United States Patent Application Publication US 2018/0236103 A1 - sequence listing, part 2

SEQ ID NO: 26697 - RNA, 20 nt, Artificial Sequence
  Synthetic
  misc_feature (1)..(1): n is a, c, g, or u
  misc_feature (20)..(20): n is a, c, g, or u
ngcugcgagcgaaacaagcn

SEQ ID NO: 26698 - RNA, 21 nt, Artificial Sequence
  Synthetic
  misc_feature (2)..(2): n is a, c, g, or u
  misc_feature (21)..(21): n is a, c, g, or u
cngcugcgagcgaaacaagcn

SEQ ID NO: 26699 - RNA, 22 nt, Artificial Sequence
  Synthetic
  misc_feature (3)..(3): n is a, c, g, or u
  misc_feature (22)..(22): n is a, c, g, or u
ccngcugcgagcgaaacaagcn

SEQ ID NO: 26700 - RNA, 23 nt, Artificial Sequence
  Synthetic
  misc_feature (4)..(4): n is a, c, g, or u
  misc_feature (23)..(23): n is a, c, g, or u
accngcugcgagcgaaacaagcn

SEQ ID NO: 26701 - RNA, 24 nt, Artificial Sequence
  Synthetic
  misc_feature (5)..(5): n is a, c, g, or u
  misc_feature (24)..(24): n is a, c, g, or u
gaccngcugcgagcgaaacaagcn

SEQ ID NO: 26702 - RNA, 18 nt, Artificial Sequence
  Synthetic
  misc_feature (18)..(18): n is a, c, g, or u
auauaacccauaaagugn

SEQ ID NO: 26703 - RNA, 19 nt, Artificial Sequence
  Synthetic
  misc_feature (1)..(1): n is a, c, g, or u
  misc_feature (19)..(19): n is a, c, g, or u
nauauaacccauaaagugn

SEQ ID NO: 26704 - RNA, 20 nt, Artificial Sequence
  Synthetic
  misc_feature (2)..(2): n is a, c, g, or u
  misc_feature (20)..(20): n is a, c, g, or u
unauauaacccauaaagugn

SEQ ID NO: 26705 - RNA, 21 nt, Artificial Sequence
  Synthetic
  misc_feature (3)..(3): n is a, c, g, or u
  misc_feature (21)..(21): n is a, c, g, or u
aunauauaacccauaaagugn

SEQ ID NO: 26706 - RNA, 22 nt, Artificial Sequence
  Synthetic
  misc_feature (4)..(4): n is a, c, g, or u
  misc_feature (22)..(22): n is a, c, g, or u
aaunauauaacccauaaagugn

SEQ ID NO: 26707 - RNA, 23 nt, Artificial Sequence
  Synthetic
  misc_feature (5)..(5): n is a, c, g, or u
  misc_feature (23)..(23): n is a, c, g, or u
caaunauauaacccauaaagugn

SEQ ID NO: 26708 - RNA, 24 nt, Artificial Sequence
  Synthetic
  misc_feature (6)..(6): n is a, c, g, or u
  misc_feature (24)..(24): n is a, c, g, or u
ccaaunauauaacccauaaagugn

SEQ ID NO: 26709 - RNA, 18 nt, Artificial Sequence
  Synthetic
  misc_feature (12)..(12): n is a, c, g, or u
  misc_feature (18)..(18): n is a, c, g, or u
aauguaaggcangaaaun

SEQ ID NO: 26710 - RNA, 19 nt, Artificial Sequence
  Synthetic
  misc_feature (13)..(13): n is a, c, g, or u
  misc_feature (19)..(19): n is a, c, g, or u
aaauguaaggcangaaaun

SEQ ID NO: 26711 - RNA, 20 nt, Artificial Sequence
  Synthetic
  misc_feature (14)..(14): n is a, c, g, or u
  misc_feature (20)..(20): n is a, c, g, or u
caaauguaaggcangaaaun

SEQ ID NO: 26712 - RNA, 21 nt, Artificial Sequence
  Synthetic
  misc_feature (15)..(15): n is a, c, g, or u
  misc_feature (21)..(21): n is a, c, g, or u
ccaaauguaaggcangaaaun

SEQ ID NO: 26713 - RNA, 22 nt, Artificial Sequence
  Synthetic
  misc_feature (16)..(16): n is a, c, g, or u
  misc_feature (22)..(22): n is a, c, g, or u
uccaaauguaaggcangaaaun

SEQ ID NO: 26714 - RNA, 23 nt, Artificial Sequence
  Synthetic
  misc_feature (17)..(17): n is a, c, g, or u
  misc_feature (23)..(23): n is a, c, g, or u
uuccaaauguaaggcangaaaun

SEQ ID NO: 26715 - RNA, 24 nt, Artificial Sequence
  Synthetic
  misc_feature (18)..(18): n is a, c, g, or u
  misc_feature (24)..(24): n is a, c, g, or u
cuuccaaauguaaggcangaaaun

SEQ ID NO: 26716 - RNA, 18 nt, Artificial Sequence
  Synthetic
gugguaccccuagaaaau

SEQ ID NO: 26717 - RNA, 19 nt, Artificial Sequence
  Synthetic
ggugguaccccuagaaaau

SEQ ID NO: 26718 - RNA, 20 nt, Artificial Sequence
  Synthetic
gggugguaccccuagaaaau

SEQ ID NO: 26719 - RNA, 21 nt, Artificial Sequence
  Synthetic
cgggugguaccccuagaaaau

SEQ ID NO: 26720 - RNA, 22 nt, Artificial Sequence
  Synthetic
ccgggugguaccccuagaaaau

SEQ ID NO: 26721 - RNA, 23 nt, Artificial Sequence
  Synthetic
cccgggugguaccccuagaaaau

SEQ ID NO: 26722 - RNA, 24 nt, Artificial Sequence
  Synthetic
acccgggugguaccccuagaaaau

SEQ ID NO: 26723 - RNA, 18 nt, Artificial Sequence
  Synthetic
acaguuucucuuccaaau

SEQ ID NO: 26724 - RNA, 19 nt, Artificial Sequence
  Synthetic
  misc_feature (1)..(1): n is a, c, g, or u
nacaguuucucuuccaaau

SEQ ID NO: 26725 - RNA, 20 nt, Artificial Sequence
  Synthetic
  misc_feature (2)..(2): n is a, c, g, or u
gnacaguuucucuuccaaau

SEQ ID NO: 26726 - RNA, 21 nt, Artificial Sequence
  Synthetic
  misc_feature (3)..(3): n is a, c, g, or u
agnacaguuucucuuccaaau

SEQ ID NO: 26727 - RNA, 22 nt, Artificial Sequence
  Synthetic
  misc_feature (4)..(4): n is a, c, g, or u
aagnacaguuucucuuccaaau

SEQ ID NO: 26728 - RNA, 23 nt, Artificial Sequence
  Synthetic
  misc_feature (5)..(5): n is a, c, g, or u
caagnacaguuucucuuccaaau

SEQ ID NO: 26729 - RNA, 24 nt, Artificial Sequence
  Synthetic
  misc_feature (6)..(6): n is a, c, g, or u
ucaagnacaguuucucuuccaaau

SEQ ID NO: 26730 - RNA, 18 nt, Artificial Sequence
  Synthetic
  misc_feature (13)..(13): n is a, c, g, or u
aaauguaaggcangaaau

SEQ ID NO: 26731 - RNA, 19 nt, Artificial Sequence
  Synthetic
  misc_feature (14)..(14): n is a, c, g, or u
caaauguaaggcangaaau

SEQ ID NO: 26732 - RNA, 20 nt, Artificial Sequence
  Synthetic
  misc_feature (15)..(15): n is a, c, g, or u
ccaaauguaaggcangaaau

SEQ ID NO: 26733 - RNA, 21 nt, Artificial Sequence
  Synthetic
  misc_feature (16)..(16): n is a, c, g, or u
uccaaauguaaggcangaaau

SEQ ID NO: 26734 - RNA, 22 nt, Artificial Sequence
  Synthetic
  misc_feature (17)..(17): n is a, c, g, or u
uuccaaauguaaggcangaaau

SEQ ID NO: 26735 - RNA, 23 nt, Artificial Sequence
  Synthetic
  misc_feature (18)..(18): n is a, c, g, or u
cuuccaaauguaaggcangaaau

SEQ ID NO: 26736 - RNA, 24 nt, Artificial Sequence
  Synthetic
  misc_feature (19)..(19): n is a, c, g, or u
ucuuccaaauguaaggcangaaau

SEQ ID NO: 26737 - RNA, 18 nt, Artificial Sequence
  Synthetic
uuguguugaagucccaau

SEQ ID NO: 26738 - RNA, 19 nt, Artificial Sequence
  Synthetic
uuuguguugaagucccaau

SEQ ID NO: 26739 - RNA, 20 nt, Artificial Sequence
  Synthetic
guuuguguugaagucccaau

SEQ ID NO: 26740 - RNA, 21 nt, Artificial Sequence
  Synthetic
uguuuguguugaagucccaau

SEQ ID NO: 26741 - RNA, 22 nt, Artificial Sequence
  Synthetic
uuguuuguguugaagucccaau

SEQ ID NO: 26742 - RNA, 23 nt, Artificial Sequence
  Synthetic
cuuguuuguguugaagucccaau

SEQ ID NO: 26743 - RNA, 24 nt, Artificial Sequence
  Synthetic
ccuuguuuguguugaagucccaau

SEQ ID NO: 26744 - RNA, 18 nt, Artificial Sequence
  Synthetic
ugguggucuggaaagaau

SEQ ID NO: 26745 - RNA, 19 nt, Artificial Sequence
  Synthetic
cugguggucuggaaagaau

SEQ ID NO: 26746 - RNA, 20 nt, Artificial Sequence
  Synthetic
acugguggucuggaaagaau

SEQ ID NO: 26747 - RNA, 21 nt, Artificial Sequence
  Synthetic
aacugguggucuggaaagaau

SEQ ID NO: 26748 - RNA, 22 nt, Artificial Sequence
  Synthetic
caacugguggucuggaaagaau

SEQ ID NO: 26749 - RNA, 23 nt, Artificial Sequence
  Synthetic
ccaacugguggucuggaaagaau

SEQ ID NO: 26750 - RNA, 24 nt, Artificial Sequence
  Synthetic
uccaacugguggucuggaaagaau

SEQ ID NO: 26751 - RNA, 18 nt, Artificial Sequence
  Synthetic
agauuggggacugcgaau

SEQ ID NO: 26752 - RNA, 19 nt, Artificial Sequence
  Synthetic
gagauuggggacugcgaau

SEQ ID NO: 26753 - RNA, 20 nt, Artificial Sequence
  Synthetic
ggagauuggggacugcgaau

SEQ ID NO: 26754 - RNA, 21 nt, Artificial Sequence
  Synthetic
uggagauuggggacugcgaau

SEQ ID NO: 26755 - RNA, 22 nt, Artificial Sequence
  Synthetic
uuggagauuggggacugcgaau

SEQ ID NO: 26756 - RNA, 23 nt, Artificial Sequence
  Synthetic
auuggagauuggggacugcgaau

SEQ ID NO: 26757 - RNA, 24 nt, Artificial Sequence
  Synthetic
gauuggagauuggggacugcgaau

SEQ ID NO: 26758 - RNA, 18 nt, Artificial Sequence
  Synthetic
cuuaugaguccaaggaau

SEQ ID NO: 26759 - RNA, 19 nt, Artificial Sequence
  Synthetic
ccuuaugaguccaaggaau

SEQ ID NO: 26760 - RNA, 20 nt, Artificial Sequence
  Synthetic
accuuaugaguccaaggaau

SEQ ID NO: 26761 - RNA, 21 nt, Artificial Sequence
  Synthetic
caccuuaugaguccaaggaau

SEQ ID NO: 26762 - RNA, 22 nt, Artificial Sequence
  Synthetic
ccaccuuaugaguccaaggaau

SEQ ID NO: 26763 - RNA, 23 nt, Artificial Sequence
  Synthetic
cccaccuuaugaguccaaggaau

SEQ ID NO: 26764 - RNA, 24 nt, Artificial Sequence
  Synthetic
ucccaccuuaugaguccaaggaau

SEQ ID NO: 26765 - RNA, 18 nt, Artificial Sequence
  Synthetic
cuggaauuugcucugaau

SEQ ID NO: 26766 - RNA, 19 nt, Artificial Sequence
  Synthetic
gcuggaauuugcucugaau

SEQ ID NO: 26767 - RNA, 20 nt, Artificial Sequence
  Synthetic
ugcuggaauuugcucugaau

SEQ ID NO: 26768 - RNA, 21 nt, Artificial Sequence
  Synthetic
cugcuggaauuugcucugaau

SEQ ID NO: 26769 - RNA, 22 nt, Artificial Sequence
  Synthetic
acugcuggaauuugcucugaau

SEQ ID NO: 26770 - RNA, 23 nt, Artificial Sequence
  Synthetic
gacugcuggaauuugcucugaau

SEQ ID NO: 26771 - RNA, 24 nt, Artificial Sequence
  Synthetic
ggacugcuggaauuugcucugaau

SEQ ID NO: 26772 - RNA, 18 nt, Artificial Sequence
  Synthetic
aucuugaugcaagugaau

SEQ ID NO: 26773 - RNA, 19 nt, Artificial Sequence
  Synthetic
  misc_feature (1)..(1): n is a, c, g, or u
naucuugaugcaagugaau

SEQ ID NO: 26774 - RNA, 20 nt, Artificial Sequence
  Synthetic
  misc_feature (2)..(2): n is a, c, g, or u
anaucuugaugcaagugaau

SEQ ID NO: 26775 - RNA, 21 nt, Artificial Sequence
  Synthetic
  misc_feature (3)..(3): n is a, c, g, or u
canaucuugaugcaagugaau

SEQ ID NO: 26776 - RNA, 22 nt, Artificial Sequence
  Synthetic
  misc_feature (4)..(4): n is a, c, g, or u
ucanaucuugaugcaagugaau

SEQ ID NO: 26777 - RNA, 23 nt, Artificial Sequence
  Synthetic
  misc_feature (5)..(5): n is a, c, g, or u
aucanaucuugaugcaagugaau

SEQ ID NO: 26778 - RNA, 24 nt, Artificial Sequence
  Synthetic
  misc_feature (6)..(6): n is a, c, g, or u
uaucanaucuugaugcaagugaau

SEQ ID NO: 26779 - RNA, 18 nt, Artificial Sequence
  Synthetic
ugccuacagccuccuaau

SEQ ID NO: 26780 - RNA, 19 nt, Artificial Sequence
  Synthetic
augccuacagccuccuaau

SEQ ID NO: 26781 - RNA, 20 nt, Artificial Sequence
  Synthetic
uaugccuacagccuccuaau

SEQ ID NO: 26782 - RNA, 21 nt, Artificial Sequence
  Synthetic
uuaugccuacagccuccuaau

SEQ ID NO: 26783 - RNA, 22 nt, Artificial Sequence
  Synthetic
uuuaugccuacagccuccuaau

SEQ ID NO: 26784 - RNA, 23 nt, Artificial Sequence
  Synthetic
auuuaugccuacagccuccuaau

SEQ ID NO: 26785 - RNA, 24 nt, Artificial Sequence
  Synthetic
aauuuaugccuacagccuccuaau

SEQ ID NO: 26786 - RNA, 18 nt, Artificial Sequence
  Synthetic
agccugcuuagcgguaau

SEQ ID NO: 26787 - RNA, 19 nt, Artificial Sequence
  Synthetic
aagccugcuuagcgguaau

SEQ ID NO: 26788 - RNA, 20 nt, Artificial Sequence
  Synthetic
aaagccugcuuagcgguaau

SEQ ID NO: 26789 - RNA, 21 nt, Artificial Sequence
  Synthetic
aaaagccugcuuagcgguaau

SEQ ID NO: 26790 - RNA, 22 nt, Artificial Sequence
  Synthetic
caaaagccugcuuagcgguaau

SEQ ID NO: 26791 - RNA, 23 nt, Artificial Sequence
  Synthetic
acaaaagccugcuuagcgguaau

SEQ ID NO: 26792 - RNA, 24 nt, Artificial Sequence
  Synthetic
aacaaaagccugcuuagcgguaau

SEQ ID NO: 26793 - RNA, 18 nt, Artificial Sequence
  Synthetic
uccaaggaauacuaacau

SEQ ID NO: 26794 - RNA, 19 nt, Artificial Sequence
  Synthetic
guccaaggaauacuaacau

SEQ ID NO: 26795 - RNA, 20 nt, Artificial Sequence
  Synthetic
aguccaaggaauacuaacau

SEQ ID NO: 26796 - RNA, 21 nt, Artificial Sequence
  Synthetic
gaguccaaggaauacuaacau

SEQ ID NO: 26797 - RNA, 22 nt, Artificial Sequence
  Synthetic
ugaguccaaggaauacuaacau

SEQ ID NO: 26798 - RNA, 23 nt, Artificial Sequence
  Synthetic
augaguccaaggaauacuaacau

SEQ ID NO: 26799 - RNA, 24 nt, Artificial Sequence
  Synthetic
uaugaguccaaggaauacuaacau

SEQ ID NO: 26800 - RNA, 18 nt, Artificial Sequence
  Synthetic
  misc_feature (6)..(6): n is a, c, g, or u
gcacanccuagcagccau

SEQ ID NO: 26801 - RNA, 19 nt, Artificial Sequence
  Synthetic
  misc_feature (7)..(7): n is a, c, g, or u
agcacanccuagcagccau

SEQ ID NO: 26802 - RNA, 20 nt, Artificial Sequence
  Synthetic
  misc_feature (8)..(8): n is a, c, g, or u
cagcacanccuagcagccau

SEQ ID NO: 26803 - RNA, 21 nt, Artificial Sequence
  Synthetic
  misc_feature (9)..(9): n is a, c, g, or u
gcagcacanccuagcagccau

SEQ ID NO: 26804 - RNA, 22 nt, Artificial Sequence
  Synthetic
  misc_feature (10)..(10): n is a, c, g, or u
ggcagcacanccuagcagccau

SEQ ID NO: 26805 - RNA, 23 nt, Artificial Sequence
  Synthetic
  misc_feature (11)..(11): n is a, c, g, or u
uggcagcacanccuagcagccau

SEQ ID NO: 26806 - RNA, 24 nt, Artificial Sequence
  Synthetic
  misc_feature (12)..(12): n is a, c, g, or u
uuggcagcacanccuagcagccau

SEQ ID NO: 26807 - RNA, 18 nt, Artificial Sequence
  Synthetic
uagcgguaauacaggcau

SEQ ID NO: 26808 - RNA, 19 nt, Artificial Sequence
  Synthetic
uuagcgguaauacaggcau

SEQ ID NO: 26809 - RNA, 20 nt, Artificial Sequence
  Synthetic
cuuagcgguaauacaggcau

SEQ ID NO: 26810 - RNA, 21 nt, Artificial Sequence
  Synthetic
gcuuagcgguaauacaggcau

SEQ ID NO: 26811 - RNA, 22 nt, Artificial Sequence
  Synthetic
ugcuuagcgguaauacaggcau

SEQ ID NO: 26812 - RNA, 23 nt, Artificial Sequence
  Synthetic
cugcuuagcgguaauacaggcau

SEQ ID NO: 26813 - RNA, 24 nt, Artificial Sequence
  Synthetic
ccugcuuagcgguaauacaggcau

SEQ ID NO: 26814 - RNA, 18 nt, Artificial Sequence
  Synthetic
aacaagaagaugaggcau

SEQ ID NO: 26815 - RNA, 19 nt, Artificial Sequence
  Synthetic
caacaagaagaugaggcau

SEQ ID NO: 26816 - RNA, 20 nt, Artificial Sequence
  Synthetic
ccaacaagaagaugaggcau

SEQ ID NO: 26817 - RNA, 21 nt, Artificial Sequence
  Synthetic
accaacaagaagaugaggcau

SEQ ID NO: 26818 - RNA, 22 nt, Artificial Sequence
  Synthetic
aaccaacaagaagaugaggcau

SEQ ID NO: 26819 - RNA, 23 nt, Artificial Sequence
  Synthetic
gaaccaacaagaagaugaggcau

SEQ ID NO: 26820 - RNA, 24 nt, Artificial Sequence
  Synthetic
agaaccaacaagaagaugaggcau

SEQ ID NO: 26821 - RNA, 18 nt, Artificial Sequence
  Synthetic
acaggcauacaagggcau

SEQ ID NO: 26822 - RNA, 19 nt, Artificial Sequence
  Synthetic
uacaggcauacaagggcau

SEQ ID NO: 26823 - RNA, 20 nt, Artificial Sequence
  Synthetic
auacaggcauacaagggcau

SEQ ID NO: 26824 - RNA, 21 nt, Artificial Sequence
  Synthetic
aauacaggcauacaagggcau

SEQ ID NO: 26825 - RNA, 22 nt, Artificial Sequence
  Synthetic
uaauacaggcauacaagggcau

SEQ ID NO: 26826 - RNA, 23 nt, Artificial Sequence
  Synthetic
guaauacaggcauacaagggcau

SEQ ID NO: 26827 - RNA, 24 nt, Artificial Sequence
  Synthetic
gguaauacaggcauacaagggcau

SEQ ID NO: 26828 - RNA, 18 nt, Artificial Sequence
  Synthetic
gauguucuccauguucau

SEQ ID NO: 26829 - RNA, 19 nt, Artificial Sequence
  Synthetic
ugauguucuccauguucau

SEQ ID NO: 26830 - RNA, 20 nt, Artificial Sequence
  Synthetic
gugauguucuccauguucau

SEQ ID NO: 26831 - RNA, 21 nt, Artificial Sequence
  Synthetic
ugugauguucuccauguucau

SEQ ID NO: 26832 - RNA, 22 nt, Artificial Sequence
  Synthetic
augugauguucuccauguucau

SEQ ID NO: 26833 - RNA, 23 nt, Artificial Sequence
  Synthetic
gaugugauguucuccauguucau

SEQ ID NO: 26834 - RNA, 24 nt, Artificial Sequence
  Synthetic
ugaugugauguucuccauguucau

SEQ ID NO: 26835 - RNA, 18 nt, Artificial Sequence
  Synthetic
uuuccgaaagcccaagau

SEQ ID NO: 26836 - RNA, 19 nt, Artificial Sequence
  Synthetic
uuuuccgaaagcccaagau

SEQ ID NO: 26837 - RNA, 20 nt, Artificial Sequence
  Synthetic
auuuuccgaaagcccaagau

SEQ ID NO: 26838 - RNA, 21 nt, Artificial Sequence
  Synthetic
uauuuuccgaaagcccaagau

SEQ ID NO: 26839 - RNA, 22 nt, Artificial Sequence
  Synthetic
guauuuuccgaaagcccaagau

SEQ ID NO: 26840 - RNA, 23 nt, Artificial Sequence
  Synthetic
gguauuuuccgaaagcccaagau

SEQ ID NO: 26841 - RNA, 24 nt, Artificial Sequence
  Synthetic
agguauuuuccgaaagcccaagau

SEQ ID NO: 26842 - RNA, 18 nt, Artificial Sequence
  Synthetic
caggaugaagaggaagau

SEQ ID NO: 26843 - RNA, 19 nt, Artificial Sequence
  Synthetic
gcaggaugaagaggaagau

SEQ ID NO: 26844 - RNA, 20 nt, Artificial Sequence
  Synthetic
agcaggaugaagaggaagau

SEQ ID NO: 26845 - RNA, 21 nt, Artificial Sequence
  Synthetic
cagcaggaugaagaggaagau

SEQ ID NO: 26846 - RNA, 22 nt, Artificial Sequence
  Synthetic
gcagcaggaugaagaggaagau

SEQ ID NO: 26847 - RNA, 23 nt, Artificial Sequence
  Synthetic
agcagcaggaugaagaggaagau

SEQ ID NO: 26848 - RNA, 24 nt, Artificial Sequence
  Synthetic
uagcagcaggaugaagaggaagau

SEQ ID NO: 26849 - RNA, 18 nt, Artificial Sequence
  Synthetic
aaauggaugcccacagau

SEQ ID NO: 26850 - RNA, 19 nt, Artificial Sequence
  Synthetic
caaauggaugcccacagau

SEQ ID NO: 26851 - RNA, 20 nt, Artificial Sequence
  Synthetic
ucaaauggaugcccacagau

SEQ ID NO: 26852 - RNA, 21 nt, Artificial Sequence
  Synthetic
uucaaauggaugcccacagau

SEQ ID NO: 26853 - RNA, 22 nt, Artificial Sequence
  Synthetic
guucaaauggaugcccacagau

SEQ ID NO: 26854 - RNA, 23 nt, Artificial Sequence
  Synthetic
uguucaaauggaugcccacagau

SEQ ID NO: 26855 - RNA, 24 nt, Artificial Sequence
  Synthetic
guguucaaauggaugcccacagau

SEQ ID NO: 26856 - RNA, 18 nt, Artificial Sequence
  Synthetic
gcacacgggccggcagau

SEQ ID NO: 26857 - RNA, 19 nt, Artificial Sequence
  Synthetic
ugcacacgggccggcagau

SEQ ID NO: 26858 - RNA, 20 nt, Artificial Sequence
  Synthetic
gugcacacgggccggcagau

SEQ ID NO: 26859 - RNA, 21 nt, Artificial Sequence
  Synthetic
agugcacacgggccggcagau

SEQ ID NO: 26860 - RNA, 22 nt, Artificial Sequence
  Synthetic
aagugcacacgggccggcagau

SEQ ID NO: 26861 - RNA, 23 nt, Artificial Sequence
  Synthetic
gaagugcacacgggccggcagau

SEQ ID NO: 26862 - RNA, 24 nt, Artificial Sequence
  Synthetic
cgaagugcacacgggccggcagau

SEQ ID NO: 26863 - RNA, 18 nt, Artificial Sequence
  Synthetic
ugguaagugauuggagau

SEQ ID NO: 26864 - RNA, 19 nt, Artificial Sequence
  Synthetic
uugguaagugauuggagau

SEQ ID NO: 26865 - RNA, 20 nt, Artificial Sequence
  Synthetic
guugguaagugauuggagau

SEQ ID NO: 26866 - RNA, 21 nt, Artificial Sequence
  Synthetic
gguugguaagugauuggagau

SEQ ID NO: 26867 - RNA, 22 nt, Artificial Sequence
  Synthetic
agguugguaagugauuggagau

SEQ ID NO: 26868 - RNA, 23 nt, Artificial Sequence
  Synthetic
gagguugguaagugauuggagau

SEQ ID NO: 26869 - RNA, 24 nt, Artificial Sequence
  Synthetic
ggagguugguaagugauuggagau

SEQ ID NO: 26870 - RNA, 18 nt, Artificial Sequence
  Synthetic
gugcuggugguuguagau

SEQ ID NO: 26871 - RNA, 19 nt, Artificial Sequence
  Synthetic
cgugcuggugguuguagau

SEQ ID NO: 26872 - RNA, 20 nt, Artificial Sequence
  Synthetic
ccgugcuggugguuguagau

SEQ ID NO: 26873 - RNA, 21 nt, Artificial Sequence
  Synthetic
cccgugcuggugguuguagau

SEQ ID NO: 26874 - RNA, 22 nt, Artificial Sequence
  Synthetic
ucccgugcuggugguuguagau

SEQ ID NO: 26875 - RNA, 23 nt, Artificial Sequence
  Synthetic
gucccgugcuggugguuguagau

SEQ ID NO: 26876 - RNA, 24 nt, Artificial Sequence
  Synthetic
ggucccgugcuggugguuguagau

SEQ ID NO: 26877 - RNA, 18 nt, Artificial Sequence
  Synthetic
gaggcauagcagcaggau

SEQ ID NO: 26878 - RNA, 19 nt, Artificial Sequence
  Synthetic
ugaggcauagcagcaggau

SEQ ID NO: 26879 - RNA, 20 nt, Artificial Sequence
  Synthetic
augaggcauagcagcaggau

SEQ ID NO: 26880 - RNA, 21 nt, Artificial Sequence
  Synthetic
gaugaggcauagcagcaggau

SEQ ID NO: 26881 - RNA, 22 nt, Artificial Sequence
  Synthetic
agaugaggcauagcagcaggau

SEQ ID NO: 26882 - RNA, 23 nt, Artificial Sequence
  Synthetic
aagaugaggcauagcagcaggau

SEQ ID NO: 26883 - RNA, 24 nt, Artificial Sequence
  Synthetic
gaagaugaggcauagcagcaggau

SEQ ID NO: 26884 - RNA, 18 nt, Artificial Sequence
  Synthetic
gaguuaaccagucaggau

SEQ ID NO: 26885 - RNA, 19 nt, Artificial Sequence
  Synthetic
ggaguuaaccagucaggau

SEQ ID NO: 26886 - RNA, 20 nt, Artificial Sequence
  Synthetic
aggaguuaaccagucaggau

SEQ ID NO: 26887 - RNA, 21 nt, Artificial Sequence
  Synthetic
aaggaguuaaccagucaggau

SEQ ID NO: 26888 - RNA, 22 nt, Artificial Sequence
  Synthetic
gaaggaguuaaccagucaggau

SEQ ID NO: 26889 - RNA, 23 nt, Artificial Sequence
  Synthetic
agaaggaguuaaccagucaggau

SEQ ID NO: 26890 - RNA, 24 nt, Artificial Sequence
  Synthetic
aagaaggaguuaaccagucaggau

SEQ ID NO: 26891 - RNA, 18 nt, Artificial Sequence
  Synthetic
cggaaguguugauaggau

SEQ ID NO: 26892 - RNA, 19 nt, Artificial Sequence
  Synthetic
ccggaaguguugauaggau

SEQ ID NO: 26893 - RNA, 20 nt, Artificial Sequence
  Synthetic
uccggaaguguugauaggau

SEQ ID NO: 26894 - RNA, 21 nt, Artificial Sequence
  Synthetic
cuccggaaguguugauaggau

SEQ ID NO: 26895 - RNA, 22 nt, Artificial Sequence
  Synthetic
ucuccggaaguguugauaggau

SEQ ID NO: 26896 - RNA, 23 nt, Artificial Sequence
  Synthetic
gucuccggaaguguugauaggau

SEQ ID NO: 26897 - RNA, 24 nt, Artificial Sequence
  Synthetic
agucuccggaaguguugauaggau

SEQ ID NO: 26898 - RNA, 18 nt, Artificial Sequence
  Synthetic
uaaccacauucucuggau

SEQ ID NO: 26899 - RNA, 19 nt, Artificial Sequence
  Synthetic
uuaaccacauucucuggau

SEQ ID NO: 26900 - RNA, 20 nt, Artificial Sequence
  Synthetic
auuaaccacauucucuggau

SEQ ID NO: 26901 - RNA, 21 nt, Artificial Sequence
  Synthetic
gauuaaccacauucucuggau

SEQ ID NO: 26902 - RNA, 22 nt, Artificial Sequence
  Synthetic
ugauuaaccacauucucuggau

SEQ ID NO: 26903 - RNA, 23 nt, Artificial Sequence
  Synthetic
augauuaaccacauucucuggau

SEQ ID NO: 26904 - RNA, 24 nt, Artificial Sequence
  Synthetic
aaugauuaaccacauucucuggau

SEQ ID NO: 26905 - RNA, 18 nt, Artificial Sequence
  Synthetic
uucgagaagauugaugau

SEQ ID NO: 26906 - RNA, 19 nt, Artificial Sequence
  Synthetic
cuucgagaagauugaugau

SEQ ID NO: 26907 - RNA, 20 nt, Artificial Sequence
  Synthetic
ucuucgagaagauugaugau

SEQ ID NO: 26908 - RNA, 21 nt, Artificial Sequence
  Synthetic
gucuucgagaagauugaugau

SEQ ID NO: 26909 - RNA, 22 nt, Artificial Sequence
  Synthetic
agucuucgagaagauugaugau

SEQ ID NO: 26910 - RNA, 23 nt, Artificial Sequence
  Synthetic
cagucuucgagaagauugaugau

SEQ ID NO: 26911 - RNA, 24 nt, Artificial Sequence
  Synthetic
ccagucuucgagaagauugaugau

SEQ ID NO: 26912 - RNA, 18 nt, Artificial Sequence
  Synthetic
aggagguugguaagugau

SEQ ID NO: 26913 - RNA, 19 nt, Artificial Sequence
  Synthetic
caggagguugguaagugau

SEQ ID NO: 26914 - RNA, 20 nt, Artificial Sequence
  Synthetic
acaggagguugguaagugau

SEQ ID NO: 26915 - RNA, 21 nt, Artificial Sequence
  Synthetic
gacaggagguugguaagugau

SEQ ID NO: 26916 - RNA, 22 nt, Artificial Sequence
  Synthetic
ggacaggagguugguaagugau

SEQ ID NO: 26917 - RNA, 23 nt, Artificial Sequence
  Synthetic
aggacaggagguugguaagugau

SEQ ID NO: 26918 - RNA, 24 nt, Artificial Sequence
  Synthetic
gaggacaggagguugguaagugau

SEQ ID NO: 26919 - RNA, 18 nt, Artificial Sequence
  Synthetic
  misc_feature (12)..(12): n is a, c, g, or u
gugcaauguucnggugau

SEQ ID NO: 26920 - RNA, 19 nt, Artificial Sequence
  Synthetic
  misc_feature (13)..(13): n is a, c, g, or u
ggugcaauguucnggugau

SEQ ID NO: 26921 - RNA, 20 nt, Artificial Sequence
  Synthetic
  misc_feature (14)..(14): n is a, c, g, or u
gggugcaauguucnggugau

SEQ ID NO: 26922 - RNA, 21 nt, Artificial Sequence
  Synthetic
  misc_feature (15)..(15): n is a, c, g, or u
ggggugcaauguucnggugau

SEQ ID NO: 26923 - RNA, 22 nt, Artificial Sequence
  Synthetic
  misc_feature (16)..(16): n is a, c, g, or u
gggggugcaauguucnggugau

SEQ ID NO: 26924 - RNA, 23 nt, Artificial Sequence
  Synthetic
  misc_feature (17)..(17): n is a, c, g, or u
ugggggugcaauguucnggugau

SEQ ID NO: 26925 - RNA, 24 nt, Artificial Sequence
  Synthetic
  misc_feature (18)..(18): n is a, c, g, or u
uugggggugcaauguucnggugau

SEQ ID NO: 26926 - RNA, 18 nt, Artificial Sequence
  Synthetic
ucuuguucccaggaauau

SEQ ID NO: 26927 - RNA, 19 nt, Artificial Sequence
  Synthetic
cucuuguucccaggaauau

SEQ ID NO: 26928 - RNA, 20 nt, Artificial Sequence
  Synthetic
gcucuuguucccaggaauau

SEQ ID NO: 26929 - RNA, 21 nt, Artificial Sequence
  Synthetic
agcucuuguucccaggaauau

SEQ ID NO: 26930 - RNA, 22 nt, Artificial Sequence
  Synthetic
uagcucuuguucccaggaauau

SEQ ID NO: 26931 - RNA, 23 nt, Artificial Sequence
  Synthetic
guagcucuuguucccaggaauau

SEQ ID NO: 26932 - RNA, 24 nt, Artificial Sequence
  Synthetic
uguagcucuuguucccaggaauau

SEQ ID NO: 26933 - RNA, 18 nt, Artificial Sequence
  Synthetic
aauugguaacagcgguau

SEQ ID NO: 26934 - RNA, 19 nt, Artificial Sequence
  Synthetic
aaauugguaacagcgguau

SEQ ID NO: 26935 - RNA, 20 nt, Artificial Sequence
  Synthetic
aaaauugguaacagcgguau

SEQ ID NO: 26936 - RNA, 21 nt, Artificial Sequence
  Synthetic
aaaaauugguaacagcgguau

SEQ ID NO: 26937 - RNA, 22 nt, Artificial Sequence
  Synthetic
aaaaaauugguaacagcgguau

SEQ ID NO: 26938 - RNA, 23 nt, Artificial Sequence
  Synthetic
caaaaaauugguaacagcgguau

SEQ ID NO: 26939 - RNA, 24 nt, Artificial Sequence
  Synthetic
acaaaaaauugguaacagcgguau

SEQ ID NO: 26940 - RNA, 18 nt, Artificial Sequence
  Synthetic
  misc_feature (12)..(12): n is a, c, g, or u
gucuagacucunugguau

SEQ ID NO: 26941 - RNA, 19 nt, Artificial Sequence
  Synthetic
  misc_feature (13)..(13): n is a, c, g, or u
agucuagacucunugguau

SEQ ID NO: 26942 - RNA, 20 nt, Artificial Sequence
  Synthetic
  misc_feature (14)..(14): n is a, c, g, or u
gagucuagacucunugguau

SEQ ID NO: 26943 - RNA, 21 nt, Artificial Sequence
  Synthetic
  misc_feature (15)..(15): n is a, c, g, or u
cgagucuagacucunugguau

SEQ ID NO: 26944 - RNA, 22 nt, Artificial Sequence
  Synthetic
  misc_feature (16)..(16): n is a, c, g, or u
acgagucuagacucunugguau

SEQ ID NO: 26945 - RNA, 23 nt, Artificial Sequence
  Synthetic
  misc_feature (17)..(17): n is a, c, g, or u
cacgagucuagacucunugguau

SEQ ID NO: 26946 - RNA, 24 nt, Artificial Sequence
  Synthetic
  misc_feature (18)..(18): n is a, c, g, or u
ccacgagucuagacucunugguau

SEQ ID NO: 26947 - RNA, 18 nt, Artificial Sequence
  Synthetic
guccaagaguccucuuau

SEQ ID NO: 26948 - RNA, 19 nt, Artificial Sequence
  Synthetic
aguccaagaguccucuuau

SEQ ID NO: 26949 - RNA, 20 nt, Artificial Sequence
  Synthetic
aaguccaagaguccucuuau

SEQ ID NO: 26950 - RNA, 18 nt, Artificial Sequence
  Synthetic
guguggauucucucuuau

SEQ ID NO: 26951 - RNA, 19 nt, Artificial Sequence
  Synthetic
uguguggauucucucuuau

SEQ ID NO: 26952 - RNA, 20 nt, Artificial Sequence
  Synthetic
auguguggauucucucuuau

SEQ ID NO: 26953 - RNA, 21 nt, Artificial Sequence
  Synthetic
uauguguggauucucucuuau

SEQ ID NO: 26954 - RNA, 22 nt, Artificial Sequence
  Synthetic
cuauguguggauucucucuuau

SEQ ID NO: 26955 - RNA, 23 nt, Artificial Sequence
  Synthetic
gcuauguguggauucucucuuau

SEQ ID NO: 26956 - RNA, 24 nt, Artificial Sequence
  Synthetic
cgcuauguguggauucucucuuau

SEQ ID NO: 26957 - RNA, 18 nt, Artificial Sequence
  Synthetic
  misc_feature (5)..(5): n is a, c, g, or u
aaggnuuaauaccuuuau

SEQ ID NO: 26958 - RNA, 19 nt, Artificial Sequence
  Synthetic
  misc_feature (6)..(6): n is a, c, g, or u
uaaggnuuaauaccuuuau

SEQ ID NO: 26959 - RNA, 20 nt, Artificial Sequence
  Synthetic
  misc_feature (7)..(7): n is a, c, g, or u
guaaggnuuaauaccuuuau

SEQ ID NO: 26960 - RNA, 21 nt, Artificial Sequence
  Synthetic
  misc_feature (8)..(8): n is a, c, g, or u
aguaaggnuuaauaccuuuau

SEQ ID NO: 26961 - RNA, 22 nt, Artificial Sequence
  Synthetic
  misc_feature (9)..(9): n is a, c, g, or u
uaguaaggnuuaauaccuuuau

SEQ ID NO: 26962 - RNA, 23 nt, Artificial Sequence
  Synthetic
  misc_feature (10)..(10): n is a, c, g, or u
auaguaaggnuuaauaccuuuau

SEQ ID NO: 26963 - RNA, 24 nt, Artificial Sequence
  Synthetic
  misc_feature (11)..(11): n is a, c, g, or u
gauaguaaggnuuaauaccuuuau

SEQ ID NO: 26964 - RNA, 18 nt, Artificial Sequence
  Synthetic
  misc_feature (3)..(3): n is a, c, g, or u
canaucauccauauaacu

SEQ ID NO: 26965 - RNA, 19 nt, Artificial Sequence
  Synthetic
  misc_feature (4)..(4): n is a, c, g, or u
ccanaucauccauauaacu

SEQ ID NO: 26966 - RNA, 20 nt, Artificial Sequence
  Synthetic
  misc_feature (5)..(5): n is a, c, g, or u
accanaucauccauauaacu

SEQ ID NO: 26967 - RNA, 21 nt, Artificial Sequence
  Synthetic
  misc_feature (6)..(6): n is a, c, g, or u
uaccanaucauccauauaacu

SEQ ID NO: 26968 - RNA, 22 nt, Artificial Sequence
  Synthetic
  misc_feature (7)..(7): n is a, c, g, or u
auaccanaucauccauauaacu

SEQ ID NO: 26969 - RNA, 23 nt, Artificial Sequence
  Synthetic
  misc_feature (8)..(8): n is a, c, g, or u
aauaccanaucauccauauaacu

SEQ ID NO: 26970 - RNA, 24 nt, Artificial Sequence
  Synthetic
  misc_feature (9)..(9): n is a, c, g, or u
caauaccanaucauccauauaacu

SEQ ID NO: 26971 - RNA, 18 nt, Artificial Sequence
  Synthetic
gggaaguauuuaguaacu

SEQ ID NO: 26972 - RNA, 19 nt, Artificial Sequence
  Synthetic
agggaaguauuuaguaacu

SEQ ID NO: 26973 - RNA, 20 nt, Artificial Sequence
  Synthetic
aagggaaguauuuaguaacu

SEQ ID NO: 26974 - RNA, 21 nt, Artificial Sequence
  Synthetic
aaagggaaguauuuaguaacu

SEQ ID NO: 26975 - RNA, 22 nt, Artificial Sequence
  Synthetic
caaagggaaguauuuaguaacu

SEQ ID NO: 26976 - RNA, 23 nt, Artificial Sequence
  Synthetic
ccaaagggaaguauuuaguaacu

SEQ ID NO: 26977 - RNA, 24 nt, Artificial Sequence
  Synthetic
uccaaagggaaguauuuaguaacu

SEQ ID NO: 26978 - RNA, 18 nt, Artificial Sequence
  Synthetic
guauugacauaauuaacu

SEQ ID NO: 26979 - RNA, 19 nt, Artificial Sequence
  Synthetic
aguauugacauaauuaacu

SEQ ID NO: 26980 - RNA, 20 nt, Artificial Sequence
  Synthetic
uaguauugacauaauuaacu

SEQ ID NO: 26981 - RNA, 21 nt, Artificial Sequence
  Synthetic
uuaguauugacauaauuaacu

SEQ ID NO: 26982 - RNA, 22 nt, Artificial Sequence
  Synthetic
  misc_feature (1)..(1): n is a, c, g, or u
nuuaguauugacauaauuaacu

SEQ ID NO: 26983 - RNA, 23 nt, Artificial Sequence
  Synthetic
  misc_feature (2)..(2): n is a, c, g, or u
unuuaguauugacauaauuaacu

SEQ ID NO: 26984 - RNA, 24 nt, Artificial Sequence
  Synthetic
  misc_feature (3)..(3): n is a, c, g, or u
aunuuaguauugacauaauuaacu

SEQ ID NO: 26985 - RNA, 18 nt, Artificial Sequence
  Synthetic
  misc_feature (9)..(9): n is a, c, g, or u
ggagugcgnauccacacu

SEQ ID NO: 26986 - RNA, 19 nt, Artificial Sequence
  Synthetic
  misc_feature (10)..(10): n is a, c, g, or u
uggagugcgnauccacacu

SEQ ID NO: 26987 - RNA, 20 nt, Artificial Sequence
  Synthetic
  misc_feature (11)..(11): n is a, c, g, or u
guggagugcgnauccacacu

SEQ ID NO: 26988 - RNA, 21 nt, Artificial Sequence
  Synthetic
  misc_feature (12)..(12): n is a, c, g, or u
gguggagugcgnauccacacu

SEQ ID NO: 26989 - RNA, 22 nt, Artificial Sequence
  Synthetic
  misc_feature (13)..(13): n is a, c, g, or u
agguggagugcgnauccacacu

SEQ ID NO: 26990 - RNA, 23 nt, Artificial Sequence
  Synthetic
  misc_feature (14)..(14): n is a, c, g, or u
cagguggagugcgnauccacacu

SEQ ID NO: 26991 - RNA, 24 nt, Artificial Sequence
  Synthetic
  misc_feature (15)..(15): n is a, c, g, or u
gcagguggagugcgnauccacacu

SEQ ID NO: 26992 - RNA, 18 nt, Artificial Sequence
  Synthetic
cacugaacaaauugcacu

SEQ ID NO: 26993 - RNA, 19 nt, Artificial Sequence
  Synthetic
ccacugaacaaauugcacu

SEQ ID NO: 26994 - RNA, 20 nt, Artificial Sequence
  Synthetic
accacugaacaaauugcacu

SEQ ID NO: 26995 - RNA, 21 nt, Artificial Sequence
  Synthetic
caccacugaacaaauugcacu

SEQ ID NO: 26996 - RNA, 22 nt, Artificial Sequence
  Synthetic
gcaccacugaacaaauugcacu

SEQ ID NO: 26997 - RNA, 23 nt, Artificial Sequence
  Synthetic
cgcaccacugaacaaauugcacu

SEQ ID NO: 26998 - RNA, 24 nt, Artificial Sequence
  Synthetic
acgcaccacugaacaaauugcacu

SEQ ID NO: 26999 - RNA, 18 nt, Artificial Sequence
  Synthetic
gaagucccaaucgggacu

SEQ ID NO: 27000 - RNA, 19 nt, Artificial Sequence
  Synthetic
ugaagucccaaucgggacu

SEQ ID NO: 27001 - RNA, 20 nt, Artificial Sequence
  Synthetic
uugaagucccaaucgggacu

SEQ ID NO: 27002 - RNA, 21 nt, Artificial Sequence
  Synthetic
guugaagucccaaucgggacu

SEQ ID NO: 27003 - RNA, 22 nt, Artificial Sequence
  Synthetic
uguugaagucccaaucgggacu

SEQ ID NO: 27004 - RNA, 23 nt, Artificial Sequence
  Synthetic
guguugaagucccaaucgggacu

SEQ ID NO: 27005 - RNA, 24 nt, Artificial Sequence
  Synthetic
uguguugaagucccaaucgggacu

SEQ ID NO: 27006 - RNA, 18 nt, Artificial Sequence
  Synthetic
augggaaggagguguacu

SEQ ID NO: 27007 - RNA, 19 nt, Artificial Sequence
  Synthetic
caugggaaggagguguacu

SEQ ID NO: 27008 - RNA, 20 nt, Artificial Sequence
  Synthetic
ccaugggaaggagguguacu

SEQ ID NO: 27009 - RNA, 21 nt, Artificial Sequence
  Synthetic
gccaugggaaggagguguacu

SEQ ID NO: 27010 - RNA, 22 nt, Artificial Sequence
  Synthetic
agccaugggaaggagguguacu

SEQ ID NO: 27011 - RNA, 23 nt, Artificial Sequence
  Synthetic
cagccaugggaaggagguguacu

SEQ ID NO: 27012 - RNA, 24 nt, Artificial Sequence
  Synthetic
gcagccaugggaaggagguguacu

SEQ ID NO: 27013 - RNA, 18 nt, Artificial Sequence
  Synthetic
  misc_feature (9)..(9): n is a, c, g, or u
aaauacagnccccuuacu

SEQ ID NO: 27014 - RNA, 19 nt, Artificial Sequence
  Synthetic
  misc_feature (10)..(10): n is a, c, g, or u
aaaauacagnccccuuacu

SEQ ID NO: 27015 - RNA, 20 nt, Artificial Sequence
  Synthetic
  misc_feature (11)..(11): n is a, c, g, or u
gaaaauacagnccccuuacu

SEQ ID NO: 27016 - RNA, 21 nt, Artificial Sequence
  Synthetic
  misc_feature (12)..(12): n is a, c, g, or u
ggaaaauacagnccccuuacu

SEQ ID NO: 27017 - RNA, 22 nt, Artificial Sequence
  Synthetic
  misc_feature (13)..(13): n is a, c, g, or u
aggaaaauacagnccccuuacu

SEQ ID NO: 27018 - RNA, 23 nt, Artificial Sequence
  Synthetic
  misc_feature (14)..(14): n is a, c, g, or u
caggaaaauacagnccccuuacu

SEQ ID NO: 27019 - RNA, 24 nt, Artificial Sequence
  Synthetic
  misc_feature (15)..(15): n is a, c, g, or u
gcaggaaaauacagnccccuuacu

SEQ ID NO: 27020 - RNA, 18 nt, Artificial Sequence
  Synthetic
cgguaaaguuucccaccu

SEQ ID NO: 27021 - RNA, 19 nt, Artificial Sequence
  Synthetic
ccgguaaaguuucccaccu

SEQ ID NO: 27022 - RNA, 20 nt, Artificial Sequence
  Synthetic
accgguaaaguuucccaccu

SEQ ID NO: 27023 - RNA, 21 nt, Artificial Sequence
  Synthetic
gaccgguaaaguuucccaccu

SEQ ID NO: 27024 - RNA, 22 nt, Artificial Sequence
  Synthetic
agaccgguaaaguuucccaccu

SEQ ID NO: 27025 - RNA, 23 nt, Artificial Sequence
  Synthetic
aagaccgguaaaguuucccaccu

SEQ ID NO: 27026 - RNA, 24 nt, Artificial Sequence
  Synthetic
aaagaccgguaaaguuucccaccu

SEQ ID NO: 27027 - RNA, 18 nt, Artificial Sequence
  Synthetic
cacccgggugguaccccu

SEQ ID NO: 27028 - RNA, 19 nt, Artificial Sequence
  Synthetic
acacccgggugguaccccu

SEQ ID NO: 27029 - RNA, 20 nt, Artificial Sequence
  Synthetic
gacacccgggugguaccccu

SEQ ID NO: 27030 - RNA, 21 nt, Artificial Sequence
  Synthetic
ggacacccgggugguaccccu

SEQ ID NO: 27031 - RNA, 22 nt, Artificial Sequence
  Synthetic
aggacacccgggugguaccccu

SEQ ID NO: 27032 - RNA, 23 nt, Artificial Sequence
  Synthetic
caggacacccgggugguaccccu

SEQ ID NO: 27033 - RNA, 24 nt, Artificial Sequence
  Synthetic
ccaggacacccgggugguaccccu

SEQ ID NO: 27034 - RNA, 18 nt, Artificial Sequence
  Synthetic
cuguggaugugugucccu

SEQ ID NO: 27035 - RNA, 19 nt, Artificial Sequence
  Synthetic
ccuguggaugugugucccu

SEQ ID NO: 27036 - RNA, 20 nt, Artificial Sequence
  Synthetic
gccuguggaugugugucccu

SEQ ID NO: 27037 - RNA, 21 nt, Artificial Sequence
  Synthetic
ggccuguggaugugugucccu

SEQ ID NO: 27038 - RNA, 22 nt, Artificial Sequence
  Synthetic
uggccuguggaugugugucccu

SEQ ID NO: 27039 - RNA, 23 nt, Artificial Sequence
  Synthetic
auggccuguggaugugugucccu

SEQ ID NO: 27040 - RNA, 24 nt, Artificial Sequence
  Synthetic
cauggccuguggaugugugucccu

SEQ ID NO: 27041 - RNA, 18 nt, Artificial Sequence
  Synthetic
guuuacagagaaaggccu

SEQ ID NO: 27042 - RNA, 19 nt, Artificial Sequence
  Synthetic
uguuuacagagaaaggccu

SEQ ID NO: 27043 - RNA, 20 nt, Artificial Sequence
  Synthetic
uuguuuacagagaaaggccu

SEQ ID NO: 27044 - RNA, 21 nt, Artificial Sequence
  Synthetic
auuguuuacagagaaaggccu

SEQ ID NO: 27045 - RNA, 22 nt, Artificial Sequence
  Synthetic
uauuguuuacagagaaaggccu

SEQ ID NO: 27046 - RNA, 23 nt, Artificial Sequence
  Synthetic
guauuguuuacagagaaaggccu

SEQ ID NO: 27047 - RNA, 24 nt, Artificial Sequence
  Synthetic
  misc_feature (1)..(1): n is a, c, g, or u
nguauuguuuacagagaaaggccu

SEQ ID NO: 27048 - RNA, 18 nt, Artificial Sequence
  Synthetic
  misc_feature (2)..(2): n is a, c, g, or u
unagaaugcccugugccu

SEQ ID NO: 27049 - RNA, 19 nt, Artificial Sequence
  Synthetic
  misc_feature (3)..(3): n is a, c, g, or u
gunagaaugcccugugccu

SEQ ID NO: 27050 - RNA, 20 nt, Artificial Sequence
  Synthetic
  misc_feature (4)..(4): n is a, c, g, or u
ugunagaaugcccugugccu

SEQ ID NO: 27051 - RNA, 21 nt, Artificial Sequence
  Synthetic
  misc_feature (5)..(5): n is a, c, g, or u
uugunagaaugcccugugccu

SEQ ID NO: 27052 - RNA, 22 nt, Artificial Sequence
  Synthetic
  misc_feature (6)..(6): n is a, c, g, or u
guugunagaaugcccugugccu

SEQ ID NO: 27053 - RNA, 23 nt, Artificial Sequence
  Synthetic
  misc_feature (7)..(7): n is a, c, g, or u
gguugunagaaugcccugugccu

SEQ ID NO: 27054 - RNA, 24 nt, Artificial Sequence
  Synthetic
  misc_feature (8)..(8): n is a, c, g, or u
agguugunagaaugcccugugccu

SEQ ID NO: 27055 - RNA, 18 nt, Artificial Sequence
  Synthetic
gcacaaaauagcuugccu

SEQ ID NO: 27056 - RNA, 19 nt, Artificial Sequence
  Synthetic
agcacaaaauagcuugccu

SEQ ID NO: 27057 - RNA, 20 nt, Artificial Sequence
  Synthetic
cagcacaaaauagcuugccu

SEQ ID NO: 27058 - RNA, 21 nt, Artificial Sequence
  Synthetic
ccagcacaaaauagcuugccu

SEQ ID NO: 27059 - RNA, 22 nt, Artificial Sequence
  Synthetic
cccagcacaaaauagcuugccu

SEQ ID NO: 27060 - RNA, 23 nt, Artificial Sequence
  Synthetic
ccccagcacaaaauagcuugccu

SEQ ID NO: 27061 - RNA, 24 nt, Artificial Sequence
  Synthetic
accccagcacaaaauagcuugccu

SEQ ID NO: 27062 - RNA, 18 nt, Artificial Sequence
  Synthetic
  misc_feature (15)..(15): n is a, c, g, or u
caguuggcagcacanccu

SEQ ID NO: 27063 - RNA, 19 nt, Artificial Sequence
  Synthetic
  misc_feature (16)..(16): n is a, c, g, or u
ccaguuggcagcacanccu

SEQ ID NO: 27064 - RNA, 20 nt, Artificial Sequence
  Synthetic
  misc_feature (17)..(17): n is a, c, g, or u
uccaguuggcagcacanccu

SEQ ID NO: 27065 - RNA, 21 nt, Artificial Sequence
  Synthetic
  misc_feature (18)..(18): n is a, c, g, or u
auccaguuggcagcacanccu

SEQ ID NO: 27066 - RNA, 22 nt, Artificial Sequence
  Synthetic
  misc_feature (19)..(19): n is a, c, g, or u
gauccaguuggcagcacanccu

SEQ ID NO: 27067 - RNA, 23 nt, Artificial Sequence
  Synthetic
  misc_feature (20)..(20): n is a, c, g, or u
ggauccaguuggcagcacanccu

SEQ ID NO: 27068 - RNA, 24 nt, Artificial Sequence
  Synthetic
  misc_feature (21)..(21): n is a, c, g, or u
aggauccaguuggcagcacanccu

SEQ ID NO: 27069 - RNA, 18 nt, Artificial Sequence
  Synthetic
gccacccaaggcacagcu

SEQ ID NO: 27070 - RNA, 19 nt, Artificial Sequence
  Synthetic
agccacccaaggcacagcu

SEQ ID NO: 27071 - RNA, 20 nt, Artificial Sequence
  Synthetic
aagccacccaaggcacagcu

SEQ ID NO: 27072 - RNA, 21 nt, Artificial Sequence
  Synthetic
aaagccacccaaggcacagcu

SEQ ID NO: 27073 - RNA, 22 nt, Artificial Sequence
  Synthetic
caaagccacccaaggcacagcu

SEQ ID NO: 27074 - RNA, 23 nt, Artificial Sequence
  Synthetic
ccaaagccacccaaggcacagcu

SEQ ID NO: 27075 - RNA, 24 nt, Artificial Sequence
  Synthetic
cccaaagccacccaaggcacagcu

SEQ ID NO: 27076 - RNA, 18 nt, Artificial Sequence
  Synthetic
  misc_feature (11)..(11): n is a, c, g, or u
gugccgauaanguccgcu

SEQ ID NO: 27077 - RNA, 19 nt, Artificial Sequence
  Synthetic
  misc_feature (12)..(12): n is a, c, g, or u
agugccgauaanguccgcu

SEQ ID NO: 27078 - RNA, 20 nt, Artificial Sequence
  Synthetic
  misc_feature (13)..(13): n is a, c, g, or u
cagugccgauaanguccgcu

SEQ ID NO: 27079 - RNA, 21 nt, Artificial Sequence
  Synthetic
  misc_feature (14)..(14): n is a, c, g, or u
ucagugccgauaanguccgcu

SEQ ID NO: 27080 - RNA, 22 nt, Artificial Sequence
  Synthetic
  misc_feature (15)..(15): n is a, c, g, or u
gucagugccgauaanguccgcu

SEQ ID NO: 27081 - RNA, 23 nt, Artificial Sequence
  Synthetic
  misc_feature (16)..(16): n is a, c, g, or u
ugucagugccgauaanguccgcu

SEQ ID NO: 27082 - RNA, 24 nt, Artificial Sequence
  Synthetic
  misc_feature (17)..(17): n is a, c, g, or u
uugucagugccgauaanguccgcu

SEQ ID NO: 27083 - RNA, 18 nt, Artificial Sequence
  Synthetic
agguuccgcgcaugcgcu

SEQ ID NO: 27084 - RNA, 19 nt, Artificial Sequence
  Synthetic
aagguuccgcgcaugcgcu

SEQ ID NO: 27085 - RNA, 20 nt, Artificial Sequence
  Synthetic
aaagguuccgcgcaugcgcu

SEQ ID NO: 27086 - RNA, 18 nt, Artificial Sequence
  Synthetic
cauugaguaaaaggggcu

SEQ ID NO: 27087 - RNA, 19 nt, Artificial Sequence
  Synthetic
acauugaguaaaaggggcu

SEQ ID NO: 27088 - RNA, 20 nt, Artificial Sequence
  Synthetic
cacauugaguaaaaggggcu

SEQ ID NO: 27089 - RNA, 21 nt, Artificial Sequence
  Synthetic
ccacauugaguaaaaggggcu

SEQ ID NO: 27090 - RNA, 22 nt, Artificial Sequence
  Synthetic
accacauugaguaaaaggggcu

SEQ ID NO: 27091 - RNA, 23 nt, Artificial Sequence
  Synthetic
aaccacauugaguaaaaggggcu

SEQ ID NO: 27092 - RNA, 24 nt, Artificial Sequence
  Synthetic
uaaccacauugaguaaaaggggcu

SEQ ID NO: 27093 - RNA, 18 nt, Artificial Sequence
  Synthetic
  misc_feature (15)..(15): n is a, c, g, or u
guccgcuccagaccngcu

SEQ ID NO: 27094 - RNA, 19 nt, Artificial Sequence
  Synthetic
  misc_feature (1)..(1): n is a, c, g, or u
  misc_feature (16)..(16): n is a, c, g, or u
nguccgcuccagaccngcu

SEQ ID NO: 27095 - RNA, 20 nt, Artificial Sequence
  Synthetic
  misc_feature (2)..(2): n is a, c, g, or u
  misc_feature (17)..(17): n is a, c, g, or u
anguccgcuccagaccngcu

SEQ ID NO: 27096 - RNA, 21 nt, Artificial Sequence
  Synthetic
  misc_feature (3)..(3): n is a, c, g, or u
  misc_feature (18)..(18): n is a, c, g, or u
aanguccgcuccagaccngcu

SEQ ID NO: 27097 - RNA, 22 nt, Artificial Sequence
  Synthetic
  misc_feature (4)..(4): n is a, c, g, or u
  misc_feature (19)..(19): n is a, c, g, or u
uaanguccgcuccagaccngcu

SEQ ID NO: 27098 - RNA, 23 nt, Artificial Sequence
  Synthetic
  misc_feature (5)..(5): n is a, c, g, or u
  misc_feature (20)..(20): n is a, c, g, or u
auaanguccgcuccagaccngcu

SEQ ID NO: 27099 - RNA, 24 nt, Artificial Sequence
  Synthetic
  misc_feature (6)..(6): n is a, c, g, or u
  misc_feature (21)..(21): n is a, c, g, or u
gauaanguccgcuccagaccngcu

SEQ ID NO: 27100 - RNA, 18 nt, Artificial Sequence
  Synthetic
  misc_feature (15)..(15): n is a, c, g, or u
acuacuagaucucungcu

SEQ ID NO: 27101 - RNA, 19 nt, Artificial Sequence
  Synthetic
  misc_feature (16)..(16): n is a, c, g, or u
aacuacuagaucucungcu

SEQ ID NO: 27102 - RNA, 20 nt, Artificial Sequence
  Synthetic
  misc_feature (17)..(17): n is a, c, g, or u
uaacuacuagaucucungcu

SEQ ID NO: 27103 - RNA, 21 nt, Artificial Sequence
  Synthetic
  misc_feature (18)..(18): n is a, c, g, or u
uuaacuacuagaucucungcu

SEQ ID NO: 27104 - RNA, 22 nt, Artificial Sequence
  Synthetic
  misc_feature (19)..(19): n is a, c, g, or u
auuaacuacuagaucucungcu

SEQ ID NO: 27105 - RNA, 23 nt, Artificial Sequence
  Synthetic
  misc_feature (20)..(20): n is a, c, g, or u
aauuaacuacuagaucucungcu

SEQ ID NO: 27106 - RNA, 24 nt, Artificial Sequence
  Synthetic
  misc_feature (21)..(21): n is a, c, g, or u
uaauuaacuacuagaucucungcu

SEQ ID NO: 27107 - RNA, 18 nt, Artificial Sequence
  Synthetic
aaaaaguugcauggugcu

SEQ ID NO: 27108 - RNA, 19 nt, Artificial Sequence
  Synthetic
gaaaaaguugcauggugcu

SEQ ID NO: 27109 - RNA, 20 nt, Artificial Sequence
  Synthetic
ugaaaaaguugcauggugcu

SEQ ID NO: 27110 - RNA, 21 nt, Artificial Sequence
  Synthetic
gugaaaaaguugcauggugcu

SEQ ID NO: 27111 - RNA, 22 nt, Artificial Sequence
  Synthetic
ggugaaaaaguugcauggugcu

SEQ ID NO: 27112 - RNA, 23 nt, Artificial Sequence
  Synthetic
aggugaaaaaguugcauggugcu

SEQ ID NO: 27113 - RNA, 24 nt, Artificial Sequence
  Synthetic
gaggugaaaaaguugcauggugcu

SEQ ID NO: 27114 - RNA, 18 nt, Artificial Sequence
  Synthetic
gaagcaggagguggaucu

SEQ ID NO: 27115 - RNA, 19 nt, Artificial Sequence
  Synthetic
ggaagcaggagguggaucu

SEQ ID NO: 27116 - RNA, 20 nt, Artificial Sequence
  Synthetic
uggaagcaggagguggaucu

SEQ ID NO: 27117 - RNA, 21 nt, Artificial Sequence
  Synthetic
guggaagcaggagguggaucu

SEQ ID NO: 27118 - RNA, 22 nt, Artificial Sequence
  Synthetic
gguggaagcaggagguggaucu

SEQ ID NO: 27119 - RNA, 23 nt, Artificial Sequence
  Synthetic
ugguggaagcaggagguggaucu

SEQ ID NO: 27120 - RNA, 24 nt, Artificial Sequence
  Synthetic
uugguggaagcaggagguggaucu

SEQ ID NO: 27121 - RNA, 18 nt, Artificial Sequence
  Synthetic
  misc_feature (7)..(7): n is a, c, g, or u
cucaagnacaguuucucu

SEQ ID NO: 27122 - RNA, 19 nt, Artificial Sequence
  Synthetic
  misc_feature (8)..(8): n is a, c, g, or u
acucaagnacaguuucucu

SEQ ID NO: 27123 - RNA, 20 nt, Artificial Sequence
  Synthetic
  misc_feature (9)..(9): n is a, c, g, or u
uacucaagnacaguuucucu

SEQ ID NO: 27124 - RNA, 21 nt, Artificial Sequence
  Synthetic
  misc_feature (10)..(10): n is a, c, g, or u
auacucaagnacaguuucucu

SEQ ID NO: 27125 - RNA, 22 nt, Artificial Sequence
  Synthetic
  misc_feature (11)..(11): n is a, c, g, or u
aauacucaagnacaguuucucu

SEQ ID NO: 27126 - RNA, 23 nt, Artificial Sequence
  Synthetic
  misc_feature (12)..(12): n is a, c, g, or u
aaauacucaagnacaguuucucu

SEQ ID NO: 27127 - RNA, 24 nt, Artificial Sequence
  Synthetic
  misc_feature (13)..(13): n is a, c, g, or u
caaauacucaagnacaguuucucu

SEQ ID NO: 27128 - RNA, 18 nt, Artificial Sequence
  Synthetic
  misc_feature (3)..(3): n is a, c, g, or u
uancaggguccccagucu

SEQ ID NO: 27129 - RNA, 19 nt, Artificial Sequence
  Synthetic
  misc_feature (4)..(4): n is a, c, g, or u
auancaggguccccagucu

SEQ ID NO: 27130 - RNA, 20 nt, Artificial Sequence
  Synthetic
  misc_feature (5)..(5): n is a, c, g, or u
cauancaggguccccagucu

SEQ ID NO: 27131 - RNA, 21 nt, Artificial Sequence
  Synthetic
  misc_feature (6)..(6): n is a, c, g, or u
ucauancaggguccccagucu

SEQ ID NO: 27132 - RNA, 22 nt, Artificial Sequence
  Synthetic
  misc_feature (7)..(7): n is a, c, g, or u
uucauancaggguccccagucu

SEQ ID NO: 27133 - RNA, 23 nt, Artificial Sequence
  Synthetic
  misc_feature (8)..(8): n is a, c, g, or u
guucauancaggguccccagucu

SEQ ID NO: 27134 - RNA, 24 nt, Artificial Sequence
  Synthetic
  misc_feature (9)..(9): n is a, c, g, or u
uguucauancaggguccccagucu

SEQ ID NO: 27135 - RNA, 18 nt, Artificial Sequence
  Synthetic
gucuaacaacaguagucu

SEQ ID NO: 27136 - RNA, 19 nt, Artificial Sequence
  Synthetic
ugucuaacaacaguagucu

SEQ ID NO: 27137 - RNA, 20 nt, Artificial Sequence
  Synthetic
uugucuaacaacaguagucu

SEQ ID NO: 27138 - RNA, 21 nt, Artificial Sequence
  Synthetic
guugucuaacaacaguagucu

SEQ ID NO: 27139 - RNA, 22 nt, Artificial Sequence
  Synthetic
cguugucuaacaacaguagucu

SEQ ID NO: 27140 - RNA, 23 nt, Artificial Sequence
  Synthetic
ucguugucuaacaacaguagucu

SEQ ID NO: 27141 - RNA, 24 nt, Artificial Sequence
  Synthetic
cucguugucuaacaacaguagucu

SEQ ID NO: 27142 - RNA, 18 nt, Artificial Sequence
  Synthetic
  misc_feature (1)..(1): n is a, c, g, or u
ngauugagaucuucgucu

SEQ ID NO: 27143 - RNA, 19 nt, Artificial Sequence
  Synthetic
  misc_feature (2)..(2): n is a, c, g, or u
gngauugagaucuucgucu

SEQ ID NO: 27144 - RNA, 20 nt, Artificial Sequence
  Synthetic
  misc_feature (3)..(3): n is a, c, g, or u
ggngauugagaucuucgucu

SEQ ID NO: 27145 - RNA, 21 nt, Artificial Sequence
  Synthetic
  misc_feature (4)..(4): n is a, c, g, or u
cggngauugagaucuucgucu

SEQ ID NO: 27146 - RNA, 22 nt, Artificial Sequence
  Synthetic
  misc_feature (5)..(5): n is a, c, g, or u
gcggngauugagaucuucgucu

SEQ ID NO: 27147 - RNA, 23 nt, Artificial Sequence
  Synthetic
  misc_feature (6)..(6): n is a, c, g, or u
cgcggngauugagaucuucgucu

SEQ ID NO: 27148 - RNA, 24 nt, Artificial Sequence
  Synthetic
  misc_feature (7)..(7): n is a, c, g, or u
acgcggngauugagaucuucgucu

SEQ ID NO: 27149 - RNA, 18 nt, Artificial Sequence
  Synthetic
ggauccaacugguggucu

SEQ ID NO: 27150 - RNA, 19 nt, Artificial Sequence
  Synthetic
uggauccaacugguggucu

SEQ ID NO: 27151 - RNA, 20 nt, Artificial Sequence
  Synthetic
guggauccaacugguggucu

SEQ ID NO: 27152 - RNA, 21 nt, Artificial Sequence
  Synthetic
aguggauccaacugguggucu

SEQ ID NO: 27153 - RNA, 22 nt, Artificial Sequence
  Synthetic
uaguggauccaacugguggucu

SEQ ID NO: 27154 - RNA, 23 nt, Artificial Sequence
  Synthetic
auaguggauccaacugguggucu

SEQ ID NO: 27155 - RNA, 24 nt, Artificial Sequence
  Synthetic
aauaguggauccaacugguggucu

SEQ ID NO: 27156 - RNA, 18 nt, Artificial Sequence
  Synthetic
aggggcauuugguggucu

SEQ ID NO: 27157 - RNA, 19 nt, Artificial Sequence
  Synthetic
uaggggcauuugguggucu

SEQ ID NO: 27158 - RNA, 20 nt, Artificial Sequence
  Synthetic
auaggggcauuugguggucu

SEQ ID NO: 27159 - RNA, 21 nt, Artificial Sequence
  Synthetic
gauaggggcauuugguggucu

SEQ ID NO: 27160 - RNA, 22 nt, Artificial Sequence
  Synthetic
ggauaggggcauuugguggucu

SEQ ID NO: 27161 - RNA, 23 nt, Artificial Sequence
  Synthetic
aggauaggggcauuugguggucu

SEQ ID NO: 27162 - RNA, 24 nt, Artificial Sequence
  Synthetic
uaggauaggggcauuugguggucu

SEQ ID NO: 27163 - RNA, 18 nt, Artificial Sequence
  Synthetic
ggcccugccucguugucu

SEQ ID NO: 27164 - RNA, 19 nt, Artificial Sequence
  Synthetic
gggcccugccucguugucu

SEQ ID NO: 27165 - RNA, 20 nt, Artificial Sequence
  Synthetic
ggggcccugccucguugucu

SEQ ID NO: 27166 - RNA, 21 nt, Artificial Sequence
  Synthetic
aggggcccugccucguugucu

SEQ ID NO: 27167 - RNA, 22 nt, Artificial Sequence
  Synthetic
uaggggcccugccucguugucu

SEQ ID NO: 27168 - RNA, 23 nt, Artificial Sequence
  Synthetic
cuaggggcccugccucguugucu

SEQ ID NO: 27169 - RNA, 24 nt, Artificial Sequence
  Synthetic
ucuaggggcccugccucguugucu

SEQ ID NO: 27170 - RNA, 18 nt, Artificial Sequence
  Synthetic
cgagggaguucuucuucu

SEQ ID NO: 27171 - RNA, 19 nt, Artificial Sequence
  Synthetic
gcgagggaguucuucuucu

SEQ ID NO: 27172 - RNA, 20 nt, Artificial Sequence
  Synthetic
ggcgagggaguucuucuucu

SEQ ID NO: 27173 - RNA, 21 nt, Artificial Sequence
  Synthetic
aggcgagggaguucuucuucu

SEQ ID NO: 27174 - RNA, 22 nt, Artificial Sequence
  Synthetic
gaggcgagggaguucuucuucu

SEQ ID NO: 27175 - RNA, 23 nt, Artificial Sequence
  Synthetic
cgaggcgagggaguucuucuucu

SEQ ID NO: 27176 - RNA, 24 nt, Artificial Sequence
  Synthetic
gcgaggcgagggaguucuucuucu

SEQ ID NO: 27177 - RNA, 18 nt, Artificial Sequence
  Synthetic
aggcgagggaguucuucu

SEQ ID NO: 27178 - RNA, 19 nt, Artificial Sequence
  Synthetic
gaggcgagggaguucuucu

SEQ ID NO: 27179 - RNA, 20 nt, Artificial Sequence
  Synthetic
cgaggcgagggaguucuucu

SEQ ID NO: 27180 - RNA, 21 nt, Artificial Sequence
  Synthetic
gcgaggcgagggaguucuucu

SEQ ID NO: 27181 - RNA, 22 nt, Artificial Sequence
  Synthetic
ugcgaggcgagggaguucuucu

SEQ ID NO: 27182 - RNA, 23 nt, Artificial Sequence
  Synthetic
cugcgaggcgagggaguucuucu

SEQ ID NO: 27183 - RNA, 24 nt, Artificial Sequence
  Synthetic
ucugcgaggcgagggaguucuucu

SEQ ID NO: 27184 - RNA, 18 nt, Artificial Sequence
  Synthetic
guugaccggggcgaaagu

SEQ ID NO: 27185 - RNA, 19 nt, Artificial Sequence
  Synthetic
cguugaccggggcgaaagu

SEQ ID NO: 27186 - RNA, 20 nt, Artificial Sequence
  Synthetic
ucguugaccggggcgaaagu

SEQ ID NO: 27187 - RNA, 21 nt, Artificial Sequence
  Synthetic
gucguugaccggggcgaaagu

SEQ ID NO: 27188 - RNA, 22 nt, Artificial Sequence
  Synthetic
ggucguugaccggggcgaaagu

SEQ ID NO: 27189 - RNA, 23 nt, Artificial Sequence
  Synthetic
aggucguugaccggggcgaaagu

SEQ ID NO: 27190 - RNA, 24 nt, Artificial Sequence
  Synthetic
caggucguugaccggggcgaaagu

SEQ ID NO: 27191 - RNA, 18 nt, Artificial Sequence
  Synthetic
acgauagccaggacaagu

SEQ ID NO: 27192 - RNA, 19 nt, Artificial Sequence
  Synthetic
aacgauagccaggacaagu

SEQ ID NO: 27193 - RNA, 20 nt, Artificial Sequence
  Synthetic
caacgauagccaggacaagu

SEQ ID NO: 27194 - RNA, 21 nt, Artificial Sequence
  Synthetic
ccaacgauagccaggacaagu

SEQ ID NO: 27195 - RNA, 22 nt, Artificial Sequence
  Synthetic
uccaacgauagccaggacaagu

SEQ ID NO: 27196 - RNA, 23 nt, Artificial Sequence
  Synthetic
auccaacgauagccaggacaagu

SEQ ID NO: 27197 - RNA, 24 nt, Artificial Sequence
  Synthetic
cauccaacgauagccaggacaagu

SEQ ID NO: 27198 - RNA, 18 nt, Artificial Sequence
  Synthetic
ggacagacgggaagaagu

SEQ ID NO: 27199 - RNA, 19 nt, Artificial Sequence
  Synthetic
cggacagacgggaagaagu

SEQ ID NO: 27200 - RNA, 20 nt, Artificial Sequence
  Synthetic
ccggacagacgggaagaagu

SEQ ID NO: 27201 - RNA, 21 nt, Artificial Sequence
  Synthetic
cccggacagacgggaagaagu

SEQ ID NO: 27202 - RNA, 22 nt, Artificial Sequence
  Synthetic
ucccggacagacgggaagaagu

SEQ ID NO: 27203 - RNA, 23 nt, Artificial Sequence
  Synthetic
gucccggacagacgggaagaagu

SEQ ID NO: 27204 - RNA, 24 nt, Artificial Sequence
  Synthetic
ggucccggacagacgggaagaagu

SEQ ID NO: 27205 - RNA, 18 nt, Artificial Sequence
  Synthetic
guuguagauccuggaagu

SEQ ID NO: 27206 - RNA, 19 nt, Artificial Sequence
  Synthetic
gguuguagauccuggaagu

SEQ ID NO: 27207 - RNA, 20 nt, Artificial Sequence
  Synthetic
ugguuguagauccuggaagu

SEQ ID NO: 27208 - RNA, 21 nt, Artificial Sequence
  Synthetic
gugguuguagauccuggaagu

SEQ ID NO: 27209 - RNA, 22 nt, Artificial Sequence
  Synthetic
ggugguuguagauccuggaagu

SEQ ID NO: 27210 - RNA, 23 nt, Artificial Sequence
  Synthetic
uggugguuguagauccuggaagu

SEQ ID NO: 27211 - RNA, 24 nt, Artificial Sequence
  Synthetic
cuggugguuguagauccuggaagu

SEQ ID NO: 27212 - RNA, 18 nt, Artificial Sequence
  Synthetic
aacuaaaagccagacagu

SEQ ID NO: 27213 - RNA, 19 nt, Artificial Sequence
  Synthetic
uaacuaaaagccagacagu

SEQ ID NO: 27214 - RNA, 20 nt, Artificial Sequence
  Synthetic
auaacuaaaagccagacagu

SEQ ID NO: 27215 - RNA, 21 nt, Artificial Sequence
  Synthetic
uauaacuaaaagccagacagu

SEQ ID NO: 27216 - RNA, 22 nt, Artificial Sequence
  Synthetic
auauaacuaaaagccagacagu

SEQ ID NO: 27217 - RNA, 23 nt, Artificial Sequence
  Synthetic
cauauaacuaaaagccagacagu

SEQ ID NO: 27218 - RNA, 24 nt, Artificial Sequence
  Synthetic
ccauauaacuaaaagccagacagu

SEQ ID NO: 27219 - RNA, 18 nt, Artificial Sequence
  Synthetic
gagaaguccaccacgagu

SEQ ID NO: 27220 - RNA, 19 nt, Artificial Sequence
  Synthetic
agagaaguccaccacgagu

SEQ ID NO: 27221 - RNA, 20 nt, Artificial Sequence
  Synthetic
gagagaaguccaccacgagu

SEQ ID NO: 27222 - RNA, 21 nt, Artificial Sequence
  Synthetic
ugagagaaguccaccacgagu

SEQ ID NO: 27223 - RNA, 22 nt, Artificial Sequence
  Synthetic
uugagagaaguccaccacgagu

SEQ ID NO: 27224 - RNA, 23 nt, Artificial Sequence
  Synthetic
auugagagaaguccaccacgagu

SEQ ID NO: 27225 - RNA, 24 nt, Artificial Sequence
  Synthetic
aauugagagaaguccaccacgagu

SEQ ID NO: 27226 - RNA, 18 nt, Artificial Sequence
  Synthetic
  misc_feature (7)..(7): n is a, c, g, or u
cagguanaguagaggagu

SEQ ID NO: 27227 - RNA, 19 nt, Artificial Sequence
  Synthetic
  misc_feature (8)..(8): n is a, c, g, or u
acagguanaguagaggagu

SEQ ID NO: 27228 - RNA, 20 nt, Artificial Sequence
  Synthetic
  misc_feature (9)..(9): n is a, c, g, or u
aacagguanaguagaggagu

SEQ ID NO: 27229 - RNA, 21 nt, Artificial Sequence
  Synthetic
  misc_feature (10)..(10): n is a, c, g, or u
aaacagguanaguagaggagu

SEQ ID NO: 27230 - RNA, 22 nt, Artificial Sequence
  Synthetic
  misc_feature (11)..(11): n is a, c, g, or u
aaaacagguanaguagaggagu

SEQ ID NO: 27231 - RNA, 23 nt, Artificial Sequence
  Synthetic
  misc_feature (12)..(12): n is a, c, g, or u
gaaaacagguanaguagaggagu

SEQ ID NO: 27232 - RNA, 24 nt, Artificial Sequence
  Synthetic
  misc_feature (13)..(13): n is a, c, g, or u
ugaaaacagguanaguagaggagu

SEQ ID NO: 27233 - RNA, 18 nt, Artificial Sequence
  Synthetic
guuucccaccuuaugagu

SEQ ID NO: 27234 - RNA, 19 nt, Artificial Sequence
  Synthetic
aguuucccaccuuaugagu

SEQ ID NO: 27235 - RNA, 20 nt, Artificial Sequence
  Synthetic
aaguuucccaccuuaugagu

SEQ ID NO: 27236 - RNA, 21 nt, Artificial Sequence
  Synthetic
aaaguuucccaccuuaugagu

SEQ ID NO: 27237 - RNA, 22 nt, Artificial Sequence
  Synthetic
uaaaguuucccaccuuaugagu

SEQ ID NO: 27238 - RNA, 23 nt, Artificial Sequence
  Synthetic
guaaaguuucccaccuuaugagu

SEQ ID NO: 27239 - RNA, 24 nt, Artificial Sequence
  Synthetic
gguaaaguuucccaccuuaugagu

SEQ ID NO: 27240 - RNA, 18 nt, Artificial Sequence
  Synthetic
aggauaaccacauugagu

SEQ ID NO: 27241 - RNA, 19 nt, Artificial Sequence
  Synthetic
caggauaaccacauugagu

SEQ ID NO: 27242 - RNA, 20 nt, Artificial Sequence
  Synthetic
gcaggauaaccacauugagu

SEQ ID NO: 27243 - RNA, 21 nt, Artificial Sequence
  Synthetic
agcaggauaaccacauugagu

SEQ ID NO: 27244 - RNA, 22 nt, Artificial Sequence
  Synthetic
gagcaggauaaccacauugagu

SEQ ID NO: 27245 - RNA, 23 nt, Artificial Sequence
  Synthetic
agagcaggauaaccacauugagu

SEQ ID NO: 27246 - RNA, 24 nt, Artificial Sequence
  Synthetic
gagagcaggauaaccacauugagu

SEQ ID NO: 27247 - RNA, 18 nt, Artificial Sequence
  Synthetic
  misc_feature (15)..(15): n is a, c, g, or u
auugaaaacagguanagu

SEQ ID NO: 27248 - RNA, 19 nt, Artificial Sequence
  Synthetic
  misc_feature (16)..(16): n is a, c, g, or u
gauugaaaacagguanagu

SEQ ID NO: 27249 - RNA, 20 nt, Artificial Sequence
  Synthetic
  misc_feature (17)..(17): n is a, c, g, or u
ggauugaaaacagguanagu

SEQ ID NO: 27250 - RNA, 21 nt, Artificial Sequence
  Synthetic
  misc_feature (18)..(18): n is a, c, g, or u
aggauugaaaacagguanagu

SEQ ID NO: 27251 - RNA, 22 nt, Artificial Sequence
  Synthetic
  misc_feature (19)..(19): n is a, c, g, or u
caggauugaaaacagguanagu

SEQ ID NO: 27252 - RNA, 23 nt, Artificial Sequence
  Synthetic
  misc_feature (20)..(20): n is a, c, g, or u
ucaggauugaaaacagguanagu

SEQ ID NO: 27253 - RNA, 24 nt, Artificial Sequence
  Synthetic
  misc_feature (21)..(21): n is a, c, g, or u
gucaggauugaaaacagguanagu

SEQ ID NO: 27254 - RNA, 18 nt, Artificial Sequence
  Synthetic
ugugagagaggcaauagu

SEQ ID NO: 27255 - RNA, 19 nt, Artificial Sequence
  Synthetic
augugagagaggcaauagu

SEQ ID NO: 27256 - RNA, 20 nt, Artificial Sequence
  Synthetic
gaugugagagaggcaauagu

SEQ ID NO: 27257 - RNA, 21 nt, Artificial Sequence
  Synthetic
ugaugugagagaggcaauagu

SEQ ID NO: 27258 - RNA, 22 nt, Artificial Sequence
  Synthetic
augaugugagagaggcaauagu

SEQ ID NO: 27259 - RNA, 23 nt, Artificial Sequence
  Synthetic
gaugaugugagagaggcaauagu

SEQ ID NO: 27260 - RNA, 24 nt, Artificial Sequence
  Synthetic
ugaugaugugagagaggcaauagu

SEQ ID NO: 27261 - RNA, 18 nt, Artificial Sequence
  Synthetic
gcaacauaccuugauagu

SEQ ID NO: 27262 - RNA, 19 nt, Artificial Sequence
  Synthetic
ggcaacauaccuugauagu

SEQ ID NO: 27263 - RNA, 20 nt, Artificial Sequence
  Synthetic
gggcaacauaccuugauagu

SEQ ID NO: 27264 - RNA, 21 nt, Artificial Sequence
  Synthetic
cgggcaacauaccuugauagu

SEQ ID NO: 27265 - RNA, 22 nt, Artificial Sequence
  Synthetic
acgggcaacauaccuugauagu

SEQ ID NO: 27266 - RNA, 23 nt, Artificial Sequence
  Synthetic
cacgggcaacauaccuugauagu

SEQ ID NO: 27267 - RNA, 24 nt, Artificial Sequence
  Synthetic
acacgggcaacauaccuugauagu

SEQ ID NO: 27268 - RNA, 18 nt, Artificial Sequence
  Synthetic
  misc_feature (7)..(7): n is a, c, g, or u
  misc_feature (13)..(13): n is a, c, g, or u
uuuuagncccaunuuagu

SEQ ID NO: 27269 - RNA, 19 nt, Artificial Sequence
  Synthetic
  misc_feature (8)..(8): n is a, c, g, or u
  misc_feature (14)..(14): n is a, c, g, or u
uuuuuagncccaunuuagu

SEQ ID NO: 27270 - RNA, 20 nt, Artificial Sequence
  Synthetic
  misc_feature (9)..(9): n is a, c, g, or u
  misc_feature (15)..(15): n is a, c, g, or u
auuuuuagncccaunuuagu

SEQ ID NO: 27271 - RNA, 21 nt, Artificial Sequence
  Synthetic
  misc_feature (10)..(10): n is a, c, g, or u
  misc_feature (16)..(16): n is a, c, g, or u
aauuuuuagncccaunuuagu

SEQ ID NO: 27272 - RNA, 22 nt, Artificial Sequence
  Synthetic
  misc_feature (11)..(11): n is a, c, g, or u
  misc_feature (17)..(17): n is a, c, g, or u
uaauuuuuagncccaunuuagu

SEQ ID NO: 27273 - RNA, 23 nt, Artificial Sequence
  Synthetic
  misc_feature (12)..(12): n is a, c, g, or u
  misc_feature (18)..(18): n is a, c, g, or u
cuaauuuuuagncccaunuuagu

SEQ ID NO: 27274 - RNA, 24 nt, Artificial Sequence
  Synthetic
  misc_feature (13)..(13): n is a, c, g, or u
  misc_feature (19)..(19): n is a, c, g, or u
ucuaauuuuuagncccaunuuagu

SEQ ID NO: 27275 - RNA, 18 nt, Artificial Sequence
  Synthetic
guggucuccaugcgacgu

SEQ ID NO: 27276 - RNA, 19 nt, Artificial Sequence
  Synthetic
gguggucuccaugcgacgu

SEQ ID NO: 27277 - RNA, 20 nt, Artificial Sequence
  Synthetic
cgguggucuccaugcgacgu

SEQ ID NO: 27278 - RNA, 21 nt, Artificial Sequence
  Synthetic
acgguggucuccaugcgacgu

SEQ ID NO: 27279 - RNA, 22 nt, Artificial Sequence
  Synthetic
cacgguggucuccaugcgacgu

SEQ ID NO: 27280 - RNA, 23 nt, Artificial Sequence
  Synthetic
ucacgguggucuccaugcgacgu

SEQ ID NO: 27281 - RNA, 24 nt, Artificial Sequence
  Synthetic
uucacgguggucuccaugcgacgu

SEQ ID NO: 27282 - RNA, 18 nt, Artificial Sequence
  Synthetic
accccagaaggccaccgu

SEQ ID NO: 27283 - RNA, 19 nt, Artificial Sequence
  Synthetic
caccccagaaggccaccgu

SEQ ID NO: 27284 - RNA, 20 nt, Artificial Sequence
  Synthetic
ccaccccagaaggccaccgu

SEQ ID NO: 27285 - RNA, 21 nt, Artificial Sequence
  Synthetic
uccaccccagaaggccaccgu

SEQ ID NO: 27286 - RNA, 22 nt, Artificial Sequence
  Synthetic
cuccaccccagaaggccaccgu

SEQ ID NO: 27287 - RNA, 23 nt, Artificial Sequence
  Synthetic
gcuccaccccagaaggccaccgu

SEQ ID NO: 27288 - RNA, 24 nt, Artificial Sequence
  Synthetic
ggcuccaccccagaaggccaccgu

SEQ ID NO: 27289 - RNA, 18 nt, Artificial Sequence
  Synthetic
caugccccuucucgccgu

SEQ ID NO: 27290 - RNA, 19 nt, Artificial Sequence
  Synthetic
ccaugccccuucucgccgu

SEQ ID NO: 27291 - RNA, 20 nt, Artificial Sequence
  Synthetic
cccaugccccuucucgccgu

SEQ ID NO: 27292 - RNA, 21 nt, Artificial Sequence
  Synthetic
ucccaugccccuucucgccgu

SEQ ID NO: 27293 - RNA, 22 nt, Artificial Sequence
  Synthetic
gucccaugccccuucucgccgu

SEQ ID NO: 27294 - RNA, 23 nt, Artificial Sequence
  Synthetic
ugucccaugccccuucucgccgu

SEQ ID NO: 27295 - RNA, 24 nt, Artificial Sequence
  Synthetic
cugucccaugccccuucucgccgu

SEQ ID NO: 27296 - RNA, 18 nt, Artificial Sequence
  Synthetic
uacaggugcaauuuccgu

SEQ ID NO: 27297 - RNA, 19 nt, Artificial Sequence
  Synthetic
auacaggugcaauuuccgu

SEQ ID NO: 27298 - RNA, 20 nt, Artificial Sequence
  Synthetic
aauacaggugcaauuuccgu

SEQ ID NO: 27299 - RNA, 21 nt, Artificial Sequence
  Synthetic
gaauacaggugcaauuuccgu

SEQ ID NO: 27300 - RNA, 22 nt, Artificial Sequence
  Synthetic
ggaauacaggugcaauuuccgu

SEQ ID NO: 27301 - RNA, 23 nt, Artificial Sequence
  Synthetic
gggaauacaggugcaauuuccgu

SEQ ID NO: 27302 - RNA, 24 nt, Artificial Sequence
  Synthetic
ugggaauacaggugcaauuuccgu

SEQ ID NO: 27303 - RNA, 18 nt, Artificial Sequence
  Synthetic
caggcggggaguccgcgu

SEQ ID NO: 27304 - RNA, 19 nt, Artificial Sequence
  Synthetic
acaggcggggaguccgcgu

SEQ ID NO: 27305 - RNA, 20 nt, Artificial Sequence
  Synthetic
cacaggcggggaguccgcgu

SEQ ID NO: 27306 - RNA, 21 nt, Artificial Sequence
  Synthetic
gcacaggcggggaguccgcgu

SEQ ID NO: 27307 - RNA, 22 nt, Artificial Sequence
  Synthetic
ggcacaggcggggaguccgcgu

SEQ ID NO: 27308 - RNA, 23 nt, Artificial Sequence
  Synthetic
aggcacaggcggggaguccgcgu

SEQ ID NO: 27309 - RNA, 24 nt, Artificial Sequence
  Synthetic
aaggcacaggcggggaguccgcgu

SEQ ID NO: 27310 - RNA, 18 nt, Artificial Sequence
  Synthetic
agaugauuaggcagaggu

SEQ ID NO: 27311 - RNA, 19 nt, Artificial Sequence
  Synthetic
aagaugauuaggcagaggu

SEQ ID NO: 27312 - RNA, 20 nt, Artificial Sequence
  Synthetic
aaagaugauuaggcagaggu

SEQ ID NO: 27313 - RNA, 21 nt, Artificial Sequence
  Synthetic
aaaagaugauuaggcagaggu

SEQ ID NO: 27314 - RNA, 22 nt, Artificial Sequence
  Synthetic
caaaagaugauuaggcagaggu

SEQ ID NO: 27315 - RNA, 23 nt, Artificial Sequence
  Synthetic
acaaaagaugauuaggcagaggu

SEQ ID NO: 27316 - RNA, 24 nt, Artificial Sequence
  Synthetic
aacaaaagaugauuaggcagaggu

SEQ ID NO: 27317 - RNA, 18 nt, Artificial Sequence
  Synthetic
ugugugucccuuagaggu

SEQ ID NO: 27318 - RNA, 19 nt, Artificial Sequence
  Synthetic
augugugucccuuagaggu

SEQ ID NO: 27319 - RNA, 20 nt, Artificial Sequence
  Synthetic
gaugugugucccuuagaggu

SEQ ID NO: 27320 - RNA, 21 nt, Artificial Sequence
  Synthetic
ggaugugugucccuuagaggu

SEQ ID NO: 27321 - RNA, 22 nt, Artificial Sequence
  Synthetic
uggaugugugucccuuagaggu

SEQ ID NO: 27322 - RNA, 23 nt, Artificial Sequence
  Synthetic
guggaugugugucccuuagaggu

SEQ ID NO: 27323 - RNA, 24 nt, Artificial Sequence
  Synthetic
uguggaugugugucccuuagaggu

SEQ ID NO: 27324 - RNA, 18 nt, Artificial Sequence
  Synthetic
aagcggugucgaguaggu

SEQ ID NO: 27325 - RNA, 19 nt, Artificial Sequence
  Synthetic
gaagcggugucgaguaggu

SEQ ID NO: 27326 - RNA, 20 nt, Artificial Sequence
  Synthetic
ugaagcggugucgaguaggu

SEQ ID NO: 27327 - RNA, 18 nt, Artificial Sequence
  Synthetic
guagagggcugaagcggu

SEQ ID NO: 27328 - RNA, 19 nt, Artificial Sequence
  Synthetic
gguagagggcugaagcggu

SEQ ID NO: 27329 - RNA, 20 nt, Artificial Sequence
  Synthetic
cgguagagggcugaagcggu

SEQ ID NO: 27330 - RNA, 21 nt, Artificial Sequence
  Synthetic
ucgguagagggcugaagcggu

SEQ ID NO: 27331 - RNA, 22 nt, Artificial Sequence
  Synthetic
cucgguagagggcugaagcggu

SEQ ID NO: 27332 - RNA, 23 nt, Artificial Sequence
  Synthetic
ucucgguagagggcugaagcggu

SEQ ID NO: 27333 - RNA, 24 nt, Artificial Sequence
  Synthetic
aucucgguagagggcugaagcggu

SEQ ID NO: 27334 - RNA, 18 nt, Artificial Sequence
  Synthetic
aaaauugguaacagcggu

SEQ ID NO: 27335 - RNA, 19 nt, Artificial Sequence
  Synthetic
aaaaauugguaacagcggu

SEQ ID NO: 27336 - RNA, 20 nt, Artificial Sequence
  Synthetic
aaaaaauugguaacagcggu

SEQ ID NO: 27337 - RNA, 21 nt, Artificial Sequence
  Synthetic
caaaaaauugguaacagcggu

SEQ ID NO: 27338 - RNA, 22 nt, Artificial Sequence
  Synthetic
acaaaaaauugguaacagcggu

SEQ ID NO: 27339 - RNA, 23 nt, Artificial Sequence
  Synthetic
aacaaaaaauugguaacagcggu

SEQ ID NO: 27340 - RNA, 24 nt, Artificial Sequence
  Synthetic
uaacaaaaaauugguaacagcggu

SEQ ID NO: 27341 - RNA, 18 nt, Artificial Sequence
  Synthetic
auucuaaggcaucucggu

SEQ ID NO: 27342 - RNA, 19 nt, Artificial Sequence
  Synthetic
gauucuaaggcaucucggu

SEQ ID NO: 27343 - RNA, 20 nt, Artificial Sequence
  Synthetic
ugauucuaaggcaucucggu

SEQ ID NO: 27344 - RNA, 21 nt, Artificial Sequence
  Synthetic
gugauucuaaggcaucucggu

SEQ ID NO: 27345 - RNA, 22 nt, Artificial Sequence
  Synthetic
ggugauucuaaggcaucucggu

SEQ ID NO: 27346 - RNA, 23 nt, Artificial Sequence
  Synthetic
  misc_feature (1)..(1): n is a, c, g, or u
nggugauucuaaggcaucucggu

SEQ ID NO: 27347 - RNA, 24 nt, Artificial Sequence
  Synthetic
  misc_feature (2)..(2): n is a, c, g, or u
cnggugauucuaaggcaucucggu

SEQ ID NO: 27348 - RNA, 18 nt, Artificial Sequence
  Synthetic
uguaacacgagaaggggu

SEQ ID NO: 27349 - RNA, 19 nt, Artificial Sequence
  Synthetic
cuguaacacgagaaggggu

SEQ ID NO: 27350 - RNA, 20 nt, Artificial Sequence
  Synthetic
ccuguaacacgagaaggggu

SEQ ID NO: 27351 - RNA, 18 nt, Artificial Sequence
  Synthetic
aggccaccgugugggggu

SEQ ID NO: 27352 - RNA, 19 nt, Artificial Sequence
  Synthetic
aaggccaccgugugggggu

SEQ ID NO: 27353 - RNA, 20 nt, Artificial Sequence
  Synthetic
gaaggccaccgugugggggu

SEQ ID NO: 27354 - RNA, 21 nt, Artificial Sequence
  Synthetic
agaaggccaccgugugggggu

SEQ ID NO: 27355 - RNA, 22 nt, Artificial Sequence
  Synthetic
cagaaggccaccgugugggggu

SEQ ID NO: 27356 - RNA, 23 nt, Artificial Sequence
  Synthetic
ccagaaggccaccgugugggggu

SEQ ID NO: 27357 - RNA, 24 nt, Artificial Sequence
  Synthetic
cccagaaggccaccgugugggggu

SEQ ID NO: 27358 - RNA, 18 nt, Artificial Sequence
  Synthetic
gcaggagguggaucuggu

SEQ ID NO: 27359 - RNA, 19 nt, Artificial Sequence
  Synthetic
agcaggagguggaucuggu

SEQ ID NO: 27360 - RNA, 20 nt, Artificial Sequence
  Synthetic
aagcaggagguggaucuggu

SEQ ID NO: 27361 - RNA, 21 nt, Artificial Sequence
  Synthetic
gaagcaggagguggaucuggu

SEQ ID NO: 27362 - RNA, 22 nt, Artificial Sequence
  Synthetic
ggaagcaggagguggaucuggu

SEQ ID NO: 27363 - RNA, 23 nt, Artificial Sequence
  Synthetic
uggaagcaggagguggaucuggu

SEQ ID NO: 27364 - RNA, 24 nt, Artificial Sequence
  Synthetic
guggaagcaggagguggaucuggu

SEQ ID NO: 27365 - RNA, 18 nt, Artificial Sequence
  Synthetic
guggauccaacugguggu

SEQ ID NO: 27366 - RNA, 19 nt, Artificial Sequence
  Synthetic
aguggauccaacugguggu

SEQ ID NO: 27367 - RNA, 20 nt, Artificial Sequence
  Synthetic
uaguggauccaacugguggu

SEQ ID NO: 27368 - RNA, 21 nt, Artificial Sequence
  Synthetic
auaguggauccaacugguggu

SEQ ID NO: 27369 - RNA, 22 nt, Artificial Sequence
  Synthetic
aauaguggauccaacugguggu

SEQ ID NO: 27370 - RNA, 23 nt, Artificial Sequence
  Synthetic
gaauaguggauccaacugguggu

SEQ ID NO: 27371 - RNA, 24 nt, Artificial Sequence
  Synthetic
ugaauaguggauccaacugguggu

SEQ ID NO: 27372 - RNA, 18 nt, Artificial Sequence
  Synthetic
gggucccgugcugguggu

SEQ ID NO: 27373 - RNA, 19 nt, Artificial Sequence
  Synthetic
agggucccgugcugguggu

SEQ ID NO: 27374 - RNA, 20 nt, Artificial Sequence
  Synthetic
cagggucccgugcugguggu

SEQ ID NO: 27375 - RNA, 21 nt, Artificial Sequence
  Synthetic
gcagggucccgugcugguggu

SEQ ID NO: 27376 - RNA, 22 nt, Artificial Sequence
  Synthetic
ugcagggucccgugcugguggu

SEQ ID NO: 27377 - RNA, 23 nt, Artificial Sequence
  Synthetic
uugcagggucccgugcugguggu

SEQ ID NO: 27378 - RNA, 24 nt, Artificial Sequence
  Synthetic
uuugcagggucccgugcugguggu

SEQ ID NO: 27379 - RNA, 18 nt, Artificial Sequence
  Synthetic
  misc_feature (14)..(14): n is a, c, g, or u
gccugagagcagunuggu

SEQ ID NO: 27380 - RNA, 19 nt, Artificial Sequence
  Synthetic
  misc_feature (15)..(15): n is a, c, g, or u
ugccugagagcagunuggu

SEQ ID NO: 27381 - RNA, 20 nt, Artificial Sequence
  Synthetic
  misc_feature (16)..(16): n is a, c, g, or u
uugccugagagcagunuggu

SEQ ID NO: 27382 - RNA, 21 nt, Artificial Sequence
  Synthetic
  misc_feature (17)..(17): n is a, c, g, or u
cuugccugagagcagunuggu

SEQ ID NO: 27383 - RNA, 22 nt, Artificial Sequence
  Synthetic
  misc_feature (18)..(18): n is a, c, g, or u
gcuugccugagagcagunuggu

SEQ ID NO: 27384 - RNA, 23 nt, Artificial Sequence
  Synthetic
  misc_feature (19)..(19): n is a, c, g, or u
agcuugccugagagcagunuggu

SEQ ID NO: 27385 - RNA, 24 nt, Artificial Sequence
  Synthetic
  misc_feature (20)..(20): n is a, c, g, or u
uagcuugccugagagcagunuggu

SEQ ID NO: 27386 - RNA, 18 nt, Artificial Sequence
  Synthetic
agauaacaaaaaauuggu

SEQ ID NO: 27387 - RNA, 19 nt, Artificial Sequence
  Synthetic
cagauaacaaaaaauuggu

SEQ ID NO: 27388 - RNA, 20 nt, Artificial Sequence
  Synthetic
acagauaacaaaaaauuggu

SEQ ID NO: 27389 - RNA, 21 nt, Artificial Sequence
  Synthetic
cacagauaacaaaaaauuggu

SEQ ID NO: 27390 - RNA, 22 nt, Artificial Sequence
  Synthetic
ccacagauaacaaaaaauuggu

SEQ ID NO: 27391 - RNA, 23 nt, Artificial Sequence
  Synthetic
cccacagauaacaaaaaauuggu

SEQ ID NO: 27392 - RNA, 24 nt, Artificial Sequence
  Synthetic
gcccacagauaacaaaaaauuggu

SEQ ID NO: 27393 - RNA, 18 nt, Artificial Sequence
  Synthetic
uccugaccuccgauuggu

SEQ ID NO: 27394 - RNA, 19 nt, Artificial Sequence
  Synthetic
uuccugaccuccgauuggu

SEQ ID NO: 27395 - RNA, 20 nt, Artificial Sequence
  Synthetic
cuuccugaccuccgauuggu

SEQ ID NO: 27396 - RNA, 21 nt, Artificial Sequence
  Synthetic
ucuuccugaccuccgauuggu

SEQ ID NO: 27397 - RNA, 22 nt, Artificial Sequence
  Synthetic
uucuuccugaccuccgauuggu

SEQ ID NO: 27398 - RNA, 23 nt, Artificial Sequence
  Synthetic
uuucuuccugaccuccgauuggu

SEQ ID NO: 27399 - RNA, 24 nt, Artificial Sequence
  Synthetic
cuuucuuccugaccuccgauuggu

SEQ ID NO: 27400 - RNA, 18 nt, Artificial Sequence
  Synthetic
cuugaugcaagugaaugu

SEQ ID NO: 27401 - RNA, 19 nt, Artificial Sequence
  Synthetic
ucuugaugcaagugaaugu

SEQ ID NO: 27402 - RNA, 20 nt, Artificial Sequence
  Synthetic
aucuugaugcaagugaaugu

SEQ ID NO: 27403 - RNA, 21 nt, Artificial Sequence
  Synthetic
  misc_feature (1)..(1): n is a, c, g, or u
naucuugaugcaagugaaugu

SEQ ID NO: 27404 - RNA, 22 nt, Artificial Sequence
  Synthetic
  misc_feature (2)..(2): n is a, c, g, or u
anaucuugaugcaagugaaugu

SEQ ID NO: 27405 - RNA, 23 nt, Artificial Sequence
  Synthetic
  misc_feature (3)..(3): n is a, c, g, or u
canaucuugaugcaagugaaugu

SEQ ID NO: 27406 - RNA, 24 nt, Artificial Sequence
  Synthetic
  misc_feature (4)..(4): n is a, c, g, or u
ucanaucuugaugcaagugaaugu

SEQ ID NO: 27407 - RNA, 18 nt, Artificial Sequence
  Synthetic
cgagaagauugaugaugu

SEQ ID NO: 27408 - RNA, 19 nt, Artificial Sequence
  Synthetic
ucgagaagauugaugaugu

SEQ ID NO: 27409 - RNA, 20 nt, Artificial Sequence
  Synthetic
uucgagaagauugaugaugu

SEQ ID NO: 27410 - RNA, 21 nt, Artificial Sequence
  Synthetic
cuucgagaagauugaugaugu

SEQ ID NO: 27411 - RNA, 22 nt, Artificial Sequence
  Synthetic
ucuucgagaagauugaugaugu

SEQ ID NO: 27412 - RNA, 23 nt, Artificial Sequence
  Synthetic
gucuucgagaagauugaugaugu

SEQ ID NO: 27413 - RNA, 24 nt, Artificial Sequence
  Synthetic
agucuucgagaagauugaugaugu

SEQ ID NO: 27414 - RNA, 18 nt, Artificial Sequence
  Synthetic
agugcuugguggaacugu

SEQ ID NO: 27415 - RNA, 19 nt, Artificial Sequence
  Synthetic
cagugcuugguggaacugu

SEQ ID NO: 27416 - RNA, 20 nt, Artificial Sequence
  Synthetic
acagugcuugguggaacugu

SEQ ID NO: 27417 - RNA, 21 nt, Artificial Sequence
  Synthetic
aacagugcuugguggaacugu

SEQ ID NO: 27418 - RNA, 22 nt, Artificial Sequence
  Synthetic
caacagugcuugguggaacugu

SEQ ID NO: 27419 - RNA, 23 nt, Artificial Sequence
  Synthetic
ccaacagugcuugguggaacugu

SEQ ID NO: 27420 - RNA, 24 nt, Artificial Sequence
  Synthetic
uccaacagugcuugguggaacugu

SEQ ID NO: 27421 - RNA, 18 nt, Artificial Sequence
  Synthetic
ccaauuguccuuguuugu

SEQ ID NO: 27422 - RNA, 19 nt, Artificial Sequence
  Synthetic
gccaauuguccuuguuugu

SEQ ID NO: 27423 - RNA, 20 nt, Artificial Sequence
  Synthetic
ggccaauuguccuuguuugu

SEQ ID NO: 27424 - RNA, 21 nt, Artificial Sequence
  Synthetic
uggccaauuguccuuguuugu

SEQ ID NO: 27425 - RNA, 22 nt, Artificial Sequence
  Synthetic
uuggccaauuguccuuguuugu

SEQ ID NO: 27426 - RNA, 23 nt, Artificial Sequence
  Synthetic
auuggccaauuguccuuguuugu

SEQ ID NO: 27427 - RNA, 24 nt, Artificial Sequence
  Synthetic
cauuggccaauuguccuuguuugu

SEQ ID NO: 27428 - RNA, 18 nt, Artificial Sequence
  Synthetic
auaaccccaccauuuugu

SEQ ID NO: 27429 - RNA, 19 nt, Artificial Sequence
  Synthetic
aauaaccccaccauuuugu

SEQ ID NO: 27430 - RNA, 20 nt, Artificial Sequence
  Synthetic
gaauaaccccaccauuuugu

SEQ ID NO: 27431 - RNA, 21 nt, Artificial Sequence
  Synthetic
ggaauaaccccaccauuuugu

SEQ ID NO: 27432 - RNA, 22 nt, Artificial Sequence
  Synthetic
  misc_feature (1)..(1): n is a, c, g, or u
nggaauaaccccaccauuuugu

SEQ ID NO: 27433 - RNA, 23 nt, Artificial Sequence
  Synthetic
  misc_feature (2)..(2): n is a, c, g, or u
anggaauaaccccaccauuuugu

SEQ ID NO: 27434 - RNA, 24 nt, Artificial Sequence
  Synthetic
  misc_feature (1)..(1): n is a, c, g, or u
  misc_feature (3)..(3): n is a, c, g, or u
nanggaauaaccccaccauuuugu

SEQ ID NO: 27435 - RNA, 18 nt, Artificial Sequence
  Synthetic
  misc_feature (17)..(17): n is a, c, g, or u
uaagguuguuggcaagnu

SEQ ID NO: 27436 - RNA, 19 nt, Artificial Sequence
  Synthetic
  misc_feature (18)..(18): n is a, c, g, or u
guaagguuguuggcaagnu

SEQ ID NO: 27437 - RNA, 20 nt, Artificial Sequence
  Synthetic
  misc_feature (19)..(19): n is a, c, g, or u
uguaagguuguuggcaagnu

SEQ ID NO: 27438 - RNA, 21 nt, Artificial Sequence
  Synthetic
  misc_feature (20)..(20): n is a, c, g, or u
auguaagguuguuggcaagnu

SEQ ID NO: 27439 - RNA, 22 nt, Artificial Sequence
  Synthetic
  misc_feature (21)..(21): n is a, c, g, or u
uauguaagguuguuggcaagnu

SEQ ID NO: 27440 - RNA, 23 nt, Artificial Sequence
  Synthetic
  misc_feature (22)..(22): n is a, c, g, or u
uuauguaagguuguuggcaagnu

SEQ ID NO: 27441 - RNA, 24 nt, Artificial Sequence
  Synthetic
  misc_feature (23)..(23): n is a, c, g, or u
cuuauguaagguuguuggcaagnu

SEQ ID NO: 27442 - RNA, 18 nt, Artificial Sequence
  Synthetic
  misc_feature (17)..(17): n is a, c, g, or u
ucgucuccuuucauuunu

SEQ ID NO: 27443 - RNA, 19 nt, Artificial Sequence
  Synthetic
  misc_feature (18)..(18): n is a, c, g, or u
aucgucuccuuucauuunu

SEQ ID NO: 27444 - RNA, 20 nt, Artificial Sequence
  Synthetic
  misc_feature (19)..(19): n is a, c, g, or u
aaucgucuccuuucauuunu

SEQ ID NO: 27445 - RNA, 21 nt, Artificial Sequence
  Synthetic
  misc_feature (20)..(20): n is a, c, g, or u
caaucgucuccuuucauuunu

SEQ ID NO: 27446 - RNA, 22 nt, Artificial Sequence
  Synthetic
  misc_feature (21)..(21): n is a, c, g, or u
ucaaucgucuccuuucauuunu

SEQ ID NO: 27447 - RNA, 23 nt, Artificial Sequence
  Synthetic
  misc_feature (22)..(22): n is a, c, g, or u
uucaaucgucuccuuucauuunu

SEQ ID NO: 27448 - RNA, 24 nt, Artificial Sequence
  Synthetic
  misc_feature (23)..(23): n is a, c, g, or u
uuucaaucgucuccuuucauuunu

SEQ ID NO: 27449 - RNA, 18 nt, Artificial Sequence
  Synthetic
cacagauaacaaaaaauu

SEQ ID NO: 27450 - RNA, 19 nt, Artificial Sequence
  Synthetic
ccacagauaacaaaaaauu

SEQ ID NO: 27451 - RNA, 20 nt, Artificial Sequence
  Synthetic
cccacagauaacaaaaaauu

SEQ ID NO: 27452 - RNA, 21 nt, Artificial Sequence
  Synthetic
gcccacagauaacaaaaaauu

SEQ ID NO: 27453 - RNA, 22 nt, Artificial Sequence
  Synthetic
ugcccacagauaacaaaaaauu

SEQ ID NO: 27454 - RNA, 23 nt, Artificial Sequence
  Synthetic
augcccacagauaacaaaaaauu

SEQ ID NO: 27455 - RNA, 24 nt, Artificial Sequence
  Synthetic
gaugcccacagauaacaaaaaauu

SEQ ID NO: 27456 - RNA, 18 nt, Artificial Sequence
  Synthetic
ugguaccccuagaaaauu

SEQ ID NO: 27457 - RNA, 19 nt, Artificial Sequence
  Synthetic
gugguaccccuagaaaauu

SEQ ID NO: 27458 - RNA, 20 nt, Artificial Sequence
  Synthetic
ggugguaccccuagaaaauu

SEQ ID NO: 27459 - RNA, 21 nt, Artificial Sequence
  Synthetic
gggugguaccccuagaaaauu

SEQ ID NO: 27460 - RNA, 22 nt, Artificial Sequence
  Synthetic
cgggugguaccccuagaaaauu

SEQ ID NO: 27461 - RNA, 23 nt, Artificial Sequence
  Synthetic
ccgggugguaccccuagaaaauu

SEQ ID NO: 27462 - RNA, 24 nt, Artificial Sequence
  Synthetic
cccgggugguaccccuagaaaauu

SEQ ID NO: 27463 - RNA, 18 nt, Artificial Sequence
  Synthetic
cauaauaauugucuaauu

SEQ ID NO: 27464 - RNA, 19 nt, Artificial Sequence
  Synthetic
ccauaauaauugucuaauu

SEQ ID NO: 27465 - RNA, 20 nt, Artificial Sequence
  Synthetic
accauaauaauugucuaauu

SEQ ID NO: 27466 - RNA, 21 nt, Artificial Sequence
  Synthetic
aaccauaauaauugucuaauu

SEQ ID NO: 27467 - RNA, 22 nt, Artificial Sequence
  Synthetic
aaaccauaauaauugucuaauu

SEQ ID NO: 27468 - RNA, 23 nt, Artificial Sequence
  Synthetic
gaaaccauaauaauugucuaauu

SEQ ID NO: 27469 - RNA, 24 nt, Artificial Sequence
  Synthetic
ugaaaccauaauaauugucuaauu

SEQ ID NO: 27470 - RNA, 18 nt, Artificial Sequence
  Synthetic
ccaaggaauacuaacauu

SEQ ID NO: 27471 - RNA, 19 nt, Artificial Sequence
  Synthetic
uccaaggaauacuaacauu

SEQ ID NO: 27472 - RNA, 20 nt, Artificial Sequence
  Synthetic
guccaaggaauacuaacauu

SEQ ID NO: 27473 - RNA, 21 nt, Artificial Sequence
  Synthetic
aguccaaggaauacuaacauu

SEQ ID NO: 27474 - RNA, 22 nt, Artificial Sequence
  Synthetic
gaguccaaggaauacuaacauu

SEQ ID NO: 27475 - RNA, 23 nt, Artificial Sequence
  Synthetic
ugaguccaaggaauacuaacauu

SEQ ID NO: 27476 - RNA, 24 nt, Artificial Sequence
  Synthetic
augaguccaaggaauacuaacauu

SEQ ID NO: 27477 - RNA, 18 nt, Artificial Sequence
  Synthetic
gguaagugauuggagauu

SEQ ID NO: 27478 - RNA, 19 nt, Artificial Sequence
  Synthetic
ugguaagugauuggagauu

SEQ ID NO: 27479 - RNA, 20 nt, Artificial Sequence
  Synthetic
uugguaagugauuggagauu

SEQ ID NO: 27480 - RNA, 21 nt, Artificial Sequence
  Synthetic
guugguaagugauuggagauu

SEQ ID NO: 27481 - RNA, 22 nt, Artificial Sequence
  Synthetic
gguugguaagugauuggagauu

SEQ ID NO: 27482 - RNA, 23 nt, Artificial Sequence
  Synthetic
agguugguaagugauuggagauu

SEQ ID NO: 27483 - RNA, 24 nt, Artificial Sequence
  Synthetic
gagguugguaagugauuggagauu

SEQ ID NO: 27484 - RNA, 18 nt, Artificial Sequence
  Synthetic
ucuuccugaccuccgauu

SEQ ID NO: 27485 - RNA, 19 nt, Artificial Sequence
  Synthetic
uucuuccugaccuccgauu

SEQ ID NO: 27486 - RNA, 20 nt, Artificial Sequence
  Synthetic
uuucuuccugaccuccgauu

SEQ ID NO: 27487 - RNA, 21 nt, Artificial Sequence
  Synthetic
cuuucuuccugaccuccgauu

SEQ ID NO: 27488 - RNA, 22 nt, Artificial Sequence
  Synthetic
gcuuucuuccugaccuccgauu

SEQ ID NO: 27489 - RNA, 23 nt, Artificial Sequence
  Synthetic
ggcuuucuuccugaccuccgauu

SEQ ID NO: 27490 - RNA, 24 nt, Artificial Sequence
  Synthetic
uggcuuucuuccugaccuccgauu

SEQ ID NO: 27491 - RNA, 18 nt, Artificial Sequence
  Synthetic
aguuaaccagucaggauu

SEQ ID NO: 27492 - RNA, 19 nt, Artificial Sequence
  Synthetic
gaguuaaccagucaggauu

SEQ ID NO: 27493 - RNA, 20 nt, Artificial Sequence
  Synthetic
ggaguuaaccagucaggauu

SEQ ID NO: 27494 - RNA, 21 nt, Artificial Sequence
  Synthetic
aggaguuaaccagucaggauu

SEQ ID NO: 27495 - RNA, 22 nt, Artificial Sequence
  Synthetic
aaggaguuaaccagucaggauu

SEQ ID NO: 27496 - RNA, 23 nt, Artificial Sequence
  Synthetic
gaaggaguuaaccagucaggauu

SEQ ID NO: 27497 - RNA, 24 nt, Artificial Sequence
  Synthetic
agaaggaguuaaccagucaggauu

SEQ ID NO: 27498 - RNA, 18 nt, Artificial Sequence
  Synthetic
  misc_feature (11)..(11): n is a, c, g, or u
ugcaauguucnggugauu

SEQ ID NO: 27499 - RNA, 19 nt, Artificial Sequence
  Synthetic
  misc_feature (12)..(12): n is a, c, g, or u
gugcaauguucnggugauu

SEQ ID NO: 27500 - RNA, 20 nt, Artificial Sequence
  Synthetic
  misc_feature (13)..(13): n is a, c, g, or u
ggugcaauguucnggugauu

SEQ ID NO: 27501 - RNA, 21 nt, Artificial Sequence
  Synthetic
  misc_feature (14)..(14): n is a, c, g, or u
gggugcaauguucnggugauu

SEQ ID NO: 27502 - RNA, 22 nt, Artificial Sequence
  Synthetic
  misc_feature (15)..(15): n is a, c, g, or u
ggggugcaauguucnggugauu

SEQ ID NO: 27503 - RNA, 23 nt, Artificial Sequence
  Synthetic
  misc_feature (16)..(16): n is a, c, g, or u
gggggugcaauguucnggugauu

SEQ ID NO: 27504 - RNA, 24 nt, Artificial Sequence
  Synthetic
  misc_feature (17)..(17): n is a, c, g, or u
ugggggugcaauguucnggugauu

SEQ ID NO: 27505 - RNA, 18 nt, Artificial Sequence
  Synthetic
ccaaucaaugggucuauu

SEQ ID NO: 27506 - RNA, 19 nt, Artificial Sequence
  Synthetic
uccaaucaaugggucuauu

SEQ ID NO: 27507 - RNA, 20 nt, Artificial Sequence
  Synthetic
uuccaaucaaugggucuauu

SEQ ID NO: 27508 - RNA, 21 nt, Artificial Sequence
  Synthetic
cuuccaaucaaugggucuauu

SEQ ID NO: 27509 - RNA, 22 nt, Artificial Sequence
  Synthetic
ccuuccaaucaaugggucuauu

SEQ ID NO: 27510 - RNA, 23 nt, Artificial Sequence
  Synthetic
accuuccaaucaaugggucuauu

SEQ ID NO: 27511 - RNA, 24 nt, Artificial Sequence
  Synthetic
aaccuuccaaucaaugggucuauu

SEQ ID NO: 27512 - RNA, 18 nt, Artificial Sequence
  Synthetic
  misc_feature (11)..(11): n is a, c, g, or u
ucuagacucunugguauu

SEQ ID NO: 27513 - RNA, 19 nt, Artificial Sequence
  Synthetic
  misc_feature (12)..(12): n is a, c, g, or u
gucuagacucunugguauu

SEQ ID NO: 27514 - RNA, 20 nt, Artificial Sequence
  Synthetic
  misc_feature (13)..(13): n is a, c, g, or u
agucuagacucunugguauu

SEQ ID NO: 27515 - RNA, 21 nt, Artificial Sequence
  Synthetic
  misc_feature (14)..(14): n is a, c, g, or u
gagucuagacucunugguauu

SEQ ID NO: 27516 - RNA, 22 nt, Artificial Sequence
  Synthetic
  misc_feature (15)..(15): n is a, c, g, or u
cgagucuagacucunugguauu

SEQ ID NO: 27517 - RNA, 23 nt, Artificial Sequence
  Synthetic
  misc_feature (16)..(16): n is a, c, g, or u
acgagucuagacucunugguauu

SEQ ID NO: 27518 - RNA, 24 nt, Artificial Sequence
  Synthetic
  misc_feature (17)..(17): n is a, c, g, or u
cacgagucuagacucunugguauu

SEQ ID NO: 27519 - RNA, 18 nt, Artificial Sequence
  Synthetic
uugcgucagcaaacacuu

SEQ ID NO: 27520 - RNA, 19 nt, Artificial Sequence
  Synthetic
guugcgucagcaaacacuu

SEQ ID NO: 27521 - RNA, 20 nt, Artificial Sequence
  Synthetic
gguugcgucagcaaacacuu

SEQ ID NO: 27522 - RNA, 21 nt, Artificial Sequence
  Synthetic
ggguugcgucagcaaacacuu

SEQ ID NO: 27523 - RNA, 22 nt, Artificial Sequence
  Synthetic
gggguugcgucagcaaacacuu

SEQ ID NO: 27524 - RNA, 23 nt, Artificial Sequence
  Synthetic
ggggguugcgucagcaaacacuu

SEQ ID NO: 27525 - RNA, 24 nt, Artificial Sequence
  Synthetic
uggggguugcgucagcaaacacuu

SEQ ID NO: 27526 - RNA, 18 nt, Artificial Sequence
  Synthetic
ugggaaggagguguacuu

SEQ ID NO: 27527 - RNA, 19 nt, Artificial Sequence
  Synthetic
augggaaggagguguacuu

SEQ ID NO: 27528 - RNA, 20 nt, Artificial Sequence
  Synthetic
caugggaaggagguguacuu

SEQ ID NO: 27529 - RNA, 21 nt, Artificial Sequence
  Synthetic
ccaugggaaggagguguacuu

SEQ ID NO: 27530 - RNA, 22 nt, Artificial Sequence
  Synthetic
gccaugggaaggagguguacuu

SEQ ID NO: 27531 - RNA, 23 nt, Artificial Sequence
  Synthetic
agccaugggaaggagguguacuu

SEQ ID NO: 27532 - RNA, 24 nt, Artificial Sequence
  Synthetic
cagccaugggaaggagguguacuu

SEQ ID NO: 27533 - RNA, 18 nt, Artificial Sequence
  Synthetic
ccacccaaggcacagcuu

SEQ ID NO: 27534 - RNA, 19 nt, Artificial Sequence
  Synthetic
gccacccaaggcacagcuu

SEQ ID NO: 27535 - RNA, 20 nt, Artificial Sequence
  Synthetic
agccacccaaggcacagcuu

SEQ ID NO: 27536 - RNA, 21 nt, Artificial Sequence
  Synthetic
aagccacccaaggcacagcuu

SEQ ID NO: 27537 - RNA, 22 nt, Artificial Sequence
  Synthetic
aaagccacccaaggcacagcuu

SEQ ID NO: 27538 - RNA, 23 nt, Artificial Sequence
  Synthetic
caaagccacccaaggcacagcuu

SEQ ID NO: 27539 - RNA, 24 nt, Artificial Sequence
  Synthetic
ccaaagccacccaaggcacagcuu

SEQ ID NO: 27540 - RNA, 18 nt, Artificial Sequence
  Synthetic
ucggauccaacagugcuu

SEQ ID NO: 27541 - RNA, 19 nt, Artificial Sequence
  Synthetic
cucggauccaacagugcuu

SEQ ID NO: 27542 - RNA, 20 nt, Artificial Sequence
  Synthetic
ucucggauccaacagugcuu

SEQ ID NO: 27543 - RNA, 21 nt, Artificial Sequence
  Synthetic
cucucggauccaacagugcuu

SEQ ID NO: 27544 - RNA, 22 nt, Artificial Sequence
  Synthetic
acucucggauccaacagugcuu

SEQ ID NO: 27545 - RNA, 23 nt, Artificial Sequence
  Synthetic
uacucucggauccaacagugcuu

SEQ ID NO: 27546 - RNA, 24 nt, Artificial Sequence
  Synthetic
uuacucucggauccaacagugcuu

SEQ ID NO: 27547 - RNA, 18 nt, Artificial Sequence
  Synthetic
  misc_feature (2)..(2): n is a, c, g, or u
ancaggguccccagucuu

SEQ ID NO: 27548 - RNA, 19 nt, Artificial Sequence
  Synthetic
  misc_feature (3)..(3): n is a, c, g, or u
uancaggguccccagucuu

SEQ ID NO: 27549 - RNA, 20 nt, Artificial Sequence
  Synthetic
  misc_feature (4)..(4): n is a, c, g, or u
auancaggguccccagucuu

SEQ ID NO: 27550 - RNA, 21 nt, Artificial Sequence
  Synthetic
  misc_feature (5)..(5): n is a, c, g, or u
cauancaggguccccagucuu

SEQ ID NO: 27551 - RNA, 22 nt, Artificial Sequence
  Synthetic
  misc_feature (6)..(6): n is a, c, g, or u
ucauancaggguccccagucuu

SEQ ID NO: 27552 - RNA, 23 nt, Artificial Sequence
  Synthetic
  misc_feature (7)..(7): n is a, c, g, or u
uucauancaggguccccagucuu

SEQ ID NO: 27553 - RNA, 24 nt, Artificial Sequence
  Synthetic
  misc_feature (8)..(8): n is a, c, g, or u
guucauancaggguccccagucuu

SEQ ID NO: 27554 - RNA, 18 nt, Artificial Sequence
  Synthetic
cagaagcuccaaauucuu

SEQ ID NO: 27555 - RNA, 19 nt, Artificial Sequence
  Synthetic
acagaagcuccaaauucuu

SEQ ID NO: 27556 - RNA, 20 nt, Artificial Sequence
  Synthetic
cacagaagcuccaaauucuu

SEQ ID NO: 27557 - RNA, 21 nt, Artificial Sequence
  Synthetic
ccacagaagcuccaaauucuu

SEQ ID NO: 27558 - RNA, 22 nt, Artificial Sequence
  Synthetic
uccacagaagcuccaaauucuu

SEQ ID NO: 27559 - RNA, 23 nt, Artificial Sequence
  Synthetic
cuccacagaagcuccaaauucuu

SEQ ID NO: 27560 - RNA, 24 nt, Artificial Sequence
  Synthetic
acuccacagaagcuccaaauucuu

SEQ ID NO: 27561 - RNA, 18 nt, Artificial Sequence
  Synthetic
ggcgagggaguucuucuu

SEQ ID NO: 27562 - RNA, 19 nt, Artificial Sequence
  Synthetic
aggcgagggaguucuucuu

SEQ ID NO: 27563 - RNA, 20 nt, Artificial Sequence
  Synthetic
gaggcgagggaguucuucuu

SEQ ID NO: 27564 - RNA, 21 nt, Artificial Sequence
  Synthetic
cgaggcgagggaguucuucuu

SEQ ID NO: 27565 - RNA, 22 nt, Artificial Sequence
  Synthetic
gcgaggcgagggaguucuucuu

SEQ ID NO: 27566 - RNA, 23 nt, Artificial Sequence
  Synthetic
ugcgaggcgagggaguucuucuu

SEQ ID NO: 27567 - RNA, 24 nt, Artificial Sequence
  Synthetic
cugcgaggcgagggaguucuucuu

SEQ ID NO: 27568 - RNA, 18 nt, Artificial Sequence
  Synthetic
acugggguuggcuuucuu

SEQ ID NO: 27569 - RNA, 19 nt, Artificial Sequence
  Synthetic
gacugggguuggcuuucuu

SEQ ID NO: 27570 - RNA, 20 nt, Artificial Sequence
  Synthetic
agacugggguuggcuuucuu

SEQ ID NO: 27571 - RNA, 21 nt, Artificial Sequence
  Synthetic
gagacugggguuggcuuucuu

SEQ ID NO: 27572 - RNA, 22 nt, Artificial Sequence
  Synthetic
agagacugggguuggcuuucuu

SEQ ID NO: 27573 - RNA, 23 nt, Artificial Sequence
  Synthetic
gagagacugggguuggcuuucuu

SEQ ID NO: 27574 - RNA, 24 nt, Artificial Sequence
  Synthetic
ggagagacugggguuggcuuucuu

SEQ ID NO: 27575 - RNA, 18 nt, Artificial Sequence
  Synthetic
cgauagccaggacaaguu

SEQ ID NO: 27576 - RNA, 19 nt, Artificial Sequence
  Synthetic
acgauagccaggacaaguu

SEQ ID NO: 27577 - RNA, 20 nt, Artificial Sequence
  Synthetic
aacgauagccaggacaaguu

SEQ ID NO: 27578 - RNA, 21 nt, Artificial Sequence
  Synthetic
caacgauagccaggacaaguu

SEQ ID NO: 27579 - RNA, 22 nt, Artificial Sequence
  Synthetic
ccaacgauagccaggacaaguu

SEQ ID NO: 27580 - RNA, 23 nt, Artificial Sequence
  Synthetic
uccaacgauagccaggacaaguu

SEQ ID NO: 27581 - RNA, 24 nt, Artificial Sequence
  Synthetic
auccaacgauagccaggacaaguu

SEQ ID NO: 27582 - RNA, 18 nt, Artificial Sequence
  Synthetic
gucuauucacgggaaguu

SEQ ID NO: 27583 - RNA, 19 nt, Artificial Sequence
  Synthetic
ggucuauucacgggaaguu

SEQ ID NO: 27584 - RNA, 20 nt, Artificial Sequence
  Synthetic
gggucuauucacgggaaguu

SEQ ID NO: 27585 - RNA, 21 nt, Artificial Sequence
  Synthetic
ugggucuauucacgggaaguu

SEQ ID NO: 27586 - RNA, 22 nt, Artificial Sequence
  Synthetic
augggucuauucacgggaaguu

SEQ ID NO: 27587 - RNA, 23 nt, Artificial Sequence
  Synthetic
aaugggucuauucacgggaaguu

SEQ ID NO: 27588 - RNA, 24 nt, Artificial Sequence
  Synthetic
caaugggucuauucacgggaaguu

SEQ ID NO: 27589 - RNA, 18 nt, Artificial Sequence
  Synthetic
agaaaggccuuguaaguu

SEQ ID NO: 27590 - RNA, 19 nt, Artificial Sequence
  Synthetic
gagaaaggccuuguaaguu

SEQ ID NO: 27591 - RNA, 20 nt, Artificial Sequence
  Synthetic
agagaaaggccuuguaaguu

SEQ ID NO: 27592 - RNA, 21 nt, Artificial Sequence
  Synthetic
cagagaaaggccuuguaaguu

SEQ ID NO: 27593 - RNA, 22 nt, Artificial Sequence
  Synthetic
acagagaaaggccuuguaaguu

SEQ ID NO: 27594 - RNA, 23 nt, Artificial Sequence
  Synthetic
uacagagaaaggccuuguaaguu

SEQ ID NO: 27595 - RNA, 24 nt, Artificial Sequence
  Synthetic
uuacagagaaaggccuuguaaguu

SEQ ID NO: 27596 - RNA, 18 nt, Artificial Sequence
  Synthetic
cccgcgcaggauccaguu

SEQ ID NO: 27597 - RNA, 19 nt, Artificial Sequence
  Synthetic
ucccgcgcaggauccaguu

SEQ ID NO: 27598 - RNA, 20 nt, Artificial Sequence
  Synthetic
gucccgcgcaggauccaguu

SEQ ID NO: 27599 - RNA, 18 nt, Artificial Sequence
  Synthetic
  misc_feature (9)..(9): n is a, c, g, or u
uguaaauanugucuaguu

SEQ ID NO: 27600 - RNA, 19 nt, Artificial Sequence
  Synthetic
  misc_feature (10)..(10): n is a, c, g, or u
auguaaauanugucuaguu

SEQ ID NO: 27601 - RNA, 20 nt, Artificial Sequence
  Synthetic
  misc_feature (11)..(11): n is a, c, g, or u
uauguaaauanugucuaguu

SEQ ID NO: 27602 - RNA, 21 nt, Artificial Sequence
  Synthetic
  misc_feature (12)..(12): n is a, c, g, or u
guauguaaauanugucuaguu

SEQ ID NO: 27603 - RNA, 22 nt, Artificial Sequence
  Synthetic
  misc_feature (13)..(13): n is a, c, g, or u
aguauguaaauanugucuaguu

SEQ ID NO: 27604 - RNA, 23 nt, Artificial Sequence
  Synthetic
  misc_feature (14)..(14): n is a, c, g, or u
aaguauguaaauanugucuaguu

SEQ ID NO: 27605 - RNA, 24 nt, Artificial Sequence
  Synthetic
  misc_feature (15)..(15): n is a, c, g, or u
aaaguauguaaauanugucuaguu

SEQ ID NO: 27606 - RNA, 18 nt, Artificial Sequence
  Synthetic
augccccuucucgccguu

SEQ ID NO: 27607 - RNA, 19 nt, Artificial Sequence
  Synthetic
caugccccuucucgccguu

SEQ ID NO: 27608 - RNA, 20 nt, Artificial Sequence
  Synthetic
ccaugccccuucucgccguu

SEQ ID NO: 27609 - RNA, 21 nt, Artificial Sequence
  Synthetic
cccaugccccuucucgccguu

SEQ ID NO: 27610 - RNA, 22 nt, Artificial Sequence
  Synthetic
ucccaugccccuucucgccguu

SEQ ID NO: 27611 - RNA, 23 nt, Artificial Sequence
  Synthetic
gucccaugccccuucucgccguu

SEQ ID NO: 27612 - RNA, 24 nt, Artificial Sequence
  Synthetic
ugucccaugccccuucucgccguu

SEQ ID NO: 27613 - RNA, 18 nt, Artificial Sequence
  Synthetic
ggcaaaggccuggccguu

SEQ ID NO: 27614 - RNA, 19 nt, Artificial Sequence
  Synthetic
uggcaaaggccuggccguu

SEQ ID NO: 27615 - RNA, 20 nt, Artificial Sequence
  Synthetic
uuggcaaaggccuggccguu

SEQ ID NO: 27616 - RNA, 21 nt, Artificial Sequence
  Synthetic
cuuggcaaaggccuggccguu

SEQ ID NO: 27617 - RNA, 22 nt, Artificial Sequence
  Synthetic
acuuggcaaaggccuggccguu

SEQ ID NO: 27618 - RNA, 23 nt, Artificial Sequence
  Synthetic
cacuuggcaaaggccuggccguu

SEQ ID NO: 27619 - RNA, 24 nt, Artificial Sequence
  Synthetic
acacuuggcaaaggccuggccguu

SEQ ID NO: 27620 - RNA, 18 nt, Artificial Sequence
  Synthetic
  misc_feature (14)..(14): n is a, c, g, or u
aaagacccacaauncguu

SEQ ID NO: 27621 - RNA, 19 nt, Artificial Sequence
  Synthetic
  misc_feature (15)..(15): n is a, c, g, or u
aaaagacccacaauncguu

SEQ ID NO: 27622 - RNA, 20 nt, Artificial Sequence
  Synthetic
  misc_feature (16)..(16): n is a, c, g, or u
caaaagacccacaauncguu

SEQ ID NO: 27623 - RNA, 21 nt, Artificial Sequence
  Synthetic
  misc_feature (17)..(17): n is a, c, g, or u
ccaaaagacccacaauncguu

SEQ ID NO: 27624 - RNA, 22 nt, Artificial Sequence
  Synthetic
  misc_feature (18)..(18): n is a, c, g, or u
cccaaaagacccacaauncguu

SEQ ID NO: 27625 - RNA, 23 nt, Artificial Sequence
  Synthetic
  misc_feature (19)..(19): n is a, c, g, or u
gcccaaaagacccacaauncguu

SEQ ID NO: 27626 - RNA, 24 nt, Artificial Sequence
  Synthetic
  misc_feature (20)..(20): n is a, c, g, or u
agcccaaaagacccacaauncguu

SEQ ID NO: 27627 - RNA, 18 nt, Artificial Sequence
  Synthetic
guccucuuauguaagguu

SEQ ID NO: 27628 - RNA, 19 nt, Artificial Sequence
  Synthetic
aguccucuuauguaagguu

SEQ ID NO: 27629 - RNA, 20 nt, Artificial Sequence
  Synthetic
gaguccucuuauguaagguu

SEQ ID NO: 27630 - RNA, 21 nt, Artificial Sequence
  Synthetic
agaguccucuuauguaagguu

SEQ ID NO: 27631 - RNA, 22 nt, Artificial Sequence
  Synthetic
aagaguccucuuauguaagguu

SEQ ID NO: 27632 - RNA, 23 nt, Artificial Sequence
  Synthetic
caagaguccucuuauguaagguu

SEQ ID NO: 27633 - RNA, 24 nt, Artificial Sequence
  Synthetic
ccaagaguccucuuauguaagguu

SEQ ID NO: 27634 - RNA, 18 nt, Artificial Sequence
  Synthetic
ggaucugguggcgagguu

SEQ ID NO: 27635 - RNA, 19 nt, Artificial Sequence
  Synthetic
uggaucugguggcgagguu

SEQ ID NO: 27636 - RNA, 20 nt, Artificial Sequence
  Synthetic
guggaucugguggcgagguu

SEQ ID NO: 27637 - RNA, 21 nt, Artificial Sequence
  Synthetic
gguggaucugguggcgagguu

SEQ ID NO: 27638 - RNA, 22 nt, Artificial Sequence
  Synthetic
agguggaucugguggcgagguu

SEQ ID NO: 27639 - RNA, 23 nt, Artificial Sequence
  Synthetic
gagguggaucugguggcgagguu

SEQ ID NO: 27640 - RNA, 24 nt, Artificial Sequence
  Synthetic
ggagguggaucugguggcgagguu

SEQ ID NO: 27641 - RNA, 18 nt, Artificial Sequence
  Synthetic
guuggaggacaggagguu

SEQ ID NO: 27642 - RNA, 19 nt, Artificial Sequence
  Synthetic
aguuggaggacaggagguu

SEQ ID NO: 27643 - RNA, 20 nt, Artificial Sequence
  Synthetic
aaguuggaggacaggagguu

SEQ ID NO: 27644 - RNA, 21 nt, Artificial Sequence
  Synthetic
caaguuggaggacaggagguu

SEQ ID NO: 27645 - RNA, 22 nt, Artificial Sequence
  Synthetic
acaaguuggaggacaggagguu

SEQ ID NO: 27646 - RNA, 23 nt, Artificial Sequence
  Synthetic
gacaaguuggaggacaggagguu

SEQ ID NO: 27647 - RNA, 24 nt, Artificial Sequence
  Synthetic
ggacaaguuggaggacaggagguu

SEQ ID NO: 27648 - RNA, 18 nt, Artificial Sequence
  Synthetic
uuuuaugcacaauauguu

SEQ ID NO: 27649 - RNA, 19 nt, Artificial Sequence
  Synthetic
auuuuaugcacaauauguu

SEQ ID NO: 27650 - RNA, 20 nt, Artificial Sequence
  Synthetic
gauuuuaugcacaauauguu

SEQ ID NO: 27651 - RNA, 21 nt, Artificial Sequence
  Synthetic
ugauuuuaugcacaauauguu

SEQ ID NO: 27652 - RNA, 22 nt, Artificial Sequence
  Synthetic
uugauuuuaugcacaauauguu

SEQ ID NO: 27653 - RNA, 23 nt, Artificial Sequence
  Synthetic
uuugauuuuaugcacaauauguu

SEQ ID NO: 27654 - RNA, 24 nt, Artificial Sequence
  Synthetic
cuuugauuuuaugcacaauauguu

SEQ ID NO: 27655 - RNA, 18 nt, Artificial Sequence
  Synthetic
guagucuccggaaguguu

SEQ ID NO: 27656 - RNA, 19 nt, Artificial Sequence
  Synthetic
aguagucuccggaaguguu

SEQ ID NO: 27657 - RNA, 20 nt, Artificial Sequence
  Synthetic
caguagucuccggaaguguu

SEQ ID NO: 27658 - RNA, 21 nt, Artificial Sequence
  Synthetic
acaguagucuccggaaguguu

SEQ ID NO: 27659 - RNA, 22 nt, Artificial Sequence
  Synthetic
aacaguagucuccggaaguguu

SEQ ID NO: 27660 - RNA, 23 nt, Artificial Sequence
  Synthetic
caacaguagucuccggaaguguu

SEQ ID NO: 27661 - RNA, 24 nt, Artificial Sequence
  Synthetic
acaacaguagucuccggaaguguu

SEQ ID NO: 27662 - RNA, 18 nt, Artificial Sequence
  Synthetic
ggagcaggguucuguguu

SEQ ID NO: 27663 - RNA, 19 nt, Artificial Sequence
  Synthetic
cggagcaggguucuguguu

SEQ ID NO: 27664 - RNA, 20 nt, Artificial Sequence
  Synthetic
ucggagcaggguucuguguu

SEQ ID NO: 27665 - RNA, 21 nt, Artificial Sequence
  Synthetic
gucggagcaggguucuguguu

SEQ ID NO: 27666 - RNA, 22 nt, Artificial Sequence
  Synthetic
agucggagcaggguucuguguu

SEQ ID NO: 27667 - RNA, 23 nt, Artificial Sequence
  Synthetic
uagucggagcaggguucuguguu

SEQ ID NO: 27668 - RNA, 24 nt, Artificial Sequence
  Synthetic
auagucggagcaggguucuguguu

SEQ ID NO: 27669 - RNA, 18 nt, Artificial Sequence
  Synthetic
  misc_feature (10)..(10): n is a, c, g, or u
aaagguucanguauuguu

SEQ ID NO: 27670 - RNA, 19 nt, Artificial Sequence
  Synthetic
  misc_feature (11)..(11): n is a, c, g, or u
uaaagguucanguauuguu

SEQ ID NO: 27671 - RNA, 20 nt, Artificial Sequence
  Synthetic
  misc_feature (12)..(12): n is a, c, g, or u
guaaagguucanguauuguu

SEQ ID NO: 27672 - RNA, 21 nt, Artificial Sequence
  Synthetic
  misc_feature (13)..(13): n is a, c, g, or u
gguaaagguucanguauuguu

SEQ ID NO: 27673 - RNA, 22 nt, Artificial Sequence
  Synthetic
  misc_feature (14)..(14): n is a, c, g, or u
ggguaaagguucanguauuguu

SEQ ID NO: 27674 - RNA, 23 nt, Artificial Sequence
  Synthetic
  misc_feature (15)..(15): n is a, c, g, or u
gggguaaagguucanguauuguu

SEQ ID NO: 27675 - RNA, 24 nt, Artificial Sequence
  Synthetic
  misc_feature (16)..(16): n is a, c, g, or u
cgggguaaagguucanguauuguu

SEQ ID NO: 27676 - RNA, 18 nt, Artificial Sequence
  Synthetic
caugcuguagcucuuguu

SEQ ID NO: 27677 - RNA, 19 nt, Artificial Sequence
  Synthetic
ccaugcuguagcucuuguu

SEQ ID NO: 27678 - RNA, 20 nt, Artificial Sequence
  Synthetic
cccaugcuguagcucuuguu

SEQ ID NO: 27679 - RNA, 21 nt, Artificial Sequence
  Synthetic
ucccaugcuguagcucuuguu

SEQ ID NO: 27680 - RNA, 22 nt, Artificial Sequence
  Synthetic
cucccaugcuguagcucuuguu

SEQ ID NO: 27681 - RNA, 23 nt, Artificial Sequence
  Synthetic
gcucccaugcuguagcucuuguu

SEQ ID NO: 27682 - RNA, 24 nt, Artificial Sequence
  Synthetic
ugcucccaugcuguagcucuuguu

SEQ ID NO: 27683 - RNA, 18 nt, Artificial Sequence
  Synthetic
cucuuauguaagguuguu

SEQ ID NO: 27684 - RNA, 19 nt, Artificial Sequence
  Synthetic
ccucuuauguaagguuguu

SEQ ID NO: 27685 - RNA, 20 nt, Artificial Sequence
  Synthetic
uccucuuauguaagguuguu

SEQ ID NO: 27686 - RNA, 21 nt, Artificial Sequence
  Synthetic
guccucuuauguaagguuguu

SEQ ID NO: 27687 - RNA, 22 nt, Artificial Sequence
  Synthetic
aguccucuuauguaagguuguu

SEQ ID NO: 27688 - RNA, 23 nt, Artificial Sequence
  Synthetic
gaguccucuuauguaagguuguu

SEQ ID NO: 27689 - RNA, 24 nt, Artificial Sequence
  Synthetic
agaguccucuuauguaagguuguu

SEQ ID NO: 27690 - RNA, 18 nt, Artificial Sequence
  Synthetic
auccaaagggaaguauuu

SEQ ID NO: 27691 - RNA, 19 nt, Artificial Sequence
  Synthetic
uauccaaagggaaguauuu

SEQ ID NO: 27692 - RNA, 20 nt, Artificial Sequence
  Synthetic
uuauccaaagggaaguauuu

SEQ ID NO: 27693 - RNA, 21 nt, Artificial Sequence
  Synthetic
uuuauccaaagggaaguauuu

SEQ ID NO: 27694 - RNA, 22 nt, Artificial Sequence
  Synthetic
cuuuauccaaagggaaguauuu

SEQ ID NO: 27695 - RNA, 23 nt, Artificial Sequence
  Synthetic
ccuuuauccaaagggaaguauuu

SEQ ID NO: 27696 - RNA, 24 nt, Artificial Sequence
  Synthetic
accuuuauccaaagggaaguauuu

SEQ ID NO: 27697 - RNA, 18 nt, Artificial Sequence
  Synthetic
ccacucccauagguauuu

SEQ ID NO: 27698 - RNA, 19 nt, Artificial Sequence
  Synthetic
cccacucccauagguauuu

SEQ ID NO: 27699 - RNA, 20 nt, Artificial Sequence
  Synthetic
gcccacucccauagguauuu

SEQ ID NO: 27700 - RNA, 21 nt, Artificial Sequence
  Synthetic
ggcccacucccauagguauuu

SEQ ID NO: 27701 - RNA, 22 nt, Artificial Sequence
  Synthetic
aggcccacucccauagguauuu

SEQ ID NO: 27702 - RNA, 23 nt, Artificial Sequence
  Synthetic
gaggcccacucccauagguauuu

SEQ ID NO: 27703 - RNA, 24 nt, Artificial Sequence
  Synthetic
ugaggcccacucccauagguauuu

SEQ ID NO: 27704 - RNA, 18 nt, Artificial Sequence
  Synthetic
agaagcuccaaauucuuu

SEQ ID NO: 27705 - RNA, 19 nt, Artificial Sequence
  Synthetic
cagaagcuccaaauucuuu

SEQ ID NO: 27706 - RNA, 20 nt, Artificial Sequence
  Synthetic
acagaagcuccaaauucuuu

SEQ ID NO: 27707 - RNA, 21 nt, Artificial Sequence
  Synthetic
cacagaagcuccaaauucuuu

SEQ ID NO: 27708 - RNA, 22 nt, Artificial Sequence
  Synthetic
ccacagaagcuccaaauucuuu

SEQ ID NO: 27709 - RNA, 23 nt, Artificial Sequence
  Synthetic
uccacagaagcuccaaauucuuu

SEQ ID NO: 27710 - RNA, 24 nt, Artificial Sequence
  Synthetic
cuccacagaagcuccaaauucuuu

SEQ ID NO: 27711 - RNA, 18 nt, Artificial Sequence
  Synthetic
ucuauucacgggaaguuu

SEQ ID NO: 27712 - RNA, 19 nt, Artificial Sequence
  Synthetic
gucuauucacgggaaguuu

SEQ ID NO: 27713 - RNA, 20 nt, Artificial Sequence
  Synthetic
ggucuauucacgggaaguuu

SEQ ID NO: 27714 - RNA, 18 nt, Artificial Sequence
  Synthetic
caagaguggugcagguuu

SEQ ID NO: 27715 - RNA, 19 nt, Artificial Sequence
  Synthetic
gcaagaguggugcagguuu

SEQ ID NO: 27716 - RNA, 20 nt, Artificial Sequence
  Synthetic
agcaagaguggugcagguuu

SEQ ID NO: 27717 - RNA, 21 nt, Artificial Sequence
  Synthetic
gagcaagaguggugcagguuu

SEQ ID NO: 27718 - RNA, 22 nt, Artificial Sequence
  Synthetic
ugagcaagaguggugcagguuu

SEQ ID NO: 27719 - RNA, 23 nt, Artificial Sequence
  Synthetic
uugagcaagaguggugcagguuu

SEQ ID NO: 27720 - RNA, 24 nt, Artificial Sequence
  Synthetic
cuugagcaagaguggugcagguuu

SEQ ID NO: 27721 - RNA, 18 nt, Artificial Sequence
  Synthetic
gagcaggguucuguguuu

SEQ ID NO: 27722 - RNA, 19 nt, Artificial Sequence
  Synthetic
ggagcaggguucuguguuu

SEQ ID NO: 27723 - RNA, 20 nt, Artificial Sequence
  Synthetic
cggagcaggguucuguguuu

SEQ ID NO: 27724 - RNA, 21 nt, Artificial Sequence
  Synthetic
ucggagcaggguucuguguuu

SEQ ID NO: 27725 - RNA, 22 nt, Artificial Sequence
  Synthetic
gucggagcaggguucuguguuu

SEQ ID NO: 27726 - RNA, 23 nt, Artificial Sequence
  Synthetic
agucggagcaggguucuguguuu

SEQ ID NO: 27727 - RNA, 24 nt, Artificial Sequence
  Synthetic
uagucggagcaggguucuguguuu

SEQ ID NO: 27728 - RNA, 18 nt, Artificial Sequence
  Synthetic
  misc_feature (9)..(9): n is a, c, g, or u
aagguucanguauuguuu

SEQ ID NO: 27729 - RNA, 19 nt, Artificial Sequence
  Synthetic
  misc_feature (10)..(10): n is a, c, g, or u
aaagguucanguauuguuu

SEQ ID NO: 27730 - RNA, 20 nt, Artificial Sequence
  Synthetic
  misc_feature (11)..(11): n is a, c, g, or u
uaaagguucanguauuguuu

SEQ ID NO: 27731 - RNA, 21 nt, Artificial Sequence
  Synthetic
  misc_feature (12)..(12): n is a, c, g, or u
guaaagguucanguauuguuu

SEQ ID NO: 27732 - RNA, 22 nt, Artificial Sequence
  Synthetic
  misc_feature (13)..(13): n is a, c, g, or u
gguaaagguucanguauuguuu

SEQ ID NO: 27733 - RNA, 23 nt, Artificial Sequence
  Synthetic
  misc_feature (14)..(14): n is a, c, g, or u
ggguaaagguucanguauuguuu

SEQ ID NO: 27734 - RNA, 24 nt, Artificial Sequence
  Synthetic
  misc_feature (15)..(15): n is a, c, g, or u
gggguaaagguucanguauuguuu

SEQ ID NO: 27735 - RNA, 18 nt, Artificial Sequence
  Synthetic
cacucccauagguauuuu

SEQ ID NO: 27736 - RNA, 19 nt, Artificial Sequence
  Synthetic
ccacucccauagguauuuu

SEQ ID NO: 27737 - RNA, 20 nt, Artificial Sequence
  Synthetic
cccacucccauagguauuuu

SEQ ID NO: 27738 - RNA, 21 nt, Artificial Sequence
  Synthetic
gcccacucccauagguauuuu

SEQ ID NO: 27739 - RNA, 22 nt, Artificial Sequence
  Synthetic
ggcccacucccauagguauuuu

SEQ ID NO: 27740 - RNA, 23 nt, Artificial Sequence
  Synthetic
aggcccacucccauagguauuuu

SEQ ID NO: 27741 - RNA, 24 nt, Artificial Sequence
  Synthetic
gaggcccacucccauagguauuuu

SEQ ID NO: 27742 - RNA, 18 nt, Artificial Sequence
  Synthetic
aagaguggugcagguuuu

SEQ ID NO: 27743 - RNA, 19 nt, Artificial Sequence
  Synthetic
caagaguggugcagguuuu

SEQ ID NO: 27744 - RNA, 20 nt, Artificial Sequence
  Synthetic
gcaagaguggugcagguuuu

SEQ ID NO: 27745 - RNA, 21 nt, Artificial Sequence
  Synthetic
agcaagaguggugcagguuuu

SEQ ID NO: 27746 - RNA, 22 nt, Artificial Sequence
  Synthetic
gagcaagaguggugcagguuuu

SEQ ID NO: 27747 - RNA, 23 nt, Artificial Sequence
  Synthetic
ugagcaagaguggugcagguuuu

SEQ ID NO: 27748 - RNA, 24 nt, Artificial Sequence
  Synthetic
uugagcaagaguggugcagguuuu

SEQ ID NO: 27749 - RNA, 18 nt, Artificial Sequence
  Synthetic
gguauugugaggauuuuu

SEQ ID NO: 27750 - RNA, 19 nt, Artificial Sequence
  Synthetic
ugguauugugaggauuuuu

SEQ ID NO: 27751 - RNA, 20 nt, Artificial Sequence
  Synthetic
  misc_feature (1)..(1): n is a, c, g, or u
nugguauugugaggauuuuu

SEQ ID NO: 27752 - RNA, 21 nt, Artificial Sequence
  Synthetic
  misc_feature (2)..(2): n is a, c, g, or u
unugguauugugaggauuuuu

SEQ ID NO: 27753 - RNA, 22 nt, Artificial Sequence
  Synthetic
  misc_feature (3)..(3): n is a, c, g, or u
cunugguauugugaggauuuuu

SEQ ID NO: 27754 - RNA, 23 nt, Artificial Sequence
  Synthetic
  misc_feature (4)..(4): n is a, c, g, or u
ucunugguauugugaggauuuuu

SEQ ID NO: 27755 - RNA, 24 nt, Artificial Sequence
  Synthetic
  misc_feature (5)..(5): n is a, c, g, or u
cucunugguauugugaggauuuuu

SEQ ID NO: 27756 - RNA, 18 nt, Artificial Sequence
  Synthetic
  misc_feature (7)..(7): n is a, c, g, or u
caagaunugauacaaaaa

SEQ ID NO: 27757 - RNA, 19 nt, Artificial Sequence
  Synthetic
  misc_feature (8)..(8): n is a, c, g, or u
ucaagaunugauacaaaaa

SEQ ID NO: 27758 - RNA, 20 nt, Artificial Sequence
  Synthetic
  misc_feature (9)..(9): n is a, c, g, or u
aucaagaunugauacaaaaa

SEQ ID NO: 27759 - RNA, 21 nt, Artificial Sequence
  Synthetic
  misc_feature (10)..(10): n is a, c, g, or u
caucaagaunugauacaaaaa

SEQ ID NO: 27760 - RNA, 22 nt, Artificial Sequence
  Synthetic
  misc_feature (11)..(11): n is a, c, g, or u
gcaucaagaunugauacaaaaa

SEQ ID NO: 27761 - RNA, 23 nt, Artificial Sequence
  Synthetic
  misc_feature (12)..(12): n is a, c, g, or u
ugcaucaagaunugauacaaaaa

SEQ ID NO: 27762 - RNA, 24 nt, Artificial Sequence
  Synthetic
  misc_feature (13)..(13): n is a, c, g, or u
uugcaucaagaunugauacaaaaa

SEQ ID NO: 27763 - RNA, 18 nt, Artificial Sequence
  Synthetic
  misc_feature (5)..(5): n is a, c, g, or u
  misc_feature (11)..(11): n is a, c, g, or u
cuaanaugggncuaaaaa

SEQ ID NO: 27764 - RNA, 19 nt, Artificial Sequence
  Synthetic
  misc_feature (6)..(6): n is a, c, g, or u
  misc_feature (12)..(12): n is a, c, g, or u
acuaanaugggncuaaaaa

SEQ ID NO: 27765 - RNA, 20 nt, Artificial Sequence
  Synthetic
  misc_feature (7)..(7): n is a, c, g, or u
  misc_feature (13)..(13): n is a, c, g, or u
uacuaanaugggncuaaaaa

SEQ ID NO: 27766 - RNA, 21 nt, Artificial Sequence
  Synthetic
  misc_feature (8)..(8): n is a, c, g, or u
  misc_feature (14)..(14): n is a, c, g, or u
auacuaanaugggncuaaaaa

SEQ ID NO: 27767 - RNA, 22 nt, Artificial Sequence
  Synthetic
  misc_feature (9)..(9): n is a, c, g, or u
  misc_feature (15)..(15): n is a, c, g, or u
aauacuaanaugggncuaaaaa

SEQ ID NO: 27768 - RNA, 23 nt, Artificial Sequence
  Synthetic
  misc_feature (10)..(10): n is a, c, g, or u
  misc_feature (16)..(16): n is a, c, g, or u
caauacuaanaugggncuaaaaa

SEQ ID NO: 27769 - RNA, 24 nt, Artificial Sequence
  Synthetic
  misc_feature (11)..(11): n is a, c, g, or u
  misc_feature (17)..(17): n is a, c, g, or u
ucaauacuaanaugggncuaaaaa

SEQ ID NO: 27770 - RNA, 18 nt, Artificial Sequence
  Synthetic
  misc_feature (14)..(14): n is a, c, g, or u
uuaaucauuacuunaaaa

SEQ ID NO: 27771 - RNA, 19 nt, Artificial Sequence
  Synthetic
  misc_feature (15)..(15): n is a, c, g, or u
guuaaucauuacuunaaaa

SEQ ID NO: 27772 - RNA, 20 nt, Artificial Sequence
  Synthetic
  misc_feature (16)..(16): n is a, c, g, or u
gguuaaucauuacuunaaaa

SEQ ID NO: 27773 - RNA, 21 nt, Artificial Sequence
  Synthetic
  misc_feature (17)..(17): n is a, c, g, or u
ugguuaaucauuacuunaaaa

SEQ ID NO: 27774 - RNA, 22 nt, Artificial Sequence
  Synthetic
  misc_feature (18)..(18): n is a, c, g, or u
gugguuaaucauuacuunaaaa

SEQ ID NO: 27775 - RNA, 23 nt, Artificial Sequence
  Synthetic
  misc_feature (19)..(19): n is a, c, g, or u
ugugguuaaucauuacuunaaaa

SEQ ID NO: 27776 - RNA, 24 nt, Artificial Sequence
  Synthetic
  misc_feature (20)..(20): n is a, c, g, or u
augugguuaaucauuacuunaaaa

SEQ ID NO: 27777 - RNA, 18 nt, Artificial Sequence
  Synthetic
aacauauugugcauaaaa

SEQ ID NO: 27778 - RNA, 19 nt, Artificial Sequence
  Synthetic
gaacauauugugcauaaaa

SEQ ID NO: 27779 - RNA, 20 nt, Artificial Sequence
  Synthetic
ggaacauauugugcauaaaa

SEQ ID NO: 27780 - RNA, 21 nt, Artificial Sequence
  Synthetic
aggaacauauugugcauaaaa

SEQ ID NO: 27781 - RNA, 22 nt, Artificial Sequence
  Synthetic
caggaacauauugugcauaaaa

SEQ ID NO: 27782 - RNA, 23 nt, Artificial Sequence
  Synthetic
ucaggaacauauugugcauaaaa

SEQ ID NO: 27783 - RNA, 24 nt, Artificial Sequence
  Synthetic
cucaggaacauauugugcauaaaa

SEQ ID NO: 27784 - RNA, 18 nt, Artificial Sequence
  Synthetic
  misc_feature (6)..(6): n is a, c, g, or u
  misc_feature (12)..(12): n is a, c, g, or u
acuaanaugggncuaaaa

SEQ ID NO: 27785 - RNA, 19 nt, Artificial Sequence
  Synthetic
  misc_feature (7)..(7): n is a, c, g, or u
  misc_feature (13)..(13): n is a, c, g, or u
uacuaanaugggncuaaaa

SEQ ID NO: 27786 - RNA, 20 nt, Artificial Sequence
  Synthetic
  misc_feature (8)..(8): n is a, c, g, or u
  misc_feature (14)..(14): n is a, c, g, or u
auacuaanaugggncuaaaa

SEQ ID NO: 27787 - RNA, 21 nt, Artificial Sequence
  Synthetic
  misc_feature (9)..(9): n is a, c, g, or u
  misc_feature (15)..(15): n is a, c, g, or u
aauacuaanaugggncuaaaa

SEQ ID NO: 27788 - RNA, 22 nt, Artificial Sequence
  Synthetic
  misc_feature (10)..(10): n is a, c, g, or u
  misc_feature (16)..(16): n is a, c, g, or u
caauacuaanaugggncuaaaa

SEQ ID NO: 27789 - RNA, 23 nt, Artificial Sequence
  Synthetic
  misc_feature (11)..(11): n is a, c, g, or u
  misc_feature (17)..(17): n is a, c, g, or u
ucaauacuaanaugggncuaaaa

SEQ ID NO: 27790 - RNA, 24 nt, Artificial Sequence
  Synthetic
  misc_feature (12)..(12): n is a, c, g, or u
  misc_feature (18)..(18): n is a, c, g, or u
gucaauacuaanaugggncuaaaa

SEQ ID NO: 27791 - RNA, 18 nt, Artificial Sequence
  Synthetic
uugggacuucaacacaaa

SEQ ID NO: 27792 - RNA, 19 nt, Artificial Sequence
  Synthetic
auugggacuucaacacaaa

SEQ ID NO: 27793 - RNA, 20 nt, Artificial Sequence
  Synthetic
gauugggacuucaacacaaa

SEQ ID NO: 27794 - RNA, 21 nt, Artificial Sequence
  Synthetic
cgauugggacuucaacacaaa

SEQ ID NO: 27795 - RNA, 22 nt, Artificial Sequence
  Synthetic
ccgauugggacuucaacacaaa

SEQ ID NO: 27796 - RNA, 23 nt, Artificial Sequence
  Synthetic
cccgauugggacuucaacacaaa

SEQ ID NO: 27797 - RNA, 24 nt, Artificial Sequence
  Synthetic
ucccgauugggacuucaacacaaa

SEQ ID NO: 27798 - RNA, 18 nt, Artificial Sequence
  Synthetic
ucggaggucaggaagaaa

SEQ ID NO: 27799 - RNA, 19 nt, Artificial Sequence
  Synthetic
aucggaggucaggaagaaa

SEQ ID NO: 27800 - RNA, 20 nt, Artificial Sequence
  Synthetic
aaucggaggucaggaagaaa

SEQ ID NO: 27801 - RNA, 21 nt, Artificial Sequence
  Synthetic
caaucggaggucaggaagaaa

SEQ ID NO: 27802 - RNA, 22 nt, Artificial Sequence
  Synthetic
ccaaucggaggucaggaagaaa

SEQ ID NO: 27803 - RNA, 23 nt, Artificial Sequence
  Synthetic
accaaucggaggucaggaagaaa

SEQ ID NO: 27804 - RNA, 24 nt, Artificial Sequence
  Synthetic
caccaaucggaggucaggaagaaa

SEQ ID NO: 27805 - RNA, 18 nt, Artificial Sequence
  Synthetic
guggcuccaguucagaaa

SEQ ID NO: 27806 - RNA, 19 nt, Artificial Sequence
  Synthetic
gguggcuccaguucagaaa

SEQ ID NO: 27807 - RNA, 20 nt, Artificial Sequence
  Synthetic
ugguggcuccaguucagaaa

SEQ ID NO: 27808 - RNA, 21 nt, Artificial Sequence
  Synthetic
cugguggcuccaguucagaaa

SEQ ID NO: 27809 - RNA, 22 nt, Artificial Sequence
  Synthetic
gcugguggcuccaguucagaaa

SEQ ID NO: 27810 - RNA, 23 nt, Artificial Sequence
  Synthetic
ugcugguggcuccaguucagaaa

SEQ ID NO: 27811 - RNA, 24 nt, Artificial Sequence
  Synthetic
cugcugguggcuccaguucagaaa

SEQ ID NO: 27812 - RNA, 18 nt, Artificial Sequence
  Synthetic
  misc_feature (10)..(10): n is a, c, g, or u
cacucacuanaaaugaaa

SEQ ID NO: 27813 - RNA, 19 nt, Artificial Sequence
  Synthetic
  misc_feature (11)..(11): n is a, c, g, or u
ccacucacuanaaaugaaa

SEQ ID NO: 27814 - RNA, 20 nt, Artificial Sequence
  Synthetic
  misc_feature (12)..(12): n is a, c, g, or u
cccacucacuanaaaugaaa

SEQ ID NO: 27815 - RNA, 21 nt, Artificial Sequence
  Synthetic
  misc_feature (13)..(13): n is a, c, g, or u
gcccacucacuanaaaugaaa

SEQ ID NO: 27816 - RNA, 22 nt, Artificial Sequence
  Synthetic
  misc_feature (14)..(14): n is a, c, g, or u
ggcccacucacuanaaaugaaa

SEQ ID NO: 27817 - RNA, 23 nt, Artificial Sequence
  Synthetic
  misc_feature (1)..(1): n is a, c, g, or u
  misc_feature (15)..(15): n is a, c, g, or u
nggcccacucacuanaaaugaaa

SEQ ID NO: 27818 - RNA, 24 nt, Artificial Sequence
  Synthetic
  misc_feature (2)..(2): n is a, c, g, or u
  misc_feature (16)..(16): n is a, c, g, or u
unggcccacucacuanaaaugaaa

SEQ ID NO: 27819 - RNA, 18 nt, Artificial Sequence
  Synthetic
  misc_feature (1)..(1): n is a, c, g, or u
  misc_feature (15)..(15): n is a, c, g, or u
nggcccacucacuanaaa

SEQ ID NO: 27820 - RNA, 19 nt, Artificial Sequence
  Synthetic
  misc_feature (2)..(2): n is a, c, g, or u
  misc_feature (16)..(16): n is a, c, g, or u
unggcccacucacuanaaa

SEQ ID NO: 27821 - RNA, 20 nt, Artificial Sequence
  Synthetic
  misc_feature (3)..(3): n is a, c, g, or u
  misc_feature (17)..(17): n is a, c, g, or u
gunggcccacucacuanaaa

SEQ ID NO: 27822 - RNA, 21 nt, Artificial Sequence
  Synthetic
  misc_feature (4)..(4): n is a, c, g, or u
  misc_feature (18)..(18): n is a, c, g, or u
ugunggcccacucacuanaaa

SEQ ID NO: 27823 - RNA, 22 nt, Artificial Sequence
  Synthetic
  misc_feature (5)..(5): n is a, c, g, or u
  misc_feature (19)..(19): n is a, c, g, or u
uugunggcccacucacuanaaa

SEQ ID NO: 27824 - RNA, 23 nt, Artificial Sequence
  Synthetic
  misc_feature (6)..(6): n is a, c, g, or u
  misc_feature (20)..(20): n is a, c, g, or u
uuugunggcccacucacuanaaa

SEQ ID NO: 27825 - RNA, 24 nt, Artificial Sequence
  Synthetic
  misc_feature (7)..(7): n is a, c, g, or u
  misc_feature (21)..(21): n is a, c, g, or u
auuugunggcccacucacuanaaa

SEQ ID NO: 27826 - RNA, 18 nt, Artificial Sequence
  Synthetic
  misc_feature (15)..(15): n is a, c, g, or u
guuaaucauuacuunaaa

SEQ ID NO: 27827 - RNA, 19 nt, Artificial Sequence
  Synthetic
  misc_feature (16)..(16): n is a, c, g, or u
gguuaaucauuacuunaaa

SEQ ID NO: 27828 - RNA, 20 nt, Artificial Sequence
  Synthetic
  misc_feature (17)..(17): n is a, c, g, or u
ugguuaaucauuacuunaaa

SEQ ID NO: 27829 - RNA, 21 nt, Artificial Sequence
  Synthetic
  misc_feature (18)..(18): n is a, c, g, or u
gugguuaaucauuacuunaaa

SEQ ID NO: 27830 - RNA, 22 nt, Artificial Sequence
  Synthetic
  misc_feature (19)..(19): n is a, c, g, or u
ugugguuaaucauuacuunaaa

SEQ ID NO: 27831 - RNA, 23 nt, Artificial Sequence
  Synthetic
  misc_feature (20)..(20): n is a, c, g, or u
augugguuaaucauuacuunaaa

SEQ ID NO: 27832 - RNA, 24 nt, Artificial Sequence
  Synthetic
  misc_feature (21)..(21): n is a, c, g, or u
aaugugguuaaucauuacuunaaa

SEQ ID NO: 27833 - RNA, 18 nt, Artificial Sequence
  Synthetic
gaacauauugugcauaaa

SEQ ID NO: 27834 - RNA, 19 nt, Artificial Sequence
  Synthetic
ggaacauauugugcauaaa

SEQ ID NO: 27835 - RNA, 20 nt, Artificial Sequence
  Synthetic
aggaacauauugugcauaaa

SEQ ID NO: 27836 - RNA, 21 nt, Artificial Sequence
  Synthetic
caggaacauauugugcauaaa

SEQ ID NO: 27837 - RNA, 22 nt, Artificial Sequence
  Synthetic
ucaggaacauauugugcauaaa

SEQ ID NO: 27838 - RNA, 23 nt, Artificial Sequence
  Synthetic
cucaggaacauauugugcauaaa

SEQ ID NO: 27839 - RNA, 24 nt, Artificial Sequence
  Synthetic
ccucaggaacauauugugcauaaa

SEQ ID NO: 27840 - RNA, 18 nt, Artificial Sequence
  Synthetic
cauuugaacacagcuaaa

SEQ ID NO: 27841 - RNA, 19 nt, Artificial Sequence
  Synthetic
ccauuugaacacagcuaaa

SEQ ID NO: 27842 - RNA, 20 nt, Artificial Sequence
  Synthetic
uccauuugaacacagcuaaa

SEQ ID NO: 27843 - RNA, 21 nt, Artificial Sequence
  Synthetic
auccauuugaacacagcuaaa

SEQ ID NO: 27844 - RNA, 22 nt, Artificial Sequence
  Synthetic
cauccauuugaacacagcuaaa

SEQ ID NO: 27845 - RNA, 23 nt, Artificial Sequence
  Synthetic
gcauccauuugaacacagcuaaa

SEQ ID NO: 27846 - RNA, 24 nt, Artificial Sequence
  Synthetic
ggcauccauuugaacacagcuaaa

SEQ ID NO: 27847 - RNA, 18 nt, Artificial Sequence
  Synthetic
uuggccaauggcaaacaa

SEQ ID NO: 27848 - RNA, 19 nt, Artificial Sequence
  Synthetic
auuggccaauggcaaacaa

SEQ ID NO: 27849 - RNA, 20 nt, Artificial Sequence
  Synthetic
aauuggccaauggcaaacaa

SEQ ID NO: 27850 - RNA, 21 nt, Artificial Sequence
  Synthetic
caauuggccaauggcaaacaa

SEQ ID NO: 27851 - RNA, 22 nt, Artificial Sequence
  Synthetic
acaauuggccaauggcaaacaa

SEQ ID NO: 27852 - RNA, 23 nt, Artificial Sequence
  Synthetic
gacaauuggccaauggcaaacaa

SEQ ID NO: 27853 - RNA, 24 nt, Artificial Sequence
  Synthetic
ggacaauuggccaauggcaaacaa

SEQ ID NO: 27854 - RNA, 18 nt, Artificial Sequence
  Synthetic
auugggacuucaacacaa

SEQ ID NO: 27855 - RNA, 19 nt, Artificial Sequence
  Synthetic
gauugggacuucaacacaa

SEQ ID NO: 27856 - RNA, 20 nt, Artificial Sequence
  Synthetic
cgauugggacuucaacacaa

SEQ ID NO: 27857 - RNA, 18 nt, Artificial Sequence
  Synthetic
acuacuguuguuagacaa

SEQ ID NO: 27858 - RNA, 19 nt, Artificial Sequence
  Synthetic
gacuacuguuguuagacaa

SEQ ID NO: 27859 - RNA, 20 nt, Artificial Sequence
  Synthetic
agacuacuguuguuagacaa

SEQ ID NO: 27860 - RNA, 21 nt, Artificial Sequence
  Synthetic
gagacuacuguuguuagacaa

SEQ ID NO: 27861 - RNA, 22 nt, Artificial Sequence
  Synthetic
ggagacuacuguuguuagacaa

SEQ ID NO: 27862 - RNA, 23 nt, Artificial Sequence
  Synthetic
cggagacuacuguuguuagacaa

SEQ ID NO: 27863 - RNA, 24 nt, Artificial Sequence
  Synthetic
ccggagacuacuguuguuagacaa

SEQ ID NO: 27864 - RNA, 18 nt, Artificial Sequence
  Synthetic
accuccugcuuccaccaa

SEQ ID NO: 27865 - RNA, 19 nt, Artificial Sequence
  Synthetic
caccuccugcuuccaccaa

SEQ ID NO: 27866 - RNA, 20 nt, Artificial Sequence
  Synthetic
ccaccuccugcuuccaccaa

SEQ ID NO: 27867 - RNA, 21 nt, Artificial Sequence
  Synthetic
uccaccuccugcuuccaccaa

SEQ ID NO: 27868 - RNA, 22 nt, Artificial Sequence
  Synthetic
auccaccuccugcuuccaccaa

SEQ ID NO: 27869 - RNA, 23 nt, Artificial Sequence
  Synthetic
gauccaccuccugcuuccaccaa

SEQ ID NO: 27870 - RNA, 24 nt, Artificial Sequence
  Synthetic
agauccaccuccugcuuccaccaa

SEQ ID NO: 27871 - RNA, 18 nt, Artificial Sequence
  Synthetic
acaauuggccaauggcaa

SEQ ID NO: 27872 - RNA, 19 nt, Artificial Sequence
  Synthetic
gacaauuggccaauggcaa

SEQ ID NO: 27873 - RNA, 20 nt, Artificial Sequence
  Synthetic
ggacaauuggccaauggcaa

SEQ ID NO: 27874 - RNA, 21 nt, Artificial Sequence
  Synthetic
aggacaauuggccaauggcaa

SEQ ID NO: 27875 - RNA, 22 nt, Artificial Sequence
  Synthetic
aaggacaauuggccaauggcaa

SEQ ID NO: 27876 - RNA, 23 nt, Artificial Sequence
  Synthetic
caaggacaauuggccaauggcaa

SEQ ID NO: 27877 - RNA, 24 nt, Artificial Sequence
  Synthetic
acaaggacaauuggccaauggcaa

SEQ ID NO: 27878 - RNA, 18 nt, Artificial Sequence
  Synthetic
ucccgauugggacuucaa

SEQ ID NO: 27879 - RNA, 19 nt, Artificial Sequence
  Synthetic
gucccgauugggacuucaa

SEQ ID NO: 27880 - RNA, 20 nt, Artificial Sequence
  Synthetic
agucccgauugggacuucaa

SEQ ID NO: 27881 - RNA, 18 nt, Artificial Sequence
  Synthetic
auugacccuuauaaagaa

SEQ ID NO: 27882 - RNA, 19 nt, Artificial Sequence
  Synthetic
cauugacccuuauaaagaa

SEQ ID NO: 27883 - RNA, 20 nt, Artificial Sequence
  Synthetic
acauugacccuuauaaagaa

SEQ ID NO: 27884 - RNA, 21 nt, Artificial Sequence
  Synthetic
gacauugacccuuauaaagaa

SEQ ID NO: 27885 - RNA, 22 nt, Artificial Sequence
  Synthetic
ggacauugacccuuauaaagaa

SEQ ID NO: 27886 - RNA, 23 nt, Artificial Sequence
  Synthetic
uggacauugacccuuauaaagaa

SEQ ID NO: 27887 - RNA, 24 nt, Artificial Sequence
  Synthetic
auggacauugacccuuauaaagaa

SEQ ID NO: 27888 - RNA, 18 nt, Artificial Sequence
  Synthetic
gaggcagggccccuagaa

SEQ ID NO: 27889 - RNA, 19 nt, Artificial Sequence
  Synthetic
cgaggcagggccccuagaa

SEQ ID NO: 27890 - RNA, 20 nt, Artificial Sequence
  Synthetic
acgaggcagggccccuagaa

SEQ ID NO: 27891 - RNA, 21 nt, Artificial Sequence
  Synthetic
aacgaggcagggccccuagaa

SEQ ID NO: 27892 - RNA, 22 nt, Artificial Sequence
  Synthetic
caacgaggcagggccccuagaa

SEQ ID NO: 27893 - RNA, 23 nt, Artificial Sequence
  Synthetic
acaacgaggcagggccccuagaa

SEQ ID NO: 27894 - RNA, 24 nt, Artificial Sequence
  Synthetic
gacaacgaggcagggccccuagaa

SEQ ID NO: 27895 - RNA, 18 nt, Artificial Sequence
  Synthetic
ccaaucggaggucaggaa

SEQ ID NO: 27896 - RNA, 19 nt, Artificial Sequence
  Synthetic
accaaucggaggucaggaa

SEQ ID NO: 27897 - RNA, 20 nt, Artificial Sequence
  Synthetic
caccaaucggaggucaggaa

SEQ ID NO: 27898 - RNA, 21 nt, Artificial Sequence
  Synthetic
ccaccaaucggaggucaggaa

SEQ ID NO: 27899 - RNA, 22 nt, Artificial Sequence
  Synthetic
uccaccaaucggaggucaggaa

SEQ ID NO: 27900 - RNA, 23 nt, Artificial Sequence
  Synthetic
uuccaccaaucggaggucaggaa

SEQ ID NO: 27901 - RNA, 24 nt, Artificial Sequence
  Synthetic
cuuccaccaaucggaggucaggaa

SEQ ID NO: 27902 - RNA, 18 nt, Artificial Sequence
  Synthetic
ucaccauauuccugggaa

SEQ ID NO: 27903 - RNA, 19 nt, Artificial Sequence
  Synthetic
gucaccauauuccugggaa

SEQ ID NO: 27904 - RNA, 20 nt, Artificial Sequence
  Synthetic
ggucaccauauuccugggaa

SEQ ID NO: 27905 - RNA, 21 nt, Artificial Sequence
  Synthetic
gggucaccauauuccugggaa

SEQ ID NO: 27906 - RNA, 22 nt, Artificial Sequence
  Synthetic
ugggucaccauauuccugggaa

SEQ ID NO: 27907 - RNA, 23 nt, Artificial Sequence
  Synthetic
gugggucaccauauuccugggaa

SEQ ID NO: 27908 - RNA, 24 nt, Artificial Sequence
  Synthetic
ugugggucaccauauuccugggaa

SEQ ID NO: 27909 - RNA, 18 nt, Artificial Sequence
  Synthetic
uuuacauacuuuguggaa

SEQ ID NO: 27910 - RNA, 19 nt, Artificial Sequence
  Synthetic
auuuacauacuuuguggaa

SEQ ID NO: 27911 - RNA, 20 nt, Artificial Sequence
  Synthetic
uauuuacauacuuuguggaa

SEQ ID NO: 27912 - RNA, 21 nt, Artificial Sequence
  Synthetic
  misc_feature (1)..(1): n is a, c, g, or u
nuauuuacauacuuuguggaa

SEQ ID NO: 27913 - RNA, 22 nt, Artificial Sequence
  Synthetic
  misc_feature (2)..(2): n is a, c, g, or u
anuauuuacauacuuuguggaa

SEQ ID NO: 27914 - RNA, 23 nt, Artificial Sequence
  Synthetic
  misc_feature (3)..(3): n is a, c, g, or u
canuauuuacauacuuuguggaa

SEQ ID NO: 27915 - RNA, 24 nt, Artificial Sequence
  Synthetic
  misc_feature (4)..(4): n is a, c, g, or u
acanuauuuacauacuuuguggaa

SEQ ID NO: 27916 - RNA, 18 nt, Artificial Sequence
  Synthetic
  misc_feature (2)..(2): n is a, c, g, or u
cnugccuuacauuuggaa

SEQ ID NO: 27917 - RNA, 19 nt, Artificial Sequence
  Synthetic
  misc_feature (3)..(3): n is a, c, g, or u
ucnugccuuacauuuggaa

SEQ ID NO: 27918 - RNA, 20 nt, Artificial Sequence
  Synthetic
  misc_feature (4)..(4): n is a, c, g, or u
uucnugccuuacauuuggaa

SEQ ID NO: 27919 - RNA, 21 nt, Artificial Sequence
  Synthetic
  misc_feature (5)..(5): n is a, c, g, or u
uuucnugccuuacauuuggaa

SEQ ID NO: 27920 - RNA, 22 nt, Artificial Sequence
  Synthetic
  misc_feature (6)..(6): n is a, c, g, or u
auuucnugccuuacauuuggaa

SEQ ID NO: 27921 - RNA, 23 nt, Artificial Sequence
  Synthetic
  misc_feature (1)..(1): n is a, c, g, or u
  misc_feature (7)..(7): n is a, c, g, or u
nauuucnugccuuacauuuggaa

SEQ ID NO: 27922 - RNA, 24 nt, Artificial Sequence
  Synthetic
  misc_feature (2)..(2): n is a, c, g, or u
  misc_feature (8)..(8): n is a, c, g, or u
anauuucnugccuuacauuuggaa

SEQ ID NO: 27923 - RNA, 18 nt, Artificial Sequence
  Synthetic
  misc_feature (11)..(11): n is a, c, g, or u
ccacucacuanaaaugaa

SEQ ID NO: 27924 - RNA, 19 nt, Artificial Sequence
  Synthetic
  misc_feature (12)..(12): n is a, c, g, or u
cccacucacuanaaaugaa

SEQ ID NO: 27925 - RNA, 20 nt, Artificial Sequence
  Synthetic
  misc_feature (13)..(13): n is a, c, g, or u
gcccacucacuanaaaugaa

SEQ ID NO: 27926 - RNA, 21 nt, Artificial Sequence
  Synthetic
  misc_feature (14)..(14): n is a, c, g, or u
ggcccacucacuanaaaugaa

SEQ ID NO: 27927 - RNA, 22 nt, Artificial Sequence
  Synthetic
  misc_feature (1)..(1): n is a, c, g, or u
  misc_feature (15)..(15): n is a, c, g, or u
nggcccacucacuanaaaugaa

SEQ ID NO: 27928 - RNA, 23 nt, Artificial Sequence
  Synthetic
  misc_feature (2)..(2): n is a, c, g, or u
  misc_feature (16)..(16): n is a, c, g, or u
unggcccacucacuanaaaugaa

SEQ ID NO: 27929 - RNA, 24 nt, Artificial Sequence
  Synthetic
  misc_feature (3)..(3): n is a, c, g, or u
  misc_feature (17)..(17): n is a, c, g, or u
gunggcccacucacuanaaaugaa

SEQ ID NO: 27930 - RNA, 18 nt, Artificial Sequence
  Synthetic
  misc_feature (12)..(12): n is a, c, g, or u
uggggacccugnuaugaa

SEQ ID NO: 27931 - RNA, 19 nt, Artificial Sequence
  Synthetic
  misc_feature (13)..(13): n is a, c, g, or u
cuggggacccugnuaugaa

SEQ ID NO: 27932 - RNA, 20 nt, Artificial Sequence
  Synthetic
  misc_feature (14)..(14): n is a, c, g, or u
acuggggacccugnuaugaa

SEQ ID NO: 27933 - RNA, 21 nt, Artificial Sequence
  Synthetic
  misc_feature (15)..(15): n is a, c, g, or u
gacuggggacccugnuaugaa

SEQ ID NO: 27934 - RNA, 22 nt, Artificial Sequence
  Synthetic
  misc_feature (16)..(16): n is a, c, g, or u
agacuggggacccugnuaugaa

SEQ ID NO: 27935 - RNA, 23 nt, Artificial Sequence
  Synthetic
  misc_feature (17)..(17): n is a, c, g, or u
aagacuggggacccugnuaugaa

SEQ ID NO: 27936 - RNA, 24 nt, Artificial Sequence
  Synthetic
  misc_feature (18)..(18): n is a, c, g, or u
gaagacuggggacccugnuaugaa

SEQ ID NO: 27937 - RNA, 18 nt, Artificial Sequence
  Synthetic
ugugggcauccauuugaa

SEQ ID NO: 27938 - RNA, 19 nt, Artificial Sequence
  Synthetic
cugugggcauccauuugaa

SEQ ID NO: 27939 - RNA, 20 nt, Artificial Sequence
  Synthetic
ucugugggcauccauuugaa

SEQ ID NO: 27940 - RNA, 21 nt, Artificial Sequence
  Synthetic
aucugugggcauccauuugaa

SEQ ID NO: 27941 - RNA, 22 nt, Artificial Sequence
  Synthetic
uaucugugggcauccauuugaa

SEQ ID NO: 27942 - RNA, 23 nt, Artificial Sequence
  Synthetic
uuaucugugggcauccauuugaa

SEQ ID NO: 27943 - RNA, 24 nt, Artificial Sequence
  Synthetic
guuaucugugggcauccauuugaa

SEQ ID NO: 27944 - RNA, 18 nt, Artificial Sequence
  Synthetic
  misc_feature (2)..(2): n is a, c, g, or u
  misc_feature (16)..(16): n is a, c, g, or u
unggcccacucacuanaa

SEQ ID NO: 27945 - RNA, 19 nt, Artificial Sequence
  Synthetic
  misc_feature (3)..(3): n is a, c, g, or u
  misc_feature (17)..(17): n is a, c, g, or u
gunggcccacucacuanaa

SEQ ID NO: 27946 - RNA, 20 nt, Artificial Sequence
  Synthetic
  misc_feature (4)..(4): n is a, c, g, or u
  misc_feature (18)..(18): n is a, c, g, or u
ugunggcccacucacuanaa

SEQ ID NO: 27947 - RNA, 21 nt, Artificial Sequence
  Synthetic
  misc_feature (5)..(5): n is a, c, g, or u
  misc_feature (19)..(19): n is a, c, g, or u
uugunggcccacucacuanaa

SEQ ID NO: 27948 - RNA, 22 nt, Artificial Sequence
  Synthetic
  misc_feature (6)..(6): n is a, c, g, or u
  misc_feature (20)..(20): n is a, c, g, or u
uuugunggcccacucacuanaa

SEQ ID NO: 27949 - RNA, 23 nt, Artificial Sequence
  Synthetic
  misc_feature (7)..(7): n is a, c, g, or u
  misc_feature (21)..(21): n is a, c, g, or u
auuugunggcccacucacuanaa

SEQ ID NO: 27950 - RNA, 24 nt, Artificial Sequence
  Synthetic
  misc_feature (8)..(8): n is a, c, g, or u
  misc_feature (22)..(22): n is a, c, g, or u
aauuugunggcccacucacuanaa

SEQ ID NO: 27951 - RNA, 18 nt, Artificial Sequence
  Synthetic
uuccugggugggcaauaa

SEQ ID NO: 27952 - RNA, 19 nt, Artificial Sequence
  Synthetic
cuuccugggugggcaauaa

SEQ ID NO: 27953 - RNA, 20 nt, Artificial Sequence
  Synthetic
gcuuccugggugggcaauaa

SEQ ID NO: 27954 - RNA, 21 nt, Artificial Sequence
  Synthetic
ggcuuccugggugggcaauaa

SEQ ID NO: 27955 - RNA, 22 nt, Artificial Sequence
  Synthetic
uggcuuccugggugggcaauaa

SEQ ID NO: 27956 - RNA, 23 nt, Artificial Sequence
  Synthetic
uuggcuuccugggugggcaauaa

SEQ ID NO: 27957 - RNA, 24 nt, Artificial Sequence
  Synthetic
  misc_feature (1)..(1): n is a, c, g, or u
nuuggcuuccugggugggcaauaa

SEQ ID NO: 27958 - RNA, 18 nt, Artificial Sequence
  Synthetic
gccaacaaccuuacauaa

SEQ ID NO: 27959 - RNA, 19 nt, Artificial Sequence
  Synthetic
ugccaacaaccuuacauaa

SEQ ID NO: 27960 - RNA, 20 nt, Artificial Sequence
  Synthetic
uugccaacaaccuuacauaa

SEQ ID NO: 27961 - RNA, 21 nt, Artificial Sequence
  Synthetic
cuugccaacaaccuuacauaa

SEQ ID NO: 27962 - RNA, 22 nt, Artificial Sequence
  Synthetic
  misc_feature (1)..(1): n is a, c, g, or u
ncuugccaacaaccuuacauaa

SEQ ID NO: 27963 - RNA, 23 nt, Artificial Sequence
  Synthetic
  misc_feature (2)..(2): n is a, c, g, or u
ancuugccaacaaccuuacauaa

SEQ ID NO: 27964 - RNA, 24 nt, Artificial Sequence
  Synthetic
  misc_feature (3)..(3): n is a, c, g, or u
gancuugccaacaaccuuacauaa

SEQ ID NO: 27965 - RNA, 18 nt, Artificial Sequence
  Synthetic
uauuccuuggacucauaa

SEQ ID NO: 27966 - RNA, 19 nt, Artificial Sequence
  Synthetic
guauuccuuggacucauaa

SEQ ID NO: 27967 - RNA, 20 nt, Artificial Sequence
  Synthetic
aguauuccuuggacucauaa

SEQ ID NO: 27968 - RNA, 21 nt, Artificial Sequence
  Synthetic
uaguauuccuuggacucauaa

SEQ ID NO: 27969 - RNA, 22 nt, Artificial Sequence
  Synthetic
uuaguauuccuuggacucauaa

SEQ ID NO: 27970 - RNA, 23 nt, Artificial Sequence
  Synthetic
guuaguauuccuuggacucauaa

SEQ ID NO: 27971 - RNA, 24 nt, Artificial Sequence
  Synthetic
uguuaguauuccuuggacucauaa

SEQ ID NO: 27972 - RNA, 18 nt, Artificial Sequence
  Synthetic
ggcaggaauucuauauaa

SEQ ID NO: 27973 - RNA, 19 nt, Artificial Sequence
  Synthetic
aggcaggaauucuauauaa

SEQ ID NO: 27974 - RNA, 20 nt, Artificial Sequence
  Synthetic
aaggcaggaauucuauauaa

SEQ ID NO: 27975 - RNA, 21 nt, Artificial Sequence
  Synthetic
gaaggcaggaauucuauauaa

SEQ ID NO: 27976 - RNA, 22 nt, Artificial Sequence
  Synthetic
ggaaggcaggaauucuauauaa

SEQ ID NO: 27977 - RNA, 23 nt, Artificial Sequence
  Synthetic
uggaaggcaggaauucuauauaa

SEQ ID NO: 27978 - RNA, 24 nt, Artificial Sequence
  Synthetic
guggaaggcaggaauucuauauaa

SEQ ID NO: 27979 - RNA, 18 nt, Artificial Sequence
  Synthetic
uaauuaugucaauacuaa

SEQ ID NO: 27980 - RNA, 19 nt, Artificial Sequence
  Synthetic
uuaauuaugucaauacuaa

SEQ ID NO: 27981 - RNA, 20 nt, Artificial Sequence
  Synthetic
guuaauuaugucaauacuaa

SEQ ID NO: 27982 - RNA, 21 nt, Artificial Sequence
  Synthetic
aguuaauuaugucaauacuaa

SEQ ID NO: 27983 - RNA, 22 nt, Artificial Sequence
  Synthetic
uaguuaauuaugucaauacuaa

SEQ ID NO: 27984 - RNA, 23 nt, Artificial Sequence
  Synthetic
guaguuaauuaugucaauacuaa

SEQ ID NO: 27985 - RNA, 24 nt, Artificial Sequence
  Synthetic
aguaguuaauuaugucaauacuaa

SEQ ID NO: 27986 - RNA, 18 nt, Artificial Sequence
  Synthetic
ccauuugaacacagcuaa

SEQ ID NO: 27987 - RNA, 19 nt, Artificial Sequence
  Synthetic
uccauuugaacacagcuaa

SEQ ID NO: 27988 - RNA, 20 nt, Artificial Sequence
  Synthetic
auccauuugaacacagcuaa

SEQ ID NO: 27989 - RNA, 21 nt, Artificial Sequence
  Synthetic
cauccauuugaacacagcuaa

SEQ ID NO: 27990 - RNA, 22 nt, Artificial Sequence
  Synthetic
gcauccauuugaacacagcuaa

SEQ ID NO: 27991 - RNA, 23 nt, Artificial Sequence
  Synthetic
ggcauccauuugaacacagcuaa

SEQ ID NO: 27992 - RNA, 24 nt, Artificial Sequence
  Synthetic
gggcauccauuugaacacagcuaa

SEQ ID NO: 27993 - RNA, 18 nt, Artificial Sequence
  Synthetic
ugccuguauuaccgcuaa

SEQ ID NO: 27994 - RNA, 19 nt, Artificial Sequence
  Synthetic
augccuguauuaccgcuaa

SEQ ID NO: 27995 - RNA, 20 nt, Artificial Sequence
  Synthetic
uaugccuguauuaccgcuaa

SEQ ID NO: 27996 - RNA, 21 nt, Artificial Sequence
  Synthetic
guaugccuguauuaccgcuaa

SEQ ID NO: 27997 - RNA, 22 nt, Artificial Sequence
  Synthetic
uguaugccuguauuaccgcuaa

SEQ ID NO: 27998 - RNA, 23 nt, Artificial Sequence
  Synthetic
uuguaugccuguauuaccgcuaa

SEQ ID NO: 27999 - RNA, 24 nt, Artificial Sequence
  Synthetic
cuuguaugccuguauuaccgcuaa

SEQ ID NO: 28000 - RNA, 18 nt, Artificial Sequence
  Synthetic
ggcuccaguucagaaaca

SEQ ID NO: 28001 - RNA, 19 nt, Artificial Sequence
  Synthetic
uggcuccaguucagaaaca

SEQ ID NO: 28002 - RNA, 20 nt, Artificial Sequence
  Synthetic
guggcuccaguucagaaaca

SEQ ID NO: 28003 - RNA, 21 nt, Artificial Sequence
  Synthetic
gguggcuccaguucagaaaca

SEQ ID NO: 28004 - RNA, 22 nt, Artificial Sequence
  Synthetic
ugguggcuccaguucagaaaca

SEQ ID NO: 28005 - RNA, 23 nt, Artificial Sequence
  Synthetic
cugguggcuccaguucagaaaca

SEQ ID NO: 28006 - RNA, 24 nt, Artificial Sequence
  Synthetic
gcugguggcuccaguucagaaaca

SEQ ID NO: 28007 - RNA, 18 nt, Artificial Sequence
  Synthetic
  misc_feature (10)..(10): n is a, c, g, or u
gggacccugnuaugaaca

SEQ ID NO: 28008 - RNA, 19 nt, Artificial Sequence
  Synthetic
  misc_feature (11)..(11): n is a, c, g, or u
ggggacccugnuaugaaca

SEQ ID NO: 28009 - RNA, 20 nt, Artificial Sequence
  Synthetic
  misc_feature (12)..(12): n is a, c, g, or u
uggggacccugnuaugaaca

SEQ ID NO: 28010 - RNA, 21 nt, Artificial Sequence
  Synthetic
  misc_feature (13)..(13): n is a, c, g, or u
cuggggacccugnuaugaaca

SEQ ID NO: 28011 - RNA, 22 nt, Artificial Sequence
  Synthetic
  misc_feature (14)..(14): n is a, c, g, or u
acuggggacccugnuaugaaca

SEQ ID NO: 28012 - RNA, 23 nt, Artificial Sequence
  Synthetic
  misc_feature (15)..(15): n is a, c, g, or u
gacuggggacccugnuaugaaca

SEQ ID NO: 28013 - RNA, 24 nt, Artificial Sequence
  Synthetic
  misc_feature (16)..(16): n is a, c, g, or u
agacuggggacccugnuaugaaca

SEQ ID NO: 28014 - RNA, 18 nt, Artificial Sequence
  Synthetic
gauugggacuucaacaca

SEQ ID NO: 28015 - RNA, 19 nt, Artificial Sequence
  Synthetic
cgauugggacuucaacaca

SEQ ID NO: 28016 - RNA, 20 nt, Artificial Sequence
  Synthetic
ccgauugggacuucaacaca

SEQ ID NO: 28017 - RNA, 21 nt, Artificial Sequence
  Synthetic
cccgauugggacuucaacaca

SEQ ID NO: 28018 - RNA, 22 nt, Artificial Sequence
  Synthetic
ucccgauugggacuucaacaca

SEQ ID NO: 28019 - RNA, 23 nt, Artificial Sequence
  Synthetic
gucccgauugggacuucaacaca

SEQ ID NO: 28020 - RNA, 24 nt, Artificial Sequence
  Synthetic
agucccgauugggacuucaacaca

SEQ ID NO: 28021 - RNA, 18 nt, Artificial Sequence
  Synthetic
ggcauccauuugaacaca

SEQ ID NO: 28022 - RNA, 19 nt, Artificial Sequence
  Synthetic
gggcauccauuugaacaca

SEQ ID NO: 28023 - RNA, 20 nt, Artificial Sequence
  Synthetic
ugggcauccauuugaacaca

SEQ ID NO: 28024 - RNA, 21 nt, Artificial Sequence
  Synthetic
gugggcauccauuugaacaca

SEQ ID NO: 28025 - RNA, 22 nt, Artificial Sequence
  Synthetic
ugugggcauccauuugaacaca

SEQ ID NO: 28026 - RNA, 23 nt, Artificial Sequence
  Synthetic
cugugggcauccauuugaacaca

SEQ ID NO: 28027 - RNA, 24 nt, Artificial Sequence
  Synthetic
ucugugggcauccauuugaacaca

SEQ ID NO: 28028 - RNA, 18 nt, Artificial Sequence
  Synthetic
uauaagagagaauccaca

SEQ ID NO: 28029 - RNA, 19 nt, Artificial Sequence
  Synthetic
auauaagagagaauccaca

SEQ ID NO: 28030 - RNA, 20 nt, Artificial Sequence
  Synthetic
uauauaagagagaauccaca

SEQ ID NO: 28031 - RNA, 21 nt, Artificial Sequence
  Synthetic
cuauauaagagagaauccaca

SEQ ID NO: 28032 - RNA, 22 nt, Artificial Sequence
  Synthetic
ucuauauaagagagaauccaca

SEQ ID NO: 28033 - RNA, 23 nt, Artificial Sequence
  Synthetic
uucuauauaagagagaauccaca

SEQ ID NO: 28034 - RNA, 24 nt, Artificial Sequence
  Synthetic
auucuauauaagagagaauccaca

SEQ ID NO: 28035 - RNA, 18 nt, Artificial Sequence
  Synthetic
aacauggagaacaucaca

SEQ ID NO: 28036 - RNA, 19 nt, Artificial Sequence
  Synthetic
gaacauggagaacaucaca

SEQ ID NO: 28037 - RNA, 20 nt, Artificial Sequence
  Synthetic
ugaacauggagaacaucaca

SEQ ID NO: 28038 - RNA, 21 nt, Artificial Sequence
  Synthetic
augaacauggagaacaucaca

SEQ ID NO: 28039 - RNA, 22 nt, Artificial Sequence
  Synthetic
uaugaacauggagaacaucaca

SEQ ID NO: 28040 - RNA, 23 nt, Artificial Sequence
  Synthetic
  misc_feature (1)..(1): n is a, c, g, or u
nuaugaacauggagaacaucaca

SEQ ID NO: 28041 - RNA, 24 nt, Artificial Sequence
  Synthetic
  misc_feature (2)..(2): n is a, c, g, or u
gnuaugaacauggagaacaucaca

SEQ ID NO: 28042 - RNA, 18 nt, Artificial Sequence
  Synthetic
gacuacuguuguuagaca

SEQ ID NO: 28043 - RNA, 19 nt, Artificial Sequence
  Synthetic
agacuacuguuguuagaca

SEQ ID NO: 28044 - RNA, 20 nt, Artificial Sequence
  Synthetic
gagacuacuguuguuagaca

SEQ ID NO: 28045 - RNA, 21 nt, Artificial Sequence
  Synthetic
ggagacuacuguuguuagaca

SEQ ID NO: 28046 - RNA, 22 nt, Artificial Sequence
  Synthetic
cggagacuacuguuguuagaca

SEQ ID NO: 28047 - RNA, 23 nt, Artificial Sequence
  Synthetic
ccggagacuacuguuguuagaca

SEQ ID NO: 28048 - RNA, 24 nt, Artificial Sequence
  Synthetic
uccggagacuacuguuguuagaca

SEQ ID NO: 28049 - RNA, 18 nt, Artificial Sequence
  Synthetic
ucaacacaaacaaggaca

SEQ ID NO: 28050 - RNA, 19 nt, Artificial Sequence
  Synthetic
uucaacacaaacaaggaca

SEQ ID NO: 28051 - RNA, 20 nt, Artificial Sequence
  Synthetic
cuucaacacaaacaaggaca

SEQ ID NO: 28052 - RNA, 21 nt, Artificial Sequence
  Synthetic
acuucaacacaaacaaggaca

SEQ ID NO: 28053 - RNA, 22 nt, Artificial Sequence
  Synthetic
gacuucaacacaaacaaggaca

SEQ ID NO: 28054 - RNA, 23 nt, Artificial Sequence
  Synthetic
ggacuucaacacaaacaaggaca

SEQ ID NO: 28055 - RNA, 24 nt, Artificial Sequence
  Synthetic
gggacuucaacacaaacaaggaca

SEQ ID NO: 28056 - RNA, 18 nt, Artificial Sequence
  Synthetic
ccuggauugaggaauaca

SEQ ID NO: 28057 - RNA, 19 nt, Artificial Sequence
  Synthetic
accuggauugaggaauaca

SEQ ID NO: 28058 - RNA, 20 nt, Artificial Sequence
  Synthetic
gaccuggauugaggaauaca

SEQ ID NO: 28059 - RNA, 21 nt, Artificial Sequence
  Synthetic
cgaccuggauugaggaauaca

SEQ ID NO: 28060 - RNA, 22 nt, Artificial Sequence
  Synthetic
acgaccuggauugaggaauaca

SEQ ID NO: 28061 - RNA, 23 nt, Artificial Sequence
  Synthetic
aacgaccuggauugaggaauaca

SEQ ID NO: 28062 - RNA, 24 nt, Artificial Sequence
  Synthetic
caacgaccuggauugaggaauaca

SEQ ID NO: 28063 - RNA, 18 nt, Artificial Sequence
  Synthetic
cuugccaacaaccuuaca

SEQ ID NO: 28064 - RNA, 19 nt, Artificial Sequence
  Synthetic
  misc_feature (1)..(1): n is a, c, g, or u
ncuugccaacaaccuuaca

SEQ ID NO: 28065 - RNA, 20 nt, Artificial Sequence
  Synthetic
  misc_feature (2)..(2): n is a, c, g, or u
ancuugccaacaaccuuaca

SEQ ID NO: 28066 - RNA, 21 nt, Artificial Sequence
  Synthetic
  misc_feature (3)..(3): n is a, c, g, or u
gancuugccaacaaccuuaca

SEQ ID NO: 28067 - RNA, 22 nt, Artificial Sequence
  Synthetic
  misc_feature (4)..(4): n is a, c, g, or u
ggancuugccaacaaccuuaca

SEQ ID NO: 28068 - RNA, 23 nt, Artificial Sequence
  Synthetic
  misc_feature (1)..(1): n is a, c, g, or u
  misc_feature (5)..(5): n is a, c, g, or u
nggancuugccaacaaccuuaca

SEQ ID NO: 28069 - RNA, 24 nt, Artificial Sequence
  Synthetic
  misc_feature (2)..(2): n is a, c, g, or u
  misc_feature (6)..(6): n is a, c, g, or u
unggancuugccaacaaccuuaca

SEQ ID NO: 28070 - RNA, 18 nt, Artificial Sequence
  Synthetic
  misc_feature (3)..(3): n is a, c, g, or u
  misc_feature (9)..(9): n is a, c, g, or u
canauuucnugccuuaca

SEQ ID NO: 28071 - RNA, 19 nt, Artificial Sequence
  Synthetic
  misc_feature (4)..(4): n is a, c, g, or u
  misc_feature (10)..(10): n is a, c, g, or u
ucanauuucnugccuuaca

SEQ ID NO: 28072 - RNA, 20 nt, Artificial Sequence
  Synthetic
  misc_feature (5)..(5): n is a, c, g, or u
  misc_feature (11)..(11): n is a, c, g, or u
uucanauuucnugccuuaca

SEQ ID NO: 28073 - RNA, 21 nt, Artificial Sequence
  Synthetic
  misc_feature (6)..(6): n is a, c, g, or u
  misc_feature (12)..(12): n is a, c, g, or u
uuucanauuucnugccuuaca

SEQ ID NO: 28074 - RNA, 22 nt, Artificial Sequence
  Synthetic
  misc_feature (7)..(7): n is a, c, g, or u
  misc_feature (13)..(13): n is a, c, g, or u
guuucanauuucnugccuuaca

SEQ ID NO: 28075 - RNA, 23 nt, Artificial Sequence
  Synthetic
  misc_feature (8)..(8): n is a, c, g, or u
  misc_feature (14)..(14): n is a, c, g, or u
gguuucanauuucnugccuuaca

SEQ ID NO: 28076 - RNA, 24 nt, Artificial Sequence
  Synthetic
  misc_feature (9)..(9): n is a, c, g, or u
  misc_feature (15)..(15): n is a, c, g, or u
ugguuucanauuucnugccuuaca

SEQ ID NO: 28077 - RNA, 18 nt, Artificial Sequence
  Synthetic
auucuuuccagaccacca

SEQ ID NO: 28078 - RNA, 19 nt, Artificial Sequence
  Synthetic
gauucuuuccagaccacca

SEQ ID NO: 28079 - RNA, 20 nt, Artificial Sequence
  Synthetic
ggauucuuuccagaccacca

SEQ ID NO: 28080 - RNA, 21 nt, Artificial Sequence
  Synthetic
gggauucuuuccagaccacca

SEQ ID NO: 28081 - RNA, 22 nt, Artificial Sequence
  Synthetic
ugggauucuuuccagaccacca

SEQ ID NO: 28082 - RNA, 23 nt, Artificial Sequence
  Synthetic
cugggauucuuuccagaccacca

SEQ ID NO: 28083 - RNA, 24 nt, Artificial Sequence
  Synthetic
ucugggauucuuuccagaccacca

SEQ ID NO: 28084 - RNA, 18 nt, Artificial Sequence
  Synthetic
caccuccugcuuccacca

SEQ ID NO: 28085 - RNA, 19 nt, Artificial Sequence
  Synthetic
ccaccuccugcuuccacca

SEQ ID NO: 28086 - RNA, 20 nt, Artificial Sequence
  Synthetic
uccaccuccugcuuccacca

SEQ ID NO: 28087 - RNA, 21 nt, Artificial Sequence
  Synthetic
auccaccuccugcuuccacca

SEQ ID NO: 28088 - RNA, 22 nt, Artificial Sequence
  Synthetic
gauccaccuccugcuuccacca

SEQ ID NO: 28089 - RNA, 23 nt, Artificial Sequence
  Synthetic
agauccaccuccugcuuccacca

SEQ ID NO: 28090 - RNA, 24 nt, Artificial Sequence
  Synthetic
cagauccaccuccugcuuccacca

SEQ ID NO: 28091 - RNA, 18 nt, Artificial Sequence
  Synthetic
gucuguucaccagcacca

SEQ ID NO: 28092 - RNA, 19 nt, Artificial Sequence
  Synthetic
ggucuguucaccagcacca

SEQ ID NO: 28093 - RNA, 20 nt, Artificial Sequence
  Synthetic
uggucuguucaccagcacca

SEQ ID NO: 28094 - RNA, 21 nt, Artificial Sequence
  Synthetic
uuggucuguucaccagcacca

SEQ ID NO: 28095 - RNA, 22 nt, Artificial Sequence
  Synthetic
auuggucuguucaccagcacca

SEQ ID NO: 28096 - RNA, 23 nt, Artificial Sequence
  Synthetic
aauuggucuguucaccagcacca

SEQ ID NO: 28097 - RNA, 24 nt, Artificial Sequence
  Synthetic
aaauuggucuguucaccagcacca

SEQ ID NO: 28098 - RNA, 18 nt, Artificial Sequence
  Synthetic
aauuuucuagggguacca

SEQ ID NO: 28099 - RNA, 19 nt, Artificial Sequence
  Synthetic
caauuuucuagggguacca

SEQ ID NO: 28100 - RNA, 20 nt, Artificial Sequence
  Synthetic
ucaauuuucuagggguacca

SEQ ID NO: 28101 - RNA, 21 nt, Artificial Sequence
  Synthetic
cucaauuuucuagggguacca

SEQ ID NO: 28102 - RNA, 22 nt, Artificial Sequence
  Synthetic
ucucaauuuucuagggguacca

SEQ ID NO: 28103 - RNA, 23 nt, Artificial Sequence
  Synthetic
cucucaauuuucuagggguacca

SEQ ID NO: 28104 - RNA, 24 nt, Artificial Sequence
  Synthetic
ucucucaauuuucuagggguacca

SEQ ID NO: 28105 - RNA, 18 nt, Artificial Sequence
  Synthetic
  misc_feature (7)..(7): n is a, c, g, or u
uugaaanuaauuaugcca

SEQ ID NO: 28106 - RNA, 19 nt, Artificial Sequence
  Synthetic
  misc_feature (8)..(8): n is a, c, g, or u
auugaaanuaauuaugcca

SEQ ID NO: 28107 - RNA, 20 nt, Artificial Sequence
  Synthetic
  misc_feature (9)..(9): n is a, c, g, or u
gauugaaanuaauuaugcca

SEQ ID NO: 28108 - RNA, 21 nt, Artificial Sequence
  Synthetic
  misc_feature (10)..(10): n is a, c, g, or u
cgauugaaanuaauuaugcca

SEQ ID NO: 28109 - RNA, 22 nt, Artificial Sequence
  Synthetic
  misc_feature (11)..(11): n is a, c, g, or u
acgauugaaanuaauuaugcca

SEQ ID NO: 28110 - RNA, 23 nt, Artificial Sequence
  Synthetic
  misc_feature (12)..(12): n is a, c, g, or u
gacgauugaaanuaauuaugcca

SEQ ID NO: 28111 - RNA, 24 nt, Artificial Sequence
  Synthetic
  misc_feature (13)..(13): n is a, c, g, or u
agacgauugaaanuaauuaugcca

SEQ ID NO: 28112 - RNA, 18 nt, Artificial Sequence
  Synthetic
  misc_feature (8)..(8): n is a, c, g, or u
ugcuaggnugugcugcca

SEQ ID NO: 28113 - RNA, 19 nt, Artificial Sequence
  Synthetic
  misc_feature (9)..(9): n is a, c, g, or u
cugcuaggnugugcugcca

SEQ ID NO: 28114 - RNA, 20 nt, Artificial Sequence
  Synthetic
  misc_feature (10)..(10): n is a, c, g, or u
gcugcuaggnugugcugcca

SEQ ID NO: 28115 - RNA, 21 nt, Artificial Sequence
  Synthetic
  misc_feature (11)..(11): n is a, c, g, or u
ggcugcuaggnugugcugcca

SEQ ID NO: 28116 - RNA, 22 nt, Artificial Sequence
  Synthetic
  misc_feature (12)..(12): n is a, c, g, or u
uggcugcuaggnugugcugcca

SEQ ID NO: 28117 - RNA, 23 nt, Artificial Sequence
  Synthetic
  misc_feature (13)..(13): n is a, c, g, or u
auggcugcuaggnugugcugcca

SEQ ID NO: 28118 - RNA, 24 nt, Artificial Sequence
  Synthetic
  misc_feature (14)..(14): n is a, c, g, or u
cauggcugcuaggnugugcugcca

SEQ ID NO: 28119 - RNA, 18 nt, Artificial Sequence
  Synthetic
guuaucugugggcaucca

SEQ ID NO: 28120 - RNA, 19 nt, Artificial Sequence
  Synthetic
uguuaucugugggcaucca

SEQ ID NO: 28121 - RNA, 20 nt, Artificial Sequence
  Synthetic
uuguuaucugugggcaucca

SEQ ID NO: 28122 - RNA, 21 nt, Artificial Sequence
  Synthetic
uuuguuaucugugggcaucca

SEQ ID NO: 28123 - RNA, 22 nt, Artificial Sequence
  Synthetic
uuuuguuaucugugggcaucca

SEQ ID NO: 28124 - RNA, 23 nt, Artificial Sequence
  Synthetic
uuuuuguuaucugugggcaucca

SEQ ID NO: 28125 - RNA, 24 nt, Artificial Sequence
  Synthetic
uuuuuuguuaucugugggcaucca

SEQ ID NO: 28126 - RNA, 18 nt, Artificial Sequence
  Synthetic
ggaacaagagcuacagca

SEQ ID NO: 28127 - RNA, 19 nt, Artificial Sequence
  Synthetic
gggaacaagagcuacagca

SEQ ID NO: 28128 - RNA, 20 nt, Artificial Sequence
  Synthetic
ugggaacaagagcuacagca

SEQ ID NO: 28129 - RNA, 21 nt, Artificial Sequence
  Synthetic
cugggaacaagagcuacagca

SEQ ID NO: 28130 - RNA, 22 nt, Artificial Sequence
  Synthetic
ccugggaacaagagcuacagca

SEQ ID NO: 28131 - RNA, 23 nt, Artificial Sequence
  Synthetic
uccugggaacaagagcuacagca

SEQ ID NO: 28132 - RNA, 24 nt, Artificial Sequence
  Synthetic
uuccugggaacaagagcuacagca

SEQ ID NO: 28133 - RNA, 18 nt, Artificial Sequence
  Synthetic
gaucuacaaccaccagca

SEQ ID NO: 28134 - RNA, 19 nt, Artificial Sequence
  Synthetic
ggaucuacaaccaccagca

SEQ ID NO: 28135 - RNA, 20 nt, Artificial Sequence
  Synthetic
aggaucuacaaccaccagca

SEQ ID NO: 28136 - RNA, 21 nt, Artificial Sequence
  Synthetic
caggaucuacaaccaccagca

SEQ ID NO: 28137 - RNA, 22 nt, Artificial Sequence
  Synthetic
ccaggaucuacaaccaccagca

SEQ ID NO: 28138 - RNA, 23 nt, Artificial Sequence
  Synthetic
uccaggaucuacaaccaccagca

SEQ ID NO: 28139 - RNA, 24 nt, Artificial Sequence
  Synthetic
uuccaggaucuacaaccaccagca

SEQ ID NO: 28140 - RNA, 18 nt, Artificial Sequence
  Synthetic
gaacucccucgccucgca

SEQ ID NO: 28141 - RNA, 19 nt, Artificial Sequence
  Synthetic
agaacucccucgccucgca

SEQ ID NO: 28142 - RNA, 20 nt, Artificial Sequence
  Synthetic
aagaacucccucgccucgca

SEQ ID NO: 28143 - RNA, 21 nt, Artificial Sequence
  Synthetic
gaagaacucccucgccucgca

SEQ ID NO: 28144 - RNA, 22 nt, Artificial Sequence
  Synthetic
agaagaacucccucgccucgca

SEQ ID NO: 28145 - RNA, 23 nt, Artificial Sequence
  Synthetic
aagaagaacucccucgccucgca

SEQ ID NO: 28146 - RNA, 24 nt, Artificial Sequence
  Synthetic
gaagaagaacucccucgccucgca

SEQ ID NO: 28147 - RNA, 18 nt, Artificial Sequence
  Synthetic
ucaccucugcacgucgca

SEQ ID NO: 28148 - RNA, 19 nt, Artificial Sequence
  Synthetic
uucaccucugcacgucgca

SEQ ID NO: 28149 - RNA, 20 nt, Artificial Sequence
  Synthetic
cuucaccucugcacgucgca

SEQ ID NO: 28150 - RNA, 21 nt, Artificial Sequence
  Synthetic
gcuucaccucugcacgucgca

SEQ ID NO: 28151 - RNA, 22 nt, Artificial Sequence
  Synthetic
cgcuucaccucugcacgucgca

SEQ ID NO: 28152 - RNA, 23 nt, Artificial Sequence
  Synthetic
ucgcuucaccucugcacgucgca

SEQ ID NO: 28153 - RNA, 24 nt, Artificial Sequence
  Synthetic
uucgcuucaccucugcacgucgca

SEQ ID NO: 28154 - RNA, 18 nt, Artificial Sequence
  Synthetic
ggguggagcccucaggca

SEQ ID NO: 28155 - RNA, 19 nt, Artificial Sequence
  Synthetic
gggguggagcccucaggca

SEQ ID NO: 28156 - RNA, 20 nt, Artificial Sequence
  Synthetic
ugggguggagcccucaggca

SEQ ID NO: 28157 - RNA, 21 nt, Artificial Sequence
  Synthetic
cugggguggagcccucaggca

SEQ ID NO: 28158 - RNA, 22 nt, Artificial Sequence
  Synthetic
ucugggguggagcccucaggca

SEQ ID NO: 28159 - RNA, 23 nt, Artificial Sequence
  Synthetic
uucugggguggagcccucaggca

SEQ ID NO: 28160 - RNA, 24 nt, Artificial Sequence
  Synthetic
cuucugggguggagcccucaggca

SEQ ID NO: 28161 - RNA, 18 nt, Artificial Sequence
  Synthetic
caacggcgagaaggggca

SEQ ID NO: 28162 - RNA, 19 nt, Artificial Sequence
  Synthetic
ucaacggcgagaaggggca

SEQ ID NO: 28163 - RNA, 20 nt, Artificial Sequence
  Synthetic
cucaacggcgagaaggggca

SEQ ID NO: 28164 - RNA, 21 nt, Artificial Sequence
  Synthetic
ucucaacggcgagaaggggca

SEQ ID NO: 28165 - RNA, 22 nt, Artificial Sequence
  Synthetic
cucucaacggcgagaaggggca

SEQ ID NO: 28166 - RNA, 23 nt, Artificial Sequence
  Synthetic
ucucucaacggcgagaaggggca

SEQ ID NO: 28167 - RNA, 24 nt, Artificial Sequence
  Synthetic
cucucucaacggcgagaaggggca

SEQ ID NO: 28168 - RNA, 18 nt, Artificial Sequence
  Synthetic
gacaauuggccaauggca

SEQ ID NO: 28169 - RNA, 19 nt, Artificial Sequence
  Synthetic
ggacaauuggccaauggca

SEQ ID NO: 28170 - RNA, 20 nt, Artificial Sequence
  Synthetic
aggacaauuggccaauggca

SEQ ID NO: 28171 - RNA, 21 nt, Artificial Sequence
  Synthetic
aaggacaauuggccaauggca

SEQ ID NO: 28172 - RNA, 22 nt, Artificial Sequence
  Synthetic
caaggacaauuggccaauggca

SEQ ID NO: 28173 - RNA, 23 nt, Artificial Sequence
  Synthetic
acaaggacaauuggccaauggca

SEQ ID NO: 28174 - RNA, 24 nt, Artificial Sequence
  Synthetic
aacaaggacaauuggccaauggca

SEQ ID NO: 28175 - RNA, 18 nt, Artificial Sequence
  Synthetic
acauccacaggccaugca

SEQ ID NO: 28176 - RNA, 19 nt, Artificial Sequence
  Synthetic
cacauccacaggccaugca

SEQ ID NO: 28177 - RNA, 20 nt, Artificial Sequence
  Synthetic
acacauccacaggccaugca

SEQ ID NO: 28178 - RNA, 21 nt, Artificial Sequence
  Synthetic
cacacauccacaggccaugca

SEQ ID NO: 28179 - RNA, 22 nt, Artificial Sequence
  Synthetic
acacacauccacaggccaugca

SEQ ID NO: 28180 - RNA, 23 nt, Artificial Sequence
  Synthetic
gacacacauccacaggccaugca

SEQ ID NO: 28181 - RNA, 24 nt, Artificial Sequence
  Synthetic
ggacacacauccacaggccaugca

SEQ ID NO: 28182 - RNA, 18 nt, Artificial Sequence
  Synthetic
aauuuagaggauccugca

SEQ ID NO: 28183 - RNA, 19 nt, Artificial Sequence
  Synthetic
uaauuuagaggauccugca

SEQ ID NO: 28184 - RNA, 20 nt, Artificial Sequence
  Synthetic
auaauuuagaggauccugca

SEQ ID NO: 28185 - RNA, 21 nt, Artificial Sequence
  Synthetic
aauaauuuagaggauccugca

SEQ ID NO: 28186 - RNA, 22 nt, Artificial Sequence
  Synthetic
caauaauuuagaggauccugca

SEQ ID NO: 28187 - RNA, 23 nt, Artificial Sequence
  Synthetic
gcaauaauuuagaggauccugca

SEQ ID NO: 28188 - RNA, 24 nt, Artificial Sequence
  Synthetic
ggcaauaauuuagaggauccugca

SEQ ID NO: 28189 - RNA, 18 nt, Artificial Sequence
  Synthetic
uccugacauucacuugca

SEQ ID NO: 28190 - RNA, 19 nt, Artificial Sequence
  Synthetic
uuccugacauucacuugca

SEQ ID NO: 28191 - RNA, 20 nt, Artificial Sequence
  Synthetic
uuuccugacauucacuugca

SEQ ID NO: 28192 - RNA, 21 nt, Artificial Sequence
  Synthetic
uuuuccugacauucacuugca

SEQ ID NO: 28193 - RNA, 22 nt, Artificial Sequence
  Synthetic
cuuuuccugacauucacuugca

SEQ ID NO: 28194 - RNA, 23 nt, Artificial Sequence
  Synthetic
ucuuuuccugacauucacuugca

SEQ ID NO: 28195 - RNA, 24 nt, Artificial Sequence
  Synthetic
uucuuuuccugacauucacuugca

SEQ ID NO: 28196 - RNA, 18 nt, Artificial Sequence
  Synthetic
cgagaugccuuagaauca

SEQ ID NO: 28197 - RNA, 19 nt, Artificial Sequence
  Synthetic
ccgagaugccuuagaauca

SEQ ID NO: 28198 - RNA, 20 nt, Artificial Sequence
  Synthetic
accgagaugccuuagaauca

SEQ ID NO: 28199 - RNA, 21 nt, Artificial Sequence
  Synthetic
uaccgagaugccuuagaauca

SEQ ID NO: 28200 - RNA, 22 nt, Artificial Sequence
  Synthetic
cuaccgagaugccuuagaauca

SEQ ID NO: 28201 - RNA, 23 nt, Artificial Sequence
  Synthetic
ucuaccgagaugccuuagaauca

SEQ ID NO: 28202 - RNA, 24 nt, Artificial Sequence
  Synthetic
cucuaccgagaugccuuagaauca

SEQ ID NO: 28203 - RNA, 18 nt, Artificial Sequence
  Synthetic
cugcaccacucuugcuca

SEQ ID NO: 28204 - RNA, 19 nt, Artificial Sequence
  Synthetic
ccugcaccacucuugcuca

SEQ ID NO: 28205 - RNA, 20 nt, Artificial Sequence
  Synthetic
accugcaccacucuugcuca

SEQ ID NO: 28206 - RNA, 21 nt, Artificial Sequence
  Synthetic
aaccugcaccacucuugcuca

SEQ ID NO: 28207 - RNA, 22 nt, Artificial Sequence
  Synthetic
aaaccugcaccacucuugcuca

SEQ ID NO: 28208 - RNA, 23 nt, Artificial Sequence
  Synthetic
aaaaccugcaccacucuugcuca

SEQ ID NO: 28209 - RNA, 24 nt, Artificial Sequence
  Synthetic
caaaaccugcaccacucuugcuca

SEQ ID NO: 28210 - RNA, 18 nt, Artificial Sequence
  Synthetic
  misc_feature (8)..(8): n is a, c, g, or u
ccaaccanacugcucuca

SEQ ID NO: 28211 - RNA, 19 nt, Artificial Sequence
  Synthetic
  misc_feature (9)..(9): n is a, c, g, or u
cccaaccanacugcucuca

SEQ ID NO: 28212 - RNA, 20 nt, Artificial Sequence
  Synthetic
  misc_feature (10)..(10): n is a, c, g, or u
ccccaaccanacugcucuca

SEQ ID NO: 28213 - RNA, 21 nt, Artificial Sequence
  Synthetic
  misc_feature (11)..(11): n is a, c, g, or u
cccccaaccanacugcucuca

SEQ ID NO: 28214 - RNA, 22 nt, Artificial Sequence
  Synthetic
  misc_feature (12)..(12): n is a, c, g, or u
acccccaaccanacugcucuca

SEQ ID NO: 28215 - RNA, 23 nt, Artificial Sequence
  Synthetic
  misc_feature (13)..(13): n is a, c, g, or u
cacccccaaccanacugcucuca

SEQ ID NO: 28216 - RNA, 24 nt, Artificial Sequence
  Synthetic
  misc_feature (14)..(14): n is a, c, g, or u
gcacccccaaccanacugcucuca

SEQ ID NO: 28217 - RNA, 18 nt, Artificial Sequence
  Synthetic
uccaccaaucggagguca

SEQ ID NO: 28218 - RNA, 19 nt, Artificial Sequence
  Synthetic
uuccaccaaucggagguca

SEQ ID NO: 28219 - RNA, 20 nt, Artificial Sequence
  Synthetic
cuuccaccaaucggagguca

SEQ ID NO: 28220 - RNA, 21 nt, Artificial Sequence
  Synthetic
gcuuccaccaaucggagguca

SEQ ID NO: 28221 - RNA, 22 nt, Artificial Sequence
  Synthetic
ugcuuccaccaaucggagguca

SEQ ID NO: 28222 - RNA, 23 nt, Artificial Sequence
  Synthetic
cugcuuccaccaaucggagguca

SEQ ID NO: 28223 - RNA, 24 nt, Artificial Sequence
  Synthetic
ccugcuuccaccaaucggagguca

SEQ ID NO: 28224 - RNA, 18 nt, Artificial Sequence
  Synthetic
caucaaucuucucgaaga

SEQ ID NO: 28225 - RNA, 19 nt, Artificial Sequence
  Synthetic
ucaucaaucuucucgaaga

SEQ ID NO: 28226 - RNA, 20 nt, Artificial Sequence
  Synthetic
aucaucaaucuucucgaaga

SEQ ID NO: 28227 - RNA, 21 nt, Artificial Sequence
  Synthetic
caucaucaaucuucucgaaga

SEQ ID NO: 28228 - RNA, 22 nt, Artificial Sequence
  Synthetic
acaucaucaaucuucucgaaga

SEQ ID NO: 28229 - RNA, 23 nt, Artificial Sequence
  Synthetic
cacaucaucaaucuucucgaaga

SEQ ID NO: 28230 - RNA, 24 nt, Artificial Sequence
  Synthetic
ucacaucaucaaucuucucgaaga

SEQ ID NO: 28231 - RNA, 18 nt, Artificial Sequence
  Synthetic
acucccucgccucgcaga

SEQ ID NO: 28232 - RNA, 19 nt, Artificial Sequence
  Synthetic
aacucccucgccucgcaga

SEQ ID NO: 28233 - RNA, 20 nt, Artificial Sequence
  Synthetic
gaacucccucgccucgcaga

SEQ ID NO: 28234 - RNA, 21 nt, Artificial Sequence
  Synthetic
agaacucccucgccucgcaga

SEQ ID NO: 28235 - RNA, 22 nt, Artificial Sequence
  Synthetic
aagaacucccucgccucgcaga

SEQ ID NO: 28236 - RNA, 23 nt, Artificial Sequence
  Synthetic
gaagaacucccucgccucgcaga

SEQ ID NO: 28237 - RNA, 24 nt, Artificial Sequence
  Synthetic
agaagaacucccucgccucgcaga

SEQ ID NO: 28238 - RNA, 18 nt, Artificial Sequence
  Synthetic
gcacuguuggauccgaga

SEQ ID NO: 28239 - RNA, 19 nt, Artificial Sequence
  Synthetic
agcacuguuggauccgaga

SEQ ID NO: 28240 - RNA, 20 nt, Artificial Sequence
  Synthetic
aagcacuguuggauccgaga

SEQ ID NO: 28241 - RNA, 21 nt, Artificial Sequence
  Synthetic
caagcacuguuggauccgaga

SEQ ID NO: 28242 - RNA, 22 nt, Artificial Sequence
  Synthetic
ccaagcacuguuggauccgaga

SEQ ID NO: 28243 - RNA, 23 nt, Artificial Sequence
  Synthetic
accaagcacuguuggauccgaga

SEQ ID NO: 28244 - RNA, 24 nt, Artificial Sequence
  Synthetic
caccaagcacuguuggauccgaga

SEQ ID NO: 28245 - RNA, 18 nt, Artificial Sequence
  Synthetic
ccucucucaacggcgaga

SEQ ID NO: 28246 - RNA, 19 nt, Artificial Sequence
  Synthetic
accucucucaacggcgaga

SEQ ID NO: 28247 - RNA, 20 nt, Artificial Sequence
  Synthetic
caccucucucaacggcgaga

SEQ ID NO: 28248 - RNA, 21 nt, Artificial Sequence
  Synthetic
gcaccucucucaacggcgaga

SEQ ID NO: 28249 - RNA, 22 nt, Artificial Sequence
  Synthetic
agcaccucucucaacggcgaga

SEQ ID NO: 28250 - RNA, 23 nt, Artificial Sequence
  Synthetic
gagcaccucucucaacggcgaga

SEQ ID NO: 28251 - RNA, 24 nt, Artificial Sequence
  Synthetic
ggagcaccucucucaacggcgaga

SEQ ID NO: 28252 - RNA, 18 nt, Artificial Sequence
  Synthetic
cgaggcagggccccuaga

SEQ ID NO: 28253 - RNA, 19 nt, Artificial Sequence
  Synthetic
acgaggcagggccccuaga

SEQ ID NO: 28254 - RNA, 20 nt, Artificial Sequence
  Synthetic
aacgaggcagggccccuaga

SEQ ID NO: 28255 - RNA, 21 nt, Artificial Sequence
  Synthetic
caacgaggcagggccccuaga

SEQ ID NO: 28256 - RNA, 22 nt, Artificial Sequence
  Synthetic
acaacgaggcagggccccuaga

SEQ ID NO: 28257 - RNA, 23 nt, Artificial Sequence
  Synthetic
gacaacgaggcagggccccuaga

SEQ ID NO: 28258 - RNA, 24 nt, Artificial Sequence
  Synthetic
agacaacgaggcagggccccuaga

SEQ ID NO: 28259 - RNA, 18 nt, Artificial Sequence
  Synthetic
acuguuguuagacaacga

SEQ ID NO: 28260 - RNA, 19 nt, Artificial Sequence
  Synthetic
uacuguuguuagacaacga

SEQ ID NO: 28261 - RNA, 20 nt, Artificial Sequence
  Synthetic
cuacuguuguuagacaacga

SEQ ID NO: 28262 - RNA, 21 nt, Artificial Sequence
  Synthetic
acuacuguuguuagacaacga

SEQ ID NO: 28263 - RNA, 22 nt, Artificial Sequence
  Synthetic
gacuacuguuguuagacaacga

SEQ ID NO: 28264 - RNA, 23 nt, Artificial Sequence
  Synthetic
agacuacuguuguuagacaacga

SEQ ID NO: 28265 - RNA, 24 nt, Artificial Sequence
  Synthetic
gagacuacuguuguuagacaacga

SEQ ID NO: 28266 - RNA, 18 nt, Artificial Sequence
  Synthetic
uuucgccccggucaacga

SEQ ID NO: 28267 - RNA, 19 nt, Artificial Sequence
  Synthetic
cuuucgccccggucaacga

SEQ ID NO: 28268 - RNA, 20 nt, Artificial Sequence
  Synthetic
acuuucgccccggucaacga

SEQ ID NO: 28269 - RNA, 18 nt, Artificial Sequence
  Synthetic
  misc_feature (2)..(2): n is a, c, g, or u
anaaaugaaaggagacga

SEQ ID NO: 28270 - RNA, 19 nt, Artificial Sequence
  Synthetic
  misc_feature (3)..(3): n is a, c, g, or u
uanaaaugaaaggagacga

SEQ ID NO: 28271 - RNA, 20 nt, Artificial Sequence
  Synthetic
  misc_feature (4)..(4): n is a, c, g, or u
cuanaaaugaaaggagacga

SEQ ID NO: 28272 - RNA, 21 nt, Artificial Sequence
  Synthetic
  misc_feature (5)..(5): n is a, c, g, or u
acuanaaaugaaaggagacga

SEQ ID NO: 28273 - RNA, 22 nt, Artificial Sequence
  Synthetic
  misc_feature (6)..(6): n is a, c, g, or u
cacuanaaaugaaaggagacga

SEQ ID NO: 28274 - RNA, 23 nt, Artificial Sequence
  Synthetic
  misc_feature (7)..(7): n is a, c, g, or u
ucacuanaaaugaaaggagacga

SEQ ID NO: 28275 - RNA, 24 nt, Artificial Sequence
  Synthetic
  misc_feature (8)..(8): n is a, c, g, or u
cucacuanaaaugaaaggagacga

SEQ ID NO: 28276 - RNA, 18 nt, Artificial Sequence
  Synthetic
aaauuccagcagucccga

SEQ ID NO: 28277 - RNA, 19 nt, Artificial Sequence
  Synthetic
caaauuccagcagucccga

SEQ ID NO: 28278 - RNA, 20 nt, Artificial Sequence
  Synthetic
gcaaauuccagcagucccga

SEQ ID NO: 28279 - RNA, 21 nt, Artificial Sequence
  Synthetic
agcaaauuccagcagucccga

SEQ ID NO: 28280 - RNA, 22 nt, Artificial Sequence
  Synthetic
gagcaaauuccagcagucccga

SEQ ID NO: 28281 - RNA, 23 nt, Artificial Sequence
  Synthetic
agagcaaauuccagcagucccga

SEQ ID NO: 28282 - RNA, 24 nt, Artificial Sequence
  Synthetic
cagagcaaauuccagcagucccga

SEQ ID NO: 28283 - RNA, 18 nt, Artificial Sequence
  Synthetic
caccucucucaacggcga

SEQ ID NO: 28284 - RNA, 19 nt, Artificial Sequence
  Synthetic
gcaccucucucaacggcga

SEQ ID NO: 28285 - RNA, 20 nt, Artificial Sequence
  Synthetic
agcaccucucucaacggcga

SEQ ID NO: 28286 - RNA, 18 nt, Artificial Sequence
  Synthetic
agacuguguauuuaagga

SEQ ID NO: 28287 - RNA, 19 nt, Artificial Sequence
  Synthetic
aagacuguguauuuaagga

SEQ ID NO: 28288 - RNA, 20 nt, Artificial Sequence
  Synthetic
aaagacuguguauuuaagga

SEQ ID NO: 28289 - RNA, 21 nt, Artificial Sequence
  Synthetic
caaagacuguguauuuaagga

SEQ ID NO: 28290 - RNA, 22 nt, Artificial Sequence
  Synthetic
ucaaagacuguguauuuaagga

SEQ ID NO: 28291 - RNA, 23 nt, Artificial Sequence
  Synthetic
aucaaagacuguguauuuaagga

SEQ ID NO: 28292 - RNA, 24 nt, Artificial Sequence
  Synthetic
caucaaagacuguguauuuaagga

SEQ ID NO: 28293 - RNA, 18 nt, Artificial Sequence
  Synthetic
accaaucggaggucagga

SEQ ID NO: 28294 - RNA, 19 nt, Artificial Sequence
  Synthetic
caccaaucggaggucagga

SEQ ID NO: 28295 - RNA, 20 nt, Artificial Sequence
  Synthetic
ccaccaaucggaggucagga

SEQ ID NO: 28296 - RNA, 21 nt, Artificial Sequence
  Synthetic
uccaccaaucggaggucagga

SEQ ID NO: 28297 - RNA, 22 nt, Artificial Sequence
  Synthetic
uuccaccaaucggaggucagga

SEQ ID NO: 28298 - RNA, 23 nt, Artificial Sequence
  Synthetic
cuuccaccaaucggaggucagga

SEQ ID NO: 28299 - RNA, 24 nt, Artificial Sequence
  Synthetic
gcuuccaccaaucggaggucagga

SEQ ID NO: 28300 - RNA, 18 nt, Artificial Sequence
  Synthetic
ggaggagucgggggagga

SEQ ID NO: 28301 - RNA, 19 nt, Artificial Sequence
  Synthetic
gggaggagucgggggagga

SEQ ID NO: 28302 - RNA, 20 nt, Artificial Sequence
  Synthetic
ugggaggagucgggggagga

SEQ ID NO: 28303 - RNA, 21 nt, Artificial Sequence
  Synthetic
cugggaggagucgggggagga

SEQ ID NO: 28304 - RNA, 22 nt, Artificial Sequence
  Synthetic
acugggaggagucgggggagga

SEQ ID NO: 28305 - RNA, 23 nt, Artificial Sequence
  Synthetic
gacugggaggagucgggggagga

SEQ ID NO: 28306 - RNA, 24 nt, Artificial Sequence
  Synthetic
ggacugggaggagucgggggagga

SEQ ID NO: 28307 - RNA, 18 nt, Artificial Sequence
  Synthetic
auuuaaggacugggagga

SEQ ID NO: 28308 - RNA, 19 nt, Artificial Sequence
  Synthetic
uauuuaaggacugggagga

SEQ ID NO: 28309 - RNA, 20 nt, Artificial Sequence
  Synthetic
guauuuaaggacugggagga

SEQ ID NO: 28310 - RNA, 21 nt, Artificial Sequence
  Synthetic
uguauuuaaggacugggagga

SEQ ID NO: 28311 - RNA, 22 nt, Artificial Sequence
  Synthetic
guguauuuaaggacugggagga

SEQ ID NO: 28312 - RNA, 23 nt, Artificial Sequence
  Synthetic
uguguauuuaaggacugggagga

SEQ ID NO: 28313 - RNA, 24 nt, Artificial Sequence
  Synthetic
cuguguauuuaaggacugggagga

SEQ ID NO: 28314 - RNA, 18 nt, Artificial Sequence
  Synthetic
auggcaaacaagguagga

SEQ ID NO: 28315 - RNA, 19 nt, Artificial Sequence
  Synthetic
aauggcaaacaagguagga

SEQ ID NO: 28316 - RNA, 20 nt, Artificial Sequence
  Synthetic
caauggcaaacaagguagga

SEQ ID NO: 28317 - RNA, 21 nt, Artificial Sequence
  Synthetic
ccaauggcaaacaagguagga

SEQ ID NO: 28318 - RNA, 22 nt, Artificial Sequence
  Synthetic
gccaauggcaaacaagguagga

SEQ ID NO: 28319 - RNA, 23 nt, Artificial Sequence
  Synthetic
ggccaauggcaaacaagguagga

SEQ ID NO: 28320 - RNA, 24 nt, Artificial Sequence
  Synthetic
uggccaauggcaaacaagguagga

SEQ ID NO: 28321 - RNA, 18 nt, Artificial Sequence
  Synthetic
cuguaccaaaccuucgga

SEQ ID NO: 28322 - RNA, 19 nt, Artificial Sequence
  Synthetic
gcuguaccaaaccuucgga

SEQ ID NO: 28323 - RNA, 20 nt, Artificial Sequence
  Synthetic
ugcuguaccaaaccuucgga

SEQ ID NO: 28324 - RNA, 21 nt, Artificial Sequence
  Synthetic
cugcuguaccaaaccuucgga

SEQ ID NO: 28325 - RNA, 22 nt, Artificial Sequence
  Synthetic
gcugcuguaccaaaccuucgga

SEQ ID NO: 28326 - RNA, 23 nt, Artificial Sequence
  Synthetic
ugcugcuguaccaaaccuucgga

SEQ ID NO: 28327 - RNA, 24 nt, Artificial Sequence
  Synthetic
cugcugcuguaccaaaccuucgga

SEQ ID NO: 28328 - RNA, 18 nt, Artificial Sequence
  Synthetic
gcgagaaggggcauggga

SEQ ID NO: 28329 - RNA, 19 nt, Artificial Sequence
  Synthetic
ggcgagaaggggcauggga

SEQ ID NO: 28330 - RNA, 20 nt, Artificial Sequence
  Synthetic
cggcgagaaggggcauggga

SEQ ID NO: 28331 - RNA, 21 nt, Artificial Sequence
  Synthetic
acggcgagaaggggcauggga

SEQ ID NO: 28332 - RNA, 22 nt, Artificial Sequence
  Synthetic
aacggcgagaaggggcauggga

SEQ ID NO: 28333 - RNA, 23 nt, Artificial Sequence
  Synthetic
caacggcgagaaggggcauggga

SEQ ID NO: 28334 - RNA, 24 nt, Artificial Sequence
  Synthetic
ucaacggcgagaaggggcauggga

SEQ ID NO: 28335 - RNA, 18 nt, Artificial Sequence
  Synthetic
cggaaaauaccuauggga

SEQ ID NO: 28336 - RNA, 19 nt, Artificial Sequence
  Synthetic
ucggaaaauaccuauggga

SEQ ID NO: 28337 - RNA, 20 nt, Artificial Sequence
  Synthetic
uucggaaaauaccuauggga

SEQ ID NO: 28338 - RNA, 21 nt, Artificial Sequence
  Synthetic
uuucggaaaauaccuauggga

SEQ ID NO: 28339 - RNA, 22 nt, Artificial Sequence
  Synthetic
cuuucggaaaauaccuauggga

SEQ ID NO: 28340 - RNA, 23 nt, Artificial Sequence
  Synthetic
gcuuucggaaaauaccuauggga

SEQ ID NO: 28341 - RNA, 24 nt, Artificial Sequence
  Synthetic
ggcuuucggaaaauaccuauggga

SEQ ID NO: 28342 - RNA, 18 nt, Artificial Sequence
  Synthetic
gucaccauauuccuggga

SEQ ID NO: 28343 - RNA, 19 nt, Artificial Sequence
  Synthetic
ggucaccauauuccuggga

SEQ ID NO: 28344 - RNA, 20 nt, Artificial Sequence
  Synthetic
gggucaccauauuccuggga

SEQ ID NO: 28345 - RNA, 21 nt, Artificial Sequence
  Synthetic
ugggucaccauauuccuggga

SEQ ID NO: 28346 - RNA, 22 nt, Artificial Sequence
  Synthetic
gugggucaccauauuccuggga

SEQ ID NO: 28347 - RNA, 23 nt, Artificial Sequence
  Synthetic
ugugggucaccauauuccuggga

SEQ ID NO: 28348 - RNA, 24 nt, Artificial Sequence
  Synthetic
uugugggucaccauauuccuggga

SEQ ID NO: 28349 - RNA, 18 nt, Artificial Sequence
  Synthetic
  misc_feature (11)..(11): n is a, c, g, or u
uggguuauaunauuggga

SEQ ID NO: 28350 - RNA, 19 nt, Artificial Sequence
  Synthetic
  misc_feature (12)..(12): n is a, c, g, or u
auggguuauaunauuggga

SEQ ID NO: 28351 - RNA, 20 nt, Artificial Sequence
  Synthetic
  misc_feature (13)..(13): n is a, c, g, or u
uauggguuauaunauuggga

SEQ ID NO: 28352 - RNA, 21 nt, Artificial Sequence
  Synthetic
  misc_feature (14)..(14): n is a, c, g, or u
uuauggguuauaunauuggga

SEQ ID NO: 28353 - RNA, 22 nt, Artificial Sequence
  Synthetic
  misc_feature (15)..(15): n is a, c, g, or u
uuuauggguuauaunauuggga

SEQ ID NO: 28354 - RNA, 23 nt, Artificial Sequence
  Synthetic
  misc_feature (16)..(16): n is a, c, g, or u
cuuuauggguuauaunauuggga

SEQ ID NO: 28355 - RNA, 24 nt, Artificial Sequence
  Synthetic
  misc_feature (17)..(17): n is a, c, g, or u
acuuuauggguuauaunauuggga

SEQ ID NO: 28356 - RNA, 18 nt, Artificial Sequence
  Synthetic
cccggucaacgaccugga

SEQ ID NO: 28357 - RNA, 19 nt, Artificial Sequence
  Synthetic
ccccggucaacgaccugga

SEQ ID NO: 28358 - RNA, 20 nt, Artificial Sequence
  Synthetic
gccccggucaacgaccugga

SEQ ID NO: 28359 - RNA, 18 nt, Artificial Sequence
  Synthetic
  misc_feature (10)..(10): n is a, c, g, or u
gcucgcagcnggucugga

SEQ ID NO: 28360 - RNA, 19 nt, Artificial Sequence
  Synthetic
  misc_feature (11)..(11): n is a, c, g, or u
cgcucgcagcnggucugga

SEQ ID NO: 28361 - RNA, 20 nt, Artificial Sequence
  Synthetic
  misc_feature (12)..(12): n is a, c, g, or u
ucgcucgcagcnggucugga

SEQ ID NO: 28362 - RNA, 21 nt, Artificial Sequence
  Synthetic
  misc_feature (13)..(13): n is a, c, g, or u
uucgcucgcagcnggucugga

SEQ ID NO: 28363 - RNA, 22 nt, Artificial Sequence
  Synthetic
  misc_feature (14)..(14): n is a, c, g, or u
uuucgcucgcagcnggucugga

SEQ ID NO: 28364 - RNA, 23 nt, Artificial Sequence
  Synthetic
  misc_feature (15)..(15): n is a, c, g, or u
guuucgcucgcagcnggucugga

SEQ ID NO: 28365 - RNA, 24 nt, Artificial Sequence
  Synthetic
  misc_feature (16)..(16): n is a, c, g, or u
uguuucgcucgcagcnggucugga

SEQ ID NO: 28366 - RNA, 18 nt, Artificial Sequence
  Synthetic
ccaccaagcacuguugga

SEQ ID NO: 28367 - RNA, 19 nt, Artificial Sequence
  Synthetic
uccaccaagcacuguugga

SEQ ID NO: 28368 - RNA, 20 nt, Artificial Sequence
  Synthetic
uuccaccaagcacuguugga

SEQ ID NO: 28369 - RNA, 21 nt, Artificial Sequence
  Synthetic
guuccaccaagcacuguugga

SEQ ID NO: 28370 - RNA, 22 nt, Artificial Sequence
  Synthetic
aguuccaccaagcacuguugga

SEQ ID NO: 28371 - RNA, 23 nt, Artificial Sequence
  Synthetic
caguuccaccaagcacuguugga

SEQ ID NO: 28372 - RNA, 24 nt, Artificial Sequence
  Synthetic
acaguuccaccaagcacuguugga

SEQ ID NO: 28373 - RNA, 18 nt, Artificial Sequence
  Synthetic
  misc_feature (3)..(3): n is a, c, g, or u
ucnugccuuacauuugga

SEQ ID NO: 28374 - RNA, 19 nt, Artificial Sequence
  Synthetic
  misc_feature (4)..(4): n is a, c, g, or u
uucnugccuuacauuugga

SEQ ID NO: 28375 - RNA, 20 nt, Artificial Sequence
  Synthetic
  misc_feature (5)..(5): n is a, c, g, or u
uuucnugccuuacauuugga

SEQ ID NO: 28376 - RNA, 21 nt, Artificial Sequence
  Synthetic
  misc_feature (6)..(6): n is a, c, g, or u
auuucnugccuuacauuugga

SEQ ID NO: 28377 - RNA, 22 nt, Artificial Sequence
  Synthetic
  misc_feature (1)..(1): n is a, c, g, or u
  misc_feature (7)..(7): n is a, c, g, or u
nauuucnugccuuacauuugga

SEQ ID NO: 28378 - RNA, 23 nt, Artificial Sequence
  Synthetic
  misc_feature (2)..(2): n is a, c, g, or u
  misc_feature (8)..(8): n is a, c, g, or u
anauuucnugccuuacauuugga

SEQ ID NO: 28379 - RNA, 24 nt, Artificial Sequence
  Synthetic
  misc_feature (3)..(3): n is a, c, g, or u
  misc_feature (9)..(9): n is a, c, g, or u
canauuucnugccuuacauuugga

SEQ ID NO: 28380 - RNA, 18 nt, Artificial Sequence
  Synthetic
uaaauacuucccuuugga

SEQ ID NO: 28381 - RNA, 19 nt, Artificial Sequence
  Synthetic
cuaaauacuucccuuugga

SEQ ID NO: 28382 - RNA, 20 nt, Artificial Sequence
  Synthetic
acuaaauacuucccuuugga

SEQ ID NO: 28383 - RNA, 21 nt, Artificial Sequence
  Synthetic
uacuaaauacuucccuuugga

SEQ ID NO: 28384 - RNA, 22 nt, Artificial Sequence
  Synthetic
uuacuaaauacuucccuuugga

SEQ ID NO: 28385 - RNA, 23 nt, Artificial Sequence
  Synthetic
guuacuaaauacuucccuuugga

SEQ ID NO: 28386 - RNA, 24 nt, Artificial Sequence
  Synthetic
aguuacuaaauacuucccuuugga

SEQ ID NO: 28387 - RNA, 18 nt, Artificial Sequence
  Synthetic
  misc_feature (12)..(12): n is a, c, g, or u
cccacucacuanaaauga

SEQ ID NO: 28388 - RNA, 19 nt, Artificial Sequence
  Synthetic
  misc_feature (13)..(13): n is a, c, g, or u
gcccacucacuanaaauga

SEQ ID NO: 28389 - RNA, 20 nt, Artificial Sequence
  Synthetic
  misc_feature (14)..(14): n is a, c, g, or u
ggcccacucacuanaaauga

SEQ ID NO: 28390 - RNA, 21 nt, Artificial Sequence
  Synthetic
  misc_feature (1)..(1): n is a, c, g, or u
  misc_feature (15)..(15): n is a, c, g, or u
nggcccacucacuanaaauga

SEQ ID NO: 28391 - RNA, 22 nt, Artificial Sequence
  Synthetic
  misc_feature (2)..(2): n is a, c, g, or u
  misc_feature (16)..(16): n is a, c, g, or u
unggcccacucacuanaaauga

SEQ ID NO: 28392 - RNA, 23 nt, Artificial Sequence
  Synthetic
  misc_feature (3)..(3): n is a, c, g, or u
  misc_feature (17)..(17): n is a, c, g, or u
gunggcccacucacuanaaauga

SEQ ID NO: 28393 - RNA, 24 nt, Artificial Sequence
  Synthetic
  misc_feature (4)..(4): n is a, c, g, or u
  misc_feature (18)..(18): n is a, c, g, or u
ugunggcccacucacuanaaauga

SEQ ID NO: 28394 - RNA, 18 nt, Artificial Sequence
  Synthetic
uugccaaguguuugcuga

SEQ ID NO: 28395 - RNA, 19 nt, Artificial Sequence
  Synthetic
uuugccaaguguuugcuga

SEQ ID NO: 28396 - RNA, 20 nt, Artificial Sequence
  Synthetic
cuuugccaaguguuugcuga

SEQ ID NO: 28397 - RNA, 21 nt, Artificial Sequence
  Synthetic
ccuuugccaaguguuugcuga

SEQ ID NO: 28398 - RNA, 22 nt, Artificial Sequence
  Synthetic
gccuuugccaaguguuugcuga

SEQ ID NO: 28399 - RNA, 23 nt, Artificial Sequence
  Synthetic
ggccuuugccaaguguuugcuga

SEQ ID NO: 28400 - RNA, 24 nt, Artificial Sequence
  Synthetic
aggccuuugccaaguguuugcuga

SEQ ID NO: 28401 - RNA, 18 nt, Artificial Sequence
  Synthetic
uucgcaaacuucccguga

SEQ ID NO: 28402 - RNA, 19 nt, Artificial Sequence
  Synthetic
uuucgcaaacuucccguga

SEQ ID NO: 28403 - RNA, 20 nt, Artificial Sequence
  Synthetic
cuuucgcaaacuucccguga

SEQ ID NO: 28404 - RNA, 21 nt, Artificial Sequence
  Synthetic
gcuuucgcaaacuucccguga

SEQ ID NO: 28405 - RNA, 22 nt, Artificial Sequence
  Synthetic
ugcuuucgcaaacuucccguga

SEQ ID NO: 28406 - RNA, 23 nt, Artificial Sequence
  Synthetic
uugcuuucgcaaacuucccguga

SEQ ID NO: 28407 - RNA, 24 nt, Artificial Sequence
  Synthetic
auugcuuucgcaaacuucccguga

SEQ ID NO: 28408 - RNA, 18 nt, Artificial Sequence
  Synthetic
  misc_feature (15)..(15): n is a, c, g, or u
acuugcaucaagaunuga

SEQ ID NO: 28409 - RNA, 19 nt, Artificial Sequence
  Synthetic
  misc_feature (16)..(16): n is a, c, g, or u
cacuugcaucaagaunuga

SEQ ID NO: 28410 - RNA, 20 nt, Artificial Sequence
  Synthetic
  misc_feature (17)..(17): n is a, c, g, or u
ucacuugcaucaagaunuga

SEQ ID NO: 28411 - RNA, 21 nt, Artificial Sequence
  Synthetic
  misc_feature (18)..(18): n is a, c, g, or u
uucacuugcaucaagaunuga

SEQ ID NO: 28412 - RNA, 22 nt, Artificial Sequence
  Synthetic
  misc_feature (19)..(19): n is a, c, g, or u
auucacuugcaucaagaunuga

SEQ ID NO: 28413 - RNA, 23 nt, Artificial Sequence
  Synthetic
  misc_feature (20)..(20): n is a, c, g, or u
cauucacuugcaucaagaunuga

SEQ ID NO: 28414 - RNA, 24 nt, Artificial Sequence
  Synthetic
  misc_feature (21)..(21): n is a, c, g, or u
acauucacuugcaucaagaunuga

SEQ ID NO: 28415 - RNA, 18 nt, Artificial Sequence
  Synthetic
cgugaauagacccauuga

SEQ ID NO: 28416 - RNA, 19 nt, Artificial Sequence
  Synthetic
ccgugaauagacccauuga

SEQ ID NO: 28417 - RNA, 20 nt, Artificial Sequence
  Synthetic
cccgugaauagacccauuga

SEQ ID NO: 28418 - RNA, 21 nt, Artificial Sequence
  Synthetic
ucccgugaauagacccauuga

SEQ ID NO: 28419 - RNA, 22 nt, Artificial Sequence
  Synthetic
uucccgugaauagacccauuga

SEQ ID NO: 28420 - RNA, 23 nt, Artificial Sequence
  Synthetic
cuucccgugaauagacccauuga

SEQ ID NO: 28421 - RNA, 24 nt, Artificial Sequence
  Synthetic
acuucccgugaauagacccauuga

SEQ ID NO: 28422 - RNA, 18 nt, Artificial Sequence
  Synthetic
cgguguguuucuuguuga

SEQ ID NO: 28423 - RNA, 19 nt, Artificial Sequence
  Synthetic
gcgguguguuucuuguuga

SEQ ID NO: 28424 - RNA, 20 nt, Artificial Sequence
  Synthetic
ggcgguguguuucuuguuga

SEQ ID NO: 28425 - RNA, 21 nt, Artificial Sequence
  Synthetic
aggcgguguguuucuuguuga

SEQ ID NO: 28426 - RNA, 22 nt, Artificial Sequence
  Synthetic
caggcgguguguuucuuguuga

SEQ ID NO: 28427 - RNA, 23 nt, Artificial Sequence
  Synthetic
acaggcgguguguuucuuguuga

SEQ ID NO: 28428 - RNA, 24 nt, Artificial Sequence
  Synthetic
uacaggcgguguguuucuuguuga

SEQ ID NO: 28429 - RNA, 18 nt, Artificial Sequence
  Synthetic
  misc_feature (3)..(3): n is a, c, g, or u
  misc_feature (17)..(17): n is a, c, g, or u
gunggcccacucacuana

SEQ ID NO: 28430 - RNA, 19 nt, Artificial Sequence
  Synthetic
  misc_feature (4)..(4): n is a, c, g, or u
  misc_feature (18)..(18): n is a, c, g, or u
ugunggcccacucacuana

SEQ ID NO: 28431 - RNA, 20 nt, Artificial Sequence
  Synthetic
  misc_feature (5)..(5): n is a, c, g, or u
  misc_feature (19)..(19): n is a, c, g, or u
uugunggcccacucacuana

SEQ ID NO: 28432 - RNA, 21 nt, Artificial Sequence
  Synthetic
  misc_feature (6)..(6): n is a, c, g, or u
  misc_feature (20)..(20): n is a, c, g, or u
uuugunggcccacucacuana

SEQ ID NO: 28433 - RNA, 22 nt, Artificial Sequence
  Synthetic
  misc_feature (7)..(7): n is a, c, g, or u
  misc_feature (21)..(21): n is a, c, g, or u
auuugunggcccacucacuana

SEQ ID NO: 28434 - RNA, 23 nt, Artificial Sequence
  Synthetic
  misc_feature (8)..(8): n is a, c, g, or u
  misc_feature (22)..(22): n is a, c, g, or u
aauuugunggcccacucacuana

SEQ ID NO: 28435 - RNA, 24 nt, Artificial Sequence
  Synthetic
  misc_feature (9)..(9): n is a, c, g, or u
  misc_feature (23)..(23): n is a, c, g, or u
caauuugunggcccacucacuana

SEQ ID NO: 28436 - RNA, 18 nt, Artificial Sequence
  Synthetic
  misc_feature (17)..(17): n is a, c, g, or u
acuuuauggguuauauna

SEQ ID NO: 28437 - RNA, 19 nt, Artificial Sequence
  Synthetic
  misc_feature (18)..(18): n is a, c, g, or u
cacuuuauggguuauauna

SEQ ID NO: 28438 - RNA, 20 nt, Artificial Sequence
  Synthetic
  misc_feature (1)..(1): n is a, c, g, or u
  misc_feature (19)..(19): n is a, c, g, or u
ncacuuuauggguuauauna

SEQ ID NO: 28439 - RNA, 21 nt, Artificial Sequence
  Synthetic
  misc_feature (2)..(2): n is a, c, g, or u
  misc_feature (20)..(20): n is a, c, g, or u
uncacuuuauggguuauauna

SEQ ID NO: 28440 - RNA, 22 nt, Artificial Sequence
  Synthetic
  misc_feature (1)..(1): n is a, c, g, or u
  misc_feature (3)..(3): n is a, c, g, or u
  misc_feature (21)..(21): n is a, c, g, or u
nuncacuuuauggguuauauna

SEQ ID NO: 28441 - RNA, 23 nt, Artificial Sequence
  Synthetic
  misc_feature (2)..(2): n is a, c, g, or u
  misc_feature (4)..(4): n is a, c, g, or u
  misc_feature (22)..(22): n is a, c, g, or u
cnuncacuuuauggguuauauna

SEQ ID NO: 28442 - RNA, 24 nt, Artificial Sequence
  Synthetic
  misc_feature (3)..(3): n is a, c, g, or u
  misc_feature (5)..(5): n is a, c, g, or u
  misc_feature (23)..(23): n is a, c, g, or u
ccnuncacuuuauggguuauauna

SEQ ID NO: 28443 - RNA, 18 nt, Artificial Sequence
  Synthetic
cuuucucuguaaacaaua

SEQ ID NO: 28444 - RNA, 19 nt, Artificial Sequence
  Synthetic
ccuuucucuguaaacaaua

SEQ ID NO: 28445 - RNA, 20 nt, Artificial Sequence
  Synthetic
gccuuucucuguaaacaaua

SEQ ID NO: 28446 - RNA, 21 nt, Artificial Sequence
  Synthetic
ggccuuucucuguaaacaaua

SEQ ID NO: 28447 - RNA, 22 nt, Artificial Sequence
  Synthetic
aggccuuucucuguaaacaaua

SEQ ID NO: 28448 - RNA, 23 nt, Artificial Sequence
  Synthetic
aaggccuuucucuguaaacaaua

SEQ ID NO: 28449 - RNA, 24 nt, Artificial Sequence
  Synthetic
caaggccuuucucuguaaacaaua

SEQ ID NO: 28450 - RNA, 18 nt, Artificial Sequence
  Synthetic
ugccaacaaccuuacaua

SEQ ID NO: 28451 - RNA, 19 nt, Artificial Sequence
  Synthetic
uugccaacaaccuuacaua

SEQ ID NO: 28452 - RNA, 20 nt, Artificial Sequence
  Synthetic
cuugccaacaaccuuacaua

SEQ ID NO: 28453 - RNA, 21 nt, Artificial Sequence
  Synthetic
  misc_feature (1)..(1): n is a, c, g, or u
ncuugccaacaaccuuacaua

SEQ ID NO: 28454 - RNA, 22 nt, Artificial Sequence
  Synthetic
  misc_feature (2)..(2): n is a, c, g, or u
ancuugccaacaaccuuacaua

SEQ ID NO: 28455 - RNA, 23 nt, Artificial Sequence
  Synthetic
  misc_feature (3)..(3): n is a, c, g, or u
gancuugccaacaaccuuacaua

SEQ ID NO: 28456 - RNA, 24 nt, Artificial Sequence
  Synthetic
  misc_feature (4)..(4): n is a, c, g, or u
ggancuugccaacaaccuuacaua

SEQ ID NO: 28457 - RNA, 18 nt, Artificial Sequence
  Synthetic
  misc_feature (13)..(13): n is a, c, g, or u
uugcaucaagaunugaua

SEQ ID NO: 28458 - RNA, 19 nt, Artificial Sequence
  Synthetic
  misc_feature (14)..(14): n is a, c, g, or u
cuugcaucaagaunugaua

SEQ ID NO: 28459 - RNA, 20 nt, Artificial Sequence
  Synthetic
  misc_feature (15)..(15): n is a, c, g, or u
acuugcaucaagaunugaua

SEQ ID NO: 28460 - RNA, 21 nt, Artificial Sequence
  Synthetic
  misc_feature (16)..(16): n is a, c, g, or u
cacuugcaucaagaunugaua

SEQ ID NO: 28461 - RNA, 22 nt, Artificial Sequence
  Synthetic
  misc_feature (17)..(17): n is a, c, g, or u
ucacuugcaucaagaunugaua

SEQ ID NO: 28462 - RNA, 23 nt, Artificial Sequence
  Synthetic
  misc_feature (18)..(18): n is a, c, g, or u
uucacuugcaucaagaunugaua

SEQ ID NO: 28463 - RNA, 24 nt, Artificial Sequence
  Synthetic
  misc_feature (19)..(19): n is a, c, g, or u
auucacuugcaucaagaunugaua

SEQ ID NO: 28464 - RNA, 18 nt, Artificial Sequence
  Synthetic
aggcaggaauucuauaua

SEQ ID NO: 28465 - RNA, 19 nt, Artificial Sequence
  Synthetic
aaggcaggaauucuauaua

SEQ ID NO: 28466 - RNA, 20 nt, Artificial Sequence
  Synthetic
gaaggcaggaauucuauaua

SEQ ID NO: 28467 - RNA, 21 nt, Artificial Sequence
  Synthetic
ggaaggcaggaauucuauaua

SEQ ID NO: 28468 - RNA, 22 nt, Artificial Sequence
  Synthetic
uggaaggcaggaauucuauaua

SEQ ID NO: 28469 - RNA, 23 nt, Artificial Sequence
  Synthetic
guggaaggcaggaauucuauaua

SEQ ID NO: 28470 - RNA, 24 nt, Artificial Sequence
  Synthetic
uguggaaggcaggaauucuauaua

SEQ ID NO: 28471 - RNA, 18 nt, Artificial Sequence
  Synthetic
gaaggcaggaauucuaua

SEQ ID NO: 28472 - RNA, 19 nt, Artificial Sequence
  Synthetic
ggaaggcaggaauucuaua

SEQ ID NO: 28473 - RNA, 20 nt, Artificial Sequence
  Synthetic
uggaaggcaggaauucuaua

SEQ ID NO: 28474 - RNA, 21 nt, Artificial Sequence
  Synthetic
guggaaggcaggaauucuaua

SEQ ID NO: 28475 - RNA, 22 nt, Artificial Sequence
  Synthetic
uguggaaggcaggaauucuaua

SEQ ID NO: 28476 - RNA, 23 nt, Artificial Sequence
  Synthetic
uuguggaaggcaggaauucuaua

SEQ ID NO: 28477 - RNA, 24 nt, Artificial Sequence
  Synthetic
uuuguggaaggcaggaauucuaua

SEQ ID NO: 28478 - RNA, 18 nt, Artificial Sequence
  Synthetic
caccaguuggauccacua

SEQ ID NO: 28479 - RNA, 19 nt, Artificial Sequence
  Synthetic
ccaccaguuggauccacua

SEQ ID NO: 28480 - RNA, 20 nt, Artificial Sequence
  Synthetic
accaccaguuggauccacua

SEQ ID NO: 28481 - RNA, 21 nt, Artificial Sequence
  Synthetic
gaccaccaguuggauccacua

SEQ ID NO: 28482 - RNA, 22 nt, Artificial Sequence
  Synthetic
agaccaccaguuggauccacua

SEQ ID NO: 28483 - RNA, 23 nt, Artificial Sequence
  Synthetic
cagaccaccaguuggauccacua

SEQ ID NO: 28484 - RNA, 24 nt, Artificial Sequence
  Synthetic
ccagaccaccaguuggauccacua

SEQ ID NO: 28485 - RNA, 18 nt, Artificial Sequence
  Synthetic
guugguucuucuggacua

SEQ ID NO: 28486 - RNA, 19 nt, Artificial Sequence
  Synthetic
uguugguucuucuggacua

SEQ ID NO: 28487 - RNA, 20 nt, Artificial Sequence
  Synthetic
uuguugguucuucuggacua

SEQ ID NO: 28488 - RNA, 21 nt, Artificial Sequence
  Synthetic
cuuguugguucuucuggacua

SEQ ID NO: 28489 - RNA, 22 nt, Artificial Sequence
  Synthetic
ucuuguugguucuucuggacua

SEQ ID NO: 28490 - RNA, 23 nt, Artificial Sequence
  Synthetic
uucuuguugguucuucuggacua

SEQ ID NO: 28491 - RNA, 24 nt, Artificial Sequence
  Synthetic
cuucuuguugguucuucuggacua

SEQ ID NO: 28492 - RNA, 18 nt, Artificial Sequence
  Synthetic
  misc_feature (10)..(10): n is a, c, g, or u
agguauuaanccuuacua

SEQ ID NO: 28493 - RNA, 19 nt, Artificial Sequence
  Synthetic
  misc_feature (11)..(11): n is a, c, g, or u
aagguauuaanccuuacua

SEQ ID NO: 28494 - RNA, 20 nt, Artificial Sequence
  Synthetic
  misc_feature (12)..(12): n is a, c, g, or u
aaagguauuaanccuuacua

SEQ ID NO: 28495 - RNA, 21 nt, Artificial Sequence
  Synthetic
  misc_feature (13)..(13): n is a, c, g, or u
uaaagguauuaanccuuacua

SEQ ID NO: 28496 - RNA, 22 nt, Artificial Sequence
  Synthetic
  misc_feature (14)..(14): n is a, c, g, or u
auaaagguauuaanccuuacua

SEQ ID NO: 28497 - RNA, 23 nt, Artificial Sequence
  Synthetic
  misc_feature (15)..(15): n is a, c, g, or u
gauaaagguauuaanccuuacua

SEQ ID NO: 28498 - RNA, 24 nt, Artificial Sequence
  Synthetic
  misc_feature (16)..(16): n is a, c, g, or u
ggauaaagguauuaanccuuacua

SEQ ID NO: 28499 - RNA, 18 nt, Artificial Sequence
  Synthetic
ccgucuguccgggaccua

SEQ ID NO: 28500 - RNA, 19 nt, Artificial Sequence
  Synthetic
cccgucuguccgggaccua

SEQ ID NO: 28501 - RNA, 20 nt, Artificial Sequence
  Synthetic
ucccgucuguccgggaccua

SEQ ID NO: 28502 - RNA, 21 nt, Artificial Sequence
  Synthetic
uucccgucuguccgggaccua

SEQ ID NO: 28503 - RNA, 22 nt, Artificial Sequence
  Synthetic
cuucccgucuguccgggaccua

SEQ ID NO: 28504 - RNA, 23 nt, Artificial Sequence
  Synthetic
ucuucccgucuguccgggaccua

SEQ ID NO: 28505 - RNA, 24 nt, Artificial Sequence
  Synthetic
uucuucccgucuguccgggaccua

SEQ ID NO: 28506 - RNA, 18 nt, Artificial Sequence
  Synthetic
gcuuucggaaaauaccua

SEQ ID NO: 28507 - RNA, 19 nt, Artificial Sequence
  Synthetic
ggcuuucggaaaauaccua

SEQ ID NO: 28508 - RNA, 20 nt, Artificial Sequence
  Synthetic
gggcuuucggaaaauaccua

SEQ ID NO: 28509 - RNA, 21 nt, Artificial Sequence
  Synthetic
ugggcuuucggaaaauaccua

SEQ ID NO: 28510 - RNA, 22 nt, Artificial Sequence
  Synthetic
uugggcuuucggaaaauaccua

SEQ ID NO: 28511 - RNA, 23 nt, Artificial Sequence
  Synthetic
cuugggcuuucggaaaauaccua

SEQ ID NO: 28512 - RNA, 24 nt, Artificial Sequence
  Synthetic
ucuugggcuuucggaaaauaccua

SEQ ID NO: 28513 - RNA, 18 nt, Artificial Sequence
  Synthetic
aacgaggcagggccccua

SEQ ID NO: 28514 - RNA, 19 nt, Artificial Sequence
  Synthetic
caacgaggcagggccccua

SEQ ID NO: 28515 - RNA, 20 nt, Artificial Sequence
  Synthetic
acaacgaggcagggccccua

SEQ ID NO: 28516 - RNA, 21 nt, Artificial Sequence
  Synthetic
gacaacgaggcagggccccua

SEQ ID NO: 28517 - RNA, 22 nt, Artificial Sequence
  Synthetic
agacaacgaggcagggccccua

SEQ ID NO: 28518 - RNA, 23 nt, Artificial Sequence
  Synthetic
uagacaacgaggcagggccccua

SEQ ID NO: 28519 - RNA, 24 nt, Artificial Sequence
  Synthetic
uuagacaacgaggcagggccccua

SEQ ID NO: 28520 - RNA, 18 nt, Artificial Sequence
  Synthetic
augccuguauuaccgcua

SEQ ID NO: 28521 - RNA, 19 nt, Artificial Sequence
  Synthetic
uaugccuguauuaccgcua

SEQ ID NO: 28522 - RNA, 20 nt, Artificial Sequence
  Synthetic
guaugccuguauuaccgcua

SEQ ID NO: 28523 - RNA, 21 nt, Artificial Sequence
  Synthetic
uguaugccuguauuaccgcua

SEQ ID NO: 28524 - RNA, 22 nt, Artificial Sequence
  Synthetic
uuguaugccuguauuaccgcua

SEQ ID NO: 28525 - RNA, 23 nt, Artificial Sequence
  Synthetic
cuuguaugccuguauuaccgcua

SEQ ID NO: 28526 - RNA, 24 nt, Artificial Sequence
  Synthetic
ccuuguaugccuguauuaccgcua

SEQ ID NO: 28527 - RNA, 18 nt, Artificial Sequence
  Synthetic
ccagucucuccaccucua

SEQ ID NO: 28528 - RNA, 19 nt, Artificial Sequence
  Synthetic
cccagucucuccaccucua

SEQ ID NO: 28529 - RNA, 20 nt, Artificial Sequence
  Synthetic
ccccagucucuccaccucua

SEQ ID NO: 28530 - RNA, 21 nt, Artificial Sequence
  Synthetic
accccagucucuccaccucua

SEQ ID NO: 28531 - RNA, 22 nt, Artificial Sequence
  Synthetic
aaccccagucucuccaccucua

SEQ ID NO: 28532 - RNA, 23 nt, Artificial Sequence
  Synthetic
caaccccagucucuccaccucua

SEQ ID NO: 28533 - RNA, 24 nt, Artificial Sequence
  Synthetic
ccaaccccagucucuccaccucua

SEQ ID NO: 28534 - RNA, 18 nt, Artificial Sequence
  Synthetic
caccgcuucagcccucua

SEQ ID NO: 28535 - RNA, 19 nt, Artificial Sequence
  Synthetic
acaccgcuucagcccucua

SEQ ID NO: 28536 - RNA, 20 nt, Artificial Sequence
  Synthetic
gacaccgcuucagcccucua

SEQ ID NO: 28537 - RNA, 21 nt, Artificial Sequence
  Synthetic
cgacaccgcuucagcccucua

SEQ ID NO: 28538 - RNA, 22 nt, Artificial Sequence
  Synthetic
ucgacaccgcuucagcccucua

SEQ ID NO: 28539 - RNA, 23 nt, Artificial Sequence
  Synthetic
cucgacaccgcuucagcccucua

SEQ ID NO: 28540 - RNA, 24 nt, Artificial Sequence
  Synthetic
acucgacaccgcuucagcccucua

SEQ ID NO: 28541 - RNA, 18 nt, Artificial Sequence
  Synthetic
uggaaggcaggaauucua

SEQ ID NO: 28542 - RNA, 19 nt, Artificial Sequence
  Synthetic
guggaaggcaggaauucua

SEQ ID NO: 28543 - RNA, 20 nt, Artificial Sequence
  Synthetic
uguggaaggcaggaauucua

SEQ ID NO: 28544 - RNA, 21 nt, Artificial Sequence
  Synthetic
uuguggaaggcaggaauucua

SEQ ID NO: 28545 - RNA, 22 nt, Artificial Sequence
  Synthetic
uuuguggaaggcaggaauucua

SEQ ID NO: 28546 - RNA, 23 nt, Artificial Sequence
  Synthetic
cuuuguggaaggcaggaauucua

SEQ ID NO: 28547 - RNA, 24 nt, Artificial Sequence
  Synthetic
acuuuguggaaggcaggaauucua

SEQ ID NO: 28548 - RNA, 18 nt, Artificial Sequence
  Synthetic
cuguuggauccgagagua

SEQ ID NO: 28549 - RNA, 19 nt, Artificial Sequence
  Synthetic
acuguuggauccgagagua

SEQ ID NO: 28550 - RNA, 20 nt, Artificial Sequence
  Synthetic
cacuguuggauccgagagua

SEQ ID NO: 28551 - RNA, 21 nt, Artificial Sequence
  Synthetic
gcacuguuggauccgagagua

SEQ ID NO: 28552 - RNA, 22 nt, Artificial Sequence
  Synthetic
agcacuguuggauccgagagua

SEQ ID NO: 28553 - RNA, 23 nt, Artificial Sequence
  Synthetic
aagcacuguuggauccgagagua

SEQ ID NO: 28554 - RNA, 24 nt, Artificial Sequence
  Synthetic
caagcacuguuggauccgagagua

SEQ ID NO: 28555 - RNA, 18 nt, Artificial Sequence
  Synthetic
  misc_feature (13)..(13): n is a, c, g, or u
uauauggaugaunuggua

SEQ ID NO: 28556 - RNA, 19 nt, Artificial Sequence
  Synthetic
  misc_feature (14)..(14): n is a, c, g, or u
uuauauggaugaunuggua

SEQ ID NO: 28557 - RNA, 20 nt, Artificial Sequence
  Synthetic
  misc_feature (15)..(15): n is a, c, g, or u
guuauauggaugaunuggua

SEQ ID NO: 28558 - RNA, 21 nt, Artificial Sequence
  Synthetic
  misc_feature (16)..(16): n is a, c, g, or u
aguuauauggaugaunuggua

SEQ ID NO: 28559 - RNA, 22 nt, Artificial Sequence
  Synthetic
  misc_feature (17)..(17): n is a, c, g, or u
uaguuauauggaugaunuggua

SEQ ID NO: 28560 - RNA, 23 nt, Artificial Sequence
  Synthetic
  misc_feature (18)..(18): n is a, c, g, or u
uuaguuauauggaugaunuggua

SEQ ID NO: 28561 - RNA, 24 nt, Artificial Sequence
  Synthetic
  misc_feature (19)..(19): n is a, c, g, or u
uuuaguuauauggaugaunuggua

SEQ ID NO: 28562 - RNA, 18 nt, Artificial Sequence
  Synthetic
uucccuccugcugcugua

SEQ ID NO: 28563 - RNA, 19 nt, Artificial Sequence
  Synthetic
uuucccuccugcugcugua

SEQ ID NO: 28564 - RNA, 20 nt, Artificial Sequence
  Synthetic
guuucccuccugcugcugua

SEQ ID NO: 28565 - RNA, 21 nt, Artificial Sequence
  Synthetic
uguuucccuccugcugcugua

SEQ ID NO: 28566 - RNA, 22 nt, Artificial Sequence
  Synthetic
auguuucccuccugcugcugua

SEQ ID NO: 28567 - RNA, 23 nt, Artificial Sequence
  Synthetic
uauguuucccuccugcugcugua

SEQ ID NO: 28568 - RNA, 24 nt, Artificial Sequence
  Synthetic
cuauguuucccuccugcugcugua

SEQ ID NO: 28569 - RNA, 18 nt, Artificial Sequence
  Synthetic
uacaucaaagacugugua

SEQ ID NO: 28570 - RNA, 19 nt, Artificial Sequence
  Synthetic
auacaucaaagacugugua

SEQ ID NO: 28571 - RNA, 20 nt, Artificial Sequence
  Synthetic
aauacaucaaagacugugua

SEQ ID NO: 28572 - RNA, 21 nt, Artificial Sequence
  Synthetic
gaauacaucaaagacugugua

SEQ ID NO: 28573 - RNA, 22 nt, Artificial Sequence
  Synthetic
ggaauacaucaaagacugugua

SEQ ID NO: 28574 - RNA, 23 nt, Artificial Sequence
  Synthetic
aggaauacaucaaagacugugua

SEQ ID NO: 28575 - RNA, 24 nt, Artificial Sequence
  Synthetic
gaggaauacaucaaagacugugua

SEQ ID NO: 28576 - RNA, 18 nt, Artificial Sequence
  Synthetic
agguuaaaggucuuugua

SEQ ID NO: 28577 - RNA, 19 nt, Artificial Sequence
  Synthetic
gagguuaaaggucuuugua

SEQ ID NO: 28578 - RNA, 20 nt, Artificial Sequence
  Synthetic
ugagguuaaaggucuuugua

SEQ ID NO: 28579 - RNA, 21 nt, Artificial Sequence
  Synthetic
uugagguuaaaggucuuugua

SEQ ID NO: 28580 - RNA, 22 nt, Artificial Sequence
  Synthetic
guugagguuaaaggucuuugua

SEQ ID NO: 28581 - RNA, 23 nt, Artificial Sequence
  Synthetic
aguugagguuaaaggucuuugua

SEQ ID NO: 28582 - RNA, 24 nt, Artificial Sequence
  Synthetic
gaguugagguuaaaggucuuugua

SEQ ID NO: 28583 - RNA, 18 nt, Artificial Sequence
  Synthetic
uuaaaggucuuuguauua

SEQ ID NO: 28584 - RNA, 19 nt, Artificial Sequence
  Synthetic
guuaaaggucuuuguauua

SEQ ID NO: 28585 - RNA, 20 nt, Artificial Sequence
  Synthetic
gguuaaaggucuuuguauua

SEQ ID NO: 28586 - RNA, 21 nt, Artificial Sequence
  Synthetic
agguuaaaggucuuuguauua

SEQ ID NO: 28587 - RNA, 22 nt, Artificial Sequence
  Synthetic
gagguuaaaggucuuuguauua

SEQ ID NO: 28588 - RNA, 23 nt, Artificial Sequence
  Synthetic
ugagguuaaaggucuuuguauua

SEQ ID NO: 28589 - RNA, 24 nt, Artificial Sequence
  Synthetic
uugagguuaaaggucuuuguauua

SEQ ID NO: 28590 - RNA, 18 nt, Artificial Sequence
  Synthetic
uguuuucucgccaacuua

SEQ ID NO: 28591 - RNA, 19 nt, Artificial Sequence
  Synthetic
uuguuuucucgccaacuua

SEQ ID NO: 28592 - RNA, 20 nt, Artificial Sequence
  Synthetic
uuuguuuucucgccaacuua

SEQ ID NO: 28593 - RNA, 21 nt, Artificial Sequence
  Synthetic
uuuuguuuucucgccaacuua

SEQ ID NO: 28594 - RNA, 22 nt, Artificial Sequence
  Synthetic
cuuuuguuuucucgccaacuua

SEQ ID NO: 28595 - RNA, 23 nt, Artificial Sequence
  Synthetic
gcuuuuguuuucucgccaacuua

SEQ ID NO: 28596 - RNA, 24 nt, Artificial Sequence
  Synthetic
ggcuuuuguuuucucgccaacuua

SEQ ID NO: 28597 - RNA, 18 nt, Artificial Sequence
  Synthetic
  misc_feature (2)..(2): n is a, c, g, or u
ancuugccaacaaccuua

SEQ ID NO: 28598 - RNA, 19 nt, Artificial Sequence
  Synthetic
  misc_feature (3)..(3): n is a, c, g, or u
gancuugccaacaaccuua

SEQ ID NO: 28599 - RNA, 20 nt, Artificial Sequence
  Synthetic
  misc_feature (4)..(4): n is a, c, g, or u
ggancuugccaacaaccuua

SEQ ID NO: 28600 - RNA, 21 nt, Artificial Sequence
  Synthetic
  misc_feature (1)..(1): n is a, c, g, or u
  misc_feature (5)..(5): n is a, c, g, or u
nggancuugccaacaaccuua

SEQ ID NO: 28601 - RNA, 22 nt, Artificial Sequence
  Synthetic
  misc_feature (2)..(2): n is a, c, g, or u
  misc_feature (6)..(6): n is a, c, g, or u
unggancuugccaacaaccuua

SEQ ID NO: 28602 - RNA, 23 nt, Artificial Sequence
  Synthetic
  misc_feature (3)..(3): n is a, c, g, or u
  misc_feature (7)..(7): n is a, c, g, or u
cunggancuugccaacaaccuua

SEQ ID NO: 28603 - RNA, 24 nt, Artificial Sequence
  Synthetic
  misc_feature (4)..(4): n is a, c, g, or u
  misc_feature (8)..(8): n is a, c, g, or u
ccunggancuugccaacaaccuua

SEQ ID NO: 28604 - RNA, 18 nt, Artificial Sequence
  Synthetic
cauggacauugacccuua

SEQ ID NO: 28605 - RNA, 19 nt, Artificial Sequence
  Synthetic
gcauggacauugacccuua

SEQ ID NO: 28606 - RNA, 20 nt, Artificial Sequence
  Synthetic
ggcauggacauugacccuua

SEQ ID NO: 28607 - RNA, 21 nt, Artificial Sequence
  Synthetic
gggcauggacauugacccuua

SEQ ID NO: 28608 - RNA, 22 nt, Artificial Sequence
  Synthetic
ggggcauggacauugacccuua

SEQ ID NO: 28609 - RNA, 23 nt, Artificial Sequence
  Synthetic
uggggcauggacauugacccuua

SEQ ID NO: 28610 - RNA, 24 nt, Artificial Sequence
  Synthetic
uuggggcauggacauugacccuua

SEQ ID NO: 28611 - RNA, 18 nt, Artificial Sequence
  Synthetic
cugucuggcuuuuaguua

SEQ ID NO: 28612 - RNA, 19 nt, Artificial Sequence
  Synthetic
acugucuggcuuuuaguua

SEQ ID NO: 28613 - RNA, 20 nt, Artificial Sequence
  Synthetic
cacugucuggcuuuuaguua

SEQ ID NO: 28614 - RNA, 21 nt, Artificial Sequence
  Synthetic
ccacugucuggcuuuuaguua

SEQ ID NO: 28615 - RNA, 22 nt, Artificial Sequence
  Synthetic
cccacugucuggcuuuuaguua

SEQ ID NO: 28616 - RNA, 23 nt, Artificial Sequence
  Synthetic
ccccacugucuggcuuuuaguua

SEQ ID NO: 28617 - RNA, 24 nt, Artificial Sequence
  Synthetic
cccccacugucuggcuuuuaguua

SEQ ID NO: 28618 - RNA, 18 nt, Artificial Sequence
  Synthetic
cggagacuacuguuguua

SEQ ID NO: 28619 - RNA, 19 nt, Artificial Sequence
  Synthetic
ccggagacuacuguuguua

SEQ ID NO: 28620 - RNA, 20 nt, Artificial Sequence
  Synthetic
uccggagacuacuguuguua

SEQ ID NO: 28621 - RNA, 21 nt, Artificial Sequence
  Synthetic
uuccggagacuacuguuguua

SEQ ID NO: 28622 - RNA, 22 nt, Artificial Sequence
  Synthetic
cuuccggagacuacuguuguua

SEQ ID NO: 28623 - RNA, 23 nt, Artificial Sequence
  Synthetic
acuuccggagacuacuguuguua

SEQ ID NO: 28624 - RNA, 24 nt, Artificial Sequence
  Synthetic
cacuuccggagacuacuguuguua

SEQ ID NO: 28625 - RNA, 18 nt, Artificial Sequence
  Synthetic
gggucgcaccucucuuua

SEQ ID NO: 28626 - RNA, 19 nt, Artificial Sequence
  Synthetic
cgggucgcaccucucuuua

SEQ ID NO: 28627 - RNA, 20 nt, Artificial Sequence
  Synthetic
acgggucgcaccucucuuua

SEQ ID NO: 28628 - RNA, 18 nt, Artificial Sequence
  Synthetic
ugggacuucaacacaaac

SEQ ID NO: 28629 - RNA, 19 nt, Artificial Sequence
  Synthetic
uugggacuucaacacaaac

SEQ ID NO: 28630 - RNA, 20 nt, Artificial Sequence
  Synthetic
auugggacuucaacacaaac

SEQ ID NO: 28631 - RNA, 18 nt, Artificial Sequence
  Synthetic
uggcuccaguucagaaac

SEQ ID NO: 28632 - RNA, 19 nt, Artificial Sequence
  Synthetic
guggcuccaguucagaaac

SEQ ID NO: 28633 - RNA, 20 nt, Artificial Sequence
  Synthetic
gguggcuccaguucagaaac

SEQ ID NO: 28634 - RNA, 21 nt, Artificial Sequence
  Synthetic
ugguggcuccaguucagaaac

SEQ ID NO: 28635 - RNA, 22 nt, Artificial Sequence
  Synthetic
cugguggcuccaguucagaaac

SEQ ID NO: 28636 - RNA, 23 nt, Artificial Sequence
  Synthetic
gcugguggcuccaguucagaaac

SEQ ID NO: 28637 - RNA, 24 nt, Artificial Sequence
  Synthetic
ugcugguggcuccaguucagaaac

SEQ ID NO: 28638 - RNA, 18 nt, Artificial Sequence
  Synthetic
gggagcaccucucucaac

SEQ ID NO: 28639 - RNA, 19 nt, Artificial Sequence
  Synthetic
ugggagcaccucucucaac

SEQ ID NO: 28640 - RNA, 20 nt, Artificial Sequence
  Synthetic
augggagcaccucucucaac

SEQ ID NO: 28641 - RNA, 21 nt, Artificial Sequence
  Synthetic
caugggagcaccucucucaac

SEQ ID NO: 28642 - RNA, 22 nt, Artificial Sequence
  Synthetic
gcaugggagcaccucucucaac

SEQ ID NO: 28643 - RNA, 23 nt, Artificial Sequence
  Synthetic
agcaugggagcaccucucucaac

SEQ ID NO: 28644 - RNA, 24 nt, Artificial Sequence
  Synthetic
cagcaugggagcaccucucucaac

SEQ ID NO: 28645 - RNA, 18 nt, Artificial Sequence
  Synthetic
cccgauugggacuucaac

SEQ ID NO: 28646 - RNA, 19 nt, Artificial Sequence
  Synthetic
ucccgauugggacuucaac

SEQ ID NO: 28647 - RNA, 20 nt, Artificial Sequence
  Synthetic
gucccgauugggacuucaac

SEQ ID NO: 28648 - RNA, 18 nt, Artificial Sequence
  Synthetic
caccauauuccugggaac

SEQ ID NO: 28649 - RNA, 19 nt, Artificial Sequence
  Synthetic
ucaccauauuccugggaac

SEQ ID NO: 28650 - RNA, 20 nt, Artificial Sequence
  Synthetic
gucaccauauuccugggaac

SEQ ID NO: 28651 - RNA, 21 nt, Artificial Sequence
  Synthetic
ggucaccauauuccugggaac

SEQ ID NO: 28652 - RNA, 22 nt, Artificial Sequence
  Synthetic
gggucaccauauuccugggaac

SEQ ID NO: 28653 - RNA, 23 nt, Artificial Sequence
  Synthetic
ugggucaccauauuccugggaac

SEQ ID NO: 28654 - RNA, 24 nt, Artificial Sequence
  Synthetic
gugggucaccauauuccugggaac

SEQ ID NO: 28655 - RNA, 18 nt, Artificial Sequence
  Synthetic
  misc_feature (11)..(11): n is a, c, g, or u
ggggacccugnuaugaac

SEQ ID NO: 28656 - RNA, 19 nt, Artificial Sequence
  Synthetic
  misc_feature (12)..(12): n is a, c, g, or u
uggggacccugnuaugaac

SEQ ID NO: 28657 - RNA, 20 nt, Artificial Sequence
  Synthetic
  misc_feature (13)..(13): n is a, c, g, or u
cuggggacccugnuaugaac

SEQ ID NO: 28658 - RNA, 21 nt, Artificial Sequence
  Synthetic
  misc_feature (14)..(14): n is a, c, g, or u
acuggggacccugnuaugaac

SEQ ID NO: 28659 - RNA, 22 nt, Artificial Sequence
  Synthetic
  misc_feature (15)..(15): n is a, c, g, or u
gacuggggacccugnuaugaac

SEQ ID NO: 28660 - RNA, 23 nt, Artificial Sequence
  Synthetic
  misc_feature (16)..(16): n is a, c, g, or u
agacuggggacccugnuaugaac

SEQ ID NO: 28661 - RNA, 24 nt, Artificial Sequence
  Synthetic
  misc_feature (17)..(17): n is a, c, g, or u
aagacuggggacccugnuaugaac

SEQ ID NO: 28662 - RNA, 18 nt, Artificial Sequence
  Synthetic
ggguucacacccccacac

SEQ ID NO: 28663 - RNA, 19 nt, Artificial Sequence
  Synthetic
aggguucacacccccacac

SEQ ID NO: 28664 - RNA, 20 nt, Artificial Sequence
  Synthetic
caggguucacacccccacac

SEQ ID NO: 28665 - RNA, 21 nt, Artificial Sequence
  Synthetic
ccaggguucacacccccacac

SEQ ID NO: 28666 - RNA, 22 nt, Artificial Sequence
  Synthetic
uccaggguucacacccccacac

SEQ ID NO: 28667 - RNA, 23 nt, Artificial Sequence
  Synthetic
guccaggguucacacccccacac

SEQ ID NO: 28668 - RNA, 24 nt, Artificial Sequence
  Synthetic
gguccaggguucacacccccacac

SEQ ID NO: 28669 - RNA, 18 nt, Artificial Sequence
  Synthetic
acgucgcauggagaccac

SEQ ID NO: 28670 - RNA, 19 nt, Artificial Sequence
  Synthetic
cacgucgcauggagaccac

SEQ ID NO: 28671 - RNA, 20 nt, Artificial Sequence
  Synthetic
gcacgucgcauggagaccac

SEQ ID NO: 28672 - RNA, 21 nt, Artificial Sequence
  Synthetic
ugcacgucgcauggagaccac

SEQ ID NO: 28673 - RNA, 22 nt, Artificial Sequence
  Synthetic
cugcacgucgcauggagaccac

SEQ ID NO: 28674 - RNA, 23 nt, Artificial Sequence
  Synthetic
ucugcacgucgcauggagaccac

SEQ ID NO: 28675 - RNA, 24 nt, Artificial Sequence
  Synthetic
cucugcacgucgcauggagaccac

SEQ ID NO: 28676 - RNA, 18 nt, Artificial Sequence
  Synthetic
gagaugccuuagaaucac

SEQ ID NO: 28677 - RNA, 19 nt, Artificial Sequence
  Synthetic
cgagaugccuuagaaucac

SEQ ID NO: 28678 - RNA, 20 nt, Artificial Sequence
  Synthetic
ccgagaugccuuagaaucac

SEQ ID NO: 28679 - RNA, 21 nt, Artificial Sequence
  Synthetic
accgagaugccuuagaaucac

SEQ ID NO: 28680 - RNA, 22 nt, Artificial Sequence
  Synthetic
uaccgagaugccuuagaaucac

SEQ ID NO: 28681 - RNA, 23 nt, Artificial Sequence
  Synthetic
cuaccgagaugccuuagaaucac

SEQ ID NO: 28682 - RNA, 24 nt, Artificial Sequence
  Synthetic
ucuaccgagaugccuuagaaucac

SEQ ID NO: 28683 - RNA, 18 nt, Artificial Sequence
  Synthetic
gaacauggagaacaucac

SEQ ID NO: 28684 - RNA, 19 nt, Artificial Sequence
  Synthetic
ugaacauggagaacaucac

SEQ ID NO: 28685 - RNA, 20 nt, Artificial Sequence
  Synthetic
augaacauggagaacaucac

SEQ ID NO: 28686 - RNA, 21 nt, Artificial Sequence
  Synthetic
uaugaacauggagaacaucac

SEQ ID NO: 28687 - RNA, 22 nt, Artificial Sequence
  Synthetic
  misc_feature (1)..(1): n is a, c, g, or u
nuaugaacauggagaacaucac

SEQ ID NO: 28688 - RNA, 23 nt, Artificial Sequence
  Synthetic
  misc_feature (2)..(2): n is a, c, g, or u
gnuaugaacauggagaacaucac

SEQ ID NO: 28689 - RNA, 24 nt, Artificial Sequence
  Synthetic
  misc_feature (3)..(3): n is a, c, g, or u
ugnuaugaacauggagaacaucac

SEQ ID NO: 28690 - RNA, 18 nt, Artificial Sequence
  Synthetic
  misc_feature (7)..(7): n is a, c, g, or u
auuugunggcccacucac

SEQ ID NO: 28691 - RNA, 19 nt, Artificial Sequence
  Synthetic
  misc_feature (8)..(8): n is a, c, g, or u
aauuugunggcccacucac

SEQ ID NO: 28692 - RNA, 20 nt, Artificial Sequence
  Synthetic
  misc_feature (9)..(9): n is a, c, g, or u
caauuugunggcccacucac

SEQ ID NO: 28693 - RNA, 21 nt, Artificial Sequence
  Synthetic
  misc_feature (10)..(10): n is a, c, g, or u
acaauuugunggcccacucac

SEQ ID NO: 28694 - RNA, 22 nt, Artificial Sequence
  Synthetic
  misc_feature (11)..(11): n is a, c, g, or u
aacaauuugunggcccacucac

SEQ ID NO: 28695 - RNA, 23 nt, Artificial Sequence
  Synthetic
  misc_feature (12)..(12): n is a, c, g, or u
gaacaauuugunggcccacucac

SEQ ID NO: 28696 - RNA, 24 nt, Artificial Sequence
  Synthetic
  misc_feature (13)..(13): n is a, c, g, or u
ugaacaauuugunggcccacucac

SEQ ID NO: 28697 - RNA, 18 nt, Artificial Sequence
  Synthetic
aucaaucuucucgaagac

SEQ ID NO: 28698 - RNA, 19 nt, Artificial Sequence
  Synthetic
caucaaucuucucgaagac

SEQ ID NO: 28699 - RNA, 20 nt, Artificial Sequence
  Synthetic
ucaucaaucuucucgaagac

SEQ ID NO: 28700 - RNA, 21 nt, Artificial Sequence
  Synthetic
aucaucaaucuucucgaagac

SEQ ID NO: 28701 - RNA, 22 nt, Artificial Sequence
  Synthetic
caucaucaaucuucucgaagac

SEQ ID NO: 28702 - RNA, 23 nt, Artificial Sequence
  Synthetic
acaucaucaaucuucucgaagac

SEQ ID NO: 28703 - RNA, 24 nt, Artificial Sequence
  Synthetic
cacaucaucaaucuucucgaagac

SEQ ID NO: 28704 - RNA, 18 nt, Artificial Sequence
  Synthetic
agacuacuguuguuagac

SEQ ID NO: 28705 - RNA, 19 nt, Artificial Sequence
  Synthetic
gagacuacuguuguuagac

SEQ ID NO: 28706 - RNA, 20 nt, Artificial Sequence
  Synthetic
ggagacuacuguuguuagac

SEQ ID NO: 28707 - RNA, 21 nt, Artificial Sequence
  Synthetic
cggagacuacuguuguuagac

SEQ ID NO: 28708 - RNA, 22 nt, Artificial Sequence
  Synthetic
ccggagacuacuguuguuagac

SEQ ID NO: 28709 - RNA, 23 nt, Artificial Sequence
  Synthetic
uccggagacuacuguuguuagac

SEQ ID NO: 28710 - RNA, 24 nt, Artificial Sequence
  Synthetic
uuccggagacuacuguuguuagac

SEQ ID NO: 28711 - RNA, 18 nt, Artificial Sequence
  Synthetic
  misc_feature (4)..(5): n is a, c, g, or u
ccunncguuccggccgac

SEQ ID NO: 28712 - RNA, 19 nt, Artificial Sequence
  Synthetic
  misc_feature (5)..(6): n is a, c, g, or u
gccunncguuccggccgac

SEQ ID NO: 28713 - RNA, 20 nt, Artificial Sequence
  Synthetic
  misc_feature (6)..(7): n is a, c, g, or u
cgccunncguuccggccgac

SEQ ID NO: 28714 - RNA, 21 nt, Artificial Sequence
  Synthetic
  misc_feature (7)..(8): n is a, c, g, or u
ccgccunncguuccggccgac

SEQ ID NO: 28715 - RNA, 22 nt, Artificial Sequence
  Synthetic
  misc_feature (8)..(9): n is a, c, g, or u
uccgccunncguuccggccgac

SEQ ID NO: 28716 - RNA, 23 nt, Artificial Sequence
  Synthetic
  misc_feature (9)..(10): n is a, c, g, or u
cuccgccunncguuccggccgac

SEQ ID NO: 28717 - RNA, 24 nt, Artificial Sequence
  Synthetic
  misc_feature (10)..(11): n is a, c, g, or u
ucuccgccunncguuccggccgac

SEQ ID NO: 28718 - RNA, 18 nt, Artificial Sequence
  Synthetic
gacuguguauuuaaggac

SEQ ID NO: 28719 - RNA, 19 nt, Artificial Sequence
  Synthetic
agacuguguauuuaaggac

SEQ ID NO: 28720 - RNA, 20 nt, Artificial Sequence
  Synthetic
aagacuguguauuuaaggac

SEQ ID NO: 28721 - RNA, 21 nt, Artificial Sequence
  Synthetic
aaagacuguguauuuaaggac

SEQ ID NO: 28722 - RNA, 22 nt, Artificial Sequence
  Synthetic
caaagacuguguauuuaaggac

SEQ ID NO: 28723 - RNA, 23 nt, Artificial Sequence
  Synthetic
ucaaagacuguguauuuaaggac

SEQ ID NO: 28724 - RNA, 24 nt, Artificial Sequence
  Synthetic
aucaaagacuguguauuuaaggac

SEQ ID NO: 28725 - RNA, 18 nt, Artificial Sequence
  Synthetic
agcagucccgauugggac

SEQ ID NO: 28726 - RNA, 19 nt, Artificial Sequence
  Synthetic
cagcagucccgauugggac

SEQ ID NO: 28727 - RNA, 20 nt, Artificial Sequence
  Synthetic
ccagcagucccgauugggac

SEQ ID NO: 28728 - RNA, 21 nt, Artificial Sequence
  Synthetic
uccagcagucccgauugggac

SEQ ID NO: 28729 - RNA, 22 nt, Artificial Sequence
  Synthetic
uuccagcagucccgauugggac

SEQ ID NO: 28730 - RNA, 23 nt, Artificial Sequence
  Synthetic
auuccagcagucccgauugggac

SEQ ID NO: 28731 - RNA, 24 nt, Artificial Sequence
  Synthetic
aauuccagcagucccgauugggac

SEQ ID NO: 28732 - RNA, 18 nt, Artificial Sequence
  Synthetic
uggcuuuggggcauggac

SEQ ID NO: 28733 - RNA, 19 nt, Artificial Sequence
  Synthetic
guggcuuuggggcauggac

SEQ ID NO: 28734 - RNA, 20 nt, Artificial Sequence
  Synthetic
gguggcuuuggggcauggac

SEQ ID NO: 28735 - RNA, 21 nt, Artificial Sequence
  Synthetic
ggguggcuuuggggcauggac

SEQ ID NO: 28736 - RNA, 22 nt, Artificial Sequence
  Synthetic
uggguggcuuuggggcauggac

SEQ ID NO: 28737 - RNA, 23 nt, Artificial Sequence
  Synthetic
uuggguggcuuuggggcauggac

SEQ ID NO: 28738 - RNA, 24 nt, Artificial Sequence
  Synthetic
cuuggguggcuuuggggcauggac

SEQ ID NO: 28739 - RNA, 18 nt, Artificial Sequence
  Synthetic
cuggggugaguugaugac

SEQ ID NO: 28740 - RNA, 19 nt, Artificial Sequence
  Synthetic
gcuggggugaguugaugac

SEQ ID NO: 28741 - RNA, 20 nt, Artificial Sequence
  Synthetic
ugcuggggugaguugaugac

SEQ ID NO: 28742 - RNA, 21 nt, Artificial Sequence
  Synthetic
gugcuggggugaguugaugac

SEQ ID NO: 28743 - RNA, 22 nt, Artificial Sequence
  Synthetic
ugugcuggggugaguugaugac

SEQ ID NO: 28744 - RNA, 23 nt, Artificial Sequence
  Synthetic
uugugcuggggugaguugaugac

SEQ ID NO: 28745 - RNA, 24 nt, Artificial Sequence
  Synthetic
uuugugcuggggugaguugaugac

SEQ ID NO: 28746 - RNA, 18 nt, Artificial Sequence
  Synthetic
uuucucuguaaacaauac

SEQ ID NO: 28747 - RNA, 19 nt, Artificial Sequence
  Synthetic
cuuucucuguaaacaauac

SEQ ID NO: 28748 - RNA, 20 nt, Artificial Sequence
  Synthetic
ccuuucucuguaaacaauac

SEQ ID NO: 28749 - RNA, 21 nt, Artificial Sequence
  Synthetic
gccuuucucuguaaacaauac

SEQ ID NO: 28750 - RNA, 22 nt, Artificial Sequence
  Synthetic
ggccuuucucuguaaacaauac

SEQ ID NO: 28751 - RNA, 23 nt, Artificial Sequence
  Synthetic
aggccuuucucuguaaacaauac

SEQ ID NO: 28752 - RNA, 24 nt, Artificial Sequence
  Synthetic
aaggccuuucucuguaaacaauac

SEQ ID NO: 28753 - RNA, 18 nt, Artificial Sequence
  Synthetic
caaaaauccucacaauac

SEQ ID NO: 28754 - RNA, 19 nt, Artificial Sequence
  Synthetic
acaaaaauccucacaauac

SEQ ID NO: 28755 - RNA, 20 nt, Artificial Sequence
  Synthetic
gacaaaaauccucacaauac

SEQ ID NO: 28756 - RNA, 21 nt, Artificial Sequence
  Synthetic
ugacaaaaauccucacaauac

SEQ ID NO: 28757 - RNA, 22 nt, Artificial Sequence
  Synthetic
uugacaaaaauccucacaauac

SEQ ID NO: 28758 - RNA, 23 nt, Artificial Sequence
  Synthetic
guugacaaaaauccucacaauac

SEQ ID NO: 28759 - RNA, 24 nt, Artificial Sequence
  Synthetic
uguugacaaaaauccucacaauac

SEQ ID NO: 28760 - RNA, 18 nt, Artificial Sequence
  Synthetic
accuggauugaggaauac

SEQ ID NO: 28761 - RNA, 19 nt, Artificial Sequence
  Synthetic
gaccuggauugaggaauac

SEQ ID NO: 28762 - RNA, 20 nt, Artificial Sequence
  Synthetic
cgaccuggauugaggaauac

SEQ ID NO: 28763 - RNA, 21 nt, Artificial Sequence
  Synthetic
acgaccuggauugaggaauac

SEQ ID NO: 28764 - RNA, 22 nt, Artificial Sequence
  Synthetic
aacgaccuggauugaggaauac

SEQ ID NO: 28765 - RNA, 23 nt, Artificial Sequence
  Synthetic
caacgaccuggauugaggaauac

SEQ ID NO: 28766 - RNA, 24 nt, Artificial Sequence
  Synthetic
ucaacgaccuggauugaggaauac

SEQ ID NO: 28767 - RNA, 18 nt, Artificial Sequence
  Synthetic
uccucugccgauccauac

SEQ ID NO: 28768 - RNA, 19 nt, Artificial Sequence
  Synthetic
cuccucugccgauccauac

SEQ ID NO: 28769 - RNA, 20 nt, Artificial Sequence
  Synthetic
gcuccucugccgauccauac

SEQ ID NO: 28770 - RNA, 21 nt, Artificial Sequence
  Synthetic
ggcuccucugccgauccauac

SEQ ID NO: 28771 - RNA, 22 nt, Artificial Sequence
  Synthetic
uggcuccucugccgauccauac

SEQ ID NO: 28772 - RNA, 23 nt, Artificial Sequence
  Synthetic
guggcuccucugccgauccauac

SEQ ID NO: 28773 - RNA, 24 nt, Artificial Sequence
  Synthetic
uguggcuccucugccgauccauac

SEQ ID NO: 28774 - RNA, 18 nt, Artificial Sequence
  Synthetic
aaugugguuaaucauuac

SEQ ID NO: 28775 - RNA, 19 nt, Artificial Sequence
  Synthetic
gaaugugguuaaucauuac

SEQ ID NO: 28776 - RNA, 20 nt, Artificial Sequence
  Synthetic
agaaugugguuaaucauuac

SEQ ID NO: 28777 - RNA, 21 nt, Artificial Sequence
  Synthetic
gagaaugugguuaaucauuac

SEQ ID NO: 28778 - RNA, 22 nt, Artificial Sequence
  Synthetic
agagaaugugguuaaucauuac

SEQ ID NO: 28779 - RNA, 23 nt, Artificial Sequence
  Synthetic
cagagaaugugguuaaucauuac

SEQ ID NO: 28780 - RNA, 24 nt, Artificial Sequence
  Synthetic
ccagagaaugugguuaaucauuac

SEQ ID NO: 28781 - RNA, 18 nt, Artificial Sequence
  Synthetic
  misc_feature (1)..(1): n is a, c, g, or u
ncuugccaacaaccuuac

SEQ ID NO: 28782 - RNA, 19 nt, Artificial Sequence
  Synthetic
  misc_feature (2)..(2): n is a, c, g, or u
ancuugccaacaaccuuac

SEQ ID NO: 28783 - RNA, 20 nt, Artificial Sequence
  Synthetic
  misc_feature (3)..(3): n is a, c, g, or u
gancuugccaacaaccuuac

SEQ ID NO: 28784 - RNA, 21 nt, Artificial Sequence
  Synthetic
  misc_feature (4)..(4): n is a, c, g, or u
ggancuugccaacaaccuuac

SEQ ID NO: 28785 - RNA, 22 nt, Artificial Sequence
  Synthetic
  misc_feature (1)..(1): n is a, c, g, or u
  misc_feature (5)..(5): n is a, c, g, or u
nggancuugccaacaaccuuac

SEQ ID NO: 28786 - RNA, 23 nt, Artificial Sequence
  Synthetic
  misc_feature (2)..(2): n is a, c, g, or u
  misc_feature (6)..(6): n is a, c, g, or u
unggancuugccaacaaccuuac

SEQ ID NO: 28787 - RNA, 24 nt, Artificial Sequence
  Synthetic
  misc_feature (3)..(3): n is a, c, g, or u
  misc_feature (7)..(7): n is a, c, g, or u
cunggancuugccaacaaccuuac

SEQ ID NO: 28788 - RNA, 18 nt, Artificial Sequence
  Synthetic
ggucgcaccucucuuuac

SEQ ID NO: 28789 - RNA, 19 nt, Artificial Sequence
  Synthetic
gggucgcaccucucuuuac

SEQ ID NO: 28790 - RNA, 20 nt, Artificial Sequence
  Synthetic
cgggucgcaccucucuuuac

SEQ ID NO: 28791 - RNA, 18 nt, Artificial Sequence
  Synthetic
cugcugcuguaccaaacc

SEQ ID NO: 28792 - RNA, 19 nt, Artificial Sequence
  Synthetic
ccugcugcuguaccaaacc

SEQ ID NO: 28793 - RNA, 20 nt, Artificial Sequence
  Synthetic
uccugcugcuguaccaaacc

SEQ ID NO: 28794 - RNA, 21 nt, Artificial Sequence
  Synthetic
cuccugcugcuguaccaaacc

SEQ ID NO: 28795 - RNA, 22 nt, Artificial Sequence
  Synthetic
ccuccugcugcuguaccaaacc

SEQ ID NO: 28796 - RNA, 23 nt, Artificial Sequence
  Synthetic
cccuccugcugcuguaccaaacc

SEQ ID NO: 28797 - RNA, 24 nt, Artificial Sequence
  Synthetic
ucccuccugcugcuguaccaaacc

SEQ ID NO: 28798 - RNA, 18 nt, Artificial Sequence
  Synthetic
cuuccaggaucuacaacc

SEQ ID NO: 28799 - RNA, 19 nt, Artificial Sequence
  Synthetic
acuuccaggaucuacaacc

SEQ ID NO: 28800 - RNA, 20 nt, Artificial Sequence
  Synthetic
uacuuccaggaucuacaacc

SEQ ID NO: 28801 - RNA, 21 nt, Artificial Sequence
  Synthetic
cuacuuccaggaucuacaacc

SEQ ID NO: 28802 - RNA, 22 nt, Artificial Sequence
  Synthetic
ucuacuuccaggaucuacaacc

SEQ ID NO: 28803 - RNA, 23 nt, Artificial Sequence
  Synthetic
cucuacuuccaggaucuacaacc

SEQ ID NO: 28804 - RNA, 24 nt, Artificial Sequence
  Synthetic
ccucuacuuccaggaucuacaacc

SEQ ID NO: 28805 - RNA, 18 nt, Artificial Sequence
  Synthetic
cgucgcauggagaccacc

SEQ ID NO: 28806 - RNA, 19 nt, Artificial Sequence
  Synthetic
acgucgcauggagaccacc

SEQ ID NO: 28807 - RNA, 20 nt, Artificial Sequence
  Synthetic
cacgucgcauggagaccacc

SEQ ID NO: 28808 - RNA, 21 nt, Artificial Sequence
  Synthetic
gcacgucgcauggagaccacc

SEQ ID NO: 28809 - RNA, 22 nt, Artificial Sequence
  Synthetic
ugcacgucgcauggagaccacc

SEQ ID NO: 28810 - RNA, 23 nt, Artificial Sequence
  Synthetic
cugcacgucgcauggagaccacc

SEQ ID NO: 28811 - RNA, 24 nt, Artificial Sequence
  Synthetic
ucugcacgucgcauggagaccacc

SEQ ID NO: 28812 - RNA, 18 nt, Artificial Sequence
  Synthetic
aaccccagucucuccacc

SEQ ID NO: 28813 - RNA, 19 nt, Artificial Sequence
  Synthetic
caaccccagucucuccacc

SEQ ID NO: 28814 - RNA, 20 nt, Artificial Sequence
  Synthetic
ccaaccccagucucuccacc

SEQ ID NO: 28815 - RNA, 21 nt, Artificial Sequence
  Synthetic
gccaaccccagucucuccacc

SEQ ID NO: 28816 - RNA, 22 nt, Artificial Sequence
  Synthetic
agccaaccccagucucuccacc

SEQ ID NO: 28817 - RNA, 23 nt, Artificial Sequence
  Synthetic
aagccaaccccagucucuccacc

SEQ ID NO: 28818 - RNA, 24 nt, Artificial Sequence
  Synthetic
aaagccaaccccagucucuccacc

SEQ ID NO: 28819 - RNA, 18 nt, Artificial Sequence
  Synthetic
  misc_feature (6)..(6): n is a, c, g, or u
ucaccngaacauugcacc

SEQ ID NO: 28820 - RNA, 19 nt, Artificial Sequence
  Synthetic
  misc_feature (7)..(7): n is a, c, g, or u
aucaccngaacauugcacc

SEQ ID NO: 28821 - RNA, 20 nt, Artificial Sequence
  Synthetic
  misc_feature (8)..(8): n is a, c, g, or u
aaucaccngaacauugcacc

SEQ ID NO: 28822 - RNA, 21 nt, Artificial Sequence
  Synthetic
  misc_feature (9)..(9): n is a, c, g, or u
gaaucaccngaacauugcacc

SEQ ID NO: 28823 - RNA, 22 nt, Artificial Sequence
  Synthetic
  misc_feature (10)..(10): n is a, c, g, or u
agaaucaccngaacauugcacc

SEQ ID NO: 28824 - RNA, 23 nt, Artificial Sequence
  Synthetic
  misc_feature (11)..(11): n is a, c, g, or u
uagaaucaccngaacauugcacc

SEQ ID NO: 28825 - RNA, 24 nt, Artificial Sequence
  Synthetic
  misc_feature (12)..(12): n is a, c, g, or u
uuagaaucaccngaacauugcacc

SEQ ID NO: 28826 - RNA, 18 nt, Artificial Sequence
  Synthetic
  misc_feature (13)..(13): n is a, c, g, or u
uccaccugcuuanagacc

SEQ ID NO: 28827 - RNA, 19 nt, Artificial Sequence
  Synthetic
  misc_feature (14)..(14): n is a, c, g, or u
cuccaccugcuuanagacc

SEQ ID NO: 28828 - RNA, 20 nt, Artificial Sequence
  Synthetic
  misc_feature (15)..(15): n is a, c, g, or u
acuccaccugcuuanagacc

SEQ ID NO: 28829 - RNA, 21 nt, Artificial Sequence
  Synthetic
  misc_feature (16)..(16): n is a, c, g, or u
cacuccaccugcuuanagacc

SEQ ID NO: 28830 - RNA, 22 nt, Artificial Sequence
  Synthetic
  misc_feature (17)..(17): n is a, c, g, or u
gcacuccaccugcuuanagacc

SEQ ID NO: 28831 - RNA, 23 nt, Artificial Sequence
  Synthetic
  misc_feature (18)..(18): n is a, c, g, or u
cgcacuccaccugcuuanagacc

SEQ ID NO: 28832 - RNA, 24 nt, Artificial Sequence
  Synthetic
  misc_feature (1)..(1): n is a, c, g, or u
  misc_feature (19)..(19): n is a, c, g, or u
ncgcacuccaccugcuuanagacc

SEQ ID NO: 28833 - RNA, 18 nt, Artificial Sequence
  Synthetic
gggcuuucggaaaauacc

SEQ ID NO: 28834 - RNA, 19 nt, Artificial Sequence
  Synthetic
ugggcuuucggaaaauacc

SEQ ID NO: 28835 - RNA, 20 nt, Artificial Sequence
  Synthetic
uugggcuuucggaaaauacc

SEQ ID NO: 28836 - RNA, 21 nt, Artificial Sequence
  Synthetic
cuugggcuuucggaaaauacc

SEQ ID NO: 28837 - RNA, 22 nt, Artificial Sequence
  Synthetic
ucuugggcuuucggaaaauacc

SEQ ID NO: 28838 - RNA, 23 nt, Artificial Sequence
  Synthetic
aucuugggcuuucggaaaauacc

SEQ ID NO: 28839 - RNA, 24 nt, Artificial Sequence
  Synthetic
caucuugggcuuucggaaaauacc

SEQ ID NO: 28840 - RNA, 18 nt, Artificial Sequence
  Synthetic
aaaaauccucacaauacc

SEQ ID NO: 28841 - RNA, 19 nt, Artificial Sequence
  Synthetic
caaaaauccucacaauacc

SEQ ID NO: 28842 - RNA, 20 nt, Artificial Sequence
  Synthetic
acaaaaauccucacaauacc

SEQ ID NO: 28843 - RNA, 21 nt, Artificial Sequence
  Synthetic
gacaaaaauccucacaauacc

SEQ ID NO: 28844 - RNA, 22 nt, Artificial Sequence
  Synthetic
ugacaaaaauccucacaauacc

SEQ ID NO: 28845 - RNA, 23 nt, Artificial Sequence
  Synthetic
uugacaaaaauccucacaauacc

SEQ ID NO: 28846 - RNA, 24 nt, Artificial Sequence
  Synthetic
guugacaaaaauccucacaauacc

SEQ ID NO: 28847 - RNA, 18 nt, Artificial Sequence
  Synthetic
uuguaugccuguauuacc

SEQ ID NO: 28848 - RNA, 19 nt, Artificial Sequence
  Synthetic
cuuguaugccuguauuacc

SEQ ID NO: 28849 - RNA, 20 nt, Artificial Sequence
  Synthetic
ccuuguaugccuguauuacc

SEQ ID NO: 28850 - RNA, 21 nt, Artificial Sequence
  Synthetic
cccuuguaugccuguauuacc

SEQ ID NO: 28851 - RNA, 22 nt, Artificial Sequence
  Synthetic
gcccuuguaugccuguauuacc

SEQ ID NO: 28852 - RNA, 23 nt, Artificial Sequence
  Synthetic
ugcccuuguaugccuguauuacc

SEQ ID NO: 28853 - RNA, 24 nt, Artificial Sequence
  Synthetic
augcccuuguaugccuguauuacc

SEQ ID NO: 28854 - RNA, 18 nt, Artificial Sequence
  Synthetic
accaccagcacgggaccc

SEQ ID NO: 28855 - RNA, 19 nt, Artificial Sequence
  Synthetic
aaccaccagcacgggaccc

SEQ ID NO: 28856 - RNA, 20 nt, Artificial Sequence
  Synthetic
caaccaccagcacgggaccc

SEQ ID NO: 28857 - RNA, 18 nt, Artificial Sequence
  Synthetic
uuugcugacgcaaccccc

SEQ ID NO: 28858 - RNA, 19 nt, Artificial Sequence
  Synthetic
guuugcugacgcaaccccc

SEQ ID NO: 28859 - RNA, 20 nt, Artificial Sequence
  Synthetic
uguuugcugacgcaaccccc

SEQ ID NO: 28860 - RNA, 21 nt, Artificial Sequence
  Synthetic
guguuugcugacgcaaccccc

SEQ ID NO: 28861 - RNA, 22 nt, Artificial Sequence
  Synthetic
aguguuugcugacgcaaccccc

SEQ ID NO: 28862 - RNA, 23 nt, Artificial Sequence
  Synthetic
aaguguuugcugacgcaaccccc

SEQ ID NO: 28863 - RNA, 24 nt, Artificial Sequence
  Synthetic
caaguguuugcugacgcaaccccc

SEQ ID NO: 28864 - RNA, 18 nt, Artificial Sequence
  Synthetic
gaccaccgugaacgcccc

SEQ ID NO: 28865 - RNA, 19 nt, Artificial Sequence
  Synthetic
agaccaccgugaacgcccc

SEQ ID NO: 28866 - RNA, 20 nt, Artificial Sequence
  Synthetic
gagaccaccgugaacgcccc

SEQ ID NO: 28867 - RNA, 21 nt, Artificial Sequence
  Synthetic
ggagaccaccgugaacgcccc

SEQ ID NO: 28868 - RNA, 22 nt, Artificial Sequence
  Synthetic
uggagaccaccgugaacgcccc

SEQ ID NO: 28869 - RNA, 23 nt, Artificial Sequence
  Synthetic
auggagaccaccgugaacgcccc

SEQ ID NO: 28870 - RNA, 24 nt, Artificial Sequence
  Synthetic
cauggagaccaccgugaacgcccc

SEQ ID NO: 28871 - RNA, 18 nt, Artificial Sequence
  Synthetic
acaacgaggcagggcccc

SEQ ID NO: 28872 - RNA, 19 nt, Artificial Sequence
  Synthetic
gacaacgaggcagggcccc

SEQ ID NO: 28873 - RNA, 20 nt, Artificial Sequence
  Synthetic
agacaacgaggcagggcccc

SEQ ID NO: 28874 - RNA, 21 nt, Artificial Sequence
  Synthetic
uagacaacgaggcagggcccc

SEQ ID NO: 28875 - RNA, 22 nt, Artificial Sequence
  Synthetic
uuagacaacgaggcagggcccc

SEQ ID NO: 28876 - RNA, 23 nt, Artificial Sequence
  Synthetic
guuagacaacgaggcagggcccc

SEQ ID NO: 28877 - RNA, 24 nt, Artificial Sequence
  Synthetic
uguuagacaacgaggcagggcccc

SEQ ID NO: 28878 - RNA, 18 nt, Artificial Sequence
  Synthetic
ccuucugggguggagccc

SEQ ID NO: 28879 - RNA, 19 nt, Artificial Sequence
  Synthetic
gccuucugggguggagccc

SEQ ID NO: 28880 - RNA, 20 nt, Artificial Sequence
  Synthetic
ggccuucugggguggagccc

SEQ ID NO: 28881 - RNA, 21 nt, Artificial Sequence
  Synthetic
uggccuucugggguggagccc

SEQ ID NO: 28882 - RNA, 22 nt, Artificial Sequence
  Synthetic
guggccuucugggguggagccc

SEQ ID NO: 28883 - RNA, 23 nt, Artificial Sequence
  Synthetic
gguggccuucugggguggagccc

SEQ ID NO: 28884 - RNA, 24 nt, Artificial Sequence
  Synthetic
cgguggccuucugggguggagccc

SEQ ID NO: 28885 - RNA, 18 nt, Artificial Sequence
  Synthetic
agaccaccgugaacgccc

SEQ ID NO: 28886 - RNA, 19 nt, Artificial Sequence
  Synthetic
gagaccaccgugaacgccc

SEQ ID NO: 28887 - RNA, 20 nt, Artificial Sequence
  Synthetic
ggagaccaccgugaacgccc

SEQ ID NO: 28888 - RNA, 21 nt, Artificial Sequence
  Synthetic
uggagaccaccgugaacgccc

SEQ ID NO: 28889 - RNA, 22 nt, Artificial Sequence
  Synthetic
auggagaccaccgugaacgccc

SEQ ID NO: 28890 - RNA, 23 nt, Artificial Sequence
  Synthetic
cauggagaccaccgugaacgccc

SEQ ID NO: 28891 - RNA, 24 nt, Artificial Sequence
  Synthetic
gcauggagaccaccgugaacgccc

SEQ ID NO: 28892 - RNA, 18 nt, Artificial Sequence
  Synthetic
gacaacgaggcagggccc

SEQ ID NO: 28893 - RNA, 19 nt, Artificial Sequence
  Synthetic
agacaacgaggcagggccc

SEQ ID NO: 28894 - RNA, 20 nt, Artificial Sequence
  Synthetic
uagacaacgaggcagggccc

SEQ ID NO: 28895 - RNA, 21 nt, Artificial Sequence
  Synthetic
uuagacaacgaggcagggccc

SEQ ID NO: 28896 - RNA, 22 nt, Artificial Sequence
  Synthetic
guuagacaacgaggcagggccc

SEQ ID NO: 28897 - RNA, 23 nt, Artificial Sequence
  Synthetic
uguuagacaacgaggcagggccc

SEQ ID NO: 28898 - RNA, 24 nt, Artificial Sequence
  Synthetic
uuguuagacaacgaggcagggccc

SEQ ID NO: 28899 - RNA, 18 nt, Artificial Sequence
  Synthetic
guccuuugucuacguccc

SEQ ID NO: 28900 - RNA, 19 nt, Artificial Sequence
  Synthetic
cguccuuugucuacguccc

SEQ ID NO: 28901 - RNA, 20 nt, Artificial Sequence
  Synthetic
acguccuuugucuacguccc

SEQ ID NO: 28902 - RNA, 18 nt, Artificial Sequence
  Synthetic
aguuacuaaauacuuccc

SEQ ID NO: 28903 - RNA, 19 nt, Artificial Sequence
  Synthetic
aaguuacuaaauacuuccc

SEQ ID NO: 28904 - RNA, 20 nt, Artificial Sequence
  Synthetic
aaaguuacuaaauacuuccc

SEQ ID NO: 28905 - RNA, 21 nt, Artificial Sequence
  Synthetic
caaaguuacuaaauacuuccc

SEQ ID NO: 28906 - RNA, 22 nt, Artificial Sequence
  Synthetic
ccaaaguuacuaaauacuuccc

SEQ ID NO: 28907 - RNA, 23 nt, Artificial Sequence
  Synthetic
cccaaaguuacuaaauacuuccc

SEQ ID NO: 28908 - RNA, 24 nt, Artificial Sequence
  Synthetic
ucccaaaguuacuaaauacuuccc

SEQ ID NO: 28909 - RNA, 18 nt, Artificial Sequence
  Synthetic
ugucccacuguucaagcc

SEQ ID NO: 28910 - RNA, 19 nt, Artificial Sequence
  Synthetic
augucccacuguucaagcc

SEQ ID NO: 28911 - RNA, 20 nt, Artificial Sequence
  Synthetic
caugucccacuguucaagcc

SEQ ID NO: 28912 - RNA, 21 nt, Artificial Sequence
  Synthetic
ucaugucccacuguucaagcc

SEQ ID NO: 28913 - RNA, 22 nt, Artificial Sequence
  Synthetic
uucaugucccacuguucaagcc

SEQ ID NO: 28914 - RNA, 23 nt, Artificial Sequence
  Synthetic
guucaugucccacuguucaagcc

SEQ ID NO: 28915 - RNA, 24 nt, Artificial Sequence
  Synthetic
uguucaugucccacuguucaagcc

SEQ ID NO: 28916 - RNA, 18 nt, Artificial Sequence
  Synthetic
gccuucugggguggagcc

SEQ ID NO: 28917 - RNA, 19 nt, Artificial Sequence
  Synthetic
ggccuucugggguggagcc

SEQ ID NO: 28918 - RNA, 20 nt, Artificial Sequence
  Synthetic
uggccuucugggguggagcc

SEQ ID NO: 28919 - RNA, 21 nt, Artificial Sequence
  Synthetic
guggccuucugggguggagcc

SEQ ID NO: 28920 - RNA, 22 nt, Artificial Sequence
  Synthetic
gguggccuucugggguggagcc

SEQ ID NO: 28921 - RNA, 23 nt, Artificial Sequence
  Synthetic
cgguggccuucugggguggagcc

SEQ ID NO: 28922 - RNA, 24 nt, Artificial Sequence
  Synthetic
acgguggccuucugggguggagcc

SEQ ID NO: 28923 - RNA, 18 nt, Artificial Sequence
  Synthetic
  misc_feature (7)..(7): n is a, c, g, or u
cauucunacaaccucgcc

SEQ ID NO: 28924 - RNA, 19 nt, Artificial Sequence
  Synthetic
  misc_feature (8)..(8): n is a, c, g, or u
gcauucunacaaccucgcc

SEQ ID NO: 28925 - RNA, 20 nt, Artificial Sequence
  Synthetic
  misc_feature (9)..(9): n is a, c, g, or u
ggcauucunacaaccucgcc

SEQ ID NO: 28926 - RNA, 21 nt, Artificial Sequence
  Synthetic
  misc_feature (10)..(10): n is a, c, g, or u
gggcauucunacaaccucgcc

SEQ ID NO: 28927 - RNA, 22 nt, Artificial Sequence
  Synthetic
  misc_feature (11)..(11): n is a, c, g, or u
agggcauucunacaaccucgcc

SEQ ID NO: 28928 - RNA, 23 nt, Artificial Sequence
  Synthetic
  misc_feature (12)..(12): n is a, c, g, or u
cagggcauucunacaaccucgcc

SEQ ID NO: 28929 - RNA, 24 nt, Artificial Sequence
  Synthetic
  misc_feature (13)..(13): n is a, c, g, or u
acagggcauucunacaaccucgcc

SEQ ID NO: 28930 - RNA, 18 nt, Artificial Sequence
  Synthetic
  misc_feature (7)..(8): n is a, c, g, or u
ccgccunncguuccggcc

SEQ ID NO: 28931 - RNA, 19 nt, Artificial Sequence
  Synthetic
  misc_feature (8)..(9): n is a, c, g, or u
uccgccunncguuccggcc

SEQ ID NO: 28932 - RNA, 20 nt, Artificial Sequence
  Synthetic
  misc_feature (9)..(10): n is a, c, g, or u
cuccgccunncguuccggcc

SEQ ID NO: 28933 - RNA, 21 nt, Artificial Sequence
  Synthetic
  misc_feature (10)..(11): n is a, c, g, or u
ucuccgccunncguuccggcc

SEQ ID NO: 28934 - RNA, 22 nt, Artificial Sequence
  Synthetic
  misc_feature (11)..(12): n is a, c, g, or u
uucuccgccunncguuccggcc

SEQ ID NO: 28935 - RNA, 23 nt, Artificial Sequence
  Synthetic
  misc_feature (12)..(13): n is a, c, g, or u
cuucuccgccunncguuccggcc

SEQ ID NO: 28936 - RNA, 24 nt, Artificial Sequence
  Synthetic
  misc_feature (1)..(1): n is a, c, g, or u
  misc_feature (13)..(14): n is a, c, g, or u
ncuucuccgccunncguuccggcc

SEQ ID NO: 28937 - RNA, 18 nt, Artificial Sequence
  Synthetic
agacaacgaggcagggcc

SEQ ID NO: 28938 - RNA, 19 nt, Artificial Sequence
  Synthetic
uagacaacgaggcagggcc

SEQ ID NO: 28939 - RNA, 20 nt, Artificial Sequence
  Synthetic
uuagacaacgaggcagggcc

SEQ ID NO: 28940 - RNA, 21 nt, Artificial Sequence
  Synthetic
guuagacaacgaggcagggcc

SEQ ID NO: 28941 - RNA, 22 nt, Artificial Sequence
  Synthetic
uguuagacaacgaggcagggcc

SEQ ID NO: 28942 - RNA, 23 nt, Artificial Sequence
  Synthetic
uuguuagacaacgaggcagggcc

SEQ ID NO: 28943 - RNA, 24 nt, Artificial Sequence
  Synthetic
guuguuagacaacgaggcagggcc

SEQ ID NO: 28944 - RNA, 18 nt, Artificial Sequence
  Synthetic
aaacaaggacaauuggcc

SEQ ID NO: 28945 - RNA, 19 nt, Artificial Sequence
  Synthetic
caaacaaggacaauuggcc

SEQ ID NO: 28946 - RNA, 20 nt, Artificial Sequence
  Synthetic
acaaacaaggacaauuggcc

SEQ ID NO: 28947 - RNA, 21 nt, Artificial Sequence
  Synthetic
cacaaacaaggacaauuggcc

SEQ ID NO: 28948 - RNA, 22 nt, Artificial Sequence
  Synthetic
acacaaacaaggacaauuggcc

SEQ ID NO: 28949 - RNA, 23 nt, Artificial Sequence
  Synthetic
aacacaaacaaggacaauuggcc

SEQ ID NO: 28950 - RNA, 24 nt, Artificial Sequence
  Synthetic
caacacaaacaaggacaauuggcc

SEQ ID NO: 28951 - RNA, 18 nt, Artificial Sequence
  Synthetic
ggggcuuggcgauuggcc

SEQ ID NO: 28952 - RNA, 19 nt, Artificial Sequence
  Synthetic
uggggcuuggcgauuggcc

SEQ ID NO: 28953 - RNA, 20 nt, Artificial Sequence
  Synthetic
cuggggcuuggcgauuggcc

SEQ ID NO: 28954 - RNA, 21 nt, Artificial Sequence
  Synthetic
gcuggggcuuggcgauuggcc

SEQ ID NO: 28955 - RNA, 22 nt, Artificial Sequence
  Synthetic
ggcuggggcuuggcgauuggcc

SEQ ID NO: 28956 - RNA, 23 nt, Artificial Sequence
  Synthetic
uggcuggggcuuggcgauuggcc

SEQ ID NO: 28957 - RNA, 24 nt, Artificial Sequence
  Synthetic
cuggcuggggcuuggcgauuggcc

SEQ ID NO: 28958 - RNA, 18 nt, Artificial Sequence
  Synthetic
gcccucuaccgagaugcc

SEQ ID NO: 28959 - RNA, 19 nt, Artificial Sequence
  Synthetic
agcccucuaccgagaugcc

SEQ ID NO: 28960 - RNA, 20 nt, Artificial Sequence
  Synthetic
cagcccucuaccgagaugcc

SEQ ID NO: 28961 - RNA, 21 nt, Artificial Sequence
  Synthetic
ucagcccucuaccgagaugcc

SEQ ID NO: 28962 - RNA, 22 nt, Artificial Sequence
  Synthetic
uucagcccucuaccgagaugcc

SEQ ID NO: 28963 - RNA, 23 nt, Artificial Sequence
  Synthetic
cuucagcccucuaccgagaugcc

SEQ ID NO: 28964 - RNA, 24 nt, Artificial Sequence
  Synthetic
gcuucagcccucuaccgagaugcc

SEQ ID NO: 28965 - RNA, 18 nt, Artificial Sequence
  Synthetic
  misc_feature (8)..(8): n is a, c, g, or u
  misc_feature (12)..(12): n is a, c, g, or u
cgccccunggancuugcc

SEQ ID NO: 28966 - RNA, 19 nt, Artificial Sequence
  Synthetic
  misc_feature (9)..(9): n is a, c, g, or u
  misc_feature (13)..(13): n is a, c, g, or u
acgccccunggancuugcc

SEQ ID NO: 28967 - RNA, 20 nt, Artificial Sequence
  Synthetic
  misc_feature (10)..(10): n is a, c, g, or u
  misc_feature (14)..(14): n is a, c, g, or u
aacgccccunggancuugcc

SEQ ID NO: 28968 - RNA, 21 nt, Artificial Sequence
  Synthetic
  misc_feature (11)..(11): n is a, c, g, or u
  misc_feature (15)..(15): n is a, c, g, or u
gaacgccccunggancuugcc

SEQ ID NO: 28969 - RNA, 22 nt, Artificial Sequence
  Synthetic
  misc_feature (12)..(12): n is a, c, g, or u
  misc_feature (16)..(16): n is a, c, g, or u
ugaacgccccunggancuugcc

SEQ ID NO: 28970 - RNA, 23 nt, Artificial Sequence
  Synthetic
  misc_feature (13)..(13): n is a, c, g, or u
  misc_feature (17)..(17): n is a, c, g, or u
gugaacgccccunggancuugcc

SEQ ID NO: 28971 - RNA, 24 nt, Artificial Sequence
  Synthetic
  misc_feature (14)..(14): n is a, c, g, or u
  misc_feature (18)..(18): n is a, c, g, or u
cgugaacgccccunggancuugcc

SEQ ID NO: 28972 - RNA, 18 nt, Artificial Sequence
  Synthetic
  misc_feature (13)..(13): n is a, c, g, or u
gaguugggggacnuugcc

SEQ ID NO: 28973 - RNA, 19 nt, Artificial Sequence
  Synthetic
  misc_feature (14)..(14): n is a, c, g, or u
ggaguugggggacnuugcc

SEQ ID NO: 28974 - RNA, 20 nt, Artificial Sequence
  Synthetic
  misc_feature (15)..(15): n is a, c, g, or u
gggaguugggggacnuugcc

SEQ ID NO: 28975 - RNA, 21 nt, Artificial Sequence
  Synthetic
  misc_feature (16)..(16): n is a, c, g, or u
ugggaguugggggacnuugcc

SEQ ID NO: 28976 - RNA, 22 nt, Artificial Sequence
  Synthetic
  misc_feature (17)..(17): n is a, c, g, or u
uugggaguugggggacnuugcc

SEQ ID NO: 28977 - RNA, 23 nt, Artificial Sequence
  Synthetic
  misc_feature (18)..(18): n is a, c, g, or u
auugggaguugggggacnuugcc

SEQ ID NO: 28978 - RNA, 24 nt, Artificial Sequence
  Synthetic
  misc_feature (1)..(1): n is a, c, g, or u
  misc_feature (19)..(19): n is a, c, g, or u
nauugggaguugggggacnuugcc

SEQ ID NO: 28979 - RNA, 18 nt, Artificial Sequence
  Synthetic
  misc_feature (1)..(1): n is a, c, g, or u
ncuuucugugcccaaucc

SEQ ID NO: 28980 - RNA, 19 nt, Artificial Sequence
  Synthetic
  misc_feature (2)..(2): n is a, c, g, or u
ancuuucugugcccaaucc

SEQ ID NO: 28981 - RNA, 20 nt, Artificial Sequence
  Synthetic
  misc_feature (3)..(3): n is a, c, g, or u
aancuuucugugcccaaucc

SEQ ID NO: 28982 - RNA, 21 nt, Artificial Sequence
  Synthetic
  misc_feature (4)..(4): n is a, c, g, or u
gaancuuucugugcccaaucc

SEQ ID NO: 28983 - RNA, 22 nt, Artificial Sequence
  Synthetic
  misc_feature (5)..(5): n is a, c, g, or u
agaancuuucugugcccaaucc

SEQ ID NO: 28984 - RNA, 23 nt, Artificial Sequence
  Synthetic
  misc_feature (6)..(6): n is a, c, g, or u
cagaancuuucugugcccaaucc

SEQ ID NO: 28985 - RNA, 24 nt, Artificial Sequence
  Synthetic
  misc_feature (7)..(7): n is a, c, g, or u
acagaancuuucugugcccaaucc

SEQ ID NO: 28986 - RNA, 18 nt, Artificial Sequence
  Synthetic
cccgucggcgcugaaucc

SEQ ID NO: 28987 - RNA, 19 nt, Artificial Sequence
  Synthetic
ucccgucggcgcugaaucc

SEQ ID NO: 28988 - RNA, 20 nt, Artificial Sequence
  Synthetic
gucccgucggcgcugaaucc

SEQ ID NO: 28989 - RNA, 18 nt, Artificial Sequence
  Synthetic
ucuaagggacacacaucc

SEQ ID NO: 28990 - RNA, 19 nt, Artificial Sequence
  Synthetic
cucuaagggacacacaucc

SEQ ID NO: 28991 - RNA, 20 nt, Artificial Sequence
  Synthetic
ccucuaagggacacacaucc

SEQ ID NO: 28992 - RNA, 21 nt, Artificial Sequence
  Synthetic
accucuaagggacacacaucc

SEQ ID NO: 28993 - RNA, 22 nt, Artificial Sequence
  Synthetic
caccucuaagggacacacaucc

SEQ ID NO: 28994 - RNA, 23 nt, Artificial Sequence
  Synthetic
ccaccucuaagggacacacaucc

SEQ ID NO: 28995 - RNA, 24 nt, Artificial Sequence
  Synthetic
uccaccucuaagggacacacaucc

SEQ ID NO: 28996 - RNA, 18 nt, Artificial Sequence
  Synthetic
caauaauuuagaggaucc

SEQ ID NO: 28997 - RNA, 19 nt, Artificial Sequence
  Synthetic
gcaauaauuuagaggaucc

SEQ ID NO: 28998 - RNA, 20 nt, Artificial Sequence
  Synthetic
ggcaauaauuuagaggaucc

SEQ ID NO: 28999 - RNA, 21 nt, Artificial Sequence
  Synthetic
gggcaauaauuuagaggaucc

SEQ ID NO: 29000 - RNA, 22 nt, Artificial Sequence
  Synthetic
ugggcaauaauuuagaggaucc

SEQ ID NO: 29001 - RNA, 23 nt, Artificial Sequence
  Synthetic
gugggcaauaauuuagaggaucc

SEQ ID NO: 29002 - RNA, 24 nt, Artificial Sequence
  Synthetic
ggugggcaauaauuuagaggaucc

SEQ ID NO: 29003 - RNA, 18 nt, Artificial Sequence
  Synthetic
  misc_feature (7)..(7): n is a, c, g, or u
uauuaanccuuacuaucc

SEQ ID NO: 29004 - RNA, 19 nt, Artificial Sequence
  Synthetic
  misc_feature (8)..(8): n is a, c, g, or u
guauuaanccuuacuaucc

SEQ ID NO: 29005 - RNA, 20 nt, Artificial Sequence
  Synthetic
  misc_feature (9)..(9): n is a, c, g, or u
gguauuaanccuuacuaucc

SEQ ID NO: 29006 - RNA, 21 nt, Artificial Sequence
  Synthetic
  misc_feature (10)..(10): n is a, c, g, or u
agguauuaanccuuacuaucc

SEQ ID NO: 29007 - RNA, 22 nt, Artificial Sequence
  Synthetic
  misc_feature (11)..(11): n is a, c, g, or u
aagguauuaanccuuacuaucc

SEQ ID NO: 29008 - RNA, 23 nt, Artificial Sequence
  Synthetic
  misc_feature (12)..(12): n is a, c, g, or u
aaagguauuaanccuuacuaucc

SEQ ID NO: 29009 - RNA, 24 nt, Artificial Sequence
  Synthetic
  misc_feature (13)..(13): n is a, c, g, or u
uaaagguauuaanccuuacuaucc

SEQ ID NO: 29010 - RNA, 18 nt, Artificial Sequence
  Synthetic
acaucacaucaggacucc

SEQ ID NO: 29011 - RNA, 19 nt, Artificial Sequence
  Synthetic
aacaucacaucaggacucc

SEQ ID NO: 29012 - RNA, 20 nt, Artificial Sequence
  Synthetic
gaacaucacaucaggacucc

SEQ ID NO: 29013 - RNA, 21 nt, Artificial Sequence
  Synthetic
agaacaucacaucaggacucc

SEQ ID NO: 29014 - RNA, 22 nt, Artificial Sequence
  Synthetic
gagaacaucacaucaggacucc

SEQ ID NO: 29015 - RNA, 23 nt, Artificial Sequence
  Synthetic
ggagaacaucacaucaggacucc

SEQ ID NO: 29016 - RNA, 24 nt, Artificial Sequence
  Synthetic
uggagaacaucacaucaggacucc

SEQ ID NO: 29017 - RNA, 18 nt, Artificial Sequence
  Synthetic
cuuaccaaccuccugucc

SEQ ID NO: 29018 - RNA, 19 nt, Artificial Sequence
  Synthetic
acuuaccaaccuccugucc

SEQ ID NO: 29019 - RNA, 20 nt, Artificial Sequence
  Synthetic
cacuuaccaaccuccugucc

SEQ ID NO: 29020 - RNA, 21 nt, Artificial Sequence
  Synthetic
ucacuuaccaaccuccugucc

SEQ ID NO: 29021 - RNA, 22 nt, Artificial Sequence
  Synthetic
aucacuuaccaaccuccugucc

SEQ ID NO: 29022 - RNA, 23 nt, Artificial Sequence
  Synthetic
aaucacuuaccaaccuccugucc

SEQ ID NO: 29023 - RNA, 24 nt, Artificial Sequence
  Synthetic
caaucacuuaccaaccuccugucc

SEQ ID NO: 29024 - RNA, 18 nt, Artificial Sequence
  Synthetic
ugugggucaccauauucc

SEQ ID NO: 29025 - RNA, 19 nt, Artificial Sequence
  Synthetic
uugugggucaccauauucc

SEQ ID NO: 29026 - RNA, 20 nt, Artificial Sequence
  Synthetic
uuugugggucaccauauucc

SEQ ID NO: 29027 - RNA, 21 nt, Artificial Sequence
  Synthetic
uuuugugggucaccauauucc

SEQ ID NO: 29028 - RNA, 22 nt, Artificial Sequence
  Synthetic
auuuugugggucaccauauucc

SEQ ID NO: 29029 - RNA, 23 nt, Artificial Sequence
  Synthetic
cauuuugugggucaccauauucc

SEQ ID NO: 29030 - RNA, 24 nt, Artificial Sequence
  Synthetic
ucauuuugugggucaccauauucc

SEQ ID NO: 29031 - RNA, 18 nt, Artificial Sequence
  Synthetic
ucccaauguuaguauucc

SEQ ID NO: 29032 - RNA, 19 nt, Artificial Sequence
  Synthetic
uucccaauguuaguauucc

SEQ ID NO: 29033 - RNA, 20 nt, Artificial Sequence
  Synthetic
cuucccaauguuaguauucc

SEQ ID NO: 29034 - RNA, 21 nt, Artificial Sequence
  Synthetic
gcuucccaauguuaguauucc

SEQ ID NO: 29035 - RNA, 22 nt, Artificial Sequence
  Synthetic
agcuucccaauguuaguauucc

SEQ ID NO: 29036 - RNA, 23 nt, Artificial Sequence
  Synthetic
cagcuucccaauguuaguauucc

SEQ ID NO: 29037 - RNA, 24 nt, Artificial Sequence
  Synthetic
ccagcuucccaauguuaguauucc

SEQ ID NO: 29038 - RNA, 18 nt, Artificial Sequence
  Synthetic
uugcuuucgcaaacuucc

SEQ ID NO: 29039 - RNA, 19 nt, Artificial Sequence
  Synthetic
auugcuuucgcaaacuucc

SEQ ID NO: 29040 - RNA, 20 nt, Artificial Sequence
  Synthetic
gauugcuuucgcaaacuucc

SEQ ID NO: 29041 - RNA, 21 nt, Artificial Sequence
  Synthetic
agauugcuuucgcaaacuucc

SEQ ID NO: 29042 - RNA, 22 nt, Artificial Sequence
  Synthetic
aagauugcuuucgcaaacuucc

SEQ ID NO: 29043 - RNA, 23 nt, Artificial Sequence
  Synthetic
aaagauugcuuucgcaaacuucc

SEQ ID NO: 29044 - RNA, 24 nt, Artificial Sequence
  Synthetic
caaagauugcuuucgcaaacuucc

SEQ ID NO: 29045 - RNA, 18 nt, Artificial Sequence
  Synthetic
uauccuaucaacacuucc

SEQ ID NO: 29046 - RNA, 19 nt, Artificial Sequence
  Synthetic
cuauccuaucaacacuucc

SEQ ID NO: 29047 - RNA, 20 nt, Artificial Sequence
  Synthetic
ccuauccuaucaacacuucc

SEQ ID NO: 29048 - RNA, 21 nt, Artificial Sequence
  Synthetic
cccuauccuaucaacacuucc

SEQ ID NO: 29049 - RNA, 22 nt, Artificial Sequence
  Synthetic
ccccuauccuaucaacacuucc

SEQ ID NO: 29050 - RNA, 23 nt, Artificial Sequence
  Synthetic
gccccuauccuaucaacacuucc

SEQ ID NO: 29051 - RNA, 24 nt, Artificial Sequence
  Synthetic
ugccccuauccuaucaacacuucc

SEQ ID NO: 29052 - RNA, 18 nt, Artificial Sequence
  Synthetic
ggaaguacaccuccuucc

SEQ ID NO: 29053 - RNA, 19 nt, Artificial Sequence
  Synthetic
cggaaguacaccuccuucc

SEQ ID NO: 29054 - RNA, 20 nt, Artificial Sequence
  Synthetic
ucggaaguacaccuccuucc

SEQ ID NO: 29055 - RNA, 21 nt, Artificial Sequence
  Synthetic
cucggaaguacaccuccuucc

SEQ ID NO: 29056 - RNA, 22 nt, Artificial Sequence
  Synthetic
ucucggaaguacaccuccuucc

SEQ ID NO: 29057 - RNA, 23 nt, Artificial Sequence
  Synthetic
uucucggaaguacaccuccuucc

SEQ ID NO: 29058 - RNA, 24 nt, Artificial Sequence
  Synthetic
uuucucggaaguacaccuccuucc

SEQ ID NO: 29059 - RNA, 18 nt, Artificial Sequence
  Synthetic
cauccauuugaacacagc

SEQ ID NO: 29060 - RNA, 19 nt, Artificial Sequence
  Synthetic
gcauccauuugaacacagc

SEQ ID NO: 29061 - RNA, 20 nt, Artificial Sequence
  Synthetic
ggcauccauuugaacacagc

SEQ ID NO: 29062 - RNA, 21 nt, Artificial Sequence
  Synthetic
gggcauccauuugaacacagc

SEQ ID NO: 29063 - RNA, 22 nt, Artificial Sequence
  Synthetic
ugggcauccauuugaacacagc

SEQ ID NO: 29064 - RNA, 23 nt, Artificial Sequence
  Synthetic
gugggcauccauuugaacacagc

SEQ ID NO: 29065 - RNA, 24 nt, Artificial Sequence
  Synthetic
ugugggcauccauuugaacacagc

SEQ ID NO: 29066 - RNA, 18 nt, Artificial Sequence
  Synthetic
gggaacaagagcuacagc

SEQ ID NO: 29067 - RNA, 19 nt, Artificial Sequence
  Synthetic
ugggaacaagagcuacagc

SEQ ID NO: 29068 - RNA, 20 nt, Artificial Sequence
  Synthetic
cugggaacaagagcuacagc

SEQ ID NO: 29069 - RNA, 21 nt, Artificial Sequence
  Synthetic
ccugggaacaagagcuacagc

SEQ ID NO: 29070 - RNA, 22 nt, Artificial Sequence
  Synthetic
uccugggaacaagagcuacagc

SEQ ID NO: 29071 - RNA, 23 nt, Artificial Sequence
  Synthetic
uuccugggaacaagagcuacagc

SEQ ID NO: 29072 - RNA, 24 nt, Artificial Sequence
  Synthetic
auuccugggaacaagagcuacagc

SEQ ID NO: 29073 - RNA, 18 nt, Artificial Sequence
  Synthetic
ggaucuacaaccaccagc

SEQ ID NO: 29074 - RNA, 19 nt, Artificial Sequence
  Synthetic
aggaucuacaaccaccagc

SEQ ID NO: 29075 - RNA, 20 nt, Artificial Sequence
  Synthetic
caggaucuacaaccaccagc

SEQ ID NO: 29076 - RNA, 21 nt, Artificial Sequence
  Synthetic
ccaggaucuacaaccaccagc

SEQ ID NO: 29077 - RNA, 22 nt, Artificial Sequence
  Synthetic
uccaggaucuacaaccaccagc

SEQ ID NO: 29078 - RNA, 23 nt, Artificial Sequence
  Synthetic
uuccaggaucuacaaccaccagc

SEQ ID NO: 29079 - RNA, 24 nt, Artificial Sequence
  Synthetic
cuuccaggaucuacaaccaccagc

SEQ ID NO: 29080 - RNA, 18 nt, Artificial Sequence
  Synthetic
uuuagaggauccugcagc

SEQ ID NO: 29081 - RNA, 19 nt, Artificial Sequence
  Synthetic
auuuagaggauccugcagc

SEQ ID NO: 29082 - RNA, 20 nt, Artificial Sequence
  Synthetic
aauuuagaggauccugcagc

SEQ ID NO: 29083 - RNA, 21 nt, Artificial Sequence
  Synthetic
uaauuuagaggauccugcagc

SEQ ID NO: 29084 - RNA, 22 nt, Artificial Sequence
  Synthetic
auaauuuagaggauccugcagc

SEQ ID NO: 29085 - RNA, 23 nt, Artificial Sequence
  Synthetic
aauaauuuagaggauccugcagc

SEQ ID NO: 29086 - RNA, 24 nt, Artificial Sequence
  Synthetic
caauaauuuagaggauccugcagc

SEQ ID NO: 29087 - RNA, 18 nt, Artificial Sequence
  Synthetic
auuccugggaacaagagc

SEQ ID NO: 29088 - RNA, 19 nt, Artificial Sequence
  Synthetic
uauuccugggaacaagagc

SEQ ID NO: 29089 - RNA, 20 nt, Artificial Sequence
  Synthetic
auauuccugggaacaagagc

SEQ ID NO: 29090 - RNA, 21 nt, Artificial Sequence
  Synthetic
cauauuccugggaacaagagc

SEQ ID NO: 29091 - RNA, 22 nt, Artificial Sequence
  Synthetic
ccauauuccugggaacaagagc

SEQ ID NO: 29092 - RNA, 23 nt, Artificial Sequence
  Synthetic
accauauuccugggaacaagagc

SEQ ID NO: 29093 - RNA, 24 nt, Artificial Sequence
  Synthetic
caccauauuccugggaacaagagc

SEQ ID NO: 29094 - RNA, 18 nt, Artificial Sequence
  Synthetic
ggaccuacucgacaccgc

SEQ ID NO: 29095 - RNA, 19 nt, Artificial Sequence
  Synthetic
gggaccuacucgacaccgc

SEQ ID NO: 29096 - RNA, 20 nt, Artificial Sequence
  Synthetic
cgggaccuacucgacaccgc

SEQ ID NO: 29097 - RNA, 18 nt, Artificial Sequence
  Synthetic
uucaccucugcacgucgc

SEQ ID NO: 29098 - RNA, 19 nt, Artificial Sequence
  Synthetic
cuucaccucugcacgucgc

SEQ ID NO: 29099 - RNA, 20 nt, Artificial Sequence
  Synthetic
gcuucaccucugcacgucgc

SEQ ID NO: 29100 - RNA, 21 nt, Artificial Sequence
  Synthetic
cgcuucaccucugcacgucgc

SEQ ID NO: 29101 - RNA, 22 nt, Artificial Sequence
  Synthetic
ucgcuucaccucugcacgucgc

SEQ ID NO: 29102 - RNA, 23 nt, Artificial Sequence
  Synthetic
uucgcuucaccucugcacgucgc

SEQ ID NO: 29103 - RNA, 24 nt, Artificial Sequence
  Synthetic
cuucgcuucaccucugcacgucgc

SEQ ID NO: 29104 - RNA, 18 nt, Artificial Sequence
  Synthetic
  misc_feature (9)..(9): n is a, c, g, or u
ucucaaucnccgcgucgc

SEQ ID NO: 29105 - RNA, 19 nt, Artificial Sequence
  Synthetic
  misc_feature (10)..(10): n is a, c, g, or u
aucucaaucnccgcgucgc

SEQ ID NO: 29106 - RNA, 20 nt, Artificial Sequence
  Synthetic
  misc_feature (11)..(11): n is a, c, g, or u
gaucucaaucnccgcgucgc

SEQ ID NO: 29107 - RNA, 21 nt, Artificial Sequence
  Synthetic
  misc_feature (12)..(12): n is a, c, g, or u
agaucucaaucnccgcgucgc

SEQ ID NO: 29108 - RNA, 22 nt, Artificial Sequence
  Synthetic
  misc_feature (13)..(13): n is a, c, g, or u
aagaucucaaucnccgcgucgc

SEQ ID NO: 29109 - RNA, 23 nt, Artificial Sequence
  Synthetic
  misc_feature (14)..(14): n is a, c, g, or u
gaagaucucaaucnccgcgucgc

SEQ ID NO: 29110 - RNA, 24 nt, Artificial Sequence
  Synthetic
  misc_feature (15)..(15): n is a, c, g, or u
cgaagaucucaaucnccgcgucgc

SEQ ID NO: 29111 - RNA, 18 nt, Artificial Sequence
  Synthetic
gaccccucucguggucgc

SEQ ID NO: 29112 - RNA, 19 nt, Artificial Sequence
  Synthetic
cgaccccucucguggucgc

SEQ ID NO: 29113 - RNA, 20 nt, Artificial Sequence
  Synthetic
acgaccccucucguggucgc

SEQ ID NO: 29114 - RNA, 18 nt, Artificial Sequence
  Synthetic
gggguggagcccucaggc

SEQ ID NO: 29115 - RNA, 19 nt, Artificial Sequence
  Synthetic
ugggguggagcccucaggc

SEQ ID NO: 29116 - RNA, 20 nt, Artificial Sequence
  Synthetic
cugggguggagcccucaggc

SEQ ID NO: 29117 - RNA, 21 nt, Artificial Sequence
  Synthetic
ucugggguggagcccucaggc

SEQ ID NO: 29118 - RNA, 22 nt, Artificial Sequence
  Synthetic
uucugggguggagcccucaggc

SEQ ID NO: 29119 - RNA, 23 nt, Artificial Sequence
  Synthetic
cuucugggguggagcccucaggc

SEQ ID NO: 29120 - RNA, 24 nt, Artificial Sequence
  Synthetic
ccuucugggguggagcccucaggc

SEQ ID NO: 29121 - RNA, 18 nt, Artificial Sequence
  Synthetic
gucuuuguauuaggaggc

SEQ ID NO: 29122 - RNA, 19 nt, Artificial Sequence
  Synthetic
ggucuuuguauuaggaggc

SEQ ID NO: 29123 - RNA, 20 nt, Artificial Sequence
  Synthetic
aggucuuuguauuaggaggc

SEQ ID NO: 29124 - RNA, 21 nt, Artificial Sequence
  Synthetic
aaggucuuuguauuaggaggc

SEQ ID NO: 29125 - RNA, 22 nt, Artificial Sequence
  Synthetic
aaaggucuuuguauuaggaggc

SEQ ID NO: 29126 - RNA, 23 nt, Artificial Sequence
  Synthetic
uaaaggucuuuguauuaggaggc

SEQ ID NO: 29127 - RNA, 24 nt, Artificial Sequence
  Synthetic
uuaaaggucuuuguauuaggaggc

SEQ ID NO: 29128 - RNA, 18 nt, Artificial Sequence
  Synthetic
agcaccucucucaacggc

SEQ ID NO: 29129 - RNA, 19 nt, Artificial Sequence
  Synthetic
gagcaccucucucaacggc

SEQ ID NO: 29130 - RNA, 20 nt, Artificial Sequence
  Synthetic
ggagcaccucucucaacggc

SEQ ID NO: 29131 - RNA, 21 nt, Artificial Sequence
  Synthetic
gggagcaccucucucaacggc

SEQ ID NO: 29132 - RNA, 22 nt, Artificial Sequence
  Synthetic
ugggagcaccucucucaacggc

SEQ ID NO: 29133 - RNA, 23 nt, Artificial Sequence
  Synthetic
augggagcaccucucucaacggc

SEQ ID NO: 29134 - RNA, 24 nt, Artificial Sequence
  Synthetic
caugggagcaccucucucaacggc

SEQ ID NO: 29135 - RNA, 18 nt, Artificial Sequence
  Synthetic
  misc_feature (10)..(10): n is a, c, g, or u
ggagcggacnuuaucggc

SEQ ID NO: 29136 - RNA, 19 nt, Artificial Sequence
  Synthetic
  misc_feature (11)..(11): n is a, c, g, or u
uggagcggacnuuaucggc

SEQ ID NO: 29137 - RNA, 20 nt, Artificial Sequence
  Synthetic
  misc_feature (12)..(12): n is a, c, g, or u
cuggagcggacnuuaucggc

SEQ ID NO: 29138 - RNA, 21 nt, Artificial Sequence
  Synthetic
  misc_feature (13)..(13): n is a, c, g, or u
ucuggagcggacnuuaucggc

SEQ ID NO: 29139 - RNA, 22 nt, Artificial Sequence
  Synthetic
  misc_feature (14)..(14): n is a, c, g, or u
gucuggagcggacnuuaucggc

SEQ ID NO: 29140 - RNA, 23 nt, Artificial Sequence
  Synthetic
  misc_feature (15)..(15): n is a, c, g, or u
ggucuggagcggacnuuaucggc

SEQ ID NO: 29141 - RNA, 24 nt, Artificial Sequence
  Synthetic
  misc_feature (1)..(1): n is a, c, g, or u
  misc_feature (16)..(16): n is a, c, g, or u
nggucuggagcggacnuuaucggc

SEQ ID NO: 29142 - RNA, 18 nt, Artificial Sequence
  Synthetic
uuuaccccguugcucggc

SEQ ID NO: 29143 - RNA, 19 nt, Artificial Sequence
  Synthetic
cuuuaccccguugcucggc

SEQ ID NO: 29144 - RNA, 20 nt, Artificial Sequence
  Synthetic
ccuuuaccccguugcucggc

SEQ ID NO: 29145 - RNA, 18 nt, Artificial Sequence
  Synthetic
ugucuacgucccgucggc

SEQ ID NO: 29146 - RNA, 19 nt, Artificial Sequence
  Synthetic
uugucuacgucccgucggc

SEQ ID NO: 29147 - RNA, 20 nt, Artificial Sequence
  Synthetic
uuugucuacgucccgucggc

SEQ ID NO: 29148 - RNA, 21 nt, Artificial Sequence
  Synthetic
cuuugucuacgucccgucggc

SEQ ID NO: 29149 - RNA, 22 nt, Artificial Sequence
  Synthetic
ccuuugucuacgucccgucggc

SEQ ID NO: 29150 - RNA, 23 nt, Artificial Sequence
  Synthetic
uccuuugucuacgucccgucggc

SEQ ID NO: 29151 - RNA, 24 nt, Artificial Sequence
  Synthetic
guccuuugucuacgucccgucggc

SEQ ID NO: 29152 - RNA, 18 nt, Artificial Sequence
  Synthetic
ucaacggcgagaaggggc

SEQ ID NO: 29153 - RNA, 19 nt, Artificial Sequence
  Synthetic
cucaacggcgagaaggggc

SEQ ID NO: 29154 - RNA, 20 nt, Artificial Sequence
  Synthetic
ucucaacggcgagaaggggc

SEQ ID NO: 29155 - RNA, 18 nt, Artificial Sequence
  Synthetic
cuuggguggcuuuggggc

SEQ ID NO: 29156 - RNA, 19 nt, Artificial Sequence
  Synthetic
ccuuggguggcuuuggggc

SEQ ID NO: 29157 - RNA, 20 nt, Artificial Sequence
  Synthetic
gccuuggguggcuuuggggc

SEQ ID NO: 29158 - RNA, 21 nt, Artificial Sequence
  Synthetic
ugccuuggguggcuuuggggc

SEQ ID NO: 29159 - RNA, 22 nt, Artificial Sequence
  Synthetic
gugccuuggguggcuuuggggc

SEQ ID NO: 29160 - RNA, 23 nt, Artificial Sequence
  Synthetic
ugugccuuggguggcuuuggggc

SEQ ID NO: 29161 - RNA, 24 nt, Artificial Sequence
  Synthetic
cugugccuuggguggcuuuggggc

SEQ ID NO: 29162 - RNA, 18 nt, Artificial Sequence
  Synthetic
auaccuaugggagugggc

SEQ ID NO: 29163 - RNA, 19 nt, Artificial Sequence
  Synthetic
aauaccuaugggagugggc

SEQ ID NO: 29164 - RNA, 20 nt, Artificial Sequence
  Synthetic
aaauaccuaugggagugggc

SEQ ID NO: 29165 - RNA, 18 nt, Artificial Sequence
  Synthetic
gacgcaacccccacuggc

SEQ ID NO: 29166 - RNA, 19 nt, Artificial Sequence
  Synthetic
ugacgcaacccccacuggc

SEQ ID NO: 29167 - RNA, 20 nt, Artificial Sequence
  Synthetic
cugacgcaacccccacuggc

SEQ ID NO: 29168 - RNA, 21 nt, Artificial Sequence
  Synthetic
gcugacgcaacccccacuggc

SEQ ID NO: 29169 - RNA, 22 nt, Artificial Sequence
  Synthetic
ugcugacgcaacccccacuggc

SEQ ID NO: 29170 - RNA, 23 nt, Artificial Sequence
  Synthetic
uugcugacgcaacccccacuggc

SEQ ID NO: 29171 - RNA, 24 nt, Artificial Sequence
  Synthetic
uuugcugacgcaacccccacuggc

SEQ ID NO: 29172 - RNA, 18 nt, Artificial Sequence
  Synthetic
agcugugccuuggguggc

SEQ ID NO: 29173 - RNA, 19 nt, Artificial Sequence
  Synthetic
aagcugugccuuggguggc

SEQ ID NO: 29174 - RNA, 20 nt, Artificial Sequence
  Synthetic
caagcugugccuuggguggc

SEQ ID NO: 29175 - RNA, 21 nt, Artificial Sequence
  Synthetic
ccaagcugugccuuggguggc

SEQ ID NO: 29176 - RNA, 22 nt, Artificial Sequence
  Synthetic
uccaagcugugccuuggguggc

SEQ ID NO: 29177 - RNA, 23 nt, Artificial Sequence
  Synthetic
cuccaagcugugccuuggguggc

SEQ ID NO: 29178 - RNA, 24 nt, Artificial Sequence
  Synthetic
ccuccaagcugugccuuggguggc

SEQ ID NO: 29179 - RNA, 18 nt, Artificial Sequence
  Synthetic
cacauccacaggccaugc

SEQ ID NO: 29180 - RNA, 19 nt, Artificial Sequence
  Synthetic
acacauccacaggccaugc

SEQ ID NO: 29181 - RNA, 20 nt, Artificial Sequence
  Synthetic
cacacauccacaggccaugc

SEQ ID NO: 29182 - RNA, 21 nt, Artificial Sequence
  Synthetic
acacacauccacaggccaugc

SEQ ID NO: 29183 - RNA, 22 nt, Artificial Sequence
  Synthetic
gacacacauccacaggccaugc

SEQ ID NO: 29184 - RNA, 23 nt, Artificial Sequence
  Synthetic
ggacacacauccacaggccaugc

SEQ ID NO: 29185 - RNA, 24 nt, Artificial Sequence
  Synthetic
gggacacacauccacaggccaugc

SEQ ID NO: 29186 - RNA, 18 nt, Artificial Sequence
  Synthetic
uuggccaucagcgcaugc

SEQ ID NO: 29187 - RNA, 19 nt, Artificial Sequence
  Synthetic
auuggccaucagcgcaugc

SEQ ID NO: 29188 - RNA, 20 nt, Artificial Sequence
  Synthetic
gauuggccaucagcgcaugc

SEQ ID NO: 29189 - RNA, 18 nt, Artificial Sequence
  Synthetic
agcccucuaccgagaugc

SEQ ID NO: 29190 - RNA, 19 nt, Artificial Sequence
  Synthetic
cagcccucuaccgagaugc

SEQ ID NO: 29191 - RNA, 20 nt, Artificial Sequence
  Synthetic
ucagcccucuaccgagaugc

SEQ ID NO: 29192 - RNA, 21 nt, Artificial Sequence
  Synthetic
uucagcccucuaccgagaugc

SEQ ID NO: 29193 - RNA, 22 nt, Artificial Sequence
  Synthetic
cuucagcccucuaccgagaugc

SEQ ID NO: 29194 - RNA, 23 nt, Artificial Sequence
  Synthetic
gcuucagcccucuaccgagaugc

SEQ ID NO: 29195 - RNA, 24 nt, Artificial Sequence
  Synthetic
cgcuucagcccucuaccgagaugc

SEQ ID NO: 29196 - RNA, 18 nt, Artificial Sequence
  Synthetic
agaaacacagaacccugc

SEQ ID NO: 29197 - RNA, 19 nt, Artificial Sequence
  Synthetic
cagaaacacagaacccugc

SEQ ID NO: 29198 - RNA, 20 nt, Artificial Sequence
  Synthetic
ucagaaacacagaacccugc

SEQ ID NO: 29199 - RNA, 21 nt, Artificial Sequence
  Synthetic
uucagaaacacagaacccugc

SEQ ID NO: 29200 - RNA, 22 nt, Artificial Sequence
  Synthetic
guucagaaacacagaacccugc

SEQ ID NO: 29201 - RNA, 23 nt, Artificial Sequence
  Synthetic
aguucagaaacacagaacccugc

SEQ ID NO: 29202 - RNA, 24 nt, Artificial Sequence
  Synthetic
caguucagaaacacagaacccugc

SEQ ID NO: 29203 - RNA, 18 nt, Artificial Sequence
  Synthetic
cugccaacuggauccugc

SEQ ID NO: 29204 - RNA, 19 nt, Artificial Sequence
  Synthetic
gcugccaacuggauccugc

SEQ ID NO: 29205 - RNA, 20 nt, Artificial Sequence
  Synthetic
ugcugccaacuggauccugc

SEQ ID NO: 29206 - RNA, 21 nt, Artificial Sequence
  Synthetic
gugcugccaacuggauccugc

SEQ ID NO: 29207 - RNA, 22 nt, Artificial Sequence
  Synthetic
ugugcugccaacuggauccugc

SEQ ID NO: 29208 - RNA, 23 nt, Artificial Sequence
  Synthetic
  misc_feature (1)..(1): n is a, c, g, or u
nugugcugccaacuggauccugc

SEQ ID NO: 29209 - RNA, 24 nt, Artificial Sequence
  Synthetic
  misc_feature (2)..(2): n is a, c, g, or u
gnugugcugccaacuggauccugc

SEQ ID NO: 29210 - RNA, 18 nt, Artificial Sequence
  Synthetic
caauuuguucaguggugc

SEQ ID NO: 29211 - RNA, 19 nt, Artificial Sequence
  Synthetic
gcaauuuguucaguggugc

SEQ ID NO: 29212 - RNA, 20 nt, Artificial Sequence
  Synthetic
ugcaauuuguucaguggugc

SEQ ID NO: 29213 - RNA, 21 nt, Artificial Sequence
  Synthetic
gugcaauuuguucaguggugc

SEQ ID NO: 29214 - RNA, 22 nt, Artificial Sequence
  Synthetic
agugcaauuuguucaguggugc

SEQ ID NO: 29215 - RNA, 23 nt, Artificial Sequence
  Synthetic
uagugcaauuuguucaguggugc

SEQ ID NO: 29216 - RNA, 24 nt, Artificial Sequence
  Synthetic
cuagugcaauuuguucaguggugc

SEQ ID NO: 29217 - RNA, 18 nt, Artificial Sequence
  Synthetic
caagccuccaagcugugc

SEQ ID NO: 29218 - RNA, 19 nt, Artificial Sequence
  Synthetic
ucaagccuccaagcugugc

SEQ ID NO: 29219 - RNA, 20 nt, Artificial Sequence
  Synthetic
uucaagccuccaagcugugc

SEQ ID NO: 29220 - RNA, 21 nt, Artificial Sequence
  Synthetic
guucaagccuccaagcugugc

SEQ ID NO: 29221 - RNA, 22 nt, Artificial Sequence
  Synthetic
uguucaagccuccaagcugugc

SEQ ID NO: 29222 - RNA, 23 nt, Artificial Sequence
  Synthetic
cuguucaagccuccaagcugugc

SEQ ID NO: 29223 - RNA, 24 nt, Artificial Sequence
  Synthetic
acuguucaagccuccaagcugugc

SEQ ID NO: 29224 - RNA, 18 nt, Artificial Sequence
  Synthetic
cucaggaacauauugugc

SEQ ID NO: 29225 - RNA, 19 nt, Artificial Sequence
  Synthetic
ccucaggaacauauugugc

SEQ ID NO: 29226 - RNA, 20 nt, Artificial Sequence
  Synthetic
gccucaggaacauauugugc

SEQ ID NO: 29227 - RNA, 21 nt, Artificial Sequence
  Synthetic
ugccucaggaacauauugugc

SEQ ID NO: 29228 - RNA, 22 nt, Artificial Sequence
  Synthetic
uugccucaggaacauauugugc

SEQ ID NO: 29229 - RNA, 23 nt, Artificial Sequence
  Synthetic
  misc_feature (1)..(1): n is a, c, g, or u
nuugccucaggaacauauugugc

SEQ ID NO: 29230 - RNA, 24 nt, Artificial Sequence
  Synthetic
  misc_feature (2)..(2): n is a, c, g, or u
cnuugccucaggaacauauugugc

SEQ ID NO: 29231 - RNA, 18 nt, Artificial Sequence
  Synthetic
uuccugacauucacuugc

SEQ ID NO: 29232 - RNA, 19 nt, Artificial Sequence
  Synthetic
uuuccugacauucacuugc

SEQ ID NO: 29233 - RNA, 20 nt, Artificial Sequence
  Synthetic
uuuuccugacauucacuugc

SEQ ID NO: 29234 - RNA, 21 nt, Artificial Sequence
  Synthetic
cuuuuccugacauucacuugc

SEQ ID NO: 29235 - RNA, 22 nt, Artificial Sequence
  Synthetic
ucuuuuccugacauucacuugc

SEQ ID NO: 29236 - RNA, 23 nt, Artificial Sequence
  Synthetic
uucuuuuccugacauucacuugc

SEQ ID NO: 29237 - RNA, 24 nt, Artificial Sequence
  Synthetic
cuucuuuuccugacauucacuugc

SEQ ID NO: 29238 - RNA, 18 nt, Artificial Sequence
  Synthetic
aaccugcaccacucuugc

SEQ ID NO: 29239 - RNA, 19 nt, Artificial Sequence
  Synthetic
aaaccugcaccacucuugc

SEQ ID NO: 29240 - RNA, 20 nt, Artificial Sequence
  Synthetic
aaaaccugcaccacucuugc

SEQ ID NO: 29241 - RNA, 21 nt, Artificial Sequence
  Synthetic
caaaaccugcaccacucuugc

SEQ ID NO: 29242 - RNA, 22 nt, Artificial Sequence
  Synthetic
gcaaaaccugcaccacucuugc

SEQ ID NO: 29243 - RNA, 23 nt, Artificial Sequence
  Synthetic
ugcaaaaccugcaccacucuugc

SEQ ID NO: 29244 - RNA, 24 nt, Artificial Sequence
  Synthetic
cugcaaaaccugcaccacucuugc

SEQ ID NO: 29245 - RNA, 18 nt, Artificial Sequence
  Synthetic
  misc_feature (14)..(14): n is a, c, g, or u
ggaguugggggacnuugc

SEQ ID NO: 29246 - RNA, 19 nt, Artificial Sequence
  Synthetic
  misc_feature (15)..(15): n is a, c, g, or u
gggaguugggggacnuugc

SEQ ID NO: 29247 - RNA, 20 nt, Artificial Sequence
  Synthetic
  misc_feature (16)..(16): n is a, c, g, or u
ugggaguugggggacnuugc

SEQ ID NO: 29248 - RNA, 21 nt, Artificial Sequence
  Synthetic
  misc_feature (17)..(17): n is a, c, g, or u
uugggaguugggggacnuugc

SEQ ID NO: 29249 - RNA, 22 nt, Artificial Sequence
  Synthetic
  misc_feature (18)..(18): n is a, c, g, or u
auugggaguugggggacnuugc

SEQ ID NO: 29250 - RNA, 23 nt, Artificial Sequence
  Synthetic
  misc_feature (1)..(1): n is a, c, g, or u
  misc_feature (19)..(19): n is a, c, g, or u
nauugggaguugggggacnuugc

SEQ ID NO: 29251 - RNA, 24 nt, Artificial Sequence
  Synthetic
  misc_feature (2)..(2): n is a, c, g, or u
  misc_feature (20)..(20): n is a, c, g, or u
unauugggaguugggggacnuugc

SEQ ID NO: 29252 - RNA, 18 nt, Artificial Sequence
  Synthetic
  misc_feature (11)..(11): n is a, c, g, or u
  misc_feature (17)..(17): n is a, c, g, or u
ucaauacuaanaugggnc

SEQ ID NO: 29253 - RNA, 19 nt, Artificial Sequence
  Synthetic
  misc_feature (12)..(12): n is a, c, g, or u
  misc_feature (18)..(18): n is a, c, g, or u
gucaauacuaanaugggnc

SEQ ID NO: 29254 - RNA, 20 nt, Artificial Sequence
  Synthetic
  misc_feature (13)..(13): n is a, c, g, or u
  misc_feature (19)..(19): n is a, c, g, or u
ugucaauacuaanaugggnc

SEQ ID NO: 29255 - RNA, 21 nt, Artificial Sequence
  Synthetic
  misc_feature (14)..(14): n is a, c, g, or u
  misc_feature (20)..(20): n is a, c, g, or u
augucaauacuaanaugggnc

SEQ ID NO: 29256 - RNA, 22 nt, Artificial Sequence
  Synthetic
  misc_feature (15)..(15): n is a, c, g, or u
  misc_feature (21)..(21): n is a, c, g, or u
uaugucaauacuaanaugggnc

SEQ ID NO: 29257 - RNA, 23 nt, Artificial Sequence
  Synthetic
  misc_feature (16)..(16): n is a, c, g, or u
  misc_feature (22)..(22): n is a, c, g, or u
uuaugucaauacuaanaugggnc

SEQ ID NO: 29258 - RNA, 24 nt, Artificial Sequence
  Synthetic
  misc_feature (17)..(17): n is a, c, g, or u
  misc_feature (23)..(23): n is a, c, g, or u
auuaugucaauacuaanaugggnc

SEQ ID NO: 29259 - RNA, 18 nt, Artificial Sequence
  Synthetic
ucgcagaagaucucaauc

SEQ ID NO: 29260 - RNA, 19 nt, Artificial Sequence
  Synthetic
gucgcagaagaucucaauc

SEQ ID NO: 29261 - RNA, 20 nt, Artificial Sequence
  Synthetic
cgucgcagaagaucucaauc

SEQ ID NO: 29262 - RNA, 18 nt, Artificial Sequence
  Synthetic
cucuaagggacacacauc

SEQ ID NO: 29263 - RNA, 19 nt, Artificial Sequence
  Synthetic
ccucuaagggacacacauc

SEQ ID NO: 29264 - RNA, 20 nt, Artificial Sequence
  Synthetic
accucuaagggacacacauc

SEQ ID NO: 29265 - RNA, 21 nt, Artificial Sequence
  Synthetic
caccucuaagggacacacauc

SEQ ID NO: 29266 - RNA, 22 nt, Artificial Sequence
  Synthetic
ccaccucuaagggacacacauc

SEQ ID NO: 29267 - RNA, 23 nt, Artificial Sequence
  Synthetic
uccaccucuaagggacacacauc

SEQ ID NO: 29268 - RNA, 24 nt, Artificial Sequence
  Synthetic
cuccaccucuaagggacacacauc

SEQ ID NO: 29269 - RNA, 18 nt, Artificial Sequence
  Synthetic
uggauugaggaauacauc

SEQ ID NO: 29270 - RNA, 19 nt, Artificial Sequence
  Synthetic
cuggauugaggaauacauc

SEQ ID NO: 29271 - RNA, 20 nt, Artificial Sequence
  Synthetic
ccuggauugaggaauacauc

SEQ ID NO: 29272 - RNA, 21 nt, Artificial Sequence
  Synthetic
accuggauugaggaauacauc

SEQ ID NO: 29273 - RNA, 22 nt, Artificial Sequence
  Synthetic
gaccuggauugaggaauacauc

SEQ ID NO: 29274 - RNA, 23 nt, Artificial Sequence
  Synthetic
cgaccuggauugaggaauacauc

SEQ ID NO: 29275 - RNA, 24 nt, Artificial Sequence
  Synthetic
acgaccuggauugaggaauacauc

SEQ ID NO: 29276 - RNA, 18 nt, Artificial Sequence
  Synthetic
uauucccaucccaucauc

SEQ ID NO: 29277 - RNA, 19 nt, Artificial Sequence
  Synthetic
guauucccaucccaucauc

SEQ ID NO: 29278 - RNA, 20 nt, Artificial Sequence
  Synthetic
uguauucccaucccaucauc

SEQ ID NO: 29279 - RNA, 21 nt, Artificial Sequence
  Synthetic
cuguauucccaucccaucauc

SEQ ID NO: 29280 - RNA, 22 nt, Artificial Sequence
  Synthetic
ccuguauucccaucccaucauc

SEQ ID NO: 29281 - RNA, 23 nt, Artificial Sequence
  Synthetic
accuguauucccaucccaucauc

SEQ ID NO: 29282 - RNA, 24 nt, Artificial Sequence
  Synthetic
caccuguauucccaucccaucauc

SEQ ID NO: 29283 - RNA, 18 nt, Artificial Sequence
  Synthetic
uccucuacuuccaggauc

SEQ ID NO: 29284 - RNA, 19 nt, Artificial Sequence
  Synthetic
guccucuacuuccaggauc

SEQ ID NO: 29285 - RNA, 20 nt, Artificial Sequence
  Synthetic
uguccucuacuuccaggauc

SEQ ID NO: 29286 - RNA, 21 nt, Artificial Sequence
  Synthetic
guguccucuacuuccaggauc

SEQ ID NO: 29287 - RNA, 22 nt, Artificial Sequence
  Synthetic
uguguccucuacuuccaggauc

SEQ ID NO: 29288 - RNA, 23 nt, Artificial Sequence
  Synthetic
guguguccucuacuuccaggauc

SEQ ID NO: 29289 - RNA, 24 nt, Artificial Sequence
  Synthetic
cguguguccucuacuuccaggauc

SEQ ID NO: 29290 - RNA, 18 nt, Artificial Sequence
  Synthetic
accaagcacuguuggauc

SEQ ID NO: 29291 - RNA, 19 nt, Artificial Sequence
  Synthetic
caccaagcacuguuggauc

SEQ ID NO: 29292 - RNA, 20 nt, Artificial Sequence
  Synthetic
ccaccaagcacuguuggauc

SEQ ID NO: 29293 - RNA, 21 nt, Artificial Sequence
  Synthetic
uccaccaagcacuguuggauc

SEQ ID NO: 29294 - RNA, 22 nt, Artificial Sequence
  Synthetic
uuccaccaagcacuguuggauc

SEQ ID NO: 29295 - RNA, 23 nt, Artificial Sequence
  Synthetic
guuccaccaagcacuguuggauc

SEQ ID NO: 29296 - RNA, 24 nt, Artificial Sequence
  Synthetic
aguuccaccaagcacuguuggauc

SEQ ID NO: 29297 - RNA, 18 nt, Artificial Sequence
  Synthetic
  misc_feature (8)..(8): n is a, c, g, or u
guauuaanccuuacuauc

SEQ ID NO: 29298 - RNA, 19 nt, Artificial Sequence
  Synthetic
  misc_feature (9)..(9): n is a, c, g, or u
gguauuaanccuuacuauc

SEQ ID NO: 29299 - RNA, 20 nt, Artificial Sequence
  Synthetic
  misc_feature (10)..(10): n is a, c, g, or u
agguauuaanccuuacuauc

SEQ ID NO: 29300 - RNA, 21 nt, Artificial Sequence
  Synthetic
  misc_feature (11)..(11): n is a, c, g, or u
aagguauuaanccuuacuauc

SEQ ID NO: 29301 - RNA, 22 nt, Artificial Sequence
  Synthetic
  misc_feature (12)..(12): n is a, c, g, or u
aaagguauuaanccuuacuauc

SEQ ID NO: 29302 - RNA, 23 nt, Artificial Sequence
  Synthetic
  misc_feature (13)..(13): n is a, c, g, or u
uaaagguauuaanccuuacuauc

SEQ ID NO: 29303 - RNA, 24 nt, Artificial Sequence
  Synthetic
  misc_feature (14)..(14): n is a, c, g, or u
auaaagguauuaanccuuacuauc

SEQ ID NO: 29304 - RNA, 18 nt, Artificial Sequence
  Synthetic
caacuuguccuggcuauc

SEQ ID NO: 29305 - RNA, 19 nt, Artificial Sequence
  Synthetic
ccaacuuguccuggcuauc

SEQ ID NO: 29306 - RNA, 20 nt, Artificial Sequence
  Synthetic
uccaacuuguccuggcuauc

SEQ ID NO: 29307 - RNA, 21 nt, Artificial Sequence
  Synthetic
cuccaacuuguccuggcuauc

SEQ ID NO: 29308 - RNA, 22 nt, Artificial Sequence
  Synthetic
ccuccaacuuguccuggcuauc

SEQ ID NO: 29309 - RNA, 23 nt, Artificial Sequence
  Synthetic
uccuccaacuuguccuggcuauc

SEQ ID NO: 29310 - RNA, 24 nt, Artificial Sequence
  Synthetic
guccuccaacuuguccuggcuauc

SEQ ID NO: 29311 - RNA, 18 nt, Artificial Sequence
  Synthetic
uaccaauuuuuuguuauc

SEQ ID NO: 29312 - RNA, 19 nt, Artificial Sequence
  Synthetic
uuaccaauuuuuuguuauc

SEQ ID NO: 29313 - RNA, 20 nt, Artificial Sequence
  Synthetic
guuaccaauuuuuuguuauc

SEQ ID NO: 29314 - RNA, 21 nt, Artificial Sequence
  Synthetic
uguuaccaauuuuuuguuauc

SEQ ID NO: 29315 - RNA, 22 nt, Artificial Sequence
  Synthetic
cuguuaccaauuuuuuguuauc

SEQ ID NO: 29316 - RNA, 23 nt, Artificial Sequence
  Synthetic
gcuguuaccaauuuuuuguuauc

SEQ ID NO: 29317 - RNA, 24 nt, Artificial Sequence
  Synthetic
cgcuguuaccaauuuuuuguuauc

SEQ ID NO: 29318 - RNA, 18 nt, Artificial Sequence
  Synthetic
ugccagcuagguuuuauc

SEQ ID NO: 29319 - RNA, 19 nt, Artificial Sequence
  Synthetic
augccagcuagguuuuauc

SEQ ID NO: 29320 - RNA, 20 nt, Artificial Sequence
  Synthetic
uaugccagcuagguuuuauc

SEQ ID NO: 29321 - RNA, 21 nt, Artificial Sequence
  Synthetic
uuaugccagcuagguuuuauc

SEQ ID NO: 29322 - RNA, 22 nt, Artificial Sequence
  Synthetic
auuaugccagcuagguuuuauc

SEQ ID NO: 29323 - RNA, 23 nt, Artificial Sequence
  Synthetic
aauuaugccagcuagguuuuauc

SEQ ID NO: 29324 - RNA, 24 nt, Artificial Sequence
  Synthetic
uaauuaugccagcuagguuuuauc

SEQ ID NO: 29325 - RNA, 18 nt, Artificial Sequence
  Synthetic
aacaucacaucaggacuc

SEQ ID NO: 29326 - RNA, 19 nt, Artificial Sequence
  Synthetic
gaacaucacaucaggacuc

SEQ ID NO: 29327 - RNA, 20 nt, Artificial Sequence
  Synthetic
agaacaucacaucaggacuc

SEQ ID NO: 29328 - RNA, 21 nt, Artificial Sequence
  Synthetic
gagaacaucacaucaggacuc

SEQ ID NO: 29329 - RNA, 22 nt, Artificial Sequence
  Synthetic
ggagaacaucacaucaggacuc

SEQ ID NO: 29330 - RNA, 23 nt, Artificial Sequence
  Synthetic
uggagaacaucacaucaggacuc

SEQ ID NO: 29331 - RNA, 24 nt, Artificial Sequence
  Synthetic
auggagaacaucacaucaggacuc

SEQ ID NO: 29332 - RNA, 18 nt, Artificial Sequence
  Synthetic
ccuuacauaagaggacuc

SEQ ID NO: 29333 - RNA, 19 nt, Artificial Sequence
  Synthetic
accuuacauaagaggacuc

SEQ ID NO: 29334 - RNA, 20 nt, Artificial Sequence
  Synthetic
aaccuuacauaagaggacuc

SEQ ID NO: 29335 - RNA, 21 nt, Artificial Sequence
  Synthetic
caaccuuacauaagaggacuc

SEQ ID NO: 29336 - RNA, 22 nt, Artificial Sequence
  Synthetic
acaaccuuacauaagaggacuc

SEQ ID NO: 29337 - RNA, 23 nt, Artificial Sequence
  Synthetic
aacaaccuuacauaagaggacuc

SEQ ID NO: 29338 - RNA, 24 nt, Artificial Sequence
  Synthetic
caacaaccuuacauaagaggacuc

SEQ ID NO: 29339 - RNA, 18 nt, Artificial Sequence
  Synthetic
uuaguauuccuuggacuc

SEQ ID NO: 29340 - RNA, 19 nt, Artificial Sequence
  Synthetic
guuaguauuccuuggacuc

SEQ ID NO: 29341 - RNA, 20 nt, Artificial Sequence
  Synthetic
uguuaguauuccuuggacuc

SEQ ID NO: 29342 - RNA, 21 nt, Artificial Sequence
  Synthetic
auguuaguauuccuuggacuc

SEQ ID NO: 29343 - RNA, 22 nt, Artificial Sequence
  Synthetic
aauguuaguauuccuuggacuc

SEQ ID NO: 29344 - RNA, 23 nt, Artificial Sequence
  Synthetic
caauguuaguauuccuuggacuc

SEQ ID NO: 29345 - RNA, 24 nt, Artificial Sequence
  Synthetic
ccaauguuaguauuccuuggacuc

SEQ ID NO: 29346 - RNA, 18 nt, Artificial Sequence
  Synthetic
ccccagucucuccaccuc

SEQ ID NO: 29347 - RNA, 19 nt, Artificial Sequence
  Synthetic
accccagucucuccaccuc

SEQ ID NO: 29348 - RNA, 20 nt, Artificial Sequence
  Synthetic
aaccccagucucuccaccuc

SEQ ID NO: 29349 - RNA, 21 nt, Artificial Sequence
  Synthetic
caaccccagucucuccaccuc

SEQ ID NO: 29350 - RNA, 22 nt, Artificial Sequence
  Synthetic
ccaaccccagucucuccaccuc

SEQ ID NO: 29351 - RNA, 23 nt, Artificial Sequence
  Synthetic
gccaaccccagucucuccaccuc

SEQ ID NO: 29352 - RNA, 24 nt, Artificial Sequence
  Synthetic
agccaaccccagucucuccaccuc

SEQ ID NO: 29353 - RNA, 18 nt, Artificial Sequence
  Synthetic
gaagaacucccucgccuc

SEQ ID NO: 29354 - RNA, 19 nt, Artificial Sequence
  Synthetic
agaagaacucccucgccuc

SEQ ID NO: 29355 - RNA, 20 nt, Artificial Sequence
  Synthetic
aagaagaacucccucgccuc

SEQ ID NO: 29356 - RNA, 21 nt, Artificial Sequence
  Synthetic
gaagaagaacucccucgccuc

SEQ ID NO: 29357 - RNA, 22 nt, Artificial Sequence
  Synthetic
agaagaagaacucccucgccuc

SEQ ID NO: 29358 - RNA, 23 nt, Artificial Sequence
  Synthetic
uagaagaagaacucccucgccuc

SEQ ID NO: 29359 - RNA, 24 nt, Artificial Sequence
  Synthetic
cuagaagaagaacucccucgccuc

SEQ ID NO: 29360 - RNA, 18 nt, Artificial Sequence
  Synthetic
  misc_feature (11)..(11): n is a, c, g, or u
guugggggacnuugccuc

SEQ ID NO: 29361 - RNA, 19 nt, Artificial Sequence
  Synthetic
  misc_feature (12)..(12): n is a, c, g, or u
aguugggggacnuugccuc

SEQ ID NO: 29362 - RNA, 20 nt, Artificial Sequence
  Synthetic
  misc_feature (13)..(13): n is a, c, g, or u
gaguugggggacnuugccuc

SEQ ID NO: 29363 - RNA, 21 nt, Artificial Sequence
  Synthetic
  misc_feature (14)..(14): n is a, c, g, or u
ggaguugggggacnuugccuc

SEQ ID NO: 29364 - RNA, 22 nt, Artificial Sequence
  Synthetic
  misc_feature (15)..(15): n is a, c, g, or u
gggaguugggggacnuugccuc

SEQ ID NO: 29365 - RNA, 23 nt, Artificial Sequence
  Synthetic
  misc_feature (16)..(16): n is a, c, g, or u
ugggaguugggggacnuugccuc

SEQ ID NO: 29366 - RNA, 24 nt, Artificial Sequence
  Synthetic
  misc_feature (17)..(17): n is a, c, g, or u
uugggaguugggggacnuugccuc

SEQ ID NO: 29367 - RNA, 18 nt, Artificial Sequence
  Synthetic
  misc_feature (11)..(11): n is a, c, g, or u
cccccaaccanacugcuc

SEQ ID NO: 29368 - RNA, 19 nt, Artificial Sequence
  Synthetic
  misc_feature (12)..(12): n is a, c, g, or u
acccccaaccanacugcuc

SEQ ID NO: 29369 - RNA, 20 nt, Artificial Sequence
  Synthetic
  misc_feature (13)..(13): n is a, c, g, or u
cacccccaaccanacugcuc

SEQ ID NO: 29370 - RNA, 21 nt, Artificial Sequence
  Synthetic
  misc_feature (14)..(14): n is a, c, g, or u
gcacccccaaccanacugcuc

SEQ ID NO: 29371 - RNA, 22 nt, Artificial Sequence
  Synthetic
  misc_feature (15)..(15): n is a, c, g, or u
ugcacccccaaccanacugcuc

SEQ ID NO: 29372 - RNA, 23 nt, Artificial Sequence
  Synthetic
  misc_feature (16)..(16): n is a, c, g, or u
uugcacccccaaccanacugcuc

SEQ ID NO: 29373 - RNA, 24 nt, Artificial Sequence
  Synthetic
  misc_feature (17)..(17): n is a, c, g, or u
auugcacccccaaccanacugcuc

SEQ ID NO: 29374 - RNA, 18 nt, Artificial Sequence
  Synthetic
ccugcaccacucuugcuc

SEQ ID NO: 29375 - RNA, 19 nt, Artificial Sequence
  Synthetic
accugcaccacucuugcuc

SEQ ID NO: 29376 - RNA, 20 nt, Artificial Sequence
  Synthetic
aaccugcaccacucuugcuc

SEQ ID NO: 29377 - RNA, 21 nt, Artificial Sequence
  Synthetic
aaaccugcaccacucuugcuc

SEQ ID NO: 29378 - RNA, 22 nt, Artificial Sequence
  Synthetic
aaaaccugcaccacucuugcuc

SEQ ID NO: 29379 - RNA, 23 nt, Artificial Sequence
  Synthetic
caaaaccugcaccacucuugcuc

SEQ ID NO: 29380 - RNA, 24 nt, Artificial Sequence
  Synthetic
gcaaaaccugcaccacucuugcuc

SEQ ID NO: 29381 - RNA, 18 nt, Artificial Sequence
  Synthetic
accuuuaccccguugcuc

SEQ ID NO: 29382 - RNA, 19 nt, Artificial Sequence
  Synthetic
aaccuuuaccccguugcuc

SEQ ID NO: 29383 - RNA, 20 nt, Artificial Sequence
  Synthetic
gaaccuuuaccccguugcuc

SEQ ID NO: 29384 - RNA, 21 nt, Artificial Sequence
  Synthetic
ugaaccuuuaccccguugcuc

SEQ ID NO: 29385 - RNA, 22 nt, Artificial Sequence
  Synthetic
  misc_feature (1)..(1): n is a, c, g, or u
nugaaccuuuaccccguugcuc

SEQ ID NO: 29386 - RNA, 23 nt, Artificial Sequence
  Synthetic
  misc_feature (2)..(2): n is a, c, g, or u
cnugaaccuuuaccccguugcuc

SEQ ID NO: 29387 - RNA, 24 nt, Artificial Sequence
  Synthetic
  misc_feature (3)..(3): n is a, c, g, or u
acnugaaccuuuaccccguugcuc

SEQ ID NO: 29388 - RNA, 18 nt, Artificial Sequence
  Synthetic
caugggagcaccucucuc

SEQ ID NO: 29389 - RNA, 19 nt, Artificial Sequence
  Synthetic
gcaugggagcaccucucuc

SEQ ID NO: 29390 - RNA, 20 nt, Artificial Sequence
  Synthetic
agcaugggagcaccucucuc

SEQ ID NO: 29391 - RNA, 21 nt, Artificial Sequence
  Synthetic
cagcaugggagcaccucucuc

SEQ ID NO: 29392 - RNA, 22 nt, Artificial Sequence
  Synthetic
acagcaugggagcaccucucuc

SEQ ID NO: 29393 - RNA, 23 nt, Artificial Sequence
  Synthetic
uacagcaugggagcaccucucuc

SEQ ID NO: 29394 - RNA, 24 nt, Artificial Sequence
  Synthetic
cuacagcaugggagcaccucucuc

SEQ ID NO: 29395 - RNA, 18 nt, Artificial Sequence
  Synthetic
cacaucaucaaucuucuc

SEQ ID NO: 29396 - RNA, 19 nt, Artificial Sequence
  Synthetic
ucacaucaucaaucuucuc

SEQ ID NO: 29397 - RNA, 20 nt, Artificial Sequence
  Synthetic
cucacaucaucaaucuucuc

SEQ ID NO: 29398 - RNA, 21 nt, Artificial Sequence
  Synthetic
ucucacaucaucaaucuucuc

SEQ ID NO: 29399 - RNA, 22 nt, Artificial Sequence
  Synthetic
cucucacaucaucaaucuucuc

SEQ ID NO: 29400 - RNA, 23 nt, Artificial Sequence
  Synthetic
ucucucacaucaucaaucuucuc

SEQ ID NO: 29401 - RNA, 24 nt, Artificial Sequence
  Synthetic
cucucucacaucaucaaucuucuc

SEQ ID NO: 29402 - RNA, 18 nt, Artificial Sequence
  Synthetic
acuuacaaggccuuucuc

SEQ ID NO: 29403 - RNA, 19 nt, Artificial Sequence
  Synthetic
aacuuacaaggccuuucuc

SEQ ID NO: 29404 - RNA, 20 nt, Artificial Sequence
  Synthetic
caacuuacaaggccuuucuc

SEQ ID NO: 29405 - RNA, 21 nt, Artificial Sequence
  Synthetic
ccaacuuacaaggccuuucuc

SEQ ID NO: 29406 - RNA, 22 nt, Artificial Sequence
  Synthetic
gccaacuuacaaggccuuucuc

SEQ ID NO: 29407 - RNA, 23 nt, Artificial Sequence
  Synthetic
cgccaacuuacaaggccuuucuc

SEQ ID NO: 29408 - RNA, 24 nt, Artificial Sequence
  Synthetic
ucgccaacuuacaaggccuuucuc

SEQ ID NO: 29409 - RNA, 18 nt, Artificial Sequence
  Synthetic
gcaggcuuuuguuuucuc

SEQ ID NO: 29410 - RNA, 19 nt, Artificial Sequence
  Synthetic
agcaggcuuuuguuuucuc

SEQ ID NO: 29411 - RNA, 20 nt, Artificial Sequence
  Synthetic
aagcaggcuuuuguuuucuc

SEQ ID NO: 29412 - RNA, 21 nt, Artificial Sequence
  Synthetic
uaagcaggcuuuuguuuucuc

SEQ ID NO: 29413 - RNA, 22 nt, Artificial Sequence
  Synthetic
cuaagcaggcuuuuguuuucuc

SEQ ID NO: 29414 - RNA, 23 nt, Artificial Sequence
  Synthetic
gcuaagcaggcuuuuguuuucuc

SEQ ID NO: 29415 - RNA, 24 nt, Artificial Sequence
  Synthetic
cgcuaagcaggcuuuuguuuucuc

SEQ ID NO: 29416 - RNA, 18 nt, Artificial Sequence
  Synthetic
uaaggacugggaggaguc

SEQ ID NO: 29417 - RNA, 19 nt, Artificial Sequence
  Synthetic
uuaaggacugggaggaguc

SEQ ID NO: 29418 - RNA, 20 nt, Artificial Sequence
  Synthetic
uuuaaggacugggaggaguc

SEQ ID NO: 29419 - RNA, 21 nt, Artificial Sequence
  Synthetic
auuuaaggacugggaggaguc

SEQ ID NO: 29420 - RNA, 22 nt, Artificial Sequence
  Synthetic
uauuuaaggacugggaggaguc

SEQ ID NO: 29421 - RNA, 23 nt, Artificial Sequence
  Synthetic
guauuuaaggacugggaggaguc

SEQ ID NO: 29422 - RNA, 24 nt, Artificial Sequence
  Synthetic
uguauuuaaggacugggaggaguc

SEQ ID NO: 29423 - RNA, 18 nt, Artificial Sequence
  Synthetic
  misc_feature (11)..(11): n is a, c, g, or u
gaucucaaucnccgcguc

SEQ ID NO: 29424 - RNA, 19 nt, Artificial Sequence
  Synthetic
  misc_feature (12)..(12): n is a, c, g, or u
agaucucaaucnccgcguc

SEQ ID NO: 29425 - RNA, 20 nt, Artificial Sequence
  Synthetic
  misc_feature (13)..(13): n is a, c, g, or u
aagaucucaaucnccgcguc

SEQ ID NO: 29426 - RNA, 21 nt, Artificial Sequence
  Synthetic
  misc_feature (14)..(14): n is a, c, g, or u
gaagaucucaaucnccgcguc

SEQ ID NO: 29427 - RNA, 22 nt, Artificial Sequence
  Synthetic
  misc_feature (15)..(15): n is a, c, g, or u
cgaagaucucaaucnccgcguc

SEQ ID NO: 29428 - RNA, 23 nt, Artificial Sequence
  Synthetic
  misc_feature (16)..(16): n is a, c, g, or u
acgaagaucucaaucnccgcguc

SEQ ID NO: 29429 - RNA, 24 nt, Artificial Sequence
  Synthetic
  misc_feature (17)..(17): n is a, c, g, or u
gacgaagaucucaaucnccgcguc

SEQ ID NO: 29430 - RNA, 18 nt, Artificial Sequence
  Synthetic
uuccaccaaucggagguc

SEQ ID NO: 29431 - RNA, 19 nt, Artificial Sequence
  Synthetic
cuuccaccaaucggagguc

SEQ ID NO: 29432 - RNA, 20 nt, Artificial Sequence
  Synthetic
gcuuccaccaaucggagguc

SEQ ID NO: 29433 - RNA, 21 nt, Artificial Sequence
  Synthetic
ugcuuccaccaaucggagguc

SEQ ID NO: 29434 - RNA, 22 nt, Artificial Sequence
  Synthetic
cugcuuccaccaaucggagguc

SEQ ID NO: 29435 - RNA, 23 nt, Artificial Sequence
  Synthetic
ccugcuuccaccaaucggagguc

SEQ ID NO: 29436 - RNA, 24 nt, Artificial Sequence
  Synthetic
uccugcuuccaccaaucggagguc

SEQ ID NO: 29437 - RNA, 18 nt, Artificial Sequence
  Synthetic
uggacuuucgccccgguc

SEQ ID NO: 29438 - RNA, 19 nt, Artificial Sequence
  Synthetic
uuggacuuucgccccgguc

SEQ ID NO: 29439 - RNA, 20 nt, Artificial Sequence
  Synthetic
cuuggacuuucgccccgguc

SEQ ID NO: 29440 - RNA, 21 nt, Artificial Sequence
  Synthetic
ucuuggacuuucgccccgguc

SEQ ID NO: 29441 - RNA, 22 nt, Artificial Sequence
  Synthetic
cucuuggacuuucgccccgguc

SEQ ID NO: 29442 - RNA, 23 nt, Artificial Sequence
  Synthetic
acucuuggacuuucgccccgguc

SEQ ID NO: 29443 - RNA, 24 nt, Artificial Sequence
  Synthetic
gacucuuggacuuucgccccgguc

SEQ ID NO: 29444 - RNA, 18 nt, Artificial Sequence
  Synthetic
  misc_feature (14)..(14): n is a, c, g, or u
uuucgcucgcagcngguc

SEQ ID NO: 29445 - RNA, 19 nt, Artificial Sequence
  Synthetic
  misc_feature (15)..(15): n is a, c, g, or u
guuucgcucgcagcngguc

SEQ ID NO: 29446 - RNA, 20 nt, Artificial Sequence
  Synthetic
  misc_feature (16)..(16): n is a, c, g, or u
uguuucgcucgcagcngguc

SEQ ID NO: 29447 - RNA, 21 nt, Artificial Sequence
  Synthetic
  misc_feature (17)..(17): n is a, c, g, or u
uuguuucgcucgcagcngguc

SEQ ID NO: 29448 - RNA, 22 nt, Artificial Sequence
  Synthetic
  misc_feature (18)..(18): n is a, c, g, or u
cuuguuucgcucgcagcngguc

SEQ ID NO: 29449 - RNA, 23 nt, Artificial Sequence
  Synthetic
  misc_feature (19)..(19): n is a, c, g, or u
gcuuguuucgcucgcagcngguc

SEQ ID NO: 29450 - RNA, 24 nt, Artificial Sequence
  Synthetic
  misc_feature (1)..(1): n is a, c, g, or u
  misc_feature (20)..(20): n is a, c, g, or u
ngcuuguuucgcucgcagcngguc

SEQ ID NO: 29451 - RNA, 18 nt, Artificial Sequence
  Synthetic
gacuucuucccgucuguc

SEQ ID NO: 29452 - RNA, 19 nt, Artificial Sequence
  Synthetic
ugacuucuucccgucuguc

SEQ ID NO: 29453 - RNA, 20 nt, Artificial Sequence
  Synthetic
cugacuucuucccgucuguc

SEQ ID NO: 29454 - RNA, 21 nt, Artificial Sequence
  Synthetic
ucugacuucuucccgucuguc

SEQ ID NO: 29455 - RNA, 22 nt, Artificial Sequence
  Synthetic
uucugacuucuucccgucuguc

SEQ ID NO: 29456 - RNA, 23 nt, Artificial Sequence
  Synthetic
cuucugacuucuucccgucuguc

SEQ ID NO: 29457 - RNA, 24 nt, Artificial Sequence
  Synthetic
ccuucugacuucuucccgucuguc

SEQ ID NO: 29458 - RNA, 18 nt, Artificial Sequence
  Synthetic
gcuaucguuggauguguc

SEQ ID NO: 29459 - RNA, 19 nt, Artificial Sequence
  Synthetic
ggcuaucguuggauguguc

SEQ ID NO: 29460 - RNA, 20 nt, Artificial Sequence
  Synthetic
uggcuaucguuggauguguc

SEQ ID NO: 29461 - RNA, 21 nt, Artificial Sequence
  Synthetic
cuggcuaucguuggauguguc

SEQ ID NO: 29462 - RNA, 22 nt, Artificial Sequence
  Synthetic
ccuggcuaucguuggauguguc

SEQ ID NO: 29463 - RNA, 23 nt, Artificial Sequence
  Synthetic
uccuggcuaucguuggauguguc

SEQ ID NO: 29464 - RNA, 24 nt, Artificial Sequence
  Synthetic
guccuggcuaucguuggauguguc

SEQ ID NO: 29465 - RNA, 18 nt, Artificial Sequence
  Synthetic
uugugggucaccauauuc

SEQ ID NO: 29466 - RNA, 19 nt, Artificial Sequence
  Synthetic
uuugugggucaccauauuc

SEQ ID NO: 29467 - RNA, 20 nt, Artificial Sequence
  Synthetic
uuuugugggucaccauauuc

SEQ ID NO: 29468 - RNA, 21 nt, Artificial Sequence
  Synthetic
auuuugugggucaccauauuc

SEQ ID NO: 29469 - RNA, 22 nt, Artificial Sequence
  Synthetic
cauuuugugggucaccauauuc

SEQ ID NO: 29470 - RNA, 23 nt, Artificial Sequence
  Synthetic
ucauuuugugggucaccauauuc

SEQ ID NO: 29471 - RNA, 24 nt, Artificial Sequence
  Synthetic
cucauuuugugggucaccauauuc

SEQ ID NO: 29472 - RNA, 18 nt, Artificial Sequence
  Synthetic
uucccaauguuaguauuc

SEQ ID NO: 29473 - RNA, 19 nt, Artificial Sequence
  Synthetic
cuucccaauguuaguauuc

SEQ ID NO: 29474 - RNA, 20 nt, Artificial Sequence
  Synthetic
gcuucccaauguuaguauuc

SEQ ID NO: 29475 - RNA, 21 nt, Artificial Sequence
  Synthetic
agcuucccaauguuaguauuc

SEQ ID NO: 29476 - RNA, 22 nt, Artificial Sequence
  Synthetic
cagcuucccaauguuaguauuc

SEQ ID NO: 29477 - RNA, 23 nt, Artificial Sequence
  Synthetic
ccagcuucccaauguuaguauuc

SEQ ID NO: 29478 - RNA, 24 nt, Artificial Sequence
  Synthetic
uccagcuucccaauguuaguauuc

SEQ ID NO: 29479 - RNA, 18 nt, Artificial Sequence
  Synthetic
cuauccuaucaacacuuc

SEQ ID NO: 29480 - RNA, 19 nt, Artificial Sequence
  Synthetic
ccuauccuaucaacacuuc

SEQ ID NO: 29481 - RNA, 20 nt, Artificial Sequence
  Synthetic
cccuauccuaucaacacuuc

SEQ ID NO: 29482 - RNA, 21 nt, Artificial Sequence
  Synthetic
ccccuauccuaucaacacuuc

SEQ ID NO: 29483 - RNA, 22 nt, Artificial Sequence
  Synthetic
gccccuauccuaucaacacuuc

SEQ ID NO: 29484 - RNA, 23 nt, Artificial Sequence
  Synthetic
ugccccuauccuaucaacacuuc

SEQ ID NO: 29485 - RNA, 24 nt, Artificial Sequence
  Synthetic
augccccuauccuaucaacacuuc

SEQ ID NO: 29486 - RNA, 18 nt, Artificial Sequence
  Synthetic
uaaagaauuuggagcuuc

SEQ ID NO: 29487 - RNA, 19 nt, Artificial Sequence
  Synthetic
auaaagaauuuggagcuuc

SEQ ID NO: 29488 - RNA, 20 nt, Artificial Sequence
  Synthetic
uauaaagaauuuggagcuuc

SEQ ID NO: 29489 - RNA, 21 nt, Artificial Sequence
  Synthetic
uuauaaagaauuuggagcuuc

SEQ ID NO: 29490 - RNA, 22 nt, Artificial Sequence
  Synthetic
cuuauaaagaauuuggagcuuc

SEQ ID NO: 29491 - RNA, 23 nt, Artificial Sequence
  Synthetic
ccuuauaaagaauuuggagcuuc

SEQ ID NO: 29492 - RNA, 24 nt, Artificial Sequence
  Synthetic
cccuuauaaagaauuuggagcuuc

SEQ ID NO: 29493 - RNA, 18 nt, Artificial Sequence
  Synthetic
cucacaucaucaaucuuc

SEQ ID NO: 29494 - RNA, 19 nt, Artificial Sequence
  Synthetic
ucucacaucaucaaucuuc

SEQ ID NO: 29495 - RNA, 20 nt, Artificial Sequence
  Synthetic
cucucacaucaucaaucuuc

SEQ ID NO: 29496 - RNA, 21 nt, Artificial Sequence
  Synthetic
ucucucacaucaucaaucuuc

SEQ ID NO: 29497 - RNA, 22 nt, Artificial Sequence
  Synthetic
cucucucacaucaucaaucuuc

SEQ ID NO: 29498 - RNA, 23 nt, Artificial Sequence
  Synthetic
ccucucucacaucaucaaucuuc

SEQ ID NO: 29499 - RNA, 24 nt, Artificial Sequence
  Synthetic
gccucucucacaucaucaaucuuc

SEQ ID NO: 29500 - RNA, 18 nt, Artificial Sequence
  Synthetic
ugcugguggcuccaguuc

SEQ ID NO: 29501 - RNA, 19 nt, Artificial Sequence
  Synthetic
cugcugguggcuccaguuc

SEQ ID NO: 29502 - RNA, 20 nt, Artificial Sequence
  Synthetic
ccugcugguggcuccaguuc

SEQ ID NO: 29503 - RNA, 21 nt, Artificial Sequence
  Synthetic
uccugcugguggcuccaguuc

SEQ ID NO: 29504 - RNA, 22 nt, Artificial Sequence
  Synthetic
uuccugcugguggcuccaguuc

SEQ ID NO: 29505 - RNA, 23 nt, Artificial Sequence
  Synthetic
uuuccugcugguggcuccaguuc

SEQ ID NO: 29506 - RNA, 24 nt, Artificial Sequence
  Synthetic
uuuuccugcugguggcuccaguuc

SEQ ID NO: 29507 - RNA, 18 nt, Artificial Sequence
  Synthetic
gcauaaauuggucuguuc

SEQ ID NO: 29508 - RNA, 19 nt, Artificial Sequence
  Synthetic
ggcauaaauuggucuguuc

SEQ ID NO: 29509 - RNA, 20 nt, Artificial Sequence
  Synthetic
aggcauaaauuggucuguuc

SEQ ID NO: 29510 - RNA, 21 nt, Artificial Sequence
  Synthetic
uaggcauaaauuggucuguuc

SEQ ID NO: 29511 - RNA, 22 nt, Artificial Sequence
  Synthetic
guaggcauaaauuggucuguuc

SEQ ID NO: 29512 - RNA, 23 nt, Artificial Sequence
  Synthetic
uguaggcauaaauuggucuguuc

SEQ ID NO: 29513 - RNA, 24 nt, Artificial Sequence
  Synthetic
cuguaggcauaaauuggucuguuc

SEQ ID NO: 29514 - RNA, 18 nt, Artificial Sequence
  Synthetic
  misc_feature (7)..(7): n is a, c, g, or u
caacucnguuguccuuuc

SEQ ID NO: 29515 - RNA, 19 nt, Artificial Sequence
  Synthetic
  misc_feature (8)..(8): n is a, c, g, or u
acaacucnguuguccuuuc

SEQ ID NO: 29516 - RNA, 20 nt, Artificial Sequence
  Synthetic
  misc_feature (9)..(9): n is a, c, g, or u
gacaacucnguuguccuuuc

SEQ ID NO: 29517 - RNA, 21 nt, Artificial Sequence
  Synthetic
  misc_feature (10)..(10): n is a, c, g, or u
ugacaacucnguuguccuuuc

SEQ ID NO: 29518 - RNA, 22 nt, Artificial Sequence
  Synthetic
  misc_feature (11)..(11): n is a, c, g, or u
cugacaacucnguuguccuuuc

SEQ ID NO: 29519 - RNA, 23 nt, Artificial Sequence
  Synthetic
  misc_feature (12)..(12): n is a, c, g, or u
acugacaacucnguuguccuuuc

SEQ ID NO: 29520 - RNA, 24 nt, Artificial Sequence
  Synthetic
  misc_feature (13)..(13): n is a, c, g, or u
cacugacaacucnguuguccuuuc

SEQ ID NO: 29521 - RNA, 18 nt, Artificial Sequence
  Synthetic
ccaucaucuugggcuuuc

SEQ ID NO: 29522 - RNA, 19 nt, Artificial Sequence
  Synthetic
cccaucaucuugggcuuuc

SEQ ID NO: 29523 - RNA, 20 nt, Artificial Sequence
  Synthetic
ucccaucaucuugggcuuuc

SEQ ID NO: 29524 - RNA, 21 nt, Artificial Sequence
  Synthetic
aucccaucaucuugggcuuuc

SEQ ID NO: 29525 - RNA, 22 nt, Artificial Sequence
  Synthetic
caucccaucaucuugggcuuuc

SEQ ID NO: 29526 - RNA, 23 nt, Artificial Sequence
  Synthetic
ccaucccaucaucuugggcuuuc

SEQ ID NO: 29527 - RNA, 24 nt, Artificial Sequence
  Synthetic
cccaucccaucaucuugggcuuuc

SEQ ID NO: 29528 - RNA, 18 nt, Artificial Sequence
  Synthetic
aaaucaaagauugcuuuc

SEQ ID NO: 29529 - RNA, 19 nt, Artificial Sequence
  Synthetic
aaaaucaaagauugcuuuc

SEQ ID NO: 29530 - RNA, 20 nt, Artificial Sequence
  Synthetic
uaaaaucaaagauugcuuuc

SEQ ID NO: 29531 - RNA, 21 nt, Artificial Sequence
  Synthetic
auaaaaucaaagauugcuuuc

SEQ ID NO: 29532 - RNA, 22 nt, Artificial Sequence
  Synthetic
cauaaaaucaaagauugcuuuc

SEQ ID NO: 29533 - RNA, 23 nt, Artificial Sequence
  Synthetic
gcauaaaaucaaagauugcuuuc

SEQ ID NO: 29534 - RNA, 24 nt, Artificial Sequence
  Synthetic
ugcauaaaaucaaagauugcuuuc

SEQ ID NO: 29535 - RNA, 18 nt, Artificial Sequence
  Synthetic
ggacuucucucaauuuuc

SEQ ID NO: 29536 - RNA, 19 nt, Artificial Sequence
  Synthetic
uggacuucucucaauuuuc

SEQ ID NO: 29537 - RNA, 20 nt, Artificial Sequence
  Synthetic
guggacuucucucaauuuuc

SEQ ID NO: 29538 - RNA, 21 nt, Artificial Sequence
  Synthetic
gguggacuucucucaauuuuc

SEQ ID NO: 29539 - RNA, 22 nt, Artificial Sequence
  Synthetic
ugguggacuucucucaauuuuc

SEQ ID NO: 29540 - RNA, 23 nt, Artificial Sequence
  Synthetic
gugguggacuucucucaauuuuc

SEQ ID NO: 29541 - RNA, 24 nt, Artificial Sequence
  Synthetic
cgugguggacuucucucaauuuuc

SEQ ID NO: 29542 - RNA, 18 nt, Artificial Sequence
  Synthetic
uggccaauggcaaacaag

SEQ ID NO: 29543 - RNA, 19 nt, Artificial Sequence
  Synthetic
uuggccaauggcaaacaag

SEQ ID NO: 29544 - RNA, 20 nt, Artificial Sequence
  Synthetic
auuggccaauggcaaacaag

SEQ ID NO: 29545 - RNA, 21 nt, Artificial Sequence
  Synthetic
aauuggccaauggcaaacaag

SEQ ID NO: 29546 - RNA, 22 nt, Artificial Sequence
  Synthetic
caauuggccaauggcaaacaag

SEQ ID NO: 29547 - RNA, 23 nt, Artificial Sequence
  Synthetic
acaauuggccaauggcaaacaag

SEQ ID NO: 29548 - RNA, 24 nt, Artificial Sequence
  Synthetic
gacaauuggccaauggcaaacaag

SEQ ID NO: 29549 - RNA, 18 nt, Artificial Sequence
  Synthetic
aggcagggccccuagaag

SEQ ID NO: 29550 - RNA, 19 nt, Artificial Sequence
  Synthetic
gaggcagggccccuagaag

SEQ ID NO: 29551 - RNA, 20 nt, Artificial Sequence
  Synthetic
cgaggcagggccccuagaag

SEQ ID NO: 29552 - RNA, 21 nt, Artificial Sequence
  Synthetic
acgaggcagggccccuagaag

SEQ ID NO: 29553 - RNA, 22 nt, Artificial Sequence
  Synthetic
aacgaggcagggccccuagaag

SEQ ID NO: 29554 - RNA, 23 nt, Artificial Sequence
  Synthetic
caacgaggcagggccccuagaag

SEQ ID NO: 29555 - RNA, 24 nt, Artificial Sequence
  Synthetic
acaacgaggcagggccccuagaag

SEQ ID NO: 29556 - RNA, 18 nt, Artificial Sequence
  Synthetic
ucaucaaucuucucgaag

SEQ ID NO: 29557 - RNA, 19 nt, Artificial Sequence
  Synthetic
aucaucaaucuucucgaag

SEQ ID NO: 29558 - RNA, 20 nt, Artificial Sequence
  Synthetic
caucaucaaucuucucgaag

SEQ ID NO: 29559 - RNA, 21 nt, Artificial Sequence
  Synthetic
acaucaucaaucuucucgaag

SEQ ID NO: 29560 - RNA, 22 nt, Artificial Sequence
  Synthetic
cacaucaucaaucuucucgaag

SEQ ID NO: 29561 - RNA, 23 nt, Artificial Sequence
  Synthetic
ucacaucaucaaucuucucgaag

SEQ ID NO: 29562 - RNA, 24 nt, Artificial Sequence
  Synthetic
cucacaucaucaaucuucucgaag

SEQ ID NO: 29563 - RNA, 18 nt, Artificial Sequence
  Synthetic
uuacauacuuuguggaag

SEQ ID NO: 29564 - RNA, 19 nt, Artificial Sequence
  Synthetic
uuuacauacuuuguggaag

SEQ ID NO: 29565 - RNA, 20 nt, Artificial Sequence
  Synthetic
auuuacauacuuuguggaag

SEQ ID NO: 29566 - RNA, 21 nt, Artificial Sequence
  Synthetic
uauuuacauacuuuguggaag

SEQ ID NO: 29567 - RNA, 22 nt, Artificial Sequence
  Synthetic
  misc_feature (1)..(1): n is a, c, g, or u
nuauuuacauacuuuguggaag

SEQ ID NO: 29568 - RNA, 23 nt, Artificial Sequence
  Synthetic
  misc_feature (2)..(2): n is a, c, g, or u
anuauuuacauacuuuguggaag

SEQ ID NO: 29569 - RNA, 24 nt, Artificial Sequence
  Synthetic
  misc_feature (3)..(3): n is a, c, g, or u
canuauuuacauacuuuguggaag

SEQ ID NO: 29570 - RNA, 18 nt, Artificial Sequence
  Synthetic
  misc_feature (1)..(1): n is a, c, g, or u
nugccuuacauuuggaag

SEQ ID NO: 29571 - RNA, 19 nt, Artificial Sequence
  Synthetic
  misc_feature (2)..(2): n is a, c, g, or u
cnugccuuacauuuggaag

SEQ ID NO: 29572 - RNA, 20 nt, Artificial Sequence
  Synthetic
  misc_feature (3)..(3): n is a, c, g, or u
ucnugccuuacauuuggaag

SEQ ID NO: 29573 - RNA, 21 nt, Artificial Sequence
  Synthetic
  misc_feature (4)..(4): n is a, c, g, or u
uucnugccuuacauuuggaag

SEQ ID NO: 29574 - RNA, 22 nt, Artificial Sequence
  Synthetic
  misc_feature (5)..(5): n is a, c, g, or u
uuucnugccuuacauuuggaag

SEQ ID NO: 29575 - RNA, 23 nt, Artificial Sequence
  Synthetic
  misc_feature (6)..(6): n is a, c, g, or u
auuucnugccuuacauuuggaag

SEQ ID NO: 29576 - RNA, 24 nt, Artificial Sequence
  Synthetic
  misc_feature (1)..(1): n is a, c, g, or u
  misc_feature (7)..(7): n is a, c, g, or u
nauuucnugccuuacauuuggaag

SEQ ID NO: 29577 - RNA, 18 nt, Artificial Sequence
  Synthetic
auuccuuggacucauaag

SEQ ID NO: 29578 - RNA, 19 nt, Artificial Sequence
  Synthetic
uauuccuuggacucauaag

SEQ ID NO: 29579 - RNA, 20 nt, Artificial Sequence
  Synthetic
guauuccuuggacucauaag

SEQ ID NO: 29580 - RNA, 21 nt, Artificial Sequence
  Synthetic
aguauuccuuggacucauaag

SEQ ID NO: 29581 - RNA, 22 nt, Artificial Sequence
  Synthetic
uaguauuccuuggacucauaag

SEQ ID NO: 29582 - RNA, 23 nt, Artificial Sequence
  Synthetic
uuaguauuccuuggacucauaag

SEQ ID NO: 29583 - RNA, 24 nt, Artificial Sequence
  Synthetic
guuaguauuccuuggacucauaag

SEQ ID NO: 29584 - RNA, 18 nt, Artificial Sequence
  Synthetic
gcaggaauucuauauaag

SEQ ID NO: 29585 - RNA, 19 nt, Artificial Sequence
  Synthetic
ggcaggaauucuauauaag

SEQ ID NO: 29586 - RNA, 20 nt, Artificial Sequence
  Synthetic
aggcaggaauucuauauaag

SEQ ID NO: 29587 - RNA, 21 nt, Artificial Sequence
  Synthetic
aaggcaggaauucuauauaag

SEQ ID NO: 29588 - RNA, 22 nt, Artificial Sequence
  Synthetic
gaaggcaggaauucuauauaag

SEQ ID NO: 29589 - RNA, 23 nt, Artificial Sequence
  Synthetic
ggaaggcaggaauucuauauaag

SEQ ID NO: 29590 - RNA, 24 nt, Artificial Sequence
  Synthetic
uggaaggcaggaauucuauauaag

SEQ ID NO: 29591 - RNA, 18 nt, Artificial Sequence
  Synthetic
gcauccauuugaacacag

SEQ ID NO: 29592 - RNA, 19 nt, Artificial Sequence
  Synthetic
ggcauccauuugaacacag

SEQ ID NO: 29593 - RNA, 20 nt, Artificial Sequence
  Synthetic
gggcauccauuugaacacag

SEQ ID NO: 29594 - RNA, 21 nt, Artificial Sequence
  Synthetic
ugggcauccauuugaacacag

SEQ ID NO: 29595 - RNA, 22 nt, Artificial Sequence
  Synthetic
gugggcauccauuugaacacag

SEQ ID NO: 29596 - RNA, 23 nt, Artificial Sequence
  Synthetic
ugugggcauccauuugaacacag

SEQ ID NO: 29597 - RNA, 24 nt, Artificial Sequence
  Synthetic
cugugggcauccauuugaacacag

SEQ ID NO: 29598 - RNA, 18 nt, Artificial Sequence
  Synthetic
ugggaacaagagcuacag

SEQ ID NO: 29599 - RNA, 19 nt, Artificial Sequence
  Synthetic
cugggaacaagagcuacag

SEQ ID NO: 29600 - RNA, 20 nt, Artificial Sequence
  Synthetic
ccugggaacaagagcuacag

SEQ ID NO: 29601 - RNA, 21 nt, Artificial Sequence
  Synthetic
uccugggaacaagagcuacag

SEQ ID NO: 29602 - RNA, 22 nt, Artificial Sequence
  Synthetic
uuccugggaacaagagcuacag

SEQ ID NO: 29603 - RNA, 23 nt, Artificial Sequence
  Synthetic
auuccugggaacaagagcuacag

SEQ ID NO: 29604 - RNA, 24 nt, Artificial Sequence
  Synthetic
uauuccugggaacaagagcuacag

SEQ ID NO: 29605 - RNA, 18 nt, Artificial Sequence
  Synthetic
aggaucuacaaccaccag

SEQ ID NO: 29606 - RNA, 19 nt, Artificial Sequence
  Synthetic
caggaucuacaaccaccag

SEQ ID NO: 29607 - RNA, 20 nt, Artificial Sequence
  Synthetic
ccaggaucuacaaccaccag

SEQ ID NO: 29608 - RNA, 21 nt, Artificial Sequence
  Synthetic
uccaggaucuacaaccaccag

SEQ ID NO: 29609 - RNA, 22 nt, Artificial Sequence
  Synthetic
uuccaggaucuacaaccaccag

SEQ ID NO: 29610 - RNA, 23 nt, Artificial Sequence
  Synthetic
cuuccaggaucuacaaccaccag

SEQ ID NO: 29611 - RNA, 24 nt, Artificial Sequence
  Synthetic
acuuccaggaucuacaaccaccag

SEQ ID NO: 29612 - RNA, 18 nt, Artificial Sequence
  Synthetic
uccugcugguggcuccag

SEQ ID NO: 29613 - RNA, 19 nt, Artificial Sequence
  Synthetic
uuccugcugguggcuccag

SEQ ID NO: 29614 - RNA, 20 nt, Artificial Sequence
  Synthetic
uuuccugcugguggcuccag

SEQ ID NO: 29615 - RNA, 21 nt, Artificial Sequence
  Synthetic
uuuuccugcugguggcuccag

SEQ ID NO: 29616 - RNA, 22 nt, Artificial Sequence
  Synthetic
auuuuccugcugguggcuccag

SEQ ID NO: 29617 - RNA, 23 nt, Artificial Sequence
  Synthetic
uauuuuccugcugguggcuccag

SEQ ID NO: 29618 - RNA, 24 nt, Artificial Sequence
  Synthetic
guauuuuccugcugguggcuccag

SEQ ID NO: 29619 - RNA, 18 nt, Artificial Sequence
  Synthetic
aacucccucgccucgcag

SEQ ID NO: 29620 - RNA, 19 nt, Artificial Sequence
  Synthetic
gaacucccucgccucgcag

SEQ ID NO: 29621 - RNA, 20 nt, Artificial Sequence
  Synthetic
agaacucccucgccucgcag

SEQ ID NO: 29622 - RNA, 21 nt, Artificial Sequence
  Synthetic
aagaacucccucgccucgcag

SEQ ID NO: 29623 - RNA, 22 nt, Artificial Sequence
  Synthetic
gaagaacucccucgccucgcag

SEQ ID NO: 29624 - RNA, 23 nt, Artificial Sequence
  Synthetic
agaagaacucccucgccucgcag

SEQ ID NO: 29625 - RNA, 24 nt, Artificial Sequence
  Synthetic
aagaagaacucccucgccucgcag

SEQ ID NO: 29626 - RNA, 18 nt, Artificial Sequence
  Synthetic
cauccacaggccaugcag

SEQ ID NO: 29627 - RNA, 19 nt, Artificial Sequence
  Synthetic
acauccacaggccaugcag

SEQ ID NO: 29628 - RNA, 20 nt, Artificial Sequence
  Synthetic
cacauccacaggccaugcag

SEQ ID NO: 29629 - RNA, 21 nt, Artificial Sequence
  Synthetic
acacauccacaggccaugcag

SEQ ID NO: 29630 - RNA, 22 nt, Artificial Sequence
  Synthetic
cacacauccacaggccaugcag

SEQ ID NO: 29631 - RNA, 23 nt, Artificial Sequence
  Synthetic
acacacauccacaggccaugcag

SEQ ID NO: 29632 - RNA, 24 nt, Artificial Sequence
  Synthetic
gacacacauccacaggccaugcag

SEQ ID NO: 29633 - RNA, 18 nt, Artificial Sequence
  Synthetic
auuuagaggauccugcag

SEQ ID NO: 29634 - RNA, 19 nt, Artificial Sequence
  Synthetic
aauuuagaggauccugcag

SEQ ID NO: 29635 - RNA, 20 nt, Artificial Sequence
  Synthetic
uaauuuagaggauccugcag

SEQ ID NO: 29636 - RNA, 21 nt, Artificial Sequence
  Synthetic
auaauuuagaggauccugcag

SEQ ID NO: 29637 - RNA, 22 nt, Artificial Sequence
  Synthetic
aauaauuuagaggauccugcag

SEQ ID NO: 29638 - RNA, 23 nt, Artificial Sequence
  Synthetic
caauaauuuagaggauccugcag

SEQ ID NO: 29639 - RNA, 24 nt, Artificial Sequence
  Synthetic
gcaauaauuuagaggauccugcag

SEQ ID NO: 29640 - RNA, 18 nt, Artificial Sequence
  Synthetic
  misc_feature (7)..(7): n is a, c, g, or u
caaccanacugcucucag

SEQ ID NO: 29641 - RNA, 19 nt, Artificial Sequence
  Synthetic
  misc_feature (8)..(8): n is a, c, g, or u
ccaaccanacugcucucag

SEQ ID NO: 29642 - RNA, 20 nt, Artificial Sequence
  Synthetic
  misc_feature (9)..(9): n is a, c, g, or u
cccaaccanacugcucucag

SEQ ID NO: 29643 - RNA, 21 nt, Artificial Sequence
  Synthetic
  misc_feature (10)..(10): n is a, c, g, or u
ccccaaccanacugcucucag

SEQ ID NO: 29644 - RNA, 22 nt, Artificial Sequence
  Synthetic
  misc_feature (11)..(11): n is a, c, g, or u
cccccaaccanacugcucucag

SEQ ID NO: 29645 - RNA, 23 nt, Artificial Sequence
  Synthetic
  misc_feature (12)..(12): n is a, c, g, or u
acccccaaccanacugcucucag

SEQ ID NO: 29646 - RNA, 24 nt, Artificial Sequence
  Synthetic
  misc_feature (13)..(13): n is a, c, g, or u
cacccccaaccanacugcucucag

SEQ ID NO: 29647 - RNA, 18 nt, Artificial Sequence
  Synthetic
ccaccaaucggaggucag

SEQ ID NO: 29648 - RNA, 19 nt, Artificial Sequence
  Synthetic
uccaccaaucggaggucag

SEQ ID NO: 29649 - RNA, 20 nt, Artificial Sequence
  Synthetic
uuccaccaaucggaggucag

SEQ ID NO: 29650 - RNA, 21 nt, Artificial Sequence
  Synthetic
cuuccaccaaucggaggucag

SEQ ID NO: 29651 - RNA, 22 nt, Artificial Sequence
  Synthetic
gcuuccaccaaucggaggucag

SEQ ID NO: 29652 - RNA, 23 nt, Artificial Sequence
  Synthetic
ugcuuccaccaaucggaggucag

SEQ ID NO: 29653 - RNA, 24 nt, Artificial Sequence
  Synthetic
cugcuuccaccaaucggaggucag

SEQ ID NO: 29654 - RNA, 18 nt, Artificial Sequence
  Synthetic
guuggauccacuauucag

SEQ ID NO: 29655 - RNA, 19 nt, Artificial Sequence
  Synthetic
aguuggauccacuauucag

SEQ ID NO: 29656 - RNA, 20 nt, Artificial Sequence
  Synthetic
caguuggauccacuauucag

SEQ ID NO: 29657 - RNA, 21 nt, Artificial Sequence
  Synthetic
ccaguuggauccacuauucag

SEQ ID NO: 29658 - RNA, 22 nt, Artificial Sequence
  Synthetic
accaguuggauccacuauucag

SEQ ID NO: 29659 - RNA, 23 nt, Artificial Sequence
  Synthetic
caccaguuggauccacuauucag

SEQ ID NO: 29660 - RNA, 24 nt, Artificial Sequence
  Synthetic
ccaccaguuggauccacuauucag

SEQ ID NO: 29661 - RNA, 18 nt, Artificial Sequence
  Synthetic
cacuguuggauccgagag

SEQ ID NO: 29662 - RNA, 19 nt, Artificial Sequence
  Synthetic
gcacuguuggauccgagag

SEQ ID NO: 29663 - RNA, 20 nt, Artificial Sequence
  Synthetic
agcacuguuggauccgagag

SEQ ID NO: 29664 - RNA, 21 nt, Artificial Sequence
  Synthetic
aagcacuguuggauccgagag

SEQ ID NO: 29665 - RNA, 22 nt, Artificial Sequence
  Synthetic
caagcacuguuggauccgagag

SEQ ID NO: 29666 - RNA, 23 nt, Artificial Sequence
  Synthetic
ccaagcacuguuggauccgagag

SEQ ID NO: 29667 - RNA, 24 nt, Artificial Sequence
  Synthetic
accaagcacuguuggauccgagag

SEQ ID NO: 29668 - RNA, 18 nt, Artificial Sequence
  Synthetic
  misc_feature (14)..(14): n is a, c, g, or u
ccucacaauaccanagag

SEQ ID NO: 29669 - RNA, 19 nt, Artificial Sequence
  Synthetic
  misc_feature (15)..(15): n is a, c, g, or u
uccucacaauaccanagag

SEQ ID NO: 29670 - RNA, 20 nt, Artificial Sequence
  Synthetic
  misc_feature (16)..(16): n is a, c, g, or u
auccucacaauaccanagag

SEQ ID NO: 29671 - RNA, 21 nt, Artificial Sequence
  Synthetic
  misc_feature (17)..(17): n is a, c, g, or u
aauccucacaauaccanagag

SEQ ID NO: 29672 - RNA, 22 nt, Artificial Sequence
  Synthetic
  misc_feature (18)..(18): n is a, c, g, or u
aaauccucacaauaccanagag

SEQ ID NO: 29673 - RNA, 23 nt, Artificial Sequence
  Synthetic
  misc_feature (19)..(19): n is a, c, g, or u
aaaauccucacaauaccanagag

SEQ ID NO: 29674 - RNA, 24 nt, Artificial Sequence
  Synthetic
  misc_feature (20)..(20): n is a, c, g, or u
aaaaauccucacaauaccanagag

SEQ ID NO: 29675 - RNA, 18 nt, Artificial Sequence
  Synthetic
cuguuguuagacaacgag

SEQ ID NO: 29676 - RNA, 19 nt, Artificial Sequence
  Synthetic
acuguuguuagacaacgag

SEQ ID NO: 29677 - RNA, 20 nt, Artificial Sequence
  Synthetic
uacuguuguuagacaacgag

SEQ ID NO: 29678 - RNA, 21 nt, Artificial Sequence
  Synthetic
cuacuguuguuagacaacgag

SEQ ID NO: 29679 - RNA, 22 nt, Artificial Sequence
  Synthetic
acuacuguuguuagacaacgag

SEQ ID NO: 29680 - RNA, 23 nt, Artificial Sequence
  Synthetic
gacuacuguuguuagacaacgag

SEQ ID NO: 29681 - RNA, 24 nt, Artificial Sequence
  Synthetic
agacuacuguuguuagacaacgag

SEQ ID NO: 29682 - RNA, 18 nt, Artificial Sequence
  Synthetic
agcacuguuggauccgag

SEQ ID NO: 29683 - RNA, 19 nt, Artificial Sequence
  Synthetic
aagcacuguuggauccgag

SEQ ID NO: 29684 - RNA, 20 nt, Artificial Sequence
  Synthetic
caagcacuguuggauccgag

SEQ ID NO: 29685 - RNA, 21 nt, Artificial Sequence
  Synthetic
ccaagcacuguuggauccgag

SEQ ID NO: 29686 - RNA, 22 nt, Artificial Sequence
  Synthetic
accaagcacuguuggauccgag

SEQ ID NO: 29687 - RNA, 23 nt, Artificial Sequence
  Synthetic
caccaagcacuguuggauccgag

SEQ ID NO: 29688 - RNA, 24 nt, Artificial Sequence
  Synthetic
ccaccaagcacuguuggauccgag

SEQ ID NO: 29689 - RNA, 18 nt, Artificial Sequence
  Synthetic
accucucucaacggcgag

SEQ ID NO: 29690 - RNA, 19 nt, Artificial Sequence
  Synthetic
caccucucucaacggcgag

SEQ ID NO: 29691 - RNA, 20 nt, Artificial Sequence
  Synthetic
gcaccucucucaacggcgag

SEQ ID NO: 29692 - RNA, 21 nt, Artificial Sequence
  Synthetic
agcaccucucucaacggcgag

SEQ ID NO: 29693 - RNA, 22 nt, Artificial Sequence
  Synthetic
gagcaccucucucaacggcgag

SEQ ID NO: 29694 - RNA, 23 nt, Artificial Sequence
  Synthetic
ggagcaccucucucaacggcgag

SEQ ID NO: 29695 - RNA, 24 nt, Artificial Sequence
  Synthetic
gggagcaccucucucaacggcgag

SEQ ID NO: 29696 - RNA, 18 nt, Artificial Sequence
  Synthetic
gaggagucgggggaggag

SEQ ID NO: 29697 - RNA, 19 nt, Artificial Sequence
  Synthetic
ggaggagucgggggaggag

SEQ ID NO: 29698 - RNA, 20 nt, Artificial Sequence
  Synthetic
gggaggagucgggggaggag

SEQ ID NO: 29699 - RNA, 21 nt, Artificial Sequence
  Synthetic
ugggaggagucgggggaggag

SEQ ID NO: 29700 - RNA, 22 nt, Artificial Sequence
  Synthetic
cugggaggagucgggggaggag

SEQ ID NO: 29701 - RNA, 23 nt, Artificial Sequence
  Synthetic
acugggaggagucgggggaggag

SEQ ID NO: 29702 - RNA, 24 nt, Artificial Sequence
  Synthetic
gacugggaggagucgggggaggag

SEQ ID NO: 29703 - RNA, 18 nt, Artificial Sequence
  Synthetic
uuuaaggacugggaggag

SEQ ID NO: 29704 - RNA, 19 nt, Artificial Sequence
  Synthetic
auuuaaggacugggaggag

SEQ ID NO: 29705 - RNA, 20 nt, Artificial Sequence
  Synthetic
uauuuaaggacugggaggag

SEQ ID NO: 29706 - RNA, 21 nt, Artificial Sequence
  Synthetic
guauuuaaggacugggaggag

SEQ ID NO: 29707 - RNA, 22 nt, Artificial Sequence
  Synthetic
uguauuuaaggacugggaggag

SEQ ID NO: 29708 - RNA, 23 nt, Artificial Sequence
  Synthetic
guguauuuaaggacugggaggag

SEQ ID NO: 29709 - RNA, 24 nt, Artificial Sequence
  Synthetic
uguguauuuaaggacugggaggag

SEQ ID NO: 29710 - RNA, 18 nt, Artificial Sequence
  Synthetic
uggcaaacaagguaggag

SEQ ID NO: 29711 - RNA, 19 nt, Artificial Sequence
  Synthetic
auggcaaacaagguaggag

SEQ ID NO: 29712 - RNA, 20 nt, Artificial Sequence
  Synthetic
aauggcaaacaagguaggag

SEQ ID NO: 29713 - RNA, 21 nt, Artificial Sequence
  Synthetic
caauggcaaacaagguaggag

SEQ ID NO: 29714 - RNA, 22 nt, Artificial Sequence
  Synthetic
ccaauggcaaacaagguaggag

SEQ ID NO: 29715 - RNA, 23 nt, Artificial Sequence
  Synthetic
gccaauggcaaacaagguaggag

SEQ ID NO: 29716 - RNA, 24 nt, Artificial Sequence
  Synthetic
ggccaauggcaaacaagguaggag

SEQ ID NO: 29717 - RNA, 18 nt, Artificial Sequence
  Synthetic
ugcuuccaccaaucggag

SEQ ID NO: 29718 - RNA, 19 nt, Artificial Sequence
  Synthetic
cugcuuccaccaaucggag

SEQ ID NO: 29719 - RNA, 20 nt, Artificial Sequence
  Synthetic
ccugcuuccaccaaucggag

SEQ ID NO: 29720 - RNA, 21 nt, Artificial Sequence
  Synthetic
uccugcuuccaccaaucggag

SEQ ID NO: 29721 - RNA, 22 nt, Artificial Sequence
  Synthetic
cuccugcuuccaccaaucggag

SEQ ID NO: 29722 - RNA, 23 nt, Artificial Sequence
  Synthetic
ccuccugcuuccaccaaucggag

SEQ ID NO: 29723 - RNA, 24 nt, Artificial Sequence
  Synthetic
accuccugcuuccaccaaucggag

SEQ ID NO: 29724 - RNA, 18 nt, Artificial Sequence
  Synthetic
  misc_feature (10)..(10): n is a, c, g, or u
ggguuauaunauugggag

SEQ ID NO: 29725 - RNA, 19 nt, Artificial Sequence
  Synthetic
  misc_feature (11)..(11): n is a, c, g, or u
uggguuauaunauugggag

SEQ ID NO: 29726 - RNA, 20 nt, Artificial Sequence
  Synthetic
  misc_feature (12)..(12): n is a, c, g, or u
auggguuauaunauugggag

SEQ ID NO: 29727 - RNA, 21 nt, Artificial Sequence
  Synthetic
  misc_feature (13)..(13): n is a, c, g, or u
uauggguuauaunauugggag

SEQ ID NO: 29728 - RNA, 22 nt, Artificial Sequence
  Synthetic
  misc_feature (14)..(14): n is a, c, g, or u
uuauggguuauaunauugggag

SEQ ID NO: 29729 - RNA, 23 nt, Artificial Sequence
  Synthetic
  misc_feature (15)..(15): n is a, c, g, or u
uuuauggguuauaunauugggag

SEQ ID NO: 29730 - RNA, 24 nt, Artificial Sequence
  Synthetic
  misc_feature (16)..(16): n is a, c, g, or u
cuuuauggguuauaunauugggag

SEQ ID NO: 29731 - RNA, 18 nt, Artificial Sequence
  Synthetic
auuuggugucuuuuggag

SEQ ID NO: 29732 - RNA, 19 nt, Artificial Sequence
  Synthetic
uauuuggugucuuuuggag

SEQ ID NO: 29733 - RNA, 20 nt, Artificial Sequence
  Synthetic
guauuuggugucuuuuggag

SEQ ID NO: 29734 - RNA, 21 nt, Artificial Sequence
  Synthetic
aguauuuggugucuuuuggag

SEQ ID NO: 29735 - RNA, 22 nt, Artificial Sequence
  Synthetic
gaguauuuggugucuuuuggag

SEQ ID NO: 29736 - RNA, 23 nt, Artificial Sequence
  Synthetic
ugaguauuuggugucuuuuggag

SEQ ID NO: 29737 - RNA, 24 nt, Artificial Sequence
  Synthetic
uugaguauuuggugucuuuuggag

SEQ ID NO: 29738 - RNA, 18 nt, Artificial Sequence
  Synthetic
gucgggggaggaguugag

SEQ ID NO: 29739 - RNA, 19 nt, Artificial Sequence
  Synthetic
agucgggggaggaguugag

SEQ ID NO: 29740 - RNA, 20 nt, Artificial Sequence
  Synthetic
gagucgggggaggaguugag

SEQ ID NO: 29741 - RNA, 21 nt, Artificial Sequence
  Synthetic
ggagucgggggaggaguugag

SEQ ID NO: 29742 - RNA, 22 nt, Artificial Sequence
  Synthetic
aggagucgggggaggaguugag

SEQ ID NO: 29743 - RNA, 23 nt, Artificial Sequence
  Synthetic
gaggagucgggggaggaguugag

SEQ ID NO: 29744 - RNA, 24 nt, Artificial Sequence
  Synthetic
ggaggagucgggggaggaguugag

SEQ ID NO: 29745 - RNA, 18 nt, Artificial Sequence
  Synthetic
acgaggcagggccccuag

SEQ ID NO: 29746 - RNA, 19 nt, Artificial Sequence
  Synthetic
aacgaggcagggccccuag

SEQ ID NO: 29747 - RNA, 20 nt, Artificial Sequence
  Synthetic
caacgaggcagggccccuag

SEQ ID NO: 29748 - RNA, 21 nt, Artificial Sequence
  Synthetic
acaacgaggcagggccccuag

SEQ ID NO: 29749 - RNA, 22 nt, Artificial Sequence
  Synthetic
gacaacgaggcagggccccuag

SEQ ID NO: 29750 - RNA, 23 nt, Artificial Sequence
  Synthetic
agacaacgaggcagggccccuag

SEQ ID NO: 29751 - RNA, 24 nt, Artificial Sequence
  Synthetic
uagacaacgaggcagggccccuag

SEQ ID NO: 29752 - RNA, 18 nt, Artificial Sequence
  Synthetic
ccccguugcucggcaacg

SEQ ID NO: 29753 - RNA, 19 nt, Artificial Sequence
  Synthetic
accccguugcucggcaacg

SEQ ID NO: 29754 - RNA, 20 nt, Artificial Sequence
  Synthetic
uaccccguugcucggcaacg

SEQ ID NO: 29755 - RNA, 18 nt, Artificial Sequence
  Synthetic
ggagcaccucucucaacg

SEQ ID NO: 29756 - RNA, 19 nt, Artificial Sequence
  Synthetic
gggagcaccucucucaacg

SEQ ID NO: 29757 - RNA, 20 nt, Artificial Sequence
  Synthetic
ugggagcaccucucucaacg

SEQ ID NO: 29758 - RNA, 18 nt, Artificial Sequence
  Synthetic
  misc_feature (3)..(3): n is a, c, g, or u
uanaaaugaaaggagacg

SEQ ID NO: 29759 - RNA, 19 nt, Artificial Sequence
  Synthetic
  misc_feature (4)..(4): n is a, c, g, or u
cuanaaaugaaaggagacg

SEQ ID NO: 29760 - RNA, 20 nt, Artificial Sequence
  Synthetic
  misc_feature (5)..(5): n is a, c, g, or u
acuanaaaugaaaggagacg

SEQ ID NO: 29761 - RNA, 21 nt, Artificial Sequence
  Synthetic
  misc_feature (6)..(6): n is a, c, g, or u
cacuanaaaugaaaggagacg

SEQ ID NO: 29762 - RNA, 22 nt, Artificial Sequence
  Synthetic
  misc_feature (7)..(7): n is a, c, g, or u
ucacuanaaaugaaaggagacg

SEQ ID NO: 29763 - RNA, 23 nt, Artificial Sequence
  Synthetic
  misc_feature (8)..(8): n is a, c, g, or u
cucacuanaaaugaaaggagacg

SEQ ID NO: 29764 - RNA, 24 nt, Artificial Sequence
  Synthetic
  misc_feature (9)..(9): n is a, c, g, or u
acucacuanaaaugaaaggagacg

SEQ ID NO: 29765 - RNA, 18 nt, Artificial Sequence
  Synthetic
uguaugccuguauuaccg

SEQ ID NO: 29766 - RNA, 19 nt, Artificial Sequence
  Synthetic
uuguaugccuguauuaccg

SEQ ID NO: 29767 - RNA, 20 nt, Artificial Sequence
  Synthetic
cuuguaugccuguauuaccg

SEQ ID NO: 29768 - RNA, 21 nt, Artificial Sequence
  Synthetic
ccuuguaugccuguauuaccg

SEQ ID NO: 29769 - RNA, 22 nt, Artificial Sequence
  Synthetic
cccuuguaugccuguauuaccg

SEQ ID NO: 29770 - RNA, 23 nt, Artificial Sequence
  Synthetic
gcccuuguaugccuguauuaccg

SEQ ID NO: 29771 - RNA, 24 nt, Artificial Sequence
  Synthetic
ugcccuuguaugccuguauuaccg

SEQ ID NO: 29772 - RNA, 18 nt, Artificial Sequence
  Synthetic
ucuuggacuuucgccccg

SEQ ID NO: 29773 - RNA, 19 nt, Artificial Sequence
  Synthetic
cucuuggacuuucgccccg

SEQ ID NO: 29774 - RNA, 20 nt, Artificial Sequence
  Synthetic
acucuuggacuuucgccccg

SEQ ID NO: 29775 - RNA, 21 nt, Artificial Sequence
  Synthetic
gacucuuggacuuucgccccg

SEQ ID NO: 29776 - RNA, 22 nt, Artificial Sequence
  Synthetic
ggacucuuggacuuucgccccg

SEQ ID NO: 29777 - RNA, 23 nt, Artificial Sequence
  Synthetic
aggacucuuggacuuucgccccg

SEQ ID NO: 29778 - RNA, 24 nt, Artificial Sequence
  Synthetic
gaggacucuuggacuuucgccccg

SEQ ID NO: 29779 - RNA, 18 nt, Artificial Sequence
  Synthetic
caaauuccagcagucccg

SEQ ID NO: 29780 - RNA, 19 nt, Artificial Sequence
  Synthetic
gcaaauuccagcagucccg

SEQ ID NO: 29781 - RNA, 20 nt, Artificial Sequence
  Synthetic
agcaaauuccagcagucccg

SEQ ID NO: 29782 - RNA, 21 nt, Artificial Sequence
  Synthetic
gagcaaauuccagcagucccg

SEQ ID NO: 29783 - RNA, 22 nt, Artificial Sequence
  Synthetic
agagcaaauuccagcagucccg

SEQ ID NO: 29784 - RNA, 23 nt, Artificial Sequence
  Synthetic
cagagcaaauuccagcagucccg

SEQ ID NO: 29785 - RNA, 24 nt, Artificial Sequence
  Synthetic
ucagagcaaauuccagcagucccg

SEQ ID NO: 29786 - RNA, 18 nt, Artificial Sequence
  Synthetic
  misc_feature (10)..(11): n is a, c, g, or u
ucuccgccunncguuccg

SEQ ID NO: 29787 - RNA, 19 nt, Artificial Sequence
  Synthetic
  misc_feature (11)..(12): n is a, c, g, or u
uucuccgccunncguuccg

SEQ ID NO: 29788 - RNA, 20 nt, Artificial Sequence
  Synthetic
  misc_feature (12)..(13): n is a, c, g, or u
cuucuccgccunncguuccg

SEQ ID NO: 29789 - RNA, 21 nt, Artificial Sequence
  Synthetic
  misc_feature (1)..(1): n is a, c, g, or u
  misc_feature (13)..(14): n is a, c, g, or u
ncuucuccgccunncguuccg

SEQ ID NO: 29790 - RNA, 22 nt, Artificial Sequence
  Synthetic
  misc_feature (2)..(2): n is a, c, g, or u
  misc_feature (14)..(15): n is a, c, g, or u
cncuucuccgccunncguuccg

SEQ ID NO: 29791 - RNA, 23 nt, Artificial Sequence
  Synthetic
  misc_feature (3)..(3): n is a, c, g, or u
  misc_feature (15)..(16): n is a, c, g, or u
ccncuucuccgccunncguuccg

SEQ ID NO: 29792 - RNA, 24 nt, Artificial Sequence
  Synthetic
  misc_feature (4)..(4): n is a, c, g, or u
  misc_feature (16)..(17): n is a, c, g, or u
cccncuucuccgccunncguuccg

SEQ ID NO: 29793 - RNA, 18 nt, Artificial Sequence
  Synthetic
gcaccucucucaacggcg

SEQ ID NO: 29794 - RNA, 19 nt, Artificial Sequence
  Synthetic
agcaccucucucaacggcg

SEQ ID NO: 29795 - RNA, 20 nt, Artificial Sequence
  Synthetic
gagcaccucucucaacggcg

SEQ ID NO: 29796 - RNA, 18 nt, Artificial Sequence
  Synthetic
acuggcuggggcuuggcg

SEQ ID NO: 29797 - RNA, 19 nt, Artificial Sequence
  Synthetic
cacuggcuggggcuuggcg

SEQ ID NO: 29798 - RNA, 20 nt, Artificial Sequence
  Synthetic
ccacuggcuggggcuuggcg

SEQ ID NO: 29799 - RNA, 21 nt, Artificial Sequence
  Synthetic
cccacuggcuggggcuuggcg

SEQ ID NO: 29800 - RNA, 22 nt, Artificial Sequence
  Synthetic
ccccacuggcuggggcuuggcg

SEQ ID NO: 29801 - RNA, 23 nt, Artificial Sequence
  Synthetic
cccccacuggcuggggcuuggcg

SEQ ID NO: 29802 - RNA, 24 nt, Artificial Sequence
  Synthetic
acccccacuggcuggggcuuggcg

SEQ ID NO: 29803 - RNA, 18 nt, Artificial Sequence
  Synthetic
uggccaucagcgcaugcg

SEQ ID NO: 29804 - RNA, 19 nt, Artificial Sequence
  Synthetic
uuggccaucagcgcaugcg

SEQ ID NO: 29805 - RNA, 20 nt, Artificial Sequence
  Synthetic
auuggccaucagcgcaugcg

SEQ ID NO: 29806 - RNA, 21 nt, Artificial Sequence
  Synthetic
gauuggccaucagcgcaugcg

SEQ ID NO: 29807 - RNA, 22 nt, Artificial Sequence
  Synthetic
cgauuggccaucagcgcaugcg

SEQ ID NO: 29808 - RNA, 23 nt, Artificial Sequence
  Synthetic
gcgauuggccaucagcgcaugcg

SEQ ID NO: 29809 - RNA, 24 nt, Artificial Sequence
  Synthetic
ggcgauuggccaucagcgcaugcg

SEQ ID NO: 29810 - RNA, 18 nt, Artificial Sequence
  Synthetic
ucggcgcugaauccugcg

SEQ ID NO: 29811 - RNA, 19 nt, Artificial Sequence
  Synthetic
gucggcgcugaauccugcg

SEQ ID NO: 29812 - RNA, 20 nt, Artificial Sequence
  Synthetic
cgucggcgcugaauccugcg

SEQ ID NO: 29813 - RNA, 21 nt, Artificial Sequence
  Synthetic
ccgucggcgcugaauccugcg

SEQ ID NO: 29814 - RNA, 22 nt, Artificial Sequence
  Synthetic
cccgucggcgcugaauccugcg

SEQ ID NO: 29815 - RNA, 23 nt, Artificial Sequence
  Synthetic
ucccgucggcgcugaauccugcg

SEQ ID NO: 29816 - RNA, 24 nt, Artificial Sequence
  Synthetic
gucccgucggcgcugaauccugcg

SEQ ID NO: 29817 - RNA, 18 nt, Artificial Sequence
  Synthetic
ugccaacuggauccugcg

SEQ ID NO: 29818 - RNA, 19 nt, Artificial Sequence
  Synthetic
cugccaacuggauccugcg

SEQ ID NO: 29819 - RNA, 20 nt, Artificial Sequence
  Synthetic
gcugccaacuggauccugcg

SEQ ID NO: 29820 - RNA, 21 nt, Artificial Sequence
  Synthetic
ugcugccaacuggauccugcg

SEQ ID NO: 29821 - RNA, 22 nt, Artificial Sequence
  Synthetic
gugcugccaacuggauccugcg

SEQ ID NO: 29822 - RNA, 23 nt, Artificial Sequence
  Synthetic
ugugcugccaacuggauccugcg

SEQ ID NO: 29823 - RNA, 24 nt, Artificial Sequence
  Synthetic
  misc_feature (1)..(1): n is a, c, g, or u
nugugcugccaacuggauccugcg

SEQ ID NO: 29824 - RNA, 18 nt, Artificial Sequence
  Synthetic
aauuuguucaguggugcg

SEQ ID NO: 29825 - RNA, 19 nt, Artificial Sequence
  Synthetic
caauuuguucaguggugcg

SEQ ID NO: 29826 - RNA, 20 nt, Artificial Sequence
  Synthetic
gcaauuuguucaguggugcg

SEQ ID NO: 29827 - RNA, 21 nt, Artificial Sequence
  Synthetic
ugcaauuuguucaguggugcg

SEQ ID NO: 29828 - RNA, 22 nt, Artificial Sequence
  Synthetic
gugcaauuuguucaguggugcg

SEQ ID NO: 29829 - RNA, 23 nt, Artificial Sequence
  Synthetic
agugcaauuuguucaguggugcg

SEQ ID NO: 29830 - RNA, 24 nt, Artificial Sequence
  Synthetic
uagugcaauuuguucaguggugcg

SEQ ID NO: 29831 - RNA, 18 nt, Artificial Sequence
  Synthetic
aaggacugggaggagucg

SEQ ID NO: 29832 - RNA, 19 nt, Artificial Sequence
  Synthetic
uaaggacugggaggagucg

SEQ ID NO: 29833 - RNA, 20 nt, Artificial Sequence
  Synthetic
uuaaggacugggaggagucg

SEQ ID NO: 29834 - RNA, 21 nt, Artificial Sequence
  Synthetic
uuuaaggacugggaggagucg

SEQ ID NO: 29835 - RNA, 22 nt, Artificial Sequence
  Synthetic
auuuaaggacugggaggagucg

SEQ ID NO: 29836 - RNA, 23 nt, Artificial Sequence
  Synthetic
uauuuaaggacugggaggagucg

SEQ ID NO: 29837 - RNA, 24 nt, Artificial Sequence
  Synthetic
guauuuaaggacugggaggagucg

SEQ ID NO: 29838 - RNA, 18 nt, Artificial Sequence
  Synthetic
cuucaccucugcacgucg

SEQ ID NO: 29839 - RNA, 19 nt, Artificial Sequence
  Synthetic
gcuucaccucugcacgucg

SEQ ID NO: 29840 - RNA, 20 nt, Artificial Sequence
  Synthetic
cgcuucaccucugcacgucg

SEQ ID NO: 29841 - RNA, 21 nt, Artificial Sequence
  Synthetic
ucgcuucaccucugcacgucg

SEQ ID NO: 29842 - RNA, 22 nt, Artificial Sequence
  Synthetic
uucgcuucaccucugcacgucg

SEQ ID NO: 29843 - RNA, 23 nt, Artificial Sequence
  Synthetic
cuucgcuucaccucugcacgucg

SEQ ID NO: 29844 - RNA, 24 nt, Artificial Sequence
  Synthetic
acuucgcuucaccucugcacgucg

SEQ ID NO: 29845 - RNA, 18 nt, Artificial Sequence
  Synthetic
  misc_feature (10)..(10): n is a, c, g, or u
aucucaaucnccgcgucg

SEQ ID NO: 29846 - RNA, 19 nt, Artificial Sequence
  Synthetic
  misc_feature (11)..(11): n is a, c, g, or u
gaucucaaucnccgcgucg

SEQ ID NO: 29847 - RNA, 20 nt, Artificial Sequence
  Synthetic
  misc_feature (12)..(12): n is a, c, g, or u
agaucucaaucnccgcgucg

SEQ ID NO: 29848 - RNA, 21 nt, Artificial Sequence
  Synthetic
  misc_feature (13)..(13): n is a, c, g, or u
aagaucucaaucnccgcgucg

SEQ ID NO: 29849 - RNA, 22 nt, Artificial Sequence
  Synthetic
  misc_feature (14)..(14): n is a, c, g, or u
gaagaucucaaucnccgcgucg

SEQ ID NO: 29850 - RNA, 23 nt, Artificial Sequence
  Synthetic
  misc_feature (15)..(15): n is a, c, g, or u
cgaagaucucaaucnccgcgucg

SEQ ID NO: 29851 - RNA, 24 nt, Artificial Sequence
  Synthetic
  misc_feature (16)..(16): n is a, c, g, or u
acgaagaucucaaucnccgcgucg

SEQ ID NO: 29852 - RNA, 18 nt, Artificial Sequence
  Synthetic
cgaccccucucguggucg

SEQ ID NO: 29853 - RNA, 19 nt, Artificial Sequence
  Synthetic
acgaccccucucguggucg

SEQ ID NO: 29854 - RNA, 20 nt, Artificial Sequence
  Synthetic
gacgaccccucucguggucg

SEQ ID NO: 29855 - RNA, 18 nt, Artificial Sequence
  Synthetic
ugcuguaccaaaccuucg

SEQ ID NO: 29856 - RNA, 19 nt, Artificial Sequence
  Synthetic
cugcuguaccaaaccuucg

SEQ ID NO: 29857 - RNA, 20 nt, Artificial Sequence
  Synthetic
gcugcuguaccaaaccuucg

SEQ ID NO: 29858 - RNA, 21 nt, Artificial Sequence
  Synthetic
ugcugcuguaccaaaccuucg

SEQ ID NO: 29859 - RNA, 22 nt, Artificial Sequence
  Synthetic
cugcugcuguaccaaaccuucg

SEQ ID NO: 29860 - RNA, 23 nt, Artificial Sequence
  Synthetic
ccugcugcuguaccaaaccuucg

SEQ ID NO: 29861 - RNA, 24 nt, Artificial Sequence
  Synthetic
uccugcugcuguaccaaaccuucg

SEQ ID NO: 29862 - RNA, 18 nt, Artificial Sequence
  Synthetic
ggccaauggcaaacaagg

SEQ ID NO: 29863 - RNA, 19 nt, Artificial Sequence
  Synthetic
uggccaauggcaaacaagg

SEQ ID NO: 29864 - RNA, 20 nt, Artificial Sequence
  Synthetic
uuggccaauggcaaacaagg

SEQ ID NO: 29865 - RNA, 21 nt, Artificial Sequence
  Synthetic
auuggccaauggcaaacaagg

SEQ ID NO: 29866 - RNA, 22 nt, Artificial Sequence
  Synthetic
aauuggccaauggcaaacaagg

SEQ ID NO: 29867 - RNA, 23 nt, Artificial Sequence
  Synthetic
caauuggccaauggcaaacaagg

SEQ ID NO: 29868 - RNA, 24 nt, Artificial Sequence
  Synthetic
acaauuggccaauggcaaacaagg

SEQ ID NO: 29869 - RNA, 18 nt, Artificial Sequence
  Synthetic
uacauacuuuguggaagg

SEQ ID NO: 29870 - RNA, 19 nt, Artificial Sequence
  Synthetic
uuacauacuuuguggaagg

SEQ ID NO: 29871 - RNA, 20 nt, Artificial Sequence
  Synthetic
uuuacauacuuuguggaagg

SEQ ID NO: 29872 - RNA, 21 nt, Artificial Sequence
  Synthetic
auuuacauacuuuguggaagg

SEQ ID NO: 29873 - RNA, 22 nt, Artificial Sequence
  Synthetic
uauuuacauacuuuguggaagg

SEQ ID NO: 29874 - RNA, 23 nt, Artificial Sequence
  Synthetic
  misc_feature (1)..(1): n is a, c, g, or u
nuauuuacauacuuuguggaagg

SEQ ID NO: 29875 - RNA, 24 nt, Artificial Sequence
  Synthetic
  misc_feature (2)..(2): n is a, c, g, or u
anuauuuacauacuuuguggaagg

SEQ ID NO: 29876 - RNA, 18 nt, Artificial Sequence
  Synthetic
uuccuuggacucauaagg

SEQ ID NO: 29877 - RNA, 19 nt, Artificial Sequence
  Synthetic
auuccuuggacucauaagg

SEQ ID NO: 29878 - RNA, 20 nt, Artificial Sequence
  Synthetic
uauuccuuggacucauaagg

SEQ ID NO: 29879 - RNA, 21 nt, Artificial Sequence
  Synthetic
guauuccuuggacucauaagg

SEQ ID NO: 29880 - RNA, 22 nt, Artificial Sequence
  Synthetic
aguauuccuuggacucauaagg

SEQ ID NO: 29881 - RNA, 23 nt, Artificial Sequence
  Synthetic
uaguauuccuuggacucauaagg

SEQ ID NO: 29882 - RNA, 24 nt, Artificial Sequence
  Synthetic
uuaguauuccuuggacucauaagg

SEQ ID NO: 29883 - RNA, 18 nt, Artificial Sequence
  Synthetic
aagacuguguauuuaagg

SEQ ID NO: 29884 - RNA, 19 nt, Artificial Sequence
  Synthetic
aaagacuguguauuuaagg

SEQ ID NO: 29885 - RNA, 20 nt, Artificial Sequence
  Synthetic
caaagacuguguauuuaagg

SEQ ID NO: 29886 - RNA, 21 nt, Artificial Sequence
  Synthetic
ucaaagacuguguauuuaagg

SEQ ID NO: 29887 - RNA, 22 nt, Artificial Sequence
  Synthetic
aucaaagacuguguauuuaagg

SEQ ID NO: 29888 - RNA, 23 nt, Artificial Sequence
  Synthetic
caucaaagacuguguauuuaagg

SEQ ID NO: 29889 - RNA, 24 nt, Artificial Sequence
  Synthetic
acaucaaagacuguguauuuaagg

SEQ ID NO: 29890 - RNA, 18 nt, Artificial Sequence
  Synthetic
ugggguggagcccucagg

SEQ ID NO: 29891 - RNA, 19 nt, Artificial Sequence
  Synthetic
cugggguggagcccucagg

SEQ ID NO: 29892 - RNA, 20 nt, Artificial Sequence
  Synthetic
ucugggguggagcccucagg

SEQ ID NO: 29893 - RNA, 21 nt, Artificial Sequence
  Synthetic
uucugggguggagcccucagg

SEQ ID NO: 29894 - RNA, 22 nt, Artificial Sequence
  Synthetic
cuucugggguggagcccucagg

SEQ ID NO: 29895 - RNA, 23 nt, Artificial Sequence
  Synthetic
ccuucugggguggagcccucagg

SEQ ID NO: 29896 - RNA, 24 nt, Artificial Sequence
  Synthetic
gccuucugggguggagcccucagg

SEQ ID NO: 29897 - RNA, 18 nt, Artificial Sequence
  Synthetic
caccaaucggaggucagg

SEQ ID NO: 29898 - RNA, 19 nt, Artificial Sequence
  Synthetic
ccaccaaucggaggucagg

SEQ ID NO: 29899 - RNA, 20 nt, Artificial Sequence
  Synthetic
uccaccaaucggaggucagg

SEQ ID NO: 29900 - RNA, 21 nt, Artificial Sequence
  Synthetic
uuccaccaaucggaggucagg

SEQ ID NO: 29901 - RNA, 22 nt, Artificial Sequence
  Synthetic
cuuccaccaaucggaggucagg

SEQ ID NO: 29902 - RNA, 23 nt, Artificial Sequence
  Synthetic
gcuuccaccaaucggaggucagg

SEQ ID NO: 29903 - RNA, 24 nt, Artificial Sequence
  Synthetic
ugcuuccaccaaucggaggucagg

SEQ ID NO: 29904 - RNA, 18 nt, Artificial Sequence
  Synthetic
uguuguuagacaacgagg

SEQ ID NO: 29905 - RNA, 19 nt, Artificial Sequence
  Synthetic
cuguuguuagacaacgagg

SEQ ID NO: 29906 - RNA, 20 nt, Artificial Sequence
  Synthetic
acuguuguuagacaacgagg

SEQ ID NO: 29907 - RNA, 21 nt, Artificial Sequence
  Synthetic
uacuguuguuagacaacgagg

SEQ ID NO: 29908 - RNA, 22 nt, Artificial Sequence
  Synthetic
cuacuguuguuagacaacgagg

SEQ ID NO: 29909 - RNA, 23 nt, Artificial Sequence
  Synthetic
acuacuguuguuagacaacgagg

SEQ ID NO: 29910 - RNA, 24 nt, Artificial Sequence
  Synthetic
gacuacuguuguuagacaacgagg

SEQ ID NO: 29911 - RNA, 18 nt, Artificial Sequence
  Synthetic
gcuuccaccaaucggagg

SEQ ID NO: 29912 - RNA, 19 nt, Artificial Sequence
  Synthetic
ugcuuccaccaaucggagg

SEQ ID NO: 29913 - RNA, 20 nt, Artificial Sequence
  Synthetic
cugcuuccaccaaucggagg

SEQ ID NO: 29914 - RNA, 21 nt, Artificial Sequence
  Synthetic
ccugcuuccaccaaucggagg

SEQ ID NO: 29915 - RNA, 22 nt, Artificial Sequence
  Synthetic
uccugcuuccaccaaucggagg

SEQ ID NO: 29916 - RNA, 23 nt, Artificial Sequence
  Synthetic
cuccugcuuccaccaaucggagg

SEQ ID NO: 29917 - RNA, 24 nt, Artificial Sequence
  Synthetic
ccuccugcuuccaccaaucggagg

SEQ ID NO: 29918 - RNA, 18 nt, Artificial Sequence
  Synthetic
ucgggggaggaguugagg

SEQ ID NO: 29919 - RNA, 19 nt, Artificial Sequence
  Synthetic
gucgggggaggaguugagg

SEQ ID NO: 29920 - RNA, 20 nt, Artificial Sequence
  Synthetic
agucgggggaggaguugagg

SEQ ID NO: 29921 - RNA, 21 nt, Artificial Sequence
  Synthetic
gagucgggggaggaguugagg

SEQ ID NO: 29922 - RNA, 22 nt, Artificial Sequence
  Synthetic
ggagucgggggaggaguugagg

SEQ ID NO: 29923 - RNA, 23 nt, Artificial Sequence
  Synthetic
aggagucgggggaggaguugagg

SEQ ID NO: 29924 - RNA, 24 nt, Artificial Sequence
  Synthetic
gaggagucgggggaggaguugagg

SEQ ID NO: 29925 - RNA, 18 nt, Artificial Sequence
  Synthetic
aauggcaaacaagguagg

SEQ ID NO: 29926 - RNA, 19 nt, Artificial Sequence
  Synthetic
caauggcaaacaagguagg

SEQ ID NO: 29927 - RNA, 20 nt, Artificial Sequence
  Synthetic
ccaauggcaaacaagguagg

SEQ ID NO: 29928 - RNA, 21 nt, Artificial Sequence
  Synthetic
gccaauggcaaacaagguagg

SEQ ID NO: 29929 - RNA, 22 nt, Artificial Sequence
  Synthetic
ggccaauggcaaacaagguagg

SEQ ID NO: 29930 - RNA, 23 nt, Artificial Sequence
  Synthetic
uggccaauggcaaacaagguagg

SEQ ID NO: 29931 - RNA, 24 nt, Artificial Sequence
  Synthetic
uuggccaauggcaaacaagguagg

SEQ ID NO: 29932 - RNA, 18 nt, Artificial Sequence
  Synthetic
guauuaggaggcuguagg

SEQ ID NO: 29933 - RNA, 19 nt, Artificial Sequence
  Synthetic
uguauuaggaggcuguagg

SEQ ID NO: 29934 - RNA, 20 nt, Artificial Sequence
  Synthetic
uuguauuaggaggcuguagg

SEQ ID NO: 29935 - RNA, 21 nt, Artificial Sequence
  Synthetic
uuuguauuaggaggcuguagg

SEQ ID NO: 29936 - RNA, 22 nt, Artificial Sequence
  Synthetic
cuuuguauuaggaggcuguagg

SEQ ID NO: 29937 - RNA, 23 nt, Artificial Sequence
  Synthetic
ucuuuguauuaggaggcuguagg

SEQ ID NO: 29938 - RNA, 24 nt, Artificial Sequence
  Synthetic
gucuuuguauuaggaggcuguagg

SEQ ID NO: 29939 - RNA, 18 nt, Artificial Sequence
  Synthetic
cccguugcucggcaacgg

SEQ ID NO: 29940 - RNA, 19 nt, Artificial Sequence
  Synthetic
ccccguugcucggcaacgg

SEQ ID NO: 29941 - RNA, 20 nt, Artificial Sequence
  Synthetic
accccguugcucggcaacgg

SEQ ID NO: 29942 - RNA, 18 nt, Artificial Sequence
  Synthetic
gagcaccucucucaacgg

SEQ ID NO: 29943 - RNA, 19 nt, Artificial Sequence
  Synthetic
ggagcaccucucucaacgg

SEQ ID NO: 29944 - RNA, 20 nt, Artificial Sequence
  Synthetic
gggagcaccucucucaacgg

SEQ ID NO: 29945 - RNA, 21 nt, Artificial Sequence
  Synthetic
ugggagcaccucucucaacgg

SEQ ID NO: 29946 - RNA, 22 nt, Artificial Sequence
  Synthetic
augggagcaccucucucaacgg

SEQ ID NO: 29947 - RNA, 23 nt, Artificial Sequence
  Synthetic
caugggagcaccucucucaacgg

SEQ ID NO: 29948 - RNA, 24 nt, Artificial Sequence
  Synthetic
gcaugggagcaccucucucaacgg

SEQ ID NO: 29949 - RNA, 18 nt, Artificial Sequence
  Synthetic
aggacugggaggagucgg

SEQ ID NO: 29950 - RNA, 19 nt, Artificial Sequence
  Synthetic
aaggacugggaggagucgg

SEQ ID NO: 29951 - RNA, 20 nt, Artificial Sequence
  Synthetic
uaaggacugggaggagucgg

SEQ ID NO: 29952 - RNA, 21 nt, Artificial Sequence
  Synthetic
uuaaggacugggaggagucgg

SEQ ID NO: 29953 - RNA, 22 nt, Artificial Sequence
  Synthetic
uuuaaggacugggaggagucgg

SEQ ID NO: 29954 - RNA, 23 nt, Artificial Sequence
  Synthetic
auuuaaggacugggaggagucgg

SEQ ID NO: 29955 - RNA, 24 nt, Artificial Sequence
  Synthetic
uauuuaaggacugggaggagucgg

SEQ ID NO: 29956 - RNA, 18 nt, Artificial Sequence
  Synthetic
gcuguaccaaaccuucgg

SEQ ID NO: 29957 - RNA, 19 nt, Artificial Sequence
  Synthetic
ugcuguaccaaaccuucgg

SEQ ID NO: 29958 - RNA, 20 nt, Artificial Sequence
  Synthetic
cugcuguaccaaaccuucgg

SEQ ID NO: 29959 - RNA, 21 nt, Artificial Sequence
  Synthetic
gcugcuguaccaaaccuucgg

SEQ ID NO: 29960 - RNA, 22 nt, Artificial Sequence
  Synthetic
ugcugcuguaccaaaccuucgg

SEQ ID NO: 29961 - RNA, 23 nt, Artificial Sequence
  Synthetic
cugcugcuguaccaaaccuucgg

SEQ ID NO: 29962 - RNA, 24 nt, Artificial Sequence
  Synthetic
ccugcugcuguaccaaaccuucgg

SEQ ID NO: 29963 - RNA, 18 nt, Artificial Sequence
  Synthetic
aggagugggaggcuucgg

SEQ ID NO: 29964 - RNA, 19 nt, Artificial Sequence
  Synthetic
uaggagugggaggcuucgg

SEQ ID NO: 29965 - RNA, 20 nt, Artificial Sequence
  Synthetic
guaggagugggaggcuucgg

SEQ ID NO: 29966 - RNA, 21 nt, Artificial Sequence
  Synthetic
gguaggagugggaggcuucgg

SEQ ID NO: 29967 - RNA, 22 nt, Artificial Sequence
  Synthetic
agguaggagugggaggcuucgg

SEQ ID NO: 29968 - RNA, 23 nt, Artificial Sequence
  Synthetic
aagguaggagugggaggcuucgg

SEQ ID NO: 29969 - RNA, 24 nt, Artificial Sequence
  Synthetic
caagguaggagugggaggcuucgg

SEQ ID NO: 29970 - RNA, 18 nt, Artificial Sequence
  Synthetic
ggacugggaggagucggg

SEQ ID NO: 29971 - RNA, 19 nt, Artificial Sequence
  Synthetic
aggacugggaggagucggg

SEQ ID NO: 29972 - RNA, 20 nt, Artificial Sequence
  Synthetic
aaggacugggaggagucggg

SEQ ID NO: 29973 - RNA, 21 nt, Artificial Sequence
  Synthetic
uaaggacugggaggagucggg

SEQ ID NO: 29974 - RNA, 22 nt, Artificial Sequence
  Synthetic
uuaaggacugggaggagucggg

SEQ ID NO: 29975 - RNA, 23 nt, Artificial Sequence
  Synthetic
uuuaaggacugggaggagucggg

SEQ ID NO: 29976 - RNA, 24 nt, Artificial Sequence
  Synthetic
auuuaaggacugggaggagucggg

SEQ ID NO: 29977 - RNA, 18 nt, Artificial Sequence
  Synthetic
cucaacggcgagaagggg

SEQ ID NO: 29978 - RNA, 19 nt, Artificial Sequence
  Synthetic
ucucaacggcgagaagggg

SEQ ID NO: 29979 - RNA, 20 nt, Artificial Sequence
  Synthetic
cucucaacggcgagaagggg

SEQ ID NO: 29980 - RNA, 18 nt, Artificial Sequence
  Synthetic
gacugggaggagucgggg

SEQ ID NO: 29981 - RNA, 19 nt, Artificial Sequence
  Synthetic
ggacugggaggagucgggg

SEQ ID NO: 29982 - RNA, 20 nt, Artificial Sequence
  Synthetic
aggacugggaggagucgggg

SEQ ID NO: 29983 - RNA, 21 nt, Artificial Sequence
  Synthetic
aaggacugggaggagucgggg

SEQ ID NO: 29984 - RNA, 22 nt, Artificial Sequence
  Synthetic
uaaggacugggaggagucgggg

SEQ ID NO: 29985 - RNA, 23 nt, Artificial Sequence
  Synthetic
uuaaggacugggaggagucgggg

SEQ ID NO: 29986 - RNA, 24 nt, Artificial Sequence
  Synthetic
uuuaaggacugggaggagucgggg

SEQ ID NO: 29987 - RNA, 18 nt, Artificial Sequence
  Synthetic
aacccccacuggcugggg

SEQ ID NO: 29988 - RNA, 19 nt, Artificial Sequence
  Synthetic
caacccccacuggcugggg

SEQ ID NO: 29989 - RNA, 20 nt, Artificial Sequence
  Synthetic
gcaacccccacuggcugggg

SEQ ID NO: 29990 - RNA, 21 nt, Artificial Sequence
  Synthetic
cgcaacccccacuggcugggg

SEQ ID NO: 29991 - RNA, 22 nt, Artificial Sequence
  Synthetic
acgcaacccccacuggcugggg

SEQ ID NO: 29992 - RNA, 23 nt, Artificial Sequence
  Synthetic
gacgcaacccccacuggcugggg

SEQ ID NO: 29993 - RNA, 24 nt, Artificial Sequence
  Synthetic
ugacgcaacccccacuggcugggg

SEQ ID NO: 29994 - RNA, 18 nt, Artificial Sequence
  Synthetic
cacgguggccuucugggg

SEQ ID NO: 29995 - RNA, 19 nt, Artificial Sequence
  Synthetic
acacgguggccuucugggg

SEQ ID NO: 29996 - RNA, 20 nt, Artificial Sequence
  Synthetic
cacacgguggccuucugggg

SEQ ID NO: 29997 - RNA, 21 nt, Artificial Sequence
  Synthetic
ccacacgguggccuucugggg

SEQ ID NO: 29998 - RNA, 22 nt, Artificial Sequence
  Synthetic
cccacacgguggccuucugggg

SEQ ID NO: 29999 - RNA, 23 nt, Artificial Sequence
  Synthetic
ccccacacgguggccuucugggg

SEQ ID NO: 30000 - RNA, 24 nt, Artificial Sequence
  Synthetic
cccccacacgguggccuucugggg

SEQ ID NO: 30001 - RNA, 18 nt, Artificial Sequence
  Synthetic
  misc_feature (7)..(7): n is a, c, g, or u
gaugaunugguauugggg

SEQ ID NO: 30002 - RNA, 19 nt, Artificial Sequence
  Synthetic
  misc_feature (8)..(8): n is a, c, g, or u
ggaugaunugguauugggg

SEQ ID NO: 30003 - RNA, 20 nt, Artificial Sequence
  Synthetic
  misc_feature (9)..(9): n is a, c, g, or u
uggaugaunugguauugggg

SEQ ID NO: 30004 - RNA, 21 nt, Artificial Sequence
  Synthetic
  misc_feature (10)..(10): n is a, c, g, or u
auggaugaunugguauugggg

SEQ ID NO: 30005 - RNA, 22 nt, Artificial Sequence
  Synthetic
  misc_feature (11)..(11): n is a, c, g, or u
uauggaugaunugguauugggg

SEQ ID NO: 30006 - RNA, 23 nt, Artificial Sequence
  Synthetic
  misc_feature (12)..(12): n is a, c, g, or u
auauggaugaunugguauugggg

SEQ ID NO: 30007 - RNA, 24 nt, Artificial Sequence
  Synthetic
  misc_feature (13)..(13): n is a, c, g, or u
uauauggaugaunugguauugggg

SEQ ID NO: 30008 - RNA, 18 nt, Artificial Sequence
  Synthetic
ccuuggguggcuuugggg

SEQ ID NO: 30009 - RNA, 19 nt, Artificial Sequence
  Synthetic
gccuuggguggcuuugggg

SEQ ID NO: 30010 - RNA, 20 nt, Artificial Sequence
  Synthetic
ugccuuggguggcuuugggg

SEQ ID NO: 30011 - RNA, 21 nt, Artificial Sequence
  Synthetic
gugccuuggguggcuuugggg

SEQ ID NO: 30012 - RNA, 22 nt, Artificial Sequence
  Synthetic
ugugccuuggguggcuuugggg

SEQ ID NO: 30013 - RNA, 23 nt, Artificial Sequence
  Synthetic
cugugccuuggguggcuuugggg

SEQ ID NO: 30014 - RNA, 24 nt, Artificial Sequence
  Synthetic
gcugugccuuggguggcuuugggg

SEQ ID NO: 30015 - RNA, 18 nt, Artificial Sequence
  Synthetic
ggcgagaaggggcauggg

SEQ ID NO: 30016 - RNA, 19 nt, Artificial Sequence
  Synthetic
cggcgagaaggggcauggg

SEQ ID NO: 30017 - RNA, 20 nt, Artificial Sequence
  Synthetic
acggcgagaaggggcauggg

SEQ ID NO: 30018 - RNA, 21 nt, Artificial Sequence
  Synthetic
aacggcgagaaggggcauggg

SEQ ID NO: 30019 - RNA, 22 nt, Artificial Sequence
  Synthetic
caacggcgagaaggggcauggg

SEQ ID NO: 30020 - RNA, 23 nt, Artificial Sequence
  Synthetic
ucaacggcgagaaggggcauggg

SEQ ID NO: 30021 - RNA, 24 nt, Artificial Sequence
  Synthetic
cucaacggcgagaaggggcauggg

SEQ ID NO: 30022 - RNA, 18 nt, Artificial Sequence
  Synthetic
  misc_feature (13)..(13): n is a, c, g, or u
ugucaauacuaanauggg

SEQ ID NO: 30023 - RNA, 19 nt, Artificial Sequence
  Synthetic
  misc_feature (14)..(14): n is a, c, g, or u
augucaauacuaanauggg

SEQ ID NO: 30024 - RNA, 20 nt, Artificial Sequence
  Synthetic
  misc_feature (15)..(15): n is a, c, g, or u
uaugucaauacuaanauggg

SEQ ID NO: 30025 - RNA, 21 nt, Artificial Sequence
  Synthetic
  misc_feature (16)..(16): n is a, c, g, or u
uuaugucaauacuaanauggg

SEQ ID NO: 30026 - RNA, 22 nt, Artificial Sequence
  Synthetic
  misc_feature (17)..(17): n is a, c, g, or u
auuaugucaauacuaanauggg

SEQ ID NO: 30027 - RNA, 23 nt, Artificial Sequence
  Synthetic
  misc_feature (18)..(18): n is a, c, g, or u
aauuaugucaauacuaanauggg

SEQ ID NO: 30028 - RNA, 24 nt, Artificial Sequence
  Synthetic
  misc_feature (19)..(19): n is a, c, g, or u
uaauuaugucaauacuaanauggg

SEQ ID NO: 30029 - RNA, 18 nt, Artificial Sequence
  Synthetic
ucggaaaauaccuauggg

SEQ ID NO: 30030 - RNA, 19 nt, Artificial Sequence
  Synthetic
uucggaaaauaccuauggg

SEQ ID NO: 30031 - RNA, 20 nt, Artificial Sequence
  Synthetic
uuucggaaaauaccuauggg

SEQ ID NO: 30032 - RNA, 21 nt, Artificial Sequence
  Synthetic
cuuucggaaaauaccuauggg

SEQ ID NO: 30033 - RNA, 22 nt, Artificial Sequence
  Synthetic
gcuuucggaaaauaccuauggg

SEQ ID NO: 30034 - RNA, 23 nt, Artificial Sequence
  Synthetic
ggcuuucggaaaauaccuauggg

SEQ ID NO: 30035 - RNA, 24 nt, Artificial Sequence
  Synthetic
gggcuuucggaaaauaccuauggg

SEQ ID NO: 30036 - RNA, 18 nt, Artificial Sequence
  Synthetic
ggucaccauauuccuggg

SEQ ID NO: 30037 - RNA, 19 nt, Artificial Sequence
  Synthetic
gggucaccauauuccuggg

SEQ ID NO: 30038 - RNA, 20 nt, Artificial Sequence
  Synthetic
ugggucaccauauuccuggg

SEQ ID NO: 30039 - RNA, 21 nt, Artificial Sequence
  Synthetic
gugggucaccauauuccuggg

SEQ ID NO: 30040 - RNA, 22 nt, Artificial Sequence
  Synthetic
ugugggucaccauauuccuggg

SEQ ID NO: 30041 - RNA, 23 nt, Artificial Sequence
  Synthetic
uugugggucaccauauuccuggg

SEQ ID NO: 30042 - RNA, 24 nt, Artificial Sequence
  Synthetic
uuugugggucaccauauuccuggg

SEQ ID NO: 30043 - RNA, 18 nt, Artificial Sequence
  Synthetic
acacgguggccuucuggg

SEQ ID NO: 30044 - RNA, 19 nt, Artificial Sequence
  Synthetic
cacacgguggccuucuggg

SEQ ID NO: 30045 - RNA, 20 nt, Artificial Sequence
  Synthetic
ccacacgguggccuucuggg

SEQ ID NO: 30046 - RNA, 21 nt, Artificial Sequence
  Synthetic
cccacacgguggccuucuggg

SEQ ID NO: 30047 - RNA, 22 nt, Artificial Sequence
  Synthetic
ccccacacgguggccuucuggg

SEQ ID NO: 30048 - RNA, 23 nt, Artificial Sequence
  Synthetic
cccccacacgguggccuucuggg

SEQ ID NO: 30049 - RNA, 24 nt, Artificial Sequence
  Synthetic
acccccacacgguggccuucuggg

SEQ ID NO: 30050 - RNA, 18 nt, Artificial Sequence
  Synthetic
  misc_feature (16)..(16): n is a, c, g, or u
uguuucgcucgcagcngg

SEQ ID NO: 30051 - RNA, 19 nt, Artificial Sequence
  Synthetic
  misc_feature (17)..(17): n is a, c, g, or u
uuguuucgcucgcagcngg

SEQ ID NO: 30052 - RNA, 20 nt, Artificial Sequence
  Synthetic
  misc_feature (18)..(18): n is a, c, g, or u
cuuguuucgcucgcagcngg

SEQ ID NO: 30053 - RNA, 21 nt, Artificial Sequence
  Synthetic
  misc_feature (19)..(19): n is a, c, g, or u
gcuuguuucgcucgcagcngg

SEQ ID NO: 30054 - RNA, 22 nt, Artificial Sequence
  Synthetic
  misc_feature (1)..(1): n is a, c, g, or u
  misc_feature (20)..(20): n is a, c, g, or u
ngcuuguuucgcucgcagcngg

SEQ ID NO: 30055 - RNA, 23 nt, Artificial Sequence
  Synthetic
  misc_feature (2)..(2): n is a, c, g, or u
  misc_feature (21)..(21): n is a, c, g, or u
cngcuuguuucgcucgcagcngg

SEQ ID NO: 30056 - RNA, 24 nt, Artificial Sequence
  Synthetic
  misc_feature (3)..(3): n is a, c, g, or u
  misc_feature (22)..(22): n is a, c, g, or u
gcngcuuguuucgcucgcagcngg

SEQ ID NO: 30057 - RNA, 18 nt, Artificial Sequence
  Synthetic
cggcgagaaggggcaugg

SEQ ID NO: 30058 - RNA, 19 nt, Artificial Sequence
  Synthetic
acggcgagaaggggcaugg

SEQ ID NO: 30059 - RNA, 20 nt, Artificial Sequence
  Synthetic
aacggcgagaaggggcaugg

SEQ ID NO: 30060 - RNA, 21 nt, Artificial Sequence
  Synthetic
caacggcgagaaggggcaugg

SEQ ID NO: 30061 - RNA, 22 nt, Artificial Sequence
  Synthetic
ucaacggcgagaaggggcaugg

SEQ ID NO: 30062 - RNA, 23 nt, Artificial Sequence
  Synthetic
cucaacggcgagaaggggcaugg

SEQ ID NO: 30063 - RNA, 24 nt, Artificial Sequence
  Synthetic
ucucaacggcgagaaggggcaugg

SEQ ID NO: 30064 - RNA, 18 nt, Artificial Sequence
  Synthetic
ugacgcaacccccacugg

SEQ ID NO: 30065 - RNA, 19 nt, Artificial Sequence
  Synthetic
cugacgcaacccccacugg

SEQ ID NO: 30066 - RNA, 20 nt, Artificial Sequence
  Synthetic
gcugacgcaacccccacugg

SEQ ID NO: 30067 - RNA, 21 nt, Artificial Sequence
  Synthetic
ugcugacgcaacccccacugg

SEQ ID NO: 30068 - RNA, 22 nt, Artificial Sequence
  Synthetic
uugcugacgcaacccccacugg

SEQ ID NO: 30069 - RNA, 23 nt, Artificial Sequence
  Synthetic
uuugcugacgcaacccccacugg

SEQ ID NO: 30070 - RNA, 24 nt, Artificial Sequence
  Synthetic
guuugcugacgcaacccccacugg

SEQ ID NO: 30071 - RNA, 18 nt, Artificial Sequence
  Synthetic
uguguauuuaaggacugg

SEQ ID NO: 30072 - RNA, 19 nt, Artificial Sequence
  Synthetic
cuguguauuuaaggacugg

SEQ ID NO: 30073 - RNA, 20 nt, Artificial Sequence
  Synthetic
acuguguauuuaaggacugg

SEQ ID NO: 30074 - RNA, 21 nt, Artificial Sequence
  Synthetic
gacuguguauuuaaggacugg

SEQ ID NO: 30075 - RNA, 22 nt, Artificial Sequence
  Synthetic
agacuguguauuuaaggacugg

SEQ ID NO: 30076 - RNA, 23 nt, Artificial Sequence
  Synthetic
aagacuguguauuuaaggacugg

SEQ ID NO: 30077 - RNA, 24 nt, Artificial Sequence
  Synthetic
aaagacuguguauuuaaggacugg

SEQ ID NO: 30078 - RNA, 18 nt, Artificial Sequence
  Synthetic
ccccggucaacgaccugg

SEQ ID NO: 30079 - RNA, 19 nt, Artificial Sequence
  Synthetic
gccccggucaacgaccugg

SEQ ID NO: 30080 - RNA, 20 nt, Artificial Sequence
  Synthetic
cgccccggucaacgaccugg

SEQ ID NO: 30081 - RNA, 18 nt, Artificial Sequence
  Synthetic
accacccggguguccugg

SEQ ID NO: 30082 - RNA, 19 nt, Artificial Sequence
  Synthetic
uaccacccggguguccugg

SEQ ID NO: 30083 - RNA, 20 nt, Artificial Sequence
  Synthetic
guaccacccggguguccugg

SEQ ID NO: 30084 - RNA, 21 nt, Artificial Sequence
  Synthetic
gguaccacccggguguccugg

SEQ ID NO: 30085 - RNA, 22 nt, Artificial Sequence
  Synthetic
ggguaccacccggguguccugg

SEQ ID NO: 30086 - RNA, 23 nt, Artificial Sequence
  Synthetic
gggguaccacccggguguccugg

SEQ ID NO: 30087 - RNA, 24 nt, Artificial Sequence
  Synthetic
agggguaccacccggguguccugg

SEQ ID NO: 30088 - RNA, 18 nt, Artificial Sequence
  Synthetic
  misc_feature (6)..(6): n is a, c, g, or u
augacnuuggcuuccugg

SEQ ID NO: 30089 - RNA, 19 nt, Artificial Sequence
  Synthetic
  misc_feature (7)..(7): n is a, c, g, or u
gaugacnuuggcuuccugg

SEQ ID NO: 30090 - RNA, 20 nt, Artificial Sequence
  Synthetic
  misc_feature (8)..(8): n is a, c, g, or u
ugaugacnuuggcuuccugg

SEQ ID NO: 30091 - RNA, 21 nt, Artificial Sequence
  Synthetic
  misc_feature (9)..(9): n is a, c, g, or u
uugaugacnuuggcuuccugg

SEQ ID NO: 30092 - RNA, 22 nt, Artificial Sequence
  Synthetic
  misc_feature (10)..(10): n is a, c, g, or u
guugaugacnuuggcuuccugg

SEQ ID NO: 30093 - RNA, 23 nt, Artificial Sequence
  Synthetic
  misc_feature (11)..(11): n is a, c, g, or u
aguugaugacnuuggcuuccugg

SEQ ID NO: 30094 - RNA, 24 nt, Artificial Sequence
  Synthetic
  misc_feature (12)..(12): n is a, c, g, or u
gaguugaugacnuuggcuuccugg

SEQ ID NO: 30095 - RNA, 18 nt, Artificial Sequence
  Synthetic
caagcuauuuugugcugg

SEQ ID NO: 30096 - RNA, 19 nt, Artificial Sequence
  Synthetic
gcaagcuauuuugugcugg

SEQ ID NO: 30097 - RNA, 20 nt, Artificial Sequence
  Synthetic
ggcaagcuauuuugugcugg

SEQ ID NO: 30098 - RNA, 21 nt, Artificial Sequence
  Synthetic
aggcaagcuauuuugugcugg

SEQ ID NO: 30099 - RNA, 22 nt, Artificial Sequence
  Synthetic
caggcaagcuauuuugugcugg

SEQ ID NO: 30100 - RNA, 23 nt, Artificial Sequence
  Synthetic
ucaggcaagcuauuuugugcugg

SEQ ID NO: 30101 - RNA, 24 nt, Artificial Sequence
  Synthetic
cucaggcaagcuauuuugugcugg

SEQ ID NO: 30102 - RNA, 18 nt, Artificial Sequence
  Synthetic
  misc_feature (11)..(11): n is a, c, g, or u
cgcucgcagcnggucugg

SEQ ID NO: 30103 - RNA, 19 nt, Artificial Sequence
  Synthetic
  misc_feature (12)..(12): n is a, c, g, or u
ucgcucgcagcnggucugg

SEQ ID NO: 30104 - RNA, 20 nt, Artificial Sequence
  Synthetic
  misc_feature (13)..(13): n is a, c, g, or u
uucgcucgcagcnggucugg

SEQ ID NO: 30105 - RNA, 21 nt, Artificial Sequence
  Synthetic
  misc_feature (14)..(14): n is a, c, g, or u
uuucgcucgcagcnggucugg

SEQ ID NO: 30106 - RNA, 22 nt, Artificial Sequence
  Synthetic
  misc_feature (15)..(15): n is a, c, g, or u
guuucgcucgcagcnggucugg

SEQ ID NO: 30107 - RNA, 23 nt, Artificial Sequence
  Synthetic
  misc_feature (16)..(16): n is a, c, g, or u
uguuucgcucgcagcnggucugg

SEQ ID NO: 30108 - RNA, 24 nt, Artificial Sequence
  Synthetic
  misc_feature (17)..(17): n is a, c, g, or u
uuguuucgcucgcagcnggucugg

SEQ ID NO: 30109 - RNA, 18 nt, Artificial Sequence
  Synthetic
cacacgguggccuucugg

SEQ ID NO: 30110 - RNA, 19 nt, Artificial Sequence
  Synthetic
ccacacgguggccuucugg

SEQ ID NO: 30111 - RNA, 20 nt, Artificial Sequence
  Synthetic
cccacacgguggccuucugg

SEQ ID NO: 30112 - RNA, 21 nt, Artificial Sequence
  Synthetic
ccccacacgguggccuucugg

SEQ ID NO: 30113 - RNA, 22 nt, Artificial Sequence
  Synthetic
cccccacacgguggccuucugg

SEQ ID NO: 30114 - RNA, 23 nt, Artificial Sequence
  Synthetic
acccccacacgguggccuucugg

SEQ ID NO: 30115 - RNA, 24 nt, Artificial Sequence
  Synthetic
cacccccacacgguggccuucugg

SEQ ID NO: 30116 - RNA, 18 nt, Artificial Sequence
  Synthetic
  misc_feature (4)..(4): n is a, c, g, or u
uucnugccuuacauuugg

SEQ ID NO: 30117 - RNA, 19 nt, Artificial Sequence
  Synthetic
  misc_feature (5)..(5): n is a, c, g, or u
uuucnugccuuacauuugg

SEQ ID NO: 30118 - RNA, 20 nt, Artificial Sequence
  Synthetic
  misc_feature (6)..(6): n is a, c, g, or u
auuucnugccuuacauuugg

SEQ ID NO: 30119 - RNA, 21 nt, Artificial Sequence
  Synthetic
  misc_feature (1)..(1): n is a, c, g, or u
  misc_feature (7)..(7): n is a, c, g, or u
nauuucnugccuuacauuugg

SEQ ID NO: 30120 - RNA, 22 nt, Artificial Sequence
  Synthetic
  misc_feature (2)..(2): n is a, c, g, or u
  misc_feature (8)..(8): n is a, c, g, or u
anauuucnugccuuacauuugg

SEQ ID NO: 30121 - RNA, 23 nt, Artificial Sequence
  Synthetic
  misc_feature (3)..(3): n is a, c, g, or u
  misc_feature (9)..(9): n is a, c, g, or u
canauuucnugccuuacauuugg

SEQ ID NO: 30122 - RNA, 24 nt, Artificial Sequence
  Synthetic
  misc_feature (4)..(4): n is a, c, g, or u
  misc_feature (10)..(10): n is a, c, g, or u
ucanauuucnugccuuacauuugg

SEQ ID NO: 30123 - RNA, 18 nt, Artificial Sequence
  Synthetic
cuaaauacuucccuuugg

SEQ ID NO: 30124 - RNA, 19 nt, Artificial Sequence
  Synthetic
acuaaauacuucccuuugg

SEQ ID NO: 30125 - RNA, 20 nt, Artificial Sequence
  Synthetic
uacuaaauacuucccuuugg

SEQ ID NO: 30126 - RNA, 21 nt, Artificial Sequence
  Synthetic
uuacuaaauacuucccuuugg

SEQ ID NO: 30127 - RNA, 22 nt, Artificial Sequence
  Synthetic
guuacuaaauacuucccuuugg

SEQ ID NO: 30128 - RNA, 23 nt, Artificial Sequence
  Synthetic
aguuacuaaauacuucccuuugg

SEQ ID NO: 30129 - RNA, 24 nt, Artificial Sequence
  Synthetic
aaguuacuaaauacuucccuuugg

SEQ ID NO: 30130 - RNA, 18 nt, Artificial Sequence
  Synthetic
cacagcuaaaacaaaaug

SEQ ID NO: 30131 - RNA, 19 nt, Artificial Sequence
  Synthetic
acacagcuaaaacaaaaug

SEQ ID NO: 30132 - RNA, 20 nt, Artificial Sequence
  Synthetic
aacacagcuaaaacaaaaug

SEQ ID NO: 30133 - RNA, 21 nt, Artificial Sequence
  Synthetic
gaacacagcuaaaacaaaaug

SEQ ID NO: 30134 - RNA, 22 nt, Artificial Sequence
  Synthetic
ugaacacagcuaaaacaaaaug

SEQ ID NO: 30135 - RNA, 23 nt, Artificial Sequence
  Synthetic
uugaacacagcuaaaacaaaaug

SEQ ID NO: 30136 - RNA, 24 nt, Artificial Sequence
  Synthetic
uuugaacacagcuaaaacaaaaug

SEQ ID NO: 30137 - RNA, 18 nt, Artificial Sequence
  Synthetic
  misc_feature (13)..(13): n is a, c, g, or u
gcccacucacuanaaaug

SEQ ID NO: 30138 - RNA, 19 nt, Artificial Sequence
  Synthetic
  misc_feature (14)..(14): n is a, c, g, or u
ggcccacucacuanaaaug

SEQ ID NO: 30139 - RNA, 20 nt, Artificial Sequence
  Synthetic
  misc_feature (1)..(1): n is a, c, g, or u
  misc_feature (15)..(15): n is a, c, g, or u
nggcccacucacuanaaaug

SEQ ID NO: 30140 - RNA, 21 nt, Artificial Sequence
  Synthetic
  misc_feature (2)..(2): n is a, c, g, or u
  misc_feature (16)..(16): n is a, c, g, or u
unggcccacucacuanaaaug

SEQ ID NO: 30141 - RNA, 22 nt, Artificial Sequence
  Synthetic
  misc_feature (3)..(3): n is a, c, g, or u
  misc_feature (17)..(17): n is a, c, g, or u
gunggcccacucacuanaaaug

SEQ ID NO: 30142 - RNA, 23 nt, Artificial Sequence
  Synthetic
  misc_feature (4)..(4): n is a, c, g, or u
  misc_feature (18)..(18): n is a, c, g, or u
ugunggcccacucacuanaaaug

SEQ ID NO: 30143 - RNA, 24 nt, Artificial Sequence
  Synthetic
  misc_feature (5)..(5): n is a, c, g, or u
  misc_feature (19)..(19): n is a, c, g, or u
uugunggcccacucacuanaaaug

SEQ ID NO: 30144 - RNA, 18 nt, Artificial Sequence
  Synthetic
aaggacaauuggccaaug

SEQ ID NO: 30145 - RNA, 19 nt, Artificial Sequence
  Synthetic
caaggacaauuggccaaug

SEQ ID NO: 30146 - RNA, 20 nt, Artificial Sequence
  Synthetic
acaaggacaauuggccaaug

SEQ ID NO: 30147 - RNA, 21 nt, Artificial Sequence
  Synthetic
aacaaggacaauuggccaaug

SEQ ID NO: 30148 - RNA, 22 nt, Artificial Sequence
  Synthetic
aaacaaggacaauuggccaaug

SEQ ID NO: 30149 - RNA, 23 nt, Artificial Sequence
  Synthetic
caaacaaggacaauuggccaaug

SEQ ID NO: 30150 - RNA, 24 nt, Artificial Sequence
  Synthetic
acaaacaaggacaauuggccaaug

SEQ ID NO: 30151 - RNA, 18 nt, Artificial Sequence
  Synthetic
  misc_feature (8)..(8): n is a, c, g, or u
gacccugnuaugaacaug

SEQ ID NO: 30152 - RNA, 19 nt, Artificial Sequence
  Synthetic
  misc_feature (9)..(9): n is a, c, g, or u
ggacccugnuaugaacaug

SEQ ID NO: 30153 - RNA, 20 nt, Artificial Sequence
  Synthetic
  misc_feature (10)..(10): n is a, c, g, or u
gggacccugnuaugaacaug

SEQ ID NO: 30154 - RNA, 21 nt, Artificial Sequence
  Synthetic
  misc_feature (11)..(11): n is a, c, g, or u
ggggacccugnuaugaacaug

SEQ ID NO: 30155 - RNA, 22 nt, Artificial Sequence
  Synthetic
  misc_feature (12)..(12): n is a, c, g, or u
uggggacccugnuaugaacaug

SEQ ID NO: 30156 - RNA, 23 nt, Artificial Sequence
  Synthetic
  misc_feature (13)..(13): n is a, c, g, or u
cuggggacccugnuaugaacaug

SEQ ID NO: 30157 - RNA, 24 nt, Artificial Sequence
  Synthetic
  misc_feature (14)..(14): n is a, c, g, or u
acuggggacccugnuaugaacaug

SEQ ID NO: 30158 - RNA, 18 nt, Artificial Sequence
  Synthetic
auuggccaucagcgcaug

SEQ ID NO: 30159 - RNA, 19 nt, Artificial Sequence
  Synthetic
gauuggccaucagcgcaug

SEQ ID NO: 30160 - RNA, 20 nt, Artificial Sequence
  Synthetic
cgauuggccaucagcgcaug

SEQ ID NO: 30161 - RNA, 18 nt, Artificial Sequence
  Synthetic
cugacgcaacccccacug

SEQ ID NO: 30162 - RNA, 19 nt, Artificial Sequence
  Synthetic
gcugacgcaacccccacug

SEQ ID NO: 30163 - RNA, 20 nt, Artificial Sequence
  Synthetic
ugcugacgcaacccccacug

SEQ ID NO: 30164 - RNA, 18 nt, Artificial Sequence
  Synthetic
uagggcuuucccccacug

SEQ ID NO: 30165 - RNA, 19 nt, Artificial Sequence
  Synthetic
guagggcuuucccccacug

SEQ ID NO: 30166 - RNA, 20 nt, Artificial Sequence
  Synthetic
cguagggcuuucccccacug

SEQ ID NO: 30167 - RNA, 21 nt, Artificial Sequence
  Synthetic
gcguagggcuuucccccacug

SEQ ID NO: 30168 - RNA, 22 nt, Artificial Sequence
  Synthetic
ugcguagggcuuucccccacug

SEQ ID NO: 30169 - RNA, 23 nt, Artificial Sequence
  Synthetic
gugcguagggcuuucccccacug

SEQ ID NO: 30170 - RNA, 24 nt, Artificial Sequence
  Synthetic
ggugcguagggcuuucccccacug

SEQ ID NO: 30171 - RNA, 18 nt, Artificial Sequence
  Synthetic
uuuguucaugucccacug

SEQ ID NO: 30172 - RNA, 19 nt, Artificial Sequence
  Synthetic
uuuuguucaugucccacug

SEQ ID NO: 30173 - RNA, 20 nt, Artificial Sequence
  Synthetic
cuuuuguucaugucccacug

SEQ ID NO: 30174 - RNA, 21 nt, Artificial Sequence
  Synthetic
ucuuuuguucaugucccacug

SEQ ID NO: 30175 - RNA, 22 nt, Artificial Sequence
  Synthetic
aucuuuuguucaugucccacug

SEQ ID NO: 30176 - RNA, 23 nt, Artificial Sequence
  Synthetic
caucuuuuguucaugucccacug

SEQ ID NO: 30177 - RNA, 24 nt, Artificial Sequence
  Synthetic
ucaucuuuuguucaugucccacug

SEQ ID NO: 30178 - RNA, 18 nt, Artificial Sequence
  Synthetic
cuguguauuuaaggacug

SEQ ID NO: 30179 - RNA, 19 nt, Artificial Sequence
  Synthetic
acuguguauuuaaggacug

SEQ ID NO: 30180 - RNA, 20 nt, Artificial Sequence
  Synthetic
gacuguguauuuaaggacug

SEQ ID NO: 30181 - RNA, 21 nt, Artificial Sequence
  Synthetic
agacuguguauuuaaggacug

SEQ ID NO: 30182 - RNA, 22 nt, Artificial Sequence
  Synthetic
aagacuguguauuuaaggacug

SEQ ID NO: 30183 - RNA, 23 nt, Artificial Sequence
  Synthetic
aaagacuguguauuuaaggacug

SEQ ID NO: 30184 - RNA, 24 nt, Artificial Sequence
  Synthetic
caaagacuguguauuuaaggacug

SEQ ID NO: 30185 - RNA, 18 nt, Artificial Sequence
  Synthetic
uguuuucaauccugacug

SEQ ID NO: 30186 - RNA, 19 nt, Artificial Sequence
  Synthetic
cuguuuucaauccugacug

SEQ ID NO: 30187 - RNA, 20 nt, Artificial Sequence
  Synthetic
ccuguuuucaauccugacug

SEQ ID NO: 30188 - RNA, 21 nt, Artificial Sequence
  Synthetic
accuguuuucaauccugacug

SEQ ID NO: 30189 - RNA, 22 nt, Artificial Sequence
  Synthetic
uaccuguuuucaauccugacug

SEQ ID NO: 30190 - RNA, 23 nt, Artificial Sequence
  Synthetic
  misc_feature (1)..(1): n is a, c, g, or u
nuaccuguuuucaauccugacug

SEQ ID NO: 30191 - RNA, 24 nt, Artificial Sequence
  Synthetic
  misc_feature (2)..(2): n is a, c, g, or u
unuaccuguuuucaauccugacug

SEQ ID NO: 30192 - RNA, 18 nt, Artificial Sequence
  Synthetic
cucugccgauccauacug

SEQ ID NO: 30193 - RNA, 19 nt, Artificial Sequence
  Synthetic
ccucugccgauccauacug

SEQ ID NO: 30194 - RNA, 20 nt, Artificial Sequence
  Synthetic
uccucugccgauccauacug

SEQ ID NO: 30195 - RNA, 21 nt, Artificial Sequence
  Synthetic
cuccucugccgauccauacug

SEQ ID NO: 30196 - RNA, 22 nt, Artificial Sequence
  Synthetic
gcuccucugccgauccauacug

SEQ ID NO: 30197 - RNA, 23 nt, Artificial Sequence
  Synthetic
ggcuccucugccgauccauacug

SEQ ID NO: 30198 - RNA, 24 nt, Artificial Sequence
  Synthetic
uggcuccucugccgauccauacug

SEQ ID NO: 30199 - RNA, 18 nt, Artificial Sequence
  Synthetic
caccagcacgggacccug

SEQ ID NO: 30200 - RNA, 19 nt, Artificial Sequence
  Synthetic
ccaccagcacgggacccug

SEQ ID NO: 30201 - RNA, 20 nt, Artificial Sequence
  Synthetic
accaccagcacgggacccug

SEQ ID NO: 30202 - RNA, 21 nt, Artificial Sequence
  Synthetic
aaccaccagcacgggacccug

SEQ ID NO: 30203 - RNA, 22 nt, Artificial Sequence
  Synthetic
caaccaccagcacgggacccug

SEQ ID NO: 30204 - RNA, 23 nt, Artificial Sequence
  Synthetic
acaaccaccagcacgggacccug

SEQ ID NO: 30205 - RNA, 24 nt, Artificial Sequence
  Synthetic
uacaaccaccagcacgggacccug

SEQ ID NO: 30206 - RNA, 18 nt, Artificial Sequence
  Synthetic
gcugccaacuggauccug

SEQ ID NO: 30207 - RNA, 19 nt, Artificial Sequence
  Synthetic
ugcugccaacuggauccug

SEQ ID NO: 30208 - RNA, 20 nt, Artificial Sequence
  Synthetic
gugcugccaacuggauccug

SEQ ID NO: 30209 - RNA, 21 nt, Artificial Sequence
  Synthetic
ugugcugccaacuggauccug

SEQ ID NO: 30210 - RNA, 22 nt, Artificial Sequence
  Synthetic
  misc_feature (1)..(1): n is a, c, g, or u
nugugcugccaacuggauccug

SEQ ID NO: 30211 - RNA, 23 nt, Artificial Sequence
  Synthetic
  misc_feature (2)..(2): n is a, c, g, or u
gnugugcugccaacuggauccug

SEQ ID NO: 30212 - RNA, 24 nt, Artificial Sequence
  Synthetic
  misc_feature (3)..(3): n is a, c, g, or u
ggnugugcugccaacuggauccug

SEQ ID NO: 30213 - RNA, 18 nt, Artificial Sequence
  Synthetic
uaccacccggguguccug

SEQ ID NO: 30214 - RNA, 19 nt, Artificial Sequence
  Synthetic
guaccacccggguguccug

SEQ ID NO: 30215 - RNA, 20 nt, Artificial Sequence
  Synthetic
gguaccacccggguguccug

SEQ ID NO: 30216 - RNA, 21 nt, Artificial Sequence
  Synthetic
ggguaccacccggguguccug

SEQ ID NO: 30217 - RNA, 22 nt, Artificial Sequence
  Synthetic
gggguaccacccggguguccug

SEQ ID NO: 30218 - RNA, 23 nt, Artificial Sequence
  Synthetic
agggguaccacccggguguccug

SEQ ID NO: 30219 - RNA, 24 nt, Artificial Sequence
  Synthetic
uagggguaccacccggguguccug

SEQ ID NO: 30220 - RNA, 18 nt, Artificial Sequence
  Synthetic
  misc_feature (7)..(7): n is a, c, g, or u
gaugacnuuggcuuccug

SEQ ID NO: 30221 - RNA, 19 nt, Artificial Sequence
  Synthetic
  misc_feature (8)..(8): n is a, c, g, or u
ugaugacnuuggcuuccug

SEQ ID NO: 30222 - RNA, 20 nt, Artificial Sequence
  Synthetic
  misc_feature (9)..(9): n is a, c, g, or u
uugaugacnuuggcuuccug

SEQ ID NO: 30223 - RNA, 21 nt, Artificial Sequence
  Synthetic
  misc_feature (10)..(10): n is a, c, g, or u
guugaugacnuuggcuuccug

SEQ ID NO: 30224 - RNA, 22 nt, Artificial Sequence
  Synthetic
  misc_feature (11)..(11): n is a, c, g, or u
aguugaugacnuuggcuuccug

SEQ ID NO: 30225 - RNA, 23 nt, Artificial Sequence
  Synthetic
  misc_feature (12)..(12): n is a, c, g, or u
gaguugaugacnuuggcuuccug

SEQ ID NO: 30226 - RNA, 24 nt, Artificial Sequence
  Synthetic
  misc_feature (13)..(13): n is a, c, g, or u
ugaguugaugacnuuggcuuccug

SEQ ID NO: 30227 - RNA, 18 nt, Artificial Sequence
  Synthetic
accuccuucccauggcug

SEQ ID NO: 30228 - RNA, 19 nt, Artificial Sequence
  Synthetic
caccuccuucccauggcug

SEQ ID NO: 30229 - RNA, 20 nt, Artificial Sequence
  Synthetic
acaccuccuucccauggcug

SEQ ID NO: 30230 - RNA, 21 nt, Artificial Sequence
  Synthetic
uacaccuccuucccauggcug

SEQ ID NO: 30231 - RNA, 22 nt, Artificial Sequence
  Synthetic
guacaccuccuucccauggcug

SEQ ID NO: 30232 - RNA, 23 nt, Artificial Sequence
  Synthetic
aguacaccuccuucccauggcug

SEQ ID NO: 30233 - RNA, 24 nt, Artificial Sequence
  Synthetic
aaguacaccuccuucccauggcug

SEQ ID NO: 30234 - RNA, 18 nt, Artificial Sequence
  Synthetic
uauugggggccaaaucug

SEQ ID NO: 30235 - RNA, 19 nt, Artificial Sequence
  Synthetic
guauugggggccaaaucug

SEQ ID NO: 30236 - RNA, 20 nt, Artificial Sequence
  Synthetic
gguauugggggccaaaucug

SEQ ID NO: 30237 - RNA, 21 nt, Artificial Sequence
  Synthetic
ugguauugggggccaaaucug

SEQ ID NO: 30238 - RNA, 22 nt, Artificial Sequence
  Synthetic
  misc_feature (1)..(1): n is a, c, g, or u
nugguauugggggccaaaucug

SEQ ID NO: 30239 - RNA, 23 nt, Artificial Sequence
  Synthetic
  misc_feature (2)..(2): n is a, c, g, or u
unugguauugggggccaaaucug

SEQ ID NO: 30240 - RNA, 24 nt, Artificial Sequence
  Synthetic
  misc_feature (3)..(3): n is a, c, g, or u
aunugguauugggggccaaaucug

SEQ ID NO: 30241 - RNA, 18 nt, Artificial Sequence
  Synthetic
cugacuucuucccgucug

SEQ ID NO: 30242 - RNA, 19 nt, Artificial Sequence
  Synthetic
ucugacuucuucccgucug

SEQ ID NO: 30243 - RNA, 20 nt, Artificial Sequence
  Synthetic
uucugacuucuucccgucug

SEQ ID NO: 30244 - RNA, 21 nt, Artificial Sequence
  Synthetic
cuucugacuucuucccgucug

SEQ ID NO: 30245 - RNA, 22 nt, Artificial Sequence
  Synthetic
ccuucugacuucuucccgucug

SEQ ID NO: 30246 - RNA, 23 nt, Artificial Sequence
  Synthetic
gccuucugacuucuucccgucug

SEQ ID NO: 30247 - RNA, 24 nt, Artificial Sequence
  Synthetic
ugccuucugacuucuucccgucug

SEQ ID NO: 30248 - RNA, 18 nt, Artificial Sequence
  Synthetic
gcaaacaagguaggagug

SEQ ID NO: 30249 - RNA, 19 nt, Artificial Sequence
  Synthetic
ggcaaacaagguaggagug

SEQ ID NO: 30250 - RNA, 20 nt, Artificial Sequence
  Synthetic
uggcaaacaagguaggagug

SEQ ID NO: 30251 - RNA, 21 nt, Artificial Sequence
  Synthetic
auggcaaacaagguaggagug

SEQ ID NO: 30252 - RNA, 22 nt, Artificial Sequence
  Synthetic
aauggcaaacaagguaggagug

SEQ ID NO: 30253 - RNA, 23 nt, Artificial Sequence
  Synthetic
caauggcaaacaagguaggagug

SEQ ID NO: 30254 - RNA, 24 nt, Artificial Sequence
  Synthetic
ccaauggcaaacaagguaggagug

SEQ ID NO: 30255 - RNA, 18 nt, Artificial Sequence
  Synthetic
uuucgcaaacuucccgug

SEQ ID NO: 30256 - RNA, 19 nt, Artificial Sequence
  Synthetic
cuuucgcaaacuucccgug

SEQ ID NO: 30257 - RNA, 20 nt, Artificial Sequence
  Synthetic
gcuuucgcaaacuucccgug

SEQ ID NO: 30258 - RNA, 18 nt, Artificial Sequence
  Synthetic
  misc_feature (2)..(2): n is a, c, g, or u
anagagucuagacucgug

SEQ ID NO: 30259 - RNA, 19 nt, Artificial Sequence
  Synthetic
  misc_feature (3)..(3): n is a, c, g, or u
canagagucuagacucgug

SEQ ID NO: 30260 - RNA, 20 nt, Artificial Sequence
  Synthetic
  misc_feature (4)..(4): n is a, c, g, or u
ccanagagucuagacucgug

SEQ ID NO: 30261 - RNA, 21 nt, Artificial Sequence
  Synthetic
  misc_feature (5)..(5): n is a, c, g, or u
accanagagucuagacucgug

SEQ ID NO: 30262 - RNA, 22 nt, Artificial Sequence
  Synthetic
  misc_feature (6)..(6): n is a, c, g, or u
uaccanagagucuagacucgug

SEQ ID NO: 30263 - RNA, 23 nt, Artificial Sequence
  Synthetic
  misc_feature (7)..(7): n is a, c, g, or u
auaccanagagucuagacucgug

SEQ ID NO: 30264 - RNA, 24 nt, Artificial Sequence
  Synthetic
  misc_feature (8)..(8): n is a, c, g, or u
aauaccanagagucuagacucgug

SEQ ID NO: 30265 - RNA, 18 nt, Artificial Sequence
  Synthetic
ccuuggacucauaaggug

SEQ ID NO: 30266 - RNA, 19 nt, Artificial Sequence
  Synthetic
uccuuggacucauaaggug

SEQ ID NO: 30267 - RNA, 20 nt, Artificial Sequence
  Synthetic
uuccuuggacucauaaggug

SEQ ID NO: 30268 - RNA, 21 nt, Artificial Sequence
  Synthetic
auuccuuggacucauaaggug

SEQ ID NO: 30269 - RNA, 22 nt, Artificial Sequence
  Synthetic
uauuccuuggacucauaaggug

SEQ ID NO: 30270 - RNA, 23 nt, Artificial Sequence
  Synthetic
guauuccuuggacucauaaggug

SEQ ID NO: 30271 - RNA, 24 nt, Artificial Sequence
  Synthetic
aguauuccuuggacucauaaggug

SEQ ID NO: 30272 - RNA, 18 nt, Artificial Sequence
  Synthetic
gcaauuuguucaguggug

SEQ ID NO: 30273 - RNA, 19 nt, Artificial Sequence
  Synthetic
ugcaauuuguucaguggug

SEQ ID NO: 30274 - RNA, 20 nt, Artificial Sequence
  Synthetic
gugcaauuuguucaguggug

SEQ ID NO: 30275 - RNA, 21 nt, Artificial Sequence
  Synthetic
agugcaauuuguucaguggug

SEQ ID NO: 30276 - RNA, 22 nt, Artificial Sequence
  Synthetic
uagugcaauuuguucaguggug

SEQ ID NO: 30277 - RNA, 23 nt, Artificial Sequence
  Synthetic
cuagugcaauuuguucaguggug

SEQ ID NO: 30278 - RNA, 24 nt, Artificial Sequence
  Synthetic
acuagugcaauuuguucaguggug

SEQ ID NO: 30279 - RNA, 18 nt, Artificial Sequence
  Synthetic
ccucaggaacauauugug

SEQ ID NO: 30280 - RNA, 19 nt, Artificial Sequence
  Synthetic
gccucaggaacauauugug

SEQ ID NO: 30281 - RNA, 20 nt, Artificial Sequence
  Synthetic
ugccucaggaacauauugug

SEQ ID NO: 30282 - RNA, 21 nt, Artificial Sequence
  Synthetic
uugccucaggaacauauugug

SEQ ID NO: 30283 - RNA, 22 nt, Artificial Sequence
  Synthetic
  misc_feature (1)..(1): n is a, c, g, or u
nuugccucaggaacauauugug

SEQ ID NO: 30284 - RNA, 23 nt, Artificial Sequence
  Synthetic
  misc_feature (2)..(2): n is a, c, g, or u
cnuugccucaggaacauauugug

SEQ ID NO: 30285 - RNA, 24 nt, Artificial Sequence
  Synthetic
  misc_feature (3)..(3): n is a, c, g, or u
acnuugccucaggaacauauugug

SEQ ID NO: 30286 - RNA, 18 nt, Artificial Sequence
  Synthetic
  misc_feature (1)..(1): n is a, c, g, or u
nuauuuacauacuuugug

SEQ ID NO: 30287 - RNA, 19 nt, Artificial Sequence
  Synthetic
  misc_feature (2)..(2): n is a, c, g, or u
anuauuuacauacuuugug

SEQ ID NO: 30288 - RNA, 20 nt, Artificial Sequence
  Synthetic
  misc_feature (3)..(3): n is a, c, g, or u
canuauuuacauacuuugug

SEQ ID NO: 30289 - RNA, 21 nt, Artificial Sequence
  Synthetic
  misc_feature (4)..(4): n is a, c, g, or u
acanuauuuacauacuuugug

SEQ ID NO: 30290 - RNA, 22 nt, Artificial Sequence
  Synthetic
  misc_feature (5)..(5): n is a, c, g, or u
gacanuauuuacauacuuugug

SEQ ID NO: 30291 - RNA, 23 nt, Artificial Sequence
  Synthetic
  misc_feature (6)..(6): n is a, c, g, or u
agacanuauuuacauacuuugug

SEQ ID NO: 30292 - RNA, 24 nt, Artificial Sequence
  Synthetic
  misc_feature (7)..(7): n is a, c, g, or u
uagacanuauuuacauacuuugug

SEQ ID NO: 30293 - RNA, 18 nt, Artificial Sequence
  Synthetic
caggcaagcuauuuugug

SEQ ID NO: 30294 - RNA, 19 nt, Artificial Sequence
  Synthetic
ucaggcaagcuauuuugug

SEQ ID NO: 30295 - RNA, 20 nt, Artificial Sequence
  Synthetic
cucaggcaagcuauuuugug

SEQ ID NO: 30296 - RNA, 21 nt, Artificial Sequence
  Synthetic
ucucaggcaagcuauuuugug

SEQ ID NO: 30297 - RNA, 22 nt, Artificial Sequence
  Synthetic
cucucaggcaagcuauuuugug

SEQ ID NO: 30298 - RNA, 23 nt, Artificial Sequence
  Synthetic
gcucucaggcaagcuauuuugug

SEQ ID NO: 30299 - RNA, 24 nt, Artificial Sequence
  Synthetic
ugcucucaggcaagcuauuuugug

SEQ ID NO: 30300 - RNA, 18 nt, Artificial Sequence
  Synthetic
ccgugaauagacccauug

SEQ ID NO: 30301 - RNA, 19 nt, Artificial Sequence
  Synthetic
cccgugaauagacccauug

SEQ ID NO: 30302 - RNA, 20 nt, Artificial Sequence
  Synthetic
ucccgugaauagacccauug

SEQ ID NO: 30303 - RNA, 21 nt, Artificial Sequence
  Synthetic
uucccgugaauagacccauug

SEQ ID NO: 30304 - RNA, 22 nt, Artificial Sequence
  Synthetic
cuucccgugaauagacccauug

SEQ ID NO: 30305 - RNA, 23 nt, Artificial Sequence
  Synthetic
acuucccgugaauagacccauug

SEQ ID NO: 30306 - RNA, 24 nt, Artificial Sequence
  Synthetic
aacuucccgugaauagacccauug

SEQ ID NO: 30307 - RNA, 18 nt, Artificial Sequence
  Synthetic
ccuccaagcugugccuug

SEQ ID NO: 30308 - RNA, 19 nt, Artificial Sequence
  Synthetic
gccuccaagcugugccuug

SEQ ID NO: 30309 - RNA, 20 nt, Artificial Sequence
  Synthetic
agccuccaagcugugccuug

SEQ ID NO: 30310 - RNA, 21 nt, Artificial Sequence
  Synthetic
aagccuccaagcugugccuug

SEQ ID NO: 30311 - RNA, 22 nt, Artificial Sequence
  Synthetic
caagccuccaagcugugccuug

SEQ ID NO: 30312 - RNA, 23 nt, Artificial Sequence
  Synthetic
ucaagccuccaagcugugccuug

SEQ ID NO: 30313 - RNA, 24 nt, Artificial Sequence
  Synthetic
uucaagccuccaagcugugccuug

SEQ ID NO: 30314 - RNA, 18 nt, Artificial Sequence
  Synthetic
aaaccugcaccacucuug

SEQ ID NO: 30315 - RNA, 19 nt, Artificial Sequence
  Synthetic
aaaaccugcaccacucuug

SEQ ID NO: 30316 - RNA, 20 nt, Artificial Sequence
  Synthetic
caaaaccugcaccacucuug

SEQ ID NO: 30317 - RNA, 21 nt, Artificial Sequence
  Synthetic
gcaaaaccugcaccacucuug

SEQ ID NO: 30318 - RNA, 22 nt, Artificial Sequence
  Synthetic
ugcaaaaccugcaccacucuug

SEQ ID NO: 30319 - RNA, 23 nt, Artificial Sequence
  Synthetic
cugcaaaaccugcaccacucuug

SEQ ID NO: 30320 - RNA, 24 nt, Artificial Sequence
  Synthetic
ccugcaaaaccugcaccacucuug

SEQ ID NO: 30321 - RNA, 18 nt, Artificial Sequence
  Synthetic
  misc_feature (7)..(7): n is a, c, g, or u
uuauaunauugggaguug

SEQ ID NO: 30322 - RNA, 19 nt, Artificial Sequence
  Synthetic
  misc_feature (8)..(8): n is a, c, g, or u
guuauaunauugggaguug

SEQ ID NO: 30323 - RNA, 20 nt, Artificial Sequence
  Synthetic
  misc_feature (9)..(9): n is a, c, g, or u
gguuauaunauugggaguug

SEQ ID NO: 30324 - RNA, 21 nt, Artificial Sequence
  Synthetic
  misc_feature (10)..(10): n is a, c, g, or u
ggguuauaunauugggaguug

SEQ ID NO: 30325 - RNA, 22 nt, Artificial Sequence
  Synthetic
  misc_feature (11)..(11): n is a, c, g, or u
uggguuauaunauugggaguug

SEQ ID NO: 30326 - RNA, 23 nt, Artificial Sequence
  Synthetic
  misc_feature (12)..(12): n is a, c, g, or u
auggguuauaunauugggaguug

SEQ ID NO: 30327 - RNA, 24 nt, Artificial Sequence
  Synthetic
  misc_feature (13)..(13): n is a, c, g, or u
uauggguuauaunauugggaguug

SEQ ID NO: 30328 - RNA, 18 nt, Artificial Sequence
  Synthetic
ugaaccuuuaccccguug

SEQ ID NO: 30329 - RNA, 19 nt, Artificial Sequence
  Synthetic
  misc_feature (1)..(1): n is a, c, g, or u
nugaaccuuuaccccguug

SEQ ID NO: 30330 - RNA, 20 nt, Artificial Sequence
  Synthetic
  misc_feature (2)..(2): n is a, c, g, or u
cnugaaccuuuaccccguug

SEQ ID NO: 30331 - RNA, 21 nt, Artificial Sequence
  Synthetic
  misc_feature (3)..(3): n is a, c, g, or u
acnugaaccuuuaccccguug

SEQ ID NO: 30332 - RNA, 22 nt, Artificial Sequence
  Synthetic
  misc_feature (4)..(4): n is a, c, g, or u
uacnugaaccuuuaccccguug

SEQ ID NO: 30333 - RNA, 23 nt, Artificial Sequence
  Synthetic
  misc_feature (5)..(5): n is a, c, g, or u
auacnugaaccuuuaccccguug

SEQ ID NO: 30334 - RNA, 24 nt, Artificial Sequence
  Synthetic
  misc_feature (6)..(6): n is a, c, g, or u
aauacnugaaccuuuaccccguug

SEQ ID NO: 30335 - RNA, 18 nt, Artificial Sequence
  Synthetic
uuccggagacuacuguug

SEQ ID NO: 30336 - RNA, 19 nt, Artificial Sequence
  Synthetic
cuuccggagacuacuguug

SEQ ID NO: 30337 - RNA, 20 nt, Artificial Sequence
  Synthetic
acuuccggagacuacuguug

SEQ ID NO: 30338 - RNA, 21 nt, Artificial Sequence
  Synthetic
cacuuccggagacuacuguug

SEQ ID NO: 30339 - RNA, 22 nt, Artificial Sequence
  Synthetic
acacuuccggagacuacuguug

SEQ ID NO: 30340 - RNA, 23 nt, Artificial Sequence
  Synthetic
aacacuuccggagacuacuguug

SEQ ID NO: 30341 - RNA, 24 nt, Artificial Sequence
  Synthetic
caacacuuccggagacuacuguug

SEQ ID NO: 30342 - RNA, 18 nt, Artificial Sequence
  Synthetic
gcgguguguuucuuguug

SEQ ID NO: 30343 - RNA, 19 nt, Artificial Sequence
  Synthetic
ggcgguguguuucuuguug

SEQ ID NO: 30344 - RNA, 20 nt, Artificial Sequence
  Synthetic
aggcgguguguuucuuguug

SEQ ID NO: 30345 - RNA, 21 nt, Artificial Sequence
  Synthetic
caggcgguguguuucuuguug

SEQ ID NO: 30346 - RNA, 22 nt, Artificial Sequence
  Synthetic
acaggcgguguguuucuuguug

SEQ ID NO: 30347 - RNA, 23 nt, Artificial Sequence
  Synthetic
uacaggcgguguguuucuuguug

SEQ ID NO: 30348 - RNA, 24 nt, Artificial Sequence
  Synthetic
uuacaggcgguguguuucuuguug

SEQ ID NO: 30349 - RNA, 18 nt, Artificial Sequence
  Synthetic
  misc_feature (5)..(5): n is a, c, g, or u
uuucnugccuuacauuug

SEQ ID NO: 30350 - RNA, 19 nt, Artificial Sequence
  Synthetic
  misc_feature (6)..(6): n is a, c, g, or u
auuucnugccuuacauuug

SEQ ID NO: 30351 - RNA, 20 nt, Artificial Sequence
  Synthetic
  misc_feature (1)..(1): n is a, c, g, or u
  misc_feature (7)..(7): n is a, c, g, or u
nauuucnugccuuacauuug

SEQ ID NO: 30352 - RNA, 21 nt, Artificial Sequence
  Synthetic
  misc_feature (2)..(2): n is a, c, g, or u
  misc_feature (8)..(8): n is a, c, g, or u
anauuucnugccuuacauuug

SEQ ID NO: 30353 - RNA, 22 nt, Artificial Sequence
  Synthetic
  misc_feature (3)..(3): n is a, c, g, or u
  misc_feature (9)..(9): n is a, c, g, or u
canauuucnugccuuacauuug

SEQ ID NO: 30354 - RNA, 23 nt, Artificial Sequence
  Synthetic
  misc_feature (4)..(4): n is a, c, g, or u
  misc_feature (10)..(10): n is a, c, g, or u
ucanauuucnugccuuacauuug

SEQ ID NO: 30355 - RNA, 24 nt, Artificial Sequence
  Synthetic
  misc_feature (5)..(5): n is a, c, g, or u
  misc_feature (11)..(11): n is a, c, g, or u
uucanauuucnugccuuacauuug

SEQ ID NO: 30356 - RNA, 18 nt, Artificial Sequence
  Synthetic
  misc_feature (3)..(3): n is a, c, g, or u
canuauuuacauacuuug

SEQ ID NO: 30357 - RNA, 19 nt, Artificial Sequence
  Synthetic
  misc_feature (4)..(4): n is a, c, g, or u
acanuauuuacauacuuug

SEQ ID NO: 30358 - RNA, 20 nt, Artificial Sequence
  Synthetic
  misc_feature (5)..(5): n is a, c, g, or u
gacanuauuuacauacuuug

SEQ ID NO: 30359 - RNA, 21 nt, Artificial Sequence
  Synthetic
  misc_feature (6)..(6): n is a, c, g, or u
agacanuauuuacauacuuug

SEQ ID NO: 30360 - RNA, 22 nt, Artificial Sequence
  Synthetic
  misc_feature (7)..(7): n is a, c, g, or u
uagacanuauuuacauacuuug

SEQ ID NO: 30361 - RNA, 23 nt, Artificial Sequence
  Synthetic
  misc_feature (8)..(8): n is a, c, g, or u
cuagacanuauuuacauacuuug

SEQ ID NO: 30362 - RNA, 24 nt, Artificial Sequence
  Synthetic
  misc_feature (9)..(9): n is a, c, g, or u
acuagacanuauuuacauacuuug

SEQ ID NO: 30363 - RNA, 18 nt, Artificial Sequence
  Synthetic
acuaaauacuucccuuug

SEQ ID NO: 30364 - RNA, 19 nt, Artificial Sequence
  Synthetic
uacuaaauacuucccuuug

SEQ ID NO: 30365 - RNA, 20 nt, Artificial Sequence
  Synthetic
uuacuaaauacuucccuuug

SEQ ID NO: 30366 - RNA, 21 nt, Artificial Sequence
  Synthetic
guuacuaaauacuucccuuug

SEQ ID NO: 30367 - RNA, 22 nt, Artificial Sequence
  Synthetic
aguuacuaaauacuucccuuug

SEQ ID NO: 30368 - RNA, 23 nt, Artificial Sequence
  Synthetic
aaguuacuaaauacuucccuuug

SEQ ID NO: 30369 - RNA, 24 nt, Artificial Sequence
  Synthetic
aaaguuacuaaauacuucccuuug

SEQ ID NO: 30370 - RNA, 18 nt, Artificial Sequence
  Synthetic
  misc_feature (18)..(18): n is a, c, g, or u
aauuaugucaauacuaan

SEQ ID NO: 30371 - RNA, 19 nt, Artificial Sequence
  Synthetic
  misc_feature (19)..(19): n is a, c, g, or u
uaauuaugucaauacuaan

SEQ ID NO: 30372 - RNA, 20 nt, Artificial Sequence
  Synthetic
  misc_feature (20)..(20): n is a, c, g, or u
uuaauuaugucaauacuaan

SEQ ID NO: 30373 - RNA, 21 nt, Artificial Sequence
  Synthetic
  misc_feature (21)..(21): n is a, c, g, or u
guuaauuaugucaauacuaan

SEQ ID NO: 30374 - RNA, 22 nt, Artificial Sequence
  Synthetic
  misc_feature (22)..(22): n is a, c, g, or u
aguuaauuaugucaauacuaan

SEQ ID NO: 30375 - RNA, 23 nt, Artificial Sequence
  Synthetic
  misc_feature (23)..(23): n is a, c, g, or u
uaguuaauuaugucaauacuaan

SEQ ID NO: 30376 - RNA, 24 nt, Artificial Sequence
  Synthetic
  misc_feature (24)..(24): n is a, c, g, or u
guaguuaauuaugucaauacuaan

SEQ ID NO: 30377 - RNA, 18 nt, Artificial Sequence
  Synthetic
  misc_feature (12)..(12): n is a, c, g, or u
  misc_feature (18)..(18): n is a, c, g, or u
gucaauacuaanaugggn

SEQ ID NO: 30378 - RNA, 19 nt, Artificial Sequence
  Synthetic
  misc_feature (13)..(13): n is a, c, g, or u
  misc_feature (19)..(19): n is a, c, g, or u
ugucaauacuaanaugggn

SEQ ID NO: 30379 - RNA, 20 nt, Artificial Sequence
  Synthetic
  misc_feature (14)..(14): n is a, c, g, or u
  misc_feature (20)..(20): n is a, c, g, or u
augucaauacuaanaugggn

SEQ ID NO: 30380 - RNA, 21 nt, Artificial Sequence
  Synthetic
  misc_feature (15)..(15): n is a, c, g, or u
  misc_feature (21)..(21): n is a, c, g, or u
uaugucaauacuaanaugggn

SEQ ID NO: 30381 - RNA, 22 nt, Artificial Sequence
  Synthetic
  misc_feature (16)..(16): n is a, c, g, or u
  misc_feature (22)..(22): n is a, c, g, or u
uuaugucaauacuaanaugggn

SEQ ID NO: 30382 - RNA, 23 nt, Artificial Sequence
  Synthetic
  misc_feature (17)..(17): n is a, c, g, or u
  misc_feature (23)..(23): n is a, c, g, or u
auuaugucaauacuaanaugggn

SEQ ID NO: 30383 - RNA, 24 nt, Artificial Sequence
  Synthetic
  misc_feature (18)..(18): n is a, c, g, or u
  misc_feature (24)..(24): n is a, c, g, or u
aauuaugucaauacuaanaugggn

SEQ ID NO: 30384 - RNA, 18 nt, Artificial Sequence
  Synthetic
  misc_feature (18)..(18): n is a, c, g, or u
gaagacuggggacccugn

SEQ ID NO: 30385 - RNA, 19 nt, Artificial Sequence
  Synthetic
  misc_feature (19)..(19): n is a, c, g, or u
cgaagacuggggacccugn

SEQ ID NO: 30386 - RNA, 20 nt, Artificial Sequence
  Synthetic
  misc_feature (20)..(20): n is a, c, g, or u
ucgaagacuggggacccugn

SEQ ID NO: 30387 - RNA, 21 nt, Artificial Sequence
  Synthetic
  misc_feature (21)..(21): n is a, c, g, or u
cucgaagacuggggacccugn

SEQ ID NO: 30388 - RNA, 22 nt, Artificial Sequence
  Synthetic
  misc_feature (22)..(22): n is a, c, g, or u
ucucgaagacuggggacccugn

SEQ ID NO: 30389 - RNA, 23 nt, Artificial Sequence
  Synthetic
  misc_feature (23)..(23): n is a, c, g, or u
uucucgaagacuggggacccugn

SEQ ID NO: 30390 - RNA, 24 nt, Artificial Sequence
  Synthetic
  misc_feature (24)..(24): n is a, c, g, or u
cuucucgaagacuggggacccugn

SEQ ID NO: 30391 - RNA, 18 nt, Artificial Sequence
  Synthetic
  misc_feature (18)..(18): n is a, c, g, or u
cacuuuauggguuauaun

SEQ ID NO: 30392 - RNA, 19 nt, Artificial Sequence
  Synthetic
  misc_feature (1)..(1): n is a, c, g, or u
  misc_feature (19)..(19): n is a, c, g, or u
ncacuuuauggguuauaun

SEQ ID NO: 30393 - RNA, 20 nt, Artificial Sequence
  Synthetic
  misc_feature (2)..(2): n is a, c, g, or u
  misc_feature (20)..(20): n is a, c, g, or u
uncacuuuauggguuauaun

SEQ ID NO: 30394 - RNA, 21 nt, Artificial Sequence
  Synthetic
  misc_feature (1)..(1): n is a, c, g, or u
  misc_feature (3)..(3): n is a, c, g, or u
  misc_feature (21)..(21): n is a, c, g, or u
nuncacuuuauggguuauaun

SEQ ID NO: 30395 - RNA, 22 nt, Artificial Sequence
  Synthetic
  misc_feature (2)..(2): n is a, c, g, or u
  misc_feature (4)..(4): n is a, c, g, or u
  misc_feature (22)..(22): n is a, c, g, or u
cnuncacuuuauggguuauaun

SEQ ID NO: 30396 - RNA, 23 nt, Artificial Sequence
  Synthetic
  misc_feature (3)..(3): n is a, c, g, or u
  misc_feature (5)..(5): n is a, c, g, or u
  misc_feature (23)..(23): n is a, c, g, or u
ccnuncacuuuauggguuauaun

SEQ ID NO: 30397 - RNA, 24 nt, Artificial Sequence
  Synthetic
  misc_feature (4)..(4): n is a, c, g, or u
  misc_feature (6)..(6): n is a, c, g, or u
  misc_feature (24)..(24): n is a, c, g, or u
uccnuncacuuuauggguuauaun

SEQ ID NO: 30398 - RNA, 18 nt, Artificial Sequence
  Synthetic
  misc_feature (18)..(18): n is a, c, g, or u
uuuggaagagaaacugun

SEQ ID NO: 30399 - RNA, 19 nt, Artificial Sequence
  Synthetic
  misc_feature (19)..(19): n is a, c, g, or u
auuuggaagagaaacugun

SEQ ID NO: 30400 - RNA, 20 nt, Artificial Sequence
  Synthetic
  misc_feature (20)..(20): n is a, c, g, or u
cauuuggaagagaaacugun

SEQ ID NO: 30401 - RNA, 21 nt, Artificial Sequence
  Synthetic
  misc_feature (21)..(21): n is a, c, g, or u
acauuuggaagagaaacugun

SEQ ID NO: 30402 - RNA, 22 nt, Artificial Sequence
  Synthetic
  misc_feature (22)..(22): n is a, c, g, or u
uacauuuggaagagaaacugun

SEQ ID NO: 30403 - RNA, 23 nt, Artificial Sequence
  Synthetic
  misc_feature (23)..(23): n is a, c, g, or u
uuacauuuggaagagaaacugun

SEQ ID NO: 30404 - RNA, 24 nt, Artificial Sequence
  Synthetic
  misc_feature (24)..(24): n is a, c, g, or u
cuuacauuuggaagagaaacugun

SEQ ID NO: 30405 - RNA, 18 nt, Artificial Sequence
  Synthetic
  misc_feature (6)..(6): n is a, c, g, or u
aagaunugauacaaaaau

SEQ ID NO: 30406 - RNA, 19 nt, Artificial Sequence
  Synthetic
  misc_feature (7)..(7): n is a, c, g, or u
caagaunugauacaaaaau

SEQ ID NO: 30407 - RNA, 20 nt, Artificial Sequence
  Synthetic
  misc_feature (8)..(8): n is a, c, g, or u
ucaagaunugauacaaaaau

SEQ ID NO: 30408 - RNA, 21 nt, Artificial Sequence
  Synthetic
  misc_feature (9)..(9): n is a, c, g, or u
aucaagaunugauacaaaaau

SEQ ID NO: 30409 - RNA, 22 nt, Artificial Sequence
  Synthetic
  misc_feature (10)..(10): n is a, c, g, or u
caucaagaunugauacaaaaau

SEQ ID NO: 30410 - RNA, 23 nt, Artificial Sequence
  Synthetic
  misc_feature (11)..(11): n is a, c, g, or u
gcaucaagaunugauacaaaaau

SEQ ID NO: 30411 - RNA, 24 nt, Artificial Sequence
  Synthetic
  misc_feature (12)..(12): n is a, c, g, or u
ugcaucaagaunugauacaaaaau

SEQ ID NO: 30412 - RNA, 18 nt, Artificial Sequence
  Synthetic
acacagcuaaaacaaaau

SEQ ID NO: 30413 - RNA, 19 nt, Artificial Sequence
  Synthetic
aacacagcuaaaacaaaau

SEQ ID NO: 30414 - RNA, 20 nt, Artificial Sequence
  Synthetic
gaacacagcuaaaacaaaau

SEQ ID NO: 30415 - RNA, 21 nt, Artificial Sequence
  Synthetic
ugaacacagcuaaaacaaaau

SEQ ID NO: 30416 - RNA, 22 nt, Artificial Sequence
  Synthetic
uugaacacagcuaaaacaaaau

SEQ ID NO: 30417 - RNA, 23 nt, Artificial Sequence
  Synthetic
uuugaacacagcuaaaacaaaau

SEQ ID NO: 30418 - RNA, 24 nt, Artificial Sequence
  Synthetic
auuugaacacagcuaaaacaaaau

SEQ ID NO: 30419 - RNA, 18 nt, Artificial Sequence
  Synthetic
acauauugugcauaaaau

SEQ ID NO: 30420 - RNA, 19 nt, Artificial Sequence
  Synthetic
aacauauugugcauaaaau

SEQ ID NO: 30421 - RNA, 20 nt, Artificial Sequence
  Synthetic
gaacauauugugcauaaaau

SEQ ID NO: 30422 - RNA, 21 nt, Artificial Sequence
  Synthetic
ggaacauauugugcauaaaau

SEQ ID NO: 30423 - RNA, 22 nt, Artificial Sequence
  Synthetic
aggaacauauugugcauaaaau

SEQ ID NO: 30424 - RNA, 23 nt, Artificial Sequence
  Synthetic
caggaacauauugugcauaaaau

SEQ ID NO: 30425 - RNA, 24 nt, Artificial Sequence
  Synthetic
ucaggaacauauugugcauaaaau

SEQ ID NO: 30426 - RNA, 18 nt, Artificial Sequence
  Synthetic
ccacuauucagagcaaau

SEQ ID NO: 30427 - RNA, 19 nt, Artificial Sequence
  Synthetic
uccacuauucagagcaaau

SEQ ID NO: 30428 - RNA, 20 nt, Artificial Sequence
  Synthetic
auccacuauucagagcaaau

SEQ ID NO: 30429 - RNA, 21 nt, Artificial Sequence
  Synthetic
gauccacuauucagagcaaau

SEQ ID NO: 30430 - RNA, 22 nt, Artificial Sequence
  Synthetic
ggauccacuauucagagcaaau

SEQ ID NO: 30431 - RNA, 23 nt, Artificial Sequence
  Synthetic
uggauccacuauucagagcaaau

SEQ ID NO: 30432 - RNA, 24 nt, Artificial Sequence
  Synthetic
uuggauccacuauucagagcaaau

SEQ ID NO: 30433 - RNA, 18 nt, Artificial Sequence
  Synthetic
  misc_feature (14)..(14): n is a, c, g, or u
ggcccacucacuanaaau

SEQ ID NO: 30434 - RNA, 19 nt, Artificial Sequence
  Synthetic
  misc_feature (1)..(1): n is a, c, g, or u
  misc_feature (15)..(15): n is a, c, g, or u
nggcccacucacuanaaau

SEQ ID NO: 30435 - RNA, 20 nt, Artificial Sequence
  Synthetic
  misc_feature (2)..(2): n is a, c, g, or u
  misc_feature (16)..(16): n is a, c, g, or u
unggcccacucacuanaaau

SEQ ID NO: 30436 - RNA, 21 nt, Artificial Sequence
  Synthetic
  misc_feature (3)..(3): n is a, c, g, or u
  misc_feature (17)..(17): n is a, c, g, or u
gunggcccacucacuanaaau

SEQ ID NO: 30437 - RNA, 22 nt, Artificial Sequence
  Synthetic
  misc_feature (4)..(4): n is a, c, g, or u
  misc_feature (18)..(18): n is a, c, g, or u
ugunggcccacucacuanaaau

SEQ ID NO: 30438 - RNA, 23 nt, Artificial Sequence
  Synthetic
  misc_feature (5)..(5): n is a, c, g, or u
  misc_feature (19)..(19): n is a, c, g, or u
uugunggcccacucacuanaaau

SEQ ID NO: 30439 - RNA, 24 nt, Artificial Sequence
  Synthetic
  misc_feature (6)..(6): n is a, c, g, or u
  misc_feature (20)..(20): n is a, c, g, or u
uuugunggcccacucacuanaaau

SEQ ID NO: 30440 - RNA, 18 nt, Artificial Sequence
  Synthetic
ccuccugcuuccaccaau

SEQ ID NO: 30441 - RNA, 19 nt, Artificial Sequence
  Synthetic
accuccugcuuccaccaau

SEQ ID NO: 30442 - RNA, 20 nt, Artificial Sequence
  Synthetic
caccuccugcuuccaccaau

SEQ ID NO: 30443 - RNA, 21 nt, Artificial Sequence
  Synthetic
ccaccuccugcuuccaccaau

SEQ ID NO: 30444 - RNA, 22 nt, Artificial Sequence
  Synthetic
uccaccuccugcuuccaccaau

SEQ ID NO: 30445 - RNA, 23 nt, Artificial Sequence
  Synthetic
auccaccuccugcuuccaccaau

SEQ ID NO: 30446 - RNA, 24 nt, Artificial Sequence
  Synthetic
gauccaccuccugcuuccaccaau

SEQ ID NO: 30447 - RNA, 18 nt, Artificial Sequence
  Synthetic
caaggacaauuggccaau

SEQ ID NO: 30448 - RNA, 19 nt, Artificial Sequence
  Synthetic
acaaggacaauuggccaau

SEQ ID NO: 30449 - RNA, 20 nt, Artificial Sequence
  Synthetic
aacaaggacaauuggccaau

SEQ ID NO: 30450 - RNA, 21 nt, Artificial Sequence
  Synthetic
aaacaaggacaauuggccaau

SEQ ID NO: 30451 - RNA, 22 nt, Artificial Sequence
  Synthetic
caaacaaggacaauuggccaau

SEQ ID NO: 30452 - RNA, 23 nt, Artificial Sequence
  Synthetic
acaaacaaggacaauuggccaau

SEQ ID NO: 30453 - RNA, 24 nt, Artificial Sequence
  Synthetic
cacaaacaaggacaauuggccaau

SEQ ID NO: 30454 - RNA, 18 nt, Artificial Sequence
  Synthetic
guaguuaauuaugucaau

SEQ ID NO: 30455 - RNA, 19 nt, Artificial Sequence
  Synthetic
aguaguuaauuaugucaau

SEQ ID NO: 30456 - RNA, 20 nt, Artificial Sequence
  Synthetic
uaguaguuaauuaugucaau

SEQ ID NO: 30457 - RNA, 21 nt, Artificial Sequence
  Synthetic
cuaguaguuaauuaugucaau

SEQ ID NO: 30458 - RNA, 22 nt, Artificial Sequence
  Synthetic
ucuaguaguuaauuaugucaau

SEQ ID NO: 30459 - RNA, 23 nt, Artificial Sequence
  Synthetic
aucuaguaguuaauuaugucaau

SEQ ID NO: 30460 - RNA, 24 nt, Artificial Sequence
  Synthetic
gaucuaguaguuaauuaugucaau

SEQ ID NO: 30461 - RNA, 18 nt, Artificial Sequence
  Synthetic
  misc_feature (4)..(4): n is a, c, g, or u
acunuaccuguuuucaau

SEQ ID NO: 30462 - RNA, 19 nt, Artificial Sequence
  Synthetic
  misc_feature (5)..(5): n is a, c, g, or u
uacunuaccuguuuucaau

SEQ ID NO: 30463 - RNA, 20 nt, Artificial Sequence
  Synthetic
  misc_feature (6)..(6): n is a, c, g, or u
cuacunuaccuguuuucaau

SEQ ID NO: 30464 - RNA, 21 nt, Artificial Sequence
  Synthetic
  misc_feature (7)..(7): n is a, c, g, or u
ucuacunuaccuguuuucaau

SEQ ID NO: 30465 - RNA, 22 nt, Artificial Sequence
  Synthetic
  misc_feature (8)..(8): n is a, c, g, or u
cucuacunuaccuguuuucaau

SEQ ID NO: 30466 - RNA, 23 nt, Artificial Sequence
  Synthetic
  misc_feature (9)..(9): n is a, c, g, or u
ccucuacunuaccuguuuucaau

SEQ ID NO: 30467 - RNA, 24 nt, Artificial Sequence
  Synthetic
  misc_feature (10)..(10): n is a, c, g, or u
uccucuacunuaccuguuuucaau

SEQ ID NO: 30468 - RNA, 18 nt, Artificial Sequence
  Synthetic
uugacccuuauaaagaau

SEQ ID NO: 30469 - RNA, 19 nt, Artificial Sequence
  Synthetic
auugacccuuauaaagaau

SEQ ID NO: 30470 - RNA, 20 nt, Artificial Sequence
  Synthetic
cauugacccuuauaaagaau

SEQ ID NO: 30471 - RNA, 21 nt, Artificial Sequence
  Synthetic
acauugacccuuauaaagaau

SEQ ID NO: 30472 - RNA, 22 nt, Artificial Sequence
  Synthetic
gacauugacccuuauaaagaau

SEQ ID NO: 30473 - RNA, 23 nt, Artificial Sequence
  Synthetic
ggacauugacccuuauaaagaau

SEQ ID NO: 30474 - RNA, 24 nt, Artificial Sequence
  Synthetic
uggacauugacccuuauaaagaau

SEQ ID NO: 30475 - RNA, 18 nt, Artificial Sequence
  Synthetic
uccugggugggcaauaau

SEQ ID NO: 30476 - RNA, 19 nt, Artificial Sequence
  Synthetic
uuccugggugggcaauaau

SEQ ID NO: 30477 - RNA, 20 nt, Artificial Sequence
  Synthetic
cuuccugggugggcaauaau

SEQ ID NO: 30478 - RNA, 21 nt, Artificial Sequence
  Synthetic
gcuuccugggugggcaauaau

SEQ ID NO: 30479 - RNA, 22 nt, Artificial Sequence
  Synthetic
ggcuuccugggugggcaauaau

SEQ ID NO: 30480 - RNA, 23 nt, Artificial Sequence
  Synthetic
uggcuuccugggugggcaauaau

SEQ ID NO: 30481 - RNA, 24 nt, Artificial Sequence
  Synthetic
uuggcuuccugggugggcaauaau

SEQ ID NO: 30482 - RNA, 18 nt, Artificial Sequence
  Synthetic
  misc_feature (9)..(9): n is a, c, g, or u
ggacccugnuaugaacau

SEQ ID NO: 30483 - RNA, 19 nt, Artificial Sequence
  Synthetic
  misc_feature (10)..(10): n is a, c, g, or u
gggacccugnuaugaacau

SEQ ID NO: 30484 - RNA, 20 nt, Artificial Sequence
  Synthetic
  misc_feature (11)..(11): n is a, c, g, or u
ggggacccugnuaugaacau

SEQ ID NO: 30485 - RNA, 21 nt, Artificial Sequence
  Synthetic
  misc_feature (12)..(12): n is a, c, g, or u
uggggacccugnuaugaacau

SEQ ID NO: 30486 - RNA, 22 nt, Artificial Sequence
  Synthetic
  misc_feature (13)..(13): n is a, c, g, or u
cuggggacccugnuaugaacau

SEQ ID NO: 30487 - RNA, 23 nt, Artificial Sequence
  Synthetic
  misc_feature (14)..(14): n is a, c, g, or u
acuggggacccugnuaugaacau

SEQ ID NO: 30488 - RNA, 24 nt, Artificial Sequence
  Synthetic
  misc_feature (15)..(15): n is a, c, g, or u
gacuggggacccugnuaugaacau

SEQ ID NO: 30489 - RNA, 18 nt, Artificial Sequence
  Synthetic
acauggagaacaucacau

SEQ ID NO: 30490 - RNA, 19 nt, Artificial Sequence
  Synthetic
aacauggagaacaucacau

SEQ ID NO: 30491 - RNA, 20 nt, Artificial Sequence
  Synthetic
gaacauggagaacaucacau

SEQ ID NO: 30492 - RNA, 21 nt, Artificial Sequence
  Synthetic
ugaacauggagaacaucacau

SEQ ID NO: 30493 - RNA, 22 nt, Artificial Sequence
  Synthetic
augaacauggagaacaucacau

SEQ ID NO: 30494 - RNA, 23 nt, Artificial Sequence
  Synthetic
uaugaacauggagaacaucacau

SEQ ID NO: 30495 - RNA, 24 nt, Artificial Sequence
  Synthetic
  misc_feature (1)..(1): n is a, c, g, or u
nuaugaacauggagaacaucacau

SEQ ID NO: 30496 - RNA, 18 nt, Artificial Sequence
  Synthetic
cuggauugaggaauacau

SEQ ID NO: 30497 - RNA, 19 nt, Artificial Sequence
  Synthetic
ccuggauugaggaauacau

SEQ ID NO: 30498 - RNA, 20 nt, Artificial Sequence
  Synthetic
accuggauugaggaauacau

SEQ ID NO: 30499 - RNA, 21 nt, Artificial Sequence
  Synthetic
gaccuggauugaggaauacau

SEQ ID NO: 30500 - RNA, 22 nt, Artificial Sequence
  Synthetic
cgaccuggauugaggaauacau

SEQ ID NO: 30501 - RNA, 23 nt, Artificial Sequence
  Synthetic
acgaccuggauugaggaauacau

SEQ ID NO: 30502 - RNA, 24 nt, Artificial Sequence
  Synthetic
aacgaccuggauugaggaauacau

SEQ ID NO: 30503 - RNA, 18 nt, Artificial Sequence
  Synthetic
uugccaacaaccuuacau

SEQ ID NO: 30504 - RNA, 19 nt, Artificial Sequence
  Synthetic
cuugccaacaaccuuacau

SEQ ID NO: 30505 - RNA, 20 nt, Artificial Sequence
  Synthetic
  misc_feature (1)..(1): n is a, c, g, or u
ncuugccaacaaccuuacau

SEQ ID NO: 30506 - RNA, 21 nt, Artificial Sequence
  Synthetic
  misc_feature (2)..(2): n is a, c, g, or u
ancuugccaacaaccuuacau

SEQ ID NO: 30507 - RNA, 22 nt, Artificial Sequence
  Synthetic
  misc_feature (3)..(3): n is a, c, g, or u
gancuugccaacaaccuuacau

SEQ ID NO: 30508 - RNA, 23 nt, Artificial Sequence
  Synthetic
  misc_feature (4)..(4): n is a, c, g, or u
ggancuugccaacaaccuuacau

SEQ ID NO: 30509 - RNA, 24 nt, Artificial Sequence
  Synthetic
  misc_feature (1)..(1): n is a, c, g, or u
  misc_feature (5)..(5): n is a, c, g, or u
nggancuugccaacaaccuuacau

SEQ ID NO: 30510 - RNA, 18 nt, Artificial Sequence
  Synthetic
  misc_feature (2)..(2): n is a, c, g, or u
  misc_feature (8)..(8): n is a, c, g, or u
anauuucnugccuuacau

SEQ ID NO: 30511 - RNA, 19 nt, Artificial Sequence
  Synthetic
  misc_feature (3)..(3): n is a, c, g, or u
  misc_feature (9)..(9): n is a, c, g, or u
canauuucnugccuuacau

SEQ ID NO: 30512 - RNA, 20 nt, Artificial Sequence
  Synthetic
  misc_feature (4)..(4): n is a, c, g, or u
  misc_feature (10)..(10): n is a, c, g, or u
ucanauuucnugccuuacau

SEQ ID NO: 30513 - RNA, 21 nt, Artificial Sequence
  Synthetic
  misc_feature (5)..(5): n is a, c, g, or u
  misc_feature (11)..(11): n is a, c, g, or u
uucanauuucnugccuuacau

SEQ ID NO: 30514 - RNA, 22 nt, Artificial Sequence
  Synthetic
  misc_feature (6)..(6): n is a, c, g, or u
  misc_feature (12)..(12): n is a, c, g, or u
uuucanauuucnugccuuacau

SEQ ID NO: 30515 - RNA, 23 nt, Artificial Sequence
  Synthetic
  misc_feature (7)..(7): n is a, c, g, or u
  misc_feature (13)..(13): n is a, c, g, or u
guuucanauuucnugccuuacau

SEQ ID NO: 30516 - RNA, 24 nt, Artificial Sequence
  Synthetic
  misc_feature (8)..(8): n is a, c, g, or u
  misc_feature (14)..(14): n is a, c, g, or u
gguuucanauuucnugccuuacau

SEQ ID NO: 30517 - RNA, 18 nt, Artificial Sequence
  Synthetic
uuaucugugggcauccau

SEQ ID NO: 30518 - RNA, 19 nt, Artificial Sequence
  Synthetic
guuaucugugggcauccau

SEQ ID NO: 30519 - RNA, 20 nt, Artificial Sequence
  Synthetic
uguuaucugugggcauccau

SEQ ID NO: 30520 - RNA, 21 nt, Artificial Sequence
  Synthetic
uuguuaucugugggcauccau

SEQ ID NO: 30521 - RNA, 22 nt, Artificial Sequence
  Synthetic
uuuguuaucugugggcauccau

SEQ ID NO: 30522 - RNA, 23 nt, Artificial Sequence
  Synthetic
uuuuguuaucugugggcauccau

SEQ ID NO: 30523 - RNA, 24 nt, Artificial Sequence
  Synthetic
uuuuuguuaucugugggcauccau

SEQ ID NO: 30524 - RNA, 18 nt, Artificial Sequence
  Synthetic
gaacaagagcuacagcau

SEQ ID NO: 30525 - RNA, 19 nt, Artificial Sequence
  Synthetic
ggaacaagagcuacagcau

SEQ ID NO: 30526 - RNA, 20 nt, Artificial Sequence
  Synthetic
gggaacaagagcuacagcau

SEQ ID NO: 30527 - RNA, 21 nt, Artificial Sequence
  Synthetic
ugggaacaagagcuacagcau

SEQ ID NO: 30528 - RNA, 22 nt, Artificial Sequence
  Synthetic
cugggaacaagagcuacagcau

SEQ ID NO: 30529 - RNA, 23 nt, Artificial Sequence
  Synthetic
ccugggaacaagagcuacagcau

SEQ ID NO: 30530 - RNA, 24 nt, Artificial Sequence
  Synthetic
uccugggaacaagagcuacagcau

SEQ ID NO: 30531 - RNA, 18 nt, Artificial Sequence
  Synthetic
gccaaaucugugcagcau

SEQ ID NO: 30532 - RNA, 19 nt, Artificial Sequence
  Synthetic
ggccaaaucugugcagcau

SEQ ID NO: 30533 - RNA, 20 nt, Artificial Sequence
  Synthetic
gggccaaaucugugcagcau

SEQ ID NO: 30534 - RNA, 21 nt, Artificial Sequence
  Synthetic
ggggccaaaucugugcagcau

SEQ ID NO: 30535 - RNA, 22 nt, Artificial Sequence
  Synthetic
gggggccaaaucugugcagcau

SEQ ID NO: 30536 - RNA, 23 nt, Artificial Sequence
  Synthetic
ugggggccaaaucugugcagcau

SEQ ID NO: 30537 - RNA, 24 nt, Artificial Sequence
  Synthetic
uugggggccaaaucugugcagcau

SEQ ID NO: 30538 - RNA, 18 nt, Artificial Sequence
  Synthetic
caccucugcacgucgcau

SEQ ID NO: 30539 - RNA, 19 nt, Artificial Sequence
  Synthetic
ucaccucugcacgucgcau

SEQ ID NO: 30540 - RNA, 20 nt, Artificial Sequence
  Synthetic
uucaccucugcacgucgcau

SEQ ID NO: 30541 - RNA, 21 nt, Artificial Sequence
  Synthetic
cuucaccucugcacgucgcau

SEQ ID NO: 30542 - RNA, 22 nt, Artificial Sequence
  Synthetic
gcuucaccucugcacgucgcau

SEQ ID NO: 30543 - RNA, 23 nt, Artificial Sequence
  Synthetic
cgcuucaccucugcacgucgcau

SEQ ID NO: 30544 - RNA, 24 nt, Artificial Sequence
  Synthetic
ucgcuucaccucugcacgucgcau

SEQ ID NO: 30545 - RNA, 18 nt, Artificial Sequence
  Synthetic
guauucccaucccaucau

SEQ ID NO: 30546 - RNA, 19 nt, Artificial Sequence
  Synthetic
uguauucccaucccaucau

SEQ ID NO: 30547 - RNA, 20 nt, Artificial Sequence
  Synthetic
cuguauucccaucccaucau

SEQ ID NO: 30548 - RNA, 21 nt, Artificial Sequence
  Synthetic
ccuguauucccaucccaucau

SEQ ID NO: 30549 - RNA, 22 nt, Artificial Sequence
  Synthetic
accuguauucccaucccaucau

SEQ ID NO: 30550 - RNA, 23 nt, Artificial Sequence
  Synthetic
caccuguauucccaucccaucau

SEQ ID NO: 30551 - RNA, 24 nt, Artificial Sequence
  Synthetic
gcaccuguauucccaucccaucau

SEQ ID NO: 30552 - RNA, 18 nt, Artificial Sequence
  Synthetic
  misc_feature (1)..(1): n is a, c, g, or u
naaaugaaaggagacgau

SEQ ID NO: 30553 - RNA, 19 nt, Artificial Sequence
  Synthetic
  misc_feature (2)..(2): n is a, c, g, or u
anaaaugaaaggagacgau

SEQ ID NO: 30554 - RNA, 20 nt, Artificial Sequence
  Synthetic
  misc_feature (3)..(3): n is a, c, g, or u
uanaaaugaaaggagacgau

SEQ ID NO: 30555 - RNA, 21 nt, Artificial Sequence
  Synthetic
  misc_feature (4)..(4): n is a, c, g, or u
cuanaaaugaaaggagacgau

SEQ ID NO: 30556 - RNA, 22 nt, Artificial Sequence
  Synthetic
  misc_feature (5)..(5): n is a, c, g, or u
acuanaaaugaaaggagacgau

SEQ ID NO: 30557 - RNA, 23 nt, Artificial Sequence
  Synthetic
  misc_feature (6)..(6): n is a, c, g, or u
cacuanaaaugaaaggagacgau

SEQ ID NO: 30558 - RNA, 24 nt, Artificial Sequence
  Synthetic
  misc_feature (7)..(7): n is a, c, g, or u
ucacuanaaaugaaaggagacgau

SEQ ID NO: 30559 - RNA, 18 nt, Artificial Sequence
  Synthetic
aauuccagcagucccgau

SEQ ID NO: 30560 - RNA, 19 nt, Artificial Sequence
  Synthetic
aaauuccagcagucccgau

SEQ ID NO: 30561 - RNA, 20 nt, Artificial Sequence
  Synthetic
caaauuccagcagucccgau

SEQ ID NO: 30562 - RNA, 21 nt, Artificial Sequence
  Synthetic
gcaaauuccagcagucccgau

SEQ ID NO: 30563 - RNA, 22 nt, Artificial Sequence
  Synthetic
agcaaauuccagcagucccgau

SEQ ID NO: 30564 - RNA, 23 nt, Artificial Sequence
  Synthetic
gagcaaauuccagcagucccgau

SEQ ID NO: 30565 - RNA, 24 nt, Artificial Sequence
  Synthetic
agagcaaauuccagcagucccgau

SEQ ID NO: 30566 - RNA, 18 nt, Artificial Sequence
  Synthetic
ccggucaacgaccuggau

SEQ ID NO: 30567 - RNA, 19 nt, Artificial Sequence
  Synthetic
cccggucaacgaccuggau

SEQ ID NO: 30568 - RNA, 20 nt, Artificial Sequence
  Synthetic
ccccggucaacgaccuggau

SEQ ID NO: 30569 - RNA, 18 nt, Artificial Sequence
  Synthetic
caccaagcacuguuggau

SEQ ID NO: 30570 - RNA, 19 nt, Artificial Sequence
  Synthetic
ccaccaagcacuguuggau

SEQ ID NO: 30571 - RNA, 20 nt, Artificial Sequence
  Synthetic
uccaccaagcacuguuggau

SEQ ID NO: 30572 - RNA, 21 nt, Artificial Sequence
  Synthetic
uuccaccaagcacuguuggau

SEQ ID NO: 30573 - RNA, 22 nt, Artificial Sequence
  Synthetic
guuccaccaagcacuguuggau

SEQ ID NO: 30574 - RNA, 23 nt, Artificial Sequence
  Synthetic
aguuccaccaagcacuguuggau

SEQ ID NO: 30575 - RNA, 24 nt, Artificial Sequence
  Synthetic
caguuccaccaagcacuguuggau

SEQ ID NO: 30576 - RNA, 18 nt, Artificial Sequence
  Synthetic
  misc_feature (14)..(14): n is a, c, g, or u
cuugcaucaagaunugau

SEQ ID NO: 30577 - RNA, 19 nt, Artificial Sequence
  Synthetic
  misc_feature (15)..(15): n is a, c, g, or u
acuugcaucaagaunugau

SEQ ID NO: 30578 - RNA, 20 nt, Artificial Sequence
  Synthetic
  misc_feature (16)..(16): n is a, c, g, or u
cacuugcaucaagaunugau

SEQ ID NO: 30579 - RNA, 21 nt, Artificial Sequence
  Synthetic
  misc_feature (17)..(17): n is a, c, g, or u
ucacuugcaucaagaunugau

SEQ ID NO: 30580 - RNA, 22 nt, Artificial Sequence
  Synthetic
  misc_feature (18)..(18): n is a, c, g, or u
uucacuugcaucaagaunugau

SEQ ID NO: 30581 - RNA, 23 nt, Artificial Sequence
  Synthetic
  misc_feature (19)..(19): n is a, c, g, or u
auucacuugcaucaagaunugau

SEQ ID NO: 30582 - RNA, 24 nt, Artificial Sequence
  Synthetic
  misc_feature (20)..(20): n is a, c, g, or u
cauucacuugcaucaagaunugau

SEQ ID NO: 30583 - RNA, 18 nt, Artificial Sequence
  Synthetic
gugaauagacccauugau

SEQ ID NO: 30584 - RNA, 19 nt, Artificial Sequence
  Synthetic
cgugaauagacccauugau

SEQ ID NO: 30585 - RNA, 20 nt, Artificial Sequence
  Synthetic
ccgugaauagacccauugau

SEQ ID NO: 30586 - RNA, 21 nt, Artificial Sequence
  Synthetic
cccgugaauagacccauugau

SEQ ID NO: 30587 - RNA, 22 nt, Artificial Sequence
  Synthetic
ucccgugaauagacccauugau

SEQ ID NO: 30588 - RNA, 23 nt, Artificial Sequence
  Synthetic
uucccgugaauagacccauugau

SEQ ID NO: 30589 - RNA, 24 nt, Artificial Sequence
  Synthetic
cuucccgugaauagacccauugau

SEQ ID NO: 30590 - RNA, 18 nt, Artificial Sequence
  Synthetic
  misc_feature (16)..(16): n is a, c, g, or u
gaagguuugucaacgnau

SEQ ID NO: 30591 - RNA, 19 nt, Artificial Sequence
  Synthetic
  misc_feature (17)..(17): n is a, c, g, or u
ggaagguuugucaacgnau

SEQ ID NO: 30592 - RNA, 20 nt, Artificial Sequence
  Synthetic
  misc_feature (18)..(18): n is a, c, g, or u
uggaagguuugucaacgnau

SEQ ID NO: 30593 - RNA, 21 nt, Artificial Sequence
  Synthetic
  misc_feature (19)..(19): n is a, c, g, or u
uuggaagguuugucaacgnau

SEQ ID NO: 30594 - RNA, 22 nt, Artificial Sequence
  Synthetic
  misc_feature (20)..(20): n is a, c, g, or u
auuggaagguuugucaacgnau

SEQ ID NO: 30595 - RNA, 23 nt, Artificial Sequence
  Synthetic
  misc_feature (21)..(21): n is a, c, g, or u
gauuggaagguuugucaacgnau

SEQ ID NO: 30596 - RNA, 24 nt, Artificial Sequence
  Synthetic
  misc_feature (22)..(22): n is a, c, g, or u
ugauuggaagguuugucaacgnau

SEQ ID NO: 30597 - RNA, 18 nt, Artificial Sequence
  Synthetic
  misc_feature (16)..(16): n is a, c, g, or u
cuuuauggguuauaunau

SEQ ID NO: 30598 - RNA, 19 nt, Artificial Sequence
  Synthetic
  misc_feature (17)..(17): n is a, c, g, or u
acuuuauggguuauaunau

SEQ ID NO: 30599 - RNA, 20 nt, Artificial Sequence
  Synthetic
  misc_feature (18)..(18): n is a, c, g, or u
cacuuuauggguuauaunau

SEQ ID NO: 30600 - RNA, 21 nt, Artificial Sequence
  Synthetic
  misc_feature (1)..(1): n is a, c, g, or u
  misc_feature (19)..(19): n is a, c, g, or u
ncacuuuauggguuauaunau

SEQ ID NO: 30601 - RNA, 22 nt, Artificial Sequence
  Synthetic
  misc_feature (2)..(2): n is a, c, g, or u
  misc_feature (20)..(20): n is a, c, g, or u
uncacuuuauggguuauaunau

SEQ ID NO: 30602 - RNA, 23 nt, Artificial Sequence
  Synthetic
  misc_feature (1)..(1): n is a, c, g, or u
  misc_feature (3)..(3): n is a, c, g, or u
  misc_feature (21)..(21): n is a, c, g, or u
nuncacuuuauggguuauaunau

SEQ ID NO: 30603 - RNA, 24 nt, Artificial Sequence
  Synthetic
  misc_feature (2)..(2): n is a, c, g, or u
  misc_feature (4)..(4): n is a, c, g, or u
  misc_feature (22)..(22): n is a, c, g, or u
cnuncacuuuauggguuauaunau

SEQ ID NO: 30604 - RNA, 18 nt, Artificial Sequence
  Synthetic
aaggcaggaauucuauau

SEQ ID NO: 30605 - RNA, 19 nt, Artificial Sequence
  Synthetic
gaaggcaggaauucuauau

SEQ ID NO: 30606 - RNA, 20 nt, Artificial Sequence
  Synthetic
ggaaggcaggaauucuauau

SEQ ID NO: 30607 - RNA, 21 nt, Artificial Sequence
  Synthetic
uggaaggcaggaauucuauau

SEQ ID NO: 30608 - RNA, 22 nt, Artificial Sequence
  Synthetic
guggaaggcaggaauucuauau

SEQ ID NO: 30609 - RNA, 23 nt, Artificial Sequence
  Synthetic
uguggaaggcaggaauucuauau

SEQ ID NO: 30610 - RNA, 24 nt, Artificial Sequence
  Synthetic
uuguggaaggcaggaauucuauau

SEQ ID NO: 30611 - RNA, 18 nt, Artificial Sequence
  Synthetic
accaguuggauccacuau

SEQ ID NO: 30612 - RNA, 19 nt, Artificial Sequence
  Synthetic
caccaguuggauccacuau

SEQ ID NO: 30613 - RNA, 20 nt, Artificial Sequence
  Synthetic
ccaccaguuggauccacuau

SEQ ID NO: 30614 - RNA, 21 nt, Artificial Sequence
  Synthetic
accaccaguuggauccacuau

SEQ ID NO: 30615 - RNA, 22 nt, Artificial Sequence
  Synthetic
gaccaccaguuggauccacuau

SEQ ID NO: 30616 - RNA, 23 nt, Artificial Sequence
  Synthetic
agaccaccaguuggauccacuau

SEQ ID NO: 30617 - RNA, 24 nt, Artificial Sequence
  Synthetic
cagaccaccaguuggauccacuau

SEQ ID NO: 30618 - RNA, 18 nt, Artificial Sequence
  Synthetic
  misc_feature (9)..(9): n is a, c, g, or u
gguauuaanccuuacuau

SEQ ID NO: 30619 - RNA, 19 nt, Artificial Sequence
  Synthetic
  misc_feature (10)..(10): n is a, c, g, or u
agguauuaanccuuacuau

SEQ ID NO: 30620 - RNA, 20 nt, Artificial Sequence
  Synthetic
  misc_feature (11)..(11): n is a, c, g, or u
aagguauuaanccuuacuau

SEQ ID NO: 30621 - RNA, 21 nt, Artificial Sequence
  Synthetic
  misc_feature (12)..(12): n is a, c, g, or u
aaagguauuaanccuuacuau

SEQ ID NO: 30622 - RNA, 22 nt, Artificial Sequence
  Synthetic
  misc_feature (13)..(13): n is a, c, g, or u
uaaagguauuaanccuuacuau

SEQ ID NO: 30623 - RNA, 23 nt, Artificial Sequence
  Synthetic
  misc_feature (14)..(14): n is a, c, g, or u
auaaagguauuaanccuuacuau

SEQ ID NO: 30624 - RNA, 24 nt, Artificial Sequence
  Synthetic
  misc_feature (15)..(15): n is a, c, g, or u
gauaaagguauuaanccuuacuau

SEQ ID NO: 30625 - RNA, 18 nt, Artificial Sequence
  Synthetic
ggaaggcaggaauucuau

SEQ ID NO: 30626 - RNA, 19 nt, Artificial Sequence
  Synthetic
uggaaggcaggaauucuau

SEQ ID NO: 30627 - RNA, 20 nt, Artificial Sequence
  Synthetic
guggaaggcaggaauucuau

SEQ ID NO: 30628 - RNA, 21 nt, Artificial Sequence
  Synthetic
uguggaaggcaggaauucuau

SEQ ID NO: 30629 - RNA, 22 nt, Artificial Sequence
  Synthetic
uuguggaaggcaggaauucuau

SEQ ID NO: 30630 - RNA, 23 nt, Artificial Sequence
  Synthetic
uuuguggaaggcaggaauucuau

SEQ ID NO: 30631 - RNA, 24 nt, Artificial Sequence
  Synthetic
cuuuguggaaggcaggaauucuau

SEQ ID NO: 30632 - RNA, 18 nt, Artificial Sequence
  Synthetic
  misc_feature (12)..(12): n is a, c, g, or u
auauggaugaunugguau

SEQ ID NO: 30633 - RNA, 19 nt, Artificial Sequence
  Synthetic
  misc_feature (13)..(13): n is a, c, g, or u
uauauggaugaunugguau

SEQ ID NO: 30634 - RNA, 20 nt, Artificial Sequence
  Synthetic
  misc_feature (14)..(14): n is a, c, g, or u
uuauauggaugaunugguau

SEQ ID NO: 30635 - RNA, 21 nt, Artificial Sequence
  Synthetic
  misc_feature (15)..(15): n is a, c, g, or u
guuauauggaugaunugguau

SEQ ID NO: 30636 - RNA, 22 nt, Artificial Sequence
  Synthetic
  misc_feature (16)..(16): n is a, c, g, or u
aguuauauggaugaunugguau

SEQ ID NO: 30637 - RNA, 23 nt, Artificial Sequence
  Synthetic
  misc_feature (17)..(17): n is a, c, g, or u
uaguuauauggaugaunugguau

SEQ ID NO: 30638 - RNA, 24 nt, Artificial Sequence
  Synthetic
  misc_feature (18)..(18): n is a, c, g, or u
uuaguuauauggaugaunugguau

SEQ ID NO: 30639 - RNA, 18 nt, Artificial Sequence
  Synthetic
acaucaaagacuguguau

SEQ ID NO: 30640 - RNA, 19 nt, Artificial Sequence
  Synthetic
uacaucaaagacuguguau

SEQ ID NO: 30641 - RNA, 20 nt, Artificial Sequence
  Synthetic
auacaucaaagacuguguau

SEQ ID NO: 30642 - RNA, 21 nt, Artificial Sequence
  Synthetic
aauacaucaaagacuguguau

SEQ ID NO: 30643 - RNA, 22 nt, Artificial Sequence
  Synthetic
gaauacaucaaagacuguguau

SEQ ID NO: 30644 - RNA, 23 nt, Artificial Sequence
  Synthetic
ggaauacaucaaagacuguguau

SEQ ID NO: 30645 - RNA, 24 nt, Artificial Sequence
  Synthetic
aggaauacaucaaagacuguguau

SEQ ID NO: 30646 - RNA, 18 nt, Artificial Sequence
  Synthetic
gguuaaaggucuuuguau

SEQ ID NO: 30647 - RNA, 19 nt, Artificial Sequence
  Synthetic
agguuaaaggucuuuguau

SEQ ID NO: 30648 - RNA, 20 nt, Artificial Sequence
  Synthetic
gagguuaaaggucuuuguau

SEQ ID NO: 30649 - RNA, 21 nt, Artificial Sequence
  Synthetic
ugagguuaaaggucuuuguau

SEQ ID NO: 30650 - RNA, 22 nt, Artificial Sequence
  Synthetic
uugagguuaaaggucuuuguau

SEQ ID NO: 30651 - RNA, 23 nt, Artificial Sequence
  Synthetic
guugagguuaaaggucuuuguau

SEQ ID NO: 30652 - RNA, 24 nt, Artificial Sequence
  Synthetic
aguugagguuaaaggucuuuguau

SEQ ID NO: 30653 - RNA, 18 nt, Artificial Sequence
  Synthetic
  misc_feature (11)..(11): n is a, c, g, or u
acgauugaaanuaauuau

SEQ ID NO: 30654 - RNA, 19 nt, Artificial Sequence
  Synthetic
  misc_feature (12)..(12): n is a, c, g, or u
gacgauugaaanuaauuau

SEQ ID NO: 30655 - RNA, 20 nt, Artificial Sequence
  Synthetic
  misc_feature (13)..(13): n is a, c, g, or u
agacgauugaaanuaauuau

SEQ ID NO: 30656 - RNA, 21 nt, Artificial Sequence
  Synthetic
  misc_feature (14)..(14): n is a, c, g, or u
gagacgauugaaanuaauuau

SEQ ID NO: 30657 - RNA, 22 nt, Artificial Sequence
  Synthetic
  misc_feature (15)..(15): n is a, c, g, or u
ggagacgauugaaanuaauuau

SEQ ID NO: 30658 - RNA, 23 nt, Artificial Sequence
  Synthetic
  misc_feature (16)..(16): n is a, c, g, or u
aggagacgauugaaanuaauuau

SEQ ID NO: 30659 - RNA, 24 nt, Artificial Sequence
  Synthetic
  misc_feature (17)..(17): n is a, c, g, or u
aaggagacgauugaaanuaauuau

SEQ ID NO: 30660 - RNA, 18 nt, Artificial Sequence
  Synthetic
auggacauugacccuuau

SEQ ID NO: 30661 - RNA, 19 nt, Artificial Sequence
  Synthetic
cauggacauugacccuuau

SEQ ID NO: 30662 - RNA, 20 nt, Artificial Sequence
  Synthetic
gcauggacauugacccuuau

SEQ ID NO: 30663 - RNA, 21 nt, Artificial Sequence
  Synthetic
ggcauggacauugacccuuau

SEQ ID NO: 30664 - RNA, 22 nt, Artificial Sequence
  Synthetic
gggcauggacauugacccuuau

SEQ ID NO: 30665 - RNA, 23 nt, Artificial Sequence
  Synthetic
ggggcauggacauugacccuuau

SEQ ID NO: 30666 - RNA, 24 nt, Artificial Sequence
  Synthetic
uggggcauggacauugacccuuau

SEQ ID NO: 30667 - RNA, 18 nt, Artificial Sequence
  Synthetic
augccagcuagguuuuau

SEQ ID NO: 30668 - RNA, 19 nt, Artificial Sequence
  Synthetic
uaugccagcuagguuuuau

SEQ ID NO: 30669 - RNA, 20 nt, Artificial Sequence
  Synthetic
uuaugccagcuagguuuuau

SEQ ID NO: 30670 - RNA, 21 nt, Artificial Sequence
  Synthetic
auuaugccagcuagguuuuau

SEQ ID NO: 30671 - RNA, 22 nt, Artificial Sequence
  Synthetic
aauuaugccagcuagguuuuau

SEQ ID NO: 30672 - RNA, 23 nt, Artificial Sequence
  Synthetic
uaauuaugccagcuagguuuuau

SEQ ID NO: 30673 - RNA, 24 nt, Artificial Sequence
  Synthetic
  misc_feature (1)..(1): n is a, c, g, or u
nuaauuaugccagcuagguuuuau

SEQ ID NO: 30674 - RNA, 18 nt, Artificial Sequence
  Synthetic
uuuguuuucucgccaacu

SEQ ID NO: 30675 - RNA, 19 nt, Artificial Sequence
  Synthetic
uuuuguuuucucgccaacu

SEQ ID NO: 30676 - RNA, 20 nt, Artificial Sequence
  Synthetic
cuuuuguuuucucgccaacu

SEQ ID NO: 30677 - RNA, 21 nt, Artificial Sequence
  Synthetic
gcuuuuguuuucucgccaacu

SEQ ID NO: 30678 - RNA, 22 nt, Artificial Sequence
  Synthetic
ggcuuuuguuuucucgccaacu

SEQ ID NO: 30679 - RNA, 23 nt, Artificial Sequence
  Synthetic
aggcuuuuguuuucucgccaacu

SEQ ID NO: 30680 - RNA, 24 nt, Artificial Sequence
  Synthetic
caggcuuuuguuuucucgccaacu

SEQ ID NO: 30681 - RNA, 18 nt, Artificial Sequence
  Synthetic
gauccauacugcggaacu

SEQ ID NO: 30682 - RNA, 19 nt, Artificial Sequence
  Synthetic
cgauccauacugcggaacu

SEQ ID NO: 30683 - RNA, 20 nt, Artificial Sequence
  Synthetic
ccgauccauacugcggaacu

SEQ ID NO: 30684 - RNA, 18 nt, Artificial Sequence
  Synthetic
cccuauccuaucaacacu

SEQ ID NO: 30685 - RNA, 19 nt, Artificial Sequence
  Synthetic
ccccuauccuaucaacacu

SEQ ID NO: 30686 - RNA, 20 nt, Artificial Sequence
  Synthetic
gccccuauccuaucaacacu

SEQ ID NO: 30687 - RNA, 21 nt, Artificial Sequence
  Synthetic
ugccccuauccuaucaacacu

SEQ ID NO: 30688 - RNA, 22 nt, Artificial Sequence
  Synthetic
augccccuauccuaucaacacu

SEQ ID NO: 30689 - RNA, 23 nt, Artificial Sequence
  Synthetic
aaugccccuauccuaucaacacu

SEQ ID NO: 30690 - RNA, 24 nt, Artificial Sequence
  Synthetic
aaaugccccuauccuaucaacacu

SEQ ID NO: 30691 - RNA, 18 nt, Artificial Sequence
  Synthetic
acaguuccaccaagcacu

SEQ ID NO: 30692 - RNA, 19 nt, Artificial Sequence
  Synthetic
cacaguuccaccaagcacu

SEQ ID NO: 30693 - RNA, 20 nt, Artificial Sequence
  Synthetic
acacaguuccaccaagcacu

SEQ ID NO: 30694 - RNA, 21 nt, Artificial Sequence
  Synthetic
aacacaguuccaccaagcacu

SEQ ID NO: 30695 - RNA, 22 nt, Artificial Sequence
  Synthetic
caacacaguuccaccaagcacu

SEQ ID NO: 30696 - RNA, 23 nt, Artificial Sequence
  Synthetic
ucaacacaguuccaccaagcacu

SEQ ID NO: 30697 - RNA, 24 nt, Artificial Sequence
  Synthetic
cucaacacaguuccaccaagcacu

SEQ ID NO: 30698 - RNA, 18 nt, Artificial Sequence
  Synthetic
  misc_feature (7)..(7): n is a, c, g, or u
gcggacnuuaucggcacu

SEQ ID NO: 30699 - RNA, 19 nt, Artificial Sequence
  Synthetic
  misc_feature (8)..(8): n is a, c, g, or u
agcggacnuuaucggcacu

SEQ ID NO: 30700 - RNA, 20 nt, Artificial Sequence
  Synthetic
  misc_feature (9)..(9): n is a, c, g, or u
gagcggacnuuaucggcacu

SEQ ID NO: 30701 - RNA, 21 nt, Artificial Sequence
  Synthetic
  misc_feature (10)..(10): n is a, c, g, or u
ggagcggacnuuaucggcacu

SEQ ID NO: 30702 - RNA, 22 nt, Artificial Sequence
  Synthetic
  misc_feature (11)..(11): n is a, c, g, or u
uggagcggacnuuaucggcacu

SEQ ID NO: 30703 - RNA, 23 nt, Artificial Sequence
  Synthetic
  misc_feature (12)..(12): n is a, c, g, or u
cuggagcggacnuuaucggcacu

SEQ ID NO: 30704 - RNA, 24 nt, Artificial Sequence
  Synthetic
  misc_feature (13)..(13): n is a, c, g, or u
ucuggagcggacnuuaucggcacu

SEQ ID NO: 30705 - RNA, 18 nt, Artificial Sequence
  Synthetic
ucaaucuucucgaagacu

SEQ ID NO: 30706 - RNA, 19 nt, Artificial Sequence
  Synthetic
aucaaucuucucgaagacu

SEQ ID NO: 30707 - RNA, 20 nt, Artificial Sequence
  Synthetic
caucaaucuucucgaagacu

SEQ ID NO: 30708 - RNA, 21 nt, Artificial Sequence
  Synthetic
ucaucaaucuucucgaagacu

SEQ ID NO: 30709 - RNA, 22 nt, Artificial Sequence
  Synthetic
aucaucaaucuucucgaagacu

SEQ ID NO: 30710 - RNA, 23 nt, Artificial Sequence
  Synthetic
caucaucaaucuucucgaagacu

SEQ ID NO: 30711 - RNA, 24 nt, Artificial Sequence
  Synthetic
acaucaucaaucuucucgaagacu

SEQ ID NO: 30712 - RNA, 18 nt, Artificial Sequence
  Synthetic
acuguguauuuaaggacu

SEQ ID NO: 30713 - RNA, 19 nt, Artificial Sequence
  Synthetic
gacuguguauuuaaggacu

SEQ ID NO: 30714 - RNA, 20 nt, Artificial Sequence
  Synthetic
agacuguguauuuaaggacu

SEQ ID NO: 30715 - RNA, 21 nt, Artificial Sequence
  Synthetic
aagacuguguauuuaaggacu

SEQ ID NO: 30716 - RNA, 22 nt, Artificial Sequence
  Synthetic
aaagacuguguauuuaaggacu

SEQ ID NO: 30717 - RNA, 23 nt, Artificial Sequence
  Synthetic
caaagacuguguauuuaaggacu

SEQ ID NO: 30718 - RNA, 24 nt, Artificial Sequence
  Synthetic
ucaaagacuguguauuuaaggacu

SEQ ID NO: 30719 - RNA, 18 nt, Artificial Sequence
  Synthetic
gaacaucacaucaggacu

SEQ ID NO: 30720 - RNA, 19 nt, Artificial Sequence
  Synthetic
agaacaucacaucaggacu

SEQ ID NO: 30721 - RNA, 20 nt, Artificial Sequence
  Synthetic
gagaacaucacaucaggacu

SEQ ID NO: 30722 - RNA, 21 nt, Artificial Sequence
  Synthetic
ggagaacaucacaucaggacu

SEQ ID NO: 30723 - RNA, 22 nt, Artificial Sequence
  Synthetic
uggagaacaucacaucaggacu

SEQ ID NO: 30724 - RNA, 23 nt, Artificial Sequence
  Synthetic
auggagaacaucacaucaggacu

SEQ ID NO: 30725 - RNA, 24 nt, Artificial Sequence
  Synthetic
cauggagaacaucacaucaggacu

SEQ ID NO: 30726 - RNA, 18 nt, Artificial Sequence
  Synthetic
accuuacauaagaggacu

SEQ ID NO: 30727 - RNA, 19 nt, Artificial Sequence
  Synthetic
aaccuuacauaagaggacu

SEQ ID NO: 30728 - RNA, 20 nt, Artificial Sequence
  Synthetic
caaccuuacauaagaggacu

SEQ ID NO: 30729 - RNA, 21 nt, Artificial Sequence
  Synthetic
acaaccuuacauaagaggacu

SEQ ID NO: 30730 - RNA, 22 nt, Artificial Sequence
  Synthetic
aacaaccuuacauaagaggacu

SEQ ID NO: 30731 - RNA, 23 nt, Artificial Sequence
  Synthetic
caacaaccuuacauaagaggacu

SEQ ID NO: 30732 - RNA, 24 nt, Artificial Sequence
  Synthetic
ccaacaaccuuacauaagaggacu

SEQ ID NO: 30733 - RNA, 18 nt, Artificial Sequence
  Synthetic
uguugguucuucuggacu

SEQ ID NO: 30734 - RNA, 19 nt, Artificial Sequence
  Synthetic
uuguugguucuucuggacu

SEQ ID NO: 30735 - RNA, 20 nt, Artificial Sequence
  Synthetic
cuuguugguucuucuggacu

SEQ ID NO: 30736 - RNA, 21 nt, Artificial Sequence
  Synthetic
ucuuguugguucuucuggacu

SEQ ID NO: 30737 - RNA, 22 nt, Artificial Sequence
  Synthetic
uucuuguugguucuucuggacu

SEQ ID NO: 30738 - RNA, 23 nt, Artificial Sequence
  Synthetic
cuucuuguugguucuucuggacu

SEQ ID NO: 30739 - RNA, 24 nt, Artificial Sequence
  Synthetic
ucuucuuguugguucuucuggacu

SEQ ID NO: 30740 - RNA, 18 nt, Artificial Sequence
  Synthetic
guuaguauuccuuggacu

SEQ ID NO: 30741 - RNA, 19 nt, Artificial Sequence
  Synthetic
uguuaguauuccuuggacu

SEQ ID NO: 30742 - RNA, 20 nt, Artificial Sequence
  Synthetic
auguuaguauuccuuggacu

SEQ ID NO: 30743 - RNA, 21 nt, Artificial Sequence
  Synthetic
aauguuaguauuccuuggacu

SEQ ID NO: 30744 - RNA, 22 nt, Artificial Sequence
  Synthetic
caauguuaguauuccuuggacu

SEQ ID NO: 30745 - RNA, 23 nt, Artificial Sequence
  Synthetic
ccaauguuaguauuccuuggacu

SEQ ID NO: 30746 - RNA, 24 nt, Artificial Sequence
  Synthetic
cccaauguuaguauuccuuggacu

SEQ ID NO: 30747 - RNA, 18 nt, Artificial Sequence
  Synthetic
ccucugccgauccauacu

SEQ ID NO: 30748 - RNA, 19 nt, Artificial Sequence
  Synthetic
uccucugccgauccauacu

SEQ ID NO: 30749 - RNA, 20 nt, Artificial Sequence
  Synthetic
cuccucugccgauccauacu

SEQ ID NO: 30750 - RNA, 21 nt, Artificial Sequence
  Synthetic
gcuccucugccgauccauacu

SEQ ID NO: 30751 - RNA, 22 nt, Artificial Sequence
  Synthetic
ggcuccucugccgauccauacu

SEQ ID NO: 30752 - RNA, 23 nt, Artificial Sequence
  Synthetic
uggcuccucugccgauccauacu

SEQ ID NO: 30753 - RNA, 24 nt, Artificial Sequence
  Synthetic
guggcuccucugccgauccauacu

SEQ ID NO: 30754 - RNA, 18 nt, Artificial Sequence
  Synthetic
gcccguguguccucuacu

SEQ ID NO: 30755 - RNA, 19 nt, Artificial Sequence
  Synthetic
ugcccguguguccucuacu

SEQ ID NO: 30756 - RNA, 20 nt, Artificial Sequence
  Synthetic
uugcccguguguccucuacu

SEQ ID NO: 30757 - RNA, 21 nt, Artificial Sequence
  Synthetic
guugcccguguguccucuacu

SEQ ID NO: 30758 - RNA, 22 nt, Artificial Sequence
  Synthetic
uguugcccguguguccucuacu

SEQ ID NO: 30759 - RNA, 23 nt, Artificial Sequence
  Synthetic
auguugcccguguguccucuacu

SEQ ID NO: 30760 - RNA, 24 nt, Artificial Sequence
  Synthetic
uauguugcccguguguccucuacu

SEQ ID NO: 30761 - RNA, 18 nt, Artificial Sequence
  Synthetic
augugguuaaucauuacu

SEQ ID NO: 30762 - RNA, 19 nt, Artificial Sequence
  Synthetic
aaugugguuaaucauuacu

SEQ ID NO: 30763 - RNA, 20 nt, Artificial Sequence
  Synthetic
gaaugugguuaaucauuacu

SEQ ID NO: 30764 - RNA, 21 nt, Artificial Sequence
  Synthetic
agaaugugguuaaucauuacu

SEQ ID NO: 30765 - RNA, 22 nt, Artificial Sequence
  Synthetic
gagaaugugguuaaucauuacu

SEQ ID NO: 30766 - RNA, 23 nt, Artificial Sequence
  Synthetic
agagaaugugguuaaucauuacu

SEQ ID NO: 30767 - RNA, 24 nt, Artificial Sequence
  Synthetic
cagagaaugugguuaaucauuacu

SEQ ID NO: 30768 - RNA, 18 nt, Artificial Sequence
  Synthetic
ugcugcuguaccaaaccu

SEQ ID NO: 30769 - RNA, 19 nt, Artificial Sequence
  Synthetic
cugcugcuguaccaaaccu

SEQ ID NO: 30770 - RNA, 20 nt, Artificial Sequence
  Synthetic
ccugcugcuguaccaaaccu

SEQ ID NO: 30771 - RNA, 21 nt, Artificial Sequence
  Synthetic
uccugcugcuguaccaaaccu

SEQ ID NO: 30772 - RNA, 22 nt, Artificial Sequence
  Synthetic
cuccugcugcuguaccaaaccu

SEQ ID NO: 30773 - RNA, 23 nt, Artificial Sequence
  Synthetic
ccuccugcugcuguaccaaaccu

SEQ ID NO: 30774 - RNA, 24 nt, Artificial Sequence
  Synthetic
cccuccugcugcuguaccaaaccu

SEQ ID NO: 30775 - RNA, 18 nt, Artificial Sequence
  Synthetic
accccagucucuccaccu

SEQ ID NO: 30776 - RNA, 19 nt, Artificial Sequence
  Synthetic
aaccccagucucuccaccu

SEQ ID NO: 30777 - RNA, 20 nt, Artificial Sequence
  Synthetic
caaccccagucucuccaccu

SEQ ID NO: 30778 - RNA, 21 nt, Artificial Sequence
  Synthetic
ccaaccccagucucuccaccu

SEQ ID NO: 30779 - RNA, 22 nt, Artificial Sequence
  Synthetic
gccaaccccagucucuccaccu

SEQ ID NO: 30780 - RNA, 23 nt, Artificial Sequence
  Synthetic
agccaaccccagucucuccaccu

SEQ ID NO: 30781 - RNA, 24 nt, Artificial Sequence
  Synthetic
aagccaaccccagucucuccaccu

SEQ ID NO: 30782 - RNA, 18 nt, Artificial Sequence
  Synthetic
ggcuuucggaaaauaccu

SEQ ID NO: 30783 - RNA, 19 nt, Artificial Sequence
  Synthetic
gggcuuucggaaaauaccu

SEQ ID NO: 30784 - RNA, 20 nt, Artificial Sequence
  Synthetic
ugggcuuucggaaaauaccu

SEQ ID NO: 30785 - RNA, 21 nt, Artificial Sequence
  Synthetic
uugggcuuucggaaaauaccu

SEQ ID NO: 30786 - RNA, 22 nt, Artificial Sequence
  Synthetic
cuugggcuuucggaaaauaccu

SEQ ID NO: 30787 - RNA, 23 nt, Artificial Sequence
  Synthetic
ucuugggcuuucggaaaauaccu

SEQ ID NO: 30788 - RNA, 24 nt, Artificial Sequence
  Synthetic
aucuugggcuuucggaaaauaccu

SEQ ID NO: 30789 - RNA, 18 nt, Artificial Sequence
  Synthetic
ccaccagcacgggacccu

SEQ ID NO: 30790 - RNA, 19 nt, Artificial Sequence
  Synthetic
accaccagcacgggacccu

SEQ ID NO: 30791 - RNA, 20 nt, Artificial Sequence
  Synthetic
aaccaccagcacgggacccu

SEQ ID NO: 30792 - RNA, 18 nt, Artificial Sequence
  Synthetic
ggcauggacauugacccu

SEQ ID NO: 30793 - RNA, 19 nt, Artificial Sequence
  Synthetic
gggcauggacauugacccu

SEQ ID NO: 30794 - RNA, 20 nt, Artificial Sequence
  Synthetic
ggggcauggacauugacccu

SEQ ID NO: 30795 - RNA, 21 nt, Artificial Sequence
  Synthetic
uggggcauggacauugacccu

SEQ ID NO: 30796 - RNA, 22 nt, Artificial Sequence
  Synthetic
uuggggcauggacauugacccu

SEQ ID NO: 30797 - RNA, 23 nt, Artificial Sequence
  Synthetic
uuuggggcauggacauugacccu

SEQ ID NO: 30798 - RNA, 24 nt, Artificial Sequence
  Synthetic
cuuuggggcauggacauugacccu

SEQ ID NO: 30799 - RNA, 18 nt, Artificial Sequence
  Synthetic
caacgaggcagggccccu

SEQ ID NO: 30800 - RNA, 19 nt, Artificial Sequence
  Synthetic
acaacgaggcagggccccu

SEQ ID NO: 30801 - RNA, 20 nt, Artificial Sequence
  Synthetic
gacaacgaggcagggccccu

SEQ ID NO: 30802 - RNA, 21 nt, Artificial Sequence
  Synthetic
agacaacgaggcagggccccu

SEQ ID NO: 30803 - RNA, 22 nt, Artificial Sequence
  Synthetic
uagacaacgaggcagggccccu

SEQ ID NO: 30804 - RNA, 23 nt, Artificial Sequence
  Synthetic
uuagacaacgaggcagggccccu

SEQ ID NO: 30805 - RNA, 24 nt, Artificial Sequence
  Synthetic
guuagacaacgaggcagggccccu

SEQ ID NO: 30806 - RNA, 18 nt, Artificial Sequence
  Synthetic
gucccacuguucaagccu

SEQ ID NO: 30807 - RNA, 19 nt, Artificial Sequence
  Synthetic
ugucccacuguucaagccu

SEQ ID NO: 30808 - RNA, 20 nt, Artificial Sequence
  Synthetic
augucccacuguucaagccu

SEQ ID NO: 30809 - RNA, 21 nt, Artificial Sequence
  Synthetic
caugucccacuguucaagccu

SEQ ID NO: 30810 - RNA, 22 nt, Artificial Sequence
  Synthetic
ucaugucccacuguucaagccu

SEQ ID NO: 30811 - RNA, 23 nt, Artificial Sequence
  Synthetic
uucaugucccacuguucaagccu

SEQ ID NO: 30812 - RNA, 24 nt, Artificial Sequence
  Synthetic
guucaugucccacuguucaagccu

SEQ ID NO: 30813 - RNA, 18 nt, Artificial Sequence
  Synthetic
agaagaacucccucgccu

SEQ ID NO: 30814 - RNA, 19 nt, Artificial Sequence
  Synthetic
aagaagaacucccucgccu

SEQ ID NO: 30815 - RNA, 20 nt, Artificial Sequence
  Synthetic
gaagaagaacucccucgccu

SEQ ID NO: 30816 - RNA, 21 nt, Artificial Sequence
  Synthetic
agaagaagaacucccucgccu

SEQ ID NO: 30817 - RNA, 22 nt, Artificial Sequence
  Synthetic
uagaagaagaacucccucgccu

SEQ ID NO: 30818 - RNA, 23 nt, Artificial Sequence
  Synthetic
cuagaagaagaacucccucgccu

SEQ ID NO: 30819 - RNA, 24 nt, Artificial Sequence
  Synthetic
ccuagaagaagaacucccucgccu

SEQ ID NO: 30820 - RNA, 18 nt, Artificial Sequence
  Synthetic
acccccacacgguggccu

SEQ ID NO: 30821 - RNA, 19 nt, Artificial Sequence
  Synthetic
cacccccacacgguggccu

SEQ ID NO: 30822 - RNA, 20 nt, Artificial Sequence
  Synthetic
acacccccacacgguggccu

SEQ ID NO: 30823 - RNA, 21 nt, Artificial Sequence
  Synthetic
cacacccccacacgguggccu

SEQ ID NO: 30824 - RNA, 22 nt, Artificial Sequence
  Synthetic
ucacacccccacacgguggccu

SEQ ID NO: 30825 - RNA, 23 nt, Artificial Sequence
  Synthetic
uucacacccccacacgguggccu

SEQ ID NO: 30826 - RNA, 24 nt, Artificial Sequence
  Synthetic
guucacacccccacacgguggccu

SEQ ID NO: 30827 - RNA, 18 nt, Artificial Sequence
  Synthetic
  misc_feature (12)..(12): n is a, c, g, or u
aguugggggacnuugccu

SEQ ID NO: 30828 - RNA, 19 nt, Artificial Sequence
  Synthetic
  misc_feature (13)..(13): n is a, c, g, or u
gaguugggggacnuugccu

SEQ ID NO: 30829 - RNA, 20 nt, Artificial Sequence
  Synthetic
  misc_feature (14)..(14): n is a, c, g, or u
ggaguugggggacnuugccu

SEQ ID NO: 30830 - RNA, 21 nt, Artificial Sequence
  Synthetic
  misc_feature (15)..(15): n is a, c, g, or u
gggaguugggggacnuugccu

SEQ ID NO: 30831 - RNA, 22 nt, Artificial Sequence
  Synthetic
  misc_feature (16)..(16): n is a, c, g, or u
ugggaguugggggacnuugccu

SEQ ID NO: 30832 - RNA, 23 nt, Artificial Sequence
  Synthetic
  misc_feature (17)..(17): n is a, c, g, or u
uugggaguugggggacnuugccu

SEQ ID NO: 30833 - RNA, 24 nt, Artificial Sequence
  Synthetic
  misc_feature (18)..(18): n is a, c, g, or u
auugggaguugggggacnuugccu

SEQ ID NO: 30834 - RNA, 18 nt, Artificial Sequence
  Synthetic
uuacucucauuuuugccu

SEQ ID NO: 30835 - RNA, 19 nt, Artificial Sequence
  Synthetic
guuacucucauuuuugccu

SEQ ID NO: 30836 - RNA, 20 nt, Artificial Sequence
  Synthetic
aguuacucucauuuuugccu

SEQ ID NO: 30837 - RNA, 21 nt, Artificial Sequence
  Synthetic
gaguuacucucauuuuugccu

SEQ ID NO: 30838 - RNA, 22 nt, Artificial Sequence
  Synthetic
ggaguuacucucauuuuugccu

SEQ ID NO: 30839 - RNA, 23 nt, Artificial Sequence
  Synthetic
uggaguuacucucauuuuugccu

SEQ ID NO: 30840 - RNA, 24 nt, Artificial Sequence
  Synthetic
guggaguuacucucauuuuugccu

SEQ ID NO: 30841 - RNA, 18 nt, Artificial Sequence
  Synthetic
cuuucugugcccaauccu

SEQ ID NO: 30842 - RNA, 19 nt, Artificial Sequence
  Synthetic
  misc_feature (1)..(1): n is a, c, g, or u
ncuuucugugcccaauccu

SEQ ID NO: 30843 - RNA, 20 nt, Artificial Sequence
  Synthetic
  misc_feature (2)..(2): n is a, c, g, or u
ancuuucugugcccaauccu

SEQ ID NO: 30844 - RNA, 21 nt, Artificial Sequence
  Synthetic
  misc_feature (3)..(3): n is a, c, g, or u
aancuuucugugcccaauccu

SEQ ID NO: 30845 - RNA, 22 nt, Artificial Sequence
  Synthetic
  misc_feature (4)..(4): n is a, c, g, or u
gaancuuucugugcccaauccu

SEQ ID NO: 30846 - RNA, 23 nt, Artificial Sequence
  Synthetic
  misc_feature (5)..(5): n is a, c, g, or u
agaancuuucugugcccaauccu

SEQ ID NO: 30847 - RNA, 24 nt, Artificial Sequence
  Synthetic
  misc_feature (6)..(6): n is a, c, g, or u
cagaancuuucugugcccaauccu

SEQ ID NO: 30848 - RNA, 18 nt, Artificial Sequence
  Synthetic
ccgucggcgcugaauccu

SEQ ID NO: 30849 - RNA, 19 nt, Artificial Sequence
  Synthetic
cccgucggcgcugaauccu

SEQ ID NO: 30850 - RNA, 20 nt, Artificial Sequence
  Synthetic
ucccgucggcgcugaauccu

SEQ ID NO: 30851 - RNA, 18 nt, Artificial Sequence
  Synthetic
accaaaugccccuauccu

SEQ ID NO: 30852 - RNA, 19 nt, Artificial Sequence
  Synthetic
caccaaaugccccuauccu

SEQ ID NO: 30853 - RNA, 20 nt, Artificial Sequence
  Synthetic
ccaccaaaugccccuauccu

SEQ ID NO: 30854 - RNA, 21 nt, Artificial Sequence
  Synthetic
accaccaaaugccccuauccu

SEQ ID NO: 30855 - RNA, 22 nt, Artificial Sequence
  Synthetic
gaccaccaaaugccccuauccu

SEQ ID NO: 30856 - RNA, 23 nt, Artificial Sequence
  Synthetic
agaccaccaaaugccccuauccu

SEQ ID NO: 30857 - RNA, 24 nt, Artificial Sequence
  Synthetic
  misc_feature (1)..(1): n is a, c, g, or u
nagaccaccaaaugccccuauccu

SEQ ID NO: 30858 - RNA, 18 nt, Artificial Sequence
  Synthetic
gugggucaccauauuccu

SEQ ID NO: 30859 - RNA, 19 nt, Artificial Sequence
  Synthetic
ugugggucaccauauuccu

SEQ ID NO: 30860 - RNA, 20 nt, Artificial Sequence
  Synthetic
uugugggucaccauauuccu

SEQ ID NO: 30861 - RNA, 21 nt, Artificial Sequence
  Synthetic
uuugugggucaccauauuccu

SEQ ID NO: 30862 - RNA, 22 nt, Artificial Sequence
  Synthetic
uuuugugggucaccauauuccu

SEQ ID NO: 30863 - RNA, 23 nt, Artificial Sequence
  Synthetic
auuuugugggucaccauauuccu

SEQ ID NO: 30864 - RNA, 24 nt, Artificial Sequence
  Synthetic
cauuuugugggucaccauauuccu

SEQ ID NO: 30865 - RNA, 18 nt, Artificial Sequence
  Synthetic
accccucucguggucgcu

SEQ ID NO: 30866 - RNA, 19 nt, Artificial Sequence
  Synthetic
gaccccucucguggucgcu

SEQ ID NO: 30867 - RNA, 20 nt, Artificial Sequence
  Synthetic
cgaccccucucguggucgcu

SEQ ID NO: 30868 - RNA, 18 nt, Artificial Sequence
  Synthetic
  misc_feature (6)..(6): n is a, c, g, or u
cuagcngcuuguuucgcu

SEQ ID NO: 30869 - RNA, 19 nt, Artificial Sequence
  Synthetic
  misc_feature (7)..(7): n is a, c, g, or u
ccuagcngcuuguuucgcu

SEQ ID NO: 30870 - RNA, 20 nt, Artificial Sequence
  Synthetic
  misc_feature (8)..(8): n is a, c, g, or u
uccuagcngcuuguuucgcu

SEQ ID NO: 30871 - RNA, 21 nt, Artificial Sequence
  Synthetic
  misc_feature (9)..(9): n is a, c, g, or u
cuccuagcngcuuguuucgcu

SEQ ID NO: 30872 - RNA, 22 nt, Artificial Sequence
  Synthetic
  misc_feature (10)..(10): n is a, c, g, or u
acuccuagcngcuuguuucgcu

SEQ ID NO: 30873 - RNA, 23 nt, Artificial Sequence
  Synthetic
  misc_feature (11)..(11): n is a, c, g, or u
aacuccuagcngcuuguuucgcu

SEQ ID NO: 30874 - RNA, 24 nt, Artificial Sequence
  Synthetic
  misc_feature (12)..(12): n is a, c, g, or u
gaacuccuagcngcuuguuucgcu

SEQ ID NO: 30875 - RNA, 18 nt, Artificial Sequence
  Synthetic
ucuuuguauuaggaggcu

SEQ ID NO: 30876 - RNA, 19 nt, Artificial Sequence
  Synthetic
gucuuuguauuaggaggcu

SEQ ID NO: 30877 - RNA, 20 nt, Artificial Sequence
  Synthetic
ggucuuuguauuaggaggcu

SEQ ID NO: 30878 - RNA, 21 nt, Artificial Sequence
  Synthetic
aggucuuuguauuaggaggcu

SEQ ID NO: 30879 - RNA, 22 nt, Artificial Sequence
  Synthetic
aaggucuuuguauuaggaggcu

SEQ ID NO: 30880 - RNA, 23 nt, Artificial Sequence
  Synthetic
aaaggucuuuguauuaggaggcu

SEQ ID NO: 30881 - RNA, 24 nt, Artificial Sequence
  Synthetic
uaaaggucuuuguauuaggaggcu

SEQ ID NO: 30882 - RNA, 18 nt, Artificial Sequence
  Synthetic
aucccaucaucuugggcu

SEQ ID NO: 30883 - RNA, 19 nt, Artificial Sequence
  Synthetic
caucccaucaucuugggcu

SEQ ID NO: 30884 - RNA, 20 nt, Artificial Sequence
  Synthetic
ccaucccaucaucuugggcu

SEQ ID NO: 30885 - RNA, 21 nt, Artificial Sequence
  Synthetic
cccaucccaucaucuugggcu

SEQ ID NO: 30886 - RNA, 22 nt, Artificial Sequence
  Synthetic
ucccaucccaucaucuugggcu

SEQ ID NO: 30887 - RNA, 23 nt, Artificial Sequence
  Synthetic
uucccaucccaucaucuugggcu

SEQ ID NO: 30888 - RNA, 24 nt, Artificial Sequence
  Synthetic
auucccaucccaucaucuugggcu

SEQ ID NO: 30889 - RNA, 18 nt, Artificial Sequence
  Synthetic
caccuccuucccauggcu

SEQ ID NO: 30890 - RNA, 19 nt, Artificial Sequence
  Synthetic
acaccuccuucccauggcu

SEQ ID NO: 30891 - RNA, 20 nt, Artificial Sequence
  Synthetic
uacaccuccuucccauggcu

SEQ ID NO: 30892 - RNA, 21 nt, Artificial Sequence
  Synthetic
guacaccuccuucccauggcu

SEQ ID NO: 30893 - RNA, 22 nt, Artificial Sequence
  Synthetic
aguacaccuccuucccauggcu

SEQ ID NO: 30894 - RNA, 23 nt, Artificial Sequence
  Synthetic
aaguacaccuccuucccauggcu

SEQ ID NO: 30895 - RNA, 24 nt, Artificial Sequence
  Synthetic
gaaguacaccuccuucccauggcu

SEQ ID NO: 30896 - RNA, 18 nt, Artificial Sequence
  Synthetic
gcugugccuuggguggcu

SEQ ID NO: 30897 - RNA, 19 nt, Artificial Sequence
  Synthetic
agcugugccuuggguggcu

SEQ ID NO: 30898 - RNA, 20 nt, Artificial Sequence
  Synthetic
aagcugugccuuggguggcu

SEQ ID NO: 30899 - RNA, 21 nt, Artificial Sequence
  Synthetic
caagcugugccuuggguggcu

SEQ ID NO: 30900 - RNA, 22 nt, Artificial Sequence
  Synthetic
ccaagcugugccuuggguggcu

SEQ ID NO: 30901 - RNA, 23 nt, Artificial Sequence
  Synthetic
uccaagcugugccuuggguggcu

SEQ ID NO: 30902 - RNA, 24 nt, Artificial Sequence
  Synthetic
cuccaagcugugccuuggguggcu

SEQ ID NO: 30903 - RNA, 18 nt, Artificial Sequence
  Synthetic
  misc_feature (12)..(12): n is a, c, g, or u
acccccaaccanacugcu

SEQ ID NO: 30904 - RNA, 19 nt, Artificial Sequence
  Synthetic
  misc_feature (13)..(13): n is a, c, g, or u
cacccccaaccanacugcu

SEQ ID NO: 30905 - RNA, 20 nt, Artificial Sequence
  Synthetic
  misc_feature (14)..(14): n is a, c, g, or u
gcacccccaaccanacugcu

SEQ ID NO: 30906 - RNA, 21 nt, Artificial Sequence
  Synthetic
  misc_feature (15)..(15): n is a, c, g, or u
ugcacccccaaccanacugcu

SEQ ID NO: 30907 - RNA, 22 nt, Artificial Sequence
  Synthetic
  misc_feature (16)..(16): n is a, c, g, or u
uugcacccccaaccanacugcu

SEQ ID NO: 30908 - RNA, 23 nt, Artificial Sequence
  Synthetic
  misc_feature (17)..(17): n is a, c, g, or u
auugcacccccaaccanacugcu

SEQ ID NO: 30909 - RNA, 24 nt, Artificial Sequence
  Synthetic
  misc_feature (18)..(18): n is a, c, g, or u
cauugcacccccaaccanacugcu

SEQ ID NO: 30910 - RNA, 18 nt, Artificial Sequence
  Synthetic
  misc_feature (3)..(3): n is a, c, g, or u
auncgcacuccaccugcu

SEQ ID NO: 30911 - RNA, 19 nt, Artificial Sequence
  Synthetic
  misc_feature (4)..(4): n is a, c, g, or u
gauncgcacuccaccugcu

SEQ ID NO: 30912 - RNA, 20 nt, Artificial Sequence
  Synthetic
  misc_feature (5)..(5): n is a, c, g, or u
ggauncgcacuccaccugcu

SEQ ID NO: 30913 - RNA, 21 nt, Artificial Sequence
  Synthetic
  misc_feature (6)..(6): n is a, c, g, or u
uggauncgcacuccaccugcu

SEQ ID NO: 30914 - RNA, 22 nt, Artificial Sequence
  Synthetic
  misc_feature (7)..(7): n is a, c, g, or u
guggauncgcacuccaccugcu

SEQ ID NO: 30915 - RNA, 23 nt, Artificial Sequence
  Synthetic
  misc_feature (8)..(8): n is a, c, g, or u
uguggauncgcacuccaccugcu

SEQ ID NO: 30916 - RNA, 24 nt, Artificial Sequence
  Synthetic
  misc_feature (9)..(9): n is a, c, g, or u
guguggauncgcacuccaccugcu

SEQ ID NO: 30917 - RNA, 18 nt, Artificial Sequence
  Synthetic
  misc_feature (3)..(3): n is a, c, g, or u
ggncuguauuuuccugcu

SEQ ID NO: 30918 - RNA, 19 nt, Artificial Sequence
  Synthetic
  misc_feature (4)..(4): n is a, c, g, or u
gggncuguauuuuccugcu

SEQ ID NO: 30919 - RNA, 20 nt, Artificial Sequence
  Synthetic
  misc_feature (5)..(5): n is a, c, g, or u
ggggncuguauuuuccugcu

SEQ ID NO: 30920 - RNA, 21 nt, Artificial Sequence
  Synthetic
  misc_feature (6)..(6): n is a, c, g, or u
aggggncuguauuuuccugcu

SEQ ID NO: 30921 - RNA, 22 nt, Artificial Sequence
  Synthetic
  misc_feature (7)..(7): n is a, c, g, or u
aaggggncuguauuuuccugcu

SEQ ID NO: 30922 - RNA, 23 nt, Artificial Sequence
  Synthetic
  misc_feature (8)..(8): n is a, c, g, or u
uaaggggncuguauuuuccugcu

SEQ ID NO: 30923 - RNA, 24 nt, Artificial Sequence
  Synthetic
  misc_feature (9)..(9): n is a, c, g, or u
guaaggggncuguauuuuccugcu

SEQ ID NO: 30924 - RNA, 18 nt, Artificial Sequence
  Synthetic
  misc_feature (12)..(12): n is a, c, g, or u
uggcugcuaggnugugcu

SEQ ID NO: 30925 - RNA, 19 nt, Artificial Sequence
  Synthetic
  misc_feature (13)..(13): n is a, c, g, or u
auggcugcuaggnugugcu

SEQ ID NO: 30926 - RNA, 20 nt, Artificial Sequence
  Synthetic
  misc_feature (14)..(14): n is a, c, g, or u
cauggcugcuaggnugugcu

SEQ ID NO: 30927 - RNA, 21 nt, Artificial Sequence
  Synthetic
  misc_feature (15)..(15): n is a, c, g, or u
ccauggcugcuaggnugugcu

SEQ ID NO: 30928 - RNA, 22 nt, Artificial Sequence
  Synthetic
  misc_feature (16)..(16): n is a, c, g, or u
cccauggcugcuaggnugugcu

SEQ ID NO: 30929 - RNA, 23 nt, Artificial Sequence
  Synthetic
  misc_feature (17)..(17): n is a, c, g, or u
ucccauggcugcuaggnugugcu

SEQ ID NO: 30930 - RNA, 24 nt, Artificial Sequence
  Synthetic
  misc_feature (18)..(18): n is a, c, g, or u
uucccauggcugcuaggnugugcu

SEQ ID NO: 30931 - RNA, 18 nt, Artificial Sequence
  Synthetic
accugcaccacucuugcu

SEQ ID NO: 30932 - RNA, 19 nt, Artificial Sequence
  Synthetic
aaccugcaccacucuugcu

SEQ ID NO: 30933 - RNA, 20 nt, Artificial Sequence
  Synthetic
aaaccugcaccacucuugcu

SEQ ID NO: 30934 - RNA, 21 nt, Artificial Sequence
  Synthetic
aaaaccugcaccacucuugcu

SEQ ID NO: 30935 - RNA, 22 nt, Artificial Sequence
  Synthetic
caaaaccugcaccacucuugcu

SEQ ID NO: 30936 - RNA, 23 nt, Artificial Sequence
  Synthetic
gcaaaaccugcaccacucuugcu

SEQ ID NO: 30937 - RNA, 24 nt, Artificial Sequence
  Synthetic
ugcaaaaccugcaccacucuugcu

SEQ ID NO: 30938 - RNA, 18 nt, Artificial Sequence
  Synthetic
gccugugccuucucaucu

SEQ ID NO: 30939 - RNA, 19 nt, Artificial Sequence
  Synthetic
cgccugugccuucucaucu

SEQ ID NO: 30940 - RNA, 20 nt, Artificial Sequence
  Synthetic
ccgccugugccuucucaucu

SEQ ID NO: 30941 - RNA, 21 nt, Artificial Sequence
  Synthetic
cccgccugugccuucucaucu

SEQ ID NO: 30942 - RNA, 22 nt, Artificial Sequence
  Synthetic
ccccgccugugccuucucaucu

SEQ ID NO: 30943 - RNA, 23 nt, Artificial Sequence
  Synthetic
uccccgccugugccuucucaucu

SEQ ID NO: 30944 - RNA, 24 nt, Artificial Sequence
  Synthetic
cuccccgccugugccuucucaucu

SEQ ID NO: 30945 - RNA, 18 nt, Artificial Sequence
  Synthetic
accaauuuuuuguuaucu

SEQ ID NO: 30946 - RNA, 19 nt, Artificial Sequence
  Synthetic
uaccaauuuuuuguuaucu

SEQ ID NO: 30947 - RNA, 20 nt, Artificial Sequence
  Synthetic
uuaccaauuuuuuguuaucu

SEQ ID NO: 30948 - RNA, 21 nt, Artificial Sequence
  Synthetic
guuaccaauuuuuuguuaucu

SEQ ID NO: 30949 - RNA, 22 nt, Artificial Sequence
  Synthetic
uguuaccaauuuuuuguuaucu

SEQ ID NO: 30950 - RNA, 23 nt, Artificial Sequence
  Synthetic
cuguuaccaauuuuuuguuaucu

SEQ ID NO: 30951 - RNA, 24 nt, Artificial Sequence
  Synthetic
gcuguuaccaauuuuuuguuaucu

SEQ ID NO: 30952 - RNA, 18 nt, Artificial Sequence
  Synthetic
cccagucucuccaccucu

SEQ ID NO: 30953 - RNA, 19 nt, Artificial Sequence
  Synthetic
ccccagucucuccaccucu

SEQ ID NO: 30954 - RNA, 20 nt, Artificial Sequence
  Synthetic
accccagucucuccaccucu

SEQ ID NO: 30955 - RNA, 21 nt, Artificial Sequence
  Synthetic
aaccccagucucuccaccucu

SEQ ID NO: 30956 - RNA, 22 nt, Artificial Sequence
  Synthetic
caaccccagucucuccaccucu

SEQ ID NO: 30957 - RNA, 23 nt, Artificial Sequence
  Synthetic
ccaaccccagucucuccaccucu

SEQ ID NO: 30958 - RNA, 24 nt, Artificial Sequence
  Synthetic
gccaaccccagucucuccaccucu

SEQ ID NO: 30959 - RNA, 18 nt, Artificial Sequence
  Synthetic
cagcaugggagcaccucu

SEQ ID NO: 30960 - RNA, 19 nt, Artificial Sequence
  Synthetic
acagcaugggagcaccucu

SEQ ID NO: 30961 - RNA, 20 nt, Artificial Sequence
  Synthetic
uacagcaugggagcaccucu

SEQ ID NO: 30962 - RNA, 21 nt, Artificial Sequence
  Synthetic
cuacagcaugggagcaccucu

SEQ ID NO: 30963 - RNA, 22 nt, Artificial Sequence
  Synthetic
gcuacagcaugggagcaccucu

SEQ ID NO: 30964 - RNA, 23 nt, Artificial Sequence
  Synthetic
agcuacagcaugggagcaccucu

SEQ ID NO: 30965 - RNA, 24 nt, Artificial Sequence
  Synthetic
gagcuacagcaugggagcaccucu

SEQ ID NO: 30966 - RNA, 18 nt, Artificial Sequence
  Synthetic
acaccgcuucagcccucu

SEQ ID NO: 30967 - RNA, 19 nt, Artificial Sequence
  Synthetic
gacaccgcuucagcccucu

SEQ ID NO: 30968 - RNA, 20 nt, Artificial Sequence
  Synthetic
cgacaccgcuucagcccucu

SEQ ID NO: 30969 - RNA, 21 nt, Artificial Sequence
  Synthetic
ucgacaccgcuucagcccucu

SEQ ID NO: 30970 - RNA, 22 nt, Artificial Sequence
  Synthetic
cucgacaccgcuucagcccucu

SEQ ID NO: 30971 - RNA, 23 nt, Artificial Sequence
  Synthetic
acucgacaccgcuucagcccucu

SEQ ID NO: 30972 - RNA, 24 nt, Artificial Sequence
  Synthetic
uacucgacaccgcuucagcccucu

SEQ ID NO: 30973 - RNA, 18 nt, Artificial Sequence
  Synthetic
cuuacaaggccuuucucu

SEQ ID NO: 30974 - RNA, 19 nt, Artificial Sequence
  Synthetic
acuuacaaggccuuucucu

SEQ ID NO: 30975 - RNA, 20 nt, Artificial Sequence
  Synthetic
aacuuacaaggccuuucucu

SEQ ID NO: 30976 - RNA, 21 nt, Artificial Sequence
  Synthetic
caacuuacaaggccuuucucu

SEQ ID NO: 30977 - RNA, 22 nt, Artificial Sequence
  Synthetic
ccaacuuacaaggccuuucucu

SEQ ID NO: 30978 - RNA, 23 nt, Artificial Sequence
  Synthetic
gccaacuuacaaggccuuucucu

SEQ ID NO: 30979 - RNA, 24 nt, Artificial Sequence
  Synthetic
cgccaacuuacaaggccuuucucu

SEQ ID NO: 30980 - RNA, 18 nt, Artificial Sequence
  Synthetic
  misc_feature (7)..(7): n is a, c, g, or u
ucaacgnauugugggucu

SEQ ID NO: 30981 - RNA, 19 nt, Artificial Sequence
  Synthetic
  misc_feature (8)..(8): n is a, c, g, or u
gucaacgnauugugggucu

SEQ ID NO: 30982 - RNA, 20 nt, Artificial Sequence
  Synthetic
  misc_feature (9)..(9): n is a, c, g, or u
ugucaacgnauugugggucu

SEQ ID NO: 30983 - RNA, 21 nt, Artificial Sequence
  Synthetic
  misc_feature (10)..(10): n is a, c, g, or u
uugucaacgnauugugggucu

SEQ ID NO: 30984 - RNA, 22 nt, Artificial Sequence
  Synthetic
  misc_feature (11)..(11): n is a, c, g, or u
uuugucaacgnauugugggucu

SEQ ID NO: 30985 - RNA, 23 nt, Artificial Sequence
  Synthetic
  misc_feature (12)..(12): n is a, c, g, or u
guuugucaacgnauugugggucu

SEQ ID NO: 30986 - RNA, 24 nt, Artificial Sequence
  Synthetic
  misc_feature (13)..(13): n is a, c, g, or u
gguuugucaacgnauugugggucu

SEQ ID NO: 30987 - RNA, 18 nt, Artificial Sequence
  Synthetic
cuugaguauuuggugucu

SEQ ID NO: 30988 - RNA, 19 nt, Artificial Sequence
  Synthetic
  misc_feature (1)..(1): n is a, c, g, or u
ncuugaguauuuggugucu

SEQ ID NO: 30989 - RNA, 20 nt, Artificial Sequence
  Synthetic
  misc_feature (2)..(2): n is a, c, g, or u
uncuugaguauuuggugucu

SEQ ID NO: 30990 - RNA, 21 nt, Artificial Sequence
  Synthetic
  misc_feature (3)..(3): n is a, c, g, or u
guncuugaguauuuggugucu

SEQ ID NO: 30991 - RNA, 22 nt, Artificial Sequence
  Synthetic
  misc_feature (4)..(4): n is a, c, g, or u
uguncuugaguauuuggugucu

SEQ ID NO: 30992 - RNA, 23 nt, Artificial Sequence
  Synthetic
  misc_feature (5)..(5): n is a, c, g, or u
cuguncuugaguauuuggugucu

SEQ ID NO: 30993 - RNA, 24 nt, Artificial Sequence
  Synthetic
  misc_feature (6)..(6): n is a, c, g, or u
acuguncuugaguauuuggugucu

SEQ ID NO: 30994 - RNA, 18 nt, Artificial Sequence
  Synthetic
ucaggcacagggcauucu

SEQ ID NO: 30995 - RNA, 19 nt, Artificial Sequence
  Synthetic
cucaggcacagggcauucu

SEQ ID NO: 30996 - RNA, 20 nt, Artificial Sequence
  Synthetic
ccucaggcacagggcauucu

SEQ ID NO: 30997 - RNA, 21 nt, Artificial Sequence
  Synthetic
cccucaggcacagggcauucu

SEQ ID NO: 30998 - RNA, 22 nt, Artificial Sequence
  Synthetic
gcccucaggcacagggcauucu

SEQ ID NO: 30999 - RNA, 23 nt, Artificial Sequence
  Synthetic
agcccucaggcacagggcauucu

SEQ ID NO: 31000 - RNA, 24 nt, Artificial Sequence
  Synthetic
gagcccucaggcacagggcauucu

SEQ ID NO: 31001 - RNA, 18 nt, Artificial Sequence
  Synthetic
aaagaauuuggagcuucu

SEQ ID NO: 31002 - RNA, 19 nt, Artificial Sequence
  Synthetic
uaaagaauuuggagcuucu

SEQ ID NO: 31003 - RNA, 20 nt, Artificial Sequence
  Synthetic
auaaagaauuuggagcuucu

SEQ ID NO: 31004 - RNA, 21 nt, Artificial Sequence
  Synthetic
uauaaagaauuuggagcuucu

SEQ ID NO: 31005 - RNA, 22 nt, Artificial Sequence
  Synthetic
uuauaaagaauuuggagcuucu

SEQ ID NO: 31006 - RNA, 23 nt, Artificial Sequence
  Synthetic
cuuauaaagaauuuggagcuucu

SEQ ID NO: 31007 - RNA, 24 nt, Artificial Sequence
  Synthetic
ccuuauaaagaauuuggagcuucu

SEQ ID NO: 31008 - RNA, 18 nt, Artificial Sequence
  Synthetic
ucacaucaucaaucuucu

SEQ ID NO: 31009 - RNA, 19 nt, Artificial Sequence
  Synthetic
cucacaucaucaaucuucu

SEQ ID NO: 31010 - RNA, 20 nt, Artificial Sequence
  Synthetic
ucucacaucaucaaucuucu

SEQ ID NO: 31011 - RNA, 21 nt, Artificial Sequence
  Synthetic
cucucacaucaucaaucuucu

SEQ ID NO: 31012 - RNA, 22 nt, Artificial Sequence
  Synthetic
ucucucacaucaucaaucuucu

SEQ ID NO: 31013 - RNA, 23 nt, Artificial Sequence
  Synthetic
cucucucacaucaucaaucuucu

SEQ ID NO: 31014 - RNA, 24 nt, Artificial Sequence
  Synthetic
ccucucucacaucaucaaucuucu

SEQ ID NO: 31015 - RNA, 18 nt, Artificial Sequence
  Synthetic
caucuucuuguugguucu

SEQ ID NO: 31016 - RNA, 19 nt, Artificial Sequence
  Synthetic
ucaucuucuuguugguucu

SEQ ID NO: 31017 - RNA, 20 nt, Artificial Sequence
  Synthetic
cucaucuucuuguugguucu

SEQ ID NO: 31018 - RNA, 21 nt, Artificial Sequence
  Synthetic
ccucaucuucuuguugguucu

SEQ ID NO: 31019 - RNA, 22 nt, Artificial Sequence
  Synthetic
gccucaucuucuuguugguucu

SEQ ID NO: 31020 - RNA, 23 nt, Artificial Sequence
  Synthetic
ugccucaucuucuuguugguucu

SEQ ID NO: 31021 - RNA, 24 nt, Artificial Sequence
  Synthetic
augccucaucuucuuguugguucu

SEQ ID NO: 31022 - RNA, 18 nt, Artificial Sequence
  Synthetic
  misc_feature (6)..(6): n is a, c, g, or u
aacucnguuguccuuucu

SEQ ID NO: 31023 - RNA, 19 nt, Artificial Sequence
  Synthetic
  misc_feature (7)..(7): n is a, c, g, or u
caacucnguuguccuuucu

SEQ ID NO: 31024 - RNA, 20 nt, Artificial Sequence
  Synthetic
  misc_feature (8)..(8): n is a, c, g, or u
acaacucnguuguccuuucu

SEQ ID NO: 31025 - RNA, 21 nt, Artificial Sequence
  Synthetic
  misc_feature (9)..(9): n is a, c, g, or u
gacaacucnguuguccuuucu

SEQ ID NO: 31026 - RNA, 22 nt, Artificial Sequence
  Synthetic
  misc_feature (10)..(10): n is a, c, g, or u
ugacaacucnguuguccuuucu

SEQ ID NO: 31027 - RNA, 23 nt, Artificial Sequence
  Synthetic
  misc_feature (11)..(11): n is a, c, g, or u
cugacaacucnguuguccuuucu

SEQ ID NO: 31028 - RNA, 24 nt, Artificial Sequence
  Synthetic
  misc_feature (12)..(12): n is a, c, g, or u
acugacaacucnguuguccuuucu

SEQ ID NO: 31029 - RNA, 18 nt, Artificial Sequence
  Synthetic
gggccucagcccguuucu

SEQ ID NO: 31030 - RNA, 19 nt, Artificial Sequence
  Synthetic
ugggccucagcccguuucu

SEQ ID NO: 31031 - RNA, 20 nt, Artificial Sequence
  Synthetic
gugggccucagcccguuucu

SEQ ID NO: 31032 - RNA, 21 nt, Artificial Sequence
  Synthetic
agugggccucagcccguuucu

SEQ ID NO: 31033 - RNA, 22 nt, Artificial Sequence
  Synthetic
gagugggccucagcccguuucu

SEQ ID NO: 31034 - RNA, 23 nt, Artificial Sequence
  Synthetic
ggagugggccucagcccguuucu

SEQ ID NO: 31035 - RNA, 24 nt, Artificial Sequence
  Synthetic
gggagugggccucagcccguuucu

SEQ ID NO: 31036 - RNA, 18 nt, Artificial Sequence
  Synthetic
ccugcugguggcuccagu

SEQ ID NO: 31037 - RNA, 19 nt, Artificial Sequence
  Synthetic
uccugcugguggcuccagu

SEQ ID NO: 31038 - RNA, 20 nt, Artificial Sequence
  Synthetic
uuccugcugguggcuccagu

SEQ ID NO: 31039 - RNA, 21 nt, Artificial Sequence
  Synthetic
uuuccugcugguggcuccagu

SEQ ID NO: 31040 - RNA, 22 nt, Artificial Sequence
  Synthetic
uuuuccugcugguggcuccagu

SEQ ID NO: 31041 - RNA, 23 nt, Artificial Sequence
  Synthetic
auuuuccugcugguggcuccagu

SEQ ID NO: 31042 - RNA, 24 nt, Artificial Sequence
  Synthetic
uauuuuccugcugguggcuccagu

SEQ ID NO: 31043 - RNA, 18 nt, Artificial Sequence
  Synthetic
acuguuggauccgagagu

SEQ ID NO: 31044 - RNA, 19 nt, Artificial Sequence
  Synthetic
cacuguuggauccgagagu

SEQ ID NO: 31045 - RNA, 20 nt, Artificial Sequence
  Synthetic
gcacuguuggauccgagagu

SEQ ID NO: 31046 - RNA, 21 nt, Artificial Sequence
  Synthetic
agcacuguuggauccgagagu

SEQ ID NO: 31047 - RNA, 22 nt, Artificial Sequence
  Synthetic
aagcacuguuggauccgagagu

SEQ ID NO: 31048 - RNA, 23 nt, Artificial Sequence
  Synthetic
caagcacuguuggauccgagagu

SEQ ID NO: 31049 - RNA, 24 nt, Artificial Sequence
  Synthetic
ccaagcacuguuggauccgagagu

SEQ ID NO: 31050 - RNA, 18 nt, Artificial Sequence
  Synthetic
  misc_feature (13)..(13): n is a, c, g, or u
cucacaauaccanagagu

SEQ ID NO: 31051 - RNA, 19 nt, Artificial Sequence
  Synthetic
  misc_feature (14)..(14): n is a, c, g, or u
ccucacaauaccanagagu

SEQ ID NO: 31052 - RNA, 20 nt, Artificial Sequence
  Synthetic
  misc_feature (15)..(15): n is a, c, g, or u
uccucacaauaccanagagu

SEQ ID NO: 31053 - RNA, 21 nt, Artificial Sequence
  Synthetic
  misc_feature (16)..(16): n is a, c, g, or u
auccucacaauaccanagagu

SEQ ID NO: 31054 - RNA, 22 nt, Artificial Sequence
  Synthetic
  misc_feature (17)..(17): n is a, c, g, or u
aauccucacaauaccanagagu

SEQ ID NO: 31055 - RNA, 23 nt, Artificial Sequence
  Synthetic
  misc_feature (18)..(18): n is a, c, g, or u
aaauccucacaauaccanagagu

SEQ ID NO: 31056 - RNA, 24 nt, Artificial Sequence
  Synthetic
  misc_feature (19)..(19): n is a, c, g, or u
aaaauccucacaauaccanagagu

SEQ ID NO: 31057 - RNA, 18 nt, Artificial Sequence
  Synthetic
uuaaggacugggaggagu

SEQ ID NO: 31058 - RNA, 19 nt, Artificial Sequence
  Synthetic
uuuaaggacugggaggagu

SEQ ID NO: 31059 - RNA, 20 nt, Artificial Sequence
  Synthetic
auuuaaggacugggaggagu

SEQ ID NO: 31060 - RNA, 21 nt, Artificial Sequence
  Synthetic
uauuuaaggacugggaggagu

SEQ ID NO: 31061 - RNA, 22 nt, Artificial Sequence
  Synthetic
guauuuaaggacugggaggagu

SEQ ID NO: 31062 - RNA, 23 nt, Artificial Sequence
  Synthetic
uguauuuaaggacugggaggagu

SEQ ID NO: 31063 - RNA, 24 nt, Artificial Sequence
  Synthetic
guguauuuaaggacugggaggagu

SEQ ID NO: 31064 - RNA, 18 nt, Artificial Sequence
  Synthetic
ggcaaacaagguaggagu

SEQ ID NO: 31065 - RNA, 19 nt, Artificial Sequence
  Synthetic
uggcaaacaagguaggagu

SEQ ID NO: 31066 - RNA, 20 nt, Artificial Sequence
  Synthetic
auggcaaacaagguaggagu

SEQ ID NO: 31067 - RNA, 21 nt, Artificial Sequence
  Synthetic
aauggcaaacaagguaggagu

SEQ ID NO: 31068 - RNA, 22 nt, Artificial Sequence
  Synthetic
caauggcaaacaagguaggagu

SEQ ID NO: 31069 - RNA, 23 nt, Artificial Sequence
  Synthetic
ccaauggcaaacaagguaggagu

SEQ ID NO: 31070 - RNA, 24 nt, Artificial Sequence
  Synthetic
gccaauggcaaacaagguaggagu

SEQ ID NO: 31071 - RNA, 18 nt, Artificial Sequence
  Synthetic
  misc_feature (9)..(9): n is a, c, g, or u
gguuauaunauugggagu

SEQ ID NO: 31072 - RNA, 19 nt, Artificial Sequence
  Synthetic
  misc_feature (10)..(10): n is a, c, g, or u
ggguuauaunauugggagu

SEQ ID NO: 31073 - RNA, 20 nt, Artificial Sequence
  Synthetic
  misc_feature (11)..(11): n is a, c, g, or u
uggguuauaunauugggagu

SEQ ID NO: 31074 - RNA, 21 nt, Artificial Sequence
  Synthetic
  misc_feature (12)..(12): n is a, c, g, or u
auggguuauaunauugggagu

SEQ ID NO: 31075 - RNA, 22 nt, Artificial Sequence
  Synthetic
  misc_feature (13)..(13): n is a, c, g, or u
uauggguuauaunauugggagu

SEQ ID NO: 31076 - RNA, 23 nt, Artificial Sequence
  Synthetic
  misc_feature (14)..(14): n is a, c, g, or u
uuauggguuauaunauugggagu

SEQ ID NO: 31077 - RNA, 24 nt, Artificial Sequence
  Synthetic
  misc_feature (15)..(15): n is a, c, g, or u
uuuauggguuauaunauugggagu

SEQ ID NO: 31078 - RNA, 18 nt, Artificial Sequence
  Synthetic
  misc_feature (12)..(12): n is a, c, g, or u
agaucucaaucnccgcgu

SEQ ID NO: 31079 - RNA, 19 nt, Artificial Sequence
  Synthetic
  misc_feature (13)..(13): n is a, c, g, or u
aagaucucaaucnccgcgu

SEQ ID NO: 31080 - RNA, 20 nt, Artificial Sequence
  Synthetic
  misc_feature (14)..(14): n is a, c, g, or u
gaagaucucaaucnccgcgu

SEQ ID NO: 31081 - RNA, 21 nt, Artificial Sequence
  Synthetic
  misc_feature (15)..(15): n is a, c, g, or u
cgaagaucucaaucnccgcgu

SEQ ID NO: 31082 - RNA, 22 nt, Artificial Sequence
  Synthetic
  misc_feature (16)..(16): n is a, c, g, or u
acgaagaucucaaucnccgcgu

SEQ ID NO: 31083 - RNA, 23 nt, Artificial Sequence
  Synthetic
  misc_feature (17)..(17): n is a, c, g, or u
gacgaagaucucaaucnccgcgu

SEQ ID NO: 31084 - RNA, 24 nt, Artificial Sequence
  Synthetic
  misc_feature (18)..(18): n is a, c, g, or u
agacgaagaucucaaucnccgcgu

SEQ ID NO: 31085 - RNA, 18 nt, Artificial Sequence
  Synthetic
  misc_feature (2)..(2): n is a, c, g, or u
  misc_feature (14)..(15): n is a, c, g, or u
cncuucuccgccunncgu

SEQ ID NO: 31086 - RNA, 19 nt, Artificial Sequence
  Synthetic
  misc_feature (3)..(3): n is a, c, g, or u
  misc_feature (15)..(16): n is a, c, g, or u
ccncuucuccgccunncgu

SEQ ID NO: 31087 - RNA, 20 nt, Artificial Sequence
  Synthetic
  misc_feature (4)..(4): n is a, c, g, or u
  misc_feature (16)..(17): n is a, c, g, or u
cccncuucuccgccunncgu

SEQ ID NO: 31088 - RNA, 21 nt, Artificial Sequence
  Synthetic
  misc_feature (5)..(5): n is a, c, g, or u
  misc_feature (17)..(18): n is a, c, g, or u
gcccncuucuccgccunncgu

SEQ ID NO: 31089 - RNA, 22 nt, Artificial Sequence
  Synthetic
  misc_feature (6)..(6): n is a, c, g, or u
  misc_feature (18)..(19): n is a, c, g, or u
cgcccncuucuccgccunncgu

SEQ ID NO: 31090 - RNA, 23 nt, Artificial Sequence
  Synthetic
  misc_feature (7)..(7): n is a, c, g, or u
  misc_feature (19)..(20): n is a, c, g, or u
ccgcccncuucuccgccunncgu

SEQ ID NO: 31091 - RNA, 24 nt, Artificial Sequence
  Synthetic
  misc_feature (8)..(8): n is a, c, g, or u
  misc_feature (20)..(21): n is a, c, g, or u
gccgcccncuucuccgccunncgu

SEQ ID NO: 31092 - RNA, 18 nt, Artificial Sequence
  Synthetic
  misc_feature (3)..(3): n is a, c, g, or u
canagagucuagacucgu

SEQ ID NO: 31093 - RNA, 19 nt, Artificial Sequence
  Synthetic
  misc_feature (4)..(4): n is a, c, g, or u
ccanagagucuagacucgu

SEQ ID NO: 31094 - RNA, 20 nt, Artificial Sequence
  Synthetic
  misc_feature (5)..(5): n is a, c, g, or u
accanagagucuagacucgu

SEQ ID NO: 31095 - RNA, 21 nt, Artificial Sequence
  Synthetic
  misc_feature (6)..(6): n is a, c, g, or u
uaccanagagucuagacucgu

SEQ ID NO: 31096 - RNA, 22 nt, Artificial Sequence
  Synthetic
  misc_feature (7)..(7): n is a, c, g, or u
auaccanagagucuagacucgu

SEQ ID NO: 31097 - RNA, 23 nt, Artificial Sequence
  Synthetic
  misc_feature (8)..(8): n is a, c, g, or u
aauaccanagagucuagacucgu

SEQ ID NO: 31098 - RNA, 24 nt, Artificial Sequence
  Synthetic
  misc_feature (9)..(9): n is a, c, g, or u
caauaccanagagucuagacucgu

SEQ ID NO: 31099 - RNA, 18 nt, Artificial Sequence
  Synthetic
uucccuuuggauaaaggu

SEQ ID NO: 31100 - RNA, 19 nt, Artificial Sequence
  Synthetic
cuucccuuuggauaaaggu

SEQ ID NO: 31101 - RNA, 20 nt, Artificial Sequence
  Synthetic
acuucccuuuggauaaaggu

SEQ ID NO: 31102 - RNA, 21 nt, Artificial Sequence
  Synthetic
uacuucccuuuggauaaaggu

SEQ ID NO: 31103 - RNA, 22 nt, Artificial Sequence
  Synthetic
auacuucccuuuggauaaaggu

SEQ ID NO: 31104 - RNA, 23 nt, Artificial Sequence
  Synthetic
aauacuucccuuuggauaaaggu

SEQ ID NO: 31105 - RNA, 24 nt, Artificial Sequence
  Synthetic
aaauacuucccuuuggauaaaggu

SEQ ID NO: 31106 - RNA, 18 nt, Artificial Sequence
  Synthetic
uccuuggacucauaaggu

SEQ ID NO: 31107 - RNA, 19 nt, Artificial Sequence
  Synthetic
uuccuuggacucauaaggu

SEQ ID NO: 31108 - RNA, 20 nt, Artificial Sequence
  Synthetic
auuccuuggacucauaaggu

SEQ ID NO: 31109 - RNA, 21 nt, Artificial Sequence
  Synthetic
uauuccuuggacucauaaggu

SEQ ID NO: 31110 - RNA, 22 nt, Artificial Sequence
  Synthetic
guauuccuuggacucauaaggu

SEQ ID NO: 31111 - RNA, 23 nt, Artificial Sequence
  Synthetic
aguauuccuuggacucauaaggu

SEQ ID NO: 31112 - RNA, 24 nt, Artificial Sequence
  Synthetic
uaguauuccuuggacucauaaggu

SEQ ID NO: 31113 - RNA, 18 nt, Artificial Sequence
  Synthetic
cuuccaccaaucggaggu

SEQ ID NO: 31114 - RNA, 19 nt, Artificial Sequence
  Synthetic
gcuuccaccaaucggaggu

SEQ ID NO: 31115 - RNA, 20 nt, Artificial Sequence
  Synthetic
ugcuuccaccaaucggaggu

SEQ ID NO: 31116 - RNA, 21 nt, Artificial Sequence
  Synthetic
cugcuuccaccaaucggaggu

SEQ ID NO: 31117 - RNA, 22 nt, Artificial Sequence
  Synthetic
ccugcuuccaccaaucggaggu

SEQ ID NO: 31118 - RNA, 23 nt, Artificial Sequence
  Synthetic
uccugcuuccaccaaucggaggu

SEQ ID NO: 31119 - RNA, 24 nt, Artificial Sequence
  Synthetic
cuccugcuuccaccaaucggaggu

SEQ ID NO: 31120 - RNA, 18 nt, Artificial Sequence
  Synthetic
cgggggaggaguugaggu

SEQ ID NO: 31121 - RNA, 19 nt, Artificial Sequence
  Synthetic
ucgggggaggaguugaggu

SEQ ID NO: 31122 - RNA, 20 nt, Artificial Sequence
  Synthetic
gucgggggaggaguugaggu

SEQ ID NO: 31123 - RNA, 21 nt, Artificial Sequence
  Synthetic
agucgggggaggaguugaggu

SEQ ID NO: 31124 - RNA, 22 nt, Artificial Sequence
  Synthetic
gagucgggggaggaguugaggu

SEQ ID NO: 31125 - RNA, 23 nt, Artificial Sequence
  Synthetic
ggagucgggggaggaguugaggu

SEQ ID NO: 31126 - RNA, 24 nt, Artificial Sequence
  Synthetic
aggagucgggggaggaguugaggu

SEQ ID NO: 31127 - RNA, 18 nt, Artificial Sequence
  Synthetic
ggagugggaggcuucggu

SEQ ID NO: 31128 - RNA, 19 nt, Artificial Sequence
  Synthetic
aggagugggaggcuucggu

SEQ ID NO: 31129 - RNA, 20 nt, Artificial Sequence
  Synthetic
uaggagugggaggcuucggu

SEQ ID NO: 31130 - RNA, 21 nt, Artificial Sequence
  Synthetic
guaggagugggaggcuucggu

SEQ ID NO: 31131 - RNA, 22 nt, Artificial Sequence
  Synthetic
gguaggagugggaggcuucggu

SEQ ID NO: 31132 - RNA, 23 nt, Artificial Sequence
  Synthetic
agguaggagugggaggcuucggu

SEQ ID NO: 31133 - RNA, 24 nt, Artificial Sequence
  Synthetic
aagguaggagugggaggcuucggu

SEQ ID NO: 31134 - RNA, 18 nt, Artificial Sequence
  Synthetic
  misc_feature (15)..(15): n is a, c, g, or u
guuucgcucgcagcnggu

SEQ ID NO: 31135 - RNA, 19 nt, Artificial Sequence
  Synthetic
  misc_feature (16)..(16): n is a, c, g, or u
uguuucgcucgcagcnggu

SEQ ID NO: 31136 - RNA, 20 nt, Artificial Sequence
  Synthetic
  misc_feature (17)..(17): n is a, c, g, or u
uuguuucgcucgcagcnggu

SEQ ID NO: 31137 - RNA, 21 nt, Artificial Sequence
  Synthetic
  misc_feature (18)..(18): n is a, c, g, or u
cuuguuucgcucgcagcnggu

SEQ ID NO: 31138 - RNA, 22 nt, Artificial Sequence
  Synthetic
  misc_feature (19)..(19): n is a, c, g, or u
gcuuguuucgcucgcagcnggu

SEQ ID NO: 31139 - RNA, 23 nt, Artificial Sequence
  Synthetic
  misc_feature (1)..(1): n is a, c, g, or u
  misc_feature (20)..(20): n is a, c, g, or u
ngcuuguuucgcucgcagcnggu

SEQ ID NO: 31140 - RNA, 24 nt, Artificial Sequence
  Synthetic
  misc_feature (2)..(2): n is a, c, g, or u
  misc_feature (21)..(21): n is a, c, g, or u
cngcuuguuucgcucgcagcnggu

SEQ ID NO: 31141 - RNA, 18 nt, Artificial Sequence
  Synthetic
  misc_feature (14)..(14): n is a, c, g, or u
uuauauggaugaunuggu

SEQ ID NO: 31142 - RNA, 19 nt, Artificial Sequence
  Synthetic
  misc_feature (15)..(15): n is a, c, g, or u
guuauauggaugaunuggu

SEQ ID NO: 31143 - RNA, 20 nt, Artificial Sequence
  Synthetic
  misc_feature (16)..(16): n is a, c, g, or u
aguuauauggaugaunuggu

SEQ ID NO: 31144 - RNA, 21 nt, Artificial Sequence
  Synthetic
  misc_feature (17)..(17): n is a, c, g, or u
uaguuauauggaugaunuggu

SEQ ID NO: 31145 - RNA, 22 nt, Artificial Sequence
  Synthetic
  misc_feature (18)..(18): n is a, c, g, or u
uuaguuauauggaugaunuggu

SEQ ID NO: 31146 - RNA, 23 nt, Artificial Sequence
  Synthetic
  misc_feature (19)..(19): n is a, c, g, or u
uuuaguuauauggaugaunuggu

SEQ ID NO: 31147 - RNA, 24 nt, Artificial Sequence
  Synthetic
  misc_feature (20)..(20): n is a, c, g, or u
uuuuaguuauauggaugaunuggu

SEQ ID NO: 31148 - RNA, 18 nt, Artificial Sequence
  Synthetic
uuguucaugucccacugu

SEQ ID NO: 31149 - RNA, 19 nt, Artificial Sequence
  Synthetic
uuuguucaugucccacugu

SEQ ID NO: 31150 - RNA, 20 nt, Artificial Sequence
  Synthetic
uuuuguucaugucccacugu

SEQ ID NO: 31151 - RNA, 21 nt, Artificial Sequence
  Synthetic
cuuuuguucaugucccacugu

SEQ ID NO: 31152 - RNA, 22 nt, Artificial Sequence
  Synthetic
ucuuuuguucaugucccacugu

SEQ ID NO: 31153 - RNA, 23 nt, Artificial Sequence
  Synthetic
aucuuuuguucaugucccacugu

SEQ ID NO: 31154 - RNA, 24 nt, Artificial Sequence
  Synthetic
caucuuuuguucaugucccacugu

SEQ ID NO: 31155 - RNA, 18 nt, Artificial Sequence
  Synthetic
uuucccuccugcugcugu

SEQ ID NO: 31156 - RNA, 19 nt, Artificial Sequence
  Synthetic
guuucccuccugcugcugu

SEQ ID NO: 31157 - RNA, 20 nt, Artificial Sequence
  Synthetic
uguuucccuccugcugcugu

SEQ ID NO: 31158 - RNA, 21 nt, Artificial Sequence
  Synthetic
auguuucccuccugcugcugu

SEQ ID NO: 31159 - RNA, 22 nt, Artificial Sequence
  Synthetic
uauguuucccuccugcugcugu

SEQ ID NO: 31160 - RNA, 23 nt, Artificial Sequence
  Synthetic
cuauguuucccuccugcugcugu

SEQ ID NO: 31161 - RNA, 24 nt, Artificial Sequence
  Synthetic
ucuauguuucccuccugcugcugu

SEQ ID NO: 31162 - RNA, 18 nt, Artificial Sequence
  Synthetic
ugacuucuucccgucugu

SEQ ID NO: 31163 - RNA, 19 nt, Artificial Sequence
  Synthetic
cugacuucuucccgucugu

SEQ ID NO: 31164 - RNA, 20 nt, Artificial Sequence
  Synthetic
ucugacuucuucccgucugu

SEQ ID NO: 31165 - RNA, 21 nt, Artificial Sequence
  Synthetic
uucugacuucuucccgucugu

SEQ ID NO: 31166 - RNA, 22 nt, Artificial Sequence
  Synthetic
cuucugacuucuucccgucugu

SEQ ID NO: 31167 - RNA, 23 nt, Artificial Sequence
  Synthetic
ccuucugacuucuucccgucugu

SEQ ID NO: 31168 - RNA, 24 nt, Artificial Sequence
  Synthetic
gccuucugacuucuucccgucugu

SEQ ID NO: 31169 - RNA, 18 nt, Artificial Sequence
  Synthetic
uaggaccccuucucgugu

SEQ ID NO: 31170 - RNA, 19 nt, Artificial Sequence
  Synthetic
cuaggaccccuucucgugu

SEQ ID NO: 31171 - RNA, 20 nt, Artificial Sequence
  Synthetic
ccuaggaccccuucucgugu

SEQ ID NO: 31172 - RNA, 18 nt, Artificial Sequence
  Synthetic
gggguaccacccgggugu

SEQ ID NO: 31173 - RNA, 19 nt, Artificial Sequence
  Synthetic
agggguaccacccgggugu

SEQ ID NO: 31174 - RNA, 20 nt, Artificial Sequence
  Synthetic
uagggguaccacccgggugu

SEQ ID NO: 31175 - RNA, 21 nt, Artificial Sequence
  Synthetic
cuagggguaccacccgggugu

SEQ ID NO: 31176 - RNA, 22 nt, Artificial Sequence
  Synthetic
ucuagggguaccacccgggugu

SEQ ID NO: 31177 - RNA, 23 nt, Artificial Sequence
  Synthetic
uucuagggguaccacccgggugu

SEQ ID NO: 31178 - RNA, 24 nt, Artificial Sequence
  Synthetic
uuucuagggguaccacccgggugu

SEQ ID NO: 31179 - RNA, 18 nt, Artificial Sequence
  Synthetic
uccuguccuccaacuugu

SEQ ID NO: 31180 - RNA, 19 nt, Artificial Sequence
  Synthetic
cuccuguccuccaacuugu

SEQ ID NO: 31181 - RNA, 20 nt, Artificial Sequence
  Synthetic
ccuccuguccuccaacuugu

SEQ ID NO: 31182 - RNA, 21 nt, Artificial Sequence
  Synthetic
accuccuguccuccaacuugu

SEQ ID NO: 31183 - RNA, 22 nt, Artificial Sequence
  Synthetic
aaccuccuguccuccaacuugu

SEQ ID NO: 31184 - RNA, 23 nt, Artificial Sequence
  Synthetic
caaccuccuguccuccaacuugu

SEQ ID NO: 31185 - RNA, 24 nt, Artificial Sequence
  Synthetic
ccaaccuccuguccuccaacuugu

SEQ ID NO: 31186 - RNA, 18 nt, Artificial Sequence
  Synthetic
  misc_feature (2)..(2): n is a, c, g, or u
anuauuuacauacuuugu

SEQ ID NO: 31187 - RNA, 19 nt, Artificial Sequence
  Synthetic
  misc_feature (3)..(3): n is a, c, g, or u
canuauuuacauacuuugu

SEQ ID NO: 31188 - RNA, 20 nt, Artificial Sequence
  Synthetic
  misc_feature (4)..(4): n is a, c, g, or u
acanuauuuacauacuuugu

SEQ ID NO: 31189 - RNA, 21 nt, Artificial Sequence
  Synthetic
  misc_feature (5)..(5): n is a, c, g, or u
gacanuauuuacauacuuugu

SEQ ID NO: 31190 - RNA, 22 nt, Artificial Sequence
  Synthetic
  misc_feature (6)..(6): n is a, c, g, or u
agacanuauuuacauacuuugu

SEQ ID NO: 31191 - RNA, 23 nt, Artificial Sequence
  Synthetic
  misc_feature (7)..(7): n is a, c, g, or u
uagacanuauuuacauacuuugu

SEQ ID NO: 31192 - RNA, 24 nt, Artificial Sequence
  Synthetic
  misc_feature (8)..(8): n is a, c, g, or u
cuagacanuauuuacauacuuugu

SEQ ID NO: 31193 - RNA, 18 nt, Artificial Sequence
  Synthetic
gagguuaaaggucuuugu

SEQ ID NO: 31194 - RNA, 19 nt, Artificial Sequence
  Synthetic
ugagguuaaaggucuuugu

SEQ ID NO: 31195 - RNA, 20 nt, Artificial Sequence
  Synthetic
uugagguuaaaggucuuugu

SEQ ID NO: 31196 - RNA, 21 nt, Artificial Sequence
  Synthetic
guugagguuaaaggucuuugu

SEQ ID NO: 31197 - RNA, 22 nt, Artificial Sequence
  Synthetic
aguugagguuaaaggucuuugu

SEQ ID NO: 31198 - RNA, 23 nt, Artificial Sequence
  Synthetic
gaguugagguuaaaggucuuugu

SEQ ID NO: 31199 - RNA, 24 nt, Artificial Sequence
  Synthetic
ggaguugagguuaaaggucuuugu

SEQ ID NO: 31200 - RNA, 18 nt, Artificial Sequence
  Synthetic
ucaggcaagcuauuuugu

SEQ ID NO: 31201 - RNA, 19 nt, Artificial Sequence
  Synthetic
cucaggcaagcuauuuugu

SEQ ID NO: 31202 - RNA, 20 nt, Artificial Sequence
  Synthetic
ucucaggcaagcuauuuugu

SEQ ID NO: 31203 - RNA, 21 nt, Artificial Sequence
  Synthetic
cucucaggcaagcuauuuugu

SEQ ID NO: 31204 - RNA, 22 nt, Artificial Sequence
  Synthetic
gcucucaggcaagcuauuuugu

SEQ ID NO: 31205 - RNA, 23 nt, Artificial Sequence
  Synthetic
ugcucucaggcaagcuauuuugu

SEQ ID NO: 31206 - RNA, 24 nt, Artificial Sequence
  Synthetic
cugcucucaggcaagcuauuuugu

SEQ ID NO: 31207 - RNA, 18 nt, Artificial Sequence
  Synthetic
  misc_feature (17)..(17): n is a, c, g, or u
aagacuggggacccugnu

SEQ ID NO: 31208 - RNA, 19 nt, Artificial Sequence
  Synthetic
  misc_feature (18)..(18): n is a, c, g, or u
gaagacuggggacccugnu

SEQ ID NO: 31209 - RNA, 20 nt, Artificial Sequence
  Synthetic
  misc_feature (19)..(19): n is a, c, g, or u
cgaagacuggggacccugnu

SEQ ID NO: 31210 - RNA, 21 nt, Artificial Sequence
  Synthetic
  misc_feature (20)..(20): n is a, c, g, or u
ucgaagacuggggacccugnu

SEQ ID NO: 31211 - RNA, 22 nt, Artificial Sequence
  Synthetic
  misc_feature (21)..(21): n is a, c, g, or u
cucgaagacuggggacccugnu

SEQ ID NO: 31212 - RNA, 23 nt, Artificial Sequence
  Synthetic
  misc_feature (22)..(22): n is a, c, g, or u
ucucgaagacuggggacccugnu

SEQ ID NO: 31213 - RNA, 24 nt, Artificial Sequence
  Synthetic
  misc_feature (23)..(23): n is a, c, g, or u
uucucgaagacuggggacccugnu

SEQ ID NO: 31214 - RNA, 18 nt, Artificial Sequence
  Synthetic
ugacccuuauaaagaauu

SEQ ID NO: 31215 - RNA, 19 nt, Artificial Sequence
  Synthetic
uugacccuuauaaagaauu

SEQ ID NO: 31216 - RNA, 20 nt, Artificial Sequence
  Synthetic
auugacccuuauaaagaauu

SEQ ID NO: 31217 - RNA, 21 nt, Artificial Sequence
  Synthetic
cauugacccuuauaaagaauu

SEQ ID NO: 31218 - RNA, 22 nt, Artificial Sequence
  Synthetic
acauugacccuuauaaagaauu

SEQ ID NO: 31219 - RNA, 23 nt, Artificial Sequence
  Synthetic
gacauugacccuuauaaagaauu

SEQ ID NO: 31220 - RNA, 24 nt, Artificial Sequence
  Synthetic
ggacauugacccuuauaaagaauu

SEQ ID NO: 31221 - RNA, 18 nt, Artificial Sequence
  Synthetic
ccugggugggcaauaauu

SEQ ID NO: 31222 - RNA, 19 nt, Artificial Sequence
  Synthetic
uccugggugggcaauaauu

SEQ ID NO: 31223 - RNA, 20 nt, Artificial Sequence
  Synthetic
uuccugggugggcaauaauu

SEQ ID NO: 31224 - RNA, 21 nt, Artificial Sequence
  Synthetic
cuuccugggugggcaauaauu

SEQ ID NO: 31225 - RNA, 22 nt, Artificial Sequence
  Synthetic
gcuuccugggugggcaauaauu

SEQ ID NO: 31226 - RNA, 23 nt, Artificial Sequence
  Synthetic
ggcuuccugggugggcaauaauu

SEQ ID NO: 31227 - RNA, 24 nt, Artificial Sequence
  Synthetic
uggcuuccugggugggcaauaauu

SEQ ID NO: 31228 - RNA, 18 nt, Artificial Sequence
  Synthetic
  misc_feature (1)..(1): n is a, c, g, or u
  misc_feature (7)..(7): n is a, c, g, or u
nauuucnugccuuacauu

SEQ ID NO: 31229 - RNA, 19 nt, Artificial Sequence
  Synthetic
  misc_feature (2)..(2): n is a, c, g, or u
  misc_feature (8)..(8): n is a, c, g, or u
anauuucnugccuuacauu

SEQ ID NO: 31230 - RNA, 20 nt, Artificial Sequence
  Synthetic
  misc_feature (3)..(3): n is a, c, g, or u
  misc_feature (9)..(9): n is a, c, g, or u
canauuucnugccuuacauu

SEQ ID NO: 31231 - RNA, 21 nt, Artificial Sequence
  Synthetic
  misc_feature (4)..(4): n is a, c, g, or u
  misc_feature (10)..(10): n is a, c, g, or u
ucanauuucnugccuuacauu

SEQ ID NO: 31232 - RNA, 22 nt, Artificial Sequence
  Synthetic
  misc_feature (5)..(5): n is a, c, g, or u
  misc_feature (11)..(11): n is a, c, g, or u
uucanauuucnugccuuacauu

SEQ ID NO: 31233 - RNA, 23 nt, Artificial Sequence
  Synthetic
  misc_feature (6)..(6): n is a, c, g, or u
  misc_feature (12)..(12): n is a, c, g, or u
uuucanauuucnugccuuacauu

SEQ ID NO: 31234 - RNA, 24 nt, Artificial Sequence
  Synthetic
  misc_feature (7)..(7): n is a, c, g, or u
  misc_feature (13)..(13): n is a, c, g, or u
guuucanauuucnugccuuacauu

SEQ ID NO: 31235 - RNA, 18 nt, Artificial Sequence
  Synthetic
cggucaacgaccuggauu

SEQ ID NO: 31236 - RNA, 19 nt, Artificial Sequence
  Synthetic
ccggucaacgaccuggauu

SEQ ID NO: 31237 - RNA, 20 nt, Artificial Sequence
  Synthetic
cccggucaacgaccuggauu

SEQ ID NO: 31238 - RNA, 21 nt, Artificial Sequence
  Synthetic
ccccggucaacgaccuggauu

SEQ ID NO: 31239 - RNA, 22 nt, Artificial Sequence
  Synthetic
gccccggucaacgaccuggauu

SEQ ID NO: 31240 - RNA, 23 nt, Artificial Sequence
  Synthetic
cgccccggucaacgaccuggauu

SEQ ID NO: 31241 - RNA, 24 nt, Artificial Sequence
  Synthetic
ucgccccggucaacgaccuggauu

SEQ ID NO: 31242 - RNA, 18 nt, Artificial Sequence
  Synthetic
ugaauagacccauugauu

SEQ ID NO: 31243 - RNA, 19 nt, Artificial Sequence
  Synthetic
gugaauagacccauugauu

SEQ ID NO: 31244 - RNA, 20 nt, Artificial Sequence
  Synthetic
cgugaauagacccauugauu

SEQ ID NO: 31245 - RNA, 21 nt, Artificial Sequence
  Synthetic
ccgugaauagacccauugauu

SEQ ID NO: 31246 - RNA, 22 nt, Artificial Sequence
  Synthetic
cccgugaauagacccauugauu

SEQ ID NO: 31247 - RNA, 23 nt, Artificial Sequence
  Synthetic
ucccgugaauagacccauugauu

SEQ ID NO: 31248 - RNA, 24 nt, Artificial Sequence
  Synthetic
uucccgugaauagacccauugauu

SEQ ID NO: 31249 - RNA, 18 nt, Artificial Sequence
  Synthetic
uuugugggucaccauauu

SEQ ID NO: 31250 - RNA, 19 nt, Artificial Sequence
  Synthetic
uuuugugggucaccauauu

SEQ ID NO: 31251 - RNA, 20 nt, Artificial Sequence
  Synthetic
auuuugugggucaccauauu

SEQ ID NO: 31252 - RNA, 21 nt, Artificial Sequence
  Synthetic
cauuuugugggucaccauauu

SEQ ID NO: 31253 - RNA, 22 nt, Artificial Sequence
  Synthetic
ucauuuugugggucaccauauu

SEQ ID NO: 31254 - RNA, 23 nt, Artificial Sequence
  Synthetic
cucauuuugugggucaccauauu

SEQ ID NO: 31255 - RNA, 24 nt, Artificial Sequence
  Synthetic
ccucauuuugugggucaccauauu

SEQ ID NO: 31256 - RNA, 18 nt, Artificial Sequence
  Synthetic
ccaguuggauccacuauu

SEQ ID NO: 31257 - RNA, 19 nt, Artificial Sequence
  Synthetic
accaguuggauccacuauu

SEQ ID NO: 31258 - RNA, 20 nt, Artificial Sequence
  Synthetic
caccaguuggauccacuauu

SEQ ID NO: 31259 - RNA, 21 nt, Artificial Sequence
  Synthetic
ccaccaguuggauccacuauu

SEQ ID NO: 31260 - RNA, 22 nt, Artificial Sequence
  Synthetic
accaccaguuggauccacuauu

SEQ ID NO: 31261 - RNA, 23 nt, Artificial Sequence
  Synthetic
gaccaccaguuggauccacuauu

SEQ ID NO: 31262 - RNA, 24 nt, Artificial Sequence
  Synthetic
agaccaccaguuggauccacuauu

SEQ ID NO: 31263 - RNA, 18 nt, Artificial Sequence
  Synthetic
  misc_feature (11)..(11): n is a, c, g, or u
uauggaugaunugguauu

SEQ ID NO: 31264 - RNA, 19 nt, Artificial Sequence
  Synthetic
  misc_feature (12)..(12): n is a, c, g, or u
auauggaugaunugguauu

SEQ ID NO: 31265 - RNA, 20 nt, Artificial Sequence
  Synthetic
  misc_feature (13)..(13): n is a, c, g, or u
uauauggaugaunugguauu

SEQ ID NO: 31266 - RNA, 21 nt, Artificial Sequence
  Synthetic
  misc_feature (14)..(14): n is a, c, g, or u
uuauauggaugaunugguauu

SEQ ID NO: 31267 - RNA, 22 nt, Artificial Sequence
  Synthetic
  misc_feature (15)..(15): n is a, c, g, or u
guuauauggaugaunugguauu

SEQ ID NO: 31268 - RNA, 23 nt, Artificial Sequence
  Synthetic
  misc_feature (16)..(16): n is a, c, g, or u
aguuauauggaugaunugguauu

SEQ ID NO: 31269 - RNA, 24 nt, Artificial Sequence
  Synthetic
  misc_feature (17)..(17): n is a, c, g, or u
uaguuauauggaugaunugguauu

SEQ ID NO: 31270 - RNA, 18 nt, Artificial Sequence
  Synthetic
caucaaagacuguguauu

SEQ ID NO: 31271 - RNA, 19 nt, Artificial Sequence
  Synthetic
acaucaaagacuguguauu

SEQ ID NO: 31272 - RNA, 20 nt, Artificial Sequence
  Synthetic
uacaucaaagacuguguauu

SEQ ID NO: 31273 - RNA, 21 nt, Artificial Sequence
  Synthetic
auacaucaaagacuguguauu

SEQ ID NO: 31274 - RNA, 22 nt, Artificial Sequence
  Synthetic
aauacaucaaagacuguguauu

SEQ ID NO: 31275 - RNA, 23 nt, Artificial Sequence
  Synthetic
gaauacaucaaagacuguguauu

SEQ ID NO: 31276 - RNA, 24 nt, Artificial Sequence
  Synthetic
ggaauacaucaaagacuguguauu

SEQ ID NO: 31277 - RNA, 18 nt, Artificial Sequence
  Synthetic
guuaaaggucuuuguauu

SEQ ID NO: 31278 - RNA, 19 nt, Artificial Sequence
  Synthetic
gguuaaaggucuuuguauu

SEQ ID NO: 31279 - RNA, 20 nt, Artificial Sequence
  Synthetic
agguuaaaggucuuuguauu

SEQ ID NO: 31280 - RNA, 21 nt, Artificial Sequence
  Synthetic
gagguuaaaggucuuuguauu

SEQ ID NO: 31281 - RNA, 22 nt, Artificial Sequence
  Synthetic
ugagguuaaaggucuuuguauu

SEQ ID NO: 31282 - RNA, 23 nt, Artificial Sequence
  Synthetic
uugagguuaaaggucuuuguauu

SEQ ID NO: 31283 - RNA, 24 nt, Artificial Sequence
  Synthetic
guugagguuaaaggucuuuguauu

SEQ ID NO: 31284 - RNA, 18 nt, Artificial Sequence
  Synthetic
uuguuuucucgccaacuu

SEQ ID NO: 31285 - RNA, 19 nt, Artificial Sequence
  Synthetic
uuuguuuucucgccaacuu

SEQ ID NO: 31286 - RNA, 20 nt, Artificial Sequence
  Synthetic
uuuuguuuucucgccaacuu

SEQ ID NO: 31287 - RNA, 21 nt, Artificial Sequence
  Synthetic
cuuuuguuuucucgccaacuu

SEQ ID NO: 31288 - RNA, 22 nt, Artificial Sequence
  Synthetic
gcuuuuguuuucucgccaacuu

SEQ ID NO: 31289 - RNA, 23 nt, Artificial Sequence
  Synthetic
ggcuuuuguuuucucgccaacuu

SEQ ID NO: 31290 - RNA, 24 nt, Artificial Sequence
  Synthetic
aggcuuuuguuuucucgccaacuu

SEQ ID NO: 31291 - RNA, 18 nt, Artificial Sequence
  Synthetic
ccuauccuaucaacacuu

SEQ ID NO: 31292 - RNA, 19 nt, Artificial Sequence
  Synthetic
cccuauccuaucaacacuu

SEQ ID NO: 31293 - RNA, 20 nt, Artificial Sequence
  Synthetic
ccccuauccuaucaacacuu

SEQ ID NO: 31294 - RNA, 21 nt, Artificial Sequence
  Synthetic
gccccuauccuaucaacacuu

SEQ ID NO: 31295 - RNA, 22 nt, Artificial Sequence
  Synthetic
ugccccuauccuaucaacacuu

SEQ ID NO: 31296 - RNA, 23 nt, Artificial Sequence
  Synthetic
augccccuauccuaucaacacuu

SEQ ID NO: 31297 - RNA, 24 nt, Artificial Sequence
  Synthetic
aaugccccuauccuaucaacacuu

SEQ ID NO: 31298 - RNA, 18 nt, Artificial Sequence
  Synthetic
  misc_feature (11)..(11): n is a, c, g, or u
  misc_feature (13)..(13): n is a, c, g, or u
ggguuauuccnuncacuu

SEQ ID NO: 31299 - RNA, 19 nt, Artificial Sequence
  Synthetic
  misc_feature (12)..(12): n is a, c, g, or u
  misc_feature (14)..(14): n is a, c, g, or u
gggguuauuccnuncacuu

SEQ ID NO: 31300 - RNA, 20 nt, Artificial Sequence
  Synthetic
  misc_feature (13)..(13): n is a, c, g, or u
  misc_feature (15)..(15): n is a, c, g, or u
ugggguuauuccnuncacuu

SEQ ID NO: 31301 - RNA, 21 nt, Artificial Sequence
  Synthetic
  misc_feature (14)..(14): n is a, c, g, or u
  misc_feature (16)..(16): n is a, c, g, or u
gugggguuauuccnuncacuu

SEQ ID NO: 31302 - RNA, 22 nt, Artificial Sequence
  Synthetic
  misc_feature (15)..(15): n is a, c, g, or u
  misc_feature (17)..(17): n is a, c, g, or u
ggugggguuauuccnuncacuu

SEQ ID NO: 31303 - RNA, 23 nt, Artificial Sequence
  Synthetic
  misc_feature (16)..(16): n is a, c, g, or u
  misc_feature (18)..(18): n is a, c, g, or u
uggugggguuauuccnuncacuu

SEQ ID NO: 31304 - RNA, 24 nt, Artificial Sequence
  Synthetic
  misc_feature (17)..(17): n is a, c, g, or u
  misc_feature (19)..(19): n is a, c, g, or u
auggugggguuauuccnuncacuu

SEQ ID NO: 31305 - RNA, 18 nt, Artificial Sequence
  Synthetic
cccaaucuccaaucacuu

SEQ ID NO: 31306 - RNA, 19 nt, Artificial Sequence
  Synthetic
ccccaaucuccaaucacuu

SEQ ID NO: 31307 - RNA, 20 nt, Artificial Sequence
  Synthetic
uccccaaucuccaaucacuu

SEQ ID NO: 31308 - RNA, 21 nt, Artificial Sequence
  Synthetic
guccccaaucuccaaucacuu

SEQ ID NO: 31309 - RNA, 22 nt, Artificial Sequence
  Synthetic
aguccccaaucuccaaucacuu

SEQ ID NO: 31310 - RNA, 23 nt, Artificial Sequence
  Synthetic
caguccccaaucuccaaucacuu

SEQ ID NO: 31311 - RNA, 24 nt, Artificial Sequence
  Synthetic
gcaguccccaaucuccaaucacuu

SEQ ID NO: 31312 - RNA, 18 nt, Artificial Sequence
  Synthetic
  misc_feature (5)..(5): n is a, c, g, or u
gacanuauuuacauacuu

SEQ ID NO: 31313 - RNA, 19 nt, Artificial Sequence
  Synthetic
  misc_feature (6)..(6): n is a, c, g, or u
agacanuauuuacauacuu

SEQ ID NO: 31314 - RNA, 20 nt, Artificial Sequence
  Synthetic
  misc_feature (7)..(7): n is a, c, g, or u
uagacanuauuuacauacuu

SEQ ID NO: 31315 - RNA, 21 nt, Artificial Sequence
  Synthetic
  misc_feature (8)..(8): n is a, c, g, or u
cuagacanuauuuacauacuu

SEQ ID NO: 31316 - RNA, 22 nt, Artificial Sequence
  Synthetic
  misc_feature (9)..(9): n is a, c, g, or u
acuagacanuauuuacauacuu

SEQ ID NO: 31317 - RNA, 23 nt, Artificial Sequence
  Synthetic
  misc_feature (10)..(10): n is a, c, g, or u
aacuagacanuauuuacauacuu

SEQ ID NO: 31318 - RNA, 24 nt, Artificial Sequence
  Synthetic
  misc_feature (11)..(11): n is a, c, g, or u
aaacuagacanuauuuacauacuu

SEQ ID NO: 31319 - RNA, 18 nt, Artificial Sequence
  Synthetic
cccguguguccucuacuu

SEQ ID NO: 31320 - RNA, 19 nt, Artificial Sequence
  Synthetic
gcccguguguccucuacuu

SEQ ID NO: 31321 - RNA, 20 nt, Artificial Sequence
  Synthetic
ugcccguguguccucuacuu

SEQ ID NO: 31322 - RNA, 21 nt, Artificial Sequence
  Synthetic
uugcccguguguccucuacuu

SEQ ID NO: 31323 - RNA, 22 nt, Artificial Sequence
  Synthetic
guugcccguguguccucuacuu

SEQ ID NO: 31324 - RNA, 23 nt, Artificial Sequence
  Synthetic
uguugcccguguguccucuacuu

SEQ ID NO: 31325 - RNA, 24 nt, Artificial Sequence
  Synthetic
auguugcccguguguccucuacuu

SEQ ID NO: 31326 - RNA, 18 nt, Artificial Sequence
  Synthetic
ugugguuaaucauuacuu

SEQ ID NO: 31327 - RNA, 19 nt, Artificial Sequence
  Synthetic
augugguuaaucauuacuu

SEQ ID NO: 31328 - RNA, 20 nt, Artificial Sequence
  Synthetic
aaugugguuaaucauuacuu

SEQ ID NO: 31329 - RNA, 21 nt, Artificial Sequence
  Synthetic
gaaugugguuaaucauuacuu

SEQ ID NO: 31330 - RNA, 22 nt, Artificial Sequence
  Synthetic
agaaugugguuaaucauuacuu

SEQ ID NO: 31331 - RNA, 23 nt, Artificial Sequence
  Synthetic
gagaaugugguuaaucauuacuu

SEQ ID NO: 31332 - RNA, 24 nt, Artificial Sequence
  Synthetic
agagaaugugguuaaucauuacuu

SEQ ID NO: 31333 - RNA, 18 nt, Artificial Sequence
  Synthetic
gcgcaugcgcggaaccuu

SEQ ID NO: 31334 - RNA, 19 nt, Artificial Sequence
  Synthetic
agcgcaugcgcggaaccuu

SEQ ID NO: 31335 - RNA, 20 nt, Artificial Sequence
  Synthetic
cagcgcaugcgcggaaccuu

SEQ ID NO: 31336 - RNA, 18 nt, Artificial Sequence
  Synthetic
gcauggacauugacccuu

SEQ ID NO: 31337 - RNA, 19 nt, Artificial Sequence
  Synthetic
ggcauggacauugacccuu

SEQ ID NO: 31338 - RNA, 20 nt, Artificial Sequence
  Synthetic
gggcauggacauugacccuu

SEQ ID NO: 31339 - RNA, 21 nt, Artificial Sequence
  Synthetic
ggggcauggacauugacccuu

SEQ ID NO: 31340 - RNA, 22 nt, Artificial Sequence
  Synthetic
uggggcauggacauugacccuu

SEQ ID NO: 31341 - RNA, 23 nt, Artificial Sequence
  Synthetic
uuggggcauggacauugacccuu

SEQ ID NO: 31342 - RNA, 24 nt, Artificial Sequence
  Synthetic
uuuggggcauggacauugacccuu

SEQ ID NO: 31343 - RNA, 18 nt, Artificial Sequence
  Synthetic
cccccacacgguggccuu

SEQ ID NO: 31344 - RNA, 19 nt, Artificial Sequence
  Synthetic
acccccacacgguggccuu

SEQ ID NO: 31345 - RNA, 20 nt, Artificial Sequence
  Synthetic
cacccccacacgguggccuu

SEQ ID NO: 31346 - RNA, 21 nt, Artificial Sequence
  Synthetic
acacccccacacgguggccuu

SEQ ID NO: 31347 - RNA, 22 nt, Artificial Sequence
  Synthetic
cacacccccacacgguggccuu

SEQ ID NO: 31348 - RNA, 23 nt, Artificial Sequence
  Synthetic
ucacacccccacacgguggccuu

SEQ ID NO: 31349 - RNA, 24 nt, Artificial Sequence
  Synthetic
uucacacccccacacgguggccuu

SEQ ID NO: 31350 - RNA, 18 nt, Artificial Sequence
  Synthetic
ucccaucaucuugggcuu

SEQ ID NO: 31351 - RNA, 19 nt, Artificial Sequence
  Synthetic
aucccaucaucuugggcuu

SEQ ID NO: 31352 - RNA, 20 nt, Artificial Sequence
  Synthetic
caucccaucaucuugggcuu

SEQ ID NO: 31353 - RNA, 21 nt, Artificial Sequence
  Synthetic
ccaucccaucaucuugggcuu

SEQ ID NO: 31354 - RNA, 22 nt, Artificial Sequence
  Synthetic
cccaucccaucaucuugggcuu

SEQ ID NO: 31355 - RNA, 23 nt, Artificial Sequence
  Synthetic
ucccaucccaucaucuugggcuu

SEQ ID NO: 31356 - RNA, 24 nt, Artificial Sequence
  Synthetic
uucccaucccaucaucuugggcuu

SEQ ID NO: 31357 - RNA, 18 nt, Artificial Sequence
  Synthetic
ugugggucuuuugggcuu

SEQ ID NO: 31358 - RNA, 19 nt, Artificial Sequence
  Synthetic
uugugggucuuuugggcuu

SEQ ID NO: 31359 - RNA, 20 nt, Artificial Sequence
  Synthetic
auugugggucuuuugggcuu

SEQ ID NO: 31360 - RNA, 21 nt, Artificial Sequence
  Synthetic
  misc_feature (1)..(1): n is a, c, g, or u
nauugugggucuuuugggcuu

SEQ ID NO: 31361 - RNA, 22 nt, Artificial Sequence
  Synthetic
  misc_feature (2)..(2): n is a, c, g, or u
gnauugugggucuuuugggcuu

SEQ ID NO: 31362 - RNA, 23 nt, Artificial Sequence
  Synthetic
  misc_feature (3)..(3): n is a, c, g, or u
cgnauugugggucuuuugggcuu

SEQ ID NO: 31363 - RNA, 24 nt, Artificial Sequence
  Synthetic
  misc_feature (4)..(4): n is a, c, g, or u
acgnauugugggucuuuugggcuu

SEQ ID NO: 31364 - RNA, 18 nt, Artificial Sequence
  Synthetic
cugugccuuggguggcuu

SEQ ID NO: 31365 - RNA, 19 nt, Artificial Sequence
  Synthetic
gcugugccuuggguggcuu

SEQ ID NO: 31366 - RNA, 20 nt, Artificial Sequence
  Synthetic
agcugugccuuggguggcuu

SEQ ID NO: 31367 - RNA, 21 nt, Artificial Sequence
  Synthetic
aagcugugccuuggguggcuu

SEQ ID NO: 31368 - RNA, 22 nt, Artificial Sequence
  Synthetic
caagcugugccuuggguggcuu

SEQ ID NO: 31369 - RNA, 23 nt, Artificial Sequence
  Synthetic
ccaagcugugccuuggguggcuu

SEQ ID NO: 31370 - RNA, 24 nt, Artificial Sequence
  Synthetic
uccaagcugugccuuggguggcuu

SEQ ID NO: 31371 - RNA, 18 nt, Artificial Sequence
  Synthetic
  misc_feature (11)..(11): n is a, c, g, or u
aguugaugacnuuggcuu

SEQ ID NO: 31372 - RNA, 19 nt, Artificial Sequence
  Synthetic
  misc_feature (12)..(12): n is a, c, g, or u
gaguugaugacnuuggcuu

SEQ ID NO: 31373 - RNA, 20 nt, Artificial Sequence
  Synthetic
  misc_feature (13)..(13): n is a, c, g, or u
ugaguugaugacnuuggcuu

SEQ ID NO: 31374 - RNA, 21 nt, Artificial Sequence
  Synthetic
  misc_feature (14)..(14): n is a, c, g, or u
gugaguugaugacnuuggcuu

SEQ ID NO: 31375 - RNA, 22 nt, Artificial Sequence
  Synthetic
  misc_feature (15)..(15): n is a, c, g, or u
ggugaguugaugacnuuggcuu

SEQ ID NO: 31376 - RNA, 23 nt, Artificial Sequence
  Synthetic
  misc_feature (16)..(16): n is a, c, g, or u
gggugaguugaugacnuuggcuu

SEQ ID NO: 31377 - RNA, 24 nt, Artificial Sequence
  Synthetic
  misc_feature (17)..(17): n is a, c, g, or u
ggggugaguugaugacnuuggcuu

SEQ ID NO: 31378 - RNA, 18 nt, Artificial Sequence
  Synthetic
  misc_feature (2)..(2): n is a, c, g, or u
uncgcacuccaccugcuu

SEQ ID NO: 31379 - RNA, 19 nt, Artificial Sequence
  Synthetic
  misc_feature (3)..(3): n is a, c, g, or u
auncgcacuccaccugcuu

SEQ ID NO: 31380 - RNA, 20 nt, Artificial Sequence
  Synthetic
  misc_feature (4)..(4): n is a, c, g, or u
gauncgcacuccaccugcuu

SEQ ID NO: 31381 - RNA, 21 nt, Artificial Sequence
  Synthetic
  misc_feature (5)..(5): n is a, c, g, or u
ggauncgcacuccaccugcuu

SEQ ID NO: 31382 - RNA, 22 nt, Artificial Sequence
  Synthetic
  misc_feature (6)..(6): n is a, c, g, or u
uggauncgcacuccaccugcuu

SEQ ID NO: 31383 - RNA, 23 nt, Artificial Sequence
  Synthetic
  misc_feature (7)..(7): n is a, c, g, or u
guggauncgcacuccaccugcuu

SEQ ID NO: 31384 - RNA, 24 nt, Artificial Sequence
  Synthetic
  misc_feature (8)..(8): n is a, c, g, or u
uguggauncgcacuccaccugcuu

SEQ ID NO: 31385 - RNA, 18 nt, Artificial Sequence
  Synthetic
  misc_feature (11)..(11): n is a, c, g, or u
  misc_feature (15)..(15): n is a, c, g, or u
gaacgccccunggancuu

SEQ ID NO: 31386 - RNA, 19 nt, Artificial Sequence
  Synthetic
  misc_feature (12)..(12): n is a, c, g, or u
  misc_feature (16)..(16): n is a, c, g, or u
ugaacgccccunggancuu

SEQ ID NO: 31387 - RNA, 20 nt, Artificial Sequence
  Synthetic
  misc_feature (13)..(13): n is a, c, g, or u
  misc_feature (17)..(17): n is a, c, g, or u
gugaacgccccunggancuu

SEQ ID NO: 31388 - RNA, 21 nt, Artificial Sequence
  Synthetic
  misc_feature (14)..(14): n is a, c, g, or u
  misc_feature (18)..(18): n is a, c, g, or u
cgugaacgccccunggancuu

SEQ ID NO: 31389 - RNA, 22 nt, Artificial Sequence
  Synthetic
  misc_feature (15)..(15): n is a, c, g, or u
  misc_feature (19)..(19): n is a, c, g, or u
ccgugaacgccccunggancuu

SEQ ID NO: 31390 - RNA, 23 nt, Artificial Sequence
  Synthetic
  misc_feature (16)..(16): n is a, c, g, or u
  misc_feature (20)..(20): n is a, c, g, or u
accgugaacgccccunggancuu

SEQ ID NO: 31391 - RNA, 24 nt, Artificial Sequence
  Synthetic
  misc_feature (17)..(17): n is a, c, g, or u
  misc_feature (21)..(21): n is a, c, g, or u
caccgugaacgccccunggancuu

SEQ ID NO: 31392 - RNA, 18 nt, Artificial Sequence
  Synthetic
ucucacaucaucaaucuu

SEQ ID NO: 31393 - RNA, 19 nt, Artificial Sequence
  Synthetic
cucucacaucaucaaucuu

SEQ ID NO: 31394 - RNA, 20 nt, Artificial Sequence
  Synthetic
ucucucacaucaucaaucuu

SEQ ID NO: 31395 - RNA, 21 nt, Artificial Sequence
  Synthetic
cucucucacaucaucaaucuu

SEQ ID NO: 31396 - RNA, 22 nt, Artificial Sequence
  Synthetic
ccucucucacaucaucaaucuu

SEQ ID NO: 31397 - RNA, 23 nt, Artificial Sequence
  Synthetic
gccucucucacaucaucaaucuu

SEQ ID NO: 31398 - RNA, 24 nt, Artificial Sequence
  Synthetic
ugccucucucacaucaucaaucuu

SEQ ID NO: 31399 - RNA, 18 nt, Artificial Sequence
  Synthetic
  misc_feature (6)..(6): n is a, c, g, or u
caacgnauugugggucuu

SEQ ID NO: 31400 - RNA, 19 nt, Artificial Sequence
  Synthetic
  misc_feature (7)..(7): n is a, c, g, or u
ucaacgnauugugggucuu

SEQ ID NO: 31401 - RNA, 20 nt, Artificial Sequence
  Synthetic
  misc_feature (8)..(8): n is a, c, g, or u
gucaacgnauugugggucuu

SEQ ID NO: 31402 - RNA, 21 nt, Artificial Sequence
  Synthetic
  misc_feature (9)..(9): n is a, c, g, or u
ugucaacgnauugugggucuu

SEQ ID NO: 31403 - RNA, 22 nt, Artificial Sequence
  Synthetic
  misc_feature (10)..(10): n is a, c, g, or u
uugucaacgnauugugggucuu

SEQ ID NO: 31404 - RNA, 23 nt, Artificial Sequence
  Synthetic
  misc_feature (11)..(11): n is a, c, g, or u
uuugucaacgnauugugggucuu

SEQ ID NO: 31405 - RNA, 24 nt, Artificial Sequence
  Synthetic
  misc_feature (12)..(12): n is a, c, g, or u
guuugucaacgnauugugggucuu

SEQ ID NO: 31406 - RNA, 18 nt, Artificial Sequence
  Synthetic
uugaguauuuggugucuu

SEQ ID NO: 31407 - RNA, 19 nt, Artificial Sequence
  Synthetic
cuugaguauuuggugucuu

SEQ ID NO: 31408 - RNA, 20 nt, Artificial Sequence
  Synthetic
  misc_feature (1)..(1): n is a, c, g, or u
ncuugaguauuuggugucuu

SEQ ID NO: 31409 - RNA, 21 nt, Artificial Sequence
  Synthetic
  misc_feature (2)..(2): n is a, c, g, or u
uncuugaguauuuggugucuu

SEQ ID NO: 31410 - RNA, 22 nt, Artificial Sequence
  Synthetic
  misc_feature (3)..(3): n is a, c, g, or u
guncuugaguauuuggugucuu

SEQ ID NO: 31411 - RNA, 23 nt, Artificial Sequence
  Synthetic
  misc_feature (4)..(4): n is a, c, g, or u
uguncuugaguauuuggugucuu

SEQ ID NO: 31412 - RNA, 24 nt, Artificial Sequence
  Synthetic
  misc_feature (5)..(5): n is a, c, g, or u
cuguncuugaguauuuggugucuu

SEQ ID NO: 31413 - RNA, 18 nt, Artificial Sequence
  Synthetic
caauccucugggauucuu

SEQ ID NO: 31414 - RNA, 19 nt, Artificial Sequence
  Synthetic
ccaauccucugggauucuu

SEQ ID NO: 31415 - RNA, 20 nt, Artificial Sequence
  Synthetic
cccaauccucugggauucuu

SEQ ID NO: 31416 - RNA, 21 nt, Artificial Sequence
  Synthetic
gcccaauccucugggauucuu

SEQ ID NO: 31417 - RNA, 22 nt, Artificial Sequence
  Synthetic
ugcccaauccucugggauucuu

SEQ ID NO: 31418 - RNA, 23 nt, Artificial Sequence
  Synthetic
gugcccaauccucugggauucuu

SEQ ID NO: 31419 - RNA, 24 nt, Artificial Sequence
  Synthetic
ugugcccaauccucugggauucuu

SEQ ID NO: 31420 - RNA, 18 nt, Artificial Sequence
  Synthetic
aucuucuuguugguucuu

SEQ ID NO: 31421 - RNA, 19 nt, Artificial Sequence
  Synthetic
caucuucuuguugguucuu

SEQ ID NO: 31422 - RNA, 20 nt, Artificial Sequence
  Synthetic
ucaucuucuuguugguucuu

SEQ ID NO: 31423 - RNA, 21 nt, Artificial Sequence
  Synthetic
cucaucuucuuguugguucuu

SEQ ID NO: 31424 - RNA, 22 nt, Artificial Sequence
  Synthetic
ccucaucuucuuguugguucuu

SEQ ID NO: 31425 - RNA, 23 nt, Artificial Sequence
  Synthetic
gccucaucuucuuguugguucuu

SEQ ID NO: 31426 - RNA, 24 nt, Artificial Sequence
  Synthetic
ugccucaucuucuuguugguucuu

SEQ ID NO: 31427 - RNA, 18 nt, Artificial Sequence
  Synthetic
acaggcgguguguuucuu

SEQ ID NO: 31428 - RNA, 19 nt, Artificial Sequence
  Synthetic
uacaggcgguguguuucuu

SEQ ID NO: 31429 - RNA, 20 nt, Artificial Sequence
  Synthetic
uuacaggcgguguguuucuu

SEQ ID NO: 31430 - RNA, 21 nt, Artificial Sequence
  Synthetic
guuacaggcgguguguuucuu

SEQ ID NO: 31431 - RNA, 22 nt, Artificial Sequence
  Synthetic
uguuacaggcgguguguuucuu

SEQ ID NO: 31432 - RNA, 23 nt, Artificial Sequence
  Synthetic
guguuacaggcgguguguuucuu

SEQ ID NO: 31433 - RNA, 24 nt, Artificial Sequence
  Synthetic
cguguuacaggcgguguguuucuu

SEQ ID NO: 31434 - RNA, 18 nt, Artificial Sequence
  Synthetic
agguuuuaucccaaaguu

SEQ ID NO: 31435 - RNA, 19 nt, Artificial Sequence
  Synthetic
uagguuuuaucccaaaguu

SEQ ID NO: 31436 - RNA, 20 nt, Artificial Sequence
  Synthetic
cuagguuuuaucccaaaguu

SEQ ID NO: 31437 - RNA, 21 nt, Artificial Sequence
  Synthetic
gcuagguuuuaucccaaaguu

SEQ ID NO: 31438 - RNA, 22 nt, Artificial Sequence
  Synthetic
agcuagguuuuaucccaaaguu

SEQ ID NO: 31439 - RNA, 23 nt, Artificial Sequence
  Synthetic
cagcuagguuuuaucccaaaguu

SEQ ID NO: 31440 - RNA, 24 nt, Artificial Sequence
  Synthetic
ccagcuagguuuuaucccaaaguu

SEQ ID NO: 31441 - RNA, 18 nt, Artificial Sequence
  Synthetic
cugcugguggcuccaguu

SEQ ID NO: 31442 - RNA, 19 nt, Artificial Sequence
  Synthetic
ccugcugguggcuccaguu

SEQ ID NO: 31443 - RNA, 20 nt, Artificial Sequence
  Synthetic
uccugcugguggcuccaguu

SEQ ID NO: 31444 - RNA, 21 nt, Artificial Sequence
  Synthetic
uuccugcugguggcuccaguu

SEQ ID NO: 31445 - RNA, 22 nt, Artificial Sequence
  Synthetic
uuuccugcugguggcuccaguu

SEQ ID NO: 31446 - RNA, 23 nt, Artificial Sequence
  Synthetic
uuuuccugcugguggcuccaguu

SEQ ID NO: 31447 - RNA, 24 nt, Artificial Sequence
  Synthetic
auuuuccugcugguggcuccaguu

SEQ ID NO: 31448 - RNA, 18 nt, Artificial Sequence
  Synthetic
  misc_feature (8)..(8): n is a, c, g, or u
guuauaunauugggaguu

SEQ ID NO: 31449 - RNA, 19 nt, Artificial Sequence
  Synthetic
  misc_feature (9)..(9): n is a, c, g, or u
gguuauaunauugggaguu

SEQ ID NO: 31450 - RNA, 20 nt, Artificial Sequence
  Synthetic
  misc_feature (10)..(10): n is a, c, g, or u
ggguuauaunauugggaguu

SEQ ID NO: 31451 - RNA, 21 nt, Artificial Sequence
  Synthetic
  misc_feature (11)..(11): n is a, c, g, or u
uggguuauaunauugggaguu

SEQ ID NO: 31452 - RNA, 22 nt, Artificial Sequence
  Synthetic
  misc_feature (12)..(12): n is a, c, g, or u
auggguuauaunauugggaguu

SEQ ID NO: 31453 - RNA, 23 nt, Artificial Sequence
  Synthetic
  misc_feature (13)..(13): n is a, c, g, or u
uauggguuauaunauugggaguu

SEQ ID NO: 31454 - RNA, 24 nt, Artificial Sequence
  Synthetic
  misc_feature (14)..(14): n is a, c, g, or u
uuauggguuauaunauugggaguu

SEQ ID NO: 31455 - RNA, 18 nt, Artificial Sequence
  Synthetic
uuugugcuggggugaguu

SEQ ID NO: 31456 - RNA, 19 nt, Artificial Sequence
  Synthetic
uuuugugcuggggugaguu

SEQ ID NO: 31457 - RNA, 20 nt, Artificial Sequence
  Synthetic
auuuugugcuggggugaguu

SEQ ID NO: 31458 - RNA, 21 nt, Artificial Sequence
  Synthetic
uauuuugugcuggggugaguu

SEQ ID NO: 31459 - RNA, 22 nt, Artificial Sequence
  Synthetic
cuauuuugugcuggggugaguu

SEQ ID NO: 31460 - RNA, 23 nt, Artificial Sequence
  Synthetic
gcuauuuugugcuggggugaguu

SEQ ID NO: 31461 - RNA, 24 nt, Artificial Sequence
  Synthetic
agcuauuuugugcuggggugaguu

SEQ ID NO: 31462 - RNA, 18 nt, Artificial Sequence
  Synthetic
cuuccggagacuacuguu

SEQ ID NO: 31463 - RNA, 19 nt, Artificial Sequence
  Synthetic
acuuccggagacuacuguu

SEQ ID NO: 31464 - RNA, 20 nt, Artificial Sequence
  Synthetic
cacuuccggagacuacuguu

SEQ ID NO: 31465 - RNA, 21 nt, Artificial Sequence
  Synthetic
acacuuccggagacuacuguu

SEQ ID NO: 31466 - RNA, 22 nt, Artificial Sequence
  Synthetic
aacacuuccggagacuacuguu

SEQ ID NO: 31467 - RNA, 23 nt, Artificial Sequence
  Synthetic
caacacuuccggagacuacuguu

SEQ ID NO: 31468 - RNA, 24 nt, Artificial Sequence
  Synthetic
ucaacacuuccggagacuacuguu

SEQ ID NO: 31469 - RNA, 18 nt, Artificial Sequence
  Synthetic
aggaccccuucucguguu

SEQ ID NO: 31470 - RNA, 19 nt, Artificial Sequence
  Synthetic
uaggaccccuucucguguu

SEQ ID NO: 31471 - RNA, 20 nt, Artificial Sequence
  Synthetic
cuaggaccccuucucguguu

SEQ ID NO: 31472 - RNA, 21 nt, Artificial Sequence
  Synthetic
ccuaggaccccuucucguguu

SEQ ID NO: 31473 - RNA, 22 nt, Artificial Sequence
  Synthetic
uccuaggaccccuucucguguu

SEQ ID NO: 31474 - RNA, 23 nt, Artificial Sequence
  Synthetic
cuccuaggaccccuucucguguu

SEQ ID NO: 31475 - RNA, 24 nt, Artificial Sequence
  Synthetic
acuccuaggaccccuucucguguu

SEQ ID NO: 31476 - RNA, 18 nt, Artificial Sequence
  Synthetic
ggcgguguguuucuuguu

SEQ ID NO: 31477 - RNA, 19 nt, Artificial Sequence
  Synthetic
aggcgguguguuucuuguu

SEQ ID NO: 31478 - RNA, 20 nt, Artificial Sequence
  Synthetic
caggcgguguguuucuuguu

SEQ ID NO: 31479 - RNA, 21 nt, Artificial Sequence
  Synthetic
acaggcgguguguuucuuguu

SEQ ID NO: 31480 - RNA, 22 nt, Artificial Sequence
  Synthetic
uacaggcgguguguuucuuguu

SEQ ID NO: 31481 - RNA, 23 nt, Artificial Sequence
  Synthetic
uuacaggcgguguguuucuuguu

SEQ ID NO: 31482 - RNA, 24 nt, Artificial Sequence
  Synthetic
guuacaggcgguguguuucuuguu

SEQ ID NO: 31483 - RNA, 18 nt, Artificial Sequence
  Synthetic
  misc_feature (1)..(1): n is a, c, g, or u
  misc_feature (16)..(16): n is a, c, g, or u
nggucuggagcggacnuu

SEQ ID NO: 31484 - RNA, 19 nt, Artificial Sequence
  Synthetic
  misc_feature (2)..(2): n is a, c, g, or u
  misc_feature (17)..(17): n is a, c, g, or u
cnggucuggagcggacnuu

SEQ ID NO: 31485 - RNA, 20 nt, Artificial Sequence
  Synthetic
  misc_feature (3)..(3): n is a, c, g, or u
  misc_feature (18)..(18): n is a, c, g, or u
gcnggucuggagcggacnuu

SEQ ID NO: 31486 - RNA, 21 nt, Artificial Sequence
  Synthetic
  misc_feature (4)..(4): n is a, c, g, or u
  misc_feature (19)..(19): n is a, c, g, or u
agcnggucuggagcggacnuu

SEQ ID NO: 31487 - RNA, 22 nt, Artificial Sequence
  Synthetic
  misc_feature (5)..(5): n is a, c, g, or u
  misc_feature (20)..(20): n is a, c, g, or u
cagcnggucuggagcggacnuu

SEQ ID NO: 31488 - RNA, 23 nt, Artificial Sequence
  Synthetic
  misc_feature (6)..(6): n is a, c, g, or u
  misc_feature (21)..(21): n is a, c, g, or u
gcagcnggucuggagcggacnuu

SEQ ID NO: 31489 - RNA, 24 nt, Artificial Sequence
  Synthetic
  misc_feature (7)..(7): n is a, c, g, or u
  misc_feature (22)..(22): n is a, c, g, or u
cgcagcnggucuggagcggacnuu

SEQ ID NO: 31490 - RNA, 18 nt, Artificial Sequence
  Synthetic
caaaaaugugaacaauuu

SEQ ID NO: 31491 - RNA, 19 nt, Artificial Sequence
  Synthetic
acaaaaaugugaacaauuu

SEQ ID NO: 31492 - RNA, 20 nt, Artificial Sequence
  Synthetic
uacaaaaaugugaacaauuu

SEQ ID NO: 31493 - RNA, 21 nt, Artificial Sequence
  Synthetic
auacaaaaaugugaacaauuu

SEQ ID NO: 31494 - RNA, 22 nt, Artificial Sequence
  Synthetic
gauacaaaaaugugaacaauuu

SEQ ID NO: 31495 - RNA, 23 nt, Artificial Sequence
  Synthetic
ugauacaaaaaugugaacaauuu

SEQ ID NO: 31496 - RNA, 24 nt, Artificial Sequence
  Synthetic
  misc_feature (1)..(1): n is a, c, g, or u
nugauacaaaaaugugaacaauuu

SEQ ID NO: 31497 - RNA, 18 nt, Artificial Sequence
  Synthetic
guggacuucucucaauuu

SEQ ID NO: 31498 - RNA, 19 nt, Artificial Sequence
  Synthetic
gguggacuucucucaauuu

SEQ ID NO: 31499 - RNA, 20 nt, Artificial Sequence
  Synthetic
ugguggacuucucucaauuu

SEQ ID NO: 31500 - RNA, 21 nt, Artificial Sequence
  Synthetic
gugguggacuucucucaauuu

SEQ ID NO: 31501 - RNA, 22 nt, Artificial Sequence
  Synthetic
cgugguggacuucucucaauuu

SEQ ID NO: 31502 - RNA, 23 nt, Artificial Sequence
  Synthetic
ucgugguggacuucucucaauuu

SEQ ID NO: 31503 - RNA, 24 nt, Artificial Sequence
  Synthetic
cucgugguggacuucucucaauuu

SEQ ID NO: 31504 - RNA, 18 nt, Artificial Sequence
  Synthetic
cugggugggcaauaauuu

SEQ ID NO: 31505 - RNA, 19 nt, Artificial Sequence
  Synthetic
ccugggugggcaauaauuu

SEQ ID NO: 31506 - RNA, 20 nt, Artificial Sequence
  Synthetic
uccugggugggcaauaauuu

SEQ ID NO: 31507 - RNA, 21 nt, Artificial Sequence
  Synthetic
uuccugggugggcaauaauuu

SEQ ID NO: 31508 - RNA, 22 nt, Artificial Sequence
  Synthetic
cuuccugggugggcaauaauuu

SEQ ID NO: 31509 - RNA, 23 nt, Artificial Sequence
  Synthetic
gcuuccugggugggcaauaauuu

SEQ ID NO: 31510 - RNA, 24 nt, Artificial Sequence
  Synthetic
ggcuuccugggugggcaauaauuu

SEQ ID NO: 31511 - RNA, 18 nt, Artificial Sequence
  Synthetic
  misc_feature (6)..(6): n is a, c, g, or u
auuucnugccuuacauuu

SEQ ID NO: 31512 - RNA, 19 nt, Artificial Sequence
  Synthetic
  misc_feature (1)..(1): n is a, c, g, or u
  misc_feature (7)..(7): n is a, c, g, or u
nauuucnugccuuacauuu

SEQ ID NO: 31513 - RNA, 20 nt, Artificial Sequence
  Synthetic
  misc_feature (2)..(2): n is a, c, g, or u
  misc_feature (8)..(8): n is a, c, g, or u
anauuucnugccuuacauuu

SEQ ID NO: 31514 - RNA, 21 nt, Artificial Sequence
  Synthetic
  misc_feature (3)..(3): n is a, c, g, or u
  misc_feature (9)..(9): n is a, c, g, or u
canauuucnugccuuacauuu

SEQ ID NO: 31515 - RNA, 22 nt, Artificial Sequence
  Synthetic
  misc_feature (4)..(4): n is a, c, g, or u
  misc_feature (10)..(10): n is a, c, g, or u
ucanauuucnugccuuacauuu

SEQ ID NO: 31516 - RNA, 23 nt, Artificial Sequence
  Synthetic
  misc_feature (5)..(5): n is a, c, g, or u
  misc_feature (11)..(11): n is a, c, g, or u
uucanauuucnugccuuacauuu

SEQ ID NO: 31517 - RNA, 24 nt, Artificial Sequence
  Synthetic
  misc_feature (6)..(6): n is a, c, g, or u
  misc_feature (12)..(12): n is a, c, g, or u
uuucanauuucnugccuuacauuu

SEQ ID NO: 31518 - RNA, 18 nt, Artificial Sequence
  Synthetic
acacauagcgccucauuu

SEQ ID NO: 31519 - RNA, 19 nt, Artificial Sequence
  Synthetic
cacacauagcgccucauuu

SEQ ID NO: 31520 - RNA, 20 nt, Artificial Sequence
  Synthetic
ccacacauagcgccucauuu

SEQ ID NO: 31521 - RNA, 21 nt, Artificial Sequence
  Synthetic
uccacacauagcgccucauuu

SEQ ID NO: 31522 - RNA, 22 nt, Artificial Sequence
  Synthetic
auccacacauagcgccucauuu

SEQ ID NO: 31523 - RNA, 23 nt, Artificial Sequence
  Synthetic
aauccacacauagcgccucauuu

SEQ ID NO: 31524 - RNA, 24 nt, Artificial Sequence
  Synthetic
gaauccacacauagcgccucauuu

SEQ ID NO: 31525 - RNA, 18 nt, Artificial Sequence
  Synthetic
aucaaagacuguguauuu

SEQ ID NO: 31526 - RNA, 19 nt, Artificial Sequence
  Synthetic
caucaaagacuguguauuu

SEQ ID NO: 31527 - RNA, 20 nt, Artificial Sequence
  Synthetic
acaucaaagacuguguauuu

SEQ ID NO: 31528 - RNA, 21 nt, Artificial Sequence
  Synthetic
uacaucaaagacuguguauuu

SEQ ID NO: 31529 - RNA, 22 nt, Artificial Sequence
  Synthetic
auacaucaaagacuguguauuu

SEQ ID NO: 31530 - RNA, 23 nt, Artificial Sequence
  Synthetic
aauacaucaaagacuguguauuu

SEQ ID NO: 31531 - RNA, 24 nt, Artificial Sequence
  Synthetic
gaauacaucaaagacuguguauuu

SEQ ID NO: 31532 - RNA, 18 nt, Artificial Sequence
  Synthetic
  misc_feature (4)..(4): n is a, c, g, or u
acanuauuuacauacuuu

SEQ ID NO: 31533 - RNA, 19 nt, Artificial Sequence
  Synthetic
  misc_feature (5)..(5): n is a, c, g, or u
gacanuauuuacauacuuu

SEQ ID NO: 31534 - RNA, 20 nt, Artificial Sequence
  Synthetic
  misc_feature (6)..(6): n is a, c, g, or u
agacanuauuuacauacuuu

SEQ ID NO: 31535 - RNA, 21 nt, Artificial Sequence
  Synthetic
  misc_feature (7)..(7): n is a, c, g, or u
uagacanuauuuacauacuuu

SEQ ID NO: 31536 - RNA, 22 nt, Artificial Sequence
  Synthetic
  misc_feature (8)..(8): n is a, c, g, or u
cuagacanuauuuacauacuuu

SEQ ID NO: 31537 - RNA, 23 nt, Artificial Sequence
  Synthetic
  misc_feature (9)..(9): n is a, c, g, or u
acuagacanuauuuacauacuuu

SEQ ID NO: 31538 - RNA, 24 nt, Artificial Sequence
  Synthetic
  misc_feature (10)..(10): n is a, c, g, or u
aacuagacanuauuuacauacuuu

SEQ ID NO: 31539 - RNA, 18 nt, Artificial Sequence
  Synthetic
ggcaacggccaggccuuu

SEQ ID NO: 31540 - RNA, 19 nt, Artificial Sequence
  Synthetic
cggcaacggccaggccuuu

SEQ ID NO: 31541 - RNA, 20 nt, Artificial Sequence
  Synthetic
ucggcaacggccaggccuuu

SEQ ID NO: 31542 - RNA, 18 nt, Artificial Sequence
  Synthetic
  misc_feature (8)..(8): n is a, c, g, or u
acaacucnguuguccuuu

SEQ ID NO: 31543 - RNA, 19 nt, Artificial Sequence
  Synthetic
  misc_feature (9)..(9): n is a, c, g, or u
gacaacucnguuguccuuu

SEQ ID NO: 31544 - RNA, 20 nt, Artificial Sequence
  Synthetic
  misc_feature (10)..(10): n is a, c, g, or u
ugacaacucnguuguccuuu

SEQ ID NO: 31545 - RNA, 21 nt, Artificial Sequence
  Synthetic
  misc_feature (11)..(11): n is a, c, g, or u
cugacaacucnguuguccuuu

SEQ ID NO: 31546 - RNA, 22 nt, Artificial Sequence
  Synthetic
  misc_feature (12)..(12): n is a, c, g, or u
acugacaacucnguuguccuuu

SEQ ID NO: 31547 - RNA, 23 nt, Artificial Sequence
  Synthetic
  misc_feature (13)..(13): n is a, c, g, or u
cacugacaacucnguuguccuuu

SEQ ID NO: 31548 - RNA, 24 nt, Artificial Sequence
  Synthetic
  misc_feature (14)..(14): n is a, c, g, or u
gcacugacaacucnguuguccuuu

SEQ ID NO: 31549 - RNA, 18 nt, Artificial Sequence
  Synthetic
cccaucaucuugggcuuu

SEQ ID NO: 31550 - RNA, 19 nt, Artificial Sequence
  Synthetic
ucccaucaucuugggcuuu

SEQ ID NO: 31551 - RNA, 20 nt, Artificial Sequence
  Synthetic
aucccaucaucuugggcuuu

SEQ ID NO: 31552 - RNA, 21 nt, Artificial Sequence
  Synthetic
caucccaucaucuugggcuuu

SEQ ID NO: 31553 - RNA, 22 nt, Artificial Sequence
  Synthetic
ccaucccaucaucuugggcuuu

SEQ ID NO: 31554 - RNA, 23 nt, Artificial Sequence
  Synthetic
cccaucccaucaucuugggcuuu

SEQ ID NO: 31555 - RNA, 24 nt, Artificial Sequence
  Synthetic
ucccaucccaucaucuugggcuuu

SEQ ID NO: 31556 - RNA, 18 nt, Artificial Sequence
  Synthetic
aaaaucaaagauugcuuu

SEQ ID NO: 31557 - RNA, 19 nt, Artificial Sequence
  Synthetic
uaaaaucaaagauugcuuu

SEQ ID NO: 31558 - RNA, 20 nt, Artificial Sequence
  Synthetic
auaaaaucaaagauugcuuu

SEQ ID NO: 31559 - RNA, 21 nt, Artificial Sequence
  Synthetic
cauaaaaucaaagauugcuuu

SEQ ID NO: 31560 - RNA, 22 nt, Artificial Sequence
  Synthetic
gcauaaaaucaaagauugcuuu

SEQ ID NO: 31561 - RNA, 23 nt, Artificial Sequence
  Synthetic
ugcauaaaaucaaagauugcuuu

SEQ ID NO: 31562 - RNA, 24 nt, Artificial Sequence
  Synthetic
gugcauaaaaucaaagauugcuuu

SEQ ID NO: 31563 - RNA, 18 nt, Artificial Sequence
  Synthetic
aauccucugggauucuuu

SEQ ID NO: 31564 - RNA, 19 nt, Artificial Sequence
  Synthetic
caauccucugggauucuuu

SEQ ID NO: 31565 - RNA, 20 nt, Artificial Sequence
  Synthetic
ccaauccucugggauucuuu

SEQ ID NO: 31566 - RNA, 21 nt, Artificial Sequence
  Synthetic
cccaauccucugggauucuuu

SEQ ID NO: 31567 - RNA, 22 nt, Artificial Sequence
  Synthetic
gcccaauccucugggauucuuu

SEQ ID NO: 31568 - RNA, 23 nt, Artificial Sequence
  Synthetic
ugcccaauccucugggauucuuu

SEQ ID NO: 31569 - RNA, 24 nt, Artificial Sequence
  Synthetic
gugcccaauccucugggauucuuu

SEQ ID NO: 31570 - RNA, 18 nt, Artificial Sequence
  Synthetic
ccauugauuggaagguuu

SEQ ID NO: 31571 - RNA, 19 nt, Artificial Sequence
  Synthetic
cccauugauuggaagguuu

SEQ ID NO: 31572 - RNA, 20 nt, Artificial Sequence
  Synthetic
acccauugauuggaagguuu

SEQ ID NO: 31573 - RNA, 21 nt, Artificial Sequence
  Synthetic
gacccauugauuggaagguuu

SEQ ID NO: 31574 - RNA, 22 nt, Artificial Sequence
  Synthetic
agacccauugauuggaagguuu

SEQ ID NO: 31575 - RNA, 23 nt, Artificial Sequence
  Synthetic
uagacccauugauuggaagguuu

SEQ ID NO: 31576 - RNA, 24 nt, Artificial Sequence
  Synthetic
auagacccauugauuggaagguuu

SEQ ID NO: 31577 - RNA, 18 nt, Artificial Sequence
  Synthetic
ggccuuugccaaguguuu

SEQ ID NO: 31578 - RNA, 19 nt, Artificial Sequence
  Synthetic
aggccuuugccaaguguuu

SEQ ID NO: 31579 - RNA, 20 nt, Artificial Sequence
  Synthetic
caggccuuugccaaguguuu

SEQ ID NO: 31580 - RNA, 21 nt, Artificial Sequence
  Synthetic
ccaggccuuugccaaguguuu

SEQ ID NO: 31581 - RNA, 22 nt, Artificial Sequence
  Synthetic
gccaggccuuugccaaguguuu

SEQ ID NO: 31582 - RNA, 23 nt, Artificial Sequence
  Synthetic
ggccaggccuuugccaaguguuu

SEQ ID NO: 31583 - RNA, 24 nt, Artificial Sequence
  Synthetic
cggccaggccuuugccaaguguuu

SEQ ID NO: 31584 - RNA, 18 nt, Artificial Sequence
  Synthetic
uggacuucucucaauuuu

SEQ ID NO: 31585 - RNA, 19 nt, Artificial Sequence
  Synthetic
guggacuucucucaauuuu

SEQ ID NO: 31586 - RNA, 20 nt, Artificial Sequence
  Synthetic
gguggacuucucucaauuuu

SEQ ID NO: 31587 - RNA, 21 nt, Artificial Sequence
  Synthetic
ugguggacuucucucaauuuu

SEQ ID NO: 31588 - RNA, 22 nt, Artificial Sequence
  Synthetic
gugguggacuucucucaauuuu

SEQ ID NO: 31589 - RNA, 23 nt, Artificial Sequence
  Synthetic
cgugguggacuucucucaauuuu

SEQ ID NO: 31590 - RNA, 24 nt, Artificial Sequence
  Synthetic
ucgugguggacuucucucaauuuu

SEQ ID NO: 31591 - RNA, 18 nt, Artificial Sequence
  Synthetic
ugguuaacuccuucuuuu

SEQ ID NO: 31592 - RNA, 19 nt, Artificial Sequence
  Synthetic
cugguuaacuccuucuuuu

SEQ ID NO: 31593 - RNA, 20 nt, Artificial Sequence
  Synthetic
acugguuaacuccuucuuuu

SEQ ID NO: 31594 - RNA, 21 nt, Artificial Sequence
  Synthetic
gacugguuaacuccuucuuuu

SEQ ID NO: 31595 - RNA, 22 nt, Artificial Sequence
  Synthetic
ugacugguuaacuccuucuuuu

SEQ ID NO: 31596 - RNA, 23 nt, Artificial Sequence
  Synthetic
cugacugguuaacuccuucuuuu

SEQ ID NO: 31597 - RNA, 24 nt, Artificial Sequence
  Synthetic
ccugacugguuaacuccuucuuuu

SEQ ID NO: 31598 - RNA, 17 nt, Artificial Sequence
  Synthetic
gaauacccgccuuccaa

SEQ ID NO: 31599 - RNA, 17 nt, Artificial Sequence
  Synthetic
gaacggcagacggagaa

SEQ ID NO: 31600 - RNA, 17 nt, Artificial Sequence
  Synthetic
gucgugcagguuuugca

SEQ ID NO: 31601 - RNA, 17 nt, Artificial Sequence
  Synthetic
gugcaauuuccguccga

SEQ ID NO: 31602 - RNA, 17 nt, Artificial Sequence
  Synthetic
gaggcaauagucggaac

SEQ ID NO: 31603 - RNA, 17 nt, Artificial Sequence
  Synthetic
gucugucaacgaauaac

SEQ ID NO: 31604 - RNA, 17 nt, Artificial Sequence
  Synthetic
gcugacgcaacccccac

SEQ ID NO: 31605 - RNA, 17 nt, Artificial Sequence
  Synthetic
guuggagccuauggacc

SEQ ID NO: 31606 - RNA, 17 nt, Artificial Sequence
  Synthetic
gacugcgaauuuaggcc

SEQ ID NO: 31607 - RNA, 17 nt, Artificial Sequence
  Synthetic
ggauugaagucccaauc

SEQ ID NO: 31608 - RNA, 17 nt, Artificial Sequence
  Synthetic
gcgaagugcacacgguc

SEQ ID NO: 31609 - RNA, 17 nt, Artificial Sequence
  Synthetic
gucagcgcugaauccag

SEQ ID NO: 31610 - RNA, 17 nt, Artificial Sequence
  Synthetic
gcaguauggaucggcag

SEQ ID NO: 31611 - RNA, 17 nt, Artificial Sequence
  Synthetic
ggacggucccucucgag

SEQ ID NO: 31612 - RNA, 17 nt, Artificial Sequence
  Synthetic
gcagaucuucugcgacg

SEQ ID NO: 31613 - RNA, 17 nt, Artificial Sequence
  Synthetic
gcgcaccucucuuuacg

SEQ ID NO: 31614 - RNA, 17 nt, Artificial Sequence
  Synthetic
gcggacgaccccucccg

SEQ ID NO: 31615 - RNA, 17 nt, Artificial Sequence
  Synthetic
gccaacuggauccuucg

SEQ ID NO: 31616 - RNA, 17 nt, Artificial Sequence
  Synthetic
gacucugcgguauugug

SEQ ID NO: 31617 - RNA, 17 nt, Artificial Sequence
  Synthetic
gcaacccccacugguug

SEQ ID NO: 31618 - RNA, 17 nt, Artificial Sequence
  Synthetic
ggugaacccggguccau

SEQ ID NO: 31619 - RNA, 17 nt, Artificial Sequence
  Synthetic
gccaagccccaaccagu

SEQ ID NO: 31620 - RNA, 17 nt, Artificial Sequence
  Synthetic
gacggucccucucgagu

SEQ ID NO: 31621 - RNA, 17 nt, Artificial Sequence
  Synthetic
guagcgcuucauuuugu

SEQ ID NO: 31622 - RNA, 20 nt, Artificial Sequence
  Synthetic
ggucaaugucuaagccaaaa

SEQ ID NO: 31623 - RNA, 20 nt, Artificial Sequence
  Synthetic
gggggcgacagagccccaaa

SEQ ID NO: 31624 - RNA, 20 nt, Artificial Sequence
  Synthetic
gaucggcagaggagccacaa

SEQ ID NO: 31625 - RNA, 20 nt, Artificial Sequence
  Synthetic
gcuuguauacaugcauauaa

SEQ ID NO: 31626 - RNA, 20 nt, Artificial Sequence
  Synthetic
gagaggcaauagucggaaca

SEQ ID NO: 31627 - RNA, 20 nt, Artificial Sequence
  Synthetic
ggagucgugcagguuuugca

SEQ ID NO: 31628 - RNA, 20 nt, Artificial Sequence
  Synthetic
gucucuuagugguggagaga

SEQ ID NO: 31629 - RNA, 20 nt, Artificial Sequence
  Synthetic
gaucuucgucugcgaggcga

SEQ ID NO: 31630 - RNA, 20 nt, Artificial Sequence
  Synthetic
gcgagggaguucuucuucga

SEQ ID NO: 31631 - RNA, 20 nt, Artificial Sequence
  Synthetic
gauagaacaacuuugccaua

SEQ ID NO: 31632 - RNA, 20 nt, Artificial Sequence
  Synthetic
guagcuccaaauucuuuaua

SEQ ID NO: 31633 - RNA, 20 nt, Artificial Sequence
  Synthetic
gggcuuucgcaaaauaccua

SEQ ID NO: 31634 - RNA, 20 nt, Artificial Sequence
  Synthetic
ggacuucucucaauuuucua

SEQ ID NO: 31635 - RNA, 20 nt, Artificial Sequence
  Synthetic
gguuuugcagggucccguac

SEQ ID NO: 31636 - RNA, 20 nt, Artificial Sequence
  Synthetic
ggggacugcgaauuuaggcc

SEQ ID NO: 31637 - RNA, 20 nt, Artificial Sequence
  Synthetic
guacugguggucgaggaucc

SEQ ID NO: 31638 - RNA, 20 nt, Artificial Sequence
  Synthetic
gacugacgauugguggaggc

SEQ ID NO: 31639 - RNA, 20 nt, Artificial Sequence
  Synthetic
gccuugagcaggagucgugc

SEQ ID NO: 31640 - RNA, 20 nt, Artificial Sequence
  Synthetic
gcuggguccaacuggugauc

SEQ ID NO: 31641 - RNA, 20 nt, Artificial Sequence
  Synthetic
gccuccaccaaucgucaguc

SEQ ID NO: 31642 - RNA, 20 nt, Artificial Sequence
  Synthetic
gaagcgaagugcacacgguc

SEQ ID NO: 31643 - RNA, 20 nt, Artificial Sequence
  Synthetic
gccccaaacggccccgggag

SEQ ID NO: 31644 - RNA, 20 nt, Artificial Sequence
  Synthetic
gaagauugacgagaugugag

SEQ ID NO: 31645 - RNA, 20 nt, Artificial Sequence
  Synthetic
gaugcagaucuucugcgacg

SEQ ID NO: 31646 - RNA, 20 nt, Artificial Sequence
  Synthetic
ggggcgcaccucucuuuacg

SEQ ID NO: 31647 - RNA, 20 nt, Artificial Sequence
  Synthetic
guaaagagaggugcgccccg

SEQ ID NO: 31648 - RNA, 20 nt, Artificial Sequence
  Synthetic
gauugagaucuucgucugcg

SEQ ID NO: 31649 - RNA, 20 nt, Artificial Sequence
  Synthetic
gggucccguacugguggucg

SEQ ID NO: 31650 - RNA, 20 nt, Artificial Sequence
  Synthetic
ggcgagggaguucuucuucg

SEQ ID NO: 31651 - RNA, 20 nt, Artificial Sequence
  Synthetic
gagccccaaacggccccggg

SEQ ID NO: 31652 - RNA, 20 nt, Artificial Sequence
  Synthetic
ggaugacugucucuuagugg

SEQ ID NO: 31653 - RNA, 20 nt, Artificial Sequence
  Synthetic
gacgcaacccccacugguug

SEQ ID NO: 31654 - RNA, 20 nt, Artificial Sequence
  Synthetic
gcgcaugcguggaaccuuug

SEQ ID NO: 31655 - RNA, 20 nt, Artificial Sequence
  Synthetic
ggcuuucgcaaaauaccuau

SEQ ID NO: 31656 - RNA, 20 nt, Artificial Sequence
  Synthetic
ggguugcgucagcaaacacu

SEQ ID NO: 31657 - RNA, 20 nt, Artificial Sequence
  Synthetic
guaacacgagcagggguccu

SEQ ID NO: 31658 - RNA, 20 nt, Artificial Sequence
  Synthetic
guauucccaucccaucaucu

SEQ ID NO: 31659 - RNA, 20 nt, Artificial Sequence
  Synthetic
ggcuccaacuccuaccuugu

SEQ ID NO: 31660 - RNA, 20 nt, Artificial Sequence
  Synthetic
guugauaggauaggggcauu

SEQ ID NO: 31661 - RNA, 20 nt, Artificial Sequence
  Synthetic
gacauuauuuacauacccuu

SEQ ID NO: 31662 - RNA, 20 nt, Artificial Sequence
  Synthetic
gaccccucccggggccguuu

SEQ ID NO: 31663 - RNA, 17 nt, Artificial Sequence
  Synthetic
ugacgggacguaaacaa

SEQ ID NO: 31664 - RNA, 17 nt, Artificial Sequence
  Synthetic
cccguggucggcaggaa

SEQ ID NO: 31665 - RNA, 17 nt, Artificial Sequence
  Synthetic
aggcaauagucggaaca

SEQ ID NO: 31666 - RNA, 17 nt, Artificial Sequence
  Synthetic
caccucugcacguuaca

SEQ ID NO: 31667 - RNA, 17 nt, Artificial Sequence
  Synthetic
cgccuguaacacgagca

SEQ ID NO: 31668 - RNA, 17 nt, Artificial Sequence
  Synthetic
ucuccauguucggugca

SEQ ID NO: 31669 - RNA, 17 nt, Artificial Sequence
  Synthetic
ccaccaaucgucaguca

SEQ ID NO: 31670 - RNA, 17 nt, Artificial Sequence
  Synthetic
ucggcaggaacggcaga

SEQ ID NO: 31671 - RNA, 17 nt, Artificial Sequence
  Synthetic
caaaggacgucccgcga

SEQ ID NO: 31672 - RNA, 17 nt, Artificial Sequence
  Synthetic
cuucgucugcgaggcga

SEQ ID NO: 31673 - RNA, 17 nt, Artificial Sequence
  Synthetic
agggaguucuucuucga

SEQ ID NO: 31674 - RNA, 17 nt, Artificial Sequence
  Synthetic
uuucucgccaacuuaua

SEQ ID NO: 31675 - RNA, 17 nt, Artificial Sequence
  Synthetic
cuuucgcaaaauaccua

SEQ ID NO: 31676 - RNA, 17 nt, Artificial Sequence
  Synthetic
cacaaaaugaagcgcua

SEQ ID NO: 31677 - RNA, 17 nt, Artificial Sequence
  Synthetic
auccucgaccaccagua

SEQ ID NO: 31678 - RNA, 17 nt, Artificial Sequence
  Synthetic
cuaggaguuccgcagua

SEQ ID NO: 31679 - RNA, 17 nt, Artificial Sequence
  Synthetic
uuguucagugguucgua

SEQ ID NO: 31680 - RNA, 17 nt, Artificial Sequence
  Synthetic
ucaauuggccuguuaac

SEQ ID NO: 31681 - RNA, 17 nt, Artificial Sequence
  Synthetic
ccguuccugccgaccac

SEQ ID NO: 31682 - RNA, 17 nt, Artificial Sequence
  Synthetic
uccucgaccaccaguac

SEQ ID NO: 31683 - RNA, 17 nt, Artificial Sequence
  Synthetic
uuugcagggucccguac

SEQ ID NO: 31684 - RNA, 17 nt, Artificial Sequence
  Synthetic
accccugcucguguuac

SEQ ID NO: 31685 - RNA, 17 nt, Artificial Sequence
  Synthetic
uacaaaggucauuaacc

SEQ ID NO: 31686 - RNA, 17 nt, Artificial Sequence
  Synthetic
cgcuucagcuuuguacc

SEQ ID NO: 31687 - RNA, 17 nt, Artificial Sequence
  Synthetic
uuggagccuauggaccc

SEQ ID NO: 31688 - RNA, 17 nt, Artificial Sequence
  Synthetic
agagccccaaacggccc

SEQ ID NO: 31689 - RNA, 17 nt, Artificial Sequence
  Synthetic
agcggacgaccccuccc

SEQ ID NO: 31690 - RNA, 17 nt, Artificial Sequence
  Synthetic
cugguggucgaggaucc

SEQ ID NO: 31691 - RNA, 17 nt, Artificial Sequence
  Synthetic
ucucgucaaucuucucc

SEQ ID NO: 31692 - RNA, 17 nt, Artificial Sequence
  Synthetic
cgggaggggucguccgc

SEQ ID NO: 31693 - RNA, 17 nt, Artificial Sequence
  Synthetic
cuuguccuggcuaucgc

SEQ ID NO: 31694 - RNA, 17 nt, Artificial Sequence
  Synthetic
ccaacuggauccuucgc

SEQ ID NO: 31695 - RNA, 17 nt, Artificial Sequence
  Synthetic
uucuccauguucggugc

SEQ ID NO: 31696 - RNA, 17 nt, Artificial Sequence
  Synthetic
uuugcucgcagccgguc

SEQ ID NO: 31697 - RNA, 17 nt, Artificial Sequence
  Synthetic
uuccauguaacgugcag

SEQ ID NO: 31698 - RNA, 17 nt, Artificial Sequence
  Synthetic
aggcgaacaaugaucag

SEQ ID NO: 31699 - RNA, 17 nt, Artificial Sequence
  Synthetic
ccaaacggccccgggag

SEQ ID NO: 31700 - RNA, 17 nt, Artificial Sequence
  Synthetic
ucgggaaggaauccuag

SEQ ID NO: 31701 - RNA, 17 nt, Artificial Sequence
  Synthetic
cguuccugccgaccacg

SEQ ID NO: 31702 - RNA, 17 nt, Artificial Sequence
  Synthetic
aagagaggugcgccccg

SEQ ID NO: 31703 - RNA, 17 nt, Artificial Sequence
  Synthetic
ucuucgucugcgaggcg

SEQ ID NO: 31704 - RNA, 17 nt, Artificial Sequence
  Synthetic
ugagaucuucgucugcg

SEQ ID NO: 31705 - RNA, 17 nt, Artificial Sequence
  Synthetic
cgcagagucuagacucg

SEQ ID NO: 31706 - RNA, 17 nt, Artificial Sequence
  Synthetic
ucccguacugguggucg

SEQ ID NO: 31707 - RNA, 17 nt, Artificial Sequence
  Synthetic
uucaccccuccacacgg

SEQ ID NO: 31708 - RNA, 17 nt, Artificial Sequence
  Synthetic
ccaaucgucagucaggg

SEQ ID NO: 31709 - RNA, 17 nt, Artificial Sequence
  Synthetic
agagucuagacucgugg

SEQ ID NO: 31710 - RNA, 17 nt, Artificial Sequence
  Synthetic
ugacugacgauuggugg

SEQ ID NO: 31711 - RNA, 17 nt, Artificial Sequence
  Synthetic
cccugacugacgauugg

SEQ ID NO: 31712 - RNA, 17 nt, Artificial Sequence
  Synthetic
ucugccgauccauacug

SEQ ID NO: 31713 - RNA, 17 nt, Artificial Sequence
  Synthetic
cacgagucuagacucug

SEQ ID NO: 31714 - RNA, 17 nt, Artificial Sequence
  Synthetic
cguagcgcuucauuuug

SEQ ID NO: 31715 - RNA, 17 nt, Artificial Sequence
  Synthetic
ccucccugacugacgau

SEQ ID NO: 31716 - RNA, 17 nt, Artificial Sequence
  Synthetic
aguuccgcaguauggau

SEQ ID NO: 31717 - RNA, 17 nt, Artificial Sequence
  Synthetic
cgaaagcccaagaugau

SEQ ID NO: 31718 - RNA, 17 nt, Artificial Sequence
  Synthetic
ucuccggaaguguugau

SEQ ID NO: 31719 - RNA, 17 nt, Artificial Sequence
  Synthetic
uugcgucagcaaacacu

SEQ ID NO: 31720 - RNA, 17 nt, Artificial Sequence
  Synthetic
cccgcgaaggauccagu

SEQ ID NO: 31721 - RNA, 17 nt, Artificial Sequence
  Synthetic
acgcaacccccacuggu

SEQ ID NO: 31722 - RNA, 17 nt, Artificial Sequence
  Synthetic
aaccguucuugaguauu

SEQ ID NO: 31723 - RNA, 17 nt, Artificial Sequence
  Synthetic
ugggucaccauauacuu

SEQ ID NO: 31724 - RNA, 17 nt, Artificial Sequence
  Synthetic
cgcaacccccacugguu

SEQ ID NO: 31725 - RNA, 17 nt, Artificial Sequence
  Synthetic
uccacacggaggccuuu

SEQ ID NO: 31726 - RNA, 17 nt, Artificial Sequence
  Synthetic
cccucccggggccguuu

SEQ ID NO: 31727 - RNA, 20 nt, Artificial Sequence
  Synthetic
ccuacgaaccacugaacaaa

SEQ ID NO: 31728 - RNA, 20 nt, Artificial Sequence
  Synthetic
uagaauacccgccuuccaaa

SEQ ID NO: 31729 - RNA, 20 nt, Artificial Sequence
  Synthetic
cgcugacgggacguaaacaa

SEQ ID NO: 31730 - RNA, 20 nt, Artificial Sequence
  Synthetic
auagaauacccgccuuccaa

SEQ ID NO: 31731 - RNA, 20 nt, Artificial Sequence
  Synthetic
aggauguauauuuccgagaa

SEQ ID NO: 31732 - RNA, 20 nt, Artificial Sequence
  Synthetic
cgccccguggucggcaggaa

SEQ ID NO: 31733 - RNA, 20 nt, Artificial Sequence
  Synthetic
cuagaggauugcugguggaa

SEQ ID NO: 31734 - RNA, 20 nt, Artificial Sequence
  Synthetic
  misc_feature (18)..(18): n is a, c, g, or u
aauugguaacagcgguanaa

SEQ ID NO: 31735 - RNA, 20 nt, Artificial Sequence
  Synthetic
uaguauuccuuggacucaca

SEQ ID NO: 31736 - RNA, 20 nt, Artificial Sequence
  Synthetic
cuucaccucugcacguuaca

SEQ ID NO: 31737 - RNA, 20 nt, Artificial Sequence
  Synthetic
ccccgccuguaacacgagca

SEQ ID NO: 31738 - RNA, 20 nt, Artificial Sequence
  Synthetic
uguucuccauguucggugca

SEQ ID NO: 31739 - RNA, 20 nt, Artificial Sequence
  Synthetic
ucgagaagaucacgaacaga

SEQ ID NO: 31740 - RNA, 20 nt, Artificial Sequence
  Synthetic
acagacgggaaaaagucaga

SEQ ID NO: 31741 - RNA, 20 nt, Artificial Sequence
  Synthetic
caggugcaauuuccguccga

SEQ ID NO: 31742 - RNA, 20 nt, Artificial Sequence
  Synthetic
aaacaaaggacgucccgcga

SEQ ID NO: 31743 - RNA, 20 nt, Artificial Sequence
  Synthetic
agccccaaacggccccggga

SEQ ID NO: 31744 - RNA, 20 nt, Artificial Sequence
  Synthetic
cagcauggggcuuucuugga

SEQ ID NO: 31745 - RNA, 20 nt, Artificial Sequence
  Synthetic
uuugcgaaagcccaagauga

SEQ ID NO: 31746 - RNA, 20 nt, Artificial Sequence
  Synthetic
uccgcuggauucagcgcuga

SEQ ID NO: 31747 - RNA, 20 nt, Artificial Sequence
  Synthetic
ucuaagccaaaaaggccaua

SEQ ID NO: 31748 - RNA, 20 nt, Artificial Sequence
  Synthetic
ccggaaguguugauaggaua

SEQ ID NO: 31749 - RNA, 20 nt, Artificial Sequence
  Synthetic
agaucuuguucccaaguaua

SEQ ID NO: 31750 - RNA, 20 nt, Artificial Sequence
  Synthetic
aggauccucgaccaccagua

SEQ ID NO: 31751 - RNA, 20 nt, Artificial Sequence
  Synthetic
cagcuaggaguuccgcagua

SEQ ID NO: 31752 - RNA, 20 nt, Artificial Sequence
  Synthetic
cauuuguucagugguucgua

SEQ ID NO: 31753 - RNA, 20 nt, Artificial Sequence
  Synthetic
aggguucacuaucccugaac

SEQ ID NO: 31754 - RNA, 20 nt, Artificial Sequence
  Synthetic
uucggaaacucccuguuaac

SEQ ID NO: 31755 - RNA, 20 nt, Artificial Sequence
  Synthetic
uuugcugacgcaacccccac

SEQ ID NO: 31756 - RNA, 20 nt, Artificial Sequence
  Synthetic
ugccaaucaggauuaaagac

SEQ ID NO: 31757 - RNA, 20 nt, Artificial Sequence
  Synthetic
cgagaagaucacgaacagac

SEQ ID NO: 31758 - RNA, 20 nt, Artificial Sequence
  Synthetic
agcaaacacuuggcacagac

SEQ ID NO: 31759 - RNA, 20 nt, Artificial Sequence
  Synthetic
caaugaguuuugcuccagac

SEQ ID NO: 31760 - RNA, 20 nt, Artificial Sequence
  Synthetic
ccgcuggauucagcgcugac

SEQ ID NO: 31761 - RNA, 20 nt, Artificial Sequence
  Synthetic
cccacaaaaugaagcgcuac

SEQ ID NO: 31762 - RNA, 20 nt, Artificial Sequence
  Synthetic
aggaccccugcucguguuac

SEQ ID NO: 31763 - RNA, 20 nt, Artificial Sequence
  Synthetic
caccgcuucagcuuuguacc

SEQ ID NO: 31764 - RNA, 20 nt, Artificial Sequence
  Synthetic
acagagccccaaacggcccc

SEQ ID NO: 31765 - RNA, 20 nt, Artificial Sequence
  Synthetic
uccagcggacgaccccuccc

SEQ ID NO: 31766 - RNA, 20 nt, Artificial Sequence
  Synthetic
agacacauccagcgauagcc

SEQ ID NO: 31767 - RNA, 20 nt, Artificial Sequence
  Synthetic
auccagcggacgaccccucc

SEQ ID NO: 31768 - RNA, 20 nt, Artificial Sequence
  Synthetic
ugcauguauacaagcuaagc

SEQ ID NO: 31769 - RNA, 20 nt, Artificial Sequence
  Synthetic
accccgccuguaacacgagc

SEQ ID NO: 31770 - RNA, 20 nt, Artificial Sequence
  Synthetic
uacauagaguugccuugagc

SEQ ID NO: 31771 - RNA, 20 nt, Artificial Sequence
  Synthetic
caacuuguccuggcuaucgc

SEQ ID NO: 31772 - RNA, 20 nt, Artificial Sequence
  Synthetic
cugccaacuggauccuucgc

SEQ ID NO: 31773 - RNA, 20 nt, Artificial Sequence
  Synthetic
uuacauacccuuuggaaggc

SEQ ID NO: 31774 - RNA, 20 nt, Artificial Sequence
  Synthetic
cuguuguuagacgaagaggc

SEQ ID NO: 31775 - RNA, 20 nt, Artificial Sequence
  Synthetic
aggugcgccccguggucggc

SEQ ID NO: 31776 - RNA, 20 nt, Artificial Sequence
  Synthetic
uugguauuugcucugaaugc

SEQ ID NO: 31777 - RNA, 20 nt, Artificial Sequence
  Synthetic
accaccaaaucucuggaugc

SEQ ID NO: 31778 - RNA, 20 nt, Artificial Sequence
  Synthetic
aggagucgugcagguuuugc

SEQ ID NO: 31779 - RNA, 20 nt, Artificial Sequence
  Synthetic
acuaagagacagucauccuc

SEQ ID NO: 31780 - RNA, 20 nt, Artificial Sequence
  Synthetic
acuacuguuguuagacgaag

SEQ ID NO: 31781 - RNA, 20 nt, Artificial Sequence
  Synthetic
cccgucagcgcugaauccag

SEQ ID NO: 31782 - RNA, 20 nt, Artificial Sequence
  Synthetic
uccgcaguauggaucggcag

SEQ ID NO: 31783 - RNA, 20 nt, Artificial Sequence
  Synthetic
cuuggacggucccucucgag

SEQ ID NO: 31784 - RNA, 20 nt, Artificial Sequence
  Synthetic
cgagggaguucuucuucgag

SEQ ID NO: 31785 - RNA, 20 nt, Artificial Sequence
  Synthetic
ucgcaaaauaccuaugggag

SEQ ID NO: 31786 - RNA, 20 nt, Artificial Sequence
  Synthetic
ugccguuccugccgaccacg

SEQ ID NO: 31787 - RNA, 20 nt, Artificial Sequence
  Synthetic
acaaggugggaaacuuuacg

SEQ ID NO: 31788 - RNA, 20 nt, Artificial Sequence
  Synthetic
ccagcggacgaccccucccg

SEQ ID NO: 31789 - RNA, 20 nt, Artificial Sequence
  Synthetic
agaucuucgucugcgaggcg

SEQ ID NO: 31790 - RNA, 20 nt, Artificial Sequence
  Synthetic
  misc_feature (6)..(6): n is a, c, g, or u
aucggncaucagcgcaugcg

SEQ ID NO: 31791 - RNA, 20 nt, Artificial Sequence
  Synthetic
uaccgcagagucuagacucg

SEQ ID NO: 31792 - RNA, 20 nt, Artificial Sequence
  Synthetic
accccugcucguguuacagg

SEQ ID NO: 31793 - RNA, 20 nt, Artificial Sequence
  Synthetic
acuucucucaauuuucuagg

SEQ ID NO: 31794 - RNA, 20 nt, Artificial Sequence
  Synthetic
ccaccaaucgucagucaggg

SEQ ID NO: 31795 - RNA, 20 nt, Artificial Sequence
  Synthetic
uuugcagggucccguacugg

SEQ ID NO: 31796 - RNA, 20 nt, Artificial Sequence
  Synthetic
cgcagagucuagacucgugg

SEQ ID NO: 31797 - RNA, 20 nt, Artificial Sequence
  Synthetic
cccugacugacgauuggugg

SEQ ID NO: 31798 - RNA, 20 nt, Artificial Sequence
  Synthetic
ccucccugacugacgauugg

SEQ ID NO: 31799 - RNA, 20 nt, Artificial Sequence
  Synthetic
cgauagccaggacaaguugg

SEQ ID NO: 31800 - RNA, 20 nt, Artificial Sequence
  Synthetic
uccagcauccagagauuugg

SEQ ID NO: 31801 - RNA, 20 nt, Artificial Sequence
  Synthetic
uccucugccgauccauacug

SEQ ID NO: 31802 - RNA, 20 nt, Artificial Sequence
  Synthetic
caccacgagucuagacucug

SEQ ID NO: 31803 - RNA, 20 nt, Artificial Sequence
  Synthetic
uggacggucccucucgagug

SEQ ID NO: 31804 - RNA, 20 nt, Artificial Sequence
  Synthetic
ugccugagugcuguauggug

SEQ ID NO: 31805 - RNA, 20 nt, Artificial Sequence
  Synthetic
cuagacucugcgguauugug

SEQ ID NO: 31806 - RNA, 20 nt, Artificial Sequence
  Synthetic
accccucccggggccguuug

SEQ ID NO: 31807 - RNA, 20 nt, Artificial Sequence
  Synthetic
ucccguagcgcuucauuuug

SEQ ID NO: 31808 - RNA, 20 nt, Artificial Sequence
  Synthetic
aggaggcuguaggcauaaau

SEQ ID NO: 31809 - RNA, 20 nt, Artificial Sequence
  Synthetic
uuaaggcaggguaaccacau

SEQ ID NO: 31810 - RNA, 20 nt, Artificial Sequence
  Synthetic
aggggugaacccggguccau

SEQ ID NO: 31811 - RNA, 20 nt, Artificial Sequence
  Synthetic
cggucuggagcaaaacucau

SEQ ID NO: 31812 - RNA, 20 nt, Artificial Sequence
  Synthetic
caaauaccaacaauccagau

SEQ ID NO: 31813 - RNA, 20 nt, Artificial Sequence
  Synthetic
uccggaaguguugauaggau

SEQ ID NO: 31814 - RNA, 20 nt, Artificial Sequence
  Synthetic
aggaguuccgcaguauggau

SEQ ID NO: 31815 - RNA, 20 nt, Artificial Sequence
  Synthetic
uugcgaaagcccaagaugau

SEQ ID NO: 31816 - RNA, 20 nt, Artificial Sequence
  Synthetic
uaccugucuuuaauccugau

SEQ ID NO: 31817 - RNA, 20 nt, Artificial Sequence
  Synthetic
ugcuggguccaacuggugau

SEQ ID NO: 31818 - RNA, 20 nt, Artificial Sequence
  Synthetic
uagucuccggaaguguugau

SEQ ID NO: 31819 - RNA, 20 nt, Artificial Sequence
  Synthetic
uuugugggucaccauauacu

SEQ ID NO: 31820 - RNA, 20 nt, Artificial Sequence
  Synthetic
aacccccacugguuggggcu

SEQ ID NO: 31821 - RNA, 20 nt, Artificial Sequence
  Synthetic
auagcugaaagccagacagu

SEQ ID NO: 31822 - RNA, 20 nt, Artificial Sequence
  Synthetic
cgucccgcgaaggauccagu

SEQ ID NO: 31823 - RNA, 20 nt, Artificial Sequence
  Synthetic
uuggacggucccucucgagu

SEQ ID NO: 31824 - RNA, 20 nt, Artificial Sequence
  Synthetic
ccauuuguucagugguucgu

SEQ ID NO: 31825 - RNA, 20 nt, Artificial Sequence
  Synthetic
auuccuuggacucacaaggu

SEQ ID NO: 31826 - RNA, 20 nt, Artificial Sequence
  Synthetic
cugacgcaacccccacuggu

SEQ ID NO: 31827 - RNA, 20 nt, Artificial Sequence
  Synthetic
ucaacgaauaacuggucugu

SEQ ID NO: 31828 - RNA, 20 nt, Artificial Sequence
  Synthetic
cccguagcgcuucauuuugu

SEQ ID NO: 31829 - RNA, 20 nt, Artificial Sequence
  Synthetic
agaaaccguucuugaguauu

SEQ ID NO: 31830 - RNA, 20 nt, Artificial Sequence
  Synthetic
cgaccccucccggggccguu

SEQ ID NO: 31831 - RNA, 20 nt, Artificial Sequence
  Synthetic
ugacgcaacccccacugguu

SEQ ID NO: 31832 - RNA, 20 nt, Artificial Sequence
  Synthetic
cccuccacacggaggccuuu

SEQ ID NO: 31833 - RNA, 17 nt, Artificial Sequence
  Synthetic
ggacuucaaucccaaaa

SEQ ID NO: 31834 - RNA, 17 nt, Artificial Sequence
  Synthetic
gagggcuccaccccaaa

SEQ ID NO: 31835 - RNA, 17 nt, Artificial Sequence
  Synthetic
ggcgacagagccccaaa

SEQ ID NO: 31836 - RNA, 17 nt, Artificial Sequence
  Synthetic
  misc_feature (14)..(14): n is a, c, g, or u
gguaacagcgguanaaa

SEQ ID NO: 31837 - RNA, 17 nt, Artificial Sequence
  Synthetic
guauuguuuacagagaa

SEQ ID NO: 31838 - RNA, 17 nt, Artificial Sequence
  Synthetic
gccuagcagccauggaa

SEQ ID NO: 31839 - RNA, 17 nt, Artificial Sequence
  Synthetic
gaggauugcugguggaa

SEQ ID NO: 31840 - RNA, 17 nt, Artificial Sequence
  Synthetic
  misc_feature (11)..(11): n is a, c, g, or u
gccuagcaacnggguaa

SEQ ID NO: 31841 - RNA, 17 nt, Artificial Sequence
  Synthetic
ggacccugcaccgaaca

SEQ ID NO: 31842 - RNA, 17 nt, Artificial Sequence
  Synthetic
ggguucaccccuccaca

SEQ ID NO: 31843 - RNA, 17 nt, Artificial Sequence
  Synthetic
gugaagcgaagugcaca

SEQ ID NO: 31844 - RNA, 17 nt, Artificial Sequence
  Synthetic
gccguuccugccgacca

SEQ ID NO: 31845 - RNA, 17 nt, Artificial Sequence
  Synthetic
gcacagccuagcagcca

SEQ ID NO: 31846 - RNA, 17 nt, Artificial Sequence
  Synthetic
gaacaagaucuacagca

SEQ ID NO: 31847 - RNA, 17 nt, Artificial Sequence
  Synthetic
  misc_feature (15)..(15): n is a, c, g, or u
gaggugaaaaaguunca

SEQ ID NO: 31848 - RNA, 17 nt, Artificial Sequence
  Synthetic
guucuucuggacuauca

SEQ ID NO: 31849 - RNA, 17 nt, Artificial Sequence
  Synthetic
  misc_feature (2)..(2): n is a, c, g, or u
gnuggagaaauacuuca

SEQ ID NO: 31850 - RNA, 17 nt, Artificial Sequence
  Synthetic
gacgggaaaaagucaga

SEQ ID NO: 31851 - RNA, 17 nt, Artificial Sequence
  Synthetic
ggaacggcagacggaga

SEQ ID NO: 31852 - RNA, 17 nt, Artificial Sequence
  Synthetic
gcgaaagcccaagauga

SEQ ID NO: 31853 - RNA, 17 nt, Artificial Sequence
  Synthetic
gugugcccugagacuga

SEQ ID NO: 31854 - RNA, 17 nt, Artificial Sequence
  Synthetic
gcuggauucagcgcuga

SEQ ID NO: 31855 - RNA, 17 nt, Artificial Sequence
  Synthetic
gaaguguugauaggaua

SEQ ID NO: 31856 - RNA, 17 nt, Artificial Sequence
  Synthetic
gcuccaaauucuuuaua

SEQ ID NO: 31857 - RNA, 17 nt, Artificial Sequence
  Synthetic
guaggaguuggagccua

SEQ ID NO: 31858 - RNA, 17 nt, Artificial Sequence
  Synthetic
ggaaucagaggacaaac

SEQ ID NO: 31859 - RNA, 17 nt, Artificial Sequence
  Synthetic
ggccguugccuagcaac

SEQ ID NO: 31860 - RNA, 17 nt, Artificial Sequence
  Synthetic
guucacuaucccugaac

SEQ ID NO: 31861 - RNA, 17 nt, Artificial Sequence
  Synthetic
ggaaacucccuguuaac

SEQ ID NO: 31862 - RNA, 17 nt, Artificial Sequence
  Synthetic
gaagaucacgaacagac

SEQ ID NO: 31863 - RNA, 17 nt, Artificial Sequence
  Synthetic
gaugagaaggaacagac

SEQ ID NO: 31864 - RNA, 17 nt, Artificial Sequence
  Synthetic
guguggaggggugaacc

SEQ ID NO: 31865 - RNA, 17 nt, Artificial Sequence
  Synthetic
gagccccaaacggcccc

SEQ ID NO: 31866 - RNA, 17 nt, Artificial Sequence
  Synthetic
guugcuaggcaacggcc

SEQ ID NO: 31867 - RNA, 17 nt, Artificial Sequence
  Synthetic
  misc_feature (15)..(15): n is a, c, g, or u
gaaguauuucuccancc

SEQ ID NO: 31868 - RNA, 17 nt, Artificial Sequence
  Synthetic
ggagugcccgugugucc

SEQ ID NO: 31869 - RNA, 17 nt, Artificial Sequence
  Synthetic
guuuguccucugauucc

SEQ ID NO: 31870 - RNA, 17 nt, Artificial Sequence
  Synthetic
gaacuggagccaccagc

SEQ ID NO: 31871 - RNA, 17 nt, Artificial Sequence
  Synthetic
guauuugcucugaaugc

SEQ ID NO: 31872 - RNA, 17 nt, Artificial Sequence
  Synthetic
  misc_feature (10)..(10): n is a, c, g, or u
ggccuguaunuuccugc

SEQ ID NO: 31873 - RNA, 17 nt, Artificial Sequence
  Synthetic
gcaggaggcggaucugc

SEQ ID NO: 31874 - RNA, 17 nt, Artificial Sequence
  Synthetic
  misc_feature (11)..(11): n is a, c, g, or u
ggcaagcaauncugugc

SEQ ID NO: 31875 - RNA, 17 nt, Artificial Sequence
  Synthetic
gaauccuagaggauugc

SEQ ID NO: 31876 - RNA, 17 nt, Artificial Sequence
  Synthetic
gaaggaguuugccaauc

SEQ ID NO: 31877 - RNA, 17 nt, Artificial Sequence
  Synthetic
ggguccaacuggugauc

SEQ ID NO: 31878 - RNA, 17 nt, Artificial Sequence
  Synthetic
guggagcccucagucuc

SEQ ID NO: 31879 - RNA, 17 nt, Artificial Sequence
  Synthetic
guaaauaaugucugguc

SEQ ID NO: 31880 - RNA, 17 nt, Artificial Sequence
  Synthetic
gguauguaaauaauguc

SEQ ID NO: 31881 - RNA, 17 nt, Artificial Sequence
  Synthetic
ggcuuucccccacuguc

SEQ ID NO: 31882 - RNA, 17 nt, Artificial Sequence
  Synthetic
gcugguggcuccaguuc

SEQ ID NO: 31883 - RNA, 17 nt, Artificial Sequence
  Synthetic
ggccaagccccaaccag

SEQ ID NO: 31884 - RNA, 17 nt, Artificial Sequence
  Synthetic
gccuguaacacgagcag

SEQ ID NO: 31885 - RNA, 17 nt, Artificial Sequence
  Synthetic
gaggauccuggaaucag

SEQ ID NO: 31886 - RNA, 17 nt, Artificial Sequence
  Synthetic
ggagaccgcguaaagag

SEQ ID NO: 31887 - RNA, 17 nt, Artificial Sequence
  Synthetic
gggaguucuucuucgag

SEQ ID NO: 31888 - RNA, 17 nt, Artificial Sequence
  Synthetic
gauugacgagaugugag

SEQ ID NO: 31889 - RNA, 17 nt, Artificial Sequence
  Synthetic
ggaugacugucucuuag

SEQ ID NO: 31890 - RNA, 17 nt, Artificial Sequence
  Synthetic
  misc_feature (3)..(3): n is a, c, g, or u
ggncaucagcgcaugcg

SEQ ID NO: 31891 - RNA, 17 nt, Artificial Sequence
  Synthetic
gagggaguucuucuucg

SEQ ID NO: 31892 - RNA, 17 nt, Artificial Sequence
  Synthetic
gguggucuauaagcagg

SEQ ID NO: 31893 - RNA, 17 nt, Artificial Sequence
  Synthetic
  misc_feature (10)..(10): n is a, c, g, or u
gacucuagcnaccuggg

SEQ ID NO: 31894 - RNA, 17 nt, Artificial Sequence
  Synthetic
gcagggucccguacugg

SEQ ID NO: 31895 - RNA, 17 nt, Artificial Sequence
  Synthetic
gauuggugagugauugg

SEQ ID NO: 31896 - RNA, 17 nt, Artificial Sequence
  Synthetic
gauuuuguagagcuugg

SEQ ID NO: 31897 - RNA, 17 nt, Artificial Sequence
  Synthetic
gcuccuuuuacccaaug

SEQ ID NO: 31898 - RNA, 17 nt, Artificial Sequence
  Synthetic
gaaccaacaagaagaug

SEQ ID NO: 31899 - RNA, 17 nt, Artificial Sequence
  Synthetic
  misc_feature (17)..(17): n is a, c, g, or u
gccguugccuagcaacn

SEQ ID NO: 31900 - RNA, 17 nt, Artificial Sequence
  Synthetic
gguuggggcuuggccau

SEQ ID NO: 31901 - RNA, 17 nt, Artificial Sequence
  Synthetic
guuggaggacaggagau

SEQ ID NO: 31902 - RNA, 17 nt, Artificial Sequence
  Synthetic
ggaaguguugauaggau

SEQ ID NO: 31903 - RNA, 17 nt, Artificial Sequence
  Synthetic
gcccaagaugaugggau

SEQ ID NO: 31904 - RNA, 17 nt, Artificial Sequence
  Synthetic
ggagauuggugagugau

SEQ ID NO: 31905 - RNA, 17 nt, Artificial Sequence
  Synthetic
gugggucaccauauacu

SEQ ID NO: 31906 - RNA, 17 nt, Artificial Sequence
  Synthetic
  misc_feature (13)..(13): n is a, c, g, or u
gaugacucuagcnaccu

SEQ ID NO: 31907 - RNA, 17 nt, Artificial Sequence
  Synthetic
gccuccaagcugugccu

SEQ ID NO: 31908 - RNA, 17 nt, Artificial Sequence
  Synthetic
gagcaaaacaagcagcu

SEQ ID NO: 31909 - RNA, 17 nt, Artificial Sequence
  Synthetic
  misc_feature (10)..(10): n is a, c, g, or u
gcaagcaauncugugcu

SEQ ID NO: 31910 - RNA, 17 nt, Artificial Sequence
  Synthetic
gauauguaauuggaagu

SEQ ID NO: 31911 - RNA, 17 nt, Artificial Sequence
  Synthetic
gcugaaagccagacagu

SEQ ID NO: 31912 - RNA, 17 nt, Artificial Sequence
  Synthetic
gccaacaagguaggagu

SEQ ID NO: 31913 - RNA, 17 nt, Artificial Sequence
  Synthetic
gguggagagaugggagu

SEQ ID NO: 31914 - RNA, 17 nt, Artificial Sequence
  Synthetic
ggugagugauuggaggu

SEQ ID NO: 31915 - RNA, 17 nt, Artificial Sequence
  Synthetic
gaggugcgccccguggu

SEQ ID NO: 31916 - RNA, 17 nt, Artificial Sequence
  Synthetic
gucccaaucuggauugu

SEQ ID NO: 31917 - RNA, 17 nt, Artificial Sequence
  Synthetic
gacccuuauaaagaauu

SEQ ID NO: 31918 - RNA, 17 nt, Artificial Sequence
  Synthetic
gcugagugggaagaauu

SEQ ID NO: 31919 - RNA, 17 nt, Artificial Sequence
  Synthetic
ggcaggguaaccacauu

SEQ ID NO: 31920 - RNA, 17 nt, Artificial Sequence
  Synthetic
gauaggauaggggcauu

SEQ ID NO: 31921 - RNA, 17 nt, Artificial Sequence
  Synthetic
gugagugauuggagguu

SEQ ID NO: 31922 - RNA, 17 nt, Artificial Sequence
  Synthetic
gugauguucuccauguu

SEQ ID NO: 31923 - RNA, 17 nt, Artificial Sequence
  Synthetic
gugccuuggguggcuuu

SEQ ID NO: 31924 - RNA, 17 nt, Artificial Sequence
  Synthetic
gaguauuuggugucuuu

SEQ ID NO: 31925 - RNA, 17 nt, Artificial Sequence
  Synthetic
ggccaaggguccuuuuu

SEQ ID NO: 31926 - RNA, 20 nt, Artificial Sequence
  Synthetic
guaaacugagccaagagaaa

SEQ ID NO: 31927 - RNA, 20 nt, Artificial Sequence
  Synthetic
ggguaaccacauuggguaaa

SEQ ID NO: 31928 - RNA, 20 nt, Artificial Sequence
  Synthetic
gguuugauaccuuugucuaa

SEQ ID NO: 31929 - RNA, 20 nt, Artificial Sequence
  Synthetic
  misc_feature (14)..(14): n is a, c, g, or u
guugccuagcaacnggguaa

SEQ ID NO: 31930 - RNA, 20 nt, Artificial Sequence
  Synthetic
gaggugaagcgaagugcaca

SEQ ID NO: 31931 - RNA, 20 nt, Artificial Sequence
  Synthetic
gcagcacagccuagcagcca

SEQ ID NO: 31932 - RNA, 20 nt, Artificial Sequence
  Synthetic
ggaaauauacauccuuucca

SEQ ID NO: 31933 - RNA, 20 nt, Artificial Sequence
  Synthetic
  misc_feature (18)..(18): n is a, c, g, or u
gcagaggugaaaaaguunca

SEQ ID NO: 31934 - RNA, 20 nt, Artificial Sequence
  Synthetic
ggguggagcccucagucuca

SEQ ID NO: 31935 - RNA, 20 nt, Artificial Sequence
  Synthetic
ggcagaugagaaggaacaga

SEQ ID NO: 31936 - RNA, 20 nt, Artificial Sequence
  Synthetic
gguucuuuccccacucgaga

SEQ ID NO: 31937 - RNA, 20 nt, Artificial Sequence
  Synthetic
gcaggaacggcagacggaga

SEQ ID NO: 31938 - RNA, 20 nt, Artificial Sequence
  Synthetic
guuucucauuuacugugaga

SEQ ID NO: 31939 - RNA, 20 nt, Artificial Sequence
  Synthetic
gguccaacuggugaucggga

SEQ ID NO: 31940 - RNA, 20 nt, Artificial Sequence
  Synthetic
gaaagcccaagaugauggga

SEQ ID NO: 31941 - RNA, 20 nt, Artificial Sequence
  Synthetic
gguuuuguacagcaacauga

SEQ ID NO: 31942 - RNA, 20 nt, Artificial Sequence
  Synthetic
ggguuauuccuuaaauuuua

SEQ ID NO: 31943 - RNA, 20 nt, Artificial Sequence
  Synthetic
gaauuuaggccaggacacac

SEQ ID NO: 31944 - RNA, 20 nt, Artificial Sequence
  Synthetic
gcagaugagaaggaacagac

SEQ ID NO: 31945 - RNA, 20 nt, Artificial Sequence
  Synthetic
gccaggacaaguuggaggac

SEQ ID NO: 31946 - RNA, 20 nt, Artificial Sequence
  Synthetic
ggauccucgaccaccaguac

SEQ ID NO: 31947 - RNA, 20 nt, Artificial Sequence
  Synthetic
gcaaacacuuggcacagacc

SEQ ID NO: 31948 - RNA, 20 nt, Artificial Sequence
  Synthetic
ggaguuggagccuauggacc

SEQ ID NO: 31949 - RNA, 20 nt, Artificial Sequence
  Synthetic
gaguuggagccuauggaccc

SEQ ID NO: 31950 - RNA, 20 nt, Artificial Sequence
  Synthetic
gacagagccccaaacggccc

SEQ ID NO: 31951 - RNA, 20 nt, Artificial Sequence
  Synthetic
gggggagugcccgugugucc

SEQ ID NO: 31952 - RNA, 20 nt, Artificial Sequence
  Synthetic
gaauacuaacauugggaagc

SEQ ID NO: 31953 - RNA, 20 nt, Artificial Sequence
  Synthetic
gcauuugguggucuauaagc

SEQ ID NO: 31954 - RNA, 20 nt, Artificial Sequence
  Synthetic
gcauauaaaggcauuaaggc

SEQ ID NO: 31955 - RNA, 20 nt, Artificial Sequence
  Synthetic
gaguuugggaaaaaucuggc

SEQ ID NO: 31956 - RNA, 20 nt, Artificial Sequence
  Synthetic
gucuguuccuucucaucugc

SEQ ID NO: 31957 - RNA, 20 nt, Artificial Sequence
  Synthetic
gaggcaggaggcggaucugc

SEQ ID NO: 31958 - RNA, 20 nt, Artificial Sequence
  Synthetic
  misc_feature (12)..(12): n is a, c, g, or u
gugaaaaaguuncauggugc

SEQ ID NO: 31959 - RNA, 20 nt, Artificial Sequence
  Synthetic
gggguggagcccucagucuc

SEQ ID NO: 31960 - RNA, 20 nt, Artificial Sequence
  Synthetic
ggcauagcagcaggaugaag

SEQ ID NO: 31961 - RNA, 20 nt, Artificial Sequence
  Synthetic
gauggccaagccccaaccag

SEQ ID NO: 31962 - RNA, 20 nt, Artificial Sequence
  Synthetic
gucauccucaggccaugcag

SEQ ID NO: 31963 - RNA, 20 nt, Artificial Sequence
  Synthetic
gguuuccauguaacgugcag

SEQ ID NO: 31964 - RNA, 20 nt, Artificial Sequence
  Synthetic
gucgaggauccuggaaucag

SEQ ID NO: 31965 - RNA, 20 nt, Artificial Sequence
  Synthetic
gugaggcgaacaaugaucag

SEQ ID NO: 31966 - RNA, 20 nt, Artificial Sequence
  Synthetic
gacuucucucaauuuucuag

SEQ ID NO: 31967 - RNA, 20 nt, Artificial Sequence
  Synthetic
gcugccaacuggauccuucg

SEQ ID NO: 31968 - RNA, 20 nt, Artificial Sequence
  Synthetic
ggaacggcagacggagaagg

SEQ ID NO: 31969 - RNA, 20 nt, Artificial Sequence
  Synthetic
ggguucaccccuccacacgg

SEQ ID NO: 31970 - RNA, 20 nt, Artificial Sequence
  Synthetic
  misc_feature (13)..(13): n is a, c, g, or u
gaugacucuagcnaccuggg

SEQ ID NO: 31971 - RNA, 20 nt, Artificial Sequence
  Synthetic
  misc_feature (10)..(10): n is a, c, g, or u
ggccuguaunuuccugcugg

SEQ ID NO: 31972 - RNA, 20 nt, Artificial Sequence
  Synthetic
gaauccuagaggauugcugg

SEQ ID NO: 31973 - RNA, 20 nt, Artificial Sequence
  Synthetic
ggccaagccccaaccagugg

SEQ ID NO: 31974 - RNA, 20 nt, Artificial Sequence
  Synthetic
ggagauuggugagugauugg

SEQ ID NO: 31975 - RNA, 20 nt, Artificial Sequence
  Synthetic
gauaggauaggggcauuugg

SEQ ID NO: 31976 - RNA, 20 nt, Artificial Sequence
  Synthetic
gcugcuccuuuuacccaaug

SEQ ID NO: 31977 - RNA, 20 nt, Artificial Sequence
  Synthetic
ggaacaagaucuacagcaug

SEQ ID NO: 31978 - RNA, 20 nt, Artificial Sequence
  Synthetic
gaagaaccaacaagaagaug

SEQ ID NO: 31979 - RNA, 20 nt, Artificial Sequence
  Synthetic
guuagugugcccugagacug

SEQ ID NO: 31980 - RNA, 20 nt, Artificial Sequence
  Synthetic
gagccaagagaaacggacug

SEQ ID NO: 31981 - RNA, 20 nt, Artificial Sequence
  Synthetic
gcuaucgcuggaugugucug

SEQ ID NO: 31982 - RNA, 20 nt, Artificial Sequence
  Synthetic
gucaaucuucuccaggauug

SEQ ID NO: 31983 - RNA, 20 nt, Artificial Sequence
  Synthetic
ggauauguaauuggaaguug

SEQ ID NO: 31984 - RNA, 20 nt, Artificial Sequence
  Synthetic
ggacugaggcccacucccau

SEQ ID NO: 31985 - RNA, 20 nt, Artificial Sequence
  Synthetic
gggaacaagaucuacagcau

SEQ ID NO: 31986 - RNA, 20 nt, Artificial Sequence
  Synthetic
gguuauuccuuaaauuuuau

SEQ ID NO: 31987 - RNA, 20 nt, Artificial Sequence
  Synthetic
  misc_feature (16)..(16): n is a, c, g, or u
guugaugacucuagcnaccu

SEQ ID NO: 31988 - RNA, 20 nt, Artificial Sequence
  Synthetic
gggccucaguccguuucucu

SEQ ID NO: 31989 - RNA, 20 nt, Artificial Sequence
  Synthetic
gaggccaacaagguaggagu

SEQ ID NO: 31990 - RNA, 20 nt, Artificial Sequence
  Synthetic
ggacuguguuuuugcugagu

SEQ ID NO: 31991 - RNA, 20 nt, Artificial Sequence
  Synthetic
gagaugugagaggcaauagu

SEQ ID NO: 31992 - RNA, 20 nt, Artificial Sequence
  Synthetic
gaagucccaaucuggauugu

SEQ ID NO: 31993 - RNA, 20 nt, Artificial Sequence
  Synthetic
gcuaugccucaucuucuugu

SEQ ID NO: 31994 - RNA, 20 nt, Artificial Sequence
  Synthetic
  misc_feature (19)..(19): n is a, c, g, or u
guccucuuauauaacugcnu

SEQ ID NO: 31995 - RNA, 20 nt, Artificial Sequence
  Synthetic
guccaaggaauacuaacauu

SEQ ID NO: 31996 - RNA, 20 nt, Artificial Sequence
  Synthetic
ggucuggagcaaaacucauu

SEQ ID NO: 31997 - RNA, 20 nt, Artificial Sequence
  Synthetic
gacaugaacaagagaugauu

SEQ ID NO: 31998 - RNA, 20 nt, Artificial Sequence
  Synthetic
gggauauguaauuggaaguu

SEQ ID NO: 31999 - RNA, 20 nt, Artificial Sequence
  Synthetic
gguaaauauuuaguagaguu

SEQ ID NO: 32000 - RNA, 20 nt, Artificial Sequence
  Synthetic
gaugugauguucuccauguu

SEQ ID NO: 32001 - RNA, 20 nt, Artificial Sequence
  Synthetic
gcugugccuuggguggcuuu

SEQ ID NO: 32002 - RNA, 20 nt, Artificial Sequence
  Synthetic
guaaauauuuaguagaguuu

SEQ ID NO: 32003 - RNA, 17 nt, Artificial Sequence
  Synthetic
caaugucuaagccaaaa

SEQ ID NO: 32004 - RNA, 17 nt, Artificial Sequence
  Synthetic
acgaaccacugaacaaa

SEQ ID NO: 32005 - RNA, 17 nt, Artificial Sequence
  Synthetic
uggaaucagaggacaaa

SEQ ID NO: 32006 - RNA, 17 nt, Artificial Sequence
  Synthetic
aauacccgccuuccaaa

SEQ ID NO: 32007 - RNA, 17 nt, Artificial Sequence
  Synthetic
uaaugucuugaugcaaa

SEQ ID NO: 32008 - RNA, 17 nt, Artificial Sequence
  Synthetic
aacugagccaagagaaa

SEQ ID NO: 32009 - RNA, 17 nt, Artificial Sequence
  Synthetic
uaaccacauuggguaaa

SEQ ID NO: 32010 - RNA, 17 nt, Artificial Sequence
  Synthetic
cggcagaggagccacaa

SEQ ID NO: 32011 - RNA, 17 nt, Artificial Sequence
  Synthetic
uauuuaccauuagacaa

SEQ ID NO: 32012 - RNA, 17 nt, Artificial Sequence
  Synthetic
acagccuccuaauacaa

SEQ ID NO: 32013 - RNA, 17 nt, Artificial Sequence
  Synthetic
uguuggccucuggccaa

SEQ ID NO: 32014 - RNA, 17 nt, Artificial Sequence
  Synthetic
  misc_feature (5)..(5): n is a, c, g, or u
acccnguugcuaggcaa

SEQ ID NO: 32015 - RNA, 17 nt, Artificial Sequence
  Synthetic
caccaaauacucaagaa

SEQ ID NO: 32016 - RNA, 17 nt, Artificial Sequence
  Synthetic
auguauauuuccgagaa

SEQ ID NO: 32017 - RNA, 17 nt, Artificial Sequence
  Synthetic
  misc_feature (15)..(15): n is a, c, g, or u
ugguaacagcgguanaa

SEQ ID NO: 32018 - RNA, 17 nt, Artificial Sequence
  Synthetic
uguauacaugcauauaa

SEQ ID NO: 32019 - RNA, 17 nt, Artificial Sequence
  Synthetic
cuccaaauucuuuauaa

SEQ ID NO: 32020 - RNA, 17 nt, Artificial Sequence
  Synthetic
uugauaccuuugucuaa

SEQ ID NO: 32021 - RNA, 17 nt, Artificial Sequence
  Synthetic
uuggccagaggccaaca

SEQ ID NO: 32022 - RNA, 17 nt, Artificial Sequence
  Synthetic
caauuggccuguuaaca

SEQ ID NO: 32023 - RNA, 17 nt, Artificial Sequence
  Synthetic
auuuaggccaggacaca

SEQ ID NO: 32024 - RNA, 17 nt, Artificial Sequence
  Synthetic
uauuccuuggacucaca

SEQ ID NO: 32025 - RNA, 17 nt, Artificial Sequence
  Synthetic
ugcccuaaagccaccca

SEQ ID NO: 32026 - RNA, 17 nt, Artificial Sequence
  Synthetic
uuguuggccucuggcca

SEQ ID NO: 32027 - RNA, 17 nt, Artificial Sequence
  Synthetic
cccaccuugugagucca

SEQ ID NO: 32028 - RNA, 17 nt, Artificial Sequence
  Synthetic
aauauacauccuuucca

SEQ ID NO: 32029 - RNA, 17 nt, Artificial Sequence
  Synthetic
auaaaggcauuaaggca

SEQ ID NO: 32030 - RNA, 17 nt, Artificial Sequence
  Synthetic
uggguggcuuuagggca

SEQ ID NO: 32031 - RNA, 17 nt, Artificial Sequence
  Synthetic
ugcacgacuccugcuca

SEQ ID NO: 32032 - RNA, 17 nt, Artificial Sequence
  Synthetic
uggagcccucagucuca

SEQ ID NO: 32033 - RNA, 17 nt, Artificial Sequence
  Synthetic
acaaaaucccaaaguca

SEQ ID NO: 32034 - RNA, 17 nt, Artificial Sequence
  Synthetic
cugguggcuccaguuca

SEQ ID NO: 32035 - RNA, 17 nt, Artificial Sequence
  Synthetic
augaugagagguguuca

SEQ ID NO: 32036 - RNA, 17 nt, Artificial Sequence
  Synthetic
  misc_feature (1)..(1): n is a, c, g, or u
nuaacaaaacaaaaaga

SEQ ID NO: 32037 - RNA, 17 nt, Artificial Sequence
  Synthetic
uggauauuuggaaaaga

SEQ ID NO: 32038 - RNA, 17 nt, Artificial Sequence
  Synthetic
agaagaucacgaacaga

SEQ ID NO: 32039 - RNA, 17 nt, Artificial Sequence
  Synthetic
agaugagaaggaacaga

SEQ ID NO: 32040 - RNA, 17 nt, Artificial Sequence
  Synthetic
ucuuagugguggagaga

SEQ ID NO: 32041 - RNA, 17 nt, Artificial Sequence
  Synthetic
ucuuuccccacucgaga

SEQ ID NO: 32042 - RNA, 17 nt, Artificial Sequence
  Synthetic
cgguccggcagaugaga

SEQ ID NO: 32043 - RNA, 17 nt, Artificial Sequence
  Synthetic
ucucauuuacugugaga

SEQ ID NO: 32044 - RNA, 17 nt, Artificial Sequence
  Synthetic
  misc_feature (13)..(13): n is a, c, g, or u
caugcgcugaugnccga

SEQ ID NO: 32045 - RNA, 17 nt, Artificial Sequence
  Synthetic
uguacaaaaccuucgga

SEQ ID NO: 32046 - RNA, 17 nt, Artificial Sequence
  Synthetic
cccaaacggccccggga

SEQ ID NO: 32047 - RNA, 17 nt, Artificial Sequence
  Synthetic
ccaacuggugaucggga

SEQ ID NO: 32048 - RNA, 17 nt, Artificial Sequence
  Synthetic
agcccaagaugauggga

SEQ ID NO: 32049 - RNA, 17 nt, Artificial Sequence
  Synthetic
aaaggccuccgugugga

SEQ ID NO: 32050 - RNA, 17 nt, Artificial Sequence
  Synthetic
cauggggcuuucuugga

SEQ ID NO: 32051 - RNA, 17 nt, Artificial Sequence
  Synthetic
uuuacauacccuuugga

SEQ ID NO: 32052 - RNA, 17 nt, Artificial Sequence
  Synthetic
uuuguacagcaacauga

SEQ ID NO: 32053 - RNA, 17 nt, Artificial Sequence
  Synthetic
acauuuucuggauaaua

SEQ ID NO: 32054 - RNA, 17 nt, Artificial Sequence
  Synthetic
uuauguuaauacuaaua

SEQ ID NO: 32055 - RNA, 17 nt, Artificial Sequence
  Synthetic
aagccaaaaaggccaua

SEQ ID NO: 32056 - RNA, 17 nt, Artificial Sequence
  Synthetic
agaacaacuuugccaua

SEQ ID NO: 32057 - RNA, 17 nt, Artificial Sequence
  Synthetic
ucuuguucccaaguaua

SEQ ID NO: 32058 - RNA, 17 nt, Artificial Sequence
  Synthetic
augaucagaggacucua

SEQ ID NO: 32059 - RNA, 17 nt, Artificial Sequence
  Synthetic
cuucucucaauuuucua

SEQ ID NO: 32060 - RNA, 17 nt, Artificial Sequence
  Synthetic
cuugccugagugcugua

SEQ ID NO: 32061 - RNA, 17 nt, Artificial Sequence
  Synthetic
ugcauauaaaggcauua

SEQ ID NO: 32062 - RNA, 17 nt, Artificial Sequence
  Synthetic
aucuuuuuguuuuguua

SEQ ID NO: 32063 - RNA, 17 nt, Artificial Sequence
  Synthetic
auaucccauaaaauuua

SEQ ID NO: 32064 - RNA, 17 nt, Artificial Sequence
  Synthetic
caaggugggaaacuuua

SEQ ID NO: 32065 - RNA, 17 nt, Artificial Sequence
  Synthetic
ugccuuggguggcuuua

SEQ ID NO: 32066 - RNA, 17 nt, Artificial Sequence
  Synthetic
uuauuccuuaaauuuua

SEQ ID NO: 32067 - RNA, 17 nt, Artificial Sequence
  Synthetic
uuuguuaugucaacaac

SEQ ID NO: 32068 - RNA, 17 nt, Artificial Sequence
  Synthetic
uaggcugugcugccaac

SEQ ID NO: 32069 - RNA, 17 nt, Artificial Sequence
  Synthetic
ugaaugcuggguccaac

SEQ ID NO: 32070 - RNA, 17 nt, Artificial Sequence
  Synthetic
uuuaggccaggacacac

SEQ ID NO: 32071 - RNA, 17 nt, Artificial Sequence
  Synthetic
caaucaggauuaaagac

SEQ ID NO: 32072 - RNA, 17 nt, Artificial Sequence
  Synthetic
ucucccaaaaguaagac

SEQ ID NO: 32073 - RNA, 17 nt, Artificial Sequence
  Synthetic
aaacacuuggcacagac

SEQ ID NO: 32074 - RNA, 17 nt, Artificial Sequence
  Synthetic
ugaguuuugcuccagac

SEQ ID NO: 32075 - RNA, 17 nt, Artificial Sequence
  Synthetic
aggacaaguuggaggac

SEQ ID NO: 32076 - RNA, 17 nt, Artificial Sequence
  Synthetic
cuggauucagcgcugac

SEQ ID NO: 32077 - RNA, 17 nt, Artificial Sequence
  Synthetic
ugaugggaugggaauac

SEQ ID NO: 32078 - RNA, 17 nt, Artificial Sequence
  Synthetic
  misc_feature (13)..(13): n is a, c, g, or u
caccagcaggaanauac

SEQ ID NO: 32079 - RNA, 17 nt, Artificial Sequence
  Synthetic
acaaaaugaagcgcuac

SEQ ID NO: 32080 - RNA, 17 nt, Artificial Sequence
  Synthetic
ccgcuucagcuuuguac

SEQ ID NO: 32081 - RNA, 17 nt, Artificial Sequence
  Synthetic
aaggugggaaacuuuac

SEQ ID NO: 32082 - RNA, 17 nt, Artificial Sequence
  Synthetic
uuguuaugucaacaacc

SEQ ID NO: 32083 - RNA, 17 nt, Artificial Sequence
  Synthetic
aacacuuggcacagacc

SEQ ID NO: 32084 - RNA, 17 nt, Artificial Sequence
  Synthetic
  misc_feature (14)..(14): n is a, c, g, or u
ugaugacucuagcnacc

SEQ ID NO: 32085 - RNA, 17 nt, Artificial Sequence
  Synthetic
uguggaggggugaaccc

SEQ ID NO: 32086 - RNA, 17 nt, Artificial Sequence
  Synthetic
caaauuauuacccaccc

SEQ ID NO: 32087 - RNA, 17 nt, Artificial Sequence
  Synthetic
cacauccagcgauagcc

SEQ ID NO: 32088 - RNA, 17 nt, Artificial Sequence
  Synthetic
ugcaggguccccaaucc

SEQ ID NO: 32089 - RNA, 17 nt, Artificial Sequence
  Synthetic
cagcggacgaccccucc

SEQ ID NO: 32090 - RNA, 17 nt, Artificial Sequence
  Synthetic
aauuaggcaaugagucc

SEQ ID NO: 32091 - RNA, 17 nt, Artificial Sequence
  Synthetic
uguccuccaacuugucc

SEQ ID NO: 32092 - RNA, 17 nt, Artificial Sequence
  Synthetic
aggacucuaaggauucc

SEQ ID NO: 32093 - RNA, 17 nt, Artificial Sequence
  Synthetic
uacuaacauugggaagc

SEQ ID NO: 32094 - RNA, 17 nt, Artificial Sequence
  Synthetic
uuugguggucuauaagc

SEQ ID NO: 32095 - RNA, 17 nt, Artificial Sequence
  Synthetic
auguauacaagcuaagc

SEQ ID NO: 32096 - RNA, 17 nt, Artificial Sequence
  Synthetic
agaugaggcauagcagc

SEQ ID NO: 32097 - RNA, 17 nt, Artificial Sequence
  Synthetic
cuuguuuugcucgcagc

SEQ ID NO: 32098 - RNA, 17 nt, Artificial Sequence
  Synthetic
ccgccuguaacacgagc

SEQ ID NO: 32099 - RNA, 17 nt, Artificial Sequence
  Synthetic
auagaguugccuugagc

SEQ ID NO: 32100 - RNA, 17 nt, Artificial Sequence
  Synthetic
cauacccuuuggaaggc

SEQ ID NO: 32101 - RNA, 17 nt, Artificial Sequence
  Synthetic
uauaaaggcauuaaggc

SEQ ID NO: 32102 - RNA, 17 nt, Artificial Sequence
  Synthetic
cugcucguguuacaggc

SEQ ID NO: 32103 - RNA, 17 nt, Artificial Sequence
  Synthetic
uuguuagacgaagaggc

SEQ ID NO: 32104 - RNA, 17 nt, Artificial Sequence
  Synthetic
ugacgauugguggaggc

SEQ ID NO: 32105 - RNA, 17 nt, Artificial Sequence
  Synthetic
ugcgccccguggucggc

SEQ ID NO: 32106 - RNA, 17 nt, Artificial Sequence
  Synthetic
uuugggaaaaaucuggc

SEQ ID NO: 32107 - RNA, 17 nt, Artificial Sequence
  Synthetic
accaaaucucuggaugc

SEQ ID NO: 32108 - RNA, 17 nt, Artificial Sequence
  Synthetic
uguuccuucucaucugc

SEQ ID NO: 32109 - RNA, 17 nt, Artificial Sequence
  Synthetic
uugagcaggagucgugc

SEQ ID NO: 32110 - RNA, 17 nt, Artificial Sequence
  Synthetic
  misc_feature (9)..(9): n is a, c, g, or u
aaaaaguuncauggugc

SEQ ID NO: 32111 - RNA, 17 nt, Artificial Sequence
  Synthetic
agucgugcagguuuugc

SEQ ID NO: 32112 - RNA, 17 nt, Artificial Sequence
  Synthetic
agaguuugggaaaaauc

SEQ ID NO: 32113 - RNA, 17 nt, Artificial Sequence
  Synthetic
auauggguuuaaaaauc

SEQ ID NO: 32114 - RNA, 17 nt, Artificial Sequence
  Synthetic
auggagaacaucacauc

SEQ ID NO: 32115 - RNA, 17 nt, Artificial Sequence
  Synthetic
cucaccauacagcacuc

SEQ ID NO: 32116 - RNA, 17 nt, Artificial Sequence
  Synthetic
ccuaccuuguuggccuc

SEQ ID NO: 32117 - RNA, 17 nt, Artificial Sequence
  Synthetic
aagagacagucauccuc

SEQ ID NO: 32118 - RNA, 17 nt, Artificial Sequence
  Synthetic
auugaccaccaaaucuc

SEQ ID NO: 32119 - RNA, 17 nt, Artificial Sequence
  Synthetic
cuaacaacaguagucuc

SEQ ID NO: 32120 - RNA, 17 nt, Artificial Sequence
  Synthetic
uacaaaaucccaaaguc

SEQ ID NO: 32121 - RNA, 17 nt, Artificial Sequence
  Synthetic
uccaccaaucgucaguc

SEQ ID NO: 32122 - RNA, 17 nt, Artificial Sequence
  Synthetic
uauccuaucaacacuuc

SEQ ID NO: 32123 - RNA, 17 nt, Artificial Sequence
  Synthetic
cuucuuguugguucuuc

SEQ ID NO: 32124 - RNA, 17 nt, Artificial Sequence
  Synthetic
ugauuaacuacauuuuc

SEQ ID NO: 32125 - RNA, 17 nt, Artificial Sequence
  Synthetic
aacggcagacggagaag

SEQ ID NO: 32126 - RNA, 17 nt, Artificial Sequence
  Synthetic
acuguuguuagacgaag

SEQ ID NO: 32127 - RNA, 17 nt, Artificial Sequence
  Synthetic
auagcagcaggaugaag

SEQ ID NO: 32128 - RNA, 17 nt, Artificial Sequence
  Synthetic
ccgguacaaagcugaag

SEQ ID NO: 32129 - RNA, 17 nt, Artificial Sequence
  Synthetic
  misc_feature (4)..(4): n is a, c, g, or u
caangcaguuauauaag

SEQ ID NO: 32130 - RNA, 17 nt, Artificial Sequence
  Synthetic
aagaaaauugguaacag

SEQ ID NO: 32131 - RNA, 17 nt, Artificial Sequence
  Synthetic
agcugaaagccagacag

SEQ ID NO: 32132 - RNA, 17 nt, Artificial Sequence
  Synthetic
aaaggacccuuggccag

SEQ ID NO: 32133 - RNA, 17 nt, Artificial Sequence
  Synthetic
aagagaugauuaggcag

SEQ ID NO: 32134 - RNA, 17 nt, Artificial Sequence
  Synthetic
auccucaggccaugcag

SEQ ID NO: 32135 - RNA, 17 nt, Artificial Sequence
  Synthetic
caaaaucccaaagucag

SEQ ID NO: 32136 - RNA, 17 nt, Artificial Sequence
  Synthetic
uagugccauuuguucag

SEQ ID NO: 32137 - RNA, 17 nt, Artificial Sequence
  Synthetic
uucuuuccccacucgag

SEQ ID NO: 32138 - RNA, 17 nt, Artificial Sequence
  Synthetic
caaaauaccuaugggag

SEQ ID NO: 32139 - RNA, 17 nt, Artificial Sequence
  Synthetic
aaggccuccguguggag

SEQ ID NO: 32140 - RNA, 17 nt, Artificial Sequence
  Synthetic
  misc_feature (2)..(2): n is a, c, g, or u
cnuuggcagaugaugag

SEQ ID NO: 32141 - RNA, 17 nt, Artificial Sequence
  Synthetic
acuguguuuuugcugag

SEQ ID NO: 32142 - RNA, 17 nt, Artificial Sequence
  Synthetic
uucucauuuacugugag

SEQ ID NO: 32143 - RNA, 17 nt, Artificial Sequence
  Synthetic
aaguguugauaggauag

SEQ ID NO: 32144 - RNA, 17 nt, Artificial Sequence
  Synthetic
uucucucaauuuucuag

SEQ ID NO: 32145 - RNA, 17 nt, Artificial Sequence
  Synthetic
augagaaggaacagacg

SEQ ID NO: 32146 - RNA, 17 nt, Artificial Sequence
  Synthetic
aggugggaaacuuuacg

SEQ ID NO: 32147 - RNA, 17 nt, Artificial Sequence
  Synthetic
ugcucguguuacaggcg

SEQ ID NO: 32148 - RNA, 17 nt, Artificial Sequence
  Synthetic
uccuuggacucacaagg

SEQ ID NO: 32149 - RNA, 17 nt, Artificial Sequence
  Synthetic
acggcagacggagaagg

SEQ ID NO: 32150 - RNA, 17 nt, Artificial Sequence
  Synthetic
acauacccuuuggaagg

SEQ ID NO: 32151 - RNA, 17 nt, Artificial Sequence
  Synthetic
ccugcucguguuacagg

SEQ ID NO: 32152 - RNA, 17 nt, Artificial Sequence
  Synthetic
cgauugguggaggcagg

SEQ ID NO: 32153 - RNA, 17 nt, Artificial Sequence
  Synthetic
uugguggaggcaggagg

SEQ ID NO: 32154 - RNA, 17 nt, Artificial Sequence
  Synthetic
ucucucaauuuucuagg

SEQ ID NO: 32155 - RNA, 17 nt, Artificial Sequence
  Synthetic
augaccuuuguauuagg

SEQ ID NO: 32156 - RNA, 17 nt, Artificial Sequence
  Synthetic
ccccaaacggccccggg

SEQ ID NO: 32157 - RNA, 17 nt, Artificial Sequence
  Synthetic
acggaggccuuuugggg

SEQ ID NO: 32158 - RNA, 17 nt, Artificial Sequence
  Synthetic
ccaagcugugccuuggg

SEQ ID NO: 32159 - RNA, 17 nt, Artificial Sequence
  Synthetic
augagagguguucaugg

SEQ ID NO: 32160 - RNA, 17 nt, Artificial Sequence
  Synthetic
  misc_feature (7)..(7): n is a, c, g, or u
cuguaunuuccugcugg

SEQ ID NO: 32161 - RNA, 17 nt, Artificial Sequence
  Synthetic
uccuagaggauugcugg

SEQ ID NO: 32162 - RNA, 17 nt, Artificial Sequence
  Synthetic
ugaaagccagacagugg

SEQ ID NO: 32163 - RNA, 17 nt, Artificial Sequence
  Synthetic
caagccccaaccagugg

SEQ ID NO: 32164 - RNA, 17 nt, Artificial Sequence
  Synthetic
ugacugucucuuagugg

SEQ ID NO: 32165 - RNA, 17 nt, Artificial Sequence
  Synthetic
aaaaggccuccgugugg

SEQ ID NO: 32166 - RNA, 17 nt, Artificial Sequence
  Synthetic
  misc_feature (1)..(1): n is a, c, g, or u
ngaugaugugguauugg

SEQ ID NO: 32167 - RNA, 17 nt, Artificial Sequence
  Synthetic
cccaaggcacagcuugg

SEQ ID NO: 32168 - RNA, 17 nt, Artificial Sequence
  Synthetic
uagccaggacaaguugg

SEQ ID NO: 32169 - RNA, 17 nt, Artificial Sequence
  Synthetic
aggauaggggcauuugg

SEQ ID NO: 32170 - RNA, 17 nt, Artificial Sequence
  Synthetic
agcauccagagauuugg

SEQ ID NO: 32171 - RNA, 17 nt, Artificial Sequence
  Synthetic
uuuuguacagcaacaug

SEQ ID NO: 32172 - RNA, 17 nt, Artificial Sequence
  Synthetic
acaagaucuacagcaug

SEQ ID NO: 32173 - RNA, 17 nt, Artificial Sequence
  Synthetic
aacaaaacaaaaagaug

SEQ ID NO: 32174 - RNA, 17 nt, Artificial Sequence
  Synthetic
  misc_feature (10)..(10): n is a, c, g, or u
cagcuauaungaugaug

SEQ ID NO: 32175 - RNA, 17 nt, Artificial Sequence
  Synthetic
agugugcccugagacug

SEQ ID NO: 32176 - RNA, 17 nt, Artificial Sequence
  Synthetic
ccaagagaaacggacug

SEQ ID NO: 32177 - RNA, 17 nt, Artificial Sequence
  Synthetic
agaauuuggagcuacug

SEQ ID NO: 32178 - RNA, 17 nt, Artificial Sequence
  Synthetic
uuccacugcauggccug

SEQ ID NO: 32179 - RNA, 17 nt, Artificial Sequence
  Synthetic
  misc_feature (9)..(9): n is a, c, g, or u
caagcaauncugugcug

SEQ ID NO: 32180 - RNA, 17 nt, Artificial Sequence
  Synthetic
aucgcuggaugugucug

SEQ ID NO: 32181 - RNA, 17 nt, Artificial Sequence
  Synthetic
cugaaagccagacagug

SEQ ID NO: 32182 - RNA, 17 nt, Artificial Sequence
  Synthetic
ccaagccccaaccagug

SEQ ID NO: 32183 - RNA, 17 nt, Artificial Sequence
  Synthetic
acggucccucucgagug

SEQ ID NO: 32184 - RNA, 17 nt, Artificial Sequence
  Synthetic
uggugucuuuuggagug

SEQ ID NO: 32185 - RNA, 17 nt, Artificial Sequence
  Synthetic
cccaaaaggccuccgug

SEQ ID NO: 32186 - RNA, 17 nt, Artificial Sequence
  Synthetic
cugagugcuguauggug

SEQ ID NO: 32187 - RNA, 17 nt, Artificial Sequence
  Synthetic
aaucuucuccaggauug

SEQ ID NO: 32188 - RNA, 17 nt, Artificial Sequence
  Synthetic
aaaucaggcaacuauug

SEQ ID NO: 32189 - RNA, 17 nt, Artificial Sequence
  Synthetic
  misc_feature (2)..(2): n is a, c, g, or u
ungaugaugugguauug

SEQ ID NO: 32190 - RNA, 17 nt, Artificial Sequence
  Synthetic
ugugugauguguucuug

SEQ ID NO: 32191 - RNA, 17 nt, Artificial Sequence
  Synthetic
uauguaauuggaaguug

SEQ ID NO: 32192 - RNA, 17 nt, Artificial Sequence
  Synthetic
ugagugauuggagguug

SEQ ID NO: 32193 - RNA, 17 nt, Artificial Sequence
  Synthetic
uaaaugugaacaauuug

SEQ ID NO: 32194 - RNA, 17 nt, Artificial Sequence
  Synthetic
caugcguggaaccuuug

SEQ ID NO: 32195 - RNA, 17 nt, Artificial Sequence
  Synthetic
ccucccggggccguuug

SEQ ID NO: 32196 - RNA, 17 nt, Artificial Sequence
  Synthetic
cacacggaggccuuuug

SEQ ID NO: 32197 - RNA, 17 nt, Artificial Sequence
  Synthetic
  misc_feature (17)..(17): n is a, c, g, or u
uaugucaacaaccgggn

SEQ ID NO: 32198 - RNA, 17 nt, Artificial Sequence
  Synthetic
caaagacaaaagaaaau

SEQ ID NO: 32199 - RNA, 17 nt, Artificial Sequence
  Synthetic
aggcuguaggcauaaau

SEQ ID NO: 32200 - RNA, 17 nt, Artificial Sequence
  Synthetic
cagacuuuccaaucaau

SEQ ID NO: 32201 - RNA, 17 nt, Artificial Sequence
  Synthetic
uuuaugggauauguaau

SEQ ID NO: 32202 - RNA, 17 nt, Artificial Sequence
  Synthetic
ccaaggaauacuaacau

SEQ ID NO: 32203 - RNA, 17 nt, Artificial Sequence
  Synthetic
aggcaggguaaccacau

SEQ ID NO: 32204 - RNA, 17 nt, Artificial Sequence
  Synthetic
cugaggcccacucccau

SEQ ID NO: 32205 - RNA, 17 nt, Artificial Sequence
  Synthetic
aacaagaucuacagcau

SEQ ID NO: 32206 - RNA, 17 nt, Artificial Sequence
  Synthetic
ucuggagcaaaacucau

SEQ ID NO: 32207 - RNA, 17 nt, Artificial Sequence
  Synthetic
uaacaaaacaaaaagau

SEQ ID NO: 32208 - RNA, 17 nt, Artificial Sequence
  Synthetic
auaccaacaauccagau

SEQ ID NO: 32209 - RNA, 17 nt, Artificial Sequence
  Synthetic
cuuagugguggagagau

SEQ ID NO: 32210 - RNA, 17 nt, Artificial Sequence
  Synthetic
ucaaucuucuccaggau

SEQ ID NO: 32211 - RNA, 17 nt, Artificial Sequence
  Synthetic
cugucuuuaauccugau

SEQ ID NO: 32212 - RNA, 17 nt, Artificial Sequence
  Synthetic
uggguccaacuggugau

SEQ ID NO: 32213 - RNA, 17 nt, Artificial Sequence
  Synthetic
uuaacaggccaauugau

SEQ ID NO: 32214 - RNA, 17 nt, Artificial Sequence
  Synthetic
uauguuaauacuaauau

SEQ ID NO: 32215 - RNA, 17 nt, Artificial Sequence
  Synthetic
uuucgcaaaauaccuau

SEQ ID NO: 32216 - RNA, 17 nt, Artificial Sequence
  Synthetic
  misc_feature (4)..(4): n is a, c, g, or u
uaungaugaugugguau

SEQ ID NO: 32217 - RNA, 17 nt, Artificial Sequence
  Synthetic
uauuccuuaaauuuuau

SEQ ID NO: 32218 - RNA, 17 nt, Artificial Sequence
  Synthetic
aucccaaaaaggacccu

SEQ ID NO: 32219 - RNA, 17 nt, Artificial Sequence
  Synthetic
acacgagcagggguccu

SEQ ID NO: 32220 - RNA, 17 nt, Artificial Sequence
  Synthetic
aucacaucaggauuccu

SEQ ID NO: 32221 - RNA, 17 nt, Artificial Sequence
  Synthetic
ccaauguuaguauuccu

SEQ ID NO: 32222 - RNA, 17 nt, Artificial Sequence
  Synthetic
ccacccaaggcacagcu

SEQ ID NO: 32223 - RNA, 17 nt, Artificial Sequence
  Synthetic
ugggauuuuguagagcu

SEQ ID NO: 32224 - RNA, 17 nt, Artificial Sequence
  Synthetic
ccccacugguuggggcu

SEQ ID NO: 32225 - RNA, 17 nt, Artificial Sequence
  Synthetic
uauuugcucugaaugcu

SEQ ID NO: 32226 - RNA, 17 nt, Artificial Sequence
  Synthetic
uccuuuccauggcugcu

SEQ ID NO: 32227 - RNA, 17 nt, Artificial Sequence
  Synthetic
  misc_feature (11)..(11): n is a, c, g, or u
accuuuacccnguugcu

SEQ ID NO: 32228 - RNA, 17 nt, Artificial Sequence
  Synthetic
uucccaucccaucaucu

SEQ ID NO: 32229 - RNA, 17 nt, Artificial Sequence
  Synthetic
uuauauaagaggacucu

SEQ ID NO: 32230 - RNA, 17 nt, Artificial Sequence
  Synthetic
uccaccagcaauccucu

SEQ ID NO: 32231 - RNA, 17 nt, Artificial Sequence
  Synthetic
ccucaguccguuucucu

SEQ ID NO: 32232 - RNA, 17 nt, Artificial Sequence
  Synthetic
auucugucguccuuucu

SEQ ID NO: 32233 - RNA, 17 nt, Artificial Sequence
  Synthetic
acagcauggggcuuucu

SEQ ID NO: 32234 - RNA, 17 nt, Artificial Sequence
  Synthetic
acuucucucaauuuucu

SEQ ID NO: 32235 - RNA, 17 nt, Artificial Sequence
  Synthetic
cgauagccaggacaagu

SEQ ID NO: 32236 - RNA, 17 nt, Artificial Sequence
  Synthetic
agaaaggccuuauaagu

SEQ ID NO: 32237 - RNA, 17 nt, Artificial Sequence
  Synthetic
uuggaggcuugaacagu

SEQ ID NO: 32238 - RNA, 17 nt, Artificial Sequence
  Synthetic
ccuucccgaucaccagu

SEQ ID NO: 32239 - RNA, 17 nt, Artificial Sequence
  Synthetic
aaaauaccuaugggagu

SEQ ID NO: 32240 - RNA, 17 nt, Artificial Sequence
  Synthetic
cuguguuuuugcugagu

SEQ ID NO: 32241 - RNA, 17 nt, Artificial Sequence
  Synthetic
augugagaggcaauagu

SEQ ID NO: 32242 - RNA, 17 nt, Artificial Sequence
  Synthetic
uuuguucagugguucgu

SEQ ID NO: 32243 - RNA, 17 nt, Artificial Sequence
  Synthetic
ccagaggccaacaaggu

SEQ ID NO: 32244 - RNA, 17 nt, Artificial Sequence
  Synthetic
ccuuggacucacaaggu

SEQ ID NO: 32245 - RNA, 17 nt, Artificial Sequence
  Synthetic
  misc_feature (9)..(9): n is a, c, g, or u
acucuagcnaccugggu

SEQ ID NO: 32246 - RNA, 17 nt, Artificial Sequence
  Synthetic
uuguauuaggaggcugu

SEQ ID NO: 32247 - RNA, 17 nt, Artificial Sequence
  Synthetic
acgaauaacuggucugu

SEQ ID NO: 32248 - RNA, 17 nt, Artificial Sequence
  Synthetic
uccaacuccuaccuugu

SEQ ID NO: 32249 - RNA, 17 nt, Artificial Sequence
  Synthetic
augccucaucuucuugu

SEQ ID NO: 32250 - RNA, 17 nt, Artificial Sequence
  Synthetic
aaaugugaacaauuugu

SEQ ID NO: 32251 - RNA, 17 nt, Artificial Sequence
  Synthetic
  misc_feature (16)..(16): n is a, c, g, or u
cucuuauauaacugcnu

SEQ ID NO: 32252 - RNA, 17 nt, Artificial Sequence
  Synthetic
cuggguggguaauaauu

SEQ ID NO: 32253 - RNA, 17 nt, Artificial Sequence
  Synthetic
caaggaauacuaacauu

SEQ ID NO: 32254 - RNA, 17 nt, Artificial Sequence
  Synthetic
cuggagcaaaacucauu

SEQ ID NO: 32255 - RNA, 17 nt, Artificial Sequence
  Synthetic
aagauguuguacagauu

SEQ ID NO: 32256 - RNA, 17 nt, Artificial Sequence
  Synthetic
uaccaacaauccagauu

SEQ ID NO: 32257 - RNA, 17 nt, Artificial Sequence
  Synthetic
uccagcauccagagauu

SEQ ID NO: 32258 - RNA, 17 nt, Artificial Sequence
  Synthetic
caaucuucuccaggauu

SEQ ID NO: 32259 - RNA, 17 nt, Artificial Sequence
  Synthetic
augaacaagagaugauu

SEQ ID NO: 32260 - RNA, 17 nt, Artificial Sequence
  Synthetic
ugaugcaaauggauauu

SEQ ID NO: 32261 - RNA, 17 nt, Artificial Sequence
  Synthetic
  misc_feature (3)..(3): n is a, c, g, or u
aungaugaugugguauu

SEQ ID NO: 32262 - RNA, 17 nt, Artificial Sequence
  Synthetic
uuaaugaccuuuguauu

SEQ ID NO: 32263 - RNA, 17 nt, Artificial Sequence
  Synthetic
auacaggccccugacuu

SEQ ID NO: 32264 - RNA, 17 nt, Artificial Sequence
  Synthetic
uugcuguacaaaaccuu

SEQ ID NO: 32265 - RNA, 17 nt, Artificial Sequence
  Synthetic
auuauuuacauacccuu

SEQ ID NO: 32266 - RNA, 17 nt, Artificial Sequence
  Synthetic
ccuccaagcugugccuu

SEQ ID NO: 32267 - RNA, 17 nt, Artificial Sequence
  Synthetic
ucccaucccaucaucuu

SEQ ID NO: 32268 - RNA, 17 nt, Artificial Sequence
  Synthetic
caauuuucuuuugucuu

SEQ ID NO: 32269 - RNA, 17 nt, Artificial Sequence
  Synthetic
auauguaauuggaaguu

SEQ ID NO: 32270 - RNA, 17 nt, Artificial Sequence
  Synthetic
aaauauuuaguagaguu

SEQ ID NO: 32271 - RNA, 17 nt, Artificial Sequence
  Synthetic
ccccucccggggccguu

SEQ ID NO: 32272 - RNA, 17 nt, Artificial Sequence
  Synthetic
cgaauaacuggucuguu

SEQ ID NO: 32273 - RNA, 17 nt, Artificial Sequence
  Synthetic
uuggggacugcgaauuu

SEQ ID NO: 32274 - RNA, 17 nt, Artificial Sequence
  Synthetic
uacaggccccugacuuu

SEQ ID NO: 32275 - RNA, 17 nt, Artificial Sequence
  Synthetic
auuuccugucuuacuuu

SEQ ID NO: 32276 - RNA, 17 nt, Artificial Sequence
  Synthetic
aauuuucuuuugucuuu

SEQ ID NO: 32277 - RNA, 17 nt, Artificial Sequence
  Synthetic
aauauuuaguagaguuu

SEQ ID NO: 32278 - RNA, 17 nt, Artificial Sequence
  Synthetic
uuuccugucuuacuuuu

SEQ ID NO: 32279 - RNA, 17 nt, Artificial Sequence
  Synthetic
ccacacggaggccuuuu

SEQ ID NO: 32280 - RNA, 17 nt, Artificial Sequence
  Synthetic
uugccauauggccuuuu

SEQ ID NO: 32281 - RNA, 17 nt, Artificial Sequence
  Synthetic
uggccaaggguccuuuu

SEQ ID NO: 32282 - RNA, 17 nt, Artificial Sequence
  Synthetic
aaauuaagcaauguuuu

SEQ ID NO: 32283 - RNA, 20 nt, Artificial Sequence
  Synthetic
uugggacuucaaucccaaaa

SEQ ID NO: 32284 - RNA, 20 nt, Artificial Sequence
  Synthetic
uccuggaaucagaggacaaa

SEQ ID NO: 32285 - RNA, 20 nt, Artificial Sequence
  Synthetic
acugagggcuccaccccaaa

SEQ ID NO: 32286 - RNA, 20 nt, Artificial Sequence
  Synthetic
uuauaaugucuugaugcaaa

SEQ ID NO: 32287 - RNA, 20 nt, Artificial Sequence
  Synthetic
  misc_feature (17)..(17): n is a, c, g, or u
auugguaacagcgguanaaa

SEQ ID NO: 32288 - RNA, 20 nt, Artificial Sequence
  Synthetic
aaauauuuaccauuagacaa

SEQ ID NO: 32289 - RNA, 20 nt, Artificial Sequence
  Synthetic
ccuacagccuccuaauacaa

SEQ ID NO: 32290 - RNA, 20 nt, Artificial Sequence
  Synthetic
ccuuguuggccucuggccaa

SEQ ID NO: 32291 - RNA, 20 nt, Artificial Sequence
  Synthetic
  misc_feature (8)..(8): n is a, c, g, or u
uuuacccnguugcuaggcaa

SEQ ID NO: 32292 - RNA, 20 nt, Artificial Sequence
  Synthetic
agacaccaaauacucaagaa

SEQ ID NO: 32293 - RNA, 20 nt, Artificial Sequence
  Synthetic
cauguauuguuuacagagaa

SEQ ID NO: 32294 - RNA, 20 nt, Artificial Sequence
  Synthetic
caggaacggcagacggagaa

SEQ ID NO: 32295 - RNA, 20 nt, Artificial Sequence
  Synthetic
acagccuagcagccauggaa

SEQ ID NO: 32296 - RNA, 20 nt, Artificial Sequence
  Synthetic
uagcuccaaauucuuuauaa

SEQ ID NO: 32297 - RNA, 20 nt, Artificial Sequence
  Synthetic
cccuuggccagaggccaaca

SEQ ID NO: 32298 - RNA, 20 nt, Artificial Sequence
  Synthetic
uggggacccugcaccgaaca

SEQ ID NO: 32299 - RNA, 20 nt, Artificial Sequence
  Synthetic
aaucaauuggccuguuaaca

SEQ ID NO: 32300 - RNA, 20 nt, Artificial Sequence
  Synthetic
cgaauuuaggccaggacaca

SEQ ID NO: 32301 - RNA, 20 nt, Artificial Sequence
  Synthetic
cccggguucaccccuccaca

SEQ ID NO: 32302 - RNA, 20 nt, Artificial Sequence
  Synthetic
ucugccguuccugccgacca

SEQ ID NO: 32303 - RNA, 20 nt, Artificial Sequence
  Synthetic
ccaugcccuaaagccaccca

SEQ ID NO: 32304 - RNA, 20 nt, Artificial Sequence
  Synthetic
accuuguuggccucuggcca

SEQ ID NO: 32305 - RNA, 20 nt, Artificial Sequence
  Synthetic
uuucccaccuugugagucca

SEQ ID NO: 32306 - RNA, 20 nt, Artificial Sequence
  Synthetic
ugggaacaagaucuacagca

SEQ ID NO: 32307 - RNA, 20 nt, Artificial Sequence
  Synthetic
cauauaaaggcauuaaggca

SEQ ID NO: 32308 - RNA, 20 nt, Artificial Sequence
  Synthetic
ccuuggguggcuuuagggca

SEQ ID NO: 32309 - RNA, 20 nt, Artificial Sequence
  Synthetic
uugguucuucuggacuauca

SEQ ID NO: 32310 - RNA, 20 nt, Artificial Sequence
  Synthetic
accugcacgacuccugcuca

SEQ ID NO: 32311 - RNA, 20 nt, Artificial Sequence
  Synthetic
ucuacaaaaucccaaaguca

SEQ ID NO: 32312 - RNA, 20 nt, Artificial Sequence
  Synthetic
ccuccaccaaucgucaguca

SEQ ID NO: 32313 - RNA, 20 nt, Artificial Sequence
  Synthetic
  misc_feature (5)..(5): n is a, c, g, or u
cgggnuggagaaauacuuca

SEQ ID NO: 32314 - RNA, 20 nt, Artificial Sequence
  Synthetic
cugcugguggcuccaguuca

SEQ ID NO: 32315 - RNA, 20 nt, Artificial Sequence
  Synthetic
cagaugaugagagguguuca

SEQ ID NO: 32316 - RNA, 20 nt, Artificial Sequence
  Synthetic
  misc_feature (4)..(4): n is a, c, g, or u
accnuaacaaaacaaaaaga

SEQ ID NO: 32317 - RNA, 20 nt, Artificial Sequence
  Synthetic
aaauggauauuuggaaaaga

SEQ ID NO: 32318 - RNA, 20 nt, Artificial Sequence
  Synthetic
uggucggcaggaacggcaga

SEQ ID NO: 32319 - RNA, 20 nt, Artificial Sequence
  Synthetic
acacgguccggcagaugaga

SEQ ID NO: 32320 - RNA, 20 nt, Artificial Sequence
  Synthetic
  misc_feature (16)..(16): n is a, c, g, or u
acgcaugcgcugaugnccga

SEQ ID NO: 32321 - RNA, 20 nt, Artificial Sequence
  Synthetic
ugcuguacaaaaccuucgga

SEQ ID NO: 32322 - RNA, 20 nt, Artificial Sequence
  Synthetic
ccaaaaggccuccgugugga

SEQ ID NO: 32323 - RNA, 20 nt, Artificial Sequence
  Synthetic
uuauuuacauacccuuugga

SEQ ID NO: 32324 - RNA, 20 nt, Artificial Sequence
  Synthetic
uuagugugcccugagacuga

SEQ ID NO: 32325 - RNA, 20 nt, Artificial Sequence
  Synthetic
acuacauuuucuggauaaua

SEQ ID NO: 32326 - RNA, 20 nt, Artificial Sequence
  Synthetic
caauuauguuaauacuaaua

SEQ ID NO: 32327 - RNA, 20 nt, Artificial Sequence
  Synthetic
uacuuucucgccaacuuaua

SEQ ID NO: 32328 - RNA, 20 nt, Artificial Sequence
  Synthetic
aagguaggaguuggagccua

SEQ ID NO: 32329 - RNA, 20 nt, Artificial Sequence
  Synthetic
acccacaaaaugaagcgcua

SEQ ID NO: 32330 - RNA, 20 nt, Artificial Sequence
  Synthetic
acaaugaucagaggacucua

SEQ ID NO: 32331 - RNA, 20 nt, Artificial Sequence
  Synthetic
uugcuugccugagugcugua

SEQ ID NO: 32332 - RNA, 20 nt, Artificial Sequence
  Synthetic
acaugcauauaaaggcauua

SEQ ID NO: 32333 - RNA, 20 nt, Artificial Sequence
  Synthetic
cccaucuuuuuguuuuguua

SEQ ID NO: 32334 - RNA, 20 nt, Artificial Sequence
  Synthetic
uacauaucccauaaaauuua

SEQ ID NO: 32335 - RNA, 20 nt, Artificial Sequence
  Synthetic
ucacaaggugggaaacuuua

SEQ ID NO: 32336 - RNA, 20 nt, Artificial Sequence
  Synthetic
cugugccuuggguggcuuua

SEQ ID NO: 32337 - RNA, 20 nt, Artificial Sequence
  Synthetic
ccuggaaucagaggacaaac

SEQ ID NO: 32338 - RNA, 20 nt, Artificial Sequence
  Synthetic
cuguuuguuaugucaacaac

SEQ ID NO: 32339 - RNA, 20 nt, Artificial Sequence
  Synthetic
ugcuaggcugugcugccaac

SEQ ID NO: 32340 - RNA, 20 nt, Artificial Sequence
  Synthetic
cucugaaugcuggguccaac

SEQ ID NO: 32341 - RNA, 20 nt, Artificial Sequence
  Synthetic
ccgggccguugccuagcaac

SEQ ID NO: 32342 - RNA, 20 nt, Artificial Sequence
  Synthetic
ugagaggcaauagucggaac

SEQ ID NO: 32343 - RNA, 20 nt, Artificial Sequence
  Synthetic
aaagucugucaacgaauaac

SEQ ID NO: 32344 - RNA, 20 nt, Artificial Sequence
  Synthetic
caaucaauuggccuguuaac

SEQ ID NO: 32345 - RNA, 20 nt, Artificial Sequence
  Synthetic
cugccguuccugccgaccac

SEQ ID NO: 32346 - RNA, 20 nt, Artificial Sequence
  Synthetic
uucucucccaaaaguaagac

SEQ ID NO: 32347 - RNA, 20 nt, Artificial Sequence
  Synthetic
agaugaugggaugggaauac

SEQ ID NO: 32348 - RNA, 20 nt, Artificial Sequence
  Synthetic
  misc_feature (16)..(16): n is a, c, g, or u
agccaccagcaggaanauac

SEQ ID NO: 32349 - RNA, 20 nt, Artificial Sequence
  Synthetic
acaccgcuucagcuuuguac

SEQ ID NO: 32350 - RNA, 20 nt, Artificial Sequence
  Synthetic
cacaaggugggaaacuuuac

SEQ ID NO: 32351 - RNA, 20 nt, Artificial Sequence
  Synthetic
uguuuguuaugucaacaacc

SEQ ID NO: 32352 - RNA, 20 nt, Artificial Sequence
  Synthetic
uccguguggaggggugaacc

SEQ ID NO: 32353 - RNA, 20 nt, Artificial Sequence
  Synthetic
uaauacaaaggucauuaacc

SEQ ID NO: 32354 - RNA, 20 nt, Artificial Sequence
  Synthetic
  misc_feature (17)..(17): n is a, c, g, or u
aguugaugacucuagcnacc

SEQ ID NO: 32355 - RNA, 20 nt, Artificial Sequence
  Synthetic
ccguguggaggggugaaccc

SEQ ID NO: 32356 - RNA, 20 nt, Artificial Sequence
  Synthetic
uuccaaauuauuacccaccc

SEQ ID NO: 32357 - RNA, 20 nt, Artificial Sequence
  Synthetic
  misc_feature (3)..(3): n is a, c, g, or u
ccnguugcuaggcaacggcc

SEQ ID NO: 32358 - RNA, 20 nt, Artificial Sequence
  Synthetic
  misc_feature (18)..(18): n is a, c, g, or u
cuugaaguauuucuccancc

SEQ ID NO: 32359 - RNA, 20 nt, Artificial Sequence
  Synthetic
cggugcaggguccccaaucc

SEQ ID NO: 32360 - RNA, 20 nt, Artificial Sequence
  Synthetic
acaucucgucaaucuucucc

SEQ ID NO: 32361 - RNA, 20 nt, Artificial Sequence
  Synthetic
aagaauuaggcaaugagucc

SEQ ID NO: 32362 - RNA, 20 nt, Artificial Sequence
  Synthetic
uccuguccuccaacuugucc

SEQ ID NO: 32363 - RNA, 20 nt, Artificial Sequence
  Synthetic
cagaggacucuaaggauucc

SEQ ID NO: 32364 - RNA, 20 nt, Artificial Sequence
  Synthetic
cccguuuguccucugauucc

SEQ ID NO: 32365 - RNA, 20 nt, Artificial Sequence
  Synthetic
ccugaacuggagccaccagc

SEQ ID NO: 32366 - RNA, 20 nt, Artificial Sequence
  Synthetic
agaagaugaggcauagcagc

SEQ ID NO: 32367 - RNA, 20 nt, Artificial Sequence
  Synthetic
cugcuuguuuugcucgcagc

SEQ ID NO: 32368 - RNA, 20 nt, Artificial Sequence
  Synthetic
ccccgggaggggucguccgc

SEQ ID NO: 32369 - RNA, 20 nt, Artificial Sequence
  Synthetic
ccccugcucguguuacaggc

SEQ ID NO: 32370 - RNA, 20 nt, Artificial Sequence
  Synthetic
  misc_feature (13)..(13): n is a, c, g, or u
aggggccuguaunuuccugc

SEQ ID NO: 32371 - RNA, 20 nt, Artificial Sequence
  Synthetic
auguucuccauguucggugc

SEQ ID NO: 32372 - RNA, 20 nt, Artificial Sequence
  Synthetic
  misc_feature (14)..(14): n is a, c, g, or u
ucaggcaagcaauncugugc

SEQ ID NO: 32373 - RNA, 20 nt, Artificial Sequence
  Synthetic
aaggaauccuagaggauugc

SEQ ID NO: 32374 - RNA, 20 nt, Artificial Sequence
  Synthetic
aguagaguuugggaaaaauc

SEQ ID NO: 32375 - RNA, 20 nt, Artificial Sequence
  Synthetic
cuaauauggguuuaaaaauc

SEQ ID NO: 32376 - RNA, 20 nt, Artificial Sequence
  Synthetic
uugggauugaagucccaauc

SEQ ID NO: 32377 - RNA, 20 nt, Artificial Sequence
  Synthetic
aaagaaggaguuugccaauc

SEQ ID NO: 32378 - RNA, 20 nt, Artificial Sequence
  Synthetic
aacauggagaacaucacauc

SEQ ID NO: 32379 - RNA, 20 nt, Artificial Sequence
  Synthetic
cgccucaccauacagcacuc

SEQ ID NO: 32380 - RNA, 20 nt, Artificial Sequence
  Synthetic
acuccuaccuuguuggccuc

SEQ ID NO: 32381 - RNA, 20 nt, Artificial Sequence
  Synthetic
auaauugaccaccaaaucuc

SEQ ID NO: 32382 - RNA, 20 nt, Artificial Sequence
  Synthetic
cgucuaacaacaguagucuc

SEQ ID NO: 32383 - RNA, 20 nt, Artificial Sequence
  Synthetic
cucuacaaaaucccaaaguc

SEQ ID NO: 32384 - RNA, 20 nt, Artificial Sequence
  Synthetic
uguuuugcucgcagccgguc

SEQ ID NO: 32385 - RNA, 20 nt, Artificial Sequence
  Synthetic
uauguaaauaaugucugguc

SEQ ID NO: 32386 - RNA, 20 nt, Artificial Sequence
  Synthetic
aaggguauguaaauaauguc

SEQ ID NO: 32387 - RNA, 20 nt, Artificial Sequence
  Synthetic
uagggcuuucccccacuguc

SEQ ID NO: 32388 - RNA, 20 nt, Artificial Sequence
  Synthetic
cccuauccuaucaacacuuc

SEQ ID NO: 32389 - RNA, 20 nt, Artificial Sequence
  Synthetic
caucuucuuguugguucuuc

SEQ ID NO: 32390 - RNA, 20 nt, Artificial Sequence
  Synthetic
ccugcugguggcuccaguuc

SEQ ID NO: 32391 - RNA, 20 nt, Artificial Sequence
  Synthetic
uaaugauuaacuacauuuuc

SEQ ID NO: 32392 - RNA, 20 nt, Artificial Sequence
  Synthetic
aggaacggcagacggagaag

SEQ ID NO: 32393 - RNA, 20 nt, Artificial Sequence
  Synthetic
uucccgguacaaagcugaag

SEQ ID NO: 32394 - RNA, 20 nt, Artificial Sequence
  Synthetic
  misc_feature (7)..(7): n is a, c, g, or u
ugccaangcaguuauauaag

SEQ ID NO: 32395 - RNA, 20 nt, Artificial Sequence
  Synthetic
caaaagaaaauugguaacag

SEQ ID NO: 32396 - RNA, 20 nt, Artificial Sequence
  Synthetic
uauagcugaaagccagacag

SEQ ID NO: 32397 - RNA, 20 nt, Artificial Sequence
  Synthetic
caaaaaggacccuuggccag

SEQ ID NO: 32398 - RNA, 20 nt, Artificial Sequence
  Synthetic
cccgccuguaacacgagcag

SEQ ID NO: 32399 - RNA, 20 nt, Artificial Sequence
  Synthetic
aacaagagaugauuaggcag

SEQ ID NO: 32400 - RNA, 20 nt, Artificial Sequence
  Synthetic
cuacaaaaucccaaagucag

SEQ ID NO: 32401 - RNA, 20 nt, Artificial Sequence
  Synthetic
uacuagugccauuuguucag

SEQ ID NO: 32402 - RNA, 20 nt, Artificial Sequence
  Synthetic
cggggagaccgcguaaagag

SEQ ID NO: 32403 - RNA, 20 nt, Artificial Sequence
  Synthetic
agguucuuuccccacucgag

SEQ ID NO: 32404 - RNA, 20 nt, Artificial Sequence
  Synthetic
caaaaggccuccguguggag

SEQ ID NO: 32405 - RNA, 20 nt, Artificial Sequence
  Synthetic
  misc_feature (5)..(5): n is a, c, g, or u
cugcnuuggcagaugaugag

SEQ ID NO: 32406 - RNA, 20 nt, Artificial Sequence
  Synthetic
aggacuguguuuuugcugag

SEQ ID NO: 32407 - RNA, 20 nt, Artificial Sequence
  Synthetic
cguuucucauuuacugugag

SEQ ID NO: 32408 - RNA, 20 nt, Artificial Sequence
  Synthetic
cggaaguguugauaggauag

SEQ ID NO: 32409 - RNA, 20 nt, Artificial Sequence
  Synthetic
ugaucgggaaggaauccuag

SEQ ID NO: 32410 - RNA, 20 nt, Artificial Sequence
  Synthetic
ugaggaugacugucucuuag

SEQ ID NO: 32411 - RNA, 20 nt, Artificial Sequence
  Synthetic
cagaugagaaggaacagacg

SEQ ID NO: 32412 - RNA, 20 nt, Artificial Sequence
  Synthetic
cccugcucguguuacaggcg

SEQ ID NO: 32413 - RNA, 20 nt, Artificial Sequence
  Synthetic
uauuccuuggacucacaagg

SEQ ID NO: 32414 - RNA, 20 nt, Artificial Sequence
  Synthetic
uuuacauacccuuuggaagg

SEQ ID NO: 32415 - RNA, 20 nt, Artificial Sequence
  Synthetic
uuugguggucuauaagcagg

SEQ ID NO: 32416 - RNA, 20 nt, Artificial Sequence
  Synthetic
ugacgauugguggaggcagg

SEQ ID NO: 32417 - RNA, 20 nt, Artificial Sequence
  Synthetic
cgauugguggaggcaggagg

SEQ ID NO: 32418 - RNA, 20 nt, Artificial Sequence
  Synthetic
uuaaugaccuuuguauuagg

SEQ ID NO: 32419 - RNA, 20 nt, Artificial Sequence
  Synthetic
cacacggaggccuuuugggg

SEQ ID NO: 32420 - RNA, 20 nt, Artificial Sequence
  Synthetic
ccuccaagcugugccuuggg

SEQ ID NO: 32421 - RNA, 20 nt, Artificial Sequence
  Synthetic
augaugagagguguucaugg

SEQ ID NO: 32422 - RNA, 20 nt, Artificial Sequence
  Synthetic
agcugaaagccagacagugg

SEQ ID NO: 32423 - RNA, 20 nt, Artificial Sequence
  Synthetic
cccaaaaggccuccgugugg

SEQ ID NO: 32424 - RNA, 20 nt, Artificial Sequence
  Synthetic
  misc_feature (4)..(4): n is a, c, g, or u
uaungaugaugugguauugg

SEQ ID NO: 32425 - RNA, 20 nt, Artificial Sequence
  Synthetic
ccacccaaggcacagcuugg

SEQ ID NO: 32426 - RNA, 20 nt, Artificial Sequence
  Synthetic
ugggauuuuguagagcuugg

SEQ ID NO: 32427 - RNA, 20 nt, Artificial Sequence
  Synthetic
agguuuuguacagcaacaug

SEQ ID NO: 32428 - RNA, 20 nt, Artificial Sequence
  Synthetic
  misc_feature (2)..(2): n is a, c, g, or u
cnuaacaaaacaaaaagaug

SEQ ID NO: 32429 - RNA, 20 nt, Artificial Sequence
  Synthetic
  misc_feature (13)..(13): n is a, c, g, or u
uuucagcuauaungaugaug

SEQ ID NO: 32430 - RNA, 20 nt, Artificial Sequence
  Synthetic
uaaagaauuuggagcuacug

SEQ ID NO: 32431 - RNA, 20 nt, Artificial Sequence
  Synthetic
  misc_feature (12)..(12): n is a, c, g, or u
aggcaagcaauncugugcug

SEQ ID NO: 32432 - RNA, 20 nt, Artificial Sequence
  Synthetic
uagcugaaagccagacagug

SEQ ID NO: 32433 - RNA, 20 nt, Artificial Sequence
  Synthetic
uggccaagccccaaccagug

SEQ ID NO: 32434 - RNA, 20 nt, Artificial Sequence
  Synthetic
auuuggugucuuuuggagug

SEQ ID NO: 32435 - RNA, 20 nt, Artificial Sequence
  Synthetic
caccccaaaaggccuccgug

SEQ ID NO: 32436 - RNA, 20 nt, Artificial Sequence
  Synthetic
uaaaaaucaggcaacuauug

SEQ ID NO: 32437 - RNA, 20 nt, Artificial Sequence
  Synthetic
  misc_feature (5)..(5): n is a, c, g, or u
auaungaugaugugguauug

SEQ ID NO: 32438 - RNA, 20 nt, Artificial Sequence
  Synthetic
  misc_feature (3)..(3): n is a, c, g, or u
uunugugugauguguucuug

SEQ ID NO: 32439 - RNA, 20 nt, Artificial Sequence
  Synthetic
uggugagugauuggagguug

SEQ ID NO: 32440 - RNA, 20 nt, Artificial Sequence
  Synthetic
aacuaaaugugaacaauuug

SEQ ID NO: 32441 - RNA, 20 nt, Artificial Sequence
  Synthetic
cuccacacggaggccuuuug

SEQ ID NO: 32442 - RNA, 20 nt, Artificial Sequence
  Synthetic
  misc_feature (20)..(20): n is a, c, g, or u
cgggccguugccuagcaacn

SEQ ID NO: 32443 - RNA, 20 nt, Artificial Sequence
  Synthetic
  misc_feature (20)..(20): n is a, c, g, or u
uguuaugucaacaaccgggn

SEQ ID NO: 32444 - RNA, 20 nt, Artificial Sequence
  Synthetic
acccaaagacaaaagaaaau

SEQ ID NO: 32445 - RNA, 20 nt, Artificial Sequence
  Synthetic
ugacagacuuuccaaucaau

SEQ ID NO: 32446 - RNA, 20 nt, Artificial Sequence
  Synthetic
aauuuuaugggauauguaau

SEQ ID NO: 32447 - RNA, 20 nt, Artificial Sequence
  Synthetic
aguccaaggaauacuaacau

SEQ ID NO: 32448 - RNA, 20 nt, Artificial Sequence
  Synthetic
acugguuggggcuuggccau

SEQ ID NO: 32449 - RNA, 20 nt, Artificial Sequence
  Synthetic
  misc_feature (3)..(3): n is a, c, g, or u
ccnuaacaaaacaaaaagau

SEQ ID NO: 32450 - RNA, 20 nt, Artificial Sequence
  Synthetic
ucucuuagugguggagagau

SEQ ID NO: 32451 - RNA, 20 nt, Artificial Sequence
  Synthetic
caaguuggaggacaggagau

SEQ ID NO: 32452 - RNA, 20 nt, Artificial Sequence
  Synthetic
cugccucccugacugacgau

SEQ ID NO: 32453 - RNA, 20 nt, Artificial Sequence
  Synthetic
ucgucaaucuucuccaggau

SEQ ID NO: 32454 - RNA, 20 nt, Artificial Sequence
  Synthetic
aaagcccaagaugaugggau

SEQ ID NO: 32455 - RNA, 20 nt, Artificial Sequence
  Synthetic
acaggagauuggugagugau

SEQ ID NO: 32456 - RNA, 20 nt, Artificial Sequence
  Synthetic
cuguuaacaggccaauugau

SEQ ID NO: 32457 - RNA, 20 nt, Artificial Sequence
  Synthetic
aauuauguuaauacuaauau

SEQ ID NO: 32458 - RNA, 20 nt, Artificial Sequence
  Synthetic
  misc_feature (7)..(7): n is a, c, g, or u
cuauaungaugaugugguau

SEQ ID NO: 32459 - RNA, 20 nt, Artificial Sequence
  Synthetic
ucaaucccaaaaaggacccu

SEQ ID NO: 32460 - RNA, 20 nt, Artificial Sequence
  Synthetic
caagccuccaagcugugccu

SEQ ID NO: 32461 - RNA, 20 nt, Artificial Sequence
  Synthetic
aacaucacaucaggauuccu

SEQ ID NO: 32462 - RNA, 20 nt, Artificial Sequence
  Synthetic
uucccaauguuaguauuccu

SEQ ID NO: 32463 - RNA, 20 nt, Artificial Sequence
  Synthetic
aagccacccaaggcacagcu

SEQ ID NO: 32464 - RNA, 20 nt, Artificial Sequence
  Synthetic
ugcgagcaaaacaagcagcu

SEQ ID NO: 32465 - RNA, 20 nt, Artificial Sequence
  Synthetic
cuuugggauuuuguagagcu

SEQ ID NO: 32466 - RNA, 20 nt, Artificial Sequence
  Synthetic
ugguauuugcucugaaugcu

SEQ ID NO: 32467 - RNA, 20 nt, Artificial Sequence
  Synthetic
acauccuuuccauggcugcu

SEQ ID NO: 32468 - RNA, 20 nt, Artificial Sequence
  Synthetic
  misc_feature (13)..(13): n is a, c, g, or u
caggcaagcaauncugugcu

SEQ ID NO: 32469 - RNA, 20 nt, Artificial Sequence
  Synthetic
  misc_feature (14)..(14): n is a, c, g, or u
ugaaccuuuacccnguugcu

SEQ ID NO: 32470 - RNA, 20 nt, Artificial Sequence
  Synthetic
caguuauauaagaggacucu

SEQ ID NO: 32471 - RNA, 20 nt, Artificial Sequence
  Synthetic
cuuuccaccagcaauccucu

SEQ ID NO: 32472 - RNA, 20 nt, Artificial Sequence
  Synthetic
acaauucugucguccuuucu

SEQ ID NO: 32473 - RNA, 20 nt, Artificial Sequence
  Synthetic
ucuacagcauggggcuuucu

SEQ ID NO: 32474 - RNA, 20 nt, Artificial Sequence
  Synthetic
uggacuucucucaauuuucu

SEQ ID NO: 32475 - RNA, 20 nt, Artificial Sequence
  Synthetic
cagcgauagccaggacaagu

SEQ ID NO: 32476 - RNA, 20 nt, Artificial Sequence
  Synthetic
ugggauauguaauuggaagu

SEQ ID NO: 32477 - RNA, 20 nt, Artificial Sequence
  Synthetic
cagagaaaggccuuauaagu

SEQ ID NO: 32478 - RNA, 20 nt, Artificial Sequence
  Synthetic
agcuuggaggcuugaacagu

SEQ ID NO: 32479 - RNA, 20 nt, Artificial Sequence
  Synthetic
auggccaagccccaaccagu

SEQ ID NO: 32480 - RNA, 20 nt, Artificial Sequence
  Synthetic
auuccuucccgaucaccagu

SEQ ID NO: 32481 - RNA, 20 nt, Artificial Sequence
  Synthetic
agugguggagagaugggagu

SEQ ID NO: 32482 - RNA, 20 nt, Artificial Sequence
  Synthetic
cgcaaaauaccuaugggagu

SEQ ID NO: 32483 - RNA, 20 nt, Artificial Sequence
  Synthetic
uggccagaggccaacaaggu

SEQ ID NO: 32484 - RNA, 20 nt, Artificial Sequence
  Synthetic
auuggugagugauuggaggu

SEQ ID NO: 32485 - RNA, 20 nt, Artificial Sequence
  Synthetic
  misc_feature (12)..(12): n is a, c, g, or u
augacucuagcnaccugggu

SEQ ID NO: 32486 - RNA, 20 nt, Artificial Sequence
  Synthetic
agagaggugcgccccguggu

SEQ ID NO: 32487 - RNA, 20 nt, Artificial Sequence
  Synthetic
ccuuuguauuaggaggcugu

SEQ ID NO: 32488 - RNA, 20 nt, Artificial Sequence
  Synthetic
acuaaaugugaacaauuugu

SEQ ID NO: 32489 - RNA, 20 nt, Artificial Sequence
  Synthetic
auugacccuuauaaagaauu

SEQ ID NO: 32490 - RNA, 20 nt, Artificial Sequence
  Synthetic
uuugcugagugggaagaauu

SEQ ID NO: 32491 - RNA, 20 nt, Artificial Sequence
  Synthetic
  misc_feature (1)..(1): n is a, c, g, or u
naccuggguggguaauaauu

SEQ ID NO: 32492 - RNA, 20 nt, Artificial Sequence
  Synthetic
uaaggcaggguaaccacauu

SEQ ID NO: 32493 - RNA, 20 nt, Artificial Sequence
  Synthetic
cucaagauguuguacagauu

SEQ ID NO: 32494 - RNA, 20 nt, Artificial Sequence
  Synthetic
aaauaccaacaauccagauu

SEQ ID NO: 32495 - RNA, 20 nt, Artificial Sequence
  Synthetic
agauccagcauccagagauu

SEQ ID NO: 32496 - RNA, 20 nt, Artificial Sequence
  Synthetic
cgucaaucuucuccaggauu

SEQ ID NO: 32497 - RNA, 20 nt, Artificial Sequence
  Synthetic
ucuugaugcaaauggauauu

SEQ ID NO: 32498 - RNA, 20 nt, Artificial Sequence
  Synthetic
  misc_feature (6)..(6): n is a, c, g, or u
uauaungaugaugugguauu

SEQ ID NO: 32499 - RNA, 20 nt, Artificial Sequence
  Synthetic
agguuaaugaccuuuguauu

SEQ ID NO: 32500 - RNA, 20 nt, Artificial Sequence
  Synthetic
  misc_feature (3)..(3): n is a, c, g, or u
aanauacaggccccugacuu

SEQ ID NO: 32501 - RNA, 20 nt, Artificial Sequence
  Synthetic
uugugggucaccauauacuu

SEQ ID NO: 32502 - RNA, 20 nt, Artificial Sequence
  Synthetic
auguugcuguacaaaaccuu

SEQ ID NO: 32503 - RNA, 20 nt, Artificial Sequence
  Synthetic
aagccuccaagcugugccuu

SEQ ID NO: 32504 - RNA, 20 nt, Artificial Sequence
  Synthetic
uauucccaucccaucaucuu

SEQ ID NO: 32505 - RNA, 20 nt, Artificial Sequence
  Synthetic
uaccaauuuucuuuugucuu

SEQ ID NO: 32506 - RNA, 20 nt, Artificial Sequence
  Synthetic
uuggugagugauuggagguu

SEQ ID NO: 32507 - RNA, 20 nt, Artificial Sequence
  Synthetic
caacgaauaacuggucuguu

SEQ ID NO: 32508 - RNA, 20 nt, Artificial Sequence
  Synthetic
agguuggggacugcgaauuu

SEQ ID NO: 32509 - RNA, 20 nt, Artificial Sequence
  Synthetic
  misc_feature (2)..(2): n is a, c, g, or u
anauacaggccccugacuuu

SEQ ID NO: 32510 - RNA, 20 nt, Artificial Sequence
  Synthetic
cacauuuccugucuuacuuu

SEQ ID NO: 32511 - RNA, 20 nt, Artificial Sequence
  Synthetic
cuugaguauuuggugucuuu

SEQ ID NO: 32512 - RNA, 20 nt, Artificial Sequence
  Synthetic
accaauuuucuuuugucuuu

SEQ ID NO: 32513 - RNA, 20 nt, Artificial Sequence
  Synthetic
acauuuccugucuuacuuuu

SEQ ID NO: 32514 - RNA, 20 nt, Artificial Sequence
  Synthetic
ccuccacacggaggccuuuu

SEQ ID NO: 32515 - RNA, 20 nt, Artificial Sequence
  Synthetic
acuuugccauauggccuuuu

SEQ ID NO: 32516 - RNA, 20 nt, Artificial Sequence
  Synthetic
cucuggccaaggguccuuuu

SEQ ID NO: 32517 - RNA, 20 nt, Artificial Sequence
  Synthetic
  misc_feature (2)..(2): n is a, c, g, or u
anaaaauuaagcaauguuuu

SEQ ID NO: 32518 - RNA, 20 nt, Artificial Sequence
  Synthetic
ucuggccaaggguccuuuuu

SEQ ID NO: 32519 - RNA, 21 nt, Artificial Sequence
  Synthetic
gaccgggccguugccuagcaa

SEQ ID NO: 32520 - RNA, 20 nt, Artificial Sequence
  Synthetic
guuauaaugucuugaugcaa

SEQ ID NO: 32521 - RNA, 18 nt, Artificial Sequence
  Synthetic
gagaggcaauagucggaa

SEQ ID NO: 32522 - RNA, 20 nt, Artificial Sequence
  Synthetic
gugagaggcaauagucggaa

SEQ ID NO: 32523 - RNA, 23 nt, Artificial Sequence
  Synthetic
gaugugagaggcaauagucggaa

SEQ ID NO: 32524 - RNA, 22 nt, Artificial Sequence
  Synthetic
gcauuaaggcaggguaaccaca

SEQ ID NO: 32525 - RNA, 23 nt, Artificial Sequence
  Synthetic
ggcauuaaggcaggguaaccaca

SEQ ID NO: 32526 - RNA, 22 nt, Artificial Sequence
  Synthetic
guacagcaacaugagggauaca

SEQ ID NO: 32527 - RNA, 19 nt, Artificial Sequence
  Synthetic
gacagaauugucaguccca

SEQ ID NO: 32528 - RNA, 22 nt, Artificial Sequence
  Synthetic
gacgacagaauugucaguccca

SEQ ID NO: 32529 - RNA, 23 nt, Artificial Sequence
  Synthetic
ggacgacagaauugucaguccca

SEQ ID NO: 32530 - RNA, 21 nt, Artificial Sequence
  Synthetic
guuucccaccuugugagucca

SEQ ID NO: 32531 - RNA, 22 nt, Artificial Sequence
  Synthetic
gcaaauggauauuuggaaaaga

SEQ ID NO: 32532 - RNA, 22 nt, Artificial Sequence
  Synthetic
guauauuuccgagaaaggacga

SEQ ID NO: 32533 - RNA, 20 nt, Artificial Sequence
  Synthetic
gaucuucgucugcgaggcga

SEQ ID NO: 32534 - RNA, 22 nt, Artificial Sequence
  Synthetic
gagaucuucgucugcgaggcga

SEQ ID NO: 32535 - RNA, 19 nt, Artificial Sequence
  Synthetic
guccaacuggugaucggga

SEQ ID NO: 32536 - RNA, 20 nt, Artificial Sequence
  Synthetic
gguccaacuggugaucggga

SEQ ID NO: 32537 - RNA, 21 nt, Artificial Sequence
  Synthetic
ggguccaacuggugaucggga

SEQ ID NO: 32538 - RNA, 24 nt, Artificial Sequence
  Synthetic
gcuggguccaacuggugaucggga

SEQ ID NO: 32539 - RNA, 21 nt, Artificial Sequence
  Synthetic
gcacagccuagcagccaugga

SEQ ID NO: 32540 - RNA, 24 nt, Artificial Sequence
  Synthetic
gcagcacagccuagcagccaugga

SEQ ID NO: 32541 - RNA, 24 nt, Artificial Sequence
  Synthetic
guauuuugcgaaagcccaagauga

SEQ ID NO: 32542 - RNA, 20 nt, Artificial Sequence
  Synthetic
guagucuccggaaguguuga

SEQ ID NO: 32543 - RNA, 18 nt, Artificial Sequence
  Synthetic
ggauguuucucucuuaua

SEQ ID NO: 32544 - RNA, 19 nt, Artificial Sequence
  Synthetic
gggauguuucucucuuaua

SEQ ID NO: 32545 - RNA, 24 nt, Artificial Sequence
  Synthetic
gcuacgggauguuucucucuuaua

SEQ ID NO: 32546 - RNA, 21 nt, Artificial Sequence
  Synthetic
ggugaucgggaaggaauccua

SEQ ID NO: 32547 - RNA, 21 nt, Artificial Sequence
  Synthetic
gacccacaaaaugaagcgcua

SEQ ID NO: 32548 - RNA, 23 nt, Artificial Sequence
  Synthetic
gugacccacaaaaugaagcgcua

SEQ ID NO: 32549 - RNA, 24 nt, Artificial Sequence
  Synthetic
ggugacccacaaaaugaagcgcua

SEQ ID NO: 32550 - RNA, 22 nt, Artificial Sequence
  Synthetic
gccuccguguggaggggugaac

SEQ ID NO: 32551 - RNA, 23 nt, Artificial Sequence
  Synthetic
ggccuccguguggaggggugaac

SEQ ID NO: 32552 - RNA, 21 nt, Artificial Sequence
  Synthetic
gaaaauugagagaaguccacc

SEQ ID NO: 32553 - RNA, 20 nt, Artificial Sequence
  Synthetic
guacugguggucgaggaucc

SEQ ID NO: 32554 - RNA, 20 nt, Artificial Sequence
  Synthetic
guugacauaacaaacagucc

SEQ ID NO: 32555 - RNA, 23 nt, Artificial Sequence
  Synthetic
guuguugacauaacaaacagucc

SEQ ID NO: 32556 - RNA, 24 nt, Artificial Sequence
  Synthetic
gguuguugacauaacaaacagucc

SEQ ID NO: 32557 - RNA, 22 nt, Artificial Sequence
  Synthetic
gauacauagaguugccuugagc

SEQ ID NO: 32558 - RNA, 23 nt, Artificial Sequence
  Synthetic
ggauacauagaguugccuugagc

SEQ ID NO: 32559 - RNA, 24 nt, Artificial Sequence
  Synthetic
gggauacauagaguugccuugagc

SEQ ID NO: 32560 - RNA, 18 nt, Artificial Sequence
  Synthetic
ggucccguacuggugguc

SEQ ID NO: 32561 - RNA, 19 nt, Artificial Sequence
  Synthetic
gggucccguacuggugguc

SEQ ID NO: 32562 - RNA, 22 nt, Artificial Sequence
  Synthetic
gcagggucccguacuggugguc

SEQ ID NO: 32563 - RNA, 22 nt, Artificial Sequence
  Synthetic
gaggcauagcagcaggaugaag

SEQ ID NO: 32564 - RNA, 21 nt, Artificial Sequence
  Synthetic
gacgauugguggaggcaggag

SEQ ID NO: 32565 - RNA, 21 nt, Artificial Sequence
  Synthetic
gauuaaagacagguauaguag

SEQ ID NO: 32566 - RNA, 22 nt, Artificial Sequence
  Synthetic
ggauuaaagacagguauaguag

SEQ ID NO: 32567 - RNA, 21 nt, Artificial Sequence
  Synthetic
ggccccgggaggggucguccg

SEQ ID NO: 32568 - RNA, 21 nt, Artificial Sequence
  Synthetic
guaaacaaaggacgucccgcg

SEQ ID NO: 32569 - RNA, 24 nt, Artificial Sequence
  Synthetic
gacguaaacaaaggacgucccgcg

SEQ ID NO: 32570 - RNA, 23 nt, Artificial Sequence
  Synthetic
gcauuugguggucuauaagcagg

SEQ ID NO: 32571 - RNA, 24 nt, Artificial Sequence
  Synthetic
ggcauuugguggucuauaagcagg

SEQ ID NO: 32572 - RNA, 18 nt, Artificial Sequence
  Synthetic
gccccaaacggccccggg

SEQ ID NO: 32573 - RNA, 20 nt, Artificial Sequence
  Synthetic
gagccccaaacggccccggg

SEQ ID NO: 32574 - RNA, 24 nt, Artificial Sequence
  Synthetic
gacagagccccaaacggccccggg

SEQ ID NO: 32575 - RNA, 24 nt, Artificial Sequence
  Synthetic
gauuguugguauuugcucugaaug

SEQ ID NO: 32576 - RNA, 22 nt, Artificial Sequence
  Synthetic
gaagguuuuguacagcaacaug

SEQ ID NO: 32577 - RNA, 20 nt, Artificial Sequence
  Synthetic
gaccaccaaaucucuggaug

SEQ ID NO: 32578 - RNA, 20 nt, Artificial Sequence
  Synthetic
gauguucuccauguucggug

SEQ ID NO: 32579 - RNA, 22 nt, Artificial Sequence
  Synthetic
gugauguucuccauguucggug

SEQ ID NO: 32580 - RNA, 24 nt, Artificial Sequence
  Synthetic
gacaaguuggaggacaggagauug

SEQ ID NO: 32581 - RNA, 21 nt, Artificial Sequence
  Synthetic
gcaggagucgugcagguuuug

SEQ ID NO: 32582 - RNA, 23 nt, Artificial Sequence
  Synthetic
gagcaggagucgugcagguuuug

SEQ ID NO: 32583 - RNA, 21 nt, Artificial Sequence
  Synthetic
gaaaagaaggaguuugccaau

SEQ ID NO: 32584 - RNA, 22 nt, Artificial Sequence
  Synthetic
ggaaaagaaggaguuugccaau

SEQ ID NO: 32585 - RNA, 21 nt, Artificial Sequence
  Synthetic
gucucuuagugguggagagau

SEQ ID NO: 32586 - RNA, 21 nt, Artificial Sequence
  Synthetic
gaaagcccaagaugaugggau

SEQ ID NO: 32587 - RNA, 23 nt, Artificial Sequence
  Synthetic
gcgaaagcccaagaugaugggau

SEQ ID NO: 32588 - RNA, 22 nt, Artificial Sequence
  Synthetic
gagugauuggagguuggggacu

SEQ ID NO: 32589 - RNA, 24 nt, Artificial Sequence
  Synthetic
gugagugauuggagguuggggacu

SEQ ID NO: 32590 - RNA, 20 nt, Artificial Sequence
  Synthetic
guaacacgagcagggguccu

SEQ ID NO: 32591 - RNA, 24 nt, Artificial Sequence
  Synthetic
gccuguaacacgagcagggguccu

SEQ ID NO: 32592 - RNA, 22 nt, Artificial Sequence
  Synthetic
gcugcgagcaaaacaagcagcu

SEQ ID NO: 32593 - RNA, 23 nt, Artificial Sequence
  Synthetic
ggcugcgagcaaaacaagcagcu

SEQ ID NO: 32594 - RNA, 21 nt, Artificial Sequence
  Synthetic
gaacaaugaucagaggacucu

SEQ ID NO: 32595 - RNA, 23 nt, Artificial Sequence
  Synthetic
gcgaacaaugaucagaggacucu

SEQ ID NO: 32596 - RNA, 24 nt, Artificial Sequence
  Synthetic
ggcgaacaaugaucagaggacucu

SEQ ID NO: 32597 - RNA, 21 nt, Artificial Sequence
  Synthetic
gauggccaagccccaaccagu

SEQ ID NO: 32598 - RNA, 20 nt, Artificial Sequence
  Synthetic
gcagcuaggaguuccgcagu

SEQ ID NO: 32599 - RNA, 19 nt, Artificial Sequence
  Synthetic
gucuauaagcaggaggagu

SEQ ID NO: 32600 - RNA, 20 nt, Artificial Sequence
  Synthetic
ggucuauaagcaggaggagu

SEQ ID NO: 32601 - RNA, 22 nt, Artificial Sequence
  Synthetic
guggucuauaagcaggaggagu

SEQ ID NO: 32602 - RNA, 23 nt, Artificial Sequence
  Synthetic
gguggucuauaagcaggaggagu

SEQ ID NO: 32603 - RNA, 21 nt, Artificial Sequence
  Synthetic
gucuagacucugcgguauugu

SEQ ID NO: 32604 - RNA, 23 nt, Artificial Sequence
  Synthetic
gagucuagacucugcgguauugu

SEQ ID NO: 32605 - RNA, 21 nt, Artificial Sequence
  Synthetic
  misc_feature (4)..(4): n is a, c, g, or u
gaanauacaggccccugacuu

SEQ ID NO: 32606 - RNA, 22 nt, Artificial Sequence
  Synthetic
  misc_feature (5)..(5): n is a, c, g, or u
ggaanauacaggccccugacuu

SEQ ID NO: 32607 - RNA, 22 nt, Artificial Sequence
  Synthetic
gccccguaaaguuucccaccuu

SEQ ID NO: 32608 - RNA, 23 nt, Artificial Sequence
  Synthetic
gaaguaaugauuaacuacauuuu

SEQ ID NO: 32609 - RNA, 24 nt, Artificial Sequence
  Synthetic
ggaaguaaugauuaacuacauuuu

SEQ ID NO: 32610 - RNA, 22 nt, Artificial Sequence
  Synthetic
gccucuggccaaggguccuuuu

SEQ ID NO: 32611 - RNA, 23 nt, Artificial Sequence
  Synthetic
ggccucuggccaaggguccuuuu

SEQ ID NO: 32612 - RNA, 21 nt, Artificial Sequence
  Synthetic
gcugcuaggcugugcugccaa

SEQ ID NO: 32613 - RNA, 22 nt, Artificial Sequence
  Synthetic
ggcugcuaggcugugcugccaa

SEQ ID NO: 32614 - RNA, 22 nt, Artificial Sequence
  Synthetic
gcugagugggaagaauuaggca

SEQ ID NO: 32615 - RNA, 24 nt, Artificial Sequence
  Synthetic
gccaauugauuggaaagucuguca

SEQ ID NO: 32616 - RNA, 21 nt, Artificial Sequence
  Synthetic
gcuuagacauugacccuuaua

SEQ ID NO: 32617 - RNA, 22 nt, Artificial Sequence
  Synthetic
ggcuuagacauugacccuuaua

SEQ ID NO: 32618 - RNA, 21 nt, Artificial Sequence
  Synthetic
gggguuauuccuuaaauuuua

SEQ ID NO: 32619 - RNA, 24 nt, Artificial Sequence
  Synthetic
gaugggguuauuccuuaaauuuua

SEQ ID NO: 32620 - RNA, 18 nt, Artificial Sequence
  Synthetic
gaguuggagccuauggac

SEQ ID NO: 32621 - RNA, 19 nt, Artificial Sequence
  Synthetic
ggaguuggagccuauggac

SEQ ID NO: 32622 - RNA, 22 nt, Artificial Sequence
  Synthetic
guaggaguuggagccuauggac

SEQ ID NO: 32623 - RNA, 23 nt, Artificial Sequence
  Synthetic
gguaggaguuggagccuauggac

SEQ ID NO: 32624 - RNA, 18 nt, Artificial Sequence
  Synthetic
gggguuuuucuuguugac

SEQ ID NO: 32625 - RNA, 20 nt, Artificial Sequence
  Synthetic
gcgggguuuuucuuguugac

SEQ ID NO: 32626 - RNA, 21 nt, Artificial Sequence
  Synthetic
ggcgggguuuuucuuguugac

SEQ ID NO: 32627 - RNA, 22 nt, Artificial Sequence
  Synthetic
  misc_feature (20)..(20): n is a, c, g, or u
gugaguugaugacucuagcnac

SEQ ID NO: 32628 - RNA, 23 nt, Artificial Sequence
  Synthetic
  misc_feature (21)..(21): n is a, c, g, or u
ggugaguugaugacucuagcnac

SEQ ID NO: 32629 - RNA, 24 nt, Artificial Sequence
  Synthetic
  misc_feature (22)..(22): n is a, c, g, or u
gggugaguugaugacucuagcnac

SEQ ID NO: 32630 - RNA, 22 nt, Artificial Sequence
  Synthetic
gacaccgcuucagcuuuguacc

SEQ ID NO: 32631 - RNA, 22 nt, Artificial Sequence
  Synthetic
guucaagccuccaagcugugcc

SEQ ID NO: 32632 - RNA, 22 nt, Artificial Sequence
  Synthetic
gugccuuggguggcuuuagggc

SEQ ID NO: 32633 - RNA, 24 nt, Artificial Sequence
  Synthetic
  misc_feature (18)..(18): n is a, c, g, or u
gcacucaggcaagcaauncugugc

SEQ ID NO: 32634 - RNA, 19 nt, Artificial Sequence
  Synthetic
gccaaaucuguacaacauc

SEQ ID NO: 32635 - RNA, 20 nt, Artificial Sequence
  Synthetic
ggccaaaucuguacaacauc

SEQ ID NO: 32636 - RNA, 21 nt, Artificial Sequence
  Synthetic
gggccaaaucuguacaacauc

SEQ ID NO: 32637 - RNA, 22 nt, Artificial Sequence
  Synthetic
ggggccaaaucuguacaacauc

SEQ ID NO: 32638 - RNA, 23 nt, Artificial Sequence
  Synthetic
gggggccaaaucuguacaacauc

SEQ ID NO: 32639 - RNA, 20 nt, Artificial Sequence
  Synthetic
gcuuucuuggacggucccuc

SEQ ID NO: 32640 - RNA, 21 nt, Artificial Sequence
  Synthetic
ggcuuucuuggacggucccuc

SEQ ID NO: 32641 - RNA, 22 nt, Artificial Sequence
  Synthetic
gggcuuucuuggacggucccuc

SEQ ID NO: 32642 - RNA, 23 nt, Artificial Sequence
  Synthetic
ggggcuuucuuggacggucccuc

SEQ ID NO: 32643 - RNA, 23 nt, Artificial Sequence
  Synthetic
gaaccuuuccaccagcaauccuc

SEQ ID NO: 32644 - RNA, 20 nt, Artificial Sequence
  Synthetic
gcccguuuguccucugauuc

SEQ ID NO: 32645 - RNA, 23 nt, Artificial Sequence
  Synthetic
guugcccguuuguccucugauuc

SEQ ID NO: 32646 - RNA, 22 nt, Artificial Sequence
  Synthetic
gacaagaauccucacaauaccg

SEQ ID NO: 32647 - RNA, 18 nt, Artificial Sequence
  Synthetic
guuuacgucccgucagcg

SEQ ID NO: 32648 - RNA, 21 nt, Artificial Sequence
  Synthetic
gaccccugcucguguuacagg

SEQ ID NO: 32649 - RNA, 22 nt, Artificial Sequence
  Synthetic
ggaccccugcucguguuacagg

SEQ ID NO: 32650 - RNA, 21 nt, Artificial Sequence
  Synthetic
gacuucucucaauuuucuagg

SEQ ID NO: 32651 - RNA, 22 nt, Artificial Sequence
  Synthetic
ggacuucucucaauuuucuagg

SEQ ID NO: 32652 - RNA, 24 nt, Artificial Sequence
  Synthetic
guggacuucucucaauuuucuagg

SEQ ID NO: 32653 - RNA, 21 nt, Artificial Sequence
  Synthetic
  misc_feature (11)..(11): n is a, c, g, or u
ggcaagcaauncugugcuggg

SEQ ID NO: 32654 - RNA, 22 nt, Artificial Sequence
  Synthetic
gacuguguuuuugcugaguggg

SEQ ID NO: 32655 - RNA, 23 nt, Artificial Sequence
  Synthetic
ggacuguguuuuugcugaguggg

SEQ ID NO: 32656 - RNA, 22 nt, Artificial Sequence
  Synthetic
  misc_feature (16)..(16): n is a, c, g, or u
guugaugacucuagcnaccugg

SEQ ID NO: 32657 - RNA, 24 nt, Artificial Sequence
  Synthetic
  misc_feature (18)..(18): n is a, c, g, or u
gaguugaugacucuagcnaccugg

SEQ ID NO: 32658 - RNA, 24 nt, Artificial Sequence
  Synthetic
gucugucaacgaauaacuggucug

SEQ ID NO: 32659 - RNA, 21 nt, Artificial Sequence
  Synthetic
gucaauuauguuaauacuaau

SEQ ID NO: 32660 - RNA, 22 nt, Artificial Sequence
  Synthetic
ggucaauuauguuaauacuaau

SEQ ID NO: 32661 - RNA, 24 nt, Artificial Sequence
  Synthetic
guggucaauuauguuaauacuaau

SEQ ID NO: 32662 - RNA, 19 nt, Artificial Sequence
  Synthetic
gcuuucgcaaaauaccuau

SEQ ID NO: 32663 - RNA, 20 nt, Artificial Sequence
  Synthetic
ggcuuucgcaaaauaccuau

SEQ ID NO: 32664 - RNA, 21 nt, Artificial Sequence
  Synthetic
gggcuuucgcaaaauaccuau

SEQ ID NO: 32665 - RNA, 19 nt, Artificial Sequence
  Synthetic
gcuuuguaccgggaauccu

SEQ ID NO: 32666 - RNA, 21 nt, Artificial Sequence
  Synthetic
guuaccaauuuucuuuugucu

SEQ ID NO: 32667 - RNA, 24 nt, Artificial Sequence
  Synthetic
gcuguuaccaauuuucuuuugucu

SEQ ID NO: 32668 - RNA, 21 nt, Artificial Sequence
  Synthetic
guauuuggugucuuuuggagu

SEQ ID NO: 32669 - RNA, 23 nt, Artificial Sequence
  Synthetic
gaguauuuggugucuuuuggagu

SEQ ID NO: 32670 - RNA, 23 nt, Artificial Sequence
  Synthetic
guucuugaguauuuggugucuuu

SEQ ID NO: 32671 - RNA, 18 nt, Artificial Sequence
  Synthetic
cgggccguugccuagcaa

SEQ ID NO: 32672 - RNA, 19 nt, Artificial Sequence
  Synthetic
ccgggccguugccuagcaa

SEQ ID NO: 32673 - RNA, 20 nt, Artificial Sequence
  Synthetic
accgggccguugccuagcaa

SEQ ID NO: 32674 - RNA, 22 nt, Artificial Sequence
  Synthetic
agaccgggccguugccuagcaa

SEQ ID NO: 32675 - RNA, 23 nt, Artificial Sequence
  Synthetic
cagaccgggccguugccuagcaa

SEQ ID NO: 32676 - RNA, 24 nt, Artificial Sequence
  Synthetic
acagaccgggccguugccuagcaa

SEQ ID NO: 32677 - RNA, 18 nt, Artificial Sequence
  Synthetic
uauaaugucuugaugcaa

SEQ ID NO: 32678 - RNA, 19 nt, Artificial Sequence
  Synthetic
uuauaaugucuugaugcaa

SEQ ID NO: 32679 - RNA, 21 nt, Artificial Sequence
  Synthetic
aguuauaaugucuugaugcaa

SEQ ID NO: 32680 - RNA, 22 nt, Artificial Sequence
  Synthetic
uaguuauaaugucuugaugcaa

SEQ ID NO: 32681 - RNA, 23 nt, Artificial Sequence
  Synthetic
uuaguuauaaugucuugaugcaa

SEQ ID NO: 32682 - RNA, 24 nt, Artificial Sequence
  Synthetic
uuuaguuauaaugucuugaugcaa

SEQ ID NO: 32683 - RNA, 19 nt, Artificial Sequence
  Synthetic
ugagaggcaauagucggaa

SEQ ID NO: 32684 - RNA, 21 nt, Artificial Sequence
  Synthetic
ugugagaggcaauagucggaa

SEQ ID NO: 32685 - RNA, 22 nt, Artificial Sequence
  Synthetic
augugagaggcaauagucggaa

SEQ ID NO: 32686 - RNA, 24 nt, Artificial Sequence
  Synthetic
agaugugagaggcaauagucggaa

SEQ ID NO: 32687 - RNA, 21 nt, Artificial Sequence
  Synthetic
caaucaauuggccuguuaaca

SEQ ID NO: 32688 - RNA, 22 nt, Artificial Sequence
  Synthetic
ccaaucaauuggccuguuaaca

SEQ ID NO: 32689 - RNA, 23 nt, Artificial Sequence
  Synthetic
uccaaucaauuggccuguuaaca

SEQ ID NO: 32690 - RNA, 24 nt, Artificial Sequence
  Synthetic
uuccaaucaauuggccuguuaaca

SEQ ID NO: 32691 - RNA, 18 nt, Artificial Sequence
  Synthetic
uaaggcaggguaaccaca

SEQ ID NO: 32692 - RNA, 19 nt, Artificial Sequence
  Synthetic
uuaaggcaggguaaccaca

SEQ ID NO: 32693 - RNA, 20 nt, Artificial Sequence
  Synthetic
auuaaggcaggguaaccaca

SEQ ID NO: 32694 - RNA, 21 nt, Artificial Sequence
  Synthetic
cauuaaggcaggguaaccaca

SEQ ID NO: 32695 - RNA, 24 nt, Artificial Sequence
  Synthetic
aggcauuaaggcaggguaaccaca

SEQ ID NO: 32696 - RNA, 21 nt, Artificial Sequence
  Synthetic
uacagcaacaugagggauaca

SEQ ID NO: 32697 - RNA, 23 nt, Artificial Sequence
  Synthetic
uguacagcaacaugagggauaca

SEQ ID NO: 32698 - RNA, 24 nt, Artificial Sequence
  Synthetic
uuguacagcaacaugagggauaca

SEQ ID NO: 32699 - RNA, 18 nt, Artificial Sequence
  Synthetic
acagaauugucaguccca

SEQ ID NO: 32700 - RNA, 20 nt, Artificial Sequence
  Synthetic
cgacagaauugucaguccca

SEQ ID NO: 32701 - RNA, 21 nt, Artificial Sequence
  Synthetic
acgacagaauugucaguccca

SEQ ID NO: 32702 - RNA, 24 nt, Artificial Sequence
  Synthetic
aggacgacagaauugucaguccca

SEQ ID NO: 32703 - RNA, 22 nt, Artificial Sequence
  Synthetic
aguuucccaccuugugagucca

SEQ ID NO: 32704 - RNA, 23 nt, Artificial Sequence
  Synthetic
aaguuucccaccuugugagucca

SEQ ID NO: 32705 - RNA, 24 nt, Artificial Sequence
  Synthetic
aaaguuucccaccuugugagucca

SEQ ID NO: 32706 - RNA, 21 nt, Artificial Sequence
  Synthetic
auauagaauacccgccuucca

SEQ ID NO: 32707 - RNA, 22 nt, Artificial Sequence
  Synthetic
uauauagaauacccgccuucca

SEQ ID NO: 32708 - RNA, 23 nt, Artificial Sequence
  Synthetic
uuauauagaauacccgccuucca

SEQ ID NO: 32709 - RNA, 24 nt, Artificial Sequence
  Synthetic
cuuauauagaauacccgccuucca

SEQ ID NO: 32710 - RNA, 21 nt, Artificial Sequence
  Synthetic
caaauggauauuuggaaaaga

SEQ ID NO: 32711 - RNA, 23 nt, Artificial Sequence
  Synthetic
ugcaaauggauauuuggaaaaga

SEQ ID NO: 32712 - RNA, 24 nt, Artificial Sequence
  Synthetic
augcaaauggauauuuggaaaaga

SEQ ID NO: 32713 - RNA, 18 nt, Artificial Sequence
  Synthetic
auuuccgagaaaggacga

SEQ ID NO: 32714 - RNA, 19 nt, Artificial Sequence
  Synthetic
uauuuccgagaaaggacga

SEQ ID NO: 32715 - RNA, 20 nt, Artificial Sequence
  Synthetic
auauuuccgagaaaggacga

SEQ ID NO: 32716 - RNA, 21 nt, Artificial Sequence
  Synthetic
uauauuuccgagaaaggacga

SEQ ID NO: 32717 - RNA, 23 nt, Artificial Sequence
  Synthetic
uguauauuuccgagaaaggacga

SEQ ID NO: 32718 - RNA, 24 nt, Artificial Sequence
  Synthetic
auguauauuuccgagaaaggacga

SEQ ID NO: 32719 - RNA, 18 nt, Artificial Sequence
  Synthetic
ucuucgucugcgaggcga

SEQ ID NO: 32720 - RNA, 19 nt, Artificial Sequence
  Synthetic
aucuucgucugcgaggcga

SEQ ID NO: 32721 - RNA, 21 nt, Artificial Sequence
  Synthetic
agaucuucgucugcgaggcga

SEQ ID NO: 32722 - RNA, 23 nt, Artificial Sequence
  Synthetic
ugagaucuucgucugcgaggcga

SEQ ID NO: 32723 - RNA, 24 nt, Artificial Sequence
  Synthetic
uugagaucuucgucugcgaggcga

SEQ ID NO: 32724 - RNA, 18 nt, Artificial Sequence
  Synthetic
uccaacuggugaucggga

SEQ ID NO: 32725 - RNA, 22 nt, Artificial Sequence
  Synthetic
uggguccaacuggugaucggga

SEQ ID NO: 32726 - RNA, 23 nt, Artificial Sequence
  Synthetic
cuggguccaacuggugaucggga

SEQ ID NO: 32727 - RNA, 18 nt, Artificial Sequence
  Synthetic
cagccuagcagccaugga

SEQ ID NO: 32728 - RNA, 19 nt, Artificial Sequence
  Synthetic
acagccuagcagccaugga

SEQ ID NO: 32729 - RNA, 20 nt, Artificial Sequence
  Synthetic
cacagccuagcagccaugga

SEQ ID NO: 32730 - RNA, 22 nt, Artificial Sequence
  Synthetic
agcacagccuagcagccaugga

SEQ ID NO: 32731 - RNA, 23 nt, Artificial Sequence
  Synthetic
cagcacagccuagcagccaugga

SEQ ID NO: 32732 - RNA, 18 nt, Artificial Sequence
  Synthetic
ugcgaaagcccaagauga

SEQ ID NO: 32733 - RNA, 19 nt, Artificial Sequence
  Synthetic
uugcgaaagcccaagauga

SEQ ID NO: 32734 - RNA, 20 nt, Artificial Sequence
  Synthetic
uuugcgaaagcccaagauga

SEQ ID NO: 32735 - RNA, 21 nt, Artificial Sequence
  Synthetic
uuuugcgaaagcccaagauga

SEQ ID NO: 32736 - RNA, 22 nt, Artificial Sequence
  Synthetic
auuuugcgaaagcccaagauga

SEQ ID NO: 32737 - RNA, 23 nt, Artificial Sequence
  Synthetic
uauuuugcgaaagcccaagauga

SEQ ID NO: 32738 - RNA, 18 nt, Artificial Sequence
  Synthetic
agucuccggaaguguuga

SEQ ID NO: 32739 - RNA, 19 nt, Artificial Sequence
  Synthetic
uagucuccggaaguguuga

SEQ ID NO: 32740 - RNA, 21 nt, Artificial Sequence
  Synthetic
aguagucuccggaaguguuga

SEQ ID NO: 32741 - RNA, 22 nt, Artificial Sequence
  Synthetic
caguagucuccggaaguguuga

SEQ ID NO: 32742 - RNA, 23 nt, Artificial Sequence
  Synthetic
acaguagucuccggaaguguuga

SEQ ID NO: 32743 - RNA, 24 nt, Artificial Sequence
  Synthetic
aacaguagucuccggaaguguuga

SEQ ID NO: 32744 - RNA, 20 nt, Artificial Sequence
  Synthetic
cgggauguuucucucuuaua

SEQ ID NO: 32745 - RNA, 21 nt, Artificial Sequence
  Synthetic
acgggauguuucucucuuaua

SEQ ID NO: 32746 - RNA, 22 nt, Artificial Sequence
  Synthetic
uacgggauguuucucucuuaua

SEQ ID NO: 32747 - RNA, 23 nt, Artificial Sequence
  Synthetic
cuacgggauguuucucucuuaua

SEQ ID NO: 32748 - RNA, 22 nt, Artificial Sequence
  Synthetic
uggugaucgggaaggaauccua

SEQ ID NO: 32749 - RNA, 23 nt, Artificial Sequence
  Synthetic
cuggugaucgggaaggaauccua

SEQ ID NO: 32750 - RNA, 24 nt, Artificial Sequence
  Synthetic
acuggugaucgggaaggaauccua

SEQ ID NO: 32751 - RNA, 18 nt, Artificial Sequence
  Synthetic
ccacaaaaugaagcgcua

SEQ ID NO: 32752 - RNA, 19 nt, Artificial Sequence
  Synthetic
cccacaaaaugaagcgcua

SEQ ID NO: 32753 - RNA, 20 nt, Artificial Sequence
  Synthetic
acccacaaaaugaagcgcua

SEQ ID NO: 32754 - RNA, 22 nt, Artificial Sequence
  Synthetic
ugacccacaaaaugaagcgcua

SEQ ID NO: 32755 - RNA, 21 nt, Artificial Sequence
  Synthetic
uuacauaucccauaaaauuua

SEQ ID NO: 32756 - RNA, 22 nt, Artificial Sequence
  Synthetic
auuacauaucccauaaaauuua

SEQ ID NO: 32757 - RNA, 23 nt, Artificial Sequence
  Synthetic
aauuacauaucccauaaaauuua

SEQ ID NO: 32758 - RNA, 24 nt, Artificial Sequence
  Synthetic
caauuacauaucccauaaaauuua

SEQ ID NO: 32759 - RNA, 21 nt, Artificial Sequence
  Synthetic
ccuccguguggaggggugaac

SEQ ID NO: 32760 - RNA, 24 nt, Artificial Sequence
  Synthetic
aggccuccguguggaggggugaac

SEQ ID NO: 32761 - RNA, 22 nt, Artificial Sequence
  Synthetic
agaaaauugagagaaguccacc

SEQ ID NO: 32762 - RNA, 23 nt, Artificial Sequence
  Synthetic
uagaaaauugagagaaguccacc

SEQ ID NO: 32763 - RNA, 24 nt, Artificial Sequence
  Synthetic
cuagaaaauugagagaaguccacc

SEQ ID NO: 32764 - RNA, 21 nt, Artificial Sequence
  Synthetic
cuaccuuguuggccucuggcc

SEQ ID NO: 32765 - RNA, 22 nt, Artificial Sequence
  Synthetic
ccuaccuuguuggccucuggcc

SEQ ID NO: 32766 - RNA, 23 nt, Artificial Sequence
  Synthetic
uccuaccuuguuggccucuggcc

SEQ ID NO: 32767 - RNA, 24 nt, Artificial Sequence
  Synthetic
cuccuaccuuguuggccucuggcc

SEQ ID NO: 32768 - RNA, 18 nt, Artificial Sequence
  Synthetic
acugguggucgaggaucc

SEQ ID NO: 32769 - RNA, 19 nt, Artificial Sequence
  Synthetic
uacugguggucgaggaucc

SEQ ID NO: 32770 - RNA, 21 nt, Artificial Sequence
  Synthetic
cguacugguggucgaggaucc

SEQ ID NO: 32771 - RNA, 22 nt, Artificial Sequence
  Synthetic
ccguacugguggucgaggaucc

SEQ ID NO: 32772 - RNA, 23 nt, Artificial Sequence
  Synthetic
cccguacugguggucgaggaucc

SEQ ID NO: 32773 - RNA, 24 nt, Artificial Sequence
  Synthetic
ucccguacugguggucgaggaucc

SEQ ID NO: 32774 - RNA, 18 nt, Artificial Sequence
  Synthetic
ugacauaacaaacagucc

SEQ ID NO: 32775 - RNA, 19 nt, Artificial Sequence
  Synthetic
uugacauaacaaacagucc

SEQ ID NO: 32776 - RNA, 21 nt, Artificial Sequence
  Synthetic
uguugacauaacaaacagucc

SEQ ID NO: 32777 - RNA, 22 nt, Artificial Sequence
  Synthetic
uuguugacauaacaaacagucc

SEQ ID NO: 32778 - RNA, 18 nt, Artificial Sequence
  Synthetic
cccgccuguaacacgagc

SEQ ID NO: 32779 - RNA, 19 nt, Artificial Sequence
  Synthetic
ccccgccuguaacacgagc

SEQ ID NO: 32780 - RNA, 20 nt, Artificial Sequence
  Synthetic
accccgccuguaacacgagc

SEQ ID NO: 32781 - RNA, 21 nt, Artificial Sequence
  Synthetic
aaccccgccuguaacacgagc

SEQ ID NO: 32782 - RNA, 22 nt, Artificial Sequence
  Synthetic
aaaccccgccuguaacacgagc

SEQ ID NO: 32783 - RNA, 23 nt, Artificial Sequence
  Synthetic
aaaaccccgccuguaacacgagc

SEQ ID NO: 32784 - RNA, 24 nt, Artificial Sequence
  Synthetic
aaaaaccccgccuguaacacgagc

SEQ ID NO: 32785 - RNA, 18 nt, Artificial Sequence
  Synthetic
cauagaguugccuugagc

SEQ ID NO: 32786 - RNA, 19 nt, Artificial Sequence
  Synthetic
acauagaguugccuugagc

SEQ ID NO: 32787 - RNA, 20 nt, Artificial Sequence
  Synthetic
uacauagaguugccuugagc

SEQ ID NO: 32788 - RNA, 21 nt, Artificial Sequence
  Synthetic
auacauagaguugccuugagc

SEQ ID NO: 32789 - RNA, 18 nt, Artificial Sequence
  Synthetic
  misc_feature (16)..(16): n is a, c, g, or u
auuacccacccaggungc

SEQ ID NO: 32790 - RNA, 19 nt, Artificial Sequence
  Synthetic
  misc_feature (17)..(17): n is a, c, g, or u
uauuacccacccaggungc

SEQ ID NO: 32791 - RNA, 20 nt, Artificial Sequence
  Synthetic
  misc_feature (18)..(18): n is a, c, g, or u
uuauuacccacccaggungc

SEQ ID NO: 32792 - RNA, 21 nt, Artificial Sequence
  Synthetic
  misc_feature (19)..(19): n is a, c, g, or u
auuauuacccacccaggungc

SEQ ID NO: 32793 - RNA, 22 nt, Artificial Sequence
  Synthetic
  misc_feature (20)..(20): n is a, c, g, or u
aauuauuacccacccaggungc

SEQ ID NO: 32794 - RNA, 23 nt, Artificial Sequence
  Synthetic
  misc_feature (21)..(21): n is a, c, g, or u
aaauuauuacccacccaggungc

SEQ ID NO: 32795 - RNA, 24 nt, Artificial Sequence
  Synthetic
  misc_feature (22)..(22): n is a, c, g, or u
caaauuauuacccacccaggungc

SEQ ID NO: 32796 - RNA, 21 nt, Artificial Sequence
  Synthetic
  misc_feature (12)..(12): n is a, c, g, or u
ccccagcacagnauugcuugc

SEQ ID NO: 32797 - RNA, 22 nt, Artificial Sequence
  Synthetic
  misc_feature (13)..(13): n is a, c, g, or u
accccagcacagnauugcuugc

SEQ ID NO: 32798 - RNA, 23 nt, Artificial Sequence
  Synthetic
  misc_feature (14)..(14): n is a, c, g, or u
caccccagcacagnauugcuugc

SEQ ID NO: 32799 - RNA, 24 nt, Artificial Sequence
  Synthetic
  misc_feature (15)..(15): n is a, c, g, or u
ucaccccagcacagnauugcuugc

SEQ ID NO: 32800 - RNA, 20 nt, Artificial Sequence
  Synthetic
agggucccguacuggugguc

SEQ ID NO: 32801 - RNA, 21 nt, Artificial Sequence
  Synthetic
cagggucccguacuggugguc

SEQ ID NO: 32802 - RNA, 23 nt, Artificial Sequence
  Synthetic
ugcagggucccguacuggugguc

SEQ ID NO: 32803 - RNA, 24 nt, Artificial Sequence
  Synthetic
uugcagggucccguacuggugguc

SEQ ID NO: 32804 - RNA, 21 nt, Artificial Sequence
  Synthetic
aggcauagcagcaggaugaag

SEQ ID NO: 32805 - RNA, 23 nt, Artificial Sequence
  Synthetic
ugaggcauagcagcaggaugaag

SEQ ID NO: 32806 - RNA, 24 nt, Artificial Sequence
  Synthetic
augaggcauagcagcaggaugaag

SEQ ID NO: 32807 - RNA, 21 nt, Artificial Sequence
  Synthetic
caagaagaugaggcauagcag

SEQ ID NO: 32808 - RNA, 22 nt, Artificial Sequence
  Synthetic
acaagaagaugaggcauagcag

SEQ ID NO: 32809 - RNA, 23 nt, Artificial Sequence
  Synthetic
aacaagaagaugaggcauagcag

SEQ ID NO: 32810 - RNA, 24 nt, Artificial Sequence
  Synthetic
caacaagaagaugaggcauagcag

SEQ ID NO: 32811 - RNA, 22 nt, Artificial Sequence
  Synthetic
ugacgauugguggaggcaggag

SEQ ID NO: 32812 - RNA, 23 nt, Artificial Sequence
  Synthetic
cugacgauugguggaggcaggag

SEQ ID NO: 32813 - RNA, 24 nt, Artificial Sequence
  Synthetic
acugacgauugguggaggcaggag

SEQ ID NO: 32814 - RNA, 18 nt, Artificial Sequence
  Synthetic
uaaagacagguauaguag

SEQ ID NO: 32815 - RNA, 19 nt, Artificial Sequence
  Synthetic
uuaaagacagguauaguag

SEQ ID NO: 32816 - RNA, 20 nt, Artificial Sequence
  Synthetic
auuaaagacagguauaguag

SEQ ID NO: 32817 - RNA, 23 nt, Artificial Sequence
  Synthetic
aggauuaaagacagguauaguag

SEQ ID NO: 32818 - RNA, 24 nt, Artificial Sequence
  Synthetic
caggauuaaagacagguauaguag

SEQ ID NO: 32819 - RNA, 22 nt, Artificial Sequence
  Synthetic
cggccccgggaggggucguccg

SEQ ID NO: 32820 - RNA, 23 nt, Artificial Sequence
  Synthetic
acggccccgggaggggucguccg

SEQ ID NO: 32821 - RNA, 24 nt, Artificial Sequence
  Synthetic
aacggccccgggaggggucguccg

SEQ ID NO: 32822 - RNA, 18 nt, Artificial Sequence
  Synthetic
aacaaaggacgucccgcg

SEQ ID NO: 32823 - RNA, 19 nt, Artificial Sequence
  Synthetic
aaacaaaggacgucccgcg

SEQ ID NO: 32824 - RNA, 20 nt, Artificial Sequence
  Synthetic
uaaacaaaggacgucccgcg

SEQ ID NO: 32825 - RNA, 22 nt, Artificial Sequence
  Synthetic
cguaaacaaaggacgucccgcg

SEQ ID NO: 32826 - RNA, 23 nt, Artificial Sequence
  Synthetic
acguaaacaaaggacgucccgcg

SEQ ID NO: 32827 - RNA, 21 nt, Artificial Sequence
  Synthetic
augcauauaaaggcauuaagg

SEQ ID NO: 32828 - RNA, 22 nt, Artificial Sequence
  Synthetic
caugcauauaaaggcauuaagg

SEQ ID NO: 32829 - RNA, 23 nt, Artificial Sequence
  Synthetic
acaugcauauaaaggcauuaagg

SEQ ID NO: 32830 - RNA, 24 nt, Artificial Sequence
  Synthetic
uacaugcauauaaaggcauuaagg

SEQ ID NO: 32831 - RNA, 21 nt, Artificial Sequence
  Synthetic
auuugguggucuauaagcagg

SEQ ID NO: 32832 - RNA, 22 nt, Artificial Sequence
  Synthetic
cauuugguggucuauaagcagg

SEQ ID NO: 32833 - RNA, 19 nt, Artificial Sequence
  Synthetic
agccccaaacggccccggg

SEQ ID NO: 32834 - RNA, 21 nt, Artificial Sequence
  Synthetic
agagccccaaacggccccggg

SEQ ID NO: 32835 - RNA, 22 nt, Artificial Sequence
  Synthetic
cagagccccaaacggccccggg

SEQ ID NO: 32836 - RNA, 23 nt, Artificial Sequence
  Synthetic
acagagccccaaacggccccggg

SEQ ID NO: 32837 - RNA, 21 nt, Artificial Sequence
  Synthetic
ccccaaaaggccuccgugugg

SEQ ID NO: 32838 - RNA, 22 nt, Artificial Sequence
  Synthetic
accccaaaaggccuccgugugg

SEQ ID NO: 32839 - RNA, 23 nt, Artificial Sequence
  Synthetic
caccccaaaaggccuccgugugg

SEQ ID NO: 32840 - RNA, 24 nt, Artificial Sequence
  Synthetic
ccaccccaaaaggccuccgugugg

SEQ ID NO: 32841 - RNA, 21 nt, Artificial Sequence
  Synthetic
uugggauuuuguagagcuugg

SEQ ID NO: 32842 - RNA, 22 nt, Artificial Sequence
  Synthetic
uuugggauuuuguagagcuugg

SEQ ID NO: 32843 - RNA, 23 nt, Artificial Sequence
  Synthetic
cuuugggauuuuguagagcuugg

SEQ ID NO: 32844 - RNA, 24 nt, Artificial Sequence
  Synthetic
acuuugggauuuuguagagcuugg

SEQ ID NO: 32845 - RNA, 21 nt, Artificial Sequence
  Synthetic
uguugguauuugcucugaaug

SEQ ID NO: 32846 - RNA, 22 nt, Artificial Sequence
  Synthetic
uuguugguauuugcucugaaug

SEQ ID NO: 32847 - RNA, 23 nt, Artificial Sequence
  Synthetic
auuguugguauuugcucugaaug

SEQ ID NO: 32848 - RNA, 21 nt, Artificial Sequence
  Synthetic
aagguuuuguacagcaacaug

SEQ ID NO: 32849 - RNA, 23 nt, Artificial Sequence
  Synthetic
cgaagguuuuguacagcaacaug

SEQ ID NO: 32850 - RNA, 24 nt, Artificial Sequence
  Synthetic
ccgaagguuuuguacagcaacaug

SEQ ID NO: 32851 - RNA, 18 nt, Artificial Sequence
  Synthetic
ccaccaaaucucuggaug

SEQ ID NO: 32852 - RNA, 19 nt, Artificial Sequence
  Synthetic
accaccaaaucucuggaug

SEQ ID NO: 32853 - RNA, 21 nt, Artificial Sequence
  Synthetic
ugaccaccaaaucucuggaug

SEQ ID NO: 32854 - RNA, 22 nt, Artificial Sequence
  Synthetic
uugaccaccaaaucucuggaug

SEQ ID NO: 32855 - RNA, 23 nt, Artificial Sequence
  Synthetic
auugaccaccaaaucucuggaug

SEQ ID NO: 32856 - RNA, 24 nt, Artificial Sequence
  Synthetic
aauugaccaccaaaucucuggaug

SEQ ID NO: 32857 - RNA, 18 nt, Artificial Sequence
  Synthetic
uguucuccauguucggug

SEQ ID NO: 32858 - RNA, 19 nt, Artificial Sequence
  Synthetic
auguucuccauguucggug

SEQ ID NO: 32859 - RNA, 21 nt, Artificial Sequence
  Synthetic
ugauguucuccauguucggug

SEQ ID NO: 32860 - RNA, 23 nt, Artificial Sequence
  Synthetic
ugugauguucuccauguucggug

SEQ ID NO: 32861 - RNA, 24 nt, Artificial Sequence
  Synthetic
augugauguucuccauguucggug

SEQ ID NO: 32862 - RNA, 21 nt, Artificial Sequence
  Synthetic
aaguuggaggacaggagauug

SEQ ID NO: 32863 - RNA, 22 nt, Artificial Sequence
  Synthetic
caaguuggaggacaggagauug

SEQ ID NO: 32864 - RNA, 23 nt, Artificial Sequence
  Synthetic
acaaguuggaggacaggagauug

SEQ ID NO: 32865 - RNA, 22 nt, Artificial Sequence
  Synthetic
agcaggagucgugcagguuuug

SEQ ID NO: 32866 - RNA, 24 nt, Artificial Sequence
  Synthetic
ugagcaggagucgugcagguuuug

SEQ ID NO: 32867 - RNA, 21 nt, Artificial Sequence
  Synthetic
uuuugggauugaagucccaau

SEQ ID NO: 32868 - RNA, 22 nt, Artificial Sequence
  Synthetic
uuuuugggauugaagucccaau

SEQ ID NO: 32869 - RNA, 23 nt, Artificial Sequence
  Synthetic
cuuuuugggauugaagucccaau

SEQ ID NO: 32870 - RNA, 24 nt, Artificial Sequence
  Synthetic
ccuuuuugggauugaagucccaau

SEQ ID NO: 32871 - RNA, 23 nt, Artificial Sequence
  Synthetic
uggaaaagaaggaguuugccaau

SEQ ID NO: 32872 - RNA, 24 nt, Artificial Sequence
  Synthetic
uuggaaaagaaggaguuugccaau

SEQ ID NO: 32873 - RNA, 18 nt, Artificial Sequence
  Synthetic
ucuuagugguggagagau

SEQ ID NO: 32874 - RNA, 19 nt, Artificial Sequence
  Synthetic
cucuuagugguggagagau

SEQ ID NO: 32875 - RNA, 20 nt, Artificial Sequence
  Synthetic
ucucuuagugguggagagau

SEQ ID NO: 32876 - RNA, 22 nt, Artificial Sequence
  Synthetic
ugucucuuagugguggagagau

SEQ ID NO: 32877 - RNA, 23 nt, Artificial Sequence
  Synthetic
cugucucuuagugguggagagau

SEQ ID NO: 32878 - RNA, 24 nt, Artificial Sequence
  Synthetic
acugucucuuagugguggagagau

SEQ ID NO: 32879 - RNA, 22 nt, Artificial Sequence
  Synthetic
cgaaagcccaagaugaugggau

SEQ ID NO: 32880 - RNA, 24 nt, Artificial Sequence
  Synthetic
ugcgaaagcccaagaugaugggau

SEQ ID NO: 32881 - RNA, 21 nt, Artificial Sequence
  Synthetic
caguagcuccaaauucuuuau

SEQ ID NO: 32882 - RNA, 22 nt, Artificial Sequence
  Synthetic
acaguagcuccaaauucuuuau

SEQ ID NO: 32883 - RNA, 23 nt, Artificial Sequence
  Synthetic
cacaguagcuccaaauucuuuau

SEQ ID NO: 32884 - RNA, 24 nt, Artificial Sequence
  Synthetic
ccacaguagcuccaaauucuuuau

SEQ ID NO: 32885 - RNA, 21 nt, Artificial Sequence
  Synthetic
agugauuggagguuggggacu

SEQ ID NO: 32886 - RNA, 23 nt, Artificial Sequence
  Synthetic
ugagugauuggagguuggggacu

SEQ ID NO: 32887 - RNA, 18 nt, Artificial Sequence
  Synthetic
aacacgagcagggguccu

SEQ ID NO: 32888 - RNA, 19 nt, Artificial Sequence
  Synthetic
uaacacgagcagggguccu

SEQ ID NO: 32889 - RNA, 21 nt, Artificial Sequence
  Synthetic
uguaacacgagcagggguccu

SEQ ID NO: 32890 - RNA, 22 nt, Artificial Sequence
  Synthetic
cuguaacacgagcagggguccu

SEQ ID NO: 32891 - RNA, 23 nt, Artificial Sequence
  Synthetic
ccuguaacacgagcagggguccu

SEQ ID NO: 32892 - RNA, 21 nt, Artificial Sequence
  Synthetic
cugcgagcaaaacaagcagcu

SEQ ID NO: 32893 - RNA, 24 nt, Artificial Sequence
  Synthetic
cggcugcgagcaaaacaagcagcu

SEQ ID NO: 32894 - RNA, 21 nt, Artificial Sequence
  Synthetic
ucuggauuguugguauuugcu

SEQ ID NO: 32895 - RNA, 22 nt, Artificial Sequence
  Synthetic
aucuggauuguugguauuugcu

SEQ ID NO: 32896 - RNA, 23 nt, Artificial Sequence
  Synthetic
aaucuggauuguugguauuugcu

SEQ ID NO: 32897 - RNA, 24 nt, Artificial Sequence
  Synthetic
caaucuggauuguugguauuugcu

SEQ ID NO: 32898 - RNA, 21 nt, Artificial Sequence
  Synthetic
acauaauugaccaccaaaucu

SEQ ID NO: 32899 - RNA, 22 nt, Artificial Sequence
  Synthetic
aacauaauugaccaccaaaucu

SEQ ID NO: 32900 - RNA, 23 nt, Artificial Sequence
  Synthetic
uaacauaauugaccaccaaaucu

SEQ ID NO: 32901 - RNA, 24 nt, Artificial Sequence
  Synthetic
uuaacauaauugaccaccaaaucu

SEQ ID NO: 32902 - RNA, 22 nt, Artificial Sequence
  Synthetic
cgaacaaugaucagaggacucu

SEQ ID NO: 32903 - RNA, 22 nt, Artificial Sequence
  Synthetic
cgauggccaagccccaaccagu

SEQ ID NO: 32904 - RNA, 23 nt, Artificial Sequence
  Synthetic
ccgauggccaagccccaaccagu

SEQ ID NO: 32905 - RNA, 24 nt, Artificial Sequence
  Synthetic
  misc_feature (1)..(1): n is a, c, g, or u
nccgauggccaagccccaaccagu

SEQ ID NO: 32906 - RNA, 18 nt, Artificial Sequence
  Synthetic
agcuaggaguuccgcagu

SEQ ID NO: 32907 - RNA, 19 nt, Artificial Sequence
  Synthetic
cagcuaggaguuccgcagu

SEQ ID NO: 32908 - RNA, 21 nt, Artificial Sequence
  Synthetic
agcagcuaggaguuccgcagu

SEQ ID NO: 32909 - RNA, 22 nt, Artificial Sequence
  Synthetic
aagcagcuaggaguuccgcagu

SEQ ID NO: 32910 - RNA, 23 nt, Artificial Sequence
  Synthetic
caagcagcuaggaguuccgcagu

SEQ ID NO: 32911 - RNA, 24 nt, Artificial Sequence
  Synthetic
acaagcagcuaggaguuccgcagu

SEQ ID NO: 32912 - RNA, 18 nt, Artificial Sequence
  Synthetic
ucuauaagcaggaggagu

SEQ ID NO: 32913 - RNA, 21 nt, Artificial Sequence
  Synthetic
uggucuauaagcaggaggagu

SEQ ID NO: 32914 - RNA, 24 nt, Artificial Sequence
  Synthetic
ugguggucuauaagcaggaggagu

SEQ ID NO: 32915 - RNA, 18 nt, Artificial Sequence
  Synthetic
uagacucugcgguauugu

SEQ ID NO: 32916 - RNA, 19 nt, Artificial Sequence
  Synthetic
cuagacucugcgguauugu

SEQ ID NO: 32917 - RNA, 20 nt, Artificial Sequence
  Synthetic
ucuagacucugcgguauugu

SEQ ID NO: 32918 - RNA, 22 nt, Artificial Sequence
  Synthetic
agucuagacucugcgguauugu

SEQ ID NO: 32919 - RNA, 24 nt, Artificial Sequence
  Synthetic
cgagucuagacucugcgguauugu

SEQ ID NO: 32920 - RNA, 23 nt, Artificial Sequence
  Synthetic
  misc_feature (6)..(6): n is a, c, g, or u
aggaanauacaggccccugacuu

SEQ ID NO: 32921 - RNA, 24 nt, Artificial Sequence
  Synthetic
  misc_feature (7)..(7): n is a, c, g, or u
caggaanauacaggccccugacuu

SEQ ID NO: 32922 - RNA, 21 nt, Artificial Sequence
  Synthetic
ccccguaaaguuucccaccuu

SEQ ID NO: 32923 - RNA, 23 nt, Artificial Sequence
  Synthetic
agccccguaaaguuucccaccuu

SEQ ID NO: 32924 - RNA, 24 nt, Artificial Sequence
  Synthetic
cagccccguaaaguuucccaccuu

SEQ ID NO: 32925 - RNA, 21 nt, Artificial Sequence
  Synthetic
aguaaugauuaacuacauuuu

SEQ ID NO: 32926 - RNA, 22 nt, Artificial Sequence
  Synthetic
aaguaaugauuaacuacauuuu

SEQ ID NO: 32927 - RNA, 21 nt, Artificial Sequence
  Synthetic
ccucuggccaaggguccuuuu

SEQ ID NO: 32928 - RNA, 24 nt, Artificial Sequence
  Synthetic
uggccucuggccaaggguccuuuu

SEQ ID NO: 32929 - RNA, 23 nt, Artificial Sequence
  Synthetic
uggcugcuaggcugugcugccaa

SEQ ID NO: 32930 - RNA, 24 nt, Artificial Sequence
  Synthetic
auggcugcuaggcugugcugccaa

SEQ ID NO: 32931 - RNA, 21 nt, Artificial Sequence
  Synthetic
cugagugggaagaauuaggca

SEQ ID NO: 32932 - RNA, 23 nt, Artificial Sequence
  Synthetic
ugcugagugggaagaauuaggca

SEQ ID NO: 32933 - RNA, 24 nt, Artificial Sequence
  Synthetic
uugcugagugggaagaauuaggca

SEQ ID NO: 32934 - RNA, 18 nt, Artificial Sequence
  Synthetic
ugauuggaaagucuguca

SEQ ID NO: 32935 - RNA, 19 nt, Artificial Sequence
  Synthetic
uugauuggaaagucuguca

SEQ ID NO: 32936 - RNA, 20 nt, Artificial Sequence
  Synthetic
auugauuggaaagucuguca

SEQ ID NO: 32937 - RNA, 21 nt, Artificial Sequence
  Synthetic
aauugauuggaaagucuguca

SEQ ID NO: 32938 - RNA, 22 nt, Artificial Sequence
  Synthetic
caauugauuggaaagucuguca

SEQ ID NO: 32939 - RNA, 23 nt, Artificial Sequence
  Synthetic
ccaauugauuggaaagucuguca

SEQ ID NO: 32940 - RNA, 21 nt, Artificial Sequence
  Synthetic
  misc_feature (5)..(5): n is a, c, g, or u
aaccnuaacaaaacaaaaaga

SEQ ID NO: 32941 - RNA, 22 nt, Artificial Sequence
  Synthetic
  misc_feature (6)..(6): n is a, c, g, or u
aaaccnuaacaaaacaaaaaga

SEQ ID NO: 32942 - RNA, 23 nt, Artificial Sequence
  Synthetic
  misc_feature (7)..(7): n is a, c, g, or u
uaaaccnuaacaaaacaaaaaga

SEQ ID NO: 32943 - RNA, 24 nt, Artificial Sequence
  Synthetic
  misc_feature (8)..(8): n is a, c, g, or u
cuaaaccnuaacaaaacaaaaaga

SEQ ID NO: 32944 - RNA, 18 nt, Artificial Sequence
  Synthetic
uagacauugacccuuaua

SEQ ID NO: 32945 - RNA, 19 nt, Artificial Sequence
  Synthetic
uuagacauugacccuuaua

SEQ ID NO: 32946 - RNA, 20 nt, Artificial Sequence
  Synthetic
cuuagacauugacccuuaua

SEQ ID NO: 32947 - RNA, 23 nt, Artificial Sequence
  Synthetic
uggcuuagacauugacccuuaua

SEQ ID NO: 32948 - RNA, 24 nt, Artificial Sequence
  Synthetic
uuggcuuagacauugacccuuaua

SEQ ID NO: 32949 - RNA, 22 nt, Artificial Sequence
  Synthetic
ugggguuauuccuuaaauuuua

SEQ ID NO: 32950 - RNA, 23 nt, Artificial Sequence
  Synthetic
augggguuauuccuuaaauuuua

SEQ ID NO: 32951 - RNA, 20 nt, Artificial Sequence
  Synthetic
aggaguuggagccuauggac

SEQ ID NO: 32952 - RNA, 21 nt, Artificial Sequence
  Synthetic
uaggaguuggagccuauggac

SEQ ID NO: 32953 - RNA, 24 nt, Artificial Sequence
  Synthetic
agguaggaguuggagccuauggac

SEQ ID NO: 32954 - RNA, 19 nt, Artificial Sequence
  Synthetic
cgggguuuuucuuguugac

SEQ ID NO: 32955 - RNA, 22 nt, Artificial Sequence
  Synthetic
aggcgggguuuuucuuguugac

SEQ ID NO: 32956 - RNA, 23 nt, Artificial Sequence
  Synthetic
caggcgggguuuuucuuguugac

SEQ ID NO: 32957 - RNA, 24 nt, Artificial Sequence
  Synthetic
acaggcgggguuuuucuuguugac

SEQ ID NO: 32958 - RNA, 21 nt, Artificial Sequence
  Synthetic
  misc_feature (19)..(19): n is a, c, g, or u
ugaguugaugacucuagcnac

SEQ ID NO: 32959 - RNA, 18 nt, Artificial Sequence
  Synthetic
ccgcuucagcuuuguacc

SEQ ID NO: 32960 - RNA, 19 nt, Artificial Sequence
  Synthetic
accgcuucagcuuuguacc

SEQ ID NO: 32961 - RNA, 20 nt, Artificial Sequence
  Synthetic
caccgcuucagcuuuguacc

SEQ ID NO: 32962 - RNA, 21 nt, Artificial Sequence
  Synthetic
acaccgcuucagcuuuguacc

SEQ ID NO: 32963 - RNA, 23 nt, Artificial Sequence
  Synthetic
cgacaccgcuucagcuuuguacc

SEQ ID NO: 32964 - RNA, 24 nt, Artificial Sequence
  Synthetic
ucgacaccgcuucagcuuuguacc

SEQ ID NO: 32965 - RNA, 18 nt, Artificial Sequence
  Synthetic
aagccuccaagcugugcc

SEQ ID NO: 32966 - RNA, 19 nt, Artificial Sequence
  Synthetic
caagccuccaagcugugcc

SEQ ID NO: 32967 - RNA, 20 nt, Artificial Sequence
  Synthetic
ucaagccuccaagcugugcc

SEQ ID NO: 32968 - RNA, 21 nt, Artificial Sequence
  Synthetic
uucaagccuccaagcugugcc

SEQ ID NO: 32969 - RNA, 23 nt, Artificial Sequence
  Synthetic
uguucaagccuccaagcugugcc

SEQ ID NO: 32970 - RNA, 24 nt, Artificial Sequence
  Synthetic
cuguucaagccuccaagcugugcc

SEQ ID NO: 32971 - RNA, 21 nt, Artificial Sequence
  Synthetic
ugccuuggguggcuuuagggc

SEQ ID NO: 32972 - RNA, 23 nt, Artificial Sequence
  Synthetic
ugugccuuggguggcuuuagggc

SEQ ID NO: 32973 - RNA, 24 nt, Artificial Sequence
  Synthetic
cugugccuuggguggcuuuagggc

SEQ ID NO: 32974 - RNA, 21 nt, Artificial Sequence
  Synthetic
  misc_feature (15)..(15): n is a, c, g, or u
cucaggcaagcaauncugugc

SEQ ID NO: 32975 - RNA, 22 nt, Artificial Sequence
  Synthetic
  misc_feature (16)..(16): n is a, c, g, or u
acucaggcaagcaauncugugc

SEQ ID NO: 32976 - RNA, 23 nt, Artificial Sequence
  Synthetic
  misc_feature (17)..(17): n is a, c, g, or u
cacucaggcaagcaauncugugc

SEQ ID NO: 32977 - RNA, 18 nt, Artificial Sequence
  Synthetic
ccaaaucuguacaacauc

SEQ ID NO: 32978 - RNA, 24 nt, Artificial Sequence
  Synthetic
ugggggccaaaucuguacaacauc

SEQ ID NO: 32979 - RNA, 18 nt, Artificial Sequence
  Synthetic
uuucuuggacggucccuc

SEQ ID NO: 32980 - RNA, 19 nt, Artificial Sequence
  Synthetic
cuuucuuggacggucccuc

SEQ ID NO: 32981 - RNA, 24 nt, Artificial Sequence
  Synthetic
uggggcuuucuuggacggucccuc

SEQ ID NO: 32982 - RNA, 21 nt, Artificial Sequence
  Synthetic
accuuuccaccagcaauccuc

SEQ ID NO: 32983 - RNA, 22 nt, Artificial Sequence
  Synthetic
aaccuuuccaccagcaauccuc

SEQ ID NO: 32984 - RNA, 24 nt, Artificial Sequence
  Synthetic
agaaccuuuccaccagcaauccuc

SEQ ID NO: 32985 - RNA, 18 nt, Artificial Sequence
  Synthetic
caucucgucaaucuucuc

SEQ ID NO: 32986 - RNA, 19 nt, Artificial Sequence
  Synthetic
acaucucgucaaucuucuc

SEQ ID NO: 32987 - RNA, 20 nt, Artificial Sequence
  Synthetic
cacaucucgucaaucuucuc

SEQ ID NO: 32988 - RNA, 21 nt, Artificial Sequence
  Synthetic
ucacaucucgucaaucuucuc

SEQ ID NO: 32989 - RNA, 22 nt, Artificial Sequence
  Synthetic
cucacaucucgucaaucuucuc

SEQ ID NO: 32990 - RNA, 23 nt, Artificial Sequence
  Synthetic
ucucacaucucgucaaucuucuc

SEQ ID NO: 32991 - RNA, 24 nt, Artificial Sequence
  Synthetic
cucucacaucucgucaaucuucuc

SEQ ID NO: 32992 - RNA, 18 nt, Artificial Sequence
  Synthetic
ccguuuguccucugauuc

SEQ ID NO: 32993 - RNA, 19 nt, Artificial Sequence
  Synthetic
cccguuuguccucugauuc

SEQ ID NO: 32994 - RNA, 21 nt, Artificial Sequence
  Synthetic
ugcccguuuguccucugauuc

SEQ ID NO: 32995 - RNA, 22 nt, Artificial Sequence
  Synthetic
uugcccguuuguccucugauuc

SEQ ID NO: 32996 - RNA, 24 nt, Artificial Sequence
  Synthetic
uguugcccguuuguccucugauuc

SEQ ID NO: 32997 - RNA, 21 nt, Artificial Sequence
  Synthetic
uccugcugguggcuccaguuc

SEQ ID NO: 32998 - RNA, 22 nt, Artificial Sequence
  Synthetic
uuccugcugguggcuccaguuc

SEQ ID NO: 32999 - RNA, 23 nt, Artificial Sequence
  Synthetic
  misc_feature (1)..(1): n is a, c, g, or u
nuuccugcugguggcuccaguuc

SEQ ID NO: 33000 - RNA, 24 nt, Artificial Sequence
  Synthetic
  misc_feature (2)..(2): n is a, c, g, or u
unuuccugcugguggcuccaguuc

SEQ ID NO: 33001 - RNA, 18 nt, Artificial Sequence
  Synthetic
uugggagagaaaccguuc

SEQ ID NO: 33002 - RNA, 19 nt, Artificial Sequence
  Synthetic
uuugggagagaaaccguuc

SEQ ID NO: 33003 - RNA, 20 nt, Artificial Sequence
  Synthetic
uuuugggagagaaaccguuc

SEQ ID NO: 33004 - RNA, 21 nt, Artificial Sequence
  Synthetic
cuuuugggagagaaaccguuc

SEQ ID NO: 33005 - RNA, 22 nt, Artificial Sequence
  Synthetic
acuuuugggagagaaaccguuc

SEQ ID NO: 33006 - RNA, 23 nt, Artificial Sequence
  Synthetic
uacuuuugggagagaaaccguuc

SEQ ID NO: 33007 - RNA, 24 nt, Artificial Sequence
  Synthetic
uuacuuuugggagagaaaccguuc

SEQ ID NO: 33008 - RNA, 21 nt, Artificial Sequence
  Synthetic
uauuuacauacccuuuggaag

SEQ ID NO: 33009 - RNA, 22 nt, Artificial Sequence
  Synthetic
uuauuuacauacccuuuggaag

SEQ ID NO: 33010 - RNA, 23 nt, Artificial Sequence
  Synthetic
auuauuuacauacccuuuggaag

SEQ ID NO: 33011 - RNA, 24 nt, Artificial Sequence
  Synthetic
cauuauuuacauacccuuuggaag

SEQ ID NO: 33012 - RNA, 18 nt, Artificial Sequence
  Synthetic
agaauccucacaauaccg

SEQ ID NO: 33013 - RNA, 19 nt, Artificial Sequence
  Synthetic
aagaauccucacaauaccg

SEQ ID NO: 33014 - RNA, 20 nt, Artificial Sequence
  Synthetic
caagaauccucacaauaccg

SEQ ID NO: 33015 - RNA, 21 nt, Artificial Sequence
  Synthetic
acaagaauccucacaauaccg

SEQ ID NO: 33016 - RNA, 23 nt, Artificial Sequence
  Synthetic
ugacaagaauccucacaauaccg

SEQ ID NO: 33017 - RNA, 24 nt, Artificial Sequence
  Synthetic
uugacaagaauccucacaauaccg

SEQ ID NO: 33018 - RNA, 19 nt, Artificial Sequence
  Synthetic
uguuuacgucccgucagcg

SEQ ID NO: 33019 - RNA, 20 nt, Artificial Sequence
  Synthetic
uuguuuacgucccgucagcg

SEQ ID NO: 33020 - RNA, 21 nt, Artificial Sequence
  Synthetic
uuuguuuacgucccgucagcg

SEQ ID NO: 33021 - RNA, 22 nt, Artificial Sequence
  Synthetic
cuuuguuuacgucccgucagcg

SEQ ID NO: 33022 - RNA, 23 nt, Artificial Sequence
  Synthetic
ccuuuguuuacgucccgucagcg

SEQ ID NO: 33023 - RNA, 24 nt, Artificial Sequence
  Synthetic
uccuuuguuuacgucccgucagcg

SEQ ID NO: 33024 - RNA, 18 nt, Artificial Sequence
  Synthetic
aacuuguccuggcuaucg

SEQ ID NO: 33025 - RNA, 19 nt, Artificial Sequence
  Synthetic
caacuuguccuggcuaucg

SEQ ID NO: 33026 - RNA, 20 nt, Artificial Sequence
  Synthetic
ccaacuuguccuggcuaucg

SEQ ID NO: 33027 - RNA, 21 nt, Artificial Sequence
  Synthetic
uccaacuuguccuggcuaucg

SEQ ID NO: 33028 - RNA, 22 nt, Artificial Sequence
  Synthetic
cuccaacuuguccuggcuaucg

SEQ ID NO: 33029 - RNA, 23 nt, Artificial Sequence
  Synthetic
ccuccaacuuguccuggcuaucg

SEQ ID NO: 33030 - RNA, 24 nt, Artificial Sequence
  Synthetic
uccuccaacuuguccuggcuaucg

SEQ ID NO: 33031 - RNA, 18 nt, Artificial Sequence
  Synthetic
cccugcucguguuacagg

SEQ ID NO: 33032 - RNA, 19 nt, Artificial Sequence
  Synthetic
ccccugcucguguuacagg

SEQ ID NO: 33033 - RNA, 20 nt, Artificial Sequence
  Synthetic
accccugcucguguuacagg

SEQ ID NO: 33034 - RNA, 23 nt, Artificial Sequence
  Synthetic
aggaccccugcucguguuacagg

SEQ ID NO: 33035 - RNA, 24 nt, Artificial Sequence
  Synthetic
uaggaccccugcucguguuacagg

SEQ ID NO: 33036 - RNA, 18 nt, Artificial Sequence
  Synthetic
uucucucaauuuucuagg

SEQ ID NO: 33037 - RNA, 19 nt, Artificial Sequence
  Synthetic
cuucucucaauuuucuagg

SEQ ID NO: 33038 - RNA, 20 nt, Artificial Sequence
  Synthetic
acuucucucaauuuucuagg

SEQ ID NO: 33039 - RNA, 23 nt, Artificial Sequence
  Synthetic
uggacuucucucaauuuucuagg

SEQ ID NO: 33040 - RNA, 22 nt, Artificial Sequence
  Synthetic
  misc_feature (12)..(12): n is a, c, g, or u
aggcaagcaauncugugcuggg

SEQ ID NO: 33041 - RNA, 23 nt, Artificial Sequence
  Synthetic
  misc_feature (13)..(13): n is a, c, g, or u
caggcaagcaauncugugcuggg

SEQ ID NO: 33042 - RNA, 24 nt, Artificial Sequence
  Synthetic
  misc_feature (14)..(14): n is a, c, g, or u
ucaggcaagcaauncugugcuggg

SEQ ID NO: 33043 - RNA, 21 nt, Artificial Sequence
  Synthetic
acuguguuuuugcugaguggg

SEQ ID NO: 33044 - RNA, 24 nt, Artificial Sequence
  Synthetic
aggacuguguuuuugcugaguggg

SEQ ID NO: 33045 - RNA, 21 nt, Artificial Sequence
  Synthetic
  misc_feature (15)..(15): n is a, c, g, or u
uugaugacucuagcnaccugg

SEQ ID NO: 33046 - RNA, 23 nt, Artificial Sequence
  Synthetic
  misc_feature (17)..(17): n is a, c, g, or u
aguugaugacucuagcnaccugg

SEQ ID NO: 33047 - RNA, 21 nt, Artificial Sequence
  Synthetic
auaaagaauuuggagcuacug

SEQ ID NO: 33048 - RNA, 22 nt, Artificial Sequence
  Synthetic
uauaaagaauuuggagcuacug

SEQ ID NO: 33049 - RNA, 23 nt, Artificial Sequence
  Synthetic
uuauaaagaauuuggagcuacug

SEQ ID NO: 33050 - RNA, 24 nt, Artificial Sequence
  Synthetic
cuuauaaagaauuuggagcuacug

SEQ ID NO: 33051 - RNA, 21 nt, Artificial Sequence
  Synthetic
ugucaacgaauaacuggucug

SEQ ID NO: 33052 - RNA, 22 nt, Artificial Sequence
  Synthetic
cugucaacgaauaacuggucug

SEQ ID NO: 33053 - RNA, 23 nt, Artificial Sequence
  Synthetic
ucugucaacgaauaacuggucug

SEQ ID NO: 33054 - RNA, 21 nt, Artificial Sequence
  Synthetic
acuucaaggacuguguuuuug

SEQ ID NO: 33055 - RNA, 22 nt, Artificial Sequence
  Synthetic
uacuucaaggacuguguuuuug

SEQ ID NO: 33056 - RNA, 23 nt, Artificial Sequence
  Synthetic
auacuucaaggacuguguuuuug

SEQ ID NO: 33057 - RNA, 24 nt, Artificial Sequence
  Synthetic
aauacuucaaggacuguguuuuug

SEQ ID NO: 33058 - RNA, 23 nt, Artificial Sequence
  Synthetic
uggucaauuauguuaauacuaau

SEQ ID NO: 33059 - RNA, 21 nt, Artificial Sequence
  Synthetic
cgaacauggagaacaucacau

SEQ ID NO: 33060 - RNA, 22 nt, Artificial Sequence
  Synthetic
ccgaacauggagaacaucacau

SEQ ID NO: 33061 - RNA, 23 nt, Artificial Sequence
  Synthetic
accgaacauggagaacaucacau

SEQ ID NO: 33062 - RNA, 24 nt, Artificial Sequence
  Synthetic
caccgaacauggagaacaucacau

SEQ ID NO: 33063 - RNA, 18 nt, Artificial Sequence
  Synthetic
cuuucgcaaaauaccuau

SEQ ID NO: 33064 - RNA, 22 nt, Artificial Sequence
  Synthetic
ugggcuuucgcaaaauaccuau

SEQ ID NO: 33065 - RNA, 23 nt, Artificial Sequence
  Synthetic
uugggcuuucgcaaaauaccuau

SEQ ID NO: 33066 - RNA, 24 nt, Artificial Sequence
  Synthetic
cuugggcuuucgcaaaauaccuau

SEQ ID NO: 33067 - RNA, 18 nt, Artificial Sequence
  Synthetic
cuuuguaccgggaauccu

SEQ ID NO: 33068 - RNA, 20 nt, Artificial Sequence
  Synthetic
agcuuuguaccgggaauccu

SEQ ID NO: 33069 - RNA, 21 nt, Artificial Sequence
  Synthetic
cagcuuuguaccgggaauccu

SEQ ID NO: 33070 - RNA, 22 nt, Artificial Sequence
  Synthetic
ucagcuuuguaccgggaauccu

SEQ ID NO: 33071 - RNA, 23 nt, Artificial Sequence
  Synthetic
uucagcuuuguaccgggaauccu

SEQ ID NO: 33072 - RNA, 24 nt, Artificial Sequence
  Synthetic
cuucagcuuuguaccgggaauccu

SEQ ID NO: 33073 - RNA, 22 nt, Artificial Sequence
  Synthetic
uguuaccaauuuucuuuugucu

SEQ ID NO: 33074 - RNA, 23 nt, Artificial Sequence
  Synthetic
cuguuaccaauuuucuuuugucu

SEQ ID NO: 33075 - RNA, 21 nt, Artificial Sequence
  Synthetic
augggauauguaauuggaagu

SEQ ID NO: 33076 - RNA, 22 nt, Artificial Sequence
  Synthetic
uaugggauauguaauuggaagu

SEQ ID NO: 33077 - RNA, 23 nt, Artificial Sequence
  Synthetic
uuaugggauauguaauuggaagu

SEQ ID NO: 33078 - RNA, 24 nt, Artificial Sequence
  Synthetic
uuuaugggauauguaauuggaagu

SEQ ID NO: 33079 - RNA, 22 nt, Artificial Sequence
  Synthetic
aguauuuggugucuuuuggagu

SEQ ID NO: 33080 - RNA, 24 nt, Artificial Sequence
  Synthetic
ugaguauuuggugucuuuuggagu

SEQ ID NO: 33081 - RNA, 21 nt, Artificial Sequence
  Synthetic
uuggccagaggccaacaaggu

SEQ ID NO: 33082 - RNA, 22 nt, Artificial Sequence
  Synthetic
cuuggccagaggccaacaaggu

SEQ ID NO: 33083 - RNA, 23 nt, Artificial Sequence
  Synthetic
ccuuggccagaggccaacaaggu

SEQ ID NO: 33084 - RNA, 24 nt, Artificial Sequence
  Synthetic
cccuuggccagaggccaacaaggu

SEQ ID NO: 33085 - RNA, 18 nt, Artificial Sequence
  Synthetic
cuccacacggaggccuuu

SEQ ID NO: 33086 - RNA, 19 nt, Artificial Sequence
  Synthetic
ccuccacacggaggccuuu

SEQ ID NO: 33087 - RNA, 20 nt, Artificial Sequence
  Synthetic
cccuccacacggaggccuuu

SEQ ID NO: 33088 - RNA, 21 nt, Artificial Sequence
  Synthetic
ccccuccacacggaggccuuu

SEQ ID NO: 33089 - RNA, 22 nt, Artificial Sequence
  Synthetic
accccuccacacggaggccuuu

SEQ ID NO: 33090 - RNA, 23 nt, Artificial Sequence
  Synthetic
caccccuccacacggaggccuuu

SEQ ID NO: 33091 - RNA, 24 nt, Artificial Sequence
  Synthetic
ucaccccuccacacggaggccuuu

SEQ ID NO: 33092 - RNA, 21 nt, Artificial Sequence
  Synthetic
ucuugaguauuuggugucuuu

SEQ ID NO: 33093 - RNA, 22 nt, Artificial Sequence
  Synthetic
uucuugaguauuuggugucuuu

SEQ ID NO: 33094 - RNA, 24 nt, Artificial Sequence
  Synthetic
cguucuugaguauuuggugucuuu

SEQ ID NO: 33095 - RNA, 18 nt, Artificial Sequence
  Synthetic
cccguagcgcuucauuuu

SEQ ID NO: 33096 - RNA, 19 nt, Artificial Sequence
  Synthetic
ucccguagcgcuucauuuu

SEQ ID NO: 33097 - RNA, 20 nt, Artificial Sequence
  Synthetic
aucccguagcgcuucauuuu

SEQ ID NO: 33098 - RNA, 21 nt, Artificial Sequence
  Synthetic
caucccguagcgcuucauuuu

SEQ ID NO: 33099 - RNA, 22 nt, Artificial Sequence
  Synthetic
acaucccguagcgcuucauuuu

SEQ ID NO: 33100 - RNA, 23 nt, Artificial Sequence
  Synthetic
aacaucccguagcgcuucauuuu

SEQ ID NO: 33101 - RNA, 24 nt, Artificial Sequence
  Synthetic
aaacaucccguagcgcuucauuuu

SEQ ID NO: 33102 - RNA, 18 nt, Artificial Sequence
  Synthetic
ucaauuggccuguuaaca

SEQ ID NO: 33103 - RNA, 19 nt, Artificial Sequence
  Synthetic
aucaauuggccuguuaaca

SEQ ID NO: 33104 - RNA, 20 nt, Artificial Sequence
  Synthetic
aaucaauuggccuguuaaca

SEQ ID NO: 33105 - RNA, 18 nt, Artificial Sequence
  Synthetic
agcaacaugagggauaca

SEQ ID NO: 33106 - RNA, 19 nt, Artificial Sequence
  Synthetic
cagcaacaugagggauaca

SEQ ID NO: 33107 - RNA, 20 nt, Artificial Sequence
  Synthetic
acagcaacaugagggauaca

SEQ ID NO: 33108 - RNA, 18 nt, Artificial Sequence
  Synthetic
ucccaccuugugagucca

SEQ ID NO: 33109 - RNA, 19 nt, Artificial Sequence
  Synthetic
uucccaccuugugagucca

SEQ ID NO: 33110 - RNA, 20 nt, Artificial Sequence
  Synthetic
uuucccaccuugugagucca

SEQ ID NO: 33111 - RNA, 18 nt, Artificial Sequence
  Synthetic
uagaauacccgccuucca

SEQ ID NO: 33112 - RNA, 19 nt, Artificial Sequence
  Synthetic
auagaauacccgccuucca

SEQ ID NO: 33113 - RNA, 20 nt, Artificial Sequence
  Synthetic
uauagaauacccgccuucca

SEQ ID NO: 33114 - RNA, 18 nt, Artificial Sequence
  Synthetic
auggauauuuggaaaaga

SEQ ID NO: 33115 - RNA, 19 nt, Artificial Sequence
  Synthetic
aauggauauuuggaaaaga

SEQ ID NO: 33116 - RNA, 20 nt, Artificial Sequence
  Synthetic
aaauggauauuuggaaaaga

SEQ ID NO: 33117 - RNA, 18 nt, Artificial Sequence
  Synthetic
gaucgggaaggaauccua

SEQ ID NO: 33118 - RNA, 19 nt, Artificial Sequence
  Synthetic
ugaucgggaaggaauccua

SEQ ID NO: 33119 - RNA, 20 nt, Artificial Sequence
  Synthetic
gugaucgggaaggaauccua

SEQ ID NO: 33120 - RNA, 18 nt, Artificial Sequence
  Synthetic
cauaucccauaaaauuua

SEQ ID NO: 33121 - RNA, 19 nt, Artificial Sequence
  Synthetic
acauaucccauaaaauuua

SEQ ID NO: 33122 - RNA, 20 nt, Artificial Sequence
  Synthetic
uacauaucccauaaaauuua

SEQ ID NO: 33123 - RNA, 18 nt, Artificial Sequence
  Synthetic
ccguguggaggggugaac

SEQ ID NO: 33124 - RNA, 19 nt, Artificial Sequence
  Synthetic
uccguguggaggggugaac

SEQ ID NO: 33125 - RNA, 20 nt, Artificial Sequence
  Synthetic
cuccguguggaggggugaac

SEQ ID NO: 33126 - RNA, 18 nt, Artificial Sequence
  Synthetic
aauugagagaaguccacc

SEQ ID NO: 33127 - RNA, 19 nt, Artificial Sequence
  Synthetic
aaauugagagaaguccacc

SEQ ID NO: 33128 - RNA, 20 nt, Artificial Sequence
  Synthetic
aaaauugagagaaguccacc

SEQ ID NO: 33129 - RNA, 18 nt, Artificial Sequence
  Synthetic
ccuuguuggccucuggcc

SEQ ID NO: 33130 - RNA, 19 nt, Artificial Sequence
  Synthetic
accuuguuggccucuggcc

SEQ ID NO: 33131 - RNA, 20 nt, Artificial Sequence
  Synthetic
uaccuuguuggccucuggcc

SEQ ID NO: 33132 - RNA, 18 nt, Artificial Sequence
  Synthetic
  misc_feature (9)..(9): n is a, c, g, or u
cagcacagnauugcuugc

SEQ ID NO: 33133 - RNA, 19 nt, Artificial Sequence
  Synthetic
  misc_feature (10)..(10): n is a, c, g, or u
ccagcacagnauugcuugc

SEQ ID NO: 33134 - RNA, 20 nt, Artificial Sequence
  Synthetic
  misc_feature (11)..(11): n is a, c, g, or u
cccagcacagnauugcuugc

SEQ ID NO: 33135 - RNA, 18 nt, Artificial Sequence
  Synthetic
cauagcagcaggaugaag

SEQ ID NO: 33136 - RNA, 19 nt, Artificial Sequence
  Synthetic
gcauagcagcaggaugaag

SEQ ID NO: 33137 - RNA, 20 nt, Artificial Sequence
  Synthetic
ggcauagcagcaggaugaag

SEQ ID NO: 33138 - RNA, 18 nt, Artificial Sequence
  Synthetic
gaagaugaggcauagcag

SEQ ID NO: 33139 - RNA, 19 nt, Artificial Sequence
  Synthetic
agaagaugaggcauagcag

SEQ ID NO: 33140 - RNA, 20 nt, Artificial Sequence
  Synthetic
aagaagaugaggcauagcag

SEQ ID NO: 33141 - RNA, 18 nt, Artificial Sequence
  Synthetic
gauugguggaggcaggag

SEQ ID NO: 33142 - RNA, 19 nt, Artificial Sequence
  Synthetic
cgauugguggaggcaggag

SEQ ID NO: 33143 - RNA, 20 nt, Artificial Sequence
  Synthetic
acgauugguggaggcaggag

SEQ ID NO: 33144 - RNA, 18 nt, Artificial Sequence
  Synthetic
cuaaugguaaauauuuag

SEQ ID NO: 33145 - RNA, 19 nt, Artificial Sequence
  Synthetic
ucuaaugguaaauauuuag

SEQ ID NO: 33146 - RNA, 20 nt, Artificial Sequence
  Synthetic
gucuaaugguaaauauuuag

SEQ ID NO: 33147 - RNA, 21 nt, Artificial Sequence
  Synthetic
ugucuaaugguaaauauuuag

SEQ ID NO: 33148 - RNA, 22 nt, Artificial Sequence
  Synthetic
uugucuaaugguaaauauuuag

SEQ ID NO: 33149 - RNA, 23 nt, Artificial Sequence
  Synthetic
uuugucuaaugguaaauauuuag

SEQ ID NO: 33150 - RNA, 24 nt, Artificial Sequence
  Synthetic
cuuugucuaaugguaaauauuuag

SEQ ID NO: 33151 - RNA, 18 nt, Artificial Sequence
  Synthetic
cccgggaggggucguccg

SEQ ID NO: 33152 - RNA, 19 nt, Artificial Sequence
  Synthetic
ccccgggaggggucguccg

SEQ ID NO: 33153 - RNA, 20 nt, Artificial Sequence
  Synthetic
gccccgggaggggucguccg

SEQ ID NO: 33154 - RNA, 18 nt, Artificial Sequence
  Synthetic
cauauaaaggcauuaagg

SEQ ID NO: 33155 - RNA, 19 nt, Artificial Sequence
  Synthetic
gcauauaaaggcauuaagg

SEQ ID NO: 33156 - RNA, 20 nt, Artificial Sequence
  Synthetic
ugcauauaaaggcauuaagg

SEQ ID NO: 33157 - RNA, 18 nt, Artificial Sequence
  Synthetic
ugguggucuauaagcagg

SEQ ID NO: 33158 - RNA, 19 nt, Artificial Sequence
  Synthetic
uugguggucuauaagcagg

SEQ ID NO: 33159 - RNA, 20 nt, Artificial Sequence
  Synthetic
uuugguggucuauaagcagg

SEQ ID NO: 33160 - RNA, 18 nt, Artificial Sequence
  Synthetic
caaaaggccuccgugugg

SEQ ID NO: 33161 - RNA, 19 nt, Artificial Sequence
  Synthetic
ccaaaaggccuccgugugg

SEQ ID NO: 33162 - RNA, 20 nt, Artificial Sequence
  Synthetic
cccaaaaggccuccgugugg

SEQ ID NO: 33163 - RNA, 18 nt, Artificial Sequence
  Synthetic
ggauuuuguagagcuugg

SEQ ID NO: 33164 - RNA, 19 nt, Artificial Sequence
  Synthetic
gggauuuuguagagcuugg

SEQ ID NO: 33165 - RNA, 20 nt, Artificial Sequence
  Synthetic
ugggauuuuguagagcuugg

SEQ ID NO: 33166 - RNA, 18 nt, Artificial Sequence
  Synthetic
ugguauuugcucugaaug

SEQ ID NO: 33167 - RNA, 19 nt, Artificial Sequence
  Synthetic
uugguauuugcucugaaug

SEQ ID NO: 33168 - RNA, 20 nt, Artificial Sequence
  Synthetic
guugguauuugcucugaaug

SEQ ID NO: 33169 - RNA, 18 nt, Artificial Sequence
  Synthetic
guuuuguacagcaacaug

SEQ ID NO: 33170 - RNA, 19 nt, Artificial Sequence
  Synthetic
gguuuuguacagcaacaug

SEQ ID NO: 33171 - RNA, 20 nt, Artificial Sequence
  Synthetic
agguuuuguacagcaacaug

SEQ ID NO: 33172 - RNA, 18 nt, Artificial Sequence
  Synthetic
uuggaggacaggagauug

SEQ ID NO: 33173 - RNA, 19 nt, Artificial Sequence
  Synthetic
guuggaggacaggagauug

SEQ ID NO: 33174 - RNA, 20 nt, Artificial Sequence
  Synthetic
aguuggaggacaggagauug

SEQ ID NO: 33175 - RNA, 18 nt, Artificial Sequence
  Synthetic
ggagucgugcagguuuug

SEQ ID NO: 33176 - RNA, 19 nt, Artificial Sequence
  Synthetic
aggagucgugcagguuuug

SEQ ID NO: 33177 - RNA, 20 nt, Artificial Sequence
  Synthetic
caggagucgugcagguuuug

SEQ ID NO: 33178 - RNA, 18 nt, Artificial Sequence
  Synthetic
ugggauugaagucccaau

SEQ ID NO: 33179 - RNA, 19 nt, Artificial Sequence
  Synthetic
uugggauugaagucccaau

SEQ ID NO: 33180 - RNA, 20 nt, Artificial Sequence
  Synthetic
uuugggauugaagucccaau

SEQ ID NO: 33181 - RNA, 18 nt, Artificial Sequence
  Synthetic
aagaaggaguuugccaau

SEQ ID NO: 33182 - RNA, 19 nt, Artificial Sequence
  Synthetic
aaagaaggaguuugccaau

SEQ ID NO: 33183 - RNA, 20 nt, Artificial Sequence
  Synthetic
aaaagaaggaguuugccaau

SEQ ID NO: 33184 - RNA, 18 nt, Artificial Sequence
  Synthetic
agcccaagaugaugggau

SEQ ID NO: 33185 - RNA, 19 nt, Artificial Sequence
  Synthetic
aagcccaagaugaugggau

SEQ ID NO: 33186 - RNA, 20 nt, Artificial Sequence
  Synthetic
aaagcccaagaugaugggau

SEQ ID NO: 33187 - RNA, 18 nt, Artificial Sequence
  Synthetic
uagcuccaaauucuuuau

SEQ ID NO: 33188 - RNA, 19 nt, Artificial Sequence
  Synthetic
guagcuccaaauucuuuau

SEQ ID NO: 33189 - RNA, 20 nt, Artificial Sequence
  Synthetic
aguagcuccaaauucuuuau

SEQ ID NO: 33190 - RNA, 18 nt, Artificial Sequence
  Synthetic
gauuggagguuggggacu

SEQ ID NO: 33191 - RNA, 19 nt, Artificial Sequence
  Synthetic
ugauuggagguuggggacu

SEQ ID NO: 33192 - RNA, 20 nt, Artificial Sequence
  Synthetic
gugauuggagguuggggacu

SEQ ID NO: 33193 - RNA, 18 nt, Artificial Sequence
  Synthetic
cgagcaaaacaagcagcu

SEQ ID NO: 33194 - RNA, 19 nt, Artificial Sequence
  Synthetic
gcgagcaaaacaagcagcu

SEQ ID NO: 33195 - RNA, 20 nt, Artificial Sequence
  Synthetic
ugcgagcaaaacaagcagcu

SEQ ID NO: 33196 - RNA, 18 nt, Artificial Sequence
  Synthetic
ggauuguugguauuugcu

SEQ ID NO: 33197 - RNA, 19 nt, Artificial Sequence
  Synthetic
uggauuguugguauuugcu

SEQ ID NO: 33198 - RNA, 20 nt, Artificial Sequence
  Synthetic
cuggauuguugguauuugcu

SEQ ID NO: 33199 - RNA, 18 nt, Artificial Sequence
  Synthetic
uaauugaccaccaaaucu

SEQ ID NO: 33200 - RNA, 19 nt, Artificial Sequence
  Synthetic
auaauugaccaccaaaucu

SEQ ID NO: 33201 - RNA, 20 nt, Artificial Sequence
  Synthetic
cauaauugaccaccaaaucu

SEQ ID NO: 33202 - RNA, 18 nt, Artificial Sequence
  Synthetic
caaugaucagaggacucu

SEQ ID NO: 33203 - RNA, 19 nt, Artificial Sequence
  Synthetic
acaaugaucagaggacucu

SEQ ID NO: 33204 - RNA, 20 nt, Artificial Sequence
  Synthetic
aacaaugaucagaggacucu

SEQ ID NO: 33205 - RNA, 18 nt, Artificial Sequence
  Synthetic
ggccaagccccaaccagu

SEQ ID NO: 33206 - RNA, 19 nt, Artificial Sequence
  Synthetic
uggccaagccccaaccagu

SEQ ID NO: 33207 - RNA, 20 nt, Artificial Sequence
  Synthetic
auggccaagccccaaccagu

SEQ ID NO: 33208 - RNA, 18 nt, Artificial Sequence
  Synthetic
  misc_feature (1)..(1): n is a, c, g, or u
nauacaggccccugacuu

SEQ ID NO: 33209 - RNA, 19 nt, Artificial Sequence
  Synthetic
  misc_feature (2)..(2): n is a, c, g, or u
anauacaggccccugacuu

SEQ ID NO: 33210 - RNA, 20 nt, Artificial Sequence
  Synthetic
  misc_feature (3)..(3): n is a, c, g, or u
aanauacaggccccugacuu

SEQ ID NO: 33211 - RNA, 18 nt, Artificial Sequence
  Synthetic
cguaaaguuucccaccuu

SEQ ID NO: 33212 - RNA, 19 nt, Artificial Sequence
  Synthetic
ccguaaaguuucccaccuu

SEQ ID NO: 33213 - RNA, 20 nt, Artificial Sequence
  Synthetic
cccguaaaguuucccaccuu

SEQ ID NO: 33214 - RNA, 18 nt, Artificial Sequence
  Synthetic
aaugauuaacuacauuuu

SEQ ID NO: 33215 - RNA, 19 nt, Artificial Sequence
  Synthetic
uaaugauuaacuacauuuu

SEQ ID NO: 33216 - RNA, 20 nt, Artificial Sequence
  Synthetic
guaaugauuaacuacauuuu

SEQ ID NO: 33217 - RNA, 18 nt, Artificial Sequence
  Synthetic
cuggccaaggguccuuuu

SEQ ID NO: 33218 - RNA, 19 nt, Artificial Sequence
  Synthetic
ucuggccaaggguccuuuu

SEQ ID NO: 33219 - RNA, 20 nt, Artificial Sequence
  Synthetic
cucuggccaaggguccuuuu

SEQ ID NO: 33220 - RNA, 18 nt, Artificial Sequence
  Synthetic
gcuaggcugugcugccaa

SEQ ID NO: 33221 - RNA, 19 nt, Artificial Sequence
  Synthetic
ugcuaggcugugcugccaa

SEQ ID NO: 33222 - RNA, 20 nt, Artificial Sequence
  Synthetic
cugcuaggcugugcugccaa

SEQ ID NO: 33223 - RNA, 18 nt, Artificial Sequence
  Synthetic
agugggaagaauuaggca

SEQ ID NO: 33224 - RNA, 19 nt, Artificial Sequence
  Synthetic
gagugggaagaauuaggca

SEQ ID NO: 33225 - RNA, 20 nt, Artificial Sequence
  Synthetic
ugagugggaagaauuaggca

SEQ ID NO: 33226 - RNA, 18 nt, Artificial Sequence
  Synthetic
  misc_feature (2)..(2): n is a, c, g, or u
cnuaacaaaacaaaaaga

SEQ ID NO: 33227 - RNA, 19 nt, Artificial Sequence
  Synthetic
  misc_feature (3)..(3): n is a, c, g, or u
ccnuaacaaaacaaaaaga

SEQ ID NO: 33228 - RNA, 20 nt, Artificial Sequence
  Synthetic
  misc_feature (4)..(4): n is a, c, g, or u
accnuaacaaaacaaaaaga

SEQ ID NO: 33229 - RNA, 18 nt, Artificial Sequence
  Synthetic
guuauuccuuaaauuuua

SEQ ID NO: 33230 - RNA, 19 nt, Artificial Sequence
  Synthetic
gguuauuccuuaaauuuua

SEQ ID NO: 33231 - RNA, 20 nt, Artificial Sequence
  Synthetic
ggguuauuccuuaaauuuua

SEQ ID NO: 33232 - RNA, 18 nt, Artificial Sequence
  Synthetic
  misc_feature (16)..(16): n is a, c, g, or u
guugaugacucuagcnac

SEQ ID NO: 33233 - RNA, 19 nt, Artificial Sequence
  Synthetic
  misc_feature (17)..(17): n is a, c, g, or u
aguugaugacucuagcnac

SEQ ID NO: 33234 - RNA, 20 nt, Artificial Sequence
  Synthetic
  misc_feature (18)..(18): n is a, c, g, or u
gaguugaugacucuagcnac

SEQ ID NO: 33235 - RNA, 18 nt, Artificial Sequence
  Synthetic
cuuggguggcuuuagggc

SEQ ID NO: 33236 - RNA, 19 nt, Artificial Sequence
  Synthetic
ccuuggguggcuuuagggc

SEQ ID NO: 33237 - RNA, 20 nt, Artificial Sequence
  Synthetic
gccuuggguggcuuuagggc

SEQ ID NO: 33238 - RNA, 18 nt, Artificial Sequence
  Synthetic
  misc_feature (12)..(12): n is a, c, g, or u
aggcaagcaauncugugc

SEQ ID NO: 33239 - RNA, 19 nt, Artificial Sequence
  Synthetic
  misc_feature (13)..(13): n is a, c, g, or u
caggcaagcaauncugugc

SEQ ID NO: 33240 - RNA, 20 nt, Artificial Sequence
  Synthetic
  misc_feature (14)..(14): n is a, c, g, or u
ucaggcaagcaauncugugc

SEQ ID NO: 33241 - RNA, 18 nt, Artificial Sequence
  Synthetic
uuuccaccagcaauccuc

SEQ ID NO: 33242 - RNA, 19 nt, Artificial Sequence
  Synthetic
cuuuccaccagcaauccuc

SEQ ID NO: 33243 - RNA, 20 nt, Artificial Sequence
  Synthetic
ccuuuccaccagcaauccuc

SEQ ID NO: 33244 - RNA, 18 nt, Artificial Sequence
  Synthetic
ugcugguggcuccaguuc

SEQ ID NO: 33245 - RNA, 19 nt, Artificial Sequence
  Synthetic
cugcugguggcuccaguuc

SEQ ID NO: 33246 - RNA, 20 nt, Artificial Sequence
  Synthetic
ccugcugguggcuccaguuc

SEQ ID NO: 33247 - RNA, 18 nt, Artificial Sequence
  Synthetic
uuacauacccuuuggaag

SEQ ID NO: 33248 - RNA, 19 nt, Artificial Sequence
  Synthetic
uuuacauacccuuuggaag

SEQ ID NO: 33249 - RNA, 20 nt, Artificial Sequence
  Synthetic
auuuacauacccuuuggaag

SEQ ID NO: 33250 - RNA, 18 nt, Artificial Sequence
  Synthetic
  misc_feature (8)..(8): n is a, c, g, or u
aagcaauncugugcuggg

SEQ ID NO: 33251 - RNA, 19 nt, Artificial Sequence
  Synthetic
  misc_feature (9)..(9): n is a, c, g, or u
caagcaauncugugcuggg

SEQ ID NO: 33252 - RNA, 20 nt, Artificial Sequence
  Synthetic
  misc_feature (10)..(10): n is a, c, g, or u
gcaagcaauncugugcuggg

SEQ ID NO: 33253 - RNA, 18 nt, Artificial Sequence
  Synthetic
guguuuuugcugaguggg

SEQ ID NO: 33254 - RNA, 19 nt, Artificial Sequence
  Synthetic
uguguuuuugcugaguggg

SEQ ID NO: 33255 - RNA, 20 nt, Artificial Sequence
  Synthetic
cuguguuuuugcugaguggg

SEQ ID NO: 33256 - RNA, 18 nt, Artificial Sequence
  Synthetic
  misc_feature (12)..(12): n is a, c, g, or u
augacucuagcnaccugg

SEQ ID NO: 33257 - RNA, 19 nt, Artificial Sequence
  Synthetic
  misc_feature (13)..(13): n is a, c, g, or u
gaugacucuagcnaccugg

SEQ ID NO: 33258 - RNA, 20 nt, Artificial Sequence
  Synthetic
  misc_feature (14)..(14): n is a, c, g, or u
ugaugacucuagcnaccugg

SEQ ID NO: 33259 - RNA, 18 nt, Artificial Sequence
  Synthetic
aagaauuuggagcuacug

SEQ ID NO: 33260 - RNA, 19 nt, Artificial Sequence
  Synthetic
aaagaauuuggagcuacug

SEQ ID NO: 33261 - RNA, 20 nt, Artificial Sequence
  Synthetic
uaaagaauuuggagcuacug

SEQ ID NO: 33262 - RNA, 18 nt, Artificial Sequence
  Synthetic
caacgaauaacuggucug

SEQ ID NO: 33263 - RNA, 19 nt, Artificial Sequence
  Synthetic
ucaacgaauaacuggucug

SEQ ID NO: 33264 - RNA, 20 nt, Artificial Sequence
  Synthetic
gucaacgaauaacuggucug

SEQ ID NO: 33265 - RNA, 18 nt, Artificial Sequence
  Synthetic
ucaaggacuguguuuuug

SEQ ID NO: 33266 - RNA, 19 nt, Artificial Sequence
  Synthetic
uucaaggacuguguuuuug

SEQ ID NO: 33267 - RNA, 20 nt, Artificial Sequence
  Synthetic
cuucaaggacuguguuuuug

SEQ ID NO: 33268 - RNA, 18 nt, Artificial Sequence
  Synthetic
aauuauguuaauacuaau

SEQ ID NO: 33269 - RNA, 19 nt, Artificial Sequence
  Synthetic
caauuauguuaauacuaau

SEQ ID NO: 33270 - RNA, 20 nt, Artificial Sequence
  Synthetic
ucaauuauguuaauacuaau

SEQ ID NO: 33271 - RNA, 18 nt, Artificial Sequence
  Synthetic
acauggagaacaucacau

SEQ ID NO: 33272 - RNA, 19 nt, Artificial Sequence
  Synthetic
aacauggagaacaucacau

SEQ ID NO: 33273 - RNA, 20 nt, Artificial Sequence
  Synthetic
gaacauggagaacaucacau

SEQ ID NO: 33274 - RNA, 18 nt, Artificial Sequence
  Synthetic
accaauuuucuuuugucu

SEQ ID NO: 33275 - RNA, 19 nt, Artificial Sequence
  Synthetic
uaccaauuuucuuuugucu

SEQ ID NO: 33276 - RNA, 20 nt, Artificial Sequence
  Synthetic
uuaccaauuuucuuuugucu

SEQ ID NO: 33277 - RNA, 18 nt, Artificial Sequence
  Synthetic
ggauauguaauuggaagu

SEQ ID NO: 33278 - RNA, 19 nt, Artificial Sequence
  Synthetic
gggauauguaauuggaagu

SEQ ID NO: 33279 - RNA, 20 nt, Artificial Sequence
  Synthetic
ugggauauguaauuggaagu

SEQ ID NO: 33280 - RNA, 18 nt, Artificial Sequence
  Synthetic
uuuggugucuuuuggagu

SEQ ID NO: 33281 - RNA, 19 nt, Artificial Sequence
  Synthetic
auuuggugucuuuuggagu

SEQ ID NO: 33282 - RNA, 20 nt, Artificial Sequence
  Synthetic
uauuuggugucuuuuggagu

SEQ ID NO: 33283 - RNA, 18 nt, Artificial Sequence
  Synthetic
gccagaggccaacaaggu

SEQ ID NO: 33284 - RNA, 19 nt, Artificial Sequence
  Synthetic
ggccagaggccaacaaggu

SEQ ID NO: 33285 - RNA, 20 nt, Artificial Sequence
  Synthetic
uggccagaggccaacaaggu

SEQ ID NO: 33286 - RNA, 18 nt, Artificial Sequence
  Synthetic
ugaguauuuggugucuuu

SEQ ID NO: 33287 - RNA, 19 nt, Artificial Sequence
  Synthetic
uugaguauuuggugucuuu

SEQ ID NO: 33288 - RNA, 20 nt, Artificial Sequence
  Synthetic
cuugaguauuuggugucuuu

SEQ ID NO: 33289 - RNA, 18 nt, Artificial Sequence
  Synthetic
aaaagucagaaggcaaaa

SEQ ID NO: 33290 - RNA, 19 nt, Artificial Sequence
  Synthetic
aaaaagucagaaggcaaaa

SEQ ID NO: 33291 - RNA, 20 nt, Artificial Sequence
  Synthetic
gaaaaagucagaaggcaaaa

SEQ ID NO: 33292 - RNA, 21 nt, Artificial Sequence
  Synthetic
ggaaaaagucagaaggcaaaa

SEQ ID NO: 33293 - RNA, 22 nt, Artificial Sequence
  Synthetic
gggaaaaagucagaaggcaaaa

SEQ ID NO: 33294 - RNA, 23 nt, Artificial Sequence
  Synthetic
cgggaaaaagucagaaggcaaaa

SEQ ID NO: 33295 - RNA, 24 nt, Artificial Sequence
  Synthetic
acgggaaaaagucagaaggcaaaa

SEQ ID NO: 33296 - RNA, 18 nt, Artificial Sequence
  Synthetic
ggcacucccccuagaaaa

SEQ ID NO: 33297 - RNA, 19 nt, Artificial Sequence
  Synthetic
gggcacucccccuagaaaa

SEQ ID NO: 33298 - RNA, 20 nt, Artificial Sequence
  Synthetic
cgggcacucccccuagaaaa

SEQ ID NO: 33299 - RNA, 21 nt, Artificial Sequence
  Synthetic
acgggcacucccccuagaaaa

SEQ ID NO: 33300 - RNA, 22 nt, Artificial Sequence
  Synthetic
cacgggcacucccccuagaaaa

SEQ ID NO: 33301 - RNA, 23 nt, Artificial Sequence
  Synthetic
acacgggcacucccccuagaaaa

SEQ ID NO: 33302 - RNA, 24 nt, Artificial Sequence
  Synthetic
cacacgggcacucccccuagaaaa

SEQ ID NO: 33303 - RNA, 18 nt, Artificial Sequence
  Synthetic
uauauggugacccacaaa

SEQ ID NO: 33304 - RNA, 19 nt, Artificial Sequence
  Synthetic
guauauggugacccacaaa

SEQ ID NO: 33305 - RNA, 20 nt, Artificial Sequence
  Synthetic
aguauauggugacccacaaa

SEQ ID NO: 33306 - RNA, 21 nt, Artificial Sequence
  Synthetic
aaguauauggugacccacaaa

SEQ ID NO: 33307 - RNA, 22 nt, Artificial Sequence
  Synthetic
caaguauauggugacccacaaa

SEQ ID NO: 33308 - RNA, 23 nt, Artificial Sequence
  Synthetic
ccaaguauauggugacccacaaa

SEQ ID NO: 33309 - RNA, 24 nt, Artificial Sequence
  Synthetic
cccaaguauauggugacccacaaa

SEQ ID NO: 33310 - RNA, 18 nt, Artificial Sequence
  Synthetic
acaaauggcacuaguaaa

SEQ ID NO: 33311 - RNA, 19 nt, Artificial Sequence
  Synthetic
aacaaauggcacuaguaaa

SEQ ID NO: 33312 - RNA, 20 nt, Artificial Sequence
  Synthetic
gaacaaauggcacuaguaaa

SEQ ID NO: 33313 - RNA, 21 nt, Artificial Sequence
  Synthetic
ugaacaaauggcacuaguaaa

SEQ ID NO: 33314 - RNA, 22 nt, Artificial Sequence
  Synthetic
cugaacaaauggcacuaguaaa

SEQ ID NO: 33315 - RNA, 23 nt, Artificial Sequence
  Synthetic
acugaacaaauggcacuaguaaa

SEQ ID NO: 33316 - RNA, 24 nt, Artificial Sequence
  Synthetic
cacugaacaaauggcacuaguaaa

SEQ ID NO: 33317 - RNA, 18 nt, Artificial Sequence
  Synthetic
acggggagaccgcguaaa

SEQ ID NO: 33318 - RNA, 19 nt, Artificial Sequence
  Synthetic
gacggggagaccgcguaaa

SEQ ID NO: 33319 - RNA, 20 nt, Artificial Sequence
  Synthetic
agacggggagaccgcguaaa

SEQ ID NO: 33320 - RNA, 21 nt, Artificial Sequence
  Synthetic
cagacggggagaccgcguaaa

SEQ ID NO: 33321 - RNA, 22 nt, Artificial Sequence
  Synthetic
acagacggggagaccgcguaaa

SEQ ID NO: 33322 - RNA, 23 nt, Artificial Sequence
  Synthetic
aacagacggggagaccgcguaaa

SEQ ID NO: 33323 - RNA, 24 nt, Artificial Sequence
  Synthetic
gaacagacggggagaccgcguaaa

SEQ ID NO: 33324 - RNA, 18 nt, Artificial Sequence
  Synthetic
guaaccacauuggguaaa

SEQ ID NO: 33325 - RNA, 19 nt, Artificial Sequence
  Synthetic
gguaaccacauuggguaaa

SEQ ID NO: 33326 - RNA, 20 nt, Artificial Sequence
  Synthetic
ggguaaccacauuggguaaa

SEQ ID NO: 33327 - RNA, 21 nt, Artificial Sequence
  Synthetic
aggguaaccacauuggguaaa

SEQ ID NO: 33328 - RNA, 22 nt, Artificial Sequence
  Synthetic
caggguaaccacauuggguaaa

SEQ ID NO: 33329 - RNA, 23 nt, Artificial Sequence
  Synthetic
gcaggguaaccacauuggguaaa

SEQ ID NO: 33330 - RNA, 24 nt, Artificial Sequence
  Synthetic
ggcaggguaaccacauuggguaaa

SEQ ID NO: 33331 - RNA, 18 nt, Artificial Sequence
  Synthetic
auguauacccaaagacaa

SEQ ID NO: 33332 - RNA, 19 nt, Artificial Sequence
  Synthetic
gauguauacccaaagacaa

SEQ ID NO: 33333 - RNA, 20 nt, Artificial Sequence
  Synthetic
agauguauacccaaagacaa

SEQ ID NO: 33334 - RNA, 21 nt, Artificial Sequence
  Synthetic
uagauguauacccaaagacaa

SEQ ID NO: 33335 - RNA, 22 nt, Artificial Sequence
  Synthetic
uuagauguauacccaaagacaa

SEQ ID NO: 33336 - RNA, 23 nt, Artificial Sequence
  Synthetic
uuuagauguauacccaaagacaa

SEQ ID NO: 33337 - RNA, 24 nt, Artificial Sequence
  Synthetic
guuuagauguauacccaaagacaa

SEQ ID NO: 33338 - RNA, 18 nt, Artificial Sequence
  Synthetic
ccuggaaucagaggacaa

SEQ ID NO: 33339 - RNA, 19 nt, Artificial Sequence
  Synthetic
uccuggaaucagaggacaa

SEQ ID NO: 33340 - RNA, 20 nt, Artificial Sequence
  Synthetic
auccuggaaucagaggacaa

SEQ ID NO: 33341 - RNA, 21 nt, Artificial Sequence
  Synthetic
gauccuggaaucagaggacaa

SEQ ID NO: 33342 - RNA, 22 nt, Artificial Sequence
  Synthetic
ggauccuggaaucagaggacaa

SEQ ID NO: 33343 - RNA, 23 nt, Artificial Sequence
  Synthetic
aggauccuggaaucagaggacaa

SEQ ID NO: 33344 - RNA, 24 nt, Artificial Sequence
  Synthetic
gaggauccuggaaucagaggacaa

SEQ ID NO: 33345 - RNA, 18 nt, Artificial Sequence
  Synthetic
acuaguaaacugagccaa

SEQ ID NO: 33346 - RNA, 19 nt, Artificial Sequence
  Synthetic
cacuaguaaacugagccaa

SEQ ID NO: 33347 - RNA, 20 nt, Artificial Sequence
  Synthetic
gcacuaguaaacugagccaa

SEQ ID NO: 33348 - RNA, 21 nt, Artificial Sequence
  Synthetic
ggcacuaguaaacugagccaa

SEQ ID NO: 33349 - RNA, 22 nt, Artificial Sequence
  Synthetic
uggcacuaguaaacugagccaa

SEQ ID NO: 33350 - RNA, 23 nt, Artificial Sequence
  Synthetic
auggcacuaguaaacugagccaa

SEQ ID NO: 33351 - RNA, 24 nt, Artificial Sequence
  Synthetic
aauggcacuaguaaacugagccaa

SEQ ID NO: 33352 - RNA, 18 nt, Artificial Sequence
  Synthetic
uaaacugagccaagagaa

SEQ ID NO: 33353 - RNA, 19 nt, Artificial Sequence
  Synthetic
guaaacugagccaagagaa

SEQ ID NO: 33354 - RNA, 20 nt, Artificial Sequence
  Synthetic
aguaaacugagccaagagaa

SEQ ID NO: 33355 - RNA, 21 nt, Artificial Sequence
  Synthetic
uaguaaacugagccaagagaa

SEQ ID NO: 33356 - RNA, 22 nt, Artificial Sequence
  Synthetic
cuaguaaacugagccaagagaa

SEQ ID NO: 33357 - RNA, 23 nt, Artificial Sequence
  Synthetic
acuaguaaacugagccaagagaa

SEQ ID NO: 33358 - RNA, 24 nt, Artificial Sequence
  Synthetic
cacuaguaaacugagccaagagaa

SEQ ID NO: 33359 - RNA, 18 nt, Artificial Sequence
  Synthetic
ggaacggcagacggagaa

SEQ ID NO: 33360 - RNA, 19 nt, Artificial Sequence
  Synthetic
aggaacggcagacggagaa

SEQ ID NO: 33361 - RNA, 20 nt, Artificial Sequence
  Synthetic
caggaacggcagacggagaa

SEQ ID NO: 33362 - RNA, 21 nt, Artificial Sequence
  Synthetic
gcaggaacggcagacggagaa

SEQ ID NO: 33363 - RNA, 22 nt, Artificial Sequence
  Synthetic
ggcaggaacggcagacggagaa

SEQ ID NO: 33364 - RNA, 23 nt, Artificial Sequence
  Synthetic
cggcaggaacggcagacggagaa

SEQ ID NO: 33365 - RNA, 24 nt, Artificial Sequence
  Synthetic
ucggcaggaacggcagacggagaa

SEQ ID NO: 33366 - RNA, 18 nt, Artificial Sequence
  Synthetic
gcaaauggauauuuggaa

SEQ ID NO: 33367 - RNA, 19 nt, Artificial Sequence
  Synthetic
ugcaaauggauauuuggaa

SEQ ID NO: 33368 - RNA, 20 nt, Artificial Sequence
  Synthetic
augcaaauggauauuuggaa

SEQ ID NO: 33369 - RNA, 21 nt, Artificial Sequence
  Synthetic
gaugcaaauggauauuuggaa

SEQ ID NO: 33370 - RNA, 22 nt, Artificial Sequence
  Synthetic
ugaugcaaauggauauuuggaa

SEQ ID NO: 33371 - RNA, 23 nt, Artificial Sequence
  Synthetic
uugaugcaaauggauauuuggaa

SEQ ID NO: 33372 - RNA, 24 nt, Artificial Sequence
  Synthetic
cuugaugcaaauggauauuuggaa

SEQ ID NO: 33373 - RNA, 18 nt, Artificial Sequence
  Synthetic
gcauagcagcaggaugaa

SEQ ID NO: 33374 - RNA, 19 nt, Artificial Sequence
  Synthetic
ggcauagcagcaggaugaa

SEQ ID NO: 33375 - RNA, 20 nt, Artificial Sequence
  Synthetic
aggcauagcagcaggaugaa

SEQ ID NO: 33376 - RNA, 21 nt, Artificial Sequence
  Synthetic
gaggcauagcagcaggaugaa

SEQ ID NO: 33377 - RNA, 22 nt, Artificial Sequence
  Synthetic
ugaggcauagcagcaggaugaa

SEQ ID NO: 33378 - RNA, 23 nt, Artificial Sequence
  Synthetic
augaggcauagcagcaggaugaa

SEQ ID NO: 33379 - RNA, 24 nt, Artificial Sequence
  Synthetic
gaugaggcauagcagcaggaugaa

SEQ ID NO: 33380 - RNA, 18 nt, Artificial Sequence
  Synthetic
ggguucacuaucccugaa

SEQ ID NO: 33381 - RNA, 19 nt, Artificial Sequence
  Synthetic
aggguucacuaucccugaa

SEQ ID NO: 33382 - RNA, 20 nt, Artificial Sequence
  Synthetic
caggguucacuaucccugaa

SEQ ID NO: 33383 - RNA, 21 nt, Artificial Sequence
  Synthetic
acaggguucacuaucccugaa

SEQ ID NO: 33384 - RNA, 22 nt, Artificial Sequence
  Synthetic
aacaggguucacuaucccugaa

SEQ ID NO: 33385 - RNA, 23 nt, Artificial Sequence
  Synthetic
gaacaggguucacuaucccugaa

SEQ ID NO: 33386 - RNA, 24 nt, Artificial Sequence
  Synthetic
ggaacaggguucacuaucccugaa

SEQ ID NO: 33387 - RNA, 18 nt, Artificial Sequence
  Synthetic
guaacgugcagaggugaa

SEQ ID NO: 33388 - RNA, 19 nt, Artificial Sequence
  Synthetic
uguaacgugcagaggugaa

SEQ ID NO: 33389 - RNA, 20 nt, Artificial Sequence
  Synthetic
auguaacgugcagaggugaa

SEQ ID NO: 33390 - RNA, 21 nt, Artificial Sequence
  Synthetic
cauguaacgugcagaggugaa

SEQ ID NO: 33391 - RNA, 22 nt, Artificial Sequence
  Synthetic
ccauguaacgugcagaggugaa

SEQ ID NO: 33392 - RNA, 23 nt, Artificial Sequence
  Synthetic
uccauguaacgugcagaggugaa

SEQ ID NO: 33393 - RNA, 24 nt, Artificial Sequence
  Synthetic
uuccauguaacgugcagaggugaa

SEQ ID NO: 33394 - RNA, 18 nt, Artificial Sequence
  Synthetic
  misc_feature (16)..(16): n is a, c, g, or u
uugguaacagcgguanaa

SEQ ID NO: 33395 - RNA, 19 nt, Artificial Sequence
  Synthetic
  misc_feature (17)..(17): n is a, c, g, or u
auugguaacagcgguanaa

SEQ ID NO: 33396 - RNA, 20 nt, Artificial Sequence
  Synthetic
  misc_feature (18)..(18): n is a, c, g, or u
aauugguaacagcgguanaa

SEQ ID NO: 33397 - RNA, 21 nt, Artificial Sequence
  Synthetic
  misc_feature (19)..(19): n is a, c, g, or u
aaauugguaacagcgguanaa

SEQ ID NO: 33398 - RNA, 22 nt, Artificial Sequence
  Synthetic
  misc_feature (20)..(20): n is a, c, g, or u
aaaauugguaacagcgguanaa

SEQ ID NO: 33399 - RNA, 23 nt, Artificial Sequence
  Synthetic
  misc_feature (21)..(21): n is a, c, g, or u
gaaaauugguaacagcgguanaa

SEQ ID NO: 33400 - RNA, 24 nt, Artificial Sequence
  Synthetic
  misc_feature (22)..(22): n is a, c, g, or u
agaaaauugguaacagcgguanaa

SEQ ID NO: 33401 - RNA, 18 nt, Artificial Sequence
  Synthetic
gguaaccacauuggguaa

SEQ ID NO: 33402 - RNA, 19 nt, Artificial Sequence
  Synthetic
ggguaaccacauuggguaa

SEQ ID NO: 33403 - RNA, 20 nt, Artificial Sequence
  Synthetic
aggguaaccacauuggguaa

SEQ ID NO: 33404 - RNA, 21 nt, Artificial Sequence
  Synthetic
caggguaaccacauuggguaa

SEQ ID NO: 33405 - RNA, 22 nt, Artificial Sequence
  Synthetic
gcaggguaaccacauuggguaa

SEQ ID NO: 33406 - RNA, 23 nt, Artificial Sequence
  Synthetic
ggcaggguaaccacauuggguaa

SEQ ID NO: 33407 - RNA, 24 nt, Artificial Sequence
  Synthetic
aggcaggguaaccacauuggguaa

SEQ ID NO: 33408 - RNA, 18 nt, Artificial Sequence
  Synthetic
aaucaauuggccuguuaa

SEQ ID NO: 33409 - RNA, 19 nt, Artificial Sequence
  Synthetic
caaucaauuggccuguuaa

SEQ ID NO: 33410 - RNA, 20 nt, Artificial Sequence
  Synthetic
ccaaucaauuggccuguuaa

SEQ ID NO: 33411 - RNA, 21 nt, Artificial Sequence
  Synthetic
uccaaucaauuggccuguuaa

SEQ ID NO: 33412 - RNA, 22 nt, Artificial Sequence
  Synthetic
uuccaaucaauuggccuguuaa

SEQ ID NO: 33413 - RNA, 23 nt, Artificial Sequence
  Synthetic
uuuccaaucaauuggccuguuaa

SEQ ID NO: 33414 - RNA, 24 nt, Artificial Sequence
  Synthetic
cuuuccaaucaauuggccuguuaa

SEQ ID NO: 33415 - RNA, 18 nt, Artificial Sequence
  Synthetic
gcugacgggacguaaaca

SEQ ID NO: 33416 - RNA, 19 nt, Artificial Sequence
  Synthetic
cgcugacgggacguaaaca

SEQ ID NO: 33417 - RNA, 20 nt, Artificial Sequence
  Synthetic
gcgcugacgggacguaaaca

SEQ ID NO: 33418 - RNA, 21 nt, Artificial Sequence
  Synthetic
agcgcugacgggacguaaaca

SEQ ID NO: 33419 - RNA, 22 nt, Artificial Sequence
  Synthetic
cagcgcugacgggacguaaaca

SEQ ID NO: 33420 - RNA, 23 nt, Artificial Sequence
  Synthetic
ucagcgcugacgggacguaaaca

SEQ ID NO: 33421 - RNA, 24 nt, Artificial Sequence
  Synthetic
uucagcgcugacgggacguaaaca

SEQ ID NO: 33422 - RNA, 18 nt, Artificial Sequence
  Synthetic
guccaaggaauacuaaca

SEQ ID NO: 33423 - RNA, 19 nt, Artificial Sequence
  Synthetic
aguccaaggaauacuaaca

SEQ ID NO: 33424 - RNA, 20 nt, Artificial Sequence
  Synthetic
gaguccaaggaauacuaaca

SEQ ID NO: 33425 - RNA, 21 nt, Artificial Sequence
  Synthetic
ugaguccaaggaauacuaaca

SEQ ID NO: 33426 - RNA, 22 nt, Artificial Sequence
  Synthetic
gugaguccaaggaauacuaaca

SEQ ID NO: 33427 - RNA, 23 nt, Artificial Sequence
  Synthetic
ugugaguccaaggaauacuaaca

SEQ ID NO: 33428 - RNA, 24 nt, Artificial Sequence
  Synthetic
uugugaguccaaggaauacuaaca

SEQ ID NO: 33429 - RNA, 18 nt, Artificial Sequence
  Synthetic
auagcugaaagccagaca

SEQ ID NO: 33430 - RNA, 19 nt, Artificial Sequence
  Synthetic
uauagcugaaagccagaca

SEQ ID NO: 33431 - RNA, 20 nt, Artificial Sequence
  Synthetic
auauagcugaaagccagaca

SEQ ID NO: 33432 - RNA, 21 nt, Artificial Sequence
  Synthetic
  misc_feature (1)..(1): n is a, c, g, or u
nauauagcugaaagccagaca

SEQ ID NO: 33433 - RNA, 22 nt, Artificial Sequence
  Synthetic
  misc_feature (2)..(2): n is a, c, g, or u
cnauauagcugaaagccagaca

SEQ ID NO: 33434 - RNA, 23 nt, Artificial Sequence
  Synthetic
  misc_feature (3)..(3): n is a, c, g, or u
ucnauauagcugaaagccagaca

SEQ ID NO: 33435 - RNA, 24 nt, Artificial Sequence
  Synthetic
  misc_feature (4)..(4): n is a, c, g, or u
aucnauauagcugaaagccagaca

SEQ ID NO: 33436 - RNA, 18 nt, Artificial Sequence
  Synthetic
guucauguauuguuuaca

SEQ ID NO: 33437 - RNA, 19 nt, Artificial Sequence
  Synthetic
gguucauguauuguuuaca

SEQ ID NO: 33438 - RNA, 20 nt, Artificial Sequence
  Synthetic
agguucauguauuguuuaca

SEQ ID NO: 33439 - RNA, 21 nt, Artificial Sequence
  Synthetic
aagguucauguauuguuuaca

SEQ ID NO: 33440 - RNA, 22 nt, Artificial Sequence
  Synthetic
aaagguucauguauuguuuaca

SEQ ID NO: 33441 - RNA, 23 nt, Artificial Sequence
  Synthetic
uaaagguucauguauuguuuaca

SEQ ID NO: 33442 - RNA, 24 nt, Artificial Sequence
  Synthetic
guaaagguucauguauuguuuaca

SEQ ID NO: 33443 - RNA, 18 nt, Artificial Sequence
  Synthetic
auggccaagccccaacca

SEQ ID NO: 33444 - RNA, 19 nt, Artificial Sequence
  Synthetic
gauggccaagccccaacca

SEQ ID NO: 33445 - RNA, 20 nt, Artificial Sequence
  Synthetic
cgauggccaagccccaacca

SEQ ID NO: 33446 - RNA, 21 nt, Artificial Sequence
  Synthetic
ccgauggccaagccccaacca

SEQ ID NO: 33447 - RNA, 22 nt, Artificial Sequence
  Synthetic
  misc_feature (1)..(1): n is a, c, g, or u
nccgauggccaagccccaacca

SEQ ID NO: 33448 - RNA, 23 nt, Artificial Sequence
  Synthetic
  misc_feature (2)..(2): n is a, c, g, or u
gnccgauggccaagccccaacca

SEQ ID NO: 33449 - RNA, 24 nt, Artificial Sequence
  Synthetic
  misc_feature (3)..(3): n is a, c, g, or u
ugnccgauggccaagccccaacca

SEQ ID NO: 33450 - RNA, 18 nt, Artificial Sequence
  Synthetic
ggaaagcccuacgaacca

SEQ ID NO: 33451 - RNA, 19 nt, Artificial Sequence
  Synthetic
gggaaagcccuacgaacca

SEQ ID NO: 33452 - RNA, 20 nt, Artificial Sequence
  Synthetic
ggggaaagcccuacgaacca

SEQ ID NO: 33453 - RNA, 21 nt, Artificial Sequence
  Synthetic
gggggaaagcccuacgaacca

SEQ ID NO: 33454 - RNA, 22 nt, Artificial Sequence
  Synthetic
ugggggaaagcccuacgaacca

SEQ ID NO: 33455 - RNA, 23 nt, Artificial Sequence
  Synthetic
gugggggaaagcccuacgaacca

SEQ ID NO: 33456 - RNA, 24 nt, Artificial Sequence
  Synthetic
agugggggaaagcccuacgaacca

SEQ ID NO: 33457 - RNA, 18 nt, Artificial Sequence
  Synthetic
agcacagccuagcagcca

SEQ ID NO: 33458 - RNA, 19 nt, Artificial Sequence
  Synthetic
cagcacagccuagcagcca

SEQ ID NO: 33459 - RNA, 20 nt, Artificial Sequence
  Synthetic
gcagcacagccuagcagcca

SEQ ID NO: 33460 - RNA, 21 nt, Artificial Sequence
  Synthetic
ggcagcacagccuagcagcca

SEQ ID NO: 33461 - RNA, 22 nt, Artificial Sequence
  Synthetic
uggcagcacagccuagcagcca

SEQ ID NO: 33462 - RNA, 23 nt, Artificial Sequence
  Synthetic
uuggcagcacagccuagcagcca

SEQ ID NO: 33463 - RNA, 24 nt, Artificial Sequence
  Synthetic
guuggcagcacagccuagcagcca

SEQ ID NO: 33464 - RNA, 18 nt, Artificial Sequence
  Synthetic
cauuggguaaaaggagca

SEQ ID NO: 33465 - RNA, 19 nt, Artificial Sequence
  Synthetic
acauuggguaaaaggagca

SEQ ID NO: 33466 - RNA, 20 nt, Artificial Sequence
  Synthetic
cacauuggguaaaaggagca

SEQ ID NO: 33467 - RNA, 21 nt, Artificial Sequence
  Synthetic
ccacauuggguaaaaggagca

SEQ ID NO: 33468 - RNA, 22 nt, Artificial Sequence
  Synthetic
accacauuggguaaaaggagca

SEQ ID NO: 33469 - RNA, 23 nt, Artificial Sequence
  Synthetic
aaccacauuggguaaaaggagca

SEQ ID NO: 33470 - RNA, 24 nt, Artificial Sequence
  Synthetic
uaaccacauuggguaaaaggagca

SEQ ID NO: 33471 - RNA, 18 nt, Artificial Sequence
  Synthetic
ccgcaguauggaucggca

SEQ ID NO: 33472 - RNA, 19 nt, Artificial Sequence
  Synthetic
uccgcaguauggaucggca

SEQ ID NO: 33473 - RNA, 20 nt, Artificial Sequence
  Synthetic
uuccgcaguauggaucggca

SEQ ID NO: 33474 - RNA, 21 nt, Artificial Sequence
  Synthetic
guuccgcaguauggaucggca

SEQ ID NO: 33475 - RNA, 22 nt, Artificial Sequence
  Synthetic
aguuccgcaguauggaucggca

SEQ ID NO: 33476 - RNA, 23 nt, Artificial Sequence
  Synthetic
gaguuccgcaguauggaucggca

SEQ ID NO: 33477 - RNA, 24 nt, Artificial Sequence
  Synthetic
ggaguuccgcaguauggaucggca

SEQ ID NO: 33478 - RNA, 18 nt, Artificial Sequence
  Synthetic
ucgaggauccuggaauca

SEQ ID NO: 33479 - RNA, 19 nt, Artificial Sequence
  Synthetic
gucgaggauccuggaauca

SEQ ID NO: 33480 - RNA, 20 nt, Artificial Sequence
  Synthetic
ggucgaggauccuggaauca

SEQ ID NO: 33481 - RNA, 21 nt, Artificial Sequence
  Synthetic
uggucgaggauccuggaauca

SEQ ID NO: 33482 - RNA, 22 nt, Artificial Sequence
  Synthetic
guggucgaggauccuggaauca

SEQ ID NO: 33483 - RNA, 23 nt, Artificial Sequence
  Synthetic
gguggucgaggauccuggaauca

SEQ ID NO: 33484 - RNA, 24 nt, Artificial Sequence
  Synthetic
ugguggucgaggauccuggaauca

SEQ ID NO: 33485 - RNA, 18 nt, Artificial Sequence
  Synthetic
ugaggcgaacaaugauca

SEQ ID NO: 33486 - RNA, 19 nt, Artificial Sequence
  Synthetic
gugaggcgaacaaugauca

SEQ ID NO: 33487 - RNA, 20 nt, Artificial Sequence
  Synthetic
ggugaggcgaacaaugauca

SEQ ID NO: 33488 - RNA, 21 nt, Artificial Sequence
  Synthetic
uggugaggcgaacaaugauca

SEQ ID NO: 33489 - RNA, 22 nt, Artificial Sequence
  Synthetic
auggugaggcgaacaaugauca

SEQ ID NO: 33490 - RNA, 23 nt, Artificial Sequence
  Synthetic
uauggugaggcgaacaaugauca

SEQ ID NO: 33491 - RNA, 24 nt, Artificial Sequence
  Synthetic
guauggugaggcgaacaaugauca

SEQ ID NO: 33492 - RNA, 18 nt, Artificial Sequence
  Synthetic
ucucucccaaaaguaaga

SEQ ID NO: 33493 - RNA, 19 nt, Artificial Sequence
  Synthetic
uucucucccaaaaguaaga

SEQ ID NO: 33494 - RNA, 20 nt, Artificial Sequence
  Synthetic
uuucucucccaaaaguaaga

SEQ ID NO: 33495 - RNA, 21 nt, Artificial Sequence
  Synthetic
guuucucucccaaaaguaaga

SEQ ID NO: 33496 - RNA, 22 nt, Artificial Sequence
  Synthetic
gguuucucucccaaaaguaaga

SEQ ID NO: 33497 - RNA, 23 nt, Artificial Sequence
  Synthetic
cgguuucucucccaaaaguaaga

SEQ ID NO: 33498 - RNA, 24 nt, Artificial Sequence
  Synthetic
acgguuucucucccaaaaguaaga

SEQ ID NO: 33499 - RNA, 18 nt, Artificial Sequence
  Synthetic
gagaagaucacgaacaga

SEQ ID NO: 33500 - RNA, 19 nt, Artificial Sequence
  Synthetic
cgagaagaucacgaacaga

SEQ ID NO: 33501 - RNA, 20 nt, Artificial Sequence
  Synthetic
ucgagaagaucacgaacaga

SEQ ID NO: 33502 - RNA, 21 nt, Artificial Sequence
  Synthetic
gucgagaagaucacgaacaga

SEQ ID NO: 33503 - RNA, 22 nt, Artificial Sequence
  Synthetic
ugucgagaagaucacgaacaga

SEQ ID NO: 33504 - RNA, 23 nt, Artificial Sequence
  Synthetic
gugucgagaagaucacgaacaga

SEQ ID NO: 33505 - RNA, 24 nt, Artificial Sequence
  Synthetic
ggugucgagaagaucacgaacaga

SEQ ID NO: 33506 - RNA, 18 nt, Artificial Sequence
  Synthetic
cagaugagaaggaacaga

SEQ ID NO: 33507 - RNA, 19 nt, Artificial Sequence
  Synthetic
gcagaugagaaggaacaga

SEQ ID NO: 33508 - RNA, 20 nt, Artificial Sequence
  Synthetic
ggcagaugagaaggaacaga

SEQ ID NO: 33509 - RNA, 21 nt, Artificial Sequence
  Synthetic
cggcagaugagaaggaacaga

SEQ ID NO: 33510 - RNA, 22 nt, Artificial Sequence
  Synthetic
ccggcagaugagaaggaacaga

SEQ ID NO: 33511 - RNA, 23 nt, Artificial Sequence
  Synthetic
uccggcagaugagaaggaacaga

SEQ ID NO: 33512 - RNA, 24 nt, Artificial Sequence
  Synthetic
guccggcagaugagaaggaacaga

SEQ ID NO: 33513 - RNA, 18 nt, Artificial Sequence
  Synthetic
gcaaacacuuggcacaga

SEQ ID NO: 33514 - RNA, 19 nt, Artificial Sequence
  Synthetic
agcaaacacuuggcacaga

SEQ ID NO: 33515 - RNA, 20 nt, Artificial Sequence
  Synthetic
cagcaaacacuuggcacaga

SEQ ID NO: 33516 - RNA, 21 nt, Artificial Sequence
  Synthetic
ucagcaaacacuuggcacaga

SEQ ID NO: 33517 - RNA, 22 nt, Artificial Sequence
  Synthetic
gucagcaaacacuuggcacaga

SEQ ID NO: 33518 - RNA, 23 nt, Artificial Sequence
  Synthetic
cgucagcaaacacuuggcacaga

SEQ ID NO: 33519 - RNA, 24 nt, Artificial Sequence
  Synthetic
gcgucagcaaacacuuggcacaga

SEQ ID NO: 33520 - RNA, 18 nt, Artificial Sequence
  Synthetic
gucggcaggaacggcaga

SEQ ID NO: 33521 - RNA, 19 nt, Artificial Sequence
  Synthetic
ggucggcaggaacggcaga

SEQ ID NO: 33522 - RNA, 20 nt, Artificial Sequence
  Synthetic
uggucggcaggaacggcaga

SEQ ID NO: 33523 - RNA, 21 nt, Artificial Sequence
  Synthetic
guggucggcaggaacggcaga

SEQ ID NO: 33524 - RNA, 22 nt, Artificial Sequence
  Synthetic
cguggucggcaggaacggcaga

SEQ ID NO: 33525 - RNA, 23 nt, Artificial Sequence
  Synthetic
ccguggucggcaggaacggcaga

SEQ ID NO: 33526 - RNA, 24 nt, Artificial Sequence
  Synthetic
cccguggucggcaggaacggcaga

SEQ ID NO: 33527 - RNA, 18 nt, Artificial Sequence
  Synthetic
cucuuagugguggagaga

SEQ ID NO: 33528 - RNA, 19 nt, Artificial Sequence
  Synthetic
ucucuuagugguggagaga

SEQ ID NO: 33529 - RNA, 20 nt, Artificial Sequence
  Synthetic
gucucuuagugguggagaga

SEQ ID NO: 33530 - RNA, 21 nt, Artificial Sequence
  Synthetic
ugucucuuagugguggagaga

SEQ ID NO: 33531 - RNA, 22 nt, Artificial Sequence
  Synthetic
cugucucuuagugguggagaga

SEQ ID NO: 33532 - RNA, 23 nt, Artificial Sequence
  Synthetic
acugucucuuagugguggagaga

SEQ ID NO: 33533 - RNA, 24 nt, Artificial Sequence
  Synthetic
gacugucucuuagugguggagaga

SEQ ID NO: 33534 - RNA, 18 nt, Artificial Sequence
  Synthetic
ggauguauauuuccgaga

SEQ ID NO: 33535 - RNA, 19 nt, Artificial Sequence
  Synthetic
aggauguauauuuccgaga

SEQ ID NO: 33536 - RNA, 20 nt, Artificial Sequence
  Synthetic
aaggauguauauuuccgaga

SEQ ID NO: 33537 - RNA, 21 nt, Artificial Sequence
  Synthetic
aaaggauguauauuuccgaga

SEQ ID NO: 33538 - RNA, 22 nt, Artificial Sequence
  Synthetic
gaaaggauguauauuuccgaga

SEQ ID NO: 33539 - RNA, 23 nt, Artificial Sequence
  Synthetic
ggaaaggauguauauuuccgaga

SEQ ID NO: 33540 - RNA, 24 nt, Artificial Sequence
  Synthetic
uggaaaggauguauauuuccgaga

SEQ ID NO: 33541 - RNA, 18 nt, Artificial Sequence
  Synthetic
aggaacggcagacggaga

SEQ ID NO: 33542 - RNA, 19 nt, Artificial Sequence
  Synthetic
caggaacggcagacggaga

SEQ ID NO: 33543 - RNA, 20 nt, Artificial Sequence
  Synthetic
gcaggaacggcagacggaga

SEQ ID NO: 33544 - RNA, 21 nt, Artificial Sequence
  Synthetic
ggcaggaacggcagacggaga

SEQ ID NO: 33545 - RNA, 22 nt, Artificial Sequence
  Synthetic
cggcaggaacggcagacggaga

SEQ ID NO: 33546 - RNA, 23 nt, Artificial Sequence
  Synthetic
ucggcaggaacggcagacggaga

SEQ ID NO: 33547 - RNA, 24 nt, Artificial Sequence
  Synthetic
gucggcaggaacggcagacggaga

SEQ ID NO: 33548 - RNA, 18 nt, Artificial Sequence
  Synthetic
acgguccggcagaugaga

SEQ ID NO: 33549 - RNA, 19 nt, Artificial Sequence
  Synthetic
cacgguccggcagaugaga

SEQ ID NO: 33550 - RNA, 20 nt, Artificial Sequence
  Synthetic
acacgguccggcagaugaga

SEQ ID NO: 33551 - RNA, 21 nt, Artificial Sequence
  Synthetic
cacacgguccggcagaugaga

SEQ ID NO: 33552 - RNA, 22 nt, Artificial Sequence
  Synthetic
gcacacgguccggcagaugaga

SEQ ID NO: 33553 - RNA, 23 nt, Artificial Sequence
  Synthetic
ugcacacgguccggcagaugaga

SEQ ID NO: 33554 - RNA, 24 nt, Artificial Sequence
  Synthetic
gugcacacgguccggcagaugaga

SEQ ID NO: 33555 - RNA, 18 nt, Artificial Sequence
  Synthetic
uguuagugugcccugaga

SEQ ID NO: 33556 - RNA, 19 nt, Artificial Sequence
  Synthetic
uuguuagugugcccugaga

SEQ ID NO: 33557 - RNA, 20 nt, Artificial Sequence
  Synthetic
guuguuagugugcccugaga

SEQ ID NO: 33558 - RNA, 21 nt, Artificial Sequence
  Synthetic
aguuguuagugugcccugaga

SEQ ID NO: 33559 - RNA, 22 nt, Artificial Sequence
  Synthetic
aaguuguuagugugcccugaga

SEQ ID NO: 33560 - RNA, 23 nt, Artificial Sequence
  Synthetic
aaaguuguuagugugcccugaga

SEQ ID NO: 33561 - RNA, 24 nt, Artificial Sequence
  Synthetic
caaaguuguuagugugcccugaga

SEQ ID NO: 33562 - RNA, 18 nt, Artificial Sequence
  Synthetic
ucuucugcgacgcggcga

SEQ ID NO: 33563 - RNA, 19 nt, Artificial Sequence
  Synthetic
aucuucugcgacgcggcga

SEQ ID NO: 33564 - RNA, 20 nt, Artificial Sequence
  Synthetic
gaucuucugcgacgcggcga

SEQ ID NO: 33565 - RNA, 21 nt, Artificial Sequence
  Synthetic
agaucuucugcgacgcggcga

SEQ ID NO: 33566 - RNA, 22 nt, Artificial Sequence
  Synthetic
cagaucuucugcgacgcggcga

SEQ ID NO: 33567 - RNA, 23 nt, Artificial Sequence
  Synthetic
gcagaucuucugcgacgcggcga

SEQ ID NO: 33568 - RNA, 24 nt, Artificial Sequence
  Synthetic
ugcagaucuucugcgacgcggcga

SEQ ID NO: 33569 - RNA, 18 nt, Artificial Sequence
  Synthetic
agacggagaagggggcga

SEQ ID NO: 33570 - RNA, 19 nt, Artificial Sequence
  Synthetic
cagacggagaagggggcga

SEQ ID NO: 33571 - RNA, 20 nt, Artificial Sequence
  Synthetic
gcagacggagaagggggcga

SEQ ID NO: 33572 - RNA, 21 nt, Artificial Sequence
  Synthetic
ggcagacggagaagggggcga

SEQ ID NO: 33573 - RNA, 22 nt, Artificial Sequence
  Synthetic
cggcagacggagaagggggcga

SEQ ID NO: 33574 - RNA, 23 nt, Artificial Sequence
  Synthetic
acggcagacggagaagggggcga

SEQ ID NO: 33575 - RNA, 24 nt, Artificial Sequence
  Synthetic
aacggcagacggagaagggggcga

SEQ ID NO: 33576 - RNA, 18 nt, Artificial Sequence
  Synthetic
gguucuuuccccacucga

SEQ ID NO: 33577 - RNA, 19 nt, Artificial Sequence
  Synthetic
agguucuuuccccacucga

SEQ ID NO: 33578 - RNA, 20 nt, Artificial Sequence
  Synthetic
aagguucuuuccccacucga

SEQ ID NO: 33579 - RNA, 21 nt, Artificial Sequence
  Synthetic
aaagguucuuuccccacucga

SEQ ID NO: 33580 - RNA, 22 nt, Artificial Sequence
  Synthetic
gaaagguucuuuccccacucga

SEQ ID NO: 33581 - RNA, 23 nt, Artificial Sequence
  Synthetic
ggaaagguucuuuccccacucga

SEQ ID NO: 33582 - RNA, 24 nt, Artificial Sequence
  Synthetic
uggaaagguucuuuccccacucga

SEQ ID NO: 33583 - RNA, 18 nt, Artificial Sequence
  Synthetic
gagggaguucuucuucga

SEQ ID NO: 33584 - RNA, 19 nt, Artificial Sequence
  Synthetic
cgagggaguucuucuucga

SEQ ID NO: 33585 - RNA, 20 nt, Artificial Sequence
  Synthetic
gcgagggaguucuucuucga

SEQ ID NO: 33586 - RNA, 21 nt, Artificial Sequence
  Synthetic
ggcgagggaguucuucuucga

SEQ ID NO: 33587 - RNA, 22 nt, Artificial Sequence
  Synthetic
aggcgagggaguucuucuucga

SEQ ID NO: 33588 - RNA, 23 nt, Artificial Sequence
  Synthetic
gaggcgagggaguucuucuucga

SEQ ID NO: 33589 - RNA, 24 nt, Artificial Sequence
  Synthetic
cgaggcgagggaguucuucuucga

SEQ ID NO: 33590 - RNA, 18 nt, Artificial Sequence
  Synthetic
ccaggacaaguuggagga

SEQ ID NO: 33591 - RNA, 19 nt, Artificial Sequence
  Synthetic
gccaggacaaguuggagga

SEQ ID NO: 33592 - RNA, 20 nt, Artificial Sequence
  Synthetic
agccaggacaaguuggagga

SEQ ID NO: 33593 - RNA, 21 nt, Artificial Sequence
  Synthetic
uagccaggacaaguuggagga

SEQ ID NO: 33594 - RNA, 22 nt, Artificial Sequence
  Synthetic
auagccaggacaaguuggagga

SEQ ID NO: 33595 - RNA, 23 nt, Artificial Sequence
  Synthetic
gauagccaggacaaguuggagga

SEQ ID NO: 33596 - RNA, 24 nt, Artificial Sequence
  Synthetic
cgauagccaggacaaguuggagga

SEQ ID NO: 33597 - RNA, 18 nt, Artificial Sequence
  Synthetic
ccggaaguguugauagga

SEQ ID NO: 33598 - RNA, 19 nt, Artificial Sequence
  Synthetic
uccggaaguguugauagga

SEQ ID NO: 33599 - RNA, 20 nt, Artificial Sequence
  Synthetic
cuccggaaguguugauagga

SEQ ID NO: 33600 - RNA, 21 nt, Artificial Sequence
  Synthetic
ucuccggaaguguugauagga

SEQ ID NO: 33601 - RNA, 22 nt, Artificial Sequence
  Synthetic
gucuccggaaguguugauagga

SEQ ID NO: 33602 - RNA, 23 nt, Artificial Sequence
  Synthetic
agucuccggaaguguugauagga

SEQ ID NO: 33603 - RNA, 24 nt, Artificial Sequence
  Synthetic
uagucuccggaaguguugauagga

SEQ ID NO: 33604 - RNA, 18 nt, Artificial Sequence
  Synthetic
ugagccaagagaaacgga

SEQ ID NO: 33605 - RNA, 19 nt, Artificial Sequence
  Synthetic
cugagccaagagaaacgga

SEQ ID NO: 33606 - RNA, 20 nt, Artificial Sequence
  Synthetic
acugagccaagagaaacgga

SEQ ID NO: 33607 - RNA, 21 nt, Artificial Sequence
  Synthetic
aacugagccaagagaaacgga

SEQ ID NO: 33608 - RNA, 22 nt, Artificial Sequence
  Synthetic
aaacugagccaagagaaacgga

SEQ ID NO: 33609 - RNA, 23 nt, Artificial Sequence
  Synthetic
uaaacugagccaagagaaacgga

SEQ ID NO: 33610 - RNA, 24 nt, Artificial Sequence
  Synthetic
guaaacugagccaagagaaacgga

SEQ ID NO: 33611 - RNA, 18 nt, Artificial Sequence
  Synthetic
aagcccaagaugauggga

SEQ ID NO: 33612 - RNA, 19 nt, Artificial Sequence
  Synthetic
aaagcccaagaugauggga

SEQ ID NO: 33613 - RNA, 20 nt, Artificial Sequence
  Synthetic
gaaagcccaagaugauggga

SEQ ID NO: 33614 - RNA, 21 nt, Artificial Sequence
  Synthetic
cgaaagcccaagaugauggga

SEQ ID NO: 33615 - RNA, 22 nt, Artificial Sequence
  Synthetic
gcgaaagcccaagaugauggga

SEQ ID NO: 33616 - RNA, 23 nt, Artificial Sequence
  Synthetic
ugcgaaagcccaagaugauggga

SEQ ID NO: 33617 - RNA, 24 nt, Artificial Sequence
  Synthetic
uugcgaaagcccaagaugauggga

SEQ ID NO: 33618 - RNA, 18 nt, Artificial Sequence
  Synthetic
caaggguccuuuuuggga

SEQ ID NO: 33619 - RNA, 19 nt, Artificial Sequence
  Synthetic
ccaaggguccuuuuuggga

SEQ ID NO: 33620 - RNA, 20 nt, Artificial Sequence
  Synthetic
gccaaggguccuuuuuggga

SEQ ID NO: 33621 - RNA, 21 nt, Artificial Sequence
  Synthetic
ggccaaggguccuuuuuggga

SEQ ID NO: 33622 - RNA, 22 nt, Artificial Sequence
  Synthetic
uggccaaggguccuuuuuggga

SEQ ID NO: 33623 - RNA, 23 nt, Artificial Sequence
  Synthetic
cuggccaaggguccuuuuuggga

SEQ ID NO: 33624 - RNA, 24 nt, Artificial Sequence
  Synthetic
ucuggccaaggguccuuuuuggga

SEQ ID NO: 33625 - RNA, 18 nt, Artificial Sequence
  Synthetic
cgcuggauucagcgcuga

SEQ ID NO: 33626 - RNA, 19 nt, Artificial Sequence
  Synthetic
ccgcuggauucagcgcuga

SEQ ID NO: 33627 - RNA, 20 nt, Artificial Sequence
  Synthetic
uccgcuggauucagcgcuga

SEQ ID NO: 33628 - RNA, 21 nt, Artificial Sequence
  Synthetic
guccgcuggauucagcgcuga

SEQ ID NO: 33629 - RNA, 22 nt, Artificial Sequence
  Synthetic
cguccgcuggauucagcgcuga

SEQ ID NO: 33630 - RNA, 23 nt, Artificial Sequence
  Synthetic
ucguccgcuggauucagcgcuga

SEQ ID NO: 33631 - RNA, 24 nt, Artificial Sequence
  Synthetic
gucguccgcuggauucagcgcuga

SEQ ID NO: 33632 - RNA, 18 nt, Artificial Sequence
  Synthetic
caggagauuggugaguga

SEQ ID NO: 33633 - RNA, 19 nt, Artificial Sequence
  Synthetic
acaggagauuggugaguga

SEQ ID NO: 33634 - RNA, 20 nt, Artificial Sequence
  Synthetic
gacaggagauuggugaguga

SEQ ID NO: 33635 - RNA, 21 nt, Artificial Sequence
  Synthetic
ggacaggagauuggugaguga

SEQ ID NO: 33636 - RNA, 22 nt, Artificial Sequence
  Synthetic
aggacaggagauuggugaguga

SEQ ID NO: 33637 - RNA, 23 nt, Artificial Sequence
  Synthetic
gaggacaggagauuggugaguga

SEQ ID NO: 33638 - RNA, 24 nt, Artificial Sequence
  Synthetic
ggaggacaggagauuggugaguga

SEQ ID NO: 33639 - RNA, 18 nt, Artificial Sequence
  Synthetic
gcuggguccaacugguga

SEQ ID NO: 33640 - RNA, 19 nt, Artificial Sequence
  Synthetic
ugcuggguccaacugguga

SEQ ID NO: 33641 - RNA, 20 nt, Artificial Sequence
  Synthetic
augcuggguccaacugguga

SEQ ID NO: 33642 - RNA, 21 nt, Artificial Sequence
  Synthetic
aaugcuggguccaacugguga

SEQ ID NO: 33643 - RNA, 22 nt, Artificial Sequence
  Synthetic
gaaugcuggguccaacugguga

SEQ ID NO: 33644 - RNA, 23 nt, Artificial Sequence
  Synthetic
ugaaugcuggguccaacugguga

SEQ ID NO: 33645 - RNA, 24 nt, Artificial Sequence
  Synthetic
cugaaugcuggguccaacugguga

SEQ ID NO: 33646 - RNA, 18 nt, Artificial Sequence
  Synthetic
guuucucauuuacuguga

SEQ ID NO: 33647 - RNA, 19 nt, Artificial Sequence
  Synthetic
cguuucucauuuacuguga

SEQ ID NO: 33648 - RNA, 20 nt, Artificial Sequence
  Synthetic
ucguuucucauuuacuguga

SEQ ID NO: 33649 - RNA, 21 nt, Artificial Sequence
  Synthetic
uucguuucucauuuacuguga

SEQ ID NO: 33650 - RNA, 22 nt, Artificial Sequence
  Synthetic
cuucguuucucauuuacuguga

SEQ ID NO: 33651 - RNA, 23 nt, Artificial Sequence
  Synthetic
ucuucguuucucauuuacuguga

SEQ ID NO: 33652 - RNA, 24 nt, Artificial Sequence
  Synthetic
aucuucguuucucauuuacuguga

SEQ ID NO: 33653 - RNA, 18 nt, Artificial Sequence
  Synthetic
cucccccuagaaaauuga

SEQ ID NO: 33654 - RNA, 19 nt, Artificial Sequence
  Synthetic
acucccccuagaaaauuga

SEQ ID NO: 33655 - RNA, 20 nt, Artificial Sequence
  Synthetic
cacucccccuagaaaauuga

SEQ ID NO: 33656 - RNA, 21 nt, Artificial Sequence
  Synthetic
gcacucccccuagaaaauuga

SEQ ID NO: 33657 - RNA, 22 nt, Artificial Sequence
  Synthetic
ggcacucccccuagaaaauuga

SEQ ID NO: 33658 - RNA, 23 nt, Artificial Sequence
  Synthetic
gggcacucccccuagaaaauuga

SEQ ID NO: 33659 - RNA, 24 nt, Artificial Sequence
  Synthetic
cgggcacucccccuagaaaauuga

SEQ ID NO: 33660 - RNA, 18 nt, Artificial Sequence
  Synthetic
  misc_feature (17)..(17): n is a, c, g, or u
auugguaacagcgguana

SEQ ID NO: 33661 - RNA, 19 nt, Artificial Sequence
  Synthetic
  misc_feature (18)..(18): n is a, c, g, or u
aauugguaacagcgguana

SEQ ID NO: 33662 - RNA, 20 nt, Artificial Sequence
  Synthetic
  misc_feature (19)..(19): n is a, c, g, or u
aaauugguaacagcgguana

SEQ ID NO: 33663 - RNA, 21 nt, Artificial Sequence
  Synthetic
  misc_feature (20)..(20): n is a, c, g, or u
aaaauugguaacagcgguana

SEQ ID NO: 33664 - RNA, 22 nt, Artificial Sequence
  Synthetic
  misc_feature (21)..(21): n is a, c, g, or u
gaaaauugguaacagcgguana

SEQ ID NO: 33665 - RNA, 23 nt, Artificial Sequence
  Synthetic
  misc_feature (22)..(22): n is a, c, g, or u
agaaaauugguaacagcgguana

SEQ ID NO: 33666 - RNA, 24 nt, Artificial Sequence
  Synthetic
  misc_feature (23)..(23): n is a, c, g, or u
aagaaaauugguaacagcgguana

SEQ ID NO: 33667 - RNA, 18 nt, Artificial Sequence
  Synthetic
agacggggagaccgcgua

SEQ ID NO: 33668 - RNA, 19 nt, Artificial Sequence
  Synthetic
cagacggggagaccgcgua

SEQ ID NO: 33669 - RNA, 20 nt, Artificial Sequence
  Synthetic
acagacggggagaccgcgua

SEQ ID NO: 33670 - RNA, 21 nt, Artificial Sequence
  Synthetic
aacagacggggagaccgcgua

SEQ ID NO: 33671 - RNA, 22 nt, Artificial Sequence
  Synthetic
gaacagacggggagaccgcgua

SEQ ID NO: 33672 - RNA, 23 nt, Artificial Sequence
  Synthetic
ggaacagacggggagaccgcgua

SEQ ID NO: 33673 - RNA, 24 nt, Artificial Sequence
  Synthetic
aggaacagacggggagaccgcgua

SEQ ID NO: 33674 - RNA, 18 nt, Artificial Sequence
  Synthetic
agguucauguauuguuua

SEQ ID NO: 33675 - RNA, 19 nt, Artificial Sequence
  Synthetic
aagguucauguauuguuua

SEQ ID NO: 33676 - RNA, 20 nt, Artificial Sequence
  Synthetic
aaagguucauguauuguuua

SEQ ID NO: 33677 - RNA, 21 nt, Artificial Sequence
  Synthetic
uaaagguucauguauuguuua

SEQ ID NO: 33678 - RNA, 22 nt, Artificial Sequence
  Synthetic
guaaagguucauguauuguuua

SEQ ID NO: 33679 - RNA, 23 nt, Artificial Sequence
  Synthetic
gguaaagguucauguauuguuua

SEQ ID NO: 33680 - RNA, 24 nt, Artificial Sequence
  Synthetic
ggguaaagguucauguauuguuua

SEQ ID NO: 33681 - RNA, 18 nt, Artificial Sequence
  Synthetic
aagucagaaggcaaaaac

SEQ ID NO: 33682 - RNA, 19 nt, Artificial Sequence
  Synthetic
aaagucagaaggcaaaaac

SEQ ID NO: 33683 - RNA, 20 nt, Artificial Sequence
  Synthetic
aaaagucagaaggcaaaaac

SEQ ID NO: 33684 - RNA, 21 nt, Artificial Sequence
  Synthetic
aaaaagucagaaggcaaaaac

SEQ ID NO: 33685 - RNA, 22 nt, Artificial Sequence
  Synthetic
gaaaaagucagaaggcaaaaac

SEQ ID NO: 33686 - RNA, 23 nt, Artificial Sequence
  Synthetic
ggaaaaagucagaaggcaaaaac

SEQ ID NO: 33687 - RNA, 24 nt, Artificial Sequence
  Synthetic
gggaaaaagucagaaggcaaaaac

SEQ ID NO: 33688 - RNA, 18 nt, Artificial Sequence
  Synthetic
uaguccagaagaaccaac

SEQ ID NO: 33689 - RNA, 19 nt, Artificial Sequence
  Synthetic
auaguccagaagaaccaac

SEQ ID NO: 33690 - RNA, 20 nt, Artificial Sequence
  Synthetic
gauaguccagaagaaccaac

SEQ ID NO: 33691 - RNA, 21 nt, Artificial Sequence
  Synthetic
ugauaguccagaagaaccaac

SEQ ID NO: 33692 - RNA, 22 nt, Artificial Sequence
  Synthetic
uugauaguccagaagaaccaac

SEQ ID NO: 33693 - RNA, 23 nt, Artificial Sequence
  Synthetic
cuugauaguccagaagaaccaac

SEQ ID NO: 33694 - RNA, 24 nt, Artificial Sequence
  Synthetic
ccuugauaguccagaagaaccaac

SEQ ID NO: 33695 - RNA, 18 nt, Artificial Sequence
  Synthetic
aagguuuuguacagcaac

SEQ ID NO: 33696 - RNA, 19 nt, Artificial Sequence
  Synthetic
gaagguuuuguacagcaac

SEQ ID NO: 33697 - RNA, 20 nt, Artificial Sequence
  Synthetic
cgaagguuuuguacagcaac

SEQ ID NO: 33698 - RNA, 21 nt, Artificial Sequence
  Synthetic
ccgaagguuuuguacagcaac

SEQ ID NO: 33699 - RNA, 22 nt, Artificial Sequence
  Synthetic
uccgaagguuuuguacagcaac

SEQ ID NO: 33700 - RNA, 23 nt, Artificial Sequence
  Synthetic
guccgaagguuuuguacagcaac

SEQ ID NO: 33701 - RNA, 24 nt, Artificial Sequence
  Synthetic
cguccgaagguuuuguacagcaac

SEQ ID NO: 33702 - RNA, 18 nt, Artificial Sequence
  Synthetic
gugaggauucuugucaac

SEQ ID NO: 33703 - RNA, 19 nt, Artificial Sequence
  Synthetic
ugugaggauucuugucaac

SEQ ID NO: 33704 - RNA, 20 nt, Artificial Sequence
  Synthetic
uugugaggauucuugucaac

SEQ ID NO: 33705 - RNA, 21 nt, Artificial Sequence
  Synthetic
auugugaggauucuugucaac

SEQ ID NO: 33706 - RNA, 22 nt, Artificial Sequence
  Synthetic
uauugugaggauucuugucaac

SEQ ID NO: 33707 - RNA, 23 nt, Artificial Sequence
  Synthetic
guauugugaggauucuugucaac

SEQ ID NO: 33708 - RNA, 24 nt, Artificial Sequence
  Synthetic
gguauugugaggauucuugucaac

SEQ ID NO: 33709 - RNA, 18 nt, Artificial Sequence
  Synthetic
  misc_feature (8)..(8): n is a, c, g, or u
gaacagunggacaugaac

SEQ ID NO: 33710 - RNA, 19 nt, Artificial Sequence
  Synthetic
  misc_feature (9)..(9): n is a, c, g, or u
ugaacagunggacaugaac

SEQ ID NO: 33711 - RNA, 20 nt, Artificial Sequence
  Synthetic
  misc_feature (10)..(10): n is a, c, g, or u
uugaacagunggacaugaac

SEQ ID NO: 33712 - RNA, 21 nt, Artificial Sequence
  Synthetic
  misc_feature (11)..(11): n is a, c, g, or u
cuugaacagunggacaugaac

SEQ ID NO: 33713 - RNA, 22 nt, Artificial Sequence
  Synthetic
  misc_feature (12)..(12): n is a, c, g, or u
gcuugaacagunggacaugaac

SEQ ID NO: 33714 - RNA, 23 nt, Artificial Sequence
  Synthetic
  misc_feature (13)..(13): n is a, c, g, or u
ggcuugaacagunggacaugaac

SEQ ID NO: 33715 - RNA, 24 nt, Artificial Sequence
  Synthetic
  misc_feature (14)..(14): n is a, c, g, or u
aggcuugaacagunggacaugaac

SEQ ID NO: 33716 - RNA, 18 nt, Artificial Sequence
  Synthetic
gguucacuaucccugaac

SEQ ID NO: 33717 - RNA, 19 nt, Artificial Sequence
  Synthetic
ggguucacuaucccugaac

SEQ ID NO: 33718 - RNA, 20 nt, Artificial Sequence
  Synthetic
aggguucacuaucccugaac

SEQ ID NO: 33719 - RNA, 21 nt, Artificial Sequence
  Synthetic
caggguucacuaucccugaac

SEQ ID NO: 33720 - RNA, 22 nt, Artificial Sequence
  Synthetic
acaggguucacuaucccugaac

SEQ ID NO: 33721 - RNA, 23 nt, Artificial Sequence
  Synthetic
aacaggguucacuaucccugaac

SEQ ID NO: 33722 - RNA, 24 nt, Artificial Sequence
  Synthetic
gaacaggguucacuaucccugaac

SEQ ID NO: 33723 - RNA, 18 nt, Artificial Sequence
  Synthetic
aaaaaccccgccuguaac

SEQ ID NO: 33724 - RNA, 19 nt, Artificial Sequence
  Synthetic
gaaaaaccccgccuguaac

SEQ ID NO: 33725 - RNA, 20 nt, Artificial Sequence
  Synthetic
agaaaaaccccgccuguaac

SEQ ID NO: 33726 - RNA, 21 nt, Artificial Sequence
  Synthetic
aagaaaaaccccgccuguaac

SEQ ID NO: 33727 - RNA, 22 nt, Artificial Sequence
  Synthetic
caagaaaaaccccgccuguaac

SEQ ID NO: 33728 - RNA, 23 nt, Artificial Sequence
  Synthetic
acaagaaaaaccccgccuguaac

SEQ ID NO: 33729 - RNA, 24 nt, Artificial Sequence
  Synthetic
aacaagaaaaaccccgccuguaac

SEQ ID NO: 33730 - RNA, 18 nt, Artificial Sequence
  Synthetic
aauacaaaggucauuaac

SEQ ID NO: 33731 - RNA, 19 nt, Artificial Sequence
  Synthetic
uaauacaaaggucauuaac

SEQ ID NO: 33732 - RNA, 20 nt, Artificial Sequence
  Synthetic
cuaauacaaaggucauuaac

SEQ ID NO: 33733 - RNA, 21 nt, Artificial Sequence
  Synthetic
ccuaauacaaaggucauuaac

SEQ ID NO: 33734 - RNA, 22 nt, Artificial Sequence
  Synthetic
uccuaauacaaaggucauuaac

SEQ ID NO: 33735 - RNA, 23 nt, Artificial Sequence
  Synthetic
cuccuaauacaaaggucauuaac

SEQ ID NO: 33736 - RNA, 24 nt, Artificial Sequence
  Synthetic
ccuccuaauacaaaggucauuaac

SEQ ID NO: 33737 - RNA, 18 nt, Artificial Sequence
  Synthetic
aucaauuggccuguuaac

SEQ ID NO: 33738 - RNA, 19 nt, Artificial Sequence
  Synthetic
aaucaauuggccuguuaac

SEQ ID NO: 33739 - RNA, 20 nt, Artificial Sequence
  Synthetic
caaucaauuggccuguuaac

SEQ ID NO: 33740 - RNA, 21 nt, Artificial Sequence
  Synthetic
ccaaucaauuggccuguuaac

SEQ ID NO: 33741 - RNA, 22 nt, Artificial Sequence
  Synthetic
uccaaucaauuggccuguuaac

SEQ ID NO: 33742 - RNA, 23 nt, Artificial Sequence
  Synthetic
uuccaaucaauuggccuguuaac

SEQ ID NO: 33743 - RNA, 24 nt, Artificial Sequence
  Synthetic
uuuccaaucaauuggccuguuaac

SEQ ID NO: 33744 - RNA, 18 nt, Artificial Sequence
  Synthetic
gaauuuaggccaggacac

SEQ ID NO: 33745 - RNA, 19 nt, Artificial Sequence
  Synthetic
cgaauuuaggccaggacac

SEQ ID NO: 33746 - RNA, 20 nt, Artificial Sequence
  Synthetic
gcgaauuuaggccaggacac

SEQ ID NO: 33747 - RNA, 21 nt, Artificial Sequence
  Synthetic
ugcgaauuuaggccaggacac

SEQ ID NO: 33748 - RNA, 22 nt, Artificial Sequence
  Synthetic
cugcgaauuuaggccaggacac

SEQ ID NO: 33749 - RNA, 23 nt, Artificial Sequence
  Synthetic
acugcgaauuuaggccaggacac

SEQ ID NO: 33750 - RNA, 24 nt, Artificial Sequence
  Synthetic
gacugcgaauuuaggccaggacac

SEQ ID NO: 33751 - RNA, 18 nt, Artificial Sequence
  Synthetic
gaaagguucuuuccccac

SEQ ID NO: 33752 - RNA, 19 nt, Artificial Sequence
  Synthetic
ggaaagguucuuuccccac

SEQ ID NO: 33753 - RNA, 20 nt, Artificial Sequence
  Synthetic
uggaaagguucuuuccccac

SEQ ID NO: 33754 - RNA, 21 nt, Artificial Sequence
  Synthetic
guggaaagguucuuuccccac

SEQ ID NO: 33755 - RNA, 22 nt, Artificial Sequence
  Synthetic
gguggaaagguucuuuccccac

SEQ ID NO: 33756 - RNA, 23 nt, Artificial Sequence
  Synthetic
ugguggaaagguucuuuccccac

SEQ ID NO: 33757 - RNA, 24 nt, Artificial Sequence
  Synthetic
cugguggaaagguucuuuccccac

SEQ ID NO: 33758 - RNA, 18 nt, Artificial Sequence
  Synthetic
cucucccaaaaguaagac

SEQ ID NO: 33759 - RNA, 19 nt, Artificial Sequence
  Synthetic
ucucucccaaaaguaagac

SEQ ID NO: 33760 - RNA, 20 nt, Artificial Sequence
  Synthetic
uucucucccaaaaguaagac

SEQ ID NO: 33761 - RNA, 21 nt, Artificial Sequence
  Synthetic
uuucucucccaaaaguaagac

SEQ ID NO: 33762 - RNA, 22 nt, Artificial Sequence
  Synthetic
guuucucucccaaaaguaagac

SEQ ID NO: 33763 - RNA, 23 nt, Artificial Sequence
  Synthetic
gguuucucucccaaaaguaagac

SEQ ID NO: 33764 - RNA, 24 nt, Artificial Sequence
  Synthetic
cgguuucucucccaaaaguaagac

SEQ ID NO: 33765 - RNA, 18 nt, Artificial Sequence
  Synthetic
agaagaucacgaacagac

SEQ ID NO: 33766 - RNA, 19 nt, Artificial Sequence
  Synthetic
gagaagaucacgaacagac

SEQ ID NO: 33767 - RNA, 20 nt, Artificial Sequence
  Synthetic
cgagaagaucacgaacagac

SEQ ID NO: 33768 - RNA, 21 nt, Artificial Sequence
  Synthetic
ucgagaagaucacgaacagac

SEQ ID NO: 33769 - RNA, 22 nt, Artificial Sequence
  Synthetic
gucgagaagaucacgaacagac

SEQ ID NO: 33770 - RNA, 23 nt, Artificial Sequence
  Synthetic
ugucgagaagaucacgaacagac

SEQ ID NO: 33771 - RNA, 24 nt, Artificial Sequence
  Synthetic
gugucgagaagaucacgaacagac

SEQ ID NO: 33772 - RNA, 18 nt, Artificial Sequence
  Synthetic
agaugagaaggaacagac

SEQ ID NO: 33773 - RNA, 19 nt, Artificial Sequence
  Synthetic
cagaugagaaggaacagac

SEQ ID NO: 33774 - RNA, 20 nt, Artificial Sequence
  Synthetic
gcagaugagaaggaacagac

SEQ ID NO: 33775 - RNA, 21 nt, Artificial Sequence
  Synthetic
ggcagaugagaaggaacagac

SEQ ID NO: 33776 - RNA, 22 nt, Artificial Sequence
  Synthetic
cggcagaugagaaggaacagac

SEQ ID NO: 33777 - RNA, 23 nt, Artificial Sequence
  Synthetic
ccggcagaugagaaggaacagac

SEQ ID NO: 33778 - RNA, 24 nt, Artificial Sequence
  Synthetic
uccggcagaugagaaggaacagac

SEQ ID NO: 33779 - RNA, 18 nt, Artificial Sequence
  Synthetic
caggacaaguuggaggac

SEQ ID NO: 33780 - RNA, 19 nt, Artificial Sequence
  Synthetic
ccaggacaaguuggaggac

SEQ ID NO: 33781 - RNA, 20 nt, Artificial Sequence
  Synthetic
gccaggacaaguuggaggac

SEQ ID NO: 33782 - RNA, 21 nt, Artificial Sequence
  Synthetic
agccaggacaaguuggaggac

SEQ ID NO: 33783 - RNA, 22 nt, Artificial Sequence
  Synthetic
uagccaggacaaguuggaggac

SEQ ID NO: 33784 - RNA, 23 nt, Artificial Sequence
  Synthetic
auagccaggacaaguuggaggac

SEQ ID NO: 33785 - RNA, 24 nt, Artificial Sequence
  Synthetic
gauagccaggacaaguuggaggac

SEQ ID NO: 33786 - RNA, 18 nt, Artificial Sequence
  Synthetic
  misc_feature (14)..(14): n is a, c, g, or u
aggcuugaacagunggac

SEQ ID NO: 33787 - RNA, 19 nt, Artificial Sequence
  Synthetic
  misc_feature (15)..(15): n is a, c, g, or u
gaggcuugaacagunggac

SEQ ID NO: 33788 - RNA, 20 nt, Artificial Sequence
  Synthetic
  misc_feature (16)..(16): n is a, c, g, or u
ggaggcuugaacagunggac

SEQ ID NO: 33789 - RNA, 21 nt, Artificial Sequence
  Synthetic
  misc_feature (17)..(17): n is a, c, g, or u
uggaggcuugaacagunggac

SEQ ID NO: 33790 - RNA, 22 nt, Artificial Sequence
  Synthetic
  misc_feature (18)..(18): n is a, c, g, or u
uuggaggcuugaacagunggac

SEQ ID NO: 33791 - RNA, 23 nt, Artificial Sequence
  Synthetic
  misc_feature (19)..(19): n is a, c, g, or u
cuuggaggcuugaacagunggac

SEQ ID NO: 33792 - RNA, 24 nt, Artificial Sequence
  Synthetic
  misc_feature (20)..(20): n is a, c, g, or u
gcuuggaggcuugaacagunggac

SEQ ID NO: 33793 - RNA, 18 nt, Artificial Sequence
  Synthetic
acacacgggcacuccccc

SEQ ID NO: 33794 - RNA, 19 nt, Artificial Sequence
  Synthetic
gacacacgggcacuccccc

SEQ ID NO: 33795 - RNA, 20 nt, Artificial Sequence
  Synthetic
ggacacacgggcacuccccc

SEQ ID NO: 33796 - RNA, 21 nt, Artificial Sequence
  Synthetic
aggacacacgggcacuccccc

SEQ ID NO: 33797 - RNA, 22 nt, Artificial Sequence
  Synthetic
caggacacacgggcacuccccc

SEQ ID NO: 33798 - RNA, 23 nt, Artificial Sequence
  Synthetic
ccaggacacacgggcacuccccc

SEQ ID NO: 33799 - RNA, 24 nt, Artificial Sequence
  Synthetic
gccaggacacacgggcacuccccc

SEQ ID NO: 33800 - RNA, 18 nt, Artificial Sequence
  Synthetic
agagccccaaacggcccc

SEQ ID NO: 33801 - RNA, 19 nt, Artificial Sequence
  Synthetic
cagagccccaaacggcccc

SEQ ID NO: 33802 - RNA, 20 nt, Artificial Sequence
  Synthetic
acagagccccaaacggcccc

SEQ ID NO: 33803 - RNA, 21 nt, Artificial Sequence
  Synthetic
gacagagccccaaacggcccc

SEQ ID NO: 33804 - RNA, 22 nt, Artificial Sequence
  Synthetic
cgacagagccccaaacggcccc

SEQ ID NO: 33805 - RNA, 23 nt, Artificial Sequence
  Synthetic
gcgacagagccccaaacggcccc

SEQ ID NO: 33806 - RNA, 24 nt, Artificial Sequence
  Synthetic
ggcgacagagccccaaacggcccc

SEQ ID NO: 33807 - RNA, 18 nt, Artificial Sequence
  Synthetic
cagagccccaaacggccc

SEQ ID NO: 33808 - RNA, 19 nt, Artificial Sequence
  Synthetic
acagagccccaaacggccc

SEQ ID NO: 33809 - RNA, 20 nt, Artificial Sequence
  Synthetic
gacagagccccaaacggccc

SEQ ID NO: 33810 - RNA, 21 nt, Artificial Sequence
  Synthetic
cgacagagccccaaacggccc

SEQ ID NO: 33811 - RNA, 22 nt, Artificial Sequence
  Synthetic
gcgacagagccccaaacggccc

SEQ ID NO: 33812 - RNA, 23 nt, Artificial Sequence
  Synthetic
ggcgacagagccccaaacggccc

SEQ ID NO: 33813 - RNA, 24 nt, Artificial Sequence
  Synthetic
gggcgacagagccccaaacggccc

SEQ ID NO: 33814 - RNA, 18 nt, Artificial Sequence
  Synthetic
guaaacaaaggacguccc

SEQ ID NO: 33815 - RNA, 19 nt, Artificial Sequence
  Synthetic
cguaaacaaaggacguccc

SEQ ID NO: 33816 - RNA, 20 nt, Artificial Sequence
  Synthetic
acguaaacaaaggacguccc

SEQ ID NO: 33817 - RNA, 21 nt, Artificial Sequence
  Synthetic
gacguaaacaaaggacguccc

SEQ ID NO: 33818 - RNA, 22 nt, Artificial Sequence
  Synthetic
ggacguaaacaaaggacguccc

SEQ ID NO: 33819 - RNA, 23 nt, Artificial Sequence
  Synthetic
gggacguaaacaaaggacguccc

SEQ ID NO: 33820 - RNA, 24 nt, Artificial Sequence
  Synthetic
cgggacguaaacaaaggacguccc

SEQ ID NO: 33821 - RNA, 18 nt, Artificial Sequence
  Synthetic
cagcacagccuagcagcc

SEQ ID NO: 33822 - RNA, 19 nt, Artificial Sequence
  Synthetic
gcagcacagccuagcagcc

SEQ ID NO: 33823 - RNA, 20 nt, Artificial Sequence
  Synthetic
ggcagcacagccuagcagcc

SEQ ID NO: 33824 - RNA, 21 nt, Artificial Sequence
  Synthetic
uggcagcacagccuagcagcc

SEQ ID NO: 33825 - RNA, 22 nt, Artificial Sequence
  Synthetic
uuggcagcacagccuagcagcc

SEQ ID NO: 33826 - RNA, 23 nt, Artificial Sequence
  Synthetic
guuggcagcacagccuagcagcc

SEQ ID NO: 33827 - RNA, 24 nt, Artificial Sequence
  Synthetic
aguuggcagcacagccuagcagcc

SEQ ID NO: 33828 - RNA, 18 nt, Artificial Sequence
  Synthetic
gcacuaguaaacugagcc

SEQ ID NO: 33829 - RNA, 19 nt, Artificial Sequence
  Synthetic
ggcacuaguaaacugagcc

SEQ ID NO: 33830 - RNA, 20 nt, Artificial Sequence
  Synthetic
uggcacuaguaaacugagcc

SEQ ID NO: 33831 - RNA, 21 nt, Artificial Sequence
  Synthetic
auggcacuaguaaacugagcc

SEQ ID NO: 33832 - RNA, 22 nt, Artificial Sequence
  Synthetic
aauggcacuaguaaacugagcc

SEQ ID NO: 33833 - RNA, 23 nt, Artificial Sequence
  Synthetic
aaauggcacuaguaaacugagcc

SEQ ID NO: 33834 - RNA, 24 nt, Artificial Sequence
  Synthetic
caaauggcacuaguaaacugagcc

SEQ ID NO: 33835 - RNA, 18 nt, Artificial Sequence
  Synthetic
acagagccccaaacggcc

SEQ ID NO: 33836 - RNA, 19 nt, Artificial Sequence
  Synthetic
gacagagccccaaacggcc

SEQ ID NO: 33837 - RNA, 20 nt, Artificial Sequence
  Synthetic
cgacagagccccaaacggcc

SEQ ID NO: 33838 - RNA, 21 nt, Artificial Sequence
  Synthetic
gcgacagagccccaaacggcc

SEQ ID NO: 33839 - RNA, 22 nt, Artificial Sequence
  Synthetic
ggcgacagagccccaaacggcc

SEQ ID NO: 33840 - RNA, 23 nt, Artificial Sequence
  Synthetic
gggcgacagagccccaaacggcc

SEQ ID NO: 33841 - RNA, 24 nt, Artificial Sequence
  Synthetic
ggggcgacagagccccaaacggcc

SEQ ID NO: 33842 - RNA, 18 nt, Artificial Sequence
  Synthetic
caaaguuguuagugugcc

SEQ ID NO: 33843 - RNA, 19 nt, Artificial Sequence
  Synthetic
gcaaaguuguuagugugcc

SEQ ID NO: 33844 - RNA, 20 nt, Artificial Sequence
  Synthetic
ggcaaaguuguuagugugcc

SEQ ID NO: 33845 - RNA, 21 nt, Artificial Sequence
  Synthetic
uggcaaaguuguuagugugcc

SEQ ID NO: 33846 - RNA, 22 nt, Artificial Sequence
  Synthetic
cuggcaaaguuguuagugugcc

SEQ ID NO: 33847 - RNA, 23 nt, Artificial Sequence
  Synthetic
gcuggcaaaguuguuagugugcc

SEQ ID NO: 33848 - RNA, 24 nt, Artificial Sequence
  Synthetic
ugcuggcaaaguuguuagugugcc

SEQ ID NO: 33849 - RNA, 18 nt, Artificial Sequence
  Synthetic
gggauacauagaguugcc

SEQ ID NO: 33850 - RNA, 19 nt, Artificial Sequence
  Synthetic
agggauacauagaguugcc

SEQ ID NO: 33851 - RNA, 20 nt, Artificial Sequence
  Synthetic
gagggauacauagaguugcc

SEQ ID NO: 33852 - RNA, 21 nt, Artificial Sequence
  Synthetic
ugagggauacauagaguugcc

SEQ ID NO: 33853 - RNA, 22 nt, Artificial Sequence
  Synthetic
augagggauacauagaguugcc

SEQ ID NO: 33854 - RNA, 23 nt, Artificial Sequence
  Synthetic
caugagggauacauagaguugcc

SEQ ID NO: 33855 - RNA, 24 nt, Artificial Sequence
  Synthetic
acaugagggauacauagaguugcc

SEQ ID NO: 33856 - RNA, 18 nt, Artificial Sequence
  Synthetic
gugcaggguccccaaucc

SEQ ID NO: 33857 - RNA, 19 nt, Artificial Sequence
  Synthetic
ggugcaggguccccaaucc

SEQ ID NO: 33858 - RNA, 20 nt, Artificial Sequence
  Synthetic
cggugcaggguccccaaucc

SEQ ID NO: 33859 - RNA, 21 nt, Artificial Sequence
  Synthetic
ucggugcaggguccccaaucc

SEQ ID NO: 33860 - RNA, 22 nt, Artificial Sequence
  Synthetic
uucggugcaggguccccaaucc

SEQ ID NO: 33861 - RNA, 23 nt, Artificial Sequence
  Synthetic
guucggugcaggguccccaaucc

SEQ ID NO: 33862 - RNA, 24 nt, Artificial Sequence
  Synthetic
uguucggugcaggguccccaaucc

SEQ ID NO: 33863 - RNA, 18 nt, Artificial Sequence
  Synthetic
gugaucgggaaggaaucc

SEQ ID NO: 33864 - RNA, 19 nt, Artificial Sequence
  Synthetic
ggugaucgggaaggaaucc

SEQ ID NO: 33865 - RNA, 20 nt, Artificial Sequence
  Synthetic
uggugaucgggaaggaaucc

SEQ ID NO: 33866 - RNA, 21 nt, Artificial Sequence
  Synthetic
cuggugaucgggaaggaaucc

SEQ ID NO: 33867 - RNA, 22 nt, Artificial Sequence
  Synthetic
acuggugaucgggaaggaaucc

SEQ ID NO: 33868 - RNA, 23 nt, Artificial Sequence
  Synthetic
aacuggugaucgggaaggaaucc

SEQ ID NO: 33869 - RNA, 24 nt, Artificial Sequence
  Synthetic
caacuggugaucgggaaggaaucc

SEQ ID NO: 33870 - RNA, 18 nt, Artificial Sequence
  Synthetic
gaacaggguucacuaucc

SEQ ID NO: 33871 - RNA, 19 nt, Artificial Sequence
  Synthetic
ggaacaggguucacuaucc

SEQ ID NO: 33872 - RNA, 20 nt, Artificial Sequence
  Synthetic
cggaacaggguucacuaucc

SEQ ID NO: 33873 - RNA, 21 nt, Artificial Sequence
  Synthetic
ucggaacaggguucacuaucc

SEQ ID NO: 33874 - RNA, 22 nt, Artificial Sequence
  Synthetic
gucggaacaggguucacuaucc

SEQ ID NO: 33875 - RNA, 23 nt, Artificial Sequence
  Synthetic
agucggaacaggguucacuaucc

SEQ ID NO: 33876 - RNA, 24 nt, Artificial Sequence
  Synthetic
uagucggaacaggguucacuaucc

SEQ ID NO: 33877 - RNA, 18 nt, Artificial Sequence
  Synthetic
ucagcaaaaacacagucc

SEQ ID NO: 33878 - RNA, 19 nt, Artificial Sequence
  Synthetic
cucagcaaaaacacagucc

SEQ ID NO: 33879 - RNA, 20 nt, Artificial Sequence
  Synthetic
acucagcaaaaacacagucc

SEQ ID NO: 33880 - RNA, 21 nt, Artificial Sequence
  Synthetic
cacucagcaaaaacacagucc

SEQ ID NO: 33881 - RNA, 22 nt, Artificial Sequence
  Synthetic
ccacucagcaaaaacacagucc

SEQ ID NO: 33882 - RNA, 23 nt, Artificial Sequence
  Synthetic
cccacucagcaaaaacacagucc

SEQ ID NO: 33883 - RNA, 24 nt, Artificial Sequence
  Synthetic
ucccacucagcaaaaacacagucc

SEQ ID NO: 33884 - RNA, 18 nt, Artificial Sequence
  Synthetic
uucccaccuugugagucc

SEQ ID NO: 33885 - RNA, 19 nt, Artificial Sequence
  Synthetic
uuucccaccuugugagucc

SEQ ID NO: 33886 - RNA, 20 nt, Artificial Sequence
  Synthetic
guuucccaccuugugagucc

SEQ ID NO: 33887 - RNA, 21 nt, Artificial Sequence
  Synthetic
aguuucccaccuugugagucc

SEQ ID NO: 33888 - RNA, 22 nt, Artificial Sequence
  Synthetic
aaguuucccaccuugugagucc

SEQ ID NO: 33889 - RNA, 23 nt, Artificial Sequence
  Synthetic
aaaguuucccaccuugugagucc

SEQ ID NO: 33890 - RNA, 24 nt, Artificial Sequence
  Synthetic
uaaaguuucccaccuugugagucc

SEQ ID NO: 33891 - RNA, 18 nt, Artificial Sequence
  Synthetic
acucgagagggaccgucc

SEQ ID NO: 33892 - RNA, 19 nt, Artificial Sequence
  Synthetic
cacucgagagggaccgucc

SEQ ID NO: 33893 - RNA, 20 nt, Artificial Sequence
  Synthetic
ccacucgagagggaccgucc

SEQ ID NO: 33894 - RNA, 21 nt, Artificial Sequence
  Synthetic
cccacucgagagggaccgucc

SEQ ID NO: 33895 - RNA, 22 nt, Artificial Sequence
  Synthetic
ccccacucgagagggaccgucc

SEQ ID NO: 33896 - RNA, 23 nt, Artificial Sequence
  Synthetic
uccccacucgagagggaccgucc

SEQ ID NO: 33897 - RNA, 24 nt, Artificial Sequence
  Synthetic
uuccccacucgagagggaccgucc

SEQ ID NO: 33898 - RNA, 18 nt, Artificial Sequence
  Synthetic
uaacacgagcaggggucc

SEQ ID NO: 33899 - RNA, 19 nt, Artificial Sequence
  Synthetic
guaacacgagcaggggucc

SEQ ID NO: 33900 - RNA, 20 nt, Artificial Sequence
  Synthetic
uguaacacgagcaggggucc

SEQ ID NO: 33901 - RNA, 21 nt, Artificial Sequence
  Synthetic
cuguaacacgagcaggggucc

SEQ ID NO: 33902 - RNA, 22 nt, Artificial Sequence
  Synthetic
ccuguaacacgagcaggggucc

SEQ ID NO: 33903 - RNA, 23 nt, Artificial Sequence
  Synthetic
gccuguaacacgagcaggggucc

SEQ ID NO: 33904 - RNA, 24 nt, Artificial Sequence
  Synthetic
cgccuguaacacgagcaggggucc

SEQ ID NO: 33905 - RNA, 18 nt, Artificial Sequence
  Synthetic
gaaaggauguauauuucc

SEQ ID NO: 33906 - RNA, 19 nt, Artificial Sequence
  Synthetic
ggaaaggauguauauuucc

SEQ ID NO: 33907 - RNA, 20 nt, Artificial Sequence
  Synthetic
uggaaaggauguauauuucc

SEQ ID NO: 33908 - RNA, 21 nt, Artificial Sequence
  Synthetic
auggaaaggauguauauuucc

SEQ ID NO: 33909 - RNA, 22 nt, Artificial Sequence
  Synthetic
cauggaaaggauguauauuucc

SEQ ID NO: 33910 - RNA, 23 nt, Artificial Sequence
  Synthetic
ccauggaaaggauguauauuucc

SEQ ID NO: 33911 - RNA, 24 nt, Artificial Sequence
  Synthetic
gccauggaaaggauguauauuucc

SEQ ID NO: 33912 - RNA, 18 nt, Artificial Sequence
  Synthetic
auacuaacauugggaagc

SEQ ID NO: 33913 - RNA, 19 nt, Artificial Sequence
  Synthetic
aauacuaacauugggaagc

SEQ ID NO: 33914 - RNA, 20 nt, Artificial Sequence
  Synthetic
gaauacuaacauugggaagc

SEQ ID NO: 33915 - RNA, 21 nt, Artificial Sequence
  Synthetic
ggaauacuaacauugggaagc

SEQ ID NO: 33916 - RNA, 22 nt, Artificial Sequence
  Synthetic
aggaauacuaacauugggaagc

SEQ ID NO: 33917 - RNA, 23 nt, Artificial Sequence
  Synthetic
aaggaauacuaacauugggaagc

SEQ ID NO: 33918 - RNA, 24 nt, Artificial Sequence
  Synthetic
caaggaauacuaacauugggaagc

SEQ ID NO: 33919 - RNA, 18 nt, Artificial Sequence
  Synthetic
auuugguggucuauaagc

SEQ ID NO: 33920 - RNA, 19 nt, Artificial Sequence
  Synthetic
cauuugguggucuauaagc

SEQ ID NO: 33921 - RNA, 20 nt, Artificial Sequence
  Synthetic
gcauuugguggucuauaagc

SEQ ID NO: 33922 - RNA, 21 nt, Artificial Sequence
  Synthetic
ggcauuugguggucuauaagc

SEQ ID NO: 33923 - RNA, 22 nt, Artificial Sequence
  Synthetic
gggcauuugguggucuauaagc

SEQ ID NO: 33924 - RNA, 23 nt, Artificial Sequence
  Synthetic
ggggcauuugguggucuauaagc

SEQ ID NO: 33925 - RNA, 24 nt, Artificial Sequence
  Synthetic
aggggcauuugguggucuauaagc

SEQ ID NO: 33926 - RNA, 18 nt, Artificial Sequence
  Synthetic
agccacccaaggcacagc

SEQ ID NO: 33927 - RNA, 19 nt, Artificial Sequence
  Synthetic
aagccacccaaggcacagc

SEQ ID NO: 33928 - RNA, 20 nt, Artificial Sequence
  Synthetic
aaagccacccaaggcacagc

SEQ ID NO: 33929 - RNA, 21 nt, Artificial Sequence
  Synthetic
uaaagccacccaaggcacagc

SEQ ID NO: 33930 - RNA, 22 nt, Artificial Sequence
  Synthetic
cuaaagccacccaaggcacagc

SEQ ID NO: 33931 - RNA, 23 nt, Artificial Sequence
  Synthetic
ccuaaagccacccaaggcacagc

SEQ ID NO: 33932 - RNA, 24 nt, Artificial Sequence
  Synthetic
cccuaaagccacccaaggcacagc

SEQ ID NO: 33933 - RNA, 18 nt, Artificial Sequence
  Synthetic
ugaacuggagccaccagc

SEQ ID NO: 33934 - RNA, 19 nt, Artificial Sequence
  Synthetic
cugaacuggagccaccagc

SEQ ID NO: 33935 - RNA, 20 nt, Artificial Sequence
  Synthetic
ccugaacuggagccaccagc

SEQ ID NO: 33936 - RNA, 21 nt, Artificial Sequence
  Synthetic
cccugaacuggagccaccagc

SEQ ID NO: 33937 - RNA, 22 nt, Artificial Sequence
  Synthetic
ucccugaacuggagccaccagc

SEQ ID NO: 33938 - RNA, 23 nt, Artificial Sequence
  Synthetic
aucccugaacuggagccaccagc

SEQ ID NO: 33939 - RNA, 24 nt, Artificial Sequence
  Synthetic
uaucccugaacuggagccaccagc

SEQ ID NO: 33940 - RNA, 18 nt, Artificial Sequence
  Synthetic
gcgagcaaaacaagcagc

SEQ ID NO: 33941 - RNA, 19 nt, Artificial Sequence
  Synthetic
ugcgagcaaaacaagcagc

SEQ ID NO: 33942 - RNA, 20 nt, Artificial Sequence
  Synthetic
cugcgagcaaaacaagcagc

SEQ ID NO: 33943 - RNA, 21 nt, Artificial Sequence
  Synthetic
gcugcgagcaaaacaagcagc

SEQ ID NO: 33944 - RNA, 22 nt, Artificial Sequence
  Synthetic
ggcugcgagcaaaacaagcagc

SEQ ID NO: 33945 - RNA, 23 nt, Artificial Sequence
  Synthetic
cggcugcgagcaaaacaagcagc

SEQ ID NO: 33946 - RNA, 24 nt, Artificial Sequence
  Synthetic
ccggcugcgagcaaaacaagcagc

SEQ ID NO: 33947 - RNA, 18 nt, Artificial Sequence
  Synthetic
gacacauccagcgauagc

SEQ ID NO: 33948 - RNA, 19 nt, Artificial Sequence
  Synthetic
agacacauccagcgauagc

SEQ ID NO: 33949 - RNA, 20 nt, Artificial Sequence
  Synthetic
cagacacauccagcgauagc

SEQ ID NO: 33950 - RNA, 21 nt, Artificial Sequence
  Synthetic
gcagacacauccagcgauagc

SEQ ID NO: 33951 - RNA, 22 nt, Artificial Sequence
  Synthetic
cgcagacacauccagcgauagc

SEQ ID NO: 33952 - RNA, 23 nt, Artificial Sequence
  Synthetic
ccgcagacacauccagcgauagc

SEQ ID NO: 33953 - RNA, 24 nt, Artificial Sequence
  Synthetic
gccgcagacacauccagcgauagc

SEQ ID NO: 33954 - RNA, 18 nt, Artificial Sequence
  Synthetic
gaucuucgucugcgaggc

SEQ ID NO: 33955 - RNA, 19 nt, Artificial Sequence
  Synthetic
agaucuucgucugcgaggc

SEQ ID NO: 33956 - RNA, 20 nt, Artificial Sequence
  Synthetic
gagaucuucgucugcgaggc

SEQ ID NO: 33957 - RNA, 21 nt, Artificial Sequence
  Synthetic
ugagaucuucgucugcgaggc

SEQ ID NO: 33958 - RNA, 22 nt, Artificial Sequence
  Synthetic
uugagaucuucgucugcgaggc

SEQ ID NO: 33959 - RNA, 23 nt, Artificial Sequence
  Synthetic
auugagaucuucgucugcgaggc

SEQ ID NO: 33960 - RNA, 24 nt, Artificial Sequence
  Synthetic
gauugagaucuucgucugcgaggc

SEQ ID NO: 33961 - RNA, 18 nt, Artificial Sequence
  Synthetic
cugacgauugguggaggc

SEQ ID NO: 33962 - RNA, 19 nt, Artificial Sequence
  Synthetic
acugacgauugguggaggc

SEQ ID NO: 33963 - RNA, 20 nt, Artificial Sequence
  Synthetic
gacugacgauugguggaggc

SEQ ID NO: 33964 - RNA, 21 nt, Artificial Sequence
  Synthetic
ugacugacgauugguggaggc

SEQ ID NO: 33965 - RNA, 22 nt, Artificial Sequence
  Synthetic
cugacugacgauugguggaggc

SEQ ID NO: 33966 - RNA, 23 nt, Artificial Sequence
  Synthetic
ccugacugacgauugguggaggc

SEQ ID NO: 33967 - RNA, 24 nt, Artificial Sequence
  Synthetic
cccugacugacgauugguggaggc

SEQ ID NO: 33968 - RNA, 18 nt, Artificial Sequence
  Synthetic
aaggcacagcuuggaggc

SEQ ID NO: 33969 - RNA, 19 nt, Artificial Sequence
  Synthetic
caaggcacagcuuggaggc

SEQ ID NO: 33970 - RNA, 20 nt, Artificial Sequence
  Synthetic
ccaaggcacagcuuggaggc

SEQ ID NO: 33971 - RNA, 21 nt, Artificial Sequence
  Synthetic
cccaaggcacagcuuggaggc

SEQ ID NO: 33972 - RNA, 22 nt, Artificial Sequence
  Synthetic
acccaaggcacagcuuggaggc

SEQ ID NO: 33973 - RNA, 23 nt, Artificial Sequence
  Synthetic
cacccaaggcacagcuuggaggc

SEQ ID NO: 33974 - RNA, 24 nt, Artificial Sequence
  Synthetic
ccacccaaggcacagcuuggaggc

SEQ ID NO: 33975 - RNA, 18 nt, Artificial Sequence
  Synthetic
gggacugcgaauuuaggc

SEQ ID NO: 33976 - RNA, 19 nt, Artificial Sequence
  Synthetic
ggggacugcgaauuuaggc

SEQ ID NO: 33977 - RNA, 20 nt, Artificial Sequence
  Synthetic
uggggacugcgaauuuaggc

SEQ ID NO: 33978 - RNA, 21 nt, Artificial Sequence
  Synthetic
uuggggacugcgaauuuaggc

SEQ ID NO: 33979 - RNA, 22 nt, Artificial Sequence
  Synthetic
guuggggacugcgaauuuaggc

SEQ ID NO: 33980 - RNA, 23 nt, Artificial Sequence
  Synthetic
gguuggggacugcgaauuuaggc

SEQ ID NO: 33981 - RNA, 24 nt, Artificial Sequence
  Synthetic
agguuggggacugcgaauuuaggc

SEQ ID NO: 33982 - RNA, 18 nt, Artificial Sequence
  Synthetic
gugcgccccguggucggc

SEQ ID NO: 33983 - RNA, 19 nt, Artificial Sequence
  Synthetic
ggugcgccccguggucggc

SEQ ID NO: 33984 - RNA, 20 nt, Artificial Sequence
  Synthetic
aggugcgccccguggucggc

SEQ ID NO: 33985 - RNA, 21 nt, Artificial Sequence
  Synthetic
gaggugcgccccguggucggc

SEQ ID NO: 33986 - RNA, 22 nt, Artificial Sequence
  Synthetic
agaggugcgccccguggucggc

SEQ ID NO: 33987 - RNA, 23 nt, Artificial Sequence
  Synthetic
gagaggugcgccccguggucggc

SEQ ID NO: 33988 - RNA, 24 nt, Artificial Sequence
  Synthetic
agagaggugcgccccguggucggc

SEQ ID NO: 33989 - RNA, 18 nt, Artificial Sequence
  Synthetic
aaggccuuauaaguuggc

SEQ ID NO: 33990 - RNA, 19 nt, Artificial Sequence
  Synthetic
aaaggccuuauaaguuggc

SEQ ID NO: 33991 - RNA, 20 nt, Artificial Sequence
  Synthetic
gaaaggccuuauaaguuggc

SEQ ID NO: 33992 - RNA, 21 nt, Artificial Sequence
  Synthetic
agaaaggccuuauaaguuggc

SEQ ID NO: 33993 - RNA, 22 nt, Artificial Sequence
  Synthetic
gagaaaggccuuauaaguuggc

SEQ ID NO: 33994 - RNA, 23 nt, Artificial Sequence
  Synthetic
agagaaaggccuuauaaguuggc

SEQ ID NO: 33995 - RNA, 24 nt, Artificial Sequence
  Synthetic
cagagaaaggccuuauaaguuggc

SEQ ID NO: 33996 - RNA, 18 nt, Artificial Sequence
  Synthetic
ggugcaggguccccaauc

SEQ ID NO: 33997 - RNA, 19 nt, Artificial Sequence
  Synthetic
cggugcaggguccccaauc

SEQ ID NO: 33998 - RNA, 20 nt, Artificial Sequence
  Synthetic
ucggugcaggguccccaauc

SEQ ID NO: 33999 - RNA, 21 nt, Artificial Sequence
  Synthetic
uucggugcaggguccccaauc

SEQ ID NO: 34000 - RNA, 22 nt, Artificial Sequence
  Synthetic
guucggugcaggguccccaauc

SEQ ID NO: 34001 - RNA, 23 nt, Artificial Sequence
  Synthetic
uguucggugcaggguccccaauc

SEQ ID NO: 34002 - RNA, 24 nt, Artificial Sequence
  Synthetic
auguucggugcaggguccccaauc

SEQ ID NO: 34003 - RNA, 18 nt, Artificial Sequence
  Synthetic
agcggugucgagaagauc

SEQ ID NO: 34004 - RNA, 19 nt, Artificial Sequence
  Synthetic
aagcggugucgagaagauc

SEQ ID NO: 34005 - RNA, 20 nt, Artificial Sequence
  Synthetic
gaagcggugucgagaagauc

SEQ ID NO: 34006 - RNA, 21 nt, Artificial Sequence
  Synthetic
ugaagcggugucgagaagauc

SEQ ID NO: 34007 - RNA, 22 nt, Artificial Sequence
  Synthetic
cugaagcggugucgagaagauc

SEQ ID NO: 34008 - RNA, 23 nt, Artificial Sequence
  Synthetic
gcugaagcggugucgagaagauc

SEQ ID NO: 34009 - RNA, 24 nt, Artificial Sequence
  Synthetic
agcugaagcggugucgagaagauc

SEQ ID NO: 34010 - RNA, 18 nt, Artificial Sequence
  Synthetic
uacugguggucgaggauc

SEQ ID NO: 34011 - RNA, 19 nt, Artificial Sequence
  Synthetic
guacugguggucgaggauc

SEQ ID NO: 34012 - RNA, 20 nt, Artificial Sequence
  Synthetic
cguacugguggucgaggauc

SEQ ID NO: 34013 - RNA, 21 nt, Artificial Sequence
  Synthetic
ccguacugguggucgaggauc

SEQ ID NO: 34014 - RNA, 22 nt, Artificial Sequence
  Synthetic
cccguacugguggucgaggauc

SEQ ID NO: 34015 - RNA, 23 nt, Artificial Sequence
  Synthetic
ucccguacugguggucgaggauc

SEQ ID NO: 34016 - RNA, 24 nt, Artificial Sequence
  Synthetic
gucccguacugguggucgaggauc

SEQ ID NO: 34017 - RNA, 18 nt, Artificial Sequence
  Synthetic
uggguccaacuggugauc

SEQ ID NO: 34018 - RNA, 19 nt, Artificial Sequence
  Synthetic
cuggguccaacuggugauc

SEQ ID NO: 34019 - RNA, 20 nt, Artificial Sequence
  Synthetic
gcuggguccaacuggugauc

SEQ ID NO: 34020 - RNA, 21 nt, Artificial Sequence
  Synthetic
ugcuggguccaacuggugauc

SEQ ID NO: 34021 - RNA, 22 nt, Artificial Sequence
  Synthetic
augcuggguccaacuggugauc

SEQ ID NO: 34022 - RNA, 23 nt, Artificial Sequence
  Synthetic
aaugcuggguccaacuggugauc

SEQ ID NO: 34023 - RNA, 24 nt, Artificial Sequence
  Synthetic
gaaugcuggguccaacuggugauc

SEQ ID NO: 34024 - RNA, 18 nt, Artificial Sequence
  Synthetic
aagguucuuuccccacuc

SEQ ID NO: 34025 - RNA, 19 nt, Artificial Sequence
  Synthetic
aaagguucuuuccccacuc

SEQ ID NO: 34026 - RNA, 20 nt, Artificial Sequence
  Synthetic
gaaagguucuuuccccacuc

SEQ ID NO: 34027 - RNA, 21 nt, Artificial Sequence
  Synthetic
ggaaagguucuuuccccacuc

SEQ ID NO: 34028 - RNA, 22 nt, Artificial Sequence
  Synthetic
uggaaagguucuuuccccacuc

SEQ ID NO: 34029 - RNA, 23 nt, Artificial Sequence
  Synthetic
guggaaagguucuuuccccacuc

SEQ ID NO: 34030 - RNA, 24 nt, Artificial Sequence
  Synthetic
gguggaaagguucuuuccccacuc

SEQ ID NO: 34031 - RNA, 18 nt, Artificial Sequence
  Synthetic
aaaagacaccaaauacuc

SEQ ID NO: 34032 - RNA, 19 nt, Artificial Sequence
  Synthetic
caaaagacaccaaauacuc

SEQ ID NO: 34033 - RNA, 20 nt, Artificial Sequence
  Synthetic
ccaaaagacaccaaauacuc

SEQ ID NO: 34034 - RNA, 21 nt, Artificial Sequence
  Synthetic
uccaaaagacaccaaauacuc

SEQ ID NO: 34035 - RNA, 22 nt, Artificial Sequence
  Synthetic
cuccaaaagacaccaaauacuc

SEQ ID NO: 34036 - RNA, 23 nt, Artificial Sequence
  Synthetic
acuccaaaagacaccaaauacuc

SEQ ID NO: 34037 - RNA, 24 nt, Artificial Sequence
  Synthetic
cacuccaaaagacaccaaauacuc

SEQ ID NO: 34038 - RNA, 18 nt, Artificial Sequence
  Synthetic
ucuaacaacaguagucuc

SEQ ID NO: 34039 - RNA, 19 nt, Artificial Sequence
  Synthetic
gucuaacaacaguagucuc

SEQ ID NO: 34040 - RNA, 20 nt, Artificial Sequence
  Synthetic
cgucuaacaacaguagucuc

SEQ ID NO: 34041 - RNA, 21 nt, Artificial Sequence
  Synthetic
ucgucuaacaacaguagucuc

SEQ ID NO: 34042 - RNA, 22 nt, Artificial Sequence
  Synthetic
uucgucuaacaacaguagucuc

SEQ ID NO: 34043 - RNA, 23 nt, Artificial Sequence
  Synthetic
cuucgucuaacaacaguagucuc

SEQ ID NO: 34044 - RNA, 24 nt, Artificial Sequence
  Synthetic
ucuucgucuaacaacaguagucuc

SEQ ID NO: 34045 - RNA, 18 nt, Artificial Sequence
  Synthetic
caacauaccuugauaguc

SEQ ID NO: 34046 - RNA, 19 nt, Artificial Sequence
  Synthetic
gcaacauaccuugauaguc

SEQ ID NO: 34047 - RNA, 20 nt, Artificial Sequence
  Synthetic
ggcaacauaccuugauaguc

SEQ ID NO: 34048 - RNA, 21 nt, Artificial Sequence
  Synthetic
gggcaacauaccuugauaguc

SEQ ID NO: 34049 - RNA, 22 nt, Artificial Sequence
  Synthetic
cgggcaacauaccuugauaguc

SEQ ID NO: 34050 - RNA, 23 nt, Artificial Sequence
  Synthetic
acgggcaacauaccuugauaguc

SEQ ID NO: 34051 - RNA, 24 nt, Artificial Sequence
  Synthetic
aacgggcaacauaccuugauaguc

SEQ ID NO: 34052 - RNA, 18 nt, Artificial Sequence
  Synthetic
uguaaauaaugucugguc

SEQ ID NO: 34053 - RNA, 19 nt, Artificial Sequence
  Synthetic
auguaaauaaugucugguc

SEQ ID NO: 34054 - RNA, 20 nt, Artificial Sequence
  Synthetic
uauguaaauaaugucugguc

SEQ ID NO: 34055 - RNA, 21 nt, Artificial Sequence
  Synthetic
guauguaaauaaugucugguc

SEQ ID NO: 34056 - RNA, 22 nt, Artificial Sequence
  Synthetic
gguauguaaauaaugucugguc

SEQ ID NO: 34057 - RNA, 23 nt, Artificial Sequence
  Synthetic
ggguauguaaauaaugucugguc

SEQ ID NO: 34058 - RNA, 24 nt, Artificial Sequence
  Synthetic
aggguauguaaauaaugucugguc

SEQ ID NO: 34059 - RNA, 18 nt, Artificial Sequence
  Synthetic
caaagcugaagcgguguc

SEQ ID NO: 34060 - RNA, 19 nt, Artificial Sequence
  Synthetic
acaaagcugaagcgguguc

SEQ ID NO: 34061 - RNA, 20 nt, Artificial Sequence
  Synthetic
uacaaagcugaagcgguguc

SEQ ID NO: 34062 - RNA, 21 nt, Artificial Sequence
  Synthetic
guacaaagcugaagcgguguc

SEQ ID NO: 34063 - RNA, 22 nt, Artificial Sequence
  Synthetic
gguacaaagcugaagcgguguc

SEQ ID NO: 34064 - RNA, 23 nt, Artificial Sequence
  Synthetic
cgguacaaagcugaagcgguguc

SEQ ID NO: 34065 - RNA, 24 nt, Artificial Sequence
  Synthetic
ccgguacaaagcugaagcgguguc

SEQ ID NO: 34066 - RNA, 18 nt, Artificial Sequence
  Synthetic
gcgagggaguucuucuuc

SEQ ID NO: 34067 - RNA, 19 nt, Artificial Sequence
  Synthetic
ggcgagggaguucuucuuc

SEQ ID NO: 34068 - RNA, 20 nt, Artificial Sequence
  Synthetic
aggcgagggaguucuucuuc

SEQ ID NO: 34069 - RNA, 21 nt, Artificial Sequence
  Synthetic
gaggcgagggaguucuucuuc

SEQ ID NO: 34070 - RNA, 22 nt, Artificial Sequence
  Synthetic
cgaggcgagggaguucuucuuc

SEQ ID NO: 34071 - RNA, 23 nt, Artificial Sequence
  Synthetic
gcgaggcgagggaguucuucuuc

SEQ ID NO: 34072 - RNA, 24 nt, Artificial Sequence
  Synthetic
ugcgaggcgagggaguucuucuuc

SEQ ID NO: 34073 - RNA, 18 nt, Artificial Sequence
  Synthetic
aauggauauuuggaaaag

SEQ ID NO: 34074 - RNA, 19 nt, Artificial Sequence
  Synthetic
aaauggauauuuggaaaag

SEQ ID NO: 34075 - RNA, 20 nt, Artificial Sequence
  Synthetic
caaauggauauuuggaaaag

SEQ ID NO: 34076 - RNA, 21 nt, Artificial Sequence
  Synthetic
gcaaauggauauuuggaaaag

SEQ ID NO: 34077 - RNA, 22 nt, Artificial Sequence
  Synthetic
ugcaaauggauauuuggaaaag

SEQ ID NO: 34078 - RNA, 23 nt, Artificial Sequence
  Synthetic
augcaaauggauauuuggaaaag

SEQ ID NO: 34079 - RNA, 24 nt, Artificial Sequence
  Synthetic
gaugcaaauggauauuuggaaaag

SEQ ID NO: 34080 - RNA, 18 nt, Artificial Sequence
  Synthetic
aggauucccgguacaaag

SEQ ID NO: 34081 - RNA, 19 nt, Artificial Sequence
  Synthetic
aaggauucccgguacaaag

SEQ ID NO: 34082 - RNA, 20 nt, Artificial Sequence
  Synthetic
uaaggauucccgguacaaag

SEQ ID NO: 34083 - RNA, 21 nt, Artificial Sequence
  Synthetic
cuaaggauucccgguacaaag

SEQ ID NO: 34084 - RNA, 22 nt, Artificial Sequence
  Synthetic
ucuaaggauucccgguacaaag

SEQ ID NO: 34085 - RNA, 23 nt, Artificial Sequence
  Synthetic
cucuaaggauucccgguacaaag

SEQ ID NO: 34086 - RNA, 24 nt, Artificial Sequence
  Synthetic
acucuaaggauucccgguacaaag

SEQ ID NO: 34087 - RNA, 18 nt, Artificial Sequence
  Synthetic
agcgauagccaggacaag

SEQ ID NO: 34088 - RNA, 19 nt, Artificial Sequence
  Synthetic
cagcgauagccaggacaag

SEQ ID NO: 34089 - RNA, 20 nt, Artificial Sequence
  Synthetic
ccagcgauagccaggacaag

SEQ ID NO: 34090 - RNA, 21 nt, Artificial Sequence
  Synthetic
uccagcgauagccaggacaag

SEQ ID NO: 34091 - RNA, 22 nt, Artificial Sequence
  Synthetic
auccagcgauagccaggacaag

SEQ ID NO: 34092 - RNA, 23 nt, Artificial Sequence
  Synthetic
cauccagcgauagccaggacaag

SEQ ID NO: 34093 - RNA, 24 nt, Artificial Sequence
  Synthetic
acauccagcgauagccaggacaag

SEQ ID NO: 34094 - RNA, 18 nt, Artificial Sequence
  Synthetic
agaagaaccaacaagaag

SEQ ID NO: 34095 - RNA, 19 nt, Artificial Sequence
  Synthetic
cagaagaaccaacaagaag

SEQ ID NO: 34096 - RNA, 20 nt, Artificial Sequence
  Synthetic
ccagaagaaccaacaagaag

SEQ ID NO: 34097 - RNA, 21 nt, Artificial Sequence
  Synthetic
uccagaagaaccaacaagaag

SEQ ID NO: 34098 - RNA, 22 nt, Artificial Sequence
  Synthetic
guccagaagaaccaacaagaag

SEQ ID NO: 34099 - RNA, 23 nt, Artificial Sequence
  Synthetic
aguccagaagaaccaacaagaag

SEQ ID NO: 34100 - RNA, 24 nt, Artificial Sequence
  Synthetic
uaguccagaagaaccaacaagaag

SEQ ID NO: 34101 - RNA, 18 nt, Artificial Sequence
  Synthetic
aauacuaacauugggaag

SEQ ID NO: 34102 - RNA, 19 nt, Artificial Sequence
  Synthetic
gaauacuaacauugggaag

SEQ ID NO: 34103 - RNA, 20 nt, Artificial Sequence
  Synthetic
ggaauacuaacauugggaag

SEQ ID NO: 34104 - RNA, 21 nt, Artificial Sequence
  Synthetic
aggaauacuaacauugggaag

SEQ ID NO: 34105 - RNA, 22 nt, Artificial Sequence
  Synthetic
aaggaauacuaacauugggaag

SEQ ID NO: 34106 - RNA, 23 nt, Artificial Sequence
  Synthetic
caaggaauacuaacauugggaag

SEQ ID NO: 34107 - RNA, 24 nt, Artificial Sequence
  Synthetic
ccaaggaauacuaacauugggaag

SEQ ID NO: 34108 - RNA, 18 nt, Artificial Sequence
  Synthetic
cauuugguggucuauaag

SEQ ID NO: 34109 - RNA, 19 nt, Artificial Sequence
  Synthetic
gcauuugguggucuauaag

SEQ ID NO: 34110 - RNA, 20 nt, Artificial Sequence
  Synthetic
ggcauuugguggucuauaag

SEQ ID NO: 34111 - RNA, 21 nt, Artificial Sequence
  Synthetic
gggcauuugguggucuauaag

SEQ ID NO: 34112 - RNA, 22 nt, Artificial Sequence
  Synthetic
ggggcauuugguggucuauaag

SEQ ID NO: 34113 - RNA, 23 nt, Artificial Sequence
  Synthetic
aggggcauuugguggucuauaag

SEQ ID NO: 34114 - RNA, 24 nt, Artificial Sequence
  Synthetic
uaggggcauuugguggucuauaag

SEQ ID NO: 34115 - RNA, 18 nt, Artificial Sequence
  Synthetic
cgagaagaucacgaacag

SEQ ID NO: 34116 - RNA, 19 nt, Artificial Sequence
  Synthetic
ucgagaagaucacgaacag

SEQ ID NO: 34117 - RNA, 20 nt, Artificial Sequence
  Synthetic
gucgagaagaucacgaacag

SEQ ID NO: 34118 - RNA, 21 nt, Artificial Sequence
  Synthetic
ugucgagaagaucacgaacag

SEQ ID NO: 34119 - RNA, 22 nt, Artificial Sequence
  Synthetic
gugucgagaagaucacgaacag

SEQ ID NO: 34120 - RNA, 23 nt, Artificial Sequence
  Synthetic
ggugucgagaagaucacgaacag

SEQ ID NO: 34121 - RNA, 24 nt, Artificial Sequence
  Synthetic
cggugucgagaagaucacgaacag

SEQ ID NO: 34122 - RNA, 18 nt, Artificial Sequence
  Synthetic
gcagaugagaaggaacag

SEQ ID NO: 34123 - RNA, 19 nt, Artificial Sequence
  Synthetic
ggcagaugagaaggaacag

SEQ ID NO: 34124 - RNA, 20 nt, Artificial Sequence
  Synthetic
cggcagaugagaaggaacag

SEQ ID NO: 34125 - RNA, 21 nt, Artificial Sequence
  Synthetic
ccggcagaugagaaggaacag

SEQ ID NO: 34126 - RNA, 22 nt, Artificial Sequence
  Synthetic
uccggcagaugagaaggaacag

SEQ ID NO: 34127 - RNA, 23 nt, Artificial Sequence
  Synthetic
guccggcagaugagaaggaacag

SEQ ID NO: 34128 - RNA, 24 nt, Artificial Sequence
  Synthetic
gguccggcagaugagaaggaacag

SEQ ID NO: 34129 - RNA, 18 nt, Artificial Sequence
  Synthetic
gcuuggaggcuugaacag

SEQ ID NO: 34130 - RNA, 19 nt, Artificial Sequence
  Synthetic
agcuuggaggcuugaacag

SEQ ID NO: 34131 - RNA, 20 nt, Artificial Sequence
  Synthetic
cagcuuggaggcuugaacag

SEQ ID NO: 34132 - RNA, 21 nt, Artificial Sequence
  Synthetic
acagcuuggaggcuugaacag

SEQ ID NO: 34133 - RNA, 22 nt, Artificial Sequence
  Synthetic
cacagcuuggaggcuugaacag

SEQ ID NO: 34134 - RNA, 23 nt, Artificial Sequence
  Synthetic
gcacagcuuggaggcuugaacag

SEQ ID NO: 34135 - RNA, 24 nt, Artificial Sequence
  Synthetic
ggcacagcuuggaggcuugaacag

SEQ ID NO: 34136 - RNA, 18 nt, Artificial Sequence
  Synthetic
uagcugaaagccagacag

SEQ ID NO: 34137 - RNA, 19 nt, Artificial Sequence
  Synthetic
auagcugaaagccagacag

SEQ ID NO: 34138 - RNA, 20 nt, Artificial Sequence
  Synthetic
uauagcugaaagccagacag

SEQ ID NO: 34139 - RNA, 21 nt, Artificial Sequence
  Synthetic
auauagcugaaagccagacag

SEQ ID NO: 34140 - RNA, 22 nt, Artificial Sequence
  Synthetic
  misc_feature (1)..(1): n is a, c, g, or u
nauauagcugaaagccagacag

SEQ ID NO: 34141 - RNA, 23 nt, Artificial Sequence
  Synthetic
  misc_feature (2)..(2): n is a, c, g, or u
cnauauagcugaaagccagacag

SEQ ID NO: 34142 - RNA, 24 nt, Artificial Sequence
  Synthetic
  misc_feature (3)..(3): n is a, c, g, or u
ucnauauagcugaaagccagacag

SEQ ID NO: 34143 - RNA, 18 nt, Artificial Sequence
  Synthetic
uggccaagccccaaccag

SEQ ID NO: 34144 - RNA, 19 nt, Artificial Sequence
  Synthetic
auggccaagccccaaccag

SEQ ID NO: 34145 - RNA, 20 nt, Artificial Sequence
  Synthetic
gauggccaagccccaaccag

SEQ ID NO: 34146 - RNA, 21 nt, Artificial Sequence
  Synthetic
cgauggccaagccccaaccag

SEQ ID NO: 34147 - RNA, 22 nt, Artificial Sequence
  Synthetic
ccgauggccaagccccaaccag

SEQ ID NO: 34148 - RNA, 23 nt, Artificial Sequence
  Synthetic
  misc_feature (1)..(1): n is a, c, g, or u
nccgauggccaagccccaaccag

SEQ ID NO: 34149 - RNA, 24 nt, Artificial Sequence
  Synthetic
  misc_feature (2)..(2): n is a, c, g, or u
gnccgauggccaagccccaaccag

SEQ ID NO: 34150 - RNA, 18 nt, Artificial Sequence
  Synthetic
cugaacuggagccaccag

SEQ ID NO: 34151 - RNA, 19 nt, Artificial Sequence
  Synthetic
ccugaacuggagccaccag

SEQ ID NO: 34152 - RNA, 20 nt, Artificial Sequence
  Synthetic
cccugaacuggagccaccag

SEQ ID NO: 34153 - RNA, 21 nt, Artificial Sequence
  Synthetic
ucccugaacuggagccaccag

SEQ ID NO: 34154 - RNA, 22 nt, Artificial Sequence
  Synthetic
aucccugaacuggagccaccag

SEQ ID NO: 34155 - RNA, 23 nt, Artificial Sequence
  Synthetic
uaucccugaacuggagccaccag

SEQ ID NO: 34156 - RNA, 24 nt, Artificial Sequence
  Synthetic
cuaucccugaacuggagccaccag

SEQ ID NO: 34157 - RNA, 18 nt, Artificial Sequence
  Synthetic
cauaccuugauaguccag

SEQ ID NO: 34158 - RNA, 19 nt, Artificial Sequence
  Synthetic
acauaccuugauaguccag

SEQ ID NO: 34159 - RNA, 20 nt, Artificial Sequence
  Synthetic
aacauaccuugauaguccag

SEQ ID NO: 34160 - RNA, 21 nt, Artificial Sequence
  Synthetic
caacauaccuugauaguccag

SEQ ID NO: 34161 - RNA, 22 nt, Artificial Sequence
  Synthetic
gcaacauaccuugauaguccag

SEQ ID NO: 34162 - RNA, 23 nt, Artificial Sequence
  Synthetic
ggcaacauaccuugauaguccag

SEQ ID NO: 34163 - RNA, 24 nt, Artificial Sequence
  Synthetic
gggcaacauaccuugauaguccag

SEQ ID NO: 34164 - RNA, 18 nt, Artificial Sequence
  Synthetic
uugguggucuauaagcag

SEQ ID NO: 34165 - RNA, 19 nt, Artificial Sequence
  Synthetic
uuugguggucuauaagcag

SEQ ID NO: 34166 - RNA, 20 nt, Artificial Sequence
  Synthetic
auuugguggucuauaagcag

SEQ ID NO: 34167 - RNA, 21 nt, Artificial Sequence
  Synthetic
cauuugguggucuauaagcag

SEQ ID NO: 34168 - RNA, 22 nt, Artificial Sequence
  Synthetic
gcauuugguggucuauaagcag

SEQ ID NO: 34169 - RNA, 23 nt, Artificial Sequence
  Synthetic
ggcauuugguggucuauaagcag

SEQ ID NO: 34170 - RNA, 24 nt, Artificial Sequence
  Synthetic
gggcauuugguggucuauaagcag

SEQ ID NO: 34171 - RNA, 18 nt, Artificial Sequence
  Synthetic
ggucggcaggaacggcag

SEQ ID NO: 34172 - RNA, 19 nt, Artificial Sequence
  Synthetic
uggucggcaggaacggcag

SEQ ID NO: 34173 - RNA, 20 nt, Artificial Sequence
  Synthetic
guggucggcaggaacggcag

SEQ ID NO: 34174 - RNA, 21 nt, Artificial Sequence
  Synthetic
cguggucggcaggaacggcag

SEQ ID NO: 34175 - RNA, 22 nt, Artificial Sequence
  Synthetic
ccguggucggcaggaacggcag

SEQ ID NO: 34176 - RNA, 23 nt, Artificial Sequence
  Synthetic
cccguggucggcaggaacggcag

SEQ ID NO: 34177 - RNA, 24 nt, Artificial Sequence
  Synthetic
ccccguggucggcaggaacggcag

SEQ ID NO: 34178 - RNA, 18 nt, Artificial Sequence
  Synthetic
gugcacacgguccggcag

SEQ ID NO: 34179 - RNA, 19 nt, Artificial Sequence
  Synthetic
agugcacacgguccggcag

SEQ ID NO: 34180 - RNA, 20 nt, Artificial Sequence
  Synthetic
aagugcacacgguccggcag

SEQ ID NO: 34181 - RNA, 21 nt, Artificial Sequence
  Synthetic
gaagugcacacgguccggcag

SEQ ID NO: 34182 - RNA, 22 nt, Artificial Sequence
  Synthetic
cgaagugcacacgguccggcag

SEQ ID NO: 34183 - RNA, 23 nt, Artificial Sequence
  Synthetic
gcgaagugcacacgguccggcag

SEQ ID NO: 34184 - RNA, 24 nt, Artificial Sequence
  Synthetic
agcgaagugcacacgguccggcag

SEQ ID NO: 34185 - RNA, 18 nt, Artificial Sequence
  Synthetic
cgcaguauggaucggcag

SEQ ID NO: 34186 - RNA, 19 nt, Artificial Sequence
  Synthetic
ccgcaguauggaucggcag

SEQ ID NO: 34187 - RNA, 20 nt, Artificial Sequence
  Synthetic
uccgcaguauggaucggcag

SEQ ID NO: 34188 - RNA, 21 nt, Artificial Sequence
  Synthetic
uuccgcaguauggaucggcag

SEQ ID NO: 34189 - RNA, 22 nt, Artificial Sequence
  Synthetic
guuccgcaguauggaucggcag

SEQ ID NO: 34190 - RNA, 23 nt, Artificial Sequence
  Synthetic
aguuccgcaguauggaucggcag

SEQ ID NO: 34191 - RNA, 24 nt, Artificial Sequence
  Synthetic
gaguuccgcaguauggaucggcag

SEQ ID NO: 34192 - RNA, 18 nt, Artificial Sequence
  Synthetic
agagaugauuaggcagag

SEQ ID NO: 34193 - RNA, 19 nt, Artificial Sequence
  Synthetic
aagagaugauuaggcagag

SEQ ID NO: 34194 - RNA, 20 nt, Artificial Sequence
  Synthetic
caagagaugauuaggcagag

SEQ ID NO: 34195 - RNA, 21 nt, Artificial Sequence
  Synthetic
acaagagaugauuaggcagag

SEQ ID NO: 34196 - RNA, 22 nt, Artificial Sequence
  Synthetic
aacaagagaugauuaggcagag

SEQ ID NO: 34197 - RNA, 23 nt, Artificial Sequence
  Synthetic
gaacaagagaugauuaggcagag

SEQ ID NO: 34198 - RNA, 24 nt, Artificial Sequence
  Synthetic
ugaacaagagaugauuaggcagag

SEQ ID NO: 34199 - RNA, 18 nt, Artificial Sequence
  Synthetic
uccauguaacgugcagag

SEQ ID NO: 34200 - RNA, 19 nt, Artificial Sequence
  Synthetic
uuccauguaacgugcagag

SEQ ID NO: 34201 - RNA, 20 nt, Artificial Sequence
  Synthetic
uuuccauguaacgugcagag

SEQ ID NO: 34202 - RNA, 21 nt, Artificial Sequence
  Synthetic
guuuccauguaacgugcagag

SEQ ID NO: 34203 - RNA, 22 nt, Artificial Sequence
  Synthetic
gguuuccauguaacgugcagag

SEQ ID NO: 34204 - RNA, 23 nt, Artificial Sequence
  Synthetic
cgguuuccauguaacgugcagag

SEQ ID NO: 34205 - RNA, 24 nt, Artificial Sequence
  Synthetic
gcgguuuccauguaacgugcagag

SEQ ID NO: 34206 - RNA, 18 nt, Artificial Sequence
  Synthetic
ucucuuagugguggagag

SEQ ID NO: 34207 - RNA, 19 nt, Artificial Sequence
  Synthetic
gucucuuagugguggagag

SEQ ID NO: 34208 - RNA, 20 nt, Artificial Sequence
  Synthetic
ugucucuuagugguggagag

SEQ ID NO: 34209 - RNA, 21 nt, Artificial Sequence
  Synthetic
cugucucuuagugguggagag

SEQ ID NO: 34210 - RNA, 22 nt, Artificial Sequence
  Synthetic
acugucucuuagugguggagag

SEQ ID NO: 34211 - RNA, 23 nt, Artificial Sequence
  Synthetic
gacugucucuuagugguggagag

SEQ ID NO: 34212 - RNA, 24 nt, Artificial Sequence
  Synthetic
ugacugucucuuagugguggagag

SEQ ID NO: 34213 - RNA, 18 nt, Artificial Sequence
  Synthetic
ccccgccuguaacacgag

SEQ ID NO: 34214 - RNA, 19 nt, Artificial Sequence
  Synthetic
accccgccuguaacacgag

SEQ ID NO: 34215 - RNA, 20 nt, Artificial Sequence
  Synthetic
aaccccgccuguaacacgag

SEQ ID NO: 34216 - RNA, 21 nt, Artificial Sequence
  Synthetic
aaaccccgccuguaacacgag

SEQ ID NO: 34217 - RNA, 22 nt, Artificial Sequence
  Synthetic
aaaaccccgccuguaacacgag

SEQ ID NO: 34218 - RNA, 23 nt, Artificial Sequence
  Synthetic
aaaaaccccgccuguaacacgag

SEQ ID NO: 34219 - RNA, 24 nt, Artificial Sequence
  Synthetic
gaaaaaccccgccuguaacacgag

SEQ ID NO: 34220 - RNA, 18 nt, Artificial Sequence
  Synthetic
gagaucuucgucugcgag

SEQ ID NO: 34221 - RNA, 19 nt, Artificial Sequence
  Synthetic
ugagaucuucgucugcgag

SEQ ID NO: 34222 - RNA, 20 nt, Artificial Sequence
  Synthetic
uugagaucuucgucugcgag

SEQ ID NO: 34223 - RNA, 21 nt, Artificial Sequence
  Synthetic
auugagaucuucgucugcgag

SEQ ID NO: 34224 - RNA, 22 nt, Artificial Sequence
  Synthetic
gauugagaucuucgucugcgag

SEQ ID NO: 34225 - RNA, 23 nt, Artificial Sequence
  Synthetic
cgauugagaucuucgucugcgag

SEQ ID NO: 34226 - RNA, 24 nt, Artificial Sequence
  Synthetic
gcgauugagaucuucgucugcgag

SEQ ID NO: 34227 - RNA, 18 nt, Artificial Sequence
  Synthetic
guucuuuccccacucgag

SEQ ID NO: 34228 - RNA, 19 nt, Artificial Sequence
  Synthetic
gguucuuuccccacucgag

SEQ ID NO: 34229 - RNA, 20 nt, Artificial Sequence
  Synthetic
agguucuuuccccacucgag

SEQ ID NO: 34230 - RNA, 21 nt, Artificial Sequence
  Synthetic
aagguucuuuccccacucgag

SEQ ID NO: 34231 - RNA, 22 nt, Artificial Sequence
  Synthetic
aaagguucuuuccccacucgag

SEQ ID NO: 34232 - RNA, 23 nt, Artificial Sequence
  Synthetic
gaaagguucuuuccccacucgag

SEQ ID NO: 34233 - RNA, 24 nt, Artificial Sequence
  Synthetic
ggaaagguucuuuccccacucgag

SEQ ID NO: 34234 - RNA, 18 nt, Artificial Sequence
  Synthetic
caggaacggcagacggag

SEQ ID NO: 34235 - RNA, 19 nt, Artificial Sequence
  Synthetic
gcaggaacggcagacggag

SEQ ID NO: 34236 - RNA, 20 nt, Artificial Sequence
  Synthetic
ggcaggaacggcagacggag

SEQ ID NO: 34237 - RNA, 21 nt, Artificial Sequence
  Synthetic
cggcaggaacggcagacggag

SEQ ID NO: 34238 - RNA, 22 nt, Artificial Sequence
  Synthetic
ucggcaggaacggcagacggag

SEQ ID NO: 34239 - RNA, 23 nt, Artificial Sequence
  Synthetic
gucggcaggaacggcagacggag

SEQ ID NO: 34240 - RNA, 24 nt, Artificial Sequence
  Synthetic
ggucggcaggaacggcagacggag

SEQ ID NO: 34241 - RNA, 18 nt, Artificial Sequence
  Synthetic
cacgguccggcagaugag

SEQ ID NO: 34242 - RNA, 19 nt, Artificial Sequence
  Synthetic
acacgguccggcagaugag

SEQ ID NO: 34243 - RNA, 20 nt, Artificial Sequence
  Synthetic
cacacgguccggcagaugag

SEQ ID NO: 34244 - RNA, 21 nt, Artificial Sequence
  Synthetic
gcacacgguccggcagaugag

SEQ ID NO: 34245 - RNA, 22 nt, Artificial Sequence
  Synthetic
ugcacacgguccggcagaugag

SEQ ID NO: 34246 - RNA, 23 nt, Artificial Sequence
  Synthetic
gugcacacgguccggcagaugag

SEQ ID NO: 34247 - RNA, 24 nt, Artificial Sequence
  Synthetic
agugcacacgguccggcagaugag

SEQ ID NO: 34248 - RNA, 18 nt, Artificial Sequence
  Synthetic
ugagugcuguauggugag

SEQ ID NO: 34249 - RNA, 19 nt, Artificial Sequence
  Synthetic
cugagugcuguauggugag

SEQ ID NO: 34250 - RNA, 20 nt, Artificial Sequence
  Synthetic
ccugagugcuguauggugag

SEQ ID NO: 34251 - RNA, 21 nt, Artificial Sequence
  Synthetic
gccugagugcuguauggugag

SEQ ID NO: 34252 - RNA, 22 nt, Artificial Sequence
  Synthetic
ugccugagugcuguauggugag

SEQ ID NO: 34253 - RNA, 23 nt, Artificial Sequence
  Synthetic
uugccugagugcuguauggugag

SEQ ID NO: 34254 - RNA, 24 nt, Artificial Sequence
  Synthetic
cuugccugagugcuguauggugag

SEQ ID NO: 34255 - RNA, 18 nt, Artificial Sequence
  Synthetic
acauagaguugccuugag

SEQ ID NO: 34256 - RNA, 19 nt, Artificial Sequence
  Synthetic
uacauagaguugccuugag

SEQ ID NO: 34257 - RNA, 20 nt, Artificial Sequence
  Synthetic
auacauagaguugccuugag

SEQ ID NO: 34258 - RNA, 21 nt, Artificial Sequence
  Synthetic
gauacauagaguugccuugag

SEQ ID NO: 34259 - RNA, 22 nt, Artificial Sequence
  Synthetic
ggauacauagaguugccuugag

SEQ ID NO: 34260 - RNA, 23 nt, Artificial Sequence
  Synthetic
gggauacauagaguugccuugag

SEQ ID NO: 34261 - RNA, 24 nt, Artificial Sequence
  Synthetic
agggauacauagaguugccuugag

SEQ ID NO: 34262 - RNA, 18 nt, Artificial Sequence
  Synthetic
agaugugagaggcaauag

SEQ ID NO: 34263 - RNA, 19 nt, Artificial Sequence
  Synthetic
gagaugugagaggcaauag

SEQ ID NO: 34264 - RNA, 20 nt, Artificial Sequence
  Synthetic
cgagaugugagaggcaauag

SEQ ID NO: 34265 - RNA, 21 nt, Artificial Sequence
  Synthetic
acgagaugugagaggcaauag

SEQ ID NO: 34266 - RNA, 22 nt, Artificial Sequence
  Synthetic
gacgagaugugagaggcaauag

SEQ ID NO: 34267 - RNA, 23 nt, Artificial Sequence
  Synthetic
ugacgagaugugagaggcaauag

SEQ ID NO: 34268 - RNA, 24 nt, Artificial Sequence
  Synthetic
uugacgagaugugagaggcaauag

SEQ ID NO: 34269 - RNA, 18 nt, Artificial Sequence
  Synthetic
  misc_feature (12)..(12): n is a, c, g, or u
accacaucaucnauauag

SEQ ID NO: 34270 - RNA, 19 nt, Artificial Sequence
  Synthetic
  misc_feature (13)..(13): n is a, c, g, or u
uaccacaucaucnauauag

SEQ ID NO: 34271 - RNA, 20 nt, Artificial Sequence
  Synthetic
  misc_feature (14)..(14): n is a, c, g, or u
auaccacaucaucnauauag

SEQ ID NO: 34272 - RNA, 21 nt, Artificial Sequence
  Synthetic
  misc_feature (15)..(15): n is a, c, g, or u
aauaccacaucaucnauauag

SEQ ID NO: 34273 - RNA, 22 nt, Artificial Sequence
  Synthetic
  misc_feature (16)..(16): n is a, c, g, or u
caauaccacaucaucnauauag

SEQ ID NO: 34274 - RNA, 23 nt, Artificial Sequence
  Synthetic
  misc_feature (17)..(17): n is a, c, g, or u
ccaauaccacaucaucnauauag

SEQ ID NO: 34275 - RNA, 24 nt, Artificial Sequence
  Synthetic
  misc_feature (18)..(18): n is a, c, g, or u
cccaauaccacaucaucnauauag

SEQ ID NO: 34276 - RNA, 18 nt, Artificial Sequence
  Synthetic
gauuaaagacagguauag

SEQ ID NO: 34277 - RNA, 19 nt, Artificial Sequence
  Synthetic
ggauuaaagacagguauag

SEQ ID NO: 34278 - RNA, 20 nt, Artificial Sequence
  Synthetic
aggauuaaagacagguauag

SEQ ID NO: 34279 - RNA, 21 nt, Artificial Sequence
  Synthetic
caggauuaaagacagguauag

SEQ ID NO: 34280 - RNA, 22 nt, Artificial Sequence
  Synthetic
ucaggauuaaagacagguauag

SEQ ID NO: 34281 - RNA, 23 nt, Artificial Sequence
  Synthetic
aucaggauuaaagacagguauag

SEQ ID NO: 34282 - RNA, 24 nt, Artificial Sequence
  Synthetic
aaucaggauuaaagacagguauag

SEQ ID NO: 34283 - RNA, 18 nt, Artificial Sequence
  Synthetic
gaugagaaggaacagacg

SEQ ID NO: 34284 - RNA, 19 nt, Artificial Sequence
  Synthetic
agaugagaaggaacagacg

SEQ ID NO: 34285 - RNA, 20 nt, Artificial Sequence
  Synthetic
cagaugagaaggaacagacg

SEQ ID NO: 34286 - RNA, 21 nt, Artificial Sequence
  Synthetic
gcagaugagaaggaacagacg

SEQ ID NO: 34287 - RNA, 22 nt, Artificial Sequence
  Synthetic
ggcagaugagaaggaacagacg

SEQ ID NO: 34288 - RNA, 23 nt, Artificial Sequence
  Synthetic
cggcagaugagaaggaacagacg

SEQ ID NO: 34289 - RNA, 24 nt, Artificial Sequence
  Synthetic
ccggcagaugagaaggaacagacg

SEQ ID NO: 34290 - RNA, 18 nt, Artificial Sequence
  Synthetic
cggcaggaacggcagacg

SEQ ID NO: 34291 - RNA, 19 nt, Artificial Sequence
  Synthetic
ucggcaggaacggcagacg

SEQ ID NO: 34292 - RNA, 20 nt, Artificial Sequence
  Synthetic
gucggcaggaacggcagacg

SEQ ID NO: 34293 - RNA, 21 nt, Artificial Sequence
  Synthetic
ggucggcaggaacggcagacg

SEQ ID NO: 34294 - RNA, 22 nt, Artificial Sequence
  Synthetic
uggucggcaggaacggcagacg

SEQ ID NO: 34295 - RNA, 23 nt, Artificial Sequence
  Synthetic
guggucggcaggaacggcagacg

SEQ ID NO: 34296 - RNA, 24 nt, Artificial Sequence
  Synthetic
cguggucggcaggaacggcagacg

SEQ ID NO: 34297 - RNA, 18 nt, Artificial Sequence
  Synthetic
aucuucgucugcgaggcg

SEQ ID NO: 34298 - RNA, 19 nt, Artificial Sequence
  Synthetic
gaucuucgucugcgaggcg

SEQ ID NO: 34299 - RNA, 20 nt, Artificial Sequence
  Synthetic
agaucuucgucugcgaggcg

SEQ ID NO: 34300 - RNA, 21 nt, Artificial Sequence
  Synthetic
gagaucuucgucugcgaggcg

SEQ ID NO: 34301 - RNA, 22 nt, Artificial Sequence
  Synthetic
ugagaucuucgucugcgaggcg

SEQ ID NO: 34302 - RNA, 23 nt, Artificial Sequence
  Synthetic
uugagaucuucgucugcgaggcg

SEQ ID NO: 34303 - RNA, 24 nt, Artificial Sequence
  Synthetic
auugagaucuucgucugcgaggcg

SEQ ID NO: 34304 - RNA, 18 nt, Artificial Sequence
  Synthetic
cgagggaguucuucuucg

SEQ ID NO: 34305 - RNA, 19 nt, Artificial Sequence
  Synthetic
gcgagggaguucuucuucg

SEQ ID NO: 34306 - RNA, 20 nt, Artificial Sequence
  Synthetic
ggcgagggaguucuucuucg

SEQ ID NO: 34307 - RNA, 21 nt, Artificial Sequence
  Synthetic
aggcgagggaguucuucuucg

SEQ ID NO: 34308 - RNA, 22 nt, Artificial Sequence
  Synthetic
gaggcgagggaguucuucuucg

SEQ ID NO: 34309 - RNA, 23 nt, Artificial Sequence
  Synthetic
cgaggcgagggaguucuucuucg

SEQ ID NO: 34310 - RNA, 24 nt, Artificial Sequence
  Synthetic
gcgaggcgagggaguucuucuucg

SEQ ID NO: 34311 - RNA, 18 nt, Artificial Sequence
  Synthetic
augaggcauagcagcagg

SEQ ID NO: 34312 - RNA, 19 nt, Artificial Sequence
  Synthetic
gaugaggcauagcagcagg

SEQ ID NO: 34313 - RNA, 20 nt, Artificial Sequence
  Synthetic
agaugaggcauagcagcagg

SEQ ID NO: 34314 - RNA, 21 nt, Artificial Sequence
  Synthetic
aagaugaggcauagcagcagg

SEQ ID NO: 34315 - RNA, 22 nt, Artificial Sequence
  Synthetic
gaagaugaggcauagcagcagg

SEQ ID NO: 34316 - RNA, 23 nt, Artificial Sequence
  Synthetic
agaagaugaggcauagcagcagg

SEQ ID NO: 34317 - RNA, 24 nt, Artificial Sequence
  Synthetic
aagaagaugaggcauagcagcagg

SEQ ID NO: 34318 - RNA, 18 nt, Artificial Sequence
  Synthetic
acugacgauugguggagg

SEQ ID NO: 34319 - RNA, 19 nt, Artificial Sequence
  Synthetic
gacugacgauugguggagg

SEQ ID NO: 34320 - RNA, 20 nt, Artificial Sequence
  Synthetic
ugacugacgauugguggagg

SEQ ID NO: 34321 - RNA, 21 nt, Artificial Sequence
  Synthetic
cugacugacgauugguggagg

SEQ ID NO: 34322 - RNA, 22 nt, Artificial Sequence
  Synthetic
ccugacugacgauugguggagg

SEQ ID NO: 34323 - RNA, 23 nt, Artificial Sequence
  Synthetic
cccugacugacgauugguggagg

SEQ ID NO: 34324 - RNA, 24 nt, Artificial Sequence
  Synthetic
ucccugacugacgauugguggagg

SEQ ID NO: 34325 - RNA, 18 nt, Artificial Sequence
  Synthetic
uuggugagugauuggagg

SEQ ID NO: 34326 - RNA, 19 nt, Artificial Sequence
  Synthetic
auuggugagugauuggagg

SEQ ID NO: 34327 - RNA, 20 nt, Artificial Sequence
  Synthetic
gauuggugagugauuggagg

SEQ ID NO: 34328 - RNA, 21 nt, Artificial Sequence
  Synthetic
agauuggugagugauuggagg

SEQ ID NO: 34329 - RNA, 22 nt, Artificial Sequence
  Synthetic
gagauuggugagugauuggagg

SEQ ID NO: 34330 - RNA, 23 nt, Artificial Sequence
  Synthetic
ggagauuggugagugauuggagg

SEQ ID NO: 34331 - RNA, 24 nt, Artificial Sequence
  Synthetic
aggagauuggugagugauuggagg

SEQ ID NO: 34332 - RNA, 18 nt, Artificial Sequence
  Synthetic
gaacaagagaugauuagg

SEQ ID NO: 34333 - RNA, 19 nt, Artificial Sequence
  Synthetic
ugaacaagagaugauuagg

SEQ ID NO: 34334 - RNA, 20 nt, Artificial Sequence
  Synthetic
augaacaagagaugauuagg

SEQ ID NO: 34335 - RNA, 21 nt, Artificial Sequence
  Synthetic
caugaacaagagaugauuagg

SEQ ID NO: 34336 - RNA, 22 nt, Artificial Sequence
  Synthetic
acaugaacaagagaugauuagg

SEQ ID NO: 34337 - RNA, 23 nt, Artificial Sequence
  Synthetic
gacaugaacaagagaugauuagg

SEQ ID NO: 34338 - RNA, 24 nt, Artificial Sequence
  Synthetic
ggacaugaacaagagaugauuagg

SEQ ID NO: 34339 - RNA, 18 nt, Artificial Sequence
  Synthetic
agccccaaacggccccgg

SEQ ID NO: 34340 - RNA, 19 nt, Artificial Sequence
  Synthetic
gagccccaaacggccccgg

SEQ ID NO: 34341 - RNA, 20 nt, Artificial Sequence
  Synthetic
agagccccaaacggccccgg

SEQ ID NO: 34342 - RNA, 21 nt, Artificial Sequence
  Synthetic
cagagccccaaacggccccgg

SEQ ID NO: 34343 - RNA, 22 nt, Artificial Sequence
  Synthetic
acagagccccaaacggccccgg

SEQ ID NO: 34344 - RNA, 23 nt, Artificial Sequence
  Synthetic
gacagagccccaaacggccccgg

SEQ ID NO: 34345 - RNA, 24 nt, Artificial Sequence
  Synthetic
cgacagagccccaaacggccccgg

SEQ ID NO: 34346 - RNA, 18 nt, Artificial Sequence
  Synthetic
uuccgcaguauggaucgg

SEQ ID NO: 34347 - RNA, 19 nt, Artificial Sequence
  Synthetic
guuccgcaguauggaucgg

SEQ ID NO: 34348 - RNA, 20 nt, Artificial Sequence
  Synthetic
aguuccgcaguauggaucgg

SEQ ID NO: 34349 - RNA, 21 nt, Artificial Sequence
  Synthetic
gaguuccgcaguauggaucgg

SEQ ID NO: 34350 - RNA, 22 nt, Artificial Sequence
  Synthetic
ggaguuccgcaguauggaucgg

SEQ ID NO: 34351 - RNA, 23 nt, Artificial Sequence
  Synthetic
aggaguuccgcaguauggaucgg

SEQ ID NO: 34352 - RNA, 24 nt, Artificial Sequence
  Synthetic
uaggaguuccgcaguauggaucgg

SEQ ID NO: 34353 - RNA, 18 nt, Artificial Sequence
  Synthetic
ggugcgccccguggucgg

SEQ ID NO: 34354 - RNA, 19 nt, Artificial Sequence
  Synthetic
aggugcgccccguggucgg

SEQ ID NO: 34355 - RNA, 20 nt, Artificial Sequence
  Synthetic
gaggugcgccccguggucgg

SEQ ID NO: 34356 - RNA, 21 nt, Artificial Sequence
  Synthetic
agaggugcgccccguggucgg

SEQ ID NO: 34357 - RNA, 22 nt, Artificial Sequence
  Synthetic
gagaggugcgccccguggucgg

SEQ ID NO: 34358 - RNA, 23 nt, Artificial Sequence
  Synthetic
agagaggugcgccccguggucgg

SEQ ID NO: 34359 - RNA, 24 nt, Artificial Sequence
  Synthetic
aagagaggugcgccccguggucgg

SEQ ID NO: 34360 - RNA, 18 nt, Artificial Sequence
  Synthetic
aggccuccguguggaggg

SEQ ID NO: 34361 - RNA, 19 nt, Artificial Sequence
  Synthetic
aaggccuccguguggaggg

SEQ ID NO: 34362 - RNA, 20 nt, Artificial Sequence
  Synthetic
aaaggccuccguguggaggg

SEQ ID NO: 34363 - RNA, 21 nt, Artificial Sequence
  Synthetic
aaaaggccuccguguggaggg

SEQ ID NO: 34364 - RNA, 22 nt, Artificial Sequence
  Synthetic
caaaaggccuccguguggaggg

SEQ ID NO: 34365 - RNA, 23 nt, Artificial Sequence
  Synthetic
ccaaaaggccuccguguggaggg

SEQ ID NO: 34366 - RNA, 24 nt, Artificial Sequence
  Synthetic
cccaaaaggccuccguguggaggg

SEQ ID NO: 34367 - RNA, 18 nt, Artificial Sequence
  Synthetic
guccaacuggugaucggg

SEQ ID NO: 34368 - RNA, 19 nt, Artificial Sequence
  Synthetic
gguccaacuggugaucggg

SEQ ID NO: 34369 - RNA, 20 nt, Artificial Sequence
  Synthetic
ggguccaacuggugaucggg

SEQ ID NO: 34370 - RNA, 21 nt, Artificial Sequence
  Synthetic
uggguccaacuggugaucggg

SEQ ID NO: 34371 - RNA, 22 nt, Artificial Sequence
  Synthetic
cuggguccaacuggugaucggg

SEQ ID NO: 34372 - RNA, 23 nt, Artificial Sequence
  Synthetic
gcuggguccaacuggugaucggg

SEQ ID NO: 34373 - RNA, 24 nt, Artificial Sequence
  Synthetic
ugcuggguccaacuggugaucggg

SEQ ID NO: 34374 - RNA, 18 nt, Artificial Sequence
  Synthetic
aaagcccaagaugauggg

SEQ ID NO: 34375 - RNA, 19 nt, Artificial Sequence
  Synthetic
gaaagcccaagaugauggg

SEQ ID NO: 34376 - RNA, 20 nt, Artificial Sequence
  Synthetic
cgaaagcccaagaugauggg

SEQ ID NO: 34377 - RNA, 21 nt, Artificial Sequence
  Synthetic
gcgaaagcccaagaugauggg

SEQ ID NO: 34378 - RNA, 22 nt, Artificial Sequence
  Synthetic
ugcgaaagcccaagaugauggg

SEQ ID NO: 34379 - RNA, 23 nt, Artificial Sequence
  Synthetic
uugcgaaagcccaagaugauggg

SEQ ID NO: 34380 - RNA, 24 nt, Artificial Sequence
  Synthetic
uuugcgaaagcccaagaugauggg

SEQ ID NO: 34381 - RNA, 18 nt, Artificial Sequence
  Synthetic
auccuagaggauugcugg

SEQ ID NO: 34382 - RNA, 19 nt, Artificial Sequence
  Synthetic
aauccuagaggauugcugg

SEQ ID NO: 34383 - RNA, 20 nt, Artificial Sequence
  Synthetic
gaauccuagaggauugcugg

SEQ ID NO: 34384 - RNA, 21 nt, Artificial Sequence
  Synthetic
ggaauccuagaggauugcugg

SEQ ID NO: 34385 - RNA, 22 nt, Artificial Sequence
  Synthetic
aggaauccuagaggauugcugg

SEQ ID NO: 34386 - RNA, 23 nt, Artificial Sequence
  Synthetic
aaggaauccuagaggauugcugg

SEQ ID NO: 34387 - RNA, 24 nt, Artificial Sequence
  Synthetic
gaaggaauccuagaggauugcugg

SEQ ID NO: 34388 - RNA, 18 nt, Artificial Sequence
  Synthetic
cugaaagccagacagugg

SEQ ID NO: 34389 - RNA, 19 nt, Artificial Sequence
  Synthetic
gcugaaagccagacagugg

SEQ ID NO: 34390 - RNA, 20 nt, Artificial Sequence
  Synthetic
agcugaaagccagacagugg

SEQ ID NO: 34391 - RNA, 21 nt, Artificial Sequence
  Synthetic
uagcugaaagccagacagugg

SEQ ID NO: 34392 - RNA, 22 nt, Artificial Sequence
  Synthetic
auagcugaaagccagacagugg

SEQ ID NO: 34393 - RNA, 23 nt, Artificial Sequence
  Synthetic
uauagcugaaagccagacagugg

SEQ ID NO: 34394 - RNA, 24 nt, Artificial Sequence
  Synthetic
auauagcugaaagccagacagugg

SEQ ID NO: 34395 - RNA, 18 nt, Artificial Sequence
  Synthetic
augacugucucuuagugg

SEQ ID NO: 34396 - RNA, 19 nt, Artificial Sequence
  Synthetic
gaugacugucucuuagugg

SEQ ID NO: 34397 - RNA, 20 nt, Artificial Sequence
  Synthetic
ggaugacugucucuuagugg

SEQ ID NO: 34398 - RNA, 21 nt, Artificial Sequence
  Synthetic
aggaugacugucucuuagugg

SEQ ID NO: 34399 - RNA, 22 nt, Artificial Sequence
  Synthetic
gaggaugacugucucuuagugg

SEQ ID NO: 34400 - RNA, 23 nt, Artificial Sequence
  Synthetic
ugaggaugacugucucuuagugg

SEQ ID NO: 34401 - RNA, 24 nt, Artificial Sequence
  Synthetic
cugaggaugacugucucuuagugg

SEQ ID NO: 34402 - RNA, 18 nt, Artificial Sequence
  Synthetic
agggucccguacuggugg

SEQ ID NO: 34403 - RNA, 19 nt, Artificial Sequence
  Synthetic
cagggucccguacuggugg

SEQ ID NO: 34404 - RNA, 20 nt, Artificial Sequence
  Synthetic
gcagggucccguacuggugg

SEQ ID NO: 34405 - RNA, 21 nt, Artificial Sequence
  Synthetic
ugcagggucccguacuggugg

SEQ ID NO: 34406 - RNA, 22 nt, Artificial Sequence
  Synthetic
uugcagggucccguacuggugg

SEQ ID NO: 34407 - RNA, 23 nt, Artificial Sequence
  Synthetic
uuugcagggucccguacuggugg

SEQ ID NO: 34408 - RNA, 24 nt, Artificial Sequence
  Synthetic
uuuugcagggucccguacuggugg

SEQ ID NO: 34409 - RNA, 18 nt, Artificial Sequence
  Synthetic
ucccugacugacgauugg

SEQ ID NO: 34410 - RNA, 19 nt, Artificial Sequence
  Synthetic
cucccugacugacgauugg

SEQ ID NO: 34411 - RNA, 20 nt, Artificial Sequence
  Synthetic
ccucccugacugacgauugg

SEQ ID NO: 34412 - RNA, 21 nt, Artificial Sequence
  Synthetic
gccucccugacugacgauugg

SEQ ID NO: 34413 - RNA, 22 nt, Artificial Sequence
  Synthetic
ugccucccugacugacgauugg

SEQ ID NO: 34414 - RNA, 23 nt, Artificial Sequence
  Synthetic
cugccucccugacugacgauugg

SEQ ID NO: 34415 - RNA, 24 nt, Artificial Sequence
  Synthetic
gcugccucccugacugacgauugg

SEQ ID NO: 34416 - RNA, 18 nt, Artificial Sequence
  Synthetic
uugcgaaagcccaagaug

SEQ ID NO: 34417 - RNA, 19 nt, Artificial Sequence
  Synthetic
uuugcgaaagcccaagaug

SEQ ID NO: 34418 - RNA, 20 nt, Artificial Sequence
  Synthetic
uuuugcgaaagcccaagaug

SEQ ID NO: 34419 - RNA, 21 nt, Artificial Sequence
  Synthetic
auuuugcgaaagcccaagaug

SEQ ID NO: 34420 - RNA, 22 nt, Artificial Sequence
  Synthetic
uauuuugcgaaagcccaagaug

SEQ ID NO: 34421 - RNA, 23 nt, Artificial Sequence
  Synthetic
guauuuugcgaaagcccaagaug

SEQ ID NO: 34422 - RNA, 24 nt, Artificial Sequence
  Synthetic
gguauuuugcgaaagcccaagaug

SEQ ID NO: 34423 - RNA, 18 nt, Artificial Sequence
  Synthetic
  misc_feature (8)..(8): n is a, c, g, or u
uaacugcnuuggcagaug

SEQ ID NO: 34424 - RNA, 19 nt, Artificial Sequence
  Synthetic
  misc_feature (9)..(9): n is a, c, g, or u
auaacugcnuuggcagaug

SEQ ID NO: 34425 - RNA, 20 nt, Artificial Sequence
  Synthetic
  misc_feature (10)..(10): n is a, c, g, or u
uauaacugcnuuggcagaug

SEQ ID NO: 34426 - RNA, 21 nt, Artificial Sequence
  Synthetic
  misc_feature (11)..(11): n is a, c, g, or u
auauaacugcnuuggcagaug

SEQ ID NO: 34427 - RNA, 22 nt, Artificial Sequence
  Synthetic
  misc_feature (12)..(12): n is a, c, g, or u
uauauaacugcnuuggcagaug

SEQ ID NO: 34428 - RNA, 23 nt, Artificial Sequence
  Synthetic
  misc_feature (13)..(13): n is a, c, g, or u
uuauauaacugcnuuggcagaug

SEQ ID NO: 34429 - RNA, 24 nt, Artificial Sequence
  Synthetic
  misc_feature (14)..(14): n is a, c, g, or u
cuuauauaacugcnuuggcagaug

SEQ ID NO: 34430 - RNA, 18 nt, Artificial Sequence
  Synthetic
aggcauagcagcaggaug

SEQ ID NO: 34431 - RNA, 19 nt, Artificial Sequence
  Synthetic
gaggcauagcagcaggaug

SEQ ID NO: 34432 - RNA, 20 nt, Artificial Sequence
  Synthetic
ugaggcauagcagcaggaug

SEQ ID NO: 34433 - RNA, 21 nt, Artificial Sequence
  Synthetic
augaggcauagcagcaggaug

SEQ ID NO: 34434 - RNA, 22 nt, Artificial Sequence
  Synthetic
gaugaggcauagcagcaggaug

SEQ ID NO: 34435 - RNA, 23 nt, Artificial Sequence
  Synthetic
agaugaggcauagcagcaggaug

SEQ ID NO: 34436 - RNA, 24 nt, Artificial Sequence
  Synthetic
aagaugaggcauagcagcaggaug

SEQ ID NO: 34437 - RNA, 18 nt, Artificial Sequence
  Synthetic
uugccugagugcuguaug

SEQ ID NO: 34438 - RNA, 19 nt, Artificial Sequence
  Synthetic
cuugccugagugcuguaug

SEQ ID NO: 34439 - RNA, 20 nt, Artificial Sequence
  Synthetic
gcuugccugagugcuguaug

SEQ ID NO: 34440 - RNA, 21 nt, Artificial Sequence
  Synthetic
ugcuugccugagugcuguaug

SEQ ID NO: 34441 - RNA, 22 nt, Artificial Sequence
  Synthetic
uugcuugccugagugcuguaug

SEQ ID NO: 34442 - RNA, 23 nt, Artificial Sequence
  Synthetic
auugcuugccugagugcuguaug

SEQ ID NO: 34443 - RNA, 24 nt, Artificial Sequence
  Synthetic
  misc_feature (1)..(1): n is a, c, g, or u
nauugcuugccugagugcuguaug

SEQ ID NO: 34444 - RNA, 18 nt, Artificial Sequence
  Synthetic
gcaggguccccaauccug

SEQ ID NO: 34445 - RNA, 19 nt, Artificial Sequence
  Synthetic
ugcaggguccccaauccug

SEQ ID NO: 34446 - RNA, 20 nt, Artificial Sequence
  Synthetic
gugcaggguccccaauccug

SEQ ID NO: 34447 - RNA, 21 nt, Artificial Sequence
  Synthetic
ggugcaggguccccaauccug

SEQ ID NO: 34448 - RNA, 22 nt, Artificial Sequence
  Synthetic
cggugcaggguccccaauccug

SEQ ID NO: 34449 - RNA, 23 nt, Artificial Sequence
  Synthetic
ucggugcaggguccccaauccug

SEQ ID NO: 34450 - RNA, 24 nt, Artificial Sequence
  Synthetic
uucggugcaggguccccaauccug

SEQ ID NO: 34451 - RNA, 18 nt, Artificial Sequence
  Synthetic
ccgcuggauucagcgcug

SEQ ID NO: 34452 - RNA, 19 nt, Artificial Sequence
  Synthetic
uccgcuggauucagcgcug

SEQ ID NO: 34453 - RNA, 20 nt, Artificial Sequence
  Synthetic
guccgcuggauucagcgcug

SEQ ID NO: 34454 - RNA, 21 nt, Artificial Sequence
  Synthetic
cguccgcuggauucagcgcug

SEQ ID NO: 34455 - RNA, 22 nt, Artificial Sequence
  Synthetic
ucguccgcuggauucagcgcug

SEQ ID NO: 34456 - RNA, 23 nt, Artificial Sequence
  Synthetic
gucguccgcuggauucagcgcug

SEQ ID NO: 34457 - RNA, 24 nt, Artificial Sequence
  Synthetic
ggucguccgcuggauucagcgcug

SEQ ID NO: 34458 - RNA, 18 nt, Artificial Sequence
  Synthetic
gagcuugguggaaugcug

SEQ ID NO: 34459 - RNA, 19 nt, Artificial Sequence
  Synthetic
agagcuugguggaaugcug

SEQ ID NO: 34460 - RNA, 20 nt, Artificial Sequence
  Synthetic
uagagcuugguggaaugcug

SEQ ID NO: 34461 - RNA, 21 nt, Artificial Sequence
  Synthetic
guagagcuugguggaaugcug

SEQ ID NO: 34462 - RNA, 22 nt, Artificial Sequence
  Synthetic
uguagagcuugguggaaugcug

SEQ ID NO: 34463 - RNA, 23 nt, Artificial Sequence
  Synthetic
uuguagagcuugguggaaugcug

SEQ ID NO: 34464 - RNA, 24 nt, Artificial Sequence
  Synthetic
uuuguagagcuugguggaaugcug

SEQ ID NO: 34465 - RNA, 18 nt, Artificial Sequence
  Synthetic
aauccuagaggauugcug

SEQ ID NO: 34466 - RNA, 19 nt, Artificial Sequence
  Synthetic
gaauccuagaggauugcug

SEQ ID NO: 34467 - RNA, 20 nt, Artificial Sequence
  Synthetic
ggaauccuagaggauugcug

SEQ ID NO: 34468 - RNA, 21 nt, Artificial Sequence
  Synthetic
aggaauccuagaggauugcug

SEQ ID NO: 34469 - RNA, 22 nt, Artificial Sequence
  Synthetic
aaggaauccuagaggauugcug

SEQ ID NO: 34470 - RNA, 23 nt, Artificial Sequence
  Synthetic
gaaggaauccuagaggauugcug

SEQ ID NO: 34471 - RNA, 24 nt, Artificial Sequence
  Synthetic
ggaaggaauccuagaggauugcug

SEQ ID NO: 34472 - RNA, 18 nt, Artificial Sequence
  Synthetic
gcugaaagccagacagug

SEQ ID NO: 34473 - RNA, 19 nt, Artificial Sequence
  Synthetic
agcugaaagccagacagug

SEQ ID NO: 34474 - RNA, 20 nt, Artificial Sequence
  Synthetic
uagcugaaagccagacagug

SEQ ID NO: 34475 - RNA, 21 nt, Artificial Sequence
  Synthetic
auagcugaaagccagacagug

SEQ ID NO: 34476 - RNA, 22 nt, Artificial Sequence
  Synthetic
uauagcugaaagccagacagug

SEQ ID NO: 34477 - RNA, 23 nt, Artificial Sequence
  Synthetic
auauagcugaaagccagacagug

SEQ ID NO: 34478 - RNA, 24 nt, Artificial Sequence
  Synthetic
  misc_feature (1)..(1): n is a, c, g, or u
nauauagcugaaagccagacagug

SEQ ID NO: 34479 - RNA, 18 nt, Artificial Sequence
  Synthetic
gaugacugucucuuagug

SEQ ID NO: 34480 - RNA, 19 nt, Artificial Sequence
  Synthetic
ggaugacugucucuuagug

SEQ ID NO: 34481 - RNA, 20 nt, Artificial Sequence
  Synthetic
aggaugacugucucuuagug

SEQ ID NO: 34482 - RNA, 21 nt, Artificial Sequence
  Synthetic
gaggaugacugucucuuagug

SEQ ID NO: 34483 - RNA, 22 nt, Artificial Sequence
  Synthetic
ugaggaugacugucucuuagug

SEQ ID NO: 34484 - RNA, 23 nt, Artificial Sequence
  Synthetic
cugaggaugacugucucuuagug

SEQ ID NO: 34485 - RNA, 24 nt, Artificial Sequence
  Synthetic
ccugaggaugacugucucuuagug

SEQ ID NO: 34486 - RNA, 18 nt, Artificial Sequence
  Synthetic
cgguuuccauguaacgug

SEQ ID NO: 34487 - RNA, 19 nt, Artificial Sequence
  Synthetic
gcgguuuccauguaacgug

SEQ ID NO: 34488 - RNA, 20 nt, Artificial Sequence
  Synthetic
ggcgguuuccauguaacgug

SEQ ID NO: 34489 - RNA, 21 nt, Artificial Sequence
  Synthetic
uggcgguuuccauguaacgug

SEQ ID NO: 34490 - RNA, 22 nt, Artificial Sequence
  Synthetic
auggcgguuuccauguaacgug

SEQ ID NO: 34491 - RNA, 23 nt, Artificial Sequence
  Synthetic
cauggcgguuuccauguaacgug

SEQ ID NO: 34492 - RNA, 24 nt, Artificial Sequence
  Synthetic
ucauggcgguuuccauguaacgug

SEQ ID NO: 34493 - RNA, 18 nt, Artificial Sequence
  Synthetic
ccccaaaaggccuccgug

SEQ ID NO: 34494 - RNA, 19 nt, Artificial Sequence
  Synthetic
accccaaaaggccuccgug

SEQ ID NO: 34495 - RNA, 20 nt, Artificial Sequence
  Synthetic
caccccaaaaggccuccgug

SEQ ID NO: 34496 - RNA, 21 nt, Artificial Sequence
  Synthetic
ccaccccaaaaggccuccgug

SEQ ID NO: 34497 - RNA, 22 nt, Artificial Sequence
  Synthetic
uccaccccaaaaggccuccgug

SEQ ID NO: 34498 - RNA, 23 nt, Artificial Sequence
  Synthetic
cuccaccccaaaaggccuccgug

SEQ ID NO: 34499 - RNA, 24 nt, Artificial Sequence
  Synthetic
gcuccaccccaaaaggccuccgug

SEQ ID NO: 34500 - RNA, 18 nt, Artificial Sequence
  Synthetic
uacaaagcugaagcggug

SEQ ID NO: 34501 - RNA, 19 nt, Artificial Sequence
  Synthetic
guacaaagcugaagcggug

SEQ ID NO: 34502 - RNA, 20 nt, Artificial Sequence
  Synthetic
gguacaaagcugaagcggug

SEQ ID NO: 34503 - RNA, 21 nt, Artificial Sequence
  Synthetic
cgguacaaagcugaagcggug

SEQ ID NO: 34504 - RNA, 22 nt, Artificial Sequence
  Synthetic
ccgguacaaagcugaagcggug

SEQ ID NO: 34505 - RNA, 23 nt, Artificial Sequence
  Synthetic
cccgguacaaagcugaagcggug

SEQ ID NO: 34506 - RNA, 24 nt, Artificial Sequence
  Synthetic
ucccgguacaaagcugaagcggug

SEQ ID NO: 34507 - RNA, 18 nt, Artificial Sequence
  Synthetic
gacugucucuuaguggug

SEQ ID NO: 34508 - RNA, 19 nt, Artificial Sequence
  Synthetic
ugacugucucuuaguggug

SEQ ID NO: 34509 - RNA, 20 nt, Artificial Sequence
  Synthetic
augacugucucuuaguggug

SEQ ID NO: 34510 - RNA, 21 nt, Artificial Sequence
  Synthetic
gaugacugucucuuaguggug

SEQ ID NO: 34511 - RNA, 22 nt, Artificial Sequence
  Synthetic
ggaugacugucucuuaguggug

SEQ ID NO: 34512 - RNA, 23 nt, Artificial Sequence
  Synthetic
aggaugacugucucuuaguggug

SEQ ID NO: 34513 - RNA, 24 nt, Artificial Sequence
  Synthetic
gaggaugacugucucuuaguggug

SEQ ID NO: 34514 - RNA, 18 nt, Artificial Sequence
  Synthetic
ccaaaaggccuccgugug

SEQ ID NO: 34515 - RNA, 19 nt, Artificial Sequence
  Synthetic
cccaaaaggccuccgugug

SEQ ID NO: 34516 - RNA, 20 nt, Artificial Sequence
  Synthetic
ccccaaaaggccuccgugug

SEQ ID NO: 34517 - RNA, 21 nt, Artificial Sequence
  Synthetic
accccaaaaggccuccgugug

SEQ ID NO: 34518 - RNA, 22 nt, Artificial Sequence
  Synthetic
caccccaaaaggccuccgugug

SEQ ID NO: 34519 - RNA, 23 nt, Artificial Sequence
  Synthetic
ccaccccaaaaggccuccgugug

SEQ ID NO: 34520 - RNA, 24 nt, Artificial Sequence
  Synthetic
uccaccccaaaaggccuccgugug

SEQ ID NO: 34521 - RNA, 18 nt, Artificial Sequence
  Synthetic
caauccuggagaagauug

SEQ ID NO: 34522 - RNA, 19 nt, Artificial Sequence
  Synthetic
ccaauccuggagaagauug

SEQ ID NO: 34523 - RNA, 20 nt, Artificial Sequence
  Synthetic
cccaauccuggagaagauug

SEQ ID NO: 34524 - RNA, 21 nt, Artificial Sequence
  Synthetic
ccccaauccuggagaagauug

SEQ ID NO: 34525 - RNA, 22 nt, Artificial Sequence
  Synthetic
uccccaauccuggagaagauug

SEQ ID NO: 34526 - RNA, 23 nt, Artificial Sequence
  Synthetic
guccccaauccuggagaagauug

SEQ ID NO: 34527 - RNA, 24 nt, Artificial Sequence
  Synthetic
gguccccaauccuggagaagauug

SEQ ID NO: 34528 - RNA, 18 nt, Artificial Sequence
  Synthetic
cucccugacugacgauug

SEQ ID NO: 34529 - RNA, 19 nt, Artificial Sequence
  Synthetic
ccucccugacugacgauug

SEQ ID NO: 34530 - RNA, 20 nt, Artificial Sequence
  Synthetic
gccucccugacugacgauug

SEQ ID NO: 34531 - RNA, 21 nt, Artificial Sequence
  Synthetic
ugccucccugacugacgauug

SEQ ID NO: 34532 - RNA, 22 nt, Artificial Sequence
  Synthetic
cugccucccugacugacgauug

SEQ ID NO: 34533 - RNA, 23 nt, Artificial Sequence
  Synthetic
gcugccucccugacugacgauug

SEQ ID NO: 34534 - RNA, 24 nt, Artificial Sequence
  Synthetic
ggcugccucccugacugacgauug

SEQ ID NO: 34535 - RNA, 18 nt, Artificial Sequence
  Synthetic
gggauuuuguagagcuug

SEQ ID NO: 34536 - RNA, 19 nt, Artificial Sequence
  Synthetic
ugggauuuuguagagcuug

SEQ ID NO: 34537 - RNA, 20 nt, Artificial Sequence
  Synthetic
uugggauuuuguagagcuug

SEQ ID NO: 34538 - RNA, 21 nt, Artificial Sequence
  Synthetic
uuugggauuuuguagagcuug

SEQ ID NO: 34539 - RNA, 22 nt, Artificial Sequence
  Synthetic
cuuugggauuuuguagagcuug

SEQ ID NO: 34540 - RNA, 23 nt, Artificial Sequence
  Synthetic
acuuugggauuuuguagagcuug

SEQ ID NO: 34541 - RNA, 24 nt, Artificial Sequence
  Synthetic
gacuuugggauuuuguagagcuug

SEQ ID NO: 34542 - RNA, 18 nt, Artificial Sequence
  Synthetic
gauagccaggacaaguug

SEQ ID NO: 34543 - RNA, 19 nt, Artificial Sequence
  Synthetic
cgauagccaggacaaguug

SEQ ID NO: 34544 - RNA, 20 nt, Artificial Sequence
  Synthetic
gcgauagccaggacaaguug

SEQ ID NO: 34545 - RNA, 21 nt, Artificial Sequence
  Synthetic
agcgauagccaggacaaguug

SEQ ID NO: 34546 - RNA, 22 nt, Artificial Sequence
  Synthetic
cagcgauagccaggacaaguug

SEQ ID NO: 34547 - RNA, 23 nt, Artificial Sequence
  Synthetic
ccagcgauagccaggacaaguug

SEQ ID NO: 34548 - RNA, 24 nt, Artificial Sequence
  Synthetic
uccagcgauagccaggacaaguug

SEQ ID NO: 34549 - RNA, 18 nt, Artificial Sequence
  Synthetic
gaaaggccuuauaaguug

SEQ ID NO: 34550 - RNA, 19 nt, Artificial Sequence
  Synthetic
agaaaggccuuauaaguug

SEQ ID NO: 34551 - RNA, 20 nt, Artificial Sequence
  Synthetic
gagaaaggccuuauaaguug

SEQ ID NO: 34552 - RNA, 21 nt, Artificial Sequence
  Synthetic
agagaaaggccuuauaaguug

SEQ ID NO: 34553 - RNA, 22 nt, Artificial Sequence
  Synthetic
cagagaaaggccuuauaaguug

SEQ ID NO: 34554 - RNA, 23 nt, Artificial Sequence
  Synthetic
acagagaaaggccuuauaaguug

SEQ ID NO: 34555 - RNA, 24 nt, Artificial Sequence
  Synthetic
uacagagaaaggccuuauaaguug

SEQ ID NO: 34556 - RNA, 18 nt, Artificial Sequence
  Synthetic
ccugacuuugggauuuug

SEQ ID NO: 34557 - RNA, 19 nt, Artificial Sequence
  Synthetic
cccugacuuugggauuuug

SEQ ID NO: 34558 - RNA, 20 nt, Artificial Sequence
  Synthetic
ccccugacuuugggauuuug

SEQ ID NO: 34559 - RNA, 21 nt, Artificial Sequence
  Synthetic
gccccugacuuugggauuuug

SEQ ID NO: 34560 - RNA, 22 nt, Artificial Sequence
  Synthetic
ggccccugacuuugggauuuug

SEQ ID NO: 34561 - RNA, 23 nt, Artificial Sequence
  Synthetic
aggccccugacuuugggauuuug

SEQ ID NO: 34562 - RNA, 24 nt, Artificial Sequence
  Synthetic
caggccccugacuuugggauuuug

SEQ ID NO: 34563 - RNA, 18 nt, Artificial Sequence
  Synthetic
aaaaguaagacaggaaau

SEQ ID NO: 34564 - RNA, 19 nt, Artificial Sequence
  Synthetic
caaaaguaagacaggaaau

SEQ ID NO: 34565 - RNA, 20 nt, Artificial Sequence
  Synthetic
ccaaaaguaagacaggaaau

SEQ ID NO: 34566 - RNA, 21 nt, Artificial Sequence
  Synthetic
cccaaaaguaagacaggaaau

SEQ ID NO: 34567 - RNA, 22 nt, Artificial Sequence
  Synthetic
ucccaaaaguaagacaggaaau

SEQ ID NO: 34568 - RNA, 23 nt, Artificial Sequence
  Synthetic
cucccaaaaguaagacaggaaau

SEQ ID NO: 34569 - RNA, 24 nt, Artificial Sequence
  Synthetic
ucucccaaaaguaagacaggaaau

SEQ ID NO: 34570 - RNA, 18 nt, Artificial Sequence
  Synthetic
ggucgaggauccuggaau

SEQ ID NO: 34571 - RNA, 19 nt, Artificial Sequence
  Synthetic
uggucgaggauccuggaau

SEQ ID NO: 34572 - RNA, 20 nt, Artificial Sequence
  Synthetic
guggucgaggauccuggaau

SEQ ID NO: 34573 - RNA, 21 nt, Artificial Sequence
  Synthetic
gguggucgaggauccuggaau

SEQ ID NO: 34574 - RNA, 22 nt, Artificial Sequence
  Synthetic
ugguggucgaggauccuggaau

SEQ ID NO: 34575 - RNA, 23 nt, Artificial Sequence
  Synthetic
cugguggucgaggauccuggaau

SEQ ID NO: 34576 - RNA, 24 nt, Artificial Sequence
  Synthetic
acugguggucgaggauccuggaau

SEQ ID NO: 34577 - RNA, 18 nt, Artificial Sequence
  Synthetic
gguuuuguacagcaacau

SEQ ID NO: 34578 - RNA, 19 nt, Artificial Sequence
  Synthetic
agguuuuguacagcaacau

SEQ ID NO: 34579 - RNA, 20 nt, Artificial Sequence
  Synthetic
aagguuuuguacagcaacau

SEQ ID NO: 34580 - RNA, 21 nt, Artificial Sequence
  Synthetic
gaagguuuuguacagcaacau

SEQ ID NO: 34581 - RNA, 22 nt, Artificial Sequence
  Synthetic
cgaagguuuuguacagcaacau

SEQ ID NO: 34582 - RNA, 23 nt, Artificial Sequence
  Synthetic
ccgaagguuuuguacagcaacau

SEQ ID NO: 34583 - RNA, 24 nt, Artificial Sequence
  Synthetic
uccgaagguuuuguacagcaacau

SEQ ID NO: 34584 - RNA, 18 nt, Artificial Sequence
  Synthetic
uccaaggaauacuaacau

SEQ ID NO: 34585 - RNA, 19 nt, Artificial Sequence
  Synthetic
guccaaggaauacuaacau

SEQ ID NO: 34586 - RNA, 20 nt, Artificial Sequence
  Synthetic
aguccaaggaauacuaacau

SEQ ID NO: 34587 - RNA, 21 nt, Artificial Sequence
  Synthetic
gaguccaaggaauacuaacau

SEQ ID NO: 34588 - RNA, 22 nt, Artificial Sequence
  Synthetic
ugaguccaaggaauacuaacau

SEQ ID NO: 34589 - RNA, 23 nt, Artificial Sequence
  Synthetic
gugaguccaaggaauacuaacau

SEQ ID NO: 34590 - RNA, 24 nt, Artificial Sequence
  Synthetic
ugugaguccaaggaauacuaacau

SEQ ID NO: 34591 - RNA, 18 nt, Artificial Sequence
  Synthetic
gcacacgguccggcagau

SEQ ID NO: 34592 - RNA, 19 nt, Artificial Sequence
  Synthetic
ugcacacgguccggcagau

SEQ ID NO: 34593 - RNA, 20 nt, Artificial Sequence
  Synthetic
gugcacacgguccggcagau

SEQ ID NO: 34594 - RNA, 21 nt, Artificial Sequence
  Synthetic
agugcacacgguccggcagau

SEQ ID NO: 34595 - RNA, 22 nt, Artificial Sequence
  Synthetic
aagugcacacgguccggcagau

SEQ ID NO: 34596 - RNA, 23 nt, Artificial Sequence
  Synthetic
gaagugcacacgguccggcagau

SEQ ID NO: 34597 - RNA, 24 nt, Artificial Sequence
  Synthetic
cgaagugcacacgguccggcagau

SEQ ID NO: 34598 - RNA, 18 nt, Artificial Sequence
  Synthetic
ggagaagauugacgagau

SEQ ID NO: 34599 - RNA, 19 nt, Artificial Sequence
  Synthetic
uggagaagauugacgagau

SEQ ID NO: 34600 - RNA, 20 nt, Artificial Sequence
  Synthetic
cuggagaagauugacgagau

SEQ ID NO: 34601 - RNA, 21 nt, Artificial Sequence
  Synthetic
ccuggagaagauugacgagau

SEQ ID NO: 34602 - RNA, 22 nt, Artificial Sequence
  Synthetic
uccuggagaagauugacgagau

SEQ ID NO: 34603 - RNA, 23 nt, Artificial Sequence
  Synthetic
auccuggagaagauugacgagau

SEQ ID NO: 34604 - RNA, 24 nt, Artificial Sequence
  Synthetic
aauccuggagaagauugacgagau

SEQ ID NO: 34605 - RNA, 18 nt, Artificial Sequence
  Synthetic
cggaaguguugauaggau

SEQ ID NO: 34606 - RNA, 19 nt, Artificial Sequence
  Synthetic
ccggaaguguugauaggau

SEQ ID NO: 34607 - RNA, 20 nt, Artificial Sequence
  Synthetic
uccggaaguguugauaggau

SEQ ID NO: 34608 - RNA, 21 nt, Artificial Sequence
  Synthetic
cuccggaaguguugauaggau

SEQ ID NO: 34609 - RNA, 22 nt, Artificial Sequence
  Synthetic
ucuccggaaguguugauaggau

SEQ ID NO: 34610 - RNA, 23 nt, Artificial Sequence
  Synthetic
gucuccggaaguguugauaggau

SEQ ID NO: 34611 - RNA, 24 nt, Artificial Sequence
  Synthetic
agucuccggaaguguugauaggau

SEQ ID NO: 34612 - RNA, 18 nt, Artificial Sequence
  Synthetic
ggugaggcgaacaaugau

SEQ ID NO: 34613 - RNA, 19 nt, Artificial Sequence
  Synthetic
uggugaggcgaacaaugau

SEQ ID NO: 34614 - RNA, 20 nt, Artificial Sequence
  Synthetic
auggugaggcgaacaaugau

SEQ ID NO: 34615 - RNA, 21 nt, Artificial Sequence
  Synthetic
uauggugaggcgaacaaugau

SEQ ID NO: 34616 - RNA, 22 nt, Artificial Sequence
  Synthetic
guauggugaggcgaacaaugau

SEQ ID NO: 34617 - RNA, 23 nt, Artificial Sequence
  Synthetic
uguauggugaggcgaacaaugau

SEQ ID NO: 34618 - RNA, 24 nt, Artificial Sequence
  Synthetic
cuguauggugaggcgaacaaugau

SEQ ID NO: 34619 - RNA, 18 nt, Artificial Sequence
  Synthetic
  misc_feature (6)..(6): n is a, c, g, or u
acugcnuuggcagaugau

SEQ ID NO: 34620 - RNA, 19 nt, Artificial Sequence
  Synthetic
  misc_feature (7)..(7): n is a, c, g, or u
aacugcnuuggcagaugau

SEQ ID NO: 34621 - RNA, 20 nt, Artificial Sequence
  Synthetic
  misc_feature (8)..(8): n is a, c, g, or u
uaacugcnuuggcagaugau

SEQ ID NO: 34622 - RNA, 21 nt, Artificial Sequence
  Synthetic
  misc_feature (9)..(9): n is a, c, g, or u
auaacugcnuuggcagaugau

SEQ ID NO: 34623 - RNA, 22 nt, Artificial Sequence
  Synthetic
  misc_feature (10)..(10): n is a, c, g, or u
uauaacugcnuuggcagaugau

SEQ ID NO: 34624 - RNA, 23 nt, Artificial Sequence
  Synthetic
  misc_feature (11)..(11): n is a, c, g, or u
auauaacugcnuuggcagaugau

SEQ ID NO: 34625 - RNA, 24 nt, Artificial Sequence
  Synthetic
  misc_feature (12)..(12): n is a, c, g, or u
uauauaacugcnuuggcagaugau

SEQ ID NO: 34626 - RNA, 18 nt, Artificial Sequence
  Synthetic
aggagauuggugagugau

SEQ ID NO: 34627 - RNA, 19 nt, Artificial Sequence
  Synthetic
caggagauuggugagugau

SEQ ID NO: 34628 - RNA, 20 nt, Artificial Sequence
  Synthetic
acaggagauuggugagugau

SEQ ID NO: 34629 - RNA, 21 nt, Artificial Sequence
  Synthetic
gacaggagauuggugagugau

SEQ ID NO: 34630 - RNA, 22 nt, Artificial Sequence
  Synthetic
ggacaggagauuggugagugau

SEQ ID NO: 34631 - RNA, 23 nt, Artificial Sequence
  Synthetic
aggacaggagauuggugagugau

SEQ ID NO: 34632 - RNA, 24 nt, Artificial Sequence
  Synthetic
gaggacaggagauuggugagugau

SEQ ID NO: 34633 - RNA, 18 nt, Artificial Sequence
  Synthetic
cuggguccaacuggugau

SEQ ID NO: 34634 - RNA, 19 nt, Artificial Sequence
  Synthetic
gcuggguccaacuggugau

SEQ ID NO: 34635 - RNA, 20 nt, Artificial Sequence
  Synthetic
ugcuggguccaacuggugau

SEQ ID NO: 34636 - RNA, 21 nt, Artificial Sequence
  Synthetic
augcuggguccaacuggugau

SEQ ID NO: 34637 - RNA, 22 nt, Artificial Sequence
  Synthetic
aaugcuggguccaacuggugau

SEQ ID NO: 34638 - RNA, 23 nt, Artificial Sequence
  Synthetic
gaaugcuggguccaacuggugau

SEQ ID NO: 34639 - RNA, 24 nt, Artificial Sequence
  Synthetic
ugaaugcuggguccaacuggugau

SEQ ID NO: 34640 - RNA, 18 nt, Artificial Sequence
  Synthetic
cuugaugcaaauggauau

SEQ ID NO: 34641 - RNA, 19 nt, Artificial Sequence
  Synthetic
ucuugaugcaaauggauau

SEQ ID NO: 34642 - RNA, 20 nt, Artificial Sequence
  Synthetic
gucuugaugcaaauggauau

SEQ ID NO: 34643 - RNA, 21 nt, Artificial Sequence
  Synthetic
ugucuugaugcaaauggauau

SEQ ID NO: 34644 - RNA, 22 nt, Artificial Sequence
  Synthetic
augucuugaugcaaauggauau

SEQ ID NO: 34645 - RNA, 23 nt, Artificial Sequence
  Synthetic
aaugucuugaugcaaauggauau

SEQ ID NO: 34646 - RNA, 24 nt, Artificial Sequence
  Synthetic
uaaugucuugaugcaaauggauau

SEQ ID NO: 34647 - RNA, 18 nt, Artificial Sequence
  Synthetic
uuagugugcccugagacu

SEQ ID NO: 34648 - RNA, 19 nt, Artificial Sequence
  Synthetic
guuagugugcccugagacu

SEQ ID NO: 34649 - RNA, 20 nt, Artificial Sequence
  Synthetic
uguuagugugcccugagacu

SEQ ID NO: 34650 - RNA, 21 nt, Artificial Sequence
  Synthetic
uuguuagugugcccugagacu

SEQ ID NO: 34651 - RNA, 22 nt, Artificial Sequence
  Synthetic
guuguuagugugcccugagacu

SEQ ID NO: 34652 - RNA, 23 nt, Artificial Sequence
  Synthetic
aguuguuagugugcccugagacu

SEQ ID NO: 34653 - RNA, 24 nt, Artificial Sequence
  Synthetic
aaguuguuagugugcccugagacu

SEQ ID NO: 34654 - RNA, 18 nt, Artificial Sequence
  Synthetic
  misc_feature (2)..(2): n is a, c, g, or u
anauacaggccccugacu

SEQ ID NO: 34655 - RNA, 19 nt, Artificial Sequence
  Synthetic
  misc_feature (3)..(3): n is a, c, g, or u
aanauacaggccccugacu

SEQ ID NO: 34656 - RNA, 20 nt, Artificial Sequence
  Synthetic
  misc_feature (4)..(4): n is a, c, g, or u
gaanauacaggccccugacu

SEQ ID NO: 34657 - RNA, 21 nt, Artificial Sequence
  Synthetic
  misc_feature (5)..(5): n is a, c, g, or u
ggaanauacaggccccugacu

SEQ ID NO: 34658 - RNA, 22 nt, Artificial Sequence
  Synthetic
  misc_feature (6)..(6): n is a, c, g, or u
aggaanauacaggccccugacu

SEQ ID NO: 34659 - RNA, 23 nt, Artificial Sequence
  Synthetic
  misc_feature (7)..(7): n is a, c, g, or u
caggaanauacaggccccugacu

SEQ ID NO: 34660 - RNA, 24 nt, Artificial Sequence
  Synthetic
  misc_feature (8)..(8): n is a, c, g, or u
gcaggaanauacaggccccugacu

SEQ ID NO: 34661 - RNA, 18 nt, Artificial Sequence
  Synthetic
cuucguuucucauuuacu

SEQ ID NO: 34662 - RNA, 19 nt, Artificial Sequence
  Synthetic
ucuucguuucucauuuacu

SEQ ID NO: 34663 - RNA, 20 nt, Artificial Sequence
  Synthetic
aucuucguuucucauuuacu

SEQ ID NO: 34664 - RNA, 21 nt, Artificial Sequence
  Synthetic
aaucuucguuucucauuuacu

SEQ ID NO: 34665 - RNA, 22 nt, Artificial Sequence
  Synthetic
uaaucuucguuucucauuuacu

SEQ ID NO: 34666 - RNA, 23 nt, Artificial Sequence
  Synthetic
uuaaucuucguuucucauuuacu

SEQ ID NO: 34667 - RNA, 24 nt, Artificial Sequence
  Synthetic
uuuaaucuucguuucucauuuacu

SEQ ID NO: 34668 - RNA, 18 nt, Artificial Sequence
  Synthetic
acagugggggaaagcccu

SEQ ID NO: 34669 - RNA, 19 nt, Artificial Sequence
  Synthetic
gacagugggggaaagcccu

SEQ ID NO: 34670 - RNA, 20 nt, Artificial Sequence
  Synthetic
agacagugggggaaagcccu

SEQ ID NO: 34671 - RNA, 21 nt, Artificial Sequence
  Synthetic
cagacagugggggaaagcccu

SEQ ID NO: 34672 - RNA, 22 nt, Artificial Sequence
  Synthetic
ccagacagugggggaaagcccu

SEQ ID NO: 34673 - RNA, 23 nt, Artificial Sequence
  Synthetic
gccagacagugggggaaagcccu

SEQ ID NO: 34674 - RNA, 24 nt, Artificial Sequence
  Synthetic
agccagacagugggggaaagcccu

SEQ ID NO: 34675 - RNA, 18 nt, Artificial Sequence
  Synthetic
gccacccaaggcacagcu

SEQ ID NO: 34676 - RNA, 19 nt, Artificial Sequence
  Synthetic
agccacccaaggcacagcu

SEQ ID NO: 34677 - RNA, 20 nt, Artificial Sequence
  Synthetic
aagccacccaaggcacagcu

SEQ ID NO: 34678 - RNA, 21 nt, Artificial Sequence
  Synthetic
aaagccacccaaggcacagcu

SEQ ID NO: 34679 - RNA, 22 nt, Artificial Sequence
  Synthetic
uaaagccacccaaggcacagcu

SEQ ID NO: 34680 - RNA, 23 nt, Artificial Sequence
  Synthetic
cuaaagccacccaaggcacagcu

SEQ ID NO: 34681 - RNA, 24 nt, Artificial Sequence
  Synthetic
ccuaaagccacccaaggcacagcu

SEQ ID NO: 34682 - RNA, 18 nt, Artificial Sequence
  Synthetic
cccacaaaaugaagcgcu

SEQ ID NO: 34683 - RNA, 19 nt, Artificial Sequence
  Synthetic
acccacaaaaugaagcgcu

SEQ ID NO: 34684 - RNA, 20 nt, Artificial Sequence
  Synthetic
gacccacaaaaugaagcgcu

SEQ ID NO: 34685 - RNA, 21 nt, Artificial Sequence
  Synthetic
ugacccacaaaaugaagcgcu

SEQ ID NO: 34686 - RNA, 22 nt, Artificial Sequence
  Synthetic
gugacccacaaaaugaagcgcu

SEQ ID NO: 34687 - RNA, 23 nt, Artificial Sequence
  Synthetic
ggugacccacaaaaugaagcgcu

SEQ ID NO: 34688 - RNA, 24 nt, Artificial Sequence
  Synthetic
uggugacccacaaaaugaagcgcu

SEQ ID NO: 34689 - RNA, 18 nt, Artificial Sequence
  Synthetic
uuuugcuccagaccggcu

SEQ ID NO: 34690 - RNA, 19 nt, Artificial Sequence
  Synthetic
guuuugcuccagaccggcu

SEQ ID NO: 34691 - RNA, 20 nt, Artificial Sequence
  Synthetic
aguuuugcuccagaccggcu

SEQ ID NO: 34692 - RNA, 21 nt, Artificial Sequence
  Synthetic
gaguuuugcuccagaccggcu

SEQ ID NO: 34693 - RNA, 22 nt, Artificial Sequence
  Synthetic
ugaguuuugcuccagaccggcu

SEQ ID NO: 34694 - RNA, 23 nt, Artificial Sequence
  Synthetic
augaguuuugcuccagaccggcu

SEQ ID NO: 34695 - RNA, 24 nt, Artificial Sequence
  Synthetic
aaugaguuuugcuccagaccggcu

SEQ ID NO: 34696 - RNA, 18 nt, Artificial Sequence
  Synthetic
gucuaacaacaguagucu

SEQ ID NO: 34697 - RNA, 19 nt, Artificial Sequence
  Synthetic
cgucuaacaacaguagucu

SEQ ID NO: 34698 - RNA, 20 nt, Artificial Sequence
  Synthetic
ucgucuaacaacaguagucu

SEQ ID NO: 34699 - RNA, 21 nt, Artificial Sequence
  Synthetic
uucgucuaacaacaguagucu

SEQ ID NO: 34700 - RNA, 22 nt, Artificial Sequence
  Synthetic
cuucgucuaacaacaguagucu

SEQ ID NO: 34701 - RNA, 23 nt, Artificial Sequence
  Synthetic
ucuucgucuaacaacaguagucu

SEQ ID NO: 34702 - RNA, 24 nt, Artificial Sequence
  Synthetic
cucuucgucuaacaacaguagucu

SEQ ID NO: 34703 - RNA, 18 nt, Artificial Sequence
  Synthetic
cgauugagaucuucgucu

SEQ ID NO: 34704 - RNA, 19 nt, Artificial Sequence
  Synthetic
gcgauugagaucuucgucu

SEQ ID NO: 34705 - RNA, 20 nt, Artificial Sequence
  Synthetic
ggcgauugagaucuucgucu

SEQ ID NO: 34706 - RNA, 21 nt, Artificial Sequence
  Synthetic
cggcgauugagaucuucgucu

SEQ ID NO: 34707 - RNA, 22 nt, Artificial Sequence
  Synthetic
gcggcgauugagaucuucgucu

SEQ ID NO: 34708 - RNA, 23 nt, Artificial Sequence
  Synthetic
cgcggcgauugagaucuucgucu

SEQ ID NO: 34709 - RNA, 24 nt, Artificial Sequence
  Synthetic
acgcggcgauugagaucuucgucu

SEQ ID NO: 34710 - RNA, 18 nt, Artificial Sequence
  Synthetic
aggcgagggaguucuucu

SEQ ID NO: 34711 - RNA, 19 nt, Artificial Sequence
  Synthetic
gaggcgagggaguucuucu

SEQ ID NO: 34712 - RNA, 20 nt, Artificial Sequence
  Synthetic
cgaggcgagggaguucuucu

SEQ ID NO: 34713 - RNA, 21 nt, Artificial Sequence
  Synthetic
gcgaggcgagggaguucuucu

SEQ ID NO: 34714 - RNA, 22 nt, Artificial Sequence
  Synthetic
ugcgaggcgagggaguucuucu

SEQ ID NO: 34715 - RNA, 23 nt, Artificial Sequence
  Synthetic
cugcgaggcgagggaguucuucu

SEQ ID NO: 34716 - RNA, 24 nt, Artificial Sequence
  Synthetic
ucugcgaggcgagggaguucuucu

SEQ ID NO: 34717 - RNA, 18 nt, Artificial Sequence
  Synthetic
gaacagacgggaaaaagu

SEQ ID NO: 34718 - RNA, 19 nt, Artificial Sequence
  Synthetic
cgaacagacgggaaaaagu

SEQ ID NO: 34719 - RNA, 20 nt, Artificial Sequence
  Synthetic
acgaacagacgggaaaaagu

SEQ ID NO: 34720 - RNA, 21 nt, Artificial Sequence
  Synthetic
cacgaacagacgggaaaaagu

SEQ ID NO: 34721 - RNA, 22 nt, Artificial Sequence
  Synthetic
ucacgaacagacgggaaaaagu

SEQ ID NO: 34722 - RNA, 23 nt, Artificial Sequence
  Synthetic
aucacgaacagacgggaaaaagu

SEQ ID NO: 34723 - RNA, 24 nt, Artificial Sequence
  Synthetic
gaucacgaacagacgggaaaaagu

SEQ ID NO: 34724 - RNA, 18 nt, Artificial Sequence
  Synthetic
gcgauagccaggacaagu

SEQ ID NO: 34725 - RNA, 19 nt, Artificial Sequence
  Synthetic
agcgauagccaggacaagu

SEQ ID NO: 34726 - RNA, 20 nt, Artificial Sequence
  Synthetic
cagcgauagccaggacaagu

SEQ ID NO: 34727 - RNA, 21 nt, Artificial Sequence
  Synthetic
ccagcgauagccaggacaagu

SEQ ID NO: 34728 - RNA, 22 nt, Artificial Sequence
  Synthetic
uccagcgauagccaggacaagu

SEQ ID NO: 34729 - RNA, 23 nt, Artificial Sequence
  Synthetic
auccagcgauagccaggacaagu

SEQ ID NO: 34730 - RNA, 24 nt, Artificial Sequence
  Synthetic
cauccagcgauagccaggacaagu

SEQ ID NO: 34731 - RNA, 18 nt, Artificial Sequence
  Synthetic
agcugaaagccagacagu

SEQ ID NO: 34732 - RNA, 19 nt, Artificial Sequence
  Synthetic
uagcugaaagccagacagu

SEQ ID NO: 34733 - RNA, 20 nt, Artificial Sequence
  Synthetic
auagcugaaagccagacagu

SEQ ID NO: 34734 - RNA, 21 nt, Artificial Sequence
  Synthetic
uauagcugaaagccagacagu

SEQ ID NO: 34735 - RNA, 22 nt, Artificial Sequence
  Synthetic
auauagcugaaagccagacagu

SEQ ID NO: 34736 - RNA, 23 nt, Artificial Sequence
  Synthetic
  misc_feature (1)..(1): n is a, c, g, or u
nauauagcugaaagccagacagu

SEQ ID NO: 34737 - RNA, 24 nt, Artificial Sequence
  Synthetic
  misc_feature (2)..(2): n is a, c, g, or u
cnauauagcugaaagccagacagu

SEQ ID NO: 34738 - RNA, 18 nt, Artificial Sequence
  Synthetic
guaaauauuuaguagagu

SEQ ID NO: 34739 - RNA, 19 nt, Artificial Sequence
  Synthetic
gguaaauauuuaguagagu

SEQ ID NO: 34740 - RNA, 20 nt, Artificial Sequence
  Synthetic
ugguaaauauuuaguagagu

SEQ ID NO: 34741 - RNA, 21 nt, Artificial Sequence
  Synthetic
augguaaauauuuaguagagu

SEQ ID NO: 34742 - RNA, 22 nt, Artificial Sequence
  Synthetic
aaugguaaauauuuaguagagu

SEQ ID NO: 34743 - RNA, 23 nt, Artificial Sequence
  Synthetic
uaaugguaaauauuuaguagagu

SEQ ID NO: 34744 - RNA, 24 nt, Artificial Sequence
  Synthetic
cuaaugguaaauauuuaguagagu

SEQ ID NO: 34745 - RNA, 18 nt, Artificial Sequence
  Synthetic
gaugugagaggcaauagu

SEQ ID NO: 34746 - RNA, 19 nt, Artificial Sequence
  Synthetic
agaugugagaggcaauagu

SEQ ID NO: 34747 - RNA, 20 nt, Artificial Sequence
  Synthetic
gagaugugagaggcaauagu

SEQ ID NO: 34748 - RNA, 21 nt, Artificial Sequence
  Synthetic
cgagaugugagaggcaauagu

SEQ ID NO: 34749 - RNA, 22 nt, Artificial Sequence
  Synthetic
acgagaugugagaggcaauagu

SEQ ID NO: 34750 - RNA, 23 nt, Artificial Sequence
  Synthetic
gacgagaugugagaggcaauagu

SEQ ID NO: 34751 - RNA, 24 nt, Artificial Sequence
  Synthetic
ugacgagaugugagaggcaauagu

SEQ ID NO: 34752 - RNA, 18 nt, Artificial Sequence
  Synthetic
accccaaaaggccuccgu

SEQ ID NO: 34753 - RNA, 19 nt, Artificial Sequence
  Synthetic
caccccaaaaggccuccgu

SEQ ID NO: 34754 - RNA, 20 nt, Artificial Sequence
  Synthetic
ccaccccaaaaggccuccgu

SEQ ID NO: 34755 - RNA, 21 nt, Artificial Sequence
  Synthetic
uccaccccaaaaggccuccgu

SEQ ID NO: 34756 - RNA, 22 nt, Artificial Sequence
  Synthetic
cuccaccccaaaaggccuccgu

SEQ ID NO: 34757 - RNA, 23 nt, Artificial Sequence
  Synthetic
gcuccaccccaaaaggccuccgu

SEQ ID NO: 34758 - RNA, 24 nt, Artificial Sequence
  Synthetic
ggcuccaccccaaaaggccuccgu

SEQ ID NO: 34759 - RNA, 18 nt, Artificial Sequence
  Synthetic
uacaggugcaauuuccgu

SEQ ID NO: 34760 - RNA, 19 nt, Artificial Sequence
  Synthetic
auacaggugcaauuuccgu

SEQ ID NO: 34761 - RNA, 20 nt, Artificial Sequence
  Synthetic
aauacaggugcaauuuccgu

SEQ ID NO: 34762 - RNA, 21 nt, Artificial Sequence
  Synthetic
gaauacaggugcaauuuccgu

SEQ ID NO: 34763 - RNA, 22 nt, Artificial Sequence
  Synthetic
ggaauacaggugcaauuuccgu

SEQ ID NO: 34764 - RNA, 23 nt, Artificial Sequence
  Synthetic
gggaauacaggugcaauuuccgu

SEQ ID NO: 34765 - RNA, 24 nt, Artificial Sequence
  Synthetic
ugggaauacaggugcaauuuccgu

SEQ ID NO: 34766 - RNA, 18 nt, Artificial Sequence
  Synthetic
uggugagugauuggaggu

SEQ ID NO: 34767 - RNA, 19 nt, Artificial Sequence
  Synthetic
uuggugagugauuggaggu

SEQ ID NO: 34768 - RNA, 20 nt, Artificial Sequence
  Synthetic
auuggugagugauuggaggu

SEQ ID NO: 34769 - RNA, 21 nt, Artificial Sequence
  Synthetic
gauuggugagugauuggaggu

SEQ ID NO: 34770 - RNA, 22 nt, Artificial Sequence
  Synthetic
agauuggugagugauuggaggu

SEQ ID NO: 34771 - RNA, 23 nt, Artificial Sequence
  Synthetic
gagauuggugagugauuggaggu

SEQ ID NO: 34772 - RNA, 24 nt, Artificial Sequence
  Synthetic
ggagauuggugagugauuggaggu

SEQ ID NO: 34773 - RNA, 18 nt, Artificial Sequence
  Synthetic
auguaaauaaugucuggu

SEQ ID NO: 34774 - RNA, 19 nt, Artificial Sequence
  Synthetic
uauguaaauaaugucuggu

SEQ ID NO: 34775 - RNA, 20 nt, Artificial Sequence
  Synthetic
guauguaaauaaugucuggu

SEQ ID NO: 34776 - RNA, 21 nt, Artificial Sequence
  Synthetic
gguauguaaauaaugucuggu

SEQ ID NO: 34777 - RNA, 22 nt, Artificial Sequence
  Synthetic
ggguauguaaauaaugucuggu

SEQ ID NO: 34778 - RNA, 23 nt, Artificial Sequence
  Synthetic
aggguauguaaauaaugucuggu

SEQ ID NO: 34779 - RNA, 24 nt, Artificial Sequence
  Synthetic
aaggguauguaaauaaugucuggu

SEQ ID NO: 34780 - RNA, 18 nt, Artificial Sequence
  Synthetic
agaagauugacgagaugu

SEQ ID NO: 34781 - RNA, 19 nt, Artificial Sequence
  Synthetic
gagaagauugacgagaugu

SEQ ID NO: 34782 - RNA, 20 nt, Artificial Sequence
  Synthetic
ggagaagauugacgagaugu

SEQ ID NO: 34783 - RNA, 21 nt, Artificial Sequence
  Synthetic
uggagaagauugacgagaugu

SEQ ID NO: 34784 - RNA, 22 nt, Artificial Sequence
  Synthetic
cuggagaagauugacgagaugu

SEQ ID NO: 34785 - RNA, 23 nt, Artificial Sequence
  Synthetic
ccuggagaagauugacgagaugu

SEQ ID NO: 34786 - RNA, 24 nt, Artificial Sequence
  Synthetic
uccuggagaagauugacgagaugu

SEQ ID NO: 34787 - RNA, 18 nt, Artificial Sequence
  Synthetic
ucguuucucauuuacugu

SEQ ID NO: 34788 - RNA, 19 nt, Artificial Sequence
  Synthetic
uucguuucucauuuacugu

SEQ ID NO: 34789 - RNA, 20 nt, Artificial Sequence
  Synthetic
cuucguuucucauuuacugu

SEQ ID NO: 34790 - RNA, 21 nt, Artificial Sequence
  Synthetic
ucuucguuucucauuuacugu

SEQ ID NO: 34791 - RNA, 22 nt, Artificial Sequence
  Synthetic
aucuucguuucucauuuacugu

SEQ ID NO: 34792 - RNA, 23 nt, Artificial Sequence
  Synthetic
aaucuucguuucucauuuacugu

SEQ ID NO: 34793 - RNA, 24 nt, Artificial Sequence
  Synthetic
uaaucuucguuucucauuuacugu

SEQ ID NO: 34794 - RNA, 18 nt, Artificial Sequence
  Synthetic
cacucccccuagaaaauu

SEQ ID NO: 34795 - RNA, 19 nt, Artificial Sequence
  Synthetic
gcacucccccuagaaaauu

SEQ ID NO: 34796 - RNA, 20 nt, Artificial Sequence
  Synthetic
ggcacucccccuagaaaauu

SEQ ID NO: 34797 - RNA, 21 nt, Artificial Sequence
  Synthetic
gggcacucccccuagaaaauu

SEQ ID NO: 34798 - RNA, 22 nt, Artificial Sequence
  Synthetic
cgggcacucccccuagaaaauu

SEQ ID NO: 34799 - RNA, 23 nt, Artificial Sequence
  Synthetic
acgggcacucccccuagaaaauu

SEQ ID NO: 34800 - RNA, 24 nt, Artificial Sequence
  Synthetic
cacgggcacucccccuagaaaauu

SEQ ID NO: 34801 - RNA, 18 nt, Artificial Sequence
  Synthetic
ccaaggaauacuaacauu

SEQ ID NO: 34802 - RNA, 19 nt, Artificial Sequence
  Synthetic
uccaaggaauacuaacauu

SEQ ID NO: 34803 - RNA, 20 nt, Artificial Sequence
  Synthetic
guccaaggaauacuaacauu

SEQ ID NO: 34804 - RNA, 21 nt, Artificial Sequence
  Synthetic
aguccaaggaauacuaacauu

SEQ ID NO: 34805 - RNA, 22 nt, Artificial Sequence
  Synthetic
gaguccaaggaauacuaacauu

SEQ ID NO: 34806 - RNA, 23 nt, Artificial Sequence
  Synthetic
ugaguccaaggaauacuaacauu

SEQ ID NO: 34807 - RNA, 24 nt, Artificial Sequence
  Synthetic
gugaguccaaggaauacuaacauu

SEQ ID NO: 34808 - RNA, 18 nt, Artificial Sequence
  Synthetic
uugaugcaaauggauauu

SEQ ID NO: 34809 - RNA, 19 nt, Artificial Sequence
  Synthetic
cuugaugcaaauggauauu

SEQ ID NO: 34810 - RNA, 20 nt, Artificial Sequence
  Synthetic
ucuugaugcaaauggauauu

SEQ ID NO: 34811 - RNA, 21 nt, Artificial Sequence
  Synthetic
gucuugaugcaaauggauauu

SEQ ID NO: 34812 - RNA, 22 nt, Artificial Sequence
  Synthetic
ugucuugaugcaaauggauauu

SEQ ID NO: 34813 - RNA, 23 nt, Artificial Sequence
  Synthetic
augucuugaugcaaauggauauu

SEQ ID NO: 34814 - RNA, 24 nt, Artificial Sequence
  Synthetic
aaugucuugaugcaaauggauauu

SEQ ID NO: 34815 - RNA, 18 nt, Artificial Sequence
  Synthetic
ucuagacucugcgguauu

SEQ ID NO: 34816 - RNA, 19 nt, Artificial Sequence
  Synthetic
gucuagacucugcgguauu

SEQ ID NO: 34817 - RNA, 20 nt, Artificial Sequence
  Synthetic
agucuagacucugcgguauu

SEQ ID NO: 34818 - RNA, 21 nt, Artificial Sequence
  Synthetic
gagucuagacucugcgguauu

SEQ ID NO: 34819 - RNA, 22 nt, Artificial Sequence
  Synthetic
cgagucuagacucugcgguauu

SEQ ID NO: 34820 - RNA, 23 nt, Artificial Sequence
  Synthetic
acgagucuagacucugcgguauu

SEQ ID NO: 34821 - RNA, 24 nt, Artificial Sequence
  Synthetic
cacgagucuagacucugcgguauu

SEQ ID NO: 34822 - RNA, 18 nt, Artificial Sequence
  Synthetic
uaaauauuuaguagaguu

SEQ ID NO: 34823 - RNA, 19 nt, Artificial Sequence
  Synthetic
guaaauauuuaguagaguu

SEQ ID NO: 34824 - RNA, 20 nt, Artificial Sequence
  Synthetic
gguaaauauuuaguagaguu

SEQ ID NO: 34825 - RNA, 21 nt, Artificial Sequence
  Synthetic
ugguaaauauuuaguagaguu

SEQ ID NO: 34826 - RNA, 22 nt, Artificial Sequence
  Synthetic
augguaaauauuuaguagaguu

SEQ ID NO: 34827 - RNA, 23 nt, Artificial Sequence
  Synthetic
aaugguaaauauuuaguagaguu

SEQ ID NO: 34828 - RNA, 24 nt, Artificial Sequence
  Synthetic
uaaugguaaauauuuaguagaguu

SEQ ID NO: 34829 - RNA, 18 nt, Artificial Sequence
  Synthetic
ggugagugauuggagguu

SEQ ID NO: 34830 - RNA, 19 nt, Artificial Sequence
  Synthetic
uggugagugauuggagguu

SEQ ID NO: 34831 - RNA, 20 nt, Artificial Sequence
  Synthetic
uuggugagugauuggagguu

SEQ ID NO: 34832 - RNA, 21 nt, Artificial Sequence
  Synthetic
auuggugagugauuggagguu

SEQ ID NO: 34833 - RNA, 22 nt, Artificial Sequence
  Synthetic
gauuggugagugauuggagguu

SEQ ID NO: 34834 - RNA, 23 nt, Artificial Sequence
  Synthetic
agauuggugagugauuggagguu

SEQ ID NO: 34835 - RNA, 24 nt, Artificial Sequence
  Synthetic
gagauuggugagugauuggagguu

SEQ ID NO: 34836 - RNA, 18 nt, Artificial Sequence
  Synthetic
acauaucccauaaaauuu

SEQ ID NO: 34837 - RNA, 19 nt, Artificial Sequence
  Synthetic
uacauaucccauaaaauuu

SEQ ID NO: 34838 - RNA, 20 nt, Artificial Sequence
  Synthetic
uuacauaucccauaaaauuu

SEQ ID NO: 34839 - RNA, 21 nt, Artificial Sequence
  Synthetic
auuacauaucccauaaaauuu

SEQ ID NO: 34840 - RNA, 22 nt, Artificial Sequence
  Synthetic
aauuacauaucccauaaaauuu

SEQ ID NO: 34841 - RNA, 23 nt, Artificial Sequence
  Synthetic
caauuacauaucccauaaaauuu

SEQ ID NO: 34842 - RNA, 24 nt, Artificial Sequence
  Synthetic
ccaauuacauaucccauaaaauuu

SEQ ID NO: 34843 - RNA, 18 nt, Artificial Sequence
  Synthetic
uggaaaggauguauauuu

SEQ ID NO: 34844 - RNA, 19 nt, Artificial Sequence
  Synthetic
auggaaaggauguauauuu

SEQ ID NO: 34845 - RNA, 20 nt, Artificial Sequence
  Synthetic
cauggaaaggauguauauuu

SEQ ID NO: 34846 - RNA, 21 nt, Artificial Sequence
  Synthetic
ccauggaaaggauguauauuu

SEQ ID NO: 34847 - RNA, 22 nt, Artificial Sequence
  Synthetic
gccauggaaaggauguauauuu

SEQ ID NO: 34848 - RNA, 23 nt, Artificial Sequence
  Synthetic
agccauggaaaggauguauauuu

SEQ ID NO: 34849 - RNA, 24 nt, Artificial Sequence
  Synthetic
cagccauggaaaggauguauauuu

SEQ ID NO: 34850 - RNA, 18 nt, Artificial Sequence
  Synthetic
ucuggccaaggguccuuu

SEQ ID NO: 34851 - RNA, 19 nt, Artificial Sequence
  Synthetic
cucuggccaaggguccuuu

SEQ ID NO: 34852 - RNA, 20 nt, Artificial Sequence
  Synthetic
ccucuggccaaggguccuuu

SEQ ID NO: 34853 - RNA, 21 nt, Artificial Sequence
  Synthetic
gccucuggccaaggguccuuu

SEQ ID NO: 34854 - RNA, 22 nt, Artificial Sequence
  Synthetic
ggccucuggccaaggguccuuu

SEQ ID NO: 34855 - RNA, 23 nt, Artificial Sequence
  Synthetic
uggccucuggccaaggguccuuu

SEQ ID NO: 34856 - RNA, 24 nt, Artificial Sequence
  Synthetic
uuggccucuggccaaggguccuuu

SEQ ID NO: 34857 - RNA, 18 nt, Artificial Sequence
  Synthetic
aaauauuuaguagaguuu

SEQ ID NO: 34858 - RNA, 19 nt, Artificial Sequence
  Synthetic
uaaauauuuaguagaguuu

SEQ ID NO: 34859 - RNA, 20 nt, Artificial Sequence
  Synthetic
guaaauauuuaguagaguuu

SEQ ID NO: 34860 - RNA, 21 nt, Artificial Sequence
  Synthetic
gguaaauauuuaguagaguuu

SEQ ID NO: 34861 - RNA, 22 nt, Artificial Sequence
  Synthetic
ugguaaauauuuaguagaguuu

SEQ ID NO: 34862 - RNA, 23 nt, Artificial Sequence
  Synthetic
augguaaauauuuaguagaguuu

SEQ ID NO: 34863 - RNA, 24 nt, Artificial Sequence
  Synthetic
aaugguaaauauuuaguagaguuu

SEQ ID NO: 34864 - RNA, 18 nt, Artificial Sequence
  Synthetic
ccuguuaacagggaguuu

SEQ ID NO: 34865 - RNA, 19 nt, Artificial Sequence
  Synthetic
gccuguuaacagggaguuu

SEQ ID NO: 34866 - RNA, 20 nt, Artificial Sequence
  Synthetic
ggccuguuaacagggaguuu

SEQ ID NO: 34867 - RNA, 21 nt, Artificial Sequence
  Synthetic
uggccuguuaacagggaguuu

SEQ ID NO: 34868 - RNA, 22 nt, Artificial Sequence
  Synthetic
uuggccuguuaacagggaguuu

SEQ ID NO: 34869 - RNA, 23 nt, Artificial Sequence
  Synthetic
auuggccuguuaacagggaguuu

SEQ ID NO: 34870 - RNA, 24 nt, Artificial Sequence
  Synthetic
aauuggccuguuaacagggaguuu

SEQ ID NO: 34871 - RNA, 18 nt, Artificial Sequence
  Synthetic
cacucccauagguauuuu

SEQ ID NO: 34872 - RNA, 19 nt, Artificial Sequence
  Synthetic
ccacucccauagguauuuu

SEQ ID NO: 34873 - RNA, 20 nt, Artificial Sequence
  Synthetic
cccacucccauagguauuuu

SEQ ID NO: 34874 - RNA, 21 nt, Artificial Sequence
  Synthetic
gcccacucccauagguauuuu

SEQ ID NO: 34875 - RNA, 22 nt, Artificial Sequence
  Synthetic
ggcccacucccauagguauuuu

SEQ ID NO: 34876 - RNA, 23 nt, Artificial Sequence
  Synthetic
aggcccacucccauagguauuuu

SEQ ID NO: 34877 - RNA, 24 nt, Artificial Sequence
  Synthetic
gaggcccacucccauagguauuuu

SEQ ID NO: 34878 - RNA, 18 nt, Artificial Sequence
  Synthetic
ugggacuucaaucccaaa

SEQ ID NO: 34879 - RNA, 19 nt, Artificial Sequence
  Synthetic
uugggacuucaaucccaaa

SEQ ID NO: 34880 - RNA, 20 nt, Artificial Sequence
  Synthetic
auugggacuucaaucccaaa

SEQ ID NO: 34881 - RNA, 21 nt, Artificial Sequence
  Synthetic
gauugggacuucaaucccaaa

SEQ ID NO: 34882 - RNA, 22 nt, Artificial Sequence
  Synthetic
agauugggacuucaaucccaaa

SEQ ID NO: 34883 - RNA, 23 nt, Artificial Sequence
  Synthetic
cagauugggacuucaaucccaaa

SEQ ID NO: 34884 - RNA, 24 nt, Artificial Sequence
  Synthetic
ccagauugggacuucaaucccaaa

SEQ ID NO: 34885 - RNA, 18 nt, Artificial Sequence
  Synthetic
uguuuguuaugucaacaa

SEQ ID NO: 34886 - RNA, 19 nt, Artificial Sequence
  Synthetic
cuguuuguuaugucaacaa

SEQ ID NO: 34887 - RNA, 20 nt, Artificial Sequence
  Synthetic
acuguuuguuaugucaacaa

SEQ ID NO: 34888 - RNA, 21 nt, Artificial Sequence
  Synthetic
gacuguuuguuaugucaacaa

SEQ ID NO: 34889 - RNA, 22 nt, Artificial Sequence
  Synthetic
ggacuguuuguuaugucaacaa

SEQ ID NO: 34890 - RNA, 23 nt, Artificial Sequence
  Synthetic
uggacuguuuguuaugucaacaa

SEQ ID NO: 34891 - RNA, 24 nt, Artificial Sequence
  Synthetic
uuggacuguuuguuaugucaacaa

SEQ ID NO: 34892 - RNA, 18 nt, Artificial Sequence
  Synthetic
ucucacaguaaaugagaa

SEQ ID NO: 34893 - RNA, 19 nt, Artificial Sequence
  Synthetic
cucucacaguaaaugagaa

SEQ ID NO: 34894 - RNA, 20 nt, Artificial Sequence
  Synthetic
ccucucacaguaaaugagaa

SEQ ID NO: 34895 - RNA, 21 nt, Artificial Sequence
  Synthetic
cccucucacaguaaaugagaa

SEQ ID NO: 34896 - RNA, 22 nt, Artificial Sequence
  Synthetic
gcccucucacaguaaaugagaa

SEQ ID NO: 34897 - RNA, 23 nt, Artificial Sequence
  Synthetic
ggcccucucacaguaaaugagaa

SEQ ID NO: 34898 - RNA, 24 nt, Artificial Sequence
  Synthetic
gggcccucucacaguaaaugagaa

SEQ ID NO: 34899 - RNA, 18 nt, Artificial Sequence
  Synthetic
ggcggguauucuauauaa

SEQ ID NO: 34900 - RNA, 19 nt, Artificial Sequence
  Synthetic
aggcggguauucuauauaa

SEQ ID NO: 34901 - RNA, 20 nt, Artificial Sequence
  Synthetic
aaggcggguauucuauauaa

SEQ ID NO: 34902 - RNA, 21 nt, Artificial Sequence
  Synthetic
gaaggcggguauucuauauaa

SEQ ID NO: 34903 - RNA, 22 nt, Artificial Sequence
  Synthetic
ggaaggcggguauucuauauaa

SEQ ID NO: 34904 - RNA, 23 nt, Artificial Sequence
  Synthetic
uggaaggcggguauucuauauaa

SEQ ID NO: 34905 - RNA, 24 nt, Artificial Sequence
  Synthetic
uuggaaggcggguauucuauauaa

SEQ ID NO: 34906 - RNA, 18 nt, Artificial Sequence
  Synthetic
  misc_feature (6)..(6): n is a, c, g, or u
gccaangcaguuauauaa

SEQ ID NO: 34907 - RNA, 19 nt, Artificial Sequence
  Synthetic
  misc_feature (7)..(7): n is a, c, g, or u
ugccaangcaguuauauaa

SEQ ID NO: 34908 - RNA, 20 nt, Artificial Sequence
  Synthetic
  misc_feature (8)..(8): n is a, c, g, or u
cugccaangcaguuauauaa

SEQ ID NO: 34909 - RNA, 21 nt, Artificial Sequence
  Synthetic
  misc_feature (9)..(9): n is a, c, g, or u
ucugccaangcaguuauauaa

SEQ ID NO: 34910 - RNA, 22 nt, Artificial Sequence
  Synthetic
  misc_feature (10)..(10): n is a, c, g, or u
aucugccaangcaguuauauaa

SEQ ID NO: 34911 - RNA, 23 nt, Artificial Sequence
  Synthetic
  misc_feature (11)..(11): n is a, c, g, or u
caucugccaangcaguuauauaa

SEQ ID NO: 34912 - RNA, 24 nt, Artificial Sequence
  Synthetic
  misc_feature (12)..(12): n is a, c, g, or u
ucaucugccaangcaguuauauaa

SEQ ID NO: 34913 - RNA, 18 nt, Artificial Sequence
  Synthetic
ugggcccucucacaguaa

SEQ ID NO: 34914 - RNA, 19 nt, Artificial Sequence
  Synthetic
gugggcccucucacaguaa

SEQ ID NO: 34915 - RNA, 20 nt, Artificial Sequence
  Synthetic
ugugggcccucucacaguaa

SEQ ID NO: 34916 - RNA, 21 nt, Artificial Sequence
  Synthetic
uugugggcccucucacaguaa

SEQ ID NO: 34917 - RNA, 22 nt, Artificial Sequence
  Synthetic
uuugugggcccucucacaguaa

SEQ ID NO: 34918 - RNA, 23 nt, Artificial Sequence
  Synthetic
auuugugggcccucucacaguaa

SEQ ID NO: 34919 - RNA, 24 nt, Artificial Sequence
  Synthetic
aauuugugggcccucucacaguaa

SEQ ID NO: 34920 - RNA, 18 nt, Artificial Sequence
  Synthetic
auuuuaugggauauguaa

SEQ ID NO: 34921 - RNA, 19 nt, Artificial Sequence
  Synthetic
aauuuuaugggauauguaa

SEQ ID NO: 34922 - RNA, 20 nt, Artificial Sequence
  Synthetic
aaauuuuaugggauauguaa

SEQ ID NO: 34923 - RNA, 21 nt, Artificial Sequence
  Synthetic
uaaauuuuaugggauauguaa

SEQ ID NO: 34924 - RNA, 22 nt, Artificial Sequence
  Synthetic
uuaaauuuuaugggauauguaa

SEQ ID NO: 34925 - RNA, 23 nt, Artificial Sequence
  Synthetic
cuuaaauuuuaugggauauguaa

SEQ ID NO: 34926 - RNA, 24 nt, Artificial Sequence
  Synthetic
ccuuaaauuuuaugggauauguaa

SEQ ID NO: 34927 - RNA, 18 nt, Artificial Sequence
  Synthetic
gggacccugcaccgaaca

SEQ ID NO: 34928 - RNA, 19 nt, Artificial Sequence
  Synthetic
ggggacccugcaccgaaca

SEQ ID NO: 34929 - RNA, 20 nt, Artificial Sequence
  Synthetic
uggggacccugcaccgaaca

SEQ ID NO: 34930 - RNA, 21 nt, Artificial Sequence
  Synthetic
uuggggacccugcaccgaaca

SEQ ID NO: 34931 - RNA, 22 nt, Artificial Sequence
  Synthetic
auuggggacccugcaccgaaca

SEQ ID NO: 34932 - RNA, 23 nt, Artificial Sequence
  Synthetic
gauuggggacccugcaccgaaca

SEQ ID NO: 34933 - RNA, 24 nt, Artificial Sequence
  Synthetic
ggauuggggacccugcaccgaaca

SEQ ID NO: 34934 - RNA, 18 nt, Artificial Sequence
  Synthetic
cggguucaccccuccaca

SEQ ID NO: 34935 - RNA, 19 nt, Artificial Sequence
  Synthetic
ccggguucaccccuccaca

SEQ ID NO: 34936 - RNA, 20 nt, Artificial Sequence
  Synthetic
cccggguucaccccuccaca

SEQ ID NO: 34937 - RNA, 21 nt, Artificial Sequence
  Synthetic
acccggguucaccccuccaca

SEQ ID NO: 34938 - RNA, 22 nt, Artificial Sequence
  Synthetic
gacccggguucaccccuccaca

SEQ ID NO: 34939 - RNA, 23 nt, Artificial Sequence
  Synthetic
ggacccggguucaccccuccaca

SEQ ID NO: 34940 - RNA, 24 nt, Artificial Sequence
  Synthetic
uggacccggguucaccccuccaca

SEQ ID NO: 34941 - RNA, 18 nt, Artificial Sequence
  Synthetic
ucaccucugcacguuaca

SEQ ID NO: 34942 - RNA, 19 nt, Artificial Sequence
  Synthetic
uucaccucugcacguuaca

SEQ ID NO: 34943 - RNA, 20 nt, Artificial Sequence
  Synthetic
cuucaccucugcacguuaca

SEQ ID NO: 34944 - RNA, 21 nt, Artificial Sequence
  Synthetic
gcuucaccucugcacguuaca

SEQ ID NO: 34945 - RNA, 22 nt, Artificial Sequence
  Synthetic
cgcuucaccucugcacguuaca

SEQ ID NO: 34946 - RNA, 23 nt, Artificial Sequence
  Synthetic
ucgcuucaccucugcacguuaca

SEQ ID NO: 34947 - RNA, 24 nt, Artificial Sequence
  Synthetic
uucgcuucaccucugcacguuaca

SEQ ID NO: 34948 - RNA, 18 nt, Artificial Sequence
  Synthetic
ugccguuccugccgacca

SEQ ID NO: 34949 - RNA, 19 nt, Artificial Sequence
  Synthetic
cugccguuccugccgacca

SEQ ID NO: 34950 - RNA, 20 nt, Artificial Sequence
  Synthetic
ucugccguuccugccgacca

SEQ ID NO: 34951 - RNA, 21 nt, Artificial Sequence
  Synthetic
gucugccguuccugccgacca

SEQ ID NO: 34952 - RNA, 22 nt, Artificial Sequence
  Synthetic
cgucugccguuccugccgacca

SEQ ID NO: 34953 - RNA, 23 nt, Artificial Sequence
  Synthetic
ccgucugccguuccugccgacca

SEQ ID NO: 34954 - RNA, 24 nt, Artificial Sequence
  Synthetic
uccgucugccguuccugccgacca

SEQ ID NO: 34955 - RNA, 18 nt, Artificial Sequence
  Synthetic
ccgucagcgcugaaucca

SEQ ID NO: 34956 - RNA, 19 nt, Artificial Sequence
  Synthetic
cccgucagcgcugaaucca

SEQ ID NO: 34957 - RNA, 20 nt, Artificial Sequence
  Synthetic
ucccgucagcgcugaaucca

SEQ ID NO: 34958 - RNA, 21 nt, Artificial Sequence
  Synthetic
gucccgucagcgcugaaucca

SEQ ID NO: 34959 - RNA, 22 nt, Artificial Sequence
  Synthetic
cgucccgucagcgcugaaucca

SEQ ID NO: 34960 - RNA, 23 nt, Artificial Sequence
  Synthetic
acgucccgucagcgcugaaucca

SEQ ID NO: 34961 - RNA, 24 nt, Artificial Sequence
  Synthetic
uacgucccgucagcgcugaaucca

SEQ ID NO: 34962 - RNA, 18 nt, Artificial Sequence
  Synthetic
ggaacaagaucuacagca

SEQ ID NO: 34963 - RNA, 19 nt, Artificial Sequence
  Synthetic
gggaacaagaucuacagca

SEQ ID NO: 34964 - RNA, 20 nt, Artificial Sequence
  Synthetic
ugggaacaagaucuacagca

SEQ ID NO: 34965 - RNA, 21 nt, Artificial Sequence
  Synthetic
uugggaacaagaucuacagca

SEQ ID NO: 34966 - RNA, 22 nt, Artificial Sequence
  Synthetic
cuugggaacaagaucuacagca

SEQ ID NO: 34967 - RNA, 23 nt, Artificial Sequence
  Synthetic
acuugggaacaagaucuacagca

SEQ ID NO: 34968 - RNA, 24 nt, Artificial Sequence
  Synthetic
uacuugggaacaagaucuacagca

SEQ ID NO: 34969 - RNA, 18 nt, Artificial Sequence
  Synthetic
ucauccucaggccaugca

SEQ ID NO: 34970 - RNA, 19 nt, Artificial Sequence
  Synthetic
gucauccucaggccaugca

SEQ ID NO: 34971 - RNA, 20 nt, Artificial Sequence
  Synthetic
agucauccucaggccaugca

SEQ ID NO: 34972 - RNA, 21 nt, Artificial Sequence
  Synthetic
cagucauccucaggccaugca

SEQ ID NO: 34973 - RNA, 22 nt, Artificial Sequence
  Synthetic
acagucauccucaggccaugca

SEQ ID NO: 34974 - RNA, 23 nt, Artificial Sequence
  Synthetic
gacagucauccucaggccaugca

SEQ ID NO: 34975 - RNA, 24 nt, Artificial Sequence
  Synthetic
agacagucauccucaggccaugca

SEQ ID NO: 34976 - RNA, 18 nt, Artificial Sequence
  Synthetic
aggauuggggacccugca

SEQ ID NO: 34977 - RNA, 19 nt, Artificial Sequence
  Synthetic
caggauuggggacccugca

SEQ ID NO: 34978 - RNA, 20 nt, Artificial Sequence
  Synthetic
ccaggauuggggacccugca

SEQ ID NO: 34979 - RNA, 21 nt, Artificial Sequence
  Synthetic
uccaggauuggggacccugca

SEQ ID NO: 34980 - RNA, 22 nt, Artificial Sequence
  Synthetic
cuccaggauuggggacccugca

SEQ ID NO: 34981 - RNA, 23 nt, Artificial Sequence
  Synthetic
ucuccaggauuggggacccugca

SEQ ID NO: 34982 - RNA, 24 nt, Artificial Sequence
  Synthetic
uucuccaggauuggggacccugca

SEQ ID NO: 34983 - RNA, 18 nt, Artificial Sequence
  Synthetic
ggucuggagcaaaacuca

SEQ ID NO: 34984 - RNA, 19 nt, Artificial Sequence
  Synthetic
cggucuggagcaaaacuca

SEQ ID NO: 34985 - RNA, 20 nt, Artificial Sequence
  Synthetic
ccggucuggagcaaaacuca

SEQ ID NO: 34986 - RNA, 21 nt, Artificial Sequence
  Synthetic
gccggucuggagcaaaacuca

SEQ ID NO: 34987 - RNA, 22 nt, Artificial Sequence
  Synthetic
agccggucuggagcaaaacuca

SEQ ID NO: 34988 - RNA, 23 nt, Artificial Sequence
  Synthetic
cagccggucuggagcaaaacuca

SEQ ID NO: 34989 - RNA, 24 nt, Artificial Sequence
  Synthetic
gcagccggucuggagcaaaacuca

SEQ ID NO: 34990 - RNA, 18 nt, Artificial Sequence
  Synthetic
uccaccaaucgucaguca

SEQ ID NO: 34991 - RNA, 19 nt, Artificial Sequence
  Synthetic
cuccaccaaucgucaguca

SEQ ID NO: 34992 - RNA, 20 nt, Artificial Sequence
  Synthetic
ccuccaccaaucgucaguca

SEQ ID NO: 34993 - RNA, 21 nt, Artificial Sequence
  Synthetic
gccuccaccaaucgucaguca

SEQ ID NO: 34994 - RNA, 22 nt, Artificial Sequence
  Synthetic
ugccuccaccaaucgucaguca

SEQ ID NO: 34995 - RNA, 23 nt, Artificial Sequence
  Synthetic
cugccuccaccaaucgucaguca

SEQ ID NO: 34996 - RNA, 24 nt, Artificial Sequence
  Synthetic
ccugccuccaccaaucgucaguca

SEQ ID NO: 34997 - RNA, 18 nt, Artificial Sequence
  Synthetic
cggguauucuauauaaga

SEQ ID NO: 34998 - RNA, 19 nt, Artificial Sequence
  Synthetic
gcggguauucuauauaaga

SEQ ID NO: 34999 - RNA, 20 nt, Artificial Sequence
  Synthetic
ggcggguauucuauauaaga

SEQ ID NO: 35000 - RNA, 21 nt, Artificial Sequence
  Synthetic
aggcggguauucuauauaaga

SEQ ID NO: 35001 - RNA, 22 nt, Artificial Sequence
  Synthetic
aaggcggguauucuauauaaga

SEQ ID NO: 35002 - RNA, 23 nt, Artificial Sequence
  Synthetic
gaaggcggguauucuauauaaga

SEQ ID NO: 35003 - RNA, 24 nt, Artificial Sequence
  Synthetic
ggaaggcggguauucuauauaaga

SEQ ID NO: 35004 - RNA, 18 nt, Artificial Sequence
  Synthetic
aaauaccaacaauccaga

SEQ ID NO: 35005 - RNA, 19 nt, Artificial Sequence
  Synthetic
caaauaccaacaauccaga

SEQ ID NO: 35006 - RNA, 20 nt, Artificial Sequence
  Synthetic
gcaaauaccaacaauccaga

SEQ ID NO: 35007 - RNA, 21 nt, Artificial Sequence
  Synthetic
agcaaauaccaacaauccaga

SEQ ID NO: 35008 - RNA, 22 nt, Artificial Sequence
  Synthetic
gagcaaauaccaacaauccaga

SEQ ID NO: 35009 - RNA, 23 nt, Artificial Sequence
  Synthetic
agagcaaauaccaacaauccaga

SEQ ID NO: 35010 - RNA, 24 nt, Artificial Sequence
  Synthetic
cagagcaaauaccaacaauccaga

SEQ ID NO: 35011 - RNA, 18 nt, Artificial Sequence
  Synthetic
uuggacggucccucucga

SEQ ID NO: 35012 - RNA, 19 nt, Artificial Sequence
  Synthetic
cuuggacggucccucucga

SEQ ID NO: 35013 - RNA, 20 nt, Artificial Sequence
  Synthetic
ucuuggacggucccucucga

SEQ ID NO: 35014 - RNA, 21 nt, Artificial Sequence
  Synthetic
uucuuggacggucccucucga

SEQ ID NO: 35015 - RNA, 22 nt, Artificial Sequence
  Synthetic
uuucuuggacggucccucucga

SEQ ID NO: 35016 - RNA, 23 nt, Artificial Sequence
  Synthetic
cuuucuuggacggucccucucga

SEQ ID NO: 35017 - RNA, 24 nt, Artificial Sequence
  Synthetic
gcuuucuuggacggucccucucga

SEQ ID NO: 35018 - RNA, 18 nt, Artificial Sequence
  Synthetic
cgucaaucuucuccagga

SEQ ID NO: 35019 - RNA, 19 nt, Artificial Sequence
  Synthetic
ucgucaaucuucuccagga

SEQ ID NO: 35020 - RNA, 20 nt, Artificial Sequence
  Synthetic
cucgucaaucuucuccagga

SEQ ID NO: 35021 - RNA, 21 nt, Artificial Sequence
  Synthetic
ucucgucaaucuucuccagga

SEQ ID NO: 35022 - RNA, 22 nt, Artificial Sequence
  Synthetic
aucucgucaaucuucuccagga

SEQ ID NO: 35023 - RNA, 23 nt, Artificial Sequence
  Synthetic
caucucgucaaucuucuccagga

SEQ ID NO: 35024 - RNA, 24 nt, Artificial Sequence
  Synthetic
acaucucgucaaucuucuccagga

SEQ ID NO: 35025 - RNA, 18 nt, Artificial Sequence
  Synthetic
cuguacaaaaccuucgga

SEQ ID NO: 35026 - RNA, 19 nt, Artificial Sequence
  Synthetic
gcuguacaaaaccuucgga

SEQ ID NO: 35027 - RNA, 20 nt, Artificial Sequence
  Synthetic
ugcuguacaaaaccuucgga

SEQ ID NO: 35028 - RNA, 21 nt, Artificial Sequence
  Synthetic
uugcuguacaaaaccuucgga

SEQ ID NO: 35029 - RNA, 22 nt, Artificial Sequence
  Synthetic
guugcuguacaaaaccuucgga

SEQ ID NO: 35030 - RNA, 23 nt, Artificial Sequence
  Synthetic
uguugcuguacaaaaccuucgga

SEQ ID NO: 35031 - RNA, 24 nt, Artificial Sequence
  Synthetic
auguugcuguacaaaaccuucgga

SEQ ID NO: 35032 - RNA, 18 nt, Artificial Sequence
  Synthetic
gucccucucgagugggga

SEQ ID NO: 35033 - RNA, 19 nt, Artificial Sequence
  Synthetic
ggucccucucgagugggga

SEQ ID NO: 35034 - RNA, 20 nt, Artificial Sequence
  Synthetic
cggucccucucgagugggga

SEQ ID NO: 35035 - RNA, 21 nt, Artificial Sequence
  Synthetic
acggucccucucgagugggga

SEQ ID NO: 35036 - RNA, 22 nt, Artificial Sequence
  Synthetic
gacggucccucucgagugggga

SEQ ID NO: 35037 - RNA, 23 nt, Artificial Sequence
  Synthetic
ggacggucccucucgagugggga

SEQ ID NO: 35038 - RNA, 24 nt, Artificial Sequence
  Synthetic
uggacggucccucucgagugggga

SEQ ID NO: 35039 - RNA, 18 nt, Artificial Sequence
  Synthetic
cgcaaaauaccuauggga

SEQ ID NO: 35040 - RNA, 19 nt, Artificial Sequence
  Synthetic
ucgcaaaauaccuauggga

SEQ ID NO: 35041 - RNA, 20 nt, Artificial Sequence
  Synthetic
uucgcaaaauaccuauggga

SEQ ID NO: 35042 - RNA, 21 nt, Artificial Sequence
  Synthetic
uuucgcaaaauaccuauggga

SEQ ID NO: 35043 - RNA, 22 nt, Artificial Sequence
  Synthetic
cuuucgcaaaauaccuauggga

SEQ ID NO: 35044 - RNA, 23 nt, Artificial Sequence
  Synthetic
gcuuucgcaaaauaccuauggga

SEQ ID NO: 35045 - RNA, 24 nt, Artificial Sequence
  Synthetic
ggcuuucgcaaaauaccuauggga

SEQ ID NO: 35046 - RNA, 18 nt, Artificial Sequence
  Synthetic
ccugucuuacuuuuggga

SEQ ID NO: 35047 - RNA, 19 nt, Artificial Sequence
  Synthetic
uccugucuuacuuuuggga

SEQ ID NO: 35048 - RNA, 20 nt, Artificial Sequence
  Synthetic
uuccugucuuacuuuuggga

SEQ ID NO: 35049 - RNA, 21 nt, Artificial Sequence
  Synthetic
uuuccugucuuacuuuuggga

SEQ ID NO: 35050 - RNA, 22 nt, Artificial Sequence
  Synthetic
auuuccugucuuacuuuuggga

SEQ ID NO: 35051 - RNA, 23 nt, Artificial Sequence
  Synthetic
cauuuccugucuuacuuuuggga

SEQ ID NO: 35052 - RNA, 24 nt, Artificial Sequence
  Synthetic
acauuuccugucuuacuuuuggga

SEQ ID NO: 35053 - RNA, 18 nt, Artificial Sequence
  Synthetic
guggcuuuagggcaugga

SEQ ID NO: 35054 - RNA, 19 nt, Artificial Sequence
  Synthetic
gguggcuuuagggcaugga

SEQ ID NO: 35055 - RNA, 20 nt, Artificial Sequence
  Synthetic
ggguggcuuuagggcaugga

SEQ ID NO: 35056 - RNA, 21 nt, Artificial Sequence
  Synthetic
uggguggcuuuagggcaugga

SEQ ID NO: 35057 - RNA, 22 nt, Artificial Sequence
  Synthetic
uuggguggcuuuagggcaugga

SEQ ID NO: 35058 - RNA, 23 nt, Artificial Sequence
  Synthetic
cuuggguggcuuuagggcaugga

SEQ ID NO: 35059 - RNA, 24 nt, Artificial Sequence
  Synthetic
ccuuggguggcuuuagggcaugga

SEQ ID NO: 35060 - RNA, 18 nt, Artificial Sequence
  Synthetic
ggacuguguuuuugcuga

SEQ ID NO: 35061 - RNA, 19 nt, Artificial Sequence
  Synthetic
aggacuguguuuuugcuga

SEQ ID NO: 35062 - RNA, 20 nt, Artificial Sequence
  Synthetic
aaggacuguguuuuugcuga

SEQ ID NO: 35063 - RNA, 21 nt, Artificial Sequence
  Synthetic
caaggacuguguuuuugcuga

SEQ ID NO: 35064 - RNA, 22 nt, Artificial Sequence
  Synthetic
ucaaggacuguguuuuugcuga

SEQ ID NO: 35065 - RNA, 23 nt, Artificial Sequence
  Synthetic
uucaaggacuguguuuuugcuga

SEQ ID NO: 35066 - RNA, 24 nt, Artificial Sequence
  Synthetic
cuucaaggacuguguuuuugcuga

SEQ ID NO: 35067 - RNA, 18 nt, Artificial Sequence
  Synthetic
uguuaacaggccaauuga

SEQ ID NO: 35068 - RNA, 19 nt, Artificial Sequence
  Synthetic
cuguuaacaggccaauuga

SEQ ID NO: 35069 - RNA, 20 nt, Artificial Sequence
  Synthetic
ccuguuaacaggccaauuga

SEQ ID NO: 35070 - RNA, 21 nt, Artificial Sequence
  Synthetic
cccuguuaacaggccaauuga

SEQ ID NO: 35071 - RNA, 22 nt, Artificial Sequence
  Synthetic
ucccuguuaacaggccaauuga

SEQ ID NO: 35072 - RNA, 23 nt, Artificial Sequence
  Synthetic
cucccuguuaacaggccaauuga

SEQ ID NO: 35073 - RNA, 24 nt, Artificial Sequence
  Synthetic
acucccuguuaacaggccaauuga

SEQ ID NO: 35074 - RNA, 18 nt, Artificial Sequence
  Synthetic
ggcuccaguucagggaua

SEQ ID NO: 35075 - RNA, 19 nt, Artificial Sequence
  Synthetic
uggcuccaguucagggaua

SEQ ID NO: 35076 - RNA, 20 nt, Artificial Sequence
  Synthetic
guggcuccaguucagggaua

SEQ ID NO: 35077 - RNA, 21 nt, Artificial Sequence
  Synthetic
gguggcuccaguucagggaua

SEQ ID NO: 35078 - RNA, 22 nt, Artificial Sequence
  Synthetic
ugguggcuccaguucagggaua

SEQ ID NO: 35079 - RNA, 23 nt, Artificial Sequence
  Synthetic
cugguggcuccaguucagggaua

SEQ ID NO: 35080 - RNA, 24 nt, Artificial Sequence
  Synthetic
gcugguggcuccaguucagggaua

SEQ ID NO: 35081 - RNA, 18 nt, Artificial Sequence
  Synthetic
gcuuucgcaaaauaccua

SEQ ID NO: 35082 - RNA, 19 nt, Artificial Sequence
  Synthetic
ggcuuucgcaaaauaccua

SEQ ID NO: 35083 - RNA, 20 nt, Artificial Sequence
  Synthetic
gggcuuucgcaaaauaccua

SEQ ID NO: 35084 - RNA, 21 nt, Artificial Sequence
  Synthetic
ugggcuuucgcaaaauaccua

SEQ ID NO: 35085 - RNA, 22 nt, Artificial Sequence
  Synthetic
uugggcuuucgcaaaauaccua

SEQ ID NO: 35086 - RNA, 23 nt, Artificial Sequence
  Synthetic
cuugggcuuucgcaaaauaccua

SEQ ID NO: 35087 - RNA, 24 nt, Artificial Sequence
  Synthetic
ucuugggcuuucgcaaaauaccua

SEQ ID NO: 35088 - RNA, 18 nt, Artificial Sequence
  Synthetic
acuucucucaauuuucua

SEQ ID NO: 35089 - RNA, 19 nt, Artificial Sequence
  Synthetic
gacuucucucaauuuucua

SEQ ID NO: 35090 - RNA, 20 nt, Artificial Sequence
  Synthetic
ggacuucucucaauuuucua

SEQ ID NO: 35091 - RNA, 21 nt, Artificial Sequence
  Synthetic
uggacuucucucaauuuucua

SEQ ID NO: 35092 - RNA, 22 nt, Artificial Sequence
  Synthetic
guggacuucucucaauuuucua

SEQ ID NO: 35093 - RNA, 23 nt, Artificial Sequence
  Synthetic
gguggacuucucucaauuuucua

SEQ ID NO: 35094 - RNA, 24 nt, Artificial Sequence
  Synthetic
ugguggacuucucucaauuuucua

SEQ ID NO: 35095 - RNA, 18 nt, Artificial Sequence
  Synthetic
gauccucgaccaccagua

SEQ ID NO: 35096 - RNA, 19 nt, Artificial Sequence
  Synthetic
ggauccucgaccaccagua

SEQ ID NO: 35097 - RNA, 20 nt, Artificial Sequence
  Synthetic
aggauccucgaccaccagua

SEQ ID NO: 35098 - RNA, 21 nt, Artificial Sequence
  Synthetic
caggauccucgaccaccagua

SEQ ID NO: 35099 - RNA, 22 nt, Artificial Sequence
  Synthetic
ccaggauccucgaccaccagua

SEQ ID NO: 35100 - RNA, 23 nt, Artificial Sequence
  Synthetic
uccaggauccucgaccaccagua

SEQ ID NO: 35101 - RNA, 24 nt, Artificial Sequence
  Synthetic
uuccaggauccucgaccaccagua

SEQ ID NO: 35102 - RNA, 18 nt, Artificial Sequence
  Synthetic
  misc_feature (6)..(6): n is a, c, g, or u
uauaungaugauguggua

SEQ ID NO: 35103 - RNA, 19 nt, Artificial Sequence
  Synthetic
  misc_feature (7)..(7): n is a, c, g, or u
cuauaungaugauguggua

SEQ ID NO: 35104 - RNA, 20 nt, Artificial Sequence
  Synthetic
  misc_feature (8)..(8): n is a, c, g, or u
gcuauaungaugauguggua

SEQ ID NO: 35105 - RNA, 21 nt, Artificial Sequence
  Synthetic
  misc_feature (9)..(9): n is a, c, g, or u
agcuauaungaugauguggua

SEQ ID NO: 35106 - RNA, 22 nt, Artificial Sequence
  Synthetic
  misc_feature (10)..(10): n is a, c, g, or u
cagcuauaungaugauguggua

SEQ ID NO: 35107 - RNA, 23 nt, Artificial Sequence
  Synthetic
  misc_feature (11)..(11): n is a, c, g, or u
ucagcuauaungaugauguggua

SEQ ID NO: 35108 - RNA, 24 nt, Artificial Sequence
  Synthetic
  misc_feature (12)..(12): n is a, c, g, or u
uucagcuauaungaugauguggua

SEQ ID NO: 35109 - RNA, 18 nt, Artificial Sequence
  Synthetic
caccgcuucagcuuugua

SEQ ID NO: 35110 - RNA, 19 nt, Artificial Sequence
  Synthetic
acaccgcuucagcuuugua

SEQ ID NO: 35111 - RNA, 20 nt, Artificial Sequence
  Synthetic
gacaccgcuucagcuuugua

SEQ ID NO: 35112 - RNA, 21 nt, Artificial Sequence
  Synthetic
cgacaccgcuucagcuuugua

SEQ ID NO: 35113 - RNA, 22 nt, Artificial Sequence
  Synthetic
ucgacaccgcuucagcuuugua

SEQ ID NO: 35114 - RNA, 23 nt, Artificial Sequence
  Synthetic
cucgacaccgcuucagcuuugua

SEQ ID NO: 35115 - RNA, 24 nt, Artificial Sequence
  Synthetic
ucucgacaccgcuucagcuuugua

SEQ ID NO: 35116 - RNA, 18 nt, Artificial Sequence
  Synthetic
acaaggugggaaacuuua

SEQ ID NO: 35117 - RNA, 19 nt, Artificial Sequence
  Synthetic
cacaaggugggaaacuuua

SEQ ID NO: 35118 - RNA, 20 nt, Artificial Sequence
  Synthetic
ucacaaggugggaaacuuua

SEQ ID NO: 35119 - RNA, 21 nt, Artificial Sequence
  Synthetic
cucacaaggugggaaacuuua

SEQ ID NO: 35120 - RNA, 22 nt, Artificial Sequence
  Synthetic
acucacaaggugggaaacuuua

SEQ ID NO: 35121 - RNA, 23 nt, Artificial Sequence
  Synthetic
gacucacaaggugggaaacuuua

SEQ ID NO: 35122 - RNA, 24 nt, Artificial Sequence
  Synthetic
ggacucacaaggugggaaacuuua

SEQ ID NO: 35123 - RNA, 18 nt, Artificial Sequence
  Synthetic
ggggacccugcaccgaac

SEQ ID NO: 35124 - RNA, 19 nt, Artificial Sequence
  Synthetic
uggggacccugcaccgaac

SEQ ID NO: 35125 - RNA, 20 nt, Artificial Sequence
  Synthetic
uuggggacccugcaccgaac

SEQ ID NO: 35126 - RNA, 21 nt, Artificial Sequence
  Synthetic
auuggggacccugcaccgaac

SEQ ID NO: 35127 - RNA, 22 nt, Artificial Sequence
  Synthetic
gauuggggacccugcaccgaac

SEQ ID NO: 35128 - RNA, 23 nt, Artificial Sequence
  Synthetic
ggauuggggacccugcaccgaac

SEQ ID NO: 35129 - RNA, 24 nt, Artificial Sequence
  Synthetic
aggauuggggacccugcaccgaac

SEQ ID NO: 35130 - RNA, 18 nt, Artificial Sequence
  Synthetic
guugggguacuuugccac

SEQ ID NO: 35131 - RNA, 19 nt, Artificial Sequence
  Synthetic
aguugggguacuuugccac

SEQ ID NO: 35132 - RNA, 20 nt, Artificial Sequence
  Synthetic
aaguugggguacuuugccac

SEQ ID NO: 35133 - RNA, 21 nt, Artificial Sequence
  Synthetic
gaaguugggguacuuugccac

SEQ ID NO: 35134 - RNA, 22 nt, Artificial Sequence
  Synthetic
ggaaguugggguacuuugccac

SEQ ID NO: 35135 - RNA, 23 nt, Artificial Sequence
  Synthetic
uggaaguugggguacuuugccac

SEQ ID NO: 35136 - RNA, 24 nt, Artificial Sequence
  Synthetic
uuggaaguugggguacuuugccac

SEQ ID NO: 35137 - RNA, 18 nt, Artificial Sequence
  Synthetic
ccggguucaccccuccac

SEQ ID NO: 35138 - RNA, 19 nt, Artificial Sequence
  Synthetic
cccggguucaccccuccac

SEQ ID NO: 35139 - RNA, 20 nt, Artificial Sequence
  Synthetic
acccggguucaccccuccac

SEQ ID NO: 35140 - RNA, 21 nt, Artificial Sequence
  Synthetic
gacccggguucaccccuccac

SEQ ID NO: 35141 - RNA, 22 nt, Artificial Sequence
  Synthetic
ggacccggguucaccccuccac

SEQ ID NO: 35142 - RNA, 23 nt, Artificial Sequence
  Synthetic
uggacccggguucaccccuccac

SEQ ID NO: 35143 - RNA, 24 nt, Artificial Sequence
  Synthetic
auggacccggguucaccccuccac

SEQ ID NO: 35144 - RNA, 18 nt, Artificial Sequence
  Synthetic
uuucucuguaaacaauac

SEQ ID NO: 35145 - RNA, 19 nt, Artificial Sequence
  Synthetic
cuuucucuguaaacaauac

SEQ ID NO: 35146 - RNA, 20 nt, Artificial Sequence
  Synthetic
ccuuucucuguaaacaauac

SEQ ID NO: 35147 - RNA, 21 nt, Artificial Sequence
  Synthetic
gccuuucucuguaaacaauac

SEQ ID NO: 35148 - RNA, 22 nt, Artificial Sequence
  Synthetic
ggccuuucucuguaaacaauac

SEQ ID NO: 35149 - RNA, 23 nt, Artificial Sequence
  Synthetic
aggccuuucucuguaaacaauac

SEQ ID NO: 35150 - RNA, 24 nt, Artificial Sequence
  Synthetic
aaggccuuucucuguaaacaauac

SEQ ID NO: 35151 - RNA, 18 nt, Artificial Sequence
  Synthetic
uugugggucaccauauac

SEQ ID NO: 35152 - RNA, 19 nt, Artificial Sequence
  Synthetic
uuugugggucaccauauac

SEQ ID NO: 35153 - RNA, 20 nt, Artificial Sequence
  Synthetic
uuuugugggucaccauauac

SEQ ID NO: 35154 - RNA, 21 nt, Artificial Sequence
  Synthetic
auuuugugggucaccauauac

SEQ ID NO: 35155 - RNA, 22 nt, Artificial Sequence
  Synthetic
cauuuugugggucaccauauac

SEQ ID NO: 35156 - RNA, 23 nt, Artificial Sequence
  Synthetic
ucauuuugugggucaccauauac

SEQ ID NO: 35157 - RNA, 24 nt, Artificial Sequence
  Synthetic
uucauuuugugggucaccauauac

SEQ ID NO: 35158 - RNA, 18 nt, Artificial Sequence
  Synthetic
accgcuucagcuuuguac

SEQ ID NO: 35159 - RNA, 19 nt, Artificial Sequence
  Synthetic
caccgcuucagcuuuguac

SEQ ID NO: 35160 - RNA, 20 nt, Artificial Sequence
  Synthetic
acaccgcuucagcuuuguac

SEQ ID NO: 35161 - RNA, 21 nt, Artificial Sequence
  Synthetic
gacaccgcuucagcuuuguac

SEQ ID NO: 35162 - RNA, 22 nt, Artificial Sequence
  Synthetic
cgacaccgcuucagcuuuguac

SEQ ID NO: 35163 - RNA, 23 nt, Artificial Sequence
  Synthetic
ucgacaccgcuucagcuuuguac

SEQ ID NO: 35164 - RNA, 24 nt, Artificial Sequence
  Synthetic
cucgacaccgcuucagcuuuguac

SEQ ID NO: 35165 - RNA, 18 nt, Artificial Sequence
  Synthetic
uucaccucugcacguuac

SEQ ID NO: 35166 - RNA, 19 nt, Artificial Sequence
  Synthetic
cuucaccucugcacguuac

SEQ ID NO: 35167 - RNA, 20 nt, Artificial Sequence
  Synthetic
gcuucaccucugcacguuac

SEQ ID NO: 35168 - RNA, 21 nt, Artificial Sequence
  Synthetic
cgcuucaccucugcacguuac

SEQ ID NO: 35169 - RNA, 22 nt, Artificial Sequence
  Synthetic
ucgcuucaccucugcacguuac

SEQ ID NO: 35170 - RNA, 23 nt, Artificial Sequence
  Synthetic
uucgcuucaccucugcacguuac

SEQ ID NO: 35171 - RNA, 24 nt, Artificial Sequence
  Synthetic
cuucgcuucaccucugcacguuac

SEQ ID NO: 35172 - RNA, 18 nt, Artificial Sequence
  Synthetic
cugccguuccugccgacc

SEQ ID NO: 35173 - RNA, 19 nt, Artificial Sequence
  Synthetic
ucugccguuccugccgacc

SEQ ID NO: 35174 - RNA, 20 nt, Artificial Sequence
  Synthetic
gucugccguuccugccgacc

SEQ ID NO: 35175 - RNA, 21 nt, Artificial Sequence
  Synthetic
cgucugccguuccugccgacc

SEQ ID NO: 35176 - RNA, 22 nt, Artificial Sequence
  Synthetic
ccgucugccguuccugccgacc

SEQ ID NO: 35177 - RNA, 23 nt, Artificial Sequence
  Synthetic
uccgucugccguuccugccgacc

SEQ ID NO: 35178 - RNA, 24 nt, Artificial Sequence
  Synthetic
cuccgucugccguuccugccgacc

SEQ ID NO: 35179 - RNA, 18 nt, Artificial Sequence
  Synthetic
acgaagaggcaggucccc

SEQ ID NO: 35180 - RNA, 19 nt, Artificial Sequence
  Synthetic
gacgaagaggcaggucccc

SEQ ID NO: 35181 - RNA, 20 nt, Artificial Sequence
  Synthetic
agacgaagaggcaggucccc

SEQ ID NO: 35182 - RNA, 21 nt, Artificial Sequence
  Synthetic
uagacgaagaggcaggucccc

SEQ ID NO: 35183 - RNA, 22 nt, Artificial Sequence
  Synthetic
uuagacgaagaggcaggucccc

SEQ ID NO: 35184 - RNA, 23 nt, Artificial Sequence
  Synthetic
guuagacgaagaggcaggucccc

SEQ ID NO: 35185 - RNA, 24 nt, Artificial Sequence
  Synthetic
uguuagacgaagaggcaggucccc

SEQ ID NO: 35186 - RNA, 18 nt, Artificial Sequence
  Synthetic
cguuacauggaaaccgcc

SEQ ID NO: 35187 - RNA, 19 nt, Artificial Sequence
  Synthetic
acguuacauggaaaccgcc

SEQ ID NO: 35188 - RNA, 20 nt, Artificial Sequence
  Synthetic
cacguuacauggaaaccgcc

SEQ ID NO: 35189 - RNA, 21 nt, Artificial Sequence
  Synthetic
gcacguuacauggaaaccgcc

SEQ ID NO: 35190 - RNA, 22 nt, Artificial Sequence
  Synthetic
ugcacguuacauggaaaccgcc

SEQ ID NO: 35191 - RNA, 23 nt, Artificial Sequence
  Synthetic
cugcacguuacauggaaaccgcc

SEQ ID NO: 35192 - RNA, 24 nt, Artificial Sequence
  Synthetic
ucugcacguuacauggaaaccgcc

SEQ ID NO: 35193 - RNA, 18 nt, Artificial Sequence
  Synthetic
ccagcggacgaccccucc

SEQ ID NO: 35194 - RNA, 19 nt, Artificial Sequence
  Synthetic
uccagcggacgaccccucc

SEQ ID NO: 35195 - RNA, 20 nt, Artificial Sequence
  Synthetic
auccagcggacgaccccucc

SEQ ID NO: 35196 - RNA, 21 nt, Artificial Sequence
  Synthetic
aauccagcggacgaccccucc

SEQ ID NO: 35197 - RNA, 22 nt, Artificial Sequence
  Synthetic
gaauccagcggacgaccccucc

SEQ ID NO: 35198 - RNA, 23 nt, Artificial Sequence
  Synthetic
ugaauccagcggacgaccccucc

SEQ ID NO: 35199 - RNA, 24 nt, Artificial Sequence
  Synthetic
cugaauccagcggacgaccccucc

SEQ ID NO: 35200 - RNA, 18 nt, Artificial Sequence
  Synthetic
acaucacaucaggauucc

SEQ ID NO: 35201 - RNA, 19 nt, Artificial Sequence
  Synthetic
aacaucacaucaggauucc

SEQ ID NO: 35202 - RNA, 20 nt, Artificial Sequence
  Synthetic
gaacaucacaucaggauucc

SEQ ID NO: 35203 - RNA, 21 nt, Artificial Sequence
  Synthetic
agaacaucacaucaggauucc

SEQ ID NO: 35204 - RNA, 22 nt, Artificial Sequence
  Synthetic
gagaacaucacaucaggauucc

SEQ ID NO: 35205 - RNA, 23 nt, Artificial Sequence
  Synthetic
ggagaacaucacaucaggauucc

SEQ ID NO: 35206 - RNA, 24 nt, Artificial Sequence
  Synthetic
uggagaacaucacaucaggauucc

SEQ ID NO: 35207 - RNA, 18 nt, Artificial Sequence
  Synthetic
ucccaauguuaguauucc

SEQ ID NO: 35208 - RNA, 19 nt, Artificial Sequence
  Synthetic
uucccaauguuaguauucc

SEQ ID NO: 35209 - RNA, 20 nt, Artificial Sequence
  Synthetic
cuucccaauguuaguauucc

SEQ ID NO: 35210 - RNA, 21 nt, Artificial Sequence
  Synthetic
gcuucccaauguuaguauucc

SEQ ID NO: 35211 - RNA, 22 nt, Artificial Sequence
  Synthetic
agcuucccaauguuaguauucc

SEQ ID NO: 35212 - RNA, 23 nt, Artificial Sequence
  Synthetic
cagcuucccaauguuaguauucc

SEQ ID NO: 35213 - RNA, 24 nt, Artificial Sequence
  Synthetic
ccagcuucccaauguuaguauucc

SEQ ID NO: 35214 - RNA, 18 nt, Artificial Sequence
  Synthetic
gggaacaagaucuacagc

SEQ ID NO: 35215 - RNA, 19 nt, Artificial Sequence
  Synthetic
ugggaacaagaucuacagc

SEQ ID NO: 35216 - RNA, 20 nt, Artificial Sequence
  Synthetic
uugggaacaagaucuacagc

SEQ ID NO: 35217 - RNA, 21 nt, Artificial Sequence
  Synthetic
cuugggaacaagaucuacagc

SEQ ID NO: 35218 - RNA, 22 nt, Artificial Sequence
  Synthetic
acuugggaacaagaucuacagc

SEQ ID NO: 35219 - RNA, 23 nt, Artificial Sequence
  Synthetic
uacuugggaacaagaucuacagc

SEQ ID NO: 35220 - RNA, 24 nt, Artificial Sequence
  Synthetic
auacuugggaacaagaucuacagc

SEQ ID NO: 35221 - RNA, 18 nt, Artificial Sequence
  Synthetic
ccaaaaaggacccuuggc

SEQ ID NO: 35222 - RNA, 19 nt, Artificial Sequence
  Synthetic
cccaaaaaggacccuuggc

SEQ ID NO: 35223 - RNA, 20 nt, Artificial Sequence
  Synthetic
ucccaaaaaggacccuuggc

SEQ ID NO: 35224 - RNA, 21 nt, Artificial Sequence
  Synthetic
aucccaaaaaggacccuuggc

SEQ ID NO: 35225 - RNA, 22 nt, Artificial Sequence
  Synthetic
aaucccaaaaaggacccuuggc

SEQ ID NO: 35226 - RNA, 23 nt, Artificial Sequence
  Synthetic
caaucccaaaaaggacccuuggc

SEQ ID NO: 35227 - RNA, 24 nt, Artificial Sequence
  Synthetic
ucaaucccaaaaaggacccuuggc

SEQ ID NO: 35228 - RNA, 18 nt, Artificial Sequence
  Synthetic
  misc_feature (5)..(5): n is a, c, g, or u
ucggncaucagcgcaugc

SEQ ID NO: 35229 - RNA, 19 nt, Artificial Sequence
  Synthetic
  misc_feature (6)..(6): n is a, c, g, or u
aucggncaucagcgcaugc

SEQ ID NO: 35230 - RNA, 20 nt, Artificial Sequence
  Synthetic
  misc_feature (7)..(7): n is a, c, g, or u
caucggncaucagcgcaugc

SEQ ID NO: 35231 - RNA, 21 nt, Artificial Sequence
  Synthetic
  misc_feature (8)..(8): n is a, c, g, or u
ccaucggncaucagcgcaugc

SEQ ID NO: 35232 - RNA, 22 nt, Artificial Sequence
  Synthetic
  misc_feature (9)..(9): n is a, c, g, or u
gccaucggncaucagcgcaugc

SEQ ID NO: 35233 - RNA, 23 nt, Artificial Sequence
  Synthetic
  misc_feature (10)..(10): n is a, c, g, or u
ggccaucggncaucagcgcaugc

SEQ ID NO: 35234 - RNA, 24 nt, Artificial Sequence
  Synthetic
  misc_feature (11)..(11): n is a, c, g, or u
uggccaucggncaucagcgcaugc

SEQ ID NO: 35235 - RNA, 18 nt, Artificial Sequence
  Synthetic
uuuggaagauccagcauc

SEQ ID NO: 35236 - RNA, 19 nt, Artificial Sequence
  Synthetic
auuuggaagauccagcauc

SEQ ID NO: 35237 - RNA, 20 nt, Artificial Sequence
  Synthetic
aauuuggaagauccagcauc

SEQ ID NO: 35238 - RNA, 21 nt, Artificial Sequence
  Synthetic
uaauuuggaagauccagcauc

SEQ ID NO: 35239 - RNA, 22 nt, Artificial Sequence
  Synthetic
auaauuuggaagauccagcauc

SEQ ID NO: 35240 - RNA, 23 nt, Artificial Sequence
  Synthetic
aauaauuuggaagauccagcauc

SEQ ID NO: 35241 - RNA, 24 nt, Artificial Sequence
  Synthetic
uaauaauuuggaagauccagcauc

SEQ ID NO: 35242 - RNA, 18 nt, Artificial Sequence
  Synthetic
uauucccaucccaucauc

SEQ ID NO: 35243 - RNA, 19 nt, Artificial Sequence
  Synthetic
guauucccaucccaucauc

SEQ ID NO: 35244 - RNA, 20 nt, Artificial Sequence
  Synthetic
uguauucccaucccaucauc

SEQ ID NO: 35245 - RNA, 21 nt, Artificial Sequence
  Synthetic
cuguauucccaucccaucauc

SEQ ID NO: 35246 - RNA, 22 nt, Artificial Sequence
  Synthetic
ccuguauucccaucccaucauc

SEQ ID NO: 35247 - RNA, 23 nt, Artificial Sequence
  Synthetic
accuguauucccaucccaucauc

SEQ ID NO: 35248 - RNA, 24 nt, Artificial Sequence
  Synthetic
caccuguauucccaucccaucauc

SEQ ID NO: 35249 - RNA, 18 nt, Artificial Sequence
  Synthetic
guaucaaaccguauuauc

SEQ ID NO: 35250 - RNA, 19 nt, Artificial Sequence
  Synthetic
gguaucaaaccguauuauc

SEQ ID NO: 35251 - RNA, 20 nt, Artificial Sequence
  Synthetic
agguaucaaaccguauuauc

SEQ ID NO: 35252 - RNA, 21 nt, Artificial Sequence
  Synthetic
aagguaucaaaccguauuauc

SEQ ID NO: 35253 - RNA, 22 nt, Artificial Sequence
  Synthetic
aaagguaucaaaccguauuauc

SEQ ID NO: 35254 - RNA, 23 nt, Artificial Sequence
  Synthetic
caaagguaucaaaccguauuauc

SEQ ID NO: 35255 - RNA, 24 nt, Artificial Sequence
  Synthetic
acaaagguaucaaaccguauuauc

SEQ ID NO: 35256 - RNA, 18 nt, Artificial Sequence
  Synthetic
aguuauauaagaggacuc

SEQ ID NO: 35257 - RNA, 19 nt, Artificial Sequence
  Synthetic
caguuauauaagaggacuc

SEQ ID NO: 35258 - RNA, 20 nt, Artificial Sequence
  Synthetic
gcaguuauauaagaggacuc

SEQ ID NO: 35259 - RNA, 21 nt, Artificial Sequence
  Synthetic
  misc_feature (1)..(1): n is a, c, g, or u
ngcaguuauauaagaggacuc

SEQ ID NO: 35260 - RNA, 22 nt, Artificial Sequence
  Synthetic
  misc_feature (2)..(2): n is a, c, g, or u
angcaguuauauaagaggacuc

SEQ ID NO: 35261 - RNA, 23 nt, Artificial Sequence
  Synthetic
  misc_feature (3)..(3): n is a, c, g, or u
aangcaguuauauaagaggacuc

SEQ ID NO: 35262 - RNA, 24 nt, Artificial Sequence
  Synthetic
  misc_feature (4)..(4): n is a, c, g, or u
caangcaguuauauaagaggacuc

SEQ ID NO: 35263 - RNA, 18 nt, Artificial Sequence
  Synthetic
uccagcggacgaccccuc

SEQ ID NO: 35264 - RNA, 19 nt, Artificial Sequence
  Synthetic
auccagcggacgaccccuc

SEQ ID NO: 35265 - RNA, 20 nt, Artificial Sequence
  Synthetic
aauccagcggacgaccccuc

SEQ ID NO: 35266 - RNA, 21 nt, Artificial Sequence
  Synthetic
gaauccagcggacgaccccuc

SEQ ID NO: 35267 - RNA, 22 nt, Artificial Sequence
  Synthetic
ugaauccagcggacgaccccuc

SEQ ID NO: 35268 - RNA, 23 nt, Artificial Sequence
  Synthetic
cugaauccagcggacgaccccuc

SEQ ID NO: 35269 - RNA, 24 nt, Artificial Sequence
  Synthetic
gcugaauccagcggacgaccccuc

SEQ ID NO: 35270 - RNA, 18 nt, Artificial Sequence
  Synthetic
cuacaaaaucccaaaguc

SEQ ID NO: 35271 - RNA, 19 nt, Artificial Sequence
  Synthetic
ucuacaaaaucccaaaguc

SEQ ID NO: 35272 - RNA, 20 nt, Artificial Sequence
  Synthetic
cucuacaaaaucccaaaguc

SEQ ID NO: 35273 - RNA, 21 nt, Artificial Sequence
  Synthetic
gcucuacaaaaucccaaaguc

SEQ ID NO: 35274 - RNA, 22 nt, Artificial Sequence
  Synthetic
agcucuacaaaaucccaaaguc

SEQ ID NO: 35275 - RNA, 23 nt, Artificial Sequence
  Synthetic
aagcucuacaaaaucccaaaguc

SEQ ID NO: 35276 - RNA, 24 nt, Artificial Sequence
  Synthetic
caagcucuacaaaaucccaaaguc

SEQ ID NO: 35277 - RNA, 18 nt, Artificial Sequence
  Synthetic
cuccaccaaucgucaguc

SEQ ID NO: 35278 - RNA, 19 nt, Artificial Sequence
  Synthetic
ccuccaccaaucgucaguc

SEQ ID NO: 35279 - RNA, 20 nt, Artificial Sequence
  Synthetic
gccuccaccaaucgucaguc

SEQ ID NO: 35280 - RNA, 21 nt, Artificial Sequence
  Synthetic
ugccuccaccaaucgucaguc

SEQ ID NO: 35281 - RNA, 22 nt, Artificial Sequence
  Synthetic
cugccuccaccaaucgucaguc

SEQ ID NO: 35282 - RNA, 23 nt, Artificial Sequence
  Synthetic
ccugccuccaccaaucgucaguc

SEQ ID NO: 35283 - RNA, 24 nt, Artificial Sequence
  Synthetic
uccugccuccaccaaucgucaguc

SEQ ID NO: 35284 - RNA, 18 nt, Artificial Sequence
  Synthetic
uuuugcucgcagccgguc

SEQ ID NO: 35285 - RNA, 19 nt, Artificial Sequence
  Synthetic
guuuugcucgcagccgguc

SEQ ID NO: 35286 - RNA, 20 nt, Artificial Sequence
  Synthetic
uguuuugcucgcagccgguc

SEQ ID NO: 35287 - RNA, 21 nt, Artificial Sequence
  Synthetic
uuguuuugcucgcagccgguc

SEQ ID NO: 35288 - RNA, 22 nt, Artificial Sequence
  Synthetic
cuuguuuugcucgcagccgguc

SEQ ID NO: 35289 - RNA, 23 nt, Artificial Sequence
  Synthetic
gcuuguuuugcucgcagccgguc

SEQ ID NO: 35290 - RNA, 24 nt, Artificial Sequence
  Synthetic
ugcuuguuuugcucgcagccgguc

SEQ ID NO: 35291 - RNA, 18 nt, Artificial Sequence
  Synthetic
cuauccuaucaacacuuc

SEQ ID NO: 35292 - RNA, 19 nt, Artificial Sequence
  Synthetic
ccuauccuaucaacacuuc

SEQ ID NO: 35293 - RNA, 20 nt, Artificial Sequence
  Synthetic
cccuauccuaucaacacuuc

SEQ ID NO: 35294 - RNA, 21 nt, Artificial Sequence
  Synthetic
ccccuauccuaucaacacuuc

SEQ ID NO: 35295 - RNA, 22 nt, Artificial Sequence
  Synthetic
gccccuauccuaucaacacuuc

SEQ ID NO: 35296 - RNA, 23 nt, Artificial Sequence
  Synthetic
ugccccuauccuaucaacacuuc

SEQ ID NO: 35297 - RNA, 24 nt, Artificial Sequence
  Synthetic
augccccuauccuaucaacacuuc

SEQ ID NO: 35298 - RNA, 18 nt, Artificial Sequence
  Synthetic
  misc_feature (4)..(4): n is a, c, g, or u
gggnuggagaaauacuuc

SEQ ID NO: 35299 - RNA, 19 nt, Artificial Sequence
  Synthetic
  misc_feature (5)..(5): n is a, c, g, or u
cgggnuggagaaauacuuc

SEQ ID NO: 35300 - RNA, 20 nt, Artificial Sequence
  Synthetic
  misc_feature (6)..(6): n is a, c, g, or u
ccgggnuggagaaauacuuc

SEQ ID NO: 35301 - RNA, 21 nt, Artificial Sequence
  Synthetic
  misc_feature (7)..(7): n is a, c, g, or u
accgggnuggagaaauacuuc

SEQ ID NO: 35302 - RNA, 22 nt, Artificial Sequence
  Synthetic
  misc_feature (8)..(8): n is a, c, g, or u
aaccgggnuggagaaauacuuc

SEQ ID NO: 35303 - RNA, 23 nt, Artificial Sequence
  Synthetic
  misc_feature (9)..(9): n is a, c, g, or u
caaccgggnuggagaaauacuuc

SEQ ID NO: 35304 - RNA, 24 nt, Artificial Sequence
  Synthetic
  misc_feature (10)..(10): n is a, c, g, or u
acaaccgggnuggagaaauacuuc

SEQ ID NO: 35305 - RNA, 18 nt, Artificial Sequence
  Synthetic
cugccaacuggauccuuc

SEQ ID NO: 35306 - RNA, 19 nt, Artificial Sequence
  Synthetic
gcugccaacuggauccuuc

SEQ ID NO: 35307 - RNA, 20 nt, Artificial Sequence
  Synthetic
ugcugccaacuggauccuuc

SEQ ID NO: 35308 - RNA, 21 nt, Artificial Sequence
  Synthetic
gugcugccaacuggauccuuc

SEQ ID NO: 35309 - RNA, 22 nt, Artificial Sequence
  Synthetic
ugugcugccaacuggauccuuc

SEQ ID NO: 35310 - RNA, 23 nt, Artificial Sequence
  Synthetic
cugugcugccaacuggauccuuc

SEQ ID NO: 35311 - RNA, 24 nt, Artificial Sequence
  Synthetic
gcugugcugccaacuggauccuuc

SEQ ID NO: 35312 - RNA, 18 nt, Artificial Sequence
  Synthetic
caauucugucguccuuuc

SEQ ID NO: 35313 - RNA, 19 nt, Artificial Sequence
  Synthetic
acaauucugucguccuuuc

SEQ ID NO: 35314 - RNA, 20 nt, Artificial Sequence
  Synthetic
gacaauucugucguccuuuc

SEQ ID NO: 35315 - RNA, 21 nt, Artificial Sequence
  Synthetic
ugacaauucugucguccuuuc

SEQ ID NO: 35316 - RNA, 22 nt, Artificial Sequence
  Synthetic
cugacaauucugucguccuuuc

SEQ ID NO: 35317 - RNA, 23 nt, Artificial Sequence
  Synthetic
acugacaauucugucguccuuuc

SEQ ID NO: 35318 - RNA, 24 nt, Artificial Sequence
  Synthetic
gacugacaauucugucguccuuuc

SEQ ID NO: 35319 - RNA, 18 nt, Artificial Sequence
  Synthetic
cuacagcauggggcuuuc

SEQ ID NO: 35320 - RNA, 19 nt, Artificial Sequence
  Synthetic
ucuacagcauggggcuuuc

SEQ ID NO: 35321 - RNA, 20 nt, Artificial Sequence
  Synthetic
aucuacagcauggggcuuuc

SEQ ID NO: 35322 - RNA, 21 nt, Artificial Sequence
  Synthetic
gaucuacagcauggggcuuuc

SEQ ID NO: 35323 - RNA, 22 nt, Artificial Sequence
  Synthetic
agaucuacagcauggggcuuuc

SEQ ID NO: 35324 - RNA, 23 nt, Artificial Sequence
  Synthetic
aagaucuacagcauggggcuuuc

SEQ ID NO: 35325 - RNA, 24 nt, Artificial Sequence
  Synthetic
caagaucuacagcauggggcuuuc

SEQ ID NO: 35326 - RNA, 18 nt, Artificial Sequence
  Synthetic
ggacuucucucaauuuuc

SEQ ID NO: 35327 - RNA, 19 nt, Artificial Sequence
  Synthetic
uggacuucucucaauuuuc

SEQ ID NO: 35328 - RNA, 20 nt, Artificial Sequence
  Synthetic
guggacuucucucaauuuuc

SEQ ID NO: 35329 - RNA, 21 nt, Artificial Sequence
  Synthetic
gguggacuucucucaauuuuc

SEQ ID NO: 35330 - RNA, 22 nt, Artificial Sequence
  Synthetic
ugguggacuucucucaauuuuc

SEQ ID NO: 35331 - RNA, 23 nt, Artificial Sequence
  Synthetic
gugguggacuucucucaauuuuc

SEQ ID NO: 35332 - RNA, 24 nt, Artificial Sequence
  Synthetic
cgugguggacuucucucaauuuuc

SEQ ID NO: 35333 - RNA, 18 nt, Artificial Sequence
  Synthetic
  misc_feature (3)..(3): n is a, c, g, or u
ccnuaacaaaacaaaaag

SEQ ID NO: 35334 - RNA, 19 nt, Artificial Sequence
  Synthetic
  misc_feature (4)..(4): n is a, c, g, or u
accnuaacaaaacaaaaag

SEQ ID NO: 35335 - RNA, 20 nt, Artificial Sequence
  Synthetic
  misc_feature (5)..(5): n is a, c, g, or u
aaccnuaacaaaacaaaaag

SEQ ID NO: 35336 - RNA, 21 nt, Artificial Sequence
  Synthetic
  misc_feature (6)..(6): n is a, c, g, or u
aaaccnuaacaaaacaaaaag

SEQ ID NO: 35337 - RNA, 22 nt, Artificial Sequence
  Synthetic
  misc_feature (7)..(7): n is a, c, g, or u
uaaaccnuaacaaaacaaaaag

SEQ ID NO: 35338 - RNA, 23 nt, Artificial Sequence
  Synthetic
  misc_feature (8)..(8): n is a, c, g, or u
cuaaaccnuaacaaaacaaaaag

SEQ ID NO: 35339 - RNA, 24 nt, Artificial Sequence
  Synthetic
  misc_feature (9)..(9): n is a, c, g, or u
ucuaaaccnuaacaaaacaaaaag

SEQ ID NO: 35340 - RNA, 18 nt, Artificial Sequence
  Synthetic
auuccuuggacucacaag

SEQ ID NO: 35341 - RNA, 19 nt, Artificial Sequence
  Synthetic
uauuccuuggacucacaag

SEQ ID NO: 35342 - RNA, 20 nt, Artificial Sequence
  Synthetic
guauuccuuggacucacaag

SEQ ID NO: 35343 - RNA, 21 nt, Artificial Sequence
  Synthetic
aguauuccuuggacucacaag

SEQ ID NO: 35344 - RNA, 22 nt, Artificial Sequence
  Synthetic
uaguauuccuuggacucacaag

SEQ ID NO: 35345 - RNA, 23 nt, Artificial Sequence
  Synthetic
uuaguauuccuuggacucacaag

SEQ ID NO: 35346 - RNA, 24 nt, Artificial Sequence
  Synthetic
guuaguauuccuuggacucacaag

SEQ ID NO: 35347 - RNA, 18 nt, Artificial Sequence
  Synthetic
aggcagguccccucgaag

SEQ ID NO: 35348 - RNA, 19 nt, Artificial Sequence
  Synthetic
gaggcagguccccucgaag

SEQ ID NO: 35349 - RNA, 20 nt, Artificial Sequence
  Synthetic
agaggcagguccccucgaag

SEQ ID NO: 35350 - RNA, 21 nt, Artificial Sequence
  Synthetic
aagaggcagguccccucgaag

SEQ ID NO: 35351 - RNA, 22 nt, Artificial Sequence
  Synthetic
gaagaggcagguccccucgaag

SEQ ID NO: 35352 - RNA, 23 nt, Artificial Sequence
  Synthetic
cgaagaggcagguccccucgaag

SEQ ID NO: 35353 - RNA, 24 nt, Artificial Sequence
  Synthetic
acgaagaggcagguccccucgaag

SEQ ID NO: 35354 - RNA, 18 nt, Artificial Sequence
  Synthetic
gggauauguaauuggaag

SEQ ID NO: 35355 - RNA, 19 nt, Artificial Sequence
  Synthetic
ugggauauguaauuggaag

SEQ ID NO: 35356 - RNA, 20 nt, Artificial Sequence
  Synthetic
augggauauguaauuggaag

SEQ ID NO: 35357 - RNA, 21 nt, Artificial Sequence
  Synthetic
uaugggauauguaauuggaag

SEQ ID NO: 35358 - RNA, 22 nt, Artificial Sequence
  Synthetic
uuaugggauauguaauuggaag

SEQ ID NO: 35359 - RNA, 23 nt, Artificial Sequence
  Synthetic
uuuaugggauauguaauuggaag

SEQ ID NO: 35360 - RNA, 24 nt, Artificial Sequence
  Synthetic
uuuuaugggauauguaauuggaag

SEQ ID NO: 35361 - RNA, 18 nt, Artificial Sequence
  Synthetic
ccccugcucguguuacag

SEQ ID NO: 35362 - RNA, 19 nt, Artificial Sequence
  Synthetic
accccugcucguguuacag

SEQ ID NO: 35363 - RNA, 20 nt, Artificial Sequence
  Synthetic
gaccccugcucguguuacag

SEQ ID NO: 35364 - RNA, 21 nt, Artificial Sequence
  Synthetic
ggaccccugcucguguuacag

SEQ ID NO: 35365 - RNA, 22 nt, Artificial Sequence
  Synthetic
aggaccccugcucguguuacag

SEQ ID NO: 35366 - RNA, 23 nt, Artificial Sequence
  Synthetic
uaggaccccugcucguguuacag

SEQ ID NO: 35367 - RNA, 24 nt, Artificial Sequence
  Synthetic
cuaggaccccugcucguguuacag

SEQ ID NO: 35368 - RNA, 18 nt, Artificial Sequence
  Synthetic
uuccuucccgaucaccag

SEQ ID NO: 35369 - RNA, 19 nt, Artificial Sequence
  Synthetic
auuccuucccgaucaccag

SEQ ID NO: 35370 - RNA, 20 nt, Artificial Sequence
  Synthetic
gauuccuucccgaucaccag

SEQ ID NO: 35371 - RNA, 21 nt, Artificial Sequence
  Synthetic
ggauuccuucccgaucaccag

SEQ ID NO: 35372 - RNA, 22 nt, Artificial Sequence
  Synthetic
aggauuccuucccgaucaccag

SEQ ID NO: 35373 - RNA, 23 nt, Artificial Sequence
  Synthetic
uaggauuccuucccgaucaccag

SEQ ID NO: 35374 - RNA, 24 nt, Artificial Sequence
  Synthetic
cuaggauuccuucccgaucaccag

SEQ ID NO: 35375 - RNA, 18 nt, Artificial Sequence
  Synthetic
aacucccucgccucgcag

SEQ ID NO: 35376 - RNA, 19 nt, Artificial Sequence
  Synthetic
gaacucccucgccucgcag

SEQ ID NO: 35377 - RNA, 20 nt, Artificial Sequence
  Synthetic
agaacucccucgccucgcag

SEQ ID NO: 35378 - RNA, 21 nt, Artificial Sequence
  Synthetic
aagaacucccucgccucgcag

SEQ ID NO: 35379 - RNA, 22 nt, Artificial Sequence
  Synthetic
gaagaacucccucgccucgcag

SEQ ID NO: 35380 - RNA, 23 nt, Artificial Sequence
  Synthetic
agaagaacucccucgccucgcag

SEQ ID NO: 35381 - RNA, 24 nt, Artificial Sequence
  Synthetic
aagaagaacucccucgccucgcag

SEQ ID NO: 35382 - RNA, 18 nt, Artificial Sequence
  Synthetic
cauccucaggccaugcag

SEQ ID NO: 35383 - RNA, 19 nt, Artificial Sequence
  Synthetic
ucauccucaggccaugcag

SEQ ID NO: 35384 - RNA, 20 nt, Artificial Sequence
  Synthetic
gucauccucaggccaugcag

SEQ ID NO: 35385 - RNA, 21 nt, Artificial Sequence
  Synthetic
agucauccucaggccaugcag

SEQ ID NO: 35386 - RNA, 22 nt, Artificial Sequence
  Synthetic
cagucauccucaggccaugcag

SEQ ID NO: 35387 - RNA, 23 nt, Artificial Sequence
  Synthetic
acagucauccucaggccaugcag

SEQ ID NO: 35388 - RNA, 24 nt, Artificial Sequence
  Synthetic
gacagucauccucaggccaugcag

SEQ ID NO: 35389 - RNA, 18 nt, Artificial Sequence
  Synthetic
uggacggucccucucgag

SEQ ID NO: 35390 - RNA, 19 nt, Artificial Sequence
  Synthetic
uuggacggucccucucgag

SEQ ID NO: 35391 - RNA, 20 nt, Artificial Sequence
  Synthetic
cuuggacggucccucucgag

SEQ ID NO: 35392 - RNA, 21 nt, Artificial Sequence
  Synthetic
ucuuggacggucccucucgag

SEQ ID NO: 35393 - RNA, 22 nt, Artificial Sequence
  Synthetic
uucuuggacggucccucucgag

SEQ ID NO: 35394 - RNA, 23 nt, Artificial Sequence
  Synthetic
uuucuuggacggucccucucgag

SEQ ID NO: 35395 - RNA, 24 nt, Artificial Sequence
  Synthetic
cuuucuuggacggucccucucgag

SEQ ID NO: 35396 - RNA, 18 nt, Artificial Sequence
  Synthetic
aggccaacaagguaggag

SEQ ID NO: 35397 - RNA, 19 nt, Artificial Sequence
  Synthetic
gaggccaacaagguaggag

SEQ ID NO: 35398 - RNA, 20 nt, Artificial Sequence
  Synthetic
agaggccaacaagguaggag

SEQ ID NO: 35399 - RNA, 21 nt, Artificial Sequence
  Synthetic
cagaggccaacaagguaggag

SEQ ID NO: 35400 - RNA, 22 nt, Artificial Sequence
  Synthetic
ccagaggccaacaagguaggag

SEQ ID NO: 35401 - RNA, 23 nt, Artificial Sequence
  Synthetic
gccagaggccaacaagguaggag

SEQ ID NO: 35402 - RNA, 24 nt, Artificial Sequence
  Synthetic
ggccagaggccaacaagguaggag

SEQ ID NO: 35403 - RNA, 18 nt, Artificial Sequence
  Synthetic
gacuguguuuuugcugag

SEQ ID NO: 35404 - RNA, 19 nt, Artificial Sequence
  Synthetic
ggacuguguuuuugcugag

SEQ ID NO: 35405 - RNA, 20 nt, Artificial Sequence
  Synthetic
aggacuguguuuuugcugag

SEQ ID NO: 35406 - RNA, 21 nt, Artificial Sequence
  Synthetic
aaggacuguguuuuugcugag

SEQ ID NO: 35407 - RNA, 22 nt, Artificial Sequence
  Synthetic
caaggacuguguuuuugcugag

SEQ ID NO: 35408 - RNA, 23 nt, Artificial Sequence
  Synthetic
ucaaggacuguguuuuugcugag

SEQ ID NO: 35409 - RNA, 24 nt, Artificial Sequence
  Synthetic
uucaaggacuguguuuuugcugag

SEQ ID NO: 35410 - RNA, 18 nt, Artificial Sequence
  Synthetic
cuucucucaauuuucuag

SEQ ID NO: 35411 - RNA, 19 nt, Artificial Sequence
  Synthetic
acuucucucaauuuucuag

SEQ ID NO: 35412 - RNA, 20 nt, Artificial Sequence
  Synthetic
gacuucucucaauuuucuag

SEQ ID NO: 35413 - RNA, 21 nt, Artificial Sequence
  Synthetic
ggacuucucucaauuuucuag

SEQ ID NO: 35414 - RNA, 22 nt, Artificial Sequence
  Synthetic
uggacuucucucaauuuucuag

SEQ ID NO: 35415 - RNA, 23 nt, Artificial Sequence
  Synthetic
guggacuucucucaauuuucuag

SEQ ID NO: 35416 - RNA, 24 nt, Artificial Sequence
  Synthetic
gguggacuucucucaauuuucuag

SEQ ID NO: 35417 - RNA, 18 nt, Artificial Sequence
  Synthetic
ggagacuacuguuguuag

SEQ ID NO: 35418 - RNA, 19 nt, Artificial Sequence
  Synthetic
cggagacuacuguuguuag

SEQ ID NO: 35419 - RNA, 20 nt, Artificial Sequence
  Synthetic
ccggagacuacuguuguuag

SEQ ID NO: 35420 - RNA, 21 nt, Artificial Sequence
  Synthetic
uccggagacuacuguuguuag

SEQ ID NO: 35421 - RNA, 22 nt, Artificial Sequence
  Synthetic
uuccggagacuacuguuguuag

SEQ ID NO: 35422 - RNA, 23 nt, Artificial Sequence
  Synthetic
cuuccggagacuacuguuguuag

SEQ ID NO: 35423 - RNA, 24 nt, Artificial Sequence
  Synthetic
acuuccggagacuacuguuguuag

SEQ ID NO: 35424 - RNA, 18 nt, Artificial Sequence
  Synthetic
gacuacuguuguuagacg

SEQ ID NO: 35425 - RNA, 19 nt, Artificial Sequence
  Synthetic
agacuacuguuguuagacg

SEQ ID NO: 35426 - RNA, 20 nt, Artificial Sequence
  Synthetic
gagacuacuguuguuagacg

SEQ ID NO: 35427 - RNA, 21 nt, Artificial Sequence
  Synthetic
ggagacuacuguuguuagacg

SEQ ID NO: 35428 - RNA, 22 nt, Artificial Sequence
  Synthetic
cggagacuacuguuguuagacg

SEQ ID NO: 35429 - RNA, 23 nt, Artificial Sequence
  Synthetic
ccggagacuacuguuguuagacg

SEQ ID NO: 35430 - RNA, 24 nt, Artificial Sequence
  Synthetic
uccggagacuacuguuguuagacg

SEQ ID NO: 35431 - RNA, 18 nt, Artificial Sequence
  Synthetic
  misc_feature (4)..(4): n is a, c, g, or u
cggncaucagcgcaugcg

SEQ ID NO: 35432 - RNA, 19 nt, Artificial Sequence
  Synthetic
  misc_feature (5)..(5): n is a, c, g, or u
ucggncaucagcgcaugcg

SEQ ID NO: 35433 - RNA, 20 nt, Artificial Sequence
  Synthetic
  misc_feature (6)..(6): n is a, c, g, or u
aucggncaucagcgcaugcg

SEQ ID NO: 35434 - RNA, 21 nt, Artificial Sequence
  Synthetic
  misc_feature (7)..(7): n is a, c, g, or u
caucggncaucagcgcaugcg

SEQ ID NO: 35435 - RNA, 22 nt, Artificial Sequence
  Synthetic
  misc_feature (8)..(8): n is a, c, g, or u
ccaucggncaucagcgcaugcg

SEQ ID NO: 35436 - RNA, 23 nt, Artificial Sequence
  Synthetic
  misc_feature (9)..(9): n is a, c, g, or u
gccaucggncaucagcgcaugcg

SEQ ID NO: 35437 - RNA, 24 nt, Artificial Sequence
  Synthetic
  misc_feature (10)..(10): n is a, c, g, or u
ggccaucggncaucagcgcaugcg

SEQ ID NO: 35438 - RNA, 18 nt, Artificial Sequence
  Synthetic
aagaggcagguccccucg

SEQ ID NO: 35439 - RNA, 19 nt, Artificial Sequence
  Synthetic
gaagaggcagguccccucg

SEQ ID NO: 35440 - RNA, 20 nt, Artificial Sequence
  Synthetic
cgaagaggcagguccccucg

SEQ ID NO: 35441 - RNA, 21 nt, Artificial Sequence
  Synthetic
acgaagaggcagguccccucg

SEQ ID NO: 35442 - RNA, 22 nt, Artificial Sequence
  Synthetic
gacgaagaggcagguccccucg

SEQ ID NO: 35443 - RNA, 23 nt, Artificial Sequence
  Synthetic
agacgaagaggcagguccccucg

SEQ ID NO: 35444 - RNA, 24 nt, Artificial Sequence
  Synthetic
uagacgaagaggcagguccccucg

SEQ ID NO: 35445 - RNA, 18 nt, Artificial Sequence
  Synthetic
aucucaaucgccgcgucg

SEQ ID NO: 35446 - RNA, 19 nt, Artificial Sequence
  Synthetic
gaucucaaucgccgcgucg

SEQ ID NO: 35447 - RNA, 20 nt, Artificial Sequence
  Synthetic
agaucucaaucgccgcgucg

SEQ ID NO: 35448 - RNA, 21 nt, Artificial Sequence
  Synthetic
aagaucucaaucgccgcgucg

SEQ ID NO: 35449 - RNA, 22 nt, Artificial Sequence
  Synthetic
gaagaucucaaucgccgcgucg

SEQ ID NO: 35450 - RNA, 23 nt, Artificial Sequence
  Synthetic
cgaagaucucaaucgccgcgucg

SEQ ID NO: 35451 - RNA, 24 nt, Artificial Sequence
  Synthetic
acgaagaucucaaucgccgcgucg

SEQ ID NO: 35452 - RNA, 18 nt, Artificial Sequence
  Synthetic
ugccaacuggauccuucg

SEQ ID NO: 35453 - RNA, 19 nt, Artificial Sequence
  Synthetic
cugccaacuggauccuucg

SEQ ID NO: 35454 - RNA, 20 nt, Artificial Sequence
  Synthetic
gcugccaacuggauccuucg

SEQ ID NO: 35455 - RNA, 21 nt, Artificial Sequence
  Synthetic
ugcugccaacuggauccuucg

SEQ ID NO: 35456 - RNA, 22 nt, Artificial Sequence
  Synthetic
gugcugccaacuggauccuucg

SEQ ID NO: 35457 - RNA, 23 nt, Artificial Sequence
  Synthetic
ugugcugccaacuggauccuucg

SEQ ID NO: 35458 - RNA, 24 nt, Artificial Sequence
  Synthetic
cugugcugccaacuggauccuucg

SEQ ID NO: 35459 - RNA, 18 nt, Artificial Sequence
  Synthetic
cauuuguucagugguucg

SEQ ID NO: 35460 - RNA, 19 nt, Artificial Sequence
  Synthetic
ccauuuguucagugguucg

SEQ ID NO: 35461 - RNA, 20 nt, Artificial Sequence
  Synthetic
gccauuuguucagugguucg

SEQ ID NO: 35462 - RNA, 21 nt, Artificial Sequence
  Synthetic
ugccauuuguucagugguucg

SEQ ID NO: 35463 - RNA, 22 nt, Artificial Sequence
  Synthetic
gugccauuuguucagugguucg

SEQ ID NO: 35464 - RNA, 23 nt, Artificial Sequence
  Synthetic
agugccauuuguucagugguucg

SEQ ID NO: 35465 - RNA, 24 nt, Artificial Sequence
  Synthetic
uagugccauuuguucagugguucg

SEQ ID NO: 35466 - RNA, 18 nt, Artificial Sequence
  Synthetic
ggccagaggccaacaagg

SEQ ID NO: 35467 - RNA, 19 nt, Artificial Sequence
  Synthetic
uggccagaggccaacaagg

SEQ ID NO: 35468 - RNA, 20 nt, Artificial Sequence
  Synthetic
uuggccagaggccaacaagg

SEQ ID NO: 35469 - RNA, 21 nt, Artificial Sequence
  Synthetic
cuuggccagaggccaacaagg

SEQ ID NO: 35470 - RNA, 22 nt, Artificial Sequence
  Synthetic
ccuuggccagaggccaacaagg

SEQ ID NO: 35471 - RNA, 23 nt, Artificial Sequence
  Synthetic
cccuuggccagaggccaacaagg

SEQ ID NO: 35472 - RNA, 24 nt, Artificial Sequence
  Synthetic
acccuuggccagaggccaacaagg

SEQ ID NO: 35473 - RNA, 18 nt, Artificial Sequence
  Synthetic
uuccuuggacucacaagg

SEQ ID NO: 35474 - RNA, 19 nt, Artificial Sequence
  Synthetic
auuccuuggacucacaagg

SEQ ID NO: 35475 - RNA, 20 nt, Artificial Sequence
  Synthetic
uauuccuuggacucacaagg

SEQ ID NO: 35476 - RNA, 21 nt, Artificial Sequence
  Synthetic
guauuccuuggacucacaagg

SEQ ID NO: 35477 - RNA, 22 nt, Artificial Sequence
  Synthetic
aguauuccuuggacucacaagg

SEQ ID NO: 35478 - RNA, 23 nt, Artificial Sequence
  Synthetic
uaguauuccuuggacucacaagg

SEQ ID NO: 35479 - RNA, 24 nt, Artificial Sequence
  Synthetic
uuaguauuccuuggacucacaagg

SEQ ID NO: 35480 - RNA, 18 nt, Artificial Sequence
  Synthetic
gcuguacaaaaccuucgg

SEQ ID NO: 35481 - RNA, 19 nt, Artificial Sequence
  Synthetic
ugcuguacaaaaccuucgg

SEQ ID NO: 35482 - RNA, 20 nt, Artificial Sequence
  Synthetic
uugcuguacaaaaccuucgg

SEQ ID NO: 35483 - RNA, 21 nt, Artificial Sequence
  Synthetic
guugcuguacaaaaccuucgg

SEQ ID NO: 35484 - RNA, 22 nt, Artificial Sequence
  Synthetic
uguugcuguacaaaaccuucgg

SEQ ID NO: 35485 - RNA, 23 nt, Artificial Sequence
  Synthetic
auguugcuguacaaaaccuucgg

SEQ ID NO: 35486 - RNA, 24 nt, Artificial Sequence
  Synthetic
cauguugcuguacaaaaccuucgg

SEQ ID NO: 35487 - RNA, 18 nt, Artificial Sequence
  Synthetic
guuaugucaacaaccggg

SEQ ID NO: 35488 - RNA, 19 nt, Artificial Sequence
  Synthetic
uguuaugucaacaaccggg

SEQ ID NO: 35489 - RNA, 20 nt, Artificial Sequence
  Synthetic
uuguuaugucaacaaccggg

SEQ ID NO: 35490 - RNA, 21 nt, Artificial Sequence
  Synthetic
uuuguuaugucaacaaccggg

SEQ ID NO: 35491 - RNA, 22 nt, Artificial Sequence
  Synthetic
guuuguuaugucaacaaccggg

SEQ ID NO: 35492 - RNA, 23 nt, Artificial Sequence
  Synthetic
uguuuguuaugucaacaaccggg

SEQ ID NO: 35493 - RNA, 24 nt, Artificial Sequence
  Synthetic
cuguuuguuaugucaacaaccggg

SEQ ID NO: 35494 - RNA, 18 nt, Artificial Sequence
  Synthetic
cacggaggccuuuugggg

SEQ ID NO: 35495 - RNA, 19 nt, Artificial Sequence
  Synthetic
acacggaggccuuuugggg

SEQ ID NO: 35496 - RNA, 20 nt, Artificial Sequence
  Synthetic
cacacggaggccuuuugggg

SEQ ID NO: 35497 - RNA, 21 nt, Artificial Sequence
  Synthetic
ccacacggaggccuuuugggg

SEQ ID NO: 35498 - RNA, 22 nt, Artificial Sequence
  Synthetic
uccacacggaggccuuuugggg

SEQ ID NO: 35499 - RNA, 23 nt, Artificial Sequence
  Synthetic
cuccacacggaggccuuuugggg

SEQ ID NO: 35500 - RNA, 24 nt, Artificial Sequence
  Synthetic
ccuccacacggaggccuuuugggg

SEQ ID NO: 35501 - RNA, 18 nt, Artificial Sequence
  Synthetic
acacggaggccuuuuggg

SEQ ID NO: 35502 - RNA, 19 nt, Artificial Sequence
  Synthetic
cacacggaggccuuuuggg

SEQ ID NO: 35503 - RNA, 20 nt, Artificial Sequence
  Synthetic
ccacacggaggccuuuuggg

SEQ ID NO: 35504 - RNA, 21 nt, Artificial Sequence
  Synthetic
uccacacggaggccuuuuggg

SEQ ID NO: 35505 - RNA, 22 nt, Artificial Sequence
  Synthetic
cuccacacggaggccuuuuggg

SEQ ID NO: 35506 - RNA, 23 nt, Artificial Sequence
  Synthetic
ccuccacacggaggccuuuuggg

SEQ ID NO: 35507 - RNA, 24 nt, Artificial Sequence
  Synthetic
cccuccacacggaggccuuuuggg

SEQ ID NO: 35508 - RNA, 18 nt, Artificial Sequence
  Synthetic
ugacgcaacccccacugg

SEQ ID NO: 35509 - RNA, 19 nt, Artificial Sequence
  Synthetic
cugacgcaacccccacugg

SEQ ID NO: 35510 - RNA, 20 nt, Artificial Sequence
  Synthetic
gcugacgcaacccccacugg

SEQ ID NO: 35511 - RNA, 21 nt, Artificial Sequence
  Synthetic
ugcugacgcaacccccacugg

SEQ ID NO: 35512 - RNA, 22 nt, Artificial Sequence
  Synthetic
uugcugacgcaacccccacugg

SEQ ID NO: 35513 - RNA, 23 nt, Artificial Sequence
  Synthetic
uuugcugacgcaacccccacugg

SEQ ID NO: 35514 - RNA, 24 nt, Artificial Sequence
  Synthetic
guuugcugacgcaacccccacugg

SEQ ID NO: 35515 - RNA, 18 nt, Artificial Sequence
  Synthetic
uuccugucuuacuuuugg

SEQ ID NO: 35516 - RNA, 19 nt, Artificial Sequence
  Synthetic
uuuccugucuuacuuuugg

SEQ ID NO: 35517 - RNA, 20 nt, Artificial Sequence
  Synthetic
auuuccugucuuacuuuugg

SEQ ID NO: 35518 - RNA, 21 nt, Artificial Sequence
  Synthetic
cauuuccugucuuacuuuugg

SEQ ID NO: 35519 - RNA, 22 nt, Artificial Sequence
  Synthetic
acauuuccugucuuacuuuugg

SEQ ID NO: 35520 - RNA, 23 nt, Artificial Sequence
  Synthetic
cacauuuccugucuuacuuuugg

SEQ ID NO: 35521 - RNA, 24 nt, Artificial Sequence
  Synthetic
ucacauuuccugucuuacuuuugg

SEQ ID NO: 35522 - RNA, 18 nt, Artificial Sequence
  Synthetic
gacccugcaccgaacaug

SEQ ID NO: 35523 - RNA, 19 nt, Artificial Sequence
  Synthetic
ggacccugcaccgaacaug

SEQ ID NO: 35524 - RNA, 20 nt, Artificial Sequence
  Synthetic
gggacccugcaccgaacaug

SEQ ID NO: 35525 - RNA, 21 nt, Artificial Sequence
  Synthetic
ggggacccugcaccgaacaug

SEQ ID NO: 35526 - RNA, 22 nt, Artificial Sequence
  Synthetic
uggggacccugcaccgaacaug

SEQ ID NO: 35527 - RNA, 23 nt, Artificial Sequence
  Synthetic
uuggggacccugcaccgaacaug

SEQ ID NO: 35528 - RNA, 24 nt, Artificial Sequence
  Synthetic
auuggggacccugcaccgaacaug

SEQ ID NO: 35529 - RNA, 18 nt, Artificial Sequence
  Synthetic
cucugccgauccauacug

SEQ ID NO: 35530 - RNA, 19 nt, Artificial Sequence
  Synthetic
ccucugccgauccauacug

SEQ ID NO: 35531 - RNA, 20 nt, Artificial Sequence
  Synthetic
uccucugccgauccauacug

SEQ ID NO: 35532 - RNA, 21 nt, Artificial Sequence
  Synthetic
cuccucugccgauccauacug

SEQ ID NO: 35533 - RNA, 22 nt, Artificial Sequence
  Synthetic
gcuccucugccgauccauacug

SEQ ID NO: 35534 - RNA, 23 nt, Artificial Sequence
  Synthetic
ggcuccucugccgauccauacug

SEQ ID NO: 35535 - RNA, 24 nt, Artificial Sequence
  Synthetic
uggcuccucugccgauccauacug

SEQ ID NO: 35536 - RNA, 18 nt, Artificial Sequence
  Synthetic
ucuguuccuucucaucug

SEQ ID NO: 35537 - RNA, 19 nt, Artificial Sequence
  Synthetic
gucuguuccuucucaucug

SEQ ID NO: 35538 - RNA, 20 nt, Artificial Sequence
  Synthetic
cgucuguuccuucucaucug

SEQ ID NO: 35539 - RNA, 21 nt, Artificial Sequence
  Synthetic
ccgucuguuccuucucaucug

SEQ ID NO: 35540 - RNA, 22 nt, Artificial Sequence
  Synthetic
cccgucuguuccuucucaucug

SEQ ID NO: 35541 - RNA, 23 nt, Artificial Sequence
  Synthetic
ccccgucuguuccuucucaucug

SEQ ID NO: 35542 - RNA, 24 nt, Artificial Sequence
  Synthetic
uccccgucuguuccuucucaucug

SEQ ID NO: 35543 - RNA, 18 nt, Artificial Sequence
  Synthetic
gacggucccucucgagug

SEQ ID NO: 35544 - RNA, 19 nt, Artificial Sequence
  Synthetic
ggacggucccucucgagug

SEQ ID NO: 35545 - RNA, 20 nt, Artificial Sequence
  Synthetic
uggacggucccucucgagug

SEQ ID NO: 35546 - RNA, 21 nt, Artificial Sequence
  Synthetic
uuggacggucccucucgagug

SEQ ID NO: 35547 - RNA, 22 nt, Artificial Sequence
  Synthetic
cuuggacggucccucucgagug

SEQ ID NO: 35548 - RNA, 23 nt, Artificial Sequence
  Synthetic
ucuuggacggucccucucgagug

SEQ ID NO: 35549 - RNA, 24 nt, Artificial Sequence
  Synthetic
uucuuggacggucccucucgagug

SEQ ID NO: 35550 - RNA, 18 nt, Artificial Sequence
  Synthetic
gcagagucuagacucgug

SEQ ID NO: 35551 - RNA, 19 nt, Artificial Sequence
  Synthetic
cgcagagucuagacucgug

SEQ ID NO: 35552 - RNA, 20 nt, Artificial Sequence
  Synthetic
ccgcagagucuagacucgug

SEQ ID NO: 35553 - RNA, 21 nt, Artificial Sequence
  Synthetic
accgcagagucuagacucgug

SEQ ID NO: 35554 - RNA, 22 nt, Artificial Sequence
  Synthetic
uaccgcagagucuagacucgug

SEQ ID NO: 35555 - RNA, 23 nt, Artificial Sequence
  Synthetic
auaccgcagagucuagacucgug

SEQ ID NO: 35556 - RNA, 24 nt, Artificial Sequence
  Synthetic
aauaccgcagagucuagacucgug

SEQ ID NO: 35557 - RNA, 18 nt, Artificial Sequence
  Synthetic
  misc_feature (13)..(13): n is a, c, g, or u
caggcaagcaauncugug

SEQ ID NO: 35558 - RNA, 19 nt, Artificial Sequence
  Synthetic
  misc_feature (14)..(14): n is a, c, g, or u
ucaggcaagcaauncugug

SEQ ID NO: 35559 - RNA, 20 nt, Artificial Sequence
  Synthetic
  misc_feature (15)..(15): n is a, c, g, or u
cucaggcaagcaauncugug

SEQ ID NO: 35560 - RNA, 21 nt, Artificial Sequence
  Synthetic
  misc_feature (16)..(16): n is a, c, g, or u
acucaggcaagcaauncugug

SEQ ID NO: 35561 - RNA, 22 nt, Artificial Sequence
  Synthetic
  misc_feature (17)..(17): n is a, c, g, or u
cacucaggcaagcaauncugug

SEQ ID NO: 35562 - RNA, 23 nt, Artificial Sequence
  Synthetic
  misc_feature (18)..(18): n is a, c, g, or u
gcacucaggcaagcaauncugug

SEQ ID NO: 35563 - RNA, 24 nt, Artificial Sequence
  Synthetic
  misc_feature (19)..(19): n is a, c, g, or u
agcacucaggcaagcaauncugug

SEQ ID NO: 35564 - RNA, 18 nt, Artificial Sequence
  Synthetic
  misc_feature (16)..(16): n is a, c, g, or u
augucaacaaccgggnug

SEQ ID NO: 35565 - RNA, 19 nt, Artificial Sequence
  Synthetic
  misc_feature (17)..(17): n is a, c, g, or u
uaugucaacaaccgggnug

SEQ ID NO: 35566 - RNA, 20 nt, Artificial Sequence
  Synthetic
  misc_feature (18)..(18): n is a, c, g, or u
uuaugucaacaaccgggnug

SEQ ID NO: 35567 - RNA, 21 nt, Artificial Sequence
  Synthetic
  misc_feature (19)..(19): n is a, c, g, or u
guuaugucaacaaccgggnug

SEQ ID NO: 35568 - RNA, 22 nt, Artificial Sequence
  Synthetic
  misc_feature (20)..(20): n is a, c, g, or u
uguuaugucaacaaccgggnug

SEQ ID NO: 35569 - RNA, 23 nt, Artificial Sequence
  Synthetic
  misc_feature (21)..(21): n is a, c, g, or u
uuguuaugucaacaaccgggnug

SEQ ID NO: 35570 - RNA, 24 nt, Artificial Sequence
  Synthetic
  misc_feature (22)..(22): n is a, c, g, or u
uuuguuaugucaacaaccgggnug

SEQ ID NO: 35571 - RNA, 18 nt, Artificial Sequence
  Synthetic
  misc_feature (18)..(18): n is a, c, g, or u
uuaugucaacaaccgggn

SEQ ID NO: 35572 - RNA, 19 nt, Artificial Sequence
  Synthetic
  misc_feature (19)..(19): n is a, c, g, or u
guuaugucaacaaccgggn

SEQ ID NO: 35573 - RNA, 20 nt, Artificial Sequence
  Synthetic
  misc_feature (20)..(20): n is a, c, g, or u
uguuaugucaacaaccgggn

SEQ ID NO: 35574 - RNA, 21 nt, Artificial Sequence
  Synthetic
  misc_feature (21)..(21): n is a, c, g, or u
uuguuaugucaacaaccgggn

SEQ ID NO: 35575 - RNA, 22 nt, Artificial Sequence
  Synthetic
  misc_feature (22)..(22): n is a, c, g, or u
uuuguuaugucaacaaccgggn

SEQ ID NO: 35576 - RNA, 23 nt, Artificial Sequence
  Synthetic
  misc_feature (23)..(23): n is a, c, g, or u
guuuguuaugucaacaaccgggn

SEQ ID NO: 35577 - RNA, 24 nt, Artificial Sequence
  Synthetic
  misc_feature (24)..(24): n is a, c, g, or u
uguuuguuaugucaacaaccgggn

SEQ ID NO: 35578 - RNA, 18 nt, Artificial Sequence
  Synthetic
aagacauuauaacuaaau

SEQ ID NO: 35579 - RNA, 19 nt, Artificial Sequence
  Synthetic
caagacauuauaacuaaau

SEQ ID NO: 35580 - RNA, 20 nt, Artificial Sequence
  Synthetic
ucaagacauuauaacuaaau

SEQ ID NO: 35581 - RNA, 21 nt, Artificial Sequence
  Synthetic
aucaagacauuauaacuaaau

SEQ ID NO: 35582 - RNA, 22 nt, Artificial Sequence
  Synthetic
caucaagacauuauaacuaaau

SEQ ID NO: 35583 - RNA, 23 nt, Artificial Sequence
  Synthetic
gcaucaagacauuauaacuaaau

SEQ ID NO: 35584 - RNA, 24 nt, Artificial Sequence
  Synthetic
ugcaucaagacauuauaacuaaau

SEQ ID NO: 35585 - RNA, 18 nt, Artificial Sequence
  Synthetic
ggcccucucacaguaaau

SEQ ID NO: 35586 - RNA, 19 nt, Artificial Sequence
  Synthetic
gggcccucucacaguaaau

SEQ ID NO: 35587 - RNA, 20 nt, Artificial Sequence
  Synthetic
ugggcccucucacaguaaau

SEQ ID NO: 35588 - RNA, 21 nt, Artificial Sequence
  Synthetic
gugggcccucucacaguaaau

SEQ ID NO: 35589 - RNA, 22 nt, Artificial Sequence
  Synthetic
ugugggcccucucacaguaaau

SEQ ID NO: 35590 - RNA, 23 nt, Artificial Sequence
  Synthetic
uugugggcccucucacaguaaau

SEQ ID NO: 35591 - RNA, 24 nt, Artificial Sequence
  Synthetic
uuugugggcccucucacaguaaau

SEQ ID NO: 35592 - RNA, 18 nt, Artificial Sequence
  Synthetic
uugacccuuauaaagaau

SEQ ID NO: 35593 - RNA, 19 nt, Artificial Sequence
  Synthetic
auugacccuuauaaagaau

SEQ ID NO: 35594 - RNA, 20 nt, Artificial Sequence
  Synthetic
cauugacccuuauaaagaau

SEQ ID NO: 35595 - RNA, 21 nt, Artificial Sequence
  Synthetic
acauugacccuuauaaagaau

SEQ ID NO: 35596 - RNA, 22 nt, Artificial Sequence
  Synthetic
gacauugacccuuauaaagaau

SEQ ID NO: 35597 - RNA, 23 nt, Artificial Sequence
  Synthetic
agacauugacccuuauaaagaau

SEQ ID NO: 35598 - RNA, 24 nt, Artificial Sequence
  Synthetic
uagacauugacccuuauaaagaau

SEQ ID NO: 35599 - RNA, 18 nt, Artificial Sequence
  Synthetic
accuggguggguaauaau

SEQ ID NO: 35600 - RNA, 19 nt, Artificial Sequence
  Synthetic
  misc_feature (1)..(1): n is a, c, g, or u
naccuggguggguaauaau

SEQ ID NO: 35601 - RNA, 20 nt, Artificial Sequence
  Synthetic
  misc_feature (2)..(2): n is a, c, g, or u
cnaccuggguggguaauaau

SEQ ID NO: 35602 - RNA, 21 nt, Artificial Sequence
  Synthetic
  misc_feature (3)..(3): n is a, c, g, or u
gcnaccuggguggguaauaau

SEQ ID NO: 35603 - RNA, 22 nt, Artificial Sequence
  Synthetic
  misc_feature (4)..(4): n is a, c, g, or u
agcnaccuggguggguaauaau

SEQ ID NO: 35604 - RNA, 23 nt, Artificial Sequence
  Synthetic
  misc_feature (5)..(5): n is a, c, g, or u
uagcnaccuggguggguaauaau

SEQ ID NO: 35605 - RNA, 24 nt, Artificial Sequence
  Synthetic
  misc_feature (6)..(6): n is a, c, g, or u
cuagcnaccuggguggguaauaau

SEQ ID NO: 35606 - RNA, 18 nt, Artificial Sequence
  Synthetic
uuuuaugggauauguaau

SEQ ID NO: 35607 - RNA, 19 nt, Artificial Sequence
  Synthetic
auuuuaugggauauguaau

SEQ ID NO: 35608 - RNA, 20 nt, Artificial Sequence
  Synthetic
aauuuuaugggauauguaau

SEQ ID NO: 35609 - RNA, 21 nt, Artificial Sequence
  Synthetic
aaauuuuaugggauauguaau

SEQ ID NO: 35610 - RNA, 22 nt, Artificial Sequence
  Synthetic
uaaauuuuaugggauauguaau

SEQ ID NO: 35611 - RNA, 23 nt, Artificial Sequence
  Synthetic
uuaaauuuuaugggauauguaau

SEQ ID NO: 35612 - RNA, 24 nt, Artificial Sequence
  Synthetic
cuuaaauuuuaugggauauguaau

SEQ ID NO: 35613 - RNA, 18 nt, Artificial Sequence
  Synthetic
gucuggagcaaaacucau

SEQ ID NO: 35614 - RNA, 19 nt, Artificial Sequence
  Synthetic
ggucuggagcaaaacucau

SEQ ID NO: 35615 - RNA, 20 nt, Artificial Sequence
  Synthetic
cggucuggagcaaaacucau

SEQ ID NO: 35616 - RNA, 21 nt, Artificial Sequence
  Synthetic
ccggucuggagcaaaacucau

SEQ ID NO: 35617 - RNA, 22 nt, Artificial Sequence
  Synthetic
gccggucuggagcaaaacucau

SEQ ID NO: 35618 - RNA, 23 nt, Artificial Sequence
  Synthetic
agccggucuggagcaaaacucau

SEQ ID NO: 35619 - RNA, 24 nt, Artificial Sequence
  Synthetic
cagccggucuggagcaaaacucau

SEQ ID NO: 35620 - RNA, 18 nt, Artificial Sequence
  Synthetic
aauaccaacaauccagau

SEQ ID NO: 35621 - RNA, 19 nt, Artificial Sequence
  Synthetic
aaauaccaacaauccagau

SEQ ID NO: 35622 - RNA, 20 nt, Artificial Sequence
  Synthetic
caaauaccaacaauccagau

SEQ ID NO: 35623 - RNA, 21 nt, Artificial Sequence
  Synthetic
gcaaauaccaacaauccagau

SEQ ID NO: 35624 - RNA, 22 nt, Artificial Sequence
  Synthetic
agcaaauaccaacaauccagau

SEQ ID NO: 35625 - RNA, 23 nt, Artificial Sequence
  Synthetic
gagcaaauaccaacaauccagau

SEQ ID NO: 35626 - RNA, 24 nt, Artificial Sequence
  Synthetic
agagcaaauaccaacaauccagau

SEQ ID NO: 35627 - RNA, 18 nt, Artificial Sequence
  Synthetic
gucaaucuucuccaggau

SEQ ID NO: 35628 - RNA, 19 nt, Artificial Sequence
  Synthetic
cgucaaucuucuccaggau

SEQ ID NO: 35629 - RNA, 20 nt, Artificial Sequence
  Synthetic
ucgucaaucuucuccaggau

SEQ ID NO: 35630 - RNA, 21 nt, Artificial Sequence
  Synthetic
cucgucaaucuucuccaggau

SEQ ID NO: 35631 - RNA, 22 nt, Artificial Sequence
  Synthetic
ucucgucaaucuucuccaggau

SEQ ID NO: 35632 - RNA, 23 nt, Artificial Sequence
  Synthetic
aucucgucaaucuucuccaggau

SEQ ID NO: 35633 - RNA, 24 nt, Artificial Sequence
  Synthetic
caucucgucaaucuucuccaggau

SEQ ID NO: 35634 - RNA, 18 nt, Artificial Sequence
  Synthetic
guuaacaggccaauugau

SEQ ID NO: 35635 - RNA, 19 nt, Artificial Sequence
  Synthetic
uguuaacaggccaauugau

SEQ ID NO: 35636 - RNA, 20 nt, Artificial Sequence
  Synthetic
cuguuaacaggccaauugau

SEQ ID NO: 35637 - RNA, 21 nt, Artificial Sequence
  Synthetic
ccuguuaacaggccaauugau

SEQ ID NO: 35638 - RNA, 22 nt, Artificial Sequence
  Synthetic
cccuguuaacaggccaauugau

SEQ ID NO: 35639 - RNA, 23 nt, Artificial Sequence
  Synthetic
ucccuguuaacaggccaauugau

SEQ ID NO: 35640 - RNA, 24 nt, Artificial Sequence
  Synthetic
cucccuguuaacaggccaauugau

SEQ ID NO: 35641 - RNA, 18 nt, Artificial Sequence
  Synthetic
aaggcggguauucuauau

SEQ ID NO: 35642 - RNA, 19 nt, Artificial Sequence
  Synthetic
gaaggcggguauucuauau

SEQ ID NO: 35643 - RNA, 20 nt, Artificial Sequence
  Synthetic
ggaaggcggguauucuauau

SEQ ID NO: 35644 - RNA, 21 nt, Artificial Sequence
  Synthetic
uggaaggcggguauucuauau

SEQ ID NO: 35645 - RNA, 22 nt, Artificial Sequence
  Synthetic
uuggaaggcggguauucuauau

SEQ ID NO: 35646 - RNA, 23 nt, Artificial Sequence
  Synthetic
uuuggaaggcggguauucuauau

SEQ ID NO: 35647 - RNA, 24 nt, Artificial Sequence
  Synthetic
cuuuggaaggcggguauucuauau

SEQ ID NO: 35648 - RNA, 18 nt, Artificial Sequence
  Synthetic
  misc_feature (8)..(8): n is a, c, g, or u
cugccaangcaguuauau

SEQ ID NO: 35649 - RNA, 19 nt, Artificial Sequence
  Synthetic
  misc_feature (9)..(9): n is a, c, g, or u
ucugccaangcaguuauau

SEQ ID NO: 35650 - RNA, 20 nt, Artificial Sequence
  Synthetic
  misc_feature (10)..(10): n is a, c, g, or u
aucugccaangcaguuauau

SEQ ID NO: 35651 - RNA, 21 nt, Artificial Sequence
  Synthetic
  misc_feature (11)..(11): n is a, c, g, or u
caucugccaangcaguuauau

SEQ ID NO: 35652 - RNA, 22 nt, Artificial Sequence
  Synthetic
  misc_feature (12)..(12): n is a, c, g, or u
ucaucugccaangcaguuauau

SEQ ID NO: 35653 - RNA, 23 nt, Artificial Sequence
  Synthetic
  misc_feature (13)..(13): n is a, c, g, or u
aucaucugccaangcaguuauau

SEQ ID NO: 35654 - RNA, 24 nt, Artificial Sequence
  Synthetic
  misc_feature (14)..(14): n is a, c, g, or u
caucaucugccaangcaguuauau

SEQ ID NO: 35655 - RNA, 18 nt, Artificial Sequence
  Synthetic
  misc_feature (5)..(5): n is a, c, g, or u
auaungaugaugugguau

SEQ ID NO: 35656 - RNA, 19 nt, Artificial Sequence
  Synthetic
  misc_feature (6)..(6): n is a, c, g, or u
uauaungaugaugugguau

SEQ ID NO: 35657 - RNA, 20 nt, Artificial Sequence
  Synthetic
  misc_feature (7)..(7): n is a, c, g, or u
cuauaungaugaugugguau

SEQ ID NO: 35658 - RNA, 21 nt, Artificial Sequence
  Synthetic
  misc_feature (8)..(8): n is a, c, g, or u
gcuauaungaugaugugguau

SEQ ID NO: 35659 - RNA, 22 nt, Artificial Sequence
  Synthetic
  misc_feature (9)..(9): n is a, c, g, or u
agcuauaungaugaugugguau

SEQ ID NO: 35660 - RNA, 23 nt, Artificial Sequence
  Synthetic
  misc_feature (10)..(10): n is a, c, g, or u
cagcuauaungaugaugugguau

SEQ ID NO: 35661 - RNA, 24 nt, Artificial Sequence
  Synthetic
  misc_feature (11)..(11): n is a, c, g, or u
ucagcuauaungaugaugugguau

SEQ ID NO: 35662 - RNA, 18 nt, Artificial Sequence
  Synthetic
gguuaaugaccuuuguau

SEQ ID NO: 35663 - RNA, 19 nt, Artificial Sequence
  Synthetic
agguuaaugaccuuuguau

SEQ ID NO: 35664 - RNA, 20 nt, Artificial Sequence
  Synthetic
cagguuaaugaccuuuguau

SEQ ID NO: 35665 - RNA, 21 nt, Artificial Sequence
  Synthetic
ccagguuaaugaccuuuguau

SEQ ID NO: 35666 - RNA, 22 nt, Artificial Sequence
  Synthetic
uccagguuaaugaccuuuguau

SEQ ID NO: 35667 - RNA, 23 nt, Artificial Sequence
  Synthetic
guccagguuaaugaccuuuguau

SEQ ID NO: 35668 - RNA, 24 nt, Artificial Sequence
  Synthetic
aguccagguuaaugaccuuuguau

SEQ ID NO: 35669 - RNA, 18 nt, Artificial Sequence
  Synthetic
ucccaucucuccaccacu

SEQ ID NO: 35670 - RNA, 19 nt, Artificial Sequence
  Synthetic
cucccaucucuccaccacu

SEQ ID NO: 35671 - RNA, 20 nt, Artificial Sequence
  Synthetic
acucccaucucuccaccacu

SEQ ID NO: 35672 - RNA, 21 nt, Artificial Sequence
  Synthetic
uacucccaucucuccaccacu

SEQ ID NO: 35673 - RNA, 22 nt, Artificial Sequence
  Synthetic
cuacucccaucucuccaccacu

SEQ ID NO: 35674 - RNA, 23 nt, Artificial Sequence
  Synthetic
ccuacucccaucucuccaccacu

SEQ ID NO: 35675 - RNA, 24 nt, Artificial Sequence
  Synthetic
gccuacucccaucucuccaccacu

SEQ ID NO: 35676 - RNA, 18 nt, Artificial Sequence
  Synthetic
ccucugccgauccauacu

SEQ ID NO: 35677 - RNA, 19 nt, Artificial Sequence
  Synthetic
uccucugccgauccauacu

SEQ ID NO: 35678 - RNA, 20 nt, Artificial Sequence
  Synthetic
cuccucugccgauccauacu

SEQ ID NO: 35679 - RNA, 21 nt, Artificial Sequence
  Synthetic
gcuccucugccgauccauacu

SEQ ID NO: 35680 - RNA, 22 nt, Artificial Sequence
  Synthetic
ggcuccucugccgauccauacu

SEQ ID NO: 35681 - RNA, 23 nt, Artificial Sequence
  Synthetic
uggcuccucugccgauccauacu

SEQ ID NO: 35682 - RNA, 24 nt, Artificial Sequence
  Synthetic
guggcuccucugccgauccauacu

SEQ ID NO: 35683 - RNA, 18 nt, Artificial Sequence
  Synthetic
ugugggucaccauauacu

SEQ ID NO: 35684 - RNA, 19 nt, Artificial Sequence
  Synthetic
uugugggucaccauauacu

SEQ ID NO: 35685 - RNA, 20 nt, Artificial Sequence
  Synthetic
uuugugggucaccauauacu

SEQ ID NO: 35686 - RNA, 21 nt, Artificial Sequence
  Synthetic
uuuugugggucaccauauacu

SEQ ID NO: 35687 - RNA, 22 nt, Artificial Sequence
  Synthetic
auuuugugggucaccauauacu

SEQ ID NO: 35688 - RNA, 23 nt, Artificial Sequence
  Synthetic
cauuuugugggucaccauauacu

SEQ ID NO: 35689 - RNA, 24 nt, Artificial Sequence
  Synthetic
ucauuuugugggucaccauauacu

SEQ ID NO: 35690 - RNA, 18 nt, Artificial Sequence
  Synthetic
aaagaauuuggagcuacu

SEQ ID NO: 35691 - RNA, 19 nt, Artificial Sequence
  Synthetic
uaaagaauuuggagcuacu

SEQ ID NO: 35692 - RNA, 20 nt, Artificial Sequence
  Synthetic
auaaagaauuuggagcuacu

SEQ ID NO: 35693 - RNA, 21 nt, Artificial Sequence
  Synthetic
uauaaagaauuuggagcuacu

SEQ ID NO: 35694 - RNA, 22 nt, Artificial Sequence
  Synthetic
uuauaaagaauuuggagcuacu

SEQ ID NO: 35695 - RNA, 23 nt, Artificial Sequence
  Synthetic
cuuauaaagaauuuggagcuacu

SEQ ID NO: 35696 - RNA, 24 nt, Artificial Sequence
  Synthetic
ccuuauaaagaauuuggagcuacu

SEQ ID NO: 35697 - RNA, 18 nt, Artificial Sequence
  Synthetic
uguugcuguacaaaaccu

SEQ ID NO: 35698 - RNA, 19 nt, Artificial Sequence
  Synthetic
auguugcuguacaaaaccu

SEQ ID NO: 35699 - RNA, 20 nt, Artificial Sequence
  Synthetic
cauguugcuguacaaaaccu

SEQ ID NO: 35700 - RNA, 21 nt, Artificial Sequence
  Synthetic
ucauguugcuguacaaaaccu

SEQ ID NO: 35701 - RNA, 22 nt, Artificial Sequence
  Synthetic
cucauguugcuguacaaaaccu

SEQ ID NO: 35702 - RNA, 23 nt, Artificial Sequence
  Synthetic
ccucauguugcuguacaaaaccu

SEQ ID NO: 35703 - RNA, 24 nt, Artificial Sequence
  Synthetic
cccucauguugcuguacaaaaccu

SEQ ID NO: 35704 - RNA, 18 nt, Artificial Sequence
  Synthetic
ggcuuucgcaaaauaccu

SEQ ID NO: 35705 - RNA, 19 nt, Artificial Sequence
  Synthetic
gggcuuucgcaaaauaccu

SEQ ID NO: 35706 - RNA, 20 nt, Artificial Sequence
  Synthetic
ugggcuuucgcaaaauaccu

SEQ ID NO: 35707 - RNA, 21 nt, Artificial Sequence
  Synthetic
uugggcuuucgcaaaauaccu

SEQ ID NO: 35708 - RNA, 22 nt, Artificial Sequence
  Synthetic
cuugggcuuucgcaaaauaccu

SEQ ID NO: 35709 - RNA, 23 nt, Artificial Sequence
  Synthetic
ucuugggcuuucgcaaaauaccu

SEQ ID NO: 35710 - RNA, 24 nt, Artificial Sequence
  Synthetic
aucuugggcuuucgcaaaauaccu

SEQ ID NO: 35711 - RNA, 18 nt, Artificial Sequence
  Synthetic
acauuauuuacauacccu

SEQ ID NO: 35712 - RNA, 19 nt, Artificial Sequence
  Synthetic
gacauuauuuacauacccu

SEQ ID NO: 35713 - RNA, 20 nt, Artificial Sequence
  Synthetic
agacauuauuuacauacccu

SEQ ID NO: 35714 - RNA, 21 nt, Artificial Sequence
  Synthetic
cagacauuauuuacauacccu

SEQ ID NO: 35715 - RNA, 22 nt, Artificial Sequence
  Synthetic
ccagacauuauuuacauacccu

SEQ ID NO: 35716 - RNA, 23 nt, Artificial Sequence
  Synthetic
accagacauuauuuacauacccu

SEQ ID NO: 35717 - RNA, 24 nt, Artificial Sequence
  Synthetic
gaccagacauuauuuacauacccu

SEQ ID NO: 35718 - RNA, 18 nt, Artificial Sequence
  Synthetic
agguaggaguuggagccu

SEQ ID NO: 35719 - RNA, 19 nt, Artificial Sequence
  Synthetic
aagguaggaguuggagccu

SEQ ID NO: 35720 - RNA, 20 nt, Artificial Sequence
  Synthetic
caagguaggaguuggagccu

SEQ ID NO: 35721 - RNA, 21 nt, Artificial Sequence
  Synthetic
acaagguaggaguuggagccu

SEQ ID NO: 35722 - RNA, 22 nt, Artificial Sequence
  Synthetic
aacaagguaggaguuggagccu

SEQ ID NO: 35723 - RNA, 23 nt, Artificial Sequence
  Synthetic
caacaagguaggaguuggagccu

SEQ ID NO: 35724 - RNA, 24 nt, Artificial Sequence
  Synthetic
ccaacaagguaggaguuggagccu

SEQ ID NO: 35725 - RNA, 18 nt, Artificial Sequence
  Synthetic
ggguggagcccucagucu

SEQ ID NO: 35726 - RNA, 19 nt, Artificial Sequence
  Synthetic
gggguggagcccucagucu

SEQ ID NO: 35727 - RNA, 20 nt, Artificial Sequence
  Synthetic
ugggguggagcccucagucu

SEQ ID NO: 35728 - RNA, 21 nt, Artificial Sequence
  Synthetic
uugggguggagcccucagucu

SEQ ID NO: 35729 - RNA, 22 nt, Artificial Sequence
  Synthetic
uuugggguggagcccucagucu

SEQ ID NO: 35730 - RNA, 23 nt, Artificial Sequence
  Synthetic
uuuugggguggagcccucagucu

SEQ ID NO: 35731 - RNA, 24 nt, Artificial Sequence
  Synthetic
cuuuugggguggagcccucagucu

SEQ ID NO: 35732 - RNA, 18 nt, Artificial Sequence
  Synthetic
aauucugucguccuuucu

SEQ ID NO: 35733 - RNA, 19 nt, Artificial Sequence
  Synthetic
caauucugucguccuuucu

SEQ ID NO: 35734 - RNA, 20 nt, Artificial Sequence
  Synthetic
acaauucugucguccuuucu

SEQ ID NO: 35735 - RNA, 21 nt, Artificial Sequence
  Synthetic
gacaauucugucguccuuucu

SEQ ID NO: 35736 - RNA, 22 nt, Artificial Sequence
  Synthetic
ugacaauucugucguccuuucu

SEQ ID NO: 35737 - RNA, 23 nt, Artificial Sequence
  Synthetic
cugacaauucugucguccuuucu

SEQ ID NO: 35738 - RNA, 24 nt, Artificial Sequence
  Synthetic
acugacaauucugucguccuuucu

SEQ ID NO: 35739 - RNA, 18 nt, Artificial Sequence
  Synthetic
gacuucucucaauuuucu

SEQ ID NO: 35740 - RNA, 19 nt, Artificial Sequence
  Synthetic
ggacuucucucaauuuucu

SEQ ID NO: 35741 - RNA, 20 nt, Artificial Sequence
  Synthetic
uggacuucucucaauuuucu

SEQ ID NO: 35742 - RNA, 21 nt, Artificial Sequence
  Synthetic
guggacuucucucaauuuucu

SEQ ID NO: 35743 - RNA, 22 nt, Artificial Sequence
  Synthetic
gguggacuucucucaauuuucu

SEQ ID NO: 35744 - RNA, 23 nt, Artificial Sequence
  Synthetic
ugguggacuucucucaauuuucu

SEQ ID NO: 35745 - RNA, 24 nt, Artificial Sequence
  Synthetic
gugguggacuucucucaauuuucu

SEQ ID NO: 35746 - RNA, 18 nt, Artificial Sequence
  Synthetic
ucuacaaaaucccaaagu

SEQ ID NO: 35747 - RNA, 19 nt, Artificial Sequence
  Synthetic
cucuacaaaaucccaaagu

SEQ ID NO: 35748 - RNA, 20 nt, Artificial Sequence
  Synthetic
gcucuacaaaaucccaaagu

SEQ ID NO: 35749 - RNA, 21 nt, Artificial Sequence
  Synthetic
agcucuacaaaaucccaaagu

SEQ ID NO: 35750 - RNA, 22 nt, Artificial Sequence
  Synthetic
aagcucuacaaaaucccaaagu

SEQ ID NO: 35751 - RNA, 23 nt, Artificial Sequence
  Synthetic
caagcucuacaaaaucccaaagu

SEQ ID NO: 35752 - RNA, 24 nt, Artificial Sequence
  Synthetic
ccaagcucuacaaaaucccaaagu

SEQ ID NO: 35753 - RNA, 18 nt, Artificial Sequence
  Synthetic
ggauccucgaccaccagu

SEQ ID NO: 35754 - RNA, 19 nt, Artificial Sequence
  Synthetic
aggauccucgaccaccagu

SEQ ID NO: 35755 - RNA, 20 nt, Artificial Sequence
  Synthetic
caggauccucgaccaccagu

SEQ ID NO: 35756 - RNA, 21 nt, Artificial Sequence
  Synthetic
ccaggauccucgaccaccagu

SEQ ID NO: 35757 - RNA, 22 nt, Artificial Sequence
  Synthetic
uccaggauccucgaccaccagu

SEQ ID NO: 35758 - RNA, 23 nt, Artificial Sequence
  Synthetic
uuccaggauccucgaccaccagu

SEQ ID NO: 35759 - RNA, 24 nt, Artificial Sequence
  Synthetic
auuccaggauccucgaccaccagu

SEQ ID NO: 35760 - RNA, 18 nt, Artificial Sequence
  Synthetic
ccuccaccaaucgucagu

SEQ ID NO: 35761 - RNA, 19 nt, Artificial Sequence
  Synthetic
gccuccaccaaucgucagu

SEQ ID NO: 35762 - RNA, 20 nt, Artificial Sequence
  Synthetic
ugccuccaccaaucgucagu

SEQ ID NO: 35763 - RNA, 21 nt, Artificial Sequence
  Synthetic
cugccuccaccaaucgucagu

SEQ ID NO: 35764 - RNA, 22 nt, Artificial Sequence
  Synthetic
ccugccuccaccaaucgucagu

SEQ ID NO: 35765 - RNA, 23 nt, Artificial Sequence
  Synthetic
uccugccuccaccaaucgucagu

SEQ ID NO: 35766 - RNA, 24 nt, Artificial Sequence
  Synthetic
cuccugccuccaccaaucgucagu

SEQ ID NO: 35767 - RNA, 18 nt, Artificial Sequence
  Synthetic
ggacggucccucucgagu

SEQ ID NO: 35768 - RNA, 19 nt, Artificial Sequence
  Synthetic
uggacggucccucucgagu

SEQ ID NO: 35769 - RNA, 20 nt, Artificial Sequence
  Synthetic
uuggacggucccucucgagu

SEQ ID NO: 35770 - RNA, 21 nt, Artificial Sequence
  Synthetic
cuuggacggucccucucgagu

SEQ ID NO: 35771 - RNA, 22 nt, Artificial Sequence
  Synthetic
ucuuggacggucccucucgagu

SEQ ID NO: 35772 - RNA, 23 nt, Artificial Sequence
  Synthetic
uucuuggacggucccucucgagu

SEQ ID NO: 35773 - RNA, 24 nt, Artificial Sequence
  Synthetic
uuucuuggacggucccucucgagu

SEQ ID NO: 35774 - RNA, 18 nt, Artificial Sequence
  Synthetic
ggccaacaagguaggagu

SEQ ID NO: 35775 - RNA, 19 nt, Artificial Sequence
  Synthetic
aggccaacaagguaggagu

SEQ ID NO: 35776 - RNA, 20 nt, Artificial Sequence
  Synthetic
gaggccaacaagguaggagu

SEQ ID NO: 35777 - RNA, 21 nt, Artificial Sequence
  Synthetic
agaggccaacaagguaggagu

SEQ ID NO: 35778 - RNA, 22 nt, Artificial Sequence
  Synthetic
cagaggccaacaagguaggagu

SEQ ID NO: 35779 - RNA, 23 nt, Artificial Sequence
  Synthetic
ccagaggccaacaagguaggagu

SEQ ID NO: 35780 - RNA, 24 nt, Artificial Sequence
  Synthetic
gccagaggccaacaagguaggagu

SEQ ID NO: 35781 - RNA, 18 nt, Artificial Sequence
  Synthetic
acuguguuuuugcugagu

SEQ ID NO: 35782 - RNA, 19 nt, Artificial Sequence
  Synthetic
gacuguguuuuugcugagu

SEQ ID NO: 35783 - RNA, 20 nt, Artificial Sequence
  Synthetic
ggacuguguuuuugcugagu

SEQ ID NO: 35784 - RNA, 21 nt, Artificial Sequence
  Synthetic
aggacuguguuuuugcugagu

SEQ ID NO: 35785 - RNA, 22 nt, Artificial Sequence
  Synthetic
aaggacuguguuuuugcugagu

SEQ ID NO: 35786 - RNA, 23 nt, Artificial Sequence
  Synthetic
caaggacuguguuuuugcugagu

SEQ ID NO: 35787 - RNA, 24 nt, Artificial Sequence
  Synthetic
ucaaggacuguguuuuugcugagu

SEQ ID NO: 35788 - RNA, 18 nt, Artificial Sequence
  Synthetic
gaccccucccggggccgu

SEQ ID NO: 35789 - RNA, 19 nt, Artificial Sequence
  Synthetic
cgaccccucccggggccgu

SEQ ID NO: 35790 - RNA, 20 nt, Artificial Sequence
  Synthetic
acgaccccucccggggccgu

SEQ ID NO: 35791 - RNA, 21 nt, Artificial Sequence
  Synthetic
gacgaccccucccggggccgu

SEQ ID NO: 35792 - RNA, 22 nt, Artificial Sequence
  Synthetic
ggacgaccccucccggggccgu

SEQ ID NO: 35793 - RNA, 23 nt, Artificial Sequence
  Synthetic
cggacgaccccucccggggccgu

SEQ ID NO: 35794 - RNA, 24 nt, Artificial Sequence
  Synthetic
gcggacgaccccucccggggccgu

SEQ ID NO: 35795 - RNA, 18 nt, Artificial Sequence
  Synthetic
uccuuggacucacaaggu

SEQ ID NO: 35796 - RNA, 19 nt, Artificial Sequence
  Synthetic
uuccuuggacucacaaggu

SEQ ID NO: 35797 - RNA, 20 nt, Artificial Sequence
  Synthetic
auuccuuggacucacaaggu

SEQ ID NO: 35798 - RNA, 21 nt, Artificial Sequence
  Synthetic
uauuccuuggacucacaaggu

SEQ ID NO: 35799 - RNA, 22 nt, Artificial Sequence
  Synthetic
guauuccuuggacucacaaggu

SEQ ID NO: 35800 - RNA, 23 nt, Artificial Sequence
  Synthetic
aguauuccuuggacucacaaggu

SEQ ID NO: 35801 - RNA, 24 nt, Artificial Sequence
  Synthetic
uaguauuccuuggacucacaaggu

SEQ ID NO: 35802 - RNA, 18 nt, Artificial Sequence
  Synthetic
guuuugcucgcagccggu

SEQ ID NO: 35803 - RNA, 19 nt, Artificial Sequence
  Synthetic
uguuuugcucgcagccggu

SEQ ID NO: 35804 - RNA, 20 nt, Artificial Sequence
  Synthetic
uuguuuugcucgcagccggu

SEQ ID NO: 35805 - RNA, 21 nt, Artificial Sequence
  Synthetic
cuuguuuugcucgcagccggu

SEQ ID NO: 35806 - RNA, 22 nt, Artificial Sequence
  Synthetic
gcuuguuuugcucgcagccggu

SEQ ID NO: 35807 - RNA, 23 nt, Artificial Sequence
  Synthetic
ugcuuguuuugcucgcagccggu

SEQ ID NO: 35808 - RNA, 24 nt, Artificial Sequence
  Synthetic
cugcuuguuuugcucgcagccggu

SEQ ID NO: 35809 - RNA, 18 nt, Artificial Sequence
  Synthetic
gacgcaacccccacuggu

SEQ ID NO: 35810 - RNA, 19 nt, Artificial Sequence
  Synthetic
ugacgcaacccccacuggu

SEQ ID NO: 35811 - RNA, 20 nt, Artificial Sequence
  Synthetic
cugacgcaacccccacuggu

SEQ ID NO: 35812 - RNA, 21 nt, Artificial Sequence
  Synthetic
gcugacgcaacccccacuggu

SEQ ID NO: 35813 - RNA, 22 nt, Artificial Sequence
  Synthetic
ugcugacgcaacccccacuggu

SEQ ID NO: 35814 - RNA, 23 nt, Artificial Sequence
  Synthetic
uugcugacgcaacccccacuggu

SEQ ID NO: 35815 - RNA, 24 nt, Artificial Sequence
  Synthetic
uuugcugacgcaacccccacuggu

SEQ ID NO: 35816 - RNA, 18 nt, Artificial Sequence
  Synthetic
ugacccuuauaaagaauu

SEQ ID NO: 35817 - RNA, 19 nt, Artificial Sequence
  Synthetic
uugacccuuauaaagaauu

SEQ ID NO: 35818 - RNA, 20 nt, Artificial Sequence
  Synthetic
auugacccuuauaaagaauu

SEQ ID NO: 35819 - RNA, 21 nt, Artificial Sequence
  Synthetic
cauugacccuuauaaagaauu

SEQ ID NO: 35820 - RNA, 22 nt, Artificial Sequence
  Synthetic
acauugacccuuauaaagaauu

SEQ ID NO: 35821 - RNA, 23 nt, Artificial Sequence
  Synthetic
gacauugacccuuauaaagaauu

SEQ ID NO: 35822 - RNA, 24 nt, Artificial Sequence
  Synthetic
agacauugacccuuauaaagaauu

SEQ ID NO: 35823 - RNA, 18 nt, Artificial Sequence
  Synthetic
ccuggguggguaauaauu

SEQ ID NO: 35824 - RNA, 19 nt, Artificial Sequence
  Synthetic
accuggguggguaauaauu

SEQ ID NO: 35825 - RNA, 20 nt, Artificial Sequence
  Synthetic
  misc_feature (1)..(1): n is a, c, g, or u
naccuggguggguaauaauu

SEQ ID NO: 35826 - RNA, 21 nt, Artificial Sequence
  Synthetic
  misc_feature (2)..(2): n is a, c, g, or u
cnaccuggguggguaauaauu

SEQ ID NO: 35827 - RNA, 22 nt, Artificial Sequence
  Synthetic
  misc_feature (3)..(3): n is a, c, g, or u
gcnaccuggguggguaauaauu

SEQ ID NO: 35828 - RNA, 23 nt, Artificial Sequence
  Synthetic
  misc_feature (4)..(4): n is a, c, g, or u
agcnaccuggguggguaauaauu

SEQ ID NO: 35829 - RNA, 24 nt, Artificial Sequence
  Synthetic
  misc_feature (5)..(5): n is a, c, g, or u
uagcnaccuggguggguaauaauu

SEQ ID NO: 35830 - RNA, 18 nt, Artificial Sequence
  Synthetic
ccaguuggacccagcauu

SEQ ID NO: 35831 - RNA, 19 nt, Artificial Sequence
  Synthetic
accaguuggacccagcauu

SEQ ID NO: 35832 - RNA, 20 nt, Artificial Sequence
  Synthetic
caccaguuggacccagcauu

SEQ ID NO: 35833 - RNA, 21 nt, Artificial Sequence
  Synthetic
ucaccaguuggacccagcauu

SEQ ID NO: 35834 - RNA, 22 nt, Artificial Sequence
  Synthetic
aucaccaguuggacccagcauu

SEQ ID NO: 35835 - RNA, 23 nt, Artificial Sequence
  Synthetic
gaucaccaguuggacccagcauu

SEQ ID NO: 35836 - RNA, 24 nt, Artificial Sequence
  Synthetic
cgaucaccaguuggacccagcauu

SEQ ID NO: 35837 - RNA, 18 nt, Artificial Sequence
  Synthetic
ucaaucuucuccaggauu

SEQ ID NO: 35838 - RNA, 19 nt, Artificial Sequence
  Synthetic
gucaaucuucuccaggauu

SEQ ID NO: 35839 - RNA, 20 nt, Artificial Sequence
  Synthetic
cgucaaucuucuccaggauu

SEQ ID NO: 35840 - RNA, 21 nt, Artificial Sequence
  Synthetic
ucgucaaucuucuccaggauu

SEQ ID NO: 35841 - RNA, 22 nt, Artificial Sequence
  Synthetic
cucgucaaucuucuccaggauu

SEQ ID NO: 35842 - RNA, 23 nt, Artificial Sequence
  Synthetic
ucucgucaaucuucuccaggauu

SEQ ID NO: 35843 - RNA, 24 nt, Artificial Sequence
  Synthetic
aucucgucaaucuucuccaggauu

SEQ ID NO: 35844 - RNA, 18 nt, Artificial Sequence
  Synthetic
  misc_feature (4)..(4): n is a, c, g, or u
uaungaugaugugguauu

SEQ ID NO: 35845 - RNA, 19 nt, Artificial Sequence
  Synthetic
  misc_feature (5)..(5): n is a, c, g, or u
auaungaugaugugguauu

SEQ ID NO: 35846 - RNA, 20 nt, Artificial Sequence
  Synthetic
  misc_feature (6)..(6): n is a, c, g, or u
uauaungaugaugugguauu

SEQ ID NO: 35847 - RNA, 21 nt, Artificial Sequence
  Synthetic
  misc_feature (7)..(7): n is a, c, g, or u
cuauaungaugaugugguauu

SEQ ID NO: 35848 - RNA, 22 nt, Artificial Sequence
  Synthetic
  misc_feature (8)..(8): n is a, c, g, or u
gcuauaungaugaugugguauu

SEQ ID NO: 35849 - RNA, 23 nt, Artificial Sequence
  Synthetic
  misc_feature (9)..(9): n is a, c, g, or u
agcuauaungaugaugugguauu

SEQ ID NO: 35850 - RNA, 24 nt, Artificial Sequence
  Synthetic
  misc_feature (10)..(10): n is a, c, g, or u
cagcuauaungaugaugugguauu

SEQ ID NO: 35851 - RNA, 18 nt, Artificial Sequence
  Synthetic
guuaaugaccuuuguauu

SEQ ID NO: 35852 - RNA, 19 nt, Artificial Sequence
  Synthetic
gguuaaugaccuuuguauu

SEQ ID NO: 35853 - RNA, 20 nt, Artificial Sequence
  Synthetic
agguuaaugaccuuuguauu

SEQ ID NO: 35854 - RNA, 21 nt, Artificial Sequence
  Synthetic
cagguuaaugaccuuuguauu

SEQ ID NO: 35855 - RNA, 22 nt, Artificial Sequence
  Synthetic
ccagguuaaugaccuuuguauu

SEQ ID NO: 35856 - RNA, 23 nt, Artificial Sequence
  Synthetic
uccagguuaaugaccuuuguauu

SEQ ID NO: 35857 - RNA, 24 nt, Artificial Sequence
  Synthetic
guccagguuaaugaccuuuguauu

SEQ ID NO: 35858 - RNA, 18 nt, Artificial Sequence
  Synthetic
ccuauccuaucaacacuu

SEQ ID NO: 35859 - RNA, 19 nt, Artificial Sequence
  Synthetic
cccuauccuaucaacacuu

SEQ ID NO: 35860 - RNA, 20 nt, Artificial Sequence
  Synthetic
ccccuauccuaucaacacuu

SEQ ID NO: 35861 - RNA, 21 nt, Artificial Sequence
  Synthetic
gccccuauccuaucaacacuu

SEQ ID NO: 35862 - RNA, 22 nt, Artificial Sequence
  Synthetic
ugccccuauccuaucaacacuu

SEQ ID NO: 35863 - RNA, 23 nt, Artificial Sequence
  Synthetic
augccccuauccuaucaacacuu

SEQ ID NO: 35864 - RNA, 24 nt, Artificial Sequence
  Synthetic
aaugccccuauccuaucaacacuu

SEQ ID NO: 35865 - RNA, 18 nt, Artificial Sequence
  Synthetic
gugggucaccauauacuu

SEQ ID NO: 35866 - RNA, 19 nt, Artificial Sequence
  Synthetic
ugugggucaccauauacuu

SEQ ID NO: 35867 - RNA, 20 nt, Artificial Sequence
  Synthetic
uugugggucaccauauacuu

SEQ ID NO: 35868 - RNA, 21 nt, Artificial Sequence
  Synthetic
uuugugggucaccauauacuu

SEQ ID NO: 35869 - RNA, 22 nt, Artificial Sequence
  Synthetic
uuuugugggucaccauauacuu

SEQ ID NO: 35870 - RNA, 23 nt, Artificial Sequence
  Synthetic
auuuugugggucaccauauacuu

SEQ ID NO: 35871 - RNA, 24 nt, Artificial Sequence
  Synthetic
cauuuugugggucaccauauacuu

SEQ ID NO: 35872 - RNA, 18 nt, Artificial Sequence
  Synthetic
acauuuccugucuuacuu

SEQ ID NO: 35873 - RNA, 19 nt, Artificial Sequence
  Synthetic
cacauuuccugucuuacuu

SEQ ID NO: 35874 - RNA, 20 nt, Artificial Sequence
  Synthetic
ucacauuuccugucuuacuu

SEQ ID NO: 35875 - RNA, 21 nt, Artificial Sequence
  Synthetic
uucacauuuccugucuuacuu

SEQ ID NO: 35876 - RNA, 22 nt, Artificial Sequence
  Synthetic
uuucacauuuccugucuuacuu

SEQ ID NO: 35877 - RNA, 23 nt, Artificial Sequence
  Synthetic
guuucacauuuccugucuuacuu

SEQ ID NO: 35878 - RNA, 24 nt, Artificial Sequence
  Synthetic
gguuucacauuuccugucuuacuu

SEQ ID NO: 35879 - RNA, 18 nt, Artificial Sequence
  Synthetic
cauuauuuacauacccuu

SEQ ID NO: 35880 - RNA, 19 nt, Artificial Sequence
  Synthetic
acauuauuuacauacccuu

SEQ ID NO: 35881 - RNA, 20 nt, Artificial Sequence
  Synthetic
gacauuauuuacauacccuu

SEQ ID NO: 35882 - RNA, 21 nt, Artificial Sequence
  Synthetic
agacauuauuuacauacccuu

SEQ ID NO: 35883 - RNA, 22 nt, Artificial Sequence
  Synthetic
cagacauuauuuacauacccuu

SEQ ID NO: 35884 - RNA, 23 nt, Artificial Sequence
  Synthetic
ccagacauuauuuacauacccuu

SEQ ID NO: 35885 - RNA, 24 nt, Artificial Sequence
  Synthetic
accagacauuauuuacauacccuu

SEQ ID NO: 35886 - RNA, 18 nt, Artificial Sequence
  Synthetic
ccuccacacggaggccuu

SEQ ID NO: 35887 - RNA, 19 nt, Artificial Sequence
  Synthetic
cccuccacacggaggccuu

SEQ ID NO: 35888 - RNA, 20 nt, Artificial Sequence
  Synthetic
ccccuccacacggaggccuu

SEQ ID NO: 35889 - RNA, 21 nt, Artificial Sequence
  Synthetic
accccuccacacggaggccuu

SEQ ID NO: 35890 - RNA, 22 nt, Artificial Sequence
  Synthetic
caccccuccacacggaggccuu

SEQ ID NO: 35891 - RNA, 23 nt, Artificial Sequence
  Synthetic
ucaccccuccacacggaggccuu

SEQ ID NO: 35892 - RNA, 24 nt, Artificial Sequence
  Synthetic
uucaccccuccacacggaggccuu

SEQ ID NO: 35893 - RNA, 18 nt, Artificial Sequence
  Synthetic
cugugccuuggguggcuu

SEQ ID NO: 35894 - RNA, 19 nt, Artificial Sequence
  Synthetic
gcugugccuuggguggcuu

SEQ ID NO: 35895 - RNA, 20 nt, Artificial Sequence
  Synthetic
agcugugccuuggguggcuu

SEQ ID NO: 35896 - RNA, 21 nt, Artificial Sequence
  Synthetic
aagcugugccuuggguggcuu

SEQ ID NO: 35897 - RNA, 22 nt, Artificial Sequence
  Synthetic
caagcugugccuuggguggcuu

SEQ ID NO: 35898 - RNA, 23 nt, Artificial Sequence
  Synthetic
ccaagcugugccuuggguggcuu

SEQ ID NO: 35899 - RNA, 24 nt, Artificial Sequence
  Synthetic
uccaagcugugccuuggguggcuu

SEQ ID NO: 35900 - RNA, 18 nt, Artificial Sequence
  Synthetic
uugaguauuuggugucuu

SEQ ID NO: 35901 - RNA, 19 nt, Artificial Sequence
  Synthetic
cuugaguauuuggugucuu

SEQ ID NO: 35902 - RNA, 20 nt, Artificial Sequence
  Synthetic
ucuugaguauuuggugucuu

SEQ ID NO: 35903 - RNA, 21 nt, Artificial Sequence
  Synthetic
uucuugaguauuuggugucuu

SEQ ID NO: 35904 - RNA, 22 nt, Artificial Sequence
  Synthetic
guucuugaguauuuggugucuu

SEQ ID NO: 35905 - RNA, 23 nt, Artificial Sequence
  Synthetic
cguucuugaguauuuggugucuu

SEQ ID NO: 35906 - RNA, 24 nt, Artificial Sequence
  Synthetic
ccguucuugaguauuuggugucuu

SEQ ID NO: 35907 - RNA, 18 nt, Artificial Sequence
  Synthetic
aucuucuuguugguucuu

SEQ ID NO: 35908 - RNA, 19 nt, Artificial Sequence
  Synthetic
caucuucuuguugguucuu

SEQ ID NO: 35909 - RNA, 20 nt, Artificial Sequence
  Synthetic
ucaucuucuuguugguucuu

SEQ ID NO: 35910 - RNA, 21 nt, Artificial Sequence
  Synthetic
cucaucuucuuguugguucuu

SEQ ID NO: 35911 - RNA, 22 nt, Artificial Sequence
  Synthetic
ccucaucuucuuguugguucuu

SEQ ID NO: 35912 - RNA, 23 nt, Artificial Sequence
  Synthetic
gccucaucuucuuguugguucuu

SEQ ID NO: 35913 - RNA, 24 nt, Artificial Sequence
  Synthetic
ugccucaucuucuuguugguucuu

SEQ ID NO: 35914 - RNA, 18 nt, Artificial Sequence
  Synthetic
cugcugguggcuccaguu

SEQ ID NO: 35915 - RNA, 19 nt, Artificial Sequence
  Synthetic
ccugcugguggcuccaguu

SEQ ID NO: 35916 - RNA, 20 nt, Artificial Sequence
  Synthetic
uccugcugguggcuccaguu

SEQ ID NO: 35917 - RNA, 21 nt, Artificial Sequence
  Synthetic
uuccugcugguggcuccaguu

SEQ ID NO: 35918 - RNA, 22 nt, Artificial Sequence
  Synthetic
  misc_feature (1)..(1): n is a, c, g, or u
nuuccugcugguggcuccaguu

SEQ ID NO: 35919 - RNA, 23 nt, Artificial Sequence
  Synthetic
  misc_feature (2)..(2): n is a, c, g, or u
unuuccugcugguggcuccaguu

SEQ ID NO: 35920 - RNA, 24 nt, Artificial Sequence
  Synthetic
  misc_feature (3)..(3): n is a, c, g, or u
aunuuccugcugguggcuccaguu

SEQ ID NO: 35921 - RNA, 18 nt, Artificial Sequence
  Synthetic
accccucccggggccguu

SEQ ID NO: 35922 - RNA, 19 nt, Artificial Sequence
  Synthetic
gaccccucccggggccguu

SEQ ID NO: 35923 - RNA, 20 nt, Artificial Sequence
  Synthetic
cgaccccucccggggccguu

SEQ ID NO: 35924 - RNA, 21 nt, Artificial Sequence
  Synthetic
acgaccccucccggggccguu

SEQ ID NO: 35925 - RNA, 22 nt, Artificial Sequence
  Synthetic
gacgaccccucccggggccguu

SEQ ID NO: 35926 - RNA, 23 nt, Artificial Sequence
  Synthetic
ggacgaccccucccggggccguu

SEQ ID NO: 35927 - RNA, 24 nt, Artificial Sequence
  Synthetic
cggacgaccccucccggggccguu

SEQ ID NO: 35928 - RNA, 18 nt, Artificial Sequence
  Synthetic
acuaaaugugaacaauuu

SEQ ID NO: 35929 - RNA, 19 nt, Artificial Sequence
  Synthetic
aacuaaaugugaacaauuu

SEQ ID NO: 35930 - RNA, 20 nt, Artificial Sequence
  Synthetic
uaacuaaaugugaacaauuu

SEQ ID NO: 35931 - RNA, 21 nt, Artificial Sequence
  Synthetic
auaacuaaaugugaacaauuu

SEQ ID NO: 35932 - RNA, 22 nt, Artificial Sequence
  Synthetic
uauaacuaaaugugaacaauuu

SEQ ID NO: 35933 - RNA, 23 nt, Artificial Sequence
  Synthetic
uuauaacuaaaugugaacaauuu

SEQ ID NO: 35934 - RNA, 24 nt, Artificial Sequence
  Synthetic
auuauaacuaaaugugaacaauuu

SEQ ID NO: 35935 - RNA, 18 nt, Artificial Sequence
  Synthetic
cacaaggugggaaacuuu

SEQ ID NO: 35936 - RNA, 19 nt, Artificial Sequence
  Synthetic
ucacaaggugggaaacuuu

SEQ ID NO: 35937 - RNA, 20 nt, Artificial Sequence
  Synthetic
cucacaaggugggaaacuuu

SEQ ID NO: 35938 - RNA, 21 nt, Artificial Sequence
  Synthetic
acucacaaggugggaaacuuu

SEQ ID NO: 35939 - RNA, 22 nt, Artificial Sequence
  Synthetic
gacucacaaggugggaaacuuu

SEQ ID NO: 35940 - RNA, 23 nt, Artificial Sequence
  Synthetic
ggacucacaaggugggaaacuuu

SEQ ID NO: 35941 - RNA, 24 nt, Artificial Sequence
  Synthetic
uggacucacaaggugggaaacuuu

SEQ ID NO: 35942 - RNA, 18 nt, Artificial Sequence
  Synthetic
cauuuccugucuuacuuu

SEQ ID NO: 35943 - RNA, 19 nt, Artificial Sequence
  Synthetic
acauuuccugucuuacuuu

SEQ ID NO: 35944 - RNA, 20 nt, Artificial Sequence
  Synthetic
cacauuuccugucuuacuuu

SEQ ID NO: 35945 - RNA, 21 nt, Artificial Sequence
  Synthetic
ucacauuuccugucuuacuuu

SEQ ID NO: 35946 - RNA, 22 nt, Artificial Sequence
  Synthetic
uucacauuuccugucuuacuuu

SEQ ID NO: 35947 - RNA, 23 nt, Artificial Sequence
  Synthetic
uuucacauuuccugucuuacuuu

SEQ ID NO: 35948 - RNA, 24 nt, Artificial Sequence
  Synthetic
guuucacauuuccugucuuacuuu

SEQ ID NO: 35949 - RNA, 18 nt, Artificial Sequence
  Synthetic
  misc_feature (1)..(1): n is a, c, g, or u
naaaauuaagcaauguuu

SEQ ID NO: 35950 - RNA, 19 nt, Artificial Sequence
  Synthetic
  misc_feature (2)..(2): n is a, c, g, or u
anaaaauuaagcaauguuu

SEQ ID NO: 35951 - RNA, 20 nt, Artificial Sequence
  Synthetic
  misc_feature (3)..(3): n is a, c, g, or u
canaaaauuaagcaauguuu

SEQ ID NO: 35952 - RNA, 21 nt, Artificial Sequence
  Synthetic
  misc_feature (4)..(4): n is a, c, g, or u
acanaaaauuaagcaauguuu

SEQ ID NO: 35953 - RNA, 22 nt, Artificial Sequence
  Synthetic
  misc_feature (5)..(5): n is a, c, g, or u
cacanaaaauuaagcaauguuu

SEQ ID NO: 35954 - RNA, 23 nt, Artificial Sequence
  Synthetic
  misc_feature (6)..(6): n is a, c, g, or u
acacanaaaauuaagcaauguuu

SEQ ID NO: 35955 - RNA, 24 nt, Artificial Sequence
  Synthetic
  misc_feature (7)..(7): n is a, c, g, or u
cacacanaaaauuaagcaauguuu

SEQ ID NO: 35956 - RNA, 18 nt, Artificial Sequence
  Synthetic
gguuauuccuuaaauuuu

SEQ ID NO: 35957 - RNA, 19 nt, Artificial Sequence
  Synthetic
ggguuauuccuuaaauuuu

SEQ ID NO: 35958 - RNA, 20 nt, Artificial Sequence
  Synthetic
gggguuauuccuuaaauuuu

SEQ ID NO: 35959 - RNA, 21 nt, Artificial Sequence
  Synthetic
ugggguuauuccuuaaauuuu

SEQ ID NO: 35960 - RNA, 22 nt, Artificial Sequence
  Synthetic
augggguuauuccuuaaauuuu

SEQ ID NO: 35961 - RNA, 23 nt, Artificial Sequence
  Synthetic
gaugggguuauuccuuaaauuuu

SEQ ID NO: 35962 - RNA, 24 nt, Artificial Sequence
  Synthetic
agaugggguuauuccuuaaauuuu

SEQ ID NO: 35963 - RNA, 18 nt, Artificial Sequence
  Synthetic
auuuccugucuuacuuuu

SEQ ID NO: 35964 - RNA, 19 nt, Artificial Sequence
  Synthetic
cauuuccugucuuacuuuu

SEQ ID NO: 35965 - RNA, 20 nt, Artificial Sequence
  Synthetic
acauuuccugucuuacuuuu

SEQ ID NO: 35966 - RNA, 21 nt, Artificial Sequence
  Synthetic
cacauuuccugucuuacuuuu

SEQ ID NO: 35967 - RNA, 22 nt, Artificial Sequence
  Synthetic
ucacauuuccugucuuacuuuu

SEQ ID NO: 35968 - RNA, 23 nt, Artificial Sequence
  Synthetic
uucacauuuccugucuuacuuuu

SEQ ID NO: 35969 - RNA, 24 nt, Artificial Sequence
  Synthetic
uuucacauuuccugucuuacuuuu

SEQ ID NO: 35970 - RNA, 18 nt, Artificial Sequence
  Synthetic
aaaauuaagcaauguuuu

SEQ ID NO: 35971 - RNA, 19 nt, Artificial Sequence
  Synthetic
  misc_feature (1)..(1): n is a, c, g, or u
naaaauuaagcaauguuuu

SEQ ID NO: 35972 - RNA, 20 nt, Artificial Sequence
  Synthetic
  misc_feature (2)..(2): n is a, c, g, or u
anaaaauuaagcaauguuuu

SEQ ID NO: 35973 - RNA, 21 nt, Artificial Sequence
  Synthetic
  misc_feature (3)..(3): n is a, c, g, or u
canaaaauuaagcaauguuuu

SEQ ID NO: 35974 - RNA, 22 nt, Artificial Sequence
  Synthetic
  misc_feature (4)..(4): n is a, c, g, or u
acanaaaauuaagcaauguuuu

SEQ ID NO: 35975 - RNA, 23 nt, Artificial Sequence
  Synthetic
  misc_feature (5)..(5): n is a, c, g, or u
cacanaaaauuaagcaauguuuu

SEQ ID NO: 35976 - RNA, 24 nt, Artificial Sequence
  Synthetic
  misc_feature (6)..(6): n is a, c, g, or u
acacanaaaauuaagcaauguuuu

SEQ ID NO: 35977 - RNA, 22 nt, Artificial Sequence
  Synthetic
gauaguccagaagaaccaacaa

SEQ ID NO: 35978 - RNA, 18 nt, Artificial Sequence
  Synthetic
gagaggcaauagucggaa

SEQ ID NO: 35979 - RNA, 20 nt, Artificial Sequence
  Synthetic
gugagaggcaauagucggaa

SEQ ID NO: 35980 - RNA, 23 nt, Artificial Sequence
  Synthetic
gaugugagaggcaauagucggaa

SEQ ID NO: 35981 - RNA, 22 nt, Artificial Sequence
  Synthetic
gcauuaaggcaggguaaccaca

SEQ ID NO: 35982 - RNA, 23 nt, Artificial Sequence
  Synthetic
ggcauuaaggcaggguaaccaca

SEQ ID NO: 35983 - RNA, 22 nt, Artificial Sequence
  Synthetic
gagggcccacaaauuguucaca

SEQ ID NO: 35984 - RNA, 24 nt, Artificial Sequence
  Synthetic
gagagggcccacaaauuguucaca

SEQ ID NO: 35985 - RNA, 21 nt, Artificial Sequence
  Synthetic
gccaggacaaguuggaggaca

SEQ ID NO: 35986 - RNA, 22 nt, Artificial Sequence
  Synthetic
guacagcaacaugagggauaca

SEQ ID NO: 35987 - RNA, 23 nt, Artificial Sequence
  Synthetic
guucccaaguauauggugaccca

SEQ ID NO: 35988 - RNA, 22 nt, Artificial Sequence
  Synthetic
  misc_feature (5)..(5): n is a, c, g, or u
gaugnccgauggccaagcccca

SEQ ID NO: 35989 - RNA, 22 nt, Artificial Sequence
  Synthetic
gacgacagaauugucaguccca

SEQ ID NO: 35990 - RNA, 23 nt, Artificial Sequence
  Synthetic
ggacgacagaauugucaguccca

SEQ ID NO: 35991 - RNA, 21 nt, Artificial Sequence
  Synthetic
guuucccaccuugugagucca

SEQ ID NO: 35992 - RNA, 23 nt, Artificial Sequence
  Synthetic
guuauucguugacagacuuucca

SEQ ID NO: 35993 - RNA, 21 nt, Artificial Sequence
  Synthetic
gcagaggugaagcgaagugca

SEQ ID NO: 35994 - RNA, 23 nt, Artificial Sequence
  Synthetic
gugcagaggugaagcgaagugca

SEQ ID NO: 35995 - RNA, 21 nt, Artificial Sequence
  Synthetic
gaagauugacgagaugugaga

SEQ ID NO: 35996 - RNA, 23 nt, Artificial Sequence
  Synthetic
gagaagauugacgagaugugaga

SEQ ID NO: 35997 - RNA, 24 nt, Artificial Sequence
  Synthetic
ggagaagauugacgagaugugaga

SEQ ID NO: 35998 - RNA, 22 nt, Artificial Sequence
  Synthetic
guauauuuccgagaaaggacga

SEQ ID NO: 35999 - RNA, 23 nt, Artificial Sequence
  Synthetic
guacaaagcugaagcggugucga

SEQ ID NO: 36000 - RNA, 24 nt, Artificial Sequence
  Synthetic
gguacaaagcugaagcggugucga

SEQ ID NO: 36001 - RNA, 21 nt, Artificial Sequence
  Synthetic
gaagaucacgaacagacggga

SEQ ID NO: 36002 - RNA, 23 nt, Artificial Sequence
  Synthetic
gagaagaucacgaacagacggga

SEQ ID NO: 36003 - RNA, 19 nt, Artificial Sequence
  Synthetic
guccaacuggugaucggga

SEQ ID NO: 36004 - RNA, 20 nt, Artificial Sequence
  Synthetic
gguccaacuggugaucggga

SEQ ID NO: 36005 - RNA, 21 nt, Artificial Sequence
  Synthetic
gcacagccuagcagccaugga

SEQ ID NO: 36006 - RNA, 24 nt, Artificial Sequence
  Synthetic
gcagcacagccuagcagccaugga

SEQ ID NO: 36007 - RNA, 22 nt, Artificial Sequence
  Synthetic
gugcaggguccccaauccugga

SEQ ID NO: 36008 - RNA, 23 nt, Artificial Sequence
  Synthetic
ggugcaggguccccaauccugga

SEQ ID NO: 36009 - RNA, 24 nt, Artificial Sequence
  Synthetic
guauuuugcgaaagcccaagauga

SEQ ID NO: 36010 - RNA, 21 nt, Artificial Sequence
  Synthetic
gaaagcccuacgaaccacuga

SEQ ID NO: 36011 - RNA, 22 nt, Artificial Sequence
  Synthetic
ggaaagcccuacgaaccacuga

SEQ ID NO: 36012 - RNA, 23 nt, Artificial Sequence
  Synthetic
gggaaagcccuacgaaccacuga

SEQ ID NO: 36013 - RNA, 24 nt, Artificial Sequence
  Synthetic
ggggaaagcccuacgaaccacuga

SEQ ID NO: 36014 - RNA, 21 nt, Artificial Sequence
  Synthetic
ggauucccgguacaaagcuga

SEQ ID NO: 36015 - RNA, 24 nt, Artificial Sequence
  Synthetic
guccccaauccuggagaagauuga

SEQ ID NO: 36016 - RNA, 20 nt, Artificial Sequence
  Synthetic
guagucuccggaaguguuga

SEQ ID NO: 36017 - RNA, 24 nt, Artificial Sequence
  Synthetic
gcuacgggauguuucucucuuaua

SEQ ID NO: 36018 - RNA, 21 nt, Artificial Sequence
  Synthetic
gacacacgggcacucccccua

SEQ ID NO: 36019 - RNA, 22 nt, Artificial Sequence
  Synthetic
ggacacacgggcacucccccua

SEQ ID NO: 36020 - RNA, 21 nt, Artificial Sequence
  Synthetic
ggugaucgggaaggaauccua

SEQ ID NO: 36021 - RNA, 21 nt, Artificial Sequence
  Synthetic
gacccacaaaaugaagcgcua

SEQ ID NO: 36022 - RNA, 23 nt, Artificial Sequence
  Synthetic
gugacccacaaaaugaagcgcua

SEQ ID NO: 36023 - RNA, 24 nt, Artificial Sequence
  Synthetic
ggugacccacaaaaugaagcgcua

SEQ ID NO: 36024 - RNA, 23 nt, Artificial Sequence
  Synthetic
gaccugccucuucgucuaacaac

SEQ ID NO: 36025 - RNA, 24 nt, Artificial Sequence
  Synthetic
ggaccugccucuucgucuaacaac

SEQ ID NO: 36026 - RNA, 19 nt, Artificial Sequence
  Synthetic
gcuguauggugaggcgaac

SEQ ID NO: 36027 - RNA, 20 nt, Artificial Sequence
  Synthetic
gaccugccucuucgucuaac

SEQ ID NO: 36028 - RNA, 23 nt, Artificial Sequence
  Synthetic
guauggaucggcagaggagccac

SEQ ID NO: 36029 - RNA, 21 nt, Artificial Sequence
  Synthetic
gaaaauugagagaaguccacc

SEQ ID NO: 36030 - RNA, 24 nt, Artificial Sequence
  Synthetic
gaccgcguaaagagaggugcgccc

SEQ ID NO: 36031 - RNA, 20 nt, Artificial Sequence
  Synthetic
gauguuguacagauuuggcc

SEQ ID NO: 36032 - RNA, 23 nt, Artificial Sequence
  Synthetic
gauaaaacgccgcagacacaucc

SEQ ID NO: 36033 - RNA, 20 nt, Artificial Sequence
  Synthetic
guacugguggucgaggaucc

SEQ ID NO: 36034 - RNA, 22 nt, Artificial Sequence
  Synthetic
gauacauagaguugccuugagc

SEQ ID NO: 36035 - RNA, 23 nt, Artificial Sequence
  Synthetic
ggauacauagaguugccuugagc

SEQ ID NO: 36036 - RNA, 24 nt, Artificial Sequence
  Synthetic
gggauacauagaguugccuugagc

SEQ ID NO: 36037 - RNA, 21 nt, Artificial Sequence
  Synthetic
gaugcagaucuucugcgacgc

SEQ ID NO: 36038 - RNA, 23 nt, Artificial Sequence
  Synthetic
gagaugcagaucuucugcgacgc

SEQ ID NO: 36039 - RNA, 24 nt, Artificial Sequence
  Synthetic
ggagaugcagaucuucugcgacgc

SEQ ID NO: 36040 - RNA, 21 nt, Artificial Sequence
  Synthetic
gauugacgagaugugagaggc

SEQ ID NO: 36041 - RNA, 24 nt, Artificial Sequence
  Synthetic
gaagauugacgagaugugagaggc

SEQ ID NO: 36042 - RNA, 24 nt, Artificial Sequence
  Synthetic
gacaugaacaagagaugauuaggc

SEQ ID NO: 36043 - RNA, 19 nt, Artificial Sequence
  Synthetic
gaaccacugaacaaauggc

SEQ ID NO: 36044 - RNA, 18 nt, Artificial Sequence
  Synthetic
gguuuccauguaacgugc

SEQ ID NO: 36045 - RNA, 20 nt, Artificial Sequence
  Synthetic
gcgguuuccauguaacgugc

SEQ ID NO: 36046 - RNA, 21 nt, Artificial Sequence
  Synthetic
ggcgguuuccauguaacgugc

SEQ ID NO: 36047 - RNA, 24 nt, Artificial Sequence
  Synthetic
guucuccauguucggugcaggguc

SEQ ID NO: 36048 - RNA, 22 nt, Artificial Sequence
  Synthetic
gcagggucccguacuggugguc

SEQ ID NO: 36049 - RNA, 23 nt, Artificial Sequence
  Synthetic
gccccaugcuguagaucuuguuc

SEQ ID NO: 36050 - RNA, 20 nt, Artificial Sequence
  Synthetic
gacggggagaccgcguaaag

SEQ ID NO: 36051 - RNA, 21 nt, Artificial Sequence
  Synthetic
gacgauugguggaggcaggag

SEQ ID NO: 36052 - RNA, 23 nt, Artificial Sequence
  Synthetic
guaggcugccucccugacugacg

SEQ ID NO: 36053 - RNA, 19 nt, Artificial Sequence
  Synthetic
gcgaagugcacacgguccg

SEQ ID NO: 36054 - RNA, 22 nt, Artificial Sequence
  Synthetic
gaagcgaagugcacacgguccg

SEQ ID NO: 36055 - RNA, 24 nt, Artificial Sequence
  Synthetic
gugaagcgaagugcacacgguccg

SEQ ID NO: 36056 - RNA, 24 nt, Artificial Sequence
  Synthetic
gccugagugcuguauggugaggcg

SEQ ID NO: 36057 - RNA, 23 nt, Artificial Sequence
  Synthetic
guagcuccaaauucuuuauaagg

SEQ ID NO: 36058 - RNA, 22 nt, Artificial Sequence
  Synthetic
gccaaucaggauuaaagacagg

SEQ ID NO: 36059 - RNA, 22 nt, Artificial Sequence
  Synthetic
gacacauccagcgauagccagg

SEQ ID NO: 36060 - RNA, 23 nt, Artificial Sequence
  Synthetic
gcauuugguggucuauaagcagg

SEQ ID NO: 36061 - RNA, 24 nt, Artificial Sequence
  Synthetic
ggcauuugguggucuauaagcagg

SEQ ID NO: 36062 - RNA, 18 nt, Artificial Sequence
  Synthetic
gccccaaacggccccggg

SEQ ID NO: 36063 - RNA, 20 nt, Artificial Sequence
  Synthetic
gagccccaaacggccccggg

SEQ ID NO: 36064 - RNA, 24 nt, Artificial Sequence
  Synthetic
gacagagccccaaacggccccggg

SEQ ID NO: 36065 - RNA, 24 nt, Artificial Sequence
  Synthetic
gucuaagccaaaaaggccauaugg

SEQ ID NO: 36066 - RNA, 23 nt, Artificial Sequence
  Synthetic
gaauccuagaggauugcuggugg

SEQ ID NO: 36067 - RNA, 24 nt, Artificial Sequence
  Synthetic
ggaauccuagaggauugcuggugg

SEQ ID NO: 36068 - RNA, 22 nt, Artificial Sequence
  Synthetic
gaugacugucucuuaguggugg

SEQ ID NO: 36069 - RNA, 23 nt, Artificial Sequence
  Synthetic
ggaugacugucucuuaguggugg

SEQ ID NO: 36070 - RNA, 24 nt, Artificial Sequence
  Synthetic
gauuguugguauuugcucugaaug

SEQ ID NO: 36071 - RNA, 21 nt, Artificial Sequence
  Synthetic
guuugauaccuuugucuaaug

SEQ ID NO: 36072 - RNA, 22 nt, Artificial Sequence
  Synthetic
gguuugauaccuuugucuaaug

SEQ ID NO: 36073 - RNA, 22 nt, Artificial Sequence
  Synthetic
gaagguuuuguacagcaacaug

SEQ ID NO: 36074 - RNA, 20 nt, Artificial Sequence
  Synthetic
guuccacgcaugcgcugaug

SEQ ID NO: 36075 - RNA, 21 nt, Artificial Sequence
  Synthetic
gguuccacgcaugcgcugaug

SEQ ID NO: 36076 - RNA, 22 nt, Artificial Sequence
  Synthetic
gugauguucuccauguucggug

SEQ ID NO: 36077 - RNA, 21 nt, Artificial Sequence
  Synthetic
gucauuaaccuggacucauug

SEQ ID NO: 36078 - RNA, 22 nt, Artificial Sequence
  Synthetic
ggucauuaaccuggacucauug

SEQ ID NO: 36079 - RNA, 24 nt, Artificial Sequence
  Synthetic
gacaaguuggaggacaggagauug

SEQ ID NO: 36080 - RNA, 22 nt, Artificial Sequence
  Synthetic
  misc_feature (19)..(19): n is a, c, g, or u
guccucuuauauaacugcnuug

SEQ ID NO: 36081 - RNA, 24 nt, Artificial Sequence
  Synthetic
  misc_feature (21)..(21): n is a, c, g, or u
gaguccucuuauauaacugcnuug

SEQ ID NO: 36082 - RNA, 23 nt, Artificial Sequence
  Synthetic
gauaauacgguuugauaccuuug

SEQ ID NO: 36083 - RNA, 24 nt, Artificial Sequence
  Synthetic
ggauaauacgguuugauaccuuug

SEQ ID NO: 36084 - RNA, 21 nt, Artificial Sequence
  Synthetic
gcaggagucgugcagguuuug

SEQ ID NO: 36085 - RNA, 23 nt, Artificial Sequence
  Synthetic
gagcaggagucgugcagguuuug

SEQ ID NO: 36086 - RNA, 22 nt, Artificial Sequence
  Synthetic
guugccugauuuuuaaacccau

SEQ ID NO: 36087 - RNA, 22 nt, Artificial Sequence
  Synthetic
gcagaugaugagagguguucau

SEQ ID NO: 36088 - RNA, 23 nt, Artificial Sequence
  Synthetic
ggcagaugaugagagguguucau

SEQ ID NO: 36089 - RNA, 21 nt, Artificial Sequence
  Synthetic
gucucuuagugguggagagau

SEQ ID NO: 36090 - RNA, 21 nt, Artificial Sequence
  Synthetic
gccaaggguccuuuuugggau

SEQ ID NO: 36091 - RNA, 22 nt, Artificial Sequence
  Synthetic
ggccaaggguccuuuuugggau

SEQ ID NO: 36092 - RNA, 24 nt, Artificial Sequence
  Synthetic
gaauacccgccuuccaaaggguau

SEQ ID NO: 36093 - RNA, 22 nt, Artificial Sequence
  Synthetic
gcucugaaugcuggguccaacu

SEQ ID NO: 36094 - RNA, 21 nt, Artificial Sequence
  Synthetic
gaguaggcugccucccugacu

SEQ ID NO: 36095 - RNA, 22 nt, Artificial Sequence
  Synthetic
ggaguaggcugccucccugacu

SEQ ID NO: 36096 - RNA, 23 nt, Artificial Sequence
  Synthetic
gggaguaggcugccucccugacu

SEQ ID NO: 36097 - RNA, 20 nt, Artificial Sequence
  Synthetic
guuuugcagggucccguacu

SEQ ID NO: 36098 - RNA, 21 nt, Artificial Sequence
  Synthetic
gguuuugcagggucccguacu

SEQ ID NO: 36099 - RNA, 24 nt, Artificial Sequence
  Synthetic
gcagguuuugcagggucccguacu

SEQ ID NO: 36100 - RNA, 20 nt, Artificial Sequence
  Synthetic
guaacacgagcagggguccu

SEQ ID NO: 36101 - RNA, 24 nt, Artificial Sequence
  Synthetic
gccuguaacacgagcagggguccu

SEQ ID NO: 36102 - RNA, 22 nt, Artificial Sequence
  Synthetic
gcugcgagcaaaacaagcagcu

SEQ ID NO: 36103 - RNA, 23 nt, Artificial Sequence
  Synthetic
ggcugcgagcaaaacaagcagcu

SEQ ID NO: 36104 - RNA, 24 nt, Artificial Sequence
  Synthetic
gaccguccaagaaagccccaugcu

SEQ ID NO: 36105 - RNA, 21 nt, Artificial Sequence
  Synthetic
gaacaaugaucagaggacucu

SEQ ID NO: 36106 - RNA, 23 nt, Artificial Sequence
  Synthetic
gcgaacaaugaucagaggacucu

SEQ ID NO: 36107 - RNA, 24 nt, Artificial Sequence
  Synthetic
ggcgaacaaugaucagaggacucu

SEQ ID NO: 36108 - RNA, 21 nt, Artificial Sequence
  Synthetic
gguccuuuuugggauugaagu

SEQ ID NO: 36109 - RNA, 22 nt, Artificial Sequence
  Synthetic
ggguccuuuuugggauugaagu

SEQ ID NO: 36110 - RNA, 21 nt, Artificial Sequence
  Synthetic
gauggccaagccccaaccagu

SEQ ID NO: 36111 - RNA, 20 nt, Artificial Sequence
  Synthetic
gcagcuaggaguuccgcagu

SEQ ID NO: 36112 - RNA, 18 nt, Artificial Sequence
  Synthetic
gacgacagaauugucagu

SEQ ID NO: 36113 - RNA, 19 nt, Artificial Sequence
  Synthetic
ggacgacagaauugucagu

SEQ ID NO: 36114 - RNA, 23 nt, Artificial Sequence
  Synthetic
gaaaggacgacagaauugucagu

SEQ ID NO: 36115 - RNA, 22 nt, Artificial Sequence
  Synthetic
guggucuauaagcaggaggagu

SEQ ID NO: 36116 - RNA, 23 nt, Artificial Sequence
  Synthetic
gguggucuauaagcaggaggagu

SEQ ID NO: 36117 - RNA, 24 nt, Artificial Sequence
  Synthetic
gcccacaaauuguucacauuuagu

SEQ ID NO: 36118 - RNA, 18 nt, Artificial Sequence
  Synthetic
gguuuugcagggucccgu

SEQ ID NO: 36119 - RNA, 21 nt, Artificial Sequence
  Synthetic
gcagguuuugcagggucccgu

SEQ ID NO: 36120 - RNA, 23 nt, Artificial Sequence
  Synthetic
gugcagguuuugcagggucccgu

SEQ ID NO: 36121 - RNA, 18 nt, Artificial Sequence
  Synthetic
gccuugagcaggagucgu

SEQ ID NO: 36122 - RNA, 21 nt, Artificial Sequence
  Synthetic
guugccuugagcaggagucgu

SEQ ID NO: 36123 - RNA, 23 nt, Artificial Sequence
  Synthetic
gaguugccuugagcaggagucgu

SEQ ID NO: 36124 - RNA, 21 nt, Artificial Sequence
  Synthetic
gucuagacucugcgguauugu

SEQ ID NO: 36125 - RNA, 23 nt, Artificial Sequence
  Synthetic
gagucuagacucugcgguauugu

SEQ ID NO: 36126 - RNA, 21 nt, Artificial Sequence
  Synthetic
gaucagaggacucuaaggauu

SEQ ID NO: 36127 - RNA, 21 nt, Artificial Sequence
  Synthetic
gggaaggaauccuagaggauu

SEQ ID NO: 36128 - RNA, 22 nt, Artificial Sequence
  Synthetic
gauugaagucccaaucuggauu

SEQ ID NO: 36129 - RNA, 23 nt, Artificial Sequence
  Synthetic
ggauugaagucccaaucuggauu

SEQ ID NO: 36130 - RNA, 24 nt, Artificial Sequence
  Synthetic
gggauugaagucccaaucuggauu

SEQ ID NO: 36131 - RNA, 22 nt, Artificial Sequence
  Synthetic
gacaggagauuggugagugauu

SEQ ID NO: 36132 - RNA, 23 nt, Artificial Sequence
  Synthetic
ggacaggagauuggugagugauu

SEQ ID NO: 36133 - RNA, 24 nt, Artificial Sequence
  Synthetic
gaccaguuauucguugacagacuu

SEQ ID NO: 36134 - RNA, 22 nt, Artificial Sequence
  Synthetic
gccccguaaaguuucccaccuu

SEQ ID NO: 36135 - RNA, 21 nt, Artificial Sequence
  Synthetic
gccugaggaugacugucucuu

SEQ ID NO: 36136 - RNA, 22 nt, Artificial Sequence
  Synthetic
ggccugaggaugacugucucuu

SEQ ID NO: 36137 - RNA, 18 nt, Artificial Sequence
  Synthetic
ggaucugcuggcaaaguu

SEQ ID NO: 36138 - RNA, 20 nt, Artificial Sequence
  Synthetic
gcggaucugcuggcaaaguu

SEQ ID NO: 36139 - RNA, 21 nt, Artificial Sequence
  Synthetic
ggcggaucugcuggcaaaguu

SEQ ID NO: 36140 - RNA, 23 nt, Artificial Sequence
  Synthetic
gaggcggaucugcuggcaaaguu

SEQ ID NO: 36141 - RNA, 24 nt, Artificial Sequence
  Synthetic
ggaggcggaucugcuggcaaaguu

SEQ ID NO: 36142 - RNA, 18 nt, Artificial Sequence
  Synthetic
gauaggauaggggcauuu

SEQ ID NO: 36143 - RNA, 21 nt, Artificial Sequence
  Synthetic
guugauaggauaggggcauuu

SEQ ID NO: 36144 - RNA, 23 nt, Artificial Sequence
  Synthetic
guguugauaggauaggggcauuu

SEQ ID NO: 36145 - RNA, 22 nt, Artificial Sequence
  Synthetic
gccucuggccaaggguccuuuu

SEQ ID NO: 36146 - RNA, 23 nt, Artificial Sequence
  Synthetic
ggccucuggccaaggguccuuuu

SEQ ID NO: 36147 - RNA, 18 nt, Artificial Sequence
  Synthetic
gcugcuccuuuuacccaa

SEQ ID NO: 36148 - RNA, 23 nt, Artificial Sequence
  Synthetic
guuucgcugcuccuuuuacccaa

SEQ ID NO: 36149 - RNA, 24 nt, Artificial Sequence
  Synthetic
gguuucgcugcuccuuuuacccaa

SEQ ID NO: 36150 - RNA, 21 nt, Artificial Sequence
  Synthetic
gcugcuaggcugugcugccaa

SEQ ID NO: 36151 - RNA, 22 nt, Artificial Sequence
  Synthetic
ggcugcuaggcugugcugccaa

SEQ ID NO: 36152 - RNA, 23 nt, Artificial Sequence
  Synthetic
gaacaccucucaucaucugccaa

SEQ ID NO: 36153 - RNA, 21 nt, Artificial Sequence
  Synthetic
gggucaccauauacuugggaa

SEQ ID NO: 36154 - RNA, 23 nt, Artificial Sequence
  Synthetic
gugggucaccauauacuugggaa

SEQ ID NO: 36155 - RNA, 23 nt, Artificial Sequence
  Synthetic
guauuaggaggcuguaggcauaa

SEQ ID NO: 36156 - RNA, 23 nt, Artificial Sequence
  Synthetic
gcacuccuccugcuuauagacca

SEQ ID NO: 36157 - RNA, 21 nt, Artificial Sequence
  Synthetic
gagacagucauccucaggcca

SEQ ID NO: 36158 - RNA, 20 nt, Artificial Sequence
  Synthetic
gcacacuaacaacuuugcca

SEQ ID NO: 36159 - RNA, 21 nt, Artificial Sequence
  Synthetic
ggcacacuaacaacuuugcca

SEQ ID NO: 36160 - RNA, 22 nt, Artificial Sequence
  Synthetic
gggcacacuaacaacuuugcca

SEQ ID NO: 36161 - RNA, 21 nt, Artificial Sequence
  Synthetic
gguaucaaaccguauuaucca

SEQ ID NO: 36162 - RNA, 24 nt, Artificial Sequence
  Synthetic
gccucaccauacagcacucaggca

SEQ ID NO: 36163 - RNA, 22 nt, Artificial Sequence
  Synthetic
gcugagugggaagaauuaggca

SEQ ID NO: 36164 - RNA, 21 nt, Artificial Sequence
  Synthetic
ggaagauccagcauccagaga

SEQ ID NO: 36165 - RNA, 22 nt, Artificial Sequence
  Synthetic
gccagauuuuucccaaacucua

SEQ ID NO: 36166 - RNA, 21 nt, Artificial Sequence
  Synthetic
gagagaaaccguucuugagua

SEQ ID NO: 36167 - RNA, 22 nt, Artificial Sequence
  Synthetic
ggagagaaaccguucuugagua

SEQ ID NO: 36168 - RNA, 23 nt, Artificial Sequence
  Synthetic
gggagagaaaccguucuugagua

SEQ ID NO: 36169 - RNA, 18 nt, Artificial Sequence
  Synthetic
ggggcgcaccucucuuua

SEQ ID NO: 36170 - RNA, 24 nt, Artificial Sequence
  Synthetic
gaccacggggcgcaccucucuuua

SEQ ID NO: 36171 - RNA, 21 nt, Artificial Sequence
  Synthetic
gggguuauuccuuaaauuuua

SEQ ID NO: 36172 - RNA, 24 nt, Artificial Sequence
  Synthetic
gaugggguuauuccuuaaauuuua

SEQ ID NO: 36173 - RNA, 23 nt, Artificial Sequence
  Synthetic
guuggguuucgcugcuccuuuua

SEQ ID NO: 36174 - RNA, 24 nt, Artificial Sequence
  Synthetic
gcccucucacaguaaaugagaaac

SEQ ID NO: 36175 - RNA, 21 nt, Artificial Sequence
  Synthetic
gaacucccucgccucgcagac

SEQ ID NO: 36176 - RNA, 24 nt, Artificial Sequence
  Synthetic
gaagaacucccucgccucgcagac

SEQ ID NO: 36177 - RNA, 23 nt, Artificial Sequence
  Synthetic
guugcuguacaaaaccuucggac

SEQ ID NO: 36178 - RNA, 22 nt, Artificial Sequence
  Synthetic
guaggaguuggagccuauggac

SEQ ID NO: 36179 - RNA, 23 nt, Artificial Sequence
  Synthetic
gguaggaguuggagccuauggac

SEQ ID NO: 36180 - RNA, 18 nt, Artificial Sequence
  Synthetic
gggguuuuucuuguugac

SEQ ID NO: 36181 - RNA, 20 nt, Artificial Sequence
  Synthetic
gcgggguuuuucuuguugac

SEQ ID NO: 36182 - RNA, 21 nt, Artificial Sequence
  Synthetic
ggcgggguuuuucuuguugac

SEQ ID NO: 36183 - RNA, 23 nt, Artificial Sequence
  Synthetic
gccuaaauucgcaguccccaacc

SEQ ID NO: 36184 - RNA, 24 nt, Artificial Sequence
  Synthetic
ggccuaaauucgcaguccccaacc

SEQ ID NO: 36185 - RNA, 19 nt, Artificial Sequence
  Synthetic
gauuccaggauccucgacc

SEQ ID NO: 36186 - RNA, 24 nt, Artificial Sequence
  Synthetic
gacccagcauucagagcaaauacc

SEQ ID NO: 36187 - RNA, 22 nt, Artificial Sequence
  Synthetic
gacaccgcuucagcuuuguacc

SEQ ID NO: 36188 - RNA, 21 nt, Artificial Sequence
  Synthetic
guguuugcugacgcaaccccc

SEQ ID NO: 36189 - RNA, 21 nt, Artificial Sequence
  Synthetic
gaggccuuuugggguggagcc

SEQ ID NO: 36190 - RNA, 22 nt, Artificial Sequence
  Synthetic
ggaggccuuuugggguggagcc

SEQ ID NO: 36191 - RNA, 22 nt, Artificial Sequence
  Synthetic
guucaagccuccaagcugugcc

SEQ ID NO: 36192 - RNA, 22 nt, Artificial Sequence
  Synthetic
gugccuuggguggcuuuagggc

SEQ ID NO: 36193 - RNA, 23 nt, Artificial Sequence
  Synthetic
gcaaaauaccuaugggagugggc

SEQ ID NO: 36194 - RNA, 24 nt, Artificial Sequence
  Synthetic
  misc_feature (18)..(18): n is a, c, g, or u
gcacucaggcaagcaauncugugc

SEQ ID NO: 36195 - RNA, 21 nt, Artificial Sequence
  Synthetic
gggccaaaucuguacaacauc

SEQ ID NO: 36196 - RNA, 22 nt, Artificial Sequence
  Synthetic
ggggccaaaucuguacaacauc

SEQ ID NO: 36197 - RNA, 23 nt, Artificial Sequence
  Synthetic
gggggccaaaucuguacaacauc

SEQ ID NO: 36198 - RNA, 21 nt, Artificial Sequence
  Synthetic
ggcuuucuuggacggucccuc

SEQ ID NO: 36199 - RNA, 22 nt, Artificial Sequence
  Synthetic
gggcuuucuuggacggucccuc

SEQ ID NO: 36200 - RNA, 23 nt, Artificial Sequence
  Synthetic
ggggcuuucuuggacggucccuc

SEQ ID NO: 36201 - RNA, 23 nt, Artificial Sequence
  Synthetic
gaaccuuuccaccagcaauccuc

SEQ ID NO: 36202 - RNA, 21 nt, Artificial Sequence
  Synthetic
gacuauugccucucacaucuc

SEQ ID NO: 36203 - RNA, 22 nt, Artificial Sequence
  Synthetic
gacaauucugucguccuuucuc

SEQ ID NO: 36204 - RNA, 23 nt, Artificial Sequence
  Synthetic
gaagaauuaggcaaugaguccag

SEQ ID NO: 36205 - RNA, 24 nt, Artificial Sequence
  Synthetic
ggaagaauuaggcaaugaguccag

SEQ ID NO: 36206 - RNA, 22 nt, Artificial Sequence
  Synthetic
gacaagaauccucacaauaccg

SEQ ID NO: 36207 - RNA, 18 nt, Artificial Sequence
  Synthetic
guuuacgucccgucagcg

SEQ ID NO: 36208 - RNA, 21 nt, Artificial Sequence
  Synthetic
gaccccugcucguguuacagg

SEQ ID NO: 36209 - RNA, 22 nt, Artificial Sequence
  Synthetic
ggaccccugcucguguuacagg

SEQ ID NO: 36210 - RNA, 22 nt, Artificial Sequence
  Synthetic
  misc_feature (16)..(16): n is a, c, g, or u
guugaugacucuagcnaccugg

SEQ ID NO: 36211 - RNA, 24 nt, Artificial Sequence
  Synthetic
  misc_feature (18)..(18): n is a, c, g, or u
gaguugaugacucuagcnaccugg

SEQ ID NO: 36212 - RNA, 22 nt, Artificial Sequence
  Synthetic
  misc_feature (19)..(19): n is a, c, g, or u
guuaugucaacaaccgggnugg

SEQ ID NO: 36213 - RNA, 21 nt, Artificial Sequence
  Synthetic
gccucaguccguuucucuugg

SEQ ID NO: 36214 - RNA, 22 nt, Artificial Sequence
  Synthetic
ggccucaguccguuucucuugg

SEQ ID NO: 36215 - RNA, 23 nt, Artificial Sequence
  Synthetic
gggccucaguccguuucucuugg

SEQ ID NO: 36216 - RNA, 21 nt, Artificial Sequence
  Synthetic
gauuaaaacuaguuaugccug

SEQ ID NO: 36217 - RNA, 24 nt, Artificial Sequence
  Synthetic
gaagauuaaaacuaguuaugccug

SEQ ID NO: 36218 - RNA, 24 nt, Artificial Sequence
  Synthetic
gucugucaacgaauaacuggucug

SEQ ID NO: 36219 - RNA, 22 nt, Artificial Sequence
  Synthetic
  misc_feature (13)..(13): n is a, c, g, or u
gaugacucuagcnaccugggug

SEQ ID NO: 36220 - RNA, 24 nt, Artificial Sequence
  Synthetic
gauccagcauccagagauuuggug

SEQ ID NO: 36221 - RNA, 18 nt, Artificial Sequence
  Synthetic
gcaacggcccggucugug

SEQ ID NO: 36222 - RNA, 19 nt, Artificial Sequence
  Synthetic
ggcaacggcccggucugug

SEQ ID NO: 36223 - RNA, 23 nt, Artificial Sequence
  Synthetic
gcuaggcaacggcccggucugug

SEQ ID NO: 36224 - RNA, 24 nt, Artificial Sequence
  Synthetic
gaucuacagcauggggcuuucuug

SEQ ID NO: 36225 - RNA, 21 nt, Artificial Sequence
  Synthetic
gucaauuauguuaauacuaau

SEQ ID NO: 36226 - RNA, 22 nt, Artificial Sequence
  Synthetic
ggucaauuauguuaauacuaau

SEQ ID NO: 36227 - RNA, 24 nt, Artificial Sequence
  Synthetic
guggucaauuauguuaauacuaau

SEQ ID NO: 36228 - RNA, 24 nt, Artificial Sequence
  Synthetic
gauuugguggucaauuauguuaau

SEQ ID NO: 36229 - RNA, 21 nt, Artificial Sequence
  Synthetic
gggcuuucgcaaaauaccuau

SEQ ID NO: 36230 - RNA, 21 nt, Artificial Sequence
  Synthetic
ggagcaaaacucauugggacu

SEQ ID NO: 36231 - RNA, 19 nt, Artificial Sequence
  Synthetic
gcuuuguaccgggaauccu

SEQ ID NO: 36232 - RNA, 18 nt, Artificial Sequence
  Synthetic
gacucgugguggacuucu

SEQ ID NO: 36233 - RNA, 23 nt, Artificial Sequence
  Synthetic
gucuagacucgugguggacuucu

SEQ ID NO: 36234 - RNA, 23 nt, Artificial Sequence
  Synthetic
gcccguguguccuggccuaaauu

SEQ ID NO: 36235 - RNA, 21 nt, Artificial Sequence
  Synthetic
gaagaucugcaucuccagcuu

SEQ ID NO: 36236 - RNA, 24 nt, Artificial Sequence
  Synthetic
gcagaagaucugcaucuccagcuu

SEQ ID NO: 36237 - RNA, 21 nt, Artificial Sequence
  Synthetic
gcugcuaugccucaucuucuu

SEQ ID NO: 36238 - RNA, 23 nt, Artificial Sequence
  Synthetic
gaagauccagcauccagagauuu

SEQ ID NO: 36239 - RNA, 24 nt, Artificial Sequence
  Synthetic
ggaagauccagcauccagagauuu

SEQ ID NO: 36240 - RNA, 23 nt, Artificial Sequence
  Synthetic
guucuugaguauuuggugucuuu

SEQ ID NO: 36241 - RNA, 23 nt, Artificial Sequence
  Synthetic
guccguuucucuuggcucaguuu

SEQ ID NO: 36242 - RNA, 21 nt, Artificial Sequence
  Synthetic
gauuggcaaacuccuucuuuu

SEQ ID NO: 36243 - RNA, 21 nt, Artificial Sequence
  Synthetic
auaguccagaagaaccaacaa

SEQ ID NO: 36244 - RNA, 23 nt, Artificial Sequence
  Synthetic
ugauaguccagaagaaccaacaa

SEQ ID NO: 36245 - RNA, 24 nt, Artificial Sequence
  Synthetic
uugauaguccagaagaaccaacaa

SEQ ID NO: 36246 - RNA, 21 nt, Artificial Sequence
  Synthetic
agguauuuugcgaaagcccaa

SEQ ID NO: 36247 - RNA, 22 nt, Artificial Sequence
  Synthetic
uagguauuuugcgaaagcccaa

SEQ ID NO: 36248 - RNA, 23 nt, Artificial Sequence
  Synthetic
auagguauuuugcgaaagcccaa

SEQ ID NO: 36249 - RNA, 24 nt, Artificial Sequence
  Synthetic
cauagguauuuugcgaaagcccaa

SEQ ID NO: 36250 - RNA, 18 nt, Artificial Sequence
  Synthetic
cgggccguugccuagcaa

SEQ ID NO: 36251 - RNA, 19 nt, Artificial Sequence
  Synthetic
ccgggccguugccuagcaa

SEQ ID NO: 36252 - RNA, 20 nt, Artificial Sequence
  Synthetic
accgggccguugccuagcaa

SEQ ID NO: 36253 - RNA, 19 nt, Artificial Sequence
  Synthetic
ugagaggcaauagucggaa

SEQ ID NO: 36254 - RNA, 21 nt, Artificial Sequence
  Synthetic
ugugagaggcaauagucggaa

SEQ ID NO: 36255 - RNA, 22 nt, Artificial Sequence
  Synthetic
augugagaggcaauagucggaa

SEQ ID NO: 36256 - RNA, 24 nt, Artificial Sequence
  Synthetic
agaugugagaggcaauagucggaa

SEQ ID NO: 36257 - RNA, 21 nt, Artificial Sequence
  Synthetic
  misc_feature (2)..(2): n is a, c, g, or u
ancccgguuguugacauaaca

SEQ ID NO: 36258 - RNA, 22 nt, Artificial Sequence
  Synthetic
  misc_feature (3)..(3): n is a, c, g, or u
cancccgguuguugacauaaca

SEQ ID NO: 36259 - RNA, 23 nt, Artificial Sequence
  Synthetic
  misc_feature (4)..(4): n is a, c, g, or u
ccancccgguuguugacauaaca

SEQ ID NO: 36260 - RNA, 24 nt, Artificial Sequence
  Synthetic
  misc_feature (5)..(5): n is a, c, g, or u
uccancccgguuguugacauaaca

SEQ ID NO: 36261 - RNA, 21 nt, Artificial Sequence
  Synthetic
caaucaauuggccuguuaaca

SEQ ID NO: 36262 - RNA, 22 nt, Artificial Sequence
  Synthetic
ccaaucaauuggccuguuaaca

SEQ ID NO: 36263 - RNA, 23 nt, Artificial Sequence
  Synthetic
uccaaucaauuggccuguuaaca

SEQ ID NO: 36264 - RNA, 24 nt, Artificial Sequence
  Synthetic
uuccaaucaauuggccuguuaaca

SEQ ID NO: 36265 - RNA, 21 nt, Artificial Sequence
  Synthetic
cauuaaggcaggguaaccaca

SEQ ID NO: 36266 - RNA, 24 nt, Artificial Sequence
  Synthetic
aggcauuaaggcaggguaaccaca

SEQ ID NO: 36267 - RNA, 21 nt, Artificial Sequence
  Synthetic
agggcccacaaauuguucaca

SEQ ID NO: 36268 - RNA, 23 nt, Artificial Sequence
  Synthetic
agagggcccacaaauuguucaca

SEQ ID NO: 36269 - RNA, 22 nt, Artificial Sequence
  Synthetic
agccaggacaaguuggaggaca

SEQ ID NO: 36270 - RNA, 23 nt, Artificial Sequence
  Synthetic
uagccaggacaaguuggaggaca

SEQ ID NO: 36271 - RNA, 24 nt, Artificial Sequence
  Synthetic
auagccaggacaaguuggaggaca

SEQ ID NO: 36272 - RNA, 21 nt, Artificial Sequence
  Synthetic
uacagcaacaugagggauaca

SEQ ID NO: 36273 - RNA, 23 nt, Artificial Sequence
  Synthetic
uguacagcaacaugagggauaca

SEQ ID NO: 36274 - RNA, 24 nt, Artificial Sequence
  Synthetic
uuguacagcaacaugagggauaca

SEQ ID NO: 36275 - RNA, 21 nt, Artificial Sequence
  Synthetic
ucccaaguauauggugaccca

SEQ ID NO: 36276 - RNA, 22 nt, Artificial Sequence
  Synthetic
uucccaaguauauggugaccca

SEQ ID NO: 36277 - RNA, 24 nt, Artificial Sequence
  Synthetic
uguucccaaguauauggugaccca

SEQ ID NO: 36278 - RNA, 21 nt, Artificial Sequence
  Synthetic
  misc_feature (4)..(4): n is a, c, g, or u
augnccgauggccaagcccca

SEQ ID NO: 36279 - RNA, 23 nt, Artificial Sequence
  Synthetic
  misc_feature (6)..(6): n is a, c, g, or u
ugaugnccgauggccaagcccca

SEQ ID NO: 36280 - RNA, 24 nt, Artificial Sequence
  Synthetic
  misc_feature (7)..(7): n is a, c, g, or u
cugaugnccgauggccaagcccca

SEQ ID NO: 36281 - RNA, 21 nt, Artificial Sequence
  Synthetic
acgacagaauugucaguccca

SEQ ID NO: 36282 - RNA, 24 nt, Artificial Sequence
  Synthetic
aggacgacagaauugucaguccca

SEQ ID NO: 36283 - RNA, 22 nt, Artificial Sequence
  Synthetic
aguuucccaccuugugagucca

SEQ ID NO: 36284 - RNA, 23 nt, Artificial Sequence
  Synthetic
aaguuucccaccuugugagucca

SEQ ID NO: 36285 - RNA, 24 nt, Artificial Sequence
  Synthetic
aaaguuucccaccuugugagucca

SEQ ID NO: 36286 - RNA, 21 nt, Artificial Sequence
  Synthetic
uugcucugaaugcugggucca

SEQ ID NO: 36287 - RNA, 22 nt, Artificial Sequence
  Synthetic
uuugcucugaaugcugggucca

SEQ ID NO: 36288 - RNA, 23 nt, Artificial Sequence
  Synthetic
auuugcucugaaugcugggucca

SEQ ID NO: 36289 - RNA, 24 nt, Artificial Sequence
  Synthetic
uauuugcucugaaugcugggucca

SEQ ID NO: 36290 - RNA, 21 nt, Artificial Sequence
  Synthetic
auauagaauacccgccuucca

SEQ ID NO: 36291 - RNA, 22 nt, Artificial Sequence
  Synthetic
uauauagaauacccgccuucca

SEQ ID NO: 36292 - RNA, 23 nt, Artificial Sequence
  Synthetic
uuauauagaauacccgccuucca

SEQ ID NO: 36293 - RNA, 24 nt, Artificial Sequence
  Synthetic
cuuauauagaauacccgccuucca

SEQ ID NO: 36294 - RNA, 21 nt, Artificial Sequence
  Synthetic
uauucguugacagacuuucca

SEQ ID NO: 36295 - RNA, 22 nt, Artificial Sequence
  Synthetic
uuauucguugacagacuuucca

SEQ ID NO: 36296 - RNA, 24 nt, Artificial Sequence
  Synthetic
aguuauucguugacagacuuucca

SEQ ID NO: 36297 - RNA, 21 nt, Artificial Sequence
  Synthetic
  misc_feature (15)..(15): n is a, c, g, or u
ucuuauauaacugcnuuggca

SEQ ID NO: 36298 - RNA, 22 nt, Artificial Sequence
  Synthetic
  misc_feature (16)..(16): n is a, c, g, or u
cucuuauauaacugcnuuggca

SEQ ID NO: 36299 - RNA, 23 nt, Artificial Sequence
  Synthetic
  misc_feature (17)..(17): n is a, c, g, or u
ccucuuauauaacugcnuuggca

SEQ ID NO: 36300 - RNA, 24 nt, Artificial Sequence
  Synthetic
  misc_feature (18)..(18): n is a, c, g, or u
uccucuuauauaacugcnuuggca

SEQ ID NO: 36301 - RNA, 22 nt, Artificial Sequence
  Synthetic
ugcagaggugaagcgaagugca

SEQ ID NO: 36302 - RNA, 24 nt, Artificial Sequence
  Synthetic
cgugcagaggugaagcgaagugca

SEQ ID NO: 36303 - RNA, 22 nt, Artificial Sequence
  Synthetic
agaagauugacgagaugugaga

SEQ ID NO: 36304 - RNA, 21 nt, Artificial Sequence
  Synthetic
uauauuuccgagaaaggacga

SEQ ID NO: 36305 - RNA, 23 nt, Artificial Sequence
  Synthetic
uguauauuuccgagaaaggacga

SEQ ID NO: 36306 - RNA, 24 nt, Artificial Sequence
  Synthetic
auguauauuuccgagaaaggacga

SEQ ID NO: 36307 - RNA, 21 nt, Artificial Sequence
  Synthetic
acaaagcugaagcggugucga

SEQ ID NO: 36308 - RNA, 22 nt, Artificial Sequence
  Synthetic
uacaaagcugaagcggugucga

SEQ ID NO: 36309 - RNA, 18 nt, Artificial Sequence
  Synthetic
aggacgucccgcgaagga

SEQ ID NO: 36310 - RNA, 19 nt, Artificial Sequence
  Synthetic
aaggacgucccgcgaagga

SEQ ID NO: 36311 - RNA, 20 nt, Artificial Sequence
  Synthetic
aaaggacgucccgcgaagga

SEQ ID NO: 36312 - RNA, 22 nt, Artificial Sequence
  Synthetic
agaagaucacgaacagacggga

SEQ ID NO: 36313 - RNA, 24 nt, Artificial Sequence
  Synthetic
cgagaagaucacgaacagacggga

SEQ ID NO: 36314 - RNA, 18 nt, Artificial Sequence
  Synthetic
uccaacuggugaucggga

SEQ ID NO: 36315 - RNA, 22 nt, Artificial Sequence
  Synthetic
agcacagccuagcagccaugga

SEQ ID NO: 36316 - RNA, 23 nt, Artificial Sequence
  Synthetic
cagcacagccuagcagccaugga

SEQ ID NO: 36317 - RNA, 21 nt, Artificial Sequence
  Synthetic
ugcaggguccccaauccugga

SEQ ID NO: 36318 - RNA, 24 nt, Artificial Sequence
  Synthetic
cggugcaggguccccaauccugga

SEQ ID NO: 36319 - RNA, 18 nt, Artificial Sequence
  Synthetic
ugcgaaagcccaagauga

SEQ ID NO: 36320 - RNA, 19 nt, Artificial Sequence
  Synthetic
uugcgaaagcccaagauga

SEQ ID NO: 36321 - RNA, 20 nt, Artificial Sequence
  Synthetic
uuugcgaaagcccaagauga

SEQ ID NO: 36322 - RNA, 21 nt, Artificial Sequence
  Synthetic
uuuugcgaaagcccaagauga

SEQ ID NO: 36323 - RNA, 22 nt, Artificial Sequence
  Synthetic
auuuugcgaaagcccaagauga

SEQ ID NO: 36324 - RNA, 23 nt, Artificial Sequence
  Synthetic
uauuuugcgaaagcccaagauga

SEQ ID NO: 36325 - RNA, 22 nt, Artificial Sequence
  Synthetic
aggauucccgguacaaagcuga

SEQ ID NO: 36326 - RNA, 23 nt, Artificial Sequence
  Synthetic
aaggauucccgguacaaagcuga

SEQ ID NO: 36327 - RNA, 24 nt, Artificial Sequence
  Synthetic
uaaggauucccgguacaaagcuga

SEQ ID NO: 36328 - RNA, 21 nt, Artificial Sequence
  Synthetic
cccaauccuggagaagauuga

SEQ ID NO: 36329 - RNA, 22 nt, Artificial Sequence
  Synthetic
ccccaauccuggagaagauuga

SEQ ID NO: 36330 - RNA, 23 nt, Artificial Sequence
  Synthetic
uccccaauccuggagaagauuga

SEQ ID NO: 36331 - RNA, 18 nt, Artificial Sequence
  Synthetic
agucuccggaaguguuga

SEQ ID NO: 36332 - RNA, 19 nt, Artificial Sequence
  Synthetic
uagucuccggaaguguuga

SEQ ID NO: 36333 - RNA, 21 nt, Artificial Sequence
  Synthetic
aguagucuccggaaguguuga

SEQ ID NO: 36334 - RNA, 22 nt, Artificial Sequence
  Synthetic
caguagucuccggaaguguuga

SEQ ID NO: 36335 - RNA, 23 nt, Artificial Sequence
  Synthetic
acaguagucuccggaaguguuga

SEQ ID NO: 36336 - RNA, 24 nt, Artificial Sequence
  Synthetic
aacaguagucuccggaaguguuga

SEQ ID NO: 36337 - RNA, 21 nt, Artificial Sequence
  Synthetic
acgggauguuucucucuuaua

SEQ ID NO: 36338 - RNA, 22 nt, Artificial Sequence
  Synthetic
uacgggauguuucucucuuaua

SEQ ID NO: 36339 - RNA, 23 nt, Artificial Sequence
  Synthetic
cuacgggauguuucucucuuaua

SEQ ID NO: 36340 - RNA, 23 nt, Artificial Sequence
  Synthetic
aggacacacgggcacucccccua

SEQ ID NO: 36341 - RNA, 24 nt, Artificial Sequence
  Synthetic
caggacacacgggcacucccccua

SEQ ID NO: 36342 - RNA, 22 nt, Artificial Sequence
  Synthetic
uggugaucgggaaggaauccua

SEQ ID NO: 36343 - RNA, 23 nt, Artificial Sequence
  Synthetic
cuggugaucgggaaggaauccua

SEQ ID NO: 36344 - RNA, 24 nt, Artificial Sequence
  Synthetic
acuggugaucgggaaggaauccua

SEQ ID NO: 36345 - RNA, 22 nt, Artificial Sequence
  Synthetic
ugacccacaaaaugaagcgcua

SEQ ID NO: 36346 - RNA, 21 nt, Artificial Sequence
  Synthetic
ccugccucuucgucuaacaac

SEQ ID NO: 36347 - RNA, 22 nt, Artificial Sequence
  Synthetic
accugccucuucgucuaacaac

SEQ ID NO: 36348 - RNA, 18 nt, Artificial Sequence
  Synthetic
cuguauggugaggcgaac

SEQ ID NO: 36349 - RNA, 20 nt, Artificial Sequence
  Synthetic
ugcuguauggugaggcgaac

SEQ ID NO: 36350 - RNA, 18 nt, Artificial Sequence
  Synthetic
ccugccucuucgucuaac

SEQ ID NO: 36351 - RNA, 19 nt, Artificial Sequence
  Synthetic
accugccucuucgucuaac

SEQ ID NO: 36352 - RNA, 21 nt, Artificial Sequence
  Synthetic
auggaucggcagaggagccac

SEQ ID NO: 36353 - RNA, 22 nt, Artificial Sequence
  Synthetic
uauggaucggcagaggagccac

SEQ ID NO: 36354 - RNA, 24 nt, Artificial Sequence
  Synthetic
aguauggaucggcagaggagccac

SEQ ID NO: 36355 - RNA, 22 nt, Artificial Sequence
  Synthetic
agaaaauugagagaaguccacc

SEQ ID NO: 36356 - RNA, 23 nt, Artificial Sequence
  Synthetic
uagaaaauugagagaaguccacc

SEQ ID NO: 36357 - RNA, 24 nt, Artificial Sequence
  Synthetic
cuagaaaauugagagaaguccacc

SEQ ID NO: 36358 - RNA, 21 nt, Artificial Sequence
  Synthetic
cgcguaaagagaggugcgccc

SEQ ID NO: 36359 - RNA, 22 nt, Artificial Sequence
  Synthetic
ccgcguaaagagaggugcgccc

SEQ ID NO: 36360 - RNA, 23 nt, Artificial Sequence
  Synthetic
accgcguaaagagaggugcgccc

SEQ ID NO: 36361 - RNA, 21 nt, Artificial Sequence
  Synthetic
ucauuuacugugagagggccc

SEQ ID NO: 36362 - RNA, 22 nt, Artificial Sequence
  Synthetic
cucauuuacugugagagggccc

SEQ ID NO: 36363 - RNA, 23 nt, Artificial Sequence
  Synthetic
ucucauuuacugugagagggccc

SEQ ID NO: 36364 - RNA, 24 nt, Artificial Sequence
  Synthetic
uucucauuuacugugagagggccc

SEQ ID NO: 36365 - RNA, 21 nt, Artificial Sequence
  Synthetic
cucaagaacgguuucucuccc

SEQ ID NO: 36366 - RNA, 22 nt, Artificial Sequence
  Synthetic
acucaagaacgguuucucuccc

SEQ ID NO: 36367 - RNA, 23 nt, Artificial Sequence
  Synthetic
uacucaagaacgguuucucuccc

SEQ ID NO: 36368 - RNA, 24 nt, Artificial Sequence
  Synthetic
auacucaagaacgguuucucuccc

SEQ ID NO: 36369 - RNA, 21 nt, Artificial Sequence
  Synthetic
cauagguauuuugcgaaagcc

SEQ ID NO: 36370 - RNA, 22 nt, Artificial Sequence
  Synthetic
ccauagguauuuugcgaaagcc

SEQ ID NO: 36371 - RNA, 23 nt, Artificial Sequence
  Synthetic
cccauagguauuuugcgaaagcc

SEQ ID NO: 36372 - RNA, 24 nt, Artificial Sequence
  Synthetic
ucccauagguauuuugcgaaagcc

SEQ ID NO: 36373 - RNA, 21 nt, Artificial Sequence
  Synthetic
cuaccuuguuggccucuggcc

SEQ ID NO: 36374 - RNA, 22 nt, Artificial Sequence
  Synthetic
ccuaccuuguuggccucuggcc

SEQ ID NO: 36375 - RNA, 23 nt, Artificial Sequence
  Synthetic
uccuaccuuguuggccucuggcc

SEQ ID NO: 36376 - RNA, 24 nt, Artificial Sequence
  Synthetic
cuccuaccuuguuggccucuggcc

SEQ ID NO: 36377 - RNA, 18 nt, Artificial Sequence
  Synthetic
uguuguacagauuuggcc

SEQ ID NO: 36378 - RNA, 19 nt, Artificial Sequence
  Synthetic
auguuguacagauuuggcc

SEQ ID NO: 36379 - RNA, 21 nt, Artificial Sequence
  Synthetic
agauguuguacagauuuggcc

SEQ ID NO: 36380 - RNA, 22 nt, Artificial Sequence
  Synthetic
aagauguuguacagauuuggcc

SEQ ID NO: 36381 - RNA, 23 nt, Artificial Sequence
  Synthetic
caagauguuguacagauuuggcc

SEQ ID NO: 36382 - RNA, 24 nt, Artificial Sequence
  Synthetic
ucaagauguuguacagauuuggcc

SEQ ID NO: 36383 - RNA, 18 nt, Artificial Sequence
  Synthetic
aacgccgcagacacaucc

SEQ ID NO: 36384 - RNA, 19 nt, Artificial Sequence
  Synthetic
aaacgccgcagacacaucc

SEQ ID NO: 36385 - RNA, 20 nt, Artificial Sequence
  Synthetic
aaaacgccgcagacacaucc

SEQ ID NO: 36386 - RNA, 21 nt, Artificial Sequence
  Synthetic
uaaaacgccgcagacacaucc

SEQ ID NO: 36387 - RNA, 22 nt, Artificial Sequence
  Synthetic
auaaaacgccgcagacacaucc

SEQ ID NO: 36388 - RNA, 24 nt, Artificial Sequence
  Synthetic
ugauaaaacgccgcagacacaucc

SEQ ID NO: 36389 - RNA, 18 nt, Artificial Sequence
  Synthetic
acugguggucgaggaucc

SEQ ID NO: 36390 - RNA, 19 nt, Artificial Sequence
  Synthetic
uacugguggucgaggaucc

SEQ ID NO: 36391 - RNA, 21 nt, Artificial Sequence
  Synthetic
cgucuaacaacaguagucucc

SEQ ID NO: 36392 - RNA, 22 nt, Artificial Sequence
  Synthetic
ucgucuaacaacaguagucucc

SEQ ID NO: 36393 - RNA, 23 nt, Artificial Sequence
  Synthetic
uucgucuaacaacaguagucucc

SEQ ID NO: 36394 - RNA, 24 nt, Artificial Sequence
  Synthetic
cuucgucuaacaacaguagucucc

SEQ ID NO: 36395 - RNA, 18 nt, Artificial Sequence
  Synthetic
cccgccuguaacacgagc

SEQ ID NO: 36396 - RNA, 19 nt, Artificial Sequence
  Synthetic
ccccgccuguaacacgagc

SEQ ID NO: 36397 - RNA, 20 nt, Artificial Sequence
  Synthetic
accccgccuguaacacgagc

SEQ ID NO: 36398 - RNA, 21 nt, Artificial Sequence
  Synthetic
auacauagaguugccuugagc

SEQ ID NO: 36399 - RNA, 22 nt, Artificial Sequence
  Synthetic
agaugcagaucuucugcgacgc

SEQ ID NO: 36400 - RNA, 22 nt, Artificial Sequence
  Synthetic
agauugacgagaugugagaggc

SEQ ID NO: 36401 - RNA, 23 nt, Artificial Sequence
  Synthetic
aagauugacgagaugugagaggc

SEQ ID NO: 36402 - RNA, 21 nt, Artificial Sequence
  Synthetic
augaacaagagaugauuaggc

SEQ ID NO: 36403 - RNA, 22 nt, Artificial Sequence
  Synthetic
caugaacaagagaugauuaggc

SEQ ID NO: 36404 - RNA, 23 nt, Artificial Sequence
  Synthetic
acaugaacaagagaugauuaggc

SEQ ID NO: 36405 - RNA, 18 nt, Artificial Sequence
  Synthetic
aaccacugaacaaauggc

SEQ ID NO: 36406 - RNA, 20 nt, Artificial Sequence
  Synthetic
cgaaccacugaacaaauggc

SEQ ID NO: 36407 - RNA, 21 nt, Artificial Sequence
  Synthetic
acgaaccacugaacaaauggc

SEQ ID NO: 36408 - RNA, 22 nt, Artificial Sequence
  Synthetic
uacgaaccacugaacaaauggc

SEQ ID NO: 36409 - RNA, 23 nt, Artificial Sequence
  Synthetic
cuacgaaccacugaacaaauggc

SEQ ID NO: 36410 - RNA, 24 nt, Artificial Sequence
  Synthetic
ccuacgaaccacugaacaaauggc

SEQ ID NO: 36411 - RNA, 21 nt, Artificial Sequence
  Synthetic
  misc_feature (19)..(19): n is a, c, g, or u
auuauuacccacccaggungc

SEQ ID NO: 36412 - RNA, 22 nt, Artificial Sequence
  Synthetic
  misc_feature (20)..(20): n is a, c, g, or u
aauuauuacccacccaggungc

SEQ ID NO: 36413 - RNA, 23 nt, Artificial Sequence
  Synthetic
  misc_feature (21)..(21): n is a, c, g, or u
aaauuauuacccacccaggungc

SEQ ID NO: 36414 - RNA, 24 nt, Artificial Sequence
  Synthetic
  misc_feature (22)..(22): n is a, c, g, or u
caaauuauuacccacccaggungc

SEQ ID NO: 36415 - RNA, 18 nt, Artificial Sequence
  Synthetic
caaagguuccacgcaugc

SEQ ID NO: 36416 - RNA, 19 nt, Artificial Sequence
  Synthetic
acaaagguuccacgcaugc

SEQ ID NO: 36417 - RNA, 20 nt, Artificial Sequence
  Synthetic
cacaaagguuccacgcaugc

SEQ ID NO: 36418 - RNA, 19 nt, Artificial Sequence
  Synthetic
cgguuuccauguaacgugc

SEQ ID NO: 36419 - RNA, 22 nt, Artificial Sequence
  Synthetic
uggcgguuuccauguaacgugc

SEQ ID NO: 36420 - RNA, 23 nt, Artificial Sequence
  Synthetic
auggcgguuuccauguaacgugc

SEQ ID NO: 36421 - RNA, 24 nt, Artificial Sequence
  Synthetic
cauggcgguuuccauguaacgugc

SEQ ID NO: 36422 - RNA, 18 nt, Artificial Sequence
  Synthetic
caccacgagucuagacuc

SEQ ID NO: 36423 - RNA, 19 nt, Artificial Sequence
  Synthetic
ccaccacgagucuagacuc

SEQ ID NO: 36424 - RNA, 20 nt, Artificial Sequence
  Synthetic
uccaccacgagucuagacuc

SEQ ID NO: 36425 - RNA, 21 nt, Artificial Sequence
  Synthetic
cuccauguucggugcaggguc

SEQ ID NO: 36426 - RNA, 22 nt, Artificial Sequence
  Synthetic
ucuccauguucggugcaggguc

SEQ ID NO: 36427 - RNA, 23 nt, Artificial Sequence
  Synthetic
uucuccauguucggugcaggguc

SEQ ID NO: 36428 - RNA, 21 nt, Artificial Sequence
  Synthetic
cagggucccguacuggugguc

SEQ ID NO: 36429 - RNA, 23 nt, Artificial Sequence
  Synthetic
ugcagggucccguacuggugguc

SEQ ID NO: 36430 - RNA, 24 nt, Artificial Sequence
  Synthetic
uugcagggucccguacuggugguc

SEQ ID NO: 36431 - RNA, 21 nt, Artificial Sequence
  Synthetic
cccaugcuguagaucuuguuc

SEQ ID NO: 36432 - RNA, 22 nt, Artificial Sequence
  Synthetic
ccccaugcuguagaucuuguuc

SEQ ID NO: 36433 - RNA, 24 nt, Artificial Sequence
  Synthetic
agccccaugcuguagaucuuguuc

SEQ ID NO: 36434 - RNA, 18 nt, Artificial Sequence
  Synthetic
cggggagaccgcguaaag

SEQ ID NO: 36435 - RNA, 19 nt, Artificial Sequence
  Synthetic
acggggagaccgcguaaag

SEQ ID NO: 36436 - RNA, 21 nt, Artificial Sequence
  Synthetic
auguaacgugcagaggugaag

SEQ ID NO: 36437 - RNA, 22 nt, Artificial Sequence
  Synthetic
cauguaacgugcagaggugaag

SEQ ID NO: 36438 - RNA, 23 nt, Artificial Sequence
  Synthetic
ccauguaacgugcagaggugaag

SEQ ID NO: 36439 - RNA, 24 nt, Artificial Sequence
  Synthetic
uccauguaacgugcagaggugaag

SEQ ID NO: 36440 - RNA, 21 nt, Artificial Sequence
  Synthetic
aggagcagcgaaacccaacag

SEQ ID NO: 36441 - RNA, 22 nt, Artificial Sequence
  Synthetic
aaggagcagcgaaacccaacag

SEQ ID NO: 36442 - RNA, 23 nt, Artificial Sequence
  Synthetic
aaaggagcagcgaaacccaacag

SEQ ID NO: 36443 - RNA, 24 nt, Artificial Sequence
  Synthetic
aaaaggagcagcgaaacccaacag

SEQ ID NO: 36444 - RNA, 21 nt, Artificial Sequence
  Synthetic
caagaagaugaggcauagcag

SEQ ID NO: 36445 - RNA, 22 nt, Artificial Sequence
  Synthetic
acaagaagaugaggcauagcag

SEQ ID NO: 36446 - RNA, 23 nt, Artificial Sequence
  Synthetic
aacaagaagaugaggcauagcag

SEQ ID NO: 36447 - RNA, 24 nt, Artificial Sequence
  Synthetic
caacaagaagaugaggcauagcag

SEQ ID NO: 36448 - RNA, 21 nt, Artificial Sequence
  Synthetic
ugacuuugggauuuuguagag

SEQ ID NO: 36449 - RNA, 22 nt, Artificial Sequence
  Synthetic
cugacuuugggauuuuguagag

SEQ ID NO: 36450 - RNA, 23 nt, Artificial Sequence
  Synthetic
ccugacuuugggauuuuguagag

SEQ ID NO: 36451 - RNA, 24 nt, Artificial Sequence
  Synthetic
cccugacuuugggauuuuguagag

SEQ ID NO: 36452 - RNA, 22 nt, Artificial Sequence
  Synthetic
ugacgauugguggaggcaggag

SEQ ID NO: 36453 - RNA, 23 nt, Artificial Sequence
  Synthetic
cugacgauugguggaggcaggag

SEQ ID NO: 36454 - RNA, 24 nt, Artificial Sequence
  Synthetic
acugacgauugguggaggcaggag

SEQ ID NO: 36455 - RNA, 21 nt, Artificial Sequence
  Synthetic
aggcugccucccugacugacg

SEQ ID NO: 36456 - RNA, 22 nt, Artificial Sequence
  Synthetic
uaggcugccucccugacugacg

SEQ ID NO: 36457 - RNA, 24 nt, Artificial Sequence
  Synthetic
aguaggcugccucccugacugacg

SEQ ID NO: 36458 - RNA, 18 nt, Artificial Sequence
  Synthetic
cgaagugcacacgguccg

SEQ ID NO: 36459 - RNA, 20 nt, Artificial Sequence
  Synthetic
agcgaagugcacacgguccg

SEQ ID NO: 36460 - RNA, 21 nt, Artificial Sequence
  Synthetic
aagcgaagugcacacgguccg

SEQ ID NO: 36461 - RNA, 23 nt, Artificial Sequence
  Synthetic
ugaagcgaagugcacacgguccg

SEQ ID NO: 36462 - RNA, 18 nt, Artificial Sequence
  Synthetic
aacaaaggacgucccgcg

SEQ ID NO: 36463 - RNA, 19 nt, Artificial Sequence
  Synthetic
aaacaaaggacgucccgcg

SEQ ID NO: 36464 - RNA, 20 nt, Artificial Sequence
  Synthetic
uaaacaaaggacgucccgcg

SEQ ID NO: 36465 - RNA, 21 nt, Artificial Sequence
  Synthetic
ugagugcuguauggugaggcg

SEQ ID NO: 36466 - RNA, 22 nt, Artificial Sequence
  Synthetic
cugagugcuguauggugaggcg

SEQ ID NO: 36467 - RNA, 23 nt, Artificial Sequence
  Synthetic
ccugagugcuguauggugaggcg

SEQ ID NO: 36468 - RNA, 21 nt, Artificial Sequence
  Synthetic
agcuccaaauucuuuauaagg

SEQ ID NO: 36469 - RNA, 22 nt, Artificial Sequence
  Synthetic
uagcuccaaauucuuuauaagg

SEQ ID NO: 36470 - RNA, 24 nt, Artificial Sequence
  Synthetic
aguagcuccaaauucuuuauaagg

SEQ ID NO: 36471 - RNA, 21 nt, Artificial Sequence
  Synthetic
augcauauaaaggcauuaagg

SEQ ID NO: 36472 - RNA, 22 nt, Artificial Sequence
  Synthetic
caugcauauaaaggcauuaagg

SEQ ID NO: 36473 - RNA, 23 nt, Artificial Sequence
  Synthetic
acaugcauauaaaggcauuaagg

SEQ ID NO: 36474 - RNA, 24 nt, Artificial Sequence
  Synthetic
uacaugcauauaaaggcauuaagg

SEQ ID NO: 36475 - RNA, 21 nt, Artificial Sequence
  Synthetic
ccaaucaggauuaaagacagg

SEQ ID NO: 36476 - RNA, 23 nt, Artificial Sequence
  Synthetic
ugccaaucaggauuaaagacagg

SEQ ID NO: 36477 - RNA, 24 nt, Artificial Sequence
  Synthetic
uugccaaucaggauuaaagacagg

SEQ ID NO: 36478 - RNA, 21 nt, Artificial Sequence
  Synthetic
acacauccagcgauagccagg

SEQ ID NO: 36479 - RNA, 23 nt, Artificial Sequence
  Synthetic
agacacauccagcgauagccagg

SEQ ID NO: 36480 - RNA, 24 nt, Artificial Sequence
  Synthetic
cagacacauccagcgauagccagg

SEQ ID NO: 36481 - RNA, 21 nt, Artificial Sequence
  Synthetic
auuugguggucuauaagcagg

SEQ ID NO: 36482 - RNA, 22 nt, Artificial Sequence
  Synthetic
cauuugguggucuauaagcagg

SEQ ID NO: 36483 - RNA, 21 nt, Artificial Sequence
  Synthetic
uacauuuucuggauaauacgg

SEQ ID NO: 36484 - RNA, 22 nt, Artificial Sequence
  Synthetic
cuacauuuucuggauaauacgg

SEQ ID NO: 36485 - RNA, 23 nt, Artificial Sequence
  Synthetic
acuacauuuucuggauaauacgg

SEQ ID NO: 36486 - RNA, 24 nt, Artificial Sequence
  Synthetic
aacuacauuuucuggauaauacgg

SEQ ID NO: 36487 - RNA, 19 nt, Artificial Sequence
  Synthetic
agccccaaacggccccggg

SEQ ID NO: 36488 - RNA, 21 nt, Artificial Sequence
  Synthetic
agagccccaaacggccccggg

SEQ ID NO: 36489 - RNA, 22 nt, Artificial Sequence
  Synthetic
cagagccccaaacggccccggg

SEQ ID NO: 36490 - RNA, 23 nt, Artificial Sequence
  Synthetic
acagagccccaaacggccccggg

SEQ ID NO: 36491 - RNA, 21 nt, Artificial Sequence
  Synthetic
uaagccaaaaaggccauaugg

SEQ ID NO: 36492 - RNA, 22 nt, Artificial Sequence
  Synthetic
cuaagccaaaaaggccauaugg

SEQ ID NO: 36493 - RNA, 23 nt, Artificial Sequence
  Synthetic
ucuaagccaaaaaggccauaugg

SEQ ID NO: 36494 - RNA, 21 nt, Artificial Sequence
  Synthetic
auccuagaggauugcuggugg

SEQ ID NO: 36495 - RNA, 22 nt, Artificial Sequence
  Synthetic
aauccuagaggauugcuggugg

SEQ ID NO: 36496 - RNA, 21 nt, Artificial Sequence
  Synthetic
augacugucucuuaguggugg

SEQ ID NO: 36497 - RNA, 24 nt, Artificial Sequence
  Synthetic
aggaugacugucucuuaguggugg

SEQ ID NO: 36498 - RNA, 21 nt, Artificial Sequence
  Synthetic
ccccaaaaggccuccgugugg

SEQ ID NO: 36499 - RNA, 22 nt, Artificial Sequence
  Synthetic
accccaaaaggccuccgugugg

SEQ ID NO: 36500 - RNA, 23 nt, Artificial Sequence
  Synthetic
caccccaaaaggccuccgugugg

SEQ ID NO: 36501 - RNA, 24 nt, Artificial Sequence
  Synthetic
ccaccccaaaaggccuccgugugg

SEQ ID NO: 36502 - RNA, 21 nt, Artificial Sequence
  Synthetic
uguugguauuugcucugaaug

SEQ ID NO: 36503 - RNA, 22 nt, Artificial Sequence
  Synthetic
uuguugguauuugcucugaaug

SEQ ID NO: 36504 - RNA, 23 nt, Artificial Sequence
  Synthetic
auuguugguauuugcucugaaug

SEQ ID NO: 36505 - RNA, 23 nt, Artificial Sequence
  Synthetic
cgguuugauaccuuugucuaaug

SEQ ID NO: 36506 - RNA, 24 nt, Artificial Sequence
  Synthetic
acgguuugauaccuuugucuaaug

SEQ ID NO: 36507 - RNA, 21 nt, Artificial Sequence
  Synthetic
aagguuuuguacagcaacaug

SEQ ID NO: 36508 - RNA, 23 nt, Artificial Sequence
  Synthetic
cgaagguuuuguacagcaacaug

SEQ ID NO: 36509 - RNA, 24 nt, Artificial Sequence
  Synthetic
ccgaagguuuuguacagcaacaug

SEQ ID NO: 36510 - RNA, 21 nt, Artificial Sequence
  Synthetic
ugaccaccaaaucucuggaug

SEQ ID NO: 36511 - RNA, 22 nt, Artificial Sequence
  Synthetic
uugaccaccaaaucucuggaug

SEQ ID NO: 36512 - RNA, 23 nt, Artificial Sequence
  Synthetic
auugaccaccaaaucucuggaug

SEQ ID NO: 36513 - RNA, 24 nt, Artificial Sequence
  Synthetic
aauugaccaccaaaucucuggaug

SEQ ID NO: 36514 - RNA, 21 nt, Artificial Sequence
  Synthetic
  misc_feature (8)..(8): n is a, c, g, or u
uaacugcnuuggcagaugaug

SEQ ID NO: 36515 - RNA, 22 nt, Artificial Sequence
  Synthetic
  misc_feature (9)..(9): n is a, c, g, or u
auaacugcnuuggcagaugaug

SEQ ID NO: 36516 - RNA, 23 nt, Artificial Sequence
  Synthetic
  misc_feature (10)..(10): n is a, c, g, or u
uauaacugcnuuggcagaugaug

SEQ ID NO: 36517 - RNA, 24 nt, Artificial Sequence
  Synthetic
  misc_feature (11)..(11): n is a, c, g, or u
auauaacugcnuuggcagaugaug

SEQ ID NO: 36518 - RNA, 18 nt, Artificial Sequence
  Synthetic
uccacgcaugcgcugaug

SEQ ID NO: 36519 - RNA, 19 nt, Artificial Sequence
  Synthetic
uuccacgcaugcgcugaug

SEQ ID NO: 36520 - RNA, 22 nt, Artificial Sequence
  Synthetic
agguuccacgcaugcgcugaug

SEQ ID NO: 36521 - RNA, 23 nt, Artificial Sequence
  Synthetic
aagguuccacgcaugcgcugaug

SEQ ID NO: 36522 - RNA, 24 nt, Artificial Sequence
  Synthetic
aaagguuccacgcaugcgcugaug

SEQ ID NO: 36523 - RNA, 21 nt, Artificial Sequence
  Synthetic
ugauguucuccauguucggug

SEQ ID NO: 36524 - RNA, 23 nt, Artificial Sequence
  Synthetic
ugugauguucuccauguucggug

SEQ ID NO: 36525 - RNA, 24 nt, Artificial Sequence
  Synthetic
augugauguucuccauguucggug

SEQ ID NO: 36526 - RNA, 21 nt, Artificial Sequence
  Synthetic
agggaguuuccgaaaacauug

SEQ ID NO: 36527 - RNA, 22 nt, Artificial Sequence
  Synthetic
cagggaguuuccgaaaacauug

SEQ ID NO: 36528 - RNA, 23 nt, Artificial Sequence
  Synthetic
acagggaguuuccgaaaacauug

SEQ ID NO: 36529 - RNA, 24 nt, Artificial Sequence
  Synthetic
aacagggaguuuccgaaaacauug

SEQ ID NO: 36530 - RNA, 18 nt, Artificial Sequence
  Synthetic
auuaaccuggacucauug

SEQ ID NO: 36531 - RNA, 19 nt, Artificial Sequence
  Synthetic
cauuaaccuggacucauug

SEQ ID NO: 36532 - RNA, 20 nt, Artificial Sequence
  Synthetic
ucauuaaccuggacucauug

SEQ ID NO: 36533 - RNA, 23 nt, Artificial Sequence
  Synthetic
aggucauuaaccuggacucauug

SEQ ID NO: 36534 - RNA, 24 nt, Artificial Sequence
  Synthetic
aaggucauuaaccuggacucauug

SEQ ID NO: 36535 - RNA, 21 nt, Artificial Sequence
  Synthetic
aaguuggaggacaggagauug

SEQ ID NO: 36536 - RNA, 22 nt, Artificial Sequence
  Synthetic
caaguuggaggacaggagauug

SEQ ID NO: 36537 - RNA, 23 nt, Artificial Sequence
  Synthetic
acaaguuggaggacaggagauug

SEQ ID NO: 36538 - RNA, 21 nt, Artificial Sequence
  Synthetic
  misc_feature (18)..(18): n is a, c, g, or u
uccucuuauauaacugcnuug

SEQ ID NO: 36539 - RNA, 23 nt, Artificial Sequence
  Synthetic
  misc_feature (20)..(20): n is a, c, g, or u
aguccucuuauauaacugcnuug

SEQ ID NO: 36540 - RNA, 21 nt, Artificial Sequence
  Synthetic
uaauacgguuugauaccuuug

SEQ ID NO: 36541 - RNA, 22 nt, Artificial Sequence
  Synthetic
auaauacgguuugauaccuuug

SEQ ID NO: 36542 - RNA, 22 nt, Artificial Sequence
  Synthetic
agcaggagucgugcagguuuug

SEQ ID NO: 36543 - RNA, 24 nt, Artificial Sequence
  Synthetic
ugagcaggagucgugcagguuuug

SEQ ID NO: 36544 - RNA, 21 nt, Artificial Sequence
  Synthetic
acgagcagggguccuaggaau

SEQ ID NO: 36545 - RNA, 22 nt, Artificial Sequence
  Synthetic
cacgagcagggguccuaggaau

SEQ ID NO: 36546 - RNA, 23 nt, Artificial Sequence
  Synthetic
acacgagcagggguccuaggaau

SEQ ID NO: 36547 - RNA, 24 nt, Artificial Sequence
  Synthetic
aacacgagcagggguccuaggaau

SEQ ID NO: 36548 - RNA, 21 nt, Artificial Sequence
  Synthetic
uugccugauuuuuaaacccau

SEQ ID NO: 36549 - RNA, 23 nt, Artificial Sequence
  Synthetic
aguugccugauuuuuaaacccau

SEQ ID NO: 36550 - RNA, 24 nt, Artificial Sequence
  Synthetic
uaguugccugauuuuuaaacccau

SEQ ID NO: 36551 - RNA, 21 nt, Artificial Sequence
  Synthetic
cagaugaugagagguguucau

SEQ ID NO: 36552 - RNA, 24 nt, Artificial Sequence
  Synthetic
uggcagaugaugagagguguucau

SEQ ID NO: 36553 - RNA, 22 nt, Artificial Sequence
  Synthetic
ugucucuuagugguggagagau

SEQ ID NO: 36554 - RNA, 23 nt, Artificial Sequence
  Synthetic
cugucucuuagugguggagagau

SEQ ID NO: 36555 - RNA, 24 nt, Artificial Sequence
  Synthetic
acugucucuuagugguggagagau

SEQ ID NO: 36556 - RNA, 18 nt, Artificial Sequence
  Synthetic
cuucugcgacgcggcgau

SEQ ID NO: 36557 - RNA, 19 nt, Artificial Sequence
  Synthetic
ucuucugcgacgcggcgau

SEQ ID NO: 36558 - RNA, 20 nt, Artificial Sequence
  Synthetic
aucuucugcgacgcggcgau

SEQ ID NO: 36559 - RNA, 23 nt, Artificial Sequence
  Synthetic
uggccaaggguccuuuuugggau

SEQ ID NO: 36560 - RNA, 24 nt, Artificial Sequence
  Synthetic
cuggccaaggguccuuuuugggau

SEQ ID NO: 36561 - RNA, 18 nt, Artificial Sequence
  Synthetic
ccgccuuccaaaggguau

SEQ ID NO: 36562 - RNA, 19 nt, Artificial Sequence
  Synthetic
cccgccuuccaaaggguau

SEQ ID NO: 36563 - RNA, 20 nt, Artificial Sequence
  Synthetic
acccgccuuccaaaggguau

SEQ ID NO: 36564 - RNA, 21 nt, Artificial Sequence
  Synthetic
uacccgccuuccaaaggguau

SEQ ID NO: 36565 - RNA, 22 nt, Artificial Sequence
  Synthetic
auacccgccuuccaaaggguau

SEQ ID NO: 36566 - RNA, 23 nt, Artificial Sequence
  Synthetic
aauacccgccuuccaaaggguau

SEQ ID NO: 36567 - RNA, 21 nt, Artificial Sequence
  Synthetic
cucugaaugcuggguccaacu

SEQ ID NO: 36568 - RNA, 23 nt, Artificial Sequence
  Synthetic
ugcucugaaugcuggguccaacu

SEQ ID NO: 36569 - RNA, 24 nt, Artificial Sequence
  Synthetic
uugcucugaaugcuggguccaacu

SEQ ID NO: 36570 - RNA, 24 nt, Artificial Sequence
  Synthetic
ugggaguaggcugccucccugacu

SEQ ID NO: 36571 - RNA, 18 nt, Artificial Sequence
  Synthetic
uuugcagggucccguacu

SEQ ID NO: 36572 - RNA, 19 nt, Artificial Sequence
  Synthetic
uuuugcagggucccguacu

SEQ ID NO: 36573 - RNA, 22 nt, Artificial Sequence
  Synthetic
agguuuugcagggucccguacu

SEQ ID NO: 36574 - RNA, 23 nt, Artificial Sequence
  Synthetic
cagguuuugcagggucccguacu

SEQ ID NO: 36575 - RNA, 18 nt, Artificial Sequence
  Synthetic
aauuuaugccuacagccu

SEQ ID NO: 36576 - RNA, 19 nt, Artificial Sequence
  Synthetic
caauuuaugccuacagccu

SEQ ID NO: 36577 - RNA, 20 nt, Artificial Sequence
  Synthetic
ccaauuuaugccuacagccu

SEQ ID NO: 36578 - RNA, 18 nt, Artificial Sequence
  Synthetic
aacacgagcagggguccu

SEQ ID NO: 36579 - RNA, 19 nt, Artificial Sequence
  Synthetic
uaacacgagcagggguccu

SEQ ID NO: 36580 - RNA, 21 nt, Artificial Sequence
  Synthetic
uguaacacgagcagggguccu

SEQ ID NO: 36581 - RNA, 22 nt, Artificial Sequence
  Synthetic
cuguaacacgagcagggguccu

SEQ ID NO: 36582 - RNA, 23 nt, Artificial Sequence
  Synthetic
ccuguaacacgagcagggguccu

SEQ ID NO: 36583 - RNA, 21 nt, Artificial Sequence
  Synthetic
cugcgagcaaaacaagcagcu

SEQ ID NO: 36584 - RNA, 24 nt, Artificial Sequence
  Synthetic
cggcugcgagcaaaacaagcagcu

SEQ ID NO: 36585 - RNA, 21 nt, Artificial Sequence
  Synthetic
cguccaagaaagccccaugcu

SEQ ID NO: 36586 - RNA, 22 nt, Artificial Sequence
  Synthetic
ccguccaagaaagccccaugcu

SEQ ID NO: 36587 - RNA, 23 nt, Artificial Sequence
  Synthetic
accguccaagaaagccccaugcu

SEQ ID NO: 36588 - RNA, 21 nt, Artificial Sequence
  Synthetic
ucuggauuguugguauuugcu

SEQ ID NO: 36589 - RNA, 22 nt, Artificial Sequence
  Synthetic
aucuggauuguugguauuugcu

SEQ ID NO: 36590 - RNA, 23 nt, Artificial Sequence
  Synthetic
aaucuggauuguugguauuugcu

SEQ ID NO: 36591 - RNA, 24 nt, Artificial Sequence
  Synthetic
caaucuggauuguugguauuugcu

SEQ ID NO: 36592 - RNA, 21 nt, Artificial Sequence
  Synthetic
acauaauugaccaccaaaucu

SEQ ID NO: 36593 - RNA, 22 nt, Artificial Sequence
  Synthetic
aacauaauugaccaccaaaucu

SEQ ID NO: 36594 - RNA, 23 nt, Artificial Sequence
  Synthetic
uaacauaauugaccaccaaaucu

SEQ ID NO: 36595 - RNA, 24 nt, Artificial Sequence
  Synthetic
uuaacauaauugaccaccaaaucu

SEQ ID NO: 36596 - RNA, 22 nt, Artificial Sequence
  Synthetic
cgaacaaugaucagaggacucu

SEQ ID NO: 36597 - RNA, 23 nt, Artificial Sequence
  Synthetic
aggguccuuuuugggauugaagu

SEQ ID NO: 36598 - RNA, 24 nt, Artificial Sequence
  Synthetic
aaggguccuuuuugggauugaagu

SEQ ID NO: 36599 - RNA, 22 nt, Artificial Sequence
  Synthetic
cgauggccaagccccaaccagu

SEQ ID NO: 36600 - RNA, 23 nt, Artificial Sequence
  Synthetic
ccgauggccaagccccaaccagu

SEQ ID NO: 36601 - RNA, 24 nt, Artificial Sequence
  Synthetic
  misc_feature (1)..(1): n is a, c, g, or u
nccgauggccaagccccaaccagu

SEQ ID NO: 36602 - RNA, 18 nt, Artificial Sequence
  Synthetic
agcuaggaguuccgcagu

SEQ ID NO: 36603 - RNA, 19 nt, Artificial Sequence
  Synthetic
cagcuaggaguuccgcagu

SEQ ID NO: 36604 - RNA, 21 nt, Artificial Sequence
  Synthetic
agcagcuaggaguuccgcagu

SEQ ID NO: 36605 - RNA, 22 nt, Artificial Sequence
  Synthetic
aagcagcuaggaguuccgcagu

SEQ ID NO: 36606 - RNA, 23 nt, Artificial Sequence
  Synthetic
caagcagcuaggaguuccgcagu

SEQ ID NO: 36607 - RNA, 24 nt, Artificial Sequence
  Synthetic
acaagcagcuaggaguuccgcagu

SEQ ID NO: 36608 - RNA, 20 nt, Artificial Sequence
  Synthetic
aggacgacagaauugucagu

SEQ ID NO: 36609 - RNA, 21 nt, Artificial Sequence
  Synthetic
aaggacgacagaauugucagu

SEQ ID NO: 36610 - RNA, 22 nt, Artificial Sequence
  Synthetic
aaaggacgacagaauugucagu

SEQ ID NO: 36611 - RNA, 24 nt, Artificial Sequence
  Synthetic
agaaaggacgacagaauugucagu

SEQ ID NO: 36612 - RNA, 21 nt, Artificial Sequence
  Synthetic
uggucuauaagcaggaggagu

SEQ ID NO: 36613 - RNA, 24 nt, Artificial Sequence
  Synthetic
ugguggucuauaagcaggaggagu

SEQ ID NO: 36614 - RNA, 21 nt, Artificial Sequence
  Synthetic
cacaaauuguucacauuuagu

SEQ ID NO: 36615 - RNA, 22 nt, Artificial Sequence
  Synthetic
ccacaaauuguucacauuuagu

SEQ ID NO: 36616 - RNA, 23 nt, Artificial Sequence
  Synthetic
cccacaaauuguucacauuuagu

SEQ ID NO: 36617 - RNA, 19 nt, Artificial Sequence
  Synthetic
agguuuugcagggucccgu

SEQ ID NO: 36618 - RNA, 20 nt, Artificial Sequence
  Synthetic
cagguuuugcagggucccgu

SEQ ID NO: 36619 - RNA, 22 nt, Artificial Sequence
  Synthetic
ugcagguuuugcagggucccgu

SEQ ID NO: 36620 - RNA, 24 nt, Artificial Sequence
  Synthetic
cgugcagguuuugcagggucccgu

SEQ ID NO: 36621 - RNA, 19 nt, Artificial Sequence
  Synthetic
ugccuugagcaggagucgu

SEQ ID NO: 36622 - RNA, 20 nt, Artificial Sequence
  Synthetic
uugccuugagcaggagucgu

SEQ ID NO: 36623 - RNA, 22 nt, Artificial Sequence
  Synthetic
aguugccuugagcaggagucgu

SEQ ID NO: 36624 - RNA, 24 nt, Artificial Sequence
  Synthetic
agaguugccuugagcaggagucgu

SEQ ID NO: 36625 - RNA, 22 nt, Artificial Sequence
  Synthetic
agucuagacucugcgguauugu

SEQ ID NO: 36626 - RNA, 24 nt, Artificial Sequence
  Synthetic
cgagucuagacucugcgguauugu

SEQ ID NO: 36627 - RNA, 21 nt, Artificial Sequence
  Synthetic
ccgagaaaggacgacagaauu

SEQ ID NO: 36628 - RNA, 22 nt, Artificial Sequence
  Synthetic
uccgagaaaggacgacagaauu

SEQ ID NO: 36629 - RNA, 23 nt, Artificial Sequence
  Synthetic
uuccgagaaaggacgacagaauu

SEQ ID NO: 36630 - RNA, 24 nt, Artificial Sequence
  Synthetic
uuuccgagaaaggacgacagaauu

SEQ ID NO: 36631 - RNA, 22 nt, Artificial Sequence
  Synthetic
ugaucagaggacucuaaggauu

SEQ ID NO: 36632 - RNA, 23 nt, Artificial Sequence
  Synthetic
augaucagaggacucuaaggauu

SEQ ID NO: 36633 - RNA, 24 nt, Artificial Sequence
  Synthetic
aaugaucagaggacucuaaggauu

SEQ ID NO: 36634 - RNA, 22 nt, Artificial Sequence
  Synthetic
cgggaaggaauccuagaggauu

SEQ ID NO: 36635 - RNA, 23 nt, Artificial Sequence
  Synthetic
ucgggaaggaauccuagaggauu

SEQ ID NO: 36636 - RNA, 24 nt, Artificial Sequence
  Synthetic
aucgggaaggaauccuagaggauu

SEQ ID NO: 36637 - RNA, 21 nt, Artificial Sequence
  Synthetic
auugaagucccaaucuggauu

SEQ ID NO: 36638 - RNA, 21 nt, Artificial Sequence
  Synthetic
acaggagauuggugagugauu

SEQ ID NO: 36639 - RNA, 24 nt, Artificial Sequence
  Synthetic
aggacaggagauuggugagugauu

SEQ ID NO: 36640 - RNA, 21 nt, Artificial Sequence
  Synthetic
caguuauucguugacagacuu

SEQ ID NO: 36641 - RNA, 22 nt, Artificial Sequence
  Synthetic
ccaguuauucguugacagacuu

SEQ ID NO: 36642 - RNA, 23 nt, Artificial Sequence
  Synthetic
accaguuauucguugacagacuu

SEQ ID NO: 36643 - RNA, 21 nt, Artificial Sequence
  Synthetic
ccccguaaaguuucccaccuu

SEQ ID NO: 36644 - RNA, 23 nt, Artificial Sequence
  Synthetic
agccccguaaaguuucccaccuu

SEQ ID NO: 36645 - RNA, 24 nt, Artificial Sequence
  Synthetic
cagccccguaaaguuucccaccuu

SEQ ID NO: 36646 - RNA, 18 nt, Artificial Sequence
  Synthetic
aaacgggcaacauaccuu

SEQ ID NO: 36647 - RNA, 19 nt, Artificial Sequence
  Synthetic
caaacgggcaacauaccuu

SEQ ID NO: 36648 - RNA, 20 nt, Artificial Sequence
  Synthetic
acaaacgggcaacauaccuu

SEQ ID NO: 36649 - RNA, 23 nt, Artificial Sequence
  Synthetic
uggccugaggaugacugucucuu

SEQ ID NO: 36650 - RNA, 24 nt, Artificial Sequence
  Synthetic
auggccugaggaugacugucucuu

SEQ ID NO: 36651 - RNA, 19 nt, Artificial Sequence
  Synthetic
cggaucugcuggcaaaguu

SEQ ID NO: 36652 - RNA, 22 nt, Artificial Sequence
  Synthetic
aggcggaucugcuggcaaaguu

SEQ ID NO: 36653 - RNA, 19 nt, Artificial Sequence
  Synthetic
ugauaggauaggggcauuu

SEQ ID NO: 36654 - RNA, 20 nt, Artificial Sequence
  Synthetic
uugauaggauaggggcauuu

SEQ ID NO: 36655 - RNA, 22 nt, Artificial Sequence
  Synthetic
uguugauaggauaggggcauuu

SEQ ID NO: 36656 - RNA, 24 nt, Artificial Sequence
  Synthetic
aguguugauaggauaggggcauuu

SEQ ID NO: 36657 - RNA, 21 nt, Artificial Sequence
  Synthetic
ccucuggccaaggguccuuuu

SEQ ID NO: 36658 - RNA, 24 nt, Artificial Sequence
  Synthetic
uggccucuggccaaggguccuuuu

SEQ ID NO: 36659 - RNA, 19 nt, Artificial Sequence
  Synthetic
cgcugcuccuuuuacccaa

SEQ ID NO: 36660 - RNA, 20 nt, Artificial Sequence
  Synthetic
ucgcugcuccuuuuacccaa

SEQ ID NO: 36661 - RNA, 21 nt, Artificial Sequence
  Synthetic
uucgcugcuccuuuuacccaa

SEQ ID NO: 36662 - RNA, 22 nt, Artificial Sequence
  Synthetic
uuucgcugcuccuuuuacccaa

SEQ ID NO: 36663 - RNA, 23 nt, Artificial Sequence
  Synthetic
uggcugcuaggcugugcugccaa

SEQ ID NO: 36664 - RNA, 24 nt, Artificial Sequence
  Synthetic
auggcugcuaggcugugcugccaa

SEQ ID NO: 36665 - RNA, 21 nt, Artificial Sequence
  Synthetic
acaccucucaucaucugccaa

SEQ ID NO: 36666 - RNA, 22 nt, Artificial Sequence
  Synthetic
aacaccucucaucaucugccaa

SEQ ID NO: 36667 - RNA, 24 nt, Artificial Sequence
  Synthetic
ugaacaccucucaucaucugccaa

SEQ ID NO: 36668 - RNA, 22 nt, Artificial Sequence
  Synthetic
ugggucaccauauacuugggaa

SEQ ID NO: 36669 - RNA, 24 nt, Artificial Sequence
  Synthetic
ugugggucaccauauacuugggaa

SEQ ID NO: 36670 - RNA, 21 nt, Artificial Sequence
  Synthetic
auuaggaggcuguaggcauaa

SEQ ID NO: 36671 - RNA, 22 nt, Artificial Sequence
  Synthetic
uauuaggaggcuguaggcauaa

SEQ ID NO: 36672 - RNA, 24 nt, Artificial Sequence
  Synthetic
uguauuaggaggcuguaggcauaa

SEQ ID NO: 36673 - RNA, 21 nt, Artificial Sequence
  Synthetic
acuccuccugcuuauagacca

SEQ ID NO: 36674 - RNA, 22 nt, Artificial Sequence
  Synthetic
cacuccuccugcuuauagacca

SEQ ID NO: 36675 - RNA, 24 nt, Artificial Sequence
  Synthetic
cgcacuccuccugcuuauagacca

SEQ ID NO: 36676 - RNA, 22 nt, Artificial Sequence
  Synthetic
agagacagucauccucaggcca

SEQ ID NO: 36677 - RNA, 23 nt, Artificial Sequence
  Synthetic
aagagacagucauccucaggcca

SEQ ID NO: 36678 - RNA, 24 nt, Artificial Sequence
  Synthetic
uaagagacagucauccucaggcca

SEQ ID NO: 36679 - RNA, 18 nt, Artificial Sequence
  Synthetic
acacuaacaacuuugcca

SEQ ID NO: 36680 - RNA, 19 nt, Artificial Sequence
  Synthetic
cacacuaacaacuuugcca

SEQ ID NO: 36681 - RNA, 23 nt, Artificial Sequence
  Synthetic
agggcacacuaacaacuuugcca

SEQ ID NO: 36682 - RNA, 24 nt, Artificial Sequence
  Synthetic
cagggcacacuaacaacuuugcca

SEQ ID NO: 36683 - RNA, 22 nt, Artificial Sequence
  Synthetic
agguaucaaaccguauuaucca

SEQ ID NO: 36684 - RNA, 23 nt, Artificial Sequence
  Synthetic
aagguaucaaaccguauuaucca

SEQ ID NO: 36685 - RNA, 24 nt, Artificial Sequence
  Synthetic
aaagguaucaaaccguauuaucca

SEQ ID NO: 36686 - RNA, 18 nt, Artificial Sequence
  Synthetic
cucaaucgccgcgucgca

SEQ ID NO: 36687 - RNA, 19 nt, Artificial Sequence
  Synthetic
ucucaaucgccgcgucgca

SEQ ID NO: 36688 - RNA, 20 nt, Artificial Sequence
  Synthetic
aucucaaucgccgcgucgca

SEQ ID NO: 36689 - RNA, 21 nt, Artificial Sequence
  Synthetic
ucaccauacagcacucaggca

SEQ ID NO: 36690 - RNA, 22 nt, Artificial Sequence
  Synthetic
cucaccauacagcacucaggca

SEQ ID NO: 36691 - RNA, 23 nt, Artificial Sequence
  Synthetic
ccucaccauacagcacucaggca

SEQ ID NO: 36692 - RNA, 21 nt, Artificial Sequence
  Synthetic
cugagugggaagaauuaggca

SEQ ID NO: 36693 - RNA, 23 nt, Artificial Sequence
  Synthetic
ugcugagugggaagaauuaggca

SEQ ID NO: 36694 - RNA, 24 nt, Artificial Sequence
  Synthetic
uugcugagugggaagaauuaggca

SEQ ID NO: 36695 - RNA, 21 nt, Artificial Sequence
  Synthetic
uguuaguauuccuuggacuca

SEQ ID NO: 36696 - RNA, 22 nt, Artificial Sequence
  Synthetic
auguuaguauuccuuggacuca

SEQ ID NO: 36697 - RNA, 23 nt, Artificial Sequence
  Synthetic
aauguuaguauuccuuggacuca

SEQ ID NO: 36698 - RNA, 24 nt, Artificial Sequence
  Synthetic
caauguuaguauuccuuggacuca

SEQ ID NO: 36699 - RNA, 21 nt, Artificial Sequence
  Synthetic
cccaucucuccaccacuaaga

SEQ ID NO: 36700 - RNA, 22 nt, Artificial Sequence
  Synthetic
ucccaucucuccaccacuaaga

SEQ ID NO: 36701 - RNA, 23 nt, Artificial Sequence
  Synthetic
cucccaucucuccaccacuaaga

SEQ ID NO: 36702 - RNA, 24 nt, Artificial Sequence
  Synthetic
acucccaucucuccaccacuaaga

SEQ ID NO: 36703 - RNA, 22 nt, Artificial Sequence
  Synthetic
uggaagauccagcauccagaga

SEQ ID NO: 36704 - RNA, 23 nt, Artificial Sequence
  Synthetic
uuggaagauccagcauccagaga

SEQ ID NO: 36705 - RNA, 24 nt, Artificial Sequence
  Synthetic
uuuggaagauccagcauccagaga

SEQ ID NO: 36706 - RNA, 21 nt, Artificial Sequence
  Synthetic
ccagauuuuucccaaacucua

SEQ ID NO: 36707 - RNA, 23 nt, Artificial Sequence
  Synthetic
ugccagauuuuucccaaacucua

SEQ ID NO: 36708 - RNA, 24 nt, Artificial Sequence
  Synthetic
cugccagauuuuucccaaacucua

SEQ ID NO: 36709 - RNA, 24 nt, Artificial Sequence
  Synthetic
ugggagagaaaccguucuugagua

SEQ ID NO: 36710 - RNA, 21 nt, Artificial Sequence
  Synthetic
cuuauaaggccuuucucugua

SEQ ID NO: 36711 - RNA, 22 nt, Artificial Sequence
  Synthetic
acuuauaaggccuuucucugua

SEQ ID NO: 36712 - RNA, 23 nt, Artificial Sequence
  Synthetic
aacuuauaaggccuuucucugua

SEQ ID NO: 36713 - RNA, 24 nt, Artificial Sequence
  Synthetic
caacuuauaaggccuuucucugua

SEQ ID NO: 36714 - RNA, 19 nt, Artificial Sequence
  Synthetic
cggggcgcaccucucuuua

SEQ ID NO: 36715 - RNA, 20 nt, Artificial Sequence
  Synthetic
acggggcgcaccucucuuua

SEQ ID NO: 36716 - RNA, 21 nt, Artificial Sequence
  Synthetic
cacggggcgcaccucucuuua

SEQ ID NO: 36717 - RNA, 22 nt, Artificial Sequence
  Synthetic
ccacggggcgcaccucucuuua

SEQ ID NO: 36718 - RNA, 23 nt, Artificial Sequence
  Synthetic
accacggggcgcaccucucuuua

SEQ ID NO: 36719 - RNA, 22 nt, Artificial Sequence
  Synthetic
ugggguuauuccuuaaauuuua

SEQ ID NO: 36720 - RNA, 23 nt, Artificial Sequence
  Synthetic
augggguuauuccuuaaauuuua

SEQ ID NO: 36721 - RNA, 21 nt, Artificial Sequence
  Synthetic
uggguuucgcugcuccuuuua

SEQ ID NO: 36722 - RNA, 22 nt, Artificial Sequence
  Synthetic
uuggguuucgcugcuccuuuua

SEQ ID NO: 36723 - RNA, 24 nt, Artificial Sequence
  Synthetic
uguuggguuucgcugcuccuuuua

SEQ ID NO: 36724 - RNA, 21 nt, Artificial Sequence
  Synthetic
cucucacaguaaaugagaaac

SEQ ID NO: 36725 - RNA, 22 nt, Artificial Sequence
  Synthetic
ccucucacaguaaaugagaaac

SEQ ID NO: 36726 - RNA, 23 nt, Artificial Sequence
  Synthetic
cccucucacaguaaaugagaaac

SEQ ID NO: 36727 - RNA, 18 nt, Artificial Sequence
  Synthetic
cucccucgccucgcagac

SEQ ID NO: 36728 - RNA, 19 nt, Artificial Sequence
  Synthetic
acucccucgccucgcagac

SEQ ID NO: 36729 - RNA, 20 nt, Artificial Sequence
  Synthetic
aacucccucgccucgcagac

SEQ ID NO: 36730 - RNA, 22 nt, Artificial Sequence
  Synthetic
agaacucccucgccucgcagac

SEQ ID NO: 36731 - RNA, 23 nt, Artificial Sequence
  Synthetic
aagaacucccucgccucgcagac

SEQ ID NO: 36732 - RNA, 21 nt, Artificial Sequence
  Synthetic
ugcuguacaaaaccuucggac

SEQ ID NO: 36733 - RNA, 22 nt, Artificial Sequence
  Synthetic
uugcuguacaaaaccuucggac

SEQ ID NO: 36734 - RNA, 24 nt, Artificial Sequence
  Synthetic
uguugcuguacaaaaccuucggac

SEQ ID NO: 36735 - RNA, 21 nt, Artificial Sequence
  Synthetic
accaacaauccagauugggac

SEQ ID NO: 36736 - RNA, 22 nt, Artificial Sequence
  Synthetic
uaccaacaauccagauugggac

SEQ ID NO: 36737 - RNA, 23 nt, Artificial Sequence
  Synthetic
auaccaacaauccagauugggac

SEQ ID NO: 36738 - RNA, 24 nt, Artificial Sequence
  Synthetic
aauaccaacaauccagauugggac

SEQ ID NO: 36739 - RNA, 21 nt, Artificial Sequence
  Synthetic
uaggaguuggagccuauggac

SEQ ID NO: 36740 - RNA, 24 nt, Artificial Sequence
  Synthetic
agguaggaguuggagccuauggac

SEQ ID NO: 36741 - RNA, 19 nt, Artificial Sequence
  Synthetic
cgggguuuuucuuguugac

SEQ ID NO: 36742 - RNA, 22 nt, Artificial Sequence
  Synthetic
aggcgggguuuuucuuguugac

SEQ ID NO: 36743 - RNA, 23 nt, Artificial Sequence
  Synthetic
caggcgggguuuuucuuguugac

SEQ ID NO: 36744 - RNA, 24 nt, Artificial Sequence
  Synthetic
acaggcgggguuuuucuuguugac

SEQ ID NO: 36745 - RNA, 21 nt, Artificial Sequence
  Synthetic
cuaaauucgcaguccccaacc

SEQ ID NO: 36746 - RNA, 22 nt, Artificial Sequence
  Synthetic
ccuaaauucgcaguccccaacc

SEQ ID NO: 36747 - RNA, 18 nt, Artificial Sequence
  Synthetic
auuccaggauccucgacc

SEQ ID NO: 36748 - RNA, 20 nt, Artificial Sequence
  Synthetic
ugauuccaggauccucgacc

SEQ ID NO: 36749 - RNA, 21 nt, Artificial Sequence
  Synthetic
cugauuccaggauccucgacc

SEQ ID NO: 36750 - RNA, 22 nt, Artificial Sequence
  Synthetic
ucugauuccaggauccucgacc

SEQ ID NO: 36751 - RNA, 23 nt, Artificial Sequence
  Synthetic
cucugauuccaggauccucgacc

SEQ ID NO: 36752 - RNA, 24 nt, Artificial Sequence
  Synthetic
ccucugauuccaggauccucgacc

SEQ ID NO: 36753 - RNA, 21 nt, Artificial Sequence
  Synthetic
ccagcauucagagcaaauacc

SEQ ID NO: 36754 - RNA, 22 nt, Artificial Sequence
  Synthetic
cccagcauucagagcaaauacc

SEQ ID NO: 36755 - RNA, 23 nt, Artificial Sequence
  Synthetic
acccagcauucagagcaaauacc

SEQ ID NO: 36756 - RNA, 21 nt, Artificial Sequence
  Synthetic
acaccgcuucagcuuuguacc

SEQ ID NO: 36757 - RNA, 23 nt, Artificial Sequence
  Synthetic
cgacaccgcuucagcuuuguacc

SEQ ID NO: 36758 - RNA, 24 nt, Artificial Sequence
  Synthetic
ucgacaccgcuucagcuuuguacc

SEQ ID NO: 36759 - RNA, 22 nt, Artificial Sequence
  Synthetic
aguguuugcugacgcaaccccc

SEQ ID NO: 36760 - RNA, 23 nt, Artificial Sequence
  Synthetic
aaguguuugcugacgcaaccccc

SEQ ID NO: 36761 - RNA, 24 nt, Artificial Sequence
  Synthetic
caaguguuugcugacgcaaccccc

SEQ ID NO: 36762 - RNA, 23 nt, Artificial Sequence
  Synthetic
cggaggccuuuugggguggagcc

SEQ ID NO: 36763 - RNA, 24 nt, Artificial Sequence
  Synthetic
acggaggccuuuugggguggagcc

SEQ ID NO: 36764 - RNA, 21 nt, Artificial Sequence
  Synthetic
uucaagccuccaagcugugcc

SEQ ID NO: 36765 - RNA, 23 nt, Artificial Sequence
  Synthetic
uguucaagccuccaagcugugcc

SEQ ID NO: 36766 - RNA, 24 nt, Artificial Sequence
  Synthetic
cuguucaagccuccaagcugugcc

SEQ ID NO: 36767 - RNA, 21 nt, Artificial Sequence
  Synthetic
agguauguugcccguuugucc

SEQ ID NO: 36768 - RNA, 22 nt, Artificial Sequence
  Synthetic
aagguauguugcccguuugucc

SEQ ID NO: 36769 - RNA, 23 nt, Artificial Sequence
  Synthetic
caagguauguugcccguuugucc

SEQ ID NO: 36770 - RNA, 24 nt, Artificial Sequence
  Synthetic
ucaagguauguugcccguuugucc

SEQ ID NO: 36771 - RNA, 21 nt, Artificial Sequence
  Synthetic
uuguauuaggaggcuguaggc

SEQ ID NO: 36772 - RNA, 22 nt, Artificial Sequence
  Synthetic
uuuguauuaggaggcuguaggc

SEQ ID NO: 36773 - RNA, 23 nt, Artificial Sequence
  Synthetic
cuuuguauuaggaggcuguaggc

SEQ ID NO: 36774 - RNA, 24 nt, Artificial Sequence
  Synthetic
ccuuuguauuaggaggcuguaggc

SEQ ID NO: 36775 - RNA, 21 nt, Artificial Sequence
  Synthetic
ugccuuggguggcuuuagggc

SEQ ID NO: 36776 - RNA, 23 nt, Artificial Sequence
  Synthetic
ugugccuuggguggcuuuagggc

SEQ ID NO: 36777 - RNA, 24 nt, Artificial Sequence
  Synthetic
cugugccuuggguggcuuuagggc

SEQ ID NO: 36778 - RNA, 21 nt, Artificial Sequence
  Synthetic
aaaauaccuaugggagugggc

SEQ ID NO: 36779 - RNA, 22 nt, Artificial Sequence
  Synthetic
caaaauaccuaugggagugggc

SEQ ID NO: 36780 - RNA, 24 nt, Artificial Sequence
  Synthetic
cgcaaaauaccuaugggagugggc

SEQ ID NO: 36781 - RNA, 18 nt, Artificial Sequence
  Synthetic
ccaaugugguuacccugc

SEQ ID NO: 36782 - RNA, 19 nt, Artificial Sequence
  Synthetic
cccaaugugguuacccugc

SEQ ID NO: 36783 - RNA, 20 nt, Artificial Sequence
  Synthetic
acccaaugugguuacccugc

SEQ ID NO: 36784 - RNA, 21 nt, Artificial Sequence
  Synthetic
uacccaaugugguuacccugc

SEQ ID NO: 36785 - RNA, 22 nt, Artificial Sequence
  Synthetic
uuacccaaugugguuacccugc

SEQ ID NO: 36786 - RNA, 23 nt, Artificial Sequence
  Synthetic
uuuacccaaugugguuacccugc

SEQ ID NO: 36787 - RNA, 24 nt, Artificial Sequence
  Synthetic
uuuuacccaaugugguuacccugc

SEQ ID NO: 36788 - RNA, 21 nt, Artificial Sequence
  Synthetic
  misc_feature (15)..(15): n is a, c, g, or u
cucaggcaagcaauncugugc

SEQ ID NO: 36789 - RNA, 22 nt, Artificial Sequence
  Synthetic
  misc_feature (16)..(16): n is a, c, g, or u
acucaggcaagcaauncugugc

SEQ ID NO: 36790 - RNA, 23 nt, Artificial Sequence
  Synthetic
  misc_feature (17)..(17): n is a, c, g, or u
cacucaggcaagcaauncugugc

SEQ ID NO: 36791 - RNA, 21 nt, Artificial Sequence
  Synthetic
cgccuccugccuccaccaauc

SEQ ID NO: 36792 - RNA, 22 nt, Artificial Sequence
  Synthetic
ccgccuccugccuccaccaauc

SEQ ID NO: 36793 - RNA, 23 nt, Artificial Sequence
  Synthetic
uccgccuccugccuccaccaauc

SEQ ID NO: 36794 - RNA, 24 nt, Artificial Sequence
  Synthetic
auccgccuccugccuccaccaauc

SEQ ID NO: 36795 - RNA, 24 nt, Artificial Sequence
  Synthetic
ugggggccaaaucuguacaacauc

SEQ ID NO: 36796 - RNA, 21 nt, Artificial Sequence
  Synthetic
cucuaggauuccuucccgauc

SEQ ID NO: 36797 - RNA, 22 nt, Artificial Sequence
  Synthetic
ccucuaggauuccuucccgauc

SEQ ID NO: 36798 - RNA, 23 nt, Artificial Sequence
  Synthetic
uccucuaggauuccuucccgauc

SEQ ID NO: 36799 - RNA, 24 nt, Artificial Sequence
  Synthetic
auccucuaggauuccuucccgauc

SEQ ID NO: 36800 - RNA, 24 nt, Artificial Sequence
  Synthetic
uggggcuuucuuggacggucccuc

SEQ ID NO: 36801 - RNA, 21 nt, Artificial Sequence
  Synthetic
accuuuccaccagcaauccuc

SEQ ID NO: 36802 - RNA, 22 nt, Artificial Sequence
  Synthetic
aaccuuuccaccagcaauccuc

SEQ ID NO: 36803 - RNA, 24 nt, Artificial Sequence
  Synthetic
agaaccuuuccaccagcaauccuc

SEQ ID NO: 36804 - RNA, 22 nt, Artificial Sequence
  Synthetic
cgacuauugccucucacaucuc

SEQ ID NO: 36805 - RNA, 23 nt, Artificial Sequence
  Synthetic
ccgacuauugccucucacaucuc

SEQ ID NO: 36806 - RNA, 24 nt, Artificial Sequence
  Synthetic
uccgacuauugccucucacaucuc

SEQ ID NO: 36807 - RNA, 21 nt, Artificial Sequence
  Synthetic
ucacaucucgucaaucuucuc

SEQ ID NO: 36808 - RNA, 22 nt, Artificial Sequence
  Synthetic
cucacaucucgucaaucuucuc

SEQ ID NO: 36809 - RNA, 23 nt, Artificial Sequence
  Synthetic
ucucacaucucgucaaucuucuc

SEQ ID NO: 36810 - RNA, 24 nt, Artificial Sequence
  Synthetic
cucucacaucucgucaaucuucuc

SEQ ID NO: 36811 - RNA, 21 nt, Artificial Sequence
  Synthetic
acaauucugucguccuuucuc

SEQ ID NO: 36812 - RNA, 23 nt, Artificial Sequence
  Synthetic
ugacaauucugucguccuuucuc

SEQ ID NO: 36813 - RNA, 24 nt, Artificial Sequence
  Synthetic
cugacaauucugucguccuuucuc

SEQ ID NO: 36814 - RNA, 21 nt, Artificial Sequence
  Synthetic
ucggaaacucccuguuaacag

SEQ ID NO: 36815 - RNA, 22 nt, Artificial Sequence
  Synthetic
uucggaaacucccuguuaacag

SEQ ID NO: 36816 - RNA, 23 nt, Artificial Sequence
  Synthetic
uuucggaaacucccuguuaacag

SEQ ID NO: 36817 - RNA, 24 nt, Artificial Sequence
  Synthetic
uuuucggaaacucccuguuaacag

SEQ ID NO: 36818 - RNA, 21 nt, Artificial Sequence
  Synthetic
agaauuaggcaaugaguccag

SEQ ID NO: 36819 - RNA, 22 nt, Artificial Sequence
  Synthetic
aagaauuaggcaaugaguccag

SEQ ID NO: 36820 - RNA, 18 nt, Artificial Sequence
  Synthetic
agaauccucacaauaccg

SEQ ID NO: 36821 - RNA, 19 nt, Artificial Sequence
  Synthetic
aagaauccucacaauaccg

SEQ ID NO: 36822 - RNA, 20 nt, Artificial Sequence
  Synthetic
caagaauccucacaauaccg

SEQ ID NO: 36823 - RNA, 21 nt, Artificial Sequence
  Synthetic
acaagaauccucacaauaccg

SEQ ID NO: 36824 - RNA, 23 nt, Artificial Sequence
  Synthetic
ugacaagaauccucacaauaccg

SEQ ID NO: 36825 - RNA, 24 nt, Artificial Sequence
  Synthetic
uugacaagaauccucacaauaccg

SEQ ID NO: 36826 - RNA, 19 nt, Artificial Sequence
  Synthetic
uguuuacgucccgucagcg

SEQ ID NO: 36827 - RNA, 20 nt, Artificial Sequence
  Synthetic
uuguuuacgucccgucagcg

SEQ ID NO: 36828 - RNA, 21 nt, Artificial Sequence
  Synthetic
uuuguuuacgucccgucagcg

SEQ ID NO: 36829 - RNA, 22 nt, Artificial Sequence
  Synthetic
cuuuguuuacgucccgucagcg

SEQ ID NO: 36830 - RNA, 23 nt, Artificial Sequence
  Synthetic
ccuuuguuuacgucccgucagcg

SEQ ID NO: 36831 - RNA, 24 nt, Artificial Sequence
  Synthetic
uccuuuguuuacgucccgucagcg

SEQ ID NO: 36832 - RNA, 18 nt, Artificial Sequence
  Synthetic
aacuuguccuggcuaucg

SEQ ID NO: 36833 - RNA, 19 nt, Artificial Sequence
  Synthetic
caacuuguccuggcuaucg

SEQ ID NO: 36834 - RNA, 20 nt, Artificial Sequence
  Synthetic
ccaacuuguccuggcuaucg

SEQ ID NO: 36835 - RNA, 18 nt, Artificial Sequence
  Synthetic
caucaucuugggcuuucg

SEQ ID NO: 36836 - RNA, 19 nt, Artificial Sequence
  Synthetic
ccaucaucuugggcuuucg

SEQ ID NO: 36837 - RNA, 20 nt, Artificial Sequence
  Synthetic
cccaucaucuugggcuuucg

SEQ ID NO: 36838 - RNA, 21 nt, Artificial Sequence
  Synthetic
ucccaucaucuugggcuuucg

SEQ ID NO: 36839 - RNA, 22 nt, Artificial Sequence
  Synthetic
aucccaucaucuugggcuuucg

SEQ ID NO: 36840 - RNA, 23 nt, Artificial Sequence
  Synthetic
caucccaucaucuugggcuuucg

SEQ ID NO: 36841 - RNA, 24 nt, Artificial Sequence
  Synthetic
ccaucccaucaucuugggcuuucg

SEQ ID NO: 36842 - RNA, 23 nt, Artificial Sequence
  Synthetic
aggaccccugcucguguuacagg

SEQ ID NO: 36843 - RNA, 24 nt, Artificial Sequence
  Synthetic
uaggaccccugcucguguuacagg

SEQ ID NO: 36844 - RNA, 21 nt, Artificial Sequence
  Synthetic
ugcugguggcuccaguucagg

SEQ ID NO: 36845 - RNA, 22 nt, Artificial Sequence
  Synthetic
cugcugguggcuccaguucagg

SEQ ID NO: 36846 - RNA, 23 nt, Artificial Sequence
  Synthetic
ccugcugguggcuccaguucagg

SEQ ID NO: 36847 - RNA, 24 nt, Artificial Sequence
  Synthetic
uccugcugguggcuccaguucagg

SEQ ID NO: 36848 - RNA, 21 nt, Artificial Sequence
  Synthetic
  misc_feature (6)..(6): n is a, c, g, or u
uacccnguugcuaggcaacgg

SEQ ID NO: 36849 - RNA, 22 nt, Artificial Sequence
  Synthetic
  misc_feature (7)..(7): n is a, c, g, or u
uuacccnguugcuaggcaacgg

SEQ ID NO: 36850 - RNA, 23 nt, Artificial Sequence
  Synthetic
  misc_feature (8)..(8): n is a, c, g, or u
uuuacccnguugcuaggcaacgg

SEQ ID NO: 36851 - RNA, 24 nt, Artificial Sequence
  Synthetic
  misc_feature (9)..(9): n is a, c, g, or u
cuuuacccnguugcuaggcaacgg

SEQ ID NO: 36852 - RNA, 21 nt, Artificial Sequence
  Synthetic
  misc_feature (15)..(15): n is a, c, g, or u
uugaugacucuagcnaccugg

SEQ ID NO: 36853 - RNA, 23 nt, Artificial Sequence
  Synthetic
  misc_feature (17)..(17): n is a, c, g, or u
aguugaugacucuagcnaccugg

SEQ ID NO: 36854 - RNA, 21 nt, Artificial Sequence
  Synthetic
  misc_feature (18)..(18): n is a, c, g, or u
uuaugucaacaaccgggnugg

SEQ ID NO: 36855 - RNA, 23 nt, Artificial Sequence
  Synthetic
  misc_feature (20)..(20): n is a, c, g, or u
uguuaugucaacaaccgggnugg

SEQ ID NO: 36856 - RNA, 24 nt, Artificial Sequence
  Synthetic
  misc_feature (21)..(21): n is a, c, g, or u
uuguuaugucaacaaccgggnugg

SEQ ID NO: 36857 - RNA, 18 nt, Artificial Sequence
  Synthetic
ucaguccguuucucuugg

SEQ ID NO: 36858 - RNA, 19 nt, Artificial Sequence
  Synthetic
cucaguccguuucucuugg

SEQ ID NO: 36859 - RNA, 20 nt, Artificial Sequence
  Synthetic
ccucaguccguuucucuugg

SEQ ID NO: 36860 - RNA, 24 nt, Artificial Sequence
  Synthetic
ugggccucaguccguuucucuugg

SEQ ID NO: 36861 - RNA, 22 nt, Artificial Sequence
  Synthetic
agauuaaaacuaguuaugccug

SEQ ID NO: 36862 - RNA, 23 nt, Artificial Sequence
  Synthetic
aagauuaaaacuaguuaugccug

SEQ ID NO: 36863 - RNA, 21 nt, Artificial Sequence
  Synthetic
ugucaacgaauaacuggucug

SEQ ID NO: 36864 - RNA, 22 nt, Artificial Sequence
  Synthetic
cugucaacgaauaacuggucug

SEQ ID NO: 36865 - RNA, 23 nt, Artificial Sequence
  Synthetic
ucugucaacgaauaacuggucug

SEQ ID NO: 36866 - RNA, 21 nt, Artificial Sequence
  Synthetic
  misc_feature (12)..(12): n is a, c, g, or u
augacucuagcnaccugggug

SEQ ID NO: 36867 - RNA, 23 nt, Artificial Sequence
  Synthetic
  misc_feature (14)..(14): n is a, c, g, or u
ugaugacucuagcnaccugggug

SEQ ID NO: 36868 - RNA, 24 nt, Artificial Sequence
  Synthetic
  misc_feature (15)..(15): n is a, c, g, or u
uugaugacucuagcnaccugggug

SEQ ID NO: 36869 - RNA, 21 nt, Artificial Sequence
  Synthetic
ccagcauccagagauuuggug

SEQ ID NO: 36870 - RNA, 22 nt, Artificial Sequence
  Synthetic
uccagcauccagagauuuggug

SEQ ID NO: 36871 - RNA, 23 nt, Artificial Sequence
  Synthetic
auccagcauccagagauuuggug

SEQ ID NO: 36872 - RNA, 20 nt, Artificial Sequence
  Synthetic
aggcaacggcccggucugug

SEQ ID NO: 36873 - RNA, 21 nt, Artificial Sequence
  Synthetic
uaggcaacggcccggucugug

SEQ ID NO: 36874 - RNA, 22 nt, Artificial Sequence
  Synthetic
cuaggcaacggcccggucugug

SEQ ID NO: 36875 - RNA, 24 nt, Artificial Sequence
  Synthetic
ugcuaggcaacggcccggucugug

SEQ ID NO: 36876 - RNA, 21 nt, Artificial Sequence
  Synthetic
uguuaacaggccaauugauug

SEQ ID NO: 36877 - RNA, 22 nt, Artificial Sequence
  Synthetic
cuguuaacaggccaauugauug

SEQ ID NO: 36878 - RNA, 23 nt, Artificial Sequence
  Synthetic
ccuguuaacaggccaauugauug

SEQ ID NO: 36879 - RNA, 24 nt, Artificial Sequence
  Synthetic
cccuguuaacaggccaauugauug

SEQ ID NO: 36880 - RNA, 21 nt, Artificial Sequence
  Synthetic
cuacagcauggggcuuucuug

SEQ ID NO: 36881 - RNA, 22 nt, Artificial Sequence
  Synthetic
ucuacagcauggggcuuucuug

SEQ ID NO: 36882 - RNA, 23 nt, Artificial Sequence
  Synthetic
aucuacagcauggggcuuucuug

SEQ ID NO: 36883 - RNA, 23 nt, Artificial Sequence
  Synthetic
uggucaauuauguuaauacuaau

SEQ ID NO: 36884 - RNA, 21 nt, Artificial Sequence
  Synthetic
uugguggucaauuauguuaau

SEQ ID NO: 36885 - RNA, 22 nt, Artificial Sequence
  Synthetic
uuugguggucaauuauguuaau

SEQ ID NO: 36886 - RNA, 23 nt, Artificial Sequence
  Synthetic
auuugguggucaauuauguuaau

SEQ ID NO: 36887 - RNA, 21 nt, Artificial Sequence
  Synthetic
ucuacuauaccugucuuuaau

SEQ ID NO: 36888 - RNA, 22 nt, Artificial Sequence
  Synthetic
uucuacuauaccugucuuuaau

SEQ ID NO: 36889 - RNA, 23 nt, Artificial Sequence
  Synthetic
cuucuacuauaccugucuuuaau

SEQ ID NO: 36890 - RNA, 24 nt, Artificial Sequence
  Synthetic
ucuucuacuauaccugucuuuaau

SEQ ID NO: 36891 - RNA, 21 nt, Artificial Sequence
  Synthetic
cgaacauggagaacaucacau

SEQ ID NO: 36892 - RNA, 22 nt, Artificial Sequence
  Synthetic
ccgaacauggagaacaucacau

SEQ ID NO: 36893 - RNA, 23 nt, Artificial Sequence
  Synthetic
accgaacauggagaacaucacau

SEQ ID NO: 36894 - RNA, 24 nt, Artificial Sequence
  Synthetic
caccgaacauggagaacaucacau

SEQ ID NO: 36895 - RNA, 18 nt, Artificial Sequence
  Synthetic
cgccucgcagacgaagau

SEQ ID NO: 36896 - RNA, 19 nt, Artificial Sequence
  Synthetic
ucgccucgcagacgaagau

SEQ ID NO: 36897 - RNA, 20 nt, Artificial Sequence
  Synthetic
cucgccucgcagacgaagau

SEQ ID NO: 36898 - RNA, 22 nt, Artificial Sequence
  Synthetic
ugggcuuucgcaaaauaccuau

SEQ ID NO: 36899 - RNA, 23 nt, Artificial Sequence
  Synthetic
uugggcuuucgcaaaauaccuau

SEQ ID NO: 36900 - RNA, 24 nt, Artificial Sequence
  Synthetic
cuugggcuuucgcaaaauaccuau

SEQ ID NO: 36901 - RNA, 18 nt, Artificial Sequence
  Synthetic
uaccgcagagucuagacu

SEQ ID NO: 36902 - RNA, 19 nt, Artificial Sequence
  Synthetic
auaccgcagagucuagacu

SEQ ID NO: 36903 - RNA, 20 nt, Artificial Sequence
  Synthetic
aauaccgcagagucuagacu

SEQ ID NO: 36904 - RNA, 22 nt, Artificial Sequence
  Synthetic
uggagcaaaacucauugggacu

SEQ ID NO: 36905 - RNA, 23 nt, Artificial Sequence
  Synthetic
cuggagcaaaacucauugggacu

SEQ ID NO: 36906 - RNA, 24 nt, Artificial Sequence
  Synthetic
ucuggagcaaaacucauugggacu

SEQ ID NO: 36907 - RNA, 18 nt, Artificial Sequence
  Synthetic
cuuuguaccgggaauccu

SEQ ID NO: 36908 - RNA, 20 nt, Artificial Sequence
  Synthetic
agcuuuguaccgggaauccu

SEQ ID NO: 36909 - RNA, 19 nt, Artificial Sequence
  Synthetic
agacucgugguggacuucu

SEQ ID NO: 36910 - RNA, 20 nt, Artificial Sequence
  Synthetic
uagacucgugguggacuucu

SEQ ID NO: 36911 - RNA, 21 nt, Artificial Sequence
  Synthetic
cuagacucgugguggacuucu

SEQ ID NO: 36912 - RNA, 22 nt, Artificial Sequence
  Synthetic
ucuagacucgugguggacuucu

SEQ ID NO: 36913 - RNA, 24 nt, Artificial Sequence
  Synthetic
agucuagacucgugguggacuucu

SEQ ID NO: 36914 - RNA, 21 nt, Artificial Sequence
  Synthetic
ccguguguccuggccuaaauu

SEQ ID NO: 36915 - RNA, 22 nt, Artificial Sequence
  Synthetic
cccguguguccuggccuaaauu

SEQ ID NO: 36916 - RNA, 24 nt, Artificial Sequence
  Synthetic
ugcccguguguccuggccuaaauu

SEQ ID NO: 36917 - RNA, 21 nt, Artificial Sequence
  Synthetic
agcaauccucuaggauuccuu

SEQ ID NO: 36918 - RNA, 22 nt, Artificial Sequence
  Synthetic
cagcaauccucuaggauuccuu

SEQ ID NO: 36919 - RNA, 23 nt, Artificial Sequence
  Synthetic
ccagcaauccucuaggauuccuu

SEQ ID NO: 36920 - RNA, 24 nt, Artificial Sequence
  Synthetic
accagcaauccucuaggauuccuu

SEQ ID NO: 36921 - RNA, 22 nt, Artificial Sequence
  Synthetic
agaagaucugcaucuccagcuu

SEQ ID NO: 36922 - RNA, 23 nt, Artificial Sequence
  Synthetic
cagaagaucugcaucuccagcuu

SEQ ID NO: 36923 - RNA, 22 nt, Artificial Sequence
  Synthetic
ugcugcuaugccucaucuucuu

SEQ ID NO: 36924 - RNA, 23 nt, Artificial Sequence
  Synthetic
cugcugcuaugccucaucuucuu

SEQ ID NO: 36925 - RNA, 24 nt, Artificial Sequence
  Synthetic
ccugcugcuaugccucaucuucuu

SEQ ID NO: 36926 - RNA, 21 nt, Artificial Sequence
  Synthetic
ucugacuuuuucccgucuguu

SEQ ID NO: 36927 - RNA, 22 nt, Artificial Sequence
  Synthetic
uucugacuuuuucccgucuguu

SEQ ID NO: 36928 - RNA, 23 nt, Artificial Sequence
  Synthetic
cuucugacuuuuucccgucuguu

SEQ ID NO: 36929 - RNA, 24 nt, Artificial Sequence
  Synthetic
ccuucugacuuuuucccgucuguu

SEQ ID NO: 36930 - RNA, 21 nt, Artificial Sequence
  Synthetic
agauccagcauccagagauuu

SEQ ID NO: 36931 - RNA, 22 nt, Artificial Sequence
  Synthetic
aagauccagcauccagagauuu

SEQ ID NO: 36932 - RNA, 21 nt, Artificial Sequence
  Synthetic
ccccuccacacggaggccuuu

SEQ ID NO: 36933 - RNA, 22 nt, Artificial Sequence
  Synthetic
accccuccacacggaggccuuu

SEQ ID NO: 36934 - RNA, 23 nt, Artificial Sequence
  Synthetic
caccccuccacacggaggccuuu

SEQ ID NO: 36935 - RNA, 24 nt, Artificial Sequence
  Synthetic
ucaccccuccacacggaggccuuu

SEQ ID NO: 36936 - RNA, 21 nt, Artificial Sequence
  Synthetic
ucuugaguauuuggugucuuu

SEQ ID NO: 36937 - RNA, 22 nt, Artificial Sequence
  Synthetic
uucuugaguauuuggugucuuu

SEQ ID NO: 36938 - RNA, 24 nt, Artificial Sequence
  Synthetic
cguucuugaguauuuggugucuuu

SEQ ID NO: 36939 - RNA, 21 nt, Artificial Sequence
  Synthetic
ccguuucucuuggcucaguuu

SEQ ID NO: 36940 - RNA, 22 nt, Artificial Sequence
  Synthetic
uccguuucucuuggcucaguuu

SEQ ID NO: 36941 - RNA, 24 nt, Artificial Sequence
  Synthetic
aguccguuucucuuggcucaguuu

SEQ ID NO: 36942 - RNA, 18 nt, Artificial Sequence
  Synthetic
cccguagcgcuucauuuu

SEQ ID NO: 36943 - RNA, 19 nt, Artificial Sequence
  Synthetic
ucccguagcgcuucauuuu

SEQ ID NO: 36944 - RNA, 20 nt, Artificial Sequence
  Synthetic
aucccguagcgcuucauuuu

SEQ ID NO: 36945 - RNA, 21 nt, Artificial Sequence
  Synthetic
caucccguagcgcuucauuuu

SEQ ID NO: 36946 - RNA, 22 nt, Artificial Sequence
  Synthetic
acaucccguagcgcuucauuuu

SEQ ID NO: 36947 - RNA, 23 nt, Artificial Sequence
  Synthetic
aacaucccguagcgcuucauuuu

SEQ ID NO: 36948 - RNA, 24 nt, Artificial Sequence
  Synthetic
aaacaucccguagcgcuucauuuu

SEQ ID NO: 36949 - RNA, 22 nt, Artificial Sequence
  Synthetic
ugauuggcaaacuccuucuuuu

SEQ ID NO: 36950 - RNA, 23 nt, Artificial Sequence
  Synthetic
cugauuggcaaacuccuucuuuu

SEQ ID NO: 36951 - RNA, 24 nt, Artificial Sequence
  Synthetic
ccugauuggcaaacuccuucuuuu

SEQ ID NO: 36952 - RNA, 18 nt, Artificial Sequence
  Synthetic
guauacccaaagacaaaa

SEQ ID NO: 36953 - RNA, 21 nt, Artificial Sequence
  Synthetic
gauguauacccaaagacaaaa

SEQ ID NO: 36954 - RNA, 22 nt, Artificial Sequence
  Synthetic
guauacccaaagacaaaagaaa

SEQ ID NO: 36955 - RNA, 18 nt, Artificial Sequence
  Synthetic
guccagaagaaccaacaa

SEQ ID NO: 36956 - RNA, 19 nt, Artificial Sequence
  Synthetic
guauuuugcgaaagcccaa

SEQ ID NO: 36957 - RNA, 20 nt, Artificial Sequence
  Synthetic
gguauuuugcgaaagcccaa

SEQ ID NO: 36958 - RNA, 20 nt, Artificial Sequence
  Synthetic
guuauaaugucuugaugcaa

SEQ ID NO: 36959 - RNA, 19 nt, Artificial Sequence
  Synthetic
gcagcaggaugaagaggaa

SEQ ID NO: 36960 - RNA, 24 nt, Artificial Sequence
  Synthetic
gcauagcagcaggaugaagaggaa

SEQ ID NO: 36961 - RNA, 23 nt, Artificial Sequence
  Synthetic
gauuaacuacauuuucuggauaa

SEQ ID NO: 36962 - RNA, 19 nt, Artificial Sequence
  Synthetic
  misc_feature (8)..(8): n is a, c, g, or u
gaacagunggacaugaaca

SEQ ID NO: 36963 - RNA, 23 nt, Artificial Sequence
  Synthetic
  misc_feature (12)..(12): n is a, c, g, or u
gcuugaacagunggacaugaaca

SEQ ID NO: 36964 - RNA, 24 nt, Artificial Sequence
  Synthetic
  misc_feature (13)..(13): n is a, c, g, or u
ggcuugaacagunggacaugaaca

SEQ ID NO: 36965 - RNA, 18 nt, Artificial Sequence
  Synthetic
gcccacaaauuguucaca

SEQ ID NO: 36966 - RNA, 19 nt, Artificial Sequence
  Synthetic
ggcccacaaauuguucaca

SEQ ID NO: 36967 - RNA, 20 nt, Artificial Sequence
  Synthetic
gggcccacaaauuguucaca

SEQ ID NO: 36968 - RNA, 23 nt, Artificial Sequence
  Synthetic
guuucucucccaaaaguaagaca

SEQ ID NO: 36969 - RNA, 24 nt, Artificial Sequence
  Synthetic
gguuucucucccaaaaguaagaca

SEQ ID NO: 36970 - RNA, 19 nt, Artificial Sequence
  Synthetic
guauuaacauaauugacca

SEQ ID NO: 36971 - RNA, 19 nt, Artificial Sequence
  Synthetic
  misc_feature (2)..(2): n is a, c, g, or u
gnccgauggccaagcccca

SEQ ID NO: 36972 - RNA, 19 nt, Artificial Sequence
  Synthetic
gacagaauugucaguccca

SEQ ID NO: 36973 - RNA, 19 nt, Artificial Sequence
  Synthetic
gcucugaaugcugggucca

SEQ ID NO: 36974 - RNA, 18 nt, Artificial Sequence
  Synthetic
guugauaggauaggggca

SEQ ID NO: 36975 - RNA, 20 nt, Artificial Sequence
  Synthetic
guguugauaggauaggggca

SEQ ID NO: 36976 - RNA, 23 nt, Artificial Sequence
  Synthetic
gaaguguugauaggauaggggca

SEQ ID NO: 36977 - RNA, 24 nt, Artificial Sequence
  Synthetic
ggaaguguugauaggauaggggca

SEQ ID NO: 36978 - RNA, 18 nt, Artificial Sequence
  Synthetic
gaggugaagcgaagugca

SEQ ID NO: 36979 - RNA, 22 nt, Artificial Sequence
  Synthetic
gcaaauggauauuuggaaaaga

SEQ ID NO: 36980 - RNA, 22 nt, Artificial Sequence
  Synthetic
  misc_feature (8)..(8): n is a, c, g, or u
gaacagunggacaugaacaaga

SEQ ID NO: 36981 - RNA, 18 nt, Artificial Sequence
  Synthetic
gauugacgagaugugaga

SEQ ID NO: 36982 - RNA, 20 nt, Artificial Sequence
  Synthetic
gaucuucgucugcgaggcga

SEQ ID NO: 36983 - RNA, 18 nt, Artificial Sequence
  Synthetic
ggccuuauaaguuggcga

SEQ ID NO: 36984 - RNA, 22 nt, Artificial Sequence
  Synthetic
gaaaggccuuauaaguuggcga

SEQ ID NO: 36985 - RNA, 24 nt, Artificial Sequence
  Synthetic
gagaaaggccuuauaaguuggcga

SEQ ID NO: 36986 - RNA, 18 nt, Artificial Sequence
  Synthetic
gaucacgaacagacggga

SEQ ID NO: 36987 - RNA, 20 nt, Artificial Sequence
  Synthetic
gcaggguccccaauccugga

SEQ ID NO: 36988 - RNA, 21 nt, Artificial Sequence
  Synthetic
guaaauaaugucuggucugga

SEQ ID NO: 36989 - RNA, 18 nt, Artificial Sequence
  Synthetic
ggguccuaggaauccuga

SEQ ID NO: 36990 - RNA, 19 nt, Artificial Sequence
  Synthetic
gggguccuaggaauccuga

SEQ ID NO: 36991 - RNA, 22 nt, Artificial Sequence
  Synthetic
gcagggguccuaggaauccuga

SEQ ID NO: 36992 - RNA, 24 nt, Artificial Sequence
  Synthetic
gagcagggguccuaggaauccuga

SEQ ID NO: 36993 - RNA, 20 nt, Artificial Sequence
  Synthetic
gauucccgguacaaagcuga

SEQ ID NO: 36994 - RNA, 19 nt, Artificial Sequence
  Synthetic
gaugauuaggcagagguga

SEQ ID NO: 36995 - RNA, 21 nt, Artificial Sequence
  Synthetic
gagaugauuaggcagagguga

SEQ ID NO: 36996 - RNA, 24 nt, Artificial Sequence
  Synthetic
gauaccuuugucuaaugguaaaua

SEQ ID NO: 36997 - RNA, 19 nt, Artificial Sequence
  Synthetic
gaaaaaucuggcaggcaua

SEQ ID NO: 36998 - RNA, 20 nt, Artificial Sequence
  Synthetic
ggaaaaaucuggcaggcaua

SEQ ID NO: 36999 - RNA, 21 nt, Artificial Sequence
  Synthetic
gggaaaaaucuggcaggcaua

SEQ ID NO: 37000 - RNA, 18 nt, Artificial Sequence
  Synthetic
ggauguuucucucuuaua

SEQ ID NO: 37001 - RNA, 19 nt, Artificial Sequence
  Synthetic
gggauguuucucucuuaua

SEQ ID NO: 37002 - RNA, 18 nt, Artificial Sequence
  Synthetic
gaucgggaaggaauccua

SEQ ID NO: 37003 - RNA, 20 nt, Artificial Sequence
  Synthetic
gugaucgggaaggaauccua

SEQ ID NO: 37004 - RNA, 20 nt, Artificial Sequence
  Synthetic
guagaucuuguucccaagua

SEQ ID NO: 37005 - RNA, 23 nt, Artificial Sequence
  Synthetic
gcuguagaucuuguucccaagua

SEQ ID NO: 37006 - RNA, 19 nt, Artificial Sequence
  Synthetic
gccuuccaaaggguaugua

SEQ ID NO: 37007 - RNA, 21 nt, Artificial Sequence
  Synthetic
guaagacaggaaaugugaaac

SEQ ID NO: 37008 - RNA, 18 nt, Artificial Sequence
  Synthetic
gccucuucgucuaacaac

SEQ ID NO: 37009 - RNA, 22 nt, Artificial Sequence
  Synthetic
gccuccguguggaggggugaac

SEQ ID NO: 37010 - RNA, 23 nt, Artificial Sequence
  Synthetic
ggccuccguguggaggggugaac

SEQ ID NO: 37011 - RNA, 20 nt, Artificial Sequence
  Synthetic
gacaaaagaaaauugguaac

SEQ ID NO: 37012 - RNA, 20 nt, Artificial Sequence
  Synthetic
gacaggaaaugugaaaccac

SEQ ID NO: 37013 - RNA, 24 nt, Artificial Sequence
  Synthetic
guaagacaggaaaugugaaaccac

SEQ ID NO: 37014 - RNA, 22 nt, Artificial Sequence
  Synthetic
gaucuuccaaauuauuacccac

SEQ ID NO: 37015 - RNA, 23 nt, Artificial Sequence
  Synthetic
ggaucuuccaaauuauuacccac

SEQ ID NO: 37016 - RNA, 18 nt, Artificial Sequence
  Synthetic
gaucggcagaggagccac

SEQ ID NO: 37017 - RNA, 19 nt, Artificial Sequence
  Synthetic
ggaucggcagaggagccac

SEQ ID NO: 37018 - RNA, 19 nt, Artificial Sequence
  Synthetic
gccuacagccuccuaauac

SEQ ID NO: 37019 - RNA, 18 nt, Artificial Sequence
  Synthetic
gacaaacgggcaacauac

SEQ ID NO: 37020 - RNA, 19 nt, Artificial Sequence
  Synthetic
ggacaaacgggcaacauac

SEQ ID NO: 37021 - RNA, 21 nt, Artificial Sequence
  Synthetic
gaggacaaacgggcaacauac

SEQ ID NO: 37022 - RNA, 18 nt, Artificial Sequence
  Synthetic
guaaagagaggugcgccc

SEQ ID NO: 37023 - RNA, 20 nt, Artificial Sequence
  Synthetic
gcguaaagagaggugcgccc

SEQ ID NO: 37024 - RNA, 18 nt, Artificial Sequence
  Synthetic
ggacugaggcccacuccc

SEQ ID NO: 37025 - RNA, 23 nt, Artificial Sequence
  Synthetic
gaaacggacugaggcccacuccc

SEQ ID NO: 37026 - RNA, 20 nt, Artificial Sequence
  Synthetic
gucuaacaacaguagucucc

SEQ ID NO: 37027 - RNA, 20 nt, Artificial Sequence
  Synthetic
guugacauaacaaacagucc

SEQ ID NO: 37028 - RNA, 23 nt, Artificial Sequence
  Synthetic
guuguugacauaacaaacagucc

SEQ ID NO: 37029 - RNA, 24 nt, Artificial Sequence
  Synthetic
gguuguugacauaacaaacagucc

SEQ ID NO: 37030 - RNA, 23 nt, Artificial Sequence
  Synthetic
gaauacaggugcaauuuccgucc

SEQ ID NO: 37031 - RNA, 24 nt, Artificial Sequence
  Synthetic
ggaauacaggugcaauuuccgucc

SEQ ID NO: 37032 - RNA, 18 nt, Artificial Sequence
  Synthetic
gcagaucuucugcgacgc

SEQ ID NO: 37033 - RNA, 19 nt, Artificial Sequence
  Synthetic
gaacaagagaugauuaggc

SEQ ID NO: 37034 - RNA, 19 nt, Artificial Sequence
  Synthetic
gcaaaaacgagagcaacuc

SEQ ID NO: 37035 - RNA, 20 nt, Artificial Sequence
  Synthetic
ggcaaaaacgagagcaacuc

SEQ ID NO: 37036 - RNA, 23 nt, Artificial Sequence
  Synthetic
gaaggcaaaaacgagagcaacuc

SEQ ID NO: 37037 - RNA, 18 nt, Artificial Sequence
  Synthetic
ggucccguacuggugguc

SEQ ID NO: 37038 - RNA, 19 nt, Artificial Sequence
  Synthetic
gggucccguacuggugguc

SEQ ID NO: 37039 - RNA, 23 nt, Artificial Sequence
  Synthetic
gcaaaacaagcagcuaggaguuc

SEQ ID NO: 37040 - RNA, 21 nt, Artificial Sequence
  Synthetic
guuugccaaucaggauuaaag

SEQ ID NO: 37041 - RNA, 23 nt, Artificial Sequence
  Synthetic
gaguuugccaaucaggauuaaag

SEQ ID NO: 37042 - RNA, 24 nt, Artificial Sequence
  Synthetic
ggaguuugccaaucaggauuaaag

SEQ ID NO: 37043 - RNA, 19 nt, Artificial Sequence
  Synthetic
gcauagcagcaggaugaag

SEQ ID NO: 37044 - RNA, 20 nt, Artificial Sequence
  Synthetic
ggcauagcagcaggaugaag

SEQ ID NO: 37045 - RNA, 22 nt, Artificial Sequence
  Synthetic
gaggcauagcagcaggaugaag

SEQ ID NO: 37046 - RNA, 19 nt, Artificial Sequence
  Synthetic
guaacgugcagaggugaag

SEQ ID NO: 37047 - RNA, 19 nt, Artificial Sequence
  Synthetic
gagcagcgaaacccaacag

SEQ ID NO: 37048 - RNA, 20 nt, Artificial Sequence
  Synthetic
ggagcagcgaaacccaacag

SEQ ID NO: 37049 - RNA, 18 nt, Artificial Sequence
  Synthetic
gaagaugaggcauagcag

SEQ ID NO: 37050 - RNA, 22 nt, Artificial Sequence
  Synthetic
  misc_feature (4)..(4): n is a, c, g, or u
  misc_feature (18)..(19): n is a, c, g, or u
guuncauggugcuggugnncag

SEQ ID NO: 37051 - RNA, 20 nt, Artificial Sequence
  Synthetic
gacuuugggauuuuguagag

SEQ ID NO: 37052 - RNA, 20 nt, Artificial Sequence
  Synthetic
gacaaguuggaggacaggag

SEQ ID NO: 37053 - RNA, 21 nt, Artificial Sequence
  Synthetic
ggacaaguuggaggacaggag

SEQ ID NO: 37054 - RNA, 18 nt, Artificial Sequence
  Synthetic
gauugguggaggcaggag

SEQ ID NO: 37055 - RNA, 22 nt, Artificial Sequence
  Synthetic
gcacucccccuagaaaauugag

SEQ ID NO: 37056 - RNA, 23 nt, Artificial Sequence
  Synthetic
ggcacucccccuagaaaauugag

SEQ ID NO: 37057 - RNA, 24 nt, Artificial Sequence
  Synthetic
gggcacucccccuagaaaauugag

SEQ ID NO: 37058 - RNA, 21 nt, Artificial Sequence
  Synthetic
gauuaaagacagguauaguag

SEQ ID NO: 37059 - RNA, 22 nt, Artificial Sequence
  Synthetic
ggauuaaagacagguauaguag

SEQ ID NO: 37060 - RNA, 20 nt, Artificial Sequence
  Synthetic
gucuaaugguaaauauuuag

SEQ ID NO: 37061 - RNA, 19 nt, Artificial Sequence
  Synthetic
gcugccucccugacugacg

SEQ ID NO: 37062 - RNA, 20 nt, Artificial Sequence
  Synthetic
ggcugccucccugacugacg

SEQ ID NO: 37063 - RNA, 19 nt, Artificial Sequence
  Synthetic
guagaagaauacagccccg

SEQ ID NO: 37064 - RNA, 24 nt, Artificial Sequence
  Synthetic
guauaguagaagaauacagccccg

SEQ ID NO: 37065 - RNA, 20 nt, Artificial Sequence
  Synthetic
gccccgggaggggucguccg

SEQ ID NO: 37066 - RNA, 18 nt, Artificial Sequence
  Synthetic
gugcuguauggugaggcg

SEQ ID NO: 37067 - RNA, 20 nt, Artificial Sequence
  Synthetic
gagugcuguauggugaggcg

SEQ ID NO: 37068 - RNA, 20 nt, Artificial Sequence
  Synthetic
gcuccaaauucuuuauaagg

SEQ ID NO: 37069 - RNA, 19 nt, Artificial Sequence
  Synthetic
gcauauaaaggcauuaagg

SEQ ID NO: 37070 - RNA, 19 nt, Artificial Sequence
  Synthetic
gaugggaugggaauacagg

SEQ ID NO: 37071 - RNA, 22 nt, Artificial Sequence
  Synthetic
gaugaugggaugggaauacagg

SEQ ID NO: 37072 - RNA, 23 nt, Artificial Sequence
  Synthetic
guaaauauuuaguagaguuuggg

SEQ ID NO: 37073 - RNA, 24 nt, Artificial Sequence
  Synthetic
gguaaauauuuaguagaguuuggg

SEQ ID NO: 37074 - RNA, 18 nt, Artificial Sequence
  Synthetic
gccaaaaaggccauaugg

SEQ ID NO: 37075 - RNA, 20 nt, Artificial Sequence
  Synthetic
gcaggaggcggaucugcugg

SEQ ID NO: 37076 - RNA, 21 nt, Artificial Sequence
  Synthetic
ggcaggaggcggaucugcugg

SEQ ID NO: 37077 - RNA, 23 nt, Artificial Sequence
  Synthetic
gaggcaggaggcggaucugcugg

SEQ ID NO: 37078 - RNA, 24 nt, Artificial Sequence
  Synthetic
ggaggcaggaggcggaucugcugg

SEQ ID NO: 37079 - RNA, 19 nt, Artificial Sequence
  Synthetic
gacugucucuuaguggugg

SEQ ID NO: 37080 - RNA, 19 nt, Artificial Sequence
  Synthetic
gugugauguguucuugugg

SEQ ID NO: 37081 - RNA, 18 nt, Artificial Sequence
  Synthetic
ggauuuuguagagcuugg

SEQ ID NO: 37082 - RNA, 19 nt, Artificial Sequence
  Synthetic
gggauuuuguagagcuugg

SEQ ID NO: 37083 - RNA, 20 nt, Artificial Sequence
  Synthetic
guugguauuugcucugaaug

SEQ ID NO: 37084 - RNA, 18 nt, Artificial Sequence
  Synthetic
guuuuguacagcaacaug

SEQ ID NO: 37085 - RNA, 19 nt, Artificial Sequence
  Synthetic
gguuuuguacagcaacaug

SEQ ID NO: 37086 - RNA, 18 nt, Artificial Sequence
  Synthetic
gaugugauguucuccaug

SEQ ID NO: 37087 - RNA, 20 nt, Artificial Sequence
  Synthetic
gaccaccaaaucucuggaug

SEQ ID NO: 37088 - RNA, 21 nt, Artificial Sequence
  Synthetic
  misc_feature (2)..(2): n is a, c, g, or u
gnauugcuugccugagugcug

SEQ ID NO: 37089 - RNA, 18 nt, Artificial Sequence
  Synthetic
gauuaacuacauuuucug

SEQ ID NO: 37090 - RNA, 23 nt, Artificial Sequence
  Synthetic
guaaugauuaacuacauuuucug

SEQ ID NO: 37091 - RNA, 20 nt, Artificial Sequence
  Synthetic
gauguucuccauguucggug

SEQ ID NO: 37092 - RNA, 18 nt, Artificial Sequence
  Synthetic
gaggacaggagauuggug

SEQ ID NO: 37093 - RNA, 19 nt, Artificial Sequence
  Synthetic
ggaggacaggagauuggug

SEQ ID NO: 37094 - RNA, 22 nt, Artificial Sequence
  Synthetic
guuggaggacaggagauuggug

SEQ ID NO: 37095 - RNA, 22 nt, Artificial Sequence
  Synthetic
  misc_feature (20)..(20): n is a, c, g, or u
gaaaacauugcuuaauuuunug

SEQ ID NO: 37096 - RNA, 18 nt, Artificial Sequence
  Synthetic
gaguuuccgaaaacauug

SEQ ID NO: 37097 - RNA, 19 nt, Artificial Sequence
  Synthetic
ggaguuuccgaaaacauug

SEQ ID NO: 37098 - RNA, 20 nt, Artificial Sequence
  Synthetic
gggaguuuccgaaaacauug

SEQ ID NO: 37099 - RNA, 19 nt, Artificial Sequence
  Synthetic
guuggaggacaggagauug

SEQ ID NO: 37100 - RNA, 18 nt, Artificial Sequence
  Synthetic
gcacagcuuggaggcuug

SEQ ID NO: 37101 - RNA, 19 nt, Artificial Sequence
  Synthetic
ggcacagcuuggaggcuug

SEQ ID NO: 37102 - RNA, 18 nt, Artificial Sequence
  Synthetic
gugaaaccacaauaguug

SEQ ID NO: 37103 - RNA, 23 nt, Artificial Sequence
  Synthetic
gaaaugugaaaccacaauaguug

SEQ ID NO: 37104 - RNA, 24 nt, Artificial Sequence
  Synthetic
ggaaaugugaaaccacaauaguug

SEQ ID NO: 37105 - RNA, 18 nt, Artificial Sequence
  Synthetic
ggagucgugcagguuuug

SEQ ID NO: 37106 - RNA, 21 nt, Artificial Sequence
  Synthetic
  misc_feature (21)..(21): n is a, c, g, or u
guccuugaaguauuucuccan

SEQ ID NO: 37107 - RNA, 18 nt, Artificial Sequence
  Synthetic
  misc_feature (18)..(18): n is a, c, g, or u
gcagaggugaaaaaguun

SEQ ID NO: 37108 - RNA, 19 nt, Artificial Sequence
  Synthetic
  misc_feature (19)..(19): n is a, c, g, or u
ggcagaggugaaaaaguun

SEQ ID NO: 37109 - RNA, 24 nt, Artificial Sequence
  Synthetic
  misc_feature (24)..(24): n is a, c, g, or u
gauuaggcagaggugaaaaaguun

SEQ ID NO: 37110 - RNA, 21 nt, Artificial Sequence
  Synthetic
gaaaagaaggaguuugccaau

SEQ ID NO: 37111 - RNA, 22 nt, Artificial Sequence
  Synthetic
ggaaaagaaggaguuugccaau

SEQ ID NO: 37112 - RNA, 19 nt, Artificial Sequence
  Synthetic
gagcagggguccuaggaau

SEQ ID NO: 37113 - RNA, 23 nt, Artificial Sequence
  Synthetic
gcccaagaugaugggaugggaau

SEQ ID NO: 37114 - RNA, 19 nt, Artificial Sequence
  Synthetic
gccugauuuuuaaacccau

SEQ ID NO: 37115 - RNA, 19 nt, Artificial Sequence
  Synthetic
gaugaugagagguguucau

SEQ ID NO: 37116 - RNA, 21 nt, Artificial Sequence
  Synthetic
gaaagcccaagaugaugggau

SEQ ID NO: 37117 - RNA, 23 nt, Artificial Sequence
  Synthetic
gcgaaagcccaagaugaugggau

SEQ ID NO: 37118 - RNA, 19 nt, Artificial Sequence
  Synthetic
guagcuccaaauucuuuau

SEQ ID NO: 37119 - RNA, 19 nt, Artificial Sequence
  Synthetic
guggcaaaguaccccaacu

SEQ ID NO: 37120 - RNA, 22 nt, Artificial Sequence
  Synthetic
  misc_feature (13)..(13): n is a, c, g, or u
guaacagcgguanaaagggacu

SEQ ID NO: 37121 - RNA, 23 nt, Artificial Sequence
  Synthetic
  misc_feature (14)..(14): n is a, c, g, or u
gguaacagcgguanaaagggacu

SEQ ID NO: 37122 - RNA, 18 nt, Artificial Sequence
  Synthetic
gauuggagguuggggacu

SEQ ID NO: 37123 - RNA, 20 nt, Artificial Sequence
  Synthetic
gugauuggagguuggggacu

SEQ ID NO: 37124 - RNA, 22 nt, Artificial Sequence
  Synthetic
gagugauuggagguuggggacu

SEQ ID NO: 37125 - RNA, 24 nt, Artificial Sequence
  Synthetic
gugagugauuggagguuggggacu

SEQ ID NO: 37126 - RNA, 19 nt, Artificial Sequence
  Synthetic
guaggcugccucccugacu

SEQ ID NO: 37127 - RNA, 22 nt, Artificial Sequence
  Synthetic
gaccaauuuaugccuacagccu

SEQ ID NO: 37128 - RNA, 21 nt, Artificial Sequence
  Synthetic
gaauacuaacauugggaagcu

SEQ ID NO: 37129 - RNA, 22 nt, Artificial Sequence
  Synthetic
ggaauacuaacauugggaagcu

SEQ ID NO: 37130 - RNA, 19 nt, Artificial Sequence
  Synthetic
gcgagcaaaacaagcagcu

SEQ ID NO: 37131 - RNA, 19 nt, Artificial Sequence
  Synthetic
gagcaacuccacaguagcu

SEQ ID NO: 37132 - RNA, 20 nt, Artificial Sequence
  Synthetic
guccaagaaagccccaugcu

SEQ ID NO: 37133 - RNA, 18 nt, Artificial Sequence
  Synthetic
ggauuguugguauuugcu

SEQ ID NO: 37134 - RNA, 18 nt, Artificial Sequence
  Synthetic
guaaauaaugucuggucu

SEQ ID NO: 37135 - RNA, 22 nt, Artificial Sequence
  Synthetic
guauguaaauaaugucuggucu

SEQ ID NO: 37136 - RNA, 23 nt, Artificial Sequence
  Synthetic
gguauguaaauaaugucuggucu

SEQ ID NO: 37137 - RNA, 24 nt, Artificial Sequence
  Synthetic
ggguauguaaauaaugucuggucu

SEQ ID NO: 37138 - RNA, 18 nt, Artificial Sequence
  Synthetic
gccugaggaugacugucu

SEQ ID NO: 37139 - RNA, 19 nt, Artificial Sequence
  Synthetic
ggccugaggaugacugucu

SEQ ID NO: 37140 - RNA, 23 nt, Artificial Sequence
  Synthetic
gcauggccugaggaugacugucu

SEQ ID NO: 37141 - RNA, 18 nt, Artificial Sequence
  Synthetic
gguuugauaccuuugucu

SEQ ID NO: 37142 - RNA, 24 nt, Artificial Sequence
  Synthetic
guaaauaaugucuggucuggaagu

SEQ ID NO: 37143 - RNA, 20 nt, Artificial Sequence
  Synthetic
guccuuuuugggauugaagu

SEQ ID NO: 37144 - RNA, 18 nt, Artificial Sequence
  Synthetic
ggccaagccccaaccagu

SEQ ID NO: 37145 - RNA, 19 nt, Artificial Sequence
  Synthetic
gucuauaagcaggaggagu

SEQ ID NO: 37146 - RNA, 20 nt, Artificial Sequence
  Synthetic
ggucuauaagcaggaggagu

SEQ ID NO: 37147 - RNA, 18 nt, Artificial Sequence
  Synthetic
  misc_feature (14)..(14): n is a, c, g, or u
guugccuagcaacngggu

SEQ ID NO: 37148 - RNA, 21 nt, Artificial Sequence
  Synthetic
  misc_feature (17)..(17): n is a, c, g, or u
gccguugccuagcaacngggu

SEQ ID NO: 37149 - RNA, 22 nt, Artificial Sequence
  Synthetic
  misc_feature (18)..(18): n is a, c, g, or u
ggccguugccuagcaacngggu

SEQ ID NO: 37150 - RNA, 23 nt, Artificial Sequence
  Synthetic
  misc_feature (19)..(19): n is a, c, g, or u
gggccguugccuagcaacngggu

SEQ ID NO: 37151 - RNA, 18 nt, Artificial Sequence
  Synthetic
  misc_feature (12)..(12): n is a, c, g, or u
gugaaaaaguuncauggu

SEQ ID NO: 37152 - RNA, 19 nt, Artificial Sequence
  Synthetic
  misc_feature (13)..(13): n is a, c, g, or u
ggugaaaaaguuncauggu

SEQ ID NO: 37153 - RNA, 21 nt, Artificial Sequence
  Synthetic
  misc_feature (15)..(15): n is a, c, g, or u
gaggugaaaaaguuncauggu

SEQ ID NO: 37154 - RNA, 24 nt, Artificial Sequence
  Synthetic
  misc_feature (18)..(18): n is a, c, g, or u
gcagaggugaaaaaguuncauggu

SEQ ID NO: 37155 - RNA, 21 nt, Artificial Sequence
  Synthetic
guucacauuuaguuauaaugu

SEQ ID NO: 37156 - RNA, 24 nt, Artificial Sequence
  Synthetic
  misc_feature (4)..(4): n is a, c, g, or u
guanaaagggacucaagauguugu

SEQ ID NO: 37157 - RNA, 19 nt, Artificial Sequence
  Synthetic
gagaaaggacgacagaauu

SEQ ID NO: 37158 - RNA, 19 nt, Artificial Sequence
  Synthetic
gaaggaauccuagaggauu

SEQ ID NO: 37159 - RNA, 20 nt, Artificial Sequence
  Synthetic
ggaaggaauccuagaggauu

SEQ ID NO: 37160 - RNA, 18 nt, Artificial Sequence
  Synthetic
gaagucccaaucuggauu

SEQ ID NO: 37161 - RNA, 18 nt, Artificial Sequence
  Synthetic
ggagauuggugagugauu

SEQ ID NO: 37162 - RNA, 19 nt, Artificial Sequence
  Synthetic
guuauucguugacagacuu

SEQ ID NO: 37163 - RNA, 21 nt, Artificial Sequence
  Synthetic
  misc_feature (4)..(4): n is a, c, g, or u
gaanauacaggccccugacuu

SEQ ID NO: 37164 - RNA, 22 nt, Artificial Sequence
  Synthetic
  misc_feature (5)..(5): n is a, c, g, or u
ggaanauacaggccccugacuu

SEQ ID NO: 37165 - RNA, 21 nt, Artificial Sequence
  Synthetic
gacaaacgggcaacauaccuu

SEQ ID NO: 37166 - RNA, 22 nt, Artificial Sequence
  Synthetic
ggacaaacgggcaacauaccuu

SEQ ID NO: 37167 - RNA, 24 nt, Artificial Sequence
  Synthetic
gaggacaaacgggcaacauaccuu

SEQ ID NO: 37168 - RNA, 19 nt, Artificial Sequence
  Synthetic
guuuacagagaaaggccuu

SEQ ID NO: 37169 - RNA, 24 nt, Artificial Sequence
  Synthetic
guauuguuuacagagaaaggccuu

SEQ ID NO: 37170 - RNA, 23 nt, Artificial Sequence
  Synthetic
gauauuuggaaaagaaggaguuu

SEQ ID NO: 37171 - RNA, 24 nt, Artificial Sequence
  Synthetic
ggauauuuggaaaagaaggaguuu

SEQ ID NO: 37172 - RNA, 20 nt, Artificial Sequence
  Synthetic
guaaugauuaacuacauuuu

SEQ ID NO: 37173 - RNA, 23 nt, Artificial Sequence
  Synthetic
gaaguaaugauuaacuacauuuu

SEQ ID NO: 37174 - RNA, 24 nt, Artificial Sequence
  Synthetic
ggaaguaaugauuaacuacauuuu

SEQ ID NO: 37175 - RNA, 23 nt, Artificial Sequence
  Synthetic
guaaaugagaaacgaagauuaaa

SEQ ID NO: 37176 - RNA, 20 nt, Artificial Sequence
  Synthetic
gacccuuggccagaggccaa

SEQ ID NO: 37177 - RNA, 21 nt, Artificial Sequence
  Synthetic
ggacccuuggccagaggccaa

SEQ ID NO: 37178 - RNA, 18 nt, Artificial Sequence
  Synthetic
gcuaggcugugcugccaa

SEQ ID NO: 37179 - RNA, 19 nt, Artificial Sequence
  Synthetic
gucaccauauacuugggaa

SEQ ID NO: 37180 - RNA, 20 nt, Artificial Sequence
  Synthetic
ggucaccauauacuugggaa

SEQ ID NO: 37181 - RNA, 21 nt, Artificial Sequence
  Synthetic
gccacaagaacacaucacaca

SEQ ID NO: 37182 - RNA, 24 nt, Artificial Sequence
  Synthetic
gaacaauuugugggcccucucaca

SEQ ID NO: 37183 - RNA, 19 nt, Artificial Sequence
  Synthetic
gacagucauccucaggcca

SEQ ID NO: 37184 - RNA, 20 nt, Artificial Sequence
  Synthetic
guaucaaaccguauuaucca

SEQ ID NO: 37185 - RNA, 19 nt, Artificial Sequence
  Synthetic
gcugcuuguuuugcucgca

SEQ ID NO: 37186 - RNA, 19 nt, Artificial Sequence
  Synthetic
gagugggaagaauuaggca

SEQ ID NO: 37187 - RNA, 20 nt, Artificial Sequence
  Synthetic
guuaguauuccuuggacuca

SEQ ID NO: 37188 - RNA, 24 nt, Artificial Sequence
  Synthetic
gccaauugauuggaaagucuguca

SEQ ID NO: 37189 - RNA, 19 nt, Artificial Sequence
  Synthetic
guuggacccagcauucaga

SEQ ID NO: 37190 - RNA, 20 nt, Artificial Sequence
  Synthetic
gaagauccagcauccagaga

SEQ ID NO: 37191 - RNA, 20 nt, Artificial Sequence
  Synthetic
  misc_feature (15)..(15): n is a, c, g, or u
gcuuucagcuauaungauga

SEQ ID NO: 37192 - RNA, 21 nt, Artificial Sequence
  Synthetic
  misc_feature (16)..(16): n is a, c, g, or u
ggcuuucagcuauaungauga

SEQ ID NO: 37193 - RNA, 20 nt, Artificial Sequence
  Synthetic
  misc_feature (6)..(6): n is a, c, g, or u
gcaauncugugcugggguga

SEQ ID NO: 37194 - RNA, 24 nt, Artificial Sequence
  Synthetic
  misc_feature (10)..(10): n is a, c, g, or u
gcaagcaauncugugcugggguga

SEQ ID NO: 37195 - RNA, 19 nt, Artificial Sequence
  Synthetic
gaaagucugucaacgaaua

SEQ ID NO: 37196 - RNA, 20 nt, Artificial Sequence
  Synthetic
ggaaagucugucaacgaaua

SEQ ID NO: 37197 - RNA, 24 nt, Artificial Sequence
  Synthetic
gauuggaaagucugucaacgaaua

SEQ ID NO: 37198 - RNA, 21 nt, Artificial Sequence
  Synthetic
gcuuagacauugacccuuaua

SEQ ID NO: 37199 - RNA, 22 nt, Artificial Sequence
  Synthetic
ggcuuagacauugacccuuaua

SEQ ID NO: 37200 - RNA, 18 nt, Artificial Sequence
  Synthetic
gauuuuucccaaacucua

SEQ ID NO: 37201 - RNA, 18 nt, Artificial Sequence
  Synthetic
gcauuccaccaagcucua

SEQ ID NO: 37202 - RNA, 19 nt, Artificial Sequence
  Synthetic
gagaaaccguucuugagua

SEQ ID NO: 37203 - RNA, 19 nt, Artificial Sequence
  Synthetic
guauuauccagaaaaugua

SEQ ID NO: 37204 - RNA, 22 nt, Artificial Sequence
  Synthetic
  misc_feature (15)..(15): n is a, c, g, or u
gaacacaucacacanaaaauua

SEQ ID NO: 37205 - RNA, 18 nt, Artificial Sequence
  Synthetic
gcugagugggaagaauua

SEQ ID NO: 37206 - RNA, 24 nt, Artificial Sequence
  Synthetic
guuuuugcugagugggaagaauua

SEQ ID NO: 37207 - RNA, 18 nt, Artificial Sequence
  Synthetic
guuauuccuuaaauuuua

SEQ ID NO: 37208 - RNA, 19 nt, Artificial Sequence
  Synthetic
gguuauuccuuaaauuuua

SEQ ID NO: 37209 - RNA, 20 nt, Artificial Sequence
  Synthetic
ggguuauuccuuaaauuuua

SEQ ID NO: 37210 - RNA, 18 nt, Artificial Sequence
  Synthetic
guuucgcugcuccuuuua

SEQ ID NO: 37211 - RNA, 19 nt, Artificial Sequence
  Synthetic
gguuucgcugcuccuuuua

SEQ ID NO: 37212 - RNA, 20 nt, Artificial Sequence
  Synthetic
ggguuucgcugcuccuuuua

SEQ ID NO: 37213 - RNA, 20 nt, Artificial Sequence
  Synthetic
gcuguacaaaaccuucggac

SEQ ID NO: 37214 - RNA, 18 nt, Artificial Sequence
  Synthetic
gaguuggagccuauggac

SEQ ID NO: 37215 - RNA, 19 nt, Artificial Sequence
  Synthetic
ggaguuggagccuauggac

SEQ ID NO: 37216 - RNA, 18 nt, Artificial Sequence
  Synthetic
  misc_feature (16)..(16): n is a, c, g, or u
guugaugacucuagcnac

SEQ ID NO: 37217 - RNA, 20 nt, Artificial Sequence
  Synthetic
  misc_feature (18)..(18): n is a, c, g, or u
gaguugaugacucuagcnac

SEQ ID NO: 37218 - RNA, 22 nt, Artificial Sequence
  Synthetic
  misc_feature (20)..(20): n is a, c, g, or u
gugaguugaugacucuagcnac

SEQ ID NO: 37219 - RNA, 23 nt, Artificial Sequence
  Synthetic
  misc_feature (21)..(21): n is a, c, g, or u
ggugaguugaugacucuagcnac

SEQ ID NO: 37220 - RNA, 24 nt, Artificial Sequence
  Synthetic
  misc_feature (22)..(22): n is a, c, g, or u
gggugaguugaugacucuagcnac

SEQ ID NO: 37221 - RNA, 18 nt, Artificial Sequence
  Synthetic
ggaaagaaccuuuccacc

SEQ ID NO: 37222 - RNA, 19 nt, Artificial Sequence
  Synthetic
gggaaagaaccuuuccacc

SEQ ID NO: 37223 - RNA, 20 nt, Artificial Sequence
  Synthetic
ggggaaagaaccuuuccacc

SEQ ID NO: 37224 - RNA, 22 nt, Artificial Sequence
  Synthetic
guggggaaagaaccuuuccacc

SEQ ID NO: 37225 - RNA, 24 nt, Artificial Sequence
  Synthetic
gaguggggaaagaaccuuuccacc

SEQ ID NO: 37226 - RNA, 18 nt, Artificial Sequence
  Synthetic
gcauucagagcaaauacc

SEQ ID NO: 37227 - RNA, 19 nt, Artificial Sequence
  Synthetic
guuugcugacgcaaccccc

SEQ ID NO: 37228 - RNA, 18 nt, Artificial Sequence
  Synthetic
gccuuuugggguggagcc

SEQ ID NO: 37229 - RNA, 19 nt, Artificial Sequence
  Synthetic
ggccuuuugggguggagcc

SEQ ID NO: 37230 - RNA, 18 nt, Artificial Sequence
  Synthetic
gauccgccuccugccucc

SEQ ID NO: 37231 - RNA, 21 nt, Artificial Sequence
  Synthetic
gcagauccgccuccugccucc

SEQ ID NO: 37232 - RNA, 19 nt, Artificial Sequence
  Synthetic
guauguugcccguuugucc

SEQ ID NO: 37233 - RNA, 20 nt, Artificial Sequence
  Synthetic
gguauguugcccguuugucc

SEQ ID NO: 37234 - RNA, 19 nt, Artificial Sequence
  Synthetic
guauuaggaggcuguaggc

SEQ ID NO: 37235 - RNA, 20 nt, Artificial Sequence
  Synthetic
gccuuggguggcuuuagggc

SEQ ID NO: 37236 - RNA, 18 nt, Artificial Sequence
  Synthetic
gugcccguguguccuggc

SEQ ID NO: 37237 - RNA, 20 nt, Artificial Sequence
  Synthetic
gagugcccguguguccuggc

SEQ ID NO: 37238 - RNA, 21 nt, Artificial Sequence
  Synthetic
ggagugcccguguguccuggc

SEQ ID NO: 37239 - RNA, 22 nt, Artificial Sequence
  Synthetic
gggagugcccguguguccuggc

SEQ ID NO: 37240 - RNA, 23 nt, Artificial Sequence
  Synthetic
ggggagugcccguguguccuggc

SEQ ID NO: 37241 - RNA, 24 nt, Artificial Sequence
  Synthetic
gggggagugcccguguguccuggc

SEQ ID NO: 37242 - RNA, 19 nt, Artificial Sequence
  Synthetic
  misc_feature (5)..(5): n is a, c, g, or u
guaunuuccugcugguggc

SEQ ID NO: 37243 - RNA, 23 nt, Artificial Sequence
  Synthetic
  misc_feature (9)..(9): n is a, c, g, or u
gccuguaunuuccugcugguggc

SEQ ID NO: 37244 - RNA, 24 nt, Artificial Sequence
  Synthetic
  misc_feature (10)..(10): n is a, c, g, or u
ggccuguaunuuccugcugguggc

SEQ ID NO: 37245 - RNA, 20 nt, Artificial Sequence
  Synthetic
gccuccugccuccaccaauc

SEQ ID NO: 37246 - RNA, 19 nt, Artificial Sequence
  Synthetic
gccaaaucuguacaacauc

SEQ ID NO: 37247 - RNA, 20 nt, Artificial Sequence
  Synthetic
ggccaaaucuguacaacauc

SEQ ID NO: 37248 - RNA, 21 nt, Artificial Sequence
  Synthetic
guccccaaccuccaaucacuc

SEQ ID NO: 37249 - RNA, 24 nt, Artificial Sequence
  Synthetic
gcaguccccaaccuccaaucacuc

SEQ ID NO: 37250 - RNA, 20 nt, Artificial Sequence
  Synthetic
gcuuucuuggacggucccuc

SEQ ID NO: 37251 - RNA, 22 nt, Artificial Sequence
  Synthetic
guauucuucuacuauaccuguc

SEQ ID NO: 37252 - RNA, 20 nt, Artificial Sequence
  Synthetic
gcccguuuguccucugauuc

SEQ ID NO: 37253 - RNA, 23 nt, Artificial Sequence
  Synthetic
guugcccguuuguccucugauuc

SEQ ID NO: 37254 - RNA, 21 nt, Artificial Sequence
  Synthetic
guuuacuagugccauuuguuc

SEQ ID NO: 37255 - RNA, 18 nt, Artificial Sequence
  Synthetic
gaaacucccuguuaacag

SEQ ID NO: 37256 - RNA, 19 nt, Artificial Sequence
  Synthetic
ggaaacucccuguuaacag

SEQ ID NO: 37257 - RNA, 20 nt, Artificial Sequence
  Synthetic
gaauuaggcaaugaguccag

SEQ ID NO: 37258 - RNA, 23 nt, Artificial Sequence
  Synthetic
gacuacuguuguuagacgaagag

SEQ ID NO: 37259 - RNA, 20 nt, Artificial Sequence
  Synthetic
gcugguggcuccaguucagg

SEQ ID NO: 37260 - RNA, 21 nt, Artificial Sequence
  Synthetic
gacuucucucaauuuucuagg

SEQ ID NO: 37261 - RNA, 22 nt, Artificial Sequence
  Synthetic
ggacuucucucaauuuucuagg

SEQ ID NO: 37262 - RNA, 24 nt, Artificial Sequence
  Synthetic
guggacuucucucaauuuucuagg

SEQ ID NO: 37263 - RNA, 19 nt, Artificial Sequence
  Synthetic
gaugaugugguauuggggg

SEQ ID NO: 37264 - RNA, 20 nt, Artificial Sequence
  Synthetic
  misc_feature (10)..(10): n is a, c, g, or u
gcaagcaauncugugcuggg

SEQ ID NO: 37265 - RNA, 21 nt, Artificial Sequence
  Synthetic
  misc_feature (11)..(11): n is a, c, g, or u
ggcaagcaauncugugcuggg

SEQ ID NO: 37266 - RNA, 18 nt, Artificial Sequence
  Synthetic
guguuuuugcugaguggg

SEQ ID NO: 37267 - RNA, 22 nt, Artificial Sequence
  Synthetic
gacuguguuuuugcugaguggg

SEQ ID NO: 37268 - RNA, 23 nt, Artificial Sequence
  Synthetic
ggacuguguuuuugcugaguggg

SEQ ID NO: 37269 - RNA, 19 nt, Artificial Sequence
  Synthetic
  misc_feature (13)..(13): n is a, c, g, or u
gaugacucuagcnaccugg

SEQ ID NO: 37270 - RNA, 18 nt, Artificial Sequence
  Synthetic
  misc_feature (2)..(2): n is a, c, g, or u
gnaacuuuuucaccucug

SEQ ID NO: 37271 - RNA, 20 nt, Artificial Sequence
  Synthetic
gucaacgaauaacuggucug

SEQ ID NO: 37272 - RNA, 19 nt, Artificial Sequence
  Synthetic
  misc_feature (10)..(10): n is a, c, g, or u
gacucuagcnaccugggug

SEQ ID NO: 37273 - RNA, 18 nt, Artificial Sequence
  Synthetic
gcauccagagauuuggug

SEQ ID NO: 37274 - RNA, 19 nt, Artificial Sequence
  Synthetic
gacauuauaacuaaaugug

SEQ ID NO: 37275 - RNA, 20 nt, Artificial Sequence
  Synthetic
guuaacaggccaauugauug

SEQ ID NO: 37276 - RNA, 24 nt, Artificial Sequence
  Synthetic
  misc_feature (3)..(3): n is a, c, g, or u
gcnaccuggguggguaauaauuug

SEQ ID NO: 37277 - RNA, 18 nt, Artificial Sequence
  Synthetic
guuuacuagugccauuug

SEQ ID NO: 37278 - RNA, 23 nt, Artificial Sequence
  Synthetic
gcucaguuuacuagugccauuug

SEQ ID NO: 37279 - RNA, 24 nt, Artificial Sequence
  Synthetic
ggcucaguuuacuagugccauuug

SEQ ID NO: 37280 - RNA, 20 nt, Artificial Sequence
  Synthetic
  misc_feature (20)..(20): n is a, c, g, or u
gucuggcuuucagcuauaun

SEQ ID NO: 37281 - RNA, 24 nt, Artificial Sequence
  Synthetic
gcauucagagcaaauaccaacaau

SEQ ID NO: 37282 - RNA, 19 nt, Artificial Sequence
  Synthetic
gcaucuccagcuucccaau

SEQ ID NO: 37283 - RNA, 24 nt, Artificial Sequence
  Synthetic
gaucugcaucuccagcuucccaau

SEQ ID NO: 37284 - RNA, 18 nt, Artificial Sequence
  Synthetic
guggucaauuauguuaau

SEQ ID NO: 37285 - RNA, 19 nt, Artificial Sequence
  Synthetic
gguggucaauuauguuaau

SEQ ID NO: 37286 - RNA, 20 nt, Artificial Sequence
  Synthetic
gaacauggagaacaucacau

SEQ ID NO: 37287 - RNA, 21 nt, Artificial Sequence
  Synthetic
guuuaaaaaucaggcaacuau

SEQ ID NO: 37288 - RNA, 22 nt, Artificial Sequence
  Synthetic
gguuuaaaaaucaggcaacuau

SEQ ID NO: 37289 - RNA, 23 nt, Artificial Sequence
  Synthetic
ggguuuaaaaaucaggcaacuau

SEQ ID NO: 37290 - RNA, 19 nt, Artificial Sequence
  Synthetic
guugguucuucuggacuau

SEQ ID NO: 37291 - RNA, 19 nt, Artificial Sequence
  Synthetic
gcuuucgcaaaauaccuau

SEQ ID NO: 37292 - RNA, 20 nt, Artificial Sequence
  Synthetic
ggcuuucgcaaaauaccuau

SEQ ID NO: 37293 - RNA, 18 nt, Artificial Sequence
  Synthetic
gauuugguggucaauuau

SEQ ID NO: 37294 - RNA, 20 nt, Artificial Sequence
  Synthetic
gagauuugguggucaauuau

SEQ ID NO: 37295 - RNA, 18 nt, Artificial Sequence
  Synthetic
gcaaaacucauugggacu

SEQ ID NO: 37296 - RNA, 20 nt, Artificial Sequence
  Synthetic
gagcaaaacucauugggacu

SEQ ID NO: 37297 - RNA, 24 nt, Artificial Sequence
  Synthetic
guuuuucuuguugacaagaauccu

SEQ ID NO: 37298 - RNA, 21 nt, Artificial Sequence
  Synthetic
  misc_feature (16)..(16): n is a, c, g, or u
gucaggggccuguaunuuccu

SEQ ID NO: 37299 - RNA, 20 nt, Artificial Sequence
  Synthetic
gaacaauuugugggcccucu

SEQ ID NO: 37300 - RNA, 22 nt, Artificial Sequence
  Synthetic
gugaacaauuugugggcccucu

SEQ ID NO: 37301 - RNA, 19 nt, Artificial Sequence
  Synthetic
gaaccuuuguggcuccucu

SEQ ID NO: 37302 - RNA, 20 nt, Artificial Sequence
  Synthetic
ggaaccuuuguggcuccucu

SEQ ID NO: 37303 - RNA, 22 nt, Artificial Sequence
  Synthetic
guggaaccuuuguggcuccucu

SEQ ID NO: 37304 - RNA, 24 nt, Artificial Sequence
  Synthetic
gcguggaaccuuuguggcuccucu

SEQ ID NO: 37305 - RNA, 21 nt, Artificial Sequence
  Synthetic
guuaccaauuuucuuuugucu

SEQ ID NO: 37306 - RNA, 24 nt, Artificial Sequence
  Synthetic
gcuguuaccaauuuucuuuugucu

SEQ ID NO: 37307 - RNA, 18 nt, Artificial Sequence
  Synthetic
ggauauguaauuggaagu

SEQ ID NO: 37308 - RNA, 19 nt, Artificial Sequence
  Synthetic
gggauauguaauuggaagu

SEQ ID NO: 37309 - RNA, 21 nt, Artificial Sequence
  Synthetic
guauuuggugucuuuuggagu

SEQ ID NO: 37310 - RNA, 23 nt, Artificial Sequence
  Synthetic
gaguauuuggugucuuuuggagu

SEQ ID NO: 37311 - RNA, 19 nt, Artificial Sequence
  Synthetic
gaagaauuaggcaaugagu

SEQ ID NO: 37312 - RNA, 20 nt, Artificial Sequence
  Synthetic
ggaagaauuaggcaaugagu

SEQ ID NO: 37313 - RNA, 21 nt, Artificial Sequence
  Synthetic
gggaagaauuaggcaaugagu

SEQ ID NO: 37314 - RNA, 23 nt, Artificial Sequence
  Synthetic
gugggaagaauuaggcaaugagu

SEQ ID NO: 37315 - RNA, 18 nt, Artificial Sequence
  Synthetic
gccagaggccaacaaggu

SEQ ID NO: 37316 - RNA, 19 nt, Artificial Sequence
  Synthetic
ggccagaggccaacaaggu

SEQ ID NO: 37317 - RNA, 22 nt, Artificial Sequence
  Synthetic
  misc_feature (10)..(10): n is a, c, g, or u
gacucuagcnaccugggugggu

SEQ ID NO: 37318 - RNA, 19 nt, Artificial Sequence
  Synthetic
guguguccuggccuaaauu

SEQ ID NO: 37319 - RNA, 20 nt, Artificial Sequence
  Synthetic
gcaauccucuaggauuccuu

SEQ ID NO: 37320 - RNA, 18 nt, Artificial Sequence
  Synthetic
gaucugcaucuccagcuu

SEQ ID NO: 37321 - RNA, 18 nt, Artificial Sequence
  Synthetic
gcuaugccucaucuucuu

SEQ ID NO: 37322 - RNA, 19 nt, Artificial Sequence
  Synthetic
  misc_feature (9)..(9): n is a, c, g, or u
gucccuuunuaccgcuguu

SEQ ID NO: 37323 - RNA, 21 nt, Artificial Sequence
  Synthetic
  misc_feature (11)..(11): n is a, c, g, or u
gagucccuuunuaccgcuguu

SEQ ID NO: 37324 - RNA, 18 nt, Artificial Sequence
  Synthetic
gacuuuuucccgucuguu

SEQ ID NO: 37325 - RNA, 20 nt, Artificial Sequence
  Synthetic
gauccagcauccagagauuu

SEQ ID NO: 37326 - RNA, 19 nt, Artificial Sequence
  Synthetic
guuucucuuggcucaguuu

SEQ ID NO: 37327 - RNA, 20 nt, Artificial Sequence
  Synthetic
guuaauacuaauauggguuu

SEQ ID NO: 37328 - RNA, 18 nt, Artificial Sequence
  Synthetic
cuucccacucagcaaaaa

SEQ ID NO: 37329 - RNA, 19 nt, Artificial Sequence
  Synthetic
ucuucccacucagcaaaaa

SEQ ID NO: 37330 - RNA, 20 nt, Artificial Sequence
  Synthetic
uucuucccacucagcaaaaa

SEQ ID NO: 37331 - RNA, 21 nt, Artificial Sequence
  Synthetic
auucuucccacucagcaaaaa

SEQ ID NO: 37332 - RNA, 22 nt, Artificial Sequence
  Synthetic
aauucuucccacucagcaaaaa

SEQ ID NO: 37333 - RNA, 23 nt, Artificial Sequence
  Synthetic
uaauucuucccacucagcaaaaa

SEQ ID NO: 37334 - RNA, 24 nt, Artificial Sequence
  Synthetic
cuaauucuucccacucagcaaaaa

SEQ ID NO: 37335 - RNA, 19 nt, Artificial Sequence
  Synthetic
uguauacccaaagacaaaa

SEQ ID NO: 37336 - RNA, 20 nt, Artificial Sequence
  Synthetic
auguauacccaaagacaaaa

SEQ ID NO: 37337 - RNA, 22 nt, Artificial Sequence
  Synthetic
agauguauacccaaagacaaaa

SEQ ID NO: 37338 - RNA, 23 nt, Artificial Sequence
  Synthetic
uagauguauacccaaagacaaaa

SEQ ID NO: 37339 - RNA, 24 nt, Artificial Sequence
  Synthetic
uuagauguauacccaaagacaaaa

SEQ ID NO: 37340 - RNA, 18 nt, Artificial Sequence
  Synthetic
acccaaagacaaaagaaa

SEQ ID NO: 37341 - RNA, 19 nt, Artificial Sequence
  Synthetic
uacccaaagacaaaagaaa

SEQ ID NO: 37342 - RNA, 20 nt, Artificial Sequence
  Synthetic
auacccaaagacaaaagaaa

SEQ ID NO: 37343 - RNA, 21 nt, Artificial Sequence
  Synthetic
uauacccaaagacaaaagaaa

SEQ ID NO: 37344 - RNA, 23 nt, Artificial Sequence
  Synthetic
uguauacccaaagacaaaagaaa

SEQ ID NO: 37345 - RNA, 24 nt, Artificial Sequence
  Synthetic
auguauacccaaagacaaaagaaa

SEQ ID NO: 37346 - RNA, 19 nt, Artificial Sequence
  Synthetic
aguccagaagaaccaacaa

SEQ ID NO: 37347 - RNA, 20 nt, Artificial Sequence
  Synthetic
uaguccagaagaaccaacaa

SEQ ID NO: 37348 - RNA, 18 nt, Artificial Sequence
  Synthetic
uauuuugcgaaagcccaa

SEQ ID NO: 37349 - RNA, 18 nt, Artificial Sequence
  Synthetic
uauaaugucuugaugcaa

SEQ ID NO: 37350 - RNA, 19 nt, Artificial Sequence
  Synthetic
uuauaaugucuugaugcaa

SEQ ID NO: 37351 - RNA, 21 nt, Artificial Sequence
  Synthetic
aguuauaaugucuugaugcaa

SEQ ID NO: 37352 - RNA, 22 nt, Artificial Sequence
  Synthetic
uaguuauaaugucuugaugcaa

SEQ ID NO: 37353 - RNA, 23 nt, Artificial Sequence
  Synthetic
uuaguuauaaugucuugaugcaa

SEQ ID NO: 37354 - RNA, 24 nt, Artificial Sequence
  Synthetic
uuuaguuauaaugucuugaugcaa

SEQ ID NO: 37355 - RNA, 18 nt, Artificial Sequence
  Synthetic
cagcaggaugaagaggaa

SEQ ID NO: 37356 - RNA, 20 nt, Artificial Sequence
  Synthetic
agcagcaggaugaagaggaa

SEQ ID NO: 37357 - RNA, 21 nt, Artificial Sequence
  Synthetic
uagcagcaggaugaagaggaa

SEQ ID NO: 37358 - RNA, 22 nt, Artificial Sequence
  Synthetic
auagcagcaggaugaagaggaa

SEQ ID NO: 37359 - RNA, 23 nt, Artificial Sequence
  Synthetic
cauagcagcaggaugaagaggaa

SEQ ID NO: 37360 - RNA, 18 nt, Artificial Sequence
  Synthetic
acuacauuuucuggauaa

SEQ ID NO: 37361 - RNA, 19 nt, Artificial Sequence
  Synthetic
aacuacauuuucuggauaa

SEQ ID NO: 37362 - RNA, 20 nt, Artificial Sequence
  Synthetic
uaacuacauuuucuggauaa

SEQ ID NO: 37363 - RNA, 21 nt, Artificial Sequence
  Synthetic
uuaacuacauuuucuggauaa

SEQ ID NO: 37364 - RNA, 22 nt, Artificial Sequence
  Synthetic
auuaacuacauuuucuggauaa

SEQ ID NO: 37365 - RNA, 24 nt, Artificial Sequence
  Synthetic
ugauuaacuacauuuucuggauaa

SEQ ID NO: 37366 - RNA, 18 nt, Artificial Sequence
  Synthetic
aacccauauuaguauuaa

SEQ ID NO: 37367 - RNA, 19 nt, Artificial Sequence
  Synthetic
aaacccauauuaguauuaa

SEQ ID NO: 37368 - RNA, 20 nt, Artificial Sequence
  Synthetic
uaaacccauauuaguauuaa

SEQ ID NO: 37369 - RNA, 21 nt, Artificial Sequence
  Synthetic
uuaaacccauauuaguauuaa

SEQ ID NO: 37370 - RNA, 22 nt, Artificial Sequence
  Synthetic
uuuaaacccauauuaguauuaa

SEQ ID NO: 37371 - RNA, 23 nt, Artificial Sequence
  Synthetic
uuuuaaacccauauuaguauuaa

SEQ ID NO: 37372 - RNA, 24 nt, Artificial Sequence
  Synthetic
uuuuuaaacccauauuaguauuaa

SEQ ID NO: 37373 - RNA, 18 nt, Artificial Sequence
  Synthetic
  misc_feature (7)..(7): n is a, c, g, or u
aacagunggacaugaaca

SEQ ID NO: 37374 - RNA, 20 nt, Artificial Sequence
  Synthetic
  misc_feature (9)..(9): n is a, c, g, or u
ugaacagunggacaugaaca

SEQ ID NO: 37375 - RNA, 21 nt, Artificial Sequence
  Synthetic
  misc_feature (10)..(10): n is a, c, g, or u
uugaacagunggacaugaaca

SEQ ID NO: 37376 - RNA, 22 nt, Artificial Sequence
  Synthetic
  misc_feature (11)..(11): n is a, c, g, or u
cuugaacagunggacaugaaca

SEQ ID NO: 37377 - RNA, 18 nt, Artificial Sequence
  Synthetic
ccgguuguugacauaaca

SEQ ID NO: 37378 - RNA, 19 nt, Artificial Sequence
  Synthetic
cccgguuguugacauaaca

SEQ ID NO: 37379 - RNA, 20 nt, Artificial Sequence
  Synthetic
  misc_feature (1)..(1): n is a, c, g, or u
ncccgguuguugacauaaca

SEQ ID NO: 37380 - RNA, 18 nt, Artificial Sequence
  Synthetic
ucaauuggccuguuaaca

SEQ ID NO: 37381 - RNA, 19 nt, Artificial Sequence
  Synthetic
aucaauuggccuguuaaca

SEQ ID NO: 37382 - RNA, 20 nt, Artificial Sequence
  Synthetic
aaucaauuggccuguuaaca

SEQ ID NO: 37383 - RNA, 18 nt, Artificial Sequence
  Synthetic
uaaggcaggguaaccaca

SEQ ID NO: 37384 - RNA, 19 nt, Artificial Sequence
  Synthetic
uuaaggcaggguaaccaca

SEQ ID NO: 37385 - RNA, 20 nt, Artificial Sequence
  Synthetic
auuaaggcaggguaaccaca

SEQ ID NO: 37386 - RNA, 18 nt, Artificial Sequence
  Synthetic
uccacacuccaaaagaca

SEQ ID NO: 37387 - RNA, 19 nt, Artificial Sequence
  Synthetic
auccacacuccaaaagaca

SEQ ID NO: 37388 - RNA, 20 nt, Artificial Sequence
  Synthetic
aauccacacuccaaaagaca

SEQ ID NO: 37389 - RNA, 18 nt, Artificial Sequence
  Synthetic
ucucccaaaaguaagaca

SEQ ID NO: 37390 - RNA, 19 nt, Artificial Sequence
  Synthetic
cucucccaaaaguaagaca

SEQ ID NO: 37391 - RNA, 20 nt, Artificial Sequence
  Synthetic
ucucucccaaaaguaagaca

SEQ ID NO: 37392 - RNA, 21 nt, Artificial Sequence
  Synthetic
uucucucccaaaaguaagaca

SEQ ID NO: 37393 - RNA, 22 nt, Artificial Sequence
  Synthetic
uuucucucccaaaaguaagaca

SEQ ID NO: 37394 - RNA, 18 nt, Artificial Sequence
  Synthetic
aggacaaguuggaggaca

SEQ ID NO: 37395 - RNA, 19 nt, Artificial Sequence
  Synthetic
caggacaaguuggaggaca

SEQ ID NO: 37396 - RNA, 20 nt, Artificial Sequence
  Synthetic
ccaggacaaguuggaggaca

SEQ ID NO: 37397 - RNA, 18 nt, Artificial Sequence
  Synthetic
agcaacaugagggauaca

SEQ ID NO: 37398 - RNA, 19 nt, Artificial Sequence
  Synthetic
cagcaacaugagggauaca

SEQ ID NO: 37399 - RNA, 20 nt, Artificial Sequence
  Synthetic
acagcaacaugagggauaca

SEQ ID NO: 37400 - RNA, 18 nt, Artificial Sequence
  Synthetic
uauuaacauaauugacca

SEQ ID NO: 37401 - RNA, 20 nt, Artificial Sequence
  Synthetic
aguauuaacauaauugacca

SEQ ID NO: 37402 - RNA, 21 nt, Artificial Sequence
  Synthetic
uaguauuaacauaauugacca

SEQ ID NO: 37403 - RNA, 22 nt, Artificial Sequence
  Synthetic
uuaguauuaacauaauugacca

SEQ ID NO: 37404 - RNA, 23 nt, Artificial Sequence
  Synthetic
auuaguauuaacauaauugacca

SEQ ID NO: 37405 - RNA, 24 nt, Artificial Sequence
  Synthetic
uauuaguauuaacauaauugacca

SEQ ID NO: 37406 - RNA, 18 nt, Artificial Sequence
  Synthetic
caaguauauggugaccca

SEQ ID NO: 37407 - RNA, 19 nt, Artificial Sequence
  Synthetic
ccaaguauauggugaccca

SEQ ID NO: 37408 - RNA, 20 nt, Artificial Sequence
  Synthetic
cccaaguauauggugaccca

SEQ ID NO: 37409 - RNA, 18 nt, Artificial Sequence
  Synthetic
  misc_feature (1)..(1): n is a, c, g, or u
nccgauggccaagcccca

SEQ ID NO: 37410 - RNA, 20 nt, Artificial Sequence
  Synthetic
  misc_feature (3)..(3): n is a, c, g, or u
ugnccgauggccaagcccca

SEQ ID NO: 37411 - RNA, 18 nt, Artificial Sequence
  Synthetic
uuccaauuacauauccca

SEQ ID NO: 37412 - RNA, 19 nt, Artificial Sequence
  Synthetic
cuuccaauuacauauccca

SEQ ID NO: 37413 - RNA, 20 nt, Artificial Sequence
  Synthetic
acuuccaauuacauauccca

SEQ ID NO: 37414 - RNA, 21 nt, Artificial Sequence
  Synthetic
aacuuccaauuacauauccca

SEQ ID NO: 37415 - RNA, 22 nt, Artificial Sequence
  Synthetic
caacuuccaauuacauauccca

SEQ ID NO: 37416 - RNA, 23 nt, Artificial Sequence
  Synthetic
ccaacuuccaauuacauauccca

SEQ ID NO: 37417 - RNA, 24 nt, Artificial Sequence
  Synthetic
cccaacuuccaauuacauauccca

SEQ ID NO: 37418 - RNA, 18 nt, Artificial Sequence
  Synthetic
acagaauugucaguccca

SEQ ID NO: 37419 - RNA, 20 nt, Artificial Sequence
  Synthetic
cgacagaauugucaguccca

SEQ ID NO: 37420 - RNA, 18 nt, Artificial Sequence
  Synthetic
  misc_feature (2)..(2): n is a, c, g, or u
cnauauagcugaaagcca

SEQ ID NO: 37421 - RNA, 19 nt, Artificial Sequence
  Synthetic
  misc_feature (3)..(3): n is a, c, g, or u
ucnauauagcugaaagcca

SEQ ID NO: 37422 - RNA, 20 nt, Artificial Sequence
  Synthetic
  misc_feature (4)..(4): n is a, c, g, or u
aucnauauagcugaaagcca

SEQ ID NO: 37423 - RNA, 21 nt, Artificial Sequence
  Synthetic
  misc_feature (5)..(5): n is a, c, g, or u
caucnauauagcugaaagcca

SEQ ID NO: 37424 - RNA, 22 nt, Artificial Sequence
  Synthetic
  misc_feature (6)..(6): n is a, c, g, or u
ucaucnauauagcugaaagcca

SEQ ID NO: 37425 - RNA, 23 nt, Artificial Sequence
  Synthetic
  misc_feature (7)..(7): n is a, c, g, or u
aucaucnauauagcugaaagcca

SEQ ID NO: 37426 - RNA, 24 nt, Artificial Sequence
  Synthetic
  misc_feature (8)..(8): n is a, c, g, or u
caucaucnauauagcugaaagcca

SEQ ID NO: 37427 - RNA, 18 nt, Artificial Sequence
  Synthetic
ucccaccuugugagucca

SEQ ID NO: 37428 - RNA, 19 nt, Artificial Sequence
  Synthetic
uucccaccuugugagucca

SEQ ID NO: 37429 - RNA, 20 nt, Artificial Sequence
  Synthetic
uuucccaccuugugagucca

SEQ ID NO: 37430 - RNA, 18 nt, Artificial Sequence
  Synthetic
cucugaaugcugggucca

SEQ ID NO: 37431 - RNA, 20 nt, Artificial Sequence
  Synthetic
ugcucugaaugcugggucca

SEQ ID NO: 37432 - RNA, 18 nt, Artificial Sequence
  Synthetic
uagaauacccgccuucca

SEQ ID NO: 37433 - RNA, 19 nt, Artificial Sequence
  Synthetic
auagaauacccgccuucca

SEQ ID NO: 37434 - RNA, 20 nt, Artificial Sequence
  Synthetic
uauagaauacccgccuucca

SEQ ID NO: 37435 - RNA, 18 nt, Artificial Sequence
  Synthetic
ucguugacagacuuucca

SEQ ID NO: 37436 - RNA, 19 nt, Artificial Sequence
  Synthetic
uucguugacagacuuucca

SEQ ID NO: 37437 - RNA, 20 nt, Artificial Sequence
  Synthetic
auucguugacagacuuucca

SEQ ID NO: 37438 - RNA, 19 nt, Artificial Sequence
  Synthetic
uguugauaggauaggggca

SEQ ID NO: 37439 - RNA, 21 nt, Artificial Sequence
  Synthetic
aguguugauaggauaggggca

SEQ ID NO: 37440 - RNA, 22 nt, Artificial Sequence
  Synthetic
aaguguugauaggauaggggca

SEQ ID NO: 37441 - RNA, 18 nt, Artificial Sequence
  Synthetic
  misc_feature (12)..(12): n is a, c, g, or u
uauauaacugcnuuggca

SEQ ID NO: 37442 - RNA, 19 nt, Artificial Sequence
  Synthetic
  misc_feature (13)..(13): n is a, c, g, or u
uuauauaacugcnuuggca

SEQ ID NO: 37443 - RNA, 20 nt, Artificial Sequence
  Synthetic
  misc_feature (14)..(14): n is a, c, g, or u
cuuauauaacugcnuuggca

SEQ ID NO: 37444 - RNA, 19 nt, Artificial Sequence
  Synthetic
agaggugaagcgaagugca

SEQ ID NO: 37445 - RNA, 20 nt, Artificial Sequence
  Synthetic
cagaggugaagcgaagugca

SEQ ID NO: 37446 - RNA, 18 nt, Artificial Sequence
  Synthetic
auggauauuuggaaaaga

SEQ ID NO: 37447 - RNA, 19 nt, Artificial Sequence
  Synthetic
aauggauauuuggaaaaga

SEQ ID NO: 37448 - RNA, 20 nt, Artificial Sequence
  Synthetic
aaauggauauuuggaaaaga

SEQ ID NO: 37449 - RNA, 21 nt, Artificial Sequence
  Synthetic
caaauggauauuuggaaaaga

SEQ ID NO: 37450 - RNA, 23 nt, Artificial Sequence
  Synthetic
ugcaaauggauauuuggaaaaga

SEQ ID NO: 37451 - RNA, 24 nt, Artificial Sequence
  Synthetic
augcaaauggauauuuggaaaaga

SEQ ID NO: 37452 - RNA, 18 nt, Artificial Sequence
  Synthetic
  misc_feature (4)..(4): n is a, c, g, or u
agunggacaugaacaaga

SEQ ID NO: 37453 - RNA, 19 nt, Artificial Sequence
  Synthetic
  misc_feature (5)..(5): n is a, c, g, or u
cagunggacaugaacaaga

SEQ ID NO: 37454 - RNA, 20 nt, Artificial Sequence
  Synthetic
  misc_feature (6)..(6): n is a, c, g, or u
acagunggacaugaacaaga

SEQ ID NO: 37455 - RNA, 21 nt, Artificial Sequence
  Synthetic
  misc_feature (7)..(7): n is a, c, g, or u
aacagunggacaugaacaaga

SEQ ID NO: 37456 - RNA, 23 nt, Artificial Sequence
  Synthetic
  misc_feature (9)..(9): n is a, c, g, or u
ugaacagunggacaugaacaaga

SEQ ID NO: 37457 - RNA, 24 nt, Artificial Sequence
  Synthetic
  misc_feature (10)..(10): n is a, c, g, or u
uugaacagunggacaugaacaaga

SEQ ID NO: 37458 - RNA, 19 nt, Artificial Sequence
  Synthetic
agauugacgagaugugaga

SEQ ID NO: 37459 - RNA, 20 nt, Artificial Sequence
  Synthetic
aagauugacgagaugugaga

SEQ ID NO: 37460 - RNA, 18 nt, Artificial Sequence
  Synthetic
auuuccgagaaaggacga

SEQ ID NO: 37461 - RNA, 19 nt, Artificial Sequence
  Synthetic
uauuuccgagaaaggacga

SEQ ID NO: 37462 - RNA, 20 nt, Artificial Sequence
  Synthetic
auauuuccgagaaaggacga

SEQ ID NO: 37463 - RNA, 18 nt, Artificial Sequence
  Synthetic
ucuucgucugcgaggcga

SEQ ID NO: 37464 - RNA, 19 nt, Artificial Sequence
  Synthetic
aucuucgucugcgaggcga

SEQ ID NO: 37465 - RNA, 19 nt, Artificial Sequence
  Synthetic
aggccuuauaaguuggcga

SEQ ID NO: 37466 - RNA, 20 nt, Artificial Sequence
  Synthetic
aaggccuuauaaguuggcga

SEQ ID NO: 37467 - RNA, 21 nt, Artificial Sequence
  Synthetic
aaaggccuuauaaguuggcga

SEQ ID NO: 37468 - RNA, 23 nt, Artificial Sequence
  Synthetic
agaaaggccuuauaaguuggcga

SEQ ID NO: 37469 - RNA, 18 nt, Artificial Sequence
  Synthetic
aagcugaagcggugucga

SEQ ID NO: 37470 - RNA, 19 nt, Artificial Sequence
  Synthetic
aaagcugaagcggugucga

SEQ ID NO: 37471 - RNA, 20 nt, Artificial Sequence
  Synthetic
caaagcugaagcggugucga

SEQ ID NO: 37472 - RNA, 19 nt, Artificial Sequence
  Synthetic
agaucacgaacagacggga

SEQ ID NO: 37473 - RNA, 20 nt, Artificial Sequence
  Synthetic
aagaucacgaacagacggga

SEQ ID NO: 37474 - RNA, 18 nt, Artificial Sequence
  Synthetic
cagccuagcagccaugga

SEQ ID NO: 37475 - RNA, 19 nt, Artificial Sequence
  Synthetic
acagccuagcagccaugga

SEQ ID NO: 37476 - RNA, 20 nt, Artificial Sequence
  Synthetic
cacagccuagcagccaugga

SEQ ID NO: 37477 - RNA, 18 nt, Artificial Sequence
  Synthetic
aggguccccaauccugga

SEQ ID NO: 37478 - RNA, 19 nt, Artificial Sequence
  Synthetic
caggguccccaauccugga

SEQ ID NO: 37479 - RNA, 18 nt, Artificial Sequence
  Synthetic
aauaaugucuggucugga

SEQ ID NO: 37480 - RNA, 19 nt, Artificial Sequence
  Synthetic
aaauaaugucuggucugga

SEQ ID NO: 37481 - RNA, 20 nt, Artificial Sequence
  Synthetic
uaaauaaugucuggucugga

SEQ ID NO: 37482 - RNA, 22 nt, Artificial Sequence
  Synthetic
uguaaauaaugucuggucugga

SEQ ID NO: 37483 - RNA, 23 nt, Artificial Sequence
  Synthetic
auguaaauaaugucuggucugga

SEQ ID NO: 37484 - RNA, 24 nt, Artificial Sequence
  Synthetic
uauguaaauaaugucuggucugga

SEQ ID NO: 37485 - RNA, 18 nt, Artificial Sequence
  Synthetic
agcccuacgaaccacuga

SEQ ID NO: 37486 - RNA, 19 nt, Artificial Sequence
  Synthetic
aagcccuacgaaccacuga

SEQ ID NO: 37487 - RNA, 20 nt, Artificial Sequence
  Synthetic
aaagcccuacgaaccacuga

SEQ ID NO: 37488 - RNA, 20 nt, Artificial Sequence
  Synthetic
agggguccuaggaauccuga

SEQ ID NO: 37489 - RNA, 21 nt, Artificial Sequence
  Synthetic
cagggguccuaggaauccuga

SEQ ID NO: 37490 - RNA, 23 nt, Artificial Sequence
  Synthetic
agcagggguccuaggaauccuga

SEQ ID NO: 37491 - RNA, 18 nt, Artificial Sequence
  Synthetic
uucccgguacaaagcuga

SEQ ID NO: 37492 - RNA, 19 nt, Artificial Sequence
  Synthetic
auucccgguacaaagcuga

SEQ ID NO: 37493 - RNA, 18 nt, Artificial Sequence
  Synthetic
augauuaggcagagguga

SEQ ID NO: 37494 - RNA, 20 nt, Artificial Sequence
  Synthetic
agaugauuaggcagagguga

SEQ ID NO: 37495 - RNA, 22 nt, Artificial Sequence
  Synthetic
agagaugauuaggcagagguga

SEQ ID NO: 37496 - RNA, 23 nt, Artificial Sequence
  Synthetic
aagagaugauuaggcagagguga

SEQ ID NO: 37497 - RNA, 24 nt, Artificial Sequence
  Synthetic
caagagaugauuaggcagagguga

SEQ ID NO: 37498 - RNA, 18 nt, Artificial Sequence
  Synthetic
aauccuggagaagauuga

SEQ ID NO: 37499 - RNA, 19 nt, Artificial Sequence
  Synthetic
caauccuggagaagauuga

SEQ ID NO: 37500 - RNA, 20 nt, Artificial Sequence
  Synthetic
ccaauccuggagaagauuga

SEQ ID NO: 37501 - RNA, 18 nt, Artificial Sequence
  Synthetic
uuugucuaaugguaaaua

SEQ ID NO: 37502 - RNA, 19 nt, Artificial Sequence
  Synthetic
cuuugucuaaugguaaaua

SEQ ID NO: 37503 - RNA, 20 nt, Artificial Sequence
  Synthetic
ccuuugucuaaugguaaaua

SEQ ID NO: 37504 - RNA, 21 nt, Artificial Sequence
  Synthetic
accuuugucuaaugguaaaua

SEQ ID NO: 37505 - RNA, 22 nt, Artificial Sequence
  Synthetic
uaccuuugucuaaugguaaaua

SEQ ID NO: 37506 - RNA, 23 nt, Artificial Sequence
  Synthetic
auaccuuugucuaaugguaaaua

SEQ ID NO: 37507 - RNA, 18 nt, Artificial Sequence
  Synthetic
aaaaaucuggcaggcaua

SEQ ID NO: 37508 - RNA, 22 nt, Artificial Sequence
  Synthetic
ugggaaaaaucuggcaggcaua

SEQ ID NO: 37509 - RNA, 23 nt, Artificial Sequence
  Synthetic
uugggaaaaaucuggcaggcaua

SEQ ID NO: 37510 - RNA, 24 nt, Artificial Sequence
  Synthetic
uuugggaaaaaucuggcaggcaua

SEQ ID NO: 37511 - RNA, 20 nt, Artificial Sequence
  Synthetic
cgggauguuucucucuuaua

SEQ ID NO: 37512 - RNA, 18 nt, Artificial Sequence
  Synthetic
acacgggcacucccccua

SEQ ID NO: 37513 - RNA, 19 nt, Artificial Sequence
  Synthetic
cacacgggcacucccccua

SEQ ID NO: 37514 - RNA, 20 nt, Artificial Sequence
  Synthetic
acacacgggcacucccccua

SEQ ID NO: 37515 - RNA, 19 nt, Artificial Sequence
  Synthetic
ugaucgggaaggaauccua

SEQ ID NO: 37516 - RNA, 18 nt, Artificial Sequence
  Synthetic
ccacaaaaugaagcgcua

SEQ ID NO: 37517 - RNA, 19 nt, Artificial Sequence
  Synthetic
cccacaaaaugaagcgcua

SEQ ID NO: 37518 - RNA, 20 nt, Artificial Sequence
  Synthetic
acccacaaaaugaagcgcua

SEQ ID NO: 37519 - RNA, 18 nt, Artificial Sequence
  Synthetic
agaucuuguucccaagua

SEQ ID NO: 37520 - RNA, 19 nt, Artificial Sequence
  Synthetic
uagaucuuguucccaagua

SEQ ID NO: 37521 - RNA, 21 nt, Artificial Sequence
  Synthetic
uguagaucuuguucccaagua

SEQ ID NO: 37522 - RNA, 22 nt, Artificial Sequence
  Synthetic
cuguagaucuuguucccaagua

SEQ ID NO: 37523 - RNA, 24 nt, Artificial Sequence
  Synthetic
ugcuguagaucuuguucccaagua

SEQ ID NO: 37524 - RNA, 18 nt, Artificial Sequence
  Synthetic
ccuuccaaaggguaugua

SEQ ID NO: 37525 - RNA, 20 nt, Artificial Sequence
  Synthetic
cgccuuccaaaggguaugua

SEQ ID NO: 37526 - RNA, 21 nt, Artificial Sequence
  Synthetic
ccgccuuccaaaggguaugua

SEQ ID NO: 37527 - RNA, 22 nt, Artificial Sequence
  Synthetic
cccgccuuccaaaggguaugua

SEQ ID NO: 37528 - RNA, 23 nt, Artificial Sequence
  Synthetic
acccgccuuccaaaggguaugua

SEQ ID NO: 37529 - RNA, 24 nt, Artificial Sequence
  Synthetic
uacccgccuuccaaaggguaugua

SEQ ID NO: 37530 - RNA, 18 nt, Artificial Sequence
  Synthetic
cauaucccauaaaauuua

SEQ ID NO: 37531 - RNA, 19 nt, Artificial Sequence
  Synthetic
acauaucccauaaaauuua

SEQ ID NO: 37532 - RNA, 20 nt, Artificial Sequence
  Synthetic
uacauaucccauaaaauuua

SEQ ID NO: 37533 - RNA, 21 nt, Artificial Sequence
  Synthetic
uuacauaucccauaaaauuua

SEQ ID NO: 37534 - RNA, 22 nt, Artificial Sequence
  Synthetic
auuacauaucccauaaaauuua

SEQ ID NO: 37535 - RNA, 23 nt, Artificial Sequence
  Synthetic
aauuacauaucccauaaaauuua

SEQ ID NO: 37536 - RNA, 24 nt, Artificial Sequence
  Synthetic
caauuacauaucccauaaaauuua

SEQ ID NO: 37537 - RNA, 18 nt, Artificial Sequence
  Synthetic
agacaggaaaugugaaac

SEQ ID NO: 37538 - RNA, 19 nt, Artificial Sequence
  Synthetic
aagacaggaaaugugaaac

SEQ ID NO: 37539 - RNA, 20 nt, Artificial Sequence
  Synthetic
uaagacaggaaaugugaaac

SEQ ID NO: 37540 - RNA, 22 nt, Artificial Sequence
  Synthetic
aguaagacaggaaaugugaaac

SEQ ID NO: 37541 - RNA, 23 nt, Artificial Sequence
  Synthetic
aaguaagacaggaaaugugaaac

SEQ ID NO: 37542 - RNA, 24 nt, Artificial Sequence
  Synthetic
aaaguaagacaggaaaugugaaac

SEQ ID NO: 37543 - RNA, 19 nt, Artificial Sequence
  Synthetic
ugccucuucgucuaacaac

SEQ ID NO: 37544 - RNA, 20 nt, Artificial Sequence
  Synthetic
cugccucuucgucuaacaac

SEQ ID NO: 37545 - RNA, 18 nt, Artificial Sequence
  Synthetic
ccguguggaggggugaac

SEQ ID NO: 37546 - RNA, 19 nt, Artificial Sequence
  Synthetic
uccguguggaggggugaac

SEQ ID NO: 37547 - RNA, 20 nt, Artificial Sequence
  Synthetic
cuccguguggaggggugaac

SEQ ID NO: 37548 - RNA, 21 nt, Artificial Sequence
  Synthetic
ccuccguguggaggggugaac

SEQ ID NO: 37549 - RNA, 24 nt, Artificial Sequence
  Synthetic
aggccuccguguggaggggugaac

SEQ ID NO: 37550 - RNA, 18 nt, Artificial Sequence
  Synthetic
caaaagaaaauugguaac

SEQ ID NO: 37551 - RNA, 19 nt, Artificial Sequence
  Synthetic
acaaaagaaaauugguaac

SEQ ID NO: 37552 - RNA, 21 nt, Artificial Sequence
  Synthetic
agacaaaagaaaauugguaac

SEQ ID NO: 37553 - RNA, 22 nt, Artificial Sequence
  Synthetic
aagacaaaagaaaauugguaac

SEQ ID NO: 37554 - RNA, 23 nt, Artificial Sequence
  Synthetic
aaagacaaaagaaaauugguaac

SEQ ID NO: 37555 - RNA, 24 nt, Artificial Sequence
  Synthetic
caaagacaaaagaaaauugguaac

SEQ ID NO: 37556 - RNA, 18 nt, Artificial Sequence
  Synthetic
caggaaaugugaaaccac

SEQ ID NO: 37557 - RNA, 19 nt, Artificial Sequence
  Synthetic
acaggaaaugugaaaccac

SEQ ID NO: 37558 - RNA, 21 nt, Artificial Sequence
  Synthetic
agacaggaaaugugaaaccac

SEQ ID NO: 37559 - RNA, 22 nt, Artificial Sequence
  Synthetic
aagacaggaaaugugaaaccac

SEQ ID NO: 37560 - RNA, 23 nt, Artificial Sequence
  Synthetic
uaagacaggaaaugugaaaccac

SEQ ID NO: 37561 - RNA, 18 nt, Artificial Sequence
  Synthetic
uuccaaauuauuacccac

SEQ ID NO: 37562 - RNA, 19 nt, Artificial Sequence
  Synthetic
cuuccaaauuauuacccac

SEQ ID NO: 37563 - RNA, 20 nt, Artificial Sequence
  Synthetic
ucuuccaaauuauuacccac

SEQ ID NO: 37564 - RNA, 21 nt, Artificial Sequence
  Synthetic
aucuuccaaauuauuacccac

SEQ ID NO: 37565 - RNA, 24 nt, Artificial Sequence
  Synthetic
uggaucuuccaaauuauuacccac

SEQ ID NO: 37566 - RNA, 20 nt, Artificial Sequence
  Synthetic
uggaucggcagaggagccac

SEQ ID NO: 37567 - RNA, 18 nt, Artificial Sequence
  Synthetic
ccuacagccuccuaauac

SEQ ID NO: 37568 - RNA, 20 nt, Artificial Sequence
  Synthetic
ugccuacagccuccuaauac

SEQ ID NO: 37569 - RNA, 21 nt, Artificial Sequence
  Synthetic
augccuacagccuccuaauac

SEQ ID NO: 37570 - RNA, 22 nt, Artificial Sequence
  Synthetic
uaugccuacagccuccuaauac

SEQ ID NO: 37571 - RNA, 23 nt, Artificial Sequence
  Synthetic
uuaugccuacagccuccuaauac

SEQ ID NO: 37572 - RNA, 24 nt, Artificial Sequence
  Synthetic
uuuaugccuacagccuccuaauac

SEQ ID NO: 37573 - RNA, 20 nt, Artificial Sequence
  Synthetic
aggacaaacgggcaacauac

SEQ ID NO: 37574 - RNA, 22 nt, Artificial Sequence
  Synthetic
agaggacaaacgggcaacauac

SEQ ID NO: 37575 - RNA, 23 nt, Artificial Sequence
  Synthetic
cagaggacaaacgggcaacauac

SEQ ID NO: 37576 - RNA, 24 nt, Artificial Sequence
  Synthetic
ucagaggacaaacgggcaacauac

SEQ ID NO: 37577 - RNA, 18 nt, Artificial Sequence
  Synthetic
aauugagagaaguccacc

SEQ ID NO: 37578 - RNA, 19 nt, Artificial Sequence
  Synthetic
aaauugagagaaguccacc

SEQ ID NO: 37579 - RNA, 20 nt, Artificial Sequence
  Synthetic
aaaauugagagaaguccacc

SEQ ID NO: 37580 - RNA, 19 nt, Artificial Sequence
  Synthetic
cguaaagagaggugcgccc

SEQ ID NO: 37581 - RNA, 18 nt, Artificial Sequence
  Synthetic
uuuacugugagagggccc

SEQ ID NO: 37582 - RNA, 19 nt, Artificial Sequence
  Synthetic
auuuacugugagagggccc

SEQ ID NO: 37583 - RNA, 20 nt, Artificial Sequence
  Synthetic
cauuuacugugagagggccc

SEQ ID NO: 37584 - RNA, 19 nt, Artificial Sequence
  Synthetic
cggacugaggcccacuccc

SEQ ID NO: 37585 - RNA, 20 nt, Artificial Sequence
  Synthetic
acggacugaggcccacuccc

SEQ ID NO: 37586 - RNA, 21 nt, Artificial Sequence
  Synthetic
aacggacugaggcccacuccc

SEQ ID NO: 37587 - RNA, 22 nt, Artificial Sequence
  Synthetic
aaacggacugaggcccacuccc

SEQ ID NO: 37588 - RNA, 24 nt, Artificial Sequence
  Synthetic
agaaacggacugaggcccacuccc

SEQ ID NO: 37589 - RNA, 18 nt, Artificial Sequence
  Synthetic
aagaacgguuucucuccc

SEQ ID NO: 37590 - RNA, 19 nt, Artificial Sequence
  Synthetic
caagaacgguuucucuccc

SEQ ID NO: 37591 - RNA, 20 nt, Artificial Sequence
  Synthetic
ucaagaacgguuucucuccc

SEQ ID NO: 37592 - RNA, 18 nt, Artificial Sequence
  Synthetic
agguauuuugcgaaagcc

SEQ ID NO: 37593 - RNA, 19 nt, Artificial Sequence
  Synthetic
uagguauuuugcgaaagcc

SEQ ID NO: 37594 - RNA, 20 nt, Artificial Sequence
  Synthetic
auagguauuuugcgaaagcc

SEQ ID NO: 37595 - RNA, 18 nt, Artificial Sequence
  Synthetic
ccuuguuggccucuggcc

SEQ ID NO: 37596 - RNA, 19 nt, Artificial Sequence
  Synthetic
accuuguuggccucuggcc

SEQ ID NO: 37597 - RNA, 20 nt, Artificial Sequence
  Synthetic
uaccuuguuggccucuggcc

SEQ ID NO: 37598 - RNA, 18 nt, Artificial Sequence
  Synthetic
cuaacaacaguagucucc

SEQ ID NO: 37599 - RNA, 19 nt, Artificial Sequence
  Synthetic
ucuaacaacaguagucucc

SEQ ID NO: 37600 - RNA, 18 nt, Artificial Sequence
  Synthetic
ugacauaacaaacagucc

SEQ ID NO: 37601 - RNA, 19 nt, Artificial Sequence
  Synthetic
uugacauaacaaacagucc

SEQ ID NO: 37602 - RNA, 21 nt, Artificial Sequence
  Synthetic
uguugacauaacaaacagucc

SEQ ID NO: 37603 - RNA, 22 nt, Artificial Sequence
  Synthetic
uuguugacauaacaaacagucc

SEQ ID NO: 37604 - RNA, 18 nt, Artificial Sequence
  Synthetic
caggugcaauuuccgucc

SEQ ID NO: 37605 - RNA, 19 nt, Artificial Sequence
  Synthetic
acaggugcaauuuccgucc

SEQ ID NO: 37606 - RNA, 20 nt, Artificial Sequence
  Synthetic
uacaggugcaauuuccgucc

SEQ ID NO: 37607 - RNA, 21 nt, Artificial Sequence
  Synthetic
auacaggugcaauuuccgucc

SEQ ID NO: 37608 - RNA, 22 nt, Artificial Sequence
  Synthetic
aauacaggugcaauuuccgucc

SEQ ID NO: 37609 - RNA, 18 nt, Artificial Sequence
  Synthetic
cauagaguugccuugagc

SEQ ID NO: 37610 - RNA, 19 nt, Artificial Sequence
  Synthetic
acauagaguugccuugagc

SEQ ID NO: 37611 - RNA, 20 nt, Artificial Sequence
  Synthetic
uacauagaguugccuugagc

SEQ ID NO: 37612 - RNA, 19 nt, Artificial Sequence
  Synthetic
ugcagaucuucugcgacgc

SEQ ID NO: 37613 - RNA, 20 nt, Artificial Sequence
  Synthetic
augcagaucuucugcgacgc

SEQ ID NO: 37614 - RNA, 18 nt, Artificial Sequence
  Synthetic
ugacgagaugugagaggc

SEQ ID NO: 37615 - RNA, 19 nt, Artificial Sequence
  Synthetic
uugacgagaugugagaggc

SEQ ID NO: 37616 - RNA, 20 nt, Artificial Sequence
  Synthetic
auugacgagaugugagaggc

SEQ ID NO: 37617 - RNA, 18 nt, Artificial Sequence
  Synthetic
aacaagagaugauuaggc

SEQ ID NO: 37618 - RNA, 20 nt, Artificial Sequence
  Synthetic
ugaacaagagaugauuaggc

SEQ ID NO: 37619 - RNA, 18 nt, Artificial Sequence
  Synthetic
  misc_feature (16)..(16): n is a, c, g, or u
auuacccacccaggungc

SEQ ID NO: 37620 - RNA, 19 nt, Artificial Sequence
  Synthetic
  misc_feature (17)..(17): n is a, c, g, or u
uauuacccacccaggungc

SEQ ID NO: 37621 - RNA, 20 nt, Artificial Sequence
  Synthetic
  misc_feature (18)..(18): n is a, c, g, or u
uuauuacccacccaggungc

SEQ ID NO: 37622 - RNA, 18 nt, Artificial Sequence
  Synthetic
  misc_feature (9)..(9): n is a, c, g, or u
cagcacagnauugcuugc

SEQ ID NO: 37623 - RNA, 19 nt, Artificial Sequence
  Synthetic
  misc_feature (10)..(10): n is a, c, g, or u
ccagcacagnauugcuugc

SEQ ID NO: 37624 - RNA, 20 nt, Artificial Sequence
  Synthetic
  misc_feature (11)..(11): n is a, c, g, or u
cccagcacagnauugcuugc

SEQ ID NO: 37625 - RNA, 21 nt, Artificial Sequence
  Synthetic
  misc_feature (12)..(12): n is a, c, g, or u
ccccagcacagnauugcuugc

SEQ ID NO: 37626 - RNA, 22 nt, Artificial Sequence
  Synthetic
  misc_feature (13)..(13): n is a, c, g, or u
accccagcacagnauugcuugc

SEQ ID NO: 37627 - RNA, 23 nt, Artificial Sequence
  Synthetic
  misc_feature (14)..(14): n is a, c, g, or u
caccccagcacagnauugcuugc

SEQ ID NO: 37628 - RNA, 24 nt, Artificial Sequence
  Synthetic
  misc_feature (15)..(15): n is a, c, g, or u
ucaccccagcacagnauugcuugc

SEQ ID NO: 37629 - RNA, 18 nt, Artificial Sequence
  Synthetic
caaaaacgagagcaacuc

SEQ ID NO: 37630 - RNA, 21 nt, Artificial Sequence
  Synthetic
aggcaaaaacgagagcaacuc

SEQ ID NO: 37631 - RNA, 22 nt, Artificial Sequence
  Synthetic
aaggcaaaaacgagagcaacuc

SEQ ID NO: 37632 - RNA, 24 nt, Artificial Sequence
  Synthetic
agaaggcaaaaacgagagcaacuc

SEQ ID NO: 37633 - RNA, 18 nt, Artificial Sequence
  Synthetic
cauguucggugcaggguc

SEQ ID NO: 37634 - RNA, 19 nt, Artificial Sequence
  Synthetic
ccauguucggugcaggguc

SEQ ID NO: 37635 - RNA, 20 nt, Artificial Sequence
  Synthetic
uccauguucggugcaggguc

SEQ ID NO: 37636 - RNA, 20 nt, Artificial Sequence
  Synthetic
agggucccguacuggugguc

SEQ ID NO: 37637 - RNA, 18 nt, Artificial Sequence
  Synthetic
acaagcagcuaggaguuc

SEQ ID NO: 37638 - RNA, 19 nt, Artificial Sequence
  Synthetic
aacaagcagcuaggaguuc

SEQ ID NO: 37639 - RNA, 20 nt, Artificial Sequence
  Synthetic
aaacaagcagcuaggaguuc

SEQ ID NO: 37640 - RNA, 21 nt, Artificial Sequence
  Synthetic
aaaacaagcagcuaggaguuc

SEQ ID NO: 37641 - RNA, 22 nt, Artificial Sequence
  Synthetic
caaaacaagcagcuaggaguuc

SEQ ID NO: 37642 - RNA, 24 nt, Artificial Sequence
  Synthetic
agcaaaacaagcagcuaggaguuc

SEQ ID NO: 37643 - RNA, 18 nt, Artificial Sequence
  Synthetic
augcuguagaucuuguuc

SEQ ID NO: 37644 - RNA, 19 nt, Artificial Sequence
  Synthetic
caugcuguagaucuuguuc

SEQ ID NO: 37645 - RNA, 20 nt, Artificial Sequence
  Synthetic
ccaugcuguagaucuuguuc

SEQ ID NO: 37646 - RNA, 18 nt, Artificial Sequence
  Synthetic
ugccaaucaggauuaaag

SEQ ID NO: 37647 - RNA, 19 nt, Artificial Sequence
  Synthetic
uugccaaucaggauuaaag

SEQ ID NO: 37648 - RNA, 20 nt, Artificial Sequence
  Synthetic
uuugccaaucaggauuaaag

SEQ ID NO: 37649 - RNA, 22 nt, Artificial Sequence
  Synthetic
aguuugccaaucaggauuaaag

SEQ ID NO: 37650 - RNA, 18 nt, Artificial Sequence
  Synthetic
agacaccaaauacucaag

SEQ ID NO: 37651 - RNA, 19 nt, Artificial Sequence
  Synthetic
aagacaccaaauacucaag

SEQ ID NO: 37652 - RNA, 20 nt, Artificial Sequence
  Synthetic
aaagacaccaaauacucaag

SEQ ID NO: 37653 - RNA, 21 nt, Artificial Sequence
  Synthetic
aaaagacaccaaauacucaag

SEQ ID NO: 37654 - RNA, 22 nt, Artificial Sequence
  Synthetic
caaaagacaccaaauacucaag

SEQ ID NO: 37655 - RNA, 23 nt, Artificial Sequence
  Synthetic
ccaaaagacaccaaauacucaag

SEQ ID NO: 37656 - RNA, 24 nt, Artificial Sequence
  Synthetic
uccaaaagacaccaaauacucaag

SEQ ID NO: 37657 - RNA, 18 nt, Artificial Sequence
  Synthetic
cauagcagcaggaugaag

SEQ ID NO: 37658 - RNA, 21 nt, Artificial Sequence
  Synthetic
aggcauagcagcaggaugaag

SEQ ID NO: 37659 - RNA, 23 nt, Artificial Sequence
  Synthetic
ugaggcauagcagcaggaugaag

SEQ ID NO: 37660 - RNA, 24 nt, Artificial Sequence
  Synthetic
augaggcauagcagcaggaugaag

SEQ ID NO: 37661 - RNA, 18 nt, Artificial Sequence
  Synthetic
uaacgugcagaggugaag

SEQ ID NO: 37662 - RNA, 20 nt, Artificial Sequence
  Synthetic
uguaacgugcagaggugaag

SEQ ID NO: 37663 - RNA, 18 nt, Artificial Sequence
  Synthetic
agcagcgaaacccaacag

SEQ ID NO: 37664 - RNA, 19 nt, Artificial Sequence
  Synthetic
agaagaugaggcauagcag

SEQ ID NO: 37665 - RNA, 20 nt, Artificial Sequence
  Synthetic
aagaagaugaggcauagcag

SEQ ID NO: 37666 - RNA, 18 nt, Artificial Sequence
  Synthetic
  misc_feature (14)..(15): n is a, c, g, or u
cauggugcuggugnncag

SEQ ID NO: 37667 - RNA, 19 nt, Artificial Sequence
  Synthetic
  misc_feature (1)..(1): n is a, c, g, or u
  misc_feature (15)..(16): n is a, c, g, or u
ncauggugcuggugnncag

SEQ ID NO: 37668 - RNA, 20 nt, Artificial Sequence
  Synthetic
  misc_feature (2)..(2): n is a, c, g, or u
  misc_feature (16)..(17): n is a, c, g, or u
uncauggugcuggugnncag

SEQ ID NO: 37669 - RNA, 21 nt, Artificial Sequence
  Synthetic
  misc_feature (3)..(3): n is a, c, g, or u
  misc_feature (17)..(18): n is a, c, g, or u
uuncauggugcuggugnncag

SEQ ID NO: 37670 - RNA, 23 nt, Artificial Sequence
  Synthetic
  misc_feature (5)..(5): n is a, c, g, or u
  misc_feature (19)..(20): n is a, c, g, or u
aguuncauggugcuggugnncag

SEQ ID NO: 37671 - RNA, 24 nt, Artificial Sequence
  Synthetic
  misc_feature (6)..(6): n is a, c, g, or u
  misc_feature (20)..(21): n is a, c, g, or u
aaguuncauggugcuggugnncag

SEQ ID NO: 37672 - RNA, 18 nt, Artificial Sequence
  Synthetic
cuuugggauuuuguagag

SEQ ID NO: 37673 - RNA, 19 nt, Artificial Sequence
  Synthetic
acuuugggauuuuguagag

SEQ ID NO: 37674 - RNA, 18 nt, Artificial Sequence
  Synthetic
caaguuggaggacaggag

SEQ ID NO: 37675 - RNA, 19 nt, Artificial Sequence
  Synthetic
acaaguuggaggacaggag

SEQ ID NO: 37676 - RNA, 22 nt, Artificial Sequence
  Synthetic
aggacaaguuggaggacaggag

SEQ ID NO: 37677 - RNA, 23 nt, Artificial Sequence
  Synthetic
caggacaaguuggaggacaggag

SEQ ID NO: 37678 - RNA, 24 nt, Artificial Sequence
  Synthetic
ccaggacaaguuggaggacaggag

SEQ ID NO: 37679 - RNA, 19 nt, Artificial Sequence
  Synthetic
cgauugguggaggcaggag

SEQ ID NO: 37680 - RNA, 20 nt, Artificial Sequence
  Synthetic
acgauugguggaggcaggag

SEQ ID NO: 37681 - RNA, 18 nt, Artificial Sequence
  Synthetic
ucccccuagaaaauugag

SEQ ID NO: 37682 - RNA, 19 nt, Artificial Sequence
  Synthetic
cucccccuagaaaauugag

SEQ ID NO: 37683 - RNA, 20 nt, Artificial Sequence
  Synthetic
acucccccuagaaaauugag

SEQ ID NO: 37684 - RNA, 21 nt, Artificial Sequence
  Synthetic
cacucccccuagaaaauugag

SEQ ID NO: 37685 - RNA, 18 nt, Artificial Sequence
  Synthetic
uaaagacagguauaguag

SEQ ID NO: 37686 - RNA, 19 nt, Artificial Sequence
  Synthetic
uuaaagacagguauaguag

SEQ ID NO: 37687 - RNA, 20 nt, Artificial Sequence
  Synthetic
auuaaagacagguauaguag

SEQ ID NO: 37688 - RNA, 23 nt, Artificial Sequence
  Synthetic
aggauuaaagacagguauaguag

SEQ ID NO: 37689 - RNA, 24 nt, Artificial Sequence
  Synthetic
caggauuaaagacagguauaguag

SEQ ID NO: 37690 - RNA, 18 nt, Artificial Sequence
  Synthetic
cuaaugguaaauauuuag

SEQ ID NO: 37691 - RNA, 19 nt, Artificial Sequence
  Synthetic
ucuaaugguaaauauuuag

SEQ ID NO: 37692 - RNA, 21 nt, Artificial Sequence
  Synthetic
ugucuaaugguaaauauuuag

SEQ ID NO: 37693 - RNA, 22 nt, Artificial Sequence
  Synthetic
uugucuaaugguaaauauuuag

SEQ ID NO: 37694 - RNA, 23 nt, Artificial Sequence
  Synthetic
uuugucuaaugguaaauauuuag

SEQ ID NO: 37695 - RNA, 24 nt, Artificial Sequence
  Synthetic
cuuugucuaaugguaaauauuuag

SEQ ID NO: 37696 - RNA, 18 nt, Artificial Sequence
  Synthetic
cugccucccugacugacg

SEQ ID NO: 37697 - RNA, 18 nt, Artificial Sequence
  Synthetic
uagaagaauacagccccg

SEQ ID NO: 37698 - RNA, 20 nt, Artificial Sequence
  Synthetic
aguagaagaauacagccccg

SEQ ID NO: 37699 - RNA, 21 nt, Artificial Sequence
  Synthetic
uaguagaagaauacagccccg

SEQ ID NO: 37700 - RNA, 22 nt, Artificial Sequence
  Synthetic
auaguagaagaauacagccccg

SEQ ID NO: 37701 - RNA, 23 nt, Artificial Sequence
  Synthetic
uauaguagaagaauacagccccg

SEQ ID NO: 37702 - RNA, 18 nt, Artificial Sequence
  Synthetic
cccgggaggggucguccg

SEQ ID NO: 37703 - RNA, 19 nt, Artificial Sequence
  Synthetic
ccccgggaggggucguccg

SEQ ID NO: 37704 - RNA, 19 nt, Artificial Sequence
  Synthetic
agugcuguauggugaggcg

SEQ ID NO: 37705 - RNA, 18 nt, Artificial Sequence
  Synthetic
uccaaauucuuuauaagg

SEQ ID NO: 37706 - RNA, 19 nt, Artificial Sequence
  Synthetic
cuccaaauucuuuauaagg

SEQ ID NO: 37707 - RNA, 18 nt, Artificial Sequence
  Synthetic
cauauaaaggcauuaagg

SEQ ID NO: 37708 - RNA, 20 nt, Artificial Sequence
  Synthetic
ugcauauaaaggcauuaagg

SEQ ID NO: 37709 - RNA, 18 nt, Artificial Sequence
  Synthetic
aucaggauuaaagacagg

SEQ ID NO: 37710 - RNA, 19 nt, Artificial Sequence
  Synthetic
aaucaggauuaaagacagg

SEQ ID NO: 37711 - RNA, 20 nt, Artificial Sequence
  Synthetic
caaucaggauuaaagacagg

SEQ ID NO: 37712 - RNA, 18 nt, Artificial Sequence
  Synthetic
augggaugggaauacagg

SEQ ID NO: 37713 - RNA, 20 nt, Artificial Sequence
  Synthetic
ugaugggaugggaauacagg

SEQ ID NO: 37714 - RNA, 21 nt, Artificial Sequence
  Synthetic
augaugggaugggaauacagg

SEQ ID NO: 37715 - RNA, 23 nt, Artificial Sequence
  Synthetic
agaugaugggaugggaauacagg

SEQ ID NO: 37716 - RNA, 24 nt, Artificial Sequence
  Synthetic
aagaugaugggaugggaauacagg

SEQ ID NO: 37717 - RNA, 18 nt, Artificial Sequence
  Synthetic
cauccagcgauagccagg

SEQ ID NO: 37718 - RNA, 19 nt, Artificial Sequence
  Synthetic
acauccagcgauagccagg

SEQ ID NO: 37719 - RNA, 20 nt, Artificial Sequence
  Synthetic
cacauccagcgauagccagg

SEQ ID NO: 37720 - RNA, 18 nt, Artificial Sequence
  Synthetic
ugguggucuauaagcagg

SEQ ID NO: 37721 - RNA, 19 nt, Artificial Sequence
  Synthetic
uugguggucuauaagcagg

SEQ ID NO: 37722 - RNA, 20 nt, Artificial Sequence
  Synthetic
uuugguggucuauaagcagg

SEQ ID NO: 37723 - RNA, 18 nt, Artificial Sequence
  Synthetic
auuuucuggauaauacgg

SEQ ID NO: 37724 - RNA, 19 nt, Artificial Sequence
  Synthetic
cauuuucuggauaauacgg

SEQ ID NO: 37725 - RNA, 20 nt, Artificial Sequence
  Synthetic
acauuuucuggauaauacgg

SEQ ID NO: 37726 - RNA, 18 nt, Artificial Sequence
  Synthetic
uauuuaguagaguuuggg

SEQ ID NO: 37727 - RNA, 19 nt, Artificial Sequence
  Synthetic
auauuuaguagaguuuggg

SEQ ID NO: 37728 - RNA, 20 nt, Artificial Sequence
  Synthetic
aauauuuaguagaguuuggg

SEQ ID NO: 37729 - RNA, 21 nt, Artificial Sequence
  Synthetic
aaauauuuaguagaguuuggg

SEQ ID NO: 37730 - RNA, 22 nt, Artificial Sequence
  Synthetic
uaaauauuuaguagaguuuggg

SEQ ID NO: 37731 - RNA, 19 nt, Artificial Sequence
  Synthetic
agccaaaaaggccauaugg

SEQ ID NO: 37732 - RNA, 20 nt, Artificial Sequence
  Synthetic
aagccaaaaaggccauaugg

SEQ ID NO: 37733 - RNA, 18 nt, Artificial Sequence
  Synthetic
aggaggcggaucugcugg

SEQ ID NO: 37734 - RNA, 19 nt, Artificial Sequence
  Synthetic
caggaggcggaucugcugg

SEQ ID NO: 37735 - RNA, 22 nt, Artificial Sequence
  Synthetic
aggcaggaggcggaucugcugg

SEQ ID NO: 37736 - RNA, 18 nt, Artificial Sequence
  Synthetic
cuagaggauugcuggugg

SEQ ID NO: 37737 - RNA, 19 nt, Artificial Sequence
  Synthetic
ccuagaggauugcuggugg

SEQ ID NO: 37738 - RNA, 20 nt, Artificial Sequence
  Synthetic
uccuagaggauugcuggugg

SEQ ID NO: 37739 - RNA, 18 nt, Artificial Sequence
  Synthetic
acugucucuuaguggugg

SEQ ID NO: 37740 - RNA, 20 nt, Artificial Sequence
  Synthetic
ugacugucucuuaguggugg

SEQ ID NO: 37741 - RNA, 18 nt, Artificial Sequence
  Synthetic
caaaaggccuccgugugg

SEQ ID NO: 37742 - RNA, 19 nt, Artificial Sequence
  Synthetic
ccaaaaggccuccgugugg

SEQ ID NO: 37743 - RNA, 20 nt, Artificial Sequence
  Synthetic
cccaaaaggccuccgugugg

SEQ ID NO: 37744 - RNA, 18 nt, Artificial Sequence
  Synthetic
ugugauguguucuugugg

SEQ ID NO: 37745 - RNA, 20 nt, Artificial Sequence
  Synthetic
ugugugauguguucuugugg

SEQ ID NO: 37746 - RNA, 21 nt, Artificial Sequence
  Synthetic
  misc_feature (1)..(1): n is a, c, g, or u
nugugugauguguucuugugg

SEQ ID NO: 37747 - RNA, 22 nt, Artificial Sequence
  Synthetic
  misc_feature (2)..(2): n is a, c, g, or u
unugugugauguguucuugugg

SEQ ID NO: 37748 - RNA, 23 nt, Artificial Sequence
  Synthetic
  misc_feature (3)..(3): n is a, c, g, or u
uunugugugauguguucuugugg

SEQ ID NO: 37749 - RNA, 24 nt, Artificial Sequence
  Synthetic
  misc_feature (4)..(4): n is a, c, g, or u
uuunugugugauguguucuugugg

SEQ ID NO: 37750 - RNA, 20 nt, Artificial Sequence
  Synthetic
ugggauuuuguagagcuugg

SEQ ID NO: 37751 - RNA, 21 nt, Artificial Sequence
  Synthetic
uugggauuuuguagagcuugg

SEQ ID NO: 37752 - RNA, 22 nt, Artificial Sequence
  Synthetic
uuugggauuuuguagagcuugg

SEQ ID NO: 37753 - RNA, 23 nt, Artificial Sequence
  Synthetic
cuuugggauuuuguagagcuugg

SEQ ID NO: 37754 - RNA, 24 nt, Artificial Sequence
  Synthetic
acuuugggauuuuguagagcuugg

SEQ ID NO: 37755 - RNA, 18 nt, Artificial Sequence
  Synthetic
ugguauuugcucugaaug

SEQ ID NO: 37756 - RNA, 19 nt, Artificial Sequence
  Synthetic
uugguauuugcucugaaug

SEQ ID NO: 37757 - RNA, 18 nt, Artificial Sequence
  Synthetic
aaggguauguaaauaaug

SEQ ID NO: 37758 - RNA, 19 nt, Artificial Sequence
  Synthetic
aaaggguauguaaauaaug

SEQ ID NO: 37759 - RNA, 20 nt, Artificial Sequence
  Synthetic
caaaggguauguaaauaaug

SEQ ID NO: 37760 - RNA, 21 nt, Artificial Sequence
  Synthetic
ccaaaggguauguaaauaaug

SEQ ID NO: 37761 - RNA, 22 nt, Artificial Sequence
  Synthetic
uccaaaggguauguaaauaaug

SEQ ID NO: 37762 - RNA, 23 nt, Artificial Sequence
  Synthetic
uuccaaaggguauguaaauaaug

SEQ ID NO: 37763 - RNA, 24 nt, Artificial Sequence
  Synthetic
cuuccaaaggguauguaaauaaug

SEQ ID NO: 37764 - RNA, 18 nt, Artificial Sequence
  Synthetic
ugauaccuuugucuaaug

SEQ ID NO: 37765 - RNA, 19 nt, Artificial Sequence
  Synthetic
uugauaccuuugucuaaug

SEQ ID NO: 37766 - RNA, 20 nt, Artificial Sequence
  Synthetic
uuugauaccuuugucuaaug

SEQ ID NO: 37767 - RNA, 20 nt, Artificial Sequence
  Synthetic
agguuuuguacagcaacaug

SEQ ID NO: 37768 - RNA, 19 nt, Artificial Sequence
  Synthetic
ugaugugauguucuccaug

SEQ ID NO: 37769 - RNA, 20 nt, Artificial Sequence
  Synthetic
cugaugugauguucuccaug

SEQ ID NO: 37770 - RNA, 21 nt, Artificial Sequence
  Synthetic
ccugaugugauguucuccaug

SEQ ID NO: 37771 - RNA, 22 nt, Artificial Sequence
  Synthetic
uccugaugugauguucuccaug

SEQ ID NO: 37772 - RNA, 23 nt, Artificial Sequence
  Synthetic
auccugaugugauguucuccaug

SEQ ID NO: 37773 - RNA, 24 nt, Artificial Sequence
  Synthetic
aauccugaugugauguucuccaug

SEQ ID NO: 37774 - RNA, 18 nt, Artificial Sequence
  Synthetic
ccaccaaaucucuggaug

SEQ ID NO: 37775 - RNA, 19 nt, Artificial Sequence
  Synthetic
accaccaaaucucuggaug

SEQ ID NO: 37776 - RNA, 18 nt, Artificial Sequence
  Synthetic
  misc_feature (5)..(5): n is a, c, g, or u
cugcnuuggcagaugaug

SEQ ID NO: 37777 - RNA, 19 nt, Artificial Sequence
  Synthetic
  misc_feature (6)..(6): n is a, c, g, or u
acugcnuuggcagaugaug

SEQ ID NO: 37778 - RNA, 20 nt, Artificial Sequence
  Synthetic
  misc_feature (7)..(7): n is a, c, g, or u
aacugcnuuggcagaugaug

SEQ ID NO: 37779 - RNA, 18 nt, Artificial Sequence
  Synthetic
uugcuugccugagugcug

SEQ ID NO: 37780 - RNA, 19 nt, Artificial Sequence
  Synthetic
auugcuugccugagugcug

SEQ ID NO: 37781 - RNA, 20 nt, Artificial Sequence
  Synthetic
  misc_feature (1)..(1): n is a, c, g, or u
nauugcuugccugagugcug

SEQ ID NO: 37782 - RNA, 22 nt, Artificial Sequence
  Synthetic
  misc_feature (3)..(3): n is a, c, g, or u
agnauugcuugccugagugcug

SEQ ID NO: 37783 - RNA, 23 nt, Artificial Sequence
  Synthetic
  misc_feature (4)..(4): n is a, c, g, or u
cagnauugcuugccugagugcug

SEQ ID NO: 37784 - RNA, 24 nt, Artificial Sequence
  Synthetic
  misc_feature (5)..(5): n is a, c, g, or u
acagnauugcuugccugagugcug

SEQ ID NO: 37785 - RNA, 19 nt, Artificial Sequence
  Synthetic
ugauuaacuacauuuucug

SEQ ID NO: 37786 - RNA, 20 nt, Artificial Sequence
  Synthetic
augauuaacuacauuuucug

SEQ ID NO: 37787 - RNA, 21 nt, Artificial Sequence
  Synthetic
aaugauuaacuacauuuucug

SEQ ID NO: 37788 - RNA, 22 nt, Artificial Sequence
  Synthetic
uaaugauuaacuacauuuucug

SEQ ID NO: 37789 - RNA, 24 nt, Artificial Sequence
  Synthetic
aguaaugauuaacuacauuuucug

SEQ ID NO: 37790 - RNA, 18 nt, Artificial Sequence
  Synthetic
uguucuccauguucggug

SEQ ID NO: 37791 - RNA, 19 nt, Artificial Sequence
  Synthetic
auguucuccauguucggug

SEQ ID NO: 37792 - RNA, 20 nt, Artificial Sequence
  Synthetic
uggaggacaggagauuggug

SEQ ID NO: 37793 - RNA, 21 nt, Artificial Sequence
  Synthetic
uuggaggacaggagauuggug

SEQ ID NO: 37794 - RNA, 23 nt, Artificial Sequence
  Synthetic
aguuggaggacaggagauuggug

SEQ ID NO: 37795 - RNA, 24 nt, Artificial Sequence
  Synthetic
aaguuggaggacaggagauuggug

SEQ ID NO: 37796 - RNA, 18 nt, Artificial Sequence
  Synthetic
  misc_feature (16)..(16): n is a, c, g, or u
acauugcuuaauuuunug

SEQ ID NO: 37797 - RNA, 19 nt, Artificial Sequence
  Synthetic
  misc_feature (17)..(17): n is a, c, g, or u
aacauugcuuaauuuunug

SEQ ID NO: 37798 - RNA, 20 nt, Artificial Sequence
  Synthetic
  misc_feature (18)..(18): n is a, c, g, or u
aaacauugcuuaauuuunug

SEQ ID NO: 37799 - RNA, 21 nt, Artificial Sequence
  Synthetic
  misc_feature (19)..(19): n is a, c, g, or u
aaaacauugcuuaauuuunug

SEQ ID NO: 37800 - RNA, 23 nt, Artificial Sequence
  Synthetic
  misc_feature (21)..(21): n is a, c, g, or u
cgaaaacauugcuuaauuuunug

SEQ ID NO: 37801 - RNA, 24 nt, Artificial Sequence
  Synthetic
  misc_feature (22)..(22): n is a, c, g, or u
ccgaaaacauugcuuaauuuunug

SEQ ID NO: 37802 - RNA, 18 nt, Artificial Sequence
  Synthetic
uuggaggacaggagauug

SEQ ID NO: 37803 - RNA, 20 nt, Artificial Sequence
  Synthetic
aguuggaggacaggagauug

SEQ ID NO: 37804 - RNA, 20 nt, Artificial Sequence
  Synthetic
aggcacagcuuggaggcuug

SEQ ID NO: 37805 - RNA, 21 nt, Artificial Sequence
  Synthetic
aaggcacagcuuggaggcuug

SEQ ID NO: 37806 - RNA, 22 nt, Artificial Sequence
  Synthetic
caaggcacagcuuggaggcuug

SEQ ID NO: 37807 - RNA, 23 nt, Artificial Sequence
  Synthetic
ccaaggcacagcuuggaggcuug

SEQ ID NO: 37808 - RNA, 24 nt, Artificial Sequence
  Synthetic
cccaaggcacagcuuggaggcuug

SEQ ID NO: 37809 - RNA, 19 nt, Artificial Sequence
  Synthetic
ugugaaaccacaauaguug

SEQ ID NO: 37810 - RNA, 20 nt, Artificial Sequence
  Synthetic
augugaaaccacaauaguug

SEQ ID NO: 37811 - RNA, 21 nt, Artificial Sequence
  Synthetic
aaugugaaaccacaauaguug

SEQ ID NO: 37812 - RNA, 22 nt, Artificial Sequence
  Synthetic
aaaugugaaaccacaauaguug

SEQ ID NO: 37813 - RNA, 18 nt, Artificial Sequence
  Synthetic
  misc_feature (15)..(15): n is a, c, g, or u
ucuuauauaacugcnuug

SEQ ID NO: 37814 - RNA, 19 nt, Artificial Sequence
  Synthetic
  misc_feature (16)..(16): n is a, c, g, or u
cucuuauauaacugcnuug

SEQ ID NO: 37815 - RNA, 20 nt, Artificial Sequence
  Synthetic
  misc_feature (17)..(17): n is a, c, g, or u
ccucuuauauaacugcnuug

SEQ ID NO: 37816 - RNA, 18 nt, Artificial Sequence
  Synthetic
uacgguuugauaccuuug

SEQ ID NO: 37817 - RNA, 19 nt, Artificial Sequence
  Synthetic
auacgguuugauaccuuug

SEQ ID NO: 37818 - RNA, 20 nt, Artificial Sequence
  Synthetic
aauacgguuugauaccuuug

SEQ ID NO: 37819 - RNA, 19 nt, Artificial Sequence
  Synthetic
aggagucgugcagguuuug

SEQ ID NO: 37820 - RNA, 20 nt, Artificial Sequence
  Synthetic
caggagucgugcagguuuug

SEQ ID NO: 37821 - RNA, 18 nt, Artificial Sequence
  Synthetic
  misc_feature (18)..(18): n is a, c, g, or u
cuugaaguauuucuccan

SEQ ID NO: 37822 - RNA, 19 nt, Artificial Sequence
  Synthetic
  misc_feature (19)..(19): n is a, c, g, or u
ccuugaaguauuucuccan

SEQ ID NO: 37823 - RNA, 20 nt, Artificial Sequence
  Synthetic
  misc_feature (20)..(20): n is a, c, g, or u
uccuugaaguauuucuccan

SEQ ID NO: 37824 - RNA, 22 nt, Artificial Sequence
  Synthetic
  misc_feature (22)..(22): n is a, c, g, or u
aguccuugaaguauuucuccan

SEQ ID NO: 37825 - RNA, 23 nt, Artificial Sequence
  Synthetic
  misc_feature (23)..(23): n is a, c, g, or u
caguccuugaaguauuucuccan

SEQ ID NO: 37826 - RNA, 24 nt, Artificial Sequence
  Synthetic
  misc_feature (24)..(24): n is a, c, g, or u
acaguccuugaaguauuucuccan

SEQ ID NO: 37827 - RNA, 20 nt, Artificial Sequence
  Synthetic
  misc_feature (20)..(20): n is a, c, g, or u
aggcagaggugaaaaaguun

SEQ ID NO: 37828 - RNA, 21 nt, Artificial Sequence
  Synthetic
  misc_feature (21)..(21): n is a, c, g, or u
uaggcagaggugaaaaaguun

SEQ ID NO: 37829 - RNA, 22 nt, Artificial Sequence
  Synthetic
  misc_feature (22)..(22): n is a, c, g, or u
uuaggcagaggugaaaaaguun

SEQ ID NO: 37830 - RNA, 23 nt, Artificial Sequence
  Synthetic
  misc_feature (23)..(23): n is a, c, g, or u
auuaggcagaggugaaaaaguun

SEQ ID NO: 37831 - RNA, 18 nt, Artificial Sequence
  Synthetic
ugggauugaagucccaau

SEQ ID NO: 37832 - RNA, 19 nt, Artificial Sequence
  Synthetic
uugggauugaagucccaau

SEQ ID NO: 37833 - RNA, 20 nt, Artificial Sequence
  Synthetic
uuugggauugaagucccaau

SEQ ID NO: 37834 - RNA, 21 nt, Artificial Sequence
  Synthetic
uuuugggauugaagucccaau

SEQ ID NO: 37835 - RNA, 22 nt, Artificial Sequence
  Synthetic
uuuuugggauugaagucccaau

SEQ ID NO: 37836 - RNA, 23 nt, Artificial Sequence
  Synthetic
cuuuuugggauugaagucccaau

SEQ ID NO: 37837 - RNA, 24 nt, Artificial Sequence
  Synthetic
ccuuuuugggauugaagucccaau

SEQ ID NO: 37838 - RNA, 18 nt, Artificial Sequence
  Synthetic
aagaaggaguuugccaau

SEQ ID NO: 37839 - RNA, 19 nt, Artificial Sequence
  Synthetic
aaagaaggaguuugccaau

SEQ ID NO: 37840 - RNA, 20 nt, Artificial Sequence
  Synthetic
aaaagaaggaguuugccaau

SEQ ID NO: 37841 - RNA, 23 nt, Artificial Sequence
  Synthetic
uggaaaagaaggaguuugccaau

SEQ ID NO: 37842 - RNA, 24 nt, Artificial Sequence
  Synthetic
uuggaaaagaaggaguuugccaau

SEQ ID NO: 37843 - RNA, 18 nt, Artificial Sequence
  Synthetic
agcagggguccuaggaau

SEQ ID NO: 37844 - RNA, 20 nt, Artificial Sequence
  Synthetic
cgagcagggguccuaggaau

SEQ ID NO: 37845 - RNA, 18 nt, Artificial Sequence
  Synthetic
agaugaugggaugggaau

SEQ ID NO: 37846 - RNA, 19 nt, Artificial Sequence
  Synthetic
aagaugaugggaugggaau

SEQ ID NO: 37847 - RNA, 20 nt, Artificial Sequence
  Synthetic
caagaugaugggaugggaau

SEQ ID NO: 37848 - RNA, 21 nt, Artificial Sequence
  Synthetic
ccaagaugaugggaugggaau

SEQ ID NO: 37849 - RNA, 22 nt, Artificial Sequence
  Synthetic
cccaagaugaugggaugggaau

SEQ ID NO: 37850 - RNA, 24 nt, Artificial Sequence
  Synthetic
agcccaagaugaugggaugggaau

SEQ ID NO: 37851 - RNA, 18 nt, Artificial Sequence
  Synthetic
ccugauuuuuaaacccau

SEQ ID NO: 37852 - RNA, 20 nt, Artificial Sequence
  Synthetic
ugccugauuuuuaaacccau

SEQ ID NO: 37853 - RNA, 18 nt, Artificial Sequence
  Synthetic
augaugagagguguucau

SEQ ID NO: 37854 - RNA, 20 nt, Artificial Sequence
  Synthetic
agaugaugagagguguucau

SEQ ID NO: 37855 - RNA, 18 nt, Artificial Sequence
  Synthetic
ucuuagugguggagagau

SEQ ID NO: 37856 - RNA, 19 nt, Artificial Sequence
  Synthetic
cucuuagugguggagagau

SEQ ID NO: 37857 - RNA, 20 nt, Artificial Sequence
  Synthetic
ucucuuagugguggagagau

SEQ ID NO: 37858 - RNA, 18 nt, Artificial Sequence
  Synthetic
cauugggaagcuggagau

SEQ ID NO: 37859 - RNA, 19 nt, Artificial Sequence
  Synthetic
acauugggaagcuggagau

SEQ ID NO: 37860 - RNA, 20 nt, Artificial Sequence
  Synthetic
aacauugggaagcuggagau

SEQ ID NO: 37861 - RNA, 21 nt, Artificial Sequence
  Synthetic
uaacauugggaagcuggagau

SEQ ID NO: 37862 - RNA, 22 nt, Artificial Sequence
  Synthetic
cuaacauugggaagcuggagau

SEQ ID NO: 37863 - RNA, 23 nt, Artificial Sequence
  Synthetic
acuaacauugggaagcuggagau

SEQ ID NO: 37864 - RNA, 24 nt, Artificial Sequence
  Synthetic
uacuaacauugggaagcuggagau

SEQ ID NO: 37865 - RNA, 18 nt, Artificial Sequence
  Synthetic
agcccaagaugaugggau

SEQ ID NO: 37866 - RNA, 19 nt, Artificial Sequence
  Synthetic
aagcccaagaugaugggau

SEQ ID NO: 37867 - RNA, 20 nt, Artificial Sequence
  Synthetic
aaagcccaagaugaugggau

SEQ ID NO: 37868 - RNA, 22 nt, Artificial Sequence
  Synthetic
cgaaagcccaagaugaugggau

SEQ ID NO: 37869 - RNA, 24 nt, Artificial Sequence
  Synthetic
ugcgaaagcccaagaugaugggau

SEQ ID NO: 37870 - RNA, 18 nt, Artificial Sequence
  Synthetic
aaggguccuuuuugggau

SEQ ID NO: 37871 - RNA, 19 nt, Artificial Sequence
  Synthetic
caaggguccuuuuugggau

SEQ ID NO: 37872 - RNA, 20 nt, Artificial Sequence
  Synthetic
ccaaggguccuuuuugggau

SEQ ID NO: 37873 - RNA, 18 nt, Artificial Sequence
  Synthetic
uaguuauaaugucuugau

SEQ ID NO: 37874 - RNA, 19 nt, Artificial Sequence
  Synthetic
uuaguuauaaugucuugau

SEQ ID NO: 37875 - RNA, 20 nt, Artificial Sequence
  Synthetic
uuuaguuauaaugucuugau

SEQ ID NO: 37876 - RNA, 21 nt, Artificial Sequence
  Synthetic
auuuaguuauaaugucuugau

SEQ ID NO: 37877 - RNA, 22 nt, Artificial Sequence
  Synthetic
cauuuaguuauaaugucuugau

SEQ ID NO: 37878 - RNA, 23 nt, Artificial Sequence
  Synthetic
acauuuaguuauaaugucuugau

SEQ ID NO: 37879 - RNA, 24 nt, Artificial Sequence
  Synthetic
cacauuuaguuauaaugucuugau

SEQ ID NO: 37880 - RNA, 18 nt, Artificial Sequence
  Synthetic
uagcuccaaauucuuuau

SEQ ID NO: 37881 - RNA, 20 nt, Artificial Sequence
  Synthetic
aguagcuccaaauucuuuau

SEQ ID NO: 37882 - RNA, 21 nt, Artificial Sequence
  Synthetic
caguagcuccaaauucuuuau

SEQ ID NO: 37883 - RNA, 22 nt, Artificial Sequence
  Synthetic
acaguagcuccaaauucuuuau

SEQ ID NO: 37884 - RNA, 23 nt, Artificial Sequence
  Synthetic
cacaguagcuccaaauucuuuau

SEQ ID NO: 37885 - RNA, 24 nt, Artificial Sequence
  Synthetic
ccacaguagcuccaaauucuuuau

SEQ ID NO: 37886 - RNA, 18 nt, Artificial Sequence
  Synthetic
uggcaaaguaccccaacu

SEQ ID NO: 37887 - RNA, 20 nt, Artificial Sequence
  Synthetic
uguggcaaaguaccccaacu

SEQ ID NO: 37888 - RNA, 21 nt, Artificial Sequence
  Synthetic
uuguggcaaaguaccccaacu

SEQ ID NO: 37889 - RNA, 22 nt, Artificial Sequence
  Synthetic
cuuguggcaaaguaccccaacu

SEQ ID NO: 37890 - RNA, 23 nt, Artificial Sequence
  Synthetic
ucuuguggcaaaguaccccaacu

SEQ ID NO: 37891 - RNA, 24 nt, Artificial Sequence
  Synthetic
uucuuguggcaaaguaccccaacu

SEQ ID NO: 37892 - RNA, 18 nt, Artificial Sequence
  Synthetic
ugaaugcuggguccaacu

SEQ ID NO: 37893 - RNA, 19 nt, Artificial Sequence
  Synthetic
cugaaugcuggguccaacu

SEQ ID NO: 37894 - RNA, 20 nt, Artificial Sequence
  Synthetic
ucugaaugcuggguccaacu

SEQ ID NO: 37895 - RNA, 18 nt, Artificial Sequence
  Synthetic
  misc_feature (9)..(9): n is a, c, g, or u
cagcgguanaaagggacu

SEQ ID NO: 37896 - RNA, 19 nt, Artificial Sequence
  Synthetic
  misc_feature (10)..(10): n is a, c, g, or u
acagcgguanaaagggacu

SEQ ID NO: 37897 - RNA, 20 nt, Artificial Sequence
  Synthetic
  misc_feature (11)..(11): n is a, c, g, or u
aacagcgguanaaagggacu

SEQ ID NO: 37898 - RNA, 21 nt, Artificial Sequence
  Synthetic
  misc_feature (12)..(12): n is a, c, g, or u
uaacagcgguanaaagggacu

SEQ ID NO: 37899 - RNA, 24 nt, Artificial Sequence
  Synthetic
  misc_feature (15)..(15): n is a, c, g, or u
ugguaacagcgguanaaagggacu

SEQ ID NO: 37900 - RNA, 19 nt, Artificial Sequence
  Synthetic
ugauuggagguuggggacu

SEQ ID NO: 37901 - RNA, 21 nt, Artificial Sequence
  Synthetic
agugauuggagguuggggacu

SEQ ID NO: 37902 - RNA, 23 nt, Artificial Sequence
  Synthetic
ugagugauuggagguuggggacu

SEQ ID NO: 37903 - RNA, 18 nt, Artificial Sequence
  Synthetic
uaggcugccucccugacu

SEQ ID NO: 37904 - RNA, 20 nt, Artificial Sequence
  Synthetic
aguaggcugccucccugacu

SEQ ID NO: 37905 - RNA, 21 nt, Artificial Sequence
  Synthetic
accaauuuaugccuacagccu

SEQ ID NO: 37906 - RNA, 23 nt, Artificial Sequence
  Synthetic
agaccaauuuaugccuacagccu

SEQ ID NO: 37907 - RNA, 24 nt, Artificial Sequence
  Synthetic
cagaccaauuuaugccuacagccu

SEQ ID NO: 37908 - RNA, 18 nt, Artificial Sequence
  Synthetic
cagcaaaaacacaguccu

SEQ ID NO: 37909 - RNA, 19 nt, Artificial Sequence
  Synthetic
ucagcaaaaacacaguccu

SEQ ID NO: 37910 - RNA, 20 nt, Artificial Sequence
  Synthetic
cucagcaaaaacacaguccu

SEQ ID NO: 37911 - RNA, 21 nt, Artificial Sequence
  Synthetic
acucagcaaaaacacaguccu

SEQ ID NO: 37912 - RNA, 22 nt, Artificial Sequence
  Synthetic
cacucagcaaaaacacaguccu

SEQ ID NO: 37913 - RNA, 23 nt, Artificial Sequence
  Synthetic
ccacucagcaaaaacacaguccu

SEQ ID NO: 37914 - RNA, 24 nt, Artificial Sequence
  Synthetic
cccacucagcaaaaacacaguccu

SEQ ID NO: 37915 - RNA, 18 nt, Artificial Sequence
  Synthetic
uacuaacauugggaagcu

SEQ ID NO: 37916 - RNA, 19 nt, Artificial Sequence
  Synthetic
auacuaacauugggaagcu

SEQ ID NO: 37917 - RNA, 20 nt, Artificial Sequence
  Synthetic
aauacuaacauugggaagcu

SEQ ID NO: 37918 - RNA, 23 nt, Artificial Sequence
  Synthetic
aggaauacuaacauugggaagcu

SEQ ID NO: 37919 - RNA, 24 nt, Artificial Sequence
  Synthetic
aaggaauacuaacauugggaagcu

SEQ ID NO: 37920 - RNA, 18 nt, Artificial Sequence
  Synthetic
cgagcaaaacaagcagcu

SEQ ID NO: 37921 - RNA, 20 nt, Artificial Sequence
  Synthetic
ugcgagcaaaacaagcagcu

SEQ ID NO: 37922 - RNA, 18 nt, Artificial Sequence
  Synthetic
agcaacuccacaguagcu

SEQ ID NO: 37923 - RNA, 20 nt, Artificial Sequence
  Synthetic
agagcaacuccacaguagcu

SEQ ID NO: 37924 - RNA, 18 nt, Artificial Sequence
  Synthetic
ccaagaaagccccaugcu

SEQ ID NO: 37925 - RNA, 19 nt, Artificial Sequence
  Synthetic
uccaagaaagccccaugcu

SEQ ID NO: 37926 - RNA, 19 nt, Artificial Sequence
  Synthetic
uggauuguugguauuugcu

SEQ ID NO: 37927 - RNA, 20 nt, Artificial Sequence
  Synthetic
cuggauuguugguauuugcu

SEQ ID NO: 37928 - RNA, 18 nt, Artificial Sequence
  Synthetic
uaauugaccaccaaaucu

SEQ ID NO: 37929 - RNA, 19 nt, Artificial Sequence
  Synthetic
auaauugaccaccaaaucu

SEQ ID NO: 37930 - RNA, 20 nt, Artificial Sequence
  Synthetic
cauaauugaccaccaaaucu

SEQ ID NO: 37931 - RNA, 18 nt, Artificial Sequence
  Synthetic
caaugaucagaggacucu

SEQ ID NO: 37932 - RNA, 19 nt, Artificial Sequence
  Synthetic
acaaugaucagaggacucu

SEQ ID NO: 37933 - RNA, 20 nt, Artificial Sequence
  Synthetic
aacaaugaucagaggacucu

SEQ ID NO: 37934 - RNA, 19 nt, Artificial Sequence
  Synthetic
uguaaauaaugucuggucu

SEQ ID NO: 37935 - RNA, 20 nt, Artificial Sequence
  Synthetic
auguaaauaaugucuggucu

SEQ ID NO: 37936 - RNA, 21 nt, Artificial Sequence
  Synthetic
uauguaaauaaugucuggucu

SEQ ID NO: 37937 - RNA, 20 nt, Artificial Sequence
  Synthetic
uggccugaggaugacugucu

SEQ ID NO: 37938 - RNA, 21 nt, Artificial Sequence
  Synthetic
auggccugaggaugacugucu

SEQ ID NO: 37939 - RNA, 22 nt, Artificial Sequence
  Synthetic
cauggccugaggaugacugucu

SEQ ID NO: 37940 - RNA, 24 nt, Artificial Sequence
  Synthetic
ugcauggccugaggaugacugucu

SEQ ID NO: 37941 - RNA, 19 nt, Artificial Sequence
  Synthetic
cgguuugauaccuuugucu

SEQ ID NO: 37942 - RNA, 20 nt, Artificial Sequence
  Synthetic
acgguuugauaccuuugucu

SEQ ID NO: 37943 - RNA, 21 nt, Artificial Sequence
  Synthetic
uacgguuugauaccuuugucu

SEQ ID NO: 37944 - RNA, 22 nt, Artificial Sequence
  Synthetic
auacgguuugauaccuuugucu

SEQ ID NO: 37945 - RNA, 23 nt, Artificial Sequence
  Synthetic
aauacgguuugauaccuuugucu

SEQ ID NO: 37946 - RNA, 24 nt, Artificial Sequence
  Synthetic
uaauacgguuugauaccuuugucu

SEQ ID NO: 37947 - RNA, 18 nt, Artificial Sequence
  Synthetic
acaguagucuccggaagu

SEQ ID NO: 37948 - RNA, 19 nt, Artificial Sequence
  Synthetic
aacaguagucuccggaagu

SEQ ID NO: 37949 - RNA, 20 nt, Artificial Sequence
  Synthetic
caacaguagucuccggaagu

SEQ ID NO: 37950 - RNA, 21 nt, Artificial Sequence
  Synthetic
acaacaguagucuccggaagu

SEQ ID NO: 37951 - RNA, 22 nt, Artificial Sequence
  Synthetic
aacaacaguagucuccggaagu

SEQ ID NO: 37952 - RNA, 23 nt, Artificial Sequence
  Synthetic
uaacaacaguagucuccggaagu

SEQ ID NO: 37953 - RNA, 24 nt, Artificial Sequence
  Synthetic
cuaacaacaguagucuccggaagu

SEQ ID NO: 37954 - RNA, 18 nt, Artificial Sequence
  Synthetic
aaugucuggucuggaagu

SEQ ID NO: 37955 - RNA, 19 nt, Artificial Sequence
  Synthetic
uaaugucuggucuggaagu

SEQ ID NO: 37956 - RNA, 20 nt, Artificial Sequence
  Synthetic
auaaugucuggucuggaagu

SEQ ID NO: 37957 - RNA, 21 nt, Artificial Sequence
  Synthetic
aauaaugucuggucuggaagu

SEQ ID NO: 37958 - RNA, 22 nt, Artificial Sequence
  Synthetic
aaauaaugucuggucuggaagu

SEQ ID NO: 37959 - RNA, 23 nt, Artificial Sequence
  Synthetic
uaaauaaugucuggucuggaagu

SEQ ID NO: 37960 - RNA, 18 nt, Artificial Sequence
  Synthetic
ccuuuuugggauugaagu

SEQ ID NO: 37961 - RNA, 19 nt, Artificial Sequence
  Synthetic
uccuuuuugggauugaagu

SEQ ID NO: 37962 - RNA, 19 nt, Artificial Sequence
  Synthetic
uggccaagccccaaccagu

SEQ ID NO: 37963 - RNA, 20 nt, Artificial Sequence
  Synthetic
auggccaagccccaaccagu

SEQ ID NO: 37964 - RNA, 18 nt, Artificial Sequence
  Synthetic
ucuauaagcaggaggagu

SEQ ID NO: 37965 - RNA, 18 nt, Artificial Sequence
  Synthetic
cuggcaggcauaacuagu

SEQ ID NO: 37966 - RNA, 19 nt, Artificial Sequence
  Synthetic
ucuggcaggcauaacuagu

SEQ ID NO: 37967 - RNA, 20 nt, Artificial Sequence
  Synthetic
aucuggcaggcauaacuagu

SEQ ID NO: 37968 - RNA, 21 nt, Artificial Sequence
  Synthetic
aaucuggcaggcauaacuagu

SEQ ID NO: 37969 - RNA, 22 nt, Artificial Sequence
  Synthetic
aaaucuggcaggcauaacuagu

SEQ ID NO: 37970 - RNA, 23 nt, Artificial Sequence
  Synthetic
aaaaucuggcaggcauaacuagu

SEQ ID NO: 37971 - RNA, 24 nt, Artificial Sequence
  Synthetic
aaaaaucuggcaggcauaacuagu

SEQ ID NO: 37972 - RNA, 18 nt, Artificial Sequence
  Synthetic
aaauuguucacauuuagu

SEQ ID NO: 37973 - RNA, 19 nt, Artificial Sequence
  Synthetic
caaauuguucacauuuagu

SEQ ID NO: 37974 - RNA, 20 nt, Artificial Sequence
  Synthetic
acaaauuguucacauuuagu

SEQ ID NO: 37975 - RNA, 19 nt, Artificial Sequence
  Synthetic
  misc_feature (15)..(15): n is a, c, g, or u
cguugccuagcaacngggu

SEQ ID NO: 37976 - RNA, 20 nt, Artificial Sequence
  Synthetic
  misc_feature (16)..(16): n is a, c, g, or u
ccguugccuagcaacngggu

SEQ ID NO: 37977 - RNA, 24 nt, Artificial Sequence
  Synthetic
  misc_feature (20)..(20): n is a, c, g, or u
cgggccguugccuagcaacngggu

SEQ ID NO: 37978 - RNA, 18 nt, Artificial Sequence
  Synthetic
  misc_feature (15)..(15): n is a, c, g, or u
uuuuuguuuuguuanggu

SEQ ID NO: 37979 - RNA, 19 nt, Artificial Sequence
  Synthetic
  misc_feature (16)..(16): n is a, c, g, or u
cuuuuuguuuuguuanggu

SEQ ID NO: 37980 - RNA, 20 nt, Artificial Sequence
  Synthetic
  misc_feature (17)..(17): n is a, c, g, or u
ucuuuuuguuuuguuanggu

SEQ ID NO: 37981 - RNA, 21 nt, Artificial Sequence
  Synthetic
  misc_feature (18)..(18): n is a, c, g, or u
aucuuuuuguuuuguuanggu

SEQ ID NO: 37982 - RNA, 22 nt, Artificial Sequence
  Synthetic
  misc_feature (19)..(19): n is a, c, g, or u
caucuuuuuguuuuguuanggu

SEQ ID NO: 37983 - RNA, 23 nt, Artificial Sequence
  Synthetic
  misc_feature (20)..(20): n is a, c, g, or u
ccaucuuuuuguuuuguuanggu

SEQ ID NO: 37984 - RNA, 24 nt, Artificial Sequence
  Synthetic
  misc_feature (21)..(21): n is a, c, g, or u
cccaucuuuuuguuuuguuanggu

SEQ ID NO: 37985 - RNA, 20 nt, Artificial Sequence
  Synthetic
  misc_feature (14)..(14): n is a, c, g, or u
aggugaaaaaguuncauggu

SEQ ID NO: 37986 - RNA, 22 nt, Artificial Sequence
  Synthetic
  misc_feature (16)..(16): n is a, c, g, or u
agaggugaaaaaguuncauggu

SEQ ID NO: 37987 - RNA, 23 nt, Artificial Sequence
  Synthetic
  misc_feature (17)..(17): n is a, c, g, or u
cagaggugaaaaaguuncauggu

SEQ ID NO: 37988 - RNA, 18 nt, Artificial Sequence
  Synthetic
cacauuuaguuauaaugu

SEQ ID NO: 37989 - RNA, 19 nt, Artificial Sequence
  Synthetic
ucacauuuaguuauaaugu

SEQ ID NO: 37990 - RNA, 20 nt, Artificial Sequence
  Synthetic
uucacauuuaguuauaaugu

SEQ ID NO: 37991 - RNA, 22 nt, Artificial Sequence
  Synthetic
uguucacauuuaguuauaaugu

SEQ ID NO: 37992 - RNA, 23 nt, Artificial Sequence
  Synthetic
uuguucacauuuaguuauaaugu

SEQ ID NO: 37993 - RNA, 24 nt, Artificial Sequence
  Synthetic
auuguucacauuuaguuauaaugu

SEQ ID NO: 37994 - RNA, 18 nt, Artificial Sequence
  Synthetic
uagacucugcgguauugu

SEQ ID NO: 37995 - RNA, 19 nt, Artificial Sequence
  Synthetic
cuagacucugcgguauugu

SEQ ID NO: 37996 - RNA, 20 nt, Artificial Sequence
  Synthetic
ucuagacucugcgguauugu

SEQ ID NO: 37997 - RNA, 18 nt, Artificial Sequence
  Synthetic
agggacucaagauguugu

SEQ ID NO: 37998 - RNA, 19 nt, Artificial Sequence
  Synthetic
aagggacucaagauguugu

SEQ ID NO: 37999 - RNA, 20 nt, Artificial Sequence
  Synthetic
aaagggacucaagauguugu

SEQ ID NO: 38000 - RNA, 21 nt, Artificial Sequence
  Synthetic
  misc_feature (1)..(1): n is a, c, g, or u
naaagggacucaagauguugu

SEQ ID NO: 38001 - RNA, 22 nt, Artificial Sequence
  Synthetic
  misc_feature (2)..(2): n is a, c, g, or u
anaaagggacucaagauguugu

SEQ ID NO: 38002 - RNA, 23 nt, Artificial Sequence
  Synthetic
  misc_feature (3)..(3): n is a, c, g, or u
uanaaagggacucaagauguugu

SEQ ID NO: 38003 - RNA, 18 nt, Artificial Sequence
  Synthetic
cccaucuuuuuguuuugu

SEQ ID NO: 38004 - RNA, 19 nt, Artificial Sequence
  Synthetic
ccccaucuuuuuguuuugu

SEQ ID NO: 38005 - RNA, 20 nt, Artificial Sequence
  Synthetic
accccaucuuuuuguuuugu

SEQ ID NO: 38006 - RNA, 21 nt, Artificial Sequence
  Synthetic
aaccccaucuuuuuguuuugu

SEQ ID NO: 38007 - RNA, 22 nt, Artificial Sequence
  Synthetic
uaaccccaucuuuuuguuuugu

SEQ ID NO: 38008 - RNA, 23 nt, Artificial Sequence
  Synthetic
auaaccccaucuuuuuguuuugu

SEQ ID NO: 38009 - RNA, 24 nt, Artificial Sequence
  Synthetic
aauaaccccaucuuuuuguuuugu

SEQ ID NO: 38010 - RNA, 18 nt, Artificial Sequence
  Synthetic
agaaaggacgacagaauu

SEQ ID NO: 38011 - RNA, 20 nt, Artificial Sequence
  Synthetic
cgagaaaggacgacagaauu

SEQ ID NO: 38012 - RNA, 18 nt, Artificial Sequence
  Synthetic
cagaggacucuaaggauu

SEQ ID NO: 38013 - RNA, 19 nt, Artificial Sequence
  Synthetic
ucagaggacucuaaggauu

SEQ ID NO: 38014 - RNA, 20 nt, Artificial Sequence
  Synthetic
aucagaggacucuaaggauu

SEQ ID NO: 38015 - RNA, 18 nt, Artificial Sequence
  Synthetic
aaggaauccuagaggauu

SEQ ID NO: 38016 - RNA, 19 nt, Artificial Sequence
  Synthetic
ugaagucccaaucuggauu

SEQ ID NO: 38017 - RNA, 20 nt, Artificial Sequence
  Synthetic
uugaagucccaaucuggauu

SEQ ID NO: 38018 - RNA, 19 nt, Artificial Sequence
  Synthetic
aggagauuggugagugauu

SEQ ID NO: 38019 - RNA, 20 nt, Artificial Sequence
  Synthetic
caggagauuggugagugauu

SEQ ID NO: 38020 - RNA, 18 nt, Artificial Sequence
  Synthetic
uuauucguugacagacuu

SEQ ID NO: 38021 - RNA, 20 nt, Artificial Sequence
  Synthetic
aguuauucguugacagacuu

SEQ ID NO: 38022 - RNA, 18 nt, Artificial Sequence
  Synthetic
  misc_feature (1)..(1): n is a, c, g, or u
nauacaggccccugacuu

SEQ ID NO: 38023 - RNA, 19 nt, Artificial Sequence
  Synthetic
  misc_feature (2)..(2): n is a, c, g, or u
anauacaggccccugacuu

SEQ ID NO: 38024 - RNA, 20 nt, Artificial Sequence
  Synthetic
  misc_feature (3)..(3): n is a, c, g, or u
aanauacaggccccugacuu

SEQ ID NO: 38025 - RNA, 23 nt, Artificial Sequence
  Synthetic
  misc_feature (6)..(6): n is a, c, g, or u
aggaanauacaggccccugacuu

SEQ ID NO: 38026 - RNA, 24 nt, Artificial Sequence
  Synthetic
  misc_feature (7)..(7): n is a, c, g, or u
caggaanauacaggccccugacuu

SEQ ID NO: 38027 - RNA, 18 nt, Artificial Sequence
  Synthetic
cguaaaguuucccaccuu

SEQ ID NO: 38028 - RNA, 19 nt, Artificial Sequence
  Synthetic
ccguaaaguuucccaccuu

SEQ ID NO: 38029 - RNA, 20 nt, Artificial Sequence
  Synthetic
cccguaaaguuucccaccuu

SEQ ID NO: 38030 - RNA, 23 nt, Artificial Sequence
  Synthetic
aggacaaacgggcaacauaccuu

SEQ ID NO: 38031 - RNA, 18 nt, Artificial Sequence
  Synthetic
uuuacagagaaaggccuu

SEQ ID NO: 38032 - RNA, 20 nt, Artificial Sequence
  Synthetic
uguuuacagagaaaggccuu

SEQ ID NO: 38033 - RNA, 21 nt, Artificial Sequence
  Synthetic
uuguuuacagagaaaggccuu

SEQ ID NO: 38034 - RNA, 22 nt, Artificial Sequence
  Synthetic
auuguuuacagagaaaggccuu

SEQ ID NO: 38035 - RNA, 23 nt, Artificial Sequence
  Synthetic
uauuguuuacagagaaaggccuu

SEQ ID NO: 38036 - RNA, 18 nt, Artificial Sequence
  Synthetic
cucuggaugcuggaucuu

SEQ ID NO: 38037 - RNA, 19 nt, Artificial Sequence
  Synthetic
ucucuggaugcuggaucuu

SEQ ID NO: 38038 - RNA, 20 nt, Artificial Sequence
  Synthetic
aucucuggaugcuggaucuu

SEQ ID NO: 38039 - RNA, 21 nt, Artificial Sequence
  Synthetic
aaucucuggaugcuggaucuu

SEQ ID NO: 38040 - RNA, 22 nt, Artificial Sequence
  Synthetic
aaaucucuggaugcuggaucuu

SEQ ID NO: 38041 - RNA, 23 nt, Artificial Sequence
  Synthetic
caaaucucuggaugcuggaucuu

SEQ ID NO: 38042 - RNA, 24 nt, Artificial Sequence
  Synthetic
ccaaaucucuggaugcuggaucuu

SEQ ID NO: 38043 - RNA, 18 nt, Artificial Sequence
  Synthetic
ugaggaugacugucucuu

SEQ ID NO: 38044 - RNA, 19 nt, Artificial Sequence
  Synthetic
cugaggaugacugucucuu

SEQ ID NO: 38045 - RNA, 20 nt, Artificial Sequence
  Synthetic
ccugaggaugacugucucuu

SEQ ID NO: 38046 - RNA, 18 nt, Artificial Sequence
  Synthetic
uuggaaaagaaggaguuu

SEQ ID NO: 38047 - RNA, 19 nt, Artificial Sequence
  Synthetic
uuuggaaaagaaggaguuu

SEQ ID NO: 38048 - RNA, 20 nt, Artificial Sequence
  Synthetic
auuuggaaaagaaggaguuu

SEQ ID NO: 38049 - RNA, 21 nt, Artificial Sequence
  Synthetic
uauuuggaaaagaaggaguuu

SEQ ID NO: 38050 - RNA, 22 nt, Artificial Sequence
  Synthetic
auauuuggaaaagaaggaguuu

SEQ ID NO: 38051 - RNA, 18 nt, Artificial Sequence
  Synthetic
aaugauuaacuacauuuu

SEQ ID NO: 38052 - RNA, 19 nt, Artificial Sequence
  Synthetic
uaaugauuaacuacauuuu

SEQ ID NO: 38053 - RNA, 21 nt, Artificial Sequence
  Synthetic
aguaaugauuaacuacauuuu

SEQ ID NO: 38054 - RNA, 22 nt, Artificial Sequence
  Synthetic
aaguaaugauuaacuacauuuu

SEQ ID NO: 38055 - RNA, 18 nt, Artificial Sequence
  Synthetic
cuggccaaggguccuuuu

SEQ ID NO: 38056 - RNA, 19 nt, Artificial Sequence
  Synthetic
ucuggccaaggguccuuuu

SEQ ID NO: 38057 - RNA, 20 nt, Artificial Sequence
  Synthetic
cucuggccaaggguccuuuu

SEQ ID NO: 38058 - RNA, 18 nt, Artificial Sequence
  Synthetic
accguauuauccagaaaa

SEQ ID NO: 38059 - RNA, 19 nt, Artificial Sequence
  Synthetic
aaccguauuauccagaaaa

SEQ ID NO: 38060 - RNA, 20 nt, Artificial Sequence
  Synthetic
aaaccguauuauccagaaaa

SEQ ID NO: 38061 - RNA, 21 nt, Artificial Sequence
  Synthetic
caaaccguauuauccagaaaa

SEQ ID NO: 38062 - RNA, 22 nt, Artificial Sequence
  Synthetic
ucaaaccguauuauccagaaaa

SEQ ID NO: 38063 - RNA, 23 nt, Artificial Sequence
  Synthetic
aucaaaccguauuauccagaaaa

SEQ ID NO: 38064 - RNA, 24 nt, Artificial Sequence
  Synthetic
uaucaaaccguauuauccagaaaa

SEQ ID NO: 38065 - RNA, 18 nt, Artificial Sequence
  Synthetic
ugagaaacgaagauuaaa

SEQ ID NO: 38066 - RNA, 19 nt, Artificial Sequence
  Synthetic
augagaaacgaagauuaaa

SEQ ID NO: 38067 - RNA, 20 nt, Artificial Sequence
  Synthetic
aaugagaaacgaagauuaaa

SEQ ID NO: 38068 - RNA, 21 nt, Artificial Sequence
  Synthetic
aaaugagaaacgaagauuaaa

SEQ ID NO: 38069 - RNA, 22 nt, Artificial Sequence
  Synthetic
uaaaugagaaacgaagauuaaa

SEQ ID NO: 38070 - RNA, 24 nt, Artificial Sequence
  Synthetic
aguaaaugagaaacgaagauuaaa

SEQ ID NO: 38071 - RNA, 18 nt, Artificial Sequence
  Synthetic
  misc_feature (7)..(7): n is a, c, g, or u
uaaaccnuaacaaaacaa

SEQ ID NO: 38072 - RNA, 19 nt, Artificial Sequence
  Synthetic
  misc_feature (8)..(8): n is a, c, g, or u
cuaaaccnuaacaaaacaa

SEQ ID NO: 38073 - RNA, 20 nt, Artificial Sequence
  Synthetic
  misc_feature (9)..(9): n is a, c, g, or u
ucuaaaccnuaacaaaacaa

SEQ ID NO: 38074 - RNA, 21 nt, Artificial Sequence
  Synthetic
  misc_feature (10)..(10): n is a, c, g, or u
aucuaaaccnuaacaaaacaa

SEQ ID NO: 38075 - RNA, 22 nt, Artificial Sequence
  Synthetic
  misc_feature (11)..(11): n is a, c, g, or u
caucuaaaccnuaacaaaacaa

SEQ ID NO: 38076 - RNA, 23 nt, Artificial Sequence
  Synthetic
  misc_feature (12)..(12): n is a, c, g, or u
acaucuaaaccnuaacaaaacaa

SEQ ID NO: 38077 - RNA, 24 nt, Artificial Sequence
  Synthetic
  misc_feature (13)..(13): n is a, c, g, or u
uacaucuaaaccnuaacaaaacaa

SEQ ID NO: 38078 - RNA, 18 nt, Artificial Sequence
  Synthetic
cccuuggccagaggccaa

SEQ ID NO: 38079 - RNA, 19 nt, Artificial Sequence
  Synthetic
acccuuggccagaggccaa

SEQ ID NO: 38080 - RNA, 22 nt, Artificial Sequence
  Synthetic
aggacccuuggccagaggccaa

SEQ ID NO: 38081 - RNA, 23 nt, Artificial Sequence
  Synthetic
aaggacccuuggccagaggccaa

SEQ ID NO: 38082 - RNA, 24 nt, Artificial Sequence
  Synthetic
aaaggacccuuggccagaggccaa

SEQ ID NO: 38083 - RNA, 19 nt, Artificial Sequence
  Synthetic
ugcuaggcugugcugccaa

SEQ ID NO: 38084 - RNA, 20 nt, Artificial Sequence
  Synthetic
cugcuaggcugugcugccaa

SEQ ID NO: 38085 - RNA, 18 nt, Artificial Sequence
  Synthetic
ccucucaucaucugccaa

SEQ ID NO: 38086 - RNA, 19 nt, Artificial Sequence
  Synthetic
accucucaucaucugccaa

SEQ ID NO: 38087 - RNA, 20 nt, Artificial Sequence
  Synthetic
caccucucaucaucugccaa

SEQ ID NO: 38088 - RNA, 18 nt, Artificial Sequence
  Synthetic
ucaccauauacuugggaa

SEQ ID NO: 38089 - RNA, 18 nt, Artificial Sequence
  Synthetic
aggaggcuguaggcauaa

SEQ ID NO: 38090 - RNA, 19 nt, Artificial Sequence
  Synthetic
uaggaggcuguaggcauaa

SEQ ID NO: 38091 - RNA, 20 nt, Artificial Sequence
  Synthetic
uuaggaggcuguaggcauaa

SEQ ID NO: 38092 - RNA, 18 nt, Artificial Sequence
  Synthetic
ugcaucaagacauuauaa

SEQ ID NO: 38093 - RNA, 19 nt, Artificial Sequence
  Synthetic
uugcaucaagacauuauaa

SEQ ID NO: 38094 - RNA, 20 nt, Artificial Sequence
  Synthetic
uuugcaucaagacauuauaa

SEQ ID NO: 38095 - RNA, 21 nt, Artificial Sequence
  Synthetic
auuugcaucaagacauuauaa

SEQ ID NO: 38096 - RNA, 22 nt, Artificial Sequence
  Synthetic
cauuugcaucaagacauuauaa

SEQ ID NO: 38097 - RNA, 23 nt, Artificial Sequence
  Synthetic
ccauuugcaucaagacauuauaa

SEQ ID NO: 38098 - RNA, 24 nt, Artificial Sequence
  Synthetic
uccauuugcaucaagacauuauaa

SEQ ID NO: 38099 - RNA, 18 nt, Artificial Sequence
  Synthetic
acaagaacacaucacaca

SEQ ID NO: 38100 - RNA, 19 nt, Artificial Sequence
  Synthetic
cacaagaacacaucacaca

SEQ ID NO: 38101 - RNA, 20 nt, Artificial Sequence
  Synthetic
ccacaagaacacaucacaca

SEQ ID NO: 38102 - RNA, 22 nt, Artificial Sequence
  Synthetic
ugccacaagaacacaucacaca

SEQ ID NO: 38103 - RNA, 23 nt, Artificial Sequence
  Synthetic
uugccacaagaacacaucacaca

SEQ ID NO: 38104 - RNA, 24 nt, Artificial Sequence
  Synthetic
uuugccacaagaacacaucacaca

SEQ ID NO: 38105 - RNA, 18 nt, Artificial Sequence
  Synthetic
uuugugggcccucucaca

SEQ ID NO: 38106 - RNA, 19 nt, Artificial Sequence
  Synthetic
auuugugggcccucucaca

SEQ ID NO: 38107 - RNA, 20 nt, Artificial Sequence
  Synthetic
aauuugugggcccucucaca

SEQ ID NO: 38108 - RNA, 21 nt, Artificial Sequence
  Synthetic
caauuugugggcccucucaca

SEQ ID NO: 38109 - RNA, 22 nt, Artificial Sequence
  Synthetic
acaauuugugggcccucucaca

SEQ ID NO: 38110 - RNA, 23 nt, Artificial Sequence
  Synthetic
aacaauuugugggcccucucaca

SEQ ID NO: 38111 - RNA, 18 nt, Artificial Sequence
  Synthetic
ccuccugcuuauagacca

SEQ ID NO: 38112 - RNA, 19 nt, Artificial Sequence
  Synthetic
uccuccugcuuauagacca

SEQ ID NO: 38113 - RNA, 20 nt, Artificial Sequence
  Synthetic
cuccuccugcuuauagacca

SEQ ID NO: 38114 - RNA, 18 nt, Artificial Sequence
  Synthetic
cucccuguuaacaggcca

SEQ ID NO: 38115 - RNA, 19 nt, Artificial Sequence
  Synthetic
acucccuguuaacaggcca

SEQ ID NO: 38116 - RNA, 20 nt, Artificial Sequence
  Synthetic
aacucccuguuaacaggcca

SEQ ID NO: 38117 - RNA, 18 nt, Artificial Sequence
  Synthetic
acagucauccucaggcca

SEQ ID NO: 38118 - RNA, 20 nt, Artificial Sequence
  Synthetic
agacagucauccucaggcca

SEQ ID NO: 38119 - RNA, 18 nt, Artificial Sequence
  Synthetic
aucaaaccguauuaucca

SEQ ID NO: 38120 - RNA, 19 nt, Artificial Sequence
  Synthetic
uaucaaaccguauuaucca

SEQ ID NO: 38121 - RNA, 18 nt, Artificial Sequence
  Synthetic
cugcuuguuuugcucgca

SEQ ID NO: 38122 - RNA, 20 nt, Artificial Sequence
  Synthetic
agcugcuuguuuugcucgca

SEQ ID NO: 38123 - RNA, 21 nt, Artificial Sequence
  Synthetic
uagcugcuuguuuugcucgca

SEQ ID NO: 38124 - RNA, 22 nt, Artificial Sequence
  Synthetic
cuagcugcuuguuuugcucgca

SEQ ID NO: 38125 - RNA, 23 nt, Artificial Sequence
  Synthetic
ccuagcugcuuguuuugcucgca

SEQ ID NO: 38126 - RNA, 24 nt, Artificial Sequence
  Synthetic
uccuagcugcuuguuuugcucgca

SEQ ID NO: 38127 - RNA, 18 nt, Artificial Sequence
  Synthetic
ccauacagcacucaggca

SEQ ID NO: 38128 - RNA, 19 nt, Artificial Sequence
  Synthetic
accauacagcacucaggca

SEQ ID NO: 38129 - RNA, 20 nt, Artificial Sequence
  Synthetic
caccauacagcacucaggca

SEQ ID NO: 38130 - RNA, 18 nt, Artificial Sequence
  Synthetic
agugggaagaauuaggca

SEQ ID NO: 38131 - RNA, 20 nt, Artificial Sequence
  Synthetic
ugagugggaagaauuaggca

SEQ ID NO: 38132 - RNA, 18 nt, Artificial Sequence
  Synthetic
uaguauuccuuggacuca

SEQ ID NO: 38133 - RNA, 19 nt, Artificial Sequence
  Synthetic
uuaguauuccuuggacuca

SEQ ID NO: 38134 - RNA, 18 nt, Artificial Sequence
  Synthetic
ugauuggaaagucuguca

SEQ ID NO: 38135 - RNA, 19 nt, Artificial Sequence
  Synthetic
uugauuggaaagucuguca

SEQ ID NO: 38136 - RNA, 20 nt, Artificial Sequence
  Synthetic
auugauuggaaagucuguca

SEQ ID NO: 38137 - RNA, 21 nt, Artificial Sequence
  Synthetic
aauugauuggaaagucuguca

SEQ ID NO: 38138 - RNA, 22 nt, Artificial Sequence
  Synthetic
caauugauuggaaagucuguca

SEQ ID NO: 38139 - RNA, 23 nt, Artificial Sequence
  Synthetic
ccaauugauuggaaagucuguca

SEQ ID NO: 38140 - RNA, 18 nt, Artificial Sequence
  Synthetic
  misc_feature (2)..(2): n is a, c, g, or u
cnuaacaaaacaaaaaga

SEQ ID NO: 38141 - RNA, 19 nt, Artificial Sequence
  Synthetic
  misc_feature (3)..(3): n is a, c, g, or u
ccnuaacaaaacaaaaaga

SEQ ID NO: 38142 - RNA, 20 nt, Artificial Sequence
  Synthetic
  misc_feature (4)..(4): n is a, c, g, or u
accnuaacaaaacaaaaaga

SEQ ID NO: 38143 - RNA, 21 nt, Artificial Sequence
  Synthetic
  misc_feature (5)..(5): n is a, c, g, or u
aaccnuaacaaaacaaaaaga

SEQ ID NO: 38144 - RNA, 22 nt, Artificial Sequence
  Synthetic
  misc_feature (6)..(6): n is a, c, g, or u
aaaccnuaacaaaacaaaaaga

SEQ ID NO: 38145 - RNA, 23 nt, Artificial Sequence
  Synthetic
  misc_feature (7)..(7): n is a, c, g, or u
uaaaccnuaacaaaacaaaaaga

SEQ ID NO: 38146 - RNA, 24 nt, Artificial Sequence
  Synthetic
  misc_feature (8)..(8): n is a, c, g, or u
cuaaaccnuaacaaaacaaaaaga

SEQ ID NO: 38147 - RNA, 18 nt, Artificial Sequence
  Synthetic
aucucuccaccacuaaga

SEQ ID NO: 38148 - RNA, 19 nt, Artificial Sequence
  Synthetic
caucucuccaccacuaaga

SEQ ID NO: 38149 - RNA, 20 nt, Artificial Sequence
  Synthetic
ccaucucuccaccacuaaga

SEQ ID NO: 38150 - RNA, 18 nt, Artificial Sequence
  Synthetic
uuggacccagcauucaga

SEQ ID NO: 38151 - RNA, 20 nt, Artificial Sequence
  Synthetic
aguuggacccagcauucaga

SEQ ID NO: 38152 - RNA, 21 nt, Artificial Sequence
  Synthetic
caguuggacccagcauucaga

SEQ ID NO: 38153 - RNA, 22 nt, Artificial Sequence
  Synthetic
ccaguuggacccagcauucaga

SEQ ID NO: 38154 - RNA, 23 nt, Artificial Sequence
  Synthetic
accaguuggacccagcauucaga

SEQ ID NO: 38155 - RNA, 24 nt, Artificial Sequence
  Synthetic
caccaguuggacccagcauucaga

SEQ ID NO: 38156 - RNA, 18 nt, Artificial Sequence
  Synthetic
agauccagcauccagaga

SEQ ID NO: 38157 - RNA, 19 nt, Artificial Sequence
  Synthetic
aagauccagcauccagaga

SEQ ID NO: 38158 - RNA, 18 nt, Artificial Sequence
  Synthetic
  misc_feature (13)..(13): n is a, c, g, or u
uuucagcuauaungauga

SEQ ID NO: 38159 - RNA, 19 nt, Artificial Sequence
  Synthetic
  misc_feature (14)..(14): n is a, c, g, or u
cuuucagcuauaungauga

SEQ ID NO: 38160 - RNA, 22 nt, Artificial Sequence
  Synthetic
  misc_feature (17)..(17): n is a, c, g, or u
uggcuuucagcuauaungauga

SEQ ID NO: 38161 - RNA, 23 nt, Artificial Sequence
  Synthetic
  misc_feature (18)..(18): n is a, c, g, or u
cuggcuuucagcuauaungauga

SEQ ID NO: 38162 - RNA, 24 nt, Artificial Sequence
  Synthetic
  misc_feature (19)..(19): n is a, c, g, or u
ucuggcuuucagcuauaungauga

SEQ ID NO: 38163 - RNA, 18 nt, Artificial Sequence
  Synthetic
  misc_feature (4)..(4): n is a, c, g, or u
aauncugugcugggguga

SEQ ID NO: 38164 - RNA, 19 nt, Artificial Sequence
  Synthetic
  misc_feature (5)..(5): n is a, c, g, or u
caauncugugcugggguga

SEQ ID NO: 38165 - RNA, 21 nt, Artificial Sequence
  Synthetic
  misc_feature (7)..(7): n is a, c, g, or u
agcaauncugugcugggguga

SEQ ID NO: 38166 - RNA, 22 nt, Artificial Sequence
  Synthetic
  misc_feature (8)..(8): n is a, c, g, or u
aagcaauncugugcugggguga

SEQ ID NO: 38167 - RNA, 23 nt, Artificial Sequence
  Synthetic
  misc_feature (9)..(9): n is a, c, g, or u
caagcaauncugugcugggguga

SEQ ID NO: 38168 - RNA, 18 nt, Artificial Sequence
  Synthetic
aaagucugucaacgaaua

SEQ ID NO: 38169 - RNA, 21 nt, Artificial Sequence
  Synthetic
uggaaagucugucaacgaaua

SEQ ID NO: 38170 - RNA, 22 nt, Artificial Sequence
  Synthetic
uuggaaagucugucaacgaaua

SEQ ID NO: 38171 - RNA, 23 nt, Artificial Sequence
  Synthetic
auuggaaagucugucaacgaaua

SEQ ID NO: 38172 - RNA, 18 nt, Artificial Sequence
  Synthetic
cuuaaauuuuaugggaua

SEQ ID NO: 38173 - RNA, 19 nt, Artificial Sequence
  Synthetic
ccuuaaauuuuaugggaua

SEQ ID NO: 38174 - RNA, 20 nt, Artificial Sequence
  Synthetic
uccuuaaauuuuaugggaua

SEQ ID NO: 38175 - RNA, 21 nt, Artificial Sequence
  Synthetic
uuccuuaaauuuuaugggaua

SEQ ID NO: 38176 - RNA, 22 nt, Artificial Sequence
  Synthetic
auuccuuaaauuuuaugggaua

SEQ ID NO: 38177 - RNA, 23 nt, Artificial Sequence
  Synthetic
uauuccuuaaauuuuaugggaua

SEQ ID NO: 38178 - RNA, 24 nt, Artificial Sequence
  Synthetic
uuauuccuuaaauuuuaugggaua

SEQ ID NO: 38179 - RNA, 18 nt, Artificial Sequence
  Synthetic
uagacauugacccuuaua

SEQ ID NO: 38180 - RNA, 19 nt, Artificial Sequence
  Synthetic
uuagacauugacccuuaua

SEQ ID NO: 38181 - RNA, 20 nt, Artificial Sequence
  Synthetic
cuuagacauugacccuuaua

SEQ ID NO: 38182 - RNA, 23 nt, Artificial Sequence
  Synthetic
uggcuuagacauugacccuuaua

SEQ ID NO: 38183 - RNA, 24 nt, Artificial Sequence
  Synthetic
uuggcuuagacauugacccuuaua

SEQ ID NO: 38184 - RNA, 19 nt, Artificial Sequence
  Synthetic
agauuuuucccaaacucua

SEQ ID NO: 38185 - RNA, 20 nt, Artificial Sequence
  Synthetic
cagauuuuucccaaacucua

SEQ ID NO: 38186 - RNA, 19 nt, Artificial Sequence
  Synthetic
agcauuccaccaagcucua

SEQ ID NO: 38187 - RNA, 20 nt, Artificial Sequence
  Synthetic
cagcauuccaccaagcucua

SEQ ID NO: 38188 - RNA, 21 nt, Artificial Sequence
  Synthetic
acagcauuccaccaagcucua

SEQ ID NO: 38189 - RNA, 22 nt, Artificial Sequence
  Synthetic
uacagcauuccaccaagcucua

SEQ ID NO: 38190 - RNA, 23 nt, Artificial Sequence
  Synthetic
cuacagcauuccaccaagcucua

SEQ ID NO: 38191 - RNA, 24 nt, Artificial Sequence
  Synthetic
ucuacagcauuccaccaagcucua

SEQ ID NO: 38192 - RNA, 18 nt, Artificial Sequence
  Synthetic
agaaaccguucuugagua

SEQ ID NO: 38193 - RNA, 20 nt, Artificial Sequence
  Synthetic
agagaaaccguucuugagua

SEQ ID NO: 38194 - RNA, 18 nt, Artificial Sequence
  Synthetic
uauuauccagaaaaugua

SEQ ID NO: 38195 - RNA, 20 nt, Artificial Sequence
  Synthetic
cguauuauccagaaaaugua

SEQ ID NO: 38196 - RNA, 21 nt, Artificial Sequence
  Synthetic
ccguauuauccagaaaaugua

SEQ ID NO: 38197 - RNA, 22 nt, Artificial Sequence
  Synthetic
accguauuauccagaaaaugua

SEQ ID NO: 38198 - RNA, 23 nt, Artificial Sequence
  Synthetic
aaccguauuauccagaaaaugua

SEQ ID NO: 38199 - RNA, 24 nt, Artificial Sequence
  Synthetic
aaaccguauuauccagaaaaugua

SEQ ID NO: 38200 - RNA, 18 nt, Artificial Sequence
  Synthetic
auaaggccuuucucugua

SEQ ID NO: 38201 - RNA, 19 nt, Artificial Sequence
  Synthetic
uauaaggccuuucucugua

SEQ ID NO: 38202 - RNA, 20 nt, Artificial Sequence
  Synthetic
uuauaaggccuuucucugua

SEQ ID NO: 38203 - RNA, 18 nt, Artificial Sequence
  Synthetic
  misc_feature (11)..(11): n is a, c, g, or u
acaucacacanaaaauua

SEQ ID NO: 38204 - RNA, 19 nt, Artificial Sequence
  Synthetic
  misc_feature (12)..(12): n is a, c, g, or u
cacaucacacanaaaauua

SEQ ID NO: 38205 - RNA, 20 nt, Artificial Sequence
  Synthetic
  misc_feature (13)..(13): n is a, c, g, or u
acacaucacacanaaaauua

SEQ ID NO: 38206 - RNA, 21 nt, Artificial Sequence
  Synthetic
  misc_feature (14)..(14): n is a, c, g, or u
aacacaucacacanaaaauua

SEQ ID NO: 38207 - RNA, 23 nt, Artificial Sequence
  Synthetic
  misc_feature (16)..(16): n is a, c, g, or u
agaacacaucacacanaaaauua

SEQ ID NO: 38208 - RNA, 24 nt, Artificial Sequence
  Synthetic
  misc_feature (17)..(17): n is a, c, g, or u
aagaacacaucacacanaaaauua

SEQ ID NO: 38209 - RNA, 19 nt, Artificial Sequence
  Synthetic
ugcugagugggaagaauua

SEQ ID NO: 38210 - RNA, 20 nt, Artificial Sequence
  Synthetic
uugcugagugggaagaauua

SEQ ID NO: 38211 - RNA, 21 nt, Artificial Sequence
  Synthetic
uuugcugagugggaagaauua

SEQ ID NO: 38212 - RNA, 22 nt, Artificial Sequence
  Synthetic
uuuugcugagugggaagaauua

SEQ ID NO: 38213 - RNA, 23 nt, Artificial Sequence
  Synthetic
uuuuugcugagugggaagaauua

SEQ ID NO: 38214 - RNA, 18 nt, Artificial Sequence
  Synthetic
ucacaguaaaugagaaac

SEQ ID NO: 38215 - RNA, 19 nt, Artificial Sequence
  Synthetic
cucacaguaaaugagaaac

SEQ ID NO: 38216 - RNA, 20 nt, Artificial Sequence
  Synthetic
ucucacaguaaaugagaaac

SEQ ID NO: 38217 - RNA, 18 nt, Artificial Sequence
  Synthetic
aaauauuuaccauuagac

SEQ ID NO: 38218 - RNA, 19 nt, Artificial Sequence
  Synthetic
uaaauauuuaccauuagac

SEQ ID NO: 38219 - RNA, 20 nt, Artificial Sequence
  Synthetic
cuaaauauuuaccauuagac

SEQ ID NO: 38220 - RNA, 21 nt, Artificial Sequence
  Synthetic
acuaaauauuuaccauuagac

SEQ ID NO: 38221 - RNA, 22 nt, Artificial Sequence
  Synthetic
uacuaaauauuuaccauuagac

SEQ ID NO: 38222 - RNA, 23 nt, Artificial Sequence
  Synthetic
cuacuaaauauuuaccauuagac

SEQ ID NO: 38223 - RNA, 24 nt, Artificial Sequence
  Synthetic
ucuacuaaauauuuaccauuagac

SEQ ID NO: 38224 - RNA, 18 nt, Artificial Sequence
  Synthetic
uguacaaaaccuucggac

SEQ ID NO: 38225 - RNA, 19 nt, Artificial Sequence
  Synthetic
cuguacaaaaccuucggac

SEQ ID NO: 38226 - RNA, 18 nt, Artificial Sequence
  Synthetic
aacaauccagauugggac

SEQ ID NO: 38227 - RNA, 19 nt, Artificial Sequence
  Synthetic
caacaauccagauugggac

SEQ ID NO: 38228 - RNA, 20 nt, Artificial Sequence
  Synthetic
ccaacaauccagauugggac

SEQ ID NO: 38229 - RNA, 20 nt, Artificial Sequence
  Synthetic
aggaguuggagccuauggac

SEQ ID NO: 38230 - RNA, 19 nt, Artificial Sequence
  Synthetic
  misc_feature (17)..(17): n is a, c, g, or u
aguugaugacucuagcnac

SEQ ID NO: 38231 - RNA, 21 nt, Artificial Sequence
  Synthetic
  misc_feature (19)..(19): n is a, c, g, or u
ugaguugaugacucuagcnac

SEQ ID NO: 38232 - RNA, 18 nt, Artificial Sequence
  Synthetic
aauucgcaguccccaacc

SEQ ID NO: 38233 - RNA, 19 nt, Artificial Sequence
  Synthetic
aaauucgcaguccccaacc

SEQ ID NO: 38234 - RNA, 20 nt, Artificial Sequence
  Synthetic
uaaauucgcaguccccaacc

SEQ ID NO: 38235 - RNA, 21 nt, Artificial Sequence
  Synthetic
uggggaaagaaccuuuccacc

SEQ ID NO: 38236 - RNA, 23 nt, Artificial Sequence
  Synthetic
aguggggaaagaaccuuuccacc

SEQ ID NO: 38237 - RNA, 19 nt, Artificial Sequence
  Synthetic
agcauucagagcaaauacc

SEQ ID NO: 38238 - RNA, 20 nt, Artificial Sequence
  Synthetic
cagcauucagagcaaauacc

SEQ ID NO: 38239 - RNA, 18 nt, Artificial Sequence
  Synthetic
ccgcuucagcuuuguacc

SEQ ID NO: 38240 - RNA, 19 nt, Artificial Sequence
  Synthetic
accgcuucagcuuuguacc

SEQ ID NO: 38241 - RNA, 20 nt, Artificial Sequence
  Synthetic
caccgcuucagcuuuguacc

SEQ ID NO: 38242 - RNA, 18 nt, Artificial Sequence
  Synthetic
uuugcugacgcaaccccc

SEQ ID NO: 38243 - RNA, 20 nt, Artificial Sequence
  Synthetic
uguuugcugacgcaaccccc

SEQ ID NO: 38244 - RNA, 20 nt, Artificial Sequence
  Synthetic
aggccuuuugggguggagcc

SEQ ID NO: 38245 - RNA, 18 nt, Artificial Sequence
  Synthetic
aagccuccaagcugugcc

SEQ ID NO: 38246 - RNA, 19 nt, Artificial Sequence
  Synthetic
caagccuccaagcugugcc

SEQ ID NO: 38247 - RNA, 20 nt, Artificial Sequence
  Synthetic
ucaagccuccaagcugugcc

SEQ ID NO: 38248 - RNA, 18 nt, Artificial Sequence
  Synthetic
ccaagcucuacaaaaucc

SEQ ID NO: 38249 - RNA, 19 nt, Artificial Sequence
  Synthetic
accaagcucuacaaaaucc

SEQ ID NO: 38250 - RNA, 20 nt, Artificial Sequence
  Synthetic
caccaagcucuacaaaaucc

SEQ ID NO: 38251 - RNA, 21 nt, Artificial Sequence
  Synthetic
ccaccaagcucuacaaaaucc

SEQ ID NO: 38252 - RNA, 22 nt, Artificial Sequence
  Synthetic
uccaccaagcucuacaaaaucc

SEQ ID NO: 38253 - RNA, 23 nt, Artificial Sequence
  Synthetic
uuccaccaagcucuacaaaaucc

SEQ ID NO: 38254 - RNA, 24 nt, Artificial Sequence
  Synthetic
auuccaccaagcucuacaaaaucc

SEQ ID NO: 38255 - RNA, 18 nt, Artificial Sequence
  Synthetic
uuggaagauccagcaucc

SEQ ID NO: 38256 - RNA, 19 nt, Artificial Sequence
  Synthetic
uuuggaagauccagcaucc

SEQ ID NO: 38257 - RNA, 20 nt, Artificial Sequence
  Synthetic
auuuggaagauccagcaucc

SEQ ID NO: 38258 - RNA, 21 nt, Artificial Sequence
  Synthetic
aauuuggaagauccagcaucc

SEQ ID NO: 38259 - RNA, 22 nt, Artificial Sequence
  Synthetic
uaauuuggaagauccagcaucc

SEQ ID NO: 38260 - RNA, 23 nt, Artificial Sequence
  Synthetic
auaauuuggaagauccagcaucc

SEQ ID NO: 38261 - RNA, 24 nt, Artificial Sequence
  Synthetic
aauaauuuggaagauccagcaucc

SEQ ID NO: 38262 - RNA, 19 nt, Artificial Sequence
  Synthetic
agauccgccuccugccucc

SEQ ID NO: 38263 - RNA, 20 nt, Artificial Sequence
  Synthetic
cagauccgccuccugccucc

SEQ ID NO: 38264 - RNA, 22 nt, Artificial Sequence
  Synthetic
agcagauccgccuccugccucc

SEQ ID NO: 38265 - RNA, 23 nt, Artificial Sequence
  Synthetic
cagcagauccgccuccugccucc

SEQ ID NO: 38266 - RNA, 24 nt, Artificial Sequence
  Synthetic
ccagcagauccgccuccugccucc

SEQ ID NO: 38267 - RNA, 18 nt, Artificial Sequence
  Synthetic
cgggaauccuuagagucc

SEQ ID NO: 38268 - RNA, 19 nt, Artificial Sequence
  Synthetic
ccgggaauccuuagagucc

SEQ ID NO: 38269 - RNA, 20 nt, Artificial Sequence
  Synthetic
accgggaauccuuagagucc

SEQ ID NO: 38270 - RNA, 18 nt, Artificial Sequence
  Synthetic
uauguugcccguuugucc

SEQ ID NO: 38271 - RNA, 18 nt, Artificial Sequence
  Synthetic
aaaagaugggguuauucc

SEQ ID NO: 38272 - RNA, 19 nt, Artificial Sequence
  Synthetic
aaaaagaugggguuauucc

SEQ ID NO: 38273 - RNA, 20 nt, Artificial Sequence
  Synthetic
caaaaagaugggguuauucc

SEQ ID NO: 38274 - RNA, 21 nt, Artificial Sequence
  Synthetic
acaaaaagaugggguuauucc

SEQ ID NO: 38275 - RNA, 22 nt, Artificial Sequence
  Synthetic
aacaaaaagaugggguuauucc

SEQ ID NO: 38276 - RNA, 23 nt, Artificial Sequence
  Synthetic
aaacaaaaagaugggguuauucc

SEQ ID NO: 38277 - RNA, 24 nt, Artificial Sequence
  Synthetic
aaaacaaaaagaugggguuauucc

SEQ ID NO: 38278 - RNA, 18 nt, Artificial Sequence
  Synthetic
uauuaggaggcuguaggc

SEQ ID NO: 38279 - RNA, 20 nt, Artificial Sequence
  Synthetic
uguauuaggaggcuguaggc

SEQ ID NO: 38280 - RNA, 18 nt, Artificial Sequence
  Synthetic
cuuggguggcuuuagggc

SEQ ID NO: 38281 - RNA, 19 nt, Artificial Sequence
  Synthetic
ccuuggguggcuuuagggc

SEQ ID NO: 38282 - RNA, 18 nt, Artificial Sequence
  Synthetic
auaccuaugggagugggc

SEQ ID NO: 38283 - RNA, 19 nt, Artificial Sequence
  Synthetic
aauaccuaugggagugggc

SEQ ID NO: 38284 - RNA, 20 nt, Artificial Sequence
  Synthetic
aaauaccuaugggagugggc

SEQ ID NO: 38285 - RNA, 19 nt, Artificial Sequence
  Synthetic
agugcccguguguccuggc

SEQ ID NO: 38286 - RNA, 18 nt, Artificial Sequence
  Synthetic
  misc_feature (4)..(4): n is a, c, g, or u
uaunuuccugcugguggc

SEQ ID NO: 38287 - RNA, 20 nt, Artificial Sequence
  Synthetic
  misc_feature (6)..(6): n is a, c, g, or u
uguaunuuccugcugguggc

SEQ ID NO: 38288 - RNA, 21 nt, Artificial Sequence
  Synthetic
  misc_feature (7)..(7): n is a, c, g, or u
cuguaunuuccugcugguggc

SEQ ID NO: 38289 - RNA, 22 nt, Artificial Sequence
  Synthetic
  misc_feature (8)..(8): n is a, c, g, or u
ccuguaunuuccugcugguggc

SEQ ID NO: 38290 - RNA, 18 nt, Artificial Sequence
  Synthetic
  misc_feature (12)..(12): n is a, c, g, or u
aggcaagcaauncugugc

SEQ ID NO: 38291 - RNA, 19 nt, Artificial Sequence
  Synthetic
  misc_feature (13)..(13): n is a, c, g, or u
caggcaagcaauncugugc

SEQ ID NO: 38292 - RNA, 20 nt, Artificial Sequence
  Synthetic
  misc_feature (14)..(14): n is a, c, g, or u
ucaggcaagcaauncugugc

SEQ ID NO: 38293 - RNA, 18 nt, Artificial Sequence
  Synthetic
cuccugccuccaccaauc

SEQ ID NO: 38294 - RNA, 19 nt, Artificial Sequence
  Synthetic
ccuccugccuccaccaauc

SEQ ID NO: 38295 - RNA, 18 nt, Artificial Sequence
  Synthetic
ccaaaucuguacaacauc

SEQ ID NO: 38296 - RNA, 18 nt, Artificial Sequence
  Synthetic
uaggauuccuucccgauc

SEQ ID NO: 38297 - RNA, 19 nt, Artificial Sequence
  Synthetic
cuaggauuccuucccgauc

SEQ ID NO: 38298 - RNA, 20 nt, Artificial Sequence
  Synthetic
ucuaggauuccuucccgauc

SEQ ID NO: 38299 - RNA, 18 nt, Artificial Sequence
  Synthetic
cccaaccuccaaucacuc

SEQ ID NO: 38300 - RNA, 19 nt, Artificial Sequence
  Synthetic
ccccaaccuccaaucacuc

SEQ ID NO: 38301 - RNA, 20 nt, Artificial Sequence
  Synthetic
uccccaaccuccaaucacuc

SEQ ID NO: 38302 - RNA, 22 nt, Artificial Sequence
  Synthetic
aguccccaaccuccaaucacuc

SEQ ID NO: 38303 - RNA, 23 nt, Artificial Sequence
  Synthetic
caguccccaaccuccaaucacuc

SEQ ID NO: 38304 - RNA, 18 nt, Artificial Sequence
  Synthetic
uuucuuggacggucccuc

SEQ ID NO: 38305 - RNA, 19 nt, Artificial Sequence
  Synthetic
cuuucuuggacggucccuc

SEQ ID NO: 38306 - RNA, 18 nt, Artificial Sequence
  Synthetic
uuuccaccagcaauccuc

SEQ ID NO: 38307 - RNA, 19 nt, Artificial Sequence
  Synthetic
cuuuccaccagcaauccuc

SEQ ID NO: 38308 - RNA, 20 nt, Artificial Sequence
  Synthetic
ccuuuccaccagcaauccuc

SEQ ID NO: 38309 - RNA, 18 nt, Artificial Sequence
  Synthetic
uauugccucucacaucuc

SEQ ID NO: 38310 - RNA, 19 nt, Artificial Sequence
  Synthetic
cuauugccucucacaucuc

SEQ ID NO: 38311 - RNA, 20 nt, Artificial Sequence
  Synthetic
acuauugccucucacaucuc

SEQ ID NO: 38312 - RNA, 18 nt, Artificial Sequence
  Synthetic
caucucgucaaucuucuc

SEQ ID NO: 38313 - RNA, 19 nt, Artificial Sequence
  Synthetic
acaucucgucaaucuucuc

SEQ ID NO: 38314 - RNA, 20 nt, Artificial Sequence
  Synthetic
cacaucucgucaaucuucuc

SEQ ID NO: 38315 - RNA, 18 nt, Artificial Sequence
  Synthetic
auucugucguccuuucuc

SEQ ID NO: 38316 - RNA, 19 nt, Artificial Sequence
  Synthetic
aauucugucguccuuucuc

SEQ ID NO: 38317 - RNA, 20 nt, Artificial Sequence
  Synthetic
caauucugucguccuuucuc

SEQ ID NO: 38318 - RNA, 18 nt, Artificial Sequence
  Synthetic
ucuucuacuauaccuguc

SEQ ID NO: 38319 - RNA, 19 nt, Artificial Sequence
  Synthetic
uucuucuacuauaccuguc

SEQ ID NO: 38320 - RNA, 20 nt, Artificial Sequence
  Synthetic
auucuucuacuauaccuguc

SEQ ID NO: 38321 - RNA, 21 nt, Artificial Sequence
  Synthetic
uauucuucuacuauaccuguc

SEQ ID NO: 38322 - RNA, 23 nt, Artificial Sequence
  Synthetic
uguauucuucuacuauaccuguc

SEQ ID NO: 38323 - RNA, 24 nt, Artificial Sequence
  Synthetic
cuguauucuucuacuauaccuguc

SEQ ID NO: 38324 - RNA, 18 nt, Artificial Sequence
  Synthetic
ccguuuguccucugauuc

SEQ ID NO: 38325 - RNA, 19 nt, Artificial Sequence
  Synthetic
cccguuuguccucugauuc

SEQ ID NO: 38326 - RNA, 21 nt, Artificial Sequence
  Synthetic
ugcccguuuguccucugauuc

SEQ ID NO: 38327 - RNA, 22 nt, Artificial Sequence
  Synthetic
uugcccguuuguccucugauuc

SEQ ID NO: 38328 - RNA, 24 nt, Artificial Sequence
  Synthetic
uguugcccguuuguccucugauuc

SEQ ID NO: 38329 - RNA, 18 nt, Artificial Sequence
  Synthetic
ugcugguggcuccaguuc

SEQ ID NO: 38330 - RNA, 19 nt, Artificial Sequence
  Synthetic
cugcugguggcuccaguuc

SEQ ID NO: 38331 - RNA, 20 nt, Artificial Sequence
  Synthetic
ccugcugguggcuccaguuc

SEQ ID NO: 38332 - RNA, 21 nt, Artificial Sequence
  Synthetic
uccugcugguggcuccaguuc

SEQ ID NO: 38333 - RNA, 22 nt, Artificial Sequence
  Synthetic
uuccugcugguggcuccaguuc

SEQ ID NO: 38334 - RNA, 23 nt, Artificial Sequence
  Synthetic
  misc_feature (1)..(1): n is a, c, g, or u
nuuccugcugguggcuccaguuc

SEQ ID NO: 38335 - RNA, 24 nt, Artificial Sequence
  Synthetic
  misc_feature (2)..(2): n is a, c, g, or u
unuuccugcugguggcuccaguuc

SEQ ID NO: 38336 - RNA, 18 nt, Artificial Sequence
  Synthetic
uugggagagaaaccguuc

SEQ ID NO: 38337 - RNA, 19 nt, Artificial Sequence
  Synthetic
uuugggagagaaaccguuc

SEQ ID NO: 38338 - RNA, 20 nt, Artificial Sequence
  Synthetic
uuuugggagagaaaccguuc

SEQ ID NO: 38339 - RNA, 21 nt, Artificial Sequence
  Synthetic
cuuuugggagagaaaccguuc

SEQ ID NO: 38340 - RNA, 22 nt, Artificial Sequence
  Synthetic
acuuuugggagagaaaccguuc

SEQ ID NO: 38341 - RNA, 23 nt, Artificial Sequence
  Synthetic
uacuuuugggagagaaaccguuc

SEQ ID NO: 38342 - RNA, 24 nt, Artificial Sequence
  Synthetic
uuacuuuugggagagaaaccguuc

SEQ ID NO: 38343 - RNA, 18 nt, Artificial Sequence
  Synthetic
uacuagugccauuuguuc

SEQ ID NO: 38344 - RNA, 19 nt, Artificial Sequence
  Synthetic
uuacuagugccauuuguuc

SEQ ID NO: 38345 - RNA, 20 nt, Artificial Sequence
  Synthetic
uuuacuagugccauuuguuc

SEQ ID NO: 38346 - RNA, 22 nt, Artificial Sequence
  Synthetic
aguuuacuagugccauuuguuc

SEQ ID NO: 38347 - RNA, 23 nt, Artificial Sequence
  Synthetic
caguuuacuagugccauuuguuc

SEQ ID NO: 38348 - RNA, 24 nt, Artificial Sequence
  Synthetic
ucaguuuacuagugccauuuguuc

SEQ ID NO: 38349 - RNA, 18 nt, Artificial Sequence
  Synthetic
uuacauacccuuuggaag

SEQ ID NO: 38350 - RNA, 19 nt, Artificial Sequence
  Synthetic
uuuacauacccuuuggaag

SEQ ID NO: 38351 - RNA, 20 nt, Artificial Sequence
  Synthetic
auuuacauacccuuuggaag

SEQ ID NO: 38352 - RNA, 21 nt, Artificial Sequence
  Synthetic
uauuuacauacccuuuggaag

SEQ ID NO: 38353 - RNA, 22 nt, Artificial Sequence
  Synthetic
uuauuuacauacccuuuggaag

SEQ ID NO: 38354 - RNA, 23 nt, Artificial Sequence
  Synthetic
auuauuuacauacccuuuggaag

SEQ ID NO: 38355 - RNA, 24 nt, Artificial Sequence
  Synthetic
cauuauuuacauacccuuuggaag

SEQ ID NO: 38356 - RNA, 20 nt, Artificial Sequence
  Synthetic
cggaaacucccuguuaacag

SEQ ID NO: 38357 - RNA, 18 nt, Artificial Sequence
  Synthetic
auuaggcaaugaguccag

SEQ ID NO: 38358 - RNA, 19 nt, Artificial Sequence
  Synthetic
aauuaggcaaugaguccag

SEQ ID NO: 38359 - RNA, 18 nt, Artificial Sequence
  Synthetic
cuguuguuagacgaagag

SEQ ID NO: 38360 - RNA, 19 nt, Artificial Sequence
  Synthetic
acuguuguuagacgaagag

SEQ ID NO: 38361 - RNA, 20 nt, Artificial Sequence
  Synthetic
uacuguuguuagacgaagag

SEQ ID NO: 38362 - RNA, 21 nt, Artificial Sequence
  Synthetic
cuacuguuguuagacgaagag

SEQ ID NO: 38363 - RNA, 22 nt, Artificial Sequence
  Synthetic
acuacuguuguuagacgaagag

SEQ ID NO: 38364 - RNA, 24 nt, Artificial Sequence
  Synthetic
agacuacuguuguuagacgaagag

SEQ ID NO: 38365 - RNA, 21 nt, Artificial Sequence
  Synthetic
uccaacuuguccuggcuaucg

SEQ ID NO: 38366 - RNA, 22 nt, Artificial Sequence
  Synthetic
cuccaacuuguccuggcuaucg

SEQ ID NO: 38367 - RNA, 23 nt, Artificial Sequence
  Synthetic
ccuccaacuuguccuggcuaucg

SEQ ID NO: 38368 - RNA, 24 nt, Artificial Sequence
  Synthetic
uccuccaacuuguccuggcuaucg

SEQ ID NO: 38369 - RNA, 18 nt, Artificial Sequence
  Synthetic
cccugcucguguuacagg

SEQ ID NO: 38370 - RNA, 19 nt, Artificial Sequence
  Synthetic
ccccugcucguguuacagg

SEQ ID NO: 38371 - RNA, 20 nt, Artificial Sequence
  Synthetic
accccugcucguguuacagg

SEQ ID NO: 38372 - RNA, 18 nt, Artificial Sequence
  Synthetic
ugguggcuccaguucagg

SEQ ID NO: 38373 - RNA, 19 nt, Artificial Sequence
  Synthetic
cugguggcuccaguucagg

SEQ ID NO: 38374 - RNA, 18 nt, Artificial Sequence
  Synthetic
uucucucaauuuucuagg

SEQ ID NO: 38375 - RNA, 19 nt, Artificial Sequence
  Synthetic
cuucucucaauuuucuagg

SEQ ID NO: 38376 - RNA, 20 nt, Artificial Sequence
  Synthetic
acuucucucaauuuucuagg

SEQ ID NO: 38377 - RNA, 23 nt, Artificial Sequence
  Synthetic
uggacuucucucaauuuucuagg

SEQ ID NO: 38378 - RNA, 18 nt, Artificial Sequence
  Synthetic
  misc_feature (3)..(3): n is a, c, g, or u
ccnguugcuaggcaacgg

SEQ ID NO: 38379 - RNA, 19 nt, Artificial Sequence
  Synthetic
  misc_feature (4)..(4): n is a, c, g, or u
cccnguugcuaggcaacgg

SEQ ID NO: 38380 - RNA, 20 nt, Artificial Sequence
  Synthetic
  misc_feature (5)..(5): n is a, c, g, or u
acccnguugcuaggcaacgg

SEQ ID NO: 38381 - RNA, 18 nt, Artificial Sequence
  Synthetic
augaugugguauuggggg

SEQ ID NO: 38382 - RNA, 20 nt, Artificial Sequence
  Synthetic
  misc_feature (1)..(1): n is a, c, g, or u
ngaugaugugguauuggggg

SEQ ID NO: 38383 - RNA, 21 nt, Artificial Sequence
  Synthetic
  misc_feature (2)..(2): n is a, c, g, or u
ungaugaugugguauuggggg

SEQ ID NO: 38384 - RNA, 22 nt, Artificial Sequence
  Synthetic
  misc_feature (3)..(3): n is a, c, g, or u
aungaugaugugguauuggggg

SEQ ID NO: 38385 - RNA, 23 nt, Artificial Sequence
  Synthetic
  misc_feature (4)..(4): n is a, c, g, or u
uaungaugaugugguauuggggg

SEQ ID NO: 38386 - RNA, 24 nt, Artificial Sequence
  Synthetic
  misc_feature (5)..(5): n is a, c, g, or u
auaungaugaugugguauuggggg

SEQ ID NO: 38387 - RNA, 18 nt, Artificial Sequence
  Synthetic
  misc_feature (8)..(8): n is a, c, g, or u
aagcaauncugugcuggg

SEQ ID NO: 38388 - RNA, 19 nt, Artificial Sequence
  Synthetic
  misc_feature (9)..(9): n is a, c, g, or u
caagcaauncugugcuggg

SEQ ID NO: 38389 - RNA, 22 nt, Artificial Sequence
  Synthetic
  misc_feature (12)..(12): n is a, c, g, or u
aggcaagcaauncugugcuggg

SEQ ID NO: 38390 - RNA, 23 nt, Artificial Sequence
  Synthetic
  misc_feature (13)..(13): n is a, c, g, or u
caggcaagcaauncugugcuggg

SEQ ID NO: 38391 - RNA, 24 nt, Artificial Sequence
  Synthetic
  misc_feature (14)..(14): n is a, c, g, or u
ucaggcaagcaauncugugcuggg

SEQ ID NO: 38392 - RNA, 19 nt, Artificial Sequence
  Synthetic
uguguuuuugcugaguggg

SEQ ID NO: 38393 - RNA, 20 nt, Artificial Sequence
  Synthetic
cuguguuuuugcugaguggg

SEQ ID NO: 38394 - RNA, 21 nt, Artificial Sequence
  Synthetic
acuguguuuuugcugaguggg

SEQ ID NO: 38395 - RNA, 24 nt, Artificial Sequence
  Synthetic
aggacuguguuuuugcugaguggg

SEQ ID NO: 38396 - RNA, 18 nt, Artificial Sequence
  Synthetic
  misc_feature (12)..(12): n is a, c, g, or u
augacucuagcnaccugg

SEQ ID NO: 38397 - RNA, 20 nt, Artificial Sequence
  Synthetic
  misc_feature (14)..(14): n is a, c, g, or u
ugaugacucuagcnaccugg

SEQ ID NO: 38398 - RNA, 18 nt, Artificial Sequence
  Synthetic
  misc_feature (15)..(15): n is a, c, g, or u
ugucaacaaccgggnugg

SEQ ID NO: 38399 - RNA, 19 nt, Artificial Sequence
  Synthetic
  misc_feature (16)..(16): n is a, c, g, or u
augucaacaaccgggnugg

SEQ ID NO: 38400 - RNA, 20 nt, Artificial Sequence
  Synthetic
  misc_feature (17)..(17): n is a, c, g, or u
uaugucaacaaccgggnugg

SEQ ID NO: 38401 - RNA, 18 nt, Artificial Sequence
  Synthetic
aagaauuuggagcuacug

SEQ ID NO: 38402 - RNA, 19 nt, Artificial Sequence
  Synthetic
aaagaauuuggagcuacug

SEQ ID NO: 38403 - RNA, 20 nt, Artificial Sequence
  Synthetic
uaaagaauuuggagcuacug

SEQ ID NO: 38404 - RNA, 21 nt, Artificial Sequence
  Synthetic
auaaagaauuuggagcuacug

SEQ ID NO: 38405 - RNA, 22 nt, Artificial Sequence
  Synthetic
uauaaagaauuuggagcuacug

SEQ ID NO: 38406 - RNA, 23 nt, Artificial Sequence
  Synthetic
uuauaaagaauuuggagcuacug

SEQ ID NO: 38407 - RNA, 24 nt, Artificial Sequence
  Synthetic
cuuauaaagaauuuggagcuacug

SEQ ID NO: 38408 - RNA, 18 nt, Artificial Sequence
  Synthetic
uaaaacuaguuaugccug

SEQ ID NO: 38409 - RNA, 19 nt, Artificial Sequence
  Synthetic
uuaaaacuaguuaugccug

SEQ ID NO: 38410 - RNA, 20 nt, Artificial Sequence
  Synthetic
auuaaaacuaguuaugccug

SEQ ID NO: 38411 - RNA, 19 nt, Artificial Sequence
  Synthetic
  misc_feature (3)..(3): n is a, c, g, or u
ugnaacuuuuucaccucug

SEQ ID NO: 38412 - RNA, 20 nt, Artificial Sequence
  Synthetic
  misc_feature (4)..(4): n is a, c, g, or u
augnaacuuuuucaccucug

SEQ ID NO: 38413 - RNA, 21 nt, Artificial Sequence
  Synthetic
  misc_feature (5)..(5): n is a, c, g, or u
caugnaacuuuuucaccucug

SEQ ID NO: 38414 - RNA, 22 nt, Artificial Sequence
  Synthetic
  misc_feature (6)..(6): n is a, c, g, or u
ccaugnaacuuuuucaccucug

SEQ ID NO: 38415 - RNA, 23 nt, Artificial Sequence
  Synthetic
  misc_feature (7)..(7): n is a, c, g, or u
accaugnaacuuuuucaccucug

SEQ ID NO: 38416 - RNA, 24 nt, Artificial Sequence
  Synthetic
  misc_feature (8)..(8): n is a, c, g, or u
caccaugnaacuuuuucaccucug

SEQ ID NO: 38417 - RNA, 18 nt, Artificial Sequence
  Synthetic
caacgaauaacuggucug

SEQ ID NO: 38418 - RNA, 19 nt, Artificial Sequence
  Synthetic
ucaacgaauaacuggucug

SEQ ID NO: 38419 - RNA, 18 nt, Artificial Sequence
  Synthetic
  misc_feature (9)..(9): n is a, c, g, or u
acucuagcnaccugggug

SEQ ID NO: 38420 - RNA, 20 nt, Artificial Sequence
  Synthetic
  misc_feature (11)..(11): n is a, c, g, or u
ugacucuagcnaccugggug

SEQ ID NO: 38421 - RNA, 19 nt, Artificial Sequence
  Synthetic
agcauccagagauuuggug

SEQ ID NO: 38422 - RNA, 20 nt, Artificial Sequence
  Synthetic
cagcauccagagauuuggug

SEQ ID NO: 38423 - RNA, 18 nt, Artificial Sequence
  Synthetic
acauuauaacuaaaugug

SEQ ID NO: 38424 - RNA, 20 nt, Artificial Sequence
  Synthetic
agacauuauaacuaaaugug

SEQ ID NO: 38425 - RNA, 21 nt, Artificial Sequence
  Synthetic
aagacauuauaacuaaaugug

SEQ ID NO: 38426 - RNA, 22 nt, Artificial Sequence
  Synthetic
caagacauuauaacuaaaugug

SEQ ID NO: 38427 - RNA, 23 nt, Artificial Sequence
  Synthetic
ucaagacauuauaacuaaaugug

SEQ ID NO: 38428 - RNA, 24 nt, Artificial Sequence
  Synthetic
aucaagacauuauaacuaaaugug

SEQ ID NO: 38429 - RNA, 18 nt, Artificial Sequence
  Synthetic
uaacaggccaauugauug

SEQ ID NO: 38430 - RNA, 19 nt, Artificial Sequence
  Synthetic
uuaacaggccaauugauug

SEQ ID NO: 38431 - RNA, 18 nt, Artificial Sequence
  Synthetic
cagcauggggcuuucuug

SEQ ID NO: 38432 - RNA, 19 nt, Artificial Sequence
  Synthetic
acagcauggggcuuucuug

SEQ ID NO: 38433 - RNA, 20 nt, Artificial Sequence
  Synthetic
uacagcauggggcuuucuug

SEQ ID NO: 38434 - RNA, 18 nt, Artificial Sequence
  Synthetic
uggguggguaauaauuug

SEQ ID NO: 38435 - RNA, 19 nt, Artificial Sequence
  Synthetic
cuggguggguaauaauuug

SEQ ID NO: 38436 - RNA, 20 nt, Artificial Sequence
  Synthetic
ccuggguggguaauaauuug

SEQ ID NO: 38437 - RNA, 21 nt, Artificial Sequence
  Synthetic
accuggguggguaauaauuug

SEQ ID NO: 38438 - RNA, 22 nt, Artificial Sequence
  Synthetic
  misc_feature (1)..(1): n is a, c, g, or u
naccuggguggguaauaauuug

SEQ ID NO: 38439 - RNA, 23 nt, Artificial Sequence
  Synthetic
  misc_feature (2)..(2): n is a, c, g, or u
cnaccuggguggguaauaauuug

SEQ ID NO: 38440 - RNA, 19 nt, Artificial Sequence
  Synthetic
aguuuacuagugccauuug

SEQ ID NO: 38441 - RNA, 20 nt, Artificial Sequence
  Synthetic
caguuuacuagugccauuug

SEQ ID NO: 38442 - RNA, 21 nt, Artificial Sequence
  Synthetic
ucaguuuacuagugccauuug

SEQ ID NO: 38443 - RNA, 22 nt, Artificial Sequence
  Synthetic
cucaguuuacuagugccauuug

SEQ ID NO: 38444 - RNA, 18 nt, Artificial Sequence
  Synthetic
ucaaggacuguguuuuug

SEQ ID NO: 38445 - RNA, 19 nt, Artificial Sequence
  Synthetic
uucaaggacuguguuuuug

SEQ ID NO: 38446 - RNA, 20 nt, Artificial Sequence
  Synthetic
cuucaaggacuguguuuuug

SEQ ID NO: 38447 - RNA, 21 nt, Artificial Sequence
  Synthetic
acuucaaggacuguguuuuug

SEQ ID NO: 38448 - RNA, 22 nt, Artificial Sequence
  Synthetic
uacuucaaggacuguguuuuug

SEQ ID NO: 38449 - RNA, 23 nt, Artificial Sequence
  Synthetic
auacuucaaggacuguguuuuug

SEQ ID NO: 38450 - RNA, 24 nt, Artificial Sequence
  Synthetic
aauacuucaaggacuguguuuuug

SEQ ID NO: 38451 - RNA, 18 nt, Artificial Sequence
  Synthetic
  misc_feature (18)..(18): n is a, c, g, or u
cuggcuuucagcuauaun

SEQ ID NO: 38452 - RNA, 19 nt, Artificial Sequence
  Synthetic
  misc_feature (19)..(19): n is a, c, g, or u
ucuggcuuucagcuauaun

SEQ ID NO: 38453 - RNA, 21 nt, Artificial Sequence
  Synthetic
  misc_feature (21)..(21): n is a, c, g, or u
ugucuggcuuucagcuauaun

SEQ ID NO: 38454 - RNA, 22 nt, Artificial Sequence
  Synthetic
  misc_feature (22)..(22): n is a, c, g, or u
cugucuggcuuucagcuauaun

SEQ ID NO: 38455 - RNA, 23 nt, Artificial Sequence
  Synthetic
  misc_feature (23)..(23): n is a, c, g, or u
acugucuggcuuucagcuauaun

SEQ ID NO: 38456 - RNA, 24 nt, Artificial Sequence
  Synthetic
  misc_feature (24)..(24): n is a, c, g, or u
cacugucuggcuuucagcuauaun

SEQ ID NO: 38457 - RNA, 18 nt, Artificial Sequence
  Synthetic
agagcaaauaccaacaau

SEQ ID NO: 38458 - RNA, 19 nt, Artificial Sequence
  Synthetic
cagagcaaauaccaacaau

SEQ ID NO: 38459 - RNA, 20 nt, Artificial Sequence
  Synthetic
ucagagcaaauaccaacaau

SEQ ID NO: 38460 - RNA, 21 nt, Artificial Sequence
  Synthetic
uucagagcaaauaccaacaau

SEQ ID NO: 38461 - RNA, 22 nt, Artificial Sequence
  Synthetic
auucagagcaaauaccaacaau

SEQ ID NO: 38462 - RNA, 23 nt, Artificial Sequence
  Synthetic
cauucagagcaaauaccaacaau

SEQ ID NO: 38463 - RNA, 18 nt, Artificial Sequence
  Synthetic
caucuccagcuucccaau

SEQ ID NO: 38464 - RNA, 20 nt, Artificial Sequence
  Synthetic
ugcaucuccagcuucccaau

SEQ ID NO: 38465 - RNA, 21 nt, Artificial Sequence
  Synthetic
cugcaucuccagcuucccaau

SEQ ID NO: 38466 - RNA, 22 nt, Artificial Sequence
  Synthetic
ucugcaucuccagcuucccaau

SEQ ID NO: 38467 - RNA, 23 nt, Artificial Sequence
  Synthetic
aucugcaucuccagcuucccaau

SEQ ID NO: 38468 - RNA, 18 nt, Artificial Sequence
  Synthetic
aauuauguuaauacuaau

SEQ ID NO: 38469 - RNA, 19 nt, Artificial Sequence
  Synthetic
caauuauguuaauacuaau

SEQ ID NO: 38470 - RNA, 20 nt, Artificial Sequence
  Synthetic
ucaauuauguuaauacuaau

SEQ ID NO: 38471 - RNA, 20 nt, Artificial Sequence
  Synthetic
ugguggucaauuauguuaau

SEQ ID NO: 38472 - RNA, 18 nt, Artificial Sequence
  Synthetic
acuauaccugucuuuaau

SEQ ID NO: 38473 - RNA, 19 nt, Artificial Sequence
  Synthetic
uacuauaccugucuuuaau

SEQ ID NO: 38474 - RNA, 20 nt, Artificial Sequence
  Synthetic
cuacuauaccugucuuuaau

SEQ ID NO: 38475 - RNA, 18 nt, Artificial Sequence
  Synthetic
acauggagaacaucacau

SEQ ID NO: 38476 - RNA, 19 nt, Artificial Sequence
  Synthetic
aacauggagaacaucacau

SEQ ID NO: 38477 - RNA, 18 nt, Artificial Sequence
  Synthetic
uaaaaaucaggcaacuau

SEQ ID NO: 38478 - RNA, 19 nt, Artificial Sequence
  Synthetic
uuaaaaaucaggcaacuau

SEQ ID NO: 38479 - RNA, 20 nt, Artificial Sequence
  Synthetic
uuuaaaaaucaggcaacuau

SEQ ID NO: 38480 - RNA, 24 nt, Artificial Sequence
  Synthetic
uggguuuaaaaaucaggcaacuau

SEQ ID NO: 38481 - RNA, 18 nt, Artificial Sequence
  Synthetic
uugguucuucuggacuau

SEQ ID NO: 38482 - RNA, 20 nt, Artificial Sequence
  Synthetic
uguugguucuucuggacuau

SEQ ID NO: 38483 - RNA, 21 nt, Artificial Sequence
  Synthetic
uuguugguucuucuggacuau

SEQ ID NO: 38484 - RNA, 22 nt, Artificial Sequence
  Synthetic
cuuguugguucuucuggacuau

SEQ ID NO: 38485 - RNA, 23 nt, Artificial Sequence
  Synthetic
ucuuguugguucuucuggacuau

SEQ ID NO: 38486 - RNA, 24 nt, Artificial Sequence
  Synthetic
uucuuguugguucuucuggacuau

SEQ ID NO: 38487 - RNA, 18 nt, Artificial Sequence
  Synthetic
cuuucgcaaaauaccuau

SEQ ID NO: 38488 - RNA, 18 nt, Artificial Sequence
  Synthetic
ugucuggcuuucagcuau

SEQ ID NO: 38489 - RNA, 19 nt, Artificial Sequence
  Synthetic
cugucuggcuuucagcuau

SEQ ID NO: 38490 - RNA, 20 nt, Artificial Sequence
  Synthetic
acugucuggcuuucagcuau

SEQ ID NO: 38491 - RNA, 21 nt, Artificial Sequence
  Synthetic
cacugucuggcuuucagcuau

SEQ ID NO: 38492 - RNA, 22 nt, Artificial Sequence
  Synthetic
ccacugucuggcuuucagcuau

SEQ ID NO: 38493 - RNA, 23 nt, Artificial Sequence
  Synthetic
cccacugucuggcuuucagcuau

SEQ ID NO: 38494 - RNA, 24 nt, Artificial Sequence
  Synthetic
ccccacugucuggcuuucagcuau

SEQ ID NO: 38495 - RNA, 19 nt, Artificial Sequence
  Synthetic
agauuugguggucaauuau

SEQ ID NO: 38496 - RNA, 21 nt, Artificial Sequence
  Synthetic
agagauuugguggucaauuau

SEQ ID NO: 38497 - RNA, 22 nt, Artificial Sequence
  Synthetic
cagagauuugguggucaauuau

SEQ ID NO: 38498 - RNA, 23 nt, Artificial Sequence
  Synthetic
ccagagauuugguggucaauuau

SEQ ID NO: 38499 - RNA, 24 nt, Artificial Sequence
  Synthetic
uccagagauuugguggucaauuau

SEQ ID NO: 38500 - RNA, 19 nt, Artificial Sequence
  Synthetic
agcaaaacucauugggacu

SEQ ID NO: 38501 - RNA, 18 nt, Artificial Sequence
  Synthetic
cuuguugacaagaauccu

SEQ ID NO: 38502 - RNA, 19 nt, Artificial Sequence
  Synthetic
ucuuguugacaagaauccu

SEQ ID NO: 38503 - RNA, 20 nt, Artificial Sequence
  Synthetic
uucuuguugacaagaauccu

SEQ ID NO: 38504 - RNA, 21 nt, Artificial Sequence
  Synthetic
uuucuuguugacaagaauccu

SEQ ID NO: 38505 - RNA, 22 nt, Artificial Sequence
  Synthetic
uuuucuuguugacaagaauccu

SEQ ID NO: 38506 - RNA, 23 nt, Artificial Sequence
  Synthetic
uuuuucuuguugacaagaauccu

SEQ ID NO: 38507 - RNA, 21 nt, Artificial Sequence
  Synthetic
cagcuuuguaccgggaauccu

SEQ ID NO: 38508 - RNA, 22 nt, Artificial Sequence
  Synthetic
ucagcuuuguaccgggaauccu

SEQ ID NO: 38509 - RNA, 23 nt, Artificial Sequence
  Synthetic
uucagcuuuguaccgggaauccu

SEQ ID NO: 38510 - RNA, 24 nt, Artificial Sequence
  Synthetic
cuucagcuuuguaccgggaauccu

SEQ ID NO: 38511 - RNA, 18 nt, Artificial Sequence
  Synthetic
  misc_feature (13)..(13): n is a, c, g, or u
aggggccuguaunuuccu

SEQ ID NO: 38512 - RNA, 19 nt, Artificial Sequence
  Synthetic
  misc_feature (14)..(14): n is a, c, g, or u
caggggccuguaunuuccu

SEQ ID NO: 38513 - RNA, 20 nt, Artificial Sequence
  Synthetic
  misc_feature (15)..(15): n is a, c, g, or u
ucaggggccuguaunuuccu

SEQ ID NO: 38514 - RNA, 22 nt, Artificial Sequence
  Synthetic
  misc_feature (17)..(17): n is a, c, g, or u
agucaggggccuguaunuuccu

SEQ ID NO: 38515 - RNA, 23 nt, Artificial Sequence
  Synthetic
  misc_feature (18)..(18): n is a, c, g, or u
aagucaggggccuguaunuuccu

SEQ ID NO: 38516 - RNA, 24 nt, Artificial Sequence
  Synthetic
  misc_feature (19)..(19): n is a, c, g, or u
aaagucaggggccuguaunuuccu

SEQ ID NO: 38517 - RNA, 18 nt, Artificial Sequence
  Synthetic
acaauuugugggcccucu

SEQ ID NO: 38518 - RNA, 19 nt, Artificial Sequence
  Synthetic
aacaauuugugggcccucu

SEQ ID NO: 38519 - RNA, 21 nt, Artificial Sequence
  Synthetic
ugaacaauuugugggcccucu

SEQ ID NO: 38520 - RNA, 23 nt, Artificial Sequence
  Synthetic
ugugaacaauuugugggcccucu

SEQ ID NO: 38521 - RNA, 24 nt, Artificial Sequence
  Synthetic
augugaacaauuugugggcccucu

SEQ ID NO: 38522 - RNA, 18 nt, Artificial Sequence
  Synthetic
aaccuuuguggcuccucu

SEQ ID NO: 38523 - RNA, 21 nt, Artificial Sequence
  Synthetic
uggaaccuuuguggcuccucu

SEQ ID NO: 38524 - RNA, 23 nt, Artificial Sequence
  Synthetic
cguggaaccuuuguggcuccucu

SEQ ID NO: 38525 - RNA, 18 nt, Artificial Sequence
  Synthetic
accaauuuucuuuugucu

SEQ ID NO: 38526 - RNA, 19 nt, Artificial Sequence
  Synthetic
uaccaauuuucuuuugucu

SEQ ID NO: 38527 - RNA, 20 nt, Artificial Sequence
  Synthetic
uuaccaauuuucuuuugucu

SEQ ID NO: 38528 - RNA, 22 nt, Artificial Sequence
  Synthetic
uguuaccaauuuucuuuugucu

SEQ ID NO: 38529 - RNA, 23 nt, Artificial Sequence
  Synthetic
cuguuaccaauuuucuuuugucu

SEQ ID NO: 38530 - RNA, 20 nt, Artificial Sequence
  Synthetic
ugggauauguaauuggaagu

SEQ ID NO: 38531 - RNA, 21 nt, Artificial Sequence
  Synthetic
augggauauguaauuggaagu

SEQ ID NO: 38532 - RNA, 22 nt, Artificial Sequence
  Synthetic
uaugggauauguaauuggaagu

SEQ ID NO: 38533 - RNA, 23 nt, Artificial Sequence
  Synthetic
uuaugggauauguaauuggaagu

SEQ ID NO: 38534 - RNA, 24 nt, Artificial Sequence
  Synthetic
uuuaugggauauguaauuggaagu

SEQ ID NO: 38535 - RNA, 18 nt, Artificial Sequence
  Synthetic
uuuggugucuuuuggagu

SEQ ID NO: 38536 - RNA, 19 nt, Artificial Sequence
  Synthetic
auuuggugucuuuuggagu

SEQ ID NO: 38537 - RNA, 20 nt, Artificial Sequence
  Synthetic
uauuuggugucuuuuggagu

SEQ ID NO: 38538 - RNA, 22 nt, Artificial Sequence
  Synthetic
aguauuuggugucuuuuggagu

SEQ ID NO: 38539 - RNA, 24 nt, Artificial Sequence
  Synthetic
ugaguauuuggugucuuuuggagu

SEQ ID NO: 38540 - RNA, 18 nt, Artificial Sequence
  Synthetic
aagaauuaggcaaugagu

SEQ ID NO: 38541 - RNA, 22 nt, Artificial Sequence
  Synthetic
ugggaagaauuaggcaaugagu

SEQ ID NO: 38542 - RNA, 24 nt, Artificial Sequence
  Synthetic
agugggaagaauuaggcaaugagu

SEQ ID NO: 38543 - RNA, 20 nt, Artificial Sequence
  Synthetic
uggccagaggccaacaaggu

SEQ ID NO: 38544 - RNA, 21 nt, Artificial Sequence
  Synthetic
uuggccagaggccaacaaggu

SEQ ID NO: 38545 - RNA, 22 nt, Artificial Sequence
  Synthetic
cuuggccagaggccaacaaggu

SEQ ID NO: 38546 - RNA, 23 nt, Artificial Sequence
  Synthetic
ccuuggccagaggccaacaaggu

SEQ ID NO: 38547 - RNA, 24 nt, Artificial Sequence
  Synthetic
cccuuggccagaggccaacaaggu

SEQ ID NO: 38548 - RNA, 18 nt, Artificial Sequence
  Synthetic
  misc_feature (6)..(6): n is a, c, g, or u
cuagcnaccugggugggu

SEQ ID NO: 38549 - RNA, 19 nt, Artificial Sequence
  Synthetic
  misc_feature (7)..(7): n is a, c, g, or u
ucuagcnaccugggugggu

SEQ ID NO: 38550 - RNA, 20 nt, Artificial Sequence
  Synthetic
  misc_feature (8)..(8): n is a, c, g, or u
cucuagcnaccugggugggu

SEQ ID NO: 38551 - RNA, 21 nt, Artificial Sequence
  Synthetic
  misc_feature (9)..(9): n is a, c, g, or u
acucuagcnaccugggugggu

SEQ ID NO: 38552 - RNA, 23 nt, Artificial Sequence
  Synthetic
  misc_feature (11)..(11): n is a, c, g, or u
ugacucuagcnaccugggugggu

SEQ ID NO: 38553 - RNA, 24 nt, Artificial Sequence
  Synthetic
  misc_feature (12)..(12): n is a, c, g, or u
augacucuagcnaccugggugggu

SEQ ID NO: 38554 - RNA, 18 nt, Artificial Sequence
  Synthetic
uguguccuggccuaaauu

SEQ ID NO: 38555 - RNA, 20 nt, Artificial Sequence
  Synthetic
cguguguccuggccuaaauu

SEQ ID NO: 38556 - RNA, 18 nt, Artificial Sequence
  Synthetic
uuuaugggauauguaauu

SEQ ID NO: 38557 - RNA, 19 nt, Artificial Sequence
  Synthetic
uuuuaugggauauguaauu

SEQ ID NO: 38558 - RNA, 20 nt, Artificial Sequence
  Synthetic
auuuuaugggauauguaauu

SEQ ID NO: 38559 - RNA, 21 nt, Artificial Sequence
  Synthetic
aauuuuaugggauauguaauu

SEQ ID NO: 38560 - RNA, 22 nt, Artificial Sequence
  Synthetic
aaauuuuaugggauauguaauu

SEQ ID NO: 38561 - RNA, 23 nt, Artificial Sequence
  Synthetic
uaaauuuuaugggauauguaauu

SEQ ID NO: 38562 - RNA, 24 nt, Artificial Sequence
  Synthetic
uuaaauuuuaugggauauguaauu

SEQ ID NO: 38563 - RNA, 18 nt, Artificial Sequence
  Synthetic
aauccucuaggauuccuu

SEQ ID NO: 38564 - RNA, 19 nt, Artificial Sequence
  Synthetic
caauccucuaggauuccuu

SEQ ID NO: 38565 - RNA, 19 nt, Artificial Sequence
  Synthetic
agaucugcaucuccagcuu

SEQ ID NO: 38566 - RNA, 20 nt, Artificial Sequence
  Synthetic
aagaucugcaucuccagcuu

SEQ ID NO: 38567 - RNA, 19 nt, Artificial Sequence
  Synthetic
ugcuaugccucaucuucuu

SEQ ID NO: 38568 - RNA, 20 nt, Artificial Sequence
  Synthetic
cugcuaugccucaucuucuu

SEQ ID NO: 38569 - RNA, 18 nt, Artificial Sequence
  Synthetic
  misc_feature (8)..(8): n is a, c, g, or u
ucccuuunuaccgcuguu

SEQ ID NO: 38570 - RNA, 20 nt, Artificial Sequence
  Synthetic
  misc_feature (10)..(10): n is a, c, g, or u
agucccuuunuaccgcuguu

SEQ ID NO: 38571 - RNA, 22 nt, Artificial Sequence
  Synthetic
  misc_feature (12)..(12): n is a, c, g, or u
ugagucccuuunuaccgcuguu

SEQ ID NO: 38572 - RNA, 23 nt, Artificial Sequence
  Synthetic
  misc_feature (13)..(13): n is a, c, g, or u
uugagucccuuunuaccgcuguu

SEQ ID NO: 38573 - RNA, 24 nt, Artificial Sequence
  Synthetic
  misc_feature (14)..(14): n is a, c, g, or u
cuugagucccuuunuaccgcuguu

SEQ ID NO: 38574 - RNA, 19 nt, Artificial Sequence
  Synthetic
ugacuuuuucccgucuguu

SEQ ID NO: 38575 - RNA, 20 nt, Artificial Sequence
  Synthetic
cugacuuuuucccgucuguu

SEQ ID NO: 38576 - RNA, 18 nt, Artificial Sequence
  Synthetic
uccagcauccagagauuu

SEQ ID NO: 38577 - RNA, 19 nt, Artificial Sequence
  Synthetic
auccagcauccagagauuu

SEQ ID NO: 38578 - RNA, 18 nt, Artificial Sequence
  Synthetic
cuccacacggaggccuuu

SEQ ID NO: 38579 - RNA, 19 nt, Artificial Sequence
  Synthetic
ccuccacacggaggccuuu

SEQ ID NO: 38580 - RNA, 20 nt, Artificial Sequence
  Synthetic
cccuccacacggaggccuuu

SEQ ID NO: 38581 - RNA, 18 nt, Artificial Sequence
  Synthetic
ugaguauuuggugucuuu

SEQ ID NO: 38582 - RNA, 19 nt, Artificial Sequence
  Synthetic
uugaguauuuggugucuuu

SEQ ID NO: 38583 - RNA, 20 nt, Artificial Sequence
  Synthetic
cuugaguauuuggugucuuu

SEQ ID NO: 38584 - RNA, 18 nt, Artificial Sequence
  Synthetic
uuucucuuggcucaguuu

SEQ ID NO: 38585 - RNA, 20 nt, Artificial Sequence
  Synthetic
cguuucucuuggcucaguuu

SEQ ID NO: 38586 - RNA, 18 nt, Artificial Sequence
  Synthetic
uaauacuaauauggguuu

SEQ ID NO: 38587 - RNA, 19 nt, Artificial Sequence
  Synthetic
uuaauacuaauauggguuu

SEQ ID NO: 38588 - RNA, 21 nt, Artificial Sequence
  Synthetic
uguuaauacuaauauggguuu

SEQ ID NO: 38589 - RNA, 22 nt, Artificial Sequence
  Synthetic
auguuaauacuaauauggguuu

SEQ ID NO: 38590 - RNA, 23 nt, Artificial Sequence
  Synthetic
uauguuaauacuaauauggguuu

SEQ ID NO: 38591 - RNA, 24 nt, Artificial Sequence
  Synthetic
uuauguuaauacuaauauggguuu

SEQ ID NO: 38592 - RNA, 18 nt, Artificial Sequence
  Synthetic
uggcaaacuccuucuuuu

SEQ ID NO: 38593 - RNA, 19 nt, Artificial Sequence
  Synthetic
uuggcaaacuccuucuuuu

SEQ ID NO: 38594 - RNA, 20 nt, Artificial Sequence
  Synthetic
auuggcaaacuccuucuuuu

SEQ ID NO: 38595 - RNA, 18 nt, Artificial Sequence
  Synthetic
aaagucagaaggcaaaaa

SEQ ID NO: 38596 - RNA, 19 nt, Artificial Sequence
  Synthetic
aaaagucagaaggcaaaaa

SEQ ID NO: 38597 - RNA, 20 nt, Artificial Sequence
  Synthetic
aaaaagucagaaggcaaaaa

SEQ ID NO: 38598 - RNA, 21 nt, Artificial Sequence
  Synthetic
gaaaaagucagaaggcaaaaa

SEQ ID NO: 38599 - RNA, 22 nt, Artificial Sequence
  Synthetic
ggaaaaagucagaaggcaaaaa

SEQ ID NO: 38600 - RNA, 23 nt, Artificial Sequence
  Synthetic
gggaaaaagucagaaggcaaaaa

SEQ ID NO: 38601 - RNA, 24 nt, Artificial Sequence
  Synthetic
cgggaaaaagucagaaggcaaaaa

SEQ ID NO: 38602 - RNA, 18 nt, Artificial Sequence
  Synthetic
acgaacagacgggaaaaa

SEQ ID NO: 38603 - RNA, 19 nt, Artificial Sequence
  Synthetic
cacgaacagacgggaaaaa

SEQ ID NO: 38604 - RNA, 20 nt, Artificial Sequence
  Synthetic
ucacgaacagacgggaaaaa

SEQ ID NO: 38605 - RNA, 21 nt, Artificial Sequence
  Synthetic
aucacgaacagacgggaaaaa

SEQ ID NO: 38606 - RNA, 22 nt, Artificial Sequence
  Synthetic
gaucacgaacagacgggaaaaa

SEQ ID NO: 38607 - RNA, 23 nt, Artificial Sequence
  Synthetic
agaucacgaacagacgggaaaaa

SEQ ID NO: 38608 - RNA, 24 nt, Artificial Sequence
  Synthetic
aagaucacgaacagacgggaaaaa

SEQ ID NO: 38609 - RNA, 18 nt, Artificial Sequence
  Synthetic
aguagaguuugggaaaaa

SEQ ID NO: 38610 - RNA, 19 nt, Artificial Sequence
  Synthetic
uaguagaguuugggaaaaa

SEQ ID NO: 38611 - RNA, 20 nt, Artificial Sequence
  Synthetic
uuaguagaguuugggaaaaa

SEQ ID NO: 38612 - RNA, 21 nt, Artificial Sequence
  Synthetic
uuuaguagaguuugggaaaaa

SEQ ID NO: 38613 - RNA, 22 nt, Artificial Sequence
  Synthetic
auuuaguagaguuugggaaaaa

SEQ ID NO: 38614 - RNA, 23 nt, Artificial Sequence
  Synthetic
uauuuaguagaguuugggaaaaa

SEQ ID NO: 38615 - RNA, 24 nt, Artificial Sequence
  Synthetic
auauuuaguagaguuugggaaaaa

SEQ ID NO: 38616 - RNA, 18 nt, Artificial Sequence
  Synthetic
auauggugacccacaaaa

SEQ ID NO: 38617 - RNA, 19 nt, Artificial Sequence
  Synthetic
uauauggugacccacaaaa

SEQ ID NO: 38618 - RNA, 20 nt, Artificial Sequence
  Synthetic
guauauggugacccacaaaa

SEQ ID NO: 38619 - RNA, 21 nt, Artificial Sequence
  Synthetic
aguauauggugacccacaaaa

SEQ ID NO: 38620 - RNA, 22 nt, Artificial Sequence
  Synthetic
aaguauauggugacccacaaaa

SEQ ID NO: 38621 - RNA, 23 nt, Artificial Sequence
  Synthetic
caaguauauggugacccacaaaa

SEQ ID NO: 38622 - RNA, 24 nt, Artificial Sequence
  Synthetic
ccaaguauauggugacccacaaaa

SEQ ID NO: 38623 - RNA, 18 nt, Artificial Sequence
  Synthetic
acgguuucucucccaaaa

SEQ ID NO: 38624 - RNA, 19 nt, Artificial Sequence
  Synthetic
aacgguuucucucccaaaa

SEQ ID NO: 38625 - RNA, 20 nt, Artificial Sequence
  Synthetic
gaacgguuucucucccaaaa

SEQ ID NO: 38626 - RNA, 21 nt, Artificial Sequence
  Synthetic
agaacgguuucucucccaaaa

SEQ ID NO: 38627 - RNA, 22 nt, Artificial Sequence
  Synthetic
aagaacgguuucucucccaaaa

SEQ ID NO: 38628 - RNA, 23 nt, Artificial Sequence
  Synthetic
caagaacgguuucucucccaaaa

SEQ ID NO: 38629 - RNA, 24 nt, Artificial Sequence
  Synthetic
ucaagaacgguuucucucccaaaa

SEQ ID NO: 38630 - RNA, 18 nt, Artificial Sequence
  Synthetic
aaaagucagaaggcaaaa

SEQ ID NO: 38631 - RNA, 19 nt, Artificial Sequence
  Synthetic
aaaaagucagaaggcaaaa

SEQ ID NO: 38632 - RNA, 20 nt, Artificial Sequence
  Synthetic
gaaaaagucagaaggcaaaa

SEQ ID NO: 38633 - RNA, 21 nt, Artificial Sequence
  Synthetic
ggaaaaagucagaaggcaaaa

SEQ ID NO: 38634 - RNA, 22 nt, Artificial Sequence
  Synthetic
gggaaaaagucagaaggcaaaa

SEQ ID NO: 38635 - RNA, 23 nt, Artificial Sequence
  Synthetic
cgggaaaaagucagaaggcaaaa

SEQ ID NO: 38636 - RNA, 24 nt, Artificial Sequence
  Synthetic
acgggaaaaagucagaaggcaaaa

SEQ ID NO: 38637 - RNA, 18 nt, Artificial Sequence
  Synthetic
ggcacucccccuagaaaa

SEQ ID NO: 38638 - RNA, 19 nt, Artificial Sequence
  Synthetic
gggcacucccccuagaaaa

SEQ ID NO: 38639 - RNA, 20 nt, Artificial Sequence
  Synthetic
cgggcacucccccuagaaaa

SEQ ID NO: 38640 - RNA, 21 nt, Artificial Sequence
  Synthetic
acgggcacucccccuagaaaa

SEQ ID NO: 38641 - RNA, 22 nt, Artificial Sequence
  Synthetic
cacgggcacucccccuagaaaa

SEQ ID NO: 38642 - RNA, 23 nt, Artificial Sequence
  Synthetic
acacgggcacucccccuagaaaa

SEQ ID NO: 38643 - RNA, 24 nt, Artificial Sequence
  Synthetic
cacacgggcacucccccuagaaaa

SEQ ID NO: 38644 - RNA, 18 nt, Artificial Sequence
  Synthetic
aaauggauauuuggaaaa

SEQ ID NO: 38645 - RNA, 19 nt, Artificial Sequence
  Synthetic
caaauggauauuuggaaaa

SEQ ID NO: 38646 - RNA, 20 nt, Artificial Sequence
  Synthetic
gcaaauggauauuuggaaaa

SEQ ID NO: 38647 - RNA, 21 nt, Artificial Sequence
  Synthetic
ugcaaauggauauuuggaaaa

SEQ ID NO: 38648 - RNA, 22 nt, Artificial Sequence
  Synthetic
augcaaauggauauuuggaaaa

SEQ ID NO: 38649 - RNA, 23 nt, Artificial Sequence
  Synthetic
gaugcaaauggauauuuggaaaa

SEQ ID NO: 38650 - RNA, 24 nt, Artificial Sequence
  Synthetic
ugaugcaaauggauauuuggaaaa

SEQ ID NO: 38651 - RNA, 18 nt, Artificial Sequence
  Synthetic
auuacauaucccauaaaa

SEQ ID NO: 38652 - RNA, 19 nt, Artificial Sequence
  Synthetic
aauuacauaucccauaaaa

SEQ ID NO: 38653 - RNA, 20 nt, Artificial Sequence
  Synthetic
caauuacauaucccauaaaa

SEQ ID NO: 38654 - RNA, 21 nt, Artificial Sequence
  Synthetic
ccaauuacauaucccauaaaa

SEQ ID NO: 38655 - RNA, 22 nt, Artificial Sequence
  Synthetic
uccaauuacauaucccauaaaa

SEQ ID NO: 38656 - RNA, 23 nt, Artificial Sequence
  Synthetic
uuccaauuacauaucccauaaaa

SEQ ID NO: 38657 - RNA, 24 nt, Artificial Sequence
  Synthetic
cuuccaauuacauaucccauaaaa

SEQ ID NO: 38658 - RNA, 18 nt, Artificial Sequence
  Synthetic
uauauggugacccacaaa

SEQ ID NO: 38659 - RNA, 19 nt, Artificial Sequence
  Synthetic
guauauggugacccacaaa

SEQ ID NO: 38660 - RNA, 20 nt, Artificial Sequence
  Synthetic
aguauauggugacccacaaa

SEQ ID NO: 38661 - RNA, 21 nt, Artificial Sequence
  Synthetic
aaguauauggugacccacaaa

SEQ ID NO: 38662 - RNA, 22 nt, Artificial Sequence
  Synthetic
caaguauauggugacccacaaa

SEQ ID NO: 38663 - RNA, 23 nt, Artificial Sequence
  Synthetic
ccaaguauauggugacccacaaa

SEQ ID NO: 38664 - RNA, 24 nt, Artificial Sequence
  Synthetic
cccaaguauauggugacccacaaa

SEQ ID NO: 38665 - RNA, 18 nt, Artificial Sequence
  Synthetic
uguauacccaaagacaaa

SEQ ID NO: 38666 - RNA, 19 nt, Artificial Sequence
  Synthetic
auguauacccaaagacaaa

SEQ ID NO: 38667 - RNA, 20 nt, Artificial Sequence
  Synthetic
gauguauacccaaagacaaa

SEQ ID NO: 38668 - RNA, 21 nt, Artificial Sequence
  Synthetic
agauguauacccaaagacaaa

SEQ ID NO: 38669 - RNA, 22 nt, Artificial Sequence
  Synthetic
uagauguauacccaaagacaaa

SEQ ID NO: 38670 - RNA, 23 nt, Artificial Sequence
  Synthetic
uuagauguauacccaaagacaaa

SEQ ID NO: 38671 - RNA, 24 nt, Artificial Sequence
  Synthetic
uuuagauguauacccaaagacaaa

SEQ ID NO: 38672 - RNA, 18 nt, Artificial Sequence
  Synthetic
aaggauucccgguacaaa

SEQ ID NO: 38673 - RNA, 19 nt, Artificial Sequence
  Synthetic
uaaggauucccgguacaaa

SEQ ID NO: 38674 - RNA, 20 nt, Artificial Sequence
  Synthetic
cuaaggauucccgguacaaa

SEQ ID NO: 38675 - RNA, 21 nt, Artificial Sequence
  Synthetic
ucuaaggauucccgguacaaa

SEQ ID NO: 38676 - RNA, 22 nt, Artificial Sequence
  Synthetic
cucuaaggauucccgguacaaa

SEQ ID NO: 38677 - RNA, 23 nt, Artificial Sequence
  Synthetic
acucuaaggauucccgguacaaa

SEQ ID NO: 38678 - RNA, 24 nt, Artificial Sequence
  Synthetic
gacucuaaggauucccgguacaaa

SEQ ID NO: 38679 - RNA, 18 nt, Artificial Sequence
  Synthetic
uuuagauguauacccaaa

SEQ ID NO: 38680 - RNA, 19 nt, Artificial Sequence
  Synthetic
guuuagauguauacccaaa

SEQ ID NO: 38681 - RNA, 20 nt, Artificial Sequence
  Synthetic
gguuuagauguauacccaaa

SEQ ID NO: 38682 - RNA, 21 nt, Artificial Sequence
  Synthetic
  misc_feature (1)..(1): n is a, c, g, or u
ngguuuagauguauacccaaa

SEQ ID NO: 38683 - RNA, 22 nt, Artificial Sequence
  Synthetic
  misc_feature (2)..(2): n is a, c, g, or u
angguuuagauguauacccaaa

SEQ ID NO: 38684 - RNA, 23 nt, Artificial Sequence
  Synthetic
  misc_feature (3)..(3): n is a, c, g, or u
uangguuuagauguauacccaaa

SEQ ID NO: 38685 - RNA, 24 nt, Artificial Sequence
  Synthetic
  misc_feature (4)..(4): n is a, c, g, or u
uuangguuuagauguauacccaaa

SEQ ID NO: 38686 - RNA, 18 nt, Artificial Sequence
  Synthetic
aacgguuucucucccaaa

SEQ ID NO: 38687 - RNA, 19 nt, Artificial Sequence
  Synthetic
gaacgguuucucucccaaa

SEQ ID NO: 38688 - RNA, 20 nt, Artificial Sequence
  Synthetic
agaacgguuucucucccaaa

SEQ ID NO: 38689 - RNA, 21 nt, Artificial Sequence
  Synthetic
aagaacgguuucucucccaaa

SEQ ID NO: 38690 - RNA, 22 nt, Artificial Sequence
  Synthetic
caagaacgguuucucucccaaa

SEQ ID NO: 38691 - RNA, 23 nt, Artificial Sequence
  Synthetic
ucaagaacgguuucucucccaaa

SEQ ID NO: 38692 - RNA, 24 nt, Artificial Sequence
  Synthetic
cucaagaacgguuucucucccaaa

SEQ ID NO: 38693 - RNA, 18 nt, Artificial Sequence
  Synthetic
agaccggcugcgagcaaa

SEQ ID NO: 38694 - RNA, 19 nt, Artificial Sequence
  Synthetic
cagaccggcugcgagcaaa

SEQ ID NO: 38695 - RNA, 20 nt, Artificial Sequence
  Synthetic
ccagaccggcugcgagcaaa

SEQ ID NO: 38696 - RNA, 21 nt, Artificial Sequence
  Synthetic
uccagaccggcugcgagcaaa

SEQ ID NO: 38697 - RNA, 22 nt, Artificial Sequence
  Synthetic
cuccagaccggcugcgagcaaa

SEQ ID NO: 38698 - RNA, 23 nt, Artificial Sequence
  Synthetic
gcuccagaccggcugcgagcaaa

SEQ ID NO: 38699 - RNA, 24 nt, Artificial Sequence
  Synthetic
ugcuccagaccggcugcgagcaaa

SEQ ID NO: 38700 - RNA, 18 nt, Artificial Sequence
  Synthetic
aaaaagucagaaggcaaa

SEQ ID NO: 38701 - RNA, 19 nt, Artificial Sequence
  Synthetic
gaaaaagucagaaggcaaa

SEQ ID NO: 38702 - RNA, 20 nt, Artificial Sequence
  Synthetic
ggaaaaagucagaaggcaaa

SEQ ID NO: 38703 - RNA, 21 nt, Artificial Sequence
  Synthetic
gggaaaaagucagaaggcaaa

SEQ ID NO: 38704 - RNA, 22 nt, Artificial Sequence
  Synthetic
cgggaaaaagucagaaggcaaa

SEQ ID NO: 38705 - RNA, 23 nt, Artificial Sequence
  Synthetic
acgggaaaaagucagaaggcaaa

SEQ ID NO: 38706 - RNA, 24 nt, Artificial Sequence
  Synthetic
gacgggaaaaagucagaaggcaaa

SEQ ID NO: 38707 - RNA, 18 nt, Artificial Sequence
  Synthetic
uuauaaguuggcgagaaa

SEQ ID NO: 38708 - RNA, 19 nt, Artificial Sequence
  Synthetic
cuuauaaguuggcgagaaa

SEQ ID NO: 38709 - RNA, 20 nt, Artificial Sequence
  Synthetic
ccuuauaaguuggcgagaaa

SEQ ID NO: 38710 - RNA, 21 nt, Artificial Sequence
  Synthetic
gccuuauaaguuggcgagaaa

SEQ ID NO: 38711 - RNA, 22 nt, Artificial Sequence
  Synthetic
ggccuuauaaguuggcgagaaa

SEQ ID NO: 38712 - RNA, 23 nt, Artificial Sequence
  Synthetic
aggccuuauaaguuggcgagaaa

SEQ ID NO: 38713 - RNA, 24 nt, Artificial Sequence
  Synthetic
aaggccuuauaaguuggcgagaaa

SEQ ID NO: 38714 - RNA, 18 nt, Artificial Sequence
  Synthetic
gggcacucccccuagaaa

SEQ ID NO: 38715 - RNA, 19 nt, Artificial Sequence
  Synthetic
cgggcacucccccuagaaa

SEQ ID NO: 38716 - RNA, 20 nt, Artificial Sequence
  Synthetic
acgggcacucccccuagaaa

SEQ ID NO: 38717 - RNA, 21 nt, Artificial Sequence
  Synthetic
cacgggcacucccccuagaaa

SEQ ID NO: 38718 - RNA, 22 nt, Artificial Sequence
  Synthetic
acacgggcacucccccuagaaa

SEQ ID NO: 38719 - RNA, 23 nt, Artificial Sequence
  Synthetic
cacacgggcacucccccuagaaa

SEQ ID NO: 38720 - RNA, 24 nt, Artificial Sequence
  Synthetic
acacacgggcacucccccuagaaa

SEQ ID NO: 38721 - RNA, 18 nt, Artificial Sequence
  Synthetic
guaaaaggagcagcgaaa

SEQ ID NO: 38722 - RNA, 19 nt, Artificial Sequence
  Synthetic
gguaaaaggagcagcgaaa

SEQ ID NO: 38723 - RNA, 20 nt, Artificial Sequence
  Synthetic
ggguaaaaggagcagcgaaa

SEQ ID NO: 38724 - RNA, 21 nt, Artificial Sequence
  Synthetic
uggguaaaaggagcagcgaaa

SEQ ID NO: 38725 - RNA, 22 nt, Artificial Sequence
  Synthetic
uuggguaaaaggagcagcgaaa

SEQ ID NO: 38726 - RNA, 23 nt, Artificial Sequence
  Synthetic
auuggguaaaaggagcagcgaaa

SEQ ID NO: 38727 - RNA, 24 nt, Artificial Sequence
  Synthetic
cauuggguaaaaggagcagcgaaa

SEQ ID NO: 38728 - RNA, 18 nt, Artificial Sequence
  Synthetic
caaaaguaagacaggaaa

SEQ ID NO: 38729 - RNA, 19 nt, Artificial Sequence
  Synthetic
ccaaaaguaagacaggaaa

SEQ ID NO: 38730 - RNA, 20 nt, Artificial Sequence
  Synthetic
cccaaaaguaagacaggaaa

SEQ ID NO: 38731 - RNA, 21 nt, Artificial Sequence
  Synthetic
ucccaaaaguaagacaggaaa

SEQ ID NO: 38732 - RNA, 22 nt, Artificial Sequence
  Synthetic
cucccaaaaguaagacaggaaa

SEQ ID NO: 38733 - RNA, 23 nt, Artificial Sequence
  Synthetic
ucucccaaaaguaagacaggaaa

SEQ ID NO: 38734 - RNA, 24 nt, Artificial Sequence
  Synthetic
cucucccaaaaguaagacaggaaa

SEQ ID NO: 38735 - RNA, 18 nt, Artificial Sequence
  Synthetic
caaauggauauuuggaaa

SEQ ID NO: 38736 - RNA, 19 nt, Artificial Sequence
  Synthetic
gcaaauggauauuuggaaa

SEQ ID NO: 38737 - RNA, 20 nt, Artificial Sequence
  Synthetic
ugcaaauggauauuuggaaa

SEQ ID NO: 38738 - RNA, 21 nt, Artificial Sequence
  Synthetic
augcaaauggauauuuggaaa

SEQ ID NO: 38739 - RNA, 22 nt, Artificial Sequence
  Synthetic
gaugcaaauggauauuuggaaa

SEQ ID NO: 38740 - RNA, 23 nt, Artificial Sequence
  Synthetic
ugaugcaaauggauauuuggaaa

SEQ ID NO: 38741 - RNA, 24 nt, Artificial Sequence
  Synthetic
uugaugcaaauggauauuuggaaa

SEQ ID NO: 38742 - RNA, 18 nt, Artificial Sequence
  Synthetic
  misc_feature (6)..(6): n is a, c, g, or u
ucaucnauauagcugaaa

SEQ ID NO: 38743 - RNA, 19 nt, Artificial Sequence
  Synthetic
  misc_feature (7)..(7): n is a, c, g, or u
aucaucnauauagcugaaa

SEQ ID NO: 38744 - RNA, 20 nt, Artificial Sequence
  Synthetic
  misc_feature (8)..(8): n is a, c, g, or u
caucaucnauauagcugaaa

SEQ ID NO: 38745 - RNA, 21 nt, Artificial Sequence
  Synthetic
  misc_feature (9)..(9): n is a, c, g, or u
acaucaucnauauagcugaaa

SEQ ID NO: 38746 - RNA, 22 nt, Artificial Sequence
  Synthetic
  misc_feature (10)..(10): n is a, c, g, or u
cacaucaucnauauagcugaaa

SEQ ID NO: 38747 - RNA, 23 nt, Artificial Sequence
  Synthetic
  misc_feature (11)..(11): n is a, c, g, or u
ccacaucaucnauauagcugaaa

SEQ ID NO: 38748 - RNA, 24 nt, Artificial Sequence
  Synthetic
  misc_feature (12)..(12): n is a, c, g, or u
accacaucaucnauauagcugaaa

SEQ ID NO: 38749 - RNA, 18 nt, Artificial Sequence
  Synthetic
acaaauggcacuaguaaa

SEQ ID NO: 38750 - RNA, 19 nt, Artificial Sequence
  Synthetic
aacaaauggcacuaguaaa

SEQ ID NO: 38751 - RNA, 20 nt, Artificial Sequence
  Synthetic
gaacaaauggcacuaguaaa

SEQ ID NO: 38752 - RNA, 21 nt, Artificial Sequence
  Synthetic
ugaacaaauggcacuaguaaa

SEQ ID NO: 38753 - RNA, 22 nt, Artificial Sequence
  Synthetic
cugaacaaauggcacuaguaaa

SEQ ID NO: 38754 - RNA, 23 nt, Artificial Sequence
  Synthetic
acugaacaaauggcacuaguaaa

SEQ ID NO: 38755 - RNA, 24 nt, Artificial Sequence
  Synthetic
cacugaacaaauggcacuaguaaa

SEQ ID NO: 38756 - RNA, 18 nt, Artificial Sequence
  Synthetic
gcgcugacgggacguaaa

SEQ ID NO: 38757 - RNA, 19 nt, Artificial Sequence
  Synthetic
agcgcugacgggacguaaa

SEQ ID NO: 38758 - RNA, 20 nt, Artificial Sequence
  Synthetic
cagcgcugacgggacguaaa

SEQ ID NO: 38759 - RNA, 18 nt, Artificial Sequence
  Synthetic
acggggagaccgcguaaa

SEQ ID NO: 38760 - RNA, 19 nt, Artificial Sequence
  Synthetic
gacggggagaccgcguaaa

SEQ ID NO: 38761 - RNA, 20 nt, Artificial Sequence
  Synthetic
agacggggagaccgcguaaa

SEQ ID NO: 38762 - RNA, 18 nt, Artificial Sequence
  Synthetic
guaaccacauuggguaaa

SEQ ID NO: 38763 - RNA, 19 nt, Artificial Sequence
  Synthetic
gguaaccacauuggguaaa

SEQ ID NO: 38764 - RNA, 20 nt, Artificial Sequence
  Synthetic
ggguaaccacauuggguaaa

SEQ ID NO: 38765 - RNA, 21 nt, Artificial Sequence
  Synthetic
aggguaaccacauuggguaaa

SEQ ID NO: 38766 - RNA, 22 nt, Artificial Sequence
  Synthetic
caggguaaccacauuggguaaa

SEQ ID NO: 38767 - RNA, 23 nt, Artificial Sequence
  Synthetic
gcaggguaaccacauuggguaaa

SEQ ID NO: 38768 - RNA, 24 nt, Artificial Sequence
  Synthetic
ggcaggguaaccacauuggguaaa

SEQ ID NO: 38769 - RNA, 18 nt, Artificial Sequence
  Synthetic
uugccaaucaggauuaaa

SEQ ID NO: 38770 - RNA, 19 nt, Artificial Sequence
  Synthetic
uuugccaaucaggauuaaa

SEQ ID NO: 38771 - RNA, 20 nt, Artificial Sequence
  Synthetic
guuugccaaucaggauuaaa

SEQ ID NO: 38772 - RNA, 21 nt, Artificial Sequence
  Synthetic
aguuugccaaucaggauuaaa

SEQ ID NO: 38773 - RNA, 22 nt, Artificial Sequence
  Synthetic
gaguuugccaaucaggauuaaa

SEQ ID NO: 38774 - RNA, 23 nt, Artificial Sequence
  Synthetic
ggaguuugccaaucaggauuaaa

SEQ ID NO: 38775 - RNA, 24 nt, Artificial Sequence
  Synthetic
aggaguuugccaaucaggauuaaa

SEQ ID NO: 38776 - RNA, 18 nt, Artificial Sequence
  Synthetic
gaggauucuugucaacaa

SEQ ID NO: 38777 - RNA, 19 nt, Artificial Sequence
  Synthetic
ugaggauucuugucaacaa

SEQ ID NO: 38778 - RNA, 20 nt, Artificial Sequence
  Synthetic
gugaggauucuugucaacaa

SEQ ID NO: 38779 - RNA, 21 nt, Artificial Sequence
  Synthetic
ugugaggauucuugucaacaa

SEQ ID NO: 38780 - RNA, 22 nt, Artificial Sequence
  Synthetic
uugugaggauucuugucaacaa

SEQ ID NO: 38781 - RNA, 23 nt, Artificial Sequence
  Synthetic
auugugaggauucuugucaacaa

SEQ ID NO: 38782 - RNA, 24 nt, Artificial Sequence
  Synthetic
uauugugaggauucuugucaacaa

SEQ ID NO: 38783 - RNA, 18 nt, Artificial Sequence
  Synthetic
guauauggugacccacaa

SEQ ID NO: 38784 - RNA, 19 nt, Artificial Sequence
  Synthetic
aguauauggugacccacaa

SEQ ID NO: 38785 - RNA, 20 nt, Artificial Sequence
  Synthetic
aaguauauggugacccacaa

SEQ ID NO: 38786 - RNA, 21 nt, Artificial Sequence
  Synthetic
caaguauauggugacccacaa

SEQ ID NO: 38787 - RNA, 22 nt, Artificial Sequence
  Synthetic
ccaaguauauggugacccacaa

SEQ ID NO: 38788 - RNA, 23 nt, Artificial Sequence
  Synthetic
cccaaguauauggugacccacaa

SEQ ID NO: 38789 - RNA, 24 nt, Artificial Sequence
  Synthetic
ucccaaguauauggugacccacaa

SEQ ID NO: 38790 - RNA, 18 nt, Artificial Sequence
  Synthetic
auguauacccaaagacaa

SEQ ID NO: 38791 - RNA, 19 nt, Artificial Sequence
  Synthetic
gauguauacccaaagacaa

SEQ ID NO: 38792 - RNA, 20 nt, Artificial Sequence
  Synthetic
agauguauacccaaagacaa

SEQ ID NO: 38793 - RNA, 21 nt, Artificial Sequence
  Synthetic
uagauguauacccaaagacaa

SEQ ID NO: 38794 - RNA, 22 nt, Artificial Sequence
  Synthetic
uuagauguauacccaaagacaa

SEQ ID NO: 38795 - RNA, 23 nt, Artificial Sequence
  Synthetic
uuuagauguauacccaaagacaa

SEQ ID NO: 38796 - RNA, 24 nt, Artificial Sequence
  Synthetic
guuuagauguauacccaaagacaa

SEQ ID NO: 38797 - RNA, 18 nt, Artificial Sequence
  Synthetic
cagcgauagccaggacaa

SEQ ID NO: 38798 - RNA, 19 nt, Artificial Sequence
  Synthetic
ccagcgauagccaggacaa

SEQ ID NO: 38799 - RNA, 20 nt, Artificial Sequence
  Synthetic
uccagcgauagccaggacaa

SEQ ID NO: 38800 - RNA, 21 nt, Artificial Sequence
  Synthetic
auccagcgauagccaggacaa

SEQ ID NO: 38801 - RNA, 22 nt, Artificial Sequence
  Synthetic
cauccagcgauagccaggacaa

SEQ ID NO: 38802 - RNA, 23 nt, Artificial Sequence
  Synthetic
acauccagcgauagccaggacaa

SEQ ID NO: 38803 - RNA, 24 nt, Artificial Sequence
  Synthetic
cacauccagcgauagccaggacaa

SEQ ID NO: 38804 - RNA, 18 nt, Artificial Sequence
  Synthetic
ccuggaaucagaggacaa

SEQ ID NO: 38805 - RNA, 19 nt, Artificial Sequence
  Synthetic
uccuggaaucagaggacaa

SEQ ID NO: 38806 - RNA, 20 nt, Artificial Sequence
  Synthetic
auccuggaaucagaggacaa

SEQ ID NO: 38807 - RNA, 21 nt, Artificial Sequence
  Synthetic
gauccuggaaucagaggacaa

SEQ ID NO: 38808 - RNA, 22 nt, Artificial Sequence
  Synthetic
ggauccuggaaucagaggacaa

SEQ ID NO: 38809 - RNA, 23 nt, Artificial Sequence
  Synthetic
aggauccuggaaucagaggacaa

SEQ ID NO: 38810 - RNA, 24 nt, Artificial Sequence
  Synthetic
gaggauccuggaaucagaggacaa

SEQ ID NO: 38811 - RNA, 18 nt, Artificial Sequence
  Synthetic
auaguccagaagaaccaa

SEQ ID NO: 38812 - RNA, 19 nt, Artificial Sequence
  Synthetic
gauaguccagaagaaccaa

SEQ ID NO: 38813 - RNA, 20 nt, Artificial Sequence
  Synthetic
ugauaguccagaagaaccaa

SEQ ID NO: 38814 - RNA, 21 nt, Artificial Sequence
  Synthetic
uugauaguccagaagaaccaa

SEQ ID NO: 38815 - RNA, 22 nt, Artificial Sequence
  Synthetic
cuugauaguccagaagaaccaa

SEQ ID NO: 38816 - RNA, 23 nt, Artificial Sequence
  Synthetic
ccuugauaguccagaagaaccaa

SEQ ID NO: 38817 - RNA, 24 nt, Artificial Sequence
  Synthetic
accuugauaguccagaagaaccaa

SEQ ID NO: 38818 - RNA, 18 nt, Artificial Sequence
  Synthetic
uugggauugaagucccaa

SEQ ID NO: 38819 - RNA, 19 nt, Artificial Sequence
  Synthetic
uuugggauugaagucccaa

SEQ ID NO: 38820 - RNA, 20 nt, Artificial Sequence
  Synthetic
uuuugggauugaagucccaa

SEQ ID NO: 38821 - RNA, 21 nt, Artificial Sequence
  Synthetic
uuuuugggauugaagucccaa

SEQ ID NO: 38822 - RNA, 22 nt, Artificial Sequence
  Synthetic
cuuuuugggauugaagucccaa

SEQ ID NO: 38823 - RNA, 23 nt, Artificial Sequence
  Synthetic
ccuuuuugggauugaagucccaa

SEQ ID NO: 38824 - RNA, 24 nt, Artificial Sequence
  Synthetic
uccuuuuugggauugaagucccaa

SEQ ID NO: 38825 - RNA, 18 nt, Artificial Sequence
  Synthetic
ggucaaugucuaagccaa

SEQ ID NO: 38826 - RNA, 19 nt, Artificial Sequence
  Synthetic
gggucaaugucuaagccaa

SEQ ID NO: 38827 - RNA, 20 nt, Artificial Sequence
  Synthetic
agggucaaugucuaagccaa

SEQ ID NO: 38828 - RNA, 21 nt, Artificial Sequence
  Synthetic
aagggucaaugucuaagccaa

SEQ ID NO: 38829 - RNA, 22 nt, Artificial Sequence
  Synthetic
uaagggucaaugucuaagccaa

SEQ ID NO: 38830 - RNA, 23 nt, Artificial Sequence
  Synthetic
auaagggucaaugucuaagccaa

SEQ ID NO: 38831 - RNA, 24 nt, Artificial Sequence
  Synthetic
uauaagggucaaugucuaagccaa

SEQ ID NO: 38832 - RNA, 18 nt, Artificial Sequence
  Synthetic
acuaguaaacugagccaa

SEQ ID NO: 38833 - RNA, 19 nt, Artificial Sequence
  Synthetic
cacuaguaaacugagccaa

SEQ ID NO: 38834 - RNA, 20 nt, Artificial Sequence
  Synthetic
gcacuaguaaacugagccaa

SEQ ID NO: 38835 - RNA, 21 nt, Artificial Sequence
  Synthetic
ggcacuaguaaacugagccaa

SEQ ID NO: 38836 - RNA, 22 nt, Artificial Sequence
  Synthetic
uggcacuaguaaacugagccaa

SEQ ID NO: 38837 - RNA, 23 nt, Artificial Sequence
  Synthetic
auggcacuaguaaacugagccaa

SEQ ID NO: 38838 - RNA, 24 nt, Artificial Sequence
  Synthetic
aauggcacuaguaaacugagccaa

SEQ ID NO: 38839 - RNA, 18 nt, Artificial Sequence
  Synthetic
aaagaaggaguuugccaa

SEQ ID NO: 38840 - RNA, 19 nt, Artificial Sequence
  Synthetic
aaaagaaggaguuugccaa

SEQ ID NO: 38841 - RNA, 20 nt, Artificial Sequence
  Synthetic
gaaaagaaggaguuugccaa

SEQ ID NO: 38842 - RNA, 21 nt, Artificial Sequence
  Synthetic
ggaaaagaaggaguuugccaa

SEQ ID NO: 38843 - RNA, 22 nt, Artificial Sequence
  Synthetic
uggaaaagaaggaguuugccaa

SEQ ID NO: 38844 - RNA, 23 nt, Artificial Sequence
  Synthetic
uuggaaaagaaggaguuugccaa

SEQ ID NO: 38845 - RNA, 24 nt, Artificial Sequence
  Synthetic
uuuggaaaagaaggaguuugccaa

SEQ ID NO: 38846 - RNA, 18 nt, Artificial Sequence
  Synthetic
ucgagagggaccguccaa

SEQ ID NO: 38847 - RNA, 19 nt, Artificial Sequence
  Synthetic
cucgagagggaccguccaa

SEQ ID NO: 38848 - RNA, 20 nt, Artificial Sequence
  Synthetic
acucgagagggaccguccaa

SEQ ID NO: 38849 - RNA, 18 nt, Artificial Sequence
  Synthetic
gaagguuuuguacagcaa

SEQ ID NO: 38850 - RNA, 19 nt, Artificial Sequence
  Synthetic
cgaagguuuuguacagcaa

SEQ ID NO: 38851 - RNA, 20 nt, Artificial Sequence
  Synthetic
ccgaagguuuuguacagcaa

SEQ ID NO: 38852 - RNA, 18 nt, Artificial Sequence
  Synthetic
cagaccggcugcgagcaa

SEQ ID NO: 38853 - RNA, 19 nt, Artificial Sequence
  Synthetic
ccagaccggcugcgagcaa

SEQ ID NO: 38854 - RNA, 20 nt, Artificial Sequence
  Synthetic
uccagaccggcugcgagcaa

SEQ ID NO: 38855 - RNA, 21 nt, Artificial Sequence
  Synthetic
cuccagaccggcugcgagcaa

SEQ ID NO: 38856 - RNA, 22 nt, Artificial Sequence
  Synthetic
gcuccagaccggcugcgagcaa

SEQ ID NO: 38857 - RNA, 23 nt, Artificial Sequence
  Synthetic
ugcuccagaccggcugcgagcaa

SEQ ID NO: 38858 - RNA, 24 nt, Artificial Sequence
  Synthetic
uugcuccagaccggcugcgagcaa

SEQ ID NO: 38859 - RNA, 18 nt, Artificial Sequence
  Synthetic
ugugaggauucuugucaa

SEQ ID NO: 38860 - RNA, 19 nt, Artificial Sequence
  Synthetic
uugugaggauucuugucaa

SEQ ID NO: 38861 - RNA, 20 nt, Artificial Sequence
  Synthetic
auugugaggauucuugucaa

SEQ ID NO: 38862 - RNA, 21 nt, Artificial Sequence
  Synthetic
uauugugaggauucuugucaa

SEQ ID NO: 38863 - RNA, 22 nt, Artificial Sequence
  Synthetic
guauugugaggauucuugucaa

SEQ ID NO: 38864 - RNA, 23 nt, Artificial Sequence
  Synthetic
gguauugugaggauucuugucaa

SEQ ID NO: 38865 - RNA, 24 nt, Artificial Sequence
  Synthetic
cgguauugugaggauucuugucaa

SEQ ID NO: 38866 - RNA, 18 nt, Artificial Sequence
  Synthetic
cagaagaaccaacaagaa

SEQ ID NO: 38867 - RNA, 19 nt, Artificial Sequence
  Synthetic
ccagaagaaccaacaagaa

SEQ ID NO: 38868 - RNA, 20 nt, Artificial Sequence
  Synthetic
uccagaagaaccaacaagaa

SEQ ID NO: 38869 - RNA, 21 nt, Artificial Sequence
  Synthetic
guccagaagaaccaacaagaa

SEQ ID NO: 38870 - RNA, 22 nt, Artificial Sequence
  Synthetic
aguccagaagaaccaacaagaa

SEQ ID NO: 38871 - RNA, 23 nt, Artificial Sequence
  Synthetic
uaguccagaagaaccaacaagaa

SEQ ID NO: 38872 - RNA, 24 nt, Artificial Sequence
  Synthetic
auaguccagaagaaccaacaagaa

SEQ ID NO: 38873 - RNA, 18 nt, Artificial Sequence
  Synthetic
acagguauaguagaagaa

SEQ ID NO: 38874 - RNA, 19 nt, Artificial Sequence
  Synthetic
gacagguauaguagaagaa

SEQ ID NO: 38875 - RNA, 20 nt, Artificial Sequence
  Synthetic
agacagguauaguagaagaa

SEQ ID NO: 38876 - RNA, 21 nt, Artificial Sequence
  Synthetic
aagacagguauaguagaagaa

SEQ ID NO: 38877 - RNA, 22 nt, Artificial Sequence
  Synthetic
aaagacagguauaguagaagaa

SEQ ID NO: 38878 - RNA, 23 nt, Artificial Sequence
  Synthetic
uaaagacagguauaguagaagaa

SEQ ID NO: 38879 - RNA, 24 nt, Artificial Sequence
  Synthetic
uuaaagacagguauaguagaagaa

SEQ ID NO: 38880 - RNA, 18 nt, Artificial Sequence
  Synthetic
gacgggaaaaagucagaa

SEQ ID NO: 38881 - RNA, 19 nt, Artificial Sequence
  Synthetic
agacgggaaaaagucagaa

SEQ ID NO: 38882 - RNA, 20 nt, Artificial Sequence
  Synthetic
cagacgggaaaaagucagaa

SEQ ID NO: 38883 - RNA, 21 nt, Artificial Sequence
  Synthetic
acagacgggaaaaagucagaa

SEQ ID NO: 38884 - RNA, 22 nt, Artificial Sequence
  Synthetic
aacagacgggaaaaagucagaa

SEQ ID NO: 38885 - RNA, 23 nt, Artificial Sequence
  Synthetic
gaacagacgggaaaaagucagaa

SEQ ID NO: 38886 - RNA, 24 nt, Artificial Sequence
  Synthetic
cgaacagacgggaaaaagucagaa

SEQ ID NO: 38887 - RNA, 18 nt, Artificial Sequence
  Synthetic
uaaacugagccaagagaa

SEQ ID NO: 38888 - RNA, 19 nt, Artificial Sequence
  Synthetic
guaaacugagccaagagaa

SEQ ID NO: 38889 - RNA, 20 nt, Artificial Sequence
  Synthetic
aguaaacugagccaagagaa

SEQ ID NO: 38890 - RNA, 21 nt, Artificial Sequence
  Synthetic
uaguaaacugagccaagagaa

SEQ ID NO: 38891 - RNA, 22 nt, Artificial Sequence
  Synthetic
cuaguaaacugagccaagagaa

SEQ ID NO: 38892 - RNA, 23 nt, Artificial Sequence
  Synthetic
acuaguaaacugagccaagagaa

SEQ ID NO: 38893 - RNA, 24 nt, Artificial Sequence
  Synthetic
cacuaguaaacugagccaagagaa

SEQ ID NO: 38894 - RNA, 18 nt, Artificial Sequence
  Synthetic
cuuauaaguuggcgagaa

SEQ ID NO: 38895 - RNA, 19 nt, Artificial Sequence
  Synthetic
ccuuauaaguuggcgagaa

SEQ ID NO: 38896 - RNA, 20 nt, Artificial Sequence
  Synthetic
gccuuauaaguuggcgagaa

SEQ ID NO: 38897 - RNA, 21 nt, Artificial Sequence
  Synthetic
ggccuuauaaguuggcgagaa

SEQ ID NO: 38898 - RNA, 22 nt, Artificial Sequence
  Synthetic
aggccuuauaaguuggcgagaa

SEQ ID NO: 38899 - RNA, 23 nt, Artificial Sequence
  Synthetic
aaggccuuauaaguuggcgagaa

SEQ ID NO: 38900 - RNA, 24 nt, Artificial Sequence
  Synthetic
aaaggccuuauaaguuggcgagaa

SEQ ID NO: 38901 - RNA, 18 nt, Artificial Sequence
  Synthetic
ggaacggcagacggagaa

SEQ ID NO: 38902 - RNA, 19 nt, Artificial Sequence
  Synthetic
aggaacggcagacggagaa

SEQ ID NO: 38903 - RNA, 20 nt, Artificial Sequence
  Synthetic
caggaacggcagacggagaa

SEQ ID NO: 38904 - RNA, 21 nt, Artificial Sequence
  Synthetic
gcaggaacggcagacggagaa

SEQ ID NO: 38905 - RNA, 22 nt, Artificial Sequence
  Synthetic
ggcaggaacggcagacggagaa

SEQ ID NO: 38906 - RNA, 23 nt, Artificial Sequence
  Synthetic
cggcaggaacggcagacggagaa

SEQ ID NO: 38907 - RNA, 24 nt, Artificial Sequence
  Synthetic
ucggcaggaacggcagacggagaa

SEQ ID NO: 38908 - RNA, 18 nt, Artificial Sequence
  Synthetic
gagguuggggacugcgaa

SEQ ID NO: 38909 - RNA, 19 nt, Artificial Sequence
  Synthetic
ggagguuggggacugcgaa

SEQ ID NO: 38910 - RNA, 20 nt, Artificial Sequence
  Synthetic
uggagguuggggacugcgaa

SEQ ID NO: 38911 - RNA, 21 nt, Artificial Sequence
  Synthetic
uuggagguuggggacugcgaa

SEQ ID NO: 38912 - RNA, 22 nt, Artificial Sequence
  Synthetic
auuggagguuggggacugcgaa

SEQ ID NO: 38913 - RNA, 23 nt, Artificial Sequence
  Synthetic
gauuggagguuggggacugcgaa

SEQ ID NO: 38914 - RNA, 24 nt, Artificial Sequence
  Synthetic
ugauuggagguuggggacugcgaa

SEQ ID NO: 38915 - RNA, 18 nt, Artificial Sequence
  Synthetic
aagaugaugggaugggaa

SEQ ID NO: 38916 - RNA, 19 nt, Artificial Sequence
  Synthetic
caagaugaugggaugggaa

SEQ ID NO: 38917 - RNA, 20 nt, Artificial Sequence
  Synthetic
ccaagaugaugggaugggaa

SEQ ID NO: 38918 - RNA, 21 nt, Artificial Sequence
  Synthetic
cccaagaugaugggaugggaa

SEQ ID NO: 38919 - RNA, 22 nt, Artificial Sequence
  Synthetic
gcccaagaugaugggaugggaa

SEQ ID NO: 38920 - RNA, 23 nt, Artificial Sequence
  Synthetic
agcccaagaugaugggaugggaa

SEQ ID NO: 38921 - RNA, 24 nt, Artificial Sequence
  Synthetic
aagcccaagaugaugggaugggaa

SEQ ID NO: 38922 - RNA, 18 nt, Artificial Sequence
  Synthetic
gaauacuaacauugggaa

SEQ ID NO: 38923 - RNA, 19 nt, Artificial Sequence
  Synthetic
ggaauacuaacauugggaa

SEQ ID NO: 38924 - RNA, 20 nt, Artificial Sequence
  Synthetic
aggaauacuaacauugggaa

SEQ ID NO: 38925 - RNA, 21 nt, Artificial Sequence
  Synthetic
aaggaauacuaacauugggaa

SEQ ID NO: 38926 - RNA, 22 nt, Artificial Sequence
  Synthetic
caaggaauacuaacauugggaa

SEQ ID NO: 38927 - RNA, 23 nt, Artificial Sequence
  Synthetic
ccaaggaauacuaacauugggaa

SEQ ID NO: 38928 - RNA, 24 nt, Artificial Sequence
  Synthetic
uccaaggaauacuaacauugggaa

SEQ ID NO: 38929 - RNA, 18 nt, Artificial Sequence
  Synthetic
uggucgaggauccuggaa

SEQ ID NO: 38930 - RNA, 19 nt, Artificial Sequence
  Synthetic
guggucgaggauccuggaa

SEQ ID NO: 38931 - RNA, 20 nt, Artificial Sequence
  Synthetic
gguggucgaggauccuggaa

SEQ ID NO: 38932 - RNA, 21 nt, Artificial Sequence
  Synthetic
ugguggucgaggauccuggaa

SEQ ID NO: 38933 - RNA, 22 nt, Artificial Sequence
  Synthetic
cugguggucgaggauccuggaa

SEQ ID NO: 38934 - RNA, 23 nt, Artificial Sequence
  Synthetic
acugguggucgaggauccuggaa

SEQ ID NO: 38935 - RNA, 24 nt, Artificial Sequence
  Synthetic
uacugguggucgaggauccuggaa

SEQ ID NO: 38936 - RNA, 18 nt, Artificial Sequence
  Synthetic
gcaaauggauauuuggaa

SEQ ID NO: 38937 - RNA, 19 nt, Artificial Sequence
  Synthetic
ugcaaauggauauuuggaa

SEQ ID NO: 38938 - RNA, 20 nt, Artificial Sequence
  Synthetic
augcaaauggauauuuggaa

SEQ ID NO: 38939 - RNA, 21 nt, Artificial Sequence
  Synthetic
gaugcaaauggauauuuggaa

SEQ ID NO: 38940 - RNA, 22 nt, Artificial Sequence
  Synthetic
ugaugcaaauggauauuuggaa

SEQ ID NO: 38941 - RNA, 23 nt, Artificial Sequence
  Synthetic
uugaugcaaauggauauuuggaa

SEQ ID NO: 38942 - RNA, 24 nt, Artificial Sequence
  Synthetic
cuugaugcaaauggauauuuggaa

SEQ ID NO: 38943 - RNA, 18 nt, Artificial Sequence
  Synthetic
  misc_feature (9)..(9): n is a, c, g, or u
ugaacagunggacaugaa

SEQ ID NO: 38944 - RNA, 19 nt, Artificial Sequence
  Synthetic
  misc_feature (10)..(10): n is a, c, g, or u
uugaacagunggacaugaa

SEQ ID NO: 38945 - RNA, 20 nt, Artificial Sequence
  Synthetic
  misc_feature (11)..(11): n is a, c, g, or u
cuugaacagunggacaugaa

SEQ ID NO: 38946 - RNA, 21 nt, Artificial Sequence
  Synthetic
  misc_feature (12)..(12): n is a, c, g, or u
gcuugaacagunggacaugaa

SEQ ID NO: 38947 - RNA, 22 nt, Artificial Sequence
  Synthetic
  misc_feature (13)..(13): n is a, c, g, or u
ggcuugaacagunggacaugaa

SEQ ID NO: 38948 - RNA, 23 nt, Artificial Sequence
  Synthetic
  misc_feature (14)..(14): n is a, c, g, or u
aggcuugaacagunggacaugaa

SEQ ID NO: 38949 - RNA, 24 nt, Artificial Sequence
  Synthetic
  misc_feature (15)..(15): n is a, c, g, or u
gaggcuugaacagunggacaugaa

SEQ ID NO: 38950 - RNA, 18 nt, Artificial Sequence
  Synthetic
gcauagcagcaggaugaa

SEQ ID NO: 38951 - RNA, 19 nt, Artificial Sequence
  Synthetic
ggcauagcagcaggaugaa

SEQ ID NO: 38952 - RNA, 20 nt, Artificial Sequence
  Synthetic
aggcauagcagcaggaugaa

SEQ ID NO: 38953 - RNA, 21 nt, Artificial Sequence
  Synthetic
gaggcauagcagcaggaugaa

SEQ ID NO: 38954 - RNA, 22 nt, Artificial Sequence
  Synthetic
ugaggcauagcagcaggaugaa

SEQ ID NO: 38955 - RNA, 23 nt, Artificial Sequence
  Synthetic
augaggcauagcagcaggaugaa

SEQ ID NO: 38956 - RNA, 24 nt, Artificial Sequence
  Synthetic
gaugaggcauagcagcaggaugaa

SEQ ID NO: 38957 - RNA, 18 nt, Artificial Sequence
  Synthetic
ggguucacuaucccugaa

SEQ ID NO: 38958 - RNA, 19 nt, Artificial Sequence
  Synthetic
aggguucacuaucccugaa

SEQ ID NO: 38959 - RNA, 20 nt, Artificial Sequence
  Synthetic
caggguucacuaucccugaa

SEQ ID NO: 38960 - RNA, 21 nt, Artificial Sequence
  Synthetic
acaggguucacuaucccugaa

SEQ ID NO: 38961 - RNA, 22 nt, Artificial Sequence
  Synthetic
aacaggguucacuaucccugaa

SEQ ID NO: 38962 - RNA, 23 nt, Artificial Sequence
  Synthetic
gaacaggguucacuaucccugaa

SEQ ID NO: 38963 - RNA, 24 nt, Artificial Sequence
  Synthetic
ggaacaggguucacuaucccugaa

SEQ ID NO: 38964 - RNA, 18 nt, Artificial Sequence
  Synthetic
guaacgugcagaggugaa

SEQ ID NO: 38965 - RNA, 19 nt, Artificial Sequence
  Synthetic
uguaacgugcagaggugaa

SEQ ID NO: 38966 - RNA, 20 nt, Artificial Sequence
  Synthetic
auguaacgugcagaggugaa

SEQ ID NO: 38967 - RNA, 21 nt, Artificial Sequence
  Synthetic
cauguaacgugcagaggugaa

SEQ ID NO: 38968 - RNA, 22 nt, Artificial Sequence
  Synthetic
ccauguaacgugcagaggugaa

SEQ ID NO: 38969 - RNA, 23 nt, Artificial Sequence
  Synthetic
uccauguaacgugcagaggugaa

SEQ ID NO: 38970 - RNA, 24 nt, Artificial Sequence
  Synthetic
uuccauguaacgugcagaggugaa

SEQ ID NO: 38971 - RNA, 18 nt, Artificial Sequence
  Synthetic
uccguguggaggggugaa

SEQ ID NO: 38972 - RNA, 19 nt, Artificial Sequence
  Synthetic
cuccguguggaggggugaa

SEQ ID NO: 38973 - RNA, 20 nt, Artificial Sequence
  Synthetic
ccuccguguggaggggugaa

SEQ ID NO: 38974 - RNA, 21 nt, Artificial Sequence
  Synthetic
gccuccguguggaggggugaa

SEQ ID NO: 38975 - RNA, 22 nt, Artificial Sequence
  Synthetic
ggccuccguguggaggggugaa

SEQ ID NO: 38976 - RNA, 23 nt, Artificial Sequence
  Synthetic
aggccuccguguggaggggugaa

SEQ ID NO: 38977 - RNA, 24 nt, Artificial Sequence
  Synthetic
aaggccuccguguggaggggugaa

SEQ ID NO: 38978 - RNA, 18 nt, Artificial Sequence
  Synthetic
  misc_feature (16)..(16): n is a, c, g, or u
uugguaacagcgguanaa

SEQ ID NO: 38979 - RNA, 19 nt, Artificial Sequence
  Synthetic
  misc_feature (17)..(17): n is a, c, g, or u
auugguaacagcgguanaa

SEQ ID NO: 38980 - RNA, 20 nt, Artificial Sequence
  Synthetic
  misc_feature (18)..(18): n is a, c, g, or u
aauugguaacagcgguanaa

SEQ ID NO: 38981 - RNA, 21 nt, Artificial Sequence
  Synthetic
  misc_feature (19)..(19): n is a, c, g, or u
aaauugguaacagcgguanaa

SEQ ID NO: 38982 - RNA, 22 nt, Artificial Sequence
  Synthetic
  misc_feature (20)..(20): n is a, c, g, or u
aaaauugguaacagcgguanaa

SEQ ID NO: 38983 - RNA, 23 nt, Artificial Sequence
  Synthetic
  misc_feature (21)..(21): n is a, c, g, or u
gaaaauugguaacagcgguanaa

SEQ ID NO: 38984 - RNA, 24 nt, Artificial Sequence
  Synthetic
  misc_feature (22)..(22): n is a, c, g, or u
agaaaauugguaacagcgguanaa

SEQ ID NO: 38985 - RNA, 18 nt, Artificial Sequence
  Synthetic
gcauuugguggucuauaa

SEQ ID NO: 38986 - RNA, 19 nt, Artificial Sequence
  Synthetic
ggcauuugguggucuauaa

SEQ ID NO: 38987 - RNA, 20 nt, Artificial Sequence
  Synthetic
gggcauuugguggucuauaa

SEQ ID NO: 38988 - RNA, 21 nt, Artificial Sequence
  Synthetic
ggggcauuugguggucuauaa

SEQ ID NO: 38989 - RNA, 22 nt, Artificial Sequence
  Synthetic
aggggcauuugguggucuauaa

SEQ ID NO: 38990 - RNA, 23 nt, Artificial Sequence
  Synthetic
uaggggcauuugguggucuauaa

SEQ ID NO: 38991 - RNA, 24 nt, Artificial Sequence
  Synthetic
auaggggcauuugguggucuauaa

SEQ ID NO: 38992 - RNA, 18 nt, Artificial Sequence
  Synthetic
cagagaaaggccuuauaa

SEQ ID NO: 38993 - RNA, 19 nt, Artificial Sequence
  Synthetic
acagagaaaggccuuauaa

SEQ ID NO: 38994 - RNA, 20 nt, Artificial Sequence
  Synthetic
uacagagaaaggccuuauaa

SEQ ID NO: 38995 - RNA, 21 nt, Artificial Sequence
  Synthetic
uuacagagaaaggccuuauaa

SEQ ID NO: 38996 - RNA, 22 nt, Artificial Sequence
  Synthetic
uuuacagagaaaggccuuauaa

SEQ ID NO: 38997 - RNA, 23 nt, Artificial Sequence
  Synthetic
guuuacagagaaaggccuuauaa

SEQ ID NO: 38998 - RNA, 24 nt, Artificial Sequence
  Synthetic
uguuuacagagaaaggccuuauaa

SEQ ID NO: 38999 - RNA, 18 nt, Artificial Sequence
  Synthetic
augccuacagccuccuaa

SEQ ID NO: 39000 - RNA, 19 nt, Artificial Sequence
  Synthetic
uaugccuacagccuccuaa

SEQ ID NO: 39001 - RNA, 20 nt, Artificial Sequence
  Synthetic
uuaugccuacagccuccuaa

SEQ ID NO: 39002 - RNA, 21 nt, Artificial Sequence
  Synthetic
uuuaugccuacagccuccuaa

SEQ ID NO: 39003 - RNA, 22 nt, Artificial Sequence
  Synthetic
auuuaugccuacagccuccuaa

SEQ ID NO: 39004 - RNA, 23 nt, Artificial Sequence
  Synthetic
aauuuaugccuacagccuccuaa

SEQ ID NO: 39005 - RNA, 24 nt, Artificial Sequence
  Synthetic
caauuuaugccuacagccuccuaa

SEQ ID NO: 39006 - RNA, 18 nt, Artificial Sequence
  Synthetic
auaagggucaaugucuaa

SEQ ID NO: 39007 - RNA, 19 nt, Artificial Sequence
  Synthetic
uauaagggucaaugucuaa

SEQ ID NO: 39008 - RNA, 20 nt, Artificial Sequence
  Synthetic
uuauaagggucaaugucuaa

SEQ ID NO: 39009 - RNA, 21 nt, Artificial Sequence
  Synthetic
uuuauaagggucaaugucuaa

SEQ ID NO: 39010 - RNA, 22 nt, Artificial Sequence
  Synthetic
cuuuauaagggucaaugucuaa

SEQ ID NO: 39011 - RNA, 23 nt, Artificial Sequence
  Synthetic
ucuuuauaagggucaaugucuaa

SEQ ID NO: 39012 - RNA, 24 nt, Artificial Sequence
  Synthetic
uucuuuauaagggucaaugucuaa

SEQ ID NO: 39013 - RNA, 18 nt, Artificial Sequence
  Synthetic
uuucucucccaaaaguaa

SEQ ID NO: 39014 - RNA, 19 nt, Artificial Sequence
  Synthetic
guuucucucccaaaaguaa

SEQ ID NO: 39015 - RNA, 20 nt, Artificial Sequence
  Synthetic
gguuucucucccaaaaguaa

SEQ ID NO: 39016 - RNA, 21 nt, Artificial Sequence
  Synthetic
cgguuucucucccaaaaguaa

SEQ ID NO: 39017 - RNA, 22 nt, Artificial Sequence
  Synthetic
acgguuucucucccaaaaguaa

SEQ ID NO: 39018 - RNA, 23 nt, Artificial Sequence
  Synthetic
aacgguuucucucccaaaaguaa

SEQ ID NO: 39019 - RNA, 24 nt, Artificial Sequence
  Synthetic
gaacgguuucucucccaaaaguaa

SEQ ID NO: 39020 - RNA, 18 nt, Artificial Sequence
  Synthetic
aacaaauggcacuaguaa

SEQ ID NO: 39021 - RNA, 19 nt, Artificial Sequence
  Synthetic
gaacaaauggcacuaguaa

SEQ ID NO: 39022 - RNA, 20 nt, Artificial Sequence
  Synthetic
ugaacaaauggcacuaguaa

SEQ ID NO: 39023 - RNA, 21 nt, Artificial Sequence
  Synthetic
cugaacaaauggcacuaguaa

SEQ ID NO: 39024 - RNA, 22 nt, Artificial Sequence
  Synthetic
acugaacaaauggcacuaguaa

SEQ ID NO: 39025 - RNA, 23 nt, Artificial Sequence
  Synthetic
cacugaacaaauggcacuaguaa

SEQ ID NO: 39026 - RNA, 24 nt, Artificial Sequence
  Synthetic
ccacugaacaaauggcacuaguaa

SEQ ID NO: 39027 - RNA, 18 nt, Artificial Sequence
  Synthetic
agcgcugacgggacguaa

SEQ ID NO: 39028 - RNA, 19 nt, Artificial Sequence
  Synthetic
cagcgcugacgggacguaa

SEQ ID NO: 39029 - RNA, 20 nt, Artificial Sequence
  Synthetic
ucagcgcugacgggacguaa

SEQ ID NO: 39030 - RNA, 21 nt, Artificial Sequence
  Synthetic
uucagcgcugacgggacguaa

SEQ ID NO: 39031 - RNA, 22 nt, Artificial Sequence
  Synthetic
auucagcgcugacgggacguaa

SEQ ID NO: 39032 - RNA, 23 nt, Artificial Sequence
  Synthetic
gauucagcgcugacgggacguaa

SEQ ID NO: 39033 - RNA, 24 nt, Artificial Sequence
  Synthetic
ggauucagcgcugacgggacguaa

SEQ ID NO: 39034 - RNA, 18 nt, Artificial Sequence
  Synthetic
gacggggagaccgcguaa

SEQ ID NO: 39035 - RNA, 19 nt, Artificial Sequence
  Synthetic
agacggggagaccgcguaa

SEQ ID NO: 39036 - RNA, 20 nt, Artificial Sequence
  Synthetic
cagacggggagaccgcguaa

SEQ ID NO: 39037 - RNA, 21 nt, Artificial Sequence
  Synthetic
acagacggggagaccgcguaa

SEQ ID NO: 39038 - RNA, 22 nt, Artificial Sequence
  Synthetic
aacagacggggagaccgcguaa

SEQ ID NO: 39039 - RNA, 23 nt, Artificial Sequence
  Synthetic
gaacagacggggagaccgcguaa

SEQ ID NO: 39040 - RNA, 24 nt, Artificial Sequence
  Synthetic
ggaacagacggggagaccgcguaa

SEQ ID NO: 39041 - RNA, 18 nt, Artificial Sequence
  Synthetic
gguaaccacauuggguaa

SEQ ID NO: 39042 - RNA, 19 nt, Artificial Sequence
  Synthetic
ggguaaccacauuggguaa

SEQ ID NO: 39043 - RNA, 20 nt, Artificial Sequence
  Synthetic
aggguaaccacauuggguaa

SEQ ID NO: 39044 - RNA, 21 nt, Artificial Sequence
  Synthetic
caggguaaccacauuggguaa

SEQ ID NO: 39045 - RNA, 22 nt, Artificial Sequence
  Synthetic
gcaggguaaccacauuggguaa

SEQ ID NO: 39046 - RNA, 23 nt, Artificial Sequence
  Synthetic
ggcaggguaaccacauuggguaa

SEQ ID NO: 39047 - RNA, 24 nt, Artificial Sequence
  Synthetic
aggcaggguaaccacauuggguaa

SEQ ID NO: 39048 - RNA, 18 nt, Artificial Sequence
  Synthetic
gaaaaaccccgccuguaa

SEQ ID NO: 39049 - RNA, 19 nt, Artificial Sequence
  Synthetic
agaaaaaccccgccuguaa

SEQ ID NO: 39050 - RNA, 20 nt, Artificial Sequence
  Synthetic
aagaaaaaccccgccuguaa

SEQ ID NO: 39051 - RNA, 21 nt, Artificial Sequence
  Synthetic
caagaaaaaccccgccuguaa

SEQ ID NO: 39052 - RNA, 22 nt, Artificial Sequence
  Synthetic
acaagaaaaaccccgccuguaa

SEQ ID NO: 39053 - RNA, 23 nt, Artificial Sequence
  Synthetic
aacaagaaaaaccccgccuguaa

SEQ ID NO: 39054 - RNA, 24 nt, Artificial Sequence
  Synthetic
caacaagaaaaaccccgccuguaa

SEQ ID NO: 39055 - RNA, 18 nt, Artificial Sequence
  Synthetic
ugcauauaaaggcauuaa

SEQ ID NO: 39056 - RNA, 19 nt, Artificial Sequence
  Synthetic
augcauauaaaggcauuaa

SEQ ID NO: 39057 - RNA, 20 nt, Artificial Sequence
  Synthetic
caugcauauaaaggcauuaa

SEQ ID NO: 39058 - RNA, 21 nt, Artificial Sequence
  Synthetic
acaugcauauaaaggcauuaa

SEQ ID NO: 39059 - RNA, 22 nt, Artificial Sequence
  Synthetic
uacaugcauauaaaggcauuaa

SEQ ID NO: 39060 - RNA, 23 nt, Artificial Sequence
  Synthetic
auacaugcauauaaaggcauuaa

SEQ ID NO: 39061 - RNA, 24 nt, Artificial Sequence
  Synthetic
uauacaugcauauaaaggcauuaa

SEQ ID NO: 39062 - RNA, 18 nt, Artificial Sequence
  Synthetic
uaauacaaaggucauuaa

SEQ ID NO: 39063 - RNA, 19 nt, Artificial Sequence
  Synthetic
cuaauacaaaggucauuaa

SEQ ID NO: 39064 - RNA, 20 nt, Artificial Sequence
  Synthetic
ccuaauacaaaggucauuaa

SEQ ID NO: 39065 - RNA, 21 nt, Artificial Sequence
  Synthetic
uccuaauacaaaggucauuaa

SEQ ID NO: 39066 - RNA, 22 nt, Artificial Sequence
  Synthetic
cuccuaauacaaaggucauuaa

SEQ ID NO: 39067 - RNA, 23 nt, Artificial Sequence
  Synthetic
ccuccuaauacaaaggucauuaa

SEQ ID NO: 39068 - RNA, 24 nt, Artificial Sequence
  Synthetic
gccuccuaauacaaaggucauuaa

SEQ ID NO: 39069 - RNA, 18 nt, Artificial Sequence
  Synthetic
aaucaauuggccuguuaa

SEQ ID NO: 39070 - RNA, 19 nt, Artificial Sequence
  Synthetic
caaucaauuggccuguuaa

SEQ ID NO: 39071 - RNA, 20 nt, Artificial Sequence
  Synthetic
ccaaucaauuggccuguuaa

SEQ ID NO: 39072 - RNA, 21 nt, Artificial Sequence
  Synthetic
uccaaucaauuggccuguuaa

SEQ ID NO: 39073 - RNA, 22 nt, Artificial Sequence
  Synthetic
uuccaaucaauuggccuguuaa

SEQ ID NO: 39074 - RNA, 23 nt, Artificial Sequence
  Synthetic
uuuccaaucaauuggccuguuaa

SEQ ID NO: 39075 - RNA, 24 nt, Artificial Sequence
  Synthetic
cuuuccaaucaauuggccuguuaa

SEQ ID NO: 39076 - RNA, 18 nt, Artificial Sequence
  Synthetic
ccggcugcgagcaaaaca

SEQ ID NO: 39077 - RNA, 19 nt, Artificial Sequence
  Synthetic
accggcugcgagcaaaaca

SEQ ID NO: 39078 - RNA, 20 nt, Artificial Sequence
  Synthetic
gaccggcugcgagcaaaaca

SEQ ID NO: 39079 - RNA, 21 nt, Artificial Sequence
  Synthetic
agaccggcugcgagcaaaaca

SEQ ID NO: 39080 - RNA, 22 nt, Artificial Sequence
  Synthetic
cagaccggcugcgagcaaaaca

SEQ ID NO: 39081 - RNA, 23 nt, Artificial Sequence
  Synthetic
ccagaccggcugcgagcaaaaca

SEQ ID NO: 39082 - RNA, 24 nt, Artificial Sequence
  Synthetic
uccagaccggcugcgagcaaaaca

SEQ ID NO: 39083 - RNA, 18 nt, Artificial Sequence
  Synthetic
ggguugcgucagcaaaca

SEQ ID NO: 39084 - RNA, 19 nt, Artificial Sequence
  Synthetic
gggguugcgucagcaaaca

SEQ ID NO: 39085 - RNA, 20 nt, Artificial Sequence
  Synthetic
ggggguugcgucagcaaaca

SEQ ID NO: 39086 - RNA, 21 nt, Artificial Sequence
  Synthetic
uggggguugcgucagcaaaca

SEQ ID NO: 39087 - RNA, 22 nt, Artificial Sequence
  Synthetic
guggggguugcgucagcaaaca

SEQ ID NO: 39088 - RNA, 23 nt, Artificial Sequence
  Synthetic
aguggggguugcgucagcaaaca

SEQ ID NO: 39089 - RNA, 24 nt, Artificial Sequence
  Synthetic
caguggggguugcgucagcaaaca

SEQ ID NO: 39090 - RNA, 18 nt, Artificial Sequence
  Synthetic
gcugacgggacguaaaca

SEQ ID NO: 39091 - RNA, 19 nt, Artificial Sequence
  Synthetic
cgcugacgggacguaaaca

SEQ ID NO: 39092 - RNA, 20 nt, Artificial Sequence
  Synthetic
gcgcugacgggacguaaaca

SEQ ID NO: 39093 - RNA, 18 nt, Artificial Sequence
  Synthetic
aguccagaagaaccaaca

SEQ ID NO: 39094 - RNA, 19 nt, Artificial Sequence
  Synthetic
uaguccagaagaaccaaca

SEQ ID NO: 39095 - RNA, 20 nt, Artificial Sequence
  Synthetic
auaguccagaagaaccaaca

SEQ ID NO: 39096 - RNA, 21 nt, Artificial Sequence
  Synthetic
gauaguccagaagaaccaaca

SEQ ID NO: 39097 - RNA, 22 nt, Artificial Sequence
  Synthetic
ugauaguccagaagaaccaaca

SEQ ID NO: 39098 - RNA, 23 nt, Artificial Sequence
  Synthetic
uugauaguccagaagaaccaaca

SEQ ID NO: 39099 - RNA, 24 nt, Artificial Sequence
  Synthetic
cuugauaguccagaagaaccaaca

SEQ ID NO: 39100 - RNA, 18 nt, Artificial Sequence
  Synthetic
agguuuuguacagcaaca

SEQ ID NO: 39101 - RNA, 19 nt, Artificial Sequence
  Synthetic
aagguuuuguacagcaaca

SEQ ID NO: 39102 - RNA, 20 nt, Artificial Sequence
  Synthetic
gaagguuuuguacagcaaca

SEQ ID NO: 39103 - RNA, 21 nt, Artificial Sequence
  Synthetic
cgaagguuuuguacagcaaca

SEQ ID NO: 39104 - RNA, 22 nt, Artificial Sequence
  Synthetic
ccgaagguuuuguacagcaaca

SEQ ID NO: 39105 - RNA, 23 nt, Artificial Sequence
  Synthetic
uccgaagguuuuguacagcaaca

SEQ ID NO: 39106 - RNA, 24 nt, Artificial Sequence
  Synthetic
guccgaagguuuuguacagcaaca

SEQ ID NO: 39107 - RNA, 18 nt, Artificial Sequence
  Synthetic
ugaggauucuugucaaca

SEQ ID NO: 39108 - RNA, 19 nt, Artificial Sequence
  Synthetic
gugaggauucuugucaaca

SEQ ID NO: 39109 - RNA, 20 nt, Artificial Sequence
  Synthetic
ugugaggauucuugucaaca

SEQ ID NO: 39110 - RNA, 21 nt, Artificial Sequence
  Synthetic
uugugaggauucuugucaaca

SEQ ID NO: 39111 - RNA, 22 nt, Artificial Sequence
  Synthetic
auugugaggauucuugucaaca

SEQ ID NO: 39112 - RNA, 23 nt, Artificial Sequence
  Synthetic
uauugugaggauucuugucaaca

SEQ ID NO: 39113 - RNA, 24 nt, Artificial Sequence
  Synthetic
guauugugaggauucuugucaaca

SEQ ID NO: 39114 - RNA, 18 nt, Artificial Sequence
  Synthetic
ucgagaagaucacgaaca

SEQ ID NO: 39115 - RNA, 19 nt, Artificial Sequence
  Synthetic
gucgagaagaucacgaaca

SEQ ID NO: 39116 - RNA, 20 nt, Artificial Sequence
  Synthetic
ugucgagaagaucacgaaca

SEQ ID NO: 39117 - RNA, 18 nt, Artificial Sequence
  Synthetic
ggcagaugagaaggaaca

SEQ ID NO: 39118 - RNA, 19 nt, Artificial Sequence
  Synthetic
cggcagaugagaaggaaca

SEQ ID NO: 39119 - RNA, 20 nt, Artificial Sequence
  Synthetic
ccggcagaugagaaggaaca

SEQ ID NO: 39120 - RNA, 21 nt, Artificial Sequence
  Synthetic
uccggcagaugagaaggaaca

SEQ ID NO: 39121 - RNA, 22 nt, Artificial Sequence
  Synthetic
guccggcagaugagaaggaaca

SEQ ID NO: 39122 - RNA, 23 nt, Artificial Sequence
  Synthetic
gguccggcagaugagaaggaaca

SEQ ID NO: 39123 - RNA, 24 nt, Artificial Sequence
  Synthetic
cgguccggcagaugagaaggaaca

SEQ ID NO: 39124 - RNA, 18 nt, Artificial Sequence
  Synthetic
ccuacgaaccacugaaca

SEQ ID NO: 39125 - RNA, 19 nt, Artificial Sequence
  Synthetic
cccuacgaaccacugaaca

SEQ ID NO: 39126 - RNA, 20 nt, Artificial Sequence
  Synthetic
gcccuacgaaccacugaaca

SEQ ID NO: 39127 - RNA, 18 nt, Artificial Sequence
  Synthetic
agcuuggaggcuugaaca

SEQ ID NO: 39128 - RNA, 19 nt, Artificial Sequence
  Synthetic
cagcuuggaggcuugaaca

SEQ ID NO: 39129 - RNA, 20 nt, Artificial Sequence
  Synthetic
acagcuuggaggcuugaaca

SEQ ID NO: 39130 - RNA, 21 nt, Artificial Sequence
  Synthetic
cacagcuuggaggcuugaaca

SEQ ID NO: 39131 - RNA, 22 nt, Artificial Sequence
  Synthetic
gcacagcuuggaggcuugaaca

SEQ ID NO: 39132 - RNA, 23 nt, Artificial Sequence
  Synthetic
ggcacagcuuggaggcuugaaca

SEQ ID NO: 39133 - RNA, 24 nt, Artificial Sequence
  Synthetic
aggcacagcuuggaggcuugaaca

SEQ ID NO: 39134 - RNA, 18 nt, Artificial Sequence
  Synthetic
guccaaggaauacuaaca

SEQ ID NO: 39135 - RNA, 19 nt, Artificial Sequence
  Synthetic
aguccaaggaauacuaaca

SEQ ID NO: 39136 - RNA, 20 nt, Artificial Sequence
  Synthetic
gaguccaaggaauacuaaca

SEQ ID NO: 39137 - RNA, 21 nt, Artificial Sequence
  Synthetic
ugaguccaaggaauacuaaca

SEQ ID NO: 39138 - RNA, 22 nt, Artificial Sequence
  Synthetic
gugaguccaaggaauacuaaca

SEQ ID NO: 39139 - RNA, 23 nt, Artificial Sequence
  Synthetic
ugugaguccaaggaauacuaaca

SEQ ID NO: 39140 - RNA, 24 nt, Artificial Sequence
  Synthetic
uugugaguccaaggaauacuaaca

SEQ ID NO: 39141 - RNA, 18 nt, Artificial Sequence
  Synthetic
uaaaacgccgcagacaca

SEQ ID NO: 39142 - RNA, 19 nt, Artificial Sequence
  Synthetic
auaaaacgccgcagacaca

SEQ ID NO: 39143 - RNA, 20 nt, Artificial Sequence
  Synthetic
gauaaaacgccgcagacaca

SEQ ID NO: 39144 - RNA, 21 nt, Artificial Sequence
  Synthetic
ugauaaaacgccgcagacaca

SEQ ID NO: 39145 - RNA, 22 nt, Artificial Sequence
  Synthetic
augauaaaacgccgcagacaca

SEQ ID NO: 39146 - RNA, 23 nt, Artificial Sequence
  Synthetic
uaugauaaaacgccgcagacaca

SEQ ID NO: 39147 - RNA, 24 nt, Artificial Sequence
  Synthetic
auaugauaaaacgccgcagacaca

SEQ ID NO: 39148 - RNA, 18 nt, Artificial Sequence
  Synthetic
gauguauacccaaagaca

SEQ ID NO: 39149 - RNA, 19 nt, Artificial Sequence
  Synthetic
agauguauacccaaagaca

SEQ ID NO: 39150 - RNA, 20 nt, Artificial Sequence
  Synthetic
uagauguauacccaaagaca

SEQ ID NO: 39151 - RNA, 21 nt, Artificial Sequence
  Synthetic
uuagauguauacccaaagaca

SEQ ID NO: 39152 - RNA, 22 nt, Artificial Sequence
  Synthetic
uuuagauguauacccaaagaca

SEQ ID NO: 39153 - RNA, 23 nt, Artificial Sequence
  Synthetic
guuuagauguauacccaaagaca

SEQ ID NO: 39154 - RNA, 24 nt, Artificial Sequence
  Synthetic
gguuuagauguauacccaaagaca

SEQ ID NO: 39155 - RNA, 18 nt, Artificial Sequence
  Synthetic
auagcugaaagccagaca

SEQ ID NO: 39156 - RNA, 19 nt, Artificial Sequence
  Synthetic
uauagcugaaagccagaca

SEQ ID NO: 39157 - RNA, 20 nt, Artificial Sequence
  Synthetic
auauagcugaaagccagaca

SEQ ID NO: 39158 - RNA, 21 nt, Artificial Sequence
  Synthetic
  misc_feature (1)..(1): n is a, c, g, or u
nauauagcugaaagccagaca

SEQ ID NO: 39159 - RNA, 22 nt, Artificial Sequence
  Synthetic
  misc_feature (2)..(2): n is a, c, g, or u
cnauauagcugaaagccagaca

SEQ ID NO: 39160 - RNA, 23 nt, Artificial Sequence
  Synthetic
  misc_feature (3)..(3): n is a, c, g, or u
ucnauauagcugaaagccagaca

SEQ ID NO: 39161 - RNA, 24 nt, Artificial Sequence
  Synthetic
  misc_feature (4)..(4): n is a, c, g, or u
aucnauauagcugaaagccagaca

SEQ ID NO: 39162 - RNA, 18 nt, Artificial Sequence
  Synthetic
cgaauuuaggccaggaca

SEQ ID NO: 39163 - RNA, 19 nt, Artificial Sequence
  Synthetic
gcgaauuuaggccaggaca

SEQ ID NO: 39164 - RNA, 20 nt, Artificial Sequence
  Synthetic
ugcgaauuuaggccaggaca

SEQ ID NO: 39165 - RNA, 21 nt, Artificial Sequence
  Synthetic
cugcgaauuuaggccaggaca

SEQ ID NO: 39166 - RNA, 22 nt, Artificial Sequence
  Synthetic
acugcgaauuuaggccaggaca

SEQ ID NO: 39167 - RNA, 23 nt, Artificial Sequence
  Synthetic
gacugcgaauuuaggccaggaca

SEQ ID NO: 39168 - RNA, 24 nt, Artificial Sequence
  Synthetic
ggacugcgaauuuaggccaggaca

SEQ ID NO: 39169 - RNA, 18 nt, Artificial Sequence
  Synthetic
uccuggaaucagaggaca

SEQ ID NO: 39170 - RNA, 19 nt, Artificial Sequence
  Synthetic
auccuggaaucagaggaca

SEQ ID NO: 39171 - RNA, 20 nt, Artificial Sequence
  Synthetic
gauccuggaaucagaggaca

SEQ ID NO: 39172 - RNA, 21 nt, Artificial Sequence
  Synthetic
ggauccuggaaucagaggaca

SEQ ID NO: 39173 - RNA, 22 nt, Artificial Sequence
  Synthetic
aggauccuggaaucagaggaca

SEQ ID NO: 39174 - RNA, 23 nt, Artificial Sequence
  Synthetic
gaggauccuggaaucagaggaca

SEQ ID NO: 39175 - RNA, 24 nt, Artificial Sequence
  Synthetic
cgaggauccuggaaucagaggaca

SEQ ID NO: 39176 - RNA, 18 nt, Artificial Sequence
  Synthetic
guucauguauuguuuaca

SEQ ID NO: 39177 - RNA, 19 nt, Artificial Sequence
  Synthetic
gguucauguauuguuuaca

SEQ ID NO: 39178 - RNA, 20 nt, Artificial Sequence
  Synthetic
agguucauguauuguuuaca

SEQ ID NO: 39179 - RNA, 21 nt, Artificial Sequence
  Synthetic
aagguucauguauuguuuaca

SEQ ID NO: 39180 - RNA, 22 nt, Artificial Sequence
  Synthetic
aaagguucauguauuguuuaca

SEQ ID NO: 39181 - RNA, 23 nt, Artificial Sequence
  Synthetic
uaaagguucauguauuguuuaca

SEQ ID NO: 39182 - RNA, 24 nt, Artificial Sequence
  Synthetic
guaaagguucauguauuguuuaca

SEQ ID NO: 39183 - RNA, 18 nt, Artificial Sequence
  Synthetic
auggccaagccccaacca

SEQ ID NO: 39184 - RNA, 19 nt, Artificial Sequence
  Synthetic
gauggccaagccccaacca

SEQ ID NO: 39185 - RNA, 20 nt, Artificial Sequence
  Synthetic
cgauggccaagccccaacca

SEQ ID NO: 39186 - RNA, 21 nt, Artificial Sequence
  Synthetic
ccgauggccaagccccaacca

SEQ ID NO: 39187 - RNA, 22 nt, Artificial Sequence
  Synthetic
  misc_feature (1)..(1): n is a, c, g, or u
nccgauggccaagccccaacca

SEQ ID NO: 39188 - RNA, 23 nt, Artificial Sequence
  Synthetic
  misc_feature (2)..(2): n is a, c, g, or u
gnccgauggccaagccccaacca

SEQ ID NO: 39189 - RNA, 24 nt, Artificial Sequence
  Synthetic
  misc_feature (3)..(3): n is a, c, g, or u
ugnccgauggccaagccccaacca

SEQ ID NO: 39190 - RNA, 18 nt, Artificial Sequence
  Synthetic
gauaguccagaagaacca

SEQ ID NO: 39191 - RNA, 19 nt, Artificial Sequence
  Synthetic
ugauaguccagaagaacca

SEQ ID NO: 39192 - RNA, 20 nt, Artificial Sequence
  Synthetic
uugauaguccagaagaacca

SEQ ID NO: 39193 - RNA, 21 nt, Artificial Sequence
  Synthetic
cuugauaguccagaagaacca

SEQ ID NO: 39194 - RNA, 22 nt, Artificial Sequence
  Synthetic
ccuugauaguccagaagaacca

SEQ ID NO: 39195 - RNA, 23 nt, Artificial Sequence
  Synthetic
accuugauaguccagaagaacca

SEQ ID NO: 39196 - RNA, 24 nt, Artificial Sequence
  Synthetic
uaccuugauaguccagaagaacca

SEQ ID NO: 39197 - RNA, 18 nt, Artificial Sequence
  Synthetic
ggaaagcccuacgaacca

SEQ ID NO: 39198 - RNA, 19 nt, Artificial Sequence
  Synthetic
gggaaagcccuacgaacca

SEQ ID NO: 39199 - RNA, 20 nt, Artificial Sequence
  Synthetic
ggggaaagcccuacgaacca

SEQ ID NO: 39200 - RNA, 21 nt, Artificial Sequence
  Synthetic
gggggaaagcccuacgaacca

SEQ ID NO: 39201 - RNA, 22 nt, Artificial Sequence
  Synthetic
ugggggaaagcccuacgaacca

SEQ ID NO: 39202 - RNA, 23 nt, Artificial Sequence
  Synthetic
gugggggaaagcccuacgaacca

SEQ ID NO: 39203 - RNA, 24 nt, Artificial Sequence
  Synthetic
agugggggaaagcccuacgaacca

SEQ ID NO: 39204 - RNA, 18 nt, Artificial Sequence
  Synthetic
ccugaacuggagccacca

SEQ ID NO: 39205 - RNA, 19 nt, Artificial Sequence
  Synthetic
cccugaacuggagccacca

SEQ ID NO: 39206 - RNA, 20 nt, Artificial Sequence
  Synthetic
ucccugaacuggagccacca

SEQ ID NO: 39207 - RNA, 21 nt, Artificial Sequence
  Synthetic
aucccugaacuggagccacca

SEQ ID NO: 39208 - RNA, 22 nt, Artificial Sequence
  Synthetic
uaucccugaacuggagccacca

SEQ ID NO: 39209 - RNA, 23 nt, Artificial Sequence
  Synthetic
cuaucccugaacuggagccacca

SEQ ID NO: 39210 - RNA, 24 nt, Artificial Sequence
  Synthetic
acuaucccugaacuggagccacca

SEQ ID NO: 39211 - RNA, 18 nt, Artificial Sequence
  Synthetic
aaggagcagcgaaaccca

SEQ ID NO: 39212 - RNA, 19 nt, Artificial Sequence
  Synthetic
aaaggagcagcgaaaccca

SEQ ID NO: 39213 - RNA, 20 nt, Artificial Sequence
  Synthetic
aaaaggagcagcgaaaccca

SEQ ID NO: 39214 - RNA, 21 nt, Artificial Sequence
  Synthetic
uaaaaggagcagcgaaaccca

SEQ ID NO: 39215 - RNA, 22 nt, Artificial Sequence
  Synthetic
guaaaaggagcagcgaaaccca

SEQ ID NO: 39216 - RNA, 23 nt, Artificial Sequence
  Synthetic
gguaaaaggagcagcgaaaccca

SEQ ID NO: 39217 - RNA, 24 nt, Artificial Sequence
  Synthetic
ggguaaaaggagcagcgaaaccca

SEQ ID NO: 39218 - RNA, 18 nt, Artificial Sequence
  Synthetic
cuuccaaauuauuaccca

SEQ ID NO: 39219 - RNA, 19 nt, Artificial Sequence
  Synthetic
ucuuccaaauuauuaccca

SEQ ID NO: 39220 - RNA, 20 nt, Artificial Sequence
  Synthetic
aucuuccaaauuauuaccca

SEQ ID NO: 39221 - RNA, 21 nt, Artificial Sequence
  Synthetic
gaucuuccaaauuauuaccca

SEQ ID NO: 39222 - RNA, 22 nt, Artificial Sequence
  Synthetic
ggaucuuccaaauuauuaccca

SEQ ID NO: 39223 - RNA, 23 nt, Artificial Sequence
  Synthetic
uggaucuuccaaauuauuaccca

SEQ ID NO: 39224 - RNA, 24 nt, Artificial Sequence
  Synthetic
cuggaucuuccaaauuauuaccca

SEQ ID NO: 39225 - RNA, 18 nt, Artificial Sequence
  Synthetic
acugagggcuccacccca

SEQ ID NO: 39226 - RNA, 19 nt, Artificial Sequence
  Synthetic
gacugagggcuccacccca

SEQ ID NO: 39227 - RNA, 20 nt, Artificial Sequence
  Synthetic
agacugagggcuccacccca

SEQ ID NO: 39228 - RNA, 21 nt, Artificial Sequence
  Synthetic
gagacugagggcuccacccca

SEQ ID NO: 39229 - RNA, 22 nt, Artificial Sequence
  Synthetic
ugagacugagggcuccacccca

SEQ ID NO: 39230 - RNA, 23 nt, Artificial Sequence
  Synthetic
cugagacugagggcuccacccca

SEQ ID NO: 39231 - RNA, 24 nt, Artificial Sequence
  Synthetic
ccugagacugagggcuccacccca

SEQ ID NO: 39232 - RNA, 18 nt, Artificial Sequence
  Synthetic
gggggcgacagagcccca

SEQ ID NO: 39233 - RNA, 19 nt, Artificial Sequence
  Synthetic
agggggcgacagagcccca

SEQ ID NO: 39234 - RNA, 20 nt, Artificial Sequence
  Synthetic
aagggggcgacagagcccca

SEQ ID NO: 39235 - RNA, 21 nt, Artificial Sequence
  Synthetic
gaagggggcgacagagcccca

SEQ ID NO: 39236 - RNA, 22 nt, Artificial Sequence
  Synthetic
agaagggggcgacagagcccca

SEQ ID NO: 39237 - RNA, 23 nt, Artificial Sequence
  Synthetic
gagaagggggcgacagagcccca

SEQ ID NO: 39238 - RNA, 24 nt, Artificial Sequence
  Synthetic
ggagaagggggcgacagagcccca

SEQ ID NO: 39239 - RNA, 18 nt, Artificial Sequence
  Synthetic
ggaaagguucuuucccca

SEQ ID NO: 39240 - RNA, 19 nt, Artificial Sequence
  Synthetic
uggaaagguucuuucccca

SEQ ID NO: 39241 - RNA, 20 nt, Artificial Sequence
  Synthetic
guggaaagguucuuucccca

SEQ ID NO: 39242 - RNA, 21 nt, Artificial Sequence
  Synthetic
gguggaaagguucuuucccca

SEQ ID NO: 39243 - RNA, 22 nt, Artificial Sequence
  Synthetic
ugguggaaagguucuuucccca

SEQ ID NO: 39244 - RNA, 23 nt, Artificial Sequence
  Synthetic
cugguggaaagguucuuucccca

SEQ ID NO: 39245 - RNA, 24 nt, Artificial Sequence
  Synthetic
gcugguggaaagguucuuucccca

SEQ ID NO: 39246 - RNA, 18 nt, Artificial Sequence
  Synthetic
auugccuaauucuuccca

SEQ ID NO: 39247 - RNA, 19 nt, Artificial Sequence
  Synthetic
cauugccuaauucuuccca

SEQ ID NO: 39248 - RNA, 20 nt, Artificial Sequence
  Synthetic
ucauugccuaauucuuccca

SEQ ID NO: 39249 - RNA, 21 nt, Artificial Sequence
  Synthetic
cucauugccuaauucuuccca

SEQ ID NO: 39250 - RNA, 22 nt, Artificial Sequence
  Synthetic
acucauugccuaauucuuccca

SEQ ID NO: 39251 - RNA, 23 nt, Artificial Sequence
  Synthetic
gacucauugccuaauucuuccca

SEQ ID NO: 39252 - RNA, 24 nt, Artificial Sequence
  Synthetic
ggacucauugccuaauucuuccca

SEQ ID NO: 39253 - RNA, 18 nt, Artificial Sequence
  Synthetic
auccaugcccuaaagcca

SEQ ID NO: 39254 - RNA, 19 nt, Artificial Sequence
  Synthetic
uauccaugcccuaaagcca

SEQ ID NO: 39255 - RNA, 20 nt, Artificial Sequence
  Synthetic
cuauccaugcccuaaagcca

SEQ ID NO: 39256 - RNA, 21 nt, Artificial Sequence
  Synthetic
ucuauccaugcccuaaagcca

SEQ ID NO: 39257 - RNA, 22 nt, Artificial Sequence
  Synthetic
uucuauccaugcccuaaagcca

SEQ ID NO: 39258 - RNA, 23 nt, Artificial Sequence
  Synthetic
guucuauccaugcccuaaagcca

SEQ ID NO: 39259 - RNA, 24 nt, Artificial Sequence
  Synthetic
uguucuauccaugcccuaaagcca

SEQ ID NO: 39260 - RNA, 18 nt, Artificial Sequence
  Synthetic
gggucaaugucuaagcca

SEQ ID NO: 39261 - RNA, 19 nt, Artificial Sequence
  Synthetic
agggucaaugucuaagcca

SEQ ID NO: 39262 - RNA, 20 nt, Artificial Sequence
  Synthetic
aagggucaaugucuaagcca

SEQ ID NO: 39263 - RNA, 21 nt, Artificial Sequence
  Synthetic
uaagggucaaugucuaagcca

SEQ ID NO: 39264 - RNA, 22 nt, Artificial Sequence
  Synthetic
auaagggucaaugucuaagcca

SEQ ID NO: 39265 - RNA, 23 nt, Artificial Sequence
  Synthetic
uauaagggucaaugucuaagcca

SEQ ID NO: 39266 - RNA, 24 nt, Artificial Sequence
  Synthetic
uuauaagggucaaugucuaagcca

SEQ ID NO: 39267 - RNA, 18 nt, Artificial Sequence
  Synthetic
agcacagccuagcagcca

SEQ ID NO: 39268 - RNA, 19 nt, Artificial Sequence
  Synthetic
cagcacagccuagcagcca

SEQ ID NO: 39269 - RNA, 20 nt, Artificial Sequence
  Synthetic
gcagcacagccuagcagcca

SEQ ID NO: 39270 - RNA, 21 nt, Artificial Sequence
  Synthetic
ggcagcacagccuagcagcca

SEQ ID NO: 39271 - RNA, 22 nt, Artificial Sequence
  Synthetic
uggcagcacagccuagcagcca

SEQ ID NO: 39272 - RNA, 23 nt, Artificial Sequence
  Synthetic
uuggcagcacagccuagcagcca

SEQ ID NO: 39273 - RNA, 24 nt, Artificial Sequence
  Synthetic
guuggcagcacagccuagcagcca

SEQ ID NO: 39274 - RNA, 18 nt, Artificial Sequence
  Synthetic
ggaucggcagaggagcca

SEQ ID NO: 39275 - RNA, 19 nt, Artificial Sequence
  Synthetic
uggaucggcagaggagcca

SEQ ID NO: 39276 - RNA, 20 nt, Artificial Sequence
  Synthetic
auggaucggcagaggagcca

SEQ ID NO: 39277 - RNA, 21 nt, Artificial Sequence
  Synthetic
uauggaucggcagaggagcca

SEQ ID NO: 39278 - RNA, 22 nt, Artificial Sequence
  Synthetic
guauggaucggcagaggagcca

SEQ ID NO: 39279 - RNA, 23 nt, Artificial Sequence
  Synthetic
aguauggaucggcagaggagcca

SEQ ID NO: 39280 - RNA, 24 nt, Artificial Sequence
  Synthetic
caguauggaucggcagaggagcca

SEQ ID NO: 39281 - RNA, 18 nt, Artificial Sequence
  Synthetic
cacuaguaaacugagcca

SEQ ID NO: 39282 - RNA, 19 nt, Artificial Sequence
  Synthetic
gcacuaguaaacugagcca

SEQ ID NO: 39283 - RNA, 20 nt, Artificial Sequence
  Synthetic
ggcacuaguaaacugagcca

SEQ ID NO: 39284 - RNA, 21 nt, Artificial Sequence
  Synthetic
uggcacuaguaaacugagcca

SEQ ID NO: 39285 - RNA, 22 nt, Artificial Sequence
  Synthetic
auggcacuaguaaacugagcca

SEQ ID NO: 39286 - RNA, 23 nt, Artificial Sequence
  Synthetic
aauggcacuaguaaacugagcca

SEQ ID NO: 39287 - RNA, 24 nt, Artificial Sequence
  Synthetic
aaauggcacuaguaaacugagcca

SEQ ID NO: 39288 - RNA, 18 nt, Artificial Sequence
  Synthetic
ucuaagccaaaaaggcca

SEQ ID NO: 39289 - RNA, 19 nt, Artificial Sequence
  Synthetic
gucuaagccaaaaaggcca

SEQ ID NO: 39290 - RNA, 20 nt, Artificial Sequence
  Synthetic
ugucuaagccaaaaaggcca

SEQ ID NO: 39291 - RNA, 21 nt, Artificial Sequence
  Synthetic
augucuaagccaaaaaggcca

SEQ ID NO: 39292 - RNA, 22 nt, Artificial Sequence
  Synthetic
aaugucuaagccaaaaaggcca

SEQ ID NO: 39293 - RNA, 23 nt, Artificial Sequence
  Synthetic
caaugucuaagccaaaaaggcca

SEQ ID NO: 39294 - RNA, 24 nt, Artificial Sequence
  Synthetic
ucaaugucuaagccaaaaaggcca

SEQ ID NO: 39295 - RNA, 18 nt, Artificial Sequence
  Synthetic
aaaagaaggaguuugcca

SEQ ID NO: 39296 - RNA, 19 nt, Artificial Sequence
  Synthetic
gaaaagaaggaguuugcca

SEQ ID NO: 39297 - RNA, 20 nt, Artificial Sequence
  Synthetic
ggaaaagaaggaguuugcca

SEQ ID NO: 39298 - RNA, 21 nt, Artificial Sequence
  Synthetic
uggaaaagaaggaguuugcca

SEQ ID NO: 39299 - RNA, 22 nt, Artificial Sequence
  Synthetic
uuggaaaagaaggaguuugcca

SEQ ID NO: 39300 - RNA, 23 nt, Artificial Sequence
  Synthetic
uuuggaaaagaaggaguuugcca

SEQ ID NO: 39301 - RNA, 24 nt, Artificial Sequence
  Synthetic
auuuggaaaagaaggaguuugcca

SEQ ID NO: 39302 - RNA, 18 nt, Artificial Sequence
  Synthetic
cgucccgcgaaggaucca

SEQ ID NO: 39303 - RNA, 19 nt, Artificial Sequence
  Synthetic
acgucccgcgaaggaucca

SEQ ID NO: 39304 - RNA, 20 nt, Artificial Sequence
  Synthetic
gacgucccgcgaaggaucca

SEQ ID NO: 39305 - RNA, 18 nt, Artificial Sequence
  Synthetic
gugcgaauccacacucca

SEQ ID NO: 39306 - RNA, 19 nt, Artificial Sequence
  Synthetic
agugcgaauccacacucca

SEQ ID NO: 39307 - RNA, 20 nt, Artificial Sequence
  Synthetic
gagugcgaauccacacucca

SEQ ID NO: 39308 - RNA, 21 nt, Artificial Sequence
  Synthetic
ggagugcgaauccacacucca

SEQ ID NO: 39309 - RNA, 22 nt, Artificial Sequence
  Synthetic
aggagugcgaauccacacucca

SEQ ID NO: 39310 - RNA, 23 nt, Artificial Sequence
  Synthetic
gaggagugcgaauccacacucca

SEQ ID NO: 39311 - RNA, 24 nt, Artificial Sequence
  Synthetic
ggaggagugcgaauccacacucca

SEQ ID NO: 39312 - RNA, 18 nt, Artificial Sequence
  Synthetic
acauaccuugauagucca

SEQ ID NO: 39313 - RNA, 19 nt, Artificial Sequence
  Synthetic
aacauaccuugauagucca

SEQ ID NO: 39314 - RNA, 20 nt, Artificial Sequence
  Synthetic
caacauaccuugauagucca

SEQ ID NO: 39315 - RNA, 21 nt, Artificial Sequence
  Synthetic
gcaacauaccuugauagucca

SEQ ID NO: 39316 - RNA, 22 nt, Artificial Sequence
  Synthetic
ggcaacauaccuugauagucca

SEQ ID NO: 39317 - RNA, 23 nt, Artificial Sequence
  Synthetic
gggcaacauaccuugauagucca

SEQ ID NO: 39318 - RNA, 24 nt, Artificial Sequence
  Synthetic
cgggcaacauaccuugauagucca

SEQ ID NO: 39319 - RNA, 18 nt, Artificial Sequence
  Synthetic
cucgagagggaccgucca

SEQ ID NO: 39320 - RNA, 19 nt, Artificial Sequence
  Synthetic
acucgagagggaccgucca

SEQ ID NO: 39321 - RNA, 20 nt, Artificial Sequence
  Synthetic
cacucgagagggaccgucca

SEQ ID NO: 39322 - RNA, 18 nt, Artificial Sequence
  Synthetic
uguucauggcgguuucca

SEQ ID NO: 39323 - RNA, 19 nt, Artificial Sequence
  Synthetic
guguucauggcgguuucca

SEQ ID NO: 39324 - RNA, 20 nt, Artificial Sequence
  Synthetic
gguguucauggcgguuucca

SEQ ID NO: 39325 - RNA, 21 nt, Artificial Sequence
  Synthetic
agguguucauggcgguuucca

SEQ ID NO: 39326 - RNA, 22 nt, Artificial Sequence
  Synthetic
gagguguucauggcgguuucca

SEQ ID NO: 39327 - RNA, 23 nt, Artificial Sequence
  Synthetic
agagguguucauggcgguuucca

SEQ ID NO: 39328 - RNA, 24 nt, Artificial Sequence
  Synthetic
gagagguguucauggcgguuucca

SEQ ID NO: 39329 - RNA, 18 nt, Artificial Sequence
  Synthetic
cugcgagcaaaacaagca

SEQ ID NO: 39330 - RNA, 19 nt, Artificial Sequence
  Synthetic
gcugcgagcaaaacaagca

SEQ ID NO: 39331 - RNA, 20 nt, Artificial Sequence
  Synthetic
ggcugcgagcaaaacaagca

SEQ ID NO: 39332 - RNA, 21 nt, Artificial Sequence
  Synthetic
cggcugcgagcaaaacaagca

SEQ ID NO: 39333 - RNA, 22 nt, Artificial Sequence
  Synthetic
ccggcugcgagcaaaacaagca

SEQ ID NO: 39334 - RNA, 23 nt, Artificial Sequence
  Synthetic
accggcugcgagcaaaacaagca

SEQ ID NO: 39335 - RNA, 24 nt, Artificial Sequence
  Synthetic
gaccggcugcgagcaaaacaagca

SEQ ID NO: 39336 - RNA, 18 nt, Artificial Sequence
  Synthetic
uuugguggucuauaagca

SEQ ID NO: 39337 - RNA, 19 nt, Artificial Sequence
  Synthetic
auuugguggucuauaagca

SEQ ID NO: 39338 - RNA, 20 nt, Artificial Sequence
  Synthetic
cauuugguggucuauaagca

SEQ ID NO: 39339 - RNA, 21 nt, Artificial Sequence
  Synthetic
gcauuugguggucuauaagca

SEQ ID NO: 39340 - RNA, 22 nt, Artificial Sequence
  Synthetic
ggcauuugguggucuauaagca

SEQ ID NO: 39341 - RNA, 23 nt, Artificial Sequence
  Synthetic
gggcauuugguggucuauaagca

SEQ ID NO: 39342 - RNA, 24 nt, Artificial Sequence
  Synthetic
ggggcauuugguggucuauaagca

SEQ ID NO: 39343 - RNA, 18 nt, Artificial Sequence
  Synthetic
cauuggguaaaaggagca

SEQ ID NO: 39344 - RNA, 19 nt, Artificial Sequence
  Synthetic
acauuggguaaaaggagca

SEQ ID NO: 39345 - RNA, 20 nt, Artificial Sequence
  Synthetic
cacauuggguaaaaggagca

SEQ ID NO: 39346 - RNA, 21 nt, Artificial Sequence
  Synthetic
ccacauuggguaaaaggagca

SEQ ID NO: 39347 - RNA, 22 nt, Artificial Sequence
  Synthetic
accacauuggguaaaaggagca

SEQ ID NO: 39348 - RNA, 23 nt, Artificial Sequence
  Synthetic
aaccacauuggguaaaaggagca

SEQ ID NO: 39349 - RNA, 24 nt, Artificial Sequence
  Synthetic
uaaccacauuggguaaaaggagca

SEQ ID NO: 39350 - RNA, 18 nt, Artificial Sequence
  Synthetic
agaagaugaggcauagca

SEQ ID NO: 39351 - RNA, 19 nt, Artificial Sequence
  Synthetic
aagaagaugaggcauagca

SEQ ID NO: 39352 - RNA, 20 nt, Artificial Sequence
  Synthetic
caagaagaugaggcauagca

SEQ ID NO: 39353 - RNA, 21 nt, Artificial Sequence
  Synthetic
acaagaagaugaggcauagca

SEQ ID NO: 39354 - RNA, 22 nt, Artificial Sequence
  Synthetic
aacaagaagaugaggcauagca

SEQ ID NO: 39355 - RNA, 23 nt, Artificial Sequence
  Synthetic
caacaagaagaugaggcauagca

SEQ ID NO: 39356 - RNA, 24 nt, Artificial Sequence
  Synthetic
ccaacaagaagaugaggcauagca

SEQ ID NO: 39357 - RNA, 18 nt, Artificial Sequence
  Synthetic
ccgggccguugccuagca

SEQ ID NO: 39358 - RNA, 19 nt, Artificial Sequence
  Synthetic
accgggccguugccuagca

SEQ ID NO: 39359 - RNA, 20 nt, Artificial Sequence
  Synthetic
gaccgggccguugccuagca

SEQ ID NO: 39360 - RNA, 21 nt, Artificial Sequence
  Synthetic
agaccgggccguugccuagca

SEQ ID NO: 39361 - RNA, 22 nt, Artificial Sequence
  Synthetic
cagaccgggccguugccuagca

SEQ ID NO: 39362 - RNA, 23 nt, Artificial Sequence
  Synthetic
acagaccgggccguugccuagca

SEQ ID NO: 39363 - RNA, 24 nt, Artificial Sequence
  Synthetic
cacagaccgggccguugccuagca

SEQ ID NO: 39364 - RNA, 18 nt, Artificial Sequence
  Synthetic
uacaugcauauaaaggca

SEQ ID NO: 39365 - RNA, 19 nt, Artificial Sequence
  Synthetic
auacaugcauauaaaggca

SEQ ID NO: 39366 - RNA, 20 nt, Artificial Sequence
  Synthetic
uauacaugcauauaaaggca

SEQ ID NO: 39367 - RNA, 21 nt, Artificial Sequence
  Synthetic
guauacaugcauauaaaggca

SEQ ID NO: 39368 - RNA, 22 nt, Artificial Sequence
  Synthetic
uguauacaugcauauaaaggca

SEQ ID NO: 39369 - RNA, 23 nt, Artificial Sequence
  Synthetic
uuguauacaugcauauaaaggca

SEQ ID NO: 39370 - RNA, 24 nt, Artificial Sequence
  Synthetic
cuuguauacaugcauauaaaggca

SEQ ID NO: 39371 - RNA, 18 nt, Artificial Sequence
  Synthetic
ugacgauugguggaggca

SEQ ID NO: 39372 - RNA, 19 nt, Artificial Sequence
  Synthetic
cugacgauugguggaggca

SEQ ID NO: 39373 - RNA, 20 nt, Artificial Sequence
  Synthetic
acugacgauugguggaggca

SEQ ID NO: 39374 - RNA, 21 nt, Artificial Sequence
  Synthetic
gacugacgauugguggaggca

SEQ ID NO: 39375 - RNA, 22 nt, Artificial Sequence
  Synthetic
ugacugacgauugguggaggca

SEQ ID NO: 39376 - RNA, 23 nt, Artificial Sequence
  Synthetic
cugacugacgauugguggaggca

SEQ ID NO: 39377 - RNA, 24 nt, Artificial Sequence
  Synthetic
ccugacugacgauugguggaggca

SEQ ID NO: 39378 - RNA, 18 nt, Artificial Sequence
  Synthetic
uggucggcaggaacggca

SEQ ID NO: 39379 - RNA, 19 nt, Artificial Sequence
  Synthetic
guggucggcaggaacggca

SEQ ID NO: 39380 - RNA, 20 nt, Artificial Sequence
  Synthetic
cguggucggcaggaacggca

SEQ ID NO: 39381 - RNA, 21 nt, Artificial Sequence
  Synthetic
ccguggucggcaggaacggca

SEQ ID NO: 39382 - RNA, 22 nt, Artificial Sequence
  Synthetic
cccguggucggcaggaacggca

SEQ ID NO: 39383 - RNA, 23 nt, Artificial Sequence
  Synthetic
ccccguggucggcaggaacggca

SEQ ID NO: 39384 - RNA, 24 nt, Artificial Sequence
  Synthetic
gccccguggucggcaggaacggca

SEQ ID NO: 39385 - RNA, 18 nt, Artificial Sequence
  Synthetic
agugcacacgguccggca

SEQ ID NO: 39386 - RNA, 19 nt, Artificial Sequence
  Synthetic
aagugcacacgguccggca

SEQ ID NO: 39387 - RNA, 20 nt, Artificial Sequence
  Synthetic
gaagugcacacgguccggca

SEQ ID NO: 39388 - RNA, 18 nt, Artificial Sequence
  Synthetic
ccgcaguauggaucggca

SEQ ID NO: 39389 - RNA, 19 nt, Artificial Sequence
  Synthetic
uccgcaguauggaucggca

SEQ ID NO: 39390 - RNA, 20 nt, Artificial Sequence
  Synthetic
uuccgcaguauggaucggca

SEQ ID NO: 39391 - RNA, 21 nt, Artificial Sequence
  Synthetic
guuccgcaguauggaucggca

SEQ ID NO: 39392 - RNA, 22 nt, Artificial Sequence
  Synthetic
aguuccgcaguauggaucggca

SEQ ID NO: 39393 - RNA, 23 nt, Artificial Sequence
  Synthetic
gaguuccgcaguauggaucggca

SEQ ID NO: 39394 - RNA, 24 nt, Artificial Sequence
  Synthetic
ggaguuccgcaguauggaucggca

SEQ ID NO: 39395 - RNA, 18 nt, Artificial Sequence
  Synthetic
uuagcuuguauacaugca

SEQ ID NO: 39396 - RNA, 19 nt, Artificial Sequence
  Synthetic
cuuagcuuguauacaugca

SEQ ID NO: 39397 - RNA, 20 nt, Artificial Sequence
  Synthetic
gcuuagcuuguauacaugca

SEQ ID NO: 39398 - RNA, 21 nt, Artificial Sequence
  Synthetic
ugcuuagcuuguauacaugca

SEQ ID NO: 39399 - RNA, 22 nt, Artificial Sequence
  Synthetic
cugcuuagcuuguauacaugca

SEQ ID NO: 39400 - RNA, 23 nt, Artificial Sequence
  Synthetic
ccugcuuagcuuguauacaugca

SEQ ID NO: 39401 - RNA, 24 nt, Artificial Sequence
  Synthetic
gccugcuuagcuuguauacaugca

SEQ ID NO: 39402 - RNA, 18 nt, Artificial Sequence
  Synthetic
uuauaaugucuugaugca

SEQ ID NO: 39403 - RNA, 19 nt, Artificial Sequence
  Synthetic
guuauaaugucuugaugca

SEQ ID NO: 39404 - RNA, 20 nt, Artificial Sequence
  Synthetic
aguuauaaugucuugaugca

SEQ ID NO: 39405 - RNA, 21 nt, Artificial Sequence
  Synthetic
uaguuauaaugucuugaugca

SEQ ID NO: 39406 - RNA, 22 nt, Artificial Sequence
  Synthetic
uuaguuauaaugucuugaugca

SEQ ID NO: 39407 - RNA, 23 nt, Artificial Sequence
  Synthetic
uuuaguuauaaugucuugaugca

SEQ ID NO: 39408 - RNA, 24 nt, Artificial Sequence
  Synthetic
auuuaguuauaaugucuugaugca

SEQ ID NO: 39409 - RNA, 18 nt, Artificial Sequence
  Synthetic
ugacagacuuuccaauca

SEQ ID NO: 39410 - RNA, 19 nt, Artificial Sequence
  Synthetic
uugacagacuuuccaauca

SEQ ID NO: 39411 - RNA, 20 nt, Artificial Sequence
  Synthetic
guugacagacuuuccaauca

SEQ ID NO: 39412 - RNA, 21 nt, Artificial Sequence
  Synthetic
cguugacagacuuuccaauca

SEQ ID NO: 39413 - RNA, 22 nt, Artificial Sequence
  Synthetic
ucguugacagacuuuccaauca

SEQ ID NO: 39414 - RNA, 23 nt, Artificial Sequence
  Synthetic
uucguugacagacuuuccaauca

SEQ ID NO: 39415 - RNA, 24 nt, Artificial Sequence
  Synthetic
auucguugacagacuuuccaauca

SEQ ID NO: 39416 - RNA, 18 nt, Artificial Sequence
  Synthetic
ucgaggauccuggaauca

SEQ ID NO: 39417 - RNA, 19 nt, Artificial Sequence
  Synthetic
gucgaggauccuggaauca

SEQ ID NO: 39418 - RNA, 20 nt, Artificial Sequence
  Synthetic
ggucgaggauccuggaauca

SEQ ID NO: 39419 - RNA, 21 nt, Artificial Sequence
  Synthetic
uggucgaggauccuggaauca

SEQ ID NO: 39420 - RNA, 22 nt, Artificial Sequence
  Synthetic
guggucgaggauccuggaauca

SEQ ID NO: 39421 - RNA, 23 nt, Artificial Sequence
  Synthetic
gguggucgaggauccuggaauca

SEQ ID NO: 39422 - RNA, 24 nt, Artificial Sequence
  Synthetic
ugguggucgaggauccuggaauca

SEQ ID NO: 39423 - RNA, 18 nt, Artificial Sequence
  Synthetic
ugaggcgaacaaugauca

SEQ ID NO: 39424 - RNA, 19 nt, Artificial Sequence
  Synthetic
gugaggcgaacaaugauca

SEQ ID NO: 39425 - RNA, 20 nt, Artificial Sequence
  Synthetic
ggugaggcgaacaaugauca

SEQ ID NO: 39426 - RNA, 21 nt, Artificial Sequence
  Synthetic
uggugaggcgaacaaugauca

SEQ ID NO: 39427 - RNA, 22 nt, Artificial Sequence
  Synthetic
auggugaggcgaacaaugauca

SEQ ID NO: 39428 - RNA, 23 nt, Artificial Sequence
  Synthetic
uauggugaggcgaacaaugauca

SEQ ID NO: 39429 - RNA, 24 nt, Artificial Sequence
  Synthetic
guauggugaggcgaacaaugauca

SEQ ID NO: 39430 - RNA, 18 nt, Artificial Sequence
  Synthetic
ccuaauucuucccacuca

SEQ ID NO: 39431 - RNA, 19 nt, Artificial Sequence
  Synthetic
gccuaauucuucccacuca

SEQ ID NO: 39432 - RNA, 20 nt, Artificial Sequence
  Synthetic
ugccuaauucuucccacuca

SEQ ID NO: 39433 - RNA, 21 nt, Artificial Sequence
  Synthetic
uugccuaauucuucccacuca

SEQ ID NO: 39434 - RNA, 22 nt, Artificial Sequence
  Synthetic
auugccuaauucuucccacuca

SEQ ID NO: 39435 - RNA, 23 nt, Artificial Sequence
  Synthetic
cauugccuaauucuucccacuca

SEQ ID NO: 39436 - RNA, 24 nt, Artificial Sequence
  Synthetic
ucauugccuaauucuucccacuca

SEQ ID NO: 39437 - RNA, 18 nt, Artificial Sequence
  Synthetic
acagacgggaaaaaguca

SEQ ID NO: 39438 - RNA, 19 nt, Artificial Sequence
  Synthetic
aacagacgggaaaaaguca

SEQ ID NO: 39439 - RNA, 20 nt, Artificial Sequence
  Synthetic
gaacagacgggaaaaaguca

SEQ ID NO: 39440 - RNA, 21 nt, Artificial Sequence
  Synthetic
cgaacagacgggaaaaaguca

SEQ ID NO: 39441 - RNA, 22 nt, Artificial Sequence
  Synthetic
acgaacagacgggaaaaaguca

SEQ ID NO: 39442 - RNA, 23 nt, Artificial Sequence
  Synthetic
cacgaacagacgggaaaaaguca

SEQ ID NO: 39443 - RNA, 24 nt, Artificial Sequence
  Synthetic
ucacgaacagacgggaaaaaguca

SEQ ID NO: 39444 - RNA, 18 nt, Artificial Sequence
  Synthetic
ccaguggggguugcguca

SEQ ID NO: 39445 - RNA, 19 nt, Artificial Sequence
  Synthetic
accaguggggguugcguca

SEQ ID NO: 39446 - RNA, 20 nt, Artificial Sequence
  Synthetic
aaccaguggggguugcguca

SEQ ID NO: 39447 - RNA, 21 nt, Artificial Sequence
  Synthetic
caaccaguggggguugcguca

SEQ ID NO: 39448 - RNA, 22 nt, Artificial Sequence
  Synthetic
ccaaccaguggggguugcguca

SEQ ID NO: 39449 - RNA, 23 nt, Artificial Sequence
  Synthetic
cccaaccaguggggguugcguca

SEQ ID NO: 39450 - RNA, 24 nt, Artificial Sequence
  Synthetic
ccccaaccaguggggguugcguca

SEQ ID NO: 39451 - RNA, 18 nt, Artificial Sequence
  Synthetic
uugugaggauucuuguca

SEQ ID NO: 39452 - RNA, 19 nt, Artificial Sequence
  Synthetic
auugugaggauucuuguca

SEQ ID NO: 39453 - RNA, 20 nt, Artificial Sequence
  Synthetic
uauugugaggauucuuguca

SEQ ID NO: 39454 - RNA, 21 nt, Artificial Sequence
  Synthetic
guauugugaggauucuuguca

SEQ ID NO: 39455 - RNA, 22 nt, Artificial Sequence
  Synthetic
gguauugugaggauucuuguca

SEQ ID NO: 39456 - RNA, 23 nt, Artificial Sequence
  Synthetic
cgguauugugaggauucuuguca

SEQ ID NO: 39457 - RNA, 24 nt, Artificial Sequence
  Synthetic
gcgguauugugaggauucuuguca

SEQ ID NO: 39458 - RNA, 18 nt, Artificial Sequence
  Synthetic
uagauguauacccaaaga

SEQ ID NO: 39459 - RNA, 19 nt, Artificial Sequence
  Synthetic
uuagauguauacccaaaga

SEQ ID NO: 39460 - RNA, 20 nt, Artificial Sequence
  Synthetic
uuuagauguauacccaaaga

SEQ ID NO: 39461 - RNA, 21 nt, Artificial Sequence
  Synthetic
guuuagauguauacccaaaga

SEQ ID NO: 39462 - RNA, 22 nt, Artificial Sequence
  Synthetic
gguuuagauguauacccaaaga

SEQ ID NO: 39463 - RNA, 23 nt, Artificial Sequence
  Synthetic
  misc_feature (1)..(1): n is a, c, g, or u
ngguuuagauguauacccaaaga

SEQ ID NO: 39464 - RNA, 24 nt, Artificial Sequence
  Synthetic
  misc_feature (2)..(2): n is a, c, g, or u
angguuuagauguauacccaaaga

SEQ ID NO: 39465 - RNA, 18 nt, Artificial Sequence
  Synthetic
gaagaaccaacaagaaga

SEQ ID NO: 39466 - RNA, 19 nt, Artificial Sequence
  Synthetic
agaagaaccaacaagaaga

SEQ ID NO: 39467 - RNA, 20 nt, Artificial Sequence
  Synthetic
cagaagaaccaacaagaaga

SEQ ID NO: 39468 - RNA, 21 nt, Artificial Sequence
  Synthetic
ccagaagaaccaacaagaaga

SEQ ID NO: 39469 - RNA, 22 nt, Artificial Sequence
  Synthetic
uccagaagaaccaacaagaaga

SEQ ID NO: 39470 - RNA, 23 nt, Artificial Sequence
  Synthetic
guccagaagaaccaacaagaaga

SEQ ID NO: 39471 - RNA, 24 nt, Artificial Sequence
  Synthetic
aguccagaagaaccaacaagaaga

SEQ ID NO: 39472 - RNA, 18 nt, Artificial Sequence
  Synthetic
ccuugauaguccagaaga

SEQ ID NO: 39473 - RNA, 19 nt, Artificial Sequence
  Synthetic
accuugauaguccagaaga

SEQ ID NO: 39474 - RNA, 20 nt, Artificial Sequence
  Synthetic
uaccuugauaguccagaaga

SEQ ID NO: 39475 - RNA, 21 nt, Artificial Sequence
  Synthetic
auaccuugauaguccagaaga

SEQ ID NO: 39476 - RNA, 22 nt, Artificial Sequence
  Synthetic
cauaccuugauaguccagaaga

SEQ ID NO: 39477 - RNA, 23 nt, Artificial Sequence
  Synthetic
acauaccuugauaguccagaaga

SEQ ID NO: 39478 - RNA, 24 nt, Artificial Sequence
  Synthetic
aacauaccuugauaguccagaaga

SEQ ID NO: 39479 - RNA, 18 nt, Artificial Sequence
  Synthetic
ucucucccaaaaguaaga

SEQ ID NO: 39480 - RNA, 19 nt, Artificial Sequence
  Synthetic
uucucucccaaaaguaaga

SEQ ID NO: 39481 - RNA, 20 nt, Artificial Sequence
  Synthetic
uuucucucccaaaaguaaga

SEQ ID NO: 39482 - RNA, 21 nt, Artificial Sequence
  Synthetic
guuucucucccaaaaguaaga

SEQ ID NO: 39483 - RNA, 22 nt, Artificial Sequence
  Synthetic
gguuucucucccaaaaguaaga

SEQ ID NO: 39484 - RNA, 23 nt, Artificial Sequence
  Synthetic
cgguuucucucccaaaaguaaga

SEQ ID NO: 39485 - RNA, 24 nt, Artificial Sequence
  Synthetic
acgguuucucucccaaaaguaaga

SEQ ID NO: 39486 - RNA, 18 nt, Artificial Sequence
  Synthetic
gagaagaucacgaacaga

SEQ ID NO: 39487 - RNA, 19 nt, Artificial Sequence
  Synthetic
cgagaagaucacgaacaga

SEQ ID NO: 39488 - RNA, 20 nt, Artificial Sequence
  Synthetic
ucgagaagaucacgaacaga

SEQ ID NO: 39489 - RNA, 18 nt, Artificial Sequence
  Synthetic
cagaugagaaggaacaga

SEQ ID NO: 39490 - RNA, 19 nt, Artificial Sequence
  Synthetic
gcagaugagaaggaacaga

SEQ ID NO: 39491 - RNA, 20 nt, Artificial Sequence
  Synthetic
ggcagaugagaaggaacaga

SEQ ID NO: 39492 - RNA, 21 nt, Artificial Sequence
  Synthetic
cggcagaugagaaggaacaga

SEQ ID NO: 39493 - RNA, 22 nt, Artificial Sequence
  Synthetic
ccggcagaugagaaggaacaga

SEQ ID NO: 39494 - RNA, 23 nt, Artificial Sequence
  Synthetic
uccggcagaugagaaggaacaga

SEQ ID NO: 39495 - RNA, 24 nt, Artificial Sequence
  Synthetic
guccggcagaugagaaggaacaga

SEQ ID NO: 39496 - RNA, 18 nt, Artificial Sequence
  Synthetic
gcaaacacuuggcacaga

SEQ ID NO: 39497 - RNA, 19 nt, Artificial Sequence
  Synthetic
agcaaacacuuggcacaga

SEQ ID NO: 39498 - RNA, 20 nt, Artificial Sequence
  Synthetic
cagcaaacacuuggcacaga

SEQ ID NO: 39499 - RNA, 21 nt, Artificial Sequence
  Synthetic
ucagcaaacacuuggcacaga

SEQ ID NO: 39500 - RNA, 22 nt, Artificial Sequence
  Synthetic
gucagcaaacacuuggcacaga

SEQ ID NO: 39501 - RNA, 23 nt, Artificial Sequence
  Synthetic
cgucagcaaacacuuggcacaga

SEQ ID NO: 39502 - RNA, 24 nt, Artificial Sequence
  Synthetic
gcgucagcaaacacuuggcacaga

SEQ ID NO: 39503 - RNA, 18 nt, Artificial Sequence
  Synthetic
cucaagauguuguacaga

SEQ ID NO: 39504 - RNA, 19 nt, Artificial Sequence
  Synthetic
acucaagauguuguacaga

SEQ ID NO: 39505 - RNA, 20 nt, Artificial Sequence
  Synthetic
gacucaagauguuguacaga

SEQ ID NO: 39506 - RNA, 21 nt, Artificial Sequence
  Synthetic
ggacucaagauguuguacaga

SEQ ID NO: 39507 - RNA, 22 nt, Artificial Sequence
  Synthetic
gggacucaagauguuguacaga

SEQ ID NO: 39508 - RNA, 23 nt, Artificial Sequence
  Synthetic
agggacucaagauguuguacaga

SEQ ID NO: 39509 - RNA, 24 nt, Artificial Sequence
  Synthetic
aagggacucaagauguuguacaga

SEQ ID NO: 39510 - RNA, 18 nt, Artificial Sequence
  Synthetic
ucauguauuguuuacaga

SEQ ID NO: 39511 - RNA, 19 nt, Artificial Sequence
  Synthetic
uucauguauuguuuacaga

SEQ ID NO: 39512 - RNA, 20 nt, Artificial Sequence
  Synthetic
guucauguauuguuuacaga

SEQ ID NO: 39513 - RNA, 21 nt, Artificial Sequence
  Synthetic
gguucauguauuguuuacaga

SEQ ID NO: 39514 - RNA, 22 nt, Artificial Sequence
  Synthetic
agguucauguauuguuuacaga

SEQ ID NO: 39515 - RNA, 23 nt, Artificial Sequence
  Synthetic
aagguucauguauuguuuacaga

SEQ ID NO: 39516 - RNA, 24 nt, Artificial Sequence
  Synthetic
aaagguucauguauuguuuacaga

SEQ ID NO: 39517 - RNA, 18 nt, Artificial Sequence
  Synthetic
aagagaugauuaggcaga

SEQ ID NO: 39518 - RNA, 19 nt, Artificial Sequence
  Synthetic
caagagaugauuaggcaga

SEQ ID NO: 39519 - RNA, 20 nt, Artificial Sequence
  Synthetic
acaagagaugauuaggcaga

SEQ ID NO: 39520 - RNA, 21 nt, Artificial Sequence
  Synthetic
aacaagagaugauuaggcaga

SEQ ID NO: 39521 - RNA, 22 nt, Artificial Sequence
  Synthetic
gaacaagagaugauuaggcaga

SEQ ID NO: 39522 - RNA, 23 nt, Artificial Sequence
  Synthetic
ugaacaagagaugauuaggcaga

SEQ ID NO: 39523 - RNA, 24 nt, Artificial Sequence
  Synthetic
augaacaagagaugauuaggcaga

SEQ ID NO: 39524 - RNA, 18 nt, Artificial Sequence
  Synthetic
gucggcaggaacggcaga

SEQ ID NO: 39525 - RNA, 19 nt, Artificial Sequence
  Synthetic
ggucggcaggaacggcaga

SEQ ID NO: 39526 - RNA, 20 nt, Artificial Sequence
  Synthetic
uggucggcaggaacggcaga

SEQ ID NO: 39527 - RNA, 21 nt, Artificial Sequence
  Synthetic
guggucggcaggaacggcaga

SEQ ID NO: 39528 - RNA, 22 nt, Artificial Sequence
  Synthetic
cguggucggcaggaacggcaga

SEQ ID NO: 39529 - RNA, 23 nt, Artificial Sequence
  Synthetic
ccguggucggcaggaacggcaga

SEQ ID NO: 39530 - RNA, 24 nt, Artificial Sequence
  Synthetic
cccguggucggcaggaacggcaga

SEQ ID NO: 39531 - RNA, 18 nt, Artificial Sequence
  Synthetic
ugcacacgguccggcaga

SEQ ID NO: 39532 - RNA, 19 nt, Artificial Sequence
  Synthetic
gugcacacgguccggcaga

SEQ ID NO: 39533 - RNA, 20 nt, Artificial Sequence
  Synthetic
agugcacacgguccggcaga

SEQ ID NO: 39534 - RNA, 18 nt, Artificial Sequence
  Synthetic
uuccauguaacgugcaga

SEQ ID NO: 39535 - RNA, 19 nt, Artificial Sequence
  Synthetic
uuuccauguaacgugcaga

SEQ ID NO: 39536 - RNA, 20 nt, Artificial Sequence
  Synthetic
guuuccauguaacgugcaga

SEQ ID NO: 39537 - RNA, 21 nt, Artificial Sequence
  Synthetic
gguuuccauguaacgugcaga

SEQ ID NO: 39538 - RNA, 22 nt, Artificial Sequence
  Synthetic
cgguuuccauguaacgugcaga

SEQ ID NO: 39539 - RNA, 23 nt, Artificial Sequence
  Synthetic
gcgguuuccauguaacgugcaga

SEQ ID NO: 39540 - RNA, 24 nt, Artificial Sequence
  Synthetic
ggcgguuuccauguaacgugcaga

SEQ ID NO: 39541 - RNA, 18 nt, Artificial Sequence
  Synthetic
guaaacugagccaagaga

SEQ ID NO: 39542 - RNA, 19 nt, Artificial Sequence
  Synthetic
aguaaacugagccaagaga

SEQ ID NO: 39543 - RNA, 20 nt, Artificial Sequence
  Synthetic
uaguaaacugagccaagaga

SEQ ID NO: 39544 - RNA, 21 nt, Artificial Sequence
  Synthetic
cuaguaaacugagccaagaga

SEQ ID NO: 39545 - RNA, 22 nt, Artificial Sequence
  Synthetic
acuaguaaacugagccaagaga

SEQ ID NO: 39546 - RNA, 23 nt, Artificial Sequence
  Synthetic
cacuaguaaacugagccaagaga

SEQ ID NO: 39547 - RNA, 24 nt, Artificial Sequence
  Synthetic
gcacuaguaaacugagccaagaga

SEQ ID NO: 39548 - RNA, 18 nt, Artificial Sequence
  Synthetic
cucuuagugguggagaga

SEQ ID NO: 39549 - RNA, 19 nt, Artificial Sequence
  Synthetic
ucucuuagugguggagaga

SEQ ID NO: 39550 - RNA, 20 nt, Artificial Sequence
  Synthetic
gucucuuagugguggagaga

SEQ ID NO: 39551 - RNA, 21 nt, Artificial Sequence
  Synthetic
ugucucuuagugguggagaga

SEQ ID NO: 39552 - RNA, 22 nt, Artificial Sequence
  Synthetic
cugucucuuagugguggagaga

SEQ ID NO: 39553 - RNA, 23 nt, Artificial Sequence
  Synthetic
acugucucuuagugguggagaga

SEQ ID NO: 39554 - RNA, 24 nt, Artificial Sequence
  Synthetic
gacugucucuuagugguggagaga

SEQ ID NO: 39555 - RNA, 18 nt, Artificial Sequence
  Synthetic
uggagaagauugacgaga

SEQ ID NO: 39556 - RNA, 19 nt, Artificial Sequence
  Synthetic
cuggagaagauugacgaga

SEQ ID NO: 39557 - RNA, 20 nt, Artificial Sequence
  Synthetic
ccuggagaagauugacgaga

SEQ ID NO: 39558 - RNA, 21 nt, Artificial Sequence
  Synthetic
uccuggagaagauugacgaga

SEQ ID NO: 39559 - RNA, 22 nt, Artificial Sequence
  Synthetic
auccuggagaagauugacgaga

SEQ ID NO: 39560 - RNA, 23 nt, Artificial Sequence
  Synthetic
aauccuggagaagauugacgaga

SEQ ID NO: 39561 - RNA, 24 nt, Artificial Sequence
  Synthetic
caauccuggagaagauugacgaga

SEQ ID NO: 39562 - RNA, 18 nt, Artificial Sequence
  Synthetic
ggauguauauuuccgaga

SEQ ID NO: 39563 - RNA, 19 nt, Artificial Sequence
  Synthetic
aggauguauauuuccgaga

SEQ ID NO: 39564 - RNA, 20 nt, Artificial Sequence
  Synthetic
aaggauguauauuuccgaga

SEQ ID NO: 39565 - RNA, 21 nt, Artificial Sequence
  Synthetic
aaaggauguauauuuccgaga

SEQ ID NO: 39566 - RNA, 22 nt, Artificial Sequence
  Synthetic
gaaaggauguauauuuccgaga

SEQ ID NO: 39567 - RNA, 23 nt, Artificial Sequence
  Synthetic
ggaaaggauguauauuuccgaga

SEQ ID NO: 39568 - RNA, 24 nt, Artificial Sequence
  Synthetic
uggaaaggauguauauuuccgaga

SEQ ID NO: 39569 - RNA, 18 nt, Artificial Sequence
  Synthetic
aggaacggcagacggaga

SEQ ID NO: 39570 - RNA, 19 nt, Artificial Sequence
  Synthetic
caggaacggcagacggaga

SEQ ID NO: 39571 - RNA, 20 nt, Artificial Sequence
  Synthetic
gcaggaacggcagacggaga

SEQ ID NO: 39572 - RNA, 21 nt, Artificial Sequence
  Synthetic
ggcaggaacggcagacggaga

SEQ ID NO: 39573 - RNA, 22 nt, Artificial Sequence
  Synthetic
cggcaggaacggcagacggaga

SEQ ID NO: 39574 - RNA, 23 nt, Artificial Sequence
  Synthetic
ucggcaggaacggcagacggaga

SEQ ID NO: 39575 - RNA, 24 nt, Artificial Sequence
  Synthetic
gucggcaggaacggcagacggaga

SEQ ID NO: 39576 - RNA, 18 nt, Artificial Sequence
  Synthetic
acauugggaagcuggaga

SEQ ID NO: 39577 - RNA, 19 nt, Artificial Sequence
  Synthetic
aacauugggaagcuggaga

SEQ ID NO: 39578 - RNA, 20 nt, Artificial Sequence
  Synthetic
uaacauugggaagcuggaga

SEQ ID NO: 39579 - RNA, 21 nt, Artificial Sequence
  Synthetic
cuaacauugggaagcuggaga

SEQ ID NO: 39580 - RNA, 22 nt, Artificial Sequence
  Synthetic
acuaacauugggaagcuggaga

SEQ ID NO: 39581 - RNA, 23 nt, Artificial Sequence
  Synthetic
uacuaacauugggaagcuggaga

SEQ ID NO: 39582 - RNA, 24 nt, Artificial Sequence
  Synthetic
auacuaacauugggaagcuggaga

SEQ ID NO: 39583 - RNA, 18 nt, Artificial Sequence
  Synthetic
gucucuuagugguggaga

SEQ ID NO: 39584 - RNA, 19 nt, Artificial Sequence
  Synthetic
ugucucuuagugguggaga

SEQ ID NO: 39585 - RNA, 20 nt, Artificial Sequence
  Synthetic
cugucucuuagugguggaga

SEQ ID NO: 39586 - RNA, 21 nt, Artificial Sequence
  Synthetic
acugucucuuagugguggaga

SEQ ID NO: 39587 - RNA, 22 nt, Artificial Sequence
  Synthetic
gacugucucuuagugguggaga

SEQ ID NO: 39588 - RNA, 23 nt, Artificial Sequence
  Synthetic
ugacugucucuuagugguggaga

SEQ ID NO: 39589 - RNA, 24 nt, Artificial Sequence
  Synthetic
augacugucucuuagugguggaga

SEQ ID NO: 39590 - RNA, 18 nt, Artificial Sequence
  Synthetic
acgguccggcagaugaga

SEQ ID NO: 39591 - RNA, 19 nt, Artificial Sequence
  Synthetic
cacgguccggcagaugaga

SEQ ID NO: 39592 - RNA, 20 nt, Artificial Sequence
  Synthetic
acacgguccggcagaugaga

SEQ ID NO: 39593 - RNA, 21 nt, Artificial Sequence
  Synthetic
cacacgguccggcagaugaga

SEQ ID NO: 39594 - RNA, 22 nt, Artificial Sequence
  Synthetic
gcacacgguccggcagaugaga

SEQ ID NO: 39595 - RNA, 23 nt, Artificial Sequence
  Synthetic
ugcacacgguccggcagaugaga

SEQ ID NO: 39596 - RNA, 24 nt, Artificial Sequence
  Synthetic
gugcacacgguccggcagaugaga

SEQ ID NO: 39597 - RNA, 18 nt, Artificial Sequence
  Synthetic
uguuagugugcccugaga

SEQ ID NO: 39598 - RNA, 19 nt, Artificial Sequence
  Synthetic
uuguuagugugcccugaga

SEQ ID NO: 39599 - RNA, 20 nt, Artificial Sequence
  Synthetic
guuguuagugugcccugaga

SEQ ID NO: 39600 - RNA, 21 nt, Artificial Sequence
  Synthetic
aguuguuagugugcccugaga

SEQ ID NO: 39601 - RNA, 22 nt, Artificial Sequence
  Synthetic
aaguuguuagugugcccugaga

SEQ ID NO: 39602 - RNA, 23 nt, Artificial Sequence
  Synthetic
aaaguuguuagugugcccugaga

SEQ ID NO: 39603 - RNA, 24 nt, Artificial Sequence
  Synthetic
caaaguuguuagugugcccugaga

SEQ ID NO: 39604 - RNA, 18 nt, Artificial Sequence
  Synthetic
accccgccuguaacacga

SEQ ID NO: 39605 - RNA, 19 nt, Artificial Sequence
  Synthetic
aaccccgccuguaacacga

SEQ ID NO: 39606 - RNA, 20 nt, Artificial Sequence
  Synthetic
aaaccccgccuguaacacga

SEQ ID NO: 39607 - RNA, 21 nt, Artificial Sequence
  Synthetic
aaaaccccgccuguaacacga

SEQ ID NO: 39608 - RNA, 22 nt, Artificial Sequence
  Synthetic
aaaaaccccgccuguaacacga

SEQ ID NO: 39609 - RNA, 23 nt, Artificial Sequence
  Synthetic
gaaaaaccccgccuguaacacga

SEQ ID NO: 39610 - RNA, 24 nt, Artificial Sequence
  Synthetic
agaaaaaccccgccuguaacacga

SEQ ID NO: 39611 - RNA, 18 nt, Artificial Sequence
  Synthetic
gugucgagaagaucacga

SEQ ID NO: 39612 - RNA, 19 nt, Artificial Sequence
  Synthetic
ggugucgagaagaucacga

SEQ ID NO: 39613 - RNA, 20 nt, Artificial Sequence
  Synthetic
cggugucgagaagaucacga

SEQ ID NO: 39614 - RNA, 18 nt, Artificial Sequence
  Synthetic
aaggauguauauuuccga

SEQ ID NO: 39615 - RNA, 19 nt, Artificial Sequence
  Synthetic
aaaggauguauauuuccga

SEQ ID NO: 39616 - RNA, 20 nt, Artificial Sequence
  Synthetic
gaaaggauguauauuuccga

SEQ ID NO: 39617 - RNA, 21 nt, Artificial Sequence
  Synthetic
ggaaaggauguauauuuccga

SEQ ID NO: 39618 - RNA, 22 nt, Artificial Sequence
  Synthetic
uggaaaggauguauauuuccga

SEQ ID NO: 39619 - RNA, 23 nt, Artificial Sequence
  Synthetic
auggaaaggauguauauuuccga

SEQ ID NO: 39620 - RNA, 24 nt, Artificial Sequence
  Synthetic
cauggaaaggauguauauuuccga

SEQ ID NO: 39621 - RNA, 18 nt, Artificial Sequence
  Synthetic
ucuucugcgacgcggcga

SEQ ID NO: 39622 - RNA, 19 nt, Artificial Sequence
  Synthetic
aucuucugcgacgcggcga

SEQ ID NO: 39623 - RNA, 20 nt, Artificial Sequence
  Synthetic
gaucuucugcgacgcggcga

SEQ ID NO: 39624 - RNA, 18 nt, Artificial Sequence
  Synthetic
agacggagaagggggcga

SEQ ID NO: 39625 - RNA, 19 nt, Artificial Sequence
  Synthetic
cagacggagaagggggcga

SEQ ID NO: 39626 - RNA, 20 nt, Artificial Sequence
  Synthetic
gcagacggagaagggggcga

SEQ ID NO: 39627 - RNA, 21 nt, Artificial Sequence
  Synthetic
ggcagacggagaagggggcga

SEQ ID NO: 39628 - RNA, 22 nt, Artificial Sequence
  Synthetic
cggcagacggagaagggggcga

SEQ ID NO: 39629 - RNA, 23 nt, Artificial Sequence
  Synthetic
acggcagacggagaagggggcga

SEQ ID NO: 39630 - RNA, 24 nt, Artificial Sequence
  Synthetic
aacggcagacggagaagggggcga

SEQ ID NO: 39631 - RNA, 18 nt, Artificial Sequence
  Synthetic
gcuccagaccggcugcga

SEQ ID NO: 39632 - RNA, 19 nt, Artificial Sequence
  Synthetic
ugcuccagaccggcugcga

SEQ ID NO: 39633 - RNA, 20 nt, Artificial Sequence
  Synthetic
uugcuccagaccggcugcga

SEQ ID NO: 39634 - RNA, 21 nt, Artificial Sequence
  Synthetic
uuugcuccagaccggcugcga

SEQ ID NO: 39635 - RNA, 22 nt, Artificial Sequence
  Synthetic
uuuugcuccagaccggcugcga

SEQ ID NO: 39636 - RNA, 23 nt, Artificial Sequence
  Synthetic
guuuugcuccagaccggcugcga

SEQ ID NO: 39637 - RNA, 24 nt, Artificial Sequence
  Synthetic
aguuuugcuccagaccggcugcga

SEQ ID NO: 39638 - RNA, 18 nt, Artificial Sequence
  Synthetic
ugagaucuucgucugcga

SEQ ID NO: 39639 - RNA, 19 nt, Artificial Sequence
  Synthetic
uugagaucuucgucugcga

SEQ ID NO: 39640 - RNA, 20 nt, Artificial Sequence
  Synthetic
auugagaucuucgucugcga

SEQ ID NO: 39641 - RNA, 18 nt, Artificial Sequence
  Synthetic
gaugcagaucuucugcga

SEQ ID NO: 39642 - RNA, 19 nt, Artificial Sequence
  Synthetic
agaugcagaucuucugcga

SEQ ID NO: 39643 - RNA, 20 nt, Artificial Sequence
  Synthetic
gagaugcagaucuucugcga

SEQ ID NO: 39644 - RNA, 21 nt, Artificial Sequence
  Synthetic
ggagaugcagaucuucugcga

SEQ ID NO: 39645 - RNA, 22 nt, Artificial Sequence
  Synthetic
uggagaugcagaucuucugcga

SEQ ID NO: 39646 - RNA, 23 nt, Artificial Sequence
  Synthetic
cuggagaugcagaucuucugcga

SEQ ID NO: 39647 - RNA, 24 nt, Artificial Sequence
  Synthetic
gcuggagaugcagaucuucugcga

SEQ ID NO: 39648 - RNA, 18 nt, Artificial Sequence
  Synthetic
gguucuuuccccacucga

SEQ ID NO: 39649 - RNA, 19 nt, Artificial Sequence
  Synthetic
agguucuuuccccacucga

SEQ ID NO: 39650 - RNA, 20 nt, Artificial Sequence
  Synthetic
aagguucuuuccccacucga

SEQ ID NO: 39651 - RNA, 21 nt, Artificial Sequence
  Synthetic
aaagguucuuuccccacucga

SEQ ID NO: 39652 - RNA, 22 nt, Artificial Sequence
  Synthetic
gaaagguucuuuccccacucga

SEQ ID NO: 39653 - RNA, 23 nt, Artificial Sequence
  Synthetic
ggaaagguucuuuccccacucga

SEQ ID NO: 39654 - RNA, 24 nt, Artificial Sequence
  Synthetic
uggaaagguucuuuccccacucga

SEQ ID NO: 39655 - RNA, 18 nt, Artificial Sequence
  Synthetic
gagggaguucuucuucga

SEQ ID NO: 39656 - RNA, 19 nt, Artificial Sequence
  Synthetic
cgagggaguucuucuucga

SEQ ID NO: 39657 - RNA, 20 nt, Artificial Sequence
  Synthetic
gcgagggaguucuucuucga

SEQ ID NO: 39658 - RNA, 18 nt, Artificial Sequence
  Synthetic
uccggcagaugagaagga

SEQ ID NO: 39659 - RNA, 19 nt, Artificial Sequence
  Synthetic
guccggcagaugagaagga

SEQ ID NO: 39660 - RNA, 20 nt, Artificial Sequence
  Synthetic
gguccggcagaugagaagga

SEQ ID NO: 39661 - RNA, 21 nt, Artificial Sequence
  Synthetic
cgguccggcagaugagaagga

SEQ ID NO: 39662 - RNA, 22 nt, Artificial Sequence
  Synthetic
acgguccggcagaugagaagga

SEQ ID NO: 39663 - RNA, 23 nt, Artificial Sequence
  Synthetic
cacgguccggcagaugagaagga

SEQ ID NO: 39664 - RNA, 24 nt, Artificial Sequence
  Synthetic
acacgguccggcagaugagaagga

SEQ ID NO: 39665 - RNA, 18 nt, Artificial Sequence
  Synthetic
ugaggcauagcagcagga

SEQ ID NO: 39666 - RNA, 19 nt, Artificial Sequence
  Synthetic
augaggcauagcagcagga

SEQ ID NO: 39667 - RNA, 20 nt, Artificial Sequence
  Synthetic
gaugaggcauagcagcagga

SEQ ID NO: 39668 - RNA, 21 nt, Artificial Sequence
  Synthetic
agaugaggcauagcagcagga

SEQ ID NO: 39669 - RNA, 22 nt, Artificial Sequence
  Synthetic
aagaugaggcauagcagcagga

SEQ ID NO: 39670 - RNA, 23 nt, Artificial Sequence
  Synthetic
gaagaugaggcauagcagcagga

SEQ ID NO: 39671 - RNA, 24 nt, Artificial Sequence
  Synthetic
agaagaugaggcauagcagcagga

SEQ ID NO: 39672 - RNA, 18 nt, Artificial Sequence
  Synthetic
cgauugguggaggcagga

SEQ ID NO: 39673 - RNA, 19 nt, Artificial Sequence
  Synthetic
acgauugguggaggcagga

SEQ ID NO: 39674 - RNA, 20 nt, Artificial Sequence
  Synthetic
gacgauugguggaggcagga

SEQ ID NO: 39675 - RNA, 21 nt, Artificial Sequence
  Synthetic
ugacgauugguggaggcagga

SEQ ID NO: 39676 - RNA, 22 nt, Artificial Sequence
  Synthetic
cugacgauugguggaggcagga

SEQ ID NO: 39677 - RNA, 23 nt, Artificial Sequence
  Synthetic
acugacgauugguggaggcagga

SEQ ID NO: 39678 - RNA, 24 nt, Artificial Sequence
  Synthetic
gacugacgauugguggaggcagga

SEQ ID NO: 39679 - RNA, 18 nt, Artificial Sequence
  Synthetic
ggaguuugccaaucagga

SEQ ID NO: 39680 - RNA, 19 nt, Artificial Sequence
  Synthetic
aggaguuugccaaucagga

SEQ ID NO: 39681 - RNA, 20 nt, Artificial Sequence
  Synthetic
aaggaguuugccaaucagga

SEQ ID NO: 39682 - RNA, 21 nt, Artificial Sequence
  Synthetic
gaaggaguuugccaaucagga

SEQ ID NO: 39683 - RNA, 22 nt, Artificial Sequence
  Synthetic
agaaggaguuugccaaucagga

SEQ ID NO: 39684 - RNA, 23 nt, Artificial Sequence
  Synthetic
aagaaggaguuugccaaucagga

SEQ ID NO: 39685 - RNA, 24 nt, Artificial Sequence
  Synthetic
aaagaaggaguuugccaaucagga

SEQ ID NO: 39686 - RNA, 18 nt, Artificial Sequence
  Synthetic
ccaggacaaguuggagga

SEQ ID NO: 39687 - RNA, 19 nt, Artificial Sequence
  Synthetic
gccaggacaaguuggagga

SEQ ID NO: 39688 - RNA, 20 nt, Artificial Sequence
  Synthetic
agccaggacaaguuggagga

SEQ ID NO: 39689 - RNA, 21 nt, Artificial Sequence
  Synthetic
uagccaggacaaguuggagga

SEQ ID NO: 39690 - RNA, 22 nt, Artificial Sequence
  Synthetic
auagccaggacaaguuggagga

SEQ ID NO: 39691 - RNA, 23 nt, Artificial Sequence
  Synthetic
gauagccaggacaaguuggagga

SEQ ID NO: 39692 - RNA, 24 nt, Artificial Sequence
  Synthetic
cgauagccaggacaaguuggagga

SEQ ID NO: 39693 - RNA, 18 nt, Artificial Sequence
  Synthetic
ccggaaguguugauagga

SEQ ID NO: 39694 - RNA, 19 nt, Artificial Sequence
  Synthetic
uccggaaguguugauagga

SEQ ID NO: 39695 - RNA, 20 nt, Artificial Sequence
  Synthetic
cuccggaaguguugauagga

SEQ ID NO: 39696 - RNA, 21 nt, Artificial Sequence
  Synthetic
ucuccggaaguguugauagga

SEQ ID NO: 39697 - RNA, 22 nt, Artificial Sequence
  Synthetic
gucuccggaaguguugauagga

SEQ ID NO: 39698 - RNA, 23 nt, Artificial Sequence
  Synthetic
agucuccggaaguguugauagga

SEQ ID NO: 39699 - RNA, 24 nt, Artificial Sequence
  Synthetic
uagucuccggaaguguugauagga

SEQ ID NO: 39700 - RNA, 18 nt, Artificial Sequence
  Synthetic
ugagccaagagaaacgga

SEQ ID NO: 39701 - RNA, 19 nt, Artificial Sequence
  Synthetic
cugagccaagagaaacgga

SEQ ID NO: 39702 - RNA, 20 nt, Artificial Sequence
  Synthetic
acugagccaagagaaacgga

SEQ ID NO: 39703 - RNA, 21 nt, Artificial Sequence
  Synthetic
aacugagccaagagaaacgga

SEQ ID NO: 39704 - RNA, 22 nt, Artificial Sequence
  Synthetic
aaacugagccaagagaaacgga

SEQ ID NO: 39705 - RNA, 23 nt, Artificial Sequence
  Synthetic
uaaacugagccaagagaaacgga

SEQ ID NO: 39706 - RNA, 24 nt, Artificial Sequence
  Synthetic
guaaacugagccaagagaaacgga

SEQ ID NO: 39707 - RNA, 18 nt, Artificial Sequence
  Synthetic
gcaggaacggcagacgga

SEQ ID NO: 39708 - RNA, 19 nt, Artificial Sequence
  Synthetic
ggcaggaacggcagacgga

SEQ ID NO: 39709 - RNA, 20 nt, Artificial Sequence
  Synthetic
cggcaggaacggcagacgga

SEQ ID NO: 39710 - RNA, 21 nt, Artificial Sequence
  Synthetic
ucggcaggaacggcagacgga

SEQ ID NO: 39711 - RNA, 22 nt, Artificial Sequence
  Synthetic
gucggcaggaacggcagacgga

SEQ ID NO: 39712 - RNA, 23 nt, Artificial Sequence
  Synthetic
ggucggcaggaacggcagacgga

SEQ ID NO: 39713 - RNA, 24 nt, Artificial Sequence
  Synthetic
uggucggcaggaacggcagacgga

SEQ ID NO: 39714 - RNA, 18 nt, Artificial Sequence
  Synthetic
ugagaggcaauagucgga

SEQ ID NO: 39715 - RNA, 19 nt, Artificial Sequence
  Synthetic
gugagaggcaauagucgga

SEQ ID NO: 39716 - RNA, 20 nt, Artificial Sequence
  Synthetic
ugugagaggcaauagucgga

SEQ ID NO: 39717 - RNA, 21 nt, Artificial Sequence
  Synthetic
augugagaggcaauagucgga

SEQ ID NO: 39718 - RNA, 22 nt, Artificial Sequence
  Synthetic
gaugugagaggcaauagucgga

SEQ ID NO: 39719 - RNA, 23 nt, Artificial Sequence
  Synthetic
agaugugagaggcaauagucgga

SEQ ID NO: 39720 - RNA, 24 nt, Artificial Sequence
  Synthetic
gagaugugagaggcaauagucgga

SEQ ID NO: 39721 - RNA, 18 nt, Artificial Sequence
  Synthetic
  misc_feature (11)..(11): n is a, c, g, or u
aacagcgguanaaaggga

SEQ ID NO: 39722 - RNA, 19 nt, Artificial Sequence
  Synthetic
  misc_feature (12)..(12): n is a, c, g, or u
uaacagcgguanaaaggga

SEQ ID NO: 39723 - RNA, 20 nt, Artificial Sequence
  Synthetic
  misc_feature (13)..(13): n is a, c, g, or u
guaacagcgguanaaaggga

SEQ ID NO: 39724 - RNA, 21 nt, Artificial Sequence
  Synthetic
  misc_feature (14)..(14): n is a, c, g, or u
gguaacagcgguanaaaggga

SEQ ID NO: 39725 - RNA, 22 nt, Artificial Sequence
  Synthetic
  misc_feature (15)..(15): n is a, c, g, or u
ugguaacagcgguanaaaggga

SEQ ID NO: 39726 - RNA, 23 nt, Artificial Sequence
  Synthetic
  misc_feature (16)..(16): n is a, c, g, or u
uugguaacagcgguanaaaggga

SEQ ID NO: 39727 - RNA, 24 nt, Artificial Sequence
  Synthetic
  misc_feature (17)..(17): n is a, c, g, or u
auugguaacagcgguanaaaggga

SEQ ID NO: 39728 - RNA, 18 nt, Artificial Sequence
  Synthetic
gauucagcgcugacggga

SEQ ID NO: 39729 - RNA, 19 nt, Artificial Sequence
  Synthetic
ggauucagcgcugacggga

SEQ ID NO: 39730 - RNA, 20 nt, Artificial Sequence
  Synthetic
uggauucagcgcugacggga

SEQ ID NO: 39731 - RNA, 21 nt, Artificial Sequence
  Synthetic
cuggauucagcgcugacggga

SEQ ID NO: 39732 - RNA, 22 nt, Artificial Sequence
  Synthetic
gcuggauucagcgcugacggga

SEQ ID NO: 39733 - RNA, 23 nt, Artificial Sequence
  Synthetic
cgcuggauucagcgcugacggga

SEQ ID NO: 39734 - RNA, 24 nt, Artificial Sequence
  Synthetic
ccgcuggauucagcgcugacggga

SEQ ID NO: 39735 - RNA, 18 nt, Artificial Sequence
  Synthetic
agugguggagagauggga

SEQ ID NO: 39736 - RNA, 19 nt, Artificial Sequence
  Synthetic
uagugguggagagauggga

SEQ ID NO: 39737 - RNA, 20 nt, Artificial Sequence
  Synthetic
uuagugguggagagauggga

SEQ ID NO: 39738 - RNA, 21 nt, Artificial Sequence
  Synthetic
cuuagugguggagagauggga

SEQ ID NO: 39739 - RNA, 22 nt, Artificial Sequence
  Synthetic
ucuuagugguggagagauggga

SEQ ID NO: 39740 - RNA, 23 nt, Artificial Sequence
  Synthetic
cucuuagugguggagagauggga

SEQ ID NO: 39741 - RNA, 24 nt, Artificial Sequence
  Synthetic
ucucuuagugguggagagauggga

SEQ ID NO: 39742 - RNA, 18 nt, Artificial Sequence
  Synthetic
aagcccaagaugauggga

SEQ ID NO: 39743 - RNA, 19 nt, Artificial Sequence
  Synthetic
aaagcccaagaugauggga

SEQ ID NO: 39744 - RNA, 20 nt, Artificial Sequence
  Synthetic
gaaagcccaagaugauggga

SEQ ID NO: 39745 - RNA, 21 nt, Artificial Sequence
  Synthetic
cgaaagcccaagaugauggga

SEQ ID NO: 39746 - RNA, 22 nt, Artificial Sequence
  Synthetic
gcgaaagcccaagaugauggga

SEQ ID NO: 39747 - RNA, 23 nt, Artificial Sequence
  Synthetic
ugcgaaagcccaagaugauggga

SEQ ID NO: 39748 - RNA, 24 nt, Artificial Sequence
  Synthetic
uugcgaaagcccaagaugauggga

SEQ ID NO: 39749 - RNA, 18 nt, Artificial Sequence
  Synthetic
caaggguccuuuuuggga

SEQ ID NO: 39750 - RNA, 19 nt, Artificial Sequence
  Synthetic
ccaaggguccuuuuuggga

SEQ ID NO: 39751 - RNA, 20 nt, Artificial Sequence
  Synthetic
gccaaggguccuuuuuggga

SEQ ID NO: 39752 - RNA, 21 nt, Artificial Sequence
  Synthetic
ggccaaggguccuuuuuggga

SEQ ID NO: 39753 - RNA, 22 nt, Artificial Sequence
  Synthetic
uggccaaggguccuuuuuggga

SEQ ID NO: 39754 - RNA, 23 nt, Artificial Sequence
  Synthetic
cuggccaaggguccuuuuuggga

SEQ ID NO: 39755 - RNA, 24 nt, Artificial Sequence
  Synthetic
ucuggccaaggguccuuuuuggga

SEQ ID NO: 39756 - RNA, 18 nt, Artificial Sequence
  Synthetic
  misc_feature (15)..(15): n is a, c, g, or u
gaggcuugaacagungga

SEQ ID NO: 39757 - RNA, 19 nt, Artificial Sequence
  Synthetic
  misc_feature (16)..(16): n is a, c, g, or u
ggaggcuugaacagungga

SEQ ID NO: 39758 - RNA, 20 nt, Artificial Sequence
  Synthetic
  misc_feature (17)..(17): n is a, c, g, or u
uggaggcuugaacagungga

SEQ ID NO: 39759 - RNA, 21 nt, Artificial Sequence
  Synthetic
  misc_feature (18)..(18): n is a, c, g, or u
uuggaggcuugaacagungga

SEQ ID NO: 39760 - RNA, 22 nt, Artificial Sequence
  Synthetic
  misc_feature (19)..(19): n is a, c, g, or u
cuuggaggcuugaacagungga

SEQ ID NO: 39761 - RNA, 23 nt, Artificial Sequence
  Synthetic
  misc_feature (20)..(20): n is a, c, g, or u
gcuuggaggcuugaacagungga

SEQ ID NO: 39762 - RNA, 24 nt, Artificial Sequence
  Synthetic
  misc_feature (21)..(21): n is a, c, g, or u
agcuuggaggcuugaacagungga

SEQ ID NO: 39763 - RNA, 18 nt, Artificial Sequence
  Synthetic
guggucgaggauccugga

SEQ ID NO: 39764 - RNA, 19 nt, Artificial Sequence
  Synthetic
gguggucgaggauccugga

SEQ ID NO: 39765 - RNA, 20 nt, Artificial Sequence
  Synthetic
ugguggucgaggauccugga

SEQ ID NO: 39766 - RNA, 21 nt, Artificial Sequence
  Synthetic
cugguggucgaggauccugga

SEQ ID NO: 39767 - RNA, 22 nt, Artificial Sequence
  Synthetic
acugguggucgaggauccugga

SEQ ID NO: 39768 - RNA, 23 nt, Artificial Sequence
  Synthetic
uacugguggucgaggauccugga

SEQ ID NO: 39769 - RNA, 24 nt, Artificial Sequence
  Synthetic
guacugguggucgaggauccugga

SEQ ID NO: 39770 - RNA, 18 nt, Artificial Sequence
  Synthetic
gaggggucguccgcugga

SEQ ID NO: 39771 - RNA, 19 nt, Artificial Sequence
  Synthetic
ggaggggucguccgcugga

SEQ ID NO: 39772 - RNA, 20 nt, Artificial Sequence
  Synthetic
gggaggggucguccgcugga

SEQ ID NO: 39773 - RNA, 21 nt, Artificial Sequence
  Synthetic
cgggaggggucguccgcugga

SEQ ID NO: 39774 - RNA, 22 nt, Artificial Sequence
  Synthetic
ccgggaggggucguccgcugga

SEQ ID NO: 39775 - RNA, 23 nt, Artificial Sequence
  Synthetic
cccgggaggggucguccgcugga

SEQ ID NO: 39776 - RNA, 24 nt, Artificial Sequence
  Synthetic
ccccgggaggggucguccgcugga

SEQ ID NO: 39777 - RNA, 18 nt, Artificial Sequence
  Synthetic
ugacugacgauuggugga

SEQ ID NO: 39778 - RNA, 19 nt, Artificial Sequence
  Synthetic
cugacugacgauuggugga

SEQ ID NO: 39779 - RNA, 20 nt, Artificial Sequence
  Synthetic
ccugacugacgauuggugga

SEQ ID NO: 39780 - RNA, 21 nt, Artificial Sequence
  Synthetic
cccugacugacgauuggugga

SEQ ID NO: 39781 - RNA, 22 nt, Artificial Sequence
  Synthetic
ucccugacugacgauuggugga

SEQ ID NO: 39782 - RNA, 23 nt, Artificial Sequence
  Synthetic
cucccugacugacgauuggugga

SEQ ID NO: 39783 - RNA, 24 nt, Artificial Sequence
  Synthetic
ccucccugacugacgauuggugga

SEQ ID NO: 39784 - RNA, 18 nt, Artificial Sequence
  Synthetic
ugcaaauggauauuugga

SEQ ID NO: 39785 - RNA, 19 nt, Artificial Sequence
  Synthetic
augcaaauggauauuugga

SEQ ID NO: 39786 - RNA, 20 nt, Artificial Sequence
  Synthetic
gaugcaaauggauauuugga

SEQ ID NO: 39787 - RNA, 21 nt, Artificial Sequence
  Synthetic
ugaugcaaauggauauuugga

SEQ ID NO: 39788 - RNA, 22 nt, Artificial Sequence
  Synthetic
uugaugcaaauggauauuugga

SEQ ID NO: 39789 - RNA, 23 nt, Artificial Sequence
  Synthetic
cuugaugcaaauggauauuugga

SEQ ID NO: 39790 - RNA, 24 nt, Artificial Sequence
  Synthetic
ucuugaugcaaauggauauuugga

SEQ ID NO: 39791 - RNA, 18 nt, Artificial Sequence
  Synthetic
uggugaggcgaacaauga

SEQ ID NO: 39792 - RNA, 19 nt, Artificial Sequence
  Synthetic
auggugaggcgaacaauga

SEQ ID NO: 39793 - RNA, 20 nt, Artificial Sequence
  Synthetic
uauggugaggcgaacaauga

SEQ ID NO: 39794 - RNA, 21 nt, Artificial Sequence
  Synthetic
guauggugaggcgaacaauga

SEQ ID NO: 39795 - RNA, 22 nt, Artificial Sequence
  Synthetic
uguauggugaggcgaacaauga

SEQ ID NO: 39796 - RNA, 23 nt, Artificial Sequence
  Synthetic
cuguauggugaggcgaacaauga

SEQ ID NO: 39797 - RNA, 24 nt, Artificial Sequence
  Synthetic
gcuguauggugaggcgaacaauga

SEQ ID NO: 39798 - RNA, 18 nt, Artificial Sequence
  Synthetic
  misc_feature (10)..(10): n is a, c, g, or u
uugaacagunggacauga

SEQ ID NO: 39799 - RNA, 19 nt, Artificial Sequence
  Synthetic
  misc_feature (11)..(11): n is a, c, g, or u
cuugaacagunggacauga

SEQ ID NO: 39800 - RNA, 20 nt, Artificial Sequence
  Synthetic
  misc_feature (12)..(12): n is a, c, g, or u
gcuugaacagunggacauga

SEQ ID NO: 39801 - RNA, 21 nt, Artificial Sequence
  Synthetic
  misc_feature (13)..(13): n is a, c, g, or u
ggcuugaacagunggacauga

SEQ ID NO: 39802 - RNA, 22 nt, Artificial Sequence
  Synthetic
  misc_feature (14)..(14): n is a, c, g, or u
aggcuugaacagunggacauga

SEQ ID NO: 39803 - RNA, 23 nt, Artificial Sequence
  Synthetic
  misc_feature (15)..(15): n is a, c, g, or u
gaggcuugaacagunggacauga

SEQ ID NO: 39804 - RNA, 24 nt, Artificial Sequence
  Synthetic
  misc_feature (16)..(16): n is a, c, g, or u
ggaggcuugaacagunggacauga

SEQ ID NO: 39805 - RNA, 18 nt, Artificial Sequence
  Synthetic
acacgguccggcagauga

SEQ ID NO: 39806 - RNA, 19 nt, Artificial Sequence
  Synthetic
cacacgguccggcagauga

SEQ ID NO: 39807 - RNA, 20 nt, Artificial Sequence
  Synthetic
gcacacgguccggcagauga

SEQ ID NO: 39808 - RNA, 18 nt, Artificial Sequence
  Synthetic
  misc_feature (7)..(7): n is a, c, g, or u
aacugcnuuggcagauga

SEQ ID NO: 39809 - RNA, 19 nt, Artificial Sequence
  Synthetic
  misc_feature (8)..(8): n is a, c, g, or u
uaacugcnuuggcagauga

SEQ ID NO: 39810 - RNA, 20 nt, Artificial Sequence
  Synthetic
  misc_feature (9)..(9): n is a, c, g, or u
auaacugcnuuggcagauga

SEQ ID NO: 39811 - RNA, 21 nt, Artificial Sequence
  Synthetic
  misc_feature (10)..(10): n is a, c, g, or u
uauaacugcnuuggcagauga

SEQ ID NO: 39812 - RNA, 22 nt, Artificial Sequence
  Synthetic
  misc_feature (11)..(11): n is a, c, g, or u
auauaacugcnuuggcagauga

SEQ ID NO: 39813 - RNA, 23 nt, Artificial Sequence
  Synthetic
  misc_feature (12)..(12): n is a, c, g, or u
uauauaacugcnuuggcagauga

SEQ ID NO: 39814 - RNA, 24 nt, Artificial Sequence
  Synthetic
  misc_feature (13)..(13): n is a, c, g, or u
uuauauaacugcnuuggcagauga

SEQ ID NO: 39815 - RNA, 18 nt, Artificial Sequence
  Synthetic
gacaugaacaagagauga

SEQ ID NO: 39816 - RNA, 19 nt, Artificial Sequence
  Synthetic
ggacaugaacaagagauga

SEQ ID NO: 39817 - RNA, 20 nt, Artificial Sequence
  Synthetic
  misc_feature (1)..(1): n is a, c, g, or u
nggacaugaacaagagauga

SEQ ID NO: 39818 - RNA, 21 nt, Artificial Sequence
  Synthetic
  misc_feature (2)..(2): n is a, c, g, or u
unggacaugaacaagagauga

SEQ ID NO: 39819 - RNA, 22 nt, Artificial Sequence
  Synthetic
  misc_feature (3)..(3): n is a, c, g, or u
gunggacaugaacaagagauga

SEQ ID NO: 39820 - RNA, 23 nt, Artificial Sequence
  Synthetic
  misc_feature (4)..(4): n is a, c, g, or u
agunggacaugaacaagagauga

SEQ ID NO: 39821 - RNA, 24 nt, Artificial Sequence
  Synthetic
  misc_feature (5)..(5): n is a, c, g, or u
cagunggacaugaacaagagauga

SEQ ID NO: 39822 - RNA, 18 nt, Artificial Sequence
  Synthetic
ggcauagcagcaggauga

SEQ ID NO: 39823 - RNA, 19 nt, Artificial Sequence
  Synthetic
aggcauagcagcaggauga

SEQ ID NO: 39824 - RNA, 20 nt, Artificial Sequence
  Synthetic
gaggcauagcagcaggauga

SEQ ID NO: 39825 - RNA, 21 nt, Artificial Sequence
  Synthetic
ugaggcauagcagcaggauga

SEQ ID NO: 39826 - RNA, 22 nt, Artificial Sequence
  Synthetic
augaggcauagcagcaggauga

SEQ ID NO: 39827 - RNA, 23 nt, Artificial Sequence
  Synthetic
gaugaggcauagcagcaggauga

SEQ ID NO: 39828 - RNA, 24 nt, Artificial Sequence
  Synthetic
agaugaggcauagcagcaggauga

SEQ ID NO: 39829 - RNA, 18 nt, Artificial Sequence
  Synthetic
ggaugaagaggaauauga

SEQ ID NO: 39830 - RNA, 19 nt, Artificial Sequence
  Synthetic
aggaugaagaggaauauga

SEQ ID NO: 39831 - RNA, 20 nt, Artificial Sequence
  Synthetic
caggaugaagaggaauauga

SEQ ID NO: 39832 - RNA, 21 nt, Artificial Sequence
  Synthetic
gcaggaugaagaggaauauga

SEQ ID NO: 39833 - RNA, 22 nt, Artificial Sequence
  Synthetic
agcaggaugaagaggaauauga

SEQ ID NO: 39834 - RNA, 23 nt, Artificial Sequence
  Synthetic
cagcaggaugaagaggaauauga

SEQ ID NO: 39835 - RNA, 24 nt, Artificial Sequence
  Synthetic
gcagcaggaugaagaggaauauga

SEQ ID NO: 39836 - RNA, 18 nt, Artificial Sequence
  Synthetic
auggcacuaguaaacuga

SEQ ID NO: 39837 - RNA, 19 nt, Artificial Sequence
  Synthetic
aauggcacuaguaaacuga

SEQ ID NO: 39838 - RNA, 20 nt, Artificial Sequence
  Synthetic
aaauggcacuaguaaacuga

SEQ ID NO: 39839 - RNA, 21 nt, Artificial Sequence
  Synthetic
caaauggcacuaguaaacuga

SEQ ID NO: 39840 - RNA, 22 nt, Artificial Sequence
  Synthetic
acaaauggcacuaguaaacuga

SEQ ID NO: 39841 - RNA, 23 nt, Artificial Sequence
  Synthetic
aacaaauggcacuaguaaacuga

SEQ ID NO: 39842 - RNA, 24 nt, Artificial Sequence
  Synthetic
gaacaaauggcacuaguaaacuga

SEQ ID NO: 39843 - RNA, 18 nt, Artificial Sequence
  Synthetic
aggguucacuaucccuga

SEQ ID NO: 39844 - RNA, 19 nt, Artificial Sequence
  Synthetic
caggguucacuaucccuga

SEQ ID NO: 39845 - RNA, 20 nt, Artificial Sequence
  Synthetic
acaggguucacuaucccuga

SEQ ID NO: 39846 - RNA, 18 nt, Artificial Sequence
  Synthetic
cgcuggauucagcgcuga

SEQ ID NO: 39847 - RNA, 19 nt, Artificial Sequence
  Synthetic
ccgcuggauucagcgcuga

SEQ ID NO: 39848 - RNA, 20 nt, Artificial Sequence
  Synthetic
uccgcuggauucagcgcuga

SEQ ID NO: 39849 - RNA, 21 nt, Artificial Sequence
  Synthetic
guccgcuggauucagcgcuga

SEQ ID NO: 39850 - RNA, 22 nt, Artificial Sequence
  Synthetic
cguccgcuggauucagcgcuga

SEQ ID NO: 39851 - RNA, 23 nt, Artificial Sequence
  Synthetic
ucguccgcuggauucagcgcuga

SEQ ID NO: 39852 - RNA, 24 nt, Artificial Sequence
  Synthetic
gucguccgcuggauucagcgcuga

SEQ ID NO: 39853 - RNA, 18 nt, Artificial Sequence
  Synthetic
caggagauuggugaguga

SEQ ID NO: 39854 - RNA, 19 nt, Artificial Sequence
  Synthetic
acaggagauuggugaguga

SEQ ID NO: 39855 - RNA, 20 nt, Artificial Sequence
  Synthetic
gacaggagauuggugaguga

SEQ ID NO: 39856 - RNA, 21 nt, Artificial Sequence
  Synthetic
ggacaggagauuggugaguga

SEQ ID NO: 39857 - RNA, 22 nt, Artificial Sequence
  Synthetic
aggacaggagauuggugaguga

SEQ ID NO: 39858 - RNA, 23 nt, Artificial Sequence
  Synthetic
gaggacaggagauuggugaguga

SEQ ID NO: 39859 - RNA, 24 nt, Artificial Sequence
  Synthetic
ggaggacaggagauuggugaguga

SEQ ID NO: 39860 - RNA, 18 nt, Artificial Sequence
  Synthetic
uguaacgugcagagguga

SEQ ID NO: 39861 - RNA, 19 nt, Artificial Sequence
  Synthetic
auguaacgugcagagguga

SEQ ID NO: 39862 - RNA, 20 nt, Artificial Sequence
  Synthetic
cauguaacgugcagagguga

SEQ ID NO: 39863 - RNA, 21 nt, Artificial Sequence
  Synthetic
ccauguaacgugcagagguga

SEQ ID NO: 39864 - RNA, 22 nt, Artificial Sequence
  Synthetic
uccauguaacgugcagagguga

SEQ ID NO: 39865 - RNA, 23 nt, Artificial Sequence
  Synthetic
uuccauguaacgugcagagguga

SEQ ID NO: 39866 - RNA, 24 nt, Artificial Sequence
  Synthetic
uuuccauguaacgugcagagguga

SEQ ID NO: 39867 - RNA, 18 nt, Artificial Sequence
  Synthetic
cugagugcuguaugguga

SEQ ID NO: 39868 - RNA, 19 nt, Artificial Sequence
  Synthetic
ccugagugcuguaugguga

SEQ ID NO: 39869 - RNA, 20 nt, Artificial Sequence
  Synthetic
gccugagugcuguaugguga

SEQ ID NO: 39870 - RNA, 21 nt, Artificial Sequence
  Synthetic
ugccugagugcuguaugguga

SEQ ID NO: 39871 - RNA, 22 nt, Artificial Sequence
  Synthetic
uugccugagugcuguaugguga

SEQ ID NO: 39872 - RNA, 23 nt, Artificial Sequence
  Synthetic
cuugccugagugcuguaugguga

SEQ ID NO: 39873 - RNA, 24 nt, Artificial Sequence
  Synthetic
gcuugccugagugcuguaugguga

SEQ ID NO: 39874 - RNA, 18 nt, Artificial Sequence
  Synthetic
gcuggguccaacugguga

SEQ ID NO: 39875 - RNA, 19 nt, Artificial Sequence
  Synthetic
ugcuggguccaacugguga

SEQ ID NO: 39876 - RNA, 20 nt, Artificial Sequence
  Synthetic
augcuggguccaacugguga

SEQ ID NO: 39877 - RNA, 21 nt, Artificial Sequence
  Synthetic
aaugcuggguccaacugguga

SEQ ID NO: 39878 - RNA, 22 nt, Artificial Sequence
  Synthetic
gaaugcuggguccaacugguga

SEQ ID NO: 39879 - RNA, 23 nt, Artificial Sequence
  Synthetic
ugaaugcuggguccaacugguga

SEQ ID NO: 39880 - RNA, 24 nt, Artificial Sequence
  Synthetic
cugaaugcuggguccaacugguga

SEQ ID NO: 39881 - RNA, 18 nt, Artificial Sequence
  Synthetic
guuucucauuuacuguga

SEQ ID NO: 39882 - RNA, 19 nt, Artificial Sequence
  Synthetic
cguuucucauuuacuguga

SEQ ID NO: 39883 - RNA, 20 nt, Artificial Sequence
  Synthetic
ucguuucucauuuacuguga

SEQ ID NO: 39884 - RNA, 21 nt, Artificial Sequence
  Synthetic
uucguuucucauuuacuguga

SEQ ID NO: 39885 - RNA, 22 nt, Artificial Sequence
  Synthetic
cuucguuucucauuuacuguga

SEQ ID NO: 39886 - RNA, 23 nt, Artificial Sequence
  Synthetic
ucuucguuucucauuuacuguga

SEQ ID NO: 39887 - RNA, 24 nt, Artificial Sequence
  Synthetic
aucuucguuucucauuuacuguga

SEQ ID NO: 39888 - RNA, 18 nt, Artificial Sequence
  Synthetic
cucccccuagaaaauuga

SEQ ID NO: 39889 - RNA, 19 nt, Artificial Sequence
  Synthetic
acucccccuagaaaauuga

SEQ ID NO: 39890 - RNA, 20 nt, Artificial Sequence
  Synthetic
cacucccccuagaaaauuga

SEQ ID NO: 39891 - RNA, 21 nt, Artificial Sequence
  Synthetic
gcacucccccuagaaaauuga

SEQ ID NO: 39892 - RNA, 22 nt, Artificial Sequence
  Synthetic
ggcacucccccuagaaaauuga

SEQ ID NO: 39893 - RNA, 23 nt, Artificial Sequence
  Synthetic
gggcacucccccuagaaaauuga

SEQ ID NO: 39894 - RNA, 24 nt, Artificial Sequence
  Synthetic
cgggcacucccccuagaaaauuga

SEQ ID NO: 39895 - RNA, 18 nt, Artificial Sequence
  Synthetic
uacauagaguugccuuga

SEQ ID NO: 39896 - RNA, 19 nt, Artificial Sequence
  Synthetic
auacauagaguugccuuga

SEQ ID NO: 39897 - RNA, 20 nt, Artificial Sequence
  Synthetic
gauacauagaguugccuuga

SEQ ID NO: 39898 - RNA, 21 nt, Artificial Sequence
  Synthetic
ggauacauagaguugccuuga

SEQ ID NO: 39899 - RNA, 22 nt, Artificial Sequence
  Synthetic
gggauacauagaguugccuuga

SEQ ID NO: 39900 - RNA, 23 nt, Artificial Sequence
  Synthetic
agggauacauagaguugccuuga

SEQ ID NO: 39901 - RNA, 24 nt, Artificial Sequence
  Synthetic
gagggauacauagaguugccuuga

SEQ ID NO: 39902 - RNA, 18 nt, Artificial Sequence
  Synthetic
uuaguuauaaugucuuga

SEQ ID NO: 39903 - RNA, 19 nt, Artificial Sequence
  Synthetic
uuuaguuauaaugucuuga

SEQ ID NO: 39904 - RNA, 20 nt, Artificial Sequence
  Synthetic
auuuaguuauaaugucuuga

SEQ ID NO: 39905 - RNA, 21 nt, Artificial Sequence
  Synthetic
cauuuaguuauaaugucuuga

SEQ ID NO: 39906 - RNA, 22 nt, Artificial Sequence
  Synthetic
acauuuaguuauaaugucuuga

SEQ ID NO: 39907 - RNA, 23 nt, Artificial Sequence
  Synthetic
cacauuuaguuauaaugucuuga

SEQ ID NO: 39908 - RNA, 24 nt, Artificial Sequence
  Synthetic
ucacauuuaguuauaaugucuuga

SEQ ID NO: 39909 - RNA, 18 nt, Artificial Sequence
  Synthetic
  misc_feature (6)..(6): n is a, c, g, or u
cuccancccgguuguuga

SEQ ID NO: 39910 - RNA, 19 nt, Artificial Sequence
  Synthetic
  misc_feature (7)..(7): n is a, c, g, or u
ucuccancccgguuguuga

SEQ ID NO: 39911 - RNA, 20 nt, Artificial Sequence
  Synthetic
  misc_feature (8)..(8): n is a, c, g, or u
uucuccancccgguuguuga

SEQ ID NO: 39912 - RNA, 21 nt, Artificial Sequence
  Synthetic
  misc_feature (9)..(9): n is a, c, g, or u
uuucuccancccgguuguuga

SEQ ID NO: 39913 - RNA, 22 nt, Artificial Sequence
  Synthetic
  misc_feature (10)..(10): n is a, c, g, or u
auuucuccancccgguuguuga

SEQ ID NO: 39914 - RNA, 23 nt, Artificial Sequence
  Synthetic
  misc_feature (11)..(11): n is a, c, g, or u
uauuucuccancccgguuguuga

SEQ ID NO: 39915 - RNA, 24 nt, Artificial Sequence
  Synthetic
  misc_feature (12)..(12): n is a, c, g, or u
guauuucuccancccgguuguuga

SEQ ID NO: 39916 - RNA, 18 nt, Artificial Sequence
  Synthetic
  misc_feature (17)..(17): n is a, c, g, or u
gagccaccagcaggaana

SEQ ID NO: 39917 - RNA, 19 nt, Artificial Sequence
  Synthetic
  misc_feature (18)..(18): n is a, c, g, or u
ggagccaccagcaggaana

SEQ ID NO: 39918 - RNA, 20 nt, Artificial Sequence
  Synthetic
  misc_feature (19)..(19): n is a, c, g, or u
uggagccaccagcaggaana

SEQ ID NO: 39919 - RNA, 21 nt, Artificial Sequence
  Synthetic
  misc_feature (20)..(20): n is a, c, g, or u
cuggagccaccagcaggaana

SEQ ID NO: 39920 - RNA, 22 nt, Artificial Sequence
  Synthetic
  misc_feature (21)..(21): n is a, c, g, or u
acuggagccaccagcaggaana

SEQ ID NO: 39921 - RNA, 23 nt, Artificial Sequence
  Synthetic
  misc_feature (22)..(22): n is a, c, g, or u
aacuggagccaccagcaggaana

SEQ ID NO: 39922 - RNA, 24 nt, Artificial Sequence
  Synthetic
  misc_feature (23)..(23): n is a, c, g, or u
gaacuggagccaccagcaggaana

SEQ ID NO: 39923 - RNA, 18 nt, Artificial Sequence
  Synthetic
  misc_feature (17)..(17): n is a, c, g, or u
auugguaacagcgguana

SEQ ID NO: 39924 - RNA, 19 nt, Artificial Sequence
  Synthetic
  misc_feature (18)..(18): n is a, c, g, or u
aauugguaacagcgguana

SEQ ID NO: 39925 - RNA, 20 nt, Artificial Sequence
  Synthetic
  misc_feature (19)..(19): n is a, c, g, or u
aaauugguaacagcgguana

SEQ ID NO: 39926 - RNA, 21 nt, Artificial Sequence
  Synthetic
  misc_feature (20)..(20): n is a, c, g, or u
aaaauugguaacagcgguana

SEQ ID NO: 39927 - RNA, 22 nt, Artificial Sequence
  Synthetic
  misc_feature (21)..(21): n is a, c, g, or u
gaaaauugguaacagcgguana

SEQ ID NO: 39928 - RNA, 23 nt, Artificial Sequence
  Synthetic
  misc_feature (22)..(22): n is a, c, g, or u
agaaaauugguaacagcgguana

SEQ ID NO: 39929 - RNA, 24 nt, Artificial Sequence
  Synthetic
  misc_feature (23)..(23): n is a, c, g, or u
aagaaaauugguaacagcgguana

SEQ ID NO: 39930 - RNA, 18 nt, Artificial Sequence
  Synthetic
  misc_feature (17)..(17): n is a, c, g, or u
ccaauaccacaucaucna

SEQ ID NO: 39931 - RNA, 19 nt, Artificial Sequence
  Synthetic
  misc_feature (18)..(18): n is a, c, g, or u
cccaauaccacaucaucna

SEQ ID NO: 39932 - RNA, 20 nt, Artificial Sequence
  Synthetic
  misc_feature (19)..(19): n is a, c, g, or u
ccccaauaccacaucaucna

SEQ ID NO: 39933 - RNA, 21 nt, Artificial Sequence
  Synthetic
  misc_feature (20)..(20): n is a, c, g, or u
cccccaauaccacaucaucna

SEQ ID NO: 39934 - RNA, 22 nt, Artificial Sequence
  Synthetic
  misc_feature (21)..(21): n is a, c, g, or u
gcccccaauaccacaucaucna

SEQ ID NO: 39935 - RNA, 23 nt, Artificial Sequence
  Synthetic
  misc_feature (22)..(22): n is a, c, g, or u
ggcccccaauaccacaucaucna

SEQ ID NO: 39936 - RNA, 24 nt, Artificial Sequence
  Synthetic
  misc_feature (23)..(23): n is a, c, g, or u
uggcccccaauaccacaucaucna

SEQ ID NO: 39937 - RNA, 18 nt, Artificial Sequence
  Synthetic
uccaaaagacaccaaaua

SEQ ID NO: 39938 - RNA, 19 nt, Artificial Sequence
  Synthetic
cuccaaaagacaccaaaua

SEQ ID NO: 39939 - RNA, 20 nt, Artificial Sequence
  Synthetic
acuccaaaagacaccaaaua

SEQ ID NO: 39940 - RNA, 21 nt, Artificial Sequence
  Synthetic
cacuccaaaagacaccaaaua

SEQ ID NO: 39941 - RNA, 22 nt, Artificial Sequence
  Synthetic
acacuccaaaagacaccaaaua

SEQ ID NO: 39942 - RNA, 23 nt, Artificial Sequence
  Synthetic
cacacuccaaaagacaccaaaua

SEQ ID NO: 39943 - RNA, 24 nt, Artificial Sequence
  Synthetic
ccacacuccaaaagacaccaaaua

SEQ ID NO: 39944 - RNA, 18 nt, Artificial Sequence
  Synthetic
gagaugugagaggcaaua

SEQ ID NO: 39945 - RNA, 19 nt, Artificial Sequence
  Synthetic
cgagaugugagaggcaaua

SEQ ID NO: 39946 - RNA, 20 nt, Artificial Sequence
  Synthetic
acgagaugugagaggcaaua

SEQ ID NO: 39947 - RNA, 21 nt, Artificial Sequence
  Synthetic
gacgagaugugagaggcaaua

SEQ ID NO: 39948 - RNA, 22 nt, Artificial Sequence
  Synthetic
ugacgagaugugagaggcaaua

SEQ ID NO: 39949 - RNA, 23 nt, Artificial Sequence
  Synthetic
uugacgagaugugagaggcaaua

SEQ ID NO: 39950 - RNA, 24 nt, Artificial Sequence
  Synthetic
auugacgagaugugagaggcaaua

SEQ ID NO: 39951 - RNA, 18 nt, Artificial Sequence
  Synthetic
gccuacagccuccuaaua

SEQ ID NO: 39952 - RNA, 19 nt, Artificial Sequence
  Synthetic
ugccuacagccuccuaaua

SEQ ID NO: 39953 - RNA, 20 nt, Artificial Sequence
  Synthetic
augccuacagccuccuaaua

SEQ ID NO: 39954 - RNA, 21 nt, Artificial Sequence
  Synthetic
uaugccuacagccuccuaaua

SEQ ID NO: 39955 - RNA, 22 nt, Artificial Sequence
  Synthetic
uuaugccuacagccuccuaaua

SEQ ID NO: 39956 - RNA, 23 nt, Artificial Sequence
  Synthetic
uuuaugccuacagccuccuaaua

SEQ ID NO: 39957 - RNA, 24 nt, Artificial Sequence
  Synthetic
auuuaugccuacagccuccuaaua

SEQ ID NO: 39958 - RNA, 18 nt, Artificial Sequence
  Synthetic
cauauuaguauuaacaua

SEQ ID NO: 39959 - RNA, 19 nt, Artificial Sequence
  Synthetic
ccauauuaguauuaacaua

SEQ ID NO: 39960 - RNA, 20 nt, Artificial Sequence
  Synthetic
cccauauuaguauuaacaua

SEQ ID NO: 39961 - RNA, 21 nt, Artificial Sequence
  Synthetic
acccauauuaguauuaacaua

SEQ ID NO: 39962 - RNA, 22 nt, Artificial Sequence
  Synthetic
aacccauauuaguauuaacaua

SEQ ID NO: 39963 - RNA, 23 nt, Artificial Sequence
  Synthetic
aaacccauauuaguauuaacaua

SEQ ID NO: 39964 - RNA, 24 nt, Artificial Sequence
  Synthetic
uaaacccauauuaguauuaacaua

SEQ ID NO: 39965 - RNA, 18 nt, Artificial Sequence
  Synthetic
  misc_feature (2)..(2): n is a, c, g, or u
ancccgguuguugacaua

SEQ ID NO: 39966 - RNA, 19 nt, Artificial Sequence
  Synthetic
  misc_feature (3)..(3): n is a, c, g, or u
cancccgguuguugacaua

SEQ ID NO: 39967 - RNA, 20 nt, Artificial Sequence
  Synthetic
  misc_feature (4)..(4): n is a, c, g, or u
ccancccgguuguugacaua

SEQ ID NO: 39968 - RNA, 21 nt, Artificial Sequence
  Synthetic
  misc_feature (5)..(5): n is a, c, g, or u
uccancccgguuguugacaua

SEQ ID NO: 39969 - RNA, 22 nt, Artificial Sequence
  Synthetic
  misc_feature (6)..(6): n is a, c, g, or u
cuccancccgguuguugacaua

SEQ ID NO: 39970 - RNA, 23 nt, Artificial Sequence
  Synthetic
  misc_feature (7)..(7): n is a, c, g, or u
ucuccancccgguuguugacaua

SEQ ID NO: 39971 - RNA, 24 nt, Artificial Sequence
  Synthetic
  misc_feature (8)..(8): n is a, c, g, or u
uucuccancccgguuguugacaua

SEQ ID NO: 39972 - RNA, 18 nt, Artificial Sequence
  Synthetic
agcuuguauacaugcaua

SEQ ID NO: 39973 - RNA, 19 nt, Artificial Sequence
  Synthetic
uagcuuguauacaugcaua

SEQ ID NO: 39974 - RNA, 20 nt, Artificial Sequence
  Synthetic
uuagcuuguauacaugcaua

SEQ ID NO: 39975 - RNA, 21 nt, Artificial Sequence
  Synthetic
cuuagcuuguauacaugcaua

SEQ ID NO: 39976 - RNA, 22 nt, Artificial Sequence
  Synthetic
gcuuagcuuguauacaugcaua

SEQ ID NO: 39977 - RNA, 23 nt, Artificial Sequence
  Synthetic
ugcuuagcuuguauacaugcaua

SEQ ID NO: 39978 - RNA, 24 nt, Artificial Sequence
  Synthetic
cugcuuagcuuguauacaugcaua

SEQ ID NO: 39979 - RNA, 18 nt, Artificial Sequence
  Synthetic
cagacacauccagcgaua

SEQ ID NO: 39980 - RNA, 19 nt, Artificial Sequence
  Synthetic
gcagacacauccagcgaua

SEQ ID NO: 39981 - RNA, 20 nt, Artificial Sequence
  Synthetic
cgcagacacauccagcgaua

SEQ ID NO: 39982 - RNA, 21 nt, Artificial Sequence
  Synthetic
ccgcagacacauccagcgaua

SEQ ID NO: 39983 - RNA, 22 nt, Artificial Sequence
  Synthetic
gccgcagacacauccagcgaua

SEQ ID NO: 39984 - RNA, 23 nt, Artificial Sequence
  Synthetic
cgccgcagacacauccagcgaua

SEQ ID NO: 39985 - RNA, 24 nt, Artificial Sequence
  Synthetic
acgccgcagacacauccagcgaua

SEQ ID NO: 39986 - RNA, 18 nt, Artificial Sequence
  Synthetic
acagcaacaugagggaua

SEQ ID NO: 39987 - RNA, 19 nt, Artificial Sequence
  Synthetic
uacagcaacaugagggaua

SEQ ID NO: 39988 - RNA, 20 nt, Artificial Sequence
  Synthetic
guacagcaacaugagggaua

SEQ ID NO: 39989 - RNA, 21 nt, Artificial Sequence
  Synthetic
uguacagcaacaugagggaua

SEQ ID NO: 39990 - RNA, 22 nt, Artificial Sequence
  Synthetic
uuguacagcaacaugagggaua

SEQ ID NO: 39991 - RNA, 23 nt, Artificial Sequence
  Synthetic
uuuguacagcaacaugagggaua

SEQ ID NO: 39992 - RNA, 24 nt, Artificial Sequence
  Synthetic
uuuuguacagcaacaugagggaua

SEQ ID NO: 39993 - RNA, 18 nt, Artificial Sequence
  Synthetic
ucuugaugcaaauggaua

SEQ ID NO: 39994 - RNA, 19 nt, Artificial Sequence
  Synthetic
gucuugaugcaaauggaua

SEQ ID NO: 39995 - RNA, 20 nt, Artificial Sequence
  Synthetic
ugucuugaugcaaauggaua

SEQ ID NO: 39996 - RNA, 21 nt, Artificial Sequence
  Synthetic
augucuugaugcaaauggaua

SEQ ID NO: 39997 - RNA, 22 nt, Artificial Sequence
  Synthetic
aaugucuugaugcaaauggaua

SEQ ID NO: 39998 - RNA, 23 nt, Artificial Sequence
  Synthetic
uaaugucuugaugcaaauggaua

SEQ ID NO: 39999 - RNA, 24 nt, Artificial Sequence
  Synthetic
auaaugucuugaugcaaauggaua

SEQ ID NO: 40000 - RNA, 18 nt, Artificial Sequence
  Synthetic
  misc_feature (13)..(13): n is a, c, g, or u
uaccacaucaucnauaua

SEQ ID NO: 40001 - RNA, 19 nt, Artificial Sequence
  Synthetic
  misc_feature (14)..(14): n is a, c, g, or u
auaccacaucaucnauaua

SEQ ID NO: 40002 - RNA, 20 nt, Artificial Sequence
  Synthetic
  misc_feature (15)..(15): n is a, c, g, or u
aauaccacaucaucnauaua

SEQ ID NO: 40003 - RNA, 21 nt, Artificial Sequence
  Synthetic
  misc_feature (16)..(16): n is a, c, g, or u
caauaccacaucaucnauaua

SEQ ID NO: 40004 - RNA, 22 nt, Artificial Sequence
  Synthetic
  misc_feature (17)..(17): n is a, c, g, or u
ccaauaccacaucaucnauaua

SEQ ID NO: 40005 - RNA, 23 nt, Artificial Sequence
  Synthetic
  misc_feature (18)..(18): n is a, c, g, or u
cccaauaccacaucaucnauaua

SEQ ID NO: 40006 - RNA, 24 nt, Artificial Sequence
  Synthetic
  misc_feature (19)..(19): n is a, c, g, or u
ccccaauaccacaucaucnauaua

SEQ ID NO: 40007 - RNA, 18 nt, Artificial Sequence
  Synthetic
ggcauuugguggucuaua

SEQ ID NO: 40008 - RNA, 19 nt, Artificial Sequence
  Synthetic
gggcauuugguggucuaua

SEQ ID NO: 40009 - RNA, 20 nt, Artificial Sequence
  Synthetic
ggggcauuugguggucuaua

SEQ ID NO: 40010 - RNA, 21 nt, Artificial Sequence
  Synthetic
aggggcauuugguggucuaua

SEQ ID NO: 40011 - RNA, 22 nt, Artificial Sequence
  Synthetic
uaggggcauuugguggucuaua

SEQ ID NO: 40012 - RNA, 23 nt, Artificial Sequence
  Synthetic
auaggggcauuugguggucuaua

SEQ ID NO: 40013 - RNA, 24 nt, Artificial Sequence
  Synthetic
gauaggggcauuugguggucuaua

SEQ ID NO: 40014 - RNA, 18 nt, Artificial Sequence
  Synthetic
ggauuaaagacagguaua

SEQ ID NO: 40015 - RNA, 19 nt, Artificial Sequence
  Synthetic
aggauuaaagacagguaua

SEQ ID NO: 40016 - RNA, 20 nt, Artificial Sequence
  Synthetic
caggauuaaagacagguaua

SEQ ID NO: 40017 - RNA, 21 nt, Artificial Sequence
  Synthetic
ucaggauuaaagacagguaua

SEQ ID NO: 40018 - RNA, 22 nt, Artificial Sequence
  Synthetic
aucaggauuaaagacagguaua

SEQ ID NO: 40019 - RNA, 23 nt, Artificial Sequence
  Synthetic
aaucaggauuaaagacagguaua

SEQ ID NO: 40020 - RNA, 24 nt, Artificial Sequence
  Synthetic
caaucaggauuaaagacagguaua

SEQ ID NO: 40021 - RNA, 18 nt, Artificial Sequence
  Synthetic
  misc_feature (4)..(4): n is a, c, g, or u
uuangguuuagauguaua

SEQ ID NO: 40022 - RNA, 19 nt, Artificial Sequence
  Synthetic
  misc_feature (5)..(5): n is a, c, g, or u
guuangguuuagauguaua

SEQ ID NO: 40023 - RNA, 20 nt, Artificial Sequence
  Synthetic
  misc_feature (6)..(6): n is a, c, g, or u
uguuangguuuagauguaua

SEQ ID NO: 40024 - RNA, 21 nt, Artificial Sequence
  Synthetic
  misc_feature (7)..(7): n is a, c, g, or u
uuguuangguuuagauguaua

SEQ ID NO: 40025 - RNA, 22 nt, Artificial Sequence
  Synthetic
  misc_feature (8)..(8): n is a, c, g, or u
uuuguuangguuuagauguaua

SEQ ID NO: 40026 - RNA, 23 nt, Artificial Sequence
  Synthetic
  misc_feature (9)..(9): n is a, c, g, or u
uuuuguuangguuuagauguaua

SEQ ID NO: 40027 - RNA, 24 nt, Artificial Sequence
  Synthetic
  misc_feature (10)..(10): n is a, c, g, or u
guuuuguuangguuuagauguaua

SEQ ID NO: 40028 - RNA, 18 nt, Artificial Sequence
  Synthetic
acugaacaaauggcacua

SEQ ID NO: 40029 - RNA, 19 nt, Artificial Sequence
  Synthetic
cacugaacaaauggcacua

SEQ ID NO: 40030 - RNA, 20 nt, Artificial Sequence
  Synthetic
ccacugaacaaauggcacua

SEQ ID NO: 40031 - RNA, 21 nt, Artificial Sequence
  Synthetic
accacugaacaaauggcacua

SEQ ID NO: 40032 - RNA, 22 nt, Artificial Sequence
  Synthetic
aaccacugaacaaauggcacua

SEQ ID NO: 40033 - RNA, 23 nt, Artificial Sequence
  Synthetic
gaaccacugaacaaauggcacua

SEQ ID NO: 40034 - RNA, 24 nt, Artificial Sequence
  Synthetic
cgaaccacugaacaaauggcacua

SEQ ID NO: 40035 - RNA, 18 nt, Artificial Sequence
  Synthetic
uuaaagacagguauagua

SEQ ID NO: 40036 - RNA, 19 nt, Artificial Sequence
  Synthetic
auuaaagacagguauagua

SEQ ID NO: 40037 - RNA, 20 nt, Artificial Sequence
  Synthetic
gauuaaagacagguauagua

SEQ ID NO: 40038 - RNA, 21 nt, Artificial Sequence
  Synthetic
ggauuaaagacagguauagua

SEQ ID NO: 40039 - RNA, 22 nt, Artificial Sequence
  Synthetic
aggauuaaagacagguauagua

SEQ ID NO: 40040 - RNA, 23 nt, Artificial Sequence
  Synthetic
caggauuaaagacagguauagua

SEQ ID NO: 40041 - RNA, 24 nt, Artificial Sequence
  Synthetic
ucaggauuaaagacagguauagua

SEQ ID NO: 40042 - RNA, 18 nt, Artificial Sequence
  Synthetic
cagcgcugacgggacgua

SEQ ID NO: 40043 - RNA, 19 nt, Artificial Sequence
  Synthetic
ucagcgcugacgggacgua

SEQ ID NO: 40044 - RNA, 20 nt, Artificial Sequence
  Synthetic
uucagcgcugacgggacgua

SEQ ID NO: 40045 - RNA, 21 nt, Artificial Sequence
  Synthetic
auucagcgcugacgggacgua

SEQ ID NO: 40046 - RNA, 22 nt, Artificial Sequence
  Synthetic
gauucagcgcugacgggacgua

SEQ ID NO: 40047 - RNA, 23 nt, Artificial Sequence
  Synthetic
ggauucagcgcugacgggacgua

SEQ ID NO: 40048 - RNA, 24 nt, Artificial Sequence
  Synthetic
uggauucagcgcugacgggacgua

SEQ ID NO: 40049 - RNA, 18 nt, Artificial Sequence
  Synthetic
agacggggagaccgcgua

SEQ ID NO: 40050 - RNA, 19 nt, Artificial Sequence
  Synthetic
cagacggggagaccgcgua

SEQ ID NO: 40051 - RNA, 20 nt, Artificial Sequence
  Synthetic
acagacggggagaccgcgua

SEQ ID NO: 40052 - RNA, 21 nt, Artificial Sequence
  Synthetic
aacagacggggagaccgcgua

SEQ ID NO: 40053 - RNA, 22 nt, Artificial Sequence
  Synthetic
gaacagacggggagaccgcgua

SEQ ID NO: 40054 - RNA, 23 nt, Artificial Sequence
  Synthetic
ggaacagacggggagaccgcgua

SEQ ID NO: 40055 - RNA, 24 nt, Artificial Sequence
  Synthetic
aggaacagacggggagaccgcgua

SEQ ID NO: 40056 - RNA, 18 nt, Artificial Sequence
  Synthetic
cucuaaggauucccggua

SEQ ID NO: 40057 - RNA, 19 nt, Artificial Sequence
  Synthetic
acucuaaggauucccggua

SEQ ID NO: 40058 - RNA, 20 nt, Artificial Sequence
  Synthetic
gacucuaaggauucccggua

SEQ ID NO: 40059 - RNA, 21 nt, Artificial Sequence
  Synthetic
ggacucuaaggauucccggua

SEQ ID NO: 40060 - RNA, 22 nt, Artificial Sequence
  Synthetic
aggacucuaaggauucccggua

SEQ ID NO: 40061 - RNA, 23 nt, Artificial Sequence
  Synthetic
gaggacucuaaggauucccggua

SEQ ID NO: 40062 - RNA, 24 nt, Artificial Sequence
  Synthetic
agaggacucuaaggauucccggua

SEQ ID NO: 40063 - RNA, 18 nt, Artificial Sequence
  Synthetic
aaauugguaacagcggua

SEQ ID NO: 40064 - RNA, 19 nt, Artificial Sequence
  Synthetic
aaaauugguaacagcggua

SEQ ID NO: 40065 - RNA, 20 nt, Artificial Sequence
  Synthetic
gaaaauugguaacagcggua

SEQ ID NO: 40066 - RNA, 21 nt, Artificial Sequence
  Synthetic
agaaaauugguaacagcggua

SEQ ID NO: 40067 - RNA, 22 nt, Artificial Sequence
  Synthetic
aagaaaauugguaacagcggua

SEQ ID NO: 40068 - RNA, 23 nt, Artificial Sequence
  Synthetic
aaagaaaauugguaacagcggua

SEQ ID NO: 40069 - RNA, 24 nt, Artificial Sequence
  Synthetic
aaaagaaaauugguaacagcggua

SEQ ID NO: 40070 - RNA, 18 nt, Artificial Sequence
  Synthetic
cccgccuuccaaagggua

SEQ ID NO: 40071 - RNA, 19 nt, Artificial Sequence
  Synthetic
acccgccuuccaaagggua

SEQ ID NO: 40072 - RNA, 20 nt, Artificial Sequence
  Synthetic
uacccgccuuccaaagggua

SEQ ID NO: 40073 - RNA, 21 nt, Artificial Sequence
  Synthetic
auacccgccuuccaaagggua

SEQ ID NO: 40074 - RNA, 22 nt, Artificial Sequence
  Synthetic
aauacccgccuuccaaagggua

SEQ ID NO: 40075 - RNA, 23 nt, Artificial Sequence
  Synthetic
gaauacccgccuuccaaagggua

SEQ ID NO: 40076 - RNA, 24 nt, Artificial Sequence
  Synthetic
agaauacccgccuuccaaagggua

SEQ ID NO: 40077 - RNA, 18 nt, Artificial Sequence
  Synthetic
ggguaaccacauugggua

SEQ ID NO: 40078 - RNA, 19 nt, Artificial Sequence
  Synthetic
aggguaaccacauugggua

SEQ ID NO: 40079 - RNA, 20 nt, Artificial Sequence
  Synthetic
caggguaaccacauugggua

SEQ ID NO: 40080 - RNA, 21 nt, Artificial Sequence
  Synthetic
gcaggguaaccacauugggua

SEQ ID NO: 40081 - RNA, 22 nt, Artificial Sequence
  Synthetic
ggcaggguaaccacauugggua

SEQ ID NO: 40082 - RNA, 23 nt, Artificial Sequence
  Synthetic
aggcaggguaaccacauugggua

SEQ ID NO: 40083 - RNA, 24 nt, Artificial Sequence
  Synthetic
aaggcaggguaaccacauugggua

SEQ ID NO: 40084 - RNA, 18 nt, Artificial Sequence
  Synthetic
augaacaagagaugauua

SEQ ID NO: 40085 - RNA, 19 nt, Artificial Sequence
  Synthetic
caugaacaagagaugauua

SEQ ID NO: 40086 - RNA, 20 nt, Artificial Sequence
  Synthetic
acaugaacaagagaugauua

SEQ ID NO: 40087 - RNA, 21 nt, Artificial Sequence
  Synthetic
gacaugaacaagagaugauua

SEQ ID NO: 40088 - RNA, 22 nt, Artificial Sequence
  Synthetic
ggacaugaacaagagaugauua

SEQ ID NO: 40089 - RNA, 23 nt, Artificial Sequence
  Synthetic
  misc_feature (1)..(1): n is a, c, g, or u
nggacaugaacaagagaugauua

SEQ ID NO: 40090 - RNA, 24 nt, Artificial Sequence
  Synthetic
  misc_feature (2)..(2): n is a, c, g, or u
unggacaugaacaagagaugauua

SEQ ID NO: 40091 - RNA, 18 nt, Artificial Sequence
  Synthetic
aguccaagaguccucuua

SEQ ID NO: 40092 - RNA, 19 nt, Artificial Sequence
  Synthetic
caguccaagaguccucuua

SEQ ID NO: 40093 - RNA, 20 nt, Artificial Sequence
  Synthetic
acaguccaagaguccucuua

SEQ ID NO: 40094 - RNA, 21 nt, Artificial Sequence
  Synthetic
aacaguccaagaguccucuua

SEQ ID NO: 40095 - RNA, 22 nt, Artificial Sequence
  Synthetic
aaacaguccaagaguccucuua

SEQ ID NO: 40096 - RNA, 23 nt, Artificial Sequence
  Synthetic
caaacaguccaagaguccucuua

SEQ ID NO: 40097 - RNA, 24 nt, Artificial Sequence
  Synthetic
acaaacaguccaagaguccucuua

SEQ ID NO: 40098 - RNA, 18 nt, Artificial Sequence
  Synthetic
cgggauguuucucucuua

SEQ ID NO: 40099 - RNA, 19 nt, Artificial Sequence
  Synthetic
acgggauguuucucucuua

SEQ ID NO: 40100 - RNA, 20 nt, Artificial Sequence
  Synthetic
uacgggauguuucucucuua

SEQ ID NO: 40101 - RNA, 21 nt, Artificial Sequence
  Synthetic
cuacgggauguuucucucuua

SEQ ID NO: 40102 - RNA, 22 nt, Artificial Sequence
  Synthetic
gcuacgggauguuucucucuua

SEQ ID NO: 40103 - RNA, 23 nt, Artificial Sequence
  Synthetic
cgcuacgggauguuucucucuua

SEQ ID NO: 40104 - RNA, 24 nt, Artificial Sequence
  Synthetic
gcgcuacgggauguuucucucuua

SEQ ID NO: 40105 - RNA, 18 nt, Artificial Sequence
  Synthetic
caaucaauuggccuguua

SEQ ID NO: 40106 - RNA, 19 nt, Artificial Sequence
  Synthetic
ccaaucaauuggccuguua

SEQ ID NO: 40107 - RNA, 20 nt, Artificial Sequence
  Synthetic
uccaaucaauuggccuguua

SEQ ID NO: 40108 - RNA, 21 nt, Artificial Sequence
  Synthetic
uuccaaucaauuggccuguua

SEQ ID NO: 40109 - RNA, 22 nt, Artificial Sequence
  Synthetic
uuuccaaucaauuggccuguua

SEQ ID NO: 40110 - RNA, 23 nt, Artificial Sequence
  Synthetic
cuuuccaaucaauuggccuguua

SEQ ID NO: 40111 - RNA, 24 nt, Artificial Sequence
  Synthetic
acuuuccaaucaauuggccuguua

SEQ ID NO: 40112 - RNA, 18 nt, Artificial Sequence
  Synthetic
ucuaaugguaaauauuua

SEQ ID NO: 40113 - RNA, 19 nt, Artificial Sequence
  Synthetic
gucuaaugguaaauauuua

SEQ ID NO: 40114 - RNA, 20 nt, Artificial Sequence
  Synthetic
ugucuaaugguaaauauuua

SEQ ID NO: 40115 - RNA, 21 nt, Artificial Sequence
  Synthetic
uugucuaaugguaaauauuua

SEQ ID NO: 40116 - RNA, 22 nt, Artificial Sequence
  Synthetic
uuugucuaaugguaaauauuua

SEQ ID NO: 40117 - RNA, 23 nt, Artificial Sequence
  Synthetic
cuuugucuaaugguaaauauuua

SEQ ID NO: 40118 - RNA, 24 nt, Artificial Sequence
  Synthetic
ccuuugucuaaugguaaauauuua

SEQ ID NO: 40119 - RNA, 18 nt, Artificial Sequence
  Synthetic
guagcuccaaauucuuua

SEQ ID NO: 40120 - RNA, 19 nt, Artificial Sequence
  Synthetic
aguagcuccaaauucuuua

SEQ ID NO: 40121 - RNA, 20 nt, Artificial Sequence
  Synthetic
caguagcuccaaauucuuua

SEQ ID NO: 40122 - RNA, 21 nt, Artificial Sequence
  Synthetic
acaguagcuccaaauucuuua

SEQ ID NO: 40123 - RNA, 22 nt, Artificial Sequence
  Synthetic
cacaguagcuccaaauucuuua

SEQ ID NO: 40124 - RNA, 23 nt, Artificial Sequence
  Synthetic
ccacaguagcuccaaauucuuua

SEQ ID NO: 40125 - RNA, 24 nt, Artificial Sequence
  Synthetic
uccacaguagcuccaaauucuuua

SEQ ID NO: 40126 - RNA, 18 nt, Artificial Sequence
  Synthetic
agguucauguauuguuua

SEQ ID NO: 40127 - RNA, 19 nt, Artificial Sequence
  Synthetic
aagguucauguauuguuua

SEQ ID NO: 40128 - RNA, 20 nt, Artificial Sequence
  Synthetic
aaagguucauguauuguuua

SEQ ID NO: 40129 - RNA, 21 nt, Artificial Sequence
  Synthetic
uaaagguucauguauuguuua

SEQ ID NO: 40130 - RNA, 22 nt, Artificial Sequence
  Synthetic
guaaagguucauguauuguuua

SEQ ID NO: 40131 - RNA, 23 nt, Artificial Sequence
  Synthetic
gguaaagguucauguauuguuua

SEQ ID NO: 40132 - RNA, 24 nt, Artificial Sequence
  Synthetic
ggguaaagguucauguauuguuua

SEQ ID NO: 40133 - RNA, 18 nt, Artificial Sequence
  Synthetic
aagucagaaggcaaaaac

SEQ ID NO: 40134 - RNA, 19 nt, Artificial Sequence
  Synthetic
aaagucagaaggcaaaaac

SEQ ID NO: 40135 - RNA, 20 nt, Artificial Sequence
  Synthetic
aaaagucagaaggcaaaaac

SEQ ID NO: 40136 - RNA, 21 nt, Artificial Sequence
  Synthetic
aaaaagucagaaggcaaaaac

SEQ ID NO: 40137 - RNA, 22 nt, Artificial Sequence
  Synthetic
gaaaaagucagaaggcaaaaac

SEQ ID NO: 40138 - RNA, 23 nt, Artificial Sequence
  Synthetic
ggaaaaagucagaaggcaaaaac

SEQ ID NO: 40139 - RNA, 24 nt, Artificial Sequence
  Synthetic
gggaaaaagucagaaggcaaaaac

SEQ ID NO: 40140 - RNA, 18 nt, Artificial Sequence
  Synthetic
cgcugacgggacguaaac

SEQ ID NO: 40141 - RNA, 19 nt, Artificial Sequence
  Synthetic
gcgcugacgggacguaaac

SEQ ID NO: 40142 - RNA, 20 nt, Artificial Sequence
  Synthetic
agcgcugacgggacguaaac

SEQ ID NO: 40143 - RNA, 18 nt, Artificial Sequence
  Synthetic
uaguccagaagaaccaac

SEQ ID NO: 40144 - RNA, 19 nt, Artificial Sequence
  Synthetic
auaguccagaagaaccaac

SEQ ID NO: 40145 - RNA, 20 nt, Artificial Sequence
  Synthetic
gauaguccagaagaaccaac

SEQ ID NO: 40146 - RNA, 21 nt, Artificial Sequence
  Synthetic
ugauaguccagaagaaccaac

SEQ ID NO: 40147 - RNA, 22 nt, Artificial Sequence
  Synthetic
uugauaguccagaagaaccaac

SEQ ID NO: 40148 - RNA, 23 nt, Artificial Sequence
  Synthetic
cuugauaguccagaagaaccaac

SEQ ID NO: 40149 - RNA, 24 nt, Artificial Sequence
  Synthetic
ccuugauaguccagaagaaccaac

SEQ ID NO: 40150 - RNA, 18 nt, Artificial Sequence
  Synthetic
aagguuuuguacagcaac

SEQ ID NO: 40151 - RNA, 19 nt, Artificial Sequence
  Synthetic
gaagguuuuguacagcaac

SEQ ID NO: 40152 - RNA, 20 nt, Artificial Sequence
  Synthetic
cgaagguuuuguacagcaac

SEQ ID NO: 40153 - RNA, 21 nt, Artificial Sequence
  Synthetic
ccgaagguuuuguacagcaac

SEQ ID NO: 40154 - RNA, 22 nt, Artificial Sequence
  Synthetic
uccgaagguuuuguacagcaac

SEQ ID NO: 40155 - RNA, 23 nt, Artificial Sequence
  Synthetic
guccgaagguuuuguacagcaac

SEQ ID NO: 40156 - RNA, 24 nt, Artificial Sequence
  Synthetic
cguccgaagguuuuguacagcaac

SEQ ID NO: 40157 - RNA, 18 nt, Artificial Sequence
  Synthetic
gugaggauucuugucaac

SEQ ID NO: 40158 - RNA, 19 nt, Artificial Sequence
  Synthetic
ugugaggauucuugucaac

SEQ ID NO: 40159 - RNA, 20 nt, Artificial Sequence
  Synthetic
uugugaggauucuugucaac

SEQ ID NO: 40160 - RNA, 21 nt, Artificial Sequence
  Synthetic
auugugaggauucuugucaac

SEQ ID NO: 40161 - RNA, 22 nt, Artificial Sequence
  Synthetic
uauugugaggauucuugucaac

SEQ ID NO: 40162 - RNA, 23 nt, Artificial Sequence
  Synthetic
guauugugaggauucuugucaac

SEQ ID NO: 40163 - RNA, 24 nt, Artificial Sequence
  Synthetic
gguauugugaggauucuugucaac

SEQ ID NO: 40164 - RNA, 18 nt, Artificial Sequence
  Synthetic
cccguggucggcaggaac

SEQ ID NO: 40165 - RNA, 19 nt, Artificial Sequence
  Synthetic
ccccguggucggcaggaac

SEQ ID NO: 40166 - RNA, 20 nt, Artificial Sequence
  Synthetic
gccccguggucggcaggaac

SEQ ID NO: 40167 - RNA, 18 nt, Artificial Sequence
  Synthetic
  misc_feature (8)..(8): n is a, c, g, or u
gaacagunggacaugaac

SEQ ID NO: 40168 - RNA, 19 nt, Artificial Sequence
  Synthetic
  misc_feature (9)..(9): n is a, c, g, or u
ugaacagunggacaugaac

SEQ ID NO: 40169 - RNA, 20 nt, Artificial Sequence
  Synthetic
  misc_feature (10)..(10): n is a, c, g, or u
uugaacagunggacaugaac

SEQ ID NO: 40170 - RNA, 21 nt, Artificial Sequence
  Synthetic
  misc_feature (11)..(11): n is a, c, g, or u
cuugaacagunggacaugaac

SEQ ID NO: 40171 - RNA, 22 nt, Artificial Sequence
  Synthetic
  misc_feature (12)..(12): n is a, c, g, or u
gcuugaacagunggacaugaac

SEQ ID NO: 40172 - RNA, 23 nt, Artificial Sequence
  Synthetic
  misc_feature (13)..(13): n is a, c, g, or u
ggcuugaacagunggacaugaac

SEQ ID NO: 40173 - RNA, 24 nt, Artificial Sequence
  Synthetic
  misc_feature (14)..(14): n is a, c, g, or u
aggcuugaacagunggacaugaac

SEQ ID NO: 40174 - RNA, 18 nt, Artificial Sequence
  Synthetic
gguucacuaucccugaac

SEQ ID NO: 40175 - RNA, 19 nt, Artificial Sequence
  Synthetic
ggguucacuaucccugaac

SEQ ID NO: 40176 - RNA, 20 nt, Artificial Sequence
  Synthetic
aggguucacuaucccugaac

SEQ ID NO: 40177 - RNA, 21 nt, Artificial Sequence
  Synthetic
caggguucacuaucccugaac

SEQ ID NO: 40178 - RNA, 22 nt, Artificial Sequence
  Synthetic
acaggguucacuaucccugaac

SEQ ID NO: 40179 - RNA, 23 nt, Artificial Sequence
  Synthetic
aacaggguucacuaucccugaac

SEQ ID NO: 40180 - RNA, 24 nt, Artificial Sequence
  Synthetic
gaacaggguucacuaucccugaac

SEQ ID NO: 40181 - RNA, 18 nt, Artificial Sequence
  Synthetic
aguccaaggaauacuaac

SEQ ID NO: 40182 - RNA, 19 nt, Artificial Sequence
  Synthetic
gaguccaaggaauacuaac

SEQ ID NO: 40183 - RNA, 20 nt, Artificial Sequence
  Synthetic
ugaguccaaggaauacuaac

SEQ ID NO: 40184 - RNA, 21 nt, Artificial Sequence
  Synthetic
gugaguccaaggaauacuaac

SEQ ID NO: 40185 - RNA, 22 nt, Artificial Sequence
  Synthetic
ugugaguccaaggaauacuaac

SEQ ID NO: 40186 - RNA, 23 nt, Artificial Sequence
  Synthetic
uugugaguccaaggaauacuaac

SEQ ID NO: 40187 - RNA, 24 nt, Artificial Sequence
  Synthetic
cuugugaguccaaggaauacuaac

SEQ ID NO: 40188 - RNA, 18 nt, Artificial Sequence
  Synthetic
aaaaaccccgccuguaac

SEQ ID NO: 40189 - RNA, 19 nt, Artificial Sequence
  Synthetic
gaaaaaccccgccuguaac

SEQ ID NO: 40190 - RNA, 20 nt, Artificial Sequence
  Synthetic
agaaaaaccccgccuguaac

SEQ ID NO: 40191 - RNA, 21 nt, Artificial Sequence
  Synthetic
aagaaaaaccccgccuguaac

SEQ ID NO: 40192 - RNA, 22 nt, Artificial Sequence
  Synthetic
caagaaaaaccccgccuguaac

SEQ ID NO: 40193 - RNA, 23 nt, Artificial Sequence
  Synthetic
acaagaaaaaccccgccuguaac

SEQ ID NO: 40194 - RNA, 24 nt, Artificial Sequence
  Synthetic
aacaagaaaaaccccgccuguaac

SEQ ID NO: 40195 - RNA, 18 nt, Artificial Sequence
  Synthetic
aauacaaaggucauuaac

SEQ ID NO: 40196 - RNA, 19 nt, Artificial Sequence
  Synthetic
uaauacaaaggucauuaac

SEQ ID NO: 40197 - RNA, 20 nt, Artificial Sequence
  Synthetic
cuaauacaaaggucauuaac

SEQ ID NO: 40198 - RNA, 21 nt, Artificial Sequence
  Synthetic
ccuaauacaaaggucauuaac

SEQ ID NO: 40199 - RNA, 22 nt, Artificial Sequence
  Synthetic
uccuaauacaaaggucauuaac

SEQ ID NO: 40200 - RNA, 23 nt, Artificial Sequence
  Synthetic
cuccuaauacaaaggucauuaac

SEQ ID NO: 40201 - RNA, 24 nt, Artificial Sequence
  Synthetic
ccuccuaauacaaaggucauuaac

SEQ ID NO: 40202 - RNA, 18 nt, Artificial Sequence
  Synthetic
aucaauuggccuguuaac

SEQ ID NO: 40203 - RNA, 19 nt, Artificial Sequence
  Synthetic
aaucaauuggccuguuaac

SEQ ID NO: 40204 - RNA, 20 nt, Artificial Sequence
  Synthetic
caaucaauuggccuguuaac

SEQ ID NO: 40205 - RNA, 21 nt, Artificial Sequence
  Synthetic
ccaaucaauuggccuguuaac

SEQ ID NO: 40206 - RNA, 22 nt, Artificial Sequence
  Synthetic
uccaaucaauuggccuguuaac

SEQ ID NO: 40207 - RNA, 23 nt, Artificial Sequence
  Synthetic
uuccaaucaauuggccuguuaac

SEQ ID NO: 40208 - RNA, 24 nt, Artificial Sequence
  Synthetic
uuuccaaucaauuggccuguuaac

SEQ ID NO: 40209 - RNA, 18 nt, Artificial Sequence
  Synthetic
aggagugcgaauccacac

SEQ ID NO: 40210 - RNA, 19 nt, Artificial Sequence
  Synthetic
gaggagugcgaauccacac

SEQ ID NO: 40211 - RNA, 20 nt, Artificial Sequence
  Synthetic
ggaggagugcgaauccacac

SEQ ID NO: 40212 - RNA, 21 nt, Artificial Sequence
  Synthetic
aggaggagugcgaauccacac

SEQ ID NO: 40213 - RNA, 22 nt, Artificial Sequence
  Synthetic
caggaggagugcgaauccacac

SEQ ID NO: 40214 - RNA, 23 nt, Artificial Sequence
  Synthetic
gcaggaggagugcgaauccacac

SEQ ID NO: 40215 - RNA, 24 nt, Artificial Sequence
  Synthetic
agcaggaggagugcgaauccacac

SEQ ID NO: 40216 - RNA, 18 nt, Artificial Sequence
  Synthetic
gaauuuaggccaggacac

SEQ ID NO: 40217 - RNA, 19 nt, Artificial Sequence
  Synthetic
cgaauuuaggccaggacac

SEQ ID NO: 40218 - RNA, 20 nt, Artificial Sequence
  Synthetic
gcgaauuuaggccaggacac

SEQ ID NO: 40219 - RNA, 21 nt, Artificial Sequence
  Synthetic
ugcgaauuuaggccaggacac

SEQ ID NO: 40220 - RNA, 22 nt, Artificial Sequence
  Synthetic
cugcgaauuuaggccaggacac

SEQ ID NO: 40221 - RNA, 23 nt, Artificial Sequence
  Synthetic
acugcgaauuuaggccaggacac

SEQ ID NO: 40222 - RNA, 24 nt, Artificial Sequence
  Synthetic
gacugcgaauuuaggccaggacac

SEQ ID NO: 40223 - RNA, 18 nt, Artificial Sequence
  Synthetic
uuaaggcaggguaaccac

SEQ ID NO: 40224 - RNA, 19 nt, Artificial Sequence
  Synthetic
auuaaggcaggguaaccac

SEQ ID NO: 40225 - RNA, 20 nt, Artificial Sequence
  Synthetic
cauuaaggcaggguaaccac

SEQ ID NO: 40226 - RNA, 21 nt, Artificial Sequence
  Synthetic
gcauuaaggcaggguaaccac

SEQ ID NO: 40227 - RNA, 22 nt, Artificial Sequence
  Synthetic
ggcauuaaggcaggguaaccac

SEQ ID NO: 40228 - RNA, 23 nt, Artificial Sequence
  Synthetic
aggcauuaaggcaggguaaccac

SEQ ID NO: 40229 - RNA, 24 nt, Artificial Sequence
  Synthetic
aaggcauuaaggcaggguaaccac

SEQ ID NO: 40230 - RNA, 18 nt, Artificial Sequence
  Synthetic
gaaagguucuuuccccac

SEQ ID NO: 40231 - RNA, 19 nt, Artificial Sequence
  Synthetic
ggaaagguucuuuccccac

SEQ ID NO: 40232 - RNA, 20 nt, Artificial Sequence
  Synthetic
uggaaagguucuuuccccac

SEQ ID NO: 40233 - RNA, 21 nt, Artificial Sequence
  Synthetic
guggaaagguucuuuccccac

SEQ ID NO: 40234 - RNA, 22 nt, Artificial Sequence
  Synthetic
gguggaaagguucuuuccccac

SEQ ID NO: 40235 - RNA, 23 nt, Artificial Sequence
  Synthetic
ugguggaaagguucuuuccccac

SEQ ID NO: 40236 - RNA, 24 nt, Artificial Sequence
  Synthetic
cugguggaaagguucuuuccccac

SEQ ID NO: 40237 - RNA, 18 nt, Artificial Sequence
  Synthetic
uccaugcccuaaagccac

SEQ ID NO: 40238 - RNA, 19 nt, Artificial Sequence
  Synthetic
auccaugcccuaaagccac

SEQ ID NO: 40239 - RNA, 20 nt, Artificial Sequence
  Synthetic
uauccaugcccuaaagccac

SEQ ID NO: 40240 - RNA, 21 nt, Artificial Sequence
  Synthetic
cuauccaugcccuaaagccac

SEQ ID NO: 40241 - RNA, 22 nt, Artificial Sequence
  Synthetic
ucuauccaugcccuaaagccac

SEQ ID NO: 40242 - RNA, 23 nt, Artificial Sequence
  Synthetic
uucuauccaugcccuaaagccac

SEQ ID NO: 40243 - RNA, 24 nt, Artificial Sequence
  Synthetic
guucuauccaugcccuaaagccac

SEQ ID NO: 40244 - RNA, 18 nt, Artificial Sequence
  Synthetic
aaacgagagcaacuccac

SEQ ID NO: 40245 - RNA, 19 nt, Artificial Sequence
  Synthetic
aaaacgagagcaacuccac

SEQ ID NO: 40246 - RNA, 20 nt, Artificial Sequence
  Synthetic
aaaaacgagagcaacuccac

SEQ ID NO: 40247 - RNA, 21 nt, Artificial Sequence
  Synthetic
caaaaacgagagcaacuccac

SEQ ID NO: 40248 - RNA, 22 nt, Artificial Sequence
  Synthetic
gcaaaaacgagagcaacuccac

SEQ ID NO: 40249 - RNA, 23 nt, Artificial Sequence
  Synthetic
ggcaaaaacgagagcaacuccac

SEQ ID NO: 40250 - RNA, 24 nt, Artificial Sequence
  Synthetic
aggcaaaaacgagagcaacuccac

SEQ ID NO: 40251 - RNA, 18 nt, Artificial Sequence
  Synthetic
ugagacugagggcuccac

SEQ ID NO: 40252 - RNA, 19 nt, Artificial Sequence
  Synthetic
cugagacugagggcuccac

SEQ ID NO: 40253 - RNA, 20 nt, Artificial Sequence
  Synthetic
ccugagacugagggcuccac

SEQ ID NO: 40254 - RNA, 21 nt, Artificial Sequence
  Synthetic
cccugagacugagggcuccac

SEQ ID NO: 40255 - RNA, 22 nt, Artificial Sequence
  Synthetic
gcccugagacugagggcuccac

SEQ ID NO: 40256 - RNA, 23 nt, Artificial Sequence
  Synthetic
ugcccugagacugagggcuccac

SEQ ID NO: 40257 - RNA, 24 nt, Artificial Sequence
  Synthetic
gugcccugagacugagggcuccac

SEQ ID NO: 40258 - RNA, 18 nt, Artificial Sequence
  Synthetic
aaauugagagaaguccac

SEQ ID NO: 40259 - RNA, 19 nt, Artificial Sequence
  Synthetic
aaaauugagagaaguccac

SEQ ID NO: 40260 - RNA, 20 nt, Artificial Sequence
  Synthetic
gaaaauugagagaaguccac

SEQ ID NO: 40261 - RNA, 21 nt, Artificial Sequence
  Synthetic
agaaaauugagagaaguccac

SEQ ID NO: 40262 - RNA, 22 nt, Artificial Sequence
  Synthetic
uagaaaauugagagaaguccac

SEQ ID NO: 40263 - RNA, 23 nt, Artificial Sequence
  Synthetic
cuagaaaauugagagaaguccac

SEQ ID NO: 40264 - RNA, 24 nt, Artificial Sequence
  Synthetic
ccuagaaaauugagagaaguccac

SEQ ID NO: 40265 - RNA, 18 nt, Artificial Sequence
  Synthetic
cuagagucaucaacucac

SEQ ID NO: 40266 - RNA, 19 nt, Artificial Sequence
  Synthetic
gcuagagucaucaacucac

SEQ ID NO: 40267 - RNA, 20 nt, Artificial Sequence
  Synthetic
  misc_feature (1)..(1): n is a, c, g, or u
ngcuagagucaucaacucac

SEQ ID NO: 40268 - RNA, 21 nt, Artificial Sequence
  Synthetic
  misc_feature (2)..(2): n is a, c, g, or u
ungcuagagucaucaacucac

SEQ ID NO: 40269 - RNA, 22 nt, Artificial Sequence
  Synthetic
  misc_feature (3)..(3): n is a, c, g, or u
gungcuagagucaucaacucac

SEQ ID NO: 40270 - RNA, 23 nt, Artificial Sequence
  Synthetic
  misc_feature (4)..(4): n is a, c, g, or u
ggungcuagagucaucaacucac

SEQ ID NO: 40271 - RNA, 24 nt, Artificial Sequence
  Synthetic
  misc_feature (5)..(5): n is a, c, g, or u
aggungcuagagucaucaacucac

SEQ ID NO: 40272 - RNA, 18 nt, Artificial Sequence
  Synthetic
auccacacuccaaaagac

SEQ ID NO: 40273 - RNA, 19 nt, Artificial Sequence
  Synthetic
aauccacacuccaaaagac

SEQ ID NO: 40274 - RNA, 20 nt, Artificial Sequence
  Synthetic
gaauccacacuccaaaagac

SEQ ID NO: 40275 - RNA, 21 nt, Artificial Sequence
  Synthetic
cgaauccacacuccaaaagac

SEQ ID NO: 40276 - RNA, 22 nt, Artificial Sequence
  Synthetic
gcgaauccacacuccaaaagac

SEQ ID NO: 40277 - RNA, 23 nt, Artificial Sequence
  Synthetic
ugcgaauccacacuccaaaagac

SEQ ID NO: 40278 - RNA, 24 nt, Artificial Sequence
  Synthetic
gugcgaauccacacuccaaaagac

SEQ ID NO: 40279 - RNA, 18 nt, Artificial Sequence
  Synthetic
agauguauacccaaagac

SEQ ID NO: 40280 - RNA, 19 nt, Artificial Sequence
  Synthetic
uagauguauacccaaagac

SEQ ID NO: 40281 - RNA, 20 nt, Artificial Sequence
  Synthetic
uuagauguauacccaaagac

SEQ ID NO: 40282 - RNA, 21 nt, Artificial Sequence
  Synthetic
uuuagauguauacccaaagac

SEQ ID NO: 40283 - RNA, 22 nt, Artificial Sequence
  Synthetic
guuuagauguauacccaaagac

SEQ ID NO: 40284 - RNA, 23 nt, Artificial Sequence
  Synthetic
gguuuagauguauacccaaagac

SEQ ID NO: 40285 - RNA, 24 nt, Artificial Sequence
  Synthetic
  misc_feature (1)..(1): n is a, c, g, or u
ngguuuagauguauacccaaagac

SEQ ID NO: 40286 - RNA, 18 nt, Artificial Sequence
  Synthetic
cucucccaaaaguaagac

SEQ ID NO: 40287 - RNA, 19 nt, Artificial Sequence
  Synthetic
ucucucccaaaaguaagac

SEQ ID NO: 40288 - RNA, 20 nt, Artificial Sequence
  Synthetic
uucucucccaaaaguaagac

SEQ ID NO: 40289 - RNA, 21 nt, Artificial Sequence
  Synthetic
uuucucucccaaaaguaagac

SEQ ID NO: 40290 - RNA, 22 nt, Artificial Sequence
  Synthetic
guuucucucccaaaaguaagac

SEQ ID NO: 40291 - RNA, 23 nt, Artificial Sequence
  Synthetic
gguuucucucccaaaaguaagac

SEQ ID NO: 40292 - RNA, 24 nt, Artificial Sequence
  Synthetic
cgguuucucucccaaaaguaagac

SEQ ID NO: 40293 - RNA, 18 nt, Artificial Sequence
  Synthetic
agaagaucacgaacagac

SEQ ID NO: 40294 - RNA, 19 nt, Artificial Sequence
  Synthetic
gagaagaucacgaacagac

SEQ ID NO: 40295 - RNA, 20 nt, Artificial Sequence
  Synthetic
cgagaagaucacgaacagac

SEQ ID NO: 40296 - RNA, 18 nt, Artificial Sequence
  Synthetic
agaugagaaggaacagac

SEQ ID NO: 40297 - RNA, 19 nt, Artificial Sequence
  Synthetic
cagaugagaaggaacagac

SEQ ID NO: 40298 - RNA, 20 nt, Artificial Sequence
  Synthetic
gcagaugagaaggaacagac

SEQ ID NO: 40299 - RNA, 21 nt, Artificial Sequence
  Synthetic
ggcagaugagaaggaacagac

SEQ ID NO: 40300 - RNA, 22 nt, Artificial Sequence
  Synthetic
cggcagaugagaaggaacagac

SEQ ID NO: 40301 - RNA, 23 nt, Artificial Sequence
  Synthetic
ccggcagaugagaaggaacagac

SEQ ID NO: 40302 - RNA, 24 nt, Artificial Sequence
  Synthetic
uccggcagaugagaaggaacagac

SEQ ID NO: 40303 - RNA, 18 nt, Artificial Sequence
  Synthetic
uauagcugaaagccagac

SEQ ID NO: 40304 - RNA, 19 nt, Artificial Sequence
  Synthetic
auauagcugaaagccagac

SEQ ID NO: 40305 - RNA, 20 nt, Artificial Sequence
  Synthetic
  misc_feature (1)..(1): n is a, c, g, or u
nauauagcugaaagccagac

SEQ ID NO: 40306 - RNA, 21 nt, Artificial Sequence
  Synthetic
  misc_feature (2)..(2): n is a, c, g, or u
cnauauagcugaaagccagac

SEQ ID NO: 40307 - RNA, 22 nt, Artificial Sequence
  Synthetic
  misc_feature (3)..(3): n is a, c, g, or u
ucnauauagcugaaagccagac

SEQ ID NO: 40308 - RNA, 23 nt, Artificial Sequence
  Synthetic
  misc_feature (4)..(4): n is a, c, g, or u
aucnauauagcugaaagccagac

SEQ ID NO: 40309 - RNA, 24 nt, Artificial Sequence
  Synthetic
  misc_feature (5)..(5): n is a, c, g, or u
caucnauauagcugaaagccagac

SEQ ID NO: 40310 - RNA, 18 nt, Artificial Sequence
  Synthetic
ucggcaggaacggcagac

SEQ ID NO: 40311 - RNA, 19 nt, Artificial Sequence
  Synthetic
gucggcaggaacggcagac

SEQ ID NO: 40312 - RNA, 20 nt, Artificial Sequence
  Synthetic
ggucggcaggaacggcagac

SEQ ID NO: 40313 - RNA, 21 nt, Artificial Sequence
  Synthetic
uggucggcaggaacggcagac

SEQ ID NO: 40314 - RNA, 22 nt, Artificial Sequence
  Synthetic
guggucggcaggaacggcagac

SEQ ID NO: 40315 - RNA, 23 nt, Artificial Sequence
  Synthetic
cguggucggcaggaacggcagac

SEQ ID NO: 40316 - RNA, 24 nt, Artificial Sequence
  Synthetic
ccguggucggcaggaacggcagac

SEQ ID NO: 40317 - RNA, 18 nt, Artificial Sequence
  Synthetic
guuagugugcccugagac

SEQ ID NO: 40318 - RNA, 19 nt, Artificial Sequence
  Synthetic
uguuagugugcccugagac

SEQ ID NO: 40319 - RNA, 20 nt, Artificial Sequence
  Synthetic
uuguuagugugcccugagac

SEQ ID NO: 40320 - RNA, 21 nt, Artificial Sequence
  Synthetic
guuguuagugugcccugagac

SEQ ID NO: 40321 - RNA, 22 nt, Artificial Sequence
  Synthetic
aguuguuagugugcccugagac

SEQ ID NO: 40322 - RNA, 23 nt, Artificial Sequence
  Synthetic
aaguuguuagugugcccugagac

SEQ ID NO: 40323 - RNA, 24 nt, Artificial Sequence
  Synthetic
aaaguuguuagugugcccugagac

SEQ ID NO: 40324 - RNA, 18 nt, Artificial Sequence
  Synthetic
auauuuccgagaaaggac

SEQ ID NO: 40325 - RNA, 19 nt, Artificial Sequence
  Synthetic
uauauuuccgagaaaggac

SEQ ID NO: 40326 - RNA, 20 nt, Artificial Sequence
  Synthetic
guauauuuccgagaaaggac

SEQ ID NO: 40327 - RNA, 21 nt, Artificial Sequence
  Synthetic
uguauauuuccgagaaaggac

SEQ ID NO: 40328 - RNA, 22 nt, Artificial Sequence
  Synthetic
auguauauuuccgagaaaggac

SEQ ID NO: 40329 - RNA, 23 nt, Artificial Sequence
  Synthetic
gauguauauuuccgagaaaggac

SEQ ID NO: 40330 - RNA, 24 nt, Artificial Sequence
  Synthetic
ggauguauauuuccgagaaaggac

SEQ ID NO: 40331 - RNA, 18 nt, Artificial Sequence
  Synthetic
gaacaaugaucagaggac

SEQ ID NO: 40332 - RNA, 19 nt, Artificial Sequence
  Synthetic
cgaacaaugaucagaggac

SEQ ID NO: 40333 - RNA, 20 nt, Artificial Sequence
  Synthetic
gcgaacaaugaucagaggac

SEQ ID NO: 40334 - RNA, 21 nt, Artificial Sequence
  Synthetic
ggcgaacaaugaucagaggac

SEQ ID NO: 40335 - RNA, 22 nt, Artificial Sequence
  Synthetic
aggcgaacaaugaucagaggac

SEQ ID NO: 40336 - RNA, 23 nt, Artificial Sequence
  Synthetic
gaggcgaacaaugaucagaggac

SEQ ID NO: 40337 - RNA, 24 nt, Artificial Sequence
  Synthetic
ugaggcgaacaaugaucagaggac

SEQ ID NO: 40338 - RNA, 18 nt, Artificial Sequence
  Synthetic
caggacaaguuggaggac

SEQ ID NO: 40339 - RNA, 19 nt, Artificial Sequence
  Synthetic
ccaggacaaguuggaggac

SEQ ID NO: 40340 - RNA, 20 nt, Artificial Sequence
  Synthetic
gccaggacaaguuggaggac

SEQ ID NO: 40341 - RNA, 21 nt, Artificial Sequence
  Synthetic
agccaggacaaguuggaggac

SEQ ID NO: 40342 - RNA, 22 nt, Artificial Sequence
  Synthetic
uagccaggacaaguuggaggac

SEQ ID NO: 40343 - RNA, 23 nt, Artificial Sequence
  Synthetic
auagccaggacaaguuggaggac

SEQ ID NO: 40344 - RNA, 24 nt, Artificial Sequence
  Synthetic
gauagccaggacaaguuggaggac

SEQ ID NO: 40345 - RNA, 18 nt, Artificial Sequence
  Synthetic
gagccaagagaaacggac

SEQ ID NO: 40346 - RNA, 19 nt, Artificial Sequence
  Synthetic
ugagccaagagaaacggac

SEQ ID NO: 40347 - RNA, 20 nt, Artificial Sequence
  Synthetic
cugagccaagagaaacggac

SEQ ID NO: 40348 - RNA, 21 nt, Artificial Sequence
  Synthetic
acugagccaagagaaacggac

SEQ ID NO: 40349 - RNA, 22 nt, Artificial Sequence
  Synthetic
aacugagccaagagaaacggac

SEQ ID NO: 40350 - RNA, 23 nt, Artificial Sequence
  Synthetic
aaacugagccaagagaaacggac

SEQ ID NO: 40351 - RNA, 24 nt, Artificial Sequence
  Synthetic
uaaacugagccaagagaaacggac

SEQ ID NO: 40352 - RNA, 18 nt, Artificial Sequence
  Synthetic
  misc_feature (10)..(10): n is a, c, g, or u
acagcgguanaaagggac

SEQ ID NO: 40353 - RNA, 19 nt, Artificial Sequence
  Synthetic
  misc_feature (11)..(11): n is a, c, g, or u
aacagcgguanaaagggac

SEQ ID NO: 40354 - RNA, 20 nt, Artificial Sequence
  Synthetic
  misc_feature (12)..(12): n is a, c, g, or u
uaacagcgguanaaagggac

SEQ ID NO: 40355 - RNA, 21 nt, Artificial Sequence
  Synthetic
  misc_feature (13)..(13): n is a, c, g, or u
guaacagcgguanaaagggac

SEQ ID NO: 40356 - RNA, 22 nt, Artificial Sequence
  Synthetic
  misc_feature (14)..(14): n is a, c, g, or u
gguaacagcgguanaaagggac

SEQ ID NO: 40357 - RNA, 23 nt, Artificial Sequence
  Synthetic
  misc_feature (15)..(15): n is a, c, g, or u
ugguaacagcgguanaaagggac

SEQ ID NO: 40358 - RNA, 24 nt, Artificial Sequence
  Synthetic
  misc_feature (16)..(16): n is a, c, g, or u
uugguaacagcgguanaaagggac

SEQ ID NO: 40359 - RNA, 18 nt, Artificial Sequence
  Synthetic
auucagcgcugacgggac

SEQ ID NO: 40360 - RNA, 19 nt, Artificial Sequence
  Synthetic
gauucagcgcugacgggac

SEQ ID NO: 40361 - RNA, 20 nt, Artificial Sequence
  Synthetic
ggauucagcgcugacgggac

SEQ ID NO: 40362 - RNA, 18 nt, Artificial Sequence
  Synthetic
ugauuggagguuggggac

SEQ ID NO: 40363 - RNA, 19 nt, Artificial Sequence
  Synthetic
gugauuggagguuggggac

SEQ ID NO: 40364 - RNA, 20 nt, Artificial Sequence
  Synthetic
agugauuggagguuggggac

SEQ ID NO: 40365 - RNA, 21 nt, Artificial Sequence
  Synthetic
gagugauuggagguuggggac

SEQ ID NO: 40366 - RNA, 22 nt, Artificial Sequence
  Synthetic
ugagugauuggagguuggggac

SEQ ID NO: 40367 - RNA, 23 nt, Artificial Sequence
  Synthetic
gugagugauuggagguuggggac

SEQ ID NO: 40368 - RNA, 24 nt, Artificial Sequence
  Synthetic
ggugagugauuggagguuggggac

SEQ ID NO: 40369 - RNA, 18 nt, Artificial Sequence
  Synthetic
  misc_feature (14)..(14): n is a, c, g, or u
aggcuugaacagunggac

SEQ ID NO: 40370 - RNA, 19 nt, Artificial Sequence
  Synthetic
  misc_feature (15)..(15): n is a, c, g, or u
gaggcuugaacagunggac

SEQ ID NO: 40371 - RNA, 20 nt, Artificial Sequence
  Synthetic
  misc_feature (16)..(16): n is a, c, g, or u
ggaggcuugaacagunggac

SEQ ID NO: 40372 - RNA, 21 nt, Artificial Sequence
  Synthetic
  misc_feature (17)..(17): n is a, c, g, or u
uggaggcuugaacagunggac

SEQ ID NO: 40373 - RNA, 22 nt, Artificial Sequence
  Synthetic
  misc_feature (18)..(18): n is a, c, g, or u
uuggaggcuugaacagunggac

SEQ ID NO: 40374 - RNA, 23 nt, Artificial Sequence
  Synthetic
  misc_feature (19)..(19): n is a, c, g, or u
cuuggaggcuugaacagunggac

SEQ ID NO: 40375 - RNA, 24 nt, Artificial Sequence
  Synthetic
  misc_feature (20)..(20): n is a, c, g, or u
gcuuggaggcuugaacagunggac

SEQ ID NO: 40376 - RNA, 18 nt, Artificial Sequence
  Synthetic
  misc_feature (3)..(3): n is a, c, g, or u
aanauacaggccccugac

SEQ ID NO: 40377 - RNA, 19 nt, Artificial Sequence
  Synthetic
  misc_feature (4)..(4): n is a, c, g, or u
gaanauacaggccccugac

SEQ ID NO: 40378 - RNA, 20 nt, Artificial Sequence
  Synthetic
  misc_feature (5)..(5): n is a, c, g, or u
ggaanauacaggccccugac

SEQ ID NO: 40379 - RNA, 21 nt, Artificial Sequence
  Synthetic
  misc_feature (6)..(6): n is a, c, g, or u
aggaanauacaggccccugac

SEQ ID NO: 40380 - RNA, 22 nt, Artificial Sequence
  Synthetic
  misc_feature (7)..(7): n is a, c, g, or u
caggaanauacaggccccugac

SEQ ID NO: 40381 - RNA, 23 nt, Artificial Sequence
  Synthetic
  misc_feature (8)..(8): n is a, c, g, or u
gcaggaanauacaggccccugac

SEQ ID NO: 40382 - RNA, 24 nt, Artificial Sequence
  Synthetic
  misc_feature (9)..(9): n is a, c, g, or u
agcaggaanauacaggccccugac

SEQ ID NO: 40383 - RNA, 18 nt, Artificial Sequence
  Synthetic
ccaaaagacaccaaauac

SEQ ID NO: 40384 - RNA, 19 nt, Artificial Sequence
  Synthetic
uccaaaagacaccaaauac

SEQ ID NO: 40385 - RNA, 20 nt, Artificial Sequence
  Synthetic
cuccaaaagacaccaaauac

SEQ ID NO: 40386 - RNA, 21 nt, Artificial Sequence
  Synthetic
acuccaaaagacaccaaauac

SEQ ID NO: 40387 - RNA, 22 nt, Artificial Sequence
  Synthetic
cacuccaaaagacaccaaauac

SEQ ID NO: 40388 - RNA, 23 nt, Artificial Sequence
  Synthetic
acacuccaaaagacaccaaauac

SEQ ID NO: 40389 - RNA, 24 nt, Artificial Sequence
  Synthetic
cacacuccaaaagacaccaaauac

SEQ ID NO: 40390 - RNA, 18 nt, Artificial Sequence
  Synthetic
cagcaacaugagggauac

SEQ ID NO: 40391 - RNA, 19 nt, Artificial Sequence
  Synthetic
acagcaacaugagggauac

SEQ ID NO: 40392 - RNA, 20 nt, Artificial Sequence
  Synthetic
uacagcaacaugagggauac

SEQ ID NO: 40393 - RNA, 21 nt, Artificial Sequence
  Synthetic
guacagcaacaugagggauac

SEQ ID NO: 40394 - RNA, 22 nt, Artificial Sequence
  Synthetic
uguacagcaacaugagggauac

SEQ ID NO: 40395 - RNA, 23 nt, Artificial Sequence
  Synthetic
uuguacagcaacaugagggauac

SEQ ID NO: 40396 - RNA, 24 nt, Artificial Sequence
  Synthetic
uuuguacagcaacaugagggauac

SEQ ID NO: 40397 - RNA, 18 nt, Artificial Sequence
  Synthetic
  misc_feature (3)..(3): n is a, c, g, or u
uangguuuagauguauac

SEQ ID NO: 40398 - RNA, 19 nt, Artificial Sequence
  Synthetic
  misc_feature (4)..(4): n is a, c, g, or u
uuangguuuagauguauac

SEQ ID NO: 40399 - RNA, 20 nt, Artificial Sequence
  Synthetic
  misc_feature (5)..(5): n is a, c, g, or u
guuangguuuagauguauac

SEQ ID NO: 40400 - RNA, 21 nt, Artificial Sequence
  Synthetic
  misc_feature (6)..(6): n is a, c, g, or u
uguuangguuuagauguauac

SEQ ID NO: 40401 - RNA, 22 nt, Artificial Sequence
  Synthetic
  misc_feature (7)..(7): n is a, c, g, or u
uuguuangguuuagauguauac

SEQ ID NO: 40402 - RNA, 23 nt, Artificial Sequence
  Synthetic
  misc_feature (8)..(8): n is a, c, g, or u
uuuguuangguuuagauguauac

SEQ ID NO: 40403 - RNA, 24 nt, Artificial Sequence
  Synthetic
  misc_feature (9)..(9): n is a, c, g, or u
uuuuguuangguuuagauguauac

SEQ ID NO: 40404 - RNA, 18 nt, Artificial Sequence
  Synthetic
guucuuguggcaaaguac

SEQ ID NO: 40405 - RNA, 19 nt, Artificial Sequence
  Synthetic
uguucuuguggcaaaguac

SEQ ID NO: 40406 - RNA, 20 nt, Artificial Sequence
  Synthetic
guguucuuguggcaaaguac

SEQ ID NO: 40407 - RNA, 21 nt, Artificial Sequence
  Synthetic
uguguucuuguggcaaaguac

SEQ ID NO: 40408 - RNA, 22 nt, Artificial Sequence
  Synthetic
auguguucuuguggcaaaguac

SEQ ID NO: 40409 - RNA, 23 nt, Artificial Sequence
  Synthetic
gauguguucuuguggcaaaguac

SEQ ID NO: 40410 - RNA, 24 nt, Artificial Sequence
  Synthetic
ugauguguucuuguggcaaaguac

SEQ ID NO: 40411 - RNA, 18 nt, Artificial Sequence
  Synthetic
cguccgaagguuuuguac

SEQ ID NO: 40412 - RNA, 19 nt, Artificial Sequence
  Synthetic
ccguccgaagguuuuguac

SEQ ID NO: 40413 - RNA, 20 nt, Artificial Sequence
  Synthetic
uccguccgaagguuuuguac

SEQ ID NO: 40414 - RNA, 21 nt, Artificial Sequence
  Synthetic
uuccguccgaagguuuuguac

SEQ ID NO: 40415 - RNA, 22 nt, Artificial Sequence
  Synthetic
uuuccguccgaagguuuuguac

SEQ ID NO: 40416 - RNA, 23 nt, Artificial Sequence
  Synthetic
auuuccguccgaagguuuuguac

SEQ ID NO: 40417 - RNA, 24 nt, Artificial Sequence
  Synthetic
aauuuccguccgaagguuuuguac

SEQ ID NO: 40418 - RNA, 18 nt, Artificial Sequence
  Synthetic
ucuucguuucucauuuac

SEQ ID NO: 40419 - RNA, 19 nt, Artificial Sequence
  Synthetic
aucuucguuucucauuuac

SEQ ID NO: 40420 - RNA, 20 nt, Artificial Sequence
  Synthetic
aaucuucguuucucauuuac

SEQ ID NO: 40421 - RNA, 21 nt, Artificial Sequence
  Synthetic
uaaucuucguuucucauuuac

SEQ ID NO: 40422 - RNA, 22 nt, Artificial Sequence
  Synthetic
uuaaucuucguuucucauuuac

SEQ ID NO: 40423 - RNA, 23 nt, Artificial Sequence
  Synthetic
uuuaaucuucguuucucauuuac

SEQ ID NO: 40424 - RNA, 24 nt, Artificial Sequence
  Synthetic
uuuuaaucuucguuucucauuuac

SEQ ID NO: 40425 - RNA, 18 nt, Artificial Sequence
  Synthetic
gguucauguauuguuuac

SEQ ID NO: 40426 - RNA, 19 nt, Artificial Sequence
  Synthetic
agguucauguauuguuuac

SEQ ID NO: 40427 - RNA, 20 nt, Artificial Sequence
  Synthetic
aagguucauguauuguuuac

SEQ ID NO: 40428 - RNA, 21 nt, Artificial Sequence
  Synthetic
aaagguucauguauuguuuac

SEQ ID NO: 40429 - RNA, 22 nt, Artificial Sequence
  Synthetic
uaaagguucauguauuguuuac

SEQ ID NO: 40430 - RNA, 23 nt, Artificial Sequence
  Synthetic
guaaagguucauguauuguuuac

SEQ ID NO: 40431 - RNA, 24 nt, Artificial Sequence
  Synthetic
gguaaagguucauguauuguuuac

SEQ ID NO: 40432 - RNA, 18 nt, Artificial Sequence
  Synthetic
gauggccaagccccaacc

SEQ ID NO: 40433 - RNA, 19 nt, Artificial Sequence
  Synthetic
cgauggccaagccccaacc

SEQ ID NO: 40434 - RNA, 20 nt, Artificial Sequence
  Synthetic
ccgauggccaagccccaacc

SEQ ID NO: 40435 - RNA, 21 nt, Artificial Sequence
  Synthetic
  misc_feature (1)..(1): n is a, c, g, or u
nccgauggccaagccccaacc

SEQ ID NO: 40436 - RNA, 22 nt, Artificial Sequence
  Synthetic
  misc_feature (2)..(2): n is a, c, g, or u
gnccgauggccaagccccaacc

SEQ ID NO: 40437 - RNA, 23 nt, Artificial Sequence
  Synthetic
  misc_feature (3)..(3): n is a, c, g, or u
ugnccgauggccaagccccaacc

SEQ ID NO: 40438 - RNA, 24 nt, Artificial Sequence
  Synthetic
  misc_feature (4)..(4): n is a, c, g, or u
augnccgauggccaagccccaacc

SEQ ID NO: 40439 - RNA, 18 nt, Artificial Sequence
  Synthetic
ugauaguccagaagaacc

SEQ ID NO: 40440 - RNA, 19 nt, Artificial Sequence
  Synthetic
uugauaguccagaagaacc

SEQ ID NO: 40441 - RNA, 20 nt, Artificial Sequence
  Synthetic
cuugauaguccagaagaacc

SEQ ID NO: 40442 - RNA, 21 nt, Artificial Sequence
  Synthetic
ccuugauaguccagaagaacc

SEQ ID NO: 40443 - RNA, 22 nt, Artificial Sequence
  Synthetic
accuugauaguccagaagaacc

SEQ ID NO: 40444 - RNA, 23 nt, Artificial Sequence
  Synthetic
uaccuugauaguccagaagaacc

SEQ ID NO: 40445 - RNA, 24 nt, Artificial Sequence
  Synthetic
auaccuugauaguccagaagaacc

SEQ ID NO: 40446 - RNA, 18 nt, Artificial Sequence
  Synthetic
gggaaagcccuacgaacc

SEQ ID NO: 40447 - RNA, 19 nt, Artificial Sequence
  Synthetic
ggggaaagcccuacgaacc

SEQ ID NO: 40448 - RNA, 20 nt, Artificial Sequence
  Synthetic
gggggaaagcccuacgaacc

SEQ ID NO: 40449 - RNA, 21 nt, Artificial Sequence
  Synthetic
ugggggaaagcccuacgaacc

SEQ ID NO: 40450 - RNA, 22 nt, Artificial Sequence
  Synthetic
gugggggaaagcccuacgaacc

SEQ ID NO: 40451 - RNA, 23 nt, Artificial Sequence
  Synthetic
agugggggaaagcccuacgaacc

SEQ ID NO: 40452 - RNA, 24 nt, Artificial Sequence
  Synthetic
cagugggggaaagcccuacgaacc

SEQ ID NO: 40453 - RNA, 18 nt, Artificial Sequence
  Synthetic
ccaugcccuaaagccacc

SEQ ID NO: 40454 - RNA, 19 nt, Artificial Sequence
  Synthetic
uccaugcccuaaagccacc

SEQ ID NO: 40455 - RNA, 20 nt, Artificial Sequence
  Synthetic
auccaugcccuaaagccacc

SEQ ID NO: 40456 - RNA, 21 nt, Artificial Sequence
  Synthetic
uauccaugcccuaaagccacc

SEQ ID NO: 40457 - RNA, 22 nt, Artificial Sequence
  Synthetic
cuauccaugcccuaaagccacc

SEQ ID NO: 40458 - RNA, 23 nt, Artificial Sequence
  Synthetic
ucuauccaugcccuaaagccacc

SEQ ID NO: 40459 - RNA, 24 nt, Artificial Sequence
  Synthetic
uucuauccaugcccuaaagccacc

SEQ ID NO: 40460 - RNA, 18 nt, Artificial Sequence
  Synthetic
cccugaacuggagccacc

SEQ ID NO: 40461 - RNA, 19 nt, Artificial Sequence
  Synthetic
ucccugaacuggagccacc

SEQ ID NO: 40462 - RNA, 20 nt, Artificial Sequence
  Synthetic
aucccugaacuggagccacc

SEQ ID NO: 40463 - RNA, 21 nt, Artificial Sequence
  Synthetic
uaucccugaacuggagccacc

SEQ ID NO: 40464 - RNA, 22 nt, Artificial Sequence
  Synthetic
cuaucccugaacuggagccacc

SEQ ID NO: 40465 - RNA, 23 nt, Artificial Sequence
  Synthetic
acuaucccugaacuggagccacc

SEQ ID NO: 40466 - RNA, 24 nt, Artificial Sequence
  Synthetic
cacuaucccugaacuggagccacc

SEQ ID NO: 40467 - RNA, 18 nt, Artificial Sequence
  Synthetic
gagacugagggcuccacc

SEQ ID NO: 40468 - RNA, 19 nt, Artificial Sequence
  Synthetic
ugagacugagggcuccacc

SEQ ID NO: 40469 - RNA, 20 nt, Artificial Sequence
  Synthetic
cugagacugagggcuccacc

SEQ ID NO: 40470 - RNA, 21 nt, Artificial Sequence
  Synthetic
ccugagacugagggcuccacc

SEQ ID NO: 40471 - RNA, 22 nt, Artificial Sequence
  Synthetic
cccugagacugagggcuccacc

SEQ ID NO: 40472 - RNA, 23 nt, Artificial Sequence
  Synthetic
gcccugagacugagggcuccacc

SEQ ID NO: 40473 - RNA, 24 nt, Artificial Sequence
  Synthetic
ugcccugagacugagggcuccacc

SEQ ID NO: 40474 - RNA, 18 nt, Artificial Sequence
  Synthetic
cccaaguauauggugacc

SEQ ID NO: 40475 - RNA, 19 nt, Artificial Sequence
  Synthetic
ucccaaguauauggugacc

SEQ ID NO: 40476 - RNA, 20 nt, Artificial Sequence
  Synthetic
uucccaaguauauggugacc

SEQ ID NO: 40477 - RNA, 21 nt, Artificial Sequence
  Synthetic
guucccaaguauauggugacc

SEQ ID NO: 40478 - RNA, 22 nt, Artificial Sequence
  Synthetic
uguucccaaguauauggugacc

SEQ ID NO: 40479 - RNA, 23 nt, Artificial Sequence
  Synthetic
uuguucccaaguauauggugacc

SEQ ID NO: 40480 - RNA, 24 nt, Artificial Sequence
  Synthetic
cuuguucccaaguauauggugacc

SEQ ID NO: 40481 - RNA, 18 nt, Artificial Sequence
  Synthetic
guauuaacauaauugacc

SEQ ID NO: 40482 - RNA, 19 nt, Artificial Sequence
  Synthetic
aguauuaacauaauugacc

SEQ ID NO: 40483 - RNA, 20 nt, Artificial Sequence
  Synthetic
uaguauuaacauaauugacc

SEQ ID NO: 40484 - RNA, 21 nt, Artificial Sequence
  Synthetic
uuaguauuaacauaauugacc

SEQ ID NO: 40485 - RNA, 22 nt, Artificial Sequence
  Synthetic
auuaguauuaacauaauugacc

SEQ ID NO: 40486 - RNA, 23 nt, Artificial Sequence
  Synthetic
uauuaguauuaacauaauugacc

SEQ ID NO: 40487 - RNA, 24 nt, Artificial Sequence
  Synthetic
auauuaguauuaacauaauugacc

SEQ ID NO: 40488 - RNA, 18 nt, Artificial Sequence
  Synthetic
  misc_feature (2)..(2): n is a, c, g, or u
angguuuagauguauacc

SEQ ID NO: 40489 - RNA, 19 nt, Artificial Sequence
  Synthetic
  misc_feature (3)..(3): n is a, c, g, or u
uangguuuagauguauacc

SEQ ID NO: 40490 - RNA, 20 nt, Artificial Sequence
  Synthetic
  misc_feature (4)..(4): n is a, c, g, or u
uuangguuuagauguauacc

SEQ ID NO: 40491 - RNA, 21 nt, Artificial Sequence
  Synthetic
  misc_feature (5)..(5): n is a, c, g, or u
guuangguuuagauguauacc

SEQ ID NO: 40492 - RNA, 22 nt, Artificial Sequence
  Synthetic
  misc_feature (6)..(6): n is a, c, g, or u
uguuangguuuagauguauacc

SEQ ID NO: 40493 - RNA, 23 nt, Artificial Sequence
  Synthetic
  misc_feature (7)..(7): n is a, c, g, or u
uuguuangguuuagauguauacc

SEQ ID NO: 40494 - RNA, 24 nt, Artificial Sequence
  Synthetic
  misc_feature (8)..(8): n is a, c, g, or u
uuuguuangguuuagauguauacc

SEQ ID NO: 40495 - RNA, 18 nt, Artificial Sequence
  Synthetic
aaaggagcagcgaaaccc

SEQ ID NO: 40496 - RNA, 19 nt, Artificial Sequence
  Synthetic
aaaaggagcagcgaaaccc

SEQ ID NO: 40497 - RNA, 20 nt, Artificial Sequence
  Synthetic
uaaaaggagcagcgaaaccc

SEQ ID NO: 40498 - RNA, 21 nt, Artificial Sequence
  Synthetic
guaaaaggagcagcgaaaccc

SEQ ID NO: 40499 - RNA, 22 nt, Artificial Sequence
  Synthetic
gguaaaaggagcagcgaaaccc

SEQ ID NO: 40500 - RNA, 23 nt, Artificial Sequence
  Synthetic
ggguaaaaggagcagcgaaaccc

SEQ ID NO: 40501 - RNA, 24 nt, Artificial Sequence
  Synthetic
uggguaaaaggagcagcgaaaccc

SEQ ID NO: 40502 - RNA, 18 nt, Artificial Sequence
  Synthetic
agacugagggcuccaccc

SEQ ID NO: 40503 - RNA, 19 nt, Artificial Sequence
  Synthetic
gagacugagggcuccaccc

SEQ ID NO: 40504 - RNA, 20 nt, Artificial Sequence
  Synthetic
ugagacugagggcuccaccc

SEQ ID NO: 40505 - RNA, 21 nt, Artificial Sequence
  Synthetic
cugagacugagggcuccaccc

SEQ ID NO: 40506 - RNA, 22 nt, Artificial Sequence
  Synthetic
ccugagacugagggcuccaccc

SEQ ID NO: 40507 - RNA, 23 nt, Artificial Sequence
  Synthetic
cccugagacugagggcuccaccc

SEQ ID NO: 40508 - RNA, 24 nt, Artificial Sequence
  Synthetic
gcccugagacugagggcuccaccc

SEQ ID NO: 40509 - RNA, 18 nt, Artificial Sequence
  Synthetic
ccaaguauauggugaccc

SEQ ID NO: 40510 - RNA, 19 nt, Artificial Sequence
  Synthetic
cccaaguauauggugaccc

SEQ ID NO: 40511 - RNA, 20 nt, Artificial Sequence
  Synthetic
ucccaaguauauggugaccc

SEQ ID NO: 40512 - RNA, 21 nt, Artificial Sequence
  Synthetic
uucccaaguauauggugaccc

SEQ ID NO: 40513 - RNA, 22 nt, Artificial Sequence
  Synthetic
guucccaaguauauggugaccc

SEQ ID NO: 40514 - RNA, 23 nt, Artificial Sequence
  Synthetic
uguucccaaguauauggugaccc

SEQ ID NO: 40515 - RNA, 24 nt, Artificial Sequence
  Synthetic
uuguucccaaguauauggugaccc

SEQ ID NO: 40516 - RNA, 18 nt, Artificial Sequence
  Synthetic
  misc_feature (1)..(1): n is a, c, g, or u
ngguuuagauguauaccc

SEQ ID NO: 40517 - RNA, 19 nt, Artificial Sequence
  Synthetic
  misc_feature (2)..(2): n is a, c, g, or u
angguuuagauguauaccc

SEQ ID NO: 40518 - RNA, 20 nt, Artificial Sequence
  Synthetic
  misc_feature (3)..(3): n is a, c, g, or u
uangguuuagauguauaccc

SEQ ID NO: 40519 - RNA, 21 nt, Artificial Sequence
  Synthetic
  misc_feature (4)..(4): n is a, c, g, or u
uuangguuuagauguauaccc

SEQ ID NO: 40520 - RNA, 22 nt, Artificial Sequence
  Synthetic
  misc_feature (5)..(5): n is a, c, g, or u
guuangguuuagauguauaccc

SEQ ID NO: 40521 - RNA, 23 nt, Artificial Sequence
  Synthetic
  misc_feature (6)..(6): n is a, c, g, or u
uguuangguuuagauguauaccc

SEQ ID NO: 40522 - RNA, 24 nt, Artificial Sequence
  Synthetic
  misc_feature (7)..(7): n is a, c, g, or u
uuguuangguuuagauguauaccc

SEQ ID NO: 40523 - RNA, 18 nt, Artificial Sequence
  Synthetic
gacugagggcuccacccc

SEQ ID NO: 40524 - RNA, 19 nt, Artificial Sequence
  Synthetic
agacugagggcuccacccc

SEQ ID NO: 40525 - RNA, 20 nt, Artificial Sequence
  Synthetic
gagacugagggcuccacccc

SEQ ID NO: 40526 - RNA, 21 nt, Artificial Sequence
  Synthetic
ugagacugagggcuccacccc

SEQ ID NO: 40527 - RNA, 22 nt, Artificial Sequence
  Synthetic
cugagacugagggcuccacccc

SEQ ID NO: 40528 - RNA, 23 nt, Artificial Sequence
  Synthetic
ccugagacugagggcuccacccc

SEQ ID NO: 40529 - RNA, 24 nt, Artificial Sequence
  Synthetic
cccugagacugagggcuccacccc

SEQ ID NO: 40530 - RNA, 18 nt, Artificial Sequence
  Synthetic
acacacgggcacuccccc

SEQ ID NO: 40531 - RNA, 19 nt, Artificial Sequence
  Synthetic
gacacacgggcacuccccc

SEQ ID NO: 40532 - RNA, 20 nt, Artificial Sequence
  Synthetic
ggacacacgggcacuccccc

SEQ ID NO: 40533 - RNA, 21 nt, Artificial Sequence
  Synthetic
aggacacacgggcacuccccc

SEQ ID NO: 40534 - RNA, 22 nt, Artificial Sequence
  Synthetic
caggacacacgggcacuccccc

SEQ ID NO: 40535 - RNA, 23 nt, Artificial Sequence
  Synthetic
ccaggacacacgggcacuccccc

SEQ ID NO: 40536 - RNA, 24 nt, Artificial Sequence
  Synthetic
gccaggacacacgggcacuccccc

SEQ ID NO: 40537 - RNA, 18 nt, Artificial Sequence
  Synthetic
guagaagaauacagcccc

SEQ ID NO: 40538 - RNA, 19 nt, Artificial Sequence
  Synthetic
aguagaagaauacagcccc

SEQ ID NO: 40539 - RNA, 20 nt, Artificial Sequence
  Synthetic
uaguagaagaauacagcccc

SEQ ID NO: 40540 - RNA, 18 nt, Artificial Sequence
  Synthetic
agagccccaaacggcccc

SEQ ID NO: 40541 - RNA, 19 nt, Artificial Sequence
  Synthetic
cagagccccaaacggcccc

SEQ ID NO: 40542 - RNA, 20 nt, Artificial Sequence
  Synthetic
acagagccccaaacggcccc

SEQ ID NO: 40543 - RNA, 21 nt, Artificial Sequence
  Synthetic
gacagagccccaaacggcccc

SEQ ID NO: 40544 - RNA, 22 nt, Artificial Sequence
  Synthetic
cgacagagccccaaacggcccc

SEQ ID NO: 40545 - RNA, 23 nt, Artificial Sequence
  Synthetic
gcgacagagccccaaacggcccc

SEQ ID NO: 40546 - RNA, 24 nt, Artificial Sequence
  Synthetic
ggcgacagagccccaaacggcccc

SEQ ID NO: 40547 - RNA, 18 nt, Artificial Sequence
  Synthetic
gacacacgggcacucccc

SEQ ID NO: 40548 - RNA, 19 nt, Artificial Sequence
  Synthetic
ggacacacgggcacucccc

SEQ ID NO: 40549 - RNA, 20 nt, Artificial Sequence
  Synthetic
aggacacacgggcacucccc

SEQ ID NO: 40550 - RNA, 21 nt, Artificial Sequence
  Synthetic
caggacacacgggcacucccc

SEQ ID NO: 40551 - RNA, 22 nt, Artificial Sequence
  Synthetic
ccaggacacacgggcacucccc

SEQ ID NO: 40552 - RNA, 23 nt, Artificial Sequence
  Synthetic
gccaggacacacgggcacucccc

SEQ ID NO: 40553 - RNA, 24 nt, Artificial Sequence
  Synthetic
ggccaggacacacgggcacucccc

SEQ ID NO: 40554 - RNA, 18 nt, Artificial Sequence
  Synthetic
gacagugggggaaagccc

SEQ ID NO: 40555 - RNA, 19 nt, Artificial Sequence
  Synthetic
agacagugggggaaagccc

SEQ ID NO: 40556 - RNA, 20 nt, Artificial Sequence
  Synthetic
cagacagugggggaaagccc

SEQ ID NO: 40557 - RNA, 21 nt, Artificial Sequence
  Synthetic
ccagacagugggggaaagccc

SEQ ID NO: 40558 - RNA, 22 nt, Artificial Sequence
  Synthetic
gccagacagugggggaaagccc

SEQ ID NO: 40559 - RNA, 23 nt, Artificial Sequence
  Synthetic
agccagacagugggggaaagccc

SEQ ID NO: 40560 - RNA, 24 nt, Artificial Sequence
  Synthetic
aagccagacagugggggaaagccc

SEQ ID NO: 40561 - RNA, 18 nt, Artificial Sequence
  Synthetic
aguagaagaauacagccc

SEQ ID NO: 40562 - RNA, 19 nt, Artificial Sequence
  Synthetic
uaguagaagaauacagccc

SEQ ID NO: 40563 - RNA, 20 nt, Artificial Sequence
  Synthetic
auaguagaagaauacagccc

SEQ ID NO: 40564 - RNA, 21 nt, Artificial Sequence
  Synthetic
uauaguagaagaauacagccc

SEQ ID NO: 40565 - RNA, 22 nt, Artificial Sequence
  Synthetic
guauaguagaagaauacagccc

SEQ ID NO: 40566 - RNA, 23 nt, Artificial Sequence
  Synthetic
gguauaguagaagaauacagccc

SEQ ID NO: 40567 - RNA, 24 nt, Artificial Sequence
  Synthetic
agguauaguagaagaauacagccc

SEQ ID NO: 40568 - RNA, 18 nt, Artificial Sequence
  Synthetic
cagagccccaaacggccc

SEQ ID NO: 40569 - RNA, 19 nt, Artificial Sequence
  Synthetic
acagagccccaaacggccc

SEQ ID NO: 40570 - RNA, 20 nt, Artificial Sequence
  Synthetic
gacagagccccaaacggccc

SEQ ID NO: 40571 - RNA, 21 nt, Artificial Sequence
  Synthetic
cgacagagccccaaacggccc

SEQ ID NO: 40572 - RNA, 22 nt, Artificial Sequence
  Synthetic
gcgacagagccccaaacggccc

SEQ ID NO: 40573 - RNA, 23 nt, Artificial Sequence
  Synthetic
ggcgacagagccccaaacggccc

SEQ ID NO: 40574 - RNA, 24 nt, Artificial Sequence
  Synthetic
gggcgacagagccccaaacggccc

SEQ ID NO: 40575 - RNA, 18 nt, Artificial Sequence
  Synthetic
guuguucuauccaugccc

SEQ ID NO: 40576 - RNA, 19 nt, Artificial Sequence
  Synthetic
aguuguucuauccaugccc

SEQ ID NO: 40577 - RNA, 20 nt, Artificial Sequence
  Synthetic
aaguuguucuauccaugccc

SEQ ID NO: 40578 - RNA, 21 nt, Artificial Sequence
  Synthetic
aaaguuguucuauccaugccc

SEQ ID NO: 40579 - RNA, 22 nt, Artificial Sequence
  Synthetic
caaaguuguucuauccaugccc

SEQ ID NO: 40580 - RNA, 23 nt, Artificial Sequence
  Synthetic
gcaaaguuguucuauccaugccc

SEQ ID NO: 40581 - RNA, 24 nt, Artificial Sequence
  Synthetic
ggcaaaguuguucuauccaugccc

SEQ ID NO: 40582 - RNA, 18 nt, Artificial Sequence
  Synthetic
aaaguuguuagugugccc

SEQ ID NO: 40583 - RNA, 19 nt, Artificial Sequence
  Synthetic
caaaguuguuagugugccc

SEQ ID NO: 40584 - RNA, 20 nt, Artificial Sequence
  Synthetic
gcaaaguuguuagugugccc

SEQ ID NO: 40585 - RNA, 21 nt, Artificial Sequence
  Synthetic
ggcaaaguuguuagugugccc

SEQ ID NO: 40586 - RNA, 22 nt, Artificial Sequence
  Synthetic
uggcaaaguuguuagugugccc

SEQ ID NO: 40587 - RNA, 23 nt, Artificial Sequence
  Synthetic
cuggcaaaguuguuagugugccc

SEQ ID NO: 40588 - RNA, 24 nt, Artificial Sequence
  Synthetic
gcuggcaaaguuguuagugugccc

SEQ ID NO: 40589 - RNA, 18 nt, Artificial Sequence
  Synthetic
cuuccaauuacauauccc

SEQ ID NO: 40590 - RNA, 19 nt, Artificial Sequence
  Synthetic
acuuccaauuacauauccc

SEQ ID NO: 40591 - RNA, 20 nt, Artificial Sequence
  Synthetic
aacuuccaauuacauauccc

SEQ ID NO: 40592 - RNA, 21 nt, Artificial Sequence
  Synthetic
caacuuccaauuacauauccc

SEQ ID NO: 40593 - RNA, 22 nt, Artificial Sequence
  Synthetic
ccaacuuccaauuacauauccc

SEQ ID NO: 40594 - RNA, 23 nt, Artificial Sequence
  Synthetic
cccaacuuccaauuacauauccc

SEQ ID NO: 40595 - RNA, 24 nt, Artificial Sequence
  Synthetic
ccccaacuuccaauuacauauccc

SEQ ID NO: 40596 - RNA, 18 nt, Artificial Sequence
  Synthetic
ggacacacgggcacuccc

SEQ ID NO: 40597 - RNA, 19 nt, Artificial Sequence
  Synthetic
aggacacacgggcacuccc

SEQ ID NO: 40598 - RNA, 20 nt, Artificial Sequence
  Synthetic
caggacacacgggcacuccc

SEQ ID NO: 40599 - RNA, 21 nt, Artificial Sequence
  Synthetic
ccaggacacacgggcacuccc

SEQ ID NO: 40600 - RNA, 22 nt, Artificial Sequence
  Synthetic
gccaggacacacgggcacuccc

SEQ ID NO: 40601 - RNA, 23 nt, Artificial Sequence
  Synthetic
ggccaggacacacgggcacuccc

SEQ ID NO: 40602 - RNA, 24 nt, Artificial Sequence
  Synthetic
aggccaggacacacgggcacuccc

SEQ ID NO: 40603 - RNA, 18 nt, Artificial Sequence
  Synthetic
gacagaauugucaguccc

SEQ ID NO: 40604 - RNA, 19 nt, Artificial Sequence
  Synthetic
cgacagaauugucaguccc

SEQ ID NO: 40605 - RNA, 20 nt, Artificial Sequence
  Synthetic
acgacagaauugucaguccc

SEQ ID NO: 40606 - RNA, 21 nt, Artificial Sequence
  Synthetic
gacgacagaauugucaguccc

SEQ ID NO: 40607 - RNA, 22 nt, Artificial Sequence
  Synthetic
ggacgacagaauugucaguccc

SEQ ID NO: 40608 - RNA, 23 nt, Artificial Sequence
  Synthetic
aggacgacagaauugucaguccc

SEQ ID NO: 40609 - RNA, 24 nt, Artificial Sequence
  Synthetic
aaggacgacagaauugucaguccc

SEQ ID NO: 40610 - RNA, 18 nt, Artificial Sequence
  Synthetic
guaaacaaaggacguccc

SEQ ID NO: 40611 - RNA, 19 nt, Artificial Sequence
  Synthetic
cguaaacaaaggacguccc

SEQ ID NO: 40612 - RNA, 20 nt, Artificial Sequence
  Synthetic
acguaaacaaaggacguccc

SEQ ID NO: 40613 - RNA, 21 nt, Artificial Sequence
  Synthetic
gacguaaacaaaggacguccc

SEQ ID NO: 40614 - RNA, 22 nt, Artificial Sequence
  Synthetic
ggacguaaacaaaggacguccc

SEQ ID NO: 40615 - RNA, 23 nt, Artificial Sequence
  Synthetic
gggacguaaacaaaggacguccc

SEQ ID NO: 40616 - RNA, 24 nt, Artificial Sequence
  Synthetic
cgggacguaaacaaaggacguccc

SEQ ID NO: 40617 - RNA, 18 nt, Artificial Sequence
  Synthetic
agggucaaugucuaagcc

SEQ ID NO: 40618 - RNA, 19 nt, Artificial Sequence
  Synthetic
aagggucaaugucuaagcc

SEQ ID NO: 40619 - RNA, 20 nt, Artificial Sequence
  Synthetic
uaagggucaaugucuaagcc

SEQ ID NO: 40620 - RNA, 21 nt, Artificial Sequence
  Synthetic
auaagggucaaugucuaagcc

SEQ ID NO: 40621 - RNA, 22 nt, Artificial Sequence
  Synthetic
uauaagggucaaugucuaagcc

SEQ ID NO: 40622 - RNA, 23 nt, Artificial Sequence
  Synthetic
uuauaagggucaaugucuaagcc

SEQ ID NO: 40623 - RNA, 24 nt, Artificial Sequence
  Synthetic
uuuauaagggucaaugucuaagcc

SEQ ID NO: 40624 - RNA, 18 nt, Artificial Sequence
  Synthetic
cagcacagccuagcagcc

SEQ ID NO: 40625 - RNA, 19 nt, Artificial Sequence
  Synthetic
gcagcacagccuagcagcc

SEQ ID NO: 40626 - RNA, 20 nt, Artificial Sequence
  Synthetic
ggcagcacagccuagcagcc

SEQ ID NO: 40627 - RNA, 21 nt, Artificial Sequence
  Synthetic
uggcagcacagccuagcagcc

SEQ ID NO: 40628 - RNA, 22 nt, Artificial Sequence
  Synthetic
uuggcagcacagccuagcagcc

SEQ ID NO: 40629 - RNA, 23 nt, Artificial Sequence
  Synthetic
guuggcagcacagccuagcagcc

SEQ ID NO: 40630 - RNA, 24 nt, Artificial Sequence
  Synthetic
aguuggcagcacagccuagcagcc

SEQ ID NO: 40631 - RNA, 18 nt, Artificial Sequence
  Synthetic
gaagggggcgacagagcc

SEQ ID NO: 40632 - RNA, 19 nt, Artificial Sequence
  Synthetic
agaagggggcgacagagcc

SEQ ID NO: 40633 - RNA, 20 nt, Artificial Sequence
  Synthetic
gagaagggggcgacagagcc

SEQ ID NO: 40634 - RNA, 21 nt, Artificial Sequence
  Synthetic
ggagaagggggcgacagagcc

SEQ ID NO: 40635 - RNA, 22 nt, Artificial Sequence
  Synthetic
cggagaagggggcgacagagcc

SEQ ID NO: 40636 - RNA, 23 nt, Artificial Sequence
  Synthetic
acggagaagggggcgacagagcc

SEQ ID NO: 40637 - RNA, 24 nt, Artificial Sequence
  Synthetic
gacggagaagggggcgacagagcc

SEQ ID NO: 40638 - RNA, 18 nt, Artificial Sequence
  Synthetic
uggaucggcagaggagcc

SEQ ID NO: 40639 - RNA, 19 nt, Artificial Sequence
  Synthetic
auggaucggcagaggagcc

SEQ ID NO: 40640 - RNA, 20 nt, Artificial Sequence
  Synthetic
uauggaucggcagaggagcc

SEQ ID NO: 40641 - RNA, 21 nt, Artificial Sequence
  Synthetic
guauggaucggcagaggagcc

SEQ ID NO: 40642 - RNA, 22 nt, Artificial Sequence
  Synthetic
aguauggaucggcagaggagcc

SEQ ID NO: 40643 - RNA, 23 nt, Artificial Sequence
  Synthetic
caguauggaucggcagaggagcc

SEQ ID NO: 40644 - RNA, 24 nt, Artificial Sequence
  Synthetic
gcaguauggaucggcagaggagcc

SEQ ID NO: 40645 - RNA, 18 nt, Artificial Sequence
  Synthetic
uaucccugaacuggagcc

SEQ ID NO: 40646 - RNA, 19 nt, Artificial Sequence
  Synthetic
cuaucccugaacuggagcc

SEQ ID NO: 40647 - RNA, 20 nt, Artificial Sequence
  Synthetic
acuaucccugaacuggagcc

SEQ ID NO: 40648 - RNA, 21 nt, Artificial Sequence
  Synthetic
cacuaucccugaacuggagcc

SEQ ID NO: 40649 - RNA, 22 nt, Artificial Sequence
  Synthetic
ucacuaucccugaacuggagcc

SEQ ID NO: 40650 - RNA, 23 nt, Artificial Sequence
  Synthetic
uucacuaucccugaacuggagcc

SEQ ID NO: 40651 - RNA, 24 nt, Artificial Sequence
  Synthetic
guucacuaucccugaacuggagcc

SEQ ID NO: 40652 - RNA, 18 nt, Artificial Sequence
  Synthetic
gcacuaguaaacugagcc

SEQ ID NO: 40653 - RNA, 19 nt, Artificial Sequence
  Synthetic
ggcacuaguaaacugagcc

SEQ ID NO: 40654 - RNA, 20 nt, Artificial Sequence
  Synthetic
uggcacuaguaaacugagcc

SEQ ID NO: 40655 - RNA, 21 nt, Artificial Sequence
  Synthetic
auggcacuaguaaacugagcc

SEQ ID NO: 40656 - RNA, 22 nt, Artificial Sequence
  Synthetic
aauggcacuaguaaacugagcc

SEQ ID NO: 40657 - RNA, 23 nt, Artificial Sequence
  Synthetic
aaauggcacuaguaaacugagcc

SEQ ID NO: 40658 - RNA, 24 nt, Artificial Sequence
  Synthetic
caaauggcacuaguaaacugagcc

SEQ ID NO: 40659 - RNA, 18 nt, Artificial Sequence
  Synthetic
ggaauaugauaaaacgcc

SEQ ID NO: 40660 - RNA, 19 nt, Artificial Sequence
  Synthetic
aggaauaugauaaaacgcc

SEQ ID NO: 40661 - RNA, 20 nt, Artificial Sequence
  Synthetic
gaggaauaugauaaaacgcc

SEQ ID NO: 40662 - RNA, 21 nt, Artificial Sequence
  Synthetic
agaggaauaugauaaaacgcc

SEQ ID NO: 40663 - RNA, 22 nt, Artificial Sequence
  Synthetic
aagaggaauaugauaaaacgcc

SEQ ID NO: 40664 - RNA, 23 nt, Artificial Sequence
  Synthetic
gaagaggaauaugauaaaacgcc

SEQ ID NO: 40665 - RNA, 24 nt, Artificial Sequence
  Synthetic
ugaagaggaauaugauaaaacgcc

SEQ ID NO: 40666 - RNA, 18 nt, Artificial Sequence
  Synthetic
aacaagaaaaaccccgcc

SEQ ID NO: 40667 - RNA, 19 nt, Artificial Sequence
  Synthetic
caacaagaaaaaccccgcc

SEQ ID NO: 40668 - RNA, 20 nt, Artificial Sequence
  Synthetic
ucaacaagaaaaaccccgcc

SEQ ID NO: 40669 - RNA, 21 nt, Artificial Sequence
  Synthetic
gucaacaagaaaaaccccgcc

SEQ ID NO: 40670 - RNA, 22 nt, Artificial Sequence
  Synthetic
ugucaacaagaaaaaccccgcc

SEQ ID NO: 40671 - RNA, 23 nt, Artificial Sequence
  Synthetic
uugucaacaagaaaaaccccgcc

SEQ ID NO: 40672 - RNA, 24 nt, Artificial Sequence
  Synthetic
cuugucaacaagaaaaaccccgcc

SEQ ID NO: 40673 - RNA, 18 nt, Artificial Sequence
  Synthetic
  misc_feature (9)..(9): n is a, c, g, or u
agcaggaanauacaggcc

SEQ ID NO: 40674 - RNA, 19 nt, Artificial Sequence
  Synthetic
  misc_feature (10)..(10): n is a, c, g, or u
cagcaggaanauacaggcc

SEQ ID NO: 40675 - RNA, 20 nt, Artificial Sequence
  Synthetic
  misc_feature (11)..(11): n is a, c, g, or u
ccagcaggaanauacaggcc

SEQ ID NO: 40676 - RNA, 21 nt, Artificial Sequence
  Synthetic
  misc_feature (12)..(12): n is a, c, g, or u
accagcaggaanauacaggcc

SEQ ID NO: 40677 - RNA, 22 nt, Artificial Sequence
  Synthetic
  misc_feature (13)..(13): n is a, c, g, or u
caccagcaggaanauacaggcc

SEQ ID NO: 40678 - RNA, 23 nt, Artificial Sequence
  Synthetic
  misc_feature (14)..(14): n is a, c, g, or u
ccaccagcaggaanauacaggcc

SEQ ID NO: 40679 - RNA, 24 nt, Artificial Sequence
  Synthetic
  misc_feature (15)..(15): n is a, c, g, or u
gccaccagcaggaanauacaggcc

SEQ ID NO: 40680 - RNA, 18 nt, Artificial Sequence
  Synthetic
acagagccccaaacggcc

SEQ ID NO: 40681 - RNA, 19 nt, Artificial Sequence
  Synthetic
gacagagccccaaacggcc

SEQ ID NO: 40682 - RNA, 20 nt, Artificial Sequence
  Synthetic
cgacagagccccaaacggcc

SEQ ID NO: 40683 - RNA, 21 nt, Artificial Sequence
  Synthetic
gcgacagagccccaaacggcc

SEQ ID NO: 40684 - RNA, 22 nt, Artificial Sequence
  Synthetic
ggcgacagagccccaaacggcc

SEQ ID NO: 40685 - RNA, 23 nt, Artificial Sequence
  Synthetic
gggcgacagagccccaaacggcc

SEQ ID NO: 40686 - RNA, 24 nt, Artificial Sequence
  Synthetic
ggggcgacagagccccaaacggcc

SEQ ID NO: 40687 - RNA, 18 nt, Artificial Sequence
  Synthetic
auuuacugugagagggcc

SEQ ID NO: 40688 - RNA, 19 nt, Artificial Sequence
  Synthetic
cauuuacugugagagggcc

SEQ ID NO: 40689 - RNA, 20 nt, Artificial Sequence
  Synthetic
ucauuuacugugagagggcc

SEQ ID NO: 40690 - RNA, 21 nt, Artificial Sequence
  Synthetic
cucauuuacugugagagggcc

SEQ ID NO: 40691 - RNA, 22 nt, Artificial Sequence
  Synthetic
ucucauuuacugugagagggcc

SEQ ID NO: 40692 - RNA, 23 nt, Artificial Sequence
  Synthetic
uucucauuuacugugagagggcc

SEQ ID NO: 40693 - RNA, 24 nt, Artificial Sequence
  Synthetic
uuucucauuuacugugagagggcc

SEQ ID NO: 40694 - RNA, 18 nt, Artificial Sequence
  Synthetic
acuccuaccuuguuggcc

SEQ ID NO: 40695 - RNA, 19 nt, Artificial Sequence
  Synthetic
aacuccuaccuuguuggcc

SEQ ID NO: 40696 - RNA, 20 nt, Artificial Sequence
  Synthetic
caacuccuaccuuguuggcc

SEQ ID NO: 40697 - RNA, 21 nt, Artificial Sequence
  Synthetic
ccaacuccuaccuuguuggcc

SEQ ID NO: 40698 - RNA, 22 nt, Artificial Sequence
  Synthetic
uccaacuccuaccuuguuggcc

SEQ ID NO: 40699 - RNA, 23 nt, Artificial Sequence
  Synthetic
cuccaacuccuaccuuguuggcc

SEQ ID NO: 40700 - RNA, 24 nt, Artificial Sequence
  Synthetic
gcuccaacuccuaccuuguuggcc

SEQ ID NO: 40701 - RNA, 18 nt, Artificial Sequence
  Synthetic
aguuguucuauccaugcc

SEQ ID NO: 40702 - RNA, 19 nt, Artificial Sequence
  Synthetic
aaguuguucuauccaugcc

SEQ ID NO: 40703 - RNA, 20 nt, Artificial Sequence
  Synthetic
aaaguuguucuauccaugcc

SEQ ID NO: 40704 - RNA, 21 nt, Artificial Sequence
  Synthetic
caaaguuguucuauccaugcc

SEQ ID NO: 40705 - RNA, 22 nt, Artificial Sequence
  Synthetic
gcaaaguuguucuauccaugcc

SEQ ID NO: 40706 - RNA, 23 nt, Artificial Sequence
  Synthetic
ggcaaaguuguucuauccaugcc

SEQ ID NO: 40707 - RNA, 24 nt, Artificial Sequence
  Synthetic
uggcaaaguuguucuauccaugcc

SEQ ID NO: 40708 - RNA, 18 nt, Artificial Sequence
  Synthetic
  misc_feature (1)..(2): n is a, c, g, or u
nncagaccaauuuaugcc

SEQ ID NO: 40709 - RNA, 19 nt, Artificial Sequence
  Synthetic
  misc_feature (2)..(3): n is a, c, g, or u
gnncagaccaauuuaugcc

SEQ ID NO: 40710 - RNA, 20 nt, Artificial Sequence
  Synthetic
  misc_feature (3)..(4): n is a, c, g, or u
ugnncagaccaauuuaugcc

SEQ ID NO: 40711 - RNA, 21 nt, Artificial Sequence
  Synthetic
  misc_feature (4)..(5): n is a, c, g, or u
gugnncagaccaauuuaugcc

SEQ ID NO: 40712 - RNA, 22 nt, Artificial Sequence
  Synthetic
  misc_feature (5)..(6): n is a, c, g, or u
ggugnncagaccaauuuaugcc

SEQ ID NO: 40713 - RNA, 23 nt, Artificial Sequence
  Synthetic
  misc_feature (6)..(7): n is a, c, g, or u
uggugnncagaccaauuuaugcc

SEQ ID NO: 40714 - RNA, 24 nt, Artificial Sequence
  Synthetic
  misc_feature (7)..(8): n is a, c, g, or u
cuggugnncagaccaauuuaugcc

SEQ ID NO: 40715 - RNA, 18 nt, Artificial Sequence
  Synthetic
caaaguuguuagugugcc

SEQ ID NO: 40716 - RNA, 19 nt, Artificial Sequence
  Synthetic
gcaaaguuguuagugugcc

SEQ ID NO: 40717 - RNA, 20 nt, Artificial Sequence
  Synthetic
ggcaaaguuguuagugugcc

SEQ ID NO: 40718 - RNA, 21 nt, Artificial Sequence
  Synthetic
uggcaaaguuguuagugugcc

SEQ ID NO: 40719 - RNA, 22 nt, Artificial Sequence
  Synthetic
cuggcaaaguuguuagugugcc

SEQ ID NO: 40720 - RNA, 23 nt, Artificial Sequence
  Synthetic
gcuggcaaaguuguuagugugcc

SEQ ID NO: 40721 - RNA, 24 nt, Artificial Sequence
  Synthetic
ugcuggcaaaguuguuagugugcc

SEQ ID NO: 40722 - RNA, 18 nt, Artificial Sequence
  Synthetic
gggauacauagaguugcc

SEQ ID NO: 40723 - RNA, 19 nt, Artificial Sequence
  Synthetic
agggauacauagaguugcc

SEQ ID NO: 40724 - RNA, 20 nt, Artificial Sequence
  Synthetic
gagggauacauagaguugcc

SEQ ID NO: 40725 - RNA, 21 nt, Artificial Sequence
  Synthetic
ugagggauacauagaguugcc

SEQ ID NO: 40726 - RNA, 22 nt, Artificial Sequence
  Synthetic
augagggauacauagaguugcc

SEQ ID NO: 40727 - RNA, 23 nt, Artificial Sequence
  Synthetic
caugagggauacauagaguugcc

SEQ ID NO: 40728 - RNA, 24 nt, Artificial Sequence
  Synthetic
acaugagggauacauagaguugcc

SEQ ID NO: 40729 - RNA, 18 nt, Artificial Sequence
  Synthetic
  misc_feature (16)..(16): n is a, c, g, or u
acgcaugcgcugaugncc

SEQ ID NO: 40730 - RNA, 19 nt, Artificial Sequence
  Synthetic
  misc_feature (17)..(17): n is a, c, g, or u
cacgcaugcgcugaugncc

SEQ ID NO: 40731 - RNA, 20 nt, Artificial Sequence
  Synthetic
  misc_feature (18)..(18): n is a, c, g, or u
ccacgcaugcgcugaugncc

SEQ ID NO: 40732 - RNA, 21 nt, Artificial Sequence
  Synthetic
  misc_feature (19)..(19): n is a, c, g, or u
uccacgcaugcgcugaugncc

SEQ ID NO: 40733 - RNA, 22 nt, Artificial Sequence
  Synthetic
  misc_feature (20)..(20): n is a, c, g, or u
uuccacgcaugcgcugaugncc

SEQ ID NO: 40734 - RNA, 23 nt, Artificial Sequence
  Synthetic
  misc_feature (21)..(21): n is a, c, g, or u
guuccacgcaugcgcugaugncc

SEQ ID NO: 40735 - RNA, 24 nt, Artificial Sequence
  Synthetic
  misc_feature (22)..(22): n is a, c, g, or u
gguuccacgcaugcgcugaugncc

SEQ ID NO: 40736 - RNA, 18 nt, Artificial Sequence
  Synthetic
gugcaggguccccaaucc

SEQ ID NO: 40737 - RNA, 19 nt, Artificial Sequence
  Synthetic
ggugcaggguccccaaucc

SEQ ID NO: 40738 - RNA, 20 nt, Artificial Sequence
  Synthetic
cggugcaggguccccaaucc

SEQ ID NO: 40739 - RNA, 21 nt, Artificial Sequence
  Synthetic
ucggugcaggguccccaaucc

SEQ ID NO: 40740 - RNA, 22 nt, Artificial Sequence
  Synthetic
uucggugcaggguccccaaucc

SEQ ID NO: 40741 - RNA, 23 nt, Artificial Sequence
  Synthetic
guucggugcaggguccccaaucc

SEQ ID NO: 40742 - RNA, 24 nt, Artificial Sequence
  Synthetic
uguucggugcaggguccccaaucc

SEQ ID NO: 40743 - RNA, 18 nt, Artificial Sequence
  Synthetic
gugaucgggaaggaaucc

SEQ ID NO: 40744 - RNA, 19 nt, Artificial Sequence
  Synthetic
ggugaucgggaaggaaucc

SEQ ID NO: 40745 - RNA, 20 nt, Artificial Sequence
  Synthetic
uggugaucgggaaggaaucc

SEQ ID NO: 40746 - RNA, 21 nt, Artificial Sequence
  Synthetic
cuggugaucgggaaggaaucc

SEQ ID NO: 40747 - RNA, 22 nt, Artificial Sequence
  Synthetic
acuggugaucgggaaggaaucc

SEQ ID NO: 40748 - RNA, 23 nt, Artificial Sequence
  Synthetic
aacuggugaucgggaaggaaucc

SEQ ID NO: 40749 - RNA, 24 nt, Artificial Sequence
  Synthetic
caacuggugaucgggaaggaaucc

SEQ ID NO: 40750 - RNA, 18 nt, Artificial Sequence
  Synthetic
acuuccaauuacauaucc

SEQ ID NO: 40751 - RNA, 19 nt, Artificial Sequence
  Synthetic
aacuuccaauuacauaucc

SEQ ID NO: 40752 - RNA, 20 nt, Artificial Sequence
  Synthetic
caacuuccaauuacauaucc

SEQ ID NO: 40753 - RNA, 21 nt, Artificial Sequence
  Synthetic
ccaacuuccaauuacauaucc

SEQ ID NO: 40754 - RNA, 22 nt, Artificial Sequence
  Synthetic
cccaacuuccaauuacauaucc

SEQ ID NO: 40755 - RNA, 23 nt, Artificial Sequence
  Synthetic
ccccaacuuccaauuacauaucc

SEQ ID NO: 40756 - RNA, 24 nt, Artificial Sequence
  Synthetic
accccaacuuccaauuacauaucc

SEQ ID NO: 40757 - RNA, 18 nt, Artificial Sequence
  Synthetic
gaacaggguucacuaucc

SEQ ID NO: 40758 - RNA, 19 nt, Artificial Sequence
  Synthetic
ggaacaggguucacuaucc

SEQ ID NO: 40759 - RNA, 20 nt, Artificial Sequence
  Synthetic
cggaacaggguucacuaucc

SEQ ID NO: 40760 - RNA, 21 nt, Artificial Sequence
  Synthetic
ucggaacaggguucacuaucc

SEQ ID NO: 40761 - RNA, 22 nt, Artificial Sequence
  Synthetic
gucggaacaggguucacuaucc

SEQ ID NO: 40762 - RNA, 23 nt, Artificial Sequence
  Synthetic
agucggaacaggguucacuaucc

SEQ ID NO: 40763 - RNA, 24 nt, Artificial Sequence
  Synthetic
uagucggaacaggguucacuaucc

SEQ ID NO: 40764 - RNA, 18 nt, Artificial Sequence
  Synthetic
agugcgaauccacacucc

SEQ ID NO: 40765 - RNA, 19 nt, Artificial Sequence
  Synthetic
gagugcgaauccacacucc

SEQ ID NO: 40766 - RNA, 20 nt, Artificial Sequence
  Synthetic
ggagugcgaauccacacucc

SEQ ID NO: 40767 - RNA, 21 nt, Artificial Sequence
  Synthetic
aggagugcgaauccacacucc

SEQ ID NO: 40768 - RNA, 22 nt, Artificial Sequence
  Synthetic
gaggagugcgaauccacacucc

SEQ ID NO: 40769 - RNA, 23 nt, Artificial Sequence
  Synthetic
ggaggagugcgaauccacacucc

SEQ ID NO: 40770 - RNA, 24 nt, Artificial Sequence
  Synthetic
aggaggagugcgaauccacacucc

SEQ ID NO: 40771 - RNA, 18 nt, Artificial Sequence
  Synthetic
cggacugaggcccacucc

SEQ ID NO: 40772 - RNA, 19 nt, Artificial Sequence
  Synthetic
acggacugaggcccacucc

SEQ ID NO: 40773 - RNA, 20 nt, Artificial Sequence
  Synthetic
aacggacugaggcccacucc

SEQ ID NO: 40774 - RNA, 21 nt, Artificial Sequence
  Synthetic
aaacggacugaggcccacucc

SEQ ID NO: 40775 - RNA, 22 nt, Artificial Sequence
  Synthetic
gaaacggacugaggcccacucc

SEQ ID NO: 40776 - RNA, 23 nt, Artificial Sequence
  Synthetic
agaaacggacugaggcccacucc

SEQ ID NO: 40777 - RNA, 24 nt, Artificial Sequence
  Synthetic
gagaaacggacugaggcccacucc

SEQ ID NO: 40778 - RNA, 18 nt, Artificial Sequence
  Synthetic
caagaacgguuucucucc

SEQ ID NO: 40779 - RNA, 19 nt, Artificial Sequence
  Synthetic
ucaagaacgguuucucucc

SEQ ID NO: 40780 - RNA, 20 nt, Artificial Sequence
  Synthetic
cucaagaacgguuucucucc

SEQ ID NO: 40781 - RNA, 21 nt, Artificial Sequence
  Synthetic
acucaagaacgguuucucucc

SEQ ID NO: 40782 - RNA, 22 nt, Artificial Sequence
  Synthetic
uacucaagaacgguuucucucc

SEQ ID NO: 40783 - RNA, 23 nt, Artificial Sequence
  Synthetic
auacucaagaacgguuucucucc

SEQ ID NO: 40784 - RNA, 24 nt, Artificial Sequence
  Synthetic
aauacucaagaacgguuucucucc

SEQ ID NO: 40785 - RNA, 18 nt, Artificial Sequence
  Synthetic
ucagcaaaaacacagucc

SEQ ID NO: 40786 - RNA, 19 nt, Artificial Sequence
  Synthetic
cucagcaaaaacacagucc

SEQ ID NO: 40787 - RNA, 20 nt, Artificial Sequence
  Synthetic
acucagcaaaaacacagucc

SEQ ID NO: 40788 - RNA, 21 nt, Artificial Sequence
  Synthetic
cacucagcaaaaacacagucc

SEQ ID NO: 40789 - RNA, 22 nt, Artificial Sequence
  Synthetic
ccacucagcaaaaacacagucc

SEQ ID NO: 40790 - RNA, 23 nt, Artificial Sequence
  Synthetic
cccacucagcaaaaacacagucc

SEQ ID NO: 40791 - RNA, 24 nt, Artificial Sequence
  Synthetic
ucccacucagcaaaaacacagucc

SEQ ID NO: 40792 - RNA, 18 nt, Artificial Sequence
  Synthetic
uucccaccuugugagucc

SEQ ID NO: 40793 - RNA, 19 nt, Artificial Sequence
  Synthetic
uuucccaccuugugagucc

SEQ ID NO: 40794 - RNA, 20 nt, Artificial Sequence
  Synthetic
guuucccaccuugugagucc

SEQ ID NO: 40795 - RNA, 21 nt, Artificial Sequence
  Synthetic
aguuucccaccuugugagucc

SEQ ID NO: 40796 - RNA, 22 nt, Artificial Sequence
  Synthetic
aaguuucccaccuugugagucc

SEQ ID NO: 40797 - RNA, 23 nt, Artificial Sequence
  Synthetic
aaaguuucccaccuugugagucc

SEQ ID NO: 40798 - RNA, 24 nt, Artificial Sequence
  Synthetic
uaaaguuucccaccuugugagucc

SEQ ID NO: 40799 - RNA, 18 nt, Artificial Sequence
  Synthetic
aacauaccuugauagucc

SEQ ID NO: 40800 - RNA, 19 nt, Artificial Sequence
  Synthetic
caacauaccuugauagucc

SEQ ID NO: 40801 - RNA, 20 nt, Artificial Sequence
  Synthetic
gcaacauaccuugauagucc

SEQ ID NO: 40802 - RNA, 18 nt, Artificial Sequence
  Synthetic
cguaaacaaaggacgucc

SEQ ID NO: 40803 - RNA, 19 nt, Artificial Sequence
  Synthetic
acguaaacaaaggacgucc

SEQ ID NO: 40804 - RNA, 20 nt, Artificial Sequence
  Synthetic
gacguaaacaaaggacgucc

SEQ ID NO: 40805 - RNA, 18 nt, Artificial Sequence
  Synthetic
acucgagagggaccgucc

SEQ ID NO: 40806 - RNA, 19 nt, Artificial Sequence
  Synthetic
cacucgagagggaccgucc

SEQ ID NO: 40807 - RNA, 20 nt, Artificial Sequence
  Synthetic
ccacucgagagggaccgucc

SEQ ID NO: 40808 - RNA, 21 nt, Artificial Sequence
  Synthetic
cccacucgagagggaccgucc

SEQ ID NO: 40809 - RNA, 22 nt, Artificial Sequence
  Synthetic
ccccacucgagagggaccgucc

SEQ ID NO: 40810 - RNA, 23 nt, Artificial Sequence
  Synthetic
uccccacucgagagggaccgucc

SEQ ID NO: 40811 - RNA, 24 nt, Artificial Sequence
  Synthetic
uuccccacucgagagggaccgucc

SEQ ID NO: 40812 - RNA, 18 nt, Artificial Sequence
  Synthetic
ccccgggaggggucgucc

SEQ ID NO: 40813 - RNA, 19 nt, Artificial Sequence
  Synthetic
gccccgggaggggucgucc

SEQ ID NO: 40814 - RNA, 20 nt, Artificial Sequence
  Synthetic
ggccccgggaggggucgucc

SEQ ID NO: 40815 - RNA, 21 nt, Artificial Sequence
  Synthetic
cggccccgggaggggucgucc

SEQ ID NO: 40816 - RNA, 22 nt, Artificial Sequence
  Synthetic
acggccccgggaggggucgucc

SEQ ID NO: 40817 - RNA, 23 nt, Artificial Sequence
  Synthetic
aacggccccgggaggggucgucc

SEQ ID NO: 40818 - RNA, 24 nt, Artificial Sequence
  Synthetic
aaacggccccgggaggggucgucc

SEQ ID NO: 40819 - RNA, 18 nt, Artificial Sequence
  Synthetic
gcgaagugcacacggucc

SEQ ID NO: 40820 - RNA, 19 nt, Artificial Sequence
  Synthetic
agcgaagugcacacggucc

SEQ ID NO: 40821 - RNA, 20 nt, Artificial Sequence
  Synthetic
aagcgaagugcacacggucc

SEQ ID NO: 40822 - RNA, 21 nt, Artificial Sequence
  Synthetic
gaagcgaagugcacacggucc

SEQ ID NO: 40823 - RNA, 22 nt, Artificial Sequence
  Synthetic
ugaagcgaagugcacacggucc

SEQ ID NO: 40824 - RNA, 23 nt, Artificial Sequence
  Synthetic
gugaagcgaagugcacacggucc

SEQ ID NO: 40825 - RNA, 24 nt, Artificial Sequence
  Synthetic
ggugaagcgaagugcacacggucc

SEQ ID NO: 40826 - RNA, 18 nt, Artificial Sequence
  Synthetic
aggggugaacccgggucc

SEQ ID NO: 40827 - RNA, 19 nt, Artificial Sequence
  Synthetic
gaggggugaacccgggucc

SEQ ID NO: 40828 - RNA, 20 nt, Artificial Sequence
  Synthetic
ggaggggugaacccgggucc

SEQ ID NO: 40829 - RNA, 21 nt, Artificial Sequence
  Synthetic
uggaggggugaacccgggucc

SEQ ID NO: 40830 - RNA, 22 nt, Artificial Sequence
  Synthetic
guggaggggugaacccgggucc

SEQ ID NO: 40831 - RNA, 23 nt, Artificial Sequence
  Synthetic
uguggaggggugaacccgggucc

SEQ ID NO: 40832 - RNA, 24 nt, Artificial Sequence
  Synthetic
guguggaggggugaacccgggucc

SEQ ID NO: 40833 - RNA, 18 nt, Artificial Sequence
  Synthetic
uaacacgagcaggggucc

SEQ ID NO: 40834 - RNA, 19 nt, Artificial Sequence
  Synthetic
guaacacgagcaggggucc

SEQ ID NO: 40835 - RNA, 20 nt, Artificial Sequence
  Synthetic
uguaacacgagcaggggucc

SEQ ID NO: 40836 - RNA, 21 nt, Artificial Sequence
  Synthetic
cuguaacacgagcaggggucc

SEQ ID NO: 40837 - RNA, 22 nt, Artificial Sequence
  Synthetic
ccuguaacacgagcaggggucc

SEQ ID NO: 40838 - RNA, 23 nt, Artificial Sequence
  Synthetic
gccuguaacacgagcaggggucc

SEQ ID NO: 40839 - RNA, 24 nt, Artificial Sequence
  Synthetic
cgccuguaacacgagcaggggucc

SEQ ID NO: 40840 - RNA, 18 nt, Artificial Sequence
  Synthetic
auagaauacccgccuucc

SEQ ID NO: 40841 - RNA, 19 nt, Artificial Sequence
  Synthetic
uauagaauacccgccuucc

SEQ ID NO: 40842 - RNA, 20 nt, Artificial Sequence
  Synthetic
auauagaauacccgccuucc

SEQ ID NO: 40843 - RNA, 21 nt, Artificial Sequence
  Synthetic
uauauagaauacccgccuucc

SEQ ID NO: 40844 - RNA, 22 nt, Artificial Sequence
  Synthetic
uuauauagaauacccgccuucc

SEQ ID NO: 40845 - RNA, 23 nt, Artificial Sequence
  Synthetic
cuuauauagaauacccgccuucc

SEQ ID NO: 40846 - RNA, 24 nt, Artificial Sequence
  Synthetic
ucuuauauagaauacccgccuucc

SEQ ID NO: 40847 - RNA, 18 nt, Artificial Sequence
  Synthetic
gaaaggauguauauuucc

SEQ ID NO: 40848 - RNA, 19 nt, Artificial Sequence
  Synthetic
ggaaaggauguauauuucc

SEQ ID NO: 40849 - RNA, 20 nt, Artificial Sequence
  Synthetic
uggaaaggauguauauuucc

SEQ ID NO: 40850 - RNA, 21 nt, Artificial Sequence
  Synthetic
auggaaaggauguauauuucc

SEQ ID NO: 40851 - RNA, 22 nt, Artificial Sequence
  Synthetic
cauggaaaggauguauauuucc

SEQ ID NO: 40852 - RNA, 23 nt, Artificial Sequence
  Synthetic
ccauggaaaggauguauauuucc

SEQ ID NO: 40853 - RNA, 24 nt, Artificial Sequence
  Synthetic
gccauggaaaggauguauauuucc

SEQ ID NO: 40854 - RNA, 18 nt, Artificial Sequence
  Synthetic
uguuaacagggaguuucc

SEQ ID NO: 40855 - RNA, 19 nt, Artificial Sequence
  Synthetic
cuguuaacagggaguuucc

SEQ ID NO: 40856 - RNA, 20 nt, Artificial Sequence
  Synthetic
ccuguuaacagggaguuucc

SEQ ID NO: 40857 - RNA, 21 nt, Artificial Sequence
  Synthetic
gccuguuaacagggaguuucc

SEQ ID NO: 40858 - RNA, 22 nt, Artificial Sequence
  Synthetic
ggccuguuaacagggaguuucc

SEQ ID NO: 40859 - RNA, 23 nt, Artificial Sequence
  Synthetic
uggccuguuaacagggaguuucc

SEQ ID NO: 40860 - RNA, 24 nt, Artificial Sequence
  Synthetic
uuggccuguuaacagggaguuucc

SEQ ID NO: 40861 - RNA, 18 nt, Artificial Sequence
  Synthetic
ggauucccgguacaaagc

SEQ ID NO: 40862 - RNA, 19 nt, Artificial Sequence
  Synthetic
aggauucccgguacaaagc

SEQ ID NO: 40863 - RNA, 20 nt, Artificial Sequence
  Synthetic
aaggauucccgguacaaagc

SEQ ID NO: 40864 - RNA, 21 nt, Artificial Sequence
  Synthetic
uaaggauucccgguacaaagc

SEQ ID NO: 40865 - RNA, 22 nt, Artificial Sequence
  Synthetic
cuaaggauucccgguacaaagc

SEQ ID NO: 40866 - RNA, 23 nt, Artificial Sequence
  Synthetic
ucuaaggauucccgguacaaagc

SEQ ID NO: 40867 - RNA, 24 nt, Artificial Sequence
  Synthetic
cucuaaggauucccgguacaaagc

SEQ ID NO: 40868 - RNA, 18 nt, Artificial Sequence
  Synthetic
uagguauuuugcgaaagc

SEQ ID NO: 40869 - RNA, 19 nt, Artificial Sequence
  Synthetic
auagguauuuugcgaaagc

SEQ ID NO: 40870 - RNA, 20 nt, Artificial Sequence
  Synthetic
cauagguauuuugcgaaagc

SEQ ID NO: 40871 - RNA, 21 nt, Artificial Sequence
  Synthetic
ccauagguauuuugcgaaagc

SEQ ID NO: 40872 - RNA, 22 nt, Artificial Sequence
  Synthetic
cccauagguauuuugcgaaagc

SEQ ID NO: 40873 - RNA, 23 nt, Artificial Sequence
  Synthetic
ucccauagguauuuugcgaaagc

SEQ ID NO: 40874 - RNA, 24 nt, Artificial Sequence
  Synthetic
cucccauagguauuuugcgaaagc

SEQ ID NO: 40875 - RNA, 18 nt, Artificial Sequence
  Synthetic
  misc_feature (5)..(5): n is a, c, g, or u
gaugnccgauggccaagc

SEQ ID NO: 40876 - RNA, 19 nt, Artificial Sequence
  Synthetic
  misc_feature (6)..(6): n is a, c, g, or u
ugaugnccgauggccaagc

SEQ ID NO: 40877 - RNA, 20 nt, Artificial Sequence
  Synthetic
  misc_feature (7)..(7): n is a, c, g, or u
cugaugnccgauggccaagc

SEQ ID NO: 40878 - RNA, 21 nt, Artificial Sequence
  Synthetic
  misc_feature (8)..(8): n is a, c, g, or u
gcugaugnccgauggccaagc

SEQ ID NO: 40879 - RNA, 22 nt, Artificial Sequence
  Synthetic
  misc_feature (9)..(9): n is a, c, g, or u
cgcugaugnccgauggccaagc

SEQ ID NO: 40880 - RNA, 23 nt, Artificial Sequence
  Synthetic
  misc_feature (10)..(10): n is a, c, g, or u
gcgcugaugnccgauggccaagc

SEQ ID NO: 40881 - RNA, 24 nt, Artificial Sequence
  Synthetic
  misc_feature (11)..(11): n is a, c, g, or u
ugcgcugaugnccgauggccaagc

SEQ ID NO: 40882 - RNA, 18 nt, Artificial Sequence
  Synthetic
auacuaacauugggaagc

SEQ ID NO: 40883 - RNA, 19 nt, Artificial Sequence
  Synthetic
aauacuaacauugggaagc

SEQ ID NO: 40884 - RNA, 20 nt, Artificial Sequence
  Synthetic
gaauacuaacauugggaagc

SEQ ID NO: 40885 - RNA, 21 nt, Artificial Sequence
  Synthetic
ggaauacuaacauugggaagc

SEQ ID NO: 40886 - RNA, 22 nt, Artificial Sequence
  Synthetic
aggaauacuaacauugggaagc

SEQ ID NO: 40887 - RNA, 23 nt, Artificial Sequence
  Synthetic
aaggaauacuaacauugggaagc

SEQ ID NO: 40888 - RNA, 24 nt, Artificial Sequence
  Synthetic
caaggaauacuaacauugggaagc

SEQ ID NO: 40889 - RNA, 18 nt, Artificial Sequence
  Synthetic
auuugguggucuauaagc

SEQ ID NO: 40890 - RNA, 19 nt, Artificial Sequence
  Synthetic
cauuugguggucuauaagc

SEQ ID NO: 40891 - RNA, 20 nt, Artificial Sequence
  Synthetic
gcauuugguggucuauaagc

SEQ ID NO: 40892 - RNA, 21 nt, Artificial Sequence
  Synthetic
ggcauuugguggucuauaagc

SEQ ID NO: 40893 - RNA, 22 nt, Artificial Sequence
  Synthetic
gggcauuugguggucuauaagc

SEQ ID NO: 40894 - RNA, 23 nt, Artificial Sequence
  Synthetic
ggggcauuugguggucuauaagc

SEQ ID NO: 40895 - RNA, 24 nt, Artificial Sequence
  Synthetic
aggggcauuugguggucuauaagc

SEQ ID NO: 40896 - RNA, 18 nt, Artificial Sequence
  Synthetic
aagggucaaugucuaagc

SEQ ID NO: 40897 - RNA, 19 nt, Artificial Sequence
  Synthetic
uaagggucaaugucuaagc

SEQ ID NO: 40898 - RNA, 20 nt, Artificial Sequence
  Synthetic
auaagggucaaugucuaagc

SEQ ID NO: 40899 - RNA, 21 nt, Artificial Sequence
  Synthetic
uauaagggucaaugucuaagc

SEQ ID NO: 40900 - RNA, 22 nt, Artificial Sequence
  Synthetic
uuauaagggucaaugucuaagc

SEQ ID NO: 40901 - RNA, 23 nt, Artificial Sequence
  Synthetic
uuuauaagggucaaugucuaagc

SEQ ID NO: 40902 - RNA, 24 nt, Artificial Sequence
  Synthetic
cuuuauaagggucaaugucuaagc

SEQ ID NO: 40903 - RNA, 18 nt, Artificial Sequence
  Synthetic
agccacccaaggcacagc

SEQ ID NO: 40904 - RNA, 19 nt, Artificial Sequence
  Synthetic
aagccacccaaggcacagc

SEQ ID NO: 40905 - RNA, 20 nt, Artificial Sequence
  Synthetic
aaagccacccaaggcacagc

SEQ ID NO: 40906 - RNA, 21 nt, Artificial Sequence
  Synthetic
uaaagccacccaaggcacagc

SEQ ID NO: 40907 - RNA, 22 nt, Artificial Sequence
  Synthetic
cuaaagccacccaaggcacagc

SEQ ID NO: 40908 - RNA, 23 nt, Artificial Sequence
  Synthetic
ccuaaagccacccaaggcacagc

SEQ ID NO: 40909 - RNA, 24 nt, Artificial Sequence
  Synthetic
cccuaaagccacccaaggcacagc

SEQ ID NO: 40910 - RNA, 18 nt, Artificial Sequence
  Synthetic
ugaacuggagccaccagc

SEQ ID NO: 40911 - RNA, 19 nt, Artificial Sequence
  Synthetic
cugaacuggagccaccagc

SEQ ID NO: 40912 - RNA, 20 nt, Artificial Sequence
  Synthetic
ccugaacuggagccaccagc

SEQ ID NO: 40913 - RNA, 21 nt, Artificial Sequence
  Synthetic
cccugaacuggagccaccagc

SEQ ID NO: 40914 - RNA, 22 nt, Artificial Sequence
  Synthetic
ucccugaacuggagccaccagc

SEQ ID NO: 40915 - RNA, 23 nt, Artificial Sequence
  Synthetic
aucccugaacuggagccaccagc

SEQ ID NO: 40916 - RNA, 24 nt, Artificial Sequence
  Synthetic
uaucccugaacuggagccaccagc

SEQ ID NO: 40917 - RNA, 18 nt, Artificial Sequence
  Synthetic
gccgcagacacauccagc

SEQ ID NO: 40918 - RNA, 19 nt, Artificial Sequence
  Synthetic
cgccgcagacacauccagc

SEQ ID NO: 40919 - RNA, 20 nt, Artificial Sequence
  Synthetic
acgccgcagacacauccagc

SEQ ID NO: 40920 - RNA, 21 nt, Artificial Sequence
  Synthetic
aacgccgcagacacauccagc

SEQ ID NO: 40921 - RNA, 22 nt, Artificial Sequence
  Synthetic
aaacgccgcagacacauccagc

SEQ ID NO: 40922 - RNA, 23 nt, Artificial Sequence
  Synthetic
aaaacgccgcagacacauccagc

SEQ ID NO: 40923 - RNA, 24 nt, Artificial Sequence
  Synthetic
uaaaacgccgcagacacauccagc

SEQ ID NO: 40924 - RNA, 18 nt, Artificial Sequence
  Synthetic
gcgagcaaaacaagcagc

SEQ ID NO: 40925 - RNA, 19 nt, Artificial Sequence
  Synthetic
ugcgagcaaaacaagcagc

SEQ ID NO: 40926 - RNA, 20 nt, Artificial Sequence
  Synthetic
cugcgagcaaaacaagcagc

SEQ ID NO: 40927 - RNA, 21 nt, Artificial Sequence
  Synthetic
gcugcgagcaaaacaagcagc

SEQ ID NO: 40928 - RNA, 22 nt, Artificial Sequence
  Synthetic
ggcugcgagcaaaacaagcagc

SEQ ID NO: 40929 - RNA, 23 nt, Artificial Sequence
  Synthetic
cggcugcgagcaaaacaagcagc

SEQ ID NO: 40930 - RNA, 24 nt, Artificial Sequence
  Synthetic
ccggcugcgagcaaaacaagcagc

SEQ ID NO: 40931 - RNA, 18 nt, Artificial Sequence
  Synthetic
gcagcacagccuagcagc

SEQ ID NO: 40932 - RNA, 19 nt, Artificial Sequence
  Synthetic
ggcagcacagccuagcagc

SEQ ID NO: 40933 - RNA, 20 nt, Artificial Sequence
  Synthetic
uggcagcacagccuagcagc

SEQ ID NO: 40934 - RNA, 21 nt, Artificial Sequence
  Synthetic
uuggcagcacagccuagcagc

SEQ ID NO: 40935 - RNA, 22 nt, Artificial Sequence
  Synthetic
guuggcagcacagccuagcagc

SEQ ID NO: 40936 - RNA, 23 nt, Artificial Sequence
  Synthetic
aguuggcagcacagccuagcagc

SEQ ID NO: 40937 - RNA, 24 nt, Artificial Sequence
  Synthetic
caguuggcagcacagccuagcagc

SEQ ID NO: 40938 - RNA, 18 nt, Artificial Sequence
  Synthetic
uaauucuucccacucagc

SEQ ID NO: 40939 - RNA, 19 nt, Artificial Sequence
  Synthetic
cuaauucuucccacucagc

SEQ ID NO: 40940 - RNA, 20 nt, Artificial Sequence
  Synthetic
ccuaauucuucccacucagc

SEQ ID NO: 40941 - RNA, 21 nt, Artificial Sequence
  Synthetic
gccuaauucuucccacucagc

SEQ ID NO: 40942 - RNA, 22 nt, Artificial Sequence
  Synthetic
ugccuaauucuucccacucagc

SEQ ID NO: 40943 - RNA, 23 nt, Artificial Sequence
  Synthetic
uugccuaauucuucccacucagc

SEQ ID NO: 40944 - RNA, 24 nt, Artificial Sequence
  Synthetic
auugccuaauucuucccacucagc

SEQ ID NO: 40945 - RNA, 18 nt, Artificial Sequence
  Synthetic
ucguccgcuggauucagc

SEQ ID NO: 40946 - RNA, 19 nt, Artificial Sequence
  Synthetic
gucguccgcuggauucagc

SEQ ID NO: 40947 - RNA, 20 nt, Artificial Sequence
  Synthetic
ggucguccgcuggauucagc

SEQ ID NO: 40948 - RNA, 18 nt, Artificial Sequence
  Synthetic
agaagggggcgacagagc

SEQ ID NO: 40949 - RNA, 19 nt, Artificial Sequence
  Synthetic
gagaagggggcgacagagc

SEQ ID NO: 40950 - RNA, 20 nt, Artificial Sequence
  Synthetic
ggagaagggggcgacagagc

SEQ ID NO: 40951 - RNA, 21 nt, Artificial Sequence
  Synthetic
cggagaagggggcgacagagc

SEQ ID NO: 40952 - RNA, 22 nt, Artificial Sequence
  Synthetic
acggagaagggggcgacagagc

SEQ ID NO: 40953 - RNA, 23 nt, Artificial Sequence
  Synthetic
gacggagaagggggcgacagagc

SEQ ID NO: 40954 - RNA, 24 nt, Artificial Sequence
  Synthetic
agacggagaagggggcgacagagc

SEQ ID NO: 40955 - RNA, 18 nt, Artificial Sequence
  Synthetic
acauuggguaaaaggagc

SEQ ID NO: 40956 - RNA, 19 nt, Artificial Sequence
  Synthetic
cacauuggguaaaaggagc

SEQ ID NO: 40957 - RNA, 20 nt, Artificial Sequence
  Synthetic
ccacauuggguaaaaggagc

SEQ ID NO: 40958 - RNA, 21 nt, Artificial Sequence
  Synthetic
accacauuggguaaaaggagc

SEQ ID NO: 40959 - RNA, 22 nt, Artificial Sequence
  Synthetic
aaccacauuggguaaaaggagc

SEQ ID NO: 40960 - RNA, 23 nt, Artificial Sequence
  Synthetic
uaaccacauuggguaaaaggagc

SEQ ID NO: 40961 - RNA, 24 nt, Artificial Sequence
  Synthetic
guaaccacauuggguaaaaggagc

SEQ ID NO: 40962 - RNA, 18 nt, Artificial Sequence
  Synthetic
auggaucggcagaggagc

SEQ ID NO: 40963 - RNA, 19 nt, Artificial Sequence
  Synthetic
uauggaucggcagaggagc

SEQ ID NO: 40964 - RNA, 20 nt, Artificial Sequence
  Synthetic
guauggaucggcagaggagc

SEQ ID NO: 40965 - RNA, 21 nt, Artificial Sequence
  Synthetic
aguauggaucggcagaggagc

SEQ ID NO: 40966 - RNA, 22 nt, Artificial Sequence
  Synthetic
caguauggaucggcagaggagc

SEQ ID NO: 40967 - RNA, 23 nt, Artificial Sequence
  Synthetic
gcaguauggaucggcagaggagc

SEQ ID NO: 40968 - RNA, 24 nt, Artificial Sequence
  Synthetic
cgcaguauggaucggcagaggagc

SEQ ID NO: 40969 - RNA, 18 nt, Artificial Sequence
  Synthetic
ggcacuaguaaacugagc

SEQ ID NO: 40970 - RNA, 19 nt, Artificial Sequence
  Synthetic
uggcacuaguaaacugagc

SEQ ID NO: 40971 - RNA, 20 nt, Artificial Sequence
  Synthetic
auggcacuaguaaacugagc

SEQ ID NO: 40972 - RNA, 21 nt, Artificial Sequence
  Synthetic
aauggcacuaguaaacugagc

SEQ ID NO: 40973 - RNA, 22 nt, Artificial Sequence
  Synthetic
aaauggcacuaguaaacugagc

SEQ ID NO: 40974 - RNA, 23 nt, Artificial Sequence
  Synthetic
caaauggcacuaguaaacugagc

SEQ ID NO: 40975 - RNA, 24 nt, Artificial Sequence
  Synthetic
acaaauggcacuaguaaacugagc

SEQ ID NO: 40976 - RNA, 18 nt, Artificial Sequence
  Synthetic
aagaagaugaggcauagc

SEQ ID NO: 40977 - RNA, 19 nt, Artificial Sequence
  Synthetic
caagaagaugaggcauagc

SEQ ID NO: 40978 - RNA, 20 nt, Artificial Sequence
  Synthetic
acaagaagaugaggcauagc

SEQ ID NO: 40979 - RNA, 21 nt, Artificial Sequence
  Synthetic
aacaagaagaugaggcauagc

SEQ ID NO: 40980 - RNA, 22 nt, Artificial Sequence
  Synthetic
caacaagaagaugaggcauagc

SEQ ID NO: 40981 - RNA, 23 nt, Artificial Sequence
  Synthetic
ccaacaagaagaugaggcauagc

SEQ ID NO: 40982 - RNA, 24 nt, Artificial Sequence
  Synthetic
accaacaagaagaugaggcauagc

SEQ ID NO: 40983 - RNA, 18 nt, Artificial Sequence
  Synthetic
gacacauccagcgauagc

SEQ ID NO: 40984 - RNA, 19 nt, Artificial Sequence
  Synthetic
agacacauccagcgauagc

SEQ ID NO: 40985 - RNA, 20 nt, Artificial Sequence
  Synthetic
cagacacauccagcgauagc

SEQ ID NO: 40986 - RNA, 21 nt, Artificial Sequence
  Synthetic
gcagacacauccagcgauagc

SEQ ID NO: 40987 - RNA, 22 nt, Artificial Sequence
  Synthetic
cgcagacacauccagcgauagc

SEQ ID NO: 40988 - RNA, 23 nt, Artificial Sequence
  Synthetic
ccgcagacacauccagcgauagc

SEQ ID NO: 40989 - RNA, 24 nt, Artificial Sequence
  Synthetic
gccgcagacacauccagcgauagc

SEQ ID NO: 40990 - RNA, 18 nt, Artificial Sequence
  Synthetic
  misc_feature (11)..(11): n is a, c, g, or u
ccacaucaucnauauagc

SEQ ID NO: 40991 - RNA, 19 nt, Artificial Sequence
  Synthetic
  misc_feature (12)..(12): n is a, c, g, or u
accacaucaucnauauagc

SEQ ID NO: 40992 - RNA, 20 nt, Artificial Sequence
  Synthetic
  misc_feature (13)..(13): n is a, c, g, or u
uaccacaucaucnauauagc

SEQ ID NO: 40993 - RNA, 21 nt, Artificial Sequence
  Synthetic
  misc_feature (14)..(14): n is a, c, g, or u
auaccacaucaucnauauagc

SEQ ID NO: 40994 - RNA, 22 nt, Artificial Sequence
  Synthetic
  misc_feature (15)..(15): n is a, c, g, or u
aauaccacaucaucnauauagc

SEQ ID NO: 40995 - RNA, 23 nt, Artificial Sequence
  Synthetic
  misc_feature (16)..(16): n is a, c, g, or u
caauaccacaucaucnauauagc

SEQ ID NO: 40996 - RNA, 24 nt, Artificial Sequence
  Synthetic
  misc_feature (17)..(17): n is a, c, g, or u
ccaauaccacaucaucnauauagc

SEQ ID NO: 40997 - RNA, 18 nt, Artificial Sequence
  Synthetic
gagcaacuccacaguagc

SEQ ID NO: 40998 - RNA, 19 nt, Artificial Sequence
  Synthetic
agagcaacuccacaguagc

SEQ ID NO: 40999 - RNA, 20 nt, Artificial Sequence
  Synthetic
gagagcaacuccacaguagc

SEQ ID NO: 41000 - RNA, 18 nt, Artificial Sequence
  Synthetic
aggaauaugauaaaacgc

SEQ ID NO: 41001 - RNA, 19 nt, Artificial Sequence
  Synthetic
gaggaauaugauaaaacgc

SEQ ID NO: 41002 - RNA, 20 nt, Artificial Sequence
  Synthetic
agaggaauaugauaaaacgc

SEQ ID NO: 41003 - RNA, 21 nt, Artificial Sequence
  Synthetic
aagaggaauaugauaaaacgc

SEQ ID NO: 41004 - RNA, 22 nt, Artificial Sequence
  Synthetic
gaagaggaauaugauaaaacgc

SEQ ID NO: 41005 - RNA, 23 nt, Artificial Sequence
  Synthetic
ugaagaggaauaugauaaaacgc

SEQ ID NO: 41006 - RNA, 24 nt, Artificial Sequence
  Synthetic
augaagaggaauaugauaaaacgc

SEQ ID NO: 41007 - RNA, 18 nt, Artificial Sequence
  Synthetic
aacagacggggagaccgc

SEQ ID NO: 41008 - RNA, 19 nt, Artificial Sequence
  Synthetic
gaacagacggggagaccgc

SEQ ID NO: 41009 - RNA, 20 nt, Artificial Sequence
  Synthetic
ggaacagacggggagaccgc

SEQ ID NO: 41010 - RNA, 21 nt, Artificial Sequence
  Synthetic
aggaacagacggggagaccgc

SEQ ID NO: 41011 - RNA, 22 nt, Artificial Sequence
  Synthetic
aaggaacagacggggagaccgc

SEQ ID NO: 41012 - RNA, 23 nt, Artificial Sequence
  Synthetic
gaaggaacagacggggagaccgc

SEQ ID NO: 41013 - RNA, 24 nt, Artificial Sequence
  Synthetic
agaaggaacagacggggagaccgc

SEQ ID NO: 41014 - RNA, 18 nt, Artificial Sequence
  Synthetic
aaacaaaggacgucccgc

SEQ ID NO: 41015 - RNA, 19 nt, Artificial Sequence
  Synthetic
uaaacaaaggacgucccgc

SEQ ID NO: 41016 - RNA, 20 nt, Artificial Sequence
  Synthetic
guaaacaaaggacgucccgc

SEQ ID NO: 41017 - RNA, 18 nt, Artificial Sequence
  Synthetic
acccacaaaaugaagcgc

SEQ ID NO: 41018 - RNA, 19 nt, Artificial Sequence
  Synthetic
gacccacaaaaugaagcgc

SEQ ID NO: 41019 - RNA, 20 nt, Artificial Sequence
  Synthetic
ugacccacaaaaugaagcgc

SEQ ID NO: 41020 - RNA, 21 nt, Artificial Sequence
  Synthetic
gugacccacaaaaugaagcgc

SEQ ID NO: 41021 - RNA, 22 nt, Artificial Sequence
  Synthetic
ggugacccacaaaaugaagcgc

SEQ ID NO: 41022 - RNA, 23 nt, Artificial Sequence
  Synthetic
uggugacccacaaaaugaagcgc

SEQ ID NO: 41023 - RNA, 24 nt, Artificial Sequence
  Synthetic
auggugacccacaaaaugaagcgc

SEQ ID NO: 41024 - RNA, 18 nt, Artificial Sequence
  Synthetic
auacaugcauauaaaggc

SEQ ID NO: 41025 - RNA, 19 nt, Artificial Sequence
  Synthetic
uauacaugcauauaaaggc

SEQ ID NO: 41026 - RNA, 20 nt, Artificial Sequence
  Synthetic
guauacaugcauauaaaggc

SEQ ID NO: 41027 - RNA, 21 nt, Artificial Sequence
  Synthetic
uguauacaugcauauaaaggc

SEQ ID NO: 41028 - RNA, 22 nt, Artificial Sequence
  Synthetic
uuguauacaugcauauaaaggc

SEQ ID NO: 41029 - RNA, 23 nt, Artificial Sequence
  Synthetic
cuuguauacaugcauauaaaggc

SEQ ID NO: 41030 - RNA, 24 nt, Artificial Sequence
  Synthetic
gcuuguauacaugcauauaaaggc

SEQ ID NO: 41031 - RNA, 18 nt, Artificial Sequence
  Synthetic
gggaaaaagucagaaggc

SEQ ID NO: 41032 - RNA, 19 nt, Artificial Sequence
  Synthetic
cgggaaaaagucagaaggc

SEQ ID NO: 41033 - RNA, 20 nt, Artificial Sequence
  Synthetic
acgggaaaaagucagaaggc

SEQ ID NO: 41034 - RNA, 21 nt, Artificial Sequence
  Synthetic
gacgggaaaaagucagaaggc

SEQ ID NO: 41035 - RNA, 22 nt, Artificial Sequence
  Synthetic
agacgggaaaaagucagaaggc

SEQ ID NO: 41036 - RNA, 23 nt, Artificial Sequence
  Synthetic
cagacgggaaaaagucagaaggc

SEQ ID NO: 41037 - RNA, 24 nt, Artificial Sequence
  Synthetic
acagacgggaaaaagucagaaggc

SEQ ID NO: 41038 - RNA, 18 nt, Artificial Sequence
  Synthetic
gaucuucgucugcgaggc

SEQ ID NO: 41039 - RNA, 19 nt, Artificial Sequence
  Synthetic
agaucuucgucugcgaggc

SEQ ID NO: 41040 - RNA, 20 nt, Artificial Sequence
  Synthetic
gagaucuucgucugcgaggc

SEQ ID NO: 41041 - RNA, 18 nt, Artificial Sequence
  Synthetic
cugacgauugguggaggc

SEQ ID NO: 41042 - RNA, 19 nt, Artificial Sequence
  Synthetic
acugacgauugguggaggc

SEQ ID NO: 41043 - RNA, 20 nt, Artificial Sequence
  Synthetic
gacugacgauugguggaggc

SEQ ID NO: 41044 - RNA, 21 nt, Artificial Sequence
  Synthetic
ugacugacgauugguggaggc

SEQ ID NO: 41045 - RNA, 22 nt, Artificial Sequence
  Synthetic
cugacugacgauugguggaggc

SEQ ID NO: 41046 - RNA, 23 nt, Artificial Sequence
  Synthetic
ccugacugacgauugguggaggc

SEQ ID NO: 41047 - RNA, 24 nt, Artificial Sequence
  Synthetic
cccugacugacgauugguggaggc

SEQ ID NO: 41048 - RNA, 18 nt, Artificial Sequence
  Synthetic
aaggcacagcuuggaggc

SEQ ID NO: 41049 - RNA, 19 nt, Artificial Sequence
  Synthetic
caaggcacagcuuggaggc

SEQ ID NO: 41050 - RNA, 20 nt, Artificial Sequence
  Synthetic
ccaaggcacagcuuggaggc

SEQ ID NO: 41051 - RNA, 21 nt, Artificial Sequence
  Synthetic
cccaaggcacagcuuggaggc

SEQ ID NO: 41052 - RNA, 22 nt, Artificial Sequence
  Synthetic
acccaaggcacagcuuggaggc

SEQ ID NO: 41053 - RNA, 23 nt, Artificial Sequence
  Synthetic
cacccaaggcacagcuuggaggc

SEQ ID NO: 41054 - RNA, 24 nt, Artificial Sequence
  Synthetic
ccacccaaggcacagcuuggaggc

SEQ ID NO: 41055 - RNA, 18 nt, Artificial Sequence
  Synthetic
gaacccggguccauaggc

SEQ ID NO: 41056 - RNA, 19 nt, Artificial Sequence
  Synthetic
ugaacccggguccauaggc

SEQ ID NO: 41057 - RNA, 20 nt, Artificial Sequence
  Synthetic
gugaacccggguccauaggc

SEQ ID NO: 41058 - RNA, 21 nt, Artificial Sequence
  Synthetic
ggugaacccggguccauaggc

SEQ ID NO: 41059 - RNA, 22 nt, Artificial Sequence
  Synthetic
gggugaacccggguccauaggc

SEQ ID NO: 41060 - RNA, 23 nt, Artificial Sequence
  Synthetic
ggggugaacccggguccauaggc

SEQ ID NO: 41061 - RNA, 24 nt, Artificial Sequence
  Synthetic
aggggugaacccggguccauaggc

SEQ ID NO: 41062 - RNA, 18 nt, Artificial Sequence
  Synthetic
gggacugcgaauuuaggc

SEQ ID NO: 41063 - RNA, 19 nt, Artificial Sequence
  Synthetic
ggggacugcgaauuuaggc

SEQ ID NO: 41064 - RNA, 20 nt, Artificial Sequence
  Synthetic
uggggacugcgaauuuaggc

SEQ ID NO: 41065 - RNA, 21 nt, Artificial Sequence
  Synthetic
uuggggacugcgaauuuaggc

SEQ ID NO: 41066 - RNA, 22 nt, Artificial Sequence
  Synthetic
guuggggacugcgaauuuaggc

SEQ ID NO: 41067 - RNA, 23 nt, Artificial Sequence
  Synthetic
gguuggggacugcgaauuuaggc

SEQ ID NO: 41068 - RNA, 24 nt, Artificial Sequence
  Synthetic
agguuggggacugcgaauuuaggc

SEQ ID NO: 41069 - RNA, 18 nt, Artificial Sequence
  Synthetic
gacagagccccaaacggc

SEQ ID NO: 41070 - RNA, 19 nt, Artificial Sequence
  Synthetic
cgacagagccccaaacggc

SEQ ID NO: 41071 - RNA, 20 nt, Artificial Sequence
  Synthetic
gcgacagagccccaaacggc

SEQ ID NO: 41072 - RNA, 21 nt, Artificial Sequence
  Synthetic
ggcgacagagccccaaacggc

SEQ ID NO: 41073 - RNA, 22 nt, Artificial Sequence
  Synthetic
gggcgacagagccccaaacggc

SEQ ID NO: 41074 - RNA, 23 nt, Artificial Sequence
  Synthetic
ggggcgacagagccccaaacggc

SEQ ID NO: 41075 - RNA, 24 nt, Artificial Sequence
  Synthetic
gggggcgacagagccccaaacggc

SEQ ID NO: 41076 - RNA, 18 nt, Artificial Sequence
  Synthetic
guuuugcuccagaccggc

SEQ ID NO: 41077 - RNA, 19 nt, Artificial Sequence
  Synthetic
aguuuugcuccagaccggc

SEQ ID NO: 41078 - RNA, 20 nt, Artificial Sequence
  Synthetic
gaguuuugcuccagaccggc

SEQ ID NO: 41079 - RNA, 21 nt, Artificial Sequence
  Synthetic
ugaguuuugcuccagaccggc

SEQ ID NO: 41080 - RNA, 22 nt, Artificial Sequence
  Synthetic
augaguuuugcuccagaccggc

SEQ ID NO: 41081 - RNA, 23 nt, Artificial Sequence
  Synthetic
aaugaguuuugcuccagaccggc

SEQ ID NO: 41082 - RNA, 24 nt, Artificial Sequence
  Synthetic
caaugaguuuugcuccagaccggc

SEQ ID NO: 41083 - RNA, 18 nt, Artificial Sequence
  Synthetic
uccgcaguauggaucggc

SEQ ID NO: 41084 - RNA, 19 nt, Artificial Sequence
  Synthetic
uuccgcaguauggaucggc

SEQ ID NO: 41085 - RNA, 20 nt, Artificial Sequence
  Synthetic
guuccgcaguauggaucggc

SEQ ID NO: 41086 - RNA, 21 nt, Artificial Sequence
  Synthetic
aguuccgcaguauggaucggc

SEQ ID NO: 41087 - RNA, 22 nt, Artificial Sequence
  Synthetic
gaguuccgcaguauggaucggc

SEQ ID NO: 41088 - RNA, 23 nt, Artificial Sequence
  Synthetic
ggaguuccgcaguauggaucggc

SEQ ID NO: 41089 - RNA, 24 nt, Artificial Sequence
  Synthetic
aggaguuccgcaguauggaucggc

SEQ ID NO: 41090 - RNA, 18 nt, Artificial Sequence
  Synthetic
gugcgccccguggucggc

SEQ ID NO: 41091 - RNA, 19 nt, Artificial Sequence
  Synthetic
ggugcgccccguggucggc

SEQ ID NO: 41092 - RNA, 20 nt, Artificial Sequence
  Synthetic
aggugcgccccguggucggc

SEQ ID NO: 41093 - RNA, 21 nt, Artificial Sequence
  Synthetic
gaggugcgccccguggucggc

SEQ ID NO: 41094 - RNA, 22 nt, Artificial Sequence
  Synthetic
agaggugcgccccguggucggc

SEQ ID NO: 41095 - RNA, 23 nt, Artificial Sequence
  Synthetic
gagaggugcgccccguggucggc

SEQ ID NO: 41096 - RNA, 24 nt, Artificial Sequence
  Synthetic
agagaggugcgccccguggucggc

SEQ ID NO: 41097 - RNA, 18 nt, Artificial Sequence
  Synthetic
gcagacggagaagggggc

SEQ ID NO: 41098 - RNA, 19 nt, Artificial Sequence
  Synthetic
ggcagacggagaagggggc

SEQ ID NO: 41099 - RNA, 20 nt, Artificial Sequence
  Synthetic
cggcagacggagaagggggc

SEQ ID NO: 41100 - RNA, 21 nt, Artificial Sequence
  Synthetic
acggcagacggagaagggggc

SEQ ID NO: 41101 - RNA, 22 nt, Artificial Sequence
  Synthetic
aacggcagacggagaagggggc

SEQ ID NO: 41102 - RNA, 23 nt, Artificial Sequence
  Synthetic
gaacggcagacggagaagggggc

SEQ ID NO: 41103 - RNA, 24 nt, Artificial Sequence
  Synthetic
ggaacggcagacggagaagggggc

SEQ ID NO: 41104 - RNA, 18 nt, Artificial Sequence
  Synthetic
accuuguuggccucuggc

SEQ ID NO: 41105 - RNA, 19 nt, Artificial Sequence
  Synthetic
uaccuuguuggccucuggc

SEQ ID NO: 41106 - RNA, 20 nt, Artificial Sequence
  Synthetic
cuaccuuguuggccucuggc

SEQ ID NO: 41107 - RNA, 21 nt, Artificial Sequence
  Synthetic
ccuaccuuguuggccucuggc

SEQ ID NO: 41108 - RNA, 22 nt, Artificial Sequence
  Synthetic
uccuaccuuguuggccucuggc

SEQ ID NO: 41109 - RNA, 23 nt, Artificial Sequence
  Synthetic
cuccuaccuuguuggccucuggc

SEQ ID NO: 41110 - RNA, 24 nt, Artificial Sequence
  Synthetic
acuccuaccuuguuggccucuggc

SEQ ID NO: 41111 - RNA, 18 nt, Artificial Sequence
  Synthetic
cgucagcaaacacuuggc

SEQ ID NO: 41112 - RNA, 19 nt, Artificial Sequence
  Synthetic
gcgucagcaaacacuuggc

SEQ ID NO: 41113 - RNA, 20 nt, Artificial Sequence
  Synthetic
ugcgucagcaaacacuuggc

SEQ ID NO: 41114 - RNA, 21 nt, Artificial Sequence
  Synthetic
uugcgucagcaaacacuuggc

SEQ ID NO: 41115 - RNA, 22 nt, Artificial Sequence
  Synthetic
guugcgucagcaaacacuuggc

SEQ ID NO: 41116 - RNA, 23 nt, Artificial Sequence
  Synthetic
gguugcgucagcaaacacuuggc

SEQ ID NO: 41117 - RNA, 24 nt, Artificial Sequence
  Synthetic
ggguugcgucagcaaacacuuggc

SEQ ID NO: 41118 - RNA, 18 nt, Artificial Sequence
  Synthetic
aaggccuuauaaguuggc

SEQ ID NO: 41119 - RNA, 19 nt, Artificial Sequence
  Synthetic
aaaggccuuauaaguuggc

SEQ ID NO: 41120 - RNA, 20 nt, Artificial Sequence
  Synthetic
gaaaggccuuauaaguuggc

SEQ ID NO: 41121 - RNA, 21 nt, Artificial Sequence
  Synthetic
agaaaggccuuauaaguuggc

SEQ ID NO: 41122 - RNA, 22 nt, Artificial Sequence
  Synthetic
gagaaaggccuuauaaguuggc

SEQ ID NO: 41123 - RNA, 23 nt, Artificial Sequence
  Synthetic
agagaaaggccuuauaaguuggc

SEQ ID NO: 41124 - RNA, 24 nt, Artificial Sequence
  Synthetic
cagagaaaggccuuauaaguuggc

SEQ ID NO: 41125 - RNA, 18 nt, Artificial Sequence
  Synthetic
uagagcuugguggaaugc

SEQ ID NO: 41126 - RNA, 19 nt, Artificial Sequence
  Synthetic
guagagcuugguggaaugc

SEQ ID NO: 41127 - RNA, 20 nt, Artificial Sequence
  Synthetic
uguagagcuugguggaaugc

SEQ ID NO: 41128 - RNA, 21 nt, Artificial Sequence
  Synthetic
uuguagagcuugguggaaugc

SEQ ID NO: 41129 - RNA, 22 nt, Artificial Sequence
  Synthetic
uuuguagagcuugguggaaugc

SEQ ID NO: 41130 - RNA, 23 nt, Artificial Sequence
  Synthetic
uuuuguagagcuugguggaaugc

SEQ ID NO: 41131 - RNA, 24 nt, Artificial Sequence
  Synthetic
auuuuguagagcuugguggaaugc

SEQ ID NO: 41132 - RNA, 18 nt, Artificial Sequence
  Synthetic
uccaagaaagccccaugc

SEQ ID NO: 41133 - RNA, 19 nt, Artificial Sequence
  Synthetic
guccaagaaagccccaugc

SEQ ID NO: 41134 - RNA, 20 nt, Artificial Sequence
  Synthetic
cguccaagaaagccccaugc

SEQ ID NO: 41135 - RNA, 21 nt, Artificial Sequence
  Synthetic
ccguccaagaaagccccaugc

SEQ ID NO: 41136 - RNA, 22 nt, Artificial Sequence
  Synthetic
accguccaagaaagccccaugc

SEQ ID NO: 41137 - RNA, 23 nt, Artificial Sequence
  Synthetic
gaccguccaagaaagccccaugc

SEQ ID NO: 41138 - RNA, 24 nt, Artificial Sequence
  Synthetic
ggaccguccaagaaagccccaugc

SEQ ID NO: 41139 - RNA, 18 nt, Artificial Sequence
  Synthetic
aaguuguucuauccaugc

SEQ ID NO: 41140 - RNA, 19 nt, Artificial Sequence
  Synthetic
aaaguuguucuauccaugc

SEQ ID NO: 41141 - RNA, 20 nt, Artificial Sequence
  Synthetic
caaaguuguucuauccaugc

SEQ ID NO: 41142 - RNA, 21 nt, Artificial Sequence
  Synthetic
gcaaaguuguucuauccaugc

SEQ ID NO: 41143 - RNA, 22 nt, Artificial Sequence
  Synthetic
ggcaaaguuguucuauccaugc

SEQ ID NO: 41144 - RNA, 23 nt, Artificial Sequence
  Synthetic
uggcaaaguuguucuauccaugc

SEQ ID NO: 41145 - RNA, 24 nt, Artificial Sequence
  Synthetic
auggcaaaguuguucuauccaugc

SEQ ID NO: 41146 - RNA, 18 nt, Artificial Sequence
  Synthetic
guccucuuauauaacugc

SEQ ID NO: 41147 - RNA, 19 nt, Artificial Sequence
  Synthetic
aguccucuuauauaacugc

SEQ ID NO: 41148 - RNA, 20 nt, Artificial Sequence
  Synthetic
gaguccucuuauauaacugc

SEQ ID NO: 41149 - RNA, 21 nt, Artificial Sequence
  Synthetic
agaguccucuuauauaacugc

SEQ ID NO: 41150 - RNA, 22 nt, Artificial Sequence
  Synthetic
aagaguccucuuauauaacugc

SEQ ID NO: 41151 - RNA, 23 nt, Artificial Sequence
  Synthetic
caagaguccucuuauauaacugc

SEQ ID NO: 41152 - RNA, 24 nt, Artificial Sequence
  Synthetic
ccaagaguccucuuauauaacugc

SEQ ID NO: 41153 - RNA, 18 nt, Artificial Sequence
  Synthetic
gcaaaguuguuagugugc

SEQ ID NO: 41154 - RNA, 19 nt, Artificial Sequence
  Synthetic
ggcaaaguuguuagugugc

SEQ ID NO: 41155 - RNA, 20 nt, Artificial Sequence
  Synthetic
uggcaaaguuguuagugugc

SEQ ID NO: 41156 - RNA, 21 nt, Artificial Sequence
  Synthetic
cuggcaaaguuguuagugugc

SEQ ID NO: 41157 - RNA, 22 nt, Artificial Sequence
  Synthetic
gcuggcaaaguuguuagugugc

SEQ ID NO: 41158 - RNA, 23 nt, Artificial Sequence
  Synthetic
ugcuggcaaaguuguuagugugc

SEQ ID NO: 41159 - RNA, 24 nt, Artificial Sequence
  Synthetic
cugcuggcaaaguuguuagugugc

SEQ ID NO: 41160 - RNA, 18 nt, Artificial Sequence
  Synthetic
agggauacauagaguugc

SEQ ID NO: 41161 - RNA, 19 nt, Artificial Sequence
  Synthetic
gagggauacauagaguugc

SEQ ID NO: 41162 - RNA, 20 nt, Artificial Sequence
  Synthetic
ugagggauacauagaguugc

SEQ ID NO: 41163 - RNA, 21 nt, Artificial Sequence
  Synthetic
augagggauacauagaguugc

SEQ ID NO: 41164 - RNA, 22 nt, Artificial Sequence
  Synthetic
caugagggauacauagaguugc

SEQ ID NO: 41165 - RNA, 23 nt, Artificial Sequence
  Synthetic
acaugagggauacauagaguugc

SEQ ID NO: 41166 - RNA, 24 nt, Artificial Sequence
  Synthetic
aacaugagggauacauagaguugc

SEQ ID NO: 41167 - RNA, 18 nt, Artificial Sequence
  Synthetic
ccaaccaguggggguugc

SEQ ID NO: 41168 - RNA, 19 nt, Artificial Sequence
  Synthetic
cccaaccaguggggguugc

SEQ ID NO: 41169 - RNA, 20 nt, Artificial Sequence
  Synthetic
ccccaaccaguggggguugc

SEQ ID NO: 41170 - RNA, 21 nt, Artificial Sequence
  Synthetic
gccccaaccaguggggguugc

SEQ ID NO: 41171 - RNA, 22 nt, Artificial Sequence
  Synthetic
agccccaaccaguggggguugc

SEQ ID NO: 41172 - RNA, 23 nt, Artificial Sequence
  Synthetic
aagccccaaccaguggggguugc

SEQ ID NO: 41173 - RNA, 24 nt, Artificial Sequence
  Synthetic
caagccccaaccaguggggguugc

SEQ ID NO: 41174 - RNA, 18 nt, Artificial Sequence
  Synthetic
uggauuguugguauuugc

SEQ ID NO: 41175 - RNA, 19 nt, Artificial Sequence
  Synthetic
cuggauuguugguauuugc

SEQ ID NO: 41176 - RNA, 20 nt, Artificial Sequence
  Synthetic
ucuggauuguugguauuugc

SEQ ID NO: 41177 - RNA, 18 nt, Artificial Sequence
  Synthetic
cucccauagguauuuugc

SEQ ID NO: 41178 - RNA, 19 nt, Artificial Sequence
  Synthetic
acucccauagguauuuugc

SEQ ID NO: 41179 - RNA, 20 nt, Artificial Sequence
  Synthetic
cacucccauagguauuuugc

SEQ ID NO: 41180 - RNA, 21 nt, Artificial Sequence
  Synthetic
ccacucccauagguauuuugc

SEQ ID NO: 41181 - RNA, 22 nt, Artificial Sequence
  Synthetic
cccacucccauagguauuuugc

SEQ ID NO: 41182 - RNA, 23 nt, Artificial Sequence
  Synthetic
gcccacucccauagguauuuugc

SEQ ID NO: 41183 - RNA, 24 nt, Artificial Sequence
  Synthetic
ggcccacucccauagguauuuugc

SEQ ID NO: 41184 - RNA, 18 nt, Artificial Sequence
  Synthetic
agucccaaugaguuuugc

SEQ ID NO: 41185 - RNA, 19 nt, Artificial Sequence
  Synthetic
cagucccaaugaguuuugc

SEQ ID NO: 41186 - RNA, 20 nt, Artificial Sequence
  Synthetic
ucagucccaaugaguuuugc

SEQ ID NO: 41187 - RNA, 21 nt, Artificial Sequence
  Synthetic
gucagucccaaugaguuuugc

SEQ ID NO: 41188 - RNA, 22 nt, Artificial Sequence
  Synthetic
ugucagucccaaugaguuuugc

SEQ ID NO: 41189 - RNA, 23 nt, Artificial Sequence
  Synthetic
uugucagucccaaugaguuuugc

SEQ ID NO: 41190 - RNA, 24 nt, Artificial Sequence
  Synthetic
auugucagucccaaugaguuuugc

SEQ ID NO: 41191 - RNA, 18 nt, Artificial Sequence
  Synthetic
auaauugaccaccaaauc

SEQ ID NO: 41192 - RNA, 19 nt, Artificial Sequence
  Synthetic
cauaauugaccaccaaauc

SEQ ID NO: 41193 - RNA, 20 nt, Artificial Sequence
  Synthetic
acauaauugaccaccaaauc

SEQ ID NO: 41194 - RNA, 21 nt, Artificial Sequence
  Synthetic
aacauaauugaccaccaaauc

SEQ ID NO: 41195 - RNA, 22 nt, Artificial Sequence
  Synthetic
uaacauaauugaccaccaaauc

SEQ ID NO: 41196 - RNA, 23 nt, Artificial Sequence
  Synthetic
uuaacauaauugaccaccaaauc

SEQ ID NO: 41197 - RNA, 24 nt, Artificial Sequence
  Synthetic
auuaacauaauugaccaccaaauc

SEQ ID NO: 41198 - RNA, 18 nt, Artificial Sequence
  Synthetic
ggugcaggguccccaauc

SEQ ID NO: 41199 - RNA, 19 nt, Artificial Sequence
  Synthetic
cggugcaggguccccaauc

SEQ ID NO: 41200 - RNA, 20 nt, Artificial Sequence
  Synthetic
ucggugcaggguccccaauc

SEQ ID NO: 41201 - RNA, 18 nt, Artificial Sequence
  Synthetic
ggugaucgggaaggaauc

SEQ ID NO: 41202 - RNA, 19 nt, Artificial Sequence
  Synthetic
uggugaucgggaaggaauc

SEQ ID NO: 41203 - RNA, 20 nt, Artificial Sequence
  Synthetic
cuggugaucgggaaggaauc

SEQ ID NO: 41204 - RNA, 21 nt, Artificial Sequence
  Synthetic
acuggugaucgggaaggaauc

SEQ ID NO: 41205 - RNA, 22 nt, Artificial Sequence
  Synthetic
aacuggugaucgggaaggaauc

SEQ ID NO: 41206 - RNA, 23 nt, Artificial Sequence
  Synthetic
caacuggugaucgggaaggaauc

SEQ ID NO: 41207 - RNA, 24 nt, Artificial Sequence
  Synthetic
ccaacuggugaucgggaaggaauc

SEQ ID NO: 41208 - RNA, 18 nt, Artificial Sequence
  Synthetic
gucgaggauccuggaauc

SEQ ID NO: 41209 - RNA, 19 nt, Artificial Sequence
  Synthetic
ggucgaggauccuggaauc

SEQ ID NO: 41210 - RNA, 20 nt, Artificial Sequence
  Synthetic
uggucgaggauccuggaauc

SEQ ID NO: 41211 - RNA, 21 nt, Artificial Sequence
  Synthetic
guggucgaggauccuggaauc

SEQ ID NO: 41212 - RNA, 22 nt, Artificial Sequence
  Synthetic
gguggucgaggauccuggaauc

SEQ ID NO: 41213 - RNA, 23 nt, Artificial Sequence
  Synthetic
ugguggucgaggauccuggaauc

SEQ ID NO: 41214 - RNA, 24 nt, Artificial Sequence
  Synthetic
cugguggucgaggauccuggaauc

SEQ ID NO: 41215 - RNA, 18 nt, Artificial Sequence
  Synthetic
agcggugucgagaagauc

SEQ ID NO: 41216 - RNA, 19 nt, Artificial Sequence
  Synthetic
aagcggugucgagaagauc

SEQ ID NO: 41217 - RNA, 20 nt, Artificial Sequence
  Synthetic
gaagcggugucgagaagauc

SEQ ID NO: 41218 - RNA, 21 nt, Artificial Sequence
  Synthetic
ugaagcggugucgagaagauc

SEQ ID NO: 41219 - RNA, 22 nt, Artificial Sequence
  Synthetic
cugaagcggugucgagaagauc

SEQ ID NO: 41220 - RNA, 23 nt, Artificial Sequence
  Synthetic
gcugaagcggugucgagaagauc

SEQ ID NO: 41221 - RNA, 24 nt, Artificial Sequence
  Synthetic
agcugaagcggugucgagaagauc

SEQ ID NO: 41222 - RNA, 18 nt, Artificial Sequence
  Synthetic
uacugguggucgaggauc

SEQ ID NO: 41223 - RNA, 19 nt, Artificial Sequence
  Synthetic
guacugguggucgaggauc

SEQ ID NO: 41224 - RNA, 20 nt, Artificial Sequence
  Synthetic
cguacugguggucgaggauc

SEQ ID NO: 41225 - RNA, 18 nt, Artificial Sequence
  Synthetic
aguuccgcaguauggauc

SEQ ID NO: 41226 - RNA, 19 nt, Artificial Sequence
  Synthetic
gaguuccgcaguauggauc

SEQ ID NO: 41227 - RNA, 20 nt, Artificial Sequence
  Synthetic
ggaguuccgcaguauggauc

SEQ ID NO: 41228 - RNA, 21 nt, Artificial Sequence
  Synthetic
aggaguuccgcaguauggauc

SEQ ID NO: 41229 - RNA, 22 nt, Artificial Sequence
  Synthetic
uaggaguuccgcaguauggauc

SEQ ID NO: 41230 - RNA, 23 nt, Artificial Sequence
  Synthetic
cuaggaguuccgcaguauggauc

SEQ ID NO: 41231 - RNA, 24 nt, Artificial Sequence
  Synthetic
gcuaggaguuccgcaguauggauc

SEQ ID NO: 41232 - RNA, 18 nt, Artificial Sequence
  Synthetic
gugaggcgaacaaugauc

SEQ ID NO: 41233 - RNA, 19 nt, Artificial Sequence
  Synthetic
ggugaggcgaacaaugauc

SEQ ID NO: 41234 - RNA, 20 nt, Artificial Sequence
  Synthetic
uggugaggcgaacaaugauc

SEQ ID NO: 41235 - RNA, 21 nt, Artificial Sequence
  Synthetic
auggugaggcgaacaaugauc

SEQ ID NO: 41236 - RNA, 22 nt, Artificial Sequence
  Synthetic
uauggugaggcgaacaaugauc

SEQ ID NO: 41237 - RNA, 23 nt, Artificial Sequence
  Synthetic
guauggugaggcgaacaaugauc

SEQ ID NO: 41238 - RNA, 24 nt, Artificial Sequence
  Synthetic
uguauggugaggcgaacaaugauc

SEQ ID NO: 41239 - RNA, 18 nt, Artificial Sequence
  Synthetic
uggguccaacuggugauc

SEQ ID NO: 41240 - RNA, 19 nt, Artificial Sequence
  Synthetic
cuggguccaacuggugauc

SEQ ID NO: 41241 - RNA, 20 nt, Artificial Sequence
  Synthetic
gcuggguccaacuggugauc

SEQ ID NO: 41242 - RNA, 21 nt, Artificial Sequence
  Synthetic
ugcuggguccaacuggugauc

SEQ ID NO: 41243 - RNA, 22 nt, Artificial Sequence
  Synthetic
augcuggguccaacuggugauc

SEQ ID NO: 41244 - RNA, 23 nt, Artificial Sequence
  Synthetic
aaugcuggguccaacuggugauc

SEQ ID NO: 41245 - RNA, 24 nt, Artificial Sequence
  Synthetic
gaaugcuggguccaacuggugauc

SEQ ID NO: 41246 - RNA, 18 nt, Artificial Sequence
  Synthetic
ggaacaggguucacuauc

SEQ ID NO: 41247 - RNA, 19 nt, Artificial Sequence
  Synthetic
cggaacaggguucacuauc

SEQ ID NO: 41248 - RNA, 20 nt, Artificial Sequence
  Synthetic
ucggaacaggguucacuauc

SEQ ID NO: 41249 - RNA, 21 nt, Artificial Sequence
  Synthetic
gucggaacaggguucacuauc

SEQ ID NO: 41250 - RNA, 22 nt, Artificial Sequence
  Synthetic
agucggaacaggguucacuauc

SEQ ID NO: 41251 - RNA, 23 nt, Artificial Sequence
  Synthetic
uagucggaacaggguucacuauc

SEQ ID NO: 41252 - RNA, 24 nt, Artificial Sequence
  Synthetic
auagucggaacaggguucacuauc

SEQ ID NO: 41253 - RNA, 18 nt, Artificial Sequence
  Synthetic
gagugcgaauccacacuc

SEQ ID NO: 41254 - RNA, 19 nt, Artificial Sequence
  Synthetic
ggagugcgaauccacacuc

SEQ ID NO: 41255 - RNA, 20 nt, Artificial Sequence
  Synthetic
aggagugcgaauccacacuc

SEQ ID NO: 41256 - RNA, 21 nt, Artificial Sequence
  Synthetic
gaggagugcgaauccacacuc

SEQ ID NO: 41257 - RNA, 22 nt, Artificial Sequence
  Synthetic
ggaggagugcgaauccacacuc

SEQ ID NO: 41258 - RNA, 23 nt, Artificial Sequence
  Synthetic
aggaggagugcgaauccacacuc

SEQ ID NO: 41259 - RNA, 24 nt, Artificial Sequence
  Synthetic
caggaggagugcgaauccacacuc

SEQ ID NO: 41260 - RNA, 18 nt, Artificial Sequence
  Synthetic
aagguucuuuccccacuc

SEQ ID NO: 41261 - RNA, 19 nt, Artificial Sequence
  Synthetic
aaagguucuuuccccacuc

SEQ ID NO: 41262 - RNA, 20 nt, Artificial Sequence
  Synthetic
gaaagguucuuuccccacuc

SEQ ID NO: 41263 - RNA, 21 nt, Artificial Sequence
  Synthetic
ggaaagguucuuuccccacuc

SEQ ID NO: 41264 - RNA, 22 nt, Artificial Sequence
  Synthetic
uggaaagguucuuuccccacuc

SEQ ID NO: 41265 - RNA, 23 nt, Artificial Sequence
  Synthetic
guggaaagguucuuuccccacuc

SEQ ID NO: 41266 - RNA, 24 nt, Artificial Sequence
  Synthetic
gguggaaagguucuuuccccacuc

SEQ ID NO: 41267 - RNA, 18 nt, Artificial Sequence
  Synthetic
gccuaauucuucccacuc

SEQ ID NO: 41268 - RNA, 19 nt, Artificial Sequence
  Synthetic
ugccuaauucuucccacuc

SEQ ID NO: 41269 - RNA, 20 nt, Artificial Sequence
  Synthetic
uugccuaauucuucccacuc

SEQ ID NO: 41270 - RNA, 21 nt, Artificial Sequence
  Synthetic
auugccuaauucuucccacuc

SEQ ID NO: 41271 - RNA, 22 nt, Artificial Sequence
  Synthetic
cauugccuaauucuucccacuc

SEQ ID NO: 41272 - RNA, 23 nt, Artificial Sequence
  Synthetic
ucauugccuaauucuucccacuc

SEQ ID NO: 41273 - RNA, 24 nt, Artificial Sequence
  Synthetic
cucauugccuaauucuucccacuc

SEQ ID NO: 41274 - RNA, 18 nt, Artificial Sequence
  Synthetic
acaaugaucagaggacuc

SEQ ID NO: 41275 - RNA, 19 nt, Artificial Sequence
  Synthetic
aacaaugaucagaggacuc

SEQ ID NO: 41276 - RNA, 20 nt, Artificial Sequence
  Synthetic
gaacaaugaucagaggacuc

SEQ ID NO: 41277 - RNA, 21 nt, Artificial Sequence
  Synthetic
cgaacaaugaucagaggacuc

SEQ ID NO: 41278 - RNA, 22 nt, Artificial Sequence
  Synthetic
gcgaacaaugaucagaggacuc

SEQ ID NO: 41279 - RNA, 23 nt, Artificial Sequence
  Synthetic
ggcgaacaaugaucagaggacuc

SEQ ID NO: 41280 - RNA, 24 nt, Artificial Sequence
  Synthetic
aggcgaacaaugaucagaggacuc

SEQ ID NO: 41281 - RNA, 18 nt, Artificial Sequence
  Synthetic
aaaagacaccaaauacuc

SEQ ID NO: 41282 - RNA, 19 nt, Artificial Sequence
  Synthetic
caaaagacaccaaauacuc

SEQ ID NO: 41283 - RNA, 20 nt, Artificial Sequence
  Synthetic
ccaaaagacaccaaauacuc

SEQ ID NO: 41284 - RNA, 21 nt, Artificial Sequence
  Synthetic
uccaaaagacaccaaauacuc

SEQ ID NO: 41285 - RNA, 22 nt, Artificial Sequence
  Synthetic
cuccaaaagacaccaaauacuc

SEQ ID NO: 41286 - RNA, 23 nt, Artificial Sequence
  Synthetic
acuccaaaagacaccaaauacuc

SEQ ID NO: 41287 - RNA, 24 nt, Artificial Sequence
  Synthetic
cacuccaaaagacaccaaauacuc

SEQ ID NO: 41288 - RNA, 18 nt, Artificial Sequence
  Synthetic
augggaguaggcugccuc

SEQ ID NO: 41289 - RNA, 19 nt, Artificial Sequence
  Synthetic
gaugggaguaggcugccuc

SEQ ID NO: 41290 - RNA, 20 nt, Artificial Sequence
  Synthetic
agaugggaguaggcugccuc

SEQ ID NO: 41291 - RNA, 21 nt, Artificial Sequence
  Synthetic
gagaugggaguaggcugccuc

SEQ ID NO: 41292 - RNA, 22 nt, Artificial Sequence
  Synthetic
agagaugggaguaggcugccuc

SEQ ID NO: 41293 - RNA, 23 nt, Artificial Sequence
  Synthetic
gagagaugggaguaggcugccuc

SEQ ID NO: 41294 - RNA, 24 nt, Artificial Sequence
  Synthetic
ggagagaugggaguaggcugccuc

SEQ ID NO: 41295 - RNA, 18 nt, Artificial Sequence
  Synthetic
ucaagaacgguuucucuc

SEQ ID NO: 41296 - RNA, 19 nt, Artificial Sequence
  Synthetic
cucaagaacgguuucucuc

SEQ ID NO: 41297 - RNA, 20 nt, Artificial Sequence
  Synthetic
acucaagaacgguuucucuc

SEQ ID NO: 41298 - RNA, 21 nt, Artificial Sequence
  Synthetic
uacucaagaacgguuucucuc

SEQ ID NO: 41299 - RNA, 22 nt, Artificial Sequence
  Synthetic
auacucaagaacgguuucucuc

SEQ ID NO: 41300 - RNA, 23 nt, Artificial Sequence
  Synthetic
aauacucaagaacgguuucucuc

SEQ ID NO: 41301 - RNA, 24 nt, Artificial Sequence
  Synthetic
aaauacucaagaacgguuucucuc

SEQ ID NO: 41302 - RNA, 18 nt, Artificial Sequence
  Synthetic
ucuaacaacaguagucuc

SEQ ID NO: 41303 - RNA, 19 nt, Artificial Sequence
  Synthetic
gucuaacaacaguagucuc

SEQ ID NO: 41304 - RNA, 20 nt, Artificial Sequence
  Synthetic
cgucuaacaacaguagucuc

SEQ ID NO: 41305 - RNA, 21 nt, Artificial Sequence
  Synthetic
ucgucuaacaacaguagucuc

SEQ ID NO: 41306 - RNA, 22 nt, Artificial Sequence
  Synthetic
uucgucuaacaacaguagucuc

SEQ ID NO: 41307 - RNA, 23 nt, Artificial Sequence
  Synthetic
cuucgucuaacaacaguagucuc

SEQ ID NO: 41308 - RNA, 24 nt, Artificial Sequence
  Synthetic
ucuucgucuaacaacaguagucuc

SEQ ID NO: 41309 - RNA, 18 nt, Artificial Sequence
  Synthetic
aacagacgggaaaaaguc

SEQ ID NO: 41310 - RNA, 19 nt, Artificial Sequence
  Synthetic
gaacagacgggaaaaaguc

SEQ ID NO: 41311 - RNA, 20 nt, Artificial Sequence
  Synthetic
cgaacagacgggaaaaaguc

SEQ ID NO: 41312 - RNA, 21 nt, Artificial Sequence
  Synthetic
acgaacagacgggaaaaaguc

SEQ ID NO: 41313 - RNA, 22 nt, Artificial Sequence
  Synthetic
cacgaacagacgggaaaaaguc

SEQ ID NO: 41314 - RNA, 23 nt, Artificial Sequence
  Synthetic
ucacgaacagacgggaaaaaguc

SEQ ID NO: 41315 - RNA, 24 nt, Artificial Sequence
  Synthetic
aucacgaacagacgggaaaaaguc

SEQ ID NO: 41316 - RNA, 18 nt, Artificial Sequence
  Synthetic
uugacauaacaaacaguc

SEQ ID NO: 41317 - RNA, 19 nt, Artificial Sequence
  Synthetic
guugacauaacaaacaguc

SEQ ID NO: 41318 - RNA, 20 nt, Artificial Sequence
  Synthetic
uguugacauaacaaacaguc

SEQ ID NO: 41319 - RNA, 21 nt, Artificial Sequence
  Synthetic
uuguugacauaacaaacaguc

SEQ ID NO: 41320 - RNA, 22 nt, Artificial Sequence
  Synthetic
guuguugacauaacaaacaguc

SEQ ID NO: 41321 - RNA, 23 nt, Artificial Sequence
  Synthetic
gguuguugacauaacaaacaguc

SEQ ID NO: 41322 - RNA, 24 nt, Artificial Sequence
  Synthetic
cgguuguugacauaacaaacaguc

SEQ ID NO: 41323 - RNA, 18 nt, Artificial Sequence
  Synthetic
cucagcaaaaacacaguc

SEQ ID NO: 41324 - RNA, 19 nt, Artificial Sequence
  Synthetic
acucagcaaaaacacaguc

SEQ ID NO: 41325 - RNA, 20 nt, Artificial Sequence
  Synthetic
cacucagcaaaaacacaguc

SEQ ID NO: 41326 - RNA, 21 nt, Artificial Sequence
  Synthetic
ccacucagcaaaaacacaguc

SEQ ID NO: 41327 - RNA, 22 nt, Artificial Sequence
  Synthetic
cccacucagcaaaaacacaguc

SEQ ID NO: 41328 - RNA, 23 nt, Artificial Sequence
  Synthetic
ucccacucagcaaaaacacaguc

SEQ ID NO: 41329 - RNA, 24 nt, Artificial Sequence
  Synthetic
uucccacucagcaaaaacacaguc

SEQ ID NO: 41330 - RNA, 18 nt, Artificial Sequence
  Synthetic
  misc_feature (9)..(9): n is a, c, g, or u
acccaggungcuagaguc

SEQ ID NO: 41331 - RNA, 19 nt, Artificial Sequence
  Synthetic
  misc_feature (10)..(10): n is a, c, g, or u
cacccaggungcuagaguc

SEQ ID NO: 41332 - RNA, 20 nt, Artificial Sequence
  Synthetic
  misc_feature (11)..(11): n is a, c, g, or u
ccacccaggungcuagaguc

SEQ ID NO: 41333 - RNA, 21 nt, Artificial Sequence
  Synthetic
  misc_feature (12)..(12): n is a, c, g, or u
cccacccaggungcuagaguc

SEQ ID NO: 41334 - RNA, 22 nt, Artificial Sequence
  Synthetic
  misc_feature (13)..(13): n is a, c, g, or u
acccacccaggungcuagaguc

SEQ ID NO: 41335 - RNA, 23 nt, Artificial Sequence
  Synthetic
  misc_feature (14)..(14): n is a, c, g, or u
uacccacccaggungcuagaguc

SEQ ID NO: 41336 - RNA, 24 nt, Artificial Sequence
  Synthetic
  misc_feature (15)..(15): n is a, c, g, or u
uuacccacccaggungcuagaguc

SEQ ID NO: 41337 - RNA, 18 nt, Artificial Sequence
  Synthetic
uuucccaccuugugaguc

SEQ ID NO: 41338 - RNA, 19 nt, Artificial Sequence
  Synthetic
guuucccaccuugugaguc

SEQ ID NO: 41339 - RNA, 20 nt, Artificial Sequence
  Synthetic
aguuucccaccuugugaguc

SEQ ID NO: 41340 - RNA, 21 nt, Artificial Sequence
  Synthetic
aaguuucccaccuugugaguc

SEQ ID NO: 41341 - RNA, 22 nt, Artificial Sequence
  Synthetic
aaaguuucccaccuugugaguc

SEQ ID NO: 41342 - RNA, 23 nt, Artificial Sequence
  Synthetic
uaaaguuucccaccuugugaguc

SEQ ID NO: 41343 - RNA, 24 nt, Artificial Sequence
  Synthetic
guaaaguuucccaccuugugaguc

SEQ ID NO: 41344 - RNA, 18 nt, Artificial Sequence
  Synthetic
caacauaccuugauaguc

SEQ ID NO: 41345 - RNA, 19 nt, Artificial Sequence
  Synthetic
gcaacauaccuugauaguc

SEQ ID NO: 41346 - RNA, 20 nt, Artificial Sequence
  Synthetic
ggcaacauaccuugauaguc

SEQ ID NO: 41347 - RNA, 21 nt, Artificial Sequence
  Synthetic
gggcaacauaccuugauaguc

SEQ ID NO: 41348 - RNA, 22 nt, Artificial Sequence
  Synthetic
cgggcaacauaccuugauaguc

SEQ ID NO: 41349 - RNA, 23 nt, Artificial Sequence
  Synthetic
acgggcaacauaccuugauaguc

SEQ ID NO: 41350 - RNA, 24 nt, Artificial Sequence
  Synthetic
aacgggcaacauaccuugauaguc

SEQ ID NO: 41351 - RNA, 18 nt, Artificial Sequence
  Synthetic
cgucuaacaacaguaguc

SEQ ID NO: 41352 - RNA, 19 nt, Artificial Sequence
  Synthetic
ucgucuaacaacaguaguc

SEQ ID NO: 41353 - RNA, 20 nt, Artificial Sequence
  Synthetic
uucgucuaacaacaguaguc

SEQ ID NO: 41354 - RNA, 21 nt, Artificial Sequence
  Synthetic
cuucgucuaacaacaguaguc

SEQ ID NO: 41355 - RNA, 22 nt, Artificial Sequence
  Synthetic
ucuucgucuaacaacaguaguc

SEQ ID NO: 41356 - RNA, 23 nt, Artificial Sequence
  Synthetic
cucuucgucuaacaacaguaguc

SEQ ID NO: 41357 - RNA, 24 nt, Artificial Sequence
  Synthetic
ccucuucgucuaacaacaguaguc

SEQ ID NO: 41358 - RNA, 18 nt, Artificial Sequence
  Synthetic
cacucgagagggaccguc

SEQ ID NO: 41359 - RNA, 19 nt, Artificial Sequence
  Synthetic
ccacucgagagggaccguc

SEQ ID NO: 41360 - RNA, 20 nt, Artificial Sequence
  Synthetic
cccacucgagagggaccguc

SEQ ID NO: 41361 - RNA, 18 nt, Artificial Sequence
  Synthetic
acaggugcaauuuccguc

SEQ ID NO: 41362 - RNA, 19 nt, Artificial Sequence
  Synthetic
uacaggugcaauuuccguc

SEQ ID NO: 41363 - RNA, 20 nt, Artificial Sequence
  Synthetic
auacaggugcaauuuccguc

SEQ ID NO: 41364 - RNA, 21 nt, Artificial Sequence
  Synthetic
aauacaggugcaauuuccguc

SEQ ID NO: 41365 - RNA, 22 nt, Artificial Sequence
  Synthetic
gaauacaggugcaauuuccguc

SEQ ID NO: 41366 - RNA, 23 nt, Artificial Sequence
  Synthetic
ggaauacaggugcaauuuccguc

SEQ ID NO: 41367 - RNA, 24 nt, Artificial Sequence
  Synthetic
gggaauacaggugcaauuuccguc

SEQ ID NO: 41368 - RNA, 18 nt, Artificial Sequence
  Synthetic
accaguggggguugcguc

SEQ ID NO: 41369 - RNA, 19 nt, Artificial Sequence
  Synthetic
aaccaguggggguugcguc

SEQ ID NO: 41370 - RNA, 20 nt, Artificial Sequence
  Synthetic
caaccaguggggguugcguc

SEQ ID NO: 41371 - RNA, 21 nt, Artificial Sequence
  Synthetic
ccaaccaguggggguugcguc

SEQ ID NO: 41372 - RNA, 22 nt, Artificial Sequence
  Synthetic
cccaaccaguggggguugcguc

SEQ ID NO: 41373 - RNA, 23 nt, Artificial Sequence
  Synthetic
ccccaaccaguggggguugcguc

SEQ ID NO: 41374 - RNA, 24 nt, Artificial Sequence
  Synthetic
gccccaaccaguggggguugcguc

SEQ ID NO: 41375 - RNA, 18 nt, Artificial Sequence
  Synthetic
gcgauugagaucuucguc

SEQ ID NO: 41376 - RNA, 19 nt, Artificial Sequence
  Synthetic
ggcgauugagaucuucguc

SEQ ID NO: 41377 - RNA, 20 nt, Artificial Sequence
  Synthetic
cggcgauugagaucuucguc

SEQ ID NO: 41378 - RNA, 18 nt, Artificial Sequence
  Synthetic
ccuccuaauacaaagguc

SEQ ID NO: 41379 - RNA, 19 nt, Artificial Sequence
  Synthetic
gccuccuaauacaaagguc

SEQ ID NO: 41380 - RNA, 20 nt, Artificial Sequence
  Synthetic
agccuccuaauacaaagguc

SEQ ID NO: 41381 - RNA, 21 nt, Artificial Sequence
  Synthetic
cagccuccuaauacaaagguc

SEQ ID NO: 41382 - RNA, 22 nt, Artificial Sequence
  Synthetic
acagccuccuaauacaaagguc

SEQ ID NO: 41383 - RNA, 23 nt, Artificial Sequence
  Synthetic
uacagccuccuaauacaaagguc

SEQ ID NO: 41384 - RNA, 24 nt, Artificial Sequence
  Synthetic
cuacagccuccuaauacaaagguc

SEQ ID NO: 41385 - RNA, 18 nt, Artificial Sequence
  Synthetic
gaggggugaacccggguc

SEQ ID NO: 41386 - RNA, 19 nt, Artificial Sequence
  Synthetic
ggaggggugaacccggguc

SEQ ID NO: 41387 - RNA, 20 nt, Artificial Sequence
  Synthetic
uggaggggugaacccggguc

SEQ ID NO: 41388 - RNA, 21 nt, Artificial Sequence
  Synthetic
guggaggggugaacccggguc

SEQ ID NO: 41389 - RNA, 22 nt, Artificial Sequence
  Synthetic
uguggaggggugaacccggguc

SEQ ID NO: 41390 - RNA, 23 nt, Artificial Sequence
  Synthetic
guguggaggggugaacccggguc

SEQ ID NO: 41391 - RNA, 24 nt, Artificial Sequence
  Synthetic
cguguggaggggugaacccggguc

SEQ ID NO: 41392 - RNA, 18 nt, Artificial Sequence
  Synthetic
guaacacgagcagggguc

SEQ ID NO: 41393 - RNA, 19 nt, Artificial Sequence
  Synthetic
uguaacacgagcagggguc

SEQ ID NO: 41394 - RNA, 20 nt, Artificial Sequence
  Synthetic
cuguaacacgagcagggguc

SEQ ID NO: 41395 - RNA, 21 nt, Artificial Sequence
  Synthetic
ccuguaacacgagcagggguc

SEQ ID NO: 41396 - RNA, 22 nt, Artificial Sequence
  Synthetic
gccuguaacacgagcagggguc

SEQ ID NO: 41397 - RNA, 23 nt, Artificial Sequence
  Synthetic
cgccuguaacacgagcagggguc

SEQ ID NO: 41398 - RNA, 24 nt, Artificial Sequence
  Synthetic
ccgccuguaacacgagcagggguc

SEQ ID NO: 41399 - RNA, 18 nt, Artificial Sequence
  Synthetic
uguaaauaaugucugguc

SEQ ID NO: 41400 - RNA, 19 nt, Artificial Sequence
  Synthetic
auguaaauaaugucugguc

SEQ ID NO: 41401 - RNA, 20 nt, Artificial Sequence
  Synthetic
uauguaaauaaugucugguc

SEQ ID NO: 41402 - RNA, 21 nt, Artificial Sequence
  Synthetic
guauguaaauaaugucugguc

SEQ ID NO: 41403 - RNA, 22 nt, Artificial Sequence
  Synthetic
gguauguaaauaaugucugguc

SEQ ID NO: 41404 - RNA, 23 nt, Artificial Sequence
  Synthetic
ggguauguaaauaaugucugguc

SEQ ID NO: 41405 - RNA, 24 nt, Artificial Sequence
  Synthetic
aggguauguaaauaaugucugguc

SEQ ID NO: 41406 - RNA, 18 nt, Artificial Sequence
  Synthetic
gaggugcgccccgugguc

SEQ ID NO: 41407 - RNA, 19 nt, Artificial Sequence
  Synthetic
agaggugcgccccgugguc

SEQ ID NO: 41408 - RNA, 20 nt, Artificial Sequence
  Synthetic
gagaggugcgccccgugguc

SEQ ID NO: 41409 - RNA, 21 nt, Artificial Sequence
  Synthetic
agagaggugcgccccgugguc

SEQ ID NO: 41410 - RNA, 22 nt, Artificial Sequence
  Synthetic
aagagaggugcgccccgugguc

SEQ ID NO: 41411 - RNA, 23 nt, Artificial Sequence
  Synthetic
aaagagaggugcgccccgugguc

SEQ ID NO: 41412 - RNA, 24 nt, Artificial Sequence
  Synthetic
uaaagagaggugcgccccgugguc

SEQ ID NO: 41413 - RNA, 18 nt, Artificial Sequence
  Synthetic
uaggggcauuuggugguc

SEQ ID NO: 41414 - RNA, 19 nt, Artificial Sequence
  Synthetic
auaggggcauuuggugguc

SEQ ID NO: 41415 - RNA, 20 nt, Artificial Sequence
  Synthetic
gauaggggcauuuggugguc

SEQ ID NO: 41416 - RNA, 21 nt, Artificial Sequence
  Synthetic
ggauaggggcauuuggugguc

SEQ ID NO: 41417 - RNA, 22 nt, Artificial Sequence
  Synthetic
aggauaggggcauuuggugguc

SEQ ID NO: 41418 - RNA, 23 nt, Artificial Sequence
  Synthetic
uaggauaggggcauuuggugguc

SEQ ID NO: 41419 - RNA, 24 nt, Artificial Sequence
  Synthetic
auaggauaggggcauuuggugguc

SEQ ID NO: 41420 - RNA, 18 nt, Artificial Sequence
  Synthetic
caaagcugaagcgguguc

SEQ ID NO: 41421 - RNA, 19 nt, Artificial Sequence
  Synthetic
acaaagcugaagcgguguc

SEQ ID NO: 41422 - RNA, 20 nt, Artificial Sequence
  Synthetic
uacaaagcugaagcgguguc

SEQ ID NO: 41423 - RNA, 21 nt, Artificial Sequence
  Synthetic
guacaaagcugaagcgguguc

SEQ ID NO: 41424 - RNA, 22 nt, Artificial Sequence
  Synthetic
gguacaaagcugaagcgguguc

SEQ ID NO: 41425 - RNA, 23 nt, Artificial Sequence
  Synthetic
cgguacaaagcugaagcgguguc

SEQ ID NO: 41426 - RNA, 24 nt, Artificial Sequence
  Synthetic
ccgguacaaagcugaagcgguguc

SEQ ID NO: 41427 - RNA, 18 nt, Artificial Sequence
  Synthetic
auugugaggauucuuguc

SEQ ID NO: 41428 - RNA, 19 nt, Artificial Sequence
  Synthetic
uauugugaggauucuuguc

SEQ ID NO: 41429 - RNA, 20 nt, Artificial Sequence
  Synthetic
guauugugaggauucuuguc

SEQ ID NO: 41430 - RNA, 21 nt, Artificial Sequence
  Synthetic
gguauugugaggauucuuguc

SEQ ID NO: 41431 - RNA, 22 nt, Artificial Sequence
  Synthetic
cgguauugugaggauucuuguc

SEQ ID NO: 41432 - RNA, 23 nt, Artificial Sequence
  Synthetic
gcgguauugugaggauucuuguc

SEQ ID NO: 41433 - RNA, 24 nt, Artificial Sequence
  Synthetic
ugcgguauugugaggauucuuguc

SEQ ID NO: 41434 - RNA, 18 nt, Artificial Sequence
  Synthetic
ccaacagaccaguuauuc

SEQ ID NO: 41435 - RNA, 19 nt, Artificial Sequence
  Synthetic
cccaacagaccaguuauuc

SEQ ID NO: 41436 - RNA, 20 nt, Artificial Sequence
  Synthetic
acccaacagaccaguuauuc

SEQ ID NO: 41437 - RNA, 21 nt, Artificial Sequence
  Synthetic
aacccaacagaccaguuauuc

SEQ ID NO: 41438 - RNA, 22 nt, Artificial Sequence
  Synthetic
aaacccaacagaccaguuauuc

SEQ ID NO: 41439 - RNA, 23 nt, Artificial Sequence
  Synthetic
gaaacccaacagaccaguuauuc

SEQ ID NO: 41440 - RNA, 24 nt, Artificial Sequence
  Synthetic
cgaaacccaacagaccaguuauuc

SEQ ID NO: 41441 - RNA, 18 nt, Artificial Sequence
  Synthetic
uauagaauacccgccuuc

SEQ ID NO: 41442 - RNA, 19 nt, Artificial Sequence
  Synthetic
auauagaauacccgccuuc

SEQ ID NO: 41443 - RNA, 20 nt, Artificial Sequence
  Synthetic
uauauagaauacccgccuuc

SEQ ID NO: 41444 - RNA, 21 nt, Artificial Sequence
  Synthetic
uuauauagaauacccgccuuc

SEQ ID NO: 41445 - RNA, 22 nt, Artificial Sequence
  Synthetic
cuuauauagaauacccgccuuc

SEQ ID NO: 41446 - RNA, 23 nt, Artificial Sequence
  Synthetic
ucuuauauagaauacccgccuuc

SEQ ID NO: 41447 - RNA, 24 nt, Artificial Sequence
  Synthetic
cucuuauauagaauacccgccuuc

SEQ ID NO: 41448 - RNA, 18 nt, Artificial Sequence
  Synthetic
cuggagaugcagaucuuc

SEQ ID NO: 41449 - RNA, 19 nt, Artificial Sequence
  Synthetic
gcuggagaugcagaucuuc

SEQ ID NO: 41450 - RNA, 20 nt, Artificial Sequence
  Synthetic
agcuggagaugcagaucuuc

SEQ ID NO: 41451 - RNA, 21 nt, Artificial Sequence
  Synthetic
aagcuggagaugcagaucuuc

SEQ ID NO: 41452 - RNA, 22 nt, Artificial Sequence
  Synthetic
gaagcuggagaugcagaucuuc

SEQ ID NO: 41453 - RNA, 23 nt, Artificial Sequence
  Synthetic
ggaagcuggagaugcagaucuuc

SEQ ID NO: 41454 - RNA, 24 nt, Artificial Sequence
  Synthetic
gggaagcuggagaugcagaucuuc

SEQ ID NO: 41455 - RNA, 18 nt, Artificial Sequence
  Synthetic
gcgagggaguucuucuuc

SEQ ID NO: 41456 - RNA, 19 nt, Artificial Sequence
  Synthetic
ggcgagggaguucuucuuc

SEQ ID NO: 41457 - RNA, 20 nt, Artificial Sequence
  Synthetic
aggcgagggaguucuucuuc

SEQ ID NO: 41458 - RNA, 21 nt, Artificial Sequence
  Synthetic
gaggcgagggaguucuucuuc

SEQ ID NO: 41459 - RNA, 22 nt, Artificial Sequence
  Synthetic
cgaggcgagggaguucuucuuc

SEQ ID NO: 41460 - RNA, 23 nt, Artificial Sequence
  Synthetic
gcgaggcgagggaguucuucuuc

SEQ ID NO: 41461 - RNA, 24 nt, Artificial Sequence
  Synthetic
ugcgaggcgagggaguucuucuuc

SEQ ID NO: 41462 - RNA, 18 nt, Artificial Sequence
  Synthetic
gaggcgagggaguucuuc

SEQ ID NO: 41463 - RNA, 19 nt, Artificial Sequence
  Synthetic
cgaggcgagggaguucuuc

SEQ ID NO: 41464 - RNA, 20 nt, Artificial Sequence
  Synthetic
gcgaggcgagggaguucuuc

SEQ ID NO: 41465 - RNA, 21 nt, Artificial Sequence
  Synthetic
ugcgaggcgagggaguucuuc

SEQ ID NO: 41466 - RNA, 22 nt, Artificial Sequence
  Synthetic
cugcgaggcgagggaguucuuc

SEQ ID NO: 41467 - RNA, 23 nt, Artificial Sequence
  Synthetic
ucugcgaggcgagggaguucuuc

SEQ ID NO: 41468 - RNA, 24 nt, Artificial Sequence
  Synthetic
gucugcgaggcgagggaguucuuc

SEQ ID NO: 41469 - RNA, 18 nt, Artificial Sequence
  Synthetic
ggaaaggauguauauuuc

SEQ ID NO: 41470 - RNA, 19 nt, Artificial Sequence
  Synthetic
uggaaaggauguauauuuc

SEQ ID NO: 41471 - RNA, 20 nt, Artificial Sequence
  Synthetic
auggaaaggauguauauuuc

SEQ ID NO: 41472 - RNA, 21 nt, Artificial Sequence
  Synthetic
cauggaaaggauguauauuuc

SEQ ID NO: 41473 - RNA, 22 nt, Artificial Sequence
  Synthetic
ccauggaaaggauguauauuuc

SEQ ID NO: 41474 - RNA, 23 nt, Artificial Sequence
  Synthetic
gccauggaaaggauguauauuuc

SEQ ID NO: 41475 - RNA, 24 nt, Artificial Sequence
  Synthetic
agccauggaaaggauguauauuuc

SEQ ID NO: 41476 - RNA, 18 nt, Artificial Sequence
  Synthetic
cuguuaacagggaguuuc

SEQ ID NO: 41477 - RNA, 19 nt, Artificial Sequence
  Synthetic
ccuguuaacagggaguuuc

SEQ ID NO: 41478 - RNA, 20 nt, Artificial Sequence
  Synthetic
gccuguuaacagggaguuuc

SEQ ID NO: 41479 - RNA, 21 nt, Artificial Sequence
  Synthetic
ggccuguuaacagggaguuuc

SEQ ID NO: 41480 - RNA, 22 nt, Artificial Sequence
  Synthetic
uggccuguuaacagggaguuuc

SEQ ID NO: 41481 - RNA, 23 nt, Artificial Sequence
  Synthetic
uuggccuguuaacagggaguuuc

SEQ ID NO: 41482 - RNA, 24 nt, Artificial Sequence
  Synthetic
auuggccuguuaacagggaguuuc

SEQ ID NO: 41483 - RNA, 18 nt, Artificial Sequence
  Synthetic
cgaacagacgggaaaaag

SEQ ID NO: 41484 - RNA, 19 nt, Artificial Sequence
  Synthetic
acgaacagacgggaaaaag

SEQ ID NO: 41485 - RNA, 20 nt, Artificial Sequence
  Synthetic
cacgaacagacgggaaaaag

SEQ ID NO: 41486 - RNA, 21 nt, Artificial Sequence
  Synthetic
ucacgaacagacgggaaaaag

SEQ ID NO: 41487 - RNA, 22 nt, Artificial Sequence
  Synthetic
aucacgaacagacgggaaaaag

SEQ ID NO: 41488 - RNA, 23 nt, Artificial Sequence
  Synthetic
gaucacgaacagacgggaaaaag

SEQ ID NO: 41489 - RNA, 24 nt, Artificial Sequence
  Synthetic
agaucacgaacagacgggaaaaag

SEQ ID NO: 41490 - RNA, 18 nt, Artificial Sequence
  Synthetic
cgguuucucucccaaaag

SEQ ID NO: 41491 - RNA, 19 nt, Artificial Sequence
  Synthetic
acgguuucucucccaaaag

SEQ ID NO: 41492 - RNA, 20 nt, Artificial Sequence
  Synthetic
aacgguuucucucccaaaag

SEQ ID NO: 41493 - RNA, 21 nt, Artificial Sequence
  Synthetic
gaacgguuucucucccaaaag

SEQ ID NO: 41494 - RNA, 22 nt, Artificial Sequence
  Synthetic
agaacgguuucucucccaaaag

SEQ ID NO: 41495 - RNA, 23 nt, Artificial Sequence
  Synthetic
aagaacgguuucucucccaaaag

SEQ ID NO: 41496 - RNA, 24 nt, Artificial Sequence
  Synthetic
caagaacgguuucucucccaaaag

SEQ ID NO: 41497 - RNA, 18 nt, Artificial Sequence
  Synthetic
aauggauauuuggaaaag

SEQ ID NO: 41498 - RNA, 19 nt, Artificial Sequence
  Synthetic
aaauggauauuuggaaaag

SEQ ID NO: 41499 - RNA, 20 nt, Artificial Sequence
  Synthetic
caaauggauauuuggaaaag

SEQ ID NO: 41500 - RNA, 21 nt, Artificial Sequence
  Synthetic
gcaaauggauauuuggaaaag

SEQ ID NO: 41501 - RNA, 22 nt, Artificial Sequence
  Synthetic
ugcaaauggauauuuggaaaag

SEQ ID NO: 41502 - RNA, 23 nt, Artificial Sequence
  Synthetic
augcaaauggauauuuggaaaag

SEQ ID NO: 41503 - RNA, 24 nt, Artificial Sequence
  Synthetic
gaugcaaauggauauuuggaaaag

SEQ ID NO: 41504 - RNA, 18 nt, Artificial Sequence
  Synthetic
aggauucccgguacaaag

SEQ ID NO: 41505 - RNA, 19 nt, Artificial Sequence
  Synthetic
aaggauucccgguacaaag

SEQ ID NO: 41506 - RNA, 20 nt, Artificial Sequence
  Synthetic
uaaggauucccgguacaaag

SEQ ID NO: 41507 - RNA, 21 nt, Artificial Sequence
  Synthetic
cuaaggauucccgguacaaag

SEQ ID NO: 41508 - RNA, 22 nt, Artificial Sequence
  Synthetic
ucuaaggauucccgguacaaag

SEQ ID NO: 41509 - RNA, 23 nt, Artificial Sequence
  Synthetic
cucuaaggauucccgguacaaag

SEQ ID NO: 41510 - RNA, 24 nt, Artificial Sequence
  Synthetic
acucuaaggauucccgguacaaag

SEQ ID NO: 41511 - RNA, 18 nt, Artificial Sequence
  Synthetic
uuagauguauacccaaag

SEQ ID NO: 41512 - RNA, 19 nt, Artificial Sequence
  Synthetic
uuuagauguauacccaaag

SEQ ID NO: 41513 - RNA, 20 nt, Artificial Sequence
  Synthetic
guuuagauguauacccaaag

SEQ ID NO: 41514 - RNA, 21 nt, Artificial Sequence
  Synthetic
gguuuagauguauacccaaag

SEQ ID NO: 41515 - RNA, 22 nt, Artificial Sequence
  Synthetic
  misc_feature (1)..(1): n is a, c, g, or u
ngguuuagauguauacccaaag

SEQ ID NO: 41516 - RNA, 23 nt, Artificial Sequence
  Synthetic
  misc_feature (2)..(2): n is a, c, g, or u
angguuuagauguauacccaaag

SEQ ID NO: 41517 - RNA, 24 nt, Artificial Sequence
  Synthetic
  misc_feature (3)..(3): n is a, c, g, or u
uangguuuagauguauacccaaag

SEQ ID NO: 41518 - RNA, 18 nt, Artificial Sequence
  Synthetic
uguauauuuccgagaaag

SEQ ID NO: 41519 - RNA, 19 nt, Artificial Sequence
  Synthetic
auguauauuuccgagaaag

SEQ ID NO: 41520 - RNA, 20 nt, Artificial Sequence
  Synthetic
gauguauauuuccgagaaag

SEQ ID NO: 41521 - RNA, 21 nt, Artificial Sequence
  Synthetic
ggauguauauuuccgagaaag

SEQ ID NO: 41522 - RNA, 22 nt, Artificial Sequence
  Synthetic
aggauguauauuuccgagaaag

SEQ ID NO: 41523 - RNA, 23 nt, Artificial Sequence
  Synthetic
aaggauguauauuuccgagaaag

SEQ ID NO: 41524 - RNA, 24 nt, Artificial Sequence
  Synthetic
aaaggauguauauuuccgagaaag

SEQ ID NO: 41525 - RNA, 18 nt, Artificial Sequence
  Synthetic
uauaaguuggcgagaaag

SEQ ID NO: 41526 - RNA, 19 nt, Artificial Sequence
  Synthetic
uuauaaguuggcgagaaag

SEQ ID NO: 41527 - RNA, 20 nt, Artificial Sequence
  Synthetic
cuuauaaguuggcgagaaag

SEQ ID NO: 41528 - RNA, 21 nt, Artificial Sequence
  Synthetic
ccuuauaaguuggcgagaaag

SEQ ID NO: 41529 - RNA, 22 nt, Artificial Sequence
  Synthetic
gccuuauaaguuggcgagaaag

SEQ ID NO: 41530 - RNA, 23 nt, Artificial Sequence
  Synthetic
ggccuuauaaguuggcgagaaag

SEQ ID NO: 41531 - RNA, 24 nt, Artificial Sequence
  Synthetic
aggccuuauaaguuggcgagaaag

SEQ ID NO: 41532 - RNA, 18 nt, Artificial Sequence
  Synthetic
auagguauuuugcgaaag

SEQ ID NO: 41533 - RNA, 19 nt, Artificial Sequence
  Synthetic
cauagguauuuugcgaaag

SEQ ID NO: 41534 - RNA, 20 nt, Artificial Sequence
  Synthetic
ccauagguauuuugcgaaag

SEQ ID NO: 41535 - RNA, 21 nt, Artificial Sequence
  Synthetic
cccauagguauuuugcgaaag

SEQ ID NO: 41536 - RNA, 22 nt, Artificial Sequence
  Synthetic
ucccauagguauuuugcgaaag

SEQ ID NO: 41537 - RNA, 23 nt, Artificial Sequence
  Synthetic
cucccauagguauuuugcgaaag

SEQ ID NO: 41538 - RNA, 24 nt, Artificial Sequence
  Synthetic
acucccauagguauuuugcgaaag

SEQ ID NO: 41539 - RNA, 18 nt, Artificial Sequence
  Synthetic
  misc_feature (5)..(5): n is a, c, g, or u
caucnauauagcugaaag

SEQ ID NO: 41540 - RNA, 19 nt, Artificial Sequence
  Synthetic
  misc_feature (6)..(6): n is a, c, g, or u
ucaucnauauagcugaaag

SEQ ID NO: 41541 - RNA, 20 nt, Artificial Sequence
  Synthetic
  misc_feature (7)..(7): n is a, c, g, or u
aucaucnauauagcugaaag

SEQ ID NO: 41542 - RNA, 21 nt, Artificial Sequence
  Synthetic
  misc_feature (8)..(8): n is a, c, g, or u
caucaucnauauagcugaaag

SEQ ID NO: 41543 - RNA, 22 nt, Artificial Sequence
  Synthetic
  misc_feature (9)..(9): n is a, c, g, or u
acaucaucnauauagcugaaag

SEQ ID NO: 41544 - RNA, 23 nt, Artificial Sequence
  Synthetic
  misc_feature (10)..(10): n is a, c, g, or u
cacaucaucnauauagcugaaag

SEQ ID NO: 41545 - RNA, 24 nt, Artificial Sequence
  Synthetic
  misc_feature (11)..(11): n is a, c, g, or u
ccacaucaucnauauagcugaaag

SEQ ID NO: 41546 - RNA, 18 nt, Artificial Sequence
  Synthetic
aggauucuugucaacaag

SEQ ID NO: 41547 - RNA, 19 nt, Artificial Sequence
  Synthetic
gaggauucuugucaacaag

SEQ ID NO: 41548 - RNA, 20 nt, Artificial Sequence
  Synthetic
ugaggauucuugucaacaag

SEQ ID NO: 41549 - RNA, 21 nt, Artificial Sequence
  Synthetic
gugaggauucuugucaacaag

SEQ ID NO: 41550 - RNA, 22 nt, Artificial Sequence
  Synthetic
ugugaggauucuugucaacaag

SEQ ID NO: 41551 - RNA, 23 nt, Artificial Sequence
  Synthetic
uugugaggauucuugucaacaag

SEQ ID NO: 41552 - RNA, 24 nt, Artificial Sequence
  Synthetic
auugugaggauucuugucaacaag

SEQ ID NO: 41553 - RNA, 18 nt, Artificial Sequence
  Synthetic
agcgauagccaggacaag

SEQ ID NO: 41554 - RNA, 19 nt, Artificial Sequence
  Synthetic
cagcgauagccaggacaag

SEQ ID NO: 41555 - RNA, 20 nt, Artificial Sequence
  Synthetic
ccagcgauagccaggacaag

SEQ ID NO: 41556 - RNA, 21 nt, Artificial Sequence
  Synthetic
uccagcgauagccaggacaag

SEQ ID NO: 41557 - RNA, 22 nt, Artificial Sequence
  Synthetic
auccagcgauagccaggacaag

SEQ ID NO: 41558 - RNA, 23 nt, Artificial Sequence
  Synthetic
cauccagcgauagccaggacaag

SEQ ID NO: 41559 - RNA, 24 nt, Artificial Sequence
  Synthetic
acauccagcgauagccaggacaag

SEQ ID NO: 41560 - RNA, 18 nt, Artificial Sequence
  Synthetic
cuaguaaacugagccaag

SEQ ID NO: 41561 - RNA, 19 nt, Artificial Sequence
  Synthetic
acuaguaaacugagccaag

SEQ ID NO: 41562 - RNA, 20 nt, Artificial Sequence
  Synthetic
cacuaguaaacugagccaag

SEQ ID NO: 41563 - RNA, 21 nt, Artificial Sequence
  Synthetic
gcacuaguaaacugagccaag

SEQ ID NO: 41564 - RNA, 22 nt, Artificial Sequence
  Synthetic
ggcacuaguaaacugagccaag

SEQ ID NO: 41565 - RNA, 23 nt, Artificial Sequence
  Synthetic
uggcacuaguaaacugagccaag

SEQ ID NO: 41566 - RNA, 24 nt, Artificial Sequence
  Synthetic
auggcacuaguaaacugagccaag

SEQ ID NO: 41567 - RNA, 18 nt, Artificial Sequence
  Synthetic
agaagaaccaacaagaag

SEQ ID NO: 41568 - RNA, 19 nt, Artificial Sequence
  Synthetic
cagaagaaccaacaagaag

SEQ ID NO: 41569 - RNA, 20 nt, Artificial Sequence
  Synthetic
ccagaagaaccaacaagaag

SEQ ID NO: 41570 - RNA, 21 nt, Artificial Sequence
  Synthetic
uccagaagaaccaacaagaag

SEQ ID NO: 41571 - RNA, 22 nt, Artificial Sequence
  Synthetic
guccagaagaaccaacaagaag

SEQ ID NO: 41572 - RNA, 23 nt, Artificial Sequence
  Synthetic
aguccagaagaaccaacaagaag

SEQ ID NO: 41573 - RNA, 24 nt, Artificial Sequence
  Synthetic
uaguccagaagaaccaacaagaag

SEQ ID NO: 41574 - RNA, 18 nt, Artificial Sequence
  Synthetic
acgggaaaaagucagaag

SEQ ID NO: 41575 - RNA, 19 nt, Artificial Sequence
  Synthetic
gacgggaaaaagucagaag

SEQ ID NO: 41576 - RNA, 20 nt, Artificial Sequence
  Synthetic
agacgggaaaaagucagaag

SEQ ID NO: 41577 - RNA, 21 nt, Artificial Sequence
  Synthetic
cagacgggaaaaagucagaag

SEQ ID NO: 41578 - RNA, 22 nt, Artificial Sequence
  Synthetic
acagacgggaaaaagucagaag

SEQ ID NO: 41579 - RNA, 23 nt, Artificial Sequence
  Synthetic
aacagacgggaaaaagucagaag

SEQ ID NO: 41580 - RNA, 24 nt, Artificial Sequence
  Synthetic
gaacagacgggaaaaagucagaag

SEQ ID NO: 41581 - RNA, 18 nt, Artificial Sequence
  Synthetic
uccccaauccuggagaag

SEQ ID NO: 41582 - RNA, 19 nt, Artificial Sequence
  Synthetic
guccccaauccuggagaag

SEQ ID NO: 41583 - RNA, 20 nt, Artificial Sequence
  Synthetic
gguccccaauccuggagaag

SEQ ID NO: 41584 - RNA, 21 nt, Artificial Sequence
  Synthetic
ggguccccaauccuggagaag

SEQ ID NO: 41585 - RNA, 22 nt, Artificial Sequence
  Synthetic
aggguccccaauccuggagaag

SEQ ID NO: 41586 - RNA, 23 nt, Artificial Sequence
  Synthetic
caggguccccaauccuggagaag

SEQ ID NO: 41587 - RNA, 24 nt, Artificial Sequence
  Synthetic
gcaggguccccaauccuggagaag

SEQ ID NO: 41588 - RNA, 18 nt, Artificial Sequence
  Synthetic
aauacuaacauugggaag

SEQ ID NO: 41589 - RNA, 19 nt, Artificial Sequence
  Synthetic
gaauacuaacauugggaag

SEQ ID NO: 41590 - RNA, 20 nt, Artificial Sequence
  Synthetic
ggaauacuaacauugggaag

SEQ ID NO: 41591 - RNA, 21 nt, Artificial Sequence
  Synthetic
aggaauacuaacauugggaag

SEQ ID NO: 41592 - RNA, 22 nt, Artificial Sequence
  Synthetic
aaggaauacuaacauugggaag

SEQ ID NO: 41593 - RNA, 23 nt, Artificial Sequence
  Synthetic
caaggaauacuaacauugggaag

SEQ ID NO: 41594 - RNA, 24 nt, Artificial Sequence
  Synthetic
ccaaggaauacuaacauugggaag

SEQ ID NO: 41595 - RNA, 18 nt, Artificial Sequence
  Synthetic
cauuugguggucuauaag

SEQ ID NO: 41596 - RNA, 19 nt, Artificial Sequence
  Synthetic
gcauuugguggucuauaag

SEQ ID NO: 41597 - RNA, 20 nt, Artificial Sequence
  Synthetic
ggcauuugguggucuauaag

SEQ ID NO: 41598 - RNA, 21 nt, Artificial Sequence
  Synthetic
gggcauuugguggucuauaag

SEQ ID NO: 41599 - RNA, 22 nt, Artificial Sequence
  Synthetic
ggggcauuugguggucuauaag

SEQ ID NO: 41600 - RNA, 23 nt, Artificial Sequence
  Synthetic
aggggcauuugguggucuauaag

SEQ ID NO: 41601 - RNA, 24 nt, Artificial Sequence
  Synthetic
uaggggcauuugguggucuauaag

SEQ ID NO: 41602 - RNA, 18 nt, Artificial Sequence
  Synthetic
uaagggucaaugucuaag

SEQ ID NO: 41603 - RNA, 19 nt, Artificial Sequence
  Synthetic
auaagggucaaugucuaag

SEQ ID NO: 41604 - RNA, 20 nt, Artificial Sequence
  Synthetic
uauaagggucaaugucuaag

SEQ ID NO: 41605 - RNA, 21 nt, Artificial Sequence
  Synthetic
uuauaagggucaaugucuaag

SEQ ID NO: 41606 - RNA, 22 nt, Artificial Sequence
  Synthetic
uuuauaagggucaaugucuaag

SEQ ID NO: 41607 - RNA, 23 nt, Artificial Sequence
  Synthetic
cuuuauaagggucaaugucuaag

SEQ ID NO: 41608 - RNA, 24 nt, Artificial Sequence
  Synthetic
ucuuuauaagggucaaugucuaag

SEQ ID NO: 41609 - RNA, 18 nt, Artificial Sequence
  Synthetic
uucucucccaaaaguaag

SEQ ID NO: 41610 - RNA, 19 nt, Artificial Sequence
  Synthetic
uuucucucccaaaaguaag

SEQ ID NO: 41611 - RNA, 20 nt, Artificial Sequence
  Synthetic
guuucucucccaaaaguaag

SEQ ID NO: 41612 - RNA, 21 nt, Artificial Sequence
  Synthetic
gguuucucucccaaaaguaag

SEQ ID NO: 41613 - RNA, 22 nt, Artificial Sequence
  Synthetic
cgguuucucucccaaaaguaag

SEQ ID NO: 41614 - RNA, 23 nt, Artificial Sequence
  Synthetic
acgguuucucucccaaaaguaag

SEQ ID NO: 41615 - RNA, 24 nt, Artificial Sequence
  Synthetic
aacgguuucucucccaaaaguaag

SEQ ID NO: 41616 - RNA, 18 nt, Artificial Sequence
  Synthetic
gcauauaaaggcauuaag

SEQ ID NO: 41617 - RNA, 19 nt, Artificial Sequence
  Synthetic
ugcauauaaaggcauuaag

SEQ ID NO: 41618 - RNA, 20 nt, Artificial Sequence
  Synthetic
augcauauaaaggcauuaag

SEQ ID NO: 41619 - RNA, 21 nt, Artificial Sequence
  Synthetic
caugcauauaaaggcauuaag

SEQ ID NO: 41620 - RNA, 22 nt, Artificial Sequence
  Synthetic
acaugcauauaaaggcauuaag

SEQ ID NO: 41621 - RNA, 23 nt, Artificial Sequence
  Synthetic
uacaugcauauaaaggcauuaag

SEQ ID NO: 41622 - RNA, 24 nt, Artificial Sequence
  Synthetic
auacaugcauauaaaggcauuaag

SEQ ID NO: 41623 - RNA, 18 nt, Artificial Sequence
  Synthetic
uguugacauaacaaacag

SEQ ID NO: 41624 - RNA, 19 nt, Artificial Sequence
  Synthetic
uuguugacauaacaaacag

SEQ ID NO: 41625 - RNA, 20 nt, Artificial Sequence
  Synthetic
guuguugacauaacaaacag

SEQ ID NO: 41626 - RNA, 21 nt, Artificial Sequence
  Synthetic
gguuguugacauaacaaacag

SEQ ID NO: 41627 - RNA, 22 nt, Artificial Sequence
  Synthetic
cgguuguugacauaacaaacag

SEQ ID NO: 41628 - RNA, 23 nt, Artificial Sequence
  Synthetic
ccgguuguugacauaacaaacag

SEQ ID NO: 41629 - RNA, 24 nt, Artificial Sequence
  Synthetic
cccgguuguugacauaacaaacag

SEQ ID NO: 41630 - RNA, 18 nt, Artificial Sequence
  Synthetic
cgagaagaucacgaacag

SEQ ID NO: 41631 - RNA, 19 nt, Artificial Sequence
  Synthetic
ucgagaagaucacgaacag

SEQ ID NO: 41632 - RNA, 20 nt, Artificial Sequence
  Synthetic
gucgagaagaucacgaacag

SEQ ID NO: 41633 - RNA, 21 nt, Artificial Sequence
  Synthetic
ugucgagaagaucacgaacag

SEQ ID NO: 41634 - RNA, 22 nt, Artificial Sequence
  Synthetic
gugucgagaagaucacgaacag

SEQ ID NO: 41635 - RNA, 23 nt, Artificial Sequence
  Synthetic
ggugucgagaagaucacgaacag

SEQ ID NO: 41636 - RNA, 24 nt, Artificial Sequence
  Synthetic
cggugucgagaagaucacgaacag

SEQ ID NO: 41637 - RNA, 18 nt, Artificial Sequence
  Synthetic
gcagaugagaaggaacag

SEQ ID NO: 41638 - RNA, 19 nt, Artificial Sequence
  Synthetic
ggcagaugagaaggaacag

SEQ ID NO: 41639 - RNA, 20 nt, Artificial Sequence
  Synthetic
cggcagaugagaaggaacag

SEQ ID NO: 41640 - RNA, 21 nt, Artificial Sequence
  Synthetic
ccggcagaugagaaggaacag

SEQ ID NO: 41641 - RNA, 22 nt, Artificial Sequence
  Synthetic
uccggcagaugagaaggaacag

SEQ ID NO: 41642 - RNA, 23 nt, Artificial Sequence
  Synthetic
guccggcagaugagaaggaacag

SEQ ID NO: 41643 - RNA, 24 nt, Artificial Sequence
  Synthetic
gguccggcagaugagaaggaacag

SEQ ID NO: 41644 - RNA, 18 nt, Artificial Sequence
  Synthetic
gcuuggaggcuugaacag

SEQ ID NO: 41645 - RNA, 19 nt, Artificial Sequence
  Synthetic
agcuuggaggcuugaacag

SEQ ID NO: 41646 - RNA, 20 nt, Artificial Sequence
  Synthetic
cagcuuggaggcuugaacag

SEQ ID NO: 41647 - RNA, 21 nt, Artificial Sequence
  Synthetic
acagcuuggaggcuugaacag

SEQ ID NO: 41648 - RNA, 22 nt, Artificial Sequence
  Synthetic
cacagcuuggaggcuugaacag

SEQ ID NO: 41649 - RNA, 23 nt, Artificial Sequence
  Synthetic
gcacagcuuggaggcuugaacag

SEQ ID NO: 41650 - RNA, 24 nt, Artificial Sequence
  Synthetic
ggcacagcuuggaggcuugaacag

SEQ ID NO: 41651 - RNA, 18 nt, Artificial Sequence
  Synthetic
auccaguuggcagcacag

SEQ ID NO: 41652 - RNA, 19 nt, Artificial Sequence
  Synthetic
gauccaguuggcagcacag

SEQ ID NO: 41653 - RNA, 20 nt, Artificial Sequence
  Synthetic
ggauccaguuggcagcacag

SEQ ID NO: 41654 - RNA, 21 nt, Artificial Sequence
  Synthetic
aggauccaguuggcagcacag

SEQ ID NO: 41655 - RNA, 22 nt, Artificial Sequence
  Synthetic
aaggauccaguuggcagcacag

SEQ ID NO: 41656 - RNA, 23 nt, Artificial Sequence
  Synthetic
gaaggauccaguuggcagcacag

SEQ ID NO: 41657 - RNA, 24 nt, Artificial Sequence
  Synthetic
cgaaggauccaguuggcagcacag

SEQ ID NO: 41658 - RNA, 18 nt, Artificial Sequence
  Synthetic
aagccacccaaggcacag

SEQ ID NO: 41659 - RNA, 19 nt, Artificial Sequence
  Synthetic
aaagccacccaaggcacag

SEQ ID NO: 41660 - RNA, 20 nt, Artificial Sequence
  Synthetic
uaaagccacccaaggcacag

SEQ ID NO: 41661 - RNA, 21 nt, Artificial Sequence
  Synthetic
cuaaagccacccaaggcacag

SEQ ID NO: 41662 - RNA, 22 nt, Artificial Sequence
  Synthetic
ccuaaagccacccaaggcacag

SEQ ID NO: 41663 - RNA, 23 nt, Artificial Sequence
  Synthetic
cccuaaagccacccaaggcacag

SEQ ID NO: 41664 - RNA, 24 nt, Artificial Sequence
  Synthetic
gcccuaaagccacccaaggcacag

SEQ ID NO: 41665 - RNA, 18 nt, Artificial Sequence
  Synthetic
agcaaacacuuggcacag

SEQ ID NO: 41666 - RNA, 19 nt, Artificial Sequence
  Synthetic
cagcaaacacuuggcacag

SEQ ID NO: 41667 - RNA, 20 nt, Artificial Sequence
  Synthetic
ucagcaaacacuuggcacag

SEQ ID NO: 41668 - RNA, 21 nt, Artificial Sequence
  Synthetic
gucagcaaacacuuggcacag

SEQ ID NO: 41669 - RNA, 22 nt, Artificial Sequence
  Synthetic
cgucagcaaacacuuggcacag

SEQ ID NO: 41670 - RNA, 23 nt, Artificial Sequence
  Synthetic
gcgucagcaaacacuuggcacag

SEQ ID NO: 41671 - RNA, 24 nt, Artificial Sequence
  Synthetic
ugcgucagcaaacacuuggcacag

SEQ ID NO: 41672 - RNA, 18 nt, Artificial Sequence
  Synthetic
uagcugaaagccagacag

SEQ ID NO: 41673 - RNA, 19 nt, Artificial Sequence
  Synthetic
auagcugaaagccagacag

SEQ ID NO: 41674 - RNA, 20 nt, Artificial Sequence
  Synthetic
uauagcugaaagccagacag

SEQ ID NO: 41675 - RNA, 21 nt, Artificial Sequence
  Synthetic
auauagcugaaagccagacag

SEQ ID NO: 41676 - RNA, 22 nt, Artificial Sequence
  Synthetic
  misc_feature (1)..(1): n is a, c, g, or u
nauauagcugaaagccagacag

SEQ ID NO: 41677 - RNA, 23 nt, Artificial Sequence
  Synthetic
  misc_feature (2)..(2): n is a, c, g, or u
cnauauagcugaaagccagacag

SEQ ID NO: 41678 - RNA, 24 nt, Artificial Sequence
  Synthetic
  misc_feature (3)..(3): n is a, c, g, or u
ucnauauagcugaaagccagacag

SEQ ID NO: 41679 - RNA, 18 nt, Artificial Sequence
  Synthetic
uucauguauuguuuacag

SEQ ID NO: 41680 - RNA, 19 nt, Artificial Sequence
  Synthetic
guucauguauuguuuacag

SEQ ID NO: 41681 - RNA, 20 nt, Artificial Sequence
  Synthetic
gguucauguauuguuuacag

SEQ ID NO: 41682 - RNA, 21 nt, Artificial Sequence
  Synthetic
agguucauguauuguuuacag

SEQ ID NO: 41683 - RNA, 22 nt, Artificial Sequence
  Synthetic
aagguucauguauuguuuacag

SEQ ID NO: 41684 - RNA, 23 nt, Artificial Sequence
  Synthetic
aaagguucauguauuguuuacag

SEQ ID NO: 41685 - RNA, 24 nt, Artificial Sequence
  Synthetic
uaaagguucauguauuguuuacag

SEQ ID NO: 41686 - RNA, 18 nt, Artificial Sequence
  Synthetic
uggccaagccccaaccag

SEQ ID NO: 41687 - RNA, 19 nt, Artificial Sequence
  Synthetic
auggccaagccccaaccag

SEQ ID NO: 41688 - RNA, 20 nt, Artificial Sequence
  Synthetic
gauggccaagccccaaccag

SEQ ID NO: 41689 - RNA, 21 nt, Artificial Sequence
  Synthetic
cgauggccaagccccaaccag

SEQ ID NO: 41690 - RNA, 22 nt, Artificial Sequence
  Synthetic
ccgauggccaagccccaaccag

SEQ ID NO: 41691 - RNA, 23 nt, Artificial Sequence
  Synthetic
  misc_feature (1)..(1): n is a, c, g, or u
nccgauggccaagccccaaccag

SEQ ID NO: 41692 - RNA, 24 nt, Artificial Sequence
  Synthetic
  misc_feature (2)..(2): n is a, c, g, or u
gnccgauggccaagccccaaccag

SEQ ID NO: 41693 - RNA, 18 nt, Artificial Sequence
  Synthetic
cugaacuggagccaccag

SEQ ID NO: 41694 - RNA, 19 nt, Artificial Sequence
  Synthetic
ccugaacuggagccaccag

SEQ ID NO: 41695 - RNA, 20 nt, Artificial Sequence
  Synthetic
cccugaacuggagccaccag

SEQ ID NO: 41696 - RNA, 21 nt, Artificial Sequence
  Synthetic
ucccugaacuggagccaccag

SEQ ID NO: 41697 - RNA, 22 nt, Artificial Sequence
  Synthetic
aucccugaacuggagccaccag

SEQ ID NO: 41698 - RNA, 23 nt, Artificial Sequence
  Synthetic
uaucccugaacuggagccaccag

SEQ ID NO: 41699 - RNA, 24 nt, Artificial Sequence
  Synthetic
cuaucccugaacuggagccaccag

SEQ ID NO: 41700 - RNA, 18 nt, Artificial Sequence
  Synthetic
gucaucaacucaccccag

SEQ ID NO: 41701 - RNA, 19 nt, Artificial Sequence
  Synthetic
agucaucaacucaccccag

SEQ ID NO: 41702 - RNA, 20 nt, Artificial Sequence
  Synthetic
gagucaucaacucaccccag

SEQ ID NO: 41703 - RNA, 21 nt, Artificial Sequence
  Synthetic
agagucaucaacucaccccag

SEQ ID NO: 41704 - RNA, 22 nt, Artificial Sequence
  Synthetic
uagagucaucaacucaccccag

SEQ ID NO: 41705 - RNA, 23 nt, Artificial Sequence
  Synthetic
cuagagucaucaacucaccccag

SEQ ID NO: 41706 - RNA, 24 nt, Artificial Sequence
  Synthetic
gcuagagucaucaacucaccccag

SEQ ID NO: 41707 - RNA, 18 nt, Artificial Sequence
  Synthetic
acauccagcgauagccag

SEQ ID NO: 41708 - RNA, 19 nt, Artificial Sequence
  Synthetic
cacauccagcgauagccag

SEQ ID NO: 41709 - RNA, 20 nt, Artificial Sequence
  Synthetic
acacauccagcgauagccag

SEQ ID NO: 41710 - RNA, 21 nt, Artificial Sequence
  Synthetic
gacacauccagcgauagccag

SEQ ID NO: 41711 - RNA, 22 nt, Artificial Sequence
  Synthetic
agacacauccagcgauagccag

SEQ ID NO: 41712 - RNA, 23 nt, Artificial Sequence
  Synthetic
cagacacauccagcgauagccag

SEQ ID NO: 41713 - RNA, 24 nt, Artificial Sequence
  Synthetic
gcagacacauccagcgauagccag

SEQ ID NO: 41714 - RNA, 18 nt, Artificial Sequence
  Synthetic
caaugaguuuugcuccag

SEQ ID NO: 41715 - RNA, 19 nt, Artificial Sequence
  Synthetic
ccaaugaguuuugcuccag

SEQ ID NO: 41716 - RNA, 20 nt, Artificial Sequence
  Synthetic
cccaaugaguuuugcuccag

SEQ ID NO: 41717 - RNA, 21 nt, Artificial Sequence
  Synthetic
ucccaaugaguuuugcuccag

SEQ ID NO: 41718 - RNA, 22 nt, Artificial Sequence
  Synthetic
gucccaaugaguuuugcuccag

SEQ ID NO: 41719 - RNA, 23 nt, Artificial Sequence
  Synthetic
agucccaaugaguuuugcuccag

SEQ ID NO: 41720 - RNA, 24 nt, Artificial Sequence
  Synthetic
cagucccaaugaguuuugcuccag

SEQ ID NO: 41721 - RNA, 18 nt, Artificial Sequence
  Synthetic
cauaccuugauaguccag

SEQ ID NO: 41722 - RNA, 19 nt, Artificial Sequence
  Synthetic
acauaccuugauaguccag

SEQ ID NO: 41723 - RNA, 20 nt, Artificial Sequence
  Synthetic
aacauaccuugauaguccag

SEQ ID NO: 41724 - RNA, 21 nt, Artificial Sequence
  Synthetic
caacauaccuugauaguccag

SEQ ID NO: 41725 - RNA, 22 nt, Artificial Sequence
  Synthetic
gcaacauaccuugauaguccag

SEQ ID NO: 41726 - RNA, 23 nt, Artificial Sequence
  Synthetic
ggcaacauaccuugauaguccag

SEQ ID NO: 41727 - RNA, 24 nt, Artificial Sequence
  Synthetic
gggcaacauaccuugauaguccag

SEQ ID NO: 41728 - RNA, 18 nt, Artificial Sequence
  Synthetic
ugcgagcaaaacaagcag

SEQ ID NO: 41729 - RNA, 19 nt, Artificial Sequence
  Synthetic
cugcgagcaaaacaagcag

SEQ ID NO: 41730 - RNA, 20 nt, Artificial Sequence
  Synthetic
gcugcgagcaaaacaagcag

SEQ ID NO: 41731 - RNA, 21 nt, Artificial Sequence
  Synthetic
ggcugcgagcaaaacaagcag

SEQ ID NO: 41732 - RNA, 22 nt, Artificial Sequence
  Synthetic
cggcugcgagcaaaacaagcag

SEQ ID NO: 41733 - RNA, 23 nt, Artificial Sequence
  Synthetic
ccggcugcgagcaaaacaagcag

SEQ ID NO: 41734 - RNA, 24 nt, Artificial Sequence
  Synthetic
accggcugcgagcaaaacaagcag

SEQ ID NO: 41735 - RNA, 18 nt, Artificial Sequence
  Synthetic
uugguggucuauaagcag

SEQ ID NO: 41736 - RNA, 19 nt, Artificial Sequence
  Synthetic
uuugguggucuauaagcag

SEQ ID NO: 41737 - RNA, 20 nt, Artificial Sequence
  Synthetic
auuugguggucuauaagcag

SEQ ID NO: 41738 - RNA, 21 nt, Artificial Sequence
  Synthetic
cauuugguggucuauaagcag

SEQ ID NO: 41739 - RNA, 22 nt, Artificial Sequence
  Synthetic
gcauuugguggucuauaagcag

SEQ ID NO: 41740 - RNA, 23 nt, Artificial Sequence
  Synthetic
ggcauuugguggucuauaagcag

SEQ ID NO: 41741 - RNA, 24 nt, Artificial Sequence
  Synthetic
gggcauuugguggucuauaagcag

SEQ ID NO: 41742 - RNA, 18 nt, Artificial Sequence
  Synthetic
gaugaggcauagcagcag

SEQ ID NO: 41743 - RNA, 19 nt, Artificial Sequence
  Synthetic
agaugaggcauagcagcag

SEQ ID NO: 41744 - RNA, 20 nt, Artificial Sequence
  Synthetic
aagaugaggcauagcagcag

SEQ ID NO: 41745 - RNA, 21 nt, Artificial Sequence
  Synthetic
gaagaugaggcauagcagcag

SEQ ID NO: 41746 - RNA, 22 nt, Artificial Sequence
  Synthetic
agaagaugaggcauagcagcag

SEQ ID NO: 41747 - RNA, 23 nt, Artificial Sequence
  Synthetic
aagaagaugaggcauagcagcag

SEQ ID NO: 41748 - RNA, 24 nt, Artificial Sequence
  Synthetic
caagaagaugaggcauagcagcag

SEQ ID NO: 41749 - RNA, 18 nt, Artificial Sequence
  Synthetic
auuggguaaaaggagcag

SEQ ID NO: 41750 - RNA, 19 nt, Artificial Sequence
  Synthetic
cauuggguaaaaggagcag

SEQ ID NO: 41751 - RNA, 20 nt, Artificial Sequence
  Synthetic
acauuggguaaaaggagcag

SEQ ID NO: 41752 - RNA, 21 nt, Artificial Sequence
  Synthetic
cacauuggguaaaaggagcag

SEQ ID NO: 41753 - RNA, 22 nt, Artificial Sequence
  Synthetic
ccacauuggguaaaaggagcag

SEQ ID NO: 41754 - RNA, 23 nt, Artificial Sequence
  Synthetic
accacauuggguaaaaggagcag

SEQ ID NO: 41755 - RNA, 24 nt, Artificial Sequence
  Synthetic
aaccacauuggguaaaaggagcag

SEQ ID NO: 41756 - RNA, 18 nt, Artificial Sequence
  Synthetic
cagcuaggaguuccgcag

SEQ ID NO: 41757 - RNA, 19 nt, Artificial Sequence
  Synthetic
gcagcuaggaguuccgcag

SEQ ID NO: 41758 - RNA, 20 nt, Artificial Sequence
  Synthetic
agcagcuaggaguuccgcag

SEQ ID NO: 41759 - RNA, 21 nt, Artificial Sequence
  Synthetic
aagcagcuaggaguuccgcag

SEQ ID NO: 41760 - RNA, 22 nt, Artificial Sequence
  Synthetic
caagcagcuaggaguuccgcag

SEQ ID NO: 41761 - RNA, 23 nt, Artificial Sequence
  Synthetic
acaagcagcuaggaguuccgcag

SEQ ID NO: 41762 - RNA, 24 nt, Artificial Sequence
  Synthetic
aacaagcagcuaggaguuccgcag

SEQ ID NO: 41763 - RNA, 18 nt, Artificial Sequence
  Synthetic
auaaaggcauuaaggcag

SEQ ID NO: 41764 - RNA, 19 nt, Artificial Sequence
  Synthetic
uauaaaggcauuaaggcag

SEQ ID NO: 41765 - RNA, 20 nt, Artificial Sequence
  Synthetic
auauaaaggcauuaaggcag

SEQ ID NO: 41766 - RNA, 21 nt, Artificial Sequence
  Synthetic
cauauaaaggcauuaaggcag

SEQ ID NO: 41767 - RNA, 22 nt, Artificial Sequence
  Synthetic
gcauauaaaggcauuaaggcag

SEQ ID NO: 41768 - RNA, 23 nt, Artificial Sequence
  Synthetic
ugcauauaaaggcauuaaggcag

SEQ ID NO: 41769 - RNA, 24 nt, Artificial Sequence
  Synthetic
augcauauaaaggcauuaaggcag

SEQ ID NO: 41770 - RNA, 18 nt, Artificial Sequence
  Synthetic
ggucggcaggaacggcag

SEQ ID NO: 41771 - RNA, 19 nt, Artificial Sequence
  Synthetic
uggucggcaggaacggcag

SEQ ID NO: 41772 - RNA, 20 nt, Artificial Sequence
  Synthetic
guggucggcaggaacggcag

SEQ ID NO: 41773 - RNA, 21 nt, Artificial Sequence
  Synthetic
cguggucggcaggaacggcag

SEQ ID NO: 41774 - RNA, 22 nt, Artificial Sequence
  Synthetic
ccguggucggcaggaacggcag

SEQ ID NO: 41775 - RNA, 23 nt, Artificial Sequence
  Synthetic
cccguggucggcaggaacggcag

SEQ ID NO: 41776 - RNA, 24 nt, Artificial Sequence
  Synthetic
ccccguggucggcaggaacggcag

SEQ ID NO: 41777 - RNA, 18 nt, Artificial Sequence
  Synthetic
gugcacacgguccggcag

SEQ ID NO: 41778 - RNA, 19 nt, Artificial Sequence
  Synthetic
agugcacacgguccggcag

SEQ ID NO: 41779 - RNA, 20 nt, Artificial Sequence
  Synthetic
aagugcacacgguccggcag

SEQ ID NO: 41780 - RNA, 18 nt, Artificial Sequence
  Synthetic
cgcaguauggaucggcag

SEQ ID NO: 41781 - RNA, 19 nt, Artificial Sequence
  Synthetic
ccgcaguauggaucggcag

SEQ ID NO: 41782 - RNA, 20 nt, Artificial Sequence
  Synthetic
uccgcaguauggaucggcag

SEQ ID NO: 41783 - RNA, 21 nt, Artificial Sequence
  Synthetic
uuccgcaguauggaucggcag

SEQ ID NO: 41784 - RNA, 22 nt, Artificial Sequence
  Synthetic
guuccgcaguauggaucggcag

SEQ ID NO: 41785 - RNA, 23 nt, Artificial Sequence
  Synthetic
aguuccgcaguauggaucggcag

SEQ ID NO: 41786 - RNA, 24 nt, Artificial Sequence
  Synthetic
gaguuccgcaguauggaucggcag

SEQ ID NO: 41787 - RNA, 18 nt, Artificial Sequence
  Synthetic
gaaggauccaguuggcag

SEQ ID NO: 41788 - RNA, 19 nt, Artificial Sequence
  Synthetic
cgaaggauccaguuggcag

SEQ ID NO: 41789 - RNA, 20 nt, Artificial Sequence
  Synthetic
gcgaaggauccaguuggcag

SEQ ID NO: 41790 - RNA, 21 nt, Artificial Sequence
  Synthetic
cgcgaaggauccaguuggcag

SEQ ID NO: 41791 - RNA, 22 nt, Artificial Sequence
  Synthetic
ccgcgaaggauccaguuggcag

SEQ ID NO: 41792 - RNA, 23 nt, Artificial Sequence
  Synthetic
cccgcgaaggauccaguuggcag

SEQ ID NO: 41793 - RNA, 24 nt, Artificial Sequence
  Synthetic
ucccgcgaaggauccaguuggcag

SEQ ID NO: 41794 - RNA, 18 nt, Artificial Sequence
  Synthetic
cuaauucuucccacucag

SEQ ID NO: 41795 - RNA, 19 nt, Artificial Sequence
  Synthetic
ccuaauucuucccacucag

SEQ ID NO: 41796 - RNA, 20 nt, Artificial Sequence
  Synthetic
gccuaauucuucccacucag

SEQ ID NO: 41797 - RNA, 21 nt, Artificial Sequence
  Synthetic
ugccuaauucuucccacucag

SEQ ID NO: 41798 - RNA, 22 nt, Artificial Sequence
  Synthetic
uugccuaauucuucccacucag

SEQ ID NO: 41799 - RNA, 23 nt, Artificial Sequence
  Synthetic
auugccuaauucuucccacucag

SEQ ID NO: 41800 - RNA, 24 nt, Artificial Sequence
  Synthetic
cauugccuaauucuucccacucag

SEQ ID NO: 41801 - RNA, 18 nt, Artificial Sequence
  Synthetic
cauguauuguuuacagag

SEQ ID NO: 41802 - RNA, 19 nt, Artificial Sequence
  Synthetic
ucauguauuguuuacagag

SEQ ID NO: 41803 - RNA, 20 nt, Artificial Sequence
  Synthetic
uucauguauuguuuacagag

SEQ ID NO: 41804 - RNA, 21 nt, Artificial Sequence
  Synthetic
guucauguauuguuuacagag

SEQ ID NO: 41805 - RNA, 22 nt, Artificial Sequence
  Synthetic
gguucauguauuguuuacagag

SEQ ID NO: 41806 - RNA, 23 nt, Artificial Sequence
  Synthetic
agguucauguauuguuuacagag

SEQ ID NO: 41807 - RNA, 24 nt, Artificial Sequence
  Synthetic
aagguucauguauuguuuacagag

SEQ ID NO: 41808 - RNA, 18 nt, Artificial Sequence
  Synthetic
agagaugauuaggcagag

SEQ ID NO: 41809 - RNA, 19 nt, Artificial Sequence
  Synthetic
aagagaugauuaggcagag

SEQ ID NO: 41810 - RNA, 20 nt, Artificial Sequence
  Synthetic
caagagaugauuaggcagag

SEQ ID NO: 41811 - RNA, 21 nt, Artificial Sequence
  Synthetic
acaagagaugauuaggcagag

SEQ ID NO: 41812 - RNA, 22 nt, Artificial Sequence
  Synthetic
aacaagagaugauuaggcagag

SEQ ID NO: 41813 - RNA, 23 nt, Artificial Sequence
  Synthetic
gaacaagagaugauuaggcagag

SEQ ID NO: 41814 - RNA, 24 nt, Artificial Sequence
  Synthetic
ugaacaagagaugauuaggcagag

SEQ ID NO: 41815 - RNA, 18 nt, Artificial Sequence
  Synthetic
uccauguaacgugcagag

SEQ ID NO: 41816 - RNA, 19 nt, Artificial Sequence
  Synthetic
uuccauguaacgugcagag

SEQ ID NO: 41817 - RNA, 20 nt, Artificial Sequence
  Synthetic
uuuccauguaacgugcagag

SEQ ID NO: 41818 - RNA, 21 nt, Artificial Sequence
  Synthetic
guuuccauguaacgugcagag

SEQ ID NO: 41819 - RNA, 22 nt, Artificial Sequence
  Synthetic
gguuuccauguaacgugcagag

SEQ ID NO: 41820 - RNA, 23 nt, Artificial Sequence
  Synthetic
cgguuuccauguaacgugcagag

SEQ ID NO: 41821 - RNA, 24 nt, Artificial Sequence
  Synthetic
gcgguuuccauguaacgugcagag

SEQ ID NO: 41822 - RNA, 18 nt, Artificial Sequence
  Synthetic
aggauccuggaaucagag

SEQ ID NO: 41823 - RNA, 19 nt, Artificial Sequence
  Synthetic
gaggauccuggaaucagag

SEQ ID NO: 41824 - RNA, 20 nt, Artificial Sequence
  Synthetic
cgaggauccuggaaucagag

SEQ ID NO: 41825 - RNA, 21 nt, Artificial Sequence
  Synthetic
ucgaggauccuggaaucagag

SEQ ID NO: 41826 - RNA, 22 nt, Artificial Sequence
  Synthetic
gucgaggauccuggaaucagag

SEQ ID NO: 41827 - RNA, 23 nt, Artificial Sequence
  Synthetic
ggucgaggauccuggaaucagag

SEQ ID NO: 41828 - RNA, 24 nt, Artificial Sequence
  Synthetic
uggucgaggauccuggaaucagag

SEQ ID NO: 41829 - RNA, 18 nt, Artificial Sequence
  Synthetic
ucucuuagugguggagag

SEQ ID NO: 41830 - RNA, 19 nt, Artificial Sequence
  Synthetic
gucucuuagugguggagag

SEQ ID NO: 41831 - RNA, 20 nt, Artificial Sequence
  Synthetic
ugucucuuagugguggagag

SEQ ID NO: 41832 - RNA, 21 nt, Artificial Sequence
  Synthetic
cugucucuuagugguggagag

SEQ ID NO: 41833 - RNA, 22 nt, Artificial Sequence
  Synthetic
acugucucuuagugguggagag

SEQ ID NO: 41834 - RNA, 23 nt, Artificial Sequence
  Synthetic
gacugucucuuagugguggagag

SEQ ID NO: 41835 - RNA, 24 nt, Artificial Sequence
  Synthetic
ugacugucucuuagugguggagag

SEQ ID NO: 41836 - RNA, 18 nt, Artificial Sequence
  Synthetic
gguaaauauuuaguagag

SEQ ID NO: 41837 - RNA, 19 nt, Artificial Sequence
  Synthetic
ugguaaauauuuaguagag

SEQ ID NO: 41838 - RNA, 20 nt, Artificial Sequence
  Synthetic
augguaaauauuuaguagag

SEQ ID NO: 41839 - RNA, 21 nt, Artificial Sequence
  Synthetic
aaugguaaauauuuaguagag

SEQ ID NO: 41840 - RNA, 22 nt, Artificial Sequence
  Synthetic
uaaugguaaauauuuaguagag

SEQ ID NO: 41841 - RNA, 23 nt, Artificial Sequence
  Synthetic
cuaaugguaaauauuuaguagag

SEQ ID NO: 41842 - RNA, 24 nt, Artificial Sequence
  Synthetic
ucuaaugguaaauauuuaguagag

SEQ ID NO: 41843 - RNA, 18 nt, Artificial Sequence
  Synthetic
ucagaaggcaaaaacgag

SEQ ID NO: 41844 - RNA, 19 nt, Artificial Sequence
  Synthetic
gucagaaggcaaaaacgag

SEQ ID NO: 41845 - RNA, 20 nt, Artificial Sequence
  Synthetic
agucagaaggcaaaaacgag

SEQ ID NO: 41846 - RNA, 21 nt, Artificial Sequence
  Synthetic
aagucagaaggcaaaaacgag

SEQ ID NO: 41847 - RNA, 22 nt, Artificial Sequence
  Synthetic
aaagucagaaggcaaaaacgag

SEQ ID NO: 41848 - RNA, 23 nt, Artificial Sequence
  Synthetic
aaaagucagaaggcaaaaacgag

SEQ ID NO: 41849 - RNA, 24 nt, Artificial Sequence
  Synthetic
aaaaagucagaaggcaaaaacgag

SEQ ID NO: 41850 - RNA, 18 nt, Artificial Sequence
  Synthetic
ccccgccuguaacacgag

SEQ ID NO: 41851 - RNA, 19 nt, Artificial Sequence
  Synthetic
accccgccuguaacacgag

SEQ ID NO: 41852 - RNA, 20 nt, Artificial Sequence
  Synthetic
aaccccgccuguaacacgag

SEQ ID NO: 41853 - RNA, 18 nt, Artificial Sequence
  Synthetic
agagaaguccaccacgag

SEQ ID NO: 41854 - RNA, 19 nt, Artificial Sequence
  Synthetic
gagagaaguccaccacgag

SEQ ID NO: 41855 - RNA, 20 nt, Artificial Sequence
  Synthetic
ugagagaaguccaccacgag

SEQ ID NO: 41856 - RNA, 21 nt, Artificial Sequence
  Synthetic
uugagagaaguccaccacgag

SEQ ID NO: 41857 - RNA, 22 nt, Artificial Sequence
  Synthetic
auugagagaaguccaccacgag

SEQ ID NO: 41858 - RNA, 23 nt, Artificial Sequence
  Synthetic
aauugagagaaguccaccacgag

SEQ ID NO: 41859 - RNA, 24 nt, Artificial Sequence
  Synthetic
aaauugagagaaguccaccacgag

SEQ ID NO: 41860 - RNA, 18 nt, Artificial Sequence
  Synthetic
aggauguauauuuccgag

SEQ ID NO: 41861 - RNA, 19 nt, Artificial Sequence
  Synthetic
aaggauguauauuuccgag

SEQ ID NO: 41862 - RNA, 20 nt, Artificial Sequence
  Synthetic
aaaggauguauauuuccgag

SEQ ID NO: 41863 - RNA, 21 nt, Artificial Sequence
  Synthetic
gaaaggauguauauuuccgag

SEQ ID NO: 41864 - RNA, 22 nt, Artificial Sequence
  Synthetic
ggaaaggauguauauuuccgag

SEQ ID NO: 41865 - RNA, 23 nt, Artificial Sequence
  Synthetic
uggaaaggauguauauuuccgag

SEQ ID NO: 41866 - RNA, 24 nt, Artificial Sequence
  Synthetic
auggaaaggauguauauuuccgag

SEQ ID NO: 41867 - RNA, 18 nt, Artificial Sequence
  Synthetic
cuccagaccggcugcgag

SEQ ID NO: 41868 - RNA, 19 nt, Artificial Sequence
  Synthetic
gcuccagaccggcugcgag

SEQ ID NO: 41869 - RNA, 20 nt, Artificial Sequence
  Synthetic
ugcuccagaccggcugcgag

SEQ ID NO: 41870 - RNA, 21 nt, Artificial Sequence
  Synthetic
uugcuccagaccggcugcgag

SEQ ID NO: 41871 - RNA, 22 nt, Artificial Sequence
  Synthetic
uuugcuccagaccggcugcgag

SEQ ID NO: 41872 - RNA, 23 nt, Artificial Sequence
  Synthetic
uuuugcuccagaccggcugcgag

SEQ ID NO: 41873 - RNA, 24 nt, Artificial Sequence
  Synthetic
guuuugcuccagaccggcugcgag

SEQ ID NO: 41874 - RNA, 18 nt, Artificial Sequence
  Synthetic
gagaucuucgucugcgag

SEQ ID NO: 41875 - RNA, 19 nt, Artificial Sequence
  Synthetic
ugagaucuucgucugcgag

SEQ ID NO: 41876 - RNA, 20 nt, Artificial Sequence
  Synthetic
uugagaucuucgucugcgag

SEQ ID NO: 41877 - RNA, 18 nt, Artificial Sequence
  Synthetic
guucuuuccccacucgag

SEQ ID NO: 41878 - RNA, 19 nt, Artificial Sequence
  Synthetic
gguucuuuccccacucgag

SEQ ID NO: 41879 - RNA, 20 nt, Artificial Sequence
  Synthetic
agguucuuuccccacucgag

SEQ ID NO: 41880 - RNA, 21 nt, Artificial Sequence
  Synthetic
aagguucuuuccccacucgag

SEQ ID NO: 41881 - RNA, 22 nt, Artificial Sequence
  Synthetic
aaagguucuuuccccacucgag

SEQ ID NO: 41882 - RNA, 23 nt, Artificial Sequence
  Synthetic
gaaagguucuuuccccacucgag

SEQ ID NO: 41883 - RNA, 24 nt, Artificial Sequence
  Synthetic
ggaaagguucuuuccccacucgag

SEQ ID NO: 41884 - RNA, 18 nt, Artificial Sequence
  Synthetic
gucuauaagcaggaggag

SEQ ID NO: 41885 - RNA, 19 nt, Artificial Sequence
  Synthetic
ggucuauaagcaggaggag

SEQ ID NO: 41886 - RNA, 20 nt, Artificial Sequence
  Synthetic
uggucuauaagcaggaggag

SEQ ID NO: 41887 - RNA, 21 nt, Artificial Sequence
  Synthetic
guggucuauaagcaggaggag

SEQ ID NO: 41888 - RNA, 22 nt, Artificial Sequence
  Synthetic
gguggucuauaagcaggaggag

SEQ ID NO: 41889 - RNA, 23 nt, Artificial Sequence
  Synthetic
ugguggucuauaagcaggaggag

SEQ ID NO: 41890 - RNA, 24 nt, Artificial Sequence
  Synthetic
uugguggucuauaagcaggaggag

SEQ ID NO: 41891 - RNA, 18 nt, Artificial Sequence
  Synthetic
caggaacggcagacggag

SEQ ID NO: 41892 - RNA, 19 nt, Artificial Sequence
  Synthetic
gcaggaacggcagacggag

SEQ ID NO: 41893 - RNA, 20 nt, Artificial Sequence
  Synthetic
ggcaggaacggcagacggag

SEQ ID NO: 41894 - RNA, 21 nt, Artificial Sequence
  Synthetic
cggcaggaacggcagacggag

SEQ ID NO: 41895 - RNA, 22 nt, Artificial Sequence
  Synthetic
ucggcaggaacggcagacggag

SEQ ID NO: 41896 - RNA, 23 nt, Artificial Sequence
  Synthetic
gucggcaggaacggcagacggag

SEQ ID NO: 41897 - RNA, 24 nt, Artificial Sequence
  Synthetic
ggucggcaggaacggcagacggag

SEQ ID NO: 41898 - RNA, 18 nt, Artificial Sequence
  Synthetic
gacugacgauugguggag

SEQ ID NO: 41899 - RNA, 19 nt, Artificial Sequence
  Synthetic
ugacugacgauugguggag

SEQ ID NO: 41900 - RNA, 20 nt, Artificial Sequence
  Synthetic
cugacugacgauugguggag

SEQ ID NO: 41901 - RNA, 21 nt, Artificial Sequence
  Synthetic
ccugacugacgauugguggag

SEQ ID NO: 41902 - RNA, 22 nt, Artificial Sequence
  Synthetic
cccugacugacgauugguggag

SEQ ID NO: 41903 - RNA, 23 nt, Artificial Sequence
  Synthetic
ucccugacugacgauugguggag

SEQ ID NO: 41904 - RNA, 24 nt, Artificial Sequence
  Synthetic
cucccugacugacgauugguggag

SEQ ID NO: 41905 - RNA, 18 nt, Artificial Sequence
  Synthetic
auuggugagugauuggag

SEQ ID NO: 41906 - RNA, 19 nt, Artificial Sequence
  Synthetic
gauuggugagugauuggag

SEQ ID NO: 41907 - RNA, 20 nt, Artificial Sequence
  Synthetic
agauuggugagugauuggag

SEQ ID NO: 41908 - RNA, 21 nt, Artificial Sequence
  Synthetic
gagauuggugagugauuggag

SEQ ID NO: 41909 - RNA, 22 nt, Artificial Sequence
  Synthetic
ggagauuggugagugauuggag

SEQ ID NO: 41910 - RNA, 23 nt, Artificial Sequence
  Synthetic
aggagauuggugagugauuggag

SEQ ID NO: 41911 - RNA, 24 nt, Artificial Sequence
  Synthetic
caggagauuggugagugauuggag

SEQ ID NO: 41912 - RNA, 18 nt, Artificial Sequence
  Synthetic
agccaggacaaguuggag

SEQ ID NO: 41913 - RNA, 19 nt, Artificial Sequence
  Synthetic
uagccaggacaaguuggag

SEQ ID NO: 41914 - RNA, 20 nt, Artificial Sequence
  Synthetic
auagccaggacaaguuggag

SEQ ID NO: 41915 - RNA, 21 nt, Artificial Sequence
  Synthetic
gauagccaggacaaguuggag

SEQ ID NO: 41916 - RNA, 22 nt, Artificial Sequence
  Synthetic
cgauagccaggacaaguuggag

SEQ ID NO: 41917 - RNA, 23 nt, Artificial Sequence
  Synthetic
gcgauagccaggacaaguuggag

SEQ ID NO: 41918 - RNA, 24 nt, Artificial Sequence
  Synthetic
agcgauagccaggacaaguuggag

SEQ ID NO: 41919 - RNA, 18 nt, Artificial Sequence
  Synthetic
cacgguccggcagaugag

SEQ ID NO: 41920 - RNA, 19 nt, Artificial Sequence
  Synthetic
acacgguccggcagaugag

SEQ ID NO: 41921 - RNA, 20 nt, Artificial Sequence
  Synthetic
cacacgguccggcagaugag

SEQ ID NO: 41922 - RNA, 21 nt, Artificial Sequence
  Synthetic
gcacacgguccggcagaugag

SEQ ID NO: 41923 - RNA, 22 nt, Artificial Sequence
  Synthetic
ugcacacgguccggcagaugag

SEQ ID NO: 41924 - RNA, 23 nt, Artificial Sequence
  Synthetic
gugcacacgguccggcagaugag

SEQ ID NO: 41925 - RNA, 24 nt, Artificial Sequence
  Synthetic
agugcacacgguccggcagaugag

SEQ ID NO: 41926 - RNA, 18 nt, Artificial Sequence
  Synthetic
uggcacuaguaaacugag

SEQ ID NO: 41927 - RNA, 19 nt, Artificial Sequence
  Synthetic
auggcacuaguaaacugag

SEQ ID NO: 41928 - RNA, 20 nt, Artificial Sequence
  Synthetic
aauggcacuaguaaacugag

SEQ ID NO: 41929 - RNA, 21 nt, Artificial Sequence
  Synthetic
aaauggcacuaguaaacugag

SEQ ID NO: 41930 - RNA, 22 nt, Artificial Sequence
  Synthetic
caaauggcacuaguaaacugag

SEQ ID NO: 41931 - RNA, 23 nt, Artificial Sequence
  Synthetic
acaaauggcacuaguaaacugag

SEQ ID NO: 41932 - RNA, 24 nt, Artificial Sequence
  Synthetic
aacaaauggcacuaguaaacugag

SEQ ID NO: 41933 - RNA, 18 nt, Artificial Sequence
  Synthetic
uuguuagugugcccugag

SEQ ID NO: 41934 - RNA, 19 nt, Artificial Sequence
  Synthetic
guuguuagugugcccugag

SEQ ID NO: 41935 - RNA, 20 nt, Artificial Sequence
  Synthetic
aguuguuagugugcccugag

SEQ ID NO: 41936 - RNA, 21 nt, Artificial Sequence
  Synthetic
aaguuguuagugugcccugag

SEQ ID NO: 41937 - RNA, 22 nt, Artificial Sequence
  Synthetic
aaaguuguuagugugcccugag

SEQ ID NO: 41938 - RNA, 23 nt, Artificial Sequence
  Synthetic
caaaguuguuagugugcccugag

SEQ ID NO: 41939 - RNA, 24 nt, Artificial Sequence
  Synthetic
gcaaaguuguuagugugcccugag

SEQ ID NO: 41940 - RNA, 18 nt, Artificial Sequence
  Synthetic
ugagugcuguauggugag

SEQ ID NO: 41941 - RNA, 19 nt, Artificial Sequence
  Synthetic
cugagugcuguauggugag

SEQ ID NO: 41942 - RNA, 20 nt, Artificial Sequence
  Synthetic
ccugagugcuguauggugag

SEQ ID NO: 41943 - RNA, 21 nt, Artificial Sequence
  Synthetic
gccugagugcuguauggugag

SEQ ID NO: 41944 - RNA, 22 nt, Artificial Sequence
  Synthetic
ugccugagugcuguauggugag

SEQ ID NO: 41945 - RNA, 23 nt, Artificial Sequence
  Synthetic
uugccugagugcuguauggugag

SEQ ID NO: 41946 - RNA, 24 nt, Artificial Sequence
  Synthetic
cuugccugagugcuguauggugag

SEQ ID NO: 41947 - RNA, 18 nt, Artificial Sequence
  Synthetic
aguuucccaccuugugag

SEQ ID NO: 41948 - RNA, 19 nt, Artificial Sequence
  Synthetic
aaguuucccaccuugugag

SEQ ID NO: 41949 - RNA, 20 nt, Artificial Sequence
  Synthetic
aaaguuucccaccuugugag

SEQ ID NO: 41950 - RNA, 21 nt, Artificial Sequence
  Synthetic
uaaaguuucccaccuugugag

SEQ ID NO: 41951 - RNA, 22 nt, Artificial Sequence
  Synthetic
guaaaguuucccaccuugugag

SEQ ID NO: 41952 - RNA, 23 nt, Artificial Sequence
  Synthetic
cguaaaguuucccaccuugugag

SEQ ID NO: 41953 - RNA, 24 nt, Artificial Sequence
  Synthetic
ccguaaaguuucccaccuugugag

SEQ ID NO: 41954 - RNA, 18 nt, Artificial Sequence
  Synthetic
acauagaguugccuugag

SEQ ID NO: 41955 - RNA, 19 nt, Artificial Sequence
  Synthetic
uacauagaguugccuugag

SEQ ID NO: 41956 - RNA, 20 nt, Artificial Sequence
  Synthetic
auacauagaguugccuugag

SEQ ID NO: 41957 - RNA, 21 nt, Artificial Sequence
  Synthetic
gauacauagaguugccuugag

SEQ ID NO: 41958 - RNA, 22 nt, Artificial Sequence
  Synthetic
ggauacauagaguugccuugag

SEQ ID NO: 41959 - RNA, 23 nt, Artificial Sequence
  Synthetic
gggauacauagaguugccuugag

SEQ ID NO: 41960 - RNA, 24 nt, Artificial Sequence
  Synthetic
agggauacauagaguugccuugag

SEQ ID NO: 41961 - RNA, 18 nt, Artificial Sequence
  Synthetic
agaugugagaggcaauag

SEQ ID NO: 41962 - RNA, 19 nt, Artificial Sequence
  Synthetic
gagaugugagaggcaauag

SEQ ID NO: 41963 - RNA, 20 nt, Artificial Sequence
  Synthetic
cgagaugugagaggcaauag

SEQ ID NO: 41964 - RNA, 21 nt, Artificial Sequence
  Synthetic
acgagaugugagaggcaauag

SEQ ID NO: 41965 - RNA, 22 nt, Artificial Sequence
  Synthetic
gacgagaugugagaggcaauag

SEQ ID NO: 41966 - RNA, 23 nt, Artificial Sequence
  Synthetic
ugacgagaugugagaggcaauag

SEQ ID NO: 41967 - RNA, 24 nt, Artificial Sequence
  Synthetic
uugacgagaugugagaggcaauag

SEQ ID NO: 41968 - RNA, 18 nt, Artificial Sequence
  Synthetic
agacacauccagcgauag

SEQ ID NO: 41969 - RNA, 19 nt, Artificial Sequence
  Synthetic
cagacacauccagcgauag

SEQ ID NO: 41970 - RNA, 20 nt, Artificial Sequence
  Synthetic
gcagacacauccagcgauag

SEQ ID NO: 41971 - RNA, 21 nt, Artificial Sequence
  Synthetic
cgcagacacauccagcgauag

SEQ ID NO: 41972 - RNA, 22 nt, Artificial Sequence
  Synthetic
ccgcagacacauccagcgauag

SEQ ID NO: 41973 - RNA, 23 nt, Artificial Sequence
  Synthetic
gccgcagacacauccagcgauag

SEQ ID NO: 41974 - RNA, 24 nt, Artificial Sequence
  Synthetic
cgccgcagacacauccagcgauag

SEQ ID NO: 41975 - RNA, 18 nt, Artificial Sequence
  Synthetic
ggcaacauaccuugauag

SEQ ID NO: 41976 - RNA, 19 nt, Artificial Sequence
  Synthetic
gggcaacauaccuugauag

SEQ ID NO: 41977 - RNA, 20 nt, Artificial Sequence
  Synthetic
cgggcaacauaccuugauag

SEQ ID NO: 41978 - RNA, 21 nt, Artificial Sequence
  Synthetic
acgggcaacauaccuugauag

SEQ ID NO: 41979 - RNA, 22 nt, Artificial Sequence
  Synthetic
aacgggcaacauaccuugauag

SEQ ID NO: 41980 - RNA, 23 nt, Artificial Sequence
  Synthetic
aaacgggcaacauaccuugauag

SEQ ID NO: 41981 - RNA, 24 nt, Artificial Sequence
  Synthetic
caaacgggcaacauaccuugauag

SEQ ID NO: 41982 - RNA, 18 nt, Artificial Sequence
  Synthetic
cuccggaaguguugauag

SEQ ID NO: 41983 - RNA, 19 nt, Artificial Sequence
  Synthetic
ucuccggaaguguugauag

SEQ ID NO: 41984 - RNA, 20 nt, Artificial Sequence
  Synthetic
gucuccggaaguguugauag

SEQ ID NO: 41985 - RNA, 21 nt, Artificial Sequence
  Synthetic
agucuccggaaguguugauag

SEQ ID NO: 41986 - RNA, 22 nt, Artificial Sequence
  Synthetic
uagucuccggaaguguugauag

SEQ ID NO: 41987 - RNA, 23 nt, Artificial Sequence
  Synthetic
guagucuccggaaguguugauag

SEQ ID NO: 41988 - RNA, 24 nt, Artificial Sequence
  Synthetic
aguagucuccggaaguguugauag

SEQ ID NO: 41989 - RNA, 18 nt, Artificial Sequence
  Synthetic
  misc_feature (12)..(12): n is a, c, g, or u
accacaucaucnauauag

SEQ ID NO: 41990 - RNA, 19 nt, Artificial Sequence
  Synthetic
  misc_feature (13)..(13): n is a, c, g, or u
uaccacaucaucnauauag

SEQ ID NO: 41991 - RNA, 20 nt, Artificial Sequence
  Synthetic
  misc_feature (14)..(14): n is a, c, g, or u
auaccacaucaucnauauag

SEQ ID NO: 41992 - RNA, 21 nt, Artificial Sequence
  Synthetic
  misc_feature (15)..(15): n is a, c, g, or u
aauaccacaucaucnauauag

SEQ ID NO: 41993 - RNA, 22 nt, Artificial Sequence
  Synthetic
  misc_feature (16)..(16): n is a, c, g, or u
caauaccacaucaucnauauag

SEQ ID NO: 41994 - RNA, 23 nt, Artificial Sequence
  Synthetic
  misc_feature (17)..(17): n is a, c, g, or u
ccaauaccacaucaucnauauag

SEQ ID NO: 41995 - RNA, 24 nt, Artificial Sequence
  Synthetic
  misc_feature (18)..(18): n is a, c, g, or u
cccaauaccacaucaucnauauag

SEQ ID NO: 41996 - RNA, 18 nt, Artificial Sequence
  Synthetic
gauuaaagacagguauag

SEQ ID NO: 41997 - RNA, 19 nt, Artificial Sequence
  Synthetic
ggauuaaagacagguauag

SEQ ID NO: 41998 - RNA, 20 nt, Artificial Sequence
  Synthetic
aggauuaaagacagguauag

SEQ ID NO: 41999 - RNA, 21 nt, Artificial Sequence
  Synthetic
caggauuaaagacagguauag

SEQ ID NO: 42000 - RNA, 22 nt, Artificial Sequence
  Synthetic
ucaggauuaaagacagguauag

SEQ ID NO: 42001 - RNA, 23 nt, Artificial Sequence
  Synthetic
aucaggauuaaagacagguauag

SEQ ID NO: 42002 - RNA, 24 nt, Artificial Sequence
  Synthetic
aaucaggauuaaagacagguauag

SEQ ID NO: 42003 - RNA, 18 nt, Artificial Sequence
  Synthetic
ugaacaagagaugauuag

SEQ ID NO: 42004 - RNA, 19 nt, Artificial Sequence
  Synthetic
augaacaagagaugauuag

SEQ ID NO: 42005 - RNA, 20 nt, Artificial Sequence
  Synthetic
caugaacaagagaugauuag

SEQ ID NO: 42006 - RNA, 21 nt, Artificial Sequence
  Synthetic
acaugaacaagagaugauuag

SEQ ID NO: 42007 - RNA, 22 nt, Artificial Sequence
  Synthetic
gacaugaacaagagaugauuag

SEQ ID NO: 42008 - RNA, 23 nt, Artificial Sequence
  Synthetic
ggacaugaacaagagaugauuag

SEQ ID NO: 42009 - RNA, 24 nt, Artificial Sequence
  Synthetic
  misc_feature (1)..(1): n is a, c, g, or u
nggacaugaacaagagaugauuag

SEQ ID NO: 42010 - RNA, 18 nt, Artificial Sequence
  Synthetic
uggggacugcgaauuuag

SEQ ID NO: 42011 - RNA, 19 nt, Artificial Sequence
  Synthetic
uuggggacugcgaauuuag

SEQ ID NO: 42012 - RNA, 20 nt, Artificial Sequence
  Synthetic
guuggggacugcgaauuuag

SEQ ID NO: 42013 - RNA, 21 nt, Artificial Sequence
  Synthetic
gguuggggacugcgaauuuag

SEQ ID NO: 42014 - RNA, 22 nt, Artificial Sequence
  Synthetic
agguuggggacugcgaauuuag

SEQ ID NO: 42015 - RNA, 23 nt, Artificial Sequence
  Synthetic
gagguuggggacugcgaauuuag

SEQ ID NO: 42016 - RNA, 24 nt, Artificial Sequence
  Synthetic
ggagguuggggacugcgaauuuag

SEQ ID NO: 42017 - RNA, 18 nt, Artificial Sequence
  Synthetic
ggaaucagaggacaaacg

SEQ ID NO: 42018 - RNA, 19 nt, Artificial Sequence
  Synthetic
uggaaucagaggacaaacg

SEQ ID NO: 42019 - RNA, 20 nt, Artificial Sequence
  Synthetic
cuggaaucagaggacaaacg

SEQ ID NO: 42020 - RNA, 21 nt, Artificial Sequence
  Synthetic
ccuggaaucagaggacaaacg

SEQ ID NO: 42021 - RNA, 22 nt, Artificial Sequence
  Synthetic
uccuggaaucagaggacaaacg

SEQ ID NO: 42022 - RNA, 23 nt, Artificial Sequence
  Synthetic
auccuggaaucagaggacaaacg

SEQ ID NO: 42023 - RNA, 24 nt, Artificial Sequence
  Synthetic
gauccuggaaucagaggacaaacg

SEQ ID NO: 42024 - RNA, 18 nt, Artificial Sequence
  Synthetic
ccguggucggcaggaacg

SEQ ID NO: 42025 - RNA, 19 nt, Artificial Sequence
  Synthetic
cccguggucggcaggaacg

SEQ ID NO: 42026 - RNA, 20 nt, Artificial Sequence
  Synthetic
ccccguggucggcaggaacg

SEQ ID NO: 42027 - RNA, 21 nt, Artificial Sequence
  Synthetic
gccccguggucggcaggaacg

SEQ ID NO: 42028 - RNA, 22 nt, Artificial Sequence
  Synthetic
cgccccguggucggcaggaacg

SEQ ID NO: 42029 - RNA, 23 nt, Artificial Sequence
  Synthetic
gcgccccguggucggcaggaacg

SEQ ID NO: 42030 - RNA, 24 nt, Artificial Sequence
  Synthetic
ugcgccccguggucggcaggaacg

SEQ ID NO: 42031 - RNA, 18 nt, Artificial Sequence
  Synthetic
ggcgguuuccauguaacg

SEQ ID NO: 42032 - RNA, 19 nt, Artificial Sequence
  Synthetic
uggcgguuuccauguaacg

SEQ ID NO: 42033 - RNA, 20 nt, Artificial Sequence
  Synthetic
auggcgguuuccauguaacg

SEQ ID NO: 42034 - RNA, 18 nt, Artificial Sequence
  Synthetic
aaccccgccuguaacacg

SEQ ID NO: 42035 - RNA, 19 nt, Artificial Sequence
  Synthetic
aaaccccgccuguaacacg

SEQ ID NO: 42036 - RNA, 20 nt, Artificial Sequence
  Synthetic
aaaaccccgccuguaacacg

SEQ ID NO: 42037 - RNA, 21 nt, Artificial Sequence
  Synthetic
aaaaaccccgccuguaacacg

SEQ ID NO: 42038 - RNA, 22 nt, Artificial Sequence
  Synthetic
gaaaaaccccgccuguaacacg

SEQ ID NO: 42039 - RNA, 23 nt, Artificial Sequence
  Synthetic
agaaaaaccccgccuguaacacg

SEQ ID NO: 42040 - RNA, 24 nt, Artificial Sequence
  Synthetic
aagaaaaaccccgccuguaacacg

SEQ ID NO: 42041 - RNA, 18 nt, Artificial Sequence
  Synthetic
ggugucgagaagaucacg

SEQ ID NO: 42042 - RNA, 19 nt, Artificial Sequence
  Synthetic
cggugucgagaagaucacg

SEQ ID NO: 42043 - RNA, 20 nt, Artificial Sequence
  Synthetic
gcggugucgagaagaucacg

SEQ ID NO: 42044 - RNA, 18 nt, Artificial Sequence
  Synthetic
gaagaucacgaacagacg

SEQ ID NO: 42045 - RNA, 19 nt, Artificial Sequence
  Synthetic
agaagaucacgaacagacg

SEQ ID NO: 42046 - RNA, 20 nt, Artificial Sequence
  Synthetic
gagaagaucacgaacagacg

SEQ ID NO: 42047 - RNA, 18 nt, Artificial Sequence
  Synthetic
gaugagaaggaacagacg

SEQ ID NO: 42048 - RNA, 19 nt, Artificial Sequence
  Synthetic
agaugagaaggaacagacg

SEQ ID NO: 42049 - RNA, 20 nt, Artificial Sequence
  Synthetic
cagaugagaaggaacagacg

SEQ ID NO: 42050 - RNA, 21 nt, Artificial Sequence
  Synthetic
gcagaugagaaggaacagacg

SEQ ID NO: 42051 - RNA, 22 nt, Artificial Sequence
  Synthetic
ggcagaugagaaggaacagacg

SEQ ID NO: 42052 - RNA, 23 nt, Artificial Sequence
  Synthetic
cggcagaugagaaggaacagacg

SEQ ID NO: 42053 - RNA, 24 nt, Artificial Sequence
  Synthetic
ccggcagaugagaaggaacagacg

SEQ ID NO: 42054 - RNA, 18 nt, Artificial Sequence
  Synthetic
cggcaggaacggcagacg

SEQ ID NO: 42055 - RNA, 19 nt, Artificial Sequence
  Synthetic
ucggcaggaacggcagacg

SEQ ID NO: 42056 - RNA, 20 nt, Artificial Sequence
  Synthetic
gucggcaggaacggcagacg

SEQ ID NO: 42057 - RNA, 21 nt, Artificial Sequence
  Synthetic
ggucggcaggaacggcagacg

SEQ ID NO: 42058 - RNA, 22 nt, Artificial Sequence
  Synthetic
uggucggcaggaacggcagacg

SEQ ID NO: 42059 - RNA, 23 nt, Artificial Sequence
  Synthetic
guggucggcaggaacggcagacg

SEQ ID NO: 42060 - RNA, 24 nt, Artificial Sequence
  Synthetic
cguggucggcaggaacggcagacg

SEQ ID NO: 42061 - RNA, 18 nt, Artificial Sequence
  Synthetic
uauuuccgagaaaggacg

SEQ ID NO: 42062 - RNA, 19 nt, Artificial Sequence
  Synthetic
auauuuccgagaaaggacg

SEQ ID NO: 42063 - RNA, 20 nt, Artificial Sequence
  Synthetic
uauauuuccgagaaaggacg

SEQ ID NO: 42064 - RNA, 21 nt, Artificial Sequence
  Synthetic
guauauuuccgagaaaggacg

SEQ ID NO: 42065 - RNA, 22 nt, Artificial Sequence
  Synthetic
uguauauuuccgagaaaggacg

SEQ ID NO: 42066 - RNA, 23 nt, Artificial Sequence
  Synthetic
auguauauuuccgagaaaggacg

SEQ ID NO: 42067 - RNA, 24 nt, Artificial Sequence
  Synthetic
gauguauauuuccgagaaaggacg

SEQ ID NO: 42068 - RNA, 18 nt, Artificial Sequence
  Synthetic
gaacagacggggagaccg

SEQ ID NO: 42069 - RNA, 19 nt, Artificial Sequence
  Synthetic
ggaacagacggggagaccg

SEQ ID NO: 42070 - RNA, 20 nt, Artificial Sequence
  Synthetic
aggaacagacggggagaccg

SEQ ID NO: 42071 - RNA, 21 nt, Artificial Sequence
  Synthetic
aaggaacagacggggagaccg

SEQ ID NO: 42072 - RNA, 22 nt, Artificial Sequence
  Synthetic
gaaggaacagacggggagaccg

SEQ ID NO: 42073 - RNA, 23 nt, Artificial Sequence
  Synthetic
agaaggaacagacggggagaccg

SEQ ID NO: 42074 - RNA, 24 nt, Artificial Sequence
  Synthetic
gagaaggaacagacggggagaccg

SEQ ID NO: 42075 - RNA, 18 nt, Artificial Sequence
  Synthetic
cccacucgagagggaccg

SEQ ID NO: 42076 - RNA, 19 nt, Artificial Sequence
  Synthetic
ccccacucgagagggaccg

SEQ ID NO: 42077 - RNA, 20 nt, Artificial Sequence
  Synthetic
uccccacucgagagggaccg

SEQ ID NO: 42078 - RNA, 21 nt, Artificial Sequence
  Synthetic
uuccccacucgagagggaccg

SEQ ID NO: 42079 - RNA, 22 nt, Artificial Sequence
  Synthetic
uuuccccacucgagagggaccg

SEQ ID NO: 42080 - RNA, 23 nt, Artificial Sequence
  Synthetic
cuuuccccacucgagagggaccg

SEQ ID NO: 42081 - RNA, 24 nt, Artificial Sequence
  Synthetic
ucuuuccccacucgagagggaccg

SEQ ID NO: 42082 - RNA, 18 nt, Artificial Sequence
  Synthetic
gagccccaaacggccccg

SEQ ID NO: 42083 - RNA, 19 nt, Artificial Sequence
  Synthetic
agagccccaaacggccccg

SEQ ID NO: 42084 - RNA, 20 nt, Artificial Sequence
  Synthetic
cagagccccaaacggccccg

SEQ ID NO: 42085 - RNA, 18 nt, Artificial Sequence
  Synthetic
uaaacaaaggacgucccg

SEQ ID NO: 42086 - RNA, 19 nt, Artificial Sequence
  Synthetic
guaaacaaaggacgucccg

SEQ ID NO: 42087 - RNA, 20 nt, Artificial Sequence
  Synthetic
cguaaacaaaggacgucccg

SEQ ID NO: 42088 - RNA, 21 nt, Artificial Sequence
  Synthetic
acguaaacaaaggacgucccg

SEQ ID NO: 42089 - RNA, 22 nt, Artificial Sequence
  Synthetic
gacguaaacaaaggacgucccg

SEQ ID NO: 42090 - RNA, 23 nt, Artificial Sequence
  Synthetic
ggacguaaacaaaggacgucccg

SEQ ID NO: 42091 - RNA, 24 nt, Artificial Sequence
  Synthetic
gggacguaaacaaaggacgucccg

SEQ ID NO: 42092 - RNA, 18 nt, Artificial Sequence
  Synthetic
caccccaaaaggccuccg

SEQ ID NO: 42093 - RNA, 19 nt, Artificial Sequence
  Synthetic
ccaccccaaaaggccuccg

SEQ ID NO: 42094 - RNA, 20 nt, Artificial Sequence
  Synthetic
uccaccccaaaaggccuccg

SEQ ID NO: 42095 - RNA, 21 nt, Artificial Sequence
  Synthetic
cuccaccccaaaaggccuccg

SEQ ID NO: 42096 - RNA, 22 nt, Artificial Sequence
  Synthetic
gcuccaccccaaaaggccuccg

SEQ ID NO: 42097 - RNA, 23 nt, Artificial Sequence
  Synthetic
ggcuccaccccaaaaggccuccg

SEQ ID NO: 42098 - RNA, 24 nt, Artificial Sequence
  Synthetic
gggcuccaccccaaaaggccuccg

SEQ ID NO: 42099 - RNA, 18 nt, Artificial Sequence
  Synthetic
auacaggugcaauuuccg

SEQ ID NO: 42100 - RNA, 19 nt, Artificial Sequence
  Synthetic
aauacaggugcaauuuccg

SEQ ID NO: 42101 - RNA, 20 nt, Artificial Sequence
  Synthetic
gaauacaggugcaauuuccg

SEQ ID NO: 42102 - RNA, 21 nt, Artificial Sequence
  Synthetic
ggaauacaggugcaauuuccg

SEQ ID NO: 42103 - RNA, 22 nt, Artificial Sequence
  Synthetic
gggaauacaggugcaauuuccg

SEQ ID NO: 42104 - RNA, 23 nt, Artificial Sequence
  Synthetic
ugggaauacaggugcaauuuccg

SEQ ID NO: 42105 - RNA, 24 nt, Artificial Sequence
  Synthetic
augggaauacaggugcaauuuccg

SEQ ID NO: 42106 - RNA, 18 nt, Artificial Sequence
  Synthetic
aaaggauguauauuuccg

SEQ ID NO: 42107 - RNA, 19 nt, Artificial Sequence
  Synthetic
gaaaggauguauauuuccg

SEQ ID NO: 42108 - RNA, 20 nt, Artificial Sequence
  Synthetic
ggaaaggauguauauuuccg

SEQ ID NO: 42109 - RNA, 21 nt, Artificial Sequence
  Synthetic
uggaaaggauguauauuuccg

SEQ ID NO: 42110 - RNA, 22 nt, Artificial Sequence
  Synthetic
auggaaaggauguauauuuccg

SEQ ID NO: 42111 - RNA, 23 nt, Artificial Sequence
  Synthetic
cauggaaaggauguauauuuccg

SEQ ID NO: 42112 - RNA, 24 nt, Artificial Sequence
  Synthetic
ccauggaaaggauguauauuuccg

SEQ ID NO: 42113 - RNA, 18 nt, Artificial Sequence
  Synthetic
acagacggggagaccgcg

SEQ ID NO: 42114 - RNA, 19 nt, Artificial Sequence
  Synthetic
aacagacggggagaccgcg

SEQ ID NO: 42115 - RNA, 20 nt, Artificial Sequence
  Synthetic
gaacagacggggagaccgcg

SEQ ID NO: 42116 - RNA, 21 nt, Artificial Sequence
  Synthetic
ggaacagacggggagaccgcg

SEQ ID NO: 42117 - RNA, 22 nt, Artificial Sequence
  Synthetic
aggaacagacggggagaccgcg

SEQ ID NO: 42118 - RNA, 23 nt, Artificial Sequence
  Synthetic
aaggaacagacggggagaccgcg

SEQ ID NO: 42119 - RNA, 24 nt, Artificial Sequence
  Synthetic
gaaggaacagacggggagaccgcg

SEQ ID NO: 42120 - RNA, 18 nt, Artificial Sequence
  Synthetic
aucuucgucugcgaggcg

SEQ ID NO: 42121 - RNA, 19 nt, Artificial Sequence
  Synthetic
gaucuucgucugcgaggcg

SEQ ID NO: 42122 - RNA, 20 nt, Artificial Sequence
  Synthetic
agaucuucgucugcgaggcg

SEQ ID NO: 42123 - RNA, 18 nt, Artificial Sequence
  Synthetic
aucuucugcgacgcggcg

SEQ ID NO: 42124 - RNA, 19 nt, Artificial Sequence
  Synthetic
gaucuucugcgacgcggcg

SEQ ID NO: 42125 - RNA, 20 nt, Artificial Sequence
  Synthetic
agaucuucugcgacgcggcg

SEQ ID NO: 42126 - RNA, 18 nt, Artificial Sequence
  Synthetic
cagacggagaagggggcg

SEQ ID NO: 42127 - RNA, 19 nt, Artificial Sequence
  Synthetic
gcagacggagaagggggcg

SEQ ID NO: 42128 - RNA, 20 nt, Artificial Sequence
  Synthetic
ggcagacggagaagggggcg

SEQ ID NO: 42129 - RNA, 21 nt, Artificial Sequence
  Synthetic
cggcagacggagaagggggcg

SEQ ID NO: 42130 - RNA, 22 nt, Artificial Sequence
  Synthetic
acggcagacggagaagggggcg

SEQ ID NO: 42131 - RNA, 23 nt, Artificial Sequence
  Synthetic
aacggcagacggagaagggggcg

SEQ ID NO: 42132 - RNA, 24 nt, Artificial Sequence
  Synthetic
gaacggcagacggagaagggggcg

SEQ ID NO: 42133 - RNA, 18 nt, Artificial Sequence
  Synthetic
aggccuuauaaguuggcg

SEQ ID NO: 42134 - RNA, 19 nt, Artificial Sequence
  Synthetic
aaggccuuauaaguuggcg

SEQ ID NO: 42135 - RNA, 20 nt, Artificial Sequence
  Synthetic
aaaggccuuauaaguuggcg

SEQ ID NO: 42136 - RNA, 21 nt, Artificial Sequence
  Synthetic
gaaaggccuuauaaguuggcg

SEQ ID NO: 42137 - RNA, 22 nt, Artificial Sequence
  Synthetic
agaaaggccuuauaaguuggcg

SEQ ID NO: 42138 - RNA, 23 nt, Artificial Sequence
  Synthetic
gagaaaggccuuauaaguuggcg

SEQ ID NO: 42139 - RNA, 24 nt, Artificial Sequence
  Synthetic
agagaaaggccuuauaaguuggcg

SEQ ID NO: 42140 - RNA, 18 nt, Artificial Sequence
  Synthetic
ugcuccagaccggcugcg

SEQ ID NO: 42141 - RNA, 19 nt, Artificial Sequence
  Synthetic
uugcuccagaccggcugcg

SEQ ID NO: 42142 - RNA, 20 nt, Artificial Sequence
  Synthetic
uuugcuccagaccggcugcg

SEQ ID NO: 42143 - RNA, 21 nt, Artificial Sequence
  Synthetic
uuuugcuccagaccggcugcg

SEQ ID NO: 42144 - RNA, 22 nt, Artificial Sequence
  Synthetic
guuuugcuccagaccggcugcg

SEQ ID NO: 42145 - RNA, 23 nt, Artificial Sequence
  Synthetic
aguuuugcuccagaccggcugcg

SEQ ID NO: 42146 - RNA, 24 nt, Artificial Sequence
  Synthetic
gaguuuugcuccagaccggcugcg

SEQ ID NO: 42147 - RNA, 18 nt, Artificial Sequence
  Synthetic
guuccgcaguauggaucg

SEQ ID NO: 42148 - RNA, 19 nt, Artificial Sequence
  Synthetic
aguuccgcaguauggaucg

SEQ ID NO: 42149 - RNA, 20 nt, Artificial Sequence
  Synthetic
gaguuccgcaguauggaucg

SEQ ID NO: 42150 - RNA, 21 nt, Artificial Sequence
  Synthetic
ggaguuccgcaguauggaucg

SEQ ID NO: 42151 - RNA, 22 nt, Artificial Sequence
  Synthetic
aggaguuccgcaguauggaucg

SEQ ID NO: 42152 - RNA, 23 nt, Artificial Sequence
  Synthetic
uaggaguuccgcaguauggaucg

SEQ ID NO: 42153 - RNA, 24 nt, Artificial Sequence
  Synthetic
cuaggaguuccgcaguauggaucg

SEQ ID NO: 42154 - RNA, 18 nt, Artificial Sequence
  Synthetic
ggguccaacuggugaucg

SEQ ID NO: 42155 - RNA, 19 nt, Artificial Sequence
  Synthetic
uggguccaacuggugaucg

SEQ ID NO: 42156 - RNA, 20 nt, Artificial Sequence
  Synthetic
cuggguccaacuggugaucg

SEQ ID NO: 42157 - RNA, 21 nt, Artificial Sequence
  Synthetic
gcuggguccaacuggugaucg

SEQ ID NO: 42158 - RNA, 22 nt, Artificial Sequence
  Synthetic
ugcuggguccaacuggugaucg

SEQ ID NO: 42159 - RNA, 23 nt, Artificial Sequence
  Synthetic
augcuggguccaacuggugaucg

SEQ ID NO: 42160 - RNA, 24 nt, Artificial Sequence
  Synthetic
aaugcuggguccaacuggugaucg

SEQ ID NO: 42161 - RNA, 18 nt, Artificial Sequence
  Synthetic
agguucuuuccccacucg

SEQ ID NO: 42162 - RNA, 19 nt, Artificial Sequence
  Synthetic
aagguucuuuccccacucg

SEQ ID NO: 42163 - RNA, 20 nt, Artificial Sequence
  Synthetic
aaagguucuuuccccacucg

SEQ ID NO: 42164 - RNA, 21 nt, Artificial Sequence
  Synthetic
gaaagguucuuuccccacucg

SEQ ID NO: 42165 - RNA, 22 nt, Artificial Sequence
  Synthetic
ggaaagguucuuuccccacucg

SEQ ID NO: 42166 - RNA, 23 nt, Artificial Sequence
  Synthetic
uggaaagguucuuuccccacucg

SEQ ID NO: 42167 - RNA, 24 nt, Artificial Sequence
  Synthetic
guggaaagguucuuuccccacucg

SEQ ID NO: 42168 - RNA, 18 nt, Artificial Sequence
  Synthetic
ugccuugagcaggagucg

SEQ ID NO: 42169 - RNA, 19 nt, Artificial Sequence
  Synthetic
uugccuugagcaggagucg

SEQ ID NO: 42170 - RNA, 20 nt, Artificial Sequence
  Synthetic
guugccuugagcaggagucg

SEQ ID NO: 42171 - RNA, 21 nt, Artificial Sequence
  Synthetic
aguugccuugagcaggagucg

SEQ ID NO: 42172 - RNA, 22 nt, Artificial Sequence
  Synthetic
gaguugccuugagcaggagucg

SEQ ID NO: 42173 - RNA, 23 nt, Artificial Sequence
  Synthetic
agaguugccuugagcaggagucg

SEQ ID NO: 42174 - RNA, 24 nt, Artificial Sequence
  Synthetic
uagaguugccuugagcaggagucg

SEQ ID NO: 42175 - RNA, 18 nt, Artificial Sequence
  Synthetic
aggugcgccccguggucg

SEQ ID NO: 42176 - RNA, 19 nt, Artificial Sequence
  Synthetic
gaggugcgccccguggucg

SEQ ID NO: 42177 - RNA, 20 nt, Artificial Sequence
  Synthetic
agaggugcgccccguggucg

SEQ ID NO: 42178 - RNA, 21 nt, Artificial Sequence
  Synthetic
gagaggugcgccccguggucg

SEQ ID NO: 42179 - RNA, 22 nt, Artificial Sequence
  Synthetic
agagaggugcgccccguggucg

SEQ ID NO: 42180 - RNA, 23 nt, Artificial Sequence
  Synthetic
aagagaggugcgccccguggucg

SEQ ID NO: 42181 - RNA, 24 nt, Artificial Sequence
  Synthetic
aaagagaggugcgccccguggucg

SEQ ID NO: 42182 - RNA, 18 nt, Artificial Sequence
  Synthetic
aaagcugaagcggugucg

SEQ ID NO: 42183 - RNA, 19 nt, Artificial Sequence
  Synthetic
caaagcugaagcggugucg

SEQ ID NO: 42184 - RNA, 20 nt, Artificial Sequence
  Synthetic
acaaagcugaagcggugucg

SEQ ID NO: 42185 - RNA, 18 nt, Artificial Sequence
  Synthetic
aggggaccugccucuucg

SEQ ID NO: 42186 - RNA, 19 nt, Artificial Sequence
  Synthetic
gaggggaccugccucuucg

SEQ ID NO: 42187 - RNA, 20 nt, Artificial Sequence
  Synthetic
cgaggggaccugccucuucg

SEQ ID NO: 42188 - RNA, 18 nt, Artificial Sequence
  Synthetic
cgagggaguucuucuucg

SEQ ID NO: 42189 - RNA, 19 nt, Artificial Sequence
  Synthetic
gcgagggaguucuucuucg

SEQ ID NO: 42190 - RNA, 20 nt, Artificial Sequence
  Synthetic
ggcgagggaguucuucuucg

SEQ ID NO: 42191 - RNA, 18 nt, Artificial Sequence
  Synthetic
accacauuggguaaaagg

SEQ ID NO: 42192 - RNA, 19 nt, Artificial Sequence
  Synthetic
aaccacauuggguaaaagg

SEQ ID NO: 42193 - RNA, 20 nt, Artificial Sequence
  Synthetic
uaaccacauuggguaaaagg

SEQ ID NO: 42194 - RNA, 21 nt, Artificial Sequence
  Synthetic
guaaccacauuggguaaaagg

SEQ ID NO: 42195 - RNA, 22 nt, Artificial Sequence
  Synthetic
gguaaccacauuggguaaaagg

SEQ ID NO: 42196 - RNA, 23 nt, Artificial Sequence
  Synthetic
ggguaaccacauuggguaaaagg

SEQ ID NO: 42197 - RNA, 24 nt, Artificial Sequence
  Synthetic
aggguaaccacauuggguaaaagg

SEQ ID NO: 42198 - RNA, 18 nt, Artificial Sequence
  Synthetic
cccuaaagccacccaagg

SEQ ID NO: 42199 - RNA, 19 nt, Artificial Sequence
  Synthetic
gcccuaaagccacccaagg

SEQ ID NO: 42200 - RNA, 20 nt, Artificial Sequence
  Synthetic
ugcccuaaagccacccaagg

SEQ ID NO: 42201 - RNA, 21 nt, Artificial Sequence
  Synthetic
augcccuaaagccacccaagg

SEQ ID NO: 42202 - RNA, 22 nt, Artificial Sequence
  Synthetic
caugcccuaaagccacccaagg

SEQ ID NO: 42203 - RNA, 23 nt, Artificial Sequence
  Synthetic
ccaugcccuaaagccacccaagg

SEQ ID NO: 42204 - RNA, 24 nt, Artificial Sequence
  Synthetic
uccaugcccuaaagccacccaagg

SEQ ID NO: 42205 - RNA, 18 nt, Artificial Sequence
  Synthetic
cgggaaaaagucagaagg

SEQ ID NO: 42206 - RNA, 19 nt, Artificial Sequence
  Synthetic
acgggaaaaagucagaagg

SEQ ID NO: 42207 - RNA, 20 nt, Artificial Sequence
  Synthetic
gacgggaaaaagucagaagg

SEQ ID NO: 42208 - RNA, 21 nt, Artificial Sequence
  Synthetic
agacgggaaaaagucagaagg

SEQ ID NO: 42209 - RNA, 22 nt, Artificial Sequence
  Synthetic
cagacgggaaaaagucagaagg

SEQ ID NO: 42210 - RNA, 23 nt, Artificial Sequence
  Synthetic
acagacgggaaaaagucagaagg

SEQ ID NO: 42211 - RNA, 24 nt, Artificial Sequence
  Synthetic
aacagacgggaaaaagucagaagg

SEQ ID NO: 42212 - RNA, 18 nt, Artificial Sequence
  Synthetic
guccggcagaugagaagg

SEQ ID NO: 42213 - RNA, 19 nt, Artificial Sequence
  Synthetic
gguccggcagaugagaagg

SEQ ID NO: 42214 - RNA, 20 nt, Artificial Sequence
  Synthetic
cgguccggcagaugagaagg

SEQ ID NO: 42215 - RNA, 21 nt, Artificial Sequence
  Synthetic
acgguccggcagaugagaagg

SEQ ID NO: 42216 - RNA, 22 nt, Artificial Sequence
  Synthetic
cacgguccggcagaugagaagg

SEQ ID NO: 42217 - RNA, 23 nt, Artificial Sequence
  Synthetic
acacgguccggcagaugagaagg

SEQ ID NO: 42218 - RNA, 24 nt, Artificial Sequence
  Synthetic
cacacgguccggcagaugagaagg

SEQ ID NO: 42219 - RNA, 18 nt, Artificial Sequence
  Synthetic
aucccauaaaauuuaagg

SEQ ID NO: 42220 - RNA, 19 nt, Artificial Sequence
  Synthetic
uaucccauaaaauuuaagg

SEQ ID NO: 42221 - RNA, 20 nt, Artificial Sequence
  Synthetic
auaucccauaaaauuuaagg

SEQ ID NO: 42222 - RNA, 21 nt, Artificial Sequence
  Synthetic
cauaucccauaaaauuuaagg

SEQ ID NO: 42223 - RNA, 22 nt, Artificial Sequence
  Synthetic
acauaucccauaaaauuuaagg

SEQ ID NO: 42224 - RNA, 23 nt, Artificial Sequence
  Synthetic
uacauaucccauaaaauuuaagg

SEQ ID NO: 42225 - RNA, 24 nt, Artificial Sequence
  Synthetic
uuacauaucccauaaaauuuaagg

SEQ ID NO: 42226 - RNA, 18 nt, Artificial Sequence
  Synthetic
augaggcauagcagcagg

SEQ ID NO: 42227 - RNA, 19 nt, Artificial Sequence
  Synthetic
gaugaggcauagcagcagg

SEQ ID NO: 42228 - RNA, 20 nt, Artificial Sequence
  Synthetic
agaugaggcauagcagcagg

SEQ ID NO: 42229 - RNA, 21 nt, Artificial Sequence
  Synthetic
aagaugaggcauagcagcagg

SEQ ID NO: 42230 - RNA, 22 nt, Artificial Sequence
  Synthetic
gaagaugaggcauagcagcagg

SEQ ID NO: 42231 - RNA, 23 nt, Artificial Sequence
  Synthetic
agaagaugaggcauagcagcagg

SEQ ID NO: 42232 - RNA, 24 nt, Artificial Sequence
  Synthetic
aagaagaugaggcauagcagcagg

SEQ ID NO: 42233 - RNA, 18 nt, Artificial Sequence
  Synthetic
cgccccguggucggcagg

SEQ ID NO: 42234 - RNA, 19 nt, Artificial Sequence
  Synthetic
gcgccccguggucggcagg

SEQ ID NO: 42235 - RNA, 20 nt, Artificial Sequence
  Synthetic
ugcgccccguggucggcagg

SEQ ID NO: 42236 - RNA, 21 nt, Artificial Sequence
  Synthetic
gugcgccccguggucggcagg

SEQ ID NO: 42237 - RNA, 22 nt, Artificial Sequence
  Synthetic
ggugcgccccguggucggcagg

SEQ ID NO: 42238 - RNA, 23 nt, Artificial Sequence
  Synthetic
aggugcgccccguggucggcagg

SEQ ID NO: 42239 - RNA, 24 nt, Artificial Sequence
  Synthetic
gaggugcgccccguggucggcagg

SEQ ID NO: 42240 - RNA, 18 nt, Artificial Sequence
  Synthetic
ugggaaaaaucuggcagg

SEQ ID NO: 42241 - RNA, 19 nt, Artificial Sequence
  Synthetic
uugggaaaaaucuggcagg

SEQ ID NO: 42242 - RNA, 20 nt, Artificial Sequence
  Synthetic
uuugggaaaaaucuggcagg

SEQ ID NO: 42243 - RNA, 21 nt, Artificial Sequence
  Synthetic
guuugggaaaaaucuggcagg

SEQ ID NO: 42244 - RNA, 22 nt, Artificial Sequence
  Synthetic
aguuugggaaaaaucuggcagg

SEQ ID NO: 42245 - RNA, 23 nt, Artificial Sequence
  Synthetic
gaguuugggaaaaaucuggcagg

SEQ ID NO: 42246 - RNA, 24 nt, Artificial Sequence
  Synthetic
agaguuugggaaaaaucuggcagg

SEQ ID NO: 42247 - RNA, 18 nt, Artificial Sequence
  Synthetic
aggaguuugccaaucagg

SEQ ID NO: 42248 - RNA, 19 nt, Artificial Sequence
  Synthetic
aaggaguuugccaaucagg

SEQ ID NO: 42249 - RNA, 20 nt, Artificial Sequence
  Synthetic
gaaggaguuugccaaucagg

SEQ ID NO: 42250 - RNA, 21 nt, Artificial Sequence
  Synthetic
agaaggaguuugccaaucagg

SEQ ID NO: 42251 - RNA, 22 nt, Artificial Sequence
  Synthetic
aagaaggaguuugccaaucagg

SEQ ID NO: 42252 - RNA, 23 nt, Artificial Sequence
  Synthetic
aaagaaggaguuugccaaucagg

SEQ ID NO: 42253 - RNA, 24 nt, Artificial Sequence
  Synthetic
aaaagaaggaguuugccaaucagg

SEQ ID NO: 42254 - RNA, 18 nt, Artificial Sequence
  Synthetic
gagaugauuaggcagagg

SEQ ID NO: 42255 - RNA, 19 nt, Artificial Sequence
  Synthetic
agagaugauuaggcagagg

SEQ ID NO: 42256 - RNA, 20 nt, Artificial Sequence
  Synthetic
aagagaugauuaggcagagg

SEQ ID NO: 42257 - RNA, 21 nt, Artificial Sequence
  Synthetic
caagagaugauuaggcagagg

SEQ ID NO: 42258 - RNA, 22 nt, Artificial Sequence
  Synthetic
acaagagaugauuaggcagagg

SEQ ID NO: 42259 - RNA, 23 nt, Artificial Sequence
  Synthetic
aacaagagaugauuaggcagagg

SEQ ID NO: 42260 - RNA, 24 nt, Artificial Sequence
  Synthetic
gaacaagagaugauuaggcagagg

SEQ ID NO: 42261 - RNA, 18 nt, Artificial Sequence
  Synthetic
ccauguaacgugcagagg

SEQ ID NO: 42262 - RNA, 19 nt, Artificial Sequence
  Synthetic
uccauguaacgugcagagg

SEQ ID NO: 42263 - RNA, 20 nt, Artificial Sequence
  Synthetic
uuccauguaacgugcagagg

SEQ ID NO: 42264 - RNA, 21 nt, Artificial Sequence
  Synthetic
uuuccauguaacgugcagagg

SEQ ID NO: 42265 - RNA, 22 nt, Artificial Sequence
  Synthetic
guuuccauguaacgugcagagg

SEQ ID NO: 42266 - RNA, 23 nt, Artificial Sequence
  Synthetic
gguuuccauguaacgugcagagg

SEQ ID NO: 42267 - RNA, 24 nt, Artificial Sequence
  Synthetic
cgguuuccauguaacgugcagagg

SEQ ID NO: 42268 - RNA, 18 nt, Artificial Sequence
  Synthetic
ggauccuggaaucagagg

SEQ ID NO: 42269 - RNA, 19 nt, Artificial Sequence
  Synthetic
aggauccuggaaucagagg

SEQ ID NO: 42270 - RNA, 20 nt, Artificial Sequence
  Synthetic
gaggauccuggaaucagagg

SEQ ID NO: 42271 - RNA, 21 nt, Artificial Sequence
  Synthetic
cgaggauccuggaaucagagg

SEQ ID NO: 42272 - RNA, 22 nt, Artificial Sequence
  Synthetic
ucgaggauccuggaaucagagg

SEQ ID NO: 42273 - RNA, 23 nt, Artificial Sequence
  Synthetic
gucgaggauccuggaaucagagg

SEQ ID NO: 42274 - RNA, 24 nt, Artificial Sequence
  Synthetic
ggucgaggauccuggaaucagagg

SEQ ID NO: 42275 - RNA, 18 nt, Artificial Sequence
  Synthetic
agaucuucgucugcgagg

SEQ ID NO: 42276 - RNA, 19 nt, Artificial Sequence
  Synthetic
gagaucuucgucugcgagg

SEQ ID NO: 42277 - RNA, 20 nt, Artificial Sequence
  Synthetic
ugagaucuucgucugcgagg

SEQ ID NO: 42278 - RNA, 21 nt, Artificial Sequence
  Synthetic
uugagaucuucgucugcgagg

SEQ ID NO: 42279 - RNA, 22 nt, Artificial Sequence
  Synthetic
auugagaucuucgucugcgagg

SEQ ID NO: 42280 - RNA, 23 nt, Artificial Sequence
  Synthetic
gauugagaucuucgucugcgagg

SEQ ID NO: 42281 - RNA, 24 nt, Artificial Sequence
  Synthetic
cgauugagaucuucgucugcgagg

SEQ ID NO: 42282 - RNA, 18 nt, Artificial Sequence
  Synthetic
acugacgauugguggagg

SEQ ID NO: 42283 - RNA, 19 nt, Artificial Sequence
  Synthetic
gacugacgauugguggagg

SEQ ID NO: 42284 - RNA, 20 nt, Artificial Sequence
  Synthetic
ugacugacgauugguggagg

SEQ ID NO: 42285 - RNA, 21 nt, Artificial Sequence
  Synthetic
cugacugacgauugguggagg

SEQ ID NO: 42286 - RNA, 22 nt, Artificial Sequence
  Synthetic
ccugacugacgauugguggagg

SEQ ID NO: 42287 - RNA, 23 nt, Artificial Sequence
  Synthetic
cccugacugacgauugguggagg

SEQ ID NO: 42288 - RNA, 24 nt, Artificial Sequence
  Synthetic
ucccugacugacgauugguggagg

SEQ ID NO: 42289 - RNA, 18 nt, Artificial Sequence
  Synthetic
aaggccuccguguggagg

SEQ ID NO: 42290 - RNA, 19 nt, Artificial Sequence
  Synthetic
aaaggccuccguguggagg

SEQ ID NO: 42291 - RNA, 20 nt, Artificial Sequence
  Synthetic
aaaaggccuccguguggagg

SEQ ID NO: 42292 - RNA, 21 nt, Artificial Sequence
  Synthetic
caaaaggccuccguguggagg

SEQ ID NO: 42293 - RNA, 22 nt, Artificial Sequence
  Synthetic
ccaaaaggccuccguguggagg

SEQ ID NO: 42294 - RNA, 23 nt, Artificial Sequence
  Synthetic
cccaaaaggccuccguguggagg

SEQ ID NO: 42295 - RNA, 24 nt, Artificial Sequence
  Synthetic
ccccaaaaggccuccguguggagg

SEQ ID NO: 42296 - RNA, 18 nt, Artificial Sequence
  Synthetic
uuggugagugauuggagg

SEQ ID NO: 42297 - RNA, 19 nt, Artificial Sequence
  Synthetic
auuggugagugauuggagg

SEQ ID NO: 42298 - RNA, 20 nt, Artificial Sequence
  Synthetic
gauuggugagugauuggagg

SEQ ID NO: 42299 - RNA, 21 nt, Artificial Sequence
  Synthetic
agauuggugagugauuggagg

SEQ ID NO: 42300 - RNA, 22 nt, Artificial Sequence
  Synthetic
gagauuggugagugauuggagg

SEQ ID NO: 42301 - RNA, 23 nt, Artificial Sequence
  Synthetic
ggagauuggugagugauuggagg

SEQ ID NO: 42302 - RNA, 24 nt, Artificial Sequence
  Synthetic
aggagauuggugagugauuggagg

SEQ ID NO: 42303 - RNA, 18 nt, Artificial Sequence
  Synthetic
caaggcacagcuuggagg

SEQ ID NO: 42304 - RNA, 19 nt, Artificial Sequence
  Synthetic
ccaaggcacagcuuggagg

SEQ ID NO: 42305 - RNA, 20 nt, Artificial Sequence
  Synthetic
cccaaggcacagcuuggagg

SEQ ID NO: 42306 - RNA, 21 nt, Artificial Sequence
  Synthetic
acccaaggcacagcuuggagg

SEQ ID NO: 42307 - RNA, 22 nt, Artificial Sequence
  Synthetic
cacccaaggcacagcuuggagg

SEQ ID NO: 42308 - RNA, 23 nt, Artificial Sequence
  Synthetic
ccacccaaggcacagcuuggagg

SEQ ID NO: 42309 - RNA, 24 nt, Artificial Sequence
  Synthetic
gccacccaaggcacagcuuggagg

SEQ ID NO: 42310 - RNA, 18 nt, Artificial Sequence
  Synthetic
gccaggacaaguuggagg

SEQ ID NO: 42311 - RNA, 19 nt, Artificial Sequence
  Synthetic
agccaggacaaguuggagg

SEQ ID NO: 42312 - RNA, 20 nt, Artificial Sequence
  Synthetic
uagccaggacaaguuggagg

SEQ ID NO: 42313 - RNA, 21 nt, Artificial Sequence
  Synthetic
auagccaggacaaguuggagg

SEQ ID NO: 42314 - RNA, 22 nt, Artificial Sequence
  Synthetic
gauagccaggacaaguuggagg

SEQ ID NO: 42315 - RNA, 23 nt, Artificial Sequence
  Synthetic
cgauagccaggacaaguuggagg

SEQ ID NO: 42316 - RNA, 24 nt, Artificial Sequence
  Synthetic
gcgauagccaggacaaguuggagg

SEQ ID NO: 42317 - RNA, 18 nt, Artificial Sequence
  Synthetic
accaacaagaagaugagg

SEQ ID NO: 42318 - RNA, 19 nt, Artificial Sequence
  Synthetic
aaccaacaagaagaugagg

SEQ ID NO: 42319 - RNA, 20 nt, Artificial Sequence
  Synthetic
gaaccaacaagaagaugagg

SEQ ID NO: 42320 - RNA, 21 nt, Artificial Sequence
  Synthetic
agaaccaacaagaagaugagg

SEQ ID NO: 42321 - RNA, 22 nt, Artificial Sequence
  Synthetic
aagaaccaacaagaagaugagg

SEQ ID NO: 42322 - RNA, 23 nt, Artificial Sequence
  Synthetic
gaagaaccaacaagaagaugagg

SEQ ID NO: 42323 - RNA, 24 nt, Artificial Sequence
  Synthetic
agaagaaccaacaagaagaugagg

SEQ ID NO: 42324 - RNA, 18 nt, Artificial Sequence
  Synthetic
uccggaaguguugauagg

SEQ ID NO: 42325 - RNA, 19 nt, Artificial Sequence
  Synthetic
cuccggaaguguugauagg

SEQ ID NO: 42326 - RNA, 20 nt, Artificial Sequence
  Synthetic
ucuccggaaguguugauagg

SEQ ID NO: 42327 - RNA, 21 nt, Artificial Sequence
  Synthetic
gucuccggaaguguugauagg

SEQ ID NO: 42328 - RNA, 22 nt, Artificial Sequence
  Synthetic
agucuccggaaguguugauagg

SEQ ID NO: 42329 - RNA, 23 nt, Artificial Sequence
  Synthetic
uagucuccggaaguguugauagg

SEQ ID NO: 42330 - RNA, 24 nt, Artificial Sequence
  Synthetic
guagucuccggaaguguugauagg

SEQ ID NO: 42331 - RNA, 18 nt, Artificial Sequence
  Synthetic
gaacaagagaugauuagg

SEQ ID NO: 42332 - RNA, 19 nt, Artificial Sequence
  Synthetic
ugaacaagagaugauuagg

SEQ ID NO: 42333 - RNA, 20 nt, Artificial Sequence
  Synthetic
augaacaagagaugauuagg

SEQ ID NO: 42334 - RNA, 21 nt, Artificial Sequence
  Synthetic
caugaacaagagaugauuagg

SEQ ID NO: 42335 - RNA, 22 nt, Artificial Sequence
  Synthetic
acaugaacaagagaugauuagg

SEQ ID NO: 42336 - RNA, 23 nt, Artificial Sequence
  Synthetic
gacaugaacaagagaugauuagg

SEQ ID NO: 42337 - RNA, 24 nt, Artificial Sequence
  Synthetic
ggacaugaacaagagaugauuagg

SEQ ID NO: 42338 - RNA, 18 nt, Artificial Sequence
  Synthetic
ggggacugcgaauuuagg

SEQ ID NO: 42339 - RNA, 19 nt, Artificial Sequence
  Synthetic
uggggacugcgaauuuagg

SEQ ID NO: 42340 - RNA, 20 nt, Artificial Sequence
  Synthetic
uuggggacugcgaauuuagg

SEQ ID NO: 42341 - RNA, 21 nt, Artificial Sequence
  Synthetic
guuggggacugcgaauuuagg

SEQ ID NO: 42342 - RNA, 22 nt, Artificial Sequence
  Synthetic
gguuggggacugcgaauuuagg

SEQ ID NO: 42343 - RNA, 23 nt, Artificial Sequence
  Synthetic
agguuggggacugcgaauuuagg

SEQ ID NO: 42344 - RNA, 24 nt, Artificial Sequence
  Synthetic
gagguuggggacugcgaauuuagg

SEQ ID NO: 42345 - RNA, 18 nt, Artificial Sequence
  Synthetic
cugagccaagagaaacgg

SEQ ID NO: 42346 - RNA, 19 nt, Artificial Sequence
  Synthetic
acugagccaagagaaacgg

SEQ ID NO: 42347 - RNA, 20 nt, Artificial Sequence
  Synthetic
aacugagccaagagaaacgg

SEQ ID NO: 42348 - RNA, 21 nt, Artificial Sequence
  Synthetic
aaacugagccaagagaaacgg

SEQ ID NO: 42349 - RNA, 22 nt, Artificial Sequence
  Synthetic
uaaacugagccaagagaaacgg

SEQ ID NO: 42350 - RNA, 23 nt, Artificial Sequence
  Synthetic
guaaacugagccaagagaaacgg

SEQ ID NO: 42351 - RNA, 24 nt, Artificial Sequence
  Synthetic
aguaaacugagccaagagaaacgg

SEQ ID NO: 42352 - RNA, 18 nt, Artificial Sequence
  Synthetic
gaagcgaagugcacacgg

SEQ ID NO: 42353 - RNA, 19 nt, Artificial Sequence
  Synthetic
ugaagcgaagugcacacgg

SEQ ID NO: 42354 - RNA, 20 nt, Artificial Sequence
  Synthetic
gugaagcgaagugcacacgg

SEQ ID NO: 42355 - RNA, 21 nt, Artificial Sequence
  Synthetic
ggugaagcgaagugcacacgg

SEQ ID NO: 42356 - RNA, 22 nt, Artificial Sequence
  Synthetic
aggugaagcgaagugcacacgg

SEQ ID NO: 42357 - RNA, 23 nt, Artificial Sequence
  Synthetic
gaggugaagcgaagugcacacgg

SEQ ID NO: 42358 - RNA, 24 nt, Artificial Sequence
  Synthetic
agaggugaagcgaagugcacacgg

SEQ ID NO: 42359 - RNA, 18 nt, Artificial Sequence
  Synthetic
aagaucacgaacagacgg

SEQ ID NO: 42360 - RNA, 19 nt, Artificial Sequence
  Synthetic
gaagaucacgaacagacgg

SEQ ID NO: 42361 - RNA, 20 nt, Artificial Sequence
  Synthetic
agaagaucacgaacagacgg

SEQ ID NO: 42362 - RNA, 18 nt, Artificial Sequence
  Synthetic
augagaaggaacagacgg

SEQ ID NO: 42363 - RNA, 19 nt, Artificial Sequence
  Synthetic
gaugagaaggaacagacgg

SEQ ID NO: 42364 - RNA, 20 nt, Artificial Sequence
  Synthetic
agaugagaaggaacagacgg

SEQ ID NO: 42365 - RNA, 21 nt, Artificial Sequence
  Synthetic
cagaugagaaggaacagacgg

SEQ ID NO: 42366 - RNA, 22 nt, Artificial Sequence
  Synthetic
gcagaugagaaggaacagacgg

SEQ ID NO: 42367 - RNA, 23 nt, Artificial Sequence
  Synthetic
ggcagaugagaaggaacagacgg

SEQ ID NO: 42368 - RNA, 24 nt, Artificial Sequence
  Synthetic
cggcagaugagaaggaacagacgg

SEQ ID NO: 42369 - RNA, 18 nt, Artificial Sequence
  Synthetic
ggcaggaacggcagacgg

SEQ ID NO: 42370 - RNA, 19 nt, Artificial Sequence
  Synthetic
cggcaggaacggcagacgg

SEQ ID NO: 42371 - RNA, 20 nt, Artificial Sequence
  Synthetic
ucggcaggaacggcagacgg

SEQ ID NO: 42372 - RNA, 21 nt, Artificial Sequence
  Synthetic
gucggcaggaacggcagacgg

SEQ ID NO: 42373 - RNA, 22 nt, Artificial Sequence
  Synthetic
ggucggcaggaacggcagacgg

SEQ ID NO: 42374 - RNA, 23 nt, Artificial Sequence
  Synthetic
uggucggcaggaacggcagacgg

SEQ ID NO: 42375 - RNA, 24 nt, Artificial Sequence
  Synthetic
guggucggcaggaacggcagacgg

SEQ ID NO: 42376 - RNA, 18 nt, Artificial Sequence
  Synthetic
agccccaaacggccccgg

SEQ ID NO: 42377 - RNA, 19 nt, Artificial Sequence
  Synthetic
gagccccaaacggccccgg

SEQ ID NO: 42378 - RNA, 20 nt, Artificial Sequence
  Synthetic
agagccccaaacggccccgg

SEQ ID NO: 42379 - RNA, 18 nt, Artificial Sequence
  Synthetic
gacucuaaggauucccgg

SEQ ID NO: 42380 - RNA, 19 nt, Artificial Sequence
  Synthetic
ggacucuaaggauucccgg

SEQ ID NO: 42381 - RNA, 20 nt, Artificial Sequence
  Synthetic
aggacucuaaggauucccgg

SEQ ID NO: 42382 - RNA, 21 nt, Artificial Sequence
  Synthetic
gaggacucuaaggauucccgg

SEQ ID NO: 42383 - RNA, 22 nt, Artificial Sequence
  Synthetic
agaggacucuaaggauucccgg

SEQ ID NO: 42384 - RNA, 23 nt, Artificial Sequence
  Synthetic
cagaggacucuaaggauucccgg

SEQ ID NO: 42385 - RNA, 24 nt, Artificial Sequence
  Synthetic
ucagaggacucuaaggauucccgg

SEQ ID NO: 42386 - RNA, 18 nt, Artificial Sequence
  Synthetic
gaaaauugguaacagcgg

SEQ ID NO: 42387 - RNA, 19 nt, Artificial Sequence
  Synthetic
agaaaauugguaacagcgg

SEQ ID NO: 42388 - RNA, 20 nt, Artificial Sequence
  Synthetic
aagaaaauugguaacagcgg

SEQ ID NO: 42389 - RNA, 21 nt, Artificial Sequence
  Synthetic
aaagaaaauugguaacagcgg

SEQ ID NO: 42390 - RNA, 22 nt, Artificial Sequence
  Synthetic
aaaagaaaauugguaacagcgg

SEQ ID NO: 42391 - RNA, 23 nt, Artificial Sequence
  Synthetic
caaaagaaaauugguaacagcgg

SEQ ID NO: 42392 - RNA, 24 nt, Artificial Sequence
  Synthetic
acaaaagaaaauugguaacagcgg

SEQ ID NO: 42393 - RNA, 18 nt, Artificial Sequence
  Synthetic
uuccgcaguauggaucgg

SEQ ID NO: 42394 - RNA, 19 nt, Artificial Sequence
  Synthetic
guuccgcaguauggaucgg

SEQ ID NO: 42395 - RNA, 20 nt, Artificial Sequence
  Synthetic
aguuccgcaguauggaucgg

SEQ ID NO: 42396 - RNA, 18 nt, Artificial Sequence
  Synthetic
gguccaacuggugaucgg

SEQ ID NO: 42397 - RNA, 19 nt, Artificial Sequence
  Synthetic
ggguccaacuggugaucgg

SEQ ID NO: 42398 - RNA, 20 nt, Artificial Sequence
  Synthetic
uggguccaacuggugaucgg

SEQ ID NO: 42399 - RNA, 18 nt, Artificial Sequence
  Synthetic
gugagaggcaauagucgg

SEQ ID NO: 42400 - RNA, 19 nt, Artificial Sequence
  Synthetic
ugugagaggcaauagucgg

SEQ ID NO: 42401 - RNA, 20 nt, Artificial Sequence
  Synthetic
augugagaggcaauagucgg

SEQ ID NO: 42402 - RNA, 21 nt, Artificial Sequence
  Synthetic
gaugugagaggcaauagucgg

SEQ ID NO: 42403 - RNA, 22 nt, Artificial Sequence
  Synthetic
agaugugagaggcaauagucgg

SEQ ID NO: 42404 - RNA, 23 nt, Artificial Sequence
  Synthetic
gagaugugagaggcaauagucgg

SEQ ID NO: 42405 - RNA, 24 nt, Artificial Sequence
  Synthetic
cgagaugugagaggcaauagucgg

SEQ ID NO: 42406 - RNA, 18 nt, Artificial Sequence
  Synthetic
ggugcgccccguggucgg

SEQ ID NO: 42407 - RNA, 19 nt, Artificial Sequence
  Synthetic
aggugcgccccguggucgg

SEQ ID NO: 42408 - RNA, 20 nt, Artificial Sequence
  Synthetic
gaggugcgccccguggucgg

SEQ ID NO: 42409 - RNA, 21 nt, Artificial Sequence
  Synthetic
agaggugcgccccguggucgg

SEQ ID NO: 42410 - RNA, 22 nt, Artificial Sequence
  Synthetic
gagaggugcgccccguggucgg

SEQ ID NO: 42411 - RNA, 23 nt, Artificial Sequence
  Synthetic
agagaggugcgccccguggucgg

SEQ ID NO: 42412 - RNA, 24 nt, Artificial Sequence
  Synthetic
aagagaggugcgccccguggucgg

SEQ ID NO: 42413 - RNA, 18 nt, Artificial Sequence
  Synthetic
gauguucuccauguucgg

SEQ ID NO: 42414 - RNA, 19 nt, Artificial Sequence
  Synthetic
ugauguucuccauguucgg

SEQ ID NO: 42415 - RNA, 20 nt, Artificial Sequence
  Synthetic
gugauguucuccauguucgg

SEQ ID NO: 42416 - RNA, 21 nt, Artificial Sequence
  Synthetic
ugugauguucuccauguucgg

SEQ ID NO: 42417 - RNA, 22 nt, Artificial Sequence
  Synthetic
augugauguucuccauguucgg

SEQ ID NO: 42418 - RNA, 23 nt, Artificial Sequence
  Synthetic
gaugugauguucuccauguucgg

SEQ ID NO: 42419 - RNA, 24 nt, Artificial Sequence
  Synthetic
ugaugugauguucuccauguucgg

SEQ ID NO: 42420 - RNA, 18 nt, Artificial Sequence
  Synthetic
acggcagacggagaaggg

SEQ ID NO: 42421 - RNA, 19 nt, Artificial Sequence
  Synthetic
aacggcagacggagaaggg

SEQ ID NO: 42422 - RNA, 20 nt, Artificial Sequence
  Synthetic
gaacggcagacggagaaggg

SEQ ID NO: 42423 - RNA, 21 nt, Artificial Sequence
  Synthetic
ggaacggcagacggagaaggg

SEQ ID NO: 42424 - RNA, 22 nt, Artificial Sequence
  Synthetic
aggaacggcagacggagaaggg

SEQ ID NO: 42425 - RNA, 23 nt, Artificial Sequence
  Synthetic
caggaacggcagacggagaaggg

SEQ ID NO: 42426 - RNA, 24 nt, Artificial Sequence
  Synthetic
gcaggaacggcagacggagaaggg

SEQ ID NO: 42427 - RNA, 18 nt, Artificial Sequence
  Synthetic
aggccuccguguggaggg

SEQ ID NO: 42428 - RNA, 19 nt, Artificial Sequence
  Synthetic
aaggccuccguguggaggg

SEQ ID NO: 42429 - RNA, 20 nt, Artificial Sequence
  Synthetic
aaaggccuccguguggaggg

SEQ ID NO: 42430 - RNA, 21 nt, Artificial Sequence
  Synthetic
aaaaggccuccguguggaggg

SEQ ID NO: 42431 - RNA, 22 nt, Artificial Sequence
  Synthetic
caaaaggccuccguguggaggg

SEQ ID NO: 42432 - RNA, 23 nt, Artificial Sequence
  Synthetic
ccaaaaggccuccguguggaggg

SEQ ID NO: 42433 - RNA, 24 nt, Artificial Sequence
  Synthetic
cccaaaaggccuccguguggaggg

SEQ ID NO: 42434 - RNA, 18 nt, Artificial Sequence
  Synthetic
agaucacgaacagacggg

SEQ ID NO: 42435 - RNA, 19 nt, Artificial Sequence
  Synthetic
aagaucacgaacagacggg

SEQ ID NO: 42436 - RNA, 20 nt, Artificial Sequence
  Synthetic
gaagaucacgaacagacggg

SEQ ID NO: 42437 - RNA, 18 nt, Artificial Sequence
  Synthetic
guccaacuggugaucggg

SEQ ID NO: 42438 - RNA, 19 nt, Artificial Sequence
  Synthetic
gguccaacuggugaucggg

SEQ ID NO: 42439 - RNA, 20 nt, Artificial Sequence
  Synthetic
ggguccaacuggugaucggg

SEQ ID NO: 42440 - RNA, 21 nt, Artificial Sequence
  Synthetic
uggguccaacuggugaucggg

SEQ ID NO: 42441 - RNA, 22 nt, Artificial Sequence
  Synthetic
cuggguccaacuggugaucggg

SEQ ID NO: 42442 - RNA, 23 nt, Artificial Sequence
  Synthetic
gcuggguccaacuggugaucggg

SEQ ID NO: 42443 - RNA, 24 nt, Artificial Sequence
  Synthetic
ugcuggguccaacuggugaucggg

SEQ ID NO: 42444 - RNA, 18 nt, Artificial Sequence
  Synthetic
gaaagccagacagugggg

SEQ ID NO: 42445 - RNA, 19 nt, Artificial Sequence
  Synthetic
ugaaagccagacagugggg

SEQ ID NO: 42446 - RNA, 20 nt, Artificial Sequence
  Synthetic
cugaaagccagacagugggg

SEQ ID NO: 42447 - RNA, 21 nt, Artificial Sequence
  Synthetic
gcugaaagccagacagugggg

SEQ ID NO: 42448 - RNA, 22 nt, Artificial Sequence
  Synthetic
agcugaaagccagacagugggg

SEQ ID NO: 42449 - RNA, 23 nt, Artificial Sequence
  Synthetic
uagcugaaagccagacagugggg

SEQ ID NO: 42450 - RNA, 24 nt, Artificial Sequence
  Synthetic
auagcugaaagccagacagugggg

SEQ ID NO: 42451 - RNA, 18 nt, Artificial Sequence
  Synthetic
  misc_feature (15)..(15): n is a, c, g, or u
cguugccuagcaacnggg

SEQ ID NO: 42452 - RNA, 19 nt, Artificial Sequence
  Synthetic
  misc_feature (16)..(16): n is a, c, g, or u
ccguugccuagcaacnggg

SEQ ID NO: 42453 - RNA, 20 nt, Artificial Sequence
  Synthetic
  misc_feature (17)..(17): n is a, c, g, or u
gccguugccuagcaacnggg

SEQ ID NO: 42454 - RNA, 21 nt, Artificial Sequence
  Synthetic
  misc_feature (18)..(18): n is a, c, g, or u
ggccguugccuagcaacnggg

SEQ ID NO: 42455 - RNA, 22 nt, Artificial Sequence
  Synthetic
  misc_feature (19)..(19): n is a, c, g, or u
gggccguugccuagcaacnggg

SEQ ID NO: 42456 - RNA, 23 nt, Artificial Sequence
  Synthetic
  misc_feature (20)..(20): n is a, c, g, or u
cgggccguugccuagcaacnggg

SEQ ID NO: 42457 - RNA, 24 nt, Artificial Sequence
  Synthetic
  misc_feature (21)..(21): n is a, c, g, or u
ccgggccguugccuagcaacnggg

SEQ ID NO: 42458 - RNA, 18 nt, Artificial Sequence
  Synthetic
uagugguggagagauggg

SEQ ID NO: 42459 - RNA, 19 nt, Artificial Sequence
  Synthetic
uuagugguggagagauggg

SEQ ID NO: 42460 - RNA, 20 nt, Artificial Sequence
  Synthetic
cuuagugguggagagauggg

SEQ ID NO: 42461 - RNA, 21 nt, Artificial Sequence
  Synthetic
ucuuagugguggagagauggg

SEQ ID NO: 42462 - RNA, 22 nt, Artificial Sequence
  Synthetic
cucuuagugguggagagauggg

SEQ ID NO: 42463 - RNA, 23 nt, Artificial Sequence
  Synthetic
ucucuuagugguggagagauggg

SEQ ID NO: 42464 - RNA, 24 nt, Artificial Sequence
  Synthetic
gucucuuagugguggagagauggg

SEQ ID NO: 42465 - RNA, 18 nt, Artificial Sequence
  Synthetic
aaagcccaagaugauggg

SEQ ID NO: 42466 - RNA, 19 nt, Artificial Sequence
  Synthetic
gaaagcccaagaugauggg

SEQ ID NO: 42467 - RNA, 20 nt, Artificial Sequence
  Synthetic
cgaaagcccaagaugauggg

SEQ ID NO: 42468 - RNA, 21 nt, Artificial Sequence
  Synthetic
gcgaaagcccaagaugauggg

SEQ ID NO: 42469 - RNA, 22 nt, Artificial Sequence
  Synthetic
ugcgaaagcccaagaugauggg

SEQ ID NO: 42470 - RNA, 23 nt, Artificial Sequence
  Synthetic
uugcgaaagcccaagaugauggg

SEQ ID NO: 42471 - RNA, 24 nt, Artificial Sequence
  Synthetic
uuugcgaaagcccaagaugauggg

SEQ ID NO: 42472 - RNA, 18 nt, Artificial Sequence
  Synthetic
uuugcucugaaugcuggg

SEQ ID NO: 42473 - RNA, 19 nt, Artificial Sequence
  Synthetic
auuugcucugaaugcuggg

SEQ ID NO: 42474 - RNA, 20 nt, Artificial Sequence
  Synthetic
uauuugcucugaaugcuggg

SEQ ID NO: 42475 - RNA, 21 nt, Artificial Sequence
  Synthetic
guauuugcucugaaugcuggg

SEQ ID NO: 42476 - RNA, 22 nt, Artificial Sequence
  Synthetic
gguauuugcucugaaugcuggg

SEQ ID NO: 42477 - RNA, 23 nt, Artificial Sequence
  Synthetic
ugguauuugcucugaaugcuggg

SEQ ID NO: 42478 - RNA, 24 nt, Artificial Sequence
  Synthetic
uugguauuugcucugaaugcuggg

SEQ ID NO: 42479 - RNA, 18 nt, Artificial Sequence
  Synthetic
ugaaagccagacaguggg

SEQ ID NO: 42480 - RNA, 19 nt, Artificial Sequence
  Synthetic
cugaaagccagacaguggg

SEQ ID NO: 42481 - RNA, 20 nt, Artificial Sequence
  Synthetic
gcugaaagccagacaguggg

SEQ ID NO: 42482 - RNA, 21 nt, Artificial Sequence
  Synthetic
agcugaaagccagacaguggg

SEQ ID NO: 42483 - RNA, 22 nt, Artificial Sequence
  Synthetic
uagcugaaagccagacaguggg

SEQ ID NO: 42484 - RNA, 23 nt, Artificial Sequence
  Synthetic
auagcugaaagccagacaguggg

SEQ ID NO: 42485 - RNA, 24 nt, Artificial Sequence
  Synthetic
uauagcugaaagccagacaguggg

SEQ ID NO: 42486 - RNA, 18 nt, Artificial Sequence
  Synthetic
caggguaaccacauuggg

SEQ ID NO: 42487 - RNA, 19 nt, Artificial Sequence
  Synthetic
gcaggguaaccacauuggg

SEQ ID NO: 42488 - RNA, 20 nt, Artificial Sequence
  Synthetic
ggcaggguaaccacauuggg

SEQ ID NO: 42489 - RNA, 21 nt, Artificial Sequence
  Synthetic
aggcaggguaaccacauuggg

SEQ ID NO: 42490 - RNA, 22 nt, Artificial Sequence
  Synthetic
aaggcaggguaaccacauuggg

SEQ ID NO: 42491 - RNA, 23 nt, Artificial Sequence
  Synthetic
uaaggcaggguaaccacauuggg

SEQ ID NO: 42492 - RNA, 24 nt, Artificial Sequence
  Synthetic
uuaaggcaggguaaccacauuggg

SEQ ID NO: 42493 - RNA, 18 nt, Artificial Sequence
  Synthetic
ccaaggguccuuuuuggg

SEQ ID NO: 42494 - RNA, 19 nt, Artificial Sequence
  Synthetic
gccaaggguccuuuuuggg

SEQ ID NO: 42495 - RNA, 20 nt, Artificial Sequence
  Synthetic
ggccaaggguccuuuuuggg

SEQ ID NO: 42496 - RNA, 21 nt, Artificial Sequence
  Synthetic
uggccaaggguccuuuuuggg

SEQ ID NO: 42497 - RNA, 22 nt, Artificial Sequence
  Synthetic
cuggccaaggguccuuuuuggg

SEQ ID NO: 42498 - RNA, 23 nt, Artificial Sequence
  Synthetic
ucuggccaaggguccuuuuuggg

SEQ ID NO: 42499 - RNA, 24 nt, Artificial Sequence
  Synthetic
cucuggccaaggguccuuuuuggg

SEQ ID NO: 42500 - RNA, 18 nt, Artificial Sequence
  Synthetic
  misc_feature (16)..(16): n is a, c, g, or u
cuuuuuguuuuguuangg

SEQ ID NO: 42501 - RNA, 19 nt, Artificial Sequence
  Synthetic
  misc_feature (17)..(17): n is a, c, g, or u
ucuuuuuguuuuguuangg

SEQ ID NO: 42502 - RNA, 20 nt, Artificial Sequence
  Synthetic
  misc_feature (18)..(18): n is a, c, g, or u
aucuuuuuguuuuguuangg

SEQ ID NO: 42503 - RNA, 21 nt, Artificial Sequence
  Synthetic
  misc_feature (19)..(19): n is a, c, g, or u
caucuuuuuguuuuguuangg

SEQ ID NO: 42504 - RNA, 22 nt, Artificial Sequence
  Synthetic
  misc_feature (20)..(20): n is a, c, g, or u
ccaucuuuuuguuuuguuangg

SEQ ID NO: 42505 - RNA, 23 nt, Artificial Sequence
  Synthetic
  misc_feature (21)..(21): n is a, c, g, or u
cccaucuuuuuguuuuguuangg

SEQ ID NO: 42506 - RNA, 24 nt, Artificial Sequence
  Synthetic
  misc_feature (22)..(22): n is a, c, g, or u
ccccaucuuuuuguuuuguuangg

SEQ ID NO: 42507 - RNA, 18 nt, Artificial Sequence
  Synthetic
  misc_feature (16)..(16): n is a, c, g, or u
ccguugccuagcaacngg

SEQ ID NO: 42508 - RNA, 19 nt, Artificial Sequence
  Synthetic
  misc_feature (17)..(17): n is a, c, g, or u
gccguugccuagcaacngg

SEQ ID NO: 42509 - RNA, 20 nt, Artificial Sequence
  Synthetic
  misc_feature (18)..(18): n is a, c, g, or u
ggccguugccuagcaacngg

SEQ ID NO: 42510 - RNA, 21 nt, Artificial Sequence
  Synthetic
  misc_feature (19)..(19): n is a, c, g, or u
gggccguugccuagcaacngg

SEQ ID NO: 42511 - RNA, 22 nt, Artificial Sequence
  Synthetic
  misc_feature (20)..(20): n is a, c, g, or u
cgggccguugccuagcaacngg

SEQ ID NO: 42512 - RNA, 23 nt, Artificial Sequence
  Synthetic
  misc_feature (21)..(21): n is a, c, g, or u
ccgggccguugccuagcaacngg

SEQ ID NO: 42513 - RNA, 24 nt, Artificial Sequence
  Synthetic
  misc_feature (22)..(22): n is a, c, g, or u
accgggccguugccuagcaacngg

SEQ ID NO: 42514 - RNA, 18 nt, Artificial Sequence
  Synthetic
acagccuagcagccaugg

SEQ ID NO: 42515 - RNA, 19 nt, Artificial Sequence
  Synthetic
cacagccuagcagccaugg

SEQ ID NO: 42516 - RNA, 20 nt, Artificial Sequence
  Synthetic
gcacagccuagcagccaugg

SEQ ID NO: 42517 - RNA, 21 nt, Artificial Sequence
  Synthetic
agcacagccuagcagccaugg

SEQ ID NO: 42518 - RNA, 22 nt, Artificial Sequence
  Synthetic
cagcacagccuagcagccaugg

SEQ ID NO: 42519 - RNA, 23 nt, Artificial Sequence
  Synthetic
gcagcacagccuagcagccaugg

SEQ ID NO: 42520 - RNA, 24 nt, Artificial Sequence
  Synthetic
ggcagcacagccuagcagccaugg

SEQ ID NO: 42521 - RNA, 18 nt, Artificial Sequence
  Synthetic
  misc_feature (11)..(11): n is a, c, g, or u
ugcgcugaugnccgaugg

SEQ ID NO: 42522 - RNA, 19 nt, Artificial Sequence
  Synthetic
  misc_feature (12)..(12): n is a, c, g, or u
augcgcugaugnccgaugg

SEQ ID NO: 42523 - RNA, 20 nt, Artificial Sequence
  Synthetic
  misc_feature (13)..(13): n is a, c, g, or u
caugcgcugaugnccgaugg

SEQ ID NO: 42524 - RNA, 21 nt, Artificial Sequence
  Synthetic
  misc_feature (14)..(14): n is a, c, g, or u
gcaugcgcugaugnccgaugg

SEQ ID NO: 42525 - RNA, 22 nt, Artificial Sequence
  Synthetic
  misc_feature (15)..(15): n is a, c, g, or u
cgcaugcgcugaugnccgaugg

SEQ ID NO: 42526 - RNA, 23 nt, Artificial Sequence
  Synthetic
  misc_feature (16)..(16): n is a, c, g, or u
acgcaugcgcugaugnccgaugg

SEQ ID NO: 42527 - RNA, 24 nt, Artificial Sequence
  Synthetic
  misc_feature (17)..(17): n is a, c, g, or u
cacgcaugcgcugaugnccgaugg

SEQ ID NO: 42528 - RNA, 18 nt, Artificial Sequence
  Synthetic
gaaagcccaagaugaugg

SEQ ID NO: 42529 - RNA, 19 nt, Artificial Sequence
  Synthetic
cgaaagcccaagaugaugg

SEQ ID NO: 42530 - RNA, 20 nt, Artificial Sequence
  Synthetic
gcgaaagcccaagaugaugg

SEQ ID NO: 42531 - RNA, 21 nt, Artificial Sequence
  Synthetic
ugcgaaagcccaagaugaugg

SEQ ID NO: 42532 - RNA, 22 nt, Artificial Sequence
  Synthetic
uugcgaaagcccaagaugaugg

SEQ ID NO: 42533 - RNA, 23 nt, Artificial Sequence
  Synthetic
uuugcgaaagcccaagaugaugg

SEQ ID NO: 42534 - RNA, 24 nt, Artificial Sequence
  Synthetic
uuuugcgaaagcccaagaugaugg

SEQ ID NO: 42535 - RNA, 18 nt, Artificial Sequence
  Synthetic
aggaguuccgcaguaugg

SEQ ID NO: 42536 - RNA, 19 nt, Artificial Sequence
  Synthetic
uaggaguuccgcaguaugg

SEQ ID NO: 42537 - RNA, 20 nt, Artificial Sequence
  Synthetic
cuaggaguuccgcaguaugg

SEQ ID NO: 42538 - RNA, 21 nt, Artificial Sequence
  Synthetic
gcuaggaguuccgcaguaugg

SEQ ID NO: 42539 - RNA, 22 nt, Artificial Sequence
  Synthetic
agcuaggaguuccgcaguaugg

SEQ ID NO: 42540 - RNA, 23 nt, Artificial Sequence
  Synthetic
cagcuaggaguuccgcaguaugg

SEQ ID NO: 42541 - RNA, 24 nt, Artificial Sequence
  Synthetic
gcagcuaggaguuccgcaguaugg

SEQ ID NO: 42542 - RNA, 18 nt, Artificial Sequence
  Synthetic
ugccugagugcuguaugg

SEQ ID NO: 42543 - RNA, 19 nt, Artificial Sequence
  Synthetic
uugccugagugcuguaugg

SEQ ID NO: 42544 - RNA, 20 nt, Artificial Sequence
  Synthetic
cuugccugagugcuguaugg

SEQ ID NO: 42545 - RNA, 21 nt, Artificial Sequence
  Synthetic
gcuugccugagugcuguaugg

SEQ ID NO: 42546 - RNA, 22 nt, Artificial Sequence
  Synthetic
ugcuugccugagugcuguaugg

SEQ ID NO: 42547 - RNA, 23 nt, Artificial Sequence
  Synthetic
uugcuugccugagugcuguaugg

SEQ ID NO: 42548 - RNA, 24 nt, Artificial Sequence
  Synthetic
auugcuugccugagugcuguaugg

SEQ ID NO: 42549 - RNA, 18 nt, Artificial Sequence
  Synthetic
caggguccccaauccugg

SEQ ID NO: 42550 - RNA, 19 nt, Artificial Sequence
  Synthetic
gcaggguccccaauccugg

SEQ ID NO: 42551 - RNA, 20 nt, Artificial Sequence
  Synthetic
ugcaggguccccaauccugg

SEQ ID NO: 42552 - RNA, 21 nt, Artificial Sequence
  Synthetic
gugcaggguccccaauccugg

SEQ ID NO: 42553 - RNA, 22 nt, Artificial Sequence
  Synthetic
ggugcaggguccccaauccugg

SEQ ID NO: 42554 - RNA, 23 nt, Artificial Sequence
  Synthetic
cggugcaggguccccaauccugg

SEQ ID NO: 42555 - RNA, 24 nt, Artificial Sequence
  Synthetic
ucggugcaggguccccaauccugg

SEQ ID NO: 42556 - RNA, 18 nt, Artificial Sequence
  Synthetic
auccuagaggauugcugg

SEQ ID NO: 42557 - RNA, 19 nt, Artificial Sequence
  Synthetic
aauccuagaggauugcugg

SEQ ID NO: 42558 - RNA, 20 nt, Artificial Sequence
  Synthetic
gaauccuagaggauugcugg

SEQ ID NO: 42559 - RNA, 21 nt, Artificial Sequence
  Synthetic
ggaauccuagaggauugcugg

SEQ ID NO: 42560 - RNA, 22 nt, Artificial Sequence
  Synthetic
aggaauccuagaggauugcugg

SEQ ID NO: 42561 - RNA, 23 nt, Artificial Sequence
  Synthetic
aaggaauccuagaggauugcugg

SEQ ID NO: 42562 - RNA, 24 nt, Artificial Sequence
  Synthetic
gaaggaauccuagaggauugcugg

SEQ ID NO: 42563 - RNA, 18 nt, Artificial Sequence
  Synthetic
uaccuuguuggccucugg

SEQ ID NO: 42564 - RNA, 19 nt, Artificial Sequence
  Synthetic
cuaccuuguuggccucugg

SEQ ID NO: 42565 - RNA, 20 nt, Artificial Sequence
  Synthetic
ccuaccuuguuggccucugg

SEQ ID NO: 42566 - RNA, 21 nt, Artificial Sequence
  Synthetic
uccuaccuuguuggccucugg

SEQ ID NO: 42567 - RNA, 22 nt, Artificial Sequence
  Synthetic
cuccuaccuuguuggccucugg

SEQ ID NO: 42568 - RNA, 23 nt, Artificial Sequence
  Synthetic
acuccuaccuuguuggccucugg

SEQ ID NO: 42569 - RNA, 24 nt, Artificial Sequence
  Synthetic
aacuccuaccuuguuggccucugg

SEQ ID NO: 42570 - RNA, 18 nt, Artificial Sequence
  Synthetic
uauguaaauaaugucugg

SEQ ID NO: 42571 - RNA, 19 nt, Artificial Sequence
  Synthetic
guauguaaauaaugucugg

SEQ ID NO: 42572 - RNA, 20 nt, Artificial Sequence
  Synthetic
gguauguaaauaaugucugg

SEQ ID NO: 42573 - RNA, 21 nt, Artificial Sequence
  Synthetic
ggguauguaaauaaugucugg

SEQ ID NO: 42574 - RNA, 22 nt, Artificial Sequence
  Synthetic
aggguauguaaauaaugucugg

SEQ ID NO: 42575 - RNA, 23 nt, Artificial Sequence
  Synthetic
aaggguauguaaauaaugucugg

SEQ ID NO: 42576 - RNA, 24 nt, Artificial Sequence
  Synthetic
aaaggguauguaaauaaugucugg

SEQ ID NO: 42577 - RNA, 18 nt, Artificial Sequence
  Synthetic
cugaaagccagacagugg

SEQ ID NO: 42578 - RNA, 19 nt, Artificial Sequence
  Synthetic
gcugaaagccagacagugg

SEQ ID NO: 42579 - RNA, 20 nt, Artificial Sequence
  Synthetic
agcugaaagccagacagugg

SEQ ID NO: 42580 - RNA, 21 nt, Artificial Sequence
  Synthetic
uagcugaaagccagacagugg

SEQ ID NO: 42581 - RNA, 22 nt, Artificial Sequence
  Synthetic
auagcugaaagccagacagugg

SEQ ID NO: 42582 - RNA, 23 nt, Artificial Sequence
  Synthetic
uauagcugaaagccagacagugg

SEQ ID NO: 42583 - RNA, 24 nt, Artificial Sequence
  Synthetic
auauagcugaaagccagacagugg

SEQ ID NO: 42584 - RNA, 18 nt, Artificial Sequence
  Synthetic
augacugucucuuagugg

SEQ ID NO: 42585 - RNA, 19 nt, Artificial Sequence
  Synthetic
gaugacugucucuuagugg

SEQ ID NO: 42586 - RNA, 20 nt, Artificial Sequence
  Synthetic
ggaugacugucucuuagugg

SEQ ID NO: 42587 - RNA, 21 nt, Artificial Sequence
  Synthetic
aggaugacugucucuuagugg

SEQ ID NO: 42588 - RNA, 22 nt, Artificial Sequence
  Synthetic
gaggaugacugucucuuagugg

SEQ ID NO: 42589 - RNA, 23 nt, Artificial Sequence
  Synthetic
ugaggaugacugucucuuagugg

SEQ ID NO: 42590 - RNA, 24 nt, Artificial Sequence
  Synthetic
cugaggaugacugucucuuagugg

SEQ ID NO: 42591 - RNA, 18 nt, Artificial Sequence
  Synthetic
agggucccguacuggugg

SEQ ID NO: 42592 - RNA, 19 nt, Artificial Sequence
  Synthetic
cagggucccguacuggugg

SEQ ID NO: 42593 - RNA, 20 nt, Artificial Sequence
  Synthetic
gcagggucccguacuggugg

SEQ ID NO: 42594 - RNA, 21 nt, Artificial Sequence
  Synthetic
ugcagggucccguacuggugg

SEQ ID NO: 42595 - RNA, 22 nt, Artificial Sequence
  Synthetic
uugcagggucccguacuggugg

SEQ ID NO: 42596 - RNA, 23 nt, Artificial Sequence
  Synthetic
uuugcagggucccguacuggugg

SEQ ID NO: 42597 - RNA, 24 nt, Artificial Sequence
  Synthetic
uuuugcagggucccguacuggugg

SEQ ID NO: 42598 - RNA, 18 nt, Artificial Sequence
  Synthetic
gcaggguaaccacauugg

SEQ ID NO: 42599 - RNA, 19 nt, Artificial Sequence
  Synthetic
ggcaggguaaccacauugg

SEQ ID NO: 42600 - RNA, 20 nt, Artificial Sequence
  Synthetic
aggcaggguaaccacauugg

SEQ ID NO: 42601 - RNA, 21 nt, Artificial Sequence
  Synthetic
aaggcaggguaaccacauugg

SEQ ID NO: 42602 - RNA, 22 nt, Artificial Sequence
  Synthetic
uaaggcaggguaaccacauugg

SEQ ID NO: 42603 - RNA, 23 nt, Artificial Sequence
  Synthetic
uuaaggcaggguaaccacauugg

SEQ ID NO: 42604 - RNA, 24 nt, Artificial Sequence
  Synthetic
auuaaggcaggguaaccacauugg

SEQ ID NO: 42605 - RNA, 18 nt, Artificial Sequence
  Synthetic
ucccugacugacgauugg

SEQ ID NO: 42606 - RNA, 19 nt, Artificial Sequence
  Synthetic
cucccugacugacgauugg

SEQ ID NO: 42607 - RNA, 20 nt, Artificial Sequence
  Synthetic
ccucccugacugacgauugg

SEQ ID NO: 42608 - RNA, 21 nt, Artificial Sequence
  Synthetic
gccucccugacugacgauugg

SEQ ID NO: 42609 - RNA, 22 nt, Artificial Sequence
  Synthetic
ugccucccugacugacgauugg

SEQ ID NO: 42610 - RNA, 23 nt, Artificial Sequence
  Synthetic
cugccucccugacugacgauugg

SEQ ID NO: 42611 - RNA, 24 nt, Artificial Sequence
  Synthetic
gcugccucccugacugacgauugg

SEQ ID NO: 42612 - RNA, 18 nt, Artificial Sequence
  Synthetic
gcgucagcaaacacuugg

SEQ ID NO: 42613 - RNA, 19 nt, Artificial Sequence
  Synthetic
ugcgucagcaaacacuugg

SEQ ID NO: 42614 - RNA, 20 nt, Artificial Sequence
  Synthetic
uugcgucagcaaacacuugg

SEQ ID NO: 42615 - RNA, 21 nt, Artificial Sequence
  Synthetic
guugcgucagcaaacacuugg

SEQ ID NO: 42616 - RNA, 22 nt, Artificial Sequence
  Synthetic
gguugcgucagcaaacacuugg

SEQ ID NO: 42617 - RNA, 23 nt, Artificial Sequence
  Synthetic
ggguugcgucagcaaacacuugg

SEQ ID NO: 42618 - RNA, 24 nt, Artificial Sequence
  Synthetic
gggguugcgucagcaaacacuugg

SEQ ID NO: 42619 - RNA, 18 nt, Artificial Sequence
  Synthetic
aaaggccuuauaaguugg

SEQ ID NO: 42620 - RNA, 19 nt, Artificial Sequence
  Synthetic
gaaaggccuuauaaguugg

SEQ ID NO: 42621 - RNA, 20 nt, Artificial Sequence
  Synthetic
agaaaggccuuauaaguugg

SEQ ID NO: 42622 - RNA, 21 nt, Artificial Sequence
  Synthetic
gagaaaggccuuauaaguugg

SEQ ID NO: 42623 - RNA, 22 nt, Artificial Sequence
  Synthetic
agagaaaggccuuauaaguugg

SEQ ID NO: 42624 - RNA, 23 nt, Artificial Sequence
  Synthetic
cagagaaaggccuuauaaguugg

SEQ ID NO: 42625 - RNA, 24 nt, Artificial Sequence
  Synthetic
acagagaaaggccuuauaaguugg

SEQ ID NO: 42626 - RNA, 18 nt, Artificial Sequence
  Synthetic
augcaaauggauauuugg

SEQ ID NO: 42627 - RNA, 19 nt, Artificial Sequence
  Synthetic
gaugcaaauggauauuugg

SEQ ID NO: 42628 - RNA, 20 nt, Artificial Sequence
  Synthetic
ugaugcaaauggauauuugg

SEQ ID NO: 42629 - RNA, 21 nt, Artificial Sequence
  Synthetic
uugaugcaaauggauauuugg

SEQ ID NO: 42630 - RNA, 22 nt, Artificial Sequence
  Synthetic
cuugaugcaaauggauauuugg

SEQ ID NO: 42631 - RNA, 23 nt, Artificial Sequence
  Synthetic
ucuugaugcaaauggauauuugg

SEQ ID NO: 42632 - RNA, 24 nt, Artificial Sequence
  Synthetic
gucuugaugcaaauggauauuugg

SEQ ID NO: 42633 - RNA, 18 nt, Artificial Sequence
  Synthetic
auauuuaguagaguuugg

SEQ ID NO: 42634 - RNA, 19 nt, Artificial Sequence
  Synthetic
aauauuuaguagaguuugg

SEQ ID NO: 42635 - RNA, 20 nt, Artificial Sequence
  Synthetic
aaauauuuaguagaguuugg

SEQ ID NO: 42636 - RNA, 21 nt, Artificial Sequence
  Synthetic
uaaauauuuaguagaguuugg

SEQ ID NO: 42637 - RNA, 22 nt, Artificial Sequence
  Synthetic
guaaauauuuaguagaguuugg

SEQ ID NO: 42638 - RNA, 23 nt, Artificial Sequence
  Synthetic
gguaaauauuuaguagaguuugg

SEQ ID NO: 42639 - RNA, 24 nt, Artificial Sequence
  Synthetic
ugguaaauauuuaguagaguuugg

SEQ ID NO: 42640 - RNA, 18 nt, Artificial Sequence
  Synthetic
  misc_feature (17)..(17): n is a, c, g, or u
gccguugccuagcaacng

SEQ ID NO: 42641 - RNA, 19 nt, Artificial Sequence
  Synthetic
  misc_feature (18)..(18): n is a, c, g, or u
ggccguugccuagcaacng

SEQ ID NO: 42642 - RNA, 20 nt, Artificial Sequence
  Synthetic
  misc_feature (19)..(19): n is a, c, g, or u
gggccguugccuagcaacng

SEQ ID NO: 42643 - RNA, 21 nt, Artificial Sequence
  Synthetic
  misc_feature (20)..(20): n is a, c, g, or u
cgggccguugccuagcaacng

SEQ ID NO: 42644 - RNA, 22 nt, Artificial Sequence
  Synthetic
  misc_feature (21)..(21): n is a, c, g, or u
ccgggccguugccuagcaacng

SEQ ID NO: 42645 - RNA, 23 nt, Artificial Sequence
  Synthetic
  misc_feature (22)..(22): n is a, c, g, or u
accgggccguugccuagcaacng

SEQ ID NO: 42646 - RNA, 24 nt, Artificial Sequence
  Synthetic
  misc_feature (23)..(23): n is a, c, g, or u
gaccgggccguugccuagcaacng

SEQ ID NO: 42647 - RNA, 18 nt, Artificial Sequence
  Synthetic
  misc_feature (17)..(17): n is a, c, g, or u
uauuacccacccaggung

SEQ ID NO: 42648 - RNA, 19 nt, Artificial Sequence
  Synthetic
  misc_feature (18)..(18): n is a, c, g, or u
uuauuacccacccaggung

SEQ ID NO: 42649 - RNA, 20 nt, Artificial Sequence
  Synthetic
  misc_feature (19)..(19): n is a, c, g, or u
auuauuacccacccaggung

SEQ ID NO: 42650 - RNA, 21 nt, Artificial Sequence
  Synthetic
  misc_feature (20)..(20): n is a, c, g, or u
aauuauuacccacccaggung

SEQ ID NO: 42651 - RNA, 22 nt, Artificial Sequence
  Synthetic
  misc_feature (21)..(21): n is a, c, g, or u
aaauuauuacccacccaggung

SEQ ID NO: 42652 - RNA, 23 nt, Artificial Sequence
  Synthetic
  misc_feature (22)..(22): n is a, c, g, or u
caaauuauuacccacccaggung

SEQ ID NO: 42653 - RNA, 24 nt, Artificial Sequence
  Synthetic
  misc_feature (23)..(23): n is a, c, g, or u
ccaaauuauuacccacccaggung

SEQ ID NO: 42654 - RNA, 18 nt, Artificial Sequence
  Synthetic
aaaguaagacaggaaaug

SEQ ID NO: 42655 - RNA, 19 nt, Artificial Sequence
  Synthetic
aaaaguaagacaggaaaug

SEQ ID NO: 42656 - RNA, 20 nt, Artificial Sequence
  Synthetic
caaaaguaagacaggaaaug

SEQ ID NO: 42657 - RNA, 21 nt, Artificial Sequence
  Synthetic
ccaaaaguaagacaggaaaug

SEQ ID NO: 42658 - RNA, 22 nt, Artificial Sequence
  Synthetic
cccaaaaguaagacaggaaaug

SEQ ID NO: 42659 - RNA, 23 nt, Artificial Sequence
  Synthetic
ucccaaaaguaagacaggaaaug

SEQ ID NO: 42660 - RNA, 24 nt, Artificial Sequence
  Synthetic
cucccaaaaguaagacaggaaaug

SEQ ID NO: 42661 - RNA, 18 nt, Artificial Sequence
  Synthetic
auggugaggcgaacaaug

SEQ ID NO: 42662 - RNA, 19 nt, Artificial Sequence
  Synthetic
uauggugaggcgaacaaug

SEQ ID NO: 42663 - RNA, 20 nt, Artificial Sequence
  Synthetic
guauggugaggcgaacaaug

SEQ ID NO: 42664 - RNA, 21 nt, Artificial Sequence
  Synthetic
uguauggugaggcgaacaaug

SEQ ID NO: 42665 - RNA, 22 nt, Artificial Sequence
  Synthetic
cuguauggugaggcgaacaaug

SEQ ID NO: 42666 - RNA, 23 nt, Artificial Sequence
  Synthetic
gcuguauggugaggcgaacaaug

SEQ ID NO: 42667 - RNA, 24 nt, Artificial Sequence
  Synthetic
ugcuguauggugaggcgaacaaug

SEQ ID NO: 42668 - RNA, 18 nt, Artificial Sequence
  Synthetic
ucuuuauaagggucaaug

SEQ ID NO: 42669 - RNA, 19 nt, Artificial Sequence
  Synthetic
uucuuuauaagggucaaug

SEQ ID NO: 42670 - RNA, 20 nt, Artificial Sequence
  Synthetic
auucuuuauaagggucaaug

SEQ ID NO: 42671 - RNA, 21 nt, Artificial Sequence
  Synthetic
aauucuuuauaagggucaaug

SEQ ID NO: 42672 - RNA, 22 nt, Artificial Sequence
  Synthetic
aaauucuuuauaagggucaaug

SEQ ID NO: 42673 - RNA, 23 nt, Artificial Sequence
  Synthetic
caaauucuuuauaagggucaaug

SEQ ID NO: 42674 - RNA, 24 nt, Artificial Sequence
  Synthetic
ccaaauucuuuauaagggucaaug

SEQ ID NO: 42675 - RNA, 18 nt, Artificial Sequence
  Synthetic
ucuggucuggaaguaaug

SEQ ID NO: 42676 - RNA, 19 nt, Artificial Sequence
  Synthetic
gucuggucuggaaguaaug

SEQ ID NO: 42677 - RNA, 20 nt, Artificial Sequence
  Synthetic
ugucuggucuggaaguaaug

SEQ ID NO: 42678 - RNA, 21 nt, Artificial Sequence
  Synthetic
augucuggucuggaaguaaug

SEQ ID NO: 42679 - RNA, 22 nt, Artificial Sequence
  Synthetic
aaugucuggucuggaaguaaug

SEQ ID NO: 42680 - RNA, 23 nt, Artificial Sequence
  Synthetic
uaaugucuggucuggaaguaaug

SEQ ID NO: 42681 - RNA, 24 nt, Artificial Sequence
  Synthetic
auaaugucuggucuggaaguaaug

SEQ ID NO: 42682 - RNA, 18 nt, Artificial Sequence
  Synthetic
  misc_feature (11)..(11): n is a, c, g, or u
cuugaacagunggacaug

SEQ ID NO: 42683 - RNA, 19 nt, Artificial Sequence
  Synthetic
  misc_feature (12)..(12): n is a, c, g, or u
gcuugaacagunggacaug

SEQ ID NO: 42684 - RNA, 20 nt, Artificial Sequence
  Synthetic
  misc_feature (13)..(13): n is a, c, g, or u
ggcuugaacagunggacaug

SEQ ID NO: 42685 - RNA, 21 nt, Artificial Sequence
  Synthetic
  misc_feature (14)..(14): n is a, c, g, or u
aggcuugaacagunggacaug

SEQ ID NO: 42686 - RNA, 22 nt, Artificial Sequence
  Synthetic
  misc_feature (15)..(15): n is a, c, g, or u
gaggcuugaacagunggacaug

SEQ ID NO: 42687 - RNA, 23 nt, Artificial Sequence
  Synthetic
  misc_feature (16)..(16): n is a, c, g, or u
ggaggcuugaacagunggacaug

SEQ ID NO: 42688 - RNA, 24 nt, Artificial Sequence
  Synthetic
  misc_feature (17)..(17): n is a, c, g, or u
uggaggcuugaacagunggacaug

SEQ ID NO: 42689 - RNA, 18 nt, Artificial Sequence
  Synthetic
cacagccuagcagccaug

SEQ ID NO: 42690 - RNA, 19 nt, Artificial Sequence
  Synthetic
gcacagccuagcagccaug

SEQ ID NO: 42691 - RNA, 20 nt, Artificial Sequence
  Synthetic
agcacagccuagcagccaug

SEQ ID NO: 42692 - RNA, 21 nt, Artificial Sequence
  Synthetic
cagcacagccuagcagccaug

SEQ ID NO: 42693 - RNA, 22 nt, Artificial Sequence
  Synthetic
gcagcacagccuagcagccaug

SEQ ID NO: 42694 - RNA, 23 nt, Artificial Sequence
  Synthetic
ggcagcacagccuagcagccaug

SEQ ID NO: 42695 - RNA, 24 nt, Artificial Sequence
  Synthetic
uggcagcacagccuagcagccaug

SEQ ID NO: 42696 - RNA, 18 nt, Artificial Sequence
  Synthetic
uugcgaaagcccaagaug

SEQ ID NO: 42697 - RNA, 19 nt, Artificial Sequence
  Synthetic
uuugcgaaagcccaagaug

SEQ ID NO: 42698 - RNA, 20 nt, Artificial Sequence
  Synthetic
uuuugcgaaagcccaagaug

SEQ ID NO: 42699 - RNA, 21 nt, Artificial Sequence
  Synthetic
auuuugcgaaagcccaagaug

SEQ ID NO: 42700 - RNA, 22 nt, Artificial Sequence
  Synthetic
uauuuugcgaaagcccaagaug

SEQ ID NO: 42701 - RNA, 23 nt, Artificial Sequence
  Synthetic
guauuuugcgaaagcccaagaug

SEQ ID NO: 42702 - RNA, 24 nt, Artificial Sequence
  Synthetic
gguauuuugcgaaagcccaagaug

SEQ ID NO: 42703 - RNA, 18 nt, Artificial Sequence
  Synthetic
cacacgguccggcagaug

SEQ ID NO: 42704 - RNA, 19 nt, Artificial Sequence
  Synthetic
gcacacgguccggcagaug

SEQ ID NO: 42705 - RNA, 20 nt, Artificial Sequence
  Synthetic
ugcacacgguccggcagaug

SEQ ID NO: 42706 - RNA, 21 nt, Artificial Sequence
  Synthetic
gugcacacgguccggcagaug

SEQ ID NO: 42707 - RNA, 22 nt, Artificial Sequence
  Synthetic
agugcacacgguccggcagaug

SEQ ID NO: 42708 - RNA, 23 nt, Artificial Sequence
  Synthetic
aagugcacacgguccggcagaug

SEQ ID NO: 42709 - RNA, 24 nt, Artificial Sequence
  Synthetic
gaagugcacacgguccggcagaug

SEQ ID NO: 42710 - RNA, 18 nt, Artificial Sequence
  Synthetic
  misc_feature (8)..(8): n is a, c, g, or u
uaacugcnuuggcagaug

SEQ ID NO: 42711 - RNA, 19 nt, Artificial Sequence
  Synthetic
  misc_feature (9)..(9): n is a, c, g, or u
auaacugcnuuggcagaug

SEQ ID NO: 42712 - RNA, 20 nt, Artificial Sequence
  Synthetic
  misc_feature (10)..(10): n is a, c, g, or u
uauaacugcnuuggcagaug

SEQ ID NO: 42713 - RNA, 21 nt, Artificial Sequence
  Synthetic
  misc_feature (11)..(11): n is a, c, g, or u
auauaacugcnuuggcagaug

SEQ ID NO: 42714 - RNA, 22 nt, Artificial Sequence
  Synthetic
  misc_feature (12)..(12): n is a, c, g, or u
uauauaacugcnuuggcagaug

SEQ ID NO: 42715 - RNA, 23 nt, Artificial Sequence
  Synthetic
  misc_feature (13)..(13): n is a, c, g, or u
uuauauaacugcnuuggcagaug

SEQ ID NO: 42716 - RNA, 24 nt, Artificial Sequence
  Synthetic
  misc_feature (14)..(14): n is a, c, g, or u
cuuauauaacugcnuuggcagaug

SEQ ID NO: 42717 - RNA, 18 nt, Artificial Sequence
  Synthetic
ggacaugaacaagagaug

SEQ ID NO: 42718 - RNA, 19 nt, Artificial Sequence
  Synthetic
  misc_feature (1)..(1): n is a, c, g, or u
nggacaugaacaagagaug

SEQ ID NO: 42719 - RNA, 20 nt, Artificial Sequence
  Synthetic
  misc_feature (2)..(2): n is a, c, g, or u
unggacaugaacaagagaug

SEQ ID NO: 42720 - RNA, 21 nt, Artificial Sequence
  Synthetic
  misc_feature (3)..(3): n is a, c, g, or u
gunggacaugaacaagagaug

SEQ ID NO: 42721 - RNA, 22 nt, Artificial Sequence
  Synthetic
  misc_feature (4)..(4): n is a, c, g, or u
agunggacaugaacaagagaug

SEQ ID NO: 42722 - RNA, 23 nt, Artificial Sequence
  Synthetic
  misc_feature (5)..(5): n is a, c, g, or u
cagunggacaugaacaagagaug

SEQ ID NO: 42723 - RNA, 24 nt, Artificial Sequence
  Synthetic
  misc_feature (6)..(6): n is a, c, g, or u
acagunggacaugaacaagagaug

SEQ ID NO: 42724 - RNA, 18 nt, Artificial Sequence
  Synthetic
gagaagauugacgagaug

SEQ ID NO: 42725 - RNA, 19 nt, Artificial Sequence
  Synthetic
ggagaagauugacgagaug

SEQ ID NO: 42726 - RNA, 20 nt, Artificial Sequence
  Synthetic
uggagaagauugacgagaug

SEQ ID NO: 42727 - RNA, 21 nt, Artificial Sequence
  Synthetic
cuggagaagauugacgagaug

SEQ ID NO: 42728 - RNA, 22 nt, Artificial Sequence
  Synthetic
ccuggagaagauugacgagaug

SEQ ID NO: 42729 - RNA, 23 nt, Artificial Sequence
  Synthetic
uccuggagaagauugacgagaug

SEQ ID NO: 42730 - RNA, 24 nt, Artificial Sequence
  Synthetic
auccuggagaagauugacgagaug

SEQ ID NO: 42731 - RNA, 18 nt, Artificial Sequence
  Synthetic
  misc_feature (12)..(12): n is a, c, g, or u
augcgcugaugnccgaug

SEQ ID NO: 42732 - RNA, 19 nt, Artificial Sequence
  Synthetic
  misc_feature (13)..(13): n is a, c, g, or u
caugcgcugaugnccgaug

SEQ ID NO: 42733 - RNA, 20 nt, Artificial Sequence
  Synthetic
  misc_feature (14)..(14): n is a, c, g, or u
gcaugcgcugaugnccgaug

SEQ ID NO: 42734 - RNA, 21 nt, Artificial Sequence
  Synthetic
  misc_feature (15)..(15): n is a, c, g, or u
cgcaugcgcugaugnccgaug

SEQ ID NO: 42735 - RNA, 22 nt, Artificial Sequence
  Synthetic
  misc_feature (16)..(16): n is a, c, g, or u
acgcaugcgcugaugnccgaug

SEQ ID NO: 42736 - RNA, 23 nt, Artificial Sequence
  Synthetic
  misc_feature (17)..(17): n is a, c, g, or u
cacgcaugcgcugaugnccgaug

SEQ ID NO: 42737 - RNA, 24 nt, Artificial Sequence
  Synthetic
  misc_feature (18)..(18): n is a, c, g, or u
ccacgcaugcgcugaugnccgaug

SEQ ID NO: 42738 - RNA, 18 nt, Artificial Sequence
  Synthetic
aggcauagcagcaggaug

SEQ ID NO: 42739 - RNA, 19 nt, Artificial Sequence
  Synthetic
gaggcauagcagcaggaug

SEQ ID NO: 42740 - RNA, 20 nt, Artificial Sequence
  Synthetic
ugaggcauagcagcaggaug

SEQ ID NO: 42741 - RNA, 21 nt, Artificial Sequence
  Synthetic
augaggcauagcagcaggaug

SEQ ID NO: 42742 - RNA, 22 nt, Artificial Sequence
  Synthetic
gaugaggcauagcagcaggaug

SEQ ID NO: 42743 - RNA, 23 nt, Artificial Sequence
  Synthetic
agaugaggcauagcagcaggaug

SEQ ID NO: 42744 - RNA, 24 nt, Artificial Sequence
  Synthetic
aagaugaggcauagcagcaggaug

SEQ ID NO: 42745 - RNA, 18 nt, Artificial Sequence
  Synthetic
aggaugaagaggaauaug

SEQ ID NO: 42746 - RNA, 19 nt, Artificial Sequence
  Synthetic
caggaugaagaggaauaug

SEQ ID NO: 42747 - RNA, 20 nt, Artificial Sequence
  Synthetic
gcaggaugaagaggaauaug

SEQ ID NO: 42748 - RNA, 21 nt, Artificial Sequence
  Synthetic
agcaggaugaagaggaauaug

SEQ ID NO: 42749 - RNA, 22 nt, Artificial Sequence
  Synthetic
cagcaggaugaagaggaauaug

SEQ ID NO: 42750 - RNA, 23 nt, Artificial Sequence
  Synthetic
gcagcaggaugaagaggaauaug

SEQ ID NO: 42751 - RNA, 24 nt, Artificial Sequence
  Synthetic
agcagcaggaugaagaggaauaug

SEQ ID NO: 42752 - RNA, 18 nt, Artificial Sequence
  Synthetic
agccaaaaaggccauaug

SEQ ID NO: 42753 - RNA, 19 nt, Artificial Sequence
  Synthetic
aagccaaaaaggccauaug

SEQ ID NO: 42754 - RNA, 20 nt, Artificial Sequence
  Synthetic
uaagccaaaaaggccauaug

SEQ ID NO: 42755 - RNA, 21 nt, Artificial Sequence
  Synthetic
cuaagccaaaaaggccauaug

SEQ ID NO: 42756 - RNA, 22 nt, Artificial Sequence
  Synthetic
ucuaagccaaaaaggccauaug

SEQ ID NO: 42757 - RNA, 23 nt, Artificial Sequence
  Synthetic
gucuaagccaaaaaggccauaug

SEQ ID NO: 42758 - RNA, 24 nt, Artificial Sequence
  Synthetic
ugucuaagccaaaaaggccauaug

SEQ ID NO: 42759 - RNA, 18 nt, Artificial Sequence
  Synthetic
uugccugagugcuguaug

SEQ ID NO: 42760 - RNA, 19 nt, Artificial Sequence
  Synthetic
cuugccugagugcuguaug

SEQ ID NO: 42761 - RNA, 20 nt, Artificial Sequence
  Synthetic
gcuugccugagugcuguaug

SEQ ID NO: 42762 - RNA, 21 nt, Artificial Sequence
  Synthetic
ugcuugccugagugcuguaug

SEQ ID NO: 42763 - RNA, 22 nt, Artificial Sequence
  Synthetic
uugcuugccugagugcuguaug

SEQ ID NO: 42764 - RNA, 23 nt, Artificial Sequence
  Synthetic
auugcuugccugagugcuguaug

SEQ ID NO: 42765 - RNA, 24 nt, Artificial Sequence
  Synthetic
  misc_feature (1)..(1): n is a, c, g, or u
nauugcuugccugagugcuguaug

SEQ ID NO: 42766 - RNA, 18 nt, Artificial Sequence
  Synthetic
aagcccuacgaaccacug

SEQ ID NO: 42767 - RNA, 19 nt, Artificial Sequence
  Synthetic
aaagcccuacgaaccacug

SEQ ID NO: 42768 - RNA, 20 nt, Artificial Sequence
  Synthetic
gaaagcccuacgaaccacug

SEQ ID NO: 42769 - RNA, 21 nt, Artificial Sequence
  Synthetic
ggaaagcccuacgaaccacug

SEQ ID NO: 42770 - RNA, 22 nt, Artificial Sequence
  Synthetic
gggaaagcccuacgaaccacug

SEQ ID NO: 42771 - RNA, 23 nt, Artificial Sequence
  Synthetic
ggggaaagcccuacgaaccacug

SEQ ID NO: 42772 - RNA, 24 nt, Artificial Sequence
  Synthetic
gggggaaagcccuacgaaccacug

SEQ ID NO: 42773 - RNA, 18 nt, Artificial Sequence
  Synthetic
uucguuucucauuuacug

SEQ ID NO: 42774 - RNA, 19 nt, Artificial Sequence
  Synthetic
cuucguuucucauuuacug

SEQ ID NO: 42775 - RNA, 20 nt, Artificial Sequence
  Synthetic
ucuucguuucucauuuacug

SEQ ID NO: 42776 - RNA, 21 nt, Artificial Sequence
  Synthetic
aucuucguuucucauuuacug

SEQ ID NO: 42777 - RNA, 22 nt, Artificial Sequence
  Synthetic
aaucuucguuucucauuuacug

SEQ ID NO: 42778 - RNA, 23 nt, Artificial Sequence
  Synthetic
uaaucuucguuucucauuuacug

SEQ ID NO: 42779 - RNA, 24 nt, Artificial Sequence
  Synthetic
uuaaucuucguuucucauuuacug

SEQ ID NO: 42780 - RNA, 18 nt, Artificial Sequence
  Synthetic
gaguaggcugccucccug

SEQ ID NO: 42781 - RNA, 19 nt, Artificial Sequence
  Synthetic
ggaguaggcugccucccug

SEQ ID NO: 42782 - RNA, 20 nt, Artificial Sequence
  Synthetic
gggaguaggcugccucccug

SEQ ID NO: 42783 - RNA, 21 nt, Artificial Sequence
  Synthetic
ugggaguaggcugccucccug

SEQ ID NO: 42784 - RNA, 22 nt, Artificial Sequence
  Synthetic
augggaguaggcugccucccug

SEQ ID NO: 42785 - RNA, 23 nt, Artificial Sequence
  Synthetic
gaugggaguaggcugccucccug

SEQ ID NO: 42786 - RNA, 24 nt, Artificial Sequence
  Synthetic
agaugggaguaggcugccucccug

SEQ ID NO: 42787 - RNA, 18 nt, Artificial Sequence
  Synthetic
cgagaaaguaaaagccug

SEQ ID NO: 42788 - RNA, 19 nt, Artificial Sequence
  Synthetic
gcgagaaaguaaaagccug

SEQ ID NO: 42789 - RNA, 20 nt, Artificial Sequence
  Synthetic
ggcgagaaaguaaaagccug

SEQ ID NO: 42790 - RNA, 21 nt, Artificial Sequence
  Synthetic
uggcgagaaaguaaaagccug

SEQ ID NO: 42791 - RNA, 22 nt, Artificial Sequence
  Synthetic
uuggcgagaaaguaaaagccug

SEQ ID NO: 42792 - RNA, 23 nt, Artificial Sequence
  Synthetic
guuggcgagaaaguaaaagccug

SEQ ID NO: 42793 - RNA, 24 nt, Artificial Sequence
  Synthetic
aguuggcgagaaaguaaaagccug

SEQ ID NO: 42794 - RNA, 18 nt, Artificial Sequence
  Synthetic
gcaggguccccaauccug

SEQ ID NO: 42795 - RNA, 19 nt, Artificial Sequence
  Synthetic
ugcaggguccccaauccug

SEQ ID NO: 42796 - RNA, 20 nt, Artificial Sequence
  Synthetic
gugcaggguccccaauccug

SEQ ID NO: 42797 - RNA, 21 nt, Artificial Sequence
  Synthetic
ggugcaggguccccaauccug

SEQ ID NO: 42798 - RNA, 22 nt, Artificial Sequence
  Synthetic
cggugcaggguccccaauccug

SEQ ID NO: 42799 - RNA, 23 nt, Artificial Sequence
  Synthetic
ucggugcaggguccccaauccug

SEQ ID NO: 42800 - RNA, 24 nt, Artificial Sequence
  Synthetic
uucggugcaggguccccaauccug

SEQ ID NO: 42801 - RNA, 18 nt, Artificial Sequence
  Synthetic
ccgcuggauucagcgcug

SEQ ID NO: 42802 - RNA, 19 nt, Artificial Sequence
  Synthetic
uccgcuggauucagcgcug

SEQ ID NO: 42803 - RNA, 20 nt, Artificial Sequence
  Synthetic
guccgcuggauucagcgcug

SEQ ID NO: 42804 - RNA, 18 nt, Artificial Sequence
  Synthetic
gagcuugguggaaugcug

SEQ ID NO: 42805 - RNA, 19 nt, Artificial Sequence
  Synthetic
agagcuugguggaaugcug

SEQ ID NO: 42806 - RNA, 20 nt, Artificial Sequence
  Synthetic
uagagcuugguggaaugcug

SEQ ID NO: 42807 - RNA, 21 nt, Artificial Sequence
  Synthetic
guagagcuugguggaaugcug

SEQ ID NO: 42808 - RNA, 22 nt, Artificial Sequence
  Synthetic
uguagagcuugguggaaugcug

SEQ ID NO: 42809 - RNA, 23 nt, Artificial Sequence
  Synthetic
uuguagagcuugguggaaugcug

SEQ ID NO: 42810 - RNA, 24 nt, Artificial Sequence
  Synthetic
uuuguagagcuugguggaaugcug

SEQ ID NO: 42811 - RNA, 18 nt, Artificial Sequence
  Synthetic
caggaggcggaucugcug

SEQ ID NO: 42812 - RNA, 19 nt, Artificial Sequence
  Synthetic
gcaggaggcggaucugcug

SEQ ID NO: 42813 - RNA, 20 nt, Artificial Sequence
  Synthetic
ggcaggaggcggaucugcug

SEQ ID NO: 42814 - RNA, 21 nt, Artificial Sequence
  Synthetic
aggcaggaggcggaucugcug

SEQ ID NO: 42815 - RNA, 22 nt, Artificial Sequence
  Synthetic
gaggcaggaggcggaucugcug

SEQ ID NO: 42816 - RNA, 23 nt, Artificial Sequence
  Synthetic
ggaggcaggaggcggaucugcug

SEQ ID NO: 42817 - RNA, 24 nt, Artificial Sequence
  Synthetic
uggaggcaggaggcggaucugcug

SEQ ID NO: 42818 - RNA, 18 nt, Artificial Sequence
  Synthetic
aauccuagaggauugcug

SEQ ID NO: 42819 - RNA, 19 nt, Artificial Sequence
  Synthetic
gaauccuagaggauugcug

SEQ ID NO: 42820 - RNA, 20 nt, Artificial Sequence
  Synthetic
ggaauccuagaggauugcug

SEQ ID NO: 42821 - RNA, 21 nt, Artificial Sequence
  Synthetic
aggaauccuagaggauugcug

SEQ ID NO: 42822 - RNA, 22 nt, Artificial Sequence
  Synthetic
aaggaauccuagaggauugcug

SEQ ID NO: 42823 - RNA, 23 nt, Artificial Sequence
  Synthetic
gaaggaauccuagaggauugcug

SEQ ID NO: 42824 - RNA, 24 nt, Artificial Sequence
  Synthetic
ggaaggaauccuagaggauugcug

SEQ ID NO: 42825 - RNA, 18 nt, Artificial Sequence
  Synthetic
gaguuugggaaaaaucug

SEQ ID NO: 42826 - RNA, 19 nt, Artificial Sequence
  Synthetic
agaguuugggaaaaaucug

SEQ ID NO: 42827 - RNA, 20 nt, Artificial Sequence
  Synthetic
uagaguuugggaaaaaucug

SEQ ID NO: 42828 - RNA, 21 nt, Artificial Sequence
  Synthetic
guagaguuugggaaaaaucug

SEQ ID NO: 42829 - RNA, 22 nt, Artificial Sequence
  Synthetic
aguagaguuugggaaaaaucug

SEQ ID NO: 42830 - RNA, 23 nt, Artificial Sequence
  Synthetic
uaguagaguuugggaaaaaucug

SEQ ID NO: 42831 - RNA, 24 nt, Artificial Sequence
  Synthetic
uuaguagaguuugggaaaaaucug

SEQ ID NO: 42832 - RNA, 18 nt, Artificial Sequence
  Synthetic
cuaccuuguuggccucug

SEQ ID NO: 42833 - RNA, 19 nt, Artificial Sequence
  Synthetic
ccuaccuuguuggccucug

SEQ ID NO: 42834 - RNA, 20 nt, Artificial Sequence
  Synthetic
uccuaccuuguuggccucug

SEQ ID NO: 42835 - RNA, 21 nt, Artificial Sequence
  Synthetic
cuccuaccuuguuggccucug

SEQ ID NO: 42836 - RNA, 22 nt, Artificial Sequence
  Synthetic
acuccuaccuuguuggccucug

SEQ ID NO: 42837 - RNA, 23 nt, Artificial Sequence
  Synthetic
aacuccuaccuuguuggccucug

SEQ ID NO: 42838 - RNA, 24 nt, Artificial Sequence
  Synthetic
caacuccuaccuuguuggccucug

SEQ ID NO: 42839 - RNA, 18 nt, Artificial Sequence
  Synthetic
gauugagaucuucgucug

SEQ ID NO: 42840 - RNA, 19 nt, Artificial Sequence
  Synthetic
cgauugagaucuucgucug

SEQ ID NO: 42841 - RNA, 20 nt, Artificial Sequence
  Synthetic
gcgauugagaucuucgucug

SEQ ID NO: 42842 - RNA, 18 nt, Artificial Sequence
  Synthetic
gcugaaagccagacagug

SEQ ID NO: 42843 - RNA, 19 nt, Artificial Sequence
  Synthetic
agcugaaagccagacagug

SEQ ID NO: 42844 - RNA, 20 nt, Artificial Sequence
  Synthetic
uagcugaaagccagacagug

SEQ ID NO: 42845 - RNA, 21 nt, Artificial Sequence
  Synthetic
auagcugaaagccagacagug

SEQ ID NO: 42846 - RNA, 22 nt, Artificial Sequence
  Synthetic
uauagcugaaagccagacagug

SEQ ID NO: 42847 - RNA, 23 nt, Artificial Sequence
  Synthetic
auauagcugaaagccagacagug

SEQ ID NO: 42848 - RNA, 24 nt, Artificial Sequence
  Synthetic
  misc_feature (1)..(1): n is a, c, g, or u
nauauagcugaaagccagacagug

SEQ ID NO: 42849 - RNA, 18 nt, Artificial Sequence
  Synthetic
acaggagauuggugagug

SEQ ID NO: 42850 - RNA, 19 nt, Artificial Sequence
  Synthetic
gacaggagauuggugagug

SEQ ID NO: 42851 - RNA, 20 nt, Artificial Sequence
  Synthetic
ggacaggagauuggugagug

SEQ ID NO: 42852 - RNA, 21 nt, Artificial Sequence
  Synthetic
aggacaggagauuggugagug

SEQ ID NO: 42853 - RNA, 22 nt, Artificial Sequence
  Synthetic
gaggacaggagauuggugagug

SEQ ID NO: 42854 - RNA, 23 nt, Artificial Sequence
  Synthetic
ggaggacaggagauuggugagug

SEQ ID NO: 42855 - RNA, 24 nt, Artificial Sequence
  Synthetic
uggaggacaggagauuggugagug

SEQ ID NO: 42856 - RNA, 18 nt, Artificial Sequence
  Synthetic
gaugacugucucuuagug

SEQ ID NO: 42857 - RNA, 19 nt, Artificial Sequence
  Synthetic
ggaugacugucucuuagug

SEQ ID NO: 42858 - RNA, 20 nt, Artificial Sequence
  Synthetic
aggaugacugucucuuagug

SEQ ID NO: 42859 - RNA, 21 nt, Artificial Sequence
  Synthetic
gaggaugacugucucuuagug

SEQ ID NO: 42860 - RNA, 22 nt, Artificial Sequence
  Synthetic
ugaggaugacugucucuuagug

SEQ ID NO: 42861 - RNA, 23 nt, Artificial Sequence
  Synthetic
cugaggaugacugucucuuagug

SEQ ID NO: 42862 - RNA, 24 nt, Artificial Sequence
  Synthetic
ccugaggaugacugucucuuagug

SEQ ID NO: 42863 - RNA, 18 nt, Artificial Sequence
  Synthetic
cgguuuccauguaacgug

SEQ ID NO: 42864 - RNA, 19 nt, Artificial Sequence
  Synthetic
gcgguuuccauguaacgug

SEQ ID NO: 42865 - RNA, 20 nt, Artificial Sequence
  Synthetic
ggcgguuuccauguaacgug

SEQ ID NO: 42866 - RNA, 21 nt, Artificial Sequence
  Synthetic
uggcgguuuccauguaacgug

SEQ ID NO: 42867 - RNA, 22 nt, Artificial Sequence
  Synthetic
auggcgguuuccauguaacgug

SEQ ID NO: 42868 - RNA, 23 nt, Artificial Sequence
  Synthetic
cauggcgguuuccauguaacgug

SEQ ID NO: 42869 - RNA, 24 nt, Artificial Sequence
  Synthetic
ucauggcgguuuccauguaacgug

SEQ ID NO: 42870 - RNA, 18 nt, Artificial Sequence
  Synthetic
agagaggugcgccccgug

SEQ ID NO: 42871 - RNA, 19 nt, Artificial Sequence
  Synthetic
aagagaggugcgccccgug

SEQ ID NO: 42872 - RNA, 20 nt, Artificial Sequence
  Synthetic
aaagagaggugcgccccgug

SEQ ID NO: 42873 - RNA, 18 nt, Artificial Sequence
  Synthetic
ccccaaaaggccuccgug

SEQ ID NO: 42874 - RNA, 19 nt, Artificial Sequence
  Synthetic
accccaaaaggccuccgug

SEQ ID NO: 42875 - RNA, 20 nt, Artificial Sequence
  Synthetic
caccccaaaaggccuccgug

SEQ ID NO: 42876 - RNA, 21 nt, Artificial Sequence
  Synthetic
ccaccccaaaaggccuccgug

SEQ ID NO: 42877 - RNA, 22 nt, Artificial Sequence
  Synthetic
uccaccccaaaaggccuccgug

SEQ ID NO: 42878 - RNA, 23 nt, Artificial Sequence
  Synthetic
cuccaccccaaaaggccuccgug

SEQ ID NO: 42879 - RNA, 24 nt, Artificial Sequence
  Synthetic
gcuccaccccaaaaggccuccgug

SEQ ID NO: 42880 - RNA, 18 nt, Artificial Sequence
  Synthetic
gaugauuaggcagaggug

SEQ ID NO: 42881 - RNA, 19 nt, Artificial Sequence
  Synthetic
agaugauuaggcagaggug

SEQ ID NO: 42882 - RNA, 20 nt, Artificial Sequence
  Synthetic
gagaugauuaggcagaggug

SEQ ID NO: 42883 - RNA, 21 nt, Artificial Sequence
  Synthetic
agagaugauuaggcagaggug

SEQ ID NO: 42884 - RNA, 22 nt, Artificial Sequence
  Synthetic
aagagaugauuaggcagaggug

SEQ ID NO: 42885 - RNA, 23 nt, Artificial Sequence
  Synthetic
caagagaugauuaggcagaggug

SEQ ID NO: 42886 - RNA, 24 nt, Artificial Sequence
  Synthetic
acaagagaugauuaggcagaggug

SEQ ID NO: 42887 - RNA, 18 nt, Artificial Sequence
  Synthetic
uacaaagcugaagcggug

SEQ ID NO: 42888 - RNA, 19 nt, Artificial Sequence
  Synthetic
guacaaagcugaagcggug

SEQ ID NO: 42889 - RNA, 20 nt, Artificial Sequence
  Synthetic
gguacaaagcugaagcggug

SEQ ID NO: 42890 - RNA, 18 nt, Artificial Sequence
  Synthetic
ugcuggguccaacuggug

SEQ ID NO: 42891 - RNA, 19 nt, Artificial Sequence
  Synthetic
augcuggguccaacuggug

SEQ ID NO: 42892 - RNA, 20 nt, Artificial Sequence
  Synthetic
aaugcuggguccaacuggug

SEQ ID NO: 42893 - RNA, 21 nt, Artificial Sequence
  Synthetic
gaaugcuggguccaacuggug

SEQ ID NO: 42894 - RNA, 22 nt, Artificial Sequence
  Synthetic
ugaaugcuggguccaacuggug

SEQ ID NO: 42895 - RNA, 23 nt, Artificial Sequence
  Synthetic
cugaaugcuggguccaacuggug

SEQ ID NO: 42896 - RNA, 24 nt, Artificial Sequence
  Synthetic
ucugaaugcuggguccaacuggug

SEQ ID NO: 42897 - RNA, 18 nt, Artificial Sequence
  Synthetic
cagggucccguacuggug

SEQ ID NO: 42898 - RNA, 19 nt, Artificial Sequence
  Synthetic
gcagggucccguacuggug

SEQ ID NO: 42899 - RNA, 20 nt, Artificial Sequence
  Synthetic
ugcagggucccguacuggug

SEQ ID NO: 42900 - RNA, 21 nt, Artificial Sequence
  Synthetic
uugcagggucccguacuggug

SEQ ID NO: 42901 - RNA, 22 nt, Artificial Sequence
  Synthetic
uuugcagggucccguacuggug

SEQ ID NO: 42902 - RNA, 23 nt, Artificial Sequence
  Synthetic
uuuugcagggucccguacuggug

SEQ ID NO: 42903 - RNA, 24 nt, Artificial Sequence
  Synthetic
guuuugcagggucccguacuggug

SEQ ID NO: 42904 - RNA, 18 nt, Artificial Sequence
  Synthetic
  misc_feature (5)..(5): n is a, c, g, or u
aguuncauggugcuggug

SEQ ID NO: 42905 - RNA, 19 nt, Artificial Sequence
  Synthetic
  misc_feature (6)..(6): n is a, c, g, or u
aaguuncauggugcuggug

SEQ ID NO: 42906 - RNA, 20 nt, Artificial Sequence
  Synthetic
  misc_feature (7)..(7): n is a, c, g, or u
aaaguuncauggugcuggug

SEQ ID NO: 42907 - RNA, 21 nt, Artificial Sequence
  Synthetic
  misc_feature (8)..(8): n is a, c, g, or u
aaaaguuncauggugcuggug

SEQ ID NO: 42908 - RNA, 22 nt, Artificial Sequence
  Synthetic
  misc_feature (9)..(9): n is a, c, g, or u
aaaaaguuncauggugcuggug

SEQ ID NO: 42909 - RNA, 23 nt, Artificial Sequence
  Synthetic
  misc_feature (10)..(10): n is a, c, g, or u
gaaaaaguuncauggugcuggug

SEQ ID NO: 42910 - RNA, 24 nt, Artificial Sequence
  Synthetic
  misc_feature (11)..(11): n is a, c, g, or u
ugaaaaaguuncauggugcuggug

SEQ ID NO: 42911 - RNA, 18 nt, Artificial Sequence
  Synthetic
ccuagaggauugcuggug

SEQ ID NO: 42912 - RNA, 19 nt, Artificial Sequence
  Synthetic
uccuagaggauugcuggug

SEQ ID NO: 42913 - RNA, 20 nt, Artificial Sequence
  Synthetic
auccuagaggauugcuggug

SEQ ID NO: 42914 - RNA, 21 nt, Artificial Sequence
  Synthetic
aauccuagaggauugcuggug

SEQ ID NO: 42915 - RNA, 22 nt, Artificial Sequence
  Synthetic
gaauccuagaggauugcuggug

SEQ ID NO: 42916 - RNA, 23 nt, Artificial Sequence
  Synthetic
ggaauccuagaggauugcuggug

SEQ ID NO: 42917 - RNA, 24 nt, Artificial Sequence
  Synthetic
aggaauccuagaggauugcuggug

SEQ ID NO: 42918 - RNA, 18 nt, Artificial Sequence
  Synthetic
gacugucucuuaguggug

SEQ ID NO: 42919 - RNA, 19 nt, Artificial Sequence
  Synthetic
ugacugucucuuaguggug

SEQ ID NO: 42920 - RNA, 20 nt, Artificial Sequence
  Synthetic
augacugucucuuaguggug

SEQ ID NO: 42921 - RNA, 21 nt, Artificial Sequence
  Synthetic
gaugacugucucuuaguggug

SEQ ID NO: 42922 - RNA, 22 nt, Artificial Sequence
  Synthetic
ggaugacugucucuuaguggug

SEQ ID NO: 42923 - RNA, 23 nt, Artificial Sequence
  Synthetic
aggaugacugucucuuaguggug

SEQ ID NO: 42924 - RNA, 24 nt, Artificial Sequence
  Synthetic
gaggaugacugucucuuaguggug

SEQ ID NO: 42925 - RNA, 18 nt, Artificial Sequence
  Synthetic
gaagauugacgagaugug

SEQ ID NO: 42926 - RNA, 19 nt, Artificial Sequence
  Synthetic
agaagauugacgagaugug

SEQ ID NO: 42927 - RNA, 20 nt, Artificial Sequence
  Synthetic
gagaagauugacgagaugug

SEQ ID NO: 42928 - RNA, 21 nt, Artificial Sequence
  Synthetic
ggagaagauugacgagaugug

SEQ ID NO: 42929 - RNA, 22 nt, Artificial Sequence
  Synthetic
uggagaagauugacgagaugug

SEQ ID NO: 42930 - RNA, 23 nt, Artificial Sequence
  Synthetic
cuggagaagauugacgagaugug

SEQ ID NO: 42931 - RNA, 24 nt, Artificial Sequence
  Synthetic
ccuggagaagauugacgagaugug

SEQ ID NO: 42932 - RNA, 18 nt, Artificial Sequence
  Synthetic
cguuucucauuuacugug

SEQ ID NO: 42933 - RNA, 19 nt, Artificial Sequence
  Synthetic
ucguuucucauuuacugug

SEQ ID NO: 42934 - RNA, 20 nt, Artificial Sequence
  Synthetic
uucguuucucauuuacugug

SEQ ID NO: 42935 - RNA, 21 nt, Artificial Sequence
  Synthetic
cuucguuucucauuuacugug

SEQ ID NO: 42936 - RNA, 22 nt, Artificial Sequence
  Synthetic
ucuucguuucucauuuacugug

SEQ ID NO: 42937 - RNA, 23 nt, Artificial Sequence
  Synthetic
aucuucguuucucauuuacugug

SEQ ID NO: 42938 - RNA, 24 nt, Artificial Sequence
  Synthetic
aaucuucguuucucauuuacugug

SEQ ID NO: 42939 - RNA, 18 nt, Artificial Sequence
  Synthetic
ccaaaaggccuccgugug

SEQ ID NO: 42940 - RNA, 19 nt, Artificial Sequence
  Synthetic
cccaaaaggccuccgugug

SEQ ID NO: 42941 - RNA, 20 nt, Artificial Sequence
  Synthetic
ccccaaaaggccuccgugug

SEQ ID NO: 42942 - RNA, 21 nt, Artificial Sequence
  Synthetic
accccaaaaggccuccgugug

SEQ ID NO: 42943 - RNA, 22 nt, Artificial Sequence
  Synthetic
caccccaaaaggccuccgugug

SEQ ID NO: 42944 - RNA, 23 nt, Artificial Sequence
  Synthetic
ccaccccaaaaggccuccgugug

SEQ ID NO: 42945 - RNA, 24 nt, Artificial Sequence
  Synthetic
uccaccccaaaaggccuccgugug

SEQ ID NO: 42946 - RNA, 18 nt, Artificial Sequence
  Synthetic
gugugauguguucuugug

SEQ ID NO: 42947 - RNA, 19 nt, Artificial Sequence
  Synthetic
ugugugauguguucuugug

SEQ ID NO: 42948 - RNA, 20 nt, Artificial Sequence
  Synthetic
  misc_feature (1)..(1): n is a, c, g, or u
nugugugauguguucuugug

SEQ ID NO: 42949 - RNA, 21 nt, Artificial Sequence
  Synthetic
  misc_feature (2)..(2): n is a, c, g, or u
unugugugauguguucuugug

SEQ ID NO: 42950 - RNA, 22 nt, Artificial Sequence
  Synthetic
  misc_feature (3)..(3): n is a, c, g, or u
uunugugugauguguucuugug

SEQ ID NO: 42951 - RNA, 23 nt, Artificial Sequence
  Synthetic
  misc_feature (4)..(4): n is a, c, g, or u
uuunugugugauguguucuugug

SEQ ID NO: 42952 - RNA, 24 nt, Artificial Sequence
  Synthetic
  misc_feature (5)..(5): n is a, c, g, or u
uuuunugugugauguguucuugug

SEQ ID NO: 42953 - RNA, 18 nt, Artificial Sequence
  Synthetic
acucccccuagaaaauug

SEQ ID NO: 42954 - RNA, 19 nt, Artificial Sequence
  Synthetic
cacucccccuagaaaauug

SEQ ID NO: 42955 - RNA, 20 nt, Artificial Sequence
  Synthetic
gcacucccccuagaaaauug

SEQ ID NO: 42956 - RNA, 21 nt, Artificial Sequence
  Synthetic
ggcacucccccuagaaaauug

SEQ ID NO: 42957 - RNA, 22 nt, Artificial Sequence
  Synthetic
gggcacucccccuagaaaauug

SEQ ID NO: 42958 - RNA, 23 nt, Artificial Sequence
  Synthetic
cgggcacucccccuagaaaauug

SEQ ID NO: 42959 - RNA, 24 nt, Artificial Sequence
  Synthetic
acgggcacucccccuagaaaauug

SEQ ID NO: 42960 - RNA, 18 nt, Artificial Sequence
  Synthetic
caaggaauacuaacauug

SEQ ID NO: 42961 - RNA, 19 nt, Artificial Sequence
  Synthetic
ccaaggaauacuaacauug

SEQ ID NO: 42962 - RNA, 20 nt, Artificial Sequence
  Synthetic
uccaaggaauacuaacauug

SEQ ID NO: 42963 - RNA, 21 nt, Artificial Sequence
  Synthetic
guccaaggaauacuaacauug

SEQ ID NO: 42964 - RNA, 22 nt, Artificial Sequence
  Synthetic
aguccaaggaauacuaacauug

SEQ ID NO: 42965 - RNA, 23 nt, Artificial Sequence
  Synthetic
gaguccaaggaauacuaacauug

SEQ ID NO: 42966 - RNA, 24 nt, Artificial Sequence
  Synthetic
ugaguccaaggaauacuaacauug

SEQ ID NO: 42967 - RNA, 18 nt, Artificial Sequence
  Synthetic
ggcaggguaaccacauug

SEQ ID NO: 42968 - RNA, 19 nt, Artificial Sequence
  Synthetic
aggcaggguaaccacauug

SEQ ID NO: 42969 - RNA, 20 nt, Artificial Sequence
  Synthetic
aaggcaggguaaccacauug

SEQ ID NO: 42970 - RNA, 21 nt, Artificial Sequence
  Synthetic
uaaggcaggguaaccacauug

SEQ ID NO: 42971 - RNA, 22 nt, Artificial Sequence
  Synthetic
uuaaggcaggguaaccacauug

SEQ ID NO: 42972 - RNA, 23 nt, Artificial Sequence
  Synthetic
auuaaggcaggguaaccacauug

SEQ ID NO: 42973 - RNA, 24 nt, Artificial Sequence
  Synthetic
cauuaaggcaggguaaccacauug

SEQ ID NO: 42974 - RNA, 18 nt, Artificial Sequence
  Synthetic
caauccuggagaagauug

SEQ ID NO: 42975 - RNA, 19 nt, Artificial Sequence
  Synthetic
ccaauccuggagaagauug

SEQ ID NO: 42976 - RNA, 20 nt, Artificial Sequence
  Synthetic
cccaauccuggagaagauug

SEQ ID NO: 42977 - RNA, 21 nt, Artificial Sequence
  Synthetic
ccccaauccuggagaagauug

SEQ ID NO: 42978 - RNA, 22 nt, Artificial Sequence
  Synthetic
uccccaauccuggagaagauug

SEQ ID NO: 42979 - RNA, 23 nt, Artificial Sequence
  Synthetic
guccccaauccuggagaagauug

SEQ ID NO: 42980 - RNA, 24 nt, Artificial Sequence
  Synthetic
gguccccaauccuggagaagauug

SEQ ID NO: 42981 - RNA, 18 nt, Artificial Sequence
  Synthetic
cucccugacugacgauug

SEQ ID NO: 42982 - RNA, 19 nt, Artificial Sequence
  Synthetic
ccucccugacugacgauug

SEQ ID NO: 42983 - RNA, 20 nt, Artificial Sequence
  Synthetic
gccucccugacugacgauug

SEQ ID NO: 42984 - RNA, 21 nt, Artificial Sequence
  Synthetic
ugccucccugacugacgauug

SEQ ID NO: 42985 - RNA, 22 nt, Artificial Sequence
  Synthetic
cugccucccugacugacgauug

SEQ ID NO: 42986 - RNA, 23 nt, Artificial Sequence
  Synthetic
gcugccucccugacugacgauug

SEQ ID NO: 42987 - RNA, 24 nt, Artificial Sequence
  Synthetic
ggcugccucccugacugacgauug

SEQ ID NO: 42988 - RNA, 18 nt, Artificial Sequence
  Synthetic
cuagacucugcgguauug

SEQ ID NO: 42989 - RNA, 19 nt, Artificial Sequence
  Synthetic
ucuagacucugcgguauug

SEQ ID NO: 42990 - RNA, 20 nt, Artificial Sequence
  Synthetic
gucuagacucugcgguauug

SEQ ID NO: 42991 - RNA, 21 nt, Artificial Sequence
  Synthetic
agucuagacucugcgguauug

SEQ ID NO: 42992 - RNA, 22 nt, Artificial Sequence
  Synthetic
gagucuagacucugcgguauug

SEQ ID NO: 42993 - RNA, 23 nt, Artificial Sequence
  Synthetic
cgagucuagacucugcgguauug

SEQ ID NO: 42994 - RNA, 24 nt, Artificial Sequence
  Synthetic
acgagucuagacucugcgguauug

SEQ ID NO: 42995 - RNA, 18 nt, Artificial Sequence
  Synthetic
auacauagaguugccuug

SEQ ID NO: 42996 - RNA, 19 nt, Artificial Sequence
  Synthetic
gauacauagaguugccuug

SEQ ID NO: 42997 - RNA, 20 nt, Artificial Sequence
  Synthetic
ggauacauagaguugccuug

SEQ ID NO: 42998 - RNA, 21 nt, Artificial Sequence
  Synthetic
gggauacauagaguugccuug

SEQ ID NO: 42999 - RNA, 22 nt, Artificial Sequence
  Synthetic
agggauacauagaguugccuug

SEQ ID NO: 43000 - RNA, 23 nt, Artificial Sequence
  Synthetic
gagggauacauagaguugccuug

SEQ ID NO: 43001 - RNA, 24 nt, Artificial Sequence
  Synthetic
ugagggauacauagaguugccuug

SEQ ID NO: 43002 - RNA, 18 nt, Artificial Sequence
  Synthetic
gggauuuuguagagcuug

SEQ ID NO: 43003 - RNA, 19 nt, Artificial Sequence
  Synthetic
ugggauuuuguagagcuug

SEQ ID NO: 43004 - RNA, 20 nt, Artificial Sequence
  Synthetic
uugggauuuuguagagcuug

SEQ ID NO: 43005 - RNA, 21 nt, Artificial Sequence
  Synthetic
uuugggauuuuguagagcuug

SEQ ID NO: 43006 - RNA, 22 nt, Artificial Sequence
  Synthetic
cuuugggauuuuguagagcuug

SEQ ID NO: 43007 - RNA, 23 nt, Artificial Sequence
  Synthetic
acuuugggauuuuguagagcuug

SEQ ID NO: 43008 - RNA, 24 nt, Artificial Sequence
  Synthetic
gacuuugggauuuuguagagcuug

SEQ ID NO: 43009 - RNA, 18 nt, Artificial Sequence
  Synthetic
  misc_feature (10)..(10): n is a, c, g, or u
ccagcacagnauugcuug

SEQ ID NO: 43010 - RNA, 19 nt, Artificial Sequence
  Synthetic
  misc_feature (11)..(11): n is a, c, g, or u
cccagcacagnauugcuug

SEQ ID NO: 43011 - RNA, 20 nt, Artificial Sequence
  Synthetic
  misc_feature (12)..(12): n is a, c, g, or u
ccccagcacagnauugcuug

SEQ ID NO: 43012 - RNA, 21 nt, Artificial Sequence
  Synthetic
  misc_feature (13)..(13): n is a, c, g, or u
accccagcacagnauugcuug

SEQ ID NO: 43013 - RNA, 22 nt, Artificial Sequence
  Synthetic
  misc_feature (14)..(14): n is a, c, g, or u
caccccagcacagnauugcuug

SEQ ID NO: 43014 - RNA, 23 nt, Artificial Sequence
  Synthetic
  misc_feature (15)..(15): n is a, c, g, or u
ucaccccagcacagnauugcuug

SEQ ID NO: 43015 - RNA, 24 nt, Artificial Sequence
  Synthetic
  misc_feature (16)..(16): n is a, c, g, or u
cucaccccagcacagnauugcuug

SEQ ID NO: 43016 - RNA, 18 nt, Artificial Sequence
  Synthetic
gauagccaggacaaguug

SEQ ID NO: 43017 - RNA, 19 nt, Artificial Sequence
  Synthetic
cgauagccaggacaaguug

SEQ ID NO: 43018 - RNA, 20 nt, Artificial Sequence
  Synthetic
gcgauagccaggacaaguug

SEQ ID NO: 43019 - RNA, 21 nt, Artificial Sequence
  Synthetic
agcgauagccaggacaaguug

SEQ ID NO: 43020 - RNA, 22 nt, Artificial Sequence
  Synthetic
cagcgauagccaggacaaguug

SEQ ID NO: 43021 - RNA, 23 nt, Artificial Sequence
  Synthetic
ccagcgauagccaggacaaguug

SEQ ID NO: 43022 - RNA, 24 nt, Artificial Sequence
  Synthetic
uccagcgauagccaggacaaguug

SEQ ID NO: 43023 - RNA, 18 nt, Artificial Sequence
  Synthetic
gaaaggccuuauaaguug

SEQ ID NO: 43024 - RNA, 19 nt, Artificial Sequence
  Synthetic
agaaaggccuuauaaguug

SEQ ID NO: 43025 - RNA, 20 nt, Artificial Sequence
  Synthetic
gagaaaggccuuauaaguug

SEQ ID NO: 43026 - RNA, 21 nt, Artificial Sequence
  Synthetic
agagaaaggccuuauaaguug

SEQ ID NO: 43027 - RNA, 22 nt, Artificial Sequence
  Synthetic
cagagaaaggccuuauaaguug

SEQ ID NO: 43028 - RNA, 23 nt, Artificial Sequence
  Synthetic
acagagaaaggccuuauaaguug

SEQ ID NO: 43029 - RNA, 24 nt, Artificial Sequence
  Synthetic
uacagagaaaggccuuauaaguug

SEQ ID NO: 43030 - RNA, 18 nt, Artificial Sequence
  Synthetic
gcacagaccgggccguug

SEQ ID NO: 43031 - RNA, 19 nt, Artificial Sequence
  Synthetic
ggcacagaccgggccguug

SEQ ID NO: 43032 - RNA, 20 nt, Artificial Sequence
  Synthetic
uggcacagaccgggccguug

SEQ ID NO: 43033 - RNA, 21 nt, Artificial Sequence
  Synthetic
uuggcacagaccgggccguug

SEQ ID NO: 43034 - RNA, 22 nt, Artificial Sequence
  Synthetic
cuuggcacagaccgggccguug

SEQ ID NO: 43035 - RNA, 23 nt, Artificial Sequence
  Synthetic
acuuggcacagaccgggccguug

SEQ ID NO: 43036 - RNA, 24 nt, Artificial Sequence
  Synthetic
cacuuggcacagaccgggccguug

SEQ ID NO: 43037 - RNA, 18 nt, Artificial Sequence
  Synthetic
cagaccaguuauucguug

SEQ ID NO: 43038 - RNA, 19 nt, Artificial Sequence
  Synthetic
acagaccaguuauucguug

SEQ ID NO: 43039 - RNA, 20 nt, Artificial Sequence
  Synthetic
aacagaccaguuauucguug

SEQ ID NO: 43040 - RNA, 21 nt, Artificial Sequence
  Synthetic
caacagaccaguuauucguug

SEQ ID NO: 43041 - RNA, 22 nt, Artificial Sequence
  Synthetic
ccaacagaccaguuauucguug

SEQ ID NO: 43042 - RNA, 23 nt, Artificial Sequence
  Synthetic
cccaacagaccaguuauucguug

SEQ ID NO: 43043 - RNA, 24 nt, Artificial Sequence
  Synthetic
acccaacagaccaguuauucguug

SEQ ID NO: 43044 - RNA, 18 nt, Artificial Sequence
  Synthetic
aagggacucaagauguug

SEQ ID NO: 43045 - RNA, 19 nt, Artificial Sequence
  Synthetic
aaagggacucaagauguug

SEQ ID NO: 43046 - RNA, 20 nt, Artificial Sequence
  Synthetic
  misc_feature (1)..(1): n is a, c, g, or u
naaagggacucaagauguug

SEQ ID NO: 43047 - RNA, 21 nt, Artificial Sequence
  Synthetic
  misc_feature (2)..(2): n is a, c, g, or u
anaaagggacucaagauguug

SEQ ID NO: 43048 - RNA, 22 nt, Artificial Sequence
  Synthetic
  misc_feature (3)..(3): n is a, c, g, or u
uanaaagggacucaagauguug

SEQ ID NO: 43049 - RNA, 23 nt, Artificial Sequence
  Synthetic
  misc_feature (4)..(4): n is a, c, g, or u
guanaaagggacucaagauguug

SEQ ID NO: 43050 - RNA, 24 nt, Artificial Sequence
  Synthetic
  misc_feature (5)..(5): n is a, c, g, or u
gguanaaagggacucaagauguug

SEQ ID NO: 43051 - RNA, 18 nt, Artificial Sequence
  Synthetic
uagucuccggaaguguug

SEQ ID NO: 43052 - RNA, 19 nt, Artificial Sequence
  Synthetic
guagucuccggaaguguug

SEQ ID NO: 43053 - RNA, 20 nt, Artificial Sequence
  Synthetic
aguagucuccggaaguguug

SEQ ID NO: 43054 - RNA, 21 nt, Artificial Sequence
  Synthetic
caguagucuccggaaguguug

SEQ ID NO: 43055 - RNA, 22 nt, Artificial Sequence
  Synthetic
acaguagucuccggaaguguug

SEQ ID NO: 43056 - RNA, 23 nt, Artificial Sequence
  Synthetic
aacaguagucuccggaaguguug

SEQ ID NO: 43057 - RNA, 24 nt, Artificial Sequence
  Synthetic
caacaguagucuccggaaguguug

SEQ ID NO: 43058 - RNA, 18 nt, Artificial Sequence
  Synthetic
gaugcaaauggauauuug

SEQ ID NO: 43059 - RNA, 19 nt, Artificial Sequence
  Synthetic
ugaugcaaauggauauuug

SEQ ID NO: 43060 - RNA, 20 nt, Artificial Sequence
  Synthetic
uugaugcaaauggauauuug

SEQ ID NO: 43061 - RNA, 21 nt, Artificial Sequence
  Synthetic
cuugaugcaaauggauauuug

SEQ ID NO: 43062 - RNA, 22 nt, Artificial Sequence
  Synthetic
ucuugaugcaaauggauauuug

SEQ ID NO: 43063 - RNA, 23 nt, Artificial Sequence
  Synthetic
gucuugaugcaaauggauauuug

SEQ ID NO: 43064 - RNA, 24 nt, Artificial Sequence
  Synthetic
ugucuugaugcaaauggauauuug

SEQ ID NO: 43065 - RNA, 18 nt, Artificial Sequence
  Synthetic
aauauuuaguagaguuug

SEQ ID NO: 43066 - RNA, 19 nt, Artificial Sequence
  Synthetic
aaauauuuaguagaguuug

SEQ ID NO: 43067 - RNA, 20 nt, Artificial Sequence
  Synthetic
uaaauauuuaguagaguuug

SEQ ID NO: 43068 - RNA, 21 nt, Artificial Sequence
  Synthetic
guaaauauuuaguagaguuug

SEQ ID NO: 43069 - RNA, 22 nt, Artificial Sequence
  Synthetic
gguaaauauuuaguagaguuug

SEQ ID NO: 43070 - RNA, 23 nt, Artificial Sequence
  Synthetic
ugguaaauauuuaguagaguuug

SEQ ID NO: 43071 - RNA, 24 nt, Artificial Sequence
  Synthetic
augguaaauauuuaguagaguuug

SEQ ID NO: 43072 - RNA, 18 nt, Artificial Sequence
  Synthetic
ccugacuuugggauuuug

SEQ ID NO: 43073 - RNA, 19 nt, Artificial Sequence
  Synthetic
cccugacuuugggauuuug

SEQ ID NO: 43074 - RNA, 20 nt, Artificial Sequence
  Synthetic
ccccugacuuugggauuuug

SEQ ID NO: 43075 - RNA, 21 nt, Artificial Sequence
  Synthetic
gccccugacuuugggauuuug

SEQ ID NO: 43076 - RNA, 22 nt, Artificial Sequence
  Synthetic
ggccccugacuuugggauuuug

SEQ ID NO: 43077 - RNA, 23 nt, Artificial Sequence
  Synthetic
aggccccugacuuugggauuuug

SEQ ID NO: 43078 - RNA, 24 nt, Artificial Sequence
  Synthetic
caggccccugacuuugggauuuug

SEQ ID NO: 43079 - RNA, 18 nt, Artificial Sequence
  Synthetic
acucccauagguauuuug

SEQ ID NO: 43080 - RNA, 19 nt, Artificial Sequence
  Synthetic
cacucccauagguauuuug

SEQ ID NO: 43081 - RNA, 20 nt, Artificial Sequence
  Synthetic
ccacucccauagguauuuug

SEQ ID NO: 43082 - RNA, 21 nt, Artificial Sequence
  Synthetic
cccacucccauagguauuuug

SEQ ID NO: 43083 - RNA, 22 nt, Artificial Sequence
  Synthetic
gcccacucccauagguauuuug

SEQ ID NO: 43084 - RNA, 23 nt, Artificial Sequence
  Synthetic
ggcccacucccauagguauuuug

SEQ ID NO: 43085 - RNA, 24 nt, Artificial Sequence
  Synthetic
aggcccacucccauagguauuuug

SEQ ID NO: 43086 - RNA, 18 nt, Artificial Sequence
  Synthetic
uuccguccgaagguuuug

SEQ ID NO: 43087 - RNA, 19 nt, Artificial Sequence
  Synthetic
uuuccguccgaagguuuug

SEQ ID NO: 43088 - RNA, 20 nt, Artificial Sequence
  Synthetic
auuuccguccgaagguuuug

SEQ ID NO: 43089 - RNA, 21 nt, Artificial Sequence
  Synthetic
aauuuccguccgaagguuuug

SEQ ID NO: 43090 - RNA, 22 nt, Artificial Sequence
  Synthetic
caauuuccguccgaagguuuug

SEQ ID NO: 43091 - RNA, 23 nt, Artificial Sequence
  Synthetic
gcaauuuccguccgaagguuuug

SEQ ID NO: 43092 - RNA, 24 nt, Artificial Sequence
  Synthetic
ugcaauuuccguccgaagguuuug

SEQ ID NO: 43093 - RNA, 18 nt, Artificial Sequence
  Synthetic
  misc_feature (18)..(18): n is a, c, g, or u
aauugguaacagcgguan

SEQ ID NO: 43094 - RNA, 19 nt, Artificial Sequence
  Synthetic
  misc_feature (19)..(19): n is a, c, g, or u
aaauugguaacagcgguan

SEQ ID NO: 43095 - RNA, 20 nt, Artificial Sequence
  Synthetic
  misc_feature (20)..(20): n is a, c, g, or u
aaaauugguaacagcgguan

SEQ ID NO: 43096 - RNA, 21 nt, Artificial Sequence
  Synthetic
  misc_feature (21)..(21): n is a, c, g, or u
gaaaauugguaacagcgguan

SEQ ID NO: 43097 - RNA, 22 nt, Artificial Sequence
  Synthetic
  misc_feature (22)..(22): n is a, c, g, or u
agaaaauugguaacagcgguan

SEQ ID NO: 43098 - RNA, 23 nt, Artificial Sequence
  Synthetic
  misc_feature (23)..(23): n is a, c, g, or u
aagaaaauugguaacagcgguan

SEQ ID NO: 43099 - RNA, 24 nt, Artificial Sequence
  Synthetic
  misc_feature (24)..(24): n is a, c, g, or u
aaagaaaauugguaacagcgguan

SEQ ID NO: 43100 - RNA, 18 nt, Artificial Sequence
  Synthetic
  misc_feature (4)..(4): n is a, c, g, or u
  misc_feature (18)..(18): n is a, c, g, or u
guuncauggugcuggugn

SEQ ID NO: 43101 - RNA, 19 nt, Artificial Sequence
  Synthetic
  misc_feature (5)..(5): n is a, c, g, or u
  misc_feature (19)..(19): n is a, c, g, or u
aguuncauggugcuggugn

SEQ ID NO: 43102 - RNA, 20 nt, Artificial Sequence
  Synthetic
  misc_feature (6)..(6): n is a, c, g, or u
  misc_feature (20)..(20): n is a, c, g, or u
aaguuncauggugcuggugn

SEQ ID NO: 43103 - RNA, 21 nt, Artificial Sequence
  Synthetic
  misc_feature (7)..(7): n is a, c, g, or u
  misc_feature (21)..(21): n is a, c, g, or u
aaaguuncauggugcuggugn

SEQ ID NO: 43104 - RNA, 22 nt, Artificial Sequence
  Synthetic
  misc_feature (8)..(8): n is a, c, g, or u
  misc_feature (22)..(22): n is a, c, g, or u
aaaaguuncauggugcuggugn

SEQ ID NO: 43105 - RNA, 23 nt, Artificial Sequence
  Synthetic
  misc_feature (9)..(9): n is a, c, g, or u
  misc_feature (23)..(23): n is a, c, g, or u
aaaaaguuncauggugcuggugn

SEQ ID NO: 43106 - RNA, 24 nt, Artificial Sequence
  Synthetic
  misc_feature (10)..(10): n is a, c, g, or u
  misc_feature (24)..(24): n is a, c, g, or u
gaaaaaguuncauggugcuggugn

SEQ ID NO: 43107 - RNA, 18 nt, Artificial Sequence
  Synthetic
  misc_feature (18)..(18): n is a, c, g, or u
uuauuacccacccaggun

SEQ ID NO: 43108 - RNA, 19 nt, Artificial Sequence
  Synthetic
  misc_feature (19)..(19): n is a, c, g, or u
auuauuacccacccaggun

SEQ ID NO: 43109 - RNA, 20 nt, Artificial Sequence
  Synthetic
  misc_feature (20)..(20): n is a, c, g, or u
aauuauuacccacccaggun

SEQ ID NO: 43110 - RNA, 21 nt, Artificial Sequence
  Synthetic
  misc_feature (21)..(21): n is a, c, g, or u
aaauuauuacccacccaggun

SEQ ID NO: 43111 - RNA, 22 nt, Artificial Sequence
  Synthetic
  misc_feature (22)..(22): n is a, c, g, or u
caaauuauuacccacccaggun

SEQ ID NO: 43112 - RNA, 23 nt, Artificial Sequence
  Synthetic
  misc_feature (23)..(23): n is a, c, g, or u
ccaaauuauuacccacccaggun

SEQ ID NO: 43113 - RNA, 24 nt, Artificial Sequence
  Synthetic
  misc_feature (24)..(24): n is a, c, g, or u
uccaaauuauuacccacccaggun

SEQ ID NO: 43114 - RNA, 18 nt, Artificial Sequence
  Synthetic
gcacucccccuagaaaau

SEQ ID NO: 43115 - RNA, 19 nt, Artificial Sequence
  Synthetic
ggcacucccccuagaaaau

SEQ ID NO: 43116 - RNA, 20 nt, Artificial Sequence
  Synthetic
gggcacucccccuagaaaau

SEQ ID NO: 43117 - RNA, 21 nt, Artificial Sequence
  Synthetic
cgggcacucccccuagaaaau

SEQ ID NO: 43118 - RNA, 22 nt, Artificial Sequence
  Synthetic
acgggcacucccccuagaaaau

SEQ ID NO: 43119 - RNA, 23 nt, Artificial Sequence
  Synthetic
cacgggcacucccccuagaaaau

SEQ ID NO: 43120 - RNA, 24 nt, Artificial Sequence
  Synthetic
acacgggcacucccccuagaaaau

SEQ ID NO: 43121 - RNA, 18 nt, Artificial Sequence
  Synthetic
uuacauaucccauaaaau

SEQ ID NO: 43122 - RNA, 19 nt, Artificial Sequence
  Synthetic
auuacauaucccauaaaau

SEQ ID NO: 43123 - RNA, 20 nt, Artificial Sequence
  Synthetic
aauuacauaucccauaaaau

SEQ ID NO: 43124 - RNA, 21 nt, Artificial Sequence
  Synthetic
caauuacauaucccauaaaau

SEQ ID NO: 43125 - RNA, 22 nt, Artificial Sequence
  Synthetic
ccaauuacauaucccauaaaau

SEQ ID NO: 43126 - RNA, 23 nt, Artificial Sequence
  Synthetic
uccaauuacauaucccauaaaau

SEQ ID NO: 43127 - RNA, 24 nt, Artificial Sequence
  Synthetic
uuccaauuacauaucccauaaaau

SEQ ID NO: 43128 - RNA, 18 nt, Artificial Sequence
  Synthetic
aaaaguaagacaggaaau

SEQ ID NO: 43129 - RNA, 19 nt, Artificial Sequence
  Synthetic
caaaaguaagacaggaaau

SEQ ID NO: 43130 - RNA, 20 nt, Artificial Sequence
  Synthetic
ccaaaaguaagacaggaaau

SEQ ID NO: 43131 - RNA, 21 nt, Artificial Sequence
  Synthetic
cccaaaaguaagacaggaaau

SEQ ID NO: 43132 - RNA, 22 nt, Artificial Sequence
  Synthetic
ucccaaaaguaagacaggaaau

SEQ ID NO: 43133 - RNA, 23 nt, Artificial Sequence
  Synthetic
cucccaaaaguaagacaggaaau

SEQ ID NO: 43134 - RNA, 24 nt, Artificial Sequence
  Synthetic
ucucccaaaaguaagacaggaaau

SEQ ID NO: 43135 - RNA, 18 nt, Artificial Sequence
  Synthetic
cggugcaggguccccaau

SEQ ID NO: 43136 - RNA, 19 nt, Artificial Sequence
  Synthetic
ucggugcaggguccccaau

SEQ ID NO: 43137 - RNA, 20 nt, Artificial Sequence
  Synthetic
uucggugcaggguccccaau

SEQ ID NO: 43138 - RNA, 21 nt, Artificial Sequence
  Synthetic
guucggugcaggguccccaau

SEQ ID NO: 43139 - RNA, 22 nt, Artificial Sequence
  Synthetic
uguucggugcaggguccccaau

SEQ ID NO: 43140 - RNA, 23 nt, Artificial Sequence
  Synthetic
auguucggugcaggguccccaau

SEQ ID NO: 43141 - RNA, 24 nt, Artificial Sequence
  Synthetic
cauguucggugcaggguccccaau

SEQ ID NO: 43142 - RNA, 18 nt, Artificial Sequence
  Synthetic
agguuggggacugcgaau

SEQ ID NO: 43143 - RNA, 19 nt, Artificial Sequence
  Synthetic
gagguuggggacugcgaau

SEQ ID NO: 43144 - RNA, 20 nt, Artificial Sequence
  Synthetic
ggagguuggggacugcgaau

SEQ ID NO: 43145 - RNA, 21 nt, Artificial Sequence
  Synthetic
uggagguuggggacugcgaau

SEQ ID NO: 43146 - RNA, 22 nt, Artificial Sequence
  Synthetic
uuggagguuggggacugcgaau

SEQ ID NO: 43147 - RNA, 23 nt, Artificial Sequence
  Synthetic
auuggagguuggggacugcgaau

SEQ ID NO: 43148 - RNA, 24 nt, Artificial Sequence
  Synthetic
gauuggagguuggggacugcgaau

SEQ ID NO: 43149 - RNA, 18 nt, Artificial Sequence
  Synthetic
cuugugaguccaaggaau

SEQ ID NO: 43150 - RNA, 19 nt, Artificial Sequence
  Synthetic
ccuugugaguccaaggaau

SEQ ID NO: 43151 - RNA, 20 nt, Artificial Sequence
  Synthetic
accuugugaguccaaggaau

SEQ ID NO: 43152 - RNA, 21 nt, Artificial Sequence
  Synthetic
caccuugugaguccaaggaau

SEQ ID NO: 43153 - RNA, 22 nt, Artificial Sequence
  Synthetic
ccaccuugugaguccaaggaau

SEQ ID NO: 43154 - RNA, 23 nt, Artificial Sequence
  Synthetic
cccaccuugugaguccaaggaau

SEQ ID NO: 43155 - RNA, 24 nt, Artificial Sequence
  Synthetic
ucccaccuugugaguccaaggaau

SEQ ID NO: 43156 - RNA, 18 nt, Artificial Sequence
  Synthetic
uggugaucgggaaggaau

SEQ ID NO: 43157 - RNA, 19 nt, Artificial Sequence
  Synthetic
cuggugaucgggaaggaau

SEQ ID NO: 43158 - RNA, 20 nt, Artificial Sequence
  Synthetic
acuggugaucgggaaggaau

SEQ ID NO: 43159 - RNA, 21 nt, Artificial Sequence
  Synthetic
aacuggugaucgggaaggaau

SEQ ID NO: 43160 - RNA, 22 nt, Artificial Sequence
  Synthetic
caacuggugaucgggaaggaau

SEQ ID NO: 43161 - RNA, 23 nt, Artificial Sequence
  Synthetic
ccaacuggugaucgggaaggaau

SEQ ID NO: 43162 - RNA, 24 nt, Artificial Sequence
  Synthetic
uccaacuggugaucgggaaggaau

SEQ ID NO: 43163 - RNA, 18 nt, Artificial Sequence
  Synthetic
ggucgaggauccuggaau

SEQ ID NO: 43164 - RNA, 19 nt, Artificial Sequence
  Synthetic
uggucgaggauccuggaau

SEQ ID NO: 43165 - RNA, 20 nt, Artificial Sequence
  Synthetic
guggucgaggauccuggaau

SEQ ID NO: 43166 - RNA, 21 nt, Artificial Sequence
  Synthetic
gguggucgaggauccuggaau

SEQ ID NO: 43167 - RNA, 22 nt, Artificial Sequence
  Synthetic
ugguggucgaggauccuggaau

SEQ ID NO: 43168 - RNA, 23 nt, Artificial Sequence
  Synthetic
cugguggucgaggauccuggaau

SEQ ID NO: 43169 - RNA, 24 nt, Artificial Sequence
  Synthetic
acugguggucgaggauccuggaau

SEQ ID NO: 43170 - RNA, 18 nt, Artificial Sequence
  Synthetic
uugguauuugcucugaau

SEQ ID NO: 43171 - RNA, 19 nt, Artificial Sequence
  Synthetic
guugguauuugcucugaau

SEQ ID NO: 43172 - RNA, 20 nt, Artificial Sequence
  Synthetic
uguugguauuugcucugaau

SEQ ID NO: 43173 - RNA, 21 nt, Artificial Sequence
  Synthetic
uuguugguauuugcucugaau

SEQ ID NO: 43174 - RNA, 22 nt, Artificial Sequence
  Synthetic
auuguugguauuugcucugaau

SEQ ID NO: 43175 - RNA, 23 nt, Artificial Sequence
  Synthetic
gauuguugguauuugcucugaau

SEQ ID NO: 43176 - RNA, 24 nt, Artificial Sequence
  Synthetic
ggauuguugguauuugcucugaau

SEQ ID NO: 43177 - RNA, 18 nt, Artificial Sequence
  Synthetic
ugccuacagccuccuaau

SEQ ID NO: 43178 - RNA, 19 nt, Artificial Sequence
  Synthetic
augccuacagccuccuaau

SEQ ID NO: 43179 - RNA, 20 nt, Artificial Sequence
  Synthetic
uaugccuacagccuccuaau

SEQ ID NO: 43180 - RNA, 21 nt, Artificial Sequence
  Synthetic
uuaugccuacagccuccuaau

SEQ ID NO: 43181 - RNA, 22 nt, Artificial Sequence
  Synthetic
uuuaugccuacagccuccuaau

SEQ ID NO: 43182 - RNA, 23 nt, Artificial Sequence
  Synthetic
auuuaugccuacagccuccuaau

SEQ ID NO: 43183 - RNA, 24 nt, Artificial Sequence
  Synthetic
aauuuaugccuacagccuccuaau

SEQ ID NO: 43184 - RNA, 18 nt, Artificial Sequence
  Synthetic
uugauaccuuugucuaau

SEQ ID NO: 43185 - RNA, 19 nt, Artificial Sequence
  Synthetic
uuugauaccuuugucuaau

SEQ ID NO: 43186 - RNA, 20 nt, Artificial Sequence
  Synthetic
guuugauaccuuugucuaau

SEQ ID NO: 43187 - RNA, 21 nt, Artificial Sequence
  Synthetic
gguuugauaccuuugucuaau

SEQ ID NO: 43188 - RNA, 22 nt, Artificial Sequence
  Synthetic
cgguuugauaccuuugucuaau

SEQ ID NO: 43189 - RNA, 23 nt, Artificial Sequence
  Synthetic
acgguuugauaccuuugucuaau

SEQ ID NO: 43190 - RNA, 24 nt, Artificial Sequence
  Synthetic
uacgguuugauaccuuugucuaau

SEQ ID NO: 43191 - RNA, 18 nt, Artificial Sequence
  Synthetic
gguuuuguacagcaacau

SEQ ID NO: 43192 - RNA, 19 nt, Artificial Sequence
  Synthetic
agguuuuguacagcaacau

SEQ ID NO: 43193 - RNA, 20 nt, Artificial Sequence
  Synthetic
aagguuuuguacagcaacau

SEQ ID NO: 43194 - RNA, 21 nt, Artificial Sequence
  Synthetic
gaagguuuuguacagcaacau

SEQ ID NO: 43195 - RNA, 22 nt, Artificial Sequence
  Synthetic
cgaagguuuuguacagcaacau

SEQ ID NO: 43196 - RNA, 23 nt, Artificial Sequence
  Synthetic
ccgaagguuuuguacagcaacau

SEQ ID NO: 43197 - RNA, 24 nt, Artificial Sequence
  Synthetic
uccgaagguuuuguacagcaacau

SEQ ID NO: 43198 - RNA, 18 nt, Artificial Sequence
  Synthetic
uccaaggaauacuaacau

SEQ ID NO: 43199 - RNA, 19 nt, Artificial Sequence
  Synthetic
guccaaggaauacuaacau

SEQ ID NO: 43200 - RNA, 20 nt, Artificial Sequence
  Synthetic
aguccaaggaauacuaacau

SEQ ID NO: 43201 - RNA, 21 nt, Artificial Sequence
  Synthetic
gaguccaaggaauacuaacau

SEQ ID NO: 43202 - RNA, 22 nt, Artificial Sequence
  Synthetic
ugaguccaaggaauacuaacau

SEQ ID NO: 43203 - RNA, 23 nt, Artificial Sequence
  Synthetic
gugaguccaaggaauacuaacau

SEQ ID NO: 43204 - RNA, 24 nt, Artificial Sequence
  Synthetic
ugugaguccaaggaauacuaacau

SEQ ID NO: 43205 - RNA, 18 nt, Artificial Sequence
  Synthetic
  misc_feature (3)..(3): n is a, c, g, or u
cancccgguuguugacau

SEQ ID NO: 43206 - RNA, 19 nt, Artificial Sequence
  Synthetic
  misc_feature (4)..(4): n is a, c, g, or u
ccancccgguuguugacau

SEQ ID NO: 43207 - RNA, 20 nt, Artificial Sequence
  Synthetic
  misc_feature (5)..(5): n is a, c, g, or u
uccancccgguuguugacau

SEQ ID NO: 43208 - RNA, 21 nt, Artificial Sequence
  Synthetic
  misc_feature (6)..(6): n is a, c, g, or u
cuccancccgguuguugacau

SEQ ID NO: 43209 - RNA, 22 nt, Artificial Sequence
  Synthetic
  misc_feature (7)..(7): n is a, c, g, or u
ucuccancccgguuguugacau

SEQ ID NO: 43210 - RNA, 23 nt, Artificial Sequence
  Synthetic
  misc_feature (8)..(8): n is a, c, g, or u
uucuccancccgguuguugacau

SEQ ID NO: 43211 - RNA, 24 nt, Artificial Sequence
  Synthetic
  misc_feature (9)..(9): n is a, c, g, or u
uuucuccancccgguuguugacau

SEQ ID NO: 43212 - RNA, 18 nt, Artificial Sequence
  Synthetic
gcacagccuagcagccau

SEQ ID NO: 43213 - RNA, 19 nt, Artificial Sequence
  Synthetic
agcacagccuagcagccau

SEQ ID NO: 43214 - RNA, 20 nt, Artificial Sequence
  Synthetic
cagcacagccuagcagccau

SEQ ID NO: 43215 - RNA, 21 nt, Artificial Sequence
  Synthetic
gcagcacagccuagcagccau

SEQ ID NO: 43216 - RNA, 22 nt, Artificial Sequence
  Synthetic
ggcagcacagccuagcagccau

SEQ ID NO: 43217 - RNA, 23 nt, Artificial Sequence
  Synthetic
uggcagcacagccuagcagccau

SEQ ID NO: 43218 - RNA, 24 nt, Artificial Sequence
  Synthetic
uuggcagcacagccuagcagccau

SEQ ID NO: 43219 - RNA, 18 nt, Artificial Sequence
  Synthetic
acaugcauauaaaggcau

SEQ ID NO: 43220 - RNA, 19 nt, Artificial Sequence
  Synthetic
uacaugcauauaaaggcau

SEQ ID NO: 43221 - RNA, 20 nt, Artificial Sequence
  Synthetic
auacaugcauauaaaggcau

SEQ ID NO: 43222 - RNA, 21 nt, Artificial Sequence
  Synthetic
uauacaugcauauaaaggcau

SEQ ID NO: 43223 - RNA, 22 nt, Artificial Sequence
  Synthetic
guauacaugcauauaaaggcau

SEQ ID NO: 43224 - RNA, 23 nt, Artificial Sequence
  Synthetic
uguauacaugcauauaaaggcau

SEQ ID NO: 43225 - RNA, 24 nt, Artificial Sequence
  Synthetic
uuguauacaugcauauaaaggcau

SEQ ID NO: 43226 - RNA, 18 nt, Artificial Sequence
  Synthetic
aacaagaagaugaggcau

SEQ ID NO: 43227 - RNA, 19 nt, Artificial Sequence
  Synthetic
caacaagaagaugaggcau

SEQ ID NO: 43228 - RNA, 20 nt, Artificial Sequence
  Synthetic
ccaacaagaagaugaggcau

SEQ ID NO: 43229 - RNA, 21 nt, Artificial Sequence
  Synthetic
accaacaagaagaugaggcau

SEQ ID NO: 43230 - RNA, 22 nt, Artificial Sequence
  Synthetic
aaccaacaagaagaugaggcau

SEQ ID NO: 43231 - RNA, 23 nt, Artificial Sequence
  Synthetic
gaaccaacaagaagaugaggcau

SEQ ID NO: 43232 - RNA, 24 nt, Artificial Sequence
  Synthetic
agaaccaacaagaagaugaggcau

SEQ ID NO: 43233 - RNA, 18 nt, Artificial Sequence
  Synthetic
uagcuuguauacaugcau

SEQ ID NO: 43234 - RNA, 19 nt, Artificial Sequence
  Synthetic
uuagcuuguauacaugcau

SEQ ID NO: 43235 - RNA, 20 nt, Artificial Sequence
  Synthetic
cuuagcuuguauacaugcau

SEQ ID NO: 43236 - RNA, 21 nt, Artificial Sequence
  Synthetic
gcuuagcuuguauacaugcau

SEQ ID NO: 43237 - RNA, 22 nt, Artificial Sequence
  Synthetic
ugcuuagcuuguauacaugcau

SEQ ID NO: 43238 - RNA, 23 nt, Artificial Sequence
  Synthetic
cugcuuagcuuguauacaugcau

SEQ ID NO: 43239 - RNA, 24 nt, Artificial Sequence
  Synthetic
ccugcuuagcuuguauacaugcau

SEQ ID NO: 43240 - RNA, 18 nt, Artificial Sequence
  Synthetic
uuugcgaaagcccaagau

SEQ ID NO: 43241 - RNA, 19 nt, Artificial Sequence
  Synthetic
uuuugcgaaagcccaagau

SEQ ID NO: 43242 - RNA, 20 nt, Artificial Sequence
  Synthetic
auuuugcgaaagcccaagau

SEQ ID NO: 43243 - RNA, 21 nt, Artificial Sequence
  Synthetic
uauuuugcgaaagcccaagau

SEQ ID NO: 43244 - RNA, 22 nt, Artificial Sequence
  Synthetic
guauuuugcgaaagcccaagau

SEQ ID NO: 43245 - RNA, 23 nt, Artificial Sequence
  Synthetic
gguauuuugcgaaagcccaagau

SEQ ID NO: 43246 - RNA, 24 nt, Artificial Sequence
  Synthetic
agguauuuugcgaaagcccaagau

SEQ ID NO: 43247 - RNA, 18 nt, Artificial Sequence
  Synthetic
aagcggugucgagaagau

SEQ ID NO: 43248 - RNA, 19 nt, Artificial Sequence
  Synthetic
gaagcggugucgagaagau

SEQ ID NO: 43249 - RNA, 20 nt, Artificial Sequence
  Synthetic
ugaagcggugucgagaagau

SEQ ID NO: 43250 - RNA, 21 nt, Artificial Sequence
  Synthetic
cugaagcggugucgagaagau

SEQ ID NO: 43251 - RNA, 22 nt, Artificial Sequence
  Synthetic
gcugaagcggugucgagaagau

SEQ ID NO: 43252 - RNA, 23 nt, Artificial Sequence
  Synthetic
agcugaagcggugucgagaagau

SEQ ID NO: 43253 - RNA, 24 nt, Artificial Sequence
  Synthetic
aagcugaagcggugucgagaagau

SEQ ID NO: 43254 - RNA, 18 nt, Artificial Sequence
  Synthetic
gcacacgguccggcagau

SEQ ID NO: 43255 - RNA, 19 nt, Artificial Sequence
  Synthetic
ugcacacgguccggcagau

SEQ ID NO: 43256 - RNA, 20 nt, Artificial Sequence
  Synthetic
gugcacacgguccggcagau

SEQ ID NO: 43257 - RNA, 18 nt, Artificial Sequence
  Synthetic
  misc_feature (9)..(9): n is a, c, g, or u
auaacugcnuuggcagau

SEQ ID NO: 43258 - RNA, 19 nt, Artificial Sequence
  Synthetic
  misc_feature (10)..(10): n is a, c, g, or u
uauaacugcnuuggcagau

SEQ ID NO: 43259 - RNA, 20 nt, Artificial Sequence
  Synthetic
  misc_feature (11)..(11): n is a, c, g, or u
auauaacugcnuuggcagau

SEQ ID NO: 43260 - RNA, 21 nt, Artificial Sequence
  Synthetic
  misc_feature (12)..(12): n is a, c, g, or u
uauauaacugcnuuggcagau

SEQ ID NO: 43261 - RNA, 22 nt, Artificial Sequence
  Synthetic
  misc_feature (13)..(13): n is a, c, g, or u
uuauauaacugcnuuggcagau

SEQ ID NO: 43262 - RNA, 23 nt, Artificial Sequence
  Synthetic
  misc_feature (14)..(14): n is a, c, g, or u
cuuauauaacugcnuuggcagau

SEQ ID NO: 43263 - RNA, 24 nt, Artificial Sequence
  Synthetic
  misc_feature (15)..(15): n is a, c, g, or u
ucuuauauaacugcnuuggcagau

SEQ ID NO: 43264 - RNA, 18 nt, Artificial Sequence
  Synthetic
ggagaagauugacgagau

SEQ ID NO: 43265 - RNA, 19 nt, Artificial Sequence
  Synthetic
uggagaagauugacgagau

SEQ ID NO: 43266 - RNA, 20 nt, Artificial Sequence
  Synthetic
cuggagaagauugacgagau

SEQ ID NO: 43267 - RNA, 21 nt, Artificial Sequence
  Synthetic
ccuggagaagauugacgagau

SEQ ID NO: 43268 - RNA, 22 nt, Artificial Sequence
  Synthetic
uccuggagaagauugacgagau

SEQ ID NO: 43269 - RNA, 23 nt, Artificial Sequence
  Synthetic
auccuggagaagauugacgagau

SEQ ID NO: 43270 - RNA, 24 nt, Artificial Sequence
  Synthetic
aauccuggagaagauugacgagau

SEQ ID NO: 43271 - RNA, 18 nt, Artificial Sequence
  Synthetic
gaggcauagcagcaggau

SEQ ID NO: 43272 - RNA, 19 nt, Artificial Sequence
  Synthetic
ugaggcauagcagcaggau

SEQ ID NO: 43273 - RNA, 20 nt, Artificial Sequence
  Synthetic
augaggcauagcagcaggau

SEQ ID NO: 43274 - RNA, 21 nt, Artificial Sequence
  Synthetic
gaugaggcauagcagcaggau

SEQ ID NO: 43275 - RNA, 22 nt, Artificial Sequence
  Synthetic
agaugaggcauagcagcaggau

SEQ ID NO: 43276 - RNA, 23 nt, Artificial Sequence
  Synthetic
aagaugaggcauagcagcaggau

SEQ ID NO: 43277 - RNA, 24 nt, Artificial Sequence
  Synthetic
gaagaugaggcauagcagcaggau

SEQ ID NO: 43278 - RNA, 18 nt, Artificial Sequence
  Synthetic
gaguuugccaaucaggau

SEQ ID NO: 43279 - RNA, 19 nt, Artificial Sequence
  Synthetic
ggaguuugccaaucaggau

SEQ ID NO: 43280 - RNA, 20 nt, Artificial Sequence
  Synthetic
aggaguuugccaaucaggau

SEQ ID NO: 43281 - RNA, 21 nt, Artificial Sequence
  Synthetic
aaggaguuugccaaucaggau

SEQ ID NO: 43282 - RNA, 22 nt, Artificial Sequence
  Synthetic
gaaggaguuugccaaucaggau

SEQ ID NO: 43283 - RNA, 23 nt, Artificial Sequence
  Synthetic
agaaggaguuugccaaucaggau

SEQ ID NO: 43284 - RNA, 24 nt, Artificial Sequence
  Synthetic
aagaaggaguuugccaaucaggau

SEQ ID NO: 43285 - RNA, 18 nt, Artificial Sequence
  Synthetic
guacugguggucgaggau

SEQ ID NO: 43286 - RNA, 19 nt, Artificial Sequence
  Synthetic
cguacugguggucgaggau

SEQ ID NO: 43287 - RNA, 20 nt, Artificial Sequence
  Synthetic
ccguacugguggucgaggau

SEQ ID NO: 43288 - RNA, 21 nt, Artificial Sequence
  Synthetic
cccguacugguggucgaggau

SEQ ID NO: 43289 - RNA, 22 nt, Artificial Sequence
  Synthetic
ucccguacugguggucgaggau

SEQ ID NO: 43290 - RNA, 23 nt, Artificial Sequence
  Synthetic
gucccguacugguggucgaggau

SEQ ID NO: 43291 - RNA, 24 nt, Artificial Sequence
  Synthetic
ggucccguacugguggucgaggau

SEQ ID NO: 43292 - RNA, 18 nt, Artificial Sequence
  Synthetic
cggaaguguugauaggau

SEQ ID NO: 43293 - RNA, 19 nt, Artificial Sequence
  Synthetic
ccggaaguguugauaggau

SEQ ID NO: 43294 - RNA, 20 nt, Artificial Sequence
  Synthetic
uccggaaguguugauaggau

SEQ ID NO: 43295 - RNA, 21 nt, Artificial Sequence
  Synthetic
cuccggaaguguugauaggau

SEQ ID NO: 43296 - RNA, 22 nt, Artificial Sequence
  Synthetic
ucuccggaaguguugauaggau

SEQ ID NO: 43297 - RNA, 23 nt, Artificial Sequence
  Synthetic
gucuccggaaguguugauaggau

SEQ ID NO: 43298 - RNA, 24 nt, Artificial Sequence
  Synthetic
agucuccggaaguguugauaggau

SEQ ID NO: 43299 - RNA, 18 nt, Artificial Sequence
  Synthetic
accaccaaaucucuggau

SEQ ID NO: 43300 - RNA, 19 nt, Artificial Sequence
  Synthetic
gaccaccaaaucucuggau

SEQ ID NO: 43301 - RNA, 20 nt, Artificial Sequence
  Synthetic
ugaccaccaaaucucuggau

SEQ ID NO: 43302 - RNA, 21 nt, Artificial Sequence
  Synthetic
uugaccaccaaaucucuggau

SEQ ID NO: 43303 - RNA, 22 nt, Artificial Sequence
  Synthetic
auugaccaccaaaucucuggau

SEQ ID NO: 43304 - RNA, 23 nt, Artificial Sequence
  Synthetic
aauugaccaccaaaucucuggau

SEQ ID NO: 43305 - RNA, 24 nt, Artificial Sequence
  Synthetic
uaauugaccaccaaaucucuggau

SEQ ID NO: 43306 - RNA, 18 nt, Artificial Sequence
  Synthetic
ggugaggcgaacaaugau

SEQ ID NO: 43307 - RNA, 19 nt, Artificial Sequence
  Synthetic
uggugaggcgaacaaugau

SEQ ID NO: 43308 - RNA, 20 nt, Artificial Sequence
  Synthetic
auggugaggcgaacaaugau

SEQ ID NO: 43309 - RNA, 21 nt, Artificial Sequence
  Synthetic
uauggugaggcgaacaaugau

SEQ ID NO: 43310 - RNA, 22 nt, Artificial Sequence
  Synthetic
guauggugaggcgaacaaugau

SEQ ID NO: 43311 - RNA, 23 nt, Artificial Sequence
  Synthetic
uguauggugaggcgaacaaugau

SEQ ID NO: 43312 - RNA, 24 nt, Artificial Sequence
  Synthetic
cuguauggugaggcgaacaaugau

SEQ ID NO: 43313 - RNA, 18 nt, Artificial Sequence
  Synthetic
  misc_feature (6)..(6): n is a, c, g, or u
acugcnuuggcagaugau

SEQ ID NO: 43314 - RNA, 19 nt, Artificial Sequence
  Synthetic
  misc_feature (7)..(7): n is a, c, g, or u
aacugcnuuggcagaugau

SEQ ID NO: 43315 - RNA, 20 nt, Artificial Sequence
  Synthetic
  misc_feature (8)..(8): n is a, c, g, or u
uaacugcnuuggcagaugau

SEQ ID NO: 43316 - RNA, 21 nt, Artificial Sequence
  Synthetic
  misc_feature (9)..(9): n is a, c, g, or u
auaacugcnuuggcagaugau

SEQ ID NO: 43317 - RNA, 22 nt, Artificial Sequence
  Synthetic
  misc_feature (10)..(10): n is a, c, g, or u
uauaacugcnuuggcagaugau

SEQ ID NO: 43318 - RNA, 23 nt, Artificial Sequence
  Synthetic
  misc_feature (11)..(11): n is a, c, g, or u
auauaacugcnuuggcagaugau

SEQ ID NO: 43319 - RNA, 24 nt, Artificial Sequence
  Synthetic
  misc_feature (12)..(12): n is a, c, g, or u
uauauaacugcnuuggcagaugau

SEQ ID NO: 43320 - RNA, 18 nt, Artificial Sequence
  Synthetic
aggagauuggugagugau

SEQ ID NO: 43321 - RNA, 19 nt, Artificial Sequence
  Synthetic
caggagauuggugagugau

SEQ ID NO: 43322 - RNA, 20 nt, Artificial Sequence
  Synthetic
acaggagauuggugagugau

SEQ ID NO: 43323 - RNA, 21 nt, Artificial Sequence
  Synthetic
gacaggagauuggugagugau

SEQ ID NO: 43324 - RNA, 22 nt, Artificial Sequence
  Synthetic
ggacaggagauuggugagugau

SEQ ID NO: 43325 - RNA, 23 nt, Artificial Sequence
  Synthetic
aggacaggagauuggugagugau

SEQ ID NO: 43326 - RNA, 24 nt, Artificial Sequence
  Synthetic
gaggacaggagauuggugagugau

SEQ ID NO: 43327 - RNA, 18 nt, Artificial Sequence
  Synthetic
cuggguccaacuggugau

SEQ ID NO: 43328 - RNA, 19 nt, Artificial Sequence
  Synthetic
gcuggguccaacuggugau

SEQ ID NO: 43329 - RNA, 20 nt, Artificial Sequence
  Synthetic
ugcuggguccaacuggugau

SEQ ID NO: 43330 - RNA, 21 nt, Artificial Sequence
  Synthetic
augcuggguccaacuggugau

SEQ ID NO: 43331 - RNA, 22 nt, Artificial Sequence
  Synthetic
aaugcuggguccaacuggugau

SEQ ID NO: 43332 - RNA, 23 nt, Artificial Sequence
  Synthetic
gaaugcuggguccaacuggugau

SEQ ID NO: 43333 - RNA, 24 nt, Artificial Sequence
  Synthetic
ugaaugcuggguccaacuggugau

SEQ ID NO: 43334 - RNA, 18 nt, Artificial Sequence
  Synthetic
  misc_feature (16)..(16): n is a, c, g, or u
agccaccagcaggaanau

SEQ ID NO: 43335 - RNA, 19 nt, Artificial Sequence
  Synthetic
  misc_feature (17)..(17): n is a, c, g, or u
gagccaccagcaggaanau

SEQ ID NO: 43336 - RNA, 20 nt, Artificial Sequence
  Synthetic
  misc_feature (18)..(18): n is a, c, g, or u
ggagccaccagcaggaanau

SEQ ID NO: 43337 - RNA, 21 nt, Artificial Sequence
  Synthetic
  misc_feature (19)..(19): n is a, c, g, or u
uggagccaccagcaggaanau

SEQ ID NO: 43338 - RNA, 22 nt, Artificial Sequence
  Synthetic
  misc_feature (20)..(20): n is a, c, g, or u
cuggagccaccagcaggaanau

SEQ ID NO: 43339 - RNA, 23 nt, Artificial Sequence
  Synthetic
  misc_feature (21)..(21): n is a, c, g, or u
acuggagccaccagcaggaanau

SEQ ID NO: 43340 - RNA, 24 nt, Artificial Sequence
  Synthetic
  misc_feature (22)..(22): n is a, c, g, or u
aacuggagccaccagcaggaanau

SEQ ID NO: 43341 - RNA, 18 nt, Artificial Sequence
  Synthetic
caggaugaagaggaauau

SEQ ID NO: 43342 - RNA, 19 nt, Artificial Sequence
  Synthetic
gcaggaugaagaggaauau

SEQ ID NO: 43343 - RNA, 20 nt, Artificial Sequence
  Synthetic
agcaggaugaagaggaauau

SEQ ID NO: 43344 - RNA, 21 nt, Artificial Sequence
  Synthetic
cagcaggaugaagaggaauau

SEQ ID NO: 43345 - RNA, 22 nt, Artificial Sequence
  Synthetic
gcagcaggaugaagaggaauau

SEQ ID NO: 43346 - RNA, 23 nt, Artificial Sequence
  Synthetic
agcagcaggaugaagaggaauau

SEQ ID NO: 43347 - RNA, 24 nt, Artificial Sequence
  Synthetic
uagcagcaggaugaagaggaauau

SEQ ID NO: 43348 - RNA, 18 nt, Artificial Sequence
  Synthetic
aagccaaaaaggccauau

SEQ ID NO: 43349 - RNA, 19 nt, Artificial Sequence
  Synthetic
uaagccaaaaaggccauau

SEQ ID NO: 43350 - RNA, 20 nt, Artificial Sequence
  Synthetic
cuaagccaaaaaggccauau

SEQ ID NO: 43351 - RNA, 21 nt, Artificial Sequence
  Synthetic
ucuaagccaaaaaggccauau

SEQ ID NO: 43352 - RNA, 22 nt, Artificial Sequence
  Synthetic
gucuaagccaaaaaggccauau

SEQ ID NO: 43353 - RNA, 23 nt, Artificial Sequence
  Synthetic
ugucuaagccaaaaaggccauau

SEQ ID NO: 43354 - RNA, 24 nt, Artificial Sequence
  Synthetic
augucuaagccaaaaaggccauau

SEQ ID NO: 43355 - RNA, 18 nt, Artificial Sequence
  Synthetic
gcuuguauacaugcauau

SEQ ID NO: 43356 - RNA, 19 nt, Artificial Sequence
  Synthetic
agcuuguauacaugcauau

SEQ ID NO: 43357 - RNA, 20 nt, Artificial Sequence
  Synthetic
uagcuuguauacaugcauau

SEQ ID NO: 43358 - RNA, 21 nt, Artificial Sequence
  Synthetic
uuagcuuguauacaugcauau

SEQ ID NO: 43359 - RNA, 22 nt, Artificial Sequence
  Synthetic
cuuagcuuguauacaugcauau

SEQ ID NO: 43360 - RNA, 23 nt, Artificial Sequence
  Synthetic
gcuuagcuuguauacaugcauau

SEQ ID NO: 43361 - RNA, 24 nt, Artificial Sequence
  Synthetic
ugcuuagcuuguauacaugcauau

SEQ ID NO: 43362 - RNA, 18 nt, Artificial Sequence
  Synthetic
cuugaugcaaauggauau

SEQ ID NO: 43363 - RNA, 19 nt, Artificial Sequence
  Synthetic
ucuugaugcaaauggauau

SEQ ID NO: 43364 - RNA, 20 nt, Artificial Sequence
  Synthetic
gucuugaugcaaauggauau

SEQ ID NO: 43365 - RNA, 21 nt, Artificial Sequence
  Synthetic
ugucuugaugcaaauggauau

SEQ ID NO: 43366 - RNA, 22 nt, Artificial Sequence
  Synthetic
augucuugaugcaaauggauau

SEQ ID NO: 43367 - RNA, 23 nt, Artificial Sequence
  Synthetic
aaugucuugaugcaaauggauau

SEQ ID NO: 43368 - RNA, 24 nt, Artificial Sequence
  Synthetic
uaaugucuugaugcaaauggauau

SEQ ID NO: 43369 - RNA, 18 nt, Artificial Sequence
  Synthetic
ucuuguucccaaguauau

SEQ ID NO: 43370 - RNA, 19 nt, Artificial Sequence
  Synthetic
aucuuguucccaaguauau

SEQ ID NO: 43371 - RNA, 20 nt, Artificial Sequence
  Synthetic
gaucuuguucccaaguauau

SEQ ID NO: 43372 - RNA, 21 nt, Artificial Sequence
  Synthetic
agaucuuguucccaaguauau

SEQ ID NO: 43373 - RNA, 22 nt, Artificial Sequence
  Synthetic
uagaucuuguucccaaguauau

SEQ ID NO: 43374 - RNA, 23 nt, Artificial Sequence
  Synthetic
guagaucuuguucccaaguauau

SEQ ID NO: 43375 - RNA, 24 nt, Artificial Sequence
  Synthetic
uguagaucuuguucccaaguauau

SEQ ID NO: 43376 - RNA, 18 nt, Artificial Sequence
  Synthetic
aggauuaaagacagguau

SEQ ID NO: 43377 - RNA, 19 nt, Artificial Sequence
  Synthetic
caggauuaaagacagguau

SEQ ID NO: 43378 - RNA, 20 nt, Artificial Sequence
  Synthetic
ucaggauuaaagacagguau

SEQ ID NO: 43379 - RNA, 21 nt, Artificial Sequence
  Synthetic
aucaggauuaaagacagguau

SEQ ID NO: 43380 - RNA, 22 nt, Artificial Sequence
  Synthetic
aaucaggauuaaagacagguau

SEQ ID NO: 43381 - RNA, 23 nt, Artificial Sequence
  Synthetic
caaucaggauuaaagacagguau

SEQ ID NO: 43382 - RNA, 24 nt, Artificial Sequence
  Synthetic
ccaaucaggauuaaagacagguau

SEQ ID NO: 43383 - RNA, 18 nt, Artificial Sequence
  Synthetic
gucuagacucugcgguau

SEQ ID NO: 43384 - RNA, 19 nt, Artificial Sequence
  Synthetic
agucuagacucugcgguau

SEQ ID NO: 43385 - RNA, 20 nt, Artificial Sequence
  Synthetic
gagucuagacucugcgguau

SEQ ID NO: 43386 - RNA, 21 nt, Artificial Sequence
  Synthetic
cgagucuagacucugcgguau

SEQ ID NO: 43387 - RNA, 22 nt, Artificial Sequence
  Synthetic
acgagucuagacucugcgguau

SEQ ID NO: 43388 - RNA, 23 nt, Artificial Sequence
  Synthetic
cacgagucuagacucugcgguau

SEQ ID NO: 43389 - RNA, 24 nt, Artificial Sequence
  Synthetic
ccacgagucuagacucugcgguau

SEQ ID NO: 43390 - RNA, 18 nt, Artificial Sequence
  Synthetic
cuugccugagugcuguau

SEQ ID NO: 43391 - RNA, 19 nt, Artificial Sequence
  Synthetic
gcuugccugagugcuguau

SEQ ID NO: 43392 - RNA, 20 nt, Artificial Sequence
  Synthetic
ugcuugccugagugcuguau

SEQ ID NO: 43393 - RNA, 21 nt, Artificial Sequence
  Synthetic
uugcuugccugagugcuguau

SEQ ID NO: 43394 - RNA, 22 nt, Artificial Sequence
  Synthetic
auugcuugccugagugcuguau

SEQ ID NO: 43395 - RNA, 23 nt, Artificial Sequence
  Synthetic
  misc_feature (1)..(1): n is a, c, g, or u
nauugcuugccugagugcuguau

SEQ ID NO: 43396 - RNA, 24 nt, Artificial Sequence
  Synthetic
  misc_feature (2)..(2): n is a, c, g, or u
gnauugcuugccugagugcuguau

SEQ ID NO: 43397 - RNA, 18 nt, Artificial Sequence
  Synthetic
gggauguuucucucuuau

SEQ ID NO: 43398 - RNA, 19 nt, Artificial Sequence
  Synthetic
cgggauguuucucucuuau

SEQ ID NO: 43399 - RNA, 20 nt, Artificial Sequence
  Synthetic
acgggauguuucucucuuau

SEQ ID NO: 43400 - RNA, 18 nt, Artificial Sequence
  Synthetic
ggagugcgaauccacacu

SEQ ID NO: 43401 - RNA, 19 nt, Artificial Sequence
  Synthetic
aggagugcgaauccacacu

SEQ ID NO: 43402 - RNA, 20 nt, Artificial Sequence
  Synthetic
gaggagugcgaauccacacu

SEQ ID NO: 43403 - RNA, 21 nt, Artificial Sequence
  Synthetic
ggaggagugcgaauccacacu

SEQ ID NO: 43404 - RNA, 22 nt, Artificial Sequence
  Synthetic
aggaggagugcgaauccacacu

SEQ ID NO: 43405 - RNA, 23 nt, Artificial Sequence
  Synthetic
caggaggagugcgaauccacacu

SEQ ID NO: 43406 - RNA, 24 nt, Artificial Sequence
  Synthetic
gcaggaggagugcgaauccacacu

SEQ ID NO: 43407 - RNA, 18 nt, Artificial Sequence
  Synthetic
aaagguucuuuccccacu

SEQ ID NO: 43408 - RNA, 19 nt, Artificial Sequence
  Synthetic
gaaagguucuuuccccacu

SEQ ID NO: 43409 - RNA, 20 nt, Artificial Sequence
  Synthetic
ggaaagguucuuuccccacu

SEQ ID NO: 43410 - RNA, 21 nt, Artificial Sequence
  Synthetic
uggaaagguucuuuccccacu

SEQ ID NO: 43411 - RNA, 22 nt, Artificial Sequence
  Synthetic
guggaaagguucuuuccccacu

SEQ ID NO: 43412 - RNA, 23 nt, Artificial Sequence
  Synthetic
gguggaaagguucuuuccccacu

SEQ ID NO: 43413 - RNA, 24 nt, Artificial Sequence
  Synthetic
ugguggaaagguucuuuccccacu

SEQ ID NO: 43414 - RNA, 18 nt, Artificial Sequence
  Synthetic
cacugaacaaauggcacu

SEQ ID NO: 43415 - RNA, 19 nt, Artificial Sequence
  Synthetic
ccacugaacaaauggcacu

SEQ ID NO: 43416 - RNA, 20 nt, Artificial Sequence
  Synthetic
accacugaacaaauggcacu

SEQ ID NO: 43417 - RNA, 21 nt, Artificial Sequence
  Synthetic
aaccacugaacaaauggcacu

SEQ ID NO: 43418 - RNA, 22 nt, Artificial Sequence
  Synthetic
gaaccacugaacaaauggcacu

SEQ ID NO: 43419 - RNA, 23 nt, Artificial Sequence
  Synthetic
cgaaccacugaacaaauggcacu

SEQ ID NO: 43420 - RNA, 24 nt, Artificial Sequence
  Synthetic
acgaaccacugaacaaauggcacu

SEQ ID NO: 43421 - RNA, 18 nt, Artificial Sequence
  Synthetic
uuagugugcccugagacu

SEQ ID NO: 43422 - RNA, 19 nt, Artificial Sequence
  Synthetic
guuagugugcccugagacu

SEQ ID NO: 43423 - RNA, 20 nt, Artificial Sequence
  Synthetic
uguuagugugcccugagacu

SEQ ID NO: 43424 - RNA, 21 nt, Artificial Sequence
  Synthetic
uuguuagugugcccugagacu

SEQ ID NO: 43425 - RNA, 22 nt, Artificial Sequence
  Synthetic
guuguuagugugcccugagacu

SEQ ID NO: 43426 - RNA, 23 nt, Artificial Sequence
  Synthetic
aguuguuagugugcccugagacu

SEQ ID NO: 43427 - RNA, 24 nt, Artificial Sequence
  Synthetic
aaguuguuagugugcccugagacu

SEQ ID NO: 43428 - RNA, 18 nt, Artificial Sequence
  Synthetic
aacaaugaucagaggacu

SEQ ID NO: 43429 - RNA, 19 nt, Artificial Sequence
  Synthetic
gaacaaugaucagaggacu

SEQ ID NO: 43430 - RNA, 20 nt, Artificial Sequence
  Synthetic
cgaacaaugaucagaggacu

SEQ ID NO: 43431 - RNA, 21 nt, Artificial Sequence
  Synthetic
gcgaacaaugaucagaggacu

SEQ ID NO: 43432 - RNA, 22 nt, Artificial Sequence
  Synthetic
ggcgaacaaugaucagaggacu

SEQ ID NO: 43433 - RNA, 23 nt, Artificial Sequence
  Synthetic
aggcgaacaaugaucagaggacu

SEQ ID NO: 43434 - RNA, 24 nt, Artificial Sequence
  Synthetic
gaggcgaacaaugaucagaggacu

SEQ ID NO: 43435 - RNA, 18 nt, Artificial Sequence
  Synthetic
  misc_feature (2)..(2): n is a, c, g, or u
anauacaggccccugacu

SEQ ID NO: 43436 - RNA, 19 nt, Artificial Sequence
  Synthetic
  misc_feature (3)..(3): n is a, c, g, or u
aanauacaggccccugacu

SEQ ID NO: 43437 - RNA, 20 nt, Artificial Sequence
  Synthetic
  misc_feature (4)..(4): n is a, c, g, or u
gaanauacaggccccugacu

SEQ ID NO: 43438 - RNA, 21 nt, Artificial Sequence
  Synthetic
  misc_feature (5)..(5): n is a, c, g, or u
ggaanauacaggccccugacu

SEQ ID NO: 43439 - RNA, 22 nt, Artificial Sequence
  Synthetic
  misc_feature (6)..(6): n is a, c, g, or u
aggaanauacaggccccugacu

SEQ ID NO: 43440 - RNA, 23 nt, Artificial Sequence
  Synthetic
  misc_feature (7)..(7): n is a, c, g, or u
caggaanauacaggccccugacu

SEQ ID NO: 43441 - RNA, 24 nt, Artificial Sequence
  Synthetic
  misc_feature (8)..(8): n is a, c, g, or u
gcaggaanauacaggccccugacu

SEQ ID NO: 43442 - RNA, 18 nt, Artificial Sequence
  Synthetic
caaaagacaccaaauacu

SEQ ID NO: 43443 - RNA, 19 nt, Artificial Sequence
  Synthetic
ccaaaagacaccaaauacu

SEQ ID NO: 43444 - RNA, 20 nt, Artificial Sequence
  Synthetic
uccaaaagacaccaaauacu

SEQ ID NO: 43445 - RNA, 21 nt, Artificial Sequence
  Synthetic
cuccaaaagacaccaaauacu

SEQ ID NO: 43446 - RNA, 22 nt, Artificial Sequence
  Synthetic
acuccaaaagacaccaaauacu

SEQ ID NO: 43447 - RNA, 23 nt, Artificial Sequence
  Synthetic
cacuccaaaagacaccaaauacu

SEQ ID NO: 43448 - RNA, 24 nt, Artificial Sequence
  Synthetic
acacuccaaaagacaccaaauacu

SEQ ID NO: 43449 - RNA, 18 nt, Artificial Sequence
  Synthetic
cuucguuucucauuuacu

SEQ ID NO: 43450 - RNA, 19 nt, Artificial Sequence
  Synthetic
ucuucguuucucauuuacu

SEQ ID NO: 43451 - RNA, 20 nt, Artificial Sequence
  Synthetic
aucuucguuucucauuuacu

SEQ ID NO: 43452 - RNA, 21 nt, Artificial Sequence
  Synthetic
aaucuucguuucucauuuacu

SEQ ID NO: 43453 - RNA, 22 nt, Artificial Sequence
  Synthetic
uaaucuucguuucucauuuacu

SEQ ID NO: 43454 - RNA, 23 nt, Artificial Sequence
  Synthetic
uuaaucuucguuucucauuuacu

SEQ ID NO: 43455 - RNA, 24 nt, Artificial Sequence
  Synthetic
uuuaaucuucguuucucauuuacu

SEQ ID NO: 43456 - RNA, 18 nt, Artificial Sequence
  Synthetic
ccguaaaguuucccaccu

SEQ ID NO: 43457 - RNA, 19 nt, Artificial Sequence
  Synthetic
cccguaaaguuucccaccu

SEQ ID NO: 43458 - RNA, 20 nt, Artificial Sequence
  Synthetic
ccccguaaaguuucccaccu

SEQ ID NO: 43459 - RNA, 21 nt, Artificial Sequence
  Synthetic
gccccguaaaguuucccaccu

SEQ ID NO: 43460 - RNA, 22 nt, Artificial Sequence
  Synthetic
agccccguaaaguuucccaccu

SEQ ID NO: 43461 - RNA, 23 nt, Artificial Sequence
  Synthetic
cagccccguaaaguuucccaccu

SEQ ID NO: 43462 - RNA, 24 nt, Artificial Sequence
  Synthetic
acagccccguaaaguuucccaccu

SEQ ID NO: 43463 - RNA, 18 nt, Artificial Sequence
  Synthetic
cacacgggcacucccccu

SEQ ID NO: 43464 - RNA, 19 nt, Artificial Sequence
  Synthetic
acacacgggcacucccccu

SEQ ID NO: 43465 - RNA, 20 nt, Artificial Sequence
  Synthetic
gacacacgggcacucccccu

SEQ ID NO: 43466 - RNA, 21 nt, Artificial Sequence
  Synthetic
ggacacacgggcacucccccu

SEQ ID NO: 43467 - RNA, 22 nt, Artificial Sequence
  Synthetic
aggacacacgggcacucccccu

SEQ ID NO: 43468 - RNA, 23 nt, Artificial Sequence
  Synthetic
caggacacacgggcacucccccu

SEQ ID NO: 43469 - RNA, 24 nt, Artificial Sequence
  Synthetic
ccaggacacacgggcacucccccu

SEQ ID NO: 43470 - RNA, 18 nt, Artificial Sequence
  Synthetic
acagugggggaaagcccu

SEQ ID NO: 43471 - RNA, 19 nt, Artificial Sequence
  Synthetic
gacagugggggaaagcccu

SEQ ID NO: 43472 - RNA, 20 nt, Artificial Sequence
  Synthetic
agacagugggggaaagcccu

SEQ ID NO: 43473 - RNA, 21 nt, Artificial Sequence
  Synthetic
cagacagugggggaaagcccu

SEQ ID NO: 43474 - RNA, 22 nt, Artificial Sequence
  Synthetic
ccagacagugggggaaagcccu

SEQ ID NO: 43475 - RNA, 23 nt, Artificial Sequence
  Synthetic
gccagacagugggggaaagcccu

SEQ ID NO: 43476 - RNA, 24 nt, Artificial Sequence
  Synthetic
agccagacagugggggaaagcccu

SEQ ID NO: 43477 - RNA, 18 nt, Artificial Sequence
  Synthetic
caguuggcagcacagccu

SEQ ID NO: 43478 - RNA, 19 nt, Artificial Sequence
  Synthetic
ccaguuggcagcacagccu

SEQ ID NO: 43479 - RNA, 20 nt, Artificial Sequence
  Synthetic
uccaguuggcagcacagccu

SEQ ID NO: 43480 - RNA, 21 nt, Artificial Sequence
  Synthetic
auccaguuggcagcacagccu

SEQ ID NO: 43481 - RNA, 22 nt, Artificial Sequence
  Synthetic
gauccaguuggcagcacagccu

SEQ ID NO: 43482 - RNA, 23 nt, Artificial Sequence
  Synthetic
ggauccaguuggcagcacagccu

SEQ ID NO: 43483 - RNA, 24 nt, Artificial Sequence
  Synthetic
aggauccaguuggcagcacagccu

SEQ ID NO: 43484 - RNA, 18 nt, Artificial Sequence
  Synthetic
uauauagaauacccgccu

SEQ ID NO: 43485 - RNA, 19 nt, Artificial Sequence
  Synthetic
uuauauagaauacccgccu

SEQ ID NO: 43486 - RNA, 20 nt, Artificial Sequence
  Synthetic
cuuauauagaauacccgccu

SEQ ID NO: 43487 - RNA, 18 nt, Artificial Sequence
  Synthetic
guuuacagagaaaggccu

SEQ ID NO: 43488 - RNA, 19 nt, Artificial Sequence
  Synthetic
uguuuacagagaaaggccu

SEQ ID NO: 43489 - RNA, 20 nt, Artificial Sequence
  Synthetic
uuguuuacagagaaaggccu

SEQ ID NO: 43490 - RNA, 21 nt, Artificial Sequence
  Synthetic
auuguuuacagagaaaggccu

SEQ ID NO: 43491 - RNA, 22 nt, Artificial Sequence
  Synthetic
uauuguuuacagagaaaggccu

SEQ ID NO: 43492 - RNA, 23 nt, Artificial Sequence
  Synthetic
guauuguuuacagagaaaggccu

SEQ ID NO: 43493 - RNA, 24 nt, Artificial Sequence
  Synthetic
uguauuguuuacagagaaaggccu

SEQ ID NO: 43494 - RNA, 18 nt, Artificial Sequence
  Synthetic
uuuccaaucaauuggccu

SEQ ID NO: 43495 - RNA, 19 nt, Artificial Sequence
  Synthetic
cuuuccaaucaauuggccu

SEQ ID NO: 43496 - RNA, 20 nt, Artificial Sequence
  Synthetic
acuuuccaaucaauuggccu

SEQ ID NO: 43497 - RNA, 21 nt, Artificial Sequence
  Synthetic
gacuuuccaaucaauuggccu

SEQ ID NO: 43498 - RNA, 22 nt, Artificial Sequence
  Synthetic
agacuuuccaaucaauuggccu

SEQ ID NO: 43499 - RNA, 23 nt, Artificial Sequence
  Synthetic
cagacuuuccaaucaauuggccu

SEQ ID NO: 43500 - RNA, 24 nt, Artificial Sequence
  Synthetic
acagacuuuccaaucaauuggccu

SEQ ID NO: 43501 - RNA, 18 nt, Artificial Sequence
  Synthetic
cagaccgggccguugccu

SEQ ID NO: 43502 - RNA, 19 nt, Artificial Sequence
  Synthetic
acagaccgggccguugccu

SEQ ID NO: 43503 - RNA, 20 nt, Artificial Sequence
  Synthetic
cacagaccgggccguugccu

SEQ ID NO: 43504 - RNA, 21 nt, Artificial Sequence
  Synthetic
gcacagaccgggccguugccu

SEQ ID NO: 43505 - RNA, 22 nt, Artificial Sequence
  Synthetic
ggcacagaccgggccguugccu

SEQ ID NO: 43506 - RNA, 23 nt, Artificial Sequence
  Synthetic
uggcacagaccgggccguugccu

SEQ ID NO: 43507 - RNA, 24 nt, Artificial Sequence
  Synthetic
uuggcacagaccgggccguugccu

SEQ ID NO: 43508 - RNA, 18 nt, Artificial Sequence
  Synthetic
ugcaggguccccaauccu

SEQ ID NO: 43509 - RNA, 19 nt, Artificial Sequence
  Synthetic
gugcaggguccccaauccu

SEQ ID NO: 43510 - RNA, 20 nt, Artificial Sequence
  Synthetic
ggugcaggguccccaauccu

SEQ ID NO: 43511 - RNA, 18 nt, Artificial Sequence
  Synthetic
ugaucgggaaggaauccu

SEQ ID NO: 43512 - RNA, 19 nt, Artificial Sequence
  Synthetic
gugaucgggaaggaauccu

SEQ ID NO: 43513 - RNA, 20 nt, Artificial Sequence
  Synthetic
ggugaucgggaaggaauccu

SEQ ID NO: 43514 - RNA, 21 nt, Artificial Sequence
  Synthetic
uggugaucgggaaggaauccu

SEQ ID NO: 43515 - RNA, 22 nt, Artificial Sequence
  Synthetic
cuggugaucgggaaggaauccu

SEQ ID NO: 43516 - RNA, 23 nt, Artificial Sequence
  Synthetic
acuggugaucgggaaggaauccu

SEQ ID NO: 43517 - RNA, 24 nt, Artificial Sequence
  Synthetic
aacuggugaucgggaaggaauccu

SEQ ID NO: 43518 - RNA, 18 nt, Artificial Sequence
  Synthetic
gccacccaaggcacagcu

SEQ ID NO: 43519 - RNA, 19 nt, Artificial Sequence
  Synthetic
agccacccaaggcacagcu

SEQ ID NO: 43520 - RNA, 20 nt, Artificial Sequence
  Synthetic
aagccacccaaggcacagcu

SEQ ID NO: 43521 - RNA, 21 nt, Artificial Sequence
  Synthetic
aaagccacccaaggcacagcu

SEQ ID NO: 43522 - RNA, 22 nt, Artificial Sequence
  Synthetic
uaaagccacccaaggcacagcu

SEQ ID NO: 43523 - RNA, 23 nt, Artificial Sequence
  Synthetic
cuaaagccacccaaggcacagcu

SEQ ID NO: 43524 - RNA, 24 nt, Artificial Sequence
  Synthetic
ccuaaagccacccaaggcacagcu

SEQ ID NO: 43525 - RNA, 18 nt, Artificial Sequence
  Synthetic
  misc_feature (10)..(10): n is a, c, g, or u
cacaucaucnauauagcu

SEQ ID NO: 43526 - RNA, 19 nt, Artificial Sequence
  Synthetic
  misc_feature (11)..(11): n is a, c, g, or u
ccacaucaucnauauagcu

SEQ ID NO: 43527 - RNA, 20 nt, Artificial Sequence
  Synthetic
  misc_feature (12)..(12): n is a, c, g, or u
accacaucaucnauauagcu

SEQ ID NO: 43528 - RNA, 21 nt, Artificial Sequence
  Synthetic
  misc_feature (13)..(13): n is a, c, g, or u
uaccacaucaucnauauagcu

SEQ ID NO: 43529 - RNA, 22 nt, Artificial Sequence
  Synthetic
  misc_feature (14)..(14): n is a, c, g, or u
auaccacaucaucnauauagcu

SEQ ID NO: 43530 - RNA, 23 nt, Artificial Sequence
  Synthetic
  misc_feature (15)..(15): n is a, c, g, or u
aauaccacaucaucnauauagcu

SEQ ID NO: 43531 - RNA, 24 nt, Artificial Sequence
  Synthetic
  misc_feature (16)..(16): n is a, c, g, or u
caauaccacaucaucnauauagcu

SEQ ID NO: 43532 - RNA, 18 nt, Artificial Sequence
  Synthetic
cccacaaaaugaagcgcu

SEQ ID NO: 43533 - RNA, 19 nt, Artificial Sequence
  Synthetic
acccacaaaaugaagcgcu

SEQ ID NO: 43534 - RNA, 20 nt, Artificial Sequence
  Synthetic
gacccacaaaaugaagcgcu

SEQ ID NO: 43535 - RNA, 21 nt, Artificial Sequence
  Synthetic
ugacccacaaaaugaagcgcu

SEQ ID NO: 43536 - RNA, 22 nt, Artificial Sequence
  Synthetic
gugacccacaaaaugaagcgcu

SEQ ID NO: 43537 - RNA, 23 nt, Artificial Sequence
  Synthetic
ggugacccacaaaaugaagcgcu

SEQ ID NO: 43538 - RNA, 24 nt, Artificial Sequence
  Synthetic
uggugacccacaaaaugaagcgcu

SEQ ID NO: 43539 - RNA, 18 nt, Artificial Sequence
  Synthetic
uccgcuggauucagcgcu

SEQ ID NO: 43540 - RNA, 19 nt, Artificial Sequence
  Synthetic
guccgcuggauucagcgcu

SEQ ID NO: 43541 - RNA, 20 nt, Artificial Sequence
  Synthetic
cguccgcuggauucagcgcu

SEQ ID NO: 43542 - RNA, 18 nt, Artificial Sequence
  Synthetic
uuuugcuccagaccggcu

SEQ ID NO: 43543 - RNA, 19 nt, Artificial Sequence
  Synthetic
guuuugcuccagaccggcu

SEQ ID NO: 43544 - RNA, 20 nt, Artificial Sequence
  Synthetic
aguuuugcuccagaccggcu

SEQ ID NO: 43545 - RNA, 21 nt, Artificial Sequence
  Synthetic
gaguuuugcuccagaccggcu

SEQ ID NO: 43546 - RNA, 22 nt, Artificial Sequence
  Synthetic
ugaguuuugcuccagaccggcu

SEQ ID NO: 43547 - RNA, 23 nt, Artificial Sequence
  Synthetic
augaguuuugcuccagaccggcu

SEQ ID NO: 43548 - RNA, 24 nt, Artificial Sequence
  Synthetic
aaugaguuuugcuccagaccggcu

SEQ ID NO: 43549 - RNA, 18 nt, Artificial Sequence
  Synthetic
agagcuugguggaaugcu

SEQ ID NO: 43550 - RNA, 19 nt, Artificial Sequence
  Synthetic
uagagcuugguggaaugcu

SEQ ID NO: 43551 - RNA, 20 nt, Artificial Sequence
  Synthetic
guagagcuugguggaaugcu

SEQ ID NO: 43552 - RNA, 21 nt, Artificial Sequence
  Synthetic
uguagagcuugguggaaugcu

SEQ ID NO: 43553 - RNA, 22 nt, Artificial Sequence
  Synthetic
uuguagagcuugguggaaugcu

SEQ ID NO: 43554 - RNA, 23 nt, Artificial Sequence
  Synthetic
uuuguagagcuugguggaaugcu

SEQ ID NO: 43555 - RNA, 24 nt, Artificial Sequence
  Synthetic
uuuuguagagcuugguggaaugcu

SEQ ID NO: 43556 - RNA, 18 nt, Artificial Sequence
  Synthetic
gcaggaggcggaucugcu

SEQ ID NO: 43557 - RNA, 19 nt, Artificial Sequence
  Synthetic
ggcaggaggcggaucugcu

SEQ ID NO: 43558 - RNA, 20 nt, Artificial Sequence
  Synthetic
aggcaggaggcggaucugcu

SEQ ID NO: 43559 - RNA, 21 nt, Artificial Sequence
  Synthetic
gaggcaggaggcggaucugcu

SEQ ID NO: 43560 - RNA, 22 nt, Artificial Sequence
  Synthetic
ggaggcaggaggcggaucugcu

SEQ ID NO: 43561 - RNA, 23 nt, Artificial Sequence
  Synthetic
uggaggcaggaggcggaucugcu

SEQ ID NO: 43562 - RNA, 24 nt, Artificial Sequence
  Synthetic
guggaggcaggaggcggaucugcu

SEQ ID NO: 43563 - RNA, 18 nt, Artificial Sequence
  Synthetic
gaauccuagaggauugcu

SEQ ID NO: 43564 - RNA, 19 nt, Artificial Sequence
  Synthetic
ggaauccuagaggauugcu

SEQ ID NO: 43565 - RNA, 20 nt, Artificial Sequence
  Synthetic
aggaauccuagaggauugcu

SEQ ID NO: 43566 - RNA, 21 nt, Artificial Sequence
  Synthetic
aaggaauccuagaggauugcu

SEQ ID NO: 43567 - RNA, 22 nt, Artificial Sequence
  Synthetic
gaaggaauccuagaggauugcu

SEQ ID NO: 43568 - RNA, 23 nt, Artificial Sequence
  Synthetic
ggaaggaauccuagaggauugcu

SEQ ID NO: 43569 - RNA, 24 nt, Artificial Sequence
  Synthetic
gggaaggaauccuagaggauugcu

SEQ ID NO: 43570 - RNA, 18 nt, Artificial Sequence
  Synthetic
gucccaaugaguuuugcu

SEQ ID NO: 43571 - RNA, 19 nt, Artificial Sequence
  Synthetic
agucccaaugaguuuugcu

SEQ ID NO: 43572 - RNA, 20 nt, Artificial Sequence
  Synthetic
cagucccaaugaguuuugcu

SEQ ID NO: 43573 - RNA, 21 nt, Artificial Sequence
  Synthetic
ucagucccaaugaguuuugcu

SEQ ID NO: 43574 - RNA, 22 nt, Artificial Sequence
  Synthetic
gucagucccaaugaguuuugcu

SEQ ID NO: 43575 - RNA, 23 nt, Artificial Sequence
  Synthetic
ugucagucccaaugaguuuugcu

SEQ ID NO: 43576 - RNA, 24 nt, Artificial Sequence
  Synthetic
uugucagucccaaugaguuuugcu

SEQ ID NO: 43577 - RNA, 18 nt, Artificial Sequence
  Synthetic
agaguuugggaaaaaucu

SEQ ID NO: 43578 - RNA, 19 nt, Artificial Sequence
  Synthetic
uagaguuugggaaaaaucu

SEQ ID NO: 43579 - RNA, 20 nt, Artificial Sequence
  Synthetic
guagaguuugggaaaaaucu

SEQ ID NO: 43580 - RNA, 21 nt, Artificial Sequence
  Synthetic
aguagaguuugggaaaaaucu

SEQ ID NO: 43581 - RNA, 22 nt, Artificial Sequence
  Synthetic
uaguagaguuugggaaaaaucu

SEQ ID NO: 43582 - RNA, 23 nt, Artificial Sequence
  Synthetic
uuaguagaguuugggaaaaaucu

SEQ ID NO: 43583 - RNA, 24 nt, Artificial Sequence
  Synthetic
uuuaguagaguuugggaaaaaucu

SEQ ID NO: 43584 - RNA, 18 nt, Artificial Sequence
  Synthetic
gaggcaggaggcggaucu

SEQ ID NO: 43585 - RNA, 19 nt, Artificial Sequence
  Synthetic
ggaggcaggaggcggaucu

SEQ ID NO: 43586 - RNA, 20 nt, Artificial Sequence
  Synthetic
uggaggcaggaggcggaucu

SEQ ID NO: 43587 - RNA, 21 nt, Artificial Sequence
  Synthetic
guggaggcaggaggcggaucu

SEQ ID NO: 43588 - RNA, 22 nt, Artificial Sequence
  Synthetic
gguggaggcaggaggcggaucu

SEQ ID NO: 43589 - RNA, 23 nt, Artificial Sequence
  Synthetic
ugguggaggcaggaggcggaucu

SEQ ID NO: 43590 - RNA, 24 nt, Artificial Sequence
  Synthetic
uugguggaggcaggaggcggaucu

SEQ ID NO: 43591 - RNA, 18 nt, Artificial Sequence
  Synthetic
ucucuggaugcuggaucu

SEQ ID NO: 43592 - RNA, 19 nt, Artificial Sequence
  Synthetic
aucucuggaugcuggaucu

SEQ ID NO: 43593 - RNA, 20 nt, Artificial Sequence
  Synthetic
aaucucuggaugcuggaucu

SEQ ID NO: 43594 - RNA, 21 nt, Artificial Sequence
  Synthetic
aaaucucuggaugcuggaucu

SEQ ID NO: 43595 - RNA, 22 nt, Artificial Sequence
  Synthetic
caaaucucuggaugcuggaucu

SEQ ID NO: 43596 - RNA, 23 nt, Artificial Sequence
  Synthetic
ccaaaucucuggaugcuggaucu

SEQ ID NO: 43597 - RNA, 24 nt, Artificial Sequence
  Synthetic
accaaaucucuggaugcuggaucu

SEQ ID NO: 43598 - RNA, 18 nt, Artificial Sequence
  Synthetic
cucaagaacgguuucucu

SEQ ID NO: 43599 - RNA, 19 nt, Artificial Sequence
  Synthetic
acucaagaacgguuucucu

SEQ ID NO: 43600 - RNA, 20 nt, Artificial Sequence
  Synthetic
uacucaagaacgguuucucu

SEQ ID NO: 43601 - RNA, 21 nt, Artificial Sequence
  Synthetic
auacucaagaacgguuucucu

SEQ ID NO: 43602 - RNA, 22 nt, Artificial Sequence
  Synthetic
aauacucaagaacgguuucucu

SEQ ID NO: 43603 - RNA, 23 nt, Artificial Sequence
  Synthetic
aaauacucaagaacgguuucucu

SEQ ID NO: 43604 - RNA, 24 nt, Artificial Sequence
  Synthetic
caaauacucaagaacgguuucucu

SEQ ID NO: 43605 - RNA, 18 nt, Artificial Sequence
  Synthetic
gucuaacaacaguagucu

SEQ ID NO: 43606 - RNA, 19 nt, Artificial Sequence
  Synthetic
cgucuaacaacaguagucu

SEQ ID NO: 43607 - RNA, 20 nt, Artificial Sequence
  Synthetic
ucgucuaacaacaguagucu

SEQ ID NO: 43608 - RNA, 21 nt, Artificial Sequence
  Synthetic
uucgucuaacaacaguagucu

SEQ ID NO: 43609 - RNA, 22 nt, Artificial Sequence
  Synthetic
cuucgucuaacaacaguagucu

SEQ ID NO: 43610 - RNA, 23 nt, Artificial Sequence
  Synthetic
ucuucgucuaacaacaguagucu

SEQ ID NO: 43611 - RNA, 24 nt, Artificial Sequence
  Synthetic
cucuucgucuaacaacaguagucu

SEQ ID NO: 43612 - RNA, 18 nt, Artificial Sequence
  Synthetic
cgauugagaucuucgucu

SEQ ID NO: 43613 - RNA, 19 nt, Artificial Sequence
  Synthetic
gcgauugagaucuucgucu

SEQ ID NO: 43614 - RNA, 20 nt, Artificial Sequence
  Synthetic
ggcgauugagaucuucgucu

SEQ ID NO: 43615 - RNA, 18 nt, Artificial Sequence
  Synthetic
ggaccugccucuucgucu

SEQ ID NO: 43616 - RNA, 19 nt, Artificial Sequence
  Synthetic
gggaccugccucuucgucu

SEQ ID NO: 43617 - RNA, 20 nt, Artificial Sequence
  Synthetic
ggggaccugccucuucgucu

SEQ ID NO: 43618 - RNA, 18 nt, Artificial Sequence
  Synthetic
aggggcauuugguggucu

SEQ ID NO: 43619 - RNA, 19 nt, Artificial Sequence
  Synthetic
uaggggcauuugguggucu

SEQ ID NO: 43620 - RNA, 20 nt, Artificial Sequence
  Synthetic
auaggggcauuugguggucu

SEQ ID NO: 43621 - RNA, 21 nt, Artificial Sequence
  Synthetic
gauaggggcauuugguggucu

SEQ ID NO: 43622 - RNA, 22 nt, Artificial Sequence
  Synthetic
ggauaggggcauuugguggucu

SEQ ID NO: 43623 - RNA, 23 nt, Artificial Sequence
  Synthetic
aggauaggggcauuugguggucu

SEQ ID NO: 43624 - RNA, 24 nt, Artificial Sequence
  Synthetic
uaggauaggggcauuugguggucu

SEQ ID NO: 43625 - RNA, 18 nt, Artificial Sequence
  Synthetic
aggcgagggaguucuucu

SEQ ID NO: 43626 - RNA, 19 nt, Artificial Sequence
  Synthetic
gaggcgagggaguucuucu

SEQ ID NO: 43627 - RNA, 20 nt, Artificial Sequence
  Synthetic
cgaggcgagggaguucuucu

SEQ ID NO: 43628 - RNA, 21 nt, Artificial Sequence
  Synthetic
gcgaggcgagggaguucuucu

SEQ ID NO: 43629 - RNA, 22 nt, Artificial Sequence
  Synthetic
ugcgaggcgagggaguucuucu

SEQ ID NO: 43630 - RNA, 23 nt, Artificial Sequence
  Synthetic
cugcgaggcgagggaguucuucu

SEQ ID NO: 43631 - RNA, 24 nt, Artificial Sequence
  Synthetic
ucugcgaggcgagggaguucuucu

SEQ ID NO: 43632 - RNA, 18 nt, Artificial Sequence
  Synthetic
  misc_feature (3)..(3): n is a, c, g, or u
uunugugugauguguucu

SEQ ID NO: 43633 - RNA, 19 nt, Artificial Sequence
  Synthetic
  misc_feature (4)..(4): n is a, c, g, or u
uuunugugugauguguucu

SEQ ID NO: 43634 - RNA, 20 nt, Artificial Sequence
  Synthetic
  misc_feature (5)..(5): n is a, c, g, or u
uuuunugugugauguguucu

SEQ ID NO: 43635 - RNA, 21 nt, Artificial Sequence
  Synthetic
  misc_feature (6)..(6): n is a, c, g, or u
auuuunugugugauguguucu

SEQ ID NO: 43636 - RNA, 22 nt, Artificial Sequence
  Synthetic
  misc_feature (7)..(7): n is a, c, g, or u
aauuuunugugugauguguucu

SEQ ID NO: 43637 - RNA, 23 nt, Artificial Sequence
  Synthetic
  misc_feature (8)..(8): n is a, c, g, or u
uaauuuunugugugauguguucu

SEQ ID NO: 43638 - RNA, 24 nt, Artificial Sequence
  Synthetic
  misc_feature (9)..(9): n is a, c, g, or u
uuaauuuunugugugauguguucu

SEQ ID NO: 43639 - RNA, 18 nt, Artificial Sequence
  Synthetic
gaacagacgggaaaaagu

SEQ ID NO: 43640 - RNA, 19 nt, Artificial Sequence
  Synthetic
cgaacagacgggaaaaagu

SEQ ID NO: 43641 - RNA, 20 nt, Artificial Sequence
  Synthetic
acgaacagacgggaaaaagu

SEQ ID NO: 43642 - RNA, 21 nt, Artificial Sequence
  Synthetic
cacgaacagacgggaaaaagu

SEQ ID NO: 43643 - RNA, 22 nt, Artificial Sequence
  Synthetic
ucacgaacagacgggaaaaagu

SEQ ID NO: 43644 - RNA, 23 nt, Artificial Sequence
  Synthetic
aucacgaacagacgggaaaaagu

SEQ ID NO: 43645 - RNA, 24 nt, Artificial Sequence
  Synthetic
gaucacgaacagacgggaaaaagu

SEQ ID NO: 43646 - RNA, 18 nt, Artificial Sequence
  Synthetic
auaaguuggcgagaaagu

SEQ ID NO: 43647 - RNA, 19 nt, Artificial Sequence
  Synthetic
uauaaguuggcgagaaagu

SEQ ID NO: 43648 - RNA, 20 nt, Artificial Sequence
  Synthetic
uuauaaguuggcgagaaagu

SEQ ID NO: 43649 - RNA, 21 nt, Artificial Sequence
  Synthetic
cuuauaaguuggcgagaaagu

SEQ ID NO: 43650 - RNA, 22 nt, Artificial Sequence
  Synthetic
ccuuauaaguuggcgagaaagu

SEQ ID NO: 43651 - RNA, 23 nt, Artificial Sequence
  Synthetic
gccuuauaaguuggcgagaaagu

SEQ ID NO: 43652 - RNA, 24 nt, Artificial Sequence
  Synthetic
ggccuuauaaguuggcgagaaagu

SEQ ID NO: 43653 - RNA, 18 nt, Artificial Sequence
  Synthetic
gcgauagccaggacaagu

SEQ ID NO: 43654 - RNA, 19 nt, Artificial Sequence
  Synthetic
agcgauagccaggacaagu

SEQ ID NO: 43655 - RNA, 20 nt, Artificial Sequence
  Synthetic
cagcgauagccaggacaagu

SEQ ID NO: 43656 - RNA, 21 nt, Artificial Sequence
  Synthetic
ccagcgauagccaggacaagu

SEQ ID NO: 43657 - RNA, 22 nt, Artificial Sequence
  Synthetic
uccagcgauagccaggacaagu

SEQ ID NO: 43658 - RNA, 23 nt, Artificial Sequence
  Synthetic
auccagcgauagccaggacaagu

SEQ ID NO: 43659 - RNA, 24 nt, Artificial Sequence
  Synthetic
cauccagcgauagccaggacaagu

SEQ ID NO: 43660 - RNA, 18 nt, Artificial Sequence
  Synthetic
guugacauaacaaacagu

SEQ ID NO: 43661 - RNA, 19 nt, Artificial Sequence
  Synthetic
uguugacauaacaaacagu

SEQ ID NO: 43662 - RNA, 20 nt, Artificial Sequence
  Synthetic
uuguugacauaacaaacagu

SEQ ID NO: 43663 - RNA, 21 nt, Artificial Sequence
  Synthetic
guuguugacauaacaaacagu

SEQ ID NO: 43664 - RNA, 22 nt, Artificial Sequence
  Synthetic
gguuguugacauaacaaacagu

SEQ ID NO: 43665 - RNA, 23 nt, Artificial Sequence
  Synthetic
cgguuguugacauaacaaacagu

SEQ ID NO: 43666 - RNA, 24 nt, Artificial Sequence
  Synthetic
ccgguuguugacauaacaaacagu

SEQ ID NO: 43667 - RNA, 18 nt, Artificial Sequence
  Synthetic
agcugaaagccagacagu

SEQ ID NO: 43668 - RNA, 19 nt, Artificial Sequence
  Synthetic
uagcugaaagccagacagu

SEQ ID NO: 43669 - RNA, 20 nt, Artificial Sequence
  Synthetic
auagcugaaagccagacagu

SEQ ID NO: 43670 - RNA, 21 nt, Artificial Sequence
  Synthetic
uauagcugaaagccagacagu

SEQ ID NO: 43671 - RNA, 22 nt, Artificial Sequence
  Synthetic
auauagcugaaagccagacagu

SEQ ID NO: 43672 - RNA, 23 nt, Artificial Sequence
  Synthetic
  misc_feature (1)..(1): n is a, c, g, or u
nauauagcugaaagccagacagu

SEQ ID NO: 43673 - RNA, 24 nt, Artificial Sequence
  Synthetic
  misc_feature (2)..(2): n is a, c, g, or u
cnauauagcugaaagccagacagu

SEQ ID NO: 43674 - RNA, 18 nt, Artificial Sequence
  Synthetic
guaaauauuuaguagagu

SEQ ID NO: 43675 - RNA, 19 nt, Artificial Sequence
  Synthetic
gguaaauauuuaguagagu

SEQ ID NO: 43676 - RNA, 20 nt, Artificial Sequence
  Synthetic
ugguaaauauuuaguagagu

SEQ ID NO: 43677 - RNA, 21 nt, Artificial Sequence
  Synthetic
augguaaauauuuaguagagu

SEQ ID NO: 43678 - RNA, 22 nt, Artificial Sequence
  Synthetic
aaugguaaauauuuaguagagu

SEQ ID NO: 43679 - RNA, 23 nt, Artificial Sequence
  Synthetic
uaaugguaaauauuuaguagagu

SEQ ID NO: 43680 - RNA, 24 nt, Artificial Sequence
  Synthetic
cuaaugguaaauauuuaguagagu

SEQ ID NO: 43681 - RNA, 18 nt, Artificial Sequence
  Synthetic
gagaaguccaccacgagu

SEQ ID NO: 43682 - RNA, 19 nt, Artificial Sequence
  Synthetic
agagaaguccaccacgagu

SEQ ID NO: 43683 - RNA, 20 nt, Artificial Sequence
  Synthetic
gagagaaguccaccacgagu

SEQ ID NO: 43684 - RNA, 21 nt, Artificial Sequence
  Synthetic
ugagagaaguccaccacgagu

SEQ ID NO: 43685 - RNA, 22 nt, Artificial Sequence
  Synthetic
uugagagaaguccaccacgagu

SEQ ID NO: 43686 - RNA, 23 nt, Artificial Sequence
  Synthetic
auugagagaaguccaccacgagu

SEQ ID NO: 43687 - RNA, 24 nt, Artificial Sequence
  Synthetic
aauugagagaaguccaccacgagu

SEQ ID NO: 43688 - RNA, 18 nt, Artificial Sequence
  Synthetic
guuucccaccuugugagu

SEQ ID NO: 43689 - RNA, 19 nt, Artificial Sequence
  Synthetic
aguuucccaccuugugagu

SEQ ID NO: 43690 - RNA, 20 nt, Artificial Sequence
  Synthetic
aaguuucccaccuugugagu

SEQ ID NO: 43691 - RNA, 21 nt, Artificial Sequence
  Synthetic
aaaguuucccaccuugugagu

SEQ ID NO: 43692 - RNA, 22 nt, Artificial Sequence
  Synthetic
uaaaguuucccaccuugugagu

SEQ ID NO: 43693 - RNA, 23 nt, Artificial Sequence
  Synthetic
guaaaguuucccaccuugugagu

SEQ ID NO: 43694 - RNA, 24 nt, Artificial Sequence
  Synthetic
cguaaaguuucccaccuugugagu

SEQ ID NO: 43695 - RNA, 18 nt, Artificial Sequence
  Synthetic
gaugugagaggcaauagu

SEQ ID NO: 43696 - RNA, 19 nt, Artificial Sequence
  Synthetic
agaugugagaggcaauagu

SEQ ID NO: 43697 - RNA, 20 nt, Artificial Sequence
  Synthetic
gagaugugagaggcaauagu

SEQ ID NO: 43698 - RNA, 21 nt, Artificial Sequence
  Synthetic
cgagaugugagaggcaauagu

SEQ ID NO: 43699 - RNA, 22 nt, Artificial Sequence
  Synthetic
acgagaugugagaggcaauagu

SEQ ID NO: 43700 - RNA, 23 nt, Artificial Sequence
  Synthetic
gacgagaugugagaggcaauagu

SEQ ID NO: 43701 - RNA, 24 nt, Artificial Sequence
  Synthetic
ugacgagaugugagaggcaauagu

SEQ ID NO: 43702 - RNA, 18 nt, Artificial Sequence
  Synthetic
gcaacauaccuugauagu

SEQ ID NO: 43703 - RNA, 19 nt, Artificial Sequence
  Synthetic
ggcaacauaccuugauagu

SEQ ID NO: 43704 - RNA, 20 nt, Artificial Sequence
  Synthetic
gggcaacauaccuugauagu

SEQ ID NO: 43705 - RNA, 21 nt, Artificial Sequence
  Synthetic
cgggcaacauaccuugauagu

SEQ ID NO: 43706 - RNA, 22 nt, Artificial Sequence
  Synthetic
acgggcaacauaccuugauagu

SEQ ID NO: 43707 - RNA, 23 nt, Artificial Sequence
  Synthetic
aacgggcaacauaccuugauagu

SEQ ID NO: 43708 - RNA, 24 nt, Artificial Sequence
  Synthetic
aaacgggcaacauaccuugauagu

SEQ ID NO: 43709 - RNA, 18 nt, Artificial Sequence
  Synthetic
auuaaagacagguauagu

SEQ ID NO: 43710 - RNA, 19 nt, Artificial Sequence
  Synthetic
gauuaaagacagguauagu

SEQ ID NO: 43711 - RNA, 20 nt, Artificial Sequence
  Synthetic
ggauuaaagacagguauagu

SEQ ID NO: 43712 - RNA, 21 nt, Artificial Sequence
  Synthetic
aggauuaaagacagguauagu

SEQ ID NO: 43713 - RNA, 22 nt, Artificial Sequence
  Synthetic
caggauuaaagacagguauagu

SEQ ID NO: 43714 - RNA, 23 nt, Artificial Sequence
  Synthetic
ucaggauuaaagacagguauagu

SEQ ID NO: 43715 - RNA, 24 nt, Artificial Sequence
  Synthetic
aucaggauuaaagacagguauagu

SEQ ID NO: 43716 - RNA, 18 nt, Artificial Sequence
  Synthetic
uuuuaaacccauauuagu

SEQ ID NO: 43717 - RNA, 19 nt, Artificial Sequence
  Synthetic
uuuuuaaacccauauuagu

SEQ ID NO: 43718 - RNA, 20 nt, Artificial Sequence
  Synthetic
auuuuuaaacccauauuagu

SEQ ID NO: 43719 - RNA, 21 nt, Artificial Sequence
  Synthetic
gauuuuuaaacccauauuagu

SEQ ID NO: 43720 - RNA, 22 nt, Artificial Sequence
  Synthetic
ugauuuuuaaacccauauuagu

SEQ ID NO: 43721 - RNA, 23 nt, Artificial Sequence
  Synthetic
cugauuuuuaaacccauauuagu

SEQ ID NO: 43722 - RNA, 24 nt, Artificial Sequence
  Synthetic
ccugauuuuuaaacccauauuagu

SEQ ID NO: 43723 - RNA, 18 nt, Artificial Sequence
  Synthetic
ggaugacugucucuuagu

SEQ ID NO: 43724 - RNA, 19 nt, Artificial Sequence
  Synthetic
aggaugacugucucuuagu

SEQ ID NO: 43725 - RNA, 20 nt, Artificial Sequence
  Synthetic
gaggaugacugucucuuagu

SEQ ID NO: 43726 - RNA, 21 nt, Artificial Sequence
  Synthetic
ugaggaugacugucucuuagu

SEQ ID NO: 43727 - RNA, 22 nt, Artificial Sequence
  Synthetic
cugaggaugacugucucuuagu

SEQ ID NO: 43728 - RNA, 23 nt, Artificial Sequence
  Synthetic
ccugaggaugacugucucuuagu

SEQ ID NO: 43729 - RNA, 24 nt, Artificial Sequence
  Synthetic
gccugaggaugacugucucuuagu

SEQ ID NO: 43730 - RNA, 18 nt, Artificial Sequence
  Synthetic
gcgguuuccauguaacgu

SEQ ID NO: 43731 - RNA, 19 nt, Artificial Sequence
  Synthetic
ggcgguuuccauguaacgu

SEQ ID NO: 43732 - RNA, 20 nt, Artificial Sequence
  Synthetic
uggcgguuuccauguaacgu

SEQ ID NO: 43733 - RNA, 18 nt, Artificial Sequence
  Synthetic
ccacucgagagggaccgu

SEQ ID NO: 43734 - RNA, 19 nt, Artificial Sequence
  Synthetic
cccacucgagagggaccgu

SEQ ID NO: 43735 - RNA, 20 nt, Artificial Sequence
  Synthetic
ccccacucgagagggaccgu

SEQ ID NO: 43736 - RNA, 21 nt, Artificial Sequence
  Synthetic
uccccacucgagagggaccgu

SEQ ID NO: 43737 - RNA, 22 nt, Artificial Sequence
  Synthetic
uuccccacucgagagggaccgu

SEQ ID NO: 43738 - RNA, 23 nt, Artificial Sequence
  Synthetic
uuuccccacucgagagggaccgu

SEQ ID NO: 43739 - RNA, 24 nt, Artificial Sequence
  Synthetic
cuuuccccacucgagagggaccgu

SEQ ID NO: 43740 - RNA, 18 nt, Artificial Sequence
  Synthetic
accccaaaaggccuccgu

SEQ ID NO: 43741 - RNA, 19 nt, Artificial Sequence
  Synthetic
caccccaaaaggccuccgu

SEQ ID NO: 43742 - RNA, 20 nt, Artificial Sequence
  Synthetic
ccaccccaaaaggccuccgu

SEQ ID NO: 43743 - RNA, 21 nt, Artificial Sequence
  Synthetic
uccaccccaaaaggccuccgu

SEQ ID NO: 43744 - RNA, 22 nt, Artificial Sequence
  Synthetic
cuccaccccaaaaggccuccgu

SEQ ID NO: 43745 - RNA, 23 nt, Artificial Sequence
  Synthetic
gcuccaccccaaaaggccuccgu

SEQ ID NO: 43746 - RNA, 24 nt, Artificial Sequence
  Synthetic
ggcuccaccccaaaaggccuccgu

SEQ ID NO: 43747 - RNA, 18 nt, Artificial Sequence
  Synthetic
uacaggugcaauuuccgu

SEQ ID NO: 43748 - RNA, 19 nt, Artificial Sequence
  Synthetic
auacaggugcaauuuccgu

SEQ ID NO: 43749 - RNA, 20 nt, Artificial Sequence
  Synthetic
aauacaggugcaauuuccgu

SEQ ID NO: 43750 - RNA, 21 nt, Artificial Sequence
  Synthetic
gaauacaggugcaauuuccgu

SEQ ID NO: 43751 - RNA, 22 nt, Artificial Sequence
  Synthetic
ggaauacaggugcaauuuccgu

SEQ ID NO: 43752 - RNA, 23 nt, Artificial Sequence
  Synthetic
gggaauacaggugcaauuuccgu

SEQ ID NO: 43753 - RNA, 24 nt, Artificial Sequence
  Synthetic
ugggaauacaggugcaauuuccgu

SEQ ID NO: 43754 - RNA, 18 nt, Artificial Sequence
  Synthetic
cagacggggagaccgcgu

SEQ ID NO: 43755 - RNA, 19 nt, Artificial Sequence
  Synthetic
acagacggggagaccgcgu

SEQ ID NO: 43756 - RNA, 20 nt, Artificial Sequence
  Synthetic
aacagacggggagaccgcgu

SEQ ID NO: 43757 - RNA, 21 nt, Artificial Sequence
  Synthetic
gaacagacggggagaccgcgu

SEQ ID NO: 43758 - RNA, 22 nt, Artificial Sequence
  Synthetic
ggaacagacggggagaccgcgu

SEQ ID NO: 43759 - RNA, 23 nt, Artificial Sequence
  Synthetic
aggaacagacggggagaccgcgu

SEQ ID NO: 43760 - RNA, 24 nt, Artificial Sequence
  Synthetic
aaggaacagacggggagaccgcgu

SEQ ID NO: 43761 - RNA, 18 nt, Artificial Sequence
  Synthetic
agaugauuaggcagaggu

SEQ ID NO: 43762 - RNA, 19 nt, Artificial Sequence
  Synthetic
gagaugauuaggcagaggu

SEQ ID NO: 43763 - RNA, 20 nt, Artificial Sequence
  Synthetic
agagaugauuaggcagaggu

SEQ ID NO: 43764 - RNA, 21 nt, Artificial Sequence
  Synthetic
aagagaugauuaggcagaggu

SEQ ID NO: 43765 - RNA, 22 nt, Artificial Sequence
  Synthetic
caagagaugauuaggcagaggu

SEQ ID NO: 43766 - RNA, 23 nt, Artificial Sequence
  Synthetic
acaagagaugauuaggcagaggu

SEQ ID NO: 43767 - RNA, 24 nt, Artificial Sequence
  Synthetic
aacaagagaugauuaggcagaggu

SEQ ID NO: 43768 - RNA, 18 nt, Artificial Sequence
  Synthetic
uggugagugauuggaggu

SEQ ID NO: 43769 - RNA, 19 nt, Artificial Sequence
  Synthetic
uuggugagugauuggaggu

SEQ ID NO: 43770 - RNA, 20 nt, Artificial Sequence
  Synthetic
auuggugagugauuggaggu

SEQ ID NO: 43771 - RNA, 21 nt, Artificial Sequence
  Synthetic
gauuggugagugauuggaggu

SEQ ID NO: 43772 - RNA, 22 nt, Artificial Sequence
  Synthetic
agauuggugagugauuggaggu

SEQ ID NO: 43773 - RNA, 23 nt, Artificial Sequence
  Synthetic
gagauuggugagugauuggaggu

SEQ ID NO: 43774 - RNA, 24 nt, Artificial Sequence
  Synthetic
ggagauuggugagugauuggaggu

SEQ ID NO: 43775 - RNA, 18 nt, Artificial Sequence
  Synthetic
acucuaaggauucccggu

SEQ ID NO: 43776 - RNA, 19 nt, Artificial Sequence
  Synthetic
gacucuaaggauucccggu

SEQ ID NO: 43777 - RNA, 20 nt, Artificial Sequence
  Synthetic
ggacucuaaggauucccggu

SEQ ID NO: 43778 - RNA, 21 nt, Artificial Sequence
  Synthetic
aggacucuaaggauucccggu

SEQ ID NO: 43779 - RNA, 22 nt, Artificial Sequence
  Synthetic
gaggacucuaaggauucccggu

SEQ ID NO: 43780 - RNA, 23 nt, Artificial Sequence
  Synthetic
agaggacucuaaggauucccggu

SEQ ID NO: 43781 - RNA, 24 nt, Artificial Sequence
  Synthetic
cagaggacucuaaggauucccggu

SEQ ID NO: 43782 - RNA, 18 nt, Artificial Sequence
  Synthetic
guacaaagcugaagcggu

SEQ ID NO: 43783 - RNA, 19 nt, Artificial Sequence
  Synthetic
gguacaaagcugaagcggu

SEQ ID NO: 43784 - RNA, 20 nt, Artificial Sequence
  Synthetic
cgguacaaagcugaagcggu

SEQ ID NO: 43785 - RNA, 21 nt, Artificial Sequence
  Synthetic
ccgguacaaagcugaagcggu

SEQ ID NO: 43786 - RNA, 22 nt, Artificial Sequence
  Synthetic
cccgguacaaagcugaagcggu

SEQ ID NO: 43787 - RNA, 23 nt, Artificial Sequence
  Synthetic
ucccgguacaaagcugaagcggu

SEQ ID NO: 43788 - RNA, 24 nt, Artificial Sequence
  Synthetic
uucccgguacaaagcugaagcggu

SEQ ID NO: 43789 - RNA, 18 nt, Artificial Sequence
  Synthetic
aaaauugguaacagcggu

SEQ ID NO: 43790 - RNA, 19 nt, Artificial Sequence
  Synthetic
gaaaauugguaacagcggu

SEQ ID NO: 43791 - RNA, 20 nt, Artificial Sequence
  Synthetic
agaaaauugguaacagcggu

SEQ ID NO: 43792 - RNA, 21 nt, Artificial Sequence
  Synthetic
aagaaaauugguaacagcggu

SEQ ID NO: 43793 - RNA, 22 nt, Artificial Sequence
  Synthetic
aaagaaaauugguaacagcggu

SEQ ID NO: 43794 - RNA, 23 nt, Artificial Sequence
  Synthetic
aaaagaaaauugguaacagcggu

SEQ ID NO: 43795 - RNA, 24 nt, Artificial Sequence
  Synthetic
caaaagaaaauugguaacagcggu

SEQ ID NO: 43796 - RNA, 18 nt, Artificial Sequence
  Synthetic
auguucuccauguucggu

SEQ ID NO: 43797 - RNA, 19 nt, Artificial Sequence
  Synthetic
gauguucuccauguucggu

SEQ ID NO: 43798 - RNA, 20 nt, Artificial Sequence
  Synthetic
ugauguucuccauguucggu

SEQ ID NO: 43799 - RNA, 21 nt, Artificial Sequence
  Synthetic
gugauguucuccauguucggu

SEQ ID NO: 43800 - RNA, 22 nt, Artificial Sequence
  Synthetic
ugugauguucuccauguucggu

SEQ ID NO: 43801 - RNA, 23 nt, Artificial Sequence
  Synthetic
augugauguucuccauguucggu

SEQ ID NO: 43802 - RNA, 24 nt, Artificial Sequence
  Synthetic
gaugugauguucuccauguucggu

SEQ ID NO: 43803 - RNA, 18 nt, Artificial Sequence
  Synthetic
uguaacacgagcaggggu

SEQ ID NO: 43804 - RNA, 19 nt, Artificial Sequence
  Synthetic
cuguaacacgagcaggggu

SEQ ID NO: 43805 - RNA, 20 nt, Artificial Sequence
  Synthetic
ccuguaacacgagcaggggu

SEQ ID NO: 43806 - RNA, 21 nt, Artificial Sequence
  Synthetic
gccuguaacacgagcaggggu

SEQ ID NO: 43807 - RNA, 22 nt, Artificial Sequence
  Synthetic
cgccuguaacacgagcaggggu

SEQ ID NO: 43808 - RNA, 23 nt, Artificial Sequence
  Synthetic
ccgccuguaacacgagcaggggu

SEQ ID NO: 43809 - RNA, 24 nt, Artificial Sequence
  Synthetic
cccgccuguaacacgagcaggggu

SEQ ID NO: 43810 - RNA, 18 nt, Artificial Sequence
  Synthetic
aggguaaccacauugggu

SEQ ID NO: 43811 - RNA, 19 nt, Artificial Sequence
  Synthetic
caggguaaccacauugggu

SEQ ID NO: 43812 - RNA, 20 nt, Artificial Sequence
  Synthetic
gcaggguaaccacauugggu

SEQ ID NO: 43813 - RNA, 21 nt, Artificial Sequence
  Synthetic
ggcaggguaaccacauugggu

SEQ ID NO: 43814 - RNA, 22 nt, Artificial Sequence
  Synthetic
aggcaggguaaccacauugggu

SEQ ID NO: 43815 - RNA, 23 nt, Artificial Sequence
  Synthetic
aaggcaggguaaccacauugggu

SEQ ID NO: 43816 - RNA, 24 nt, Artificial Sequence
  Synthetic
uaaggcaggguaaccacauugggu

SEQ ID NO: 43817 - RNA, 18 nt, Artificial Sequence
  Synthetic
uccuagaggauugcuggu

SEQ ID NO: 43818 - RNA, 19 nt, Artificial Sequence
  Synthetic
auccuagaggauugcuggu

SEQ ID NO: 43819 - RNA, 20 nt, Artificial Sequence
  Synthetic
aauccuagaggauugcuggu

SEQ ID NO: 43820 - RNA, 21 nt, Artificial Sequence
  Synthetic
gaauccuagaggauugcuggu

SEQ ID NO: 43821 - RNA, 22 nt, Artificial Sequence
  Synthetic
ggaauccuagaggauugcuggu

SEQ ID NO: 43822 - RNA, 23 nt, Artificial Sequence
  Synthetic
aggaauccuagaggauugcuggu

SEQ ID NO: 43823 - RNA, 24 nt, Artificial Sequence
  Synthetic
aaggaauccuagaggauugcuggu

SEQ ID NO: 43824 - RNA, 18 nt, Artificial Sequence
  Synthetic
auguaaauaaugucuggu

SEQ ID NO: 43825 - RNA, 19 nt, Artificial Sequence
  Synthetic
uauguaaauaaugucuggu

SEQ ID NO: 43826 - RNA, 20 nt, Artificial Sequence
  Synthetic
guauguaaauaaugucuggu

SEQ ID NO: 43827 - RNA, 21 nt, Artificial Sequence
  Synthetic
gguauguaaauaaugucuggu

SEQ ID NO: 43828 - RNA, 22 nt, Artificial Sequence
  Synthetic
ggguauguaaauaaugucuggu

SEQ ID NO: 43829 - RNA, 23 nt, Artificial Sequence
  Synthetic
aggguauguaaauaaugucuggu

SEQ ID NO: 43830 - RNA, 24 nt, Artificial Sequence
  Synthetic
aaggguauguaaauaaugucuggu

SEQ ID NO: 43831 - RNA, 18 nt, Artificial Sequence
  Synthetic
ugacugucucuuaguggu

SEQ ID NO: 43832 - RNA, 19 nt, Artificial Sequence
  Synthetic
augacugucucuuaguggu

SEQ ID NO: 43833 - RNA, 20 nt, Artificial Sequence
  Synthetic
gaugacugucucuuaguggu

SEQ ID NO: 43834 - RNA, 21 nt, Artificial Sequence
  Synthetic
ggaugacugucucuuaguggu

SEQ ID NO: 43835 - RNA, 22 nt, Artificial Sequence
  Synthetic
aggaugacugucucuuaguggu

SEQ ID NO: 43836 - RNA, 23 nt, Artificial Sequence
  Synthetic
gaggaugacugucucuuaguggu

SEQ ID NO: 43837 - RNA, 24 nt, Artificial Sequence
  Synthetic
ugaggaugacugucucuuaguggu

SEQ ID NO: 43838 - RNA, 18 nt, Artificial Sequence
  Synthetic
gggucccguacugguggu

SEQ ID NO: 43839 - RNA, 19 nt, Artificial Sequence
  Synthetic
agggucccguacugguggu

SEQ ID NO: 43840 - RNA, 20 nt, Artificial Sequence
  Synthetic
cagggucccguacugguggu

SEQ ID NO: 43841 - RNA, 21 nt, Artificial Sequence
  Synthetic
gcagggucccguacugguggu

SEQ ID NO: 43842 - RNA, 22 nt, Artificial Sequence
  Synthetic
ugcagggucccguacugguggu

SEQ ID NO: 43843 - RNA, 23 nt, Artificial Sequence
  Synthetic
uugcagggucccguacugguggu

SEQ ID NO: 43844 - RNA, 24 nt, Artificial Sequence
  Synthetic
uuugcagggucccguacugguggu

SEQ ID NO: 43845 - RNA, 18 nt, Artificial Sequence
  Synthetic
agacaaaagaaaauuggu

SEQ ID NO: 43846 - RNA, 19 nt, Artificial Sequence
  Synthetic
aagacaaaagaaaauuggu

SEQ ID NO: 43847 - RNA, 20 nt, Artificial Sequence
  Synthetic
aaagacaaaagaaaauuggu

SEQ ID NO: 43848 - RNA, 21 nt, Artificial Sequence
  Synthetic
caaagacaaaagaaaauuggu

SEQ ID NO: 43849 - RNA, 22 nt, Artificial Sequence
  Synthetic
ccaaagacaaaagaaaauuggu

SEQ ID NO: 43850 - RNA, 23 nt, Artificial Sequence
  Synthetic
cccaaagacaaaagaaaauuggu

SEQ ID NO: 43851 - RNA, 24 nt, Artificial Sequence
  Synthetic
acccaaagacaaaagaaaauuggu

SEQ ID NO: 43852 - RNA, 18 nt, Artificial Sequence
  Synthetic
cccugacugacgauuggu

SEQ ID NO: 43853 - RNA, 19 nt, Artificial Sequence
  Synthetic
ucccugacugacgauuggu

SEQ ID NO: 43854 - RNA, 20 nt, Artificial Sequence
  Synthetic
cucccugacugacgauuggu

SEQ ID NO: 43855 - RNA, 21 nt, Artificial Sequence
  Synthetic
ccucccugacugacgauuggu

SEQ ID NO: 43856 - RNA, 22 nt, Artificial Sequence
  Synthetic
gccucccugacugacgauuggu

SEQ ID NO: 43857 - RNA, 23 nt, Artificial Sequence
  Synthetic
ugccucccugacugacgauuggu

SEQ ID NO: 43858 - RNA, 24 nt, Artificial Sequence
  Synthetic
cugccucccugacugacgauuggu

SEQ ID NO: 43859 - RNA, 18 nt, Artificial Sequence
  Synthetic
cuuuauaagggucaaugu

SEQ ID NO: 43860 - RNA, 19 nt, Artificial Sequence
  Synthetic
ucuuuauaagggucaaugu

SEQ ID NO: 43861 - RNA, 20 nt, Artificial Sequence
  Synthetic
uucuuuauaagggucaaugu

SEQ ID NO: 43862 - RNA, 21 nt, Artificial Sequence
  Synthetic
auucuuuauaagggucaaugu

SEQ ID NO: 43863 - RNA, 22 nt, Artificial Sequence
  Synthetic
aauucuuuauaagggucaaugu

SEQ ID NO: 43864 - RNA, 23 nt, Artificial Sequence
  Synthetic
aaauucuuuauaagggucaaugu

SEQ ID NO: 43865 - RNA, 24 nt, Artificial Sequence
  Synthetic
caaauucuuuauaagggucaaugu

SEQ ID NO: 43866 - RNA, 18 nt, Artificial Sequence
  Synthetic
agaagauugacgagaugu

SEQ ID NO: 43867 - RNA, 19 nt, Artificial Sequence
  Synthetic
gagaagauugacgagaugu

SEQ ID NO: 43868 - RNA, 20 nt, Artificial Sequence
  Synthetic
ggagaagauugacgagaugu

SEQ ID NO: 43869 - RNA, 21 nt, Artificial Sequence
  Synthetic
uggagaagauugacgagaugu

SEQ ID NO: 43870 - RNA, 22 nt, Artificial Sequence
  Synthetic
cuggagaagauugacgagaugu

SEQ ID NO: 43871 - RNA, 23 nt, Artificial Sequence
  Synthetic
ccuggagaagauugacgagaugu

SEQ ID NO: 43872 - RNA, 24 nt, Artificial Sequence
  Synthetic
uccuggagaagauugacgagaugu

SEQ ID NO: 43873 - RNA, 18 nt, Artificial Sequence
  Synthetic
ucguuucucauuuacugu

SEQ ID NO: 43874 - RNA, 19 nt, Artificial Sequence
  Synthetic
uucguuucucauuuacugu

SEQ ID NO: 43875 - RNA, 20 nt, Artificial Sequence
  Synthetic
cuucguuucucauuuacugu

SEQ ID NO: 43876 - RNA, 21 nt, Artificial Sequence
  Synthetic
ucuucguuucucauuuacugu

SEQ ID NO: 43877 - RNA, 22 nt, Artificial Sequence
  Synthetic
aucuucguuucucauuuacugu

SEQ ID NO: 43878 - RNA, 23 nt, Artificial Sequence
  Synthetic
aaucuucguuucucauuuacugu

SEQ ID NO: 43879 - RNA, 24 nt, Artificial Sequence
  Synthetic
uaaucuucguuucucauuuacugu

SEQ ID NO: 43880 - RNA, 18 nt, Artificial Sequence
  Synthetic
cccaaaaggccuccgugu

SEQ ID NO: 43881 - RNA, 19 nt, Artificial Sequence
  Synthetic
ccccaaaaggccuccgugu

SEQ ID NO: 43882 - RNA, 20 nt, Artificial Sequence
  Synthetic
accccaaaaggccuccgugu

SEQ ID NO: 43883 - RNA, 21 nt, Artificial Sequence
  Synthetic
caccccaaaaggccuccgugu

SEQ ID NO: 43884 - RNA, 22 nt, Artificial Sequence
  Synthetic
ccaccccaaaaggccuccgugu

SEQ ID NO: 43885 - RNA, 23 nt, Artificial Sequence
  Synthetic
uccaccccaaaaggccuccgugu

SEQ ID NO: 43886 - RNA, 24 nt, Artificial Sequence
  Synthetic
cuccaccccaaaaggccuccgugu

SEQ ID NO: 43887 - RNA, 18 nt, Artificial Sequence
  Synthetic
acaaagcugaagcggugu

SEQ ID NO: 43888 - RNA, 19 nt, Artificial Sequence
  Synthetic
uacaaagcugaagcggugu

SEQ ID NO: 43889 - RNA, 20 nt, Artificial Sequence
  Synthetic
guacaaagcugaagcggugu

SEQ ID NO: 43890 - RNA, 21 nt, Artificial Sequence
  Synthetic
gguacaaagcugaagcggugu

SEQ ID NO: 43891 - RNA, 22 nt, Artificial Sequence
  Synthetic
cgguacaaagcugaagcggugu

SEQ ID NO: 43892 - RNA, 23 nt, Artificial Sequence
  Synthetic
ccgguacaaagcugaagcggugu

SEQ ID NO: 43893 - RNA, 24 nt, Artificial Sequence
  Synthetic
cccgguacaaagcugaagcggugu

SEQ ID NO: 43894 - RNA, 18 nt, Artificial Sequence
  Synthetic
ugugugauguguucuugu

SEQ ID NO: 43895 - RNA, 19 nt, Artificial Sequence
  Synthetic
  misc_feature (1)..(1): n is a, c, g, or u
nugugugauguguucuugu

SEQ ID NO: 43896 - RNA, 20 nt, Artificial Sequence
  Synthetic
  misc_feature (2)..(2): n is a, c, g, or u
unugugugauguguucuugu

SEQ ID NO: 43897 - RNA, 21 nt, Artificial Sequence
  Synthetic
  misc_feature (3)..(3): n is a, c, g, or u
uunugugugauguguucuugu

SEQ ID NO: 43898 - RNA, 22 nt, Artificial Sequence
  Synthetic
  misc_feature (4)..(4): n is a, c, g, or u
uuunugugugauguguucuugu

SEQ ID NO: 43899 - RNA, 23 nt, Artificial Sequence
  Synthetic
  misc_feature (5)..(5): n is a, c, g, or u
uuuunugugugauguguucuugu

SEQ ID NO: 43900 - RNA, 24 nt, Artificial Sequence
  Synthetic
  misc_feature (6)..(6): n is a, c, g, or u
auuuunugugugauguguucuugu

SEQ ID NO: 43901 - RNA, 18 nt, Artificial Sequence
  Synthetic
caaagacaaaagaaaauu

SEQ ID NO: 43902 - RNA, 19 nt, Artificial Sequence
  Synthetic
ccaaagacaaaagaaaauu

SEQ ID NO: 43903 - RNA, 20 nt, Artificial Sequence
  Synthetic
cccaaagacaaaagaaaauu

SEQ ID NO: 43904 - RNA, 21 nt, Artificial Sequence
  Synthetic
acccaaagacaaaagaaaauu

SEQ ID NO: 43905 - RNA, 22 nt, Artificial Sequence
  Synthetic
uacccaaagacaaaagaaaauu

SEQ ID NO: 43906 - RNA, 23 nt, Artificial Sequence
  Synthetic
auacccaaagacaaaagaaaauu

SEQ ID NO: 43907 - RNA, 24 nt, Artificial Sequence
  Synthetic
uauacccaaagacaaaagaaaauu

SEQ ID NO: 43908 - RNA, 18 nt, Artificial Sequence
  Synthetic
cacucccccuagaaaauu

SEQ ID NO: 43909 - RNA, 19 nt, Artificial Sequence
  Synthetic
gcacucccccuagaaaauu

SEQ ID NO: 43910 - RNA, 20 nt, Artificial Sequence
  Synthetic
ggcacucccccuagaaaauu

SEQ ID NO: 43911 - RNA, 21 nt, Artificial Sequence
  Synthetic
gggcacucccccuagaaaauu

SEQ ID NO: 43912 - RNA, 22 nt, Artificial Sequence
  Synthetic
cgggcacucccccuagaaaauu

SEQ ID NO: 43913 - RNA, 23 nt, Artificial Sequence
  Synthetic
acgggcacucccccuagaaaauu

SEQ ID NO: 43914 - RNA, 24 nt, Artificial Sequence
  Synthetic
cacgggcacucccccuagaaaauu

SEQ ID NO: 43915 - RNA, 18 nt, Artificial Sequence
  Synthetic
uacauaucccauaaaauu

SEQ ID NO: 43916 - RNA, 19 nt, Artificial Sequence
  Synthetic
uuacauaucccauaaaauu

SEQ ID NO: 43917 - RNA, 20 nt, Artificial Sequence
  Synthetic
auuacauaucccauaaaauu

SEQ ID NO: 43918 - RNA, 21 nt, Artificial Sequence
  Synthetic
aauuacauaucccauaaaauu

SEQ ID NO: 43919 - RNA, 22 nt, Artificial Sequence
  Synthetic
caauuacauaucccauaaaauu

SEQ ID NO: 43920 - RNA, 23 nt, Artificial Sequence
  Synthetic
ccaauuacauaucccauaaaauu

SEQ ID NO: 43921 - RNA, 24 nt, Artificial Sequence
  Synthetic
uccaauuacauaucccauaaaauu

SEQ ID NO: 43922 - RNA, 18 nt, Artificial Sequence
  Synthetic
ccaaggaauacuaacauu

SEQ ID NO: 43923 - RNA, 19 nt, Artificial Sequence
  Synthetic
uccaaggaauacuaacauu

SEQ ID NO: 43924 - RNA, 20 nt, Artificial Sequence
  Synthetic
guccaaggaauacuaacauu

SEQ ID NO: 43925 - RNA, 21 nt, Artificial Sequence
  Synthetic
aguccaaggaauacuaacauu

SEQ ID NO: 43926 - RNA, 22 nt, Artificial Sequence
  Synthetic
gaguccaaggaauacuaacauu

SEQ ID NO: 43927 - RNA, 23 nt, Artificial Sequence
  Synthetic
ugaguccaaggaauacuaacauu

SEQ ID NO: 43928 - RNA, 24 nt, Artificial Sequence
  Synthetic
gugaguccaaggaauacuaacauu

SEQ ID NO: 43929 - RNA, 18 nt, Artificial Sequence
  Synthetic
ccaauccuggagaagauu

SEQ ID NO: 43930 - RNA, 19 nt, Artificial Sequence
  Synthetic
cccaauccuggagaagauu

SEQ ID NO: 43931 - RNA, 20 nt, Artificial Sequence
  Synthetic
ccccaauccuggagaagauu

SEQ ID NO: 43932 - RNA, 21 nt, Artificial Sequence
  Synthetic
uccccaauccuggagaagauu

SEQ ID NO: 43933 - RNA, 22 nt, Artificial Sequence
  Synthetic
guccccaauccuggagaagauu

SEQ ID NO: 43934 - RNA, 23 nt, Artificial Sequence
  Synthetic
gguccccaauccuggagaagauu

SEQ ID NO: 43935 - RNA, 24 nt, Artificial Sequence
  Synthetic
ggguccccaauccuggagaagauu

SEQ ID NO: 43936 - RNA, 18 nt, Artificial Sequence
  Synthetic
guuggaggacaggagauu

SEQ ID NO: 43937 - RNA, 19 nt, Artificial Sequence
  Synthetic
aguuggaggacaggagauu

SEQ ID NO: 43938 - RNA, 20 nt, Artificial Sequence
  Synthetic
aaguuggaggacaggagauu

SEQ ID NO: 43939 - RNA, 21 nt, Artificial Sequence
  Synthetic
caaguuggaggacaggagauu

SEQ ID NO: 43940 - RNA, 22 nt, Artificial Sequence
  Synthetic
acaaguuggaggacaggagauu

SEQ ID NO: 43941 - RNA, 23 nt, Artificial Sequence
  Synthetic
gacaaguuggaggacaggagauu

SEQ ID NO: 43942 - RNA, 24 nt, Artificial Sequence
  Synthetic
ggacaaguuggaggacaggagauu

SEQ ID NO: 43943 - RNA, 18 nt, Artificial Sequence
  Synthetic
ccucccugacugacgauu

SEQ ID NO: 43944 - RNA, 19 nt, Artificial Sequence
  Synthetic
gccucccugacugacgauu

SEQ ID NO: 43945 - RNA, 20 nt, Artificial Sequence
  Synthetic
ugccucccugacugacgauu

SEQ ID NO: 43946 - RNA, 21 nt, Artificial Sequence
  Synthetic
cugccucccugacugacgauu

SEQ ID NO: 43947 - RNA, 22 nt, Artificial Sequence
  Synthetic
gcugccucccugacugacgauu

SEQ ID NO: 43948 - RNA, 23 nt, Artificial Sequence
  Synthetic
ggcugccucccugacugacgauu

SEQ ID NO: 43949 - RNA, 24 nt, Artificial Sequence
  Synthetic
aggcugccucccugacugacgauu

SEQ ID NO: 43950 - RNA, 18 nt, Artificial Sequence
  Synthetic
aguuugccaaucaggauu

SEQ ID NO: 43951 - RNA, 19 nt, Artificial Sequence
  Synthetic
gaguuugccaaucaggauu

SEQ ID NO: 43952 - RNA, 20 nt, Artificial Sequence
  Synthetic
ggaguuugccaaucaggauu

SEQ ID NO: 43953 - RNA, 21 nt, Artificial Sequence
  Synthetic
aggaguuugccaaucaggauu

SEQ ID NO: 43954 - RNA, 22 nt, Artificial Sequence
  Synthetic
aaggaguuugccaaucaggauu

SEQ ID NO: 43955 - RNA, 23 nt, Artificial Sequence
  Synthetic
gaaggaguuugccaaucaggauu

SEQ ID NO: 43956 - RNA, 24 nt, Artificial Sequence
  Synthetic
agaaggaguuugccaaucaggauu

SEQ ID NO: 43957 - RNA, 18 nt, Artificial Sequence
  Synthetic
cacaauaguugccugauu

SEQ ID NO: 43958 - RNA, 19 nt, Artificial Sequence
  Synthetic
ccacaauaguugccugauu

SEQ ID NO: 43959 - RNA, 20 nt, Artificial Sequence
  Synthetic
accacaauaguugccugauu

SEQ ID NO: 43960 - RNA, 21 nt, Artificial Sequence
  Synthetic
aaccacaauaguugccugauu

SEQ ID NO: 43961 - RNA, 22 nt, Artificial Sequence
  Synthetic
aaaccacaauaguugccugauu

SEQ ID NO: 43962 - RNA, 23 nt, Artificial Sequence
  Synthetic
gaaaccacaauaguugccugauu

SEQ ID NO: 43963 - RNA, 24 nt, Artificial Sequence
  Synthetic
ugaaaccacaauaguugccugauu

SEQ ID NO: 43964 - RNA, 18 nt, Artificial Sequence
  Synthetic
uugaugcaaauggauauu

SEQ ID NO: 43965 - RNA, 19 nt, Artificial Sequence
  Synthetic
cuugaugcaaauggauauu

SEQ ID NO: 43966 - RNA, 20 nt, Artificial Sequence
  Synthetic
ucuugaugcaaauggauauu

SEQ ID NO: 43967 - RNA, 21 nt, Artificial Sequence
  Synthetic
gucuugaugcaaauggauauu

SEQ ID NO: 43968 - RNA, 22 nt, Artificial Sequence
  Synthetic
ugucuugaugcaaauggauauu

SEQ ID NO: 43969 - RNA, 23 nt, Artificial Sequence
  Synthetic
augucuugaugcaaauggauauu

SEQ ID NO: 43970 - RNA, 24 nt, Artificial Sequence
  Synthetic
aaugucuugaugcaaauggauauu

SEQ ID NO: 43971 - RNA, 18 nt, Artificial Sequence
  Synthetic
auggaaaggauguauauu

SEQ ID NO: 43972 - RNA, 19 nt, Artificial Sequence
  Synthetic
cauggaaaggauguauauu

SEQ ID NO: 43973 - RNA, 20 nt, Artificial Sequence
  Synthetic
ccauggaaaggauguauauu

SEQ ID NO: 43974 - RNA, 21 nt, Artificial Sequence
  Synthetic
gccauggaaaggauguauauu

SEQ ID NO: 43975 - RNA, 22 nt, Artificial Sequence
  Synthetic
agccauggaaaggauguauauu

SEQ ID NO: 43976 - RNA, 23 nt, Artificial Sequence
  Synthetic
cagccauggaaaggauguauauu

SEQ ID NO: 43977 - RNA, 24 nt, Artificial Sequence
  Synthetic
gcagccauggaaaggauguauauu

SEQ ID NO: 43978 - RNA, 18 nt, Artificial Sequence
  Synthetic
ucuagacucugcgguauu

SEQ ID NO: 43979 - RNA, 19 nt, Artificial Sequence
  Synthetic
gucuagacucugcgguauu

SEQ ID NO: 43980 - RNA, 20 nt, Artificial Sequence
  Synthetic
agucuagacucugcgguauu

SEQ ID NO: 43981 - RNA, 21 nt, Artificial Sequence
  Synthetic
gagucuagacucugcgguauu

SEQ ID NO: 43982 - RNA, 22 nt, Artificial Sequence
  Synthetic
cgagucuagacucugcgguauu

SEQ ID NO: 43983 - RNA, 23 nt, Artificial Sequence
  Synthetic
acgagucuagacucugcgguauu

SEQ ID NO: 43984 - RNA, 24 nt, Artificial Sequence
  Synthetic
cacgagucuagacucugcgguauu

SEQ ID NO: 43985 - RNA, 18 nt, Artificial Sequence
  Synthetic
ggcuccaacuccuaccuu

SEQ ID NO: 43986 - RNA, 19 nt, Artificial Sequence
  Synthetic
aggcuccaacuccuaccuu

SEQ ID NO: 43987 - RNA, 20 nt, Artificial Sequence
  Synthetic
uaggcuccaacuccuaccuu

SEQ ID NO: 43988 - RNA, 21 nt, Artificial Sequence
  Synthetic
auaggcuccaacuccuaccuu

SEQ ID NO: 43989 - RNA, 22 nt, Artificial Sequence
  Synthetic
cauaggcuccaacuccuaccuu

SEQ ID NO: 43990 - RNA, 23 nt, Artificial Sequence
  Synthetic
ccauaggcuccaacuccuaccuu

SEQ ID NO: 43991 - RNA, 24 nt, Artificial Sequence
  Synthetic
uccauaggcuccaacuccuaccuu

SEQ ID NO: 43992 - RNA, 18 nt, Artificial Sequence
  Synthetic
auauagaauacccgccuu

SEQ ID NO: 43993 - RNA, 19 nt, Artificial Sequence
  Synthetic
uauauagaauacccgccuu

SEQ ID NO: 43994 - RNA, 20 nt, Artificial Sequence
  Synthetic
uuauauagaauacccgccuu

SEQ ID NO: 43995 - RNA, 21 nt, Artificial Sequence
  Synthetic
cuuauauagaauacccgccuu

SEQ ID NO: 43996 - RNA, 22 nt, Artificial Sequence
  Synthetic
ucuuauauagaauacccgccuu

SEQ ID NO: 43997 - RNA, 23 nt, Artificial Sequence
  Synthetic
cucuuauauagaauacccgccuu

SEQ ID NO: 43998 - RNA, 24 nt, Artificial Sequence
  Synthetic
ucucuuauauagaauacccgccuu

SEQ ID NO: 43999 - RNA, 18 nt, Artificial Sequence
  Synthetic
cucuggccaaggguccuu

SEQ ID NO: 44000 - RNA, 19 nt, Artificial Sequence
  Synthetic
ccucuggccaaggguccuu

SEQ ID NO: 44001 - RNA, 20 nt, Artificial Sequence
  Synthetic
gccucuggccaaggguccuu

SEQ ID NO: 44002 - RNA, 21 nt, Artificial Sequence
  Synthetic
ggccucuggccaaggguccuu

SEQ ID NO: 44003 - RNA, 22 nt, Artificial Sequence
  Synthetic
uggccucuggccaaggguccuu

SEQ ID NO: 44004 - RNA, 23 nt, Artificial Sequence
  Synthetic
uuggccucuggccaaggguccuu

SEQ ID NO: 44005 - RNA, 24 nt, Artificial Sequence
  Synthetic
guuggccucuggccaaggguccuu

SEQ ID NO: 44006 - RNA, 18 nt, Artificial Sequence
  Synthetic
ccacccaaggcacagcuu

SEQ ID NO: 44007 - RNA, 19 nt, Artificial Sequence
  Synthetic
gccacccaaggcacagcuu

SEQ ID NO: 44008 - RNA, 20 nt, Artificial Sequence
  Synthetic
agccacccaaggcacagcuu

SEQ ID NO: 44009 - RNA, 21 nt, Artificial Sequence
  Synthetic
aagccacccaaggcacagcuu

SEQ ID NO: 44010 - RNA, 22 nt, Artificial Sequence
  Synthetic
aaagccacccaaggcacagcuu

SEQ ID NO: 44011 - RNA, 23 nt, Artificial Sequence
  Synthetic
uaaagccacccaaggcacagcuu

SEQ ID NO: 44012 - RNA, 24 nt, Artificial Sequence
  Synthetic
cuaaagccacccaaggcacagcuu

SEQ ID NO: 44013 - RNA, 18 nt, Artificial Sequence
  Synthetic
ugggauuuuguagagcuu

SEQ ID NO: 44014 - RNA, 19 nt, Artificial Sequence
  Synthetic
uugggauuuuguagagcuu

SEQ ID NO: 44015 - RNA, 20 nt, Artificial Sequence
  Synthetic
uuugggauuuuguagagcuu

SEQ ID NO: 44016 - RNA, 21 nt, Artificial Sequence
  Synthetic
cuuugggauuuuguagagcuu

SEQ ID NO: 44017 - RNA, 22 nt, Artificial Sequence
  Synthetic
acuuugggauuuuguagagcuu

SEQ ID NO: 44018 - RNA, 23 nt, Artificial Sequence
  Synthetic
gacuuugggauuuuguagagcuu

SEQ ID NO: 44019 - RNA, 24 nt, Artificial Sequence
  Synthetic
ugacuuugggauuuuguagagcuu

SEQ ID NO: 44020 - RNA, 18 nt, Artificial Sequence
  Synthetic
caguagcuccaaauucuu

SEQ ID NO: 44021 - RNA, 19 nt, Artificial Sequence
  Synthetic
acaguagcuccaaauucuu

SEQ ID NO: 44022 - RNA, 20 nt, Artificial Sequence
  Synthetic
cacaguagcuccaaauucuu

SEQ ID NO: 44023 - RNA, 21 nt, Artificial Sequence
  Synthetic
ccacaguagcuccaaauucuu

SEQ ID NO: 44024 - RNA, 22 nt, Artificial Sequence
  Synthetic
uccacaguagcuccaaauucuu

SEQ ID NO: 44025 - RNA, 23 nt, Artificial Sequence
  Synthetic
cuccacaguagcuccaaauucuu

SEQ ID NO: 44026 - RNA, 24 nt, Artificial Sequence
  Synthetic
acuccacaguagcuccaaauucuu

SEQ ID NO: 44027 - RNA, 18 nt, Artificial Sequence
  Synthetic
gguauugugaggauucuu

SEQ ID NO: 44028 - RNA, 19 nt, Artificial Sequence
  Synthetic
cgguauugugaggauucuu

SEQ ID NO: 44029 - RNA, 20 nt, Artificial Sequence
  Synthetic
gcgguauugugaggauucuu

SEQ ID NO: 44030 - RNA, 21 nt, Artificial Sequence
  Synthetic
ugcgguauugugaggauucuu

SEQ ID NO: 44031 - RNA, 22 nt, Artificial Sequence
  Synthetic
cugcgguauugugaggauucuu

SEQ ID NO: 44032 - RNA, 23 nt, Artificial Sequence
  Synthetic
ucugcgguauugugaggauucuu

SEQ ID NO: 44033 - RNA, 24 nt, Artificial Sequence
  Synthetic
cucugcgguauugugaggauucuu

SEQ ID NO: 44034 - RNA, 18 nt, Artificial Sequence
  Synthetic
ggcgagggaguucuucuu

SEQ ID NO: 44035 - RNA, 19 nt, Artificial Sequence
  Synthetic
aggcgagggaguucuucuu

SEQ ID NO: 44036 - RNA, 20 nt, Artificial Sequence
  Synthetic
gaggcgagggaguucuucuu

SEQ ID NO: 44037 - RNA, 21 nt, Artificial Sequence
  Synthetic
cgaggcgagggaguucuucuu

SEQ ID NO: 44038 - RNA, 22 nt, Artificial Sequence
  Synthetic
gcgaggcgagggaguucuucuu

SEQ ID NO: 44039 - RNA, 23 nt, Artificial Sequence
  Synthetic
ugcgaggcgagggaguucuucuu

SEQ ID NO: 44040 - RNA, 24 nt, Artificial Sequence
  Synthetic
cugcgaggcgagggaguucuucuu

SEQ ID NO: 44041 - RNA, 18 nt, Artificial Sequence
  Synthetic
cgauagccaggacaaguu

SEQ ID NO: 44042 - RNA, 19 nt, Artificial Sequence
  Synthetic
gcgauagccaggacaaguu

SEQ ID NO: 44043 - RNA, 20 nt, Artificial Sequence
  Synthetic
agcgauagccaggacaaguu

SEQ ID NO: 44044 - RNA, 21 nt, Artificial Sequence
  Synthetic
cagcgauagccaggacaaguu

SEQ ID NO: 44045 - RNA, 22 nt, Artificial Sequence
  Synthetic
ccagcgauagccaggacaaguu

SEQ ID NO: 44046 - RNA, 23 nt, Artificial Sequence
  Synthetic
uccagcgauagccaggacaaguu

SEQ ID NO: 44047 - RNA, 24 nt, Artificial Sequence
  Synthetic
auccagcgauagccaggacaaguu

SEQ ID NO: 44048 - RNA, 18 nt, Artificial Sequence
  Synthetic
agaaaggccuuauaaguu

SEQ ID NO: 44049 - RNA, 19 nt, Artificial Sequence
  Synthetic
gagaaaggccuuauaaguu

SEQ ID NO: 44050 - RNA, 20 nt, Artificial Sequence
  Synthetic
agagaaaggccuuauaaguu

SEQ ID NO: 44051 - RNA, 21 nt, Artificial Sequence
  Synthetic
cagagaaaggccuuauaaguu

SEQ ID NO: 44052 - RNA, 22 nt, Artificial Sequence
  Synthetic
acagagaaaggccuuauaaguu

SEQ ID NO: 44053 - RNA, 23 nt, Artificial Sequence
  Synthetic
uacagagaaaggccuuauaaguu

SEQ ID NO: 44054 - RNA, 24 nt, Artificial Sequence
  Synthetic
uuacagagaaaggccuuauaaguu

SEQ ID NO: 44055 - RNA, 18 nt, Artificial Sequence
  Synthetic
cccgcgaaggauccaguu

SEQ ID NO: 44056 - RNA, 19 nt, Artificial Sequence
  Synthetic
ucccgcgaaggauccaguu

SEQ ID NO: 44057 - RNA, 20 nt, Artificial Sequence
  Synthetic
gucccgcgaaggauccaguu

SEQ ID NO: 44058 - RNA, 18 nt, Artificial Sequence
  Synthetic
uaaauauuuaguagaguu

SEQ ID NO: 44059 - RNA, 19 nt, Artificial Sequence
  Synthetic
guaaauauuuaguagaguu

SEQ ID NO: 44060 - RNA, 20 nt, Artificial Sequence
  Synthetic
gguaaauauuuaguagaguu

SEQ ID NO: 44061 - RNA, 21 nt, Artificial Sequence
  Synthetic
ugguaaauauuuaguagaguu

SEQ ID NO: 44062 - RNA, 22 nt, Artificial Sequence
  Synthetic
augguaaauauuuaguagaguu

SEQ ID NO: 44063 - RNA, 23 nt, Artificial Sequence
  Synthetic
aaugguaaauauuuaguagaguu

SEQ ID NO: 44064 - RNA, 24 nt, Artificial Sequence
  Synthetic
uaaugguaaauauuuaguagaguu

SEQ ID NO: 44065 - RNA, 18 nt, Artificial Sequence
  Synthetic
gccuguuaacagggaguu

SEQ ID NO: 44066 - RNA, 19 nt, Artificial Sequence
  Synthetic
ggccuguuaacagggaguu

SEQ ID NO: 44067 - RNA, 20 nt, Artificial Sequence
  Synthetic
uggccuguuaacagggaguu

SEQ ID NO: 44068 - RNA, 21 nt, Artificial Sequence
  Synthetic
uuggccuguuaacagggaguu

SEQ ID NO: 44069 - RNA, 22 nt, Artificial Sequence
  Synthetic
auuggccuguuaacagggaguu

SEQ ID NO: 44070 - RNA, 23 nt, Artificial Sequence
  Synthetic
aauuggccuguuaacagggaguu

SEQ ID NO: 44071 - RNA, 24 nt, Artificial Sequence
  Synthetic
caauuggccuguuaacagggaguu

SEQ ID NO: 44072 - RNA, 18 nt, Artificial Sequence
  Synthetic
acagaccaguuauucguu

SEQ ID NO: 44073 - RNA, 19 nt, Artificial Sequence
  Synthetic
aacagaccaguuauucguu

SEQ ID NO: 44074 - RNA, 20 nt, Artificial Sequence
  Synthetic
caacagaccaguuauucguu

SEQ ID NO: 44075 - RNA, 21 nt, Artificial Sequence
  Synthetic
ccaacagaccaguuauucguu

SEQ ID NO: 44076 - RNA, 22 nt, Artificial Sequence
  Synthetic
cccaacagaccaguuauucguu

SEQ ID NO: 44077 - RNA, 23 nt, Artificial Sequence
  Synthetic
acccaacagaccaguuauucguu

SEQ ID NO: 44078 - RNA, 24 nt, Artificial Sequence
  Synthetic
aacccaacagaccaguuauucguu

SEQ ID NO: 44079 - RNA, 18 nt, Artificial Sequence
  Synthetic
ggugagugauuggagguu

SEQ ID NO: 44080 - RNA, 19 nt, Artificial Sequence
  Synthetic
uggugagugauuggagguu

SEQ ID NO: 44081 - RNA, 20 nt, Artificial Sequence
  Synthetic
uuggugagugauuggagguu

SEQ ID NO: 44082 - RNA, 21 nt, Artificial Sequence
  Synthetic
auuggugagugauuggagguu

SEQ ID NO: 44083 - RNA, 22 nt, Artificial Sequence
  Synthetic
gauuggugagugauuggagguu

SEQ ID NO: 44084 - RNA, 23 nt, Artificial Sequence
  Synthetic
agauuggugagugauuggagguu

SEQ ID NO: 44085 - RNA, 24 nt, Artificial Sequence
  Synthetic
gagauuggugagugauuggagguu

SEQ ID NO: 44086 - RNA, 18 nt, Artificial Sequence
  Synthetic
  misc_feature (11)..(11): n is a, c, g, or u
uauuucuccancccgguu

SEQ ID NO: 44087 - RNA, 19 nt, Artificial Sequence
  Synthetic
  misc_feature (12)..(12): n is a, c, g, or u
guauuucuccancccgguu

SEQ ID NO: 44088 - RNA, 20 nt, Artificial Sequence
  Synthetic
  misc_feature (13)..(13): n is a, c, g, or u
aguauuucuccancccgguu

SEQ ID NO: 44089 - RNA, 21 nt, Artificial Sequence
  Synthetic
  misc_feature (14)..(14): n is a, c, g, or u
aaguauuucuccancccgguu

SEQ ID NO: 44090 - RNA, 22 nt, Artificial Sequence
  Synthetic
  misc_feature (15)..(15): n is a, c, g, or u
gaaguauuucuccancccgguu

SEQ ID NO: 44091 - RNA, 23 nt, Artificial Sequence
  Synthetic
  misc_feature (16)..(16): n is a, c, g, or u
ugaaguauuucuccancccgguu

SEQ ID NO: 44092 - RNA, 24 nt, Artificial Sequence
  Synthetic
  misc_feature (17)..(17): n is a, c, g, or u
uugaaguauuucuccancccgguu

SEQ ID NO: 44093 - RNA, 18 nt, Artificial Sequence
  Synthetic
ccaaucaauuggccuguu

SEQ ID NO: 44094 - RNA, 19 nt, Artificial Sequence
  Synthetic
uccaaucaauuggccuguu

SEQ ID NO: 44095 - RNA, 20 nt, Artificial Sequence
  Synthetic
uuccaaucaauuggccuguu

SEQ ID NO: 44096 - RNA, 21 nt, Artificial Sequence
  Synthetic
uuuccaaucaauuggccuguu

SEQ ID NO: 44097 - RNA, 22 nt, Artificial Sequence
  Synthetic
cuuuccaaucaauuggccuguu

SEQ ID NO: 44098 - RNA, 23 nt, Artificial Sequence
  Synthetic
acuuuccaaucaauuggccuguu

SEQ ID NO: 44099 - RNA, 24 nt, Artificial Sequence
  Synthetic
gacuuuccaaucaauuggccuguu

SEQ ID NO: 44100 - RNA, 18 nt, Artificial Sequence
  Synthetic
guagucuccggaaguguu

SEQ ID NO: 44101 - RNA, 19 nt, Artificial Sequence
  Synthetic
aguagucuccggaaguguu

SEQ ID NO: 44102 - RNA, 20 nt, Artificial Sequence
  Synthetic
caguagucuccggaaguguu

SEQ ID NO: 44103 - RNA, 21 nt, Artificial Sequence
  Synthetic
acaguagucuccggaaguguu

SEQ ID NO: 44104 - RNA, 22 nt, Artificial Sequence
  Synthetic
aacaguagucuccggaaguguu

SEQ ID NO: 44105 - RNA, 23 nt, Artificial Sequence
  Synthetic
caacaguagucuccggaaguguu

SEQ ID NO: 44106 - RNA, 24 nt, Artificial Sequence
  Synthetic
acaacaguagucuccggaaguguu

SEQ ID NO: 44107 - RNA, 18 nt, Artificial Sequence
  Synthetic
cagaugaugagagguguu

SEQ ID NO: 44108 - RNA, 19 nt, Artificial Sequence
  Synthetic
gcagaugaugagagguguu

SEQ ID NO: 44109 - RNA, 20 nt, Artificial Sequence
  Synthetic
ggcagaugaugagagguguu

SEQ ID NO: 44110 - RNA, 21 nt, Artificial Sequence
  Synthetic
uggcagaugaugagagguguu

SEQ ID NO: 44111 - RNA, 22 nt, Artificial Sequence
  Synthetic
uuggcagaugaugagagguguu

SEQ ID NO: 44112 - RNA, 23 nt, Artificial Sequence
  Synthetic
  misc_feature (1)..(1): n is a, c, g, or u
nuuggcagaugaugagagguguu

SEQ ID NO: 44113 - RNA, 24 nt, Artificial Sequence
  Synthetic
  misc_feature (2)..(2): n is a, c, g, or u
cnuuggcagaugaugagagguguu

SEQ ID NO: 44114 - RNA, 18 nt, Artificial Sequence
  Synthetic
aaagguucauguauuguu

SEQ ID NO: 44115 - RNA, 19 nt, Artificial Sequence
  Synthetic
uaaagguucauguauuguu

SEQ ID NO: 44116 - RNA, 20 nt, Artificial Sequence
  Synthetic
guaaagguucauguauuguu

SEQ ID NO: 44117 - RNA, 21 nt, Artificial Sequence
  Synthetic
gguaaagguucauguauuguu

SEQ ID NO: 44118 - RNA, 22 nt, Artificial Sequence
  Synthetic
ggguaaagguucauguauuguu

SEQ ID NO: 44119 - RNA, 23 nt, Artificial Sequence
  Synthetic
  misc_feature (1)..(1): n is a, c, g, or u
nggguaaagguucauguauuguu

SEQ ID NO: 44120 - RNA, 24 nt, Artificial Sequence
  Synthetic
  misc_feature (2)..(2): n is a, c, g, or u
cnggguaaagguucauguauuguu

SEQ ID NO: 44121 - RNA, 18 nt, Artificial Sequence
  Synthetic
caugcuguagaucuuguu

SEQ ID NO: 44122 - RNA, 19 nt, Artificial Sequence
  Synthetic
ccaugcuguagaucuuguu

SEQ ID NO: 44123 - RNA, 20 nt, Artificial Sequence
  Synthetic
cccaugcuguagaucuuguu

SEQ ID NO: 44124 - RNA, 21 nt, Artificial Sequence
  Synthetic
ccccaugcuguagaucuuguu

SEQ ID NO: 44125 - RNA, 22 nt, Artificial Sequence
  Synthetic
gccccaugcuguagaucuuguu

SEQ ID NO: 44126 - RNA, 23 nt, Artificial Sequence
  Synthetic
agccccaugcuguagaucuuguu

SEQ ID NO: 44127 - RNA, 24 nt, Artificial Sequence
  Synthetic
aagccccaugcuguagaucuuguu

SEQ ID NO: 44128 - RNA, 18 nt, Artificial Sequence
  Synthetic
  misc_feature (16)..(16): n is a, c, g, or u
cucuuauauaacugcnuu

SEQ ID NO: 44129 - RNA, 19 nt, Artificial Sequence
  Synthetic
  misc_feature (17)..(17): n is a, c, g, or u
ccucuuauauaacugcnuu

SEQ ID NO: 44130 - RNA, 20 nt, Artificial Sequence
  Synthetic
  misc_feature (18)..(18): n is a, c, g, or u
uccucuuauauaacugcnuu

SEQ ID NO: 44131 - RNA, 21 nt, Artificial Sequence
  Synthetic
  misc_feature (19)..(19): n is a, c, g, or u
guccucuuauauaacugcnuu

SEQ ID NO: 44132 - RNA, 22 nt, Artificial Sequence
  Synthetic
  misc_feature (20)..(20): n is a, c, g, or u
aguccucuuauauaacugcnuu

SEQ ID NO: 44133 - RNA, 23 nt, Artificial Sequence
  Synthetic
  misc_feature (21)..(21): n is a, c, g, or u
gaguccucuuauauaacugcnuu

SEQ ID NO: 44134 - RNA, 24 nt, Artificial Sequence
  Synthetic
  misc_feature (22)..(22): n is a, c, g, or u
agaguccucuuauauaacugcnuu

SEQ ID NO: 44135 - RNA, 18 nt, Artificial Sequence
  Synthetic
acauaucccauaaaauuu

SEQ ID NO: 44136 - RNA, 19 nt, Artificial Sequence
  Synthetic
uacauaucccauaaaauuu

SEQ ID NO: 44137 - RNA, 20 nt, Artificial Sequence
  Synthetic
uuacauaucccauaaaauuu

SEQ ID NO: 44138 - RNA, 21 nt, Artificial Sequence
  Synthetic
auuacauaucccauaaaauuu

SEQ ID NO: 44139 - RNA, 22 nt, Artificial Sequence
  Synthetic
aauuacauaucccauaaaauuu

SEQ ID NO: 44140 - RNA, 23 nt, Artificial Sequence
  Synthetic
caauuacauaucccauaaaauuu

SEQ ID NO: 44141 - RNA, 24 nt, Artificial Sequence
  Synthetic
ccaauuacauaucccauaaaauuu

SEQ ID NO: 44142 - RNA, 18 nt, Artificial Sequence
  Synthetic
uaaugauuaacuacauuu

SEQ ID NO: 44143 - RNA, 19 nt, Artificial Sequence
  Synthetic
guaaugauuaacuacauuu

SEQ ID NO: 44144 - RNA, 20 nt, Artificial Sequence
  Synthetic
aguaaugauuaacuacauuu

SEQ ID NO: 44145 - RNA, 21 nt, Artificial Sequence
  Synthetic
aaguaaugauuaacuacauuu

SEQ ID NO: 44146 - RNA, 22 nt, Artificial Sequence
  Synthetic
gaaguaaugauuaacuacauuu

SEQ ID NO: 44147 - RNA, 23 nt, Artificial Sequence
  Synthetic
ggaaguaaugauuaacuacauuu

SEQ ID NO: 44148 - RNA, 24 nt, Artificial Sequence
  Synthetic
uggaaguaaugauuaacuacauuu

SEQ ID NO: 44149 - RNA, 18 nt, Artificial Sequence
  Synthetic
ccccugacuuugggauuu

SEQ ID NO: 44150 - RNA, 19 nt, Artificial Sequence
  Synthetic
gccccugacuuugggauuu

SEQ ID NO: 44151 - RNA, 20 nt, Artificial Sequence
  Synthetic
ggccccugacuuugggauuu

SEQ ID NO: 44152 - RNA, 21 nt, Artificial Sequence
  Synthetic
aggccccugacuuugggauuu

SEQ ID NO: 44153 - RNA, 22 nt, Artificial Sequence
  Synthetic
caggccccugacuuugggauuu

SEQ ID NO: 44154 - RNA, 23 nt, Artificial Sequence
  Synthetic
acaggccccugacuuugggauuu

SEQ ID NO: 44155 - RNA, 24 nt, Artificial Sequence
  Synthetic
uacaggccccugacuuugggauuu

SEQ ID NO: 44156 - RNA, 18 nt, Artificial Sequence
  Synthetic
acaauaguugccugauuu

SEQ ID NO: 44157 - RNA, 19 nt, Artificial Sequence
  Synthetic
cacaauaguugccugauuu

SEQ ID NO: 44158 - RNA, 20 nt, Artificial Sequence
  Synthetic
ccacaauaguugccugauuu

SEQ ID NO: 44159 - RNA, 21 nt, Artificial Sequence
  Synthetic
accacaauaguugccugauuu

SEQ ID NO: 44160 - RNA, 22 nt, Artificial Sequence
  Synthetic
aaccacaauaguugccugauuu

SEQ ID NO: 44161 - RNA, 23 nt, Artificial Sequence
  Synthetic
aaaccacaauaguugccugauuu

SEQ ID NO: 44162 - RNA, 24 nt, Artificial Sequence
  Synthetic
gaaaccacaauaguugccugauuu

SEQ ID NO: 44163 - RNA, 18 nt, Artificial Sequence
  Synthetic
gucuaaugguaaauauuu

SEQ ID NO: 44164 - RNA, 19 nt, Artificial Sequence
  Synthetic
ugucuaaugguaaauauuu

SEQ ID NO: 44165 - RNA, 20 nt, Artificial Sequence
  Synthetic
uugucuaaugguaaauauuu

SEQ ID NO: 44166 - RNA, 21 nt, Artificial Sequence
  Synthetic
uuugucuaaugguaaauauuu

SEQ ID NO: 44167 - RNA, 22 nt, Artificial Sequence
  Synthetic
cuuugucuaaugguaaauauuu

SEQ ID NO: 44168 - RNA, 23 nt, Artificial Sequence
  Synthetic
ccuuugucuaaugguaaauauuu

SEQ ID NO: 44169 - RNA, 24 nt, Artificial Sequence
  Synthetic
accuuugucuaaugguaaauauuu

SEQ ID NO: 44170 - RNA, 18 nt, Artificial Sequence
  Synthetic
ugaugcaaauggauauuu

SEQ ID NO: 44171 - RNA, 19 nt, Artificial Sequence
  Synthetic
uugaugcaaauggauauuu

SEQ ID NO: 44172 - RNA, 20 nt, Artificial Sequence
  Synthetic
cuugaugcaaauggauauuu

SEQ ID NO: 44173 - RNA, 21 nt, Artificial Sequence
  Synthetic
ucuugaugcaaauggauauuu

SEQ ID NO: 44174 - RNA, 22 nt, Artificial Sequence
  Synthetic
gucuugaugcaaauggauauuu

SEQ ID NO: 44175 - RNA, 23 nt, Artificial Sequence
  Synthetic
ugucuugaugcaaauggauauuu

SEQ ID NO: 44176 - RNA, 24 nt, Artificial Sequence
  Synthetic
augucuugaugcaaauggauauuu

SEQ ID NO: 44177 - RNA, 18 nt, Artificial Sequence
  Synthetic
uggaaaggauguauauuu

SEQ ID NO: 44178 - RNA, 19 nt, Artificial Sequence
  Synthetic
auggaaaggauguauauuu

SEQ ID NO: 44179 - RNA, 20 nt, Artificial Sequence
  Synthetic
cauggaaaggauguauauuu

SEQ ID NO: 44180 - RNA, 21 nt, Artificial Sequence
  Synthetic
ccauggaaaggauguauauuu

SEQ ID NO: 44181 - RNA, 22 nt, Artificial Sequence
  Synthetic
gccauggaaaggauguauauuu

SEQ ID NO: 44182 - RNA, 23 nt, Artificial Sequence
  Synthetic
agccauggaaaggauguauauuu

SEQ ID NO: 44183 - RNA, 24 nt, Artificial Sequence
  Synthetic
cagccauggaaaggauguauauuu

SEQ ID NO: 44184 - RNA, 18 nt, Artificial Sequence
  Synthetic
ccacucccauagguauuu

SEQ ID NO: 44185 - RNA, 19 nt, Artificial Sequence
  Synthetic
cccacucccauagguauuu

SEQ ID NO: 44186 - RNA, 20 nt, Artificial Sequence
  Synthetic
gcccacucccauagguauuu

SEQ ID NO: 44187 - RNA, 21 nt, Artificial Sequence
  Synthetic
ggcccacucccauagguauuu

SEQ ID NO: 44188 - RNA, 22 nt, Artificial Sequence
  Synthetic
aggcccacucccauagguauuu

SEQ ID NO: 44189 - RNA, 23 nt, Artificial Sequence
  Synthetic
gaggcccacucccauagguauuu

SEQ ID NO: 44190 - RNA, 24 nt, Artificial Sequence
  Synthetic
ugaggcccacucccauagguauuu

SEQ ID NO: 44191 - RNA, 18 nt, Artificial Sequence
  Synthetic
ucuggccaaggguccuuu

SEQ ID NO: 44192 - RNA, 19 nt, Artificial Sequence
  Synthetic
cucuggccaaggguccuuu

SEQ ID NO: 44193 - RNA, 20 nt, Artificial Sequence
  Synthetic
ccucuggccaaggguccuuu

SEQ ID NO: 44194 - RNA, 21 nt, Artificial Sequence
  Synthetic
gccucuggccaaggguccuuu

SEQ ID NO: 44195 - RNA, 22 nt, Artificial Sequence
  Synthetic
ggccucuggccaaggguccuuu

SEQ ID NO: 44196 - RNA, 23 nt, Artificial Sequence
  Synthetic
uggccucuggccaaggguccuuu

SEQ ID NO: 44197 - RNA, 24 nt, Artificial Sequence
  Synthetic
uuggccucuggccaaggguccuuu

SEQ ID NO: 44198 - RNA, 18 nt, Artificial Sequence
  Synthetic
aguagcuccaaauucuuu

SEQ ID NO: 44199 - RNA, 19 nt, Artificial Sequence
  Synthetic
caguagcuccaaauucuuu

SEQ ID NO: 44200 - RNA, 20 nt, Artificial Sequence
  Synthetic
acaguagcuccaaauucuuu

SEQ ID NO: 44201 - RNA, 21 nt, Artificial Sequence
  Synthetic
cacaguagcuccaaauucuuu

SEQ ID NO: 44202 - RNA, 22 nt, Artificial Sequence
  Synthetic
ccacaguagcuccaaauucuuu

SEQ ID NO: 44203 - RNA, 23 nt, Artificial Sequence
  Synthetic
uccacaguagcuccaaauucuuu

SEQ ID NO: 44204 - RNA, 24 nt, Artificial Sequence
  Synthetic
cuccacaguagcuccaaauucuuu

SEQ ID NO: 44205 - RNA, 18 nt, Artificial Sequence
  Synthetic
aaauauuuaguagaguuu

SEQ ID NO: 44206 - RNA, 19 nt, Artificial Sequence
  Synthetic
uaaauauuuaguagaguuu

SEQ ID NO: 44207 - RNA, 20 nt, Artificial Sequence
  Synthetic
guaaauauuuaguagaguuu

SEQ ID NO: 44208 - RNA, 21 nt, Artificial Sequence
  Synthetic
gguaaauauuuaguagaguuu

SEQ ID NO: 44209 - RNA, 22 nt, Artificial Sequence
  Synthetic
ugguaaauauuuaguagaguuu

SEQ ID NO: 44210 - RNA, 23 nt, Artificial Sequence
  Synthetic
augguaaauauuuaguagaguuu

SEQ ID NO: 44211 - RNA, 24 nt, Artificial Sequence
  Synthetic
aaugguaaauauuuaguagaguuu

SEQ ID NO: 44212 - RNA, 18 nt, Artificial Sequence
  Synthetic
ccuguuaacagggaguuu

SEQ ID NO: 44213 - RNA, 19 nt, Artificial Sequence
  Synthetic
gccuguuaacagggaguuu

SEQ ID NO: 44214 - RNA, 20 nt, Artificial Sequence
  Synthetic
ggccuguuaacagggaguuu

SEQ ID NO: 44215 - RNA, 21 nt, Artificial Sequence
  Synthetic
uggccuguuaacagggaguuu

SEQ ID NO: 44216 - RNA, 22 nt, Artificial Sequence
  Synthetic
uuggccuguuaacagggaguuu

SEQ ID NO: 44217 - RNA, 23 nt, Artificial Sequence
  Synthetic
auuggccuguuaacagggaguuu

SEQ ID NO: 44218 - RNA, 24 nt, Artificial Sequence
  Synthetic
aauuggccuguuaacagggaguuu

SEQ ID NO: 44219 - RNA, 18 nt, Artificial Sequence
  Synthetic
caggagucgugcagguuu

SEQ ID NO: 44220 - RNA, 19 nt, Artificial Sequence
  Synthetic
gcaggagucgugcagguuu

SEQ ID NO: 44221 - RNA, 20 nt, Artificial Sequence
  Synthetic
agcaggagucgugcagguuu

SEQ ID NO: 44222 - RNA, 21 nt, Artificial Sequence
  Synthetic
gagcaggagucgugcagguuu

SEQ ID NO: 44223 - RNA, 22 nt, Artificial Sequence
  Synthetic
ugagcaggagucgugcagguuu

SEQ ID NO: 44224 - RNA, 23 nt, Artificial Sequence
  Synthetic
uugagcaggagucgugcagguuu

SEQ ID NO: 44225 - RNA, 24 nt, Artificial Sequence
  Synthetic
cuugagcaggagucgugcagguuu

SEQ ID NO: 44226 - RNA, 18 nt, Artificial Sequence
  Synthetic
aagguucauguauuguuu

SEQ ID NO: 44227 - RNA, 19 nt, Artificial Sequence
  Synthetic
aaagguucauguauuguuu

SEQ ID NO: 44228 - RNA, 20 nt, Artificial Sequence
  Synthetic
uaaagguucauguauuguuu

SEQ ID NO: 44229 - RNA, 21 nt, Artificial Sequence
  Synthetic
guaaagguucauguauuguuu

SEQ ID NO: 44230 - RNA, 22 nt, Artificial Sequence
  Synthetic
gguaaagguucauguauuguuu

SEQ ID NO: 44231 - RNA, 23 nt, Artificial Sequence
  Synthetic
ggguaaagguucauguauuguuu

SEQ ID NO: 44232 - RNA, 24 nt, Artificial Sequence
  Synthetic
  misc_feature (1)..(1): n is a, c, g, or u
nggguaaagguucauguauuguuu

SEQ ID NO: 44233 - RNA, 18 nt, Artificial Sequence
  Synthetic
cccugacuuugggauuuu

SEQ ID NO: 44234 - RNA, 19 nt, Artificial Sequence
  Synthetic
ccccugacuuugggauuuu

SEQ ID NO: 44235 - RNA, 20 nt, Artificial Sequence
  Synthetic
gccccugacuuugggauuuu

SEQ ID NO: 44236 - RNA, 21 nt, Artificial Sequence
  Synthetic
ggccccugacuuugggauuuu

SEQ ID NO: 44237 - RNA, 22 nt, Artificial Sequence
  Synthetic
aggccccugacuuugggauuuu

SEQ ID NO: 44238 - RNA, 23 nt, Artificial Sequence
  Synthetic
caggccccugacuuugggauuuu

SEQ ID NO: 44239 - RNA, 24 nt, Artificial Sequence
  Synthetic
acaggccccugacuuugggauuuu

SEQ ID NO: 44240 - RNA, 18 nt, Artificial Sequence
  Synthetic
cacucccauagguauuuu

SEQ ID NO: 44241 - RNA, 19 nt, Artificial Sequence
  Synthetic
ccacucccauagguauuuu

SEQ ID NO: 44242 - RNA, 20 nt, Artificial Sequence
  Synthetic
cccacucccauagguauuuu

SEQ ID NO: 44243 - RNA, 21 nt, Artificial Sequence
  Synthetic
gcccacucccauagguauuuu

SEQ ID NO: 44244 - RNA, 22 nt, Artificial Sequence
  Synthetic
ggcccacucccauagguauuuu

SEQ ID NO: 44245 - RNA, 23 nt, Artificial Sequence
  Synthetic
aggcccacucccauagguauuuu

SEQ ID NO: 44246 - RNA, 24 nt, Artificial Sequence
  Synthetic
gaggcccacucccauagguauuuu

SEQ ID NO: 44247 - RNA, 18 nt, Artificial Sequence
  Synthetic
aggagucgugcagguuuu

SEQ ID NO: 44248 - RNA, 19 nt, Artificial Sequence
  Synthetic
caggagucgugcagguuuu

SEQ ID NO: 44249 - RNA, 20 nt, Artificial Sequence
  Synthetic
gcaggagucgugcagguuuu

SEQ ID NO: 44250 - RNA, 21 nt, Artificial Sequence
  Synthetic
agcaggagucgugcagguuuu

SEQ ID NO: 44251 - RNA, 22 nt, Artificial Sequence
  Synthetic
gagcaggagucgugcagguuuu

SEQ ID NO: 44252 - RNA, 23 nt, Artificial Sequence
  Synthetic
ugagcaggagucgugcagguuuu

SEQ ID NO: 44253 - RNA, 24 nt, Artificial Sequence
  Synthetic
uugagcaggagucgugcagguuuu

SEQ ID NO: 44254 - RNA, 18 nt, Artificial Sequence
  Synthetic
  misc_feature (4)..(4): n is a, c, g, or u
accnuaacaaaacaaaaa

SEQ ID NO: 44255 - RNA, 19 nt, Artificial Sequence
  Synthetic
  misc_feature (5)..(5): n is a, c, g, or u
aaccnuaacaaaacaaaaa

SEQ ID NO: 44256 - RNA, 20 nt, Artificial Sequence
  Synthetic
  misc_feature (6)..(6): n is a, c, g, or u
aaaccnuaacaaaacaaaaa

SEQ ID NO: 44257 - RNA, 21 nt, Artificial Sequence
  Synthetic
  misc_feature (7)..(7): n is a, c, g, or u
uaaaccnuaacaaaacaaaaa

SEQ ID NO: 44258 - RNA, 22 nt, Artificial Sequence
  Synthetic
  misc_feature (8)..(8): n is a, c, g, or u
cuaaaccnuaacaaaacaaaaa

SEQ ID NO: 44259 - RNA, 23 nt, Artificial Sequence
  Synthetic
  misc_feature (9)..(9): n is a, c, g, or u
ucuaaaccnuaacaaaacaaaaa

SEQ ID NO: 44260 - RNA, 24 nt, Artificial Sequence
  Synthetic
  misc_feature (10)..(10): n is a, c, g, or u
aucuaaaccnuaacaaaacaaaaa

SEQ ID NO: 44261 - RNA, 18 nt, Artificial Sequence
  Synthetic
cuaauauggguuuaaaaa

SEQ ID NO: 44262 - RNA, 19 nt, Artificial Sequence
  Synthetic
acuaauauggguuuaaaaa

SEQ ID NO: 44263 - RNA, 20 nt, Artificial Sequence
  Synthetic
uacuaauauggguuuaaaaa

SEQ ID NO: 44264 - RNA, 21 nt, Artificial Sequence
  Synthetic
auacuaauauggguuuaaaaa

SEQ ID NO: 44265 - RNA, 22 nt, Artificial Sequence
  Synthetic
aauacuaauauggguuuaaaaa

SEQ ID NO: 44266 - RNA, 23 nt, Artificial Sequence
  Synthetic
uaauacuaauauggguuuaaaaa

SEQ ID NO: 44267 - RNA, 24 nt, Artificial Sequence
  Synthetic
uuaauacuaauauggguuuaaaaa

SEQ ID NO: 44268 - RNA, 18 nt, Artificial Sequence
  Synthetic
  misc_feature (10)..(10): n is a, c, g, or u
aucuaaaccnuaacaaaa

SEQ ID NO: 44269 - RNA, 19 nt, Artificial Sequence
  Synthetic
  misc_feature (11)..(11): n is a, c, g, or u
caucuaaaccnuaacaaaa

SEQ ID NO: 44270 - RNA, 20 nt, Artificial Sequence
  Synthetic
  misc_feature (12)..(12): n is a, c, g, or u
acaucuaaaccnuaacaaaa

SEQ ID NO: 44271 - RNA, 21 nt, Artificial Sequence
  Synthetic
  misc_feature (13)..(13): n is a, c, g, or u
uacaucuaaaccnuaacaaaa

SEQ ID NO: 44272 - RNA, 22 nt, Artificial Sequence
  Synthetic
  misc_feature (14)..(14): n is a, c, g, or u
auacaucuaaaccnuaacaaaa

SEQ ID NO: 44273 - RNA, 23 nt, Artificial Sequence
  Synthetic
  misc_feature (15)..(15): n is a, c, g, or u
uauacaucuaaaccnuaacaaaa

SEQ ID NO: 44274 - RNA, 24 nt, Artificial Sequence
  Synthetic
  misc_feature (16)..(16): n is a, c, g, or u
guauacaucuaaaccnuaacaaaa

SEQ ID NO: 44275 - RNA, 18 nt, Artificial Sequence
  Synthetic
  misc_feature (14)..(14): n is a, c, g, or u
aacacaucacacanaaaa

SEQ ID NO: 44276 - RNA, 19 nt, Artificial Sequence
  Synthetic
  misc_feature (15)..(15): n is a, c, g, or u
gaacacaucacacanaaaa

SEQ ID NO: 44277 - RNA, 20 nt, Artificial Sequence
  Synthetic
  misc_feature (16)..(16): n is a, c, g, or u
agaacacaucacacanaaaa

SEQ ID NO: 44278 - RNA, 21 nt, Artificial Sequence
  Synthetic
  misc_feature (17)..(17): n is a, c, g, or u
aagaacacaucacacanaaaa

SEQ ID NO: 44279 - RNA, 22 nt, Artificial Sequence
  Synthetic
  misc_feature (18)..(18): n is a, c, g, or u
caagaacacaucacacanaaaa

SEQ ID NO: 44280 - RNA, 23 nt, Artificial Sequence
  Synthetic
  misc_feature (19)..(19): n is a, c, g, or u
acaagaacacaucacacanaaaa

SEQ ID NO: 44281 - RNA, 24 nt, Artificial Sequence
  Synthetic
  misc_feature (20)..(20): n is a, c, g, or u
cacaagaacacaucacacanaaaa

SEQ ID NO: 44282 - RNA, 18 nt, Artificial Sequence
  Synthetic
acuaauauggguuuaaaa

SEQ ID NO: 44283 - RNA, 19 nt, Artificial Sequence
  Synthetic
uacuaauauggguuuaaaa

SEQ ID NO: 44284 - RNA, 20 nt, Artificial Sequence
  Synthetic
auacuaauauggguuuaaaa

SEQ ID NO: 44285 - RNA, 21 nt, Artificial Sequence
  Synthetic
aauacuaauauggguuuaaaa

SEQ ID NO: 44286 - RNA, 22 nt, Artificial Sequence
  Synthetic
uaauacuaauauggguuuaaaa

SEQ ID NO: 44287 - RNA, 23 nt, Artificial Sequence
  Synthetic
uuaauacuaauauggguuuaaaa

SEQ ID NO: 44288 - RNA, 24 nt, Artificial Sequence
  Synthetic
guuaauacuaauauggguuuaaaa

SEQ ID NO: 44289 - RNA, 18 nt, Artificial Sequence
  Synthetic
  misc_feature (11)..(11): n is a, c, g, or u
caucuaaaccnuaacaaa

SEQ ID NO: 44290 - RNA, 19 nt, Artificial Sequence
  Synthetic
  misc_feature (12)..(12): n is a, c, g, or u
acaucuaaaccnuaacaaa

SEQ ID NO: 44291 - RNA, 20 nt, Artificial Sequence
  Synthetic
  misc_feature (13)..(13): n is a, c, g, or u
uacaucuaaaccnuaacaaa

SEQ ID NO: 44292 - RNA, 21 nt, Artificial Sequence
  Synthetic
  misc_feature (14)..(14): n is a, c, g, or u
auacaucuaaaccnuaacaaa

SEQ ID NO: 44293 - RNA, 22 nt, Artificial Sequence
  Synthetic
  misc_feature (15)..(15): n is a, c, g, or u
uauacaucuaaaccnuaacaaa

SEQ ID NO: 44294 - RNA, 23 nt, Artificial Sequence
  Synthetic
  misc_feature (16)..(16): n is a, c, g, or u
guauacaucuaaaccnuaacaaa

SEQ ID NO: 44295 - RNA, 24 nt, Artificial Sequence
  Synthetic
  misc_feature (17)..(17): n is a, c, g, or u
gguauacaucuaaaccnuaacaaa

SEQ ID NO: 44296 - RNA, 18 nt, Artificial Sequence
  Synthetic
gcucuacaaaaucccaaa

SEQ ID NO: 44297 - RNA, 19 nt, Artificial Sequence
  Synthetic
agcucuacaaaaucccaaa

SEQ ID NO: 44298 - RNA, 20 nt, Artificial Sequence
  Synthetic
aagcucuacaaaaucccaaa

SEQ ID NO: 44299 - RNA, 21 nt, Artificial Sequence
  Synthetic
caagcucuacaaaaucccaaa

SEQ ID NO: 44300 - RNA, 22 nt, Artificial Sequence
  Synthetic
ccaagcucuacaaaaucccaaa

SEQ ID NO: 44301 - RNA, 23 nt, Artificial Sequence
  Synthetic
accaagcucuacaaaaucccaaa

SEQ ID NO: 44302 - RNA, 24 nt, Artificial Sequence
  Synthetic
caccaagcucuacaaaaucccaaa

SEQ ID NO: 44303 - RNA, 18 nt, Artificial Sequence
  Synthetic
ugggacuucaaucccaaa

SEQ ID NO: 44304 - RNA, 19 nt, Artificial Sequence
  Synthetic
uugggacuucaaucccaaa

SEQ ID NO: 44305 - RNA, 20 nt, Artificial Sequence
  Synthetic
auugggacuucaaucccaaa

SEQ ID NO: 44306 - RNA, 21 nt, Artificial Sequence
  Synthetic
gauugggacuucaaucccaaa

SEQ ID NO: 44307 - RNA, 22 nt, Artificial Sequence
  Synthetic
agauugggacuucaaucccaaa

SEQ ID NO: 44308 - RNA, 23 nt, Artificial Sequence
  Synthetic
cagauugggacuucaaucccaaa

SEQ ID NO: 44309 - RNA, 24 nt, Artificial Sequence
  Synthetic
ccagauugggacuucaaucccaaa

SEQ ID NO: 44310 - RNA, 18 nt, Artificial Sequence
  Synthetic
cucacaguaaaugagaaa

SEQ ID NO: 44311 - RNA, 19 nt, Artificial Sequence
  Synthetic
ucucacaguaaaugagaaa

SEQ ID NO: 44312 - RNA, 20 nt, Artificial Sequence
  Synthetic
cucucacaguaaaugagaaa

SEQ ID NO: 44313 - RNA, 21 nt, Artificial Sequence
  Synthetic
ccucucacaguaaaugagaaa

SEQ ID NO: 44314 - RNA, 22 nt, Artificial Sequence
  Synthetic
cccucucacaguaaaugagaaa

SEQ ID NO: 44315 - RNA, 23 nt, Artificial Sequence
  Synthetic
gcccucucacaguaaaugagaaa

SEQ ID NO: 44316 - RNA, 24 nt, Artificial Sequence
  Synthetic
ggcccucucacaguaaaugagaaa

SEQ ID NO: 44317 - RNA, 18 nt, Artificial Sequence
  Synthetic
  misc_feature (15)..(15): n is a, c, g, or u
gaacacaucacacanaaa

SEQ ID NO: 44318 - RNA, 19 nt, Artificial Sequence
  Synthetic
  misc_feature (16)..(16): n is a, c, g, or u
agaacacaucacacanaaa

SEQ ID NO: 44319 - RNA, 20 nt, Artificial Sequence
  Synthetic
  misc_feature (17)..(17): n is a, c, g, or u
aagaacacaucacacanaaa

SEQ ID NO: 44320 - RNA, 21 nt, Artificial Sequence
  Synthetic
  misc_feature (18)..(18): n is a, c, g, or u
caagaacacaucacacanaaa

SEQ ID NO: 44321 - RNA, 22 nt, Artificial Sequence
  Synthetic
  misc_feature (19)..(19): n is a, c, g, or u
acaagaacacaucacacanaaa

SEQ ID NO: 44322 - RNA, 23 nt, Artificial Sequence
  Synthetic
  misc_feature (20)..(20): n is a, c, g, or u
cacaagaacacaucacacanaaa

SEQ ID NO: 44323 - RNA, 24 nt, Artificial Sequence
  Synthetic
  misc_feature (21)..(21): n is a, c, g, or u
ccacaagaacacaucacacanaaa

SEQ ID NO: 44324 - RNA, 18 nt, Artificial Sequence
  Synthetic
caagacauuauaacuaaa

SEQ ID NO: 44325 - RNA, 19 nt, Artificial Sequence
  Synthetic
ucaagacauuauaacuaaa

SEQ ID NO: 44326 - RNA, 20 nt, Artificial Sequence
  Synthetic
aucaagacauuauaacuaaa

SEQ ID NO: 44327 - RNA, 21 nt, Artificial Sequence
  Synthetic
caucaagacauuauaacuaaa

SEQ ID NO: 44328 - RNA, 22 nt, Artificial Sequence
  Synthetic
gcaucaagacauuauaacuaaa

SEQ ID NO: 44329 - RNA, 23 nt, Artificial Sequence
  Synthetic
ugcaucaagacauuauaacuaaa

SEQ ID NO: 44330 - RNA, 24 nt, Artificial Sequence
  Synthetic
uugcaucaagacauuauaacuaaa

SEQ ID NO: 44331 - RNA, 18 nt, Artificial Sequence
  Synthetic
gggcccucucacaguaaa

SEQ ID NO: 44332 - RNA, 19 nt, Artificial Sequence
  Synthetic
ugggcccucucacaguaaa

SEQ ID NO: 44333 - RNA, 20 nt, Artificial Sequence
  Synthetic
gugggcccucucacaguaaa

SEQ ID NO: 44334 - RNA, 21 nt, Artificial Sequence
  Synthetic
ugugggcccucucacaguaaa

SEQ ID NO: 44335 - RNA, 22 nt, Artificial Sequence
  Synthetic
uugugggcccucucacaguaaa

SEQ ID NO: 44336 - RNA, 23 nt, Artificial Sequence
  Synthetic
uuugugggcccucucacaguaaa

SEQ ID NO: 44337 - RNA, 24 nt, Artificial Sequence
  Synthetic
auuugugggcccucucacaguaaa

SEQ ID NO: 44338 - RNA, 18 nt, Artificial Sequence
  Synthetic
cagagcaaauaccaacaa

SEQ ID NO: 44339 - RNA, 19 nt, Artificial Sequence
  Synthetic
ucagagcaaauaccaacaa

SEQ ID NO: 44340 - RNA, 20 nt, Artificial Sequence
  Synthetic
uucagagcaaauaccaacaa

SEQ ID NO: 44341 - RNA, 21 nt, Artificial Sequence
  Synthetic
auucagagcaaauaccaacaa

SEQ ID NO: 44342 - RNA, 22 nt, Artificial Sequence
  Synthetic
cauucagagcaaauaccaacaa

SEQ ID NO: 44343 - RNA, 23 nt, Artificial Sequence
  Synthetic
gcauucagagcaaauaccaacaa

SEQ ID NO: 44344 - RNA, 24 nt, Artificial Sequence
  Synthetic
agcauucagagcaaauaccaacaa

SEQ ID NO: 44345 - RNA, 18 nt, Artificial Sequence
  Synthetic
uuggccagaggccaacaa

SEQ ID NO: 44346 - RNA, 19 nt, Artificial Sequence
  Synthetic
cuuggccagaggccaacaa

SEQ ID NO: 44347 - RNA, 20 nt, Artificial Sequence
  Synthetic
ccuuggccagaggccaacaa

SEQ ID NO: 44348 - RNA, 21 nt, Artificial Sequence
  Synthetic
cccuuggccagaggccaacaa

SEQ ID NO: 44349 - RNA, 22 nt, Artificial Sequence
  Synthetic
acccuuggccagaggccaacaa

SEQ ID NO: 44350 - RNA, 23 nt, Artificial Sequence
  Synthetic
gacccuuggccagaggccaacaa

SEQ ID NO: 44351 - RNA, 24 nt, Artificial Sequence
  Synthetic
ggacccuuggccagaggccaacaa

SEQ ID NO: 44352 - RNA, 18 nt, Artificial Sequence
  Synthetic
uguuuguuaugucaacaa

SEQ ID NO: 44353 - RNA, 19 nt, Artificial Sequence
  Synthetic
cuguuuguuaugucaacaa

SEQ ID NO: 44354 - RNA, 20 nt, Artificial Sequence
  Synthetic
acuguuuguuaugucaacaa

SEQ ID NO: 44355 - RNA, 21 nt, Artificial Sequence
  Synthetic
gacuguuuguuaugucaacaa

SEQ ID NO: 44356 - RNA, 22 nt, Artificial Sequence
  Synthetic
ggacuguuuguuaugucaacaa

SEQ ID NO: 44357 - RNA, 23 nt, Artificial Sequence
  Synthetic
uggacuguuuguuaugucaacaa

SEQ ID NO: 44358 - RNA, 24 nt, Artificial Sequence
  Synthetic
uuggacuguuuguuaugucaacaa

SEQ ID NO: 44359 - RNA, 18 nt, Artificial Sequence
  Synthetic
  misc_feature (12)..(12): n is a, c, g, or u
acaucuaaaccnuaacaa

SEQ ID NO: 44360 - RNA, 19 nt, Artificial Sequence
  Synthetic
  misc_feature (13)..(13): n is a, c, g, or u
uacaucuaaaccnuaacaa

SEQ ID NO: 44361 - RNA, 20 nt, Artificial Sequence
  Synthetic
  misc_feature (14)..(14): n is a, c, g, or u
auacaucuaaaccnuaacaa

SEQ ID NO: 44362 - RNA, 21 nt, Artificial Sequence
  Synthetic
  misc_feature (15)..(15): n is a, c, g, or u
uauacaucuaaaccnuaacaa

SEQ ID NO: 44363 - RNA, 22 nt, Artificial Sequence
  Synthetic
  misc_feature (16)..(16): n is a, c, g, or u
guauacaucuaaaccnuaacaa

SEQ ID NO: 44364 - RNA, 23 nt, Artificial Sequence
  Synthetic
  misc_feature (17)..(17): n is a, c, g, or u
gguauacaucuaaaccnuaacaa

SEQ ID NO: 44365 - RNA, 24 nt, Artificial Sequence
  Synthetic
  misc_feature (18)..(18): n is a, c, g, or u
ggguauacaucuaaaccnuaacaa

SEQ ID NO: 44366 - RNA, 18 nt, Artificial Sequence
  Synthetic
uauuccuuggacucacaa

SEQ ID NO: 44367 - RNA, 19 nt, Artificial Sequence
  Synthetic
guauuccuuggacucacaa

SEQ ID NO: 44368 - RNA, 20 nt, Artificial Sequence
  Synthetic
aguauuccuuggacucacaa

SEQ ID NO: 44369 - RNA, 21 nt, Artificial Sequence
  Synthetic
uaguauuccuuggacucacaa

SEQ ID NO: 44370 - RNA, 22 nt, Artificial Sequence
  Synthetic
uuaguauuccuuggacucacaa

SEQ ID NO: 44371 - RNA, 23 nt, Artificial Sequence
  Synthetic
guuaguauuccuuggacucacaa

SEQ ID NO: 44372 - RNA, 24 nt, Artificial Sequence
  Synthetic
uguuaguauuccuuggacucacaa

SEQ ID NO: 44373 - RNA, 18 nt, Artificial Sequence
  Synthetic
uuauaugcauguauacaa

SEQ ID NO: 44374 - RNA, 19 nt, Artificial Sequence
  Synthetic
uuuauaugcauguauacaa

SEQ ID NO: 44375 - RNA, 20 nt, Artificial Sequence
  Synthetic
cuuuauaugcauguauacaa

SEQ ID NO: 44376 - RNA, 21 nt, Artificial Sequence
  Synthetic
ccuuuauaugcauguauacaa

SEQ ID NO: 44377 - RNA, 22 nt, Artificial Sequence
  Synthetic
gccuuuauaugcauguauacaa

SEQ ID NO: 44378 - RNA, 23 nt, Artificial Sequence
  Synthetic
ugccuuuauaugcauguauacaa

SEQ ID NO: 44379 - RNA, 24 nt, Artificial Sequence
  Synthetic
augccuuuauaugcauguauacaa

SEQ ID NO: 44380 - RNA, 18 nt, Artificial Sequence
  Synthetic
uugggacuucaaucccaa

SEQ ID NO: 44381 - RNA, 19 nt, Artificial Sequence
  Synthetic
auugggacuucaaucccaa

SEQ ID NO: 44382 - RNA, 20 nt, Artificial Sequence
  Synthetic
gauugggacuucaaucccaa

SEQ ID NO: 44383 - RNA, 21 nt, Artificial Sequence
  Synthetic
agauugggacuucaaucccaa

SEQ ID NO: 44384 - RNA, 22 nt, Artificial Sequence
  Synthetic
cagauugggacuucaaucccaa

SEQ ID NO: 44385 - RNA, 23 nt, Artificial Sequence
  Synthetic
ccagauugggacuucaaucccaa

SEQ ID NO: 44386 - RNA, 24 nt, Artificial Sequence
  Synthetic
uccagauugggacuucaaucccaa

SEQ ID NO: 44387 - RNA, 18 nt, Artificial Sequence
  Synthetic
ugcacgacuccugcucaa

SEQ ID NO: 44388 - RNA, 19 nt, Artificial Sequence
  Synthetic
cugcacgacuccugcucaa

SEQ ID NO: 44389 - RNA, 20 nt, Artificial Sequence
  Synthetic
ccugcacgacuccugcucaa

SEQ ID NO: 44390 - RNA, 21 nt, Artificial Sequence
  Synthetic
accugcacgacuccugcucaa

SEQ ID NO: 44391 - RNA, 22 nt, Artificial Sequence
  Synthetic
aaccugcacgacuccugcucaa

SEQ ID NO: 44392 - RNA, 23 nt, Artificial Sequence
  Synthetic
aaaccugcacgacuccugcucaa

SEQ ID NO: 44393 - RNA, 24 nt, Artificial Sequence
  Synthetic
aaaaccugcacgacuccugcucaa

SEQ ID NO: 44394 - RNA, 18 nt, Artificial Sequence
  Synthetic
auugacccuuauaaagaa

SEQ ID NO: 44395 - RNA, 19 nt, Artificial Sequence
  Synthetic
cauugacccuuauaaagaa

SEQ ID NO: 44396 - RNA, 20 nt, Artificial Sequence
  Synthetic
acauugacccuuauaaagaa

SEQ ID NO: 44397 - RNA, 21 nt, Artificial Sequence
  Synthetic
gacauugacccuuauaaagaa

SEQ ID NO: 44398 - RNA, 22 nt, Artificial Sequence
  Synthetic
agacauugacccuuauaaagaa

SEQ ID NO: 44399 - RNA, 23 nt, Artificial Sequence
  Synthetic
uagacauugacccuuauaaagaa

SEQ ID NO: 44400 - RNA, 24 nt, Artificial Sequence
  Synthetic
uuagacauugacccuuauaaagaa

SEQ ID NO: 44401 - RNA, 18 nt, Artificial Sequence
  Synthetic
uuugcugagugggaagaa

SEQ ID NO: 44402 - RNA, 19 nt, Artificial Sequence
  Synthetic
uuuugcugagugggaagaa

SEQ ID NO: 44403 - RNA, 20 nt, Artificial Sequence
  Synthetic
uuuuugcugagugggaagaa

SEQ ID NO: 44404 - RNA, 21 nt, Artificial Sequence
  Synthetic
guuuuugcugagugggaagaa

SEQ ID NO: 44405 - RNA, 22 nt, Artificial Sequence
  Synthetic
uguuuuugcugagugggaagaa

SEQ ID NO: 44406 - RNA, 23 nt, Artificial Sequence
  Synthetic
guguuuuugcugagugggaagaa

SEQ ID NO: 44407 - RNA, 24 nt, Artificial Sequence
  Synthetic
uguguuuuugcugagugggaagaa

SEQ ID NO: 44408 - RNA, 18 nt, Artificial Sequence
  Synthetic
ucucacaguaaaugagaa

SEQ ID NO: 44409 - RNA, 19 nt, Artificial Sequence
  Synthetic
cucucacaguaaaugagaa

SEQ ID NO: 44410 - RNA, 20 nt, Artificial Sequence
  Synthetic
ccucucacaguaaaugagaa

SEQ ID NO: 44411 - RNA, 21 nt, Artificial Sequence
  Synthetic
cccucucacaguaaaugagaa

SEQ ID NO: 44412 - RNA, 22 nt, Artificial Sequence
  Synthetic
gcccucucacaguaaaugagaa

SEQ ID NO: 44413 - RNA, 23 nt, Artificial Sequence
  Synthetic
ggcccucucacaguaaaugagaa

SEQ ID NO: 44414 - RNA, 24 nt, Artificial Sequence
  Synthetic
gggcccucucacaguaaaugagaa

SEQ ID NO: 44415 - RNA, 18 nt, Artificial Sequence
  Synthetic
uggggacccugcaccgaa

SEQ ID NO: 44416 - RNA, 19 nt, Artificial Sequence
  Synthetic
uuggggacccugcaccgaa

SEQ ID NO: 44417 - RNA, 20 nt, Artificial Sequence
  Synthetic
auuggggacccugcaccgaa

SEQ ID NO: 44418 - RNA, 21 nt, Artificial Sequence
  Synthetic
gauuggggacccugcaccgaa

SEQ ID NO: 44419 - RNA, 22 nt, Artificial Sequence
  Synthetic
ggauuggggacccugcaccgaa

SEQ ID NO: 44420 - RNA, 23 nt, Artificial Sequence
  Synthetic
aggauuggggacccugcaccgaa

SEQ ID NO: 44421 - RNA, 24 nt, Artificial Sequence
  Synthetic
caggauuggggacccugcaccgaa

SEQ ID NO: 44422 - RNA, 18 nt, Artificial Sequence
  Synthetic
gaggcagguccccucgaa

SEQ ID NO: 44423 - RNA, 19 nt, Artificial Sequence
  Synthetic
agaggcagguccccucgaa

SEQ ID NO: 44424 - RNA, 20 nt, Artificial Sequence
  Synthetic
aagaggcagguccccucgaa

SEQ ID NO: 44425 - RNA, 21 nt, Artificial Sequence
  Synthetic
gaagaggcagguccccucgaa

SEQ ID NO: 44426 - RNA, 22 nt, Artificial Sequence
  Synthetic
cgaagaggcagguccccucgaa

SEQ ID NO: 44427 - RNA, 23 nt, Artificial Sequence
  Synthetic
acgaagaggcagguccccucgaa

SEQ ID NO: 44428 - RNA, 24 nt, Artificial Sequence
  Synthetic
gacgaagaggcagguccccucgaa

SEQ ID NO: 44429 - RNA, 18 nt, Artificial Sequence
  Synthetic
ugggauauguaauuggaa

SEQ ID NO: 44430 - RNA, 19 nt, Artificial Sequence
  Synthetic
augggauauguaauuggaa

SEQ ID NO: 44431 - RNA, 20 nt, Artificial Sequence
  Synthetic
uaugggauauguaauuggaa

SEQ ID NO: 44432 - RNA, 21 nt, Artificial Sequence
  Synthetic
uuaugggauauguaauuggaa

SEQ ID NO: 44433 - RNA, 22 nt, Artificial Sequence
  Synthetic
uuuaugggauauguaauuggaa

SEQ ID NO: 44434 - RNA, 23 nt, Artificial Sequence
  Synthetic
uuuuaugggauauguaauuggaa

SEQ ID NO: 44435 - RNA, 24 nt, Artificial Sequence
  Synthetic
auuuuaugggauauguaauuggaa

SEQ ID NO: 44436 - RNA, 18 nt, Artificial Sequence
  Synthetic
uuuacauacccuuuggaa

SEQ ID NO: 44437 - RNA, 19 nt, Artificial Sequence
  Synthetic
auuuacauacccuuuggaa

SEQ ID NO: 44438 - RNA, 20 nt, Artificial Sequence
  Synthetic
uauuuacauacccuuuggaa

SEQ ID NO: 44439 - RNA, 21 nt, Artificial Sequence
  Synthetic
uuauuuacauacccuuuggaa

SEQ ID NO: 44440 - RNA, 22 nt, Artificial Sequence
  Synthetic
auuauuuacauacccuuuggaa

SEQ ID NO: 44441 - RNA, 23 nt, Artificial Sequence
  Synthetic
cauuauuuacauacccuuuggaa

SEQ ID NO: 44442 - RNA, 24 nt, Artificial Sequence
  Synthetic
acauuauuuacauacccuuuggaa

SEQ ID NO: 44443 - RNA, 18 nt, Artificial Sequence
  Synthetic
cgucccgucagcgcugaa

SEQ ID NO: 44444 - RNA, 19 nt, Artificial Sequence
  Synthetic
acgucccgucagcgcugaa

SEQ ID NO: 44445 - RNA, 20 nt, Artificial Sequence
  Synthetic
uacgucccgucagcgcugaa

SEQ ID NO: 44446 - RNA, 18 nt, Artificial Sequence
  Synthetic
  misc_feature (1)..(1): n is a, c, g, or u
naccuggguggguaauaa

SEQ ID NO: 44447 - RNA, 19 nt, Artificial Sequence
  Synthetic
  misc_feature (2)..(2): n is a, c, g, or u
cnaccuggguggguaauaa

SEQ ID NO: 44448 - RNA, 20 nt, Artificial Sequence
  Synthetic
  misc_feature (3)..(3): n is a, c, g, or u
gcnaccuggguggguaauaa

SEQ ID NO: 44449 - RNA, 21 nt, Artificial Sequence
  Synthetic
  misc_feature (4)..(4): n is a, c, g, or u
agcnaccuggguggguaauaa

SEQ ID NO: 44450 - RNA, 22 nt, Artificial Sequence
  Synthetic
  misc_feature (5)..(5): n is a, c, g, or u
uagcnaccuggguggguaauaa

SEQ ID NO: 44451 - RNA, 23 nt, Artificial Sequence
  Synthetic
  misc_feature (6)..(6): n is a, c, g, or u
cuagcnaccuggguggguaauaa

SEQ ID NO: 44452 - RNA, 24 nt, Artificial Sequence
  Synthetic
  misc_feature (7)..(7): n is a, c, g, or u
ucuagcnaccuggguggguaauaa

SEQ ID NO: 44453 - RNA, 18 nt, Artificial Sequence
  Synthetic
ggcggguauucuauauaa

SEQ ID NO: 44454 - RNA, 19 nt, Artificial Sequence
  Synthetic
aggcggguauucuauauaa

SEQ ID NO: 44455 - RNA, 20 nt, Artificial Sequence
  Synthetic
aaggcggguauucuauauaa

SEQ ID NO: 44456 - RNA, 21 nt, Artificial Sequence
  Synthetic
gaaggcggguauucuauauaa

SEQ ID NO: 44457 - RNA, 22 nt, Artificial Sequence
  Synthetic
ggaaggcggguauucuauauaa

SEQ ID NO: 44458 - RNA, 23 nt, Artificial Sequence
  Synthetic
uggaaggcggguauucuauauaa

SEQ ID NO: 44459 - RNA, 24 nt, Artificial Sequence
  Synthetic
uuggaaggcggguauucuauauaa

SEQ ID NO: 44460 - RNA, 18 nt, Artificial Sequence
  Synthetic
  misc_feature (6)..(6): n is a, c, g, or u
gccaangcaguuauauaa

SEQ ID NO: 44461 - RNA, 19 nt, Artificial Sequence
  Synthetic
  misc_feature (7)..(7): n is a, c, g, or u
ugccaangcaguuauauaa

SEQ ID NO: 44462 - RNA, 20 nt, Artificial Sequence
  Synthetic
  misc_feature (8)..(8): n is a, c, g, or u
cugccaangcaguuauauaa

SEQ ID NO: 44463 - RNA, 21 nt, Artificial Sequence
  Synthetic
  misc_feature (9)..(9): n is a, c, g, or u
ucugccaangcaguuauauaa

SEQ ID NO: 44464 - RNA, 22 nt, Artificial Sequence
  Synthetic
  misc_feature (10)..(10): n is a, c, g, or u
aucugccaangcaguuauauaa

SEQ ID NO: 44465 - RNA, 23 nt, Artificial Sequence
  Synthetic
  misc_feature (11)..(11): n is a, c, g, or u
caucugccaangcaguuauauaa

SEQ ID NO: 44466 - RNA, 24 nt, Artificial Sequence
  Synthetic
  misc_feature (12)..(12): n is a, c, g, or u
ucaucugccaangcaguuauauaa

SEQ ID NO: 44467 - RNA, 18 nt, Artificial Sequence
  Synthetic
caauuauguuaauacuaa

SEQ ID NO: 44468 - RNA, 19 nt, Artificial Sequence
  Synthetic
ucaauuauguuaauacuaa

SEQ ID NO: 44469 - RNA, 20 nt, Artificial Sequence
  Synthetic
gucaauuauguuaauacuaa

SEQ ID NO: 44470 - RNA, 21 nt, Artificial Sequence
  Synthetic
ggucaauuauguuaauacuaa

SEQ ID NO: 44471 - RNA, 22 nt, Artificial Sequence
  Synthetic
uggucaauuauguuaauacuaa

SEQ ID NO: 44472 - RNA, 23 nt, Artificial Sequence
  Synthetic
guggucaauuauguuaauacuaa

SEQ ID NO: 44473 - RNA, 24 nt, Artificial Sequence
  Synthetic
gguggucaauuauguuaauacuaa

SEQ ID NO: 44474 - RNA, 18 nt, Artificial Sequence
  Synthetic
ugcauguauacaagcuaa

SEQ ID NO: 44475 - RNA, 19 nt, Artificial Sequence
  Synthetic
augcauguauacaagcuaa

SEQ ID NO: 44476 - RNA, 20 nt, Artificial Sequence
  Synthetic
uaugcauguauacaagcuaa

SEQ ID NO: 44477 - RNA, 21 nt, Artificial Sequence
  Synthetic
auaugcauguauacaagcuaa

SEQ ID NO: 44478 - RNA, 22 nt, Artificial Sequence
  Synthetic
uauaugcauguauacaagcuaa

SEQ ID NO: 44479 - RNA, 23 nt, Artificial Sequence
  Synthetic
uuauaugcauguauacaagcuaa

SEQ ID NO: 44480 - RNA, 24 nt, Artificial Sequence
  Synthetic
uuuauaugcauguauacaagcuaa

SEQ ID NO: 44481 - RNA, 18 nt, Artificial Sequence
  Synthetic
ugggcccucucacaguaa

SEQ ID NO: 44482 - RNA, 19 nt, Artificial Sequence
  Synthetic
gugggcccucucacaguaa

SEQ ID NO: 44483 - RNA, 20 nt, Artificial Sequence
  Synthetic
ugugggcccucucacaguaa

SEQ ID NO: 44484 - RNA, 21 nt, Artificial Sequence
  Synthetic
uugugggcccucucacaguaa

SEQ ID NO: 44485 - RNA, 22 nt, Artificial Sequence
  Synthetic
uuugugggcccucucacaguaa

SEQ ID NO: 44486 - RNA, 23 nt, Artificial Sequence
  Synthetic
auuugugggcccucucacaguaa

SEQ ID NO: 44487 - RNA, 24 nt, Artificial Sequence
  Synthetic
aauuugugggcccucucacaguaa

SEQ ID NO: 44488 - RNA, 18 nt, Artificial Sequence
  Synthetic
auuuuaugggauauguaa

SEQ ID NO: 44489 - RNA, 19 nt, Artificial Sequence
  Synthetic
aauuuuaugggauauguaa

SEQ ID NO: 44490 - RNA, 20 nt, Artificial Sequence
  Synthetic
aaauuuuaugggauauguaa

SEQ ID NO: 44491 - RNA, 21 nt, Artificial Sequence
  Synthetic
uaaauuuuaugggauauguaa

SEQ ID NO: 44492 - RNA, 22 nt, Artificial Sequence
  Synthetic
uuaaauuuuaugggauauguaa

SEQ ID NO: 44493 - RNA, 23 nt, Artificial Sequence
  Synthetic
cuuaaauuuuaugggauauguaa

SEQ ID NO: 44494 - RNA, 24 nt, Artificial Sequence
  Synthetic
ccuuaaauuuuaugggauauguaa

SEQ ID NO: 44495 - RNA, 18 nt, Artificial Sequence
  Synthetic
  misc_feature (15)..(15): n is a, c, g, or u
uauacaucuaaaccnuaa

SEQ ID NO: 44496 - RNA, 19 nt, Artificial Sequence
  Synthetic
  misc_feature (16)..(16): n is a, c, g, or u
guauacaucuaaaccnuaa

SEQ ID NO: 44497 - RNA, 20 nt, Artificial Sequence
  Synthetic
  misc_feature (17)..(17): n is a, c, g, or u
gguauacaucuaaaccnuaa

SEQ ID NO: 44498 - RNA, 21 nt, Artificial Sequence
  Synthetic
  misc_feature (18)..(18): n is a, c, g, or u
ggguauacaucuaaaccnuaa

SEQ ID NO: 44499 - RNA, 22 nt, Artificial Sequence
  Synthetic
  misc_feature (19)..(19): n is a, c, g, or u
uggguauacaucuaaaccnuaa

SEQ ID NO: 44500 - RNA, 23 nt, Artificial Sequence
  Synthetic
  misc_feature (20)..(20): n is a, c, g, or u
uuggguauacaucuaaaccnuaa

SEQ ID NO: 44501 - RNA, 24 nt, Artificial Sequence
  Synthetic
  misc_feature (21)..(21): n is a, c, g, or u
uuuggguauacaucuaaaccnuaa

SEQ ID NO: 44502 - RNA, 18 nt, Artificial Sequence
  Synthetic
  misc_feature (8)..(8): n is a, c, g, or u
cuaaaccnuaacaaaaca

SEQ ID NO: 44503 - RNA, 19 nt, Artificial Sequence
  Synthetic
  misc_feature (9)..(9): n is a, c, g, or u
ucuaaaccnuaacaaaaca

SEQ ID NO: 44504 - RNA, 20 nt, Artificial Sequence
  Synthetic
  misc_feature (10)..(10): n is a, c, g, or u
aucuaaaccnuaacaaaaca

SEQ ID NO: 44505 - RNA, 21 nt, Artificial Sequence
  Synthetic
  misc_feature (11)..(11): n is a, c, g, or u
caucuaaaccnuaacaaaaca

SEQ ID NO: 44506 - RNA, 22 nt, Artificial Sequence
  Synthetic
  misc_feature (12)..(12): n is a, c, g, or u
acaucuaaaccnuaacaaaaca

SEQ ID NO: 44507 - RNA, 23 nt, Artificial Sequence
  Synthetic
  misc_feature (13)..(13): n is a, c, g, or u
uacaucuaaaccnuaacaaaaca

SEQ ID NO: 44508 - RNA, 24 nt, Artificial Sequence
  Synthetic
  misc_feature (14)..(14): n is a, c, g, or u
auacaucuaaaccnuaacaaaaca

SEQ ID NO: 44509 - RNA, 18 nt, Artificial Sequence
  Synthetic
cuguuuguuaugucaaca

SEQ ID NO: 44510 - RNA, 19 nt, Artificial Sequence
  Synthetic
acuguuuguuaugucaaca

SEQ ID NO: 44511 - RNA, 20 nt, Artificial Sequence
  Synthetic
gacuguuuguuaugucaaca

SEQ ID NO: 44512 - RNA, 21 nt, Artificial Sequence
  Synthetic
ggacuguuuguuaugucaaca

SEQ ID NO: 44513 - RNA, 22 nt, Artificial Sequence
  Synthetic
uggacuguuuguuaugucaaca

SEQ ID NO: 44514 - RNA, 23 nt, Artificial Sequence
  Synthetic
uuggacuguuuguuaugucaaca

SEQ ID NO: 44515 - RNA, 24 nt, Artificial Sequence
  Synthetic
cuuggacuguuuguuaugucaaca

SEQ ID NO: 44516 - RNA, 18 nt, Artificial Sequence
  Synthetic
gggacccugcaccgaaca

SEQ ID NO: 44517 - RNA, 19 nt, Artificial Sequence
  Synthetic
ggggacccugcaccgaaca

SEQ ID NO: 44518 - RNA, 20 nt, Artificial Sequence
  Synthetic
uggggacccugcaccgaaca

SEQ ID NO: 44519 - RNA, 21 nt, Artificial Sequence
  Synthetic
uuggggacccugcaccgaaca

SEQ ID NO: 44520 - RNA, 22 nt, Artificial Sequence
  Synthetic
auuggggacccugcaccgaaca

SEQ ID NO: 44521 - RNA, 23 nt, Artificial Sequence
  Synthetic
gauuggggacccugcaccgaaca

SEQ ID NO: 44522 - RNA, 24 nt, Artificial Sequence
  Synthetic
ggauuggggacccugcaccgaaca

SEQ ID NO: 44523 - RNA, 18 nt, Artificial Sequence
  Synthetic
cggguucaccccuccaca

SEQ ID NO: 44524 - RNA, 19 nt, Artificial Sequence
  Synthetic
ccggguucaccccuccaca

SEQ ID NO: 44525 - RNA, 20 nt, Artificial Sequence
  Synthetic
cccggguucaccccuccaca

SEQ ID NO: 44526 - RNA, 21 nt, Artificial Sequence
  Synthetic
acccggguucaccccuccaca

SEQ ID NO: 44527 - RNA, 22 nt, Artificial Sequence
  Synthetic
gacccggguucaccccuccaca

SEQ ID NO: 44528 - RNA, 23 nt, Artificial Sequence
  Synthetic
ggacccggguucaccccuccaca

SEQ ID NO: 44529 - RNA, 24 nt, Artificial Sequence
  Synthetic
uggacccggguucaccccuccaca

SEQ ID NO: 44530 - RNA, 18 nt, Artificial Sequence
  Synthetic
aacauggagaacaucaca

SEQ ID NO: 44531 - RNA, 19 nt, Artificial Sequence
  Synthetic
gaacauggagaacaucaca

SEQ ID NO: 44532 - RNA, 20 nt, Artificial Sequence
  Synthetic
cgaacauggagaacaucaca

SEQ ID NO: 44533 - RNA, 21 nt, Artificial Sequence
  Synthetic
ccgaacauggagaacaucaca

SEQ ID NO: 44534 - RNA, 22 nt, Artificial Sequence
  Synthetic
accgaacauggagaacaucaca

SEQ ID NO: 44535 - RNA, 23 nt, Artificial Sequence
  Synthetic
caccgaacauggagaacaucaca

SEQ ID NO: 44536 - RNA, 24 nt, Artificial Sequence
  Synthetic
gcaccgaacauggagaacaucaca

SEQ ID NO: 44537 - RNA, 18 nt, Artificial Sequence
  Synthetic
ccacaagaacacaucaca

SEQ ID NO: 44538 - RNA, 19 nt, Artificial Sequence
  Synthetic
gccacaagaacacaucaca

SEQ ID NO: 44539 - RNA, 20 nt, Artificial Sequence
  Synthetic
ugccacaagaacacaucaca

SEQ ID NO: 44540 - RNA, 21 nt, Artificial Sequence
  Synthetic
uugccacaagaacacaucaca

SEQ ID NO: 44541 - RNA, 22 nt, Artificial Sequence
  Synthetic
uuugccacaagaacacaucaca

SEQ ID NO: 44542 - RNA, 23 nt, Artificial Sequence
  Synthetic
cuuugccacaagaacacaucaca

SEQ ID NO: 44543 - RNA, 24 nt, Artificial Sequence
  Synthetic
acuuugccacaagaacacaucaca

SEQ ID NO: 44544 - RNA, 18 nt, Artificial Sequence
  Synthetic
uuugucuuuggguauaca

SEQ ID NO: 44545 - RNA, 19 nt, Artificial Sequence
  Synthetic
uuuugucuuuggguauaca

SEQ ID NO: 44546 - RNA, 20 nt, Artificial Sequence
  Synthetic
cuuuugucuuuggguauaca

SEQ ID NO: 44547 - RNA, 21 nt, Artificial Sequence
  Synthetic
ucuuuugucuuuggguauaca

SEQ ID NO: 44548 - RNA, 22 nt, Artificial Sequence
  Synthetic
uucuuuugucuuuggguauaca

SEQ ID NO: 44549 - RNA, 23 nt, Artificial Sequence
  Synthetic
uuucuuuugucuuuggguauaca

SEQ ID NO: 44550 - RNA, 24 nt, Artificial Sequence
  Synthetic
uuuucuuuugucuuuggguauaca

SEQ ID NO: 44551 - RNA, 18 nt, Artificial Sequence
  Synthetic
ucaccucugcacguuaca

SEQ ID NO: 44552 - RNA, 19 nt, Artificial Sequence
  Synthetic
uucaccucugcacguuaca

SEQ ID NO: 44553 - RNA, 20 nt, Artificial Sequence
  Synthetic
cuucaccucugcacguuaca

SEQ ID NO: 44554 - RNA, 18 nt, Artificial Sequence
  Synthetic
accccugcucguguuaca

SEQ ID NO: 44555 - RNA, 19 nt, Artificial Sequence
  Synthetic
gaccccugcucguguuaca

SEQ ID NO: 44556 - RNA, 20 nt, Artificial Sequence
  Synthetic
ggaccccugcucguguuaca

SEQ ID NO: 44557 - RNA, 21 nt, Artificial Sequence
  Synthetic
aggaccccugcucguguuaca

SEQ ID NO: 44558 - RNA, 22 nt, Artificial Sequence
  Synthetic
uaggaccccugcucguguuaca

SEQ ID NO: 44559 - RNA, 23 nt, Artificial Sequence
  Synthetic
cuaggaccccugcucguguuaca

SEQ ID NO: 44560 - RNA, 24 nt, Artificial Sequence
  Synthetic
ccuaggaccccugcucguguuaca

SEQ ID NO: 44561 - RNA, 18 nt, Artificial Sequence
  Synthetic
acucccaucucuccacca

SEQ ID NO: 44562 - RNA, 19 nt, Artificial Sequence
  Synthetic
uacucccaucucuccacca

SEQ ID NO: 44563 - RNA, 20 nt, Artificial Sequence
  Synthetic
cuacucccaucucuccacca

SEQ ID NO: 44564 - RNA, 21 nt, Artificial Sequence
  Synthetic
ccuacucccaucucuccacca

SEQ ID NO: 44565 - RNA, 22 nt, Artificial Sequence
  Synthetic
gccuacucccaucucuccacca

SEQ ID NO: 44566 - RNA, 23 nt, Artificial Sequence
  Synthetic
agccuacucccaucucuccacca

SEQ ID NO: 44567 - RNA, 24 nt, Artificial Sequence
  Synthetic
cagccuacucccaucucuccacca

SEQ ID NO: 44568 - RNA, 18 nt, Artificial Sequence
  Synthetic
  misc_feature (6)..(7): n is a, c, g, or u
gucugnncaccagcacca

SEQ ID NO: 44569 - RNA, 19 nt, Artificial Sequence
  Synthetic
  misc_feature (7)..(8): n is a, c, g, or u
ggucugnncaccagcacca

SEQ ID NO: 44570 - RNA, 20 nt, Artificial Sequence
  Synthetic
  misc_feature (8)..(9): n is a, c, g, or u
uggucugnncaccagcacca

SEQ ID NO: 44571 - RNA, 21 nt, Artificial Sequence
  Synthetic
  misc_feature (9)..(10): n is a, c, g, or u
uuggucugnncaccagcacca

SEQ ID NO: 44572 - RNA, 22 nt, Artificial Sequence
  Synthetic
  misc_feature (10)..(11): n is a, c, g, or u
auuggucugnncaccagcacca

SEQ ID NO: 44573 - RNA, 23 nt, Artificial Sequence
  Synthetic
  misc_feature (11)..(12): n is a, c, g, or u
aauuggucugnncaccagcacca

SEQ ID NO: 44574 - RNA, 24 nt, Artificial Sequence
  Synthetic
  misc_feature (12)..(13): n is a, c, g, or u
aaauuggucugnncaccagcacca

SEQ ID NO: 44575 - RNA, 18 nt, Artificial Sequence
  Synthetic
auuccuucccgaucacca

SEQ ID NO: 44576 - RNA, 19 nt, Artificial Sequence
  Synthetic
gauuccuucccgaucacca

SEQ ID NO: 44577 - RNA, 20 nt, Artificial Sequence
  Synthetic
ggauuccuucccgaucacca

SEQ ID NO: 44578 - RNA, 21 nt, Artificial Sequence
  Synthetic
aggauuccuucccgaucacca

SEQ ID NO: 44579 - RNA, 22 nt, Artificial Sequence
  Synthetic
uaggauuccuucccgaucacca

SEQ ID NO: 44580 - RNA, 23 nt, Artificial Sequence
  Synthetic
cuaggauuccuucccgaucacca

SEQ ID NO: 44581 - RNA, 24 nt, Artificial Sequence
  Synthetic
ucuaggauuccuucccgaucacca

SEQ ID NO: 44582 - RNA, 18 nt, Artificial Sequence
  Synthetic
ucauuguucgccucacca

SEQ ID NO: 44583 - RNA, 19 nt, Artificial Sequence
  Synthetic
aucauuguucgccucacca

SEQ ID NO: 44584 - RNA, 20 nt, Artificial Sequence
  Synthetic
gaucauuguucgccucacca

SEQ ID NO: 44585 - RNA, 21 nt, Artificial Sequence
  Synthetic
ugaucauuguucgccucacca

SEQ ID NO: 44586 - RNA, 22 nt, Artificial Sequence
  Synthetic
cugaucauuguucgccucacca

SEQ ID NO: 44587 - RNA, 23 nt, Artificial Sequence
  Synthetic
ucugaucauuguucgccucacca

SEQ ID NO: 44588 - RNA, 24 nt, Artificial Sequence
  Synthetic
cucugaucauuguucgccucacca

SEQ ID NO: 44589 - RNA, 18 nt, Artificial Sequence
  Synthetic
ugccguuccugccgacca

SEQ ID NO: 44590 - RNA, 19 nt, Artificial Sequence
  Synthetic
cugccguuccugccgacca

SEQ ID NO: 44591 - RNA, 20 nt, Artificial Sequence
  Synthetic
ucugccguuccugccgacca

SEQ ID NO: 44592 - RNA, 21 nt, Artificial Sequence
  Synthetic
gucugccguuccugccgacca

SEQ ID NO: 44593 - RNA, 22 nt, Artificial Sequence
  Synthetic
cgucugccguuccugccgacca

SEQ ID NO: 44594 - RNA, 23 nt, Artificial Sequence
  Synthetic
ccgucugccguuccugccgacca

SEQ ID NO: 44595 - RNA, 24 nt, Artificial Sequence
  Synthetic
uccgucugccguuccugccgacca

SEQ ID NO: 44596 - RNA, 18 nt, Artificial Sequence
  Synthetic
ucuacuaaauauuuacca

SEQ ID NO: 44597 - RNA, 19 nt, Artificial Sequence
  Synthetic
cucuacuaaauauuuacca

SEQ ID NO: 44598 - RNA, 20 nt, Artificial Sequence
  Synthetic
acucuacuaaauauuuacca

SEQ ID NO: 44599 - RNA, 21 nt, Artificial Sequence
  Synthetic
aacucuacuaaauauuuacca

SEQ ID NO: 44600 - RNA, 22 nt, Artificial Sequence
  Synthetic
aaacucuacuaaauauuuacca

SEQ ID NO: 44601 - RNA, 23 nt, Artificial Sequence
  Synthetic
caaacucuacuaaauauuuacca

SEQ ID NO: 44602 - RNA, 24 nt, Artificial Sequence
  Synthetic
ccaaacucuacuaaauauuuacca

SEQ ID NO: 44603 - RNA, 18 nt, Artificial Sequence
  Synthetic
auugggacuucaauccca

SEQ ID NO: 44604 - RNA, 19 nt, Artificial Sequence
  Synthetic
gauugggacuucaauccca

SEQ ID NO: 44605 - RNA, 20 nt, Artificial Sequence
  Synthetic
agauugggacuucaauccca

SEQ ID NO: 44606 - RNA, 21 nt, Artificial Sequence
  Synthetic
cagauugggacuucaauccca

SEQ ID NO: 44607 - RNA, 22 nt, Artificial Sequence
  Synthetic
ccagauugggacuucaauccca

SEQ ID NO: 44608 - RNA, 23 nt, Artificial Sequence
  Synthetic
uccagauugggacuucaauccca

SEQ ID NO: 44609 - RNA, 24 nt, Artificial Sequence
  Synthetic
auccagauugggacuucaauccca

SEQ ID NO: 44610 - RNA, 18 nt, Artificial Sequence
  Synthetic
acccuuggccagaggcca

SEQ ID NO: 44611 - RNA, 19 nt, Artificial Sequence
  Synthetic
gacccuuggccagaggcca

SEQ ID NO: 44612 - RNA, 20 nt, Artificial Sequence
  Synthetic
ggacccuuggccagaggcca

SEQ ID NO: 44613 - RNA, 21 nt, Artificial Sequence
  Synthetic
aggacccuuggccagaggcca

SEQ ID NO: 44614 - RNA, 22 nt, Artificial Sequence
  Synthetic
aaggacccuuggccagaggcca

SEQ ID NO: 44615 - RNA, 23 nt, Artificial Sequence
  Synthetic
aaaggacccuuggccagaggcca

SEQ ID NO: 44616 - RNA, 24 nt, Artificial Sequence
  Synthetic
aaaaggacccuuggccagaggcca

SEQ ID NO: 44617 - RNA, 18 nt, Artificial Sequence
  Synthetic
ugcuaggcugugcugcca

SEQ ID NO: 44618 - RNA, 19 nt, Artificial Sequence
  Synthetic
cugcuaggcugugcugcca

SEQ ID NO: 44619 - RNA, 20 nt, Artificial Sequence
  Synthetic
gcugcuaggcugugcugcca

SEQ ID NO: 44620 - RNA, 21 nt, Artificial Sequence
  Synthetic
ggcugcuaggcugugcugcca

SEQ ID NO: 44621 - RNA, 22 nt, Artificial Sequence
  Synthetic
uggcugcuaggcugugcugcca

SEQ ID NO: 44622 - RNA, 23 nt, Artificial Sequence
  Synthetic
auggcugcuaggcugugcugcca

SEQ ID NO: 44623 - RNA, 24 nt, Artificial Sequence
  Synthetic
cauggcugcuaggcugugcugcca

SEQ ID NO: 44624 - RNA, 18 nt, Artificial Sequence
  Synthetic
gauagaacaacuuugcca

SEQ ID NO: 44625 - RNA, 19 nt, Artificial Sequence
  Synthetic
ggauagaacaacuuugcca

SEQ ID NO: 44626 - RNA, 20 nt, Artificial Sequence
  Synthetic
uggauagaacaacuuugcca

SEQ ID NO: 44627 - RNA, 21 nt, Artificial Sequence
  Synthetic
auggauagaacaacuuugcca

SEQ ID NO: 44628 - RNA, 22 nt, Artificial Sequence
  Synthetic
cauggauagaacaacuuugcca

SEQ ID NO: 44629 - RNA, 23 nt, Artificial Sequence
  Synthetic
gcauggauagaacaacuuugcca

SEQ ID NO: 44630 - RNA, 24 nt, Artificial Sequence
  Synthetic
ggcauggauagaacaacuuugcca

SEQ ID NO: 44631 - RNA, 18 nt, Artificial Sequence
  Synthetic
aguugggguacuuugcca

SEQ ID NO: 44632 - RNA, 19 nt, Artificial Sequence
  Synthetic
aaguugggguacuuugcca

SEQ ID NO: 44633 - RNA, 20 nt, Artificial Sequence
  Synthetic
gaaguugggguacuuugcca

SEQ ID NO: 44634 - RNA, 21 nt, Artificial Sequence
  Synthetic
ggaaguugggguacuuugcca

SEQ ID NO: 44635 - RNA, 22 nt, Artificial Sequence
  Synthetic
uggaaguugggguacuuugcca

SEQ ID NO: 44636 - RNA, 23 nt, Artificial Sequence
  Synthetic
uuggaaguugggguacuuugcca

SEQ ID NO: 44637 - RNA, 24 nt, Artificial Sequence
  Synthetic
auuggaaguugggguacuuugcca

SEQ ID NO: 44638 - RNA, 18 nt, Artificial Sequence
  Synthetic
ccgucagcgcugaaucca

SEQ ID NO: 44639 - RNA, 19 nt, Artificial Sequence
  Synthetic
cccgucagcgcugaaucca

SEQ ID NO: 44640 - RNA, 20 nt, Artificial Sequence
  Synthetic
ucccgucagcgcugaaucca

SEQ ID NO: 44641 - RNA, 18 nt, Artificial Sequence
  Synthetic
cccggguucaccccucca

SEQ ID NO: 44642 - RNA, 19 nt, Artificial Sequence
  Synthetic
acccggguucaccccucca

SEQ ID NO: 44643 - RNA, 20 nt, Artificial Sequence
  Synthetic
gacccggguucaccccucca

SEQ ID NO: 44644 - RNA, 18 nt, Artificial Sequence
  Synthetic
ucgccucaccauacagca

SEQ ID NO: 44645 - RNA, 19 nt, Artificial Sequence
  Synthetic
uucgccucaccauacagca

SEQ ID NO: 44646 - RNA, 20 nt, Artificial Sequence
  Synthetic
guucgccucaccauacagca

SEQ ID NO: 44647 - RNA, 21 nt, Artificial Sequence
  Synthetic
uguucgccucaccauacagca

SEQ ID NO: 44648 - RNA, 22 nt, Artificial Sequence
  Synthetic
uuguucgccucaccauacagca

SEQ ID NO: 44649 - RNA, 23 nt, Artificial Sequence
  Synthetic
auuguucgccucaccauacagca

SEQ ID NO: 44650 - RNA, 24 nt, Artificial Sequence
  Synthetic
cauuguucgccucaccauacagca

SEQ ID NO: 44651 - RNA, 18 nt, Artificial Sequence
  Synthetic
ggaacaagaucuacagca

SEQ ID NO: 44652 - RNA, 19 nt, Artificial Sequence
  Synthetic
gggaacaagaucuacagca

SEQ ID NO: 44653 - RNA, 20 nt, Artificial Sequence
  Synthetic
ugggaacaagaucuacagca

SEQ ID NO: 44654 - RNA, 21 nt, Artificial Sequence
  Synthetic
uugggaacaagaucuacagca

SEQ ID NO: 44655 - RNA, 22 nt, Artificial Sequence
  Synthetic
cuugggaacaagaucuacagca

SEQ ID NO: 44656 - RNA, 23 nt, Artificial Sequence
  Synthetic
acuugggaacaagaucuacagca

SEQ ID NO: 44657 - RNA, 24 nt, Artificial Sequence
  Synthetic
uacuugggaacaagaucuacagca

SEQ ID NO: 44658 - RNA, 18 nt, Artificial Sequence
  Synthetic
caccaguuggacccagca

SEQ ID NO: 44659 - RNA, 19 nt, Artificial Sequence
  Synthetic
ucaccaguuggacccagca

SEQ ID NO: 44660 - RNA, 20 nt, Artificial Sequence
  Synthetic
aucaccaguuggacccagca

SEQ ID NO: 44661 - RNA, 18 nt, Artificial Sequence
  Synthetic
aauuuggaagauccagca

SEQ ID NO: 44662 - RNA, 19 nt, Artificial Sequence
  Synthetic
uaauuuggaagauccagca

SEQ ID NO: 44663 - RNA, 20 nt, Artificial Sequence
  Synthetic
auaauuuggaagauccagca

SEQ ID NO: 44664 - RNA, 21 nt, Artificial Sequence
  Synthetic
aauaauuuggaagauccagca

SEQ ID NO: 44665 - RNA, 22 nt, Artificial Sequence
  Synthetic
uaauaauuuggaagauccagca

SEQ ID NO: 44666 - RNA, 23 nt, Artificial Sequence
  Synthetic
guaauaauuuggaagauccagca

SEQ ID NO: 44667 - RNA, 24 nt, Artificial Sequence
  Synthetic
gguaauaauuuggaagauccagca

SEQ ID NO: 44668 - RNA, 18 nt, Artificial Sequence
  Synthetic
gaacucccucgccucgca

SEQ ID NO: 44669 - RNA, 19 nt, Artificial Sequence
  Synthetic
agaacucccucgccucgca

SEQ ID NO: 44670 - RNA, 20 nt, Artificial Sequence
  Synthetic
aagaacucccucgccucgca

SEQ ID NO: 44671 - RNA, 21 nt, Artificial Sequence
  Synthetic
gaagaacucccucgccucgca

SEQ ID NO: 44672 - RNA, 22 nt, Artificial Sequence
  Synthetic
agaagaacucccucgccucgca

SEQ ID NO: 44673 - RNA, 23 nt, Artificial Sequence
  Synthetic
aagaagaacucccucgccucgca

SEQ ID NO: 44674 - RNA, 24 nt, Artificial Sequence
  Synthetic
gaagaagaacucccucgccucgca

SEQ ID NO: 44675 - RNA, 18 nt, Artificial Sequence
  Synthetic
ucauccucaggccaugca

SEQ ID NO: 44676 - RNA, 19 nt, Artificial Sequence
  Synthetic
gucauccucaggccaugca

SEQ ID NO: 44677 - RNA, 20 nt, Artificial Sequence
  Synthetic
agucauccucaggccaugca

SEQ ID NO: 44678 - RNA, 21 nt, Artificial Sequence
  Synthetic
cagucauccucaggccaugca

SEQ ID NO: 44679 - RNA, 22 nt, Artificial Sequence
  Synthetic
acagucauccucaggccaugca

SEQ ID NO: 44680 - RNA, 23 nt, Artificial Sequence
  Synthetic
gacagucauccucaggccaugca

SEQ ID NO: 44681 - RNA, 24 nt, Artificial Sequence
  Synthetic
agacagucauccucaggccaugca

SEQ ID NO: 44682 - RNA, 18 nt, Artificial Sequence
  Synthetic
aggauuggggacccugca

SEQ ID NO: 44683 - RNA, 19 nt, Artificial Sequence
  Synthetic
caggauuggggacccugca

SEQ ID NO: 44684 - RNA, 20 nt, Artificial Sequence
  Synthetic
ccaggauuggggacccugca

SEQ ID NO: 44685 - RNA, 21 nt, Artificial Sequence
  Synthetic
uccaggauuggggacccugca

SEQ ID NO: 44686 - RNA, 22 nt, Artificial Sequence
  Synthetic
cuccaggauuggggacccugca

SEQ ID NO: 44687 - RNA, 23 nt, Artificial Sequence
  Synthetic
ucuccaggauuggggacccugca

SEQ ID NO: 44688 - RNA, 24 nt, Artificial Sequence
  Synthetic
uucuccaggauuggggacccugca

SEQ ID NO: 44689 - RNA, 18 nt, Artificial Sequence
  Synthetic
uccaaauauccauuugca

SEQ ID NO: 44690 - RNA, 19 nt, Artificial Sequence
  Synthetic
uuccaaauauccauuugca

SEQ ID NO: 44691 - RNA, 20 nt, Artificial Sequence
  Synthetic
uuuccaaauauccauuugca

SEQ ID NO: 44692 - RNA, 21 nt, Artificial Sequence
  Synthetic
uuuuccaaauauccauuugca

SEQ ID NO: 44693 - RNA, 22 nt, Artificial Sequence
  Synthetic
cuuuuccaaauauccauuugca

SEQ ID NO: 44694 - RNA, 23 nt, Artificial Sequence
  Synthetic
ucuuuuccaaauauccauuugca

SEQ ID NO: 44695 - RNA, 24 nt, Artificial Sequence
  Synthetic
uucuuuuccaaauauccauuugca

SEQ ID NO: 44696 - RNA, 18 nt, Artificial Sequence
  Synthetic
auauggguuuaaaaauca

SEQ ID NO: 44697 - RNA, 19 nt, Artificial Sequence
  Synthetic
aauauggguuuaaaaauca

SEQ ID NO: 44698 - RNA, 20 nt, Artificial Sequence
  Synthetic
uaauauggguuuaaaaauca

SEQ ID NO: 44699 - RNA, 21 nt, Artificial Sequence
  Synthetic
cuaauauggguuuaaaaauca

SEQ ID NO: 44700 - RNA, 22 nt, Artificial Sequence
  Synthetic
acuaauauggguuuaaaaauca

SEQ ID NO: 44701 - RNA, 23 nt, Artificial Sequence
  Synthetic
uacuaauauggguuuaaaaauca

SEQ ID NO: 44702 - RNA, 24 nt, Artificial Sequence
  Synthetic
auacuaauauggguuuaaaaauca

SEQ ID NO: 44703 - RNA, 18 nt, Artificial Sequence
  Synthetic
ggucuggagcaaaacuca

SEQ ID NO: 44704 - RNA, 19 nt, Artificial Sequence
  Synthetic
cggucuggagcaaaacuca

SEQ ID NO: 44705 - RNA, 20 nt, Artificial Sequence
  Synthetic
ccggucuggagcaaaacuca

SEQ ID NO: 44706 - RNA, 21 nt, Artificial Sequence
  Synthetic
gccggucuggagcaaaacuca

SEQ ID NO: 44707 - RNA, 22 nt, Artificial Sequence
  Synthetic
agccggucuggagcaaaacuca

SEQ ID NO: 44708 - RNA, 23 nt, Artificial Sequence
  Synthetic
cagccggucuggagcaaaacuca

SEQ ID NO: 44709 - RNA, 24 nt, Artificial Sequence
  Synthetic
gcagccggucuggagcaaaacuca

SEQ ID NO: 44710 - RNA, 18 nt, Artificial Sequence
  Synthetic
cucaccauacagcacuca

SEQ ID NO: 44711 - RNA, 19 nt, Artificial Sequence
  Synthetic
ccucaccauacagcacuca

SEQ ID NO: 44712 - RNA, 20 nt, Artificial Sequence
  Synthetic
gccucaccauacagcacuca

SEQ ID NO: 44713 - RNA, 21 nt, Artificial Sequence
  Synthetic
cgccucaccauacagcacuca

SEQ ID NO: 44714 - RNA, 22 nt, Artificial Sequence
  Synthetic
ucgccucaccauacagcacuca

SEQ ID NO: 44715 - RNA, 23 nt, Artificial Sequence
  Synthetic
uucgccucaccauacagcacuca

SEQ ID NO: 44716 - RNA, 24 nt, Artificial Sequence
  Synthetic
guucgccucaccauacagcacuca

SEQ ID NO: 44717 - RNA, 18 nt, Artificial Sequence
  Synthetic
uccaccaaucgucaguca

SEQ ID NO: 44718 - RNA, 19 nt, Artificial Sequence
  Synthetic
cuccaccaaucgucaguca

SEQ ID NO: 44719 - RNA, 20 nt, Artificial Sequence
  Synthetic
ccuccaccaaucgucaguca

SEQ ID NO: 44720 - RNA, 21 nt, Artificial Sequence
  Synthetic
gccuccaccaaucgucaguca

SEQ ID NO: 44721 - RNA, 22 nt, Artificial Sequence
  Synthetic
ugccuccaccaaucgucaguca

SEQ ID NO: 44722 - RNA, 23 nt, Artificial Sequence
  Synthetic
cugccuccaccaaucgucaguca

SEQ ID NO: 44723 - RNA, 24 nt, Artificial Sequence
  Synthetic
ccugccuccaccaaucgucaguca

SEQ ID NO: 44724 - RNA, 18 nt, Artificial Sequence
  Synthetic
ugccuccaccaaucguca

SEQ ID NO: 44725 - RNA, 19 nt, Artificial Sequence
  Synthetic
cugccuccaccaaucguca

SEQ ID NO: 44726 - RNA, 20 nt, Artificial Sequence
  Synthetic
ccugccuccaccaaucguca

SEQ ID NO: 44727 - RNA, 21 nt, Artificial Sequence
  Synthetic
uccugccuccaccaaucguca

SEQ ID NO: 44728 - RNA, 22 nt, Artificial Sequence
  Synthetic
cuccugccuccaccaaucguca

SEQ ID NO: 44729 - RNA, 23 nt, Artificial Sequence
  Synthetic
ccuccugccuccaccaaucguca

SEQ ID NO: 44730 - RNA, 24 nt, Artificial Sequence
  Synthetic
gccuccugccuccaccaaucguca

SEQ ID NO: 44731 - RNA, 18 nt, Artificial Sequence
  Synthetic
guaaaugagaaacgaaga

SEQ ID NO: 44732 - RNA, 19 nt, Artificial Sequence
  Synthetic
aguaaaugagaaacgaaga

SEQ ID NO: 44733 - RNA, 20 nt, Artificial Sequence
  Synthetic
caguaaaugagaaacgaaga

SEQ ID NO: 44734 - RNA, 21 nt, Artificial Sequence
  Synthetic
acaguaaaugagaaacgaaga

SEQ ID NO: 44735 - RNA, 22 nt, Artificial Sequence
  Synthetic
cacaguaaaugagaaacgaaga

SEQ ID NO: 44736 - RNA, 23 nt, Artificial Sequence
  Synthetic
ucacaguaaaugagaaacgaaga

SEQ ID NO: 44737 - RNA, 24 nt, Artificial Sequence
  Synthetic
cucacaguaaaugagaaacgaaga

SEQ ID NO: 44738 - RNA, 18 nt, Artificial Sequence
  Synthetic
acuguuguuagacgaaga

SEQ ID NO: 44739 - RNA, 19 nt, Artificial Sequence
  Synthetic
uacuguuguuagacgaaga

SEQ ID NO: 44740 - RNA, 20 nt, Artificial Sequence
  Synthetic
cuacuguuguuagacgaaga

SEQ ID NO: 44741 - RNA, 21 nt, Artificial Sequence
  Synthetic
acuacuguuguuagacgaaga

SEQ ID NO: 44742 - RNA, 22 nt, Artificial Sequence
  Synthetic
gacuacuguuguuagacgaaga

SEQ ID NO: 44743 - RNA, 23 nt, Artificial Sequence
  Synthetic
agacuacuguuguuagacgaaga

SEQ ID NO: 44744 - RNA, 24 nt, Artificial Sequence
  Synthetic
gagacuacuguuguuagacgaaga

SEQ ID NO: 44745 - RNA, 18 nt, Artificial Sequence
  Synthetic
uuuugcugagugggaaga

SEQ ID NO: 44746 - RNA, 19 nt, Artificial Sequence
  Synthetic
uuuuugcugagugggaaga

SEQ ID NO: 44747 - RNA, 20 nt, Artificial Sequence
  Synthetic
guuuuugcugagugggaaga

SEQ ID NO: 44748 - RNA, 21 nt, Artificial Sequence
  Synthetic
uguuuuugcugagugggaaga

SEQ ID NO: 44749 - RNA, 22 nt, Artificial Sequence
  Synthetic
guguuuuugcugagugggaaga

SEQ ID NO: 44750 - RNA, 23 nt, Artificial Sequence
  Synthetic
uguguuuuugcugagugggaaga

SEQ ID NO: 44751 - RNA, 24 nt, Artificial Sequence
  Synthetic
cuguguuuuugcugagugggaaga

SEQ ID NO: 44752 - RNA, 18 nt, Artificial Sequence
  Synthetic
ggguaauaauuuggaaga

SEQ ID NO: 44753 - RNA, 19 nt, Artificial Sequence
  Synthetic
uggguaauaauuuggaaga

SEQ ID NO: 44754 - RNA, 20 nt, Artificial Sequence
  Synthetic
guggguaauaauuuggaaga

SEQ ID NO: 44755 - RNA, 21 nt, Artificial Sequence
  Synthetic
gguggguaauaauuuggaaga

SEQ ID NO: 44756 - RNA, 22 nt, Artificial Sequence
  Synthetic
ggguggguaauaauuuggaaga

SEQ ID NO: 44757 - RNA, 23 nt, Artificial Sequence
  Synthetic
uggguggguaauaauuuggaaga

SEQ ID NO: 44758 - RNA, 24 nt, Artificial Sequence
  Synthetic
cuggguggguaauaauuuggaaga

SEQ ID NO: 44759 - RNA, 18 nt, Artificial Sequence
  Synthetic
cggguauucuauauaaga

SEQ ID NO: 44760 - RNA, 19 nt, Artificial Sequence
  Synthetic
gcggguauucuauauaaga

SEQ ID NO: 44761 - RNA, 20 nt, Artificial Sequence
  Synthetic
ggcggguauucuauauaaga

SEQ ID NO: 44762 - RNA, 21 nt, Artificial Sequence
  Synthetic
aggcggguauucuauauaaga

SEQ ID NO: 44763 - RNA, 22 nt, Artificial Sequence
  Synthetic
aaggcggguauucuauauaaga

SEQ ID NO: 44764 - RNA, 23 nt, Artificial Sequence
  Synthetic
gaaggcggguauucuauauaaga

SEQ ID NO: 44765 - RNA, 24 nt, Artificial Sequence
  Synthetic
ggaaggcggguauucuauauaaga

SEQ ID NO: 44766 - RNA, 18 nt, Artificial Sequence
  Synthetic
aaauaccaacaauccaga

SEQ ID NO: 44767 - RNA, 19 nt, Artificial Sequence
  Synthetic
caaauaccaacaauccaga

SEQ ID NO: 44768 - RNA, 20 nt, Artificial Sequence
  Synthetic
gcaaauaccaacaauccaga

SEQ ID NO: 44769 - RNA, 21 nt, Artificial Sequence
  Synthetic
agcaaauaccaacaauccaga

SEQ ID NO: 44770 - RNA, 22 nt, Artificial Sequence
  Synthetic
gagcaaauaccaacaauccaga

SEQ ID NO: 44771 - RNA, 23 nt, Artificial Sequence
  Synthetic
agagcaaauaccaacaauccaga

SEQ ID NO: 44772 - RNA, 24 nt, Artificial Sequence
  Synthetic
cagagcaaauaccaacaauccaga

SEQ ID NO: 44773 - RNA, 18 nt, Artificial Sequence
  Synthetic
uuaaucauuacuuccaga

SEQ ID NO: 44774 - RNA, 19 nt, Artificial Sequence
  Synthetic
guuaaucauuacuuccaga

SEQ ID NO: 44775 - RNA, 20 nt, Artificial Sequence
  Synthetic
aguuaaucauuacuuccaga

SEQ ID NO: 44776 - RNA, 21 nt, Artificial Sequence
  Synthetic
uaguuaaucauuacuuccaga

SEQ ID NO: 44777 - RNA, 22 nt, Artificial Sequence
  Synthetic
guaguuaaucauuacuuccaga

SEQ ID NO: 44778 - RNA, 23 nt, Artificial Sequence
  Synthetic
uguaguuaaucauuacuuccaga

SEQ ID NO: 44779 - RNA, 24 nt, Artificial Sequence
  Synthetic
auguaguuaaucauuacuuccaga

SEQ ID NO: 44780 - RNA, 18 nt, Artificial Sequence
  Synthetic
acucccucgccucgcaga

SEQ ID NO: 44781 - RNA, 19 nt, Artificial Sequence
  Synthetic
aacucccucgccucgcaga

SEQ ID NO: 44782 - RNA, 20 nt, Artificial Sequence
  Synthetic
gaacucccucgccucgcaga

SEQ ID NO: 44783 - RNA, 21 nt, Artificial Sequence
  Synthetic
agaacucccucgccucgcaga

SEQ ID NO: 44784 - RNA, 22 nt, Artificial Sequence
  Synthetic
aagaacucccucgccucgcaga

SEQ ID NO: 44785 - RNA, 23 nt, Artificial Sequence
  Synthetic
gaagaacucccucgccucgcaga

SEQ ID NO: 44786 - RNA, 24 nt, Artificial Sequence
  Synthetic
agaagaacucccucgccucgcaga

SEQ ID NO: 44787 - RNA, 18 nt, Artificial Sequence
  Synthetic
cucucacaguaaaugaga

SEQ ID NO: 44788 - RNA, 19 nt, Artificial Sequence
  Synthetic
ccucucacaguaaaugaga

SEQ ID NO: 44789 - RNA, 20 nt, Artificial Sequence
  Synthetic
cccucucacaguaaaugaga

SEQ ID NO: 44790 - RNA, 21 nt, Artificial Sequence
  Synthetic
gcccucucacaguaaaugaga

SEQ ID NO: 44791 - RNA, 22 nt, Artificial Sequence
  Synthetic
ggcccucucacaguaaaugaga

SEQ ID NO: 44792 - RNA, 23 nt, Artificial Sequence
  Synthetic
gggcccucucacaguaaaugaga

SEQ ID NO: 44793 - RNA, 24 nt, Artificial Sequence
  Synthetic
ugggcccucucacaguaaaugaga

SEQ ID NO: 44794 - RNA, 18 nt, Artificial Sequence
  Synthetic
uaaauauuuaccauuaga

SEQ ID NO: 44795 - RNA, 19 nt, Artificial Sequence
  Synthetic
cuaaauauuuaccauuaga

SEQ ID NO: 44796 - RNA, 20 nt, Artificial Sequence
  Synthetic
acuaaauauuuaccauuaga

SEQ ID NO: 44797 - RNA, 21 nt, Artificial Sequence
  Synthetic
uacuaaauauuuaccauuaga

SEQ ID NO: 44798 - RNA, 22 nt, Artificial Sequence
  Synthetic
cuacuaaauauuuaccauuaga

SEQ ID NO: 44799 - RNA, 23 nt, Artificial Sequence
  Synthetic
ucuacuaaauauuuaccauuaga

SEQ ID NO: 44800 - RNA, 24 nt, Artificial Sequence
  Synthetic
cucuacuaaauauuuaccauuaga

SEQ ID NO: 44801 - RNA, 18 nt, Artificial Sequence
  Synthetic
gagacuacuguuguuaga

SEQ ID NO: 44802 - RNA, 19 nt, Artificial Sequence
  Synthetic
ggagacuacuguuguuaga

SEQ ID NO: 44803 - RNA, 20 nt, Artificial Sequence
  Synthetic
cggagacuacuguuguuaga

SEQ ID NO: 44804 - RNA, 18 nt, Artificial Sequence
  Synthetic
acuacuguuguuagacga

SEQ ID NO: 44805 - RNA, 19 nt, Artificial Sequence
  Synthetic
gacuacuguuguuagacga

SEQ ID NO: 44806 - RNA, 20 nt, Artificial Sequence
  Synthetic
agacuacuguuguuagacga

SEQ ID NO: 44807 - RNA, 18 nt, Artificial Sequence
  Synthetic
agaggcagguccccucga

SEQ ID NO: 44808 - RNA, 19 nt, Artificial Sequence
  Synthetic
aagaggcagguccccucga

SEQ ID NO: 44809 - RNA, 20 nt, Artificial Sequence
  Synthetic
gaagaggcagguccccucga

SEQ ID NO: 44810 - RNA, 18 nt, Artificial Sequence
  Synthetic
uuggacggucccucucga

SEQ ID NO: 44811 - RNA, 19 nt, Artificial Sequence
  Synthetic
cuuggacggucccucucga

SEQ ID NO: 44812 - RNA, 20 nt, Artificial Sequence
  Synthetic
ucuuggacggucccucucga

SEQ ID NO: 44813 - RNA, 21 nt, Artificial Sequence
  Synthetic
uucuuggacggucccucucga

SEQ ID NO: 44814 - RNA, 22 nt, Artificial Sequence
  Synthetic
uuucuuggacggucccucucga

SEQ ID NO: 44815 - RNA, 23 nt, Artificial Sequence
  Synthetic
cuuucuuggacggucccucucga

SEQ ID NO: 44816 - RNA, 24 nt, Artificial Sequence
  Synthetic
gcuuucuuggacggucccucucga

SEQ ID NO: 44817 - RNA, 18 nt, Artificial Sequence
  Synthetic
cgucaaucuucuccagga

SEQ ID NO: 44818 - RNA, 19 nt, Artificial Sequence
  Synthetic
ucgucaaucuucuccagga

SEQ ID NO: 44819 - RNA, 20 nt, Artificial Sequence
  Synthetic
cucgucaaucuucuccagga

SEQ ID NO: 44820 - RNA, 21 nt, Artificial Sequence
  Synthetic
ucucgucaaucuucuccagga

SEQ ID NO: 44821 - RNA, 22 nt, Artificial Sequence
  Synthetic
aucucgucaaucuucuccagga

SEQ ID NO: 44822 - RNA, 23 nt, Artificial Sequence
  Synthetic
caucucgucaaucuucuccagga

SEQ ID NO: 44823 - RNA, 24 nt, Artificial Sequence
  Synthetic
acaucucgucaaucuucuccagga

SEQ ID NO: 44824 - RNA, 18 nt, Artificial Sequence
  Synthetic
gaggccaacaagguagga

SEQ ID NO: 44825 - RNA, 19 nt, Artificial Sequence
  Synthetic
agaggccaacaagguagga

SEQ ID NO: 44826 - RNA, 20 nt, Artificial Sequence
  Synthetic
cagaggccaacaagguagga

SEQ ID NO: 44827 - RNA, 21 nt, Artificial Sequence
  Synthetic
ccagaggccaacaagguagga

SEQ ID NO: 44828 - RNA, 22 nt, Artificial Sequence
  Synthetic
gccagaggccaacaagguagga

SEQ ID NO: 44829 - RNA, 23 nt, Artificial Sequence
  Synthetic
ggccagaggccaacaagguagga

SEQ ID NO: 44830 - RNA, 24 nt, Artificial Sequence
  Synthetic
uggccagaggccaacaagguagga

SEQ ID NO: 44831 - RNA, 18 nt, Artificial Sequence
  Synthetic
cuguacaaaaccuucgga

SEQ ID NO: 44832 - RNA, 19 nt, Artificial Sequence
  Synthetic
gcuguacaaaaccuucgga

SEQ ID NO: 44833 - RNA, 20 nt, Artificial Sequence
  Synthetic
ugcuguacaaaaccuucgga

SEQ ID NO: 44834 - RNA, 21 nt, Artificial Sequence
  Synthetic
uugcuguacaaaaccuucgga

SEQ ID NO: 44835 - RNA, 22 nt, Artificial Sequence
  Synthetic
guugcuguacaaaaccuucgga

SEQ ID NO: 44836 - RNA, 23 nt, Artificial Sequence
  Synthetic
uguugcuguacaaaaccuucgga

SEQ ID NO: 44837 - RNA, 24 nt, Artificial Sequence
  Synthetic
auguugcuguacaaaaccuucgga

SEQ ID NO: 44838 - RNA, 18 nt, Artificial Sequence
  Synthetic
ccaaucgucagucaggga

SEQ ID NO: 44839 - RNA, 19 nt, Artificial Sequence
  Synthetic
accaaucgucagucaggga

SEQ ID NO: 44840 - RNA, 20 nt, Artificial Sequence
  Synthetic
caccaaucgucagucaggga

SEQ ID NO: 44841 - RNA, 21 nt, Artificial Sequence
  Synthetic
ccaccaaucgucagucaggga

SEQ ID NO: 44842 - RNA, 22 nt, Artificial Sequence
  Synthetic
uccaccaaucgucagucaggga

SEQ ID NO: 44843 - RNA, 23 nt, Artificial Sequence
  Synthetic
cuccaccaaucgucagucaggga

SEQ ID NO: 44844 - RNA, 24 nt, Artificial Sequence
  Synthetic
ccuccaccaaucgucagucaggga

SEQ ID NO: 44845 - RNA, 18 nt, Artificial Sequence
  Synthetic
gucccucucgagugggga

SEQ ID NO: 44846 - RNA, 19 nt, Artificial Sequence
  Synthetic
ggucccucucgagugggga

SEQ ID NO: 44847 - RNA, 20 nt, Artificial Sequence
  Synthetic
cggucccucucgagugggga

SEQ ID NO: 44848 - RNA, 21 nt, Artificial Sequence
  Synthetic
acggucccucucgagugggga

SEQ ID NO: 44849 - RNA, 22 nt, Artificial Sequence
  Synthetic
gacggucccucucgagugggga

SEQ ID NO: 44850 - RNA, 23 nt, Artificial Sequence
  Synthetic
ggacggucccucucgagugggga

SEQ ID NO: 44851 - RNA, 24 nt, Artificial Sequence
  Synthetic
uggacggucccucucgagugggga

SEQ ID NO: 44852 - RNA, 18 nt, Artificial Sequence
  Synthetic
cgcaaaauaccuauggga

SEQ ID NO: 44853 - RNA, 19 nt, Artificial Sequence
  Synthetic
ucgcaaaauaccuauggga

SEQ ID NO: 44854 - RNA, 20 nt, Artificial Sequence
  Synthetic
uucgcaaaauaccuauggga

SEQ ID NO: 44855 - RNA, 21 nt, Artificial Sequence
  Synthetic
uuucgcaaaauaccuauggga

SEQ ID NO: 44856 - RNA, 22 nt, Artificial Sequence
  Synthetic
cuuucgcaaaauaccuauggga

SEQ ID NO: 44857 - RNA, 23 nt, Artificial Sequence
  Synthetic
gcuuucgcaaaauaccuauggga

SEQ ID NO: 44858 - RNA, 24 nt, Artificial Sequence
  Synthetic
ggcuuucgcaaaauaccuauggga

SEQ ID NO: 44859 - RNA, 18 nt, Artificial Sequence
  Synthetic
gucaccauauacuuggga

SEQ ID NO: 44860 - RNA, 19 nt, Artificial Sequence
  Synthetic
ggucaccauauacuuggga

SEQ ID NO: 44861 - RNA, 20 nt, Artificial Sequence
  Synthetic
gggucaccauauacuuggga

SEQ ID NO: 44862 - RNA, 21 nt, Artificial Sequence
  Synthetic
ugggucaccauauacuuggga

SEQ ID NO: 44863 - RNA, 22 nt, Artificial Sequence
  Synthetic
gugggucaccauauacuuggga

SEQ ID NO: 44864 - RNA, 23 nt, Artificial Sequence
  Synthetic
ugugggucaccauauacuuggga

SEQ ID NO: 44865 - RNA, 24 nt, Artificial Sequence
  Synthetic
uugugggucaccauauacuuggga

SEQ ID NO: 44866 - RNA, 18 nt, Artificial Sequence
  Synthetic
ccugucuuacuuuuggga

SEQ ID NO: 44867 - RNA, 19 nt, Artificial Sequence
  Synthetic
uccugucuuacuuuuggga

SEQ ID NO: 44868 - RNA, 20 nt, Artificial Sequence
  Synthetic
uuccugucuuacuuuuggga

SEQ ID NO: 44869 - RNA, 21 nt, Artificial Sequence
  Synthetic
uuuccugucuuacuuuuggga

SEQ ID NO: 44870 - RNA, 22 nt, Artificial Sequence
  Synthetic
auuuccugucuuacuuuuggga

SEQ ID NO: 44871 - RNA, 23 nt, Artificial Sequence
  Synthetic
cauuuccugucuuacuuuuggga

SEQ ID NO: 44872 - RNA, 24 nt, Artificial Sequence
  Synthetic
acauuuccugucuuacuuuuggga

SEQ ID NO: 44873 - RNA, 18 nt, Artificial Sequence
  Synthetic
guggcuuuagggcaugga

SEQ ID NO: 44874 - RNA, 19 nt, Artificial Sequence
  Synthetic
gguggcuuuagggcaugga

SEQ ID NO: 44875 - RNA, 20 nt, Artificial Sequence
  Synthetic
ggguggcuuuagggcaugga

SEQ ID NO: 44876 - RNA, 21 nt, Artificial Sequence
  Synthetic
uggguggcuuuagggcaugga

SEQ ID NO: 44877 - RNA, 22 nt, Artificial Sequence
  Synthetic
uuggguggcuuuagggcaugga

SEQ ID NO: 44878 - RNA, 23 nt, Artificial Sequence
  Synthetic
cuuggguggcuuuagggcaugga

SEQ ID NO: 44879 - RNA, 24 nt, Artificial Sequence
  Synthetic
ccuuggguggcuuuagggcaugga

SEQ ID NO: 44880 - RNA, 18 nt, Artificial Sequence
  Synthetic
ggaguuggagccuaugga

SEQ ID NO: 44881 - RNA, 19 nt, Artificial Sequence
  Synthetic
aggaguuggagccuaugga

SEQ ID NO: 44882 - RNA, 20 nt, Artificial Sequence
  Synthetic
uaggaguuggagccuaugga

SEQ ID NO: 44883 - RNA, 21 nt, Artificial Sequence
  Synthetic
guaggaguuggagccuaugga

SEQ ID NO: 44884 - RNA, 22 nt, Artificial Sequence
  Synthetic
gguaggaguuggagccuaugga

SEQ ID NO: 44885 - RNA, 23 nt, Artificial Sequence
  Synthetic
agguaggaguuggagccuaugga

SEQ ID NO: 44886 - RNA, 24 nt, Artificial Sequence
  Synthetic
aagguaggaguuggagccuaugga

SEQ ID NO: 44887 - RNA, 18 nt, Artificial Sequence
  Synthetic
gcucgcagccggucugga

SEQ ID NO: 44888 - RNA, 19 nt, Artificial Sequence
  Synthetic
ugcucgcagccggucugga

SEQ ID NO: 44889 - RNA, 20 nt, Artificial Sequence
  Synthetic
uugcucgcagccggucugga

SEQ ID NO: 44890 - RNA, 21 nt, Artificial Sequence
  Synthetic
uuugcucgcagccggucugga

SEQ ID NO: 44891 - RNA, 22 nt, Artificial Sequence
  Synthetic
uuuugcucgcagccggucugga

SEQ ID NO: 44892 - RNA, 23 nt, Artificial Sequence
  Synthetic
guuuugcucgcagccggucugga

SEQ ID NO: 44893 - RNA, 24 nt, Artificial Sequence
  Synthetic
uguuuugcucgcagccggucugga

SEQ ID NO: 44894 - RNA, 18 nt, Artificial Sequence
  Synthetic
ucccgaucaccaguugga

SEQ ID NO: 44895 - RNA, 19 nt, Artificial Sequence
  Synthetic
uucccgaucaccaguugga

SEQ ID NO: 44896 - RNA, 20 nt, Artificial Sequence
  Synthetic
cuucccgaucaccaguugga

SEQ ID NO: 44897 - RNA, 21 nt, Artificial Sequence
  Synthetic
ccuucccgaucaccaguugga

SEQ ID NO: 44898 - RNA, 22 nt, Artificial Sequence
  Synthetic
uccuucccgaucaccaguugga

SEQ ID NO: 44899 - RNA, 23 nt, Artificial Sequence
  Synthetic
uuccuucccgaucaccaguugga

SEQ ID NO: 44900 - RNA, 24 nt, Artificial Sequence
  Synthetic
auuccuucccgaucaccaguugga

SEQ ID NO: 44901 - RNA, 18 nt, Artificial Sequence
  Synthetic
gugccaaguguuugcuga

SEQ ID NO: 44902 - RNA, 19 nt, Artificial Sequence
  Synthetic
ugugccaaguguuugcuga

SEQ ID NO: 44903 - RNA, 20 nt, Artificial Sequence
  Synthetic
cugugccaaguguuugcuga

SEQ ID NO: 44904 - RNA, 21 nt, Artificial Sequence
  Synthetic
ucugugccaaguguuugcuga

SEQ ID NO: 44905 - RNA, 22 nt, Artificial Sequence
  Synthetic
gucugugccaaguguuugcuga

SEQ ID NO: 44906 - RNA, 23 nt, Artificial Sequence
  Synthetic
ggucugugccaaguguuugcuga

SEQ ID NO: 44907 - RNA, 24 nt, Artificial Sequence
  Synthetic
cggucugugccaaguguuugcuga

SEQ ID NO: 44908 - RNA, 18 nt, Artificial Sequence
  Synthetic
ggacuguguuuuugcuga

SEQ ID NO: 44909 - RNA, 19 nt, Artificial Sequence
  Synthetic
aggacuguguuuuugcuga

SEQ ID NO: 44910 - RNA, 20 nt, Artificial Sequence
  Synthetic
aaggacuguguuuuugcuga

SEQ ID NO: 44911 - RNA, 21 nt, Artificial Sequence
  Synthetic
caaggacuguguuuuugcuga

SEQ ID NO: 44912 - RNA, 22 nt, Artificial Sequence
  Synthetic
ucaaggacuguguuuuugcuga

SEQ ID NO: 44913 - RNA, 23 nt, Artificial Sequence
  Synthetic
uucaaggacuguguuuuugcuga

SEQ ID NO: 44914 - RNA, 24 nt, Artificial Sequence
  Synthetic
cuucaaggacuguguuuuugcuga

SEQ ID NO: 44915 - RNA, 18 nt, Artificial Sequence
  Synthetic
uguuaacaggccaauuga

SEQ ID NO: 44916 - RNA, 19 nt, Artificial Sequence
  Synthetic
cuguuaacaggccaauuga

SEQ ID NO: 44917 - RNA, 20 nt, Artificial Sequence
  Synthetic
ccuguuaacaggccaauuga

SEQ ID NO: 44918 - RNA, 21 nt, Artificial Sequence
  Synthetic
cccuguuaacaggccaauuga

SEQ ID NO: 44919 - RNA, 22 nt, Artificial Sequence
  Synthetic
ucccuguuaacaggccaauuga

SEQ ID NO: 44920 - RNA, 23 nt, Artificial Sequence
  Synthetic
cucccuguuaacaggccaauuga

SEQ ID NO: 44921 - RNA, 24 nt, Artificial Sequence
  Synthetic
acucccuguuaacaggccaauuga

SEQ ID NO: 44922 - RNA, 18 nt, Artificial Sequence
  Synthetic
cgggguuuuucuuguuga

SEQ ID NO: 44923 - RNA, 19 nt, Artificial Sequence
  Synthetic
gcgggguuuuucuuguuga

SEQ ID NO: 44924 - RNA, 20 nt, Artificial Sequence
  Synthetic
ggcgggguuuuucuuguuga

SEQ ID NO: 44925 - RNA, 21 nt, Artificial Sequence
  Synthetic
aggcgggguuuuucuuguuga

SEQ ID NO: 44926 - RNA, 22 nt, Artificial Sequence
  Synthetic
caggcgggguuuuucuuguuga

SEQ ID NO: 44927 - RNA, 23 nt, Artificial Sequence
  Synthetic
acaggcgggguuuuucuuguuga

SEQ ID NO: 44928 - RNA, 24 nt, Artificial Sequence
  Synthetic
uacaggcgggguuuuucuuguuga

SEQ ID NO: 44929 - RNA, 18 nt, Artificial Sequence
  Synthetic
  misc_feature (17)..(17): n is a, c, g, or u
aguugaugacucuagcna

SEQ ID NO: 44930 - RNA, 19 nt, Artificial Sequence
  Synthetic
  misc_feature (18)..(18): n is a, c, g, or u
gaguugaugacucuagcna

SEQ ID NO: 44931 - RNA, 20 nt, Artificial Sequence
  Synthetic
  misc_feature (19)..(19): n is a, c, g, or u
ugaguugaugacucuagcna

SEQ ID NO: 44932 - RNA, 21 nt, Artificial Sequence
  Synthetic
  misc_feature (20)..(20): n is a, c, g, or u
gugaguugaugacucuagcna

SEQ ID NO: 44933 - RNA, 22 nt, Artificial Sequence
  Synthetic
  misc_feature (21)..(21): n is a, c, g, or u
ggugaguugaugacucuagcna

SEQ ID NO: 44934 - RNA, 23 nt, Artificial Sequence
  Synthetic
  misc_feature (22)..(22): n is a, c, g, or u
gggugaguugaugacucuagcna

SEQ ID NO: 44935 - RNA, 24 nt, Artificial Sequence
  Synthetic
  misc_feature (23)..(23): n is a, c, g, or u
ggggugaguugaugacucuagcna

SEQ ID NO: 44936 - RNA, 18 nt, Artificial Sequence
  Synthetic
cuuucucuguaaacaaua

SEQ ID NO: 44937 - RNA, 19 nt, Artificial Sequence
  Synthetic
ccuuucucuguaaacaaua

SEQ ID NO: 44938 - RNA, 20 nt, Artificial Sequence
  Synthetic
gccuuucucuguaaacaaua

SEQ ID NO: 44939 - RNA, 21 nt, Artificial Sequence
  Synthetic
ggccuuucucuguaaacaaua

SEQ ID NO: 44940 - RNA, 22 nt, Artificial Sequence
  Synthetic
aggccuuucucuguaaacaaua

SEQ ID NO: 44941 - RNA, 23 nt, Artificial Sequence
  Synthetic
aaggccuuucucuguaaacaaua

SEQ ID NO: 44942 - RNA, 24 nt, Artificial Sequence
  Synthetic
uaaggccuuucucuguaaacaaua

SEQ ID NO: 44943 - RNA, 18 nt, Artificial Sequence
  Synthetic
ggcuccaguucagggaua

SEQ ID NO: 44944 - RNA, 19 nt, Artificial Sequence
  Synthetic
uggcuccaguucagggaua

SEQ ID NO: 44945 - RNA, 20 nt, Artificial Sequence
  Synthetic
guggcuccaguucagggaua

SEQ ID NO: 44946 - RNA, 21 nt, Artificial Sequence
  Synthetic
gguggcuccaguucagggaua

SEQ ID NO: 44947 - RNA, 22 nt, Artificial Sequence
  Synthetic
ugguggcuccaguucagggaua

SEQ ID NO: 44948 - RNA, 23 nt, Artificial Sequence
  Synthetic
cugguggcuccaguucagggaua

SEQ ID NO: 44949 - RNA, 24 nt, Artificial Sequence
  Synthetic
gcugguggcuccaguucagggaua

SEQ ID NO: 44950 - RNA, 18 nt, Artificial Sequence
  Synthetic
uuugugggucaccauaua

SEQ ID NO: 44951 - RNA, 19 nt, Artificial Sequence
  Synthetic
uuuugugggucaccauaua

SEQ ID NO: 44952 - RNA, 20 nt, Artificial Sequence
  Synthetic
auuuugugggucaccauaua

SEQ ID NO: 44953 - RNA, 21 nt, Artificial Sequence
  Synthetic
cauuuugugggucaccauaua

SEQ ID NO: 44954 - RNA, 22 nt, Artificial Sequence
  Synthetic
ucauuuugugggucaccauaua

SEQ ID NO: 44955 - RNA, 23 nt, Artificial Sequence
  Synthetic
uucauuuugugggucaccauaua

SEQ ID NO: 44956 - RNA, 24 nt, Artificial Sequence
  Synthetic
cuucauuuugugggucaccauaua

SEQ ID NO: 44957 - RNA, 18 nt, Artificial Sequence
  Synthetic
aggcggguauucuauaua

SEQ ID NO: 44958 - RNA, 19 nt, Artificial Sequence
  Synthetic
aaggcggguauucuauaua

SEQ ID NO: 44959 - RNA, 20 nt, Artificial Sequence
  Synthetic
gaaggcggguauucuauaua

SEQ ID NO: 44960 - RNA, 21 nt, Artificial Sequence
  Synthetic
ggaaggcggguauucuauaua

SEQ ID NO: 44961 - RNA, 22 nt, Artificial Sequence
  Synthetic
uggaaggcggguauucuauaua

SEQ ID NO: 44962 - RNA, 23 nt, Artificial Sequence
  Synthetic
uuggaaggcggguauucuauaua

SEQ ID NO: 44963 - RNA, 24 nt, Artificial Sequence
  Synthetic
uuuggaaggcggguauucuauaua

SEQ ID NO: 44964 - RNA, 18 nt, Artificial Sequence
  Synthetic
  misc_feature (7)..(7): n is a, c, g, or u
ugccaangcaguuauaua

SEQ ID NO: 44965 - RNA, 19 nt, Artificial Sequence
  Synthetic
  misc_feature (8)..(8): n is a, c, g, or u
cugccaangcaguuauaua

SEQ ID NO: 44966 - RNA, 20 nt, Artificial Sequence
  Synthetic
  misc_feature (9)..(9): n is a, c, g, or u
ucugccaangcaguuauaua

SEQ ID NO: 44967 - RNA, 21 nt, Artificial Sequence
  Synthetic
  misc_feature (10)..(10): n is a, c, g, or u
aucugccaangcaguuauaua

SEQ ID NO: 44968 - RNA, 22 nt, Artificial Sequence
  Synthetic
  misc_feature (11)..(11): n is a, c, g, or u
caucugccaangcaguuauaua

SEQ ID NO: 44969 - RNA, 23 nt, Artificial Sequence
  Synthetic
  misc_feature (12)..(12): n is a, c, g, or u
ucaucugccaangcaguuauaua

SEQ ID NO: 44970 - RNA, 24 nt, Artificial Sequence
  Synthetic
  misc_feature (13)..(13): n is a, c, g, or u
aucaucugccaangcaguuauaua

SEQ ID NO: 44971 - RNA, 18 nt, Artificial Sequence
  Synthetic
gaaggcggguauucuaua

SEQ ID NO: 44972 - RNA, 19 nt, Artificial Sequence
  Synthetic
ggaaggcggguauucuaua

SEQ ID NO: 44973 - RNA, 20 nt, Artificial Sequence
  Synthetic
uggaaggcggguauucuaua

SEQ ID NO: 44974 - RNA, 21 nt, Artificial Sequence
  Synthetic
uuggaaggcggguauucuaua

SEQ ID NO: 44975 - RNA, 22 nt, Artificial Sequence
  Synthetic
uuuggaaggcggguauucuaua

SEQ ID NO: 44976 - RNA, 23 nt, Artificial Sequence
  Synthetic
cuuuggaaggcggguauucuaua

SEQ ID NO: 44977 - RNA, 24 nt, Artificial Sequence
  Synthetic
ccuuuggaaggcggguauucuaua

SEQ ID NO: 44978 - RNA, 18 nt, Artificial Sequence
  Synthetic
uugcaucaagacauuaua

SEQ ID NO: 44979 - RNA, 19 nt, Artificial Sequence
  Synthetic
uuugcaucaagacauuaua

SEQ ID NO: 44980 - RNA, 20 nt, Artificial Sequence
  Synthetic
auuugcaucaagacauuaua

SEQ ID NO: 44981 - RNA, 21 nt, Artificial Sequence
  Synthetic
cauuugcaucaagacauuaua

SEQ ID NO: 44982 - RNA, 22 nt, Artificial Sequence
  Synthetic
ccauuugcaucaagacauuaua

SEQ ID NO: 44983 - RNA, 23 nt, Artificial Sequence
  Synthetic
uccauuugcaucaagacauuaua

SEQ ID NO: 44984 - RNA, 24 nt, Artificial Sequence
  Synthetic
auccauuugcaucaagacauuaua

SEQ ID NO: 44985 - RNA, 18 nt, Artificial Sequence
  Synthetic
  misc_feature (9)..(9): n is a, c, g, or u
ucugccaangcaguuaua

SEQ ID NO: 44986 - RNA, 19 nt, Artificial Sequence
  Synthetic
  misc_feature (10)..(10): n is a, c, g, or u
aucugccaangcaguuaua

SEQ ID NO: 44987 - RNA, 20 nt, Artificial Sequence
  Synthetic
  misc_feature (11)..(11): n is a, c, g, or u
caucugccaangcaguuaua

SEQ ID NO: 44988 - RNA, 21 nt, Artificial Sequence
  Synthetic
  misc_feature (12)..(12): n is a, c, g, or u
ucaucugccaangcaguuaua

SEQ ID NO: 44989 - RNA, 22 nt, Artificial Sequence
  Synthetic
  misc_feature (13)..(13): n is a, c, g, or u
aucaucugccaangcaguuaua

SEQ ID NO: 44990 - RNA, 23 nt, Artificial Sequence
  Synthetic
  misc_feature (14)..(14): n is a, c, g, or u
caucaucugccaangcaguuaua

SEQ ID NO: 44991 - RNA, 24 nt, Artificial Sequence
  Synthetic
  misc_feature (15)..(15): n is a, c, g, or u
ucaucaucugccaangcaguuaua

SEQ ID NO: 44992 - RNA, 18 nt, Artificial Sequence
  Synthetic
cccaucucuccaccacua

SEQ ID NO: 44993 - RNA, 19 nt, Artificial Sequence
  Synthetic
ucccaucucuccaccacua

SEQ ID NO: 44994 - RNA, 20 nt, Artificial Sequence
  Synthetic
cucccaucucuccaccacua

SEQ ID NO: 44995 - RNA, 21 nt, Artificial Sequence
  Synthetic
acucccaucucuccaccacua

SEQ ID NO: 44996 - RNA, 22 nt, Artificial Sequence
  Synthetic
uacucccaucucuccaccacua

SEQ ID NO: 44997 - RNA, 23 nt, Artificial Sequence
  Synthetic
cuacucccaucucuccaccacua

SEQ ID NO: 44998 - RNA, 24 nt, Artificial Sequence
  Synthetic
ccuacucccaucucuccaccacua

SEQ ID NO: 44999 - RNA, 18 nt, Artificial Sequence
  Synthetic
guugguucuucuggacua

SEQ ID NO: 45000 - RNA, 19 nt, Artificial Sequence
  Synthetic
uguugguucuucuggacua

SEQ ID NO: 45001 - RNA, 20 nt, Artificial Sequence
  Synthetic
uuguugguucuucuggacua

SEQ ID NO: 45002 - RNA, 21 nt, Artificial Sequence
  Synthetic
cuuguugguucuucuggacua

SEQ ID NO: 45003 - RNA, 22 nt, Artificial Sequence
  Synthetic
ucuuguugguucuucuggacua

SEQ ID NO: 45004 - RNA, 23 nt, Artificial Sequence
  Synthetic
uucuuguugguucuucuggacua

SEQ ID NO: 45005 - RNA, 24 nt, Artificial Sequence
  Synthetic
cuucuuguugguucuucuggacua

SEQ ID NO: 45006 - RNA, 18 nt, Artificial Sequence
  Synthetic
gcuuucgcaaaauaccua

SEQ ID NO: 45007 - RNA, 19 nt, Artificial Sequence
  Synthetic
ggcuuucgcaaaauaccua

SEQ ID NO: 45008 - RNA, 20 nt, Artificial Sequence
  Synthetic
gggcuuucgcaaaauaccua

SEQ ID NO: 45009 - RNA, 21 nt, Artificial Sequence
  Synthetic
ugggcuuucgcaaaauaccua

SEQ ID NO: 45010 - RNA, 22 nt, Artificial Sequence
  Synthetic
uugggcuuucgcaaaauaccua

SEQ ID NO: 45011 - RNA, 23 nt, Artificial Sequence
  Synthetic
cuugggcuuucgcaaaauaccua

SEQ ID NO: 45012 - RNA, 24 nt, Artificial Sequence
  Synthetic
ucuugggcuuucgcaaaauaccua

SEQ ID NO: 45013 - RNA, 18 nt, Artificial Sequence
  Synthetic
augcauguauacaagcua

SEQ ID NO: 45014 - RNA, 19 nt, Artificial Sequence
  Synthetic
uaugcauguauacaagcua

SEQ ID NO: 45015 - RNA, 20 nt, Artificial Sequence
  Synthetic
auaugcauguauacaagcua

SEQ ID NO: 45016 - RNA, 21 nt, Artificial Sequence
  Synthetic
uauaugcauguauacaagcua

SEQ ID NO: 45017 - RNA, 22 nt, Artificial Sequence
  Synthetic
uuauaugcauguauacaagcua

SEQ ID NO: 45018 - RNA, 23 nt, Artificial Sequence
  Synthetic
uuuauaugcauguauacaagcua

SEQ ID NO: 45019 - RNA, 24 nt, Artificial Sequence
  Synthetic
cuuuauaugcauguauacaagcua

SEQ ID NO: 45020 - RNA, 18 nt, Artificial Sequence
  Synthetic
  misc_feature (11)..(11): n is a, c, g, or u
accuuuacccnguugcua

SEQ ID NO: 45021 - RNA, 19 nt, Artificial Sequence
  Synthetic
  misc_feature (12)..(12): n is a, c, g, or u
aaccuuuacccnguugcua

SEQ ID NO: 45022 - RNA, 20 nt, Artificial Sequence
  Synthetic
  misc_feature (13)..(13): n is a, c, g, or u
gaaccuuuacccnguugcua

SEQ ID NO: 45023 - RNA, 21 nt, Artificial Sequence
  Synthetic
  misc_feature (14)..(14): n is a, c, g, or u
ugaaccuuuacccnguugcua

SEQ ID NO: 45024 - RNA, 22 nt, Artificial Sequence
  Synthetic
  misc_feature (15)..(15): n is a, c, g, or u
augaaccuuuacccnguugcua

SEQ ID NO: 45025 - RNA, 23 nt, Artificial Sequence
  Synthetic
  misc_feature (16)..(16): n is a, c, g, or u
caugaaccuuuacccnguugcua

SEQ ID NO: 45026 - RNA, 24 nt, Artificial Sequence
  Synthetic
  misc_feature (17)..(17): n is a, c, g, or u
acaugaaccuuuacccnguugcua

SEQ ID NO: 45027 - RNA, 18 nt, Artificial Sequence
  Synthetic
uggaaggcggguauucua

SEQ ID NO: 45028 - RNA, 19 nt, Artificial Sequence
  Synthetic
uuggaaggcggguauucua

SEQ ID NO: 45029 - RNA, 20 nt, Artificial Sequence
  Synthetic
uuuggaaggcggguauucua

SEQ ID NO: 45030 - RNA, 21 nt, Artificial Sequence
  Synthetic
cuuuggaaggcggguauucua

SEQ ID NO: 45031 - RNA, 22 nt, Artificial Sequence
  Synthetic
ccuuuggaaggcggguauucua

SEQ ID NO: 45032 - RNA, 23 nt, Artificial Sequence
  Synthetic
cccuuuggaaggcggguauucua

SEQ ID NO: 45033 - RNA, 24 nt, Artificial Sequence
  Synthetic
acccuuuggaaggcggguauucua

SEQ ID NO: 45034 - RNA, 18 nt, Artificial Sequence
  Synthetic
acuucucucaauuuucua

SEQ ID NO: 45035 - RNA, 19 nt, Artificial Sequence
  Synthetic
gacuucucucaauuuucua

SEQ ID NO: 45036 - RNA, 20 nt, Artificial Sequence
  Synthetic
ggacuucucucaauuuucua

SEQ ID NO: 45037 - RNA, 21 nt, Artificial Sequence
  Synthetic
uggacuucucucaauuuucua

SEQ ID NO: 45038 - RNA, 22 nt, Artificial Sequence
  Synthetic
guggacuucucucaauuuucua

SEQ ID NO: 45039 - RNA, 23 nt, Artificial Sequence
  Synthetic
gguggacuucucucaauuuucua

SEQ ID NO: 45040 - RNA, 24 nt, Artificial Sequence
  Synthetic
ugguggacuucucucaauuuucua

SEQ ID NO: 45041 - RNA, 18 nt, Artificial Sequence
  Synthetic
gugggcccucucacagua

SEQ ID NO: 45042 - RNA, 19 nt, Artificial Sequence
  Synthetic
ugugggcccucucacagua

SEQ ID NO: 45043 - RNA, 20 nt, Artificial Sequence
  Synthetic
uugugggcccucucacagua

SEQ ID NO: 45044 - RNA, 21 nt, Artificial Sequence
  Synthetic
uuugugggcccucucacagua

SEQ ID NO: 45045 - RNA, 22 nt, Artificial Sequence
  Synthetic
auuugugggcccucucacagua

SEQ ID NO: 45046 - RNA, 23 nt, Artificial Sequence
  Synthetic
aauuugugggcccucucacagua

SEQ ID NO: 45047 - RNA, 24 nt, Artificial Sequence
  Synthetic
caauuugugggcccucucacagua

SEQ ID NO: 45048 - RNA, 18 nt, Artificial Sequence
  Synthetic
gauccucgaccaccagua

SEQ ID NO: 45049 - RNA, 19 nt, Artificial Sequence
  Synthetic
ggauccucgaccaccagua

SEQ ID NO: 45050 - RNA, 20 nt, Artificial Sequence
  Synthetic
aggauccucgaccaccagua

SEQ ID NO: 45051 - RNA, 21 nt, Artificial Sequence
  Synthetic
caggauccucgaccaccagua

SEQ ID NO: 45052 - RNA, 22 nt, Artificial Sequence
  Synthetic
ccaggauccucgaccaccagua

SEQ ID NO: 45053 - RNA, 23 nt, Artificial Sequence
  Synthetic
uccaggauccucgaccaccagua

SEQ ID NO: 45054 - RNA, 24 nt, Artificial Sequence
  Synthetic
uuccaggauccucgaccaccagua

SEQ ID NO: 45055 - RNA, 18 nt, Artificial Sequence
  Synthetic
uaccauuagacaaaggua

SEQ ID NO: 45056 - RNA, 19 nt, Artificial Sequence
  Synthetic
uuaccauuagacaaaggua

SEQ ID NO: 45057 - RNA, 20 nt, Artificial Sequence
  Synthetic
uuuaccauuagacaaaggua

SEQ ID NO: 45058 - RNA, 21 nt, Artificial Sequence
  Synthetic
auuuaccauuagacaaaggua

SEQ ID NO: 45059 - RNA, 22 nt, Artificial Sequence
  Synthetic
uauuuaccauuagacaaaggua

SEQ ID NO: 45060 - RNA, 23 nt, Artificial Sequence
  Synthetic
auauuuaccauuagacaaaggua

SEQ ID NO: 45061 - RNA, 24 nt, Artificial Sequence
  Synthetic
aauauuuaccauuagacaaaggua

SEQ ID NO: 45062 - RNA, 18 nt, Artificial Sequence
  Synthetic
  misc_feature (6)..(6): n is a, c, g, or u
uauaungaugauguggua

SEQ ID NO: 45063 - RNA, 19 nt, Artificial Sequence
  Synthetic
  misc_feature (7)..(7): n is a, c, g, or u
cuauaungaugauguggua

SEQ ID NO: 45064 - RNA, 20 nt, Artificial Sequence
  Synthetic
  misc_feature (8)..(8): n is a, c, g, or u
gcuauaungaugauguggua

SEQ ID NO: 45065 - RNA, 21 nt, Artificial Sequence
  Synthetic
  misc_feature (9)..(9): n is a, c, g, or u
agcuauaungaugauguggua

SEQ ID NO: 45066 - RNA, 22 nt, Artificial Sequence
  Synthetic
  misc_feature (10)..(10): n is a, c, g, or u
cagcuauaungaugauguggua

SEQ ID NO: 45067 - RNA, 23 nt, Artificial Sequence
  Synthetic
  misc_feature (11)..(11): n is a, c, g, or u
ucagcuauaungaugauguggua

SEQ ID NO: 45068 - RNA, 24 nt, Artificial Sequence
  Synthetic
  misc_feature (12)..(12): n is a, c, g, or u
uucagcuauaungaugauguggua

SEQ ID NO: 45069 - RNA, 18 nt, Artificial Sequence
  Synthetic
ugccuuuauaugcaugua

SEQ ID NO: 45070 - RNA, 19 nt, Artificial Sequence
  Synthetic
augccuuuauaugcaugua

SEQ ID NO: 45071 - RNA, 20 nt, Artificial Sequence
  Synthetic
aaugccuuuauaugcaugua

SEQ ID NO: 45072 - RNA, 21 nt, Artificial Sequence
  Synthetic
uaaugccuuuauaugcaugua

SEQ ID NO: 45073 - RNA, 22 nt, Artificial Sequence
  Synthetic
uuaaugccuuuauaugcaugua

SEQ ID NO: 45074 - RNA, 23 nt, Artificial Sequence
  Synthetic
cuuaaugccuuuauaugcaugua

SEQ ID NO: 45075 - RNA, 24 nt, Artificial Sequence
  Synthetic
ccuuaaugccuuuauaugcaugua

SEQ ID NO: 45076 - RNA, 18 nt, Artificial Sequence
  Synthetic
aauuuuaugggauaugua

SEQ ID NO: 45077 - RNA, 19 nt, Artificial Sequence
  Synthetic
aaauuuuaugggauaugua

SEQ ID NO: 45078 - RNA, 20 nt, Artificial Sequence
  Synthetic
uaaauuuuaugggauaugua

SEQ ID NO: 45079 - RNA, 21 nt, Artificial Sequence
  Synthetic
uuaaauuuuaugggauaugua

SEQ ID NO: 45080 - RNA, 22 nt, Artificial Sequence
  Synthetic
cuuaaauuuuaugggauaugua

SEQ ID NO: 45081 - RNA, 23 nt, Artificial Sequence
  Synthetic
ccuuaaauuuuaugggauaugua

SEQ ID NO: 45082 - RNA, 24 nt, Artificial Sequence
  Synthetic
uccuuaaauuuuaugggauaugua

SEQ ID NO: 45083 - RNA, 18 nt, Artificial Sequence
  Synthetic
aucccucauguugcugua

SEQ ID NO: 45084 - RNA, 19 nt, Artificial Sequence
  Synthetic
uaucccucauguugcugua

SEQ ID NO: 45085 - RNA, 20 nt, Artificial Sequence
  Synthetic
guaucccucauguugcugua

SEQ ID NO: 45086 - RNA, 21 nt, Artificial Sequence
  Synthetic
uguaucccucauguugcugua

SEQ ID NO: 45087 - RNA, 22 nt, Artificial Sequence
  Synthetic
auguaucccucauguugcugua

SEQ ID NO: 45088 - RNA, 23 nt, Artificial Sequence
  Synthetic
uauguaucccucauguugcugua

SEQ ID NO: 45089 - RNA, 24 nt, Artificial Sequence
  Synthetic
cuauguaucccucauguugcugua

SEQ ID NO: 45090 - RNA, 18 nt, Artificial Sequence
  Synthetic
agguuaaugaccuuugua

SEQ ID NO: 45091 - RNA, 19 nt, Artificial Sequence
  Synthetic
cagguuaaugaccuuugua

SEQ ID NO: 45092 - RNA, 20 nt, Artificial Sequence
  Synthetic
ccagguuaaugaccuuugua

SEQ ID NO: 45093 - RNA, 21 nt, Artificial Sequence
  Synthetic
uccagguuaaugaccuuugua

SEQ ID NO: 45094 - RNA, 22 nt, Artificial Sequence
  Synthetic
guccagguuaaugaccuuugua

SEQ ID NO: 45095 - RNA, 23 nt, Artificial Sequence
  Synthetic
aguccagguuaaugaccuuugua

SEQ ID NO: 45096 - RNA, 24 nt, Artificial Sequence
  Synthetic
gaguccagguuaaugaccuuugua

SEQ ID NO: 45097 - RNA, 18 nt, Artificial Sequence
  Synthetic
caccgcuucagcuuugua

SEQ ID NO: 45098 - RNA, 19 nt, Artificial Sequence
  Synthetic
acaccgcuucagcuuugua

SEQ ID NO: 45099 - RNA, 20 nt, Artificial Sequence
  Synthetic
gacaccgcuucagcuuugua

SEQ ID NO: 45100 - RNA, 21 nt, Artificial Sequence
  Synthetic
cgacaccgcuucagcuuugua

SEQ ID NO: 45101 - RNA, 22 nt, Artificial Sequence
  Synthetic
ucgacaccgcuucagcuuugua

SEQ ID NO: 45102 - RNA, 23 nt, Artificial Sequence
  Synthetic
cucgacaccgcuucagcuuugua

SEQ ID NO: 45103 - RNA, 24 nt, Artificial Sequence
  Synthetic
ucucgacaccgcuucagcuuugua

SEQ ID NO: 45104 - RNA, 18 nt, Artificial Sequence
  Synthetic
  misc_feature (16)..(16): n is a, c, g, or u
guauacaucuaaaccnua

SEQ ID NO: 45105 - RNA, 19 nt, Artificial Sequence
  Synthetic
  misc_feature (17)..(17): n is a, c, g, or u
gguauacaucuaaaccnua

SEQ ID NO: 45106 - RNA, 20 nt, Artificial Sequence
  Synthetic
  misc_feature (18)..(18): n is a, c, g, or u
ggguauacaucuaaaccnua

SEQ ID NO: 45107 - RNA, 21 nt, Artificial Sequence
  Synthetic
  misc_feature (19)..(19): n is a, c, g, or u
uggguauacaucuaaaccnua

SEQ ID NO: 45108 - RNA, 22 nt, Artificial Sequence
  Synthetic
  misc_feature (20)..(20): n is a, c, g, or u
uuggguauacaucuaaaccnua

SEQ ID NO: 45109 - RNA, 23 nt, Artificial Sequence
  Synthetic
  misc_feature (21)..(21): n is a, c, g, or u
uuuggguauacaucuaaaccnua

SEQ ID NO: 45110 - RNA, 24 nt, Artificial Sequence
  Synthetic
  misc_feature (22)..(22): n is a, c, g, or u
cuuuggguauacaucuaaaccnua

SEQ ID NO: 45111 - RNA, 18 nt, Artificial Sequence
  Synthetic
acuaaauauuuaccauua

SEQ ID NO: 45112 - RNA, 19 nt, Artificial Sequence
  Synthetic
uacuaaauauuuaccauua

SEQ ID NO: 45113 - RNA, 20 nt, Artificial Sequence
  Synthetic
cuacuaaauauuuaccauua

SEQ ID NO: 45114 - RNA, 21 nt, Artificial Sequence
  Synthetic
ucuacuaaauauuuaccauua

SEQ ID NO: 45115 - RNA, 22 nt, Artificial Sequence
  Synthetic
cucuacuaaauauuuaccauua

SEQ ID NO: 45116 - RNA, 23 nt, Artificial Sequence
  Synthetic
acucuacuaaauauuuaccauua

SEQ ID NO: 45117 - RNA, 24 nt, Artificial Sequence
  Synthetic
aacucuacuaaauauuuaccauua

SEQ ID NO: 45118 - RNA, 18 nt, Artificial Sequence
  Synthetic
agguaucaaaccguauua

SEQ ID NO: 45119 - RNA, 19 nt, Artificial Sequence
  Synthetic
aagguaucaaaccguauua

SEQ ID NO: 45120 - RNA, 20 nt, Artificial Sequence
  Synthetic
aaagguaucaaaccguauua

SEQ ID NO: 45121 - RNA, 21 nt, Artificial Sequence
  Synthetic
caaagguaucaaaccguauua

SEQ ID NO: 45122 - RNA, 22 nt, Artificial Sequence
  Synthetic
acaaagguaucaaaccguauua

SEQ ID NO: 45123 - RNA, 23 nt, Artificial Sequence
  Synthetic
gacaaagguaucaaaccguauua

SEQ ID NO: 45124 - RNA, 24 nt, Artificial Sequence
  Synthetic
agacaaagguaucaaaccguauua

SEQ ID NO: 45125 - RNA, 18 nt, Artificial Sequence
  Synthetic
uuaaugaccuuuguauua

SEQ ID NO: 45126 - RNA, 19 nt, Artificial Sequence
  Synthetic
guuaaugaccuuuguauua

SEQ ID NO: 45127 - RNA, 20 nt, Artificial Sequence
  Synthetic
gguuaaugaccuuuguauua

SEQ ID NO: 45128 - RNA, 21 nt, Artificial Sequence
  Synthetic
agguuaaugaccuuuguauua

SEQ ID NO: 45129 - RNA, 22 nt, Artificial Sequence
  Synthetic
cagguuaaugaccuuuguauua

SEQ ID NO: 45130 - RNA, 23 nt, Artificial Sequence
  Synthetic
ccagguuaaugaccuuuguauua

SEQ ID NO: 45131 - RNA, 24 nt, Artificial Sequence
  Synthetic
uccagguuaaugaccuuuguauua

SEQ ID NO: 45132 - RNA, 18 nt, Artificial Sequence
  Synthetic
uacuuucucgccaacuua

SEQ ID NO: 45133 - RNA, 19 nt, Artificial Sequence
  Synthetic
uuacuuucucgccaacuua

SEQ ID NO: 45134 - RNA, 20 nt, Artificial Sequence
  Synthetic
uuuacuuucucgccaacuua

SEQ ID NO: 45135 - RNA, 21 nt, Artificial Sequence
  Synthetic
uuuuacuuucucgccaacuua

SEQ ID NO: 45136 - RNA, 22 nt, Artificial Sequence
  Synthetic
cuuuuacuuucucgccaacuua

SEQ ID NO: 45137 - RNA, 23 nt, Artificial Sequence
  Synthetic
gcuuuuacuuucucgccaacuua

SEQ ID NO: 45138 - RNA, 24 nt, Artificial Sequence
  Synthetic
ggcuuuuacuuucucgccaacuua

SEQ ID NO: 45139 - RNA, 18 nt, Artificial Sequence
  Synthetic
cuuagacauugacccuua

SEQ ID NO: 45140 - RNA, 19 nt, Artificial Sequence
  Synthetic
gcuuagacauugacccuua

SEQ ID NO: 45141 - RNA, 20 nt, Artificial Sequence
  Synthetic
ggcuuagacauugacccuua

SEQ ID NO: 45142 - RNA, 21 nt, Artificial Sequence
  Synthetic
uggcuuagacauugacccuua

SEQ ID NO: 45143 - RNA, 22 nt, Artificial Sequence
  Synthetic
uuggcuuagacauugacccuua

SEQ ID NO: 45144 - RNA, 23 nt, Artificial Sequence
  Synthetic
uuuggcuuagacauugacccuua

SEQ ID NO: 45145 - RNA, 24 nt, Artificial Sequence
  Synthetic
uuuuggcuuagacauugacccuua

SEQ ID NO: 45146 - RNA, 18 nt, Artificial Sequence
  Synthetic
  misc_feature (11)..(11): n is a, c, g, or u
caucugccaangcaguua

SEQ ID NO: 45147 - RNA, 19 nt, Artificial Sequence
  Synthetic
  misc_feature (12)..(12): n is a, c, g, or u
ucaucugccaangcaguua

SEQ ID NO: 45148 - RNA, 20 nt, Artificial Sequence
  Synthetic
  misc_feature (13)..(13): n is a, c, g, or u
aucaucugccaangcaguua

SEQ ID NO: 45149 - RNA, 21 nt, Artificial Sequence
  Synthetic
  misc_feature (14)..(14): n is a, c, g, or u
caucaucugccaangcaguua

SEQ ID NO: 45150 - RNA, 22 nt, Artificial Sequence
  Synthetic
  misc_feature (15)..(15): n is a, c, g, or u
ucaucaucugccaangcaguua

SEQ ID NO: 45151 - RNA, 23 nt, Artificial Sequence
  Synthetic
  misc_feature (16)..(16): n is a, c, g, or u
cucaucaucugccaangcaguua

SEQ ID NO: 45152 - RNA, 24 nt, Artificial Sequence
  Synthetic
  misc_feature (17)..(17): n is a, c, g, or u
ucucaucaucugccaangcaguua

SEQ ID NO: 45153 - RNA, 18 nt, Artificial Sequence
  Synthetic
cuucaccucugcacguua

SEQ ID NO: 45154 - RNA, 19 nt, Artificial Sequence
  Synthetic
gcuucaccucugcacguua

SEQ ID NO: 45155 - RNA, 20 nt, Artificial Sequence
  Synthetic
cgcuucaccucugcacguua

SEQ ID NO: 45156 - RNA, 21 nt, Artificial Sequence
  Synthetic
ucgcuucaccucugcacguua

SEQ ID NO: 45157 - RNA, 22 nt, Artificial Sequence
  Synthetic
uucgcuucaccucugcacguua

SEQ ID NO: 45158 - RNA, 23 nt, Artificial Sequence
  Synthetic
cuucgcuucaccucugcacguua

SEQ ID NO: 45159 - RNA, 24 nt, Artificial Sequence
  Synthetic
acuucgcuucaccucugcacguua

SEQ ID NO: 45160 - RNA, 18 nt, Artificial Sequence
  Synthetic
uucggaaacucccuguua

SEQ ID NO: 45161 - RNA, 19 nt, Artificial Sequence
  Synthetic
uuucggaaacucccuguua

SEQ ID NO: 45162 - RNA, 20 nt, Artificial Sequence
  Synthetic
uuuucggaaacucccuguua

SEQ ID NO: 45163 - RNA, 21 nt, Artificial Sequence
  Synthetic
guuuucggaaacucccuguua

SEQ ID NO: 45164 - RNA, 22 nt, Artificial Sequence
  Synthetic
uguuuucggaaacucccuguua

SEQ ID NO: 45165 - RNA, 23 nt, Artificial Sequence
  Synthetic
auguuuucggaaacucccuguua

SEQ ID NO: 45166 - RNA, 24 nt, Artificial Sequence
  Synthetic
aauguuuucggaaacucccuguua

SEQ ID NO: 45167 - RNA, 18 nt, Artificial Sequence
  Synthetic
cggagacuacuguuguua

SEQ ID NO: 45168 - RNA, 19 nt, Artificial Sequence
  Synthetic
ccggagacuacuguuguua

SEQ ID NO: 45169 - RNA, 20 nt, Artificial Sequence
  Synthetic
uccggagacuacuguuguua

SEQ ID NO: 45170 - RNA, 21 nt, Artificial Sequence
  Synthetic
uuccggagacuacuguuguua

SEQ ID NO: 45171 - RNA, 22 nt, Artificial Sequence
  Synthetic
cuuccggagacuacuguuguua

SEQ ID NO: 45172 - RNA, 23 nt, Artificial Sequence
  Synthetic
acuuccggagacuacuguuguua

SEQ ID NO: 45173 - RNA, 24 nt, Artificial Sequence
  Synthetic
cacuuccggagacuacuguuguua

SEQ ID NO: 45174 - RNA, 18 nt, Artificial Sequence
  Synthetic
acaaggugggaaacuuua

SEQ ID NO: 45175 - RNA, 19 nt, Artificial Sequence
  Synthetic
cacaaggugggaaacuuua

SEQ ID NO: 45176 - RNA, 20 nt, Artificial Sequence
  Synthetic
ucacaaggugggaaacuuua

SEQ ID NO: 45177 - RNA, 21 nt, Artificial Sequence
  Synthetic
cucacaaggugggaaacuuua

SEQ ID NO: 45178 - RNA, 22 nt, Artificial Sequence
  Synthetic
acucacaaggugggaaacuuua

SEQ ID NO: 45179 - RNA, 23 nt, Artificial Sequence
  Synthetic
gacucacaaggugggaaacuuua

SEQ ID NO: 45180 - RNA, 24 nt, Artificial Sequence
  Synthetic
ggacucacaaggugggaaacuuua

SEQ ID NO: 45181 - RNA, 18 nt, Artificial Sequence
  Synthetic
  misc_feature (9)..(9): n is a, c, g, or u
ucuaaaccnuaacaaaac

SEQ ID NO: 45182 - RNA, 19 nt, Artificial Sequence
  Synthetic
  misc_feature (10)..(10): n is a, c, g, or u
aucuaaaccnuaacaaaac

SEQ ID NO: 45183 - RNA, 20 nt, Artificial Sequence
  Synthetic
  misc_feature (11)..(11): n is a, c, g, or u
caucuaaaccnuaacaaaac

SEQ ID NO: 45184 - RNA, 21 nt, Artificial Sequence
  Synthetic
  misc_feature (12)..(12): n is a, c, g, or u
acaucuaaaccnuaacaaaac

SEQ ID NO: 45185 - RNA, 22 nt, Artificial Sequence
  Synthetic
  misc_feature (13)..(13): n is a, c, g, or u
uacaucuaaaccnuaacaaaac

SEQ ID NO: 45186 - RNA, 23 nt, Artificial Sequence
  Synthetic
  misc_feature (14)..(14): n is a, c, g, or u
auacaucuaaaccnuaacaaaac

SEQ ID NO: 45187 - RNA, 24 nt, Artificial Sequence
  Synthetic
  misc_feature (15)..(15): n is a, c, g, or u
uauacaucuaaaccnuaacaaaac

SEQ ID NO: 45188 - RNA, 18 nt, Artificial Sequence
  Synthetic
uuggguauacaucuaaac

SEQ ID NO: 45189 - RNA, 19 nt, Artificial Sequence
  Synthetic
uuuggguauacaucuaaac

SEQ ID NO: 45190 - RNA, 20 nt, Artificial Sequence
  Synthetic
cuuuggguauacaucuaaac

SEQ ID NO: 45191 - RNA, 21 nt, Artificial Sequence
  Synthetic
ucuuuggguauacaucuaaac

SEQ ID NO: 45192 - RNA, 22 nt, Artificial Sequence
  Synthetic
gucuuuggguauacaucuaaac

SEQ ID NO: 45193 - RNA, 23 nt, Artificial Sequence
  Synthetic
ugucuuuggguauacaucuaaac

SEQ ID NO: 45194 - RNA, 24 nt, Artificial Sequence
  Synthetic
uugucuuuggguauacaucuaaac

SEQ ID NO: 45195 - RNA, 18 nt, Artificial Sequence
  Synthetic
ggggacccugcaccgaac

SEQ ID NO: 45196 - RNA, 19 nt, Artificial Sequence
  Synthetic
uggggacccugcaccgaac

SEQ ID NO: 45197 - RNA, 20 nt, Artificial Sequence
  Synthetic
uuggggacccugcaccgaac

SEQ ID NO: 45198 - RNA, 21 nt, Artificial Sequence
  Synthetic
auuggggacccugcaccgaac

SEQ ID NO: 45199 - RNA, 22 nt, Artificial Sequence
  Synthetic
gauuggggacccugcaccgaac

SEQ ID NO: 45200 - RNA, 23 nt, Artificial Sequence
  Synthetic
ggauuggggacccugcaccgaac

SEQ ID NO: 45201 - RNA, 24 nt, Artificial Sequence
  Synthetic
aggauuggggacccugcaccgaac

SEQ ID NO: 45202 - RNA, 18 nt, Artificial Sequence
  Synthetic
ggguucaccccuccacac

SEQ ID NO: 45203 - RNA, 19 nt, Artificial Sequence
  Synthetic
cggguucaccccuccacac

SEQ ID NO: 45204 - RNA, 20 nt, Artificial Sequence
  Synthetic
ccggguucaccccuccacac

SEQ ID NO: 45205 - RNA, 21 nt, Artificial Sequence
  Synthetic
cccggguucaccccuccacac

SEQ ID NO: 45206 - RNA, 22 nt, Artificial Sequence
  Synthetic
acccggguucaccccuccacac

SEQ ID NO: 45207 - RNA, 23 nt, Artificial Sequence
  Synthetic
gacccggguucaccccuccacac

SEQ ID NO: 45208 - RNA, 24 nt, Artificial Sequence
  Synthetic
ggacccggguucaccccuccacac

SEQ ID NO: 45209 - RNA, 18 nt, Artificial Sequence
  Synthetic
cacaagaacacaucacac

SEQ ID NO: 45210 - RNA, 19 nt, Artificial Sequence
  Synthetic
ccacaagaacacaucacac

SEQ ID NO: 45211 - RNA, 20 nt, Artificial Sequence
  Synthetic
gccacaagaacacaucacac

SEQ ID NO: 45212 - RNA, 21 nt, Artificial Sequence
  Synthetic
ugccacaagaacacaucacac

SEQ ID NO: 45213 - RNA, 22 nt, Artificial Sequence
  Synthetic
uugccacaagaacacaucacac

SEQ ID NO: 45214 - RNA, 23 nt, Artificial Sequence
  Synthetic
uuugccacaagaacacaucacac

SEQ ID NO: 45215 - RNA, 24 nt, Artificial Sequence
  Synthetic
cuuugccacaagaacacaucacac

SEQ ID NO: 45216 - RNA, 18 nt, Artificial Sequence
  Synthetic
cucccaucucuccaccac

SEQ ID NO: 45217 - RNA, 19 nt, Artificial Sequence
  Synthetic
acucccaucucuccaccac

SEQ ID NO: 45218 - RNA, 20 nt, Artificial Sequence
  Synthetic
uacucccaucucuccaccac

SEQ ID NO: 45219 - RNA, 21 nt, Artificial Sequence
  Synthetic
cuacucccaucucuccaccac

SEQ ID NO: 45220 - RNA, 22 nt, Artificial Sequence
  Synthetic
ccuacucccaucucuccaccac

SEQ ID NO: 45221 - RNA, 23 nt, Artificial Sequence
  Synthetic
gccuacucccaucucuccaccac

SEQ ID NO: 45222 - RNA, 24 nt, Artificial Sequence
  Synthetic
agccuacucccaucucuccaccac

SEQ ID NO: 45223 - RNA, 18 nt, Artificial Sequence
  Synthetic
guugggguacuuugccac

SEQ ID NO: 45224 - RNA, 19 nt, Artificial Sequence
  Synthetic
aguugggguacuuugccac

SEQ ID NO: 45225 - RNA, 20 nt, Artificial Sequence
  Synthetic
aaguugggguacuuugccac

SEQ ID NO: 45226 - RNA, 21 nt, Artificial Sequence
  Synthetic
gaaguugggguacuuugccac

SEQ ID NO: 45227 - RNA, 22 nt, Artificial Sequence
  Synthetic
ggaaguugggguacuuugccac

SEQ ID NO: 45228 - RNA, 23 nt, Artificial Sequence
  Synthetic
uggaaguugggguacuuugccac

SEQ ID NO: 45229 - RNA, 24 nt, Artificial Sequence
  Synthetic
uuggaaguugggguacuuugccac

SEQ ID NO: 45230 - RNA, 18 nt, Artificial Sequence
  Synthetic
ccggguucaccccuccac

SEQ ID NO: 45231 - RNA, 19 nt, Artificial Sequence
  Synthetic
cccggguucaccccuccac

SEQ ID NO: 45232 - RNA, 20 nt, Artificial Sequence
  Synthetic
acccggguucaccccuccac

SEQ ID NO: 45233 - RNA, 18 nt, Artificial Sequence
  Synthetic
cgccucaccauacagcac

SEQ ID NO: 45234 - RNA, 19 nt, Artificial Sequence
  Synthetic
ucgccucaccauacagcac

SEQ ID NO: 45235 - RNA, 20 nt, Artificial Sequence
  Synthetic
uucgccucaccauacagcac

SEQ ID NO: 45236 - RNA, 21 nt, Artificial Sequence
  Synthetic
guucgccucaccauacagcac

SEQ ID NO: 45237 - RNA, 22 nt, Artificial Sequence
  Synthetic
uguucgccucaccauacagcac

SEQ ID NO: 45238 - RNA, 23 nt, Artificial Sequence
  Synthetic
uuguucgccucaccauacagcac

SEQ ID NO: 45239 - RNA, 24 nt, Artificial Sequence
  Synthetic
auuguucgccucaccauacagcac

SEQ ID NO: 45240 - RNA, 18 nt, Artificial Sequence
  Synthetic
cccucagucucagggcac

SEQ ID NO: 45241 - RNA, 19 nt, Artificial Sequence
  Synthetic
gcccucagucucagggcac

SEQ ID NO: 45242 - RNA, 20 nt, Artificial Sequence
  Synthetic
agcccucagucucagggcac

SEQ ID NO: 45243 - RNA, 21 nt, Artificial Sequence
  Synthetic
gagcccucagucucagggcac

SEQ ID NO: 45244 - RNA, 22 nt, Artificial Sequence
  Synthetic
ggagcccucagucucagggcac

SEQ ID NO: 45245 - RNA, 23 nt, Artificial Sequence
  Synthetic
uggagcccucagucucagggcac

SEQ ID NO: 45246 - RNA, 24 nt, Artificial Sequence
  Synthetic
guggagcccucagucucagggcac

SEQ ID NO: 45247 - RNA, 18 nt, Artificial Sequence
  Synthetic
gaacauggagaacaucac

SEQ ID NO: 45248 - RNA, 19 nt, Artificial Sequence
  Synthetic
cgaacauggagaacaucac

SEQ ID NO: 45249 - RNA, 20 nt, Artificial Sequence
  Synthetic
ccgaacauggagaacaucac

SEQ ID NO: 45250 - RNA, 21 nt, Artificial Sequence
  Synthetic
accgaacauggagaacaucac

SEQ ID NO: 45251 - RNA, 22 nt, Artificial Sequence
  Synthetic
caccgaacauggagaacaucac

SEQ ID NO: 45252 - RNA, 23 nt, Artificial Sequence
  Synthetic
gcaccgaacauggagaacaucac

SEQ ID NO: 45253 - RNA, 24 nt, Artificial Sequence
  Synthetic
ugcaccgaacauggagaacaucac

SEQ ID NO: 45254 - RNA, 18 nt, Artificial Sequence
  Synthetic
auuugugggcccucucac

SEQ ID NO: 45255 - RNA, 19 nt, Artificial Sequence
  Synthetic
aauuugugggcccucucac

SEQ ID NO: 45256 - RNA, 20 nt, Artificial Sequence
  Synthetic
caauuugugggcccucucac

SEQ ID NO: 45257 - RNA, 21 nt, Artificial Sequence
  Synthetic
acaauuugugggcccucucac

SEQ ID NO: 45258 - RNA, 22 nt, Artificial Sequence
  Synthetic
aacaauuugugggcccucucac

SEQ ID NO: 45259 - RNA, 23 nt, Artificial Sequence
  Synthetic
gaacaauuugugggcccucucac

SEQ ID NO: 45260 - RNA, 24 nt, Artificial Sequence
  Synthetic
ugaacaauuugugggcccucucac

SEQ ID NO: 45261 - RNA, 18 nt, Artificial Sequence
  Synthetic
ggccuuuuuggcuuagac

SEQ ID NO: 45262 - RNA, 19 nt, Artificial Sequence
  Synthetic
uggccuuuuuggcuuagac

SEQ ID NO: 45263 - RNA, 20 nt, Artificial Sequence
  Synthetic
auggccuuuuuggcuuagac

SEQ ID NO: 45264 - RNA, 21 nt, Artificial Sequence
  Synthetic
uauggccuuuuuggcuuagac

SEQ ID NO: 45265 - RNA, 22 nt, Artificial Sequence
  Synthetic
auauggccuuuuuggcuuagac

SEQ ID NO: 45266 - RNA, 23 nt, Artificial Sequence
  Synthetic
cauauggccuuuuuggcuuagac

SEQ ID NO: 45267 - RNA, 24 nt, Artificial Sequence
  Synthetic
ccauauggccuuuuuggcuuagac

SEQ ID NO: 45268 - RNA, 18 nt, Artificial Sequence
  Synthetic
agacuacuguuguuagac

SEQ ID NO: 45269 - RNA, 19 nt, Artificial Sequence
  Synthetic
gagacuacuguuguuagac

SEQ ID NO: 45270 - RNA, 20 nt, Artificial Sequence
  Synthetic
ggagacuacuguuguuagac

SEQ ID NO: 45271 - RNA, 21 nt, Artificial Sequence
  Synthetic
cggagacuacuguuguuagac

SEQ ID NO: 45272 - RNA, 22 nt, Artificial Sequence
  Synthetic
ccggagacuacuguuguuagac

SEQ ID NO: 45273 - RNA, 23 nt, Artificial Sequence
  Synthetic
uccggagacuacuguuguuagac

SEQ ID NO: 45274 - RNA, 24 nt, Artificial Sequence
  Synthetic
uuccggagacuacuguuguuagac

SEQ ID NO: 45275 - RNA, 18 nt, Artificial Sequence
  Synthetic
ucugccguuccugccgac

SEQ ID NO: 45276 - RNA, 19 nt, Artificial Sequence
  Synthetic
gucugccguuccugccgac

SEQ ID NO: 45277 - RNA, 20 nt, Artificial Sequence
  Synthetic
cgucugccguuccugccgac

SEQ ID NO: 45278 - RNA, 21 nt, Artificial Sequence
  Synthetic
ccgucugccguuccugccgac

SEQ ID NO: 45279 - RNA, 22 nt, Artificial Sequence
  Synthetic
uccgucugccguuccugccgac

SEQ ID NO: 45280 - RNA, 23 nt, Artificial Sequence
  Synthetic
cuccgucugccguuccugccgac

SEQ ID NO: 45281 - RNA, 24 nt, Artificial Sequence
  Synthetic
ucuccgucugccguuccugccgac

SEQ ID NO: 45282 - RNA, 18 nt, Artificial Sequence
  Synthetic
cuggggugaguugaugac

SEQ ID NO: 45283 - RNA, 19 nt, Artificial Sequence
  Synthetic
gcuggggugaguugaugac

SEQ ID NO: 45284 - RNA, 20 nt, Artificial Sequence
  Synthetic
ugcuggggugaguugaugac

SEQ ID NO: 45285 - RNA, 21 nt, Artificial Sequence
  Synthetic
gugcuggggugaguugaugac

SEQ ID NO: 45286 - RNA, 22 nt, Artificial Sequence
  Synthetic
ugugcuggggugaguugaugac

SEQ ID NO: 45287 - RNA, 23 nt, Artificial Sequence
  Synthetic
cugugcuggggugaguugaugac

SEQ ID NO: 45288 - RNA, 24 nt, Artificial Sequence
  Synthetic
  misc_feature (1)..(1): n is a, c, g, or u
ncugugcuggggugaguugaugac

SEQ ID NO: 45289 - RNA, 18 nt, Artificial Sequence
  Synthetic
  misc_feature (7)..(7): n is a, c, g, or u
accgggnuggagaaauac

SEQ ID NO: 45290 - RNA, 19 nt, Artificial Sequence
  Synthetic
  misc_feature (8)..(8): n is a, c, g, or u
aaccgggnuggagaaauac

SEQ ID NO: 45291 - RNA, 20 nt, Artificial Sequence
  Synthetic
  misc_feature (9)..(9): n is a, c, g, or u
caaccgggnuggagaaauac

SEQ ID NO: 45292 - RNA, 21 nt, Artificial Sequence
  Synthetic
  misc_feature (10)..(10): n is a, c, g, or u
acaaccgggnuggagaaauac

SEQ ID NO: 45293 - RNA, 22 nt, Artificial Sequence
  Synthetic
  misc_feature (11)..(11): n is a, c, g, or u
aacaaccgggnuggagaaauac

SEQ ID NO: 45294 - RNA, 23 nt, Artificial Sequence
  Synthetic
  misc_feature (12)..(12): n is a, c, g, or u
caacaaccgggnuggagaaauac

SEQ ID NO: 45295 - RNA, 24 nt, Artificial Sequence
  Synthetic
  misc_feature (13)..(13): n is a, c, g, or u
ucaacaaccgggnuggagaaauac

SEQ ID NO: 45296 - RNA, 18 nt, Artificial Sequence
  Synthetic
uuucucuguaaacaauac

SEQ ID NO: 45297 - RNA, 19 nt, Artificial Sequence
  Synthetic
cuuucucuguaaacaauac

SEQ ID NO: 45298 - RNA, 20 nt, Artificial Sequence
  Synthetic
ccuuucucuguaaacaauac

SEQ ID NO: 45299 - RNA, 21 nt, Artificial Sequence
  Synthetic
gccuuucucuguaaacaauac

SEQ ID NO: 45300 - RNA, 22 nt, Artificial Sequence
  Synthetic
ggccuuucucuguaaacaauac

SEQ ID NO: 45301 - RNA, 23 nt, Artificial Sequence
  Synthetic
aggccuuucucuguaaacaauac

SEQ ID NO: 45302 - RNA, 24 nt, Artificial Sequence
  Synthetic
aaggccuuucucuguaaacaauac

SEQ ID NO: 45303 - RNA, 18 nt, Artificial Sequence
  Synthetic
caagaauccucacaauac

SEQ ID NO: 45304 - RNA, 19 nt, Artificial Sequence
  Synthetic
acaagaauccucacaauac

SEQ ID NO: 45305 - RNA, 20 nt, Artificial Sequence
  Synthetic
gacaagaauccucacaauac

SEQ ID NO: 45306 - RNA, 21 nt, Artificial Sequence
  Synthetic
ugacaagaauccucacaauac

SEQ ID NO: 45307 - RNA, 22 nt, Artificial Sequence
  Synthetic
uugacaagaauccucacaauac

SEQ ID NO: 45308 - RNA, 23 nt, Artificial Sequence
  Synthetic
guugacaagaauccucacaauac

SEQ ID NO: 45309 - RNA, 24 nt, Artificial Sequence
  Synthetic
uguugacaagaauccucacaauac

SEQ ID NO: 45310 - RNA, 18 nt, Artificial Sequence
  Synthetic
uccucugccgauccauac

SEQ ID NO: 45311 - RNA, 19 nt, Artificial Sequence
  Synthetic
cuccucugccgauccauac

SEQ ID NO: 45312 - RNA, 20 nt, Artificial Sequence
  Synthetic
gcuccucugccgauccauac

SEQ ID NO: 45313 - RNA, 21 nt, Artificial Sequence
  Synthetic
ggcuccucugccgauccauac

SEQ ID NO: 45314 - RNA, 22 nt, Artificial Sequence
  Synthetic
uggcuccucugccgauccauac

SEQ ID NO: 45315 - RNA, 23 nt, Artificial Sequence
  Synthetic
guggcuccucugccgauccauac

SEQ ID NO: 45316 - RNA, 24 nt, Artificial Sequence
  Synthetic
uguggcuccucugccgauccauac

SEQ ID NO: 45317 - RNA, 18 nt, Artificial Sequence
  Synthetic
uugugggucaccauauac

SEQ ID NO: 45318 - RNA, 19 nt, Artificial Sequence
  Synthetic
uuugugggucaccauauac

SEQ ID NO: 45319 - RNA, 20 nt, Artificial Sequence
  Synthetic
uuuugugggucaccauauac

SEQ ID NO: 45320 - RNA, 21 nt, Artificial Sequence
  Synthetic
auuuugugggucaccauauac

SEQ ID NO: 45321 - RNA, 22 nt, Artificial Sequence
  Synthetic
cauuuugugggucaccauauac

SEQ ID NO: 45322 - RNA, 23 nt, Artificial Sequence
  Synthetic
ucauuuugugggucaccauauac

SEQ ID NO: 45323 - RNA, 24 nt, Artificial Sequence
  Synthetic
uucauuuugugggucaccauauac

SEQ ID NO: 45324 - RNA, 18 nt, Artificial Sequence
  Synthetic
uaaagaauuuggagcuac

SEQ ID NO: 45325 - RNA, 19 nt, Artificial Sequence
  Synthetic
auaaagaauuuggagcuac

SEQ ID NO: 45326 - RNA, 20 nt, Artificial Sequence
  Synthetic
uauaaagaauuuggagcuac

SEQ ID NO: 45327 - RNA, 21 nt, Artificial Sequence
  Synthetic
uuauaaagaauuuggagcuac

SEQ ID NO: 45328 - RNA, 22 nt, Artificial Sequence
  Synthetic
cuuauaaagaauuuggagcuac

SEQ ID NO: 45329 - RNA, 23 nt, Artificial Sequence
  Synthetic
ccuuauaaagaauuuggagcuac

SEQ ID NO: 45330 - RNA, 24 nt, Artificial Sequence
  Synthetic
cccuuauaaagaauuuggagcuac

SEQ ID NO: 45331 - RNA, 18 nt, Artificial Sequence
  Synthetic
accgcuucagcuuuguac

SEQ ID NO: 45332 - RNA, 19 nt, Artificial Sequence
  Synthetic
caccgcuucagcuuuguac

SEQ ID NO: 45333 - RNA, 20 nt, Artificial Sequence
  Synthetic
acaccgcuucagcuuuguac

SEQ ID NO: 45334 - RNA, 21 nt, Artificial Sequence
  Synthetic
gacaccgcuucagcuuuguac

SEQ ID NO: 45335 - RNA, 22 nt, Artificial Sequence
  Synthetic
cgacaccgcuucagcuuuguac

SEQ ID NO: 45336 - RNA, 23 nt, Artificial Sequence
  Synthetic
ucgacaccgcuucagcuuuguac

SEQ ID NO: 45337 - RNA, 24 nt, Artificial Sequence
  Synthetic
cucgacaccgcuucagcuuuguac

SEQ ID NO: 45338 - RNA, 18 nt, Artificial Sequence
  Synthetic
uucaccucugcacguuac

SEQ ID NO: 45339 - RNA, 19 nt, Artificial Sequence
  Synthetic
cuucaccucugcacguuac

SEQ ID NO: 45340 - RNA, 20 nt, Artificial Sequence
  Synthetic
gcuucaccucugcacguuac

SEQ ID NO: 45341 - RNA, 21 nt, Artificial Sequence
  Synthetic
cgcuucaccucugcacguuac

SEQ ID NO: 45342 - RNA, 22 nt, Artificial Sequence
  Synthetic
ucgcuucaccucugcacguuac

SEQ ID NO: 45343 - RNA, 23 nt, Artificial Sequence
  Synthetic
uucgcuucaccucugcacguuac

SEQ ID NO: 45344 - RNA, 24 nt, Artificial Sequence
  Synthetic
cuucgcuucaccucugcacguuac

SEQ ID NO: 45345 - RNA, 18 nt, Artificial Sequence
  Synthetic
auguugcuguacaaaacc

SEQ ID NO: 45346 - RNA, 19 nt, Artificial Sequence
  Synthetic
cauguugcuguacaaaacc

SEQ ID NO: 45347 - RNA, 20 nt, Artificial Sequence
  Synthetic
ucauguugcuguacaaaacc

SEQ ID NO: 45348 - RNA, 21 nt, Artificial Sequence
  Synthetic
cucauguugcuguacaaaacc

SEQ ID NO: 45349 - RNA, 22 nt, Artificial Sequence
  Synthetic
ccucauguugcuguacaaaacc

SEQ ID NO: 45350 - RNA, 23 nt, Artificial Sequence
  Synthetic
cccucauguugcuguacaaaacc

SEQ ID NO: 45351 - RNA, 24 nt, Artificial Sequence
  Synthetic
ucccucauguugcuguacaaaacc

SEQ ID NO: 45352 - RNA, 18 nt, Artificial Sequence
  Synthetic
uacucccaucucuccacc

SEQ ID NO: 45353 - RNA, 19 nt, Artificial Sequence
  Synthetic
cuacucccaucucuccacc

SEQ ID NO: 45354 - RNA, 20 nt, Artificial Sequence
  Synthetic
ccuacucccaucucuccacc

SEQ ID NO: 45355 - RNA, 21 nt, Artificial Sequence
  Synthetic
gccuacucccaucucuccacc

SEQ ID NO: 45356 - RNA, 22 nt, Artificial Sequence
  Synthetic
agccuacucccaucucuccacc

SEQ ID NO: 45357 - RNA, 23 nt, Artificial Sequence
  Synthetic
cagccuacucccaucucuccacc

SEQ ID NO: 45358 - RNA, 24 nt, Artificial Sequence
  Synthetic
gcagccuacucccaucucuccacc

SEQ ID NO: 45359 - RNA, 18 nt, Artificial Sequence
  Synthetic
uccuccugcuuauagacc

SEQ ID NO: 45360 - RNA, 19 nt, Artificial Sequence
  Synthetic
cuccuccugcuuauagacc

SEQ ID NO: 45361 - RNA, 20 nt, Artificial Sequence
  Synthetic
acuccuccugcuuauagacc

SEQ ID NO: 45362 - RNA, 18 nt, Artificial Sequence
  Synthetic
cugccguuccugccgacc

SEQ ID NO: 45363 - RNA, 19 nt, Artificial Sequence
  Synthetic
ucugccguuccugccgacc

SEQ ID NO: 45364 - RNA, 20 nt, Artificial Sequence
  Synthetic
gucugccguuccugccgacc

SEQ ID NO: 45365 - RNA, 21 nt, Artificial Sequence
  Synthetic
cgucugccguuccugccgacc

SEQ ID NO: 45366 - RNA, 22 nt, Artificial Sequence
  Synthetic
ccgucugccguuccugccgacc

SEQ ID NO: 45367 - RNA, 23 nt, Artificial Sequence
  Synthetic
uccgucugccguuccugccgacc

SEQ ID NO: 45368 - RNA, 24 nt, Artificial Sequence
  Synthetic
cuccgucugccguuccugccgacc

SEQ ID NO: 45369 - RNA, 18 nt, Artificial Sequence
  Synthetic
ucaaucccaaaaaggacc

SEQ ID NO: 45370 - RNA, 19 nt, Artificial Sequence
  Synthetic
uucaaucccaaaaaggacc

SEQ ID NO: 45371 - RNA, 20 nt, Artificial Sequence
  Synthetic
cuucaaucccaaaaaggacc

SEQ ID NO: 45372 - RNA, 21 nt, Artificial Sequence
  Synthetic
acuucaaucccaaaaaggacc

SEQ ID NO: 45373 - RNA, 22 nt, Artificial Sequence
  Synthetic
gacuucaaucccaaaaaggacc

SEQ ID NO: 45374 - RNA, 23 nt, Artificial Sequence
  Synthetic
ggacuucaaucccaaaaaggacc

SEQ ID NO: 45375 - RNA, 24 nt, Artificial Sequence
  Synthetic
gggacuucaaucccaaaaaggacc

SEQ ID NO: 45376 - RNA, 18 nt, Artificial Sequence
  Synthetic
gggcuuucgcaaaauacc

SEQ ID NO: 45377 - RNA, 19 nt, Artificial Sequence
  Synthetic
ugggcuuucgcaaaauacc

SEQ ID NO: 45378 - RNA, 20 nt, Artificial Sequence
  Synthetic
uugggcuuucgcaaaauacc

SEQ ID NO: 45379 - RNA, 21 nt, Artificial Sequence
  Synthetic
cuugggcuuucgcaaaauacc

SEQ ID NO: 45380 - RNA, 22 nt, Artificial Sequence
  Synthetic
ucuugggcuuucgcaaaauacc

SEQ ID NO: 45381 - RNA, 23 nt, Artificial Sequence
  Synthetic
aucuugggcuuucgcaaaauacc

SEQ ID NO: 45382 - RNA, 24 nt, Artificial Sequence
  Synthetic
caucuugggcuuucgcaaaauacc

SEQ ID NO: 45383 - RNA, 18 nt, Artificial Sequence
  Synthetic
aagaauccucacaauacc

SEQ ID NO: 45384 - RNA, 19 nt, Artificial Sequence
  Synthetic
caagaauccucacaauacc

SEQ ID NO: 45385 - RNA, 20 nt, Artificial Sequence
  Synthetic
acaagaauccucacaauacc

SEQ ID NO: 45386 - RNA, 21 nt, Artificial Sequence
  Synthetic
gacaagaauccucacaauacc

SEQ ID NO: 45387 - RNA, 22 nt, Artificial Sequence
  Synthetic
ugacaagaauccucacaauacc

SEQ ID NO: 45388 - RNA, 23 nt, Artificial Sequence
  Synthetic
uugacaagaauccucacaauacc

SEQ ID NO: 45389 - RNA, 24 nt, Artificial Sequence
  Synthetic
guugacaagaauccucacaauacc

SEQ ID NO: 45390 - RNA, 18 nt, Artificial Sequence
  Synthetic
cucuacuaaauauuuacc

SEQ ID NO: 45391 - RNA, 19 nt, Artificial Sequence
  Synthetic
acucuacuaaauauuuacc

SEQ ID NO: 45392 - RNA, 20 nt, Artificial Sequence
  Synthetic
aacucuacuaaauauuuacc

SEQ ID NO: 45393 - RNA, 21 nt, Artificial Sequence
  Synthetic
aaacucuacuaaauauuuacc

SEQ ID NO: 45394 - RNA, 22 nt, Artificial Sequence
  Synthetic
caaacucuacuaaauauuuacc

SEQ ID NO: 45395 - RNA, 23 nt, Artificial Sequence
  Synthetic
ccaaacucuacuaaauauuuacc

SEQ ID NO: 45396 - RNA, 24 nt, Artificial Sequence
  Synthetic
cccaaacucuacuaaauauuuacc

SEQ ID NO: 45397 - RNA, 18 nt, Artificial Sequence
  Synthetic
accaccaguacgggaccc

SEQ ID NO: 45398 - RNA, 19 nt, Artificial Sequence
  Synthetic
gaccaccaguacgggaccc

SEQ ID NO: 45399 - RNA, 20 nt, Artificial Sequence
  Synthetic
cgaccaccaguacgggaccc

SEQ ID NO: 45400 - RNA, 21 nt, Artificial Sequence
  Synthetic
ucgaccaccaguacgggaccc

SEQ ID NO: 45401 - RNA, 22 nt, Artificial Sequence
  Synthetic
cucgaccaccaguacgggaccc

SEQ ID NO: 45402 - RNA, 23 nt, Artificial Sequence
  Synthetic
ccucgaccaccaguacgggaccc

SEQ ID NO: 45403 - RNA, 24 nt, Artificial Sequence
  Synthetic
uccucgaccaccaguacgggaccc

SEQ ID NO: 45404 - RNA, 18 nt, Artificial Sequence
  Synthetic
gacauuauuuacauaccc

SEQ ID NO: 45405 - RNA, 19 nt, Artificial Sequence
  Synthetic
agacauuauuuacauaccc

SEQ ID NO: 45406 - RNA, 20 nt, Artificial Sequence
  Synthetic
cagacauuauuuacauaccc

SEQ ID NO: 45407 - RNA, 21 nt, Artificial Sequence
  Synthetic
ccagacauuauuuacauaccc

SEQ ID NO: 45408 - RNA, 22 nt, Artificial Sequence
  Synthetic
accagacauuauuuacauaccc

SEQ ID NO: 45409 - RNA, 23 nt, Artificial Sequence
  Synthetic
gaccagacauuauuuacauaccc

SEQ ID NO: 45410 - RNA, 24 nt, Artificial Sequence
  Synthetic
agaccagacauuauuuacauaccc

SEQ ID NO: 45411 - RNA, 18 nt, Artificial Sequence
  Synthetic
acgaagaggcaggucccc

SEQ ID NO: 45412 - RNA, 19 nt, Artificial Sequence
  Synthetic
gacgaagaggcaggucccc

SEQ ID NO: 45413 - RNA, 20 nt, Artificial Sequence
  Synthetic
agacgaagaggcaggucccc

SEQ ID NO: 45414 - RNA, 21 nt, Artificial Sequence
  Synthetic
uagacgaagaggcaggucccc

SEQ ID NO: 45415 - RNA, 22 nt, Artificial Sequence
  Synthetic
uuagacgaagaggcaggucccc

SEQ ID NO: 45416 - RNA, 23 nt, Artificial Sequence
  Synthetic
guuagacgaagaggcaggucccc

SEQ ID NO: 45417 - RNA, 24 nt, Artificial Sequence
  Synthetic
uguuagacgaagaggcaggucccc

SEQ ID NO: 45418 - RNA, 18 nt, Artificial Sequence
  Synthetic
gauugggacuucaauccc

SEQ ID NO: 45419 - RNA, 19 nt, Artificial Sequence
  Synthetic
agauugggacuucaauccc

SEQ ID NO: 45420 - RNA, 20 nt, Artificial Sequence
  Synthetic
cagauugggacuucaauccc

SEQ ID NO: 45421 - RNA, 21 nt, Artificial Sequence
  Synthetic
ccagauugggacuucaauccc

SEQ ID NO: 45422 - RNA, 22 nt, Artificial Sequence
  Synthetic
uccagauugggacuucaauccc

SEQ ID NO: 45423 - RNA, 23 nt, Artificial Sequence
  Synthetic
auccagauugggacuucaauccc

SEQ ID NO: 45424 - RNA, 24 nt, Artificial Sequence
  Synthetic
aauccagauugggacuucaauccc

SEQ ID NO: 45425 - RNA, 18 nt, Artificial Sequence
  Synthetic
guccuuuguuuacguccc

SEQ ID NO: 45426 - RNA, 19 nt, Artificial Sequence
  Synthetic
cguccuuuguuuacguccc

SEQ ID NO: 45427 - RNA, 20 nt, Artificial Sequence
  Synthetic
acguccuuuguuuacguccc

SEQ ID NO: 45428 - RNA, 21 nt, Artificial Sequence
  Synthetic
gacguccuuuguuuacguccc

SEQ ID NO: 45429 - RNA, 22 nt, Artificial Sequence
  Synthetic
ggacguccuuuguuuacguccc

SEQ ID NO: 45430 - RNA, 23 nt, Artificial Sequence
  Synthetic
gggacguccuuuguuuacguccc

SEQ ID NO: 45431 - RNA, 24 nt, Artificial Sequence
  Synthetic
cgggacguccuuuguuuacguccc

SEQ ID NO: 45432 - RNA, 18 nt, Artificial Sequence
  Synthetic
gacgaagaggcagguccc

SEQ ID NO: 45433 - RNA, 19 nt, Artificial Sequence
  Synthetic
agacgaagaggcagguccc

SEQ ID NO: 45434 - RNA, 20 nt, Artificial Sequence
  Synthetic
uagacgaagaggcagguccc

SEQ ID NO: 45435 - RNA, 21 nt, Artificial Sequence
  Synthetic
uuagacgaagaggcagguccc

SEQ ID NO: 45436 - RNA, 22 nt, Artificial Sequence
  Synthetic
guuagacgaagaggcagguccc

SEQ ID NO: 45437 - RNA, 23 nt, Artificial Sequence
  Synthetic
uguuagacgaagaggcagguccc

SEQ ID NO: 45438 - RNA, 24 nt, Artificial Sequence
  Synthetic
uuguuagacgaagaggcagguccc

SEQ ID NO: 45439 - RNA, 18 nt, Artificial Sequence
  Synthetic
  misc_feature (6)..(6): n is a, c, g, or u
uguccnacuguucaagcc

SEQ ID NO: 45440 - RNA, 19 nt, Artificial Sequence
  Synthetic
  misc_feature (7)..(7): n is a, c, g, or u
auguccnacuguucaagcc

SEQ ID NO: 45441 - RNA, 20 nt, Artificial Sequence
  Synthetic
  misc_feature (8)..(8): n is a, c, g, or u
cauguccnacuguucaagcc

SEQ ID NO: 45442 - RNA, 21 nt, Artificial Sequence
  Synthetic
  misc_feature (9)..(9): n is a, c, g, or u
ucauguccnacuguucaagcc

SEQ ID NO: 45443 - RNA, 22 nt, Artificial Sequence
  Synthetic
  misc_feature (10)..(10): n is a, c, g, or u
uucauguccnacuguucaagcc

SEQ ID NO: 45444 - RNA, 23 nt, Artificial Sequence
  Synthetic
  misc_feature (11)..(11): n is a, c, g, or u
guucauguccnacuguucaagcc

SEQ ID NO: 45445 - RNA, 24 nt, Artificial Sequence
  Synthetic
  misc_feature (12)..(12): n is a, c, g, or u
uguucauguccnacuguucaagcc

SEQ ID NO: 45446 - RNA, 18 nt, Artificial Sequence
  Synthetic
aagguaggaguuggagcc

SEQ ID NO: 45447 - RNA, 19 nt, Artificial Sequence
  Synthetic
caagguaggaguuggagcc

SEQ ID NO: 45448 - RNA, 20 nt, Artificial Sequence
  Synthetic
acaagguaggaguuggagcc

SEQ ID NO: 45449 - RNA, 21 nt, Artificial Sequence
  Synthetic
aacaagguaggaguuggagcc

SEQ ID NO: 45450 - RNA, 22 nt, Artificial Sequence
  Synthetic
caacaagguaggaguuggagcc

SEQ ID NO: 45451 - RNA, 23 nt, Artificial Sequence
  Synthetic
ccaacaagguaggaguuggagcc

SEQ ID NO: 45452 - RNA, 24 nt, Artificial Sequence
  Synthetic
gccaacaagguaggaguuggagcc

SEQ ID NO: 45453 - RNA, 18 nt, Artificial Sequence
  Synthetic
cguuacauggaaaccgcc

SEQ ID NO: 45454 - RNA, 19 nt, Artificial Sequence
  Synthetic
acguuacauggaaaccgcc

SEQ ID NO: 45455 - RNA, 20 nt, Artificial Sequence
  Synthetic
cacguuacauggaaaccgcc

SEQ ID NO: 45456 - RNA, 18 nt, Artificial Sequence
  Synthetic
gacccuuggccagaggcc

SEQ ID NO: 45457 - RNA, 19 nt, Artificial Sequence
  Synthetic
ggacccuuggccagaggcc

SEQ ID NO: 45458 - RNA, 20 nt, Artificial Sequence
  Synthetic
aggacccuuggccagaggcc

SEQ ID NO: 45459 - RNA, 21 nt, Artificial Sequence
  Synthetic
aaggacccuuggccagaggcc

SEQ ID NO: 45460 - RNA, 22 nt, Artificial Sequence
  Synthetic
aaaggacccuuggccagaggcc

SEQ ID NO: 45461 - RNA, 23 nt, Artificial Sequence
  Synthetic
aaaaggacccuuggccagaggcc

SEQ ID NO: 45462 - RNA, 24 nt, Artificial Sequence
  Synthetic
aaaaaggacccuuggccagaggcc

SEQ ID NO: 45463 - RNA, 18 nt, Artificial Sequence
  Synthetic
caaaaaggacccuuggcc

SEQ ID NO: 45464 - RNA, 19 nt, Artificial Sequence
  Synthetic
ccaaaaaggacccuuggcc

SEQ ID NO: 45465 - RNA, 20 nt, Artificial Sequence
  Synthetic
cccaaaaaggacccuuggcc

SEQ ID NO: 45466 - RNA, 21 nt, Artificial Sequence
  Synthetic
ucccaaaaaggacccuuggcc

SEQ ID NO: 45467 - RNA, 22 nt, Artificial Sequence
  Synthetic
aucccaaaaaggacccuuggcc

SEQ ID NO: 45468 - RNA, 23 nt, Artificial Sequence
  Synthetic
aaucccaaaaaggacccuuggcc

SEQ ID NO: 45469 - RNA, 24 nt, Artificial Sequence
  Synthetic
caaucccaaaaaggacccuuggcc

SEQ ID NO: 45470 - RNA, 18 nt, Artificial Sequence
  Synthetic
acugguuggggcuuggcc

SEQ ID NO: 45471 - RNA, 19 nt, Artificial Sequence
  Synthetic
cacugguuggggcuuggcc

SEQ ID NO: 45472 - RNA, 20 nt, Artificial Sequence
  Synthetic
ccacugguuggggcuuggcc

SEQ ID NO: 45473 - RNA, 18 nt, Artificial Sequence
  Synthetic
cacacuaacaacuuugcc

SEQ ID NO: 45474 - RNA, 19 nt, Artificial Sequence
  Synthetic
gcacacuaacaacuuugcc

SEQ ID NO: 45475 - RNA, 20 nt, Artificial Sequence
  Synthetic
ggcacacuaacaacuuugcc

SEQ ID NO: 45476 - RNA, 21 nt, Artificial Sequence
  Synthetic
gggcacacuaacaacuuugcc

SEQ ID NO: 45477 - RNA, 22 nt, Artificial Sequence
  Synthetic
agggcacacuaacaacuuugcc

SEQ ID NO: 45478 - RNA, 23 nt, Artificial Sequence
  Synthetic
cagggcacacuaacaacuuugcc

SEQ ID NO: 45479 - RNA, 24 nt, Artificial Sequence
  Synthetic
ucagggcacacuaacaacuuugcc

SEQ ID NO: 45480 - RNA, 18 nt, Artificial Sequence
  Synthetic
aaguugggguacuuugcc

SEQ ID NO: 45481 - RNA, 19 nt, Artificial Sequence
  Synthetic
gaaguugggguacuuugcc

SEQ ID NO: 45482 - RNA, 20 nt, Artificial Sequence
  Synthetic
ggaaguugggguacuuugcc

SEQ ID NO: 45483 - RNA, 21 nt, Artificial Sequence
  Synthetic
uggaaguugggguacuuugcc

SEQ ID NO: 45484 - RNA, 22 nt, Artificial Sequence
  Synthetic
uuggaaguugggguacuuugcc

SEQ ID NO: 45485 - RNA, 23 nt, Artificial Sequence
  Synthetic
auuggaaguugggguacuuugcc

SEQ ID NO: 45486 - RNA, 24 nt, Artificial Sequence
  Synthetic
aauuggaaguugggguacuuugcc

SEQ ID NO: 45487 - RNA, 18 nt, Artificial Sequence
  Synthetic
ccuuuccaccagcaaucc

SEQ ID NO: 45488 - RNA, 19 nt, Artificial Sequence
  Synthetic
accuuuccaccagcaaucc

SEQ ID NO: 45489 - RNA, 20 nt, Artificial Sequence
  Synthetic
aaccuuuccaccagcaaucc

SEQ ID NO: 45490 - RNA, 21 nt, Artificial Sequence
  Synthetic
gaaccuuuccaccagcaaucc

SEQ ID NO: 45491 - RNA, 22 nt, Artificial Sequence
  Synthetic
agaaccuuuccaccagcaaucc

SEQ ID NO: 45492 - RNA, 23 nt, Artificial Sequence
  Synthetic
aagaaccuuuccaccagcaaucc

SEQ ID NO: 45493 - RNA, 24 nt, Artificial Sequence
  Synthetic
aaagaaccuuuccaccagcaaucc

SEQ ID NO: 45494 - RNA, 18 nt, Artificial Sequence
  Synthetic
agauugggacuucaaucc

SEQ ID NO: 45495 - RNA, 19 nt, Artificial Sequence
  Synthetic
cagauugggacuucaaucc

SEQ ID NO: 45496 - RNA, 20 nt, Artificial Sequence
  Synthetic
ccagauugggacuucaaucc

SEQ ID NO: 45497 - RNA, 21 nt, Artificial Sequence
  Synthetic
uccagauugggacuucaaucc

SEQ ID NO: 45498 - RNA, 22 nt, Artificial Sequence
  Synthetic
auccagauugggacuucaaucc

SEQ ID NO: 45499 - RNA, 23 nt, Artificial Sequence
  Synthetic
aauccagauugggacuucaaucc

SEQ ID NO: 45500 - RNA, 24 nt, Artificial Sequence
  Synthetic
caauccagauugggacuucaaucc

SEQ ID NO: 45501 - RNA, 18 nt, Artificial Sequence
  Synthetic
gcuuuguaccgggaaucc

SEQ ID NO: 45502 - RNA, 19 nt, Artificial Sequence
  Synthetic
agcuuuguaccgggaaucc

SEQ ID NO: 45503 - RNA, 20 nt, Artificial Sequence
  Synthetic
cagcuuuguaccgggaaucc

SEQ ID NO: 45504 - RNA, 21 nt, Artificial Sequence
  Synthetic
ucagcuuuguaccgggaaucc

SEQ ID NO: 45505 - RNA, 22 nt, Artificial Sequence
  Synthetic
uucagcuuuguaccgggaaucc

SEQ ID NO: 45506 - RNA, 23 nt, Artificial Sequence
  Synthetic
cuucagcuuuguaccgggaaucc

SEQ ID NO: 45507 - RNA, 24 nt, Artificial Sequence
  Synthetic
gcuucagcuuuguaccgggaaucc

SEQ ID NO: 45508 - RNA, 18 nt, Artificial Sequence
  Synthetic
cccgucagcgcugaaucc

SEQ ID NO: 45509 - RNA, 19 nt, Artificial Sequence
  Synthetic
ucccgucagcgcugaaucc

SEQ ID NO: 45510 - RNA, 20 nt, Artificial Sequence
  Synthetic
gucccgucagcgcugaaucc

SEQ ID NO: 45511 - RNA, 18 nt, Artificial Sequence
  Synthetic
uauaagagagaaacaucc

SEQ ID NO: 45512 - RNA, 19 nt, Artificial Sequence
  Synthetic
auauaagagagaaacaucc

SEQ ID NO: 45513 - RNA, 20 nt, Artificial Sequence
  Synthetic
uauauaagagagaaacaucc

SEQ ID NO: 45514 - RNA, 21 nt, Artificial Sequence
  Synthetic
cuauauaagagagaaacaucc

SEQ ID NO: 45515 - RNA, 22 nt, Artificial Sequence
  Synthetic
ucuauauaagagagaaacaucc

SEQ ID NO: 45516 - RNA, 23 nt, Artificial Sequence
  Synthetic
uucuauauaagagagaaacaucc

SEQ ID NO: 45517 - RNA, 24 nt, Artificial Sequence
  Synthetic
auucuauauaagagagaaacaucc

SEQ ID NO: 45518 - RNA, 18 nt, Artificial Sequence
  Synthetic
acuaagagacagucaucc

SEQ ID NO: 45519 - RNA, 19 nt, Artificial Sequence
  Synthetic
cacuaagagacagucaucc

SEQ ID NO: 45520 - RNA, 20 nt, Artificial Sequence
  Synthetic
ccacuaagagacagucaucc

SEQ ID NO: 45521 - RNA, 21 nt, Artificial Sequence
  Synthetic
accacuaagagacagucaucc

SEQ ID NO: 45522 - RNA, 22 nt, Artificial Sequence
  Synthetic
caccacuaagagacagucaucc

SEQ ID NO: 45523 - RNA, 23 nt, Artificial Sequence
  Synthetic
ccaccacuaagagacagucaucc

SEQ ID NO: 45524 - RNA, 24 nt, Artificial Sequence
  Synthetic
uccaccacuaagagacagucaucc

SEQ ID NO: 45525 - RNA, 18 nt, Artificial Sequence
  Synthetic
uaucaaaccguauuaucc

SEQ ID NO: 45526 - RNA, 19 nt, Artificial Sequence
  Synthetic
guaucaaaccguauuaucc

SEQ ID NO: 45527 - RNA, 20 nt, Artificial Sequence
  Synthetic
gguaucaaaccguauuaucc

SEQ ID NO: 45528 - RNA, 21 nt, Artificial Sequence
  Synthetic
agguaucaaaccguauuaucc

SEQ ID NO: 45529 - RNA, 22 nt, Artificial Sequence
  Synthetic
aagguaucaaaccguauuaucc

SEQ ID NO: 45530 - RNA, 23 nt, Artificial Sequence
  Synthetic
aaagguaucaaaccguauuaucc

SEQ ID NO: 45531 - RNA, 24 nt, Artificial Sequence
  Synthetic
caaagguaucaaaccguauuaucc

SEQ ID NO: 45532 - RNA, 18 nt, Artificial Sequence
  Synthetic
ccagcggacgaccccucc

SEQ ID NO: 45533 - RNA, 19 nt, Artificial Sequence
  Synthetic
uccagcggacgaccccucc

SEQ ID NO: 45534 - RNA, 20 nt, Artificial Sequence
  Synthetic
auccagcggacgaccccucc

SEQ ID NO: 45535 - RNA, 21 nt, Artificial Sequence
  Synthetic
aauccagcggacgaccccucc

SEQ ID NO: 45536 - RNA, 22 nt, Artificial Sequence
  Synthetic
gaauccagcggacgaccccucc

SEQ ID NO: 45537 - RNA, 23 nt, Artificial Sequence
  Synthetic
ugaauccagcggacgaccccucc

SEQ ID NO: 45538 - RNA, 24 nt, Artificial Sequence
  Synthetic
cugaauccagcggacgaccccucc

SEQ ID NO: 45539 - RNA, 18 nt, Artificial Sequence
  Synthetic
cucaccaaucuccugucc

SEQ ID NO: 45540 - RNA, 19 nt, Artificial Sequence
  Synthetic
acucaccaaucuccugucc

SEQ ID NO: 45541 - RNA, 20 nt, Artificial Sequence
  Synthetic
cacucaccaaucuccugucc

SEQ ID NO: 45542 - RNA, 21 nt, Artificial Sequence
  Synthetic
ucacucaccaaucuccugucc

SEQ ID NO: 45543 - RNA, 22 nt, Artificial Sequence
  Synthetic
aucacucaccaaucuccugucc

SEQ ID NO: 45544 - RNA, 23 nt, Artificial Sequence
  Synthetic
aaucacucaccaaucuccugucc

SEQ ID NO: 45545 - RNA, 24 nt, Artificial Sequence
  Synthetic
caaucacucaccaaucuccugucc

SEQ ID NO: 45546 - RNA, 18 nt, Artificial Sequence
  Synthetic
acaucacaucaggauucc

SEQ ID NO: 45547 - RNA, 19 nt, Artificial Sequence
  Synthetic
aacaucacaucaggauucc

SEQ ID NO: 45548 - RNA, 20 nt, Artificial Sequence
  Synthetic
gaacaucacaucaggauucc

SEQ ID NO: 45549 - RNA, 21 nt, Artificial Sequence
  Synthetic
agaacaucacaucaggauucc

SEQ ID NO: 45550 - RNA, 22 nt, Artificial Sequence
  Synthetic
gagaacaucacaucaggauucc

SEQ ID NO: 45551 - RNA, 23 nt, Artificial Sequence
  Synthetic
ggagaacaucacaucaggauucc

SEQ ID NO: 45552 - RNA, 24 nt, Artificial Sequence
  Synthetic
uggagaacaucacaucaggauucc

SEQ ID NO: 45553 - RNA, 18 nt, Artificial Sequence
  Synthetic
ucccaauguuaguauucc

SEQ ID NO: 45554 - RNA, 19 nt, Artificial Sequence
  Synthetic
uucccaauguuaguauucc

SEQ ID NO: 45555 - RNA, 20 nt, Artificial Sequence
  Synthetic
cuucccaauguuaguauucc

SEQ ID NO: 45556 - RNA, 21 nt, Artificial Sequence
  Synthetic
gcuucccaauguuaguauucc

SEQ ID NO: 45557 - RNA, 22 nt, Artificial Sequence
  Synthetic
agcuucccaauguuaguauucc

SEQ ID NO: 45558 - RNA, 23 nt, Artificial Sequence
  Synthetic
cagcuucccaauguuaguauucc

SEQ ID NO: 45559 - RNA, 24 nt, Artificial Sequence
  Synthetic
ccagcuucccaauguuaguauucc

SEQ ID NO: 45560 - RNA, 18 nt, Artificial Sequence
  Synthetic
uauccuaucaacacuucc

SEQ ID NO: 45561 - RNA, 19 nt, Artificial Sequence
  Synthetic
cuauccuaucaacacuucc

SEQ ID NO: 45562 - RNA, 20 nt, Artificial Sequence
  Synthetic
ccuauccuaucaacacuucc

SEQ ID NO: 45563 - RNA, 21 nt, Artificial Sequence
  Synthetic
cccuauccuaucaacacuucc

SEQ ID NO: 45564 - RNA, 22 nt, Artificial Sequence
  Synthetic
ccccuauccuaucaacacuucc

SEQ ID NO: 45565 - RNA, 23 nt, Artificial Sequence
  Synthetic
gccccuauccuaucaacacuucc

SEQ ID NO: 45566 - RNA, 24 nt, Artificial Sequence
  Synthetic
ugccccuauccuaucaacacuucc

SEQ ID NO: 45567 - RNA, 18 nt, Artificial Sequence
  Synthetic
uggggaaagaaccuuucc

SEQ ID NO: 45568 - RNA, 19 nt, Artificial Sequence
  Synthetic
guggggaaagaaccuuucc

SEQ ID NO: 45569 - RNA, 20 nt, Artificial Sequence
  Synthetic
aguggggaaagaaccuuucc

SEQ ID NO: 45570 - RNA, 21 nt, Artificial Sequence
  Synthetic
gaguggggaaagaaccuuucc

SEQ ID NO: 45571 - RNA, 22 nt, Artificial Sequence
  Synthetic
cgaguggggaaagaaccuuucc

SEQ ID NO: 45572 - RNA, 23 nt, Artificial Sequence
  Synthetic
ucgaguggggaaagaaccuuucc

SEQ ID NO: 45573 - RNA, 24 nt, Artificial Sequence
  Synthetic
cucgaguggggaaagaaccuuucc

SEQ ID NO: 45574 - RNA, 18 nt, Artificial Sequence
  Synthetic
gggaacaagaucuacagc

SEQ ID NO: 45575 - RNA, 19 nt, Artificial Sequence
  Synthetic
ugggaacaagaucuacagc

SEQ ID NO: 45576 - RNA, 20 nt, Artificial Sequence
  Synthetic
uugggaacaagaucuacagc

SEQ ID NO: 45577 - RNA, 21 nt, Artificial Sequence
  Synthetic
cuugggaacaagaucuacagc

SEQ ID NO: 45578 - RNA, 22 nt, Artificial Sequence
  Synthetic
acuugggaacaagaucuacagc

SEQ ID NO: 45579 - RNA, 23 nt, Artificial Sequence
  Synthetic
uacuugggaacaagaucuacagc

SEQ ID NO: 45580 - RNA, 24 nt, Artificial Sequence
  Synthetic
auacuugggaacaagaucuacagc

SEQ ID NO: 45581 - RNA, 18 nt, Artificial Sequence
  Synthetic
uguuuacgucccgucagc

SEQ ID NO: 45582 - RNA, 19 nt, Artificial Sequence
  Synthetic
uuguuuacgucccgucagc

SEQ ID NO: 45583 - RNA, 20 nt, Artificial Sequence
  Synthetic
uuuguuuacgucccgucagc

SEQ ID NO: 45584 - RNA, 21 nt, Artificial Sequence
  Synthetic
cuuuguuuacgucccgucagc

SEQ ID NO: 45585 - RNA, 22 nt, Artificial Sequence
  Synthetic
ccuuuguuuacgucccgucagc

SEQ ID NO: 45586 - RNA, 23 nt, Artificial Sequence
  Synthetic
uccuuuguuuacgucccgucagc

SEQ ID NO: 45587 - RNA, 24 nt, Artificial Sequence
  Synthetic
guccuuuguuuacgucccgucagc

SEQ ID NO: 45588 - RNA, 18 nt, Artificial Sequence
  Synthetic
acguuacauggaaaccgc

SEQ ID NO: 45589 - RNA, 19 nt, Artificial Sequence
  Synthetic
cacguuacauggaaaccgc

SEQ ID NO: 45590 - RNA, 20 nt, Artificial Sequence
  Synthetic
gcacguuacauggaaaccgc

SEQ ID NO: 45591 - RNA, 21 nt, Artificial Sequence
  Synthetic
ugcacguuacauggaaaccgc

SEQ ID NO: 45592 - RNA, 22 nt, Artificial Sequence
  Synthetic
cugcacguuacauggaaaccgc

SEQ ID NO: 45593 - RNA, 23 nt, Artificial Sequence
  Synthetic
ucugcacguuacauggaaaccgc

SEQ ID NO: 45594 - RNA, 24 nt, Artificial Sequence
  Synthetic
cucugcacguuacauggaaaccgc

SEQ ID NO: 45595 - RNA, 18 nt, Artificial Sequence
  Synthetic
ugaucuucucgacaccgc

SEQ ID NO: 45596 - RNA, 19 nt, Artificial Sequence
  Synthetic
gugaucuucucgacaccgc

SEQ ID NO: 45597 - RNA, 20 nt, Artificial Sequence
  Synthetic
cgugaucuucucgacaccgc

SEQ ID NO: 45598 - RNA, 18 nt, Artificial Sequence
  Synthetic
ucucaaucgccgcgucgc

SEQ ID NO: 45599 - RNA, 19 nt, Artificial Sequence
  Synthetic
aucucaaucgccgcgucgc

SEQ ID NO: 45600 - RNA, 20 nt, Artificial Sequence
  Synthetic
gaucucaaucgccgcgucgc

SEQ ID NO: 45601 - RNA, 18 nt, Artificial Sequence
  Synthetic
accuuuguauuaggaggc

SEQ ID NO: 45602 - RNA, 19 nt, Artificial Sequence
  Synthetic
gaccuuuguauuaggaggc

SEQ ID NO: 45603 - RNA, 20 nt, Artificial Sequence
  Synthetic
ugaccuuuguauuaggaggc

SEQ ID NO: 45604 - RNA, 21 nt, Artificial Sequence
  Synthetic
augaccuuuguauuaggaggc

SEQ ID NO: 45605 - RNA, 22 nt, Artificial Sequence
  Synthetic
aaugaccuuuguauuaggaggc

SEQ ID NO: 45606 - RNA, 23 nt, Artificial Sequence
  Synthetic
uaaugaccuuuguauuaggaggc

SEQ ID NO: 45607 - RNA, 24 nt, Artificial Sequence
  Synthetic
uuaaugaccuuuguauuaggaggc

SEQ ID NO: 45608 - RNA, 18 nt, Artificial Sequence
  Synthetic
  misc_feature (8)..(8): n is a, c, g, or u
uuuacccnguugcuaggc

SEQ ID NO: 45609 - RNA, 19 nt, Artificial Sequence
  Synthetic
  misc_feature (9)..(9): n is a, c, g, or u
cuuuacccnguugcuaggc

SEQ ID NO: 45610 - RNA, 20 nt, Artificial Sequence
  Synthetic
  misc_feature (10)..(10): n is a, c, g, or u
ccuuuacccnguugcuaggc

SEQ ID NO: 45611 - RNA, 21 nt, Artificial Sequence
  Synthetic
  misc_feature (11)..(11): n is a, c, g, or u
accuuuacccnguugcuaggc

SEQ ID NO: 45612 - RNA, 22 nt, Artificial Sequence
  Synthetic
  misc_feature (12)..(12): n is a, c, g, or u
aaccuuuacccnguugcuaggc

SEQ ID NO: 45613 - RNA, 23 nt, Artificial Sequence
  Synthetic
  misc_feature (13)..(13): n is a, c, g, or u
gaaccuuuacccnguugcuaggc

SEQ ID NO: 45614 - RNA, 24 nt, Artificial Sequence
  Synthetic
  misc_feature (14)..(14): n is a, c, g, or u
ugaaccuuuacccnguugcuaggc

SEQ ID NO: 45615 - RNA, 18 nt, Artificial Sequence
  Synthetic
gagugggaagaauuaggc

SEQ ID NO: 45616 - RNA, 19 nt, Artificial Sequence
  Synthetic
ugagugggaagaauuaggc

SEQ ID NO: 45617 - RNA, 20 nt, Artificial Sequence
  Synthetic
cugagugggaagaauuaggc

SEQ ID NO: 45618 - RNA, 21 nt, Artificial Sequence
  Synthetic
gcugagugggaagaauuaggc

SEQ ID NO: 45619 - RNA, 22 nt, Artificial Sequence
  Synthetic
ugcugagugggaagaauuaggc

SEQ ID NO: 45620 - RNA, 23 nt, Artificial Sequence
  Synthetic
uugcugagugggaagaauuaggc

SEQ ID NO: 45621 - RNA, 24 nt, Artificial Sequence
  Synthetic
uuugcugagugggaagaauuaggc

SEQ ID NO: 45622 - RNA, 18 nt, Artificial Sequence
  Synthetic
agcugugccuuggguggc

SEQ ID NO: 45623 - RNA, 19 nt, Artificial Sequence
  Synthetic
aagcugugccuuggguggc

SEQ ID NO: 45624 - RNA, 20 nt, Artificial Sequence
  Synthetic
caagcugugccuuggguggc

SEQ ID NO: 45625 - RNA, 21 nt, Artificial Sequence
  Synthetic
ccaagcugugccuuggguggc

SEQ ID NO: 45626 - RNA, 22 nt, Artificial Sequence
  Synthetic
uccaagcugugccuuggguggc

SEQ ID NO: 45627 - RNA, 23 nt, Artificial Sequence
  Synthetic
cuccaagcugugccuuggguggc

SEQ ID NO: 45628 - RNA, 24 nt, Artificial Sequence
  Synthetic
ccuccaagcugugccuuggguggc

SEQ ID NO: 45629 - RNA, 18 nt, Artificial Sequence
  Synthetic
ccaaaaaggacccuuggc

SEQ ID NO: 45630 - RNA, 19 nt, Artificial Sequence
  Synthetic
cccaaaaaggacccuuggc

SEQ ID NO: 45631 - RNA, 20 nt, Artificial Sequence
  Synthetic
ucccaaaaaggacccuuggc

SEQ ID NO: 45632 - RNA, 21 nt, Artificial Sequence
  Synthetic
aucccaaaaaggacccuuggc

SEQ ID NO: 45633 - RNA, 22 nt, Artificial Sequence
  Synthetic
aaucccaaaaaggacccuuggc

SEQ ID NO: 45634 - RNA, 23 nt, Artificial Sequence
  Synthetic
caaucccaaaaaggacccuuggc

SEQ ID NO: 45635 - RNA, 24 nt, Artificial Sequence
  Synthetic
ucaaucccaaaaaggacccuuggc

SEQ ID NO: 45636 - RNA, 18 nt, Artificial Sequence
  Synthetic
ccauauggccuuuuuggc

SEQ ID NO: 45637 - RNA, 19 nt, Artificial Sequence
  Synthetic
gccauauggccuuuuuggc

SEQ ID NO: 45638 - RNA, 20 nt, Artificial Sequence
  Synthetic
ugccauauggccuuuuuggc

SEQ ID NO: 45639 - RNA, 21 nt, Artificial Sequence
  Synthetic
uugccauauggccuuuuuggc

SEQ ID NO: 45640 - RNA, 22 nt, Artificial Sequence
  Synthetic
uuugccauauggccuuuuuggc

SEQ ID NO: 45641 - RNA, 23 nt, Artificial Sequence
  Synthetic
cuuugccauauggccuuuuuggc

SEQ ID NO: 45642 - RNA, 24 nt, Artificial Sequence
  Synthetic
acuuugccauauggccuuuuuggc

SEQ ID NO: 45643 - RNA, 18 nt, Artificial Sequence
  Synthetic
gucauccucaggccaugc

SEQ ID NO: 45644 - RNA, 19 nt, Artificial Sequence
  Synthetic
agucauccucaggccaugc

SEQ ID NO: 45645 - RNA, 20 nt, Artificial Sequence
  Synthetic
cagucauccucaggccaugc

SEQ ID NO: 45646 - RNA, 21 nt, Artificial Sequence
  Synthetic
acagucauccucaggccaugc

SEQ ID NO: 45647 - RNA, 22 nt, Artificial Sequence
  Synthetic
gacagucauccucaggccaugc

SEQ ID NO: 45648 - RNA, 23 nt, Artificial Sequence
  Synthetic
agacagucauccucaggccaugc

SEQ ID NO: 45649 - RNA, 24 nt, Artificial Sequence
  Synthetic
gagacagucauccucaggccaugc

SEQ ID NO: 45650 - RNA, 18 nt, Artificial Sequence
  Synthetic
  misc_feature (5)..(5): n is a, c, g, or u
ucggncaucagcgcaugc

SEQ ID NO: 45651 - RNA, 19 nt, Artificial Sequence
  Synthetic
  misc_feature (6)..(6): n is a, c, g, or u
aucggncaucagcgcaugc

SEQ ID NO: 45652 - RNA, 20 nt, Artificial Sequence
  Synthetic
  misc_feature (7)..(7): n is a, c, g, or u
caucggncaucagcgcaugc

SEQ ID NO: 45653 - RNA, 21 nt, Artificial Sequence
  Synthetic
  misc_feature (8)..(8): n is a, c, g, or u
ccaucggncaucagcgcaugc

SEQ ID NO: 45654 - RNA, 22 nt, Artificial Sequence
  Synthetic
  misc_feature (9)..(9): n is a, c, g, or u
gccaucggncaucagcgcaugc

SEQ ID NO: 45655 - RNA, 23 nt, Artificial Sequence
  Synthetic
  misc_feature (10)..(10): n is a, c, g, or u
ggccaucggncaucagcgcaugc

SEQ ID NO: 45656 - RNA, 24 nt, Artificial Sequence
  Synthetic
  misc_feature (11)..(11): n is a, c, g, or u
uggccaucggncaucagcgcaugc

SEQ ID NO: 45657 - RNA, 18 nt, Artificial Sequence
  Synthetic
caggauuggggacccugc

SEQ ID NO: 45658 - RNA, 19 nt, Artificial Sequence
  Synthetic
ccaggauuggggacccugc

SEQ ID NO: 45659 - RNA, 20 nt, Artificial Sequence
  Synthetic
uccaggauuggggacccugc

SEQ ID NO: 45660 - RNA, 21 nt, Artificial Sequence
  Synthetic
cuccaggauuggggacccugc

SEQ ID NO: 45661 - RNA, 22 nt, Artificial Sequence
  Synthetic
ucuccaggauuggggacccugc

SEQ ID NO: 45662 - RNA, 23 nt, Artificial Sequence
  Synthetic
uucuccaggauuggggacccugc

SEQ ID NO: 45663 - RNA, 24 nt, Artificial Sequence
  Synthetic
cuucuccaggauuggggacccugc

SEQ ID NO: 45664 - RNA, 18 nt, Artificial Sequence
  Synthetic
aaccugcacgacuccugc

SEQ ID NO: 45665 - RNA, 19 nt, Artificial Sequence
  Synthetic
aaaccugcacgacuccugc

SEQ ID NO: 45666 - RNA, 20 nt, Artificial Sequence
  Synthetic
aaaaccugcacgacuccugc

SEQ ID NO: 45667 - RNA, 21 nt, Artificial Sequence
  Synthetic
caaaaccugcacgacuccugc

SEQ ID NO: 45668 - RNA, 22 nt, Artificial Sequence
  Synthetic
gcaaaaccugcacgacuccugc

SEQ ID NO: 45669 - RNA, 23 nt, Artificial Sequence
  Synthetic
ugcaaaaccugcacgacuccugc

SEQ ID NO: 45670 - RNA, 24 nt, Artificial Sequence
  Synthetic
cugcaaaaccugcacgacuccugc

SEQ ID NO: 45671 - RNA, 18 nt, Artificial Sequence
  Synthetic
caagccuccaagcugugc

SEQ ID NO: 45672 - RNA, 19 nt, Artificial Sequence
  Synthetic
ucaagccuccaagcugugc

SEQ ID NO: 45673 - RNA, 20 nt, Artificial Sequence
  Synthetic
uucaagccuccaagcugugc

SEQ ID NO: 45674 - RNA, 21 nt, Artificial Sequence
  Synthetic
guucaagccuccaagcugugc

SEQ ID NO: 45675 - RNA, 22 nt, Artificial Sequence
  Synthetic
uguucaagccuccaagcugugc

SEQ ID NO: 45676 - RNA, 23 nt, Artificial Sequence
  Synthetic
cuguucaagccuccaagcugugc

SEQ ID NO: 45677 - RNA, 24 nt, Artificial Sequence
  Synthetic
acuguucaagccuccaagcugugc

SEQ ID NO: 45678 - RNA, 18 nt, Artificial Sequence
  Synthetic
uuccaaauauccauuugc

SEQ ID NO: 45679 - RNA, 19 nt, Artificial Sequence
  Synthetic
uuuccaaauauccauuugc

SEQ ID NO: 45680 - RNA, 20 nt, Artificial Sequence
  Synthetic
uuuuccaaauauccauuugc

SEQ ID NO: 45681 - RNA, 21 nt, Artificial Sequence
  Synthetic
cuuuuccaaauauccauuugc

SEQ ID NO: 45682 - RNA, 22 nt, Artificial Sequence
  Synthetic
ucuuuuccaaauauccauuugc

SEQ ID NO: 45683 - RNA, 23 nt, Artificial Sequence
  Synthetic
uucuuuuccaaauauccauuugc

SEQ ID NO: 45684 - RNA, 24 nt, Artificial Sequence
  Synthetic
cuucuuuuccaaauauccauuugc

SEQ ID NO: 45685 - RNA, 18 nt, Artificial Sequence
  Synthetic
gaaguugggguacuuugc

SEQ ID NO: 45686 - RNA, 19 nt, Artificial Sequence
  Synthetic
ggaaguugggguacuuugc

SEQ ID NO: 45687 - RNA, 20 nt, Artificial Sequence
  Synthetic
uggaaguugggguacuuugc

SEQ ID NO: 45688 - RNA, 21 nt, Artificial Sequence
  Synthetic
uuggaaguugggguacuuugc

SEQ ID NO: 45689 - RNA, 22 nt, Artificial Sequence
  Synthetic
auuggaaguugggguacuuugc

SEQ ID NO: 45690 - RNA, 23 nt, Artificial Sequence
  Synthetic
aauuggaaguugggguacuuugc

SEQ ID NO: 45691 - RNA, 24 nt, Artificial Sequence
  Synthetic
uaauuggaaguugggguacuuugc

SEQ ID NO: 45692 - RNA, 18 nt, Artificial Sequence
  Synthetic
  misc_feature (17)..(17): n is a, c, g, or u
ggggcuuggccaucggnc

SEQ ID NO: 45693 - RNA, 19 nt, Artificial Sequence
  Synthetic
  misc_feature (18)..(18): n is a, c, g, or u
uggggcuuggccaucggnc

SEQ ID NO: 45694 - RNA, 20 nt, Artificial Sequence
  Synthetic
  misc_feature (19)..(19): n is a, c, g, or u
uuggggcuuggccaucggnc

SEQ ID NO: 45695 - RNA, 21 nt, Artificial Sequence
  Synthetic
  misc_feature (20)..(20): n is a, c, g, or u
guuggggcuuggccaucggnc

SEQ ID NO: 45696 - RNA, 22 nt, Artificial Sequence
  Synthetic
  misc_feature (21)..(21): n is a, c, g, or u
gguuggggcuuggccaucggnc

SEQ ID NO: 45697 - RNA, 23 nt, Artificial Sequence
  Synthetic
  misc_feature (22)..(22): n is a, c, g, or u
ugguuggggcuuggccaucggnc

SEQ ID NO: 45698 - RNA, 24 nt, Artificial Sequence
  Synthetic
  misc_feature (23)..(23): n is a, c, g, or u
cugguuggggcuuggccaucggnc

SEQ ID NO: 45699 - RNA, 18 nt, Artificial Sequence
  Synthetic
  misc_feature (16)..(17): n is a, c, g, or u
gcauaaauuggucugnnc

SEQ ID NO: 45700 - RNA, 19 nt, Artificial Sequence
  Synthetic
  misc_feature (17)..(18): n is a, c, g, or u
ggcauaaauuggucugnnc

SEQ ID NO: 45701 - RNA, 20 nt, Artificial Sequence
  Synthetic
  misc_feature (18)..(19): n is a, c, g, or u
aggcauaaauuggucugnnc

SEQ ID NO: 45702 - RNA, 21 nt, Artificial Sequence
  Synthetic
  misc_feature (19)..(20): n is a, c, g, or u
uaggcauaaauuggucugnnc

SEQ ID NO: 45703 - RNA, 22 nt, Artificial Sequence
  Synthetic
  misc_feature (20)..(21): n is a, c, g, or u
guaggcauaaauuggucugnnc

SEQ ID NO: 45704 - RNA, 23 nt, Artificial Sequence
  Synthetic
  misc_feature (21)..(22): n is a, c, g, or u
uguaggcauaaauuggucugnnc

SEQ ID NO: 45705 - RNA, 24 nt, Artificial Sequence
  Synthetic
  misc_feature (22)..(23): n is a, c, g, or u
cuguaggcauaaauuggucugnnc

SEQ ID NO: 45706 - RNA, 18 nt, Artificial Sequence
  Synthetic
accaagcucuacaaaauc

SEQ ID NO: 45707 - RNA, 19 nt, Artificial Sequence
  Synthetic
caccaagcucuacaaaauc

SEQ ID NO: 45708 - RNA, 20 nt, Artificial Sequence
  Synthetic
ccaccaagcucuacaaaauc

SEQ ID NO: 45709 - RNA, 21 nt, Artificial Sequence
  Synthetic
uccaccaagcucuacaaaauc

SEQ ID NO: 45710 - RNA, 22 nt, Artificial Sequence
  Synthetic
uuccaccaagcucuacaaaauc

SEQ ID NO: 45711 - RNA, 23 nt, Artificial Sequence
  Synthetic
auuccaccaagcucuacaaaauc

SEQ ID NO: 45712 - RNA, 24 nt, Artificial Sequence
  Synthetic
cauuccaccaagcucuacaaaauc

SEQ ID NO: 45713 - RNA, 18 nt, Artificial Sequence
  Synthetic
cagauugggacuucaauc

SEQ ID NO: 45714 - RNA, 19 nt, Artificial Sequence
  Synthetic
ccagauugggacuucaauc

SEQ ID NO: 45715 - RNA, 20 nt, Artificial Sequence
  Synthetic
uccagauugggacuucaauc

SEQ ID NO: 45716 - RNA, 18 nt, Artificial Sequence
  Synthetic
agcuuuguaccgggaauc

SEQ ID NO: 45717 - RNA, 19 nt, Artificial Sequence
  Synthetic
cagcuuuguaccgggaauc

SEQ ID NO: 45718 - RNA, 20 nt, Artificial Sequence
  Synthetic
ucagcuuuguaccgggaauc

SEQ ID NO: 45719 - RNA, 21 nt, Artificial Sequence
  Synthetic
uucagcuuuguaccgggaauc

SEQ ID NO: 45720 - RNA, 22 nt, Artificial Sequence
  Synthetic
cuucagcuuuguaccgggaauc

SEQ ID NO: 45721 - RNA, 23 nt, Artificial Sequence
  Synthetic
gcuucagcuuuguaccgggaauc

SEQ ID NO: 45722 - RNA, 24 nt, Artificial Sequence
  Synthetic
cgcuucagcuuuguaccgggaauc

SEQ ID NO: 45723 - RNA, 18 nt, Artificial Sequence
  Synthetic
uuuggaagauccagcauc

SEQ ID NO: 45724 - RNA, 19 nt, Artificial Sequence
  Synthetic
auuuggaagauccagcauc

SEQ ID NO: 45725 - RNA, 20 nt, Artificial Sequence
  Synthetic
aauuuggaagauccagcauc

SEQ ID NO: 45726 - RNA, 21 nt, Artificial Sequence
  Synthetic
uaauuuggaagauccagcauc

SEQ ID NO: 45727 - RNA, 22 nt, Artificial Sequence
  Synthetic
auaauuuggaagauccagcauc

SEQ ID NO: 45728 - RNA, 23 nt, Artificial Sequence
  Synthetic
aauaauuuggaagauccagcauc

SEQ ID NO: 45729 - RNA, 24 nt, Artificial Sequence
  Synthetic
uaauaauuuggaagauccagcauc

SEQ ID NO: 45730 - RNA, 18 nt, Artificial Sequence
  Synthetic
ucgcagaagaucugcauc

SEQ ID NO: 45731 - RNA, 19 nt, Artificial Sequence
  Synthetic
gucgcagaagaucugcauc

SEQ ID NO: 45732 - RNA, 20 nt, Artificial Sequence
  Synthetic
cgucgcagaagaucugcauc

SEQ ID NO: 45733 - RNA, 18 nt, Artificial Sequence
  Synthetic
uauucccaucccaucauc

SEQ ID NO: 45734 - RNA, 19 nt, Artificial Sequence
  Synthetic
guauucccaucccaucauc

SEQ ID NO: 45735 - RNA, 20 nt, Artificial Sequence
  Synthetic
uguauucccaucccaucauc

SEQ ID NO: 45736 - RNA, 21 nt, Artificial Sequence
  Synthetic
cuguauucccaucccaucauc

SEQ ID NO: 45737 - RNA, 22 nt, Artificial Sequence
  Synthetic
ccuguauucccaucccaucauc

SEQ ID NO: 45738 - RNA, 23 nt, Artificial Sequence
  Synthetic
accuguauucccaucccaucauc

SEQ ID NO: 45739 - RNA, 24 nt, Artificial Sequence
  Synthetic
caccuguauucccaucccaucauc

SEQ ID NO: 45740 - RNA, 18 nt, Artificial Sequence
  Synthetic
cacuaagagacagucauc

SEQ ID NO: 45741 - RNA, 19 nt, Artificial Sequence
  Synthetic
ccacuaagagacagucauc

SEQ ID NO: 45742 - RNA, 20 nt, Artificial Sequence
  Synthetic
accacuaagagacagucauc

SEQ ID NO: 45743 - RNA, 21 nt, Artificial Sequence
  Synthetic
caccacuaagagacagucauc

SEQ ID NO: 45744 - RNA, 22 nt, Artificial Sequence
  Synthetic
ccaccacuaagagacagucauc

SEQ ID NO: 45745 - RNA, 23 nt, Artificial Sequence
  Synthetic
uccaccacuaagagacagucauc

SEQ ID NO: 45746 - RNA, 24 nt, Artificial Sequence
  Synthetic
cuccaccacuaagagacagucauc

SEQ ID NO: 45747 - RNA, 18 nt, Artificial Sequence
  Synthetic
auacuugggaacaagauc

SEQ ID NO: 45748 - RNA, 19 nt, Artificial Sequence
  Synthetic
uauacuugggaacaagauc

SEQ ID NO: 45749 - RNA, 20 nt, Artificial Sequence
  Synthetic
auauacuugggaacaagauc

SEQ ID NO: 45750 - RNA, 21 nt, Artificial Sequence
  Synthetic
cauauacuugggaacaagauc

SEQ ID NO: 45751 - RNA, 22 nt, Artificial Sequence
  Synthetic
ccauauacuugggaacaagauc

SEQ ID NO: 45752 - RNA, 23 nt, Artificial Sequence
  Synthetic
accauauacuugggaacaagauc

SEQ ID NO: 45753 - RNA, 24 nt, Artificial Sequence
  Synthetic
caccauauacuugggaacaagauc

SEQ ID NO: 45754 - RNA, 18 nt, Artificial Sequence
  Synthetic
uccucugauuccaggauc

SEQ ID NO: 45755 - RNA, 19 nt, Artificial Sequence
  Synthetic
guccucugauuccaggauc

SEQ ID NO: 45756 - RNA, 20 nt, Artificial Sequence
  Synthetic
uguccucugauuccaggauc

SEQ ID NO: 45757 - RNA, 21 nt, Artificial Sequence
  Synthetic
uuguccucugauuccaggauc

SEQ ID NO: 45758 - RNA, 22 nt, Artificial Sequence
  Synthetic
uuuguccucugauuccaggauc

SEQ ID NO: 45759 - RNA, 23 nt, Artificial Sequence
  Synthetic
guuuguccucugauuccaggauc

SEQ ID NO: 45760 - RNA, 24 nt, Artificial Sequence
  Synthetic
cguuuguccucugauuccaggauc

SEQ ID NO: 45761 - RNA, 18 nt, Artificial Sequence
  Synthetic
caacuuguccuggcuauc

SEQ ID NO: 45762 - RNA, 19 nt, Artificial Sequence
  Synthetic
ccaacuuguccuggcuauc

SEQ ID NO: 45763 - RNA, 20 nt, Artificial Sequence
  Synthetic
uccaacuuguccuggcuauc

SEQ ID NO: 45764 - RNA, 21 nt, Artificial Sequence
  Synthetic
cuccaacuuguccuggcuauc

SEQ ID NO: 45765 - RNA, 22 nt, Artificial Sequence
  Synthetic
ccuccaacuuguccuggcuauc

SEQ ID NO: 45766 - RNA, 23 nt, Artificial Sequence
  Synthetic
uccuccaacuuguccuggcuauc

SEQ ID NO: 45767 - RNA, 24 nt, Artificial Sequence
  Synthetic
guccuccaacuuguccuggcuauc

SEQ ID NO: 45768 - RNA, 18 nt, Artificial Sequence
  Synthetic
guaucaaaccguauuauc

SEQ ID NO: 45769 - RNA, 19 nt, Artificial Sequence
  Synthetic
gguaucaaaccguauuauc

SEQ ID NO: 45770 - RNA, 20 nt, Artificial Sequence
  Synthetic
agguaucaaaccguauuauc

SEQ ID NO: 45771 - RNA, 21 nt, Artificial Sequence
  Synthetic
aagguaucaaaccguauuauc

SEQ ID NO: 45772 - RNA, 22 nt, Artificial Sequence
  Synthetic
aaagguaucaaaccguauuauc

SEQ ID NO: 45773 - RNA, 23 nt, Artificial Sequence
  Synthetic
caaagguaucaaaccguauuauc

SEQ ID NO: 45774 - RNA, 24 nt, Artificial Sequence
  Synthetic
acaaagguaucaaaccguauuauc

SEQ ID NO: 45775 - RNA, 18 nt, Artificial Sequence
  Synthetic
cggucuggagcaaaacuc

SEQ ID NO: 45776 - RNA, 19 nt, Artificial Sequence
  Synthetic
ccggucuggagcaaaacuc

SEQ ID NO: 45777 - RNA, 20 nt, Artificial Sequence
  Synthetic
gccggucuggagcaaaacuc

SEQ ID NO: 45778 - RNA, 21 nt, Artificial Sequence
  Synthetic
agccggucuggagcaaaacuc

SEQ ID NO: 45779 - RNA, 22 nt, Artificial Sequence
  Synthetic
cagccggucuggagcaaaacuc

SEQ ID NO: 45780 - RNA, 23 nt, Artificial Sequence
  Synthetic
gcagccggucuggagcaaaacuc

SEQ ID NO: 45781 - RNA, 24 nt, Artificial Sequence
  Synthetic
cgcagccggucuggagcaaaacuc

SEQ ID NO: 45782 - RNA, 18 nt, Artificial Sequence
  Synthetic
aguuauauaagaggacuc

SEQ ID NO: 45783 - RNA, 19 nt, Artificial Sequence
  Synthetic
caguuauauaagaggacuc

SEQ ID NO: 45784 - RNA, 20 nt, Artificial Sequence
  Synthetic
gcaguuauauaagaggacuc

SEQ ID NO: 45785 - RNA, 21 nt, Artificial Sequence
  Synthetic
  misc_feature (1)..(1): n is a, c, g, or u
ngcaguuauauaagaggacuc

SEQ ID NO: 45786 - RNA, 22 nt, Artificial Sequence
  Synthetic
  misc_feature (2)..(2): n is a, c, g, or u
angcaguuauauaagaggacuc

SEQ ID NO: 45787 - RNA, 23 nt, Artificial Sequence
  Synthetic
  misc_feature (3)..(3): n is a, c, g, or u
aangcaguuauauaagaggacuc

SEQ ID NO: 45788 - RNA, 24 nt, Artificial Sequence
  Synthetic
  misc_feature (4)..(4): n is a, c, g, or u
caangcaguuauauaagaggacuc

SEQ ID NO: 45789 - RNA, 18 nt, Artificial Sequence
  Synthetic
uuaguauuccuuggacuc

SEQ ID NO: 45790 - RNA, 19 nt, Artificial Sequence
  Synthetic
guuaguauuccuuggacuc

SEQ ID NO: 45791 - RNA, 20 nt, Artificial Sequence
  Synthetic
uguuaguauuccuuggacuc

SEQ ID NO: 45792 - RNA, 21 nt, Artificial Sequence
  Synthetic
auguuaguauuccuuggacuc

SEQ ID NO: 45793 - RNA, 22 nt, Artificial Sequence
  Synthetic
aauguuaguauuccuuggacuc

SEQ ID NO: 45794 - RNA, 23 nt, Artificial Sequence
  Synthetic
caauguuaguauuccuuggacuc

SEQ ID NO: 45795 - RNA, 24 nt, Artificial Sequence
  Synthetic
ccaauguuaguauuccuuggacuc

SEQ ID NO: 45796 - RNA, 18 nt, Artificial Sequence
  Synthetic
uccagcggacgaccccuc

SEQ ID NO: 45797 - RNA, 19 nt, Artificial Sequence
  Synthetic
auccagcggacgaccccuc

SEQ ID NO: 45798 - RNA, 20 nt, Artificial Sequence
  Synthetic
aauccagcggacgaccccuc

SEQ ID NO: 45799 - RNA, 18 nt, Artificial Sequence
  Synthetic
gaagaggcagguccccuc

SEQ ID NO: 45800 - RNA, 19 nt, Artificial Sequence
  Synthetic
cgaagaggcagguccccuc

SEQ ID NO: 45801 - RNA, 20 nt, Artificial Sequence
  Synthetic
acgaagaggcagguccccuc

SEQ ID NO: 45802 - RNA, 21 nt, Artificial Sequence
  Synthetic
gacgaagaggcagguccccuc

SEQ ID NO: 45803 - RNA, 22 nt, Artificial Sequence
  Synthetic
agacgaagaggcagguccccuc

SEQ ID NO: 45804 - RNA, 23 nt, Artificial Sequence
  Synthetic
uagacgaagaggcagguccccuc

SEQ ID NO: 45805 - RNA, 24 nt, Artificial Sequence
  Synthetic
uuagacgaagaggcagguccccuc

SEQ ID NO: 45806 - RNA, 18 nt, Artificial Sequence
  Synthetic
gaagaacucccucgccuc

SEQ ID NO: 45807 - RNA, 19 nt, Artificial Sequence
  Synthetic
agaagaacucccucgccuc

SEQ ID NO: 45808 - RNA, 20 nt, Artificial Sequence
  Synthetic
aagaagaacucccucgccuc

SEQ ID NO: 45809 - RNA, 21 nt, Artificial Sequence
  Synthetic
gaagaagaacucccucgccuc

SEQ ID NO: 45810 - RNA, 22 nt, Artificial Sequence
  Synthetic
cgaagaagaacucccucgccuc

SEQ ID NO: 45811 - RNA, 23 nt, Artificial Sequence
  Synthetic
ucgaagaagaacucccucgccuc

SEQ ID NO: 45812 - RNA, 24 nt, Artificial Sequence
  Synthetic
cucgaagaagaacucccucgccuc

SEQ ID NO: 45813 - RNA, 18 nt, Artificial Sequence
  Synthetic
cagcauuccaccaagcuc

SEQ ID NO: 45814 - RNA, 19 nt, Artificial Sequence
  Synthetic
acagcauuccaccaagcuc

SEQ ID NO: 45815 - RNA, 20 nt, Artificial Sequence
  Synthetic
uacagcauuccaccaagcuc

SEQ ID NO: 45816 - RNA, 18 nt, Artificial Sequence
  Synthetic
gcaggcuuuuacuuucuc

SEQ ID NO: 45817 - RNA, 19 nt, Artificial Sequence
  Synthetic
agcaggcuuuuacuuucuc

SEQ ID NO: 45818 - RNA, 20 nt, Artificial Sequence
  Synthetic
aagcaggcuuuuacuuucuc

SEQ ID NO: 45819 - RNA, 21 nt, Artificial Sequence
  Synthetic
uaagcaggcuuuuacuuucuc

SEQ ID NO: 45820 - RNA, 22 nt, Artificial Sequence
  Synthetic
cuaagcaggcuuuuacuuucuc

SEQ ID NO: 45821 - RNA, 23 nt, Artificial Sequence
  Synthetic
gcuaagcaggcuuuuacuuucuc

SEQ ID NO: 45822 - RNA, 24 nt, Artificial Sequence
  Synthetic
agcuaagcaggcuuuuacuuucuc

SEQ ID NO: 45823 - RNA, 18 nt, Artificial Sequence
  Synthetic
acuuauaaggccuuucuc

SEQ ID NO: 45824 - RNA, 19 nt, Artificial Sequence
  Synthetic
aacuuauaaggccuuucuc

SEQ ID NO: 45825 - RNA, 20 nt, Artificial Sequence
  Synthetic
caacuuauaaggccuuucuc

SEQ ID NO: 45826 - RNA, 21 nt, Artificial Sequence
  Synthetic
ccaacuuauaaggccuuucuc

SEQ ID NO: 45827 - RNA, 22 nt, Artificial Sequence
  Synthetic
gccaacuuauaaggccuuucuc

SEQ ID NO: 45828 - RNA, 23 nt, Artificial Sequence
  Synthetic
cgccaacuuauaaggccuuucuc

SEQ ID NO: 45829 - RNA, 24 nt, Artificial Sequence
  Synthetic
ucgccaacuuauaaggccuuucuc

SEQ ID NO: 45830 - RNA, 18 nt, Artificial Sequence
  Synthetic
cuacaaaaucccaaaguc

SEQ ID NO: 45831 - RNA, 19 nt, Artificial Sequence
  Synthetic
ucuacaaaaucccaaaguc

SEQ ID NO: 45832 - RNA, 20 nt, Artificial Sequence
  Synthetic
cucuacaaaaucccaaaguc

SEQ ID NO: 45833 - RNA, 21 nt, Artificial Sequence
  Synthetic
gcucuacaaaaucccaaaguc

SEQ ID NO: 45834 - RNA, 22 nt, Artificial Sequence
  Synthetic
agcucuacaaaaucccaaaguc

SEQ ID NO: 45835 - RNA, 23 nt, Artificial Sequence
  Synthetic
aagcucuacaaaaucccaaaguc

SEQ ID NO: 45836 - RNA, 24 nt, Artificial Sequence
  Synthetic
caagcucuacaaaaucccaaaguc

SEQ ID NO: 45837 - RNA, 18 nt, Artificial Sequence
  Synthetic
uggccuaaauucgcaguc

SEQ ID NO: 45838 - RNA, 19 nt, Artificial Sequence
  Synthetic
cuggccuaaauucgcaguc

SEQ ID NO: 45839 - RNA, 20 nt, Artificial Sequence
  Synthetic
ccuggccuaaauucgcaguc

SEQ ID NO: 45840 - RNA, 21 nt, Artificial Sequence
  Synthetic
uccuggccuaaauucgcaguc

SEQ ID NO: 45841 - RNA, 22 nt, Artificial Sequence
  Synthetic
guccuggccuaaauucgcaguc

SEQ ID NO: 45842 - RNA, 23 nt, Artificial Sequence
  Synthetic
uguccuggccuaaauucgcaguc

SEQ ID NO: 45843 - RNA, 24 nt, Artificial Sequence
  Synthetic
guguccuggccuaaauucgcaguc

SEQ ID NO: 45844 - RNA, 18 nt, Artificial Sequence
  Synthetic
gggguggagcccucaguc

SEQ ID NO: 45845 - RNA, 19 nt, Artificial Sequence
  Synthetic
ugggguggagcccucaguc

SEQ ID NO: 45846 - RNA, 20 nt, Artificial Sequence
  Synthetic
uugggguggagcccucaguc

SEQ ID NO: 45847 - RNA, 21 nt, Artificial Sequence
  Synthetic
uuugggguggagcccucaguc

SEQ ID NO: 45848 - RNA, 22 nt, Artificial Sequence
  Synthetic
uuuugggguggagcccucaguc

SEQ ID NO: 45849 - RNA, 23 nt, Artificial Sequence
  Synthetic
cuuuugggguggagcccucaguc

SEQ ID NO: 45850 - RNA, 24 nt, Artificial Sequence
  Synthetic
ccuuuugggguggagcccucaguc

SEQ ID NO: 45851 - RNA, 18 nt, Artificial Sequence
  Synthetic
cuccaccaaucgucaguc

SEQ ID NO: 45852 - RNA, 19 nt, Artificial Sequence
  Synthetic
ccuccaccaaucgucaguc

SEQ ID NO: 45853 - RNA, 20 nt, Artificial Sequence
  Synthetic
gccuccaccaaucgucaguc

SEQ ID NO: 45854 - RNA, 21 nt, Artificial Sequence
  Synthetic
ugccuccaccaaucgucaguc

SEQ ID NO: 45855 - RNA, 22 nt, Artificial Sequence
  Synthetic
cugccuccaccaaucgucaguc

SEQ ID NO: 45856 - RNA, 23 nt, Artificial Sequence
  Synthetic
ccugccuccaccaaucgucaguc

SEQ ID NO: 45857 - RNA, 24 nt, Artificial Sequence
  Synthetic
uccugccuccaccaaucgucaguc

SEQ ID NO: 45858 - RNA, 18 nt, Artificial Sequence
  Synthetic
gaucucaaucgccgcguc

SEQ ID NO: 45859 - RNA, 19 nt, Artificial Sequence
  Synthetic
agaucucaaucgccgcguc

SEQ ID NO: 45860 - RNA, 20 nt, Artificial Sequence
  Synthetic
aagaucucaaucgccgcguc

SEQ ID NO: 45861 - RNA, 18 nt, Artificial Sequence
  Synthetic
uuuugcucgcagccgguc

SEQ ID NO: 45862 - RNA, 19 nt, Artificial Sequence
  Synthetic
guuuugcucgcagccgguc

SEQ ID NO: 45863 - RNA, 20 nt, Artificial Sequence
  Synthetic
uguuuugcucgcagccgguc

SEQ ID NO: 45864 - RNA, 21 nt, Artificial Sequence
  Synthetic
uuguuuugcucgcagccgguc

SEQ ID NO: 45865 - RNA, 22 nt, Artificial Sequence
  Synthetic
cuuguuuugcucgcagccgguc

SEQ ID NO: 45866 - RNA, 23 nt, Artificial Sequence
  Synthetic
gcuuguuuugcucgcagccgguc

SEQ ID NO: 45867 - RNA, 24 nt, Artificial Sequence
  Synthetic
ugcuuguuuugcucgcagccgguc

SEQ ID NO: 45868 - RNA, 18 nt, Artificial Sequence
  Synthetic
uggacuguuuguuauguc

SEQ ID NO: 45869 - RNA, 19 nt, Artificial Sequence
  Synthetic
uuggacuguuuguuauguc

SEQ ID NO: 45870 - RNA, 20 nt, Artificial Sequence
  Synthetic
cuuggacuguuuguuauguc

SEQ ID NO: 45871 - RNA, 21 nt, Artificial Sequence
  Synthetic
ucuuggacuguuuguuauguc

SEQ ID NO: 45872 - RNA, 22 nt, Artificial Sequence
  Synthetic
cucuuggacuguuuguuauguc

SEQ ID NO: 45873 - RNA, 23 nt, Artificial Sequence
  Synthetic
acucuuggacuguuuguuauguc

SEQ ID NO: 45874 - RNA, 24 nt, Artificial Sequence
  Synthetic
gacucuuggacuguuuguuauguc

SEQ ID NO: 45875 - RNA, 18 nt, Artificial Sequence
  Synthetic
uugauuggaaagucuguc

SEQ ID NO: 45876 - RNA, 19 nt, Artificial Sequence
  Synthetic
auugauuggaaagucuguc

SEQ ID NO: 45877 - RNA, 20 nt, Artificial Sequence
  Synthetic
aauugauuggaaagucuguc

SEQ ID NO: 45878 - RNA, 21 nt, Artificial Sequence
  Synthetic
caauugauuggaaagucuguc

SEQ ID NO: 45879 - RNA, 22 nt, Artificial Sequence
  Synthetic
ccaauugauuggaaagucuguc

SEQ ID NO: 45880 - RNA, 23 nt, Artificial Sequence
  Synthetic
gccaauugauuggaaagucuguc

SEQ ID NO: 45881 - RNA, 24 nt, Artificial Sequence
  Synthetic
ggccaauugauuggaaagucuguc

SEQ ID NO: 45882 - RNA, 18 nt, Artificial Sequence
  Synthetic
gcuaucgcuggauguguc

SEQ ID NO: 45883 - RNA, 19 nt, Artificial Sequence
  Synthetic
ggcuaucgcuggauguguc

SEQ ID NO: 45884 - RNA, 20 nt, Artificial Sequence
  Synthetic
uggcuaucgcuggauguguc

SEQ ID NO: 45885 - RNA, 21 nt, Artificial Sequence
  Synthetic
cuggcuaucgcuggauguguc

SEQ ID NO: 45886 - RNA, 22 nt, Artificial Sequence
  Synthetic
ccuggcuaucgcuggauguguc

SEQ ID NO: 45887 - RNA, 23 nt, Artificial Sequence
  Synthetic
uccuggcuaucgcuggauguguc

SEQ ID NO: 45888 - RNA, 24 nt, Artificial Sequence
  Synthetic
guccuggcuaucgcuggauguguc

SEQ ID NO: 45889 - RNA, 18 nt, Artificial Sequence
  Synthetic
uaccaauuuucuuuuguc

SEQ ID NO: 45890 - RNA, 19 nt, Artificial Sequence
  Synthetic
uuaccaauuuucuuuuguc

SEQ ID NO: 45891 - RNA, 20 nt, Artificial Sequence
  Synthetic
guuaccaauuuucuuuuguc

SEQ ID NO: 45892 - RNA, 21 nt, Artificial Sequence
  Synthetic
uguuaccaauuuucuuuuguc

SEQ ID NO: 45893 - RNA, 22 nt, Artificial Sequence
  Synthetic
cuguuaccaauuuucuuuuguc

SEQ ID NO: 45894 - RNA, 23 nt, Artificial Sequence
  Synthetic
gcuguuaccaauuuucuuuuguc

SEQ ID NO: 45895 - RNA, 24 nt, Artificial Sequence
  Synthetic
cgcuguuaccaauuuucuuuuguc

SEQ ID NO: 45896 - RNA, 18 nt, Artificial Sequence
  Synthetic
aacaucacaucaggauuc

SEQ ID NO: 45897 - RNA, 19 nt, Artificial Sequence
  Synthetic
gaacaucacaucaggauuc

SEQ ID NO: 45898 - RNA, 20 nt, Artificial Sequence
  Synthetic
agaacaucacaucaggauuc

SEQ ID NO: 45899 - RNA, 21 nt, Artificial Sequence
  Synthetic
gagaacaucacaucaggauuc

SEQ ID NO: 45900 - RNA, 22 nt, Artificial Sequence
  Synthetic
ggagaacaucacaucaggauuc

SEQ ID NO: 45901 - RNA, 23 nt, Artificial Sequence
  Synthetic
uggagaacaucacaucaggauuc

SEQ ID NO: 45902 - RNA, 24 nt, Artificial Sequence
  Synthetic
auggagaacaucacaucaggauuc

SEQ ID NO: 45903 - RNA, 18 nt, Artificial Sequence
  Synthetic
uucccaauguuaguauuc

SEQ ID NO: 45904 - RNA, 19 nt, Artificial Sequence
  Synthetic
cuucccaauguuaguauuc

SEQ ID NO: 45905 - RNA, 20 nt, Artificial Sequence
  Synthetic
gcuucccaauguuaguauuc

SEQ ID NO: 45906 - RNA, 21 nt, Artificial Sequence
  Synthetic
agcuucccaauguuaguauuc

SEQ ID NO: 45907 - RNA, 22 nt, Artificial Sequence
  Synthetic
cagcuucccaauguuaguauuc

SEQ ID NO: 45908 - RNA, 23 nt, Artificial Sequence
  Synthetic
ccagcuucccaauguuaguauuc

SEQ ID NO: 45909 - RNA, 24 nt, Artificial Sequence
  Synthetic
uccagcuucccaauguuaguauuc

SEQ ID NO: 45910 - RNA, 18 nt, Artificial Sequence
  Synthetic
aaaaagaugggguuauuc

SEQ ID NO: 45911 - RNA, 19 nt, Artificial Sequence
  Synthetic
caaaaagaugggguuauuc

SEQ ID NO: 45912 - RNA, 20 nt, Artificial Sequence
  Synthetic
acaaaaagaugggguuauuc

SEQ ID NO: 45913 - RNA, 21 nt, Artificial Sequence
  Synthetic
aacaaaaagaugggguuauuc

SEQ ID NO: 45914 - RNA, 22 nt, Artificial Sequence
  Synthetic
aaacaaaaagaugggguuauuc

SEQ ID NO: 45915 - RNA, 23 nt, Artificial Sequence
  Synthetic
aaaacaaaaagaugggguuauuc

SEQ ID NO: 45916 - RNA, 24 nt, Artificial Sequence
  Synthetic
caaaacaaaaagaugggguuauuc

SEQ ID NO: 45917 - RNA, 18 nt, Artificial Sequence
  Synthetic
cuauccuaucaacacuuc

SEQ ID NO: 45918 - RNA, 19 nt, Artificial Sequence
  Synthetic
ccuauccuaucaacacuuc

SEQ ID NO: 45919 - RNA, 20 nt, Artificial Sequence
  Synthetic
cccuauccuaucaacacuuc

SEQ ID NO: 45920 - RNA, 21 nt, Artificial Sequence
  Synthetic
ccccuauccuaucaacacuuc

SEQ ID NO: 45921 - RNA, 22 nt, Artificial Sequence
  Synthetic
gccccuauccuaucaacacuuc

SEQ ID NO: 45922 - RNA, 23 nt, Artificial Sequence
  Synthetic
ugccccuauccuaucaacacuuc

SEQ ID NO: 45923 - RNA, 24 nt, Artificial Sequence
  Synthetic
augccccuauccuaucaacacuuc

SEQ ID NO: 45924 - RNA, 18 nt, Artificial Sequence
  Synthetic
  misc_feature (4)..(4): n is a, c, g, or u
gggnuggagaaauacuuc

SEQ ID NO: 45925 - RNA, 19 nt, Artificial Sequence
  Synthetic
  misc_feature (5)..(5): n is a, c, g, or u
cgggnuggagaaauacuuc

SEQ ID NO: 45926 - RNA, 20 nt, Artificial Sequence
  Synthetic
  misc_feature (6)..(6): n is a, c, g, or u
ccgggnuggagaaauacuuc

SEQ ID NO: 45927 - RNA, 21 nt, Artificial Sequence
  Synthetic
  misc_feature (7)..(7): n is a, c, g, or u
accgggnuggagaaauacuuc

SEQ ID NO: 45928 - RNA, 22 nt, Artificial Sequence
  Synthetic
  misc_feature (8)..(8): n is a, c, g, or u
aaccgggnuggagaaauacuuc

SEQ ID NO: 45929 - RNA, 23 nt, Artificial Sequence
  Synthetic
  misc_feature (9)..(9): n is a, c, g, or u
caaccgggnuggagaaauacuuc

SEQ ID NO: 45930 - RNA, 24 nt, Artificial Sequence
  Synthetic
  misc_feature (10)..(10): n is a, c, g, or u
acaaccgggnuggagaaauacuuc

SEQ ID NO: 45931 - RNA, 18 nt, Artificial Sequence
  Synthetic
cugccaacuggauccuuc

SEQ ID NO: 45932 - RNA, 19 nt, Artificial Sequence
  Synthetic
gcugccaacuggauccuuc

SEQ ID NO: 45933 - RNA, 20 nt, Artificial Sequence
  Synthetic
ugcugccaacuggauccuuc

SEQ ID NO: 45934 - RNA, 21 nt, Artificial Sequence
  Synthetic
gugcugccaacuggauccuuc

SEQ ID NO: 45935 - RNA, 22 nt, Artificial Sequence
  Synthetic
ugugcugccaacuggauccuuc

SEQ ID NO: 45936 - RNA, 23 nt, Artificial Sequence
  Synthetic
cugugcugccaacuggauccuuc

SEQ ID NO: 45937 - RNA, 24 nt, Artificial Sequence
  Synthetic
gcugugcugccaacuggauccuuc

SEQ ID NO: 45938 - RNA, 18 nt, Artificial Sequence
  Synthetic
cacaucucgucaaucuuc

SEQ ID NO: 45939 - RNA, 19 nt, Artificial Sequence
  Synthetic
ucacaucucgucaaucuuc

SEQ ID NO: 45940 - RNA, 20 nt, Artificial Sequence
  Synthetic
cucacaucucgucaaucuuc

SEQ ID NO: 45941 - RNA, 18 nt, Artificial Sequence
  Synthetic
ccauuuguucagugguuc

SEQ ID NO: 45942 - RNA, 19 nt, Artificial Sequence
  Synthetic
gccauuuguucagugguuc

SEQ ID NO: 45943 - RNA, 20 nt, Artificial Sequence
  Synthetic
ugccauuuguucagugguuc

SEQ ID NO: 45944 - RNA, 21 nt, Artificial Sequence
  Synthetic
gugccauuuguucagugguuc

SEQ ID NO: 45945 - RNA, 22 nt, Artificial Sequence
  Synthetic
agugccauuuguucagugguuc

SEQ ID NO: 45946 - RNA, 23 nt, Artificial Sequence
  Synthetic
uagugccauuuguucagugguuc

SEQ ID NO: 45947 - RNA, 24 nt, Artificial Sequence
  Synthetic
cuagugccauuuguucagugguuc

SEQ ID NO: 45948 - RNA, 18 nt, Artificial Sequence
  Synthetic
ggaaauauacauccuuuc

SEQ ID NO: 45949 - RNA, 19 nt, Artificial Sequence
  Synthetic
cggaaauauacauccuuuc

SEQ ID NO: 45950 - RNA, 20 nt, Artificial Sequence
  Synthetic
ucggaaauauacauccuuuc

SEQ ID NO: 45951 - RNA, 21 nt, Artificial Sequence
  Synthetic
cucggaaauauacauccuuuc

SEQ ID NO: 45952 - RNA, 22 nt, Artificial Sequence
  Synthetic
ucucggaaauauacauccuuuc

SEQ ID NO: 45953 - RNA, 23 nt, Artificial Sequence
  Synthetic
uucucggaaauauacauccuuuc

SEQ ID NO: 45954 - RNA, 24 nt, Artificial Sequence
  Synthetic
uuucucggaaauauacauccuuuc

SEQ ID NO: 45955 - RNA, 18 nt, Artificial Sequence
  Synthetic
caauucugucguccuuuc

SEQ ID NO: 45956 - RNA, 19 nt, Artificial Sequence
  Synthetic
acaauucugucguccuuuc

SEQ ID NO: 45957 - RNA, 20 nt, Artificial Sequence
  Synthetic
gacaauucugucguccuuuc

SEQ ID NO: 45958 - RNA, 21 nt, Artificial Sequence
  Synthetic
ugacaauucugucguccuuuc

SEQ ID NO: 45959 - RNA, 22 nt, Artificial Sequence
  Synthetic
cugacaauucugucguccuuuc

SEQ ID NO: 45960 - RNA, 23 nt, Artificial Sequence
  Synthetic
acugacaauucugucguccuuuc

SEQ ID NO: 45961 - RNA, 24 nt, Artificial Sequence
  Synthetic
gacugacaauucugucguccuuuc

SEQ ID NO: 45962 - RNA, 18 nt, Artificial Sequence
  Synthetic
cuacagcauggggcuuuc

SEQ ID NO: 45963 - RNA, 19 nt, Artificial Sequence
  Synthetic
ucuacagcauggggcuuuc

SEQ ID NO: 45964 - RNA, 20 nt, Artificial Sequence
  Synthetic
aucuacagcauggggcuuuc

SEQ ID NO: 45965 - RNA, 21 nt, Artificial Sequence
  Synthetic
gaucuacagcauggggcuuuc

SEQ ID NO: 45966 - RNA, 22 nt, Artificial Sequence
  Synthetic
agaucuacagcauggggcuuuc

SEQ ID NO: 45967 - RNA, 23 nt, Artificial Sequence
  Synthetic
aagaucuacagcauggggcuuuc

SEQ ID NO: 45968 - RNA, 24 nt, Artificial Sequence
  Synthetic
caagaucuacagcauggggcuuuc

SEQ ID NO: 45969 - RNA, 18 nt, Artificial Sequence
  Synthetic
ccaucaucuugggcuuuc

SEQ ID NO: 45970 - RNA, 19 nt, Artificial Sequence
  Synthetic
cccaucaucuugggcuuuc

SEQ ID NO: 45971 - RNA, 20 nt, Artificial Sequence
  Synthetic
ucccaucaucuugggcuuuc

SEQ ID NO: 45972 - RNA, 21 nt, Artificial Sequence
  Synthetic
aucccaucaucuugggcuuuc

SEQ ID NO: 45973 - RNA, 22 nt, Artificial Sequence
  Synthetic
caucccaucaucuugggcuuuc

SEQ ID NO: 45974 - RNA, 23 nt, Artificial Sequence
  Synthetic
ccaucccaucaucuugggcuuuc

SEQ ID NO: 45975 - RNA, 24 nt, Artificial Sequence
  Synthetic
cccaucccaucaucuugggcuuuc

SEQ ID NO: 45976 - RNA, 18 nt, Artificial Sequence
  Synthetic
ggacuucucucaauuuuc

SEQ ID NO: 45977 - RNA, 19 nt, Artificial Sequence
  Synthetic
uggacuucucucaauuuuc

SEQ ID NO: 45978 - RNA, 20 nt, Artificial Sequence
  Synthetic
guggacuucucucaauuuuc

SEQ ID NO: 45979 - RNA, 21 nt, Artificial Sequence
  Synthetic
gguggacuucucucaauuuuc

SEQ ID NO: 45980 - RNA, 22 nt, Artificial Sequence
  Synthetic
ugguggacuucucucaauuuuc

SEQ ID NO: 45981 - RNA, 23 nt, Artificial Sequence
  Synthetic
gugguggacuucucucaauuuuc

SEQ ID NO: 45982 - RNA, 24 nt, Artificial Sequence
  Synthetic
cgugguggacuucucucaauuuuc

SEQ ID NO: 45983 - RNA, 18 nt, Artificial Sequence
  Synthetic
aaauuaagcaauguuuuc

SEQ ID NO: 45984 - RNA, 19 nt, Artificial Sequence
  Synthetic
aaaauuaagcaauguuuuc

SEQ ID NO: 45985 - RNA, 20 nt, Artificial Sequence
  Synthetic
  misc_feature (1)..(1): n is a, c, g, or u
naaaauuaagcaauguuuuc

SEQ ID NO: 45986 - RNA, 21 nt, Artificial Sequence
  Synthetic
  misc_feature (2)..(2): n is a, c, g, or u
anaaaauuaagcaauguuuuc

SEQ ID NO: 45987 - RNA, 22 nt, Artificial Sequence
  Synthetic
  misc_feature (3)..(3): n is a, c, g, or u
canaaaauuaagcaauguuuuc

SEQ ID NO: 45988 - RNA, 23 nt, Artificial Sequence
  Synthetic
  misc_feature (4)..(4): n is a, c, g, or u
acanaaaauuaagcaauguuuuc

SEQ ID NO: 45989 - RNA, 24 nt, Artificial Sequence
  Synthetic
  misc_feature (5)..(5): n is a, c, g, or u
cacanaaaauuaagcaauguuuuc

SEQ ID NO: 45990 - RNA, 18 nt, Artificial Sequence
  Synthetic
augccugccagauuuuuc

SEQ ID NO: 45991 - RNA, 19 nt, Artificial Sequence
  Synthetic
uaugccugccagauuuuuc

SEQ ID NO: 45992 - RNA, 20 nt, Artificial Sequence
  Synthetic
uuaugccugccagauuuuuc

SEQ ID NO: 45993 - RNA, 21 nt, Artificial Sequence
  Synthetic
guuaugccugccagauuuuuc

SEQ ID NO: 45994 - RNA, 22 nt, Artificial Sequence
  Synthetic
aguuaugccugccagauuuuuc

SEQ ID NO: 45995 - RNA, 23 nt, Artificial Sequence
  Synthetic
uaguuaugccugccagauuuuuc

SEQ ID NO: 45996 - RNA, 24 nt, Artificial Sequence
  Synthetic
cuaguuaugccugccagauuuuuc

SEQ ID NO: 45997 - RNA, 18 nt, Artificial Sequence
  Synthetic
  misc_feature (3)..(3): n is a, c, g, or u
ccnuaacaaaacaaaaag

SEQ ID NO: 45998 - RNA, 19 nt, Artificial Sequence
  Synthetic
  misc_feature (4)..(4): n is a, c, g, or u
accnuaacaaaacaaaaag

SEQ ID NO: 45999 - RNA, 20 nt, Artificial Sequence
  Synthetic
  misc_feature (5)..(5): n is a, c, g, or u
aaccnuaacaaaacaaaaag

SEQ ID NO: 46000 - RNA, 21 nt, Artificial Sequence
  Synthetic
  misc_feature (6)..(6): n is a, c, g, or u
aaaccnuaacaaaacaaaaag

SEQ ID NO: 46001 - RNA, 22 nt, Artificial Sequence
  Synthetic
  misc_feature (7)..(7): n is a, c, g, or u
uaaaccnuaacaaaacaaaaag

SEQ ID NO: 46002 - RNA, 23 nt, Artificial Sequence
  Synthetic
  misc_feature (8)..(8): n is a, c, g, or u
cuaaaccnuaacaaaacaaaaag

SEQ ID NO: 46003 - RNA, 24 nt, Artificial Sequence
  Synthetic
  misc_feature (9)..(9): n is a, c, g, or u
ucuaaaccnuaacaaaacaaaaag

SEQ ID NO: 46004 - RNA, 18 nt, Artificial Sequence
  Synthetic
cucuacaaaaucccaaag

SEQ ID NO: 46005 - RNA, 19 nt, Artificial Sequence
  Synthetic
gcucuacaaaaucccaaag

SEQ ID NO: 46006 - RNA, 20 nt, Artificial Sequence
  Synthetic
agcucuacaaaaucccaaag

SEQ ID NO: 46007 - RNA, 21 nt, Artificial Sequence
  Synthetic
aagcucuacaaaaucccaaag

SEQ ID NO: 46008 - RNA, 22 nt, Artificial Sequence
  Synthetic
caagcucuacaaaaucccaaag

SEQ ID NO: 46009 - RNA, 23 nt, Artificial Sequence
  Synthetic
ccaagcucuacaaaaucccaaag

SEQ ID NO: 46010 - RNA, 24 nt, Artificial Sequence
  Synthetic
accaagcucuacaaaaucccaaag

SEQ ID NO: 46011 - RNA, 18 nt, Artificial Sequence
  Synthetic
uggccagaggccaacaag

SEQ ID NO: 46012 - RNA, 19 nt, Artificial Sequence
  Synthetic
uuggccagaggccaacaag

SEQ ID NO: 46013 - RNA, 20 nt, Artificial Sequence
  Synthetic
cuuggccagaggccaacaag

SEQ ID NO: 46014 - RNA, 21 nt, Artificial Sequence
  Synthetic
ccuuggccagaggccaacaag

SEQ ID NO: 46015 - RNA, 22 nt, Artificial Sequence
  Synthetic
cccuuggccagaggccaacaag

SEQ ID NO: 46016 - RNA, 23 nt, Artificial Sequence
  Synthetic
acccuuggccagaggccaacaag

SEQ ID NO: 46017 - RNA, 24 nt, Artificial Sequence
  Synthetic
gacccuuggccagaggccaacaag

SEQ ID NO: 46018 - RNA, 18 nt, Artificial Sequence
  Synthetic
auuccuuggacucacaag

SEQ ID NO: 46019 - RNA, 19 nt, Artificial Sequence
  Synthetic
uauuccuuggacucacaag

SEQ ID NO: 46020 - RNA, 20 nt, Artificial Sequence
  Synthetic
guauuccuuggacucacaag

SEQ ID NO: 46021 - RNA, 21 nt, Artificial Sequence
  Synthetic
aguauuccuuggacucacaag

SEQ ID NO: 46022 - RNA, 22 nt, Artificial Sequence
  Synthetic
uaguauuccuuggacucacaag

SEQ ID NO: 46023 - RNA, 23 nt, Artificial Sequence
  Synthetic
uuaguauuccuuggacucacaag

SEQ ID NO: 46024 - RNA, 24 nt, Artificial Sequence
  Synthetic
guuaguauuccuuggacucacaag

SEQ ID NO: 46025 - RNA, 18 nt, Artificial Sequence
  Synthetic
uauaugcauguauacaag

SEQ ID NO: 46026 - RNA, 19 nt, Artificial Sequence
  Synthetic
uuauaugcauguauacaag

SEQ ID NO: 46027 - RNA, 20 nt, Artificial Sequence
  Synthetic
uuuauaugcauguauacaag

SEQ ID NO: 46028 - RNA, 21 nt, Artificial Sequence
  Synthetic
cuuuauaugcauguauacaag

SEQ ID NO: 46029 - RNA, 22 nt, Artificial Sequence
  Synthetic
ccuuuauaugcauguauacaag

SEQ ID NO: 46030 - RNA, 23 nt, Artificial Sequence
  Synthetic
gccuuuauaugcauguauacaag

SEQ ID NO: 46031 - RNA, 24 nt, Artificial Sequence
  Synthetic
ugccuuuauaugcauguauacaag

SEQ ID NO: 46032 - RNA, 18 nt, Artificial Sequence
  Synthetic
aguaaaugagaaacgaag

SEQ ID NO: 46033 - RNA, 19 nt, Artificial Sequence
  Synthetic
caguaaaugagaaacgaag

SEQ ID NO: 46034 - RNA, 20 nt, Artificial Sequence
  Synthetic
acaguaaaugagaaacgaag

SEQ ID NO: 46035 - RNA, 21 nt, Artificial Sequence
  Synthetic
cacaguaaaugagaaacgaag

SEQ ID NO: 46036 - RNA, 22 nt, Artificial Sequence
  Synthetic
ucacaguaaaugagaaacgaag

SEQ ID NO: 46037 - RNA, 23 nt, Artificial Sequence
  Synthetic
cucacaguaaaugagaaacgaag

SEQ ID NO: 46038 - RNA, 24 nt, Artificial Sequence
  Synthetic
ucucacaguaaaugagaaacgaag

SEQ ID NO: 46039 - RNA, 18 nt, Artificial Sequence
  Synthetic
aggcagguccccucgaag

SEQ ID NO: 46040 - RNA, 19 nt, Artificial Sequence
  Synthetic
gaggcagguccccucgaag

SEQ ID NO: 46041 - RNA, 20 nt, Artificial Sequence
  Synthetic
agaggcagguccccucgaag

SEQ ID NO: 46042 - RNA, 21 nt, Artificial Sequence
  Synthetic
aagaggcagguccccucgaag

SEQ ID NO: 46043 - RNA, 22 nt, Artificial Sequence
  Synthetic
gaagaggcagguccccucgaag

SEQ ID NO: 46044 - RNA, 23 nt, Artificial Sequence
  Synthetic
cgaagaggcagguccccucgaag

SEQ ID NO: 46045 - RNA, 24 nt, Artificial Sequence
  Synthetic
acgaagaggcagguccccucgaag

SEQ ID NO: 46046 - RNA, 18 nt, Artificial Sequence
  Synthetic
gggauauguaauuggaag

SEQ ID NO: 46047 - RNA, 19 nt, Artificial Sequence
  Synthetic
ugggauauguaauuggaag

SEQ ID NO: 46048 - RNA, 20 nt, Artificial Sequence
  Synthetic
augggauauguaauuggaag

SEQ ID NO: 46049 - RNA, 21 nt, Artificial Sequence
  Synthetic
uaugggauauguaauuggaag

SEQ ID NO: 46050 - RNA, 22 nt, Artificial Sequence
  Synthetic
uuaugggauauguaauuggaag

SEQ ID NO: 46051 - RNA, 23 nt, Artificial Sequence
  Synthetic
uuuaugggauauguaauuggaag

SEQ ID NO: 46052 - RNA, 24 nt, Artificial Sequence
  Synthetic
uuuuaugggauauguaauuggaag

SEQ ID NO: 46053 - RNA, 18 nt, Artificial Sequence
  Synthetic
gcggguauucuauauaag

SEQ ID NO: 46054 - RNA, 19 nt, Artificial Sequence
  Synthetic
ggcggguauucuauauaag

SEQ ID NO: 46055 - RNA, 20 nt, Artificial Sequence
  Synthetic
aggcggguauucuauauaag

SEQ ID NO: 46056 - RNA, 21 nt, Artificial Sequence
  Synthetic
aaggcggguauucuauauaag

SEQ ID NO: 46057 - RNA, 22 nt, Artificial Sequence
  Synthetic
gaaggcggguauucuauauaag

SEQ ID NO: 46058 - RNA, 23 nt, Artificial Sequence
  Synthetic
ggaaggcggguauucuauauaag

SEQ ID NO: 46059 - RNA, 24 nt, Artificial Sequence
  Synthetic
uggaaggcggguauucuauauaag

SEQ ID NO: 46060 - RNA, 18 nt, Artificial Sequence
  Synthetic
ugggaacaagaucuacag

SEQ ID NO: 46061 - RNA, 19 nt, Artificial Sequence
  Synthetic
uugggaacaagaucuacag

SEQ ID NO: 46062 - RNA, 20 nt, Artificial Sequence
  Synthetic
cuugggaacaagaucuacag

SEQ ID NO: 46063 - RNA, 21 nt, Artificial Sequence
  Synthetic
acuugggaacaagaucuacag

SEQ ID NO: 46064 - RNA, 22 nt, Artificial Sequence
  Synthetic
uacuugggaacaagaucuacag

SEQ ID NO: 46065 - RNA, 23 nt, Artificial Sequence
  Synthetic
auacuugggaacaagaucuacag

SEQ ID NO: 46066 - RNA, 24 nt, Artificial Sequence
  Synthetic
uauacuugggaacaagaucuacag

SEQ ID NO: 46067 - RNA, 18 nt, Artificial Sequence
  Synthetic
ccccugcucguguuacag

SEQ ID NO: 46068 - RNA, 19 nt, Artificial Sequence
  Synthetic
accccugcucguguuacag

SEQ ID NO: 46069 - RNA, 20 nt, Artificial Sequence
  Synthetic
gaccccugcucguguuacag

SEQ ID NO: 46070 - RNA, 21 nt, Artificial Sequence
  Synthetic
ggaccccugcucguguuacag

SEQ ID NO: 46071 - RNA, 22 nt, Artificial Sequence
  Synthetic
aggaccccugcucguguuacag

SEQ ID NO: 46072 - RNA, 23 nt, Artificial Sequence
  Synthetic
uaggaccccugcucguguuacag

SEQ ID NO: 46073 - RNA, 24 nt, Artificial Sequence
  Synthetic
cuaggaccccugcucguguuacag

SEQ ID NO: 46074 - RNA, 18 nt, Artificial Sequence
  Synthetic
aggauccucgaccaccag

SEQ ID NO: 46075 - RNA, 19 nt, Artificial Sequence
  Synthetic
caggauccucgaccaccag

SEQ ID NO: 46076 - RNA, 20 nt, Artificial Sequence
  Synthetic
ccaggauccucgaccaccag

SEQ ID NO: 46077 - RNA, 21 nt, Artificial Sequence
  Synthetic
uccaggauccucgaccaccag

SEQ ID NO: 46078 - RNA, 22 nt, Artificial Sequence
  Synthetic
uuccaggauccucgaccaccag

SEQ ID NO: 46079 - RNA, 23 nt, Artificial Sequence
  Synthetic
auuccaggauccucgaccaccag

SEQ ID NO: 46080 - RNA, 24 nt, Artificial Sequence
  Synthetic
gauuccaggauccucgaccaccag

SEQ ID NO: 46081 - RNA, 18 nt, Artificial Sequence
  Synthetic
uuccuucccgaucaccag

SEQ ID NO: 46082 - RNA, 19 nt, Artificial Sequence
  Synthetic
auuccuucccgaucaccag

SEQ ID NO: 46083 - RNA, 20 nt, Artificial Sequence
  Synthetic
gauuccuucccgaucaccag

SEQ ID NO: 46084 - RNA, 21 nt, Artificial Sequence
  Synthetic
ggauuccuucccgaucaccag

SEQ ID NO: 46085 - RNA, 22 nt, Artificial Sequence
  Synthetic
aggauuccuucccgaucaccag

SEQ ID NO: 46086 - RNA, 23 nt, Artificial Sequence
  Synthetic
uaggauuccuucccgaucaccag

SEQ ID NO: 46087 - RNA, 24 nt, Artificial Sequence
  Synthetic
cuaggauuccuucccgaucaccag

SEQ ID NO: 46088 - RNA, 18 nt, Artificial Sequence
  Synthetic
caaauaccaacaauccag

SEQ ID NO: 46089 - RNA, 19 nt, Artificial Sequence
  Synthetic
gcaaauaccaacaauccag

SEQ ID NO: 46090 - RNA, 20 nt, Artificial Sequence
  Synthetic
agcaaauaccaacaauccag

SEQ ID NO: 46091 - RNA, 21 nt, Artificial Sequence
  Synthetic
gagcaaauaccaacaauccag

SEQ ID NO: 46092 - RNA, 22 nt, Artificial Sequence
  Synthetic
agagcaaauaccaacaauccag

SEQ ID NO: 46093 - RNA, 23 nt, Artificial Sequence
  Synthetic
cagagcaaauaccaacaauccag

SEQ ID NO: 46094 - RNA, 24 nt, Artificial Sequence
  Synthetic
ucagagcaaauaccaacaauccag

SEQ ID NO: 46095 - RNA, 18 nt, Artificial Sequence
  Synthetic
uccugcugguggcuccag

SEQ ID NO: 46096 - RNA, 19 nt, Artificial Sequence
  Synthetic
uuccugcugguggcuccag

SEQ ID NO: 46097 - RNA, 20 nt, Artificial Sequence
  Synthetic
  misc_feature (1)..(1): n is a, c, g, or u
nuuccugcugguggcuccag

SEQ ID NO: 46098 - RNA, 21 nt, Artificial Sequence
  Synthetic
  misc_feature (2)..(2): n is a, c, g, or u
unuuccugcugguggcuccag

SEQ ID NO: 46099 - RNA, 22 nt, Artificial Sequence
  Synthetic
  misc_feature (3)..(3): n is a, c, g, or u
aunuuccugcugguggcuccag

SEQ ID NO: 46100 - RNA, 23 nt, Artificial Sequence
  Synthetic
  misc_feature (4)..(4): n is a, c, g, or u
uaunuuccugcugguggcuccag

SEQ ID NO: 46101 - RNA, 24 nt, Artificial Sequence
  Synthetic
  misc_feature (5)..(5): n is a, c, g, or u
guaunuuccugcugguggcuccag

SEQ ID NO: 46102 - RNA, 18 nt, Artificial Sequence
  Synthetic
guuaaucauuacuuccag

SEQ ID NO: 46103 - RNA, 19 nt, Artificial Sequence
  Synthetic
aguuaaucauuacuuccag

SEQ ID NO: 46104 - RNA, 20 nt, Artificial Sequence
  Synthetic
uaguuaaucauuacuuccag

SEQ ID NO: 46105 - RNA, 21 nt, Artificial Sequence
  Synthetic
guaguuaaucauuacuuccag

SEQ ID NO: 46106 - RNA, 22 nt, Artificial Sequence
  Synthetic
uguaguuaaucauuacuuccag

SEQ ID NO: 46107 - RNA, 23 nt, Artificial Sequence
  Synthetic
auguaguuaaucauuacuuccag

SEQ ID NO: 46108 - RNA, 24 nt, Artificial Sequence
  Synthetic
aauguaguuaaucauuacuuccag

SEQ ID NO: 46109 - RNA, 18 nt, Artificial Sequence
  Synthetic
aacucccucgccucgcag

SEQ ID NO: 46110 - RNA, 19 nt, Artificial Sequence
  Synthetic
gaacucccucgccucgcag

SEQ ID NO: 46111 - RNA, 20 nt, Artificial Sequence
  Synthetic
agaacucccucgccucgcag

SEQ ID NO: 46112 - RNA, 21 nt, Artificial Sequence
  Synthetic
aagaacucccucgccucgcag

SEQ ID NO: 46113 - RNA, 22 nt, Artificial Sequence
  Synthetic
gaagaacucccucgccucgcag

SEQ ID NO: 46114 - RNA, 23 nt, Artificial Sequence
  Synthetic
agaagaacucccucgccucgcag

SEQ ID NO: 46115 - RNA, 24 nt, Artificial Sequence
  Synthetic
aagaagaacucccucgccucgcag

SEQ ID NO: 46116 - RNA, 18 nt, Artificial Sequence
  Synthetic
cauccucaggccaugcag

SEQ ID NO: 46117 - RNA, 19 nt, Artificial Sequence
  Synthetic
ucauccucaggccaugcag

SEQ ID NO: 46118 - RNA, 20 nt, Artificial Sequence
  Synthetic
gucauccucaggccaugcag

SEQ ID NO: 46119 - RNA, 21 nt, Artificial Sequence
  Synthetic
agucauccucaggccaugcag

SEQ ID NO: 46120 - RNA, 22 nt, Artificial Sequence
  Synthetic
cagucauccucaggccaugcag

SEQ ID NO: 46121 - RNA, 23 nt, Artificial Sequence
  Synthetic
acagucauccucaggccaugcag

SEQ ID NO: 46122 - RNA, 24 nt, Artificial Sequence
  Synthetic
gacagucauccucaggccaugcag

SEQ ID NO: 46123 - RNA, 18 nt, Artificial Sequence
  Synthetic
ucaccauacagcacucag

SEQ ID NO: 46124 - RNA, 19 nt, Artificial Sequence
  Synthetic
cucaccauacagcacucag

SEQ ID NO: 46125 - RNA, 20 nt, Artificial Sequence
  Synthetic
ccucaccauacagcacucag

SEQ ID NO: 46126 - RNA, 21 nt, Artificial Sequence
  Synthetic
gccucaccauacagcacucag

SEQ ID NO: 46127 - RNA, 22 nt, Artificial Sequence
  Synthetic
cgccucaccauacagcacucag

SEQ ID NO: 46128 - RNA, 23 nt, Artificial Sequence
  Synthetic
ucgccucaccauacagcacucag

SEQ ID NO: 46129 - RNA, 24 nt, Artificial Sequence
  Synthetic
uucgccucaccauacagcacucag

SEQ ID NO: 46130 - RNA, 18 nt, Artificial Sequence
  Synthetic
ccaccaaucgucagucag

SEQ ID NO: 46131 - RNA, 19 nt, Artificial Sequence
  Synthetic
uccaccaaucgucagucag

SEQ ID NO: 46132 - RNA, 20 nt, Artificial Sequence
  Synthetic
cuccaccaaucgucagucag

SEQ ID NO: 46133 - RNA, 21 nt, Artificial Sequence
  Synthetic
ccuccaccaaucgucagucag

SEQ ID NO: 46134 - RNA, 22 nt, Artificial Sequence
  Synthetic
gccuccaccaaucgucagucag

SEQ ID NO: 46135 - RNA, 23 nt, Artificial Sequence
  Synthetic
ugccuccaccaaucgucagucag

SEQ ID NO: 46136 - RNA, 24 nt, Artificial Sequence
  Synthetic
cugccuccaccaaucgucagucag

SEQ ID NO: 46137 - RNA, 18 nt, Artificial Sequence
  Synthetic
gccuccaccaaucgucag

SEQ ID NO: 46138 - RNA, 19 nt, Artificial Sequence
  Synthetic
ugccuccaccaaucgucag

SEQ ID NO: 46139 - RNA, 20 nt, Artificial Sequence
  Synthetic
cugccuccaccaaucgucag

SEQ ID NO: 46140 - RNA, 21 nt, Artificial Sequence
  Synthetic
ccugccuccaccaaucgucag

SEQ ID NO: 46141 - RNA, 22 nt, Artificial Sequence
  Synthetic
uccugccuccaccaaucgucag

SEQ ID NO: 46142 - RNA, 23 nt, Artificial Sequence
  Synthetic
cuccugccuccaccaaucgucag

SEQ ID NO: 46143 - RNA, 24 nt, Artificial Sequence
  Synthetic
ccuccugccuccaccaaucgucag

SEQ ID NO: 46144 - RNA, 18 nt, Artificial Sequence
  Synthetic
guuggacccagcauucag

SEQ ID NO: 46145 - RNA, 19 nt, Artificial Sequence
  Synthetic
aguuggacccagcauucag

SEQ ID NO: 46146 - RNA, 20 nt, Artificial Sequence
  Synthetic
caguuggacccagcauucag

SEQ ID NO: 46147 - RNA, 21 nt, Artificial Sequence
  Synthetic
ccaguuggacccagcauucag

SEQ ID NO: 46148 - RNA, 22 nt, Artificial Sequence
  Synthetic
accaguuggacccagcauucag

SEQ ID NO: 46149 - RNA, 23 nt, Artificial Sequence
  Synthetic
caccaguuggacccagcauucag

SEQ ID NO: 46150 - RNA, 24 nt, Artificial Sequence
  Synthetic
ucaccaguuggacccagcauucag

SEQ ID NO: 46151 - RNA, 18 nt, Artificial Sequence
  Synthetic
ggguauucuauauaagag

SEQ ID NO: 46152 - RNA, 19 nt, Artificial Sequence
  Synthetic
cggguauucuauauaagag

SEQ ID NO: 46153 - RNA, 20 nt, Artificial Sequence
  Synthetic
gcggguauucuauauaagag

SEQ ID NO: 46154 - RNA, 21 nt, Artificial Sequence
  Synthetic
ggcggguauucuauauaagag

SEQ ID NO: 46155 - RNA, 22 nt, Artificial Sequence
  Synthetic
aggcggguauucuauauaagag

SEQ ID NO: 46156 - RNA, 23 nt, Artificial Sequence
  Synthetic
aaggcggguauucuauauaagag

SEQ ID NO: 46157 - RNA, 24 nt, Artificial Sequence
  Synthetic
gaaggcggguauucuauauaagag

SEQ ID NO: 46158 - RNA, 18 nt, Artificial Sequence
  Synthetic
aaggacccuuggccagag

SEQ ID NO: 46159 - RNA, 19 nt, Artificial Sequence
  Synthetic
aaaggacccuuggccagag

SEQ ID NO: 46160 - RNA, 20 nt, Artificial Sequence
  Synthetic
aaaaggacccuuggccagag

SEQ ID NO: 46161 - RNA, 21 nt, Artificial Sequence
  Synthetic
aaaaaggacccuuggccagag

SEQ ID NO: 46162 - RNA, 22 nt, Artificial Sequence
  Synthetic
caaaaaggacccuuggccagag

SEQ ID NO: 46163 - RNA, 23 nt, Artificial Sequence
  Synthetic
ccaaaaaggacccuuggccagag

SEQ ID NO: 46164 - RNA, 24 nt, Artificial Sequence
  Synthetic
cccaaaaaggacccuuggccagag

SEQ ID NO: 46165 - RNA, 18 nt, Artificial Sequence
  Synthetic
ccucacaauaccgcagag

SEQ ID NO: 46166 - RNA, 19 nt, Artificial Sequence
  Synthetic
uccucacaauaccgcagag

SEQ ID NO: 46167 - RNA, 20 nt, Artificial Sequence
  Synthetic
auccucacaauaccgcagag

SEQ ID NO: 46168 - RNA, 21 nt, Artificial Sequence
  Synthetic
aauccucacaauaccgcagag

SEQ ID NO: 46169 - RNA, 22 nt, Artificial Sequence
  Synthetic
gaauccucacaauaccgcagag

SEQ ID NO: 46170 - RNA, 23 nt, Artificial Sequence
  Synthetic
agaauccucacaauaccgcagag

SEQ ID NO: 46171 - RNA, 24 nt, Artificial Sequence
  Synthetic
aagaauccucacaauaccgcagag

SEQ ID NO: 46172 - RNA, 18 nt, Artificial Sequence
  Synthetic
uggacggucccucucgag

SEQ ID NO: 46173 - RNA, 19 nt, Artificial Sequence
  Synthetic
uuggacggucccucucgag

SEQ ID NO: 46174 - RNA, 20 nt, Artificial Sequence
  Synthetic
cuuggacggucccucucgag

SEQ ID NO: 46175 - RNA, 21 nt, Artificial Sequence
  Synthetic
ucuuggacggucccucucgag

SEQ ID NO: 46176 - RNA, 22 nt, Artificial Sequence
  Synthetic
uucuuggacggucccucucgag

SEQ ID NO: 46177 - RNA, 23 nt, Artificial Sequence
  Synthetic
uuucuuggacggucccucucgag

SEQ ID NO: 46178 - RNA, 24 nt, Artificial Sequence
  Synthetic
cuuucuuggacggucccucucgag

SEQ ID NO: 46179 - RNA, 18 nt, Artificial Sequence
  Synthetic
aggccaacaagguaggag

SEQ ID NO: 46180 - RNA, 19 nt, Artificial Sequence
  Synthetic
gaggccaacaagguaggag

SEQ ID NO: 46181 - RNA, 20 nt, Artificial Sequence
  Synthetic
agaggccaacaagguaggag

SEQ ID NO: 46182 - RNA, 21 nt, Artificial Sequence
  Synthetic
cagaggccaacaagguaggag

SEQ ID NO: 46183 - RNA, 22 nt, Artificial Sequence
  Synthetic
ccagaggccaacaagguaggag

SEQ ID NO: 46184 - RNA, 23 nt, Artificial Sequence
  Synthetic
gccagaggccaacaagguaggag

SEQ ID NO: 46185 - RNA, 24 nt, Artificial Sequence
  Synthetic
ggccagaggccaacaagguaggag

SEQ ID NO: 46186 - RNA, 18 nt, Artificial Sequence
  Synthetic
cugucuuacuuuugggag

SEQ ID NO: 46187 - RNA, 19 nt, Artificial Sequence
  Synthetic
ccugucuuacuuuugggag

SEQ ID NO: 46188 - RNA, 20 nt, Artificial Sequence
  Synthetic
uccugucuuacuuuugggag

SEQ ID NO: 46189 - RNA, 21 nt, Artificial Sequence
  Synthetic
uuccugucuuacuuuugggag

SEQ ID NO: 46190 - RNA, 22 nt, Artificial Sequence
  Synthetic
uuuccugucuuacuuuugggag

SEQ ID NO: 46191 - RNA, 23 nt, Artificial Sequence
  Synthetic
auuuccugucuuacuuuugggag

SEQ ID NO: 46192 - RNA, 24 nt, Artificial Sequence
  Synthetic
cauuuccugucuuacuuuugggag

SEQ ID NO: 46193 - RNA, 18 nt, Artificial Sequence
  Synthetic
cucgcagccggucuggag

SEQ ID NO: 46194 - RNA, 19 nt, Artificial Sequence
  Synthetic
gcucgcagccggucuggag

SEQ ID NO: 46195 - RNA, 20 nt, Artificial Sequence
  Synthetic
ugcucgcagccggucuggag

SEQ ID NO: 46196 - RNA, 21 nt, Artificial Sequence
  Synthetic
uugcucgcagccggucuggag

SEQ ID NO: 46197 - RNA, 22 nt, Artificial Sequence
  Synthetic
uuugcucgcagccggucuggag

SEQ ID NO: 46198 - RNA, 23 nt, Artificial Sequence
  Synthetic
uuuugcucgcagccggucuggag

SEQ ID NO: 46199 - RNA, 24 nt, Artificial Sequence
  Synthetic
guuuugcucgcagccggucuggag

SEQ ID NO: 46200 - RNA, 18 nt, Artificial Sequence
  Synthetic
auuuggugucuuuuggag

SEQ ID NO: 46201 - RNA, 19 nt, Artificial Sequence
  Synthetic
uauuuggugucuuuuggag

SEQ ID NO: 46202 - RNA, 20 nt, Artificial Sequence
  Synthetic
guauuuggugucuuuuggag

SEQ ID NO: 46203 - RNA, 21 nt, Artificial Sequence
  Synthetic
aguauuuggugucuuuuggag

SEQ ID NO: 46204 - RNA, 22 nt, Artificial Sequence
  Synthetic
gaguauuuggugucuuuuggag

SEQ ID NO: 46205 - RNA, 23 nt, Artificial Sequence
  Synthetic
ugaguauuuggugucuuuuggag

SEQ ID NO: 46206 - RNA, 24 nt, Artificial Sequence
  Synthetic
uugaguauuuggugucuuuuggag

SEQ ID NO: 46207 - RNA, 18 nt, Artificial Sequence
  Synthetic
gaagaauuaggcaaugag

SEQ ID NO: 46208 - RNA, 19 nt, Artificial Sequence
  Synthetic
ggaagaauuaggcaaugag

SEQ ID NO: 46209 - RNA, 20 nt, Artificial Sequence
  Synthetic
gggaagaauuaggcaaugag

SEQ ID NO: 46210 - RNA, 21 nt, Artificial Sequence
  Synthetic
ugggaagaauuaggcaaugag

SEQ ID NO: 46211 - RNA, 22 nt, Artificial Sequence
  Synthetic
gugggaagaauuaggcaaugag

SEQ ID NO: 46212 - RNA, 23 nt, Artificial Sequence
  Synthetic
agugggaagaauuaggcaaugag

SEQ ID NO: 46213 - RNA, 24 nt, Artificial Sequence
  Synthetic
gagugggaagaauuaggcaaugag

SEQ ID NO: 46214 - RNA, 18 nt, Artificial Sequence
  Synthetic
gacuguguuuuugcugag

SEQ ID NO: 46215 - RNA, 19 nt, Artificial Sequence
  Synthetic
ggacuguguuuuugcugag

SEQ ID NO: 46216 - RNA, 20 nt, Artificial Sequence
  Synthetic
aggacuguguuuuugcugag

SEQ ID NO: 46217 - RNA, 21 nt, Artificial Sequence
  Synthetic
aaggacuguguuuuugcugag

SEQ ID NO: 46218 - RNA, 22 nt, Artificial Sequence
  Synthetic
caaggacuguguuuuugcugag

SEQ ID NO: 46219 - RNA, 23 nt, Artificial Sequence
  Synthetic
ucaaggacuguguuuuugcugag

SEQ ID NO: 46220 - RNA, 24 nt, Artificial Sequence
  Synthetic
uucaaggacuguguuuuugcugag

SEQ ID NO: 46221 - RNA, 18 nt, Artificial Sequence
  Synthetic
gcuuuagggcauggauag

SEQ ID NO: 46222 - RNA, 19 nt, Artificial Sequence
  Synthetic
ggcuuuagggcauggauag

SEQ ID NO: 46223 - RNA, 20 nt, Artificial Sequence
  Synthetic
uggcuuuagggcauggauag

SEQ ID NO: 46224 - RNA, 21 nt, Artificial Sequence
  Synthetic
guggcuuuagggcauggauag

SEQ ID NO: 46225 - RNA, 22 nt, Artificial Sequence
  Synthetic
gguggcuuuagggcauggauag

SEQ ID NO: 46226 - RNA, 23 nt, Artificial Sequence
  Synthetic
ggguggcuuuagggcauggauag

SEQ ID NO: 46227 - RNA, 24 nt, Artificial Sequence
  Synthetic
uggguggcuuuagggcauggauag

SEQ ID NO: 46228 - RNA, 18 nt, Artificial Sequence
  Synthetic
cuucucucaauuuucuag

SEQ ID NO: 46229 - RNA, 19 nt, Artificial Sequence
  Synthetic
acuucucucaauuuucuag

SEQ ID NO: 46230 - RNA, 20 nt, Artificial Sequence
  Synthetic
gacuucucucaauuuucuag

SEQ ID NO: 46231 - RNA, 21 nt, Artificial Sequence
  Synthetic
ggacuucucucaauuuucuag

SEQ ID NO: 46232 - RNA, 22 nt, Artificial Sequence
  Synthetic
uggacuucucucaauuuucuag

SEQ ID NO: 46233 - RNA, 23 nt, Artificial Sequence
  Synthetic
guggacuucucucaauuuucuag

SEQ ID NO: 46234 - RNA, 24 nt, Artificial Sequence
  Synthetic
gguggacuucucucaauuuucuag

SEQ ID NO: 46235 - RNA, 18 nt, Artificial Sequence
  Synthetic
cuaaauauuuaccauuag

SEQ ID NO: 46236 - RNA, 19 nt, Artificial Sequence
  Synthetic
acuaaauauuuaccauuag

SEQ ID NO: 46237 - RNA, 20 nt, Artificial Sequence
  Synthetic
uacuaaauauuuaccauuag

SEQ ID NO: 46238 - RNA, 21 nt, Artificial Sequence
  Synthetic
cuacuaaauauuuaccauuag

SEQ ID NO: 46239 - RNA, 22 nt, Artificial Sequence
  Synthetic
ucuacuaaauauuuaccauuag

SEQ ID NO: 46240 - RNA, 23 nt, Artificial Sequence
  Synthetic
cucuacuaaauauuuaccauuag

SEQ ID NO: 46241 - RNA, 24 nt, Artificial Sequence
  Synthetic
acucuacuaaauauuuaccauuag

SEQ ID NO: 46242 - RNA, 18 nt, Artificial Sequence
  Synthetic
ggagacuacuguuguuag

SEQ ID NO: 46243 - RNA, 19 nt, Artificial Sequence
  Synthetic
cggagacuacuguuguuag

SEQ ID NO: 46244 - RNA, 20 nt, Artificial Sequence
  Synthetic
ccggagacuacuguuguuag

SEQ ID NO: 46245 - RNA, 21 nt, Artificial Sequence
  Synthetic
uccggagacuacuguuguuag

SEQ ID NO: 46246 - RNA, 22 nt, Artificial Sequence
  Synthetic
uuccggagacuacuguuguuag

SEQ ID NO: 46247 - RNA, 23 nt, Artificial Sequence
  Synthetic
cuuccggagacuacuguuguuag

SEQ ID NO: 46248 - RNA, 24 nt, Artificial Sequence
  Synthetic
acuuccggagacuacuguuguuag

SEQ ID NO: 46249 - RNA, 18 nt, Artificial Sequence
  Synthetic
uuggaaagucugucaacg

SEQ ID NO: 46250 - RNA, 19 nt, Artificial Sequence
  Synthetic
auuggaaagucugucaacg

SEQ ID NO: 46251 - RNA, 20 nt, Artificial Sequence
  Synthetic
gauuggaaagucugucaacg

SEQ ID NO: 46252 - RNA, 21 nt, Artificial Sequence
  Synthetic
ugauuggaaagucugucaacg

SEQ ID NO: 46253 - RNA, 22 nt, Artificial Sequence
  Synthetic
uugauuggaaagucugucaacg

SEQ ID NO: 46254 - RNA, 23 nt, Artificial Sequence
  Synthetic
auugauuggaaagucugucaacg

SEQ ID NO: 46255 - RNA, 24 nt, Artificial Sequence
  Synthetic
aauugauuggaaagucugucaacg

SEQ ID NO: 46256 - RNA, 18 nt, Artificial Sequence
  Synthetic
gacuacuguuguuagacg

SEQ ID NO: 46257 - RNA, 19 nt, Artificial Sequence
  Synthetic
agacuacuguuguuagacg

SEQ ID NO: 46258 - RNA, 20 nt, Artificial Sequence
  Synthetic
gagacuacuguuguuagacg

SEQ ID NO: 46259 - RNA, 21 nt, Artificial Sequence
  Synthetic
ggagacuacuguuguuagacg

SEQ ID NO: 46260 - RNA, 22 nt, Artificial Sequence
  Synthetic
cggagacuacuguuguuagacg

SEQ ID NO: 46261 - RNA, 23 nt, Artificial Sequence
  Synthetic
ccggagacuacuguuguuagacg

SEQ ID NO: 46262 - RNA, 24 nt, Artificial Sequence
  Synthetic
uccggagacuacuguuguuagacg

SEQ ID NO: 46263 - RNA, 18 nt, Artificial Sequence
  Synthetic
cgaccccucccggggccg

SEQ ID NO: 46264 - RNA, 19 nt, Artificial Sequence
  Synthetic
acgaccccucccggggccg

SEQ ID NO: 46265 - RNA, 20 nt, Artificial Sequence
  Synthetic
gacgaccccucccggggccg

SEQ ID NO: 46266 - RNA, 21 nt, Artificial Sequence
  Synthetic
ggacgaccccucccggggccg

SEQ ID NO: 46267 - RNA, 22 nt, Artificial Sequence
  Synthetic
cggacgaccccucccggggccg

SEQ ID NO: 46268 - RNA, 23 nt, Artificial Sequence
  Synthetic
gcggacgaccccucccggggccg

SEQ ID NO: 46269 - RNA, 24 nt, Artificial Sequence
  Synthetic
agcggacgaccccucccggggccg

SEQ ID NO: 46270 - RNA, 18 nt, Artificial Sequence
  Synthetic
ucagcgcugaauccagcg

SEQ ID NO: 46271 - RNA, 19 nt, Artificial Sequence
  Synthetic
gucagcgcugaauccagcg

SEQ ID NO: 46272 - RNA, 20 nt, Artificial Sequence
  Synthetic
cgucagcgcugaauccagcg

SEQ ID NO: 46273 - RNA, 18 nt, Artificial Sequence
  Synthetic
  misc_feature (4)..(4): n is a, c, g, or u
cggncaucagcgcaugcg

SEQ ID NO: 46274 - RNA, 19 nt, Artificial Sequence
  Synthetic
  misc_feature (5)..(5): n is a, c, g, or u
ucggncaucagcgcaugcg

SEQ ID NO: 46275 - RNA, 20 nt, Artificial Sequence
  Synthetic
  misc_feature (6)..(6): n is a, c, g, or u
aucggncaucagcgcaugcg

SEQ ID NO: 46276 - RNA, 21 nt, Artificial Sequence
  Synthetic
  misc_feature (7)..(7): n is a, c, g, or u
caucggncaucagcgcaugcg

SEQ ID NO: 46277 - RNA, 22 nt, Artificial Sequence
  Synthetic
  misc_feature (8)..(8): n is a, c, g, or u
ccaucggncaucagcgcaugcg

SEQ ID NO: 46278 - RNA, 23 nt, Artificial Sequence
  Synthetic
  misc_feature (9)..(9): n is a, c, g, or u
gccaucggncaucagcgcaugcg

SEQ ID NO: 46279 - RNA, 24 nt, Artificial Sequence
  Synthetic
  misc_feature (10)..(10): n is a, c, g, or u
ggccaucggncaucagcgcaugcg

SEQ ID NO: 46280 - RNA, 18 nt, Artificial Sequence
  Synthetic
aagaggcagguccccucg

SEQ ID NO: 46281 - RNA, 19 nt, Artificial Sequence
  Synthetic
gaagaggcagguccccucg

SEQ ID NO: 46282 - RNA, 20 nt, Artificial Sequence
  Synthetic
cgaagaggcagguccccucg

SEQ ID NO: 46283 - RNA, 18 nt, Artificial Sequence
  Synthetic
cuuggacggucccucucg

SEQ ID NO: 46284 - RNA, 19 nt, Artificial Sequence
  Synthetic
ucuuggacggucccucucg

SEQ ID NO: 46285 - RNA, 20 nt, Artificial Sequence
  Synthetic
uucuuggacggucccucucg

SEQ ID NO: 46286 - RNA, 18 nt, Artificial Sequence
  Synthetic
aucucaaucgccgcgucg

SEQ ID NO: 46287 - RNA, 19 nt, Artificial Sequence
  Synthetic
gaucucaaucgccgcgucg

SEQ ID NO: 46288 - RNA, 20 nt, Artificial Sequence
  Synthetic
agaucucaaucgccgcgucg

SEQ ID NO: 46289 - RNA, 18 nt, Artificial Sequence
  Synthetic
ugcuguacaaaaccuucg

SEQ ID NO: 46290 - RNA, 19 nt, Artificial Sequence
  Synthetic
uugcuguacaaaaccuucg

SEQ ID NO: 46291 - RNA, 20 nt, Artificial Sequence
  Synthetic
guugcuguacaaaaccuucg

SEQ ID NO: 46292 - RNA, 21 nt, Artificial Sequence
  Synthetic
uguugcuguacaaaaccuucg

SEQ ID NO: 46293 - RNA, 22 nt, Artificial Sequence
  Synthetic
auguugcuguacaaaaccuucg

SEQ ID NO: 46294 - RNA, 23 nt, Artificial Sequence
  Synthetic
cauguugcuguacaaaaccuucg

SEQ ID NO: 46295 - RNA, 24 nt, Artificial Sequence
  Synthetic
ucauguugcuguacaaaaccuucg

SEQ ID NO: 46296 - RNA, 18 nt, Artificial Sequence
  Synthetic
ugccaacuggauccuucg

SEQ ID NO: 46297 - RNA, 19 nt, Artificial Sequence
  Synthetic
cugccaacuggauccuucg

SEQ ID NO: 46298 - RNA, 20 nt, Artificial Sequence
  Synthetic
gcugccaacuggauccuucg

SEQ ID NO: 46299 - RNA, 21 nt, Artificial Sequence
  Synthetic
ugcugccaacuggauccuucg

SEQ ID NO: 46300 - RNA, 22 nt, Artificial Sequence
  Synthetic
gugcugccaacuggauccuucg

SEQ ID NO: 46301 - RNA, 23 nt, Artificial Sequence
  Synthetic
ugugcugccaacuggauccuucg

SEQ ID NO: 46302 - RNA, 24 nt, Artificial Sequence
  Synthetic
cugugcugccaacuggauccuucg

SEQ ID NO: 46303 - RNA, 18 nt, Artificial Sequence
  Synthetic
cauuuguucagugguucg

SEQ ID NO: 46304 - RNA, 19 nt, Artificial Sequence
  Synthetic
ccauuuguucagugguucg

SEQ ID NO: 46305 - RNA, 20 nt, Artificial Sequence
  Synthetic
gccauuuguucagugguucg

SEQ ID NO: 46306 - RNA, 21 nt, Artificial Sequence
  Synthetic
ugccauuuguucagugguucg

SEQ ID NO: 46307 - RNA, 22 nt, Artificial Sequence
  Synthetic
gugccauuuguucagugguucg

SEQ ID NO: 46308 - RNA, 23 nt, Artificial Sequence
  Synthetic
agugccauuuguucagugguucg

SEQ ID NO: 46309 - RNA, 24 nt, Artificial Sequence
  Synthetic
uagugccauuuguucagugguucg

SEQ ID NO: 46310 - RNA, 18 nt, Artificial Sequence
  Synthetic
ggccagaggccaacaagg

SEQ ID NO: 46311 - RNA, 19 nt, Artificial Sequence
  Synthetic
uggccagaggccaacaagg

SEQ ID NO: 46312 - RNA, 20 nt, Artificial Sequence
  Synthetic
uuggccagaggccaacaagg

SEQ ID NO: 46313 - RNA, 21 nt, Artificial Sequence
  Synthetic
cuuggccagaggccaacaagg

SEQ ID NO: 46314 - RNA, 22 nt, Artificial Sequence
  Synthetic
ccuuggccagaggccaacaagg

SEQ ID NO: 46315 - RNA, 23 nt, Artificial Sequence
  Synthetic
cccuuggccagaggccaacaagg

SEQ ID NO: 46316 - RNA, 24 nt, Artificial Sequence
  Synthetic
acccuuggccagaggccaacaagg

SEQ ID NO: 46317 - RNA, 18 nt, Artificial Sequence
  Synthetic
uuccuuggacucacaagg

SEQ ID NO: 46318 - RNA, 19 nt, Artificial Sequence
  Synthetic
auuccuuggacucacaagg

SEQ ID NO: 46319 - RNA, 20 nt, Artificial Sequence
  Synthetic
uauuccuuggacucacaagg

SEQ ID NO: 46320 - RNA, 21 nt, Artificial Sequence
  Synthetic
guauuccuuggacucacaagg

SEQ ID NO: 46321 - RNA, 22 nt, Artificial Sequence
  Synthetic
aguauuccuuggacucacaagg

SEQ ID NO: 46322 - RNA, 23 nt, Artificial Sequence
  Synthetic
uaguauuccuuggacucacaagg

SEQ ID NO: 46323 - RNA, 24 nt, Artificial Sequence
  Synthetic
uuaguauuccuuggacucacaagg

SEQ ID NO: 46324 - RNA, 18 nt, Artificial Sequence
  Synthetic
ucgucaaucuucuccagg

SEQ ID NO: 46325 - RNA, 19 nt, Artificial Sequence
  Synthetic
cucgucaaucuucuccagg

SEQ ID NO: 46326 - RNA, 20 nt, Artificial Sequence
  Synthetic
ucucgucaaucuucuccagg

SEQ ID NO: 46327 - RNA, 21 nt, Artificial Sequence
  Synthetic
aucucgucaaucuucuccagg

SEQ ID NO: 46328 - RNA, 22 nt, Artificial Sequence
  Synthetic
caucucgucaaucuucuccagg

SEQ ID NO: 46329 - RNA, 23 nt, Artificial Sequence
  Synthetic
acaucucgucaaucuucuccagg

SEQ ID NO: 46330 - RNA, 24 nt, Artificial Sequence
  Synthetic
cacaucucgucaaucuucuccagg

SEQ ID NO: 46331 - RNA, 18 nt, Artificial Sequence
  Synthetic
guauuaggaggcuguagg

SEQ ID NO: 46332 - RNA, 19 nt, Artificial Sequence
  Synthetic
uguauuaggaggcuguagg

SEQ ID NO: 46333 - RNA, 20 nt, Artificial Sequence
  Synthetic
uuguauuaggaggcuguagg

SEQ ID NO: 46334 - RNA, 21 nt, Artificial Sequence
  Synthetic
uuuguauuaggaggcuguagg

SEQ ID NO: 46335 - RNA, 22 nt, Artificial Sequence
  Synthetic
cuuuguauuaggaggcuguagg

SEQ ID NO: 46336 - RNA, 23 nt, Artificial Sequence
  Synthetic
ccuuuguauuaggaggcuguagg

SEQ ID NO: 46337 - RNA, 24 nt, Artificial Sequence
  Synthetic
accuuuguauuaggaggcuguagg

SEQ ID NO: 46338 - RNA, 18 nt, Artificial Sequence
  Synthetic
uguuaugucaacaaccgg

SEQ ID NO: 46339 - RNA, 19 nt, Artificial Sequence
  Synthetic
uuguuaugucaacaaccgg

SEQ ID NO: 46340 - RNA, 20 nt, Artificial Sequence
  Synthetic
uuuguuaugucaacaaccgg

SEQ ID NO: 46341 - RNA, 21 nt, Artificial Sequence
  Synthetic
guuuguuaugucaacaaccgg

SEQ ID NO: 46342 - RNA, 22 nt, Artificial Sequence
  Synthetic
uguuuguuaugucaacaaccgg

SEQ ID NO: 46343 - RNA, 23 nt, Artificial Sequence
  Synthetic
cuguuuguuaugucaacaaccgg

SEQ ID NO: 46344 - RNA, 24 nt, Artificial Sequence
  Synthetic
acuguuuguuaugucaacaaccgg

SEQ ID NO: 46345 - RNA, 18 nt, Artificial Sequence
  Synthetic
uguuuugcucgcagccgg

SEQ ID NO: 46346 - RNA, 19 nt, Artificial Sequence
  Synthetic
uuguuuugcucgcagccgg

SEQ ID NO: 46347 - RNA, 20 nt, Artificial Sequence
  Synthetic
cuuguuuugcucgcagccgg

SEQ ID NO: 46348 - RNA, 21 nt, Artificial Sequence
  Synthetic
gcuuguuuugcucgcagccgg

SEQ ID NO: 46349 - RNA, 22 nt, Artificial Sequence
  Synthetic
ugcuuguuuugcucgcagccgg

SEQ ID NO: 46350 - RNA, 23 nt, Artificial Sequence
  Synthetic
cugcuuguuuugcucgcagccgg

SEQ ID NO: 46351 - RNA, 24 nt, Artificial Sequence
  Synthetic
gcugcuuguuuugcucgcagccgg

SEQ ID NO: 46352 - RNA, 18 nt, Artificial Sequence
  Synthetic
gcuguacaaaaccuucgg

SEQ ID NO: 46353 - RNA, 19 nt, Artificial Sequence
  Synthetic
ugcuguacaaaaccuucgg

SEQ ID NO: 46354 - RNA, 20 nt, Artificial Sequence
  Synthetic
uugcuguacaaaaccuucgg

SEQ ID NO: 46355 - RNA, 21 nt, Artificial Sequence
  Synthetic
guugcuguacaaaaccuucgg

SEQ ID NO: 46356 - RNA, 22 nt, Artificial Sequence
  Synthetic
uguugcuguacaaaaccuucgg

SEQ ID NO: 46357 - RNA, 23 nt, Artificial Sequence
  Synthetic
auguugcuguacaaaaccuucgg

SEQ ID NO: 46358 - RNA, 24 nt, Artificial Sequence
  Synthetic
cauguugcuguacaaaaccuucgg

SEQ ID NO: 46359 - RNA, 18 nt, Artificial Sequence
  Synthetic
ccuuggguggcuuuaggg

SEQ ID NO: 46360 - RNA, 19 nt, Artificial Sequence
  Synthetic
gccuuggguggcuuuaggg

SEQ ID NO: 46361 - RNA, 20 nt, Artificial Sequence
  Synthetic
ugccuuggguggcuuuaggg

SEQ ID NO: 46362 - RNA, 21 nt, Artificial Sequence
  Synthetic
gugccuuggguggcuuuaggg

SEQ ID NO: 46363 - RNA, 22 nt, Artificial Sequence
  Synthetic
ugugccuuggguggcuuuaggg

SEQ ID NO: 46364 - RNA, 23 nt, Artificial Sequence
  Synthetic
cugugccuuggguggcuuuaggg

SEQ ID NO: 46365 - RNA, 24 nt, Artificial Sequence
  Synthetic
gcugugccuuggguggcuuuaggg

SEQ ID NO: 46366 - RNA, 18 nt, Artificial Sequence
  Synthetic
guuaugucaacaaccggg

SEQ ID NO: 46367 - RNA, 19 nt, Artificial Sequence
  Synthetic
uguuaugucaacaaccggg

SEQ ID NO: 46368 - RNA, 20 nt, Artificial Sequence
  Synthetic
uuguuaugucaacaaccggg

SEQ ID NO: 46369 - RNA, 21 nt, Artificial Sequence
  Synthetic
uuuguuaugucaacaaccggg

SEQ ID NO: 46370 - RNA, 22 nt, Artificial Sequence
  Synthetic
guuuguuaugucaacaaccggg

SEQ ID NO: 46371 - RNA, 23 nt, Artificial Sequence
  Synthetic
uguuuguuaugucaacaaccggg

SEQ ID NO: 46372 - RNA, 24 nt, Artificial Sequence
  Synthetic
cuguuuguuaugucaacaaccggg

SEQ ID NO: 46373 - RNA, 18 nt, Artificial Sequence
  Synthetic
ggucccucucgagugggg

SEQ ID NO: 46374 - RNA, 19 nt, Artificial Sequence
  Synthetic
cggucccucucgagugggg

SEQ ID NO: 46375 - RNA, 20 nt, Artificial Sequence
  Synthetic
acggucccucucgagugggg

SEQ ID NO: 46376 - RNA, 18 nt, Artificial Sequence
  Synthetic
gaugaugugguauugggg

SEQ ID NO: 46377 - RNA, 19 nt, Artificial Sequence
  Synthetic
  misc_feature (1)..(1): n is a, c, g, or u
ngaugaugugguauugggg

SEQ ID NO: 46378 - RNA, 20 nt, Artificial Sequence
  Synthetic
  misc_feature (2)..(2): n is a, c, g, or u
ungaugaugugguauugggg

SEQ ID NO: 46379 - RNA, 21 nt, Artificial Sequence
  Synthetic
  misc_feature (3)..(3): n is a, c, g, or u
aungaugaugugguauugggg

SEQ ID NO: 46380 - RNA, 22 nt, Artificial Sequence
  Synthetic
  misc_feature (4)..(4): n is a, c, g, or u
uaungaugaugugguauugggg

SEQ ID NO: 46381 - RNA, 23 nt, Artificial Sequence
  Synthetic
  misc_feature (5)..(5): n is a, c, g, or u
auaungaugaugugguauugggg

SEQ ID NO: 46382 - RNA, 24 nt, Artificial Sequence
  Synthetic
  misc_feature (6)..(6): n is a, c, g, or u
uauaungaugaugugguauugggg

SEQ ID NO: 46383 - RNA, 18 nt, Artificial Sequence
  Synthetic
aacccccacugguugggg

SEQ ID NO: 46384 - RNA, 19 nt, Artificial Sequence
  Synthetic
caacccccacugguugggg

SEQ ID NO: 46385 - RNA, 20 nt, Artificial Sequence
  Synthetic
gcaacccccacugguugggg

SEQ ID NO: 46386 - RNA, 21 nt, Artificial Sequence
  Synthetic
cgcaacccccacugguugggg

SEQ ID NO: 46387 - RNA, 22 nt, Artificial Sequence
  Synthetic
acgcaacccccacugguugggg

SEQ ID NO: 46388 - RNA, 23 nt, Artificial Sequence
  Synthetic
gacgcaacccccacugguugggg

SEQ ID NO: 46389 - RNA, 24 nt, Artificial Sequence
  Synthetic
ugacgcaacccccacugguugggg

SEQ ID NO: 46390 - RNA, 18 nt, Artificial Sequence
  Synthetic
cacggaggccuuuugggg

SEQ ID NO: 46391 - RNA, 19 nt, Artificial Sequence
  Synthetic
acacggaggccuuuugggg

SEQ ID NO: 46392 - RNA, 20 nt, Artificial Sequence
  Synthetic
cacacggaggccuuuugggg

SEQ ID NO: 46393 - RNA, 21 nt, Artificial Sequence
  Synthetic
ccacacggaggccuuuugggg

SEQ ID NO: 46394 - RNA, 22 nt, Artificial Sequence
  Synthetic
uccacacggaggccuuuugggg

SEQ ID NO: 46395 - RNA, 23 nt, Artificial Sequence
  Synthetic
cuccacacggaggccuuuugggg

SEQ ID NO: 46396 - RNA, 24 nt, Artificial Sequence
  Synthetic
ccuccacacggaggccuuuugggg

SEQ ID NO: 46397 - RNA, 18 nt, Artificial Sequence
  Synthetic
uguuaauacuaauauggg

SEQ ID NO: 46398 - RNA, 19 nt, Artificial Sequence
  Synthetic
auguuaauacuaauauggg

SEQ ID NO: 46399 - RNA, 20 nt, Artificial Sequence
  Synthetic
uauguuaauacuaauauggg

SEQ ID NO: 46400 - RNA, 21 nt, Artificial Sequence
  Synthetic
uuauguuaauacuaauauggg

SEQ ID NO: 46401 - RNA, 22 nt, Artificial Sequence
  Synthetic
auuauguuaauacuaauauggg

SEQ ID NO: 46402 - RNA, 23 nt, Artificial Sequence
  Synthetic
aauuauguuaauacuaauauggg

SEQ ID NO: 46403 - RNA, 24 nt, Artificial Sequence
  Synthetic
caauuauguuaauacuaauauggg

SEQ ID NO: 46404 - RNA, 18 nt, Artificial Sequence
  Synthetic
ucgcaaaauaccuauggg

SEQ ID NO: 46405 - RNA, 19 nt, Artificial Sequence
  Synthetic
uucgcaaaauaccuauggg

SEQ ID NO: 46406 - RNA, 20 nt, Artificial Sequence
  Synthetic
uuucgcaaaauaccuauggg

SEQ ID NO: 46407 - RNA, 21 nt, Artificial Sequence
  Synthetic
cuuucgcaaaauaccuauggg

SEQ ID NO: 46408 - RNA, 22 nt, Artificial Sequence
  Synthetic
gcuuucgcaaaauaccuauggg

SEQ ID NO: 46409 - RNA, 23 nt, Artificial Sequence
  Synthetic
ggcuuucgcaaaauaccuauggg

SEQ ID NO: 46410 - RNA, 24 nt, Artificial Sequence
  Synthetic
gggcuuucgcaaaauaccuauggg

SEQ ID NO: 46411 - RNA, 18 nt, Artificial Sequence
  Synthetic
cggucccucucgaguggg

SEQ ID NO: 46412 - RNA, 19 nt, Artificial Sequence
  Synthetic
acggucccucucgaguggg

SEQ ID NO: 46413 - RNA, 20 nt, Artificial Sequence
  Synthetic
gacggucccucucgaguggg

SEQ ID NO: 46414 - RNA, 18 nt, Artificial Sequence
  Synthetic
ggagcaaaacucauuggg

SEQ ID NO: 46415 - RNA, 19 nt, Artificial Sequence
  Synthetic
uggagcaaaacucauuggg

SEQ ID NO: 46416 - RNA, 20 nt, Artificial Sequence
  Synthetic
cuggagcaaaacucauuggg

SEQ ID NO: 46417 - RNA, 21 nt, Artificial Sequence
  Synthetic
ucuggagcaaaacucauuggg

SEQ ID NO: 46418 - RNA, 22 nt, Artificial Sequence
  Synthetic
gucuggagcaaaacucauuggg

SEQ ID NO: 46419 - RNA, 23 nt, Artificial Sequence
  Synthetic
ggucuggagcaaaacucauuggg

SEQ ID NO: 46420 - RNA, 24 nt, Artificial Sequence
  Synthetic
cggucuggagcaaaacucauuggg

SEQ ID NO: 46421 - RNA, 18 nt, Artificial Sequence
  Synthetic
ggucaccauauacuuggg

SEQ ID NO: 46422 - RNA, 19 nt, Artificial Sequence
  Synthetic
gggucaccauauacuuggg

SEQ ID NO: 46423 - RNA, 20 nt, Artificial Sequence
  Synthetic
ugggucaccauauacuuggg

SEQ ID NO: 46424 - RNA, 21 nt, Artificial Sequence
  Synthetic
gugggucaccauauacuuggg

SEQ ID NO: 46425 - RNA, 22 nt, Artificial Sequence
  Synthetic
ugugggucaccauauacuuggg

SEQ ID NO: 46426 - RNA, 23 nt, Artificial Sequence
  Synthetic
uugugggucaccauauacuuggg

SEQ ID NO: 46427 - RNA, 24 nt, Artificial Sequence
  Synthetic
uuugugggucaccauauacuuggg

SEQ ID NO: 46428 - RNA, 18 nt, Artificial Sequence
  Synthetic
uccugucuuacuuuuggg

SEQ ID NO: 46429 - RNA, 19 nt, Artificial Sequence
  Synthetic
uuccugucuuacuuuuggg

SEQ ID NO: 46430 - RNA, 20 nt, Artificial Sequence
  Synthetic
uuuccugucuuacuuuuggg

SEQ ID NO: 46431 - RNA, 21 nt, Artificial Sequence
  Synthetic
auuuccugucuuacuuuuggg

SEQ ID NO: 46432 - RNA, 22 nt, Artificial Sequence
  Synthetic
cauuuccugucuuacuuuuggg

SEQ ID NO: 46433 - RNA, 23 nt, Artificial Sequence
  Synthetic
acauuuccugucuuacuuuuggg

SEQ ID NO: 46434 - RNA, 24 nt, Artificial Sequence
  Synthetic
cacauuuccugucuuacuuuuggg

SEQ ID NO: 46435 - RNA, 18 nt, Artificial Sequence
  Synthetic
acacggaggccuuuuggg

SEQ ID NO: 46436 - RNA, 19 nt, Artificial Sequence
  Synthetic
cacacggaggccuuuuggg

SEQ ID NO: 46437 - RNA, 20 nt, Artificial Sequence
  Synthetic
ccacacggaggccuuuuggg

SEQ ID NO: 46438 - RNA, 21 nt, Artificial Sequence
  Synthetic
uccacacggaggccuuuuggg

SEQ ID NO: 46439 - RNA, 22 nt, Artificial Sequence
  Synthetic
cuccacacggaggccuuuuggg

SEQ ID NO: 46440 - RNA, 23 nt, Artificial Sequence
  Synthetic
ccuccacacggaggccuuuuggg

SEQ ID NO: 46441 - RNA, 24 nt, Artificial Sequence
  Synthetic
cccuccacacggaggccuuuuggg

SEQ ID NO: 46442 - RNA, 18 nt, Artificial Sequence
  Synthetic
gguggcuuuagggcaugg

SEQ ID NO: 46443 - RNA, 19 nt, Artificial Sequence
  Synthetic
ggguggcuuuagggcaugg

SEQ ID NO: 46444 - RNA, 20 nt, Artificial Sequence
  Synthetic
uggguggcuuuagggcaugg

SEQ ID NO: 46445 - RNA, 21 nt, Artificial Sequence
  Synthetic
uuggguggcuuuagggcaugg

SEQ ID NO: 46446 - RNA, 22 nt, Artificial Sequence
  Synthetic
cuuggguggcuuuagggcaugg

SEQ ID NO: 46447 - RNA, 23 nt, Artificial Sequence
  Synthetic
ccuuggguggcuuuagggcaugg

SEQ ID NO: 46448 - RNA, 24 nt, Artificial Sequence
  Synthetic
gccuuggguggcuuuagggcaugg

SEQ ID NO: 46449 - RNA, 18 nt, Artificial Sequence
  Synthetic
ugacgcaacccccacugg

SEQ ID NO: 46450 - RNA, 19 nt, Artificial Sequence
  Synthetic
cugacgcaacccccacugg

SEQ ID NO: 46451 - RNA, 20 nt, Artificial Sequence
  Synthetic
gcugacgcaacccccacugg

SEQ ID NO: 46452 - RNA, 21 nt, Artificial Sequence
  Synthetic
ugcugacgcaacccccacugg

SEQ ID NO: 46453 - RNA, 22 nt, Artificial Sequence
  Synthetic
uugcugacgcaacccccacugg

SEQ ID NO: 46454 - RNA, 23 nt, Artificial Sequence
  Synthetic
uuugcugacgcaacccccacugg

SEQ ID NO: 46455 - RNA, 24 nt, Artificial Sequence
  Synthetic
guuugcugacgcaacccccacugg

SEQ ID NO: 46456 - RNA, 18 nt, Artificial Sequence
  Synthetic
agugcccguguguccugg

SEQ ID NO: 46457 - RNA, 19 nt, Artificial Sequence
  Synthetic
gagugcccguguguccugg

SEQ ID NO: 46458 - RNA, 20 nt, Artificial Sequence
  Synthetic
ggagugcccguguguccugg

SEQ ID NO: 46459 - RNA, 21 nt, Artificial Sequence
  Synthetic
gggagugcccguguguccugg

SEQ ID NO: 46460 - RNA, 22 nt, Artificial Sequence
  Synthetic
ggggagugcccguguguccugg

SEQ ID NO: 46461 - RNA, 23 nt, Artificial Sequence
  Synthetic
gggggagugcccguguguccugg

SEQ ID NO: 46462 - RNA, 24 nt, Artificial Sequence
  Synthetic
agggggagugcccguguguccugg

SEQ ID NO: 46463 - RNA, 18 nt, Artificial Sequence
  Synthetic
  misc_feature (9)..(9): n is a, c, g, or u
caagcaauncugugcugg

SEQ ID NO: 46464 - RNA, 19 nt, Artificial Sequence
  Synthetic
  misc_feature (10)..(10): n is a, c, g, or u
gcaagcaauncugugcugg

SEQ ID NO: 46465 - RNA, 20 nt, Artificial Sequence
  Synthetic
  misc_feature (11)..(11): n is a, c, g, or u
ggcaagcaauncugugcugg

SEQ ID NO: 46466 - RNA, 21 nt, Artificial Sequence
  Synthetic
  misc_feature (12)..(12): n is a, c, g, or u
aggcaagcaauncugugcugg

SEQ ID NO: 46467 - RNA, 22 nt, Artificial Sequence
  Synthetic
  misc_feature (13)..(13): n is a, c, g, or u
caggcaagcaauncugugcugg

SEQ ID NO: 46468 - RNA, 23 nt, Artificial Sequence
  Synthetic
  misc_feature (14)..(14): n is a, c, g, or u
ucaggcaagcaauncugugcugg

SEQ ID NO: 46469 - RNA, 24 nt, Artificial Sequence
  Synthetic
  misc_feature (15)..(15): n is a, c, g, or u
cucaggcaagcaauncugugcugg

SEQ ID NO: 46470 - RNA, 18 nt, Artificial Sequence
  Synthetic
ugcucgcagccggucugg

SEQ ID NO: 46471 - RNA, 19 nt, Artificial Sequence
  Synthetic
uugcucgcagccggucugg

SEQ ID NO: 46472 - RNA, 20 nt, Artificial Sequence
  Synthetic
uuugcucgcagccggucugg

SEQ ID NO: 46473 - RNA, 21 nt, Artificial Sequence
  Synthetic
uuuugcucgcagccggucugg

SEQ ID NO: 46474 - RNA, 22 nt, Artificial Sequence
  Synthetic
guuuugcucgcagccggucugg

SEQ ID NO: 46475 - RNA, 23 nt, Artificial Sequence
  Synthetic
uguuuugcucgcagccggucugg

SEQ ID NO: 46476 - RNA, 24 nt, Artificial Sequence
  Synthetic
uuguuuugcucgcagccggucugg

SEQ ID NO: 46477 - RNA, 18 nt, Artificial Sequence
  Synthetic
acggucccucucgagugg

SEQ ID NO: 46478 - RNA, 19 nt, Artificial Sequence
  Synthetic
gacggucccucucgagugg

SEQ ID NO: 46479 - RNA, 20 nt, Artificial Sequence
  Synthetic
ggacggucccucucgagugg

SEQ ID NO: 46480 - RNA, 18 nt, Artificial Sequence
  Synthetic
uguguuuuugcugagugg

SEQ ID NO: 46481 - RNA, 19 nt, Artificial Sequence
  Synthetic
cuguguuuuugcugagugg

SEQ ID NO: 46482 - RNA, 20 nt, Artificial Sequence
  Synthetic
acuguguuuuugcugagugg

SEQ ID NO: 46483 - RNA, 21 nt, Artificial Sequence
  Synthetic
gacuguguuuuugcugagugg

SEQ ID NO: 46484 - RNA, 22 nt, Artificial Sequence
  Synthetic
ggacuguguuuuugcugagugg

SEQ ID NO: 46485 - RNA, 23 nt, Artificial Sequence
  Synthetic
aggacuguguuuuugcugagugg

SEQ ID NO: 46486 - RNA, 24 nt, Artificial Sequence
  Synthetic
aaggacuguguuuuugcugagugg

SEQ ID NO: 46487 - RNA, 18 nt, Artificial Sequence
  Synthetic
cccaaaaaggacccuugg

SEQ ID NO: 46488 - RNA, 19 nt, Artificial Sequence
  Synthetic
ucccaaaaaggacccuugg

SEQ ID NO: 46489 - RNA, 20 nt, Artificial Sequence
  Synthetic
aucccaaaaaggacccuugg

SEQ ID NO: 46490 - RNA, 21 nt, Artificial Sequence
  Synthetic
aaucccaaaaaggacccuugg

SEQ ID NO: 46491 - RNA, 22 nt, Artificial Sequence
  Synthetic
caaucccaaaaaggacccuugg

SEQ ID NO: 46492 - RNA, 23 nt, Artificial Sequence
  Synthetic
ucaaucccaaaaaggacccuugg

SEQ ID NO: 46493 - RNA, 24 nt, Artificial Sequence
  Synthetic
uucaaucccaaaaaggacccuugg

SEQ ID NO: 46494 - RNA, 18 nt, Artificial Sequence
  Synthetic
uuccugucuuacuuuugg

SEQ ID NO: 46495 - RNA, 19 nt, Artificial Sequence
  Synthetic
uuuccugucuuacuuuugg

SEQ ID NO: 46496 - RNA, 20 nt, Artificial Sequence
  Synthetic
auuuccugucuuacuuuugg

SEQ ID NO: 46497 - RNA, 21 nt, Artificial Sequence
  Synthetic
cauuuccugucuuacuuuugg

SEQ ID NO: 46498 - RNA, 22 nt, Artificial Sequence
  Synthetic
acauuuccugucuuacuuuugg

SEQ ID NO: 46499 - RNA, 23 nt, Artificial Sequence
  Synthetic
cacauuuccugucuuacuuuugg

SEQ ID NO: 46500 - RNA, 24 nt, Artificial Sequence
  Synthetic
ucacauuuccugucuuacuuuugg

SEQ ID NO: 46501 - RNA, 18 nt, Artificial Sequence
  Synthetic
cacacggaggccuuuugg

SEQ ID NO: 46502 - RNA, 19 nt, Artificial Sequence
  Synthetic
ccacacggaggccuuuugg

SEQ ID NO: 46503 - RNA, 20 nt, Artificial Sequence
  Synthetic
uccacacggaggccuuuugg

SEQ ID NO: 46504 - RNA, 21 nt, Artificial Sequence
  Synthetic
cuccacacggaggccuuuugg

SEQ ID NO: 46505 - RNA, 22 nt, Artificial Sequence
  Synthetic
ccuccacacggaggccuuuugg

SEQ ID NO: 46506 - RNA, 23 nt, Artificial Sequence
  Synthetic
cccuccacacggaggccuuuugg

SEQ ID NO: 46507 - RNA, 24 nt, Artificial Sequence
  Synthetic
ccccuccacacggaggccuuuugg

SEQ ID NO: 46508 - RNA, 18 nt, Artificial Sequence
  Synthetic
gccauauggccuuuuugg

SEQ ID NO: 46509 - RNA, 19 nt, Artificial Sequence
  Synthetic
ugccauauggccuuuuugg

SEQ ID NO: 46510 - RNA, 20 nt, Artificial Sequence
  Synthetic
uugccauauggccuuuuugg

SEQ ID NO: 46511 - RNA, 21 nt, Artificial Sequence
  Synthetic
uuugccauauggccuuuuugg

SEQ ID NO: 46512 - RNA, 22 nt, Artificial Sequence
  Synthetic
cuuugccauauggccuuuuugg

SEQ ID NO: 46513 - RNA, 23 nt, Artificial Sequence
  Synthetic
acuuugccauauggccuuuuugg

SEQ ID NO: 46514 - RNA, 24 nt, Artificial Sequence
  Synthetic
aacuuugccauauggccuuuuugg

SEQ ID NO: 46515 - RNA, 18 nt, Artificial Sequence
  Synthetic
gcccucucacaguaaaug

SEQ ID NO: 46516 - RNA, 19 nt, Artificial Sequence
  Synthetic
ggcccucucacaguaaaug

SEQ ID NO: 46517 - RNA, 20 nt, Artificial Sequence
  Synthetic
gggcccucucacaguaaaug

SEQ ID NO: 46518 - RNA, 21 nt, Artificial Sequence
  Synthetic
ugggcccucucacaguaaaug

SEQ ID NO: 46519 - RNA, 22 nt, Artificial Sequence
  Synthetic
gugggcccucucacaguaaaug

SEQ ID NO: 46520 - RNA, 23 nt, Artificial Sequence
  Synthetic
ugugggcccucucacaguaaaug

SEQ ID NO: 46521 - RNA, 24 nt, Artificial Sequence
  Synthetic
uugugggcccucucacaguaaaug

SEQ ID NO: 46522 - RNA, 18 nt, Artificial Sequence
  Synthetic
gacccugcaccgaacaug

SEQ ID NO: 46523 - RNA, 19 nt, Artificial Sequence
  Synthetic
ggacccugcaccgaacaug

SEQ ID NO: 46524 - RNA, 20 nt, Artificial Sequence
  Synthetic
gggacccugcaccgaacaug

SEQ ID NO: 46525 - RNA, 21 nt, Artificial Sequence
  Synthetic
ggggacccugcaccgaacaug

SEQ ID NO: 46526 - RNA, 22 nt, Artificial Sequence
  Synthetic
uggggacccugcaccgaacaug

SEQ ID NO: 46527 - RNA, 23 nt, Artificial Sequence
  Synthetic
uuggggacccugcaccgaacaug

SEQ ID NO: 46528 - RNA, 24 nt, Artificial Sequence
  Synthetic
auuggggacccugcaccgaacaug

SEQ ID NO: 46529 - RNA, 18 nt, Artificial Sequence
  Synthetic
  misc_feature (6)..(6): n is a, c, g, or u
aucggncaucagcgcaug

SEQ ID NO: 46530 - RNA, 19 nt, Artificial Sequence
  Synthetic
  misc_feature (7)..(7): n is a, c, g, or u
caucggncaucagcgcaug

SEQ ID NO: 46531 - RNA, 20 nt, Artificial Sequence
  Synthetic
  misc_feature (8)..(8): n is a, c, g, or u
ccaucggncaucagcgcaug

SEQ ID NO: 46532 - RNA, 21 nt, Artificial Sequence
  Synthetic
  misc_feature (9)..(9): n is a, c, g, or u
gccaucggncaucagcgcaug

SEQ ID NO: 46533 - RNA, 22 nt, Artificial Sequence
  Synthetic
  misc_feature (10)..(10): n is a, c, g, or u
ggccaucggncaucagcgcaug

SEQ ID NO: 46534 - RNA, 23 nt, Artificial Sequence
  Synthetic
  misc_feature (11)..(11): n is a, c, g, or u
uggccaucggncaucagcgcaug

SEQ ID NO: 46535 - RNA, 24 nt, Artificial Sequence
  Synthetic
  misc_feature (12)..(12): n is a, c, g, or u
uuggccaucggncaucagcgcaug

SEQ ID NO: 46536 - RNA, 18 nt, Artificial Sequence
  Synthetic
ggguggcuuuagggcaug

SEQ ID NO: 46537 - RNA, 19 nt, Artificial Sequence
  Synthetic
uggguggcuuuagggcaug

SEQ ID NO: 46538 - RNA, 20 nt, Artificial Sequence
  Synthetic
uuggguggcuuuagggcaug

SEQ ID NO: 46539 - RNA, 21 nt, Artificial Sequence
  Synthetic
cuuggguggcuuuagggcaug

SEQ ID NO: 46540 - RNA, 22 nt, Artificial Sequence
  Synthetic
ccuuggguggcuuuagggcaug

SEQ ID NO: 46541 - RNA, 23 nt, Artificial Sequence
  Synthetic
gccuuggguggcuuuagggcaug

SEQ ID NO: 46542 - RNA, 24 nt, Artificial Sequence
  Synthetic
ugccuuggguggcuuuagggcaug

SEQ ID NO: 46543 - RNA, 18 nt, Artificial Sequence
  Synthetic
cugacgcaacccccacug

SEQ ID NO: 46544 - RNA, 19 nt, Artificial Sequence
  Synthetic
gcugacgcaacccccacug

SEQ ID NO: 46545 - RNA, 20 nt, Artificial Sequence
  Synthetic
ugcugacgcaacccccacug

SEQ ID NO: 46546 - RNA, 18 nt, Artificial Sequence
  Synthetic
uagggcuuucccccacug

SEQ ID NO: 46547 - RNA, 19 nt, Artificial Sequence
  Synthetic
guagggcuuucccccacug

SEQ ID NO: 46548 - RNA, 20 nt, Artificial Sequence
  Synthetic
cguagggcuuucccccacug

SEQ ID NO: 46549 - RNA, 21 nt, Artificial Sequence
  Synthetic
ucguagggcuuucccccacug

SEQ ID NO: 46550 - RNA, 22 nt, Artificial Sequence
  Synthetic
uucguagggcuuucccccacug

SEQ ID NO: 46551 - RNA, 23 nt, Artificial Sequence
  Synthetic
guucguagggcuuucccccacug

SEQ ID NO: 46552 - RNA, 24 nt, Artificial Sequence
  Synthetic
gguucguagggcuuucccccacug

SEQ ID NO: 46553 - RNA, 18 nt, Artificial Sequence
  Synthetic
  misc_feature (14)..(14): n is a, c, g, or u
cuuguucauguccnacug

SEQ ID NO: 46554 - RNA, 19 nt, Artificial Sequence
  Synthetic
  misc_feature (15)..(15): n is a, c, g, or u
ucuuguucauguccnacug

SEQ ID NO: 46555 - RNA, 20 nt, Artificial Sequence
  Synthetic
  misc_feature (16)..(16): n is a, c, g, or u
cucuuguucauguccnacug

SEQ ID NO: 46556 - RNA, 21 nt, Artificial Sequence
  Synthetic
  misc_feature (17)..(17): n is a, c, g, or u
ucucuuguucauguccnacug

SEQ ID NO: 46557 - RNA, 22 nt, Artificial Sequence
  Synthetic
  misc_feature (18)..(18): n is a, c, g, or u
aucucuuguucauguccnacug

SEQ ID NO: 46558 - RNA, 23 nt, Artificial Sequence
  Synthetic
  misc_feature (19)..(19): n is a, c, g, or u
caucucuuguucauguccnacug

SEQ ID NO: 46559 - RNA, 24 nt, Artificial Sequence
  Synthetic
  misc_feature (20)..(20): n is a, c, g, or u
ucaucucuuguucauguccnacug

SEQ ID NO: 46560 - RNA, 18 nt, Artificial Sequence
  Synthetic
cucugccgauccauacug

SEQ ID NO: 46561 - RNA, 19 nt, Artificial Sequence
  Synthetic
ccucugccgauccauacug

SEQ ID NO: 46562 - RNA, 20 nt, Artificial Sequence
  Synthetic
uccucugccgauccauacug

SEQ ID NO: 46563 - RNA, 21 nt, Artificial Sequence
  Synthetic
cuccucugccgauccauacug

SEQ ID NO: 46564 - RNA, 22 nt, Artificial Sequence
  Synthetic
gcuccucugccgauccauacug

SEQ ID NO: 46565 - RNA, 23 nt, Artificial Sequence
  Synthetic
ggcuccucugccgauccauacug

SEQ ID NO: 46566 - RNA, 24 nt, Artificial Sequence
  Synthetic
uggcuccucugccgauccauacug

SEQ ID NO: 46567 - RNA, 18 nt, Artificial Sequence
  Synthetic
gggacccugcaaaaccug

SEQ ID NO: 46568 - RNA, 19 nt, Artificial Sequence
  Synthetic
cgggacccugcaaaaccug

SEQ ID NO: 46569 - RNA, 20 nt, Artificial Sequence
  Synthetic
acgggacccugcaaaaccug

SEQ ID NO: 46570 - RNA, 21 nt, Artificial Sequence
  Synthetic
uacgggacccugcaaaaccug

SEQ ID NO: 46571 - RNA, 22 nt, Artificial Sequence
  Synthetic
guacgggacccugcaaaaccug

SEQ ID NO: 46572 - RNA, 23 nt, Artificial Sequence
  Synthetic
aguacgggacccugcaaaaccug

SEQ ID NO: 46573 - RNA, 24 nt, Artificial Sequence
  Synthetic
caguacgggacccugcaaaaccug

SEQ ID NO: 46574 - RNA, 18 nt, Artificial Sequence
  Synthetic
  misc_feature (13)..(13): n is a, c, g, or u
gaugacucuagcnaccug

SEQ ID NO: 46575 - RNA, 19 nt, Artificial Sequence
  Synthetic
  misc_feature (14)..(14): n is a, c, g, or u
ugaugacucuagcnaccug

SEQ ID NO: 46576 - RNA, 20 nt, Artificial Sequence
  Synthetic
  misc_feature (15)..(15): n is a, c, g, or u
uugaugacucuagcnaccug

SEQ ID NO: 46577 - RNA, 21 nt, Artificial Sequence
  Synthetic
  misc_feature (16)..(16): n is a, c, g, or u
guugaugacucuagcnaccug

SEQ ID NO: 46578 - RNA, 22 nt, Artificial Sequence
  Synthetic
  misc_feature (17)..(17): n is a, c, g, or u
aguugaugacucuagcnaccug

SEQ ID NO: 46579 - RNA, 23 nt, Artificial Sequence
  Synthetic
  misc_feature (18)..(18): n is a, c, g, or u
gaguugaugacucuagcnaccug

SEQ ID NO: 46580 - RNA, 24 nt, Artificial Sequence
  Synthetic
  misc_feature (19)..(19): n is a, c, g, or u
ugaguugaugacucuagcnaccug

SEQ ID NO: 46581 - RNA, 18 nt, Artificial Sequence
  Synthetic
caccaguacgggacccug

SEQ ID NO: 46582 - RNA, 19 nt, Artificial Sequence
  Synthetic
ccaccaguacgggacccug

SEQ ID NO: 46583 - RNA, 20 nt, Artificial Sequence
  Synthetic
accaccaguacgggacccug

SEQ ID NO: 46584 - RNA, 18 nt, Artificial Sequence
  Synthetic
uaccugucuuuaauccug

SEQ ID NO: 46585 - RNA, 19 nt, Artificial Sequence
  Synthetic
auaccugucuuuaauccug

SEQ ID NO: 46586 - RNA, 20 nt, Artificial Sequence
  Synthetic
uauaccugucuuuaauccug

SEQ ID NO: 46587 - RNA, 21 nt, Artificial Sequence
  Synthetic
cuauaccugucuuuaauccug

SEQ ID NO: 46588 - RNA, 22 nt, Artificial Sequence
  Synthetic
acuauaccugucuuuaauccug

SEQ ID NO: 46589 - RNA, 23 nt, Artificial Sequence
  Synthetic
uacuauaccugucuuuaauccug

SEQ ID NO: 46590 - RNA, 24 nt, Artificial Sequence
  Synthetic
cuacuauaccugucuuuaauccug

SEQ ID NO: 46591 - RNA, 18 nt, Artificial Sequence
  Synthetic
aaaccugcacgacuccug

SEQ ID NO: 46592 - RNA, 19 nt, Artificial Sequence
  Synthetic
aaaaccugcacgacuccug

SEQ ID NO: 46593 - RNA, 20 nt, Artificial Sequence
  Synthetic
caaaaccugcacgacuccug

SEQ ID NO: 46594 - RNA, 21 nt, Artificial Sequence
  Synthetic
gcaaaaccugcacgacuccug

SEQ ID NO: 46595 - RNA, 22 nt, Artificial Sequence
  Synthetic
ugcaaaaccugcacgacuccug

SEQ ID NO: 46596 - RNA, 23 nt, Artificial Sequence
  Synthetic
cugcaaaaccugcacgacuccug

SEQ ID NO: 46597 - RNA, 24 nt, Artificial Sequence
  Synthetic
ccugcaaaaccugcacgacuccug

SEQ ID NO: 46598 - RNA, 18 nt, Artificial Sequence
  Synthetic
acauccuuuccauggcug

SEQ ID NO: 46599 - RNA, 19 nt, Artificial Sequence
  Synthetic
uacauccuuuccauggcug

SEQ ID NO: 46600 - RNA, 20 nt, Artificial Sequence
  Synthetic
auacauccuuuccauggcug

SEQ ID NO: 46601 - RNA, 21 nt, Artificial Sequence
  Synthetic
uauacauccuuuccauggcug

SEQ ID NO: 46602 - RNA, 22 nt, Artificial Sequence
  Synthetic
auauacauccuuuccauggcug

SEQ ID NO: 46603 - RNA, 23 nt, Artificial Sequence
  Synthetic
aauauacauccuuuccauggcug

SEQ ID NO: 46604 - RNA, 24 nt, Artificial Sequence
  Synthetic
aaauauacauccuuuccauggcug

SEQ ID NO: 46605 - RNA, 18 nt, Artificial Sequence
  Synthetic
guaucccucauguugcug

SEQ ID NO: 46606 - RNA, 19 nt, Artificial Sequence
  Synthetic
uguaucccucauguugcug

SEQ ID NO: 46607 - RNA, 20 nt, Artificial Sequence
  Synthetic
auguaucccucauguugcug

SEQ ID NO: 46608 - RNA, 21 nt, Artificial Sequence
  Synthetic
uauguaucccucauguugcug

SEQ ID NO: 46609 - RNA, 22 nt, Artificial Sequence
  Synthetic
cuauguaucccucauguugcug

SEQ ID NO: 46610 - RNA, 23 nt, Artificial Sequence
  Synthetic
ucuauguaucccucauguugcug

SEQ ID NO: 46611 - RNA, 24 nt, Artificial Sequence
  Synthetic
cucuauguaucccucauguugcug

SEQ ID NO: 46612 - RNA, 18 nt, Artificial Sequence
  Synthetic
aggacuguguuuuugcug

SEQ ID NO: 46613 - RNA, 19 nt, Artificial Sequence
  Synthetic
aaggacuguguuuuugcug

SEQ ID NO: 46614 - RNA, 20 nt, Artificial Sequence
  Synthetic
caaggacuguguuuuugcug

SEQ ID NO: 46615 - RNA, 21 nt, Artificial Sequence
  Synthetic
ucaaggacuguguuuuugcug

SEQ ID NO: 46616 - RNA, 22 nt, Artificial Sequence
  Synthetic
uucaaggacuguguuuuugcug

SEQ ID NO: 46617 - RNA, 23 nt, Artificial Sequence
  Synthetic
cuucaaggacuguguuuuugcug

SEQ ID NO: 46618 - RNA, 24 nt, Artificial Sequence
  Synthetic
acuucaaggacuguguuuuugcug

SEQ ID NO: 46619 - RNA, 18 nt, Artificial Sequence
  Synthetic
uauugggggccaaaucug

SEQ ID NO: 46620 - RNA, 19 nt, Artificial Sequence
  Synthetic
guauugggggccaaaucug

SEQ ID NO: 46621 - RNA, 20 nt, Artificial Sequence
  Synthetic
gguauugggggccaaaucug

SEQ ID NO: 46622 - RNA, 21 nt, Artificial Sequence
  Synthetic
ugguauugggggccaaaucug

SEQ ID NO: 46623 - RNA, 22 nt, Artificial Sequence
  Synthetic
gugguauugggggccaaaucug

SEQ ID NO: 46624 - RNA, 23 nt, Artificial Sequence
  Synthetic
ugugguauugggggccaaaucug

SEQ ID NO: 46625 - RNA, 24 nt, Artificial Sequence
  Synthetic
augugguauugggggccaaaucug

SEQ ID NO: 46626 - RNA, 18 nt, Artificial Sequence
  Synthetic
ucuguuccuucucaucug

SEQ ID NO: 46627 - RNA, 19 nt, Artificial Sequence
  Synthetic
gucuguuccuucucaucug

SEQ ID NO: 46628 - RNA, 20 nt, Artificial Sequence
  Synthetic
cgucuguuccuucucaucug

SEQ ID NO: 46629 - RNA, 21 nt, Artificial Sequence
  Synthetic
ccgucuguuccuucucaucug

SEQ ID NO: 46630 - RNA, 22 nt, Artificial Sequence
  Synthetic
cccgucuguuccuucucaucug

SEQ ID NO: 46631 - RNA, 23 nt, Artificial Sequence
  Synthetic
ccccgucuguuccuucucaucug

SEQ ID NO: 46632 - RNA, 24 nt, Artificial Sequence
  Synthetic
uccccgucuguuccuucucaucug

SEQ ID NO: 46633 - RNA, 18 nt, Artificial Sequence
  Synthetic
gacggucccucucgagug

SEQ ID NO: 46634 - RNA, 19 nt, Artificial Sequence
  Synthetic
ggacggucccucucgagug

SEQ ID NO: 46635 - RNA, 20 nt, Artificial Sequence
  Synthetic
uggacggucccucucgagug

SEQ ID NO: 46636 - RNA, 18 nt, Artificial Sequence
  Synthetic
cuguguuuuugcugagug

SEQ ID NO: 46637 - RNA, 19 nt, Artificial Sequence
  Synthetic
acuguguuuuugcugagug

SEQ ID NO: 46638 - RNA, 20 nt, Artificial Sequence
  Synthetic
gacuguguuuuugcugagug

SEQ ID NO: 46639 - RNA, 21 nt, Artificial Sequence
  Synthetic
ggacuguguuuuugcugagug

SEQ ID NO: 46640 - RNA, 22 nt, Artificial Sequence
  Synthetic
aggacuguguuuuugcugagug

SEQ ID NO: 46641 - RNA, 23 nt, Artificial Sequence
  Synthetic
aaggacuguguuuuugcugagug

SEQ ID NO: 46642 - RNA, 24 nt, Artificial Sequence
  Synthetic
caaggacuguguuuuugcugagug

SEQ ID NO: 46643 - RNA, 18 nt, Artificial Sequence
  Synthetic
gcagagucuagacucgug

SEQ ID NO: 46644 - RNA, 19 nt, Artificial Sequence
  Synthetic
cgcagagucuagacucgug

SEQ ID NO: 46645 - RNA, 20 nt, Artificial Sequence
  Synthetic
ccgcagagucuagacucgug

SEQ ID NO: 46646 - RNA, 21 nt, Artificial Sequence
  Synthetic
accgcagagucuagacucgug

SEQ ID NO: 46647 - RNA, 22 nt, Artificial Sequence
  Synthetic
uaccgcagagucuagacucgug

SEQ ID NO: 46648 - RNA, 23 nt, Artificial Sequence
  Synthetic
auaccgcagagucuagacucgug

SEQ ID NO: 46649 - RNA, 24 nt, Artificial Sequence
  Synthetic
aauaccgcagagucuagacucgug

SEQ ID NO: 46650 - RNA, 18 nt, Artificial Sequence
  Synthetic
ccuuggacucacaaggug

SEQ ID NO: 46651 - RNA, 19 nt, Artificial Sequence
  Synthetic
uccuuggacucacaaggug

SEQ ID NO: 46652 - RNA, 20 nt, Artificial Sequence
  Synthetic
uuccuuggacucacaaggug

SEQ ID NO: 46653 - RNA, 21 nt, Artificial Sequence
  Synthetic
auuccuuggacucacaaggug

SEQ ID NO: 46654 - RNA, 22 nt, Artificial Sequence
  Synthetic
uauuccuuggacucacaaggug

SEQ ID NO: 46655 - RNA, 23 nt, Artificial Sequence
  Synthetic
guauuccuuggacucacaaggug

SEQ ID NO: 46656 - RNA, 24 nt, Artificial Sequence
  Synthetic
aguauuccuuggacucacaaggug

SEQ ID NO: 46657 - RNA, 18 nt, Artificial Sequence
  Synthetic
  misc_feature (13)..(13): n is a, c, g, or u
caggcaagcaauncugug

SEQ ID NO: 46658 - RNA, 19 nt, Artificial Sequence
  Synthetic
  misc_feature (14)..(14): n is a, c, g, or u
ucaggcaagcaauncugug

SEQ ID NO: 46659 - RNA, 20 nt, Artificial Sequence
  Synthetic
  misc_feature (15)..(15): n is a, c, g, or u
cucaggcaagcaauncugug

SEQ ID NO: 46660 - RNA, 21 nt, Artificial Sequence
  Synthetic
  misc_feature (16)..(16): n is a, c, g, or u
acucaggcaagcaauncugug

SEQ ID NO: 46661 - RNA, 22 nt, Artificial Sequence
  Synthetic
  misc_feature (17)..(17): n is a, c, g, or u
cacucaggcaagcaauncugug

SEQ ID NO: 46662 - RNA, 23 nt, Artificial Sequence
  Synthetic
  misc_feature (18)..(18): n is a, c, g, or u
gcacucaggcaagcaauncugug

SEQ ID NO: 46663 - RNA, 24 nt, Artificial Sequence
  Synthetic
  misc_feature (19)..(19): n is a, c, g, or u
agcacucaggcaagcaauncugug

SEQ ID NO: 46664 - RNA, 18 nt, Artificial Sequence
  Synthetic
  misc_feature (16)..(16): n is a, c, g, or u
augucaacaaccgggnug

SEQ ID NO: 46665 - RNA, 19 nt, Artificial Sequence
  Synthetic
  misc_feature (17)..(17): n is a, c, g, or u
uaugucaacaaccgggnug

SEQ ID NO: 46666 - RNA, 20 nt, Artificial Sequence
  Synthetic
  misc_feature (18)..(18): n is a, c, g, or u
uuaugucaacaaccgggnug

SEQ ID NO: 46667 - RNA, 21 nt, Artificial Sequence
  Synthetic
  misc_feature (19)..(19): n is a, c, g, or u
guuaugucaacaaccgggnug

SEQ ID NO: 46668 - RNA, 22 nt, Artificial Sequence
  Synthetic
  misc_feature (20)..(20): n is a, c, g, or u
uguuaugucaacaaccgggnug

SEQ ID NO: 46669 - RNA, 23 nt, Artificial Sequence
  Synthetic
  misc_feature (21)..(21): n is a, c, g, or u
uuguuaugucaacaaccgggnug

SEQ ID NO: 46670 - RNA, 24 nt, Artificial Sequence
  Synthetic
  misc_feature (22)..(22): n is a, c, g, or u
uuuguuaugucaacaaccgggnug

SEQ ID NO: 46671 - RNA, 18 nt, Artificial Sequence
  Synthetic
cuguuaacaggccaauug

SEQ ID NO: 46672 - RNA, 19 nt, Artificial Sequence
  Synthetic
ccuguuaacaggccaauug

SEQ ID NO: 46673 - RNA, 20 nt, Artificial Sequence
  Synthetic
cccuguuaacaggccaauug

SEQ ID NO: 46674 - RNA, 21 nt, Artificial Sequence
  Synthetic
ucccuguuaacaggccaauug

SEQ ID NO: 46675 - RNA, 22 nt, Artificial Sequence
  Synthetic
cucccuguuaacaggccaauug

SEQ ID NO: 46676 - RNA, 23 nt, Artificial Sequence
  Synthetic
acucccuguuaacaggccaauug

SEQ ID NO: 46677 - RNA, 24 nt, Artificial Sequence
  Synthetic
aacucccuguuaacaggccaauug

SEQ ID NO: 46678 - RNA, 18 nt, Artificial Sequence
  Synthetic
ugucuuuaauccugauug

SEQ ID NO: 46679 - RNA, 19 nt, Artificial Sequence
  Synthetic
cugucuuuaauccugauug

SEQ ID NO: 46680 - RNA, 20 nt, Artificial Sequence
  Synthetic
ccugucuuuaauccugauug

SEQ ID NO: 46681 - RNA, 21 nt, Artificial Sequence
  Synthetic
accugucuuuaauccugauug

SEQ ID NO: 46682 - RNA, 22 nt, Artificial Sequence
  Synthetic
uaccugucuuuaauccugauug

SEQ ID NO: 46683 - RNA, 23 nt, Artificial Sequence
  Synthetic
auaccugucuuuaauccugauug

SEQ ID NO: 46684 - RNA, 24 nt, Artificial Sequence
  Synthetic
uauaccugucuuuaauccugauug

SEQ ID NO: 46685 - RNA, 18 nt, Artificial Sequence
  Synthetic
ucccaaaaaggacccuug

SEQ ID NO: 46686 - RNA, 19 nt, Artificial Sequence
  Synthetic
aucccaaaaaggacccuug

SEQ ID NO: 46687 - RNA, 20 nt, Artificial Sequence
  Synthetic
aaucccaaaaaggacccuug

SEQ ID NO: 46688 - RNA, 21 nt, Artificial Sequence
  Synthetic
caaucccaaaaaggacccuug

SEQ ID NO: 46689 - RNA, 22 nt, Artificial Sequence
  Synthetic
ucaaucccaaaaaggacccuug

SEQ ID NO: 46690 - RNA, 23 nt, Artificial Sequence
  Synthetic
uucaaucccaaaaaggacccuug

SEQ ID NO: 46691 - RNA, 24 nt, Artificial Sequence
  Synthetic
cuucaaucccaaaaaggacccuug

SEQ ID NO: 46692 - RNA, 18 nt, Artificial Sequence
  Synthetic
ccuccaagcugugccuug

SEQ ID NO: 46693 - RNA, 19 nt, Artificial Sequence
  Synthetic
gccuccaagcugugccuug

SEQ ID NO: 46694 - RNA, 20 nt, Artificial Sequence
  Synthetic
agccuccaagcugugccuug

SEQ ID NO: 46695 - RNA, 21 nt, Artificial Sequence
  Synthetic
aagccuccaagcugugccuug

SEQ ID NO: 46696 - RNA, 22 nt, Artificial Sequence
  Synthetic
caagccuccaagcugugccuug

SEQ ID NO: 46697 - RNA, 23 nt, Artificial Sequence
  Synthetic
ucaagccuccaagcugugccuug

SEQ ID NO: 46698 - RNA, 24 nt, Artificial Sequence
  Synthetic
uucaagccuccaagcugugccuug

SEQ ID NO: 46699 - RNA, 18 nt, Artificial Sequence
  Synthetic
  misc_feature (14)..(14): n is a, c, g, or u
ugaaccuuuacccnguug

SEQ ID NO: 46700 - RNA, 19 nt, Artificial Sequence
  Synthetic
  misc_feature (15)..(15): n is a, c, g, or u
augaaccuuuacccnguug

SEQ ID NO: 46701 - RNA, 20 nt, Artificial Sequence
  Synthetic
  misc_feature (16)..(16): n is a, c, g, or u
caugaaccuuuacccnguug

SEQ ID NO: 46702 - RNA, 21 nt, Artificial Sequence
  Synthetic
  misc_feature (17)..(17): n is a, c, g, or u
acaugaaccuuuacccnguug

SEQ ID NO: 46703 - RNA, 22 nt, Artificial Sequence
  Synthetic
  misc_feature (18)..(18): n is a, c, g, or u
uacaugaaccuuuacccnguug

SEQ ID NO: 46704 - RNA, 23 nt, Artificial Sequence
  Synthetic
  misc_feature (19)..(19): n is a, c, g, or u
auacaugaaccuuuacccnguug

SEQ ID NO: 46705 - RNA, 24 nt, Artificial Sequence
  Synthetic
  misc_feature (20)..(20): n is a, c, g, or u
aauacaugaaccuuuacccnguug

SEQ ID NO: 46706 - RNA, 18 nt, Artificial Sequence
  Synthetic
uuccggagacuacuguug

SEQ ID NO: 46707 - RNA, 19 nt, Artificial Sequence
  Synthetic
cuuccggagacuacuguug

SEQ ID NO: 46708 - RNA, 20 nt, Artificial Sequence
  Synthetic
acuuccggagacuacuguug

SEQ ID NO: 46709 - RNA, 21 nt, Artificial Sequence
  Synthetic
cacuuccggagacuacuguug

SEQ ID NO: 46710 - RNA, 22 nt, Artificial Sequence
  Synthetic
acacuuccggagacuacuguug

SEQ ID NO: 46711 - RNA, 23 nt, Artificial Sequence
  Synthetic
aacacuuccggagacuacuguug

SEQ ID NO: 46712 - RNA, 24 nt, Artificial Sequence
  Synthetic
caacacuuccggagacuacuguug

SEQ ID NO: 46713 - RNA, 18 nt, Artificial Sequence
  Synthetic
gcgggguuuuucuuguug

SEQ ID NO: 46714 - RNA, 19 nt, Artificial Sequence
  Synthetic
ggcgggguuuuucuuguug

SEQ ID NO: 46715 - RNA, 20 nt, Artificial Sequence
  Synthetic
aggcgggguuuuucuuguug

SEQ ID NO: 46716 - RNA, 21 nt, Artificial Sequence
  Synthetic
caggcgggguuuuucuuguug

SEQ ID NO: 46717 - RNA, 22 nt, Artificial Sequence
  Synthetic
acaggcgggguuuuucuuguug

SEQ ID NO: 46718 - RNA, 23 nt, Artificial Sequence
  Synthetic
uacaggcgggguuuuucuuguug

SEQ ID NO: 46719 - RNA, 24 nt, Artificial Sequence
  Synthetic
uuacaggcgggguuuuucuuguug

SEQ ID NO: 46720 - RNA, 18 nt, Artificial Sequence
  Synthetic
uuauuuacauacccuuug

SEQ ID NO: 46721 - RNA, 19 nt, Artificial Sequence
  Synthetic
auuauuuacauacccuuug

SEQ ID NO: 46722 - RNA, 20 nt, Artificial Sequence
  Synthetic
cauuauuuacauacccuuug

SEQ ID NO: 46723 - RNA, 21 nt, Artificial Sequence
  Synthetic
acauuauuuacauacccuuug

SEQ ID NO: 46724 - RNA, 22 nt, Artificial Sequence
  Synthetic
gacauuauuuacauacccuuug

SEQ ID NO: 46725 - RNA, 23 nt, Artificial Sequence
  Synthetic
agacauuauuuacauacccuuug

SEQ ID NO: 46726 - RNA, 24 nt, Artificial Sequence
  Synthetic
cagacauuauuuacauacccuuug

SEQ ID NO: 46727 - RNA, 18 nt, Artificial Sequence
  Synthetic
uuuccugucuuacuuuug

SEQ ID NO: 46728 - RNA, 19 nt, Artificial Sequence
  Synthetic
auuuccugucuuacuuuug

SEQ ID NO: 46729 - RNA, 20 nt, Artificial Sequence
  Synthetic
cauuuccugucuuacuuuug

SEQ ID NO: 46730 - RNA, 21 nt, Artificial Sequence
  Synthetic
acauuuccugucuuacuuuug

SEQ ID NO: 46731 - RNA, 22 nt, Artificial Sequence
  Synthetic
cacauuuccugucuuacuuuug

SEQ ID NO: 46732 - RNA, 23 nt, Artificial Sequence
  Synthetic
ucacauuuccugucuuacuuuug

SEQ ID NO: 46733 - RNA, 24 nt, Artificial Sequence
  Synthetic
uucacauuuccugucuuacuuuug

SEQ ID NO: 46734 - RNA, 18 nt, Artificial Sequence
  Synthetic
  misc_feature (18)..(18): n is a, c, g, or u
uuaugucaacaaccgggn

SEQ ID NO: 46735 - RNA, 19 nt, Artificial Sequence
  Synthetic
  misc_feature (19)..(19): n is a, c, g, or u
guuaugucaacaaccgggn

SEQ ID NO: 46736 - RNA, 20 nt, Artificial Sequence
  Synthetic
  misc_feature (20)..(20): n is a, c, g, or u
uguuaugucaacaaccgggn

SEQ ID NO: 46737 - RNA, 21 nt, Artificial Sequence
  Synthetic
  misc_feature (21)..(21): n is a, c, g, or u
uuguuaugucaacaaccgggn

SEQ ID NO: 46738 - RNA, 22 nt, Artificial Sequence
  Synthetic
  misc_feature (22)..(22): n is a, c, g, or u
uuuguuaugucaacaaccgggn

SEQ ID NO: 46739 - RNA, 23 nt, Artificial Sequence
  Synthetic
  misc_feature (23)..(23): n is a, c, g, or u
guuuguuaugucaacaaccgggn

SEQ ID NO: 46740 - RNA, 24 nt, Artificial Sequence
  Synthetic
  misc_feature (24)..(24): n is a, c, g, or u
uguuuguuaugucaacaaccgggn

SEQ ID NO: 46741 - RNA, 18 nt, Artificial Sequence
  Synthetic
caccaagcucuacaaaau

SEQ ID NO: 46742 - RNA, 19 nt, Artificial Sequence
  Synthetic
ccaccaagcucuacaaaau

SEQ ID NO: 46743 - RNA, 20 nt, Artificial Sequence
  Synthetic
uccaccaagcucuacaaaau

SEQ ID NO: 46744 - RNA, 21 nt, Artificial Sequence
  Synthetic
uuccaccaagcucuacaaaau

SEQ ID NO: 46745 - RNA, 22 nt, Artificial Sequence
  Synthetic
auuccaccaagcucuacaaaau

SEQ ID NO: 46746 - RNA, 23 nt, Artificial Sequence
  Synthetic
cauuccaccaagcucuacaaaau

SEQ ID NO: 46747 - RNA, 24 nt, Artificial Sequence
  Synthetic
gcauuccaccaagcucuacaaaau

SEQ ID NO: 46748 - RNA, 18 nt, Artificial Sequence
  Synthetic
ccagcauucagagcaaau

SEQ ID NO: 46749 - RNA, 19 nt, Artificial Sequence
  Synthetic
cccagcauucagagcaaau

SEQ ID NO: 46750 - RNA, 20 nt, Artificial Sequence
  Synthetic
acccagcauucagagcaaau

SEQ ID NO: 46751 - RNA, 21 nt, Artificial Sequence
  Synthetic
gacccagcauucagagcaaau

SEQ ID NO: 46752 - RNA, 22 nt, Artificial Sequence
  Synthetic
ggacccagcauucagagcaaau

SEQ ID NO: 46753 - RNA, 23 nt, Artificial Sequence
  Synthetic
uggacccagcauucagagcaaau

SEQ ID NO: 46754 - RNA, 24 nt, Artificial Sequence
  Synthetic
uuggacccagcauucagagcaaau

SEQ ID NO: 46755 - RNA, 18 nt, Artificial Sequence
  Synthetic
aagacauuauaacuaaau

SEQ ID NO: 46756 - RNA, 19 nt, Artificial Sequence
  Synthetic
caagacauuauaacuaaau

SEQ ID NO: 46757 - RNA, 20 nt, Artificial Sequence
  Synthetic
ucaagacauuauaacuaaau

SEQ ID NO: 46758 - RNA, 21 nt, Artificial Sequence
  Synthetic
aucaagacauuauaacuaaau

SEQ ID NO: 46759 - RNA, 22 nt, Artificial Sequence
  Synthetic
caucaagacauuauaacuaaau

SEQ ID NO: 46760 - RNA, 23 nt, Artificial Sequence
  Synthetic
gcaucaagacauuauaacuaaau

SEQ ID NO: 46761 - RNA, 24 nt, Artificial Sequence
  Synthetic
ugcaucaagacauuauaacuaaau

SEQ ID NO: 46762 - RNA, 18 nt, Artificial Sequence
  Synthetic
ggcccucucacaguaaau

SEQ ID NO: 46763 - RNA, 19 nt, Artificial Sequence
  Synthetic
gggcccucucacaguaaau

SEQ ID NO: 46764 - RNA, 20 nt, Artificial Sequence
  Synthetic
ugggcccucucacaguaaau

SEQ ID NO: 46765 - RNA, 21 nt, Artificial Sequence
  Synthetic
gugggcccucucacaguaaau

SEQ ID NO: 46766 - RNA, 22 nt, Artificial Sequence
  Synthetic
ugugggcccucucacaguaaau

SEQ ID NO: 46767 - RNA, 23 nt, Artificial Sequence
  Synthetic
uugugggcccucucacaguaaau

SEQ ID NO: 46768 - RNA, 24 nt, Artificial Sequence
  Synthetic
uuugugggcccucucacaguaaau

SEQ ID NO: 46769 - RNA, 18 nt, Artificial Sequence
  Synthetic
ccagauugggacuucaau

SEQ ID NO: 46770 - RNA, 19 nt, Artificial Sequence
  Synthetic
uccagauugggacuucaau

SEQ ID NO: 46771 - RNA, 20 nt, Artificial Sequence
  Synthetic
auccagauugggacuucaau

SEQ ID NO: 46772 - RNA, 21 nt, Artificial Sequence
  Synthetic
aauccagauugggacuucaau

SEQ ID NO: 46773 - RNA, 22 nt, Artificial Sequence
  Synthetic
caauccagauugggacuucaau

SEQ ID NO: 46774 - RNA, 23 nt, Artificial Sequence
  Synthetic
acaauccagauugggacuucaau

SEQ ID NO: 46775 - RNA, 24 nt, Artificial Sequence
  Synthetic
aacaauccagauugggacuucaau

SEQ ID NO: 46776 - RNA, 18 nt, Artificial Sequence
  Synthetic
uugacccuuauaaagaau

SEQ ID NO: 46777 - RNA, 19 nt, Artificial Sequence
  Synthetic
auugacccuuauaaagaau

SEQ ID NO: 46778 - RNA, 20 nt, Artificial Sequence
  Synthetic
cauugacccuuauaaagaau

SEQ ID NO: 46779 - RNA, 21 nt, Artificial Sequence
  Synthetic
acauugacccuuauaaagaau

SEQ ID NO: 46780 - RNA, 22 nt, Artificial Sequence
  Synthetic
gacauugacccuuauaaagaau

SEQ ID NO: 46781 - RNA, 23 nt, Artificial Sequence
  Synthetic
agacauugacccuuauaaagaau

SEQ ID NO: 46782 - RNA, 24 nt, Artificial Sequence
  Synthetic
uagacauugacccuuauaaagaau

SEQ ID NO: 46783 - RNA, 18 nt, Artificial Sequence
  Synthetic
accuggguggguaauaau

SEQ ID NO: 46784 - RNA, 19 nt, Artificial Sequence
  Synthetic
  misc_feature (1)..(1): n is a, c, g, or u
naccuggguggguaauaau

SEQ ID NO: 46785 - RNA, 20 nt, Artificial Sequence
  Synthetic
  misc_feature (2)..(2): n is a, c, g, or u
cnaccuggguggguaauaau

SEQ ID NO: 46786 - RNA, 21 nt, Artificial Sequence
  Synthetic
  misc_feature (3)..(3): n is a, c, g, or u
gcnaccuggguggguaauaau

SEQ ID NO: 46787 - RNA, 22 nt, Artificial Sequence
  Synthetic
  misc_feature (4)..(4): n is a, c, g, or u
agcnaccuggguggguaauaau

SEQ ID NO: 46788 - RNA, 23 nt, Artificial Sequence
  Synthetic
  misc_feature (5)..(5): n is a, c, g, or u
uagcnaccuggguggguaauaau

SEQ ID NO: 46789 - RNA, 24 nt, Artificial Sequence
  Synthetic
  misc_feature (6)..(6): n is a, c, g, or u
cuagcnaccuggguggguaauaau

SEQ ID NO: 46790 - RNA, 18 nt, Artificial Sequence
  Synthetic
uuuuaugggauauguaau

SEQ ID NO: 46791 - RNA, 19 nt, Artificial Sequence
  Synthetic
auuuuaugggauauguaau

SEQ ID NO: 46792 - RNA, 20 nt, Artificial Sequence
  Synthetic
aauuuuaugggauauguaau

SEQ ID NO: 46793 - RNA, 21 nt, Artificial Sequence
  Synthetic
aaauuuuaugggauauguaau

SEQ ID NO: 46794 - RNA, 22 nt, Artificial Sequence
  Synthetic
uaaauuuuaugggauauguaau

SEQ ID NO: 46795 - RNA, 23 nt, Artificial Sequence
  Synthetic
uuaaauuuuaugggauauguaau

SEQ ID NO: 46796 - RNA, 24 nt, Artificial Sequence
  Synthetic
cuuaaauuuuaugggauauguaau

SEQ ID NO: 46797 - RNA, 18 nt, Artificial Sequence
  Synthetic
gccaaaucuguacaacau

SEQ ID NO: 46798 - RNA, 19 nt, Artificial Sequence
  Synthetic
ggccaaaucuguacaacau

SEQ ID NO: 46799 - RNA, 20 nt, Artificial Sequence
  Synthetic
gggccaaaucuguacaacau

SEQ ID NO: 46800 - RNA, 21 nt, Artificial Sequence
  Synthetic
ggggccaaaucuguacaacau

SEQ ID NO: 46801 - RNA, 22 nt, Artificial Sequence
  Synthetic
gggggccaaaucuguacaacau

SEQ ID NO: 46802 - RNA, 23 nt, Artificial Sequence
  Synthetic
ugggggccaaaucuguacaacau

SEQ ID NO: 46803 - RNA, 24 nt, Artificial Sequence
  Synthetic
uugggggccaaaucuguacaacau

SEQ ID NO: 46804 - RNA, 18 nt, Artificial Sequence
  Synthetic
ggacccugcaccgaacau

SEQ ID NO: 46805 - RNA, 19 nt, Artificial Sequence
  Synthetic
gggacccugcaccgaacau

SEQ ID NO: 46806 - RNA, 20 nt, Artificial Sequence
  Synthetic
ggggacccugcaccgaacau

SEQ ID NO: 46807 - RNA, 18 nt, Artificial Sequence
  Synthetic
ccauuugcaucaagacau

SEQ ID NO: 46808 - RNA, 19 nt, Artificial Sequence
  Synthetic
uccauuugcaucaagacau

SEQ ID NO: 46809 - RNA, 20 nt, Artificial Sequence
  Synthetic
auccauuugcaucaagacau

SEQ ID NO: 46810 - RNA, 21 nt, Artificial Sequence
  Synthetic
uauccauuugcaucaagacau

SEQ ID NO: 46811 - RNA, 22 nt, Artificial Sequence
  Synthetic
auauccauuugcaucaagacau

SEQ ID NO: 46812 - RNA, 23 nt, Artificial Sequence
  Synthetic
aauauccauuugcaucaagacau

SEQ ID NO: 46813 - RNA, 24 nt, Artificial Sequence
  Synthetic
aaauauccauuugcaucaagacau

SEQ ID NO: 46814 - RNA, 18 nt, Artificial Sequence
  Synthetic
uugucuuuggguauacau

SEQ ID NO: 46815 - RNA, 19 nt, Artificial Sequence
  Synthetic
uuugucuuuggguauacau

SEQ ID NO: 46816 - RNA, 20 nt, Artificial Sequence
  Synthetic
uuuugucuuuggguauacau

SEQ ID NO: 46817 - RNA, 21 nt, Artificial Sequence
  Synthetic
cuuuugucuuuggguauacau

SEQ ID NO: 46818 - RNA, 22 nt, Artificial Sequence
  Synthetic
ucuuuugucuuuggguauacau

SEQ ID NO: 46819 - RNA, 23 nt, Artificial Sequence
  Synthetic
uucuuuugucuuuggguauacau

SEQ ID NO: 46820 - RNA, 24 nt, Artificial Sequence
  Synthetic
uuucuuuugucuuuggguauacau

SEQ ID NO: 46821 - RNA, 18 nt, Artificial Sequence
  Synthetic
caccucugcacguuacau

SEQ ID NO: 46822 - RNA, 19 nt, Artificial Sequence
  Synthetic
ucaccucugcacguuacau

SEQ ID NO: 46823 - RNA, 20 nt, Artificial Sequence
  Synthetic
uucaccucugcacguuacau

SEQ ID NO: 46824 - RNA, 21 nt, Artificial Sequence
  Synthetic
cuucaccucugcacguuacau

SEQ ID NO: 46825 - RNA, 22 nt, Artificial Sequence
  Synthetic
gcuucaccucugcacguuacau

SEQ ID NO: 46826 - RNA, 23 nt, Artificial Sequence
  Synthetic
cgcuucaccucugcacguuacau

SEQ ID NO: 46827 - RNA, 24 nt, Artificial Sequence
  Synthetic
ucgcuucaccucugcacguuacau

SEQ ID NO: 46828 - RNA, 18 nt, Artificial Sequence
  Synthetic
accaguuggacccagcau

SEQ ID NO: 46829 - RNA, 19 nt, Artificial Sequence
  Synthetic
caccaguuggacccagcau

SEQ ID NO: 46830 - RNA, 20 nt, Artificial Sequence
  Synthetic
ucaccaguuggacccagcau

SEQ ID NO: 46831 - RNA, 21 nt, Artificial Sequence
  Synthetic
aucaccaguuggacccagcau

SEQ ID NO: 46832 - RNA, 22 nt, Artificial Sequence
  Synthetic
gaucaccaguuggacccagcau

SEQ ID NO: 46833 - RNA, 23 nt, Artificial Sequence
  Synthetic
cgaucaccaguuggacccagcau

SEQ ID NO: 46834 - RNA, 24 nt, Artificial Sequence
  Synthetic
ccgaucaccaguuggacccagcau

SEQ ID NO: 46835 - RNA, 18 nt, Artificial Sequence
  Synthetic
auuuggaagauccagcau

SEQ ID NO: 46836 - RNA, 19 nt, Artificial Sequence
  Synthetic
aauuuggaagauccagcau

SEQ ID NO: 46837 - RNA, 20 nt, Artificial Sequence
  Synthetic
uaauuuggaagauccagcau

SEQ ID NO: 46838 - RNA, 21 nt, Artificial Sequence
  Synthetic
auaauuuggaagauccagcau

SEQ ID NO: 46839 - RNA, 22 nt, Artificial Sequence
  Synthetic
aauaauuuggaagauccagcau

SEQ ID NO: 46840 - RNA, 23 nt, Artificial Sequence
  Synthetic
uaauaauuuggaagauccagcau

SEQ ID NO: 46841 - RNA, 24 nt, Artificial Sequence
  Synthetic
guaauaauuuggaagauccagcau

SEQ ID NO: 46842 - RNA, 18 nt, Artificial Sequence
  Synthetic
ccaaauauccauuugcau

SEQ ID NO: 46843 - RNA, 19 nt, Artificial Sequence
  Synthetic
uccaaauauccauuugcau

SEQ ID NO: 46844 - RNA, 20 nt, Artificial Sequence
  Synthetic
uuccaaauauccauuugcau

SEQ ID NO: 46845 - RNA, 21 nt, Artificial Sequence
  Synthetic
uuuccaaauauccauuugcau

SEQ ID NO: 46846 - RNA, 22 nt, Artificial Sequence
  Synthetic
uuuuccaaauauccauuugcau

SEQ ID NO: 46847 - RNA, 23 nt, Artificial Sequence
  Synthetic
cuuuuccaaauauccauuugcau

SEQ ID NO: 46848 - RNA, 24 nt, Artificial Sequence
  Synthetic
ucuuuuccaaauauccauuugcau

SEQ ID NO: 46849 - RNA, 18 nt, Artificial Sequence
  Synthetic
guauucccaucccaucau

SEQ ID NO: 46850 - RNA, 19 nt, Artificial Sequence
  Synthetic
uguauucccaucccaucau

SEQ ID NO: 46851 - RNA, 20 nt, Artificial Sequence
  Synthetic
cuguauucccaucccaucau

SEQ ID NO: 46852 - RNA, 21 nt, Artificial Sequence
  Synthetic
ccuguauucccaucccaucau

SEQ ID NO: 46853 - RNA, 22 nt, Artificial Sequence
  Synthetic
accuguauucccaucccaucau

SEQ ID NO: 46854 - RNA, 23 nt, Artificial Sequence
  Synthetic
caccuguauucccaucccaucau

SEQ ID NO: 46855 - RNA, 24 nt, Artificial Sequence
  Synthetic
gcaccuguauucccaucccaucau

SEQ ID NO: 46856 - RNA, 18 nt, Artificial Sequence
  Synthetic
gucuggagcaaaacucau

SEQ ID NO: 46857 - RNA, 19 nt, Artificial Sequence
  Synthetic
ggucuggagcaaaacucau

SEQ ID NO: 46858 - RNA, 20 nt, Artificial Sequence
  Synthetic
cggucuggagcaaaacucau

SEQ ID NO: 46859 - RNA, 21 nt, Artificial Sequence
  Synthetic
ccggucuggagcaaaacucau

SEQ ID NO: 46860 - RNA, 22 nt, Artificial Sequence
  Synthetic
gccggucuggagcaaaacucau

SEQ ID NO: 46861 - RNA, 23 nt, Artificial Sequence
  Synthetic
agccggucuggagcaaaacucau

SEQ ID NO: 46862 - RNA, 24 nt, Artificial Sequence
  Synthetic
cagccggucuggagcaaaacucau

SEQ ID NO: 46863 - RNA, 18 nt, Artificial Sequence
  Synthetic
uaaaugagaaacgaagau

SEQ ID NO: 46864 - RNA, 19 nt, Artificial Sequence
  Synthetic
guaaaugagaaacgaagau

SEQ ID NO: 46865 - RNA, 20 nt, Artificial Sequence
  Synthetic
aguaaaugagaaacgaagau

SEQ ID NO: 46866 - RNA, 21 nt, Artificial Sequence
  Synthetic
caguaaaugagaaacgaagau

SEQ ID NO: 46867 - RNA, 22 nt, Artificial Sequence
  Synthetic
acaguaaaugagaaacgaagau

SEQ ID NO: 46868 - RNA, 23 nt, Artificial Sequence
  Synthetic
cacaguaaaugagaaacgaagau

SEQ ID NO: 46869 - RNA, 24 nt, Artificial Sequence
  Synthetic
ucacaguaaaugagaaacgaagau

SEQ ID NO: 46870 - RNA, 18 nt, Artificial Sequence
  Synthetic
aauaccaacaauccagau

SEQ ID NO: 46871 - RNA, 19 nt, Artificial Sequence
  Synthetic
aaauaccaacaauccagau

SEQ ID NO: 46872 - RNA, 20 nt, Artificial Sequence
  Synthetic
caaauaccaacaauccagau

SEQ ID NO: 46873 - RNA, 21 nt, Artificial Sequence
  Synthetic
gcaaauaccaacaauccagau

SEQ ID NO: 46874 - RNA, 22 nt, Artificial Sequence
  Synthetic
agcaaauaccaacaauccagau

SEQ ID NO: 46875 - RNA, 23 nt, Artificial Sequence
  Synthetic
gagcaaauaccaacaauccagau

SEQ ID NO: 46876 - RNA, 24 nt, Artificial Sequence
  Synthetic
agagcaaauaccaacaauccagau

SEQ ID NO: 46877 - RNA, 18 nt, Artificial Sequence
  Synthetic
gucaaucuucuccaggau

SEQ ID NO: 46878 - RNA, 19 nt, Artificial Sequence
  Synthetic
cgucaaucuucuccaggau

SEQ ID NO: 46879 - RNA, 20 nt, Artificial Sequence
  Synthetic
ucgucaaucuucuccaggau

SEQ ID NO: 46880 - RNA, 18 nt, Artificial Sequence
  Synthetic
uggcuccaguucagggau

SEQ ID NO: 46881 - RNA, 19 nt, Artificial Sequence
  Synthetic
guggcuccaguucagggau

SEQ ID NO: 46882 - RNA, 20 nt, Artificial Sequence
  Synthetic
gguggcuccaguucagggau

SEQ ID NO: 46883 - RNA, 21 nt, Artificial Sequence
  Synthetic
ugguggcuccaguucagggau

SEQ ID NO: 46884 - RNA, 22 nt, Artificial Sequence
  Synthetic
cugguggcuccaguucagggau

SEQ ID NO: 46885 - RNA, 23 nt, Artificial Sequence
  Synthetic
gcugguggcuccaguucagggau

SEQ ID NO: 46886 - RNA, 24 nt, Artificial Sequence
  Synthetic
ugcugguggcuccaguucagggau

SEQ ID NO: 46887 - RNA, 18 nt, Artificial Sequence
  Synthetic
gcccguuuguccucugau

SEQ ID NO: 46888 - RNA, 19 nt, Artificial Sequence
  Synthetic
ugcccguuuguccucugau

SEQ ID NO: 46889 - RNA, 20 nt, Artificial Sequence
  Synthetic
uugcccguuuguccucugau

SEQ ID NO: 46890 - RNA, 21 nt, Artificial Sequence
  Synthetic
guugcccguuuguccucugau

SEQ ID NO: 46891 - RNA, 22 nt, Artificial Sequence
  Synthetic
uguugcccguuuguccucugau

SEQ ID NO: 46892 - RNA, 23 nt, Artificial Sequence
  Synthetic
auguugcccguuuguccucugau

SEQ ID NO: 46893 - RNA, 24 nt, Artificial Sequence
  Synthetic
uauguugcccguuuguccucugau

SEQ ID NO: 46894 - RNA, 18 nt, Artificial Sequence
  Synthetic
guuaacaggccaauugau

SEQ ID NO: 46895 - RNA, 19 nt, Artificial Sequence
  Synthetic
uguuaacaggccaauugau

SEQ ID NO: 46896 - RNA, 20 nt, Artificial Sequence
  Synthetic
cuguuaacaggccaauugau

SEQ ID NO: 46897 - RNA, 21 nt, Artificial Sequence
  Synthetic
ccuguuaacaggccaauugau

SEQ ID NO: 46898 - RNA, 22 nt, Artificial Sequence
  Synthetic
cccuguuaacaggccaauugau

SEQ ID NO: 46899 - RNA, 23 nt, Artificial Sequence
  Synthetic
ucccuguuaacaggccaauugau

SEQ ID NO: 46900 - RNA, 24 nt, Artificial Sequence
  Synthetic
cucccuguuaacaggccaauugau

SEQ ID NO: 46901 - RNA, 18 nt, Artificial Sequence
  Synthetic
aaggcggguauucuauau

SEQ ID NO: 46902 - RNA, 19 nt, Artificial Sequence
  Synthetic
gaaggcggguauucuauau

SEQ ID NO: 46903 - RNA, 20 nt, Artificial Sequence
  Synthetic
ggaaggcggguauucuauau

SEQ ID NO: 46904 - RNA, 21 nt, Artificial Sequence
  Synthetic
uggaaggcggguauucuauau

SEQ ID NO: 46905 - RNA, 22 nt, Artificial Sequence
  Synthetic
uuggaaggcggguauucuauau

SEQ ID NO: 46906 - RNA, 23 nt, Artificial Sequence
  Synthetic
uuuggaaggcggguauucuauau

SEQ ID NO: 46907 - RNA, 24 nt, Artificial Sequence
  Synthetic
cuuuggaaggcggguauucuauau

SEQ ID NO: 46908 - RNA, 18 nt, Artificial Sequence
  Synthetic
  misc_feature (8)..(8): n is a, c, g, or u
cugccaangcaguuauau

SEQ ID NO: 46909 - RNA, 19 nt, Artificial Sequence
  Synthetic
  misc_feature (9)..(9): n is a, c, g, or u
ucugccaangcaguuauau

SEQ ID NO: 46910 - RNA, 20 nt, Artificial Sequence
  Synthetic
  misc_feature (10)..(10): n is a, c, g, or u
aucugccaangcaguuauau

SEQ ID NO: 46911 - RNA, 21 nt, Artificial Sequence
  Synthetic
  misc_feature (11)..(11): n is a, c, g, or u
caucugccaangcaguuauau

SEQ ID NO: 46912 - RNA, 22 nt, Artificial Sequence
  Synthetic
  misc_feature (12)..(12): n is a, c, g, or u
ucaucugccaangcaguuauau

SEQ ID NO: 46913 - RNA, 23 nt, Artificial Sequence
  Synthetic
  misc_feature (13)..(13): n is a, c, g, or u
aucaucugccaangcaguuauau

SEQ ID NO: 46914 - RNA, 24 nt, Artificial Sequence
  Synthetic
  misc_feature (14)..(14): n is a, c, g, or u
caucaucugccaangcaguuauau

SEQ ID NO: 46915 - RNA, 18 nt, Artificial Sequence
  Synthetic
ggaaggcggguauucuau

SEQ ID NO: 46916 - RNA, 19 nt, Artificial Sequence
  Synthetic
uggaaggcggguauucuau

SEQ ID NO: 46917 - RNA, 20 nt, Artificial Sequence
  Synthetic
uuggaaggcggguauucuau

SEQ ID NO: 46918 - RNA, 21 nt, Artificial Sequence
  Synthetic
uuuggaaggcggguauucuau

SEQ ID NO: 46919 - RNA, 22 nt, Artificial Sequence
  Synthetic
cuuuggaaggcggguauucuau

SEQ ID NO: 46920 - RNA, 23 nt, Artificial Sequence
  Synthetic
ccuuuggaaggcggguauucuau

SEQ ID NO: 46921 - RNA, 24 nt, Artificial Sequence
  Synthetic
cccuuuggaaggcggguauucuau

SEQ ID NO: 46922 - RNA, 18 nt, Artificial Sequence
  Synthetic
  misc_feature (5)..(5): n is a, c, g, or u
auaungaugaugugguau

SEQ ID NO: 46923 - RNA, 19 nt, Artificial Sequence
  Synthetic
  misc_feature (6)..(6): n is a, c, g, or u
uauaungaugaugugguau

SEQ ID NO: 46924 - RNA, 20 nt, Artificial Sequence
  Synthetic
  misc_feature (7)..(7): n is a, c, g, or u
cuauaungaugaugugguau

SEQ ID NO: 46925 - RNA, 21 nt, Artificial Sequence
  Synthetic
  misc_feature (8)..(8): n is a, c, g, or u
gcuauaungaugaugugguau

SEQ ID NO: 46926 - RNA, 22 nt, Artificial Sequence
  Synthetic
  misc_feature (9)..(9): n is a, c, g, or u
agcuauaungaugaugugguau

SEQ ID NO: 46927 - RNA, 23 nt, Artificial Sequence
  Synthetic
  misc_feature (10)..(10): n is a, c, g, or u
cagcuauaungaugaugugguau

SEQ ID NO: 46928 - RNA, 24 nt, Artificial Sequence
  Synthetic
  misc_feature (11)..(11): n is a, c, g, or u
ucagcuauaungaugaugugguau

SEQ ID NO: 46929 - RNA, 18 nt, Artificial Sequence
  Synthetic
gccuuuauaugcauguau

SEQ ID NO: 46930 - RNA, 19 nt, Artificial Sequence
  Synthetic
ugccuuuauaugcauguau

SEQ ID NO: 46931 - RNA, 20 nt, Artificial Sequence
  Synthetic
augccuuuauaugcauguau

SEQ ID NO: 46932 - RNA, 21 nt, Artificial Sequence
  Synthetic
aaugccuuuauaugcauguau

SEQ ID NO: 46933 - RNA, 22 nt, Artificial Sequence
  Synthetic
uaaugccuuuauaugcauguau

SEQ ID NO: 46934 - RNA, 23 nt, Artificial Sequence
  Synthetic
uuaaugccuuuauaugcauguau

SEQ ID NO: 46935 - RNA, 24 nt, Artificial Sequence
  Synthetic
cuuaaugccuuuauaugcauguau

SEQ ID NO: 46936 - RNA, 18 nt, Artificial Sequence
  Synthetic
gguuaaugaccuuuguau

SEQ ID NO: 46937 - RNA, 19 nt, Artificial Sequence
  Synthetic
agguuaaugaccuuuguau

SEQ ID NO: 46938 - RNA, 20 nt, Artificial Sequence
  Synthetic
cagguuaaugaccuuuguau

SEQ ID NO: 46939 - RNA, 21 nt, Artificial Sequence
  Synthetic
ccagguuaaugaccuuuguau

SEQ ID NO: 46940 - RNA, 22 nt, Artificial Sequence
  Synthetic
uccagguuaaugaccuuuguau

SEQ ID NO: 46941 - RNA, 23 nt, Artificial Sequence
  Synthetic
guccagguuaaugaccuuuguau

SEQ ID NO: 46942 - RNA, 24 nt, Artificial Sequence
  Synthetic
aguccagguuaaugaccuuuguau

SEQ ID NO: 46943 - RNA, 18 nt, Artificial Sequence
  Synthetic
gguaucaaaccguauuau

SEQ ID NO: 46944 - RNA, 19 nt, Artificial Sequence
  Synthetic
agguaucaaaccguauuau

SEQ ID NO: 46945 - RNA, 20 nt, Artificial Sequence
  Synthetic
aagguaucaaaccguauuau

SEQ ID NO: 46946 - RNA, 21 nt, Artificial Sequence
  Synthetic
aaagguaucaaaccguauuau

SEQ ID NO: 46947 - RNA, 22 nt, Artificial Sequence
  Synthetic
caaagguaucaaaccguauuau

SEQ ID NO: 46948 - RNA, 23 nt, Artificial Sequence
  Synthetic
acaaagguaucaaaccguauuau

SEQ ID NO: 46949 - RNA, 24 nt, Artificial Sequence
  Synthetic
gacaaagguaucaaaccguauuau

SEQ ID NO: 46950 - RNA, 18 nt, Artificial Sequence
  Synthetic
uuagacauugacccuuau

SEQ ID NO: 46951 - RNA, 19 nt, Artificial Sequence
  Synthetic
cuuagacauugacccuuau

SEQ ID NO: 46952 - RNA, 20 nt, Artificial Sequence
  Synthetic
gcuuagacauugacccuuau

SEQ ID NO: 46953 - RNA, 21 nt, Artificial Sequence
  Synthetic
ggcuuagacauugacccuuau

SEQ ID NO: 46954 - RNA, 22 nt, Artificial Sequence
  Synthetic
uggcuuagacauugacccuuau

SEQ ID NO: 46955 - RNA, 23 nt, Artificial Sequence
  Synthetic
uuggcuuagacauugacccuuau

SEQ ID NO: 46956 - RNA, 24 nt, Artificial Sequence
  Synthetic
uuuggcuuagacauugacccuuau

SEQ ID NO: 46957 - RNA, 18 nt, Artificial Sequence
  Synthetic
  misc_feature (10)..(10): n is a, c, g, or u
aucugccaangcaguuau

SEQ ID NO: 46958 - RNA, 19 nt, Artificial Sequence
  Synthetic
  misc_feature (11)..(11): n is a, c, g, or u
caucugccaangcaguuau

SEQ ID NO: 46959 - RNA, 20 nt, Artificial Sequence
  Synthetic
  misc_feature (12)..(12): n is a, c, g, or u
ucaucugccaangcaguuau

SEQ ID NO: 46960 - RNA, 21 nt, Artificial Sequence
  Synthetic
  misc_feature (13)..(13): n is a, c, g, or u
aucaucugccaangcaguuau

SEQ ID NO: 46961 - RNA, 22 nt, Artificial Sequence
  Synthetic
  misc_feature (14)..(14): n is a, c, g, or u
caucaucugccaangcaguuau

SEQ ID NO: 46962 - RNA, 23 nt, Artificial Sequence
  Synthetic
  misc_feature (15)..(15): n is a, c, g, or u
ucaucaucugccaangcaguuau

SEQ ID NO: 46963 - RNA, 24 nt, Artificial Sequence
  Synthetic
  misc_feature (16)..(16): n is a, c, g, or u
cucaucaucugccaangcaguuau

SEQ ID NO: 46964 - RNA, 18 nt, Artificial Sequence
  Synthetic
ucuuggacuguuuguuau

SEQ ID NO: 46965 - RNA, 19 nt, Artificial Sequence
  Synthetic
cucuuggacuguuuguuau

SEQ ID NO: 46966 - RNA, 20 nt, Artificial Sequence
  Synthetic
acucuuggacuguuuguuau

SEQ ID NO: 46967 - RNA, 21 nt, Artificial Sequence
  Synthetic
gacucuuggacuguuuguuau

SEQ ID NO: 46968 - RNA, 22 nt, Artificial Sequence
  Synthetic
ggacucuuggacuguuuguuau

SEQ ID NO: 46969 - RNA, 23 nt, Artificial Sequence
  Synthetic
aggacucuuggacuguuuguuau

SEQ ID NO: 46970 - RNA, 24 nt, Artificial Sequence
  Synthetic
gaggacucuuggacuguuuguuau

SEQ ID NO: 46971 - RNA, 18 nt, Artificial Sequence
  Synthetic
uuuacuuucucgccaacu

SEQ ID NO: 46972 - RNA, 19 nt, Artificial Sequence
  Synthetic
uuuuacuuucucgccaacu

SEQ ID NO: 46973 - RNA, 20 nt, Artificial Sequence
  Synthetic
cuuuuacuuucucgccaacu

SEQ ID NO: 46974 - RNA, 21 nt, Artificial Sequence
  Synthetic
gcuuuuacuuucucgccaacu

SEQ ID NO: 46975 - RNA, 22 nt, Artificial Sequence
  Synthetic
ggcuuuuacuuucucgccaacu

SEQ ID NO: 46976 - RNA, 23 nt, Artificial Sequence
  Synthetic
aggcuuuuacuuucucgccaacu

SEQ ID NO: 46977 - RNA, 24 nt, Artificial Sequence
  Synthetic
caggcuuuuacuuucucgccaacu

SEQ ID NO: 46978 - RNA, 18 nt, Artificial Sequence
  Synthetic
gauccauacugcggaacu

SEQ ID NO: 46979 - RNA, 19 nt, Artificial Sequence
  Synthetic
cgauccauacugcggaacu

SEQ ID NO: 46980 - RNA, 20 nt, Artificial Sequence
  Synthetic
ccgauccauacugcggaacu

SEQ ID NO: 46981 - RNA, 18 nt, Artificial Sequence
  Synthetic
cccuauccuaucaacacu

SEQ ID NO: 46982 - RNA, 19 nt, Artificial Sequence
  Synthetic
ccccuauccuaucaacacu

SEQ ID NO: 46983 - RNA, 20 nt, Artificial Sequence
  Synthetic
gccccuauccuaucaacacu

SEQ ID NO: 46984 - RNA, 21 nt, Artificial Sequence
  Synthetic
ugccccuauccuaucaacacu

SEQ ID NO: 46985 - RNA, 22 nt, Artificial Sequence
  Synthetic
augccccuauccuaucaacacu

SEQ ID NO: 46986 - RNA, 23 nt, Artificial Sequence
  Synthetic
aaugccccuauccuaucaacacu

SEQ ID NO: 46987 - RNA, 24 nt, Artificial Sequence
  Synthetic
aaaugccccuauccuaucaacacu

SEQ ID NO: 46988 - RNA, 18 nt, Artificial Sequence
  Synthetic
ucagucucagggcacacu

SEQ ID NO: 46989 - RNA, 19 nt, Artificial Sequence
  Synthetic
cucagucucagggcacacu

SEQ ID NO: 46990 - RNA, 20 nt, Artificial Sequence
  Synthetic
ccucagucucagggcacacu

SEQ ID NO: 46991 - RNA, 21 nt, Artificial Sequence
  Synthetic
cccucagucucagggcacacu

SEQ ID NO: 46992 - RNA, 22 nt, Artificial Sequence
  Synthetic
gcccucagucucagggcacacu

SEQ ID NO: 46993 - RNA, 23 nt, Artificial Sequence
  Synthetic
agcccucagucucagggcacacu

SEQ ID NO: 46994 - RNA, 24 nt, Artificial Sequence
  Synthetic
gagcccucagucucagggcacacu

SEQ ID NO: 46995 - RNA, 18 nt, Artificial Sequence
  Synthetic
ucccaucucuccaccacu

SEQ ID NO: 46996 - RNA, 19 nt, Artificial Sequence
  Synthetic
cucccaucucuccaccacu

SEQ ID NO: 46997 - RNA, 20 nt, Artificial Sequence
  Synthetic
acucccaucucuccaccacu

SEQ ID NO: 46998 - RNA, 21 nt, Artificial Sequence
  Synthetic
uacucccaucucuccaccacu

SEQ ID NO: 46999 - RNA, 22 nt, Artificial Sequence
  Synthetic
cuacucccaucucuccaccacu

SEQ ID NO: 47000 - RNA, 23 nt, Artificial Sequence
  Synthetic
ccuacucccaucucuccaccacu

SEQ ID NO: 47001 - RNA, 24 nt, Artificial Sequence
  Synthetic
gccuacucccaucucuccaccacu

SEQ ID NO: 47002 - RNA, 18 nt, Artificial Sequence
  Synthetic
caguuauauaagaggacu

SEQ ID NO: 47003 - RNA, 19 nt, Artificial Sequence
  Synthetic
gcaguuauauaagaggacu

SEQ ID NO: 47004 - RNA, 20 nt, Artificial Sequence
  Synthetic
  misc_feature (1)..(1): n is a, c, g, or u
ngcaguuauauaagaggacu

SEQ ID NO: 47005 - RNA, 21 nt, Artificial Sequence
  Synthetic
  misc_feature (2)..(2): n is a, c, g, or u
angcaguuauauaagaggacu

SEQ ID NO: 47006 - RNA, 22 nt, Artificial Sequence
  Synthetic
  misc_feature (3)..(3): n is a, c, g, or u
aangcaguuauauaagaggacu

SEQ ID NO: 47007 - RNA, 23 nt, Artificial Sequence
  Synthetic
  misc_feature (4)..(4): n is a, c, g, or u
caangcaguuauauaagaggacu

SEQ ID NO: 47008 - RNA, 24 nt, Artificial Sequence
  Synthetic
  misc_feature (5)..(5): n is a, c, g, or u
ccaangcaguuauauaagaggacu

SEQ ID NO: 47009 - RNA, 18 nt, Artificial Sequence
  Synthetic
uguugguucuucuggacu

SEQ ID NO: 47010 - RNA, 19 nt, Artificial Sequence
  Synthetic
uuguugguucuucuggacu

SEQ ID NO: 47011 - RNA, 20 nt, Artificial Sequence
  Synthetic
cuuguugguucuucuggacu

SEQ ID NO: 47012 - RNA, 21 nt, Artificial Sequence
  Synthetic
ucuuguugguucuucuggacu

SEQ ID NO: 47013 - RNA, 22 nt, Artificial Sequence
  Synthetic
uucuuguugguucuucuggacu

SEQ ID NO: 47014 - RNA, 23 nt, Artificial Sequence
  Synthetic
cuucuuguugguucuucuggacu

SEQ ID NO: 47015 - RNA, 24 nt, Artificial Sequence
  Synthetic
ucuucuuguugguucuucuggacu

SEQ ID NO: 47016 - RNA, 18 nt, Artificial Sequence
  Synthetic
guuaguauuccuuggacu

SEQ ID NO: 47017 - RNA, 19 nt, Artificial Sequence
  Synthetic
uguuaguauuccuuggacu

SEQ ID NO: 47018 - RNA, 20 nt, Artificial Sequence
  Synthetic
auguuaguauuccuuggacu

SEQ ID NO: 47019 - RNA, 21 nt, Artificial Sequence
  Synthetic
aauguuaguauuccuuggacu

SEQ ID NO: 47020 - RNA, 22 nt, Artificial Sequence
  Synthetic
caauguuaguauuccuuggacu

SEQ ID NO: 47021 - RNA, 23 nt, Artificial Sequence
  Synthetic
ccaauguuaguauuccuuggacu

SEQ ID NO: 47022 - RNA, 24 nt, Artificial Sequence
  Synthetic
cccaauguuaguauuccuuggacu

SEQ ID NO: 47023 - RNA, 18 nt, Artificial Sequence
  Synthetic
  misc_feature (6)..(6): n is a, c, g, or u
ccgggnuggagaaauacu

SEQ ID NO: 47024 - RNA, 19 nt, Artificial Sequence
  Synthetic
  misc_feature (7)..(7): n is a, c, g, or u
accgggnuggagaaauacu

SEQ ID NO: 47025 - RNA, 20 nt, Artificial Sequence
  Synthetic
  misc_feature (8)..(8): n is a, c, g, or u
aaccgggnuggagaaauacu

SEQ ID NO: 47026 - RNA, 21 nt, Artificial Sequence
  Synthetic
  misc_feature (9)..(9): n is a, c, g, or u
caaccgggnuggagaaauacu

SEQ ID NO: 47027 - RNA, 22 nt, Artificial Sequence
  Synthetic
  misc_feature (10)..(10): n is a, c, g, or u
acaaccgggnuggagaaauacu

SEQ ID NO: 47028 - RNA, 23 nt, Artificial Sequence
  Synthetic
  misc_feature (11)..(11): n is a, c, g, or u
aacaaccgggnuggagaaauacu

SEQ ID NO: 47029 - RNA, 24 nt, Artificial Sequence
  Synthetic
  misc_feature (12)..(12): n is a, c, g, or u
caacaaccgggnuggagaaauacu

SEQ ID NO: 47030 - RNA, 18 nt, Artificial Sequence
  Synthetic
ccucugccgauccauacu

SEQ ID NO: 47031 - RNA, 19 nt, Artificial Sequence
  Synthetic
uccucugccgauccauacu

SEQ ID NO: 47032 - RNA, 20 nt, Artificial Sequence
  Synthetic
cuccucugccgauccauacu

SEQ ID NO: 47033 - RNA, 21 nt, Artificial Sequence
  Synthetic
gcuccucugccgauccauacu

SEQ ID NO: 47034 - RNA, 22 nt, Artificial Sequence
  Synthetic
ggcuccucugccgauccauacu

SEQ ID NO: 47035 - RNA, 23 nt, Artificial Sequence
  Synthetic
uggcuccucugccgauccauacu

SEQ ID NO: 47036 - RNA, 24 nt, Artificial Sequence
  Synthetic
guggcuccucugccgauccauacu

SEQ ID NO: 47037 - RNA, 18 nt, Artificial Sequence
  Synthetic
ugugggucaccauauacu

SEQ ID NO: 47038 - RNA, 19 nt, Artificial Sequence
  Synthetic
uugugggucaccauauacu

SEQ ID NO: 47039 - RNA, 20 nt, Artificial Sequence
  Synthetic
uuugugggucaccauauacu

SEQ ID NO: 47040 - RNA, 21 nt, Artificial Sequence
  Synthetic
uuuugugggucaccauauacu

SEQ ID NO: 47041 - RNA, 22 nt, Artificial Sequence
  Synthetic
auuuugugggucaccauauacu

SEQ ID NO: 47042 - RNA, 23 nt, Artificial Sequence
  Synthetic
cauuuugugggucaccauauacu

SEQ ID NO: 47043 - RNA, 24 nt, Artificial Sequence
  Synthetic
ucauuuugugggucaccauauacu

SEQ ID NO: 47044 - RNA, 18 nt, Artificial Sequence
  Synthetic
aaagaauuuggagcuacu

SEQ ID NO: 47045 - RNA, 19 nt, Artificial Sequence
  Synthetic
uaaagaauuuggagcuacu

SEQ ID NO: 47046 - RNA, 20 nt, Artificial Sequence
  Synthetic
auaaagaauuuggagcuacu

SEQ ID NO: 47047 - RNA, 21 nt, Artificial Sequence
  Synthetic
uauaaagaauuuggagcuacu

SEQ ID NO: 47048 - RNA, 22 nt, Artificial Sequence
  Synthetic
uuauaaagaauuuggagcuacu

SEQ ID NO: 47049 - RNA, 23 nt, Artificial Sequence
  Synthetic
cuuauaaagaauuuggagcuacu

SEQ ID NO: 47050 - RNA, 24 nt, Artificial Sequence
  Synthetic
ccuuauaaagaauuuggagcuacu

SEQ ID NO: 47051 - RNA, 18 nt, Artificial Sequence
  Synthetic
auguaguuaaucauuacu

SEQ ID NO: 47052 - RNA, 19 nt, Artificial Sequence
  Synthetic
aauguaguuaaucauuacu

SEQ ID NO: 47053 - RNA, 20 nt, Artificial Sequence
  Synthetic
aaauguaguuaaucauuacu

SEQ ID NO: 47054 - RNA, 21 nt, Artificial Sequence
  Synthetic
aaaauguaguuaaucauuacu

SEQ ID NO: 47055 - RNA, 22 nt, Artificial Sequence
  Synthetic
gaaaauguaguuaaucauuacu

SEQ ID NO: 47056 - RNA, 23 nt, Artificial Sequence
  Synthetic
agaaaauguaguuaaucauuacu

SEQ ID NO: 47057 - RNA, 24 nt, Artificial Sequence
  Synthetic
cagaaaauguaguuaaucauuacu

SEQ ID NO: 47058 - RNA, 18 nt, Artificial Sequence
  Synthetic
cacauuuccugucuuacu

SEQ ID NO: 47059 - RNA, 19 nt, Artificial Sequence
  Synthetic
ucacauuuccugucuuacu

SEQ ID NO: 47060 - RNA, 20 nt, Artificial Sequence
  Synthetic
uucacauuuccugucuuacu

SEQ ID NO: 47061 - RNA, 21 nt, Artificial Sequence
  Synthetic
uuucacauuuccugucuuacu

SEQ ID NO: 47062 - RNA, 22 nt, Artificial Sequence
  Synthetic
guuucacauuuccugucuuacu

SEQ ID NO: 47063 - RNA, 23 nt, Artificial Sequence
  Synthetic
gguuucacauuuccugucuuacu

SEQ ID NO: 47064 - RNA, 24 nt, Artificial Sequence
  Synthetic
ugguuucacauuuccugucuuacu

SEQ ID NO: 47065 - RNA, 18 nt, Artificial Sequence
  Synthetic
uguugcuguacaaaaccu

SEQ ID NO: 47066 - RNA, 19 nt, Artificial Sequence
  Synthetic
auguugcuguacaaaaccu

SEQ ID NO: 47067 - RNA, 20 nt, Artificial Sequence
  Synthetic
cauguugcuguacaaaaccu

SEQ ID NO: 47068 - RNA, 21 nt, Artificial Sequence
  Synthetic
ucauguugcuguacaaaaccu

SEQ ID NO: 47069 - RNA, 22 nt, Artificial Sequence
  Synthetic
cucauguugcuguacaaaaccu

SEQ ID NO: 47070 - RNA, 23 nt, Artificial Sequence
  Synthetic
ccucauguugcuguacaaaaccu

SEQ ID NO: 47071 - RNA, 24 nt, Artificial Sequence
  Synthetic
cccucauguugcuguacaaaaccu

SEQ ID NO: 47072 - RNA, 18 nt, Artificial Sequence
  Synthetic
ggcuuucgcaaaauaccu

SEQ ID NO: 47073 - RNA, 19 nt, Artificial Sequence
  Synthetic
gggcuuucgcaaaauaccu

SEQ ID NO: 47074 - RNA, 20 nt, Artificial Sequence
  Synthetic
ugggcuuucgcaaaauaccu

SEQ ID NO: 47075 - RNA, 21 nt, Artificial Sequence
  Synthetic
uugggcuuucgcaaaauaccu

SEQ ID NO: 47076 - RNA, 22 nt, Artificial Sequence
  Synthetic
cuugggcuuucgcaaaauaccu

SEQ ID NO: 47077 - RNA, 23 nt, Artificial Sequence
  Synthetic
ucuugggcuuucgcaaaauaccu

SEQ ID NO: 47078 - RNA, 24 nt, Artificial Sequence
  Synthetic
aucuugggcuuucgcaaaauaccu

SEQ ID NO: 47079 - RNA, 18 nt, Artificial Sequence
  Synthetic
ccaccaguacgggacccu

SEQ ID NO: 47080 - RNA, 19 nt, Artificial Sequence
  Synthetic
accaccaguacgggacccu

SEQ ID NO: 47081 - RNA, 20 nt, Artificial Sequence
  Synthetic
gaccaccaguacgggacccu

SEQ ID NO: 47082 - RNA, 21 nt, Artificial Sequence
  Synthetic
cgaccaccaguacgggacccu

SEQ ID NO: 47083 - RNA, 22 nt, Artificial Sequence
  Synthetic
ucgaccaccaguacgggacccu

SEQ ID NO: 47084 - RNA, 23 nt, Artificial Sequence
  Synthetic
cucgaccaccaguacgggacccu

SEQ ID NO: 47085 - RNA, 24 nt, Artificial Sequence
  Synthetic
ccucgaccaccaguacgggacccu

SEQ ID NO: 47086 - RNA, 18 nt, Artificial Sequence
  Synthetic
ggcuuagacauugacccu

SEQ ID NO: 47087 - RNA, 19 nt, Artificial Sequence
  Synthetic
uggcuuagacauugacccu

SEQ ID NO: 47088 - RNA, 20 nt, Artificial Sequence
  Synthetic
uuggcuuagacauugacccu

SEQ ID NO: 47089 - RNA, 21 nt, Artificial Sequence
  Synthetic
uuuggcuuagacauugacccu

SEQ ID NO: 47090 - RNA, 22 nt, Artificial Sequence
  Synthetic
uuuuggcuuagacauugacccu

SEQ ID NO: 47091 - RNA, 23 nt, Artificial Sequence
  Synthetic
uuuuuggcuuagacauugacccu

SEQ ID NO: 47092 - RNA, 24 nt, Artificial Sequence
  Synthetic
cuuuuuggcuuagacauugacccu

SEQ ID NO: 47093 - RNA, 18 nt, Artificial Sequence
  Synthetic
acauuauuuacauacccu

SEQ ID NO: 47094 - RNA, 19 nt, Artificial Sequence
  Synthetic
gacauuauuuacauacccu

SEQ ID NO: 47095 - RNA, 20 nt, Artificial Sequence
  Synthetic
agacauuauuuacauacccu

SEQ ID NO: 47096 - RNA, 21 nt, Artificial Sequence
  Synthetic
cagacauuauuuacauacccu

SEQ ID NO: 47097 - RNA, 22 nt, Artificial Sequence
  Synthetic
ccagacauuauuuacauacccu

SEQ ID NO: 47098 - RNA, 23 nt, Artificial Sequence
  Synthetic
accagacauuauuuacauacccu

SEQ ID NO: 47099 - RNA, 24 nt, Artificial Sequence
  Synthetic
gaccagacauuauuuacauacccu

SEQ ID NO: 47100 - RNA, 18 nt, Artificial Sequence
  Synthetic
auccagcggacgaccccu

SEQ ID NO: 47101 - RNA, 19 nt, Artificial Sequence
  Synthetic
aauccagcggacgaccccu

SEQ ID NO: 47102 - RNA, 20 nt, Artificial Sequence
  Synthetic
gaauccagcggacgaccccu

SEQ ID NO: 47103 - RNA, 18 nt, Artificial Sequence
  Synthetic
cgaagaggcagguccccu

SEQ ID NO: 47104 - RNA, 19 nt, Artificial Sequence
  Synthetic
acgaagaggcagguccccu

SEQ ID NO: 47105 - RNA, 20 nt, Artificial Sequence
  Synthetic
gacgaagaggcagguccccu

SEQ ID NO: 47106 - RNA, 21 nt, Artificial Sequence
  Synthetic
agacgaagaggcagguccccu

SEQ ID NO: 47107 - RNA, 22 nt, Artificial Sequence
  Synthetic
uagacgaagaggcagguccccu

SEQ ID NO: 47108 - RNA, 23 nt, Artificial Sequence
  Synthetic
uuagacgaagaggcagguccccu

SEQ ID NO: 47109 - RNA, 24 nt, Artificial Sequence
  Synthetic
guuagacgaagaggcagguccccu

SEQ ID NO: 47110 - RNA, 18 nt, Artificial Sequence
  Synthetic
uguuuucggaaacucccu

SEQ ID NO: 47111 - RNA, 19 nt, Artificial Sequence
  Synthetic
auguuuucggaaacucccu

SEQ ID NO: 47112 - RNA, 20 nt, Artificial Sequence
  Synthetic
aauguuuucggaaacucccu

SEQ ID NO: 47113 - RNA, 21 nt, Artificial Sequence
  Synthetic
caauguuuucggaaacucccu

SEQ ID NO: 47114 - RNA, 22 nt, Artificial Sequence
  Synthetic
gcaauguuuucggaaacucccu

SEQ ID NO: 47115 - RNA, 23 nt, Artificial Sequence
  Synthetic
agcaauguuuucggaaacucccu

SEQ ID NO: 47116 - RNA, 24 nt, Artificial Sequence
  Synthetic
aagcaauguuuucggaaacucccu

SEQ ID NO: 47117 - RNA, 18 nt, Artificial Sequence
  Synthetic
cuuucuuggacggucccu

SEQ ID NO: 47118 - RNA, 19 nt, Artificial Sequence
  Synthetic
gcuuucuuggacggucccu

SEQ ID NO: 47119 - RNA, 20 nt, Artificial Sequence
  Synthetic
ggcuuucuuggacggucccu

SEQ ID NO: 47120 - RNA, 21 nt, Artificial Sequence
  Synthetic
gggcuuucuuggacggucccu

SEQ ID NO: 47121 - RNA, 22 nt, Artificial Sequence
  Synthetic
ggggcuuucuuggacggucccu

SEQ ID NO: 47122 - RNA, 23 nt, Artificial Sequence
  Synthetic
uggggcuuucuuggacggucccu

SEQ ID NO: 47123 - RNA, 24 nt, Artificial Sequence
  Synthetic
auggggcuuucuuggacggucccu

SEQ ID NO: 47124 - RNA, 18 nt, Artificial Sequence
  Synthetic
  misc_feature (5)..(5): n is a, c, g, or u
guccnacuguucaagccu

SEQ ID NO: 47125 - RNA, 19 nt, Artificial Sequence
  Synthetic
  misc_feature (6)..(6): n is a, c, g, or u
uguccnacuguucaagccu

SEQ ID NO: 47126 - RNA, 20 nt, Artificial Sequence
  Synthetic
  misc_feature (7)..(7): n is a, c, g, or u
auguccnacuguucaagccu

SEQ ID NO: 47127 - RNA, 21 nt, Artificial Sequence
  Synthetic
  misc_feature (8)..(8): n is a, c, g, or u
cauguccnacuguucaagccu

SEQ ID NO: 47128 - RNA, 22 nt, Artificial Sequence
  Synthetic
  misc_feature (9)..(9): n is a, c, g, or u
ucauguccnacuguucaagccu

SEQ ID NO: 47129 - RNA, 23 nt, Artificial Sequence
  Synthetic
  misc_feature (10)..(10): n is a, c, g, or u
uucauguccnacuguucaagccu

SEQ ID NO: 47130 - RNA, 24 nt, Artificial Sequence
  Synthetic
  misc_feature (11)..(11): n is a, c, g, or u
guucauguccnacuguucaagccu

SEQ ID NO: 47131 - RNA, 18 nt, Artificial Sequence
  Synthetic
agguaggaguuggagccu

SEQ ID NO: 47132 - RNA, 19 nt, Artificial Sequence
  Synthetic
aagguaggaguuggagccu

SEQ ID NO: 47133 - RNA, 20 nt, Artificial Sequence
  Synthetic
caagguaggaguuggagccu

SEQ ID NO: 47134 - RNA, 21 nt, Artificial Sequence
  Synthetic
acaagguaggaguuggagccu

SEQ ID NO: 47135 - RNA, 22 nt, Artificial Sequence
  Synthetic
aacaagguaggaguuggagccu

SEQ ID NO: 47136 - RNA, 23 nt, Artificial Sequence
  Synthetic
caacaagguaggaguuggagccu

SEQ ID NO: 47137 - RNA, 24 nt, Artificial Sequence
  Synthetic
ccaacaagguaggaguuggagccu

SEQ ID NO: 47138 - RNA, 18 nt, Artificial Sequence
  Synthetic
agaagaacucccucgccu

SEQ ID NO: 47139 - RNA, 19 nt, Artificial Sequence
  Synthetic
aagaagaacucccucgccu

SEQ ID NO: 47140 - RNA, 20 nt, Artificial Sequence
  Synthetic
gaagaagaacucccucgccu

SEQ ID NO: 47141 - RNA, 18 nt, Artificial Sequence
  Synthetic
cccuccacacggaggccu

SEQ ID NO: 47142 - RNA, 19 nt, Artificial Sequence
  Synthetic
ccccuccacacggaggccu

SEQ ID NO: 47143 - RNA, 20 nt, Artificial Sequence
  Synthetic
accccuccacacggaggccu

SEQ ID NO: 47144 - RNA, 21 nt, Artificial Sequence
  Synthetic
caccccuccacacggaggccu

SEQ ID NO: 47145 - RNA, 22 nt, Artificial Sequence
  Synthetic
ucaccccuccacacggaggccu

SEQ ID NO: 47146 - RNA, 23 nt, Artificial Sequence
  Synthetic
uucaccccuccacacggaggccu

SEQ ID NO: 47147 - RNA, 24 nt, Artificial Sequence
  Synthetic
guucaccccuccacacggaggccu

SEQ ID NO: 47148 - RNA, 18 nt, Artificial Sequence
  Synthetic
uuaaaacuaguuaugccu

SEQ ID NO: 47149 - RNA, 19 nt, Artificial Sequence
  Synthetic
auuaaaacuaguuaugccu

SEQ ID NO: 47150 - RNA, 20 nt, Artificial Sequence
  Synthetic
gauuaaaacuaguuaugccu

SEQ ID NO: 47151 - RNA, 21 nt, Artificial Sequence
  Synthetic
agauuaaaacuaguuaugccu

SEQ ID NO: 47152 - RNA, 22 nt, Artificial Sequence
  Synthetic
aagauuaaaacuaguuaugccu

SEQ ID NO: 47153 - RNA, 23 nt, Artificial Sequence
  Synthetic
gaagauuaaaacuaguuaugccu

SEQ ID NO: 47154 - RNA, 24 nt, Artificial Sequence
  Synthetic
cgaagauuaaaacuaguuaugccu

SEQ ID NO: 47155 - RNA, 18 nt, Artificial Sequence
  Synthetic
uugcucucguuuuugccu

SEQ ID NO: 47156 - RNA, 19 nt, Artificial Sequence
  Synthetic
guugcucucguuuuugccu

SEQ ID NO: 47157 - RNA, 20 nt, Artificial Sequence
  Synthetic
aguugcucucguuuuugccu

SEQ ID NO: 47158 - RNA, 21 nt, Artificial Sequence
  Synthetic
gaguugcucucguuuuugccu

SEQ ID NO: 47159 - RNA, 22 nt, Artificial Sequence
  Synthetic
ggaguugcucucguuuuugccu

SEQ ID NO: 47160 - RNA, 23 nt, Artificial Sequence
  Synthetic
uggaguugcucucguuuuugccu

SEQ ID NO: 47161 - RNA, 24 nt, Artificial Sequence
  Synthetic
guggaguugcucucguuuuugccu

SEQ ID NO: 47162 - RNA, 18 nt, Artificial Sequence
  Synthetic
cuuuccaccagcaauccu

SEQ ID NO: 47163 - RNA, 19 nt, Artificial Sequence
  Synthetic
ccuuuccaccagcaauccu

SEQ ID NO: 47164 - RNA, 20 nt, Artificial Sequence
  Synthetic
accuuuccaccagcaauccu

SEQ ID NO: 47165 - RNA, 21 nt, Artificial Sequence
  Synthetic
aaccuuuccaccagcaauccu

SEQ ID NO: 47166 - RNA, 22 nt, Artificial Sequence
  Synthetic
gaaccuuuccaccagcaauccu

SEQ ID NO: 47167 - RNA, 23 nt, Artificial Sequence
  Synthetic
agaaccuuuccaccagcaauccu

SEQ ID NO: 47168 - RNA, 24 nt, Artificial Sequence
  Synthetic
aagaaccuuuccaccagcaauccu

SEQ ID NO: 47169 - RNA, 18 nt, Artificial Sequence
  Synthetic
accaaaugccccuauccu

SEQ ID NO: 47170 - RNA, 19 nt, Artificial Sequence
  Synthetic
caccaaaugccccuauccu

SEQ ID NO: 47171 - RNA, 20 nt, Artificial Sequence
  Synthetic
ccaccaaaugccccuauccu

SEQ ID NO: 47172 - RNA, 21 nt, Artificial Sequence
  Synthetic
accaccaaaugccccuauccu

SEQ ID NO: 47173 - RNA, 22 nt, Artificial Sequence
  Synthetic
gaccaccaaaugccccuauccu

SEQ ID NO: 47174 - RNA, 23 nt, Artificial Sequence
  Synthetic
agaccaccaaaugccccuauccu

SEQ ID NO: 47175 - RNA, 24 nt, Artificial Sequence
  Synthetic
uagaccaccaaaugccccuauccu

SEQ ID NO: 47176 - RNA, 18 nt, Artificial Sequence
  Synthetic
ucuccgucugccguuccu

SEQ ID NO: 47177 - RNA, 19 nt, Artificial Sequence
  Synthetic
uucuccgucugccguuccu

SEQ ID NO: 47178 - RNA, 20 nt, Artificial Sequence
  Synthetic
cuucuccgucugccguuccu

SEQ ID NO: 47179 - RNA, 21 nt, Artificial Sequence
  Synthetic
ccuucuccgucugccguuccu

SEQ ID NO: 47180 - RNA, 22 nt, Artificial Sequence
  Synthetic
cccuucuccgucugccguuccu

SEQ ID NO: 47181 - RNA, 23 nt, Artificial Sequence
  Synthetic
ccccuucuccgucugccguuccu

SEQ ID NO: 47182 - RNA, 24 nt, Artificial Sequence
  Synthetic
cccccuucuccgucugccguuccu

SEQ ID NO: 47183 - RNA, 18 nt, Artificial Sequence
  Synthetic
ccuuuguauuaggaggcu

SEQ ID NO: 47184 - RNA, 19 nt, Artificial Sequence
  Synthetic
accuuuguauuaggaggcu

SEQ ID NO: 47185 - RNA, 20 nt, Artificial Sequence
  Synthetic
gaccuuuguauuaggaggcu

SEQ ID NO: 47186 - RNA, 21 nt, Artificial Sequence
  Synthetic
ugaccuuuguauuaggaggcu

SEQ ID NO: 47187 - RNA, 22 nt, Artificial Sequence
  Synthetic
augaccuuuguauuaggaggcu

SEQ ID NO: 47188 - RNA, 23 nt, Artificial Sequence
  Synthetic
aaugaccuuuguauuaggaggcu

SEQ ID NO: 47189 - RNA, 24 nt, Artificial Sequence
  Synthetic
uaaugaccuuuguauuaggaggcu

SEQ ID NO: 47190 - RNA, 18 nt, Artificial Sequence
  Synthetic
uacauccuuuccauggcu

SEQ ID NO: 47191 - RNA, 19 nt, Artificial Sequence
  Synthetic
auacauccuuuccauggcu

SEQ ID NO: 47192 - RNA, 20 nt, Artificial Sequence
  Synthetic
uauacauccuuuccauggcu

SEQ ID NO: 47193 - RNA, 21 nt, Artificial Sequence
  Synthetic
auauacauccuuuccauggcu

SEQ ID NO: 47194 - RNA, 22 nt, Artificial Sequence
  Synthetic
aauauacauccuuuccauggcu

SEQ ID NO: 47195 - RNA, 23 nt, Artificial Sequence
  Synthetic
aaauauacauccuuuccauggcu

SEQ ID NO: 47196 - RNA, 24 nt, Artificial Sequence
  Synthetic
gaaauauacauccuuuccauggcu

SEQ ID NO: 47197 - RNA, 18 nt, Artificial Sequence
  Synthetic
uucccccacugucuggcu

SEQ ID NO: 47198 - RNA, 19 nt, Artificial Sequence
  Synthetic
uuucccccacugucuggcu

SEQ ID NO: 47199 - RNA, 20 nt, Artificial Sequence
  Synthetic
cuuucccccacugucuggcu

SEQ ID NO: 47200 - RNA, 21 nt, Artificial Sequence
  Synthetic
gcuuucccccacugucuggcu

SEQ ID NO: 47201 - RNA, 22 nt, Artificial Sequence
  Synthetic
ggcuuucccccacugucuggcu

SEQ ID NO: 47202 - RNA, 23 nt, Artificial Sequence
  Synthetic
gggcuuucccccacugucuggcu

SEQ ID NO: 47203 - RNA, 24 nt, Artificial Sequence
  Synthetic
agggcuuucccccacugucuggcu

SEQ ID NO: 47204 - RNA, 18 nt, Artificial Sequence
  Synthetic
gcugugccuuggguggcu

SEQ ID NO: 47205 - RNA, 19 nt, Artificial Sequence
  Synthetic
agcugugccuuggguggcu

SEQ ID NO: 47206 - RNA, 20 nt, Artificial Sequence
  Synthetic
aagcugugccuuggguggcu

SEQ ID NO: 47207 - RNA, 21 nt, Artificial Sequence
  Synthetic
caagcugugccuuggguggcu

SEQ ID NO: 47208 - RNA, 22 nt, Artificial Sequence
  Synthetic
ccaagcugugccuuggguggcu

SEQ ID NO: 47209 - RNA, 23 nt, Artificial Sequence
  Synthetic
uccaagcugugccuuggguggcu

SEQ ID NO: 47210 - RNA, 24 nt, Artificial Sequence
  Synthetic
cuccaagcugugccuuggguggcu

SEQ ID NO: 47211 - RNA, 18 nt, Artificial Sequence
  Synthetic
accugcacgacuccugcu

SEQ ID NO: 47212 - RNA, 19 nt, Artificial Sequence
  Synthetic
aaccugcacgacuccugcu

SEQ ID NO: 47213 - RNA, 20 nt, Artificial Sequence
  Synthetic
aaaccugcacgacuccugcu

SEQ ID NO: 47214 - RNA, 21 nt, Artificial Sequence
  Synthetic
aaaaccugcacgacuccugcu

SEQ ID NO: 47215 - RNA, 22 nt, Artificial Sequence
  Synthetic
caaaaccugcacgacuccugcu

SEQ ID NO: 47216 - RNA, 23 nt, Artificial Sequence
  Synthetic
gcaaaaccugcacgacuccugcu

SEQ ID NO: 47217 - RNA, 24 nt, Artificial Sequence
  Synthetic
ugcaaaaccugcacgacuccugcu

SEQ ID NO: 47218 - RNA, 18 nt, Artificial Sequence
  Synthetic
auucgcacuccuccugcu

SEQ ID NO: 47219 - RNA, 19 nt, Artificial Sequence
  Synthetic
gauucgcacuccuccugcu

SEQ ID NO: 47220 - RNA, 20 nt, Artificial Sequence
  Synthetic
ggauucgcacuccuccugcu

SEQ ID NO: 47221 - RNA, 21 nt, Artificial Sequence
  Synthetic
uggauucgcacuccuccugcu

SEQ ID NO: 47222 - RNA, 22 nt, Artificial Sequence
  Synthetic
guggauucgcacuccuccugcu

SEQ ID NO: 47223 - RNA, 23 nt, Artificial Sequence
  Synthetic
uguggauucgcacuccuccugcu

SEQ ID NO: 47224 - RNA, 24 nt, Artificial Sequence
  Synthetic
guguggauucgcacuccuccugcu

SEQ ID NO: 47225 - RNA, 18 nt, Artificial Sequence
  Synthetic
  misc_feature (10)..(10): n is a, c, g, or u
ggccuguaunuuccugcu

SEQ ID NO: 47226 - RNA, 19 nt, Artificial Sequence
  Synthetic
  misc_feature (11)..(11): n is a, c, g, or u
gggccuguaunuuccugcu

SEQ ID NO: 47227 - RNA, 20 nt, Artificial Sequence
  Synthetic
  misc_feature (12)..(12): n is a, c, g, or u
ggggccuguaunuuccugcu

SEQ ID NO: 47228 - RNA, 21 nt, Artificial Sequence
  Synthetic
  misc_feature (13)..(13): n is a, c, g, or u
aggggccuguaunuuccugcu

SEQ ID NO: 47229 - RNA, 22 nt, Artificial Sequence
  Synthetic
  misc_feature (14)..(14): n is a, c, g, or u
caggggccuguaunuuccugcu

SEQ ID NO: 47230 - RNA, 23 nt, Artificial Sequence
  Synthetic
  misc_feature (15)..(15): n is a, c, g, or u
ucaggggccuguaunuuccugcu

SEQ ID NO: 47231 - RNA, 24 nt, Artificial Sequence
  Synthetic
  misc_feature (16)..(16): n is a, c, g, or u
gucaggggccuguaunuuccugcu

SEQ ID NO: 47232 - RNA, 18 nt, Artificial Sequence
  Synthetic
uggcugcuaggcugugcu

SEQ ID NO: 47233 - RNA, 19 nt, Artificial Sequence
  Synthetic
auggcugcuaggcugugcu

SEQ ID NO: 47234 - RNA, 20 nt, Artificial Sequence
  Synthetic
cauggcugcuaggcugugcu

SEQ ID NO: 47235 - RNA, 21 nt, Artificial Sequence
  Synthetic
ccauggcugcuaggcugugcu

SEQ ID NO: 47236 - RNA, 22 nt, Artificial Sequence
  Synthetic
uccauggcugcuaggcugugcu

SEQ ID NO: 47237 - RNA, 23 nt, Artificial Sequence
  Synthetic
uuccauggcugcuaggcugugcu

SEQ ID NO: 47238 - RNA, 24 nt, Artificial Sequence
  Synthetic
uuuccauggcugcuaggcugugcu

SEQ ID NO: 47239 - RNA, 18 nt, Artificial Sequence
  Synthetic
cuagcugcuuguuuugcu

SEQ ID NO: 47240 - RNA, 19 nt, Artificial Sequence
  Synthetic
ccuagcugcuuguuuugcu

SEQ ID NO: 47241 - RNA, 20 nt, Artificial Sequence
  Synthetic
uccuagcugcuuguuuugcu

SEQ ID NO: 47242 - RNA, 21 nt, Artificial Sequence
  Synthetic
cuccuagcugcuuguuuugcu

SEQ ID NO: 47243 - RNA, 22 nt, Artificial Sequence
  Synthetic
acuccuagcugcuuguuuugcu

SEQ ID NO: 47244 - RNA, 23 nt, Artificial Sequence
  Synthetic
aacuccuagcugcuuguuuugcu

SEQ ID NO: 47245 - RNA, 24 nt, Artificial Sequence
  Synthetic
gaacuccuagcugcuuguuuugcu

SEQ ID NO: 47246 - RNA, 18 nt, Artificial Sequence
  Synthetic
gaacaccucucaucaucu

SEQ ID NO: 47247 - RNA, 19 nt, Artificial Sequence
  Synthetic
ugaacaccucucaucaucu

SEQ ID NO: 47248 - RNA, 20 nt, Artificial Sequence
  Synthetic
augaacaccucucaucaucu

SEQ ID NO: 47249 - RNA, 21 nt, Artificial Sequence
  Synthetic
caugaacaccucucaucaucu

SEQ ID NO: 47250 - RNA, 22 nt, Artificial Sequence
  Synthetic
ccaugaacaccucucaucaucu

SEQ ID NO: 47251 - RNA, 23 nt, Artificial Sequence
  Synthetic
gccaugaacaccucucaucaucu

SEQ ID NO: 47252 - RNA, 24 nt, Artificial Sequence
  Synthetic
cgccaugaacaccucucaucaucu

SEQ ID NO: 47253 - RNA, 18 nt, Artificial Sequence
  Synthetic
gucuguuccuucucaucu

SEQ ID NO: 47254 - RNA, 19 nt, Artificial Sequence
  Synthetic
cgucuguuccuucucaucu

SEQ ID NO: 47255 - RNA, 20 nt, Artificial Sequence
  Synthetic
ccgucuguuccuucucaucu

SEQ ID NO: 47256 - RNA, 21 nt, Artificial Sequence
  Synthetic
cccgucuguuccuucucaucu

SEQ ID NO: 47257 - RNA, 22 nt, Artificial Sequence
  Synthetic
ccccgucuguuccuucucaucu

SEQ ID NO: 47258 - RNA, 23 nt, Artificial Sequence
  Synthetic
uccccgucuguuccuucucaucu

SEQ ID NO: 47259 - RNA, 24 nt, Artificial Sequence
  Synthetic
cuccccgucuguuccuucucaucu

SEQ ID NO: 47260 - RNA, 18 nt, Artificial Sequence
  Synthetic
agauuuuucccaaacucu

SEQ ID NO: 47261 - RNA, 19 nt, Artificial Sequence
  Synthetic
cagauuuuucccaaacucu

SEQ ID NO: 47262 - RNA, 20 nt, Artificial Sequence
  Synthetic
ccagauuuuucccaaacucu

SEQ ID NO: 47263 - RNA, 21 nt, Artificial Sequence
  Synthetic
gccagauuuuucccaaacucu

SEQ ID NO: 47264 - RNA, 22 nt, Artificial Sequence
  Synthetic
ugccagauuuuucccaaacucu

SEQ ID NO: 47265 - RNA, 23 nt, Artificial Sequence
  Synthetic
cugccagauuuuucccaaacucu

SEQ ID NO: 47266 - RNA, 24 nt, Artificial Sequence
  Synthetic
ccugccagauuuuucccaaacucu

SEQ ID NO: 47267 - RNA, 18 nt, Artificial Sequence
  Synthetic
agcauuccaccaagcucu

SEQ ID NO: 47268 - RNA, 19 nt, Artificial Sequence
  Synthetic
cagcauuccaccaagcucu

SEQ ID NO: 47269 - RNA, 20 nt, Artificial Sequence
  Synthetic
acagcauuccaccaagcucu

SEQ ID NO: 47270 - RNA, 21 nt, Artificial Sequence
  Synthetic
uacagcauuccaccaagcucu

SEQ ID NO: 47271 - RNA, 22 nt, Artificial Sequence
  Synthetic
cuacagcauuccaccaagcucu

SEQ ID NO: 47272 - RNA, 23 nt, Artificial Sequence
  Synthetic
ucuacagcauuccaccaagcucu

SEQ ID NO: 47273 - RNA, 24 nt, Artificial Sequence
  Synthetic
cucuacagcauuccaccaagcucu

SEQ ID NO: 47274 - RNA, 18 nt, Artificial Sequence
  Synthetic
cuuauaaggccuuucucu

SEQ ID NO: 47275 - RNA, 19 nt, Artificial Sequence
  Synthetic
acuuauaaggccuuucucu

SEQ ID NO: 47276 - RNA, 20 nt, Artificial Sequence
  Synthetic
aacuuauaaggccuuucucu

SEQ ID NO: 47277 - RNA, 18 nt, Artificial Sequence
  Synthetic
caauugauuggaaagucu

SEQ ID NO: 47278 - RNA, 19 nt, Artificial Sequence
  Synthetic
ccaauugauuggaaagucu

SEQ ID NO: 47279 - RNA, 20 nt, Artificial Sequence
  Synthetic
gccaauugauuggaaagucu

SEQ ID NO: 47280 - RNA, 21 nt, Artificial Sequence
  Synthetic
ggccaauugauuggaaagucu

SEQ ID NO: 47281 - RNA, 22 nt, Artificial Sequence
  Synthetic
aggccaauugauuggaaagucu

SEQ ID NO: 47282 - RNA, 23 nt, Artificial Sequence
  Synthetic
caggccaauugauuggaaagucu

SEQ ID NO: 47283 - RNA, 24 nt, Artificial Sequence
  Synthetic
acaggccaauugauuggaaagucu

SEQ ID NO: 47284 - RNA, 18 nt, Artificial Sequence
  Synthetic
ggguggagcccucagucu

SEQ ID NO: 47285 - RNA, 19 nt, Artificial Sequence
  Synthetic
gggguggagcccucagucu

SEQ ID NO: 47286 - RNA, 20 nt, Artificial Sequence
  Synthetic
ugggguggagcccucagucu

SEQ ID NO: 47287 - RNA, 21 nt, Artificial Sequence
  Synthetic
uugggguggagcccucagucu

SEQ ID NO: 47288 - RNA, 22 nt, Artificial Sequence
  Synthetic
uuugggguggagcccucagucu

SEQ ID NO: 47289 - RNA, 23 nt, Artificial Sequence
  Synthetic
uuuugggguggagcccucagucu

SEQ ID NO: 47290 - RNA, 24 nt, Artificial Sequence
  Synthetic
cuuuugggguggagcccucagucu

SEQ ID NO: 47291 - RNA, 18 nt, Artificial Sequence
  Synthetic
ucaacgaauaacuggucu

SEQ ID NO: 47292 - RNA, 19 nt, Artificial Sequence
  Synthetic
gucaacgaauaacuggucu

SEQ ID NO: 47293 - RNA, 20 nt, Artificial Sequence
  Synthetic
ugucaacgaauaacuggucu

SEQ ID NO: 47294 - RNA, 21 nt, Artificial Sequence
  Synthetic
cugucaacgaauaacuggucu

SEQ ID NO: 47295 - RNA, 22 nt, Artificial Sequence
  Synthetic
ucugucaacgaauaacuggucu

SEQ ID NO: 47296 - RNA, 23 nt, Artificial Sequence
  Synthetic
gucugucaacgaauaacuggucu

SEQ ID NO: 47297 - RNA, 24 nt, Artificial Sequence
  Synthetic
agucugucaacgaauaacuggucu

SEQ ID NO: 47298 - RNA, 18 nt, Artificial Sequence
  Synthetic
cuugaguauuuggugucu

SEQ ID NO: 47299 - RNA, 19 nt, Artificial Sequence
  Synthetic
ucuugaguauuuggugucu

SEQ ID NO: 47300 - RNA, 20 nt, Artificial Sequence
  Synthetic
uucuugaguauuuggugucu

SEQ ID NO: 47301 - RNA, 21 nt, Artificial Sequence
  Synthetic
guucuugaguauuuggugucu

SEQ ID NO: 47302 - RNA, 22 nt, Artificial Sequence
  Synthetic
cguucuugaguauuuggugucu

SEQ ID NO: 47303 - RNA, 23 nt, Artificial Sequence
  Synthetic
ccguucuugaguauuuggugucu

SEQ ID NO: 47304 - RNA, 24 nt, Artificial Sequence
  Synthetic
accguucuugaguauuuggugucu

SEQ ID NO: 47305 - RNA, 18 nt, Artificial Sequence
  Synthetic
acaucucgucaaucuucu

SEQ ID NO: 47306 - RNA, 19 nt, Artificial Sequence
  Synthetic
cacaucucgucaaucuucu

SEQ ID NO: 47307 - RNA, 20 nt, Artificial Sequence
  Synthetic
ucacaucucgucaaucuucu

SEQ ID NO: 47308 - RNA, 21 nt, Artificial Sequence
  Synthetic
cucacaucucgucaaucuucu

SEQ ID NO: 47309 - RNA, 22 nt, Artificial Sequence
  Synthetic
ucucacaucucgucaaucuucu

SEQ ID NO: 47310 - RNA, 23 nt, Artificial Sequence
  Synthetic
cucucacaucucgucaaucuucu

SEQ ID NO: 47311 - RNA, 24 nt, Artificial Sequence
  Synthetic
ccucucacaucucgucaaucuucu

SEQ ID NO: 47312 - RNA, 18 nt, Artificial Sequence
  Synthetic
caucuucuuguugguucu

SEQ ID NO: 47313 - RNA, 19 nt, Artificial Sequence
  Synthetic
ucaucuucuuguugguucu

SEQ ID NO: 47314 - RNA, 20 nt, Artificial Sequence
  Synthetic
cucaucuucuuguugguucu

SEQ ID NO: 47315 - RNA, 21 nt, Artificial Sequence
  Synthetic
ccucaucuucuuguugguucu

SEQ ID NO: 47316 - RNA, 22 nt, Artificial Sequence
  Synthetic
gccucaucuucuuguugguucu

SEQ ID NO: 47317 - RNA, 23 nt, Artificial Sequence
  Synthetic
ugccucaucuucuuguugguucu

SEQ ID NO: 47318 - RNA, 24 nt, Artificial Sequence
  Synthetic
augccucaucuucuuguugguucu

SEQ ID NO: 47319 - RNA, 18 nt, Artificial Sequence
  Synthetic
aauucugucguccuuucu

SEQ ID NO: 47320 - RNA, 19 nt, Artificial Sequence
  Synthetic
caauucugucguccuuucu

SEQ ID NO: 47321 - RNA, 20 nt, Artificial Sequence
  Synthetic
acaauucugucguccuuucu

SEQ ID NO: 47322 - RNA, 21 nt, Artificial Sequence
  Synthetic
gacaauucugucguccuuucu

SEQ ID NO: 47323 - RNA, 22 nt, Artificial Sequence
  Synthetic
ugacaauucugucguccuuucu

SEQ ID NO: 47324 - RNA, 23 nt, Artificial Sequence
  Synthetic
cugacaauucugucguccuuucu

SEQ ID NO: 47325 - RNA, 24 nt, Artificial Sequence
  Synthetic
acugacaauucugucguccuuucu

SEQ ID NO: 47326 - RNA, 18 nt, Artificial Sequence
  Synthetic
gggccucaguccguuucu

SEQ ID NO: 47327 - RNA, 19 nt, Artificial Sequence
  Synthetic
ugggccucaguccguuucu

SEQ ID NO: 47328 - RNA, 20 nt, Artificial Sequence
  Synthetic
gugggccucaguccguuucu

SEQ ID NO: 47329 - RNA, 21 nt, Artificial Sequence
  Synthetic
agugggccucaguccguuucu

SEQ ID NO: 47330 - RNA, 22 nt, Artificial Sequence
  Synthetic
gagugggccucaguccguuucu

SEQ ID NO: 47331 - RNA, 23 nt, Artificial Sequence
  Synthetic
ggagugggccucaguccguuucu

SEQ ID NO: 47332 - RNA, 24 nt, Artificial Sequence
  Synthetic
gggagugggccucaguccguuucu

SEQ ID NO: 47333 - RNA, 18 nt, Artificial Sequence
  Synthetic
gacuucucucaauuuucu

SEQ ID NO: 47334 - RNA, 19 nt, Artificial Sequence
  Synthetic
ggacuucucucaauuuucu

SEQ ID NO: 47335 - RNA, 20 nt, Artificial Sequence
  Synthetic
uggacuucucucaauuuucu

SEQ ID NO: 47336 - RNA, 21 nt, Artificial Sequence
  Synthetic
guggacuucucucaauuuucu

SEQ ID NO: 47337 - RNA, 22 nt, Artificial Sequence
  Synthetic
gguggacuucucucaauuuucu

SEQ ID NO: 47338 - RNA, 23 nt, Artificial Sequence
  Synthetic
ugguggacuucucucaauuuucu

SEQ ID NO: 47339 - RNA, 24 nt, Artificial Sequence
  Synthetic
gugguggacuucucucaauuuucu

SEQ ID NO: 47340 - RNA, 18 nt, Artificial Sequence
  Synthetic
ucuacaaaaucccaaagu

SEQ ID NO: 47341 - RNA, 19 nt, Artificial Sequence
  Synthetic
cucuacaaaaucccaaagu

SEQ ID NO: 47342 - RNA, 20 nt, Artificial Sequence
  Synthetic
gcucuacaaaaucccaaagu

SEQ ID NO: 47343 - RNA, 21 nt, Artificial Sequence
  Synthetic
agcucuacaaaaucccaaagu

SEQ ID NO: 47344 - RNA, 22 nt, Artificial Sequence
  Synthetic
aagcucuacaaaaucccaaagu

SEQ ID NO: 47345 - RNA, 23 nt, Artificial Sequence
  Synthetic
caagcucuacaaaaucccaaagu

SEQ ID NO: 47346 - RNA, 24 nt, Artificial Sequence
  Synthetic
ccaagcucuacaaaaucccaaagu

SEQ ID NO: 47347 - RNA, 18 nt, Artificial Sequence
  Synthetic
ggauccucgaccaccagu

SEQ ID NO: 47348 - RNA, 19 nt, Artificial Sequence
  Synthetic
aggauccucgaccaccagu

SEQ ID NO: 47349 - RNA, 20 nt, Artificial Sequence
  Synthetic
caggauccucgaccaccagu

SEQ ID NO: 47350 - RNA, 21 nt, Artificial Sequence
  Synthetic
ccaggauccucgaccaccagu

SEQ ID NO: 47351 - RNA, 22 nt, Artificial Sequence
  Synthetic
uccaggauccucgaccaccagu

SEQ ID NO: 47352 - RNA, 23 nt, Artificial Sequence
  Synthetic
uuccaggauccucgaccaccagu

SEQ ID NO: 47353 - RNA, 24 nt, Artificial Sequence
  Synthetic
auuccaggauccucgaccaccagu

SEQ ID NO: 47354 - RNA, 18 nt, Artificial Sequence
  Synthetic
ccugcugguggcuccagu

SEQ ID NO: 47355 - RNA, 19 nt, Artificial Sequence
  Synthetic
uccugcugguggcuccagu

SEQ ID NO: 47356 - RNA, 20 nt, Artificial Sequence
  Synthetic
uuccugcugguggcuccagu

SEQ ID NO: 47357 - RNA, 21 nt, Artificial Sequence
  Synthetic
  misc_feature (1)..(1): n is a, c, g, or u
nuuccugcugguggcuccagu

SEQ ID NO: 47358 - RNA, 22 nt, Artificial Sequence
  Synthetic
  misc_feature (2)..(2): n is a, c, g, or u
unuuccugcugguggcuccagu

SEQ ID NO: 47359 - RNA, 23 nt, Artificial Sequence
  Synthetic
  misc_feature (3)..(3): n is a, c, g, or u
aunuuccugcugguggcuccagu

SEQ ID NO: 47360 - RNA, 24 nt, Artificial Sequence
  Synthetic
  misc_feature (4)..(4): n is a, c, g, or u
uaunuuccugcugguggcuccagu

SEQ ID NO: 47361 - RNA, 18 nt, Artificial Sequence
  Synthetic
ugggguggagcccucagu

SEQ ID NO: 47362 - RNA, 19 nt, Artificial Sequence
  Synthetic
uugggguggagcccucagu

SEQ ID NO: 47363 - RNA, 20 nt, Artificial Sequence
  Synthetic
uuugggguggagcccucagu

SEQ ID NO: 47364 - RNA, 21 nt, Artificial Sequence
  Synthetic
uuuugggguggagcccucagu

SEQ ID NO: 47365 - RNA, 22 nt, Artificial Sequence
  Synthetic
cuuuugggguggagcccucagu

SEQ ID NO: 47366 - RNA, 23 nt, Artificial Sequence
  Synthetic
ccuuuugggguggagcccucagu

SEQ ID NO: 47367 - RNA, 24 nt, Artificial Sequence
  Synthetic
gccuuuugggguggagcccucagu

SEQ ID NO: 47368 - RNA, 18 nt, Artificial Sequence
  Synthetic
ccuccaccaaucgucagu

SEQ ID NO: 47369 - RNA, 19 nt, Artificial Sequence
  Synthetic
gccuccaccaaucgucagu

SEQ ID NO: 47370 - RNA, 20 nt, Artificial Sequence
  Synthetic
ugccuccaccaaucgucagu

SEQ ID NO: 47371 - RNA, 21 nt, Artificial Sequence
  Synthetic
cugccuccaccaaucgucagu

SEQ ID NO: 47372 - RNA, 22 nt, Artificial Sequence
  Synthetic
ccugccuccaccaaucgucagu

SEQ ID NO: 47373 - RNA, 23 nt, Artificial Sequence
  Synthetic
uccugccuccaccaaucgucagu

SEQ ID NO: 47374 - RNA, 24 nt, Artificial Sequence
  Synthetic
cuccugccuccaccaaucgucagu

SEQ ID NO: 47375 - RNA, 18 nt, Artificial Sequence
  Synthetic
cucacaauaccgcagagu

SEQ ID NO: 47376 - RNA, 19 nt, Artificial Sequence
  Synthetic
ccucacaauaccgcagagu

SEQ ID NO: 47377 - RNA, 20 nt, Artificial Sequence
  Synthetic
uccucacaauaccgcagagu

SEQ ID NO: 47378 - RNA, 21 nt, Artificial Sequence
  Synthetic
auccucacaauaccgcagagu

SEQ ID NO: 47379 - RNA, 22 nt, Artificial Sequence
  Synthetic
aauccucacaauaccgcagagu

SEQ ID NO: 47380 - RNA, 23 nt, Artificial Sequence
  Synthetic
gaauccucacaauaccgcagagu

SEQ ID NO: 47381 - RNA, 24 nt, Artificial Sequence
  Synthetic
agaauccucacaauaccgcagagu

SEQ ID NO: 47382 - RNA, 18 nt, Artificial Sequence
  Synthetic
ggacggucccucucgagu

SEQ ID NO: 47383 - RNA, 19 nt, Artificial Sequence
  Synthetic
uggacggucccucucgagu

SEQ ID NO: 47384 - RNA, 20 nt, Artificial Sequence
  Synthetic
uuggacggucccucucgagu

SEQ ID NO: 47385 - RNA, 21 nt, Artificial Sequence
  Synthetic
cuuggacggucccucucgagu

SEQ ID NO: 47386 - RNA, 22 nt, Artificial Sequence
  Synthetic
ucuuggacggucccucucgagu

SEQ ID NO: 47387 - RNA, 23 nt, Artificial Sequence
  Synthetic
uucuuggacggucccucucgagu

SEQ ID NO: 47388 - RNA, 24 nt, Artificial Sequence
  Synthetic
uuucuuggacggucccucucgagu

SEQ ID NO: 47389 - RNA, 18 nt, Artificial Sequence
  Synthetic
ggccaacaagguaggagu

SEQ ID NO: 47390 - RNA, 19 nt, Artificial Sequence
  Synthetic
aggccaacaagguaggagu

SEQ ID NO: 47391 - RNA, 20 nt, Artificial Sequence
  Synthetic
gaggccaacaagguaggagu

SEQ ID NO: 47392 - RNA, 21 nt, Artificial Sequence
  Synthetic
agaggccaacaagguaggagu

SEQ ID NO: 47393 - RNA, 22 nt, Artificial Sequence
  Synthetic
cagaggccaacaagguaggagu

SEQ ID NO: 47394 - RNA, 23 nt, Artificial Sequence
  Synthetic
ccagaggccaacaagguaggagu

SEQ ID NO: 47395 - RNA, 24 nt, Artificial Sequence
  Synthetic
gccagaggccaacaagguaggagu

SEQ ID NO: 47396 - RNA, 18 nt, Artificial Sequence
  Synthetic
acuguguuuuugcugagu

SEQ ID NO: 47397 - RNA, 19 nt, Artificial Sequence
  Synthetic
gacuguguuuuugcugagu

SEQ ID NO: 47398 - RNA, 20 nt, Artificial Sequence
  Synthetic
ggacuguguuuuugcugagu

SEQ ID NO: 47399 - RNA, 21 nt, Artificial Sequence
  Synthetic
aggacuguguuuuugcugagu

SEQ ID NO: 47400 - RNA, 22 nt, Artificial Sequence
  Synthetic
aaggacuguguuuuugcugagu

SEQ ID NO: 47401 - RNA, 23 nt, Artificial Sequence
  Synthetic
caaggacuguguuuuugcugagu

SEQ ID NO: 47402 - RNA, 24 nt, Artificial Sequence
  Synthetic
ucaaggacuguguuuuugcugagu

SEQ ID NO: 47403 - RNA, 18 nt, Artificial Sequence
  Synthetic
gaccccucccggggccgu

SEQ ID NO: 47404 - RNA, 19 nt, Artificial Sequence
  Synthetic
cgaccccucccggggccgu

SEQ ID NO: 47405 - RNA, 20 nt, Artificial Sequence
  Synthetic
acgaccccucccggggccgu

SEQ ID NO: 47406 - RNA, 18 nt, Artificial Sequence
  Synthetic
agaucucaaucgccgcgu

SEQ ID NO: 47407 - RNA, 19 nt, Artificial Sequence
  Synthetic
aagaucucaaucgccgcgu

SEQ ID NO: 47408 - RNA, 20 nt, Artificial Sequence
  Synthetic
gaagaucucaaucgccgcgu

SEQ ID NO: 47409 - RNA, 18 nt, Artificial Sequence
  Synthetic
cgcagagucuagacucgu

SEQ ID NO: 47410 - RNA, 19 nt, Artificial Sequence
  Synthetic
ccgcagagucuagacucgu

SEQ ID NO: 47411 - RNA, 20 nt, Artificial Sequence
  Synthetic
accgcagagucuagacucgu

SEQ ID NO: 47412 - RNA, 21 nt, Artificial Sequence
  Synthetic
uaccgcagagucuagacucgu

SEQ ID NO: 47413 - RNA, 22 nt, Artificial Sequence
  Synthetic
auaccgcagagucuagacucgu

SEQ ID NO: 47414 - RNA, 23 nt, Artificial Sequence
  Synthetic
aauaccgcagagucuagacucgu

SEQ ID NO: 47415 - RNA, 24 nt, Artificial Sequence
  Synthetic
caauaccgcagagucuagacucgu

SEQ ID NO: 47416 - RNA, 18 nt, Artificial Sequence
  Synthetic
uuaccauuagacaaaggu

SEQ ID NO: 47417 - RNA, 19 nt, Artificial Sequence
  Synthetic
uuuaccauuagacaaaggu

SEQ ID NO: 47418 - RNA, 20 nt, Artificial Sequence
  Synthetic
auuuaccauuagacaaaggu

SEQ ID NO: 47419 - RNA, 21 nt, Artificial Sequence
  Synthetic
uauuuaccauuagacaaaggu

SEQ ID NO: 47420 - RNA, 22 nt, Artificial Sequence
  Synthetic
auauuuaccauuagacaaaggu

SEQ ID NO: 47421 - RNA, 23 nt, Artificial Sequence
  Synthetic
aauauuuaccauuagacaaaggu

SEQ ID NO: 47422 - RNA, 24 nt, Artificial Sequence
  Synthetic
aaauauuuaccauuagacaaaggu

SEQ ID NO: 47423 - RNA, 18 nt, Artificial Sequence
  Synthetic
uccuuggacucacaaggu

SEQ ID NO: 47424 - RNA, 19 nt, Artificial Sequence
  Synthetic
uuccuuggacucacaaggu

SEQ ID NO: 47425 - RNA, 20 nt, Artificial Sequence
  Synthetic
auuccuuggacucacaaggu

SEQ ID NO: 47426 - RNA, 21 nt, Artificial Sequence
  Synthetic
uauuccuuggacucacaaggu

SEQ ID NO: 47427 - RNA, 22 nt, Artificial Sequence
  Synthetic
guauuccuuggacucacaaggu

SEQ ID NO: 47428 - RNA, 23 nt, Artificial Sequence
  Synthetic
aguauuccuuggacucacaaggu

SEQ ID NO: 47429 - RNA, 24 nt, Artificial Sequence
  Synthetic
uaguauuccuuggacucacaaggu

SEQ ID NO: 47430 - RNA, 18 nt, Artificial Sequence
  Synthetic
guuuugcucgcagccggu

SEQ ID NO: 47431 - RNA, 19 nt, Artificial Sequence
  Synthetic
uguuuugcucgcagccggu

SEQ ID NO: 47432 - RNA, 20 nt, Artificial Sequence
  Synthetic
uuguuuugcucgcagccggu

SEQ ID NO: 47433 - RNA, 21 nt, Artificial Sequence
  Synthetic
cuuguuuugcucgcagccggu

SEQ ID NO: 47434 - RNA, 22 nt, Artificial Sequence
  Synthetic
gcuuguuuugcucgcagccggu

SEQ ID NO: 47435 - RNA, 23 nt, Artificial Sequence
  Synthetic
ugcuuguuuugcucgcagccggu

SEQ ID NO: 47436 - RNA, 24 nt, Artificial Sequence
  Synthetic
cugcuuguuuugcucgcagccggu

SEQ ID NO: 47437 - RNA, 18 nt, Artificial Sequence
  Synthetic
guuaauacuaauaugggu

SEQ ID NO: 47438 - RNA, 19 nt, Artificial Sequence
  Synthetic
uguuaauacuaauaugggu

SEQ ID NO: 47439 - RNA, 20 nt, Artificial Sequence
  Synthetic
auguuaauacuaauaugggu

SEQ ID NO: 47440 - RNA, 21 nt, Artificial Sequence
  Synthetic
uauguuaauacuaauaugggu

SEQ ID NO: 47441 - RNA, 22 nt, Artificial Sequence
  Synthetic
uuauguuaauacuaauaugggu

SEQ ID NO: 47442 - RNA, 23 nt, Artificial Sequence
  Synthetic
auuauguuaauacuaauaugggu

SEQ ID NO: 47443 - RNA, 24 nt, Artificial Sequence
  Synthetic
aauuauguuaauacuaauaugggu

SEQ ID NO: 47444 - RNA, 18 nt, Artificial Sequence
  Synthetic
gacgcaacccccacuggu

SEQ ID NO: 47445 - RNA, 19 nt, Artificial Sequence
  Synthetic
ugacgcaacccccacuggu

SEQ ID NO: 47446 - RNA, 20 nt, Artificial Sequence
  Synthetic
cugacgcaacccccacuggu

SEQ ID NO: 47447 - RNA, 18 nt, Artificial Sequence
  Synthetic
  misc_feature (7)..(7): n is a, c, g, or u
cuauaungaugauguggu

SEQ ID NO: 47448 - RNA, 19 nt, Artificial Sequence
  Synthetic
  misc_feature (8)..(8): n is a, c, g, or u
gcuauaungaugauguggu

SEQ ID NO: 47449 - RNA, 20 nt, Artificial Sequence
  Synthetic
  misc_feature (9)..(9): n is a, c, g, or u
agcuauaungaugauguggu

SEQ ID NO: 47450 - RNA, 21 nt, Artificial Sequence
  Synthetic
  misc_feature (10)..(10): n is a, c, g, or u
cagcuauaungaugauguggu

SEQ ID NO: 47451 - RNA, 22 nt, Artificial Sequence
  Synthetic
  misc_feature (11)..(11): n is a, c, g, or u
ucagcuauaungaugauguggu

SEQ ID NO: 47452 - RNA, 23 nt, Artificial Sequence
  Synthetic
  misc_feature (12)..(12): n is a, c, g, or u
uucagcuauaungaugauguggu

SEQ ID NO: 47453 - RNA, 24 nt, Artificial Sequence
  Synthetic
  misc_feature (13)..(13): n is a, c, g, or u
uuucagcuauaungaugauguggu

SEQ ID NO: 47454 - RNA, 18 nt, Artificial Sequence
  Synthetic
  misc_feature (13)..(13): n is a, c, g, or u
uuguucauguccnacugu

SEQ ID NO: 47455 - RNA, 19 nt, Artificial Sequence
  Synthetic
  misc_feature (14)..(14): n is a, c, g, or u
cuuguucauguccnacugu

SEQ ID NO: 47456 - RNA, 20 nt, Artificial Sequence
  Synthetic
  misc_feature (15)..(15): n is a, c, g, or u
ucuuguucauguccnacugu

SEQ ID NO: 47457 - RNA, 21 nt, Artificial Sequence
  Synthetic
  misc_feature (16)..(16): n is a, c, g, or u
cucuuguucauguccnacugu

SEQ ID NO: 47458 - RNA, 22 nt, Artificial Sequence
  Synthetic
  misc_feature (17)..(17): n is a, c, g, or u
ucucuuguucauguccnacugu

SEQ ID NO: 47459 - RNA, 23 nt, Artificial Sequence
  Synthetic
  misc_feature (18)..(18): n is a, c, g, or u
aucucuuguucauguccnacugu

SEQ ID NO: 47460 - RNA, 24 nt, Artificial Sequence
  Synthetic
  misc_feature (19)..(19): n is a, c, g, or u
caucucuuguucauguccnacugu

SEQ ID NO: 47461 - RNA, 18 nt, Artificial Sequence
  Synthetic
agggauagugaacccugu

SEQ ID NO: 47462 - RNA, 19 nt, Artificial Sequence
  Synthetic
cagggauagugaacccugu

SEQ ID NO: 47463 - RNA, 20 nt, Artificial Sequence
  Synthetic
ucagggauagugaacccugu

SEQ ID NO: 47464 - RNA, 21 nt, Artificial Sequence
  Synthetic
uucagggauagugaacccugu

SEQ ID NO: 47465 - RNA, 22 nt, Artificial Sequence
  Synthetic
guucagggauagugaacccugu

SEQ ID NO: 47466 - RNA, 23 nt, Artificial Sequence
  Synthetic
aguucagggauagugaacccugu

SEQ ID NO: 47467 - RNA, 24 nt, Artificial Sequence
  Synthetic
caguucagggauagugaacccugu

SEQ ID NO: 47468 - RNA, 18 nt, Artificial Sequence
  Synthetic
uaucccucauguugcugu

SEQ ID NO: 47469 - RNA, 19 nt, Artificial Sequence
  Synthetic
guaucccucauguugcugu

SEQ ID NO: 47470 - RNA, 20 nt, Artificial Sequence
  Synthetic
uguaucccucauguugcugu

SEQ ID NO: 47471 - RNA, 21 nt, Artificial Sequence
  Synthetic
auguaucccucauguugcugu

SEQ ID NO: 47472 - RNA, 22 nt, Artificial Sequence
  Synthetic
uauguaucccucauguugcugu

SEQ ID NO: 47473 - RNA, 23 nt, Artificial Sequence
  Synthetic
cuauguaucccucauguugcugu

SEQ ID NO: 47474 - RNA, 24 nt, Artificial Sequence
  Synthetic
ucuauguaucccucauguugcugu

SEQ ID NO: 47475 - RNA, 18 nt, Artificial Sequence
  Synthetic
  misc_feature (14)..(14): n is a, c, g, or u
ucaggcaagcaauncugu

SEQ ID NO: 47476 - RNA, 19 nt, Artificial Sequence
  Synthetic
  misc_feature (15)..(15): n is a, c, g, or u
cucaggcaagcaauncugu

SEQ ID NO: 47477 - RNA, 20 nt, Artificial Sequence
  Synthetic
  misc_feature (16)..(16): n is a, c, g, or u
acucaggcaagcaauncugu

SEQ ID NO: 47478 - RNA, 21 nt, Artificial Sequence
  Synthetic
  misc_feature (17)..(17): n is a, c, g, or u
cacucaggcaagcaauncugu

SEQ ID NO: 47479 - RNA, 22 nt, Artificial Sequence
  Synthetic
  misc_feature (18)..(18): n is a, c, g, or u
gcacucaggcaagcaauncugu

SEQ ID NO: 47480 - RNA, 23 nt, Artificial Sequence
  Synthetic
  misc_feature (19)..(19): n is a, c, g, or u
agcacucaggcaagcaauncugu

SEQ ID NO: 47481 - RNA, 24 nt, Artificial Sequence
  Synthetic
  misc_feature (20)..(20): n is a, c, g, or u
cagcacucaggcaagcaauncugu

SEQ ID NO: 47482 - RNA, 18 nt, Artificial Sequence
  Synthetic
ggcaacggcccggucugu

SEQ ID NO: 47483 - RNA, 19 nt, Artificial Sequence
  Synthetic
aggcaacggcccggucugu

SEQ ID NO: 47484 - RNA, 20 nt, Artificial Sequence
  Synthetic
uaggcaacggcccggucugu

SEQ ID NO: 47485 - RNA, 18 nt, Artificial Sequence
  Synthetic
uaggaccccugcucgugu

SEQ ID NO: 47486 - RNA, 19 nt, Artificial Sequence
  Synthetic
cuaggaccccugcucgugu

SEQ ID NO: 47487 - RNA, 20 nt, Artificial Sequence
  Synthetic
ccuaggaccccugcucgugu

SEQ ID NO: 47488 - RNA, 21 nt, Artificial Sequence
  Synthetic
uccuaggaccccugcucgugu

SEQ ID NO: 47489 - RNA, 22 nt, Artificial Sequence
  Synthetic
uuccuaggaccccugcucgugu

SEQ ID NO: 47490 - RNA, 23 nt, Artificial Sequence
  Synthetic
auuccuaggaccccugcucgugu

SEQ ID NO: 47491 - RNA, 24 nt, Artificial Sequence
  Synthetic
gauuccuaggaccccugcucgugu

SEQ ID NO: 47492 - RNA, 18 nt, Artificial Sequence
  Synthetic
gggggagugcccgugugu

SEQ ID NO: 47493 - RNA, 19 nt, Artificial Sequence
  Synthetic
agggggagugcccgugugu

SEQ ID NO: 47494 - RNA, 20 nt, Artificial Sequence
  Synthetic
uagggggagugcccgugugu

SEQ ID NO: 47495 - RNA, 21 nt, Artificial Sequence
  Synthetic
cuagggggagugcccgugugu

SEQ ID NO: 47496 - RNA, 22 nt, Artificial Sequence
  Synthetic
ucuagggggagugcccgugugu

SEQ ID NO: 47497 - RNA, 23 nt, Artificial Sequence
  Synthetic
uucuagggggagugcccgugugu

SEQ ID NO: 47498 - RNA, 24 nt, Artificial Sequence
  Synthetic
uuucuagggggagugcccgugugu

SEQ ID NO: 47499 - RNA, 18 nt, Artificial Sequence
  Synthetic
uccuguccuccaacuugu

SEQ ID NO: 47500 - RNA, 19 nt, Artificial Sequence
  Synthetic
cuccuguccuccaacuugu

SEQ ID NO: 47501 - RNA, 20 nt, Artificial Sequence
  Synthetic
ucuccuguccuccaacuugu

SEQ ID NO: 47502 - RNA, 21 nt, Artificial Sequence
  Synthetic
aucuccuguccuccaacuugu

SEQ ID NO: 47503 - RNA, 22 nt, Artificial Sequence
  Synthetic
aaucuccuguccuccaacuugu

SEQ ID NO: 47504 - RNA, 23 nt, Artificial Sequence
  Synthetic
caaucuccuguccuccaacuugu

SEQ ID NO: 47505 - RNA, 24 nt, Artificial Sequence
  Synthetic
ccaaucuccuguccuccaacuugu

SEQ ID NO: 47506 - RNA, 18 nt, Artificial Sequence
  Synthetic
cagguuaaugaccuuugu

SEQ ID NO: 47507 - RNA, 19 nt, Artificial Sequence
  Synthetic
ccagguuaaugaccuuugu

SEQ ID NO: 47508 - RNA, 20 nt, Artificial Sequence
  Synthetic
uccagguuaaugaccuuugu

SEQ ID NO: 47509 - RNA, 21 nt, Artificial Sequence
  Synthetic
guccagguuaaugaccuuugu

SEQ ID NO: 47510 - RNA, 22 nt, Artificial Sequence
  Synthetic
aguccagguuaaugaccuuugu

SEQ ID NO: 47511 - RNA, 23 nt, Artificial Sequence
  Synthetic
gaguccagguuaaugaccuuugu

SEQ ID NO: 47512 - RNA, 24 nt, Artificial Sequence
  Synthetic
ugaguccagguuaaugaccuuugu

SEQ ID NO: 47513 - RNA, 18 nt, Artificial Sequence
  Synthetic
acaccgcuucagcuuugu

SEQ ID NO: 47514 - RNA, 19 nt, Artificial Sequence
  Synthetic
gacaccgcuucagcuuugu

SEQ ID NO: 47515 - RNA, 20 nt, Artificial Sequence
  Synthetic
cgacaccgcuucagcuuugu

SEQ ID NO: 47516 - RNA, 21 nt, Artificial Sequence
  Synthetic
ucgacaccgcuucagcuuugu

SEQ ID NO: 47517 - RNA, 22 nt, Artificial Sequence
  Synthetic
cucgacaccgcuucagcuuugu

SEQ ID NO: 47518 - RNA, 23 nt, Artificial Sequence
  Synthetic
ucucgacaccgcuucagcuuugu

SEQ ID NO: 47519 - RNA, 24 nt, Artificial Sequence
  Synthetic
uucucgacaccgcuucagcuuugu

SEQ ID NO: 47520 - RNA, 18 nt, Artificial Sequence
  Synthetic
  misc_feature (17)..(17): n is a, c, g, or u
gguauacaucuaaaccnu

SEQ ID NO: 47521 - RNA, 19 nt, Artificial Sequence
  Synthetic
  misc_feature (18)..(18): n is a, c, g, or u
ggguauacaucuaaaccnu

SEQ ID NO: 47522 - RNA, 20 nt, Artificial Sequence
  Synthetic
  misc_feature (19)..(19): n is a, c, g, or u
uggguauacaucuaaaccnu

SEQ ID NO: 47523 - RNA, 21 nt, Artificial Sequence
  Synthetic
  misc_feature (20)..(20): n is a, c, g, or u
uuggguauacaucuaaaccnu

SEQ ID NO: 47524 - RNA, 22 nt, Artificial Sequence
  Synthetic
  misc_feature (21)..(21): n is a, c, g, or u
uuuggguauacaucuaaaccnu

SEQ ID NO: 47525 - RNA, 23 nt, Artificial Sequence
  Synthetic
  misc_feature (22)..(22): n is a, c, g, or u
cuuuggguauacaucuaaaccnu

SEQ ID NO: 47526 - RNA, 24 nt, Artificial Sequence
  Synthetic
  misc_feature (23)..(23): n is a, c, g, or u
ucuuuggguauacaucuaaaccnu

SEQ ID NO: 47527 - RNA, 18 nt, Artificial Sequence
  Synthetic
  misc_feature (17)..(17): n is a, c, g, or u
uaugucaacaaccgggnu

SEQ ID NO: 47528 - RNA, 19 nt, Artificial Sequence
  Synthetic
  misc_feature (18)..(18): n is a, c, g, or u
uuaugucaacaaccgggnu

SEQ ID NO: 47529 - RNA, 20 nt, Artificial Sequence
  Synthetic
  misc_feature (19)..(19): n is a, c, g, or u
guuaugucaacaaccgggnu

SEQ ID NO: 47530 - RNA, 21 nt, Artificial Sequence
  Synthetic
  misc_feature (20)..(20): n is a, c, g, or u
uguuaugucaacaaccgggnu

SEQ ID NO: 47531 - RNA, 22 nt, Artificial Sequence
  Synthetic
  misc_feature (21)..(21): n is a, c, g, or u
uuguuaugucaacaaccgggnu

SEQ ID NO: 47532 - RNA, 23 nt, Artificial Sequence
  Synthetic
  misc_feature (22)..(22): n is a, c, g, or u
uuuguuaugucaacaaccgggnu

SEQ ID NO: 47533 - RNA, 24 nt, Artificial Sequence
  Synthetic
  misc_feature (23)..(23): n is a, c, g, or u
guuuguuaugucaacaaccgggnu

SEQ ID NO: 47534 - RNA, 18 nt, Artificial Sequence
  Synthetic
aacuaaaugugaacaauu

SEQ ID NO: 47535 - RNA, 19 nt, Artificial Sequence
  Synthetic
uaacuaaaugugaacaauu

SEQ ID NO: 47536 - RNA, 20 nt, Artificial Sequence
  Synthetic
auaacuaaaugugaacaauu

SEQ ID NO: 47537 - RNA, 21 nt, Artificial Sequence
  Synthetic
uauaacuaaaugugaacaauu

SEQ ID NO: 47538 - RNA, 22 nt, Artificial Sequence
  Synthetic
uuauaacuaaaugugaacaauu

SEQ ID NO: 47539 - RNA, 23 nt, Artificial Sequence
  Synthetic
auuauaacuaaaugugaacaauu

SEQ ID NO: 47540 - RNA, 24 nt, Artificial Sequence
  Synthetic
cauuauaacuaaaugugaacaauu

SEQ ID NO: 47541 - RNA, 18 nt, Artificial Sequence
  Synthetic
ugacccuuauaaagaauu

SEQ ID NO: 47542 - RNA, 19 nt, Artificial Sequence
  Synthetic
uugacccuuauaaagaauu

SEQ ID NO: 47543 - RNA, 20 nt, Artificial Sequence
  Synthetic
auugacccuuauaaagaauu

SEQ ID NO: 47544 - RNA, 21 nt, Artificial Sequence
  Synthetic
cauugacccuuauaaagaauu

SEQ ID NO: 47545 - RNA, 22 nt, Artificial Sequence
  Synthetic
acauugacccuuauaaagaauu

SEQ ID NO: 47546 - RNA, 23 nt, Artificial Sequence
  Synthetic
gacauugacccuuauaaagaauu

SEQ ID NO: 47547 - RNA, 24 nt, Artificial Sequence
  Synthetic
agacauugacccuuauaaagaauu

SEQ ID NO: 47548 - RNA, 18 nt, Artificial Sequence
  Synthetic
ccuggguggguaauaauu

SEQ ID NO: 47549 - RNA, 19 nt, Artificial Sequence
  Synthetic
accuggguggguaauaauu

SEQ ID NO: 47550 - RNA, 20 nt, Artificial Sequence
  Synthetic
  misc_feature (1)..(1): n is a, c, g, or u
naccuggguggguaauaauu

SEQ ID NO: 47551 - RNA, 21 nt, Artificial Sequence
  Synthetic
  misc_feature (2)..(2): n is a, c, g, or u
cnaccuggguggguaauaauu

SEQ ID NO: 47552 - RNA, 22 nt, Artificial Sequence
  Synthetic
  misc_feature (3)..(3): n is a, c, g, or u
gcnaccuggguggguaauaauu

SEQ ID NO: 47553 - RNA, 23 nt, Artificial Sequence
  Synthetic
  misc_feature (4)..(4): n is a, c, g, or u
agcnaccuggguggguaauaauu

SEQ ID NO: 47554 - RNA, 24 nt, Artificial Sequence
  Synthetic
  misc_feature (5)..(5): n is a, c, g, or u
uagcnaccuggguggguaauaauu

SEQ ID NO: 47555 - RNA, 18 nt, Artificial Sequence
  Synthetic
ccaguuggacccagcauu

SEQ ID NO: 47556 - RNA, 19 nt, Artificial Sequence
  Synthetic
accaguuggacccagcauu

SEQ ID NO: 47557 - RNA, 20 nt, Artificial Sequence
  Synthetic
caccaguuggacccagcauu

SEQ ID NO: 47558 - RNA, 21 nt, Artificial Sequence
  Synthetic
ucaccaguuggacccagcauu

SEQ ID NO: 47559 - RNA, 22 nt, Artificial Sequence
  Synthetic
aucaccaguuggacccagcauu

SEQ ID NO: 47560 - RNA, 23 nt, Artificial Sequence
  Synthetic
gaucaccaguuggacccagcauu

SEQ ID NO: 47561 - RNA, 24 nt, Artificial Sequence
  Synthetic
cgaucaccaguuggacccagcauu

SEQ ID NO: 47562 - RNA, 18 nt, Artificial Sequence
  Synthetic
ucaaucuucuccaggauu

SEQ ID NO: 47563 - RNA, 19 nt, Artificial Sequence
  Synthetic
gucaaucuucuccaggauu

SEQ ID NO: 47564 - RNA, 20 nt, Artificial Sequence
  Synthetic
cgucaaucuucuccaggauu

SEQ ID NO: 47565 - RNA, 21 nt, Artificial Sequence
  Synthetic
ucgucaaucuucuccaggauu

SEQ ID NO: 47566 - RNA, 22 nt, Artificial Sequence
  Synthetic
cucgucaaucuucuccaggauu

SEQ ID NO: 47567 - RNA, 23 nt, Artificial Sequence
  Synthetic
ucucgucaaucuucuccaggauu

SEQ ID NO: 47568 - RNA, 24 nt, Artificial Sequence
  Synthetic
aucucgucaaucuucuccaggauu

SEQ ID NO: 47569 - RNA, 18 nt, Artificial Sequence
  Synthetic
gaacaucacaucaggauu

SEQ ID NO: 47570 - RNA, 19 nt, Artificial Sequence
  Synthetic
agaacaucacaucaggauu

SEQ ID NO: 47571 - RNA, 20 nt, Artificial Sequence
  Synthetic
gagaacaucacaucaggauu

SEQ ID NO: 47572 - RNA, 21 nt, Artificial Sequence
  Synthetic
ggagaacaucacaucaggauu

SEQ ID NO: 47573 - RNA, 22 nt, Artificial Sequence
  Synthetic
uggagaacaucacaucaggauu

SEQ ID NO: 47574 - RNA, 23 nt, Artificial Sequence
  Synthetic
auggagaacaucacaucaggauu

SEQ ID NO: 47575 - RNA, 24 nt, Artificial Sequence
  Synthetic
cauggagaacaucacaucaggauu

SEQ ID NO: 47576 - RNA, 18 nt, Artificial Sequence
  Synthetic
cugucuuuaauccugauu

SEQ ID NO: 47577 - RNA, 19 nt, Artificial Sequence
  Synthetic
ccugucuuuaauccugauu

SEQ ID NO: 47578 - RNA, 20 nt, Artificial Sequence
  Synthetic
accugucuuuaauccugauu

SEQ ID NO: 47579 - RNA, 21 nt, Artificial Sequence
  Synthetic
uaccugucuuuaauccugauu

SEQ ID NO: 47580 - RNA, 22 nt, Artificial Sequence
  Synthetic
auaccugucuuuaauccugauu

SEQ ID NO: 47581 - RNA, 23 nt, Artificial Sequence
  Synthetic
uauaccugucuuuaauccugauu

SEQ ID NO: 47582 - RNA, 24 nt, Artificial Sequence
  Synthetic
cuauaccugucuuuaauccugauu

SEQ ID NO: 47583 - RNA, 18 nt, Artificial Sequence
  Synthetic
cccguuuguccucugauu

SEQ ID NO: 47584 - RNA, 19 nt, Artificial Sequence
  Synthetic
gcccguuuguccucugauu

SEQ ID NO: 47585 - RNA, 20 nt, Artificial Sequence
  Synthetic
ugcccguuuguccucugauu

SEQ ID NO: 47586 - RNA, 21 nt, Artificial Sequence
  Synthetic
uugcccguuuguccucugauu

SEQ ID NO: 47587 - RNA, 22 nt, Artificial Sequence
  Synthetic
guugcccguuuguccucugauu

SEQ ID NO: 47588 - RNA, 23 nt, Artificial Sequence
  Synthetic
uguugcccguuuguccucugauu

SEQ ID NO: 47589 - RNA, 24 nt, Artificial Sequence
  Synthetic
auguugcccguuuguccucugauu

SEQ ID NO: 47590 - RNA, 18 nt, Artificial Sequence
  Synthetic
uuaacaggccaauugauu

SEQ ID NO: 47591 - RNA, 19 nt, Artificial Sequence
  Synthetic
guuaacaggccaauugauu

SEQ ID NO: 47592 - RNA, 20 nt, Artificial Sequence
  Synthetic
uguuaacaggccaauugauu

SEQ ID NO: 47593 - RNA, 21 nt, Artificial Sequence
  Synthetic
cuguuaacaggccaauugauu

SEQ ID NO: 47594 - RNA, 22 nt, Artificial Sequence
  Synthetic
ccuguuaacaggccaauugauu

SEQ ID NO: 47595 - RNA, 23 nt, Artificial Sequence
  Synthetic
cccuguuaacaggccaauugauu

SEQ ID NO: 47596 - RNA, 24 nt, Artificial Sequence
  Synthetic
ucccuguuaacaggccaauugauu

SEQ ID NO: 47597 - RNA, 18 nt, Artificial Sequence
  Synthetic
  misc_feature (4)..(4): n is a, c, g, or u
uaungaugaugugguauu

SEQ ID NO: 47598 - RNA, 19 nt, Artificial Sequence
  Synthetic
  misc_feature (5)..(5): n is a, c, g, or u
auaungaugaugugguauu

SEQ ID NO: 47599 - RNA, 20 nt, Artificial Sequence
  Synthetic
  misc_feature (6)..(6): n is a, c, g, or u
uauaungaugaugugguauu

SEQ ID NO: 47600 - RNA, 21 nt, Artificial Sequence
  Synthetic
  misc_feature (7)..(7): n is a, c, g, or u
cuauaungaugaugugguauu

SEQ ID NO: 47601 - RNA, 22 nt, Artificial Sequence
  Synthetic
  misc_feature (8)..(8): n is a, c, g, or u
gcuauaungaugaugugguauu

SEQ ID NO: 47602 - RNA, 23 nt, Artificial Sequence
  Synthetic
  misc_feature (9)..(9): n is a, c, g, or u
agcuauaungaugaugugguauu

SEQ ID NO: 47603 - RNA, 24 nt, Artificial Sequence
  Synthetic
  misc_feature (10)..(10): n is a, c, g, or u
cagcuauaungaugaugugguauu

SEQ ID NO: 47604 - RNA, 18 nt, Artificial Sequence
  Synthetic
guuaaugaccuuuguauu

SEQ ID NO: 47605 - RNA, 19 nt, Artificial Sequence
  Synthetic
gguuaaugaccuuuguauu

SEQ ID NO: 47606 - RNA, 20 nt, Artificial Sequence
  Synthetic
agguuaaugaccuuuguauu

SEQ ID NO: 47607 - RNA, 21 nt, Artificial Sequence
  Synthetic
cagguuaaugaccuuuguauu

SEQ ID NO: 47608 - RNA, 22 nt, Artificial Sequence
  Synthetic
ccagguuaaugaccuuuguauu

SEQ ID NO: 47609 - RNA, 23 nt, Artificial Sequence
  Synthetic
uccagguuaaugaccuuuguauu

SEQ ID NO: 47610 - RNA, 24 nt, Artificial Sequence
  Synthetic
guccagguuaaugaccuuuguauu

SEQ ID NO: 47611 - RNA, 18 nt, Artificial Sequence
  Synthetic
ucacaaggugggaaacuu

SEQ ID NO: 47612 - RNA, 19 nt, Artificial Sequence
  Synthetic
cucacaaggugggaaacuu

SEQ ID NO: 47613 - RNA, 20 nt, Artificial Sequence
  Synthetic
acucacaaggugggaaacuu

SEQ ID NO: 47614 - RNA, 21 nt, Artificial Sequence
  Synthetic
gacucacaaggugggaaacuu

SEQ ID NO: 47615 - RNA, 22 nt, Artificial Sequence
  Synthetic
ggacucacaaggugggaaacuu

SEQ ID NO: 47616 - RNA, 23 nt, Artificial Sequence
  Synthetic
uggacucacaaggugggaaacuu

SEQ ID NO: 47617 - RNA, 24 nt, Artificial Sequence
  Synthetic
uuggacucacaaggugggaaacuu

SEQ ID NO: 47618 - RNA, 18 nt, Artificial Sequence
  Synthetic
uuacuuucucgccaacuu

SEQ ID NO: 47619 - RNA, 19 nt, Artificial Sequence
  Synthetic
uuuacuuucucgccaacuu

SEQ ID NO: 47620 - RNA, 20 nt, Artificial Sequence
  Synthetic
uuuuacuuucucgccaacuu

SEQ ID NO: 47621 - RNA, 21 nt, Artificial Sequence
  Synthetic
cuuuuacuuucucgccaacuu

SEQ ID NO: 47622 - RNA, 22 nt, Artificial Sequence
  Synthetic
gcuuuuacuuucucgccaacuu

SEQ ID NO: 47623 - RNA, 23 nt, Artificial Sequence
  Synthetic
ggcuuuuacuuucucgccaacuu

SEQ ID NO: 47624 - RNA, 24 nt, Artificial Sequence
  Synthetic
aggcuuuuacuuucucgccaacuu

SEQ ID NO: 47625 - RNA, 18 nt, Artificial Sequence
  Synthetic
ccuauccuaucaacacuu

SEQ ID NO: 47626 - RNA, 19 nt, Artificial Sequence
  Synthetic
cccuauccuaucaacacuu

SEQ ID NO: 47627 - RNA, 20 nt, Artificial Sequence
  Synthetic
ccccuauccuaucaacacuu

SEQ ID NO: 47628 - RNA, 21 nt, Artificial Sequence
  Synthetic
gccccuauccuaucaacacuu

SEQ ID NO: 47629 - RNA, 22 nt, Artificial Sequence
  Synthetic
ugccccuauccuaucaacacuu

SEQ ID NO: 47630 - RNA, 23 nt, Artificial Sequence
  Synthetic
augccccuauccuaucaacacuu

SEQ ID NO: 47631 - RNA, 24 nt, Artificial Sequence
  Synthetic
aaugccccuauccuaucaacacuu

SEQ ID NO: 47632 - RNA, 18 nt, Artificial Sequence
  Synthetic
  misc_feature (5)..(5): n is a, c, g, or u
cgggnuggagaaauacuu

SEQ ID NO: 47633 - RNA, 19 nt, Artificial Sequence
  Synthetic
  misc_feature (6)..(6): n is a, c, g, or u
ccgggnuggagaaauacuu

SEQ ID NO: 47634 - RNA, 20 nt, Artificial Sequence
  Synthetic
  misc_feature (7)..(7): n is a, c, g, or u
accgggnuggagaaauacuu

SEQ ID NO: 47635 - RNA, 21 nt, Artificial Sequence
  Synthetic
  misc_feature (8)..(8): n is a, c, g, or u
aaccgggnuggagaaauacuu

SEQ ID NO: 47636 - RNA, 22 nt, Artificial Sequence
  Synthetic
  misc_feature (9)..(9): n is a, c, g, or u
caaccgggnuggagaaauacuu

SEQ ID NO: 47637 - RNA, 23 nt, Artificial Sequence
  Synthetic
  misc_feature (10)..(10): n is a, c, g, or u
acaaccgggnuggagaaauacuu

SEQ ID NO: 47638 - RNA, 24 nt, Artificial Sequence
  Synthetic
  misc_feature (11)..(11): n is a, c, g, or u
aacaaccgggnuggagaaauacuu

SEQ ID NO: 47639 - RNA, 18 nt, Artificial Sequence
  Synthetic
gugggucaccauauacuu

SEQ ID NO: 47640 - RNA, 19 nt, Artificial Sequence
  Synthetic
ugugggucaccauauacuu

SEQ ID NO: 47641 - RNA, 20 nt, Artificial Sequence
  Synthetic
uugugggucaccauauacuu

SEQ ID NO: 47642 - RNA, 21 nt, Artificial Sequence
  Synthetic
uuugugggucaccauauacuu

SEQ ID NO: 47643 - RNA, 22 nt, Artificial Sequence
  Synthetic
uuuugugggucaccauauacuu

SEQ ID NO: 47644 - RNA, 23 nt, Artificial Sequence
  Synthetic
auuuugugggucaccauauacuu

SEQ ID NO: 47645 - RNA, 24 nt, Artificial Sequence
  Synthetic
cauuuugugggucaccauauacuu

SEQ ID NO: 47646 - RNA, 18 nt, Artificial Sequence
  Synthetic
uguaguuaaucauuacuu

SEQ ID NO: 47647 - RNA, 19 nt, Artificial Sequence
  Synthetic
auguaguuaaucauuacuu

SEQ ID NO: 47648 - RNA, 20 nt, Artificial Sequence
  Synthetic
aauguaguuaaucauuacuu

SEQ ID NO: 47649 - RNA, 21 nt, Artificial Sequence
  Synthetic
aaauguaguuaaucauuacuu

SEQ ID NO: 47650 - RNA, 22 nt, Artificial Sequence
  Synthetic
aaaauguaguuaaucauuacuu

SEQ ID NO: 47651 - RNA, 23 nt, Artificial Sequence
  Synthetic
gaaaauguaguuaaucauuacuu

SEQ ID NO: 47652 - RNA, 24 nt, Artificial Sequence
  Synthetic
agaaaauguaguuaaucauuacuu

SEQ ID NO: 47653 - RNA, 18 nt, Artificial Sequence
  Synthetic
acauuuccugucuuacuu

SEQ ID NO: 47654 - RNA, 19 nt, Artificial Sequence
  Synthetic
cacauuuccugucuuacuu

SEQ ID NO: 47655 - RNA, 20 nt, Artificial Sequence
  Synthetic
ucacauuuccugucuuacuu

SEQ ID NO: 47656 - RNA, 21 nt, Artificial Sequence
  Synthetic
uucacauuuccugucuuacuu

SEQ ID NO: 47657 - RNA, 22 nt, Artificial Sequence
  Synthetic
uuucacauuuccugucuuacuu

SEQ ID NO: 47658 - RNA, 23 nt, Artificial Sequence
  Synthetic
guuucacauuuccugucuuacuu

SEQ ID NO: 47659 - RNA, 24 nt, Artificial Sequence
  Synthetic
gguuucacauuuccugucuuacuu

SEQ ID NO: 47660 - RNA, 18 nt, Artificial Sequence
  Synthetic
gcgcaugcguggaaccuu

SEQ ID NO: 47661 - RNA, 19 nt, Artificial Sequence
  Synthetic
agcgcaugcguggaaccuu

SEQ ID NO: 47662 - RNA, 20 nt, Artificial Sequence
  Synthetic
cagcgcaugcguggaaccuu

SEQ ID NO: 47663 - RNA, 21 nt, Artificial Sequence
  Synthetic
ucagcgcaugcguggaaccuu

SEQ ID NO: 47664 - RNA, 22 nt, Artificial Sequence
  Synthetic
aucagcgcaugcguggaaccuu

SEQ ID NO: 47665 - RNA, 23 nt, Artificial Sequence
  Synthetic
caucagcgcaugcguggaaccuu

SEQ ID NO: 47666 - RNA, 24 nt, Artificial Sequence
  Synthetic
  misc_feature (1)..(1): n is a, c, g, or u
ncaucagcgcaugcguggaaccuu

SEQ ID NO: 47667 - RNA, 18 nt, Artificial Sequence
  Synthetic
gcuuagacauugacccuu

SEQ ID NO: 47668 - RNA, 19 nt, Artificial Sequence
  Synthetic
ggcuuagacauugacccuu

SEQ ID NO: 47669 - RNA, 20 nt, Artificial Sequence
  Synthetic
uggcuuagacauugacccuu

SEQ ID NO: 47670 - RNA, 21 nt, Artificial Sequence
  Synthetic
uuggcuuagacauugacccuu

SEQ ID NO: 47671 - RNA, 22 nt, Artificial Sequence
  Synthetic
uuuggcuuagacauugacccuu

SEQ ID NO: 47672 - RNA, 23 nt, Artificial Sequence
  Synthetic
uuuuggcuuagacauugacccuu

SEQ ID NO: 47673 - RNA, 24 nt, Artificial Sequence
  Synthetic
uuuuuggcuuagacauugacccuu

SEQ ID NO: 47674 - RNA, 18 nt, Artificial Sequence
  Synthetic
cauuauuuacauacccuu

SEQ ID NO: 47675 - RNA, 19 nt, Artificial Sequence
  Synthetic
acauuauuuacauacccuu

SEQ ID NO: 47676 - RNA, 20 nt, Artificial Sequence
  Synthetic
gacauuauuuacauacccuu

SEQ ID NO: 47677 - RNA, 21 nt, Artificial Sequence
  Synthetic
agacauuauuuacauacccuu

SEQ ID NO: 47678 - RNA, 22 nt, Artificial Sequence
  Synthetic
cagacauuauuuacauacccuu

SEQ ID NO: 47679 - RNA, 23 nt, Artificial Sequence
  Synthetic
ccagacauuauuuacauacccuu

SEQ ID NO: 47680 - RNA, 24 nt, Artificial Sequence
  Synthetic
accagacauuauuuacauacccuu

SEQ ID NO: 47681 - RNA, 18 nt, Artificial Sequence
  Synthetic
ccuccacacggaggccuu

SEQ ID NO: 47682 - RNA, 19 nt, Artificial Sequence
  Synthetic
cccuccacacggaggccuu

SEQ ID NO: 47683 - RNA, 20 nt, Artificial Sequence
  Synthetic
ccccuccacacggaggccuu

SEQ ID NO: 47684 - RNA, 21 nt, Artificial Sequence
  Synthetic
accccuccacacggaggccuu

SEQ ID NO: 47685 - RNA, 22 nt, Artificial Sequence
  Synthetic
caccccuccacacggaggccuu

SEQ ID NO: 47686 - RNA, 23 nt, Artificial Sequence
  Synthetic
ucaccccuccacacggaggccuu

SEQ ID NO: 47687 - RNA, 24 nt, Artificial Sequence
  Synthetic
uucaccccuccacacggaggccuu

SEQ ID NO: 47688 - RNA, 18 nt, Artificial Sequence
  Synthetic
acuuugccauauggccuu

SEQ ID NO: 47689 - RNA, 19 nt, Artificial Sequence
  Synthetic
aacuuugccauauggccuu

SEQ ID NO: 47690 - RNA, 20 nt, Artificial Sequence
  Synthetic
caacuuugccauauggccuu

SEQ ID NO: 47691 - RNA, 21 nt, Artificial Sequence
  Synthetic
acaacuuugccauauggccuu

SEQ ID NO: 47692 - RNA, 22 nt, Artificial Sequence
  Synthetic
aacaacuuugccauauggccuu

SEQ ID NO: 47693 - RNA, 23 nt, Artificial Sequence
  Synthetic
gaacaacuuugccauauggccuu

SEQ ID NO: 47694 - RNA, 24 nt, Artificial Sequence
  Synthetic
agaacaacuuugccauauggccuu

SEQ ID NO: 47695 - RNA, 18 nt, Artificial Sequence
  Synthetic
gcugccaacuggauccuu

SEQ ID NO: 47696 - RNA, 19 nt, Artificial Sequence
  Synthetic
ugcugccaacuggauccuu

SEQ ID NO: 47697 - RNA, 20 nt, Artificial Sequence
  Synthetic
gugcugccaacuggauccuu

SEQ ID NO: 47698 - RNA, 21 nt, Artificial Sequence
  Synthetic
ugugcugccaacuggauccuu

SEQ ID NO: 47699 - RNA, 22 nt, Artificial Sequence
  Synthetic
cugugcugccaacuggauccuu

SEQ ID NO: 47700 - RNA, 23 nt, Artificial Sequence
  Synthetic
gcugugcugccaacuggauccuu

SEQ ID NO: 47701 - RNA, 24 nt, Artificial Sequence
  Synthetic
ggcugugcugccaacuggauccuu

SEQ ID NO: 47702 - RNA, 18 nt, Artificial Sequence
  Synthetic
cugugccuuggguggcuu

SEQ ID NO: 47703 - RNA, 19 nt, Artificial Sequence
  Synthetic
gcugugccuuggguggcuu

SEQ ID NO: 47704 - RNA, 20 nt, Artificial Sequence
  Synthetic
agcugugccuuggguggcuu

SEQ ID NO: 47705 - RNA, 21 nt, Artificial Sequence
  Synthetic
aagcugugccuuggguggcuu

SEQ ID NO: 47706 - RNA, 22 nt, Artificial Sequence
  Synthetic
caagcugugccuuggguggcuu

SEQ ID NO: 47707 - RNA, 23 nt, Artificial Sequence
  Synthetic
ccaagcugugccuuggguggcuu

SEQ ID NO: 47708 - RNA, 24 nt, Artificial Sequence
  Synthetic
uccaagcugugccuuggguggcuu

SEQ ID NO: 47709 - RNA, 18 nt, Artificial Sequence
  Synthetic
uucgcacuccuccugcuu

SEQ ID NO: 47710 - RNA, 19 nt, Artificial Sequence
  Synthetic
auucgcacuccuccugcuu

SEQ ID NO: 47711 - RNA, 20 nt, Artificial Sequence
  Synthetic
gauucgcacuccuccugcuu

SEQ ID NO: 47712 - RNA, 21 nt, Artificial Sequence
  Synthetic
ggauucgcacuccuccugcuu

SEQ ID NO: 47713 - RNA, 22 nt, Artificial Sequence
  Synthetic
uggauucgcacuccuccugcuu

SEQ ID NO: 47714 - RNA, 23 nt, Artificial Sequence
  Synthetic
guggauucgcacuccuccugcuu

SEQ ID NO: 47715 - RNA, 24 nt, Artificial Sequence
  Synthetic
uguggauucgcacuccuccugcuu

SEQ ID NO: 47716 - RNA, 18 nt, Artificial Sequence
  Synthetic
ccgucuguucgugaucuu

SEQ ID NO: 47717 - RNA, 19 nt, Artificial Sequence
  Synthetic
cccgucuguucgugaucuu

SEQ ID NO: 47718 - RNA, 20 nt, Artificial Sequence
  Synthetic
ucccgucuguucgugaucuu

SEQ ID NO: 47719 - RNA, 21 nt, Artificial Sequence
  Synthetic
uucccgucuguucgugaucuu

SEQ ID NO: 47720 - RNA, 22 nt, Artificial Sequence
  Synthetic
uuucccgucuguucgugaucuu

SEQ ID NO: 47721 - RNA, 23 nt, Artificial Sequence
  Synthetic
uuuucccgucuguucgugaucuu

SEQ ID NO: 47722 - RNA, 24 nt, Artificial Sequence
  Synthetic
uuuuucccgucuguucgugaucuu

SEQ ID NO: 47723 - RNA, 18 nt, Artificial Sequence
  Synthetic
uugaguauuuggugucuu

SEQ ID NO: 47724 - RNA, 19 nt, Artificial Sequence
  Synthetic
cuugaguauuuggugucuu

SEQ ID NO: 47725 - RNA, 20 nt, Artificial Sequence
  Synthetic
ucuugaguauuuggugucuu

SEQ ID NO: 47726 - RNA, 21 nt, Artificial Sequence
  Synthetic
uucuugaguauuuggugucuu

SEQ ID NO: 47727 - RNA, 22 nt, Artificial Sequence
  Synthetic
guucuugaguauuuggugucuu

SEQ ID NO: 47728 - RNA, 23 nt, Artificial Sequence
  Synthetic
cguucuugaguauuuggugucuu

SEQ ID NO: 47729 - RNA, 24 nt, Artificial Sequence
  Synthetic
ccguucuugaguauuuggugucuu

SEQ ID NO: 47730 - RNA, 18 nt, Artificial Sequence
  Synthetic
aucuucuuguugguucuu

SEQ ID NO: 47731 - RNA, 19 nt, Artificial Sequence
  Synthetic
caucuucuuguugguucuu

SEQ ID NO: 47732 - RNA, 20 nt, Artificial Sequence
  Synthetic
ucaucuucuuguugguucuu

SEQ ID NO: 47733 - RNA, 21 nt, Artificial Sequence
  Synthetic
cucaucuucuuguugguucuu

SEQ ID NO: 47734 - RNA, 22 nt, Artificial Sequence
  Synthetic
ccucaucuucuuguugguucuu

SEQ ID NO: 47735 - RNA, 23 nt, Artificial Sequence
  Synthetic
gccucaucuucuuguugguucuu

SEQ ID NO: 47736 - RNA, 24 nt, Artificial Sequence
  Synthetic
ugccucaucuucuuguugguucuu

SEQ ID NO: 47737 - RNA, 18 nt, Artificial Sequence
  Synthetic
acaggcgggguuuuucuu

SEQ ID NO: 47738 - RNA, 19 nt, Artificial Sequence
  Synthetic
uacaggcgggguuuuucuu

SEQ ID NO: 47739 - RNA, 20 nt, Artificial Sequence
  Synthetic
uuacaggcgggguuuuucuu

SEQ ID NO: 47740 - RNA, 21 nt, Artificial Sequence
  Synthetic
guuacaggcgggguuuuucuu

SEQ ID NO: 47741 - RNA, 22 nt, Artificial Sequence
  Synthetic
uguuacaggcgggguuuuucuu

SEQ ID NO: 47742 - RNA, 23 nt, Artificial Sequence
  Synthetic
guguuacaggcgggguuuuucuu

SEQ ID NO: 47743 - RNA, 24 nt, Artificial Sequence
  Synthetic
cguguuacaggcgggguuuuucuu

SEQ ID NO: 47744 - RNA, 18 nt, Artificial Sequence
  Synthetic
cugcugguggcuccaguu

SEQ ID NO: 47745 - RNA, 19 nt, Artificial Sequence
  Synthetic
ccugcugguggcuccaguu

SEQ ID NO: 47746 - RNA, 20 nt, Artificial Sequence
  Synthetic
uccugcugguggcuccaguu

SEQ ID NO: 47747 - RNA, 21 nt, Artificial Sequence
  Synthetic
uuccugcugguggcuccaguu

SEQ ID NO: 47748 - RNA, 22 nt, Artificial Sequence
  Synthetic
  misc_feature (1)..(1): n is a, c, g, or u
nuuccugcugguggcuccaguu

SEQ ID NO: 47749 - RNA, 23 nt, Artificial Sequence
  Synthetic
  misc_feature (2)..(2): n is a, c, g, or u
unuuccugcugguggcuccaguu

SEQ ID NO: 47750 - RNA, 24 nt, Artificial Sequence
  Synthetic
  misc_feature (3)..(3): n is a, c, g, or u
aunuuccugcugguggcuccaguu

SEQ ID NO: 47751 - RNA, 18 nt, Artificial Sequence
  Synthetic
  misc_feature (1)..(1): n is a, c, g, or u
ncugugcuggggugaguu

SEQ ID NO: 47752 - RNA, 19 nt, Artificial Sequence
  Synthetic
  misc_feature (2)..(2): n is a, c, g, or u
uncugugcuggggugaguu

SEQ ID NO: 47753 - RNA, 20 nt, Artificial Sequence
  Synthetic
  misc_feature (3)..(3): n is a, c, g, or u
auncugugcuggggugaguu

SEQ ID NO: 47754 - RNA, 21 nt, Artificial Sequence
  Synthetic
  misc_feature (4)..(4): n is a, c, g, or u
aauncugugcuggggugaguu

SEQ ID NO: 47755 - RNA, 22 nt, Artificial Sequence
  Synthetic
  misc_feature (5)..(5): n is a, c, g, or u
caauncugugcuggggugaguu

SEQ ID NO: 47756 - RNA, 23 nt, Artificial Sequence
  Synthetic
  misc_feature (6)..(6): n is a, c, g, or u
gcaauncugugcuggggugaguu

SEQ ID NO: 47757 - RNA, 24 nt, Artificial Sequence
  Synthetic
  misc_feature (7)..(7): n is a, c, g, or u
agcaauncugugcuggggugaguu

SEQ ID NO: 47758 - RNA, 18 nt, Artificial Sequence
  Synthetic
uuugggagagaaaccguu

SEQ ID NO: 47759 - RNA, 19 nt, Artificial Sequence
  Synthetic
uuuugggagagaaaccguu

SEQ ID NO: 47760 - RNA, 20 nt, Artificial Sequence
  Synthetic
cuuuugggagagaaaccguu

SEQ ID NO: 47761 - RNA, 21 nt, Artificial Sequence
  Synthetic
acuuuugggagagaaaccguu

SEQ ID NO: 47762 - RNA, 22 nt, Artificial Sequence
  Synthetic
uacuuuugggagagaaaccguu

SEQ ID NO: 47763 - RNA, 23 nt, Artificial Sequence
  Synthetic
uuacuuuugggagagaaaccguu

SEQ ID NO: 47764 - RNA, 24 nt, Artificial Sequence
  Synthetic
cuuacuuuugggagagaaaccguu

SEQ ID NO: 47765 - RNA, 18 nt, Artificial Sequence
  Synthetic
accccucccggggccguu

SEQ ID NO: 47766 - RNA, 19 nt, Artificial Sequence
  Synthetic
gaccccucccggggccguu

SEQ ID NO: 47767 - RNA, 20 nt, Artificial Sequence
  Synthetic
cgaccccucccggggccguu

SEQ ID NO: 47768 - RNA, 18 nt, Artificial Sequence
  Synthetic
aggcaaugaguccagguu

SEQ ID NO: 47769 - RNA, 19 nt, Artificial Sequence
  Synthetic
uaggcaaugaguccagguu

SEQ ID NO: 47770 - RNA, 20 nt, Artificial Sequence
  Synthetic
uuaggcaaugaguccagguu

SEQ ID NO: 47771 - RNA, 21 nt, Artificial Sequence
  Synthetic
auuaggcaaugaguccagguu

SEQ ID NO: 47772 - RNA, 22 nt, Artificial Sequence
  Synthetic
aauuaggcaaugaguccagguu

SEQ ID NO: 47773 - RNA, 23 nt, Artificial Sequence
  Synthetic
gaauuaggcaaugaguccagguu

SEQ ID NO: 47774 - RNA, 24 nt, Artificial Sequence
  Synthetic
agaauuaggcaaugaguccagguu

SEQ ID NO: 47775 - RNA, 18 nt, Artificial Sequence
  Synthetic
uuaauacuaauauggguu

SEQ ID NO: 47776 - RNA, 19 nt, Artificial Sequence
  Synthetic
guuaauacuaauauggguu

SEQ ID NO: 47777 - RNA, 20 nt, Artificial Sequence
  Synthetic
uguuaauacuaauauggguu

SEQ ID NO: 47778 - RNA, 21 nt, Artificial Sequence
  Synthetic
auguuaauacuaauauggguu

SEQ ID NO: 47779 - RNA, 22 nt, Artificial Sequence
  Synthetic
uauguuaauacuaauauggguu

SEQ ID NO: 47780 - RNA, 23 nt, Artificial Sequence
  Synthetic
uuauguuaauacuaauauggguu

SEQ ID NO: 47781 - RNA, 24 nt, Artificial Sequence
  Synthetic
auuauguuaauacuaauauggguu

SEQ ID NO: 47782 - RNA, 18 nt, Artificial Sequence
  Synthetic
gccauuuguucagugguu

SEQ ID NO: 47783 - RNA, 19 nt, Artificial Sequence
  Synthetic
ugccauuuguucagugguu

SEQ ID NO: 47784 - RNA, 20 nt, Artificial Sequence
  Synthetic
gugccauuuguucagugguu

SEQ ID NO: 47785 - RNA, 21 nt, Artificial Sequence
  Synthetic
agugccauuuguucagugguu

SEQ ID NO: 47786 - RNA, 22 nt, Artificial Sequence
  Synthetic
uagugccauuuguucagugguu

SEQ ID NO: 47787 - RNA, 23 nt, Artificial Sequence
  Synthetic
cuagugccauuuguucagugguu

SEQ ID NO: 47788 - RNA, 24 nt, Artificial Sequence
  Synthetic
acuagugccauuuguucagugguu

SEQ ID NO: 47789 - RNA, 18 nt, Artificial Sequence
  Synthetic
  misc_feature (15)..(15): n is a, c, g, or u
augaaccuuuacccnguu

SEQ ID NO: 47790 - RNA, 19 nt, Artificial Sequence
  Synthetic
  misc_feature (16)..(16): n is a, c, g, or u
caugaaccuuuacccnguu

SEQ ID NO: 47791 - RNA, 20 nt, Artificial Sequence
  Synthetic
  misc_feature (17)..(17): n is a, c, g, or u
acaugaaccuuuacccnguu

SEQ ID NO: 47792 - RNA, 21 nt, Artificial Sequence
  Synthetic
  misc_feature (18)..(18): n is a, c, g, or u
uacaugaaccuuuacccnguu

SEQ ID NO: 47793 - RNA, 22 nt, Artificial Sequence
  Synthetic
  misc_feature (19)..(19): n is a, c, g, or u
auacaugaaccuuuacccnguu

SEQ ID NO: 47794 - RNA, 23 nt, Artificial Sequence
  Synthetic
  misc_feature (20)..(20): n is a, c, g, or u
aauacaugaaccuuuacccnguu

SEQ ID NO: 47795 - RNA, 24 nt, Artificial Sequence
  Synthetic
  misc_feature (21)..(21): n is a, c, g, or u
caauacaugaaccuuuacccnguu

SEQ ID NO: 47796 - RNA, 18 nt, Artificial Sequence
  Synthetic
  misc_feature (2)..(2): n is a, c, g, or u
anaaaauuaagcaauguu

SEQ ID NO: 47797 - RNA, 19 nt, Artificial Sequence
  Synthetic
  misc_feature (3)..(3): n is a, c, g, or u
canaaaauuaagcaauguu

SEQ ID NO: 47798 - RNA, 20 nt, Artificial Sequence
  Synthetic
  misc_feature (4)..(4): n is a, c, g, or u
acanaaaauuaagcaauguu

SEQ ID NO: 47799 - RNA, 21 nt, Artificial Sequence
  Synthetic
  misc_feature (5)..(5): n is a, c, g, or u
cacanaaaauuaagcaauguu

SEQ ID NO: 47800 - RNA, 22 nt, Artificial Sequence
  Synthetic
  misc_feature (6)..(6): n is a, c, g, or u
acacanaaaauuaagcaauguu

SEQ ID NO: 47801 - RNA, 23 nt, Artificial Sequence
  Synthetic
  misc_feature (7)..(7): n is a, c, g, or u
cacacanaaaauuaagcaauguu

SEQ ID NO: 47802 - RNA, 24 nt, Artificial Sequence
  Synthetic
  misc_feature (8)..(8): n is a, c, g, or u
ucacacanaaaauuaagcaauguu

SEQ ID NO: 47803 - RNA, 18 nt, Artificial Sequence
  Synthetic
cuuccggagacuacuguu

SEQ ID NO: 47804 - RNA, 19 nt, Artificial Sequence
  Synthetic
acuuccggagacuacuguu

SEQ ID NO: 47805 - RNA, 20 nt, Artificial Sequence
  Synthetic
cacuuccggagacuacuguu

SEQ ID NO: 47806 - RNA, 21 nt, Artificial Sequence
  Synthetic
acacuuccggagacuacuguu

SEQ ID NO: 47807 - RNA, 22 nt, Artificial Sequence
  Synthetic
aacacuuccggagacuacuguu

SEQ ID NO: 47808 - RNA, 23 nt, Artificial Sequence
  Synthetic
caacacuuccggagacuacuguu

SEQ ID NO: 47809 - RNA, 24 nt, Artificial Sequence
  Synthetic
ucaacacuuccggagacuacuguu

SEQ ID NO: 47810 - RNA, 18 nt, Artificial Sequence
  Synthetic
uuucggaaacucccuguu

SEQ ID NO: 47811 - RNA, 19 nt, Artificial Sequence
  Synthetic
uuuucggaaacucccuguu

SEQ ID NO: 47812 - RNA, 20 nt, Artificial Sequence
  Synthetic
guuuucggaaacucccuguu

SEQ ID NO: 47813 - RNA, 21 nt, Artificial Sequence
  Synthetic
uguuuucggaaacucccuguu

SEQ ID NO: 47814 - RNA, 22 nt, Artificial Sequence
  Synthetic
auguuuucggaaacucccuguu

SEQ ID NO: 47815 - RNA, 23 nt, Artificial Sequence
  Synthetic
aauguuuucggaaacucccuguu

SEQ ID NO: 47816 - RNA, 24 nt, Artificial Sequence
  Synthetic
caauguuuucggaaacucccuguu

SEQ ID NO: 47817 - RNA, 18 nt, Artificial Sequence
  Synthetic
aggaccccugcucguguu

SEQ ID NO: 47818 - RNA, 19 nt, Artificial Sequence
  Synthetic
uaggaccccugcucguguu

SEQ ID NO: 47819 - RNA, 20 nt, Artificial Sequence
  Synthetic
cuaggaccccugcucguguu

SEQ ID NO: 47820 - RNA, 21 nt, Artificial Sequence
  Synthetic
ccuaggaccccugcucguguu

SEQ ID NO: 47821 - RNA, 22 nt, Artificial Sequence
  Synthetic
uccuaggaccccugcucguguu

SEQ ID NO: 47822 - RNA, 23 nt, Artificial Sequence
  Synthetic
uuccuaggaccccugcucguguu

SEQ ID NO: 47823 - RNA, 24 nt, Artificial Sequence
  Synthetic
auuccuaggaccccugcucguguu

SEQ ID NO: 47824 - RNA, 18 nt, Artificial Sequence
  Synthetic
ggcgggguuuuucuuguu

SEQ ID NO: 47825 - RNA, 19 nt, Artificial Sequence
  Synthetic
aggcgggguuuuucuuguu

SEQ ID NO: 47826 - RNA, 20 nt, Artificial Sequence
  Synthetic
caggcgggguuuuucuuguu

SEQ ID NO: 47827 - RNA, 21 nt, Artificial Sequence
  Synthetic
acaggcgggguuuuucuuguu

SEQ ID NO: 47828 - RNA, 22 nt, Artificial Sequence
  Synthetic
uacaggcgggguuuuucuuguu

SEQ ID NO: 47829 - RNA, 23 nt, Artificial Sequence
  Synthetic
uuacaggcgggguuuuucuuguu

SEQ ID NO: 47830 - RNA, 24 nt, Artificial Sequence
  Synthetic
guuacaggcgggguuuuucuuguu

SEQ ID NO: 47831 - RNA, 18 nt, Artificial Sequence
  Synthetic
ggguuauuccuuaaauuu

SEQ ID NO: 47832 - RNA, 19 nt, Artificial Sequence
  Synthetic
gggguuauuccuuaaauuu

SEQ ID NO: 47833 - RNA, 20 nt, Artificial Sequence
  Synthetic
ugggguuauuccuuaaauuu

SEQ ID NO: 47834 - RNA, 21 nt, Artificial Sequence
  Synthetic
augggguuauuccuuaaauuu

SEQ ID NO: 47835 - RNA, 22 nt, Artificial Sequence
  Synthetic
gaugggguuauuccuuaaauuu

SEQ ID NO: 47836 - RNA, 23 nt, Artificial Sequence
  Synthetic
agaugggguuauuccuuaaauuu

SEQ ID NO: 47837 - RNA, 24 nt, Artificial Sequence
  Synthetic
aagaugggguuauuccuuaaauuu

SEQ ID NO: 47838 - RNA, 18 nt, Artificial Sequence
  Synthetic
acuaaaugugaacaauuu

SEQ ID NO: 47839 - RNA, 19 nt, Artificial Sequence
  Synthetic
aacuaaaugugaacaauuu

SEQ ID NO: 47840 - RNA, 20 nt, Artificial Sequence
  Synthetic
uaacuaaaugugaacaauuu

SEQ ID NO: 47841 - RNA, 21 nt, Artificial Sequence
  Synthetic
auaacuaaaugugaacaauuu

SEQ ID NO: 47842 - RNA, 22 nt, Artificial Sequence
  Synthetic
uauaacuaaaugugaacaauuu

SEQ ID NO: 47843 - RNA, 23 nt, Artificial Sequence
  Synthetic
uuauaacuaaaugugaacaauuu

SEQ ID NO: 47844 - RNA, 24 nt, Artificial Sequence
  Synthetic
auuauaacuaaaugugaacaauuu

SEQ ID NO: 47845 - RNA, 18 nt, Artificial Sequence
  Synthetic
guggacuucucucaauuu

SEQ ID NO: 47846 - RNA, 19 nt, Artificial Sequence
  Synthetic
gguggacuucucucaauuu

SEQ ID NO: 47847 - RNA, 20 nt, Artificial Sequence
  Synthetic
ugguggacuucucucaauuu

SEQ ID NO: 47848 - RNA, 21 nt, Artificial Sequence
  Synthetic
gugguggacuucucucaauuu

SEQ ID NO: 47849 - RNA, 22 nt, Artificial Sequence
  Synthetic
cgugguggacuucucucaauuu

SEQ ID NO: 47850 - RNA, 23 nt, Artificial Sequence
  Synthetic
ucgugguggacuucucucaauuu

SEQ ID NO: 47851 - RNA, 24 nt, Artificial Sequence
  Synthetic
cucgugguggacuucucucaauuu

SEQ ID NO: 47852 - RNA, 18 nt, Artificial Sequence
  Synthetic
cuggguggguaauaauuu

SEQ ID NO: 47853 - RNA, 19 nt, Artificial Sequence
  Synthetic
ccuggguggguaauaauuu

SEQ ID NO: 47854 - RNA, 20 nt, Artificial Sequence
  Synthetic
accuggguggguaauaauuu

SEQ ID NO: 47855 - RNA, 21 nt, Artificial Sequence
  Synthetic
  misc_feature (1)..(1): n is a, c, g, or u
naccuggguggguaauaauuu

SEQ ID NO: 47856 - RNA, 22 nt, Artificial Sequence
  Synthetic
  misc_feature (2)..(2): n is a, c, g, or u
cnaccuggguggguaauaauuu

SEQ ID NO: 47857 - RNA, 23 nt, Artificial Sequence
  Synthetic
  misc_feature (3)..(3): n is a, c, g, or u
gcnaccuggguggguaauaauuu

SEQ ID NO: 47858 - RNA, 24 nt, Artificial Sequence
  Synthetic
  misc_feature (4)..(4): n is a, c, g, or u
agcnaccuggguggguaauaauuu

SEQ ID NO: 47859 - RNA, 18 nt, Artificial Sequence
  Synthetic
ucccguagcgcuucauuu

SEQ ID NO: 47860 - RNA, 19 nt, Artificial Sequence
  Synthetic
aucccguagcgcuucauuu

SEQ ID NO: 47861 - RNA, 20 nt, Artificial Sequence
  Synthetic
caucccguagcgcuucauuu

SEQ ID NO: 47862 - RNA, 21 nt, Artificial Sequence
  Synthetic
acaucccguagcgcuucauuu

SEQ ID NO: 47863 - RNA, 22 nt, Artificial Sequence
  Synthetic
aacaucccguagcgcuucauuu

SEQ ID NO: 47864 - RNA, 23 nt, Artificial Sequence
  Synthetic
aaacaucccguagcgcuucauuu

SEQ ID NO: 47865 - RNA, 24 nt, Artificial Sequence
  Synthetic
gaaacaucccguagcgcuucauuu

SEQ ID NO: 47866 - RNA, 18 nt, Artificial Sequence
  Synthetic
cacaaggugggaaacuuu

SEQ ID NO: 47867 - RNA, 19 nt, Artificial Sequence
  Synthetic
ucacaaggugggaaacuuu

SEQ ID NO: 47868 - RNA, 20 nt, Artificial Sequence
  Synthetic
cucacaaggugggaaacuuu

SEQ ID NO: 47869 - RNA, 21 nt, Artificial Sequence
  Synthetic
acucacaaggugggaaacuuu

SEQ ID NO: 47870 - RNA, 22 nt, Artificial Sequence
  Synthetic
gacucacaaggugggaaacuuu

SEQ ID NO: 47871 - RNA, 23 nt, Artificial Sequence
  Synthetic
ggacucacaaggugggaaacuuu

SEQ ID NO: 47872 - RNA, 24 nt, Artificial Sequence
  Synthetic
uggacucacaaggugggaaacuuu

SEQ ID NO: 47873 - RNA, 18 nt, Artificial Sequence
  Synthetic
gggcacacuaacaacuuu

SEQ ID NO: 47874 - RNA, 19 nt, Artificial Sequence
  Synthetic
agggcacacuaacaacuuu

SEQ ID NO: 47875 - RNA, 20 nt, Artificial Sequence
  Synthetic
cagggcacacuaacaacuuu

SEQ ID NO: 47876 - RNA, 21 nt, Artificial Sequence
  Synthetic
ucagggcacacuaacaacuuu

SEQ ID NO: 47877 - RNA, 22 nt, Artificial Sequence
  Synthetic
cucagggcacacuaacaacuuu

SEQ ID NO: 47878 - RNA, 23 nt, Artificial Sequence
  Synthetic
ucucagggcacacuaacaacuuu

SEQ ID NO: 47879 - RNA, 24 nt, Artificial Sequence
  Synthetic
gucucagggcacacuaacaacuuu

SEQ ID NO: 47880 - RNA, 18 nt, Artificial Sequence
  Synthetic
cauuuccugucuuacuuu

SEQ ID NO: 47881 - RNA, 19 nt, Artificial Sequence
  Synthetic
acauuuccugucuuacuuu

SEQ ID NO: 47882 - RNA, 20 nt, Artificial Sequence
  Synthetic
cacauuuccugucuuacuuu

SEQ ID NO: 47883 - RNA, 21 nt, Artificial Sequence
  Synthetic
ucacauuuccugucuuacuuu

SEQ ID NO: 47884 - RNA, 22 nt, Artificial Sequence
  Synthetic
uucacauuuccugucuuacuuu

SEQ ID NO: 47885 - RNA, 23 nt, Artificial Sequence
  Synthetic
uuucacauuuccugucuuacuuu

SEQ ID NO: 47886 - RNA, 24 nt, Artificial Sequence
  Synthetic
guuucacauuuccugucuuacuuu

SEQ ID NO: 47887 - RNA, 18 nt, Artificial Sequence
  Synthetic
auuauuuacauacccuuu

SEQ ID NO: 47888 - RNA, 19 nt, Artificial Sequence
  Synthetic
cauuauuuacauacccuuu

SEQ ID NO: 47889 - RNA, 20 nt, Artificial Sequence
  Synthetic
acauuauuuacauacccuuu

SEQ ID NO: 47890 - RNA, 21 nt, Artificial Sequence
  Synthetic
gacauuauuuacauacccuuu

SEQ ID NO: 47891 - RNA, 22 nt, Artificial Sequence
  Synthetic
agacauuauuuacauacccuuu

SEQ ID NO: 47892 - RNA, 23 nt, Artificial Sequence
  Synthetic
cagacauuauuuacauacccuuu

SEQ ID NO: 47893 - RNA, 24 nt, Artificial Sequence
  Synthetic
ccagacauuauuuacauacccuuu

SEQ ID NO: 47894 - RNA, 18 nt, Artificial Sequence
  Synthetic
acaauucugucguccuuu

SEQ ID NO: 47895 - RNA, 19 nt, Artificial Sequence
  Synthetic
gacaauucugucguccuuu

SEQ ID NO: 47896 - RNA, 20 nt, Artificial Sequence
  Synthetic
ugacaauucugucguccuuu

SEQ ID NO: 47897 - RNA, 21 nt, Artificial Sequence
  Synthetic
cugacaauucugucguccuuu

SEQ ID NO: 47898 - RNA, 22 nt, Artificial Sequence
  Synthetic
acugacaauucugucguccuuu

SEQ ID NO: 47899 - RNA, 23 nt, Artificial Sequence
  Synthetic
gacugacaauucugucguccuuu

SEQ ID NO: 47900 - RNA, 24 nt, Artificial Sequence
  Synthetic
ggacugacaauucugucguccuuu

SEQ ID NO: 47901 - RNA, 18 nt, Artificial Sequence
  Synthetic
ucuacagcauggggcuuu

SEQ ID NO: 47902 - RNA, 19 nt, Artificial Sequence
  Synthetic
aucuacagcauggggcuuu

SEQ ID NO: 47903 - RNA, 20 nt, Artificial Sequence
  Synthetic
gaucuacagcauggggcuuu

SEQ ID NO: 47904 - RNA, 21 nt, Artificial Sequence
  Synthetic
agaucuacagcauggggcuuu

SEQ ID NO: 47905 - RNA, 22 nt, Artificial Sequence
  Synthetic
aagaucuacagcauggggcuuu

SEQ ID NO: 47906 - RNA, 23 nt, Artificial Sequence
  Synthetic
caagaucuacagcauggggcuuu

SEQ ID NO: 47907 - RNA, 24 nt, Artificial Sequence
  Synthetic
acaagaucuacagcauggggcuuu

SEQ ID NO: 47908 - RNA, 18 nt, Artificial Sequence
  Synthetic
cccaucaucuugggcuuu

SEQ ID NO: 47909 - RNA, 19 nt, Artificial Sequence
  Synthetic
ucccaucaucuugggcuuu

SEQ ID NO: 47910 - RNA, 20 nt, Artificial Sequence
  Synthetic
aucccaucaucuugggcuuu

SEQ ID NO: 47911 - RNA, 21 nt, Artificial Sequence
  Synthetic
caucccaucaucuugggcuuu

SEQ ID NO: 47912 - RNA, 22 nt, Artificial Sequence
  Synthetic
ccaucccaucaucuugggcuuu

SEQ ID NO: 47913 - RNA, 23 nt, Artificial Sequence
  Synthetic
cccaucccaucaucuugggcuuu

SEQ ID NO: 47914 - RNA, 24 nt, Artificial Sequence
  Synthetic
ucccaucccaucaucuugggcuuu

SEQ ID NO: 47915 - RNA, 18 nt, Artificial Sequence
  Synthetic
uuggcaaacuccuucuuu

SEQ ID NO: 47916 - RNA, 19 nt, Artificial Sequence
  Synthetic
auuggcaaacuccuucuuu

SEQ ID NO: 47917 - RNA, 20 nt, Artificial Sequence
  Synthetic
gauuggcaaacuccuucuuu

SEQ ID NO: 47918 - RNA, 21 nt, Artificial Sequence
  Synthetic
ugauuggcaaacuccuucuuu

SEQ ID NO: 47919 - RNA, 22 nt, Artificial Sequence
  Synthetic
cugauuggcaaacuccuucuuu

SEQ ID NO: 47920 - RNA, 23 nt, Artificial Sequence
  Synthetic
ccugauuggcaaacuccuucuuu

SEQ ID NO: 47921 - RNA, 24 nt, Artificial Sequence
  Synthetic
uccugauuggcaaacuccuucuuu

SEQ ID NO: 47922 - RNA, 18 nt, Artificial Sequence
  Synthetic
  misc_feature (1)..(1): n is a, c, g, or u
naaaauuaagcaauguuu

SEQ ID NO: 47923 - RNA, 19 nt, Artificial Sequence
  Synthetic
  misc_feature (2)..(2): n is a, c, g, or u
anaaaauuaagcaauguuu

SEQ ID NO: 47924 - RNA, 20 nt, Artificial Sequence
  Synthetic
  misc_feature (3)..(3): n is a, c, g, or u
canaaaauuaagcaauguuu

SEQ ID NO: 47925 - RNA, 21 nt, Artificial Sequence
  Synthetic
  misc_feature (4)..(4): n is a, c, g, or u
acanaaaauuaagcaauguuu

SEQ ID NO: 47926 - RNA, 22 nt, Artificial Sequence
  Synthetic
  misc_feature (5)..(5): n is a, c, g, or u
cacanaaaauuaagcaauguuu

SEQ ID NO: 47927 - RNA, 23 nt, Artificial Sequence
  Synthetic
  misc_feature (6)..(6): n is a, c, g, or u
acacanaaaauuaagcaauguuu

SEQ ID NO: 47928 - RNA, 24 nt, Artificial Sequence
  Synthetic
  misc_feature (7)..(7): n is a, c, g, or u
cacacanaaaauuaagcaauguuu

SEQ ID NO: 47929 - RNA, 18 nt, Artificial Sequence
  Synthetic
ggucugugccaaguguuu

SEQ ID NO: 47930 - RNA, 19 nt, Artificial Sequence
  Synthetic
cggucugugccaaguguuu

SEQ ID NO: 47931 - RNA, 20 nt, Artificial Sequence
  Synthetic
ccggucugugccaaguguuu

SEQ ID NO: 47932 - RNA, 21 nt, Artificial Sequence
  Synthetic
cccggucugugccaaguguuu

SEQ ID NO: 47933 - RNA, 22 nt, Artificial Sequence
  Synthetic
gcccggucugugccaaguguuu

SEQ ID NO: 47934 - RNA, 23 nt, Artificial Sequence
  Synthetic
ggcccggucugugccaaguguuu

SEQ ID NO: 47935 - RNA, 24 nt, Artificial Sequence
  Synthetic
cggcccggucugugccaaguguuu

SEQ ID NO: 47936 - RNA, 18 nt, Artificial Sequence
  Synthetic
gguuauuccuuaaauuuu

SEQ ID NO: 47937 - RNA, 19 nt, Artificial Sequence
  Synthetic
ggguuauuccuuaaauuuu

SEQ ID NO: 47938 - RNA, 20 nt, Artificial Sequence
  Synthetic
gggguuauuccuuaaauuuu

SEQ ID NO: 47939 - RNA, 21 nt, Artificial Sequence
  Synthetic
ugggguuauuccuuaaauuuu

SEQ ID NO: 47940 - RNA, 22 nt, Artificial Sequence
  Synthetic
augggguuauuccuuaaauuuu

SEQ ID NO: 47941 - RNA, 23 nt, Artificial Sequence
  Synthetic
gaugggguuauuccuuaaauuuu

SEQ ID NO: 47942 - RNA, 24 nt, Artificial Sequence
  Synthetic
agaugggguuauuccuuaaauuuu

SEQ ID NO: 47943 - RNA, 18 nt, Artificial Sequence
  Synthetic
uggacuucucucaauuuu

SEQ ID NO: 47944 - RNA, 19 nt, Artificial Sequence
  Synthetic
guggacuucucucaauuuu

SEQ ID NO: 47945 - RNA, 20 nt, Artificial Sequence
  Synthetic
gguggacuucucucaauuuu

SEQ ID NO: 47946 - RNA, 21 nt, Artificial Sequence
  Synthetic
ugguggacuucucucaauuuu

SEQ ID NO: 47947 - RNA, 22 nt, Artificial Sequence
  Synthetic
gugguggacuucucucaauuuu

SEQ ID NO: 47948 - RNA, 23 nt, Artificial Sequence
  Synthetic
cgugguggacuucucucaauuuu

SEQ ID NO: 47949 - RNA, 24 nt, Artificial Sequence
  Synthetic
ucgugguggacuucucucaauuuu

SEQ ID NO: 47950 - RNA, 18 nt, Artificial Sequence
  Synthetic
auuuccugucuuacuuuu

SEQ ID NO: 47951 - RNA, 19 nt, Artificial Sequence
  Synthetic
cauuuccugucuuacuuuu

SEQ ID NO: 47952 - RNA, 20 nt, Artificial Sequence
  Synthetic
acauuuccugucuuacuuuu

SEQ ID NO: 47953 - RNA, 21 nt, Artificial Sequence
  Synthetic
cacauuuccugucuuacuuuu

SEQ ID NO: 47954 - RNA, 22 nt, Artificial Sequence
  Synthetic
ucacauuuccugucuuacuuuu

SEQ ID NO: 47955 - RNA, 23 nt, Artificial Sequence
  Synthetic
uucacauuuccugucuuacuuuu

SEQ ID NO: 47956 - RNA, 24 nt, Artificial Sequence
  Synthetic
uuucacauuuccugucuuacuuuu

SEQ ID NO: 47957 - RNA, 18 nt, Artificial Sequence
  Synthetic
aaaauuaagcaauguuuu

SEQ ID NO: 47958 - RNA, 19 nt, Artificial Sequence
  Synthetic
  misc_feature (1)..(1): n is a, c, g, or u
naaaauuaagcaauguuuu

SEQ ID NO: 47959 - RNA, 20 nt, Artificial Sequence
  Synthetic
  misc_feature (2)..(2): n is a, c, g, or u
anaaaauuaagcaauguuuu

SEQ ID NO: 47960 - RNA, 21 nt, Artificial Sequence
  Synthetic
  misc_feature (3)..(3): n is a, c, g, or u
canaaaauuaagcaauguuuu

SEQ ID NO: 47961 - RNA, 22 nt, Artificial Sequence
  Synthetic
  misc_feature (4)..(4): n is a, c, g, or u
acanaaaauuaagcaauguuuu

SEQ ID NO: 47962 - RNA, 23 nt, Artificial Sequence
  Synthetic
  misc_feature (5)..(5): n is a, c, g, or u
cacanaaaauuaagcaauguuuu

SEQ ID NO: 47963 - RNA, 24 nt, Artificial Sequence
  Synthetic
  misc_feature (6)..(6): n is a, c, g, or u
acacanaaaauuaagcaauguuuu

SEQ ID NO: 47964 - RNA, 18 nt, Artificial Sequence
  Synthetic
uaugccugccagauuuuu

SEQ ID NO: 47965 - RNA, 19 nt, Artificial Sequence
  Synthetic
uuaugccugccagauuuuu

SEQ ID NO: 47966 - RNA, 20 nt, Artificial Sequence
  Synthetic
guuaugccugccagauuuuu

SEQ ID NO: 47967 - RNA, 21 nt, Artificial Sequence
  Synthetic
aguuaugccugccagauuuuu

SEQ ID NO: 47968 - RNA, 22 nt, Artificial Sequence
  Synthetic
uaguuaugccugccagauuuuu

SEQ ID NO: 47969 - RNA, 23 nt, Artificial Sequence
  Synthetic
cuaguuaugccugccagauuuuu

SEQ ID NO: 47970 - RNA, 24 nt, Artificial Sequence
  Synthetic
acuaguuaugccugccagauuuuu

SEQ ID NO: 47971 - RNA, 18 nt, Artificial Sequence
  Synthetic
uucaaggacuguguuuuu

SEQ ID NO: 47972 - RNA, 19 nt, Artificial Sequence
  Synthetic
cuucaaggacuguguuuuu

SEQ ID NO: 47973 - RNA, 20 nt, Artificial Sequence
  Synthetic
acuucaaggacuguguuuuu

SEQ ID NO: 47974 - RNA, 21 nt, Artificial Sequence
  Synthetic
uacuucaaggacuguguuuuu

SEQ ID NO: 47975 - RNA, 22 nt, Artificial Sequence
  Synthetic
auacuucaaggacuguguuuuu

SEQ ID NO: 47976 - RNA, 23 nt, Artificial Sequence
  Synthetic
aauacuucaaggacuguguuuuu

SEQ ID NO: 47977 - RNA, 24 nt, Artificial Sequence
  Synthetic
aaauacuucaaggacuguguuuuu

SEQ ID NO: 47978 - RNA, 17 nt, Artificial Sequence
  Synthetic
gugcaguuuccguccga

SEQ ID NO: 47979 - RNA, 17 nt, Artificial Sequence
  Synthetic
  misc_feature (16)..(16): n is a, c, g, or u
gccguuccagccgacna

SEQ ID NO: 47980 - RNA, 17 nt, Artificial Sequence
  Synthetic
ggccguugccgagcaac

SEQ ID NO: 47981 - RNA, 17 nt, Artificial Sequence
  Synthetic
gcugacgcaacccccac

SEQ ID NO: 47982 - RNA, 17 nt, Artificial Sequence
  Synthetic
  misc_feature (14)..(14): n is a, c, g, or u
guaggucccgaacngac

SEQ ID NO: 47983 - RNA, 17 nt, Artificial Sequence
  Synthetic
gauguauucuucgaucc

SEQ ID NO: 47984 - RNA, 17 nt, Artificial Sequence
  Synthetic
gaggcaauagucggagc

SEQ ID NO: 47985 - RNA, 17 nt, Artificial Sequence
  Synthetic
gcaguauggaucggcag

SEQ ID NO: 47986 - RNA, 17 nt, Artificial Sequence
  Synthetic
ggccaucagcgcaugcg

SEQ ID NO: 47987 - RNA, 17 nt, Artificial Sequence
  Synthetic
  misc_feature (16)..(16): n is a, c, g, or u
gucggcgcugaauccng

SEQ ID NO: 47988 - RNA, 17 nt, Artificial Sequence
  Synthetic
gcaacccccacugguug

SEQ ID NO: 47989 - RNA, 17 nt, Artificial Sequence
  Synthetic
gccaagccccaaccagu

SEQ ID NO: 47990 - RNA, 17 nt, Artificial Sequence
  Synthetic
  misc_feature (15)..(15): n is a, c, g, or u
gaggugcgacccgungu

SEQ ID NO: 47991 - RNA, 17 nt, Artificial Sequence
  Synthetic
guagcgccucauuuugu

SEQ ID NO: 47992 - RNA, 17 nt, Artificial Sequence
  Synthetic
guuuccguccgaggguu

SEQ ID NO: 47993 - RNA, 20 nt, Artificial Sequence
  Synthetic
gaucggcagaggagccacaa

SEQ ID NO: 47994 - RNA, 20 nt, Artificial Sequence
  Synthetic
gccuggccguugccgagcaa

SEQ ID NO: 47995 - RNA, 20 nt, Artificial Sequence
  Synthetic
guugccgagcaacgggguaa

SEQ ID NO: 47996 - RNA, 20 nt, Artificial Sequence
  Synthetic
  misc_feature (19)..(19): n is a, c, g, or u
gcgagggaguucuucuucna

SEQ ID NO: 47997 - RNA, 20 nt, Artificial Sequence
  Synthetic
ggacuucucucaauuuucua

SEQ ID NO: 47998 - RNA, 20 nt, Artificial Sequence
  Synthetic
  misc_feature (6)..(6): n is a, c, g, or u
ggaucnacgaccaccagcac

SEQ ID NO: 47999 - RNA, 20 nt, Artificial Sequence
  Synthetic
ggggacugcgaauuuuggcc

SEQ ID NO: 48000 - RNA, 20 nt, Artificial Sequence
  Synthetic
gaccgccgauugguggaagc

SEQ ID NO: 48001 - RNA, 20 nt, Artificial Sequence
  Synthetic
gaagcaggaggcggaucugc

SEQ ID NO: 48002 - RNA, 20 nt, Artificial Sequence
  Synthetic
  misc_feature (19)..(19): n is a, c, g, or u
gaagcgaagugcacacggnc

SEQ ID NO: 48003 - RNA, 20 nt, Artificial Sequence
  Synthetic
gcuuccaccaaucggcgguc

SEQ ID NO: 48004 - RNA, 20 nt, Artificial Sequence
  Synthetic
ggucuccaugcgacgugcag

SEQ ID NO: 48005 - RNA, 20 nt, Artificial Sequence
  Synthetic
gauugagaucuucugcgacg

SEQ ID NO: 48006 - RNA, 20 nt, Artificial Sequence
  Synthetic
gggucgcaccucucuuuacg

SEQ ID NO: 48007 - RNA, 20 nt, Artificial Sequence
  Synthetic
  misc_feature (9)..(9): n is a, c, g, or u
gauugagancuucgucugcg

SEQ ID NO: 48008 - RNA, 20 nt, Artificial Sequence
  Synthetic
ggguucacacccccacacgg

SEQ ID NO: 48009 - RNA, 20 nt, Artificial Sequence
  Synthetic
ggagguugguaagugauugg

SEQ ID NO: 48010 - RNA, 20 nt, Artificial Sequence
  Synthetic
gacgcaacccccacugguug

SEQ ID NO: 48011 - RNA, 20 nt, Artificial Sequence
  Synthetic
gcgcaugcguggaaccuuug

SEQ ID NO: 48012 - RNA, 20 nt, Artificial Sequence
  Synthetic
gggaacaagagcuacagcau

SEQ ID NO: 48013 - RNA, 20 nt, Artificial Sequence
  Synthetic
ggguugcgucagcaaacacu

SEQ ID NO: 48014 - RNA, 20 nt, Artificial Sequence
  Synthetic
guaacacgagcagggguccu

SEQ ID NO: 48015 - RNA, 20 nt, Artificial Sequence
  Synthetic
guccuuuguuuacgucccgu

SEQ ID NO: 48016 - RNA, 20 nt, Artificial Sequence
  Synthetic
gcaguuuccguccgaggguu

SEQ ID NO: 48017 - RNA, 17 nt, Artificial Sequence
  Synthetic
cgacgggacguaaacaa

SEQ ID NO: 48018 - RNA, 17 nt, Artificial Sequence
  Synthetic
uggccguugccgagcaa

SEQ ID NO: 48019 - RNA, 17 nt, Artificial Sequence
  Synthetic
accccguugcucggcaa

SEQ ID NO: 48020 - RNA, 17 nt, Artificial Sequence
  Synthetic
  misc_feature (6)..(6): n is a, c, g, or u
cccgungucggcuggaa

SEQ ID NO: 48021 - RNA, 17 nt, Artificial Sequence
  Synthetic
ugguaacagcgguauaa

SEQ ID NO: 48022 - RNA, 17 nt, Artificial Sequence
  Synthetic
cgccuguaacacgagca

SEQ ID NO: 48023 - RNA, 17 nt, Artificial Sequence
  Synthetic
aggcaauagucggagca

SEQ ID NO: 48024 - RNA, 17 nt, Artificial Sequence
  Synthetic
caccucugcacgucgca

SEQ ID NO: 48025 - RNA, 17 nt, Artificial Sequence
  Synthetic
cuucgucugcgaggcga

SEQ ID NO: 48026 - RNA, 17 nt, Artificial Sequence
  Synthetic
uguuccaaacccucgga

SEQ ID NO: 48027 - RNA, 17 nt, Artificial Sequence
  Synthetic
caaggaguuccgcagua

SEQ ID NO: 48028 - RNA, 17 nt, Artificial Sequence
  Synthetic
  misc_feature (5)..(5): n is a, c, g, or u
uguungauccgagggua

SEQ ID NO: 48029 - RNA, 17 nt, Artificial Sequence
  Synthetic
  misc_feature (2)..(2): n is a, c, g, or u
cnggauucagcgccgac

SEQ ID NO: 48030 - RNA, 17 nt, Artificial Sequence
  Synthetic
  misc_feature (15)..(15): n is a, c, g, or u
ccguuccagccgacnac

SEQ ID NO: 48031 - RNA, 17 nt, Artificial Sequence
  Synthetic
accccugcucguguuac

SEQ ID NO: 48032 - RNA, 17 nt, Artificial Sequence
  Synthetic
cgccgauugguggaagc

SEQ ID NO: 48033 - RNA, 17 nt, Artificial Sequence
  Synthetic
uuguuagacgacgaggc

SEQ ID NO: 48034 - RNA, 17 nt, Artificial Sequence
  Synthetic
  misc_feature (11)..(11): n is a, c, g, or u
ugcgacccgungucggc

SEQ ID NO: 48035 - RNA, 17 nt, Artificial Sequence
  Synthetic
uuugcauggucccgugc

SEQ ID NO: 48036 - RNA, 17 nt, Artificial Sequence
  Synthetic
uucgcucgcagccgguc

SEQ ID NO: 48037 - RNA, 17 nt, Artificial Sequence
  Synthetic
uccaccaaucggcgguc

SEQ ID NO: 48038 - RNA, 17 nt, Artificial Sequence
  Synthetic
cuccaugcgacgugcag

SEQ ID NO: 48039 - RNA, 17 nt, Artificial Sequence
  Synthetic
acuguuguuagacgacg

SEQ ID NO: 48040 - RNA, 17 nt, Artificial Sequence
  Synthetic
ugagaucuucugcgacg

SEQ ID NO: 48041 - RNA, 17 nt, Artificial Sequence
  Synthetic
ucgcaccucucuuuacg

SEQ ID NO: 48042 - RNA, 17 nt, Artificial Sequence
  Synthetic
  misc_feature (1)..(1): n is a, c, g, or u
ngugcaguuuccguccg

SEQ ID NO: 48043 - RNA, 17 nt, Artificial Sequence
  Synthetic
cgauugguggaagcagg

SEQ ID NO: 48044 - RNA, 17 nt, Artificial Sequence
  Synthetic
uucacacccccacacgg

SEQ ID NO: 48045 - RNA, 17 nt, Artificial Sequence
  Synthetic
cugcuuccaccaaucgg

SEQ ID NO: 48046 - RNA, 17 nt, Artificial Sequence
  Synthetic
agagucuagacucgugg

SEQ ID NO: 48047 - RNA, 17 nt, Artificial Sequence
  Synthetic
ucugccgauccauacug

SEQ ID NO: 48048 - RNA, 17 nt, Artificial Sequence
  Synthetic
cacgagucuagacucug

SEQ ID NO: 48049 - RNA, 17 nt, Artificial Sequence
  Synthetic
aguaguuuccggaagug

SEQ ID NO: 48050 - RNA, 17 nt, Artificial Sequence
  Synthetic
aaaugaggcgcuacgug

SEQ ID NO: 48051 - RNA, 17 nt, Artificial Sequence
  Synthetic
cguagcgccucauuuug

SEQ ID NO: 48052 - RNA, 17 nt, Artificial Sequence
  Synthetic
  misc_feature (17)..(17): n is a, c, g, or u
caaaggacgucccgcgn

SEQ ID NO: 48053 - RNA, 17 nt, Artificial Sequence
  Synthetic
aguuccgcaguauggau

SEQ ID NO: 48054 - RNA, 17 nt, Artificial Sequence
  Synthetic
uauggaugaucugguau

SEQ ID NO: 48055 - RNA, 17 nt, Artificial Sequence
  Synthetic
uugcgucagcaaacacu

SEQ ID NO: 48056 - RNA, 17 nt, Artificial Sequence
  Synthetic
cugaagcggugucgagu

SEQ ID NO: 48057 - RNA, 17 nt, Artificial Sequence
  Synthetic
cuuuguuuacgucccgu

SEQ ID NO: 48058 - RNA, 17 nt, Artificial Sequence
  Synthetic
uuuguucaguggugcgu

SEQ ID NO: 48059 - RNA, 17 nt, Artificial Sequence
  Synthetic
acgcaacccccacuggu

SEQ ID NO: 48060 - RNA, 17 nt, Artificial Sequence
  Synthetic
cgcaacccccacugguu

SEQ ID NO: 48061 - RNA, 20 nt, Artificial Sequence
  Synthetic
auugguaacagcgguauaaa

SEQ ID NO: 48062 - RNA, 20 nt, Artificial Sequence
  Synthetic
cgccgacgggacguaaacaa

SEQ ID NO: 48063 - RNA, 20 nt, Artificial Sequence
  Synthetic
acgcaugcgcugauggccaa

SEQ ID NO: 48064 - RNA, 20 nt, Artificial Sequence
  Synthetic
uuuaccccguugcucggcaa

SEQ ID NO: 48065 - RNA, 20 nt, Artificial Sequence
  Synthetic
  misc_feature (9)..(9): n is a, c, g, or u
cgacccgungucggcuggaa

SEQ ID NO: 48066 - RNA, 20 nt, Artificial Sequence
  Synthetic
aauugguaacagcgguauaa

SEQ ID NO: 48067 - RNA, 20 nt, Artificial Sequence
  Synthetic
ugucuuuucgccaacuuaca

SEQ ID NO: 48068 - RNA, 20 nt, Artificial Sequence
  Synthetic
caccgccuguaacacgagca

SEQ ID NO: 48069 - RNA, 20 nt, Artificial Sequence
  Synthetic
ugcgagcgaaacaagcugca

SEQ ID NO: 48070 - RNA, 20 nt, Artificial Sequence
  Synthetic
  misc_feature (6)..(6): n is a, c, g, or u
uccgcnggauucagcgccga

SEQ ID NO: 48071 - RNA, 20 nt, Artificial Sequence
  Synthetic
  misc_feature (3)..(3): n is a, c, g, or u
cangugcaguuuccguccga

SEQ ID NO: 48072 - RNA, 20 nt, Artificial Sequence
  Synthetic
  misc_feature (18)..(18): n is a, c, g, or u
ucgaguaggucccgaacnga

SEQ ID NO: 48073 - RNA, 20 nt, Artificial Sequence
  Synthetic
agguuccacgcaugcgcuga

SEQ ID NO: 48074 - RNA, 20 nt, Artificial Sequence
  Synthetic
  misc_feature (19)..(19): n is a, c, g, or u
ucugccguuccagccgacna

SEQ ID NO: 48075 - RNA, 20 nt, Artificial Sequence
  Synthetic
cugcaaggaguuccgcagua

SEQ ID NO: 48076 - RNA, 20 nt, Artificial Sequence
  Synthetic
aauuuguucaguggugcgua

SEQ ID NO: 48077 - RNA, 20 nt, Artificial Sequence
  Synthetic
ccuggccguugccgagcaac

SEQ ID NO: 48078 - RNA, 20 nt, Artificial Sequence
  Synthetic
uuugcugacgcaacccccac

SEQ ID NO: 48079 - RNA, 20 nt, Artificial Sequence
  Synthetic
cgucagcaaacacuuggcac

SEQ ID NO: 48080 - RNA, 20 nt, Artificial Sequence
  Synthetic
  misc_feature (17)..(17): n is a, c, g, or u
cgaguaggucccgaacngac

SEQ ID NO: 48081 - RNA, 20 nt, Artificial Sequence
  Synthetic
  misc_feature (17)..(17): n is a, c, g, or u
acaccgcuucagcccunuac

SEQ ID NO: 48082 - RNA, 20 nt, Artificial Sequence
  Synthetic
aggaccccugcucguguuac

SEQ ID NO: 48083 - RNA, 20 nt, Artificial Sequence
  Synthetic
uugcacuaguaaacugagcc

SEQ ID NO: 48084 - RNA, 20 nt, Artificial Sequence
  Synthetic
  misc_feature (12)..(12): n is a, c, g, or u
agacacauccancgauagcc

SEQ ID NO: 48085 - RNA, 20 nt, Artificial Sequence
  Synthetic
cccguugcucggcaacggcc

SEQ ID NO: 48086 - RNA, 20 nt, Artificial Sequence
  Synthetic
cuuccaccaaucggcggucc

SEQ ID NO: 48087 - RNA, 20 nt, Artificial Sequence
  Synthetic
acaccgccuguaacacgagc

SEQ ID NO: 48088 - RNA, 20 nt, Artificial Sequence
  Synthetic
agagaggcaauagucggagc

SEQ ID NO: 48089 - RNA, 20 nt, Artificial Sequence
  Synthetic
cuguuguuagacgacgaggc

SEQ ID NO: 48090 - RNA, 20 nt, Artificial Sequence
  Synthetic
  misc_feature (14)..(14): n is a, c, g, or u
aggugcgacccgungucggc

SEQ ID NO: 48091 - RNA, 20 nt, Artificial Sequence
  Synthetic
uguuucgcucgcagccgguc

SEQ ID NO: 48092 - RNA, 20 nt, Artificial Sequence
  Synthetic
accgccuguaacacgagcag

SEQ ID NO: 48093 - RNA, 20 nt, Artificial Sequence
  Synthetic
uccgcaguauggaucggcag

SEQ ID NO: 48094 - RNA, 20 nt, Artificial Sequence
  Synthetic
uacuagugcaauuuguucag

SEQ ID NO: 48095 - RNA, 20 nt, Artificial Sequence
  Synthetic
uaggaaaauaccuaugggag

SEQ ID NO: 48096 - RNA, 20 nt, Artificial Sequence
  Synthetic
  misc_feature (15)..(15): n is a, c, g, or u
cggaaguguggauangauag

SEQ ID NO: 48097 - RNA, 20 nt, Artificial Sequence
  Synthetic
cuggccguugccgagcaacg

SEQ ID NO: 48098 - RNA, 20 nt, Artificial Sequence
  Synthetic
acuacuguuguuagacgacg

SEQ ID NO: 48099 - RNA, 20 nt, Artificial Sequence
  Synthetic
  misc_feature (4)..(4): n is a, c, g, or u
acangugcaguuuccguccg

SEQ ID NO: 48100 - RNA, 20 nt, Artificial Sequence
  Synthetic
auuggccaucagcgcaugcg

SEQ ID NO: 48101 - RNA, 20 nt, Artificial Sequence
  Synthetic
uaccacagagucuagacucg

SEQ ID NO: 48102 - RNA, 20 nt, Artificial Sequence
  Synthetic
accccugcucguguuacagg

SEQ ID NO: 48103 - RNA, 20 nt, Artificial Sequence
  Synthetic
cgccgauugguggaagcagg

SEQ ID NO: 48104 - RNA, 20 nt, Artificial Sequence
  Synthetic
acuucucucaauuuucuagg

SEQ ID NO: 48105 - RNA, 20 nt, Artificial Sequence
  Synthetic
cuccugcuuccaccaaucgg

SEQ ID NO: 48106 - RNA, 20 nt, Artificial Sequence
  Synthetic
cacagagucuagacucgugg

SEQ ID NO: 48107 - RNA, 20 nt, Artificial Sequence
  Synthetic
cgauagccaggacaaguugg

SEQ ID NO: 48108 - RNA, 20 nt, Artificial Sequence
  Synthetic
uccucugccgauccauacug

SEQ ID NO: 48109 - RNA, 20 nt, Artificial Sequence
  Synthetic
uaccaauuuucuguuaucug

SEQ ID NO: 48110 - RNA, 20 nt, Artificial Sequence
  Synthetic
caccacgagucuagacucug

SEQ ID NO: 48111 - RNA, 20 nt, Artificial Sequence
  Synthetic
acaaaaugaggcgcuacgug

SEQ ID NO: 48112 - RNA, 20 nt, Artificial Sequence
  Synthetic
acacguagcgccucauuuug

SEQ ID NO: 48113 - RNA, 20 nt, Artificial Sequence
  Synthetic
  misc_feature (20)..(20): n is a, c, g, or u
caaauuccagcagucccgan

SEQ ID NO: 48114 - RNA, 20 nt, Artificial Sequence
  Synthetic
  misc_feature (20)..(20): n is a, c, g, or u
aaacaaaggacgucccgcgn

SEQ ID NO: 48115 - RNA, 20 nt, Artificial Sequence
  Synthetic
  misc_feature (20)..(20): n is a, c, g, or u
caacuuguccuggcuaucgn

SEQ ID NO: 48116 - RNA, 20 nt, Artificial Sequence
  Synthetic
aggaggcuguaggcauaaau

SEQ ID NO: 48117 - RNA, 20 nt, Artificial Sequence
  Synthetic
  misc_feature (1)..(1): n is a, c, g, or u
  misc_feature (4)..(4): n is a, c, g, or u
nuuncucccggaccgccgau

SEQ ID NO: 48118 - RNA, 20 nt, Artificial Sequence
  Synthetic
aggaguuccgcaguauggau

SEQ ID NO: 48119 - RNA, 20 nt, Artificial Sequence
  Synthetic
uuauauggaugaucugguau

SEQ ID NO: 48120 - RNA, 20 nt, Artificial Sequence
  Synthetic
aacccccacugguuggggcu

SEQ ID NO: 48121 - RNA, 20 nt, Artificial Sequence
  Synthetic
ugaaccuuuaccccguugcu

SEQ ID NO: 48122 - RNA, 20 nt, Artificial Sequence
  Synthetic
  misc_feature (10)..(10): n is a, c, g, or u
cgucccgcgnaggauccagu

SEQ ID NO: 48123 - RNA, 20 nt, Artificial Sequence
  Synthetic
aggaaaauaccuaugggagu

SEQ ID NO: 48124 - RNA, 20 nt, Artificial Sequence
  Synthetic
auuccuuggacucauaaggu

SEQ ID NO: 48125 - RNA, 20 nt, Artificial Sequence
  Synthetic
cugacgcaacccccacuggu

SEQ ID NO: 48126 - RNA, 20 nt, Artificial Sequence
  Synthetic
cacguagcgccucauuuugu

SEQ ID NO: 48127 - RNA, 20 nt, Artificial Sequence
  Synthetic
ugacgcaacccccacugguu

SEQ ID NO: 48128 - RNA, 17 nt, Artificial Sequence
  Synthetic
gguaacagcgguauaaa

SEQ ID NO: 48129 - RNA, 17 nt, Artificial Sequence
  Synthetic
  misc_feature (4)..(4): n is a, c, g, or u
  misc_feature (9)..(9): n is a, c, g, or u
  misc_feature (13)..(13): n is a, c, g, or u
guanuguunacanagaa

SEQ ID NO: 48130 - RNA, 17 nt, Artificial Sequence
  Synthetic
  misc_feature (4)..(4): n is a, c, g, or u
guungauccgaggguaa

SEQ ID NO: 48131 - RNA, 17 nt, Artificial Sequence
  Synthetic
gccgagcaacgggguaa

SEQ ID NO: 48132 - RNA, 17 nt, Artificial Sequence
  Synthetic
  misc_feature (12)..(12): n is a, c, g, or u
ggacuucaacanaaaca

SEQ ID NO: 48133 - RNA, 17 nt, Artificial Sequence
  Synthetic
  misc_feature (12)..(12): n is a, c, g, or u
gggcccugcuangaaca

SEQ ID NO: 48134 - RNA, 17 nt, Artificial Sequence
  Synthetic
ggguucacacccccaca

SEQ ID NO: 48135 - RNA, 17 nt, Artificial Sequence
  Synthetic
gugaagcgaagugcaca

SEQ ID NO: 48136 - RNA, 17 nt, Artificial Sequence
  Synthetic
  misc_feature (6)..(6): n is a, c, g, or u
gcacanccgagcagcca

SEQ ID NO: 48137 - RNA, 17 nt, Artificial Sequence
  Synthetic
gaacaagagcuacagca

SEQ ID NO: 48138 - RNA, 17 nt, Artificial Sequence
  Synthetic
gagcgaaacaagcugca

SEQ ID NO: 48139 - RNA, 17 nt, Artificial Sequence
  Synthetic
gaggugaaaaaguugca

SEQ ID NO: 48140 - RNA, 17 nt, Artificial Sequence
  Synthetic
guugugcagguuuugca

SEQ ID NO: 48141 - RNA, 17 nt, Artificial Sequence
  Synthetic
guucuucuggacuauca

SEQ ID NO: 48142 - RNA, 17 nt, Artificial Sequence
  Synthetic
  misc_feature (12)..(12): n is a, c, g, or u
gacgggaagaanucaga

SEQ ID NO: 48143 - RNA, 17 nt, Artificial Sequence
  Synthetic
  misc_feature (3)..(3): n is a, c, g, or u
gcnggauucagcgccga

SEQ ID NO: 48144 - RNA, 17 nt, Artificial Sequence
  Synthetic
  misc_feature (4)..(4): n is a, c, g, or u
  misc_feature (10)..(10): n is a, c, g, or u
ggcncuguungauccga

SEQ ID NO: 48145 - RNA, 17 nt, Artificial Sequence
  Synthetic
  misc_feature (4)..(4): n is a, c, g, or u
  misc_feature (7)..(7): n is a, c, g, or u
  misc_feature (13)..(13): n is a, c, g, or u
  misc_feature (16)..(16): n is a, c, g, or u
gganganccugcngcna

SEQ ID NO: 48146 - RNA, 17 nt, Artificial Sequence
  Synthetic
  misc_feature (13)..(13): n is a, c, g, or u
gaaguguggauangaua

SEQ ID NO: 48147 - RNA, 17 nt, Artificial Sequence
  Synthetic
gcuccaaauucuuuaua

SEQ ID NO: 48148 - RNA, 17 nt, Artificial Sequence
  Synthetic
  misc_feature (15)..(15): n is a, c, g, or u
guaggagugggaggnua

SEQ ID NO: 48149 - RNA, 17 nt, Artificial Sequence
  Synthetic
  misc_feature (5)..(5): n is a, c, g, or u
ggaanuagaggacaaac

SEQ ID NO: 48150 - RNA, 17 nt, Artificial Sequence
  Synthetic
  misc_feature (11)..(11): n is a, c, g, or u
guucugugucncugaac

SEQ ID NO: 48151 - RNA, 17 nt, Artificial Sequence
  Synthetic
gaugagaaggaacagac

SEQ ID NO: 48152 - RNA, 17 nt, Artificial Sequence
  Synthetic
guugcucggcaacggcc

SEQ ID NO: 48153 - RNA, 17 nt, Artificial Sequence
  Synthetic
gacugcgaauuuuggcc

SEQ ID NO: 48154 - RNA, 17 nt, Artificial Sequence
  Synthetic
  misc_feature (9)..(9): n is a, c, g, or u
gugggaggnuacggucc

SEQ ID NO: 48155 - RNA, 17 nt, Artificial Sequence
  Synthetic
  misc_feature (4)..(5): n is a, c, g, or u
ggannacccgggugucc

SEQ ID NO: 48156 - RNA, 17 nt, Artificial Sequence
  Synthetic
  misc_feature (13)..(13): n is a, c, g, or u
guuuguccucuanuucc

SEQ ID NO: 48157 - RNA, 17 nt, Artificial Sequence
  Synthetic
gaacuggagccaccagc

SEQ ID NO: 48158 - RNA, 17 nt, Artificial Sequence
  Synthetic
  misc_feature (7)..(7): n is a, c, g, or u
gucccanucgggacugc

SEQ ID NO: 48159 - RNA, 17 nt, Artificial Sequence
  Synthetic
gcucuguauuuuccugc

SEQ ID NO: 48160 - RNA, 17 nt, Artificial Sequence
  Synthetic
gcaggaggcggaucugc

SEQ ID NO: 48161 - RNA, 17 nt, Artificial Sequence
  Synthetic
  misc_feature (2)..(2): n is a, c, g, or u
  misc_feature (5)..(5): n is a, c, g, or u
  misc_feature (16)..(16): n is a, c, g, or u
gnggncuccaccccanc

SEQ ID NO: 48162 - RNA, 17 nt, Artificial Sequence
  Synthetic
  misc_feature (2)..(2): n is a, c, g, or u
  misc_feature (13)..(13): n is a, c, g, or u
  misc_feature (16)..(16): n is a, c, g, or u
gnugggguggagnccnc

SEQ ID NO: 48163 - RNA, 17 nt, Artificial Sequence
  Synthetic
  misc_feature (16)..(16): n is a, c, g, or u
gcgaagugcacacggnc

SEQ ID NO: 48164 - RNA, 17 nt, Artificial Sequence
  Synthetic
ggauccagcugaugguc

SEQ ID NO: 48165 - RNA, 17 nt, Artificial Sequence
  Synthetic
ggcuuucccccacuguc

SEQ ID NO: 48166 - RNA, 17 nt, Artificial Sequence
  Synthetic
  misc_feature (3)..(3): n is a, c, g, or u
  misc_feature (11)..(11): n is a, c, g, or u
gunauacaggnauacag

SEQ ID NO: 48167 - RNA, 17 nt, Artificial Sequence
  Synthetic
ggccaagccccaaccag

SEQ ID NO: 48168 - RNA, 17 nt, Artificial Sequence
  Synthetic
gccuguaacacgagcag

SEQ ID NO: 48169 - RNA, 17 nt, Artificial Sequence
  Synthetic
  misc_feature (5)..(5): n is a, c, g, or u
ggagnccgcguaaagag

SEQ ID NO: 48170 - RNA, 17 nt, Artificial Sequence
  Synthetic
gauugaugaugugagag

SEQ ID NO: 48171 - RNA, 17 nt, Artificial Sequence
  Synthetic
ggcaaacaagguaggag

SEQ ID NO: 48172 - RNA, 17 nt, Artificial Sequence
  Synthetic
gaaaauaccuaugggag

SEQ ID NO: 48173 - RNA, 17 nt, Artificial Sequence
  Synthetic
  misc_feature (9)..(9): n is a, c, g, or u
  misc_feature (15)..(15): n is a, c, g, or u
gaauuugcncugaanag

SEQ ID NO: 48174 - RNA, 17 nt, Artificial Sequence
  Synthetic
  misc_feature (15)..(15): n is a, c, g, or u
gggaguucuucuucnag

SEQ ID NO: 48175 - RNA, 17 nt, Artificial Sequence
  Synthetic
  misc_feature (3)..(3): n is a, c, g, or u
  misc_feature (14)..(14): n is a, c, g, or u
gungauccuggaanuag

SEQ ID NO: 48176 - RNA, 17 nt, Artificial Sequence
  Synthetic
  misc_feature (6)..(6): n is a, c, g, or u
ggaugngugucucuuag

SEQ ID NO: 48177 - RNA, 17 nt, Artificial Sequence
  Synthetic
gccguugccgagcaacg

SEQ ID NO: 48178 - RNA, 17 nt, Artificial Sequence
  Synthetic
  misc_feature (9)..(9): n is a, c, g, or u
  misc_feature (15)..(15): n is a, c, g, or u
gcggacgancccucncg

SEQ ID NO: 48179 - RNA, 17 nt, Artificial Sequence
  Synthetic
  misc_feature (15)..(15): n is a, c, g, or u
gccaacuggauccuncg

SEQ ID NO: 48180 - RNA, 17 nt, Artificial Sequence
  Synthetic
  misc_feature (13)..(13): n is a, c, g, or u
gagcagccauggnaagg

SEQ ID NO: 48181 - RNA, 17 nt, Artificial Sequence
  Synthetic
gacuuuggcuuccuggg

SEQ ID NO: 48182 - RNA, 17 nt, Artificial Sequence
  Synthetic
  misc_feature (15)..(15): n is a, c, g, or u
gguggucuauaagcngg

SEQ ID NO: 48183 - RNA, 17 nt, Artificial Sequence
  Synthetic
  misc_feature (5)..(5): n is a, c, g, or u
  misc_feature (11)..(11): n is a, c, g, or u
gaucnaacagngccugg

SEQ ID NO: 48184 - RNA, 17 nt, Artificial Sequence
  Synthetic
gcauggucccgugcugg

SEQ ID NO: 48185 - RNA, 17 nt, Artificial Sequence
  Synthetic
gguugguaagugauugg

SEQ ID NO: 48186 - RNA, 17 nt, Artificial Sequence
  Synthetic
ggaugaucugguauugg

SEQ ID NO: 48187 - RNA, 17 nt, Artificial Sequence
  Synthetic
  misc_feature (3)..(3): n is a, c, g, or u
  misc_feature (6)..(6): n is a, c, g, or u
  misc_feature (9)..(9): n is a, c, g, or u
  misc_feature (12)..(12): n is a, c, g, or u
gcnccnuunacncaaug

SEQ ID NO: 48188 - RNA, 17 nt, Artificial Sequence
  Synthetic
gaaccaacaagaagaug

SEQ ID NO: 48189 - RNA, 17 nt, Artificial Sequence
  Synthetic
gacucugugguauugug

SEQ ID NO: 48190 - RNA, 17 nt, Artificial Sequence
  Synthetic
  misc_feature (17)..(17): n is a, c, g, or u
gugggucaccauauucn

SEQ ID NO: 48191 - RNA, 17 nt, Artificial Sequence
  Synthetic
  misc_feature (17)..(17): n is a, c, g, or u
gagggaguucuucuucn

SEQ ID NO: 48192 - RNA, 17 nt, Artificial Sequence
  Synthetic
  misc_feature (11)..(11): n is a, c, g, or u
  misc_feature (17)..(17): n is a, c, g, or u
ggcaagcuaunuugugn

SEQ ID NO: 48193 - RNA, 17 nt, Artificial Sequence
  Synthetic
  misc_feature (17)..(17): n is a, c, g, or u
gaaggaguuaaccagun

SEQ ID NO: 48194 - RNA, 17 nt, Artificial Sequence
  Synthetic
gguuggggcuuggccau

SEQ ID NO: 48195 - RNA, 17 nt, Artificial Sequence
  Synthetic
  misc_feature (6)..(6): n is a, c, g, or u
gcccangaugaugggau

SEQ ID NO: 48196 - RNA, 17 nt, Artificial Sequence
  Synthetic
  misc_feature (14)..(14): n is a, c, g, or u
ggaaguguggauangau

SEQ ID NO: 48197 - RNA, 17 nt, Artificial Sequence
  Synthetic
ggagguugguaagugau

SEQ ID NO: 48198 - RNA, 17 nt, Artificial Sequence
  Synthetic
gccuccaagcugugccu

SEQ ID NO: 48199 - RNA, 17 nt, Artificial Sequence
  Synthetic
gcaaacaagguaggagu

SEQ ID NO: 48200 - RNA, 17 nt, Artificial Sequence
  Synthetic
  misc_feature (8)..(8): n is a, c, g, or u
  misc_feature (14)..(14): n is a, c, g, or u
guuaugunauuggnagu

SEQ ID NO: 48201 - RNA, 17 nt, Artificial Sequence
  Synthetic
gugagagaggcaauagu

SEQ ID NO: 48202 - RNA, 17 nt, Artificial Sequence
  Synthetic
guuggaggacaggaggu

SEQ ID NO: 48203 - RNA, 17 nt, Artificial Sequence
  Synthetic
gguaagugauuggaggu

SEQ ID NO: 48204 - RNA, 17 nt, Artificial Sequence
  Synthetic
gguggagagacuggggu

SEQ ID NO: 48205 - RNA, 17 nt, Artificial Sequence
  Synthetic
  misc_feature (12)..(12): n is a, c, g, or u
guuugucaacgnauugu

SEQ ID NO: 48206 - RNA, 17 nt, Artificial Sequence
  Synthetic
  misc_feature (10)..(10): n is a, c, g, or u
  misc_feature (16)..(16): n is a, c, g, or u
gcaagcuaunuugugnu

SEQ ID NO: 48207 - RNA, 17 nt, Artificial Sequence
  Synthetic
gacccuuauaaagaauu

SEQ ID NO: 48208 - RNA, 17 nt, Artificial Sequence
  Synthetic
  misc_feature (5)..(5): n is a, c, g, or u
gauangauaggggcauu

SEQ ID NO: 48209 - RNA, 17 nt, Artificial Sequence
  Synthetic
  misc_feature (7)..(7): n is a, c, g, or u
ggguganuuaaugacuu

SEQ ID NO: 48210 - RNA, 17 nt, Artificial Sequence
  Synthetic
guaagugauuggagguu

SEQ ID NO: 48211 - RNA, 17 nt, Artificial Sequence
  Synthetic
  misc_feature (15)..(15): n is a, c, g, or u
gaguauuuggugucnuu

SEQ ID NO: 48212 - RNA, 17 nt, Artificial Sequence
  Synthetic
gugccuuggguggcuuu

SEQ ID NO: 48213 - RNA, 20 nt, Artificial Sequence
  Synthetic
guaaacugagccaggagaaa

SEQ ID NO: 48214 - RNA, 20 nt, Artificial Sequence
  Synthetic
  misc_feature (15)..(15): n is a, c, g, or u
  misc_feature (18)..(18): n is a, c, g, or u
ggauaaccacauugngunaa

SEQ ID NO: 48215 - RNA, 20 nt, Artificial Sequence
  Synthetic
  misc_feature (9)..(9): n is a, c, g, or u
  misc_feature (12)..(12): n is a, c, g, or u
ggguggagnccncaggcaca

SEQ ID NO: 48216 - RNA, 20 nt, Artificial Sequence
  Synthetic
gaggugaagcgaagugcaca

SEQ ID NO: 48217 - RNA, 20 nt, Artificial Sequence
  Synthetic
  misc_feature (9)..(9): n is a, c, g, or u
gcagcacanccgagcagcca

SEQ ID NO: 48218 - RNA, 20 nt, Artificial Sequence
  Synthetic
  misc_feature (17)..(17): n is a, c, g, or u
ggaaguacaccuccuuncca

SEQ ID NO: 48219 - RNA, 20 nt, Artificial Sequence
  Synthetic
gagaggcaauagucggagca

SEQ ID NO: 48220 - RNA, 20 nt, Artificial Sequence
  Synthetic
gcagaggugaaaaaguugca

SEQ ID NO: 48221 - RNA, 20 nt, Artificial Sequence
  Synthetic
  misc_feature (7)..(7): n is a, c, g, or u
  misc_feature (9)..(11): n is a, c, g, or u
  misc_feature (14)..(14): n is a, c, g, or u
ggguuanannnuanauuuca

SEQ ID NO: 48222 - RNA, 20 nt, Artificial Sequence
  Synthetic
ggcagaugagaaggaacaga

SEQ ID NO: 48223 - RNA, 20 nt, Artificial Sequence
  Synthetic
  misc_feature (3)..(3): n is a, c, g, or u
gancuucgucugcgaggcga

SEQ ID NO: 48224 - RNA, 20 nt, Artificial Sequence
  Synthetic
  misc_feature (6)..(6): n is a, c, g, or u
ggacunuuggacuuucagga

SEQ ID NO: 48225 - RNA, 20 nt, Artificial Sequence
  Synthetic
  misc_feature (15)..(15): n is a, c, g, or u
  misc_feature (18)..(18): n is a, c, g, or u
gguuuggaacagcancanga

SEQ ID NO: 48226 - RNA, 20 nt, Artificial Sequence
  Synthetic
gaagcuccaaauucuuuaua

SEQ ID NO: 48227 - RNA, 20 nt, Artificial Sequence
  Synthetic
gggcuuuaggaaaauaccua

SEQ ID NO: 48228 - RNA, 20 nt, Artificial Sequence
  Synthetic
  misc_feature (5)..(5): n is a, c, g, or u
gacanuauuugcauacuuua

SEQ ID NO: 48229 - RNA, 20 nt, Artificial Sequence
  Synthetic
gcagaugagaaggaacagac

SEQ ID NO: 48230 - RNA, 20 nt, Artificial Sequence
  Synthetic
gccaggacaaguuggaggac

SEQ ID NO: 48231 - RNA, 20 nt, Artificial Sequence
  Synthetic
gaauuuuggccaggacaccc

SEQ ID NO: 48232 - RNA, 20 nt, Artificial Sequence
  Synthetic
gcaaacacuuggcacaggcc

SEQ ID NO: 48233 - RNA, 20 nt, Artificial Sequence
  Synthetic
  misc_feature (15)..(15): n is a, c, g, or u
gugcugguggucgungaucc

SEQ ID NO: 48234 - RNA, 20 nt, Artificial Sequence
  Synthetic
  misc_feature (13)..(13): n is a, c, g, or u
  misc_feature (16)..(16): n is a, c, g, or u
gacugggguuggnuuncucc

SEQ ID NO: 48235 - RNA, 20 nt, Artificial Sequence
  Synthetic
gggccucagcccguuucucc

SEQ ID NO: 48236 - RNA, 20 nt, Artificial Sequence
  Synthetic
  misc_feature (12)..(12): n is a, c, g, or u
ggagugggaggnuacggucc

SEQ ID NO: 48237 - RNA, 20 nt, Artificial Sequence
  Synthetic
  misc_feature (7)..(8): n is a, c, g, or u
gggggannacccgggugucc

SEQ ID NO: 48238 - RNA, 20 nt, Artificial Sequence
  Synthetic
gaauacuaacauugggaagc

SEQ ID NO: 48239 - RNA, 20 nt, Artificial Sequence
  Synthetic
gcauuugguggucuauaagc

SEQ ID NO: 48240 - RNA, 20 nt, Artificial Sequence
  Synthetic
  misc_feature (2)..(2): n is a, c, g, or u
gnauacagaggcaugagagc

SEQ ID NO: 48241 - RNA, 20 nt, Artificial Sequence
  Synthetic
  misc_feature (10)..(10): n is a, c, g, or u
gaagucccanucgggacugc

SEQ ID NO: 48242 - RNA, 20 nt, Artificial Sequence
  Synthetic
gucuguuccuucucaucugc

SEQ ID NO: 48243 - RNA, 20 nt, Artificial Sequence
  Synthetic
gguuuugcauggucccgugc

SEQ ID NO: 48244 - RNA, 20 nt, Artificial Sequence
  Synthetic
gugaaaaaguugcauggugc

SEQ ID NO: 48245 - RNA, 20 nt, Artificial Sequence
  Synthetic
ggcauagcagcaggaugaag

SEQ ID NO: 48246 - RNA, 20 nt, Artificial Sequence
  Synthetic
  misc_feature (6)..(6): n is a, c, g, or u
  misc_feature (14)..(14): n is a, c, g, or u
gcagunauacaggnauacag

SEQ ID NO: 48247 - RNA, 20 nt, Artificial Sequence
  Synthetic
gaagauugaugaugugagag

SEQ ID NO: 48248 - RNA, 20 nt, Artificial Sequence
  Synthetic
  misc_feature (4)..(4): n is a, c, g, or u
  misc_feature (7)..(7): n is a, c, g, or u
gcancangagggaaacauag

SEQ ID NO: 48249 - RNA, 20 nt, Artificial Sequence
  Synthetic
gacuucucucaauuuucuag

SEQ ID NO: 48250 - RNA, 20 nt, Artificial Sequence
  Synthetic
  misc_feature (6)..(6): n is a, c, g, or u
  misc_feature (17)..(17): n is a, c, g, or u
gucgungauccuggaanuag

SEQ ID NO: 48251 - RNA, 20 nt, Artificial Sequence
  Synthetic
  misc_feature (18)..(18): n is a, c, g, or u
gcugccaacuggauccuncg

SEQ ID NO: 48252 - RNA, 20 nt, Artificial Sequence
  Synthetic
  misc_feature (6)..(6): n is a, c, g, or u
ggaugngugucucuuagagg

SEQ ID NO: 48253 - RNA, 20 nt, Artificial Sequence
  Synthetic
gcaaacaagguaggaguggg

SEQ ID NO: 48254 - RNA, 20 nt, Artificial Sequence
  Synthetic
gcucuguauuuuccugcugg

SEQ ID NO: 48255 - RNA, 20 nt, Artificial Sequence
  Synthetic
ggccaagccccaaccagugg

SEQ ID NO: 48256 - RNA, 20 nt, Artificial Sequence
  Synthetic
  misc_feature (5)..(5): n is a, c, g, or u
gauangauaggggcauuugg

SEQ ID NO: 48257 - RNA, 20 nt, Artificial Sequence
  Synthetic
  misc_feature (16)..(16): n is a, c, g, or u
  misc_feature (19)..(19): n is a, c, g, or u
ggguuuggaacagcancang

SEQ ID NO: 48258 - RNA, 20 nt, Artificial Sequence
  Synthetic
  misc_feature (13)..(13): n is a, c, g, or u
  misc_feature (16)..(16): n is a, c, g, or u
  misc_feature (18)..(19): n is a, c, g, or u
gacuguuggcaancuncnng

SEQ ID NO: 48259 - RNA, 20 nt, Artificial Sequence
  Synthetic
  misc_feature (3)..(3): n is a, c, g, or u
  misc_feature (6)..(6): n is a, c, g, or u
  misc_feature (9)..(9): n is a, c, g, or u
  misc_feature (12)..(12): n is a, c, g, or u
  misc_feature (15)..(15): n is a, c, g, or u
gcngcnccnuunacncaaug

SEQ ID NO: 48260 - RNA, 20 nt, Artificial Sequence
  Synthetic
gaagaaccaacaagaagaug

SEQ ID NO: 48261 - RNA, 20 nt, Artificial Sequence
  Synthetic
  misc_feature (3)..(3): n is a, c, g, or u
  misc_feature (5)..(6): n is a, c, g, or u
  misc_feature (12)..(12): n is a, c, g, or u
gunannacaccnugugccug

SEQ ID NO: 48262 - RNA, 20 nt, Artificial Sequence
  Synthetic
gagccaggagaaacgggcug

SEQ ID NO: 48263 - RNA, 20 nt, Artificial Sequence
  Synthetic
  misc_feature (8)..(8): n is a, c, g, or u
gcuaucgnuggaugugucug

SEQ ID NO: 48264 - RNA, 20 nt, Artificial Sequence
  Synthetic
  misc_feature (16)..(16): n is a, c, g, or u
gaaaguuugucaacgnauug

SEQ ID NO: 48265 - RNA, 20 nt, Artificial Sequence
  Synthetic
  misc_feature (9)..(9): n is a, c, g, or u
  misc_feature (15)..(15): n is a, c, g, or u
gguuaugunauuggnaguug

SEQ ID NO: 48266 - RNA, 20 nt, Artificial Sequence
  Synthetic
  misc_feature (9)..(9): n is a, c, g, or u
  misc_feature (12)..(12): n is a, c, g, or u
  misc_feature (15)..(15): n is a, c, g, or u
  misc_feature (20)..(20): n is a, c, g, or u
gguuuaaunccnuunuccan

SEQ ID NO: 48267 - RNA, 20 nt, Artificial Sequence
  Synthetic
  misc_feature (11)..(11): n is a, c, g, or u
  misc_feature (20)..(20): n is a, c, g, or u
gagugggaggnuacgguccn

SEQ ID NO: 48268 - RNA, 20 nt, Artificial Sequence
  Synthetic
  misc_feature (20)..(20): n is a, c, g, or u
guauucccaucccaucaucn

SEQ ID NO: 48269 - RNA, 20 nt, Artificial Sequence
  Synthetic
  misc_feature (20)..(20): n is a, c, g, or u
ggcgagggaguucuucuucn

SEQ ID NO: 48270 - RNA, 20 nt, Artificial Sequence
  Synthetic
  misc_feature (14)..(14): n is a, c, g, or u
  misc_feature (20)..(20): n is a, c, g, or u
ggaacggcagacgnagaagn

SEQ ID NO: 48271 - RNA, 20 nt, Artificial Sequence
  Synthetic
gggcugaggcccacucccau

SEQ ID NO: 48272 - RNA, 20 nt, Artificial Sequence
  Synthetic
  misc_feature (6)..(6): n is a, c, g, or u
  misc_feature (8)..(10): n is a, c, g, or u
  misc_feature (13)..(13): n is a, c, g, or u
gguuanannnuanauuucau

SEQ ID NO: 48273 - RNA, 20 nt, Artificial Sequence
  Synthetic
ggcuuuaggaaaauaccuau

SEQ ID NO: 48274 - RNA, 20 nt, Artificial Sequence
  Synthetic
gggcugaagcggugucgagu

SEQ ID NO: 48275 - RNA, 20 nt, Artificial Sequence
  Synthetic
gaugugagagaggcaauagu

SEQ ID NO: 48276 - RNA, 20 nt, Artificial Sequence
  Synthetic
guugguaagugauuggaggu

SEQ ID NO: 48277 - RNA, 20 nt, Artificial Sequence
  Synthetic
  misc_feature (5)..(6): n is a, c, g, or u
guccnnuuauguaagacugu

SEQ ID NO: 48278 - RNA, 20 nt, Artificial Sequence
  Synthetic
gcuaugccucaucuucuugu

SEQ ID NO: 48279 - RNA, 20 nt, Artificial Sequence
  Synthetic
  misc_feature (5)..(5): n is a, c, g, or u
  misc_feature (19)..(19): n is a, c, g, or u
guuunuguugaagucccanu

SEQ ID NO: 48280 - RNA, 20 nt, Artificial Sequence
  Synthetic
  misc_feature (12)..(13): n is a, c, g, or u
  misc_feature (19)..(19): n is a, c, g, or u
gucuuacauaannggacunu

SEQ ID NO: 48281 - RNA, 20 nt, Artificial Sequence
  Synthetic
guccaaggaauacuaacauu

SEQ ID NO: 48282 - RNA, 20 nt, Artificial Sequence
  Synthetic
  misc_feature (8)..(8): n is a, c, g, or u
guggauangauaggggcauu

SEQ ID NO: 48283 - RNA, 20 nt, Artificial Sequence
  Synthetic
  misc_feature (15)..(15): n is a, c, g, or u
ggaaagaaucccagnggauu

SEQ ID NO: 48284 - RNA, 20 nt, Artificial Sequence
  Synthetic
gacaugaacaaaagaugauu

SEQ ID NO: 48285 - RNA, 20 nt, Artificial Sequence
  Synthetic
  misc_feature (3)..(3): n is a, c, g, or u
  misc_feature (9)..(9): n is a, c, g, or u
  misc_feature (15)..(15): n is a, c, g, or u
gancccucncggggncgcuu

SEQ ID NO: 48286 - RNA, 20 nt, Artificial Sequence
  Synthetic
  misc_feature (10)..(10): n is a, c, g, or u
  misc_feature (16)..(16): n is a, c, g, or u
ggguuaugunauuggnaguu

SEQ ID NO: 48287 - RNA, 20 nt, Artificial Sequence
  Synthetic
  misc_feature (12)..(12): n is a, c, g, or u
  misc_feature (17)..(18): n is a, c, g, or u
ggaaaauauuunguaannuu

SEQ ID NO: 48288 - RNA, 20 nt, Artificial Sequence
  Synthetic
gcugugccuuggguggcuuu

SEQ ID NO: 48289 - RNA, 17 nt, Artificial Sequence
  Synthetic
  misc_feature (6)..(6): n is a, c, g, or u
uggaanuagaggacaaa

SEQ ID NO: 48290 - RNA, 17 nt, Artificial Sequence
  Synthetic
aacugagccaggagaaa

SEQ ID NO: 48291 - RNA, 17 nt, Artificial Sequence
  Synthetic
  misc_feature (5)..(5): n is a, c, g, or u
  misc_feature (8)..(8): n is a, c, g, or u
  misc_feature (14)..(14): n is a, c, g, or u
uuuunganguauunaaa

SEQ ID NO: 48292 - RNA, 17 nt, Artificial Sequence
  Synthetic
cggcagaggagccacaa

SEQ ID NO: 48293 - RNA, 17 nt, Artificial Sequence
  Synthetic
caugcgcugauggccaa

SEQ ID NO: 48294 - RNA, 17 nt, Artificial Sequence
  Synthetic
  misc_feature (9)..(9): n is a, c, g, or u
caaggacanuuggccaa

SEQ ID NO: 48295 - RNA, 17 nt, Artificial Sequence
  Synthetic
  misc_feature (4)..(4): n is a, c, g, or u
  misc_feature (13)..(14): n is a, c, g, or u
ucunucaacgacnngaa

SEQ ID NO: 48296 - RNA, 17 nt, Artificial Sequence
  Synthetic
  misc_feature (10)..(10): n is a, c, g, or u
  misc_feature (15)..(15): n is a, c, g, or u
uauuuuccunugganaa

SEQ ID NO: 48297 - RNA, 17 nt, Artificial Sequence
  Synthetic
  misc_feature (12)..(12): n is a, c, g, or u
  misc_feature (15)..(15): n is a, c, g, or u
uaaccacauugngunaa

SEQ ID NO: 48298 - RNA, 17 nt, Artificial Sequence
  Synthetic
cuccaaauucuuuauaa

SEQ ID NO: 48299 - RNA, 17 nt, Artificial Sequence
  Synthetic
uuggccaauggcaaaca

SEQ ID NO: 48300 - RNA, 17 nt, Artificial Sequence
  Synthetic
  misc_feature (7)..(7): n is a, c, g, or u
  misc_feature (10)..(10): n is a, c, g, or u
cuaugunaanacuaaca

SEQ ID NO: 48301 - RNA, 17 nt, Artificial Sequence
  Synthetic
  misc_feature (6)..(6): n is a, c, g, or u
  misc_feature (9)..(9): n is a, c, g, or u
uggagnccncaggcaca

SEQ ID NO: 48302 - RNA, 17 nt, Artificial Sequence
  Synthetic
cuuuucgccaacuuaca

SEQ ID NO: 48303 - RNA, 17 nt, Artificial Sequence
  Synthetic
ugccccaaagccaccca

SEQ ID NO: 48304 - RNA, 17 nt, Artificial Sequence
  Synthetic
  misc_feature (14)..(14): n is a, c, g, or u
aguacaccuccuuncca

SEQ ID NO: 48305 - RNA, 17 nt, Artificial Sequence
  Synthetic
cccaccuuaugagucca

SEQ ID NO: 48306 - RNA, 17 nt, Artificial Sequence
  Synthetic
  misc_feature (4)..(4): n is a, c, g, or u
aucnacgaccaccagca

SEQ ID NO: 48307 - RNA, 17 nt, Artificial Sequence
  Synthetic
  misc_feature (12)..(12): n is a, c, g, or u
uguccauguucnuagca

SEQ ID NO: 48308 - RNA, 17 nt, Artificial Sequence
  Synthetic
  misc_feature (7)..(8): n is a, c, g, or u
aacgacnngaaggggca

SEQ ID NO: 48309 - RNA, 17 nt, Artificial Sequence
  Synthetic
uggguggcuuuggggca

SEQ ID NO: 48310 - RNA, 17 nt, Artificial Sequence
  Synthetic
ugcacaacucuugcuca

SEQ ID NO: 48311 - RNA, 17 nt, Artificial Sequence
  Synthetic
  misc_feature (1)..(1): n is a, c, g, or u
  misc_feature (4)..(4): n is a, c, g, or u
  misc_feature (6)..(7): n is a, c, g, or u
ncuncnnggggcguuca

SEQ ID NO: 48312 - RNA, 17 nt, Artificial Sequence
  Synthetic
  misc_feature (4)..(4): n is a, c, g, or u
  misc_feature (6)..(8): n is a, c, g, or u
  misc_feature (11)..(11): n is a, c, g, or u
uuanannnuanauuuca

SEQ ID NO: 48313 - RNA, 17 nt, Artificial Sequence
  Synthetic
  misc_feature (2)..(2): n is a, c, g, or u
  misc_feature (5)..(5): n is a, c, g, or u
cnucnaaaacaaaaaga

SEQ ID NO: 48314 - RNA, 17 nt, Artificial Sequence
  Synthetic
  misc_feature (6)..(6): n is a, c, g, or u
ugaaunucaggaaaaga

SEQ ID NO: 48315 - RNA, 17 nt, Artificial Sequence
  Synthetic
agaugagaaggaacaga

SEQ ID NO: 48316 - RNA, 17 nt, Artificial Sequence
  Synthetic
  misc_feature (4)..(4): n is a, c, g, or u
cggnccggcagaugaga

SEQ ID NO: 48317 - RNA, 17 nt, Artificial Sequence
  Synthetic
  misc_feature (3)..(3): n is a, c, g, or u
cunuuggacuuucagga

SEQ ID NO: 48318 - RNA, 17 nt, Artificial Sequence
  Synthetic
  misc_feature (7)..(7): n is a, c, g, or u
agcccangaugauggga

SEQ ID NO: 48319 - RNA, 17 nt, Artificial Sequence
  Synthetic
  misc_feature (12)..(12): n is a, c, g, or u
  misc_feature (15)..(15): n is a, c, g, or u
uuggaacagcancanga

SEQ ID NO: 48320 - RNA, 17 nt, Artificial Sequence
  Synthetic
  misc_feature (15)..(15): n is a, c, g, or u
aguaggucccgaacnga

SEQ ID NO: 48321 - RNA, 17 nt, Artificial Sequence
  Synthetic
  misc_feature (9)..(9): n is a, c, g, or u
  misc_feature (15)..(15): n is a, c, g, or u
cccaagcgnccccgnga

SEQ ID NO: 48322 - RNA, 17 nt, Artificial Sequence
  Synthetic
  misc_feature (5)..(5): n is a, c, g, or u
  misc_feature (14)..(15): n is a, c, g, or u
cucunucaacgacnnga

SEQ ID NO: 48323 - RNA, 17 nt, Artificial Sequence
  Synthetic
  misc_feature (12)..(12): n is a, c, g, or u
ccuaaagcccangauga

SEQ ID NO: 48324 - RNA, 17 nt, Artificial Sequence
  Synthetic
  misc_feature (2)..(2): n is a, c, g, or u
  misc_feature (5)..(5): n is a, c, g, or u
anagnggauccagcuga

SEQ ID NO: 48325 - RNA, 17 nt, Artificial Sequence
  Synthetic
uuccacgcaugcgcuga

SEQ ID NO: 48326 - RNA, 17 nt, Artificial Sequence
  Synthetic
  misc_feature (12)..(12): n is a, c, g, or u
  misc_feature (16)..(16): n is a, c, g, or u
uaaagcaucccnguana

SEQ ID NO: 48327 - RNA, 17 nt, Artificial Sequence
  Synthetic
  misc_feature (16)..(16): n is a, c, g, or u
agggaguucuucuucna

SEQ ID NO: 48328 - RNA, 17 nt, Artificial Sequence
  Synthetic
  misc_feature (1)..(1): n is a, c, g, or u
  misc_feature (16)..(16): n is a, c, g, or u
nccgagcagccauggna

SEQ ID NO: 48329 - RNA, 17 nt, Artificial Sequence
  Synthetic
  misc_feature (12)..(12): n is a, c, g, or u
ucuuguucccangaaua

SEQ ID NO: 48330 - RNA, 17 nt, Artificial Sequence
  Synthetic
  misc_feature (1)..(1): n is a, c, g, or u
  misc_feature (3)..(3): n is a, c, g, or u
  misc_feature (5)..(6): n is a, c, g, or u
ncnunnucaggauaaua

SEQ ID NO: 48331 - RNA, 17 nt, Artificial Sequence
  Synthetic
uauuccuuggacucaua

SEQ ID NO: 48332 - RNA, 17 nt, Artificial Sequence
  Synthetic
ucuggcuuuuaguuaua

SEQ ID NO: 48333 - RNA, 17 nt, Artificial Sequence
  Synthetic
cuuuaggaaaauaccua

SEQ ID NO: 48334 - RNA, 17 nt, Artificial Sequence
  Synthetic
cuucucucaauuuucua

SEQ ID NO: 48335 - RNA, 17 nt, Artificial Sequence
  Synthetic
uuucucuuccaaaagua

SEQ ID NO: 48336 - RNA, 17 nt, Artificial Sequence
  Synthetic
uuguucaguggugcgua

SEQ ID NO: 48337 - RNA, 17 nt, Artificial Sequence
  Synthetic
  misc_feature (2)..(2): n is a, c, g, or u
anuauuugcauacuuua

SEQ ID NO: 48338 - RNA, 17 nt, Artificial Sequence
  Synthetic
  misc_feature (13)..(13): n is a, c, g, or u
uaaggugggaaanuuua

SEQ ID NO: 48339 - RNA, 17 nt, Artificial Sequence
  Synthetic
acugagccaggagaaac

SEQ ID NO: 48340 - RNA, 17 nt, Artificial Sequence
  Synthetic
  misc_feature (7)..(7): n is a, c, g, or u
  misc_feature (13)..(13): n is a, c, g, or u
cuguaunacugcnaaac

SEQ ID NO: 48341 - RNA, 17 nt, Artificial Sequence
  Synthetic
  misc_feature (5)..(5): n is a, c, g, or u
ucggnugugcugccaac

SEQ ID NO: 48342 - RNA, 17 nt, Artificial Sequence
  Synthetic
  misc_feature (10)..(10): n is a, c, g, or u
aagagacacncauccac

SEQ ID NO: 48343 - RNA, 17 nt, Artificial Sequence
  Synthetic
  misc_feature (3)..(3): n is a, c, g, or u
ucnacgaccaccagcac

SEQ ID NO: 48344 - RNA, 17 nt, Artificial Sequence
  Synthetic
cagcaaacacuuggcac

SEQ ID NO: 48345 - RNA, 17 nt, Artificial Sequence
  Synthetic
  misc_feature (11)..(11): n is a, c, g, or u
ucaaucuucungaagac

SEQ ID NO: 48346 - RNA, 17 nt, Artificial Sequence
  Synthetic
  misc_feature (4)..(5): n is a, c, g, or u
ugannuucgcuccagac

SEQ ID NO: 48347 - RNA, 17 nt, Artificial Sequence
  Synthetic
cuuagagguggagagac

SEQ ID NO: 48348 - RNA, 17 nt, Artificial Sequence
  Synthetic
aggacaaguuggaggac

SEQ ID NO: 48349 - RNA, 17 nt, Artificial Sequence
  Synthetic
  misc_feature (14)..(14): n is a, c, g, or u
acuguguauuuaangac

SEQ ID NO: 48350 - RNA, 17 nt, Artificial Sequence
  Synthetic
  misc_feature (3)..(3): n is a, c, g, or u
  misc_feature (8)..(8): n is a, c, g, or u
  misc_feature (15)..(15): n is a, c, g, or u
cuncuuunaauccunac

SEQ ID NO: 48351 - RNA, 17 nt, Artificial Sequence
  Synthetic
  misc_feature (7)..(7): n is a, c, g, or u
  misc_feature (13)..(13): n is a, c, g, or u
cuguuungcagunauac

SEQ ID NO: 48352 - RNA, 17 nt, Artificial Sequence
  Synthetic
  misc_feature (14)..(14): n is a, c, g, or u
ccgcuucagcccunuac

SEQ ID NO: 48353 - RNA, 17 nt, Artificial Sequence
  Synthetic
  misc_feature (6)..(6): n is a, c, g, or u
  misc_feature (9)..(9): n is a, c, g, or u
ucaaunggncgauuuac

SEQ ID NO: 48354 - RNA, 17 nt, Artificial Sequence
  Synthetic
  misc_feature (12)..(12): n is a, c, g, or u
aaggugggaaanuuuac

SEQ ID NO: 48355 - RNA, 17 nt, Artificial Sequence
  Synthetic
auuuuggccaggacacc

SEQ ID NO: 48356 - RNA, 17 nt, Artificial Sequence
  Synthetic
  misc_feature (4)..(4): n is a, c, g, or u
  misc_feature (7)..(7): n is a, c, g, or u
cucnacncaguuccacc

SEQ ID NO: 48357 - RNA, 17 nt, Artificial Sequence
  Synthetic
  misc_feature (13)..(14): n is a, c, g, or u
uuucuagggggannacc

SEQ ID NO: 48358 - RNA, 17 nt, Artificial Sequence
  Synthetic
  misc_feature (6)..(6): n is a, c, g, or u
  misc_feature (14)..(14): n is a, c, g, or u
cagganggucaaunacc

SEQ ID NO: 48359 - RNA, 17 nt, Artificial Sequence
  Synthetic
ugugggggugugaaccc

SEQ ID NO: 48360 - RNA, 17 nt, Artificial Sequence
  Synthetic
uuuuggccaggacaccc

SEQ ID NO: 48361 - RNA, 17 nt, Artificial Sequence
  Synthetic
  misc_feature (4)..(4): n is a, c, g, or u
caanuuauugcccaccc

SEQ ID NO: 48362 - RNA, 17 nt, Artificial Sequence
  Synthetic
  misc_feature (12)..(13): n is a, c, g, or u
uucuagggggannaccc

SEQ ID NO: 48363 - RNA, 17 nt, Artificial Sequence
  Synthetic
cacuaguaaacugagcc

SEQ ID NO: 48364 - RNA, 17 nt, Artificial Sequence
  Synthetic
  misc_feature (9)..(9): n is a, c, g, or u
cacauccancgauagcc

SEQ ID NO: 48365 - RNA, 17 nt, Artificial Sequence
  Synthetic
aacacuuggcacaggcc

SEQ ID NO: 48366 - RNA, 17 nt, Artificial Sequence
  Synthetic
  misc_feature (8)..(8): n is a, c, g, or u
  misc_feature (14)..(14): n is a, c, g, or u
ucggaucnaacagngcc

SEQ ID NO: 48367 - RNA, 17 nt, Artificial Sequence
  Synthetic
  misc_feature (12)..(12): n is a, c, g, or u
cugguggucgungaucc

SEQ ID NO: 48368 - RNA, 17 nt, Artificial Sequence
  Synthetic
  misc_feature (10)..(10): n is a, c, g, or u
  misc_feature (13)..(13): n is a, c, g, or u
ugggguuggnuuncucc

SEQ ID NO: 48369 - RNA, 17 nt, Artificial Sequence
  Synthetic
ccucagcccguuucucc

SEQ ID NO: 48370 - RNA, 17 nt, Artificial Sequence
  Synthetic
ccaccaaucggcggucc

SEQ ID NO: 48371 - RNA, 17 nt, Artificial Sequence
  Synthetic
uguccuccaacuugucc

SEQ ID NO: 48372 - RNA, 17 nt, Artificial Sequence
  Synthetic
uaaugacuuuggcuucc

SEQ ID NO: 48373 - RNA, 17 nt, Artificial Sequence
  Synthetic
uacuaacauugggaagc

SEQ ID NO: 48374 - RNA, 17 nt, Artificial Sequence
  Synthetic
uuugguggucuauaagc

SEQ ID NO: 48375 - RNA, 17 nt, Artificial Sequence
  Synthetic
agaugaggcauagcagc

SEQ ID NO: 48376 - RNA, 17 nt, Artificial Sequence
  Synthetic
cuuguuucgcucgcagc

SEQ ID NO: 48377 - RNA, 17 nt, Artificial Sequence
  Synthetic
cuuuccagaccaucagc

SEQ ID NO: 48378 - RNA, 17 nt, Artificial Sequence
  Synthetic
uacagaggcaugagagc

SEQ ID NO: 48379 - RNA, 17 nt, Artificial Sequence
  Synthetic
ccgccuguaacacgagc

SEQ ID NO: 48380 - RNA, 17 nt, Artificial Sequence
  Synthetic
  misc_feature (13)..(13): n is a, c, g, or u
uuguccauguucnuagc

SEQ ID NO: 48381 - RNA, 17 nt, Artificial Sequence
  Synthetic
  misc_feature (3)..(3): n is a, c, g, or u
  misc_feature (9)..(9): n is a, c, g, or u
cgngagggnucguccgc

SEQ ID NO: 48382 - RNA, 17 nt, Artificial Sequence
  Synthetic
  misc_feature (14)..(14): n is a, c, g, or u
ccaacuggauccuncgc

SEQ ID NO: 48383 - RNA, 17 nt, Artificial Sequence
  Synthetic
ucuuccaaaaguaaggc

SEQ ID NO: 48384 - RNA, 17 nt, Artificial Sequence
  Synthetic
  misc_feature (15)..(15): n is a, c, g, or u
cauacuuuauggaangc

SEQ ID NO: 48385 - RNA, 17 nt, Artificial Sequence
  Synthetic
  misc_feature (5)..(6): n is a, c, g, or u
  misc_feature (12)..(12): n is a, c, g, or u
  misc_feature (15)..(15): n is a, c, g, or u
acuannucccungcngc

SEQ ID NO: 48386 - RNA, 17 nt, Artificial Sequence
  Synthetic
uguuccuucucaucugc

SEQ ID NO: 48387 - RNA, 17 nt, Artificial Sequence
  Synthetic
aaaaaguugcauggugc

SEQ ID NO: 48388 - RNA, 17 nt, Artificial Sequence
  Synthetic
uugagcaagaguugugc

SEQ ID NO: 48389 - RNA, 17 nt, Artificial Sequence
  Synthetic
  misc_feature (7)..(7): n is a, c, g, or u
  misc_feature (16)..(16): n is a, c, g, or u
cucuguncccaauccnc

SEQ ID NO: 48390 - RNA, 17 nt, Artificial Sequence
  Synthetic
  misc_feature (1)..(1): n is a, c, g, or u
  misc_feature (10)..(10): n is a, c, g, or u
  misc_feature (16)..(16): n is a, c, g, or u
ngcggacgancccucnc

SEQ ID NO: 48391 - RNA, 17 nt, Artificial Sequence
  Synthetic
auggacaacaucacauc

SEQ ID NO: 48392 - RNA, 17 nt, Artificial Sequence
  Synthetic
uaguuauauggaugauc

SEQ ID NO: 48393 - RNA, 17 nt, Artificial Sequence
  Synthetic
  misc_feature (2)..(2): n is a, c, g, or u
  misc_feature (5)..(5): n is a, c, g, or u
cnaancauaccgcucuc

SEQ ID NO: 48394 - RNA, 17 nt, Artificial Sequence
  Synthetic
  misc_feature (13)..(13): n is a, c, g, or u
aguaugcaaauanuguc

SEQ ID NO: 48395 - RNA, 17 nt, Artificial Sequence
  Synthetic
  misc_feature (1)..(1): n is a, c, g, or u
  misc_feature (15)..(15): n is a, c, g, or u
nuguugaagucccanuc

SEQ ID NO: 48396 - RNA, 17 nt, Artificial Sequence
  Synthetic
  misc_feature (9)..(10): n is a, c, g, or u
  misc_feature (12)..(12): n is a, c, g, or u
  misc_feature (14)..(15): n is a, c, g, or u
ugauuaacnncnunnuc

SEQ ID NO: 48397 - RNA, 17 nt, Artificial Sequence
  Synthetic
  misc_feature (6)..(6): n is a, c, g, or u
  misc_feature (15)..(15): n is a, c, g, or u
ugaugnaaaugaaunuc

SEQ ID NO: 48398 - RNA, 17 nt, Artificial Sequence
  Synthetic
  misc_feature (5)..(5): n is a, c, g, or u
uaucnuauccacacuuc

SEQ ID NO: 48399 - RNA, 17 nt, Artificial Sequence
  Synthetic
cuucuuguugguucuuc

SEQ ID NO: 48400 - RNA, 17 nt, Artificial Sequence
  Synthetic
  misc_feature (1)..(1): n is a, c, g, or u
  misc_feature (13)..(13): n is a, c, g, or u
nuucuucccgucnguuc

SEQ ID NO: 48401 - RNA, 17 nt, Artificial Sequence
  Synthetic
  misc_feature (3)..(3): n is a, c, g, or u
  misc_feature (6)..(6): n is a, c, g, or u
uunggngugcaauguuc

SEQ ID NO: 48402 - RNA, 17 nt, Artificial Sequence
  Synthetic
  misc_feature (1)..(1): n is a, c, g, or u
  misc_feature (7)..(7): n is a, c, g, or u
nggacunuuggacuuuc

SEQ ID NO: 48403 - RNA, 17 nt, Artificial Sequence
  Synthetic
cuaacaacaguaguuuc

SEQ ID NO: 48404 - RNA, 17 nt, Artificial Sequence
  Synthetic
  misc_feature (12)..(12): n is a, c, g, or u
aacggcagacgnagaag

SEQ ID NO: 48405 - RNA, 17 nt, Artificial Sequence
  Synthetic
  misc_feature (3)..(3): n is a, c, g, or u
  misc_feature (12)..(13): n is a, c, g, or u
cunucaacgacnngaag

SEQ ID NO: 48406 - RNA, 17 nt, Artificial Sequence
  Synthetic
auagcagcaggaugaag

SEQ ID NO: 48407 - RNA, 17 nt, Artificial Sequence
  Synthetic
  misc_feature (3)..(3): n is a, c, g, or u
  misc_feature (7)..(7): n is a, c, g, or u
ccnguanagggcugaag

SEQ ID NO: 48408 - RNA, 17 nt, Artificial Sequence
  Synthetic
cagaaaauugguaacag

SEQ ID NO: 48409 - RNA, 17 nt, Artificial Sequence
  Synthetic
aacuaaaagccagacag

SEQ ID NO: 48410 - RNA, 17 nt, Artificial Sequence
  Synthetic
ucuggaaagaaucccag

SEQ ID NO: 48411 - RNA, 17 nt, Artificial Sequence
  Synthetic
aaaagaugauuaggcag

SEQ ID NO: 48412 - RNA, 17 nt, Artificial Sequence
  Synthetic
  misc_feature (11)..(11): n is a, c, g, or u
auccacaggcnaugcag

SEQ ID NO: 48413 - RNA, 17 nt, Artificial Sequence
  Synthetic
uagugcaauuuguucag

SEQ ID NO: 48414 - RNA, 17 nt, Artificial Sequence
  Synthetic
  misc_feature (1)..(1): n is a, c, g, or u
nauagcuugccugagag

SEQ ID NO: 48415 - RNA, 17 nt, Artificial Sequence
  Synthetic
agguguacuuccuagag

SEQ ID NO: 48416 - RNA, 17 nt, Artificial Sequence
  Synthetic
  misc_feature (5)..(6): n is a, c, g, or u
  misc_feature (15)..(15): n is a, c, g, or u
cuucnngucguuganag

SEQ ID NO: 48417 - RNA, 17 nt, Artificial Sequence
  Synthetic
  misc_feature (12)..(12): n is a, c, g, or u
  misc_feature (15)..(15): n is a, c, g, or u
aauucauuuuungunag

SEQ ID NO: 48418 - RNA, 17 nt, Artificial Sequence
  Synthetic
  misc_feature (1)..(1): n is a, c, g, or u
  misc_feature (4)..(4): n is a, c, g, or u
ncangagggaaacauag

SEQ ID NO: 48419 - RNA, 17 nt, Artificial Sequence
  Synthetic
  misc_feature (12)..(12): n is a, c, g, or u
aaguguggauangauag

SEQ ID NO: 48420 - RNA, 17 nt, Artificial Sequence
  Synthetic
uucucucaauuuucuag

SEQ ID NO: 48421 - RNA, 17 nt, Artificial Sequence
  Synthetic
augagaaggaacagacg

SEQ ID NO: 48422 - RNA, 17 nt, Artificial Sequence
  Synthetic
  misc_feature (5)..(5): n is a, c, g, or u
  misc_feature (11)..(11): n is a, c, g, or u
aggcncuguungauccg

SEQ ID NO: 48423 - RNA, 17 nt, Artificial Sequence
  Synthetic
  misc_feature (1)..(1): n is a, c, g, or u
ncuucgucugcgaggcg

SEQ ID NO: 48424 - RNA, 17 nt, Artificial Sequence
  Synthetic
  misc_feature (6)..(6): n is a, c, g, or u
ugagancuucgucugcg

SEQ ID NO: 48425 - RNA, 17 nt, Artificial Sequence
  Synthetic
cacagagucuagacucg

SEQ ID NO: 48426 - RNA, 17 nt, Artificial Sequence
  Synthetic
uccuuggacucauaagg

SEQ ID NO: 48427 - RNA, 17 nt, Artificial Sequence
  Synthetic
acaaguuggaggacagg

SEQ ID NO: 48428 - RNA, 17 nt, Artificial Sequence
  Synthetic
ccugcucguguuacagg

SEQ ID NO: 48429 - RNA, 17 nt, Artificial Sequence
  Synthetic
  misc_feature (3)..(3): n is a, c, g, or u
ugngugucucuuagagg

SEQ ID NO: 48430 - RNA, 17 nt, Artificial Sequence
  Synthetic
uugguggaagcaggagg

SEQ ID NO: 48431 - RNA, 17 nt, Artificial Sequence
  Synthetic
ucucucaauuuucuagg

SEQ ID NO: 48432 - RNA, 17 nt, Artificial Sequence
  Synthetic
  misc_feature (2)..(2): n is a, c, g, or u
  misc_feature (4)..(4): n is a, c, g, or u
  misc_feature (13)..(13): n is a, c, g, or u
angnucuuuguanuagg

SEQ ID NO: 48433 - RNA, 17 nt, Artificial Sequence
  Synthetic
  misc_feature (1)..(1): n is a, c, g, or u
  misc_feature (3)..(4): n is a, c, g, or u
ncnnggggcguucacgg

SEQ ID NO: 48434 - RNA, 17 nt, Artificial Sequence
  Synthetic
  misc_feature (11)..(11): n is a, c, g, or u
cugggaggagnuggggg

SEQ ID NO: 48435 - RNA, 17 nt, Artificial Sequence
  Synthetic
  misc_feature (12)..(12): n is a, c, g, or u
acgguggccugnugggg

SEQ ID NO: 48436 - RNA, 17 nt, Artificial Sequence
  Synthetic
  misc_feature (10)..(10): n is a, c, g, or u
uguauuuaangacuggg

SEQ ID NO: 48437 - RNA, 17 nt, Artificial Sequence
  Synthetic
aacaagguaggaguggg

SEQ ID NO: 48438 - RNA, 17 nt, Artificial Sequence
  Synthetic
ccaagcugugccuuggg

SEQ ID NO: 48439 - RNA, 17 nt, Artificial Sequence
  Synthetic
  misc_feature (8)..(8): n is a, c, g, or u
aucuucungaagacugg

SEQ ID NO: 48440 - RNA, 17 nt, Artificial Sequence
  Synthetic
cuguauuuuccugcugg

SEQ ID NO: 48441 - RNA, 17 nt, Artificial Sequence
  Synthetic
uaaaagccagacagugg

SEQ ID NO: 48442 - RNA, 17 nt, Artificial Sequence
  Synthetic
caagccccaaccagugg

SEQ ID NO: 48443 - RNA, 17 nt, Artificial Sequence
  Synthetic
  misc_feature (2)..(2): n is a, c, g, or u
ancaggccaccgugugg

SEQ ID NO: 48444 - RNA, 17 nt, Artificial Sequence
  Synthetic
  misc_feature (1)..(1): n is a, c, g, or u
  misc_feature (14)..(14): n is a, c, g, or u
ngacugggaggagnugg

SEQ ID NO: 48445 - RNA, 17 nt, Artificial Sequence
  Synthetic
cccggaccgccgauugg

SEQ ID NO: 48446 - RNA, 17 nt, Artificial Sequence
  Synthetic
cccaaggcacagcuugg

SEQ ID NO: 48447 - RNA, 17 nt, Artificial Sequence
  Synthetic
uagccaggacaaguugg

SEQ ID NO: 48448 - RNA, 17 nt, Artificial Sequence
  Synthetic
  misc_feature (2)..(2): n is a, c, g, or u
angauaggggcauuugg

SEQ ID NO: 48449 - RNA, 17 nt, Artificial Sequence
  Synthetic
  misc_feature (13)..(13): n is a, c, g, or u
  misc_feature (16)..(16): n is a, c, g, or u
uuuggaacagcancang

SEQ ID NO: 48450 - RNA, 17 nt, Artificial Sequence
  Synthetic
  misc_feature (10)..(10): n is a, c, g, or u
  misc_feature (16)..(16): n is a, c, g, or u
ccccaagcgnccccgng

SEQ ID NO: 48451 - RNA, 17 nt, Artificial Sequence
  Synthetic
  misc_feature (10)..(10): n is a, c, g, or u
  misc_feature (13)..(13): n is a, c, g, or u
  misc_feature (15)..(16): n is a, c, g, or u
uguuggcaancuncnng

SEQ ID NO: 48452 - RNA, 17 nt, Artificial Sequence
  Synthetic
uggugacccacaaaaug

SEQ ID NO: 48453 - RNA, 17 nt, Artificial Sequence
  Synthetic
  misc_feature (3)..(3): n is a, c, g, or u
ucnaaaacaaaaagaug

SEQ ID NO: 48454 - RNA, 17 nt, Artificial Sequence
  Synthetic
  misc_feature (9)..(9): n is a, c, g, or u
aaucuucungaagacug

SEQ ID NO: 48455 - RNA, 17 nt, Artificial Sequence
  Synthetic
uagagguggagagacug

SEQ ID NO: 48456 - RNA, 17 nt, Artificial Sequence
  Synthetic
  misc_feature (12)..(12): n is a, c, g, or u
uuccacugcaungccug

SEQ ID NO: 48457 - RNA, 17 nt, Artificial Sequence
  Synthetic
  misc_feature (2)..(3): n is a, c, g, or u
  misc_feature (9)..(9): n is a, c, g, or u
annacaccnugugccug

SEQ ID NO: 48458 - RNA, 17 nt, Artificial Sequence
  Synthetic
ccaggagaaacgggcug

SEQ ID NO: 48459 - RNA, 17 nt, Artificial Sequence
  Synthetic
caauuuucuguuaucug

SEQ ID NO: 48460 - RNA, 17 nt, Artificial Sequence
  Synthetic
  misc_feature (5)..(5): n is a, c, g, or u
aucgnuggaugugucug

SEQ ID NO: 48461 - RNA, 17 nt, Artificial Sequence
  Synthetic
agaauuuggagcuucug

SEQ ID NO: 48462 - RNA, 17 nt, Artificial Sequence
  Synthetic
cuaaaagccagacagug

SEQ ID NO: 48463 - RNA, 17 nt, Artificial Sequence
  Synthetic
ccaagccccaaccagug

SEQ ID NO: 48464 - RNA, 17 nt, Artificial Sequence
  Synthetic
  misc_feature (8)..(8): n is a, c, g, or u
uggugucnuuuggagug

SEQ ID NO: 48465 - RNA, 17 nt, Artificial Sequence
  Synthetic
  misc_feature (5)..(5): n is a, c, g, or u
cccancaggccaccgug

SEQ ID NO: 48466 - RNA, 17 nt, Artificial Sequence
  Synthetic
  misc_feature (3)..(3): n is a, c, g, or u
cancaggccaccgugug

SEQ ID NO: 48467 - RNA, 17 nt, Artificial Sequence
  Synthetic
  misc_feature (2)..(2): n is a, c, g, or u
  misc_feature (15)..(15): n is a, c, g, or u
angacugggaggagnug

SEQ ID NO: 48468 - RNA, 17 nt, Artificial Sequence
  Synthetic
  misc_feature (15)..(15): n is a, c, g, or u
cacacgguggccugnug

SEQ ID NO: 48469 - RNA, 17 nt, Artificial Sequence
  Synthetic
  misc_feature (9)..(9): n is a, c, g, or u
  misc_feature (15)..(15): n is a, c, g, or u
caagcuaunuugugnug

SEQ ID NO: 48470 - RNA, 17 nt, Artificial Sequence
  Synthetic
  misc_feature (2)..(2): n is a, c, g, or u
  misc_feature (12)..(12): n is a, c, g, or u
  misc_feature (14)..(15): n is a, c, g, or u
anauuagacaanunnug

SEQ ID NO: 48471 - RNA, 17 nt, Artificial Sequence
  Synthetic
  misc_feature (13)..(13): n is a, c, g, or u
aguuugucaacgnauug

SEQ ID NO: 48472 - RNA, 17 nt, Artificial Sequence
  Synthetic
uggaugaucugguauug

SEQ ID NO: 48473 - RNA, 17 nt, Artificial Sequence
  Synthetic
  misc_feature (5)..(5): n is a, c, g, or u
  misc_feature (11)..(11): n is a, c, g, or u
ccucncggggncgcuug

SEQ ID NO: 48474 - RNA, 17 nt, Artificial Sequence
  Synthetic
  misc_feature (9)..(9): n is a, c, g, or u
uguacaaunugaucuug

SEQ ID NO: 48475 - RNA, 17 nt, Artificial Sequence
  Synthetic
  misc_feature (6)..(6): n is a, c, g, or u
  misc_feature (12)..(12): n is a, c, g, or u
uaugunauuggnaguug

SEQ ID NO: 48476 - RNA, 17 nt, Artificial Sequence
  Synthetic
uaagugauuggagguug

SEQ ID NO: 48477 - RNA, 17 nt, Artificial Sequence
  Synthetic
caugcguggaaccuuug

SEQ ID NO: 48478 - RNA, 17 nt, Artificial Sequence
  Synthetic
ugccuuggguggcuuug

SEQ ID NO: 48479 - RNA, 17 nt, Artificial Sequence
  Synthetic
  misc_feature (17)..(17): n is a, c, g, or u
caacagucuuacauaan

SEQ ID NO: 48480 - RNA, 17 nt, Artificial Sequence
  Synthetic
  misc_feature (6)..(6): n is a, c, g, or u
  misc_feature (9)..(9): n is a, c, g, or u
  misc_feature (12)..(12): n is a, c, g, or u
  misc_feature (17)..(17): n is a, c, g, or u
uuaaunccnuunuccan

SEQ ID NO: 48481 - RNA, 17 nt, Artificial Sequence
  Synthetic
  misc_feature (17)..(17): n is a, c, g, or u
auuccagcagucccgan

SEQ ID NO: 48482 - RNA, 17 nt, Artificial Sequence
  Synthetic
  misc_feature (8)..(8): n is a, c, g, or u
  misc_feature (11)..(11): n is a, c, g, or u
  misc_feature (17)..(17): n is a, c, g, or u
uaaaucgnccnauugan

SEQ ID NO: 48483 - RNA, 17 nt, Artificial Sequence
  Synthetic
  misc_feature (13)..(13): n is a, c, g, or u
  misc_feature (17)..(17): n is a, c, g, or u
cuaaagcaucccnguan

SEQ ID NO: 48484 - RNA, 17 nt, Artificial Sequence
  Synthetic
  misc_feature (13)..(13): n is a, c, g, or u
  misc_feature (17)..(17): n is a, c, g, or u
cgcuucagcccunuacn

SEQ ID NO: 48485 - RNA, 17 nt, Artificial Sequence
  Synthetic
  misc_feature (8)..(8): n is a, c, g, or u
  misc_feature (17)..(17): n is a, c, g, or u
ugggaggnuacgguccn

SEQ ID NO: 48486 - RNA, 17 nt, Artificial Sequence
  Synthetic
  misc_feature (5)..(5): n is a, c, g, or u
  misc_feature (8)..(8): n is a, c, g, or u
  misc_feature (14)..(14): n is a, c, g, or u
  misc_feature (17)..(17): n is a, c, g, or u
ugganganccugcngcn

SEQ ID NO: 48487 - RNA, 17 nt, Artificial Sequence
  Synthetic
  misc_feature (12)..(12): n is a, c, g, or u
  misc_feature (15)..(15): n is a, c, g, or u
  misc_feature (17)..(17): n is a, c, g, or u
acuguuggcaancuncn

SEQ ID NO: 48488 - RNA, 17 nt, Artificial Sequence
  Synthetic
  misc_feature (17)..(17): n is a, c, g, or u
uucccaucccaucaucn

SEQ ID NO: 48489 - RNA, 17 nt, Artificial Sequence
  Synthetic
  misc_feature (2)..(2): n is a, c, g, or u
  misc_feature (11)..(11): n is a, c, g, or u
  misc_feature (17)..(17): n is a, c, g, or u
cngcggacgancccucn

SEQ ID NO: 48490 - RNA, 17 nt, Artificial Sequence
  Synthetic
  misc_feature (5)..(5): n is a, c, g, or u
  misc_feature (12)..(12): n is a, c, g, or u
  misc_feature (17)..(17): n is a, c, g, or u
cagunaggauunaaagn

SEQ ID NO: 48491 - RNA, 17 nt, Artificial Sequence
  Synthetic
  misc_feature (11)..(11): n is a, c, g, or u
  misc_feature (17)..(17): n is a, c, g, or u
acggcagacgnagaagn

SEQ ID NO: 48492 - RNA, 17 nt, Artificial Sequence
  Synthetic
  misc_feature (4)..(4): n is a, c, g, or u
  misc_feature (17)..(17): n is a, c, g, or u
uaangacugggaggagn

SEQ ID NO: 48493 - RNA, 17 nt, Artificial Sequence
  Synthetic
  misc_feature (11)..(11): n is a, c, g, or u
  misc_feature (14)..(14): n is a, c, g, or u
  misc_feature (17)..(17): n is a, c, g, or u
auucauuuuungunagn

SEQ ID NO: 48494 - RNA, 17 nt, Artificial Sequence
  Synthetic
  misc_feature (17)..(17): n is a, c, g, or u
cuuguccuggcuaucgn

SEQ ID NO: 48495 - RNA, 17 nt, Artificial Sequence
  Synthetic
  misc_feature (7)..(7): n is a, c, g, or u
  misc_feature (9)..(9): n is a, c, g, or u
  misc_feature (15)..(15): n is a, c, g, or u
  misc_feature (17)..(17): n is a, c, g, or u
uuaggananaaucungn

SEQ ID NO: 48496 - RNA, 17 nt, Artificial Sequence
  Synthetic
  misc_feature (17)..(17): n is a, c, g, or u
cccacacgguggccugn

SEQ ID NO: 48497 - RNA, 17 nt, Artificial Sequence
  Synthetic
  misc_feature (11)..(11): n is a, c, g, or u
  misc_feature (14)..(14): n is a, c, g, or u
  misc_feature (16)..(17): n is a, c, g, or u
cuguuggcaancuncnn

SEQ ID NO: 48498 - RNA, 17 nt, Artificial Sequence
  Synthetic
  misc_feature (3)..(3): n is a, c, g, or u
  misc_feature (17)..(17): n is a, c, g, or u
agnugggggaggagaun

SEQ ID NO: 48499 - RNA, 17 nt, Artificial Sequence
  Synthetic
  misc_feature (4)..(4): n is a, c, g, or u
  misc_feature (17)..(17): n is a, c, g, or u
uacnaaauauuuuccun

SEQ ID NO: 48500 - RNA, 17 nt, Artificial Sequence
  Synthetic
cacagauaacagaaaau

SEQ ID NO: 48501 - RNA, 17 nt, Artificial Sequence
  Synthetic
aggcuguaggcauaaau

SEQ ID NO: 48502 - RNA, 17 nt, Artificial Sequence
  Synthetic
cuccugcuuccaccaau

SEQ ID NO: 48503 - RNA, 17 nt, Artificial Sequence
  Synthetic
  misc_feature (12)..(12): n is a, c, g, or u
caaacuuuccanucaau

SEQ ID NO: 48504 - RNA, 17 nt, Artificial Sequence
  Synthetic
  misc_feature (6)..(6): n is a, c, g, or u
  misc_feature (9)..(9): n is a, c, g, or u
uaugunaanacuaacau

SEQ ID NO: 48505 - RNA, 17 nt, Artificial Sequence
  Synthetic
ccaaggaauacuaacau

SEQ ID NO: 48506 - RNA, 17 nt, Artificial Sequence
  Synthetic
cugaggcccacucccau

SEQ ID NO: 48507 - RNA, 17 nt, Artificial Sequence
  Synthetic
ccuaccuuguuugccau

SEQ ID NO: 48508 - RNA, 17 nt, Artificial Sequence
  Synthetic
aacaagagcuacagcau

SEQ ID NO: 48509 - RNA, 17 nt, Artificial Sequence
  Synthetic
  misc_feature (6)..(7): n is a, c, g, or u
acgacnngaaggggcau

SEQ ID NO: 48510 - RNA, 17 nt, Artificial Sequence
  Synthetic
  misc_feature (12)..(13): n is a, c, g, or u
ucuggagcgaannucau

SEQ ID NO: 48511 - RNA, 17 nt, Artificial Sequence
  Synthetic
  misc_feature (3)..(3): n is a, c, g, or u
  misc_feature (5)..(7): n is a, c, g, or u
  misc_feature (10)..(10): n is a, c, g, or u
uanannnuanauuucau

SEQ ID NO: 48512 - RNA, 17 nt, Artificial Sequence
  Synthetic
  misc_feature (1)..(1): n is a, c, g, or u
  misc_feature (4)..(4): n is a, c, g, or u
nucnaaaacaaaaagau

SEQ ID NO: 48513 - RNA, 17 nt, Artificial Sequence
  Synthetic
  misc_feature (1)..(1): n is a, c, g, or u
ncucccggaccgccgau

SEQ ID NO: 48514 - RNA, 17 nt, Artificial Sequence
  Synthetic
  misc_feature (13)..(13): n is a, c, g, or u
aaagaaucccagnggau

SEQ ID NO: 48515 - RNA, 17 nt, Artificial Sequence
  Synthetic
  misc_feature (11)..(11): n is a, c, g, or u
cuaaagcccangaugau

SEQ ID NO: 48516 - RNA, 17 nt, Artificial Sequence
  Synthetic
  misc_feature (15)..(15): n is a, c, g, or u
uucauggguuaugunau

SEQ ID NO: 48517 - RNA, 17 nt, Artificial Sequence
  Synthetic
uuuaggaaaauaccuau

SEQ ID NO: 48518 - RNA, 17 nt, Artificial Sequence
  Synthetic
  misc_feature (10)..(10): n is a, c, g, or u
caaucuucungaagacu

SEQ ID NO: 48519 - RNA, 17 nt, Artificial Sequence
  Synthetic
uuagagguggagagacu

SEQ ID NO: 48520 - RNA, 17 nt, Artificial Sequence
  Synthetic
  misc_feature (13)..(13): n is a, c, g, or u
cuguguauuuaangacu

SEQ ID NO: 48521 - RNA, 17 nt, Artificial Sequence
  Synthetic
  misc_feature (1)..(1): n is a, c, g, or u
nugcuguuccaaacccu

SEQ ID NO: 48522 - RNA, 17 nt, Artificial Sequence
  Synthetic
uacagagcccuuacccu

SEQ ID NO: 48523 - RNA, 17 nt, Artificial Sequence
  Synthetic
aucacaucaggacuccu

SEQ ID NO: 48524 - RNA, 17 nt, Artificial Sequence
  Synthetic
acacgagcagggguccu

SEQ ID NO: 48525 - RNA, 17 nt, Artificial Sequence
  Synthetic
ccaauguuaguauuccu

SEQ ID NO: 48526 - RNA, 17 nt, Artificial Sequence
  Synthetic
aaugacuuuggcuuccu

SEQ ID NO: 48527 - RNA, 17 nt, Artificial Sequence
  Synthetic
ccacccaaggcacagcu

SEQ ID NO: 48528 - RNA, 17 nt, Artificial Sequence
  Synthetic
  misc_feature (1)..(1): n is a, c, g, or u
  misc_feature (7)..(7): n is a, c, g, or u
  misc_feature (13)..(13): n is a, c, g, or u
ncccucncggggncgcu

SEQ ID NO: 48529 - RNA, 17 nt, Artificial Sequence
  Synthetic
ccccacugguuggggcu

SEQ ID NO: 48530 - RNA, 17 nt, Artificial Sequence
  Synthetic
  misc_feature (6)..(6): n is a, c, g, or u
uccuunccauggcugcu

SEQ ID NO: 48531 - RNA, 17 nt, Artificial Sequence
  Synthetic
accuuuaccccguugcu

SEQ ID NO: 48532 - RNA, 17 nt, Artificial Sequence
  Synthetic
  misc_feature (6)..(6): n is a, c, g, or u
  misc_feature (15)..(15): n is a, c, g, or u
ucuguncccaauccncu

SEQ ID NO: 48533 - RNA, 17 nt, Artificial Sequence
  Synthetic
acucuguuguccucucu

SEQ ID NO: 48534 - RNA, 17 nt, Artificial Sequence
  Synthetic
acuucucucaauuuucu

SEQ ID NO: 48535 - RNA, 17 nt, Artificial Sequence
  Synthetic
cgauagccaggacaagu

SEQ ID NO: 48536 - RNA, 17 nt, Artificial Sequence
  Synthetic
agaaaggccuuguaagu

SEQ ID NO: 48537 - RNA, 17 nt, Artificial Sequence
  Synthetic
uuggaggcuugaacagu

SEQ ID NO: 48538 - RNA, 17 nt, Artificial Sequence
  Synthetic
acuaaaagccagacagu

SEQ ID NO: 48539 - RNA, 17 nt, Artificial Sequence
  Synthetic
  misc_feature (7)..(7): n is a, c, g, or u
cccgcgnaggauccagu

SEQ ID NO: 48540 - RNA, 17 nt, Artificial Sequence
  Synthetic
aaaauaccuaugggagu

SEQ ID NO: 48541 - RNA, 17 nt, Artificial Sequence
  Synthetic
ccaauggcaaacaaggu

SEQ ID NO: 48542 - RNA, 17 nt, Artificial Sequence
  Synthetic
ccuuggacucauaaggu

SEQ ID NO: 48543 - RNA, 17 nt, Artificial Sequence
  Synthetic
acuuuggcuuccugggu

SEQ ID NO: 48544 - RNA, 17 nt, Artificial Sequence
  Synthetic
  misc_feature (2)..(3): n is a, c, g, or u
cnnuuauguaagacugu

SEQ ID NO: 48545 - RNA, 17 nt, Artificial Sequence
  Synthetic
  misc_feature (6)..(6): n is a, c, g, or u
uuguanuaggaggcugu

SEQ ID NO: 48546 - RNA, 17 nt, Artificial Sequence
  Synthetic
aauuuucuguuaucugu

SEQ ID NO: 48547 - RNA, 17 nt, Artificial Sequence
  Synthetic
  misc_feature (4)..(4): n is a, c, g, or u
ccancaggccaccgugu

SEQ ID NO: 48548 - RNA, 17 nt, Artificial Sequence
  Synthetic
augccucaucuucuugu

SEQ ID NO: 48549 - RNA, 17 nt, Artificial Sequence
  Synthetic
aaaugugaacaauuugu

SEQ ID NO: 48550 - RNA, 17 nt, Artificial Sequence
  Synthetic
  misc_feature (16)..(16): n is a, c, g, or u
cugggugggcaauaanu

SEQ ID NO: 48551 - RNA, 17 nt, Artificial Sequence
  Synthetic
  misc_feature (4)..(4): n is a, c, g, or u
  misc_feature (16)..(16): n is a, c, g, or u
acanaaacaaggacanu

SEQ ID NO: 48552 - RNA, 17 nt, Artificial Sequence
  Synthetic
  misc_feature (2)..(2): n is a, c, g, or u
  misc_feature (16)..(16): n is a, c, g, or u
unuguugaagucccanu

SEQ ID NO: 48553 - RNA, 17 nt, Artificial Sequence
  Synthetic
  misc_feature (16)..(16): n is a, c, g, or u
uuccagcagucccganu

SEQ ID NO: 48554 - RNA, 17 nt, Artificial Sequence
  Synthetic
  misc_feature (5)..(5): n is a, c, g, or u
  misc_feature (7)..(7): n is a, c, g, or u
  misc_feature (16)..(16): n is a, c, g, or u
uuaangnucuuuguanu

SEQ ID NO: 48555 - RNA, 17 nt, Artificial Sequence
  Synthetic
  misc_feature (16)..(16): n is a, c, g, or u
ucccaucccaucaucnu

SEQ ID NO: 48556 - RNA, 17 nt, Artificial Sequence
  Synthetic
  misc_feature (16)..(16): n is a, c, g, or u
ugggucaccauauucnu

SEQ ID NO: 48557 - RNA, 17 nt, Artificial Sequence
  Synthetic
  misc_feature (3)..(3): n is a, c, g, or u
  misc_feature (16)..(16): n is a, c, g, or u
aangacugggaggagnu

SEQ ID NO: 48558 - RNA, 17 nt, Artificial Sequence
  Synthetic
  misc_feature (16)..(16): n is a, c, g, or u
ccacacgguggccugnu

SEQ ID NO: 48559 - RNA, 17 nt, Artificial Sequence
  Synthetic
  misc_feature (9)..(10): n is a, c, g, or u
  misc_feature (16)..(16): n is a, c, g, or u
uuacauaannggacunu

SEQ ID NO: 48560 - RNA, 17 nt, Artificial Sequence
  Synthetic
caaggaauacuaacauu

SEQ ID NO: 48561 - RNA, 17 nt, Artificial Sequence
  Synthetic
aagaugcugcacagauu

SEQ ID NO: 48562 - RNA, 17 nt, Artificial Sequence
  Synthetic
  misc_feature (12)..(12): n is a, c, g, or u
aagaaucccagnggauu

SEQ ID NO: 48563 - RNA, 17 nt, Artificial Sequence
  Synthetic
augaacaaaagaugauu

SEQ ID NO: 48564 - RNA, 17 nt, Artificial Sequence
  Synthetic
aacaguucuugaguauu

SEQ ID NO: 48565 - RNA, 17 nt, Artificial Sequence
  Synthetic
auggaugaucugguauu

SEQ ID NO: 48566 - RNA, 17 nt, Artificial Sequence
  Synthetic
ccuccaagcugugccuu

SEQ ID NO: 48567 - RNA, 17 nt, Artificial Sequence
  Synthetic
  misc_feature (6)..(6): n is a, c, g, or u
  misc_feature (12)..(12): n is a, c, g, or u
cccucncggggncgcuu

SEQ ID NO: 48568 - RNA, 17 nt, Artificial Sequence
  Synthetic
ugugccuuggguggcuu

SEQ ID NO: 48569 - RNA, 17 nt, Artificial Sequence
  Synthetic
  misc_feature (7)..(7): n is a, c, g, or u
  misc_feature (13)..(13): n is a, c, g, or u
uuaugunauuggnaguu

SEQ ID NO: 48570 - RNA, 17 nt, Artificial Sequence
  Synthetic
  misc_feature (2)..(2): n is a, c, g, or u
  misc_feature (14)..(14): n is a, c, g, or u
anuucuucccgucnguu

SEQ ID NO: 48571 - RNA, 17 nt, Artificial Sequence
  Synthetic
  misc_feature (15)..(15): n is a, c, g, or u
cugagagcgguaugnuu

SEQ ID NO: 48572 - RNA, 17 nt, Artificial Sequence
  Synthetic
  misc_feature (9)..(9): n is a, c, g, or u
  misc_feature (14)..(15): n is a, c, g, or u
aaauauuunguaannuu

SEQ ID NO: 48573 - RNA, 17 nt, Artificial Sequence
  Synthetic
uuggggacugcgaauuu

SEQ ID NO: 48574 - RNA, 17 nt, Artificial Sequence
  Synthetic
auuuccugccuuacuuu

SEQ ID NO: 48575 - RNA, 17 nt, Artificial Sequence
  Synthetic
  misc_feature (9)..(9): n is a, c, g, or u
ccaucaucnugggcuuu

SEQ ID NO: 48576 - RNA, 17 nt, Artificial Sequence
  Synthetic
  misc_feature (4)..(4): n is a, c, g, or u
  misc_feature (13)..(13): n is a, c, g, or u
acgnauugugggncuuu

SEQ ID NO: 48577 - RNA, 17 nt, Artificial Sequence
  Synthetic
  misc_feature (3)..(3): n is a, c, g, or u
  misc_feature (12)..(12): n is a, c, g, or u
cgnauugugggncuuuu

SEQ ID NO: 48578 - RNA, 20 nt, Artificial Sequence
  Synthetic
  misc_feature (9)..(9): n is a, c, g, or u
uccuggaanuagaggacaaa

SEQ ID NO: 48579 - RNA, 20 nt, Artificial Sequence
  Synthetic
  misc_feature (8)..(8): n is a, c, g, or u
  misc_feature (11)..(11): n is a, c, g, or u
  misc_feature (17)..(17): n is a, c, g, or u
uuguuuunganguauunaaa

SEQ ID NO: 48580 - RNA, 20 nt, Artificial Sequence
  Synthetic
  misc_feature (12)..(12): n is a, c, g, or u
aaacaaggacanuuggccaa

SEQ ID NO: 48581 - RNA, 20 nt, Artificial Sequence
  Synthetic
  misc_feature (7)..(7): n is a, c, g, or u
  misc_feature (12)..(12): n is a, c, g, or u
  misc_feature (16)..(16): n is a, c, g, or u
cauguanuguunacanagaa

SEQ ID NO: 48582 - RNA, 20 nt, Artificial Sequence
  Synthetic
  misc_feature (7)..(7): n is a, c, g, or u
  misc_feature (16)..(17): n is a, c, g, or u
accucunucaacgacnngaa

SEQ ID NO: 48583 - RNA, 20 nt, Artificial Sequence
  Synthetic
  misc_feature (13)..(13): n is a, c, g, or u
  misc_feature (18)..(18): n is a, c, g, or u
aaauauuuuccunugganaa

SEQ ID NO: 48584 - RNA, 20 nt, Artificial Sequence
  Synthetic
aagcuccaaauucuuuauaa

SEQ ID NO: 48585 - RNA, 20 nt, Artificial Sequence
  Synthetic
  misc_feature (1)..(1): n is a, c, g, or u
  misc_feature (7)..(7): n is a, c, g, or u
ncuguungauccgaggguaa

SEQ ID NO: 48586 - RNA, 20 nt, Artificial Sequence
  Synthetic
  misc_feature (3)..(3): n is a, c, g, or u
canuuggccaauggcaaaca

SEQ ID NO: 48587 - RNA, 20 nt, Artificial Sequence
  Synthetic
  misc_feature (1)..(1): n is a, c, g, or u
  misc_feature (15)..(15): n is a, c, g, or u
nugggacuucaacanaaaca

SEQ ID NO: 48588 - RNA, 20 nt, Artificial Sequence
  Synthetic
  misc_feature (15)..(15): n is a, c, g, or u
ugggggcccugcuangaaca

SEQ ID NO: 48589 - RNA, 20 nt, Artificial Sequence
  Synthetic
  misc_feature (10)..(10): n is a, c, g, or u
  misc_feature (13)..(13): n is a, c, g, or u
uaacuaugunaanacuaaca

SEQ ID NO: 48590 - RNA, 20 nt, Artificial Sequence
  Synthetic
  misc_feature (3)..(3): n is a, c, g, or u
ccnggguucacacccccaca

SEQ ID NO: 48591 - RNA, 20 nt, Artificial Sequence
  Synthetic
ccaugccccaaagccaccca

SEQ ID NO: 48592 - RNA, 20 nt, Artificial Sequence
  Synthetic
uuucccaccuuaugagucca

SEQ ID NO: 48593 - RNA, 20 nt, Artificial Sequence
  Synthetic
ugggaacaagagcuacagca

SEQ ID NO: 48594 - RNA, 20 nt, Artificial Sequence
  Synthetic
  misc_feature (7)..(7): n is a, c, g, or u
aggaucnacgaccaccagca

SEQ ID NO: 48595 - RNA, 20 nt, Artificial Sequence
  Synthetic
  misc_feature (15)..(15): n is a, c, g, or u
uguuguccauguucnuagca

SEQ ID NO: 48596 - RNA, 20 nt, Artificial Sequence
  Synthetic
cuucaccucugcacgucgca

SEQ ID NO: 48597 - RNA, 20 nt, Artificial Sequence
  Synthetic
  misc_feature (1)..(1): n is a, c, g, or u
  misc_feature (10)..(11): n is a, c, g, or u
nucaacgacnngaaggggca

SEQ ID NO: 48598 - RNA, 20 nt, Artificial Sequence
  Synthetic
ccuuggguggcuuuggggca

SEQ ID NO: 48599 - RNA, 20 nt, Artificial Sequence
  Synthetic
agaguugugcagguuuugca

SEQ ID NO: 48600 - RNA, 20 nt, Artificial Sequence
  Synthetic
uugguucuucuggacuauca

SEQ ID NO: 48601 - RNA, 20 nt, Artificial Sequence
  Synthetic
accugcacaacucuugcuca

SEQ ID NO: 48602 - RNA, 20 nt, Artificial Sequence
  Synthetic
  misc_feature (4)..(4): n is a, c, g, or u
  misc_feature (7)..(7): n is a, c, g, or u
  misc_feature (9)..(10): n is a, c, g, or u
caancuncnnggggcguuca

SEQ ID NO: 48603 - RNA, 20 nt, Artificial Sequence
  Synthetic
  misc_feature (5)..(5): n is a, c, g, or u
  misc_feature (8)..(8): n is a, c, g, or u
auacnucnaaaacaaaaaga

SEQ ID NO: 48604 - RNA, 20 nt, Artificial Sequence
  Synthetic
  misc_feature (9)..(9): n is a, c, g, or u
aaaugaaunucaggaaaaga

SEQ ID NO: 48605 - RNA, 20 nt, Artificial Sequence
  Synthetic
  misc_feature (3)..(3): n is a, c, g, or u
  misc_feature (15)..(15): n is a, c, g, or u
acngacgggaagaanucaga

SEQ ID NO: 48606 - RNA, 20 nt, Artificial Sequence
  Synthetic
  misc_feature (7)..(7): n is a, c, g, or u
acacggnccggcagaugaga

SEQ ID NO: 48607 - RNA, 20 nt, Artificial Sequence
  Synthetic
  misc_feature (7)..(7): n is a, c, g, or u
  misc_feature (13)..(13): n is a, c, g, or u
ccaggcncuguungauccga

SEQ ID NO: 48608 - RNA, 20 nt, Artificial Sequence
  Synthetic
ugcuguuccaaacccucgga

SEQ ID NO: 48609 - RNA, 20 nt, Artificial Sequence
  Synthetic
  misc_feature (10)..(10): n is a, c, g, or u
uaaagcccangaugauggga

SEQ ID NO: 48610 - RNA, 20 nt, Artificial Sequence
  Synthetic
  misc_feature (12)..(12): n is a, c, g, or u
  misc_feature (18)..(18): n is a, c, g, or u
agccccaagcgnccccgnga

SEQ ID NO: 48611 - RNA, 20 nt, Artificial Sequence
  Synthetic
  misc_feature (8)..(8): n is a, c, g, or u
  misc_feature (17)..(18): n is a, c, g, or u
caccucunucaacgacnnga

SEQ ID NO: 48612 - RNA, 20 nt, Artificial Sequence
  Synthetic
  misc_feature (15)..(15): n is a, c, g, or u
uuuccuaaagcccangauga

SEQ ID NO: 48613 - RNA, 20 nt, Artificial Sequence
  Synthetic
  misc_feature (5)..(5): n is a, c, g, or u
  misc_feature (8)..(8): n is a, c, g, or u
ugaanagnggauccagcuga

SEQ ID NO: 48614 - RNA, 20 nt, Artificial Sequence
  Synthetic
  misc_feature (1)..(1): n is a, c, g, or u
  misc_feature (15)..(15): n is a, c, g, or u
  misc_feature (19)..(19): n is a, c, g, or u
nucuaaagcaucccnguana

SEQ ID NO: 48615 - RNA, 20 nt, Artificial Sequence
  Synthetic
  misc_feature (1)..(1): n is a, c, g, or u
  misc_feature (7)..(7): n is a, c, g, or u
  misc_feature (10)..(10): n is a, c, g, or u
  misc_feature (16)..(16): n is a, c, g, or u
  misc_feature (19)..(19): n is a, c, g, or u
nuugganganccugcngcna

SEQ ID NO: 48616 - RNA, 20 nt, Artificial Sequence
  Synthetic
  misc_feature (4)..(4): n is a, c, g, or u
  misc_feature (19)..(19): n is a, c, g, or u
acanccgagcagccauggna

SEQ ID NO: 48617 - RNA, 20 nt, Artificial Sequence
  Synthetic
  misc_feature (15)..(15): n is a, c, g, or u
agcucuuguucccangaaua

SEQ ID NO: 48618 - RNA, 20 nt, Artificial Sequence
  Synthetic
  misc_feature (3)..(4): n is a, c, g, or u
  misc_feature (6)..(6): n is a, c, g, or u
  misc_feature (8)..(9): n is a, c, g, or u
acnncnunnucaggauaaua

SEQ ID NO: 48619 - RNA, 20 nt, Artificial Sequence
  Synthetic
uaguauuccuuggacucaua

SEQ ID NO: 48620 - RNA, 20 nt, Artificial Sequence
  Synthetic
  misc_feature (16)..(16): n is a, c, g, or u
ccggaaguguggauangaua

SEQ ID NO: 48621 - RNA, 20 nt, Artificial Sequence
  Synthetic
cugucuggcuuuuaguuaua

SEQ ID NO: 48622 - RNA, 20 nt, Artificial Sequence
  Synthetic
cuguuucucuuccaaaagua

SEQ ID NO: 48623 - RNA, 20 nt, Artificial Sequence
  Synthetic
  misc_feature (2)..(2): n is a, c, g, or u
  misc_feature (8)..(8): n is a, c, g, or u
cncuguungauccgagggua

SEQ ID NO: 48624 - RNA, 20 nt, Artificial Sequence
  Synthetic
  misc_feature (18)..(18): n is a, c, g, or u
aagguaggagugggaggnua

SEQ ID NO: 48625 - RNA, 20 nt, Artificial Sequence
  Synthetic
  misc_feature (16)..(16): n is a, c, g, or u
ucauaaggugggaaanuuua

SEQ ID NO: 48626 - RNA, 20 nt, Artificial Sequence
  Synthetic
  misc_feature (8)..(8): n is a, c, g, or u
ccuggaanuagaggacaaac

SEQ ID NO: 48627 - RNA, 20 nt, Artificial Sequence
  Synthetic
uaaacugagccaggagaaac

SEQ ID NO: 48628 - RNA, 20 nt, Artificial Sequence
  Synthetic
  misc_feature (2)..(2): n is a, c, g, or u
  misc_feature (10)..(10): n is a, c, g, or u
  misc_feature (16)..(16): n is a, c, g, or u
unccuguaunacugcnaaac

SEQ ID NO: 48629 - RNA, 20 nt, Artificial Sequence
  Synthetic
  misc_feature (8)..(8): n is a, c, g, or u
ugcucggnugugcugccaac

SEQ ID NO: 48630 - RNA, 20 nt, Artificial Sequence
  Synthetic
  misc_feature (14)..(14): n is a, c, g, or u
aggguucugugucncugaac

SEQ ID NO: 48631 - RNA, 20 nt, Artificial Sequence
  Synthetic
  misc_feature (13)..(13): n is a, c, g, or u
ucuaagagacacncauccac

SEQ ID NO: 48632 - RNA, 20 nt, Artificial Sequence
  Synthetic
  misc_feature (14)..(14): n is a, c, g, or u
ucaucaaucuucungaagac

SEQ ID NO: 48633 - RNA, 20 nt, Artificial Sequence
  Synthetic
  misc_feature (7)..(8): n is a, c, g, or u
cgaugannuucgcuccagac

SEQ ID NO: 48634 - RNA, 20 nt, Artificial Sequence
  Synthetic
ucucuuagagguggagagac

SEQ ID NO: 48635 - RNA, 20 nt, Artificial Sequence
  Synthetic
  misc_feature (5)..(5): n is a, c, g, or u
ccgcnggauucagcgccgac

SEQ ID NO: 48636 - RNA, 20 nt, Artificial Sequence
  Synthetic
  misc_feature (17)..(17): n is a, c, g, or u
aagacuguguauuuaangac

SEQ ID NO: 48637 - RNA, 20 nt, Artificial Sequence
  Synthetic
  misc_feature (18)..(18): n is a, c, g, or u
cugccguuccagccgacnac

SEQ ID NO: 48638 - RNA, 20 nt, Artificial Sequence
  Synthetic
  misc_feature (2)..(2): n is a, c, g, or u
  misc_feature (6)..(6): n is a, c, g, or u
  misc_feature (11)..(11): n is a, c, g, or u
  misc_feature (18)..(18): n is a, c, g, or u
unccuncuuunaauccunac

SEQ ID NO: 48639 - RNA, 20 nt, Artificial Sequence
  Synthetic
  misc_feature (10)..(10): n is a, c, g, or u
  misc_feature (16)..(16): n is a, c, g, or u
agccuguuungcagunauac

SEQ ID NO: 48640 - RNA, 20 nt, Artificial Sequence
  Synthetic
  misc_feature (3)..(3): n is a, c, g, or u
  misc_feature (9)..(9): n is a, c, g, or u
  misc_feature (12)..(12): n is a, c, g, or u
canucaaunggncgauuuac

SEQ ID NO: 48641 - RNA, 20 nt, Artificial Sequence
  Synthetic
  misc_feature (15)..(15): n is a, c, g, or u
cauaaggugggaaanuuuac

SEQ ID NO: 48642 - RNA, 20 nt, Artificial Sequence
  Synthetic
cgaauuuuggccaggacacc

SEQ ID NO: 48643 - RNA, 20 nt, Artificial Sequence
  Synthetic
  misc_feature (16)..(17): n is a, c, g, or u
aauuuucuagggggannacc

SEQ ID NO: 48644 - RNA, 20 nt, Artificial Sequence
  Synthetic
  misc_feature (9)..(9): n is a, c, g, or u
  misc_feature (17)..(17): n is a, c, g, or u
uuucagganggucaaunacc

SEQ ID NO: 48645 - RNA, 20 nt, Artificial Sequence
  Synthetic
ccgugugggggugugaaccc

SEQ ID NO: 48646 - RNA, 20 nt, Artificial Sequence
  Synthetic
  misc_feature (1)..(1): n is a, c, g, or u
  misc_feature (7)..(7): n is a, c, g, or u
nuccaanuuauugcccaccc

SEQ ID NO: 48647 - RNA, 20 nt, Artificial Sequence
  Synthetic
  misc_feature (15)..(16): n is a, c, g, or u
auuuucuagggggannaccc

SEQ ID NO: 48648 - RNA, 20 nt, Artificial Sequence
  Synthetic
  misc_feature (11)..(11): n is a, c, g, or u
  misc_feature (17)..(17): n is a, c, g, or u
cccucggaucnaacagngcc

SEQ ID NO: 48649 - RNA, 20 nt, Artificial Sequence
  Synthetic
uuugauguauucuucgaucc

SEQ ID NO: 48650 - RNA, 20 nt, Artificial Sequence
  Synthetic
uccuguccuccaacuugucc

SEQ ID NO: 48651 - RNA, 20 nt, Artificial Sequence
  Synthetic
  misc_feature (2)..(2): n is a, c, g, or u
anuuaaugacuuuggcuucc

SEQ ID NO: 48652 - RNA, 20 nt, Artificial Sequence
  Synthetic
  misc_feature (16)..(16): n is a, c, g, or u
cccguuuguccucuanuucc

SEQ ID NO: 48653 - RNA, 20 nt, Artificial Sequence
  Synthetic
  misc_feature (1)..(1): n is a, c, g, or u
ncugaacuggagccaccagc

SEQ ID NO: 48654 - RNA, 20 nt, Artificial Sequence
  Synthetic
agaagaugaggcauagcagc

SEQ ID NO: 48655 - RNA, 20 nt, Artificial Sequence
  Synthetic
cagcuuguuucgcucgcagc

SEQ ID NO: 48656 - RNA, 20 nt, Artificial Sequence
  Synthetic
auucuuuccagaccaucagc

SEQ ID NO: 48657 - RNA, 20 nt, Artificial Sequence
  Synthetic
  misc_feature (16)..(16): n is a, c, g, or u
auguuguccauguucnuagc

SEQ ID NO: 48658 - RNA, 20 nt, Artificial Sequence
  Synthetic
  misc_feature (6)..(6): n is a, c, g, or u
  misc_feature (12)..(12): n is a, c, g, or u
ccccgngagggnucguccgc

SEQ ID NO: 48659 - RNA, 20 nt, Artificial Sequence
  Synthetic
  misc_feature (17)..(17): n is a, c, g, or u
cugccaacuggauccuncgc

SEQ ID NO: 48660 - RNA, 20 nt, Artificial Sequence
  Synthetic
uucucuuccaaaaguaaggc

SEQ ID NO: 48661 - RNA, 20 nt, Artificial Sequence
  Synthetic
  misc_feature (18)..(18): n is a, c, g, or u
uugcauacuuuauggaangc

SEQ ID NO: 48662 - RNA, 20 nt, Artificial Sequence
  Synthetic
  misc_feature (3)..(3): n is a, c, g, or u
  misc_feature (8)..(9): n is a, c, g, or u
  misc_feature (15)..(15): n is a, c, g, or u
  misc_feature (18)..(18): n is a, c, g, or u
acnacuannucccungcngc

SEQ ID NO: 48663 - RNA, 20 nt, Artificial Sequence
  Synthetic
agggcucuguauuuuccugc

SEQ ID NO: 48664 - RNA, 20 nt, Artificial Sequence
  Synthetic
uccuugagcaagaguugugc

SEQ ID NO: 48665 - RNA, 20 nt, Artificial Sequence
  Synthetic
  misc_feature (5)..(5): n is a, c, g, or u
  misc_feature (8)..(8): n is a, c, g, or u
  misc_feature (19)..(19): n is a, c, g, or u
ccugnggncuccaccccanc

SEQ ID NO: 48666 - RNA, 20 nt, Artificial Sequence
  Synthetic
  misc_feature (5)..(5): n is a, c, g, or u
  misc_feature (16)..(16): n is a, c, g, or u
  misc_feature (19)..(19): n is a, c, g, or u
ccugnugggguggagnccnc

SEQ ID NO: 48667 - RNA, 20 nt, Artificial Sequence
  Synthetic
  misc_feature (10)..(10): n is a, c, g, or u
  misc_feature (19)..(19): n is a, c, g, or u
ucucucuguncccaauccnc

SEQ ID NO: 48668 - RNA, 20 nt, Artificial Sequence
  Synthetic
  misc_feature (4)..(4): n is a, c, g, or u
  misc_feature (13)..(13): n is a, c, g, or u
  misc_feature (19)..(19): n is a, c, g, or u
uccngcggacgancccucnc

SEQ ID NO: 48669 - RNA, 20 nt, Artificial Sequence
  Synthetic
aacauggacaacaucacauc

SEQ ID NO: 48670 - RNA, 20 nt, Artificial Sequence
  Synthetic
uuuuaguuauauggaugauc

SEQ ID NO: 48671 - RNA, 20 nt, Artificial Sequence
  Synthetic
  misc_feature (2)..(2): n is a, c, g, or u
  misc_feature (5)..(5): n is a, c, g, or u
  misc_feature (8)..(8): n is a, c, g, or u
cnccnaancauaccgcucuc

SEQ ID NO: 48672 - RNA, 20 nt, Artificial Sequence
  Synthetic
  misc_feature (3)..(3): n is a, c, g, or u
agnggauccagcugaugguc

SEQ ID NO: 48673 - RNA, 20 nt, Artificial Sequence
  Synthetic
uagggcuuucccccacuguc

SEQ ID NO: 48674 - RNA, 20 nt, Artificial Sequence
  Synthetic
  misc_feature (16)..(16): n is a, c, g, or u
uaaaguaugcaaauanuguc

SEQ ID NO: 48675 - RNA, 20 nt, Artificial Sequence
  Synthetic
  misc_feature (4)..(4): n is a, c, g, or u
  misc_feature (18)..(18): n is a, c, g, or u
uuunuguugaagucccanuc

SEQ ID NO: 48676 - RNA, 20 nt, Artificial Sequence
  Synthetic
  misc_feature (12)..(13): n is a, c, g, or u
  misc_feature (15)..(15): n is a, c, g, or u
  misc_feature (17)..(18): n is a, c, g, or u
uaaugauuaacnncnunnuc

SEQ ID NO: 48677 - RNA, 20 nt, Artificial Sequence
  Synthetic
  misc_feature (9)..(9): n is a, c, g, or u
  misc_feature (18)..(18): n is a, c, g, or u
ucuugaugnaaaugaaunuc

SEQ ID NO: 48678 - RNA, 20 nt, Artificial Sequence
  Synthetic
  misc_feature (8)..(8): n is a, c, g, or u
cccuaucnuauccacacuuc

SEQ ID NO: 48679 - RNA, 20 nt, Artificial Sequence
  Synthetic
caucuucuuguugguucuuc

SEQ ID NO: 48680 - RNA, 20 nt, Artificial Sequence
  Synthetic
  misc_feature (4)..(4): n is a, c, g, or u
  misc_feature (16)..(16): n is a, c, g, or u
uganuucuucccgucnguuc

SEQ ID NO: 48681 - RNA, 20 nt, Artificial Sequence
  Synthetic
  misc_feature (3)..(3): n is a, c, g, or u
  misc_feature (6)..(6): n is a, c, g, or u
  misc_feature (9)..(9): n is a, c, g, or u
ugnuunggngugcaauguuc

SEQ ID NO: 48682 - RNA, 20 nt, Artificial Sequence
  Synthetic
  misc_feature (3)..(4): n is a, c, g, or u
  misc_feature (10)..(10): n is a, c, g, or u
aannggacunuuggacuuuc

SEQ ID NO: 48683 - RNA, 20 nt, Artificial Sequence
  Synthetic
cgucuaacaacaguaguuuc

SEQ ID NO: 48684 - RNA, 20 nt, Artificial Sequence
  Synthetic
  misc_feature (15)..(15): n is a, c, g, or u
uggaacggcagacgnagaag

SEQ ID NO: 48685 - RNA, 20 nt, Artificial Sequence
  Synthetic
  misc_feature (6)..(6): n is a, c, g, or u
  misc_feature (15)..(16): n is a, c, g, or u
ccucunucaacgacnngaag

SEQ ID NO: 48686 - RNA, 20 nt, Artificial Sequence
  Synthetic
  misc_feature (6)..(6): n is a, c, g, or u
  misc_feature (10)..(10): n is a, c, g, or u
aucccnguanagggcugaag

SEQ ID NO: 48687 - RNA, 20 nt, Artificial Sequence
  Synthetic
uaacagaaaauugguaacag

SEQ ID NO: 48688 - RNA, 20 nt, Artificial Sequence
  Synthetic
uauaacuaaaagccagacag

SEQ ID NO: 48689 - RNA, 20 nt, Artificial Sequence
  Synthetic
aauggccaagccccaaccag

SEQ ID NO: 48690 - RNA, 20 nt, Artificial Sequence
  Synthetic
uggucuggaaagaaucccag

SEQ ID NO: 48691 - RNA, 20 nt, Artificial Sequence
  Synthetic
aacaaaagaugauuaggcag

SEQ ID NO: 48692 - RNA, 20 nt, Artificial Sequence
  Synthetic
  misc_feature (2)..(2): n is a, c, g, or u
  misc_feature (14)..(14): n is a, c, g, or u
cncauccacaggcnaugcag

SEQ ID NO: 48693 - RNA, 20 nt, Artificial Sequence
  Synthetic
  misc_feature (8)..(8): n is a, c, g, or u
cggggagnccgcguaaagag

SEQ ID NO: 48694 - RNA, 20 nt, Artificial Sequence
  Synthetic
  misc_feature (4)..(4): n is a, c, g, or u
caanauagcuugccugagag

SEQ ID NO: 48695 - RNA, 20 nt, Artificial Sequence
  Synthetic
aggagguguacuuccuagag

SEQ ID NO: 48696 - RNA, 20 nt, Artificial Sequence
  Synthetic
aauggcaaacaagguaggag

SEQ ID NO: 48697 - RNA, 20 nt, Artificial Sequence
  Synthetic
  misc_feature (12)..(12): n is a, c, g, or u
  misc_feature (18)..(18): n is a, c, g, or u
cuggaauuugcncugaanag

SEQ ID NO: 48698 - RNA, 20 nt, Artificial Sequence
  Synthetic
  misc_feature (8)..(9): n is a, c, g, or u
  misc_feature (18)..(18): n is a, c, g, or u
ccccuucnngucguuganag

SEQ ID NO: 48699 - RNA, 20 nt, Artificial Sequence
  Synthetic
  misc_feature (18)..(18): n is a, c, g, or u
cgagggaguucuucuucnag

SEQ ID NO: 48700 - RNA, 20 nt, Artificial Sequence
  Synthetic
  misc_feature (15)..(15): n is a, c, g, or u
  misc_feature (18)..(18): n is a, c, g, or u
cucaauucauuuuungunag

SEQ ID NO: 48701 - RNA, 20 nt, Artificial Sequence
  Synthetic
  misc_feature (9)..(9): n is a, c, g, or u
uguggaugngugucucuuag

SEQ ID NO: 48702 - RNA, 20 nt, Artificial Sequence
  Synthetic
cagaugagaaggaacagacg

SEQ ID NO: 48703 - RNA, 20 nt, Artificial Sequence
  Synthetic
  misc_feature (8)..(8): n is a, c, g, or u
  misc_feature (14)..(14): n is a, c, g, or u
accaggcncuguungauccg

SEQ ID NO: 48704 - RNA, 20 nt, Artificial Sequence
  Synthetic
  misc_feature (4)..(4): n is a, c, g, or u
agancuucgucugcgaggcg

SEQ ID NO: 48705 - RNA, 20 nt, Artificial Sequence
  Synthetic
  misc_feature (3)..(3): n is a, c, g, or u
  misc_feature (12)..(12): n is a, c, g, or u
  misc_feature (18)..(18): n is a, c, g, or u
ccngcggacgancccucncg

SEQ ID NO: 48706 - RNA, 20 nt, Artificial Sequence
  Synthetic
  misc_feature (1)..(1): n is a, c, g, or u
  misc_feature (16)..(16): n is a, c, g, or u
nccgagcagccauggnaagg

SEQ ID NO: 48707 - RNA, 20 nt, Artificial Sequence
  Synthetic
uauuccuuggacucauaagg

SEQ ID NO: 48708 - RNA, 20 nt, Artificial Sequence
  Synthetic
aggacaaguuggaggacagg

SEQ ID NO: 48709 - RNA, 20 nt, Artificial Sequence
  Synthetic
cgauugguggaagcaggagg

SEQ ID NO: 48710 - RNA, 20 nt, Artificial Sequence
  Synthetic
  misc_feature (5)..(5): n is a, c, g, or u
  misc_feature (7)..(7): n is a, c, g, or u
  misc_feature (16)..(16): n is a, c, g, or u
uuaangnucuuuguanuagg

SEQ ID NO: 48711 - RNA, 20 nt, Artificial Sequence
  Synthetic
  misc_feature (1)..(1): n is a, c, g, or u
  misc_feature (4)..(4): n is a, c, g, or u
  misc_feature (6)..(7): n is a, c, g, or u
ncuncnnggggcguucacgg

SEQ ID NO: 48712 - RNA, 20 nt, Artificial Sequence
  Synthetic
  misc_feature (1)..(1): n is a, c, g, or u
  misc_feature (14)..(14): n is a, c, g, or u
ngacugggaggagnuggggg

SEQ ID NO: 48713 - RNA, 20 nt, Artificial Sequence
  Synthetic
  misc_feature (15)..(15): n is a, c, g, or u
cacacgguggccugnugggg

SEQ ID NO: 48714 - RNA, 20 nt, Artificial Sequence
  Synthetic
  misc_feature (13)..(13): n is a, c, g, or u
cuguguauuuaangacuggg

SEQ ID NO: 48715 - RNA, 20 nt, Artificial Sequence
  Synthetic
aaugacuuuggcuuccuggg

SEQ ID NO: 48716 - RNA, 20 nt, Artificial Sequence
  Synthetic
ccuccaagcugugccuuggg

SEQ ID NO: 48717 - RNA, 20 nt, Artificial Sequence
  Synthetic
  misc_feature (18)..(18): n is a, c, g, or u
uuugguggucuauaagcngg

SEQ ID NO: 48718 - RNA, 20 nt, Artificial Sequence
  Synthetic
  misc_feature (11)..(11): n is a, c, g, or u
ucaaucuucungaagacugg

SEQ ID NO: 48719 - RNA, 20 nt, Artificial Sequence
  Synthetic
  misc_feature (8)..(8): n is a, c, g, or u
  misc_feature (14)..(14): n is a, c, g, or u
ucggaucnaacagngccugg

SEQ ID NO: 48720 - RNA, 20 nt, Artificial Sequence
  Synthetic
uuugcauggucccgugcugg

SEQ ID NO: 48721 - RNA, 20 nt, Artificial Sequence
  Synthetic
aacuaaaagccagacagugg

SEQ ID NO: 48722 - RNA, 20 nt, Artificial Sequence
  Synthetic
  misc_feature (5)..(5): n is a, c, g, or u
cccancaggccaccgugugg

SEQ ID NO: 48723 - RNA, 20 nt, Artificial Sequence
  Synthetic
  misc_feature (4)..(4): n is a, c, g, or u
  misc_feature (17)..(17): n is a, c, g, or u
uaangacugggaggagnugg

SEQ ID NO: 48724 - RNA, 20 nt, Artificial Sequence
  Synthetic
  misc_feature (1)..(1): n is a, c, g, or u
ncucccggaccgccgauugg

SEQ ID NO: 48725 - RNA, 20 nt, Artificial Sequence
  Synthetic
uauggaugaucugguauugg

SEQ ID NO: 48726 - RNA, 20 nt, Artificial Sequence
  Synthetic
ccacccaaggcacagcuugg

SEQ ID NO: 48727 - RNA, 20 nt, Artificial Sequence
  Synthetic
  misc_feature (19)..(19): n is a, c, g, or u
cccgucggcgcugaauccng

SEQ ID NO: 48728 - RNA, 20 nt, Artificial Sequence
  Synthetic
  misc_feature (1)..(1): n is a, c, g, or u
  misc_feature (13)..(13): n is a, c, g, or u
  misc_feature (19)..(19): n is a, c, g, or u
nagccccaagcgnccccgng

SEQ ID NO: 48729 - RNA, 20 nt, Artificial Sequence
  Synthetic
auauggugacccacaaaaug

SEQ ID NO: 48730 - RNA, 20 nt, Artificial Sequence
  Synthetic
  misc_feature (3)..(3): n is a, c, g, or u
  misc_feature (6)..(6): n is a, c, g, or u
acnucnaaaacaaaaagaug

SEQ ID NO: 48731 - RNA, 20 nt, Artificial Sequence
  Synthetic
  misc_feature (12)..(12): n is a, c, g, or u
aucaaucuucungaagacug

SEQ ID NO: 48732 - RNA, 20 nt, Artificial Sequence
  Synthetic
ucuuagagguggagagacug

SEQ ID NO: 48733 - RNA, 20 nt, Artificial Sequence
  Synthetic
uaaagaauuuggagcuucug

SEQ ID NO: 48734 - RNA, 20 nt, Artificial Sequence
  Synthetic
aacaguaguuuccggaagug

SEQ ID NO: 48735 - RNA, 20 nt, Artificial Sequence
  Synthetic
uaacuaaaagccagacagug

SEQ ID NO: 48736 - RNA, 20 nt, Artificial Sequence
  Synthetic
uggccaagccccaaccagug

SEQ ID NO: 48737 - RNA, 20 nt, Artificial Sequence
  Synthetic
  misc_feature (11)..(11): n is a, c, g, or u
auuuggugucnuuuggagug

SEQ ID NO: 48738 - RNA, 20 nt, Artificial Sequence
  Synthetic
  misc_feature (8)..(8): n is a, c, g, or u
caccccancaggccaccgug

SEQ ID NO: 48739 - RNA, 20 nt, Artificial Sequence
  Synthetic
  misc_feature (6)..(6): n is a, c, g, or u
ccccancaggccaccgugug

SEQ ID NO: 48740 - RNA, 20 nt, Artificial Sequence
  Synthetic
cuagacucugugguauugug

SEQ ID NO: 48741 - RNA, 20 nt, Artificial Sequence
  Synthetic
  misc_feature (5)..(5): n is a, c, g, or u
  misc_feature (18)..(18): n is a, c, g, or u
uuaangacugggaggagnug

SEQ ID NO: 48742 - RNA, 20 nt, Artificial Sequence
  Synthetic
  misc_feature (18)..(18): n is a, c, g, or u
ccccacacgguggccugnug

SEQ ID NO: 48743 - RNA, 20 nt, Artificial Sequence
  Synthetic
  misc_feature (12)..(12): n is a, c, g, or u
  misc_feature (18)..(18): n is a, c, g, or u
aggcaagcuaunuugugnug

SEQ ID NO: 48744 - RNA, 20 nt, Artificial Sequence
  Synthetic
  misc_feature (5)..(5): n is a, c, g, or u
  misc_feature (15)..(15): n is a, c, g, or u
  misc_feature (17)..(18): n is a, c, g, or u
uaaanauuagacaanunnug

SEQ ID NO: 48745 - RNA, 20 nt, Artificial Sequence
  Synthetic
auauggaugaucugguauug

SEQ ID NO: 48746 - RNA, 20 nt, Artificial Sequence
  Synthetic
  misc_feature (2)..(2): n is a, c, g, or u
  misc_feature (8)..(8): n is a, c, g, or u
  misc_feature (14)..(14): n is a, c, g, or u
ancccucncggggncgcuug

SEQ ID NO: 48747 - RNA, 20 nt, Artificial Sequence
  Synthetic
  misc_feature (3)..(3): n is a, c, g, or u
  misc_feature (12)..(12): n is a, c, g, or u
uunuguacaaunugaucuug

SEQ ID NO: 48748 - RNA, 20 nt, Artificial Sequence
  Synthetic
ugguaagugauuggagguug

SEQ ID NO: 48749 - RNA, 20 nt, Artificial Sequence
  Synthetic
cugugccuuggguggcuuug

SEQ ID NO: 48750 - RNA, 20 nt, Artificial Sequence
  Synthetic
  misc_feature (20)..(20): n is a, c, g, or u
ugccaacagucuuacauaan

SEQ ID NO: 48751 - RNA, 20 nt, Artificial Sequence
  Synthetic
  misc_feature (11)..(11): n is a, c, g, or u
  misc_feature (14)..(14): n is a, c, g, or u
  misc_feature (20)..(20): n is a, c, g, or u
cuguaaaucgnccnauugan

SEQ ID NO: 48752 - RNA, 20 nt, Artificial Sequence
  Synthetic
  misc_feature (2)..(2): n is a, c, g, or u
  misc_feature (16)..(16): n is a, c, g, or u
  misc_feature (20)..(20): n is a, c, g, or u
anucuaaagcaucccnguan

SEQ ID NO: 48753 - RNA, 20 nt, Artificial Sequence
  Synthetic
  misc_feature (16)..(16): n is a, c, g, or u
  misc_feature (20)..(20): n is a, c, g, or u
caccgcuucagcccunuacn

SEQ ID NO: 48754 - RNA, 20 nt, Artificial Sequence
  Synthetic
  misc_feature (2)..(2): n is a, c, g, or u
  misc_feature (8)..(8): n is a, c, g, or u
  misc_feature (11)..(11): n is a, c, g, or u
  misc_feature (17)..(17): n is a, c, g, or u
  misc_feature (20)..(20): n is a, c, g, or u
anuugganganccugcngcn

SEQ ID NO: 48755 - RNA, 20 nt, Artificial Sequence
  Synthetic
  misc_feature (15)..(15): n is a, c, g, or u
  misc_feature (18)..(18): n is a, c, g, or u
  misc_feature (20)..(20): n is a, c, g, or u
aagacuguuggcaancuncn

SEQ ID NO: 48756 - RNA, 20 nt, Artificial Sequence
  Synthetic
  misc_feature (5)..(5): n is a, c, g, or u
  misc_feature (14)..(14): n is a, c, g, or u
  misc_feature (20)..(20): n is a, c, g, or u
auccngcggacgancccucn

SEQ ID NO: 48757 - RNA, 20 nt, Artificial Sequence
  Synthetic
  misc_feature (20)..(20): n is a, c, g, or u
uuugugggucaccauauucn

SEQ ID NO: 48758 - RNA, 20 nt, Artificial Sequence
  Synthetic
  misc_feature (8)..(8): n is a, c, g, or u
  misc_feature (15)..(15): n is a, c, g, or u
  misc_feature (20)..(20): n is a, c, g, or u
aaccagunaggauunaaagn

SEQ ID NO: 48759 - RNA, 20 nt, Artificial Sequence
  Synthetic
  misc_feature (7)..(7): n is a, c, g, or u
  misc_feature (20)..(20): n is a, c, g, or u
auuuaangacugggaggagn

SEQ ID NO: 48760 - RNA, 20 nt, Artificial Sequence
  Synthetic
  misc_feature (14)..(14): n is a, c, g, or u
  misc_feature (17)..(17): n is a, c, g, or u
  misc_feature (20)..(20): n is a, c, g, or u
ucaauucauuuuungunagn

SEQ ID NO: 48761 - RNA, 20 nt, Artificial Sequence
  Synthetic
  misc_feature (2)..(3): n is a, c, g, or u
  misc_feature (10)..(10): n is a, c, g, or u
  misc_feature (12)..(12): n is a, c, g, or u
  misc_feature (18)..(18): n is a, c, g, or u
  misc_feature (20)..(20): n is a, c, g, or u
annuuaggananaaucungn

SEQ ID NO: 48762 - RNA, 20 nt, Artificial Sequence
  Synthetic
  misc_feature (20)..(20): n is a, c, g, or u
acccccacacgguggccugn

SEQ ID NO: 48763 - RNA, 20 nt, Artificial Sequence
  Synthetic
  misc_feature (14)..(14): n is a, c, g, or u
  misc_feature (20)..(20): n is a, c, g, or u
ucaggcaagcuaunuugugn

SEQ ID NO: 48764 - RNA, 20 nt, Artificial Sequence
  Synthetic
  misc_feature (14)..(14): n is a, c, g, or u
  misc_feature (17)..(17): n is a, c, g, or u
  misc_feature (19)..(20): n is a, c, g, or u
agacuguuggcaancuncnn

SEQ ID NO: 48765 - RNA, 20 nt, Artificial Sequence
  Synthetic
  misc_feature (6)..(6): n is a, c, g, or u
  misc_feature (20)..(20): n is a, c, g, or u
aggagnugggggaggagaun

SEQ ID NO: 48766 - RNA, 20 nt, Artificial Sequence
  Synthetic
  misc_feature (1)..(2): n is a, c, g, or u
  misc_feature (7)..(7): n is a, c, g, or u
  misc_feature (20)..(20): n is a, c, g, or u
nnuuacnaaauauuuuccun

SEQ ID NO: 48767 - RNA, 20 nt, Artificial Sequence
  Synthetic
  misc_feature (20)..(20): n is a, c, g, or u
aaagaaggaguuaaccagun

SEQ ID NO: 48768 - RNA, 20 nt, Artificial Sequence
  Synthetic
acccacagauaacagaaaau

SEQ ID NO: 48769 - RNA, 20 nt, Artificial Sequence
  Synthetic
cgccuccugcuuccaccaau

SEQ ID NO: 48770 - RNA, 20 nt, Artificial Sequence
  Synthetic
  misc_feature (15)..(15): n is a, c, g, or u
ugacaaacuuuccanucaau

SEQ ID NO: 48771 - RNA, 20 nt, Artificial Sequence
  Synthetic
  misc_feature (9)..(9): n is a, c, g, or u
  misc_feature (12)..(12): n is a, c, g, or u
aacuaugunaanacuaacau

SEQ ID NO: 48772 - RNA, 20 nt, Artificial Sequence
  Synthetic
aguccaaggaauacuaacau

SEQ ID NO: 48773 - RNA, 20 nt, Artificial Sequence
  Synthetic
acugguuggggcuuggccau

SEQ ID NO: 48774 - RNA, 20 nt, Artificial Sequence
  Synthetic
acuccuaccuuguuugccau

SEQ ID NO: 48775 - RNA, 20 nt, Artificial Sequence
  Synthetic
  misc_feature (9)..(10): n is a, c, g, or u
ucaacgacnngaaggggcau

SEQ ID NO: 48776 - RNA, 20 nt, Artificial Sequence
  Synthetic
  misc_feature (15)..(16): n is a, c, g, or u
cggucuggagcgaannucau

SEQ ID NO: 48777 - RNA, 20 nt, Artificial Sequence
  Synthetic
  misc_feature (4)..(4): n is a, c, g, or u
  misc_feature (7)..(7): n is a, c, g, or u
uacnucnaaaacaaaaagau

SEQ ID NO: 48778 - RNA, 20 nt, Artificial Sequence
  Synthetic
  misc_feature (9)..(9): n is a, c, g, or u
aaagcccangaugaugggau

SEQ ID NO: 48779 - RNA, 20 nt, Artificial Sequence
  Synthetic
  misc_feature (16)..(16): n is a, c, g, or u
uggaaagaaucccagnggau

SEQ ID NO: 48780 - RNA, 20 nt, Artificial Sequence
  Synthetic
  misc_feature (17)..(17): n is a, c, g, or u
uccggaaguguggauangau

SEQ ID NO: 48781 - RNA, 20 nt, Artificial Sequence
  Synthetic
  misc_feature (14)..(14): n is a, c, g, or u
uuccuaaagcccangaugau

SEQ ID NO: 48782 - RNA, 20 nt, Artificial Sequence
  Synthetic
acaggagguugguaagugau

SEQ ID NO: 48783 - RNA, 20 nt, Artificial Sequence
  Synthetic
  misc_feature (1)..(1): n is a, c, g, or u
  misc_feature (18)..(18): n is a, c, g, or u
nauuucauggguuaugunau

SEQ ID NO: 48784 - RNA, 20 nt, Artificial Sequence
  Synthetic
  misc_feature (13)..(13): n is a, c, g, or u
caucaaucuucungaagacu

SEQ ID NO: 48785 - RNA, 20 nt, Artificial Sequence
  Synthetic
cucuuagagguggagagacu

SEQ ID NO: 48786 - RNA, 20 nt, Artificial Sequence
  Synthetic
  misc_feature (16)..(16): n is a, c, g, or u
agacuguguauuuaangacu

SEQ ID NO: 48787 - RNA, 20 nt, Artificial Sequence
  Synthetic
  misc_feature (1)..(1): n is a, c, g, or u
  misc_feature (4)..(4): n is a, c, g, or u
nugnugcuguuccaaacccu

SEQ ID NO: 48788 - RNA, 20 nt, Artificial Sequence
  Synthetic
aaauacagagcccuuacccu

SEQ ID NO: 48789 - RNA, 20 nt, Artificial Sequence
  Synthetic
caagccuccaagcugugccu

SEQ ID NO: 48790 - RNA, 20 nt, Artificial Sequence
  Synthetic
aacaucacaucaggacuccu

SEQ ID NO: 48791 - RNA, 20 nt, Artificial Sequence
  Synthetic
uucccaauguuaguauuccu

SEQ ID NO: 48792 - RNA, 20 nt, Artificial Sequence
  Synthetic
  misc_feature (1)..(1): n is a, c, g, or u
nuuaaugacuuuggcuuccu

SEQ ID NO: 48793 - RNA, 20 nt, Artificial Sequence
  Synthetic
aagccacccaaggcacagcu

SEQ ID NO: 48794 - RNA, 20 nt, Artificial Sequence
  Synthetic
  misc_feature (4)..(4): n is a, c, g, or u
  misc_feature (10)..(10): n is a, c, g, or u
  misc_feature (16)..(16): n is a, c, g, or u
cgancccucncggggncgcu

SEQ ID NO: 48795 - RNA, 20 nt, Artificial Sequence
  Synthetic
  misc_feature (9)..(9): n is a, c, g, or u
accuccuunccauggcugcu

SEQ ID NO: 48796 - RNA, 20 nt, Artificial Sequence
  Synthetic
  misc_feature (9)..(9): n is a, c, g, or u
  misc_feature (18)..(18): n is a, c, g, or u
cucucuguncccaauccncu

SEQ ID NO: 48797 - RNA, 20 nt, Artificial Sequence
  Synthetic
acaacucuguuguccucucu

SEQ ID NO: 48798 - RNA, 20 nt, Artificial Sequence
  Synthetic
uggacuucucucaauuuucu

SEQ ID NO: 48799 - RNA, 20 nt, Artificial Sequence
  Synthetic
  misc_feature (3)..(3): n is a, c, g, or u
cancgauagccaggacaagu

SEQ ID NO: 48800 - RNA, 20 nt, Artificial Sequence
  Synthetic
  misc_feature (3)..(3): n is a, c, g, or u
canagaaaggccuuguaagu

SEQ ID NO: 48801 - RNA, 20 nt, Artificial Sequence
  Synthetic
agcuuggaggcuugaacagu

SEQ ID NO: 48802 - RNA, 20 nt, Artificial Sequence
  Synthetic
auaacuaaaagccagacagu

SEQ ID NO: 48803 - RNA, 20 nt, Artificial Sequence
  Synthetic
auggccaagccccaaccagu

SEQ ID NO: 48804 - RNA, 20 nt, Artificial Sequence
  Synthetic
auggcaaacaagguaggagu

SEQ ID NO: 48805 - RNA, 20 nt, Artificial Sequence
  Synthetic
  misc_feature (11)..(11): n is a, c, g, or u
  misc_feature (17)..(17): n is a, c, g, or u
uggguuaugunauuggnagu

SEQ ID NO: 48806 - RNA, 20 nt, Artificial Sequence
  Synthetic
caauuuguucaguggugcgu

SEQ ID NO: 48807 - RNA, 20 nt, Artificial Sequence
  Synthetic
uggccaauggcaaacaaggu

SEQ ID NO: 48808 - RNA, 20 nt, Artificial Sequence
  Synthetic
caaguuggaggacaggaggu

SEQ ID NO: 48809 - RNA, 20 nt, Artificial Sequence
  Synthetic
agagguggagagacuggggu

SEQ ID NO: 48810 - RNA, 20 nt, Artificial Sequence
  Synthetic
augacuuuggcuuccugggu

SEQ ID NO: 48811 - RNA, 20 nt, Artificial Sequence
  Synthetic
  misc_feature (18)..(18): n is a, c, g, or u
agagaggugcgacccgungu

SEQ ID NO: 48812 - RNA, 20 nt, Artificial Sequence
  Synthetic
  misc_feature (9)..(9): n is a, c, g, or u
ucuuuguanuaggaggcugu

SEQ ID NO: 48813 - RNA, 20 nt, Artificial Sequence
  Synthetic
accaauuuucuguuaucugu

SEQ ID NO: 48814 - RNA, 20 nt, Artificial Sequence
  Synthetic
  misc_feature (7)..(7): n is a, c, g, or u
accccancaggccaccgugu

SEQ ID NO: 48815 - RNA, 20 nt, Artificial Sequence
  Synthetic
  misc_feature (15)..(15): n is a, c, g, or u
aaaguuugucaacgnauugu

SEQ ID NO: 48816 - RNA, 20 nt, Artificial Sequence
  Synthetic
  misc_feature (1)..(3): n is a, c, g, or u
nnnaaaugugaacaauuugu

SEQ ID NO: 48817 - RNA, 20 nt, Artificial Sequence
  Synthetic
  misc_feature (19)..(19): n is a, c, g, or u
uuccugggugggcaauaanu

SEQ ID NO: 48818 - RNA, 20 nt, Artificial Sequence
  Synthetic
  misc_feature (7)..(7): n is a, c, g, or u
  misc_feature (19)..(19): n is a, c, g, or u
ucaacanaaacaaggacanu

SEQ ID NO: 48819 - RNA, 20 nt, Artificial Sequence
  Synthetic
  misc_feature (19)..(19): n is a, c, g, or u
aaauuccagcagucccganu

SEQ ID NO: 48820 - RNA, 20 nt, Artificial Sequence
  Synthetic
  misc_feature (8)..(8): n is a, c, g, or u
  misc_feature (10)..(10): n is a, c, g, or u
  misc_feature (19)..(19): n is a, c, g, or u
agguuaangnucuuuguanu

SEQ ID NO: 48821 - RNA, 20 nt, Artificial Sequence
  Synthetic
  misc_feature (19)..(19): n is a, c, g, or u
uauucccaucccaucaucnu

SEQ ID NO: 48822 - RNA, 20 nt, Artificial Sequence
  Synthetic
  misc_feature (19)..(19): n is a, c, g, or u
uugugggucaccauauucnu

SEQ ID NO: 48823 - RNA, 20 nt, Artificial Sequence
  Synthetic
  misc_feature (6)..(6): n is a, c, g, or u
  misc_feature (19)..(19): n is a, c, g, or u
uuuaangacugggaggagnu

SEQ ID NO: 48824 - RNA, 20 nt, Artificial Sequence
  Synthetic
  misc_feature (19)..(19): n is a, c, g, or u
cccccacacgguggccugnu

SEQ ID NO: 48825 - RNA, 20 nt, Artificial Sequence
  Synthetic
  misc_feature (13)..(13): n is a, c, g, or u
  misc_feature (19)..(19): n is a, c, g, or u
caggcaagcuaunuugugnu

SEQ ID NO: 48826 - RNA, 20 nt, Artificial Sequence
  Synthetic
auugacccuuauaaagaauu

SEQ ID NO: 48827 - RNA, 20 nt, Artificial Sequence
  Synthetic
cucaagaugcugcacagauu

SEQ ID NO: 48828 - RNA, 20 nt, Artificial Sequence
  Synthetic
agaaacaguucuugaguauu

SEQ ID NO: 48829 - RNA, 20 nt, Artificial Sequence
  Synthetic
uauauggaugaucugguauu

SEQ ID NO: 48830 - RNA, 20 nt, Artificial Sequence
  Synthetic
  misc_feature (1)..(1): n is a, c, g, or u
  misc_feature (10)..(10): n is a, c, g, or u
nugggguganuuaaugacuu

SEQ ID NO: 48831 - RNA, 20 nt, Artificial Sequence
  Synthetic
aagccuccaagcugugccuu

SEQ ID NO: 48832 - RNA, 20 nt, Artificial Sequence
  Synthetic
agcugugccuuggguggcuu

SEQ ID NO: 48833 - RNA, 20 nt, Artificial Sequence
  Synthetic
uugguaagugauuggagguu

SEQ ID NO: 48834 - RNA, 20 nt, Artificial Sequence
  Synthetic
  misc_feature (5)..(5): n is a, c, g, or u
  misc_feature (17)..(17): n is a, c, g, or u
cuganuucuucccgucnguu

SEQ ID NO: 48835 - RNA, 20 nt, Artificial Sequence
  Synthetic
  misc_feature (18)..(18): n is a, c, g, or u
cuugaguauuuggugucnuu

SEQ ID NO: 48836 - RNA, 20 nt, Artificial Sequence
  Synthetic
  misc_feature (18)..(18): n is a, c, g, or u
ugccugagagcgguaugnuu

SEQ ID NO: 48837 - RNA, 20 nt, Artificial Sequence
  Synthetic
agguuggggacugcgaauuu

SEQ ID NO: 48838 - RNA, 20 nt, Artificial Sequence
  Synthetic
cacauuuccugccuuacuuu

SEQ ID NO: 48839 - RNA, 20 nt, Artificial Sequence
  Synthetic
  misc_feature (12)..(12): n is a, c, g, or u
aucccaucaucnugggcuuu

SEQ ID NO: 48840 - RNA, 20 nt, Artificial Sequence
  Synthetic
  misc_feature (7)..(7): n is a, c, g, or u
  misc_feature (16)..(16): n is a, c, g, or u
ucaacgnauugugggncuuu

SEQ ID NO: 48841 - RNA, 20 nt, Artificial Sequence
  Synthetic
  misc_feature (6)..(6): n is a, c, g, or u
  misc_feature (15)..(15): n is a, c, g, or u
caacgnauugugggncuuuu

SEQ ID NO: 48842 - RNA, 22 nt, Artificial Sequence
  Synthetic
guguacuuccuagagaggacaa

SEQ ID NO: 48843 - RNA, 23 nt, Artificial Sequence
  Synthetic
gguguacuuccuagagaggacaa

SEQ ID NO: 48844 - RNA, 20 nt, Artificial Sequence
  Synthetic
gccuggccguugccgagcaa

SEQ ID NO: 48845 - RNA, 21 nt, Artificial Sequence
  Synthetic
ggccuggccguugccgagcaa

SEQ ID NO: 48846 - RNA, 18 nt, Artificial Sequence
  Synthetic
ggucuggaaagaauccca

SEQ ID NO: 48847 - RNA, 21 nt, Artificial Sequence
  Synthetic
gauggucuggaaagaauccca

SEQ ID NO: 48848 - RNA, 24 nt, Artificial Sequence
  Synthetic
gcugauggucuggaaagaauccca

SEQ ID NO: 48849 - RNA, 19 nt, Artificial Sequence
  Synthetic
gcgagcgaaacaagcugca

SEQ ID NO: 48850 - RNA, 22 nt, Artificial Sequence
  Synthetic
gcugcgagcgaaacaagcugca

SEQ ID NO: 48851 - RNA, 23 nt, Artificial Sequence
  Synthetic
ggcugcgagcgaaacaagcugca

SEQ ID NO: 48852 - RNA, 22 nt, Artificial Sequence
  Synthetic
  misc_feature (2)..(2): n is a, c, g, or u
  misc_feature (11)..(11): n is a, c, g, or u
gnaaaugaaunucaggaaaaga

SEQ ID NO: 48853 - RNA, 20 nt, Artificial Sequence
  Synthetic
  misc_feature (3)..(3): n is a, c, g, or u
gancuucgucugcgaggcga

SEQ ID NO: 48854 - RNA, 22 nt, Artificial Sequence
  Synthetic
  misc_feature (5)..(5): n is a, c, g, or u
gagancuucgucugcgaggcga

SEQ ID NO: 48855 - RNA, 21 nt, Artificial Sequence
  Synthetic
ggauccagcugauggucugga

SEQ ID NO: 48856 - RNA, 23 nt, Artificial Sequence
  Synthetic
  misc_feature (2)..(2): n is a, c, g, or u
gnggauccagcugauggucugga

SEQ ID NO: 48857 - RNA, 24 nt, Artificial Sequence
  Synthetic
  misc_feature (19)..(19): n is a, c, g, or u
guauuuuccuaaagcccangauga

SEQ ID NO: 48858 - RNA, 24 nt, Artificial Sequence
  Synthetic
  misc_feature (17)..(17): n is a, c, g, or u
  misc_feature (23)..(23): n is a, c, g, or u
gacugcuggaauuugcncugaana

SEQ ID NO: 48859 - RNA, 18 nt, Artificial Sequence
  Synthetic
gaauuuuggccaggacac

SEQ ID NO: 48860 - RNA, 20 nt, Artificial Sequence
  Synthetic
gcgaauuuuggccaggacac

SEQ ID NO: 48861 - RNA, 24 nt, Artificial Sequence
  Synthetic
gacugcgaauuuuggccaggacac

SEQ ID NO: 48862 - RNA, 21 nt, Artificial Sequence
  Synthetic
gucucuuagagguggagagac

SEQ ID NO: 48863 - RNA, 23 nt, Artificial Sequence
  Synthetic
gugucucuuagagguggagagac

SEQ ID NO: 48864 - RNA, 21 nt, Artificial Sequence
  Synthetic
gaaaauugagagaaguccacc

SEQ ID NO: 48865 - RNA, 21 nt, Artificial Sequence
  Synthetic
gaaaauacagagcccuuaccc

SEQ ID NO: 48866 - RNA, 22 nt, Artificial Sequence
  Synthetic
ggaaaauacagagcccuuaccc

SEQ ID NO: 48867 - RNA, 23 nt, Artificial Sequence
  Synthetic
  misc_feature (8)..(8): n is a, c, g, or u
gaauacangugcaguuuccgucc

SEQ ID NO: 48868 - RNA, 24 nt, Artificial Sequence
  Synthetic
  misc_feature (9)..(9): n is a, c, g, or u
ggaauacangugcaguuuccgucc

SEQ ID NO: 48869 - RNA, 22 nt, Artificial Sequence
  Synthetic
gaaacauagagguuccuugagc

SEQ ID NO: 48870 - RNA, 23 nt, Artificial Sequence
  Synthetic
ggaaacauagagguuccuugagc

SEQ ID NO: 48871 - RNA, 24 nt, Artificial Sequence
  Synthetic
gggaaacauagagguuccuugagc

SEQ ID NO: 48872 - RNA, 23 nt, Artificial Sequence
  Synthetic
  misc_feature (13)..(13): n is a, c, g, or u
guugaagucccanucgggacugc

SEQ ID NO: 48873 - RNA, 21 nt, Artificial Sequence
  Synthetic
gccgauugguggaagcaggag

SEQ ID NO: 48874 - RNA, 18 nt, Artificial Sequence
  Synthetic
gagaggcaauagucggag

SEQ ID NO: 48875 - RNA, 20 nt, Artificial Sequence
  Synthetic
gagagaggcaauagucggag

SEQ ID NO: 48876 - RNA, 22 nt, Artificial Sequence
  Synthetic
gugagagaggcaauagucggag

SEQ ID NO: 48877 - RNA, 21 nt, Artificial Sequence
  Synthetic
  misc_feature (2)..(2): n is a, c, g, or u
  misc_feature (8)..(8): n is a, c, g, or u
  misc_feature (14)..(14): n is a, c, g, or u
gnccccgngagggnucguccg

SEQ ID NO: 48878 - RNA, 23 nt, Artificial Sequence
  Synthetic
  misc_feature (4)..(4): n is a, c, g, or u
  misc_feature (10)..(10): n is a, c, g, or u
  misc_feature (16)..(16): n is a, c, g, or u
gcgnccccgngagggnucguccg

SEQ ID NO: 48879 - RNA, 21 nt, Artificial Sequence
  Synthetic
guaaacaaaggacgucccgcg

SEQ ID NO: 48880 - RNA, 24 nt, Artificial Sequence
  Synthetic
gacguaaacaaaggacgucccgcg

SEQ ID NO: 48881 - RNA, 23 nt, Artificial Sequence
  Synthetic
  misc_feature (21)..(21): n is a, c, g, or u
gcauuugguggucuauaagcngg

SEQ ID NO: 48882 - RNA, 24 nt, Artificial Sequence
  Synthetic
  misc_feature (22)..(22): n is a, c, g, or u
ggcauuugguggucuauaagcngg

SEQ ID NO: 48883 - RNA, 24 nt, Artificial Sequence
  Synthetic
guaagugauuggagguuggggacu

SEQ ID NO: 48884 - RNA, 20 nt, Artificial Sequence
  Synthetic
guaacacgagcagggguccu

SEQ ID NO: 48885 - RNA, 24 nt, Artificial Sequence
  Synthetic
gccuguaacacgagcagggguccu

SEQ ID NO: 48886 - RNA, 24 nt, Artificial Sequence
  Synthetic
gccaauggccaagccccaaccagu

SEQ ID NO: 48887 - RNA, 21 nt, Artificial Sequence
  Synthetic
gaaaagaaggaguuaaccagu

SEQ ID NO: 48888 - RNA, 22 nt, Artificial Sequence
  Synthetic
ggaaaagaaggaguuaaccagu

SEQ ID NO: 48889 - RNA, 20 nt, Artificial Sequence
  Synthetic
gcugcaaggaguuccgcagu

SEQ ID NO: 48890 - RNA, 19 nt, Artificial Sequence
  Synthetic
  misc_feature (11)..(11): n is a, c, g, or u
gucuauaagcnggaggagu

SEQ ID NO: 48891 - RNA, 20 nt, Artificial Sequence
  Synthetic
  misc_feature (12)..(12): n is a, c, g, or u
ggucuauaagcnggaggagu

SEQ ID NO: 48892 - RNA, 22 nt, Artificial Sequence
  Synthetic
  misc_feature (14)..(14): n is a, c, g, or u
guggucuauaagcnggaggagu

SEQ ID NO: 48893 - RNA, 23 nt, Artificial Sequence
  Synthetic
  misc_feature (15)..(15): n is a, c, g, or u
gguggucuauaagcnggaggagu

SEQ ID NO: 48894 - RNA, 24 nt, Artificial Sequence
  Synthetic
gacccacaaaaugaggcgcuacgu

SEQ ID NO: 48895 - RNA, 21 nt, Artificial Sequence
  Synthetic
gucuagacucugugguauugu

SEQ ID NO: 48896 - RNA, 23 nt, Artificial Sequence
  Synthetic
gagucuagacucugugguauugu

SEQ ID NO: 48897 - RNA, 22 nt, Artificial Sequence
  Synthetic
  misc_feature (2)..(2): n is a, c, g, or u
  misc_feature (11)..(11): n is a, c, g, or u
gncccguaaanuuucccaccuu

SEQ ID NO: 48898 - RNA, 24 nt, Artificial Sequence
  Synthetic
  misc_feature (4)..(4): n is a, c, g, or u
  misc_feature (13)..(13): n is a, c, g, or u
gagncccguaaanuuucccaccuu

SEQ ID NO: 48899 - RNA, 21 nt, Artificial Sequence
  Synthetic
  misc_feature (10)..(10): n is a, c, g, or u
gcugcucggnugugcugccaa

SEQ ID NO: 48900 - RNA, 22 nt, Artificial Sequence
  Synthetic
  misc_feature (11)..(11): n is a, c, g, or u
ggcugcucggnugugcugccaa

SEQ ID NO: 48901 - RNA, 22 nt, Artificial Sequence
  Synthetic
gacaaaaauccucacaauacca

SEQ ID NO: 48902 - RNA, 23 nt, Artificial Sequence
  Synthetic
  misc_feature (4)..(4): n is a, c, g, or u
  misc_feature (7)..(7): n is a, c, g, or u
  misc_feature (10)..(10): n is a, c, g, or u
  misc_feature (14)..(14): n is a, c, g, or u
gaangcnggnauunuauauaaga

SEQ ID NO: 48903 - RNA, 24 nt, Artificial Sequence
  Synthetic
  misc_feature (5)..(5): n is a, c, g, or u
  misc_feature (8)..(8): n is a, c, g, or u
  misc_feature (11)..(11): n is a, c, g, or u
  misc_feature (15)..(15): n is a, c, g, or u
ggaangcnggnauunuauauaaga

SEQ ID NO: 48904 - RNA, 21 nt, Artificial Sequence
  Synthetic
gcauggacauugacccuuaua

SEQ ID NO: 48905 - RNA, 22 nt, Artificial Sequence
  Synthetic
ggcauggacauugacccuuaua

SEQ ID NO: 48906 - RNA, 23 nt, Artificial Sequence
  Synthetic
gggcauggacauugacccuuaua

SEQ ID NO: 48907 - RNA, 24 nt, Artificial Sequence
  Synthetic
ggggcauggacauugacccuuaua

SEQ ID NO: 48908 - RNA, 22 nt, Artificial Sequence
  Synthetic
  misc_feature (12)..(12): n is a, c, g, or u
  misc_feature (20)..(20): n is a, c, g, or u
gacuuucagganggucaaunac

SEQ ID NO: 48909 - RNA, 23 nt, Artificial Sequence
  Synthetic
  misc_feature (13)..(13): n is a, c, g, or u
  misc_feature (21)..(21): n is a, c, g, or u
ggacuuucagganggucaaunac

SEQ ID NO: 48910 - RNA, 21 nt, Artificial Sequence
  Synthetic
  misc_feature (18)..(18): n is a, c, g, or u
gacaccgcuucagcccunuac

SEQ ID NO: 48911 - RNA, 22 nt, Artificial Sequence
  Synthetic
guucaagccuccaagcugugcc

SEQ ID NO: 48912 - RNA, 24 nt, Artificial Sequence
  Synthetic
  misc_feature (13)..(13): n is a, c, g, or u
  misc_feature (19)..(19): n is a, c, g, or u
guuccaccaggcncuguungaucc

SEQ ID NO: 48913 - RNA, 23 nt, Artificial Sequence
  Synthetic
  misc_feature (13)..(13): n is a, c, g, or u
  misc_feature (22)..(22): n is a, c, g, or u
gaaucucucuguncccaauccnc

SEQ ID NO: 48914 - RNA, 19 nt, Artificial Sequence
  Synthetic
gccaaaucugugcagcauc

SEQ ID NO: 48915 - RNA, 20 nt, Artificial Sequence
  Synthetic
ggccaaaucugugcagcauc

SEQ ID NO: 48916 - RNA, 21 nt, Artificial Sequence
  Synthetic
gggccaaaucugugcagcauc

SEQ ID NO: 48917 - RNA, 22 nt, Artificial Sequence
  Synthetic
ggggccaaaucugugcagcauc

SEQ ID NO: 48918 - RNA, 23 nt, Artificial Sequence
  Synthetic
gggggccaaaucugugcagcauc

SEQ ID NO: 48919 - RNA, 22 nt, Artificial Sequence
  Synthetic
  misc_feature (15)..(15): n is a, c, g, or u
guaggagugggaggnuacgguc

SEQ ID NO: 48920 - RNA, 23 nt, Artificial Sequence
  Synthetic
  misc_feature (16)..(16): n is a, c, g, or u
gguaggagugggaggnuacgguc

SEQ ID NO: 48921 - RNA, 22 nt, Artificial Sequence
  Synthetic
  misc_feature (5)..(5): n is a, c, g, or u
guganuuaaugacuuuggcuuc

SEQ ID NO: 48922 - RNA, 23 nt, Artificial Sequence
  Synthetic
  misc_feature (6)..(6): n is a, c, g, or u
gguganuuaaugacuuuggcuuc

SEQ ID NO: 48923 - RNA, 24 nt, Artificial Sequence
  Synthetic
  misc_feature (7)..(7): n is a, c, g, or u
ggguganuuaaugacuuuggcuuc

SEQ ID NO: 48924 - RNA, 20 nt, Artificial Sequence
  Synthetic
  misc_feature (17)..(17): n is a, c, g, or u
gcccguuuguccucuanuuc

SEQ ID NO: 48925 - RNA, 23 nt, Artificial Sequence
  Synthetic
  misc_feature (20)..(20): n is a, c, g, or u
guugcccguuuguccucuanuuc

SEQ ID NO: 48926 - RNA, 20 nt, Artificial Sequence
  Synthetic
gauucuuuccagaccaucag

SEQ ID NO: 48927 - RNA, 21 nt, Artificial Sequence
  Synthetic
ggauucuuuccagaccaucag

SEQ ID NO: 48928 - RNA, 22 nt, Artificial Sequence
  Synthetic
gggauucuuuccagaccaucag

SEQ ID NO: 48929 - RNA, 18 nt, Artificial Sequence
  Synthetic
guuuacgucccgucggcg

SEQ ID NO: 48930 - RNA, 21 nt, Artificial Sequence
  Synthetic
  misc_feature (3)..(3): n is a, c, g, or u
  misc_feature (11)..(11): n is a, c, g, or u
ganggucaaunaccuggaucg

SEQ ID NO: 48931 - RNA, 22 nt, Artificial Sequence
  Synthetic
  misc_feature (4)..(4): n is a, c, g, or u
  misc_feature (12)..(12): n is a, c, g, or u
gganggucaaunaccuggaucg

SEQ ID NO: 48932 - RNA, 24 nt, Artificial Sequence
  Synthetic
  misc_feature (18)..(18): n is a, c, g, or u
  misc_feature (24)..(24): n is a, c, g, or u
gcucucaggcaagcuaunuugugn

SEQ ID NO: 48933 - RNA, 21 nt, Artificial Sequence
  Synthetic
gggcuuuaggaaaauaccuau

SEQ ID NO: 48934 - RNA, 21 nt, Artificial Sequence
  Synthetic
guuaccaauuuucuguuaucu

SEQ ID NO: 48935 - RNA, 24 nt, Artificial Sequence
  Synthetic
gcuguuaccaauuuucuguuaucu

SEQ ID NO: 48936 - RNA, 21 nt, Artificial Sequence
  Synthetic
  misc_feature (13)..(13): n is a, c, g, or u
guauuuggugucnuuuggagu

SEQ ID NO: 48937 - RNA, 23 nt, Artificial Sequence
  Synthetic
  misc_feature (15)..(15): n is a, c, g, or u
gaguauuuggugucnuuuggagu

SEQ ID NO: 48938 - RNA, 23 nt, Artificial Sequence
  Synthetic
  misc_feature (21)..(21): n is a, c, g, or u
guucuugaguauuuggugucnuu

SEQ ID NO: 48939 - RNA, 21 nt, Artificial Sequence
  Synthetic
uguacuuccuagagaggacaa

SEQ ID NO: 48940 - RNA, 24 nt, Artificial Sequence
  Synthetic
agguguacuuccuagagaggacaa

SEQ ID NO: 48941 - RNA, 18 nt, Artificial Sequence
  Synthetic
cuggccguugccgagcaa

SEQ ID NO: 48942 - RNA, 19 nt, Artificial Sequence
  Synthetic
ccuggccguugccgagcaa

SEQ ID NO: 48943 - RNA, 22 nt, Artificial Sequence
  Synthetic
aggccuggccguugccgagcaa

SEQ ID NO: 48944 - RNA, 23 nt, Artificial Sequence
  Synthetic
caggccuggccguugccgagcaa

SEQ ID NO: 48945 - RNA, 24 nt, Artificial Sequence
  Synthetic
acaggccuggccguugccgagcaa

SEQ ID NO: 48946 - RNA, 19 nt, Artificial Sequence
  Synthetic
uggucuggaaagaauccca

SEQ ID NO: 48947 - RNA, 20 nt, Artificial Sequence
  Synthetic
auggucuggaaagaauccca

SEQ ID NO: 48948 - RNA, 22 nt, Artificial Sequence
  Synthetic
ugauggucuggaaagaauccca

SEQ ID NO: 48949 - RNA, 23 nt, Artificial Sequence
  Synthetic
cugauggucuggaaagaauccca

SEQ ID NO: 48950 - RNA, 21 nt, Artificial Sequence
  Synthetic
  misc_feature (1)..(1): n is a, c, g, or u
nuuucccaccuuaugagucca

SEQ ID NO: 48951 - RNA, 22 nt, Artificial Sequence
  Synthetic
  misc_feature (2)..(2): n is a, c, g, or u
anuuucccaccuuaugagucca

SEQ ID NO: 48952 - RNA, 23 nt, Artificial Sequence
  Synthetic
  misc_feature (3)..(3): n is a, c, g, or u
aanuuucccaccuuaugagucca

SEQ ID NO: 48953 - RNA, 24 nt, Artificial Sequence
  Synthetic
  misc_feature (4)..(4): n is a, c, g, or u
aaanuuucccaccuuaugagucca

SEQ ID NO: 48954 - RNA, 18 nt, Artificial Sequence
  Synthetic
cgagcgaaacaagcugca

SEQ ID NO: 48955 - RNA, 20 nt, Artificial Sequence
  Synthetic
ugcgagcgaaacaagcugca

SEQ ID NO: 48956 - RNA, 21 nt, Artificial Sequence
  Synthetic
cugcgagcgaaacaagcugca

SEQ ID NO: 48957 - RNA, 24 nt, Artificial Sequence
  Synthetic
cggcugcgagcgaaacaagcugca

SEQ ID NO: 48958 - RNA, 21 nt, Artificial Sequence
  Synthetic
  misc_feature (1)..(1): n is a, c, g, or u
  misc_feature (10)..(10): n is a, c, g, or u
naaaugaaunucaggaaaaga

SEQ ID NO: 48959 - RNA, 23 nt, Artificial Sequence
  Synthetic
  misc_feature (3)..(3): n is a, c, g, or u
  misc_feature (12)..(12): n is a, c, g, or u
ugnaaaugaaunucaggaaaaga

SEQ ID NO: 48960 - RNA, 24 nt, Artificial Sequence
  Synthetic
  misc_feature (4)..(4): n is a, c, g, or u
  misc_feature (13)..(13): n is a, c, g, or u
augnaaaugaaunucaggaaaaga

SEQ ID NO: 48961 - RNA, 18 nt, Artificial Sequence
  Synthetic
  misc_feature (1)..(1): n is a, c, g, or u
ncuucgucugcgaggcga

SEQ ID NO: 48962 - RNA, 19 nt, Artificial Sequence
  Synthetic
  misc_feature (2)..(2): n is a, c, g, or u
ancuucgucugcgaggcga

SEQ ID NO: 48963 - RNA, 21 nt, Artificial Sequence
  Synthetic
  misc_feature (4)..(4): n is a, c, g, or u
agancuucgucugcgaggcga

SEQ ID NO: 48964 - RNA, 23 nt, Artificial Sequence
  Synthetic
  misc_feature (6)..(6): n is a, c, g, or u
ugagancuucgucugcgaggcga

SEQ ID NO: 48965 - RNA, 24 nt, Artificial Sequence
  Synthetic
  misc_feature (7)..(7): n is a, c, g, or u
uugagancuucgucugcgaggcga

SEQ ID NO: 48966 - RNA, 22 nt, Artificial Sequence
  Synthetic
  misc_feature (1)..(1): n is a, c, g, or u
nggauccagcugauggucugga

SEQ ID NO: 48967 - RNA, 24 nt, Artificial Sequence
  Synthetic
  misc_feature (3)..(3): n is a, c, g, or u
agnggauccagcugauggucugga

SEQ ID NO: 48968 - RNA, 21 nt, Artificial Sequence
  Synthetic
  misc_feature (16)..(16): n is a, c, g, or u
uuuuccuaaagcccangauga

SEQ ID NO: 48969 - RNA, 22 nt, Artificial Sequence
  Synthetic
  misc_feature (17)..(17): n is a, c, g, or u
auuuuccuaaagcccangauga

SEQ ID NO: 48970 - RNA, 23 nt, Artificial Sequence
  Synthetic
  misc_feature (18)..(18): n is a, c, g, or u
uauuuuccuaaagcccangauga

SEQ ID NO: 48971 - RNA, 21 nt, Artificial Sequence
  Synthetic
  misc_feature (14)..(14): n is a, c, g, or u
  misc_feature (20)..(20): n is a, c, g, or u
ugcuggaauuugcncugaana

SEQ ID NO: 48972 - RNA, 22 nt, Artificial Sequence
  Synthetic
  misc_feature (15)..(15): n is a, c, g, or u
  misc_feature (21)..(21): n is a, c, g, or u
cugcuggaauuugcncugaana

SEQ ID NO: 48973 - RNA, 23 nt, Artificial Sequence
  Synthetic
  misc_feature (16)..(16): n is a, c, g, or u
  misc_feature (22)..(22): n is a, c, g, or u
acugcuggaauuugcncugaana

SEQ ID NO: 48974 - RNA, 19 nt, Artificial Sequence
  Synthetic
cgaauuuuggccaggacac

SEQ ID NO: 48975 - RNA, 21 nt, Artificial Sequence
  Synthetic
ugcgaauuuuggccaggacac

SEQ ID NO: 48976 - RNA, 22 nt, Artificial Sequence
  Synthetic
cugcgaauuuuggccaggacac

SEQ ID NO: 48977 - RNA, 23 nt, Artificial Sequence
  Synthetic
acugcgaauuuuggccaggacac

SEQ ID NO: 48978 - RNA, 18 nt, Artificial Sequence
  Synthetic
ucuuagagguggagagac

SEQ ID NO: 48979 - RNA, 19 nt, Artificial Sequence
  Synthetic
cucuuagagguggagagac

SEQ ID NO: 48980 - RNA, 20 nt, Artificial Sequence
  Synthetic
ucucuuagagguggagagac

SEQ ID NO: 48981 - RNA, 22 nt, Artificial Sequence
  Synthetic
ugucucuuagagguggagagac

SEQ ID NO: 48982 - RNA, 24 nt, Artificial Sequence
  Synthetic
  misc_feature (1)..(1): n is a, c, g, or u
ngugucucuuagagguggagagac

SEQ ID NO: 48983 - RNA, 22 nt, Artificial Sequence
  Synthetic
agaaaauugagagaaguccacc

SEQ ID NO: 48984 - RNA, 23 nt, Artificial Sequence
  Synthetic
uagaaaauugagagaaguccacc

SEQ ID NO: 48985 - RNA, 24 nt, Artificial Sequence
  Synthetic
cuagaaaauugagagaaguccacc

SEQ ID NO: 48986 - RNA, 23 nt, Artificial Sequence
  Synthetic
aggaaaauacagagcccuuaccc

SEQ ID NO: 48987 - RNA, 24 nt, Artificial Sequence
  Synthetic
caggaaaauacagagcccuuaccc

SEQ ID NO: 48988 - RNA, 21 nt, Artificial Sequence
  Synthetic
caugcuguagcucuuguuccc

SEQ ID NO: 48989 - RNA, 22 nt, Artificial Sequence
  Synthetic
ccaugcuguagcucuuguuccc

SEQ ID NO: 48990 - RNA, 23 nt, Artificial Sequence
  Synthetic
cccaugcuguagcucuuguuccc

SEQ ID NO: 48991 - RNA, 24 nt, Artificial Sequence
  Synthetic
ucccaugcuguagcucuuguuccc

SEQ ID NO: 48992 - RNA, 21 nt, Artificial Sequence
  Synthetic
  misc_feature (6)..(6): n is a, c, g, or u
auacangugcaguuuccgucc

SEQ ID NO: 48993 - RNA, 22 nt, Artificial Sequence
  Synthetic
  misc_feature (7)..(7): n is a, c, g, or u
aauacangugcaguuuccgucc

SEQ ID NO: 48994 - RNA, 18 nt, Artificial Sequence
  Synthetic
accgccuguaacacgagc

SEQ ID NO: 48995 - RNA, 19 nt, Artificial Sequence
  Synthetic
caccgccuguaacacgagc

SEQ ID NO: 48996 - RNA, 20 nt, Artificial Sequence
  Synthetic
acaccgccuguaacacgagc

SEQ ID NO: 48997 - RNA, 21 nt, Artificial Sequence
  Synthetic
cacaccgccuguaacacgagc

SEQ ID NO: 48998 - RNA, 22 nt, Artificial Sequence
  Synthetic
acacaccgccuguaacacgagc

SEQ ID NO: 48999 - RNA, 23 nt, Artificial Sequence
  Synthetic
aacacaccgccuguaacacgagc

SEQ ID NO: 49000 - RNA, 24 nt, Artificial Sequence
  Synthetic
aaacacaccgccuguaacacgagc

SEQ ID NO: 49001 - RNA, 18 nt, Artificial Sequence
  Synthetic
cauagagguuccuugagc

SEQ ID NO: 49002 - RNA, 19 nt, Artificial Sequence
  Synthetic
acauagagguuccuugagc

SEQ ID NO: 49003 - RNA, 20 nt, Artificial Sequence
  Synthetic
aacauagagguuccuugagc

SEQ ID NO: 49004 - RNA, 21 nt, Artificial Sequence
  Synthetic
aaacauagagguuccuugagc

SEQ ID NO: 49005 - RNA, 21 nt, Artificial Sequence
  Synthetic
  misc_feature (11)..(11): n is a, c, g, or u
ugaagucccanucgggacugc

SEQ ID NO: 49006 - RNA, 22 nt, Artificial Sequence
  Synthetic
  misc_feature (12)..(12): n is a, c, g, or u
uugaagucccanucgggacugc

SEQ ID NO: 49007 - RNA, 24 nt, Artificial Sequence
  Synthetic
  misc_feature (14)..(14): n is a, c, g, or u
uguugaagucccanucgggacugc

SEQ ID NO: 49008 - RNA, 21 nt, Artificial Sequence
  Synthetic
caagaagaugaggcauagcag

SEQ ID NO: 49009 - RNA, 22 nt, Artificial Sequence
  Synthetic
acaagaagaugaggcauagcag

SEQ ID NO: 49010 - RNA, 23 nt, Artificial Sequence
  Synthetic
aacaagaagaugaggcauagcag

SEQ ID NO: 49011 - RNA, 24 nt, Artificial Sequence
  Synthetic
caacaagaagaugaggcauagcag

SEQ ID NO: 49012 - RNA, 21 nt, Artificial Sequence
  Synthetic
  misc_feature (4)..(4): n is a, c, g, or u
aggnauacagaggcaugagag

SEQ ID NO: 49013 - RNA, 22 nt, Artificial Sequence
  Synthetic
  misc_feature (5)..(5): n is a, c, g, or u
caggnauacagaggcaugagag

SEQ ID NO: 49014 - RNA, 23 nt, Artificial Sequence
  Synthetic
  misc_feature (6)..(6): n is a, c, g, or u
acaggnauacagaggcaugagag

SEQ ID NO: 49015 - RNA, 24 nt, Artificial Sequence
  Synthetic
  misc_feature (7)..(7): n is a, c, g, or u
uacaggnauacagaggcaugagag

SEQ ID NO: 49016 - RNA, 22 nt, Artificial Sequence
  Synthetic
cgccgauugguggaagcaggag

SEQ ID NO: 49017 - RNA, 23 nt, Artificial Sequence
  Synthetic
ccgccgauugguggaagcaggag

SEQ ID NO: 49018 - RNA, 24 nt, Artificial Sequence
  Synthetic
accgccgauugguggaagcaggag

SEQ ID NO: 49019 - RNA, 19 nt, Artificial Sequence
  Synthetic
agagaggcaauagucggag

SEQ ID NO: 49020 - RNA, 21 nt, Artificial Sequence
  Synthetic
ugagagaggcaauagucggag

SEQ ID NO: 49021 - RNA, 23 nt, Artificial Sequence
  Synthetic
ugugagagaggcaauagucggag

SEQ ID NO: 49022 - RNA, 24 nt, Artificial Sequence
  Synthetic
augugagagaggcaauagucggag

SEQ ID NO: 49023 - RNA, 22 nt, Artificial Sequence
  Synthetic
  misc_feature (3)..(3): n is a, c, g, or u
  misc_feature (9)..(9): n is a, c, g, or u
  misc_feature (15)..(15): n is a, c, g, or u
cgnccccgngagggnucguccg

SEQ ID NO: 49024 - RNA, 24 nt, Artificial Sequence
  Synthetic
  misc_feature (5)..(5): n is a, c, g, or u
  misc_feature (11)..(11): n is a, c, g, or u
  misc_feature (17)..(17): n is a, c, g, or u
agcgnccccgngagggnucguccg

SEQ ID NO: 49025 - RNA, 18 nt, Artificial Sequence
  Synthetic
aacaaaggacgucccgcg

SEQ ID NO: 49026 - RNA, 19 nt, Artificial Sequence
  Synthetic
aaacaaaggacgucccgcg

SEQ ID NO: 49027 - RNA, 20 nt, Artificial Sequence
  Synthetic
uaaacaaaggacgucccgcg

SEQ ID NO: 49028 - RNA, 22 nt, Artificial Sequence
  Synthetic
cguaaacaaaggacgucccgcg

SEQ ID NO: 49029 - RNA, 23 nt, Artificial Sequence
  Synthetic
acguaaacaaaggacgucccgcg

SEQ ID NO: 49030 - RNA, 21 nt, Artificial Sequence
  Synthetic
  misc_feature (19)..(19): n is a, c, g, or u
auuugguggucuauaagcngg

SEQ ID NO: 49031 - RNA, 22 nt, Artificial Sequence
  Synthetic
  misc_feature (20)..(20): n is a, c, g, or u
cauuugguggucuauaagcngg

SEQ ID NO: 49032 - RNA, 21 nt, Artificial Sequence
  Synthetic
  misc_feature (2)..(2): n is a, c, g, or u
  misc_feature (6)..(6): n is a, c, g, or u
cnguanagggcugaagcggug

SEQ ID NO: 49033 - RNA, 22 nt, Artificial Sequence
  Synthetic
  misc_feature (3)..(3): n is a, c, g, or u
  misc_feature (7)..(7): n is a, c, g, or u
ccnguanagggcugaagcggug

SEQ ID NO: 49034 - RNA, 23 nt, Artificial Sequence
  Synthetic
  misc_feature (4)..(4): n is a, c, g, or u
  misc_feature (8)..(8): n is a, c, g, or u
cccnguanagggcugaagcggug

SEQ ID NO: 49035 - RNA, 24 nt, Artificial Sequence
  Synthetic
  misc_feature (5)..(5): n is a, c, g, or u
  misc_feature (9)..(9): n is a, c, g, or u
ucccnguanagggcugaagcggug

SEQ ID NO: 49036 - RNA, 21 nt, Artificial Sequence
  Synthetic
cagaagcuccaaauucuuuau

SEQ ID NO: 49037 - RNA, 22 nt, Artificial Sequence
  Synthetic
acagaagcuccaaauucuuuau

SEQ ID NO: 49038 - RNA, 23 nt, Artificial Sequence
  Synthetic
cacagaagcuccaaauucuuuau

SEQ ID NO: 49039 - RNA, 24 nt, Artificial Sequence
  Synthetic
ccacagaagcuccaaauucuuuau

SEQ ID NO: 49040 - RNA, 21 nt, Artificial Sequence
  Synthetic
agugauuggagguuggggacu

SEQ ID NO: 49041 - RNA, 22 nt, Artificial Sequence
  Synthetic
aagugauuggagguuggggacu

SEQ ID NO: 49042 - RNA, 23 nt, Artificial Sequence
  Synthetic
uaagugauuggagguuggggacu

SEQ ID NO: 49043 - RNA, 18 nt, Artificial Sequence
  Synthetic
aacacgagcagggguccu

SEQ ID NO: 49044 - RNA, 19 nt, Artificial Sequence
  Synthetic
uaacacgagcagggguccu

SEQ ID NO: 49045 - RNA, 21 nt, Artificial Sequence
  Synthetic
uguaacacgagcagggguccu

SEQ ID NO: 49046 - RNA, 22 nt, Artificial Sequence
  Synthetic
cuguaacacgagcagggguccu

SEQ ID NO: 49047 - RNA, 23 nt, Artificial Sequence
  Synthetic
ccuguaacacgagcagggguccu

SEQ ID NO: 49048 - RNA, 18 nt, Artificial Sequence
  Synthetic
acaguaguuuccggaagu

SEQ ID NO: 49049 - RNA, 19 nt, Artificial Sequence
  Synthetic
aacaguaguuuccggaagu

SEQ ID NO: 49050 - RNA, 20 nt, Artificial Sequence
  Synthetic
caacaguaguuuccggaagu

SEQ ID NO: 49051 - RNA, 21 nt, Artificial Sequence
  Synthetic
acaacaguaguuuccggaagu

SEQ ID NO: 49052 - RNA, 22 nt, Artificial Sequence
  Synthetic
aacaacaguaguuuccggaagu

SEQ ID NO: 49053 - RNA, 23 nt, Artificial Sequence
  Synthetic
uaacaacaguaguuuccggaagu

SEQ ID NO: 49054 - RNA, 24 nt, Artificial Sequence
  Synthetic
cuaacaacaguaguuuccggaagu

SEQ ID NO: 49055 - RNA, 21 nt, Artificial Sequence
  Synthetic
aauggccaagccccaaccagu

SEQ ID NO: 49056 - RNA, 22 nt, Artificial Sequence
  Synthetic
caauggccaagccccaaccagu

SEQ ID NO: 49057 - RNA, 23 nt, Artificial Sequence
  Synthetic
ccaauggccaagccccaaccagu

SEQ ID NO: 49058 - RNA, 23 nt, Artificial Sequence
  Synthetic
aggaaaagaaggaguuaaccagu

SEQ ID NO: 49059 - RNA, 24 nt, Artificial Sequence
  Synthetic
caggaaaagaaggaguuaaccagu

SEQ ID NO: 49060 - RNA, 18 nt, Artificial Sequence
  Synthetic
ugcaaggaguuccgcagu

SEQ ID NO: 49061 - RNA, 19 nt, Artificial Sequence
  Synthetic
cugcaaggaguuccgcagu

SEQ ID NO: 49062 - RNA, 21 nt, Artificial Sequence
  Synthetic
agcugcaaggaguuccgcagu

SEQ ID NO: 49063 - RNA, 22 nt, Artificial Sequence
  Synthetic
aagcugcaaggaguuccgcagu

SEQ ID NO: 49064 - RNA, 23 nt, Artificial Sequence
  Synthetic
caagcugcaaggaguuccgcagu

SEQ ID NO: 49065 - RNA, 24 nt, Artificial Sequence
  Synthetic
acaagcugcaaggaguuccgcagu

SEQ ID NO: 49066 - RNA, 18 nt, Artificial Sequence
  Synthetic
  misc_feature (10)..(10): n is a, c, g, or u
ucuauaagcnggaggagu

SEQ ID NO: 49067 - RNA, 21 nt, Artificial Sequence
  Synthetic
  misc_feature (13)..(13): n is a, c, g, or u
uggucuauaagcnggaggagu

SEQ ID NO: 49068 - RNA, 24 nt, Artificial Sequence
  Synthetic
  misc_feature (16)..(16): n is a, c, g, or u
ugguggucuauaagcnggaggagu

SEQ ID NO: 49069 - RNA, 18 nt, Artificial Sequence
  Synthetic
caaaaugaggcgcuacgu

SEQ ID NO: 49070 - RNA, 19 nt, Artificial Sequence
  Synthetic
acaaaaugaggcgcuacgu

SEQ ID NO: 49071 - RNA, 20 nt, Artificial Sequence
  Synthetic
cacaaaaugaggcgcuacgu

SEQ ID NO: 49072 - RNA, 21 nt, Artificial Sequence
  Synthetic
ccacaaaaugaggcgcuacgu

SEQ ID NO: 49073 - RNA, 22 nt, Artificial Sequence
  Synthetic
cccacaaaaugaggcgcuacgu

SEQ ID NO: 49074 - RNA, 23 nt, Artificial Sequence
  Synthetic
acccacaaaaugaggcgcuacgu

SEQ ID NO: 49075 - RNA, 21 nt, Artificial Sequence
  Synthetic
  misc_feature (8)..(8): n is a, c, g, or u
caccccancaggccaccgugu

SEQ ID NO: 49076 - RNA, 22 nt, Artificial Sequence
  Synthetic
  misc_feature (9)..(9): n is a, c, g, or u
ccaccccancaggccaccgugu

SEQ ID NO: 49077 - RNA, 23 nt, Artificial Sequence
  Synthetic
  misc_feature (10)..(10): n is a, c, g, or u
uccaccccancaggccaccgugu

SEQ ID NO: 49078 - RNA, 24 nt, Artificial Sequence
  Synthetic
  misc_feature (11)..(11): n is a, c, g, or u
cuccaccccancaggccaccgugu

SEQ ID NO: 49079 - RNA, 22 nt, Artificial Sequence
  Synthetic
agucuagacucugugguauugu

SEQ ID NO: 49080 - RNA, 24 nt, Artificial Sequence
  Synthetic
cgagucuagacucugugguauugu

SEQ ID NO: 49081 - RNA, 21 nt, Artificial Sequence
  Synthetic
  misc_feature (1)..(1): n is a, c, g, or u
  misc_feature (10)..(10): n is a, c, g, or u
ncccguaaanuuucccaccuu

SEQ ID NO: 49082 - RNA, 23 nt, Artificial Sequence
  Synthetic
  misc_feature (3)..(3): n is a, c, g, or u
  misc_feature (12)..(12): n is a, c, g, or u
agncccguaaanuuucccaccuu

SEQ ID NO: 49083 - RNA, 21 nt, Artificial Sequence
  Synthetic
  misc_feature (11)..(11): n is a, c, g, or u
  misc_feature (14)..(14): n is a, c, g, or u
  misc_feature (17)..(17): n is a, c, g, or u
uuguaggcccncunacnaaaa

SEQ ID NO: 49084 - RNA, 22 nt, Artificial Sequence
  Synthetic
  misc_feature (12)..(12): n is a, c, g, or u
  misc_feature (15)..(15): n is a, c, g, or u
  misc_feature (18)..(18): n is a, c, g, or u
uuuguaggcccncunacnaaaa

SEQ ID NO: 49085 - RNA, 23 nt, Artificial Sequence
  Synthetic
  misc_feature (13)..(13): n is a, c, g, or u
  misc_feature (16)..(16): n is a, c, g, or u
  misc_feature (19)..(19): n is a, c, g, or u
auuuguaggcccncunacnaaaa

SEQ ID NO: 49086 - RNA, 24 nt, Artificial Sequence
  Synthetic
  misc_feature (14)..(14): n is a, c, g, or u
  misc_feature (17)..(17): n is a, c, g, or u
  misc_feature (20)..(20): n is a, c, g, or u
aauuuguaggcccncunacnaaaa

SEQ ID NO: 49087 - RNA, 23 nt, Artificial Sequence
  Synthetic
  misc_feature (12)..(12): n is a, c, g, or u
uggcugcucggnugugcugccaa

SEQ ID NO: 49088 - RNA, 24 nt, Artificial Sequence
  Synthetic
  misc_feature (13)..(13): n is a, c, g, or u
auggcugcucggnugugcugccaa

SEQ ID NO: 49089 - RNA, 21 nt, Artificial Sequence
  Synthetic
acaaaaauccucacaauacca

SEQ ID NO: 49090 - RNA, 23 nt, Artificial Sequence
  Synthetic
ugacaaaaauccucacaauacca

SEQ ID NO: 49091 - RNA, 24 nt, Artificial Sequence
  Synthetic
uugacaaaaauccucacaauacca

SEQ ID NO: 49092 - RNA, 21 nt, Artificial Sequence
  Synthetic
  misc_feature (2)..(2): n is a, c, g, or u
  misc_feature (5)..(5): n is a, c, g, or u
  misc_feature (8)..(8): n is a, c, g, or u
  misc_feature (12)..(12): n is a, c, g, or u
angcnggnauunuauauaaga

SEQ ID NO: 49093 - RNA, 22 nt, Artificial Sequence
  Synthetic
  misc_feature (3)..(3): n is a, c, g, or u
  misc_feature (6)..(6): n is a, c, g, or u
  misc_feature (9)..(9): n is a, c, g, or u
  misc_feature (13)..(13): n is a, c, g, or u
aangcnggnauunuauauaaga

SEQ ID NO: 49094 - RNA, 21 nt, Artificial Sequence
  Synthetic
  misc_feature (6)..(7): n is a, c, g, or u
acgacnngaaggggcauggga

SEQ ID NO: 49095 - RNA, 22 nt, Artificial Sequence
  Synthetic
  misc_feature (7)..(8): n is a, c, g, or u
aacgacnngaaggggcauggga

SEQ ID NO: 49096 - RNA, 23 nt, Artificial Sequence
  Synthetic
  misc_feature (8)..(9): n is a, c, g, or u
caacgacnngaaggggcauggga

SEQ ID NO: 49097 - RNA, 24 nt, Artificial Sequence
  Synthetic
  misc_feature (9)..(10): n is a, c, g, or u
ucaacgacnngaaggggcauggga

SEQ ID NO: 49098 - RNA, 18 nt, Artificial Sequence
  Synthetic
uggacauugacccuuaua

SEQ ID NO: 49099 - RNA, 19 nt, Artificial Sequence
  Synthetic
auggacauugacccuuaua

SEQ ID NO: 49100 - RNA, 20 nt, Artificial Sequence
  Synthetic
cauggacauugacccuuaua

SEQ ID NO: 49101 - RNA, 21 nt, Artificial Sequence
  Synthetic
  misc_feature (18)..(19): n is a, c, g, or u
ucaauuuucuagggggannac

SEQ ID NO: 49102 - RNA, 22 nt, Artificial Sequence
  Synthetic
  misc_feature (19)..(20): n is a, c, g, or u
cucaauuuucuagggggannac

SEQ ID NO: 49103 - RNA, 23 nt, Artificial Sequence
  Synthetic
  misc_feature (20)..(21): n is a, c, g, or u
ucucaauuuucuagggggannac

SEQ ID NO: 49104 - RNA, 24 nt, Artificial Sequence
  Synthetic
  misc_feature (21)..(22): n is a, c, g, or u
cucucaauuuucuagggggannac

SEQ ID NO: 49105 - RNA, 21 nt, Artificial Sequence
  Synthetic
  misc_feature (11)..(11): n is a, c, g, or u
  misc_feature (19)..(19): n is a, c, g, or u
acuuucagganggucaaunac

SEQ ID NO: 49106 - RNA, 24 nt, Artificial Sequence
  Synthetic
  misc_feature (14)..(14): n is a, c, g, or u
  misc_feature (22)..(22): n is a, c, g, or u
uggacuuucagganggucaaunac

SEQ ID NO: 49107 - RNA, 18 nt, Artificial Sequence
  Synthetic
  misc_feature (15)..(15): n is a, c, g, or u
accgcuucagcccunuac

SEQ ID NO: 49108 - RNA, 19 nt, Artificial Sequence
  Synthetic
  misc_feature (16)..(16): n is a, c, g, or u
caccgcuucagcccunuac

SEQ ID NO: 49109 - RNA, 20 nt, Artificial Sequence
  Synthetic
  misc_feature (17)..(17): n is a, c, g, or u
acaccgcuucagcccunuac

SEQ ID NO: 49110 - RNA, 22 nt, Artificial Sequence
  Synthetic
  misc_feature (19)..(19): n is a, c, g, or u
cgacaccgcuucagcccunuac

SEQ ID NO: 49111 - RNA, 23 nt, Artificial Sequence
  Synthetic
  misc_feature (20)..(20): n is a, c, g, or u
ucgacaccgcuucagcccunuac

SEQ ID NO: 49112 - RNA, 24 nt, Artificial Sequence
  Synthetic
  misc_feature (21)..(21): n is a, c, g, or u
cucgacaccgcuucagcccunuac

SEQ ID NO: 49113 - RNA, 18 nt, Artificial Sequence
  Synthetic
aagccuccaagcugugcc

SEQ ID NO: 49114 - RNA, 19 nt, Artificial Sequence
  Synthetic
caagccuccaagcugugcc

SEQ ID NO: 49115 - RNA, 20 nt, Artificial Sequence
  Synthetic
ucaagccuccaagcugugcc

SEQ ID NO: 49116 - RNA, 21 nt, Artificial Sequence
  Synthetic
uucaagccuccaagcugugcc

SEQ ID NO: 49117 - RNA, 23 nt, Artificial Sequence
  Synthetic
uguucaagccuccaagcugugcc

SEQ ID NO: 49118 - RNA, 24 nt, Artificial Sequence
  Synthetic
cuguucaagccuccaagcugugcc

SEQ ID NO: 49119 - RNA, 21 nt, Artificial Sequence
  Synthetic
  misc_feature (10)..(10): n is a, c, g, or u
  misc_feature (16)..(16): n is a, c, g, or u
ccaccaggcncuguungaucc

SEQ ID NO: 49120 - RNA, 22 nt, Artificial Sequence
  Synthetic
  misc_feature (11)..(11): n is a, c, g, or u
  misc_feature (17)..(17): n is a, c, g, or u
uccaccaggcncuguungaucc

SEQ ID NO: 49121 - RNA, 23 nt, Artificial Sequence
  Synthetic
  misc_feature (12)..(12): n is a, c, g, or u
  misc_feature (18)..(18): n is a, c, g, or u
uuccaccaggcncuguungaucc

SEQ ID NO: 49122 - RNA, 21 nt, Artificial Sequence
  Synthetic
  misc_feature (11)..(11): n is a, c, g, or u
  misc_feature (20)..(20): n is a, c, g, or u
aucucucuguncccaauccnc

SEQ ID NO: 49123 - RNA, 22 nt, Artificial Sequence
  Synthetic
  misc_feature (12)..(12): n is a, c, g, or u
  misc_feature (21)..(21): n is a, c, g, or u
aaucucucuguncccaauccnc

SEQ ID NO: 49124 - RNA, 24 nt, Artificial Sequence
  Synthetic
  misc_feature (14)..(14): n is a, c, g, or u
  misc_feature (23)..(23): n is a, c, g, or u
agaaucucucuguncccaauccnc

SEQ ID NO: 49125 - RNA, 18 nt, Artificial Sequence
  Synthetic
ccaaaucugugcagcauc

SEQ ID NO: 49126 - RNA, 24 nt, Artificial Sequence
  Synthetic
ugggggccaaaucugugcagcauc

SEQ ID NO: 49127 - RNA, 21 nt, Artificial Sequence
  Synthetic
  misc_feature (14)..(14): n is a, c, g, or u
uaggagugggaggnuacgguc

SEQ ID NO: 49128 - RNA, 24 nt, Artificial Sequence
  Synthetic
  misc_feature (17)..(17): n is a, c, g, or u
agguaggagugggaggnuacgguc

SEQ ID NO: 49129 - RNA, 21 nt, Artificial Sequence
  Synthetic
  misc_feature (4)..(4): n is a, c, g, or u
uganuuaaugacuuuggcuuc

SEQ ID NO: 49130 - RNA, 21 nt, Artificial Sequence
  Synthetic
cuuuuggaagagaaacaguuc

SEQ ID NO: 49131 - RNA, 22 nt, Artificial Sequence
  Synthetic
acuuuuggaagagaaacaguuc

SEQ ID NO: 49132 - RNA, 23 nt, Artificial Sequence
  Synthetic
uacuuuuggaagagaaacaguuc

SEQ ID NO: 49133 - RNA, 24 nt, Artificial Sequence
  Synthetic
uuacuuuuggaagagaaacaguuc

SEQ ID NO: 49134 - RNA, 18 nt, Artificial Sequence
  Synthetic
  misc_feature (15)..(15): n is a, c, g, or u
ccguuuguccucuanuuc

SEQ ID NO: 49135 - RNA, 19 nt, Artificial Sequence
  Synthetic
  misc_feature (16)..(16): n is a, c, g, or u
cccguuuguccucuanuuc

SEQ ID NO: 49136 - RNA, 21 nt, Artificial Sequence
  Synthetic
  misc_feature (18)..(18): n is a, c, g, or u
ugcccguuuguccucuanuuc

SEQ ID NO: 49137 - RNA, 22 nt, Artificial Sequence
  Synthetic
  misc_feature (19)..(19): n is a, c, g, or u
uugcccguuuguccucuanuuc

SEQ ID NO: 49138 - RNA, 24 nt, Artificial Sequence
  Synthetic
  misc_feature (21)..(21): n is a, c, g, or u
uguugcccguuuguccucuanuuc

SEQ ID NO: 49139 - RNA, 18 nt, Artificial Sequence
  Synthetic
uucuuuccagaccaucag

SEQ ID NO: 49140 - RNA, 19 nt, Artificial Sequence
  Synthetic
auucuuuccagaccaucag

SEQ ID NO: 49141 - RNA, 23 nt, Artificial Sequence
  Synthetic
ugggauucuuuccagaccaucag

SEQ ID NO: 49142 - RNA, 24 nt, Artificial Sequence
  Synthetic
cugggauucuuuccagaccaucag

SEQ ID NO: 49143 - RNA, 19 nt, Artificial Sequence
  Synthetic
uguuuacgucccgucggcg

SEQ ID NO: 49144 - RNA, 20 nt, Artificial Sequence
  Synthetic
uuguuuacgucccgucggcg

SEQ ID NO: 49145 - RNA, 21 nt, Artificial Sequence
  Synthetic
uuuguuuacgucccgucggcg

SEQ ID NO: 49146 - RNA, 22 nt, Artificial Sequence
  Synthetic
cuuuguuuacgucccgucggcg

SEQ ID NO: 49147 - RNA, 23 nt, Artificial Sequence
  Synthetic
ccuuuguuuacgucccgucggcg

SEQ ID NO: 49148 - RNA, 24 nt, Artificial Sequence
  Synthetic
uccuuuguuuacgucccgucggcg

SEQ ID NO: 49149 - RNA, 23 nt, Artificial Sequence
  Synthetic
  misc_feature (5)..(5): n is a, c, g, or u
  misc_feature (13)..(13): n is a, c, g, or u
agganggucaaunaccuggaucg

SEQ ID NO: 49150 - RNA, 24 nt, Artificial Sequence
  Synthetic
  misc_feature (6)..(6): n is a, c, g, or u
  misc_feature (14)..(14): n is a, c, g, or u
cagganggucaaunaccuggaucg

SEQ ID NO: 49151 - RNA, 18 nt, Artificial Sequence
  Synthetic
aacuuguccuggcuaucg

SEQ ID NO: 49152 - RNA, 19 nt, Artificial Sequence
  Synthetic
caacuuguccuggcuaucg

SEQ ID NO: 49153 - RNA, 20 nt, Artificial Sequence
  Synthetic
ccaacuuguccuggcuaucg

SEQ ID NO: 49154 - RNA, 21 nt, Artificial Sequence
  Synthetic
uccaacuuguccuggcuaucg

SEQ ID NO: 49155 - RNA, 22 nt, Artificial Sequence
  Synthetic
cuccaacuuguccuggcuaucg

SEQ ID NO: 49156 - RNA, 23 nt, Artificial Sequence
  Synthetic
ccuccaacuuguccuggcuaucg

SEQ ID NO: 49157 - RNA, 24 nt, Artificial Sequence
  Synthetic
uccuccaacuuguccuggcuaucg

SEQ ID NO: 49158 - RNA, 18 nt, Artificial Sequence
  Synthetic
aagaauuuggagcuucug

SEQ ID NO: 49159 - RNA, 19 nt, Artificial Sequence
  Synthetic
aaagaauuuggagcuucug

SEQ ID NO: 49160 - RNA, 20 nt, Artificial Sequence
  Synthetic
uaaagaauuuggagcuucug

SEQ ID NO: 49161 - RNA, 21 nt, Artificial Sequence
  Synthetic
auaaagaauuuggagcuucug

SEQ ID NO: 49162 - RNA, 22 nt, Artificial Sequence
  Synthetic
uauaaagaauuuggagcuucug

SEQ ID NO: 49163 - RNA, 23 nt, Artificial Sequence
  Synthetic
uuauaaagaauuuggagcuucug

SEQ ID NO: 49164 - RNA, 24 nt, Artificial Sequence
  Synthetic
cuuauaaagaauuuggagcuucug

SEQ ID NO: 49165 - RNA, 21 nt, Artificial Sequence
  Synthetic
  misc_feature (21)..(21): n is a, c, g, or u
cgucugccguuccagccgacn

SEQ ID NO: 49166 - RNA, 22 nt, Artificial Sequence
  Synthetic
  misc_feature (1)..(1): n is a, c, g, or u
  misc_feature (22)..(22): n is a, c, g, or u
ncgucugccguuccagccgacn

SEQ ID NO: 49167 - RNA, 23 nt, Artificial Sequence
  Synthetic
  misc_feature (2)..(2): n is a, c, g, or u
  misc_feature (23)..(23): n is a, c, g, or u
uncgucugccguuccagccgacn

SEQ ID NO: 49168 - RNA, 24 nt, Artificial Sequence
  Synthetic
  misc_feature (3)..(3): n is a, c, g, or u
  misc_feature (24)..(24): n is a, c, g, or u
cuncgucugccguuccagccgacn

SEQ ID NO: 49169 - RNA, 21 nt, Artificial Sequence
  Synthetic
  misc_feature (21)..(21): n is a, c, g, or u
cacccccacacgguggccugn

SEQ ID NO: 49170 - RNA, 22 nt, Artificial Sequence
  Synthetic
  misc_feature (22)..(22): n is a, c, g, or u
acacccccacacgguggccugn

SEQ ID NO: 49171 - RNA, 23 nt, Artificial Sequence
  Synthetic
  misc_feature (23)..(23): n is a, c, g, or u
cacacccccacacgguggccugn

SEQ ID NO: 49172 - RNA, 24 nt, Artificial Sequence
  Synthetic
  misc_feature (24)..(24): n is a, c, g, or u
ucacacccccacacgguggccugn

SEQ ID NO: 49173 - RNA, 21 nt, Artificial Sequence
  Synthetic
  misc_feature (15)..(15): n is a, c, g, or u
  misc_feature (21)..(21): n is a, c, g, or u
cucaggcaagcuaunuugugn

SEQ ID NO: 49174 - RNA, 22 nt, Artificial Sequence
  Synthetic
  misc_feature (16)..(16): n is a, c, g, or u
  misc_feature (22)..(22): n is a, c, g, or u
ucucaggcaagcuaunuugugn

SEQ ID NO: 49175 - RNA, 23 nt, Artificial Sequence
  Synthetic
  misc_feature (17)..(17): n is a, c, g, or u
  misc_feature (23)..(23): n is a, c, g, or u
cucucaggcaagcuaunuugugn

SEQ ID NO: 49176 - RNA, 22 nt, Artificial Sequence
  Synthetic
ugggcuuuaggaaaauaccuau

SEQ ID NO: 49177 - RNA, 23 nt, Artificial Sequence
  Synthetic
  misc_feature (1)..(1): n is a, c, g, or u
nugggcuuuaggaaaauaccuau

SEQ ID NO: 49178 - RNA, 24 nt, Artificial Sequence
  Synthetic
  misc_feature (2)..(2): n is a, c, g, or u
cnugggcuuuaggaaaauaccuau

SEQ ID NO: 49179 - RNA, 18 nt, Artificial Sequence
  Synthetic
ugucuggcuuuuaguuau

SEQ ID NO: 49180 - RNA, 19 nt, Artificial Sequence
  Synthetic
cugucuggcuuuuaguuau

SEQ ID NO: 49181 - RNA, 20 nt, Artificial Sequence
  Synthetic
acugucuggcuuuuaguuau

SEQ ID NO: 49182 - RNA, 21 nt, Artificial Sequence
  Synthetic
cacugucuggcuuuuaguuau

SEQ ID NO: 49183 - RNA, 22 nt, Artificial Sequence
  Synthetic
ccacugucuggcuuuuaguuau

SEQ ID NO: 49184 - RNA, 23 nt, Artificial Sequence
  Synthetic
cccacugucuggcuuuuaguuau

SEQ ID NO: 49185 - RNA, 24 nt, Artificial Sequence
  Synthetic
ccccacugucuggcuuuuaguuau

SEQ ID NO: 49186 - RNA, 22 nt, Artificial Sequence
  Synthetic
uguuaccaauuuucuguuaucu

SEQ ID NO: 49187 - RNA, 23 nt, Artificial Sequence
  Synthetic
cuguuaccaauuuucuguuaucu

SEQ ID NO: 49188 - RNA, 22 nt, Artificial Sequence
  Synthetic
  misc_feature (14)..(14): n is a, c, g, or u
aguauuuggugucnuuuggagu

SEQ ID NO: 49189 - RNA, 24 nt, Artificial Sequence
  Synthetic
  misc_feature (16)..(16): n is a, c, g, or u
ugaguauuuggugucnuuuggagu

SEQ ID NO: 49190 - RNA, 21 nt, Artificial Sequence
  Synthetic
uuggccaauggcaaacaaggu

SEQ ID NO: 49191 - RNA, 22 nt, Artificial Sequence
  Synthetic
  misc_feature (1)..(1): n is a, c, g, or u
nuuggccaauggcaaacaaggu

SEQ ID NO: 49192 - RNA, 23 nt, Artificial Sequence
  Synthetic
  misc_feature (2)..(2): n is a, c, g, or u
anuuggccaauggcaaacaaggu

SEQ ID NO: 49193 - RNA, 24 nt, Artificial Sequence
  Synthetic
  misc_feature (3)..(3): n is a, c, g, or u
canuuggccaauggcaaacaaggu

SEQ ID NO: 49194 - RNA, 21 nt, Artificial Sequence
  Synthetic
  misc_feature (19)..(19): n is a, c, g, or u
ucuugaguauuuggugucnuu

SEQ ID NO: 49195 - RNA, 22 nt, Artificial Sequence
  Synthetic
  misc_feature (20)..(20): n is a, c, g, or u
uucuugaguauuuggugucnuu

SEQ ID NO: 49196 - RNA, 24 nt, Artificial Sequence
  Synthetic
  misc_feature (22)..(22): n is a, c, g, or u
aguucuugaguauuuggugucnuu

SEQ ID NO: 49197 - RNA, 18 nt, Artificial Sequence
  Synthetic
cacguagcgccucauuuu

SEQ ID NO: 49198 - RNA, 19 nt, Artificial Sequence
  Synthetic
acacguagcgccucauuuu

SEQ ID NO: 49199 - RNA, 20 nt, Artificial Sequence
  Synthetic
cacacguagcgccucauuuu

SEQ ID NO: 49200 - RNA, 21 nt, Artificial Sequence
  Synthetic
ccacacguagcgccucauuuu

SEQ ID NO: 49201 - RNA, 22 nt, Artificial Sequence
  Synthetic
uccacacguagcgccucauuuu

SEQ ID NO: 49202 - RNA, 23 nt, Artificial Sequence
  Synthetic
auccacacguagcgccucauuuu

SEQ ID NO: 49203 - RNA, 24 nt, Artificial Sequence
  Synthetic
aauccacacguagcgccucauuuu

SEQ ID NO: 49204 - RNA, 18 nt, Artificial Sequence
  Synthetic
acuuccuagagaggacaa

SEQ ID NO: 49205 - RNA, 19 nt, Artificial Sequence
  Synthetic
uacuuccuagagaggacaa

SEQ ID NO: 49206 - RNA, 20 nt, Artificial Sequence
  Synthetic
guacuuccuagagaggacaa

SEQ ID NO: 49207 - RNA, 18 nt, Artificial Sequence
  Synthetic
  misc_feature (6)..(7): n is a, c, g, or u
  misc_feature (16)..(16): n is a, c, g, or u
uaucannucuugaugnaa

SEQ ID NO: 49208 - RNA, 19 nt, Artificial Sequence
  Synthetic
  misc_feature (1)..(1): n is a, c, g, or u
  misc_feature (7)..(8): n is a, c, g, or u
  misc_feature (17)..(17): n is a, c, g, or u
nuaucannucuugaugnaa

SEQ ID NO: 49209 - RNA, 20 nt, Artificial Sequence
  Synthetic
  misc_feature (1)..(2): n is a, c, g, or u
  misc_feature (8)..(9): n is a, c, g, or u
  misc_feature (18)..(18): n is a, c, g, or u
nnuaucannucuugaugnaa

SEQ ID NO: 49210 - RNA, 21 nt, Artificial Sequence
  Synthetic
  misc_feature (1)..(3): n is a, c, g, or u
  misc_feature (9)..(10): n is a, c, g, or u
  misc_feature (19)..(19): n is a, c, g, or u
nnnuaucannucuugaugnaa

SEQ ID NO: 49211 - RNA, 22 nt, Artificial Sequence
  Synthetic
  misc_feature (2)..(4): n is a, c, g, or u
  misc_feature (10)..(11): n is a, c, g, or u
  misc_feature (20)..(20): n is a, c, g, or u
unnnuaucannucuugaugnaa

SEQ ID NO: 49212 - RNA, 23 nt, Artificial Sequence
  Synthetic
  misc_feature (3)..(5): n is a, c, g, or u
  misc_feature (11)..(12): n is a, c, g, or u
  misc_feature (21)..(21): n is a, c, g, or u
uunnnuaucannucuugaugnaa

SEQ ID NO: 49213 - RNA, 24 nt, Artificial Sequence
  Synthetic
  misc_feature (4)..(6): n is a, c, g, or u
  misc_feature (12)..(13): n is a, c, g, or u
  misc_feature (22)..(22): n is a, c, g, or u
uuunnnuaucannucuugaugnaa

SEQ ID NO: 49214 - RNA, 18 nt, Artificial Sequence
  Synthetic
  misc_feature (7)..(7): n is a, c, g, or u
  misc_feature (10)..(10): n is a, c, g, or u
  misc_feature (16)..(16): n is a, c, g, or u
uguuuunganguauunaa

SEQ ID NO: 49215 - RNA, 19 nt, Artificial Sequence
  Synthetic
  misc_feature (8)..(8): n is a, c, g, or u
  misc_feature (11)..(11): n is a, c, g, or u
  misc_feature (17)..(17): n is a, c, g, or u
uuguuuunganguauunaa

SEQ ID NO: 49216 - RNA, 20 nt, Artificial Sequence
  Synthetic
  misc_feature (9)..(9): n is a, c, g, or u
  misc_feature (12)..(12): n is a, c, g, or u
  misc_feature (18)..(18): n is a, c, g, or u
uuuguuuunganguauunaa

SEQ ID NO: 49217 - RNA, 21 nt, Artificial Sequence
  Synthetic
  misc_feature (10)..(10): n is a, c, g, or u
  misc_feature (13)..(13): n is a, c, g, or u
  misc_feature (19)..(19): n is a, c, g, or u
uuuuguuuunganguauunaa

SEQ ID NO: 49218 - RNA, 22 nt, Artificial Sequence
  Synthetic
  misc_feature (11)..(11): n is a, c, g, or u
  misc_feature (14)..(14): n is a, c, g, or u
  misc_feature (20)..(20): n is a, c, g, or u
uuuuuguuuunganguauunaa

SEQ ID NO: 49219 - RNA, 23 nt, Artificial Sequence
  Synthetic
  misc_feature (12)..(12): n is a, c, g, or u
  misc_feature (15)..(15): n is a, c, g, or u
  misc_feature (21)..(21): n is a, c, g, or u
cuuuuuguuuunganguauunaa

SEQ ID NO: 49220 - RNA, 24 nt, Artificial Sequence
  Synthetic
  misc_feature (13)..(13): n is a, c, g, or u
  misc_feature (16)..(16): n is a, c, g, or u
  misc_feature (22)..(22): n is a, c, g, or u
ucuuuuuguuuunganguauunaa

SEQ ID NO: 49221 - RNA, 18 nt, Artificial Sequence
  Synthetic
ucccaccuuaugagucca

SEQ ID NO: 49222 - RNA, 19 nt, Artificial Sequence
  Synthetic
uucccaccuuaugagucca

SEQ ID NO: 49223 - RNA, 20 nt, Artificial Sequence
  Synthetic
uuucccaccuuaugagucca

SEQ ID NO: 49224 - RNA, 18 nt, Artificial Sequence
  Synthetic
  misc_feature (7)..(7): n is a, c, g, or u
augaaunucaggaaaaga

SEQ ID NO: 49225 - RNA, 19 nt, Artificial Sequence
  Synthetic
  misc_feature (8)..(8): n is a, c, g, or u
aaugaaunucaggaaaaga

SEQ ID NO: 49226 - RNA, 20 nt, Artificial Sequence
  Synthetic
  misc_feature (9)..(9): n is a, c, g, or u
aaaugaaunucaggaaaaga

SEQ ID NO: 49227 - RNA, 18 nt, Artificial Sequence
  Synthetic
uccagcugauggucugga

SEQ ID NO: 49228 - RNA, 19 nt, Artificial Sequence
  Synthetic
auccagcugauggucugga

SEQ ID NO: 49229 - RNA, 20 nt, Artificial Sequence
  Synthetic
gauccagcugauggucugga

SEQ ID NO: 49230 - RNA, 18 nt, Artificial Sequence
  Synthetic
  misc_feature (13)..(13): n is a, c, g, or u
uccuaaagcccangauga

SEQ ID NO: 49231 - RNA, 19 nt, Artificial Sequence
  Synthetic
  misc_feature (14)..(14): n is a, c, g, or u
uuccuaaagcccangauga

SEQ ID NO: 49232 - RNA, 20 nt, Artificial Sequence
  Synthetic
  misc_feature (15)..(15): n is a, c, g, or u
uuuccuaaagcccangauga

SEQ ID NO: 49233 - RNA, 18 nt, Artificial Sequence
  Synthetic
  misc_feature (11)..(11): n is a, c, g, or u
  misc_feature (17)..(17): n is a, c, g, or u
uggaauuugcncugaana

SEQ ID NO: 49234 - RNA, 19 nt, Artificial Sequence
  Synthetic
  misc_feature (12)..(12): n is a, c, g, or u
  misc_feature (18)..(18): n is a, c, g, or u
cuggaauuugcncugaana

SEQ ID NO: 49235 - RNA, 20 nt, Artificial Sequence
  Synthetic
  misc_feature (13)..(13): n is a, c, g, or u
  misc_feature (19)..(19): n is a, c, g, or u
gcuggaauuugcncugaana

SEQ ID NO: 49236 - RNA, 18 nt, Artificial Sequence
  Synthetic
aauugagagaaguccacc

SEQ ID NO: 49237 - RNA, 19 nt, Artificial Sequence
  Synthetic
aaauugagagaaguccacc

SEQ ID NO: 49238 - RNA, 20 nt, Artificial Sequence
  Synthetic
aaaauugagagaaguccacc

SEQ ID NO: 49239 - RNA, 18 nt, Artificial Sequence
  Synthetic
aauacagagcccuuaccc

SEQ ID NO: 49240 - RNA, 19 nt, Artificial Sequence
  Synthetic
aaauacagagcccuuaccc

SEQ ID NO: 49241 - RNA, 20 nt, Artificial Sequence
  Synthetic
aaaauacagagcccuuaccc

SEQ ID NO: 49242 - RNA, 18 nt, Artificial Sequence
  Synthetic
gcuguagcucuuguuccc

SEQ ID NO: 49243 - RNA, 19 nt, Artificial Sequence
  Synthetic
ugcuguagcucuuguuccc

SEQ ID NO: 49244 - RNA, 20 nt, Artificial Sequence
  Synthetic
augcuguagcucuuguuccc

SEQ ID NO: 49245 - RNA, 18 nt, Artificial Sequence
  Synthetic
  misc_feature (3)..(3): n is a, c, g, or u
cangugcaguuuccgucc

SEQ ID NO: 49246 - RNA, 19 nt, Artificial Sequence
  Synthetic
  misc_feature (4)..(4): n is a, c, g, or u
acangugcaguuuccgucc

SEQ ID NO: 49247 - RNA, 20 nt, Artificial Sequence
  Synthetic
  misc_feature (5)..(5): n is a, c, g, or u
uacangugcaguuuccgucc

SEQ ID NO: 49248 - RNA, 18 nt, Artificial Sequence
  Synthetic
  misc_feature (8)..(8): n is a, c, g, or u
agucccanucgggacugc

SEQ ID NO: 49249 - RNA, 19 nt, Artificial Sequence
  Synthetic
  misc_feature (9)..(9): n is a, c, g, or u
aagucccanucgggacugc

SEQ ID NO: 49250 - RNA, 20 nt, Artificial Sequence
  Synthetic
  misc_feature (10)..(10): n is a, c, g, or u
gaagucccanucgggacugc

SEQ ID NO: 49251 - RNA, 18 nt, Artificial Sequence
  Synthetic
gaagaugaggcauagcag

SEQ ID NO: 49252 - RNA, 19 nt, Artificial Sequence
  Synthetic
agaagaugaggcauagcag

SEQ ID NO: 49253 - RNA, 20 nt, Artificial Sequence
  Synthetic
aagaagaugaggcauagcag

SEQ ID NO: 49254 - RNA, 18 nt, Artificial Sequence
  Synthetic
  misc_feature (1)..(1): n is a, c, g, or u
nauacagaggcaugagag

SEQ ID NO: 49255 - RNA, 19 nt, Artificial Sequence
  Synthetic
  misc_feature (2)..(2): n is a, c, g, or u
gnauacagaggcaugagag

SEQ ID NO: 49256 - RNA, 20 nt, Artificial Sequence
  Synthetic
  misc_feature (3)..(3): n is a, c, g, or u
ggnauacagaggcaugagag

SEQ ID NO: 49257 - RNA, 18 nt, Artificial Sequence
  Synthetic
gauugguggaagcaggag

SEQ ID NO: 49258 - RNA, 19 nt, Artificial Sequence
  Synthetic
cgauugguggaagcaggag

SEQ ID NO: 49259 - RNA, 20 nt, Artificial Sequence
  Synthetic
ccgauugguggaagcaggag

SEQ ID NO: 49260 - RNA, 18 nt, Artificial Sequence
  Synthetic
  misc_feature (5)..(5): n is a, c, g, or u
  misc_feature (11)..(11): n is a, c, g, or u
cccgngagggnucguccg

SEQ ID NO: 49261 - RNA, 19 nt, Artificial Sequence
  Synthetic
  misc_feature (6)..(6): n is a, c, g, or u
  misc_feature (12)..(12): n is a, c, g, or u
ccccgngagggnucguccg

SEQ ID NO: 49262 - RNA, 20 nt, Artificial Sequence
  Synthetic
  misc_feature (1)..(1): n is a, c, g, or u
  misc_feature (7)..(7): n is a, c, g, or u
  misc_feature (13)..(13): n is a, c, g, or u
nccccgngagggnucguccg

SEQ ID NO: 49263 - RNA, 18 nt, Artificial Sequence
  Synthetic
  misc_feature (16)..(16): n is a, c, g, or u
ugguggucuauaagcngg

SEQ ID NO: 49264 - RNA, 19 nt, Artificial Sequence
  Synthetic
  misc_feature (17)..(17): n is a, c, g, or u
uugguggucuauaagcngg

SEQ ID NO: 49265 - RNA, 20 nt, Artificial Sequence
  Synthetic
  misc_feature (18)..(18): n is a, c, g, or u
uuugguggucuauaagcngg

SEQ ID NO: 49266 - RNA, 18 nt, Artificial Sequence
  Synthetic
  misc_feature (3)..(3): n is a, c, g, or u
uanagggcugaagcggug

SEQ ID NO: 49267 - RNA, 19 nt, Artificial Sequence
  Synthetic
  misc_feature (4)..(4): n is a, c, g, or u
guanagggcugaagcggug

SEQ ID NO: 49268 - RNA, 20 nt, Artificial Sequence
  Synthetic
  misc_feature (1)..(1): n is a, c, g, or u
  misc_feature (5)..(5): n is a, c, g, or u
nguanagggcugaagcggug

SEQ ID NO: 49269 - RNA, 18 nt, Artificial Sequence
  Synthetic
  misc_feature (7)..(7): n is a, c, g, or u
agcccangaugaugggau

SEQ ID NO: 49270 - RNA, 19 nt, Artificial Sequence
  Synthetic
  misc_feature (8)..(8): n is a, c, g, or u
aagcccangaugaugggau

SEQ ID NO: 49271 - RNA, 20 nt, Artificial Sequence
  Synthetic
  misc_feature (9)..(9): n is a, c, g, or u
aaagcccangaugaugggau

SEQ ID NO: 49272 - RNA, 21 nt, Artificial Sequence
  Synthetic
  misc_feature (10)..(10): n is a, c, g, or u
uaaagcccangaugaugggau

SEQ ID NO: 49273 - RNA, 22 nt, Artificial Sequence
  Synthetic
  misc_feature (11)..(11): n is a, c, g, or u
cuaaagcccangaugaugggau

SEQ ID NO: 49274 - RNA, 23 nt, Artificial Sequence
  Synthetic
  misc_feature (12)..(12): n is a, c, g, or u
ccuaaagcccangaugaugggau

SEQ ID NO: 49275 - RNA, 24 nt, Artificial Sequence
  Synthetic
  misc_feature (13)..(13): n is a, c, g, or u
uccuaaagcccangaugaugggau

SEQ ID NO: 49276 - RNA, 18 nt, Artificial Sequence
  Synthetic
aagcuccaaauucuuuau

SEQ ID NO: 49277 - RNA, 19 nt, Artificial Sequence
  Synthetic
gaagcuccaaauucuuuau

SEQ ID NO: 49278 - RNA, 20 nt, Artificial Sequence
  Synthetic
agaagcuccaaauucuuuau

SEQ ID NO: 49279 - RNA, 18 nt, Artificial Sequence
  Synthetic
gauuggagguuggggacu

SEQ ID NO: 49280 - RNA, 19 nt, Artificial Sequence
  Synthetic
ugauuggagguuggggacu

SEQ ID NO: 49281 - RNA, 20 nt, Artificial Sequence
  Synthetic
gugauuggagguuggggacu

SEQ ID NO: 49282 - RNA, 18 nt, Artificial Sequence
  Synthetic
ggccaagccccaaccagu

SEQ ID NO: 49283 - RNA, 19 nt, Artificial Sequence
  Synthetic
uggccaagccccaaccagu

SEQ ID NO: 49284 - RNA, 20 nt, Artificial Sequence
  Synthetic
auggccaagccccaaccagu

SEQ ID NO: 49285 - RNA, 18 nt, Artificial Sequence
  Synthetic
aagaaggaguuaaccagu

SEQ ID NO: 49286 - RNA, 19 nt, Artificial Sequence
  Synthetic
aaagaaggaguuaaccagu

SEQ ID NO: 49287 - RNA, 20 nt, Artificial Sequence
  Synthetic
aaaagaaggaguuaaccagu

SEQ ID NO: 49288 - RNA, 18 nt, Artificial Sequence
  Synthetic
  misc_feature (5)..(5): n is a, c, g, or u
cccancaggccaccgugu

SEQ ID NO: 49289 - RNA, 19 nt, Artificial Sequence
  Synthetic
  misc_feature (6)..(6): n is a, c, g, or u
ccccancaggccaccgugu

SEQ ID NO: 49290 - RNA, 20 nt, Artificial Sequence
  Synthetic
  misc_feature (7)..(7): n is a, c, g, or u
accccancaggccaccgugu

SEQ ID NO: 49291 - RNA, 18 nt, Artificial Sequence
  Synthetic
uagacucugugguauugu

SEQ ID NO: 49292 - RNA, 19 nt, Artificial Sequence
  Synthetic
cuagacucugugguauugu

SEQ ID NO: 49293 - RNA, 20 nt, Artificial Sequence
  Synthetic
ucuagacucugugguauugu

SEQ ID NO: 49294 - RNA, 18 nt, Artificial Sequence
  Synthetic
  misc_feature (11)..(12): n is a, c, g, or u
  misc_feature (14)..(14): n is a, c, g, or u
  misc_feature (16)..(17): n is a, c, g, or u
aaugauuaacnncnunnu

SEQ ID NO: 49295 - RNA, 19 nt, Artificial Sequence
  Synthetic
  misc_feature (12)..(13): n is a, c, g, or u
  misc_feature (15)..(15): n is a, c, g, or u
  misc_feature (17)..(18): n is a, c, g, or u
uaaugauuaacnncnunnu

SEQ ID NO: 49296 - RNA, 20 nt, Artificial Sequence
  Synthetic
  misc_feature (13)..(14): n is a, c, g, or u
  misc_feature (16)..(16): n is a, c, g, or u
  misc_feature (18)..(19): n is a, c, g, or u
auaaugauuaacnncnunnu

SEQ ID NO: 49297 - RNA, 21 nt, Artificial Sequence
  Synthetic
  misc_feature (14)..(15): n is a, c, g, or u
  misc_feature (17)..(17): n is a, c, g, or u
  misc_feature (19)..(20): n is a, c, g, or u
aauaaugauuaacnncnunnu

SEQ ID NO: 49298 - RNA, 22 nt, Artificial Sequence
  Synthetic
  misc_feature (15)..(16): n is a, c, g, or u
  misc_feature (18)..(18): n is a, c, g, or u
  misc_feature (20)..(21): n is a, c, g, or u
aaauaaugauuaacnncnunnu

SEQ ID NO: 49299 - RNA, 23 nt, Artificial Sequence
  Synthetic
  misc_feature (16)..(17): n is a, c, g, or u
  misc_feature (19)..(19): n is a, c, g, or u
  misc_feature (21)..(22): n is a, c, g, or u
aaaauaaugauuaacnncnunnu

SEQ ID NO: 49300 - RNA, 24 nt, Artificial Sequence
  Synthetic
  misc_feature (17)..(18): n is a, c, g, or u
  misc_feature (20)..(20): n is a, c, g, or u
  misc_feature (22)..(23): n is a, c, g, or u
uaaaauaaugauuaacnncnunnu

SEQ ID NO: 49301 - RNA, 18 nt, Artificial Sequence
  Synthetic
  misc_feature (7)..(7): n is a, c, g, or u
cguaaanuuucccaccuu

SEQ ID NO: 49302 - RNA, 19 nt, Artificial Sequence
  Synthetic
  misc_feature (8)..(8): n is a, c, g, or u
ccguaaanuuucccaccuu

SEQ ID NO: 49303 - RNA, 20 nt, Artificial Sequence
  Synthetic
  misc_feature (9)..(9): n is a, c, g, or u
cccguaaanuuucccaccuu

SEQ ID NO: 49304 - RNA, 18 nt, Artificial Sequence
  Synthetic
  misc_feature (8)..(8): n is a, c, g, or u
  misc_feature (11)..(11): n is a, c, g, or u
  misc_feature (14)..(14): n is a, c, g, or u
uaggcccncunacnaaaa

SEQ ID NO: 49305 - RNA, 19 nt, Artificial Sequence
  Synthetic
  misc_feature (9)..(9): n is a, c, g, or u
  misc_feature (12)..(12): n is a, c, g, or u
  misc_feature (15)..(15): n is a, c, g, or u
guaggcccncunacnaaaa

SEQ ID NO: 49306 - RNA, 20 nt, Artificial Sequence
  Synthetic
  misc_feature (10)..(10): n is a, c, g, or u
  misc_feature (13)..(13): n is a, c, g, or u
  misc_feature (16)..(16): n is a, c, g, or u
uguaggcccncunacnaaaa

SEQ ID NO: 49307 - RNA, 18 nt, Artificial Sequence
  Synthetic
  misc_feature (7)..(7): n is a, c, g, or u
gcucggnugugcugccaa

SEQ ID NO: 49308 - RNA, 19 nt, Artificial Sequence
  Synthetic
  misc_feature (8)..(8): n is a, c, g, or u
ugcucggnugugcugccaa

SEQ ID NO: 49309 - RNA, 20 nt, Artificial Sequence
  Synthetic
  misc_feature (9)..(9): n is a, c, g, or u
cugcucggnugugcugccaa

SEQ ID NO: 49310 - RNA, 18 nt, Artificial Sequence
  Synthetic
aaaauccucacaauacca

SEQ ID NO: 49311 - RNA, 19 nt, Artificial Sequence
  Synthetic
aaaaauccucacaauacca

SEQ ID NO: 49312 - RNA, 20 nt, Artificial Sequence
  Synthetic
caaaaauccucacaauacca

SEQ ID NO: 49313 - RNA, 18 nt, Artificial Sequence
  Synthetic
  misc_feature (3)..(3): n is a, c, g, or u
  misc_feature (6)..(6): n is a, c, g, or u
acnucnaaaacaaaaaga

SEQ ID NO: 49314 - RNA, 19 nt, Artificial Sequence
  Synthetic
  misc_feature (4)..(4): n is a, c, g, or u
  misc_feature (7)..(7): n is a, c, g, or u
uacnucnaaaacaaaaaga

SEQ ID NO: 49315 - RNA, 20 nt, Artificial Sequence
  Synthetic
  misc_feature (5)..(5): n is a, c, g, or u
  misc_feature (8)..(8): n is a, c, g, or u
auacnucnaaaacaaaaaga

SEQ ID NO: 49316 - RNA, 21 nt, Artificial Sequence
  Synthetic
  misc_feature (6)..(6): n is a, c, g, or u
  misc_feature (9)..(9): n is a, c, g, or u
aauacnucnaaaacaaaaaga

SEQ ID NO: 49317 - RNA, 22 nt, Artificial Sequence
  Synthetic
  misc_feature (1)..(1): n is a, c, g, or u
  misc_feature (7)..(7): n is a, c, g, or u
  misc_feature (10)..(10): n is a, c, g, or u
naauacnucnaaaacaaaaaga

SEQ ID NO: 49318 - RNA, 23 nt, Artificial Sequence
  Synthetic
  misc_feature (2)..(2): n is a, c, g, or u
  misc_feature (8)..(8): n is a, c, g, or u
  misc_feature (11)..(11): n is a, c, g, or u
unaauacnucnaaaacaaaaaga

SEQ ID NO: 49319 - RNA, 24 nt, Artificial Sequence
  Synthetic
  misc_feature (3)..(3): n is a, c, g, or u
  misc_feature (9)..(9): n is a, c, g, or u
  misc_feature (12)..(12): n is a, c, g, or u
uunaauacnucnaaaacaaaaaga

SEQ ID NO: 49320 - RNA, 18 nt, Artificial Sequence
  Synthetic
  misc_feature (2)..(2): n is a, c, g, or u
  misc_feature (5)..(5): n is a, c, g, or u
  misc_feature (9)..(9): n is a, c, g, or u
cnggnauunuauauaaga

SEQ ID NO: 49321 - RNA, 19 nt, Artificial Sequence
  Synthetic
  misc_feature (3)..(3): n is a, c, g, or u
  misc_feature (6)..(6): n is a, c, g, or u
  misc_feature (10)..(10): n is a, c, g, or u
gcnggnauunuauauaaga

SEQ ID NO: 49322 - RNA, 20 nt, Artificial Sequence
  Synthetic
  misc_feature (1)..(1): n is a, c, g, or u
  misc_feature (4)..(4): n is a, c, g, or u
  misc_feature (7)..(7): n is a, c, g, or u
  misc_feature (11)..(11): n is a, c, g, or u
ngcnggnauunuauauaaga

SEQ ID NO: 49323 - RNA, 18 nt, Artificial Sequence
  Synthetic
  misc_feature (3)..(4): n is a, c, g, or u
acnngaaggggcauggga

SEQ ID NO: 49324 - RNA, 19 nt, Artificial Sequence
  Synthetic
  misc_feature (4)..(5): n is a, c, g, or u
gacnngaaggggcauggga

SEQ ID NO: 49325 - RNA, 20 nt, Artificial Sequence
  Synthetic
  misc_feature (5)..(6): n is a, c, g, or u
cgacnngaaggggcauggga

SEQ ID NO: 49326 - RNA, 18 nt, Artificial Sequence
  Synthetic
  misc_feature (15)..(16): n is a, c, g, or u
auuuucuagggggannac

SEQ ID NO: 49327 - RNA, 19 nt, Artificial Sequence
  Synthetic
  misc_feature (16)..(17): n is a, c, g, or u
aauuuucuagggggannac

SEQ ID NO: 49328 - RNA, 20 nt, Artificial Sequence
  Synthetic
  misc_feature (17)..(18): n is a, c, g, or u
caauuuucuagggggannac

SEQ ID NO: 49329 - RNA, 18 nt, Artificial Sequence
  Synthetic
  misc_feature (8)..(8): n is a, c, g, or u
  misc_feature (16)..(16): n is a, c, g, or u
uucagganggucaaunac

SEQ ID NO: 49330 - RNA, 19 nt, Artificial Sequence
  Synthetic
  misc_feature (9)..(9): n is a, c, g, or u
  misc_feature (17)..(17): n is a, c, g, or u
uuucagganggucaaunac

SEQ ID NO: 49331 - RNA, 20 nt, Artificial Sequence
  Synthetic
  misc_feature (10)..(10): n is a, c, g, or u
  misc_feature (18)..(18): n is a, c, g, or u
cuuucagganggucaaunac

SEQ ID NO: 49332 - RNA, 18 nt, Artificial Sequence
  Synthetic
  misc_feature (7)..(7): n is a, c, g, or u
  misc_feature (13)..(13): n is a, c, g, or u
ccaggcncuguungaucc

SEQ ID NO: 49333 - RNA, 19 nt, Artificial Sequence
  Synthetic
  misc_feature (8)..(8): n is a, c, g, or u
  misc_feature (14)..(14): n is a, c, g, or u
accaggcncuguungaucc

SEQ ID NO: 49334 - RNA, 20 nt, Artificial Sequence
  Synthetic
  misc_feature (9)..(9): n is a, c, g, or u
  misc_feature (15)..(15): n is a, c, g, or u
caccaggcncuguungaucc

SEQ ID NO: 49335 - RNA, 18 nt, Artificial Sequence
  Synthetic
  misc_feature (8)..(8): n is a, c, g, or u
  misc_feature (17)..(17): n is a, c, g, or u
ucucuguncccaauccnc

SEQ ID NO: 49336 - RNA, 19 nt, Artificial Sequence
  Synthetic
  misc_feature (9)..(9): n is a, c, g, or u
  misc_feature (18)..(18): n is a, c, g, or u
cucucuguncccaauccnc

SEQ ID NO: 49337 - RNA, 20 nt, Artificial Sequence
  Synthetic
  misc_feature (10)..(10): n is a, c, g, or u
  misc_feature (19)..(19): n is a, c, g, or u
ucucucuguncccaauccnc

SEQ ID NO: 49338 - RNA, 18 nt, Artificial Sequence
  Synthetic
  misc_feature (11)..(11): n is a, c, g, or u
gagugggaggnuacgguc

SEQ ID NO: 49339 - RNA, 19 nt, Artificial Sequence
  Synthetic
  misc_feature (12)..(12): n is a, c, g, or u
ggagugggaggnuacgguc

SEQ ID NO: 49340 - RNA, 20 nt, Artificial Sequence
  Synthetic
  misc_feature (13)..(13): n is a, c, g, or u
aggagugggaggnuacgguc

SEQ ID NO: 49341 - RNA, 18 nt, Artificial Sequence
  Synthetic
  misc_feature (1)..(1): n is a, c, g, or u
nuuaaugacuuuggcuuc

SEQ ID NO: 49342 - RNA, 19 nt, Artificial Sequence
  Synthetic
  misc_feature (2)..(2): n is a, c, g, or u
anuuaaugacuuuggcuuc

SEQ ID NO: 49343 - RNA, 20 nt, Artificial Sequence
  Synthetic
  misc_feature (3)..(3): n is a, c, g, or u
ganuuaaugacuuuggcuuc

SEQ ID NO: 49344 - RNA, 18 nt, Artificial Sequence
  Synthetic
uuggaagagaaacaguuc

SEQ ID NO: 49345 - RNA, 19 nt, Artificial Sequence
  Synthetic
uuuggaagagaaacaguuc

SEQ ID NO: 49346 - RNA, 20 nt, Artificial Sequence
  Synthetic
uuuuggaagagaaacaguuc

SEQ ID NO: 49347 - RNA, 18 nt, Artificial Sequence
  Synthetic
  misc_feature (6)..(6): n is a, c, g, or u
  misc_feature (8)..(10): n is a, c, g, or u
  misc_feature (13)..(13): n is a, c, g, or u
gguuanannnuanauuuc

SEQ ID NO: 49348 - RNA, 19 nt, Artificial Sequence
  Synthetic
  misc_feature (7)..(7): n is a, c, g, or u
  misc_feature (9)..(11): n is a, c, g, or u
  misc_feature (14)..(14): n is a, c, g, or u
ggguuanannnuanauuuc

SEQ ID NO: 49349 - RNA, 20 nt, Artificial Sequence
  Synthetic
  misc_feature (8)..(8): n is a, c, g, or u
  misc_feature (10)..(12): n is a, c, g, or u
  misc_feature (15)..(15): n is a, c, g, or u
gggguuanannnuanauuuc

SEQ ID NO: 49350 - RNA, 21 nt, Artificial Sequence
  Synthetic
  misc_feature (9)..(9): n is a, c, g, or u
  misc_feature (11)..(13): n is a, c, g, or u
  misc_feature (16)..(16): n is a, c, g, or u
ugggguuanannnuanauuuc

SEQ ID NO: 49351 - RNA, 22 nt, Artificial Sequence
  Synthetic
  misc_feature (10)..(10): n is a, c, g, or u
  misc_feature (12)..(14): n is a, c, g, or u
  misc_feature (17)..(17): n is a, c, g, or u
augggguuanannnuanauuuc

SEQ ID NO: 49352 - RNA, 23 nt, Artificial Sequence
  Synthetic
  misc_feature (11)..(11): n is a, c, g, or u
  misc_feature (13)..(15): n is a, c, g, or u
  misc_feature (18)..(18): n is a, c, g, or u
gaugggguuanannnuanauuuc

SEQ ID NO: 49353 - RNA, 24 nt, Artificial Sequence
  Synthetic
  misc_feature (12)..(12): n is a, c, g, or u
  misc_feature (14)..(16): n is a, c, g, or u
  misc_feature (19)..(19): n is a, c, g, or u
agaugggguuanannnuanauuuc

SEQ ID NO: 49354 - RNA, 18 nt, Artificial Sequence
  Synthetic
  misc_feature (8)..(8): n is a, c, g, or u
ggucaaunaccuggaucg

SEQ ID NO: 49355 - RNA, 19 nt, Artificial Sequence
  Synthetic
  misc_feature (1)..(1): n is a, c, g, or u
  misc_feature (9)..(9): n is a, c, g, or u
nggucaaunaccuggaucg

SEQ ID NO: 49356 - RNA, 20 nt, Artificial Sequence
  Synthetic
  misc_feature (2)..(2): n is a, c, g, or u
  misc_feature (10)..(10): n is a, c, g, or u
anggucaaunaccuggaucg

SEQ ID NO: 49357 - RNA, 18 nt, Artificial Sequence
  Synthetic
  misc_feature (18)..(18): n is a, c, g, or u
cugccguuccagccgacn

SEQ ID NO: 49358 - RNA, 19 nt, Artificial Sequence
  Synthetic
  misc_feature (19)..(19): n is a, c, g, or u
ucugccguuccagccgacn

SEQ ID NO: 49359 - RNA, 20 nt, Artificial Sequence
  Synthetic
  misc_feature (20)..(20): n is a, c, g, or u
gucugccguuccagccgacn

SEQ ID NO: 49360 - RNA, 18 nt, Artificial Sequence
  Synthetic
  misc_feature (18)..(18): n is a, c, g, or u
ccccacacgguggccugn

SEQ ID NO: 49361 - RNA, 19 nt, Artificial Sequence
  Synthetic
  misc_feature (19)..(19): n is a, c, g, or u
cccccacacgguggccugn

SEQ ID NO: 49362 - RNA, 20 nt, Artificial Sequence
  Synthetic
  misc_feature (20)..(20): n is a, c, g, or u
acccccacacgguggccugn

SEQ ID NO: 49363 - RNA, 18 nt, Artificial Sequence
  Synthetic
  misc_feature (12)..(12): n is a, c, g, or u
  misc_feature (18)..(18): n is a, c, g, or u
aggcaagcuaunuugugn

SEQ ID NO: 49364 - RNA, 19 nt, Artificial Sequence
  Synthetic
  misc_feature (13)..(13): n is a, c, g, or u
  misc_feature (19)..(19): n is a, c, g, or u
caggcaagcuaunuugugn

SEQ ID NO: 49365 - RNA, 20 nt, Artificial Sequence
  Synthetic
  misc_feature (14)..(14): n is a, c, g, or u
  misc_feature (20)..(20): n is a, c, g, or u
ucaggcaagcuaunuugugn

SEQ ID NO: 49366 - RNA, 18 nt, Artificial Sequence
  Synthetic
cuuuaggaaaauaccuau

SEQ ID NO: 49367 - RNA, 19 nt, Artificial Sequence
  Synthetic
gcuuuaggaaaauaccuau

SEQ ID NO: 49368 - RNA, 20 nt, Artificial Sequence
  Synthetic
ggcuuuaggaaaauaccuau

SEQ ID NO: 49369 - RNA, 18 nt, Artificial Sequence
  Synthetic
accaauuuucuguuaucu

SEQ ID NO: 49370 - RNA, 19 nt, Artificial Sequence
  Synthetic
uaccaauuuucuguuaucu

SEQ ID NO: 49371 - RNA, 20 nt, Artificial Sequence
  Synthetic
uuaccaauuuucuguuaucu

SEQ ID NO: 49372 - RNA, 18 nt, Artificial Sequence
  Synthetic
  misc_feature (10)..(10): n is a, c, g, or u
uuuggugucnuuuggagu

SEQ ID NO: 49373 - RNA, 19 nt, Artificial Sequence
  Synthetic
  misc_feature (11)..(11): n is a, c, g, or u
auuuggugucnuuuggagu

SEQ ID NO: 49374 - RNA, 20 nt, Artificial Sequence
  Synthetic
  misc_feature (12)..(12): n is a, c, g, or u
uauuuggugucnuuuggagu

SEQ ID NO: 49375 - RNA, 18 nt, Artificial Sequence
  Synthetic
gccaauggcaaacaaggu

SEQ ID NO: 49376 - RNA, 19 nt, Artificial Sequence
  Synthetic
ggccaauggcaaacaaggu

SEQ ID NO: 49377 - RNA, 20 nt, Artificial Sequence
  Synthetic
uggccaauggcaaacaaggu

SEQ ID NO: 49378 - RNA, 18 nt, Artificial Sequence
  Synthetic
  misc_feature (16)..(16): n is a, c, g, or u
ugaguauuuggugucnuu

SEQ ID NO: 49379 - RNA, 19 nt, Artificial Sequence
  Synthetic
  misc_feature (17)..(17): n is a, c, g, or u
uugaguauuuggugucnuu

SEQ ID NO: 49380 - RNA, 20 nt, Artificial Sequence
  Synthetic
  misc_feature (18)..(18): n is a, c, g, or u
cuugaguauuuggugucnuu

SEQ ID NO: 49381 - RNA, 18 nt, Artificial Sequence
  Synthetic
  misc_feature (3)..(3): n is a, c, g, or u
aanucagaaggcaaaaaa

SEQ ID NO: 49382 - RNA, 19 nt, Artificial Sequence
  Synthetic
  misc_feature (4)..(4): n is a, c, g, or u
gaanucagaaggcaaaaaa

SEQ ID NO: 49383 - RNA, 20 nt, Artificial Sequence
  Synthetic
  misc_feature (5)..(5): n is a, c, g, or u
agaanucagaaggcaaaaaa

SEQ ID NO: 49384 - RNA, 21 nt, Artificial Sequence
  Synthetic
  misc_feature (6)..(6): n is a, c, g, or u
aagaanucagaaggcaaaaaa

SEQ ID NO: 49385 - RNA, 22 nt, Artificial Sequence
  Synthetic
  misc_feature (7)..(7): n is a, c, g, or u
gaagaanucagaaggcaaaaaa

SEQ ID NO: 49386 - RNA, 23 nt, Artificial Sequence
  Synthetic
  misc_feature (8)..(8): n is a, c, g, or u
ggaagaanucagaaggcaaaaaa

SEQ ID NO: 49387 - RNA, 24 nt, Artificial Sequence
  Synthetic
  misc_feature (9)..(9): n is a, c, g, or u
gggaagaanucagaaggcaaaaaa

SEQ ID NO: 49388 - RNA, 18 nt, Artificial Sequence
  Synthetic
  misc_feature (5)..(5): n is a, c, g, or u
agaanucagaaggcaaaa

SEQ ID NO: 49389 - RNA, 19 nt, Artificial Sequence
  Synthetic
  misc_feature (6)..(6): n is a, c, g, or u
aagaanucagaaggcaaaa

SEQ ID NO: 49390 - RNA, 20 nt, Artificial Sequence
  Synthetic
  misc_feature (7)..(7): n is a, c, g, or u
gaagaanucagaaggcaaaa

SEQ ID NO: 49391 - RNA, 21 nt, Artificial Sequence
  Synthetic
  misc_feature (8)..(8): n is a, c, g, or u
ggaagaanucagaaggcaaaa

SEQ ID NO: 49392 - RNA, 22 nt, Artificial Sequence
  Synthetic
  misc_feature (9)..(9): n is a, c, g, or u
gggaagaanucagaaggcaaaa

SEQ ID NO: 49393 - RNA, 23 nt, Artificial Sequence
  Synthetic
  misc_feature (10)..(10): n is a, c, g, or u
cgggaagaanucagaaggcaaaa

SEQ ID NO: 49394 - RNA, 24 nt, Artificial Sequence
  Synthetic
  misc_feature (11)..(11): n is a, c, g, or u
acgggaagaanucagaaggcaaaa

SEQ ID NO: 49395 - RNA, 18 nt, Artificial Sequence
  Synthetic
  misc_feature (4)..(5): n is a, c, g, or u
ggunnucccccuagaaaa

SEQ ID NO: 49396 - RNA, 19 nt, Artificial Sequence
  Synthetic
  misc_feature (5)..(6): n is a, c, g, or u
gggunnucccccuagaaaa

SEQ ID NO: 49397 - RNA, 20 nt, Artificial Sequence
  Synthetic
  misc_feature (6)..(7): n is a, c, g, or u
cgggunnucccccuagaaaa

SEQ ID NO: 49398 - RNA, 21 nt, Artificial Sequence
  Synthetic
  misc_feature (7)..(8): n is a, c, g, or u
ccgggunnucccccuagaaaa

SEQ ID NO: 49399 - RNA, 22 nt, Artificial Sequence
  Synthetic
  misc_feature (8)..(9): n is a, c, g, or u
cccgggunnucccccuagaaaa

SEQ ID NO: 49400 - RNA, 23 nt, Artificial Sequence
  Synthetic
  misc_feature (9)..(10): n is a, c, g, or u
acccgggunnucccccuagaaaa

SEQ ID NO: 49401 - RNA, 24 nt, Artificial Sequence
  Synthetic
  misc_feature (10)..(11): n is a, c, g, or u
cacccgggunnucccccuagaaaa

SEQ ID NO: 49402 - RNA, 18 nt, Artificial Sequence
  Synthetic
aauauggugacccacaaa

SEQ ID NO: 49403 - RNA, 19 nt, Artificial Sequence
  Synthetic
gaauauggugacccacaaa

SEQ ID NO: 49404 - RNA, 20 nt, Artificial Sequence
  Synthetic
  misc_feature (1)..(1): n is a, c, g, or u
ngaauauggugacccacaaa

SEQ ID NO: 49405 - RNA, 21 nt, Artificial Sequence
  Synthetic
  misc_feature (2)..(2): n is a, c, g, or u
angaauauggugacccacaaa

SEQ ID NO: 49406 - RNA, 22 nt, Artificial Sequence
  Synthetic
  misc_feature (3)..(3): n is a, c, g, or u
cangaauauggugacccacaaa

SEQ ID NO: 49407 - RNA, 23 nt, Artificial Sequence
  Synthetic
  misc_feature (4)..(4): n is a, c, g, or u
ccangaauauggugacccacaaa

SEQ ID NO: 49408 - RNA, 24 nt, Artificial Sequence
  Synthetic
  misc_feature (5)..(5): n is a, c, g, or u
cccangaauauggugacccacaaa

SEQ ID NO: 49409 - RNA, 18 nt, Artificial Sequence
  Synthetic
acaaauugcacuaguaaa

SEQ ID NO: 49410 - RNA, 19 nt, Artificial Sequence
  Synthetic
aacaaauugcacuaguaaa

SEQ ID NO: 49411 - RNA, 20 nt, Artificial Sequence
  Synthetic
gaacaaauugcacuaguaaa

SEQ ID NO: 49412 - RNA, 21 nt, Artificial Sequence
  Synthetic
ugaacaaauugcacuaguaaa

SEQ ID NO: 49413 - RNA, 22 nt, Artificial Sequence
  Synthetic
cugaacaaauugcacuaguaaa

SEQ ID NO: 49414 - RNA, 23 nt, Artificial Sequence
  Synthetic
acugaacaaauugcacuaguaaa

SEQ ID NO: 49415 - RNA, 24 nt, Artificial Sequence
  Synthetic
cacugaacaaauugcacuaguaaa

SEQ ID NO: 49416 - RNA, 18 nt, Artificial Sequence
  Synthetic
  misc_feature (9)..(9): n is a, c, g, or u
acggggagnccgcguaaa

SEQ ID NO: 49417 - RNA, 19 nt, Artificial Sequence
  Synthetic
  misc_feature (10)..(10): n is a, c, g, or u
gacggggagnccgcguaaa

SEQ ID NO: 49418 - RNA, 20 nt, Artificial Sequence
  Synthetic
  misc_feature (11)..(11): n is a, c, g, or u
agacggggagnccgcguaaa

SEQ ID NO: 49419 - RNA, 21 nt, Artificial Sequence
  Synthetic
  misc_feature (12)..(12): n is a, c, g, or u
cagacggggagnccgcguaaa

SEQ ID NO: 49420 - RNA, 22 nt, Artificial Sequence
  Synthetic
  misc_feature (13)..(13): n is a, c, g, or u
acagacggggagnccgcguaaa

SEQ ID NO: 49421 - RNA, 23 nt, Artificial Sequence
  Synthetic
  misc_feature (14)..(14): n is a, c, g, or u
aacagacggggagnccgcguaaa

SEQ ID NO: 49422 - RNA, 24 nt, Artificial Sequence
  Synthetic
  misc_feature (15)..(15): n is a, c, g, or u
gaacagacggggagnccgcguaaa

SEQ ID NO: 49423 - RNA, 18 nt, Artificial Sequence
  Synthetic
  misc_feature (8)..(8): n is a, c, g, or u
ccuggaanuagaggacaa

SEQ ID NO: 49424 - RNA, 19 nt, Artificial Sequence
  Synthetic
  misc_feature (9)..(9): n is a, c, g, or u
uccuggaanuagaggacaa

SEQ ID NO: 49425 - RNA, 20 nt, Artificial Sequence
  Synthetic
  misc_feature (10)..(10): n is a, c, g, or u
auccuggaanuagaggacaa

SEQ ID NO: 49426 - RNA, 21 nt, Artificial Sequence
  Synthetic
  misc_feature (11)..(11): n is a, c, g, or u
gauccuggaanuagaggacaa

SEQ ID NO: 49427 - RNA, 22 nt, Artificial Sequence
  Synthetic
  misc_feature (1)..(1): n is a, c, g, or u
  misc_feature (12)..(12): n is a, c, g, or u
ngauccuggaanuagaggacaa

SEQ ID NO: 49428 - RNA, 23 nt, Artificial Sequence
  Synthetic
  misc_feature (2)..(2): n is a, c, g, or u
  misc_feature (13)..(13): n is a, c, g, or u
ungauccuggaanuagaggacaa

SEQ ID NO: 49429 - RNA, 24 nt, Artificial Sequence
  Synthetic
  misc_feature (3)..(3): n is a, c, g, or u
  misc_feature (14)..(14): n is a, c, g, or u
gungauccuggaanuagaggacaa

SEQ ID NO: 49430 - RNA, 18 nt, Artificial Sequence
  Synthetic
uaaacugagccaggagaa

SEQ ID NO: 49431 - RNA, 19 nt, Artificial Sequence
  Synthetic
guaaacugagccaggagaa

SEQ ID NO: 49432 - RNA, 20 nt, Artificial Sequence
  Synthetic
aguaaacugagccaggagaa

SEQ ID NO: 49433 - RNA, 21 nt, Artificial Sequence
  Synthetic
uaguaaacugagccaggagaa

SEQ ID NO: 49434 - RNA, 22 nt, Artificial Sequence
  Synthetic
cuaguaaacugagccaggagaa

SEQ ID NO: 49435 - RNA, 23 nt, Artificial Sequence
  Synthetic
acuaguaaacugagccaggagaa

SEQ ID NO: 49436 - RNA, 24 nt, Artificial Sequence
  Synthetic
cacuaguaaacugagccaggagaa

SEQ ID NO: 49437 - RNA, 18 nt, Artificial Sequence
  Synthetic
  misc_feature (14)..(14): n is a, c, g, or u
ggaacggcagacgnagaa

SEQ ID NO: 49438 - RNA, 19 nt, Artificial Sequence
  Synthetic
  misc_feature (15)..(15): n is a, c, g, or u
uggaacggcagacgnagaa

SEQ ID NO: 49439 - RNA, 20 nt, Artificial Sequence
  Synthetic
  misc_feature (16)..(16): n is a, c, g, or u
cuggaacggcagacgnagaa

SEQ ID NO: 49440 - RNA, 21 nt, Artificial Sequence
  Synthetic
  misc_feature (17)..(17): n is a, c, g, or u
gcuggaacggcagacgnagaa

SEQ ID NO: 49441 - RNA, 22 nt, Artificial Sequence
  Synthetic
  misc_feature (18)..(18): n is a, c, g, or u
ggcuggaacggcagacgnagaa

SEQ ID NO: 49442 - RNA, 23 nt, Artificial Sequence
  Synthetic
  misc_feature (19)..(19): n is a, c, g, or u
cggcuggaacggcagacgnagaa

SEQ ID NO: 49443 - RNA, 24 nt, Artificial Sequence
  Synthetic
  misc_feature (20)..(20): n is a, c, g, or u
ucggcuggaacggcagacgnagaa

SEQ ID NO: 49444 - RNA, 18 nt, Artificial Sequence
  Synthetic
  misc_feature (2)..(2): n is a, c, g, or u
  misc_feature (11)..(11): n is a, c, g, or u
gnaaaugaaunucaggaa

SEQ ID NO: 49445 - RNA, 19 nt, Artificial Sequence
  Synthetic
  misc_feature (3)..(3): n is a, c, g, or u
  misc_feature (12)..(12): n is a, c, g, or u
ugnaaaugaaunucaggaa

SEQ ID NO: 49446 - RNA, 20 nt, Artificial Sequence
  Synthetic
  misc_feature (4)..(4): n is a, c, g, or u
  misc_feature (13)..(13): n is a, c, g, or u
augnaaaugaaunucaggaa

SEQ ID NO: 49447 - RNA, 21 nt, Artificial Sequence
  Synthetic
  misc_feature (5)..(5): n is a, c, g, or u
  misc_feature (14)..(14): n is a, c, g, or u
gaugnaaaugaaunucaggaa

SEQ ID NO: 49448 - RNA, 22 nt, Artificial Sequence
  Synthetic
  misc_feature (6)..(6): n is a, c, g, or u
  misc_feature (15)..(15): n is a, c, g, or u
ugaugnaaaugaaunucaggaa

SEQ ID NO: 49449 - RNA, 23 nt, Artificial Sequence
  Synthetic
  misc_feature (7)..(7): n is a, c, g, or u
  misc_feature (16)..(16): n is a, c, g, or u
uugaugnaaaugaaunucaggaa

SEQ ID NO: 49450 - RNA, 24 nt, Artificial Sequence
  Synthetic
  misc_feature (8)..(8): n is a, c, g, or u
  misc_feature (17)..(17): n is a, c, g, or u
cuugaugnaaaugaaunucaggaa

SEQ ID NO: 49451 - RNA, 18 nt, Artificial Sequence
  Synthetic
gcauagcagcaggaugaa

SEQ ID NO: 49452 - RNA, 19 nt, Artificial Sequence
  Synthetic
ggcauagcagcaggaugaa

SEQ ID NO: 49453 - RNA, 20 nt, Artificial Sequence
  Synthetic
aggcauagcagcaggaugaa

SEQ ID NO: 49454 - RNA, 21 nt, Artificial Sequence
  Synthetic
gaggcauagcagcaggaugaa

SEQ ID NO: 49455 - RNA, 22 nt, Artificial Sequence
  Synthetic
ugaggcauagcagcaggaugaa

SEQ ID NO: 49456 - RNA, 23 nt, Artificial Sequence
  Synthetic
augaggcauagcagcaggaugaa

SEQ ID NO: 49457 - RNA, 24 nt, Artificial Sequence
  Synthetic
gaugaggcauagcagcaggaugaa

SEQ ID NO: 49458 - RNA, 18 nt, Artificial Sequence
  Synthetic
  misc_feature (13)..(13): n is a, c, g, or u
ggguucugugucncugaa

SEQ ID NO: 49459 - RNA, 19 nt, Artificial Sequence
  Synthetic
  misc_feature (14)..(14): n is a, c, g, or u
aggguucugugucncugaa

SEQ ID NO: 49460 - RNA, 20 nt, Artificial Sequence
  Synthetic
  misc_feature (15)..(15): n is a, c, g, or u
caggguucugugucncugaa

SEQ ID NO: 49461 - RNA, 21 nt, Artificial Sequence
  Synthetic
  misc_feature (16)..(16): n is a, c, g, or u
gcaggguucugugucncugaa

SEQ ID NO: 49462 - RNA, 22 nt, Artificial Sequence
  Synthetic
  misc_feature (17)..(17): n is a, c, g, or u
agcaggguucugugucncugaa

SEQ ID NO: 49463 - RNA, 23 nt, Artificial Sequence
  Synthetic
  misc_feature (18)..(18): n is a, c, g, or u
gagcaggguucugugucncugaa

SEQ ID NO: 49464 - RNA, 24 nt, Artificial Sequence
  Synthetic
  misc_feature (19)..(19): n is a, c, g, or u
ggagcaggguucugugucncugaa

SEQ ID NO: 49465 - RNA, 18 nt, Artificial Sequence
  Synthetic
gcgacgugcagaggugaa

SEQ ID NO: 49466 - RNA, 19 nt, Artificial Sequence
  Synthetic
ugcgacgugcagaggugaa

SEQ ID NO: 49467 - RNA, 20 nt, Artificial Sequence
  Synthetic
augcgacgugcagaggugaa

SEQ ID NO: 49468 - RNA, 21 nt, Artificial Sequence
  Synthetic
caugcgacgugcagaggugaa

SEQ ID NO: 49469 - RNA, 22 nt, Artificial Sequence
  Synthetic
ccaugcgacgugcagaggugaa

SEQ ID NO: 49470 - RNA, 23 nt, Artificial Sequence
  Synthetic
uccaugcgacgugcagaggugaa

SEQ ID NO: 49471 - RNA, 24 nt, Artificial Sequence
  Synthetic
cuccaugcgacgugcagaggugaa

SEQ ID NO: 49472 - RNA, 18 nt, Artificial Sequence
  Synthetic
auggauacccacagauaa

SEQ ID NO: 49473 - RNA, 19 nt, Artificial Sequence
  Synthetic
aauggauacccacagauaa

SEQ ID NO: 49474 - RNA, 20 nt, Artificial Sequence
  Synthetic
aaauggauacccacagauaa

SEQ ID NO: 49475 - RNA, 21 nt, Artificial Sequence
  Synthetic
  misc_feature (1)..(1): n is a, c, g, or u
naaauggauacccacagauaa

SEQ ID NO: 49476 - RNA, 22 nt, Artificial Sequence
  Synthetic
  misc_feature (2)..(2): n is a, c, g, or u
unaaauggauacccacagauaa

SEQ ID NO: 49477 - RNA, 23 nt, Artificial Sequence
  Synthetic
  misc_feature (3)..(3): n is a, c, g, or u
uunaaauggauacccacagauaa

SEQ ID NO: 49478 - RNA, 24 nt, Artificial Sequence
  Synthetic
  misc_feature (4)..(4): n is a, c, g, or u
auunaaauggauacccacagauaa

SEQ ID NO: 49479 - RNA, 18 nt, Artificial Sequence
  Synthetic
uugguaacagcgguauaa

SEQ ID NO: 49480 - RNA, 19 nt, Artificial Sequence
  Synthetic
auugguaacagcgguauaa

SEQ ID NO: 49481 - RNA, 20 nt, Artificial Sequence
  Synthetic
aauugguaacagcgguauaa

SEQ ID NO: 49482 - RNA, 21 nt, Artificial Sequence
  Synthetic
aaauugguaacagcgguauaa

SEQ ID NO: 49483 - RNA, 22 nt, Artificial Sequence
  Synthetic
aaaauugguaacagcgguauaa

SEQ ID NO: 49484 - RNA, 23 nt, Artificial Sequence
  Synthetic
gaaaauugguaacagcgguauaa

SEQ ID NO: 49485 - RNA, 24 nt, Artificial Sequence
  Synthetic
agaaaauugguaacagcgguauaa

SEQ ID NO: 49486 - RNA, 18 nt, Artificial Sequence
  Synthetic
  misc_feature (5)..(5): n is a, c, g, or u
  misc_feature (8)..(8): n is a, c, g, or u
agcancangagggaaaca

SEQ ID NO: 49487 - RNA, 19 nt, Artificial Sequence
  Synthetic
  misc_feature (6)..(6): n is a, c, g, or u
  misc_feature (9)..(9): n is a, c, g, or u
cagcancangagggaaaca

SEQ ID NO: 49488 - RNA, 20 nt, Artificial Sequence
  Synthetic
  misc_feature (7)..(7): n is a, c, g, or u
  misc_feature (10)..(10): n is a, c, g, or u
acagcancangagggaaaca

SEQ ID NO: 49489 - RNA, 21 nt, Artificial Sequence
  Synthetic
  misc_feature (8)..(8): n is a, c, g, or u
  misc_feature (11)..(11): n is a, c, g, or u
aacagcancangagggaaaca

SEQ ID NO: 49490 - RNA, 22 nt, Artificial Sequence
  Synthetic
  misc_feature (9)..(9): n is a, c, g, or u
  misc_feature (12)..(12): n is a, c, g, or u
gaacagcancangagggaaaca

SEQ ID NO: 49491 - RNA, 23 nt, Artificial Sequence
  Synthetic
  misc_feature (10)..(10): n is a, c, g, or u
  misc_feature (13)..(13): n is a, c, g, or u
ggaacagcancangagggaaaca

SEQ ID NO: 49492 - RNA, 24 nt, Artificial Sequence
  Synthetic
  misc_feature (11)..(11): n is a, c, g, or u
  misc_feature (14)..(14): n is a, c, g, or u
uggaacagcancangagggaaaca

SEQ ID NO: 49493 - RNA, 18 nt, Artificial Sequence
  Synthetic
gccgacgggacguaaaca

SEQ ID NO: 49494 - RNA, 19 nt, Artificial Sequence
  Synthetic
cgccgacgggacguaaaca

SEQ ID NO: 49495 - RNA, 20 nt, Artificial Sequence
  Synthetic
gcgccgacgggacguaaaca

SEQ ID NO: 49496 - RNA, 21 nt, Artificial Sequence
  Synthetic
agcgccgacgggacguaaaca

SEQ ID NO: 49497 - RNA, 22 nt, Artificial Sequence
  Synthetic
cagcgccgacgggacguaaaca

SEQ ID NO: 49498 - RNA, 23 nt, Artificial Sequence
  Synthetic
ucagcgccgacgggacguaaaca

SEQ ID NO: 49499 - RNA, 24 nt, Artificial Sequence
  Synthetic
uucagcgccgacgggacguaaaca

SEQ ID NO: 49500 - RNA, 18 nt, Artificial Sequence
  Synthetic
guccaaggaauacuaaca

SEQ ID NO: 49501 - RNA, 19 nt, Artificial Sequence
  Synthetic
aguccaaggaauacuaaca

SEQ ID NO: 49502 - RNA, 20 nt, Artificial Sequence
  Synthetic
gaguccaaggaauacuaaca

SEQ ID NO: 49503 - RNA, 21 nt, Artificial Sequence
  Synthetic
ugaguccaaggaauacuaaca

SEQ ID NO: 49504 - RNA, 22 nt, Artificial Sequence
  Synthetic
augaguccaaggaauacuaaca

SEQ ID NO: 49505 - RNA, 23 nt, Artificial Sequence
  Synthetic
uaugaguccaaggaauacuaaca

SEQ ID NO: 49506 - RNA, 24 nt, Artificial Sequence
  Synthetic
uuaugaguccaaggaauacuaaca

SEQ ID NO: 49507 - RNA, 18 nt, Artificial Sequence
  Synthetic
auaacuaaaagccagaca

SEQ ID NO: 49508 - RNA, 19 nt, Artificial Sequence
  Synthetic
uauaacuaaaagccagaca

SEQ ID NO: 49509 - RNA, 20 nt, Artificial Sequence
  Synthetic
auauaacuaaaagccagaca

SEQ ID NO: 49510 - RNA, 21 nt, Artificial Sequence
  Synthetic
cauauaacuaaaagccagaca

SEQ ID NO: 49511 - RNA, 22 nt, Artificial Sequence
  Synthetic
ccauauaacuaaaagccagaca

SEQ ID NO: 49512 - RNA, 23 nt, Artificial Sequence
  Synthetic
uccauauaacuaaaagccagaca

SEQ ID NO: 49513 - RNA, 24 nt, Artificial Sequence
  Synthetic
auccauauaacuaaaagccagaca

SEQ ID NO: 49514 - RNA, 18 nt, Artificial Sequence
  Synthetic
  misc_feature (6)..(6): n is a, c, g, or u
  misc_feature (15)..(15): n is a, c, g, or u
cccagnggauugggnaca

SEQ ID NO: 49515 - RNA, 19 nt, Artificial Sequence
  Synthetic
  misc_feature (7)..(7): n is a, c, g, or u
  misc_feature (16)..(16): n is a, c, g, or u
ucccagnggauugggnaca

SEQ ID NO: 49516 - RNA, 20 nt, Artificial Sequence
  Synthetic
  misc_feature (8)..(8): n is a, c, g, or u
  misc_feature (17)..(17): n is a, c, g, or u
aucccagnggauugggnaca

SEQ ID NO: 49517 - RNA, 21 nt, Artificial Sequence
  Synthetic
  misc_feature (9)..(9): n is a, c, g, or u
  misc_feature (18)..(18): n is a, c, g, or u
aaucccagnggauugggnaca

SEQ ID NO: 49518 - RNA, 22 nt, Artificial Sequence
  Synthetic
  misc_feature (10)..(10): n is a, c, g, or u
  misc_feature (19)..(19): n is a, c, g, or u
gaaucccagnggauugggnaca

SEQ ID NO: 49519 - RNA, 23 nt, Artificial Sequence
  Synthetic
  misc_feature (11)..(11): n is a, c, g, or u
  misc_feature (20)..(20): n is a, c, g, or u
agaaucccagnggauugggnaca

SEQ ID NO: 49520 - RNA, 24 nt, Artificial Sequence
  Synthetic
  misc_feature (12)..(12): n is a, c, g, or u
  misc_feature (21)..(21): n is a, c, g, or u
aagaaucccagnggauugggnaca

SEQ ID NO: 49521 - RNA, 18 nt, Artificial Sequence
  Synthetic
  misc_feature (10)..(10): n is a, c, g, or u
  misc_feature (15)..(15): n is a, c, g, or u
guucauguanuguunaca

SEQ ID NO: 49522 - RNA, 19 nt, Artificial Sequence
  Synthetic
  misc_feature (11)..(11): n is a, c, g, or u
  misc_feature (16)..(16): n is a, c, g, or u
gguucauguanuguunaca

SEQ ID NO: 49523 - RNA, 20 nt, Artificial Sequence
  Synthetic
  misc_feature (12)..(12): n is a, c, g, or u
  misc_feature (17)..(17): n is a, c, g, or u
agguucauguanuguunaca

SEQ ID NO: 49524 - RNA, 21 nt, Artificial Sequence
  Synthetic
  misc_feature (13)..(13): n is a, c, g, or u
  misc_feature (18)..(18): n is a, c, g, or u
aagguucauguanuguunaca

SEQ ID NO: 49525 - RNA, 22 nt, Artificial Sequence
  Synthetic
  misc_feature (14)..(14): n is a, c, g, or u
  misc_feature (19)..(19): n is a, c, g, or u
aaagguucauguanuguunaca

SEQ ID NO: 49526 - RNA, 23 nt, Artificial Sequence
  Synthetic
  misc_feature (15)..(15): n is a, c, g, or u
  misc_feature (20)..(20): n is a, c, g, or u
uaaagguucauguanuguunaca

SEQ ID NO: 49527 - RNA, 24 nt, Artificial Sequence
  Synthetic
  misc_feature (16)..(16): n is a, c, g, or u
  misc_feature (21)..(21): n is a, c, g, or u
guaaagguucauguanuguunaca

SEQ ID NO: 49528 - RNA, 18 nt, Artificial Sequence
  Synthetic
auggccaagccccaacca

SEQ ID NO: 49529 - RNA, 19 nt, Artificial Sequence
  Synthetic
aauggccaagccccaacca

SEQ ID NO: 49530 - RNA, 20 nt, Artificial Sequence
  Synthetic
caauggccaagccccaacca

SEQ ID NO: 49531 - RNA, 21 nt, Artificial Sequence
  Synthetic
ccaauggccaagccccaacca

SEQ ID NO: 49532 - RNA, 22 nt, Artificial Sequence
  Synthetic
gccaauggccaagccccaacca

SEQ ID NO: 49533 - RNA, 23 nt, Artificial Sequence
  Synthetic
ggccaauggccaagccccaacca

SEQ ID NO: 49534 - RNA, 24 nt, Artificial Sequence
  Synthetic
uggccaauggccaagccccaacca

SEQ ID NO: 49535 - RNA, 18 nt, Artificial Sequence
  Synthetic
ggaaagcccuacgcacca

SEQ ID NO: 49536 - RNA, 19 nt, Artificial Sequence
  Synthetic
gggaaagcccuacgcacca

SEQ ID NO: 49537 - RNA, 20 nt, Artificial Sequence
  Synthetic
ggggaaagcccuacgcacca

SEQ ID NO: 49538 - RNA, 21 nt, Artificial Sequence
  Synthetic
gggggaaagcccuacgcacca

SEQ ID NO: 49539 - RNA, 22 nt, Artificial Sequence
  Synthetic
ugggggaaagcccuacgcacca

SEQ ID NO: 49540 - RNA, 23 nt, Artificial Sequence
  Synthetic
gugggggaaagcccuacgcacca

SEQ ID NO: 49541 - RNA, 24 nt, Artificial Sequence
  Synthetic
agugggggaaagcccuacgcacca

SEQ ID NO: 49542 - RNA, 18 nt, Artificial Sequence
  Synthetic
  misc_feature (8)..(8): n is a, c, g, or u
  misc_feature (11)..(11): n is a, c, g, or u
  misc_feature (14)..(14): n is a, c, g, or u
guuuaaunccnuunucca

SEQ ID NO: 49543 - RNA, 19 nt, Artificial Sequence
  Synthetic
  misc_feature (9)..(9): n is a, c, g, or u
  misc_feature (12)..(12): n is a, c, g, or u
  misc_feature (15)..(15): n is a, c, g, or u
gguuuaaunccnuunucca

SEQ ID NO: 49544 - RNA, 20 nt, Artificial Sequence
  Synthetic
  misc_feature (1)..(1): n is a, c, g, or u
  misc_feature (10)..(10): n is a, c, g, or u
  misc_feature (13)..(13): n is a, c, g, or u
  misc_feature (16)..(16): n is a, c, g, or u
ngguuuaaunccnuunucca

SEQ ID NO: 49545 - RNA, 21 nt, Artificial Sequence
  Synthetic
  misc_feature (2)..(2): n is a, c, g, or u
  misc_feature (11)..(11): n is a, c, g, or u
  misc_feature (14)..(14): n is a, c, g, or u
  misc_feature (17)..(17): n is a, c, g, or u
angguuuaaunccnuunucca

SEQ ID NO: 49546 - RNA, 22 nt, Artificial Sequence
  Synthetic
  misc_feature (3)..(3): n is a, c, g, or u
  misc_feature (12)..(12): n is a, c, g, or u
  misc_feature (15)..(15): n is a, c, g, or u
  misc_feature (18)..(18): n is a, c, g, or u
uangguuuaaunccnuunucca

SEQ ID NO: 49547 - RNA, 23 nt, Artificial Sequence
  Synthetic
  misc_feature (4)..(4): n is a, c, g, or u
  misc_feature (13)..(13): n is a, c, g, or u
  misc_feature (16)..(16): n is a, c, g, or u
  misc_feature (19)..(19): n is a, c, g, or u
auangguuuaaunccnuunucca

SEQ ID NO: 49548 - RNA, 24 nt, Artificial Sequence
  Synthetic
  misc_feature (5)..(5): n is a, c, g, or u
  misc_feature (14)..(14): n is a, c, g, or u
  misc_feature (17)..(17): n is a, c, g, or u
  misc_feature (20)..(20): n is a, c, g, or u
aauangguuuaaunccnuunucca

SEQ ID NO: 49549 - RNA, 18 nt, Artificial Sequence
  Synthetic
  misc_feature (11)..(11): n is a, c, g, or u
aaaaagagagnaauucca

SEQ ID NO: 49550 - RNA, 19 nt, Artificial Sequence
  Synthetic
  misc_feature (12)..(12): n is a, c, g, or u
aaaaaagagagnaauucca

SEQ ID NO: 49551 - RNA, 20 nt, Artificial Sequence
  Synthetic
  misc_feature (13)..(13): n is a, c, g, or u
caaaaaagagagnaauucca

SEQ ID NO: 49552 - RNA, 21 nt, Artificial Sequence
  Synthetic
  misc_feature (14)..(14): n is a, c, g, or u
gcaaaaaagagagnaauucca

SEQ ID NO: 49553 - RNA, 22 nt, Artificial Sequence
  Synthetic
  misc_feature (15)..(15): n is a, c, g, or u
ggcaaaaaagagagnaauucca

SEQ ID NO: 49554 - RNA, 23 nt, Artificial Sequence
  Synthetic
  misc_feature (16)..(16): n is a, c, g, or u
aggcaaaaaagagagnaauucca

SEQ ID NO: 49555 - RNA, 24 nt, Artificial Sequence
  Synthetic
  misc_feature (17)..(17): n is a, c, g, or u
aaggcaaaaaagagagnaauucca

SEQ ID NO: 49556 - RNA, 18 nt, Artificial Sequence
  Synthetic
ccuggccguugccgagca

SEQ ID NO: 49557 - RNA, 19 nt, Artificial Sequence
  Synthetic
gccuggccguugccgagca

SEQ ID NO: 49558 - RNA, 20 nt, Artificial Sequence
  Synthetic
ggccuggccguugccgagca

SEQ ID NO: 49559 - RNA, 21 nt, Artificial Sequence
  Synthetic
aggccuggccguugccgagca

SEQ ID NO: 49560 - RNA, 22 nt, Artificial Sequence
  Synthetic
caggccuggccguugccgagca

SEQ ID NO: 49561 - RNA, 23 nt, Artificial Sequence
  Synthetic
acaggccuggccguugccgagca

SEQ ID NO: 49562 - RNA, 24 nt, Artificial Sequence
  Synthetic
cacaggccuggccguugccgagca

SEQ ID NO: 49563 - RNA, 18 nt, Artificial Sequence
  Synthetic
ccgcaguauggaucggca

SEQ ID NO: 49564 - RNA, 19 nt, Artificial Sequence
  Synthetic
uccgcaguauggaucggca

SEQ ID NO: 49565 - RNA, 20 nt, Artificial Sequence
  Synthetic
uuccgcaguauggaucggca

SEQ ID NO: 49566 - RNA, 21 nt, Artificial Sequence
  Synthetic
guuccgcaguauggaucggca

SEQ ID NO: 49567 - RNA, 22 nt, Artificial Sequence
  Synthetic
aguuccgcaguauggaucggca

SEQ ID NO: 49568 - RNA, 23 nt, Artificial Sequence
  Synthetic
gaguuccgcaguauggaucggca

SEQ ID NO: 49569 - RNA, 24 nt, Artificial Sequence
  Synthetic
ggaguuccgcaguauggaucggca

SEQ ID NO: 49570 - RNA, 18 nt, Artificial Sequence
  Synthetic
cagaugagaaggaacaga

SEQ ID NO: 49571 - RNA, 19 nt, Artificial Sequence
  Synthetic
gcagaugagaaggaacaga

SEQ ID NO: 49572 - RNA, 20 nt, Artificial Sequence
  Synthetic
ggcagaugagaaggaacaga

SEQ ID NO: 49573 - RNA, 21 nt, Artificial Sequence
  Synthetic
cggcagaugagaaggaacaga

SEQ ID NO: 49574 - RNA, 22 nt, Artificial Sequence
  Synthetic
ccggcagaugagaaggaacaga

SEQ ID NO: 49575 - RNA, 23 nt, Artificial Sequence
  Synthetic
  misc_feature (1)..(1): n is a, c, g, or u
nccggcagaugagaaggaacaga

SEQ ID NO: 49576 - RNA, 24 nt, Artificial Sequence
  Synthetic
  misc_feature (2)..(2): n is a, c, g, or u
gnccggcagaugagaaggaacaga

SEQ ID NO: 49577 - RNA, 18 nt, Artificial Sequence
  Synthetic
cucuuagagguggagaga

SEQ ID NO: 49578 - RNA, 19 nt, Artificial Sequence
  Synthetic
ucucuuagagguggagaga

SEQ ID NO: 49579 - RNA, 20 nt, Artificial Sequence
  Synthetic
gucucuuagagguggagaga

SEQ ID NO: 49580 - RNA, 21 nt, Artificial Sequence
  Synthetic
ugucucuuagagguggagaga

SEQ ID NO: 49581 - RNA, 22 nt, Artificial Sequence
  Synthetic
gugucucuuagagguggagaga

SEQ ID NO: 49582 - RNA, 23 nt, Artificial Sequence
  Synthetic
  misc_feature (1)..(1): n is a, c, g, or u
ngugucucuuagagguggagaga

SEQ ID NO: 49583 - RNA, 24 nt, Artificial Sequence
  Synthetic
  misc_feature (2)..(2): n is a, c, g, or u
gngugucucuuagagguggagaga

SEQ ID NO: 49584 - RNA, 18 nt, Artificial Sequence
  Synthetic
acauugggaagcuggaga

SEQ ID NO: 49585 - RNA, 19 nt, Artificial Sequence
  Synthetic
aacauugggaagcuggaga

SEQ ID NO: 49586 - RNA, 20 nt, Artificial Sequence
  Synthetic
uaacauugggaagcuggaga

SEQ ID NO: 49587 - RNA, 21 nt, Artificial Sequence
  Synthetic
cuaacauugggaagcuggaga

SEQ ID NO: 49588 - RNA, 22 nt, Artificial Sequence
  Synthetic
acuaacauugggaagcuggaga

SEQ ID NO: 49589 - RNA, 23 nt, Artificial Sequence
  Synthetic
uacuaacauugggaagcuggaga

SEQ ID NO: 49590 - RNA, 24 nt, Artificial Sequence
  Synthetic
auacuaacauugggaagcuggaga

SEQ ID NO: 49591 - RNA, 18 nt, Artificial Sequence
  Synthetic
  misc_feature (5)..(5): n is a, c, g, or u
acggnccggcagaugaga

SEQ ID NO: 49592 - RNA, 19 nt, Artificial Sequence
  Synthetic
  misc_feature (6)..(6): n is a, c, g, or u
cacggnccggcagaugaga

SEQ ID NO: 49593 - RNA, 20 nt, Artificial Sequence
  Synthetic
  misc_feature (7)..(7): n is a, c, g, or u
acacggnccggcagaugaga

SEQ ID NO: 49594 - RNA, 21 nt, Artificial Sequence
  Synthetic
  misc_feature (8)..(8): n is a, c, g, or u
cacacggnccggcagaugaga

SEQ ID NO: 49595 - RNA, 22 nt, Artificial Sequence
  Synthetic
  misc_feature (9)..(9): n is a, c, g, or u
gcacacggnccggcagaugaga

SEQ ID NO: 49596 - RNA, 23 nt, Artificial Sequence
  Synthetic
  misc_feature (10)..(10): n is a, c, g, or u
ugcacacggnccggcagaugaga

SEQ ID NO: 49597 - RNA, 24 nt, Artificial Sequence
  Synthetic
  misc_feature (11)..(11): n is a, c, g, or u
gugcacacggnccggcagaugaga

SEQ ID NO: 49598 - RNA, 18 nt, Artificial Sequence
  Synthetic
ggagguguacuuccuaga

SEQ ID NO: 49599 - RNA, 19 nt, Artificial Sequence
  Synthetic
aggagguguacuuccuaga

SEQ ID NO: 49600 - RNA, 20 nt, Artificial Sequence
  Synthetic
aaggagguguacuuccuaga

SEQ ID NO: 49601 - RNA, 21 nt, Artificial Sequence
  Synthetic
  misc_feature (1)..(1): n is a, c, g, or u
naaggagguguacuuccuaga

SEQ ID NO: 49602 - RNA, 22 nt, Artificial Sequence
  Synthetic
  misc_feature (2)..(2): n is a, c, g, or u
gnaaggagguguacuuccuaga

SEQ ID NO: 49603 - RNA, 23 nt, Artificial Sequence
  Synthetic
  misc_feature (3)..(3): n is a, c, g, or u
ggnaaggagguguacuuccuaga

SEQ ID NO: 49604 - RNA, 24 nt, Artificial Sequence
  Synthetic
  misc_feature (4)..(4): n is a, c, g, or u
uggnaaggagguguacuuccuaga

SEQ ID NO: 49605 - RNA, 18 nt, Artificial Sequence
  Synthetic
  misc_feature (4)..(4): n is a, c, g, or u
cgcnggauucagcgccga

SEQ ID NO: 49606 - RNA, 19 nt, Artificial Sequence
  Synthetic
  misc_feature (5)..(5): n is a, c, g, or u
ccgcnggauucagcgccga

SEQ ID NO: 49607 - RNA, 20 nt, Artificial Sequence
  Synthetic
  misc_feature (6)..(6): n is a, c, g, or u
uccgcnggauucagcgccga

SEQ ID NO: 49608 - RNA, 21 nt, Artificial Sequence
  Synthetic
  misc_feature (7)..(7): n is a, c, g, or u
guccgcnggauucagcgccga

SEQ ID NO: 49609 - RNA, 22 nt, Artificial Sequence
  Synthetic
  misc_feature (8)..(8): n is a, c, g, or u
cguccgcnggauucagcgccga

SEQ ID NO: 49610 - RNA, 23 nt, Artificial Sequence
  Synthetic
  misc_feature (9)..(9): n is a, c, g, or u
ucguccgcnggauucagcgccga

SEQ ID NO: 49611 - RNA, 24 nt, Artificial Sequence
  Synthetic
  misc_feature (1)..(1): n is a, c, g, or u
  misc_feature (10)..(10): n is a, c, g, or u
nucguccgcnggauucagcgccga

SEQ ID NO: 49612 - RNA, 18 nt, Artificial Sequence
  Synthetic
ucuucugcgacgcggcga

SEQ ID NO: 49613 - RNA, 19 nt, Artificial Sequence
  Synthetic
aucuucugcgacgcggcga

SEQ ID NO: 49614 - RNA, 20 nt, Artificial Sequence
  Synthetic
gaucuucugcgacgcggcga

SEQ ID NO: 49615 - RNA, 21 nt, Artificial Sequence
  Synthetic
agaucuucugcgacgcggcga

SEQ ID NO: 49616 - RNA, 22 nt, Artificial Sequence
  Synthetic
gagaucuucugcgacgcggcga

SEQ ID NO: 49617 - RNA, 23 nt, Artificial Sequence
  Synthetic
ugagaucuucugcgacgcggcga

SEQ ID NO: 49618 - RNA, 24 nt, Artificial Sequence
  Synthetic
uugagaucuucugcgacgcggcga

SEQ ID NO: 49619 - RNA, 18 nt, Artificial Sequence
  Synthetic
gcuccagaccggcugcga

SEQ ID NO: 49620 - RNA, 19 nt, Artificial Sequence
  Synthetic
cgcuccagaccggcugcga

SEQ ID NO: 49621 - RNA, 20 nt, Artificial Sequence
  Synthetic
ucgcuccagaccggcugcga

SEQ ID NO: 49622 - RNA, 21 nt, Artificial Sequence
  Synthetic
uucgcuccagaccggcugcga

SEQ ID NO: 49623 - RNA, 22 nt, Artificial Sequence
  Synthetic
  misc_feature (1)..(1): n is a, c, g, or u
nuucgcuccagaccggcugcga

SEQ ID NO: 49624 - RNA, 23 nt, Artificial Sequence
  Synthetic
  misc_feature (1)..(2): n is a, c, g, or u
nnuucgcuccagaccggcugcga

SEQ ID NO: 49625 - RNA, 24 nt, Artificial Sequence
  Synthetic
  misc_feature (2)..(3): n is a, c, g, or u
annuucgcuccagaccggcugcga

SEQ ID NO: 49626 - RNA, 18 nt, Artificial Sequence
  Synthetic
ccaggacaaguuggagga

SEQ ID NO: 49627 - RNA, 19 nt, Artificial Sequence
  Synthetic
gccaggacaaguuggagga

SEQ ID NO: 49628 - RNA, 20 nt, Artificial Sequence
  Synthetic
agccaggacaaguuggagga

SEQ ID NO: 49629 - RNA, 21 nt, Artificial Sequence
  Synthetic
uagccaggacaaguuggagga

SEQ ID NO: 49630 - RNA, 22 nt, Artificial Sequence
  Synthetic
auagccaggacaaguuggagga

SEQ ID NO: 49631 - RNA, 23 nt, Artificial Sequence
  Synthetic
gauagccaggacaaguuggagga

SEQ ID NO: 49632 - RNA, 24 nt, Artificial Sequence
  Synthetic
cgauagccaggacaaguuggagga

SEQ ID NO: 49633 - RNA, 18 nt, Artificial Sequence
  Synthetic
  misc_feature (8)..(8): n is a, c, g, or u
aagcccangaugauggga

SEQ ID NO: 49634 - RNA, 19 nt, Artificial Sequence
  Synthetic
  misc_feature (9)..(9): n is a, c, g, or u
aaagcccangaugauggga

SEQ ID NO: 49635 - RNA, 20 nt, Artificial Sequence
  Synthetic
  misc_feature (10)..(10): n is a, c, g, or u
uaaagcccangaugauggga

SEQ ID NO: 49636 - RNA, 21 nt, Artificial Sequence
  Synthetic
  misc_feature (11)..(11): n is a, c, g, or u
cuaaagcccangaugauggga

SEQ ID NO: 49637 - RNA, 22 nt, Artificial Sequence
  Synthetic
  misc_feature (12)..(12): n is a, c, g, or u
ccuaaagcccangaugauggga

SEQ ID NO: 49638 - RNA, 23 nt, Artificial Sequence
  Synthetic
  misc_feature (13)..(13): n is a, c, g, or u
uccuaaagcccangaugauggga

SEQ ID NO: 49639 - RNA, 24 nt, Artificial Sequence
  Synthetic
  misc_feature (14)..(14): n is a, c, g, or u
uuccuaaagcccangaugauggga

SEQ ID NO: 49640 - RNA, 18 nt, Artificial Sequence
  Synthetic
  misc_feature (15)..(15): n is a, c, g, or u
ggaaagaaucccagngga

SEQ ID NO: 49641 - RNA, 19 nt, Artificial Sequence
  Synthetic
  misc_feature (16)..(16): n is a, c, g, or u
uggaaagaaucccagngga

SEQ ID NO: 49642 - RNA, 20 nt, Artificial Sequence
  Synthetic
  misc_feature (17)..(17): n is a, c, g, or u
cuggaaagaaucccagngga

SEQ ID NO: 49643 - RNA, 21 nt, Artificial Sequence
  Synthetic
  misc_feature (18)..(18): n is a, c, g, or u
ucuggaaagaaucccagngga

SEQ ID NO: 49644 - RNA, 22 nt, Artificial Sequence
  Synthetic
  misc_feature (19)..(19): n is a, c, g, or u
gucuggaaagaaucccagngga

SEQ ID NO: 49645 - RNA, 23 nt, Artificial Sequence
  Synthetic
  misc_feature (20)..(20): n is a, c, g, or u
ggucuggaaagaaucccagngga

SEQ ID NO: 49646 - RNA, 24 nt, Artificial Sequence
  Synthetic
  misc_feature (21)..(21): n is a, c, g, or u
uggucuggaaagaaucccagngga

SEQ ID NO: 49647 - RNA, 18 nt, Artificial Sequence
  Synthetic
  misc_feature (13)..(13): n is a, c, g, or u
  misc_feature (16)..(16): n is a, c, g, or u
uuuggaacagcancanga

SEQ ID NO: 49648 - RNA, 19 nt, Artificial Sequence
  Synthetic
  misc_feature (14)..(14): n is a, c, g, or u
  misc_feature (17)..(17): n is a, c, g, or u
guuuggaacagcancanga

SEQ ID NO: 49649 - RNA, 20 nt, Artificial Sequence
  Synthetic
  misc_feature (15)..(15): n is a, c, g, or u
  misc_feature (18)..(18): n is a, c, g, or u
gguuuggaacagcancanga

SEQ ID NO: 49650 - RNA, 21 nt, Artificial Sequence
  Synthetic
  misc_feature (16)..(16): n is a, c, g, or u
  misc_feature (19)..(19): n is a, c, g, or u
ggguuuggaacagcancanga

SEQ ID NO: 49651 - RNA, 22 nt, Artificial Sequence
  Synthetic
  misc_feature (17)..(17): n is a, c, g, or u
  misc_feature (20)..(20): n is a, c, g, or u
aggguuuggaacagcancanga

SEQ ID NO: 49652 - RNA, 23 nt, Artificial Sequence
  Synthetic
  misc_feature (18)..(18): n is a, c, g, or u
  misc_feature (21)..(21): n is a, c, g, or u
gaggguuuggaacagcancanga

SEQ ID NO: 49653 - RNA, 24 nt, Artificial Sequence
  Synthetic
  misc_feature (19)..(19): n is a, c, g, or u
  misc_feature (22)..(22): n is a, c, g, or u
cgaggguuuggaacagcancanga

SEQ ID NO: 49654 - RNA, 18 nt, Artificial Sequence
  Synthetic
  misc_feature (16)..(16): n is a, c, g, or u
ccggaaguguggauanga

SEQ ID NO: 49655 - RNA, 19 nt, Artificial Sequence
  Synthetic
  misc_feature (17)..(17): n is a, c, g, or u
uccggaaguguggauanga

SEQ ID NO: 49656 - RNA, 20 nt, Artificial Sequence
  Synthetic
  misc_feature (18)..(18): n is a, c, g, or u
uuccggaaguguggauanga

SEQ ID NO: 49657 - RNA, 21 nt, Artificial Sequence
  Synthetic
  misc_feature (19)..(19): n is a, c, g, or u
uuuccggaaguguggauanga

SEQ ID NO: 49658 - RNA, 22 nt, Artificial Sequence
  Synthetic
  misc_feature (20)..(20): n is a, c, g, or u
guuuccggaaguguggauanga

SEQ ID NO: 49659 - RNA, 23 nt, Artificial Sequence
  Synthetic
  misc_feature (21)..(21): n is a, c, g, or u
aguuuccggaaguguggauanga

SEQ ID NO: 49660 - RNA, 24 nt, Artificial Sequence
  Synthetic
  misc_feature (22)..(22): n is a, c, g, or u
uaguuuccggaaguguggauanga

SEQ ID NO: 49661 - RNA, 18 nt, Artificial Sequence
  Synthetic
  misc_feature (16)..(16): n is a, c, g, or u
gaguaggucccgaacnga

SEQ ID NO: 49662 - RNA, 19 nt, Artificial Sequence
  Synthetic
  misc_feature (17)..(17): n is a, c, g, or u
cgaguaggucccgaacnga

SEQ ID NO: 49663 - RNA, 20 nt, Artificial Sequence
  Synthetic
  misc_feature (18)..(18): n is a, c, g, or u
ucgaguaggucccgaacnga

SEQ ID NO: 49664 - RNA, 21 nt, Artificial Sequence
  Synthetic
  misc_feature (19)..(19): n is a, c, g, or u
gucgaguaggucccgaacnga

SEQ ID NO: 49665 - RNA, 22 nt, Artificial Sequence
  Synthetic
  misc_feature (20)..(20): n is a, c, g, or u
ugucgaguaggucccgaacnga

SEQ ID NO: 49666 - RNA, 23 nt, Artificial Sequence
  Synthetic
  misc_feature (21)..(21): n is a, c, g, or u
gugucgaguaggucccgaacnga

SEQ ID NO: 49667 - RNA, 24 nt, Artificial Sequence
  Synthetic
  misc_feature (22)..(22): n is a, c, g, or u
ggugucgaguaggucccgaacnga

SEQ ID NO: 49668 - RNA, 18 nt, Artificial Sequence
  Synthetic
caggagguugguaaguga

SEQ ID NO: 49669 - RNA, 19 nt, Artificial Sequence
  Synthetic
acaggagguugguaaguga

SEQ ID NO: 49670 - RNA, 20 nt, Artificial Sequence
  Synthetic
gacaggagguugguaaguga

SEQ ID NO: 49671 - RNA, 21 nt, Artificial Sequence
  Synthetic
ggacaggagguugguaaguga

SEQ ID NO: 49672 - RNA, 22 nt, Artificial Sequence
  Synthetic
aggacaggagguugguaaguga

SEQ ID NO: 49673 - RNA, 23 nt, Artificial Sequence
  Synthetic
gaggacaggagguugguaaguga

SEQ ID NO: 49674 - RNA, 24 nt, Artificial Sequence
  Synthetic
ggaggacaggagguugguaaguga

SEQ ID NO: 49675 - RNA, 18 nt, Artificial Sequence
  Synthetic
agaagauugaugauguga

SEQ ID NO: 49676 - RNA, 19 nt, Artificial Sequence
  Synthetic
  misc_feature (1)..(1): n is a, c, g, or u
nagaagauugaugauguga

SEQ ID NO: 49677 - RNA, 20 nt, Artificial Sequence
  Synthetic
  misc_feature (2)..(2): n is a, c, g, or u
cnagaagauugaugauguga

SEQ ID NO: 49678 - RNA, 21 nt, Artificial Sequence
  Synthetic
  misc_feature (3)..(3): n is a, c, g, or u
ucnagaagauugaugauguga

SEQ ID NO: 49679 - RNA, 22 nt, Artificial Sequence
  Synthetic
  misc_feature (4)..(4): n is a, c, g, or u
uucnagaagauugaugauguga

SEQ ID NO: 49680 - RNA, 23 nt, Artificial Sequence
  Synthetic
  misc_feature (5)..(5): n is a, c, g, or u
cuucnagaagauugaugauguga

SEQ ID NO: 49681 - RNA, 24 nt, Artificial Sequence
  Synthetic
  misc_feature (6)..(6): n is a, c, g, or u
ucuucnagaagauugaugauguga

SEQ ID NO: 49682 - RNA, 18 nt, Artificial Sequence
  Synthetic
  misc_feature (1)..(1): n is a, c, g, or u
nucccccuagaaaauuga

SEQ ID NO: 49683 - RNA, 19 nt, Artificial Sequence
  Synthetic
  misc_feature (1)..(2): n is a, c, g, or u
nnucccccuagaaaauuga

SEQ ID NO: 49684 - RNA, 20 nt, Artificial Sequence
  Synthetic
  misc_feature (2)..(3): n is a, c, g, or u
unnucccccuagaaaauuga

SEQ ID NO: 49685 - RNA, 21 nt, Artificial Sequence
  Synthetic
  misc_feature (3)..(4): n is a, c, g, or u
gunnucccccuagaaaauuga

SEQ ID NO: 49686 - RNA, 22 nt, Artificial Sequence
  Synthetic
  misc_feature (4)..(5): n is a, c, g, or u
ggunnucccccuagaaaauuga

SEQ ID NO: 49687 - RNA, 23 nt, Artificial Sequence
  Synthetic
  misc_feature (5)..(6): n is a, c, g, or u
gggunnucccccuagaaaauuga

SEQ ID NO: 49688 - RNA, 24 nt, Artificial Sequence
  Synthetic
  misc_feature (6)..(7): n is a, c, g, or u
cgggunnucccccuagaaaauuga

SEQ ID NO: 49689 - RNA, 18 nt, Artificial Sequence
  Synthetic
  misc_feature (9)..(10): n is a, c, g, or u
gccccuucnngucguuga

SEQ ID NO: 49690 - RNA, 19 nt, Artificial Sequence
  Synthetic
  misc_feature (10)..(11): n is a, c, g, or u
ugccccuucnngucguuga

SEQ ID NO: 49691 - RNA, 20 nt, Artificial Sequence
  Synthetic
  misc_feature (11)..(12): n is a, c, g, or u
augccccuucnngucguuga

SEQ ID NO: 49692 - RNA, 21 nt, Artificial Sequence
  Synthetic
  misc_feature (12)..(13): n is a, c, g, or u
caugccccuucnngucguuga

SEQ ID NO: 49693 - RNA, 22 nt, Artificial Sequence
  Synthetic
  misc_feature (13)..(14): n is a, c, g, or u
ccaugccccuucnngucguuga

SEQ ID NO: 49694 - RNA, 23 nt, Artificial Sequence
  Synthetic
  misc_feature (14)..(15): n is a, c, g, or u
cccaugccccuucnngucguuga

SEQ ID NO: 49695 - RNA, 24 nt, Artificial Sequence
  Synthetic
  misc_feature (15)..(16): n is a, c, g, or u
ucccaugccccuucnngucguuga

SEQ ID NO: 49696 - RNA, 18 nt, Artificial Sequence
  Synthetic
  misc_feature (17)..(17): n is a, c, g, or u
gagggaguucuucuucna

SEQ ID NO: 49697 - RNA, 19 nt, Artificial Sequence
  Synthetic
  misc_feature (18)..(18): n is a, c, g, or u
cgagggaguucuucuucna

SEQ ID NO: 49698 - RNA, 20 nt, Artificial Sequence
  Synthetic
  misc_feature (19)..(19): n is a, c, g, or u
gcgagggaguucuucuucna

SEQ ID NO: 49699 - RNA, 21 nt, Artificial Sequence
  Synthetic
  misc_feature (20)..(20): n is a, c, g, or u
ggcgagggaguucuucuucna

SEQ ID NO: 49700 - RNA, 22 nt, Artificial Sequence
  Synthetic
  misc_feature (21)..(21): n is a, c, g, or u
aggcgagggaguucuucuucna

SEQ ID NO: 49701 - RNA, 23 nt, Artificial Sequence
  Synthetic
  misc_feature (22)..(22): n is a, c, g, or u
gaggcgagggaguucuucuucna

SEQ ID NO: 49702 - RNA, 24 nt, Artificial Sequence
  Synthetic
  misc_feature (23)..(23): n is a, c, g, or u
cgaggcgagggaguucuucuucna

SEQ ID NO: 49703 - RNA, 18 nt, Artificial Sequence
  Synthetic
  misc_feature (8)..(8): n is a, c, g, or u
  misc_feature (17)..(17): n is a, c, g, or u
aucccagnggauugggna

SEQ ID NO: 49704 - RNA, 19 nt, Artificial Sequence
  Synthetic
  misc_feature (9)..(9): n is a, c, g, or u
  misc_feature (18)..(18): n is a, c, g, or u
aaucccagnggauugggna

SEQ ID NO: 49705 - RNA, 20 nt, Artificial Sequence
  Synthetic
  misc_feature (10)..(10): n is a, c, g, or u
  misc_feature (19)..(19): n is a, c, g, or u
gaaucccagnggauugggna

SEQ ID NO: 49706 - RNA, 21 nt, Artificial Sequence
  Synthetic
  misc_feature (11)..(11): n is a, c, g, or u
  misc_feature (20)..(20): n is a, c, g, or u
agaaucccagnggauugggna

SEQ ID NO: 49707 - RNA, 22 nt, Artificial Sequence
  Synthetic
  misc_feature (12)..(12): n is a, c, g, or u
  misc_feature (21)..(21): n is a, c, g, or u
aagaaucccagnggauugggna

SEQ ID NO: 49708 - RNA, 23 nt, Artificial Sequence
  Synthetic
  misc_feature (13)..(13): n is a, c, g, or u
  misc_feature (22)..(22): n is a, c, g, or u
aaagaaucccagnggauugggna

SEQ ID NO: 49709 - RNA, 24 nt, Artificial Sequence
  Synthetic
  misc_feature (14)..(14): n is a, c, g, or u
  misc_feature (23)..(23): n is a, c, g, or u
gaaagaaucccagnggauugggna

SEQ ID NO: 49710 - RNA, 18 nt, Artificial Sequence
  Synthetic
  misc_feature (2)..(2): n is a, c, g, or u
  misc_feature (17)..(17): n is a, c, g, or u
anccgagcagccauggna

SEQ ID NO: 49711 - RNA, 19 nt, Artificial Sequence
  Synthetic
  misc_feature (3)..(3): n is a, c, g, or u
  misc_feature (18)..(18): n is a, c, g, or u
canccgagcagccauggna

SEQ ID NO: 49712 - RNA, 20 nt, Artificial Sequence
  Synthetic
  misc_feature (4)..(4): n is a, c, g, or u
  misc_feature (19)..(19): n is a, c, g, or u
acanccgagcagccauggna

SEQ ID NO: 49713 - RNA, 21 nt, Artificial Sequence
  Synthetic
  misc_feature (5)..(5): n is a, c, g, or u
  misc_feature (20)..(20): n is a, c, g, or u
cacanccgagcagccauggna

SEQ ID NO: 49714 - RNA, 22 nt, Artificial Sequence
  Synthetic
  misc_feature (6)..(6): n is a, c, g, or u
  misc_feature (21)..(21): n is a, c, g, or u
gcacanccgagcagccauggna

SEQ ID NO: 49715 - RNA, 23 nt, Artificial Sequence
  Synthetic
  misc_feature (7)..(7): n is a, c, g, or u
  misc_feature (22)..(22): n is a, c, g, or u
agcacanccgagcagccauggna

SEQ ID NO: 49716 - RNA, 24 nt, Artificial Sequence
  Synthetic
  misc_feature (8)..(8): n is a, c, g, or u
  misc_feature (23)..(23): n is a, c, g, or u
cagcacanccgagcagccauggna

SEQ ID NO: 49717 - RNA, 18 nt, Artificial Sequence
  Synthetic
  misc_feature (14)..(14): n is a, c, g, or u
  misc_feature (17)..(17): n is a, c, g, or u
ucaauucauuuuunguna

SEQ ID NO: 49718 - RNA, 19 nt, Artificial Sequence
  Synthetic
  misc_feature (15)..(15): n is a, c, g, or u
  misc_feature (18)..(18): n is a, c, g, or u
cucaauucauuuuunguna

SEQ ID NO: 49719 - RNA, 20 nt, Artificial Sequence
  Synthetic
  misc_feature (16)..(16): n is a, c, g, or u
  misc_feature (19)..(19): n is a, c, g, or u
ucucaauucauuuuunguna

SEQ ID NO: 49720 - RNA, 21 nt, Artificial Sequence
  Synthetic
  misc_feature (17)..(17): n is a, c, g, or u
  misc_feature (20)..(20): n is a, c, g, or u
uucucaauucauuuuunguna

SEQ ID NO: 49721 - RNA, 22 nt, Artificial Sequence
  Synthetic
  misc_feature (18)..(18): n is a, c, g, or u
  misc_feature (21)..(21): n is a, c, g, or u
cuucucaauucauuuuunguna

SEQ ID NO: 49722 - RNA, 23 nt, Artificial Sequence
  Synthetic
  misc_feature (1)..(1): n is a, c, g, or u
  misc_feature (19)..(19): n is a, c, g, or u
  misc_feature (22)..(22): n is a, c, g, or u
ncuucucaauucauuuuunguna

SEQ ID NO: 49723 - RNA, 24 nt, Artificial Sequence
  Synthetic
  misc_feature (2)..(2): n is a, c, g, or u
  misc_feature (20)..(20): n is a, c, g, or u
  misc_feature (23)..(23): n is a, c, g, or u
ancuucucaauucauuuuunguna

SEQ ID NO: 49724 - RNA, 18 nt, Artificial Sequence
  Synthetic
gccaccagcaggaaaaua

SEQ ID NO: 49725 - RNA, 19 nt, Artificial Sequence
  Synthetic
agccaccagcaggaaaaua

SEQ ID NO: 49726 - RNA, 20 nt, Artificial Sequence
  Synthetic
gagccaccagcaggaaaaua

SEQ ID NO: 49727 - RNA, 21 nt, Artificial Sequence
  Synthetic
ggagccaccagcaggaaaaua

SEQ ID NO: 49728 - RNA, 22 nt, Artificial Sequence
  Synthetic
uggagccaccagcaggaaaaua

SEQ ID NO: 49729 - RNA, 23 nt, Artificial Sequence
  Synthetic
cuggagccaccagcaggaaaaua

SEQ ID NO: 49730 - RNA, 24 nt, Artificial Sequence
  Synthetic
acuggagccaccagcaggaaaaua

SEQ ID NO: 49731 - RNA, 18 nt, Artificial Sequence
  Synthetic
  misc_feature (1)..(1): n is a, c, g, or u
  misc_feature (7)..(7): n is a, c, g, or u
  misc_feature (15)..(15): n is a, c, g, or u
ngcagunauacaggnaua

SEQ ID NO: 49732 - RNA, 19 nt, Artificial Sequence
  Synthetic
  misc_feature (2)..(2): n is a, c, g, or u
  misc_feature (8)..(8): n is a, c, g, or u
  misc_feature (16)..(16): n is a, c, g, or u
ungcagunauacaggnaua

SEQ ID NO: 49733 - RNA, 20 nt, Artificial Sequence
  Synthetic
  misc_feature (3)..(3): n is a, c, g, or u
  misc_feature (9)..(9): n is a, c, g, or u
  misc_feature (17)..(17): n is a, c, g, or u
uungcagunauacaggnaua

SEQ ID NO: 49734 - RNA, 21 nt, Artificial Sequence
  Synthetic
  misc_feature (4)..(4): n is a, c, g, or u
  misc_feature (10)..(10): n is a, c, g, or u
  misc_feature (18)..(18): n is a, c, g, or u
uuungcagunauacaggnaua

SEQ ID NO: 49735 - RNA, 22 nt, Artificial Sequence
  Synthetic
  misc_feature (5)..(5): n is a, c, g, or u
  misc_feature (11)..(11): n is a, c, g, or u
  misc_feature (19)..(19): n is a, c, g, or u
guuungcagunauacaggnaua

SEQ ID NO: 49736 - RNA, 23 nt, Artificial Sequence
  Synthetic
  misc_feature (6)..(6): n is a, c, g, or u
  misc_feature (12)..(12): n is a, c, g, or u
  misc_feature (20)..(20): n is a, c, g, or u
uguuungcagunauacaggnaua

SEQ ID NO: 49737 - RNA, 24 nt, Artificial Sequence
  Synthetic
  misc_feature (7)..(7): n is a, c, g, or u
  misc_feature (13)..(13): n is a, c, g, or u
  misc_feature (21)..(21): n is a, c, g, or u
cuguuungcagunauacaggnaua

SEQ ID NO: 49738 - RNA, 18 nt, Artificial Sequence
  Synthetic
auugguaacagcgguaua

SEQ ID NO: 49739 - RNA, 19 nt, Artificial Sequence
  Synthetic
aauugguaacagcgguaua

SEQ ID NO: 49740 - RNA, 20 nt, Artificial Sequence
  Synthetic
aaauugguaacagcgguaua

SEQ ID NO: 49741 - RNA, 21 nt, Artificial Sequence
  Synthetic
aaaauugguaacagcgguaua

SEQ ID NO: 49742 - RNA, 22 nt, Artificial Sequence
  Synthetic
gaaaauugguaacagcgguaua

SEQ ID NO: 49743 - RNA, 23 nt, Artificial Sequence
  Synthetic
agaaaauugguaacagcgguaua

SEQ ID NO: 49744 - RNA, 24 nt, Artificial Sequence
  Synthetic
cagaaaauugguaacagcgguaua

SEQ ID NO: 49745 - RNA, 18 nt, Artificial Sequence
  Synthetic
aaggagguguacuuccua

SEQ ID NO: 49746 - RNA, 19 nt, Artificial Sequence
  Synthetic
  misc_feature (1)..(1): n is a, c, g, or u
naaggagguguacuuccua

SEQ ID NO: 49747 - RNA, 20 nt, Artificial Sequence
  Synthetic
  misc_feature (2)..(2): n is a, c, g, or u
gnaaggagguguacuuccua

SEQ ID NO: 49748 - RNA, 21 nt, Artificial Sequence
  Synthetic
  misc_feature (3)..(3): n is a, c, g, or u
ggnaaggagguguacuuccua

SEQ ID NO: 49749 - RNA, 22 nt, Artificial Sequence
  Synthetic
  misc_feature (4)..(4): n is a, c, g, or u
uggnaaggagguguacuuccua

SEQ ID NO: 49750 - RNA, 23 nt, Artificial Sequence
  Synthetic
  misc_feature (5)..(5): n is a, c, g, or u
auggnaaggagguguacuuccua

SEQ ID NO: 49751 - RNA, 24 nt, Artificial Sequence
  Synthetic
  misc_feature (6)..(6): n is a, c, g, or u
cauggnaaggagguguacuuccua

SEQ ID NO: 49752 - RNA, 18 nt, Artificial Sequence
  Synthetic
  misc_feature (11)..(11): n is a, c, g, or u
agacggggagnccgcgua

SEQ ID NO: 49753 - RNA, 19 nt, Artificial Sequence
  Synthetic
  misc_feature (12)..(12): n is a, c, g, or u
cagacggggagnccgcgua

SEQ ID NO: 49754 - RNA, 20 nt, Artificial Sequence
  Synthetic
  misc_feature (13)..(13): n is a, c, g, or u
acagacggggagnccgcgua

SEQ ID NO: 49755 - RNA, 21 nt, Artificial Sequence
  Synthetic
  misc_feature (14)..(14): n is a, c, g, or u
aacagacggggagnccgcgua

SEQ ID NO: 49756 - RNA, 22 nt, Artificial Sequence
  Synthetic
  misc_feature (15)..(15): n is a, c, g, or u
gaacagacggggagnccgcgua

SEQ ID NO: 49757 - RNA, 23 nt, Artificial Sequence
  Synthetic
  misc_feature (16)..(16): n is a, c, g, or u
ggaacagacggggagnccgcgua

SEQ ID NO: 49758 - RNA, 24 nt, Artificial Sequence
  Synthetic
  misc_feature (17)..(17): n is a, c, g, or u
aggaacagacggggagnccgcgua

SEQ ID NO: 49759 - RNA, 18 nt, Artificial Sequence
  Synthetic
  misc_feature (1)..(1): n is a, c, g, or u
  misc_feature (15)..(15): n is a, c, g, or u
nucuaaagcaucccngua

SEQ ID NO: 49760 - RNA, 19 nt, Artificial Sequence
  Synthetic
  misc_feature (2)..(2): n is a, c, g, or u
  misc_feature (16)..(16): n is a, c, g, or u
anucuaaagcaucccngua

SEQ ID NO: 49761 - RNA, 20 nt, Artificial Sequence
  Synthetic
  misc_feature (3)..(3): n is a, c, g, or u
  misc_feature (17)..(17): n is a, c, g, or u
ganucuaaagcaucccngua

SEQ ID NO: 49762 - RNA, 21 nt, Artificial Sequence
  Synthetic
  misc_feature (4)..(4): n is a, c, g, or u
  misc_feature (18)..(18): n is a, c, g, or u
uganucuaaagcaucccngua

SEQ ID NO: 49763 - RNA, 22 nt, Artificial Sequence
  Synthetic
  misc_feature (5)..(5): n is a, c, g, or u
  misc_feature (19)..(19): n is a, c, g, or u
guganucuaaagcaucccngua

SEQ ID NO: 49764 - RNA, 23 nt, Artificial Sequence
  Synthetic
  misc_feature (6)..(6): n is a, c, g, or u
  misc_feature (20)..(20): n is a, c, g, or u
gguganucuaaagcaucccngua

SEQ ID NO: 49765 - RNA, 24 nt, Artificial Sequence
  Synthetic
  misc_feature (1)..(1): n is a, c, g, or u
  misc_feature (7)..(7): n is a, c, g, or u
  misc_feature (21)..(21): n is a, c, g, or u
ngguganucuaaagcaucccngua

SEQ ID NO: 49766 - RNA, 18 nt, Artificial Sequence
  Synthetic
  misc_feature (5)..(5): n is a, c, g, or u
  misc_feature (16)..(16): n is a, c, g, or u
ucgungauccuggaanua

SEQ ID NO: 49767 - RNA, 19 nt, Artificial Sequence
  Synthetic
  misc_feature (6)..(6): n is a, c, g, or u
  misc_feature (17)..(17): n is a, c, g, or u
gucgungauccuggaanua

SEQ ID NO: 49768 - RNA, 20 nt, Artificial Sequence
  Synthetic
  misc_feature (7)..(7): n is a, c, g, or u
  misc_feature (18)..(18): n is a, c, g, or u
ggucgungauccuggaanua

SEQ ID NO: 49769 - RNA, 21 nt, Artificial Sequence
  Synthetic
  misc_feature (8)..(8): n is a, c, g, or u
  misc_feature (19)..(19): n is a, c, g, or u
uggucgungauccuggaanua

SEQ ID NO: 49770 - RNA, 22 nt, Artificial Sequence
  Synthetic
  misc_feature (9)..(9): n is a, c, g, or u
  misc_feature (20)..(20): n is a, c, g, or u
guggucgungauccuggaanua

SEQ ID NO: 49771 - RNA, 23 nt, Artificial Sequence
  Synthetic
  misc_feature (10)..(10): n is a, c, g, or u
  misc_feature (21)..(21): n is a, c, g, or u
gguggucgungauccuggaanua

SEQ ID NO: 49772 - RNA, 24 nt, Artificial Sequence
  Synthetic
  misc_feature (11)..(11): n is a, c, g, or u
  misc_feature (22)..(22): n is a, c, g, or u
ugguggucgungauccuggaanua

SEQ ID NO: 49773 - RNA, 18 nt, Artificial Sequence
  Synthetic
  misc_feature (2)..(2): n is a, c, g, or u
  misc_feature (8)..(8): n is a, c, g, or u
  misc_feature (11)..(11): n is a, c, g, or u
anucaaunggncgauuua

SEQ ID NO: 49774 - RNA, 19 nt, Artificial Sequence
  Synthetic
  misc_feature (3)..(3): n is a, c, g, or u
  misc_feature (9)..(9): n is a, c, g, or u
  misc_feature (12)..(12): n is a, c, g, or u
canucaaunggncgauuua

SEQ ID NO: 49775 - RNA, 20 nt, Artificial Sequence
  Synthetic
  misc_feature (4)..(4): n is a, c, g, or u
  misc_feature (10)..(10): n is a, c, g, or u
  misc_feature (13)..(13): n is a, c, g, or u
ccanucaaunggncgauuua

SEQ ID NO: 49776 - RNA, 21 nt, Artificial Sequence
  Synthetic
  misc_feature (5)..(5): n is a, c, g, or u
  misc_feature (11)..(11): n is a, c, g, or u
  misc_feature (14)..(14): n is a, c, g, or u
uccanucaaunggncgauuua

SEQ ID NO: 49777 - RNA, 22 nt, Artificial Sequence
  Synthetic
  misc_feature (6)..(6): n is a, c, g, or u
  misc_feature (12)..(12): n is a, c, g, or u
  misc_feature (15)..(15): n is a, c, g, or u
uuccanucaaunggncgauuua

SEQ ID NO: 49778 - RNA, 23 nt, Artificial Sequence
  Synthetic
  misc_feature (7)..(7): n is a, c, g, or u
  misc_feature (13)..(13): n is a, c, g, or u
  misc_feature (16)..(16): n is a, c, g, or u
uuuccanucaaunggncgauuua

SEQ ID NO: 49779 - RNA, 24 nt, Artificial Sequence
  Synthetic
  misc_feature (8)..(8): n is a, c, g, or u
  misc_feature (14)..(14): n is a, c, g, or u
  misc_feature (17)..(17): n is a, c, g, or u
cuuuccanucaaunggncgauuua

SEQ ID NO: 49780 - RNA, 18 nt, Artificial Sequence
  Synthetic
uaguccagaagaaccaac

SEQ ID NO: 49781 - RNA, 19 nt, Artificial Sequence
  Synthetic
auaguccagaagaaccaac

SEQ ID NO: 49782 - RNA, 20 nt, Artificial Sequence
  Synthetic
gauaguccagaagaaccaac

SEQ ID NO: 49783 - RNA, 21 nt, Artificial Sequence
  Synthetic
ugauaguccagaagaaccaac

SEQ ID NO: 49784 - RNA, 22 nt, Artificial Sequence
  Synthetic
uugauaguccagaagaaccaac

SEQ ID NO: 49785 - RNA, 23 nt, Artificial Sequence
  Synthetic
cuugauaguccagaagaaccaac

SEQ ID NO: 49786 - RNA, 24 nt, Artificial Sequence
  Synthetic
ccuugauaguccagaagaaccaac

SEQ ID NO: 49787 - RNA, 18 nt, Artificial Sequence
  Synthetic
gugaggauuuuugucaac

SEQ ID NO: 49788 - RNA, 19 nt, Artificial Sequence
  Synthetic
ugugaggauuuuugucaac

SEQ ID NO: 49789 - RNA, 20 nt, Artificial Sequence
  Synthetic
uugugaggauuuuugucaac

SEQ ID NO: 49790 - RNA, 21 nt, Artificial Sequence
  Synthetic
auugugaggauuuuugucaac

SEQ ID NO: 49791 - RNA, 22 nt, Artificial Sequence
  Synthetic
uauugugaggauuuuugucaac

SEQ ID NO: 49792 - RNA, 23 nt, Artificial Sequence
  Synthetic
guauugugaggauuuuugucaac

SEQ ID NO: 49793 - RNA, 24 nt, Artificial Sequence
  Synthetic
gguauugugaggauuuuugucaac

SEQ ID NO: 49794 - RNA, 18 nt, Artificial Sequence
  Synthetic
  misc_feature (12)..(12): n is a, c, g, or u
gguucugugucncugaac

SEQ ID NO: 49795 - RNA, 19 nt, Artificial Sequence
  Synthetic
  misc_feature (13)..(13): n is a, c, g, or u
ggguucugugucncugaac

SEQ ID NO: 49796 - RNA, 20 nt, Artificial Sequence
  Synthetic
  misc_feature (14)..(14): n is a, c, g, or u
aggguucugugucncugaac

SEQ ID NO: 49797 - RNA, 21 nt, Artificial Sequence
  Synthetic
  misc_feature (15)..(15): n is a, c, g, or u
caggguucugugucncugaac

SEQ ID NO: 49798 - RNA, 22 nt, Artificial Sequence
  Synthetic
  misc_feature (16)..(16): n is a, c, g, or u
gcaggguucugugucncugaac

SEQ ID NO: 49799 - RNA, 23 nt, Artificial Sequence
  Synthetic
  misc_feature (17)..(17): n is a, c, g, or u
agcaggguucugugucncugaac

SEQ ID NO: 49800 - RNA, 24 nt, Artificial Sequence
  Synthetic
  misc_feature (18)..(18): n is a, c, g, or u
gagcaggguucugugucncugaac

SEQ ID NO: 49801 - RNA, 18 nt, Artificial Sequence
  Synthetic
aaacacaccgccuguaac

SEQ ID NO: 49802 - RNA, 19 nt, Artificial Sequence
  Synthetic
gaaacacaccgccuguaac

SEQ ID NO: 49803 - RNA, 20 nt, Artificial Sequence
  Synthetic
agaaacacaccgccuguaac

SEQ ID NO: 49804 - RNA, 21 nt, Artificial Sequence
  Synthetic
aagaaacacaccgccuguaac

SEQ ID NO: 49805 - RNA, 22 nt, Artificial Sequence
  Synthetic
caagaaacacaccgccuguaac

SEQ ID NO: 49806 - RNA, 23 nt, Artificial Sequence
  Synthetic
acaagaaacacaccgccuguaac

SEQ ID NO: 49807 - RNA, 24 nt, Artificial Sequence
  Synthetic
aacaagaaacacaccgccuguaac

SEQ ID NO: 49808 - RNA, 18 nt, Artificial Sequence
  Synthetic
agaugagaaggaacagac

SEQ ID NO: 49809 - RNA, 19 nt, Artificial Sequence
  Synthetic
cagaugagaaggaacagac

SEQ ID NO: 49810 - RNA, 20 nt, Artificial Sequence
  Synthetic
gcagaugagaaggaacagac

SEQ ID NO: 49811 - RNA, 21 nt, Artificial Sequence
  Synthetic
ggcagaugagaaggaacagac

SEQ ID NO: 49812 - RNA, 22 nt, Artificial Sequence
  Synthetic
cggcagaugagaaggaacagac

SEQ ID NO: 49813 - RNA, 23 nt, Artificial Sequence
  Synthetic
ccggcagaugagaaggaacagac

SEQ ID NO: 49814 - RNA, 24 nt, Artificial Sequence
  Synthetic
  misc_feature (1)..(1): n is a, c, g, or u
nccggcagaugagaaggaacagac

SEQ ID NO: 49815 - RNA, 18 nt, Artificial Sequence
  Synthetic
caggacaaguuggaggac

SEQ ID NO: 49816 - RNA, 19 nt, Artificial Sequence
  Synthetic
ccaggacaaguuggaggac

SEQ ID NO: 49817 - RNA, 20 nt, Artificial Sequence
  Synthetic
gccaggacaaguuggaggac

SEQ ID NO: 49818 - RNA, 21 nt, Artificial Sequence
  Synthetic
agccaggacaaguuggaggac

SEQ ID NO: 49819 - RNA, 22 nt, Artificial Sequence
  Synthetic
uagccaggacaaguuggaggac

SEQ ID NO: 49820 - RNA, 23 nt, Artificial Sequence
  Synthetic
auagccaggacaaguuggaggac

SEQ ID NO: 49821 - RNA, 24 nt, Artificial Sequence
  Synthetic
gauagccaggacaaguuggaggac

SEQ ID NO: 49822 - RNA, 18 nt, Artificial Sequence
  Synthetic
  misc_feature (14)..(14): n is a, c, g, or u
aggcuugaacagunggac

SEQ ID NO: 49823 - RNA, 19 nt, Artificial Sequence
  Synthetic
  misc_feature (15)..(15): n is a, c, g, or u
gaggcuugaacagunggac

SEQ ID NO: 49824 - RNA, 20 nt, Artificial Sequence
  Synthetic
  misc_feature (16)..(16): n is a, c, g, or u
ggaggcuugaacagunggac

SEQ ID NO: 49825 - RNA, 21 nt, Artificial Sequence
  Synthetic
  misc_feature (17)..(17): n is a, c, g, or u
uggaggcuugaacagunggac

SEQ ID NO: 49826 - RNA, 22 nt, Artificial Sequence
  Synthetic
  misc_feature (18)..(18): n is a, c, g, or u
uuggaggcuugaacagunggac

SEQ ID NO: 49827 - RNA, 23 nt, Artificial Sequence
  Synthetic
  misc_feature (19)..(19): n is a, c, g, or u
cuuggaggcuugaacagunggac

SEQ ID NO: 49828 - RNA, 24 nt, Artificial Sequence
  Synthetic
  misc_feature (20)..(20): n is a, c, g, or u
gcuuggaggcuugaacagunggac

SEQ ID NO: 49829 - RNA, 18 nt, Artificial Sequence
  Synthetic
  misc_feature (15)..(15): n is a, c, g, or u
aguaggucccgaacngac

SEQ ID NO: 49830 - RNA, 19 nt, Artificial Sequence
  Synthetic
  misc_feature (16)..(16): n is a, c, g, or u
gaguaggucccgaacngac

SEQ ID NO: 49831 - RNA, 20 nt, Artificial Sequence
  Synthetic
  misc_feature (17)..(17): n is a, c, g, or u
cgaguaggucccgaacngac

SEQ ID NO: 49832 - RNA, 21 nt, Artificial Sequence
  Synthetic
  misc_feature (18)..(18): n is a, c, g, or u
ucgaguaggucccgaacngac

SEQ ID NO: 49833 - RNA, 22 nt, Artificial Sequence
  Synthetic
  misc_feature (19)..(19): n is a, c, g, or u
gucgaguaggucccgaacngac

SEQ ID NO: 49834 - RNA, 23 nt, Artificial Sequence
  Synthetic
  misc_feature (20)..(20): n is a, c, g, or u
ugucgaguaggucccgaacngac

SEQ ID NO: 49835 - RNA, 24 nt, Artificial Sequence
  Synthetic
  misc_feature (21)..(21): n is a, c, g, or u
gugucgaguaggucccgaacngac

SEQ ID NO: 49836 - RNA, 18 nt, Artificial Sequence
  Synthetic
  misc_feature (1)..(1): n is a, c, g, or u
  misc_feature (7)..(7): n is a, c, g, or u
  misc_feature (10)..(10): n is a, c, g, or u
nucaaunggncgauuuac

SEQ ID NO: 49837 - RNA, 19 nt, Artificial Sequence
  Synthetic
  misc_feature (2)..(2): n is a, c, g, or u
  misc_feature (8)..(8): n is a, c, g, or u
  misc_feature (11)..(11): n is a, c, g, or u
anucaaunggncgauuuac

SEQ ID NO: 49838 - RNA, 20 nt, Artificial Sequence
  Synthetic
  misc_feature (3)..(3): n is a, c, g, or u
  misc_feature (9)..(9): n is a, c, g, or u
  misc_feature (12)..(12): n is a, c, g, or u
canucaaunggncgauuuac

SEQ ID NO: 49839 - RNA, 21 nt, Artificial Sequence
  Synthetic
  misc_feature (4)..(4): n is a, c, g, or u
  misc_feature (10)..(10): n is a, c, g, or u
  misc_feature (13)..(13): n is a, c, g, or u
ccanucaaunggncgauuuac

SEQ ID NO: 49840 - RNA, 22 nt, Artificial Sequence
  Synthetic
  misc_feature (5)..(5): n is a, c, g, or u
  misc_feature (11)..(11): n is a, c, g, or u
  misc_feature (14)..(14): n is a, c, g, or u
uccanucaaunggncgauuuac

SEQ ID NO: 49841 - RNA, 23 nt, Artificial Sequence
  Synthetic
  misc_feature (6)..(6): n is a, c, g, or u
  misc_feature (12)..(12): n is a, c, g, or u
  misc_feature (15)..(15): n is a, c, g, or u
uuccanucaaunggncgauuuac

SEQ ID NO: 49842 - RNA, 24 nt, Artificial Sequence
  Synthetic
  misc_feature (7)..(7): n is a, c, g, or u
  misc_feature (13)..(13): n is a, c, g, or u
  misc_feature (16)..(16): n is a, c, g, or u
uuuccanucaaunggncgauuuac

SEQ ID NO: 49843 - RNA, 18 nt, Artificial Sequence
  Synthetic
cgugugggggugugaacc

SEQ ID NO: 49844 - RNA, 19 nt, Artificial Sequence
  Synthetic
ccgugugggggugugaacc

SEQ ID NO: 49845 - RNA, 20 nt, Artificial Sequence
  Synthetic
accgugugggggugugaacc

SEQ ID NO: 49846 - RNA, 21 nt, Artificial Sequence
  Synthetic
caccgugugggggugugaacc

SEQ ID NO: 49847 - RNA, 22 nt, Artificial Sequence
  Synthetic
ccaccgugugggggugugaacc

SEQ ID NO: 49848 - RNA, 23 nt, Artificial Sequence
  Synthetic
gccaccgugugggggugugaacc

SEQ ID NO: 49849 - RNA, 24 nt, Artificial Sequence
  Synthetic
ggccaccgugugggggugugaacc

SEQ ID NO: 49850 - RNA, 18 nt, Artificial Sequence
  Synthetic
  misc_feature (6)..(6): n is a, c, g, or u
uccaanuuauugcccacc

SEQ ID NO: 49851 - RNA, 19 nt, Artificial Sequence
  Synthetic
  misc_feature (1)..(1): n is a, c, g, or u
  misc_feature (7)..(7): n is a, c, g, or u
nuccaanuuauugcccacc

SEQ ID NO: 49852 - RNA, 20 nt, Artificial Sequence
  Synthetic
  misc_feature (2)..(2): n is a, c, g, or u
  misc_feature (8)..(8): n is a, c, g, or u
cnuccaanuuauugcccacc

SEQ ID NO: 49853 - RNA, 21 nt, Artificial Sequence
  Synthetic
  misc_feature (3)..(3): n is a, c, g, or u
  misc_feature (9)..(9): n is a, c, g, or u
ucnuccaanuuauugcccacc

SEQ ID NO: 49854 - RNA, 22 nt, Artificial Sequence
  Synthetic
  misc_feature (1)..(1): n is a, c, g, or u
  misc_feature (4)..(4): n is a, c, g, or u
  misc_feature (10)..(10): n is a, c, g, or u
nucnuccaanuuauugcccacc

SEQ ID NO: 49855 - RNA, 23 nt, Artificial Sequence
  Synthetic
  misc_feature (2)..(2): n is a, c, g, or u
  misc_feature (5)..(5): n is a, c, g, or u
  misc_feature (11)..(11): n is a, c, g, or u
gnucnuccaanuuauugcccacc

SEQ ID NO: 49856 - RNA, 24 nt, Artificial Sequence
  Synthetic
  misc_feature (3)..(3): n is a, c, g, or u
  misc_feature (6)..(6): n is a, c, g, or u
  misc_feature (12)..(12): n is a, c, g, or u
ggnucnuccaanuuauugcccacc

SEQ ID NO: 49857 - RNA, 18 nt, Artificial Sequence
  Synthetic
  misc_feature (3)..(3): n is a, c, g, or u
  misc_feature (9)..(9): n is a, c, g, or u
cunccaaunacauaaccc

SEQ ID NO: 49858 - RNA, 19 nt, Artificial Sequence
  Synthetic
  misc_feature (4)..(4): n is a, c, g, or u
  misc_feature (10)..(10): n is a, c, g, or u
acunccaaunacauaaccc

SEQ ID NO: 49859 - RNA, 20 nt, Artificial Sequence
  Synthetic
  misc_feature (5)..(5): n is a, c, g, or u
  misc_feature (11)..(11): n is a, c, g, or u
aacunccaaunacauaaccc

SEQ ID NO: 49860 - RNA, 21 nt, Artificial Sequence
  Synthetic
  misc_feature (6)..(6): n is a, c, g, or u
  misc_feature (12)..(12): n is a, c, g, or u
caacunccaaunacauaaccc

SEQ ID NO: 49861 - RNA, 22 nt, Artificial Sequence
  Synthetic
  misc_feature (7)..(7): n is a, c, g, or u
  misc_feature (13)..(13): n is a, c, g, or u
ccaacunccaaunacauaaccc

SEQ ID NO: 49862 - RNA, 23 nt, Artificial Sequence
  Synthetic
  misc_feature (8)..(8): n is a, c, g, or u
  misc_feature (14)..(14): n is a, c, g, or u
cccaacunccaaunacauaaccc

SEQ ID NO: 49863 - RNA, 24 nt, Artificial Sequence
  Synthetic
  misc_feature (9)..(9): n is a, c, g, or u
  misc_feature (15)..(15): n is a, c, g, or u
ccccaacunccaaunacauaaccc

SEQ ID NO: 49864 - RNA, 18 nt, Artificial Sequence
  Synthetic
  misc_feature (5)..(5): n is a, c, g, or u
ccaanuuauugcccaccc

SEQ ID NO: 49865 - RNA, 19 nt, Artificial Sequence
  Synthetic
  misc_feature (6)..(6): n is a, c, g, or u
uccaanuuauugcccaccc

SEQ ID NO: 49866 - RNA, 20 nt, Artificial Sequence
  Synthetic
  misc_feature (1)..(1): n is a, c, g, or u
  misc_feature (7)..(7): n is a, c, g, or u
nuccaanuuauugcccaccc

SEQ ID NO: 49867 - RNA, 21 nt, Artificial Sequence
  Synthetic
  misc_feature (2)..(2): n is a, c, g, or u
  misc_feature (8)..(8): n is a, c, g, or u
cnuccaanuuauugcccaccc

SEQ ID NO: 49868 - RNA, 22 nt, Artificial Sequence
  Synthetic
  misc_feature (3)..(3): n is a, c, g, or u
  misc_feature (9)..(9): n is a, c, g, or u
ucnuccaanuuauugcccaccc

SEQ ID NO: 49869 - RNA, 23 nt, Artificial Sequence
  Synthetic
  misc_feature (1)..(1): n is a, c, g, or u
  misc_feature (4)..(4): n is a, c, g, or u
  misc_feature (10)..(10): n is a, c, g, or u
nucnuccaanuuauugcccaccc

SEQ ID NO: 49870 - RNA, 24 nt, Artificial Sequence
  Synthetic
  misc_feature (2)..(2): n is a, c, g, or u
  misc_feature (5)..(5): n is a, c, g, or u
  misc_feature (11)..(11): n is a, c, g, or u
gnucnuccaanuuauugcccaccc

SEQ ID NO: 49871 - RNA, 18 nt, Artificial Sequence
  Synthetic
  misc_feature (11)..(12): n is a, c, g, or u
acacccgggunnuccccc

SEQ ID NO: 49872 - RNA, 19 nt, Artificial Sequence
  Synthetic
  misc_feature (12)..(13): n is a, c, g, or u
gacacccgggunnuccccc

SEQ ID NO: 49873 - RNA, 20 nt, Artificial Sequence
  Synthetic
  misc_feature (13)..(14): n is a, c, g, or u
ggacacccgggunnuccccc

SEQ ID NO: 49874 - RNA, 21 nt, Artificial Sequence
  Synthetic
  misc_feature (14)..(15): n is a, c, g, or u
aggacacccgggunnuccccc

SEQ ID NO: 49875 - RNA, 22 nt, Artificial Sequence
  Synthetic
  misc_feature (15)..(16): n is a, c, g, or u
caggacacccgggunnuccccc

SEQ ID NO: 49876 - RNA, 23 nt, Artificial Sequence
  Synthetic
  misc_feature (16)..(17): n is a, c, g, or u
ccaggacacccgggunnuccccc

SEQ ID NO: 49877 - RNA, 24 nt, Artificial Sequence
  Synthetic
  misc_feature (17)..(18): n is a, c, g, or u
gccaggacacccgggunnuccccc

SEQ ID NO: 49878 - RNA, 18 nt, Artificial Sequence
  Synthetic
  misc_feature (2)..(2): n is a, c, g, or u
  misc_feature (14)..(14): n is a, c, g, or u
anagccccaagcgncccc

SEQ ID NO: 49879 - RNA, 19 nt, Artificial Sequence
  Synthetic
  misc_feature (3)..(3): n is a, c, g, or u
  misc_feature (15)..(15): n is a, c, g, or u
uanagccccaagcgncccc

SEQ ID NO: 49880 - RNA, 20 nt, Artificial Sequence
  Synthetic
  misc_feature (1)..(1): n is a, c, g, or u
  misc_feature (4)..(4): n is a, c, g, or u
  misc_feature (16)..(16): n is a, c, g, or u
nuanagccccaagcgncccc

SEQ ID NO: 49881 - RNA, 21 nt, Artificial Sequence
  Synthetic
  misc_feature (2)..(2): n is a, c, g, or u
  misc_feature (5)..(5): n is a, c, g, or u
  misc_feature (17)..(17): n is a, c, g, or u
gnuanagccccaagcgncccc

SEQ ID NO: 49882 - RNA, 22 nt, Artificial Sequence
  Synthetic
  misc_feature (3)..(3): n is a, c, g, or u
  misc_feature (6)..(6): n is a, c, g, or u
  misc_feature (18)..(18): n is a, c, g, or u
cgnuanagccccaagcgncccc

SEQ ID NO: 49883 - RNA, 23 nt, Artificial Sequence
  Synthetic
  misc_feature (4)..(4): n is a, c, g, or u
  misc_feature (7)..(7): n is a, c, g, or u
  misc_feature (19)..(19): n is a, c, g, or u
gcgnuanagccccaagcgncccc

SEQ ID NO: 49884 - RNA, 24 nt, Artificial Sequence
  Synthetic
  misc_feature (5)..(5): n is a, c, g, or u
  misc_feature (8)..(8): n is a, c, g, or u
  misc_feature (20)..(20): n is a, c, g, or u
ggcgnuanagccccaagcgncccc

SEQ ID NO: 49885 - RNA, 18 nt, Artificial Sequence
  Synthetic
gcacuaguaaacugagcc

SEQ ID NO: 49886 - RNA, 19 nt, Artificial Sequence
  Synthetic
ugcacuaguaaacugagcc

SEQ ID NO: 49887 - RNA, 20 nt, Artificial Sequence
  Synthetic
uugcacuaguaaacugagcc

SEQ ID NO: 49888 - RNA, 21 nt, Artificial Sequence
  Synthetic
auugcacuaguaaacugagcc

SEQ ID NO: 49889 - RNA, 22 nt, Artificial Sequence
  Synthetic
aauugcacuaguaaacugagcc

SEQ ID NO: 49890 - RNA, 23 nt, Artificial Sequence
  Synthetic
aaauugcacuaguaaacugagcc

SEQ ID NO: 49891 - RNA, 24 nt, Artificial Sequence
  Synthetic
caaauugcacuaguaaacugagcc

SEQ ID NO: 49892 - RNA, 18 nt, Artificial Sequence
  Synthetic
  misc_feature (13)..(13): n is a, c, g, or u
gcugguggucgungaucc

SEQ ID NO: 49893 - RNA, 19 nt, Artificial Sequence
  Synthetic
  misc_feature (14)..(14): n is a, c, g, or u
ugcugguggucgungaucc

SEQ ID NO: 49894 - RNA, 20 nt, Artificial Sequence
  Synthetic
  misc_feature (15)..(15): n is a, c, g, or u
gugcugguggucgungaucc

SEQ ID NO: 49895 - RNA, 21 nt, Artificial Sequence
  Synthetic
  misc_feature (16)..(16): n is a, c, g, or u
cgugcugguggucgungaucc

SEQ ID NO: 49896 - RNA, 22 nt, Artificial Sequence
  Synthetic
  misc_feature (17)..(17): n is a, c, g, or u
ccgugcugguggucgungaucc

SEQ ID NO: 49897 - RNA, 23 nt, Artificial Sequence
  Synthetic
  misc_feature (18)..(18): n is a, c, g, or u
cccgugcugguggucgungaucc

SEQ ID NO: 49898 - RNA, 24 nt, Artificial Sequence
  Synthetic
  misc_feature (19)..(19): n is a, c, g, or u
ucccgugcugguggucgungaucc

SEQ ID NO: 49899 - RNA, 18 nt, Artificial Sequence
  Synthetic
uucccaccuuaugagucc

SEQ ID NO: 49900 - RNA, 19 nt, Artificial Sequence
  Synthetic
uuucccaccuuaugagucc

SEQ ID NO: 49901 - RNA, 20 nt, Artificial Sequence
  Synthetic
  misc_feature (1)..(1): n is a, c, g, or u
nuuucccaccuuaugagucc

SEQ ID NO: 49902 - RNA, 21 nt, Artificial Sequence
  Synthetic
  misc_feature (2)..(2): n is a, c, g, or u
anuuucccaccuuaugagucc

SEQ ID NO: 49903 - RNA, 22 nt, Artificial Sequence
  Synthetic
  misc_feature (3)..(3): n is a, c, g, or u
aanuuucccaccuuaugagucc

SEQ ID NO: 49904 - RNA, 23 nt, Artificial Sequence
  Synthetic
  misc_feature (4)..(4): n is a, c, g, or u
aaanuuucccaccuuaugagucc

SEQ ID NO: 49905 - RNA, 24 nt, Artificial Sequence
  Synthetic
  misc_feature (5)..(5): n is a, c, g, or u
uaaanuuucccaccuuaugagucc

SEQ ID NO: 49906 - RNA, 18 nt, Artificial Sequence
  Synthetic
uaacacgagcaggggucc

SEQ ID NO: 49907 - RNA, 19 nt, Artificial Sequence
  Synthetic
guaacacgagcaggggucc

SEQ ID NO: 49908 - RNA, 20 nt, Artificial Sequence
  Synthetic
uguaacacgagcaggggucc

SEQ ID NO: 49909 - RNA, 21 nt, Artificial Sequence
  Synthetic
cuguaacacgagcaggggucc

SEQ ID NO: 49910 - RNA, 22 nt, Artificial Sequence
  Synthetic
ccuguaacacgagcaggggucc

SEQ ID NO: 49911 - RNA, 23 nt, Artificial Sequence
  Synthetic
gccuguaacacgagcaggggucc

SEQ ID NO: 49912 - RNA, 24 nt, Artificial Sequence
  Synthetic
cgccuguaacacgagcaggggucc

SEQ ID NO: 49913 - RNA, 18 nt, Artificial Sequence
  Synthetic
  misc_feature (2)..(2): n is a, c, g, or u
gnaaggagguguacuucc

SEQ ID NO: 49914 - RNA, 19 nt, Artificial Sequence
  Synthetic
  misc_feature (3)..(3): n is a, c, g, or u
ggnaaggagguguacuucc

SEQ ID NO: 49915 - RNA, 20 nt, Artificial Sequence
  Synthetic
  misc_feature (4)..(4): n is a, c, g, or u
uggnaaggagguguacuucc

SEQ ID NO: 49916 - RNA, 21 nt, Artificial Sequence
  Synthetic
  misc_feature (5)..(5): n is a, c, g, or u
auggnaaggagguguacuucc

SEQ ID NO: 49917 - RNA, 22 nt, Artificial Sequence
  Synthetic
  misc_feature (6)..(6): n is a, c, g, or u
cauggnaaggagguguacuucc

SEQ ID NO: 49918 - RNA, 23 nt, Artificial Sequence
  Synthetic
  misc_feature (7)..(7): n is a, c, g, or u
ccauggnaaggagguguacuucc

SEQ ID NO: 49919 - RNA, 24 nt, Artificial Sequence
  Synthetic
  misc_feature (8)..(8): n is a, c, g, or u
gccauggnaaggagguguacuucc

SEQ ID NO: 49920 - RNA, 18 nt, Artificial Sequence
  Synthetic
gggaaacauagagguucc

SEQ ID NO: 49921 - RNA, 19 nt, Artificial Sequence
  Synthetic
agggaaacauagagguucc

SEQ ID NO: 49922 - RNA, 20 nt, Artificial Sequence
  Synthetic
gagggaaacauagagguucc

SEQ ID NO: 49923 - RNA, 21 nt, Artificial Sequence
  Synthetic
  misc_feature (1)..(1): n is a, c, g, or u
ngagggaaacauagagguucc

SEQ ID NO: 49924 - RNA, 22 nt, Artificial Sequence
  Synthetic
  misc_feature (2)..(2): n is a, c, g, or u
angagggaaacauagagguucc

SEQ ID NO: 49925 - RNA, 23 nt, Artificial Sequence
  Synthetic
  misc_feature (3)..(3): n is a, c, g, or u
cangagggaaacauagagguucc

SEQ ID NO: 49926 - RNA, 24 nt, Artificial Sequence
  Synthetic
  misc_feature (1)..(1): n is a, c, g, or u
  misc_feature (4)..(4): n is a, c, g, or u
ncangagggaaacauagagguucc

SEQ ID NO: 49927 - RNA, 18 nt, Artificial Sequence
  Synthetic
auacuaacauugggaagc

SEQ ID NO: 49928 - RNA, 19 nt, Artificial Sequence
  Synthetic
aauacuaacauugggaagc

SEQ ID NO: 49929 - RNA, 20 nt, Artificial Sequence
  Synthetic
gaauacuaacauugggaagc

SEQ ID NO: 49930 - RNA, 21 nt, Artificial Sequence
  Synthetic
ggaauacuaacauugggaagc

SEQ ID NO: 49931 - RNA, 22 nt, Artificial Sequence
  Synthetic
aggaauacuaacauugggaagc

SEQ ID NO: 49932 - RNA, 23 nt, Artificial Sequence
  Synthetic
aaggaauacuaacauugggaagc

SEQ ID NO: 49933 - RNA, 24 nt, Artificial Sequence
  Synthetic
caaggaauacuaacauugggaagc

SEQ ID NO: 49934 - RNA, 18 nt, Artificial Sequence
  Synthetic
ccgccgauugguggaagc

SEQ ID NO: 49935 - RNA, 19 nt, Artificial Sequence
  Synthetic
accgccgauugguggaagc

SEQ ID NO: 49936 - RNA, 20 nt, Artificial Sequence
  Synthetic
gaccgccgauugguggaagc

SEQ ID NO: 49937 - RNA, 21 nt, Artificial Sequence
  Synthetic
ggaccgccgauugguggaagc

SEQ ID NO: 49938 - RNA, 22 nt, Artificial Sequence
  Synthetic
cggaccgccgauugguggaagc

SEQ ID NO: 49939 - RNA, 23 nt, Artificial Sequence
  Synthetic
ccggaccgccgauugguggaagc

SEQ ID NO: 49940 - RNA, 24 nt, Artificial Sequence
  Synthetic
cccggaccgccgauugguggaagc

SEQ ID NO: 49941 - RNA, 18 nt, Artificial Sequence
  Synthetic
auuugguggucuauaagc

SEQ ID NO: 49942 - RNA, 19 nt, Artificial Sequence
  Synthetic
cauuugguggucuauaagc

SEQ ID NO: 49943 - RNA, 20 nt, Artificial Sequence
  Synthetic
gcauuugguggucuauaagc

SEQ ID NO: 49944 - RNA, 21 nt, Artificial Sequence
  Synthetic
ggcauuugguggucuauaagc

SEQ ID NO: 49945 - RNA, 22 nt, Artificial Sequence
  Synthetic
gggcauuugguggucuauaagc

SEQ ID NO: 49946 - RNA, 23 nt, Artificial Sequence
  Synthetic
ggggcauuugguggucuauaagc

SEQ ID NO: 49947 - RNA, 24 nt, Artificial Sequence
  Synthetic
aggggcauuugguggucuauaagc

SEQ ID NO: 49948 - RNA, 18 nt, Artificial Sequence
  Synthetic
agccacccaaggcacagc

SEQ ID NO: 49949 - RNA, 19 nt, Artificial Sequence
  Synthetic
aagccacccaaggcacagc

SEQ ID NO: 49950 - RNA, 20 nt, Artificial Sequence
  Synthetic
aaagccacccaaggcacagc

SEQ ID NO: 49951 - RNA, 21 nt, Artificial Sequence
  Synthetic
caaagccacccaaggcacagc

SEQ ID NO: 49952 - RNA, 22 nt, Artificial Sequence
  Synthetic
ccaaagccacccaaggcacagc

SEQ ID NO: 49953 - RNA, 23 nt, Artificial Sequence
  Synthetic
cccaaagccacccaaggcacagc

SEQ ID NO: 49954 - RNA, 24 nt, Artificial Sequence
  Synthetic
ccccaaagccacccaaggcacagc

SEQ ID NO: 49955 - RNA, 18 nt, Artificial Sequence
  Synthetic
ugaacuggagccaccagc

SEQ ID NO: 49956 - RNA, 19 nt, Artificial Sequence
  Synthetic
cugaacuggagccaccagc

SEQ ID NO: 49957 - RNA, 20 nt, Artificial Sequence
  Synthetic
  misc_feature (1)..(1): n is a, c, g, or u
ncugaacuggagccaccagc

SEQ ID NO: 49958 - RNA, 21 nt, Artificial Sequence
  Synthetic
  misc_feature (2)..(2): n is a, c, g, or u
cncugaacuggagccaccagc

SEQ ID NO: 49959 - RNA, 22 nt, Artificial Sequence
  Synthetic
  misc_feature (3)..(3): n is a, c, g, or u
ucncugaacuggagccaccagc

SEQ ID NO: 49960 - RNA, 23 nt, Artificial Sequence
  Synthetic
  misc_feature (4)..(4): n is a, c, g, or u
gucncugaacuggagccaccagc

SEQ ID NO: 49961 - RNA, 24 nt, Artificial Sequence
  Synthetic
  misc_feature (5)..(5): n is a, c, g, or u
ugucncugaacuggagccaccagc

SEQ ID NO: 49962 - RNA, 18 nt, Artificial Sequence
  Synthetic
ugcacuaguaaacugagc

SEQ ID NO: 49963 - RNA, 19 nt, Artificial Sequence
  Synthetic
uugcacuaguaaacugagc

SEQ ID NO: 49964 - RNA, 20 nt, Artificial Sequence
  Synthetic
auugcacuaguaaacugagc

SEQ ID NO: 49965 - RNA, 21 nt, Artificial Sequence
  Synthetic
aauugcacuaguaaacugagc

SEQ ID NO: 49966 - RNA, 22 nt, Artificial Sequence
  Synthetic
aaauugcacuaguaaacugagc

SEQ ID NO: 49967 - RNA, 23 nt, Artificial Sequence
  Synthetic
caaauugcacuaguaaacugagc

SEQ ID NO: 49968 - RNA, 24 nt, Artificial Sequence
  Synthetic
acaaauugcacuaguaaacugagc

SEQ ID NO: 49969 - RNA, 18 nt, Artificial Sequence
  Synthetic
  misc_feature (11)..(11): n is a, c, g, or u
gacacauccancgauagc

SEQ ID NO: 49970 - RNA, 19 nt, Artificial Sequence
  Synthetic
  misc_feature (12)..(12): n is a, c, g, or u
agacacauccancgauagc

SEQ ID NO: 49971 - RNA, 20 nt, Artificial Sequence
  Synthetic
  misc_feature (13)..(13): n is a, c, g, or u
cagacacauccancgauagc

SEQ ID NO: 49972 - RNA, 21 nt, Artificial Sequence
  Synthetic
  misc_feature (14)..(14): n is a, c, g, or u
gcagacacauccancgauagc

SEQ ID NO: 49973 - RNA, 22 nt, Artificial Sequence
  Synthetic
  misc_feature (15)..(15): n is a, c, g, or u
cgcagacacauccancgauagc

SEQ ID NO: 49974 - RNA, 23 nt, Artificial Sequence
  Synthetic
  misc_feature (16)..(16): n is a, c, g, or u
ccgcagacacauccancgauagc

SEQ ID NO: 49975 - RNA, 24 nt, Artificial Sequence
  Synthetic
  misc_feature (17)..(17): n is a, c, g, or u
gccgcagacacauccancgauagc

SEQ ID NO: 49976 - RNA, 18 nt, Artificial Sequence
  Synthetic
cucuuccaaaaguaaggc

SEQ ID NO: 49977 - RNA, 19 nt, Artificial Sequence
  Synthetic
ucucuuccaaaaguaaggc

SEQ ID NO: 49978 - RNA, 20 nt, Artificial Sequence
  Synthetic
uucucuuccaaaaguaaggc

SEQ ID NO: 49979 - RNA, 21 nt, Artificial Sequence
  Synthetic
uuucucuuccaaaaguaaggc

SEQ ID NO: 49980 - RNA, 22 nt, Artificial Sequence
  Synthetic
guuucucuuccaaaaguaaggc

SEQ ID NO: 49981 - RNA, 23 nt, Artificial Sequence
  Synthetic
uguuucucuuccaaaaguaaggc

SEQ ID NO: 49982 - RNA, 24 nt, Artificial Sequence
  Synthetic
cuguuucucuuccaaaaguaaggc

SEQ ID NO: 49983 - RNA, 18 nt, Artificial Sequence
  Synthetic
  misc_feature (8)..(8): n is a, c, g, or u
auacaggnauacagaggc

SEQ ID NO: 49984 - RNA, 19 nt, Artificial Sequence
  Synthetic
  misc_feature (1)..(1): n is a, c, g, or u
  misc_feature (9)..(9): n is a, c, g, or u
nauacaggnauacagaggc

SEQ ID NO: 49985 - RNA, 20 nt, Artificial Sequence
  Synthetic
  misc_feature (2)..(2): n is a, c, g, or u
  misc_feature (10)..(10): n is a, c, g, or u
unauacaggnauacagaggc

SEQ ID NO: 49986 - RNA, 21 nt, Artificial Sequence
  Synthetic
  misc_feature (3)..(3): n is a, c, g, or u
  misc_feature (11)..(11): n is a, c, g, or u
gunauacaggnauacagaggc

SEQ ID NO: 49987 - RNA, 22 nt, Artificial Sequence
  Synthetic
  misc_feature (4)..(4): n is a, c, g, or u
  misc_feature (12)..(12): n is a, c, g, or u
agunauacaggnauacagaggc

SEQ ID NO: 49988 - RNA, 23 nt, Artificial Sequence
  Synthetic
  misc_feature (5)..(5): n is a, c, g, or u
  misc_feature (13)..(13): n is a, c, g, or u
cagunauacaggnauacagaggc

SEQ ID NO: 49989 - RNA, 24 nt, Artificial Sequence
  Synthetic
  misc_feature (6)..(6): n is a, c, g, or u
  misc_feature (14)..(14): n is a, c, g, or u
gcagunauacaggnauacagaggc

SEQ ID NO: 49990 - RNA, 18 nt, Artificial Sequence
  Synthetic
  misc_feature (3)..(3): n is a, c, g, or u
gancuucgucugcgaggc

SEQ ID NO: 49991 - RNA, 19 nt, Artificial Sequence
  Synthetic
  misc_feature (4)..(4): n is a, c, g, or u
agancuucgucugcgaggc

SEQ ID NO: 49992 - RNA, 20 nt, Artificial Sequence
  Synthetic
  misc_feature (5)..(5): n is a, c, g, or u
gagancuucgucugcgaggc

SEQ ID NO: 49993 - RNA, 21 nt, Artificial Sequence
  Synthetic
  misc_feature (6)..(6): n is a, c, g, or u
ugagancuucgucugcgaggc

SEQ ID NO: 49994 - RNA, 22 nt, Artificial Sequence
  Synthetic
  misc_feature (7)..(7): n is a, c, g, or u
uugagancuucgucugcgaggc

SEQ ID NO: 49995 - RNA, 23 nt, Artificial Sequence
  Synthetic
  misc_feature (8)..(8): n is a, c, g, or u
auugagancuucgucugcgaggc

SEQ ID NO: 49996 - RNA, 24 nt, Artificial Sequence
  Synthetic
  misc_feature (9)..(9): n is a, c, g, or u
gauugagancuucgucugcgaggc

SEQ ID NO: 49997 - RNA, 18 nt, Artificial Sequence
  Synthetic
aaggcacagcuuggaggc

SEQ ID NO: 49998 - RNA, 19 nt, Artificial Sequence
  Synthetic
caaggcacagcuuggaggc

SEQ ID NO: 49999 - RNA, 20 nt, Artificial Sequence
  Synthetic
ccaaggcacagcuuggaggc

SEQ ID NO: 50000 - RNA, 21 nt, Artificial Sequence
  Synthetic
cccaaggcacagcuuggaggc

SEQ ID NO: 50001 - RNA, 22 nt, Artificial Sequence
  Synthetic
acccaaggcacagcuuggaggc

SEQ ID NO: 50002 - RNA, 23 nt, Artificial Sequence
  Synthetic
cacccaaggcacagcuuggaggc

SEQ ID NO: 50003 - RNA, 24 nt, Artificial Sequence
  Synthetic
ccacccaaggcacagcuuggaggc

SEQ ID NO: 50004 - RNA, 18 nt, Artificial Sequence
  Synthetic
  misc_feature (12)..(12): n is a, c, g, or u
gugcgacccgungucggc

SEQ ID NO: 50005 - RNA, 19 nt, Artificial Sequence
  Synthetic
  misc_feature (13)..(13): n is a, c, g, or u
ggugcgacccgungucggc

SEQ ID NO: 50006 - RNA, 20 nt, Artificial Sequence
  Synthetic
  misc_feature (14)..(14): n is a, c, g, or u
aggugcgacccgungucggc

SEQ ID NO: 50007 - RNA, 21 nt, Artificial Sequence
  Synthetic
  misc_feature (15)..(15): n is a, c, g, or u
gaggugcgacccgungucggc

SEQ ID NO: 50008 - RNA, 22 nt, Artificial Sequence
  Synthetic
  misc_feature (16)..(16): n is a, c, g, or u
agaggugcgacccgungucggc

SEQ ID NO: 50009 - RNA, 23 nt, Artificial Sequence
  Synthetic
  misc_feature (17)..(17): n is a, c, g, or u
gagaggugcgacccgungucggc

SEQ ID NO: 50010 - RNA, 24 nt, Artificial Sequence
  Synthetic
  misc_feature (18)..(18): n is a, c, g, or u
agagaggugcgacccgungucggc

SEQ ID NO: 50011 - RNA, 18 nt, Artificial Sequence
  Synthetic
gggacugcgaauuuuggc

SEQ ID NO: 50012 - RNA, 19 nt, Artificial Sequence
  Synthetic
ggggacugcgaauuuuggc

SEQ ID NO: 50013 - RNA, 20 nt, Artificial Sequence
  Synthetic
uggggacugcgaauuuuggc

SEQ ID NO: 50014 - RNA, 21 nt, Artificial Sequence
  Synthetic
uuggggacugcgaauuuuggc

SEQ ID NO: 50015 - RNA, 22 nt, Artificial Sequence
  Synthetic
guuggggacugcgaauuuuggc

SEQ ID NO: 50016 - RNA, 23 nt, Artificial Sequence
  Synthetic
gguuggggacugcgaauuuuggc

SEQ ID NO: 50017 - RNA, 24 nt, Artificial Sequence
  Synthetic
agguuggggacugcgaauuuuggc

SEQ ID NO: 50018 - RNA, 18 nt, Artificial Sequence
  Synthetic
gcgagcgaaacaagcugc

SEQ ID NO: 50019 - RNA, 19 nt, Artificial Sequence
  Synthetic
ugcgagcgaaacaagcugc

SEQ ID NO: 50020 - RNA, 20 nt, Artificial Sequence
  Synthetic
cugcgagcgaaacaagcugc

SEQ ID NO: 50021 - RNA, 21 nt, Artificial Sequence
  Synthetic
gcugcgagcgaaacaagcugc

SEQ ID NO: 50022 - RNA, 22 nt, Artificial Sequence
  Synthetic
ggcugcgagcgaaacaagcugc

SEQ ID NO: 50023 - RNA, 23 nt, Artificial Sequence
  Synthetic
cggcugcgagcgaaacaagcugc

SEQ ID NO: 50024 - RNA, 24 nt, Artificial Sequence
  Synthetic
ccggcugcgagcgaaacaagcugc

SEQ ID NO: 50025 - RNA, 18 nt, Artificial Sequence
  Synthetic
  misc_feature (3)..(3): n is a, c, g, or u
  misc_feature (9)..(9): n is a, c, g, or u
cancacaanauagcuugc

SEQ ID NO: 50026 - RNA, 19 nt, Artificial Sequence
  Synthetic
  misc_feature (4)..(4): n is a, c, g, or u
  misc_feature (10)..(10): n is a, c, g, or u
ccancacaanauagcuugc

SEQ ID NO: 50027 - RNA, 20 nt, Artificial Sequence
  Synthetic
  misc_feature (5)..(5): n is a, c, g, or u
  misc_feature (11)..(11): n is a, c, g, or u
cccancacaanauagcuugc

SEQ ID NO: 50028 - RNA, 21 nt, Artificial Sequence
  Synthetic
  misc_feature (6)..(6): n is a, c, g, or u
  misc_feature (12)..(12): n is a, c, g, or u
ccccancacaanauagcuugc

SEQ ID NO: 50029 - RNA, 22 nt, Artificial Sequence
  Synthetic
  misc_feature (7)..(7): n is a, c, g, or u
  misc_feature (13)..(13): n is a, c, g, or u
accccancacaanauagcuugc

SEQ ID NO: 50030 - RNA, 23 nt, Artificial Sequence
  Synthetic
  misc_feature (8)..(8): n is a, c, g, or u
  misc_feature (14)..(14): n is a, c, g, or u
caccccancacaanauagcuugc

SEQ ID NO: 50031 - RNA, 24 nt, Artificial Sequence
  Synthetic
  misc_feature (9)..(9): n is a, c, g, or u
  misc_feature (15)..(15): n is a, c, g, or u
ucaccccancacaanauagcuugc

SEQ ID NO: 50032 - RNA, 18 nt, Artificial Sequence
  Synthetic
  misc_feature (17)..(17): n is a, c, g, or u
aggguuuggaacagcanc

SEQ ID NO: 50033 - RNA, 19 nt, Artificial Sequence
  Synthetic
  misc_feature (18)..(18): n is a, c, g, or u
gaggguuuggaacagcanc

SEQ ID NO: 50034 - RNA, 20 nt, Artificial Sequence
  Synthetic
  misc_feature (19)..(19): n is a, c, g, or u
cgaggguuuggaacagcanc

SEQ ID NO: 50035 - RNA, 21 nt, Artificial Sequence
  Synthetic
  misc_feature (20)..(20): n is a, c, g, or u
ccgaggguuuggaacagcanc

SEQ ID NO: 50036 - RNA, 22 nt, Artificial Sequence
  Synthetic
  misc_feature (21)..(21): n is a, c, g, or u
uccgaggguuuggaacagcanc

SEQ ID NO: 50037 - RNA, 23 nt, Artificial Sequence
  Synthetic
  misc_feature (22)..(22): n is a, c, g, or u
guccgaggguuuggaacagcanc

SEQ ID NO: 50038 - RNA, 24 nt, Artificial Sequence
  Synthetic
  misc_feature (23)..(23): n is a, c, g, or u
cguccgaggguuuggaacagcanc

SEQ ID NO: 50039 - RNA, 18 nt, Artificial Sequence
  Synthetic
  misc_feature (14)..(14): n is a, c, g, or u
  misc_feature (17)..(17): n is a, c, g, or u
agacuguuggcaancunc

SEQ ID NO: 50040 - RNA, 19 nt, Artificial Sequence
  Synthetic
  misc_feature (15)..(15): n is a, c, g, or u
  misc_feature (18)..(18): n is a, c, g, or u
aagacuguuggcaancunc

SEQ ID NO: 50041 - RNA, 20 nt, Artificial Sequence
  Synthetic
  misc_feature (16)..(16): n is a, c, g, or u
  misc_feature (19)..(19): n is a, c, g, or u
uaagacuguuggcaancunc

SEQ ID NO: 50042 - RNA, 21 nt, Artificial Sequence
  Synthetic
  misc_feature (17)..(17): n is a, c, g, or u
  misc_feature (20)..(20): n is a, c, g, or u
guaagacuguuggcaancunc

SEQ ID NO: 50043 - RNA, 22 nt, Artificial Sequence
  Synthetic
  misc_feature (18)..(18): n is a, c, g, or u
  misc_feature (21)..(21): n is a, c, g, or u
uguaagacuguuggcaancunc

SEQ ID NO: 50044 - RNA, 23 nt, Artificial Sequence
  Synthetic
  misc_feature (19)..(19): n is a, c, g, or u
  misc_feature (22)..(22): n is a, c, g, or u
auguaagacuguuggcaancunc

SEQ ID NO: 50045 - RNA, 24 nt, Artificial Sequence
  Synthetic
  misc_feature (20)..(20): n is a, c, g, or u
  misc_feature (23)..(23): n is a, c, g, or u
uauguaagacuguuggcaancunc

SEQ ID NO: 50046 - RNA, 18 nt, Artificial Sequence
  Synthetic
  misc_feature (14)..(14): n is a, c, g, or u
ugcugguggucgungauc

SEQ ID NO: 50047 - RNA, 19 nt, Artificial Sequence
  Synthetic
  misc_feature (15)..(15): n is a, c, g, or u
gugcugguggucgungauc

SEQ ID NO: 50048 - RNA, 20 nt, Artificial Sequence
  Synthetic
  misc_feature (16)..(16): n is a, c, g, or u
cgugcugguggucgungauc

SEQ ID NO: 50049 - RNA, 21 nt, Artificial Sequence
  Synthetic
  misc_feature (17)..(17): n is a, c, g, or u
ccgugcugguggucgungauc

SEQ ID NO: 50050 - RNA, 22 nt, Artificial Sequence
  Synthetic
  misc_feature (18)..(18): n is a, c, g, or u
cccgugcugguggucgungauc

SEQ ID NO: 50051 - RNA, 23 nt, Artificial Sequence
  Synthetic
  misc_feature (19)..(19): n is a, c, g, or u
ucccgugcugguggucgungauc

SEQ ID NO: 50052 - RNA, 24 nt, Artificial Sequence
  Synthetic
  misc_feature (20)..(20): n is a, c, g, or u
gucccgugcugguggucgungauc

SEQ ID NO: 50053 - RNA, 18 nt, Artificial Sequence
  Synthetic
  misc_feature (4)..(4): n is a, c, g, or u
aaangacaccaaauacuc

SEQ ID NO: 50054 - RNA, 19 nt, Artificial Sequence
  Synthetic
  misc_feature (5)..(5): n is a, c, g, or u
caaangacaccaaauacuc

SEQ ID NO: 50055 - RNA, 20 nt, Artificial Sequence
  Synthetic
  misc_feature (6)..(6): n is a, c, g, or u
ccaaangacaccaaauacuc

SEQ ID NO: 50056 - RNA, 21 nt, Artificial Sequence
  Synthetic
  misc_feature (7)..(7): n is a, c, g, or u
uccaaangacaccaaauacuc

SEQ ID NO: 50057 - RNA, 22 nt, Artificial Sequence
  Synthetic
  misc_feature (8)..(8): n is a, c, g, or u
cuccaaangacaccaaauacuc

SEQ ID NO: 50058 - RNA, 23 nt, Artificial Sequence
  Synthetic
  misc_feature (9)..(9): n is a, c, g, or u
acuccaaangacaccaaauacuc

SEQ ID NO: 50059 - RNA, 24 nt, Artificial Sequence
  Synthetic
  misc_feature (10)..(10): n is a, c, g, or u
cacuccaaangacaccaaauacuc

SEQ ID NO: 50060 - RNA, 18 nt, Artificial Sequence
  Synthetic
  misc_feature (12)..(12): n is a, c, g, or u
  misc_feature (15)..(15): n is a, c, g, or u
acugggguuggnuuncuc

SEQ ID NO: 50061 - RNA, 19 nt, Artificial Sequence
  Synthetic
  misc_feature (13)..(13): n is a, c, g, or u
  misc_feature (16)..(16): n is a, c, g, or u
gacugggguuggnuuncuc

SEQ ID NO: 50062 - RNA, 20 nt, Artificial Sequence
  Synthetic
  misc_feature (14)..(14): n is a, c, g, or u
  misc_feature (17)..(17): n is a, c, g, or u
agacugggguuggnuuncuc

SEQ ID NO: 50063 - RNA, 21 nt, Artificial Sequence
  Synthetic
  misc_feature (15)..(15): n is a, c, g, or u
  misc_feature (18)..(18): n is a, c, g, or u
gagacugggguuggnuuncuc

SEQ ID NO: 50064 - RNA, 22 nt, Artificial Sequence
  Synthetic
  misc_feature (16)..(16): n is a, c, g, or u
  misc_feature (19)..(19): n is a, c, g, or u
agagacugggguuggnuuncuc

SEQ ID NO: 50065 - RNA, 23 nt, Artificial Sequence
  Synthetic
  misc_feature (17)..(17): n is a, c, g, or u
  misc_feature (20)..(20): n is a, c, g, or u
gagagacugggguuggnuuncuc

SEQ ID NO: 50066 - RNA, 24 nt, Artificial Sequence
  Synthetic
  misc_feature (18)..(18): n is a, c, g, or u
  misc_feature (21)..(21): n is a, c, g, or u
ggagagacugggguuggnuuncuc

SEQ ID NO: 50067 - RNA, 18 nt, Artificial Sequence
  Synthetic
caacauaccuugauaguc

SEQ ID NO: 50068 - RNA, 19 nt, Artificial Sequence
  Synthetic
gcaacauaccuugauaguc

SEQ ID NO: 50069 - RNA, 20 nt, Artificial Sequence
  Synthetic
ggcaacauaccuugauaguc

SEQ ID NO: 50070 - RNA, 21 nt, Artificial Sequence
  Synthetic
gggcaacauaccuugauaguc

SEQ ID NO: 50071 - RNA, 22 nt, Artificial Sequence
  Synthetic
cgggcaacauaccuugauaguc

SEQ ID NO: 50072 - RNA, 23 nt, Artificial Sequence
  Synthetic
acgggcaacauaccuugauaguc

SEQ ID NO: 50073 - RNA, 24 nt, Artificial Sequence
  Synthetic
aacgggcaacauaccuugauaguc

SEQ ID NO: 50074 - RNA, 18 nt, Artificial Sequence
  Synthetic
agcggugucgaguagguc

SEQ ID NO: 50075 - RNA, 19 nt, Artificial Sequence
  Synthetic
aagcggugucgaguagguc

SEQ ID NO: 50076 - RNA, 20 nt, Artificial Sequence
  Synthetic
gaagcggugucgaguagguc

SEQ ID NO: 50077 - RNA, 21 nt, Artificial Sequence
  Synthetic
ugaagcggugucgaguagguc

SEQ ID NO: 50078 - RNA, 22 nt, Artificial Sequence
  Synthetic
cugaagcggugucgaguagguc

SEQ ID NO: 50079 - RNA, 23 nt, Artificial Sequence
  Synthetic
gcugaagcggugucgaguagguc

SEQ ID NO: 50080 - RNA, 24 nt, Artificial Sequence
  Synthetic
ggcugaagcggugucgaguagguc

SEQ ID NO: 50081 - RNA, 18 nt, Artificial Sequence
  Synthetic
  misc_feature (1)..(1): n is a, c, g, or u
nggauccagcugaugguc

SEQ ID NO: 50082 - RNA, 19 nt, Artificial Sequence
  Synthetic
  misc_feature (2)..(2): n is a, c, g, or u
gnggauccagcugaugguc

SEQ ID NO: 50083 - RNA, 20 nt, Artificial Sequence
  Synthetic
  misc_feature (3)..(3): n is a, c, g, or u
agnggauccagcugaugguc

SEQ ID NO: 50084 - RNA, 21 nt, Artificial Sequence
  Synthetic
  misc_feature (1)..(1): n is a, c, g, or u
  misc_feature (4)..(4): n is a, c, g, or u
nagnggauccagcugaugguc

SEQ ID NO: 50085 - RNA, 22 nt, Artificial Sequence
  Synthetic
  misc_feature (2)..(2): n is a, c, g, or u
  misc_feature (5)..(5): n is a, c, g, or u
anagnggauccagcugaugguc

SEQ ID NO: 50086 - RNA, 23 nt, Artificial Sequence
  Synthetic
  misc_feature (3)..(3): n is a, c, g, or u
  misc_feature (6)..(6): n is a, c, g, or u
aanagnggauccagcugaugguc

SEQ ID NO: 50087 - RNA, 24 nt, Artificial Sequence
  Synthetic
  misc_feature (4)..(4): n is a, c, g, or u
  misc_feature (7)..(7): n is a, c, g, or u
gaanagnggauccagcugaugguc

SEQ ID NO: 50088 - RNA, 18 nt, Artificial Sequence
  Synthetic
  misc_feature (8)..(8): n is a, c, g, or u
  misc_feature (16)..(16): n is a, c, g, or u
uccaggunauugaccnuc

SEQ ID NO: 50089 - RNA, 19 nt, Artificial Sequence
  Synthetic
  misc_feature (9)..(9): n is a, c, g, or u
  misc_feature (17)..(17): n is a, c, g, or u
auccaggunauugaccnuc

SEQ ID NO: 50090 - RNA, 20 nt, Artificial Sequence
  Synthetic
  misc_feature (10)..(10): n is a, c, g, or u
  misc_feature (18)..(18): n is a, c, g, or u
gauccaggunauugaccnuc

SEQ ID NO: 50091 - RNA, 21 nt, Artificial Sequence
  Synthetic
  misc_feature (11)..(11): n is a, c, g, or u
  misc_feature (19)..(19): n is a, c, g, or u
cgauccaggunauugaccnuc

SEQ ID NO: 50092 - RNA, 22 nt, Artificial Sequence
  Synthetic
  misc_feature (12)..(12): n is a, c, g, or u
  misc_feature (20)..(20): n is a, c, g, or u
ucgauccaggunauugaccnuc

SEQ ID NO: 50093 - RNA, 23 nt, Artificial Sequence
  Synthetic
  misc_feature (13)..(13): n is a, c, g, or u
  misc_feature (21)..(21): n is a, c, g, or u
uucgauccaggunauugaccnuc

SEQ ID NO: 50094 - RNA, 24 nt, Artificial Sequence
  Synthetic
  misc_feature (14)..(14): n is a, c, g, or u
  misc_feature (22)..(22): n is a, c, g, or u
cuucgauccaggunauugaccnuc

SEQ ID NO: 50095 - RNA, 18 nt, Artificial Sequence
  Synthetic
  misc_feature (7)..(7): n is a, c, g, or u
  misc_feature (16)..(16): n is a, c, g, or u
uugaugnaaaugaaunuc

SEQ ID NO: 50096 - RNA, 19 nt, Artificial Sequence
  Synthetic
  misc_feature (8)..(8): n is a, c, g, or u
  misc_feature (17)..(17): n is a, c, g, or u
cuugaugnaaaugaaunuc

SEQ ID NO: 50097 - RNA, 20 nt, Artificial Sequence
  Synthetic
  misc_feature (9)..(9): n is a, c, g, or u
  misc_feature (18)..(18): n is a, c, g, or u
ucuugaugnaaaugaaunuc

SEQ ID NO: 50098 - RNA, 21 nt, Artificial Sequence
  Synthetic
  misc_feature (1)..(1): n is a, c, g, or u
  misc_feature (10)..(10): n is a, c, g, or u
  misc_feature (19)..(19): n is a, c, g, or u
nucuugaugnaaaugaaunuc

SEQ ID NO: 50099 - RNA, 22 nt, Artificial Sequence
  Synthetic
  misc_feature (1)..(2): n is a, c, g, or u
  misc_feature (11)..(11): n is a, c, g, or u
  misc_feature (20)..(20): n is a, c, g, or u
nnucuugaugnaaaugaaunuc

SEQ ID NO: 50100 - RNA, 23 nt, Artificial Sequence
  Synthetic
  misc_feature (2)..(3): n is a, c, g, or u
  misc_feature (12)..(12): n is a, c, g, or u
  misc_feature (21)..(21): n is a, c, g, or u
annucuugaugnaaaugaaunuc

SEQ ID NO: 50101 - RNA, 24 nt, Artificial Sequence
  Synthetic
  misc_feature (3)..(4): n is a, c, g, or u
  misc_feature (13)..(13): n is a, c, g, or u
  misc_feature (22)..(22): n is a, c, g, or u
cannucuugaugnaaaugaaunuc

SEQ ID NO: 50102 - RNA, 18 nt, Artificial Sequence
  Synthetic
gcagggcccccagucuuc

SEQ ID NO: 50103 - RNA, 19 nt, Artificial Sequence
  Synthetic
agcagggcccccagucuuc

SEQ ID NO: 50104 - RNA, 20 nt, Artificial Sequence
  Synthetic
uagcagggcccccagucuuc

SEQ ID NO: 50105 - RNA, 21 nt, Artificial Sequence
  Synthetic
  misc_feature (1)..(1): n is a, c, g, or u
nuagcagggcccccagucuuc

SEQ ID NO: 50106 - RNA, 22 nt, Artificial Sequence
  Synthetic
  misc_feature (2)..(2): n is a, c, g, or u
cnuagcagggcccccagucuuc

SEQ ID NO: 50107 - RNA, 23 nt, Artificial Sequence
  Synthetic
  misc_feature (3)..(3): n is a, c, g, or u
ucnuagcagggcccccagucuuc

SEQ ID NO: 50108 - RNA, 24 nt, Artificial Sequence
  Synthetic
  misc_feature (4)..(4): n is a, c, g, or u
uucnuagcagggcccccagucuuc

SEQ ID NO: 50109 - RNA, 18 nt, Artificial Sequence
  Synthetic
gcgagggaguucuucuuc

SEQ ID NO: 50110 - RNA, 19 nt, Artificial Sequence
  Synthetic
ggcgagggaguucuucuuc

SEQ ID NO: 50111 - RNA, 20 nt, Artificial Sequence
  Synthetic
aggcgagggaguucuucuuc

SEQ ID NO: 50112 - RNA, 21 nt, Artificial Sequence
  Synthetic
gaggcgagggaguucuucuuc

SEQ ID NO: 50113 - RNA, 22 nt, Artificial Sequence
  Synthetic
cgaggcgagggaguucuucuuc

SEQ ID NO: 50114 - RNA, 23 nt, Artificial Sequence
  Synthetic
gcgaggcgagggaguucuucuuc

SEQ ID NO: 50115 - RNA, 24 nt, Artificial Sequence
  Synthetic
ugcgaggcgagggaguucuucuuc

SEQ ID NO: 50116 - RNA, 18 nt, Artificial Sequence
  Synthetic
ucuaacaacaguaguuuc

SEQ ID NO: 50117 - RNA, 19 nt, Artificial Sequence
  Synthetic
gucuaacaacaguaguuuc

SEQ ID NO: 50118 - RNA, 20 nt, Artificial Sequence
  Synthetic
cgucuaacaacaguaguuuc

SEQ ID NO: 50119 - RNA, 21 nt, Artificial Sequence
  Synthetic
ucgucuaacaacaguaguuuc

SEQ ID NO: 50120 - RNA, 22 nt, Artificial Sequence
  Synthetic
gucgucuaacaacaguaguuuc

SEQ ID NO: 50121 - RNA, 23 nt, Artificial Sequence
  Synthetic
cgucgucuaacaacaguaguuuc

SEQ ID NO: 50122 - RNA, 24 nt, Artificial Sequence
  Synthetic
ucgucgucuaacaacaguaguuuc

SEQ ID NO: 50123 - RNA, 18 nt, Artificial Sequence
  Synthetic
  misc_feature (8)..(8): n is a, c, g, or u
aaugaaunucaggaaaag

SEQ ID NO: 50124 - RNA, 19 nt, Artificial Sequence
  Synthetic
  misc_feature (9)..(9): n is a, c, g, or u
aaaugaaunucaggaaaag

SEQ ID NO: 50125 - RNA, 20 nt, Artificial Sequence
  Synthetic
  misc_feature (1)..(1): n is a, c, g, or u
  misc_feature (10)..(10): n is a, c, g, or u
naaaugaaunucaggaaaag

SEQ ID NO: 50126 - RNA, 21 nt, Artificial Sequence
  Synthetic
  misc_feature (2)..(2): n is a, c, g, or u
  misc_feature (11)..(11): n is a, c, g, or u
gnaaaugaaunucaggaaaag

SEQ ID NO: 50127 - RNA, 22 nt, Artificial Sequence
  Synthetic
  misc_feature (3)..(3): n is a, c, g, or u
  misc_feature (12)..(12): n is a, c, g, or u
ugnaaaugaaunucaggaaaag

SEQ ID NO: 50128 - RNA, 23 nt, Artificial Sequence
  Synthetic
  misc_feature (4)..(4): n is a, c, g, or u
  misc_feature (13)..(13): n is a, c, g, or u
augnaaaugaaunucaggaaaag

SEQ ID NO: 50129 - RNA, 24 nt, Artificial Sequence
  Synthetic
  misc_feature (5)..(5): n is a, c, g, or u
  misc_feature (14)..(14): n is a, c, g, or u
gaugnaaaugaaunucaggaaaag

SEQ ID NO: 50130 - RNA, 18 nt, Artificial Sequence
  Synthetic
  misc_feature (2)..(2): n is a, c, g, or u
ancgauagccaggacaag

SEQ ID NO: 50131 - RNA, 19 nt, Artificial Sequence
  Synthetic
  misc_feature (3)..(3): n is a, c, g, or u
cancgauagccaggacaag

SEQ ID NO: 50132 - RNA, 20 nt, Artificial Sequence
  Synthetic
  misc_feature (4)..(4): n is a, c, g, or u
ccancgauagccaggacaag

SEQ ID NO: 50133 - RNA, 21 nt, Artificial Sequence
  Synthetic
  misc_feature (5)..(5): n is a, c, g, or u
uccancgauagccaggacaag

SEQ ID NO: 50134 - RNA, 22 nt, Artificial Sequence
  Synthetic
  misc_feature (6)..(6): n is a, c, g, or u
auccancgauagccaggacaag

SEQ ID NO: 50135 - RNA, 23 nt, Artificial Sequence
  Synthetic
  misc_feature (7)..(7): n is a, c, g, or u
cauccancgauagccaggacaag

SEQ ID NO: 50136 - RNA, 24 nt, Artificial Sequence
  Synthetic
  misc_feature (8)..(8): n is a, c, g, or u
acauccancgauagccaggacaag

SEQ ID NO: 50137 - RNA, 18 nt, Artificial Sequence
  Synthetic
agaagaaccaacaagaag

SEQ ID NO: 50138 - RNA, 19 nt, Artificial Sequence
  Synthetic
cagaagaaccaacaagaag

SEQ ID NO: 50139 - RNA, 20 nt, Artificial Sequence
  Synthetic
ccagaagaaccaacaagaag

SEQ ID NO: 50140 - RNA, 21 nt, Artificial Sequence
  Synthetic
uccagaagaaccaacaagaag

SEQ ID NO: 50141 - RNA, 22 nt, Artificial Sequence
  Synthetic
guccagaagaaccaacaagaag

SEQ ID NO: 50142 - RNA, 23 nt, Artificial Sequence
  Synthetic
aguccagaagaaccaacaagaag

SEQ ID NO: 50143 - RNA, 24 nt, Artificial Sequence
  Synthetic
uaguccagaagaaccaacaagaag

SEQ ID NO: 50144 - RNA, 18 nt, Artificial Sequence
  Synthetic
aauacuaacauugggaag

SEQ ID NO: 50145 - RNA, 19 nt, Artificial Sequence
  Synthetic
gaauacuaacauugggaag

SEQ ID NO: 50146 - RNA, 20 nt, Artificial Sequence
  Synthetic
ggaauacuaacauugggaag

SEQ ID NO: 50147 - RNA, 21 nt, Artificial Sequence
  Synthetic
aggaauacuaacauugggaag

SEQ ID NO: 50148 - RNA, 22 nt, Artificial Sequence
  Synthetic
aaggaauacuaacauugggaag

SEQ ID NO: 50149 - RNA, 23 nt, Artificial Sequence
  Synthetic
caaggaauacuaacauugggaag

SEQ ID NO: 50150 - RNA, 24 nt, Artificial Sequence
  Synthetic
ccaaggaauacuaacauugggaag

SEQ ID NO: 50151 - RNA, 18 nt, Artificial Sequence
  Synthetic
accgccgauugguggaag

SEQ ID NO: 50152 - RNA, 19 nt, Artificial Sequence
  Synthetic
gaccgccgauugguggaag

SEQ ID NO: 50153 - RNA, 20 nt, Artificial Sequence
  Synthetic
ggaccgccgauugguggaag

SEQ ID NO: 50154 - RNA, 21 nt, Artificial Sequence
  Synthetic
cggaccgccgauugguggaag

SEQ ID NO: 50155 - RNA, 22 nt, Artificial Sequence
  Synthetic
ccggaccgccgauugguggaag

SEQ ID NO: 50156 - RNA, 23 nt, Artificial Sequence
  Synthetic
cccggaccgccgauugguggaag

SEQ ID NO: 50157 - RNA, 24 nt, Artificial Sequence
  Synthetic
ucccggaccgccgauugguggaag

SEQ ID NO: 50158 - RNA, 18 nt, Artificial Sequence
  Synthetic
cauagcagcaggaugaag

SEQ ID NO: 50159 - RNA, 19 nt, Artificial Sequence
  Synthetic
gcauagcagcaggaugaag

SEQ ID NO: 50160 - RNA, 20 nt, Artificial Sequence
  Synthetic
ggcauagcagcaggaugaag

SEQ ID NO: 50161 - RNA, 21 nt, Artificial Sequence
  Synthetic
aggcauagcagcaggaugaag

SEQ ID NO: 50162 - RNA, 22 nt, Artificial Sequence
  Synthetic
gaggcauagcagcaggaugaag

SEQ ID NO: 50163 - RNA, 23 nt, Artificial Sequence
  Synthetic
ugaggcauagcagcaggaugaag

SEQ ID NO: 50164 - RNA, 24 nt, Artificial Sequence
  Synthetic
augaggcauagcagcaggaugaag

SEQ ID NO: 50165 - RNA, 18 nt, Artificial Sequence
  Synthetic
cauuugguggucuauaag

SEQ ID NO: 50166 - RNA, 19 nt, Artificial Sequence
  Synthetic
gcauuugguggucuauaag

SEQ ID NO: 50167 - RNA, 20 nt, Artificial Sequence
  Synthetic
ggcauuugguggucuauaag

SEQ ID NO: 50168 - RNA, 21 nt, Artificial Sequence
  Synthetic
gggcauuugguggucuauaag

SEQ ID NO: 50169 - RNA, 22 nt, Artificial Sequence
  Synthetic
ggggcauuugguggucuauaag

SEQ ID NO: 50170 - RNA, 23 nt, Artificial Sequence
  Synthetic
aggggcauuugguggucuauaag

SEQ ID NO: 50171 - RNA, 24 nt, Artificial Sequence
  Synthetic
uaggggcauuugguggucuauaag

SEQ ID NO: 50172 - RNA, 18 nt, Artificial Sequence
  Synthetic
gcagaugagaaggaacag

SEQ ID NO: 50173 - RNA, 19 nt, Artificial Sequence
  Synthetic
ggcagaugagaaggaacag

SEQ ID NO: 50174 - RNA, 20 nt, Artificial Sequence
  Synthetic
cggcagaugagaaggaacag

SEQ ID NO: 50175 - RNA, 21 nt, Artificial Sequence
  Synthetic
ccggcagaugagaaggaacag

SEQ ID NO: 50176 - RNA, 22 nt, Artificial Sequence
  Synthetic
  misc_feature (1)..(1): n is a, c, g, or u
nccggcagaugagaaggaacag

SEQ ID NO: 50177 - RNA, 23 nt, Artificial Sequence
  Synthetic
  misc_feature (2)..(2): n is a, c, g, or u
gnccggcagaugagaaggaacag

SEQ ID NO: 50178 - RNA, 24 nt, Artificial Sequence
  Synthetic
  misc_feature (3)..(3): n is a, c, g, or u
ggnccggcagaugagaaggaacag

SEQ ID NO: 50179 - RNA, 18 nt, Artificial Sequence
  Synthetic
gcuuggaggcuugaacag

SEQ ID NO: 50180 - RNA, 19 nt, Artificial Sequence
  Synthetic
agcuuggaggcuugaacag

SEQ ID NO: 50181 - RNA, 20 nt, Artificial Sequence
  Synthetic
cagcuuggaggcuugaacag

SEQ ID NO: 50182 - RNA, 21 nt, Artificial Sequence
  Synthetic
acagcuuggaggcuugaacag

SEQ ID NO: 50183 - RNA, 22 nt, Artificial Sequence
  Synthetic
cacagcuuggaggcuugaacag

SEQ ID NO: 50184 - RNA, 23 nt, Artificial Sequence
  Synthetic
gcacagcuuggaggcuugaacag

SEQ ID NO: 50185 - RNA, 24 nt, Artificial Sequence
  Synthetic
ggcacagcuuggaggcuugaacag

SEQ ID NO: 50186 - RNA, 18 nt, Artificial Sequence
  Synthetic
uaacuaaaagccagacag

SEQ ID NO: 50187 - RNA, 19 nt, Artificial Sequence
  Synthetic
auaacuaaaagccagacag

SEQ ID NO: 50188 - RNA, 20 nt, Artificial Sequence
  Synthetic
uauaacuaaaagccagacag

SEQ ID NO: 50189 - RNA, 21 nt, Artificial Sequence
  Synthetic
auauaacuaaaagccagacag

SEQ ID NO: 50190 - RNA, 22 nt, Artificial Sequence
  Synthetic
cauauaacuaaaagccagacag

SEQ ID NO: 50191 - RNA, 23 nt, Artificial Sequence
  Synthetic
ccauauaacuaaaagccagacag

SEQ ID NO: 50192 - RNA, 24 nt, Artificial Sequence
  Synthetic
uccauauaacuaaaagccagacag

SEQ ID NO: 50193 - RNA, 18 nt, Artificial Sequence
  Synthetic
uggccaagccccaaccag

SEQ ID NO: 50194 - RNA, 19 nt, Artificial Sequence
  Synthetic
auggccaagccccaaccag

SEQ ID NO: 50195 - RNA, 20 nt, Artificial Sequence
  Synthetic
aauggccaagccccaaccag

SEQ ID NO: 50196 - RNA, 21 nt, Artificial Sequence
  Synthetic
caauggccaagccccaaccag

SEQ ID NO: 50197 - RNA, 22 nt, Artificial Sequence
  Synthetic
ccaauggccaagccccaaccag

SEQ ID NO: 50198 - RNA, 23 nt, Artificial Sequence
  Synthetic
gccaauggccaagccccaaccag

SEQ ID NO: 50199 - RNA, 24 nt, Artificial Sequence
  Synthetic
ggccaauggccaagccccaaccag

SEQ ID NO: 50200 - RNA, 18 nt, Artificial Sequence
  Synthetic
cugaacuggagccaccag

SEQ ID NO: 50201 - RNA, 19 nt, Artificial Sequence
  Synthetic
  misc_feature (1)..(1): n is a, c, g, or u
ncugaacuggagccaccag

SEQ ID NO: 50202 - RNA, 20 nt, Artificial Sequence
  Synthetic
  misc_feature (2)..(2): n is a, c, g, or u
cncugaacuggagccaccag

SEQ ID NO: 50203 - RNA, 21 nt, Artificial Sequence
  Synthetic
  misc_feature (3)..(3): n is a, c, g, or u
ucncugaacuggagccaccag

SEQ ID NO: 50204 - RNA, 22 nt, Artificial Sequence
  Synthetic
  misc_feature (4)..(4): n is a, c, g, or u
gucncugaacuggagccaccag

SEQ ID NO: 50205 - RNA, 23 nt, Artificial Sequence
  Synthetic
  misc_feature (5)..(5): n is a, c, g, or u
ugucncugaacuggagccaccag

SEQ ID NO: 50206 - RNA, 24 nt, Artificial Sequence
  Synthetic
  misc_feature (6)..(6): n is a, c, g, or u
gugucncugaacuggagccaccag

SEQ ID NO: 50207 - RNA, 18 nt, Artificial Sequence
  Synthetic
acuaguaaacugagccag

SEQ ID NO: 50208 - RNA, 19 nt, Artificial Sequence
  Synthetic
cacuaguaaacugagccag

SEQ ID NO: 50209 - RNA, 20 nt, Artificial Sequence
  Synthetic
gcacuaguaaacugagccag

SEQ ID NO: 50210 - RNA, 21 nt, Artificial Sequence
  Synthetic
ugcacuaguaaacugagccag

SEQ ID NO: 50211 - RNA, 22 nt, Artificial Sequence
  Synthetic
uugcacuaguaaacugagccag

SEQ ID NO: 50212 - RNA, 23 nt, Artificial Sequence
  Synthetic
auugcacuaguaaacugagccag

SEQ ID NO: 50213 - RNA, 24 nt, Artificial Sequence
  Synthetic
aauugcacuaguaaacugagccag

SEQ ID NO: 50214 - RNA, 18 nt, Artificial Sequence
  Synthetic
cauaccuugauaguccag

SEQ ID NO: 50215 - RNA, 19 nt, Artificial Sequence
  Synthetic
acauaccuugauaguccag

SEQ ID NO: 50216 - RNA, 20 nt, Artificial Sequence
  Synthetic
aacauaccuugauaguccag

SEQ ID NO: 50217 - RNA, 21 nt, Artificial Sequence
  Synthetic
caacauaccuugauaguccag

SEQ ID NO: 50218 - RNA, 22 nt, Artificial Sequence
  Synthetic
gcaacauaccuugauaguccag

SEQ ID NO: 50219 - RNA, 23 nt, Artificial Sequence
  Synthetic
ggcaacauaccuugauaguccag

SEQ ID NO: 50220 - RNA, 24 nt, Artificial Sequence
  Synthetic
gggcaacauaccuugauaguccag

SEQ ID NO: 50221 - RNA, 18 nt, Artificial Sequence
  Synthetic
  misc_feature (11)..(11): n is a, c, g, or u
gugcacacggnccggcag

SEQ ID NO: 50222 - RNA, 19 nt, Artificial Sequence
  Synthetic
  misc_feature (12)..(12): n is a, c, g, or u
agugcacacggnccggcag

SEQ ID NO: 50223 - RNA, 20 nt, Artificial Sequence
  Synthetic
  misc_feature (13)..(13): n is a, c, g, or u
aagugcacacggnccggcag

SEQ ID NO: 50224 - RNA, 21 nt, Artificial Sequence
  Synthetic
  misc_feature (14)..(14): n is a, c, g, or u
gaagugcacacggnccggcag

SEQ ID NO: 50225 - RNA, 22 nt, Artificial Sequence
  Synthetic
  misc_feature (15)..(15): n is a, c, g, or u
cgaagugcacacggnccggcag

SEQ ID NO: 50226 - RNA, 23 nt, Artificial Sequence
  Synthetic
  misc_feature (16)..(16): n is a, c, g, or u
gcgaagugcacacggnccggcag

SEQ ID NO: 50227 - RNA, 24 nt, Artificial Sequence
  Synthetic
  misc_feature (17)..(17): n is a, c, g, or u
agcgaagugcacacggnccggcag

SEQ ID NO: 50228 - RNA, 18 nt, Artificial Sequence
  Synthetic
cgcaguauggaucggcag

SEQ ID NO: 50229 - RNA, 19 nt, Artificial Sequence
  Synthetic
ccgcaguauggaucggcag

SEQ ID NO: 50230 - RNA, 20 nt, Artificial Sequence
  Synthetic
uccgcaguauggaucggcag

SEQ ID NO: 50231 - RNA, 21 nt, Artificial Sequence
  Synthetic
uuccgcaguauggaucggcag

SEQ ID NO: 50232 - RNA, 22 nt, Artificial Sequence
  Synthetic
guuccgcaguauggaucggcag

SEQ ID NO: 50233 - RNA, 23 nt, Artificial Sequence
  Synthetic
aguuccgcaguauggaucggcag

SEQ ID NO: 50234 - RNA, 24 nt, Artificial Sequence
  Synthetic
gaguuccgcaguauggaucggcag

SEQ ID NO: 50235 - RNA, 18 nt, Artificial Sequence
  Synthetic
aaagaugauuaggcagag

SEQ ID NO: 50236 - RNA, 19 nt, Artificial Sequence
  Synthetic
aaaagaugauuaggcagag

SEQ ID NO: 50237 - RNA, 20 nt, Artificial Sequence
  Synthetic
caaaagaugauuaggcagag

SEQ ID NO: 50238 - RNA, 21 nt, Artificial Sequence
  Synthetic
acaaaagaugauuaggcagag

SEQ ID NO: 50239 - RNA, 22 nt, Artificial Sequence
  Synthetic
aacaaaagaugauuaggcagag

SEQ ID NO: 50240 - RNA, 23 nt, Artificial Sequence
  Synthetic
gaacaaaagaugauuaggcagag

SEQ ID NO: 50241 - RNA, 24 nt, Artificial Sequence
  Synthetic
ugaacaaaagaugauuaggcagag

SEQ ID NO: 50242 - RNA, 18 nt, Artificial Sequence
  Synthetic
uccaugcgacgugcagag

SEQ ID NO: 50243 - RNA, 19 nt, Artificial Sequence
  Synthetic
cuccaugcgacgugcagag

SEQ ID NO: 50244 - RNA, 20 nt, Artificial Sequence
  Synthetic
ucuccaugcgacgugcagag

SEQ ID NO: 50245 - RNA, 21 nt, Artificial Sequence
  Synthetic
gucuccaugcgacgugcagag

SEQ ID NO: 50246 - RNA, 22 nt, Artificial Sequence
  Synthetic
ggucuccaugcgacgugcagag

SEQ ID NO: 50247 - RNA, 23 nt, Artificial Sequence
  Synthetic
uggucuccaugcgacgugcagag

SEQ ID NO: 50248 - RNA, 24 nt, Artificial Sequence
  Synthetic
guggucuccaugcgacgugcagag

SEQ ID NO: 50249 - RNA, 18 nt, Artificial Sequence
  Synthetic
  misc_feature (5)..(5): n is a, c, g, or u
gaugngugucucuuagag

SEQ ID NO: 50250 - RNA, 19 nt, Artificial Sequence
  Synthetic
  misc_feature (6)..(6): n is a, c, g, or u
ggaugngugucucuuagag

SEQ ID NO: 50251 - RNA, 20 nt, Artificial Sequence
  Synthetic
  misc_feature (7)..(7): n is a, c, g, or u
uggaugngugucucuuagag

SEQ ID NO: 50252 - RNA, 21 nt, Artificial Sequence
  Synthetic
  misc_feature (8)..(8): n is a, c, g, or u
guggaugngugucucuuagag

SEQ ID NO: 50253 - RNA, 22 nt, Artificial Sequence
  Synthetic
  misc_feature (9)..(9): n is a, c, g, or u
uguggaugngugucucuuagag

SEQ ID NO: 50254 - RNA, 23 nt, Artificial Sequence
  Synthetic
  misc_feature (10)..(10): n is a, c, g, or u
cuguggaugngugucucuuagag

SEQ ID NO: 50255 - RNA, 24 nt, Artificial Sequence
  Synthetic
  misc_feature (11)..(11): n is a, c, g, or u
ccuguggaugngugucucuuagag

SEQ ID NO: 50256 - RNA, 18 nt, Artificial Sequence
  Synthetic
caccgccuguaacacgag

SEQ ID NO: 50257 - RNA, 19 nt, Artificial Sequence
  Synthetic
acaccgccuguaacacgag

SEQ ID NO: 50258 - RNA, 20 nt, Artificial Sequence
  Synthetic
cacaccgccuguaacacgag

SEQ ID NO: 50259 - RNA, 21 nt, Artificial Sequence
  Synthetic
acacaccgccuguaacacgag

SEQ ID NO: 50260 - RNA, 22 nt, Artificial Sequence
  Synthetic
aacacaccgccuguaacacgag

SEQ ID NO: 50261 - RNA, 23 nt, Artificial Sequence
  Synthetic
aaacacaccgccuguaacacgag

SEQ ID NO: 50262 - RNA, 24 nt, Artificial Sequence
  Synthetic
gaaacacaccgccuguaacacgag

SEQ ID NO: 50263 - RNA, 18 nt, Artificial Sequence
  Synthetic
  misc_feature (5)..(5): n is a, c, g, or u
gagancuucgucugcgag

SEQ ID NO: 50264 - RNA, 19 nt, Artificial Sequence
  Synthetic
  misc_feature (6)..(6): n is a, c, g, or u
ugagancuucgucugcgag

SEQ ID NO: 50265 - RNA, 20 nt, Artificial Sequence
  Synthetic
  misc_feature (7)..(7): n is a, c, g, or u
uugagancuucgucugcgag

SEQ ID NO: 50266 - RNA, 21 nt, Artificial Sequence
  Synthetic
  misc_feature (8)..(8): n is a, c, g, or u
auugagancuucgucugcgag

SEQ ID NO: 50267 - RNA, 22 nt, Artificial Sequence
  Synthetic
  misc_feature (9)..(9): n is a, c, g, or u
gauugagancuucgucugcgag

SEQ ID NO: 50268 - RNA, 23 nt, Artificial Sequence
  Synthetic
  misc_feature (10)..(10): n is a, c, g, or u
cgauugagancuucgucugcgag

SEQ ID NO: 50269 - RNA, 24 nt, Artificial Sequence
  Synthetic
  misc_feature (11)..(11): n is a, c, g, or u
gcgauugagancuucgucugcgag

SEQ ID NO: 50270 - RNA, 18 nt, Artificial Sequence
  Synthetic
  misc_feature (6)..(6): n is a, c, g, or u
cacggnccggcagaugag

SEQ ID NO: 50271 - RNA, 19 nt, Artificial Sequence
  Synthetic
  misc_feature (7)..(7): n is a, c, g, or u
acacggnccggcagaugag

SEQ ID NO: 50272 - RNA, 20 nt, Artificial Sequence
  Synthetic
  misc_feature (8)..(8): n is a, c, g, or u
cacacggnccggcagaugag

SEQ ID NO: 50273 - RNA, 21 nt, Artificial Sequence
  Synthetic
  misc_feature (9)..(9): n is a, c, g, or u
gcacacggnccggcagaugag

SEQ ID NO: 50274 - RNA, 22 nt, Artificial Sequence
  Synthetic
  misc_feature (10)..(10): n is a, c, g, or u
ugcacacggnccggcagaugag

SEQ ID NO: 50275 - RNA, 23 nt, Artificial Sequence
  Synthetic
  misc_feature (11)..(11): n is a, c, g, or u
gugcacacggnccggcagaugag

SEQ ID NO: 50276 - RNA, 24 nt, Artificial Sequence
  Synthetic
  misc_feature (12)..(12): n is a, c, g, or u
agugcacacggnccggcagaugag

SEQ ID NO: 50277 - RNA, 18 nt, Artificial Sequence
  Synthetic
augugagagaggcaauag

SEQ ID NO: 50278 - RNA, 19 nt, Artificial Sequence
  Synthetic
gaugugagagaggcaauag

SEQ ID NO: 50279 - RNA, 20 nt, Artificial Sequence
  Synthetic
ugaugugagagaggcaauag

SEQ ID NO: 50280 - RNA, 21 nt, Artificial Sequence
  Synthetic
augaugugagagaggcaauag

SEQ ID NO: 50281 - RNA, 22 nt, Artificial Sequence
  Synthetic
gaugaugugagagaggcaauag

SEQ ID NO: 50282 - RNA, 23 nt, Artificial Sequence
  Synthetic
ugaugaugugagagaggcaauag

SEQ ID NO: 50283 - RNA, 24 nt, Artificial Sequence
  Synthetic
uugaugaugugagagaggcaauag

SEQ ID NO: 50284 - RNA, 18 nt, Artificial Sequence
  Synthetic
  misc_feature (15)..(15): n is a, c, g, or u
uguuguccauguucnuag

SEQ ID NO: 50285 - RNA, 19 nt, Artificial Sequence
  Synthetic
  misc_feature (16)..(16): n is a, c, g, or u
auguuguccauguucnuag

SEQ ID NO: 50286 - RNA, 20 nt, Artificial Sequence
  Synthetic
  misc_feature (17)..(17): n is a, c, g, or u
gauguuguccauguucnuag

SEQ ID NO: 50287 - RNA, 21 nt, Artificial Sequence
  Synthetic
  misc_feature (18)..(18): n is a, c, g, or u
ugauguuguccauguucnuag

SEQ ID NO: 50288 - RNA, 22 nt, Artificial Sequence
  Synthetic
  misc_feature (19)..(19): n is a, c, g, or u
gugauguuguccauguucnuag

SEQ ID NO: 50289 - RNA, 23 nt, Artificial Sequence
  Synthetic
  misc_feature (20)..(20): n is a, c, g, or u
ugugauguuguccauguucnuag

SEQ ID NO: 50290 - RNA, 24 nt, Artificial Sequence
  Synthetic
  misc_feature (21)..(21): n is a, c, g, or u
augugauguuguccauguucnuag

SEQ ID NO: 50291 - RNA, 18 nt, Artificial Sequence
  Synthetic
gaugagaaggaacagacg

SEQ ID NO: 50292 - RNA, 19 nt, Artificial Sequence
  Synthetic
agaugagaaggaacagacg

SEQ ID NO: 50293 - RNA, 20 nt, Artificial Sequence
  Synthetic
cagaugagaaggaacagacg

SEQ ID NO: 50294 - RNA, 21 nt, Artificial Sequence
  Synthetic
gcagaugagaaggaacagacg

SEQ ID NO: 50295 - RNA, 22 nt, Artificial Sequence
  Synthetic
ggcagaugagaaggaacagacg

SEQ ID NO: 50296 - RNA, 23 nt, Artificial Sequence
  Synthetic
cggcagaugagaaggaacagacg

SEQ ID NO: 50297 - RNA, 24 nt, Artificial Sequence
  Synthetic
ccggcagaugagaaggaacagacg

SEQ ID NO: 50298 - RNA, 18 nt, Artificial Sequence
  Synthetic
cggcuggaacggcagacg

SEQ ID NO: 50299 - RNA, 19 nt, Artificial Sequence
  Synthetic
ucggcuggaacggcagacg

SEQ ID NO: 50300 - RNA, 20 nt, Artificial Sequence
  Synthetic
gucggcuggaacggcagacg

SEQ ID NO: 50301 - RNA, 21 nt, Artificial Sequence
  Synthetic
  misc_feature (1)..(1): n is a, c, g, or u
ngucggcuggaacggcagacg

SEQ ID NO: 50302 - RNA, 22 nt, Artificial Sequence
  Synthetic
  misc_feature (2)..(2): n is a, c, g, or u
ungucggcuggaacggcagacg

SEQ ID NO: 50303 - RNA, 23 nt, Artificial Sequence
  Synthetic
  misc_feature (3)..(3): n is a, c, g, or u
gungucggcuggaacggcagacg

SEQ ID NO: 50304 - RNA, 24 nt, Artificial Sequence
  Synthetic
  misc_feature (4)..(4): n is a, c, g, or u
cgungucggcuggaacggcagacg

SEQ ID NO: 50305 - RNA, 18 nt, Artificial Sequence
  Synthetic
  misc_feature (5)..(5): n is a, c, g, or u
ccgcnggauucagcgccg

SEQ ID NO: 50306 - RNA, 19 nt, Artificial Sequence
  Synthetic
  misc_feature (6)..(6): n is a, c, g, or u
uccgcnggauucagcgccg

SEQ ID NO: 50307 - RNA, 20 nt, Artificial Sequence
  Synthetic
  misc_feature (7)..(7): n is a, c, g, or u
guccgcnggauucagcgccg

SEQ ID NO: 50308 - RNA, 21 nt, Artificial Sequence
  Synthetic
  misc_feature (8)..(8): n is a, c, g, or u
cguccgcnggauucagcgccg

SEQ ID NO: 50309 - RNA, 22 nt, Artificial Sequence
  Synthetic
  misc_feature (9)..(9): n is a, c, g, or u
ucguccgcnggauucagcgccg

SEQ ID NO: 50310 - RNA, 23 nt, Artificial Sequence
  Synthetic
  misc_feature (1)..(1): n is a, c, g, or u
  misc_feature (10)..(10): n is a, c, g, or u
nucguccgcnggauucagcgccg

SEQ ID NO: 50311 - RNA, 24 nt, Artificial Sequence
  Synthetic
  misc_feature (2)..(2): n is a, c, g, or u
  misc_feature (11)..(11): n is a, c, g, or u
gnucguccgcnggauucagcgccg

SEQ ID NO: 50312 - RNA, 18 nt, Artificial Sequence
  Synthetic
  misc_feature (2)..(2): n is a, c, g, or u
ancuucgucugcgaggcg

SEQ ID NO: 50313 - RNA, 19 nt, Artificial Sequence
  Synthetic
  misc_feature (3)..(3): n is a, c, g, or u
gancuucgucugcgaggcg

SEQ ID NO: 50314 - RNA, 20 nt, Artificial Sequence
  Synthetic
  misc_feature (4)..(4): n is a, c, g, or u
agancuucgucugcgaggcg

SEQ ID NO: 50315 - RNA, 21 nt, Artificial Sequence
  Synthetic
  misc_feature (5)..(5): n is a, c, g, or u
gagancuucgucugcgaggcg

SEQ ID NO: 50316 - RNA, 22 nt, Artificial Sequence
  Synthetic
  misc_feature (6)..(6): n is a, c, g, or u
ugagancuucgucugcgaggcg

SEQ ID NO: 50317 - RNA, 23 nt, Artificial Sequence
  Synthetic
  misc_feature (7)..(7): n is a, c, g, or u
uugagancuucgucugcgaggcg

SEQ ID NO: 50318 - RNA, 24 nt, Artificial Sequence
  Synthetic
  misc_feature (8)..(8): n is a, c, g, or u
auugagancuucgucugcgaggcg

SEQ ID NO: 50319 - RNA, 18 nt, Artificial Sequence
  Synthetic
ucucuuccaaaaguaagg

SEQ ID NO: 50320 - RNA, 19 nt, Artificial Sequence
  Synthetic
uucucuuccaaaaguaagg

SEQ ID NO: 50321 - RNA, 20 nt, Artificial Sequence
  Synthetic
uuucucuuccaaaaguaagg

SEQ ID NO: 50322 - RNA, 21 nt, Artificial Sequence
  Synthetic
guuucucuuccaaaaguaagg

SEQ ID NO: 50323 - RNA, 22 nt, Artificial Sequence
  Synthetic
uguuucucuuccaaaaguaagg

SEQ ID NO: 50324 - RNA, 23 nt, Artificial Sequence
  Synthetic
cuguuucucuuccaaaaguaagg

SEQ ID NO: 50325 - RNA, 24 nt, Artificial Sequence
  Synthetic
acuguuucucuuccaaaaguaagg

SEQ ID NO: 50326 - RNA, 18 nt, Artificial Sequence
  Synthetic
augaggcauagcagcagg

SEQ ID NO: 50327 - RNA, 19 nt, Artificial Sequence
  Synthetic
gaugaggcauagcagcagg

SEQ ID NO: 50328 - RNA, 20 nt, Artificial Sequence
  Synthetic
agaugaggcauagcagcagg

SEQ ID NO: 50329 - RNA, 21 nt, Artificial Sequence
  Synthetic
aagaugaggcauagcagcagg

SEQ ID NO: 50330 - RNA, 22 nt, Artificial Sequence
  Synthetic
gaagaugaggcauagcagcagg

SEQ ID NO: 50331 - RNA, 23 nt, Artificial Sequence
  Synthetic
agaagaugaggcauagcagcagg

SEQ ID NO: 50332 - RNA, 24 nt, Artificial Sequence
  Synthetic
aagaagaugaggcauagcagcagg

SEQ ID NO: 50333 - RNA, 18 nt, Artificial Sequence
  Synthetic
  misc_feature (4)..(4): n is a, c, g, or u
augngugucucuuagagg

SEQ ID NO: 50334 - RNA, 19 nt, Artificial Sequence
  Synthetic
  misc_feature (5)..(5): n is a, c, g, or u
gaugngugucucuuagagg

SEQ ID NO: 50335 - RNA, 20 nt, Artificial Sequence
  Synthetic
  misc_feature (6)..(6): n is a, c, g, or u
ggaugngugucucuuagagg

SEQ ID NO: 50336 - RNA, 21 nt, Artificial Sequence
  Synthetic
  misc_feature (7)..(7): n is a, c, g, or u
uggaugngugucucuuagagg

SEQ ID NO: 50337 - RNA, 22 nt, Artificial Sequence
  Synthetic
  misc_feature (8)..(8): n is a, c, g, or u
guggaugngugucucuuagagg

SEQ ID NO: 50338 - RNA, 23 nt, Artificial Sequence
  Synthetic
  misc_feature (9)..(9): n is a, c, g, or u
uguggaugngugucucuuagagg

SEQ ID NO: 50339 - RNA, 24 nt, Artificial Sequence
  Synthetic
  misc_feature (10)..(10): n is a, c, g, or u
cuguggaugngugucucuuagagg

SEQ ID NO: 50340 - RNA, 18 nt, Artificial Sequence
  Synthetic
uugguaagugauuggagg

SEQ ID NO: 50341 - RNA, 19 nt, Artificial Sequence
  Synthetic
guugguaagugauuggagg

SEQ ID NO: 50342 - RNA, 20 nt, Artificial Sequence
  Synthetic
gguugguaagugauuggagg

SEQ ID NO: 50343 - RNA, 21 nt, Artificial Sequence
  Synthetic
agguugguaagugauuggagg

SEQ ID NO: 50344 - RNA, 22 nt, Artificial Sequence
  Synthetic
gagguugguaagugauuggagg

SEQ ID NO: 50345 - RNA, 23 nt, Artificial Sequence
  Synthetic
ggagguugguaagugauuggagg

SEQ ID NO: 50346 - RNA, 24 nt, Artificial Sequence
  Synthetic
aggagguugguaagugauuggagg

SEQ ID NO: 50347 - RNA, 18 nt, Artificial Sequence
  Synthetic
gaacaaaagaugauuagg

SEQ ID NO: 50348 - RNA, 19 nt, Artificial Sequence
  Synthetic
ugaacaaaagaugauuagg

SEQ ID NO: 50349 - RNA, 20 nt, Artificial Sequence
  Synthetic
augaacaaaagaugauuagg

SEQ ID NO: 50350 - RNA, 21 nt, Artificial Sequence
  Synthetic
caugaacaaaagaugauuagg

SEQ ID NO: 50351 - RNA, 22 nt, Artificial Sequence
  Synthetic
acaugaacaaaagaugauuagg

SEQ ID NO: 50352 - RNA, 23 nt, Artificial Sequence
  Synthetic
gacaugaacaaaagaugauuagg

SEQ ID NO: 50353 - RNA, 24 nt, Artificial Sequence
  Synthetic
ggacaugaacaaaagaugauuagg

SEQ ID NO: 50354 - RNA, 18 nt, Artificial Sequence
  Synthetic
uuccgcaguauggaucgg

SEQ ID NO: 50355 - RNA, 19 nt, Artificial Sequence
  Synthetic
guuccgcaguauggaucgg

SEQ ID NO: 50356 - RNA, 20 nt, Artificial Sequence
  Synthetic
aguuccgcaguauggaucgg

SEQ ID NO: 50357 - RNA, 21 nt, Artificial Sequence
  Synthetic
gaguuccgcaguauggaucgg

SEQ ID NO: 50358 - RNA, 22 nt, Artificial Sequence
  Synthetic
ggaguuccgcaguauggaucgg

SEQ ID NO: 50359 - RNA, 23 nt, Artificial Sequence
  Synthetic
aggaguuccgcaguauggaucgg

SEQ ID NO: 50360 - RNA, 24 nt, Artificial Sequence
  Synthetic
aaggaguuccgcaguauggaucgg

SEQ ID NO: 50361 - RNA, 18 nt, Artificial Sequence
  Synthetic
  misc_feature (13)..(13): n is a, c, g, or u
ggugcgacccgungucgg

SEQ ID NO: 50362 - RNA, 19 nt, Artificial Sequence
  Synthetic
  misc_feature (14)..(14): n is a, c, g, or u
aggugcgacccgungucgg

SEQ ID NO: 50363 - RNA, 20 nt, Artificial Sequence
  Synthetic
  misc_feature (15)..(15): n is a, c, g, or u
gaggugcgacccgungucgg

SEQ ID NO: 50364 - RNA, 21 nt, Artificial Sequence
  Synthetic
  misc_feature (16)..(16): n is a, c, g, or u
agaggugcgacccgungucgg

SEQ ID NO: 50365 - RNA, 22 nt, Artificial Sequence
  Synthetic
  misc_feature (17)..(17): n is a, c, g, or u
gagaggugcgacccgungucgg

SEQ ID NO: 50366 - RNA, 23 nt, Artificial Sequence
  Synthetic
  misc_feature (18)..(18): n is a, c, g, or u
agagaggugcgacccgungucgg

SEQ ID NO: 50367 - RNA, 24 nt, Artificial Sequence
  Synthetic
  misc_feature (19)..(19): n is a, c, g, or u
aagagaggugcgacccgungucgg

SEQ ID NO: 50368 - RNA, 18 nt, Artificial Sequence
  Synthetic
  misc_feature (10)..(10): n is a, c, g, or u
  misc_feature (14)..(14): n is a, c, g, or u
aagcaucccnguanaggg

SEQ ID NO: 50369 - RNA, 19 nt, Artificial Sequence
  Synthetic
  misc_feature (11)..(11): n is a, c, g, or u
  misc_feature (15)..(15): n is a, c, g, or u
aaagcaucccnguanaggg

SEQ ID NO: 50370 - RNA, 20 nt, Artificial Sequence
  Synthetic
  misc_feature (12)..(12): n is a, c, g, or u
  misc_feature (16)..(16): n is a, c, g, or u
uaaagcaucccnguanaggg

SEQ ID NO: 50371 - RNA, 21 nt, Artificial Sequence
  Synthetic
  misc_feature (13)..(13): n is a, c, g, or u
  misc_feature (17)..(17): n is a, c, g, or u
cuaaagcaucccnguanaggg

SEQ ID NO: 50372 - RNA, 22 nt, Artificial Sequence
  Synthetic
  misc_feature (14)..(14): n is a, c, g, or u
  misc_feature (18)..(18): n is a, c, g, or u
ucuaaagcaucccnguanaggg

SEQ ID NO: 50373 - RNA, 23 nt, Artificial Sequence
  Synthetic
  misc_feature (1)..(1): n is a, c, g, or u
  misc_feature (15)..(15): n is a, c, g, or u
  misc_feature (19)..(19): n is a, c, g, or u
nucuaaagcaucccnguanaggg

SEQ ID NO: 50374 - RNA, 24 nt, Artificial Sequence
  Synthetic
  misc_feature (2)..(2): n is a, c, g, or u
  misc_feature (16)..(16): n is a, c, g, or u
  misc_feature (20)..(20): n is a, c, g, or u
anucuaaagcaucccnguanaggg

SEQ ID NO: 50375 - RNA, 18 nt, Artificial Sequence
  Synthetic
ugagccaggagaaacggg

SEQ ID NO: 50376 - RNA, 19 nt, Artificial Sequence
  Synthetic
cugagccaggagaaacggg

SEQ ID NO: 50377 - RNA, 20 nt, Artificial Sequence
  Synthetic
acugagccaggagaaacggg

SEQ ID NO: 50378 - RNA, 21 nt, Artificial Sequence
  Synthetic
aacugagccaggagaaacggg

SEQ ID NO: 50379 - RNA, 22 nt, Artificial Sequence
  Synthetic
aaacugagccaggagaaacggg

SEQ ID NO: 50380 - RNA, 23 nt, Artificial Sequence
  Synthetic
uaaacugagccaggagaaacggg

SEQ ID NO: 50381 - RNA, 24 nt, Artificial Sequence
  Synthetic
guaaacugagccaggagaaacggg

SEQ ID NO: 50382 - RNA, 18 nt, Artificial Sequence
  Synthetic
  misc_feature (12)..(12): n is a, c, g, or u
aggucccgaacngacggg

SEQ ID NO: 50383 - RNA, 19 nt, Artificial Sequence
  Synthetic
  misc_feature (13)..(13): n is a, c, g, or u
uaggucccgaacngacggg

SEQ ID NO: 50384 - RNA, 20 nt, Artificial Sequence
  Synthetic
  misc_feature (14)..(14): n is a, c, g, or u
guaggucccgaacngacggg

SEQ ID NO: 50385 - RNA, 21 nt, Artificial Sequence
  Synthetic
  misc_feature (15)..(15): n is a, c, g, or u
aguaggucccgaacngacggg

SEQ ID NO: 50386 - RNA, 22 nt, Artificial Sequence
  Synthetic
  misc_feature (16)..(16): n is a, c, g, or u
gaguaggucccgaacngacggg

SEQ ID NO: 50387 - RNA, 23 nt, Artificial Sequence
  Synthetic
  misc_feature (17)..(17): n is a, c, g, or u
cgaguaggucccgaacngacggg

SEQ ID NO: 50388 - RNA, 24 nt, Artificial Sequence
  Synthetic
  misc_feature (18)..(18): n is a, c, g, or u
ucgaguaggucccgaacngacggg

SEQ ID NO: 50389 - RNA, 18 nt, Artificial Sequence
  Synthetic
  misc_feature (9)..(9): n is a, c, g, or u
aaagcccangaugauggg

SEQ ID NO: 50390 - RNA, 19 nt, Artificial Sequence
  Synthetic
  misc_feature (10)..(10): n is a, c, g, or u
uaaagcccangaugauggg

SEQ ID NO: 50391 - RNA, 20 nt, Artificial Sequence
  Synthetic
  misc_feature (11)..(11): n is a, c, g, or u
cuaaagcccangaugauggg

SEQ ID NO: 50392 - RNA, 21 nt, Artificial Sequence
  Synthetic
  misc_feature (12)..(12): n is a, c, g, or u
ccuaaagcccangaugauggg

SEQ ID NO: 50393 - RNA, 22 nt, Artificial Sequence
  Synthetic
  misc_feature (13)..(13): n is a, c, g, or u
uccuaaagcccangaugauggg

SEQ ID NO: 50394 - RNA, 23 nt, Artificial Sequence
  Synthetic
  misc_feature (14)..(14): n is a, c, g, or u
uuccuaaagcccangaugauggg

SEQ ID NO: 50395 - RNA, 24 nt, Artificial Sequence
  Synthetic
  misc_feature (15)..(15): n is a, c, g, or u
uuuccuaaagcccangaugauggg

SEQ ID NO: 50396 - RNA, 18 nt, Artificial Sequence
  Synthetic
  misc_feature (6)..(6): n is a, c, g, or u
  misc_feature (12)..(12): n is a, c, g, or u
ggaucnaacagngccugg

SEQ ID NO: 50397 - RNA, 19 nt, Artificial Sequence
  Synthetic
  misc_feature (7)..(7): n is a, c, g, or u
  misc_feature (13)..(13): n is a, c, g, or u
cggaucnaacagngccugg

SEQ ID NO: 50398 - RNA, 20 nt, Artificial Sequence
  Synthetic
  misc_feature (8)..(8): n is a, c, g, or u
  misc_feature (14)..(14): n is a, c, g, or u
ucggaucnaacagngccugg

SEQ ID NO: 50399 - RNA, 21 nt, Artificial Sequence
  Synthetic
  misc_feature (9)..(9): n is a, c, g, or u
  misc_feature (15)..(15): n is a, c, g, or u
cucggaucnaacagngccugg

SEQ ID NO: 50400 - RNA, 22 nt, Artificial Sequence
  Synthetic
  misc_feature (10)..(10): n is a, c, g, or u
  misc_feature (16)..(16): n is a, c, g, or u
ccucggaucnaacagngccugg

SEQ ID NO: 50401 - RNA, 23 nt, Artificial Sequence
  Synthetic
  misc_feature (11)..(11): n is a, c, g, or u
  misc_feature (17)..(17): n is a, c, g, or u
cccucggaucnaacagngccugg

SEQ ID NO: 50402 - RNA, 24 nt, Artificial Sequence
  Synthetic
  misc_feature (12)..(12): n is a, c, g, or u
  misc_feature (18)..(18): n is a, c, g, or u
acccucggaucnaacagngccugg

SEQ ID NO: 50403 - RNA, 18 nt, Artificial Sequence
  Synthetic
cuaaaagccagacagugg

SEQ ID NO: 50404 - RNA, 19 nt, Artificial Sequence
  Synthetic
acuaaaagccagacagugg

SEQ ID NO: 50405 - RNA, 20 nt, Artificial Sequence
  Synthetic
aacuaaaagccagacagugg

SEQ ID NO: 50406 - RNA, 21 nt, Artificial Sequence
  Synthetic
uaacuaaaagccagacagugg

SEQ ID NO: 50407 - RNA, 22 nt, Artificial Sequence
  Synthetic
auaacuaaaagccagacagugg

SEQ ID NO: 50408 - RNA, 23 nt, Artificial Sequence
  Synthetic
uauaacuaaaagccagacagugg

SEQ ID NO: 50409 - RNA, 24 nt, Artificial Sequence
  Synthetic
auauaacuaaaagccagacagugg

SEQ ID NO: 50410 - RNA, 18 nt, Artificial Sequence
  Synthetic
ucccggaccgccgauugg

SEQ ID NO: 50411 - RNA, 19 nt, Artificial Sequence
  Synthetic
cucccggaccgccgauugg

SEQ ID NO: 50412 - RNA, 20 nt, Artificial Sequence
  Synthetic
  misc_feature (1)..(1): n is a, c, g, or u
ncucccggaccgccgauugg

SEQ ID NO: 50413 - RNA, 21 nt, Artificial Sequence
  Synthetic
  misc_feature (2)..(2): n is a, c, g, or u
uncucccggaccgccgauugg

SEQ ID NO: 50414 - RNA, 22 nt, Artificial Sequence
  Synthetic
  misc_feature (3)..(3): n is a, c, g, or u
uuncucccggaccgccgauugg

SEQ ID NO: 50415 - RNA, 23 nt, Artificial Sequence
  Synthetic
  misc_feature (1)..(1): n is a, c, g, or u
  misc_feature (4)..(4): n is a, c, g, or u
nuuncucccggaccgccgauugg

SEQ ID NO: 50416 - RNA, 24 nt, Artificial Sequence
  Synthetic
  misc_feature (2)..(2): n is a, c, g, or u
  misc_feature (5)..(5): n is a, c, g, or u
gnuuncucccggaccgccgauugg

SEQ ID NO: 50417 - RNA, 18 nt, Artificial Sequence
  Synthetic
  misc_feature (14)..(14): n is a, c, g, or u
  misc_feature (17)..(17): n is a, c, g, or u
guuuggaacagcancang

SEQ ID NO: 50418 - RNA, 19 nt, Artificial Sequence
  Synthetic
  misc_feature (15)..(15): n is a, c, g, or u
  misc_feature (18)..(18): n is a, c, g, or u
gguuuggaacagcancang

SEQ ID NO: 50419 - RNA, 20 nt, Artificial Sequence
  Synthetic
  misc_feature (16)..(16): n is a, c, g, or u
  misc_feature (19)..(19): n is a, c, g, or u
ggguuuggaacagcancang

SEQ ID NO: 50420 - RNA, 21 nt, Artificial Sequence
  Synthetic
  misc_feature (17)..(17): n is a, c, g, or u
  misc_feature (20)..(20): n is a, c, g, or u
aggguuuggaacagcancang

SEQ ID NO: 50421 - RNA, 22 nt, Artificial Sequence
  Synthetic
  misc_feature (18)..(18): n is a, c, g, or u
  misc_feature (21)..(21): n is a, c, g, or u
gaggguuuggaacagcancang

SEQ ID NO: 50422 - RNA, 23 nt, Artificial Sequence
  Synthetic
  misc_feature (19)..(19): n is a, c, g, or u
  misc_feature (22)..(22): n is a, c, g, or u
cgaggguuuggaacagcancang

SEQ ID NO: 50423 - RNA, 24 nt, Artificial Sequence
  Synthetic
  misc_feature (20)..(20): n is a, c, g, or u
  misc_feature (23)..(23): n is a, c, g, or u
ccgaggguuuggaacagcancang

SEQ ID NO: 50424 - RNA, 18 nt, Artificial Sequence
  Synthetic
  misc_feature (17)..(17): n is a, c, g, or u
cgaguaggucccgaacng

SEQ ID NO: 50425 - RNA, 19 nt, Artificial Sequence
  Synthetic
  misc_feature (18)..(18): n is a, c, g, or u
ucgaguaggucccgaacng

SEQ ID NO: 50426 - RNA, 20 nt, Artificial Sequence
  Synthetic
  misc_feature (19)..(19): n is a, c, g, or u
gucgaguaggucccgaacng

SEQ ID NO: 50427 - RNA, 21 nt, Artificial Sequence
  Synthetic
  misc_feature (20)..(20): n is a, c, g, or u
ugucgaguaggucccgaacng

SEQ ID NO: 50428 - RNA, 22 nt, Artificial Sequence
  Synthetic
  misc_feature (21)..(21): n is a, c, g, or u
gugucgaguaggucccgaacng

SEQ ID NO: 50429 - RNA, 23 nt, Artificial Sequence
  Synthetic
  misc_feature (22)..(22): n is a, c, g, or u
ggugucgaguaggucccgaacng

SEQ ID NO: 50430 - RNA, 24 nt, Artificial Sequence
  Synthetic
  misc_feature (23)..(23): n is a, c, g, or u
cggugucgaguaggucccgaacng

SEQ ID NO: 50431 - RNA, 18 nt, Artificial Sequence
  Synthetic
  misc_feature (17)..(17): n is a, c, g, or u
uugguggucuauaagcng

SEQ ID NO: 50432 - RNA, 19 nt, Artificial Sequence
  Synthetic
  misc_feature (18)..(18): n is a, c, g, or u
uuugguggucuauaagcng

SEQ ID NO: 50433 - RNA, 20 nt, Artificial Sequence
  Synthetic
  misc_feature (19)..(19): n is a, c, g, or u
auuugguggucuauaagcng

SEQ ID NO: 50434 - RNA, 21 nt, Artificial Sequence
  Synthetic
  misc_feature (20)..(20): n is a, c, g, or u
cauuugguggucuauaagcng

SEQ ID NO: 50435 - RNA, 22 nt, Artificial Sequence
  Synthetic
  misc_feature (21)..(21): n is a, c, g, or u
gcauuugguggucuauaagcng

SEQ ID NO: 50436 - RNA, 23 nt, Artificial Sequence
  Synthetic
  misc_feature (22)..(22): n is a, c, g, or u
ggcauuugguggucuauaagcng

SEQ ID NO: 50437 - RNA, 24 nt, Artificial Sequence
  Synthetic
  misc_feature (23)..(23): n is a, c, g, or u
gggcauuugguggucuauaagcng

SEQ ID NO: 50438 - RNA, 18 nt, Artificial Sequence
  Synthetic
  misc_feature (2)..(2): n is a, c, g, or u
  misc_feature (17)..(17): n is a, c, g, or u
gngccugguggaacugng

SEQ ID NO: 50439 - RNA, 19 nt, Artificial Sequence
  Synthetic
  misc_feature (3)..(3): n is a, c, g, or u
  misc_feature (18)..(18): n is a, c, g, or u
agngccugguggaacugng

SEQ ID NO: 50440 - RNA, 20 nt, Artificial Sequence
  Synthetic
  misc_feature (4)..(4): n is a, c, g, or u
  misc_feature (19)..(19): n is a, c, g, or u
cagngccugguggaacugng

SEQ ID NO: 50441 - RNA, 21 nt, Artificial Sequence
  Synthetic
  misc_feature (5)..(5): n is a, c, g, or u
  misc_feature (20)..(20): n is a, c, g, or u
acagngccugguggaacugng

SEQ ID NO: 50442 - RNA, 22 nt, Artificial Sequence
  Synthetic
  misc_feature (6)..(6): n is a, c, g, or u
  misc_feature (21)..(21): n is a, c, g, or u
aacagngccugguggaacugng

SEQ ID NO: 50443 - RNA, 23 nt, Artificial Sequence
  Synthetic
  misc_feature (1)..(1): n is a, c, g, or u
  misc_feature (7)..(7): n is a, c, g, or u
  misc_feature (22)..(22): n is a, c, g, or u
naacagngccugguggaacugng

SEQ ID NO: 50444 - RNA, 24 nt, Artificial Sequence
  Synthetic
  misc_feature (2)..(2): n is a, c, g, or u
  misc_feature (8)..(8): n is a, c, g, or u
  misc_feature (23)..(23): n is a, c, g, or u
cnaacagngccugguggaacugng

SEQ ID NO: 50445 - RNA, 18 nt, Artificial Sequence
  Synthetic
aggcauagcagcaggaug

SEQ ID NO: 50446 - RNA, 19 nt, Artificial Sequence
  Synthetic
gaggcauagcagcaggaug

SEQ ID NO: 50447 - RNA, 20 nt, Artificial Sequence
  Synthetic
ugaggcauagcagcaggaug

SEQ ID NO: 50448 - RNA, 21 nt, Artificial Sequence
  Synthetic
augaggcauagcagcaggaug

SEQ ID NO: 50449 - RNA, 22 nt, Artificial Sequence
  Synthetic
gaugaggcauagcagcaggaug

SEQ ID NO: 50450 - RNA, 23 nt, Artificial Sequence
  Synthetic
agaugaggcauagcagcaggaug

SEQ ID NO: 50451 - RNA, 24 nt, Artificial Sequence
  Synthetic
aagaugaggcauagcagcaggaug

SEQ ID NO: 50452 - RNA, 18 nt, Artificial Sequence
  Synthetic
  misc_feature (14)..(14): n is a, c, g, or u
uuccuaaagcccangaug

SEQ ID NO: 50453 - RNA, 19 nt, Artificial Sequence
  Synthetic
  misc_feature (15)..(15): n is a, c, g, or u
uuuccuaaagcccangaug

SEQ ID NO: 50454 - RNA, 20 nt, Artificial Sequence
  Synthetic
  misc_feature (16)..(16): n is a, c, g, or u
uuuuccuaaagcccangaug

SEQ ID NO: 50455 - RNA, 21 nt, Artificial Sequence
  Synthetic
  misc_feature (17)..(17): n is a, c, g, or u
auuuuccuaaagcccangaug

SEQ ID NO: 50456 - RNA, 22 nt, Artificial Sequence
  Synthetic
  misc_feature (18)..(18): n is a, c, g, or u
uauuuuccuaaagcccangaug

SEQ ID NO: 50457 - RNA, 23 nt, Artificial Sequence
  Synthetic
  misc_feature (19)..(19): n is a, c, g, or u
guauuuuccuaaagcccangaug

SEQ ID NO: 50458 - RNA, 24 nt, Artificial Sequence
  Synthetic
  misc_feature (20)..(20): n is a, c, g, or u
gguauuuuccuaaagcccangaug

SEQ ID NO: 50459 - RNA, 18 nt, Artificial Sequence
  Synthetic
  misc_feature (9)..(9): n is a, c, g, or u
aagucccanucgggacug

SEQ ID NO: 50460 - RNA, 19 nt, Artificial Sequence
  Synthetic
  misc_feature (10)..(10): n is a, c, g, or u
gaagucccanucgggacug

SEQ ID NO: 50461 - RNA, 20 nt, Artificial Sequence
  Synthetic
  misc_feature (11)..(11): n is a, c, g, or u
ugaagucccanucgggacug

SEQ ID NO: 50462 - RNA, 21 nt, Artificial Sequence
  Synthetic
  misc_feature (12)..(12): n is a, c, g, or u
uugaagucccanucgggacug

SEQ ID NO: 50463 - RNA, 22 nt, Artificial Sequence
  Synthetic
  misc_feature (13)..(13): n is a, c, g, or u
guugaagucccanucgggacug

SEQ ID NO: 50464 - RNA, 23 nt, Artificial Sequence
  Synthetic
  misc_feature (14)..(14): n is a, c, g, or u
uguugaagucccanucgggacug

SEQ ID NO: 50465 - RNA, 24 nt, Artificial Sequence
  Synthetic
  misc_feature (1)..(1): n is a, c, g, or u
  misc_feature (15)..(15): n is a, c, g, or u
nuguugaagucccanucgggacug

SEQ ID NO: 50466 - RNA, 18 nt, Artificial Sequence
  Synthetic
  misc_feature (7)..(7): n is a, c, g, or u
  misc_feature (13)..(13): n is a, c, g, or u
cggaucnaacagngccug

SEQ ID NO: 50467 - RNA, 19 nt, Artificial Sequence
  Synthetic
  misc_feature (8)..(8): n is a, c, g, or u
  misc_feature (14)..(14): n is a, c, g, or u
ucggaucnaacagngccug

SEQ ID NO: 50468 - RNA, 20 nt, Artificial Sequence
  Synthetic
  misc_feature (9)..(9): n is a, c, g, or u
  misc_feature (15)..(15): n is a, c, g, or u
cucggaucnaacagngccug

SEQ ID NO: 50469 - RNA, 21 nt, Artificial Sequence
  Synthetic
  misc_feature (10)..(10): n is a, c, g, or u
  misc_feature (16)..(16): n is a, c, g, or u
ccucggaucnaacagngccug

SEQ ID NO: 50470 - RNA, 22 nt, Artificial Sequence
  Synthetic
  misc_feature (11)..(11): n is a, c, g, or u
  misc_feature (17)..(17): n is a, c, g, or u
cccucggaucnaacagngccug

SEQ ID NO: 50471 - RNA, 23 nt, Artificial Sequence
  Synthetic
  misc_feature (12)..(12): n is a, c, g, or u
  misc_feature (18)..(18): n is a, c, g, or u
acccucggaucnaacagngccug

SEQ ID NO: 50472 - RNA, 24 nt, Artificial Sequence
  Synthetic
  misc_feature (13)..(13): n is a, c, g, or u
  misc_feature (19)..(19): n is a, c, g, or u
uacccucggaucnaacagngccug

SEQ ID NO: 50473 - RNA, 18 nt, Artificial Sequence
  Synthetic
aaaaguugcauggugcug

SEQ ID NO: 50474 - RNA, 19 nt, Artificial Sequence
  Synthetic
aaaaaguugcauggugcug

SEQ ID NO: 50475 - RNA, 20 nt, Artificial Sequence
  Synthetic
gaaaaaguugcauggugcug

SEQ ID NO: 50476 - RNA, 21 nt, Artificial Sequence
  Synthetic
ugaaaaaguugcauggugcug

SEQ ID NO: 50477 - RNA, 22 nt, Artificial Sequence
  Synthetic
gugaaaaaguugcauggugcug

SEQ ID NO: 50478 - RNA, 23 nt, Artificial Sequence
  Synthetic
ggugaaaaaguugcauggugcug

SEQ ID NO: 50479 - RNA, 24 nt, Artificial Sequence
  Synthetic
aggugaaaaaguugcauggugcug

SEQ ID NO: 50480 - RNA, 18 nt, Artificial Sequence
  Synthetic
acuaaaagccagacagug

SEQ ID NO: 50481 - RNA, 19 nt, Artificial Sequence
  Synthetic
aacuaaaagccagacagug

SEQ ID NO: 50482 - RNA, 20 nt, Artificial Sequence
  Synthetic
uaacuaaaagccagacagug

SEQ ID NO: 50483 - RNA, 21 nt, Artificial Sequence
  Synthetic
auaacuaaaagccagacagug

SEQ ID NO: 50484 - RNA, 22 nt, Artificial Sequence
  Synthetic
uauaacuaaaagccagacagug

SEQ ID NO: 50485 - RNA, 23 nt, Artificial Sequence
  Synthetic
auauaacuaaaagccagacagug

SEQ ID NO: 50486 - RNA, 24 nt, Artificial Sequence
  Synthetic
cauauaacuaaaagccagacagug

SEQ ID NO: 50487 - RNA, 18 nt, Artificial Sequence
  Synthetic
uggucuccaugcgacgug

SEQ ID NO: 50488 - RNA, 19 nt, Artificial Sequence
  Synthetic
guggucuccaugcgacgug

SEQ ID NO: 50489 - RNA, 20 nt, Artificial Sequence
  Synthetic
gguggucuccaugcgacgug

SEQ ID NO: 50490 - RNA, 21 nt, Artificial Sequence
  Synthetic
cgguggucuccaugcgacgug

SEQ ID NO: 50491 - RNA, 22 nt, Artificial Sequence
  Synthetic
acgguggucuccaugcgacgug

SEQ ID NO: 50492 - RNA, 23 nt, Artificial Sequence
  Synthetic
cacgguggucuccaugcgacgug

SEQ ID NO: 50493 - RNA, 24 nt, Artificial Sequence
  Synthetic
ucacgguggucuccaugcgacgug

SEQ ID NO: 50494 - RNA, 18 nt, Artificial Sequence
  Synthetic
  misc_feature (6)..(6): n is a, c, g, or u
ccccancaggccaccgug

SEQ ID NO: 50495 - RNA, 19 nt, Artificial Sequence
  Synthetic
  misc_feature (7)..(7): n is a, c, g, or u
accccancaggccaccgug

SEQ ID NO: 50496 - RNA, 20 nt, Artificial Sequence
  Synthetic
  misc_feature (8)..(8): n is a, c, g, or u
caccccancaggccaccgug

SEQ ID NO: 50497 - RNA, 21 nt, Artificial Sequence
  Synthetic
  misc_feature (9)..(9): n is a, c, g, or u
ccaccccancaggccaccgug

SEQ ID NO: 50498 - RNA, 22 nt, Artificial Sequence
  Synthetic
  misc_feature (10)..(10): n is a, c, g, or u
uccaccccancaggccaccgug

SEQ ID NO: 50499 - RNA, 23 nt, Artificial Sequence
  Synthetic
  misc_feature (11)..(11): n is a, c, g, or u
cuccaccccancaggccaccgug

SEQ ID NO: 50500 - RNA, 24 nt, Artificial Sequence
  Synthetic
  misc_feature (1)..(1): n is a, c, g, or u
  misc_feature (12)..(12): n is a, c, g, or u
ncuccaccccancaggccaccgug

SEQ ID NO: 50501 - RNA, 18 nt, Artificial Sequence
  Synthetic
  misc_feature (2)..(2): n is a, c, g, or u
gngugucucuuagaggug

SEQ ID NO: 50502 - RNA, 19 nt, Artificial Sequence
  Synthetic
  misc_feature (3)..(3): n is a, c, g, or u
ugngugucucuuagaggug

SEQ ID NO: 50503 - RNA, 20 nt, Artificial Sequence
  Synthetic
  misc_feature (4)..(4): n is a, c, g, or u
augngugucucuuagaggug

SEQ ID NO: 50504 - RNA, 21 nt, Artificial Sequence
  Synthetic
  misc_feature (5)..(5): n is a, c, g, or u
gaugngugucucuuagaggug

SEQ ID NO: 50505 - RNA, 22 nt, Artificial Sequence
  Synthetic
  misc_feature (6)..(6): n is a, c, g, or u
ggaugngugucucuuagaggug

SEQ ID NO: 50506 - RNA, 23 nt, Artificial Sequence
  Synthetic
  misc_feature (7)..(7): n is a, c, g, or u
uggaugngugucucuuagaggug

SEQ ID NO: 50507 - RNA, 24 nt, Artificial Sequence
  Synthetic
  misc_feature (8)..(8): n is a, c, g, or u
guggaugngugucucuuagaggug

SEQ ID NO: 50508 - RNA, 18 nt, Artificial Sequence
  Synthetic
  misc_feature (4)..(4): n is a, c, g, or u
  misc_feature (16)..(16): n is a, c, g, or u
caanuguccuuguuunug

SEQ ID NO: 50509 - RNA, 19 nt, Artificial Sequence
  Synthetic
  misc_feature (5)..(5): n is a, c, g, or u
  misc_feature (17)..(17): n is a, c, g, or u
ccaanuguccuuguuunug

SEQ ID NO: 50510 - RNA, 20 nt, Artificial Sequence
  Synthetic
  misc_feature (6)..(6): n is a, c, g, or u
  misc_feature (18)..(18): n is a, c, g, or u
gccaanuguccuuguuunug

SEQ ID NO: 50511 - RNA, 21 nt, Artificial Sequence
  Synthetic
  misc_feature (7)..(7): n is a, c, g, or u
  misc_feature (19)..(19): n is a, c, g, or u
ggccaanuguccuuguuunug

SEQ ID NO: 50512 - RNA, 22 nt, Artificial Sequence
  Synthetic
  misc_feature (8)..(8): n is a, c, g, or u
  misc_feature (20)..(20): n is a, c, g, or u
uggccaanuguccuuguuunug

SEQ ID NO: 50513 - RNA, 23 nt, Artificial Sequence
  Synthetic
  misc_feature (9)..(9): n is a, c, g, or u
  misc_feature (21)..(21): n is a, c, g, or u
uuggccaanuguccuuguuunug

SEQ ID NO: 50514 - RNA, 24 nt, Artificial Sequence
  Synthetic
  misc_feature (10)..(10): n is a, c, g, or u
  misc_feature (22)..(22): n is a, c, g, or u
auuggccaanuguccuuguuunug

SEQ ID NO: 50515 - RNA, 18 nt, Artificial Sequence
  Synthetic
cucccggaccgccgauug

SEQ ID NO: 50516 - RNA, 19 nt, Artificial Sequence
  Synthetic
  misc_feature (1)..(1): n is a, c, g, or u
ncucccggaccgccgauug

SEQ ID NO: 50517 - RNA, 20 nt, Artificial Sequence
  Synthetic
  misc_feature (2)..(2): n is a, c, g, or u
uncucccggaccgccgauug

SEQ ID NO: 50518 - RNA, 21 nt, Artificial Sequence
  Synthetic
  misc_feature (3)..(3): n is a, c, g, or u
uuncucccggaccgccgauug

SEQ ID NO: 50519 - RNA, 22 nt, Artificial Sequence
  Synthetic
  misc_feature (1)..(1): n is a, c, g, or u
  misc_feature (4)..(4): n is a, c, g, or u
nuuncucccggaccgccgauug

SEQ ID NO: 50520 - RNA, 23 nt, Artificial Sequence
  Synthetic
  misc_feature (2)..(2): n is a, c, g, or u
  misc_feature (5)..(5): n is a, c, g, or u
gnuuncucccggaccgccgauug

SEQ ID NO: 50521 - RNA, 24 nt, Artificial Sequence
  Synthetic
  misc_feature (3)..(3): n is a, c, g, or u
  misc_feature (6)..(6): n is a, c, g, or u
ggnuuncucccggaccgccgauug

SEQ ID NO: 50522 - RNA, 18 nt, Artificial Sequence
  Synthetic
gauagccaggacaaguug

SEQ ID NO: 50523 - RNA, 19 nt, Artificial Sequence
  Synthetic
cgauagccaggacaaguug

SEQ ID NO: 50524 - RNA, 20 nt, Artificial Sequence
  Synthetic
  misc_feature (1)..(1): n is a, c, g, or u
ncgauagccaggacaaguug

SEQ ID NO: 50525 - RNA, 21 nt, Artificial Sequence
  Synthetic
  misc_feature (2)..(2): n is a, c, g, or u
ancgauagccaggacaaguug

SEQ ID NO: 50526 - RNA, 22 nt, Artificial Sequence
  Synthetic
  misc_feature (3)..(3): n is a, c, g, or u
cancgauagccaggacaaguug

SEQ ID NO: 50527 - RNA, 23 nt, Artificial Sequence
  Synthetic
  misc_feature (4)..(4): n is a, c, g, or u
ccancgauagccaggacaaguug

SEQ ID NO: 50528 - RNA, 24 nt, Artificial Sequence
  Synthetic
  misc_feature (5)..(5): n is a, c, g, or u
uccancgauagccaggacaaguug

SEQ ID NO: 50529 - RNA, 18 nt, Artificial Sequence
  Synthetic
gaaaggccuuguaaguug

SEQ ID NO: 50530 - RNA, 19 nt, Artificial Sequence
  Synthetic
agaaaggccuuguaaguug

SEQ ID NO: 50531 - RNA, 20 nt, Artificial Sequence
  Synthetic
  misc_feature (1)..(1): n is a, c, g, or u
nagaaaggccuuguaaguug

SEQ ID NO: 50532 - RNA, 21 nt, Artificial Sequence
  Synthetic
  misc_feature (2)..(2): n is a, c, g, or u
anagaaaggccuuguaaguug

SEQ ID NO: 50533 - RNA, 22 nt, Artificial Sequence
  Synthetic
  misc_feature (3)..(3): n is a, c, g, or u
canagaaaggccuuguaaguug

SEQ ID NO: 50534 - RNA, 23 nt, Artificial Sequence
  Synthetic
  misc_feature (4)..(4): n is a, c, g, or u
acanagaaaggccuuguaaguug

SEQ ID NO: 50535 - RNA, 24 nt, Artificial Sequence
  Synthetic
  misc_feature (1)..(1): n is a, c, g, or u
  misc_feature (5)..(5): n is a, c, g, or u
nacanagaaaggccuuguaaguug

SEQ ID NO: 50536 - RNA, 18 nt, Artificial Sequence
  Synthetic
gcacaggccuggccguug

SEQ ID NO: 50537 - RNA, 19 nt, Artificial Sequence
  Synthetic
ggcacaggccuggccguug

SEQ ID NO: 50538 - RNA, 20 nt, Artificial Sequence
  Synthetic
uggcacaggccuggccguug

SEQ ID NO: 50539 - RNA, 21 nt, Artificial Sequence
  Synthetic
uuggcacaggccuggccguug

SEQ ID NO: 50540 - RNA, 22 nt, Artificial Sequence
  Synthetic
cuuggcacaggccuggccguug

SEQ ID NO: 50541 - RNA, 23 nt, Artificial Sequence
  Synthetic
acuuggcacaggccuggccguug

SEQ ID NO: 50542 - RNA, 24 nt, Artificial Sequence
  Synthetic
cacuuggcacaggccuggccguug

SEQ ID NO: 50543 - RNA, 18 nt, Artificial Sequence
  Synthetic
  misc_feature (7)..(7): n is a, c, g, or u
  misc_feature (18)..(18): n is a, c, g, or u
ggucgungauccuggaan

SEQ ID NO: 50544 - RNA, 19 nt, Artificial Sequence
  Synthetic
  misc_feature (8)..(8): n is a, c, g, or u
  misc_feature (19)..(19): n is a, c, g, or u
uggucgungauccuggaan

SEQ ID NO: 50545 - RNA, 20 nt, Artificial Sequence
  Synthetic
  misc_feature (9)..(9): n is a, c, g, or u
  misc_feature (20)..(20): n is a, c, g, or u
guggucgungauccuggaan

SEQ ID NO: 50546 - RNA, 21 nt, Artificial Sequence
  Synthetic
  misc_feature (10)..(10): n is a, c, g, or u
  misc_feature (21)..(21): n is a, c, g, or u
gguggucgungauccuggaan

SEQ ID NO: 50547 - RNA, 22 nt, Artificial Sequence
  Synthetic
  misc_feature (11)..(11): n is a, c, g, or u
  misc_feature (22)..(22): n is a, c, g, or u
ugguggucgungauccuggaan

SEQ ID NO: 50548 - RNA, 23 nt, Artificial Sequence
  Synthetic
  misc_feature (12)..(12): n is a, c, g, or u
  misc_feature (23)..(23): n is a, c, g, or u
cugguggucgungauccuggaan

SEQ ID NO: 50549 - RNA, 24 nt, Artificial Sequence
  Synthetic
  misc_feature (13)..(13): n is a, c, g, or u
  misc_feature (24)..(24): n is a, c, g, or u
gcugguggucgungauccuggaan

SEQ ID NO: 50550 - RNA, 18 nt, Artificial Sequence
  Synthetic
  misc_feature (18)..(18): n is a, c, g, or u
auccaguuggcagcacan

SEQ ID NO: 50551 - RNA, 19 nt, Artificial Sequence
  Synthetic
  misc_feature (19)..(19): n is a, c, g, or u
gauccaguuggcagcacan

SEQ ID NO: 50552 - RNA, 20 nt, Artificial Sequence
  Synthetic
  misc_feature (20)..(20): n is a, c, g, or u
ggauccaguuggcagcacan

SEQ ID NO: 50553 - RNA, 21 nt, Artificial Sequence
  Synthetic
  misc_feature (21)..(21): n is a, c, g, or u
aggauccaguuggcagcacan

SEQ ID NO: 50554 - RNA, 22 nt, Artificial Sequence
  Synthetic
  misc_feature (1)..(1): n is a, c, g, or u
  misc_feature (22)..(22): n is a, c, g, or u
naggauccaguuggcagcacan

SEQ ID NO: 50555 - RNA, 23 nt, Artificial Sequence
  Synthetic
  misc_feature (2)..(2): n is a, c, g, or u
  misc_feature (23)..(23): n is a, c, g, or u
gnaggauccaguuggcagcacan

SEQ ID NO: 50556 - RNA, 24 nt, Artificial Sequence
  Synthetic
  misc_feature (3)..(3): n is a, c, g, or u
  misc_feature (24)..(24): n is a, c, g, or u
cgnaggauccaguuggcagcacan

SEQ ID NO: 50557 - RNA, 18 nt, Artificial Sequence
  Synthetic
  misc_feature (4)..(4): n is a, c, g, or u
  misc_feature (18)..(18): n is a, c, g, or u
uuunuguugaagucccan

SEQ ID NO: 50558 - RNA, 19 nt, Artificial Sequence
  Synthetic
  misc_feature (5)..(5): n is a, c, g, or u
  misc_feature (19)..(19): n is a, c, g, or u
guuunuguugaagucccan

SEQ ID NO: 50559 - RNA, 20 nt, Artificial Sequence
  Synthetic
  misc_feature (6)..(6): n is a, c, g, or u
  misc_feature (20)..(20): n is a, c, g, or u
uguuunuguugaagucccan

SEQ ID NO: 50560 - RNA, 21 nt, Artificial Sequence
  Synthetic
  misc_feature (7)..(7): n is a, c, g, or u
  misc_feature (21)..(21): n is a, c, g, or u
uuguuunuguugaagucccan

SEQ ID NO: 50561 - RNA, 22 nt, Artificial Sequence
  Synthetic
  misc_feature (8)..(8): n is a, c, g, or u
  misc_feature (22)..(22): n is a, c, g, or u
cuuguuunuguugaagucccan

SEQ ID NO: 50562 - RNA, 23 nt, Artificial Sequence
  Synthetic
  misc_feature (9)..(9): n is a, c, g, or u
  misc_feature (23)..(23): n is a, c, g, or u
ccuuguuunuguugaagucccan

SEQ ID NO: 50563 - RNA, 24 nt, Artificial Sequence
  Synthetic
  misc_feature (10)..(10): n is a, c, g, or u
  misc_feature (24)..(24): n is a, c, g, or u
uccuuguuunuguugaagucccan

SEQ ID NO: 50564 - RNA, 18 nt, Artificial Sequence
  Synthetic
  misc_feature (7)..(7): n is a, c, g, or u
  misc_feature (10)..(10): n is a, c, g, or u
  misc_feature (13)..(13): n is a, c, g, or u
  misc_feature (18)..(18): n is a, c, g, or u
uuuaaunccnuunuccan

SEQ ID NO: 50565 - RNA, 19 nt, Artificial Sequence
  Synthetic
  misc_feature (8)..(8): n is a, c, g, or u
  misc_feature (11)..(11): n is a, c, g, or u
  misc_feature (14)..(14): n is a, c, g, or u
  misc_feature (19)..(19): n is a, c, g, or u
guuuaaunccnuunuccan

SEQ ID NO: 50566 - RNA, 20 nt, Artificial Sequence
  Synthetic
  misc_feature (9)..(9): n is a, c, g, or u
  misc_feature (12)..(12): n is a, c, g, or u
  misc_feature (15)..(15): n is a, c, g, or u
  misc_feature (20)..(20): n is a, c, g, or u
gguuuaaunccnuunuccan

SEQ ID NO: 50567 - RNA, 21 nt, Artificial Sequence
  Synthetic
  misc_feature (1)..(1): n is a, c, g, or u
  misc_feature (10)..(10): n is a, c, g, or u
  misc_feature (13)..(13): n is a, c, g, or u
  misc_feature (16)..(16): n is a, c, g, or u
  misc_feature (21)..(21): n is a, c, g, or u
ngguuuaaunccnuunuccan

SEQ ID NO: 50568 - RNA, 22 nt, Artificial Sequence
  Synthetic
  misc_feature (2)..(2): n is a, c, g, or u
  misc_feature (11)..(11): n is a, c, g, or u
  misc_feature (14)..(14): n is a, c, g, or u
  misc_feature (17)..(17): n is a, c, g, or u
  misc_feature (22)..(22): n is a, c, g, or u
angguuuaaunccnuunuccan

SEQ ID NO: 50569 - RNA, 23 nt, Artificial Sequence
  Synthetic
  misc_feature (3)..(3): n is a, c, g, or u
  misc_feature (12)..(12): n is a, c, g, or u
  misc_feature (15)..(15): n is a, c, g, or u
  misc_feature (18)..(18): n is a, c, g, or u
  misc_feature (23)..(23): n is a, c, g, or u
uangguuuaaunccnuunuccan

SEQ ID NO: 50570 - RNA, 24 nt, Artificial Sequence
  Synthetic
  misc_feature (4)..(4): n is a, c, g, or u
  misc_feature (13)..(13): n is a, c, g, or u
  misc_feature (16)..(16): n is a, c, g, or u
  misc_feature (19)..(19): n is a, c, g, or u
  misc_feature (24)..(24): n is a, c, g, or u
auangguuuaaunccnuunuccan

SEQ ID NO: 50571 - RNA, 18 nt, Artificial Sequence
  Synthetic
  misc_feature (15)..(15): n is a, c, g, or u
  misc_feature (18)..(18): n is a, c, g, or u
gguuuggaacagcancan

SEQ ID NO: 50572 - RNA, 19 nt, Artificial Sequence
  Synthetic
  misc_feature (16)..(16): n is a, c, g, or u
  misc_feature (19)..(19): n is a, c, g, or u
ggguuuggaacagcancan

SEQ ID NO: 50573 - RNA, 20 nt, Artificial Sequence
  Synthetic
  misc_feature (17)..(17): n is a, c, g, or u
  misc_feature (20)..(20): n is a, c, g, or u
aggguuuggaacagcancan

SEQ ID NO: 50574 - RNA, 21 nt, Artificial Sequence
  Synthetic
  misc_feature (18)..(18): n is a, c, g, or u
  misc_feature (21)..(21): n is a, c, g, or u
gaggguuuggaacagcancan

SEQ ID NO: 50575 - RNA, 22 nt, Artificial Sequence
  Synthetic
  misc_feature (19)..(19): n is a, c, g, or u
  misc_feature (22)..(22): n is a, c, g, or u
cgaggguuuggaacagcancan

SEQ ID NO: 50576 - RNA, 23 nt, Artificial Sequence
  Synthetic
  misc_feature (20)..(20): n is a, c, g, or u
  misc_feature (23)..(23): n is a, c, g, or u
ccgaggguuuggaacagcancan

SEQ ID NO: 50577 - RNA, 24 nt, Artificial Sequence
  Synthetic
  misc_feature (21)..(21): n is a, c, g, or u
  misc_feature (24)..(24): n is a, c, g, or u
uccgaggguuuggaacagcancan

SEQ ID NO: 50578 - RNA, 18 nt, Artificial Sequence
  Synthetic
  misc_feature (2)..(2): n is a, c, g, or u
  misc_feature (6)..(6): n is a, c, g, or u
  misc_feature (15)..(15): n is a, c, g, or u
  misc_feature (18)..(18): n is a, c, g, or u
gnaggnacaguagangan

SEQ ID NO: 50579 - RNA, 19 nt, Artificial Sequence
  Synthetic
  misc_feature (3)..(3): n is a, c, g, or u
  misc_feature (7)..(7): n is a, c, g, or u
  misc_feature (16)..(16): n is a, c, g, or u
  misc_feature (19)..(19): n is a, c, g, or u
agnaggnacaguagangan

SEQ ID NO: 50580 - RNA, 20 nt, Artificial Sequence
  Synthetic
  misc_feature (4)..(4): n is a, c, g, or u
  misc_feature (8)..(8): n is a, c, g, or u
  misc_feature (17)..(17): n is a, c, g, or u
  misc_feature (20)..(20): n is a, c, g, or u
aagnaggnacaguagangan

SEQ ID NO: 50581 - RNA, 21 nt, Artificial Sequence
  Synthetic
  misc_feature (5)..(5): n is a, c, g, or u
  misc_feature (9)..(9): n is a, c, g, or u
  misc_feature (18)..(18): n is a, c, g, or u
  misc_feature (21)..(21): n is a, c, g, or u
aaagnaggnacaguagangan

SEQ ID NO: 50582 - RNA, 22 nt, Artificial Sequence
  Synthetic
  misc_feature (1)..(1): n is a, c, g, or u
  misc_feature (6)..(6): n is a, c, g, or u
  misc_feature (10)..(10): n is a, c, g, or u
  misc_feature (19)..(19): n is a, c, g, or u
  misc_feature (22)..(22): n is a, c, g, or u
naaagnaggnacaguagangan

SEQ ID NO: 50583 - RNA, 23 nt, Artificial Sequence
  Synthetic
  misc_feature (2)..(2): n is a, c, g, or u
  misc_feature (7)..(7): n is a, c, g, or u
  misc_feature (11)..(11): n is a, c, g, or u
  misc_feature (20)..(20): n is a, c, g, or u
  misc_feature (23)..(23): n is a, c, g, or u
unaaagnaggnacaguagangan

SEQ ID NO: 50584 - RNA, 24 nt, Artificial Sequence
  Synthetic
  misc_feature (3)..(3): n is a, c, g, or u
  misc_feature (8)..(8): n is a, c, g, or u
  misc_feature (12)..(12): n is a, c, g, or u
  misc_feature (21)..(21): n is a, c, g, or u
  misc_feature (24)..(24): n is a, c, g, or u
uunaaagnaggnacaguagangan

SEQ ID NO: 50585 - RNA, 18 nt, Artificial Sequence
  Synthetic
  misc_feature (18)..(18): n is a, c, g, or u
ggacugcuggaauuugcn

SEQ ID NO: 50586 - RNA, 19 nt, Artificial Sequence
  Synthetic
  misc_feature (19)..(19): n is a, c, g, or u
gggacugcuggaauuugcn

SEQ ID NO: 50587 - RNA, 20 nt, Artificial Sequence
  Synthetic
  misc_feature (20)..(20): n is a, c, g, or u
cgggacugcuggaauuugcn

SEQ ID NO: 50588 - RNA, 21 nt, Artificial Sequence
  Synthetic
  misc_feature (21)..(21): n is a, c, g, or u
ucgggacugcuggaauuugcn

SEQ ID NO: 50589 - RNA, 22 nt, Artificial Sequence
  Synthetic
  misc_feature (1)..(1): n is a, c, g, or u
  misc_feature (22)..(22): n is a, c, g, or u
nucgggacugcuggaauuugcn

SEQ ID NO: 50590 - RNA, 23 nt, Artificial Sequence
  Synthetic
  misc_feature (2)..(2): n is a, c, g, or u
  misc_feature (23)..(23): n is a, c, g, or u
anucgggacugcuggaauuugcn

SEQ ID NO: 50591 - RNA, 24 nt, Artificial Sequence
  Synthetic
  misc_feature (3)..(3): n is a, c, g, or u
  misc_feature (24)..(24): n is a, c, g, or u
canucgggacugcuggaauuugcn

SEQ ID NO: 50592 - RNA, 18 nt, Artificial Sequence
  Synthetic
  misc_feature (13)..(13): n is a, c, g, or u
  misc_feature (16)..(16): n is a, c, g, or u
  misc_feature (18)..(18): n is a, c, g, or u
gacuguuggcaancuncn

SEQ ID NO: 50593 - RNA, 19 nt, Artificial Sequence
  Synthetic
  misc_feature (14)..(14): n is a, c, g, or u
  misc_feature (17)..(17): n is a, c, g, or u
  misc_feature (19)..(19): n is a, c, g, or u
agacuguuggcaancuncn

SEQ ID NO: 50594 - RNA, 20 nt, Artificial Sequence
  Synthetic
  misc_feature (15)..(15): n is a, c, g, or u
  misc_feature (18)..(18): n is a, c, g, or u
  misc_feature (20)..(20): n is a, c, g, or u
aagacuguuggcaancuncn

SEQ ID NO: 50595 - RNA, 21 nt, Artificial Sequence
  Synthetic
  misc_feature (16)..(16): n is a, c, g, or u
  misc_feature (19)..(19): n is a, c, g, or u
  misc_feature (21)..(21): n is a, c, g, or u
uaagacuguuggcaancuncn

SEQ ID NO: 50596 - RNA, 22 nt, Artificial Sequence
  Synthetic
  misc_feature (17)..(17): n is a, c, g, or u
  misc_feature (20)..(20): n is a, c, g, or u
  misc_feature (22)..(22): n is a, c, g, or u
guaagacuguuggcaancuncn

SEQ ID NO: 50597 - RNA, 23 nt, Artificial Sequence
  Synthetic
  misc_feature (18)..(18): n is a, c, g, or u
  misc_feature (21)..(21): n is a, c, g, or u
  misc_feature (23)..(23): n is a, c, g, or u
uguaagacuguuggcaancuncn

SEQ ID NO: 50598 - RNA, 24 nt, Artificial Sequence
  Synthetic
  misc_feature (19)..(19): n is a, c, g, or u
  misc_feature (22)..(22): n is a, c, g, or u
  misc_feature (24)..(24): n is a, c, g, or u
auguaagacuguuggcaancuncn

SEQ ID NO: 50599 - RNA, 18 nt, Artificial Sequence
  Synthetic
  misc_feature (18)..(18): n is a, c, g, or u
gagcaggguucugugucn

SEQ ID NO: 50600 - RNA, 19 nt, Artificial Sequence
  Synthetic
  misc_feature (19)..(19): n is a, c, g, or u
ggagcaggguucugugucn

SEQ ID NO: 50601 - RNA, 20 nt, Artificial Sequence
  Synthetic
  misc_feature (20)..(20): n is a, c, g, or u
cggagcaggguucugugucn

SEQ ID NO: 50602 - RNA, 21 nt, Artificial Sequence
  Synthetic
  misc_feature (21)..(21): n is a, c, g, or u
ucggagcaggguucugugucn

SEQ ID NO: 50603 - RNA, 22 nt, Artificial Sequence
  Synthetic
  misc_feature (22)..(22): n is a, c, g, or u
gucggagcaggguucugugucn

SEQ ID NO: 50604 - RNA, 23 nt, Artificial Sequence
  Synthetic
  misc_feature (23)..(23): n is a, c, g, or u
agucggagcaggguucugugucn

SEQ ID NO: 50605 - RNA, 24 nt, Artificial Sequence
  Synthetic
  misc_feature (24)..(24): n is a, c, g, or u
uagucggagcaggguucugugucn

SEQ ID NO: 50606 - RNA, 18 nt, Artificial Sequence
  Synthetic
  misc_feature (18)..(18): n is a, c, g, or u
cgagggaguucuucuucn

SEQ ID NO: 50607 - RNA, 19 nt, Artificial Sequence
  Synthetic
  misc_feature (19)..(19): n is a, c, g, or u
gcgagggaguucuucuucn

SEQ ID NO: 50608 - RNA, 20 nt, Artificial Sequence
  Synthetic
  misc_feature (20)..(20): n is a, c, g, or u
ggcgagggaguucuucuucn

SEQ ID NO: 50609 - RNA, 21 nt, Artificial Sequence
  Synthetic
  misc_feature (21)..(21): n is a, c, g, or u
aggcgagggaguucuucuucn

SEQ ID NO: 50610 - RNA, 22 nt, Artificial Sequence
  Synthetic
  misc_feature (22)..(22): n is a, c, g, or u
gaggcgagggaguucuucuucn

SEQ ID NO: 50611 - RNA, 23 nt, Artificial Sequence
  Synthetic
  misc_feature (23)..(23): n is a, c, g, or u
cgaggcgagggaguucuucuucn

SEQ ID NO: 50612 - RNA, 24 nt, Artificial Sequence
  Synthetic
  misc_feature (24)..(24): n is a, c, g, or u
gcgaggcgagggaguucuucuucn

SEQ ID NO: 50613 - RNA, 18 nt, Artificial Sequence
  Synthetic
  misc_feature (12)..(12): n is a, c, g, or u
  misc_feature (18)..(18): n is a, c, g, or u
agccccaagcgnccccgn

SEQ ID NO: 50614 - RNA, 19 nt, Artificial Sequence
  Synthetic
  misc_feature (1)..(1): n is a, c, g, or u
  misc_feature (13)..(13): n is a, c, g, or u
  misc_feature (19)..(19): n is a, c, g, or u
nagccccaagcgnccccgn

SEQ ID NO: 50615 - RNA, 20 nt, Artificial Sequence
  Synthetic
  misc_feature (2)..(2): n is a, c, g, or u
  misc_feature (14)..(14): n is a, c, g, or u
  misc_feature (20)..(20): n is a, c, g, or u
anagccccaagcgnccccgn

SEQ ID NO: 50616 - RNA, 21 nt, Artificial Sequence
  Synthetic
  misc_feature (3)..(3): n is a, c, g, or u
  misc_feature (15)..(15): n is a, c, g, or u
  misc_feature (21)..(21): n is a, c, g, or u
uanagccccaagcgnccccgn

SEQ ID NO: 50617 - RNA, 22 nt, Artificial Sequence
  Synthetic
  misc_feature (1)..(1): n is a, c, g, or u
  misc_feature (4)..(4): n is a, c, g, or u
  misc_feature (16)..(16): n is a, c, g, or u
  misc_feature (22)..(22): n is a, c, g, or u
nuanagccccaagcgnccccgn

SEQ ID NO: 50618 - RNA, 23 nt, Artificial Sequence
  Synthetic
  misc_feature (2)..(2): n is a, c, g, or u
  misc_feature (5)..(5): n is a, c, g, or u
  misc_feature (17)..(17): n is a, c, g, or u
  misc_feature (23)..(23): n is a, c, g, or u
gnuanagccccaagcgnccccgn

SEQ ID NO: 50619 - RNA, 24 nt, Artificial Sequence
  Synthetic
  misc_feature (3)..(3): n is a, c, g, or u
  misc_feature (6)..(6): n is a, c, g, or u
  misc_feature (18)..(18): n is a, c, g, or u
  misc_feature (24)..(24): n is a, c, g, or u
cgnuanagccccaagcgnccccgn

SEQ ID NO: 50620 - RNA, 18 nt, Artificial Sequence
  Synthetic
  misc_feature (3)..(3): n is a, c, g, or u
  misc_feature (18)..(18): n is a, c, g, or u
canccgagcagccauggn

SEQ ID NO: 50621 - RNA, 19 nt, Artificial Sequence
  Synthetic
  misc_feature (4)..(4): n is a, c, g, or u
  misc_feature (19)..(19): n is a, c, g, or u
acanccgagcagccauggn

SEQ ID NO: 50622 - RNA, 20 nt, Artificial Sequence
  Synthetic
  misc_feature (5)..(5): n is a, c, g, or u
  misc_feature (20)..(20): n is a, c, g, or u
cacanccgagcagccauggn

SEQ ID NO: 50623 - RNA, 21 nt, Artificial Sequence
  Synthetic
  misc_feature (6)..(6): n is a, c, g, or u
  misc_feature (21)..(21): n is a, c, g, or u
gcacanccgagcagccauggn

SEQ ID NO: 50624 - RNA, 22 nt, Artificial Sequence
  Synthetic
  misc_feature (7)..(7): n is a, c, g, or u
  misc_feature (22)..(22): n is a, c, g, or u
agcacanccgagcagccauggn

SEQ ID NO: 50625 - RNA, 23 nt, Artificial Sequence
  Synthetic
  misc_feature (8)..(8): n is a, c, g, or u
  misc_feature (23)..(23): n is a, c, g, or u
cagcacanccgagcagccauggn

SEQ ID NO: 50626 - RNA, 24 nt, Artificial Sequence
  Synthetic
  misc_feature (9)..(9): n is a, c, g, or u
  misc_feature (24)..(24): n is a, c, g, or u
gcagcacanccgagcagccauggn

SEQ ID NO: 50627 - RNA, 18 nt, Artificial Sequence
  Synthetic
aaaaguaaggcaggaaau

SEQ ID NO: 50628 - RNA, 19 nt, Artificial Sequence
  Synthetic
caaaaguaaggcaggaaau

SEQ ID NO: 50629 - RNA, 20 nt, Artificial Sequence
  Synthetic
ccaaaaguaaggcaggaaau

SEQ ID NO: 50630 - RNA, 21 nt, Artificial Sequence
  Synthetic
uccaaaaguaaggcaggaaau

SEQ ID NO: 50631 - RNA, 22 nt, Artificial Sequence
  Synthetic
uuccaaaaguaaggcaggaaau

SEQ ID NO: 50632 - RNA, 23 nt, Artificial Sequence
  Synthetic
cuuccaaaaguaaggcaggaaau

SEQ ID NO: 50633 - RNA, 24 nt, Artificial Sequence
  Synthetic
ucuuccaaaaguaaggcaggaaau

SEQ ID NO: 50634 - RNA, 18 nt, Artificial Sequence
  Synthetic
uccaaggaauacuaacau

SEQ ID NO: 50635 - RNA, 19 nt, Artificial Sequence
  Synthetic
guccaaggaauacuaacau

SEQ ID NO: 50636 - RNA, 20 nt, Artificial Sequence
  Synthetic
aguccaaggaauacuaacau

SEQ ID NO: 50637 - RNA, 21 nt, Artificial Sequence
  Synthetic
gaguccaaggaauacuaacau

SEQ ID NO: 50638 - RNA, 22 nt, Artificial Sequence
  Synthetic
ugaguccaaggaauacuaacau

SEQ ID NO: 50639 - RNA, 23 nt, Artificial Sequence
  Synthetic
augaguccaaggaauacuaacau

SEQ ID NO: 50640 - RNA, 24 nt, Artificial Sequence
  Synthetic
uaugaguccaaggaauacuaacau

SEQ ID NO: 50641 - RNA, 18 nt, Artificial Sequence
  Synthetic
  misc_feature (6)..(6): n is a, c, g, or u
acaggnauacagaggcau

SEQ ID NO: 50642 - RNA, 19 nt, Artificial Sequence
  Synthetic
  misc_feature (7)..(7): n is a, c, g, or u
uacaggnauacagaggcau

SEQ ID NO: 50643 - RNA, 20 nt, Artificial Sequence
  Synthetic
  misc_feature (8)..(8): n is a, c, g, or u
auacaggnauacagaggcau

SEQ ID NO: 50644 - RNA, 21 nt, Artificial Sequence
  Synthetic
  misc_feature (1)..(1): n is a, c, g, or u
  misc_feature (9)..(9): n is a, c, g, or u
nauacaggnauacagaggcau

SEQ ID NO: 50645 - RNA, 22 nt, Artificial Sequence
  Synthetic
  misc_feature (2)..(2): n is a, c, g, or u
  misc_feature (10)..(10): n is a, c, g, or u
unauacaggnauacagaggcau

SEQ ID NO: 50646 - RNA, 23 nt, Artificial Sequence
  Synthetic
  misc_feature (3)..(3): n is a, c, g, or u
  misc_feature (11)..(11): n is a, c, g, or u
gunauacaggnauacagaggcau

SEQ ID NO: 50647 - RNA, 24 nt, Artificial Sequence
  Synthetic
  misc_feature (4)..(4): n is a, c, g, or u
  misc_feature (12)..(12): n is a, c, g, or u
agunauacaggnauacagaggcau

SEQ ID NO: 50648 - RNA, 18 nt, Artificial Sequence
  Synthetic
  misc_feature (9)..(9): n is a, c, g, or u
gcacacggnccggcagau

SEQ ID NO: 50649 - RNA, 19 nt, Artificial Sequence
  Synthetic
  misc_feature (10)..(10): n is a, c, g, or u
ugcacacggnccggcagau

SEQ ID NO: 50650 - RNA, 20 nt, Artificial Sequence
  Synthetic
  misc_feature (11)..(11): n is a, c, g, or u
gugcacacggnccggcagau

SEQ ID NO: 50651 - RNA, 21 nt, Artificial Sequence
  Synthetic
  misc_feature (12)..(12): n is a, c, g, or u
agugcacacggnccggcagau

SEQ ID NO: 50652 - RNA, 22 nt, Artificial Sequence
  Synthetic
  misc_feature (13)..(13): n is a, c, g, or u
aagugcacacggnccggcagau

SEQ ID NO: 50653 - RNA, 23 nt, Artificial Sequence
  Synthetic
  misc_feature (14)..(14): n is a, c, g, or u
gaagugcacacggnccggcagau

SEQ ID NO: 50654 - RNA, 24 nt, Artificial Sequence
  Synthetic
  misc_feature (15)..(15): n is a, c, g, or u
cgaagugcacacggnccggcagau

SEQ ID NO: 50655 - RNA, 18 nt, Artificial Sequence
  Synthetic
  misc_feature (15)..(15): n is a, c, g, or u
cggaaguguggauangau

SEQ ID NO: 50656 - RNA, 19 nt, Artificial Sequence
  Synthetic
  misc_feature (16)..(16): n is a, c, g, or u
ccggaaguguggauangau

SEQ ID NO: 50657 - RNA, 20 nt, Artificial Sequence
  Synthetic
  misc_feature (17)..(17): n is a, c, g, or u
uccggaaguguggauangau

SEQ ID NO: 50658 - RNA, 21 nt, Artificial Sequence
  Synthetic
  misc_feature (18)..(18): n is a, c, g, or u
uuccggaaguguggauangau

SEQ ID NO: 50659 - RNA, 22 nt, Artificial Sequence
  Synthetic
  misc_feature (19)..(19): n is a, c, g, or u
uuuccggaaguguggauangau

SEQ ID NO: 50660 - RNA, 23 nt, Artificial Sequence
  Synthetic
  misc_feature (20)..(20): n is a, c, g, or u
guuuccggaaguguggauangau

SEQ ID NO: 50661 - RNA, 24 nt, Artificial Sequence
  Synthetic
  misc_feature (21)..(21): n is a, c, g, or u
aguuuccggaaguguggauangau

SEQ ID NO: 50662 - RNA, 18 nt, Artificial Sequence
  Synthetic
  misc_feature (4)..(4): n is a, c, g, or u
uucnagaagauugaugau

SEQ ID NO: 50663 - RNA, 19 nt, Artificial Sequence
  Synthetic
  misc_feature (5)..(5): n is a, c, g, or u
cuucnagaagauugaugau

SEQ ID NO: 50664 - RNA, 20 nt, Artificial Sequence
  Synthetic
  misc_feature (6)..(6): n is a, c, g, or u
ucuucnagaagauugaugau

SEQ ID NO: 50665 - RNA, 21 nt, Artificial Sequence
  Synthetic
  misc_feature (7)..(7): n is a, c, g, or u
gucuucnagaagauugaugau

SEQ ID NO: 50666 - RNA, 22 nt, Artificial Sequence
  Synthetic
  misc_feature (8)..(8): n is a, c, g, or u
agucuucnagaagauugaugau

SEQ ID NO: 50667 - RNA, 23 nt, Artificial Sequence
  Synthetic
  misc_feature (9)..(9): n is a, c, g, or u
cagucuucnagaagauugaugau

SEQ ID NO: 50668 - RNA, 24 nt, Artificial Sequence
  Synthetic
  misc_feature (10)..(10): n is a, c, g, or u
ccagucuucnagaagauugaugau

SEQ ID NO: 50669 - RNA, 18 nt, Artificial Sequence
  Synthetic
aggagguugguaagugau

SEQ ID NO: 50670 - RNA, 19 nt, Artificial Sequence
  Synthetic
caggagguugguaagugau

SEQ ID NO: 50671 - RNA, 20 nt, Artificial Sequence
  Synthetic
acaggagguugguaagugau

SEQ ID NO: 50672 - RNA, 21 nt, Artificial Sequence
  Synthetic
gacaggagguugguaagugau

SEQ ID NO: 50673 - RNA, 22 nt, Artificial Sequence
  Synthetic
ggacaggagguugguaagugau

SEQ ID NO: 50674 - RNA, 23 nt, Artificial Sequence
  Synthetic
aggacaggagguugguaagugau

SEQ ID NO: 50675 - RNA, 24 nt, Artificial Sequence
  Synthetic
gaggacaggagguugguaagugau

SEQ ID NO: 50676 - RNA, 18 nt, Artificial Sequence
  Synthetic
  misc_feature (1)..(1): n is a, c, g, or u
  misc_feature (7)..(7): n is a, c, g, or u
ncacaanauagcuugccu

SEQ ID NO: 50677 - RNA, 19 nt, Artificial Sequence
  Synthetic
  misc_feature (2)..(2): n is a, c, g, or u
  misc_feature (8)..(8): n is a, c, g, or u
ancacaanauagcuugccu

SEQ ID NO: 50678 - RNA, 20 nt, Artificial Sequence
  Synthetic
  misc_feature (3)..(3): n is a, c, g, or u
  misc_feature (9)..(9): n is a, c, g, or u
cancacaanauagcuugccu

SEQ ID NO: 50679 - RNA, 21 nt, Artificial Sequence
  Synthetic
  misc_feature (4)..(4): n is a, c, g, or u
  misc_feature (10)..(10): n is a, c, g, or u
ccancacaanauagcuugccu

SEQ ID NO: 50680 - RNA, 22 nt, Artificial Sequence
  Synthetic
  misc_feature (5)..(5): n is a, c, g, or u
  misc_feature (11)..(11): n is a, c, g, or u
cccancacaanauagcuugccu

SEQ ID NO: 50681 - RNA, 23 nt, Artificial Sequence
  Synthetic
  misc_feature (6)..(6): n is a, c, g, or u
  misc_feature (12)..(12): n is a, c, g, or u
ccccancacaanauagcuugccu

SEQ ID NO: 50682 - RNA, 24 nt, Artificial Sequence
  Synthetic
  misc_feature (7)..(7): n is a, c, g, or u
  misc_feature (13)..(13): n is a, c, g, or u
accccancacaanauagcuugccu

SEQ ID NO: 50683 - RNA, 18 nt, Artificial Sequence
  Synthetic
gccacccaaggcacagcu

SEQ ID NO: 50684 - RNA, 19 nt, Artificial Sequence
  Synthetic
agccacccaaggcacagcu

SEQ ID NO: 50685 - RNA, 20 nt, Artificial Sequence
  Synthetic
aagccacccaaggcacagcu

SEQ ID NO: 50686 - RNA, 21 nt, Artificial Sequence
  Synthetic
aaagccacccaaggcacagcu

SEQ ID NO: 50687 - RNA, 22 nt, Artificial Sequence
  Synthetic
caaagccacccaaggcacagcu

SEQ ID NO: 50688 - RNA, 23 nt, Artificial Sequence
  Synthetic
ccaaagccacccaaggcacagcu

SEQ ID NO: 50689 - RNA, 24 nt, Artificial Sequence
  Synthetic
cccaaagccacccaaggcacagcu

SEQ ID NO: 50690 - RNA, 18 nt, Artificial Sequence
  Synthetic
  misc_feature (1)..(1): n is a, c, g, or u
nuucgcuccagaccggcu

SEQ ID NO: 50691 - RNA, 19 nt, Artificial Sequence
  Synthetic
  misc_feature (1)..(2): n is a, c, g, or u
nnuucgcuccagaccggcu

SEQ ID NO: 50692 - RNA, 20 nt, Artificial Sequence
  Synthetic
  misc_feature (2)..(3): n is a, c, g, or u
annuucgcuccagaccggcu

SEQ ID NO: 50693 - RNA, 21 nt, Artificial Sequence
  Synthetic
  misc_feature (3)..(4): n is a, c, g, or u
gannuucgcuccagaccggcu

SEQ ID NO: 50694 - RNA, 22 nt, Artificial Sequence
  Synthetic
  misc_feature (4)..(5): n is a, c, g, or u
ugannuucgcuccagaccggcu

SEQ ID NO: 50695 - RNA, 23 nt, Artificial Sequence
  Synthetic
  misc_feature (5)..(6): n is a, c, g, or u
augannuucgcuccagaccggcu

SEQ ID NO: 50696 - RNA, 24 nt, Artificial Sequence
  Synthetic
  misc_feature (6)..(7): n is a, c, g, or u
gaugannuucgcuccagaccggcu

SEQ ID NO: 50697 - RNA, 18 nt, Artificial Sequence
  Synthetic
  misc_feature (10)..(10): n is a, c, g, or u
cuguggaugngugucucu

SEQ ID NO: 50698 - RNA, 19 nt, Artificial Sequence
  Synthetic
  misc_feature (11)..(11): n is a, c, g, or u
ccuguggaugngugucucu

SEQ ID NO: 50699 - RNA, 20 nt, Artificial Sequence
  Synthetic
  misc_feature (12)..(12): n is a, c, g, or u
gccuguggaugngugucucu

SEQ ID NO: 50700 - RNA, 21 nt, Artificial Sequence
  Synthetic
  misc_feature (1)..(1): n is a, c, g, or u
  misc_feature (13)..(13): n is a, c, g, or u
ngccuguggaugngugucucu

SEQ ID NO: 50701 - RNA, 22 nt, Artificial Sequence
  Synthetic
  misc_feature (2)..(2): n is a, c, g, or u
  misc_feature (14)..(14): n is a, c, g, or u
ungccuguggaugngugucucu

SEQ ID NO: 50702 - RNA, 23 nt, Artificial Sequence
  Synthetic
  misc_feature (3)..(3): n is a, c, g, or u
  misc_feature (15)..(15): n is a, c, g, or u
aungccuguggaugngugucucu

SEQ ID NO: 50703 - RNA, 24 nt, Artificial Sequence
  Synthetic
  misc_feature (4)..(4): n is a, c, g, or u
  misc_feature (16)..(16): n is a, c, g, or u
caungccuguggaugngugucucu

SEQ ID NO: 50704 - RNA, 18 nt, Artificial Sequence
  Synthetic
  misc_feature (10)..(10): n is a, c, g, or u
cgauugagancuucgucu

SEQ ID NO: 50705 - RNA, 19 nt, Artificial Sequence
  Synthetic
  misc_feature (11)..(11): n is a, c, g, or u
gcgauugagancuucgucu

SEQ ID NO: 50706 - RNA, 20 nt, Artificial Sequence
  Synthetic
  misc_feature (12)..(12): n is a, c, g, or u
ggcgauugagancuucgucu

SEQ ID NO: 50707 - RNA, 21 nt, Artificial Sequence
  Synthetic
  misc_feature (13)..(13): n is a, c, g, or u
cggcgauugagancuucgucu

SEQ ID NO: 50708 - RNA, 22 nt, Artificial Sequence
  Synthetic
  misc_feature (14)..(14): n is a, c, g, or u
gcggcgauugagancuucgucu

SEQ ID NO: 50709 - RNA, 23 nt, Artificial Sequence
  Synthetic
  misc_feature (15)..(15): n is a, c, g, or u
cgcggcgauugagancuucgucu

SEQ ID NO: 50710 - RNA, 24 nt, Artificial Sequence
  Synthetic
  misc_feature (16)..(16): n is a, c, g, or u
acgcggcgauugagancuucgucu

SEQ ID NO: 50711 - RNA, 18 nt, Artificial Sequence
  Synthetic
  misc_feature (1)..(1): n is a, c, g, or u
ncgauagccaggacaagu

SEQ ID NO: 50712 - RNA, 19 nt, Artificial Sequence
  Synthetic
  misc_feature (2)..(2): n is a, c, g, or u
ancgauagccaggacaagu

SEQ ID NO: 50713 - RNA, 20 nt, Artificial Sequence
  Synthetic
  misc_feature (3)..(3): n is a, c, g, or u
cancgauagccaggacaagu

SEQ ID NO: 50714 - RNA, 21 nt, Artificial Sequence
  Synthetic
  misc_feature (4)..(4): n is a, c, g, or u
ccancgauagccaggacaagu

SEQ ID NO: 50715 - RNA, 22 nt, Artificial Sequence
  Synthetic
  misc_feature (5)..(5): n is a, c, g, or u
uccancgauagccaggacaagu

SEQ ID NO: 50716 - RNA, 23 nt, Artificial Sequence
  Synthetic
  misc_feature (6)..(6): n is a, c, g, or u
auccancgauagccaggacaagu

SEQ ID NO: 50717 - RNA, 24 nt, Artificial Sequence
  Synthetic
  misc_feature (7)..(7): n is a, c, g, or u
cauccancgauagccaggacaagu

SEQ ID NO: 50718 - RNA, 18 nt, Artificial Sequence
  Synthetic
aacuaaaagccagacagu

SEQ ID NO: 50719 - RNA, 19 nt, Artificial Sequence
  Synthetic
uaacuaaaagccagacagu

SEQ ID NO: 50720 - RNA, 20 nt, Artificial Sequence
  Synthetic
auaacuaaaagccagacagu

SEQ ID NO: 50721 - RNA, 21 nt, Artificial Sequence
  Synthetic
uauaacuaaaagccagacagu

SEQ ID NO: 50722 - RNA, 22 nt, Artificial Sequence
  Synthetic
auauaacuaaaagccagacagu

SEQ ID NO: 50723 - RNA, 23 nt, Artificial Sequence
  Synthetic
cauauaacuaaaagccagacagu

SEQ ID NO: 50724 - RNA, 24 nt, Artificial Sequence
  Synthetic
ccauauaacuaaaagccagacagu

SEQ ID NO: 50725 - RNA, 18 nt, Artificial Sequence
  Synthetic
ugugagagaggcaauagu

SEQ ID NO: 50726 - RNA, 19 nt, Artificial Sequence
  Synthetic
augugagagaggcaauagu

SEQ ID NO: 50727 - RNA, 20 nt, Artificial Sequence
  Synthetic
gaugugagagaggcaauagu

SEQ ID NO: 50728 - RNA, 21 nt, Artificial Sequence
  Synthetic
ugaugugagagaggcaauagu

SEQ ID NO: 50729 - RNA, 22 nt, Artificial Sequence
  Synthetic
augaugugagagaggcaauagu

SEQ ID NO: 50730 - RNA, 23 nt, Artificial Sequence
  Synthetic
gaugaugugagagaggcaauagu

SEQ ID NO: 50731 - RNA, 24 nt, Artificial Sequence
  Synthetic
ugaugaugugagagaggcaauagu

SEQ ID NO: 50732 - RNA, 18 nt, Artificial Sequence
  Synthetic
  misc_feature (7)..(7): n is a, c, g, or u
accccancaggccaccgu

SEQ ID NO: 50733 - RNA, 19 nt, Artificial Sequence
  Synthetic
  misc_feature (8)..(8): n is a, c, g, or u
caccccancaggccaccgu

SEQ ID NO: 50734 - RNA, 20 nt, Artificial Sequence
  Synthetic
  misc_feature (9)..(9): n is a, c, g, or u
ccaccccancaggccaccgu

SEQ ID NO: 50735 - RNA, 21 nt, Artificial Sequence
  Synthetic
  misc_feature (10)..(10): n is a, c, g, or u
uccaccccancaggccaccgu

SEQ ID NO: 50736 - RNA, 22 nt, Artificial Sequence
  Synthetic
  misc_feature (11)..(11): n is a, c, g, or u
cuccaccccancaggccaccgu

SEQ ID NO: 50737 - RNA, 23 nt, Artificial Sequence
  Synthetic
  misc_feature (1)..(1): n is a, c, g, or u
  misc_feature (12)..(12): n is a, c, g, or u
ncuccaccccancaggccaccgu

SEQ ID NO: 50738 - RNA, 24 nt, Artificial Sequence
  Synthetic
  misc_feature (2)..(2): n is a, c, g, or u
  misc_feature (13)..(13): n is a, c, g, or u
gncuccaccccancaggccaccgu

SEQ ID NO: 50739 - RNA, 18 nt, Artificial Sequence
  Synthetic
  misc_feature (5)..(5): n is a, c, g, or u
uacangugcaguuuccgu

SEQ ID NO: 50740 - RNA, 19 nt, Artificial Sequence
  Synthetic
  misc_feature (6)..(6): n is a, c, g, or u
auacangugcaguuuccgu

SEQ ID NO: 50741 - RNA, 20 nt, Artificial Sequence
  Synthetic
  misc_feature (7)..(7): n is a, c, g, or u
aauacangugcaguuuccgu

SEQ ID NO: 50742 - RNA, 21 nt, Artificial Sequence
  Synthetic
  misc_feature (8)..(8): n is a, c, g, or u
gaauacangugcaguuuccgu

SEQ ID NO: 50743 - RNA, 22 nt, Artificial Sequence
  Synthetic
  misc_feature (9)..(9): n is a, c, g, or u
ggaauacangugcaguuuccgu

SEQ ID NO: 50744 - RNA, 23 nt, Artificial Sequence
  Synthetic
  misc_feature (10)..(10): n is a, c, g, or u
gggaauacangugcaguuuccgu

SEQ ID NO: 50745 - RNA, 24 nt, Artificial Sequence
  Synthetic
  misc_feature (11)..(11): n is a, c, g, or u
ugggaauacangugcaguuuccgu

SEQ ID NO: 50746 - RNA, 18 nt, Artificial Sequence
  Synthetic
ugguaagugauuggaggu

SEQ ID NO: 50747 - RNA, 19 nt, Artificial Sequence
  Synthetic
uugguaagugauuggaggu

SEQ ID NO: 50748 - RNA, 20 nt, Artificial Sequence
  Synthetic
guugguaagugauuggaggu

SEQ ID NO: 50749 - RNA, 21 nt, Artificial Sequence
  Synthetic
gguugguaagugauuggaggu

SEQ ID NO: 50750 - RNA, 22 nt, Artificial Sequence
  Synthetic
agguugguaagugauuggaggu

SEQ ID NO: 50751 - RNA, 23 nt, Artificial Sequence
  Synthetic
gagguugguaagugauuggaggu

SEQ ID NO: 50752 - RNA, 24 nt, Artificial Sequence
  Synthetic
ggagguugguaagugauuggaggu

SEQ ID NO: 50753 - RNA, 18 nt, Artificial Sequence
  Synthetic
caguuuccguccgagggu

SEQ ID NO: 50754 - RNA, 19 nt, Artificial Sequence
  Synthetic
gcaguuuccguccgagggu

SEQ ID NO: 50755 - RNA, 20 nt, Artificial Sequence
  Synthetic
ugcaguuuccguccgagggu

SEQ ID NO: 50756 - RNA, 21 nt, Artificial Sequence
  Synthetic
gugcaguuuccguccgagggu

SEQ ID NO: 50757 - RNA, 22 nt, Artificial Sequence
  Synthetic
  misc_feature (1)..(1): n is a, c, g, or u
ngugcaguuuccguccgagggu

SEQ ID NO: 50758 - RNA, 23 nt, Artificial Sequence
  Synthetic
  misc_feature (2)..(2): n is a, c, g, or u
angugcaguuuccguccgagggu

SEQ ID NO: 50759 - RNA, 24 nt, Artificial Sequence
  Synthetic
  misc_feature (3)..(3): n is a, c, g, or u
cangugcaguuuccguccgagggu

SEQ ID NO: 50760 - RNA, 18 nt, Artificial Sequence
  Synthetic
aggccaccgugugggggu

SEQ ID NO: 50761 - RNA, 19 nt, Artificial Sequence
  Synthetic
caggccaccgugugggggu

SEQ ID NO: 50762 - RNA, 20 nt, Artificial Sequence
  Synthetic
  misc_feature (1)..(1): n is a, c, g, or u
ncaggccaccgugugggggu

SEQ ID NO: 50763 - RNA, 21 nt, Artificial Sequence
  Synthetic
  misc_feature (2)..(2): n is a, c, g, or u
ancaggccaccgugugggggu

SEQ ID NO: 50764 - RNA, 22 nt, Artificial Sequence
  Synthetic
  misc_feature (3)..(3): n is a, c, g, or u
cancaggccaccgugugggggu

SEQ ID NO: 50765 - RNA, 23 nt, Artificial Sequence
  Synthetic
  misc_feature (4)..(4): n is a, c, g, or u
ccancaggccaccgugugggggu

SEQ ID NO: 50766 - RNA, 24 nt, Artificial Sequence
  Synthetic
  misc_feature (5)..(5): n is a, c, g, or u
cccancaggccaccgugugggggu

SEQ ID NO: 50767 - RNA, 18 nt, Artificial Sequence
  Synthetic
  misc_feature (2)..(2): n is a, c, g, or u
gnggauccagcugauggu

SEQ ID NO: 50768 - RNA, 19 nt, Artificial Sequence
  Synthetic
  misc_feature (3)..(3): n is a, c, g, or u
agnggauccagcugauggu

SEQ ID NO: 50769 - RNA, 20 nt, Artificial Sequence
  Synthetic
  misc_feature (1)..(1): n is a, c, g, or u
  misc_feature (4)..(4): n is a, c, g, or u
nagnggauccagcugauggu

SEQ ID NO: 50770 - RNA, 21 nt, Artificial Sequence
  Synthetic
  misc_feature (2)..(2): n is a, c, g, or u
  misc_feature (5)..(5): n is a, c, g, or u
anagnggauccagcugauggu

SEQ ID NO: 50771 - RNA, 22 nt, Artificial Sequence
  Synthetic
  misc_feature (3)..(3): n is a, c, g, or u
  misc_feature (6)..(6): n is a, c, g, or u
aanagnggauccagcugauggu

SEQ ID NO: 50772 - RNA, 23 nt, Artificial Sequence
  Synthetic
  misc_feature (4)..(4): n is a, c, g, or u
  misc_feature (7)..(7): n is a, c, g, or u
gaanagnggauccagcugauggu

SEQ ID NO: 50773 - RNA, 24 nt, Artificial Sequence
  Synthetic
  misc_feature (5)..(5): n is a, c, g, or u
  misc_feature (8)..(8): n is a, c, g, or u
ugaanagnggauccagcugauggu

SEQ ID NO: 50774 - RNA, 18 nt, Artificial Sequence
  Synthetic
  misc_feature (2)..(2): n is a, c, g, or u
cnagaagauugaugaugu

SEQ ID NO: 50775 - RNA, 19 nt, Artificial Sequence
  Synthetic
  misc_feature (3)..(3): n is a, c, g, or u
ucnagaagauugaugaugu

SEQ ID NO: 50776 - RNA, 20 nt, Artificial Sequence
  Synthetic
  misc_feature (4)..(4): n is a, c, g, or u
uucnagaagauugaugaugu

SEQ ID NO: 50777 - RNA, 21 nt, Artificial Sequence
  Synthetic
  misc_feature (5)..(5): n is a, c, g, or u
cuucnagaagauugaugaugu

SEQ ID NO: 50778 - RNA, 22 nt, Artificial Sequence
  Synthetic
  misc_feature (6)..(6): n is a, c, g, or u
ucuucnagaagauugaugaugu

SEQ ID NO: 50779 - RNA, 23 nt, Artificial Sequence
  Synthetic
  misc_feature (7)..(7): n is a, c, g, or u
gucuucnagaagauugaugaugu

SEQ ID NO: 50780 - RNA, 24 nt, Artificial Sequence
  Synthetic
  misc_feature (8)..(8): n is a, c, g, or u
agucuucnagaagauugaugaugu

SEQ ID NO: 50781 - RNA, 18 nt, Artificial Sequence
  Synthetic
  misc_feature (5)..(5): n is a, c, g, or u
  misc_feature (17)..(17): n is a, c, g, or u
gaacngacgggaagaanu

SEQ ID NO: 50782 - RNA, 19 nt, Artificial Sequence
  Synthetic
  misc_feature (6)..(6): n is a, c, g, or u
  misc_feature (18)..(18): n is a, c, g, or u
cgaacngacgggaagaanu

SEQ ID NO: 50783 - RNA, 20 nt, Artificial Sequence
  Synthetic
  misc_feature (7)..(7): n is a, c, g, or u
  misc_feature (19)..(19): n is a, c, g, or u
ccgaacngacgggaagaanu

SEQ ID NO: 50784 - RNA, 21 nt, Artificial Sequence
  Synthetic
  misc_feature (8)..(8): n is a, c, g, or u
  misc_feature (20)..(20): n is a, c, g, or u
cccgaacngacgggaagaanu

SEQ ID NO: 50785 - RNA, 22 nt, Artificial Sequence
  Synthetic
  misc_feature (9)..(9): n is a, c, g, or u
  misc_feature (21)..(21): n is a, c, g, or u
ucccgaacngacgggaagaanu

SEQ ID NO: 50786 - RNA, 23 nt, Artificial Sequence
  Synthetic
  misc_feature (10)..(10): n is a, c, g, or u
  misc_feature (22)..(22): n is a, c, g, or u
gucccgaacngacgggaagaanu

SEQ ID NO: 50787 - RNA, 24 nt, Artificial Sequence
  Synthetic
  misc_feature (11)..(11): n is a, c, g, or u
  misc_feature (23)..(23): n is a, c, g, or u
ggucccgaacngacgggaagaanu

SEQ ID NO: 50788 - RNA, 18 nt, Artificial Sequence
  Synthetic
  misc_feature (3)..(3): n is a, c, g, or u
  misc_feature (17)..(17): n is a, c, g, or u
uunuguugaagucccanu

SEQ ID NO: 50789 - RNA, 19 nt, Artificial Sequence
  Synthetic
  misc_feature (4)..(4): n is a, c, g, or u
  misc_feature (18)..(18): n is a, c, g, or u
uuunuguugaagucccanu

SEQ ID NO: 50790 - RNA, 20 nt, Artificial Sequence
  Synthetic
  misc_feature (5)..(5): n is a, c, g, or u
  misc_feature (19)..(19): n is a, c, g, or u
guuunuguugaagucccanu

SEQ ID NO: 50791 - RNA, 21 nt, Artificial Sequence
  Synthetic
  misc_feature (6)..(6): n is a, c, g, or u
  misc_feature (20)..(20): n is a, c, g, or u
uguuunuguugaagucccanu

SEQ ID NO: 50792 - RNA, 22 nt, Artificial Sequence
  Synthetic
  misc_feature (7)..(7): n is a, c, g, or u
  misc_feature (21)..(21): n is a, c, g, or u
uuguuunuguugaagucccanu

SEQ ID NO: 50793 - RNA, 23 nt, Artificial Sequence
  Synthetic
  misc_feature (8)..(8): n is a, c, g, or u
  misc_feature (22)..(22): n is a, c, g, or u
cuuguuunuguugaagucccanu

SEQ ID NO: 50794 - RNA, 24 nt, Artificial Sequence
  Synthetic
  misc_feature (9)..(9): n is a, c, g, or u
  misc_feature (23)..(23): n is a, c, g, or u
ccuuguuunuguugaagucccanu

SEQ ID NO: 50795 - RNA, 18 nt, Artificial Sequence
  Synthetic
  misc_feature (11)..(11): n is a, c, g, or u
  misc_feature (16)..(17): n is a, c, g, or u
gaaaauauuunguaannu

SEQ ID NO: 50796 - RNA, 19 nt, Artificial Sequence
  Synthetic
  misc_feature (12)..(12): n is a, c, g, or u
  misc_feature (17)..(18): n is a, c, g, or u
ggaaaauauuunguaannu

SEQ ID NO: 50797 - RNA, 20 nt, Artificial Sequence
  Synthetic
  misc_feature (13)..(13): n is a, c, g, or u
  misc_feature (18)..(19): n is a, c, g, or u
aggaaaauauuunguaannu

SEQ ID NO: 50798 - RNA, 21 nt, Artificial Sequence
  Synthetic
  misc_feature (1)..(1): n is a, c, g, or u
  misc_feature (14)..(14): n is a, c, g, or u
  misc_feature (19)..(20): n is a, c, g, or u
naggaaaauauuunguaannu

SEQ ID NO: 50799 - RNA, 22 nt, Artificial Sequence
  Synthetic
  misc_feature (2)..(2): n is a, c, g, or u
  misc_feature (15)..(15): n is a, c, g, or u
  misc_feature (20)..(21): n is a, c, g, or u
anaggaaaauauuunguaannu

SEQ ID NO: 50800 - RNA, 23 nt, Artificial Sequence
  Synthetic
  misc_feature (3)..(3): n is a, c, g, or u
  misc_feature (16)..(16): n is a, c, g, or u
  misc_feature (21)..(22): n is a, c, g, or u
canaggaaaauauuunguaannu

SEQ ID NO: 50801 - RNA, 24 nt, Artificial Sequence
  Synthetic
  misc_feature (4)..(4): n is a, c, g, or u
  misc_feature (17)..(17): n is a, c, g, or u
  misc_feature (22)..(23): n is a, c, g, or u
ccanaggaaaauauuunguaannu

SEQ ID NO: 50802 - RNA, 18 nt, Artificial Sequence
  Synthetic
  misc_feature (8)..(8): n is a, c, g, or u
  misc_feature (17)..(17): n is a, c, g, or u
cuugaugnaaaugaaunu

SEQ ID NO: 50803 - RNA, 19 nt, Artificial Sequence
  Synthetic
  misc_feature (9)..(9): n is a, c, g, or u
  misc_feature (18)..(18): n is a, c, g, or u
ucuugaugnaaaugaaunu

SEQ ID NO: 50804 - RNA, 20 nt, Artificial Sequence
  Synthetic
  misc_feature (1)..(1): n is a, c, g, or u
  misc_feature (10)..(10): n is a, c, g, or u
  misc_feature (19)..(19): n is a, c, g, or u
nucuugaugnaaaugaaunu

SEQ ID NO: 50805 - RNA, 21 nt, Artificial Sequence
  Synthetic
  misc_feature (1)..(2): n is a, c, g, or u
  misc_feature (11)..(11): n is a, c, g, or u
  misc_feature (20)..(20): n is a, c, g, or u
nnucuugaugnaaaugaaunu

SEQ ID NO: 50806 - RNA, 22 nt, Artificial Sequence
  Synthetic
  misc_feature (2)..(3): n is a, c, g, or u
  misc_feature (12)..(12): n is a, c, g, or u
  misc_feature (21)..(21): n is a, c, g, or u
annucuugaugnaaaugaaunu

SEQ ID NO: 50807 - RNA, 23 nt, Artificial Sequence
  Synthetic
  misc_feature (3)..(4): n is a, c, g, or u
  misc_feature (13)..(13): n is a, c, g, or u
  misc_feature (22)..(22): n is a, c, g, or u
cannucuugaugnaaaugaaunu

SEQ ID NO: 50808 - RNA, 24 nt, Artificial Sequence
  Synthetic
  misc_feature (4)..(5): n is a, c, g, or u
  misc_feature (14)..(14): n is a, c, g, or u
  misc_feature (23)..(23): n is a, c, g, or u
ucannucuugaugnaaaugaaunu

SEQ ID NO: 50809 - RNA, 18 nt, Artificial Sequence
  Synthetic
  misc_feature (2)..(3): n is a, c, g, or u
unnucccccuagaaaauu

SEQ ID NO: 50810 - RNA, 19 nt, Artificial Sequence
  Synthetic
  misc_feature (3)..(4): n is a, c, g, or u
gunnucccccuagaaaauu

SEQ ID NO: 50811 - RNA, 20 nt, Artificial Sequence
  Synthetic
  misc_feature (4)..(5): n is a, c, g, or u
ggunnucccccuagaaaauu

SEQ ID NO: 50812 - RNA, 21 nt, Artificial Sequence
  Synthetic
  misc_feature (5)..(6): n is a, c, g, or u
gggunnucccccuagaaaauu

SEQ ID NO: 50813 - RNA, 22 nt, Artificial Sequence
  Synthetic
  misc_feature (6)..(7): n is a, c, g, or u
cgggunnucccccuagaaaauu

SEQ ID NO: 50814 - RNA, 23 nt, Artificial Sequence
  Synthetic
  misc_feature (7)..(8): n is a, c, g, or u
ccgggunnucccccuagaaaauu

SEQ ID NO: 50815 - RNA, 24 nt, Artificial Sequence
  Synthetic
  misc_feature (8)..(9): n is a, c, g, or u
cccgggunnucccccuagaaaauu

SEQ ID NO: 50816 - RNA, 18 nt, Artificial Sequence
  Synthetic
ccaaggaauacuaacauu

SEQ ID NO: 50817 - RNA, 19 nt, Artificial Sequence
  Synthetic
uccaaggaauacuaacauu

SEQ ID NO: 50818 - RNA, 20 nt, Artificial Sequence
  Synthetic
guccaaggaauacuaacauu

SEQ ID NO: 50819 - RNA, 21 nt, Artificial Sequence
  Synthetic
aguccaaggaauacuaacauu

SEQ ID NO: 50820 - RNA, 22 nt, Artificial Sequence
  Synthetic
gaguccaaggaauacuaacauu

SEQ ID NO: 50821 - RNA, 23 nt, Artificial Sequence
  Synthetic
ugaguccaaggaauacuaacauu

SEQ ID NO: 50822 - RNA, 24 nt, Artificial Sequence
  Synthetic
augaguccaaggaauacuaacauu

SEQ ID NO: 50823 - RNA, 18 nt, Artificial Sequence
  Synthetic
ucuagacucugugguauu

SEQ ID NO: 50824 - RNA, 19 nt, Artificial Sequence
  Synthetic
gucuagacucugugguauu

SEQ ID NO: 50825 - RNA, 20 nt, Artificial Sequence
  Synthetic
agucuagacucugugguauu

SEQ ID NO: 50826 - RNA, 21 nt, Artificial Sequence
  Synthetic
gagucuagacucugugguauu

SEQ ID NO: 50827 - RNA, 22 nt, Artificial Sequence
  Synthetic
cgagucuagacucugugguauu

SEQ ID NO: 50828 - RNA, 23 nt, Artificial Sequence
  Synthetic
acgagucuagacucugugguauu

SEQ ID NO: 50829 - RNA, 24 nt, Artificial Sequence
  Synthetic
cacgagucuagacucugugguauu

SEQ ID NO: 50830 - RNA, 18 nt, Artificial Sequence
  Synthetic
gguaagugauuggagguu

SEQ ID NO: 50831 - RNA, 19 nt, Artificial Sequence
  Synthetic
ugguaagugauuggagguu

SEQ ID NO: 50832 - RNA, 20 nt, Artificial Sequence
  Synthetic
uugguaagugauuggagguu

SEQ ID NO: 50833 - RNA, 21 nt, Artificial Sequence
  Synthetic
guugguaagugauuggagguu

SEQ ID NO: 50834 - RNA, 22 nt, Artificial Sequence
  Synthetic
gguugguaagugauuggagguu

SEQ ID NO: 50835 - RNA, 23 nt, Artificial Sequence
  Synthetic
agguugguaagugauuggagguu

SEQ ID NO: 50836 - RNA, 24 nt, Artificial Sequence
  Synthetic
gagguugguaagugauuggagguu

SEQ ID NO: 50837 - RNA, 18 nt, Artificial Sequence
  Synthetic
aguuuccguccgaggguu

SEQ ID NO: 50838 - RNA, 19 nt, Artificial Sequence
  Synthetic
caguuuccguccgaggguu

SEQ ID NO: 50839 - RNA, 20 nt, Artificial Sequence
  Synthetic
gcaguuuccguccgaggguu

SEQ ID NO: 50840 - RNA, 21 nt, Artificial Sequence
  Synthetic
ugcaguuuccguccgaggguu

SEQ ID NO: 50841 - RNA, 22 nt, Artificial Sequence
  Synthetic
gugcaguuuccguccgaggguu

SEQ ID NO: 50842 - RNA, 23 nt, Artificial Sequence
  Synthetic
  misc_feature (1)..(1): n is a, c, g, or u
ngugcaguuuccguccgaggguu

SEQ ID NO: 50843 - RNA, 24 nt, Artificial Sequence
  Synthetic
  misc_feature (2)..(2): n is a, c, g, or u
angugcaguuuccguccgaggguu

SEQ ID NO: 50844 - RNA, 18 nt, Artificial Sequence
  Synthetic
gucuaacaacaguaguuu

SEQ ID NO: 50845 - RNA, 19 nt, Artificial Sequence
  Synthetic
cgucuaacaacaguaguuu

SEQ ID NO: 50846 - RNA, 20 nt, Artificial Sequence
  Synthetic
ucgucuaacaacaguaguuu

SEQ ID NO: 50847 - RNA, 21 nt, Artificial Sequence
  Synthetic
gucgucuaacaacaguaguuu

SEQ ID NO: 50848 - RNA, 22 nt, Artificial Sequence
  Synthetic
cgucgucuaacaacaguaguuu

SEQ ID NO: 50849 - RNA, 23 nt, Artificial Sequence
  Synthetic
ucgucgucuaacaacaguaguuu

SEQ ID NO: 50850 - RNA, 24 nt, Artificial Sequence
  Synthetic
cucgucgucuaacaacaguaguuu

SEQ ID NO: 50851 - RNA, 18 nt, Artificial Sequence
  Synthetic
ccugccuuacuuuuggaa

SEQ ID NO: 50852 - RNA, 19 nt, Artificial Sequence
  Synthetic
uccugccuuacuuuuggaa

SEQ ID NO: 50853 - RNA, 20 nt, Artificial Sequence
  Synthetic
uuccugccuuacuuuuggaa

SEQ ID NO: 50854 - RNA, 21 nt, Artificial Sequence
  Synthetic
uuuccugccuuacuuuuggaa

SEQ ID NO: 50855 - RNA, 22 nt, Artificial Sequence
  Synthetic
auuuccugccuuacuuuuggaa

SEQ ID NO: 50856 - RNA, 23 nt, Artificial Sequence
  Synthetic
cauuuccugccuuacuuuuggaa

SEQ ID NO: 50857 - RNA, 24 nt, Artificial Sequence
  Synthetic
acauuuccugccuuacuuuuggaa

SEQ ID NO: 50858 - RNA, 18 nt, Artificial Sequence
  Synthetic
  misc_feature (3)..(3): n is a, c, g, or u
  misc_feature (6)..(6): n is a, c, g, or u
  misc_feature (9)..(9): n is a, c, g, or u
ccncunacnaaaaaugaa

SEQ ID NO: 50859 - RNA, 19 nt, Artificial Sequence
  Synthetic
  misc_feature (4)..(4): n is a, c, g, or u
  misc_feature (7)..(7): n is a, c, g, or u
  misc_feature (10)..(10): n is a, c, g, or u
cccncunacnaaaaaugaa

SEQ ID NO: 50860 - RNA, 20 nt, Artificial Sequence
  Synthetic
  misc_feature (5)..(5): n is a, c, g, or u
  misc_feature (8)..(8): n is a, c, g, or u
  misc_feature (11)..(11): n is a, c, g, or u
gcccncunacnaaaaaugaa

SEQ ID NO: 50861 - RNA, 21 nt, Artificial Sequence
  Synthetic
  misc_feature (6)..(6): n is a, c, g, or u
  misc_feature (9)..(9): n is a, c, g, or u
  misc_feature (12)..(12): n is a, c, g, or u
ggcccncunacnaaaaaugaa

SEQ ID NO: 50862 - RNA, 22 nt, Artificial Sequence
  Synthetic
  misc_feature (7)..(7): n is a, c, g, or u
  misc_feature (10)..(10): n is a, c, g, or u
  misc_feature (13)..(13): n is a, c, g, or u
aggcccncunacnaaaaaugaa

SEQ ID NO: 50863 - RNA, 23 nt, Artificial Sequence
  Synthetic
  misc_feature (8)..(8): n is a, c, g, or u
  misc_feature (11)..(11): n is a, c, g, or u
  misc_feature (14)..(14): n is a, c, g, or u
uaggcccncunacnaaaaaugaa

SEQ ID NO: 50864 - RNA, 24 nt, Artificial Sequence
  Synthetic
  misc_feature (9)..(9): n is a, c, g, or u
  misc_feature (12)..(12): n is a, c, g, or u
  misc_feature (15)..(15): n is a, c, g, or u
guaggcccncunacnaaaaaugaa

SEQ ID NO: 50865 - RNA, 18 nt, Artificial Sequence
  Synthetic
gccaacagucuuacauaa

SEQ ID NO: 50866 - RNA, 19 nt, Artificial Sequence
  Synthetic
ugccaacagucuuacauaa

SEQ ID NO: 50867 - RNA, 20 nt, Artificial Sequence
  Synthetic
uugccaacagucuuacauaa

SEQ ID NO: 50868 - RNA, 21 nt, Artificial Sequence
  Synthetic
  misc_feature (1)..(1): n is a, c, g, or u
nuugccaacagucuuacauaa

SEQ ID NO: 50869 - RNA, 22 nt, Artificial Sequence
  Synthetic
  misc_feature (2)..(2): n is a, c, g, or u
gnuugccaacagucuuacauaa

SEQ ID NO: 50870 - RNA, 23 nt, Artificial Sequence
  Synthetic
  misc_feature (3)..(3): n is a, c, g, or u
agnuugccaacagucuuacauaa

SEQ ID NO: 50871 - RNA, 24 nt, Artificial Sequence
  Synthetic
  misc_feature (1)..(1): n is a, c, g, or u
  misc_feature (4)..(4): n is a, c, g, or u
nagnuugccaacagucuuacauaa

SEQ ID NO: 50872 - RNA, 18 nt, Artificial Sequence
  Synthetic
  misc_feature (1)..(1): n is a, c, g, or u
  misc_feature (4)..(4): n is a, c, g, or u
  misc_feature (7)..(7): n is a, c, g, or u
  misc_feature (11)..(11): n is a, c, g, or u
ngcnggnauunuauauaa

SEQ ID NO: 50873 - RNA, 19 nt, Artificial Sequence
  Synthetic
  misc_feature (2)..(2): n is a, c, g, or u
  misc_feature (5)..(5): n is a, c, g, or u
  misc_feature (8)..(8): n is a, c, g, or u
  misc_feature (12)..(12): n is a, c, g, or u
angcnggnauunuauauaa

SEQ ID NO: 50874 - RNA, 20 nt, Artificial Sequence
  Synthetic
  misc_feature (3)..(3): n is a, c, g, or u
  misc_feature (6)..(6): n is a, c, g, or u
  misc_feature (9)..(9): n is a, c, g, or u
  misc_feature (13)..(13): n is a, c, g, or u
aangcnggnauunuauauaa

SEQ ID NO: 50875 - RNA, 21 nt, Artificial Sequence
  Synthetic
  misc_feature (4)..(4): n is a, c, g, or u
  misc_feature (7)..(7): n is a, c, g, or u
  misc_feature (10)..(10): n is a, c, g, or u
  misc_feature (14)..(14): n is a, c, g, or u
gaangcnggnauunuauauaa

SEQ ID NO: 50876 - RNA, 22 nt, Artificial Sequence
  Synthetic
  misc_feature (5)..(5): n is a, c, g, or u
  misc_feature (8)..(8): n is a, c, g, or u
  misc_feature (11)..(11): n is a, c, g, or u
  misc_feature (15)..(15): n is a, c, g, or u
ggaangcnggnauunuauauaa

SEQ ID NO: 50877 - RNA, 23 nt, Artificial Sequence
  Synthetic
  misc_feature (6)..(6): n is a, c, g, or u
  misc_feature (9)..(9): n is a, c, g, or u
  misc_feature (12)..(12): n is a, c, g, or u
  misc_feature (16)..(16): n is a, c, g, or u
uggaangcnggnauunuauauaa

SEQ ID NO: 50878 - RNA, 24 nt, Artificial Sequence
  Synthetic
  misc_feature (7)..(7): n is a, c, g, or u
  misc_feature (10)..(10): n is a, c, g, or u
  misc_feature (13)..(13): n is a, c, g, or u
  misc_feature (17)..(17): n is a, c, g, or u
auggaangcnggnauunuauauaa

SEQ ID NO: 50879 - RNA, 18 nt, Artificial Sequence
  Synthetic
  misc_feature (14)..(14): n is a, c, g, or u
ggcuccaguucagngaca

SEQ ID NO: 50880 - RNA, 19 nt, Artificial Sequence
  Synthetic
  misc_feature (15)..(15): n is a, c, g, or u
uggcuccaguucagngaca

SEQ ID NO: 50881 - RNA, 20 nt, Artificial Sequence
  Synthetic
  misc_feature (16)..(16): n is a, c, g, or u
guggcuccaguucagngaca

SEQ ID NO: 50882 - RNA, 21 nt, Artificial Sequence
  Synthetic
  misc_feature (17)..(17): n is a, c, g, or u
gguggcuccaguucagngaca

SEQ ID NO: 50883 - RNA, 22 nt, Artificial Sequence
  Synthetic
  misc_feature (18)..(18): n is a, c, g, or u
ugguggcuccaguucagngaca

SEQ ID NO: 50884 - RNA, 23 nt, Artificial Sequence
  Synthetic
  misc_feature (19)..(19): n is a, c, g, or u
cugguggcuccaguucagngaca

SEQ ID NO: 50885 - RNA, 24 nt, Artificial Sequence
  Synthetic
  misc_feature (20)..(20): n is a, c, g, or u
gcugguggcuccaguucagngaca

SEQ ID NO: 50886 - RNA, 18 nt, Artificial Sequence
  Synthetic
ggaacaagagcuacagca

SEQ ID NO: 50887 - RNA, 19 nt, Artificial Sequence
  Synthetic
gggaacaagagcuacagca

SEQ ID NO: 50888 - RNA, 20 nt, Artificial Sequence
  Synthetic
ugggaacaagagcuacagca

SEQ ID NO: 50889 - RNA, 21 nt, Artificial Sequence
  Synthetic
  misc_feature (1)..(1): n is a, c, g, or u
nugggaacaagagcuacagca

SEQ ID NO: 50890 - RNA, 22 nt, Artificial Sequence
  Synthetic
  misc_feature (2)..(2): n is a, c, g, or u
cnugggaacaagagcuacagca

SEQ ID NO: 50891 - RNA, 23 nt, Artificial Sequence
  Synthetic
  misc_feature (3)..(3): n is a, c, g, or u
ucnugggaacaagagcuacagca

SEQ ID NO: 50892 - RNA, 24 nt, Artificial Sequence
  Synthetic
  misc_feature (4)..(4): n is a, c, g, or u
uucnugggaacaagagcuacagca

SEQ ID NO: 50893 - RNA, 18 nt, Artificial Sequence
  Synthetic
  misc_feature (5)..(5): n is a, c, g, or u
gaucnacgaccaccagca

SEQ ID NO: 50894 - RNA, 19 nt, Artificial Sequence
  Synthetic
  misc_feature (6)..(6): n is a, c, g, or u
ggaucnacgaccaccagca

SEQ ID NO: 50895 - RNA, 20 nt, Artificial Sequence
  Synthetic
  misc_feature (7)..(7): n is a, c, g, or u
aggaucnacgaccaccagca

SEQ ID NO: 50896 - RNA, 21 nt, Artificial Sequence
  Synthetic
  misc_feature (8)..(8): n is a, c, g, or u
caggaucnacgaccaccagca

SEQ ID NO: 50897 - RNA, 22 nt, Artificial Sequence
  Synthetic
  misc_feature (9)..(9): n is a, c, g, or u
ccaggaucnacgaccaccagca

SEQ ID NO: 50898 - RNA, 23 nt, Artificial Sequence
  Synthetic
  misc_feature (10)..(10): n is a, c, g, or u
uccaggaucnacgaccaccagca

SEQ ID NO: 50899 - RNA, 24 nt, Artificial Sequence
  Synthetic
  misc_feature (11)..(11): n is a, c, g, or u
uuccaggaucnacgaccaccagca

SEQ ID NO: 50900 - RNA, 18 nt, Artificial Sequence
  Synthetic
ucaccucugcacgucgca

SEQ ID NO: 50901 - RNA, 19 nt, Artificial Sequence
  Synthetic
uucaccucugcacgucgca

SEQ ID NO: 50902 - RNA, 20 nt, Artificial Sequence
  Synthetic
cuucaccucugcacgucgca

SEQ ID NO: 50903 - RNA, 21 nt, Artificial Sequence
  Synthetic
gcuucaccucugcacgucgca

SEQ ID NO: 50904 - RNA, 22 nt, Artificial Sequence
  Synthetic
cgcuucaccucugcacgucgca

SEQ ID NO: 50905 - RNA, 23 nt, Artificial Sequence
  Synthetic
ucgcuucaccucugcacgucgca

SEQ ID NO: 50906 - RNA, 24 nt, Artificial Sequence
  Synthetic
uucgcuucaccucugcacgucgca

SEQ ID NO: 50907 - RNA, 18 nt, Artificial Sequence
  Synthetic
  misc_feature (8)..(9): n is a, c, g, or u
caacgacnngaaggggca

SEQ ID NO: 50908 - RNA, 19 nt, Artificial Sequence
  Synthetic
  misc_feature (9)..(10): n is a, c, g, or u
ucaacgacnngaaggggca

SEQ ID NO: 50909 - RNA, 20 nt, Artificial Sequence
  Synthetic
  misc_feature (1)..(1): n is a, c, g, or u
  misc_feature (10)..(11): n is a, c, g, or u
nucaacgacnngaaggggca

SEQ ID NO: 50910 - RNA, 21 nt, Artificial Sequence
  Synthetic
  misc_feature (2)..(2): n is a, c, g, or u
  misc_feature (11)..(12): n is a, c, g, or u
unucaacgacnngaaggggca

SEQ ID NO: 50911 - RNA, 22 nt, Artificial Sequence
  Synthetic
  misc_feature (3)..(3): n is a, c, g, or u
  misc_feature (12)..(13): n is a, c, g, or u
cunucaacgacnngaaggggca

SEQ ID NO: 50912 - RNA, 23 nt, Artificial Sequence
  Synthetic
  misc_feature (4)..(4): n is a, c, g, or u
  misc_feature (13)..(14): n is a, c, g, or u
ucunucaacgacnngaaggggca

SEQ ID NO: 50913 - RNA, 24 nt, Artificial Sequence
  Synthetic
  misc_feature (5)..(5): n is a, c, g, or u
  misc_feature (14)..(15): n is a, c, g, or u
cucunucaacgacnngaaggggca

SEQ ID NO: 50914 - RNA, 18 nt, Artificial Sequence
  Synthetic
  misc_feature (1)..(1): n is a, c, g, or u
  misc_feature (13)..(13): n is a, c, g, or u
ncauccacaggcnaugca

SEQ ID NO: 50915 - RNA, 19 nt, Artificial Sequence
  Synthetic
  misc_feature (2)..(2): n is a, c, g, or u
  misc_feature (14)..(14): n is a, c, g, or u
cncauccacaggcnaugca

SEQ ID NO: 50916 - RNA, 20 nt, Artificial Sequence
  Synthetic
  misc_feature (3)..(3): n is a, c, g, or u
  misc_feature (15)..(15): n is a, c, g, or u
acncauccacaggcnaugca

SEQ ID NO: 50917 - RNA, 21 nt, Artificial Sequence
  Synthetic
  misc_feature (4)..(4): n is a, c, g, or u
  misc_feature (16)..(16): n is a, c, g, or u
cacncauccacaggcnaugca

SEQ ID NO: 50918 - RNA, 22 nt, Artificial Sequence
  Synthetic
  misc_feature (5)..(5): n is a, c, g, or u
  misc_feature (17)..(17): n is a, c, g, or u
acacncauccacaggcnaugca

SEQ ID NO: 50919 - RNA, 23 nt, Artificial Sequence
  Synthetic
  misc_feature (6)..(6): n is a, c, g, or u
  misc_feature (18)..(18): n is a, c, g, or u
gacacncauccacaggcnaugca

SEQ ID NO: 50920 - RNA, 24 nt, Artificial Sequence
  Synthetic
  misc_feature (7)..(7): n is a, c, g, or u
  misc_feature (19)..(19): n is a, c, g, or u
agacacncauccacaggcnaugca

SEQ ID NO: 50921 - RNA, 18 nt, Artificial Sequence
  Synthetic
cugcacaacucuugcuca

SEQ ID NO: 50922 - RNA, 19 nt, Artificial Sequence
  Synthetic
ccugcacaacucuugcuca

SEQ ID NO: 50923 - RNA, 20 nt, Artificial Sequence
  Synthetic
accugcacaacucuugcuca

SEQ ID NO: 50924 - RNA, 21 nt, Artificial Sequence
  Synthetic
aaccugcacaacucuugcuca

SEQ ID NO: 50925 - RNA, 22 nt, Artificial Sequence
  Synthetic
aaaccugcacaacucuugcuca

SEQ ID NO: 50926 - RNA, 23 nt, Artificial Sequence
  Synthetic
aaaaccugcacaacucuugcuca

SEQ ID NO: 50927 - RNA, 24 nt, Artificial Sequence
  Synthetic
caaaaccugcacaacucuugcuca

SEQ ID NO: 50928 - RNA, 18 nt, Artificial Sequence
  Synthetic
  misc_feature (13)..(13): n is a, c, g, or u
caucaaucuucungaaga

SEQ ID NO: 50929 - RNA, 19 nt, Artificial Sequence
  Synthetic
  misc_feature (14)..(14): n is a, c, g, or u
ucaucaaucuucungaaga

SEQ ID NO: 50930 - RNA, 20 nt, Artificial Sequence
  Synthetic
  misc_feature (15)..(15): n is a, c, g, or u
aucaucaaucuucungaaga

SEQ ID NO: 50931 - RNA, 21 nt, Artificial Sequence
  Synthetic
  misc_feature (16)..(16): n is a, c, g, or u
caucaucaaucuucungaaga

SEQ ID NO: 50932 - RNA, 22 nt, Artificial Sequence
  Synthetic
  misc_feature (17)..(17): n is a, c, g, or u
acaucaucaaucuucungaaga

SEQ ID NO: 50933 - RNA, 23 nt, Artificial Sequence
  Synthetic
  misc_feature (18)..(18): n is a, c, g, or u
cacaucaucaaucuucungaaga

SEQ ID NO: 50934 - RNA, 24 nt, Artificial Sequence
  Synthetic
  misc_feature (19)..(19): n is a, c, g, or u
ucacaucaucaaucuucungaaga

SEQ ID NO: 50935 - RNA, 18 nt, Artificial Sequence
  Synthetic
aaauuccagcagucccga

SEQ ID NO: 50936 - RNA, 19 nt, Artificial Sequence
  Synthetic
caaauuccagcagucccga

SEQ ID NO: 50937 - RNA, 20 nt, Artificial Sequence
  Synthetic
gcaaauuccagcagucccga

SEQ ID NO: 50938 - RNA, 21 nt, Artificial Sequence
  Synthetic
  misc_feature (1)..(1): n is a, c, g, or u
ngcaaauuccagcagucccga

SEQ ID NO: 50939 - RNA, 22 nt, Artificial Sequence
  Synthetic
  misc_feature (2)..(2): n is a, c, g, or u
gngcaaauuccagcagucccga

SEQ ID NO: 50940 - RNA, 23 nt, Artificial Sequence
  Synthetic
  misc_feature (3)..(3): n is a, c, g, or u
agngcaaauuccagcagucccga

SEQ ID NO: 50941 - RNA, 24 nt, Artificial Sequence
  Synthetic
  misc_feature (4)..(4): n is a, c, g, or u
cagngcaaauuccagcagucccga

SEQ ID NO: 50942 - RNA, 18 nt, Artificial Sequence
  Synthetic
auggcaaacaagguagga

SEQ ID NO: 50943 - RNA, 19 nt, Artificial Sequence
  Synthetic
aauggcaaacaagguagga

SEQ ID NO: 50944 - RNA, 20 nt, Artificial Sequence
  Synthetic
caauggcaaacaagguagga

SEQ ID NO: 50945 - RNA, 21 nt, Artificial Sequence
  Synthetic
ccaauggcaaacaagguagga

SEQ ID NO: 50946 - RNA, 22 nt, Artificial Sequence
  Synthetic
gccaauggcaaacaagguagga

SEQ ID NO: 50947 - RNA, 23 nt, Artificial Sequence
  Synthetic
ggccaauggcaaacaagguagga

SEQ ID NO: 50948 - RNA, 24 nt, Artificial Sequence
  Synthetic
uggccaauggcaaacaagguagga

SEQ ID NO: 50949 - RNA, 18 nt, Artificial Sequence
  Synthetic
cuguuccaaacccucgga

SEQ ID NO: 50950 - RNA, 19 nt, Artificial Sequence
  Synthetic
gcuguuccaaacccucgga

SEQ ID NO: 50951 - RNA, 20 nt, Artificial Sequence
  Synthetic
ugcuguuccaaacccucgga

SEQ ID NO: 50952 - RNA, 21 nt, Artificial Sequence
  Synthetic
  misc_feature (1)..(1): n is a, c, g, or u
nugcuguuccaaacccucgga

SEQ ID NO: 50953 - RNA, 22 nt, Artificial Sequence
  Synthetic
  misc_feature (2)..(2): n is a, c, g, or u
gnugcuguuccaaacccucgga

SEQ ID NO: 50954 - RNA, 23 nt, Artificial Sequence
  Synthetic
  misc_feature (3)..(3): n is a, c, g, or u
ugnugcuguuccaaacccucgga

SEQ ID NO: 50955 - RNA, 24 nt, Artificial Sequence
  Synthetic
  misc_feature (1)..(1): n is a, c, g, or u
  misc_feature (4)..(4): n is a, c, g, or u
nugnugcuguuccaaacccucgga

SEQ ID NO: 50956 - RNA, 18 nt, Artificial Sequence
  Synthetic
aggaaaauaccuauggga

SEQ ID NO: 50957 - RNA, 19 nt, Artificial Sequence
  Synthetic
uaggaaaauaccuauggga

SEQ ID NO: 50958 - RNA, 20 nt, Artificial Sequence
  Synthetic
uuaggaaaauaccuauggga

SEQ ID NO: 50959 - RNA, 21 nt, Artificial Sequence
  Synthetic
uuuaggaaaauaccuauggga

SEQ ID NO: 50960 - RNA, 22 nt, Artificial Sequence
  Synthetic
cuuuaggaaaauaccuauggga

SEQ ID NO: 50961 - RNA, 23 nt, Artificial Sequence
  Synthetic
gcuuuaggaaaauaccuauggga

SEQ ID NO: 50962 - RNA, 24 nt, Artificial Sequence
  Synthetic
ggcuuuaggaaaauaccuauggga

SEQ ID NO: 50963 - RNA, 18 nt, Artificial Sequence
  Synthetic
  misc_feature (3)..(3): n is a, c, g, or u
  misc_feature (11)..(11): n is a, c, g, or u
ganggucaaunaccugga

SEQ ID NO: 50964 - RNA, 19 nt, Artificial Sequence
  Synthetic
  misc_feature (4)..(4): n is a, c, g, or u
  misc_feature (12)..(12): n is a, c, g, or u
gganggucaaunaccugga

SEQ ID NO: 50965 - RNA, 20 nt, Artificial Sequence
  Synthetic
  misc_feature (5)..(5): n is a, c, g, or u
  misc_feature (13)..(13): n is a, c, g, or u
agganggucaaunaccugga

SEQ ID NO: 50966 - RNA, 21 nt, Artificial Sequence
  Synthetic
  misc_feature (6)..(6): n is a, c, g, or u
  misc_feature (14)..(14): n is a, c, g, or u
cagganggucaaunaccugga

SEQ ID NO: 50967 - RNA, 22 nt, Artificial Sequence
  Synthetic
  misc_feature (7)..(7): n is a, c, g, or u
  misc_feature (15)..(15): n is a, c, g, or u
ucagganggucaaunaccugga

SEQ ID NO: 50968 - RNA, 23 nt, Artificial Sequence
  Synthetic
  misc_feature (8)..(8): n is a, c, g, or u
  misc_feature (16)..(16): n is a, c, g, or u
uucagganggucaaunaccugga

SEQ ID NO: 50969 - RNA, 24 nt, Artificial Sequence
  Synthetic
  misc_feature (9)..(9): n is a, c, g, or u
  misc_feature (17)..(17): n is a, c, g, or u
uuucagganggucaaunaccugga

SEQ ID NO: 50970 - RNA, 18 nt, Artificial Sequence
  Synthetic
gcucgcagccggucugga

SEQ ID NO: 50971 - RNA, 19 nt, Artificial Sequence
  Synthetic
cgcucgcagccggucugga

SEQ ID NO: 50972 - RNA, 20 nt, Artificial Sequence
  Synthetic
ucgcucgcagccggucugga

SEQ ID NO: 50973 - RNA, 21 nt, Artificial Sequence
  Synthetic
uucgcucgcagccggucugga

SEQ ID NO: 50974 - RNA, 22 nt, Artificial Sequence
  Synthetic
uuucgcucgcagccggucugga

SEQ ID NO: 50975 - RNA, 23 nt, Artificial Sequence
  Synthetic
guuucgcucgcagccggucugga

SEQ ID NO: 50976 - RNA, 24 nt, Artificial Sequence
  Synthetic
uguuucgcucgcagccggucugga

SEQ ID NO: 50977 - RNA, 18 nt, Artificial Sequence
  Synthetic
  misc_feature (16)..(16): n is a, c, g, or u
agacuguguauuuaanga

SEQ ID NO: 50978 - RNA, 19 nt, Artificial Sequence
  Synthetic
  misc_feature (17)..(17): n is a, c, g, or u
aagacuguguauuuaanga

SEQ ID NO: 50979 - RNA, 20 nt, Artificial Sequence
  Synthetic
  misc_feature (18)..(18): n is a, c, g, or u
aaagacuguguauuuaanga

SEQ ID NO: 50980 - RNA, 21 nt, Artificial Sequence
  Synthetic
  misc_feature (19)..(19): n is a, c, g, or u
caaagacuguguauuuaanga

SEQ ID NO: 50981 - RNA, 22 nt, Artificial Sequence
  Synthetic
  misc_feature (20)..(20): n is a, c, g, or u
ucaaagacuguguauuuaanga

SEQ ID NO: 50982 - RNA, 23 nt, Artificial Sequence
  Synthetic
  misc_feature (21)..(21): n is a, c, g, or u
aucaaagacuguguauuuaanga

SEQ ID NO: 50983 - RNA, 24 nt, Artificial Sequence
  Synthetic
  misc_feature (22)..(22): n is a, c, g, or u
caucaaagacuguguauuuaanga

SEQ ID NO: 50984 - RNA, 18 nt, Artificial Sequence
  Synthetic
  misc_feature (6)..(6): n is a, c, g, or u
  misc_feature (15)..(16): n is a, c, g, or u
ccucunucaacgacnnga

SEQ ID NO: 50985 - RNA, 19 nt, Artificial Sequence
  Synthetic
  misc_feature (7)..(7): n is a, c, g, or u
  misc_feature (16)..(17): n is a, c, g, or u
accucunucaacgacnnga

SEQ ID NO: 50986 - RNA, 20 nt, Artificial Sequence
  Synthetic
  misc_feature (8)..(8): n is a, c, g, or u
  misc_feature (17)..(18): n is a, c, g, or u
caccucunucaacgacnnga

SEQ ID NO: 50987 - RNA, 21 nt, Artificial Sequence
  Synthetic
  misc_feature (9)..(9): n is a, c, g, or u
  misc_feature (18)..(19): n is a, c, g, or u
gcaccucunucaacgacnnga

SEQ ID NO: 50988 - RNA, 22 nt, Artificial Sequence
  Synthetic
  misc_feature (10)..(10): n is a, c, g, or u
  misc_feature (19)..(20): n is a, c, g, or u
agcaccucunucaacgacnnga

SEQ ID NO: 50989 - RNA, 23 nt, Artificial Sequence
  Synthetic
  misc_feature (11)..(11): n is a, c, g, or u
  misc_feature (20)..(21): n is a, c, g, or u
gagcaccucunucaacgacnnga

SEQ ID NO: 50990 - RNA, 24 nt, Artificial Sequence
  Synthetic
  misc_feature (12)..(12): n is a, c, g, or u
  misc_feature (21)..(22): n is a, c, g, or u
ggagcaccucunucaacgacnnga

SEQ ID NO: 50991 - RNA, 18 nt, Artificial Sequence
  Synthetic
  misc_feature (10)..(10): n is a, c, g, or u
  misc_feature (13)..(13): n is a, c, g, or u
uguaaaucgnccnauuga

SEQ ID NO: 50992 - RNA, 19 nt, Artificial Sequence
  Synthetic
  misc_feature (11)..(11): n is a, c, g, or u
  misc_feature (14)..(14): n is a, c, g, or u
cuguaaaucgnccnauuga

SEQ ID NO: 50993 - RNA, 20 nt, Artificial Sequence
  Synthetic
  misc_feature (12)..(12): n is a, c, g, or u
  misc_feature (15)..(15): n is a, c, g, or u
ccuguaaaucgnccnauuga

SEQ ID NO: 50994 - RNA, 21 nt, Artificial Sequence
  Synthetic
  misc_feature (13)..(13): n is a, c, g, or u
  misc_feature (16)..(16): n is a, c, g, or u
uccuguaaaucgnccnauuga

SEQ ID NO: 50995 - RNA, 22 nt, Artificial Sequence
  Synthetic
  misc_feature (14)..(14): n is a, c, g, or u
  misc_feature (17)..(17): n is a, c, g, or u
uuccuguaaaucgnccnauuga

SEQ ID NO: 50996 - RNA, 23 nt, Artificial Sequence
  Synthetic
  misc_feature (15)..(15): n is a, c, g, or u
  misc_feature (18)..(18): n is a, c, g, or u
cuuccuguaaaucgnccnauuga

SEQ ID NO: 50997 - RNA, 24 nt, Artificial Sequence
  Synthetic
  misc_feature (16)..(16): n is a, c, g, or u
  misc_feature (19)..(19): n is a, c, g, or u
acuuccuguaaaucgnccnauuga

SEQ ID NO: 50998 - RNA, 18 nt, Artificial Sequence
  Synthetic
gcuuuaggaaaauaccua

SEQ ID NO: 50999 - RNA, 19 nt, Artificial Sequence
  Synthetic
ggcuuuaggaaaauaccua

SEQ ID NO: 51000 - RNA, 20 nt, Artificial Sequence
  Synthetic
gggcuuuaggaaaauaccua

SEQ ID NO: 51001 - RNA, 21 nt, Artificial Sequence
  Synthetic
ugggcuuuaggaaaauaccua

SEQ ID NO: 51002 - RNA, 22 nt, Artificial Sequence
  Synthetic
  misc_feature (1)..(1): n is a, c, g, or u
nugggcuuuaggaaaauaccua

SEQ ID NO: 51003 - RNA, 23 nt, Artificial Sequence
  Synthetic
  misc_feature (2)..(2): n is a, c, g, or u
cnugggcuuuaggaaaauaccua

SEQ ID NO: 51004 - RNA, 24 nt, Artificial Sequence
  Synthetic
  misc_feature (3)..(3): n is a, c, g, or u
ucnugggcuuuaggaaaauaccua

SEQ ID NO: 51005 - RNA, 18 nt, Artificial Sequence
  Synthetic
acuucucucaauuuucua

SEQ ID NO: 51006 - RNA, 19 nt, Artificial Sequence
  Synthetic
gacuucucucaauuuucua

SEQ ID NO: 51007 - RNA, 20 nt, Artificial Sequence
  Synthetic
ggacuucucucaauuuucua

SEQ ID NO: 51008 - RNA, 21 nt, Artificial Sequence
  Synthetic
uggacuucucucaauuuucua

SEQ ID NO: 51009 - RNA, 22 nt, Artificial Sequence
  Synthetic
guggacuucucucaauuuucua

SEQ ID NO: 51010 - RNA, 23 nt, Artificial Sequence
  Synthetic
gguggacuucucucaauuuucua

SEQ ID NO: 51011 - RNA, 24 nt, Artificial Sequence
  Synthetic
ugguggacuucucucaauuuucua

SEQ ID NO: 51012 - RNA, 18 nt, Artificial Sequence
  Synthetic
uauauggaugaucuggua

SEQ ID NO: 51013 - RNA, 19 nt, Artificial Sequence
  Synthetic
uuauauggaugaucuggua

SEQ ID NO: 51014 - RNA, 20 nt, Artificial Sequence
  Synthetic
guuauauggaugaucuggua

SEQ ID NO: 51015 - RNA, 21 nt, Artificial Sequence
  Synthetic
aguuauauggaugaucuggua

SEQ ID NO: 51016 - RNA, 22 nt, Artificial Sequence
  Synthetic
uaguuauauggaugaucuggua

SEQ ID NO: 51017 - RNA, 23 nt, Artificial Sequence
  Synthetic
uuaguuauauggaugaucuggua

SEQ ID NO: 51018 - RNA, 24 nt, Artificial Sequence
  Synthetic
uuuaguuauauggaugaucuggua

SEQ ID NO: 51019 - RNA, 18 nt, Artificial Sequence
  Synthetic
  misc_feature (16)..(16): n is a, c, g, or u
caccgcuucagcccunua

SEQ ID NO: 51020 - RNA, 19 nt, Artificial Sequence
  Synthetic
  misc_feature (17)..(17): n is a, c, g, or u
acaccgcuucagcccunua

SEQ ID NO: 51021 - RNA, 20 nt, Artificial Sequence
  Synthetic
  misc_feature (18)..(18): n is a, c, g, or u
gacaccgcuucagcccunua

SEQ ID NO: 51022 - RNA, 21 nt, Artificial Sequence
  Synthetic
  misc_feature (19)..(19): n is a, c, g, or u
cgacaccgcuucagcccunua

SEQ ID NO: 51023 - RNA, 22 nt, Artificial Sequence
  Synthetic
  misc_feature (20)..(20): n is a, c, g, or u
ucgacaccgcuucagcccunua

SEQ ID NO: 51024 - RNA, 23 nt, Artificial Sequence
  Synthetic
  misc_feature (21)..(21): n is a, c, g, or u
cucgacaccgcuucagcccunua

SEQ ID NO: 51025 - RNA, 24 nt, Artificial Sequence
  Synthetic
  misc_feature (22)..(22): n is a, c, g, or u
acucgacaccgcuucagcccunua

SEQ ID NO: 51026 - RNA, 18 nt, Artificial Sequence
  Synthetic
  misc_feature (3)..(3): n is a, c, g, or u
canuauuugcauacuuua

SEQ ID NO: 51027 - RNA, 19 nt, Artificial Sequence
  Synthetic
  misc_feature (4)..(4): n is a, c, g, or u
acanuauuugcauacuuua

SEQ ID NO: 51028 - RNA, 20 nt, Artificial Sequence
  Synthetic
  misc_feature (5)..(5): n is a, c, g, or u
gacanuauuugcauacuuua

SEQ ID NO: 51029 - RNA, 21 nt, Artificial Sequence
  Synthetic
  misc_feature (6)..(6): n is a, c, g, or u
agacanuauuugcauacuuua

SEQ ID NO: 51030 - RNA, 22 nt, Artificial Sequence
  Synthetic
  misc_feature (7)..(7): n is a, c, g, or u
cagacanuauuugcauacuuua

SEQ ID NO: 51031 - RNA, 23 nt, Artificial Sequence
  Synthetic
  misc_feature (8)..(8): n is a, c, g, or u
ccagacanuauuugcauacuuua

SEQ ID NO: 51032 - RNA, 24 nt, Artificial Sequence
  Synthetic
  misc_feature (9)..(9): n is a, c, g, or u
accagacanuauuugcauacuuua

SEQ ID NO: 51033 - RNA, 18 nt, Artificial Sequence
  Synthetic
  misc_feature (14)..(14): n is a, c, g, or u
ugggacuucaacanaaac

SEQ ID NO: 51034 - RNA, 19 nt, Artificial Sequence
  Synthetic
  misc_feature (1)..(1): n is a, c, g, or u
  misc_feature (15)..(15): n is a, c, g, or u
nugggacuucaacanaaac

SEQ ID NO: 51035 - RNA, 20 nt, Artificial Sequence
  Synthetic
  misc_feature (2)..(2): n is a, c, g, or u
  misc_feature (16)..(16): n is a, c, g, or u
anugggacuucaacanaaac

SEQ ID NO: 51036 - RNA, 21 nt, Artificial Sequence
  Synthetic
  misc_feature (3)..(3): n is a, c, g, or u
  misc_feature (17)..(17): n is a, c, g, or u
ganugggacuucaacanaaac

SEQ ID NO: 51037 - RNA, 22 nt, Artificial Sequence
  Synthetic
  misc_feature (4)..(4): n is a, c, g, or u
  misc_feature (18)..(18): n is a, c, g, or u
cganugggacuucaacanaaac

SEQ ID NO: 51038 - RNA, 23 nt, Artificial Sequence
  Synthetic
  misc_feature (5)..(5): n is a, c, g, or u
  misc_feature (19)..(19): n is a, c, g, or u
ccganugggacuucaacanaaac

SEQ ID NO: 51039 - RNA, 24 nt, Artificial Sequence
  Synthetic
  misc_feature (6)..(6): n is a, c, g, or u
  misc_feature (20)..(20): n is a, c, g, or u
cccganugggacuucaacanaaac

SEQ ID NO: 51040 - RNA, 18 nt, Artificial Sequence
  Synthetic
  misc_feature (11)..(11): n is a, c, g, or u
caccauauucnugggaac

SEQ ID NO: 51041 - RNA, 19 nt, Artificial Sequence
  Synthetic
  misc_feature (12)..(12): n is a, c, g, or u
ucaccauauucnugggaac

SEQ ID NO: 51042 - RNA, 20 nt, Artificial Sequence
  Synthetic
  misc_feature (13)..(13): n is a, c, g, or u
gucaccauauucnugggaac

SEQ ID NO: 51043 - RNA, 21 nt, Artificial Sequence
  Synthetic
  misc_feature (14)..(14): n is a, c, g, or u
ggucaccauauucnugggaac

SEQ ID NO: 51044 - RNA, 22 nt, Artificial Sequence
  Synthetic
  misc_feature (15)..(15): n is a, c, g, or u
gggucaccauauucnugggaac

SEQ ID NO: 51045 - RNA, 23 nt, Artificial Sequence
  Synthetic
  misc_feature (16)..(16): n is a, c, g, or u
ugggucaccauauucnugggaac

SEQ ID NO: 51046 - RNA, 24 nt, Artificial Sequence
  Synthetic
  misc_feature (17)..(17): n is a, c, g, or u
gugggucaccauauucnugggaac

SEQ ID NO: 51047 - RNA, 18 nt, Artificial Sequence
  Synthetic
  misc_feature (14)..(14): n is a, c, g, or u
gggggcccugcuangaac

SEQ ID NO: 51048 - RNA, 19 nt, Artificial Sequence
  Synthetic
  misc_feature (15)..(15): n is a, c, g, or u
ugggggcccugcuangaac

SEQ ID NO: 51049 - RNA, 20 nt, Artificial Sequence
  Synthetic
  misc_feature (16)..(16): n is a, c, g, or u
cugggggcccugcuangaac

SEQ ID NO: 51050 - RNA, 21 nt, Artificial Sequence
  Synthetic
  misc_feature (17)..(17): n is a, c, g, or u
acugggggcccugcuangaac

SEQ ID NO: 51051 - RNA, 22 nt, Artificial Sequence
  Synthetic
  misc_feature (18)..(18): n is a, c, g, or u
gacugggggcccugcuangaac

SEQ ID NO: 51052 - RNA, 23 nt, Artificial Sequence
  Synthetic
  misc_feature (19)..(19): n is a, c, g, or u
agacugggggcccugcuangaac

SEQ ID NO: 51053 - RNA, 24 nt, Artificial Sequence
  Synthetic
  misc_feature (20)..(20): n is a, c, g, or u
aagacugggggcccugcuangaac

SEQ ID NO: 51054 - RNA, 18 nt, Artificial Sequence
  Synthetic
  misc_feature (9)..(9): n is a, c, g, or u
  misc_feature (12)..(12): n is a, c, g, or u
aacuaugunaanacuaac

SEQ ID NO: 51055 - RNA, 19 nt, Artificial Sequence
  Synthetic
  misc_feature (10)..(10): n is a, c, g, or u
  misc_feature (13)..(13): n is a, c, g, or u
uaacuaugunaanacuaac

SEQ ID NO: 51056 - RNA, 20 nt, Artificial Sequence
  Synthetic
  misc_feature (11)..(11): n is a, c, g, or u
  misc_feature (14)..(14): n is a, c, g, or u
uuaacuaugunaanacuaac

SEQ ID NO: 51057 - RNA, 21 nt, Artificial Sequence
  Synthetic
  misc_feature (12)..(12): n is a, c, g, or u
  misc_feature (15)..(15): n is a, c, g, or u
guuaacuaugunaanacuaac

SEQ ID NO: 51058 - RNA, 22 nt, Artificial Sequence
  Synthetic
  misc_feature (1)..(1): n is a, c, g, or u
  misc_feature (13)..(13): n is a, c, g, or u
  misc_feature (16)..(16): n is a, c, g, or u
nguuaacuaugunaanacuaac

SEQ ID NO: 51059 - RNA, 23 nt, Artificial Sequence
  Synthetic
  misc_feature (2)..(2): n is a, c, g, or u
  misc_feature (14)..(14): n is a, c, g, or u
  misc_feature (17)..(17): n is a, c, g, or u
unguuaacuaugunaanacuaac

SEQ ID NO: 51060 - RNA, 24 nt, Artificial Sequence
  Synthetic
  misc_feature (3)..(3): n is a, c, g, or u
  misc_feature (15)..(15): n is a, c, g, or u
  misc_feature (18)..(18): n is a, c, g, or u
gunguuaacuaugunaanacuaac

SEQ ID NO: 51061 - RNA, 18 nt, Artificial Sequence
  Synthetic
  misc_feature (14)..(14): n is a, c, g, or u
gggaugcuuuaganucac

SEQ ID NO: 51062 - RNA, 19 nt, Artificial Sequence
  Synthetic
  misc_feature (1)..(1): n is a, c, g, or u
  misc_feature (15)..(15): n is a, c, g, or u
ngggaugcuuuaganucac

SEQ ID NO: 51063 - RNA, 20 nt, Artificial Sequence
  Synthetic
  misc_feature (2)..(2): n is a, c, g, or u
  misc_feature (16)..(16): n is a, c, g, or u
cngggaugcuuuaganucac

SEQ ID NO: 51064 - RNA, 21 nt, Artificial Sequence
  Synthetic
  misc_feature (3)..(3): n is a, c, g, or u
  misc_feature (17)..(17): n is a, c, g, or u
acngggaugcuuuaganucac

SEQ ID NO: 51065 - RNA, 22 nt, Artificial Sequence
  Synthetic
  misc_feature (4)..(4): n is a, c, g, or u
  misc_feature (18)..(18): n is a, c, g, or u
uacngggaugcuuuaganucac

SEQ ID NO: 51066 - RNA, 23 nt, Artificial Sequence
  Synthetic
  misc_feature (1)..(1): n is a, c, g, or u
  misc_feature (5)..(5): n is a, c, g, or u
  misc_feature (19)..(19): n is a, c, g, or u
nuacngggaugcuuuaganucac

SEQ ID NO: 51067 - RNA, 24 nt, Artificial Sequence
  Synthetic
  misc_feature (2)..(2): n is a, c, g, or u
  misc_feature (6)..(6): n is a, c, g, or u
  misc_feature (20)..(20): n is a, c, g, or u
unuacngggaugcuuuaganucac

SEQ ID NO: 51068 - RNA, 18 nt, Artificial Sequence
  Synthetic
  misc_feature (12)..(12): n is a, c, g, or u
aucaaucuucungaagac

SEQ ID NO: 51069 - RNA, 19 nt, Artificial Sequence
  Synthetic
  misc_feature (13)..(13): n is a, c, g, or u
caucaaucuucungaagac

SEQ ID NO: 51070 - RNA, 20 nt, Artificial Sequence
  Synthetic
  misc_feature (14)..(14): n is a, c, g, or u
ucaucaaucuucungaagac

SEQ ID NO: 51071 - RNA, 21 nt, Artificial Sequence
  Synthetic
  misc_feature (15)..(15): n is a, c, g, or u
aucaucaaucuucungaagac

SEQ ID NO: 51072 - RNA, 22 nt, Artificial Sequence
  Synthetic
  misc_feature (16)..(16): n is a, c, g, or u
caucaucaaucuucungaagac

SEQ ID NO: 51073 - RNA, 23 nt, Artificial Sequence
  Synthetic
  misc_feature (17)..(17): n is a, c, g, or u
acaucaucaaucuucungaagac

SEQ ID NO: 51074 - RNA, 24 nt, Artificial Sequence
  Synthetic
  misc_feature (18)..(18): n is a, c, g, or u
cacaucaucaaucuucungaagac

SEQ ID NO: 51075 - RNA, 18 nt, Artificial Sequence
  Synthetic
  misc_feature (10)..(10): n is a, c, g, or u
agcaccucunucaacgac

SEQ ID NO: 51076 - RNA, 19 nt, Artificial Sequence
  Synthetic
  misc_feature (11)..(11): n is a, c, g, or u
gagcaccucunucaacgac

SEQ ID NO: 51077 - RNA, 20 nt, Artificial Sequence
  Synthetic
  misc_feature (12)..(12): n is a, c, g, or u
ggagcaccucunucaacgac

SEQ ID NO: 51078 - RNA, 21 nt, Artificial Sequence
  Synthetic
  misc_feature (13)..(13): n is a, c, g, or u
gggagcaccucunucaacgac

SEQ ID NO: 51079 - RNA, 22 nt, Artificial Sequence
  Synthetic
  misc_feature (14)..(14): n is a, c, g, or u
ugggagcaccucunucaacgac

SEQ ID NO: 51080 - RNA, 23 nt, Artificial Sequence
  Synthetic
  misc_feature (15)..(15): n is a, c, g, or u
augggagcaccucunucaacgac

SEQ ID NO: 51081 - RNA, 24 nt, Artificial Sequence
  Synthetic
  misc_feature (16)..(16): n is a, c, g, or u
caugggagcaccucunucaacgac

SEQ ID NO: 51082 - RNA, 18 nt, Artificial Sequence
  Synthetic
  misc_feature (15)..(15): n is a, c, g, or u
gacuguguauuuaangac

SEQ ID NO: 51083 - RNA, 19 nt, Artificial Sequence
  Synthetic
  misc_feature (16)..(16): n is a, c, g, or u
agacuguguauuuaangac

SEQ ID NO: 51084 - RNA, 20 nt, Artificial Sequence
  Synthetic
  misc_feature (17)..(17): n is a, c, g, or u
aagacuguguauuuaangac

SEQ ID NO: 51085 - RNA, 21 nt, Artificial Sequence
  Synthetic
  misc_feature (18)..(18): n is a, c, g, or u
aaagacuguguauuuaangac

SEQ ID NO: 51086 - RNA, 22 nt, Artificial Sequence
  Synthetic
  misc_feature (19)..(19): n is a, c, g, or u
caaagacuguguauuuaangac

SEQ ID NO: 51087 - RNA, 23 nt, Artificial Sequence
  Synthetic
  misc_feature (20)..(20): n is a, c, g, or u
ucaaagacuguguauuuaangac

SEQ ID NO: 51088 - RNA, 24 nt, Artificial Sequence
  Synthetic
  misc_feature (21)..(21): n is a, c, g, or u
aucaaagacuguguauuuaangac

SEQ ID NO: 51089 - RNA, 18 nt, Artificial Sequence
  Synthetic
  misc_feature (6)..(6): n is a, c, g, or u
  misc_feature (10)..(10): n is a, c, g, or u
  misc_feature (15)..(15): n is a, c, g, or u
uuucunugunaacanuac

SEQ ID NO: 51090 - RNA, 19 nt, Artificial Sequence
  Synthetic
  misc_feature (7)..(7): n is a, c, g, or u
  misc_feature (11)..(11): n is a, c, g, or u
  misc_feature (16)..(16): n is a, c, g, or u
cuuucunugunaacanuac

SEQ ID NO: 51091 - RNA, 20 nt, Artificial Sequence
  Synthetic
  misc_feature (8)..(8): n is a, c, g, or u
  misc_feature (12)..(12): n is a, c, g, or u
  misc_feature (17)..(17): n is a, c, g, or u
ccuuucunugunaacanuac

SEQ ID NO: 51092 - RNA, 21 nt, Artificial Sequence
  Synthetic
  misc_feature (9)..(9): n is a, c, g, or u
  misc_feature (13)..(13): n is a, c, g, or u
  misc_feature (18)..(18): n is a, c, g, or u
gccuuucunugunaacanuac

SEQ ID NO: 51093 - RNA, 22 nt, Artificial Sequence
  Synthetic
  misc_feature (10)..(10): n is a, c, g, or u
  misc_feature (14)..(14): n is a, c, g, or u
  misc_feature (19)..(19): n is a, c, g, or u
ggccuuucunugunaacanuac

SEQ ID NO: 51094 - RNA, 23 nt, Artificial Sequence
  Synthetic
  misc_feature (11)..(11): n is a, c, g, or u
  misc_feature (15)..(15): n is a, c, g, or u
  misc_feature (20)..(20): n is a, c, g, or u
aggccuuucunugunaacanuac

SEQ ID NO: 51095 - RNA, 24 nt, Artificial Sequence
  Synthetic
  misc_feature (12)..(12): n is a, c, g, or u
  misc_feature (16)..(16): n is a, c, g, or u
  misc_feature (21)..(21): n is a, c, g, or u
aaggccuuucunugunaacanuac

SEQ ID NO: 51096 - RNA, 18 nt, Artificial Sequence
  Synthetic
cgucgcauggagaccacc

SEQ ID NO: 51097 - RNA, 19 nt, Artificial Sequence
  Synthetic
acgucgcauggagaccacc

SEQ ID NO: 51098 - RNA, 20 nt, Artificial Sequence
  Synthetic
cacgucgcauggagaccacc

SEQ ID NO: 51099 - RNA, 21 nt, Artificial Sequence
  Synthetic
gcacgucgcauggagaccacc

SEQ ID NO: 51100 - RNA, 22 nt, Artificial Sequence
  Synthetic
ugcacgucgcauggagaccacc

SEQ ID NO: 51101 - RNA, 23 nt, Artificial Sequence
  Synthetic
cugcacgucgcauggagaccacc

SEQ ID NO: 51102 - RNA, 24 nt, Artificial Sequence
  Synthetic
ucugcacgucgcauggagaccacc

SEQ ID NO: 51103 - RNA, 18 nt, Artificial Sequence
  Synthetic
  misc_feature (3)..(3): n is a, c, g, or u
ugnugcuguuccaaaccc

SEQ ID NO: 51104 - RNA, 19 nt, Artificial Sequence
  Synthetic
  misc_feature (1)..(1): n is a, c, g, or u
  misc_feature (4)..(4): n is a, c, g, or u
nugnugcuguuccaaaccc

SEQ ID NO: 51105 - RNA, 20 nt, Artificial Sequence
  Synthetic
  misc_feature (2)..(2): n is a, c, g, or u
  misc_feature (5)..(5): n is a, c, g, or u
cnugnugcuguuccaaaccc

SEQ ID NO: 51106 - RNA, 21 nt, Artificial Sequence
  Synthetic
  misc_feature (3)..(3): n is a, c, g, or u
  misc_feature (6)..(6): n is a, c, g, or u
ucnugnugcuguuccaaaccc

SEQ ID NO: 51107 - RNA, 22 nt, Artificial Sequence
  Synthetic
  misc_feature (4)..(4): n is a, c, g, or u
  misc_feature (7)..(7): n is a, c, g, or u
cucnugnugcuguuccaaaccc

SEQ ID NO: 51108 - RNA, 23 nt, Artificial Sequence
  Synthetic
  misc_feature (5)..(5): n is a, c, g, or u
  misc_feature (8)..(8): n is a, c, g, or u
ccucnugnugcuguuccaaaccc

SEQ ID NO: 51109 - RNA, 24 nt, Artificial Sequence
  Synthetic
  misc_feature (6)..(6): n is a, c, g, or u
  misc_feature (9)..(9): n is a, c, g, or u
cccucnugnugcuguuccaaaccc

SEQ ID NO: 51110 - RNA, 18 nt, Artificial Sequence
  Synthetic
acgacgaggcaggucccc

SEQ ID NO: 51111 - RNA, 19 nt, Artificial Sequence
  Synthetic
gacgacgaggcaggucccc

SEQ ID NO: 51112 - RNA, 20 nt, Artificial Sequence
  Synthetic
agacgacgaggcaggucccc

SEQ ID NO: 51113 - RNA, 21 nt, Artificial Sequence
  Synthetic
uagacgacgaggcaggucccc

SEQ ID NO: 51114 - RNA, 22 nt, Artificial Sequence
  Synthetic
uuagacgacgaggcaggucccc

SEQ ID NO: 51115 - RNA, 23 nt, Artificial Sequence
  Synthetic
guuagacgacgaggcaggucccc

SEQ ID NO: 51116 - RNA, 24 nt, Artificial Sequence
  Synthetic
uguuagacgacgaggcaggucccc

SEQ ID NO: 51117 - RNA, 18 nt, Artificial Sequence
  Synthetic
acaucacaucaggacucc

SEQ ID NO: 51118 - RNA, 19 nt, Artificial Sequence
  Synthetic
aacaucacaucaggacucc

SEQ ID NO: 51119 - RNA, 20 nt, Artificial Sequence
  Synthetic
caacaucacaucaggacucc

SEQ ID NO: 51120 - RNA, 21 nt, Artificial Sequence
  Synthetic
acaacaucacaucaggacucc

SEQ ID NO: 51121 - RNA, 22 nt, Artificial Sequence
  Synthetic
gacaacaucacaucaggacucc

SEQ ID NO: 51122 - RNA, 23 nt, Artificial Sequence
  Synthetic
ggacaacaucacaucaggacucc

SEQ ID NO: 51123 - RNA, 24 nt, Artificial Sequence
  Synthetic
uggacaacaucacaucaggacucc

SEQ ID NO: 51124 - RNA, 18 nt, Artificial Sequence
  Synthetic
uccaccaaucggcggucc

SEQ ID NO: 51125 - RNA, 19 nt, Artificial Sequence
  Synthetic
uuccaccaaucggcggucc

SEQ ID NO: 51126 - RNA, 20 nt, Artificial Sequence
  Synthetic
cuuccaccaaucggcggucc

SEQ ID NO: 51127 - RNA, 21 nt, Artificial Sequence
  Synthetic
gcuuccaccaaucggcggucc

SEQ ID NO: 51128 - RNA, 22 nt, Artificial Sequence
  Synthetic
ugcuuccaccaaucggcggucc

SEQ ID NO: 51129 - RNA, 23 nt, Artificial Sequence
  Synthetic
cugcuuccaccaaucggcggucc

SEQ ID NO: 51130 - RNA, 24 nt, Artificial Sequence
  Synthetic
ccugcuuccaccaaucggcggucc

SEQ ID NO: 51131 - RNA, 18 nt, Artificial Sequence
  Synthetic
ucccaauguuaguauucc

SEQ ID NO: 51132 - RNA, 19 nt, Artificial Sequence
  Synthetic
uucccaauguuaguauucc

SEQ ID NO: 51133 - RNA, 20 nt, Artificial Sequence
  Synthetic
cuucccaauguuaguauucc

SEQ ID NO: 51134 - RNA, 21 nt, Artificial Sequence
  Synthetic
gcuucccaauguuaguauucc

SEQ ID NO: 51135 - RNA, 22 nt, Artificial Sequence
  Synthetic
agcuucccaauguuaguauucc

SEQ ID NO: 51136 - RNA, 23 nt, Artificial Sequence
  Synthetic
cagcuucccaauguuaguauucc

SEQ ID NO: 51137 - RNA, 24 nt, Artificial Sequence
  Synthetic
ccagcuucccaauguuaguauucc

SEQ ID NO: 51138 - RNA, 18 nt, Artificial Sequence
  Synthetic
gggaacaagagcuacagc

SEQ ID NO: 51139 - RNA, 19 nt, Artificial Sequence
  Synthetic
ugggaacaagagcuacagc

SEQ ID NO: 51140 - RNA, 20 nt, Artificial Sequence
  Synthetic
  misc_feature (1)..(1): n is a, c, g, or u
nugggaacaagagcuacagc

SEQ ID NO: 51141 - RNA, 21 nt, Artificial Sequence
  Synthetic
  misc_feature (2)..(2): n is a, c, g, or u
cnugggaacaagagcuacagc

SEQ ID NO: 51142 - RNA, 22 nt, Artificial Sequence
  Synthetic
  misc_feature (3)..(3): n is a, c, g, or u
ucnugggaacaagagcuacagc

SEQ ID NO: 51143 - RNA, 23 nt, Artificial Sequence
  Synthetic
  misc_feature (4)..(4): n is a, c, g, or u
uucnugggaacaagagcuacagc

SEQ ID NO: 51144 - RNA, 24 nt, Artificial Sequence
  Synthetic
  misc_feature (5)..(5): n is a, c, g, or u
auucnugggaacaagagcuacagc

SEQ ID NO: 51145 - RNA, 18 nt, Artificial Sequence
  Synthetic
  misc_feature (6)..(6): n is a, c, g, or u
ggaucnacgaccaccagc

SEQ ID NO: 51146 - RNA, 19 nt, Artificial Sequence
  Synthetic
  misc_feature (7)..(7): n is a, c, g, or u
aggaucnacgaccaccagc

SEQ ID NO: 51147 - RNA, 20 nt, Artificial Sequence
  Synthetic
  misc_feature (8)..(8): n is a, c, g, or u
caggaucnacgaccaccagc

SEQ ID NO: 51148 - RNA, 21 nt, Artificial Sequence
  Synthetic
  misc_feature (9)..(9): n is a, c, g, or u
ccaggaucnacgaccaccagc

SEQ ID NO: 51149 - RNA, 22 nt, Artificial Sequence
  Synthetic
  misc_feature (10)..(10): n is a, c, g, or u
uccaggaucnacgaccaccagc

SEQ ID NO: 51150 - RNA, 23 nt, Artificial Sequence
  Synthetic
  misc_feature (11)..(11): n is a, c, g, or u
uuccaggaucnacgaccaccagc

SEQ ID NO: 51151 - RNA, 24 nt, Artificial Sequence
  Synthetic
  misc_feature (1)..(1): n is a, c, g, or u
  misc_feature (12)..(12): n is a, c, g, or u
nuuccaggaucnacgaccaccagc

SEQ ID NO: 51152 - RNA, 18 nt, Artificial Sequence
  Synthetic
  misc_feature (3)..(3): n is a, c, g, or u
  misc_feature (9)..(9): n is a, c, g, or u
  misc_feature (15)..(15): n is a, c, g, or u
gancccucncggggncgc

SEQ ID NO: 51153 - RNA, 19 nt, Artificial Sequence
  Synthetic
  misc_feature (4)..(4): n is a, c, g, or u
  misc_feature (10)..(10): n is a, c, g, or u
  misc_feature (16)..(16): n is a, c, g, or u
cgancccucncggggncgc

SEQ ID NO: 51154 - RNA, 20 nt, Artificial Sequence
  Synthetic
  misc_feature (5)..(5): n is a, c, g, or u
  misc_feature (11)..(11): n is a, c, g, or u
  misc_feature (17)..(17): n is a, c, g, or u
acgancccucncggggncgc

SEQ ID NO: 51155 - RNA, 21 nt, Artificial Sequence
  Synthetic
  misc_feature (6)..(6): n is a, c, g, or u
  misc_feature (12)..(12): n is a, c, g, or u
  misc_feature (18)..(18): n is a, c, g, or u
gacgancccucncggggncgc

SEQ ID NO: 51156 - RNA, 22 nt, Artificial Sequence
  Synthetic
  misc_feature (7)..(7): n is a, c, g, or u
  misc_feature (13)..(13): n is a, c, g, or u
  misc_feature (19)..(19): n is a, c, g, or u
ggacgancccucncggggncgc

SEQ ID NO: 51157 - RNA, 23 nt, Artificial Sequence
  Synthetic
  misc_feature (8)..(8): n is a, c, g, or u
  misc_feature (14)..(14): n is a, c, g, or u
  misc_feature (20)..(20): n is a, c, g, or u
cggacgancccucncggggncgc

SEQ ID NO: 51158 - RNA, 24 nt, Artificial Sequence
  Synthetic
  misc_feature (9)..(9): n is a, c, g, or u
  misc_feature (15)..(15): n is a, c, g, or u
  misc_feature (21)..(21): n is a, c, g, or u
gcggacgancccucncggggncgc

SEQ ID NO: 51159 - RNA, 18 nt, Artificial Sequence
  Synthetic
uucaccucugcacgucgc

SEQ ID NO: 51160 - RNA, 19 nt, Artificial Sequence
  Synthetic
cuucaccucugcacgucgc

SEQ ID NO: 51161 - RNA, 20 nt, Artificial Sequence
  Synthetic
gcuucaccucugcacgucgc

SEQ ID NO: 51162 - RNA, 21 nt, Artificial Sequence
  Synthetic
cgcuucaccucugcacgucgc

SEQ ID NO: 51163 - RNA, 22 nt, Artificial Sequence
  Synthetic
ucgcuucaccucugcacgucgc

SEQ ID NO: 51164 - RNA, 23 nt, Artificial Sequence
  Synthetic
uucgcuucaccucugcacgucgc

SEQ ID NO: 51165 - RNA, 24 nt, Artificial Sequence
  Synthetic
cuucgcuucaccucugcacgucgc

SEQ ID NO: 51166 - RNA, 18 nt, Artificial Sequence
  Synthetic
  misc_feature (9)..(10): n is a, c, g, or u
ucaacgacnngaaggggc

SEQ ID NO: 51167 - RNA, 19 nt, Artificial Sequence
  Synthetic
  misc_feature (1)..(1): n is a, c, g, or u
  misc_feature (10)..(11): n is a, c, g, or u
nucaacgacnngaaggggc

SEQ ID NO: 51168 - RNA, 20 nt, Artificial Sequence
  Synthetic
  misc_feature (2)..(2): n is a, c, g, or u
  misc_feature (11)..(12): n is a, c, g, or u
unucaacgacnngaaggggc

SEQ ID NO: 51169 - RNA, 21 nt, Artificial Sequence
  Synthetic
  misc_feature (3)..(3): n is a, c, g, or u
  misc_feature (12)..(13): n is a, c, g, or u
cunucaacgacnngaaggggc

SEQ ID NO: 51170 - RNA, 22 nt, Artificial Sequence
  Synthetic
  misc_feature (4)..(4): n is a, c, g, or u
  misc_feature (13)..(14): n is a, c, g, or u
ucunucaacgacnngaaggggc

SEQ ID NO: 51171 - RNA, 23 nt, Artificial Sequence
  Synthetic
  misc_feature (5)..(5): n is a, c, g, or u
  misc_feature (14)..(15): n is a, c, g, or u
cucunucaacgacnngaaggggc

SEQ ID NO: 51172 - RNA, 24 nt, Artificial Sequence
  Synthetic
  misc_feature (6)..(6): n is a, c, g, or u
  misc_feature (15)..(16): n is a, c, g, or u
ccucunucaacgacnngaaggggc

SEQ ID NO: 51173 - RNA, 18 nt, Artificial Sequence
  Synthetic
cuuggguggcuuuggggc

SEQ ID NO: 51174 - RNA, 19 nt, Artificial Sequence
  Synthetic
ccuuggguggcuuuggggc

SEQ ID NO: 51175 - RNA, 20 nt, Artificial Sequence
  Synthetic
gccuuggguggcuuuggggc

SEQ ID NO: 51176 - RNA, 21 nt, Artificial Sequence
  Synthetic
ugccuuggguggcuuuggggc

SEQ ID NO: 51177 - RNA, 22 nt, Artificial Sequence
  Synthetic
gugccuuggguggcuuuggggc

SEQ ID NO: 51178 - RNA, 23 nt, Artificial Sequence
  Synthetic
ugugccuuggguggcuuuggggc

SEQ ID NO: 51179 - RNA, 24 nt, Artificial Sequence
  Synthetic
cugugccuuggguggcuuuggggc

SEQ ID NO: 51180 - RNA, 18 nt, Artificial Sequence
  Synthetic
  misc_feature (1)..(1): n is a, c, g, or u
  misc_feature (7)..(7): n is a, c, g, or u
  misc_feature (10)..(10): n is a, c, g, or u
  misc_feature (16)..(16): n is a, c, g, or u
nuugganganccugcngc

SEQ ID NO: 51181 - RNA, 19 nt, Artificial Sequence
  Synthetic
  misc_feature (2)..(2): n is a, c, g, or u
  misc_feature (8)..(8): n is a, c, g, or u
  misc_feature (11)..(11): n is a, c, g, or u
  misc_feature (17)..(17): n is a, c, g, or u
anuugganganccugcngc

SEQ ID NO: 51182 - RNA, 20 nt, Artificial Sequence
  Synthetic
  misc_feature (3)..(3): n is a, c, g, or u
  misc_feature (9)..(9): n is a, c, g, or u
  misc_feature (12)..(12): n is a, c, g, or u
  misc_feature (18)..(18): n is a, c, g, or u
aanuugganganccugcngc

SEQ ID NO: 51183 - RNA, 21 nt, Artificial Sequence
  Synthetic
  misc_feature (4)..(4): n is a, c, g, or u
  misc_feature (10)..(10): n is a, c, g, or u
  misc_feature (13)..(13): n is a, c, g, or u
  misc_feature (19)..(19): n is a, c, g, or u
uaanuugganganccugcngc

SEQ ID NO: 51184 - RNA, 22 nt, Artificial Sequence
  Synthetic
  misc_feature (5)..(5): n is a, c, g, or u
  misc_feature (11)..(11): n is a, c, g, or u
  misc_feature (14)..(14): n is a, c, g, or u
  misc_feature (20)..(20): n is a, c, g, or u
auaanuugganganccugcngc

SEQ ID NO: 51185 - RNA, 23 nt, Artificial Sequence
  Synthetic
  misc_feature (6)..(6): n is a, c, g, or u
  misc_feature (12)..(12): n is a, c, g, or u
  misc_feature (15)..(15): n is a, c, g, or u
  misc_feature (21)..(21): n is a, c, g, or u
aauaanuugganganccugcngc

SEQ ID NO: 51186 - RNA, 24 nt, Artificial Sequence
  Synthetic
  misc_feature (7)..(7): n is a, c, g, or u
  misc_feature (13)..(13): n is a, c, g, or u
  misc_feature (16)..(16): n is a, c, g, or u
  misc_feature (22)..(22): n is a, c, g, or u
caauaanuugganganccugcngc

SEQ ID NO: 51187 - RNA, 18 nt, Artificial Sequence
  Synthetic
uuggccaucagcgcaugc

SEQ ID NO: 51188 - RNA, 19 nt, Artificial Sequence
  Synthetic
auuggccaucagcgcaugc

SEQ ID NO: 51189 - RNA, 20 nt, Artificial Sequence
  Synthetic
cauuggccaucagcgcaugc

SEQ ID NO: 51190 - RNA, 21 nt, Artificial Sequence
  Synthetic
ccauuggccaucagcgcaugc

SEQ ID NO: 51191 - RNA, 22 nt, Artificial Sequence
  Synthetic
gccauuggccaucagcgcaugc

SEQ ID NO: 51192 - RNA, 23 nt, Artificial Sequence
  Synthetic
ggccauuggccaucagcgcaugc

SEQ ID NO: 51193 - RNA, 24 nt, Artificial Sequence
  Synthetic
uggccauuggccaucagcgcaugc

SEQ ID NO: 51194 - RNA, 18 nt, Artificial Sequence
  Synthetic
  misc_feature (17)..(17): n is a, c, g, or u
cugccaacuggauccunc

SEQ ID NO: 51195 - RNA, 19 nt, Artificial Sequence
  Synthetic
  misc_feature (18)..(18): n is a, c, g, or u
gcugccaacuggauccunc

SEQ ID NO: 51196 - RNA, 20 nt, Artificial Sequence
  Synthetic
  misc_feature (19)..(19): n is a, c, g, or u
ugcugccaacuggauccunc

SEQ ID NO: 51197 - RNA, 21 nt, Artificial Sequence
  Synthetic
  misc_feature (20)..(20): n is a, c, g, or u
gugcugccaacuggauccunc

SEQ ID NO: 51198 - RNA, 22 nt, Artificial Sequence
  Synthetic
  misc_feature (21)..(21): n is a, c, g, or u
ugugcugccaacuggauccunc

SEQ ID NO: 51199 - RNA, 23 nt, Artificial Sequence
  Synthetic
  misc_feature (1)..(1): n is a, c, g, or u
  misc_feature (22)..(22): n is a, c, g, or u
nugugcugccaacuggauccunc

SEQ ID NO: 51200 - RNA, 24 nt, Artificial Sequence
  Synthetic
  misc_feature (2)..(2): n is a, c, g, or u
  misc_feature (23)..(23): n is a, c, g, or u
gnugugcugccaacuggauccunc

SEQ ID NO: 51201 - RNA, 18 nt, Artificial Sequence
  Synthetic
uauucccaucccaucauc

SEQ ID NO: 51202 - RNA, 19 nt, Artificial Sequence
  Synthetic
guauucccaucccaucauc

SEQ ID NO: 51203 - RNA, 20 nt, Artificial Sequence
  Synthetic
uguauucccaucccaucauc

SEQ ID NO: 51204 - RNA, 21 nt, Artificial Sequence
  Synthetic
  misc_feature (1)..(1): n is a, c, g, or u
nuguauucccaucccaucauc

SEQ ID NO: 51205 - RNA, 22 nt, Artificial Sequence
  Synthetic
  misc_feature (2)..(2): n is a, c, g, or u
cnuguauucccaucccaucauc

SEQ ID NO: 51206 - RNA, 23 nt, Artificial Sequence
  Synthetic
  misc_feature (3)..(3): n is a, c, g, or u
acnuguauucccaucccaucauc

SEQ ID NO: 51207 - RNA, 24 nt, Artificial Sequence
  Synthetic
  misc_feature (4)..(4): n is a, c, g, or u
cacnuguauucccaucccaucauc

SEQ ID NO: 51208 - RNA, 18 nt, Artificial Sequence
  Synthetic
  misc_feature (4)..(4): n is a, c, g, or u
  misc_feature (13)..(13): n is a, c, g, or u
uccngcggacgancccuc

SEQ ID NO: 51209 - RNA, 19 nt, Artificial Sequence
  Synthetic
  misc_feature (5)..(5): n is a, c, g, or u
  misc_feature (14)..(14): n is a, c, g, or u
auccngcggacgancccuc

SEQ ID NO: 51210 - RNA, 20 nt, Artificial Sequence
  Synthetic
  misc_feature (6)..(6): n is a, c, g, or u
  misc_feature (15)..(15): n is a, c, g, or u
aauccngcggacgancccuc

SEQ ID NO: 51211 - RNA, 21 nt, Artificial Sequence
  Synthetic
  misc_feature (7)..(7): n is a, c, g, or u
  misc_feature (16)..(16): n is a, c, g, or u
gaauccngcggacgancccuc

SEQ ID NO: 51212 - RNA, 22 nt, Artificial Sequence
  Synthetic
  misc_feature (8)..(8): n is a, c, g, or u
  misc_feature (17)..(17): n is a, c, g, or u
ugaauccngcggacgancccuc

SEQ ID NO: 51213 - RNA, 23 nt, Artificial Sequence
  Synthetic
  misc_feature (9)..(9): n is a, c, g, or u
  misc_feature (18)..(18): n is a, c, g, or u
cugaauccngcggacgancccuc

SEQ ID NO: 51214 - RNA, 24 nt, Artificial Sequence
  Synthetic
  misc_feature (10)..(10): n is a, c, g, or u
  misc_feature (19)..(19): n is a, c, g, or u
gcugaauccngcggacgancccuc

SEQ ID NO: 51215 - RNA, 18 nt, Artificial Sequence
  Synthetic
ccugcacaacucuugcuc

SEQ ID NO: 51216 - RNA, 19 nt, Artificial Sequence
  Synthetic
accugcacaacucuugcuc

SEQ ID NO: 51217 - RNA, 20 nt, Artificial Sequence
  Synthetic
aaccugcacaacucuugcuc

SEQ ID NO: 51218 - RNA, 21 nt, Artificial Sequence
  Synthetic
aaaccugcacaacucuugcuc

SEQ ID NO: 51219 - RNA, 22 nt, Artificial Sequence
  Synthetic
aaaaccugcacaacucuugcuc

SEQ ID NO: 51220 - RNA, 23 nt, Artificial Sequence
  Synthetic
caaaaccugcacaacucuugcuc

SEQ ID NO: 51221 - RNA, 24 nt, Artificial Sequence
  Synthetic
gcaaaaccugcacaacucuugcuc

SEQ ID NO: 51222 - RNA, 18 nt, Artificial Sequence
  Synthetic
caacucuguuguccucuc

SEQ ID NO: 51223 - RNA, 19 nt, Artificial Sequence
  Synthetic
acaacucuguuguccucuc

SEQ ID NO: 51224 - RNA, 20 nt, Artificial Sequence
  Synthetic
gacaacucuguuguccucuc

SEQ ID NO: 51225 - RNA, 21 nt, Artificial Sequence
  Synthetic
  misc_feature (1)..(1): n is a, c, g, or u
ngacaacucuguuguccucuc

SEQ ID NO: 51226 - RNA, 22 nt, Artificial Sequence
  Synthetic
  misc_feature (2)..(2): n is a, c, g, or u
cngacaacucuguuguccucuc

SEQ ID NO: 51227 - RNA, 23 nt, Artificial Sequence
  Synthetic
  misc_feature (3)..(3): n is a, c, g, or u
acngacaacucuguuguccucuc

SEQ ID NO: 51228 - RNA, 24 nt, Artificial Sequence
  Synthetic
  misc_feature (4)..(4): n is a, c, g, or u
cacngacaacucuguuguccucuc

SEQ ID NO: 51229 - RNA, 18 nt, Artificial Sequence
  Synthetic
uuucgcucgcagccgguc

SEQ ID NO: 51230 - RNA, 19 nt, Artificial Sequence
  Synthetic
guuucgcucgcagccgguc

SEQ ID NO: 51231 - RNA, 20 nt, Artificial Sequence
  Synthetic
uguuucgcucgcagccgguc

SEQ ID NO: 51232 - RNA, 21 nt, Artificial Sequence
  Synthetic
uuguuucgcucgcagccgguc

SEQ ID NO: 51233 - RNA, 22 nt, Artificial Sequence
  Synthetic
cuuguuucgcucgcagccgguc

SEQ ID NO: 51234 - RNA, 23 nt, Artificial Sequence
  Synthetic
gcuuguuucgcucgcagccgguc

SEQ ID NO: 51235 - RNA, 24 nt, Artificial Sequence
  Synthetic
agcuuguuucgcucgcagccgguc

SEQ ID NO: 51236 - RNA, 18 nt, Artificial Sequence
  Synthetic
uuccaccaaucggcgguc

SEQ ID NO: 51237 - RNA, 19 nt, Artificial Sequence
  Synthetic
cuuccaccaaucggcgguc

SEQ ID NO: 51238 - RNA, 20 nt, Artificial Sequence
  Synthetic
gcuuccaccaaucggcgguc

SEQ ID NO: 51239 - RNA, 21 nt, Artificial Sequence
  Synthetic
ugcuuccaccaaucggcgguc

SEQ ID NO: 51240 - RNA, 22 nt, Artificial Sequence
  Synthetic
cugcuuccaccaaucggcgguc

SEQ ID NO: 51241 - RNA, 23 nt, Artificial Sequence
  Synthetic
ccugcuuccaccaaucggcgguc

SEQ ID NO: 51242 - RNA, 24 nt, Artificial Sequence
  Synthetic
uccugcuuccaccaaucggcgguc

SEQ ID NO: 51243 - RNA, 18 nt, Artificial Sequence
  Synthetic
uugugggucaccauauuc

SEQ ID NO: 51244 - RNA, 19 nt, Artificial Sequence
  Synthetic
uuugugggucaccauauuc

SEQ ID NO: 51245 - RNA, 20 nt, Artificial Sequence
  Synthetic
uuuugugggucaccauauuc

SEQ ID NO: 51246 - RNA, 21 nt, Artificial Sequence
  Synthetic
auuuugugggucaccauauuc

SEQ ID NO: 51247 - RNA, 22 nt, Artificial Sequence
  Synthetic
cauuuugugggucaccauauuc

SEQ ID NO: 51248 - RNA, 23 nt, Artificial Sequence
  Synthetic
ucauuuugugggucaccauauuc

SEQ ID NO: 51249 - RNA, 24 nt, Artificial Sequence
  Synthetic
cucauuuugugggucaccauauuc

SEQ ID NO: 51250 - RNA, 18 nt, Artificial Sequence
  Synthetic
  misc_feature (6)..(6): n is a, c, g, or u
cuaucnuauccacacuuc

SEQ ID NO: 51251 - RNA, 19 nt, Artificial Sequence
  Synthetic
  misc_feature (7)..(7): n is a, c, g, or u
ccuaucnuauccacacuuc

SEQ ID NO: 51252 - RNA, 20 nt, Artificial Sequence
  Synthetic
  misc_feature (8)..(8): n is a, c, g, or u
cccuaucnuauccacacuuc

SEQ ID NO: 51253 - RNA, 21 nt, Artificial Sequence
  Synthetic
  misc_feature (9)..(9): n is a, c, g, or u
ccccuaucnuauccacacuuc

SEQ ID NO: 51254 - RNA, 22 nt, Artificial Sequence
  Synthetic
  misc_feature (10)..(10): n is a, c, g, or u
gccccuaucnuauccacacuuc

SEQ ID NO: 51255 - RNA, 23 nt, Artificial Sequence
  Synthetic
  misc_feature (11)..(11): n is a, c, g, or u
ugccccuaucnuauccacacuuc

SEQ ID NO: 51256 - RNA, 24 nt, Artificial Sequence
  Synthetic
  misc_feature (12)..(12): n is a, c, g, or u
augccccuaucnuauccacacuuc

SEQ ID NO: 51257 - RNA, 18 nt, Artificial Sequence
  Synthetic
cucacaucaucaaucuuc

SEQ ID NO: 51258 - RNA, 19 nt, Artificial Sequence
  Synthetic
ucucacaucaucaaucuuc

SEQ ID NO: 51259 - RNA, 20 nt, Artificial Sequence
  Synthetic
cucucacaucaucaaucuuc

SEQ ID NO: 51260 - RNA, 21 nt, Artificial Sequence
  Synthetic
ucucucacaucaucaaucuuc

SEQ ID NO: 51261 - RNA, 22 nt, Artificial Sequence
  Synthetic
cucucucacaucaucaaucuuc

SEQ ID NO: 51262 - RNA, 23 nt, Artificial Sequence
  Synthetic
ccucucucacaucaucaaucuuc

SEQ ID NO: 51263 - RNA, 24 nt, Artificial Sequence
  Synthetic
gccucucucacaucaucaaucuuc

SEQ ID NO: 51264 - RNA, 18 nt, Artificial Sequence
  Synthetic
ggacuucucucaauuuuc

SEQ ID NO: 51265 - RNA, 19 nt, Artificial Sequence
  Synthetic
uggacuucucucaauuuuc

SEQ ID NO: 51266 - RNA, 20 nt, Artificial Sequence
  Synthetic
guggacuucucucaauuuuc

SEQ ID NO: 51267 - RNA, 21 nt, Artificial Sequence
  Synthetic
gguggacuucucucaauuuuc

SEQ ID NO: 51268 - RNA, 22 nt, Artificial Sequence
  Synthetic
ugguggacuucucucaauuuuc

SEQ ID NO: 51269 - RNA, 23 nt, Artificial Sequence
  Synthetic
gugguggacuucucucaauuuuc

SEQ ID NO: 51270 - RNA, 24 nt, Artificial Sequence
  Synthetic
cgugguggacuucucucaauuuuc

SEQ ID NO: 51271 - RNA, 18 nt, Artificial Sequence
  Synthetic
  misc_feature (4)..(4): n is a, c, g, or u
  misc_feature (7)..(7): n is a, c, g, or u
uacnucnaaaacaaaaag

SEQ ID NO: 51272 - RNA, 19 nt, Artificial Sequence
  Synthetic
  misc_feature (5)..(5): n is a, c, g, or u
  misc_feature (8)..(8): n is a, c, g, or u
auacnucnaaaacaaaaag

SEQ ID NO: 51273 - RNA, 20 nt, Artificial Sequence
  Synthetic
  misc_feature (6)..(6): n is a, c, g, or u
  misc_feature (9)..(9): n is a, c, g, or u
aauacnucnaaaacaaaaag

SEQ ID NO: 51274 - RNA, 21 nt, Artificial Sequence
  Synthetic
  misc_feature (1)..(1): n is a, c, g, or u
  misc_feature (7)..(7): n is a, c, g, or u
  misc_feature (10)..(10): n is a, c, g, or u
naauacnucnaaaacaaaaag

SEQ ID NO: 51275 - RNA, 22 nt, Artificial Sequence
  Synthetic
  misc_feature (2)..(2): n is a, c, g, or u
  misc_feature (8)..(8): n is a, c, g, or u
  misc_feature (11)..(11): n is a, c, g, or u
unaauacnucnaaaacaaaaag

SEQ ID NO: 51276 - RNA, 23 nt, Artificial Sequence
  Synthetic
  misc_feature (3)..(3): n is a, c, g, or u
  misc_feature (9)..(9): n is a, c, g, or u
  misc_feature (12)..(12): n is a, c, g, or u
uunaauacnucnaaaacaaaaag

SEQ ID NO: 51277 - RNA, 24 nt, Artificial Sequence
  Synthetic
  misc_feature (4)..(4): n is a, c, g, or u
  misc_feature (10)..(10): n is a, c, g, or u
  misc_feature (13)..(13): n is a, c, g, or u
uuunaauacnucnaaaacaaaaag

SEQ ID NO: 51278 - RNA, 18 nt, Artificial Sequence
  Synthetic
  misc_feature (14)..(14): n is a, c, g, or u
aggcagguccccungaag

SEQ ID NO: 51279 - RNA, 19 nt, Artificial Sequence
  Synthetic
  misc_feature (15)..(15): n is a, c, g, or u
gaggcagguccccungaag

SEQ ID NO: 51280 - RNA, 20 nt, Artificial Sequence
  Synthetic
  misc_feature (16)..(16): n is a, c, g, or u
cgaggcagguccccungaag

SEQ ID NO: 51281 - RNA, 21 nt, Artificial Sequence
  Synthetic
  misc_feature (17)..(17): n is a, c, g, or u
acgaggcagguccccungaag

SEQ ID NO: 51282 - RNA, 22 nt, Artificial Sequence
  Synthetic
  misc_feature (18)..(18): n is a, c, g, or u
gacgaggcagguccccungaag

SEQ ID NO: 51283 - RNA, 23 nt, Artificial Sequence
  Synthetic
  misc_feature (19)..(19): n is a, c, g, or u
cgacgaggcagguccccungaag

SEQ ID NO: 51284 - RNA, 24 nt, Artificial Sequence
  Synthetic
  misc_feature (20)..(20): n is a, c, g, or u
acgacgaggcagguccccungaag

SEQ ID NO: 51285 - RNA, 18 nt, Artificial Sequence
  Synthetic
auuccuuggacucauaag

SEQ ID NO: 51286 - RNA, 19 nt, Artificial Sequence
  Synthetic
uauuccuuggacucauaag

SEQ ID NO: 51287 - RNA, 20 nt, Artificial Sequence
  Synthetic
guauuccuuggacucauaag

SEQ ID NO: 51288 - RNA, 21 nt, Artificial Sequence
  Synthetic
aguauuccuuggacucauaag

SEQ ID NO: 51289 - RNA, 22 nt, Artificial Sequence
  Synthetic
uaguauuccuuggacucauaag

SEQ ID NO: 51290 - RNA, 23 nt, Artificial Sequence
  Synthetic
uuaguauuccuuggacucauaag

SEQ ID NO: 51291 - RNA, 24 nt, Artificial Sequence
  Synthetic
guuaguauuccuuggacucauaag

SEQ ID NO: 51292 - RNA, 18 nt, Artificial Sequence
  Synthetic
aacucccucgccucgcag

SEQ ID NO: 51293 - RNA, 19 nt, Artificial Sequence
  Synthetic
gaacucccucgccucgcag

SEQ ID NO: 51294 - RNA, 20 nt, Artificial Sequence
  Synthetic
agaacucccucgccucgcag

SEQ ID NO: 51295 - RNA, 21 nt, Artificial Sequence
  Synthetic
aagaacucccucgccucgcag

SEQ ID NO: 51296 - RNA, 22 nt, Artificial Sequence
  Synthetic
gaagaacucccucgccucgcag

SEQ ID NO: 51297 - RNA, 23 nt, Artificial Sequence
  Synthetic
agaagaacucccucgccucgcag

SEQ ID NO: 51298 - RNA, 24 nt, Artificial Sequence
  Synthetic
aagaagaacucccucgccucgcag

SEQ ID NO: 51299 - RNA, 18 nt, Artificial Sequence
  Synthetic
  misc_feature (12)..(12): n is a, c, g, or u
cauccacaggcnaugcag

SEQ ID NO: 51300 - RNA, 19 nt, Artificial Sequence
  Synthetic
  misc_feature (1)..(1): n is a, c, g, or u
  misc_feature (13)..(13): n is a, c, g, or u
ncauccacaggcnaugcag

SEQ ID NO: 51301 - RNA, 20 nt, Artificial Sequence
  Synthetic
  misc_feature (2)..(2): n is a, c, g, or u
  misc_feature (14)..(14): n is a, c, g, or u
cncauccacaggcnaugcag

SEQ ID NO: 51302 - RNA, 21 nt, Artificial Sequence
  Synthetic
  misc_feature (3)..(3): n is a, c, g, or u
  misc_feature (15)..(15): n is a, c, g, or u
acncauccacaggcnaugcag

SEQ ID NO: 51303 - RNA, 22 nt, Artificial Sequence
  Synthetic
  misc_feature (4)..(4): n is a, c, g, or u
  misc_feature (16)..(16): n is a, c, g, or u
cacncauccacaggcnaugcag

SEQ ID NO: 51304 - RNA, 23 nt, Artificial Sequence
  Synthetic
  misc_feature (5)..(5): n is a, c, g, or u
  misc_feature (17)..(17): n is a, c, g, or u
acacncauccacaggcnaugcag

SEQ ID NO: 51305 - RNA, 24 nt, Artificial Sequence
  Synthetic
  misc_feature (6)..(6): n is a, c, g, or u
  misc_feature (18)..(18): n is a, c, g, or u
gacacncauccacaggcnaugcag

SEQ ID NO: 51306 - RNA, 18 nt, Artificial Sequence
  Synthetic
  misc_feature (6)..(6): n is a, c, g, or u
uuuaangacugggaggag

SEQ ID NO: 51307 - RNA, 19 nt, Artificial Sequence
  Synthetic
  misc_feature (7)..(7): n is a, c, g, or u
auuuaangacugggaggag

SEQ ID NO: 51308 - RNA, 20 nt, Artificial Sequence
  Synthetic
  misc_feature (8)..(8): n is a, c, g, or u
uauuuaangacugggaggag

SEQ ID NO: 51309 - RNA, 21 nt, Artificial Sequence
  Synthetic
  misc_feature (9)..(9): n is a, c, g, or u
guauuuaangacugggaggag

SEQ ID NO: 51310 - RNA, 22 nt, Artificial Sequence
  Synthetic
  misc_feature (10)..(10): n is a, c, g, or u
uguauuuaangacugggaggag

SEQ ID NO: 51311 - RNA, 23 nt, Artificial Sequence
  Synthetic
  misc_feature (11)..(11): n is a, c, g, or u
guguauuuaangacugggaggag

SEQ ID NO: 51312 - RNA, 24 nt, Artificial Sequence
  Synthetic
  misc_feature (12)..(12): n is a, c, g, or u
uguguauuuaangacugggaggag

SEQ ID NO: 51313 - RNA, 18 nt, Artificial Sequence
  Synthetic
uggcaaacaagguaggag

SEQ ID NO: 51314 - RNA, 19 nt, Artificial Sequence
  Synthetic
auggcaaacaagguaggag

SEQ ID NO: 51315 - RNA, 20 nt, Artificial Sequence
  Synthetic
aauggcaaacaagguaggag

SEQ ID NO: 51316 - RNA, 21 nt, Artificial Sequence
  Synthetic
caauggcaaacaagguaggag

SEQ ID NO: 51317 - RNA, 22 nt, Artificial Sequence
  Synthetic
ccaauggcaaacaagguaggag

SEQ ID NO: 51318 - RNA, 23 nt, Artificial Sequence
  Synthetic
gccaauggcaaacaagguaggag

SEQ ID NO: 51319 - RNA, 24 nt, Artificial Sequence
  Synthetic
ggccaauggcaaacaagguaggag

SEQ ID NO: 51320 - RNA, 18 nt, Artificial Sequence
  Synthetic
  misc_feature (10)..(10): n is a, c, g, or u
  misc_feature (16)..(16): n is a, c, g, or u
ggguuaugunauuggnag

SEQ ID NO: 51321 - RNA, 19 nt, Artificial Sequence
  Synthetic
  misc_feature (11)..(11): n is a, c, g, or u
  misc_feature (17)..(17): n is a, c, g, or u
uggguuaugunauuggnag

SEQ ID NO: 51322 - RNA, 20 nt, Artificial Sequence
  Synthetic
  misc_feature (12)..(12): n is a, c, g, or u
  misc_feature (18)..(18): n is a, c, g, or u
auggguuaugunauuggnag

SEQ ID NO: 51323 - RNA, 21 nt, Artificial Sequence
  Synthetic
  misc_feature (13)..(13): n is a, c, g, or u
  misc_feature (19)..(19): n is a, c, g, or u
cauggguuaugunauuggnag

SEQ ID NO: 51324 - RNA, 22 nt, Artificial Sequence
  Synthetic
  misc_feature (14)..(14): n is a, c, g, or u
  misc_feature (20)..(20): n is a, c, g, or u
ucauggguuaugunauuggnag

SEQ ID NO: 51325 - RNA, 23 nt, Artificial Sequence
  Synthetic
  misc_feature (15)..(15): n is a, c, g, or u
  misc_feature (21)..(21): n is a, c, g, or u
uucauggguuaugunauuggnag

SEQ ID NO: 51326 - RNA, 24 nt, Artificial Sequence
  Synthetic
  misc_feature (16)..(16): n is a, c, g, or u
  misc_feature (22)..(22): n is a, c, g, or u
uuucauggguuaugunauuggnag

SEQ ID NO: 51327 - RNA, 18 nt, Artificial Sequence
  Synthetic
cuucucucaauuuucuag

SEQ ID NO: 51328 - RNA, 19 nt, Artificial Sequence
  Synthetic
acuucucucaauuuucuag

SEQ ID NO: 51329 - RNA, 20 nt, Artificial Sequence
  Synthetic
gacuucucucaauuuucuag

SEQ ID NO: 51330 - RNA, 21 nt, Artificial Sequence
  Synthetic
ggacuucucucaauuuucuag

SEQ ID NO: 51331 - RNA, 22 nt, Artificial Sequence
  Synthetic
uggacuucucucaauuuucuag

SEQ ID NO: 51332 - RNA, 23 nt, Artificial Sequence
  Synthetic
guggacuucucucaauuuucuag

SEQ ID NO: 51333 - RNA, 24 nt, Artificial Sequence
  Synthetic
gguggacuucucucaauuuucuag

SEQ ID NO: 51334 - RNA, 18 nt, Artificial Sequence
  Synthetic
aacuacuguuguuagacg

SEQ ID NO: 51335 - RNA, 19 nt, Artificial Sequence
  Synthetic
aaacuacuguuguuagacg

SEQ ID NO: 51336 - RNA, 20 nt, Artificial Sequence
  Synthetic
gaaacuacuguuguuagacg

SEQ ID NO: 51337 - RNA, 21 nt, Artificial Sequence
  Synthetic
ggaaacuacuguuguuagacg

SEQ ID NO: 51338 - RNA, 22 nt, Artificial Sequence
  Synthetic
cggaaacuacuguuguuagacg

SEQ ID NO: 51339 - RNA, 23 nt, Artificial Sequence
  Synthetic
ccggaaacuacuguuguuagacg

SEQ ID NO: 51340 - RNA, 24 nt, Artificial Sequence
  Synthetic
uccggaaacuacuguuguuagacg

SEQ ID NO: 51341 - RNA, 18 nt, Artificial Sequence
  Synthetic
uggccaucagcgcaugcg

SEQ ID NO: 51342 - RNA, 19 nt, Artificial Sequence
  Synthetic
uuggccaucagcgcaugcg

SEQ ID NO: 51343 - RNA, 20 nt, Artificial Sequence
  Synthetic
auuggccaucagcgcaugcg

SEQ ID NO: 51344 - RNA, 21 nt, Artificial Sequence
  Synthetic
cauuggccaucagcgcaugcg

SEQ ID NO: 51345 - RNA, 22 nt, Artificial Sequence
  Synthetic
ccauuggccaucagcgcaugcg

SEQ ID NO: 51346 - RNA, 23 nt, Artificial Sequence
  Synthetic
gccauuggccaucagcgcaugcg

SEQ ID NO: 51347 - RNA, 24 nt, Artificial Sequence
  Synthetic
ggccauuggccaucagcgcaugcg

SEQ ID NO: 51348 - RNA, 18 nt, Artificial Sequence
  Synthetic
aauuuguucaguggugcg

SEQ ID NO: 51349 - RNA, 19 nt, Artificial Sequence
  Synthetic
caauuuguucaguggugcg

SEQ ID NO: 51350 - RNA, 20 nt, Artificial Sequence
  Synthetic
gcaauuuguucaguggugcg

SEQ ID NO: 51351 - RNA, 21 nt, Artificial Sequence
  Synthetic
ugcaauuuguucaguggugcg

SEQ ID NO: 51352 - RNA, 22 nt, Artificial Sequence
  Synthetic
gugcaauuuguucaguggugcg

SEQ ID NO: 51353 - RNA, 23 nt, Artificial Sequence
  Synthetic
agugcaauuuguucaguggugcg

SEQ ID NO: 51354 - RNA, 24 nt, Artificial Sequence
  Synthetic
uagugcaauuuguucaguggugcg

SEQ ID NO: 51355 - RNA, 18 nt, Artificial Sequence
  Synthetic
  misc_feature (16)..(16): n is a, c, g, or u
ugccaacuggauccuncg

SEQ ID NO: 51356 - RNA, 19 nt, Artificial Sequence
  Synthetic
  misc_feature (17)..(17): n is a, c, g, or u
cugccaacuggauccuncg

SEQ ID NO: 51357 - RNA, 20 nt, Artificial Sequence
  Synthetic
  misc_feature (18)..(18): n is a, c, g, or u
gcugccaacuggauccuncg

SEQ ID NO: 51358 - RNA, 21 nt, Artificial Sequence
  Synthetic
  misc_feature (19)..(19): n is a, c, g, or u
ugcugccaacuggauccuncg

SEQ ID NO: 51359 - RNA, 22 nt, Artificial Sequence
  Synthetic
  misc_feature (20)..(20): n is a, c, g, or u
gugcugccaacuggauccuncg

SEQ ID NO: 51360 - RNA, 23 nt, Artificial Sequence
  Synthetic
  misc_feature (21)..(21): n is a, c, g, or u
ugugcugccaacuggauccuncg

SEQ ID NO: 51361 - RNA, 24 nt, Artificial Sequence
  Synthetic
  misc_feature (1)..(1): n is a, c, g, or u
  misc_feature (22)..(22): n is a, c, g, or u
nugugcugccaacuggauccuncg

SEQ ID NO: 51362 - RNA, 18 nt, Artificial Sequence
  Synthetic
  misc_feature (1)..(1): n is a, c, g, or u
nucucaaucgccgcgucg

SEQ ID NO: 51363 - RNA, 19 nt, Artificial Sequence
  Synthetic
  misc_feature (2)..(2): n is a, c, g, or u
gnucucaaucgccgcgucg

SEQ ID NO: 51364 - RNA, 20 nt, Artificial Sequence
  Synthetic
  misc_feature (3)..(3): n is a, c, g, or u
agnucucaaucgccgcgucg

SEQ ID NO: 51365 - RNA, 21 nt, Artificial Sequence
  Synthetic
  misc_feature (4)..(4): n is a, c, g, or u
aagnucucaaucgccgcgucg

SEQ ID NO: 51366 - RNA, 22 nt, Artificial Sequence
  Synthetic
  misc_feature (5)..(5): n is a, c, g, or u
gaagnucucaaucgccgcgucg

SEQ ID NO: 51367 - RNA, 23 nt, Artificial Sequence
  Synthetic
  misc_feature (6)..(6): n is a, c, g, or u
cgaagnucucaaucgccgcgucg

SEQ ID NO: 51368 - RNA, 24 nt, Artificial Sequence
  Synthetic
  misc_feature (7)..(7): n is a, c, g, or u
acgaagnucucaaucgccgcgucg

SEQ ID NO: 51369 - RNA, 18 nt, Artificial Sequence
  Synthetic
ggccaauggcaaacaagg

SEQ ID NO: 51370 - RNA, 19 nt, Artificial Sequence
  Synthetic
uggccaauggcaaacaagg

SEQ ID NO: 51371 - RNA, 20 nt, Artificial Sequence
  Synthetic
uuggccaauggcaaacaagg

SEQ ID NO: 51372 - RNA, 21 nt, Artificial Sequence
  Synthetic
  misc_feature (1)..(1): n is a, c, g, or u
nuuggccaauggcaaacaagg

SEQ ID NO: 51373 - RNA, 22 nt, Artificial Sequence
  Synthetic
  misc_feature (2)..(2): n is a, c, g, or u
anuuggccaauggcaaacaagg

SEQ ID NO: 51374 - RNA, 23 nt, Artificial Sequence
  Synthetic
  misc_feature (3)..(3): n is a, c, g, or u
canuuggccaauggcaaacaagg

SEQ ID NO: 51375 - RNA, 24 nt, Artificial Sequence
  Synthetic
  misc_feature (4)..(4): n is a, c, g, or u
acanuuggccaauggcaaacaagg

SEQ ID NO: 51376 - RNA, 18 nt, Artificial Sequence
  Synthetic
uuccuuggacucauaagg

SEQ ID NO: 51377 - RNA, 19 nt, Artificial Sequence
  Synthetic
auuccuuggacucauaagg

SEQ ID NO: 51378 - RNA, 20 nt, Artificial Sequence
  Synthetic
uauuccuuggacucauaagg

SEQ ID NO: 51379 - RNA, 21 nt, Artificial Sequence
  Synthetic
guauuccuuggacucauaagg

SEQ ID NO: 51380 - RNA, 22 nt, Artificial Sequence
  Synthetic
aguauuccuuggacucauaagg

SEQ ID NO: 51381 - RNA, 23 nt, Artificial Sequence
  Synthetic
uaguauuccuuggacucauaagg

SEQ ID NO: 51382 - RNA, 24 nt, Artificial Sequence
  Synthetic
uuaguauuccuuggacucauaagg

SEQ ID NO: 51383 - RNA, 18 nt, Artificial Sequence
  Synthetic
gcuguuccaaacccucgg

SEQ ID NO: 51384 - RNA, 19 nt, Artificial Sequence
  Synthetic
ugcuguuccaaacccucgg

SEQ ID NO: 51385 - RNA, 20 nt, Artificial Sequence
  Synthetic
  misc_feature (1)..(1): n is a, c, g, or u
nugcuguuccaaacccucgg

SEQ ID NO: 51386 - RNA, 21 nt, Artificial Sequence
  Synthetic
  misc_feature (2)..(2): n is a, c, g, or u
gnugcuguuccaaacccucgg

SEQ ID NO: 51387 - RNA, 22 nt, Artificial Sequence
  Synthetic
  misc_feature (3)..(3): n is a, c, g, or u
ugnugcuguuccaaacccucgg

SEQ ID NO: 51388 - RNA, 23 nt, Artificial Sequence
  Synthetic
  misc_feature (1)..(1): n is a, c, g, or u
  misc_feature (4)..(4): n is a, c, g, or u
nugnugcuguuccaaacccucgg

SEQ ID NO: 51389 - RNA, 24 nt, Artificial Sequence
  Synthetic
  misc_feature (2)..(2): n is a, c, g, or u
  misc_feature (5)..(5): n is a, c, g, or u
cnugnugcuguuccaaacccucgg

SEQ ID NO: 51390 - RNA, 18 nt, Artificial Sequence
  Synthetic
  misc_feature (12)..(12): n is a, c, g, or u
acugggaggagnuggggg

SEQ ID NO: 51391 - RNA, 19 nt, Artificial Sequence
  Synthetic
  misc_feature (13)..(13): n is a, c, g, or u
gacugggaggagnuggggg

SEQ ID NO: 51392 - RNA, 20 nt, Artificial Sequence
  Synthetic
  misc_feature (1)..(1): n is a, c, g, or u
  misc_feature (14)..(14): n is a, c, g, or u
ngacugggaggagnuggggg

SEQ ID NO: 51393 - RNA, 21 nt, Artificial Sequence
  Synthetic
  misc_feature (2)..(2): n is a, c, g, or u
  misc_feature (15)..(15): n is a, c, g, or u
angacugggaggagnuggggg

SEQ ID NO: 51394 - RNA, 22 nt, Artificial Sequence
  Synthetic
  misc_feature (3)..(3): n is a, c, g, or u
  misc_feature (16)..(16): n is a, c, g, or u
aangacugggaggagnuggggg

SEQ ID NO: 51395 - RNA, 23 nt, Artificial Sequence
  Synthetic
  misc_feature (4)..(4): n is a, c, g, or u
  misc_feature (17)..(17): n is a, c, g, or u
uaangacugggaggagnuggggg

SEQ ID NO: 51396 - RNA, 24 nt, Artificial Sequence
  Synthetic
  misc_feature (5)..(5): n is a, c, g, or u
  misc_feature (18)..(18): n is a, c, g, or u
uuaangacugggaggagnuggggg

SEQ ID NO: 51397 - RNA, 18 nt, Artificial Sequence
  Synthetic
  misc_feature (13)..(13): n is a, c, g, or u
gacugggaggagnugggg

SEQ ID NO: 51398 - RNA, 19 nt, Artificial Sequence
  Synthetic
  misc_feature (1)..(1): n is a, c, g, or u
  misc_feature (14)..(14): n is a, c, g, or u
ngacugggaggagnugggg

SEQ ID NO: 51399 - RNA, 20 nt, Artificial Sequence
  Synthetic
  misc_feature (2)..(2): n is a, c, g, or u
  misc_feature (15)..(15): n is a, c, g, or u
angacugggaggagnugggg

SEQ ID NO: 51400 - RNA, 21 nt, Artificial Sequence
  Synthetic
  misc_feature (3)..(3): n is a, c, g, or u
  misc_feature (16)..(16): n is a, c, g, or u
aangacugggaggagnugggg

SEQ ID NO: 51401 - RNA, 22 nt, Artificial Sequence
  Synthetic
  misc_feature (4)..(4): n is a, c, g, or u
  misc_feature (17)..(17): n is a, c, g, or u
uaangacugggaggagnugggg

SEQ ID NO: 51402 - RNA, 23 nt, Artificial Sequence
  Synthetic
  misc_feature (5)..(5): n is a, c, g, or u
  misc_feature (18)..(18): n is a, c, g, or u
uuaangacugggaggagnugggg

SEQ ID NO: 51403 - RNA, 24 nt, Artificial Sequence
  Synthetic
  misc_feature (6)..(6): n is a, c, g, or u
  misc_feature (19)..(19): n is a, c, g, or u
uuuaangacugggaggagnugggg

SEQ ID NO: 51404 - RNA, 18 nt, Artificial Sequence
  Synthetic
  misc_feature (13)..(13): n is a, c, g, or u
cacgguggccugnugggg

SEQ ID NO: 51405 - RNA, 19 nt, Artificial Sequence
  Synthetic
  misc_feature (14)..(14): n is a, c, g, or u
acacgguggccugnugggg

SEQ ID NO: 51406 - RNA, 20 nt, Artificial Sequence
  Synthetic
  misc_feature (15)..(15): n is a, c, g, or u
cacacgguggccugnugggg

SEQ ID NO: 51407 - RNA, 21 nt, Artificial Sequence
  Synthetic
  misc_feature (16)..(16): n is a, c, g, or u
ccacacgguggccugnugggg

SEQ ID NO: 51408 - RNA, 22 nt, Artificial Sequence
  Synthetic
  misc_feature (17)..(17): n is a, c, g, or u
cccacacgguggccugnugggg

SEQ ID NO: 51409 - RNA, 23 nt, Artificial Sequence
  Synthetic
  misc_feature (18)..(18): n is a, c, g, or u
ccccacacgguggccugnugggg

SEQ ID NO: 51410 - RNA, 24 nt, Artificial Sequence
  Synthetic
  misc_feature (19)..(19): n is a, c, g, or u
cccccacacgguggccugnugggg

SEQ ID NO: 51411 - RNA, 18 nt, Artificial Sequence
  Synthetic
  misc_feature (11)..(11): n is a, c, g, or u
guguauuuaangacuggg

SEQ ID NO: 51412 - RNA, 19 nt, Artificial Sequence
  Synthetic
  misc_feature (12)..(12): n is a, c, g, or u
uguguauuuaangacuggg

SEQ ID NO: 51413 - RNA, 20 nt, Artificial Sequence
  Synthetic
  misc_feature (13)..(13): n is a, c, g, or u
cuguguauuuaangacuggg

SEQ ID NO: 51414 - RNA, 21 nt, Artificial Sequence
  Synthetic
  misc_feature (14)..(14): n is a, c, g, or u
acuguguauuuaangacuggg

SEQ ID NO: 51415 - RNA, 22 nt, Artificial Sequence
  Synthetic
  misc_feature (15)..(15): n is a, c, g, or u
gacuguguauuuaangacuggg

SEQ ID NO: 51416 - RNA, 23 nt, Artificial Sequence
  Synthetic
  misc_feature (16)..(16): n is a, c, g, or u
agacuguguauuuaangacuggg

SEQ ID NO: 51417 - RNA, 24 nt, Artificial Sequence
  Synthetic
  misc_feature (17)..(17): n is a, c, g, or u
aagacuguguauuuaangacuggg

SEQ ID NO: 51418 - RNA, 18 nt, Artificial Sequence
  Synthetic
  misc_feature (14)..(14): n is a, c, g, or u
acacgguggccugnuggg

SEQ ID NO: 51419 - RNA, 19 nt, Artificial Sequence
  Synthetic
  misc_feature (15)..(15): n is a, c, g, or u
cacacgguggccugnuggg

SEQ ID NO: 51420 - RNA, 20 nt, Artificial Sequence
  Synthetic
  misc_feature (16)..(16): n is a, c, g, or u
ccacacgguggccugnuggg

SEQ ID NO: 51421 - RNA, 21 nt, Artificial Sequence
  Synthetic
  misc_feature (17)..(17): n is a, c, g, or u
cccacacgguggccugnuggg

SEQ ID NO: 51422 - RNA, 22 nt, Artificial Sequence
  Synthetic
  misc_feature (18)..(18): n is a, c, g, or u
ccccacacgguggccugnuggg

SEQ ID NO: 51423 - RNA, 23 nt, Artificial Sequence
  Synthetic
  misc_feature (19)..(19): n is a, c, g, or u
cccccacacgguggccugnuggg

SEQ ID NO: 51424 - RNA, 24 nt, Artificial Sequence
  Synthetic
  misc_feature (20)..(20): n is a, c, g, or u
acccccacacgguggccugnuggg

SEQ ID NO: 51425 - RNA, 18 nt, Artificial Sequence
  Synthetic
ugacgcaacccccacugg

SEQ ID NO: 51426 - RNA, 19 nt, Artificial Sequence
  Synthetic
cugacgcaacccccacugg

SEQ ID NO: 51427 - RNA, 20 nt, Artificial Sequence
  Synthetic
gcugacgcaacccccacugg

SEQ ID NO: 51428 - RNA, 21 nt, Artificial Sequence
  Synthetic
ugcugacgcaacccccacugg

SEQ ID NO: 51429 - RNA, 22 nt, Artificial Sequence
  Synthetic
uugcugacgcaacccccacugg

SEQ ID NO: 51430 - RNA, 23 nt, Artificial Sequence
  Synthetic
uuugcugacgcaacccccacugg

SEQ ID NO: 51431 - RNA, 24 nt, Artificial Sequence
  Synthetic
guuugcugacgcaacccccacugg

SEQ ID NO: 51432 - RNA, 18 nt, Artificial Sequence
  Synthetic
  misc_feature (12)..(12): n is a, c, g, or u
uguguauuuaangacugg

SEQ ID NO: 51433 - RNA, 19 nt, Artificial Sequence
  Synthetic
  misc_feature (13)..(13): n is a, c, g, or u
cuguguauuuaangacugg

SEQ ID NO: 51434 - RNA, 20 nt, Artificial Sequence
  Synthetic
  misc_feature (14)..(14): n is a, c, g, or u
acuguguauuuaangacugg

SEQ ID NO: 51435 - RNA, 21 nt, Artificial Sequence
  Synthetic
  misc_feature (15)..(15): n is a, c, g, or u
gacuguguauuuaangacugg

SEQ ID NO: 51436 - RNA, 22 nt, Artificial Sequence
  Synthetic
  misc_feature (16)..(16): n is a, c, g, or u
agacuguguauuuaangacugg

SEQ ID NO: 51437 - RNA, 23 nt, Artificial Sequence
  Synthetic
  misc_feature (17)..(17): n is a, c, g, or u
aagacuguguauuuaangacugg

SEQ ID NO: 51438 - RNA, 24 nt, Artificial Sequence
  Synthetic
  misc_feature (18)..(18): n is a, c, g, or u
aaagacuguguauuuaangacugg

SEQ ID NO: 51439 - RNA, 18 nt, Artificial Sequence
  Synthetic
augacuuuggcuuccugg

SEQ ID NO: 51440 - RNA, 19 nt, Artificial Sequence
  Synthetic
aaugacuuuggcuuccugg

SEQ ID NO: 51441 - RNA, 20 nt, Artificial Sequence
  Synthetic
uaaugacuuuggcuuccugg

SEQ ID NO: 51442 - RNA, 21 nt, Artificial Sequence
  Synthetic
uuaaugacuuuggcuuccugg

SEQ ID NO: 51443 - RNA, 22 nt, Artificial Sequence
  Synthetic
  misc_feature (1)..(1): n is a, c, g, or u
nuuaaugacuuuggcuuccugg

SEQ ID NO: 51444 - RNA, 23 nt, Artificial Sequence
  Synthetic
  misc_feature (2)..(2): n is a, c, g, or u
anuuaaugacuuuggcuuccugg

SEQ ID NO: 51445 - RNA, 24 nt, Artificial Sequence
  Synthetic
  misc_feature (3)..(3): n is a, c, g, or u
ganuuaaugacuuuggcuuccugg

SEQ ID NO: 51446 - RNA, 18 nt, Artificial Sequence
  Synthetic
  misc_feature (2)..(2): n is a, c, g, or u
  misc_feature (15)..(15): n is a, c, g, or u
angacugggaggagnugg

SEQ ID NO: 51447 - RNA, 19 nt, Artificial Sequence
  Synthetic
  misc_feature (3)..(3): n is a, c, g, or u
  misc_feature (16)..(16): n is a, c, g, or u
aangacugggaggagnugg

SEQ ID NO: 51448 - RNA, 20 nt, Artificial Sequence
  Synthetic
  misc_feature (4)..(4): n is a, c, g, or u
  misc_feature (17)..(17): n is a, c, g, or u
uaangacugggaggagnugg

SEQ ID NO: 51449 - RNA, 21 nt, Artificial Sequence
  Synthetic
  misc_feature (5)..(5): n is a, c, g, or u
  misc_feature (18)..(18): n is a, c, g, or u
uuaangacugggaggagnugg

SEQ ID NO: 51450 - RNA, 22 nt, Artificial Sequence
  Synthetic
  misc_feature (6)..(6): n is a, c, g, or u
  misc_feature (19)..(19): n is a, c, g, or u
uuuaangacugggaggagnugg

SEQ ID NO: 51451 - RNA, 23 nt, Artificial Sequence
  Synthetic
  misc_feature (7)..(7): n is a, c, g, or u
  misc_feature (20)..(20): n is a, c, g, or u
auuuaangacugggaggagnugg

SEQ ID NO: 51452 - RNA, 24 nt, Artificial Sequence
  Synthetic
  misc_feature (8)..(8): n is a, c, g, or u
  misc_feature (21)..(21): n is a, c, g, or u
uauuuaangacugggaggagnugg

SEQ ID NO: 51453 - RNA, 18 nt, Artificial Sequence
  Synthetic
uuccugccuuacuuuugg

SEQ ID NO: 51454 - RNA, 19 nt, Artificial Sequence
  Synthetic
uuuccugccuuacuuuugg

SEQ ID NO: 51455 - RNA, 20 nt, Artificial Sequence
  Synthetic
auuuccugccuuacuuuugg

SEQ ID NO: 51456 - RNA, 21 nt, Artificial Sequence
  Synthetic
cauuuccugccuuacuuuugg

SEQ ID NO: 51457 - RNA, 22 nt, Artificial Sequence
  Synthetic
acauuuccugccuuacuuuugg

SEQ ID NO: 51458 - RNA, 23 nt, Artificial Sequence
  Synthetic
cacauuuccugccuuacuuuugg

SEQ ID NO: 51459 - RNA, 24 nt, Artificial Sequence
  Synthetic
ucacauuuccugccuuacuuuugg

SEQ ID NO: 51460 - RNA, 18 nt, Artificial Sequence
  Synthetic
  misc_feature (7)..(7): n is a, c, g, or u
  misc_feature (16)..(17): n is a, c, g, or u
accucunucaacgacnng

SEQ ID NO: 51461 - RNA, 19 nt, Artificial Sequence
  Synthetic
  misc_feature (8)..(8): n is a, c, g, or u
  misc_feature (17)..(18): n is a, c, g, or u
caccucunucaacgacnng

SEQ ID NO: 51462 - RNA, 20 nt, Artificial Sequence
  Synthetic
  misc_feature (9)..(9): n is a, c, g, or u
  misc_feature (18)..(19): n is a, c, g, or u
gcaccucunucaacgacnng

SEQ ID NO: 51463 - RNA, 21 nt, Artificial Sequence
  Synthetic
  misc_feature (10)..(10): n is a, c, g, or u
  misc_feature (19)..(20): n is a, c, g, or u
agcaccucunucaacgacnng

SEQ ID NO: 51464 - RNA, 22 nt, Artificial Sequence
  Synthetic
  misc_feature (11)..(11): n is a, c, g, or u
  misc_feature (20)..(21): n is a, c, g, or u
gagcaccucunucaacgacnng

SEQ ID NO: 51465 - RNA, 23 nt, Artificial Sequence
  Synthetic
  misc_feature (12)..(12): n is a, c, g, or u
  misc_feature (21)..(22): n is a, c, g, or u
ggagcaccucunucaacgacnng

SEQ ID NO: 51466 - RNA, 24 nt, Artificial Sequence
  Synthetic
  misc_feature (13)..(13): n is a, c, g, or u
  misc_feature (22)..(23): n is a, c, g, or u
gggagcaccucunucaacgacnng

SEQ ID NO: 51467 - RNA, 18 nt, Artificial Sequence
  Synthetic
  misc_feature (17)..(17): n is a, c, g, or u
acgaggcagguccccung

SEQ ID NO: 51468 - RNA, 19 nt, Artificial Sequence
  Synthetic
  misc_feature (18)..(18): n is a, c, g, or u
gacgaggcagguccccung

SEQ ID NO: 51469 - RNA, 20 nt, Artificial Sequence
  Synthetic
  misc_feature (19)..(19): n is a, c, g, or u
cgacgaggcagguccccung

SEQ ID NO: 51470 - RNA, 21 nt, Artificial Sequence
  Synthetic
  misc_feature (20)..(20): n is a, c, g, or u
acgacgaggcagguccccung

SEQ ID NO: 51471 - RNA, 22 nt, Artificial Sequence
  Synthetic
  misc_feature (21)..(21): n is a, c, g, or u
gacgacgaggcagguccccung

SEQ ID NO: 51472 - RNA, 23 nt, Artificial Sequence
  Synthetic
  misc_feature (22)..(22): n is a, c, g, or u
agacgacgaggcagguccccung

SEQ ID NO: 51473 - RNA, 24 nt, Artificial Sequence
  Synthetic
  misc_feature (23)..(23): n is a, c, g, or u
uagacgacgaggcagguccccung

SEQ ID NO: 51474 - RNA, 18 nt, Artificial Sequence
  Synthetic
cucugccgauccauacug

SEQ ID NO: 51475 - RNA, 19 nt, Artificial Sequence
  Synthetic
ccucugccgauccauacug

SEQ ID NO: 51476 - RNA, 20 nt, Artificial Sequence
  Synthetic
uccucugccgauccauacug

SEQ ID NO: 51477 - RNA, 21 nt, Artificial Sequence
  Synthetic
cuccucugccgauccauacug

SEQ ID NO: 51478 - RNA, 22 nt, Artificial Sequence
  Synthetic
gcuccucugccgauccauacug

SEQ ID NO: 51479 - RNA, 23 nt, Artificial Sequence
  Synthetic
ggcuccucugccgauccauacug

SEQ ID NO: 51480 - RNA, 24 nt, Artificial Sequence
  Synthetic
uggcuccucugccgauccauacug

SEQ ID NO: 51481 - RNA, 18 nt, Artificial Sequence
  Synthetic
cccccacacgguggccug

SEQ ID NO: 51482 - RNA, 19 nt, Artificial Sequence
  Synthetic
acccccacacgguggccug

SEQ ID NO: 51483 - RNA, 20 nt, Artificial Sequence
  Synthetic
cacccccacacgguggccug

SEQ ID NO: 51484 - RNA, 21 nt, Artificial Sequence
  Synthetic
acacccccacacgguggccug

SEQ ID NO: 51485 - RNA, 22 nt, Artificial Sequence
  Synthetic
cacacccccacacgguggccug

SEQ ID NO: 51486 - RNA, 23 nt, Artificial Sequence
  Synthetic
ucacacccccacacgguggccug

SEQ ID NO: 51487 - RNA, 24 nt, Artificial Sequence
  Synthetic
uucacacccccacacgguggccug

SEQ ID NO: 51488 - RNA, 18 nt, Artificial Sequence
  Synthetic
acagagucuagacucgug

SEQ ID NO: 51489 - RNA, 19 nt, Artificial Sequence
  Synthetic
cacagagucuagacucgug

SEQ ID NO: 51490 - RNA, 20 nt, Artificial Sequence
  Synthetic
ccacagagucuagacucgug

SEQ ID NO: 51491 - RNA, 21 nt, Artificial Sequence
  Synthetic
accacagagucuagacucgug

SEQ ID NO: 51492 - RNA, 22 nt, Artificial Sequence
  Synthetic
uaccacagagucuagacucgug

SEQ ID NO: 51493 - RNA, 23 nt, Artificial Sequence
  Synthetic
auaccacagagucuagacucgug

SEQ ID NO: 51494 - RNA, 24 nt, Artificial Sequence
  Synthetic
aauaccacagagucuagacucgug

SEQ ID NO: 51495 - RNA, 18 nt, Artificial Sequence
  Synthetic
  misc_feature (13)..(13): n is a, c, g, or u
caggcaagcuaunuugug

SEQ ID NO: 51496 - RNA, 19 nt, Artificial Sequence
  Synthetic
  misc_feature (14)..(14): n is a, c, g, or u
ucaggcaagcuaunuugug

SEQ ID NO: 51497 - RNA, 20 nt, Artificial Sequence
  Synthetic
  misc_feature (15)..(15): n is a, c, g, or u
cucaggcaagcuaunuugug

SEQ ID NO: 51498 - RNA, 21 nt, Artificial Sequence
  Synthetic
  misc_feature (16)..(16): n is a, c, g, or u
ucucaggcaagcuaunuugug

SEQ ID NO: 51499 - RNA, 22 nt, Artificial Sequence
  Synthetic
  misc_feature (17)..(17): n is a, c, g, or u
cucucaggcaagcuaunuugug

SEQ ID NO: 51500 - RNA, 23 nt, Artificial Sequence
  Synthetic
  misc_feature (18)..(18): n is a, c, g, or u
gcucucaggcaagcuaunuugug

SEQ ID NO: 51501 - RNA, 24 nt, Artificial Sequence
  Synthetic
  misc_feature (19)..(19): n is a, c, g, or u
cgcucucaggcaagcuaunuugug

SEQ ID NO: 51502 - RNA, 18 nt, Artificial Sequence
  Synthetic
  misc_feature (3)..(3): n is a, c, g, or u
  misc_feature (16)..(16): n is a, c, g, or u
aangacugggaggagnug

SEQ ID NO: 51503 - RNA, 19 nt, Artificial Sequence
  Synthetic
  misc_feature (4)..(4): n is a, c, g, or u
  misc_feature (17)..(17): n is a, c, g, or u
uaangacugggaggagnug

SEQ ID NO: 51504 - RNA, 20 nt, Artificial Sequence
  Synthetic
  misc_feature (5)..(5): n is a, c, g, or u
  misc_feature (18)..(18): n is a, c, g, or u
uuaangacugggaggagnug

SEQ ID NO: 51505 - RNA, 21 nt, Artificial Sequence
  Synthetic
  misc_feature (6)..(6): n is a, c, g, or u
  misc_feature (19)..(19): n is a, c, g, or u
uuuaangacugggaggagnug

SEQ ID NO: 51506 - RNA, 22 nt, Artificial Sequence
  Synthetic
  misc_feature (7)..(7): n is a, c, g, or u
  misc_feature (20)..(20): n is a, c, g, or u
auuuaangacugggaggagnug

SEQ ID NO: 51507 - RNA, 23 nt, Artificial Sequence
  Synthetic
  misc_feature (8)..(8): n is a, c, g, or u
  misc_feature (21)..(21): n is a, c, g, or u
uauuuaangacugggaggagnug

SEQ ID NO: 51508 - RNA, 24 nt, Artificial Sequence
  Synthetic
  misc_feature (9)..(9): n is a, c, g, or u
  misc_feature (22)..(22): n is a, c, g, or u
guauuuaangacugggaggagnug

SEQ ID NO: 51509 - RNA, 18 nt, Artificial Sequence
  Synthetic
  misc_feature (18)..(18): n is a, c, g, or u
uccugggugggcaauaan

SEQ ID NO: 51510 - RNA, 19 nt, Artificial Sequence
  Synthetic
  misc_feature (19)..(19): n is a, c, g, or u
uuccugggugggcaauaan

SEQ ID NO: 51511 - RNA, 20 nt, Artificial Sequence
  Synthetic
  misc_feature (20)..(20): n is a, c, g, or u
cuuccugggugggcaauaan

SEQ ID NO: 51512 - RNA, 21 nt, Artificial Sequence
  Synthetic
  misc_feature (21)..(21): n is a, c, g, or u
gcuuccugggugggcaauaan

SEQ ID NO: 51513 - RNA, 22 nt, Artificial Sequence
  Synthetic
  misc_feature (22)..(22): n is a, c, g, or u
ggcuuccugggugggcaauaan

SEQ ID NO: 51514 - RNA, 23 nt, Artificial Sequence
  Synthetic
  misc_feature (23)..(23): n is a, c, g, or u
uggcuuccugggugggcaauaan

SEQ ID NO: 51515 - RNA, 24 nt, Artificial Sequence
  Synthetic
  misc_feature (24)..(24): n is a, c, g, or u
uuggcuuccugggugggcaauaan

SEQ ID NO: 51516 - RNA, 18 nt, Artificial Sequence
  Synthetic
  misc_feature (18)..(18): n is a, c, g, or u
aauuccagcagucccgan

SEQ ID NO: 51517 - RNA, 19 nt, Artificial Sequence
  Synthetic
  misc_feature (19)..(19): n is a, c, g, or u
aaauuccagcagucccgan

SEQ ID NO: 51518 - RNA, 20 nt, Artificial Sequence
  Synthetic
  misc_feature (20)..(20): n is a, c, g, or u
caaauuccagcagucccgan

SEQ ID NO: 51519 - RNA, 21 nt, Artificial Sequence
  Synthetic
  misc_feature (21)..(21): n is a, c, g, or u
gcaaauuccagcagucccgan

SEQ ID NO: 51520 - RNA, 22 nt, Artificial Sequence
  Synthetic
  misc_feature (1)..(1): n is a, c, g, or u
  misc_feature (22)..(22): n is a, c, g, or u
ngcaaauuccagcagucccgan

SEQ ID NO: 51521 - RNA, 23 nt, Artificial Sequence
  Synthetic
  misc_feature (2)..(2): n is a, c, g, or u
  misc_feature (23)..(23): n is a, c, g, or u
gngcaaauuccagcagucccgan

SEQ ID NO: 51522 - RNA, 24 nt, Artificial Sequence
  Synthetic
  misc_feature (3)..(3): n is a, c, g, or u
  misc_feature (24)..(24): n is a, c, g, or u
agngcaaauuccagcagucccgan

SEQ ID NO: 51523 - RNA, 18 nt, Artificial Sequence
  Synthetic
  misc_feature (9)..(9): n is a, c, g, or u
  misc_feature (12)..(12): n is a, c, g, or u
  misc_feature (18)..(18): n is a, c, g, or u
guaaaucgnccnauugan

SEQ ID NO: 51524 - RNA, 19 nt, Artificial Sequence
  Synthetic
  misc_feature (10)..(10): n is a, c, g, or u
  misc_feature (13)..(13): n is a, c, g, or u
  misc_feature (19)..(19): n is a, c, g, or u
uguaaaucgnccnauugan

SEQ ID NO: 51525 - RNA, 20 nt, Artificial Sequence
  Synthetic
  misc_feature (11)..(11): n is a, c, g, or u
  misc_feature (14)..(14): n is a, c, g, or u
  misc_feature (20)..(20): n is a, c, g, or u
cuguaaaucgnccnauugan

SEQ ID NO: 51526 - RNA, 21 nt, Artificial Sequence
  Synthetic
  misc_feature (12)..(12): n is a, c, g, or u
  misc_feature (15)..(15): n is a, c, g, or u
  misc_feature (21)..(21): n is a, c, g, or u
ccuguaaaucgnccnauugan

SEQ ID NO: 51527 - RNA, 22 nt, Artificial Sequence
  Synthetic
  misc_feature (13)..(13): n is a, c, g, or u
  misc_feature (16)..(16): n is a, c, g, or u
  misc_feature (22)..(22): n is a, c, g, or u
uccuguaaaucgnccnauugan

SEQ ID NO: 51528 - RNA, 23 nt, Artificial Sequence
  Synthetic
  misc_feature (14)..(14): n is a, c, g, or u
  misc_feature (17)..(17): n is a, c, g, or u
  misc_feature (23)..(23): n is a, c, g, or u
uuccuguaaaucgnccnauugan

SEQ ID NO: 51529 - RNA, 24 nt, Artificial Sequence
  Synthetic
  misc_feature (15)..(15): n is a, c, g, or u
  misc_feature (18)..(18): n is a, c, g, or u
  misc_feature (24)..(24): n is a, c, g, or u
cuuccuguaaaucgnccnauugan

SEQ ID NO: 51530 - RNA, 18 nt, Artificial Sequence
  Synthetic
  misc_feature (7)..(7): n is a, c, g, or u
  misc_feature (9)..(9): n is a, c, g, or u
  misc_feature (18)..(18): n is a, c, g, or u
gguuaangnucuuuguan

SEQ ID NO: 51531 - RNA, 19 nt, Artificial Sequence
  Synthetic
  misc_feature (8)..(8): n is a, c, g, or u
  misc_feature (10)..(10): n is a, c, g, or u
  misc_feature (19)..(19): n is a, c, g, or u
agguuaangnucuuuguan

SEQ ID NO: 51532 - RNA, 20 nt, Artificial Sequence
  Synthetic
  misc_feature (1)..(1): n is a, c, g, or u
  misc_feature (9)..(9): n is a, c, g, or u
  misc_feature (11)..(11): n is a, c, g, or u
  misc_feature (20)..(20): n is a, c, g, or u
nagguuaangnucuuuguan

SEQ ID NO: 51533 - RNA, 21 nt, Artificial Sequence
  Synthetic
  misc_feature (2)..(2): n is a, c, g, or u
  misc_feature (10)..(10): n is a, c, g, or u
  misc_feature (12)..(12): n is a, c, g, or u
  misc_feature (21)..(21): n is a, c, g, or u
unagguuaangnucuuuguan

SEQ ID NO: 51534 - RNA, 22 nt, Artificial Sequence
  Synthetic
  misc_feature (3)..(3): n is a, c, g, or u
  misc_feature (11)..(11): n is a, c, g, or u
  misc_feature (13)..(13): n is a, c, g, or u
  misc_feature (22)..(22): n is a, c, g, or u
aunagguuaangnucuuuguan

SEQ ID NO: 51535 - RNA, 23 nt, Artificial Sequence
  Synthetic
  misc_feature (4)..(4): n is a, c, g, or u
  misc_feature (12)..(12): n is a, c, g, or u
  misc_feature (14)..(14): n is a, c, g, or u
  misc_feature (23)..(23): n is a, c, g, or u
gaunagguuaangnucuuuguan

SEQ ID NO: 51536 - RNA, 24 nt, Artificial Sequence
  Synthetic
  misc_feature (5)..(5): n is a, c, g, or u
  misc_feature (13)..(13): n is a, c, g, or u
  misc_feature (15)..(15): n is a, c, g, or u
  misc_feature (24)..(24): n is a, c, g, or u
agaunagguuaangnucuuuguan

SEQ ID NO: 51537 - RNA, 18 nt, Artificial Sequence
  Synthetic
  misc_feature (9)..(9): n is a, c, g, or u
  misc_feature (18)..(18): n is a, c, g, or u
cucucuguncccaauccn

SEQ ID NO: 51538 - RNA, 19 nt, Artificial Sequence
  Synthetic
  misc_feature (10)..(10): n is a, c, g, or u
  misc_feature (19)..(19): n is a, c, g, or u
ucucucuguncccaauccn

SEQ ID NO: 51539 - RNA, 20 nt, Artificial Sequence
  Synthetic
  misc_feature (11)..(11): n is a, c, g, or u
  misc_feature (20)..(20): n is a, c, g, or u
aucucucuguncccaauccn

SEQ ID NO: 51540 - RNA, 21 nt, Artificial Sequence
  Synthetic
  misc_feature (12)..(12): n is a, c, g, or u
  misc_feature (21)..(21): n is a, c, g, or u
aaucucucuguncccaauccn

SEQ ID NO: 51541 - RNA, 22 nt, Artificial Sequence
  Synthetic
  misc_feature (13)..(13): n is a, c, g, or u
  misc_feature (22)..(22): n is a, c, g, or u
gaaucucucuguncccaauccn

SEQ ID NO: 51542 - RNA, 23 nt, Artificial Sequence
  Synthetic
  misc_feature (14)..(14): n is a, c, g, or u
  misc_feature (23)..(23): n is a, c, g, or u
agaaucucucuguncccaauccn

SEQ ID NO: 51543 - RNA, 24 nt, Artificial Sequence
  Synthetic
  misc_feature (15)..(15): n is a, c, g, or u
  misc_feature (24)..(24): n is a, c, g, or u
cagaaucucucuguncccaauccn

SEQ ID NO: 51544 - RNA, 18 nt, Artificial Sequence
  Synthetic
  misc_feature (18)..(18): n is a, c, g, or u
ccgucggcgcugaauccn

SEQ ID NO: 51545 - RNA, 19 nt, Artificial Sequence
  Synthetic
  misc_feature (19)..(19): n is a, c, g, or u
cccgucggcgcugaauccn

SEQ ID NO: 51546 - RNA, 20 nt, Artificial Sequence
  Synthetic
  misc_feature (20)..(20): n is a, c, g, or u
ucccgucggcgcugaauccn

SEQ ID NO: 51547 - RNA, 21 nt, Artificial Sequence
  Synthetic
  misc_feature (21)..(21): n is a, c, g, or u
gucccgucggcgcugaauccn

SEQ ID NO: 51548 - RNA, 22 nt, Artificial Sequence
  Synthetic
  misc_feature (22)..(22): n is a, c, g, or u
cgucccgucggcgcugaauccn

SEQ ID NO: 51549 - RNA, 23 nt, Artificial Sequence
  Synthetic
  misc_feature (23)..(23): n is a, c, g, or u
acgucccgucggcgcugaauccn

SEQ ID NO: 51550 - RNA, 24 nt, Artificial Sequence
  Synthetic
  misc_feature (24)..(24): n is a, c, g, or u
uacgucccgucggcgcugaauccn

SEQ ID NO: 51551 - RNA, 18 nt, Artificial Sequence
  Synthetic
  misc_feature (6)..(6): n is a, c, g, or u
  misc_feature (9)..(9): n is a, c, g, or u
  misc_feature (15)..(15): n is a, c, g, or u
  misc_feature (18)..(18): n is a, c, g, or u
uugganganccugcngcn

SEQ ID NO: 51552 - RNA, 19 nt, Artificial Sequence
  Synthetic
  misc_feature (1)..(1): n is a, c, g, or u
  misc_feature (7)..(7): n is a, c, g, or u
  misc_feature (10)..(10): n is a, c, g, or u
  misc_feature (16)..(16): n is a, c, g, or u
  misc_feature (19)..(19): n is a, c, g, or u
nuugganganccugcngcn

SEQ ID NO: 51553 - RNA, 20 nt, Artificial Sequence
  Synthetic
  misc_feature (2)..(2): n is a, c, g, or u
  misc_feature (8)..(8): n is a, c, g, or u
  misc_feature (11)..(11): n is a, c, g, or u
  misc_feature (17)..(17): n is a, c, g, or u
  misc_feature (20)..(20): n is a, c, g, or u
anuugganganccugcngcn

SEQ ID NO: 51554 - RNA, 21 nt, Artificial Sequence
  Synthetic
  misc_feature (3)..(3): n is a, c, g, or u
  misc_feature (9)..(9): n is a, c, g, or u
  misc_feature (12)..(12): n is a, c, g, or u
  misc_feature (18)..(18): n is a, c, g, or u
  misc_feature (21)..(21): n is a, c, g, or u
aanuugganganccugcngcn

SEQ ID NO: 51555 - RNA, 22 nt, Artificial Sequence
  Synthetic
  misc_feature (4)..(4): n is a, c, g, or u
  misc_feature (10)..(10): n is a, c, g, or u
  misc_feature (13)..(13): n is a, c, g, or u
  misc_feature (19)..(19): n is a, c, g, or u
  misc_feature (22)..(22): n is a, c, g, or u
uaanuugganganccugcngcn

SEQ ID NO: 51556 - RNA, 23 nt, Artificial Sequence
  Synthetic
  misc_feature (5)..(5): n is a, c, g, or u
  misc_feature (11)..(11): n is a, c, g, or u
  misc_feature (14)..(14): n is a, c, g, or u
  misc_feature (20)..(20): n is a, c, g, or u
  misc_feature (23)..(23): n is a, c, g, or u
auaanuugganganccugcngcn

SEQ ID NO: 51557 - RNA, 24 nt, Artificial Sequence
  Synthetic
  misc_feature (6)..(6): n is a, c, g, or u
  misc_feature (12)..(12): n is a, c, g, or u
  misc_feature (15)..(15): n is a, c, g, or u
  misc_feature (21)..(21): n is a, c, g, or u
  misc_feature (24)..(24): n is a, c, g, or u
aauaanuugganganccugcngcn

SEQ ID NO: 51558 - RNA, 18 nt, Artificial Sequence
  Synthetic
  misc_feature (3)..(3): n is a, c, g, or u
  misc_feature (12)..(12): n is a, c, g, or u
  misc_feature (18)..(18): n is a, c, g, or u
ccngcggacgancccucn

SEQ ID NO: 51559 - RNA, 19 nt, Artificial Sequence
  Synthetic
  misc_feature (4)..(4): n is a, c, g, or u
  misc_feature (13)..(13): n is a, c, g, or u
  misc_feature (19)..(19): n is a, c, g, or u
uccngcggacgancccucn

SEQ ID NO: 51560 - RNA, 20 nt, Artificial Sequence
  Synthetic
  misc_feature (5)..(5): n is a, c, g, or u
  misc_feature (14)..(14): n is a, c, g, or u
  misc_feature (20)..(20): n is a, c, g, or u
auccngcggacgancccucn

SEQ ID NO: 51561 - RNA, 21 nt, Artificial Sequence
  Synthetic
  misc_feature (6)..(6): n is a, c, g, or u
  misc_feature (15)..(15): n is a, c, g, or u
  misc_feature (21)..(21): n is a, c, g, or u
aauccngcggacgancccucn

SEQ ID NO: 51562 - RNA, 22 nt, Artificial Sequence
  Synthetic
  misc_feature (7)..(7): n is a, c, g, or u
  misc_feature (16)..(16): n is a, c, g, or u
  misc_feature (22)..(22): n is a, c, g, or u
gaauccngcggacgancccucn

SEQ ID NO: 51563 - RNA, 23 nt, Artificial Sequence
  Synthetic
  misc_feature (8)..(8): n is a, c, g, or u
  misc_feature (17)..(17): n is a, c, g, or u
  misc_feature (23)..(23): n is a, c, g, or u
ugaauccngcggacgancccucn

SEQ ID NO: 51564 - RNA, 24 nt, Artificial Sequence
  Synthetic
  misc_feature (9)..(9): n is a, c, g, or u
  misc_feature (18)..(18): n is a, c, g, or u
  misc_feature (24)..(24): n is a, c, g, or u
cugaauccngcggacgancccucn

SEQ ID NO: 51565 - RNA, 18 nt, Artificial Sequence
  Synthetic
  misc_feature (18)..(18): n is a, c, g, or u
ugugggucaccauauucn

SEQ ID NO: 51566 - RNA, 19 nt, Artificial Sequence
  Synthetic
  misc_feature (19)..(19): n is a, c, g, or u
uugugggucaccauauucn

SEQ ID NO: 51567 - RNA, 20 nt, Artificial Sequence
  Synthetic
  misc_feature (20)..(20): n is a, c, g, or u
uuugugggucaccauauucn

SEQ ID NO: 51568 - RNA, 21 nt, Artificial Sequence
  Synthetic
  misc_feature (21)..(21): n is a, c, g, or u
uuuugugggucaccauauucn

SEQ ID NO: 51569 - RNA, 22 nt, Artificial Sequence
  Synthetic
  misc_feature (22)..(22): n is a, c, g, or u
auuuugugggucaccauauucn

SEQ ID NO: 51570 - RNA, 23 nt, Artificial Sequence
  Synthetic
  misc_feature (23)..(23): n is a, c, g, or u
cauuuugugggucaccauauucn

SEQ ID NO: 51571 - RNA, 24 nt, Artificial Sequence
  Synthetic
  misc_feature (24)..(24): n is a, c, g, or u
ucauuuugugggucaccauauucn

SEQ ID NO: 51572 - RNA, 18 nt, Artificial Sequence
  Synthetic
  misc_feature (5)..(5): n is a, c, g, or u
  misc_feature (18)..(18): n is a, c, g, or u
uuaangacugggaggagn

SEQ ID NO: 51573 - RNA, 19 nt, Artificial Sequence
  Synthetic
  misc_feature (6)..(6): n is a, c, g, or u
  misc_feature (19)..(19): n is a, c, g, or u
uuuaangacugggaggagn

SEQ ID NO: 51574 - RNA, 20 nt, Artificial Sequence
  Synthetic
  misc_feature (7)..(7): n is a, c, g, or u
  misc_feature (20)..(20): n is a, c, g, or u
auuuaangacugggaggagn

SEQ ID NO: 51575 - RNA, 21 nt, Artificial Sequence
  Synthetic
  misc_feature (8)..(8): n is a, c, g, or u
  misc_feature (21)..(21): n is a, c, g, or u
uauuuaangacugggaggagn

SEQ ID NO: 51576 - RNA, 22 nt, Artificial Sequence
  Synthetic
  misc_feature (9)..(9): n is a, c, g, or u
  misc_feature (22)..(22): n is a, c, g, or u
guauuuaangacugggaggagn

SEQ ID NO: 51577 - RNA, 23 nt, Artificial Sequence
  Synthetic
  misc_feature (10)..(10): n is a, c, g, or u
  misc_feature (23)..(23): n is a, c, g, or u
uguauuuaangacugggaggagn

SEQ ID NO: 51578 - RNA, 24 nt, Artificial Sequence
  Synthetic
  misc_feature (11)..(11): n is a, c, g, or u
  misc_feature (24)..(24): n is a, c, g, or u
guguauuuaangacugggaggagn

SEQ ID NO: 51579 - RNA, 18 nt, Artificial Sequence
  Synthetic
  misc_feature (11)..(12): n is a, c, g, or u
  misc_feature (18)..(18): n is a, c, g, or u
ucuuacauaannggacun

SEQ ID NO: 51580 - RNA, 19 nt, Artificial Sequence
  Synthetic
  misc_feature (12)..(13): n is a, c, g, or u
  misc_feature (19)..(19): n is a, c, g, or u
gucuuacauaannggacun

SEQ ID NO: 51581 - RNA, 20 nt, Artificial Sequence
  Synthetic
  misc_feature (13)..(14): n is a, c, g, or u
  misc_feature (20)..(20): n is a, c, g, or u
agucuuacauaannggacun

SEQ ID NO: 51582 - RNA, 21 nt, Artificial Sequence
  Synthetic
  misc_feature (14)..(15): n is a, c, g, or u
  misc_feature (21)..(21): n is a, c, g, or u
cagucuuacauaannggacun

SEQ ID NO: 51583 - RNA, 22 nt, Artificial Sequence
  Synthetic
  misc_feature (15)..(16): n is a, c, g, or u
  misc_feature (22)..(22): n is a, c, g, or u
acagucuuacauaannggacun

SEQ ID NO: 51584 - RNA, 23 nt, Artificial Sequence
  Synthetic
  misc_feature (16)..(17): n is a, c, g, or u
  misc_feature (23)..(23): n is a, c, g, or u
aacagucuuacauaannggacun

SEQ ID NO: 51585 - RNA, 24 nt, Artificial Sequence
  Synthetic
  misc_feature (17)..(18): n is a, c, g, or u
  misc_feature (24)..(24): n is a, c, g, or u
caacagucuuacauaannggacun

SEQ ID NO: 51586 - RNA, 18 nt, Artificial Sequence
  Synthetic
  misc_feature (5)..(6): n is a, c, g, or u
  misc_feature (12)..(14): n is a, c, g, or u
aagannugauannnaaau

SEQ ID NO: 51587 - RNA, 19 nt, Artificial Sequence
  Synthetic
  misc_feature (6)..(7): n is a, c, g, or u
  misc_feature (13)..(15): n is a, c, g, or u
caagannugauannnaaau

SEQ ID NO: 51588 - RNA, 20 nt, Artificial Sequence
  Synthetic
  misc_feature (7)..(8): n is a, c, g, or u
  misc_feature (14)..(16): n is a, c, g, or u
ucaagannugauannnaaau

SEQ ID NO: 51589 - RNA, 21 nt, Artificial Sequence
  Synthetic
  misc_feature (8)..(9): n is a, c, g, or u
  misc_feature (15)..(17): n is a, c, g, or u
aucaagannugauannnaaau

SEQ ID NO: 51590 - RNA, 22 nt, Artificial Sequence
  Synthetic
  misc_feature (9)..(10): n is a, c, g, or u
  misc_feature (16)..(18): n is a, c, g, or u
caucaagannugauannnaaau

SEQ ID NO: 51591 - RNA, 23 nt, Artificial Sequence
  Synthetic
  misc_feature (1)..(1): n is a, c, g, or u
  misc_feature (10)..(11): n is a, c, g, or u
  misc_feature (17)..(19): n is a, c, g, or u
ncaucaagannugauannnaaau

SEQ ID NO: 51592 - RNA, 24 nt, Artificial Sequence
  Synthetic
  misc_feature (2)..(2): n is a, c, g, or u
  misc_feature (11)..(12): n is a, c, g, or u
  misc_feature (18)..(20): n is a, c, g, or u
uncaucaagannugauannnaaau

SEQ ID NO: 51593 - RNA, 18 nt, Artificial Sequence
  Synthetic
uugacccuuauaaagaau

SEQ ID NO: 51594 - RNA, 19 nt, Artificial Sequence
  Synthetic
auugacccuuauaaagaau

SEQ ID NO: 51595 - RNA, 20 nt, Artificial Sequence
  Synthetic
cauugacccuuauaaagaau

SEQ ID NO: 51596 - RNA, 21 nt, Artificial Sequence
  Synthetic
acauugacccuuauaaagaau

SEQ ID NO: 51597 - RNA, 22 nt, Artificial Sequence
  Synthetic
gacauugacccuuauaaagaau

SEQ ID NO: 51598 - RNA, 23 nt, Artificial Sequence
  Synthetic
ggacauugacccuuauaaagaau

SEQ ID NO: 51599 - RNA, 24 nt, Artificial Sequence
  Synthetic
uggacauugacccuuauaaagaau

SEQ ID NO: 51600 - RNA, 18 nt, Artificial Sequence
  Synthetic
acauggacaacaucacau

SEQ ID NO: 51601 - RNA, 19 nt, Artificial Sequence
  Synthetic
aacauggacaacaucacau

SEQ ID NO: 51602 - RNA, 20 nt, Artificial Sequence
  Synthetic
gaacauggacaacaucacau

SEQ ID NO: 51603 - RNA, 21 nt, Artificial Sequence
  Synthetic
  misc_feature (1)..(1): n is a, c, g, or u
ngaacauggacaacaucacau

SEQ ID NO: 51604 - RNA, 22 nt, Artificial Sequence
  Synthetic
  misc_feature (2)..(2): n is a, c, g, or u
angaacauggacaacaucacau

SEQ ID NO: 51605 - RNA, 23 nt, Artificial Sequence
  Synthetic
  misc_feature (3)..(3): n is a, c, g, or u
uangaacauggacaacaucacau

SEQ ID NO: 51606 - RNA, 24 nt, Artificial Sequence
  Synthetic
  misc_feature (4)..(4): n is a, c, g, or u
cuangaacauggacaacaucacau

SEQ ID NO: 51607 - RNA, 18 nt, Artificial Sequence
  Synthetic
gaacaagagcuacagcau

SEQ ID NO: 51608 - RNA, 19 nt, Artificial Sequence
  Synthetic
ggaacaagagcuacagcau

SEQ ID NO: 51609 - RNA, 20 nt, Artificial Sequence
  Synthetic
gggaacaagagcuacagcau

SEQ ID NO: 51610 - RNA, 21 nt, Artificial Sequence
  Synthetic
ugggaacaagagcuacagcau

SEQ ID NO: 51611 - RNA, 22 nt, Artificial Sequence
  Synthetic
  misc_feature (1)..(1): n is a, c, g, or u
nugggaacaagagcuacagcau

SEQ ID NO: 51612 - RNA, 23 nt, Artificial Sequence
  Synthetic
  misc_feature (2)..(2): n is a, c, g, or u
cnugggaacaagagcuacagcau

SEQ ID NO: 51613 - RNA, 24 nt, Artificial Sequence
  Synthetic
  misc_feature (3)..(3): n is a, c, g, or u
ucnugggaacaagagcuacagcau

SEQ ID NO: 51614 - RNA, 18 nt, Artificial Sequence
  Synthetic
  misc_feature (9)..(9): n is a, c, g, or u
  misc_feature (15)..(15): n is a, c, g, or u
caccaggcncuguungau

SEQ ID NO: 51615 - RNA, 19 nt, Artificial Sequence
  Synthetic
  misc_feature (10)..(10): n is a, c, g, or u
  misc_feature (16)..(16): n is a, c, g, or u
ccaccaggcncuguungau

SEQ ID NO: 51616 - RNA, 20 nt, Artificial Sequence
  Synthetic
  misc_feature (11)..(11): n is a, c, g, or u
  misc_feature (17)..(17): n is a, c, g, or u
uccaccaggcncuguungau

SEQ ID NO: 51617 - RNA, 21 nt, Artificial Sequence
  Synthetic
  misc_feature (12)..(12): n is a, c, g, or u
  misc_feature (18)..(18): n is a, c, g, or u
uuccaccaggcncuguungau

SEQ ID NO: 51618 - RNA, 22 nt, Artificial Sequence
  Synthetic
  misc_feature (13)..(13): n is a, c, g, or u
  misc_feature (19)..(19): n is a, c, g, or u
guuccaccaggcncuguungau

SEQ ID NO: 51619 - RNA, 23 nt, Artificial Sequence
  Synthetic
  misc_feature (14)..(14): n is a, c, g, or u
  misc_feature (20)..(20): n is a, c, g, or u
aguuccaccaggcncuguungau

SEQ ID NO: 51620 - RNA, 24 nt, Artificial Sequence
  Synthetic
  misc_feature (15)..(15): n is a, c, g, or u
  misc_feature (21)..(21): n is a, c, g, or u
caguuccaccaggcncuguungau

SEQ ID NO: 51621 - RNA, 18 nt, Artificial Sequence
  Synthetic
  misc_feature (3)..(3): n is a, c, g, or u
  misc_feature (6)..(6): n is a, c, g, or u
  misc_feature (9)..(9): n is a, c, g, or u
  misc_feature (13)..(13): n is a, c, g, or u
aangcnggnauunuauau

SEQ ID NO: 51622 - RNA, 19 nt, Artificial Sequence
  Synthetic
  misc_feature (4)..(4): n is a, c, g, or u
  misc_feature (7)..(7): n is a, c, g, or u
  misc_feature (10)..(10): n is a, c, g, or u
  misc_feature (14)..(14): n is a, c, g, or u
gaangcnggnauunuauau

SEQ ID NO: 51623 - RNA, 20 nt, Artificial Sequence
  Synthetic
  misc_feature (5)..(5): n is a, c, g, or u
  misc_feature (8)..(8): n is a, c, g, or u
  misc_feature (11)..(11): n is a, c, g, or u
  misc_feature (15)..(15): n is a, c, g, or u
ggaangcnggnauunuauau

SEQ ID NO: 51624 - RNA, 21 nt, Artificial Sequence
  Synthetic
  misc_feature (6)..(6): n is a, c, g, or u
  misc_feature (9)..(9): n is a, c, g, or u
  misc_feature (12)..(12): n is a, c, g, or u
  misc_feature (16)..(16): n is a, c, g, or u
uggaangcnggnauunuauau

SEQ ID NO: 51625 - RNA, 22 nt, Artificial Sequence
  Synthetic
  misc_feature (7)..(7): n is a, c, g, or u
  misc_feature (10)..(10): n is a, c, g, or u
  misc_feature (13)..(13): n is a, c, g, or u
  misc_feature (17)..(17): n is a, c, g, or u
auggaangcnggnauunuauau

SEQ ID NO: 51626 - RNA, 23 nt, Artificial Sequence
  Synthetic
  misc_feature (8)..(8): n is a, c, g, or u
  misc_feature (11)..(11): n is a, c, g, or u
  misc_feature (14)..(14): n is a, c, g, or u
  misc_feature (18)..(18): n is a, c, g, or u
uauggaangcnggnauunuauau

SEQ ID NO: 51627 - RNA, 24 nt, Artificial Sequence
  Synthetic
  misc_feature (9)..(9): n is a, c, g, or u
  misc_feature (12)..(12): n is a, c, g, or u
  misc_feature (15)..(15): n is a, c, g, or u
  misc_feature (19)..(19): n is a, c, g, or u
uuauggaangcnggnauunuauau

SEQ ID NO: 51628 - RNA, 18 nt, Artificial Sequence
  Synthetic
auauggaugaucugguau

SEQ ID NO: 51629 - RNA, 19 nt, Artificial Sequence
  Synthetic
uauauggaugaucugguau

SEQ ID NO: 51630 - RNA, 20 nt, Artificial Sequence
  Synthetic
uuauauggaugaucugguau

SEQ ID NO: 51631 - RNA, 21 nt, Artificial Sequence
  Synthetic
guuauauggaugaucugguau

SEQ ID NO: 51632 - RNA, 22 nt, Artificial Sequence
  Synthetic
aguuauauggaugaucugguau

SEQ ID NO: 51633 - RNA, 23 nt, Artificial Sequence
  Synthetic
uaguuauauggaugaucugguau

SEQ ID NO: 51634 - RNA, 24 nt, Artificial Sequence
  Synthetic
uuaguuauauggaugaucugguau

SEQ ID NO: 51635 - RNA, 18 nt, Artificial Sequence
  Synthetic
  misc_feature (11)..(11): n is a, c, g, or u
ucaaucuucungaagacu

SEQ ID NO: 51636 - RNA, 19 nt, Artificial Sequence
  Synthetic
  misc_feature (12)..(12): n is a, c, g, or u
aucaaucuucungaagacu

SEQ ID NO: 51637 - RNA, 20 nt, Artificial Sequence
  Synthetic
  misc_feature (13)..(13): n is a, c, g, or u
caucaaucuucungaagacu

SEQ ID NO: 51638 - RNA, 21 nt, Artificial Sequence
  Synthetic
  misc_feature (14)..(14): n is a, c, g, or u
ucaucaaucuucungaagacu

SEQ ID NO: 51639 - RNA, 22 nt, Artificial Sequence
  Synthetic
  misc_feature (15)..(15): n is a, c, g, or u
aucaucaaucuucungaagacu

SEQ ID NO: 51640 - RNA, 23 nt, Artificial Sequence
  Synthetic
  misc_feature (16)..(16): n is a, c, g, or u
caucaucaaucuucungaagacu

SEQ ID NO: 51641 - RNA, 24 nt, Artificial Sequence
  Synthetic
  misc_feature (17)..(17): n is a, c, g, or u
acaucaucaaucuucungaagacu

SEQ ID NO: 51642 - RNA, 18 nt, Artificial Sequence
  Synthetic
  misc_feature (14)..(14): n is a, c, g, or u
acuguguauuuaangacu

SEQ ID NO: 51643 - RNA, 19 nt, Artificial Sequence
  Synthetic
  misc_feature (15)..(15): n is a, c, g, or u
gacuguguauuuaangacu

SEQ ID NO: 51644 - RNA, 20 nt, Artificial Sequence
  Synthetic
  misc_feature (16)..(16): n is a, c, g, or u
agacuguguauuuaangacu

SEQ ID NO: 51645 - RNA, 21 nt, Artificial Sequence
  Synthetic
  misc_feature (17)..(17): n is a, c, g, or u
aagacuguguauuuaangacu

SEQ ID NO: 51646 - RNA, 22 nt, Artificial Sequence
  Synthetic
  misc_feature (18)..(18): n is a, c, g, or u
aaagacuguguauuuaangacu

SEQ ID NO: 51647 - RNA, 23 nt, Artificial Sequence
  Synthetic
  misc_feature (19)..(19): n is a, c, g, or u
caaagacuguguauuuaangacu

SEQ ID NO: 51648 - RNA, 24 nt, Artificial Sequence
  Synthetic
  misc_feature (20)..(20): n is a, c, g, or u
ucaaagacuguguauuuaangacu

SEQ ID NO: 51649 - RNA, 18 nt, Artificial Sequence
  Synthetic
ccucugccgauccauacu

SEQ ID NO: 51650 - RNA, 19 nt, Artificial Sequence
  Synthetic
uccucugccgauccauacu

SEQ ID NO: 51651 - RNA, 20 nt, Artificial Sequence
  Synthetic
cuccucugccgauccauacu

SEQ ID NO: 51652 - RNA, 21 nt, Artificial Sequence
  Synthetic
gcuccucugccgauccauacu

SEQ ID NO: 51653 - RNA, 22 nt, Artificial Sequence
  Synthetic
ggcuccucugccgauccauacu

SEQ ID NO: 51654 - RNA, 23 nt, Artificial Sequence
  Synthetic
uggcuccucugccgauccauacu

SEQ ID NO: 51655 - RNA, 24 nt, Artificial Sequence
  Synthetic
guggcuccucugccgauccauacu

SEQ ID NO: 51656 - RNA, 18 nt, Artificial Sequence
  Synthetic
ggcuuuaggaaaauaccu

SEQ ID NO: 51657 - RNA, 19 nt, Artificial Sequence
  Synthetic
gggcuuuaggaaaauaccu

SEQ ID NO: 51658 - RNA, 20 nt, Artificial Sequence
  Synthetic
ugggcuuuaggaaaauaccu

SEQ ID NO: 51659 - RNA, 21 nt, Artificial Sequence
  Synthetic
  misc_feature (1)..(1): n is a, c, g, or u
nugggcuuuaggaaaauaccu

SEQ ID NO: 51660 - RNA, 22 nt, Artificial Sequence
  Synthetic
  misc_feature (2)..(2): n is a, c, g, or u
cnugggcuuuaggaaaauaccu

SEQ ID NO: 51661 - RNA, 23 nt, Artificial Sequence
  Synthetic
  misc_feature (3)..(3): n is a, c, g, or u
ucnugggcuuuaggaaaauaccu

SEQ ID NO: 51662 - RNA, 24 nt, Artificial Sequence
  Synthetic
  misc_feature (4)..(4): n is a, c, g, or u
aucnugggcuuuaggaaaauaccu

SEQ ID NO: 51663 - RNA, 18 nt, Artificial Sequence
  Synthetic
  misc_feature (1)..(1): n is a, c, g, or u
  misc_feature (6)..(6): n is a, c, g, or u
nuuacnaaauauuuuccu

SEQ ID NO: 51664 - RNA, 19 nt, Artificial Sequence
  Synthetic
  misc_feature (1)..(2): n is a, c, g, or u
  misc_feature (7)..(7): n is a, c, g, or u
nnuuacnaaauauuuuccu

SEQ ID NO: 51665 - RNA, 20 nt, Artificial Sequence
  Synthetic
  misc_feature (2)..(3): n is a, c, g, or u
  misc_feature (8)..(8): n is a, c, g, or u
annuuacnaaauauuuuccu

SEQ ID NO: 51666 - RNA, 21 nt, Artificial Sequence
  Synthetic
  misc_feature (3)..(4): n is a, c, g, or u
  misc_feature (9)..(9): n is a, c, g, or u
aannuuacnaaauauuuuccu

SEQ ID NO: 51667 - RNA, 22 nt, Artificial Sequence
  Synthetic
  misc_feature (4)..(5): n is a, c, g, or u
  misc_feature (10)..(10): n is a, c, g, or u
uaannuuacnaaauauuuuccu

SEQ ID NO: 51668 - RNA, 23 nt, Artificial Sequence
  Synthetic
  misc_feature (5)..(6): n is a, c, g, or u
  misc_feature (11)..(11): n is a, c, g, or u
cuaannuuacnaaauauuuuccu

SEQ ID NO: 51669 - RNA, 24 nt, Artificial Sequence
  Synthetic
  misc_feature (6)..(7): n is a, c, g, or u
  misc_feature (12)..(12): n is a, c, g, or u
ccuaannuuacnaaauauuuuccu

SEQ ID NO: 51670 - RNA, 18 nt, Artificial Sequence
  Synthetic
  misc_feature (2)..(2): n is a, c, g, or u
  misc_feature (8)..(8): n is a, c, g, or u
  misc_feature (14)..(14): n is a, c, g, or u
ancccucncggggncgcu

SEQ ID NO: 51671 - RNA, 19 nt, Artificial Sequence
  Synthetic
  misc_feature (3)..(3): n is a, c, g, or u
  misc_feature (9)..(9): n is a, c, g, or u
  misc_feature (15)..(15): n is a, c, g, or u
gancccucncggggncgcu

SEQ ID NO: 51672 - RNA, 20 nt, Artificial Sequence
  Synthetic
  misc_feature (4)..(4): n is a, c, g, or u
  misc_feature (10)..(10): n is a, c, g, or u
  misc_feature (16)..(16): n is a, c, g, or u
cgancccucncggggncgcu

SEQ ID NO: 51673 - RNA, 21 nt, Artificial Sequence
  Synthetic
  misc_feature (5)..(5): n is a, c, g, or u
  misc_feature (11)..(11): n is a, c, g, or u
  misc_feature (17)..(17): n is a, c, g, or u
acgancccucncggggncgcu

SEQ ID NO: 51674 - RNA, 22 nt, Artificial Sequence
  Synthetic
  misc_feature (6)..(6): n is a, c, g, or u
  misc_feature (12)..(12): n is a, c, g, or u
  misc_feature (18)..(18): n is a, c, g, or u
gacgancccucncggggncgcu

SEQ ID NO: 51675 - RNA, 23 nt, Artificial Sequence
  Synthetic
  misc_feature (7)..(7): n is a, c, g, or u
  misc_feature (13)..(13): n is a, c, g, or u
  misc_feature (19)..(19): n is a, c, g, or u
ggacgancccucncggggncgcu

SEQ ID NO: 51676 - RNA, 24 nt, Artificial Sequence
  Synthetic
  misc_feature (8)..(8): n is a, c, g, or u
  misc_feature (14)..(14): n is a, c, g, or u
  misc_feature (20)..(20): n is a, c, g, or u
cggacgancccucncggggncgcu

SEQ ID NO: 51677 - RNA, 18 nt, Artificial Sequence
  Synthetic
gcugugccuuggguggcu

SEQ ID NO: 51678 - RNA, 19 nt, Artificial Sequence
  Synthetic
agcugugccuuggguggcu

SEQ ID NO: 51679 - RNA, 20 nt, Artificial Sequence
  Synthetic
aagcugugccuuggguggcu

SEQ ID NO: 51680 - RNA, 21 nt, Artificial Sequence
  Synthetic
caagcugugccuuggguggcu

SEQ ID NO: 51681 - RNA, 22 nt, Artificial Sequence
  Synthetic
ccaagcugugccuuggguggcu

SEQ ID NO: 51682 - RNA, 23 nt, Artificial Sequence
  Synthetic
uccaagcugugccuuggguggcu

SEQ ID NO: 51683 - RNA, 24 nt, Artificial Sequence
  Synthetic
cuccaagcugugccuuggguggcu

SEQ ID NO: 51684 - RNA, 18 nt, Artificial Sequence
  Synthetic
aagacugggggcccugcu

SEQ ID NO: 51685 - RNA, 19 nt, Artificial Sequence
  Synthetic
gaagacugggggcccugcu

SEQ ID NO: 51686 - RNA, 20 nt, Artificial Sequence
  Synthetic
  misc_feature (1)..(1): n is a, c, g, or u
ngaagacugggggcccugcu

SEQ ID NO: 51687 - RNA, 21 nt, Artificial Sequence
  Synthetic
  misc_feature (2)..(2): n is a, c, g, or u
ungaagacugggggcccugcu

SEQ ID NO: 51688 - RNA, 22 nt, Artificial Sequence
  Synthetic
  misc_feature (3)..(3): n is a, c, g, or u
cungaagacugggggcccugcu

SEQ ID NO: 51689 - RNA, 23 nt, Artificial Sequence
  Synthetic
  misc_feature (4)..(4): n is a, c, g, or u
ucungaagacugggggcccugcu

SEQ ID NO: 51690 - RNA, 24 nt, Artificial Sequence
  Synthetic
  misc_feature (5)..(5): n is a, c, g, or u
uucungaagacugggggcccugcu

SEQ ID NO: 51691 - RNA, 18 nt, Artificial Sequence
  Synthetic
cccagucucuccaccucu

SEQ ID NO: 51692 - RNA, 19 nt, Artificial Sequence
  Synthetic
ccccagucucuccaccucu

SEQ ID NO: 51693 - RNA, 20 nt, Artificial Sequence
  Synthetic
accccagucucuccaccucu

SEQ ID NO: 51694 - RNA, 21 nt, Artificial Sequence
  Synthetic
aaccccagucucuccaccucu

SEQ ID NO: 51695 - RNA, 22 nt, Artificial Sequence
  Synthetic
caaccccagucucuccaccucu

SEQ ID NO: 51696 - RNA, 23 nt, Artificial Sequence
  Synthetic
ccaaccccagucucuccaccucu

SEQ ID NO: 51697 - RNA, 24 nt, Artificial Sequence
  Synthetic
  misc_feature (1)..(1): n is a, c, g, or u
nccaaccccagucucuccaccucu

SEQ ID NO: 51698 - RNA, 18 nt, Artificial Sequence
  Synthetic
aacucuguuguccucucu

SEQ ID NO: 51699 - RNA, 19 nt, Artificial Sequence
  Synthetic
caacucuguuguccucucu

SEQ ID NO: 51700 - RNA, 20 nt, Artificial Sequence
  Synthetic
acaacucuguuguccucucu

SEQ ID NO: 51701 - RNA, 21 nt, Artificial Sequence
  Synthetic
gacaacucuguuguccucucu

SEQ ID NO: 51702 - RNA, 22 nt, Artificial Sequence
  Synthetic
  misc_feature (1)..(1): n is a, c, g, or u
ngacaacucuguuguccucucu

SEQ ID NO: 51703 - RNA, 23 nt, Artificial Sequence
  Synthetic
  misc_feature (2)..(2): n is a, c, g, or u
cngacaacucuguuguccucucu

SEQ ID NO: 51704 - RNA, 24 nt, Artificial Sequence
  Synthetic
  misc_feature (3)..(3): n is a, c, g, or u
acngacaacucuguuguccucucu

SEQ ID NO: 51705 - RNA, 18 nt, Artificial Sequence
  Synthetic
aaagaauuuggagcuucu

SEQ ID NO: 51706 - RNA, 19 nt, Artificial Sequence
  Synthetic
uaaagaauuuggagcuucu

SEQ ID NO: 51707 - RNA, 20 nt, Artificial Sequence
  Synthetic
auaaagaauuuggagcuucu

SEQ ID NO: 51708 - RNA, 21 nt, Artificial Sequence
  Synthetic
uauaaagaauuuggagcuucu

SEQ ID NO: 51709 - RNA, 22 nt, Artificial Sequence
  Synthetic
uuauaaagaauuuggagcuucu

SEQ ID NO: 51710 - RNA, 23 nt, Artificial Sequence
  Synthetic
cuuauaaagaauuuggagcuucu

SEQ ID NO: 51711 - RNA, 24 nt, Artificial Sequence
  Synthetic
ccuuauaaagaauuuggagcuucu

SEQ ID NO: 51712 - RNA, 18 nt, Artificial Sequence
  Synthetic
gacuucucucaauuuucu

SEQ ID NO: 51713 - RNA, 19 nt, Artificial Sequence
  Synthetic
ggacuucucucaauuuucu

SEQ ID NO: 51714 - RNA, 20 nt, Artificial Sequence
  Synthetic
uggacuucucucaauuuucu

SEQ ID NO: 51715 - RNA, 21 nt, Artificial Sequence
  Synthetic
guggacuucucucaauuuucu

SEQ ID NO: 51716 - RNA, 22 nt, Artificial Sequence
  Synthetic
gguggacuucucucaauuuucu

SEQ ID NO: 51717 - RNA, 23 nt, Artificial Sequence
  Synthetic
ugguggacuucucucaauuuucu

SEQ ID NO: 51718 - RNA, 24 nt, Artificial Sequence
  Synthetic
gugguggacuucucucaauuuucu

SEQ ID NO: 51719 - RNA, 18 nt, Artificial Sequence
  Synthetic
ggcaaacaagguaggagu

SEQ ID NO: 51720 - RNA, 19 nt, Artificial Sequence
  Synthetic
uggcaaacaagguaggagu

SEQ ID NO: 51721 - RNA, 20 nt, Artificial Sequence
  Synthetic
auggcaaacaagguaggagu

SEQ ID NO: 51722 - RNA, 21 nt, Artificial Sequence
  Synthetic
aauggcaaacaagguaggagu

SEQ ID NO: 51723 - RNA, 22 nt, Artificial Sequence
  Synthetic
caauggcaaacaagguaggagu

SEQ ID NO: 51724 - RNA, 23 nt, Artificial Sequence
  Synthetic
ccaauggcaaacaagguaggagu

SEQ ID NO: 51725 - RNA, 24 nt, Artificial Sequence
  Synthetic
gccaauggcaaacaagguaggagu

SEQ ID NO: 51726 - RNA, 18 nt, Artificial Sequence
  Synthetic
  misc_feature (9)..(9): n is a, c, g, or u
  misc_feature (15)..(15): n is a, c, g, or u
gguuaugunauuggnagu

SEQ ID NO: 51727 - RNA, 19 nt, Artificial Sequence
  Synthetic
  misc_feature (10)..(10): n is a, c, g, or u
  misc_feature (16)..(16): n is a, c, g, or u
ggguuaugunauuggnagu

SEQ ID NO: 51728 - RNA, 20 nt, Artificial Sequence
  Synthetic
  misc_feature (11)..(11): n is a, c, g, or u
  misc_feature (17)..(17): n is a, c, g, or u
uggguuaugunauuggnagu

SEQ ID NO: 51729 - RNA, 21 nt, Artificial Sequence
  Synthetic
  misc_feature (12)..(12): n is a, c, g, or u
  misc_feature (18)..(18): n is a, c, g, or u
auggguuaugunauuggnagu

SEQ ID NO: 51730 - RNA, 22 nt, Artificial Sequence
  Synthetic
  misc_feature (13)..(13): n is a, c, g, or u
  misc_feature (19)..(19): n is a, c, g, or u
cauggguuaugunauuggnagu

SEQ ID NO: 51731 - RNA, 23 nt, Artificial Sequence
  Synthetic
  misc_feature (14)..(14): n is a, c, g, or u
  misc_feature (20)..(20): n is a, c, g, or u
ucauggguuaugunauuggnagu

SEQ ID NO: 51732 - RNA, 24 nt, Artificial Sequence
  Synthetic
  misc_feature (15)..(15): n is a, c, g, or u
  misc_feature (21)..(21): n is a, c, g, or u
uucauggguuaugunauuggnagu

SEQ ID NO: 51733 - RNA, 18 nt, Artificial Sequence
  Synthetic
uccuuggacucauaaggu

SEQ ID NO: 51734 - RNA, 19 nt, Artificial Sequence
  Synthetic
uuccuuggacucauaaggu

SEQ ID NO: 51735 - RNA, 20 nt, Artificial Sequence
  Synthetic
auuccuuggacucauaaggu

SEQ ID NO: 51736 - RNA, 21 nt, Artificial Sequence
  Synthetic
uauuccuuggacucauaaggu

SEQ ID NO: 51737 - RNA, 22 nt, Artificial Sequence
  Synthetic
guauuccuuggacucauaaggu

SEQ ID NO: 51738 - RNA, 23 nt, Artificial Sequence
  Synthetic
aguauuccuuggacucauaaggu

SEQ ID NO: 51739 - RNA, 24 nt, Artificial Sequence
  Synthetic
uaguauuccuuggacucauaaggu

SEQ ID NO: 51740 - RNA, 18 nt, Artificial Sequence
  Synthetic
guuucgcucgcagccggu

SEQ ID NO: 51741 - RNA, 19 nt, Artificial Sequence
  Synthetic
uguuucgcucgcagccggu

SEQ ID NO: 51742 - RNA, 20 nt, Artificial Sequence
  Synthetic
uuguuucgcucgcagccggu

SEQ ID NO: 51743 - RNA, 21 nt, Artificial Sequence
  Synthetic
cuuguuucgcucgcagccggu

SEQ ID NO: 51744 - RNA, 22 nt, Artificial Sequence
  Synthetic
gcuuguuucgcucgcagccggu

SEQ ID NO: 51745 - RNA, 23 nt, Artificial Sequence
  Synthetic
agcuuguuucgcucgcagccggu

SEQ ID NO: 51746 - RNA, 24 nt, Artificial Sequence
  Synthetic
cagcuuguuucgcucgcagccggu

SEQ ID NO: 51747 - RNA, 18 nt, Artificial Sequence
  Synthetic
cuuccaccaaucggcggu

SEQ ID NO: 51748 - RNA, 19 nt, Artificial Sequence
  Synthetic
gcuuccaccaaucggcggu

SEQ ID NO: 51749 - RNA, 20 nt, Artificial Sequence
  Synthetic
ugcuuccaccaaucggcggu

SEQ ID NO: 51750 - RNA, 21 nt, Artificial Sequence
  Synthetic
cugcuuccaccaaucggcggu

SEQ ID NO: 51751 - RNA, 22 nt, Artificial Sequence
  Synthetic
ccugcuuccaccaaucggcggu

SEQ ID NO: 51752 - RNA, 23 nt, Artificial Sequence
  Synthetic
uccugcuuccaccaaucggcggu

SEQ ID NO: 51753 - RNA, 24 nt, Artificial Sequence
  Synthetic
cuccugcuuccaccaaucggcggu

SEQ ID NO: 51754 - RNA, 18 nt, Artificial Sequence
  Synthetic
  misc_feature (1)..(1): n is a, c, g, or u
  misc_feature (7)..(7): n is a, c, g, or u
ncuguungauccgagggu

SEQ ID NO: 51755 - RNA, 19 nt, Artificial Sequence
  Synthetic
  misc_feature (2)..(2): n is a, c, g, or u
  misc_feature (8)..(8): n is a, c, g, or u
cncuguungauccgagggu

SEQ ID NO: 51756 - RNA, 20 nt, Artificial Sequence
  Synthetic
  misc_feature (3)..(3): n is a, c, g, or u
  misc_feature (9)..(9): n is a, c, g, or u
gcncuguungauccgagggu

SEQ ID NO: 51757 - RNA, 21 nt, Artificial Sequence
  Synthetic
  misc_feature (4)..(4): n is a, c, g, or u
  misc_feature (10)..(10): n is a, c, g, or u
ggcncuguungauccgagggu

SEQ ID NO: 51758 - RNA, 22 nt, Artificial Sequence
  Synthetic
  misc_feature (5)..(5): n is a, c, g, or u
  misc_feature (11)..(11): n is a, c, g, or u
aggcncuguungauccgagggu

SEQ ID NO: 51759 - RNA, 23 nt, Artificial Sequence
  Synthetic
  misc_feature (6)..(6): n is a, c, g, or u
  misc_feature (12)..(12): n is a, c, g, or u
caggcncuguungauccgagggu

SEQ ID NO: 51760 - RNA, 24 nt, Artificial Sequence
  Synthetic
  misc_feature (7)..(7): n is a, c, g, or u
  misc_feature (13)..(13): n is a, c, g, or u
ccaggcncuguungauccgagggu

SEQ ID NO: 51761 - RNA, 18 nt, Artificial Sequence
  Synthetic
gacgcaacccccacuggu

SEQ ID NO: 51762 - RNA, 19 nt, Artificial Sequence
  Synthetic
ugacgcaacccccacuggu

SEQ ID NO: 51763 - RNA, 20 nt, Artificial Sequence
  Synthetic
cugacgcaacccccacuggu

SEQ ID NO: 51764 - RNA, 21 nt, Artificial Sequence
  Synthetic
gcugacgcaacccccacuggu

SEQ ID NO: 51765 - RNA, 22 nt, Artificial Sequence
  Synthetic
ugcugacgcaacccccacuggu

SEQ ID NO: 51766 - RNA, 23 nt, Artificial Sequence
  Synthetic
uugcugacgcaacccccacuggu

SEQ ID NO: 51767 - RNA, 24 nt, Artificial Sequence
  Synthetic
uuugcugacgcaacccccacuggu

SEQ ID NO: 51768 - RNA, 18 nt, Artificial Sequence
  Synthetic
  misc_feature (4)..(4): n is a, c, g, or u
  misc_feature (16)..(16): n is a, c, g, or u
uganuucuucccgucngu

SEQ ID NO: 51769 - RNA, 19 nt, Artificial Sequence
  Synthetic
  misc_feature (5)..(5): n is a, c, g, or u
  misc_feature (17)..(17): n is a, c, g, or u
cuganuucuucccgucngu

SEQ ID NO: 51770 - RNA, 20 nt, Artificial Sequence
  Synthetic
  misc_feature (6)..(6): n is a, c, g, or u
  misc_feature (18)..(18): n is a, c, g, or u
ucuganuucuucccgucngu

SEQ ID NO: 51771 - RNA, 21 nt, Artificial Sequence
  Synthetic
  misc_feature (7)..(7): n is a, c, g, or u
  misc_feature (19)..(19): n is a, c, g, or u
uucuganuucuucccgucngu

SEQ ID NO: 51772 - RNA, 22 nt, Artificial Sequence
  Synthetic
  misc_feature (8)..(8): n is a, c, g, or u
  misc_feature (20)..(20): n is a, c, g, or u
cuucuganuucuucccgucngu

SEQ ID NO: 51773 - RNA, 23 nt, Artificial Sequence
  Synthetic
  misc_feature (9)..(9): n is a, c, g, or u
  misc_feature (21)..(21): n is a, c, g, or u
ccuucuganuucuucccgucngu

SEQ ID NO: 51774 - RNA, 24 nt, Artificial Sequence
  Synthetic
  misc_feature (10)..(10): n is a, c, g, or u
  misc_feature (22)..(22): n is a, c, g, or u
gccuucuganuucuucccgucngu

SEQ ID NO: 51775 - RNA, 18 nt, Artificial Sequence
  Synthetic
  misc_feature (6)..(6): n is a, c, g, or u
  misc_feature (8)..(8): n is a, c, g, or u
  misc_feature (17)..(17): n is a, c, g, or u
guuaangnucuuuguanu

SEQ ID NO: 51776 - RNA, 19 nt, Artificial Sequence
  Synthetic
  misc_feature (7)..(7): n is a, c, g, or u
  misc_feature (9)..(9): n is a, c, g, or u
  misc_feature (18)..(18): n is a, c, g, or u
gguuaangnucuuuguanu

SEQ ID NO: 51777 - RNA, 20 nt, Artificial Sequence
  Synthetic
  misc_feature (8)..(8): n is a, c, g, or u
  misc_feature (10)..(10): n is a, c, g, or u
  misc_feature (19)..(19): n is a, c, g, or u
agguuaangnucuuuguanu

SEQ ID NO: 51778 - RNA, 21 nt, Artificial Sequence
  Synthetic
  misc_feature (1)..(1): n is a, c, g, or u
  misc_feature (9)..(9): n is a, c, g, or u
  misc_feature (11)..(11): n is a, c, g, or u
  misc_feature (20)..(20): n is a, c, g, or u
nagguuaangnucuuuguanu

SEQ ID NO: 51779 - RNA, 22 nt, Artificial Sequence
  Synthetic
  misc_feature (2)..(2): n is a, c, g, or u
  misc_feature (10)..(10): n is a, c, g, or u
  misc_feature (12)..(12): n is a, c, g, or u
  misc_feature (21)..(21): n is a, c, g, or u
unagguuaangnucuuuguanu

SEQ ID NO: 51780 - RNA, 23 nt, Artificial Sequence
  Synthetic
  misc_feature (3)..(3): n is a, c, g, or u
  misc_feature (11)..(11): n is a, c, g, or u
  misc_feature (13)..(13): n is a, c, g, or u
  misc_feature (22)..(22): n is a, c, g, or u
aunagguuaangnucuuuguanu

SEQ ID NO: 51781 - RNA, 24 nt, Artificial Sequence
  Synthetic
  misc_feature (4)..(4): n is a, c, g, or u
  misc_feature (12)..(12): n is a, c, g, or u
  misc_feature (14)..(14): n is a, c, g, or u
  misc_feature (23)..(23): n is a, c, g, or u
gaunagguuaangnucuuuguanu

SEQ ID NO: 51782 - RNA, 18 nt, Artificial Sequence
  Synthetic
  misc_feature (17)..(17): n is a, c, g, or u
uugaguauuuggugucnu

SEQ ID NO: 51783 - RNA, 19 nt, Artificial Sequence
  Synthetic
  misc_feature (18)..(18): n is a, c, g, or u
cuugaguauuuggugucnu

SEQ ID NO: 51784 - RNA, 20 nt, Artificial Sequence
  Synthetic
  misc_feature (19)..(19): n is a, c, g, or u
ucuugaguauuuggugucnu

SEQ ID NO: 51785 - RNA, 21 nt, Artificial Sequence
  Synthetic
  misc_feature (20)..(20): n is a, c, g, or u
uucuugaguauuuggugucnu

SEQ ID NO: 51786 - RNA, 22 nt, Artificial Sequence
  Synthetic
  misc_feature (21)..(21): n is a, c, g, or u
guucuugaguauuuggugucnu

SEQ ID NO: 51787 - RNA, 23 nt, Artificial Sequence
  Synthetic
  misc_feature (22)..(22): n is a, c, g, or u
aguucuugaguauuuggugucnu

SEQ ID NO: 51788 - RNA, 24 nt, Artificial Sequence
  Synthetic
  misc_feature (23)..(23): n is a, c, g, or u
caguucuugaguauuuggugucnu

SEQ ID NO: 51789 - RNA, 18 nt, Artificial Sequence
  Synthetic
  misc_feature (17)..(17): n is a, c, g, or u
gugggucaccauauucnu

SEQ ID NO: 51790 - RNA, 19 nt, Artificial Sequence
  Synthetic
  misc_feature (18)..(18): n is a, c, g, or u
ugugggucaccauauucnu

SEQ ID NO: 51791 - RNA, 20 nt, Artificial Sequence
  Synthetic
  misc_feature (19)..(19): n is a, c, g, or u
uugugggucaccauauucnu

SEQ ID NO: 51792 - RNA, 21 nt, Artificial Sequence
  Synthetic
  misc_feature (20)..(20): n is a, c, g, or u
uuugugggucaccauauucnu

SEQ ID NO: 51793 - RNA, 22 nt, Artificial Sequence
  Synthetic
  misc_feature (21)..(21): n is a, c, g, or u
uuuugugggucaccauauucnu

SEQ ID NO: 51794 - RNA, 23 nt, Artificial Sequence
  Synthetic
  misc_feature (22)..(22): n is a, c, g, or u
auuuugugggucaccauauucnu

SEQ ID NO: 51795 - RNA, 24 nt, Artificial Sequence
  Synthetic
  misc_feature (23)..(23): n is a, c, g, or u
cauuuugugggucaccauauucnu

SEQ ID NO: 51796 - RNA, 18 nt, Artificial Sequence
  Synthetic
  misc_feature (4)..(4): n is a, c, g, or u
  misc_feature (17)..(17): n is a, c, g, or u
uaangacugggaggagnu

SEQ ID NO: 51797 - RNA, 19 nt, Artificial Sequence
  Synthetic
  misc_feature (5)..(5): n is a, c, g, or u
  misc_feature (18)..(18): n is a, c, g, or u
uuaangacugggaggagnu

SEQ ID NO: 51798 - RNA, 20 nt, Artificial Sequence
  Synthetic
  misc_feature (6)..(6): n is a, c, g, or u
  misc_feature (19)..(19): n is a, c, g, or u
uuuaangacugggaggagnu

SEQ ID NO: 51799 - RNA, 21 nt, Artificial Sequence
  Synthetic
  misc_feature (7)..(7): n is a, c, g, or u
  misc_feature (20)..(20): n is a, c, g, or u
auuuaangacugggaggagnu

SEQ ID NO: 51800 - RNA, 22 nt, Artificial Sequence
  Synthetic
  misc_feature (8)..(8): n is a, c, g, or u
  misc_feature (21)..(21): n is a, c, g, or u
uauuuaangacugggaggagnu

SEQ ID NO: 51801 - RNA, 23 nt, Artificial Sequence
  Synthetic
  misc_feature (9)..(9): n is a, c, g, or u
  misc_feature (22)..(22): n is a, c, g, or u
guauuuaangacugggaggagnu

SEQ ID NO: 51802 - RNA, 24 nt, Artificial Sequence
  Synthetic
  misc_feature (10)..(10): n is a, c, g, or u
  misc_feature (23)..(23): n is a, c, g, or u
uguauuuaangacugggaggagnu

SEQ ID NO: 51803 - RNA, 18 nt, Artificial Sequence
  Synthetic
ugacccuuauaaagaauu

SEQ ID NO: 51804 - RNA, 19 nt, Artificial Sequence
  Synthetic
uugacccuuauaaagaauu

SEQ ID NO: 51805 - RNA, 20 nt, Artificial Sequence
  Synthetic
auugacccuuauaaagaauu

SEQ ID NO: 51806 - RNA, 21 nt, Artificial Sequence
  Synthetic
cauugacccuuauaaagaauu

SEQ ID NO: 51807 - RNA, 22 nt, Artificial Sequence
  Synthetic
acauugacccuuauaaagaauu

SEQ ID NO: 51808 - RNA, 23 nt, Artificial Sequence
  Synthetic
gacauugacccuuauaaagaauu

SEQ ID NO: 51809 - RNA, 24 nt, Artificial Sequence
  Synthetic
ggacauugacccuuauaaagaauu

SEQ ID NO: 51810 - RNA, 18 nt, Artificial Sequence
  Synthetic
  misc_feature (1)..(1): n is a, c, g, or u
  misc_feature (4)..(4): n is a, c, g, or u
  misc_feature (7)..(7): n is a, c, g, or u
ncunacnaaaaaugaauu

SEQ ID NO: 51811 - RNA, 19 nt, Artificial Sequence
  Synthetic
  misc_feature (2)..(2): n is a, c, g, or u
  misc_feature (5)..(5): n is a, c, g, or u
  misc_feature (8)..(8): n is a, c, g, or u
cncunacnaaaaaugaauu

SEQ ID NO: 51812 - RNA, 20 nt, Artificial Sequence
  Synthetic
  misc_feature (3)..(3): n is a, c, g, or u
  misc_feature (6)..(6): n is a, c, g, or u
  misc_feature (9)..(9): n is a, c, g, or u
ccncunacnaaaaaugaauu

SEQ ID NO: 51813 - RNA, 21 nt, Artificial Sequence
  Synthetic
  misc_feature (4)..(4): n is a, c, g, or u
  misc_feature (7)..(7): n is a, c, g, or u
  misc_feature (10)..(10): n is a, c, g, or u
cccncunacnaaaaaugaauu

SEQ ID NO: 51814 - RNA, 22 nt, Artificial Sequence
  Synthetic
  misc_feature (5)..(5): n is a, c, g, or u
  misc_feature (8)..(8): n is a, c, g, or u
  misc_feature (11)..(11): n is a, c, g, or u
gcccncunacnaaaaaugaauu

SEQ ID NO: 51815 - RNA, 23 nt, Artificial Sequence
  Synthetic
  misc_feature (6)..(6): n is a, c, g, or u
  misc_feature (9)..(9): n is a, c, g, or u
  misc_feature (12)..(12): n is a, c, g, or u
ggcccncunacnaaaaaugaauu

SEQ ID NO: 51816 - RNA, 24 nt, Artificial Sequence
  Synthetic
  misc_feature (7)..(7): n is a, c, g, or u
  misc_feature (10)..(10): n is a, c, g, or u
  misc_feature (13)..(13): n is a, c, g, or u
aggcccncunacnaaaaaugaauu

SEQ ID NO: 51817 - RNA, 18 nt, Artificial Sequence
  Synthetic
  misc_feature (15)..(15): n is a, c, g, or u
aaaguuugucaacgnauu

SEQ ID NO: 51818 - RNA, 19 nt, Artificial Sequence
  Synthetic
  misc_feature (16)..(16): n is a, c, g, or u
gaaaguuugucaacgnauu

SEQ ID NO: 51819 - RNA, 20 nt, Artificial Sequence
  Synthetic
  misc_feature (17)..(17): n is a, c, g, or u
ggaaaguuugucaacgnauu

SEQ ID NO: 51820 - RNA, 21 nt, Artificial Sequence
  Synthetic
  misc_feature (18)..(18): n is a, c, g, or u
uggaaaguuugucaacgnauu

SEQ ID NO: 51821 - RNA, 22 nt, Artificial Sequence
  Synthetic
  misc_feature (1)..(1): n is a, c, g, or u
  misc_feature (19)..(19): n is a, c, g, or u
nuggaaaguuugucaacgnauu

SEQ ID NO: 51822 - RNA, 23 nt, Artificial Sequence
  Synthetic
  misc_feature (2)..(2): n is a, c, g, or u
  misc_feature (20)..(20): n is a, c, g, or u
anuggaaaguuugucaacgnauu

SEQ ID NO: 51823 - RNA, 24 nt, Artificial Sequence
  Synthetic
  misc_feature (3)..(3): n is a, c, g, or u
  misc_feature (21)..(21): n is a, c, g, or u
ganuggaaaguuugucaacgnauu

SEQ ID NO: 51824 - RNA, 18 nt, Artificial Sequence
  Synthetic
uauggaugaucugguauu

SEQ ID NO: 51825 - RNA, 19 nt, Artificial Sequence
  Synthetic
auauggaugaucugguauu

SEQ ID NO: 51826 - RNA, 20 nt, Artificial Sequence
  Synthetic
uauauggaugaucugguauu

SEQ ID NO: 51827 - RNA, 21 nt, Artificial Sequence
  Synthetic
uuauauggaugaucugguauu

SEQ ID NO: 51828 - RNA, 22 nt, Artificial Sequence
  Synthetic
guuauauggaugaucugguauu

SEQ ID NO: 51829 - RNA, 23 nt, Artificial Sequence
  Synthetic
aguuauauggaugaucugguauu

SEQ ID NO: 51830 - RNA, 24 nt, Artificial Sequence
  Synthetic
uaguuauauggaugaucugguauu

SEQ ID NO: 51831 - RNA, 18 nt, Artificial Sequence
  Synthetic
  misc_feature (7)..(7): n is a, c, g, or u
ccuaucnuauccacacuu

SEQ ID NO: 51832 - RNA, 19 nt, Artificial Sequence
  Synthetic
  misc_feature (8)..(8): n is a, c, g, or u
cccuaucnuauccacacuu

SEQ ID NO: 51833 - RNA, 20 nt, Artificial Sequence
  Synthetic
  misc_feature (9)..(9): n is a, c, g, or u
ccccuaucnuauccacacuu

SEQ ID NO: 51834 - RNA, 21 nt, Artificial Sequence
  Synthetic
  misc_feature (10)..(10): n is a, c, g, or u
gccccuaucnuauccacacuu

SEQ ID NO: 51835 - RNA, 22 nt, Artificial Sequence
  Synthetic
  misc_feature (11)..(11): n is a, c, g, or u
ugccccuaucnuauccacacuu

SEQ ID NO: 51836 - RNA, 23 nt, Artificial Sequence
  Synthetic
  misc_feature (12)..(12): n is a, c, g, or u
augccccuaucnuauccacacuu

SEQ ID NO: 51837 - RNA, 24 nt, Artificial Sequence
  Synthetic
  misc_feature (13)..(13): n is a, c, g, or u
aaugccccuaucnuauccacacuu

SEQ ID NO: 51838 - RNA, 18 nt, Artificial Sequence
  Synthetic
acauuuccugccuuacuu

SEQ ID NO: 51839 - RNA, 19 nt, Artificial Sequence
  Synthetic
cacauuuccugccuuacuu

SEQ ID NO: 51840 - RNA, 20 nt, Artificial Sequence
  Synthetic
ucacauuuccugccuuacuu

SEQ ID NO: 51841 - RNA, 21 nt, Artificial Sequence
  Synthetic
uucacauuuccugccuuacuu

SEQ ID NO: 51842 - RNA, 22 nt, Artificial Sequence
  Synthetic
uuucacauuuccugccuuacuu

SEQ ID NO: 51843 - RNA, 23 nt, Artificial Sequence
  Synthetic
guuucacauuuccugccuuacuu

SEQ ID NO: 51844 - RNA, 24 nt, Artificial Sequence
  Synthetic
gguuucacauuuccugccuuacuu

SEQ ID NO: 51845 - RNA, 18 nt, Artificial Sequence
  Synthetic
  misc_feature (11)..(11): n is a, c, g, or u
ucccaucaucnugggcuu

SEQ ID NO: 51846 - RNA, 19 nt, Artificial Sequence
  Synthetic
  misc_feature (12)..(12): n is a, c, g, or u
aucccaucaucnugggcuu

SEQ ID NO: 51847 - RNA, 20 nt, Artificial Sequence
  Synthetic
  misc_feature (13)..(13): n is a, c, g, or u
caucccaucaucnugggcuu

SEQ ID NO: 51848 - RNA, 21 nt, Artificial Sequence
  Synthetic
  misc_feature (14)..(14): n is a, c, g, or u
ccaucccaucaucnugggcuu

SEQ ID NO: 51849 - RNA, 22 nt, Artificial Sequence
  Synthetic
  misc_feature (15)..(15): n is a, c, g, or u
cccaucccaucaucnugggcuu

SEQ ID NO: 51850 - RNA, 23 nt, Artificial Sequence
  Synthetic
  misc_feature (16)..(16): n is a, c, g, or u
ucccaucccaucaucnugggcuu

SEQ ID NO: 51851 - RNA, 24 nt, Artificial Sequence
  Synthetic
  misc_feature (17)..(17): n is a, c, g, or u
uucccaucccaucaucnugggcuu

SEQ ID NO: 51852 - RNA, 18 nt, Artificial Sequence
  Synthetic
cugugccuuggguggcuu

SEQ ID NO: 51853 - RNA, 19 nt, Artificial Sequence
  Synthetic
gcugugccuuggguggcuu

SEQ ID NO: 51854 - RNA, 20 nt, Artificial Sequence
  Synthetic
agcugugccuuggguggcuu

SEQ ID NO: 51855 - RNA, 21 nt, Artificial Sequence
  Synthetic
aagcugugccuuggguggcuu

SEQ ID NO: 51856 - RNA, 22 nt, Artificial Sequence
  Synthetic
caagcugugccuuggguggcuu

SEQ ID NO: 51857 - RNA, 23 nt, Artificial Sequence
  Synthetic
ccaagcugugccuuggguggcuu

SEQ ID NO: 51858 - RNA, 24 nt, Artificial Sequence
  Synthetic
uccaagcugugccuuggguggcuu

SEQ ID NO: 51859 - RNA, 18 nt, Artificial Sequence
  Synthetic
  misc_feature (6)..(6): n is a, c, g, or u
  misc_feature (15)..(15): n is a, c, g, or u
caacgnauugugggncuu

SEQ ID NO: 51860 - RNA, 19 nt, Artificial Sequence
  Synthetic
  misc_feature (7)..(7): n is a, c, g, or u
  misc_feature (16)..(16): n is a, c, g, or u
ucaacgnauugugggncuu

SEQ ID NO: 51861 - RNA, 20 nt, Artificial Sequence
  Synthetic
  misc_feature (8)..(8): n is a, c, g, or u
  misc_feature (17)..(17): n is a, c, g, or u
gucaacgnauugugggncuu

SEQ ID NO: 51862 - RNA, 21 nt, Artificial Sequence
  Synthetic
  misc_feature (9)..(9): n is a, c, g, or u
  misc_feature (18)..(18): n is a, c, g, or u
ugucaacgnauugugggncuu

SEQ ID NO: 51863 - RNA, 22 nt, Artificial Sequence
  Synthetic
  misc_feature (10)..(10): n is a, c, g, or u
  misc_feature (19)..(19): n is a, c, g, or u
uugucaacgnauugugggncuu

SEQ ID NO: 51864 - RNA, 23 nt, Artificial Sequence
  Synthetic
  misc_feature (11)..(11): n is a, c, g, or u
  misc_feature (20)..(20): n is a, c, g, or u
uuugucaacgnauugugggncuu

SEQ ID NO: 51865 - RNA, 24 nt, Artificial Sequence
  Synthetic
  misc_feature (12)..(12): n is a, c, g, or u
  misc_feature (21)..(21): n is a, c, g, or u
guuugucaacgnauugugggncuu

SEQ ID NO: 51866 - RNA, 18 nt, Artificial Sequence
  Synthetic
aucuucuuguugguucuu

SEQ ID NO: 51867 - RNA, 19 nt, Artificial Sequence
  Synthetic
caucuucuuguugguucuu

SEQ ID NO: 51868 - RNA, 20 nt, Artificial Sequence
  Synthetic
ucaucuucuuguugguucuu

SEQ ID NO: 51869 - RNA, 21 nt, Artificial Sequence
  Synthetic
cucaucuucuuguugguucuu

SEQ ID NO: 51870 - RNA, 22 nt, Artificial Sequence
  Synthetic
ccucaucuucuuguugguucuu

SEQ ID NO: 51871 - RNA, 23 nt, Artificial Sequence
  Synthetic
gccucaucuucuuguugguucuu

SEQ ID NO: 51872 - RNA, 24 nt, Artificial Sequence
  Synthetic
ugccucaucuucuuguugguucuu

SEQ ID NO: 51873 - RNA, 18 nt, Artificial Sequence
  Synthetic
  misc_feature (8)..(8): n is a, c, g, or u
  misc_feature (14)..(14): n is a, c, g, or u
guuaugunauuggnaguu

SEQ ID NO: 51874 - RNA, 19 nt, Artificial Sequence
  Synthetic
  misc_feature (9)..(9): n is a, c, g, or u
  misc_feature (15)..(15): n is a, c, g, or u
gguuaugunauuggnaguu

SEQ ID NO: 51875 - RNA, 20 nt, Artificial Sequence
  Synthetic
  misc_feature (10)..(10): n is a, c, g, or u
  misc_feature (16)..(16): n is a, c, g, or u
ggguuaugunauuggnaguu

SEQ ID NO: 51876 - RNA, 21 nt, Artificial Sequence
  Synthetic
  misc_feature (11)..(11): n is a, c, g, or u
  misc_feature (17)..(17): n is a, c, g, or u
uggguuaugunauuggnaguu

SEQ ID NO: 51877 - RNA, 22 nt, Artificial Sequence
  Synthetic
  misc_feature (12)..(12): n is a, c, g, or u
  misc_feature (18)..(18): n is a, c, g, or u
auggguuaugunauuggnaguu

SEQ ID NO: 51878 - RNA, 23 nt, Artificial Sequence
  Synthetic
  misc_feature (13)..(13): n is a, c, g, or u
  misc_feature (19)..(19): n is a, c, g, or u
cauggguuaugunauuggnaguu

SEQ ID NO: 51879 - RNA, 24 nt, Artificial Sequence
  Synthetic
  misc_feature (14)..(14): n is a, c, g, or u
  misc_feature (20)..(20): n is a, c, g, or u
ucauggguuaugunauuggnaguu

SEQ ID NO: 51880 - RNA, 18 nt, Artificial Sequence
  Synthetic
  misc_feature (3)..(3): n is a, c, g, or u
  misc_feature (15)..(15): n is a, c, g, or u
ganuucuucccgucnguu

SEQ ID NO: 51881 - RNA, 19 nt, Artificial Sequence
  Synthetic
  misc_feature (4)..(4): n is a, c, g, or u
  misc_feature (16)..(16): n is a, c, g, or u
uganuucuucccgucnguu

SEQ ID NO: 51882 - RNA, 20 nt, Artificial Sequence
  Synthetic
  misc_feature (5)..(5): n is a, c, g, or u
  misc_feature (17)..(17): n is a, c, g, or u
cuganuucuucccgucnguu

SEQ ID NO: 51883 - RNA, 21 nt, Artificial Sequence
  Synthetic
  misc_feature (6)..(6): n is a, c, g, or u
  misc_feature (18)..(18): n is a, c, g, or u
ucuganuucuucccgucnguu

SEQ ID NO: 51884 - RNA, 22 nt, Artificial Sequence
  Synthetic
  misc_feature (7)..(7): n is a, c, g, or u
  misc_feature (19)..(19): n is a, c, g, or u
uucuganuucuucccgucnguu

SEQ ID NO: 51885 - RNA, 23 nt, Artificial Sequence
  Synthetic
  misc_feature (8)..(8): n is a, c, g, or u
  misc_feature (20)..(20): n is a, c, g, or u
cuucuganuucuucccgucnguu

SEQ ID NO: 51886 - RNA, 24 nt, Artificial Sequence
  Synthetic
  misc_feature (9)..(9): n is a, c, g, or u
  misc_feature (21)..(21): n is a, c, g, or u
ccuucuganuucuucccgucnguu

SEQ ID NO: 51887 - RNA, 18 nt, Artificial Sequence
  Synthetic
  misc_feature (2)..(3): n is a, c, g, or u
  misc_feature (9)..(9): n is a, c, g, or u
annggacunuuggacuuu

SEQ ID NO: 51888 - RNA, 19 nt, Artificial Sequence
  Synthetic
  misc_feature (3)..(4): n is a, c, g, or u
  misc_feature (10)..(10): n is a, c, g, or u
aannggacunuuggacuuu

SEQ ID NO: 51889 - RNA, 20 nt, Artificial Sequence
  Synthetic
  misc_feature (4)..(5): n is a, c, g, or u
  misc_feature (11)..(11): n is a, c, g, or u
uaannggacunuuggacuuu

SEQ ID NO: 51890 - RNA, 21 nt, Artificial Sequence
  Synthetic
  misc_feature (5)..(6): n is a, c, g, or u
  misc_feature (12)..(12): n is a, c, g, or u
auaannggacunuuggacuuu

SEQ ID NO: 51891 - RNA, 22 nt, Artificial Sequence
  Synthetic
  misc_feature (6)..(7): n is a, c, g, or u
  misc_feature (13)..(13): n is a, c, g, or u
cauaannggacunuuggacuuu

SEQ ID NO: 51892 - RNA, 23 nt, Artificial Sequence
  Synthetic
  misc_feature (7)..(8): n is a, c, g, or u
  misc_feature (14)..(14): n is a, c, g, or u
acauaannggacunuuggacuuu

SEQ ID NO: 51893 - RNA, 24 nt, Artificial Sequence
  Synthetic
  misc_feature (8)..(9): n is a, c, g, or u
  misc_feature (15)..(15): n is a, c, g, or u
uacauaannggacunuuggacuuu

SEQ ID NO: 51894 - RNA, 18 nt, Artificial Sequence
  Synthetic
  misc_feature (4)..(4): n is a, c, g, or u
acanuauuugcauacuuu

SEQ ID NO: 51895 - RNA, 19 nt, Artificial Sequence
  Synthetic
  misc_feature (5)..(5): n is a, c, g, or u
gacanuauuugcauacuuu

SEQ ID NO: 51896 - RNA, 20 nt, Artificial Sequence
  Synthetic
  misc_feature (6)..(6): n is a, c, g, or u
agacanuauuugcauacuuu

SEQ ID NO: 51897 - RNA, 21 nt, Artificial Sequence
  Synthetic
  misc_feature (7)..(7): n is a, c, g, or u
cagacanuauuugcauacuuu

SEQ ID NO: 51898 - RNA, 22 nt, Artificial Sequence
  Synthetic
  misc_feature (8)..(8): n is a, c, g, or u
ccagacanuauuugcauacuuu

SEQ ID NO: 51899 - RNA, 23 nt, Artificial Sequence
  Synthetic
  misc_feature (9)..(9): n is a, c, g, or u
accagacanuauuugcauacuuu

SEQ ID NO: 51900 - RNA, 24 nt, Artificial Sequence
  Synthetic
  misc_feature (1)..(1): n is a, c, g, or u
  misc_feature (10)..(10): n is a, c, g, or u
naccagacanuauuugcauacuuu

SEQ ID NO: 51901 - RNA, 18 nt, Artificial Sequence
  Synthetic
cauuuccugccuuacuuu

SEQ ID NO: 51902 - RNA, 19 nt, Artificial Sequence
  Synthetic
acauuuccugccuuacuuu

SEQ ID NO: 51903 - RNA, 20 nt, Artificial Sequence
  Synthetic
cacauuuccugccuuacuuu

SEQ ID NO: 51904 - RNA, 21 nt, Artificial Sequence
  Synthetic
ucacauuuccugccuuacuuu

SEQ ID NO: 51905 - RNA, 22 nt, Artificial Sequence
  Synthetic
uucacauuuccugccuuacuuu

SEQ ID NO: 51906 - RNA, 23 nt, Artificial Sequence
  Synthetic
uuucacauuuccugccuuacuuu

SEQ ID NO: 51907 - RNA, 24 nt, Artificial Sequence
  Synthetic
guuucacauuuccugccuuacuuu

SEQ ID NO: 51908 - RNA, 18 nt, Artificial Sequence
  Synthetic
  misc_feature (10)..(10): n is a, c, g, or u
cccaucaucnugggcuuu

SEQ ID NO: 51909 - RNA, 19 nt, Artificial Sequence
  Synthetic
  misc_feature (11)..(11): n is a, c, g, or u
ucccaucaucnugggcuuu

SEQ ID NO: 51910 - RNA, 20 nt, Artificial Sequence
  Synthetic
  misc_feature (12)..(12): n is a, c, g, or u
aucccaucaucnugggcuuu

SEQ ID NO: 51911 - RNA, 21 nt, Artificial Sequence
  Synthetic
  misc_feature (13)..(13): n is a, c, g, or u
caucccaucaucnugggcuuu

SEQ ID NO: 51912 - RNA, 22 nt, Artificial Sequence
  Synthetic
  misc_feature (14)..(14): n is a, c, g, or u
ccaucccaucaucnugggcuuu

SEQ ID NO: 51913 - RNA, 23 nt, Artificial Sequence
  Synthetic
  misc_feature (15)..(15): n is a, c, g, or u
cccaucccaucaucnugggcuuu

SEQ ID NO: 51914 - RNA, 24 nt, Artificial Sequence
  Synthetic
  misc_feature (16)..(16): n is a, c, g, or u
ucccaucccaucaucnugggcuuu

SEQ ID NO: 51915 - RNA, 18 nt, Artificial Sequence
  Synthetic
  misc_feature (15)..(15): n is a, c, g, or u
cauaaggugggaaanuuu

SEQ ID NO: 51916 - RNA, 19 nt, Artificial Sequence
  Synthetic
  misc_feature (16)..(16): n is a, c, g, or u
ucauaaggugggaaanuuu

SEQ ID NO: 51917 - RNA, 20 nt, Artificial Sequence
  Synthetic
  misc_feature (17)..(17): n is a, c, g, or u
cucauaaggugggaaanuuu

SEQ ID NO: 51918 - RNA, 21 nt, Artificial Sequence
  Synthetic
  misc_feature (18)..(18): n is a, c, g, or u
acucauaaggugggaaanuuu

SEQ ID NO: 51919 - RNA, 22 nt, Artificial Sequence
  Synthetic
  misc_feature (19)..(19): n is a, c, g, or u
gacucauaaggugggaaanuuu

SEQ ID NO: 51920 - RNA, 23 nt, Artificial Sequence
  Synthetic
  misc_feature (20)..(20): n is a, c, g, or u
ggacucauaaggugggaaanuuu

SEQ ID NO: 51921 - RNA, 24 nt, Artificial Sequence
  Synthetic
  misc_feature (21)..(21): n is a, c, g, or u
uggacucauaaggugggaaanuuu

SEQ ID NO: 51922 - RNA, 22 nt, Artificial Sequence
  Synthetic
gauaguccagaagaaccaacaa

SEQ ID NO: 51923 - RNA, 21 nt, Artificial Sequence
  Synthetic
ggccuggccguugccgagcaa

SEQ ID NO: 51924 - RNA, 21 nt, Artificial Sequence
  Synthetic
gccaggacaaguuggaggaca

SEQ ID NO: 51925 - RNA, 21 nt, Artificial Sequence
  Synthetic
  misc_feature (17)..(17): n is a, c, g, or u
gaauccacacuccaaangaca

SEQ ID NO: 51926 - RNA, 23 nt, Artificial Sequence
  Synthetic
  misc_feature (19)..(19): n is a, c, g, or u
gcgaauccacacuccaaangaca

SEQ ID NO: 51927 - RNA, 21 nt, Artificial Sequence
  Synthetic
gauggucuggaaagaauccca

SEQ ID NO: 51928 - RNA, 24 nt, Artificial Sequence
  Synthetic
gcugauggucuggaaagaauccca

SEQ ID NO: 51929 - RNA, 22 nt, Artificial Sequence
  Synthetic
  misc_feature (5)..(5): n is a, c, g, or u
gagancuucgucugcgaggcga

SEQ ID NO: 51930 - RNA, 23 nt, Artificial Sequence
  Synthetic
  misc_feature (4)..(4): n is a, c, g, or u
guanagggcugaagcggugucga

SEQ ID NO: 51931 - RNA, 21 nt, Artificial Sequence
  Synthetic
gaaagcccuacgcaccacuga

SEQ ID NO: 51932 - RNA, 22 nt, Artificial Sequence
  Synthetic
ggaaagcccuacgcaccacuga

SEQ ID NO: 51933 - RNA, 23 nt, Artificial Sequence
  Synthetic
gggaaagcccuacgcaccacuga

SEQ ID NO: 51934 - RNA, 24 nt, Artificial Sequence
  Synthetic
ggggaaagcccuacgcaccacuga

SEQ ID NO: 51935 - RNA, 18 nt, Artificial Sequence
  Synthetic
gccucgucgucuaacaac

SEQ ID NO: 51936 - RNA, 23 nt, Artificial Sequence
  Synthetic
gaccugccucgucgucuaacaac

SEQ ID NO: 51937 - RNA, 24 nt, Artificial Sequence
  Synthetic
ggaccugccucgucgucuaacaac

SEQ ID NO: 51938 - RNA, 20 nt, Artificial Sequence
  Synthetic
gaccugccucgucgucuaac

SEQ ID NO: 51939 - RNA, 23 nt, Artificial Sequence
  Synthetic
guauggaucggcagaggagccac

SEQ ID NO: 51940 - RNA, 21 nt, Artificial Sequence
  Synthetic
gaaaauugagagaaguccacc

SEQ ID NO: 51941 - RNA, 21 nt, Artificial Sequence
  Synthetic
gaaaauacagagcccuuaccc

SEQ ID NO: 51942 - RNA, 22 nt, Artificial Sequence
  Synthetic
ggaaaauacagagcccuuaccc

SEQ ID NO: 51943 - RNA, 23 nt, Artificial Sequence
  Synthetic
gaaacgggcugaggcccacuccc

SEQ ID NO: 51944 - RNA, 21 nt, Artificial Sequence
  Synthetic
  misc_feature (11)..(11): n is a, c, g, or u
guccauguucnuagcagggcc

SEQ ID NO: 51945 - RNA, 24 nt, Artificial Sequence
  Synthetic
  misc_feature (14)..(14): n is a, c, g, or u
guuguccauguucnuagcagggcc

SEQ ID NO: 51946 - RNA, 23 nt, Artificial Sequence
  Synthetic
gauaaaacgccgcagacacaucc

SEQ ID NO: 51947 - RNA, 22 nt, Artificial Sequence
  Synthetic
gaaacauagagguuccuugagc

SEQ ID NO: 51948 - RNA, 23 nt, Artificial Sequence
  Synthetic
ggaaacauagagguuccuugagc

SEQ ID NO: 51949 - RNA, 24 nt, Artificial Sequence
  Synthetic
gggaaacauagagguuccuugagc

SEQ ID NO: 51950 - RNA, 24 nt, Artificial Sequence
  Synthetic
gacaugaacaaaagaugauuaggc

SEQ ID NO: 51951 - RNA, 23 nt, Artificial Sequence
  Synthetic
  misc_feature (13)..(13): n is a, c, g, or u
guugaagucccanucgggacugc

SEQ ID NO: 51952 - RNA, 24 nt, Artificial Sequence
  Synthetic
guauaaagggacucaagaugcugc

SEQ ID NO: 51953 - RNA, 18 nt, Artificial Sequence
  Synthetic
ggucuccaugcgacgugc

SEQ ID NO: 51954 - RNA, 20 nt, Artificial Sequence
  Synthetic
guggucuccaugcgacgugc

SEQ ID NO: 51955 - RNA, 19 nt, Artificial Sequence
  Synthetic
gcaccacugaacaaauugc

SEQ ID NO: 51956 - RNA, 22 nt, Artificial Sequence
  Synthetic
gcauggucccgugcuggugguc

SEQ ID NO: 51957 - RNA, 19 nt, Artificial Sequence
  Synthetic
gcgacgugcagaggugaag

SEQ ID NO: 51958 - RNA, 22 nt, Artificial Sequence
  Synthetic
guugcauggugcuggugaacag

SEQ ID NO: 51959 - RNA, 21 nt, Artificial Sequence
  Synthetic
gccgauugguggaagcaggag

SEQ ID NO: 51960 - RNA, 23 nt, Artificial Sequence
  Synthetic
  misc_feature (6)..(6): n is a, c, g, or u
  misc_feature (9)..(9): n is a, c, g, or u
guuggnuuncucccggaccgccg

SEQ ID NO: 51961 - RNA, 24 nt, Artificial Sequence
  Synthetic
  misc_feature (7)..(7): n is a, c, g, or u
  misc_feature (10)..(10): n is a, c, g, or u
gguuggnuuncucccggaccgccg

SEQ ID NO: 51962 - RNA, 19 nt, Artificial Sequence
  Synthetic
  misc_feature (16)..(16): n is a, c, g, or u
gcgaagugcacacggnccg

SEQ ID NO: 51963 - RNA, 23 nt, Artificial Sequence
  Synthetic
gaagcuccaaauucuuuauaagg

SEQ ID NO: 51964 - RNA, 23 nt, Artificial Sequence
  Synthetic
  misc_feature (21)..(21): n is a, c, g, or u
gcauuugguggucuauaagcngg

SEQ ID NO: 51965 - RNA, 24 nt, Artificial Sequence
  Synthetic
  misc_feature (22)..(22): n is a, c, g, or u
ggcauuugguggucuauaagcngg

SEQ ID NO: 51966 - RNA, 20 nt, Artificial Sequence
  Synthetic
guuccacgcaugcgcugaug

SEQ ID NO: 51967 - RNA, 21 nt, Artificial Sequence
  Synthetic
gguuccacgcaugcgcugaug

SEQ ID NO: 51968 - RNA, 24 nt, Artificial Sequence
  Synthetic
gacaaguuggaggacaggagguug

SEQ ID NO: 51969 - RNA, 21 nt, Artificial Sequence
  Synthetic
gucuuugauguauucuucgau

SEQ ID NO: 51970 - RNA, 22 nt, Artificial Sequence
  Synthetic
guaacagcgguauaaagggacu

SEQ ID NO: 51971 - RNA, 23 nt, Artificial Sequence
  Synthetic
gguaacagcgguauaaagggacu

SEQ ID NO: 51972 - RNA, 24 nt, Artificial Sequence
  Synthetic
guaagugauuggagguuggggacu

SEQ ID NO: 51973 - RNA, 20 nt, Artificial Sequence
  Synthetic
guaacacgagcagggguccu

SEQ ID NO: 51974 - RNA, 24 nt, Artificial Sequence
  Synthetic
gccuguaacacgagcagggguccu

SEQ ID NO: 51975 - RNA, 22 nt, Artificial Sequence
  Synthetic
  misc_feature (10)..(10): n is a, c, g, or u
  misc_feature (18)..(18): n is a, c, g, or u
gauccaggunauugaccnuccu

SEQ ID NO: 51976 - RNA, 21 nt, Artificial Sequence
  Synthetic
gguuuugcauggucccgugcu

SEQ ID NO: 51977 - RNA, 24 nt, Artificial Sequence
  Synthetic
gcagguuuugcauggucccgugcu

SEQ ID NO: 51978 - RNA, 24 nt, Artificial Sequence
  Synthetic
gccaauggccaagccccaaccagu

SEQ ID NO: 51979 - RNA, 20 nt, Artificial Sequence
  Synthetic
gcugcaaggaguuccgcagu

SEQ ID NO: 51980 - RNA, 22 nt, Artificial Sequence
  Synthetic
  misc_feature (14)..(14): n is a, c, g, or u
guggucuauaagcnggaggagu

SEQ ID NO: 51981 - RNA, 23 nt, Artificial Sequence
  Synthetic
  misc_feature (15)..(15): n is a, c, g, or u
gguggucuauaagcnggaggagu

SEQ ID NO: 51982 - RNA, 19 nt, Artificial Sequence
  Synthetic
gagcagggguccuaggagu

SEQ ID NO: 51983 - RNA, 21 nt, Artificial Sequence
  Synthetic
gcagguuuugcauggucccgu

SEQ ID NO: 51984 - RNA, 23 nt, Artificial Sequence
  Synthetic
gugcagguuuugcauggucccgu

SEQ ID NO: 51985 - RNA, 18 nt, Artificial Sequence
  Synthetic
guugccgagcaacggggu

SEQ ID NO: 51986 - RNA, 21 nt, Artificial Sequence
  Synthetic
gaggugaaaaaguugcauggu

SEQ ID NO: 51987 - RNA, 24 nt, Artificial Sequence
  Synthetic
gcagaggugaaaaaguugcauggu

SEQ ID NO: 51988 - RNA, 21 nt, Artificial Sequence
  Synthetic
gucuagacucugugguauugu

SEQ ID NO: 51989 - RNA, 23 nt, Artificial Sequence
  Synthetic
gagucuagacucugugguauugu

SEQ ID NO: 51990 - RNA, 21 nt, Artificial Sequence
  Synthetic
  misc_feature (8)..(8): n is a, c, g, or u
guggauangauaggggcauuu

SEQ ID NO: 51991 - RNA, 23 nt, Artificial Sequence
  Synthetic
  misc_feature (10)..(10): n is a, c, g, or u
guguggauangauaggggcauuu

SEQ ID NO: 51992 - RNA, 21 nt, Artificial Sequence
  Synthetic
  misc_feature (10)..(10): n is a, c, g, or u
gcugcucggnugugcugccaa

SEQ ID NO: 51993 - RNA, 22 nt, Artificial Sequence
  Synthetic
  misc_feature (11)..(11): n is a, c, g, or u
ggcugcucggnugugcugccaa

SEQ ID NO: 51994 - RNA, 19 nt, Artificial Sequence
  Synthetic
gaccccugcucguguuaca

SEQ ID NO: 51995 - RNA, 20 nt, Artificial Sequence
  Synthetic
ggaccccugcucguguuaca

SEQ ID NO: 51996 - RNA, 23 nt, Artificial Sequence
  Synthetic
  misc_feature (11)..(11): n is a, c, g, or u
gcacuccuccngcuuauagacca

SEQ ID NO: 51997 - RNA, 19 nt, Artificial Sequence
  Synthetic
gcagcuuguuucgcucgca

SEQ ID NO: 51998 - RNA, 21 nt, Artificial Sequence
  Synthetic
gcauggacauugacccuuaua

SEQ ID NO: 51999 - RNA, 22 nt, Artificial Sequence
  Synthetic
ggcauggacauugacccuuaua

SEQ ID NO: 52000 - RNA, 23 nt, Artificial Sequence
  Synthetic
gggcauggacauugacccuuaua

SEQ ID NO: 52001 - RNA, 24 nt, Artificial Sequence
  Synthetic
ggggcauggacauugacccuuaua

SEQ ID NO: 52002 - RNA, 21 nt, Artificial Sequence
  Synthetic
  misc_feature (13)..(13): n is a, c, g, or u
  misc_feature (16)..(16): n is a, c, g, or u
gcgguccgggagnaanccaac

SEQ ID NO: 52003 - RNA, 22 nt, Artificial Sequence
  Synthetic
  misc_feature (14)..(14): n is a, c, g, or u
  misc_feature (17)..(17): n is a, c, g, or u
ggcgguccgggagnaanccaac

SEQ ID NO: 52004 - RNA, 21 nt, Artificial Sequence
  Synthetic
  misc_feature (18)..(18): n is a, c, g, or u
gacaccgcuucagcccunuac

SEQ ID NO: 52005 - RNA, 23 nt, Artificial Sequence
  Synthetic
gccaaaauucgcaguccccaacc

SEQ ID NO: 52006 - RNA, 24 nt, Artificial Sequence
  Synthetic
ggccaaaauucgcaguccccaacc

SEQ ID NO: 52007 - RNA, 21 nt, Artificial Sequence
  Synthetic
guguuugcugacgcaaccccc

SEQ ID NO: 52008 - RNA, 22 nt, Artificial Sequence
  Synthetic
guucaagccuccaagcugugcc

SEQ ID NO: 52009 - RNA, 21 nt, Artificial Sequence
  Synthetic
gggccaaaucugugcagcauc

SEQ ID NO: 52010 - RNA, 22 nt, Artificial Sequence
  Synthetic
ggggccaaaucugugcagcauc

SEQ ID NO: 52011 - RNA, 23 nt, Artificial Sequence
  Synthetic
gggggccaaaucugugcagcauc

SEQ ID NO: 52012 - RNA, 22 nt, Artificial Sequence
  Synthetic
  misc_feature (5)..(5): n is a, c, g, or u
guganuuaaugacuuuggcuuc

SEQ ID NO: 52013 - RNA, 23 nt, Artificial Sequence
  Synthetic
  misc_feature (6)..(6): n is a, c, g, or u
gguganuuaaugacuuuggcuuc

SEQ ID NO: 52014 - RNA, 24 nt, Artificial Sequence
  Synthetic
  misc_feature (7)..(7): n is a, c, g, or u
ggguganuuaaugacuuuggcuuc

SEQ ID NO: 52015 - RNA, 21 nt, Artificial Sequence
  Synthetic
guuuacuagugcaauuuguuc

SEQ ID NO: 52016 - RNA, 21 nt, Artificial Sequence
  Synthetic
ggauucuuuccagaccaucag

SEQ ID NO: 52017 - RNA, 22 nt, Artificial Sequence
  Synthetic
gggauucuuuccagaccaucag

SEQ ID NO: 52018 - RNA, 18 nt, Artificial Sequence
  Synthetic
guuuacgucccgucggcg

SEQ ID NO: 52019 - RNA, 23 nt, Artificial Sequence
  Synthetic
gcucggcaacggccaggccugug

SEQ ID NO: 52020 - RNA, 23 nt, Artificial Sequence
  Synthetic
gcucaguuuacuagugcaauuug

SEQ ID NO: 52021 - RNA, 24 nt, Artificial Sequence
  Synthetic
ggcucaguuuacuagugcaauuug

SEQ ID NO: 52022 - RNA, 24 nt, Artificial Sequence
  Synthetic
gaucucaaucuccagcuucccaau

SEQ ID NO: 52023 - RNA, 22 nt, Artificial Sequence
  Synthetic
guuucuuguugacaaaaauccu

SEQ ID NO: 52024 - RNA, 24 nt, Artificial Sequence
  Synthetic
guguuucuuguugacaaaaauccu

SEQ ID NO: 52025 - RNA, 21 nt, Artificial Sequence
  Synthetic
gcuuucccccacugucuggcu

SEQ ID NO: 52026 - RNA, 22 nt, Artificial Sequence
  Synthetic
ggcuuucccccacugucuggcu

SEQ ID NO: 52027 - RNA, 23 nt, Artificial Sequence
  Synthetic
gggcuuucccccacugucuggcu

SEQ ID NO: 52028 - RNA, 18 nt, Artificial Sequence
  Synthetic
gacucgugguggacuucu

SEQ ID NO: 52029 - RNA, 23 nt, Artificial Sequence
  Synthetic
gucuagacucgugguggacuucu

SEQ ID NO: 52030 - RNA, 18 nt, Artificial Sequence
  Synthetic
gguguccuggccaaaauu

SEQ ID NO: 52031 - RNA, 19 nt, Artificial Sequence
  Synthetic
ggguguccuggccaaaauu

SEQ ID NO: 52032 - RNA, 21 nt, Artificial Sequence
  Synthetic
gaagaucucaaucuccagcuu

SEQ ID NO: 52033 - RNA, 24 nt, Artificial Sequence
  Synthetic
gcagaagaucucaaucuccagcuu

SEQ ID NO: 52034 - RNA, 21 nt, Artificial Sequence
  Synthetic
gcugcuaugccucaucuucuu

SEQ ID NO: 52035 - RNA, 21 nt, Artificial Sequence
  Synthetic
auaguccagaagaaccaacaa

SEQ ID NO: 52036 - RNA, 23 nt, Artificial Sequence
  Synthetic
ugauaguccagaagaaccaacaa

SEQ ID NO: 52037 - RNA, 24 nt, Artificial Sequence
  Synthetic
uugauaguccagaagaaccaacaa

SEQ ID NO: 52038 - RNA, 22 nt, Artificial Sequence
  Synthetic
aggccuggccguugccgagcaa

SEQ ID NO: 52039 - RNA, 23 nt, Artificial Sequence
  Synthetic
caggccuggccguugccgagcaa

SEQ ID NO: 52040 - RNA, 24 nt, Artificial Sequence
  Synthetic
acaggccuggccguugccgagcaa

SEQ ID NO: 52041 - RNA, 22 nt, Artificial Sequence
  Synthetic
agccaggacaaguuggaggaca

SEQ ID NO: 52042 - RNA, 23 nt, Artificial Sequence
  Synthetic
uagccaggacaaguuggaggaca

SEQ ID NO: 52043 - RNA, 24 nt, Artificial Sequence
  Synthetic
auagccaggacaaguuggaggaca

SEQ ID NO: 52044 - RNA, 22 nt, Artificial Sequence
  Synthetic
  misc_feature (18)..(18): n is a, c, g, or u
cgaauccacacuccaaangaca

SEQ ID NO: 52045 - RNA, 24 nt, Artificial Sequence
  Synthetic
  misc_feature (20)..(20): n is a, c, g, or u
ugcgaauccacacuccaaangaca

SEQ ID NO: 52046 - RNA, 22 nt, Artificial Sequence
  Synthetic
ugauggucuggaaagaauccca

SEQ ID NO: 52047 - RNA, 23 nt, Artificial Sequence
  Synthetic
cugauggucuggaaagaauccca

SEQ ID NO: 52048 - RNA, 21 nt, Artificial Sequence
  Synthetic
  misc_feature (4)..(4): n is a, c, g, or u
agancuucgucugcgaggcga

SEQ ID NO: 52049 - RNA, 23 nt, Artificial Sequence
  Synthetic
  misc_feature (6)..(6): n is a, c, g, or u
ugagancuucgucugcgaggcga

SEQ ID NO: 52050 - RNA, 24 nt, Artificial Sequence
  Synthetic
  misc_feature (7)..(7): n is a, c, g, or u
uugagancuucgucugcgaggcga

SEQ ID NO: 52051 - RNA, 21 nt, Artificial Sequence
  Synthetic
  misc_feature (2)..(2): n is a, c, g, or u
anagggcugaagcggugucga

SEQ ID NO: 52052 - RNA, 22 nt, Artificial Sequence
  Synthetic
  misc_feature (3)..(3): n is a, c, g, or u
uanagggcugaagcggugucga

SEQ ID NO: 52053 - RNA, 24 nt, Artificial Sequence
  Synthetic
  misc_feature (1)..(1): n is a, c, g, or u
  misc_feature (5)..(5): n is a, c, g, or u
nguanagggcugaagcggugucga

SEQ ID NO: 52054 - RNA, 18 nt, Artificial Sequence
  Synthetic
  misc_feature (14)..(14): n is a, c, g, or u
aggacgucccgcgnagga

SEQ ID NO: 52055 - RNA, 19 nt, Artificial Sequence
  Synthetic
  misc_feature (15)..(15): n is a, c, g, or u
aaggacgucccgcgnagga

SEQ ID NO: 52056 - RNA, 20 nt, Artificial Sequence
  Synthetic
  misc_feature (16)..(16): n is a, c, g, or u
aaaggacgucccgcgnagga

SEQ ID NO: 52057 - RNA, 21 nt, Artificial Sequence
  Synthetic
  misc_feature (17)..(17): n is a, c, g, or u
caaaggacgucccgcgnagga

SEQ ID NO: 52058 - RNA, 22 nt, Artificial Sequence
  Synthetic
  misc_feature (18)..(18): n is a, c, g, or u
acaaaggacgucccgcgnagga

SEQ ID NO: 52059 - RNA, 23 nt, Artificial Sequence
  Synthetic
  misc_feature (19)..(19): n is a, c, g, or u
aacaaaggacgucccgcgnagga

SEQ ID NO: 52060 - RNA, 24 nt, Artificial Sequence
  Synthetic
  misc_feature (20)..(20): n is a, c, g, or u
aaacaaaggacgucccgcgnagga

SEQ ID NO: 52061 - RNA, 21 nt, Artificial Sequence
  Synthetic
aguaguuuccggaagugugga

SEQ ID NO: 52062 - RNA, 22 nt, Artificial Sequence
  Synthetic
caguaguuuccggaagugugga

SEQ ID NO: 52063 - RNA, 23 nt, Artificial Sequence
  Synthetic
acaguaguuuccggaagugugga

SEQ ID NO: 52064 - RNA, 24 nt, Artificial Sequence
  Synthetic
aacaguaguuuccggaagugugga

SEQ ID NO: 52065 - RNA, 19 nt, Artificial Sequence
  Synthetic
ugccucgucgucuaacaac

SEQ ID NO: 52066 - RNA, 20 nt, Artificial Sequence
  Synthetic
cugccucgucgucuaacaac

SEQ ID NO: 52067 - RNA, 21 nt, Artificial Sequence
  Synthetic
ccugccucgucgucuaacaac

SEQ ID NO: 52068 - RNA, 22 nt, Artificial Sequence
  Synthetic
accugccucgucgucuaacaac

SEQ ID NO: 52069 - RNA, 18 nt, Artificial Sequence
  Synthetic
ccugccucgucgucuaac

SEQ ID NO: 52070 - RNA, 19 nt, Artificial Sequence
  Synthetic
accugccucgucgucuaac

SEQ ID NO: 52071 - RNA, 21 nt, Artificial Sequence
  Synthetic
auggaucggcagaggagccac

SEQ ID NO: 52072 - RNA, 22 nt, Artificial Sequence
  Synthetic
uauggaucggcagaggagccac

SEQ ID NO: 52073 - RNA, 24 nt, Artificial Sequence
  Synthetic
aguauggaucggcagaggagccac

SEQ ID NO: 52074 - RNA, 22 nt, Artificial Sequence
  Synthetic
agaaaauugagagaaguccacc

SEQ ID NO: 52075 - RNA, 23 nt, Artificial Sequence
  Synthetic
uagaaaauugagagaaguccacc

SEQ ID NO: 52076 - RNA, 24 nt, Artificial Sequence
  Synthetic
cuagaaaauugagagaaguccacc

SEQ ID NO: 52077 - RNA, 23 nt, Artificial Sequence
  Synthetic
aggaaaauacagagcccuuaccc

SEQ ID NO: 52078 - RNA, 24 nt, Artificial Sequence
  Synthetic
caggaaaauacagagcccuuaccc

SEQ ID NO: 52079 - RNA, 21 nt, Artificial Sequence
  Synthetic
aacgggcugaggcccacuccc

SEQ ID NO: 52080 - RNA, 22 nt, Artificial Sequence
  Synthetic
aaacgggcugaggcccacuccc

SEQ ID NO: 52081 - RNA, 24 nt, Artificial Sequence
  Synthetic
agaaacgggcugaggcccacuccc

SEQ ID NO: 52082 - RNA, 21 nt, Artificial Sequence
  Synthetic
caugcuguagcucuuguuccc

SEQ ID NO: 52083 - RNA, 22 nt, Artificial Sequence
  Synthetic
ccaugcuguagcucuuguuccc

SEQ ID NO: 52084 - RNA, 23 nt, Artificial Sequence
  Synthetic
cccaugcuguagcucuuguuccc

SEQ ID NO: 52085 - RNA, 24 nt, Artificial Sequence
  Synthetic
ucccaugcuguagcucuuguuccc

SEQ ID NO: 52086 - RNA, 22 nt, Artificial Sequence
  Synthetic
  misc_feature (12)..(12): n is a, c, g, or u
uguccauguucnuagcagggcc

SEQ ID NO: 52087 - RNA, 23 nt, Artificial Sequence
  Synthetic
  misc_feature (13)..(13): n is a, c, g, or u
uuguccauguucnuagcagggcc

SEQ ID NO: 52088 - RNA, 21 nt, Artificial Sequence
  Synthetic
agaugcugcacagauuuggcc

SEQ ID NO: 52089 - RNA, 22 nt, Artificial Sequence
  Synthetic
aagaugcugcacagauuuggcc

SEQ ID NO: 52090 - RNA, 23 nt, Artificial Sequence
  Synthetic
caagaugcugcacagauuuggcc

SEQ ID NO: 52091 - RNA, 24 nt, Artificial Sequence
  Synthetic
ucaagaugcugcacagauuuggcc

SEQ ID NO: 52092 - RNA, 18 nt, Artificial Sequence
  Synthetic
aacgccgcagacacaucc

SEQ ID NO: 52093 - RNA, 19 nt, Artificial Sequence
  Synthetic
aaacgccgcagacacaucc

SEQ ID NO: 52094 - RNA, 20 nt, Artificial Sequence
  Synthetic
aaaacgccgcagacacaucc

SEQ ID NO: 52095 - RNA, 21 nt, Artificial Sequence
  Synthetic
uaaaacgccgcagacacaucc

SEQ ID NO: 52096 - RNA, 22 nt, Artificial Sequence
  Synthetic
auaaaacgccgcagacacaucc

SEQ ID NO: 52097 - RNA, 24 nt, Artificial Sequence
  Synthetic
ugauaaaacgccgcagacacaucc

SEQ ID NO: 52098 - RNA, 18 nt, Artificial Sequence
  Synthetic
accgccuguaacacgagc

SEQ ID NO: 52099 - RNA, 19 nt, Artificial Sequence
  Synthetic
caccgccuguaacacgagc

SEQ ID NO: 52100 - RNA, 20 nt, Artificial Sequence
  Synthetic
acaccgccuguaacacgagc

SEQ ID NO: 52101 - RNA, 21 nt, Artificial Sequence
  Synthetic
cacaccgccuguaacacgagc

SEQ ID NO: 52102 - RNA, 22 nt, Artificial Sequence
  Synthetic
acacaccgccuguaacacgagc

SEQ ID NO: 52103 - RNA, 23 nt, Artificial Sequence
  Synthetic
aacacaccgccuguaacacgagc

SEQ ID NO: 52104 - RNA, 24 nt, Artificial Sequence
  Synthetic
aaacacaccgccuguaacacgagc

SEQ ID NO: 52105 - RNA, 21 nt, Artificial Sequence
  Synthetic
aaacauagagguuccuugagc

SEQ ID NO: 52106 - RNA, 18 nt, Artificial Sequence
  Synthetic
ugagaucuucugcgacgc

SEQ ID NO: 52107 - RNA, 19 nt, Artificial Sequence
  Synthetic
uugagaucuucugcgacgc

SEQ ID NO: 52108 - RNA, 20 nt, Artificial Sequence
  Synthetic
auugagaucuucugcgacgc

SEQ ID NO: 52109 - RNA, 21 nt, Artificial Sequence
  Synthetic
augaacaaaagaugauuaggc

SEQ ID NO: 52110 - RNA, 22 nt, Artificial Sequence
  Synthetic
caugaacaaaagaugauuaggc

SEQ ID NO: 52111 - RNA, 23 nt, Artificial Sequence
  Synthetic
acaugaacaaaagaugauuaggc

SEQ ID NO: 52112 - RNA, 18 nt, Artificial Sequence
  Synthetic
caaagguuccacgcaugc

SEQ ID NO: 52113 - RNA, 19 nt, Artificial Sequence
  Synthetic
acaaagguuccacgcaugc

SEQ ID NO: 52114 - RNA, 20 nt, Artificial Sequence
  Synthetic
cacaaagguuccacgcaugc

SEQ ID NO: 52115 - RNA, 21 nt, Artificial Sequence
  Synthetic
  misc_feature (11)..(11): n is a, c, g, or u
ugaagucccanucgggacugc

SEQ ID NO: 52116 - RNA, 22 nt, Artificial Sequence
  Synthetic
  misc_feature (12)..(12): n is a, c, g, or u
uugaagucccanucgggacugc

SEQ ID NO: 52117 - RNA, 24 nt, Artificial Sequence
  Synthetic
  misc_feature (14)..(14): n is a, c, g, or u
uguugaagucccanucgggacugc

SEQ ID NO: 52118 - RNA, 21 nt, Artificial Sequence
  Synthetic
uaaagggacucaagaugcugc

SEQ ID NO: 52119 - RNA, 22 nt, Artificial Sequence
  Synthetic
auaaagggacucaagaugcugc

SEQ ID NO: 52120 - RNA, 23 nt, Artificial Sequence
  Synthetic
uauaaagggacucaagaugcugc

SEQ ID NO: 52121 - RNA, 19 nt, Artificial Sequence
  Synthetic
uggucuccaugcgacgugc

SEQ ID NO: 52122 - RNA, 18 nt, Artificial Sequence
  Synthetic
caccacugaacaaauugc

SEQ ID NO: 52123 - RNA, 20 nt, Artificial Sequence
  Synthetic
cgcaccacugaacaaauugc

SEQ ID NO: 52124 - RNA, 18 nt, Artificial Sequence
  Synthetic
caccacgagucuagacuc

SEQ ID NO: 52125 - RNA, 19 nt, Artificial Sequence
  Synthetic
ccaccacgagucuagacuc

SEQ ID NO: 52126 - RNA, 20 nt, Artificial Sequence
  Synthetic
uccaccacgagucuagacuc

SEQ ID NO: 52127 - RNA, 21 nt, Artificial Sequence
  Synthetic
cauggucccgugcuggugguc

SEQ ID NO: 52128 - RNA, 23 nt, Artificial Sequence
  Synthetic
ugcauggucccgugcuggugguc

SEQ ID NO: 52129 - RNA, 24 nt, Artificial Sequence
  Synthetic
uugcauggucccgugcuggugguc

SEQ ID NO: 52130 - RNA, 21 nt, Artificial Sequence
  Synthetic
  misc_feature (11)..(11): n is a, c, g, or u
agacggggagnccgcguaaag

SEQ ID NO: 52131 - RNA, 22 nt, Artificial Sequence
  Synthetic
  misc_feature (12)..(12): n is a, c, g, or u
cagacggggagnccgcguaaag

SEQ ID NO: 52132 - RNA, 23 nt, Artificial Sequence
  Synthetic
  misc_feature (13)..(13): n is a, c, g, or u
acagacggggagnccgcguaaag

SEQ ID NO: 52133 - RNA, 24 nt, Artificial Sequence
  Synthetic
  misc_feature (14)..(14): n is a, c, g, or u
aacagacggggagnccgcguaaag

SEQ ID NO: 52134 - RNA, 18 nt, Artificial Sequence
  Synthetic
cgacgugcagaggugaag

SEQ ID NO: 52135 - RNA, 20 nt, Artificial Sequence
  Synthetic
ugcgacgugcagaggugaag

SEQ ID NO: 52136 - RNA, 21 nt, Artificial Sequence
  Synthetic
augcgacgugcagaggugaag

SEQ ID NO: 52137 - RNA, 22 nt, Artificial Sequence
  Synthetic
caugcgacgugcagaggugaag

SEQ ID NO: 52138 - RNA, 23 nt, Artificial Sequence
  Synthetic
ccaugcgacgugcagaggugaag

SEQ ID NO: 52139 - RNA, 24 nt, Artificial Sequence
  Synthetic
uccaugcgacgugcagaggugaag

SEQ ID NO: 52140 - RNA, 21 nt, Artificial Sequence
  Synthetic
uugcauggugcuggugaacag

SEQ ID NO: 52141 - RNA, 23 nt, Artificial Sequence
  Synthetic
aguugcauggugcuggugaacag

SEQ ID NO: 52142 - RNA, 24 nt, Artificial Sequence
  Synthetic
aaguugcauggugcuggugaacag

SEQ ID NO: 52143 - RNA, 21 nt, Artificial Sequence
  Synthetic
caagaagaugaggcauagcag

SEQ ID NO: 52144 - RNA, 22 nt, Artificial Sequence
  Synthetic
acaagaagaugaggcauagcag

SEQ ID NO: 52145 - RNA, 23 nt, Artificial Sequence
  Synthetic
aacaagaagaugaggcauagcag

SEQ ID NO: 52146 - RNA, 24 nt, Artificial Sequence
  Synthetic
caacaagaagaugaggcauagcag

SEQ ID NO: 52147 - RNA, 22 nt, Artificial Sequence
  Synthetic
cgccgauugguggaagcaggag

SEQ ID NO: 52148 - RNA, 23 nt, Artificial Sequence
  Synthetic
ccgccgauugguggaagcaggag

SEQ ID NO: 52149 - RNA, 24 nt, Artificial Sequence
  Synthetic
accgccgauugguggaagcaggag

SEQ ID NO: 52150 - RNA, 21 nt, Artificial Sequence
  Synthetic
  misc_feature (4)..(4): n is a, c, g, or u
  misc_feature (7)..(7): n is a, c, g, or u
uggnuuncucccggaccgccg

SEQ ID NO: 52151 - RNA, 22 nt, Artificial Sequence
  Synthetic
  misc_feature (5)..(5): n is a, c, g, or u
  misc_feature (8)..(8): n is a, c, g, or u
uuggnuuncucccggaccgccg

SEQ ID NO: 52152 - RNA, 18 nt, Artificial Sequence
  Synthetic
  misc_feature (15)..(15): n is a, c, g, or u
cgaagugcacacggnccg

SEQ ID NO: 52153 - RNA, 20 nt, Artificial Sequence
  Synthetic
  misc_feature (17)..(17): n is a, c, g, or u
agcgaagugcacacggnccg

SEQ ID NO: 52154 - RNA, 18 nt, Artificial Sequence
  Synthetic
aacaaaggacgucccgcg

SEQ ID NO: 52155 - RNA, 19 nt, Artificial Sequence
  Synthetic
aaacaaaggacgucccgcg

SEQ ID NO: 52156 - RNA, 20 nt, Artificial Sequence
  Synthetic
uaaacaaaggacgucccgcg

SEQ ID NO: 52157 - RNA, 21 nt, Artificial Sequence
  Synthetic
agcuccaaauucuuuauaagg

SEQ ID NO: 52158 - RNA, 22 nt, Artificial Sequence
  Synthetic
aagcuccaaauucuuuauaagg

SEQ ID NO: 52159 - RNA, 24 nt, Artificial Sequence
  Synthetic
agaagcuccaaauucuuuauaagg

SEQ ID NO: 52160 - RNA, 21 nt, Artificial Sequence
  Synthetic
  misc_feature (19)..(19): n is a, c, g, or u
auuugguggucuauaagcngg

SEQ ID NO: 52161 - RNA, 22 nt, Artificial Sequence
  Synthetic
  misc_feature (20)..(20): n is a, c, g, or u
cauuugguggucuauaagcngg

SEQ ID NO: 52162 - RNA, 21 nt, Artificial Sequence
  Synthetic
  misc_feature (14)..(14): n is a, c, g, or u
  misc_feature (20)..(20): n is a, c, g, or u
uuacccucggaucnaacagng

SEQ ID NO: 52163 - RNA, 22 nt, Artificial Sequence
  Synthetic
  misc_feature (15)..(15): n is a, c, g, or u
  misc_feature (21)..(21): n is a, c, g, or u
cuuacccucggaucnaacagng

SEQ ID NO: 52164 - RNA, 23 nt, Artificial Sequence
  Synthetic
  misc_feature (16)..(16): n is a, c, g, or u
  misc_feature (22)..(22): n is a, c, g, or u
ccuuacccucggaucnaacagng

SEQ ID NO: 52165 - RNA, 24 nt, Artificial Sequence
  Synthetic
  misc_feature (17)..(17): n is a, c, g, or u
  misc_feature (23)..(23): n is a, c, g, or u
cccuuacccucggaucnaacagng

SEQ ID NO: 52166 - RNA, 18 nt, Artificial Sequence
  Synthetic
uccacgcaugcgcugaug

SEQ ID NO: 52167 - RNA, 19 nt, Artificial Sequence
  Synthetic
uuccacgcaugcgcugaug

SEQ ID NO: 52168 - RNA, 22 nt, Artificial Sequence
  Synthetic
agguuccacgcaugcgcugaug

SEQ ID NO: 52169 - RNA, 23 nt, Artificial Sequence
  Synthetic
aagguuccacgcaugcgcugaug

SEQ ID NO: 52170 - RNA, 24 nt, Artificial Sequence
  Synthetic
aaagguuccacgcaugcgcugaug

SEQ ID NO: 52171 - RNA, 21 nt, Artificial Sequence
  Synthetic
aaguuggaggacaggagguug

SEQ ID NO: 52172 - RNA, 22 nt, Artificial Sequence
  Synthetic
caaguuggaggacaggagguug

SEQ ID NO: 52173 - RNA, 23 nt, Artificial Sequence
  Synthetic
acaaguuggaggacaggagguug

SEQ ID NO: 52174 - RNA, 22 nt, Artificial Sequence
  Synthetic
agucuuugauguauucuucgau

SEQ ID NO: 52175 - RNA, 23 nt, Artificial Sequence
  Synthetic
cagucuuugauguauucuucgau

SEQ ID NO: 52176 - RNA, 24 nt, Artificial Sequence
  Synthetic
acagucuuugauguauucuucgau

SEQ ID NO: 52177 - RNA, 21 nt, Artificial Sequence
  Synthetic
cagaagcuccaaauucuuuau

SEQ ID NO: 52178 - RNA, 22 nt, Artificial Sequence
  Synthetic
acagaagcuccaaauucuuuau

SEQ ID NO: 52179 - RNA, 23 nt, Artificial Sequence
  Synthetic
cacagaagcuccaaauucuuuau

SEQ ID NO: 52180 - RNA, 24 nt, Artificial Sequence
  Synthetic
ccacagaagcuccaaauucuuuau

SEQ ID NO: 52181 - RNA, 18 nt, Artificial Sequence
  Synthetic
cagcgguauaaagggacu

SEQ ID NO: 52182 - RNA, 19 nt, Artificial Sequence
  Synthetic
acagcgguauaaagggacu

SEQ ID NO: 52183 - RNA, 20 nt, Artificial Sequence
  Synthetic
aacagcgguauaaagggacu

SEQ ID NO: 52184 - RNA, 21 nt, Artificial Sequence
  Synthetic
uaacagcgguauaaagggacu

SEQ ID NO: 52185 - RNA, 24 nt, Artificial Sequence
  Synthetic
ugguaacagcgguauaaagggacu

SEQ ID NO: 52186 - RNA, 21 nt, Artificial Sequence
  Synthetic
agugauuggagguuggggacu

SEQ ID NO: 52187 - RNA, 22 nt, Artificial Sequence
  Synthetic
aagugauuggagguuggggacu

SEQ ID NO: 52188 - RNA, 23 nt, Artificial Sequence
  Synthetic
uaagugauuggagguuggggacu

SEQ ID NO: 52189 - RNA, 18 nt, Artificial Sequence
  Synthetic
aacacgagcagggguccu

SEQ ID NO: 52190 - RNA, 19 nt, Artificial Sequence
  Synthetic
uaacacgagcagggguccu

SEQ ID NO: 52191 - RNA, 21 nt, Artificial Sequence
  Synthetic
uguaacacgagcagggguccu

SEQ ID NO: 52192 - RNA, 22 nt, Artificial Sequence
  Synthetic
cuguaacacgagcagggguccu

SEQ ID NO: 52193 - RNA, 23 nt, Artificial Sequence
  Synthetic
ccuguaacacgagcagggguccu

SEQ ID NO: 52194 - RNA, 21 nt, Artificial Sequence
  Synthetic
  misc_feature (9)..(9): n is a, c, g, or u
  misc_feature (17)..(17): n is a, c, g, or u
auccaggunauugaccnuccu

SEQ ID NO: 52195 - RNA, 23 nt, Artificial Sequence
  Synthetic
  misc_feature (11)..(11): n is a, c, g, or u
  misc_feature (19)..(19): n is a, c, g, or u
cgauccaggunauugaccnuccu

SEQ ID NO: 52196 - RNA, 24 nt, Artificial Sequence
  Synthetic
  misc_feature (12)..(12): n is a, c, g, or u
  misc_feature (20)..(20): n is a, c, g, or u
ucgauccaggunauugaccnuccu

SEQ ID NO: 52197 - RNA, 22 nt, Artificial Sequence
  Synthetic
agguuuugcauggucccgugcu

SEQ ID NO: 52198 - RNA, 23 nt, Artificial Sequence
  Synthetic
cagguuuugcauggucccgugcu

SEQ ID NO: 52199 - RNA, 18 nt, Artificial Sequence
  Synthetic
acaguaguuuccggaagu

SEQ ID NO: 52200 - RNA, 19 nt, Artificial Sequence
  Synthetic
aacaguaguuuccggaagu

SEQ ID NO: 52201 - RNA, 20 nt, Artificial Sequence
  Synthetic
caacaguaguuuccggaagu

SEQ ID NO: 52202 - RNA, 21 nt, Artificial Sequence
  Synthetic
acaacaguaguuuccggaagu

SEQ ID NO: 52203 - RNA, 22 nt, Artificial Sequence
  Synthetic
aacaacaguaguuuccggaagu

SEQ ID NO: 52204 - RNA, 23 nt, Artificial Sequence
  Synthetic
uaacaacaguaguuuccggaagu

SEQ ID NO: 52205 - RNA, 24 nt, Artificial Sequence
  Synthetic
cuaacaacaguaguuuccggaagu

SEQ ID NO: 52206 - RNA, 21 nt, Artificial Sequence
  Synthetic
aauggccaagccccaaccagu

SEQ ID NO: 52207 - RNA, 22 nt, Artificial Sequence
  Synthetic
caauggccaagccccaaccagu

SEQ ID NO: 52208 - RNA, 23 nt, Artificial Sequence
  Synthetic
ccaauggccaagccccaaccagu

SEQ ID NO: 52209 - RNA, 18 nt, Artificial Sequence
  Synthetic
ugcaaggaguuccgcagu

SEQ ID NO: 52210 - RNA, 19 nt, Artificial Sequence
  Synthetic
cugcaaggaguuccgcagu

SEQ ID NO: 52211 - RNA, 21 nt, Artificial Sequence
  Synthetic
agcugcaaggaguuccgcagu

SEQ ID NO: 52212 - RNA, 22 nt, Artificial Sequence
  Synthetic
aagcugcaaggaguuccgcagu

SEQ ID NO: 52213 - RNA, 23 nt, Artificial Sequence
  Synthetic
caagcugcaaggaguuccgcagu

SEQ ID NO: 52214 - RNA, 24 nt, Artificial Sequence
  Synthetic
acaagcugcaaggaguuccgcagu

SEQ ID NO: 52215 - RNA, 21 nt, Artificial Sequence
  Synthetic
  misc_feature (13)..(13): n is a, c, g, or u
uggucuauaagcnggaggagu

SEQ ID NO: 52216 - RNA, 24 nt, Artificial Sequence
  Synthetic
  misc_feature (16)..(16): n is a, c, g, or u
ugguggucuauaagcnggaggagu

SEQ ID NO: 52217 - RNA, 18 nt, Artificial Sequence
  Synthetic
agcagggguccuaggagu

SEQ ID NO: 52218 - RNA, 20 nt, Artificial Sequence
  Synthetic
cgagcagggguccuaggagu

SEQ ID NO: 52219 - RNA, 21 nt, Artificial Sequence
  Synthetic
acgagcagggguccuaggagu

SEQ ID NO: 52220 - RNA, 22 nt, Artificial Sequence
  Synthetic
cacgagcagggguccuaggagu

SEQ ID NO: 52221 - RNA, 23 nt, Artificial Sequence
  Synthetic
acacgagcagggguccuaggagu

SEQ ID NO: 52222 - RNA, 24 nt, Artificial Sequence
  Synthetic
aacacgagcagggguccuaggagu

SEQ ID NO: 52223 - RNA, 18 nt, Artificial Sequence
  Synthetic
caaaaugaggcgcuacgu

SEQ ID NO: 52224 - RNA, 19 nt, Artificial Sequence
  Synthetic
acaaaaugaggcgcuacgu

SEQ ID NO: 52225 - RNA, 20 nt, Artificial Sequence
  Synthetic
cacaaaaugaggcgcuacgu

SEQ ID NO: 52226 - RNA, 22 nt, Artificial Sequence
  Synthetic
ugcagguuuugcauggucccgu

SEQ ID NO: 52227 - RNA, 24 nt, Artificial Sequence
  Synthetic
ugugcagguuuugcauggucccgu

SEQ ID NO: 52228 - RNA, 19 nt, Artificial Sequence
  Synthetic
cguugccgagcaacggggu

SEQ ID NO: 52229 - RNA, 20 nt, Artificial Sequence
  Synthetic
ccguugccgagcaacggggu

SEQ ID NO: 52230 - RNA, 22 nt, Artificial Sequence
  Synthetic
agaggugaaaaaguugcauggu

SEQ ID NO: 52231 - RNA, 23 nt, Artificial Sequence
  Synthetic
cagaggugaaaaaguugcauggu

SEQ ID NO: 52232 - RNA, 22 nt, Artificial Sequence
  Synthetic
agucuagacucugugguauugu

SEQ ID NO: 52233 - RNA, 24 nt, Artificial Sequence
  Synthetic
cgagucuagacucugugguauugu

SEQ ID NO: 52234 - RNA, 18 nt, Artificial Sequence
  Synthetic
aaacgggcaacauaccuu

SEQ ID NO: 52235 - RNA, 19 nt, Artificial Sequence
  Synthetic
caaacgggcaacauaccuu

SEQ ID NO: 52236 - RNA, 20 nt, Artificial Sequence
  Synthetic
acaaacgggcaacauaccuu

SEQ ID NO: 52237 - RNA, 22 nt, Artificial Sequence
  Synthetic
  misc_feature (9)..(9): n is a, c, g, or u
uguggauangauaggggcauuu

SEQ ID NO: 52238 - RNA, 24 nt, Artificial Sequence
  Synthetic
  misc_feature (11)..(11): n is a, c, g, or u
aguguggauangauaggggcauuu

SEQ ID NO: 52239 - RNA, 23 nt, Artificial Sequence
  Synthetic
  misc_feature (12)..(12): n is a, c, g, or u
uggcugcucggnugugcugccaa

SEQ ID NO: 52240 - RNA, 24 nt, Artificial Sequence
  Synthetic
  misc_feature (13)..(13): n is a, c, g, or u
auggcugcucggnugugcugccaa

SEQ ID NO: 52241 - RNA, 18 nt, Artificial Sequence
  Synthetic
accccugcucguguuaca

SEQ ID NO: 52242 - RNA, 21 nt, Artificial Sequence
  Synthetic
aggaccccugcucguguuaca

SEQ ID NO: 52243 - RNA, 22 nt, Artificial Sequence
  Synthetic
uaggaccccugcucguguuaca

SEQ ID NO: 52244 - RNA, 23 nt, Artificial Sequence
  Synthetic
cuaggaccccugcucguguuaca

SEQ ID NO: 52245 - RNA, 24 nt, Artificial Sequence
  Synthetic
ccuaggaccccugcucguguuaca

SEQ ID NO: 52246 - RNA, 21 nt, Artificial Sequence
  Synthetic
  misc_feature (9)..(9): n is a, c, g, or u
acuccuccngcuuauagacca

SEQ ID NO: 52247 - RNA, 22 nt, Artificial Sequence
  Synthetic
  misc_feature (10)..(10): n is a, c, g, or u
cacuccuccngcuuauagacca

SEQ ID NO: 52248 - RNA, 24 nt, Artificial Sequence
  Synthetic
  misc_feature (12)..(12): n is a, c, g, or u
cgcacuccuccngcuuauagacca

SEQ ID NO: 52249 - RNA, 18 nt, Artificial Sequence
  Synthetic
cagcuuguuucgcucgca

SEQ ID NO: 52250 - RNA, 20 nt, Artificial Sequence
  Synthetic
ugcagcuuguuucgcucgca

SEQ ID NO: 52251 - RNA, 21 nt, Artificial Sequence
  Synthetic
uguuaguauuccuuggacuca

SEQ ID NO: 52252 - RNA, 22 nt, Artificial Sequence
  Synthetic
auguuaguauuccuuggacuca

SEQ ID NO: 52253 - RNA, 23 nt, Artificial Sequence
  Synthetic
aauguuaguauuccuuggacuca

SEQ ID NO: 52254 - RNA, 24 nt, Artificial Sequence
  Synthetic
caauguuaguauuccuuggacuca

SEQ ID NO: 52255 - RNA, 23 nt, Artificial Sequence
  Synthetic
  misc_feature (15)..(15): n is a, c, g, or u
  misc_feature (18)..(18): n is a, c, g, or u
cggcgguccgggagnaanccaac

SEQ ID NO: 52256 - RNA, 24 nt, Artificial Sequence
  Synthetic
  misc_feature (16)..(16): n is a, c, g, or u
  misc_feature (19)..(19): n is a, c, g, or u
ucggcgguccgggagnaanccaac

SEQ ID NO: 52257 - RNA, 22 nt, Artificial Sequence
  Synthetic
  misc_feature (19)..(19): n is a, c, g, or u
cgacaccgcuucagcccunuac

SEQ ID NO: 52258 - RNA, 23 nt, Artificial Sequence
  Synthetic
  misc_feature (20)..(20): n is a, c, g, or u
ucgacaccgcuucagcccunuac

SEQ ID NO: 52259 - RNA, 24 nt, Artificial Sequence
  Synthetic
  misc_feature (21)..(21): n is a, c, g, or u
cucgacaccgcuucagcccunuac

SEQ ID NO: 52260 - RNA, 21 nt, Artificial Sequence
  Synthetic
caaaauucgcaguccccaacc

SEQ ID NO: 52261 - RNA, 22 nt, Artificial Sequence
  Synthetic
ccaaaauucgcaguccccaacc

SEQ ID NO: 52262 - RNA, 22 nt, Artificial Sequence
  Synthetic
aguguuugcugacgcaaccccc

SEQ ID NO: 52263 - RNA, 23 nt, Artificial Sequence
  Synthetic
aaguguuugcugacgcaaccccc

SEQ ID NO: 52264 - RNA, 24 nt, Artificial Sequence
  Synthetic
caaguguuugcugacgcaaccccc

SEQ ID NO: 52265 - RNA, 21 nt, Artificial Sequence
  Synthetic
uucaagccuccaagcugugcc

SEQ ID NO: 52266 - RNA, 23 nt, Artificial Sequence
  Synthetic
uguucaagccuccaagcugugcc

SEQ ID NO: 52267 - RNA, 24 nt, Artificial Sequence
  Synthetic
cuguucaagccuccaagcugugcc

SEQ ID NO: 52268 - RNA, 21 nt, Artificial Sequence
  Synthetic
  misc_feature (6)..(6): n is a, c, g, or u
uuguanuaggaggcuguaggc

SEQ ID NO: 52269 - RNA, 22 nt, Artificial Sequence
  Synthetic
  misc_feature (7)..(7): n is a, c, g, or u
uuuguanuaggaggcuguaggc

SEQ ID NO: 52270 - RNA, 23 nt, Artificial Sequence
  Synthetic
  misc_feature (8)..(8): n is a, c, g, or u
cuuuguanuaggaggcuguaggc

SEQ ID NO: 52271 - RNA, 24 nt, Artificial Sequence
  Synthetic
  misc_feature (9)..(9): n is a, c, g, or u
ucuuuguanuaggaggcuguaggc

SEQ ID NO: 52272 - RNA, 21 nt, Artificial Sequence
  Synthetic
cgccuccugcuuccaccaauc

SEQ ID NO: 52273 - RNA, 22 nt, Artificial Sequence
  Synthetic
ccgccuccugcuuccaccaauc

SEQ ID NO: 52274 - RNA, 23 nt, Artificial Sequence
  Synthetic
uccgccuccugcuuccaccaauc

SEQ ID NO: 52275 - RNA, 24 nt, Artificial Sequence
  Synthetic
auccgccuccugcuuccaccaauc

SEQ ID NO: 52276 - RNA, 24 nt, Artificial Sequence
  Synthetic
ugggggccaaaucugugcagcauc

SEQ ID NO: 52277 - RNA, 21 nt, Artificial Sequence
  Synthetic
  misc_feature (4)..(4): n is a, c, g, or u
uganuuaaugacuuuggcuuc

SEQ ID NO: 52278 - RNA, 22 nt, Artificial Sequence
  Synthetic
aguuuacuagugcaauuuguuc

SEQ ID NO: 52279 - RNA, 23 nt, Artificial Sequence
  Synthetic
caguuuacuagugcaauuuguuc

SEQ ID NO: 52280 - RNA, 24 nt, Artificial Sequence
  Synthetic
ucaguuuacuagugcaauuuguuc

SEQ ID NO: 52281 - RNA, 23 nt, Artificial Sequence
  Synthetic
ugggauucuuuccagaccaucag

SEQ ID NO: 52282 - RNA, 24 nt, Artificial Sequence
  Synthetic
cugggauucuuuccagaccaucag

SEQ ID NO: 52283 - RNA, 18 nt, Artificial Sequence
  Synthetic
cuguuguuagacgacgag

SEQ ID NO: 52284 - RNA, 19 nt, Artificial Sequence
  Synthetic
acuguuguuagacgacgag

SEQ ID NO: 52285 - RNA, 20 nt, Artificial Sequence
  Synthetic
uacuguuguuagacgacgag

SEQ ID NO: 52286 - RNA, 21 nt, Artificial Sequence
  Synthetic
cuacuguuguuagacgacgag

SEQ ID NO: 52287 - RNA, 22 nt, Artificial Sequence
  Synthetic
acuacuguuguuagacgacgag

SEQ ID NO: 52288 - RNA, 23 nt, Artificial Sequence
  Synthetic
aacuacuguuguuagacgacgag

SEQ ID NO: 52289 - RNA, 24 nt, Artificial Sequence
  Synthetic
aaacuacuguuguuagacgacgag

SEQ ID NO: 52290 - RNA, 19 nt, Artificial Sequence
  Synthetic
uguuuacgucccgucggcg

SEQ ID NO: 52291 - RNA, 20 nt, Artificial Sequence
  Synthetic
uuguuuacgucccgucggcg

SEQ ID NO: 52292 - RNA, 18 nt, Artificial Sequence
  Synthetic
aacuuguccuggcuaucg

SEQ ID NO: 52293 - RNA, 19 nt, Artificial Sequence
  Synthetic
caacuuguccuggcuaucg

SEQ ID NO: 52294 - RNA, 20 nt, Artificial Sequence
  Synthetic
ccaacuuguccuggcuaucg

SEQ ID NO: 52295 - RNA, 21 nt, Artificial Sequence
  Synthetic
uggaugaucugguauuggggg

SEQ ID NO: 52296 - RNA, 22 nt, Artificial Sequence
  Synthetic
auggaugaucugguauuggggg

SEQ ID NO: 52297 - RNA, 23 nt, Artificial Sequence
  Synthetic
uauggaugaucugguauuggggg

SEQ ID NO: 52298 - RNA, 24 nt, Artificial Sequence
  Synthetic
auauggaugaucugguauuggggg

SEQ ID NO: 52299 - RNA, 21 nt, Artificial Sequence
  Synthetic
caugcaacuuuuucaccucug

SEQ ID NO: 52300 - RNA, 22 nt, Artificial Sequence
  Synthetic
ccaugcaacuuuuucaccucug

SEQ ID NO: 52301 - RNA, 23 nt, Artificial Sequence
  Synthetic
accaugcaacuuuuucaccucug

SEQ ID NO: 52302 - RNA, 24 nt, Artificial Sequence
  Synthetic
caccaugcaacuuuuucaccucug

SEQ ID NO: 52303 - RNA, 21 nt, Artificial Sequence
  Synthetic
augacuuuggcuuccugggug

SEQ ID NO: 52304 - RNA, 22 nt, Artificial Sequence
  Synthetic
aaugacuuuggcuuccugggug

SEQ ID NO: 52305 - RNA, 23 nt, Artificial Sequence
  Synthetic
uaaugacuuuggcuuccugggug

SEQ ID NO: 52306 - RNA, 24 nt, Artificial Sequence
  Synthetic
uuaaugacuuuggcuuccugggug

SEQ ID NO: 52307 - RNA, 21 nt, Artificial Sequence
  Synthetic
ucggcaacggccaggccugug

SEQ ID NO: 52308 - RNA, 22 nt, Artificial Sequence
  Synthetic
cucggcaacggccaggccugug

SEQ ID NO: 52309 - RNA, 24 nt, Artificial Sequence
  Synthetic
ugcucggcaacggccaggccugug

SEQ ID NO: 52310 - RNA, 21 nt, Artificial Sequence
  Synthetic
ucaguuuacuagugcaauuug

SEQ ID NO: 52311 - RNA, 22 nt, Artificial Sequence
  Synthetic
cucaguuuacuagugcaauuug

SEQ ID NO: 52312 - RNA, 21 nt, Artificial Sequence
  Synthetic
  misc_feature (21)..(21): n is a, c, g, or u
cgucugccguuccagccgacn

SEQ ID NO: 52313 - RNA, 22 nt, Artificial Sequence
  Synthetic
  misc_feature (1)..(1): n is a, c, g, or u
  misc_feature (22)..(22): n is a, c, g, or u
ncgucugccguuccagccgacn

SEQ ID NO: 52314 - RNA, 23 nt, Artificial Sequence
  Synthetic
  misc_feature (2)..(2): n is a, c, g, or u
  misc_feature (23)..(23): n is a, c, g, or u
uncgucugccguuccagccgacn

SEQ ID NO: 52315 - RNA, 24 nt, Artificial Sequence
  Synthetic
  misc_feature (3)..(3): n is a, c, g, or u
  misc_feature (24)..(24): n is a, c, g, or u
cuncgucugccguuccagccgacn

SEQ ID NO: 52316 - RNA, 21 nt, Artificial Sequence
  Synthetic
cucaaucuccagcuucccaau

SEQ ID NO: 52317 - RNA, 22 nt, Artificial Sequence
  Synthetic
ucucaaucuccagcuucccaau

SEQ ID NO: 52318 - RNA, 23 nt, Artificial Sequence
  Synthetic
aucucaaucuccagcuucccaau

SEQ ID NO: 52319 - RNA, 18 nt, Artificial Sequence
  Synthetic
cgccgcgucgcagaagau

SEQ ID NO: 52320 - RNA, 19 nt, Artificial Sequence
  Synthetic
ucgccgcgucgcagaagau

SEQ ID NO: 52321 - RNA, 20 nt, Artificial Sequence
  Synthetic
aucgccgcgucgcagaagau

SEQ ID NO: 52322 - RNA, 21 nt, Artificial Sequence
  Synthetic
caauaccacagagucuagacu

SEQ ID NO: 52323 - RNA, 22 nt, Artificial Sequence
  Synthetic
acaauaccacagagucuagacu

SEQ ID NO: 52324 - RNA, 23 nt, Artificial Sequence
  Synthetic
cacaauaccacagagucuagacu

SEQ ID NO: 52325 - RNA, 24 nt, Artificial Sequence
  Synthetic
ucacaauaccacagagucuagacu

SEQ ID NO: 52326 - RNA, 21 nt, Artificial Sequence
  Synthetic
uuucuuguugacaaaaauccu

SEQ ID NO: 52327 - RNA, 23 nt, Artificial Sequence
  Synthetic
uguuucuuguugacaaaaauccu

SEQ ID NO: 52328 - RNA, 24 nt, Artificial Sequence
  Synthetic
agggcuuucccccacugucuggcu

SEQ ID NO: 52329 - RNA, 19 nt, Artificial Sequence
  Synthetic
agacucgugguggacuucu

SEQ ID NO: 52330 - RNA, 20 nt, Artificial Sequence
  Synthetic
uagacucgugguggacuucu

SEQ ID NO: 52331 - RNA, 21 nt, Artificial Sequence
  Synthetic
cuagacucgugguggacuucu

SEQ ID NO: 52332 - RNA, 22 nt, Artificial Sequence
  Synthetic
ucuagacucgugguggacuucu

SEQ ID NO: 52333 - RNA, 24 nt, Artificial Sequence
  Synthetic
agucuagacucgugguggacuucu

SEQ ID NO: 52334 - RNA, 21 nt, Artificial Sequence
  Synthetic
  misc_feature (20)..(20): n is a, c, g, or u
ccucgccucgcagacgaagnu

SEQ ID NO: 52335 - RNA, 22 nt, Artificial Sequence
  Synthetic
  misc_feature (21)..(21): n is a, c, g, or u
cccucgccucgcagacgaagnu

SEQ ID NO: 52336 - RNA, 23 nt, Artificial Sequence
  Synthetic
  misc_feature (22)..(22): n is a, c, g, or u
ucccucgccucgcagacgaagnu

SEQ ID NO: 52337 - RNA, 24 nt, Artificial Sequence
  Synthetic
  misc_feature (23)..(23): n is a, c, g, or u
cucccucgccucgcagacgaagnu

SEQ ID NO: 52338 - RNA, 20 nt, Artificial Sequence
  Synthetic
cggguguccuggccaaaauu

SEQ ID NO: 52339 - RNA, 22 nt, Artificial Sequence
  Synthetic
agaagaucucaaucuccagcuu

SEQ ID NO: 52340 - RNA, 23 nt, Artificial Sequence
  Synthetic
cagaagaucucaaucuccagcuu

SEQ ID NO: 52341 - RNA, 22 nt, Artificial Sequence
  Synthetic
ugcugcuaugccucaucuucuu

SEQ ID NO: 52342 - RNA, 23 nt, Artificial Sequence
  Synthetic
cugcugcuaugccucaucuucuu

SEQ ID NO: 52343 - RNA, 24 nt, Artificial Sequence
  Synthetic
ccugcugcuaugccucaucuucuu

SEQ ID NO: 52344 - RNA, 18 nt, Artificial Sequence
  Synthetic
cacguagcgccucauuuu

SEQ ID NO: 52345 - RNA, 19 nt, Artificial Sequence
  Synthetic
acacguagcgccucauuuu

SEQ ID NO: 52346 - RNA, 20 nt, Artificial Sequence
  Synthetic
cacacguagcgccucauuuu

SEQ ID NO: 52347 - RNA, 21 nt, Artificial Sequence
  Synthetic
ccacacguagcgccucauuuu

SEQ ID NO: 52348 - RNA, 22 nt, Artificial Sequence
  Synthetic
uccacacguagcgccucauuuu

SEQ ID NO: 52349 - RNA, 23 nt, Artificial Sequence
  Synthetic
auccacacguagcgccucauuuu

SEQ ID NO: 52350 - RNA, 24 nt, Artificial Sequence
  Synthetic
aauccacacguagcgccucauuuu

SEQ ID NO: 52351 - RNA, 22 nt, Artificial Sequence
  Synthetic
  misc_feature (8)..(8): n is a, c, g, or u
gaacagunggacaugaacaaaa

SEQ ID NO: 52352 - RNA, 21 nt, Artificial Sequence
  Synthetic
gauacccacagauaacagaaa

SEQ ID NO: 52353 - RNA, 22 nt, Artificial Sequence
  Synthetic
ggauacccacagauaacagaaa

SEQ ID NO: 52354 - RNA, 18 nt, Artificial Sequence
  Synthetic
guccagaagaaccaacaa

SEQ ID NO: 52355 - RNA, 20 nt, Artificial Sequence
  Synthetic
guacuuccuagagaggacaa

SEQ ID NO: 52356 - RNA, 22 nt, Artificial Sequence
  Synthetic
guguacuuccuagagaggacaa

SEQ ID NO: 52357 - RNA, 23 nt, Artificial Sequence
  Synthetic
gguguacuuccuagagaggacaa

SEQ ID NO: 52358 - RNA, 20 nt, Artificial Sequence
  Synthetic
gccuggccguugccgagcaa

SEQ ID NO: 52359 - RNA, 19 nt, Artificial Sequence
  Synthetic
gcagcaggaugaagaggaa

SEQ ID NO: 52360 - RNA, 24 nt, Artificial Sequence
  Synthetic
gcauagcagcaggaugaagaggaa

SEQ ID NO: 52361 - RNA, 20 nt, Artificial Sequence
  Synthetic
  misc_feature (17)..(17): n is a, c, g, or u
guagcucuuguucccangaa

SEQ ID NO: 52362 - RNA, 23 nt, Artificial Sequence
  Synthetic
  misc_feature (20)..(20): n is a, c, g, or u
gcuguagcucuuguucccangaa

SEQ ID NO: 52363 - RNA, 23 nt, Artificial Sequence
  Synthetic
  misc_feature (6)..(6): n is a, c, g, or u
  misc_feature (21)..(21): n is a, c, g, or u
gcacanccgagcagccauggnaa

SEQ ID NO: 52364 - RNA, 23 nt, Artificial Sequence
  Synthetic
  misc_feature (8)..(9): n is a, c, g, or u
  misc_feature (11)..(11): n is a, c, g, or u
  misc_feature (13)..(14): n is a, c, g, or u
gauuaacnncnunnucaggauaa

SEQ ID NO: 52365 - RNA, 21 nt, Artificial Sequence
  Synthetic
  misc_feature (8)..(8): n is a, c, g, or u
  misc_feature (17)..(17): n is a, c, g, or u
gcaaauanugucuggunuuaa

SEQ ID NO: 52366 - RNA, 19 nt, Artificial Sequence
  Synthetic
  misc_feature (8)..(8): n is a, c, g, or u
gaacagunggacaugaaca

SEQ ID NO: 52367 - RNA, 23 nt, Artificial Sequence
  Synthetic
  misc_feature (12)..(12): n is a, c, g, or u
gcuugaacagunggacaugaaca

SEQ ID NO: 52368 - RNA, 24 nt, Artificial Sequence
  Synthetic
  misc_feature (13)..(13): n is a, c, g, or u
ggcuugaacagunggacaugaaca

SEQ ID NO: 52369 - RNA, 18 nt, Artificial Sequence
  Synthetic
ggauacccacagauaaca

SEQ ID NO: 52370 - RNA, 23 nt, Artificial Sequence
  Synthetic
  misc_feature (8)..(8): n is a, c, g, or u
guucccangaauauggugaccca

SEQ ID NO: 52371 - RNA, 18 nt, Artificial Sequence
  Synthetic
gccaauggccaagcccca

SEQ ID NO: 52372 - RNA, 19 nt, Artificial Sequence
  Synthetic
ggccaauggccaagcccca

SEQ ID NO: 52373 - RNA, 22 nt, Artificial Sequence
  Synthetic
gauggccaauggccaagcccca

SEQ ID NO: 52374 - RNA, 18 nt, Artificial Sequence
  Synthetic
ggucuggaaagaauccca

SEQ ID NO: 52375 - RNA, 24 nt, Artificial Sequence
  Synthetic
gaucauccauauaacuaaaagcca

SEQ ID NO: 52376 - RNA, 19 nt, Artificial Sequence
  Synthetic
  misc_feature (3)..(3): n is a, c, g, or u
  misc_feature (9)..(9): n is a, c, g, or u
  misc_feature (12)..(12): n is a, c, g, or u
gcncugaanagnggaucca

SEQ ID NO: 52377 - RNA, 23 nt, Artificial Sequence
  Synthetic
guuucucuuccaaaaguaaggca

SEQ ID NO: 52378 - RNA, 18 nt, Artificial Sequence
  Synthetic
  misc_feature (8)..(8): n is a, c, g, or u
guggauangauaggggca

SEQ ID NO: 52379 - RNA, 20 nt, Artificial Sequence
  Synthetic
  misc_feature (10)..(10): n is a, c, g, or u
guguggauangauaggggca

SEQ ID NO: 52380 - RNA, 23 nt, Artificial Sequence
  Synthetic
  misc_feature (13)..(13): n is a, c, g, or u
gaaguguggauangauaggggca

SEQ ID NO: 52381 - RNA, 24 nt, Artificial Sequence
  Synthetic
  misc_feature (14)..(14): n is a, c, g, or u
ggaaguguggauangauaggggca

SEQ ID NO: 52382 - RNA, 19 nt, Artificial Sequence
  Synthetic
gcgagcgaaacaagcugca

SEQ ID NO: 52383 - RNA, 22 nt, Artificial Sequence
  Synthetic
  misc_feature (2)..(2): n is a, c, g, or u
  misc_feature (11)..(11): n is a, c, g, or u
gnaaaugaaunucaggaaaaga

SEQ ID NO: 52384 - RNA, 18 nt, Artificial Sequence
  Synthetic
gauugaugaugugagaga

SEQ ID NO: 52385 - RNA, 21 nt, Artificial Sequence
  Synthetic
gaagauugaugaugugagaga

SEQ ID NO: 52386 - RNA, 20 nt, Artificial Sequence
  Synthetic
  misc_feature (3)..(3): n is a, c, g, or u
gancuucgucugcgaggcga

SEQ ID NO: 52387 - RNA, 18 nt, Artificial Sequence
  Synthetic
gggcugaagcggugucga

SEQ ID NO: 52388 - RNA, 23 nt, Artificial Sequence
  Synthetic
  misc_feature (11)..(11): n is a, c, g, or u
  misc_feature (16)..(17): n is a, c, g, or u
gaaaauauuunguaannuuagga

SEQ ID NO: 52389 - RNA, 24 nt, Artificial Sequence
  Synthetic
  misc_feature (12)..(12): n is a, c, g, or u
  misc_feature (17)..(18): n is a, c, g, or u
ggaaaauauuunguaannuuagga

SEQ ID NO: 52390 - RNA, 20 nt, Artificial Sequence
  Synthetic
gauccagcugauggucugga

SEQ ID NO: 52391 - RNA, 21 nt, Artificial Sequence
  Synthetic
ggauccagcugauggucugga

SEQ ID NO: 52392 - RNA, 23 nt, Artificial Sequence
  Synthetic
  misc_feature (2)..(2): n is a, c, g, or u
gnggauccagcugauggucugga

SEQ ID NO: 52393 - RNA, 20 nt, Artificial Sequence
  Synthetic
guaguuuccggaagugugga

SEQ ID NO: 52394 - RNA, 24 nt, Artificial Sequence
  Synthetic
  misc_feature (19)..(19): n is a, c, g, or u
guauuuuccuaaagcccangauga

SEQ ID NO: 52395 - RNA, 18 nt, Artificial Sequence
  Synthetic
ggguccuaggaguccuga

SEQ ID NO: 52396 - RNA, 19 nt, Artificial Sequence
  Synthetic
gggguccuaggaguccuga

SEQ ID NO: 52397 - RNA, 22 nt, Artificial Sequence
  Synthetic
gcagggguccuaggaguccuga

SEQ ID NO: 52398 - RNA, 24 nt, Artificial Sequence
  Synthetic
gagcagggguccuaggaguccuga

SEQ ID NO: 52399 - RNA, 20 nt, Artificial Sequence
  Synthetic
  misc_feature (8)..(8): n is a, c, g, or u
  misc_feature (12)..(12): n is a, c, g, or u
gcaucccnguanagggcuga

SEQ ID NO: 52400 - RNA, 19 nt, Artificial Sequence
  Synthetic
gaugauuaggcagagguga

SEQ ID NO: 52401 - RNA, 20 nt, Artificial Sequence
  Synthetic
  misc_feature (13)..(13): n is a, c, g, or u
  misc_feature (19)..(19): n is a, c, g, or u
gcuggaauuugcncugaana

SEQ ID NO: 52402 - RNA, 24 nt, Artificial Sequence
  Synthetic
  misc_feature (17)..(17): n is a, c, g, or u
  misc_feature (23)..(23): n is a, c, g, or u
gacugcuggaauuugcncugaana

SEQ ID NO: 52403 - RNA, 20 nt, Artificial Sequence
  Synthetic
  misc_feature (19)..(19): n is a, c, g, or u
gcagggcccccagucuucna

SEQ ID NO: 52404 - RNA, 21 nt, Artificial Sequence
  Synthetic
gcacagauuuggcccccaaua

SEQ ID NO: 52405 - RNA, 24 nt, Artificial Sequence
  Synthetic
gcugcacagauuuggcccccaaua

SEQ ID NO: 52406 - RNA, 20 nt, Artificial Sequence
  Synthetic
  misc_feature (3)..(3): n is a, c, g, or u
  misc_feature (5)..(5): n is a, c, g, or u
  misc_feature (11)..(11): n is a, c, g, or u
  misc_feature (13)..(13): n is a, c, g, or u
gananaaucungnuggcaua

SEQ ID NO: 52407 - RNA, 21 nt, Artificial Sequence
  Synthetic
  misc_feature (4)..(4): n is a, c, g, or u
  misc_feature (6)..(6): n is a, c, g, or u
  misc_feature (12)..(12): n is a, c, g, or u
  misc_feature (14)..(14): n is a, c, g, or u
ggananaaucungnuggcaua

SEQ ID NO: 52408 - RNA, 19 nt, Artificial Sequence
  Synthetic
guguggauucucucuuaua

SEQ ID NO: 52409 - RNA, 21 nt, Artificial Sequence
  Synthetic
  misc_feature (12)..(13): n is a, c, g, or u
gacacccgggunnucccccua

SEQ ID NO: 52410 - RNA, 22 nt, Artificial Sequence
  Synthetic
  misc_feature (13)..(14): n is a, c, g, or u
ggacacccgggunnucccccua

SEQ ID NO: 52411 - RNA, 18 nt, Artificial Sequence
  Synthetic
gaggacaggagguuggua

SEQ ID NO: 52412 - RNA, 19 nt, Artificial Sequence
  Synthetic
ggaggacaggagguuggua

SEQ ID NO: 52413 - RNA, 22 nt, Artificial Sequence
  Synthetic
guuggaggacaggagguuggua

SEQ ID NO: 52414 - RNA, 24 nt, Artificial Sequence
  Synthetic
  misc_feature (5)..(5): n is a, c, g, or u
gaaunucaggaaaagaaggaguua

SEQ ID NO: 52415 - RNA, 20 nt, Artificial Sequence
  Synthetic
gauaacagaaaauugguaac

SEQ ID NO: 52416 - RNA, 18 nt, Artificial Sequence
  Synthetic
gaauuuuggccaggacac

SEQ ID NO: 52417 - RNA, 20 nt, Artificial Sequence
  Synthetic
gcgaauuuuggccaggacac

SEQ ID NO: 52418 - RNA, 24 nt, Artificial Sequence
  Synthetic
gacugcgaauuuuggccaggacac

SEQ ID NO: 52419 - RNA, 18 nt, Artificial Sequence
  Synthetic
gaucggcagaggagccac

SEQ ID NO: 52420 - RNA, 19 nt, Artificial Sequence
  Synthetic
ggaucggcagaggagccac

SEQ ID NO: 52421 - RNA, 22 nt, Artificial Sequence
  Synthetic
  misc_feature (5)..(5): n is a, c, g, or u
  misc_feature (8)..(8): n is a, c, g, or u
  misc_feature (10)..(11): n is a, c, g, or u
gcaancuncnnggggcguucac

SEQ ID NO: 52422 - RNA, 23 nt, Artificial Sequence
  Synthetic
  misc_feature (6)..(6): n is a, c, g, or u
  misc_feature (9)..(9): n is a, c, g, or u
  misc_feature (11)..(12): n is a, c, g, or u
ggcaancuncnnggggcguucac

SEQ ID NO: 52423 - RNA, 21 nt, Artificial Sequence
  Synthetic
gucucuuagagguggagagac

SEQ ID NO: 52424 - RNA, 23 nt, Artificial Sequence
  Synthetic
gugucucuuagagguggagagac

SEQ ID NO: 52425 - RNA, 18 nt, Artificial Sequence
  Synthetic
gacaaacgggcaacauac

SEQ ID NO: 52426 - RNA, 19 nt, Artificial Sequence
  Synthetic
ggacaaacgggcaacauac

SEQ ID NO: 52427 - RNA, 21 nt, Artificial Sequence
  Synthetic
gaggacaaacgggcaacauac

SEQ ID NO: 52428 - RNA, 19 nt, Artificial Sequence
  Synthetic
  misc_feature (6)..(6): n is a, c, g, or u
  misc_feature (9)..(9): n is a, c, g, or u
guuggnuuncucccggacc

SEQ ID NO: 52429 - RNA, 20 nt, Artificial Sequence
  Synthetic
  misc_feature (7)..(7): n is a, c, g, or u
  misc_feature (10)..(10): n is a, c, g, or u
gguuggnuuncucccggacc

SEQ ID NO: 52430 - RNA, 21 nt, Artificial Sequence
  Synthetic
  misc_feature (8)..(8): n is a, c, g, or u
  misc_feature (11)..(11): n is a, c, g, or u
ggguuggnuuncucccggacc

SEQ ID NO: 52431 - RNA, 22 nt, Artificial Sequence
  Synthetic
  misc_feature (9)..(9): n is a, c, g, or u
  misc_feature (12)..(12): n is a, c, g, or u
gggguuggnuuncucccggacc

SEQ ID NO: 52432 - RNA, 18 nt, Artificial Sequence
  Synthetic
  misc_feature (6)..(6): n is a, c, g, or u
guauunaaauggauaccc

SEQ ID NO: 52433 - RNA, 21 nt, Artificial Sequence
  Synthetic
  misc_feature (3)..(3): n is a, c, g, or u
  misc_feature (9)..(9): n is a, c, g, or u
ganguauunaaauggauaccc

SEQ ID NO: 52434 - RNA, 18 nt, Artificial Sequence
  Synthetic
gggcugaggcccacuccc

SEQ ID NO: 52435 - RNA, 18 nt, Artificial Sequence
  Synthetic
gcuguagcucuuguuccc

SEQ ID NO: 52436 - RNA, 20 nt, Artificial Sequence
  Synthetic
gaugcugcacagauuuggcc

SEQ ID NO: 52437 - RNA, 20 nt, Artificial Sequence
  Synthetic
  misc_feature (3)..(3): n is a, c, g, or u
  misc_feature (18)..(18): n is a, c, g, or u
gcngcaaagcccaaaagncc

SEQ ID NO: 52438 - RNA, 22 nt, Artificial Sequence
  Synthetic
  misc_feature (2)..(2): n is a, c, g, or u
  misc_feature (5)..(5): n is a, c, g, or u
  misc_feature (20)..(20): n is a, c, g, or u
gngcngcaaagcccaaaagncc

SEQ ID NO: 52439 - RNA, 23 nt, Artificial Sequence
  Synthetic
  misc_feature (3)..(3): n is a, c, g, or u
  misc_feature (6)..(6): n is a, c, g, or u
  misc_feature (21)..(21): n is a, c, g, or u
ggngcngcaaagcccaaaagncc

SEQ ID NO: 52440 - RNA, 23 nt, Artificial Sequence
  Synthetic
  misc_feature (3)..(3): n is a, c, g, or u
  misc_feature (11)..(11): n is a, c, g, or u
gunauugaccnuccugaaagucc

SEQ ID NO: 52441 - RNA, 24 nt, Artificial Sequence
  Synthetic
  misc_feature (4)..(4): n is a, c, g, or u
  misc_feature (12)..(12): n is a, c, g, or u
ggunauugaccnuccugaaagucc

SEQ ID NO: 52442 - RNA, 23 nt, Artificial Sequence
  Synthetic
  misc_feature (8)..(8): n is a, c, g, or u
gaauacangugcaguuuccgucc

SEQ ID NO: 52443 - RNA, 24 nt, Artificial Sequence
  Synthetic
  misc_feature (9)..(9): n is a, c, g, or u
ggaauacangugcaguuuccgucc

SEQ ID NO: 52444 - RNA, 20 nt, Artificial Sequence
  Synthetic
gucuaacaacaguaguuucc

SEQ ID NO: 52445 - RNA, 21 nt, Artificial Sequence
  Synthetic
gauugaugaugugagagaggc

SEQ ID NO: 52446 - RNA, 24 nt, Artificial Sequence
  Synthetic
gaagauugaugaugugagagaggc

SEQ ID NO: 52447 - RNA, 19 nt, Artificial Sequence
  Synthetic
gaacaaaagaugauuaggc

SEQ ID NO: 52448 - RNA, 20 nt, Artificial Sequence
  Synthetic
  misc_feature (10)..(10): n is a, c, g, or u
gaagucccanucgggacugc

SEQ ID NO: 52449 - RNA, 18 nt, Artificial Sequence
  Synthetic
  misc_feature (4)..(4): n is a, c, g, or u
gucnuuaaauacacaguc

SEQ ID NO: 52450 - RNA, 18 nt, Artificial Sequence
  Synthetic
ggucccgugcuggugguc

SEQ ID NO: 52451 - RNA, 21 nt, Artificial Sequence
  Synthetic
gaaacaagcugcaaggaguuc

SEQ ID NO: 52452 - RNA, 23 nt, Artificial Sequence
  Synthetic
gcgaaacaagcugcaaggaguuc

SEQ ID NO: 52453 - RNA, 20 nt, Artificial Sequence
  Synthetic
  misc_feature (10)..(10): n is a, c, g, or u
gacggggagnccgcguaaag

SEQ ID NO: 52454 - RNA, 19 nt, Artificial Sequence
  Synthetic
  misc_feature (14)..(14): n is a, c, g, or u
gcccccagucuucnagaag

SEQ ID NO: 52455 - RNA, 20 nt, Artificial Sequence
  Synthetic
  misc_feature (15)..(15): n is a, c, g, or u
ggcccccagucuucnagaag

SEQ ID NO: 52456 - RNA, 21 nt, Artificial Sequence
  Synthetic
  misc_feature (16)..(16): n is a, c, g, or u
gggcccccagucuucnagaag

SEQ ID NO: 52457 - RNA, 24 nt, Artificial Sequence
  Synthetic
  misc_feature (19)..(19): n is a, c, g, or u
gcagggcccccagucuucnagaag

SEQ ID NO: 52458 - RNA, 19 nt, Artificial Sequence
  Synthetic
gcauggugcuggugaacag

SEQ ID NO: 52459 - RNA, 23 nt, Artificial Sequence
  Synthetic
  misc_feature (10)..(10): n is a, c, g, or u
  misc_feature (19)..(19): n is a, c, g, or u
gaaucccagnggauugggnacag

SEQ ID NO: 52460 - RNA, 19 nt, Artificial Sequence
  Synthetic
gaacuggagccaccagcag

SEQ ID NO: 52461 - RNA, 18 nt, Artificial Sequence
  Synthetic
gaagaugaggcauagcag

SEQ ID NO: 52462 - RNA, 18 nt, Artificial Sequence
  Synthetic
  misc_feature (8)..(9): n is a, c, g, or u
  misc_feature (11)..(11): n is a, c, g, or u
  misc_feature (13)..(14): n is a, c, g, or u
gauuaacnncnunnucag

SEQ ID NO: 52463 - RNA, 22 nt, Artificial Sequence
  Synthetic
  misc_feature (4)..(4): n is a, c, g, or u
gaanucagaaggcaaaaaagag

SEQ ID NO: 52464 - RNA, 21 nt, Artificial Sequence
  Synthetic
gcauagcagcaggaugaagag

SEQ ID NO: 52465 - RNA, 22 nt, Artificial Sequence
  Synthetic
ggcauagcagcaggaugaagag

SEQ ID NO: 52466 - RNA, 24 nt, Artificial Sequence
  Synthetic
gaggcauagcagcaggaugaagag

SEQ ID NO: 52467 - RNA, 19 nt, Artificial Sequence
  Synthetic
  misc_feature (2)..(2): n is a, c, g, or u
gnauacagaggcaugagag

SEQ ID NO: 52468 - RNA, 20 nt, Artificial Sequence
  Synthetic
  misc_feature (3)..(3): n is a, c, g, or u
ggnauacagaggcaugagag

SEQ ID NO: 52469 - RNA, 20 nt, Artificial Sequence
  Synthetic
gacaaguuggaggacaggag

SEQ ID NO: 52470 - RNA, 21 nt, Artificial Sequence
  Synthetic
ggacaaguuggaggacaggag

SEQ ID NO: 52471 - RNA, 18 nt, Artificial Sequence
  Synthetic
gauugguggaagcaggag

SEQ ID NO: 52472 - RNA, 18 nt, Artificial Sequence
  Synthetic
gagaggcaauagucggag

SEQ ID NO: 52473 - RNA, 20 nt, Artificial Sequence
  Synthetic
gagagaggcaauagucggag

SEQ ID NO: 52474 - RNA, 22 nt, Artificial Sequence
  Synthetic
gugagagaggcaauagucggag

SEQ ID NO: 52475 - RNA, 22 nt, Artificial Sequence
  Synthetic
  misc_feature (3)..(4): n is a, c, g, or u
gunnucccccuagaaaauugag

SEQ ID NO: 52476 - RNA, 23 nt, Artificial Sequence
  Synthetic
  misc_feature (4)..(5): n is a, c, g, or u
ggunnucccccuagaaaauugag

SEQ ID NO: 52477 - RNA, 24 nt, Artificial Sequence
  Synthetic
  misc_feature (5)..(6): n is a, c, g, or u
gggunnucccccuagaaaauugag

SEQ ID NO: 52478 - RNA, 21 nt, Artificial Sequence
  Synthetic
  misc_feature (8)..(8): n is a, c, g, or u
  misc_feature (11)..(11): n is a, c, g, or u
  misc_feature (14)..(14): n is a, c, g, or u
  misc_feature (19)..(19): n is a, c, g, or u
guuuaaunccnuunuccanag

SEQ ID NO: 52479 - RNA, 22 nt, Artificial Sequence
  Synthetic
  misc_feature (9)..(9): n is a, c, g, or u
  misc_feature (12)..(12): n is a, c, g, or u
  misc_feature (15)..(15): n is a, c, g, or u
  misc_feature (20)..(20): n is a, c, g, or u
gguuuaaunccnuunuccanag

SEQ ID NO: 52480 - RNA, 19 nt, Artificial Sequence
  Synthetic
  misc_feature (2)..(2): n is a, c, g, or u
  misc_feature (5)..(5): n is a, c, g, or u
gnuuncucccggaccgccg

SEQ ID NO: 52481 - RNA, 20 nt, Artificial Sequence
  Synthetic
  misc_feature (3)..(3): n is a, c, g, or u
  misc_feature (6)..(6): n is a, c, g, or u
ggnuuncucccggaccgccg

SEQ ID NO: 52482 - RNA, 22 nt, Artificial Sequence
  Synthetic
  misc_feature (19)..(19): n is a, c, g, or u
gaagcgaagugcacacggnccg

SEQ ID NO: 52483 - RNA, 24 nt, Artificial Sequence
  Synthetic
  misc_feature (21)..(21): n is a, c, g, or u
gugaagcgaagugcacacggnccg

SEQ ID NO: 52484 - RNA, 21 nt, Artificial Sequence
  Synthetic
  misc_feature (2)..(2): n is a, c, g, or u
  misc_feature (8)..(8): n is a, c, g, or u
  misc_feature (14)..(14): n is a, c, g, or u
gnccccgngagggnucguccg

SEQ ID NO: 52485 - RNA, 23 nt, Artificial Sequence
  Synthetic
  misc_feature (4)..(4): n is a, c, g, or u
  misc_feature (10)..(10): n is a, c, g, or u
  misc_feature (16)..(16): n is a, c, g, or u
gcgnccccgngagggnucguccg

SEQ ID NO: 52486 - RNA, 20 nt, Artificial Sequence
  Synthetic
gcuccaaauucuuuauaagg

SEQ ID NO: 52487 - RNA, 22 nt, Artificial Sequence
  Synthetic
  misc_feature (11)..(11): n is a, c, g, or u
gacacauccancgauagccagg

SEQ ID NO: 52488 - RNA, 18 nt, Artificial Sequence
  Synthetic
  misc_feature (3)..(3): n is a, c, g, or u
  misc_feature (10)..(10): n is a, c, g, or u
  misc_feature (15)..(15): n is a, c, g, or u
gunaggauunaaagnagg

SEQ ID NO: 52489 - RNA, 19 nt, Artificial Sequence
  Synthetic
  misc_feature (18)..(18): n is a, c, g, or u
gaugggaugggaauacang

SEQ ID NO: 52490 - RNA, 22 nt, Artificial Sequence
  Synthetic
  misc_feature (21)..(21): n is a, c, g, or u
gaugaugggaugggaauacang

SEQ ID NO: 52491 - RNA, 18 nt, Artificial Sequence
  Synthetic
  misc_feature (11)..(11): n is a, c, g, or u
  misc_feature (14)..(14): n is a, c, g, or u
  misc_feature (17)..(17): n is a, c, g, or u
gagcgguaugnuunggng

SEQ ID NO: 52492 - RNA, 20 nt, Artificial Sequence
  Synthetic
  misc_feature (13)..(13): n is a, c, g, or u
  misc_feature (16)..(16): n is a, c, g, or u
  misc_feature (19)..(19): n is a, c, g, or u
gagagcgguaugnuunggng

SEQ ID NO: 52493 - RNA, 24 nt, Artificial Sequence
  Synthetic
  misc_feature (17)..(17): n is a, c, g, or u
  misc_feature (20)..(20): n is a, c, g, or u
  misc_feature (23)..(23): n is a, c, g, or u
gccugagagcgguaugnuunggng

SEQ ID NO: 52494 - RNA, 21 nt, Artificial Sequence
  Synthetic
  misc_feature (14)..(14): n is a, c, g, or u
  misc_feature (20)..(20): n is a, c, g, or u
gacaaacuuuccanucaaung

SEQ ID NO: 52495 - RNA, 24 nt, Artificial Sequence
  Synthetic
  misc_feature (17)..(17): n is a, c, g, or u
  misc_feature (23)..(23): n is a, c, g, or u
guugacaaacuuuccanucaaung

SEQ ID NO: 52496 - RNA, 19 nt, Artificial Sequence
  Synthetic
  misc_feature (4)..(4): n is a, c, g, or u
guanagggcugaagcggug

SEQ ID NO: 52497 - RNA, 18 nt, Artificial Sequence
  Synthetic
gcacagcuuggaggcuug

SEQ ID NO: 52498 - RNA, 19 nt, Artificial Sequence
  Synthetic
ggcacagcuuggaggcuug

SEQ ID NO: 52499 - RNA, 18 nt, Artificial Sequence
  Synthetic
gcagaggugaaaaaguug

SEQ ID NO: 52500 - RNA, 19 nt, Artificial Sequence
  Synthetic
ggcagaggugaaaaaguug

SEQ ID NO: 52501 - RNA, 24 nt, Artificial Sequence
  Synthetic
gauuaggcagaggugaaaaaguug

SEQ ID NO: 52502 - RNA, 19 nt, Artificial Sequence
  Synthetic
guuggaggacaggagguug

SEQ ID NO: 52503 - RNA, 18 nt, Artificial Sequence
  Synthetic
  misc_feature (12)..(13): n is a, c, g, or u
  misc_feature (15)..(15): n is a, c, g, or u
gugaaaccacannanuug

SEQ ID NO: 52504 - RNA, 23 nt, Artificial Sequence
  Synthetic
  misc_feature (17)..(18): n is a, c, g, or u
  misc_feature (20)..(20): n is a, c, g, or u
gaaaugugaaaccacannanuug

SEQ ID NO: 52505 - RNA, 24 nt, Artificial Sequence
  Synthetic
  misc_feature (18)..(19): n is a, c, g, or u
  misc_feature (21)..(21): n is a, c, g, or u
ggaaaugugaaaccacannanuug

SEQ ID NO: 52506 - RNA, 21 nt, Artificial Sequence
  Synthetic
gcaagaguugugcagguuuug

SEQ ID NO: 52507 - RNA, 23 nt, Artificial Sequence
  Synthetic
gagcaagaguugugcagguuuug

SEQ ID NO: 52508 - RNA, 19 nt, Artificial Sequence
  Synthetic
  misc_feature (19)..(19): n is a, c, g, or u
guauuuuccuaaagcccan

SEQ ID NO: 52509 - RNA, 20 nt, Artificial Sequence
  Synthetic
  misc_feature (20)..(20): n is a, c, g, or u
gguauuuuccuaaagcccan

SEQ ID NO: 52510 - RNA, 19 nt, Artificial Sequence
  Synthetic
  misc_feature (9)..(10): n is a, c, g, or u
  misc_feature (19)..(19): n is a, c, g, or u
gccccuucnngucguugan

SEQ ID NO: 52511 - RNA, 24 nt, Artificial Sequence
  Synthetic
  misc_feature (8)..(8): n is a, c, g, or u
  misc_feature (17)..(17): n is a, c, g, or u
gcaaauanugucuggunuuaaaau

SEQ ID NO: 52512 - RNA, 18 nt, Artificial Sequence
  Synthetic
  misc_feature (4)..(4): n is a, c, g, or u
  misc_feature (7)..(7): n is a, c, g, or u
gcancangagggaaacau

SEQ ID NO: 52513 - RNA, 23 nt, Artificial Sequence
  Synthetic
  misc_feature (9)..(9): n is a, c, g, or u
  misc_feature (12)..(12): n is a, c, g, or u
gaacagcancangagggaaacau

SEQ ID NO: 52514 - RNA, 24 nt, Artificial Sequence
  Synthetic
  misc_feature (10)..(10): n is a, c, g, or u
  misc_feature (13)..(13): n is a, c, g, or u
ggaacagcancangagggaaacau

SEQ ID NO: 52515 - RNA, 19 nt, Artificial Sequence
  Synthetic
  misc_feature (8)..(8): n is a, c, g, or u
  misc_feature (13)..(13): n is a, c, g, or u
gucuaaunuuuangcccau

SEQ ID NO: 52516 - RNA, 19 nt, Artificial Sequence
  Synthetic
gaagcuccaaauucuuuau

SEQ ID NO: 52517 - RNA, 19 nt, Artificial Sequence
  Synthetic
  misc_feature (2)..(2): n is a, c, g, or u
  misc_feature (10)..(10): n is a, c, g, or u
gngguaaugnuccccaacu

SEQ ID NO: 52518 - RNA, 18 nt, Artificial Sequence
  Synthetic
gauuggagguuggggacu

SEQ ID NO: 52519 - RNA, 20 nt, Artificial Sequence
  Synthetic
gugauuggagguuggggacu

SEQ ID NO: 52520 - RNA, 19 nt, Artificial Sequence
  Synthetic
  misc_feature (4)..(4): n is a, c, g, or u
gagnaauuccacagaagcu

SEQ ID NO: 52521 - RNA, 21 nt, Artificial Sequence
  Synthetic
  misc_feature (6)..(6): n is a, c, g, or u
gagagnaauuccacagaagcu

SEQ ID NO: 52522 - RNA, 21 nt, Artificial Sequence
  Synthetic
gaauacuaacauugggaagcu

SEQ ID NO: 52523 - RNA, 22 nt, Artificial Sequence
  Synthetic
ggaauacuaacauugggaagcu

SEQ ID NO: 52524 - RNA, 22 nt, Artificial Sequence
  Synthetic
  misc_feature (3)..(3): n is a, c, g, or u
  misc_feature (9)..(9): n is a, c, g, or u
  misc_feature (12)..(12): n is a, c, g, or u
gcncugaanagnggauccagcu

SEQ ID NO: 52525 - RNA, 20 nt, Artificial Sequence
  Synthetic
guuuugcauggucccgugcu

SEQ ID NO: 52526 - RNA, 22 nt, Artificial Sequence
  Synthetic
  misc_feature (3)..(3): n is a, c, g, or u
  misc_feature (7)..(7): n is a, c, g, or u
  misc_feature (16)..(16): n is a, c, g, or u
ganuuunuguacaaunugaucu

SEQ ID NO: 52527 - RNA, 18 nt, Artificial Sequence
  Synthetic
ggccaagccccaaccagu

SEQ ID NO: 52528 - RNA, 21 nt, Artificial Sequence
  Synthetic
gaaaagaaggaguuaaccagu

SEQ ID NO: 52529 - RNA, 22 nt, Artificial Sequence
  Synthetic
ggaaaagaaggaguuaaccagu

SEQ ID NO: 52530 - RNA, 19 nt, Artificial Sequence
  Synthetic
  misc_feature (11)..(11): n is a, c, g, or u
gucuauaagcnggaggagu

SEQ ID NO: 52531 - RNA, 20 nt, Artificial Sequence
  Synthetic
  misc_feature (12)..(12): n is a, c, g, or u
ggucuauaagcnggaggagu

SEQ ID NO: 52532 - RNA, 18 nt, Artificial Sequence
  Synthetic
gguuuugcauggucccgu

SEQ ID NO: 52533 - RNA, 18 nt, Artificial Sequence
  Synthetic
gugaaaaaguugcauggu

SEQ ID NO: 52534 - RNA, 19 nt, Artificial Sequence
  Synthetic
ggugaaaaaguugcauggu

SEQ ID NO: 52535 - RNA, 18 nt, Artificial Sequence
  Synthetic
  misc_feature (16)..(16): n is a, c, g, or u
gacaacagaguugucngu

SEQ ID NO: 52536 - RNA, 19 nt, Artificial Sequence
  Synthetic
  misc_feature (17)..(17): n is a, c, g, or u
ggacaacagaguugucngu

SEQ ID NO: 52537 - RNA, 21 nt, Artificial Sequence
  Synthetic
  misc_feature (19)..(19): n is a, c, g, or u
gaggacaacagaguugucngu

SEQ ID NO: 52538 - RNA, 23 nt, Artificial Sequence
  Synthetic
  misc_feature (21)..(21): n is a, c, g, or u
gagaggacaacagaguugucngu

SEQ ID NO: 52539 - RNA, 21 nt, Artificial Sequence
  Synthetic
  misc_feature (6)..(6): n is a, c, g, or u
  misc_feature (9)..(9): n is a, c, g, or u
  misc_feature (12)..(12): n is a, c, g, or u
guaugnuunggngugcaaugu

SEQ ID NO: 52540 - RNA, 22 nt, Artificial Sequence
  Synthetic
  misc_feature (7)..(7): n is a, c, g, or u
  misc_feature (10)..(10): n is a, c, g, or u
  misc_feature (13)..(13): n is a, c, g, or u
gguaugnuunggngugcaaugu

SEQ ID NO: 52541 - RNA, 24 nt, Artificial Sequence
  Synthetic
  misc_feature (9)..(9): n is a, c, g, or u
  misc_feature (12)..(12): n is a, c, g, or u
  misc_feature (15)..(15): n is a, c, g, or u
gcgguaugnuunggngugcaaugu

SEQ ID NO: 52542 - RNA, 21 nt, Artificial Sequence
  Synthetic
  misc_feature (6)..(6): n is a, c, g, or u
  misc_feature (18)..(18): n is a, c, g, or u
gccaanuguccuuguuunugu

SEQ ID NO: 52543 - RNA, 22 nt, Artificial Sequence
  Synthetic
  misc_feature (7)..(7): n is a, c, g, or u
  misc_feature (19)..(19): n is a, c, g, or u
ggccaanuguccuuguuunugu

SEQ ID NO: 52544 - RNA, 20 nt, Artificial Sequence
  Synthetic
guuccuugagcaagaguugu

SEQ ID NO: 52545 - RNA, 21 nt, Artificial Sequence
  Synthetic
gguuccuugagcaagaguugu

SEQ ID NO: 52546 - RNA, 23 nt, Artificial Sequence
  Synthetic
gagguuccuugagcaagaguugu

SEQ ID NO: 52547 - RNA, 21 nt, Artificial Sequence
  Synthetic
  misc_feature (11)..(13): n is a, c, g, or u
  misc_feature (19)..(20): n is a, c, g, or u
guucacauuunnnuaucannu

SEQ ID NO: 52548 - RNA, 18 nt, Artificial Sequence
  Synthetic
  misc_feature (8)..(8): n is a, c, g, or u
  misc_feature (17)..(17): n is a, c, g, or u
gcaaauanugucuggunu

SEQ ID NO: 52549 - RNA, 22 nt, Artificial Sequence
  Synthetic
  misc_feature (12)..(12): n is a, c, g, or u
  misc_feature (21)..(21): n is a, c, g, or u
guaugcaaauanugucuggunu

SEQ ID NO: 52550 - RNA, 22 nt, Artificial Sequence
  Synthetic
  misc_feature (14)..(14): n is a, c, g, or u
gcccccagucuucnagaagauu

SEQ ID NO: 52551 - RNA, 23 nt, Artificial Sequence
  Synthetic
  misc_feature (15)..(15): n is a, c, g, or u
ggcccccagucuucnagaagauu

SEQ ID NO: 52552 - RNA, 24 nt, Artificial Sequence
  Synthetic
  misc_feature (16)..(16): n is a, c, g, or u
gggcccccagucuucnagaagauu

SEQ ID NO: 52553 - RNA, 18 nt, Artificial Sequence
  Synthetic
ggagguugguaagugauu

SEQ ID NO: 52554 - RNA, 22 nt, Artificial Sequence
  Synthetic
gacaggagguugguaagugauu

SEQ ID NO: 52555 - RNA, 23 nt, Artificial Sequence
  Synthetic
ggacaggagguugguaagugauu

SEQ ID NO: 52556 - RNA, 22 nt, Artificial Sequence
  Synthetic
  misc_feature (2)..(2): n is a, c, g, or u
  misc_feature (11)..(11): n is a, c, g, or u
gncccguaaanuuucccaccuu

SEQ ID NO: 52557 - RNA, 24 nt, Artificial Sequence
  Synthetic
  misc_feature (4)..(4): n is a, c, g, or u
  misc_feature (13)..(13): n is a, c, g, or u
gagncccguaaanuuucccaccuu

SEQ ID NO: 52558 - RNA, 21 nt, Artificial Sequence
  Synthetic
gacaaacgggcaacauaccuu

SEQ ID NO: 52559 - RNA, 22 nt, Artificial Sequence
  Synthetic
ggacaaacgggcaacauaccuu

SEQ ID NO: 52560 - RNA, 24 nt, Artificial Sequence
  Synthetic
gaggacaaacgggcaacauaccuu

SEQ ID NO: 52561 - RNA, 19 nt, Artificial Sequence
  Synthetic
  misc_feature (4)..(4): n is a, c, g, or u
  misc_feature (8)..(8): n is a, c, g, or u
guunacanagaaaggccuu

SEQ ID NO: 52562 - RNA, 24 nt, Artificial Sequence
  Synthetic
  misc_feature (4)..(4): n is a, c, g, or u
  misc_feature (9)..(9): n is a, c, g, or u
  misc_feature (13)..(13): n is a, c, g, or u
guanuguunacanagaaaggccuu

SEQ ID NO: 52563 - RNA, 20 nt, Artificial Sequence
  Synthetic
  misc_feature (7)..(8): n is a, c, g, or u
  misc_feature (14)..(14): n is a, c, g, or u
  misc_feature (17)..(17): n is a, c, g, or u
gcauaannaauuunaancuu

SEQ ID NO: 52564 - RNA, 21 nt, Artificial Sequence
  Synthetic
  misc_feature (8)..(9): n is a, c, g, or u
  misc_feature (15)..(15): n is a, c, g, or u
  misc_feature (18)..(18): n is a, c, g, or u
ggcauaannaauuunaancuu

SEQ ID NO: 52565 - RNA, 24 nt, Artificial Sequence
  Synthetic
  misc_feature (2)..(2): n is a, c, g, or u
  misc_feature (11)..(12): n is a, c, g, or u
  misc_feature (18)..(18): n is a, c, g, or u
  misc_feature (21)..(21): n is a, c, g, or u
gnuggcauaannaauuunaancuu

SEQ ID NO: 52566 - RNA, 21 nt, Artificial Sequence
  Synthetic
  misc_feature (12)..(12): n is a, c, g, or u
gccuguggaugngugucucuu

SEQ ID NO: 52567 - RNA, 19 nt, Artificial Sequence
  Synthetic
  misc_feature (5)..(5): n is a, c, g, or u
  misc_feature (8)..(8): n is a, c, g, or u
  misc_feature (10)..(11): n is a, c, g, or u
gcaancuncnnggggcguu

SEQ ID NO: 52568 - RNA, 20 nt, Artificial Sequence
  Synthetic
  misc_feature (6)..(6): n is a, c, g, or u
  misc_feature (9)..(9): n is a, c, g, or u
  misc_feature (11)..(12): n is a, c, g, or u
ggcaancuncnnggggcguu

SEQ ID NO: 52569 - RNA, 23 nt, Artificial Sequence
  Synthetic
  misc_feature (9)..(9): n is a, c, g, or u
  misc_feature (12)..(12): n is a, c, g, or u
  misc_feature (14)..(15): n is a, c, g, or u
guuggcaancuncnnggggcguu

SEQ ID NO: 52570 - RNA, 18 nt, Artificial Sequence
  Synthetic
  misc_feature (5)..(5): n is a, c, g, or u
gauangauaggggcauuu

SEQ ID NO: 52571 - RNA, 19 nt, Artificial Sequence
  Synthetic
  misc_feature (6)..(6): n is a, c, g, or u
ggauangauaggggcauuu

SEQ ID NO: 52572 - RNA, 20 nt, Artificial Sequence
  Synthetic
gaaaagacaaaagccuguuu

SEQ ID NO: 52573 - RNA, 22 nt, Artificial Sequence
  Synthetic
gcgaaaagacaaaagccuguuu

SEQ ID NO: 52574 - RNA, 23 nt, Artificial Sequence
  Synthetic
ggcgaaaagacaaaagccuguuu

SEQ ID NO: 52575 - RNA, 19 nt, Artificial Sequence
  Synthetic
  misc_feature (9)..(9): n is a, c, g, or u
  misc_feature (12)..(12): n is a, c, g, or u
  misc_feature (15)..(15): n is a, c, g, or u
guaggcccncunacnaaaa

SEQ ID NO: 52576 - RNA, 20 nt, Artificial Sequence
  Synthetic
  misc_feature (5)..(5): n is a, c, g, or u
gacanuuggccaauggcaaa

SEQ ID NO: 52577 - RNA, 21 nt, Artificial Sequence
  Synthetic
  misc_feature (6)..(6): n is a, c, g, or u
ggacanuuggccaauggcaaa

SEQ ID NO: 52578 - RNA, 18 nt, Artificial Sequence
  Synthetic
  misc_feature (7)..(7): n is a, c, g, or u
gcucggnugugcugccaa

SEQ ID NO: 52579 - RNA, 18 nt, Artificial Sequence
  Synthetic
  misc_feature (3)..(3): n is a, c, g, or u
  misc_feature (6)..(6): n is a, c, g, or u
  misc_feature (9)..(9): n is a, c, g, or u
  misc_feature (12)..(12): n is a, c, g, or u
  misc_feature (15)..(15): n is a, c, g, or u
gcngcnccnuunacncaa

SEQ ID NO: 52580 - RNA, 23 nt, Artificial Sequence
  Synthetic
  misc_feature (8)..(8): n is a, c, g, or u
  misc_feature (11)..(11): n is a, c, g, or u
  misc_feature (14)..(14): n is a, c, g, or u
  misc_feature (17)..(17): n is a, c, g, or u
  misc_feature (20)..(20): n is a, c, g, or u
gcuuugcngcnccnuunacncaa

SEQ ID NO: 52581 - RNA, 24 nt, Artificial Sequence
  Synthetic
  misc_feature (9)..(9): n is a, c, g, or u
  misc_feature (12)..(12): n is a, c, g, or u
  misc_feature (15)..(15): n is a, c, g, or u
  misc_feature (18)..(18): n is a, c, g, or u
  misc_feature (21)..(21): n is a, c, g, or u
ggcuuugcngcnccnuunacncaa

SEQ ID NO: 52582 - RNA, 23 nt, Artificial Sequence
  Synthetic
  misc_feature (4)..(4): n is a, c, g, or u
guanuaggaggcuguaggcauaa

SEQ ID NO: 52583 - RNA, 22 nt, Artificial Sequence
  Synthetic
gacaaaaauccucacaauacca

SEQ ID NO: 52584 - RNA, 20 nt, Artificial Sequence
  Synthetic
  misc_feature (5)..(5): n is a, c, g, or u
guccnggguucacaccccca

SEQ ID NO: 52585 - RNA, 21 nt, Artificial Sequence
  Synthetic
  misc_feature (6)..(6): n is a, c, g, or u
gguccnggguucacaccccca

SEQ ID NO: 52586 - RNA, 18 nt, Artificial Sequence
  Synthetic
  misc_feature (3)..(4): n is a, c, g, or u
  misc_feature (6)..(6): n is a, c, g, or u
  misc_feature (12)..(12): n is a, c, g, or u
gunnunacaacnuugcca

SEQ ID NO: 52587 - RNA, 20 nt, Artificial Sequence
  Synthetic
  misc_feature (5)..(6): n is a, c, g, or u
  misc_feature (8)..(8): n is a, c, g, or u
  misc_feature (14)..(14): n is a, c, g, or u
gugunnunacaacnuugcca

SEQ ID NO: 52588 - RNA, 21 nt, Artificial Sequence
  Synthetic
  misc_feature (6)..(7): n is a, c, g, or u
  misc_feature (9)..(9): n is a, c, g, or u
  misc_feature (15)..(15): n is a, c, g, or u
ggugunnunacaacnuugcca

SEQ ID NO: 52589 - RNA, 18 nt, Artificial Sequence
  Synthetic
  misc_feature (9)..(9): n is a, c, g, or u
  misc_feature (12)..(12): n is a, c, g, or u
ggguggagnccncaggca

SEQ ID NO: 52590 - RNA, 19 nt, Artificial Sequence
  Synthetic
  misc_feature (10)..(10): n is a, c, g, or u
  misc_feature (13)..(13): n is a, c, g, or u
gggguggagnccncaggca

SEQ ID NO: 52591 - RNA, 22 nt, Artificial Sequence
  Synthetic
  misc_feature (2)..(2): n is a, c, g, or u
  misc_feature (13)..(13): n is a, c, g, or u
  misc_feature (16)..(16): n is a, c, g, or u
gnugggguggagnccncaggca

SEQ ID NO: 52592 - RNA, 20 nt, Artificial Sequence
  Synthetic
guuaguauuccuuggacuca

SEQ ID NO: 52593 - RNA, 20 nt, Artificial Sequence
  Synthetic
  misc_feature (3)..(3): n is a, c, g, or u
  misc_feature (12)..(12): n is a, c, g, or u
ganauucauuuncaucaaga

SEQ ID NO: 52594 - RNA, 19 nt, Artificial Sequence
  Synthetic
  misc_feature (3)..(3): n is a, c, g, or u
  misc_feature (6)..(6): n is a, c, g, or u
  misc_feature (10)..(10): n is a, c, g, or u
gcnggnauunuauauaaga

SEQ ID NO: 52595 - RNA, 23 nt, Artificial Sequence
  Synthetic
  misc_feature (4)..(4): n is a, c, g, or u
  misc_feature (7)..(7): n is a, c, g, or u
  misc_feature (10)..(10): n is a, c, g, or u
  misc_feature (14)..(14): n is a, c, g, or u
gaangcnggnauunuauauaaga

SEQ ID NO: 52596 - RNA, 24 nt, Artificial Sequence
  Synthetic
  misc_feature (5)..(5): n is a, c, g, or u
  misc_feature (8)..(8): n is a, c, g, or u
  misc_feature (11)..(11): n is a, c, g, or u
  misc_feature (15)..(15): n is a, c, g, or u
ggaangcnggnauunuauauaaga

SEQ ID NO: 52597 - RNA, 19 nt, Artificial Sequence
  Synthetic
gccuuacuuuuggaagaga

SEQ ID NO: 52598 - RNA, 19 nt, Artificial Sequence
  Synthetic
  misc_feature (7)..(7): n is a, c, g, or u
gaggagnugggggaggaga

SEQ ID NO: 52599 - RNA, 20 nt, Artificial Sequence
  Synthetic
  misc_feature (8)..(8): n is a, c, g, or u
ggaggagnugggggaggaga

SEQ ID NO: 52600 - RNA, 21 nt, Artificial Sequence
  Synthetic
  misc_feature (9)..(9): n is a, c, g, or u
gggaggagnugggggaggaga

SEQ ID NO: 52601 - RNA, 20 nt, Artificial Sequence
  Synthetic
  misc_feature (3)..(3): n is a, c, g, or u
  misc_feature (6)..(6): n is a, c, g, or u
  misc_feature (12)..(12): n is a, c, g, or u
  misc_feature (15)..(15): n is a, c, g, or u
ganganccugcngcnaggga

SEQ ID NO: 52602 - RNA, 21 nt, Artificial Sequence
  Synthetic
  misc_feature (4)..(4): n is a, c, g, or u
  misc_feature (7)..(7): n is a, c, g, or u
  misc_feature (13)..(13): n is a, c, g, or u
  misc_feature (16)..(16): n is a, c, g, or u
gganganccugcngcnaggga

SEQ ID NO: 52603 - RNA, 20 nt, Artificial Sequence
  Synthetic
  misc_feature (13)..(13): n is a, c, g, or u
gacugggaggagnuggggga

SEQ ID NO: 52604 - RNA, 19 nt, Artificial Sequence
  Synthetic
  misc_feature (4)..(5): n is a, c, g, or u
gacnngaaggggcauggga

SEQ ID NO: 52605 - RNA, 20 nt, Artificial Sequence
  Synthetic
gcuuuuaguuauauggauga

SEQ ID NO: 52606 - RNA, 21 nt, Artificial Sequence
  Synthetic
ggcuuuuaguuauauggauga

SEQ ID NO: 52607 - RNA, 20 nt, Artificial Sequence
  Synthetic
  misc_feature (6)..(6): n is a, c, g, or u
  misc_feature (12)..(12): n is a, c, g, or u
gcuaunuugugnugggguga

SEQ ID NO: 52608 - RNA, 24 nt, Artificial Sequence
  Synthetic
  misc_feature (10)..(10): n is a, c, g, or u
  misc_feature (16)..(16): n is a, c, g, or u
gcaagcuaunuugugnugggguga

SEQ ID NO: 52609 - RNA, 19 nt, Artificial Sequence
  Synthetic
  misc_feature (6)..(6): n is a, c, g, or u
  misc_feature (18)..(18): n is a, c, g, or u
gacacncauccacaggcna

SEQ ID NO: 52610 - RNA, 21 nt, Artificial Sequence
  Synthetic
  misc_feature (8)..(8): n is a, c, g, or u
  misc_feature (20)..(20): n is a, c, g, or u
gagacacncauccacaggcna

SEQ ID NO: 52611 - RNA, 18 nt, Artificial Sequence
  Synthetic
  misc_feature (8)..(8): n is a, c, g, or u
  misc_feature (11)..(11): n is a, c, g, or u
  misc_feature (14)..(14): n is a, c, g, or u
  misc_feature (17)..(17): n is a, c, g, or u
gcuuugcngcnccnuuna

SEQ ID NO: 52612 - RNA, 19 nt, Artificial Sequence
  Synthetic
  misc_feature (9)..(9): n is a, c, g, or u
  misc_feature (12)..(12): n is a, c, g, or u
  misc_feature (15)..(15): n is a, c, g, or u
  misc_feature (18)..(18): n is a, c, g, or u
ggcuuugcngcnccnuuna

SEQ ID NO: 52613 - RNA, 20 nt, Artificial Sequence
  Synthetic
  misc_feature (10)..(10): n is a, c, g, or u
  misc_feature (13)..(13): n is a, c, g, or u
  misc_feature (16)..(16): n is a, c, g, or u
  misc_feature (19)..(19): n is a, c, g, or u
gggcuuugcngcnccnuuna

SEQ ID NO: 52614 - RNA, 22 nt, Artificial Sequence
  Synthetic
gacaacucuguuguccucucua

SEQ ID NO: 52615 - RNA, 19 nt, Artificial Sequence
  Synthetic
gagaaacaguucuugagua

SEQ ID NO: 52616 - RNA, 22 nt, Artificial Sequence
  Synthetic
gaagagaaacaguucuugagua

SEQ ID NO: 52617 - RNA, 23 nt, Artificial Sequence
  Synthetic
ggaagagaaacaguucuugagua

SEQ ID NO: 52618 - RNA, 18 nt, Artificial Sequence
  Synthetic
  misc_feature (5)..(5): n is a, c, g, or u
  misc_feature (7)..(7): n is a, c, g, or u
  misc_feature (14)..(15): n is a, c, g, or u
gauununuccuaannuua

SEQ ID NO: 52619 - RNA, 18 nt, Artificial Sequence
  Synthetic
  misc_feature (10)..(10): n is a, c, g, or u
  misc_feature (13)..(13): n is a, c, g, or u
guccgggagnaanccaac

SEQ ID NO: 52620 - RNA, 19 nt, Artificial Sequence
  Synthetic
  misc_feature (11)..(11): n is a, c, g, or u
  misc_feature (14)..(14): n is a, c, g, or u
gguccgggagnaanccaac

SEQ ID NO: 52621 - RNA, 18 nt, Artificial Sequence
  Synthetic
gguguguuucuuguugac

SEQ ID NO: 52622 - RNA, 20 nt, Artificial Sequence
  Synthetic
gcgguguguuucuuguugac

SEQ ID NO: 52623 - RNA, 21 nt, Artificial Sequence
  Synthetic
ggcgguguguuucuuguugac

SEQ ID NO: 52624 - RNA, 22 nt, Artificial Sequence
  Synthetic
  misc_feature (12)..(12): n is a, c, g, or u
  misc_feature (20)..(20): n is a, c, g, or u
gacuuucagganggucaaunac

SEQ ID NO: 52625 - RNA, 23 nt, Artificial Sequence
  Synthetic
  misc_feature (13)..(13): n is a, c, g, or u
  misc_feature (21)..(21): n is a, c, g, or u
ggacuuucagganggucaaunac

SEQ ID NO: 52626 - RNA, 19 nt, Artificial Sequence
  Synthetic
guuugcugacgcaaccccc

SEQ ID NO: 52627 - RNA, 21 nt, Artificial Sequence
  Synthetic
  misc_feature (10)..(11): n is a, c, g, or u
  misc_feature (13)..(13): n is a, c, g, or u
  misc_feature (16)..(16): n is a, c, g, or u
gaacgccccnngnagnuugcc

SEQ ID NO: 52628 - RNA, 23 nt, Artificial Sequence
  Synthetic
  misc_feature (12)..(13): n is a, c, g, or u
  misc_feature (15)..(15): n is a, c, g, or u
  misc_feature (18)..(18): n is a, c, g, or u
gugaacgccccnngnagnuugcc

SEQ ID NO: 52629 - RNA, 24 nt, Artificial Sequence
  Synthetic
  misc_feature (13)..(13): n is a, c, g, or u
  misc_feature (19)..(19): n is a, c, g, or u
guuccaccaggcncuguungaucc

SEQ ID NO: 52630 - RNA, 24 nt, Artificial Sequence
  Synthetic
  misc_feature (6)..(6): n is a, c, g, or u
  misc_feature (9)..(9): n is a, c, g, or u
  misc_feature (15)..(15): n is a, c, g, or u
gauccncunuucagngcaaauucc

SEQ ID NO: 52631 - RNA, 18 nt, Artificial Sequence
  Synthetic
gauccgccuccugcuucc

SEQ ID NO: 52632 - RNA, 21 nt, Artificial Sequence
  Synthetic
gcagauccgccuccugcuucc

SEQ ID NO: 52633 - RNA, 19 nt, Artificial Sequence
  Synthetic
  misc_feature (4)..(4): n is a, c, g, or u
guanuaggaggcuguaggc

SEQ ID NO: 52634 - RNA, 20 nt, Artificial Sequence
  Synthetic
  misc_feature (3)..(4): n is a, c, g, or u
gannacccggguguccuggc

SEQ ID NO: 52635 - RNA, 21 nt, Artificial Sequence
  Synthetic
  misc_feature (4)..(5): n is a, c, g, or u
ggannacccggguguccuggc

SEQ ID NO: 52636 - RNA, 22 nt, Artificial Sequence
  Synthetic
  misc_feature (5)..(6): n is a, c, g, or u
gggannacccggguguccuggc

SEQ ID NO: 52637 - RNA, 23 nt, Artificial Sequence
  Synthetic
  misc_feature (6)..(7): n is a, c, g, or u
ggggannacccggguguccuggc

SEQ ID NO: 52638 - RNA, 24 nt, Artificial Sequence
  Synthetic
  misc_feature (7)..(8): n is a, c, g, or u
gggggannacccggguguccuggc

SEQ ID NO: 52639 - RNA, 19 nt, Artificial Sequence
  Synthetic
guauuuuccugcugguggc

SEQ ID NO: 52640 - RNA, 24 nt, Artificial Sequence
  Synthetic
gcucuguauuuuccugcugguggc

SEQ ID NO: 52641 - RNA, 23 nt, Artificial Sequence
  Synthetic
  misc_feature (13)..(13): n is a, c, g, or u
  misc_feature (22)..(22): n is a, c, g, or u
gaaucucucuguncccaauccnc

SEQ ID NO: 52642 - RNA, 20 nt, Artificial Sequence
  Synthetic
gccuccugcuuccaccaauc

SEQ ID NO: 52643 - RNA, 21 nt, Artificial Sequence
  Synthetic
gacuauugccucucucacauc

SEQ ID NO: 52644 - RNA, 19 nt, Artificial Sequence
  Synthetic
gccaaaucugugcagcauc

SEQ ID NO: 52645 - RNA, 20 nt, Artificial Sequence
  Synthetic
ggccaaaucugugcagcauc

SEQ ID NO: 52646 - RNA, 18 nt, Artificial Sequence
  Synthetic
  misc_feature (11)..(11): n is a, c, g, or u
gagugggaggnuacgguc

SEQ ID NO: 52647 - RNA, 19 nt, Artificial Sequence
  Synthetic
  misc_feature (12)..(12): n is a, c, g, or u
ggagugggaggnuacgguc

SEQ ID NO: 52648 - RNA, 22 nt, Artificial Sequence
  Synthetic
  misc_feature (15)..(15): n is a, c, g, or u
guaggagugggaggnuacgguc

SEQ ID NO: 52649 - RNA, 23 nt, Artificial Sequence
  Synthetic
  misc_feature (16)..(16): n is a, c, g, or u
gguaggagugggaggnuacgguc

SEQ ID NO: 52650 - RNA, 20 nt, Artificial Sequence
  Synthetic
  misc_feature (3)..(3): n is a, c, g, or u
ganuuaaugacuuuggcuuc

SEQ ID NO: 52651 - RNA, 20 nt, Artificial Sequence
  Synthetic
  misc_feature (17)..(17): n is a, c, g, or u
gcccguuuguccucuanuuc

SEQ ID NO: 52652 - RNA, 23 nt, Artificial Sequence
  Synthetic
  misc_feature (20)..(20): n is a, c, g, or u
guugcccguuuguccucuanuuc

SEQ ID NO: 52653 - RNA, 18 nt, Artificial Sequence
  Synthetic
  misc_feature (6)..(6): n is a, c, g, or u
  misc_feature (8)..(10): n is a, c, g, or u
  misc_feature (13)..(13): n is a, c, g, or u
gguuanannnuanauuuc

SEQ ID NO: 52654 - RNA, 19 nt, Artificial Sequence
  Synthetic
  misc_feature (7)..(7): n is a, c, g, or u
  misc_feature (9)..(11): n is a, c, g, or u
  misc_feature (14)..(14): n is a, c, g, or u
ggguuanannnuanauuuc

SEQ ID NO: 52655 - RNA, 20 nt, Artificial Sequence
  Synthetic
  misc_feature (8)..(8): n is a, c, g, or u
  misc_feature (10)..(12): n is a, c, g, or u
  misc_feature (15)..(15): n is a, c, g, or u
gggguuanannnuanauuuc

SEQ ID NO: 52656 - RNA, 23 nt, Artificial Sequence
  Synthetic
  misc_feature (11)..(11): n is a, c, g, or u
  misc_feature (13)..(15): n is a, c, g, or u
  misc_feature (18)..(18): n is a, c, g, or u
gaugggguuanannnuanauuuc

SEQ ID NO: 52657 - RNA, 20 nt, Artificial Sequence
  Synthetic
gauucuuuccagaccaucag

SEQ ID NO: 52658 - RNA, 18 nt, Artificial Sequence
  Synthetic
  misc_feature (6)..(6): n is a, c, g, or u
ggacunuuggacuuucag

SEQ ID NO: 52659 - RNA, 24 nt, Artificial Sequence
  Synthetic
guuucuccuggcucaguuuacuag

SEQ ID NO: 52660 - RNA, 18 nt, Artificial Sequence
  Synthetic
  misc_feature (8)..(8): n is a, c, g, or u
ggucaaunaccuggaucg

SEQ ID NO: 52661 - RNA, 21 nt, Artificial Sequence
  Synthetic
  misc_feature (3)..(3): n is a, c, g, or u
  misc_feature (11)..(11): n is a, c, g, or u
ganggucaaunaccuggaucg

SEQ ID NO: 52662 - RNA, 22 nt, Artificial Sequence
  Synthetic
  misc_feature (4)..(4): n is a, c, g, or u
  misc_feature (12)..(12): n is a, c, g, or u
gganggucaaunaccuggaucg

SEQ ID NO: 52663 - RNA, 19 nt, Artificial Sequence
  Synthetic
gaugaucugguauuggggg

SEQ ID NO: 52664 - RNA, 20 nt, Artificial Sequence
  Synthetic
ggaugaucugguauuggggg

SEQ ID NO: 52665 - RNA, 21 nt, Artificial Sequence
  Synthetic
gccucagcccguuucuccugg

SEQ ID NO: 52666 - RNA, 22 nt, Artificial Sequence
  Synthetic
ggccucagcccguuucuccugg

SEQ ID NO: 52667 - RNA, 23 nt, Artificial Sequence
  Synthetic
gggccucagcccguuucuccugg

SEQ ID NO: 52668 - RNA, 21 nt, Artificial Sequence
  Synthetic
  misc_feature (5)..(5): n is a, c, g, or u
  misc_feature (20)..(20): n is a, c, g, or u
gacunuuggacuuucaggang

SEQ ID NO: 52669 - RNA, 22 nt, Artificial Sequence
  Synthetic
  misc_feature (6)..(6): n is a, c, g, or u
  misc_feature (21)..(21): n is a, c, g, or u
ggacunuuggacuuucaggang

SEQ ID NO: 52670 - RNA, 20 nt, Artificial Sequence
  Synthetic
gucuggcuuuuaguuauaug

SEQ ID NO: 52671 - RNA, 18 nt, Artificial Sequence
  Synthetic
gcaacuuuuucaccucug

SEQ ID NO: 52672 - RNA, 19 nt, Artificial Sequence
  Synthetic
gacuuuggcuuccugggug

SEQ ID NO: 52673 - RNA, 19 nt, Artificial Sequence
  Synthetic
  misc_feature (3)..(4): n is a, c, g, or u
  misc_feature (10)..(12): n is a, c, g, or u
gannugauannnaaaugug

SEQ ID NO: 52674 - RNA, 18 nt, Artificial Sequence
  Synthetic
gcaacggccaggccugug

SEQ ID NO: 52675 - RNA, 19 nt, Artificial Sequence
  Synthetic
ggcaacggccaggccugug

SEQ ID NO: 52676 - RNA, 20 nt, Artificial Sequence
  Synthetic
  misc_feature (9)..(9): n is a, c, g, or u
  misc_feature (12)..(12): n is a, c, g, or u
  misc_feature (18)..(18): n is a, c, g, or u
guaaaucgnccnauuganug

SEQ ID NO: 52677 - RNA, 18 nt, Artificial Sequence
  Synthetic
guuuacuagugcaauuug

SEQ ID NO: 52678 - RNA, 21 nt, Artificial Sequence
  Synthetic
  misc_feature (2)..(2): n is a, c, g, or u
  misc_feature (5)..(5): n is a, c, g, or u
  misc_feature (11)..(12): n is a, c, g, or u
  misc_feature (21)..(21): n is a, c, g, or u
gnuunaaauunnuuaugccan

SEQ ID NO: 52679 - RNA, 24 nt, Artificial Sequence
  Synthetic
  misc_feature (5)..(5): n is a, c, g, or u
  misc_feature (8)..(8): n is a, c, g, or u
  misc_feature (14)..(15): n is a, c, g, or u
  misc_feature (24)..(24): n is a, c, g, or u
gaagnuunaaauunnuuaugccan

SEQ ID NO: 52680 - RNA, 20 nt, Artificial Sequence
  Synthetic
  misc_feature (20)..(20): n is a, c, g, or u
gucugccguuccagccgacn

SEQ ID NO: 52681 - RNA, 24 nt, Artificial Sequence
  Synthetic
  misc_feature (18)..(18): n is a, c, g, or u
  misc_feature (21)..(21): n is a, c, g, or u
  misc_feature (24)..(24): n is a, c, g, or u
gaacaauuuguaggcccncunacn

SEQ ID NO: 52682 - RNA, 20 nt, Artificial Sequence
  Synthetic
  misc_feature (2)..(2): n is a, c, g, or u
  misc_feature (12)..(12): n is a, c, g, or u
  misc_feature (20)..(20): n is a, c, g, or u
gnaguuggggancauuaccn

SEQ ID NO: 52683 - RNA, 21 nt, Artificial Sequence
  Synthetic
  misc_feature (3)..(3): n is a, c, g, or u
  misc_feature (13)..(13): n is a, c, g, or u
  misc_feature (21)..(21): n is a, c, g, or u
ggnaguuggggancauuaccn

SEQ ID NO: 52684 - RNA, 19 nt, Artificial Sequence
  Synthetic
  misc_feature (10)..(10): n is a, c, g, or u
  misc_feature (13)..(13): n is a, c, g, or u
  misc_feature (19)..(19): n is a, c, g, or u
gcuggauccncunuucagn

SEQ ID NO: 52685 - RNA, 24 nt, Artificial Sequence
  Synthetic
  misc_feature (24)..(24): n is a, c, g, or u
gcaaacaagguaggagugggaggn

SEQ ID NO: 52686 - RNA, 24 nt, Artificial Sequence
  Synthetic
  misc_feature (18)..(18): n is a, c, g, or u
  misc_feature (24)..(24): n is a, c, g, or u
gcucucaggcaagcuaunuugugn

SEQ ID NO: 52687 - RNA, 21 nt, Artificial Sequence
  Synthetic
  misc_feature (3)..(3): n is a, c, g, or u
  misc_feature (8)..(8): n is a, c, g, or u
  misc_feature (18)..(18): n is a, c, g, or u
  misc_feature (20)..(21): n is a, c, g, or u
gcnuaaanauuagacaanunn

SEQ ID NO: 52688 - RNA, 22 nt, Artificial Sequence
  Synthetic
  misc_feature (4)..(4): n is a, c, g, or u
  misc_feature (9)..(9): n is a, c, g, or u
  misc_feature (19)..(19): n is a, c, g, or u
  misc_feature (21)..(22): n is a, c, g, or u
ggcnuaaanauuagacaanunn

SEQ ID NO: 52689 - RNA, 23 nt, Artificial Sequence
  Synthetic
  misc_feature (5)..(5): n is a, c, g, or u
  misc_feature (10)..(10): n is a, c, g, or u
  misc_feature (20)..(20): n is a, c, g, or u
  misc_feature (22)..(23): n is a, c, g, or u
gggcnuaaanauuagacaanunn

SEQ ID NO: 52690 - RNA, 19 nt, Artificial Sequence
  Synthetic
  misc_feature (3)..(3): n is a, c, g, or u
  misc_feature (7)..(7): n is a, c, g, or u
  misc_feature (12)..(12): n is a, c, g, or u
  misc_feature (19)..(19): n is a, c, g, or u
gunccuncuuunaauccun

SEQ ID NO: 52691 - RNA, 18 nt, Artificial Sequence
  Synthetic
  misc_feature (18)..(18): n is a, c, g, or u
ggacagaaucucucugun

SEQ ID NO: 52692 - RNA, 19 nt, Artificial Sequence
  Synthetic
  misc_feature (19)..(19): n is a, c, g, or u
gggacagaaucucucugun

SEQ ID NO: 52693 - RNA, 23 nt, Artificial Sequence
  Synthetic
  misc_feature (23)..(23): n is a, c, g, or u
gcaugggacagaaucucucugun

SEQ ID NO: 52694 - RNA, 24 nt, Artificial Sequence
  Synthetic
  misc_feature (24)..(24): n is a, c, g, or u
ggcaugggacagaaucucucugun

SEQ ID NO: 52695 - RNA, 19 nt, Artificial Sequence
  Synthetic
guuaucuguggguauccau

SEQ ID NO: 52696 - RNA, 19 nt, Artificial Sequence
  Synthetic
guugguucuucuggacuau

SEQ ID NO: 52697 - RNA, 19 nt, Artificial Sequence
  Synthetic
gcuuuaggaaaauaccuau

SEQ ID NO: 52698 - RNA, 20 nt, Artificial Sequence
  Synthetic
ggcuuuaggaaaauaccuau

SEQ ID NO: 52699 - RNA, 21 nt, Artificial Sequence
  Synthetic
gggcuuuaggaaaauaccuau

SEQ ID NO: 52700 - RNA, 21 nt, Artificial Sequence
  Synthetic
  misc_feature (3)..(3): n is a, c, g, or u
  misc_feature (10)..(10): n is a, c, g, or u
  misc_feature (12)..(12): n is a, c, g, or u
ganuguuuungnaaacuuccu

SEQ ID NO: 52701 - RNA, 21 nt, Artificial Sequence
  Synthetic
guaagggcucuguauuuuccu

SEQ ID NO: 52702 - RNA, 22 nt, Artificial Sequence
  Synthetic
gguaagggcucuguauuuuccu

SEQ ID NO: 52703 - RNA, 23 nt, Artificial Sequence
  Synthetic
ggguaagggcucuguauuuuccu

SEQ ID NO: 52704 - RNA, 21 nt, Artificial Sequence
  Synthetic
guuaccaauuuucuguuaucu

SEQ ID NO: 52705 - RNA, 24 nt, Artificial Sequence
  Synthetic
gcuguuaccaauuuucuguuaucu

SEQ ID NO: 52706 - RNA, 19 nt, Artificial Sequence
  Synthetic
gaaccuuuguggcuccucu

SEQ ID NO: 52707 - RNA, 20 nt, Artificial Sequence
  Synthetic
ggaaccuuuguggcuccucu

SEQ ID NO: 52708 - RNA, 22 nt, Artificial Sequence
  Synthetic
guggaaccuuuguggcuccucu

SEQ ID NO: 52709 - RNA, 24 nt, Artificial Sequence
  Synthetic
gcguggaaccuuuguggcuccucu

SEQ ID NO: 52710 - RNA, 21 nt, Artificial Sequence
  Synthetic
  misc_feature (13)..(13): n is a, c, g, or u
guauuuggugucnuuuggagu

SEQ ID NO: 52711 - RNA, 23 nt, Artificial Sequence
  Synthetic
  misc_feature (15)..(15): n is a, c, g, or u
gaguauuuggugucnuuuggagu

SEQ ID NO: 52712 - RNA, 18 nt, Artificial Sequence
  Synthetic
gccaauggcaaacaaggu

SEQ ID NO: 52713 - RNA, 19 nt, Artificial Sequence
  Synthetic
ggccaauggcaaacaaggu

SEQ ID NO: 52714 - RNA, 18 nt, Artificial Sequence
  Synthetic
gaucucaaucuccagcuu

SEQ ID NO: 52715 - RNA, 18 nt, Artificial Sequence
  Synthetic
gcuaugccucaucuucuu

SEQ ID NO: 52716 - RNA, 19 nt, Artificial Sequence
  Synthetic
gucccuuuauaccgcuguu

SEQ ID NO: 52717 - RNA, 21 nt, Artificial Sequence
  Synthetic
gagucccuuuauaccgcuguu

SEQ ID NO: 52718 - RNA, 23 nt, Artificial Sequence
  Synthetic
  misc_feature (21)..(21): n is a, c, g, or u
guucuugaguauuuggugucnuu

SEQ ID NO: 52719 - RNA, 19 nt, Artificial Sequence
  Synthetic
guuucuccuggcucaguuu

SEQ ID NO: 52720 - RNA, 23 nt, Artificial Sequence
  Synthetic
gcccguuucuccuggcucaguuu

SEQ ID NO: 52721 - RNA, 18 nt, Artificial Sequence
  Synthetic
  misc_feature (4)..(4): n is a, c, g, or u
agunggacaugaacaaaa

SEQ ID NO: 52722 - RNA, 19 nt, Artificial Sequence
  Synthetic
  misc_feature (5)..(5): n is a, c, g, or u
cagunggacaugaacaaaa

SEQ ID NO: 52723 - RNA, 20 nt, Artificial Sequence
  Synthetic
  misc_feature (6)..(6): n is a, c, g, or u
acagunggacaugaacaaaa

SEQ ID NO: 52724 - RNA, 21 nt, Artificial Sequence
  Synthetic
  misc_feature (7)..(7): n is a, c, g, or u
aacagunggacaugaacaaaa

SEQ ID NO: 52725 - RNA, 23 nt, Artificial Sequence
  Synthetic
  misc_feature (9)..(9): n is a, c, g, or u
ugaacagunggacaugaacaaaa

SEQ ID NO: 52726 - RNA, 24 nt, Artificial Sequence
  Synthetic
  misc_feature (10)..(10): n is a, c, g, or u
uugaacagunggacaugaacaaaa

SEQ ID NO: 52727 - RNA, 18 nt, Artificial Sequence
  Synthetic
acccacagauaacagaaa

SEQ ID NO: 52728 - RNA, 19 nt, Artificial Sequence
  Synthetic
uacccacagauaacagaaa

SEQ ID NO: 52729 - RNA, 20 nt, Artificial Sequence
  Synthetic
auacccacagauaacagaaa

SEQ ID NO: 52730 - RNA, 23 nt, Artificial Sequence
  Synthetic
uggauacccacagauaacagaaa

SEQ ID NO: 52731 - RNA, 24 nt, Artificial Sequence
  Synthetic
auggauacccacagauaacagaaa

SEQ ID NO: 52732 - RNA, 19 nt, Artificial Sequence
  Synthetic
aguccagaagaaccaacaa

SEQ ID NO: 52733 - RNA, 20 nt, Artificial Sequence
  Synthetic
uaguccagaagaaccaacaa

SEQ ID NO: 52734 - RNA, 18 nt, Artificial Sequence
  Synthetic
acuuccuagagaggacaa

SEQ ID NO: 52735 - RNA, 19 nt, Artificial Sequence
  Synthetic
uacuuccuagagaggacaa

SEQ ID NO: 52736 - RNA, 21 nt, Artificial Sequence
  Synthetic
uguacuuccuagagaggacaa

SEQ ID NO: 52737 - RNA, 24 nt, Artificial Sequence
  Synthetic
agguguacuuccuagagaggacaa

SEQ ID NO: 52738 - RNA, 18 nt, Artificial Sequence
  Synthetic
  misc_feature (7)..(7): n is a, c, g, or u
  misc_feature (11)..(11): n is a, c, g, or u
cuuuganuuunuguacaa

SEQ ID NO: 52739 - RNA, 19 nt, Artificial Sequence
  Synthetic
  misc_feature (8)..(8): n is a, c, g, or u
  misc_feature (12)..(12): n is a, c, g, or u
ucuuuganuuunuguacaa

SEQ ID NO: 52740 - RNA, 20 nt, Artificial Sequence
  Synthetic
  misc_feature (1)..(1): n is a, c, g, or u
  misc_feature (9)..(9): n is a, c, g, or u
  misc_feature (13)..(13): n is a, c, g, or u
nucuuuganuuunuguacaa

SEQ ID NO: 52741 - RNA, 21 nt, Artificial Sequence
  Synthetic
  misc_feature (2)..(2): n is a, c, g, or u
  misc_feature (10)..(10): n is a, c, g, or u
  misc_feature (14)..(14): n is a, c, g, or u
anucuuuganuuunuguacaa

SEQ ID NO: 52742 - RNA, 22 nt, Artificial Sequence
  Synthetic
  misc_feature (3)..(3): n is a, c, g, or u
  misc_feature (11)..(11): n is a, c, g, or u
  misc_feature (15)..(15): n is a, c, g, or u
canucuuuganuuunuguacaa

SEQ ID NO: 52743 - RNA, 23 nt, Artificial Sequence
  Synthetic
  misc_feature (4)..(4): n is a, c, g, or u
  misc_feature (12)..(12): n is a, c, g, or u
  misc_feature (16)..(16): n is a, c, g, or u
acanucuuuganuuunuguacaa

SEQ ID NO: 52744 - RNA, 24 nt, Artificial Sequence
  Synthetic
  misc_feature (5)..(5): n is a, c, g, or u
  misc_feature (13)..(13): n is a, c, g, or u
  misc_feature (17)..(17): n is a, c, g, or u
aacanucuuuganuuunuguacaa

SEQ ID NO: 52745 - RNA, 18 nt, Artificial Sequence
  Synthetic
cuggccguugccgagcaa

SEQ ID NO: 52746 - RNA, 19 nt, Artificial Sequence
  Synthetic
ccuggccguugccgagcaa

SEQ ID NO: 52747 - RNA, 18 nt, Artificial Sequence
  Synthetic
cagcaggaugaagaggaa

SEQ ID NO: 52748 - RNA, 20 nt, Artificial Sequence
  Synthetic
agcagcaggaugaagaggaa

SEQ ID NO: 52749 - RNA, 21 nt, Artificial Sequence
  Synthetic
uagcagcaggaugaagaggaa

SEQ ID NO: 52750 - RNA, 22 nt, Artificial Sequence
  Synthetic
auagcagcaggaugaagaggaa

SEQ ID NO: 52751 - RNA, 23 nt, Artificial Sequence
  Synthetic
cauagcagcaggaugaagaggaa

SEQ ID NO: 52752 - RNA, 18 nt, Artificial Sequence
  Synthetic
  misc_feature (15)..(15): n is a, c, g, or u
agcucuuguucccangaa

SEQ ID NO: 52753 - RNA, 19 nt, Artificial Sequence
  Synthetic
  misc_feature (16)..(16): n is a, c, g, or u
uagcucuuguucccangaa

SEQ ID NO: 52754 - RNA, 21 nt, Artificial Sequence
  Synthetic
  misc_feature (18)..(18): n is a, c, g, or u
uguagcucuuguucccangaa

SEQ ID NO: 52755 - RNA, 22 nt, Artificial Sequence
  Synthetic
  misc_feature (19)..(19): n is a, c, g, or u
cuguagcucuuguucccangaa

SEQ ID NO: 52756 - RNA, 24 nt, Artificial Sequence
  Synthetic
  misc_feature (21)..(21): n is a, c, g, or u
ugcuguagcucuuguucccangaa

SEQ ID NO: 52757 - RNA, 18 nt, Artificial Sequence
  Synthetic
  misc_feature (1)..(1): n is a, c, g, or u
  misc_feature (16)..(16): n is a, c, g, or u
nccgagcagccauggnaa

SEQ ID NO: 52758 - RNA, 19 nt, Artificial Sequence
  Synthetic
  misc_feature (2)..(2): n is a, c, g, or u
  misc_feature (17)..(17): n is a, c, g, or u
anccgagcagccauggnaa

SEQ ID NO: 52759 - RNA, 20 nt, Artificial Sequence
  Synthetic
  misc_feature (3)..(3): n is a, c, g, or u
  misc_feature (18)..(18): n is a, c, g, or u
canccgagcagccauggnaa

SEQ ID NO: 52760 - RNA, 21 nt, Artificial Sequence
  Synthetic
  misc_feature (4)..(4): n is a, c, g, or u
  misc_feature (19)..(19): n is a, c, g, or u
acanccgagcagccauggnaa

SEQ ID NO: 52761 - RNA, 22 nt, Artificial Sequence
  Synthetic
  misc_feature (5)..(5): n is a, c, g, or u
  misc_feature (20)..(20): n is a, c, g, or u
cacanccgagcagccauggnaa

SEQ ID NO: 52762 - RNA, 24 nt, Artificial Sequence
  Synthetic
  misc_feature (7)..(7): n is a, c, g, or u
  misc_feature (22)..(22): n is a, c, g, or u
agcacanccgagcagccauggnaa

SEQ ID NO: 52763 - RNA, 18 nt, Artificial Sequence
  Synthetic
  misc_feature (6)..(7): n is a, c, g, or u
  misc_feature (16)..(16): n is a, c, g, or u
uaucannucuugaugnaa

SEQ ID NO: 52764 - RNA, 19 nt, Artificial Sequence
  Synthetic
  misc_feature (1)..(1): n is a, c, g, or u
  misc_feature (7)..(8): n is a, c, g, or u
  misc_feature (17)..(17): n is a, c, g, or u
nuaucannucuugaugnaa

SEQ ID NO: 52765 - RNA, 20 nt, Artificial Sequence
  Synthetic
  misc_feature (1)..(2): n is a, c, g, or u
  misc_feature (8)..(9): n is a, c, g, or u
  misc_feature (18)..(18): n is a, c, g, or u
nnuaucannucuugaugnaa

SEQ ID NO: 52766 - RNA, 21 nt, Artificial Sequence
  Synthetic
  misc_feature (1)..(3): n is a, c, g, or u
  misc_feature (9)..(10): n is a, c, g, or u
  misc_feature (19)..(19): n is a, c, g, or u
nnnuaucannucuugaugnaa

SEQ ID NO: 52767 - RNA, 22 nt, Artificial Sequence
  Synthetic
  misc_feature (2)..(4): n is a, c, g, or u
  misc_feature (10)..(11): n is a, c, g, or u
  misc_feature (20)..(20): n is a, c, g, or u
unnnuaucannucuugaugnaa

SEQ ID NO: 52768 - RNA, 23 nt, Artificial Sequence
  Synthetic
  misc_feature (3)..(5): n is a, c, g, or u
  misc_feature (11)..(12): n is a, c, g, or u
  misc_feature (21)..(21): n is a, c, g, or u
uunnnuaucannucuugaugnaa

SEQ ID NO: 52769 - RNA, 24 nt, Artificial Sequence
  Synthetic
  misc_feature (4)..(6): n is a, c, g, or u
  misc_feature (12)..(13): n is a, c, g, or u
  misc_feature (22)..(22): n is a, c, g, or u
uuunnnuaucannucuugaugnaa

SEQ ID NO: 52770 - RNA, 18 nt, Artificial Sequence
  Synthetic
  misc_feature (7)..(7): n is a, c, g, or u
  misc_feature (10)..(10): n is a, c, g, or u
  misc_feature (16)..(16): n is a, c, g, or u
uguuuunganguauunaa

SEQ ID NO: 52771 - RNA, 19 nt, Artificial Sequence
  Synthetic
  misc_feature (8)..(8): n is a, c, g, or u
  misc_feature (11)..(11): n is a, c, g, or u
  misc_feature (17)..(17): n is a, c, g, or u
uuguuuunganguauunaa

SEQ ID NO: 52772 - RNA, 20 nt, Artificial Sequence
  Synthetic
  misc_feature (9)..(9): n is a, c, g, or u
  misc_feature (12)..(12): n is a, c, g, or u
  misc_feature (18)..(18): n is a, c, g, or u
uuuguuuunganguauunaa

SEQ ID NO: 52773 - RNA, 21 nt, Artificial Sequence
  Synthetic
  misc_feature (10)..(10): n is a, c, g, or u
  misc_feature (13)..(13): n is a, c, g, or u
  misc_feature (19)..(19): n is a, c, g, or u
uuuuguuuunganguauunaa

SEQ ID NO: 52774 - RNA, 22 nt, Artificial Sequence
  Synthetic
  misc_feature (11)..(11): n is a, c, g, or u
  misc_feature (14)..(14): n is a, c, g, or u
  misc_feature (20)..(20): n is a, c, g, or u
uuuuuguuuunganguauunaa

SEQ ID NO: 52775 - RNA, 23 nt, Artificial Sequence
  Synthetic
  misc_feature (12)..(12): n is a, c, g, or u
  misc_feature (15)..(15): n is a, c, g, or u
  misc_feature (21)..(21): n is a, c, g, or u
cuuuuuguuuunganguauunaa

SEQ ID NO: 52776 - RNA, 24 nt, Artificial Sequence
  Synthetic
  misc_feature (13)..(13): n is a, c, g, or u
  misc_feature (16)..(16): n is a, c, g, or u
  misc_feature (22)..(22): n is a, c, g, or u
ucuuuuuguuuunganguauunaa

SEQ ID NO: 52777 - RNA, 18 nt, Artificial Sequence
  Synthetic
  misc_feature (3)..(4): n is a, c, g, or u
  misc_feature (6)..(6): n is a, c, g, or u
  misc_feature (8)..(9): n is a, c, g, or u
acnncnunnucaggauaa

SEQ ID NO: 52778 - RNA, 19 nt, Artificial Sequence
  Synthetic
  misc_feature (4)..(5): n is a, c, g, or u
  misc_feature (7)..(7): n is a, c, g, or u
  misc_feature (9)..(10): n is a, c, g, or u
aacnncnunnucaggauaa

SEQ ID NO: 52779 - RNA, 20 nt, Artificial Sequence
  Synthetic
  misc_feature (5)..(6): n is a, c, g, or u
  misc_feature (8)..(8): n is a, c, g, or u
  misc_feature (10)..(11): n is a, c, g, or u
uaacnncnunnucaggauaa

SEQ ID NO: 52780 - RNA, 21 nt, Artificial Sequence
  Synthetic
  misc_feature (6)..(7): n is a, c, g, or u
  misc_feature (9)..(9): n is a, c, g, or u
  misc_feature (11)..(12): n is a, c, g, or u
uuaacnncnunnucaggauaa

SEQ ID NO: 52781 - RNA, 22 nt, Artificial Sequence
  Synthetic
  misc_feature (7)..(8): n is a, c, g, or u
  misc_feature (10)..(10): n is a, c, g, or u
  misc_feature (12)..(13): n is a, c, g, or u
auuaacnncnunnucaggauaa

SEQ ID NO: 52782 - RNA, 24 nt, Artificial Sequence
  Synthetic
  misc_feature (9)..(10): n is a, c, g, or u
  misc_feature (12)..(12): n is a, c, g, or u
  misc_feature (14)..(15): n is a, c, g, or u
ugauuaacnncnunnucaggauaa

SEQ ID NO: 52783 - RNA, 18 nt, Artificial Sequence
  Synthetic
  misc_feature (5)..(5): n is a, c, g, or u
  misc_feature (14)..(14): n is a, c, g, or u
aauanugucuggunuuaa

SEQ ID NO: 52784 - RNA, 19 nt, Artificial Sequence
  Synthetic
  misc_feature (6)..(6): n is a, c, g, or u
  misc_feature (15)..(15): n is a, c, g, or u
aaauanugucuggunuuaa

SEQ ID NO: 52785 - RNA, 20 nt, Artificial Sequence
  Synthetic
  misc_feature (7)..(7): n is a, c, g, or u
  misc_feature (16)..(16): n is a, c, g, or u
caaauanugucuggunuuaa

SEQ ID NO: 52786 - RNA, 22 nt, Artificial Sequence
  Synthetic
  misc_feature (9)..(9): n is a, c, g, or u
  misc_feature (18)..(18): n is a, c, g, or u
ugcaaauanugucuggunuuaa

SEQ ID NO: 52787 - RNA, 23 nt, Artificial Sequence
  Synthetic
  misc_feature (10)..(10): n is a, c, g, or u
  misc_feature (19)..(19): n is a, c, g, or u
augcaaauanugucuggunuuaa

SEQ ID NO: 52788 - RNA, 24 nt, Artificial Sequence
  Synthetic
  misc_feature (11)..(11): n is a, c, g, or u
  misc_feature (20)..(20): n is a, c, g, or u
uaugcaaauanugucuggunuuaa

SEQ ID NO: 52789 - RNA, 18 nt, Artificial Sequence
  Synthetic
  misc_feature (7)..(7): n is a, c, g, or u
aacagunggacaugaaca

SEQ ID NO: 52790 - RNA, 20 nt, Artificial Sequence
  Synthetic
  misc_feature (9)..(9): n is a, c, g, or u
ugaacagunggacaugaaca

SEQ ID NO: 52791 - RNA, 21 nt, Artificial Sequence
  Synthetic
  misc_feature (10)..(10): n is a, c, g, or u
uugaacagunggacaugaaca

SEQ ID NO: 52792 - RNA, 22 nt, Artificial Sequence
  Synthetic
  misc_feature (11)..(11): n is a, c, g, or u
cuugaacagunggacaugaaca

SEQ ID NO: 52793 - RNA, 19 nt, Artificial Sequence
  Synthetic
uggauacccacagauaaca

SEQ ID NO: 52794 - RNA, 20 nt, Artificial Sequence
  Synthetic
auggauacccacagauaaca

SEQ ID NO: 52795 - RNA, 21 nt, Artificial Sequence
  Synthetic
aauggauacccacagauaaca

SEQ ID NO: 52796 - RNA, 22 nt, Artificial Sequence
  Synthetic
aaauggauacccacagauaaca

SEQ ID NO: 52797 - RNA, 23 nt, Artificial Sequence
  Synthetic
  misc_feature (1)..(1): n is a, c, g, or u
naaauggauacccacagauaaca

SEQ ID NO: 52798 - RNA, 24 nt, Artificial Sequence
  Synthetic
  misc_feature (2)..(2): n is a, c, g, or u
unaaauggauacccacagauaaca

SEQ ID NO: 52799 - RNA, 18 nt, Artificial Sequence
  Synthetic
aggacaaguuggaggaca

SEQ ID NO: 52800 - RNA, 19 nt, Artificial Sequence
  Synthetic
caggacaaguuggaggaca

SEQ ID NO: 52801 - RNA, 20 nt, Artificial Sequence
  Synthetic
ccaggacaaguuggaggaca

SEQ ID NO: 52802 - RNA, 18 nt, Artificial Sequence
  Synthetic
  misc_feature (14)..(14): n is a, c, g, or u
uccacacuccaaangaca

SEQ ID NO: 52803 - RNA, 19 nt, Artificial Sequence
  Synthetic
  misc_feature (15)..(15): n is a, c, g, or u
auccacacuccaaangaca

SEQ ID NO: 52804 - RNA, 20 nt, Artificial Sequence
  Synthetic
  misc_feature (16)..(16): n is a, c, g, or u
aauccacacuccaaangaca

SEQ ID NO: 52805 - RNA, 18 nt, Artificial Sequence
  Synthetic
  misc_feature (6)..(6): n is a, c, g, or u
  misc_feature (9)..(9): n is a, c, g, or u
ucaaunggncgauuuaca

SEQ ID NO: 52806 - RNA, 19 nt, Artificial Sequence
  Synthetic
  misc_feature (1)..(1): n is a, c, g, or u
  misc_feature (7)..(7): n is a, c, g, or u
  misc_feature (10)..(10): n is a, c, g, or u
nucaaunggncgauuuaca

SEQ ID NO: 52807 - RNA, 20 nt, Artificial Sequence
  Synthetic
  misc_feature (2)..(2): n is a, c, g, or u
  misc_feature (8)..(8): n is a, c, g, or u
  misc_feature (11)..(11): n is a, c, g, or u
anucaaunggncgauuuaca

SEQ ID NO: 52808 - RNA, 21 nt, Artificial Sequence
  Synthetic
  misc_feature (3)..(3): n is a, c, g, or u
  misc_feature (9)..(9): n is a, c, g, or u
  misc_feature (12)..(12): n is a, c, g, or u
canucaaunggncgauuuaca

SEQ ID NO: 52809 - RNA, 22 nt, Artificial Sequence
  Synthetic
  misc_feature (4)..(4): n is a, c, g, or u
  misc_feature (10)..(10): n is a, c, g, or u
  misc_feature (13)..(13): n is a, c, g, or u
ccanucaaunggncgauuuaca

SEQ ID NO: 52810 - RNA, 23 nt, Artificial Sequence
  Synthetic
  misc_feature (5)..(5): n is a, c, g, or u
  misc_feature (11)..(11): n is a, c, g, or u
  misc_feature (14)..(14): n is a, c, g, or u
uccanucaaunggncgauuuaca

SEQ ID NO: 52811 - RNA, 24 nt, Artificial Sequence
  Synthetic
  misc_feature (6)..(6): n is a, c, g, or u
  misc_feature (12)..(12): n is a, c, g, or u
  misc_feature (15)..(15): n is a, c, g, or u
uuccanucaaunggncgauuuaca

SEQ ID NO: 52812 - RNA, 18 nt, Artificial Sequence
  Synthetic
  misc_feature (2)..(2): n is a, c, g, or u
  misc_feature (8)..(8): n is a, c, g, or u
unccaaunacauaaccca

SEQ ID NO: 52813 - RNA, 19 nt, Artificial Sequence
  Synthetic
  misc_feature (3)..(3): n is a, c, g, or u
  misc_feature (9)..(9): n is a, c, g, or u
cunccaaunacauaaccca

SEQ ID NO: 52814 - RNA, 20 nt, Artificial Sequence
  Synthetic
  misc_feature (4)..(4): n is a, c, g, or u
  misc_feature (10)..(10): n is a, c, g, or u
acunccaaunacauaaccca

SEQ ID NO: 52815 - RNA, 21 nt, Artificial Sequence
  Synthetic
  misc_feature (5)..(5): n is a, c, g, or u
  misc_feature (11)..(11): n is a, c, g, or u
aacunccaaunacauaaccca

SEQ ID NO: 52816 - RNA, 22 nt, Artificial Sequence
  Synthetic
  misc_feature (6)..(6): n is a, c, g, or u
  misc_feature (12)..(12): n is a, c, g, or u
caacunccaaunacauaaccca

SEQ ID NO: 52817 - RNA, 23 nt, Artificial Sequence
  Synthetic
  misc_feature (7)..(7): n is a, c, g, or u
  misc_feature (13)..(13): n is a, c, g, or u
ccaacunccaaunacauaaccca

SEQ ID NO: 52818 - RNA, 24 nt, Artificial Sequence
  Synthetic
  misc_feature (8)..(8): n is a, c, g, or u
  misc_feature (14)..(14): n is a, c, g, or u
cccaacunccaaunacauaaccca

SEQ ID NO: 52819 - RNA, 18 nt, Artificial Sequence
  Synthetic
  misc_feature (3)..(3): n is a, c, g, or u
cangaauauggugaccca

SEQ ID NO: 52820 - RNA, 19 nt, Artificial Sequence
  Synthetic
  misc_feature (4)..(4): n is a, c, g, or u
ccangaauauggugaccca

SEQ ID NO: 52821 - RNA, 20 nt, Artificial Sequence
  Synthetic
  misc_feature (5)..(5): n is a, c, g, or u
cccangaauauggugaccca

SEQ ID NO: 52822 - RNA, 21 nt, Artificial Sequence
  Synthetic
  misc_feature (6)..(6): n is a, c, g, or u
ucccangaauauggugaccca

SEQ ID NO: 52823 - RNA, 22 nt, Artificial Sequence
  Synthetic
  misc_feature (7)..(7): n is a, c, g, or u
uucccangaauauggugaccca

SEQ ID NO: 52824 - RNA, 24 nt, Artificial Sequence
  Synthetic
  misc_feature (9)..(9): n is a, c, g, or u
uguucccangaauauggugaccca

SEQ ID NO: 52825 - RNA, 20 nt, Artificial Sequence
  Synthetic
uggccaauggccaagcccca

SEQ ID NO: 52826 - RNA, 21 nt, Artificial Sequence
  Synthetic
auggccaauggccaagcccca

SEQ ID NO: 52827 - RNA, 23 nt, Artificial Sequence
  Synthetic
ugauggccaauggccaagcccca

SEQ ID NO: 52828 - RNA, 24 nt, Artificial Sequence
  Synthetic
cugauggccaauggccaagcccca

SEQ ID NO: 52829 - RNA, 19 nt, Artificial Sequence
  Synthetic
uggucuggaaagaauccca

SEQ ID NO: 52830 - RNA, 20 nt, Artificial Sequence
  Synthetic
auggucuggaaagaauccca

SEQ ID NO: 52831 - RNA, 18 nt, Artificial Sequence
  Synthetic
ccauauaacuaaaagcca

SEQ ID NO: 52832 - RNA, 19 nt, Artificial Sequence
  Synthetic
uccauauaacuaaaagcca

SEQ ID NO: 52833 - RNA, 20 nt, Artificial Sequence
  Synthetic
auccauauaacuaaaagcca

SEQ ID NO: 52834 - RNA, 21 nt, Artificial Sequence
  Synthetic
cauccauauaacuaaaagcca

SEQ ID NO: 52835 - RNA, 22 nt, Artificial Sequence
  Synthetic
ucauccauauaacuaaaagcca

SEQ ID NO: 52836 - RNA, 23 nt, Artificial Sequence
  Synthetic
aucauccauauaacuaaaagcca

SEQ ID NO: 52837 - RNA, 18 nt, Artificial Sequence
  Synthetic
  misc_feature (2)..(2): n is a, c, g, or u
  misc_feature (8)..(8): n is a, c, g, or u
  misc_feature (11)..(11): n is a, c, g, or u
cncugaanagnggaucca

SEQ ID NO: 52838 - RNA, 20 nt, Artificial Sequence
  Synthetic
  misc_feature (4)..(4): n is a, c, g, or u
  misc_feature (10)..(10): n is a, c, g, or u
  misc_feature (13)..(13): n is a, c, g, or u
ugcncugaanagnggaucca

SEQ ID NO: 52839 - RNA, 21 nt, Artificial Sequence
  Synthetic
  misc_feature (5)..(5): n is a, c, g, or u
  misc_feature (11)..(11): n is a, c, g, or u
  misc_feature (14)..(14): n is a, c, g, or u
uugcncugaanagnggaucca

SEQ ID NO: 52840 - RNA, 22 nt, Artificial Sequence
  Synthetic
  misc_feature (6)..(6): n is a, c, g, or u
  misc_feature (12)..(12): n is a, c, g, or u
  misc_feature (15)..(15): n is a, c, g, or u
uuugcncugaanagnggaucca

SEQ ID NO: 52841 - RNA, 23 nt, Artificial Sequence
  Synthetic
  misc_feature (7)..(7): n is a, c, g, or u
  misc_feature (13)..(13): n is a, c, g, or u
  misc_feature (16)..(16): n is a, c, g, or u
auuugcncugaanagnggaucca

SEQ ID NO: 52842 - RNA, 24 nt, Artificial Sequence
  Synthetic
  misc_feature (8)..(8): n is a, c, g, or u
  misc_feature (14)..(14): n is a, c, g, or u
  misc_feature (17)..(17): n is a, c, g, or u
aauuugcncugaanagnggaucca

SEQ ID NO: 52843 - RNA, 18 nt, Artificial Sequence
  Synthetic
ucccaccuuaugagucca

SEQ ID NO: 52844 - RNA, 19 nt, Artificial Sequence
  Synthetic
uucccaccuuaugagucca

SEQ ID NO: 52845 - RNA, 20 nt, Artificial Sequence
  Synthetic
uuucccaccuuaugagucca

SEQ ID NO: 52846 - RNA, 21 nt, Artificial Sequence
  Synthetic
  misc_feature (1)..(1): n is a, c, g, or u
nuuucccaccuuaugagucca

SEQ ID NO: 52847 - RNA, 22 nt, Artificial Sequence
  Synthetic
  misc_feature (2)..(2): n is a, c, g, or u
anuuucccaccuuaugagucca

SEQ ID NO: 52848 - RNA, 23 nt, Artificial Sequence
  Synthetic
  misc_feature (3)..(3): n is a, c, g, or u
aanuuucccaccuuaugagucca

SEQ ID NO: 52849 - RNA, 24 nt, Artificial Sequence
  Synthetic
  misc_feature (4)..(4): n is a, c, g, or u
aaanuuucccaccuuaugagucca

SEQ ID NO: 52850 - RNA, 18 nt, Artificial Sequence
  Synthetic
  misc_feature (3)..(3): n is a, c, g, or u
  misc_feature (7)..(7): n is a, c, g, or u
  misc_feature (10)..(10): n is a, c, g, or u
  misc_feature (13)..(13): n is a, c, g, or u
uanaaunccngcnuucca

SEQ ID NO: 52851 - RNA, 19 nt, Artificial Sequence
  Synthetic
  misc_feature (4)..(4): n is a, c, g, or u
  misc_feature (8)..(8): n is a, c, g, or u
  misc_feature (11)..(11): n is a, c, g, or u
  misc_feature (14)..(14): n is a, c, g, or u
auanaaunccngcnuucca

SEQ ID NO: 52852 - RNA, 20 nt, Artificial Sequence
  Synthetic
  misc_feature (5)..(5): n is a, c, g, or u
  misc_feature (9)..(9): n is a, c, g, or u
  misc_feature (12)..(12): n is a, c, g, or u
  misc_feature (15)..(15): n is a, c, g, or u
uauanaaunccngcnuucca

SEQ ID NO: 52853 - RNA, 21 nt, Artificial Sequence
  Synthetic
  misc_feature (6)..(6): n is a, c, g, or u
  misc_feature (10)..(10): n is a, c, g, or u
  misc_feature (13)..(13): n is a, c, g, or u
  misc_feature (16)..(16): n is a, c, g, or u
auauanaaunccngcnuucca

SEQ ID NO: 52854 - RNA, 22 nt, Artificial Sequence
  Synthetic
  misc_feature (7)..(7): n is a, c, g, or u
  misc_feature (11)..(11): n is a, c, g, or u
  misc_feature (14)..(14): n is a, c, g, or u
  misc_feature (17)..(17): n is a, c, g, or u
uauauanaaunccngcnuucca

SEQ ID NO: 52855 - RNA, 23 nt, Artificial Sequence
  Synthetic
  misc_feature (8)..(8): n is a, c, g, or u
  misc_feature (12)..(12): n is a, c, g, or u
  misc_feature (15)..(15): n is a, c, g, or u
  misc_feature (18)..(18): n is a, c, g, or u
uuauauanaaunccngcnuucca

SEQ ID NO: 52856 - RNA, 24 nt, Artificial Sequence
  Synthetic
  misc_feature (9)..(9): n is a, c, g, or u
  misc_feature (13)..(13): n is a, c, g, or u
  misc_feature (16)..(16): n is a, c, g, or u
  misc_feature (19)..(19): n is a, c, g, or u
cuuauauanaaunccngcnuucca

SEQ ID NO: 52857 - RNA, 18 nt, Artificial Sequence
  Synthetic
  misc_feature (1)..(1): n is a, c, g, or u
ncguugacaaacuuucca

SEQ ID NO: 52858 - RNA, 19 nt, Artificial Sequence
  Synthetic
  misc_feature (2)..(2): n is a, c, g, or u
uncguugacaaacuuucca

SEQ ID NO: 52859 - RNA, 20 nt, Artificial Sequence
  Synthetic
  misc_feature (3)..(3): n is a, c, g, or u
auncguugacaaacuuucca

SEQ ID NO: 52860 - RNA, 21 nt, Artificial Sequence
  Synthetic
  misc_feature (4)..(4): n is a, c, g, or u
aauncguugacaaacuuucca

SEQ ID NO: 52861 - RNA, 22 nt, Artificial Sequence
  Synthetic
  misc_feature (5)..(5): n is a, c, g, or u
caauncguugacaaacuuucca

SEQ ID NO: 52862 - RNA, 23 nt, Artificial Sequence
  Synthetic
  misc_feature (6)..(6): n is a, c, g, or u
acaauncguugacaaacuuucca

SEQ ID NO: 52863 - RNA, 24 nt, Artificial Sequence
  Synthetic
  misc_feature (7)..(7): n is a, c, g, or u
cacaauncguugacaaacuuucca

SEQ ID NO: 52864 - RNA, 18 nt, Artificial Sequence
  Synthetic
ucuuccaaaaguaaggca

SEQ ID NO: 52865 - RNA, 19 nt, Artificial Sequence
  Synthetic
cucuuccaaaaguaaggca

SEQ ID NO: 52866 - RNA, 20 nt, Artificial Sequence
  Synthetic
ucucuuccaaaaguaaggca

SEQ ID NO: 52867 - RNA, 21 nt, Artificial Sequence
  Synthetic
uucucuuccaaaaguaaggca

SEQ ID NO: 52868 - RNA, 22 nt, Artificial Sequence
  Synthetic
uuucucuuccaaaaguaaggca

SEQ ID NO: 52869 - RNA, 24 nt, Artificial Sequence
  Synthetic
uguuucucuuccaaaaguaaggca

SEQ ID NO: 52870 - RNA, 19 nt, Artificial Sequence
  Synthetic
  misc_feature (9)..(9): n is a, c, g, or u
uguggauangauaggggca

SEQ ID NO: 52871 - RNA, 21 nt, Artificial Sequence
  Synthetic
  misc_feature (11)..(11): n is a, c, g, or u
aguguggauangauaggggca

SEQ ID NO: 52872 - RNA, 22 nt, Artificial Sequence
  Synthetic
  misc_feature (12)..(12): n is a, c, g, or u
aaguguggauangauaggggca

SEQ ID NO: 52873 - RNA, 18 nt, Artificial Sequence
  Synthetic
cgagcgaaacaagcugca

SEQ ID NO: 52874 - RNA, 20 nt, Artificial Sequence
  Synthetic
ugcgagcgaaacaagcugca

SEQ ID NO: 52875 - RNA, 18 nt, Artificial Sequence
  Synthetic
  misc_feature (7)..(7): n is a, c, g, or u
augaaunucaggaaaaga

SEQ ID NO: 52876 - RNA, 19 nt, Artificial Sequence
  Synthetic
  misc_feature (8)..(8): n is a, c, g, or u
aaugaaunucaggaaaaga

SEQ ID NO: 52877 - RNA, 20 nt, Artificial Sequence
  Synthetic
  misc_feature (9)..(9): n is a, c, g, or u
aaaugaaunucaggaaaaga

SEQ ID NO: 52878 - RNA, 21 nt, Artificial Sequence
  Synthetic
  misc_feature (1)..(1): n is a, c, g, or u
  misc_feature (10)..(10): n is a, c, g, or u
naaaugaaunucaggaaaaga

SEQ ID NO: 52879 - RNA, 23 nt, Artificial Sequence
  Synthetic
  misc_feature (3)..(3): n is a, c, g, or u
  misc_feature (12)..(12): n is a, c, g, or u
ugnaaaugaaunucaggaaaaga

SEQ ID NO: 52880 - RNA, 24 nt, Artificial Sequence
  Synthetic
  misc_feature (4)..(4): n is a, c, g, or u
  misc_feature (13)..(13): n is a, c, g, or u
augnaaaugaaunucaggaaaaga

SEQ ID NO: 52881 - RNA, 19 nt, Artificial Sequence
  Synthetic
agauugaugaugugagaga

SEQ ID NO: 52882 - RNA, 20 nt, Artificial Sequence
  Synthetic
aagauugaugaugugagaga

SEQ ID NO: 52883 - RNA, 22 nt, Artificial Sequence
  Synthetic
agaagauugaugaugugagaga

SEQ ID NO: 52884 - RNA, 23 nt, Artificial Sequence
  Synthetic
  misc_feature (1)..(1): n is a, c, g, or u
nagaagauugaugaugugagaga

SEQ ID NO: 52885 - RNA, 24 nt, Artificial Sequence
  Synthetic
  misc_feature (2)..(2): n is a, c, g, or u
cnagaagauugaugaugugagaga

SEQ ID NO: 52886 - RNA, 18 nt, Artificial Sequence
  Synthetic
  misc_feature (1)..(1): n is a, c, g, or u
ncuucgucugcgaggcga

SEQ ID NO: 52887 - RNA, 19 nt, Artificial Sequence
  Synthetic
  misc_feature (2)..(2): n is a, c, g, or u
ancuucgucugcgaggcga

SEQ ID NO: 52888 - RNA, 19 nt, Artificial Sequence
  Synthetic
agggcugaagcggugucga

SEQ ID NO: 52889 - RNA, 20 nt, Artificial Sequence
  Synthetic
  misc_feature (1)..(1): n is a, c, g, or u
nagggcugaagcggugucga

SEQ ID NO: 52890 - RNA, 18 nt, Artificial Sequence
  Synthetic
  misc_feature (6)..(6): n is a, c, g, or u
  misc_feature (11)..(12): n is a, c, g, or u
uauuunguaannuuagga

SEQ ID NO: 52891 - RNA, 19 nt, Artificial Sequence
  Synthetic
  misc_feature (7)..(7): n is a, c, g, or u
  misc_feature (12)..(13): n is a, c, g, or u
auauuunguaannuuagga

SEQ ID NO: 52892 - RNA, 20 nt, Artificial Sequence
  Synthetic
  misc_feature (8)..(8): n is a, c, g, or u
  misc_feature (13)..(14): n is a, c, g, or u
aauauuunguaannuuagga

SEQ ID NO: 52893 - RNA, 21 nt, Artificial Sequence
  Synthetic
  misc_feature (9)..(9): n is a, c, g, or u
  misc_feature (14)..(15): n is a, c, g, or u
aaauauuunguaannuuagga

SEQ ID NO: 52894 - RNA, 22 nt, Artificial Sequence
  Synthetic
  misc_feature (10)..(10): n is a, c, g, or u
  misc_feature (15)..(16): n is a, c, g, or u
aaaauauuunguaannuuagga

SEQ ID NO: 52895 - RNA, 18 nt, Artificial Sequence
  Synthetic
uccagcugauggucugga

SEQ ID NO: 52896 - RNA, 19 nt, Artificial Sequence
  Synthetic
auccagcugauggucugga

SEQ ID NO: 52897 - RNA, 22 nt, Artificial Sequence
  Synthetic
  misc_feature (1)..(1): n is a, c, g, or u
nggauccagcugauggucugga

SEQ ID NO: 52898 - RNA, 24 nt, Artificial Sequence
  Synthetic
  misc_feature (3)..(3): n is a, c, g, or u
agnggauccagcugauggucugga

SEQ ID NO: 52899 - RNA, 18 nt, Artificial Sequence
  Synthetic
aguuuccggaagugugga

SEQ ID NO: 52900 - RNA, 19 nt, Artificial Sequence
  Synthetic
uaguuuccggaagugugga

SEQ ID NO: 52901 - RNA, 18 nt, Artificial Sequence
  Synthetic
  misc_feature (13)..(13): n is a, c, g, or u
uccuaaagcccangauga

SEQ ID NO: 52902 - RNA, 19 nt, Artificial Sequence
  Synthetic
  misc_feature (14)..(14): n is a, c, g, or u
uuccuaaagcccangauga

SEQ ID NO: 52903 - RNA, 20 nt, Artificial Sequence
  Synthetic
  misc_feature (15)..(15): n is a, c, g, or u
uuuccuaaagcccangauga

SEQ ID NO: 52904 - RNA, 21 nt, Artificial Sequence
  Synthetic
  misc_feature (16)..(16): n is a, c, g, or u
uuuuccuaaagcccangauga

SEQ ID NO: 52905 - RNA, 22 nt, Artificial Sequence
  Synthetic
  misc_feature (17)..(17): n is a, c, g, or u
auuuuccuaaagcccangauga

SEQ ID NO: 52906 - RNA, 23 nt, Artificial Sequence
  Synthetic
  misc_feature (18)..(18): n is a, c, g, or u
uauuuuccuaaagcccangauga

SEQ ID NO: 52907 - RNA, 18 nt, Artificial Sequence
  Synthetic
agcccuacgcaccacuga

SEQ ID NO: 52908 - RNA, 19 nt, Artificial Sequence
  Synthetic
aagcccuacgcaccacuga

SEQ ID NO: 52909 - RNA, 20 nt, Artificial Sequence
  Synthetic
aaagcccuacgcaccacuga

SEQ ID NO: 52910 - RNA, 20 nt, Artificial Sequence
  Synthetic
agggguccuaggaguccuga

SEQ ID NO: 52911 - RNA, 21 nt, Artificial Sequence
  Synthetic
cagggguccuaggaguccuga

SEQ ID NO: 52912 - RNA, 23 nt, Artificial Sequence
  Synthetic
agcagggguccuaggaguccuga

SEQ ID NO: 52913 - RNA, 18 nt, Artificial Sequence
  Synthetic
  misc_feature (6)..(6): n is a, c, g, or u
  misc_feature (10)..(10): n is a, c, g, or u
aucccnguanagggcuga

SEQ ID NO: 52914 - RNA, 19 nt, Artificial Sequence
  Synthetic
  misc_feature (7)..(7): n is a, c, g, or u
  misc_feature (11)..(11): n is a, c, g, or u
caucccnguanagggcuga

SEQ ID NO: 52915 - RNA, 21 nt, Artificial Sequence
  Synthetic
  misc_feature (9)..(9): n is a, c, g, or u
  misc_feature (13)..(13): n is a, c, g, or u
agcaucccnguanagggcuga

SEQ ID NO: 52916 - RNA, 22 nt, Artificial Sequence
  Synthetic
  misc_feature (10)..(10): n is a, c, g, or u
  misc_feature (14)..(14): n is a, c, g, or u
aagcaucccnguanagggcuga

SEQ ID NO: 52917 - RNA, 23 nt, Artificial Sequence
  Synthetic
  misc_feature (11)..(11): n is a, c, g, or u
  misc_feature (15)..(15): n is a, c, g, or u
aaagcaucccnguanagggcuga

SEQ ID NO: 52918 - RNA, 24 nt, Artificial Sequence
  Synthetic
  misc_feature (12)..(12): n is a, c, g, or u
  misc_feature (16)..(16): n is a, c, g, or u
uaaagcaucccnguanagggcuga

SEQ ID NO: 52919 - RNA, 18 nt, Artificial Sequence
  Synthetic
augauuaggcagagguga

SEQ ID NO: 52920 - RNA, 20 nt, Artificial Sequence
  Synthetic
agaugauuaggcagagguga

SEQ ID NO: 52921 - RNA, 21 nt, Artificial Sequence
  Synthetic
aagaugauuaggcagagguga

SEQ ID NO: 52922 - RNA, 22 nt, Artificial Sequence
  Synthetic
aaagaugauuaggcagagguga

SEQ ID NO: 52923 - RNA, 23 nt, Artificial Sequence
  Synthetic
aaaagaugauuaggcagagguga

SEQ ID NO: 52924 - RNA, 24 nt, Artificial Sequence
  Synthetic
caaaagaugauuaggcagagguga

SEQ ID NO: 52925 - RNA, 18 nt, Artificial Sequence
  Synthetic
  misc_feature (11)..(11): n is a, c, g, or u
  misc_feature (17)..(17): n is a, c, g, or u
uggaauuugcncugaana

SEQ ID NO: 52926 - RNA, 19 nt, Artificial Sequence
  Synthetic
  misc_feature (12)..(12): n is a, c, g, or u
  misc_feature (18)..(18): n is a, c, g, or u
cuggaauuugcncugaana

SEQ ID NO: 52927 - RNA, 21 nt, Artificial Sequence
  Synthetic
  misc_feature (14)..(14): n is a, c, g, or u
  misc_feature (20)..(20): n is a, c, g, or u
ugcuggaauuugcncugaana

SEQ ID NO: 52928 - RNA, 22 nt, Artificial Sequence
  Synthetic
  misc_feature (15)..(15): n is a, c, g, or u
  misc_feature (21)..(21): n is a, c, g, or u
cugcuggaauuugcncugaana

SEQ ID NO: 52929 - RNA, 23 nt, Artificial Sequence
  Synthetic
  misc_feature (16)..(16): n is a, c, g, or u
  misc_feature (22)..(22): n is a, c, g, or u
acugcuggaauuugcncugaana

SEQ ID NO: 52930 - RNA, 18 nt, Artificial Sequence
  Synthetic
  misc_feature (17)..(17): n is a, c, g, or u
agggcccccagucuucna

SEQ ID NO: 52931 - RNA, 19 nt, Artificial Sequence
  Synthetic
  misc_feature (18)..(18): n is a, c, g, or u
cagggcccccagucuucna

SEQ ID NO: 52932 - RNA, 21 nt, Artificial Sequence
  Synthetic
  misc_feature (20)..(20): n is a, c, g, or u
agcagggcccccagucuucna

SEQ ID NO: 52933 - RNA, 22 nt, Artificial Sequence
  Synthetic
  misc_feature (21)..(21): n is a, c, g, or u
uagcagggcccccagucuucna

SEQ ID NO: 52934 - RNA, 23 nt, Artificial Sequence
  Synthetic
  misc_feature (1)..(1): n is a, c, g, or u
  misc_feature (22)..(22): n is a, c, g, or u
nuagcagggcccccagucuucna

SEQ ID NO: 52935 - RNA, 24 nt, Artificial Sequence
  Synthetic
  misc_feature (2)..(2): n is a, c, g, or u
  misc_feature (23)..(23): n is a, c, g, or u
cnuagcagggcccccagucuucna

SEQ ID NO: 52936 - RNA, 18 nt, Artificial Sequence
  Synthetic
  misc_feature (1)..(1): n is a, c, g, or u
  misc_feature (14)..(14): n is a, c, g, or u
  misc_feature (17)..(17): n is a, c, g, or u
ngcccauguuagunuuna

SEQ ID NO: 52937 - RNA, 19 nt, Artificial Sequence
  Synthetic
  misc_feature (2)..(2): n is a, c, g, or u
  misc_feature (15)..(15): n is a, c, g, or u
  misc_feature (18)..(18): n is a, c, g, or u
angcccauguuagunuuna

SEQ ID NO: 52938 - RNA, 20 nt, Artificial Sequence
  Synthetic
  misc_feature (3)..(3): n is a, c, g, or u
  misc_feature (16)..(16): n is a, c, g, or u
  misc_feature (19)..(19): n is a, c, g, or u
uangcccauguuagunuuna

SEQ ID NO: 52939 - RNA, 21 nt, Artificial Sequence
  Synthetic
  misc_feature (4)..(4): n is a, c, g, or u
  misc_feature (17)..(17): n is a, c, g, or u
  misc_feature (20)..(20): n is a, c, g, or u
uuangcccauguuagunuuna

SEQ ID NO: 52940 - RNA, 22 nt, Artificial Sequence
  Synthetic
  misc_feature (5)..(5): n is a, c, g, or u
  misc_feature (18)..(18): n is a, c, g, or u
  misc_feature (21)..(21): n is a, c, g, or u
uuuangcccauguuagunuuna

SEQ ID NO: 52941 - RNA, 23 nt, Artificial Sequence
  Synthetic
  misc_feature (1)..(1): n is a, c, g, or u
  misc_feature (6)..(6): n is a, c, g, or u
  misc_feature (19)..(19): n is a, c, g, or u
  misc_feature (22)..(22): n is a, c, g, or u
nuuuangcccauguuagunuuna

SEQ ID NO: 52942 - RNA, 24 nt, Artificial Sequence
  Synthetic
  misc_feature (2)..(2): n is a, c, g, or u
  misc_feature (7)..(7): n is a, c, g, or u
  misc_feature (20)..(20): n is a, c, g, or u
  misc_feature (23)..(23): n is a, c, g, or u
unuuuangcccauguuagunuuna

SEQ ID NO: 52943 - RNA, 18 nt, Artificial Sequence
  Synthetic
  misc_feature (11)..(11): n is a, c, g, or u
ccucccagucnuuaaaua

SEQ ID NO: 52944 - RNA, 19 nt, Artificial Sequence
  Synthetic
  misc_feature (12)..(12): n is a, c, g, or u
uccucccagucnuuaaaua

SEQ ID NO: 52945 - RNA, 20 nt, Artificial Sequence
  Synthetic
  misc_feature (13)..(13): n is a, c, g, or u
cuccucccagucnuuaaaua

SEQ ID NO: 52946 - RNA, 21 nt, Artificial Sequence
  Synthetic
  misc_feature (1)..(1): n is a, c, g, or u
  misc_feature (14)..(14): n is a, c, g, or u
ncuccucccagucnuuaaaua

SEQ ID NO: 52947 - RNA, 22 nt, Artificial Sequence
  Synthetic
  misc_feature (2)..(2): n is a, c, g, or u
  misc_feature (15)..(15): n is a, c, g, or u
ancuccucccagucnuuaaaua

SEQ ID NO: 52948 - RNA, 23 nt, Artificial Sequence
  Synthetic
  misc_feature (3)..(3): n is a, c, g, or u
  misc_feature (16)..(16): n is a, c, g, or u
cancuccucccagucnuuaaaua

SEQ ID NO: 52949 - RNA, 24 nt, Artificial Sequence
  Synthetic
  misc_feature (4)..(4): n is a, c, g, or u
  misc_feature (17)..(17): n is a, c, g, or u
ccancuccucccagucnuuaaaua

SEQ ID NO: 52950 - RNA, 18 nt, Artificial Sequence
  Synthetic
cagauuuggcccccaaua

SEQ ID NO: 52951 - RNA, 19 nt, Artificial Sequence
  Synthetic
acagauuuggcccccaaua

SEQ ID NO: 52952 - RNA, 20 nt, Artificial Sequence
  Synthetic
cacagauuuggcccccaaua

SEQ ID NO: 52953 - RNA, 22 nt, Artificial Sequence
  Synthetic
ugcacagauuuggcccccaaua

SEQ ID NO: 52954 - RNA, 23 nt, Artificial Sequence
  Synthetic
cugcacagauuuggcccccaaua

SEQ ID NO: 52955 - RNA, 18 nt, Artificial Sequence
  Synthetic
  misc_feature (1)..(1): n is a, c, g, or u
  misc_feature (3)..(3): n is a, c, g, or u
  misc_feature (9)..(9): n is a, c, g, or u
  misc_feature (11)..(11): n is a, c, g, or u
nanaaucungnuggcaua

SEQ ID NO: 52956 - RNA, 19 nt, Artificial Sequence
  Synthetic
  misc_feature (2)..(2): n is a, c, g, or u
  misc_feature (4)..(4): n is a, c, g, or u
  misc_feature (10)..(10): n is a, c, g, or u
  misc_feature (12)..(12): n is a, c, g, or u
ananaaucungnuggcaua

SEQ ID NO: 52957 - RNA, 22 nt, Artificial Sequence
  Synthetic
  misc_feature (5)..(5): n is a, c, g, or u
  misc_feature (7)..(7): n is a, c, g, or u
  misc_feature (13)..(13): n is a, c, g, or u
  misc_feature (15)..(15): n is a, c, g, or u
aggananaaucungnuggcaua

SEQ ID NO: 52958 - RNA, 23 nt, Artificial Sequence
  Synthetic
  misc_feature (6)..(6): n is a, c, g, or u
  misc_feature (8)..(8): n is a, c, g, or u
  misc_feature (14)..(14): n is a, c, g, or u
  misc_feature (16)..(16): n is a, c, g, or u
uaggananaaucungnuggcaua

SEQ ID NO: 52959 - RNA, 24 nt, Artificial Sequence
  Synthetic
  misc_feature (7)..(7): n is a, c, g, or u
  misc_feature (9)..(9): n is a, c, g, or u
  misc_feature (15)..(15): n is a, c, g, or u
  misc_feature (17)..(17): n is a, c, g, or u
uuaggananaaucungnuggcaua

SEQ ID NO: 52960 - RNA, 18 nt, Artificial Sequence
  Synthetic
uguggauucucucuuaua

SEQ ID NO: 52961 - RNA, 20 nt, Artificial Sequence
  Synthetic
cguguggauucucucuuaua

SEQ ID NO: 52962 - RNA, 18 nt, Artificial Sequence
  Synthetic
  misc_feature (9)..(10): n is a, c, g, or u
acccgggunnucccccua

SEQ ID NO: 52963 - RNA, 19 nt, Artificial Sequence
  Synthetic
  misc_feature (10)..(11): n is a, c, g, or u
cacccgggunnucccccua

SEQ ID NO: 52964 - RNA, 20 nt, Artificial Sequence
  Synthetic
  misc_feature (11)..(12): n is a, c, g, or u
acacccgggunnucccccua

SEQ ID NO: 52965 - RNA, 23 nt, Artificial Sequence
  Synthetic
  misc_feature (14)..(15): n is a, c, g, or u
aggacacccgggunnucccccua

SEQ ID NO: 52966 - RNA, 24 nt, Artificial Sequence
  Synthetic
  misc_feature (15)..(16): n is a, c, g, or u
caggacacccgggunnucccccua

SEQ ID NO: 52967 - RNA, 20 nt, Artificial Sequence
  Synthetic
uggaggacaggagguuggua

SEQ ID NO: 52968 - RNA, 21 nt, Artificial Sequence
  Synthetic
uuggaggacaggagguuggua

SEQ ID NO: 52969 - RNA, 23 nt, Artificial Sequence
  Synthetic
aguuggaggacaggagguuggua

SEQ ID NO: 52970 - RNA, 24 nt, Artificial Sequence
  Synthetic
aaguuggaggacaggagguuggua

SEQ ID NO: 52971 - RNA, 18 nt, Artificial Sequence
  Synthetic
caggaaaagaaggaguua

SEQ ID NO: 52972 - RNA, 19 nt, Artificial Sequence
  Synthetic
ucaggaaaagaaggaguua

SEQ ID NO: 52973 - RNA, 20 nt, Artificial Sequence
  Synthetic
  misc_feature (1)..(1): n is a, c, g, or u
nucaggaaaagaaggaguua

SEQ ID NO: 52974 - RNA, 21 nt, Artificial Sequence
  Synthetic
  misc_feature (2)..(2): n is a, c, g, or u
unucaggaaaagaaggaguua

SEQ ID NO: 52975 - RNA, 22 nt, Artificial Sequence
  Synthetic
  misc_feature (3)..(3): n is a, c, g, or u
aunucaggaaaagaaggaguua

SEQ ID NO: 52976 - RNA, 23 nt, Artificial Sequence
  Synthetic
  misc_feature (4)..(4): n is a, c, g, or u
aaunucaggaaaagaaggaguua

SEQ ID NO: 52977 - RNA, 18 nt, Artificial Sequence
  Synthetic
uaacagaaaauugguaac

SEQ ID NO: 52978 - RNA, 19 nt, Artificial Sequence
  Synthetic
auaacagaaaauugguaac

SEQ ID NO: 52979 - RNA, 21 nt, Artificial Sequence
  Synthetic
agauaacagaaaauugguaac

SEQ ID NO: 52980 - RNA, 22 nt, Artificial Sequence
  Synthetic
cagauaacagaaaauugguaac

SEQ ID NO: 52981 - RNA, 23 nt, Artificial Sequence
  Synthetic
acagauaacagaaaauugguaac

SEQ ID NO: 52982 - RNA, 24 nt, Artificial Sequence
  Synthetic
cacagauaacagaaaauugguaac

SEQ ID NO: 52983 - RNA, 19 nt, Artificial Sequence
  Synthetic
cgaauuuuggccaggacac

SEQ ID NO: 52984 - RNA, 21 nt, Artificial Sequence
  Synthetic
ugcgaauuuuggccaggacac

SEQ ID NO: 52985 - RNA, 22 nt, Artificial Sequence
  Synthetic
cugcgaauuuuggccaggacac

SEQ ID NO: 52986 - RNA, 23 nt, Artificial Sequence
  Synthetic
acugcgaauuuuggccaggacac

SEQ ID NO: 52987 - RNA, 20 nt, Artificial Sequence
  Synthetic
uggaucggcagaggagccac

SEQ ID NO: 52988 - RNA, 18 nt, Artificial Sequence
  Synthetic
  misc_feature (1)..(1): n is a, c, g, or u
  misc_feature (4)..(4): n is a, c, g, or u
  misc_feature (6)..(7): n is a, c, g, or u
ncuncnnggggcguucac

SEQ ID NO: 52989 - RNA, 19 nt, Artificial Sequence
  Synthetic
  misc_feature (2)..(2): n is a, c, g, or u
  misc_feature (5)..(5): n is a, c, g, or u
  misc_feature (7)..(8): n is a, c, g, or u
ancuncnnggggcguucac

SEQ ID NO: 52990 - RNA, 20 nt, Artificial Sequence
  Synthetic
  misc_feature (3)..(3): n is a, c, g, or u
  misc_feature (6)..(6): n is a, c, g, or u
  misc_feature (8)..(9): n is a, c, g, or u
aancuncnnggggcguucac

SEQ ID NO: 52991 - RNA, 21 nt, Artificial Sequence
  Synthetic
  misc_feature (4)..(4): n is a, c, g, or u
  misc_feature (7)..(7): n is a, c, g, or u
  misc_feature (9)..(10): n is a, c, g, or u
caancuncnnggggcguucac

SEQ ID NO: 52992 - RNA, 24 nt, Artificial Sequence
  Synthetic
  misc_feature (7)..(7): n is a, c, g, or u
  misc_feature (10)..(10): n is a, c, g, or u
  misc_feature (12)..(13): n is a, c, g, or u
uggcaancuncnnggggcguucac

SEQ ID NO: 52993 - RNA, 18 nt, Artificial Sequence
  Synthetic
ucuuagagguggagagac

SEQ ID NO: 52994 - RNA, 19 nt, Artificial Sequence
  Synthetic
cucuuagagguggagagac

SEQ ID NO: 52995 - RNA, 20 nt, Artificial Sequence
  Synthetic
ucucuuagagguggagagac

SEQ ID NO: 52996 - RNA, 22 nt, Artificial Sequence
  Synthetic
ugucucuuagagguggagagac

SEQ ID NO: 52997 - RNA, 24 nt, Artificial Sequence
  Synthetic
  misc_feature (1)..(1): n is a, c, g, or u
ngugucucuuagagguggagagac

SEQ ID NO: 52998 - RNA, 20 nt, Artificial Sequence
  Synthetic
aggacaaacgggcaacauac

SEQ ID NO: 52999 - RNA, 22 nt, Artificial Sequence
  Synthetic
agaggacaaacgggcaacauac

SEQ ID NO: 53000 - RNA, 23 nt, Artificial Sequence
  Synthetic
uagaggacaaacgggcaacauac

SEQ ID NO: 53001 - RNA, 24 nt, Artificial Sequence
  Synthetic
  misc_feature (1)..(1): n is a, c, g, or u
nuagaggacaaacgggcaacauac

SEQ ID NO: 53002 - RNA, 18 nt, Artificial Sequence
  Synthetic
aauugagagaaguccacc

SEQ ID NO: 53003 - RNA, 19 nt, Artificial Sequence
  Synthetic
aaauugagagaaguccacc

SEQ ID NO: 53004 - RNA, 20 nt, Artificial Sequence
  Synthetic
aaaauugagagaaguccacc

SEQ ID NO: 53005 - RNA, 18 nt, Artificial Sequence
  Synthetic
  misc_feature (5)..(5): n is a, c, g, or u
  misc_feature (8)..(8): n is a, c, g, or u
uuggnuuncucccggacc

SEQ ID NO: 53006 - RNA, 23 nt, Artificial Sequence
  Synthetic
  misc_feature (10)..(10): n is a, c, g, or u
  misc_feature (13)..(13): n is a, c, g, or u
ugggguuggnuuncucccggacc

SEQ ID NO: 53007 - RNA, 24 nt, Artificial Sequence
  Synthetic
  misc_feature (11)..(11): n is a, c, g, or u
  misc_feature (14)..(14): n is a, c, g, or u
cugggguuggnuuncucccggacc

SEQ ID NO: 53008 - RNA, 19 nt, Artificial Sequence
  Synthetic
  misc_feature (1)..(1): n is a, c, g, or u
  misc_feature (7)..(7): n is a, c, g, or u
nguauunaaauggauaccc

SEQ ID NO: 53009 - RNA, 20 nt, Artificial Sequence
  Synthetic
  misc_feature (2)..(2): n is a, c, g, or u
  misc_feature (8)..(8): n is a, c, g, or u
anguauunaaauggauaccc

SEQ ID NO: 53010 - RNA, 22 nt, Artificial Sequence
  Synthetic
  misc_feature (1)..(1): n is a, c, g, or u
  misc_feature (4)..(4): n is a, c, g, or u
  misc_feature (10)..(10): n is a, c, g, or u
nganguauunaaauggauaccc

SEQ ID NO: 53011 - RNA, 23 nt, Artificial Sequence
  Synthetic
  misc_feature (2)..(2): n is a, c, g, or u
  misc_feature (5)..(5): n is a, c, g, or u
  misc_feature (11)..(11): n is a, c, g, or u
unganguauunaaauggauaccc

SEQ ID NO: 53012 - RNA, 24 nt, Artificial Sequence
  Synthetic
  misc_feature (3)..(3): n is a, c, g, or u
  misc_feature (6)..(6): n is a, c, g, or u
  misc_feature (12)..(12): n is a, c, g, or u
uunganguauunaaauggauaccc

SEQ ID NO: 53013 - RNA, 18 nt, Artificial Sequence
  Synthetic
aauacagagcccuuaccc

SEQ ID NO: 53014 - RNA, 19 nt, Artificial Sequence
  Synthetic
aaauacagagcccuuaccc

SEQ ID NO: 53015 - RNA, 20 nt, Artificial Sequence
  Synthetic
aaaauacagagcccuuaccc

SEQ ID NO: 53016 - RNA, 19 nt, Artificial Sequence
  Synthetic
cgggcugaggcccacuccc

SEQ ID NO: 53017 - RNA, 20 nt, Artificial Sequence
  Synthetic
acgggcugaggcccacuccc

SEQ ID NO: 53018 - RNA, 19 nt, Artificial Sequence
  Synthetic
ugcuguagcucuuguuccc

SEQ ID NO: 53019 - RNA, 20 nt, Artificial Sequence
  Synthetic
augcuguagcucuuguuccc

SEQ ID NO: 53020 - RNA, 18 nt, Artificial Sequence
  Synthetic
agguauuuuccuaaagcc

SEQ ID NO: 53021 - RNA, 19 nt, Artificial Sequence
  Synthetic
uagguauuuuccuaaagcc

SEQ ID NO: 53022 - RNA, 20 nt, Artificial Sequence
  Synthetic
auagguauuuuccuaaagcc

SEQ ID NO: 53023 - RNA, 21 nt, Artificial Sequence
  Synthetic
cauagguauuuuccuaaagcc

SEQ ID NO: 53024 - RNA, 22 nt, Artificial Sequence
  Synthetic
ccauagguauuuuccuaaagcc

SEQ ID NO: 53025 - RNA, 23 nt, Artificial Sequence
  Synthetic
cccauagguauuuuccuaaagcc

SEQ ID NO: 53026 - RNA, 24 nt, Artificial Sequence
  Synthetic
ucccauagguauuuuccuaaagcc

SEQ ID NO: 53027 - RNA, 18 nt, Artificial Sequence
  Synthetic
  misc_feature (8)..(8): n is a, c, g, or u
cauguucnuagcagggcc

SEQ ID NO: 53028 - RNA, 19 nt, Artificial Sequence
  Synthetic
  misc_feature (9)..(9): n is a, c, g, or u
ccauguucnuagcagggcc

SEQ ID NO: 53029 - RNA, 20 nt, Artificial Sequence
  Synthetic
  misc_feature (10)..(10): n is a, c, g, or u
uccauguucnuagcagggcc

SEQ ID NO: 53030 - RNA, 18 nt, Artificial Sequence
  Synthetic
ugcugcacagauuuggcc

SEQ ID NO: 53031 - RNA, 19 nt, Artificial Sequence
  Synthetic
augcugcacagauuuggcc

SEQ ID NO: 53032 - RNA, 18 nt, Artificial Sequence
  Synthetic
  misc_feature (1)..(1): n is a, c, g, or u
  misc_feature (16)..(16): n is a, c, g, or u
ngcaaagcccaaaagncc

SEQ ID NO: 53033 - RNA, 19 nt, Artificial Sequence
  Synthetic
  misc_feature (2)..(2): n is a, c, g, or u
  misc_feature (17)..(17): n is a, c, g, or u
cngcaaagcccaaaagncc

SEQ ID NO: 53034 - RNA, 21 nt, Artificial Sequence
  Synthetic
  misc_feature (1)..(1): n is a, c, g, or u
  misc_feature (4)..(4): n is a, c, g, or u
  misc_feature (19)..(19): n is a, c, g, or u
ngcngcaaagcccaaaagncc

SEQ ID NO: 53035 - RNA, 24 nt, Artificial Sequence
  Synthetic
  misc_feature (1)..(1): n is a, c, g, or u
  misc_feature (4)..(4): n is a, c, g, or u
  misc_feature (7)..(7): n is a, c, g, or u
  misc_feature (22)..(22): n is a, c, g, or u
nggngcngcaaagcccaaaagncc

SEQ ID NO: 53036 - RNA, 18 nt, Artificial Sequence
  Synthetic
  misc_feature (6)..(6): n is a, c, g, or u
ugaccnuccugaaagucc

SEQ ID NO: 53037 - RNA, 19 nt, Artificial Sequence
  Synthetic
  misc_feature (7)..(7): n is a, c, g, or u
uugaccnuccugaaagucc

SEQ ID NO: 53038 - RNA, 20 nt, Artificial Sequence
  Synthetic
  misc_feature (8)..(8): n is a, c, g, or u
auugaccnuccugaaagucc

SEQ ID NO: 53039 - RNA, 21 nt, Artificial Sequence
  Synthetic
  misc_feature (1)..(1): n is a, c, g, or u
  misc_feature (9)..(9): n is a, c, g, or u
nauugaccnuccugaaagucc

SEQ ID NO: 53040 - RNA, 22 nt, Artificial Sequence
  Synthetic
  misc_feature (2)..(2): n is a, c, g, or u
  misc_feature (10)..(10): n is a, c, g, or u
unauugaccnuccugaaagucc

SEQ ID NO: 53041 - RNA, 18 nt, Artificial Sequence
  Synthetic
  misc_feature (3)..(3): n is a, c, g, or u
cangugcaguuuccgucc

SEQ ID NO: 53042 - RNA, 19 nt, Artificial Sequence
  Synthetic
  misc_feature (4)..(4): n is a, c, g, or u
acangugcaguuuccgucc

SEQ ID NO: 53043 - RNA, 20 nt, Artificial Sequence
  Synthetic
  misc_feature (5)..(5): n is a, c, g, or u
uacangugcaguuuccgucc

SEQ ID NO: 53044 - RNA, 21 nt, Artificial Sequence
  Synthetic
  misc_feature (6)..(6): n is a, c, g, or u
auacangugcaguuuccgucc

SEQ ID NO: 53045 - RNA, 22 nt, Artificial Sequence
  Synthetic
  misc_feature (7)..(7): n is a, c, g, or u
aauacangugcaguuuccgucc

SEQ ID NO: 53046 - RNA, 18 nt, Artificial Sequence
  Synthetic
aagaacuguuucucuucc

SEQ ID NO: 53047 - RNA, 19 nt, Artificial Sequence
  Synthetic
caagaacuguuucucuucc

SEQ ID NO: 53048 - RNA, 20 nt, Artificial Sequence
  Synthetic
ucaagaacuguuucucuucc

SEQ ID NO: 53049 - RNA, 21 nt, Artificial Sequence
  Synthetic
cucaagaacuguuucucuucc

SEQ ID NO: 53050 - RNA, 22 nt, Artificial Sequence
  Synthetic
acucaagaacuguuucucuucc

SEQ ID NO: 53051 - RNA, 23 nt, Artificial Sequence
  Synthetic
uacucaagaacuguuucucuucc

SEQ ID NO: 53052 - RNA, 24 nt, Artificial Sequence
  Synthetic
auacucaagaacuguuucucuucc

SEQ ID NO: 53053 - RNA, 18 nt, Artificial Sequence
  Synthetic
cuaacaacaguaguuucc

SEQ ID NO: 53054 - RNA, 19 nt, Artificial Sequence
  Synthetic
ucuaacaacaguaguuucc

SEQ ID NO: 53055 - RNA, 18 nt, Artificial Sequence
  Synthetic
auugcccacccaggaagc

SEQ ID NO: 53056 - RNA, 19 nt, Artificial Sequence
  Synthetic
uauugcccacccaggaagc

SEQ ID NO: 53057 - RNA, 20 nt, Artificial Sequence
  Synthetic
uuauugcccacccaggaagc

SEQ ID NO: 53058 - RNA, 21 nt, Artificial Sequence
  Synthetic
  misc_feature (1)..(1): n is a, c, g, or u
nuuauugcccacccaggaagc

SEQ ID NO: 53059 - RNA, 22 nt, Artificial Sequence
  Synthetic
  misc_feature (2)..(2): n is a, c, g, or u
anuuauugcccacccaggaagc

SEQ ID NO: 53060 - RNA, 23 nt, Artificial Sequence
  Synthetic
  misc_feature (3)..(3): n is a, c, g, or u
aanuuauugcccacccaggaagc

SEQ ID NO: 53061 - RNA, 24 nt, Artificial Sequence
  Synthetic
  misc_feature (4)..(4): n is a, c, g, or u
caanuuauugcccacccaggaagc

SEQ ID NO: 53062 - RNA, 18 nt, Artificial Sequence
  Synthetic
cauagagguuccuugagc

SEQ ID NO: 53063 - RNA, 19 nt, Artificial Sequence
  Synthetic
acauagagguuccuugagc

SEQ ID NO: 53064 - RNA, 20 nt, Artificial Sequence
  Synthetic
aacauagagguuccuugagc

SEQ ID NO: 53065 - RNA, 18 nt, Artificial Sequence
  Synthetic
ugaugaugugagagaggc

SEQ ID NO: 53066 - RNA, 19 nt, Artificial Sequence
  Synthetic
uugaugaugugagagaggc

SEQ ID NO: 53067 - RNA, 20 nt, Artificial Sequence
  Synthetic
auugaugaugugagagaggc

SEQ ID NO: 53068 - RNA, 22 nt, Artificial Sequence
  Synthetic
agauugaugaugugagagaggc

SEQ ID NO: 53069 - RNA, 23 nt, Artificial Sequence
  Synthetic
aagauugaugaugugagagaggc

SEQ ID NO: 53070 - RNA, 18 nt, Artificial Sequence
  Synthetic
aacaaaagaugauuaggc

SEQ ID NO: 53071 - RNA, 20 nt, Artificial Sequence
  Synthetic
ugaacaaaagaugauuaggc

SEQ ID NO: 53072 - RNA, 18 nt, Artificial Sequence
  Synthetic
  misc_feature (8)..(8): n is a, c, g, or u
agucccanucgggacugc

SEQ ID NO: 53073 - RNA, 19 nt, Artificial Sequence
  Synthetic
  misc_feature (9)..(9): n is a, c, g, or u
aagucccanucgggacugc

SEQ ID NO: 53074 - RNA, 18 nt, Artificial Sequence
  Synthetic
agggacucaagaugcugc

SEQ ID NO: 53075 - RNA, 19 nt, Artificial Sequence
  Synthetic
aagggacucaagaugcugc

SEQ ID NO: 53076 - RNA, 20 nt, Artificial Sequence
  Synthetic
aaagggacucaagaugcugc

SEQ ID NO: 53077 - RNA, 19 nt, Artificial Sequence
  Synthetic
  misc_feature (5)..(5): n is a, c, g, or u
agucnuuaaauacacaguc

SEQ ID NO: 53078 - RNA, 20 nt, Artificial Sequence
  Synthetic
  misc_feature (6)..(6): n is a, c, g, or u
cagucnuuaaauacacaguc

SEQ ID NO: 53079 - RNA, 21 nt, Artificial Sequence
  Synthetic
  misc_feature (7)..(7): n is a, c, g, or u
ccagucnuuaaauacacaguc

SEQ ID NO: 53080 - RNA, 22 nt, Artificial Sequence
  Synthetic
  misc_feature (8)..(8): n is a, c, g, or u
cccagucnuuaaauacacaguc

SEQ ID NO: 53081 - RNA, 23 nt, Artificial Sequence
  Synthetic
  misc_feature (9)..(9): n is a, c, g, or u
ucccagucnuuaaauacacaguc

SEQ ID NO: 53082 - RNA, 24 nt, Artificial Sequence
  Synthetic
  misc_feature (10)..(10): n is a, c, g, or u
cucccagucnuuaaauacacaguc

SEQ ID NO: 53083 - RNA, 19 nt, Artificial Sequence
  Synthetic
uggucccgugcuggugguc

SEQ ID NO: 53084 - RNA, 20 nt, Artificial Sequence
  Synthetic
auggucccgugcuggugguc

SEQ ID NO: 53085 - RNA, 18 nt, Artificial Sequence
  Synthetic
acagucuuugauguauuc

SEQ ID NO: 53086 - RNA, 19 nt, Artificial Sequence
  Synthetic
cacagucuuugauguauuc

SEQ ID NO: 53087 - RNA, 20 nt, Artificial Sequence
  Synthetic
acacagucuuugauguauuc

SEQ ID NO: 53088 - RNA, 21 nt, Artificial Sequence
  Synthetic
uacacagucuuugauguauuc

SEQ ID NO: 53089 - RNA, 22 nt, Artificial Sequence
  Synthetic
auacacagucuuugauguauuc

SEQ ID NO: 53090 - RNA, 23 nt, Artificial Sequence
  Synthetic
aauacacagucuuugauguauuc

SEQ ID NO: 53091 - RNA, 24 nt, Artificial Sequence
  Synthetic
aaauacacagucuuugauguauuc

SEQ ID NO: 53092 - RNA, 18 nt, Artificial Sequence
  Synthetic
acaagcugcaaggaguuc

SEQ ID NO: 53093 - RNA, 19 nt, Artificial Sequence
  Synthetic
aacaagcugcaaggaguuc

SEQ ID NO: 53094 - RNA, 20 nt, Artificial Sequence
  Synthetic
aaacaagcugcaaggaguuc

SEQ ID NO: 53095 - RNA, 22 nt, Artificial Sequence
  Synthetic
cgaaacaagcugcaaggaguuc

SEQ ID NO: 53096 - RNA, 24 nt, Artificial Sequence
  Synthetic
agcgaaacaagcugcaaggaguuc

SEQ ID NO: 53097 - RNA, 18 nt, Artificial Sequence
  Synthetic
  misc_feature (8)..(8): n is a, c, g, or u
cggggagnccgcguaaag

SEQ ID NO: 53098 - RNA, 19 nt, Artificial Sequence
  Synthetic
  misc_feature (9)..(9): n is a, c, g, or u
acggggagnccgcguaaag

SEQ ID NO: 53099 - RNA, 18 nt, Artificial Sequence
  Synthetic
  misc_feature (13)..(13): n is a, c, g, or u
cccccagucuucnagaag

SEQ ID NO: 53100 - RNA, 22 nt, Artificial Sequence
  Synthetic
  misc_feature (17)..(17): n is a, c, g, or u
agggcccccagucuucnagaag

SEQ ID NO: 53101 - RNA, 23 nt, Artificial Sequence
  Synthetic
  misc_feature (18)..(18): n is a, c, g, or u
cagggcccccagucuucnagaag

SEQ ID NO: 53102 - RNA, 18 nt, Artificial Sequence
  Synthetic
cauggugcuggugaacag

SEQ ID NO: 53103 - RNA, 20 nt, Artificial Sequence
  Synthetic
ugcauggugcuggugaacag

SEQ ID NO: 53104 - RNA, 18 nt, Artificial Sequence
  Synthetic
  misc_feature (5)..(5): n is a, c, g, or u
  misc_feature (14)..(14): n is a, c, g, or u
ccagnggauugggnacag

SEQ ID NO: 53105 - RNA, 19 nt, Artificial Sequence
  Synthetic
  misc_feature (6)..(6): n is a, c, g, or u
  misc_feature (15)..(15): n is a, c, g, or u
cccagnggauugggnacag

SEQ ID NO: 53106 - RNA, 20 nt, Artificial Sequence
  Synthetic
  misc_feature (7)..(7): n is a, c, g, or u
  misc_feature (16)..(16): n is a, c, g, or u
ucccagnggauugggnacag

SEQ ID NO: 53107 - RNA, 21 nt, Artificial Sequence
  Synthetic
  misc_feature (8)..(8): n is a, c, g, or u
  misc_feature (17)..(17): n is a, c, g, or u
aucccagnggauugggnacag

SEQ ID NO: 53108 - RNA, 22 nt, Artificial Sequence
  Synthetic
  misc_feature (9)..(9): n is a, c, g, or u
  misc_feature (18)..(18): n is a, c, g, or u
aaucccagnggauugggnacag

SEQ ID NO: 53109 - RNA, 24 nt, Artificial Sequence
  Synthetic
  misc_feature (11)..(11): n is a, c, g, or u
  misc_feature (20)..(20): n is a, c, g, or u
agaaucccagnggauugggnacag

SEQ ID NO: 53110 - RNA, 18 nt, Artificial Sequence
  Synthetic
aacuggagccaccagcag

SEQ ID NO: 53111 - RNA, 20 nt, Artificial Sequence
  Synthetic
ugaacuggagccaccagcag

SEQ ID NO: 53112 - RNA, 21 nt, Artificial Sequence
  Synthetic
cugaacuggagccaccagcag

SEQ ID NO: 53113 - RNA, 22 nt, Artificial Sequence
  Synthetic
  misc_feature (1)..(1): n is a, c, g, or u
ncugaacuggagccaccagcag

SEQ ID NO: 53114 - RNA, 23 nt, Artificial Sequence
  Synthetic
  misc_feature (2)..(2): n is a, c, g, or u
cncugaacuggagccaccagcag

SEQ ID NO: 53115 - RNA, 24 nt, Artificial Sequence
  Synthetic
  misc_feature (3)..(3): n is a, c, g, or u
ucncugaacuggagccaccagcag

SEQ ID NO: 53116 - RNA, 19 nt, Artificial Sequence
  Synthetic
agaagaugaggcauagcag

SEQ ID NO: 53117 - RNA, 20 nt, Artificial Sequence
  Synthetic
aagaagaugaggcauagcag

SEQ ID NO: 53118 - RNA, 19 nt, Artificial Sequence
  Synthetic
  misc_feature (9)..(10): n is a, c, g, or u
  misc_feature (12)..(12): n is a, c, g, or u
  misc_feature (14)..(15): n is a, c, g, or u
ugauuaacnncnunnucag

SEQ ID NO: 53119 - RNA, 20 nt, Artificial Sequence
  Synthetic
  misc_feature (10)..(11): n is a, c, g, or u
  misc_feature (13)..(13): n is a, c, g, or u
  misc_feature (15)..(16): n is a, c, g, or u
augauuaacnncnunnucag

SEQ ID NO: 53120 - RNA, 21 nt, Artificial Sequence
  Synthetic
  misc_feature (11)..(12): n is a, c, g, or u
  misc_feature (14)..(14): n is a, c, g, or u
  misc_feature (16)..(17): n is a, c, g, or u
aaugauuaacnncnunnucag

SEQ ID NO: 53121 - RNA, 22 nt, Artificial Sequence
  Synthetic
  misc_feature (12)..(13): n is a, c, g, or u
  misc_feature (15)..(15): n is a, c, g, or u
  misc_feature (17)..(18): n is a, c, g, or u
uaaugauuaacnncnunnucag

SEQ ID NO: 53122 - RNA, 23 nt, Artificial Sequence
  Synthetic
  misc_feature (13)..(14): n is a, c, g, or u
  misc_feature (16)..(16): n is a, c, g, or u
  misc_feature (18)..(19): n is a, c, g, or u
auaaugauuaacnncnunnucag

SEQ ID NO: 53123 - RNA, 24 nt, Artificial Sequence
  Synthetic
  misc_feature (14)..(15): n is a, c, g, or u
  misc_feature (17)..(17): n is a, c, g, or u
  misc_feature (19)..(20): n is a, c, g, or u
aauaaugauuaacnncnunnucag

SEQ ID NO: 53124 - RNA, 18 nt, Artificial Sequence
  Synthetic
ucagaaggcaaaaaagag

SEQ ID NO: 53125 - RNA, 19 nt, Artificial Sequence
  Synthetic
  misc_feature (1)..(1): n is a, c, g, or u
nucagaaggcaaaaaagag

SEQ ID NO: 53126 - RNA, 20 nt, Artificial Sequence
  Synthetic
  misc_feature (2)..(2): n is a, c, g, or u
anucagaaggcaaaaaagag

SEQ ID NO: 53127 - RNA, 21 nt, Artificial Sequence
  Synthetic
  misc_feature (3)..(3): n is a, c, g, or u
aanucagaaggcaaaaaagag

SEQ ID NO: 53128 - RNA, 23 nt, Artificial Sequence
  Synthetic
  misc_feature (5)..(5): n is a, c, g, or u
agaanucagaaggcaaaaaagag

SEQ ID NO: 53129 - RNA, 24 nt, Artificial Sequence
  Synthetic
  misc_feature (6)..(6): n is a, c, g, or u
aagaanucagaaggcaaaaaagag

SEQ ID NO: 53130 - RNA, 18 nt, Artificial Sequence
  Synthetic
uagcagcaggaugaagag

SEQ ID NO: 53131 - RNA, 19 nt, Artificial Sequence
  Synthetic
auagcagcaggaugaagag

SEQ ID NO: 53132 - RNA, 20 nt, Artificial Sequence
  Synthetic
cauagcagcaggaugaagag

SEQ ID NO: 53133 - RNA, 23 nt, Artificial Sequence
  Synthetic
aggcauagcagcaggaugaagag

SEQ ID NO: 53134 - RNA, 18 nt, Artificial Sequence
  Synthetic
  misc_feature (1)..(1): n is a, c, g, or u
nauacagaggcaugagag

SEQ ID NO: 53135 - RNA, 21 nt, Artificial Sequence
  Synthetic
  misc_feature (4)..(4): n is a, c, g, or u
aggnauacagaggcaugagag

SEQ ID NO: 53136 - RNA, 22 nt, Artificial Sequence
  Synthetic
  misc_feature (5)..(5): n is a, c, g, or u
caggnauacagaggcaugagag

SEQ ID NO: 53137 - RNA, 23 nt, Artificial Sequence
  Synthetic
  misc_feature (6)..(6): n is a, c, g, or u
acaggnauacagaggcaugagag

SEQ ID NO: 53138 - RNA, 24 nt, Artificial Sequence
  Synthetic
  misc_feature (7)..(7): n is a, c, g, or u
uacaggnauacagaggcaugagag

SEQ ID NO: 53139 - RNA, 18 nt, Artificial Sequence
  Synthetic
caaguuggaggacaggag

SEQ ID NO: 53140 - RNA, 19 nt, Artificial Sequence
  Synthetic
acaaguuggaggacaggag

SEQ ID NO: 53141 - RNA, 22 nt, Artificial Sequence
  Synthetic
aggacaaguuggaggacaggag

SEQ ID NO: 53142 - RNA, 23 nt, Artificial Sequence
  Synthetic
caggacaaguuggaggacaggag

SEQ ID NO: 53143 - RNA, 24 nt, Artificial Sequence
  Synthetic
ccaggacaaguuggaggacaggag

SEQ ID NO: 53144 - RNA, 19 nt, Artificial Sequence
  Synthetic
cgauugguggaagcaggag

SEQ ID NO: 53145 - RNA, 20 nt, Artificial Sequence
  Synthetic
ccgauugguggaagcaggag

SEQ ID NO: 53146 - RNA, 19 nt, Artificial Sequence
  Synthetic
agagaggcaauagucggag

SEQ ID NO: 53147 - RNA, 21 nt, Artificial Sequence
  Synthetic
ugagagaggcaauagucggag

SEQ ID NO: 53148 - RNA, 23 nt, Artificial Sequence
  Synthetic
ugugagagaggcaauagucggag

SEQ ID NO: 53149 - RNA, 24 nt, Artificial Sequence
  Synthetic
augugagagaggcaauagucggag

SEQ ID NO: 53150 - RNA, 18 nt, Artificial Sequence
  Synthetic
  misc_feature (4)..(4): n is a, c, g, or u
caanauagcuugccugag

SEQ ID NO: 53151 - RNA, 19 nt, Artificial Sequence
  Synthetic
  misc_feature (5)..(5): n is a, c, g, or u
acaanauagcuugccugag

SEQ ID NO: 53152 - RNA, 20 nt, Artificial Sequence
  Synthetic
  misc_feature (6)..(6): n is a, c, g, or u
cacaanauagcuugccugag

SEQ ID NO: 53153 - RNA, 21 nt, Artificial Sequence
  Synthetic
  misc_feature (1)..(1): n is a, c, g, or u
  misc_feature (7)..(7): n is a, c, g, or u
ncacaanauagcuugccugag

SEQ ID NO: 53154 - RNA, 22 nt, Artificial Sequence
  Synthetic
  misc_feature (2)..(2): n is a, c, g, or u
  misc_feature (8)..(8): n is a, c, g, or u
ancacaanauagcuugccugag

SEQ ID NO: 53155 - RNA, 23 nt, Artificial Sequence
  Synthetic
  misc_feature (3)..(3): n is a, c, g, or u
  misc_feature (9)..(9): n is a, c, g, or u
cancacaanauagcuugccugag

SEQ ID NO: 53156 - RNA, 24 nt, Artificial Sequence
  Synthetic
  misc_feature (4)..(4): n is a, c, g, or u
  misc_feature (10)..(10): n is a, c, g, or u
ccancacaanauagcuugccugag

SEQ ID NO: 53157 - RNA, 18 nt, Artificial Sequence
  Synthetic
ucccccuagaaaauugag

SEQ ID NO: 53158 - RNA, 19 nt, Artificial Sequence
  Synthetic
  misc_feature (1)..(1): n is a, c, g, or u
nucccccuagaaaauugag

SEQ ID NO: 53159 - RNA, 20 nt, Artificial Sequence
  Synthetic
  misc_feature (1)..(2): n is a, c, g, or u
nnucccccuagaaaauugag

SEQ ID NO: 53160 - RNA, 21 nt, Artificial Sequence
  Synthetic
  misc_feature (2)..(3): n is a, c, g, or u
unnucccccuagaaaauugag

SEQ ID NO: 53161 - RNA, 18 nt, Artificial Sequence
  Synthetic
  misc_feature (5)..(5): n is a, c, g, or u
  misc_feature (8)..(8): n is a, c, g, or u
  misc_feature (11)..(11): n is a, c, g, or u
  misc_feature (16)..(16): n is a, c, g, or u
uaaunccnuunuccanag

SEQ ID NO: 53162 - RNA, 19 nt, Artificial Sequence
  Synthetic
  misc_feature (6)..(6): n is a, c, g, or u
  misc_feature (9)..(9): n is a, c, g, or u
  misc_feature (12)..(12): n is a, c, g, or u
  misc_feature (17)..(17): n is a, c, g, or u
uuaaunccnuunuccanag

SEQ ID NO: 53163 - RNA, 20 nt, Artificial Sequence
  Synthetic
  misc_feature (7)..(7): n is a, c, g, or u
  misc_feature (10)..(10): n is a, c, g, or u
  misc_feature (13)..(13): n is a, c, g, or u
  misc_feature (18)..(18): n is a, c, g, or u
uuuaaunccnuunuccanag

SEQ ID NO: 53164 - RNA, 23 nt, Artificial Sequence
  Synthetic
  misc_feature (1)..(1): n is a, c, g, or u
  misc_feature (10)..(10): n is a, c, g, or u
  misc_feature (13)..(13): n is a, c, g, or u
  misc_feature (16)..(16): n is a, c, g, or u
  misc_feature (21)..(21): n is a, c, g, or u
ngguuuaaunccnuunuccanag

SEQ ID NO: 53165 - RNA, 24 nt, Artificial Sequence
  Synthetic
  misc_feature (2)..(2): n is a, c, g, or u
  misc_feature (11)..(11): n is a, c, g, or u
  misc_feature (14)..(14): n is a, c, g, or u
  misc_feature (17)..(17): n is a, c, g, or u
  misc_feature (22)..(22): n is a, c, g, or u
angguuuaaunccnuunuccanag

SEQ ID NO: 53166 - RNA, 18 nt, Artificial Sequence
  Synthetic
  misc_feature (1)..(1): n is a, c, g, or u
  misc_feature (4)..(4): n is a, c, g, or u
nuuncucccggaccgccg

SEQ ID NO: 53167 - RNA, 21 nt, Artificial Sequence
  Synthetic
  misc_feature (18)..(18): n is a, c, g, or u
aagcgaagugcacacggnccg

SEQ ID NO: 53168 - RNA, 23 nt, Artificial Sequence
  Synthetic
  misc_feature (20)..(20): n is a, c, g, or u
ugaagcgaagugcacacggnccg

SEQ ID NO: 53169 - RNA, 18 nt, Artificial Sequence
  Synthetic
  misc_feature (5)..(5): n is a, c, g, or u
  misc_feature (11)..(11): n is a, c, g, or u
cccgngagggnucguccg

SEQ ID NO: 53170 - RNA, 19 nt, Artificial Sequence
  Synthetic
  misc_feature (6)..(6): n is a, c, g, or u
  misc_feature (12)..(12): n is a, c, g, or u
ccccgngagggnucguccg

SEQ ID NO: 53171 - RNA, 20 nt, Artificial Sequence
  Synthetic
  misc_feature (1)..(1): n is a, c, g, or u
  misc_feature (7)..(7): n is a, c, g, or u
  misc_feature (13)..(13): n is a, c, g, or u
nccccgngagggnucguccg

SEQ ID NO: 53172 - RNA, 22 nt, Artificial Sequence
  Synthetic
  misc_feature (3)..(3): n is a, c, g, or u
  misc_feature (9)..(9): n is a, c, g, or u
  misc_feature (15)..(15): n is a, c, g, or u
cgnccccgngagggnucguccg

SEQ ID NO: 53173 - RNA, 24 nt, Artificial Sequence
  Synthetic
  misc_feature (5)..(5): n is a, c, g, or u
  misc_feature (11)..(11): n is a, c, g, or u
  misc_feature (17)..(17): n is a, c, g, or u
agcgnccccgngagggnucguccg

SEQ ID NO: 53174 - RNA, 18 nt, Artificial Sequence
  Synthetic
uccaaauucuuuauaagg

SEQ ID NO: 53175 - RNA, 19 nt, Artificial Sequence
  Synthetic
cuccaaauucuuuauaagg

SEQ ID NO: 53176 - RNA, 18 nt, Artificial Sequence
  Synthetic
  misc_feature (7)..(7): n is a, c, g, or u
cauccancgauagccagg

SEQ ID NO: 53177 - RNA, 19 nt, Artificial Sequence
  Synthetic
  misc_feature (8)..(8): n is a, c, g, or u
acauccancgauagccagg

SEQ ID NO: 53178 - RNA, 20 nt, Artificial Sequence
  Synthetic
  misc_feature (9)..(9): n is a, c, g, or u
cacauccancgauagccagg

SEQ ID NO: 53179 - RNA, 21 nt, Artificial Sequence
  Synthetic
  misc_feature (10)..(10): n is a, c, g, or u
acacauccancgauagccagg

SEQ ID NO: 53180 - RNA, 23 nt, Artificial Sequence
  Synthetic
  misc_feature (12)..(12): n is a, c, g, or u
agacacauccancgauagccagg

SEQ ID NO: 53181 - RNA, 24 nt, Artificial Sequence
  Synthetic
  misc_feature (13)..(13): n is a, c, g, or u
cagacacauccancgauagccagg

SEQ ID NO: 53182 - RNA, 19 nt, Artificial Sequence
  Synthetic
  misc_feature (4)..(4): n is a, c, g, or u
  misc_feature (11)..(11): n is a, c, g, or u
  misc_feature (16)..(16): n is a, c, g, or u
agunaggauunaaagnagg

SEQ ID NO: 53183 - RNA, 20 nt, Artificial Sequence
  Synthetic
  misc_feature (5)..(5): n is a, c, g, or u
  misc_feature (12)..(12): n is a, c, g, or u
  misc_feature (17)..(17): n is a, c, g, or u
cagunaggauunaaagnagg

SEQ ID NO: 53184 - RNA, 21 nt, Artificial Sequence
  Synthetic
  misc_feature (6)..(6): n is a, c, g, or u
  misc_feature (13)..(13): n is a, c, g, or u
  misc_feature (18)..(18): n is a, c, g, or u
ccagunaggauunaaagnagg

SEQ ID NO: 53185 - RNA, 22 nt, Artificial Sequence
  Synthetic
  misc_feature (7)..(7): n is a, c, g, or u
  misc_feature (14)..(14): n is a, c, g, or u
  misc_feature (19)..(19): n is a, c, g, or u
accagunaggauunaaagnagg

SEQ ID NO: 53186 - RNA, 23 nt, Artificial Sequence
  Synthetic
  misc_feature (8)..(8): n is a, c, g, or u
  misc_feature (15)..(15): n is a, c, g, or u
  misc_feature (20)..(20): n is a, c, g, or u
aaccagunaggauunaaagnagg

SEQ ID NO: 53187 - RNA, 24 nt, Artificial Sequence
  Synthetic
  misc_feature (9)..(9): n is a, c, g, or u
  misc_feature (16)..(16): n is a, c, g, or u
  misc_feature (21)..(21): n is a, c, g, or u
uaaccagunaggauunaaagnagg

SEQ ID NO: 53188 - RNA, 18 nt, Artificial Sequence
  Synthetic
  misc_feature (1)..(1): n is a, c, g, or u
  misc_feature (3)..(4): n is a, c, g, or u
  misc_feature (16)..(16): n is a, c, g, or u
nunnucaggauaauangg

SEQ ID NO: 53189 - RNA, 19 nt, Artificial Sequence
  Synthetic
  misc_feature (2)..(2): n is a, c, g, or u
  misc_feature (4)..(5): n is a, c, g, or u
  misc_feature (17)..(17): n is a, c, g, or u
cnunnucaggauaauangg

SEQ ID NO: 53190 - RNA, 20 nt, Artificial Sequence
  Synthetic
  misc_feature (1)..(1): n is a, c, g, or u
  misc_feature (3)..(3): n is a, c, g, or u
  misc_feature (5)..(6): n is a, c, g, or u
  misc_feature (18)..(18): n is a, c, g, or u
ncnunnucaggauaauangg

SEQ ID NO: 53191 - RNA, 21 nt, Artificial Sequence
  Synthetic
  misc_feature (1)..(2): n is a, c, g, or u
  misc_feature (4)..(4): n is a, c, g, or u
  misc_feature (6)..(7): n is a, c, g, or u
  misc_feature (19)..(19): n is a, c, g, or u
nncnunnucaggauaauangg

SEQ ID NO: 53192 - RNA, 22 nt, Artificial Sequence
  Synthetic
  misc_feature (2)..(3): n is a, c, g, or u
  misc_feature (5)..(5): n is a, c, g, or u
  misc_feature (7)..(8): n is a, c, g, or u
  misc_feature (20)..(20): n is a, c, g, or u
cnncnunnucaggauaauangg

SEQ ID NO: 53193 - RNA, 23 nt, Artificial Sequence
  Synthetic
  misc_feature (3)..(4): n is a, c, g, or u
  misc_feature (6)..(6): n is a, c, g, or u
  misc_feature (8)..(9): n is a, c, g, or u
  misc_feature (21)..(21): n is a, c, g, or u
acnncnunnucaggauaauangg

SEQ ID NO: 53194 - RNA, 24 nt, Artificial Sequence
  Synthetic
  misc_feature (4)..(5): n is a, c, g, or u
  misc_feature (7)..(7): n is a, c, g, or u
  misc_feature (9)..(10): n is a, c, g, or u
  misc_feature (22)..(22): n is a, c, g, or u
aacnncnunnucaggauaauangg

SEQ ID NO: 53195 - RNA, 18 nt, Artificial Sequence
  Synthetic
  misc_feature (16)..(16): n is a, c, g, or u
ugguggucuauaagcngg

SEQ ID NO: 53196 - RNA, 19 nt, Artificial Sequence
  Synthetic
  misc_feature (17)..(17): n is a, c, g, or u
uugguggucuauaagcngg

SEQ ID NO: 53197 - RNA, 20 nt, Artificial Sequence
  Synthetic
  misc_feature (18)..(18): n is a, c, g, or u
uuugguggucuauaagcngg

SEQ ID NO: 53198 - RNA, 18 nt, Artificial Sequence
  Synthetic
  misc_feature (17)..(17): n is a, c, g, or u
augggaugggaauacang

SEQ ID NO: 53199 - RNA, 20 nt, Artificial Sequence
  Synthetic
  misc_feature (19)..(19): n is a, c, g, or u
ugaugggaugggaauacang

SEQ ID NO: 53200 - RNA, 21 nt, Artificial Sequence
  Synthetic
  misc_feature (20)..(20): n is a, c, g, or u
augaugggaugggaauacang

SEQ ID NO: 53201 - RNA, 23 nt, Artificial Sequence
  Synthetic
  misc_feature (1)..(1): n is a, c, g, or u
  misc_feature (22)..(22): n is a, c, g, or u
ngaugaugggaugggaauacang

SEQ ID NO: 53202 - RNA, 24 nt, Artificial Sequence
  Synthetic
  misc_feature (2)..(2): n is a, c, g, or u
  misc_feature (23)..(23): n is a, c, g, or u
angaugaugggaugggaauacang

SEQ ID NO: 53203 - RNA, 18 nt, Artificial Sequence
  Synthetic
  misc_feature (11)..(11): n is a, c, g, or u
  misc_feature (17)..(17): n is a, c, g, or u
cccucggaucnaacagng

SEQ ID NO: 53204 - RNA, 19 nt, Artificial Sequence
  Synthetic
  misc_feature (12)..(12): n is a, c, g, or u
  misc_feature (18)..(18): n is a, c, g, or u
acccucggaucnaacagng

SEQ ID NO: 53205 - RNA, 20 nt, Artificial Sequence
  Synthetic
  misc_feature (13)..(13): n is a, c, g, or u
  misc_feature (19)..(19): n is a, c, g, or u
uacccucggaucnaacagng

SEQ ID NO: 53206 - RNA, 19 nt, Artificial Sequence
  Synthetic
  misc_feature (12)..(12): n is a, c, g, or u
  misc_feature (15)..(15): n is a, c, g, or u
  misc_feature (18)..(18): n is a, c, g, or u
agagcgguaugnuunggng

SEQ ID NO: 53207 - RNA, 21 nt, Artificial Sequence
  Synthetic
  misc_feature (14)..(14): n is a, c, g, or u
  misc_feature (17)..(17): n is a, c, g, or u
  misc_feature (20)..(20): n is a, c, g, or u
ugagagcgguaugnuunggng

SEQ ID NO: 53208 - RNA, 22 nt, Artificial Sequence
  Synthetic
  misc_feature (15)..(15): n is a, c, g, or u
  misc_feature (18)..(18): n is a, c, g, or u
  misc_feature (21)..(21): n is a, c, g, or u
cugagagcgguaugnuunggng

SEQ ID NO: 53209 - RNA, 23 nt, Artificial Sequence
  Synthetic
  misc_feature (16)..(16): n is a, c, g, or u
  misc_feature (19)..(19): n is a, c, g, or u
  misc_feature (22)..(22): n is a, c, g, or u
ccugagagcgguaugnuunggng

SEQ ID NO: 53210 - RNA, 18 nt, Artificial Sequence
  Synthetic
  misc_feature (11)..(11): n is a, c, g, or u
  misc_feature (17)..(17): n is a, c, g, or u
aaacuuuccanucaaung

SEQ ID NO: 53211 - RNA, 19 nt, Artificial Sequence
  Synthetic
  misc_feature (12)..(12): n is a, c, g, or u
  misc_feature (18)..(18): n is a, c, g, or u
caaacuuuccanucaaung

SEQ ID NO: 53212 - RNA, 20 nt, Artificial Sequence
  Synthetic
  misc_feature (13)..(13): n is a, c, g, or u
  misc_feature (19)..(19): n is a, c, g, or u
acaaacuuuccanucaaung

SEQ ID NO: 53213 - RNA, 22 nt, Artificial Sequence
  Synthetic
  misc_feature (15)..(15): n is a, c, g, or u
  misc_feature (21)..(21): n is a, c, g, or u
ugacaaacuuuccanucaaung

SEQ ID NO: 53214 - RNA, 23 nt, Artificial Sequence
  Synthetic
  misc_feature (16)..(16): n is a, c, g, or u
  misc_feature (22)..(22): n is a, c, g, or u
uugacaaacuuuccanucaaung

SEQ ID NO: 53215 - RNA, 18 nt, Artificial Sequence
  Synthetic
  misc_feature (3)..(3): n is a, c, g, or u
uanagggcugaagcggug

SEQ ID NO: 53216 - RNA, 20 nt, Artificial Sequence
  Synthetic
  misc_feature (1)..(1): n is a, c, g, or u
  misc_feature (5)..(5): n is a, c, g, or u
nguanagggcugaagcggug

SEQ ID NO: 53217 - RNA, 21 nt, Artificial Sequence
  Synthetic
  misc_feature (2)..(2): n is a, c, g, or u
  misc_feature (6)..(6): n is a, c, g, or u
cnguanagggcugaagcggug

SEQ ID NO: 53218 - RNA, 22 nt, Artificial Sequence
  Synthetic
  misc_feature (3)..(3): n is a, c, g, or u
  misc_feature (7)..(7): n is a, c, g, or u
ccnguanagggcugaagcggug

SEQ ID NO: 53219 - RNA, 23 nt, Artificial Sequence
  Synthetic
  misc_feature (4)..(4): n is a, c, g, or u
  misc_feature (8)..(8): n is a, c, g, or u
cccnguanagggcugaagcggug

SEQ ID NO: 53220 - RNA, 24 nt, Artificial Sequence
  Synthetic
  misc_feature (5)..(5): n is a, c, g, or u
  misc_feature (9)..(9): n is a, c, g, or u
ucccnguanagggcugaagcggug

SEQ ID NO: 53221 - RNA, 18 nt, Artificial Sequence
  Synthetic
  misc_feature (16)..(16): n is a, c, g, or u
uaaaguaugcaaauanug

SEQ ID NO: 53222 - RNA, 19 nt, Artificial Sequence
  Synthetic
  misc_feature (17)..(17): n is a, c, g, or u
auaaaguaugcaaauanug

SEQ ID NO: 53223 - RNA, 20 nt, Artificial Sequence
  Synthetic
  misc_feature (18)..(18): n is a, c, g, or u
cauaaaguaugcaaauanug

SEQ ID NO: 53224 - RNA, 21 nt, Artificial Sequence
  Synthetic
  misc_feature (19)..(19): n is a, c, g, or u
ccauaaaguaugcaaauanug

SEQ ID NO: 53225 - RNA, 22 nt, Artificial Sequence
  Synthetic
  misc_feature (20)..(20): n is a, c, g, or u
uccauaaaguaugcaaauanug

SEQ ID NO: 53226 - RNA, 23 nt, Artificial Sequence
  Synthetic
  misc_feature (21)..(21): n is a, c, g, or u
uuccauaaaguaugcaaauanug

SEQ ID NO: 53227 - RNA, 24 nt, Artificial Sequence
  Synthetic
  misc_feature (1)..(1): n is a, c, g, or u
  misc_feature (22)..(22): n is a, c, g, or u
nuuccauaaaguaugcaaauanug

SEQ ID NO: 53228 - RNA, 18 nt, Artificial Sequence
  Synthetic
  misc_feature (4)..(4): n is a, c, g, or u
  misc_feature (12)..(12): n is a, c, g, or u
  misc_feature (16)..(16): n is a, c, g, or u
acanucuuuganuuunug

SEQ ID NO: 53229 - RNA, 19 nt, Artificial Sequence
  Synthetic
  misc_feature (5)..(5): n is a, c, g, or u
  misc_feature (13)..(13): n is a, c, g, or u
  misc_feature (17)..(17): n is a, c, g, or u
aacanucuuuganuuunug

SEQ ID NO: 53230 - RNA, 20 nt, Artificial Sequence
  Synthetic
  misc_feature (6)..(6): n is a, c, g, or u
  misc_feature (14)..(14): n is a, c, g, or u
  misc_feature (18)..(18): n is a, c, g, or u
aaacanucuuuganuuunug

SEQ ID NO: 53231 - RNA, 21 nt, Artificial Sequence
  Synthetic
  misc_feature (7)..(7): n is a, c, g, or u
  misc_feature (15)..(15): n is a, c, g, or u
  misc_feature (19)..(19): n is a, c, g, or u
aaaacanucuuuganuuunug

SEQ ID NO: 53232 - RNA, 22 nt, Artificial Sequence
  Synthetic
  misc_feature (1)..(1): n is a, c, g, or u
  misc_feature (8)..(8): n is a, c, g, or u
  misc_feature (16)..(16): n is a, c, g, or u
  misc_feature (20)..(20): n is a, c, g, or u
naaaacanucuuuganuuunug

SEQ ID NO: 53233 - RNA, 23 nt, Artificial Sequence
  Synthetic
  misc_feature (2)..(2): n is a, c, g, or u
  misc_feature (9)..(9): n is a, c, g, or u
  misc_feature (17)..(17): n is a, c, g, or u
  misc_feature (21)..(21): n is a, c, g, or u
cnaaaacanucuuuganuuunug

SEQ ID NO: 53234 - RNA, 24 nt, Artificial Sequence
  Synthetic
  misc_feature (1)..(1): n is a, c, g, or u
  misc_feature (3)..(3): n is a, c, g, or u
  misc_feature (10)..(10): n is a, c, g, or u
  misc_feature (18)..(18): n is a, c, g, or u
  misc_feature (22)..(22): n is a, c, g, or u
ncnaaaacanucuuuganuuunug

SEQ ID NO: 53235 - RNA, 20 nt, Artificial Sequence
  Synthetic
aggcacagcuuggaggcuug

SEQ ID NO: 53236 - RNA, 21 nt, Artificial Sequence
  Synthetic
aaggcacagcuuggaggcuug

SEQ ID NO: 53237 - RNA, 22 nt, Artificial Sequence
  Synthetic
caaggcacagcuuggaggcuug

SEQ ID NO: 53238 - RNA, 23 nt, Artificial Sequence
  Synthetic
ccaaggcacagcuuggaggcuug

SEQ ID NO: 53239 - RNA, 24 nt, Artificial Sequence
  Synthetic
cccaaggcacagcuuggaggcuug

SEQ ID NO: 53240 - RNA, 20 nt, Artificial Sequence
  Synthetic
aggcagaggugaaaaaguug

SEQ ID NO: 53241 - RNA, 21 nt, Artificial Sequence
  Synthetic
uaggcagaggugaaaaaguug

SEQ ID NO: 53242 - RNA, 22 nt, Artificial Sequence
  Synthetic
uuaggcagaggugaaaaaguug

SEQ ID NO: 53243 - RNA, 23 nt, Artificial Sequence
  Synthetic
auuaggcagaggugaaaaaguug

SEQ ID NO: 53244 - RNA, 18 nt, Artificial Sequence
  Synthetic
uuggaggacaggagguug

SEQ ID NO: 53245 - RNA, 20 nt, Artificial Sequence
  Synthetic
aguuggaggacaggagguug

SEQ ID NO: 53246 - RNA, 19 nt, Artificial Sequence
  Synthetic
  misc_feature (13)..(14): n is a, c, g, or u
  misc_feature (16)..(16): n is a, c, g, or u
ugugaaaccacannanuug

SEQ ID NO: 53247 - RNA, 20 nt, Artificial Sequence
  Synthetic
  misc_feature (14)..(15): n is a, c, g, or u
  misc_feature (17)..(17): n is a, c, g, or u
augugaaaccacannanuug

SEQ ID NO: 53248 - RNA, 21 nt, Artificial Sequence
  Synthetic
  misc_feature (15)..(16): n is a, c, g, or u
  misc_feature (18)..(18): n is a, c, g, or u
aaugugaaaccacannanuug

SEQ ID NO: 53249 - RNA, 22 nt, Artificial Sequence
  Synthetic
  misc_feature (16)..(17): n is a, c, g, or u
  misc_feature (19)..(19): n is a, c, g, or u
aaaugugaaaccacannanuug

SEQ ID NO: 53250 - RNA, 18 nt, Artificial Sequence
  Synthetic
agaguugugcagguuuug

SEQ ID NO: 53251 - RNA, 19 nt, Artificial Sequence
  Synthetic
aagaguugugcagguuuug

SEQ ID NO: 53252 - RNA, 20 nt, Artificial Sequence
  Synthetic
caagaguugugcagguuuug

SEQ ID NO: 53253 - RNA, 22 nt, Artificial Sequence
  Synthetic
agcaagaguugugcagguuuug

SEQ ID NO: 53254 - RNA, 24 nt, Artificial Sequence
  Synthetic
ugagcaagaguugugcagguuuug

SEQ ID NO: 53255 - RNA, 18 nt, Artificial Sequence
  Synthetic
  misc_feature (18)..(18): n is a, c, g, or u
uauuuuccuaaagcccan

SEQ ID NO: 53256 - RNA, 21 nt, Artificial Sequence
  Synthetic
  misc_feature (21)..(21): n is a, c, g, or u
agguauuuuccuaaagcccan

SEQ ID NO: 53257 - RNA, 22 nt, Artificial Sequence
  Synthetic
  misc_feature (22)..(22): n is a, c, g, or u
uagguauuuuccuaaagcccan

SEQ ID NO: 53258 - RNA, 23 nt, Artificial Sequence
  Synthetic
  misc_feature (23)..(23): n is a, c, g, or u
auagguauuuuccuaaagcccan

SEQ ID NO: 53259 - RNA, 24 nt, Artificial Sequence
  Synthetic
  misc_feature (24)..(24): n is a, c, g, or u
cauagguauuuuccuaaagcccan

SEQ ID NO: 53260 - RNA, 18 nt, Artificial Sequence
  Synthetic
  misc_feature (8)..(9): n is a, c, g, or u
  misc_feature (18)..(18): n is a, c, g, or u
ccccuucnngucguugan

SEQ ID NO: 53261 - RNA, 20 nt, Artificial Sequence
  Synthetic
  misc_feature (10)..(11): n is a, c, g, or u
  misc_feature (20)..(20): n is a, c, g, or u
ugccccuucnngucguugan

SEQ ID NO: 53262 - RNA, 21 nt, Artificial Sequence
  Synthetic
  misc_feature (11)..(12): n is a, c, g, or u
  misc_feature (21)..(21): n is a, c, g, or u
augccccuucnngucguugan

SEQ ID NO: 53263 - RNA, 22 nt, Artificial Sequence
  Synthetic
  misc_feature (12)..(13): n is a, c, g, or u
  misc_feature (22)..(22): n is a, c, g, or u
caugccccuucnngucguugan

SEQ ID NO: 53264 - RNA, 23 nt, Artificial Sequence
  Synthetic
  misc_feature (13)..(14): n is a, c, g, or u
  misc_feature (23)..(23): n is a, c, g, or u
ccaugccccuucnngucguugan

SEQ ID NO: 53265 - RNA, 24 nt, Artificial Sequence
  Synthetic
  misc_feature (14)..(15): n is a, c, g, or u
  misc_feature (24)..(24): n is a, c, g, or u
cccaugccccuucnngucguugan

SEQ ID NO: 53266 - RNA, 18 nt, Artificial Sequence
  Synthetic
  misc_feature (5)..(5): n is a, c, g, or u
  misc_feature (18)..(18): n is a, c, g, or u
cccancuccucccagucn

SEQ ID NO: 53267 - RNA, 19 nt, Artificial Sequence
  Synthetic
  misc_feature (6)..(6): n is a, c, g, or u
  misc_feature (19)..(19): n is a, c, g, or u
ccccancuccucccagucn

SEQ ID NO: 53268 - RNA, 20 nt, Artificial Sequence
  Synthetic
  misc_feature (7)..(7): n is a, c, g, or u
  misc_feature (20)..(20): n is a, c, g, or u
cccccancuccucccagucn

SEQ ID NO: 53269 - RNA, 21 nt, Artificial Sequence
  Synthetic
  misc_feature (8)..(8): n is a, c, g, or u
  misc_feature (21)..(21): n is a, c, g, or u
ucccccancuccucccagucn

SEQ ID NO: 53270 - RNA, 22 nt, Artificial Sequence
  Synthetic
  misc_feature (9)..(9): n is a, c, g, or u
  misc_feature (22)..(22): n is a, c, g, or u
cucccccancuccucccagucn

SEQ ID NO: 53271 - RNA, 23 nt, Artificial Sequence
  Synthetic
  misc_feature (10)..(10): n is a, c, g, or u
  misc_feature (23)..(23): n is a, c, g, or u
ccucccccancuccucccagucn

SEQ ID NO: 53272 - RNA, 24 nt, Artificial Sequence
  Synthetic
  misc_feature (11)..(11): n is a, c, g, or u
  misc_feature (24)..(24): n is a, c, g, or u
uccucccccancuccucccagucn

SEQ ID NO: 53273 - RNA, 18 nt, Artificial Sequence
  Synthetic
  misc_feature (9)..(9): n is a, c, g, or u
  misc_feature (18)..(18): n is a, c, g, or u
uguacaaunugaucuugn

SEQ ID NO: 53274 - RNA, 19 nt, Artificial Sequence
  Synthetic
  misc_feature (1)..(1): n is a, c, g, or u
  misc_feature (10)..(10): n is a, c, g, or u
  misc_feature (19)..(19): n is a, c, g, or u
nuguacaaunugaucuugn

SEQ ID NO: 53275 - RNA, 20 nt, Artificial Sequence
  Synthetic
  misc_feature (2)..(2): n is a, c, g, or u
  misc_feature (11)..(11): n is a, c, g, or u
  misc_feature (20)..(20): n is a, c, g, or u
unuguacaaunugaucuugn

SEQ ID NO: 53276 - RNA, 21 nt, Artificial Sequence
  Synthetic
  misc_feature (3)..(3): n is a, c, g, or u
  misc_feature (12)..(12): n is a, c, g, or u
  misc_feature (21)..(21): n is a, c, g, or u
uunuguacaaunugaucuugn

SEQ ID NO: 53277 - RNA, 22 nt, Artificial Sequence
  Synthetic
  misc_feature (4)..(4): n is a, c, g, or u
  misc_feature (13)..(13): n is a, c, g, or u
  misc_feature (22)..(22): n is a, c, g, or u
uuunuguacaaunugaucuugn

SEQ ID NO: 53278 - RNA, 23 nt, Artificial Sequence
  Synthetic
  misc_feature (1)..(1): n is a, c, g, or u
  misc_feature (5)..(5): n is a, c, g, or u
  misc_feature (14)..(14): n is a, c, g, or u
  misc_feature (23)..(23): n is a, c, g, or u
nuuunuguacaaunugaucuugn

SEQ ID NO: 53279 - RNA, 24 nt, Artificial Sequence
  Synthetic
  misc_feature (2)..(2): n is a, c, g, or u
  misc_feature (6)..(6): n is a, c, g, or u
  misc_feature (15)..(15): n is a, c, g, or u
  misc_feature (24)..(24): n is a, c, g, or u
anuuunuguacaaunugaucuugn

SEQ ID NO: 53280 - RNA, 18 nt, Artificial Sequence
  Synthetic
  misc_feature (2)..(2): n is a, c, g, or u
  misc_feature (11)..(11): n is a, c, g, or u
anugucuggunuuaaaau

SEQ ID NO: 53281 - RNA, 19 nt, Artificial Sequence
  Synthetic
  misc_feature (3)..(3): n is a, c, g, or u
  misc_feature (12)..(12): n is a, c, g, or u
uanugucuggunuuaaaau

SEQ ID NO: 53282 - RNA, 20 nt, Artificial Sequence
  Synthetic
  misc_feature (4)..(4): n is a, c, g, or u
  misc_feature (13)..(13): n is a, c, g, or u
auanugucuggunuuaaaau

SEQ ID NO: 53283 - RNA, 21 nt, Artificial Sequence
  Synthetic
  misc_feature (5)..(5): n is a, c, g, or u
  misc_feature (14)..(14): n is a, c, g, or u
aauanugucuggunuuaaaau

SEQ ID NO: 53284 - RNA, 22 nt, Artificial Sequence
  Synthetic
  misc_feature (6)..(6): n is a, c, g, or u
  misc_feature (15)..(15): n is a, c, g, or u
aaauanugucuggunuuaaaau

SEQ ID NO: 53285 - RNA, 23 nt, Artificial Sequence
  Synthetic
  misc_feature (7)..(7): n is a, c, g, or u
  misc_feature (16)..(16): n is a, c, g, or u
caaauanugucuggunuuaaaau

SEQ ID NO: 53286 - RNA, 19 nt, Artificial Sequence
  Synthetic
  misc_feature (5)..(5): n is a, c, g, or u
  misc_feature (8)..(8): n is a, c, g, or u
agcancangagggaaacau

SEQ ID NO: 53287 - RNA, 20 nt, Artificial Sequence
  Synthetic
  misc_feature (6)..(6): n is a, c, g, or u
  misc_feature (9)..(9): n is a, c, g, or u
cagcancangagggaaacau

SEQ ID NO: 53288 - RNA, 21 nt, Artificial Sequence
  Synthetic
  misc_feature (7)..(7): n is a, c, g, or u
  misc_feature (10)..(10): n is a, c, g, or u
acagcancangagggaaacau

SEQ ID NO: 53289 - RNA, 22 nt, Artificial Sequence
  Synthetic
  misc_feature (8)..(8): n is a, c, g, or u
  misc_feature (11)..(11): n is a, c, g, or u
aacagcancangagggaaacau

SEQ ID NO: 53290 - RNA, 18 nt, Artificial Sequence
  Synthetic
  misc_feature (7)..(7): n is a, c, g, or u
  misc_feature (12)..(12): n is a, c, g, or u
ucuaaunuuuangcccau

SEQ ID NO: 53291 - RNA, 20 nt, Artificial Sequence
  Synthetic
  misc_feature (9)..(9): n is a, c, g, or u
  misc_feature (14)..(14): n is a, c, g, or u
ugucuaaunuuuangcccau

SEQ ID NO: 53292 - RNA, 21 nt, Artificial Sequence
  Synthetic
  misc_feature (10)..(10): n is a, c, g, or u
  misc_feature (15)..(15): n is a, c, g, or u
uugucuaaunuuuangcccau

SEQ ID NO: 53293 - RNA, 22 nt, Artificial Sequence
  Synthetic
  misc_feature (1)..(1): n is a, c, g, or u
  misc_feature (11)..(11): n is a, c, g, or u
  misc_feature (16)..(16): n is a, c, g, or u
nuugucuaaunuuuangcccau

SEQ ID NO: 53294 - RNA, 23 nt, Artificial Sequence
  Synthetic
  misc_feature (2)..(2): n is a, c, g, or u
  misc_feature (12)..(12): n is a, c, g, or u
  misc_feature (17)..(17): n is a, c, g, or u
anuugucuaaunuuuangcccau

SEQ ID NO: 53295 - RNA, 24 nt, Artificial Sequence
  Synthetic
  misc_feature (1)..(1): n is a, c, g, or u
  misc_feature (3)..(3): n is a, c, g, or u
  misc_feature (13)..(13): n is a, c, g, or u
  misc_feature (18)..(18): n is a, c, g, or u
nanuugucuaaunuuuangcccau

SEQ ID NO: 53296 - RNA, 18 nt, Artificial Sequence
  Synthetic
cauugggaagcuggagau

SEQ ID NO: 53297 - RNA, 19 nt, Artificial Sequence
  Synthetic
acauugggaagcuggagau

SEQ ID NO: 53298 - RNA, 20 nt, Artificial Sequence
  Synthetic
aacauugggaagcuggagau

SEQ ID NO: 53299 - RNA, 21 nt, Artificial Sequence
  Synthetic
uaacauugggaagcuggagau

SEQ ID NO: 53300 - RNA, 22 nt, Artificial Sequence
  Synthetic
cuaacauugggaagcuggagau

SEQ ID NO: 53301 - RNA, 23 nt, Artificial Sequence
  Synthetic
acuaacauugggaagcuggagau

SEQ ID NO: 53302 - RNA, 24 nt, Artificial Sequence
  Synthetic
uacuaacauugggaagcuggagau

SEQ ID NO: 53303 - RNA, 18 nt, Artificial Sequence
  Synthetic
uuugauguauucuucgau

SEQ ID NO: 53304 - RNA, 19 nt, Artificial Sequence
  Synthetic
cuuugauguauucuucgau

SEQ ID NO: 53305 - RNA, 20 nt, Artificial Sequence
  Synthetic
ucuuugauguauucuucgau

SEQ ID NO: 53306 - RNA, 18 nt, Artificial Sequence
  Synthetic
  misc_feature (7)..(7): n is a, c, g, or u
agcccangaugaugggau

SEQ ID NO: 53307 - RNA, 19 nt, Artificial Sequence
  Synthetic
  misc_feature (8)..(8): n is a, c, g, or u
aagcccangaugaugggau

SEQ ID NO: 53308 - RNA, 20 nt, Artificial Sequence
  Synthetic
  misc_feature (9)..(9): n is a, c, g, or u
aaagcccangaugaugggau

SEQ ID NO: 53309 - RNA, 21 nt, Artificial Sequence
  Synthetic
  misc_feature (10)..(10): n is a, c, g, or u
uaaagcccangaugaugggau

SEQ ID NO: 53310 - RNA, 22 nt, Artificial Sequence
  Synthetic
  misc_feature (11)..(11): n is a, c, g, or u
cuaaagcccangaugaugggau

SEQ ID NO: 53311 - RNA, 23 nt, Artificial Sequence
  Synthetic
  misc_feature (12)..(12): n is a, c, g, or u
ccuaaagcccangaugaugggau

SEQ ID NO: 53312 - RNA, 24 nt, Artificial Sequence
  Synthetic
  misc_feature (13)..(13): n is a, c, g, or u
uccuaaagcccangaugaugggau

SEQ ID NO: 53313 - RNA, 18 nt, Artificial Sequence
  Synthetic
  misc_feature (2)..(4): n is a, c, g, or u
  misc_feature (10)..(11): n is a, c, g, or u
unnnuaucannucuugau

SEQ ID NO: 53314 - RNA, 19 nt, Artificial Sequence
  Synthetic
  misc_feature (3)..(5): n is a, c, g, or u
  misc_feature (11)..(12): n is a, c, g, or u
uunnnuaucannucuugau

SEQ ID NO: 53315 - RNA, 20 nt, Artificial Sequence
  Synthetic
  misc_feature (4)..(6): n is a, c, g, or u
  misc_feature (12)..(13): n is a, c, g, or u
uuunnnuaucannucuugau

SEQ ID NO: 53316 - RNA, 21 nt, Artificial Sequence
  Synthetic
  misc_feature (5)..(7): n is a, c, g, or u
  misc_feature (13)..(14): n is a, c, g, or u
auuunnnuaucannucuugau

SEQ ID NO: 53317 - RNA, 22 nt, Artificial Sequence
  Synthetic
  misc_feature (6)..(8): n is a, c, g, or u
  misc_feature (14)..(15): n is a, c, g, or u
cauuunnnuaucannucuugau

SEQ ID NO: 53318 - RNA, 23 nt, Artificial Sequence
  Synthetic
  misc_feature (7)..(9): n is a, c, g, or u
  misc_feature (15)..(16): n is a, c, g, or u
acauuunnnuaucannucuugau

SEQ ID NO: 53319 - RNA, 24 nt, Artificial Sequence
  Synthetic
  misc_feature (8)..(10): n is a, c, g, or u
  misc_feature (16)..(17): n is a, c, g, or u
cacauuunnnuaucannucuugau

SEQ ID NO: 53320 - RNA, 18 nt, Artificial Sequence
  Synthetic
  misc_feature (2)..(2): n is a, c, g, or u
  misc_feature (5)..(5): n is a, c, g, or u
cngcnuuccauaaaguau

SEQ ID NO: 53321 - RNA, 19 nt, Artificial Sequence
  Synthetic
  misc_feature (3)..(3): n is a, c, g, or u
  misc_feature (6)..(6): n is a, c, g, or u
ccngcnuuccauaaaguau

SEQ ID NO: 53322 - RNA, 20 nt, Artificial Sequence
  Synthetic
  misc_feature (1)..(1): n is a, c, g, or u
  misc_feature (4)..(4): n is a, c, g, or u
  misc_feature (7)..(7): n is a, c, g, or u
nccngcnuuccauaaaguau

SEQ ID NO: 53323 - RNA, 21 nt, Artificial Sequence
  Synthetic
  misc_feature (2)..(2): n is a, c, g, or u
  misc_feature (5)..(5): n is a, c, g, or u
  misc_feature (8)..(8): n is a, c, g, or u
unccngcnuuccauaaaguau

SEQ ID NO: 53324 - RNA, 22 nt, Artificial Sequence
  Synthetic
  misc_feature (3)..(3): n is a, c, g, or u
  misc_feature (6)..(6): n is a, c, g, or u
  misc_feature (9)..(9): n is a, c, g, or u
aunccngcnuuccauaaaguau

SEQ ID NO: 53325 - RNA, 23 nt, Artificial Sequence
  Synthetic
  misc_feature (4)..(4): n is a, c, g, or u
  misc_feature (7)..(7): n is a, c, g, or u
  misc_feature (10)..(10): n is a, c, g, or u
aaunccngcnuuccauaaaguau

SEQ ID NO: 53326 - RNA, 24 nt, Artificial Sequence
  Synthetic
  misc_feature (1)..(1): n is a, c, g, or u
  misc_feature (5)..(5): n is a, c, g, or u
  misc_feature (8)..(8): n is a, c, g, or u
  misc_feature (11)..(11): n is a, c, g, or u
naaunccngcnuuccauaaaguau

SEQ ID NO: 53327 - RNA, 18 nt, Artificial Sequence
  Synthetic
  misc_feature (11)..(11): n is a, c, g, or u
  misc_feature (14)..(14): n is a, c, g, or u
uuuuuguuuunganguau

SEQ ID NO: 53328 - RNA, 19 nt, Artificial Sequence
  Synthetic
  misc_feature (12)..(12): n is a, c, g, or u
  misc_feature (15)..(15): n is a, c, g, or u
cuuuuuguuuunganguau

SEQ ID NO: 53329 - RNA, 20 nt, Artificial Sequence
  Synthetic
  misc_feature (13)..(13): n is a, c, g, or u
  misc_feature (16)..(16): n is a, c, g, or u
ucuuuuuguuuunganguau

SEQ ID NO: 53330 - RNA, 21 nt, Artificial Sequence
  Synthetic
  misc_feature (14)..(14): n is a, c, g, or u
  misc_feature (17)..(17): n is a, c, g, or u
aucuuuuuguuuunganguau

SEQ ID NO: 53331 - RNA, 22 nt, Artificial Sequence
  Synthetic
  misc_feature (15)..(15): n is a, c, g, or u
  misc_feature (18)..(18): n is a, c, g, or u
caucuuuuuguuuunganguau

SEQ ID NO: 53332 - RNA, 23 nt, Artificial Sequence
  Synthetic
  misc_feature (16)..(16): n is a, c, g, or u
  misc_feature (19)..(19): n is a, c, g, or u
ccaucuuuuuguuuunganguau

SEQ ID NO: 53333 - RNA, 24 nt, Artificial Sequence
  Synthetic
  misc_feature (17)..(17): n is a, c, g, or u
  misc_feature (20)..(20): n is a, c, g, or u
cccaucuuuuuguuuunganguau

SEQ ID NO: 53334 - RNA, 18 nt, Artificial Sequence
  Synthetic
aagcuccaaauucuuuau

SEQ ID NO: 53335 - RNA, 20 nt, Artificial Sequence
  Synthetic
agaagcuccaaauucuuuau

SEQ ID NO: 53336 - RNA, 18 nt, Artificial Sequence
  Synthetic
  misc_feature (1)..(1): n is a, c, g, or u
  misc_feature (9)..(9): n is a, c, g, or u
ngguaaugnuccccaacu

SEQ ID NO: 53337 - RNA, 20 nt, Artificial Sequence
  Synthetic
  misc_feature (3)..(3): n is a, c, g, or u
  misc_feature (11)..(11): n is a, c, g, or u
ugngguaaugnuccccaacu

SEQ ID NO: 53338 - RNA, 21 nt, Artificial Sequence
  Synthetic
  misc_feature (4)..(4): n is a, c, g, or u
  misc_feature (12)..(12): n is a, c, g, or u
uugngguaaugnuccccaacu

SEQ ID NO: 53339 - RNA, 22 nt, Artificial Sequence
  Synthetic
  misc_feature (5)..(5): n is a, c, g, or u
  misc_feature (13)..(13): n is a, c, g, or u
cuugngguaaugnuccccaacu

SEQ ID NO: 53340 - RNA, 23 nt, Artificial Sequence
  Synthetic
  misc_feature (6)..(6): n is a, c, g, or u
  misc_feature (14)..(14): n is a, c, g, or u
ucuugngguaaugnuccccaacu

SEQ ID NO: 53341 - RNA, 24 nt, Artificial Sequence
  Synthetic
  misc_feature (7)..(7): n is a, c, g, or u
  misc_feature (15)..(15): n is a, c, g, or u
aucuugngguaaugnuccccaacu

SEQ ID NO: 53342 - RNA, 19 nt, Artificial Sequence
  Synthetic
ugauuggagguuggggacu

SEQ ID NO: 53343 - RNA, 18 nt, Artificial Sequence
  Synthetic
  misc_feature (6)..(6): n is a, c, g, or u
  misc_feature (9)..(9): n is a, c, g, or u
  misc_feature (12)..(12): n is a, c, g, or u
uuuuungunagngggccu

SEQ ID NO: 53344 - RNA, 19 nt, Artificial Sequence
  Synthetic
  misc_feature (7)..(7): n is a, c, g, or u
  misc_feature (10)..(10): n is a, c, g, or u
  misc_feature (13)..(13): n is a, c, g, or u
auuuuungunagngggccu

SEQ ID NO: 53345 - RNA, 20 nt, Artificial Sequence
  Synthetic
  misc_feature (8)..(8): n is a, c, g, or u
  misc_feature (11)..(11): n is a, c, g, or u
  misc_feature (14)..(14): n is a, c, g, or u
cauuuuungunagngggccu

SEQ ID NO: 53346 - RNA, 21 nt, Artificial Sequence
  Synthetic
  misc_feature (9)..(9): n is a, c, g, or u
  misc_feature (12)..(12): n is a, c, g, or u
  misc_feature (15)..(15): n is a, c, g, or u
ucauuuuungunagngggccu

SEQ ID NO: 53347 - RNA, 22 nt, Artificial Sequence
  Synthetic
  misc_feature (10)..(10): n is a, c, g, or u
  misc_feature (13)..(13): n is a, c, g, or u
  misc_feature (16)..(16): n is a, c, g, or u
uucauuuuungunagngggccu

SEQ ID NO: 53348 - RNA, 23 nt, Artificial Sequence
  Synthetic
  misc_feature (11)..(11): n is a, c, g, or u
  misc_feature (14)..(14): n is a, c, g, or u
  misc_feature (17)..(17): n is a, c, g, or u
auucauuuuungunagngggccu

SEQ ID NO: 53349 - RNA, 24 nt, Artificial Sequence
  Synthetic
  misc_feature (12)..(12): n is a, c, g, or u
  misc_feature (15)..(15): n is a, c, g, or u
  misc_feature (18)..(18): n is a, c, g, or u
aauucauuuuungunagngggccu

SEQ ID NO: 53350 - RNA, 18 nt, Artificial Sequence
  Synthetic
  misc_feature (13)..(13): n is a, c, g, or u
ucuccucccccancuccu

SEQ ID NO: 53351 - RNA, 19 nt, Artificial Sequence
  Synthetic
  misc_feature (14)..(14): n is a, c, g, or u
aucuccucccccancuccu

SEQ ID NO: 53352 - RNA, 20 nt, Artificial Sequence
  Synthetic
  misc_feature (1)..(1): n is a, c, g, or u
  misc_feature (15)..(15): n is a, c, g, or u
naucuccucccccancuccu

SEQ ID NO: 53353 - RNA, 21 nt, Artificial Sequence
  Synthetic
  misc_feature (2)..(2): n is a, c, g, or u
  misc_feature (16)..(16): n is a, c, g, or u
unaucuccucccccancuccu

SEQ ID NO: 53354 - RNA, 22 nt, Artificial Sequence
  Synthetic
  misc_feature (3)..(3): n is a, c, g, or u
  misc_feature (17)..(17): n is a, c, g, or u
cunaucuccucccccancuccu

SEQ ID NO: 53355 - RNA, 23 nt, Artificial Sequence
  Synthetic
  misc_feature (4)..(4): n is a, c, g, or u
  misc_feature (18)..(18): n is a, c, g, or u
ccunaucuccucccccancuccu

SEQ ID NO: 53356 - RNA, 24 nt, Artificial Sequence
  Synthetic
  misc_feature (5)..(5): n is a, c, g, or u
  misc_feature (19)..(19): n is a, c, g, or u
accunaucuccucccccancuccu

SEQ ID NO: 53357 - RNA, 18 nt, Artificial Sequence
  Synthetic
  misc_feature (6)..(6): n is a, c, g, or u
  misc_feature (14)..(14): n is a, c, g, or u
caggunauugaccnuccu

SEQ ID NO: 53358 - RNA, 19 nt, Artificial Sequence
  Synthetic
  misc_feature (7)..(7): n is a, c, g, or u
  misc_feature (15)..(15): n is a, c, g, or u
ccaggunauugaccnuccu

SEQ ID NO: 53359 - RNA, 20 nt, Artificial Sequence
  Synthetic
  misc_feature (8)..(8): n is a, c, g, or u
  misc_feature (16)..(16): n is a, c, g, or u
uccaggunauugaccnuccu

SEQ ID NO: 53360 - RNA, 18 nt, Artificial Sequence
  Synthetic
  misc_feature (3)..(3): n is a, c, g, or u
agnaauuccacagaagcu

SEQ ID NO: 53361 - RNA, 20 nt, Artificial Sequence
  Synthetic
  misc_feature (5)..(5): n is a, c, g, or u
agagnaauuccacagaagcu

SEQ ID NO: 53362 - RNA, 22 nt, Artificial Sequence
  Synthetic
  misc_feature (7)..(7): n is a, c, g, or u
agagagnaauuccacagaagcu

SEQ ID NO: 53363 - RNA, 23 nt, Artificial Sequence
  Synthetic
  misc_feature (8)..(8): n is a, c, g, or u
aagagagnaauuccacagaagcu

SEQ ID NO: 53364 - RNA, 24 nt, Artificial Sequence
  Synthetic
  misc_feature (9)..(9): n is a, c, g, or u
aaagagagnaauuccacagaagcu

SEQ ID NO: 53365 - RNA, 18 nt, Artificial Sequence
  Synthetic
uacuaacauugggaagcu

SEQ ID NO: 53366 - RNA, 19 nt, Artificial Sequence
  Synthetic
auacuaacauugggaagcu

SEQ ID NO: 53367 - RNA, 20 nt, Artificial Sequence
  Synthetic
aauacuaacauugggaagcu

SEQ ID NO: 53368 - RNA, 23 nt, Artificial Sequence
  Synthetic
aggaauacuaacauugggaagcu

SEQ ID NO: 53369 - RNA, 24 nt, Artificial Sequence
  Synthetic
aaggaauacuaacauugggaagcu

SEQ ID NO: 53370 - RNA, 18 nt, Artificial Sequence
  Synthetic
  misc_feature (5)..(5): n is a, c, g, or u
  misc_feature (8)..(8): n is a, c, g, or u
ugaanagnggauccagcu

SEQ ID NO: 53371 - RNA, 19 nt, Artificial Sequence
  Synthetic
  misc_feature (6)..(6): n is a, c, g, or u
  misc_feature (9)..(9): n is a, c, g, or u
cugaanagnggauccagcu

SEQ ID NO: 53372 - RNA, 20 nt, Artificial Sequence
  Synthetic
  misc_feature (1)..(1): n is a, c, g, or u
  misc_feature (7)..(7): n is a, c, g, or u
  misc_feature (10)..(10): n is a, c, g, or u
ncugaanagnggauccagcu

SEQ ID NO: 53373 - RNA, 21 nt, Artificial Sequence
  Synthetic
  misc_feature (2)..(2): n is a, c, g, or u
  misc_feature (8)..(8): n is a, c, g, or u
  misc_feature (11)..(11): n is a, c, g, or u
cncugaanagnggauccagcu

SEQ ID NO: 53374 - RNA, 23 nt, Artificial Sequence
  Synthetic
  misc_feature (4)..(4): n is a, c, g, or u
  misc_feature (10)..(10): n is a, c, g, or u
  misc_feature (13)..(13): n is a, c, g, or u
ugcncugaanagnggauccagcu

SEQ ID NO: 53375 - RNA, 24 nt, Artificial Sequence
  Synthetic
  misc_feature (5)..(5): n is a, c, g, or u
  misc_feature (11)..(11): n is a, c, g, or u
  misc_feature (14)..(14): n is a, c, g, or u
uugcncugaanagnggauccagcu

SEQ ID NO: 53376 - RNA, 18 nt, Artificial Sequence
  Synthetic
uuugcauggucccgugcu

SEQ ID NO: 53377 - RNA, 19 nt, Artificial Sequence
  Synthetic
uuuugcauggucccgugcu

SEQ ID NO: 53378 - RNA, 18 nt, Artificial Sequence
  Synthetic
  misc_feature (3)..(3): n is a, c, g, or u
  misc_feature (12)..(12): n is a, c, g, or u
uunuguacaaunugaucu

SEQ ID NO: 53379 - RNA, 19 nt, Artificial Sequence
  Synthetic
  misc_feature (4)..(4): n is a, c, g, or u
  misc_feature (13)..(13): n is a, c, g, or u
uuunuguacaaunugaucu

SEQ ID NO: 53380 - RNA, 20 nt, Artificial Sequence
  Synthetic
  misc_feature (1)..(1): n is a, c, g, or u
  misc_feature (5)..(5): n is a, c, g, or u
  misc_feature (14)..(14): n is a, c, g, or u
nuuunuguacaaunugaucu

SEQ ID NO: 53381 - RNA, 21 nt, Artificial Sequence
  Synthetic
  misc_feature (2)..(2): n is a, c, g, or u
  misc_feature (6)..(6): n is a, c, g, or u
  misc_feature (15)..(15): n is a, c, g, or u
anuuunuguacaaunugaucu

SEQ ID NO: 53382 - RNA, 23 nt, Artificial Sequence
  Synthetic
  misc_feature (4)..(4): n is a, c, g, or u
  misc_feature (8)..(8): n is a, c, g, or u
  misc_feature (17)..(17): n is a, c, g, or u
uganuuunuguacaaunugaucu

SEQ ID NO: 53383 - RNA, 24 nt, Artificial Sequence
  Synthetic
  misc_feature (5)..(5): n is a, c, g, or u
  misc_feature (9)..(9): n is a, c, g, or u
  misc_feature (18)..(18): n is a, c, g, or u
uuganuuunuguacaaunugaucu

SEQ ID NO: 53384 - RNA, 19 nt, Artificial Sequence
  Synthetic
uggccaagccccaaccagu

SEQ ID NO: 53385 - RNA, 20 nt, Artificial Sequence
  Synthetic
auggccaagccccaaccagu

SEQ ID NO: 53386 - RNA, 18 nt, Artificial Sequence
  Synthetic
aagaaggaguuaaccagu

SEQ ID NO: 53387 - RNA, 19 nt, Artificial Sequence
  Synthetic
aaagaaggaguuaaccagu

SEQ ID NO: 53388 - RNA, 20 nt, Artificial Sequence
  Synthetic
aaaagaaggaguuaaccagu

SEQ ID NO: 53389 - RNA, 23 nt, Artificial Sequence
  Synthetic
aggaaaagaaggaguuaaccagu

SEQ ID NO: 53390 - RNA, 24 nt, Artificial Sequence
  Synthetic
caggaaaagaaggaguuaaccagu

SEQ ID NO: 53391 - RNA, 18 nt, Artificial Sequence
  Synthetic
  misc_feature (10)..(10): n is a, c, g, or u
ucuauaagcnggaggagu

SEQ ID NO: 53392 - RNA, 19 nt, Artificial Sequence
  Synthetic
agguuuugcauggucccgu

SEQ ID NO: 53393 - RNA, 20 nt, Artificial Sequence
  Synthetic
cagguuuugcauggucccgu

SEQ ID NO: 53394 - RNA, 20 nt, Artificial Sequence
  Synthetic
aggugaaaaaguugcauggu

SEQ ID NO: 53395 - RNA, 20 nt, Artificial Sequence
  Synthetic
  misc_feature (18)..(18): n is a, c, g, or u
aggacaacagaguugucngu

SEQ ID NO: 53396 - RNA, 22 nt, Artificial Sequence
  Synthetic
  misc_feature (20)..(20): n is a, c, g, or u
agaggacaacagaguugucngu

SEQ ID NO: 53397 - RNA, 24 nt, Artificial Sequence
  Synthetic
  misc_feature (22)..(22): n is a, c, g, or u
agagaggacaacagaguugucngu

SEQ ID NO: 53398 - RNA, 18 nt, Artificial Sequence
  Synthetic
  misc_feature (3)..(3): n is a, c, g, or u
  misc_feature (6)..(6): n is a, c, g, or u
  misc_feature (9)..(9): n is a, c, g, or u
ugnuunggngugcaaugu

SEQ ID NO: 53399 - RNA, 19 nt, Artificial Sequence
  Synthetic
  misc_feature (4)..(4): n is a, c, g, or u
  misc_feature (7)..(7): n is a, c, g, or u
  misc_feature (10)..(10): n is a, c, g, or u
augnuunggngugcaaugu

SEQ ID NO: 53400 - RNA, 20 nt, Artificial Sequence
  Synthetic
  misc_feature (5)..(5): n is a, c, g, or u
  misc_feature (8)..(8): n is a, c, g, or u
  misc_feature (11)..(11): n is a, c, g, or u
uaugnuunggngugcaaugu

SEQ ID NO: 53401 - RNA, 23 nt, Artificial Sequence
  Synthetic
  misc_feature (8)..(8): n is a, c, g, or u
  misc_feature (11)..(11): n is a, c, g, or u
  misc_feature (14)..(14): n is a, c, g, or u
cgguaugnuunggngugcaaugu

SEQ ID NO: 53402 - RNA, 18 nt, Artificial Sequence
  Synthetic
  misc_feature (5)..(5): n is a, c, g, or u
cccancaggccaccgugu

SEQ ID NO: 53403 - RNA, 19 nt, Artificial Sequence
  Synthetic
  misc_feature (6)..(6): n is a, c, g, or u
ccccancaggccaccgugu

SEQ ID NO: 53404 - RNA, 20 nt, Artificial Sequence
  Synthetic
  misc_feature (7)..(7): n is a, c, g, or u
accccancaggccaccgugu

SEQ ID NO: 53405 - RNA, 21 nt, Artificial Sequence
  Synthetic
  misc_feature (8)..(8): n is a, c, g, or u
caccccancaggccaccgugu

SEQ ID NO: 53406 - RNA, 22 nt, Artificial Sequence
  Synthetic
  misc_feature (9)..(9): n is a, c, g, or u
ccaccccancaggccaccgugu

SEQ ID NO: 53407 - RNA, 23 nt, Artificial Sequence
  Synthetic
  misc_feature (10)..(10): n is a, c, g, or u
uccaccccancaggccaccgugu

SEQ ID NO: 53408 - RNA, 24 nt, Artificial Sequence
  Synthetic
  misc_feature (11)..(11): n is a, c, g, or u
cuccaccccancaggccaccgugu

SEQ ID NO: 53409 - RNA, 18 nt, Artificial Sequence
  Synthetic
  misc_feature (3)..(3): n is a, c, g, or u
  misc_feature (15)..(15): n is a, c, g, or u
aanuguccuuguuunugu

SEQ ID NO: 53410 - RNA, 19 nt, Artificial Sequence
  Synthetic
  misc_feature (4)..(4): n is a, c, g, or u
  misc_feature (16)..(16): n is a, c, g, or u
caanuguccuuguuunugu

SEQ ID NO: 53411 - RNA, 20 nt, Artificial Sequence
  Synthetic
  misc_feature (5)..(5): n is a, c, g, or u
  misc_feature (17)..(17): n is a, c, g, or u
ccaanuguccuuguuunugu

SEQ ID NO: 53412 - RNA, 23 nt, Artificial Sequence
  Synthetic
  misc_feature (8)..(8): n is a, c, g, or u
  misc_feature (20)..(20): n is a, c, g, or u
uggccaanuguccuuguuunugu

SEQ ID NO: 53413 - RNA, 24 nt, Artificial Sequence
  Synthetic
  misc_feature (9)..(9): n is a, c, g, or u
  misc_feature (21)..(21): n is a, c, g, or u
uuggccaanuguccuuguuunugu

SEQ ID NO: 53414 - RNA, 18 nt, Artificial Sequence
  Synthetic
uagacucugugguauugu

SEQ ID NO: 53415 - RNA, 19 nt, Artificial Sequence
  Synthetic
cuagacucugugguauugu

SEQ ID NO: 53416 - RNA, 20 nt, Artificial Sequence
  Synthetic
ucuagacucugugguauugu

SEQ ID NO: 53417 - RNA, 18 nt, Artificial Sequence
  Synthetic
uccuugagcaagaguugu

SEQ ID NO: 53418 - RNA, 19 nt, Artificial Sequence
  Synthetic
uuccuugagcaagaguugu

SEQ ID NO: 53419 - RNA, 22 nt, Artificial Sequence
  Synthetic
agguuccuugagcaagaguugu

SEQ ID NO: 53420 - RNA, 24 nt, Artificial Sequence
  Synthetic
agagguuccuugagcaagaguugu

SEQ ID NO: 53421 - RNA, 18 nt, Artificial Sequence
  Synthetic
  misc_feature (8)..(10): n is a, c, g, or u
  misc_feature (16)..(17): n is a, c, g, or u
cacauuunnnuaucannu

SEQ ID NO: 53422 - RNA, 19 nt, Artificial Sequence
  Synthetic
  misc_feature (9)..(11): n is a, c, g, or u
  misc_feature (17)..(18): n is a, c, g, or u
ucacauuunnnuaucannu

SEQ ID NO: 53423 - RNA, 20 nt, Artificial Sequence
  Synthetic
  misc_feature (10)..(12): n is a, c, g, or u
  misc_feature (18)..(19): n is a, c, g, or u
uucacauuunnnuaucannu

SEQ ID NO: 53424 - RNA, 22 nt, Artificial Sequence
  Synthetic
  misc_feature (12)..(14): n is a, c, g, or u
  misc_feature (20)..(21): n is a, c, g, or u
uguucacauuunnnuaucannu

SEQ ID NO: 53425 - RNA, 23 nt, Artificial Sequence
  Synthetic
  misc_feature (13)..(15): n is a, c, g, or u
  misc_feature (21)..(22): n is a, c, g, or u
uuguucacauuunnnuaucannu

SEQ ID NO: 53426 - RNA, 24 nt, Artificial Sequence
  Synthetic
  misc_feature (14)..(16): n is a, c, g, or u
  misc_feature (22)..(23): n is a, c, g, or u
auuguucacauuunnnuaucannu

SEQ ID NO: 53427 - RNA, 18 nt, Artificial Sequence
  Synthetic
  misc_feature (11)..(12): n is a, c, g, or u
  misc_feature (14)..(14): n is a, c, g, or u
  misc_feature (16)..(17): n is a, c, g, or u
aaugauuaacnncnunnu

SEQ ID NO: 53428 - RNA, 19 nt, Artificial Sequence
  Synthetic
  misc_feature (12)..(13): n is a, c, g, or u
  misc_feature (15)..(15): n is a, c, g, or u
  misc_feature (17)..(18): n is a, c, g, or u
uaaugauuaacnncnunnu

SEQ ID NO: 53429 - RNA, 20 nt, Artificial Sequence
  Synthetic
  misc_feature (13)..(14): n is a, c, g, or u
  misc_feature (16)..(16): n is a, c, g, or u
  misc_feature (18)..(19): n is a, c, g, or u
auaaugauuaacnncnunnu

SEQ ID NO: 53430 - RNA, 21 nt, Artificial Sequence
  Synthetic
  misc_feature (14)..(15): n is a, c, g, or u
  misc_feature (17)..(17): n is a, c, g, or u
  misc_feature (19)..(20): n is a, c, g, or u
aauaaugauuaacnncnunnu

SEQ ID NO: 53431 - RNA, 22 nt, Artificial Sequence
  Synthetic
  misc_feature (15)..(16): n is a, c, g, or u
  misc_feature (18)..(18): n is a, c, g, or u
  misc_feature (20)..(21): n is a, c, g, or u
aaauaaugauuaacnncnunnu

SEQ ID NO: 53432 - RNA, 23 nt, Artificial Sequence
  Synthetic
  misc_feature (16)..(17): n is a, c, g, or u
  misc_feature (19)..(19): n is a, c, g, or u
  misc_feature (21)..(22): n is a, c, g, or u
aaaauaaugauuaacnncnunnu

SEQ ID NO: 53433 - RNA, 24 nt, Artificial Sequence
  Synthetic
  misc_feature (17)..(18): n is a, c, g, or u
  misc_feature (20)..(20): n is a, c, g, or u
  misc_feature (22)..(23): n is a, c, g, or u
uaaaauaaugauuaacnncnunnu

SEQ ID NO: 53434 - RNA, 19 nt, Artificial Sequence
  Synthetic
  misc_feature (9)..(9): n is a, c, g, or u
  misc_feature (18)..(18): n is a, c, g, or u
ugcaaauanugucuggunu

SEQ ID NO: 53435 - RNA, 20 nt, Artificial Sequence
  Synthetic
  misc_feature (10)..(10): n is a, c, g, or u
  misc_feature (19)..(19): n is a, c, g, or u
augcaaauanugucuggunu

SEQ ID NO: 53436 - RNA, 21 nt, Artificial Sequence
  Synthetic
  misc_feature (11)..(11): n is a, c, g, or u
  misc_feature (20)..(20): n is a, c, g, or u
uaugcaaauanugucuggunu

SEQ ID NO: 53437 - RNA, 23 nt, Artificial Sequence
  Synthetic
  misc_feature (13)..(13): n is a, c, g, or u
  misc_feature (22)..(22): n is a, c, g, or u
aguaugcaaauanugucuggunu

SEQ ID NO: 53438 - RNA, 24 nt, Artificial Sequence
  Synthetic
  misc_feature (14)..(14): n is a, c, g, or u
  misc_feature (23)..(23): n is a, c, g, or u
aaguaugcaaauanugucuggunu

SEQ ID NO: 53439 - RNA, 18 nt, Artificial Sequence
  Synthetic
  misc_feature (10)..(10): n is a, c, g, or u
ccagucuucnagaagauu

SEQ ID NO: 53440 - RNA, 19 nt, Artificial Sequence
  Synthetic
  misc_feature (11)..(11): n is a, c, g, or u
cccagucuucnagaagauu

SEQ ID NO: 53441 - RNA, 20 nt, Artificial Sequence
  Synthetic
  misc_feature (12)..(12): n is a, c, g, or u
ccccagucuucnagaagauu

SEQ ID NO: 53442 - RNA, 21 nt, Artificial Sequence
  Synthetic
  misc_feature (13)..(13): n is a, c, g, or u
cccccagucuucnagaagauu

SEQ ID NO: 53443 - RNA, 19 nt, Artificial Sequence
  Synthetic
aggagguugguaagugauu

SEQ ID NO: 53444 - RNA, 20 nt, Artificial Sequence
  Synthetic
caggagguugguaagugauu

SEQ ID NO: 53445 - RNA, 21 nt, Artificial Sequence
  Synthetic
acaggagguugguaagugauu

SEQ ID NO: 53446 - RNA, 24 nt, Artificial Sequence
  Synthetic
aggacaggagguugguaagugauu

SEQ ID NO: 53447 - RNA, 18 nt, Artificial Sequence
  Synthetic
  misc_feature (7)..(7): n is a, c, g, or u
cguaaanuuucccaccuu

SEQ ID NO: 53448 - RNA, 19 nt, Artificial Sequence
  Synthetic
  misc_feature (8)..(8): n is a, c, g, or u
ccguaaanuuucccaccuu

SEQ ID NO: 53449 - RNA, 20 nt, Artificial Sequence
  Synthetic
  misc_feature (9)..(9): n is a, c, g, or u
cccguaaanuuucccaccuu

SEQ ID NO: 53450 - RNA, 21 nt, Artificial Sequence
  Synthetic
  misc_feature (1)..(1): n is a, c, g, or u
  misc_feature (10)..(10): n is a, c, g, or u
ncccguaaanuuucccaccuu

SEQ ID NO: 53451 - RNA, 23 nt, Artificial Sequence
  Synthetic
  misc_feature (3)..(3): n is a, c, g, or u
  misc_feature (12)..(12): n is a, c, g, or u
agncccguaaanuuucccaccuu

SEQ ID NO: 53452 - RNA, 23 nt, Artificial Sequence
  Synthetic
aggacaaacgggcaacauaccuu

SEQ ID NO: 53453 - RNA, 18 nt, Artificial Sequence
  Synthetic
  misc_feature (3)..(3): n is a, c, g, or u
  misc_feature (7)..(7): n is a, c, g, or u
uunacanagaaaggccuu

SEQ ID NO: 53454 - RNA, 20 nt, Artificial Sequence
  Synthetic
  misc_feature (5)..(5): n is a, c, g, or u
  misc_feature (9)..(9): n is a, c, g, or u
uguunacanagaaaggccuu

SEQ ID NO: 53455 - RNA, 21 nt, Artificial Sequence
  Synthetic
  misc_feature (1)..(1): n is a, c, g, or u
  misc_feature (6)..(6): n is a, c, g, or u
  misc_feature (10)..(10): n is a, c, g, or u
nuguunacanagaaaggccuu

SEQ ID NO: 53456 - RNA, 22 nt, Artificial Sequence
  Synthetic
  misc_feature (2)..(2): n is a, c, g, or u
  misc_feature (7)..(7): n is a, c, g, or u
  misc_feature (11)..(11): n is a, c, g, or u
anuguunacanagaaaggccuu

SEQ ID NO: 53457 - RNA, 23 nt, Artificial Sequence
  Synthetic
  misc_feature (3)..(3): n is a, c, g, or u
  misc_feature (8)..(8): n is a, c, g, or u
  misc_feature (12)..(12): n is a, c, g, or u
uanuguunacanagaaaggccuu

SEQ ID NO: 53458 - RNA, 18 nt, Artificial Sequence
  Synthetic
  misc_feature (5)..(6): n is a, c, g, or u
  misc_feature (12)..(12): n is a, c, g, or u
  misc_feature (15)..(15): n is a, c, g, or u
auaannaauuunaancuu

SEQ ID NO: 53459 - RNA, 19 nt, Artificial Sequence
  Synthetic
  misc_feature (6)..(7): n is a, c, g, or u
  misc_feature (13)..(13): n is a, c, g, or u
  misc_feature (16)..(16): n is a, c, g, or u
cauaannaauuunaancuu

SEQ ID NO: 53460 - RNA, 22 nt, Artificial Sequence
  Synthetic
  misc_feature (9)..(10): n is a, c, g, or u
  misc_feature (16)..(16): n is a, c, g, or u
  misc_feature (19)..(19): n is a, c, g, or u
uggcauaannaauuunaancuu

SEQ ID NO: 53461 - RNA, 23 nt, Artificial Sequence
  Synthetic
  misc_feature (1)..(1): n is a, c, g, or u
  misc_feature (10)..(11): n is a, c, g, or u
  misc_feature (17)..(17): n is a, c, g, or u
  misc_feature (20)..(20): n is a, c, g, or u
nuggcauaannaauuunaancuu

SEQ ID NO: 53462 - RNA, 18 nt, Artificial Sequence
  Synthetic
  misc_feature (9)..(9): n is a, c, g, or u
uguggaugngugucucuu

SEQ ID NO: 53463 - RNA, 19 nt, Artificial Sequence
  Synthetic
  misc_feature (10)..(10): n is a, c, g, or u
cuguggaugngugucucuu

SEQ ID NO: 53464 - RNA, 20 nt, Artificial Sequence
  Synthetic
  misc_feature (11)..(11): n is a, c, g, or u
ccuguggaugngugucucuu

SEQ ID NO: 53465 - RNA, 22 nt, Artificial Sequence
  Synthetic
  misc_feature (1)..(1): n is a, c, g, or u
  misc_feature (13)..(13): n is a, c, g, or u
ngccuguggaugngugucucuu

SEQ ID NO: 53466 - RNA, 23 nt, Artificial Sequence
  Synthetic
  misc_feature (2)..(2): n is a, c, g, or u
  misc_feature (14)..(14): n is a, c, g, or u
ungccuguggaugngugucucuu

SEQ ID NO: 53467 - RNA, 24 nt, Artificial Sequence
  Synthetic
  misc_feature (3)..(3): n is a, c, g, or u
  misc_feature (15)..(15): n is a, c, g, or u
aungccuguggaugngugucucuu

SEQ ID NO: 53468 - RNA, 18 nt, Artificial Sequence
  Synthetic
  misc_feature (4)..(4): n is a, c, g, or u
  misc_feature (7)..(7): n is a, c, g, or u
  misc_feature (9)..(10): n is a, c, g, or u
caancuncnnggggcguu

SEQ ID NO: 53469 - RNA, 21 nt, Artificial Sequence
  Synthetic
  misc_feature (7)..(7): n is a, c, g, or u
  misc_feature (10)..(10): n is a, c, g, or u
  misc_feature (12)..(13): n is a, c, g, or u
uggcaancuncnnggggcguu

SEQ ID NO: 53470 - RNA, 22 nt, Artificial Sequence
  Synthetic
  misc_feature (8)..(8): n is a, c, g, or u
  misc_feature (11)..(11): n is a, c, g, or u
  misc_feature (13)..(14): n is a, c, g, or u
uuggcaancuncnnggggcguu

SEQ ID NO: 53471 - RNA, 24 nt, Artificial Sequence
  Synthetic
  misc_feature (10)..(10): n is a, c, g, or u
  misc_feature (13)..(13): n is a, c, g, or u
  misc_feature (15)..(16): n is a, c, g, or u
uguuggcaancuncnnggggcguu

SEQ ID NO: 53472 - RNA, 20 nt, Artificial Sequence
  Synthetic
  misc_feature (7)..(7): n is a, c, g, or u
uggauangauaggggcauuu

SEQ ID NO: 53473 - RNA, 18 nt, Artificial Sequence
  Synthetic
aaagacaaaagccuguuu

SEQ ID NO: 53474 - RNA, 19 nt, Artificial Sequence
  Synthetic
aaaagacaaaagccuguuu

SEQ ID NO: 53475 - RNA, 21 nt, Artificial Sequence
  Synthetic
cgaaaagacaaaagccuguuu

SEQ ID NO: 53476 - RNA, 24 nt, Artificial Sequence
  Synthetic
uggcgaaaagacaaaagccuguuu

SEQ ID NO: 53477 - RNA, 18 nt, Artificial Sequence
  Synthetic
  misc_feature (8)..(8): n is a, c, g, or u
  misc_feature (11)..(11): n is a, c, g, or u
  misc_feature (14)..(14): n is a, c, g, or u
uaggcccncunacnaaaa

SEQ ID NO: 53478 - RNA, 20 nt, Artificial Sequence
  Synthetic
  misc_feature (10)..(10): n is a, c, g, or u
  misc_feature (13)..(13): n is a, c, g, or u
  misc_feature (16)..(16): n is a, c, g, or u
uguaggcccncunacnaaaa

SEQ ID NO: 53479 - RNA, 21 nt, Artificial Sequence
  Synthetic
  misc_feature (11)..(11): n is a, c, g, or u
  misc_feature (14)..(14): n is a, c, g, or u
  misc_feature (17)..(17): n is a, c, g, or u
uuguaggcccncunacnaaaa

SEQ ID NO: 53480 - RNA, 22 nt, Artificial Sequence
  Synthetic
  misc_feature (12)..(12): n is a, c, g, or u
  misc_feature (15)..(15): n is a, c, g, or u
  misc_feature (18)..(18): n is a, c, g, or u
uuuguaggcccncunacnaaaa

SEQ ID NO: 53481 - RNA, 23 nt, Artificial Sequence
  Synthetic
  misc_feature (13)..(13): n is a, c, g, or u
  misc_feature (16)..(16): n is a, c, g, or u
  misc_feature (19)..(19): n is a, c, g, or u
auuuguaggcccncunacnaaaa

SEQ ID NO: 53482 - RNA, 24 nt, Artificial Sequence
  Synthetic
  misc_feature (14)..(14): n is a, c, g, or u
  misc_feature (17)..(17): n is a, c, g, or u
  misc_feature (20)..(20): n is a, c, g, or u
aauuuguaggcccncunacnaaaa

SEQ ID NO: 53483 - RNA, 18 nt, Artificial Sequence
  Synthetic
  misc_feature (3)..(3): n is a, c, g, or u
canuuggccaauggcaaa

SEQ ID NO: 53484 - RNA, 19 nt, Artificial Sequence
  Synthetic
  misc_feature (4)..(4): n is a, c, g, or u
acanuuggccaauggcaaa

SEQ ID NO: 53485 - RNA, 22 nt, Artificial Sequence
  Synthetic
  misc_feature (7)..(7): n is a, c, g, or u
aggacanuuggccaauggcaaa

SEQ ID NO: 53486 - RNA, 23 nt, Artificial Sequence
  Synthetic
  misc_feature (8)..(8): n is a, c, g, or u
aaggacanuuggccaauggcaaa

SEQ ID NO: 53487 - RNA, 24 nt, Artificial Sequence
  Synthetic
  misc_feature (9)..(9): n is a, c, g, or u
caaggacanuuggccaauggcaaa

SEQ ID NO: 53488 - RNA, 18 nt, Artificial Sequence
  Synthetic
  misc_feature (2)..(2): n is a, c, g, or u
  misc_feature (8)..(8): n is a, c, g, or u
  misc_feature (11)..(11): n is a, c, g, or u
unaauacnucnaaaacaa

SEQ ID NO: 53489 - RNA, 19 nt, Artificial Sequence
  Synthetic
  misc_feature (3)..(3): n is a, c, g, or u
  misc_feature (9)..(9): n is a, c, g, or u
  misc_feature (12)..(12): n is a, c, g, or u
uunaauacnucnaaaacaa

SEQ ID NO: 53490 - RNA, 20 nt, Artificial Sequence
  Synthetic
  misc_feature (4)..(4): n is a, c, g, or u
  misc_feature (10)..(10): n is a, c, g, or u
  misc_feature (13)..(13): n is a, c, g, or u
uuunaauacnucnaaaacaa

SEQ ID NO: 53491 - RNA, 21 nt, Artificial Sequence
  Synthetic
  misc_feature (5)..(5): n is a, c, g, or u
  misc_feature (11)..(11): n is a, c, g, or u
  misc_feature (14)..(14): n is a, c, g, or u
auuunaauacnucnaaaacaa

SEQ ID NO: 53492 - RNA, 22 nt, Artificial Sequence
  Synthetic
  misc_feature (6)..(6): n is a, c, g, or u
  misc_feature (12)..(12): n is a, c, g, or u
  misc_feature (15)..(15): n is a, c, g, or u
cauuunaauacnucnaaaacaa

SEQ ID NO: 53493 - RNA, 23 nt, Artificial Sequence
  Synthetic
  misc_feature (7)..(7): n is a, c, g, or u
  misc_feature (13)..(13): n is a, c, g, or u
  misc_feature (16)..(16): n is a, c, g, or u
ccauuunaauacnucnaaaacaa

SEQ ID NO: 53494 - RNA, 24 nt, Artificial Sequence
  Synthetic
  misc_feature (8)..(8): n is a, c, g, or u
  misc_feature (14)..(14): n is a, c, g, or u
  misc_feature (17)..(17): n is a, c, g, or u
uccauuunaauacnucnaaaacaa

SEQ ID NO: 53495 - RNA, 19 nt, Artificial Sequence
  Synthetic
  misc_feature (8)..(8): n is a, c, g, or u
ugcucggnugugcugccaa

SEQ ID NO: 53496 - RNA, 20 nt, Artificial Sequence
  Synthetic
  misc_feature (9)..(9): n is a, c, g, or u
cugcucggnugugcugccaa

SEQ ID NO: 53497 - RNA, 19 nt, Artificial Sequence
  Synthetic
  misc_feature (4)..(4): n is a, c, g, or u
  misc_feature (7)..(7): n is a, c, g, or u
  misc_feature (10)..(10): n is a, c, g, or u
  misc_feature (13)..(13): n is a, c, g, or u
  misc_feature (16)..(16): n is a, c, g, or u
ugcngcnccnuunacncaa

SEQ ID NO: 53498 - RNA, 20 nt, Artificial Sequence
  Synthetic
  misc_feature (5)..(5): n is a, c, g, or u
  misc_feature (8)..(8): n is a, c, g, or u
  misc_feature (11)..(11): n is a, c, g, or u
  misc_feature (14)..(14): n is a, c, g, or u
  misc_feature (17)..(17): n is a, c, g, or u
uugcngcnccnuunacncaa

SEQ ID NO: 53499 - RNA, 21 nt, Artificial Sequence
  Synthetic
  misc_feature (6)..(6): n is a, c, g, or u
  misc_feature (9)..(9): n is a, c, g, or u
  misc_feature (12)..(12): n is a, c, g, or u
  misc_feature (15)..(15): n is a, c, g, or u
  misc_feature (18)..(18): n is a, c, g, or u
uuugcngcnccnuunacncaa

SEQ ID NO: 53500 - RNA, 22 nt, Artificial Sequence
  Synthetic
  misc_feature (7)..(7): n is a, c, g, or u
  misc_feature (10)..(10): n is a, c, g, or u
  misc_feature (13)..(13): n is a, c, g, or u
  misc_feature (16)..(16): n is a, c, g, or u
  misc_feature (19)..(19): n is a, c, g, or u
cuuugcngcnccnuunacncaa

SEQ ID NO: 53501 - RNA, 18 nt, Artificial Sequence
  Synthetic
aggaggcuguaggcauaa

SEQ ID NO: 53502 - RNA, 19 nt, Artificial Sequence
  Synthetic
uaggaggcuguaggcauaa

SEQ ID NO: 53503 - RNA, 20 nt, Artificial Sequence
  Synthetic
  misc_feature (1)..(1): n is a, c, g, or u
nuaggaggcuguaggcauaa

SEQ ID NO: 53504 - RNA, 21 nt, Artificial Sequence
  Synthetic
  misc_feature (2)..(2): n is a, c, g, or u
anuaggaggcuguaggcauaa

SEQ ID NO: 53505 - RNA, 22 nt, Artificial Sequence
  Synthetic
  misc_feature (3)..(3): n is a, c, g, or u
uanuaggaggcuguaggcauaa

SEQ ID NO: 53506 - RNA, 24 nt, Artificial Sequence
  Synthetic
  misc_feature (5)..(5): n is a, c, g, or u
uguanuaggaggcuguaggcauaa

SEQ ID NO: 53507 - RNA, 18 nt, Artificial Sequence
  Synthetic
  misc_feature (6)..(6): n is a, c, g, or u
ccuccngcuuauagacca

SEQ ID NO: 53508 - RNA, 19 nt, Artificial Sequence
  Synthetic
  misc_feature (7)..(7): n is a, c, g, or u
uccuccngcuuauagacca

SEQ ID NO: 53509 - RNA, 20 nt, Artificial Sequence
  Synthetic
  misc_feature (8)..(8): n is a, c, g, or u
cuccuccngcuuauagacca

SEQ ID NO: 53510 - RNA, 18 nt, Artificial Sequence
  Synthetic
aaaauccucacaauacca

SEQ ID NO: 53511 - RNA, 19 nt, Artificial Sequence
  Synthetic
aaaaauccucacaauacca

SEQ ID NO: 53512 - RNA, 20 nt, Artificial Sequence
  Synthetic
caaaaauccucacaauacca

SEQ ID NO: 53513 - RNA, 21 nt, Artificial Sequence
  Synthetic
acaaaaauccucacaauacca

SEQ ID NO: 53514 - RNA, 23 nt, Artificial Sequence
  Synthetic
ugacaaaaauccucacaauacca

SEQ ID NO: 53515 - RNA, 24 nt, Artificial Sequence
  Synthetic
uugacaaaaauccucacaauacca

SEQ ID NO: 53516 - RNA, 18 nt, Artificial Sequence
  Synthetic
  misc_feature (3)..(3): n is a, c, g, or u
ccnggguucacaccccca

SEQ ID NO: 53517 - RNA, 19 nt, Artificial Sequence
  Synthetic
  misc_feature (4)..(4): n is a, c, g, or u
uccnggguucacaccccca

SEQ ID NO: 53518 - RNA, 22 nt, Artificial Sequence
  Synthetic
  misc_feature (7)..(7): n is a, c, g, or u
cgguccnggguucacaccccca

SEQ ID NO: 53519 - RNA, 23 nt, Artificial Sequence
  Synthetic
  misc_feature (8)..(8): n is a, c, g, or u
acgguccnggguucacaccccca

SEQ ID NO: 53520 - RNA, 24 nt, Artificial Sequence
  Synthetic
  misc_feature (9)..(9): n is a, c, g, or u
uacgguccnggguucacaccccca

SEQ ID NO: 53521 - RNA, 19 nt, Artificial Sequence
  Synthetic
  misc_feature (4)..(5): n is a, c, g, or u
  misc_feature (7)..(7): n is a, c, g, or u
  misc_feature (13)..(13): n is a, c, g, or u
ugunnunacaacnuugcca

SEQ ID NO: 53522 - RNA, 22 nt, Artificial Sequence
  Synthetic
  misc_feature (1)..(1): n is a, c, g, or u
  misc_feature (7)..(8): n is a, c, g, or u
  misc_feature (10)..(10): n is a, c, g, or u
  misc_feature (16)..(16): n is a, c, g, or u
nggugunnunacaacnuugcca

SEQ ID NO: 53523 - RNA, 23 nt, Artificial Sequence
  Synthetic
  misc_feature (2)..(2): n is a, c, g, or u
  misc_feature (8)..(9): n is a, c, g, or u
  misc_feature (11)..(11): n is a, c, g, or u
  misc_feature (17)..(17): n is a, c, g, or u
anggugunnunacaacnuugcca

SEQ ID NO: 53524 - RNA, 24 nt, Artificial Sequence
  Synthetic
  misc_feature (3)..(3): n is a, c, g, or u
  misc_feature (9)..(10): n is a, c, g, or u
  misc_feature (12)..(12): n is a, c, g, or u
  misc_feature (18)..(18): n is a, c, g, or u
canggugunnunacaacnuugcca

SEQ ID NO: 53525 - RNA, 18 nt, Artificial Sequence
  Synthetic
cucaaucgccgcgucgca

SEQ ID NO: 53526 - RNA, 19 nt, Artificial Sequence
  Synthetic
ucucaaucgccgcgucgca

SEQ ID NO: 53527 - RNA, 20 nt, Artificial Sequence
  Synthetic
  misc_feature (1)..(1): n is a, c, g, or u
nucucaaucgccgcgucgca

SEQ ID NO: 53528 - RNA, 20 nt, Artificial Sequence
  Synthetic
  misc_feature (11)..(11): n is a, c, g, or u
  misc_feature (14)..(14): n is a, c, g, or u
ugggguggagnccncaggca

SEQ ID NO: 53529 - RNA, 21 nt, Artificial Sequence
  Synthetic
  misc_feature (1)..(1): n is a, c, g, or u
  misc_feature (12)..(12): n is a, c, g, or u
  misc_feature (15)..(15): n is a, c, g, or u
nugggguggagnccncaggca

SEQ ID NO: 53530 - RNA, 23 nt, Artificial Sequence
  Synthetic
  misc_feature (3)..(3): n is a, c, g, or u
  misc_feature (14)..(14): n is a, c, g, or u
  misc_feature (17)..(17): n is a, c, g, or u
ugnugggguggagnccncaggca

SEQ ID NO: 53531 - RNA, 24 nt, Artificial Sequence
  Synthetic
  misc_feature (4)..(4): n is a, c, g, or u
  misc_feature (15)..(15): n is a, c, g, or u
  misc_feature (18)..(18): n is a, c, g, or u
cugnugggguggagnccncaggca

SEQ ID NO: 53532 - RNA, 18 nt, Artificial Sequence
  Synthetic
uaguauuccuuggacuca

SEQ ID NO: 53533 - RNA, 19 nt, Artificial Sequence
  Synthetic
uuaguauuccuuggacuca

SEQ ID NO: 53534 - RNA, 18 nt, Artificial Sequence
  Synthetic
  misc_feature (3)..(3): n is a, c, g, or u
  misc_feature (6)..(6): n is a, c, g, or u
acnucnaaaacaaaaaga

SEQ ID NO: 53535 - RNA, 19 nt, Artificial Sequence
  Synthetic
  misc_feature (4)..(4): n is a, c, g, or u
  misc_feature (7)..(7): n is a, c, g, or u
uacnucnaaaacaaaaaga

SEQ ID NO: 53536 - RNA, 20 nt, Artificial Sequence
  Synthetic
  misc_feature (5)..(5): n is a, c, g, or u
  misc_feature (8)..(8): n is a, c, g, or u
auacnucnaaaacaaaaaga

SEQ ID NO: 53537 - RNA, 21 nt, Artificial Sequence
  Synthetic
  misc_feature (6)..(6): n is a, c, g, or u
  misc_feature (9)..(9): n is a, c, g, or u
aauacnucnaaaacaaaaaga

SEQ ID NO: 53538 - RNA, 22 nt, Artificial Sequence
  Synthetic
  misc_feature (1)..(1): n is a, c, g, or u
  misc_feature (7)..(7): n is a, c, g, or u
  misc_feature (10)..(10): n is a, c, g, or u
naauacnucnaaaacaaaaaga

SEQ ID NO: 53539 - RNA, 23 nt, Artificial Sequence
  Synthetic
  misc_feature (2)..(2): n is a, c, g, or u
  misc_feature (8)..(8): n is a, c, g, or u
  misc_feature (11)..(11): n is a, c, g, or u
unaauacnucnaaaacaaaaaga

SEQ ID NO: 53540 - RNA, 24 nt, Artificial Sequence
  Synthetic
  misc_feature (3)..(3): n is a, c, g, or u
  misc_feature (9)..(9): n is a, c, g, or u
  misc_feature (12)..(12): n is a, c, g, or u
uunaauacnucnaaaacaaaaaga

SEQ ID NO: 53541 - RNA, 18 nt, Artificial Sequence
  Synthetic
  misc_feature (1)..(1): n is a, c, g, or u
  misc_feature (10)..(10): n is a, c, g, or u
nauucauuuncaucaaga

SEQ ID NO: 53542 - RNA, 19 nt, Artificial Sequence
  Synthetic
  misc_feature (2)..(2): n is a, c, g, or u
  misc_feature (11)..(11): n is a, c, g, or u
anauucauuuncaucaaga

SEQ ID NO: 53543 - RNA, 21 nt, Artificial Sequence
  Synthetic
  misc_feature (4)..(4): n is a, c, g, or u
  misc_feature (13)..(13): n is a, c, g, or u
uganauucauuuncaucaaga

SEQ ID NO: 53544 - RNA, 22 nt, Artificial Sequence
  Synthetic
  misc_feature (5)..(5): n is a, c, g, or u
  misc_feature (14)..(14): n is a, c, g, or u
cuganauucauuuncaucaaga

SEQ ID NO: 53545 - RNA, 23 nt, Artificial Sequence
  Synthetic
  misc_feature (6)..(6): n is a, c, g, or u
  misc_feature (15)..(15): n is a, c, g, or u
ccuganauucauuuncaucaaga

SEQ ID NO: 53546 - RNA, 24 nt, Artificial Sequence
  Synthetic
  misc_feature (7)..(7): n is a, c, g, or u
  misc_feature (16)..(16): n is a, c, g, or u
uccuganauucauuuncaucaaga

SEQ ID NO: 53547 - RNA, 18 nt, Artificial Sequence
  Synthetic
  misc_feature (2)..(2): n is a, c, g, or u
  misc_feature (5)..(5): n is a, c, g, or u
  misc_feature (9)..(9): n is a, c, g, or u
cnggnauunuauauaaga

SEQ ID NO: 53548 - RNA, 20 nt, Artificial Sequence
  Synthetic
  misc_feature (1)..(1): n is a, c, g, or u
  misc_feature (4)..(4): n is a, c, g, or u
  misc_feature (7)..(7): n is a, c, g, or u
  misc_feature (11)..(11): n is a, c, g, or u
ngcnggnauunuauauaaga

SEQ ID NO: 53549 - RNA, 21 nt, Artificial Sequence
  Synthetic
  misc_feature (2)..(2): n is a, c, g, or u
  misc_feature (5)..(5): n is a, c, g, or u
  misc_feature (8)..(8): n is a, c, g, or u
  misc_feature (12)..(12): n is a, c, g, or u
angcnggnauunuauauaaga

SEQ ID NO: 53550 - RNA, 22 nt, Artificial Sequence
  Synthetic
  misc_feature (3)..(3): n is a, c, g, or u
  misc_feature (6)..(6): n is a, c, g, or u
  misc_feature (9)..(9): n is a, c, g, or u
  misc_feature (13)..(13): n is a, c, g, or u
aangcnggnauunuauauaaga

SEQ ID NO: 53551 - RNA, 18 nt, Artificial Sequence
  Synthetic
ccuuacuuuuggaagaga

SEQ ID NO: 53552 - RNA, 20 nt, Artificial Sequence
  Synthetic
ugccuuacuuuuggaagaga

SEQ ID NO: 53553 - RNA, 21 nt, Artificial Sequence
  Synthetic
cugccuuacuuuuggaagaga

SEQ ID NO: 53554 - RNA, 22 nt, Artificial Sequence
  Synthetic
ccugccuuacuuuuggaagaga

SEQ ID NO: 53555 - RNA, 23 nt, Artificial Sequence
  Synthetic
uccugccuuacuuuuggaagaga

SEQ ID NO: 53556 - RNA, 24 nt, Artificial Sequence
  Synthetic
uuccugccuuacuuuuggaagaga

SEQ ID NO: 53557 - RNA, 18 nt, Artificial Sequence
  Synthetic
  misc_feature (6)..(6): n is a, c, g, or u
aggagnugggggaggaga

SEQ ID NO: 53558 - RNA, 22 nt, Artificial Sequence
  Synthetic
  misc_feature (10)..(10): n is a, c, g, or u
ugggaggagnugggggaggaga

SEQ ID NO: 53559 - RNA, 23 nt, Artificial Sequence
  Synthetic
  misc_feature (11)..(11): n is a, c, g, or u
cugggaggagnugggggaggaga

SEQ ID NO: 53560 - RNA, 24 nt, Artificial Sequence
  Synthetic
  misc_feature (12)..(12): n is a, c, g, or u
acugggaggagnugggggaggaga

SEQ ID NO: 53561 - RNA, 18 nt, Artificial Sequence
  Synthetic
  misc_feature (1)..(1): n is a, c, g, or u
  misc_feature (4)..(4): n is a, c, g, or u
  misc_feature (10)..(10): n is a, c, g, or u
  misc_feature (13)..(13): n is a, c, g, or u
nganccugcngcnaggga

SEQ ID NO: 53562 - RNA, 19 nt, Artificial Sequence
  Synthetic
  misc_feature (2)..(2): n is a, c, g, or u
  misc_feature (5)..(5): n is a, c, g, or u
  misc_feature (11)..(11): n is a, c, g, or u
  misc_feature (14)..(14): n is a, c, g, or u
anganccugcngcnaggga

SEQ ID NO: 53563 - RNA, 22 nt, Artificial Sequence
  Synthetic
  misc_feature (5)..(5): n is a, c, g, or u
  misc_feature (8)..(8): n is a, c, g, or u
  misc_feature (14)..(14): n is a, c, g, or u
  misc_feature (17)..(17): n is a, c, g, or u
ugganganccugcngcnaggga

SEQ ID NO: 53564 - RNA, 23 nt, Artificial Sequence
  Synthetic
  misc_feature (6)..(6): n is a, c, g, or u
  misc_feature (9)..(9): n is a, c, g, or u
  misc_feature (15)..(15): n is a, c, g, or u
  misc_feature (18)..(18): n is a, c, g, or u
uugganganccugcngcnaggga

SEQ ID NO: 53565 - RNA, 24 nt, Artificial Sequence
  Synthetic
  misc_feature (1)..(1): n is a, c, g, or u
  misc_feature (7)..(7): n is a, c, g, or u
  misc_feature (10)..(10): n is a, c, g, or u
  misc_feature (16)..(16): n is a, c, g, or u
  misc_feature (19)..(19): n is a, c, g, or u
nuugganganccugcngcnaggga

SEQ ID NO: 53566 - RNA, 18 nt, Artificial Sequence
  Synthetic
  misc_feature (11)..(11): n is a, c, g, or u
cugggaggagnuggggga

SEQ ID NO: 53567 - RNA, 19 nt, Artificial Sequence
  Synthetic
  misc_feature (12)..(12): n is a, c, g, or u
acugggaggagnuggggga

SEQ ID NO: 53568 - RNA, 21 nt, Artificial Sequence
  Synthetic
  misc_feature (1)..(1): n is a, c, g, or u
  misc_feature (14)..(14): n is a, c, g, or u
ngacugggaggagnuggggga

SEQ ID NO: 53569 - RNA, 22 nt, Artificial Sequence
  Synthetic
  misc_feature (2)..(2): n is a, c, g, or u
  misc_feature (15)..(15): n is a, c, g, or u
angacugggaggagnuggggga

SEQ ID NO: 53570 - RNA, 23 nt, Artificial Sequence
  Synthetic
  misc_feature (3)..(3): n is a, c, g, or u
  misc_feature (16)..(16): n is a, c, g, or u
aangacugggaggagnuggggga

SEQ ID NO: 53571 - RNA, 24 nt, Artificial Sequence
  Synthetic
  misc_feature (4)..(4): n is a, c, g, or u
  misc_feature (17)..(17): n is a, c, g, or u
uaangacugggaggagnuggggga

SEQ ID NO: 53572 - RNA, 18 nt, Artificial Sequence
  Synthetic
  misc_feature (3)..(4): n is a, c, g, or u
acnngaaggggcauggga

SEQ ID NO: 53573 - RNA, 20 nt, Artificial Sequence
  Synthetic
  misc_feature (5)..(6): n is a, c, g, or u
cgacnngaaggggcauggga

SEQ ID NO: 53574 - RNA, 21 nt, Artificial Sequence
  Synthetic
  misc_feature (6)..(7): n is a, c, g, or u
acgacnngaaggggcauggga

SEQ ID NO: 53575 - RNA, 22 nt, Artificial Sequence
  Synthetic
  misc_feature (7)..(8): n is a, c, g, or u
aacgacnngaaggggcauggga

SEQ ID NO: 53576 - RNA, 23 nt, Artificial Sequence
  Synthetic
  misc_feature (8)..(9): n is a, c, g, or u
caacgacnngaaggggcauggga

SEQ ID NO: 53577 - RNA, 24 nt, Artificial Sequence
  Synthetic
  misc_feature (9)..(10): n is a, c, g, or u
ucaacgacnngaaggggcauggga

SEQ ID NO: 53578 - RNA, 18 nt, Artificial Sequence
  Synthetic
uuuuaguuauauggauga

SEQ ID NO: 53579 - RNA, 19 nt, Artificial Sequence
  Synthetic
cuuuuaguuauauggauga

SEQ ID NO: 53580 - RNA, 22 nt, Artificial Sequence
  Synthetic
uggcuuuuaguuauauggauga

SEQ ID NO: 53581 - RNA, 23 nt, Artificial Sequence
  Synthetic
cuggcuuuuaguuauauggauga

SEQ ID NO: 53582 - RNA, 24 nt, Artificial Sequence
  Synthetic
ucuggcuuuuaguuauauggauga

SEQ ID NO: 53583 - RNA, 18 nt, Artificial Sequence
  Synthetic
  misc_feature (4)..(4): n is a, c, g, or u
  misc_feature (10)..(10): n is a, c, g, or u
uaunuugugnugggguga

SEQ ID NO: 53584 - RNA, 19 nt, Artificial Sequence
  Synthetic
  misc_feature (5)..(5): n is a, c, g, or u
  misc_feature (11)..(11): n is a, c, g, or u
cuaunuugugnugggguga

SEQ ID NO: 53585 - RNA, 21 nt, Artificial Sequence
  Synthetic
  misc_feature (7)..(7): n is a, c, g, or u
  misc_feature (13)..(13): n is a, c, g, or u
agcuaunuugugnugggguga

SEQ ID NO: 53586 - RNA, 22 nt, Artificial Sequence
  Synthetic
  misc_feature (8)..(8): n is a, c, g, or u
  misc_feature (14)..(14): n is a, c, g, or u
aagcuaunuugugnugggguga

SEQ ID NO: 53587 - RNA, 23 nt, Artificial Sequence
  Synthetic
  misc_feature (9)..(9): n is a, c, g, or u
  misc_feature (15)..(15): n is a, c, g, or u
caagcuaunuugugnugggguga

SEQ ID NO: 53588 - RNA, 18 nt, Artificial Sequence
  Synthetic
  misc_feature (5)..(5): n is a, c, g, or u
  misc_feature (17)..(17): n is a, c, g, or u
acacncauccacaggcna

SEQ ID NO: 53589 - RNA, 20 nt, Artificial Sequence
  Synthetic
  misc_feature (7)..(7): n is a, c, g, or u
  misc_feature (19)..(19): n is a, c, g, or u
agacacncauccacaggcna

SEQ ID NO: 53590 - RNA, 22 nt, Artificial Sequence
  Synthetic
  misc_feature (9)..(9): n is a, c, g, or u
  misc_feature (21)..(21): n is a, c, g, or u
agagacacncauccacaggcna

SEQ ID NO: 53591 - RNA, 23 nt, Artificial Sequence
  Synthetic
  misc_feature (10)..(10): n is a, c, g, or u
  misc_feature (22)..(22): n is a, c, g, or u
aagagacacncauccacaggcna

SEQ ID NO: 53592 - RNA, 24 nt, Artificial Sequence
  Synthetic
  misc_feature (11)..(11): n is a, c, g, or u
  misc_feature (23)..(23): n is a, c, g, or u
uaagagacacncauccacaggcna

SEQ ID NO: 53593 - RNA, 21 nt, Artificial Sequence
  Synthetic
  misc_feature (11)..(11): n is a, c, g, or u
  misc_feature (14)..(14): n is a, c, g, or u
  misc_feature (17)..(17): n is a, c, g, or u
  misc_feature (20)..(20): n is a, c, g, or u
ugggcuuugcngcnccnuuna

SEQ ID NO: 53594 - RNA, 22 nt, Artificial Sequence
  Synthetic
  misc_feature (12)..(12): n is a, c, g, or u
  misc_feature (15)..(15): n is a, c, g, or u
  misc_feature (18)..(18): n is a, c, g, or u
  misc_feature (21)..(21): n is a, c, g, or u
uugggcuuugcngcnccnuuna

SEQ ID NO: 53595 - RNA, 23 nt, Artificial Sequence
  Synthetic
  misc_feature (13)..(13): n is a, c, g, or u
  misc_feature (16)..(16): n is a, c, g, or u
  misc_feature (19)..(19): n is a, c, g, or u
  misc_feature (22)..(22): n is a, c, g, or u
uuugggcuuugcngcnccnuuna

SEQ ID NO: 53596 - RNA, 24 nt, Artificial Sequence
  Synthetic
  misc_feature (14)..(14): n is a, c, g, or u
  misc_feature (17)..(17): n is a, c, g, or u
  misc_feature (20)..(20): n is a, c, g, or u
  misc_feature (23)..(23): n is a, c, g, or u
uuuugggcuuugcngcnccnuuna

SEQ ID NO: 53597 - RNA, 18 nt, Artificial Sequence
  Synthetic
uggacauugacccuuaua

SEQ ID NO: 53598 - RNA, 19 nt, Artificial Sequence
  Synthetic
auggacauugacccuuaua

SEQ ID NO: 53599 - RNA, 20 nt, Artificial Sequence
  Synthetic
cauggacauugacccuuaua

SEQ ID NO: 53600 - RNA, 18 nt, Artificial Sequence
  Synthetic
acucuguuguccucucua

SEQ ID NO: 53601 - RNA, 19 nt, Artificial Sequence
  Synthetic
aacucuguuguccucucua

SEQ ID NO: 53602 - RNA, 20 nt, Artificial Sequence
  Synthetic
caacucuguuguccucucua

SEQ ID NO: 53603 - RNA, 21 nt, Artificial Sequence
  Synthetic
acaacucuguuguccucucua

SEQ ID NO: 53604 - RNA, 23 nt, Artificial Sequence
  Synthetic
  misc_feature (1)..(1): n is a, c, g, or u
ngacaacucuguuguccucucua

SEQ ID NO: 53605 - RNA, 24 nt, Artificial Sequence
  Synthetic
  misc_feature (2)..(2): n is a, c, g, or u
cngacaacucuguuguccucucua

SEQ ID NO: 53606 - RNA, 18 nt, Artificial Sequence
  Synthetic
agaaacaguucuugagua

SEQ ID NO: 53607 - RNA, 20 nt, Artificial Sequence
  Synthetic
agagaaacaguucuugagua

SEQ ID NO: 53608 - RNA, 21 nt, Artificial Sequence
  Synthetic
aagagaaacaguucuugagua

SEQ ID NO: 53609 - RNA, 24 nt, Artificial Sequence
  Synthetic
uggaagagaaacaguucuugagua

SEQ ID NO: 53610 - RNA, 19 nt, Artificial Sequence
  Synthetic
  misc_feature (6)..(6): n is a, c, g, or u
  misc_feature (8)..(8): n is a, c, g, or u
  misc_feature (15)..(16): n is a, c, g, or u
agauununuccuaannuua

SEQ ID NO: 53611 - RNA, 20 nt, Artificial Sequence
  Synthetic
  misc_feature (1)..(1): n is a, c, g, or u
  misc_feature (7)..(7): n is a, c, g, or u
  misc_feature (9)..(9): n is a, c, g, or u
  misc_feature (16)..(17): n is a, c, g, or u
nagauununuccuaannuua

SEQ ID NO: 53612 - RNA, 21 nt, Artificial Sequence
  Synthetic
  misc_feature (2)..(2): n is a, c, g, or u
  misc_feature (8)..(8): n is a, c, g, or u
  misc_feature (10)..(10): n is a, c, g, or u
  misc_feature (17)..(18): n is a, c, g, or u
cnagauununuccuaannuua

SEQ ID NO: 53613 - RNA, 22 nt, Artificial Sequence
  Synthetic
  misc_feature (1)..(1): n is a, c, g, or u
  misc_feature (3)..(3): n is a, c, g, or u
  misc_feature (9)..(9): n is a, c, g, or u
  misc_feature (11)..(11): n is a, c, g, or u
  misc_feature (18)..(19): n is a, c, g, or u
ncnagauununuccuaannuua

SEQ ID NO: 53614 - RNA, 23 nt, Artificial Sequence
  Synthetic
  misc_feature (2)..(2): n is a, c, g, or u
  misc_feature (4)..(4): n is a, c, g, or u
  misc_feature (10)..(10): n is a, c, g, or u
  misc_feature (12)..(12): n is a, c, g, or u
  misc_feature (19)..(20): n is a, c, g, or u
ancnagauununuccuaannuua

SEQ ID NO: 53615 - RNA, 24 nt, Artificial Sequence
  Synthetic
  misc_feature (3)..(3): n is a, c, g, or u
  misc_feature (5)..(5): n is a, c, g, or u
  misc_feature (11)..(11): n is a, c, g, or u
  misc_feature (13)..(13): n is a, c, g, or u
  misc_feature (20)..(21): n is a, c, g, or u
cancnagauununuccuaannuua

SEQ ID NO: 53616 - RNA, 20 nt, Artificial Sequence
  Synthetic
  misc_feature (12)..(12): n is a, c, g, or u
  misc_feature (15)..(15): n is a, c, g, or u
cgguccgggagnaanccaac

SEQ ID NO: 53617 - RNA, 19 nt, Artificial Sequence
  Synthetic
cgguguguuucuuguugac

SEQ ID NO: 53618 - RNA, 22 nt, Artificial Sequence
  Synthetic
aggcgguguguuucuuguugac

SEQ ID NO: 53619 - RNA, 23 nt, Artificial Sequence
  Synthetic
caggcgguguguuucuuguugac

SEQ ID NO: 53620 - RNA, 24 nt, Artificial Sequence
  Synthetic
acaggcgguguguuucuuguugac

SEQ ID NO: 53621 - RNA, 18 nt, Artificial Sequence
  Synthetic
  misc_feature (15)..(16): n is a, c, g, or u
auuuucuagggggannac

SEQ ID NO: 53622 - RNA, 19 nt, Artificial Sequence
  Synthetic
  misc_feature (16)..(17): n is a, c, g, or u
aauuuucuagggggannac

SEQ ID NO: 53623 - RNA, 20 nt, Artificial Sequence
  Synthetic
  misc_feature (17)..(18): n is a, c, g, or u
caauuuucuagggggannac

SEQ ID NO: 53624 - RNA, 21 nt, Artificial Sequence
  Synthetic
  misc_feature (18)..(19): n is a, c, g, or u
ucaauuuucuagggggannac

SEQ ID NO: 53625 - RNA, 22 nt, Artificial Sequence
  Synthetic
  misc_feature (19)..(20): n is a, c, g, or u
cucaauuuucuagggggannac

SEQ ID NO: 53626 - RNA, 23 nt, Artificial Sequence
  Synthetic
  misc_feature (20)..(21): n is a, c, g, or u
ucucaauuuucuagggggannac

SEQ ID NO: 53627 - RNA, 24 nt, Artificial Sequence
  Synthetic
  misc_feature (21)..(22): n is a, c, g, or u
cucucaauuuucuagggggannac

SEQ ID NO: 53628 - RNA, 18 nt, Artificial Sequence
  Synthetic
  misc_feature (8)..(8): n is a, c, g, or u
  misc_feature (16)..(16): n is a, c, g, or u
uucagganggucaaunac

SEQ ID NO: 53629 - RNA, 19 nt, Artificial Sequence
  Synthetic
  misc_feature (9)..(9): n is a, c, g, or u
  misc_feature (17)..(17): n is a, c, g, or u
uuucagganggucaaunac

SEQ ID NO: 53630 - RNA, 20 nt, Artificial Sequence
  Synthetic
  misc_feature (10)..(10): n is a, c, g, or u
  misc_feature (18)..(18): n is a, c, g, or u
cuuucagganggucaaunac

SEQ ID NO: 53631 - RNA, 21 nt, Artificial Sequence
  Synthetic
  misc_feature (11)..(11): n is a, c, g, or u
  misc_feature (19)..(19): n is a, c, g, or u
acuuucagganggucaaunac

SEQ ID NO: 53632 - RNA, 24 nt, Artificial Sequence
  Synthetic
  misc_feature (14)..(14): n is a, c, g, or u
  misc_feature (22)..(22): n is a, c, g, or u
uggacuuucagganggucaaunac

SEQ ID NO: 53633 - RNA, 18 nt, Artificial Sequence
  Synthetic
  misc_feature (15)..(15): n is a, c, g, or u
accgcuucagcccunuac

SEQ ID NO: 53634 - RNA, 19 nt, Artificial Sequence
  Synthetic
  misc_feature (16)..(16): n is a, c, g, or u
caccgcuucagcccunuac

SEQ ID NO: 53635 - RNA, 20 nt, Artificial Sequence
  Synthetic
  misc_feature (17)..(17): n is a, c, g, or u
acaccgcuucagcccunuac

SEQ ID NO: 53636 - RNA, 18 nt, Artificial Sequence
  Synthetic
aauucgcaguccccaacc

SEQ ID NO: 53637 - RNA, 19 nt, Artificial Sequence
  Synthetic
aaauucgcaguccccaacc

SEQ ID NO: 53638 - RNA, 20 nt, Artificial Sequence
  Synthetic
aaaauucgcaguccccaacc

SEQ ID NO: 53639 - RNA, 18 nt, Artificial Sequence
  Synthetic
uuugcugacgcaaccccc

SEQ ID NO: 53640 - RNA, 20 nt, Artificial Sequence
  Synthetic
uguuugcugacgcaaccccc

SEQ ID NO: 53641 - RNA, 18 nt, Artificial Sequence
  Synthetic
aagccuccaagcugugcc

SEQ ID NO: 53642 - RNA, 19 nt, Artificial Sequence
  Synthetic
caagccuccaagcugugcc

SEQ ID NO: 53643 - RNA, 20 nt, Artificial Sequence
  Synthetic
ucaagccuccaagcugugcc

SEQ ID NO: 53644 - RNA, 18 nt, Artificial Sequence
  Synthetic
  misc_feature (7)..(8): n is a, c, g, or u
  misc_feature (10)..(10): n is a, c, g, or u
  misc_feature (13)..(13): n is a, c, g, or u
cgccccnngnagnuugcc

SEQ ID NO: 53645 - RNA, 19 nt, Artificial Sequence
  Synthetic
  misc_feature (8)..(9): n is a, c, g, or u
  misc_feature (11)..(11): n is a, c, g, or u
  misc_feature (14)..(14): n is a, c, g, or u
acgccccnngnagnuugcc

SEQ ID NO: 53646 - RNA, 20 nt, Artificial Sequence
  Synthetic
  misc_feature (9)..(10): n is a, c, g, or u
  misc_feature (12)..(12): n is a, c, g, or u
  misc_feature (15)..(15): n is a, c, g, or u
aacgccccnngnagnuugcc

SEQ ID NO: 53647 - RNA, 22 nt, Artificial Sequence
  Synthetic
  misc_feature (11)..(12): n is a, c, g, or u
  misc_feature (14)..(14): n is a, c, g, or u
  misc_feature (17)..(17): n is a, c, g, or u
ugaacgccccnngnagnuugcc

SEQ ID NO: 53648 - RNA, 24 nt, Artificial Sequence
  Synthetic
  misc_feature (13)..(14): n is a, c, g, or u
  misc_feature (16)..(16): n is a, c, g, or u
  misc_feature (19)..(19): n is a, c, g, or u
cgugaacgccccnngnagnuugcc

SEQ ID NO: 53649 - RNA, 18 nt, Artificial Sequence
  Synthetic
  misc_feature (7)..(7): n is a, c, g, or u
  misc_feature (13)..(13): n is a, c, g, or u
ccaggcncuguungaucc

SEQ ID NO: 53650 - RNA, 19 nt, Artificial Sequence
  Synthetic
  misc_feature (8)..(8): n is a, c, g, or u
  misc_feature (14)..(14): n is a, c, g, or u
accaggcncuguungaucc

SEQ ID NO: 53651 - RNA, 20 nt, Artificial Sequence
  Synthetic
  misc_feature (9)..(9): n is a, c, g, or u
  misc_feature (15)..(15): n is a, c, g, or u
caccaggcncuguungaucc

SEQ ID NO: 53652 - RNA, 21 nt, Artificial Sequence
  Synthetic
  misc_feature (10)..(10): n is a, c, g, or u
  misc_feature (16)..(16): n is a, c, g, or u
ccaccaggcncuguungaucc

SEQ ID NO: 53653 - RNA, 22 nt, Artificial Sequence
  Synthetic
  misc_feature (11)..(11): n is a, c, g, or u
  misc_feature (17)..(17): n is a, c, g, or u
uccaccaggcncuguungaucc

SEQ ID NO: 53654 - RNA, 23 nt, Artificial Sequence
  Synthetic
  misc_feature (12)..(12): n is a, c, g, or u
  misc_feature (18)..(18): n is a, c, g, or u
uuccaccaggcncuguungaucc

SEQ ID NO: 53655 - RNA, 18 nt, Artificial Sequence
  Synthetic
  misc_feature (3)..(3): n is a, c, g, or u
  misc_feature (9)..(9): n is a, c, g, or u
cunuucagngcaaauucc

SEQ ID NO: 53656 - RNA, 19 nt, Artificial Sequence
  Synthetic
  misc_feature (1)..(1): n is a, c, g, or u
  misc_feature (4)..(4): n is a, c, g, or u
  misc_feature (10)..(10): n is a, c, g, or u
ncunuucagngcaaauucc

SEQ ID NO: 53657 - RNA, 20 nt, Artificial Sequence
  Synthetic
  misc_feature (2)..(2): n is a, c, g, or u
  misc_feature (5)..(5): n is a, c, g, or u
  misc_feature (11)..(11): n is a, c, g, or u
cncunuucagngcaaauucc

SEQ ID NO: 53658 - RNA, 21 nt, Artificial Sequence
  Synthetic
  misc_feature (3)..(3): n is a, c, g, or u
  misc_feature (6)..(6): n is a, c, g, or u
  misc_feature (12)..(12): n is a, c, g, or u
ccncunuucagngcaaauucc

SEQ ID NO: 53659 - RNA, 22 nt, Artificial Sequence
  Synthetic
  misc_feature (4)..(4): n is a, c, g, or u
  misc_feature (7)..(7): n is a, c, g, or u
  misc_feature (13)..(13): n is a, c, g, or u
uccncunuucagngcaaauucc

SEQ ID NO: 53660 - RNA, 23 nt, Artificial Sequence
  Synthetic
  misc_feature (5)..(5): n is a, c, g, or u
  misc_feature (8)..(8): n is a, c, g, or u
  misc_feature (14)..(14): n is a, c, g, or u
auccncunuucagngcaaauucc

SEQ ID NO: 53661 - RNA, 19 nt, Artificial Sequence
  Synthetic
agauccgccuccugcuucc

SEQ ID NO: 53662 - RNA, 20 nt, Artificial Sequence
  Synthetic
cagauccgccuccugcuucc

SEQ ID NO: 53663 - RNA, 22 nt, Artificial Sequence
  Synthetic
agcagauccgccuccugcuucc

SEQ ID NO: 53664 - RNA, 23 nt, Artificial Sequence
  Synthetic
cagcagauccgccuccugcuucc

SEQ ID NO: 53665 - RNA, 24 nt, Artificial Sequence
  Synthetic
ccagcagauccgccuccugcuucc

SEQ ID NO: 53666 - RNA, 18 nt, Artificial Sequence
  Synthetic
  misc_feature (3)..(3): n is a, c, g, or u
uanuaggaggcuguaggc

SEQ ID NO: 53667 - RNA, 20 nt, Artificial Sequence
  Synthetic
  misc_feature (5)..(5): n is a, c, g, or u
uguanuaggaggcuguaggc

SEQ ID NO: 53668 - RNA, 18 nt, Artificial Sequence
  Synthetic
  misc_feature (1)..(2): n is a, c, g, or u
nnacccggguguccuggc

SEQ ID NO: 53669 - RNA, 19 nt, Artificial Sequence
  Synthetic
  misc_feature (2)..(3): n is a, c, g, or u
annacccggguguccuggc

SEQ ID NO: 53670 - RNA, 18 nt, Artificial Sequence
  Synthetic
uauuuuccugcugguggc

SEQ ID NO: 53671 - RNA, 20 nt, Artificial Sequence
  Synthetic
uguauuuuccugcugguggc

SEQ ID NO: 53672 - RNA, 21 nt, Artificial Sequence
  Synthetic
cuguauuuuccugcugguggc

SEQ ID NO: 53673 - RNA, 22 nt, Artificial Sequence
  Synthetic
ucuguauuuuccugcugguggc

SEQ ID NO: 53674 - RNA, 23 nt, Artificial Sequence
  Synthetic
cucuguauuuuccugcugguggc

SEQ ID NO: 53675 - RNA, 18 nt, Artificial Sequence
  Synthetic
  misc_feature (8)..(8): n is a, c, g, or u
  misc_feature (17)..(17): n is a, c, g, or u
ucucuguncccaauccnc

SEQ ID NO: 53676 - RNA, 19 nt, Artificial Sequence
  Synthetic
  misc_feature (9)..(9): n is a, c, g, or u
  misc_feature (18)..(18): n is a, c, g, or u
cucucuguncccaauccnc

SEQ ID NO: 53677 - RNA, 20 nt, Artificial Sequence
  Synthetic
  misc_feature (10)..(10): n is a, c, g, or u
  misc_feature (19)..(19): n is a, c, g, or u
ucucucuguncccaauccnc

SEQ ID NO: 53678 - RNA, 21 nt, Artificial Sequence
  Synthetic
  misc_feature (11)..(11): n is a, c, g, or u
  misc_feature (20)..(20): n is a, c, g, or u
aucucucuguncccaauccnc

SEQ ID NO: 53679 - RNA, 22 nt, Artificial Sequence
  Synthetic
  misc_feature (12)..(12): n is a, c, g, or u
  misc_feature (21)..(21): n is a, c, g, or u
aaucucucuguncccaauccnc

SEQ ID NO: 53680 - RNA, 24 nt, Artificial Sequence
  Synthetic
  misc_feature (14)..(14): n is a, c, g, or u
  misc_feature (23)..(23): n is a, c, g, or u
agaaucucucuguncccaauccnc

SEQ ID NO: 53681 - RNA, 18 nt, Artificial Sequence
  Synthetic
cuccugcuuccaccaauc

SEQ ID NO: 53682 - RNA, 19 nt, Artificial Sequence
  Synthetic
ccuccugcuuccaccaauc

SEQ ID NO: 53683 - RNA, 18 nt, Artificial Sequence
  Synthetic
uauugccucucucacauc

SEQ ID NO: 53684 - RNA, 19 nt, Artificial Sequence
  Synthetic
cuauugccucucucacauc

SEQ ID NO: 53685 - RNA, 20 nt, Artificial Sequence
  Synthetic
acuauugccucucucacauc

SEQ ID NO: 53686 - RNA, 22 nt, Artificial Sequence
  Synthetic
cgacuauugccucucucacauc

SEQ ID NO: 53687 - RNA, 23 nt, Artificial Sequence
  Synthetic
ccgacuauugccucucucacauc

SEQ ID NO: 53688 - RNA, 24 nt, Artificial Sequence
  Synthetic
uccgacuauugccucucucacauc

SEQ ID NO: 53689 - RNA, 18 nt, Artificial Sequence
  Synthetic
ccaaaucugugcagcauc

SEQ ID NO: 53690 - RNA, 20 nt, Artificial Sequence
  Synthetic
  misc_feature (13)..(13): n is a, c, g, or u
aggagugggaggnuacgguc

SEQ ID NO: 53691 - RNA, 21 nt, Artificial Sequence
  Synthetic
  misc_feature (14)..(14): n is a, c, g, or u
uaggagugggaggnuacgguc

SEQ ID NO: 53692 - RNA, 24 nt, Artificial Sequence
  Synthetic
  misc_feature (17)..(17): n is a, c, g, or u
agguaggagugggaggnuacgguc

SEQ ID NO: 53693 - RNA, 18 nt, Artificial Sequence
  Synthetic
  misc_feature (1)..(1): n is a, c, g, or u
nuuaaugacuuuggcuuc

SEQ ID NO: 53694 - RNA, 19 nt, Artificial Sequence
  Synthetic
  misc_feature (2)..(2): n is a, c, g, or u
anuuaaugacuuuggcuuc

SEQ ID NO: 53695 - RNA, 18 nt, Artificial Sequence
  Synthetic
uuggaagagaaacaguuc

SEQ ID NO: 53696 - RNA, 19 nt, Artificial Sequence
  Synthetic
uuuggaagagaaacaguuc

SEQ ID NO: 53697 - RNA, 20 nt, Artificial Sequence
  Synthetic
uuuuggaagagaaacaguuc

SEQ ID NO: 53698 - RNA, 21 nt, Artificial Sequence
  Synthetic
cuuuuggaagagaaacaguuc

SEQ ID NO: 53699 - RNA, 22 nt, Artificial Sequence
  Synthetic
acuuuuggaagagaaacaguuc

SEQ ID NO: 53700 - RNA, 23 nt, Artificial Sequence
  Synthetic
uacuuuuggaagagaaacaguuc

SEQ ID NO: 53701 - RNA, 24 nt, Artificial Sequence
  Synthetic
uuacuuuuggaagagaaacaguuc

SEQ ID NO: 53702 - RNA, 18 nt, Artificial Sequence
  Synthetic
uacuagugcaauuuguuc

SEQ ID NO: 53703 - RNA, 19 nt, Artificial Sequence
  Synthetic
uuacuagugcaauuuguuc

SEQ ID NO: 53704 - RNA, 20 nt, Artificial Sequence
  Synthetic
uuuacuagugcaauuuguuc

SEQ ID NO: 53705 - RNA, 18 nt, Artificial Sequence
  Synthetic
  misc_feature (15)..(15): n is a, c, g, or u
ccguuuguccucuanuuc

SEQ ID NO: 53706 - RNA, 19 nt, Artificial Sequence
  Synthetic
  misc_feature (16)..(16): n is a, c, g, or u
cccguuuguccucuanuuc

SEQ ID NO: 53707 - RNA, 21 nt, Artificial Sequence
  Synthetic
  misc_feature (18)..(18): n is a, c, g, or u
ugcccguuuguccucuanuuc

SEQ ID NO: 53708 - RNA, 22 nt, Artificial Sequence
  Synthetic
  misc_feature (19)..(19): n is a, c, g, or u
uugcccguuuguccucuanuuc

SEQ ID NO: 53709 - RNA, 24 nt, Artificial Sequence
  Synthetic
  misc_feature (21)..(21): n is a, c, g, or u
uguugcccguuuguccucuanuuc

SEQ ID NO: 53710 - RNA, 21 nt, Artificial Sequence
  Synthetic
  misc_feature (9)..(9): n is a, c, g, or u
  misc_feature (11)..(13): n is a, c, g, or u
  misc_feature (16)..(16): n is a, c, g, or u
ugggguuanannnuanauuuc

SEQ ID NO: 53711 - RNA, 22 nt, Artificial Sequence
  Synthetic
  misc_feature (10)..(10): n is a, c, g, or u
  misc_feature (12)..(14): n is a, c, g, or u
  misc_feature (17)..(17): n is a, c, g, or u
augggguuanannnuanauuuc

SEQ ID NO: 53712 - RNA, 24 nt, Artificial Sequence
  Synthetic
  misc_feature (12)..(12): n is a, c, g, or u
  misc_feature (14)..(16): n is a, c, g, or u
  misc_feature (19)..(19): n is a, c, g, or u
agaugggguuanannnuanauuuc

SEQ ID NO: 53713 - RNA, 18 nt, Artificial Sequence
  Synthetic
uucuuuccagaccaucag

SEQ ID NO: 53714 - RNA, 19 nt, Artificial Sequence
  Synthetic
auucuuuccagaccaucag

SEQ ID NO: 53715 - RNA, 19 nt, Artificial Sequence
  Synthetic
  misc_feature (1)..(1): n is a, c, g, or u
  misc_feature (7)..(7): n is a, c, g, or u
nggacunuuggacuuucag

SEQ ID NO: 53716 - RNA, 20 nt, Artificial Sequence
  Synthetic
  misc_feature (1)..(2): n is a, c, g, or u
  misc_feature (8)..(8): n is a, c, g, or u
nnggacunuuggacuuucag

SEQ ID NO: 53717 - RNA, 21 nt, Artificial Sequence
  Synthetic
  misc_feature (2)..(3): n is a, c, g, or u
  misc_feature (9)..(9): n is a, c, g, or u
annggacunuuggacuuucag

SEQ ID NO: 53718 - RNA, 22 nt, Artificial Sequence
  Synthetic
  misc_feature (3)..(4): n is a, c, g, or u
  misc_feature (10)..(10): n is a, c, g, or u
aannggacunuuggacuuucag

SEQ ID NO: 53719 - RNA, 23 nt, Artificial Sequence
  Synthetic
  misc_feature (4)..(5): n is a, c, g, or u
  misc_feature (11)..(11): n is a, c, g, or u
uaannggacunuuggacuuucag

SEQ ID NO: 53720 - RNA, 24 nt, Artificial Sequence
  Synthetic
  misc_feature (5)..(6): n is a, c, g, or u
  misc_feature (12)..(12): n is a, c, g, or u
auaannggacunuuggacuuucag

SEQ ID NO: 53721 - RNA, 18 nt, Artificial Sequence
  Synthetic
ccuggcucaguuuacuag

SEQ ID NO: 53722 - RNA, 19 nt, Artificial Sequence
  Synthetic
uccuggcucaguuuacuag

SEQ ID NO: 53723 - RNA, 20 nt, Artificial Sequence
  Synthetic
cuccuggcucaguuuacuag

SEQ ID NO: 53724 - RNA, 21 nt, Artificial Sequence
  Synthetic
ucuccuggcucaguuuacuag

SEQ ID NO: 53725 - RNA, 22 nt, Artificial Sequence
  Synthetic
uucuccuggcucaguuuacuag

SEQ ID NO: 53726 - RNA, 23 nt, Artificial Sequence
  Synthetic
uuucuccuggcucaguuuacuag

SEQ ID NO: 53727 - RNA, 18 nt, Artificial Sequence
  Synthetic
  misc_feature (8)..(8): n is a, c, g, or u
caucaucnugggcuuuag

SEQ ID NO: 53728 - RNA, 19 nt, Artificial Sequence
  Synthetic
  misc_feature (9)..(9): n is a, c, g, or u
ccaucaucnugggcuuuag

SEQ ID NO: 53729 - RNA, 20 nt, Artificial Sequence
  Synthetic
  misc_feature (10)..(10): n is a, c, g, or u
cccaucaucnugggcuuuag

SEQ ID NO: 53730 - RNA, 21 nt, Artificial Sequence
  Synthetic
  misc_feature (11)..(11): n is a, c, g, or u
ucccaucaucnugggcuuuag

SEQ ID NO: 53731 - RNA, 22 nt, Artificial Sequence
  Synthetic
  misc_feature (12)..(12): n is a, c, g, or u
aucccaucaucnugggcuuuag

SEQ ID NO: 53732 - RNA, 23 nt, Artificial Sequence
  Synthetic
  misc_feature (13)..(13): n is a, c, g, or u
caucccaucaucnugggcuuuag

SEQ ID NO: 53733 - RNA, 24 nt, Artificial Sequence
  Synthetic
  misc_feature (14)..(14): n is a, c, g, or u
ccaucccaucaucnugggcuuuag

SEQ ID NO: 53734 - RNA, 19 nt, Artificial Sequence
  Synthetic
  misc_feature (1)..(1): n is a, c, g, or u
  misc_feature (9)..(9): n is a, c, g, or u
nggucaaunaccuggaucg

SEQ ID NO: 53735 - RNA, 20 nt, Artificial Sequence
  Synthetic
  misc_feature (2)..(2): n is a, c, g, or u
  misc_feature (10)..(10): n is a, c, g, or u
anggucaaunaccuggaucg

SEQ ID NO: 53736 - RNA, 23 nt, Artificial Sequence
  Synthetic
  misc_feature (5)..(5): n is a, c, g, or u
  misc_feature (13)..(13): n is a, c, g, or u
agganggucaaunaccuggaucg

SEQ ID NO: 53737 - RNA, 24 nt, Artificial Sequence
  Synthetic
  misc_feature (6)..(6): n is a, c, g, or u
  misc_feature (14)..(14): n is a, c, g, or u
cagganggucaaunaccuggaucg

SEQ ID NO: 53738 - RNA, 21 nt, Artificial Sequence
  Synthetic
uccaacuuguccuggcuaucg

SEQ ID NO: 53739 - RNA, 22 nt, Artificial Sequence
  Synthetic
cuccaacuuguccuggcuaucg

SEQ ID NO: 53740 - RNA, 23 nt, Artificial Sequence
  Synthetic
ccuccaacuuguccuggcuaucg

SEQ ID NO: 53741 - RNA, 24 nt, Artificial Sequence
  Synthetic
uccuccaacuuguccuggcuaucg

SEQ ID NO: 53742 - RNA, 18 nt, Artificial Sequence
  Synthetic
augaucugguauuggggg

SEQ ID NO: 53743 - RNA, 18 nt, Artificial Sequence
  Synthetic
ucagcccguuucuccugg

SEQ ID NO: 53744 - RNA, 19 nt, Artificial Sequence
  Synthetic
cucagcccguuucuccugg

SEQ ID NO: 53745 - RNA, 20 nt, Artificial Sequence
  Synthetic
ccucagcccguuucuccugg

SEQ ID NO: 53746 - RNA, 24 nt, Artificial Sequence
  Synthetic
ugggccucagcccguuucuccugg

SEQ ID NO: 53747 - RNA, 18 nt, Artificial Sequence
  Synthetic
  misc_feature (2)..(2): n is a, c, g, or u
  misc_feature (17)..(17): n is a, c, g, or u
unuuggacuuucaggang

SEQ ID NO: 53748 - RNA, 19 nt, Artificial Sequence
  Synthetic
  misc_feature (3)..(3): n is a, c, g, or u
  misc_feature (18)..(18): n is a, c, g, or u
cunuuggacuuucaggang

SEQ ID NO: 53749 - RNA, 20 nt, Artificial Sequence
  Synthetic
  misc_feature (4)..(4): n is a, c, g, or u
  misc_feature (19)..(19): n is a, c, g, or u
acunuuggacuuucaggang

SEQ ID NO: 53750 - RNA, 23 nt, Artificial Sequence
  Synthetic
  misc_feature (1)..(1): n is a, c, g, or u
  misc_feature (7)..(7): n is a, c, g, or u
  misc_feature (22)..(22): n is a, c, g, or u
nggacunuuggacuuucaggang

SEQ ID NO: 53751 - RNA, 24 nt, Artificial Sequence
  Synthetic
  misc_feature (1)..(2): n is a, c, g, or u
  misc_feature (8)..(8): n is a, c, g, or u
  misc_feature (23)..(23): n is a, c, g, or u
nnggacunuuggacuuucaggang

SEQ ID NO: 53752 - RNA, 18 nt, Artificial Sequence
  Synthetic
cuggcuuuuaguuauaug

SEQ ID NO: 53753 - RNA, 19 nt, Artificial Sequence
  Synthetic
ucuggcuuuuaguuauaug

SEQ ID NO: 53754 - RNA, 21 nt, Artificial Sequence
  Synthetic
ugucuggcuuuuaguuauaug

SEQ ID NO: 53755 - RNA, 22 nt, Artificial Sequence
  Synthetic
cugucuggcuuuuaguuauaug

SEQ ID NO: 53756 - RNA, 23 nt, Artificial Sequence
  Synthetic
acugucuggcuuuuaguuauaug

SEQ ID NO: 53757 - RNA, 24 nt, Artificial Sequence
  Synthetic
cacugucuggcuuuuaguuauaug

SEQ ID NO: 53758 - RNA, 18 nt, Artificial Sequence
  Synthetic
  misc_feature (15)..(15): n is a, c, g, or u
caguuccaccaggcncug

SEQ ID NO: 53759 - RNA, 19 nt, Artificial Sequence
  Synthetic
  misc_feature (1)..(1): n is a, c, g, or u
  misc_feature (16)..(16): n is a, c, g, or u
ncaguuccaccaggcncug

SEQ ID NO: 53760 - RNA, 20 nt, Artificial Sequence
  Synthetic
  misc_feature (2)..(2): n is a, c, g, or u
  misc_feature (17)..(17): n is a, c, g, or u
cncaguuccaccaggcncug

SEQ ID NO: 53761 - RNA, 21 nt, Artificial Sequence
  Synthetic
  misc_feature (3)..(3): n is a, c, g, or u
  misc_feature (18)..(18): n is a, c, g, or u
acncaguuccaccaggcncug

SEQ ID NO: 53762 - RNA, 22 nt, Artificial Sequence
  Synthetic
  misc_feature (1)..(1): n is a, c, g, or u
  misc_feature (4)..(4): n is a, c, g, or u
  misc_feature (19)..(19): n is a, c, g, or u
nacncaguuccaccaggcncug

SEQ ID NO: 53763 - RNA, 23 nt, Artificial Sequence
  Synthetic
  misc_feature (2)..(2): n is a, c, g, or u
  misc_feature (5)..(5): n is a, c, g, or u
  misc_feature (20)..(20): n is a, c, g, or u
cnacncaguuccaccaggcncug

SEQ ID NO: 53764 - RNA, 24 nt, Artificial Sequence
  Synthetic
  misc_feature (3)..(3): n is a, c, g, or u
  misc_feature (6)..(6): n is a, c, g, or u
  misc_feature (21)..(21): n is a, c, g, or u
ucnacncaguuccaccaggcncug

SEQ ID NO: 53765 - RNA, 19 nt, Artificial Sequence
  Synthetic
ugcaacuuuuucaccucug

SEQ ID NO: 53766 - RNA, 20 nt, Artificial Sequence
  Synthetic
augcaacuuuuucaccucug

SEQ ID NO: 53767 - RNA, 18 nt, Artificial Sequence
  Synthetic
aagaauuuggagcuucug

SEQ ID NO: 53768 - RNA, 19 nt, Artificial Sequence
  Synthetic
aaagaauuuggagcuucug

SEQ ID NO: 53769 - RNA, 20 nt, Artificial Sequence
  Synthetic
uaaagaauuuggagcuucug

SEQ ID NO: 53770 - RNA, 21 nt, Artificial Sequence
  Synthetic
auaaagaauuuggagcuucug

SEQ ID NO: 53771 - RNA, 22 nt, Artificial Sequence
  Synthetic
uauaaagaauuuggagcuucug

SEQ ID NO: 53772 - RNA, 23 nt, Artificial Sequence
  Synthetic
uuauaaagaauuuggagcuucug

SEQ ID NO: 53773 - RNA, 24 nt, Artificial Sequence
  Synthetic
cuuauaaagaauuuggagcuucug

SEQ ID NO: 53774 - RNA, 18 nt, Artificial Sequence
  Synthetic
acuuuggcuuccugggug

SEQ ID NO: 53775 - RNA, 20 nt, Artificial Sequence
  Synthetic
ugacuuuggcuuccugggug

SEQ ID NO: 53776 - RNA, 18 nt, Artificial Sequence
  Synthetic
  misc_feature (2)..(3): n is a, c, g, or u
  misc_feature (9)..(11): n is a, c, g, or u
annugauannnaaaugug

SEQ ID NO: 53777 - RNA, 20 nt, Artificial Sequence
  Synthetic
  misc_feature (4)..(5): n is a, c, g, or u
  misc_feature (11)..(13): n is a, c, g, or u
agannugauannnaaaugug

SEQ ID NO: 53778 - RNA, 21 nt, Artificial Sequence
  Synthetic
  misc_feature (5)..(6): n is a, c, g, or u
  misc_feature (12)..(14): n is a, c, g, or u
aagannugauannnaaaugug

SEQ ID NO: 53779 - RNA, 22 nt, Artificial Sequence
  Synthetic
  misc_feature (6)..(7): n is a, c, g, or u
  misc_feature (13)..(15): n is a, c, g, or u
caagannugauannnaaaugug

SEQ ID NO: 53780 - RNA, 23 nt, Artificial Sequence
  Synthetic
  misc_feature (7)..(8): n is a, c, g, or u
  misc_feature (14)..(16): n is a, c, g, or u
ucaagannugauannnaaaugug

SEQ ID NO: 53781 - RNA, 24 nt, Artificial Sequence
  Synthetic
  misc_feature (8)..(9): n is a, c, g, or u
  misc_feature (15)..(17): n is a, c, g, or u
aucaagannugauannnaaaugug

SEQ ID NO: 53782 - RNA, 20 nt, Artificial Sequence
  Synthetic
cggcaacggccaggccugug

SEQ ID NO: 53783 - RNA, 18 nt, Artificial Sequence
  Synthetic
  misc_feature (7)..(7): n is a, c, g, or u
  misc_feature (10)..(10): n is a, c, g, or u
  misc_feature (16)..(16): n is a, c, g, or u
aaaucgnccnauuganug

SEQ ID NO: 53784 - RNA, 19 nt, Artificial Sequence
  Synthetic
  misc_feature (8)..(8): n is a, c, g, or u
  misc_feature (11)..(11): n is a, c, g, or u
  misc_feature (17)..(17): n is a, c, g, or u
uaaaucgnccnauuganug

SEQ ID NO: 53785 - RNA, 21 nt, Artificial Sequence
  Synthetic
  misc_feature (10)..(10): n is a, c, g, or u
  misc_feature (13)..(13): n is a, c, g, or u
  misc_feature (19)..(19): n is a, c, g, or u
uguaaaucgnccnauuganug

SEQ ID NO: 53786 - RNA, 22 nt, Artificial Sequence
  Synthetic
  misc_feature (11)..(11): n is a, c, g, or u
  misc_feature (14)..(14): n is a, c, g, or u
  misc_feature (20)..(20): n is a, c, g, or u
cuguaaaucgnccnauuganug

SEQ ID NO: 53787 - RNA, 23 nt, Artificial Sequence
  Synthetic
  misc_feature (12)..(12): n is a, c, g, or u
  misc_feature (15)..(15): n is a, c, g, or u
  misc_feature (21)..(21): n is a, c, g, or u
ccuguaaaucgnccnauuganug

SEQ ID NO: 53788 - RNA, 24 nt, Artificial Sequence
  Synthetic
  misc_feature (13)..(13): n is a, c, g, or u
  misc_feature (16)..(16): n is a, c, g, or u
  misc_feature (22)..(22): n is a, c, g, or u
uccuguaaaucgnccnauuganug

SEQ ID NO: 53789 - RNA, 18 nt, Artificial Sequence
  Synthetic
  misc_feature (3)..(3): n is a, c, g, or u
  misc_feature (15)..(15): n is a, c, g, or u
canaaacaaggacanuug

SEQ ID NO: 53790 - RNA, 19 nt, Artificial Sequence
  Synthetic
  misc_feature (4)..(4): n is a, c, g, or u
  misc_feature (16)..(16): n is a, c, g, or u
acanaaacaaggacanuug

SEQ ID NO: 53791 - RNA, 20 nt, Artificial Sequence
  Synthetic
  misc_feature (5)..(5): n is a, c, g, or u
  misc_feature (17)..(17): n is a, c, g, or u
aacanaaacaaggacanuug

SEQ ID NO: 53792 - RNA, 21 nt, Artificial Sequence
  Synthetic
  misc_feature (6)..(6): n is a, c, g, or u
  misc_feature (18)..(18): n is a, c, g, or u
caacanaaacaaggacanuug

SEQ ID NO: 53793 - RNA, 22 nt, Artificial Sequence
  Synthetic
  misc_feature (7)..(7): n is a, c, g, or u
  misc_feature (19)..(19): n is a, c, g, or u
ucaacanaaacaaggacanuug

SEQ ID NO: 53794 - RNA, 23 nt, Artificial Sequence
  Synthetic
  misc_feature (8)..(8): n is a, c, g, or u
  misc_feature (20)..(20): n is a, c, g, or u
uucaacanaaacaaggacanuug

SEQ ID NO: 53795 - RNA, 24 nt, Artificial Sequence
  Synthetic
  misc_feature (9)..(9): n is a, c, g, or u
  misc_feature (21)..(21): n is a, c, g, or u
cuucaacanaaacaaggacanuug

SEQ ID NO: 53796 - RNA, 19 nt, Artificial Sequence
  Synthetic
aguuuacuagugcaauuug

SEQ ID NO: 53797 - RNA, 20 nt, Artificial Sequence
  Synthetic
caguuuacuagugcaauuug

SEQ ID NO: 53798 - RNA, 18 nt, Artificial Sequence
  Synthetic
  misc_feature (2)..(2): n is a, c, g, or u
  misc_feature (8)..(9): n is a, c, g, or u
  misc_feature (18)..(18): n is a, c, g, or u
unaaauunnuuaugccan

SEQ ID NO: 53799 - RNA, 19 nt, Artificial Sequence
  Synthetic
  misc_feature (3)..(3): n is a, c, g, or u
  misc_feature (9)..(10): n is a, c, g, or u
  misc_feature (19)..(19): n is a, c, g, or u
uunaaauunnuuaugccan

SEQ ID NO: 53800 - RNA, 20 nt, Artificial Sequence
  Synthetic
  misc_feature (1)..(1): n is a, c, g, or u
  misc_feature (4)..(4): n is a, c, g, or u
  misc_feature (10)..(11): n is a, c, g, or u
  misc_feature (20)..(20): n is a, c, g, or u
nuunaaauunnuuaugccan

SEQ ID NO: 53801 - RNA, 22 nt, Artificial Sequence
  Synthetic
  misc_feature (3)..(3): n is a, c, g, or u
  misc_feature (6)..(6): n is a, c, g, or u
  misc_feature (12)..(13): n is a, c, g, or u
  misc_feature (22)..(22): n is a, c, g, or u
agnuunaaauunnuuaugccan

SEQ ID NO: 53802 - RNA, 23 nt, Artificial Sequence
  Synthetic
  misc_feature (4)..(4): n is a, c, g, or u
  misc_feature (7)..(7): n is a, c, g, or u
  misc_feature (13)..(14): n is a, c, g, or u
  misc_feature (23)..(23): n is a, c, g, or u
aagnuunaaauunnuuaugccan

SEQ ID NO: 53803 - RNA, 18 nt, Artificial Sequence
  Synthetic
  misc_feature (2)..(2): n is a, c, g, or u
  misc_feature (11)..(12): n is a, c, g, or u
  misc_feature (18)..(18): n is a, c, g, or u
uncaucaagannugauan

SEQ ID NO: 53804 - RNA, 19 nt, Artificial Sequence
  Synthetic
  misc_feature (3)..(3): n is a, c, g, or u
  misc_feature (12)..(13): n is a, c, g, or u
  misc_feature (19)..(19): n is a, c, g, or u
uuncaucaagannugauan

SEQ ID NO: 53805 - RNA, 20 nt, Artificial Sequence
  Synthetic
  misc_feature (4)..(4): n is a, c, g, or u
  misc_feature (13)..(14): n is a, c, g, or u
  misc_feature (20)..(20): n is a, c, g, or u
uuuncaucaagannugauan

SEQ ID NO: 53806 - RNA, 21 nt, Artificial Sequence
  Synthetic
  misc_feature (5)..(5): n is a, c, g, or u
  misc_feature (14)..(15): n is a, c, g, or u
  misc_feature (21)..(21): n is a, c, g, or u
auuuncaucaagannugauan

SEQ ID NO: 53807 - RNA, 22 nt, Artificial Sequence
  Synthetic
  misc_feature (6)..(6): n is a, c, g, or u
  misc_feature (15)..(16): n is a, c, g, or u
  misc_feature (22)..(22): n is a, c, g, or u
cauuuncaucaagannugauan

SEQ ID NO: 53808 - RNA, 23 nt, Artificial Sequence
  Synthetic
  misc_feature (7)..(7): n is a, c, g, or u
  misc_feature (16)..(17): n is a, c, g, or u
  misc_feature (23)..(23): n is a, c, g, or u
ucauuuncaucaagannugauan

SEQ ID NO: 53809 - RNA, 24 nt, Artificial Sequence
  Synthetic
  misc_feature (8)..(8): n is a, c, g, or u
  misc_feature (17)..(18): n is a, c, g, or u
  misc_feature (24)..(24): n is a, c, g, or u
uucauuuncaucaagannugauan

SEQ ID NO: 53810 - RNA, 18 nt, Artificial Sequence
  Synthetic
  misc_feature (18)..(18): n is a, c, g, or u
cugccguuccagccgacn

SEQ ID NO: 53811 - RNA, 19 nt, Artificial Sequence
  Synthetic
  misc_feature (19)..(19): n is a, c, g, or u
ucugccguuccagccgacn

SEQ ID NO: 53812 - RNA, 18 nt, Artificial Sequence
  Synthetic
  misc_feature (12)..(12): n is a, c, g, or u
  misc_feature (15)..(15): n is a, c, g, or u
  misc_feature (18)..(18): n is a, c, g, or u
uuuguaggcccncunacn

SEQ ID NO: 53813 - RNA, 19 nt, Artificial Sequence
  Synthetic
  misc_feature (13)..(13): n is a, c, g, or u
  misc_feature (16)..(16): n is a, c, g, or u
  misc_feature (19)..(19): n is a, c, g, or u
auuuguaggcccncunacn

SEQ ID NO: 53814 - RNA, 20 nt, Artificial Sequence
  Synthetic
  misc_feature (14)..(14): n is a, c, g, or u
  misc_feature (17)..(17): n is a, c, g, or u
  misc_feature (20)..(20): n is a, c, g, or u
aauuuguaggcccncunacn

SEQ ID NO: 53815 - RNA, 21 nt, Artificial Sequence
  Synthetic
  misc_feature (15)..(15): n is a, c, g, or u
  misc_feature (18)..(18): n is a, c, g, or u
  misc_feature (21)..(21): n is a, c, g, or u
caauuuguaggcccncunacn

SEQ ID NO: 53816 - RNA, 22 nt, Artificial Sequence
  Synthetic
  misc_feature (16)..(16): n is a, c, g, or u
  misc_feature (19)..(19): n is a, c, g, or u
  misc_feature (22)..(22): n is a, c, g, or u
acaauuuguaggcccncunacn

SEQ ID NO: 53817 - RNA, 23 nt, Artificial Sequence
  Synthetic
  misc_feature (17)..(17): n is a, c, g, or u
  misc_feature (20)..(20): n is a, c, g, or u
  misc_feature (23)..(23): n is a, c, g, or u
aacaauuuguaggcccncunacn

SEQ ID NO: 53818 - RNA, 18 nt, Artificial Sequence
  Synthetic
  misc_feature (10)..(10): n is a, c, g, or u
  misc_feature (18)..(18): n is a, c, g, or u
aguuggggancauuaccn

SEQ ID NO: 53819 - RNA, 19 nt, Artificial Sequence
  Synthetic
  misc_feature (1)..(1): n is a, c, g, or u
  misc_feature (11)..(11): n is a, c, g, or u
  misc_feature (19)..(19): n is a, c, g, or u
naguuggggancauuaccn

SEQ ID NO: 53820 - RNA, 22 nt, Artificial Sequence
  Synthetic
  misc_feature (4)..(4): n is a, c, g, or u
  misc_feature (14)..(14): n is a, c, g, or u
  misc_feature (22)..(22): n is a, c, g, or u
uggnaguuggggancauuaccn

SEQ ID NO: 53821 - RNA, 23 nt, Artificial Sequence
  Synthetic
  misc_feature (5)..(5): n is a, c, g, or u
  misc_feature (15)..(15): n is a, c, g, or u
  misc_feature (23)..(23): n is a, c, g, or u
uuggnaguuggggancauuaccn

SEQ ID NO: 53822 - RNA, 24 nt, Artificial Sequence
  Synthetic
  misc_feature (6)..(6): n is a, c, g, or u
  misc_feature (16)..(16): n is a, c, g, or u
  misc_feature (24)..(24): n is a, c, g, or u
auuggnaguuggggancauuaccn

SEQ ID NO: 53823 - RNA, 18 nt, Artificial Sequence
  Synthetic
  misc_feature (9)..(9): n is a, c, g, or u
  misc_feature (12)..(12): n is a, c, g, or u
  misc_feature (18)..(18): n is a, c, g, or u
cuggauccncunuucagn

SEQ ID NO: 53824 - RNA, 20 nt, Artificial Sequence
  Synthetic
  misc_feature (11)..(11): n is a, c, g, or u
  misc_feature (14)..(14): n is a, c, g, or u
  misc_feature (20)..(20): n is a, c, g, or u
agcuggauccncunuucagn

SEQ ID NO: 53825 - RNA, 21 nt, Artificial Sequence
  Synthetic
  misc_feature (12)..(12): n is a, c, g, or u
  misc_feature (15)..(15): n is a, c, g, or u
  misc_feature (21)..(21): n is a, c, g, or u
cagcuggauccncunuucagn

SEQ ID NO: 53826 - RNA, 22 nt, Artificial Sequence
  Synthetic
  misc_feature (13)..(13): n is a, c, g, or u
  misc_feature (16)..(16): n is a, c, g, or u
  misc_feature (22)..(22): n is a, c, g, or u
ucagcuggauccncunuucagn

SEQ ID NO: 53827 - RNA, 23 nt, Artificial Sequence
  Synthetic
  misc_feature (14)..(14): n is a, c, g, or u
  misc_feature (17)..(17): n is a, c, g, or u
  misc_feature (23)..(23): n is a, c, g, or u
aucagcuggauccncunuucagn

SEQ ID NO: 53828 - RNA, 24 nt, Artificial Sequence
  Synthetic
  misc_feature (15)..(15): n is a, c, g, or u
  misc_feature (18)..(18): n is a, c, g, or u
  misc_feature (24)..(24): n is a, c, g, or u
caucagcuggauccncunuucagn

SEQ ID NO: 53829 - RNA, 18 nt, Artificial Sequence
  Synthetic
  misc_feature (18)..(18): n is a, c, g, or u
aagguaggagugggaggn

SEQ ID NO: 53830 - RNA, 19 nt, Artificial Sequence
  Synthetic
  misc_feature (19)..(19): n is a, c, g, or u
caagguaggagugggaggn

SEQ ID NO: 53831 - RNA, 20 nt, Artificial Sequence
  Synthetic
  misc_feature (20)..(20): n is a, c, g, or u
acaagguaggagugggaggn

SEQ ID NO: 53832 - RNA, 21 nt, Artificial Sequence
  Synthetic
  misc_feature (21)..(21): n is a, c, g, or u
aacaagguaggagugggaggn

SEQ ID NO: 53833 - RNA, 22 nt, Artificial Sequence
  Synthetic
  misc_feature (22)..(22): n is a, c, g, or u
aaacaagguaggagugggaggn

SEQ ID NO: 53834 - RNA, 23 nt, Artificial Sequence
  Synthetic
  misc_feature (23)..(23): n is a, c, g, or u
caaacaagguaggagugggaggn

SEQ ID NO: 53835 - RNA, 18 nt, Artificial Sequence
  Synthetic
  misc_feature (18)..(18): n is a, c, g, or u
ccccacacgguggccugn

SEQ ID NO: 53836 - RNA, 19 nt, Artificial Sequence
  Synthetic
  misc_feature (19)..(19): n is a, c, g, or u
cccccacacgguggccugn

SEQ ID NO: 53837 - RNA, 20 nt, Artificial Sequence
  Synthetic
  misc_feature (20)..(20): n is a, c, g, or u
acccccacacgguggccugn

SEQ ID NO: 53838 - RNA, 21 nt, Artificial Sequence
  Synthetic
  misc_feature (21)..(21): n is a, c, g, or u
cacccccacacgguggccugn

SEQ ID NO: 53839 - RNA, 22 nt, Artificial Sequence
  Synthetic
  misc_feature (22)..(22): n is a, c, g, or u
acacccccacacgguggccugn

SEQ ID NO: 53840 - RNA, 23 nt, Artificial Sequence
  Synthetic
  misc_feature (23)..(23): n is a, c, g, or u
cacacccccacacgguggccugn

SEQ ID NO: 53841 - RNA, 24 nt, Artificial Sequence
  Synthetic
  misc_feature (24)..(24): n is a, c, g, or u
ucacacccccacacgguggccugn

SEQ ID NO: 53842 - RNA, 18 nt, Artificial Sequence
  Synthetic
  misc_feature (12)..(12): n is a, c, g, or u
  misc_feature (18)..(18): n is a, c, g, or u
aggcaagcuaunuugugn

SEQ ID NO: 53843 - RNA, 19 nt, Artificial Sequence
  Synthetic
  misc_feature (13)..(13): n is a, c, g, or u
  misc_feature (19)..(19): n is a, c, g, or u
caggcaagcuaunuugugn

SEQ ID NO: 53844 - RNA, 20 nt, Artificial Sequence
  Synthetic
  misc_feature (14)..(14): n is a, c, g, or u
  misc_feature (20)..(20): n is a, c, g, or u
ucaggcaagcuaunuugugn

SEQ ID NO: 53845 - RNA, 21 nt, Artificial Sequence
  Synthetic
  misc_feature (15)..(15): n is a, c, g, or u
  misc_feature (21)..(21): n is a, c, g, or u
cucaggcaagcuaunuugugn

SEQ ID NO: 53846 - RNA, 22 nt, Artificial Sequence
  Synthetic
  misc_feature (16)..(16): n is a, c, g, or u
  misc_feature (22)..(22): n is a, c, g, or u
ucucaggcaagcuaunuugugn

SEQ ID NO: 53847 - RNA, 23 nt, Artificial Sequence
  Synthetic
  misc_feature (17)..(17): n is a, c, g, or u
  misc_feature (23)..(23): n is a, c, g, or u
cucucaggcaagcuaunuugugn

SEQ ID NO: 53848 - RNA, 18 nt, Artificial Sequence
  Synthetic
  misc_feature (12)..(13): n is a, c, g, or u
  misc_feature (15)..(15): n is a, c, g, or u
  misc_feature (17)..(18): n is a, c, g, or u
uauuauccugannangnn

SEQ ID NO: 53849 - RNA, 19 nt, Artificial Sequence
  Synthetic
  misc_feature (1)..(1): n is a, c, g, or u
  misc_feature (13)..(14): n is a, c, g, or u
  misc_feature (16)..(16): n is a, c, g, or u
  misc_feature (18)..(19): n is a, c, g, or u
nuauuauccugannangnn

SEQ ID NO: 53850 - RNA, 20 nt, Artificial Sequence
  Synthetic
  misc_feature (2)..(2): n is a, c, g, or u
  misc_feature (14)..(15): n is a, c, g, or u
  misc_feature (17)..(17): n is a, c, g, or u
  misc_feature (19)..(20): n is a, c, g, or u
cnuauuauccugannangnn

SEQ ID NO: 53851 - RNA, 21 nt, Artificial Sequence
  Synthetic
  misc_feature (3)..(3): n is a, c, g, or u
  misc_feature (15)..(16): n is a, c, g, or u
  misc_feature (18)..(18): n is a, c, g, or u
  misc_feature (20)..(21): n is a, c, g, or u
ccnuauuauccugannangnn

SEQ ID NO: 53852 - RNA, 22 nt, Artificial Sequence
  Synthetic
  misc_feature (4)..(4): n is a, c, g, or u
  misc_feature (16)..(17): n is a, c, g, or u
  misc_feature (19)..(19): n is a, c, g, or u
  misc_feature (21)..(22): n is a, c, g, or u
accnuauuauccugannangnn

SEQ ID NO: 53853 - RNA, 23 nt, Artificial Sequence
  Synthetic
  misc_feature (5)..(5): n is a, c, g, or u
  misc_feature (17)..(18): n is a, c, g, or u
  misc_feature (20)..(20): n is a, c, g, or u
  misc_feature (22)..(23): n is a, c, g, or u
aaccnuauuauccugannangnn

SEQ ID NO: 53854 - RNA, 24 nt, Artificial Sequence
  Synthetic
  misc_feature (6)..(6): n is a, c, g, or u
  misc_feature (18)..(19): n is a, c, g, or u
  misc_feature (21)..(21): n is a, c, g, or u
  misc_feature (23)..(24): n is a, c, g, or u
aaaccnuauuauccugannangnn

SEQ ID NO: 53855 - RNA, 18 nt, Artificial Sequence
  Synthetic
  misc_feature (5)..(5): n is a, c, g, or u
  misc_feature (15)..(15): n is a, c, g, or u
  misc_feature (17)..(18): n is a, c, g, or u
uaaanauuagacaanunn

SEQ ID NO: 53856 - RNA, 19 nt, Artificial Sequence
  Synthetic
  misc_feature (1)..(1): n is a, c, g, or u
  misc_feature (6)..(6): n is a, c, g, or u
  misc_feature (16)..(16): n is a, c, g, or u
  misc_feature (18)..(19): n is a, c, g, or u
nuaaanauuagacaanunn

SEQ ID NO: 53857 - RNA, 20 nt, Artificial Sequence
  Synthetic
  misc_feature (2)..(2): n is a, c, g, or u
  misc_feature (7)..(7): n is a, c, g, or u
  misc_feature (17)..(17): n is a, c, g, or u
  misc_feature (19)..(20): n is a, c, g, or u
cnuaaanauuagacaanunn

SEQ ID NO: 53858 - RNA, 24 nt, Artificial Sequence
  Synthetic
  misc_feature (6)..(6): n is a, c, g, or u
  misc_feature (11)..(11): n is a, c, g, or u
  misc_feature (21)..(21): n is a, c, g, or u
  misc_feature (23)..(24): n is a, c, g, or u
ugggcnuaaanauuagacaanunn

SEQ ID NO: 53859 - RNA, 18 nt, Artificial Sequence
  Synthetic
  misc_feature (2)..(2): n is a, c, g, or u
  misc_feature (6)..(6): n is a, c, g, or u
  misc_feature (11)..(11): n is a, c, g, or u
  misc_feature (18)..(18): n is a, c, g, or u
unccuncuuunaauccun

SEQ ID NO: 53860 - RNA, 20 nt, Artificial Sequence
  Synthetic
  misc_feature (4)..(4): n is a, c, g, or u
  misc_feature (8)..(8): n is a, c, g, or u
  misc_feature (13)..(13): n is a, c, g, or u
  misc_feature (20)..(20): n is a, c, g, or u
ugunccuncuuunaauccun

SEQ ID NO: 53861 - RNA, 21 nt, Artificial Sequence
  Synthetic
  misc_feature (5)..(5): n is a, c, g, or u
  misc_feature (9)..(9): n is a, c, g, or u
  misc_feature (14)..(14): n is a, c, g, or u
  misc_feature (21)..(21): n is a, c, g, or u
cugunccuncuuunaauccun

SEQ ID NO: 53862 - RNA, 22 nt, Artificial Sequence
  Synthetic
  misc_feature (6)..(6): n is a, c, g, or u
  misc_feature (10)..(10): n is a, c, g, or u
  misc_feature (15)..(15): n is a, c, g, or u
  misc_feature (22)..(22): n is a, c, g, or u
acugunccuncuuunaauccun

SEQ ID NO: 53863 - RNA, 23 nt, Artificial Sequence
  Synthetic
  misc_feature (7)..(7): n is a, c, g, or u
  misc_feature (11)..(11): n is a, c, g, or u
  misc_feature (16)..(16): n is a, c, g, or u
  misc_feature (23)..(23): n is a, c, g, or u
uacugunccuncuuunaauccun

SEQ ID NO: 53864 - RNA, 24 nt, Artificial Sequence
  Synthetic
  misc_feature (8)..(8): n is a, c, g, or u
  misc_feature (12)..(12): n is a, c, g, or u
  misc_feature (17)..(17): n is a, c, g, or u
  misc_feature (24)..(24): n is a, c, g, or u
cuacugunccuncuuunaauccun

SEQ ID NO: 53865 - RNA, 20 nt, Artificial Sequence
  Synthetic
  misc_feature (20)..(20): n is a, c, g, or u
ugggacagaaucucucugun

SEQ ID NO: 53866 - RNA, 21 nt, Artificial Sequence
  Synthetic
  misc_feature (21)..(21): n is a, c, g, or u
augggacagaaucucucugun

SEQ ID NO: 53867 - RNA, 22 nt, Artificial Sequence
  Synthetic
  misc_feature (22)..(22): n is a, c, g, or u
caugggacagaaucucucugun

SEQ ID NO: 53868 - RNA, 18 nt, Artificial Sequence
  Synthetic
aaucuccagcuucccaau

SEQ ID NO: 53869 - RNA, 19 nt, Artificial Sequence
  Synthetic
caaucuccagcuucccaau

SEQ ID NO: 53870 - RNA, 20 nt, Artificial Sequence
  Synthetic
ucaaucuccagcuucccaau

SEQ ID NO: 53871 - RNA, 18 nt, Artificial Sequence
  Synthetic
uuaucuguggguauccau

SEQ ID NO: 53872 - RNA, 20 nt, Artificial Sequence
  Synthetic
uguuaucuguggguauccau

SEQ ID NO: 53873 - RNA, 21 nt, Artificial Sequence
  Synthetic
cuguuaucuguggguauccau

SEQ ID NO: 53874 - RNA, 22 nt, Artificial Sequence
  Synthetic
ucuguuaucuguggguauccau

SEQ ID NO: 53875 - RNA, 23 nt, Artificial Sequence
  Synthetic
uucuguuaucuguggguauccau

SEQ ID NO: 53876 - RNA, 24 nt, Artificial Sequence
  Synthetic
uuucuguuaucuguggguauccau

SEQ ID NO: 53877 - RNA, 18 nt, Artificial Sequence
  Synthetic
uugguucuucuggacuau

SEQ ID NO: 53878 - RNA, 20 nt, Artificial Sequence
  Synthetic
uguugguucuucuggacuau

SEQ ID NO: 53879 - RNA, 21 nt, Artificial Sequence
  Synthetic
uuguugguucuucuggacuau

SEQ ID NO: 53880 - RNA, 22 nt, Artificial Sequence
  Synthetic
cuuguugguucuucuggacuau

SEQ ID NO: 53881 - RNA, 23 nt, Artificial Sequence
  Synthetic
ucuuguugguucuucuggacuau

SEQ ID NO: 53882 - RNA, 24 nt, Artificial Sequence
  Synthetic
uucuuguugguucuucuggacuau

SEQ ID NO: 53883 - RNA, 18 nt, Artificial Sequence
  Synthetic
cuuuaggaaaauaccuau

SEQ ID NO: 53884 - RNA, 22 nt, Artificial Sequence
  Synthetic
ugggcuuuaggaaaauaccuau

SEQ ID NO: 53885 - RNA, 23 nt, Artificial Sequence
  Synthetic
  misc_feature (1)..(1): n is a, c, g, or u
nugggcuuuaggaaaauaccuau

SEQ ID NO: 53886 - RNA, 24 nt, Artificial Sequence
  Synthetic
  misc_feature (2)..(2): n is a, c, g, or u
cnugggcuuuaggaaaauaccuau

SEQ ID NO: 53887 - RNA, 18 nt, Artificial Sequence
  Synthetic
ugucuggcuuuuaguuau

SEQ ID NO: 53888 - RNA, 19 nt, Artificial Sequence
  Synthetic
cugucuggcuuuuaguuau

SEQ ID NO: 53889 - RNA, 20 nt, Artificial Sequence
  Synthetic
acugucuggcuuuuaguuau

SEQ ID NO: 53890 - RNA, 21 nt, Artificial Sequence
  Synthetic
cacugucuggcuuuuaguuau

SEQ ID NO: 53891 - RNA, 22 nt, Artificial Sequence
  Synthetic
ccacugucuggcuuuuaguuau

SEQ ID NO: 53892 - RNA, 23 nt, Artificial Sequence
  Synthetic
cccacugucuggcuuuuaguuau

SEQ ID NO: 53893 - RNA, 24 nt, Artificial Sequence
  Synthetic
ccccacugucuggcuuuuaguuau

SEQ ID NO: 53894 - RNA, 18 nt, Artificial Sequence
  Synthetic
uaccacagagucuagacu

SEQ ID NO: 53895 - RNA, 19 nt, Artificial Sequence
  Synthetic
auaccacagagucuagacu

SEQ ID NO: 53896 - RNA, 20 nt, Artificial Sequence
  Synthetic
aauaccacagagucuagacu

SEQ ID NO: 53897 - RNA, 18 nt, Artificial Sequence
  Synthetic
cuuguugacaaaaauccu

SEQ ID NO: 53898 - RNA, 19 nt, Artificial Sequence
  Synthetic
ucuuguugacaaaaauccu

SEQ ID NO: 53899 - RNA, 20 nt, Artificial Sequence
  Synthetic
uucuuguugacaaaaauccu

SEQ ID NO: 53900 - RNA, 18 nt, Artificial Sequence
  Synthetic
  misc_feature (7)..(7): n is a, c, g, or u
  misc_feature (9)..(9): n is a, c, g, or u
uguuuungnaaacuuccu

SEQ ID NO: 53901 - RNA, 19 nt, Artificial Sequence
  Synthetic
  misc_feature (1)..(1): n is a, c, g, or u
  misc_feature (8)..(8): n is a, c, g, or u
  misc_feature (10)..(10): n is a, c, g, or u
nuguuuungnaaacuuccu

SEQ ID NO: 53902 - RNA, 20 nt, Artificial Sequence
  Synthetic
  misc_feature (2)..(2): n is a, c, g, or u
  misc_feature (9)..(9): n is a, c, g, or u
  misc_feature (11)..(11): n is a, c, g, or u
anuguuuungnaaacuuccu

SEQ ID NO: 53903 - RNA, 22 nt, Artificial Sequence
  Synthetic
  misc_feature (4)..(4): n is a, c, g, or u
  misc_feature (11)..(11): n is a, c, g, or u
  misc_feature (13)..(13): n is a, c, g, or u
aganuguuuungnaaacuuccu

SEQ ID NO: 53904 - RNA, 23 nt, Artificial Sequence
  Synthetic
  misc_feature (5)..(5): n is a, c, g, or u
  misc_feature (12)..(12): n is a, c, g, or u
  misc_feature (14)..(14): n is a, c, g, or u
aaganuguuuungnaaacuuccu

SEQ ID NO: 53905 - RNA, 24 nt, Artificial Sequence
  Synthetic
  misc_feature (6)..(6): n is a, c, g, or u
  misc_feature (13)..(13): n is a, c, g, or u
  misc_feature (15)..(15): n is a, c, g, or u
aaaganuguuuungnaaacuuccu

SEQ ID NO: 53906 - RNA, 18 nt, Artificial Sequence
  Synthetic
agggcucuguauuuuccu

SEQ ID NO: 53907 - RNA, 19 nt, Artificial Sequence
  Synthetic
aagggcucuguauuuuccu

SEQ ID NO: 53908 - RNA, 20 nt, Artificial Sequence
  Synthetic
uaagggcucuguauuuuccu

SEQ ID NO: 53909 - RNA, 24 nt, Artificial Sequence
  Synthetic
aggguaagggcucuguauuuuccu

SEQ ID NO: 53910 - RNA, 18 nt, Artificial Sequence
  Synthetic
uucccccacugucuggcu

SEQ ID NO: 53911 - RNA, 19 nt, Artificial Sequence
  Synthetic
uuucccccacugucuggcu

SEQ ID NO: 53912 - RNA, 20 nt, Artificial Sequence
  Synthetic
cuuucccccacugucuggcu

SEQ ID NO: 53913 - RNA, 18 nt, Artificial Sequence
  Synthetic
  misc_feature (3)..(3): n is a, c, g, or u
  misc_feature (12)..(12): n is a, c, g, or u
  misc_feature (16)..(16): n is a, c, g, or u
ucnucuacugunccuncu

SEQ ID NO: 53914 - RNA, 19 nt, Artificial Sequence
  Synthetic
  misc_feature (1)..(1): n is a, c, g, or u
  misc_feature (4)..(4): n is a, c, g, or u
  misc_feature (13)..(13): n is a, c, g, or u
  misc_feature (17)..(17): n is a, c, g, or u
nucnucuacugunccuncu

SEQ ID NO: 53915 - RNA, 20 nt, Artificial Sequence
  Synthetic
  misc_feature (2)..(2): n is a, c, g, or u
  misc_feature (5)..(5): n is a, c, g, or u
  misc_feature (14)..(14): n is a, c, g, or u
  misc_feature (18)..(18): n is a, c, g, or u
anucnucuacugunccuncu

SEQ ID NO: 53916 - RNA, 21 nt, Artificial Sequence
  Synthetic
  misc_feature (3)..(3): n is a, c, g, or u
  misc_feature (6)..(6): n is a, c, g, or u
  misc_feature (15)..(15): n is a, c, g, or u
  misc_feature (19)..(19): n is a, c, g, or u
uanucnucuacugunccuncu

SEQ ID NO: 53917 - RNA, 22 nt, Artificial Sequence
  Synthetic
  misc_feature (4)..(4): n is a, c, g, or u
  misc_feature (7)..(7): n is a, c, g, or u
  misc_feature (16)..(16): n is a, c, g, or u
  misc_feature (20)..(20): n is a, c, g, or u
cuanucnucuacugunccuncu

SEQ ID NO: 53918 - RNA, 23 nt, Artificial Sequence
  Synthetic
  misc_feature (5)..(5): n is a, c, g, or u
  misc_feature (8)..(8): n is a, c, g, or u
  misc_feature (17)..(17): n is a, c, g, or u
  misc_feature (21)..(21): n is a, c, g, or u
ucuanucnucuacugunccuncu

SEQ ID NO: 53919 - RNA, 24 nt, Artificial Sequence
  Synthetic
  misc_feature (6)..(6): n is a, c, g, or u
  misc_feature (9)..(9): n is a, c, g, or u
  misc_feature (18)..(18): n is a, c, g, or u
  misc_feature (22)..(22): n is a, c, g, or u
cucuanucnucuacugunccuncu

SEQ ID NO: 53920 - RNA, 18 nt, Artificial Sequence
  Synthetic
accaauuuucuguuaucu

SEQ ID NO: 53921 - RNA, 19 nt, Artificial Sequence
  Synthetic
uaccaauuuucuguuaucu

SEQ ID NO: 53922 - RNA, 20 nt, Artificial Sequence
  Synthetic
uuaccaauuuucuguuaucu

SEQ ID NO: 53923 - RNA, 22 nt, Artificial Sequence
  Synthetic
uguuaccaauuuucuguuaucu

SEQ ID NO: 53924 - RNA, 23 nt, Artificial Sequence
  Synthetic
cuguuaccaauuuucuguuaucu

SEQ ID NO: 53925 - RNA, 18 nt, Artificial Sequence
  Synthetic
aaccuuuguggcuccucu

SEQ ID NO: 53926 - RNA, 21 nt, Artificial Sequence
  Synthetic
uggaaccuuuguggcuccucu

SEQ ID NO: 53927 - RNA, 23 nt, Artificial Sequence
  Synthetic
cguggaaccuuuguggcuccucu

SEQ ID NO: 53928 - RNA, 18 nt, Artificial Sequence
  Synthetic
  misc_feature (10)..(10): n is a, c, g, or u
uuuggugucnuuuggagu

SEQ ID NO: 53929 - RNA, 19 nt, Artificial Sequence
  Synthetic
  misc_feature (11)..(11): n is a, c, g, or u
auuuggugucnuuuggagu

SEQ ID NO: 53930 - RNA, 20 nt, Artificial Sequence
  Synthetic
  misc_feature (12)..(12): n is a, c, g, or u
uauuuggugucnuuuggagu

SEQ ID NO: 53931 - RNA, 22 nt, Artificial Sequence
  Synthetic
  misc_feature (14)..(14): n is a, c, g, or u
aguauuuggugucnuuuggagu

SEQ ID NO: 53932 - RNA, 24 nt, Artificial Sequence
  Synthetic
  misc_feature (16)..(16): n is a, c, g, or u
ugaguauuuggugucnuuuggagu

SEQ ID NO: 53933 - RNA, 20 nt, Artificial Sequence
  Synthetic
uggccaauggcaaacaaggu

SEQ ID NO: 53934 - RNA, 21 nt, Artificial Sequence
  Synthetic
uuggccaauggcaaacaaggu

SEQ ID NO: 53935 - RNA, 22 nt, Artificial Sequence
  Synthetic
  misc_feature (1)..(1): n is a, c, g, or u
nuuggccaauggcaaacaaggu

SEQ ID NO: 53936 - RNA, 23 nt, Artificial Sequence
  Synthetic
  misc_feature (2)..(2): n is a, c, g, or u
anuuggccaauggcaaacaaggu

SEQ ID NO: 53937 - RNA, 24 nt, Artificial Sequence
  Synthetic
  misc_feature (3)..(3): n is a, c, g, or u
canuuggccaauggcaaacaaggu

SEQ ID NO: 53938 - RNA, 18 nt, Artificial Sequence
  Synthetic
  misc_feature (17)..(17): n is a, c, g, or u
aaaaugaauugagaagnu

SEQ ID NO: 53939 - RNA, 19 nt, Artificial Sequence
  Synthetic
  misc_feature (18)..(18): n is a, c, g, or u
aaaaaugaauugagaagnu

SEQ ID NO: 53940 - RNA, 20 nt, Artificial Sequence
  Synthetic
  misc_feature (1)..(1): n is a, c, g, or u
  misc_feature (19)..(19): n is a, c, g, or u
naaaaaugaauugagaagnu

SEQ ID NO: 53941 - RNA, 21 nt, Artificial Sequence
  Synthetic
  misc_feature (2)..(2): n is a, c, g, or u
  misc_feature (20)..(20): n is a, c, g, or u
cnaaaaaugaauugagaagnu

SEQ ID NO: 53942 - RNA, 22 nt, Artificial Sequence
  Synthetic
  misc_feature (3)..(3): n is a, c, g, or u
  misc_feature (21)..(21): n is a, c, g, or u
acnaaaaaugaauugagaagnu

SEQ ID NO: 53943 - RNA, 23 nt, Artificial Sequence
  Synthetic
  misc_feature (1)..(1): n is a, c, g, or u
  misc_feature (4)..(4): n is a, c, g, or u
  misc_feature (22)..(22): n is a, c, g, or u
nacnaaaaaugaauugagaagnu

SEQ ID NO: 53944 - RNA, 24 nt, Artificial Sequence
  Synthetic
  misc_feature (2)..(2): n is a, c, g, or u
  misc_feature (5)..(5): n is a, c, g, or u
  misc_feature (23)..(23): n is a, c, g, or u
unacnaaaaaugaauugagaagnu

SEQ ID NO: 53945 - RNA, 18 nt, Artificial Sequence
  Synthetic
  misc_feature (17)..(17): n is a, c, g, or u
cgccucgcagacgaagnu

SEQ ID NO: 53946 - RNA, 19 nt, Artificial Sequence
  Synthetic
  misc_feature (18)..(18): n is a, c, g, or u
ucgccucgcagacgaagnu

SEQ ID NO: 53947 - RNA, 20 nt, Artificial Sequence
  Synthetic
  misc_feature (19)..(19): n is a, c, g, or u
cucgccucgcagacgaagnu

SEQ ID NO: 53948 - RNA, 21 nt, Artificial Sequence
  Synthetic
ccggguguccuggccaaaauu

SEQ ID NO: 53949 - RNA, 22 nt, Artificial Sequence
  Synthetic
cccggguguccuggccaaaauu

SEQ ID NO: 53950 - RNA, 23 nt, Artificial Sequence
  Synthetic
acccggguguccuggccaaaauu

SEQ ID NO: 53951 - RNA, 24 nt, Artificial Sequence
  Synthetic
  misc_feature (1)..(1): n is a, c, g, or u
nacccggguguccuggccaaaauu

SEQ ID NO: 53952 - RNA, 18 nt, Artificial Sequence
  Synthetic
  misc_feature (15)..(15): n is a, c, g, or u
uucauggguuaugunauu

SEQ ID NO: 53953 - RNA, 19 nt, Artificial Sequence
  Synthetic
  misc_feature (16)..(16): n is a, c, g, or u
uuucauggguuaugunauu

SEQ ID NO: 53954 - RNA, 20 nt, Artificial Sequence
  Synthetic
  misc_feature (17)..(17): n is a, c, g, or u
auuucauggguuaugunauu

SEQ ID NO: 53955 - RNA, 21 nt, Artificial Sequence
  Synthetic
  misc_feature (1)..(1): n is a, c, g, or u
  misc_feature (18)..(18): n is a, c, g, or u
nauuucauggguuaugunauu

SEQ ID NO: 53956 - RNA, 22 nt, Artificial Sequence
  Synthetic
  misc_feature (2)..(2): n is a, c, g, or u
  misc_feature (19)..(19): n is a, c, g, or u
anauuucauggguuaugunauu

SEQ ID NO: 53957 - RNA, 23 nt, Artificial Sequence
  Synthetic
  misc_feature (3)..(3): n is a, c, g, or u
  misc_feature (20)..(20): n is a, c, g, or u
uanauuucauggguuaugunauu

SEQ ID NO: 53958 - RNA, 24 nt, Artificial Sequence
  Synthetic
  misc_feature (1)..(1): n is a, c, g, or u
  misc_feature (4)..(4): n is a, c, g, or u
  misc_feature (21)..(21): n is a, c, g, or u
nuanauuucauggguuaugunauu

SEQ ID NO: 53959 - RNA, 19 nt, Artificial Sequence
  Synthetic
agaucucaaucuccagcuu

SEQ ID NO: 53960 - RNA, 20 nt, Artificial Sequence
  Synthetic
aagaucucaaucuccagcuu

SEQ ID NO: 53961 - RNA, 19 nt, Artificial Sequence
  Synthetic
ugcuaugccucaucuucuu

SEQ ID NO: 53962 - RNA, 20 nt, Artificial Sequence
  Synthetic
cugcuaugccucaucuucuu

SEQ ID NO: 53963 - RNA, 18 nt, Artificial Sequence
  Synthetic
ucccuuuauaccgcuguu

SEQ ID NO: 53964 - RNA, 20 nt, Artificial Sequence
  Synthetic
agucccuuuauaccgcuguu

SEQ ID NO: 53965 - RNA, 22 nt, Artificial Sequence
  Synthetic
ugagucccuuuauaccgcuguu

SEQ ID NO: 53966 - RNA, 23 nt, Artificial Sequence
  Synthetic
uugagucccuuuauaccgcuguu

SEQ ID NO: 53967 - RNA, 24 nt, Artificial Sequence
  Synthetic
cuugagucccuuuauaccgcuguu

SEQ ID NO: 53968 - RNA, 18 nt, Artificial Sequence
  Synthetic
  misc_feature (16)..(16): n is a, c, g, or u
ugaguauuuggugucnuu

SEQ ID NO: 53969 - RNA, 19 nt, Artificial Sequence
  Synthetic
  misc_feature (17)..(17): n is a, c, g, or u
uugaguauuuggugucnuu

SEQ ID NO: 53970 - RNA, 20 nt, Artificial Sequence
  Synthetic
  misc_feature (18)..(18): n is a, c, g, or u
cuugaguauuuggugucnuu

SEQ ID NO: 53971 - RNA, 21 nt, Artificial Sequence
  Synthetic
  misc_feature (19)..(19): n is a, c, g, or u
ucuugaguauuuggugucnuu

SEQ ID NO: 53972 - RNA, 22 nt, Artificial Sequence
  Synthetic
  misc_feature (20)..(20): n is a, c, g, or u
uucuugaguauuuggugucnuu

SEQ ID NO: 53973 - RNA, 24 nt, Artificial Sequence
  Synthetic
  misc_feature (22)..(22): n is a, c, g, or u
aguucuugaguauuuggugucnuu

SEQ ID NO: 53974 - RNA, 18 nt, Artificial Sequence
  Synthetic
uuucuccuggcucaguuu

SEQ ID NO: 53975 - RNA, 20 nt, Artificial Sequence
  Synthetic
cguuucuccuggcucaguuu

SEQ ID NO: 53976 - RNA, 21 nt, Artificial Sequence
  Synthetic
ccguuucuccuggcucaguuu

SEQ ID NO: 53977 - RNA, 22 nt, Artificial Sequence
  Synthetic
cccguuucuccuggcucaguuu

SEQ ID NO: 53978 - RNA, 24 nt, Artificial Sequence
  Synthetic
agcccguuucuccuggcucaguuu

SEQ ID NO: 53979 - RNA, 18 nt, Artificial Sequence
  Synthetic
  misc_feature (3)..(3): n is a, c, g, or u
aanucagaaggcaaaaaa

SEQ ID NO: 53980 - RNA, 19 nt, Artificial Sequence
  Synthetic
  misc_feature (4)..(4): n is a, c, g, or u
gaanucagaaggcaaaaaa

SEQ ID NO: 53981 - RNA, 20 nt, Artificial Sequence
  Synthetic
  misc_feature (5)..(5): n is a, c, g, or u
agaanucagaaggcaaaaaa

SEQ ID NO: 53982 - RNA, 21 nt, Artificial Sequence
  Synthetic
  misc_feature (6)..(6): n is a, c, g, or u
aagaanucagaaggcaaaaaa

SEQ ID NO: 53983 - RNA, 22 nt, Artificial Sequence
  Synthetic
  misc_feature (7)..(7): n is a, c, g, or u
gaagaanucagaaggcaaaaaa

SEQ ID NO: 53984 - RNA, 23 nt, Artificial Sequence
  Synthetic
  misc_feature (8)..(8): n is a, c, g, or u
ggaagaanucagaaggcaaaaaa

SEQ ID NO: 53985 - RNA, 24 nt, Artificial Sequence
  Synthetic
  misc_feature (9)..(9): n is a, c, g, or u
gggaagaanucagaaggcaaaaaa

SEQ ID NO: 53986 - RNA, 18 nt, Artificial Sequence
  Synthetic
  misc_feature (4)..(4): n is a, c, g, or u
gaanucagaaggcaaaaa

SEQ ID NO: 53987 - RNA, 19 nt, Artificial Sequence
  Synthetic
  misc_feature (5)..(5): n is a, c, g, or u
agaanucagaaggcaaaaa

SEQ ID NO: 53988 - RNA, 20 nt, Artificial Sequence
  Synthetic
  misc_feature (6)..(6): n is a, c, g, or u
aagaanucagaaggcaaaaa

SEQ ID NO: 53989 - RNA, 21 nt, Artificial Sequence
  Synthetic
  misc_feature (7)..(7): n is a, c, g, or u
gaagaanucagaaggcaaaaa

SEQ ID NO: 53990 - RNA, 22 nt, Artificial Sequence
  Synthetic
  misc_feature (8)..(8): n is a, c, g, or u
ggaagaanucagaaggcaaaaa

SEQ ID NO: 53991 - RNA, 23 nt, Artificial Sequence
  Synthetic
  misc_feature (9)..(9): n is a, c, g, or u
gggaagaanucagaaggcaaaaa

SEQ ID NO: 53992 - RNA, 24 nt, Artificial Sequence
  Synthetic
  misc_feature (10)..(10): n is a, c, g, or u
cgggaagaanucagaaggcaaaaa

SEQ ID NO: 53993 - RNA, 18 nt, Artificial Sequence
  Synthetic
auauggugacccacaaaa

SEQ ID NO: 53994 - RNA, 19 nt, Artificial Sequence
  Synthetic
aauauggugacccacaaaa

SEQ ID NO: 53995 - RNA, 20 nt, Artificial Sequence
  Synthetic
gaauauggugacccacaaaa

SEQ ID NO: 53996 - RNA, 21 nt, Artificial Sequence
  Synthetic
  misc_feature (1)..(1): n is a, c, g, or u
ngaauauggugacccacaaaa

SEQ ID NO: 53997 - RNA, 22 nt, Artificial Sequence
  Synthetic
  misc_feature (2)..(2): n is a, c, g, or u
angaauauggugacccacaaaa

SEQ ID NO: 53998 - RNA, 23 nt, Artificial Sequence
  Synthetic
  misc_feature (3)..(3): n is a, c, g, or u
cangaauauggugacccacaaaa

SEQ ID NO: 53999 - RNA, 24 nt, Artificial Sequence
  Synthetic
  misc_feature (4)..(4): n is a, c, g, or u
ccangaauauggugacccacaaaa

SEQ ID NO: 54000 - RNA, 18 nt, Artificial Sequence
  Synthetic
acuguuucucuuccaaaa

SEQ ID NO: 54001 - RNA, 19 nt, Artificial Sequence
  Synthetic
aacuguuucucuuccaaaa

SEQ ID NO: 54002 - RNA, 20 nt, Artificial Sequence
  Synthetic
gaacuguuucucuuccaaaa

SEQ ID NO: 54003 - RNA, 21 nt, Artificial Sequence
  Synthetic
agaacuguuucucuuccaaaa

SEQ ID NO: 54004 - RNA, 22 nt, Artificial Sequence
  Synthetic
aagaacuguuucucuuccaaaa

SEQ ID NO: 54005 - RNA, 23 nt, Artificial Sequence
  Synthetic
caagaacuguuucucuuccaaaa

SEQ ID NO: 54006 - RNA, 24 nt, Artificial Sequence
  Synthetic
ucaagaacuguuucucuuccaaaa

SEQ ID NO: 54007 - RNA, 18 nt, Artificial Sequence
  Synthetic
  misc_feature (5)..(5): n is a, c, g, or u
agaanucagaaggcaaaa

SEQ ID NO: 54008 - RNA, 19 nt, Artificial Sequence
  Synthetic
  misc_feature (6)..(6): n is a, c, g, or u
aagaanucagaaggcaaaa

SEQ ID NO: 54009 - RNA, 20 nt, Artificial Sequence
  Synthetic
  misc_feature (7)..(7): n is a, c, g, or u
gaagaanucagaaggcaaaa

SEQ ID NO: 54010 - RNA, 21 nt, Artificial Sequence
  Synthetic
  misc_feature (8)..(8): n is a, c, g, or u
ggaagaanucagaaggcaaaa

SEQ ID NO: 54011 - RNA, 22 nt, Artificial Sequence
  Synthetic
  misc_feature (9)..(9): n is a, c, g, or u
gggaagaanucagaaggcaaaa

SEQ ID NO: 54012 - RNA, 23 nt, Artificial Sequence
  Synthetic
  misc_feature (10)..(10): n is a, c, g, or u
cgggaagaanucagaaggcaaaa

SEQ ID NO: 54013 - RNA, 24 nt, Artificial Sequence
  Synthetic
  misc_feature (11)..(11): n is a, c, g, or u
acgggaagaanucagaaggcaaaa

SEQ ID NO: 54014 - RNA, 18 nt, Artificial Sequence
  Synthetic
  misc_feature (4)..(5): n is a, c, g, or u
ggunnucccccuagaaaa

SEQ ID NO: 54015 - RNA, 19 nt, Artificial Sequence
  Synthetic
  misc_feature (5)..(6): n is a, c, g, or u
gggunnucccccuagaaaa

SEQ ID NO: 54016 - RNA, 20 nt, Artificial Sequence
  Synthetic
  misc_feature (6)..(7): n is a, c, g, or u
cgggunnucccccuagaaaa

SEQ ID NO: 54017 - RNA, 21 nt, Artificial Sequence
  Synthetic
  misc_feature (7)..(8): n is a, c, g, or u
ccgggunnucccccuagaaaa

SEQ ID NO: 54018 - RNA, 22 nt, Artificial Sequence
  Synthetic
  misc_feature (8)..(9): n is a, c, g, or u
cccgggunnucccccuagaaaa

SEQ ID NO: 54019 - RNA, 23 nt, Artificial Sequence
  Synthetic
  misc_feature (9)..(10): n is a, c, g, or u
acccgggunnucccccuagaaaa

SEQ ID NO: 54020 - RNA, 24 nt, Artificial Sequence
  Synthetic
  misc_feature (10)..(11): n is a, c, g, or u
cacccgggunnucccccuagaaaa

SEQ ID NO: 54021 - RNA, 18 nt, Artificial Sequence
  Synthetic
cuuguaaguuggcgaaaa

SEQ ID NO: 54022 - RNA, 19 nt, Artificial Sequence
  Synthetic
ccuuguaaguuggcgaaaa

SEQ ID NO: 54023 - RNA, 20 nt, Artificial Sequence
  Synthetic
gccuuguaaguuggcgaaaa

SEQ ID NO: 54024 - RNA, 21 nt, Artificial Sequence
  Synthetic
ggccuuguaaguuggcgaaaa

SEQ ID NO: 54025 - RNA, 22 nt, Artificial Sequence
  Synthetic
aggccuuguaaguuggcgaaaa

SEQ ID NO: 54026 - RNA, 23 nt, Artificial Sequence
  Synthetic
aaggccuuguaaguuggcgaaaa

SEQ ID NO: 54027 - RNA, 24 nt, Artificial Sequence
  Synthetic
aaaggccuuguaaguuggcgaaaa

SEQ ID NO: 54028 - RNA, 18 nt, Artificial Sequence
  Synthetic
gagccaccagcaggaaaa

SEQ ID NO: 54029 - RNA, 19 nt, Artificial Sequence
  Synthetic
ggagccaccagcaggaaaa

SEQ ID NO: 54030 - RNA, 20 nt, Artificial Sequence
  Synthetic
uggagccaccagcaggaaaa

SEQ ID NO: 54031 - RNA, 21 nt, Artificial Sequence
  Synthetic
cuggagccaccagcaggaaaa

SEQ ID NO: 54032 - RNA, 22 nt, Artificial Sequence
  Synthetic
acuggagccaccagcaggaaaa

SEQ ID NO: 54033 - RNA, 23 nt, Artificial Sequence
  Synthetic
aacuggagccaccagcaggaaaa

SEQ ID NO: 54034 - RNA, 24 nt, Artificial Sequence
  Synthetic
gaacuggagccaccagcaggaaaa

SEQ ID NO: 54035 - RNA, 18 nt, Artificial Sequence
  Synthetic
  misc_feature (9)..(9): n is a, c, g, or u
aaaugaaunucaggaaaa

SEQ ID NO: 54036 - RNA, 19 nt, Artificial Sequence
  Synthetic
  misc_feature (1)..(1): n is a, c, g, or u
  misc_feature (10)..(10): n is a, c, g, or u
naaaugaaunucaggaaaa

SEQ ID NO: 54037 - RNA, 20 nt, Artificial Sequence
  Synthetic
  misc_feature (2)..(2): n is a, c, g, or u
  misc_feature (11)..(11): n is a, c, g, or u
gnaaaugaaunucaggaaaa

SEQ ID NO: 54038 - RNA, 21 nt, Artificial Sequence
  Synthetic
  misc_feature (3)..(3): n is a, c, g, or u
  misc_feature (12)..(12): n is a, c, g, or u
ugnaaaugaaunucaggaaaa

SEQ ID NO: 54039 - RNA, 22 nt, Artificial Sequence
  Synthetic
  misc_feature (4)..(4): n is a, c, g, or u
  misc_feature (13)..(13): n is a, c, g, or u
augnaaaugaaunucaggaaaa

SEQ ID NO: 54040 - RNA, 23 nt, Artificial Sequence
  Synthetic
  misc_feature (5)..(5): n is a, c, g, or u
  misc_feature (14)..(14): n is a, c, g, or u
gaugnaaaugaaunucaggaaaa

SEQ ID NO: 54041 - RNA, 24 nt, Artificial Sequence
  Synthetic
  misc_feature (6)..(6): n is a, c, g, or u
  misc_feature (15)..(15): n is a, c, g, or u
ugaugnaaaugaaunucaggaaaa

SEQ ID NO: 54042 - RNA, 18 nt, Artificial Sequence
  Synthetic
ucauccauauaacuaaaa

SEQ ID NO: 54043 - RNA, 19 nt, Artificial Sequence
  Synthetic
aucauccauauaacuaaaa

SEQ ID NO: 54044 - RNA, 20 nt, Artificial Sequence
  Synthetic
gaucauccauauaacuaaaa

SEQ ID NO: 54045 - RNA, 21 nt, Artificial Sequence
  Synthetic
agaucauccauauaacuaaaa

SEQ ID NO: 54046 - RNA, 22 nt, Artificial Sequence
  Synthetic
cagaucauccauauaacuaaaa

SEQ ID NO: 54047 - RNA, 23 nt, Artificial Sequence
  Synthetic
ccagaucauccauauaacuaaaa

SEQ ID NO: 54048 - RNA, 24 nt, Artificial Sequence
  Synthetic
accagaucauccauauaacuaaaa

SEQ ID NO: 54049 - RNA, 18 nt, Artificial Sequence
  Synthetic
aauauggugacccacaaa

SEQ ID NO: 54050 - RNA, 19 nt, Artificial Sequence
  Synthetic
gaauauggugacccacaaa

SEQ ID NO: 54051 - RNA, 20 nt, Artificial Sequence
  Synthetic
  misc_feature (1)..(1): n is a, c, g, or u
ngaauauggugacccacaaa

SEQ ID NO: 54052 - RNA, 21 nt, Artificial Sequence
  Synthetic
  misc_feature (2)..(2): n is a, c, g, or u
angaauauggugacccacaaa

SEQ ID NO: 54053 - RNA, 22 nt, Artificial Sequence
  Synthetic
  misc_feature (3)..(3): n is a, c, g, or u
cangaauauggugacccacaaa

SEQ ID NO: 54054 - RNA, 23 nt, Artificial Sequence
  Synthetic
  misc_feature (4)..(4): n is a, c, g, or u
ccangaauauggugacccacaaa

SEQ ID NO: 54055 - RNA, 24 nt, Artificial Sequence
  Synthetic
  misc_feature (5)..(5): n is a, c, g, or u
cccangaauauggugacccacaaa

SEQ ID NO: 54056 - RNA, 18 nt, Artificial Sequence
  Synthetic
aacuguuucucuuccaaa

SEQ ID NO: 54057 - RNA, 19 nt, Artificial Sequence
  Synthetic
gaacuguuucucuuccaaa

SEQ ID NO: 54058 - RNA, 20 nt, Artificial Sequence
  Synthetic
agaacuguuucucuuccaaa

SEQ ID NO: 54059 - RNA, 21 nt, Artificial Sequence
  Synthetic
aagaacuguuucucuuccaaa

SEQ ID NO: 54060 - RNA, 22 nt, Artificial Sequence
  Synthetic
caagaacuguuucucuuccaaa

SEQ ID NO: 54061 - RNA, 23 nt, Artificial Sequence
  Synthetic
ucaagaacuguuucucuuccaaa

SEQ ID NO: 54062 - RNA, 24 nt, Artificial Sequence
  Synthetic
cucaagaacuguuucucuuccaaa

SEQ ID NO: 54063 - RNA, 18 nt, Artificial Sequence
  Synthetic
  misc_feature (6)..(6): n is a, c, g, or u
aagaanucagaaggcaaa

SEQ ID NO: 54064 - RNA, 19 nt, Artificial Sequence
  Synthetic
  misc_feature (7)..(7): n is a, c, g, or u
gaagaanucagaaggcaaa

SEQ ID NO: 54065 - RNA, 20 nt, Artificial Sequence
  Synthetic
  misc_feature (8)..(8): n is a, c, g, or u
ggaagaanucagaaggcaaa

SEQ ID NO: 54066 - RNA, 21 nt, Artificial Sequence
  Synthetic
  misc_feature (9)..(9): n is a, c, g, or u
gggaagaanucagaaggcaaa

SEQ ID NO: 54067 - RNA, 22 nt, Artificial Sequence
  Synthetic
  misc_feature (10)..(10): n is a, c, g, or u
cgggaagaanucagaaggcaaa

SEQ ID NO: 54068 - RNA, 23 nt, Artificial Sequence
  Synthetic
  misc_feature (11)..(11): n is a, c, g, or u
acgggaagaanucagaaggcaaa

SEQ ID NO: 54069 - RNA, 24 nt, Artificial Sequence
  Synthetic
  misc_feature (12)..(12): n is a, c, g, or u
gacgggaagaanucagaaggcaaa

SEQ ID NO: 54070 - RNA, 18 nt, Artificial Sequence
  Synthetic
  misc_feature (5)..(6): n is a, c, g, or u
gggunnucccccuagaaa

SEQ ID NO: 54071 - RNA, 19 nt, Artificial Sequence
  Synthetic
  misc_feature (6)..(7): n is a, c, g, or u
cgggunnucccccuagaaa

SEQ ID NO: 54072 - RNA, 20 nt, Artificial Sequence
  Synthetic
  misc_feature (7)..(8): n is a, c, g, or u
ccgggunnucccccuagaaa

SEQ ID NO: 54073 - RNA, 21 nt, Artificial Sequence
  Synthetic
  misc_feature (8)..(9): n is a, c, g, or u
cccgggunnucccccuagaaa

SEQ ID NO: 54074 - RNA, 22 nt, Artificial Sequence
  Synthetic
  misc_feature (9)..(10): n is a, c, g, or u
acccgggunnucccccuagaaa

SEQ ID NO: 54075 - RNA, 23 nt, Artificial Sequence
  Synthetic
  misc_feature (10)..(11): n is a, c, g, or u
cacccgggunnucccccuagaaa

SEQ ID NO: 54076 - RNA, 24 nt, Artificial Sequence
  Synthetic
  misc_feature (11)..(12): n is a, c, g, or u
acacccgggunnucccccuagaaa

SEQ ID NO: 54077 - RNA, 18 nt, Artificial Sequence
  Synthetic
caaaaguaaggcaggaaa

SEQ ID NO: 54078 - RNA, 19 nt, Artificial Sequence
  Synthetic
ccaaaaguaaggcaggaaa

SEQ ID NO: 54079 - RNA, 20 nt, Artificial Sequence
  Synthetic
uccaaaaguaaggcaggaaa

SEQ ID NO: 54080 - RNA, 21 nt, Artificial Sequence
  Synthetic
uuccaaaaguaaggcaggaaa

SEQ ID NO: 54081 - RNA, 22 nt, Artificial Sequence
  Synthetic
cuuccaaaaguaaggcaggaaa

SEQ ID NO: 54082 - RNA, 23 nt, Artificial Sequence
  Synthetic
ucuuccaaaaguaaggcaggaaa

SEQ ID NO: 54083 - RNA, 24 nt, Artificial Sequence
  Synthetic
cucuuccaaaaguaaggcaggaaa

SEQ ID NO: 54084 - RNA, 18 nt, Artificial Sequence
  Synthetic
  misc_feature (1)..(1): n is a, c, g, or u
  misc_feature (10)..(10): n is a, c, g, or u
naaaugaaunucaggaaa

SEQ ID NO: 54085 - RNA, 19 nt, Artificial Sequence
  Synthetic
  misc_feature (2)..(2): n is a, c, g, or u
  misc_feature (11)..(11): n is a, c, g, or u
gnaaaugaaunucaggaaa

SEQ ID NO: 54086 - RNA, 20 nt, Artificial Sequence
  Synthetic
  misc_feature (3)..(3): n is a, c, g, or u
  misc_feature (12)..(12): n is a, c, g, or u
ugnaaaugaaunucaggaaa

SEQ ID NO: 54087 - RNA, 21 nt, Artificial Sequence
  Synthetic
  misc_feature (4)..(4): n is a, c, g, or u
  misc_feature (13)..(13): n is a, c, g, or u
augnaaaugaaunucaggaaa

SEQ ID NO: 54088 - RNA, 22 nt, Artificial Sequence
  Synthetic
  misc_feature (5)..(5): n is a, c, g, or u
  misc_feature (14)..(14): n is a, c, g, or u
gaugnaaaugaaunucaggaaa

SEQ ID NO: 54089 - RNA, 23 nt, Artificial Sequence
  Synthetic
  misc_feature (6)..(6): n is a, c, g, or u
  misc_feature (15)..(15): n is a, c, g, or u
ugaugnaaaugaaunucaggaaa

SEQ ID NO: 54090 - RNA, 24 nt, Artificial Sequence
  Synthetic
  misc_feature (7)..(7): n is a, c, g, or u
  misc_feature (16)..(16): n is a, c, g, or u
uugaugnaaaugaaunucaggaaa

SEQ ID NO: 54091 - RNA, 18 nt, Artificial Sequence
  Synthetic
  misc_feature (7)..(7): n is a, c, g, or u
  misc_feature (10)..(10): n is a, c, g, or u
acagcancangagggaaa

SEQ ID NO: 54092 - RNA, 19 nt, Artificial Sequence
  Synthetic
  misc_feature (8)..(8): n is a, c, g, or u
  misc_feature (11)..(11): n is a, c, g, or u
aacagcancangagggaaa

SEQ ID NO: 54093 - RNA, 20 nt, Artificial Sequence
  Synthetic
  misc_feature (9)..(9): n is a, c, g, or u
  misc_feature (12)..(12): n is a, c, g, or u
gaacagcancangagggaaa

SEQ ID NO: 54094 - RNA, 21 nt, Artificial Sequence
  Synthetic
  misc_feature (10)..(10): n is a, c, g, or u
  misc_feature (13)..(13): n is a, c, g, or u
ggaacagcancangagggaaa

SEQ ID NO: 54095 - RNA, 22 nt, Artificial Sequence
  Synthetic
  misc_feature (11)..(11): n is a, c, g, or u
  misc_feature (14)..(14): n is a, c, g, or u
uggaacagcancangagggaaa

SEQ ID NO: 54096 - RNA, 23 nt, Artificial Sequence
  Synthetic
  misc_feature (12)..(12): n is a, c, g, or u
  misc_feature (15)..(15): n is a, c, g, or u
uuggaacagcancangagggaaa

SEQ ID NO: 54097 - RNA, 24 nt, Artificial Sequence
  Synthetic
  misc_feature (13)..(13): n is a, c, g, or u
  misc_feature (16)..(16): n is a, c, g, or u
uuuggaacagcancangagggaaa

SEQ ID NO: 54098 - RNA, 18 nt, Artificial Sequence
  Synthetic
  misc_feature (8)..(8): n is a, c, g, or u
  misc_feature (15)..(15): n is a, c, g, or u
aaccagunaggauunaaa

SEQ ID NO: 54099 - RNA, 19 nt, Artificial Sequence
  Synthetic
  misc_feature (9)..(9): n is a, c, g, or u
  misc_feature (16)..(16): n is a, c, g, or u
uaaccagunaggauunaaa

SEQ ID NO: 54100 - RNA, 20 nt, Artificial Sequence
  Synthetic
  misc_feature (10)..(10): n is a, c, g, or u
  misc_feature (17)..(17): n is a, c, g, or u
uuaaccagunaggauunaaa

SEQ ID NO: 54101 - RNA, 21 nt, Artificial Sequence
  Synthetic
  misc_feature (11)..(11): n is a, c, g, or u
  misc_feature (18)..(18): n is a, c, g, or u
guuaaccagunaggauunaaa

SEQ ID NO: 54102 - RNA, 22 nt, Artificial Sequence
  Synthetic
  misc_feature (12)..(12): n is a, c, g, or u
  misc_feature (19)..(19): n is a, c, g, or u
aguuaaccagunaggauunaaa

SEQ ID NO: 54103 - RNA, 23 nt, Artificial Sequence
  Synthetic
  misc_feature (13)..(13): n is a, c, g, or u
  misc_feature (20)..(20): n is a, c, g, or u
gaguuaaccagunaggauunaaa

SEQ ID NO: 54104 - RNA, 24 nt, Artificial Sequence
  Synthetic
  misc_feature (14)..(14): n is a, c, g, or u
  misc_feature (21)..(21): n is a, c, g, or u
ggaguuaaccagunaggauunaaa

SEQ ID NO: 54105 - RNA, 18 nt, Artificial Sequence
  Synthetic
acaaauugcacuaguaaa

SEQ ID NO: 54106 - RNA, 19 nt, Artificial Sequence
  Synthetic
aacaaauugcacuaguaaa

SEQ ID NO: 54107 - RNA, 20 nt, Artificial Sequence
  Synthetic
gaacaaauugcacuaguaaa

SEQ ID NO: 54108 - RNA, 21 nt, Artificial Sequence
  Synthetic
ugaacaaauugcacuaguaaa

SEQ ID NO: 54109 - RNA, 22 nt, Artificial Sequence
  Synthetic
cugaacaaauugcacuaguaaa

SEQ ID NO: 54110 - RNA, 23 nt, Artificial Sequence
  Synthetic
acugaacaaauugcacuaguaaa

SEQ ID NO: 54111 - RNA, 24 nt, Artificial Sequence
  Synthetic
cacugaacaaauugcacuaguaaa

SEQ ID NO: 54112 - RNA, 18 nt, Artificial Sequence
  Synthetic
gcgccgacgggacguaaa

SEQ ID NO: 54113 - RNA, 19 nt, Artificial Sequence
  Synthetic
agcgccgacgggacguaaa

SEQ ID NO: 54114 - RNA, 20 nt, Artificial Sequence
  Synthetic
cagcgccgacgggacguaaa

SEQ ID NO: 54115 - RNA, 18 nt, Artificial Sequence
  Synthetic
  misc_feature (9)..(9): n is a, c, g, or u
acggggagnccgcguaaa

SEQ ID NO: 54116 - RNA, 19 nt, Artificial Sequence
  Synthetic
  misc_feature (10)..(10): n is a, c, g, or u
gacggggagnccgcguaaa

SEQ ID NO: 54117 - RNA, 20 nt, Artificial Sequence
  Synthetic
  misc_feature (11)..(11): n is a, c, g, or u
agacggggagnccgcguaaa

SEQ ID NO: 54118 - RNA, 21 nt, Artificial Sequence
  Synthetic
  misc_feature (12)..(12): n is a, c, g, or u
cagacggggagnccgcguaaa

SEQ ID NO: 54119 - RNA, 22 nt, Artificial Sequence
  Synthetic
  misc_feature (13)..(13): n is a, c, g, or u
acagacggggagnccgcguaaa

SEQ ID NO: 54120 - RNA, 23 nt, Artificial Sequence
  Synthetic
  misc_feature (14)..(14): n is a, c, g, or u
aacagacggggagnccgcguaaa

SEQ ID NO: 54121 - RNA, 24 nt, Artificial Sequence
  Synthetic
  misc_feature (15)..(15): n is a, c, g, or u
gaacagacggggagnccgcguaaa

SEQ ID NO: 54122 - RNA, 18 nt, Artificial Sequence
  Synthetic
gaauauggugacccacaa

SEQ ID NO: 54123 - RNA, 19 nt, Artificial Sequence
  Synthetic
  misc_feature (1)..(1): n is a, c, g, or u
ngaauauggugacccacaa

SEQ ID NO: 54124 - RNA, 20 nt, Artificial Sequence
  Synthetic
  misc_feature (2)..(2): n is a, c, g, or u
angaauauggugacccacaa

SEQ ID NO: 54125 - RNA, 21 nt, Artificial Sequence
  Synthetic
  misc_feature (3)..(3): n is a, c, g, or u
cangaauauggugacccacaa

SEQ ID NO: 54126 - RNA, 22 nt, Artificial Sequence
  Synthetic
  misc_feature (4)..(4): n is a, c, g, or u
ccangaauauggugacccacaa

SEQ ID NO: 54127 - RNA, 23 nt, Artificial Sequence
  Synthetic
  misc_feature (5)..(5): n is a, c, g, or u
cccangaauauggugacccacaa

SEQ ID NO: 54128 - RNA, 24 nt, Artificial Sequence
  Synthetic
  misc_feature (6)..(6): n is a, c, g, or u
ucccangaauauggugacccacaa

SEQ ID NO: 54129 - RNA, 18 nt, Artificial Sequence
  Synthetic
  misc_feature (4)..(4): n is a, c, g, or u
  misc_feature (13)..(13): n is a, c, g, or u
uaanucaccccancacaa

SEQ ID NO: 54130 - RNA, 19 nt, Artificial Sequence
  Synthetic
  misc_feature (5)..(5): n is a, c, g, or u
  misc_feature (14)..(14): n is a, c, g, or u
uuaanucaccccancacaa

SEQ ID NO: 54131 - RNA, 20 nt, Artificial Sequence
  Synthetic
  misc_feature (6)..(6): n is a, c, g, or u
  misc_feature (15)..(15): n is a, c, g, or u
auuaanucaccccancacaa

SEQ ID NO: 54132 - RNA, 21 nt, Artificial Sequence
  Synthetic
  misc_feature (7)..(7): n is a, c, g, or u
  misc_feature (16)..(16): n is a, c, g, or u
cauuaanucaccccancacaa

SEQ ID NO: 54133 - RNA, 22 nt, Artificial Sequence
  Synthetic
  misc_feature (8)..(8): n is a, c, g, or u
  misc_feature (17)..(17): n is a, c, g, or u
ucauuaanucaccccancacaa

SEQ ID NO: 54134 - RNA, 23 nt, Artificial Sequence
  Synthetic
  misc_feature (9)..(9): n is a, c, g, or u
  misc_feature (18)..(18): n is a, c, g, or u
gucauuaanucaccccancacaa

SEQ ID NO: 54135 - RNA, 24 nt, Artificial Sequence
  Synthetic
  misc_feature (10)..(10): n is a, c, g, or u
  misc_feature (19)..(19): n is a, c, g, or u
agucauuaanucaccccancacaa

SEQ ID NO: 54136 - RNA, 18 nt, Artificial Sequence
  Synthetic
  misc_feature (3)..(3): n is a, c, g, or u
cancgauagccaggacaa

SEQ ID NO: 54137 - RNA, 19 nt, Artificial Sequence
  Synthetic
  misc_feature (4)..(4): n is a, c, g, or u
ccancgauagccaggacaa

SEQ ID NO: 54138 - RNA, 20 nt, Artificial Sequence
  Synthetic
  misc_feature (5)..(5): n is a, c, g, or u
uccancgauagccaggacaa

SEQ ID NO: 54139 - RNA, 21 nt, Artificial Sequence
  Synthetic
  misc_feature (6)..(6): n is a, c, g, or u
auccancgauagccaggacaa

SEQ ID NO: 54140 - RNA, 22 nt, Artificial Sequence
  Synthetic
  misc_feature (7)..(7): n is a, c, g, or u
cauccancgauagccaggacaa

SEQ ID NO: 54141 - RNA, 23 nt, Artificial Sequence
  Synthetic
  misc_feature (8)..(8): n is a, c, g, or u
acauccancgauagccaggacaa

SEQ ID NO: 54142 - RNA, 24 nt, Artificial Sequence
  Synthetic
  misc_feature (9)..(9): n is a, c, g, or u
cacauccancgauagccaggacaa

SEQ ID NO: 54143 - RNA, 18 nt, Artificial Sequence
  Synthetic
  misc_feature (8)..(8): n is a, c, g, or u
ccuggaanuagaggacaa

SEQ ID NO: 54144 - RNA, 19 nt, Artificial Sequence
  Synthetic
  misc_feature (9)..(9): n is a, c, g, or u
uccuggaanuagaggacaa

SEQ ID NO: 54145 - RNA, 20 nt, Artificial Sequence
  Synthetic
  misc_feature (10)..(10): n is a, c, g, or u
auccuggaanuagaggacaa

SEQ ID NO: 54146 - RNA, 21 nt, Artificial Sequence
  Synthetic
  misc_feature (11)..(11): n is a, c, g, or u
gauccuggaanuagaggacaa

SEQ ID NO: 54147 - RNA, 22 nt, Artificial Sequence
  Synthetic
  misc_feature (1)..(1): n is a, c, g, or u
  misc_feature (12)..(12): n is a, c, g, or u
ngauccuggaanuagaggacaa

SEQ ID NO: 54148 - RNA, 23 nt, Artificial Sequence
  Synthetic
  misc_feature (2)..(2): n is a, c, g, or u
  misc_feature (13)..(13): n is a, c, g, or u
ungauccuggaanuagaggacaa

SEQ ID NO: 54149 - RNA, 24 nt, Artificial Sequence
  Synthetic
  misc_feature (3)..(3): n is a, c, g, or u
  misc_feature (14)..(14): n is a, c, g, or u
gungauccuggaanuagaggacaa

SEQ ID NO: 54150 - RNA, 18 nt, Artificial Sequence
  Synthetic
auaguccagaagaaccaa

SEQ ID NO: 54151 - RNA, 19 nt, Artificial Sequence
  Synthetic
gauaguccagaagaaccaa

SEQ ID NO: 54152 - RNA, 20 nt, Artificial Sequence
  Synthetic
ugauaguccagaagaaccaa

SEQ ID NO: 54153 - RNA, 21 nt, Artificial Sequence
  Synthetic
uugauaguccagaagaaccaa

SEQ ID NO: 54154 - RNA, 22 nt, Artificial Sequence
  Synthetic
cuugauaguccagaagaaccaa

SEQ ID NO: 54155 - RNA, 23 nt, Artificial Sequence
  Synthetic
ccuugauaguccagaagaaccaa

SEQ ID NO: 54156 - RNA, 24 nt, Artificial Sequence
  Synthetic
accuugauaguccagaagaaccaa

SEQ ID NO: 54157 - RNA, 18 nt, Artificial Sequence
  Synthetic
  misc_feature (7)..(7): n is a, c, g, or u
gaagaanucagaaggcaa

SEQ ID NO: 54158 - RNA, 19 nt, Artificial Sequence
  Synthetic
  misc_feature (8)..(8): n is a, c, g, or u
ggaagaanucagaaggcaa

SEQ ID NO: 54159 - RNA, 20 nt, Artificial Sequence
  Synthetic
  misc_feature (9)..(9): n is a, c, g, or u
gggaagaanucagaaggcaa

SEQ ID NO: 54160 - RNA, 21 nt, Artificial Sequence
  Synthetic
  misc_feature (10)..(10): n is a, c, g, or u
cgggaagaanucagaaggcaa

SEQ ID NO: 54161 - RNA, 22 nt, Artificial Sequence
  Synthetic
  misc_feature (11)..(11): n is a, c, g, or u
acgggaagaanucagaaggcaa

SEQ ID NO: 54162 - RNA, 23 nt, Artificial Sequence
  Synthetic
  misc_feature (12)..(12): n is a, c, g, or u
gacgggaagaanucagaaggcaa

SEQ ID NO: 54163 - RNA, 24 nt, Artificial Sequence
  Synthetic
  misc_feature (1)..(1): n is a, c, g, or u
  misc_feature (13)..(13): n is a, c, g, or u
ngacgggaagaanucagaaggcaa

SEQ ID NO: 54164 - RNA, 18 nt, Artificial Sequence
  Synthetic
ugugaggauuuuugucaa

SEQ ID NO: 54165 - RNA, 19 nt, Artificial Sequence
  Synthetic
uugugaggauuuuugucaa

SEQ ID NO: 54166 - RNA, 20 nt, Artificial Sequence
  Synthetic
auugugaggauuuuugucaa

SEQ ID NO: 54167 - RNA, 21 nt, Artificial Sequence
  Synthetic
uauugugaggauuuuugucaa

SEQ ID NO: 54168 - RNA, 22 nt, Artificial Sequence
  Synthetic
guauugugaggauuuuugucaa

SEQ ID NO: 54169 - RNA, 23 nt, Artificial Sequence
  Synthetic
gguauugugaggauuuuugucaa

SEQ ID NO: 54170 - RNA, 24 nt, Artificial Sequence
  Synthetic
ugguauugugaggauuuuugucaa

SEQ ID NO: 54171 - RNA, 18 nt, Artificial Sequence
  Synthetic
cagaagaaccaacaagaa

SEQ ID NO: 54172 - RNA, 19 nt, Artificial Sequence
  Synthetic
ccagaagaaccaacaagaa

SEQ ID NO: 54173 - RNA, 20 nt, Artificial Sequence
  Synthetic
uccagaagaaccaacaagaa

SEQ ID NO: 54174 - RNA, 21 nt, Artificial Sequence
  Synthetic
guccagaagaaccaacaagaa

SEQ ID NO: 54175 - RNA, 22 nt, Artificial Sequence
  Synthetic
aguccagaagaaccaacaagaa

SEQ ID NO: 54176 - RNA, 23 nt, Artificial Sequence
  Synthetic
uaguccagaagaaccaacaagaa

SEQ ID NO: 54177 - RNA, 24 nt, Artificial Sequence
  Synthetic
auaguccagaagaaccaacaagaa

SEQ ID NO: 54178 - RNA, 18 nt, Artificial Sequence
  Synthetic
  misc_feature (7)..(7): n is a, c, g, or u
ccgaacngacgggaagaa

SEQ ID NO: 54179 - RNA, 19 nt, Artificial Sequence
  Synthetic
  misc_feature (8)..(8): n is a, c, g, or u
cccgaacngacgggaagaa

SEQ ID NO: 54180 - RNA, 20 nt, Artificial Sequence
  Synthetic
  misc_feature (9)..(9): n is a, c, g, or u
ucccgaacngacgggaagaa

SEQ ID NO: 54181 - RNA, 21 nt, Artificial Sequence
  Synthetic
  misc_feature (10)..(10): n is a, c, g, or u
gucccgaacngacgggaagaa

SEQ ID NO: 54182 - RNA, 22 nt, Artificial Sequence
  Synthetic
  misc_feature (11)..(11): n is a, c, g, or u
ggucccgaacngacgggaagaa

SEQ ID NO: 54183 - RNA, 23 nt, Artificial Sequence
  Synthetic
  misc_feature (12)..(12): n is a, c, g, or u
aggucccgaacngacgggaagaa

SEQ ID NO: 54184 - RNA, 24 nt, Artificial Sequence
  Synthetic
  misc_feature (13)..(13): n is a, c, g, or u
uaggucccgaacngacgggaagaa

SEQ ID NO: 54185 - RNA, 18 nt, Artificial Sequence
  Synthetic
  misc_feature (12)..(12): n is a, c, g, or u
gacgggaagaanucagaa

SEQ ID NO: 54186 - RNA, 19 nt, Artificial Sequence
  Synthetic
  misc_feature (1)..(1): n is a, c, g, or u
  misc_feature (13)..(13): n is a, c, g, or u
ngacgggaagaanucagaa

SEQ ID NO: 54187 - RNA, 20 nt, Artificial Sequence
  Synthetic
  misc_feature (2)..(2): n is a, c, g, or u
  misc_feature (14)..(14): n is a, c, g, or u
cngacgggaagaanucagaa

SEQ ID NO: 54188 - RNA, 21 nt, Artificial Sequence
  Synthetic
  misc_feature (3)..(3): n is a, c, g, or u
  misc_feature (15)..(15): n is a, c, g, or u
acngacgggaagaanucagaa

SEQ ID NO: 54189 - RNA, 22 nt, Artificial Sequence
  Synthetic
  misc_feature (4)..(4): n is a, c, g, or u
  misc_feature (16)..(16): n is a, c, g, or u
aacngacgggaagaanucagaa

SEQ ID NO: 54190 - RNA, 23 nt, Artificial Sequence
  Synthetic
  misc_feature (5)..(5): n is a, c, g, or u
  misc_feature (17)..(17): n is a, c, g, or u
gaacngacgggaagaanucagaa

SEQ ID NO: 54191 - RNA, 24 nt, Artificial Sequence
  Synthetic
  misc_feature (6)..(6): n is a, c, g, or u
  misc_feature (18)..(18): n is a, c, g, or u
cgaacngacgggaagaanucagaa

SEQ ID NO: 54192 - RNA, 18 nt, Artificial Sequence
  Synthetic
uaaacugagccaggagaa

SEQ ID NO: 54193 - RNA, 19 nt, Artificial Sequence
  Synthetic
guaaacugagccaggagaa

SEQ ID NO: 54194 - RNA, 20 nt, Artificial Sequence
  Synthetic
aguaaacugagccaggagaa

SEQ ID NO: 54195 - RNA, 21 nt, Artificial Sequence
  Synthetic
uaguaaacugagccaggagaa

SEQ ID NO: 54196 - RNA, 22 nt, Artificial Sequence
  Synthetic
cuaguaaacugagccaggagaa

SEQ ID NO: 54197 - RNA, 23 nt, Artificial Sequence
  Synthetic
acuaguaaacugagccaggagaa

SEQ ID NO: 54198 - RNA, 24 nt, Artificial Sequence
  Synthetic
cacuaguaaacugagccaggagaa

SEQ ID NO: 54199 - RNA, 18 nt, Artificial Sequence
  Synthetic
  misc_feature (14)..(14): n is a, c, g, or u
ggaacggcagacgnagaa

SEQ ID NO: 54200 - RNA, 19 nt, Artificial Sequence
  Synthetic
  misc_feature (15)..(15): n is a, c, g, or u
uggaacggcagacgnagaa

SEQ ID NO: 54201 - RNA, 20 nt, Artificial Sequence
  Synthetic
  misc_feature (16)..(16): n is a, c, g, or u
cuggaacggcagacgnagaa

SEQ ID NO: 54202 - RNA, 21 nt, Artificial Sequence
  Synthetic
  misc_feature (17)..(17): n is a, c, g, or u
gcuggaacggcagacgnagaa

SEQ ID NO: 54203 - RNA, 22 nt, Artificial Sequence
  Synthetic
  misc_feature (18)..(18): n is a, c, g, or u
ggcuggaacggcagacgnagaa

SEQ ID NO: 54204 - RNA, 23 nt, Artificial Sequence
  Synthetic
  misc_feature (19)..(19): n is a, c, g, or u
cggcuggaacggcagacgnagaa

SEQ ID NO: 54205 - RNA, 24 nt, Artificial Sequence
  Synthetic
  misc_feature (20)..(20): n is a, c, g, or u
ucggcuggaacggcagacgnagaa

SEQ ID NO: 54206 - RNA, 18 nt, Artificial Sequence
  Synthetic
agaccggcugcgagcgaa

SEQ ID NO: 54207 - RNA, 19 nt, Artificial Sequence
  Synthetic
cagaccggcugcgagcgaa

SEQ ID NO: 54208 - RNA, 20 nt, Artificial Sequence
  Synthetic
ccagaccggcugcgagcgaa

SEQ ID NO: 54209 - RNA, 18 nt, Artificial Sequence
  Synthetic
uuauugcccacccaggaa

SEQ ID NO: 54210 - RNA, 19 nt, Artificial Sequence
  Synthetic
  misc_feature (1)..(1): n is a, c, g, or u
nuuauugcccacccaggaa

SEQ ID NO: 54211 - RNA, 20 nt, Artificial Sequence
  Synthetic
  misc_feature (2)..(2): n is a, c, g, or u
anuuauugcccacccaggaa

SEQ ID NO: 54212 - RNA, 21 nt, Artificial Sequence
  Synthetic
  misc_feature (3)..(3): n is a, c, g, or u
aanuuauugcccacccaggaa

SEQ ID NO: 54213 - RNA, 22 nt, Artificial Sequence
  Synthetic
  misc_feature (4)..(4): n is a, c, g, or u
caanuuauugcccacccaggaa

SEQ ID NO: 54214 - RNA, 23 nt, Artificial Sequence
  Synthetic
  misc_feature (5)..(5): n is a, c, g, or u
ccaanuuauugcccacccaggaa

SEQ ID NO: 54215 - RNA, 24 nt, Artificial Sequence
  Synthetic
  misc_feature (6)..(6): n is a, c, g, or u
uccaanuuauugcccacccaggaa

SEQ ID NO: 54216 - RNA, 18 nt, Artificial Sequence
  Synthetic
  misc_feature (2)..(2): n is a, c, g, or u
  misc_feature (11)..(11): n is a, c, g, or u
gnaaaugaaunucaggaa

SEQ ID NO: 54217 - RNA, 19 nt, Artificial Sequence
  Synthetic
  misc_feature (3)..(3): n is a, c, g, or u
  misc_feature (12)..(12): n is a, c, g, or u
ugnaaaugaaunucaggaa

SEQ ID NO: 54218 - RNA, 20 nt, Artificial Sequence
  Synthetic
  misc_feature (4)..(4): n is a, c, g, or u
  misc_feature (13)..(13): n is a, c, g, or u
augnaaaugaaunucaggaa

SEQ ID NO: 54219 - RNA, 21 nt, Artificial Sequence
  Synthetic
  misc_feature (5)..(5): n is a, c, g, or u
  misc_feature (14)..(14): n is a, c, g, or u
gaugnaaaugaaunucaggaa

SEQ ID NO: 54220 - RNA, 22 nt, Artificial Sequence
  Synthetic
  misc_feature (6)..(6): n is a, c, g, or u
  misc_feature (15)..(15): n is a, c, g, or u
ugaugnaaaugaaunucaggaa

SEQ ID NO: 54221 - RNA, 23 nt, Artificial Sequence
  Synthetic
  misc_feature (7)..(7): n is a, c, g, or u
  misc_feature (16)..(16): n is a, c, g, or u
uugaugnaaaugaaunucaggaa

SEQ ID NO: 54222 - RNA, 24 nt, Artificial Sequence
  Synthetic
  misc_feature (8)..(8): n is a, c, g, or u
  misc_feature (17)..(17): n is a, c, g, or u
cuugaugnaaaugaaunucaggaa

SEQ ID NO: 54223 - RNA, 18 nt, Artificial Sequence
  Synthetic
gaauacuaacauugggaa

SEQ ID NO: 54224 - RNA, 19 nt, Artificial Sequence
  Synthetic
ggaauacuaacauugggaa

SEQ ID NO: 54225 - RNA, 20 nt, Artificial Sequence
  Synthetic
aggaauacuaacauugggaa

SEQ ID NO: 54226 - RNA, 21 nt, Artificial Sequence
  Synthetic
aaggaauacuaacauugggaa

SEQ ID NO: 54227 - RNA, 22 nt, Artificial Sequence
  Synthetic
caaggaauacuaacauugggaa

SEQ ID NO: 54228 - RNA, 23 nt, Artificial Sequence
  Synthetic
ccaaggaauacuaacauugggaa

SEQ ID NO: 54229 - RNA, 24 nt, Artificial Sequence
  Synthetic
uccaaggaauacuaacauugggaa

SEQ ID NO: 54230 - RNA, 18 nt, Artificial Sequence
  Synthetic
  misc_feature (8)..(8): n is a, c, g, or u
uggucgungauccuggaa

SEQ ID NO: 54231 - RNA, 19 nt, Artificial Sequence
  Synthetic
  misc_feature (9)..(9): n is a, c, g, or u
guggucgungauccuggaa

SEQ ID NO: 54232 - RNA, 20 nt, Artificial Sequence
  Synthetic
  misc_feature (10)..(10): n is a, c, g, or u
gguggucgungauccuggaa

SEQ ID NO: 54233 - RNA, 21 nt, Artificial Sequence
  Synthetic
  misc_feature (11)..(11): n is a, c, g, or u
ugguggucgungauccuggaa

SEQ ID NO: 54234 - RNA, 22 nt, Artificial Sequence
  Synthetic
  misc_feature (12)..(12): n is a, c, g, or u
cugguggucgungauccuggaa

SEQ ID NO: 54235 - RNA, 23 nt, Artificial Sequence
  Synthetic
  misc_feature (13)..(13): n is a, c, g, or u
gcugguggucgungauccuggaa

SEQ ID NO: 54236 - RNA, 24 nt, Artificial Sequence
  Synthetic
  misc_feature (14)..(14): n is a, c, g, or u
ugcugguggucgungauccuggaa

SEQ ID NO: 54237 - RNA, 18 nt, Artificial Sequence
  Synthetic
gaccgccgauugguggaa

SEQ ID NO: 54238 - RNA, 19 nt, Artificial Sequence
  Synthetic
ggaccgccgauugguggaa

SEQ ID NO: 54239 - RNA, 20 nt, Artificial Sequence
  Synthetic
cggaccgccgauugguggaa

SEQ ID NO: 54240 - RNA, 21 nt, Artificial Sequence
  Synthetic
ccggaccgccgauugguggaa

SEQ ID NO: 54241 - RNA, 22 nt, Artificial Sequence
  Synthetic
cccggaccgccgauugguggaa

SEQ ID NO: 54242 - RNA, 23 nt, Artificial Sequence
  Synthetic
ucccggaccgccgauugguggaa

SEQ ID NO: 54243 - RNA, 24 nt, Artificial Sequence
  Synthetic
cucccggaccgccgauugguggaa

SEQ ID NO: 54244 - RNA, 18 nt, Artificial Sequence
  Synthetic
  misc_feature (9)..(9): n is a, c, g, or u
ugaacagunggacaugaa

SEQ ID NO: 54245 - RNA, 19 nt, Artificial Sequence
  Synthetic
  misc_feature (10)..(10): n is a, c, g, or u
uugaacagunggacaugaa

SEQ ID NO: 54246 - RNA, 20 nt, Artificial Sequence
  Synthetic
  misc_feature (11)..(11): n is a, c, g, or u
cuugaacagunggacaugaa

SEQ ID NO: 54247 - RNA, 21 nt, Artificial Sequence
  Synthetic
  misc_feature (12)..(12): n is a, c, g, or u
gcuugaacagunggacaugaa

SEQ ID NO: 54248 - RNA, 22 nt, Artificial Sequence
  Synthetic
  misc_feature (13)..(13): n is a, c, g, or u
ggcuugaacagunggacaugaa

SEQ ID NO: 54249 - RNA, 23 nt, Artificial Sequence
  Synthetic
  misc_feature (14)..(14): n is a, c, g, or u
aggcuugaacagunggacaugaa

SEQ ID NO: 54250 - RNA, 24 nt, Artificial Sequence
  Synthetic
  misc_feature (15)..(15): n is a, c, g, or u
gaggcuugaacagunggacaugaa

SEQ ID NO: 54251 - RNA, 18 nt, Artificial Sequence
  Synthetic
gcauagcagcaggaugaa

SEQ ID NO: 54252 - RNA, 19 nt, Artificial Sequence
  Synthetic
ggcauagcagcaggaugaa

SEQ ID NO: 54253 - RNA, 20 nt, Artificial Sequence
  Synthetic
aggcauagcagcaggaugaa

SEQ ID NO: 54254 - RNA, 21 nt, Artificial Sequence
  Synthetic
gaggcauagcagcaggaugaa

SEQ ID NO: 54255 - RNA, 22 nt, Artificial Sequence
  Synthetic
ugaggcauagcagcaggaugaa

SEQ ID NO: 54256 - RNA, 23 nt, Artificial Sequence
  Synthetic
augaggcauagcagcaggaugaa

SEQ ID NO: 54257 - RNA, 24 nt, Artificial Sequence
  Synthetic
gaugaggcauagcagcaggaugaa

SEQ ID NO: 54258 - RNA, 18 nt, Artificial Sequence
  Synthetic
  misc_feature (13)..(13): n is a, c, g, or u
ggguucugugucncugaa

SEQ ID NO: 54259 - RNA, 19 nt, Artificial Sequence
  Synthetic
  misc_feature (14)..(14): n is a, c, g, or u
aggguucugugucncugaa

SEQ ID NO: 54260 - RNA, 20 nt, Artificial Sequence
  Synthetic
  misc_feature (15)..(15): n is a, c, g, or u
caggguucugugucncugaa

SEQ ID NO: 54261 - RNA, 21 nt, Artificial Sequence
  Synthetic
  misc_feature (16)..(16): n is a, c, g, or u
gcaggguucugugucncugaa

SEQ ID NO: 54262 - RNA, 22 nt, Artificial Sequence
  Synthetic
  misc_feature (17)..(17): n is a, c, g, or u
agcaggguucugugucncugaa

SEQ ID NO: 54263 - RNA, 23 nt, Artificial Sequence
  Synthetic
  misc_feature (18)..(18): n is a, c, g, or u
gagcaggguucugugucncugaa

SEQ ID NO: 54264 - RNA, 24 nt, Artificial Sequence
  Synthetic
  misc_feature (19)..(19): n is a, c, g, or u
ggagcaggguucugugucncugaa

SEQ ID NO: 54265 - RNA, 18 nt, Artificial Sequence
  Synthetic
gcgacgugcagaggugaa

SEQ ID NO: 54266 - RNA, 19 nt, Artificial Sequence
  Synthetic
ugcgacgugcagaggugaa

SEQ ID NO: 54267 - RNA, 20 nt, Artificial Sequence
  Synthetic
augcgacgugcagaggugaa

SEQ ID NO: 54268 - RNA, 21 nt, Artificial Sequence
  Synthetic
caugcgacgugcagaggugaa

SEQ ID NO: 54269 - RNA, 22 nt, Artificial Sequence
  Synthetic
ccaugcgacgugcagaggugaa

SEQ ID NO: 54270 - RNA, 23 nt, Artificial Sequence
  Synthetic
uccaugcgacgugcagaggugaa

SEQ ID NO: 54271 - RNA, 24 nt, Artificial Sequence
  Synthetic
cuccaugcgacgugcagaggugaa

SEQ ID NO: 54272 - RNA, 18 nt, Artificial Sequence
  Synthetic
  misc_feature (9)..(9): n is a, c, g, or u
  misc_feature (16)..(16): n is a, c, g, or u
uaaccagunaggauunaa

SEQ ID NO: 54273 - RNA, 19 nt, Artificial Sequence
  Synthetic
  misc_feature (10)..(10): n is a, c, g, or u
  misc_feature (17)..(17): n is a, c, g, or u
uuaaccagunaggauunaa

SEQ ID NO: 54274 - RNA, 20 nt, Artificial Sequence
  Synthetic
  misc_feature (11)..(11): n is a, c, g, or u
  misc_feature (18)..(18): n is a, c, g, or u
guuaaccagunaggauunaa

SEQ ID NO: 54275 - RNA, 21 nt, Artificial Sequence
  Synthetic
  misc_feature (12)..(12): n is a, c, g, or u
  misc_feature (19)..(19): n is a, c, g, or u
aguuaaccagunaggauunaa

SEQ ID NO: 54276 - RNA, 22 nt, Artificial Sequence
  Synthetic
  misc_feature (13)..(13): n is a, c, g, or u
  misc_feature (20)..(20): n is a, c, g, or u
gaguuaaccagunaggauunaa

SEQ ID NO: 54277 - RNA, 23 nt, Artificial Sequence
  Synthetic
  misc_feature (14)..(14): n is a, c, g, or u
  misc_feature (21)..(21): n is a, c, g, or u
ggaguuaaccagunaggauunaa

SEQ ID NO: 54278 - RNA, 24 nt, Artificial Sequence
  Synthetic
  misc_feature (15)..(15): n is a, c, g, or u
  misc_feature (22)..(22): n is a, c, g, or u
aggaguuaaccagunaggauunaa

SEQ ID NO: 54279 - RNA, 18 nt, Artificial Sequence
  Synthetic
auggauacccacagauaa

SEQ ID NO: 54280 - RNA, 19 nt, Artificial Sequence
  Synthetic
aauggauacccacagauaa

SEQ ID NO: 54281 - RNA, 20 nt, Artificial Sequence
  Synthetic
aaauggauacccacagauaa

SEQ ID NO: 54282 - RNA, 21 nt, Artificial Sequence
  Synthetic
  misc_feature (1)..(1): n is a, c, g, or u
naaauggauacccacagauaa

SEQ ID NO: 54283 - RNA, 22 nt, Artificial Sequence
  Synthetic
  misc_feature (2)..(2): n is a, c, g, or u
unaaauggauacccacagauaa

SEQ ID NO: 54284 - RNA, 23 nt, Artificial Sequence
  Synthetic
  misc_feature (3)..(3): n is a, c, g, or u
uunaaauggauacccacagauaa

SEQ ID NO: 54285 - RNA, 24 nt, Artificial Sequence
  Synthetic
  misc_feature (4)..(4): n is a, c, g, or u
auunaaauggauacccacagauaa

SEQ ID NO: 54286 - RNA, 18 nt, Artificial Sequence
  Synthetic
accagaucauccauauaa

SEQ ID NO: 54287 - RNA, 19 nt, Artificial Sequence
  Synthetic
uaccagaucauccauauaa

SEQ ID NO: 54288 - RNA, 20 nt, Artificial Sequence
  Synthetic
auaccagaucauccauauaa

SEQ ID NO: 54289 - RNA, 21 nt, Artificial Sequence
  Synthetic
aauaccagaucauccauauaa

SEQ ID NO: 54290 - RNA, 22 nt, Artificial Sequence
  Synthetic
caauaccagaucauccauauaa

SEQ ID NO: 54291 - RNA, 23 nt, Artificial Sequence
  Synthetic
ccaauaccagaucauccauauaa

SEQ ID NO: 54292 - RNA, 24 nt, Artificial Sequence
  Synthetic
cccaauaccagaucauccauauaa

SEQ ID NO: 54293 - RNA, 18 nt, Artificial Sequence
  Synthetic
gcauuugguggucuauaa

SEQ ID NO: 54294 - RNA, 19 nt, Artificial Sequence
  Synthetic
ggcauuugguggucuauaa

SEQ ID NO: 54295 - RNA, 20 nt, Artificial Sequence
  Synthetic
gggcauuugguggucuauaa

SEQ ID NO: 54296 - RNA, 21 nt, Artificial Sequence
  Synthetic
ggggcauuugguggucuauaa

SEQ ID NO: 54297 - RNA, 22 nt, Artificial Sequence
  Synthetic
aggggcauuugguggucuauaa

SEQ ID NO: 54298 - RNA, 23 nt, Artificial Sequence
  Synthetic
uaggggcauuugguggucuauaa

SEQ ID NO: 54299 - RNA, 24 nt, Artificial Sequence
  Synthetic
auaggggcauuugguggucuauaa

SEQ ID NO: 54300 - RNA, 18 nt, Artificial Sequence
  Synthetic
uugguaacagcgguauaa

SEQ ID NO: 54301 - RNA, 19 nt, Artificial Sequence
  Synthetic
auugguaacagcgguauaa

SEQ ID NO: 54302 - RNA, 20 nt, Artificial Sequence
  Synthetic
aauugguaacagcgguauaa

SEQ ID NO: 54303 - RNA, 21 nt, Artificial Sequence
  Synthetic
aaauugguaacagcgguauaa

SEQ ID NO: 54304 - RNA, 22 nt, Artificial Sequence
  Synthetic
aaaauugguaacagcgguauaa

SEQ ID NO: 54305 - RNA, 23 nt, Artificial Sequence
  Synthetic
gaaaauugguaacagcgguauaa

SEQ ID NO: 54306 - RNA, 24 nt, Artificial Sequence
  Synthetic
agaaaauugguaacagcgguauaa

SEQ ID NO: 54307 - RNA, 18 nt, Artificial Sequence
  Synthetic
uuucucuuccaaaaguaa

SEQ ID NO: 54308 - RNA, 19 nt, Artificial Sequence
  Synthetic
guuucucuuccaaaaguaa

SEQ ID NO: 54309 - RNA, 20 nt, Artificial Sequence
  Synthetic
uguuucucuuccaaaaguaa

SEQ ID NO: 54310 - RNA, 21 nt, Artificial Sequence
  Synthetic
cuguuucucuuccaaaaguaa

SEQ ID NO: 54311 - RNA, 22 nt, Artificial Sequence
  Synthetic
acuguuucucuuccaaaaguaa

SEQ ID NO: 54312 - RNA, 23 nt, Artificial Sequence
  Synthetic
aacuguuucucuuccaaaaguaa

SEQ ID NO: 54313 - RNA, 24 nt, Artificial Sequence
  Synthetic
gaacuguuucucuuccaaaaguaa

SEQ ID NO: 54314 - RNA, 18 nt, Artificial Sequence
  Synthetic
aacaaauugcacuaguaa

SEQ ID NO: 54315 - RNA, 19 nt, Artificial Sequence
  Synthetic
gaacaaauugcacuaguaa

SEQ ID NO: 54316 - RNA, 20 nt, Artificial Sequence
  Synthetic
ugaacaaauugcacuaguaa

SEQ ID NO: 54317 - RNA, 21 nt, Artificial Sequence
  Synthetic
cugaacaaauugcacuaguaa

SEQ ID NO: 54318 - RNA, 22 nt, Artificial Sequence
  Synthetic
acugaacaaauugcacuaguaa

SEQ ID NO: 54319 - RNA, 23 nt, Artificial Sequence
  Synthetic
cacugaacaaauugcacuaguaa

SEQ ID NO: 54320 - RNA, 24 nt, Artificial Sequence
  Synthetic
ccacugaacaaauugcacuaguaa

SEQ ID NO: 54321 - RNA, 18 nt, Artificial Sequence
  Synthetic
agcgccgacgggacguaa

SEQ ID NO: 54322 - RNA, 19 nt, Artificial Sequence
  Synthetic
cagcgccgacgggacguaa

SEQ ID NO: 54323 - RNA, 20 nt, Artificial Sequence
  Synthetic
ucagcgccgacgggacguaa

SEQ ID NO: 54324 - RNA, 18 nt, Artificial Sequence
  Synthetic
  misc_feature (10)..(10): n is a, c, g, or u
gacggggagnccgcguaa

SEQ ID NO: 54325 - RNA, 19 nt, Artificial Sequence
  Synthetic
  misc_feature (11)..(11): n is a, c, g, or u
agacggggagnccgcguaa

SEQ ID NO: 54326 - RNA, 20 nt, Artificial Sequence
  Synthetic
  misc_feature (12)..(12): n is a, c, g, or u
cagacggggagnccgcguaa

SEQ ID NO: 54327 - RNA, 21 nt, Artificial Sequence
  Synthetic
  misc_feature (13)..(13): n is a, c, g, or u
acagacggggagnccgcguaa

SEQ ID NO: 54328 - RNA, 22 nt, Artificial Sequence
  Synthetic
  misc_feature (14)..(14): n is a, c, g, or u
aacagacggggagnccgcguaa

SEQ ID NO: 54329 - RNA, 23 nt, Artificial Sequence
  Synthetic
  misc_feature (15)..(15): n is a, c, g, or u
gaacagacggggagnccgcguaa

SEQ ID NO: 54330 - RNA, 24 nt, Artificial Sequence
  Synthetic
  misc_feature (16)..(16): n is a, c, g, or u
ggaacagacggggagnccgcguaa

SEQ ID NO: 54331 - RNA, 18 nt, Artificial Sequence
  Synthetic
gaaacacaccgccuguaa

SEQ ID NO: 54332 - RNA, 19 nt, Artificial Sequence
  Synthetic
agaaacacaccgccuguaa

SEQ ID NO: 54333 - RNA, 20 nt, Artificial Sequence
  Synthetic
aagaaacacaccgccuguaa

SEQ ID NO: 54334 - RNA, 21 nt, Artificial Sequence
  Synthetic
caagaaacacaccgccuguaa

SEQ ID NO: 54335 - RNA, 22 nt, Artificial Sequence
  Synthetic
acaagaaacacaccgccuguaa

SEQ ID NO: 54336 - RNA, 23 nt, Artificial Sequence
  Synthetic
aacaagaaacacaccgccuguaa

SEQ ID NO: 54337 - RNA, 24 nt, Artificial Sequence
  Synthetic
caacaagaaacacaccgccuguaa

SEQ ID NO: 54338 - RNA, 18 nt, Artificial Sequence
  Synthetic
  misc_feature (3)..(3): n is a, c, g, or u
canagaaaggccuuguaa

SEQ ID NO: 54339 - RNA, 19 nt, Artificial Sequence
  Synthetic
  misc_feature (4)..(4): n is a, c, g, or u
acanagaaaggccuuguaa

SEQ ID NO: 54340 - RNA, 20 nt, Artificial Sequence
  Synthetic
  misc_feature (1)..(1): n is a, c, g, or u
  misc_feature (5)..(5): n is a, c, g, or u
nacanagaaaggccuuguaa

SEQ ID NO: 54341 - RNA, 21 nt, Artificial Sequence
  Synthetic
  misc_feature (2)..(2): n is a, c, g, or u
  misc_feature (6)..(6): n is a, c, g, or u
unacanagaaaggccuuguaa

SEQ ID NO: 54342 - RNA, 22 nt, Artificial Sequence
  Synthetic
  misc_feature (3)..(3): n is a, c, g, or u
  misc_feature (7)..(7): n is a, c, g, or u
uunacanagaaaggccuuguaa

SEQ ID NO: 54343 - RNA, 23 nt, Artificial Sequence
  Synthetic
  misc_feature (4)..(4): n is a, c, g, or u
  misc_feature (8)..(8): n is a, c, g, or u
guunacanagaaaggccuuguaa

SEQ ID NO: 54344 - RNA, 24 nt, Artificial Sequence
  Synthetic
  misc_feature (5)..(5): n is a, c, g, or u
  misc_feature (9)..(9): n is a, c, g, or u
uguunacanagaaaggccuuguaa

SEQ ID NO: 54345 - RNA, 18 nt, Artificial Sequence
  Synthetic
ggguugcgucagcaaaca

SEQ ID NO: 54346 - RNA, 19 nt, Artificial Sequence
  Synthetic
gggguugcgucagcaaaca

SEQ ID NO: 54347 - RNA, 20 nt, Artificial Sequence
  Synthetic
ggggguugcgucagcaaaca

SEQ ID NO: 54348 - RNA, 21 nt, Artificial Sequence
  Synthetic
uggggguugcgucagcaaaca

SEQ ID NO: 54349 - RNA, 22 nt, Artificial Sequence
  Synthetic
guggggguugcgucagcaaaca

SEQ ID NO: 54350 - RNA, 23 nt, Artificial Sequence
  Synthetic
aguggggguugcgucagcaaaca

SEQ ID NO: 54351 - RNA, 24 nt, Artificial Sequence
  Synthetic
caguggggguugcgucagcaaaca

SEQ ID NO: 54352 - RNA, 18 nt, Artificial Sequence
  Synthetic
  misc_feature (5)..(5): n is a, c, g, or u
  misc_feature (8)..(8): n is a, c, g, or u
agcancangagggaaaca

SEQ ID NO: 54353 - RNA, 19 nt, Artificial Sequence
  Synthetic
  misc_feature (6)..(6): n is a, c, g, or u
  misc_feature (9)..(9): n is a, c, g, or u
cagcancangagggaaaca

SEQ ID NO: 54354 - RNA, 20 nt, Artificial Sequence
  Synthetic
  misc_feature (7)..(7): n is a, c, g, or u
  misc_feature (10)..(10): n is a, c, g, or u
acagcancangagggaaaca

SEQ ID NO: 54355 - RNA, 21 nt, Artificial Sequence
  Synthetic
  misc_feature (8)..(8): n is a, c, g, or u
  misc_feature (11)..(11): n is a, c, g, or u
aacagcancangagggaaaca

SEQ ID NO: 54356 - RNA, 22 nt, Artificial Sequence
  Synthetic
  misc_feature (9)..(9): n is a, c, g, or u
  misc_feature (12)..(12): n is a, c, g, or u
gaacagcancangagggaaaca

SEQ ID NO: 54357 - RNA, 23 nt, Artificial Sequence
  Synthetic
  misc_feature (10)..(10): n is a, c, g, or u
  misc_feature (13)..(13): n is a, c, g, or u
ggaacagcancangagggaaaca

SEQ ID NO: 54358 - RNA, 24 nt, Artificial Sequence
  Synthetic
  misc_feature (11)..(11): n is a, c, g, or u
  misc_feature (14)..(14): n is a, c, g, or u
uggaacagcancangagggaaaca

SEQ ID NO: 54359 - RNA, 18 nt, Artificial Sequence
  Synthetic
gccgacgggacguaaaca

SEQ ID NO: 54360 - RNA, 19 nt, Artificial Sequence
  Synthetic
cgccgacgggacguaaaca

SEQ ID NO: 54361 - RNA, 20 nt, Artificial Sequence
  Synthetic
gcgccgacgggacguaaaca

SEQ ID NO: 54362 - RNA, 18 nt, Artificial Sequence
  Synthetic
aguccagaagaaccaaca

SEQ ID NO: 54363 - RNA, 19 nt, Artificial Sequence
  Synthetic
uaguccagaagaaccaaca

SEQ ID NO: 54364 - RNA, 20 nt, Artificial Sequence
  Synthetic
auaguccagaagaaccaaca

SEQ ID NO: 54365 - RNA, 21 nt, Artificial Sequence
  Synthetic
gauaguccagaagaaccaaca

SEQ ID NO: 54366 - RNA, 22 nt, Artificial Sequence
  Synthetic
ugauaguccagaagaaccaaca

SEQ ID NO: 54367 - RNA, 23 nt, Artificial Sequence
  Synthetic
uugauaguccagaagaaccaaca

SEQ ID NO: 54368 - RNA, 24 nt, Artificial Sequence
  Synthetic
cuugauaguccagaagaaccaaca

SEQ ID NO: 54369 - RNA, 18 nt, Artificial Sequence
  Synthetic
ugaggauuuuugucaaca

SEQ ID NO: 54370 - RNA, 19 nt, Artificial Sequence
  Synthetic
gugaggauuuuugucaaca

SEQ ID NO: 54371 - RNA, 20 nt, Artificial Sequence
  Synthetic
ugugaggauuuuugucaaca

SEQ ID NO: 54372 - RNA, 21 nt, Artificial Sequence
  Synthetic
uugugaggauuuuugucaaca

SEQ ID NO: 54373 - RNA, 22 nt, Artificial Sequence
  Synthetic
auugugaggauuuuugucaaca

SEQ ID NO: 54374 - RNA, 23 nt, Artificial Sequence
  Synthetic
uauugugaggauuuuugucaaca

SEQ ID NO: 54375 - RNA, 24 nt, Artificial Sequence
  Synthetic
guauugugaggauuuuugucaaca

SEQ ID NO: 54376 - RNA, 18 nt, Artificial Sequence
  Synthetic
ggcagaugagaaggaaca

SEQ ID NO: 54377 - RNA, 19 nt, Artificial Sequence
  Synthetic
cggcagaugagaaggaaca

SEQ ID NO: 54378 - RNA, 20 nt, Artificial Sequence
  Synthetic
ccggcagaugagaaggaaca

SEQ ID NO: 54379 - RNA, 21 nt, Artificial Sequence
  Synthetic
  misc_feature (1)..(1): n is a, c, g, or u
nccggcagaugagaaggaaca

SEQ ID NO: 54380 - RNA, 22 nt, Artificial Sequence
  Synthetic
  misc_feature (2)..(2): n is a, c, g, or u
gnccggcagaugagaaggaaca

SEQ ID NO: 54381 - RNA, 23 nt, Artificial Sequence
  Synthetic
  misc_feature (3)..(3): n is a, c, g, or u
ggnccggcagaugagaaggaaca

SEQ ID NO: 54382 - RNA, 24 nt, Artificial Sequence
  Synthetic
  misc_feature (4)..(4): n is a, c, g, or u
cggnccggcagaugagaaggaaca

SEQ ID NO: 54383 - RNA, 18 nt, Artificial Sequence
  Synthetic
agcuuggaggcuugaaca

SEQ ID NO: 54384 - RNA, 19 nt, Artificial Sequence
  Synthetic
cagcuuggaggcuugaaca

SEQ ID NO: 54385 - RNA, 20 nt, Artificial Sequence
  Synthetic
acagcuuggaggcuugaaca

SEQ ID NO: 54386 - RNA, 21 nt, Artificial Sequence
  Synthetic
cacagcuuggaggcuugaaca

SEQ ID NO: 54387 - RNA, 22 nt, Artificial Sequence
  Synthetic
gcacagcuuggaggcuugaaca

SEQ ID NO: 54388 - RNA, 23 nt, Artificial Sequence
  Synthetic
ggcacagcuuggaggcuugaaca

SEQ ID NO: 54389 - RNA, 24 nt, Artificial Sequence
  Synthetic
aggcacagcuuggaggcuugaaca

SEQ ID NO: 54390 - RNA, 18 nt, Artificial Sequence
  Synthetic
guccaaggaauacuaaca

SEQ ID NO: 54391 - RNA, 19 nt, Artificial Sequence
  Synthetic
aguccaaggaauacuaaca

SEQ ID NO: 54392 - RNA, 20 nt, Artificial Sequence
  Synthetic
gaguccaaggaauacuaaca

SEQ ID NO: 54393 - RNA, 21 nt, Artificial Sequence
  Synthetic
ugaguccaaggaauacuaaca

SEQ ID NO: 54394 - RNA, 22 nt, Artificial Sequence
  Synthetic
augaguccaaggaauacuaaca

SEQ ID NO: 54395 - RNA, 23 nt, Artificial Sequence
  Synthetic
uaugaguccaaggaauacuaaca

SEQ ID NO: 54396 - RNA, 24 nt, Artificial Sequence
  Synthetic
uuaugaguccaaggaauacuaaca

SEQ ID NO: 54397 - RNA, 18 nt, Artificial Sequence
  Synthetic
  misc_feature (3)..(3): n is a, c, g, or u
uunaaauggauacccaca

SEQ ID NO: 54398 - RNA, 19 nt, Artificial Sequence
  Synthetic
  misc_feature (4)..(4): n is a, c, g, or u
auunaaauggauacccaca

SEQ ID NO: 54399 - RNA, 20 nt, Artificial Sequence
  Synthetic
  misc_feature (5)..(5): n is a, c, g, or u
uauunaaauggauacccaca

SEQ ID NO: 54400 - RNA, 21 nt, Artificial Sequence
  Synthetic
  misc_feature (6)..(6): n is a, c, g, or u
guauunaaauggauacccaca

SEQ ID NO: 54401 - RNA, 22 nt, Artificial Sequence
  Synthetic
  misc_feature (1)..(1): n is a, c, g, or u
  misc_feature (7)..(7): n is a, c, g, or u
nguauunaaauggauacccaca

SEQ ID NO: 54402 - RNA, 23 nt, Artificial Sequence
  Synthetic
  misc_feature (2)..(2): n is a, c, g, or u
  misc_feature (8)..(8): n is a, c, g, or u
anguauunaaauggauacccaca

SEQ ID NO: 54403 - RNA, 24 nt, Artificial Sequence
  Synthetic
  misc_feature (3)..(3): n is a, c, g, or u
  misc_feature (9)..(9): n is a, c, g, or u
ganguauunaaauggauacccaca

SEQ ID NO: 54404 - RNA, 18 nt, Artificial Sequence
  Synthetic
gauccaguuggcagcaca

SEQ ID NO: 54405 - RNA, 19 nt, Artificial Sequence
  Synthetic
ggauccaguuggcagcaca

SEQ ID NO: 54406 - RNA, 20 nt, Artificial Sequence
  Synthetic
aggauccaguuggcagcaca

SEQ ID NO: 54407 - RNA, 21 nt, Artificial Sequence
  Synthetic
  misc_feature (1)..(1): n is a, c, g, or u
naggauccaguuggcagcaca

SEQ ID NO: 54408 - RNA, 22 nt, Artificial Sequence
  Synthetic
  misc_feature (2)..(2): n is a, c, g, or u
gnaggauccaguuggcagcaca

SEQ ID NO: 54409 - RNA, 23 nt, Artificial Sequence
  Synthetic
  misc_feature (3)..(3): n is a, c, g, or u
cgnaggauccaguuggcagcaca

SEQ ID NO: 54410 - RNA, 24 nt, Artificial Sequence
  Synthetic
  misc_feature (4)..(4): n is a, c, g, or u
gcgnaggauccaguuggcagcaca

SEQ ID NO: 54411 - RNA, 18 nt, Artificial Sequence
  Synthetic
auaacuaaaagccagaca

SEQ ID NO: 54412 - RNA, 19 nt, Artificial Sequence
  Synthetic
uauaacuaaaagccagaca

SEQ ID NO: 54413 - RNA, 20 nt, Artificial Sequence
  Synthetic
auauaacuaaaagccagaca

SEQ ID NO: 54414 - RNA, 21 nt, Artificial Sequence
  Synthetic
cauauaacuaaaagccagaca

SEQ ID NO: 54415 - RNA, 22 nt, Artificial Sequence
  Synthetic
ccauauaacuaaaagccagaca

SEQ ID NO: 54416 - RNA, 23 nt, Artificial Sequence
  Synthetic
uccauauaacuaaaagccagaca

SEQ ID NO: 54417 - RNA, 24 nt, Artificial Sequence
  Synthetic
auccauauaacuaaaagccagaca

SEQ ID NO: 54418 - RNA, 18 nt, Artificial Sequence
  Synthetic
cgaauuuuggccaggaca

SEQ ID NO: 54419 - RNA, 19 nt, Artificial Sequence
  Synthetic
gcgaauuuuggccaggaca

SEQ ID NO: 54420 - RNA, 20 nt, Artificial Sequence
  Synthetic
ugcgaauuuuggccaggaca

SEQ ID NO: 54421 - RNA, 21 nt, Artificial Sequence
  Synthetic
cugcgaauuuuggccaggaca

SEQ ID NO: 54422 - RNA, 22 nt, Artificial Sequence
  Synthetic
acugcgaauuuuggccaggaca

SEQ ID NO: 54423 - RNA, 23 nt, Artificial Sequence
  Synthetic
gacugcgaauuuuggccaggaca

SEQ ID NO: 54424 - RNA, 24 nt, Artificial Sequence
  Synthetic
ggacugcgaauuuuggccaggaca

SEQ ID NO: 54425 - RNA, 18 nt, Artificial Sequence
  Synthetic
uacuuccuagagaggaca

SEQ ID NO: 54426 - RNA, 19 nt, Artificial Sequence
  Synthetic
guacuuccuagagaggaca

SEQ ID NO: 54427 - RNA, 20 nt, Artificial Sequence
  Synthetic
uguacuuccuagagaggaca

SEQ ID NO: 54428 - RNA, 21 nt, Artificial Sequence
  Synthetic
guguacuuccuagagaggaca

SEQ ID NO: 54429 - RNA, 22 nt, Artificial Sequence
  Synthetic
gguguacuuccuagagaggaca

SEQ ID NO: 54430 - RNA, 23 nt, Artificial Sequence
  Synthetic
agguguacuuccuagagaggaca

SEQ ID NO: 54431 - RNA, 24 nt, Artificial Sequence
  Synthetic
gagguguacuuccuagagaggaca

SEQ ID NO: 54432 - RNA, 18 nt, Artificial Sequence
  Synthetic
  misc_feature (9)..(9): n is a, c, g, or u
uccuggaanuagaggaca

SEQ ID NO: 54433 - RNA, 19 nt, Artificial Sequence
  Synthetic
  misc_feature (10)..(10): n is a, c, g, or u
auccuggaanuagaggaca

SEQ ID NO: 54434 - RNA, 20 nt, Artificial Sequence
  Synthetic
  misc_feature (11)..(11): n is a, c, g, or u
gauccuggaanuagaggaca

SEQ ID NO: 54435 - RNA, 21 nt, Artificial Sequence
  Synthetic
  misc_feature (1)..(1): n is a, c, g, or u
  misc_feature (12)..(12): n is a, c, g, or u
ngauccuggaanuagaggaca

SEQ ID NO: 54436 - RNA, 22 nt, Artificial Sequence
  Synthetic
  misc_feature (2)..(2): n is a, c, g, or u
  misc_feature (13)..(13): n is a, c, g, or u
ungauccuggaanuagaggaca

SEQ ID NO: 54437 - RNA, 23 nt, Artificial Sequence
  Synthetic
  misc_feature (3)..(3): n is a, c, g, or u
  misc_feature (14)..(14): n is a, c, g, or u
gungauccuggaanuagaggaca

SEQ ID NO: 54438 - RNA, 24 nt, Artificial Sequence
  Synthetic
  misc_feature (4)..(4): n is a, c, g, or u
  misc_feature (15)..(15): n is a, c, g, or u
cgungauccuggaanuagaggaca

SEQ ID NO: 54439 - RNA, 18 nt, Artificial Sequence
  Synthetic
  misc_feature (6)..(6): n is a, c, g, or u
  misc_feature (11)..(11): n is a, c, g, or u
  misc_feature (15)..(15): n is a, c, g, or u
ggauunaaagnaggnaca

SEQ ID NO: 54440 - RNA, 19 nt, Artificial Sequence
  Synthetic
  misc_feature (7)..(7): n is a, c, g, or u
  misc_feature (12)..(12): n is a, c, g, or u
  misc_feature (16)..(16): n is a, c, g, or u
aggauunaaagnaggnaca

SEQ ID NO: 54441 - RNA, 20 nt, Artificial Sequence
  Synthetic
  misc_feature (1)..(1): n is a, c, g, or u
  misc_feature (8)..(8): n is a, c, g, or u
  misc_feature (13)..(13): n is a, c, g, or u
  misc_feature (17)..(17): n is a, c, g, or u
naggauunaaagnaggnaca

SEQ ID NO: 54442 - RNA, 21 nt, Artificial Sequence
  Synthetic
  misc_feature (2)..(2): n is a, c, g, or u
  misc_feature (9)..(9): n is a, c, g, or u
  misc_feature (14)..(14): n is a, c, g, or u
  misc_feature (18)..(18): n is a, c, g, or u
unaggauunaaagnaggnaca

SEQ ID NO: 54443 - RNA, 22 nt, Artificial Sequence
  Synthetic
  misc_feature (3)..(3): n is a, c, g, or u
  misc_feature (10)..(10): n is a, c, g, or u
  misc_feature (15)..(15): n is a, c, g, or u
  misc_feature (19)..(19): n is a, c, g, or u
gunaggauunaaagnaggnaca

SEQ ID NO: 54444 - RNA, 23 nt, Artificial Sequence
  Synthetic
  misc_feature (4)..(4): n is a, c, g, or u
  misc_feature (11)..(11): n is a, c, g, or u
  misc_feature (16)..(16): n is a, c, g, or u
  misc_feature (20)..(20): n is a, c, g, or u
agunaggauunaaagnaggnaca

SEQ ID NO: 54445 - RNA, 24 nt, Artificial Sequence
  Synthetic
  misc_feature (5)..(5): n is a, c, g, or u
  misc_feature (12)..(12): n is a, c, g, or u
  misc_feature (17)..(17): n is a, c, g, or u
  misc_feature (21)..(21): n is a, c, g, or u
cagunaggauunaaagnaggnaca

SEQ ID NO: 54446 - RNA, 18 nt, Artificial Sequence
  Synthetic
  misc_feature (6)..(6): n is a, c, g, or u
  misc_feature (15)..(15): n is a, c, g, or u
cccagnggauugggnaca

SEQ ID NO: 54447 - RNA, 19 nt, Artificial Sequence
  Synthetic
  misc_feature (7)..(7): n is a, c, g, or u
  misc_feature (16)..(16): n is a, c, g, or u
ucccagnggauugggnaca

SEQ ID NO: 54448 - RNA, 20 nt, Artificial Sequence
  Synthetic
  misc_feature (8)..(8): n is a, c, g, or u
  misc_feature (17)..(17): n is a, c, g, or u
aucccagnggauugggnaca

SEQ ID NO: 54449 - RNA, 21 nt, Artificial Sequence
  Synthetic
  misc_feature (9)..(9): n is a, c, g, or u
  misc_feature (18)..(18): n is a, c, g, or u
aaucccagnggauugggnaca

SEQ ID NO: 54450 - RNA, 22 nt, Artificial Sequence
  Synthetic
  misc_feature (10)..(10): n is a, c, g, or u
  misc_feature (19)..(19): n is a, c, g, or u
gaaucccagnggauugggnaca

SEQ ID NO: 54451 - RNA, 23 nt, Artificial Sequence
  Synthetic
  misc_feature (11)..(11): n is a, c, g, or u
  misc_feature (20)..(20): n is a, c, g, or u
agaaucccagnggauugggnaca

SEQ ID NO: 54452 - RNA, 24 nt, Artificial Sequence
  Synthetic
  misc_feature (12)..(12): n is a, c, g, or u
  misc_feature (21)..(21): n is a, c, g, or u
aagaaucccagnggauugggnaca

SEQ ID NO: 54453 - RNA, 18 nt, Artificial Sequence
  Synthetic
  misc_feature (10)..(10): n is a, c, g, or u
  misc_feature (15)..(15): n is a, c, g, or u
guucauguanuguunaca

SEQ ID NO: 54454 - RNA, 19 nt, Artificial Sequence
  Synthetic
  misc_feature (11)..(11): n is a, c, g, or u
  misc_feature (16)..(16): n is a, c, g, or u
gguucauguanuguunaca

SEQ ID NO: 54455 - RNA, 20 nt, Artificial Sequence
  Synthetic
  misc_feature (12)..(12): n is a, c, g, or u
  misc_feature (17)..(17): n is a, c, g, or u
agguucauguanuguunaca

SEQ ID NO: 54456 - RNA, 21 nt, Artificial Sequence
  Synthetic
  misc_feature (13)..(13): n is a, c, g, or u
  misc_feature (18)..(18): n is a, c, g, or u
aagguucauguanuguunaca

SEQ ID NO: 54457 - RNA, 22 nt, Artificial Sequence
  Synthetic
  misc_feature (14)..(14): n is a, c, g, or u
  misc_feature (19)..(19): n is a, c, g, or u
aaagguucauguanuguunaca

SEQ ID NO: 54458 - RNA, 23 nt, Artificial Sequence
  Synthetic
  misc_feature (15)..(15): n is a, c, g, or u
  misc_feature (20)..(20): n is a, c, g, or u
uaaagguucauguanuguunaca

SEQ ID NO: 54459 - RNA, 24 nt, Artificial Sequence
  Synthetic
  misc_feature (16)..(16): n is a, c, g, or u
  misc_feature (21)..(21): n is a, c, g, or u
guaaagguucauguanuguunaca

SEQ ID NO: 54460 - RNA, 18 nt, Artificial Sequence
  Synthetic
auggccaagccccaacca

SEQ ID NO: 54461 - RNA, 19 nt, Artificial Sequence
  Synthetic
aauggccaagccccaacca

SEQ ID NO: 54462 - RNA, 20 nt, Artificial Sequence
  Synthetic
caauggccaagccccaacca

SEQ ID NO: 54463 - RNA, 21 nt, Artificial Sequence
  Synthetic
ccaauggccaagccccaacca

SEQ ID NO: 54464 - RNA, 22 nt, Artificial Sequence
  Synthetic
gccaauggccaagccccaacca

SEQ ID NO: 54465 - RNA, 23 nt, Artificial Sequence
  Synthetic
ggccaauggccaagccccaacca

SEQ ID NO: 54466 - RNA, 24 nt, Artificial Sequence
  Synthetic
uggccaauggccaagccccaacca

SEQ ID NO: 54467 - RNA, 18 nt, Artificial Sequence
  Synthetic
gauaguccagaagaacca

SEQ ID NO: 54468 - RNA, 19 nt, Artificial Sequence
  Synthetic
ugauaguccagaagaacca

SEQ ID NO: 54469 - RNA, 20 nt, Artificial Sequence
  Synthetic
uugauaguccagaagaacca

SEQ ID NO: 54470 - RNA, 21 nt, Artificial Sequence
  Synthetic
cuugauaguccagaagaacca

SEQ ID NO: 54471 - RNA, 22 nt, Artificial Sequence
  Synthetic
ccuugauaguccagaagaacca

SEQ ID NO: 54472 - RNA, 23 nt, Artificial Sequence
  Synthetic
accuugauaguccagaagaacca

SEQ ID NO: 54473 - RNA, 24 nt, Artificial Sequence
  Synthetic
uaccuugauaguccagaagaacca

SEQ ID NO: 54474 - RNA, 18 nt, Artificial Sequence
  Synthetic
aaaagaaggaguuaacca

SEQ ID NO: 54475 - RNA, 19 nt, Artificial Sequence
  Synthetic
gaaaagaaggaguuaacca

SEQ ID NO: 54476 - RNA, 20 nt, Artificial Sequence
  Synthetic
ggaaaagaaggaguuaacca

SEQ ID NO: 54477 - RNA, 21 nt, Artificial Sequence
  Synthetic
aggaaaagaaggaguuaacca

SEQ ID NO: 54478 - RNA, 22 nt, Artificial Sequence
  Synthetic
caggaaaagaaggaguuaacca

SEQ ID NO: 54479 - RNA, 23 nt, Artificial Sequence
  Synthetic
ucaggaaaagaaggaguuaacca

SEQ ID NO: 54480 - RNA, 24 nt, Artificial Sequence
  Synthetic
  misc_feature (1)..(1): n is a, c, g, or u
nucaggaaaagaaggaguuaacca

SEQ ID NO: 54481 - RNA, 18 nt, Artificial Sequence
  Synthetic
  misc_feature (1)..(1): n is a, c, g, or u
ncugaacuggagccacca

SEQ ID NO: 54482 - RNA, 19 nt, Artificial Sequence
  Synthetic
  misc_feature (2)..(2): n is a, c, g, or u
cncugaacuggagccacca

SEQ ID NO: 54483 - RNA, 20 nt, Artificial Sequence
  Synthetic
  misc_feature (3)..(3): n is a, c, g, or u
ucncugaacuggagccacca

SEQ ID NO: 54484 - RNA, 21 nt, Artificial Sequence
  Synthetic
  misc_feature (4)..(4): n is a, c, g, or u
gucncugaacuggagccacca

SEQ ID NO: 54485 - RNA, 22 nt, Artificial Sequence
  Synthetic
  misc_feature (5)..(5): n is a, c, g, or u
ugucncugaacuggagccacca

SEQ ID NO: 54486 - RNA, 23 nt, Artificial Sequence
  Synthetic
  misc_feature (6)..(6): n is a, c, g, or u
gugucncugaacuggagccacca

SEQ ID NO: 54487 - RNA, 24 nt, Artificial Sequence
  Synthetic
  misc_feature (7)..(7): n is a, c, g, or u
ugugucncugaacuggagccacca

SEQ ID NO: 54488 - RNA, 18 nt, Artificial Sequence
  Synthetic
ggaaagcccuacgcacca

SEQ ID NO: 54489 - RNA, 19 nt, Artificial Sequence
  Synthetic
gggaaagcccuacgcacca

SEQ ID NO: 54490 - RNA, 20 nt, Artificial Sequence
  Synthetic
ggggaaagcccuacgcacca

SEQ ID NO: 54491 - RNA, 21 nt, Artificial Sequence
  Synthetic
gggggaaagcccuacgcacca

SEQ ID NO: 54492 - RNA, 22 nt, Artificial Sequence
  Synthetic
ugggggaaagcccuacgcacca

SEQ ID NO: 54493 - RNA, 23 nt, Artificial Sequence
  Synthetic
gugggggaaagcccuacgcacca

SEQ ID NO: 54494 - RNA, 24 nt, Artificial Sequence
  Synthetic
agugggggaaagcccuacgcacca

SEQ ID NO: 54495 - RNA, 18 nt, Artificial Sequence
  Synthetic
  misc_feature (4)..(4): n is a, c, g, or u
caanuuauugcccaccca

SEQ ID NO: 54496 - RNA, 19 nt, Artificial Sequence
  Synthetic
  misc_feature (5)..(5): n is a, c, g, or u
ccaanuuauugcccaccca

SEQ ID NO: 54497 - RNA, 20 nt, Artificial Sequence
  Synthetic
  misc_feature (6)..(6): n is a, c, g, or u
uccaanuuauugcccaccca

SEQ ID NO: 54498 - RNA, 21 nt, Artificial Sequence
  Synthetic
  misc_feature (1)..(1): n is a, c, g, or u
  misc_feature (7)..(7): n is a, c, g, or u
nuccaanuuauugcccaccca

SEQ ID NO: 54499 - RNA, 22 nt, Artificial Sequence
  Synthetic
  misc_feature (2)..(2): n is a, c, g, or u
  misc_feature (8)..(8): n is a, c, g, or u
cnuccaanuuauugcccaccca

SEQ ID NO: 54500 - RNA, 23 nt, Artificial Sequence
  Synthetic
  misc_feature (3)..(3): n is a, c, g, or u
  misc_feature (9)..(9): n is a, c, g, or u
ucnuccaanuuauugcccaccca

SEQ ID NO: 54501 - RNA, 24 nt, Artificial Sequence
  Synthetic
  misc_feature (1)..(1): n is a, c, g, or u
  misc_feature (4)..(4): n is a, c, g, or u
  misc_feature (10)..(10): n is a, c, g, or u
nucnuccaanuuauugcccaccca

SEQ ID NO: 54502 - RNA, 18 nt, Artificial Sequence
  Synthetic
  misc_feature (5)..(5): n is a, c, g, or u
  misc_feature (8)..(8): n is a, c, g, or u
ccugnggncuccacccca

SEQ ID NO: 54503 - RNA, 19 nt, Artificial Sequence
  Synthetic
  misc_feature (6)..(6): n is a, c, g, or u
  misc_feature (9)..(9): n is a, c, g, or u
gccugnggncuccacccca

SEQ ID NO: 54504 - RNA, 20 nt, Artificial Sequence
  Synthetic
  misc_feature (7)..(7): n is a, c, g, or u
  misc_feature (10)..(10): n is a, c, g, or u
ugccugnggncuccacccca

SEQ ID NO: 54505 - RNA, 21 nt, Artificial Sequence
  Synthetic
  misc_feature (8)..(8): n is a, c, g, or u
  misc_feature (11)..(11): n is a, c, g, or u
gugccugnggncuccacccca

SEQ ID NO: 54506 - RNA, 22 nt, Artificial Sequence
  Synthetic
  misc_feature (9)..(9): n is a, c, g, or u
  misc_feature (12)..(12): n is a, c, g, or u
ugugccugnggncuccacccca

SEQ ID NO: 54507 - RNA, 23 nt, Artificial Sequence
  Synthetic
  misc_feature (1)..(1): n is a, c, g, or u
  misc_feature (10)..(10): n is a, c, g, or u
  misc_feature (13)..(13): n is a, c, g, or u
nugugccugnggncuccacccca

SEQ ID NO: 54508 - RNA, 24 nt, Artificial Sequence
  Synthetic
  misc_feature (2)..(2): n is a, c, g, or u
  misc_feature (11)..(11): n is a, c, g, or u
  misc_feature (14)..(14): n is a, c, g, or u
cnugugccugnggncuccacccca

SEQ ID NO: 54509 - RNA, 18 nt, Artificial Sequence
  Synthetic
  misc_feature (2)..(2): n is a, c, g, or u
  misc_feature (8)..(8): n is a, c, g, or u
cnuccaanuuauugccca

SEQ ID NO: 54510 - RNA, 19 nt, Artificial Sequence
  Synthetic
  misc_feature (3)..(3): n is a, c, g, or u
  misc_feature (9)..(9): n is a, c, g, or u
ucnuccaanuuauugccca

SEQ ID NO: 54511 - RNA, 20 nt, Artificial Sequence
  Synthetic
  misc_feature (1)..(1): n is a, c, g, or u
  misc_feature (4)..(4): n is a, c, g, or u
  misc_feature (10)..(10): n is a, c, g, or u
nucnuccaanuuauugccca

SEQ ID NO: 54512 - RNA, 21 nt, Artificial Sequence
  Synthetic
  misc_feature (2)..(2): n is a, c, g, or u
  misc_feature (5)..(5): n is a, c, g, or u
  misc_feature (11)..(11): n is a, c, g, or u
gnucnuccaanuuauugccca

SEQ ID NO: 54513 - RNA, 22 nt, Artificial Sequence
  Synthetic
  misc_feature (3)..(3): n is a, c, g, or u
  misc_feature (6)..(6): n is a, c, g, or u
  misc_feature (12)..(12): n is a, c, g, or u
ggnucnuccaanuuauugccca

SEQ ID NO: 54514 - RNA, 23 nt, Artificial Sequence
  Synthetic
  misc_feature (4)..(4): n is a, c, g, or u
  misc_feature (7)..(7): n is a, c, g, or u
  misc_feature (13)..(13): n is a, c, g, or u
aggnucnuccaanuuauugccca

SEQ ID NO: 54515 - RNA, 24 nt, Artificial Sequence
  Synthetic
  misc_feature (5)..(5): n is a, c, g, or u
  misc_feature (8)..(8): n is a, c, g, or u
  misc_feature (14)..(14): n is a, c, g, or u
caggnucnuccaanuuauugccca

SEQ ID NO: 54516 - RNA, 18 nt, Artificial Sequence
  Synthetic
  misc_feature (5)..(5): n is a, c, g, or u
guuunuguugaaguccca

SEQ ID NO: 54517 - RNA, 19 nt, Artificial Sequence
  Synthetic
  misc_feature (6)..(6): n is a, c, g, or u
uguuunuguugaaguccca

SEQ ID NO: 54518 - RNA, 20 nt, Artificial Sequence
  Synthetic
  misc_feature (7)..(7): n is a, c, g, or u
uuguuunuguugaaguccca

SEQ ID NO: 54519 - RNA, 21 nt, Artificial Sequence
  Synthetic
  misc_feature (8)..(8): n is a, c, g, or u
cuuguuunuguugaaguccca

SEQ ID NO: 54520 - RNA, 22 nt, Artificial Sequence
  Synthetic
  misc_feature (9)..(9): n is a, c, g, or u
ccuuguuunuguugaaguccca

SEQ ID NO: 54521 - RNA, 23 nt, Artificial Sequence
  Synthetic
  misc_feature (10)..(10): n is a, c, g, or u
uccuuguuunuguugaaguccca

SEQ ID NO: 54522 - RNA, 24 nt, Artificial Sequence
  Synthetic
  misc_feature (11)..(11): n is a, c, g, or u
guccuuguuunuguugaaguccca

SEQ ID NO: 54523 - RNA, 18 nt, Artificial Sequence
  Synthetic
guccaugccccaaagcca

SEQ ID NO: 54524 - RNA, 19 nt, Artificial Sequence
  Synthetic
uguccaugccccaaagcca

SEQ ID NO: 54525 - RNA, 20 nt, Artificial Sequence
  Synthetic
auguccaugccccaaagcca

SEQ ID NO: 54526 - RNA, 21 nt, Artificial Sequence
  Synthetic
aauguccaugccccaaagcca

SEQ ID NO: 54527 - RNA, 22 nt, Artificial Sequence
  Synthetic
caauguccaugccccaaagcca

SEQ ID NO: 54528 - RNA, 23 nt, Artificial Sequence
  Synthetic
ucaauguccaugccccaaagcca

SEQ ID NO: 54529 - RNA, 24 nt, Artificial Sequence
  Synthetic
gucaauguccaugccccaaagcca

SEQ ID NO: 54530 - RNA, 18 nt, Artificial Sequence
  Synthetic
ggaucggcagaggagcca

SEQ ID NO: 54531 - RNA, 19 nt, Artificial Sequence
  Synthetic
uggaucggcagaggagcca

SEQ ID NO: 54532 - RNA, 20 nt, Artificial Sequence
  Synthetic
auggaucggcagaggagcca

SEQ ID NO: 54533 - RNA, 21 nt, Artificial Sequence
  Synthetic
uauggaucggcagaggagcca

SEQ ID NO: 54534 - RNA, 22 nt, Artificial Sequence
  Synthetic
guauggaucggcagaggagcca

SEQ ID NO: 54535 - RNA, 23 nt, Artificial Sequence
  Synthetic
aguauggaucggcagaggagcca

SEQ ID NO: 54536 - RNA, 24 nt, Artificial Sequence
  Synthetic
caguauggaucggcagaggagcca

SEQ ID NO: 54537 - RNA, 18 nt, Artificial Sequence
  Synthetic
cacuaguaaacugagcca

SEQ ID NO: 54538 - RNA, 19 nt, Artificial Sequence
  Synthetic
gcacuaguaaacugagcca

SEQ ID NO: 54539 - RNA, 20 nt, Artificial Sequence
  Synthetic
ugcacuaguaaacugagcca

SEQ ID NO: 54540 - RNA, 21 nt, Artificial Sequence
  Synthetic
uugcacuaguaaacugagcca

SEQ ID NO: 54541 - RNA, 22 nt, Artificial Sequence
  Synthetic
auugcacuaguaaacugagcca

SEQ ID NO: 54542 - RNA, 23 nt, Artificial Sequence
  Synthetic
aauugcacuaguaaacugagcca

SEQ ID NO: 54543 - RNA, 24 nt, Artificial Sequence
  Synthetic
aaauugcacuaguaaacugagcca

SEQ ID NO: 54544 - RNA, 18 nt, Artificial Sequence
  Synthetic
ccaauaccagaucaucca

SEQ ID NO: 54545 - RNA, 19 nt, Artificial Sequence
  Synthetic
cccaauaccagaucaucca

SEQ ID NO: 54546 - RNA, 20 nt, Artificial Sequence
  Synthetic
ccccaauaccagaucaucca

SEQ ID NO: 54547 - RNA, 21 nt, Artificial Sequence
  Synthetic
cccccaauaccagaucaucca

SEQ ID NO: 54548 - RNA, 22 nt, Artificial Sequence
  Synthetic
gcccccaauaccagaucaucca

SEQ ID NO: 54549 - RNA, 23 nt, Artificial Sequence
  Synthetic
ggcccccaauaccagaucaucca

SEQ ID NO: 54550 - RNA, 24 nt, Artificial Sequence
  Synthetic
uggcccccaauaccagaucaucca

SEQ ID NO: 54551 - RNA, 18 nt, Artificial Sequence
  Synthetic
  misc_feature (10)..(10): n is a, c, g, or u
cgucccgcgnaggaucca

SEQ ID NO: 54552 - RNA, 19 nt, Artificial Sequence
  Synthetic
  misc_feature (11)..(11): n is a, c, g, or u
acgucccgcgnaggaucca

SEQ ID NO: 54553 - RNA, 20 nt, Artificial Sequence
  Synthetic
  misc_feature (12)..(12): n is a, c, g, or u
gacgucccgcgnaggaucca

SEQ ID NO: 54554 - RNA, 18 nt, Artificial Sequence
  Synthetic
gugcgaauccacacucca

SEQ ID NO: 54555 - RNA, 19 nt, Artificial Sequence
  Synthetic
agugcgaauccacacucca

SEQ ID NO: 54556 - RNA, 20 nt, Artificial Sequence
  Synthetic
gagugcgaauccacacucca

SEQ ID NO: 54557 - RNA, 21 nt, Artificial Sequence
  Synthetic
ggagugcgaauccacacucca

SEQ ID NO: 54558 - RNA, 22 nt, Artificial Sequence
  Synthetic
aggagugcgaauccacacucca

SEQ ID NO: 54559 - RNA, 23 nt, Artificial Sequence
  Synthetic
gaggagugcgaauccacacucca

SEQ ID NO: 54560 - RNA, 24 nt, Artificial Sequence
  Synthetic
ggaggagugcgaauccacacucca

SEQ ID NO: 54561 - RNA, 18 nt, Artificial Sequence
  Synthetic
cguucacgguggucucca

SEQ ID NO: 54562 - RNA, 19 nt, Artificial Sequence
  Synthetic
gcguucacgguggucucca

SEQ ID NO: 54563 - RNA, 20 nt, Artificial Sequence
  Synthetic
ggcguucacgguggucucca

SEQ ID NO: 54564 - RNA, 21 nt, Artificial Sequence
  Synthetic
gggcguucacgguggucucca

SEQ ID NO: 54565 - RNA, 22 nt, Artificial Sequence
  Synthetic
ggggcguucacgguggucucca

SEQ ID NO: 54566 - RNA, 23 nt, Artificial Sequence
  Synthetic
  misc_feature (1)..(1): n is a, c, g, or u
nggggcguucacgguggucucca

SEQ ID NO: 54567 - RNA, 24 nt, Artificial Sequence
  Synthetic
  misc_feature (1)..(2): n is a, c, g, or u
nnggggcguucacgguggucucca

SEQ ID NO: 54568 - RNA, 18 nt, Artificial Sequence
  Synthetic
acauaccuugauagucca

SEQ ID NO: 54569 - RNA, 19 nt, Artificial Sequence
  Synthetic
aacauaccuugauagucca

SEQ ID NO: 54570 - RNA, 20 nt, Artificial Sequence
  Synthetic
caacauaccuugauagucca

SEQ ID NO: 54571 - RNA, 21 nt, Artificial Sequence
  Synthetic
gcaacauaccuugauagucca

SEQ ID NO: 54572 - RNA, 22 nt, Artificial Sequence
  Synthetic
ggcaacauaccuugauagucca

SEQ ID NO: 54573 - RNA, 23 nt, Artificial Sequence
  Synthetic
gggcaacauaccuugauagucca

SEQ ID NO: 54574 - RNA, 24 nt, Artificial Sequence
  Synthetic
cgggcaacauaccuugauagucca

SEQ ID NO: 54575 - RNA, 18 nt, Artificial Sequence
  Synthetic
  misc_feature (8)..(8): n is a, c, g, or u
  misc_feature (11)..(11): n is a, c, g, or u
  misc_feature (14)..(14): n is a, c, g, or u
guuuaaunccnuunucca

SEQ ID NO: 54576 - RNA, 19 nt, Artificial Sequence
  Synthetic
  misc_feature (9)..(9): n is a, c, g, or u
  misc_feature (12)..(12): n is a, c, g, or u
  misc_feature (15)..(15): n is a, c, g, or u
gguuuaaunccnuunucca

SEQ ID NO: 54577 - RNA, 20 nt, Artificial Sequence
  Synthetic
  misc_feature (1)..(1): n is a, c, g, or u
  misc_feature (10)..(10): n is a, c, g, or u
  misc_feature (13)..(13): n is a, c, g, or u
  misc_feature (16)..(16): n is a, c, g, or u
ngguuuaaunccnuunucca

SEQ ID NO: 54578 - RNA, 21 nt, Artificial Sequence
  Synthetic
  misc_feature (2)..(2): n is a, c, g, or u
  misc_feature (11)..(11): n is a, c, g, or u
  misc_feature (14)..(14): n is a, c, g, or u
  misc_feature (17)..(17): n is a, c, g, or u
angguuuaaunccnuunucca

SEQ ID NO: 54579 - RNA, 22 nt, Artificial Sequence
  Synthetic
  misc_feature (3)..(3): n is a, c, g, or u
  misc_feature (12)..(12): n is a, c, g, or u
  misc_feature (15)..(15): n is a, c, g, or u
  misc_feature (18)..(18): n is a, c, g, or u
uangguuuaaunccnuunucca

SEQ ID NO: 54580 - RNA, 23 nt, Artificial Sequence
  Synthetic
  misc_feature (4)..(4): n is a, c, g, or u
  misc_feature (13)..(13): n is a, c, g, or u
  misc_feature (16)..(16): n is a, c, g, or u
  misc_feature (19)..(19): n is a, c, g, or u
auangguuuaaunccnuunucca

SEQ ID NO: 54581 - RNA, 24 nt, Artificial Sequence
  Synthetic
  misc_feature (5)..(5): n is a, c, g, or u
  misc_feature (14)..(14): n is a, c, g, or u
  misc_feature (17)..(17): n is a, c, g, or u
  misc_feature (20)..(20): n is a, c, g, or u
aauangguuuaaunccnuunucca

SEQ ID NO: 54582 - RNA, 18 nt, Artificial Sequence
  Synthetic
  misc_feature (11)..(11): n is a, c, g, or u
aaaaagagagnaauucca

SEQ ID NO: 54583 - RNA, 19 nt, Artificial Sequence
  Synthetic
  misc_feature (12)..(12): n is a, c, g, or u
aaaaaagagagnaauucca

SEQ ID NO: 54584 - RNA, 20 nt, Artificial Sequence
  Synthetic
  misc_feature (13)..(13): n is a, c, g, or u
caaaaaagagagnaauucca

SEQ ID NO: 54585 - RNA, 21 nt, Artificial Sequence
  Synthetic
  misc_feature (14)..(14): n is a, c, g, or u
gcaaaaaagagagnaauucca

SEQ ID NO: 54586 - RNA, 22 nt, Artificial Sequence
  Synthetic
  misc_feature (15)..(15): n is a, c, g, or u
ggcaaaaaagagagnaauucca

SEQ ID NO: 54587 - RNA, 23 nt, Artificial Sequence
  Synthetic
  misc_feature (16)..(16): n is a, c, g, or u
aggcaaaaaagagagnaauucca

SEQ ID NO: 54588 - RNA, 24 nt, Artificial Sequence
  Synthetic
  misc_feature (17)..(17): n is a, c, g, or u
aaggcaaaaaagagagnaauucca

SEQ ID NO: 54589 - RNA, 18 nt, Artificial Sequence
  Synthetic
cgccgauugguggaagca

SEQ ID NO: 54590 - RNA, 19 nt, Artificial Sequence
  Synthetic
ccgccgauugguggaagca

SEQ ID NO: 54591 - RNA, 20 nt, Artificial Sequence
  Synthetic
accgccgauugguggaagca

SEQ ID NO: 54592 - RNA, 18 nt, Artificial Sequence
  Synthetic
gaacuggagccaccagca

SEQ ID NO: 54593 - RNA, 19 nt, Artificial Sequence
  Synthetic
ugaacuggagccaccagca

SEQ ID NO: 54594 - RNA, 20 nt, Artificial Sequence
  Synthetic
cugaacuggagccaccagca

SEQ ID NO: 54595 - RNA, 21 nt, Artificial Sequence
  Synthetic
  misc_feature (1)..(1): n is a, c, g, or u
ncugaacuggagccaccagca

SEQ ID NO: 54596 - RNA, 22 nt, Artificial Sequence
  Synthetic
  misc_feature (2)..(2): n is a, c, g, or u
cncugaacuggagccaccagca

SEQ ID NO: 54597 - RNA, 23 nt, Artificial Sequence
  Synthetic
  misc_feature (3)..(3): n is a, c, g, or u
ucncugaacuggagccaccagca

SEQ ID NO: 54598 - RNA, 24 nt, Artificial Sequence
  Synthetic
  misc_feature (4)..(4): n is a, c, g, or u
gucncugaacuggagccaccagca

SEQ ID NO: 54599 - RNA, 18 nt, Artificial Sequence
  Synthetic
ccuggccguugccgagca

SEQ ID NO: 54600 - RNA, 19 nt, Artificial Sequence
  Synthetic
gccuggccguugccgagca

SEQ ID NO: 54601 - RNA, 20 nt, Artificial Sequence
  Synthetic
ggccuggccguugccgagca

SEQ ID NO: 54602 - RNA, 21 nt, Artificial Sequence
  Synthetic
aggccuggccguugccgagca

SEQ ID NO: 54603 - RNA, 22 nt, Artificial Sequence
  Synthetic
caggccuggccguugccgagca

SEQ ID NO: 54604 - RNA, 23 nt, Artificial Sequence
  Synthetic
acaggccuggccguugccgagca

SEQ ID NO: 54605 - RNA, 24 nt, Artificial Sequence
  Synthetic
cacaggccuggccguugccgagca

SEQ ID NO: 54606 - RNA, 18 nt, Artificial Sequence
  Synthetic
agaagaugaggcauagca

SEQ ID NO: 54607 - RNA, 19 nt, Artificial Sequence
  Synthetic
aagaagaugaggcauagca

SEQ ID NO: 54608 - RNA, 20 nt, Artificial Sequence
  Synthetic
caagaagaugaggcauagca

SEQ ID NO: 54609 - RNA, 21 nt, Artificial Sequence
  Synthetic
acaagaagaugaggcauagca

SEQ ID NO: 54610 - RNA, 22 nt, Artificial Sequence
  Synthetic
aacaagaagaugaggcauagca

SEQ ID NO: 54611 - RNA, 23 nt, Artificial Sequence
  Synthetic
caacaagaagaugaggcauagca

SEQ ID NO: 54612 - RNA, 24 nt, Artificial Sequence
  Synthetic
ccaacaagaagaugaggcauagca

SEQ ID NO: 54613 - RNA, 18 nt, Artificial Sequence
  Synthetic
  misc_feature (8)..(8): n is a, c, g, or u
ggaagaanucagaaggca

SEQ ID NO: 54614 - RNA, 19 nt, Artificial Sequence
  Synthetic
  misc_feature (9)..(9): n is a, c, g, or u
gggaagaanucagaaggca

SEQ ID NO: 54615 - RNA, 20 nt, Artificial Sequence
  Synthetic
  misc_feature (10)..(10): n is a, c, g, or u
cgggaagaanucagaaggca

SEQ ID NO: 54616 - RNA, 21 nt, Artificial Sequence
  Synthetic
  misc_feature (11)..(11): n is a, c, g, or u
acgggaagaanucagaaggca

SEQ ID NO: 54617 - RNA, 22 nt, Artificial Sequence
  Synthetic
  misc_feature (12)..(12): n is a, c, g, or u
gacgggaagaanucagaaggca

SEQ ID NO: 54618 - RNA, 23 nt, Artificial Sequence
  Synthetic
  misc_feature (1)..(1): n is a, c, g, or u
  misc_feature (13)..(13): n is a, c, g, or u
ngacgggaagaanucagaaggca

SEQ ID NO: 54619 - RNA, 24 nt, Artificial Sequence
  Synthetic
  misc_feature (2)..(2): n is a, c, g, or u
  misc_feature (14)..(14): n is a, c, g, or u
cngacgggaagaanucagaaggca

SEQ ID NO: 54620 - RNA, 18 nt, Artificial Sequence
  Synthetic
  misc_feature (7)..(7): n is a, c, g, or u
uacaggnauacagaggca

SEQ ID NO: 54621 - RNA, 19 nt, Artificial Sequence
  Synthetic
  misc_feature (8)..(8): n is a, c, g, or u
auacaggnauacagaggca

SEQ ID NO: 54622 - RNA, 20 nt, Artificial Sequence
  Synthetic
  misc_feature (1)..(1): n is a, c, g, or u
  misc_feature (9)..(9): n is a, c, g, or u
nauacaggnauacagaggca

SEQ ID NO: 54623 - RNA, 21 nt, Artificial Sequence
  Synthetic
  misc_feature (2)..(2): n is a, c, g, or u
  misc_feature (10)..(10): n is a, c, g, or u
unauacaggnauacagaggca

SEQ ID NO: 54624 - RNA, 22 nt, Artificial Sequence
  Synthetic
  misc_feature (3)..(3): n is a, c, g, or u
  misc_feature (11)..(11): n is a, c, g, or u
gunauacaggnauacagaggca

SEQ ID NO: 54625 - RNA, 23 nt, Artificial Sequence
  Synthetic
  misc_feature (4)..(4): n is a, c, g, or u
  misc_feature (12)..(12): n is a, c, g, or u
agunauacaggnauacagaggca

SEQ ID NO: 54626 - RNA, 24 nt, Artificial Sequence
  Synthetic
  misc_feature (5)..(5): n is a, c, g, or u
  misc_feature (13)..(13): n is a, c, g, or u
cagunauacaggnauacagaggca

SEQ ID NO: 54627 - RNA, 18 nt, Artificial Sequence
  Synthetic
  misc_feature (12)..(12): n is a, c, g, or u
agugcacacggnccggca

SEQ ID NO: 54628 - RNA, 19 nt, Artificial Sequence
  Synthetic
  misc_feature (13)..(13): n is a, c, g, or u
aagugcacacggnccggca

SEQ ID NO: 54629 - RNA, 20 nt, Artificial Sequence
  Synthetic
  misc_feature (14)..(14): n is a, c, g, or u
gaagugcacacggnccggca

SEQ ID NO: 54630 - RNA, 21 nt, Artificial Sequence
  Synthetic
  misc_feature (15)..(15): n is a, c, g, or u
cgaagugcacacggnccggca

SEQ ID NO: 54631 - RNA, 22 nt, Artificial Sequence
  Synthetic
  misc_feature (16)..(16): n is a, c, g, or u
gcgaagugcacacggnccggca

SEQ ID NO: 54632 - RNA, 23 nt, Artificial Sequence
  Synthetic
  misc_feature (17)..(17): n is a, c, g, or u
agcgaagugcacacggnccggca

SEQ ID NO: 54633 - RNA, 24 nt, Artificial Sequence
  Synthetic
  misc_feature (18)..(18): n is a, c, g, or u
aagcgaagugcacacggnccggca

SEQ ID NO: 54634 - RNA, 18 nt, Artificial Sequence
  Synthetic
ccgcaguauggaucggca

SEQ ID NO: 54635 - RNA, 19 nt, Artificial Sequence
  Synthetic
uccgcaguauggaucggca

SEQ ID NO: 54636 - RNA, 20 nt, Artificial Sequence
  Synthetic
uuccgcaguauggaucggca

SEQ ID NO: 54637 - RNA, 21 nt, Artificial Sequence
  Synthetic
guuccgcaguauggaucggca

SEQ ID NO: 54638 - RNA, 22 nt, Artificial Sequence
  Synthetic
aguuccgcaguauggaucggca

SEQ ID NO: 54639 - RNA, 23 nt, Artificial Sequence
  Synthetic
gaguuccgcaguauggaucggca

SEQ ID NO: 54640 - RNA, 24 nt, Artificial Sequence
  Synthetic
ggaguuccgcaguauggaucggca

SEQ ID NO: 54641 - RNA, 18 nt, Artificial Sequence
  Synthetic
gaggugaagcgaagugca

SEQ ID NO: 54642 - RNA, 19 nt, Artificial Sequence
  Synthetic
agaggugaagcgaagugca

SEQ ID NO: 54643 - RNA, 20 nt, Artificial Sequence
  Synthetic
cagaggugaagcgaagugca

SEQ ID NO: 54644 - RNA, 21 nt, Artificial Sequence
  Synthetic
gcagaggugaagcgaagugca

SEQ ID NO: 54645 - RNA, 22 nt, Artificial Sequence
  Synthetic
ugcagaggugaagcgaagugca

SEQ ID NO: 54646 - RNA, 23 nt, Artificial Sequence
  Synthetic
gugcagaggugaagcgaagugca

SEQ ID NO: 54647 - RNA, 24 nt, Artificial Sequence
  Synthetic
cgugcagaggugaagcgaagugca

SEQ ID NO: 54648 - RNA, 18 nt, Artificial Sequence
  Synthetic
  misc_feature (16)..(16): n is a, c, g, or u
ggguuuggaacagcanca

SEQ ID NO: 54649 - RNA, 19 nt, Artificial Sequence
  Synthetic
  misc_feature (17)..(17): n is a, c, g, or u
aggguuuggaacagcanca

SEQ ID NO: 54650 - RNA, 20 nt, Artificial Sequence
  Synthetic
  misc_feature (18)..(18): n is a, c, g, or u
gaggguuuggaacagcanca

SEQ ID NO: 54651 - RNA, 21 nt, Artificial Sequence
  Synthetic
  misc_feature (19)..(19): n is a, c, g, or u
cgaggguuuggaacagcanca

SEQ ID NO: 54652 - RNA, 22 nt, Artificial Sequence
  Synthetic
  misc_feature (20)..(20): n is a, c, g, or u
ccgaggguuuggaacagcanca

SEQ ID NO: 54653 - RNA, 23 nt, Artificial Sequence
  Synthetic
  misc_feature (21)..(21): n is a, c, g, or u
uccgaggguuuggaacagcanca

SEQ ID NO: 54654 - RNA, 24 nt, Artificial Sequence
  Synthetic
  misc_feature (22)..(22): n is a, c, g, or u
guccgaggguuuggaacagcanca

SEQ ID NO: 54655 - RNA, 18 nt, Artificial Sequence
  Synthetic
ccaguggggguugcguca

SEQ ID NO: 54656 - RNA, 19 nt, Artificial Sequence
  Synthetic
accaguggggguugcguca

SEQ ID NO: 54657 - RNA, 20 nt, Artificial Sequence
  Synthetic
aaccaguggggguugcguca

SEQ ID NO: 54658 - RNA, 21 nt, Artificial Sequence
  Synthetic
caaccaguggggguugcguca

SEQ ID NO: 54659 - RNA, 22 nt, Artificial Sequence
  Synthetic
ccaaccaguggggguugcguca

SEQ ID NO: 54660 - RNA, 23 nt, Artificial Sequence
  Synthetic
cccaaccaguggggguugcguca

SEQ ID NO: 54661 - RNA, 24 nt, Artificial Sequence
  Synthetic
ccccaaccaguggggguugcguca

SEQ ID NO: 54662 - RNA, 18 nt, Artificial Sequence
  Synthetic
uugugaggauuuuuguca

SEQ ID NO: 54663 - RNA, 19 nt, Artificial Sequence
  Synthetic
auugugaggauuuuuguca

SEQ ID NO: 54664 - RNA, 20 nt, Artificial Sequence
  Synthetic
uauugugaggauuuuuguca

SEQ ID NO: 54665 - RNA, 21 nt, Artificial Sequence
  Synthetic
guauugugaggauuuuuguca

SEQ ID NO: 54666 - RNA, 22 nt, Artificial Sequence
  Synthetic
gguauugugaggauuuuuguca

SEQ ID NO: 54667 - RNA, 23 nt, Artificial Sequence
  Synthetic
ugguauugugaggauuuuuguca

SEQ ID NO: 54668 - RNA, 24 nt, Artificial Sequence
  Synthetic
gugguauugugaggauuuuuguca

SEQ ID NO: 54669 - RNA, 18 nt, Artificial Sequence
  Synthetic
  misc_feature (3)..(3): n is a, c, g, or u
  misc_feature (15)..(15): n is a, c, g, or u
acngacgggaagaanuca

SEQ ID NO: 54670 - RNA, 19 nt, Artificial Sequence
  Synthetic
  misc_feature (4)..(4): n is a, c, g, or u
  misc_feature (16)..(16): n is a, c, g, or u
aacngacgggaagaanuca

SEQ ID NO: 54671 - RNA, 20 nt, Artificial Sequence
  Synthetic
  misc_feature (5)..(5): n is a, c, g, or u
  misc_feature (17)..(17): n is a, c, g, or u
gaacngacgggaagaanuca

SEQ ID NO: 54672 - RNA, 21 nt, Artificial Sequence
  Synthetic
  misc_feature (6)..(6): n is a, c, g, or u
  misc_feature (18)..(18): n is a, c, g, or u
cgaacngacgggaagaanuca

SEQ ID NO: 54673 - RNA, 22 nt, Artificial Sequence
  Synthetic
  misc_feature (7)..(7): n is a, c, g, or u
  misc_feature (19)..(19): n is a, c, g, or u
ccgaacngacgggaagaanuca

SEQ ID NO: 54674 - RNA, 23 nt, Artificial Sequence
  Synthetic
  misc_feature (8)..(8): n is a, c, g, or u
  misc_feature (20)..(20): n is a, c, g, or u
cccgaacngacgggaagaanuca

SEQ ID NO: 54675 - RNA, 24 nt, Artificial Sequence
  Synthetic
  misc_feature (9)..(9): n is a, c, g, or u
  misc_feature (21)..(21): n is a, c, g, or u
ucccgaacngacgggaagaanuca

SEQ ID NO: 54676 - RNA, 18 nt, Artificial Sequence
  Synthetic
  misc_feature (15)..(15): n is a, c, g, or u
ugacaaacuuuccanuca

SEQ ID NO: 54677 - RNA, 19 nt, Artificial Sequence
  Synthetic
  misc_feature (16)..(16): n is a, c, g, or u
uugacaaacuuuccanuca

SEQ ID NO: 54678 - RNA, 20 nt, Artificial Sequence
  Synthetic
  misc_feature (17)..(17): n is a, c, g, or u
guugacaaacuuuccanuca

SEQ ID NO: 54679 - RNA, 21 nt, Artificial Sequence
  Synthetic
  misc_feature (18)..(18): n is a, c, g, or u
cguugacaaacuuuccanuca

SEQ ID NO: 54680 - RNA, 22 nt, Artificial Sequence
  Synthetic
  misc_feature (1)..(1): n is a, c, g, or u
  misc_feature (19)..(19): n is a, c, g, or u
ncguugacaaacuuuccanuca

SEQ ID NO: 54681 - RNA, 23 nt, Artificial Sequence
  Synthetic
  misc_feature (2)..(2): n is a, c, g, or u
  misc_feature (20)..(20): n is a, c, g, or u
uncguugacaaacuuuccanuca

SEQ ID NO: 54682 - RNA, 24 nt, Artificial Sequence
  Synthetic
  misc_feature (3)..(3): n is a, c, g, or u
  misc_feature (21)..(21): n is a, c, g, or u
auncguugacaaacuuuccanuca

SEQ ID NO: 54683 - RNA, 18 nt, Artificial Sequence
  Synthetic
  misc_feature (6)..(6): n is a, c, g, or u
  misc_feature (15)..(15): n is a, c, g, or u
ugaugnaaaugaaunuca

SEQ ID NO: 54684 - RNA, 19 nt, Artificial Sequence
  Synthetic
  misc_feature (7)..(7): n is a, c, g, or u
  misc_feature (16)..(16): n is a, c, g, or u
uugaugnaaaugaaunuca

SEQ ID NO: 54685 - RNA, 20 nt, Artificial Sequence
  Synthetic
  misc_feature (8)..(8): n is a, c, g, or u
  misc_feature (17)..(17): n is a, c, g, or u
cuugaugnaaaugaaunuca

SEQ ID NO: 54686 - RNA, 21 nt, Artificial Sequence
  Synthetic
  misc_feature (9)..(9): n is a, c, g, or u
  misc_feature (18)..(18): n is a, c, g, or u
ucuugaugnaaaugaaunuca

SEQ ID NO: 54687 - RNA, 22 nt, Artificial Sequence
  Synthetic
  misc_feature (1)..(1): n is a, c, g, or u
  misc_feature (10)..(10): n is a, c, g, or u
  misc_feature (19)..(19): n is a, c, g, or u
nucuugaugnaaaugaaunuca

SEQ ID NO: 54688 - RNA, 23 nt, Artificial Sequence
  Synthetic
  misc_feature (1)..(2): n is a, c, g, or u
  misc_feature (11)..(11): n is a, c, g, or u
  misc_feature (20)..(20): n is a, c, g, or u
nnucuugaugnaaaugaaunuca

SEQ ID NO: 54689 - RNA, 24 nt, Artificial Sequence
  Synthetic
  misc_feature (2)..(3): n is a, c, g, or u
  misc_feature (12)..(12): n is a, c, g, or u
  misc_feature (21)..(21): n is a, c, g, or u
annucuugaugnaaaugaaunuca

SEQ ID NO: 54690 - RNA, 18 nt, Artificial Sequence
  Synthetic
uguaaguuggcgaaaaga

SEQ ID NO: 54691 - RNA, 19 nt, Artificial Sequence
  Synthetic
uuguaaguuggcgaaaaga

SEQ ID NO: 54692 - RNA, 20 nt, Artificial Sequence
  Synthetic
cuuguaaguuggcgaaaaga

SEQ ID NO: 54693 - RNA, 21 nt, Artificial Sequence
  Synthetic
ccuuguaaguuggcgaaaaga

SEQ ID NO: 54694 - RNA, 22 nt, Artificial Sequence
  Synthetic
gccuuguaaguuggcgaaaaga

SEQ ID NO: 54695 - RNA, 23 nt, Artificial Sequence
  Synthetic
ggccuuguaaguuggcgaaaaga

SEQ ID NO: 54696 - RNA, 24 nt, Artificial Sequence
  Synthetic
aggccuuguaaguuggcgaaaaga

SEQ ID NO: 54697 - RNA, 18 nt, Artificial Sequence
  Synthetic
gaagaaccaacaagaaga

SEQ ID NO: 54698 - RNA, 19 nt, Artificial Sequence
  Synthetic
agaagaaccaacaagaaga

SEQ ID NO: 54699 - RNA, 20 nt, Artificial Sequence
  Synthetic
cagaagaaccaacaagaaga

SEQ ID NO: 54700 - RNA, 21 nt, Artificial Sequence
  Synthetic
ccagaagaaccaacaagaaga

SEQ ID NO: 54701 - RNA, 22 nt, Artificial Sequence
  Synthetic
uccagaagaaccaacaagaaga

SEQ ID NO: 54702 - RNA, 23 nt, Artificial Sequence
  Synthetic
guccagaagaaccaacaagaaga

SEQ ID NO: 54703 - RNA, 24 nt, Artificial Sequence
  Synthetic
aguccagaagaaccaacaagaaga

SEQ ID NO: 54704 - RNA, 18 nt, Artificial Sequence
  Synthetic
ccuugauaguccagaaga

SEQ ID NO: 54705 - RNA, 19 nt, Artificial Sequence
  Synthetic
accuugauaguccagaaga

SEQ ID NO: 54706 - RNA, 20 nt, Artificial Sequence
  Synthetic
uaccuugauaguccagaaga

SEQ ID NO: 54707 - RNA, 21 nt, Artificial Sequence
  Synthetic
auaccuugauaguccagaaga

SEQ ID NO: 54708 - RNA, 22 nt, Artificial Sequence
  Synthetic
cauaccuugauaguccagaaga

SEQ ID NO: 54709 - RNA, 23 nt, Artificial Sequence
  Synthetic
acauaccuugauaguccagaaga

SEQ ID NO: 54710 - RNA, 24 nt, Artificial Sequence
  Synthetic
aacauaccuugauaguccagaaga

SEQ ID NO: 54711 - RNA, 18 nt, Artificial Sequence
  Synthetic
auagcagcaggaugaaga

SEQ ID NO: 54712 - RNA, 19 nt, Artificial Sequence
  Synthetic
cauagcagcaggaugaaga

SEQ ID NO: 54713 - RNA, 20 nt, Artificial Sequence
  Synthetic
gcauagcagcaggaugaaga

SEQ ID NO: 54714 - RNA, 21 nt, Artificial Sequence
  Synthetic
ggcauagcagcaggaugaaga

SEQ ID NO: 54715 - RNA, 22 nt, Artificial Sequence
  Synthetic
aggcauagcagcaggaugaaga

SEQ ID NO: 54716 - RNA, 23 nt, Artificial Sequence
  Synthetic
gaggcauagcagcaggaugaaga

SEQ ID NO: 54717 - RNA, 24 nt, Artificial Sequence
  Synthetic
ugaggcauagcagcaggaugaaga

SEQ ID NO: 54718 - RNA, 18 nt, Artificial Sequence
  Synthetic
cagaugagaaggaacaga

SEQ ID NO: 54719 - RNA, 19 nt, Artificial Sequence
  Synthetic
gcagaugagaaggaacaga

SEQ ID NO: 54720 - RNA, 20 nt, Artificial Sequence
  Synthetic
ggcagaugagaaggaacaga

SEQ ID NO: 54721 - RNA, 21 nt, Artificial Sequence
  Synthetic
cggcagaugagaaggaacaga

SEQ ID NO: 54722 - RNA, 22 nt, Artificial Sequence
  Synthetic
ccggcagaugagaaggaacaga

SEQ ID NO: 54723 - RNA, 23 nt, Artificial Sequence
  Synthetic
  misc_feature (1)..(1): n is a, c, g, or u
nccggcagaugagaaggaacaga

SEQ ID NO: 54724 - RNA, 24 nt, Artificial Sequence
  Synthetic
  misc_feature (2)..(2): n is a, c, g, or u
gnccggcagaugagaaggaacaga

SEQ ID NO: 54725 - RNA, 18 nt, Artificial Sequence
  Synthetic
cucaagaugcugcacaga

SEQ ID NO: 54726 - RNA, 19 nt, Artificial Sequence
  Synthetic
acucaagaugcugcacaga

SEQ ID NO: 54727 - RNA, 20 nt, Artificial Sequence
  Synthetic
gacucaagaugcugcacaga

SEQ ID NO: 54728 - RNA, 21 nt, Artificial Sequence
  Synthetic
ggacucaagaugcugcacaga

SEQ ID NO: 54729 - RNA, 22 nt, Artificial Sequence
  Synthetic
gggacucaagaugcugcacaga

SEQ ID NO: 54730 - RNA, 23 nt, Artificial Sequence
  Synthetic
agggacucaagaugcugcacaga

SEQ ID NO: 54731 - RNA, 24 nt, Artificial Sequence
  Synthetic
aagggacucaagaugcugcacaga

SEQ ID NO: 54732 - RNA, 18 nt, Artificial Sequence
  Synthetic
aaaagaugauuaggcaga

SEQ ID NO: 54733 - RNA, 19 nt, Artificial Sequence
  Synthetic
caaaagaugauuaggcaga

SEQ ID NO: 54734 - RNA, 20 nt, Artificial Sequence
  Synthetic
acaaaagaugauuaggcaga

SEQ ID NO: 54735 - RNA, 21 nt, Artificial Sequence
  Synthetic
aacaaaagaugauuaggcaga

SEQ ID NO: 54736 - RNA, 22 nt, Artificial Sequence
  Synthetic
gaacaaaagaugauuaggcaga

SEQ ID NO: 54737 - RNA, 23 nt, Artificial Sequence
  Synthetic
ugaacaaaagaugauuaggcaga

SEQ ID NO: 54738 - RNA, 24 nt, Artificial Sequence
  Synthetic
augaacaaaagaugauuaggcaga

SEQ ID NO: 54739 - RNA, 18 nt, Artificial Sequence
  Synthetic
gucggcuggaacggcaga

SEQ ID NO: 54740 - RNA, 19 nt, Artificial Sequence
  Synthetic
  misc_feature (1)..(1): n is a, c, g, or u
ngucggcuggaacggcaga

SEQ ID NO: 54741 - RNA, 20 nt, Artificial Sequence
  Synthetic
  misc_feature (2)..(2): n is a, c, g, or u
ungucggcuggaacggcaga

SEQ ID NO: 54742 - RNA, 21 nt, Artificial Sequence
  Synthetic
  misc_feature (3)..(3): n is a, c, g, or u
gungucggcuggaacggcaga

SEQ ID NO: 54743 - RNA, 22 nt, Artificial Sequence
  Synthetic
  misc_feature (4)..(4): n is a, c, g, or u
cgungucggcuggaacggcaga

SEQ ID NO: 54744 - RNA, 23 nt, Artificial Sequence
  Synthetic
  misc_feature (5)..(5): n is a, c, g, or u
ccgungucggcuggaacggcaga

SEQ ID NO: 54745 - RNA, 24 nt, Artificial Sequence
  Synthetic
  misc_feature (6)..(6): n is a, c, g, or u
cccgungucggcuggaacggcaga

SEQ ID NO: 54746 - RNA, 18 nt, Artificial Sequence
  Synthetic
  misc_feature (10)..(10): n is a, c, g, or u
ugcacacggnccggcaga

SEQ ID NO: 54747 - RNA, 19 nt, Artificial Sequence
  Synthetic
  misc_feature (11)..(11): n is a, c, g, or u
gugcacacggnccggcaga

SEQ ID NO: 54748 - RNA, 20 nt, Artificial Sequence
  Synthetic
  misc_feature (12)..(12): n is a, c, g, or u
agugcacacggnccggcaga

SEQ ID NO: 54749 - RNA, 21 nt, Artificial Sequence
  Synthetic
  misc_feature (13)..(13): n is a, c, g, or u
aagugcacacggnccggcaga

SEQ ID NO: 54750 - RNA, 22 nt, Artificial Sequence
  Synthetic
  misc_feature (14)..(14): n is a, c, g, or u
gaagugcacacggnccggcaga

SEQ ID NO: 54751 - RNA, 23 nt, Artificial Sequence
  Synthetic
  misc_feature (15)..(15): n is a, c, g, or u
cgaagugcacacggnccggcaga

SEQ ID NO: 54752 - RNA, 24 nt, Artificial Sequence
  Synthetic
  misc_feature (16)..(16): n is a, c, g, or u
gcgaagugcacacggnccggcaga

SEQ ID NO: 54753 - RNA, 18 nt, Artificial Sequence
  Synthetic
cuccaugcgacgugcaga

SEQ ID NO: 54754 - RNA, 19 nt, Artificial Sequence
  Synthetic
ucuccaugcgacgugcaga

SEQ ID NO: 54755 - RNA, 20 nt, Artificial Sequence
  Synthetic
gucuccaugcgacgugcaga

SEQ ID NO: 54756 - RNA, 21 nt, Artificial Sequence
  Synthetic
ggucuccaugcgacgugcaga

SEQ ID NO: 54757 - RNA, 22 nt, Artificial Sequence
  Synthetic
uggucuccaugcgacgugcaga

SEQ ID NO: 54758 - RNA, 23 nt, Artificial Sequence
  Synthetic
guggucuccaugcgacgugcaga

SEQ ID NO: 54759 - RNA, 24 nt, Artificial Sequence
  Synthetic
gguggucuccaugcgacgugcaga

SEQ ID NO: 54760 - RNA, 18 nt, Artificial Sequence
  Synthetic
cucuuagagguggagaga

SEQ ID NO: 54761 - RNA, 19 nt, Artificial Sequence
  Synthetic
ucucuuagagguggagaga

SEQ ID NO: 54762 - RNA, 20 nt, Artificial Sequence
  Synthetic
gucucuuagagguggagaga

SEQ ID NO: 54763 - RNA, 21 nt, Artificial Sequence
  Synthetic
ugucucuuagagguggagaga

SEQ ID NO: 54764 - RNA, 22 nt, Artificial Sequence
  Synthetic
gugucucuuagagguggagaga

SEQ ID NO: 54765 - RNA, 23 nt, Artificial Sequence
  Synthetic
  misc_feature (1)..(1): n is a, c, g, or u
ngugucucuuagagguggagaga

SEQ ID NO: 54766 - RNA, 24 nt, Artificial Sequence
  Synthetic
  misc_feature (2)..(2): n is a, c, g, or u
gngugucucuuagagguggagaga

SEQ ID NO: 54767 - RNA, 18 nt, Artificial Sequence
  Synthetic
guaaacugagccaggaga

SEQ ID NO: 54768 - RNA, 19 nt, Artificial Sequence
  Synthetic
aguaaacugagccaggaga

SEQ ID NO: 54769 - RNA, 20 nt, Artificial Sequence
  Synthetic
uaguaaacugagccaggaga

SEQ ID NO: 54770 - RNA, 21 nt, Artificial Sequence
  Synthetic
cuaguaaacugagccaggaga

SEQ ID NO: 54771 - RNA, 22 nt, Artificial Sequence
  Synthetic
acuaguaaacugagccaggaga

SEQ ID NO: 54772 - RNA, 23 nt, Artificial Sequence
  Synthetic
cacuaguaaacugagccaggaga

SEQ ID NO: 54773 - RNA, 24 nt, Artificial Sequence
  Synthetic
gcacuaguaaacugagccaggaga

SEQ ID NO: 54774 - RNA, 18 nt, Artificial Sequence
  Synthetic
acauugggaagcuggaga

SEQ ID NO: 54775 - RNA, 19 nt, Artificial Sequence
  Synthetic
aacauugggaagcuggaga

SEQ ID NO: 54776 - RNA, 20 nt, Artificial Sequence
  Synthetic
uaacauugggaagcuggaga

SEQ ID NO: 54777 - RNA, 21 nt, Artificial Sequence
  Synthetic
cuaacauugggaagcuggaga

SEQ ID NO: 54778 - RNA, 22 nt, Artificial Sequence
  Synthetic
acuaacauugggaagcuggaga

SEQ ID NO: 54779 - RNA, 23 nt, Artificial Sequence
  Synthetic
uacuaacauugggaagcuggaga

SEQ ID NO: 54780 - RNA, 24 nt, Artificial Sequence
  Synthetic
auacuaacauugggaagcuggaga

SEQ ID NO: 54781 - RNA, 18 nt, Artificial Sequence
  Synthetic
  misc_feature (2)..(2): n is a, c, g, or u
gnauacagaggcaugaga

SEQ ID NO: 54782 - RNA, 19 nt, Artificial Sequence
  Synthetic
  misc_feature (3)..(3): n is a, c, g, or u
ggnauacagaggcaugaga

SEQ ID NO: 54783 - RNA, 20 nt, Artificial Sequence
  Synthetic
  misc_feature (4)..(4): n is a, c, g, or u
aggnauacagaggcaugaga

SEQ ID NO: 54784 - RNA, 21 nt, Artificial Sequence
  Synthetic
  misc_feature (5)..(5): n is a, c, g, or u
caggnauacagaggcaugaga

SEQ ID NO: 54785 - RNA, 22 nt, Artificial Sequence
  Synthetic
  misc_feature (6)..(6): n is a, c, g, or u
acaggnauacagaggcaugaga

SEQ ID NO: 54786 - RNA, 23 nt, Artificial Sequence
  Synthetic
  misc_feature (7)..(7): n is a, c, g, or u
uacaggnauacagaggcaugaga

SEQ ID NO: 54787 - RNA, 24 nt, Artificial Sequence
  Synthetic
  misc_feature (8)..(8): n is a, c, g, or u
auacaggnauacagaggcaugaga

SEQ ID NO: 54788 - RNA, 18 nt, Artificial Sequence
  Synthetic
  misc_feature (5)..(5): n is a, c, g, or u
acggnccggcagaugaga

SEQ ID NO: 54789 - RNA, 19 nt, Artificial Sequence
  Synthetic
  misc_feature (6)..(6): n is a, c, g, or u
cacggnccggcagaugaga

SEQ ID NO: 54790 - RNA, 20 nt, Artificial Sequence
  Synthetic
  misc_feature (7)..(7): n is a, c, g, or u
acacggnccggcagaugaga

SEQ ID NO: 54791 - RNA, 21 nt, Artificial Sequence
  Synthetic
  misc_feature (8)..(8): n is a, c, g, or u
cacacggnccggcagaugaga

SEQ ID NO: 54792 - RNA, 22 nt, Artificial Sequence
  Synthetic
  misc_feature (9)..(9): n is a, c, g, or u
gcacacggnccggcagaugaga

SEQ ID NO: 54793 - RNA, 23 nt, Artificial Sequence
  Synthetic
  misc_feature (10)..(10): n is a, c, g, or u
ugcacacggnccggcagaugaga

SEQ ID NO: 54794 - RNA, 24 nt, Artificial Sequence
  Synthetic
  misc_feature (11)..(11): n is a, c, g, or u
gugcacacggnccggcagaugaga

SEQ ID NO: 54795 - RNA, 18 nt, Artificial Sequence
  Synthetic
  misc_feature (15)..(15): n is a, c, g, or u
uggaacggcagacgnaga

SEQ ID NO: 54796 - RNA, 19 nt, Artificial Sequence
  Synthetic
  misc_feature (16)..(16): n is a, c, g, or u
cuggaacggcagacgnaga

SEQ ID NO: 54797 - RNA, 20 nt, Artificial Sequence
  Synthetic
  misc_feature (17)..(17): n is a, c, g, or u
gcuggaacggcagacgnaga

SEQ ID NO: 54798 - RNA, 21 nt, Artificial Sequence
  Synthetic
  misc_feature (18)..(18): n is a, c, g, or u
ggcuggaacggcagacgnaga

SEQ ID NO: 54799 - RNA, 22 nt, Artificial Sequence
  Synthetic
  misc_feature (19)..(19): n is a, c, g, or u
cggcuggaacggcagacgnaga

SEQ ID NO: 54800 - RNA, 23 nt, Artificial Sequence
  Synthetic
  misc_feature (20)..(20): n is a, c, g, or u
ucggcuggaacggcagacgnaga

SEQ ID NO: 54801 - RNA, 24 nt, Artificial Sequence
  Synthetic
  misc_feature (21)..(21): n is a, c, g, or u
gucggcuggaacggcagacgnaga

SEQ ID NO: 54802 - RNA, 18 nt, Artificial Sequence
  Synthetic
ggagguguacuuccuaga

SEQ ID NO: 54803 - RNA, 19 nt, Artificial Sequence
  Synthetic
aggagguguacuuccuaga

SEQ ID NO: 54804 - RNA, 20 nt, Artificial Sequence
  Synthetic
aaggagguguacuuccuaga

SEQ ID NO: 54805 - RNA, 21 nt, Artificial Sequence
  Synthetic
  misc_feature (1)..(1): n is a, c, g, or u
naaggagguguacuuccuaga

SEQ ID NO: 54806 - RNA, 22 nt, Artificial Sequence
  Synthetic
  misc_feature (2)..(2): n is a, c, g, or u
gnaaggagguguacuuccuaga

SEQ ID NO: 54807 - RNA, 23 nt, Artificial Sequence
  Synthetic
  misc_feature (3)..(3): n is a, c, g, or u
ggnaaggagguguacuuccuaga

SEQ ID NO: 54808 - RNA, 24 nt, Artificial Sequence
  Synthetic
  misc_feature (4)..(4): n is a, c, g, or u
uggnaaggagguguacuuccuaga

SEQ ID NO: 54809 - RNA, 18 nt, Artificial Sequence
  Synthetic
  misc_feature (6)..(6): n is a, c, g, or u
ggaugngugucucuuaga

SEQ ID NO: 54810 - RNA, 19 nt, Artificial Sequence
  Synthetic
  misc_feature (7)..(7): n is a, c, g, or u
uggaugngugucucuuaga

SEQ ID NO: 54811 - RNA, 20 nt, Artificial Sequence
  Synthetic
  misc_feature (8)..(8): n is a, c, g, or u
guggaugngugucucuuaga

SEQ ID NO: 54812 - RNA, 21 nt, Artificial Sequence
  Synthetic
  misc_feature (9)..(9): n is a, c, g, or u
uguggaugngugucucuuaga

SEQ ID NO: 54813 - RNA, 22 nt, Artificial Sequence
  Synthetic
  misc_feature (10)..(10): n is a, c, g, or u
cuguggaugngugucucuuaga

SEQ ID NO: 54814 - RNA, 23 nt, Artificial Sequence
  Synthetic
  misc_feature (11)..(11): n is a, c, g, or u
ccuguggaugngugucucuuaga

SEQ ID NO: 54815 - RNA, 24 nt, Artificial Sequence
  Synthetic
  misc_feature (12)..(12): n is a, c, g, or u
gccuguggaugngugucucuuaga

SEQ ID NO: 54816 - RNA, 18 nt, Artificial Sequence
  Synthetic
acaccgccuguaacacga

SEQ ID NO: 54817 - RNA, 19 nt, Artificial Sequence
  Synthetic
cacaccgccuguaacacga

SEQ ID NO: 54818 - RNA, 20 nt, Artificial Sequence
  Synthetic
acacaccgccuguaacacga

SEQ ID NO: 54819 - RNA, 21 nt, Artificial Sequence
  Synthetic
aacacaccgccuguaacacga

SEQ ID NO: 54820 - RNA, 22 nt, Artificial Sequence
  Synthetic
aaacacaccgccuguaacacga

SEQ ID NO: 54821 - RNA, 23 nt, Artificial Sequence
  Synthetic
gaaacacaccgccuguaacacga

SEQ ID NO: 54822 - RNA, 24 nt, Artificial Sequence
  Synthetic
agaaacacaccgccuguaacacga

SEQ ID NO: 54823 - RNA, 18 nt, Artificial Sequence
  Synthetic
gugucgaguaggucccga

SEQ ID NO: 54824 - RNA, 19 nt, Artificial Sequence
  Synthetic
ggugucgaguaggucccga

SEQ ID NO: 54825 - RNA, 20 nt, Artificial Sequence
  Synthetic
cggugucgaguaggucccga

SEQ ID NO: 54826 - RNA, 18 nt, Artificial Sequence
  Synthetic
  misc_feature (4)..(4): n is a, c, g, or u
cgcnggauucagcgccga

SEQ ID NO: 54827 - RNA, 19 nt, Artificial Sequence
  Synthetic
  misc_feature (5)..(5): n is a, c, g, or u
ccgcnggauucagcgccga

SEQ ID NO: 54828 - RNA, 20 nt, Artificial Sequence
  Synthetic
  misc_feature (6)..(6): n is a, c, g, or u
uccgcnggauucagcgccga

SEQ ID NO: 54829 - RNA, 21 nt, Artificial Sequence
  Synthetic
  misc_feature (7)..(7): n is a, c, g, or u
guccgcnggauucagcgccga

SEQ ID NO: 54830 - RNA, 22 nt, Artificial Sequence
  Synthetic
  misc_feature (8)..(8): n is a, c, g, or u
cguccgcnggauucagcgccga

SEQ ID NO: 54831 - RNA, 23 nt, Artificial Sequence
  Synthetic
  misc_feature (9)..(9): n is a, c, g, or u
ucguccgcnggauucagcgccga

SEQ ID NO: 54832 - RNA, 24 nt, Artificial Sequence
  Synthetic
  misc_feature (1)..(1): n is a, c, g, or u
  misc_feature (10)..(10): n is a, c, g, or u
nucguccgcnggauucagcgccga

SEQ ID NO: 54833 - RNA, 18 nt, Artificial Sequence
  Synthetic
cagaccggcugcgagcga

SEQ ID NO: 54834 - RNA, 19 nt, Artificial Sequence
  Synthetic
ccagaccggcugcgagcga

SEQ ID NO: 54835 - RNA, 20 nt, Artificial Sequence
  Synthetic
uccagaccggcugcgagcga

SEQ ID NO: 54836 - RNA, 18 nt, Artificial Sequence
  Synthetic
ucuucugcgacgcggcga

SEQ ID NO: 54837 - RNA, 19 nt, Artificial Sequence
  Synthetic
aucuucugcgacgcggcga

SEQ ID NO: 54838 - RNA, 20 nt, Artificial Sequence
  Synthetic
gaucuucugcgacgcggcga

SEQ ID NO: 54839 - RNA, 18 nt, Artificial Sequence
  Synthetic
ggccuuguaaguuggcga

SEQ ID NO: 54840 - RNA, 19 nt, Artificial Sequence
  Synthetic
aggccuuguaaguuggcga

SEQ ID NO: 54841 - RNA, 20 nt, Artificial Sequence
  Synthetic
aaggccuuguaaguuggcga

SEQ ID NO: 54842 - RNA, 21 nt, Artificial Sequence
  Synthetic
aaaggccuuguaaguuggcga

SEQ ID NO: 54843 - RNA, 22 nt, Artificial Sequence
  Synthetic
gaaaggccuuguaaguuggcga

SEQ ID NO: 54844 - RNA, 23 nt, Artificial Sequence
  Synthetic
agaaaggccuuguaaguuggcga

SEQ ID NO: 54845 - RNA, 24 nt, Artificial Sequence
  Synthetic
  misc_feature (1)..(1): n is a, c, g, or u
nagaaaggccuuguaaguuggcga

SEQ ID NO: 54846 - RNA, 18 nt, Artificial Sequence
  Synthetic
gcuccagaccggcugcga

SEQ ID NO: 54847 - RNA, 19 nt, Artificial Sequence
  Synthetic
cgcuccagaccggcugcga

SEQ ID NO: 54848 - RNA, 20 nt, Artificial Sequence
  Synthetic
ucgcuccagaccggcugcga

SEQ ID NO: 54849 - RNA, 21 nt, Artificial Sequence
  Synthetic
uucgcuccagaccggcugcga

SEQ ID NO: 54850 - RNA, 22 nt, Artificial Sequence
  Synthetic
  misc_feature (1)..(1): n is a, c, g, or u
nuucgcuccagaccggcugcga

SEQ ID NO: 54851 - RNA, 23 nt, Artificial Sequence
  Synthetic
  misc_feature (1)..(2): n is a, c, g, or u
nnuucgcuccagaccggcugcga

SEQ ID NO: 54852 - RNA, 24 nt, Artificial Sequence
  Synthetic
  misc_feature (2)..(3): n is a, c, g, or u
annuucgcuccagaccggcugcga

SEQ ID NO: 54853 - RNA, 18 nt, Artificial Sequence
  Synthetic
  misc_feature (6)..(6): n is a, c, g, or u
ugagancuucgucugcga

SEQ ID NO: 54854 - RNA, 19 nt, Artificial Sequence
  Synthetic
  misc_feature (7)..(7): n is a, c, g, or u
uugagancuucgucugcga

SEQ ID NO: 54855 - RNA, 20 nt, Artificial Sequence
  Synthetic
  misc_feature (8)..(8): n is a, c, g, or u
auugagancuucgucugcga

SEQ ID NO: 54856 - RNA, 21 nt, Artificial Sequence
  Synthetic
  misc_feature (9)..(9): n is a, c, g, or u
gauugagancuucgucugcga

SEQ ID NO: 54857 - RNA, 22 nt, Artificial Sequence
  Synthetic
  misc_feature (10)..(10): n is a, c, g, or u
cgauugagancuucgucugcga

SEQ ID NO: 54858 - RNA, 23 nt, Artificial Sequence
  Synthetic
  misc_feature (11)..(11): n is a, c, g, or u
gcgauugagancuucgucugcga

SEQ ID NO: 54859 - RNA, 24 nt, Artificial Sequence
  Synthetic
  misc_feature (12)..(12): n is a, c, g, or u
ggcgauugagancuucgucugcga

SEQ ID NO: 54860 - RNA, 18 nt, Artificial Sequence
  Synthetic
gauugagaucuucugcga

SEQ ID NO: 54861 - RNA, 19 nt, Artificial Sequence
  Synthetic
agauugagaucuucugcga

SEQ ID NO: 54862 - RNA, 20 nt, Artificial Sequence
  Synthetic
gagauugagaucuucugcga

SEQ ID NO: 54863 - RNA, 21 nt, Artificial Sequence
  Synthetic
ggagauugagaucuucugcga

SEQ ID NO: 54864 - RNA, 22 nt, Artificial Sequence
  Synthetic
uggagauugagaucuucugcga

SEQ ID NO: 54865 - RNA, 23 nt, Artificial Sequence
  Synthetic
cuggagauugagaucuucugcga

SEQ ID NO: 54866 - RNA, 24 nt, Artificial Sequence
  Synthetic
gcuggagauugagaucuucugcga

SEQ ID NO: 54867 - RNA, 18 nt, Artificial Sequence
  Synthetic
cuuugauguauucuucga

SEQ ID NO: 54868 - RNA, 19 nt, Artificial Sequence
  Synthetic
ucuuugauguauucuucga

SEQ ID NO: 54869 - RNA, 20 nt, Artificial Sequence
  Synthetic
gucuuugauguauucuucga

SEQ ID NO: 54870 - RNA, 21 nt, Artificial Sequence
  Synthetic
agucuuugauguauucuucga

SEQ ID NO: 54871 - RNA, 22 nt, Artificial Sequence
  Synthetic
cagucuuugauguauucuucga

SEQ ID NO: 54872 - RNA, 23 nt, Artificial Sequence
  Synthetic
acagucuuugauguauucuucga

SEQ ID NO: 54873 - RNA, 24 nt, Artificial Sequence
  Synthetic
cacagucuuugauguauucuucga

SEQ ID NO: 54874 - RNA, 18 nt, Artificial Sequence
  Synthetic
  misc_feature (3)..(3): n is a, c, g, or u
aunucaggaaaagaagga

SEQ ID NO: 54875 - RNA, 19 nt, Artificial Sequence
  Synthetic
  misc_feature (4)..(4): n is a, c, g, or u
aaunucaggaaaagaagga

SEQ ID NO: 54876 - RNA, 20 nt, Artificial Sequence
  Synthetic
  misc_feature (5)..(5): n is a, c, g, or u
gaaunucaggaaaagaagga

SEQ ID NO: 54877 - RNA, 21 nt, Artificial Sequence
  Synthetic
  misc_feature (6)..(6): n is a, c, g, or u
ugaaunucaggaaaagaagga

SEQ ID NO: 54878 - RNA, 22 nt, Artificial Sequence
  Synthetic
  misc_feature (7)..(7): n is a, c, g, or u
augaaunucaggaaaagaagga

SEQ ID NO: 54879 - RNA, 23 nt, Artificial Sequence
  Synthetic
  misc_feature (8)..(8): n is a, c, g, or u
aaugaaunucaggaaaagaagga

SEQ ID NO: 54880 - RNA, 24 nt, Artificial Sequence
  Synthetic
  misc_feature (9)..(9): n is a, c, g, or u
aaaugaaunucaggaaaagaagga

SEQ ID NO: 54881 - RNA, 18 nt, Artificial Sequence
  Synthetic
  misc_feature (1)..(1): n is a, c, g, or u
nccggcagaugagaagga

SEQ ID NO: 54882 - RNA, 19 nt, Artificial Sequence
  Synthetic
  misc_feature (2)..(2): n is a, c, g, or u
gnccggcagaugagaagga

SEQ ID NO: 54883 - RNA, 20 nt, Artificial Sequence
  Synthetic
  misc_feature (3)..(3): n is a, c, g, or u
ggnccggcagaugagaagga

SEQ ID NO: 54884 - RNA, 21 nt, Artificial Sequence
  Synthetic
  misc_feature (4)..(4): n is a, c, g, or u
cggnccggcagaugagaagga

SEQ ID NO: 54885 - RNA, 22 nt, Artificial Sequence
  Synthetic
  misc_feature (5)..(5): n is a, c, g, or u
acggnccggcagaugagaagga

SEQ ID NO: 54886 - RNA, 23 nt, Artificial Sequence
  Synthetic
  misc_feature (6)..(6): n is a, c, g, or u
cacggnccggcagaugagaagga

SEQ ID NO: 54887 - RNA, 24 nt, Artificial Sequence
  Synthetic
  misc_feature (7)..(7): n is a, c, g, or u
acacggnccggcagaugagaagga

SEQ ID NO: 54888 - RNA, 18 nt, Artificial Sequence
  Synthetic
cgauugguggaagcagga

SEQ ID NO: 54889 - RNA, 19 nt, Artificial Sequence
  Synthetic
ccgauugguggaagcagga

SEQ ID NO: 54890 - RNA, 20 nt, Artificial Sequence
  Synthetic
gccgauugguggaagcagga

SEQ ID NO: 54891 - RNA, 18 nt, Artificial Sequence
  Synthetic
ugaggcauagcagcagga

SEQ ID NO: 54892 - RNA, 19 nt, Artificial Sequence
  Synthetic
augaggcauagcagcagga

SEQ ID NO: 54893 - RNA, 20 nt, Artificial Sequence
  Synthetic
gaugaggcauagcagcagga

SEQ ID NO: 54894 - RNA, 21 nt, Artificial Sequence
  Synthetic
agaugaggcauagcagcagga

SEQ ID NO: 54895 - RNA, 22 nt, Artificial Sequence
  Synthetic
aagaugaggcauagcagcagga

SEQ ID NO: 54896 - RNA, 23 nt, Artificial Sequence
  Synthetic
gaagaugaggcauagcagcagga

SEQ ID NO: 54897 - RNA, 24 nt, Artificial Sequence
  Synthetic
agaagaugaggcauagcagcagga

SEQ ID NO: 54898 - RNA, 18 nt, Artificial Sequence
  Synthetic
  misc_feature (3)..(3): n is a, c, g, or u
  misc_feature (12)..(12): n is a, c, g, or u
ugnaaaugaaunucagga

SEQ ID NO: 54899 - RNA, 19 nt, Artificial Sequence
  Synthetic
  misc_feature (4)..(4): n is a, c, g, or u
  misc_feature (13)..(13): n is a, c, g, or u
augnaaaugaaunucagga

SEQ ID NO: 54900 - RNA, 20 nt, Artificial Sequence
  Synthetic
  misc_feature (5)..(5): n is a, c, g, or u
  misc_feature (14)..(14): n is a, c, g, or u
gaugnaaaugaaunucagga

SEQ ID NO: 54901 - RNA, 21 nt, Artificial Sequence
  Synthetic
  misc_feature (6)..(6): n is a, c, g, or u
  misc_feature (15)..(15): n is a, c, g, or u
ugaugnaaaugaaunucagga

SEQ ID NO: 54902 - RNA, 22 nt, Artificial Sequence
  Synthetic
  misc_feature (7)..(7): n is a, c, g, or u
  misc_feature (16)..(16): n is a, c, g, or u
uugaugnaaaugaaunucagga

SEQ ID NO: 54903 - RNA, 23 nt, Artificial Sequence
  Synthetic
  misc_feature (8)..(8): n is a, c, g, or u
  misc_feature (17)..(17): n is a, c, g, or u
cuugaugnaaaugaaunucagga

SEQ ID NO: 54904 - RNA, 24 nt, Artificial Sequence
  Synthetic
  misc_feature (9)..(9): n is a, c, g, or u
  misc_feature (18)..(18): n is a, c, g, or u
ucuugaugnaaaugaaunucagga

SEQ ID NO: 54905 - RNA, 18 nt, Artificial Sequence
  Synthetic
ccaggacaaguuggagga

SEQ ID NO: 54906 - RNA, 19 nt, Artificial Sequence
  Synthetic
gccaggacaaguuggagga

SEQ ID NO: 54907 - RNA, 20 nt, Artificial Sequence
  Synthetic
agccaggacaaguuggagga

SEQ ID NO: 54908 - RNA, 21 nt, Artificial Sequence
  Synthetic
uagccaggacaaguuggagga

SEQ ID NO: 54909 - RNA, 22 nt, Artificial Sequence
  Synthetic
auagccaggacaaguuggagga

SEQ ID NO: 54910 - RNA, 23 nt, Artificial Sequence
  Synthetic
gauagccaggacaaguuggagga

SEQ ID NO: 54911 - RNA, 24 nt, Artificial Sequence
  Synthetic
cgauagccaggacaaguuggagga

SEQ ID NO: 54912 - RNA, 18 nt, Artificial Sequence
  Synthetic
  misc_feature (14)..(14): n is a, c, g, or u
ggaguuaaccagunagga

SEQ ID NO: 54913 - RNA, 19 nt, Artificial Sequence
  Synthetic
  misc_feature (15)..(15): n is a, c, g, or u
aggaguuaaccagunagga

SEQ ID NO: 54914 - RNA, 20 nt, Artificial Sequence
  Synthetic
  misc_feature (16)..(16): n is a, c, g, or u
aaggaguuaaccagunagga

SEQ ID NO: 54915 - RNA, 21 nt, Artificial Sequence
  Synthetic
  misc_feature (17)..(17): n is a, c, g, or u
gaaggaguuaaccagunagga

SEQ ID NO: 54916 - RNA, 22 nt, Artificial Sequence
  Synthetic
  misc_feature (18)..(18): n is a, c, g, or u
agaaggaguuaaccagunagga

SEQ ID NO: 54917 - RNA, 23 nt, Artificial Sequence
  Synthetic
  misc_feature (19)..(19): n is a, c, g, or u
aagaaggaguuaaccagunagga

SEQ ID NO: 54918 - RNA, 24 nt, Artificial Sequence
  Synthetic
  misc_feature (20)..(20): n is a, c, g, or u
aaagaaggaguuaaccagunagga

SEQ ID NO: 54919 - RNA, 18 nt, Artificial Sequence
  Synthetic
agagcccuuacccucgga

SEQ ID NO: 54920 - RNA, 19 nt, Artificial Sequence
  Synthetic
cagagcccuuacccucgga

SEQ ID NO: 54921 - RNA, 20 nt, Artificial Sequence
  Synthetic
acagagcccuuacccucgga

SEQ ID NO: 54922 - RNA, 21 nt, Artificial Sequence
  Synthetic
uacagagcccuuacccucgga

SEQ ID NO: 54923 - RNA, 22 nt, Artificial Sequence
  Synthetic
auacagagcccuuacccucgga

SEQ ID NO: 54924 - RNA, 23 nt, Artificial Sequence
  Synthetic
aauacagagcccuuacccucgga

SEQ ID NO: 54925 - RNA, 24 nt, Artificial Sequence
  Synthetic
aaauacagagcccuuacccucgga

SEQ ID NO: 54926 - RNA, 18 nt, Artificial Sequence
  Synthetic
agagaggcaauagucgga

SEQ ID NO: 54927 - RNA, 19 nt, Artificial Sequence
  Synthetic
gagagaggcaauagucgga

SEQ ID NO: 54928 - RNA, 20 nt, Artificial Sequence
  Synthetic
ugagagaggcaauagucgga

SEQ ID NO: 54929 - RNA, 21 nt, Artificial Sequence
  Synthetic
gugagagaggcaauagucgga

SEQ ID NO: 54930 - RNA, 22 nt, Artificial Sequence
  Synthetic
ugugagagaggcaauagucgga

SEQ ID NO: 54931 - RNA, 23 nt, Artificial Sequence
  Synthetic
augugagagaggcaauagucgga

SEQ ID NO: 54932 - RNA, 24 nt, Artificial Sequence
  Synthetic
gaugugagagaggcaauagucgga

SEQ ID NO: 54933 - RNA, 18 nt, Artificial Sequence
  Synthetic
aacagcgguauaaaggga

SEQ ID NO: 54934 - RNA, 19 nt, Artificial Sequence
  Synthetic
uaacagcgguauaaaggga

SEQ ID NO: 54935 - RNA, 20 nt, Artificial Sequence
  Synthetic
guaacagcgguauaaaggga

SEQ ID NO: 54936 - RNA, 21 nt, Artificial Sequence
  Synthetic
gguaacagcgguauaaaggga

SEQ ID NO: 54937 - RNA, 22 nt, Artificial Sequence
  Synthetic
ugguaacagcgguauaaaggga

SEQ ID NO: 54938 - RNA, 23 nt, Artificial Sequence
  Synthetic
uugguaacagcgguauaaaggga

SEQ ID NO: 54939 - RNA, 24 nt, Artificial Sequence
  Synthetic
auugguaacagcgguauaaaggga

SEQ ID NO: 54940 - RNA, 18 nt, Artificial Sequence
  Synthetic
gauucagcgccgacggga

SEQ ID NO: 54941 - RNA, 19 nt, Artificial Sequence
  Synthetic
ggauucagcgccgacggga

SEQ ID NO: 54942 - RNA, 20 nt, Artificial Sequence
  Synthetic
  misc_feature (1)..(1): n is a, c, g, or u
nggauucagcgccgacggga

SEQ ID NO: 54943 - RNA, 18 nt, Artificial Sequence
  Synthetic
  misc_feature (8)..(8): n is a, c, g, or u
aagcccangaugauggga

SEQ ID NO: 54944 - RNA, 19 nt, Artificial Sequence
  Synthetic
  misc_feature (9)..(9): n is a, c, g, or u
aaagcccangaugauggga

SEQ ID NO: 54945 - RNA, 20 nt, Artificial Sequence
  Synthetic
  misc_feature (10)..(10): n is a, c, g, or u
uaaagcccangaugauggga

SEQ ID NO: 54946 - RNA, 21 nt, Artificial Sequence
  Synthetic
  misc_feature (11)..(11): n is a, c, g, or u
cuaaagcccangaugauggga

SEQ ID NO: 54947 - RNA, 22 nt, Artificial Sequence
  Synthetic
  misc_feature (12)..(12): n is a, c, g, or u
ccuaaagcccangaugauggga

SEQ ID NO: 54948 - RNA, 23 nt, Artificial Sequence
  Synthetic
  misc_feature (13)..(13): n is a, c, g, or u
uccuaaagcccangaugauggga

SEQ ID NO: 54949 - RNA, 24 nt, Artificial Sequence
  Synthetic
  misc_feature (14)..(14): n is a, c, g, or u
uuccuaaagcccangaugauggga

SEQ ID NO: 54950 - RNA, 18 nt, Artificial Sequence
  Synthetic
  misc_feature (6)..(6): n is a, c, g, or u
  misc_feature (15)..(15): n is a, c, g, or u
gagggnucguccgcngga

SEQ ID NO: 54951 - RNA, 19 nt, Artificial Sequence
  Synthetic
  misc_feature (1)..(1): n is a, c, g, or u
  misc_feature (7)..(7): n is a, c, g, or u
  misc_feature (16)..(16): n is a, c, g, or u
ngagggnucguccgcngga

SEQ ID NO: 54952 - RNA, 20 nt, Artificial Sequence
  Synthetic
  misc_feature (2)..(2): n is a, c, g, or u
  misc_feature (8)..(8): n is a, c, g, or u
  misc_feature (17)..(17): n is a, c, g, or u
gngagggnucguccgcngga

SEQ ID NO: 54953 - RNA, 21 nt, Artificial Sequence
  Synthetic
  misc_feature (3)..(3): n is a, c, g, or u
  misc_feature (9)..(9): n is a, c, g, or u
  misc_feature (18)..(18): n is a, c, g, or u
cgngagggnucguccgcngga

SEQ ID NO: 54954 - RNA, 22 nt, Artificial Sequence
  Synthetic
  misc_feature (4)..(4): n is a, c, g, or u
  misc_feature (10)..(10): n is a, c, g, or u
  misc_feature (19)..(19): n is a, c, g, or u
ccgngagggnucguccgcngga

SEQ ID NO: 54955 - RNA, 23 nt, Artificial Sequence
  Synthetic
  misc_feature (5)..(5): n is a, c, g, or u
  misc_feature (11)..(11): n is a, c, g, or u
  misc_feature (20)..(20): n is a, c, g, or u
cccgngagggnucguccgcngga

SEQ ID NO: 54956 - RNA, 24 nt, Artificial Sequence
  Synthetic
  misc_feature (6)..(6): n is a, c, g, or u
  misc_feature (12)..(12): n is a, c, g, or u
  misc_feature (21)..(21): n is a, c, g, or u
ccccgngagggnucguccgcngga

SEQ ID NO: 54957 - RNA, 18 nt, Artificial Sequence
  Synthetic
  misc_feature (15)..(15): n is a, c, g, or u
ggaaagaaucccagngga

SEQ ID NO: 54958 - RNA, 19 nt, Artificial Sequence
  Synthetic
  misc_feature (16)..(16): n is a, c, g, or u
uggaaagaaucccagngga

SEQ ID NO: 54959 - RNA, 20 nt, Artificial Sequence
  Synthetic
  misc_feature (17)..(17): n is a, c, g, or u
cuggaaagaaucccagngga

SEQ ID NO: 54960 - RNA, 21 nt, Artificial Sequence
  Synthetic
  misc_feature (18)..(18): n is a, c, g, or u
ucuggaaagaaucccagngga

SEQ ID NO: 54961 - RNA, 22 nt, Artificial Sequence
  Synthetic
  misc_feature (19)..(19): n is a, c, g, or u
gucuggaaagaaucccagngga

SEQ ID NO: 54962 - RNA, 23 nt, Artificial Sequence
  Synthetic
  misc_feature (20)..(20): n is a, c, g, or u
ggucuggaaagaaucccagngga

SEQ ID NO: 54963 - RNA, 24 nt, Artificial Sequence
  Synthetic
  misc_feature (21)..(21): n is a, c, g, or u
uggucuggaaagaaucccagngga

SEQ ID NO: 54964 - RNA, 18 nt, Artificial Sequence
  Synthetic
  misc_feature (6)..(6): n is a, c, g, or u
  misc_feature (12)..(12): n is a, c, g, or u
  misc_feature (15)..(15): n is a, c, g, or u
uuugcncugaanagngga

SEQ ID NO: 54965 - RNA, 19 nt, Artificial Sequence
  Synthetic
  misc_feature (7)..(7): n is a, c, g, or u
  misc_feature (13)..(13): n is a, c, g, or u
  misc_feature (16)..(16): n is a, c, g, or u
auuugcncugaanagngga

SEQ ID NO: 54966 - RNA, 20 nt, Artificial Sequence
  Synthetic
  misc_feature (8)..(8): n is a, c, g, or u
  misc_feature (14)..(14): n is a, c, g, or u
  misc_feature (17)..(17): n is a, c, g, or u
aauuugcncugaanagngga

SEQ ID NO: 54967 - RNA, 21 nt, Artificial Sequence
  Synthetic
  misc_feature (9)..(9): n is a, c, g, or u
  misc_feature (15)..(15): n is a, c, g, or u
  misc_feature (18)..(18): n is a, c, g, or u
gaauuugcncugaanagngga

SEQ ID NO: 54968 - RNA, 22 nt, Artificial Sequence
  Synthetic
  misc_feature (10)..(10): n is a, c, g, or u
  misc_feature (16)..(16): n is a, c, g, or u
  misc_feature (19)..(19): n is a, c, g, or u
ggaauuugcncugaanagngga

SEQ ID NO: 54969 - RNA, 23 nt, Artificial Sequence
  Synthetic
  misc_feature (11)..(11): n is a, c, g, or u
  misc_feature (17)..(17): n is a, c, g, or u
  misc_feature (20)..(20): n is a, c, g, or u
uggaauuugcncugaanagngga

SEQ ID NO: 54970 - RNA, 24 nt, Artificial Sequence
  Synthetic
  misc_feature (12)..(12): n is a, c, g, or u
  misc_feature (18)..(18): n is a, c, g, or u
  misc_feature (21)..(21): n is a, c, g, or u
cuggaauuugcncugaanagngga

SEQ ID NO: 54971 - RNA, 18 nt, Artificial Sequence
  Synthetic
  misc_feature (15)..(15): n is a, c, g, or u
gaggcuugaacagungga

SEQ ID NO: 54972 - RNA, 19 nt, Artificial Sequence
  Synthetic
  misc_feature (16)..(16): n is a, c, g, or u
ggaggcuugaacagungga

SEQ ID NO: 54973 - RNA, 20 nt, Artificial Sequence
  Synthetic
  misc_feature (17)..(17): n is a, c, g, or u
uggaggcuugaacagungga

SEQ ID NO: 54974 - RNA, 21 nt, Artificial Sequence
  Synthetic
  misc_feature (18)..(18): n is a, c, g, or u
uuggaggcuugaacagungga

SEQ ID NO: 54975 - RNA, 22 nt, Artificial Sequence
  Synthetic
  misc_feature (19)..(19): n is a, c, g, or u
cuuggaggcuugaacagungga

SEQ ID NO: 54976 - RNA, 23 nt, Artificial Sequence
  Synthetic
  misc_feature (20)..(20): n is a, c, g, or u
gcuuggaggcuugaacagungga

SEQ ID NO: 54977 - RNA, 24 nt, Artificial Sequence
  Synthetic
  misc_feature (21)..(21): n is a, c, g, or u
agcuuggaggcuugaacagungga

SEQ ID NO: 54978 - RNA, 18 nt, Artificial Sequence
  Synthetic
  misc_feature (9)..(9): n is a, c, g, or u
guggucgungauccugga

SEQ ID NO: 54979 - RNA, 19 nt, Artificial Sequence
  Synthetic
  misc_feature (10)..(10): n is a, c, g, or u
gguggucgungauccugga

SEQ ID NO: 54980 - RNA, 20 nt, Artificial Sequence
  Synthetic
  misc_feature (11)..(11): n is a, c, g, or u
ugguggucgungauccugga

SEQ ID NO: 54981 - RNA, 21 nt, Artificial Sequence
  Synthetic
  misc_feature (12)..(12): n is a, c, g, or u
cugguggucgungauccugga

SEQ ID NO: 54982 - RNA, 22 nt, Artificial Sequence
  Synthetic
  misc_feature (13)..(13): n is a, c, g, or u
gcugguggucgungauccugga

SEQ ID NO: 54983 - RNA, 23 nt, Artificial Sequence
  Synthetic
  misc_feature (14)..(14): n is a, c, g, or u
ugcugguggucgungauccugga

SEQ ID NO: 54984 - RNA, 24 nt, Artificial Sequence
  Synthetic
  misc_feature (15)..(15): n is a, c, g, or u
gugcugguggucgungauccugga

SEQ ID NO: 54985 - RNA, 18 nt, Artificial Sequence
  Synthetic
ggaccgccgauuggugga

SEQ ID NO: 54986 - RNA, 19 nt, Artificial Sequence
  Synthetic
cggaccgccgauuggugga

SEQ ID NO: 54987 - RNA, 20 nt, Artificial Sequence
  Synthetic
ccggaccgccgauuggugga

SEQ ID NO: 54988 - RNA, 21 nt, Artificial Sequence
  Synthetic
cccggaccgccgauuggugga

SEQ ID NO: 54989 - RNA, 22 nt, Artificial Sequence
  Synthetic
ucccggaccgccgauuggugga

SEQ ID NO: 54990 - RNA, 23 nt, Artificial Sequence
  Synthetic
cucccggaccgccgauuggugga

SEQ ID NO: 54991 - RNA, 24 nt, Artificial Sequence
  Synthetic
  misc_feature (1)..(1): n is a, c, g, or u
ncucccggaccgccgauuggugga

SEQ ID NO: 54992 - RNA, 18 nt, Artificial Sequence
  Synthetic
  misc_feature (13)..(13): n is a, c, g, or u
  misc_feature (16)..(16): n is a, c, g, or u
uuuggaacagcancanga

SEQ ID NO: 54993 - RNA, 19 nt, Artificial Sequence
  Synthetic
  misc_feature (14)..(14): n is a, c, g, or u
  misc_feature (17)..(17): n is a, c, g, or u
guuuggaacagcancanga

SEQ ID NO: 54994 - RNA, 20 nt, Artificial Sequence
  Synthetic
  misc_feature (15)..(15): n is a, c, g, or u
  misc_feature (18)..(18): n is a, c, g, or u
gguuuggaacagcancanga

SEQ ID NO: 54995 - RNA, 21 nt, Artificial Sequence
  Synthetic
  misc_feature (16)..(16): n is a, c, g, or u
  misc_feature (19)..(19): n is a, c, g, or u
ggguuuggaacagcancanga

SEQ ID NO: 54996 - RNA, 22 nt, Artificial Sequence
  Synthetic
  misc_feature (17)..(17): n is a, c, g, or u
  misc_feature (20)..(20): n is a, c, g, or u
aggguuuggaacagcancanga

SEQ ID NO: 54997 - RNA, 23 nt, Artificial Sequence
  Synthetic
  misc_feature (18)..(18): n is a, c, g, or u
  misc_feature (21)..(21): n is a, c, g, or u
gaggguuuggaacagcancanga

SEQ ID NO: 54998 - RNA, 24 nt, Artificial Sequence
  Synthetic
  misc_feature (19)..(19): n is a, c, g, or u
  misc_feature (22)..(22): n is a, c, g, or u
cgaggguuuggaacagcancanga

SEQ ID NO: 54999 - RNA, 18 nt, Artificial Sequence
  Synthetic
  misc_feature (3)..(3): n is a, c, g, or u
  misc_feature (7)..(7): n is a, c, g, or u
  misc_feature (16)..(16): n is a, c, g, or u
agnaggnacaguaganga

SEQ ID NO: 55000 - RNA, 19 nt, Artificial Sequence
  Synthetic
  misc_feature (4)..(4): n is a, c, g, or u
  misc_feature (8)..(8): n is a, c, g, or u
  misc_feature (17)..(17): n is a, c, g, or u
aagnaggnacaguaganga

SEQ ID NO: 55001 - RNA, 20 nt, Artificial Sequence
  Synthetic
  misc_feature (5)..(5): n is a, c, g, or u
  misc_feature (9)..(9): n is a, c, g, or u
  misc_feature (18)..(18): n is a, c, g, or u
aaagnaggnacaguaganga

SEQ ID NO: 55002 - RNA, 21 nt, Artificial Sequence
  Synthetic
  misc_feature (1)..(1): n is a, c, g, or u
  misc_feature (6)..(6): n is a, c, g, or u
  misc_feature (10)..(10): n is a, c, g, or u
  misc_feature (19)..(19): n is a, c, g, or u
naaagnaggnacaguaganga

SEQ ID NO: 55003 - RNA, 22 nt, Artificial Sequence
  Synthetic
  misc_feature (2)..(2): n is a, c, g, or u
  misc_feature (7)..(7): n is a, c, g, or u
  misc_feature (11)..(11): n is a, c, g, or u
  misc_feature (20)..(20): n is a, c, g, or u
unaaagnaggnacaguaganga

SEQ ID NO: 55004 - RNA, 23 nt, Artificial Sequence
  Synthetic
  misc_feature (3)..(3): n is a, c, g, or u
  misc_feature (8)..(8): n is a, c, g, or u
  misc_feature (12)..(12): n is a, c, g, or u
  misc_feature (21)..(21): n is a, c, g, or u
uunaaagnaggnacaguaganga

SEQ ID NO: 55005 - RNA, 24 nt, Artificial Sequence
  Synthetic
  misc_feature (4)..(4): n is a, c, g, or u
  misc_feature (9)..(9): n is a, c, g, or u
  misc_feature (13)..(13): n is a, c, g, or u
  misc_feature (22)..(22): n is a, c, g, or u
auunaaagnaggnacaguaganga

SEQ ID NO: 55006 - RNA, 18 nt, Artificial Sequence
  Synthetic
  misc_feature (16)..(16): n is a, c, g, or u
ccggaaguguggauanga

SEQ ID NO: 55007 - RNA, 19 nt, Artificial Sequence
  Synthetic
  misc_feature (17)..(17): n is a, c, g, or u
uccggaaguguggauanga

SEQ ID NO: 55008 - RNA, 20 nt, Artificial Sequence
  Synthetic
  misc_feature (18)..(18): n is a, c, g, or u
uuccggaaguguggauanga

SEQ ID NO: 55009 - RNA, 21 nt, Artificial Sequence
  Synthetic
  misc_feature (19)..(19): n is a, c, g, or u
uuuccggaaguguggauanga

SEQ ID NO: 55010 - RNA, 22 nt, Artificial Sequence
  Synthetic
  misc_feature (20)..(20): n is a, c, g, or u
guuuccggaaguguggauanga

SEQ ID NO: 55011 - RNA, 23 nt, Artificial Sequence
  Synthetic
  misc_feature (21)..(21): n is a, c, g, or u
aguuuccggaaguguggauanga

SEQ ID NO: 55012 - RNA, 24 nt, Artificial Sequence
  Synthetic
  misc_feature (22)..(22): n is a, c, g, or u
uaguuuccggaaguguggauanga

SEQ ID NO: 55013 - RNA, 18 nt, Artificial Sequence
  Synthetic
  misc_feature (16)..(16): n is a, c, g, or u
gaguaggucccgaacnga

SEQ ID NO: 55014 - RNA, 19 nt, Artificial Sequence
  Synthetic
  misc_feature (17)..(17): n is a, c, g, or u
cgaguaggucccgaacnga

SEQ ID NO: 55015 - RNA, 20 nt, Artificial Sequence
  Synthetic
  misc_feature (18)..(18): n is a, c, g, or u
ucgaguaggucccgaacnga

SEQ ID NO: 55016 - RNA, 21 nt, Artificial Sequence
  Synthetic
  misc_feature (19)..(19): n is a, c, g, or u
gucgaguaggucccgaacnga

SEQ ID NO: 55017 - RNA, 22 nt, Artificial Sequence
  Synthetic
  misc_feature (20)..(20): n is a, c, g, or u
ugucgaguaggucccgaacnga

SEQ ID NO: 55018 - RNA, 23 nt, Artificial Sequence
  Synthetic
  misc_feature (21)..(21): n is a, c, g, or u
gugucgaguaggucccgaacnga

SEQ ID NO: 55019 - RNA, 24 nt, Artificial Sequence
  Synthetic
  misc_feature (22)..(22): n is a, c, g, or u
ggugucgaguaggucccgaacnga

SEQ ID NO: 55020 - RNA, 18 nt, Artificial Sequence
  Synthetic
  misc_feature (10)..(10): n is a, c, g, or u
uugaacagunggacauga

SEQ ID NO: 55021 - RNA, 19 nt, Artificial Sequence
  Synthetic
  misc_feature (11)..(11): n is a, c, g, or u
cuugaacagunggacauga

SEQ ID NO: 55022 - RNA, 20 nt, Artificial Sequence
  Synthetic
  misc_feature (12)..(12): n is a, c, g, or u
gcuugaacagunggacauga

SEQ ID NO: 55023 - RNA, 21 nt, Artificial Sequence
  Synthetic
  misc_feature (13)..(13): n is a, c, g, or u
ggcuugaacagunggacauga

SEQ ID NO: 55024 - RNA, 22 nt, Artificial Sequence
  Synthetic
  misc_feature (14)..(14): n is a, c, g, or u
aggcuugaacagunggacauga

SEQ ID NO: 55025 - RNA, 23 nt, Artificial Sequence
  Synthetic
  misc_feature (15)..(15): n is a, c, g, or u
gaggcuugaacagunggacauga

SEQ ID NO: 55026 - RNA, 24 nt, Artificial Sequence
  Synthetic
  misc_feature (16)..(16): n is a, c, g, or u
ggaggcuugaacagunggacauga

SEQ ID NO: 55027 - RNA, 18 nt, Artificial Sequence
  Synthetic
gacaugaacaaaagauga

SEQ ID NO: 55028 - RNA, 19 nt, Artificial Sequence
  Synthetic
ggacaugaacaaaagauga

SEQ ID NO: 55029 - RNA, 20 nt, Artificial Sequence
  Synthetic
  misc_feature (1)..(1): n is a, c, g, or u
nggacaugaacaaaagauga

SEQ ID NO: 55030 - RNA, 21 nt, Artificial Sequence
  Synthetic
  misc_feature (2)..(2): n is a, c, g, or u
unggacaugaacaaaagauga

SEQ ID NO: 55031 - RNA, 22 nt, Artificial Sequence
  Synthetic
  misc_feature (3)..(3): n is a, c, g, or u
gunggacaugaacaaaagauga

SEQ ID NO: 55032 - RNA, 23 nt, Artificial Sequence
  Synthetic
  misc_feature (4)..(4): n is a, c, g, or u
agunggacaugaacaaaagauga

SEQ ID NO: 55033 - RNA, 24 nt, Artificial Sequence
  Synthetic
  misc_feature (5)..(5): n is a, c, g, or u
cagunggacaugaacaaaagauga

SEQ ID NO: 55034 - RNA, 18 nt, Artificial Sequence
  Synthetic
ggaugaagaggaagauga

SEQ ID NO: 55035 - RNA, 19 nt, Artificial Sequence
  Synthetic
aggaugaagaggaagauga

SEQ ID NO: 55036 - RNA, 20 nt, Artificial Sequence
  Synthetic
caggaugaagaggaagauga

SEQ ID NO: 55037 - RNA, 21 nt, Artificial Sequence
  Synthetic
gcaggaugaagaggaagauga

SEQ ID NO: 55038 - RNA, 22 nt, Artificial Sequence
  Synthetic
agcaggaugaagaggaagauga

SEQ ID NO: 55039 - RNA, 23 nt, Artificial Sequence
  Synthetic
cagcaggaugaagaggaagauga

SEQ ID NO: 55040 - RNA, 24 nt, Artificial Sequence
  Synthetic
gcagcaggaugaagaggaagauga

SEQ ID NO: 55041 - RNA, 18 nt, Artificial Sequence
  Synthetic
  misc_feature (7)..(7): n is a, c, g, or u
acacggnccggcagauga

SEQ ID NO: 55042 - RNA, 19 nt, Artificial Sequence
  Synthetic
  misc_feature (8)..(8): n is a, c, g, or u
cacacggnccggcagauga

SEQ ID NO: 55043 - RNA, 20 nt, Artificial Sequence
  Synthetic
  misc_feature (9)..(9): n is a, c, g, or u
gcacacggnccggcagauga

SEQ ID NO: 55044 - RNA, 21 nt, Artificial Sequence
  Synthetic
  misc_feature (10)..(10): n is a, c, g, or u
ugcacacggnccggcagauga

SEQ ID NO: 55045 - RNA, 22 nt, Artificial Sequence
  Synthetic
  misc_feature (11)..(11): n is a, c, g, or u
gugcacacggnccggcagauga

SEQ ID NO: 55046 - RNA, 23 nt, Artificial Sequence
  Synthetic
  misc_feature (12)..(12): n is a, c, g, or u
agugcacacggnccggcagauga

SEQ ID NO: 55047 - RNA, 24 nt, Artificial Sequence
  Synthetic
  misc_feature (13)..(13): n is a, c, g, or u
aagugcacacggnccggcagauga

SEQ ID NO: 55048 - RNA, 18 nt, Artificial Sequence
  Synthetic
ggcauagcagcaggauga

SEQ ID NO: 55049 - RNA, 19 nt, Artificial Sequence
  Synthetic
aggcauagcagcaggauga

SEQ ID NO: 55050 - RNA, 20 nt, Artificial Sequence
  Synthetic
gaggcauagcagcaggauga

SEQ ID NO: 55051 - RNA, 21 nt, Artificial Sequence
  Synthetic
ugaggcauagcagcaggauga

SEQ ID NO: 55052 - RNA, 22 nt, Artificial Sequence
  Synthetic
augaggcauagcagcaggauga

SEQ ID NO: 55053 - RNA, 23 nt, Artificial Sequence
  Synthetic
gaugaggcauagcagcaggauga

SEQ ID NO: 55054 - RNA, 24 nt, Artificial Sequence
  Synthetic
agaugaggcauagcagcaggauga

SEQ ID NO: 55055 - RNA, 18 nt, Artificial Sequence
  Synthetic
  misc_feature (5)..(5): n is a, c, g, or u
cuucnagaagauugauga

SEQ ID NO: 55056 - RNA, 19 nt, Artificial Sequence
  Synthetic
  misc_feature (6)..(6): n is a, c, g, or u
ucuucnagaagauugauga

SEQ ID NO: 55057 - RNA, 20 nt, Artificial Sequence
  Synthetic
  misc_feature (7)..(7): n is a, c, g, or u
gucuucnagaagauugauga

SEQ ID NO: 55058 - RNA, 21 nt, Artificial Sequence
  Synthetic
  misc_feature (8)..(8): n is a, c, g, or u
agucuucnagaagauugauga

SEQ ID NO: 55059 - RNA, 22 nt, Artificial Sequence
  Synthetic
  misc_feature (9)..(9): n is a, c, g, or u
cagucuucnagaagauugauga

SEQ ID NO: 55060 - RNA, 23 nt, Artificial Sequence
  Synthetic
  misc_feature (10)..(10): n is a, c, g, or u
ccagucuucnagaagauugauga

SEQ ID NO: 55061 - RNA, 24 nt, Artificial Sequence
  Synthetic
  misc_feature (11)..(11): n is a, c, g, or u
cccagucuucnagaagauugauga

SEQ ID NO: 55062 - RNA, 18 nt, Artificial Sequence
  Synthetic
auugcacuaguaaacuga

SEQ ID NO: 55063 - RNA, 19 nt, Artificial Sequence
  Synthetic
aauugcacuaguaaacuga

SEQ ID NO: 55064 - RNA, 20 nt, Artificial Sequence
  Synthetic
aaauugcacuaguaaacuga

SEQ ID NO: 55065 - RNA, 21 nt, Artificial Sequence
  Synthetic
caaauugcacuaguaaacuga

SEQ ID NO: 55066 - RNA, 22 nt, Artificial Sequence
  Synthetic
acaaauugcacuaguaaacuga

SEQ ID NO: 55067 - RNA, 23 nt, Artificial Sequence
  Synthetic
aacaaauugcacuaguaaacuga

SEQ ID NO: 55068 - RNA, 24 nt, Artificial Sequence
  Synthetic
gaacaaauugcacuaguaaacuga

SEQ ID NO: 55069 - RNA, 18 nt, Artificial Sequence
  Synthetic
  misc_feature (14)..(14): n is a, c, g, or u
aggguucugugucncuga

SEQ ID NO: 55070 - RNA, 19 nt, Artificial Sequence
  Synthetic
  misc_feature (15)..(15): n is a, c, g, or u
caggguucugugucncuga

SEQ ID NO: 55071 - RNA, 20 nt, Artificial Sequence
  Synthetic
  misc_feature (16)..(16): n is a, c, g, or u
gcaggguucugugucncuga

SEQ ID NO: 55072 - RNA, 21 nt, Artificial Sequence
  Synthetic
  misc_feature (17)..(17): n is a, c, g, or u
agcaggguucugugucncuga

SEQ ID NO: 55073 - RNA, 22 nt, Artificial Sequence
  Synthetic
  misc_feature (18)..(18): n is a, c, g, or u
gagcaggguucugugucncuga

SEQ ID NO: 55074 - RNA, 23 nt, Artificial Sequence
  Synthetic
  misc_feature (19)..(19): n is a, c, g, or u
ggagcaggguucugugucncuga

SEQ ID NO: 55075 - RNA, 24 nt, Artificial Sequence
  Synthetic
  misc_feature (20)..(20): n is a, c, g, or u
cggagcaggguucugugucncuga

SEQ ID NO: 55076 - RNA, 18 nt, Artificial Sequence
  Synthetic
caggagguugguaaguga

SEQ ID NO: 55077 - RNA, 19 nt, Artificial Sequence
  Synthetic
acaggagguugguaaguga

SEQ ID NO: 55078 - RNA, 20 nt, Artificial Sequence
  Synthetic
gacaggagguugguaaguga

SEQ ID NO: 55079 - RNA, 21 nt, Artificial Sequence
  Synthetic
ggacaggagguugguaaguga

SEQ ID NO: 55080 - RNA, 22 nt, Artificial Sequence
  Synthetic
aggacaggagguugguaaguga

SEQ ID NO: 55081 - RNA, 23 nt, Artificial Sequence
  Synthetic
gaggacaggagguugguaaguga

SEQ ID NO: 55082 - RNA, 24 nt, Artificial Sequence
  Synthetic
ggaggacaggagguugguaaguga

SEQ ID NO: 55083 - RNA, 18 nt, Artificial Sequence
  Synthetic
ugcgacgugcagagguga

SEQ ID NO: 55084 - RNA, 19 nt, Artificial Sequence
  Synthetic
augcgacgugcagagguga

SEQ ID NO: 55085 - RNA, 20 nt, Artificial Sequence
  Synthetic
caugcgacgugcagagguga

SEQ ID NO: 55086 - RNA, 21 nt, Artificial Sequence
  Synthetic
ccaugcgacgugcagagguga

SEQ ID NO: 55087 - RNA, 22 nt, Artificial Sequence
  Synthetic
uccaugcgacgugcagagguga

SEQ ID NO: 55088 - RNA, 23 nt, Artificial Sequence
  Synthetic
cuccaugcgacgugcagagguga

SEQ ID NO: 55089 - RNA, 24 nt, Artificial Sequence
  Synthetic
ucuccaugcgacgugcagagguga

SEQ ID NO: 55090 - RNA, 18 nt, Artificial Sequence
  Synthetic
guugcauggugcugguga

SEQ ID NO: 55091 - RNA, 19 nt, Artificial Sequence
  Synthetic
aguugcauggugcugguga

SEQ ID NO: 55092 - RNA, 20 nt, Artificial Sequence
  Synthetic
aaguugcauggugcugguga

SEQ ID NO: 55093 - RNA, 21 nt, Artificial Sequence
  Synthetic
aaaguugcauggugcugguga

SEQ ID NO: 55094 - RNA, 22 nt, Artificial Sequence
  Synthetic
aaaaguugcauggugcugguga

SEQ ID NO: 55095 - RNA, 23 nt, Artificial Sequence
  Synthetic
aaaaaguugcauggugcugguga

SEQ ID NO: 55096 - RNA, 24 nt, Artificial Sequence
  Synthetic
gaaaaaguugcauggugcugguga

SEQ ID NO: 55097 - RNA, 18 nt, Artificial Sequence
  Synthetic
agaagauugaugauguga

SEQ ID NO: 55098 - RNA, 19 nt, Artificial Sequence
  Synthetic
  misc_feature (1)..(1): n is a, c, g, or u
nagaagauugaugauguga

SEQ ID NO: 55099 - RNA, 20 nt, Artificial Sequence
  Synthetic
  misc_feature (2)..(2): n is a, c, g, or u
cnagaagauugaugauguga

SEQ ID NO: 55100 - RNA, 21 nt, Artificial Sequence
  Synthetic
  misc_feature (3)..(3): n is a, c, g, or u
ucnagaagauugaugauguga

SEQ ID NO: 55101 - RNA, 22 nt, Artificial Sequence
  Synthetic
  misc_feature (4)..(4): n is a, c, g, or u
uucnagaagauugaugauguga

SEQ ID NO: 55102 - RNA, 23 nt, Artificial Sequence
  Synthetic
  misc_feature (5)..(5): n is a, c, g, or u
cuucnagaagauugaugauguga

SEQ ID NO: 55103 - RNA, 24 nt, Artificial Sequence
  Synthetic
  misc_feature (6)..(6): n is a, c, g, or u
ucuucnagaagauugaugauguga

SEQ ID NO: 55104 - RNA, 18 nt, Artificial Sequence
  Synthetic
  misc_feature (1)..(1): n is a, c, g, or u
nucccccuagaaaauuga

SEQ ID NO: 55105 - RNA, 19 nt, Artificial Sequence
  Synthetic
  misc_feature (1)..(2): n is a, c, g, or u
nnucccccuagaaaauuga

SEQ ID NO: 55106 - RNA, 20 nt, Artificial Sequence
  Synthetic
  misc_feature (2)..(3): n is a, c, g, or u
unnucccccuagaaaauuga

SEQ ID NO: 55107 - RNA, 21 nt, Artificial Sequence
  Synthetic
  misc_feature (3)..(4): n is a, c, g, or u
gunnucccccuagaaaauuga

SEQ ID NO: 55108 - RNA, 22 nt, Artificial Sequence
  Synthetic
  misc_feature (4)..(5): n is a, c, g, or u
ggunnucccccuagaaaauuga

SEQ ID NO: 55109 - RNA, 23 nt, Artificial Sequence
  Synthetic
  misc_feature (5)..(6): n is a, c, g, or u
gggunnucccccuagaaaauuga

SEQ ID NO: 55110 - RNA, 24 nt, Artificial Sequence
  Synthetic
  misc_feature (6)..(7): n is a, c, g, or u
cgggunnucccccuagaaaauuga

SEQ ID NO: 55111 - RNA, 18 nt, Artificial Sequence
  Synthetic
aacauagagguuccuuga

SEQ ID NO: 55112 - RNA, 19 nt, Artificial Sequence
  Synthetic
aaacauagagguuccuuga

SEQ ID NO: 55113 - RNA, 20 nt, Artificial Sequence
  Synthetic
gaaacauagagguuccuuga

SEQ ID NO: 55114 - RNA, 21 nt, Artificial Sequence
  Synthetic
ggaaacauagagguuccuuga

SEQ ID NO: 55115 - RNA, 22 nt, Artificial Sequence
  Synthetic
gggaaacauagagguuccuuga

SEQ ID NO: 55116 - RNA, 23 nt, Artificial Sequence
  Synthetic
agggaaacauagagguuccuuga

SEQ ID NO: 55117 - RNA, 24 nt, Artificial Sequence
  Synthetic
gagggaaacauagagguuccuuga

SEQ ID NO: 55118 - RNA, 18 nt, Artificial Sequence
  Synthetic
  misc_feature (3)..(5): n is a, c, g, or u
  misc_feature (11)..(12): n is a, c, g, or u
uunnnuaucannucuuga

SEQ ID NO: 55119 - RNA, 19 nt, Artificial Sequence
  Synthetic
  misc_feature (4)..(6): n is a, c, g, or u
  misc_feature (12)..(13): n is a, c, g, or u
uuunnnuaucannucuuga

SEQ ID NO: 55120 - RNA, 20 nt, Artificial Sequence
  Synthetic
  misc_feature (5)..(7): n is a, c, g, or u
  misc_feature (13)..(14): n is a, c, g, or u
auuunnnuaucannucuuga

SEQ ID NO: 55121 - RNA, 21 nt, Artificial Sequence
  Synthetic
  misc_feature (6)..(8): n is a, c, g, or u
  misc_feature (14)..(15): n is a, c, g, or u
cauuunnnuaucannucuuga

SEQ ID NO: 55122 - RNA, 22 nt, Artificial Sequence
  Synthetic
  misc_feature (7)..(9): n is a, c, g, or u
  misc_feature (15)..(16): n is a, c, g, or u
acauuunnnuaucannucuuga

SEQ ID NO: 55123 - RNA, 23 nt, Artificial Sequence
  Synthetic
  misc_feature (8)..(10): n is a, c, g, or u
  misc_feature (16)..(17): n is a, c, g, or u
cacauuunnnuaucannucuuga

SEQ ID NO: 55124 - RNA, 24 nt, Artificial Sequence
  Synthetic
  misc_feature (9)..(11): n is a, c, g, or u
  misc_feature (17)..(18): n is a, c, g, or u
ucacauuunnnuaucannucuuga

SEQ ID NO: 55125 - RNA, 18 nt, Artificial Sequence
  Synthetic
  misc_feature (9)..(10): n is a, c, g, or u
gccccuucnngucguuga

SEQ ID NO: 55126 - RNA, 19 nt, Artificial Sequence
  Synthetic
  misc_feature (10)..(11): n is a, c, g, or u
ugccccuucnngucguuga

SEQ ID NO: 55127 - RNA, 20 nt, Artificial Sequence
  Synthetic
  misc_feature (11)..(12): n is a, c, g, or u
augccccuucnngucguuga

SEQ ID NO: 55128 - RNA, 21 nt, Artificial Sequence
  Synthetic
  misc_feature (12)..(13): n is a, c, g, or u
caugccccuucnngucguuga

SEQ ID NO: 55129 - RNA, 22 nt, Artificial Sequence
  Synthetic
  misc_feature (13)..(14): n is a, c, g, or u
ccaugccccuucnngucguuga

SEQ ID NO: 55130 - RNA, 23 nt, Artificial Sequence
  Synthetic
  misc_feature (14)..(15): n is a, c, g, or u
cccaugccccuucnngucguuga

SEQ ID NO: 55131 - RNA, 24 nt, Artificial Sequence
  Synthetic
  misc_feature (15)..(16): n is a, c, g, or u
ucccaugccccuucnngucguuga

SEQ ID NO: 55132 - RNA, 18 nt, Artificial Sequence
  Synthetic
  misc_feature (8)..(8): n is a, c, g, or u
  misc_feature (13)..(13): n is a, c, g, or u
  misc_feature (17)..(17): n is a, c, g, or u
ucauguanuguunacana

SEQ ID NO: 55133 - RNA, 19 nt, Artificial Sequence
  Synthetic
  misc_feature (9)..(9): n is a, c, g, or u
  misc_feature (14)..(14): n is a, c, g, or u
  misc_feature (18)..(18): n is a, c, g, or u
uucauguanuguunacana

SEQ ID NO: 55134 - RNA, 20 nt, Artificial Sequence
  Synthetic
  misc_feature (10)..(10): n is a, c, g, or u
  misc_feature (15)..(15): n is a, c, g, or u
  misc_feature (19)..(19): n is a, c, g, or u
guucauguanuguunacana

SEQ ID NO: 55135 - RNA, 21 nt, Artificial Sequence
  Synthetic
  misc_feature (11)..(11): n is a, c, g, or u
  misc_feature (16)..(16): n is a, c, g, or u
  misc_feature (20)..(20): n is a, c, g, or u
gguucauguanuguunacana

SEQ ID NO: 55136 - RNA, 22 nt, Artificial Sequence
  Synthetic
  misc_feature (12)..(12): n is a, c, g, or u
  misc_feature (17)..(17): n is a, c, g, or u
  misc_feature (21)..(21): n is a, c, g, or u
agguucauguanuguunacana

SEQ ID NO: 55137 - RNA, 23 nt, Artificial Sequence
  Synthetic
  misc_feature (13)..(13): n is a, c, g, or u
  misc_feature (18)..(18): n is a, c, g, or u
  misc_feature (22)..(22): n is a, c, g, or u
aagguucauguanuguunacana

SEQ ID NO: 55138 - RNA, 24 nt, Artificial Sequence
  Synthetic
  misc_feature (14)..(14): n is a, c, g, or u
  misc_feature (19)..(19): n is a, c, g, or u
  misc_feature (23)..(23): n is a, c, g, or u
aaagguucauguanuguunacana

SEQ ID NO: 55139 - RNA, 18 nt, Artificial Sequence
  Synthetic
  misc_feature (6)..(6): n is a, c, g, or u
  misc_feature (9)..(9): n is a, c, g, or u
  misc_feature (12)..(12): n is a, c, g, or u
  misc_feature (17)..(17): n is a, c, g, or u
uuaaunccnuunuccana

SEQ ID NO: 55140 - RNA, 19 nt, Artificial Sequence
  Synthetic
  misc_feature (7)..(7): n is a, c, g, or u
  misc_feature (10)..(10): n is a, c, g, or u
  misc_feature (13)..(13): n is a, c, g, or u
  misc_feature (18)..(18): n is a, c, g, or u
uuuaaunccnuunuccana

SEQ ID NO: 55141 - RNA, 20 nt, Artificial Sequence
  Synthetic
  misc_feature (8)..(8): n is a, c, g, or u
  misc_feature (11)..(11): n is a, c, g, or u
  misc_feature (14)..(14): n is a, c, g, or u
  misc_feature (19)..(19): n is a, c, g, or u
guuuaaunccnuunuccana

SEQ ID NO: 55142 - RNA, 21 nt, Artificial Sequence
  Synthetic
  misc_feature (9)..(9): n is a, c, g, or u
  misc_feature (12)..(12): n is a, c, g, or u
  misc_feature (15)..(15): n is a, c, g, or u
  misc_feature (20)..(20): n is a, c, g, or u
gguuuaaunccnuunuccana

SEQ ID NO: 55143 - RNA, 22 nt, Artificial Sequence
  Synthetic
  misc_feature (1)..(1): n is a, c, g, or u
  misc_feature (10)..(10): n is a, c, g, or u
  misc_feature (13)..(13): n is a, c, g, or u
  misc_feature (16)..(16): n is a, c, g, or u
  misc_feature (21)..(21): n is a, c, g, or u
ngguuuaaunccnuunuccana

SEQ ID NO: 55144 - RNA, 23 nt, Artificial Sequence
  Synthetic
  misc_feature (2)..(2): n is a, c, g, or u
  misc_feature (11)..(11): n is a, c, g, or u
  misc_feature (14)..(14): n is a, c, g, or u
  misc_feature (17)..(17): n is a, c, g, or u
  misc_feature (22)..(22): n is a, c, g, or u
angguuuaaunccnuunuccana

SEQ ID NO: 55145 - RNA, 24 nt, Artificial Sequence
  Synthetic
  misc_feature (3)..(3): n is a, c, g, or u
  misc_feature (12)..(12): n is a, c, g, or u
  misc_feature (15)..(15): n is a, c, g, or u
  misc_feature (18)..(18): n is a, c, g, or u
  misc_feature (23)..(23): n is a, c, g, or u
uangguuuaaunccnuunuccana

SEQ ID NO: 55146 - RNA, 18 nt, Artificial Sequence
  Synthetic
  misc_feature (17)..(17): n is a, c, g, or u
gagggaguucuucuucna

SEQ ID NO: 55147 - RNA, 19 nt, Artificial Sequence
  Synthetic
  misc_feature (18)..(18): n is a, c, g, or u
cgagggaguucuucuucna

SEQ ID NO: 55148 - RNA, 20 nt, Artificial Sequence
  Synthetic
  misc_feature (19)..(19): n is a, c, g, or u
gcgagggaguucuucuucna

SEQ ID NO: 55149 - RNA, 21 nt, Artificial Sequence
  Synthetic
  misc_feature (20)..(20): n is a, c, g, or u
ggcgagggaguucuucuucna

SEQ ID NO: 55150 - RNA, 22 nt, Artificial Sequence
  Synthetic
  misc_feature (21)..(21): n is a, c, g, or u
aggcgagggaguucuucuucna

SEQ ID NO: 55151 - RNA, 23 nt, Artificial Sequence
  Synthetic
  misc_feature (22)..(22): n is a, c, g, or u
gaggcgagggaguucuucuucna

SEQ ID NO: 55152 - RNA, 24 nt, Artificial Sequence
  Synthetic
  misc_feature (23)..(23): n is a, c, g, or u
cgaggcgagggaguucuucuucna

SEQ ID NO: 55153 - RNA, 18 nt, Artificial Sequence
  Synthetic
  misc_feature (3)..(3): n is a, c, g, or u
  misc_feature (9)..(9): n is a, c, g, or u
  misc_feature (17)..(17): n is a, c, g, or u
uungcagunauacaggna

SEQ ID NO: 55154 - RNA, 19 nt, Artificial Sequence
  Synthetic
  misc_feature (4)..(4): n is a, c, g, or u
  misc_feature (10)..(10): n is a, c, g, or u
  misc_feature (18)..(18): n is a, c, g, or u
uuungcagunauacaggna

SEQ ID NO: 55155 - RNA, 20 nt, Artificial Sequence
  Synthetic
  misc_feature (5)..(5): n is a, c, g, or u
  misc_feature (11)..(11): n is a, c, g, or u
  misc_feature (19)..(19): n is a, c, g, or u
guuungcagunauacaggna

SEQ ID NO: 55156 - RNA, 21 nt, Artificial Sequence
  Synthetic
  misc_feature (6)..(6): n is a, c, g, or u
  misc_feature (12)..(12): n is a, c, g, or u
  misc_feature (20)..(20): n is a, c, g, or u
uguuungcagunauacaggna

SEQ ID NO: 55157 - RNA, 22 nt, Artificial Sequence
  Synthetic
  misc_feature (7)..(7): n is a, c, g, or u
  misc_feature (13)..(13): n is a, c, g, or u
  misc_feature (21)..(21): n is a, c, g, or u
cuguuungcagunauacaggna

SEQ ID NO: 55158 - RNA, 23 nt, Artificial Sequence
  Synthetic
  misc_feature (8)..(8): n is a, c, g, or u
  misc_feature (14)..(14): n is a, c, g, or u
  misc_feature (22)..(22): n is a, c, g, or u
ccuguuungcagunauacaggna

SEQ ID NO: 55159 - RNA, 24 nt, Artificial Sequence
  Synthetic
  misc_feature (9)..(9): n is a, c, g, or u
  misc_feature (15)..(15): n is a, c, g, or u
  misc_feature (23)..(23): n is a, c, g, or u
gccuguuungcagunauacaggna

SEQ ID NO: 55160 - RNA, 18 nt, Artificial Sequence
  Synthetic
  misc_feature (8)..(8): n is a, c, g, or u
  misc_feature (17)..(17): n is a, c, g, or u
aucccagnggauugggna

SEQ ID NO: 55161 - RNA, 19 nt, Artificial Sequence
  Synthetic
  misc_feature (9)..(9): n is a, c, g, or u
  misc_feature (18)..(18): n is a, c, g, or u
aaucccagnggauugggna

SEQ ID NO: 55162 - RNA, 20 nt, Artificial Sequence
  Synthetic
  misc_feature (10)..(10): n is a, c, g, or u
  misc_feature (19)..(19): n is a, c, g, or u
gaaucccagnggauugggna

SEQ ID NO: 55163 - RNA, 21 nt, Artificial Sequence
  Synthetic
  misc_feature (11)..(11): n is a, c, g, or u
  misc_feature (20)..(20): n is a, c, g, or u
agaaucccagnggauugggna

SEQ ID NO: 55164 - RNA, 22 nt, Artificial Sequence
  Synthetic
  misc_feature (12)..(12): n is a, c, g, or u
  misc_feature (21)..(21): n is a, c, g, or u
aagaaucccagnggauugggna

SEQ ID NO: 55165 - RNA, 23 nt, Artificial Sequence
  Synthetic
  misc_feature (13)..(13): n is a, c, g, or u
  misc_feature (22)..(22): n is a, c, g, or u
aaagaaucccagnggauugggna

SEQ ID NO: 55166 - RNA, 24 nt, Artificial Sequence
  Synthetic
  misc_feature (14)..(14): n is a, c, g, or u
  misc_feature (23)..(23): n is a, c, g, or u
gaaagaaucccagnggauugggna

SEQ ID NO: 55167 - RNA, 18 nt, Artificial Sequence
  Synthetic
  misc_feature (2)..(2): n is a, c, g, or u
  misc_feature (17)..(17): n is a, c, g, or u
anccgagcagccauggna

SEQ ID NO: 55168 - RNA, 19 nt, Artificial Sequence
  Synthetic
  misc_feature (3)..(3): n is a, c, g, or u
  misc_feature (18)..(18): n is a, c, g, or u
canccgagcagccauggna

SEQ ID NO: 55169 - RNA, 20 nt, Artificial Sequence
  Synthetic
  misc_feature (4)..(4): n is a, c, g, or u
  misc_feature (19)..(19): n is a, c, g, or u
acanccgagcagccauggna

SEQ ID NO: 55170 - RNA, 21 nt, Artificial Sequence
  Synthetic
  misc_feature (5)..(5): n is a, c, g, or u
  misc_feature (20)..(20): n is a, c, g, or u
cacanccgagcagccauggna

SEQ ID NO: 55171 - RNA, 22 nt, Artificial Sequence
  Synthetic
  misc_feature (6)..(6): n is a, c, g, or u
  misc_feature (21)..(21): n is a, c, g, or u
gcacanccgagcagccauggna

SEQ ID NO: 55172 - RNA, 23 nt, Artificial Sequence
  Synthetic
  misc_feature (7)..(7): n is a, c, g, or u
  misc_feature (22)..(22): n is a, c, g, or u
agcacanccgagcagccauggna

SEQ ID NO: 55173 - RNA, 24 nt, Artificial Sequence
  Synthetic
  misc_feature (8)..(8): n is a, c, g, or u
  misc_feature (23)..(23): n is a, c, g, or u
cagcacanccgagcagccauggna

SEQ ID NO: 55174 - RNA, 18 nt, Artificial Sequence
  Synthetic
  misc_feature (1)..(1): n is a, c, g, or u
  misc_feature (7)..(8): n is a, c, g, or u
  misc_feature (17)..(17): n is a, c, g, or u
nuaucannucuugaugna

SEQ ID NO: 55175 - RNA, 19 nt, Artificial Sequence
  Synthetic
  misc_feature (1)..(2): n is a, c, g, or u
  misc_feature (8)..(9): n is a, c, g, or u
  misc_feature (18)..(18): n is a, c, g, or u
nnuaucannucuugaugna

SEQ ID NO: 55176 - RNA, 20 nt, Artificial Sequence
  Synthetic
  misc_feature (1)..(3): n is a, c, g, or u
  misc_feature (9)..(10): n is a, c, g, or u
  misc_feature (19)..(19): n is a, c, g, or u
nnnuaucannucuugaugna

SEQ ID NO: 55177 - RNA, 21 nt, Artificial Sequence
  Synthetic
  misc_feature (2)..(4): n is a, c, g, or u
  misc_feature (10)..(11): n is a, c, g, or u
  misc_feature (20)..(20): n is a, c, g, or u
unnnuaucannucuugaugna

SEQ ID NO: 55178 - RNA, 22 nt, Artificial Sequence
  Synthetic
  misc_feature (3)..(5): n is a, c, g, or u
  misc_feature (11)..(12): n is a, c, g, or u
  misc_feature (21)..(21): n is a, c, g, or u
uunnnuaucannucuugaugna

SEQ ID NO: 55179 - RNA, 23 nt, Artificial Sequence
  Synthetic
  misc_feature (4)..(6): n is a, c, g, or u
  misc_feature (12)..(13): n is a, c, g, or u
  misc_feature (22)..(22): n is a, c, g, or u
uuunnnuaucannucuugaugna

SEQ ID NO: 55180 - RNA, 24 nt, Artificial Sequence
  Synthetic
  misc_feature (5)..(7): n is a, c, g, or u
  misc_feature (13)..(14): n is a, c, g, or u
  misc_feature (23)..(23): n is a, c, g, or u
auuunnnuaucannucuugaugna

SEQ ID NO: 55181 - RNA, 18 nt, Artificial Sequence
  Synthetic
  misc_feature (1)..(1): n is a, c, g, or u
  misc_feature (11)..(11): n is a, c, g, or u
  misc_feature (17)..(17): n is a, c, g, or u
nuccccaacunccaauna

SEQ ID NO: 55182 - RNA, 19 nt, Artificial Sequence
  Synthetic
  misc_feature (2)..(2): n is a, c, g, or u
  misc_feature (12)..(12): n is a, c, g, or u
  misc_feature (18)..(18): n is a, c, g, or u
gnuccccaacunccaauna

SEQ ID NO: 55183 - RNA, 20 nt, Artificial Sequence
  Synthetic
  misc_feature (3)..(3): n is a, c, g, or u
  misc_feature (13)..(13): n is a, c, g, or u
  misc_feature (19)..(19): n is a, c, g, or u
ugnuccccaacunccaauna

SEQ ID NO: 55184 - RNA, 21 nt, Artificial Sequence
  Synthetic
  misc_feature (4)..(4): n is a, c, g, or u
  misc_feature (14)..(14): n is a, c, g, or u
  misc_feature (20)..(20): n is a, c, g, or u
augnuccccaacunccaauna

SEQ ID NO: 55185 - RNA, 22 nt, Artificial Sequence
  Synthetic
  misc_feature (5)..(5): n is a, c, g, or u
  misc_feature (15)..(15): n is a, c, g, or u
  misc_feature (21)..(21): n is a, c, g, or u
aaugnuccccaacunccaauna

SEQ ID NO: 55186 - RNA, 23 nt, Artificial Sequence
  Synthetic
  misc_feature (6)..(6): n is a, c, g, or u
  misc_feature (16)..(16): n is a, c, g, or u
  misc_feature (22)..(22): n is a, c, g, or u
uaaugnuccccaacunccaauna

SEQ ID NO: 55187 - RNA, 24 nt, Artificial Sequence
  Synthetic
  misc_feature (7)..(7): n is a, c, g, or u
  misc_feature (17)..(17): n is a, c, g, or u
  misc_feature (23)..(23): n is a, c, g, or u
guaaugnuccccaacunccaauna

SEQ ID NO: 55188 - RNA, 18 nt, Artificial Sequence
  Synthetic
  misc_feature (11)..(11): n is a, c, g, or u
  misc_feature (17)..(17): n is a, c, g, or u
aagccuguuungcaguna

SEQ ID NO: 55189 - RNA, 19 nt, Artificial Sequence
  Synthetic
  misc_feature (12)..(12): n is a, c, g, or u
  misc_feature (18)..(18): n is a, c, g, or u
aaagccuguuungcaguna

SEQ ID NO: 55190 - RNA, 20 nt, Artificial Sequence
  Synthetic
  misc_feature (13)..(13): n is a, c, g, or u
  misc_feature (19)..(19): n is a, c, g, or u
aaaagccuguuungcaguna

SEQ ID NO: 55191 - RNA, 21 nt, Artificial Sequence
  Synthetic
  misc_feature (14)..(14): n is a, c, g, or u
  misc_feature (20)..(20): n is a, c, g, or u
caaaagccuguuungcaguna

SEQ ID NO: 55192 - RNA, 22 nt, Artificial Sequence
  Synthetic
  misc_feature (15)..(15): n is a, c, g, or u
  misc_feature (21)..(21): n is a, c, g, or u
acaaaagccuguuungcaguna

SEQ ID NO: 55193 - RNA, 23 nt, Artificial Sequence
  Synthetic
  misc_feature (16)..(16): n is a, c, g, or u
  misc_feature (22)..(22): n is a, c, g, or u
gacaaaagccuguuungcaguna

SEQ ID NO: 55194 - RNA, 24 nt, Artificial Sequence
  Synthetic
  misc_feature (17)..(17): n is a, c, g, or u
  misc_feature (23)..(23): n is a, c, g, or u
agacaaaagccuguuungcaguna

SEQ ID NO: 55195 - RNA, 18 nt, Artificial Sequence
  Synthetic
  misc_feature (14)..(14): n is a, c, g, or u
  misc_feature (17)..(17): n is a, c, g, or u
ucaauucauuuuunguna

SEQ ID NO: 55196 - RNA, 19 nt, Artificial Sequence
  Synthetic
  misc_feature (15)..(15): n is a, c, g, or u
  misc_feature (18)..(18): n is a, c, g, or u
cucaauucauuuuunguna

SEQ ID NO: 55197 - RNA, 20 nt, Artificial Sequence
  Synthetic
  misc_feature (16)..(16): n is a, c, g, or u
  misc_feature (19)..(19): n is a, c, g, or u
ucucaauucauuuuunguna

SEQ ID NO: 55198 - RNA, 21 nt, Artificial Sequence
  Synthetic
  misc_feature (17)..(17): n is a, c, g, or u
  misc_feature (20)..(20): n is a, c, g, or u
uucucaauucauuuuunguna

SEQ ID NO: 55199 - RNA, 22 nt, Artificial Sequence
  Synthetic
  misc_feature (18)..(18): n is a, c, g, or u
  misc_feature (21)..(21): n is a, c, g, or u
cuucucaauucauuuuunguna

SEQ ID NO: 55200 - RNA, 23 nt, Artificial Sequence
  Synthetic
  misc_feature (1)..(1): n is a, c, g, or u
  misc_feature (19)..(19): n is a, c, g, or u
  misc_feature (22)..(22): n is a, c, g, or u
ncuucucaauucauuuuunguna

SEQ ID NO: 55201 - RNA, 24 nt, Artificial Sequence
  Synthetic
  misc_feature (2)..(2): n is a, c, g, or u
  misc_feature (20)..(20): n is a, c, g, or u
  misc_feature (23)..(23): n is a, c, g, or u
ancuucucaauucauuuuunguna

SEQ ID NO: 55202 - RNA, 18 nt, Artificial Sequence
  Synthetic
  misc_feature (8)..(8): n is a, c, g, or u
  misc_feature (11)..(11): n is a, c, g, or u
  misc_feature (17)..(17): n is a, c, g, or u
uuguuuunganguauuna

SEQ ID NO: 55203 - RNA, 19 nt, Artificial Sequence
  Synthetic
  misc_feature (9)..(9): n is a, c, g, or u
  misc_feature (12)..(12): n is a, c, g, or u
  misc_feature (18)..(18): n is a, c, g, or u
uuuguuuunganguauuna

SEQ ID NO: 55204 - RNA, 20 nt, Artificial Sequence
  Synthetic
  misc_feature (10)..(10): n is a, c, g, or u
  misc_feature (13)..(13): n is a, c, g, or u
  misc_feature (19)..(19): n is a, c, g, or u
uuuuguuuunganguauuna

SEQ ID NO: 55205 - RNA, 21 nt, Artificial Sequence
  Synthetic
  misc_feature (11)..(11): n is a, c, g, or u
  misc_feature (14)..(14): n is a, c, g, or u
  misc_feature (20)..(20): n is a, c, g, or u
uuuuuguuuunganguauuna

SEQ ID NO: 55206 - RNA, 22 nt, Artificial Sequence
  Synthetic
  misc_feature (12)..(12): n is a, c, g, or u
  misc_feature (15)..(15): n is a, c, g, or u
  misc_feature (21)..(21): n is a, c, g, or u
cuuuuuguuuunganguauuna

SEQ ID NO: 55207 - RNA, 23 nt, Artificial Sequence
  Synthetic
  misc_feature (13)..(13): n is a, c, g, or u
  misc_feature (16)..(16): n is a, c, g, or u
  misc_feature (22)..(22): n is a, c, g, or u
ucuuuuuguuuunganguauuna

SEQ ID NO: 55208 - RNA, 24 nt, Artificial Sequence
  Synthetic
  misc_feature (14)..(14): n is a, c, g, or u
  misc_feature (17)..(17): n is a, c, g, or u
  misc_feature (23)..(23): n is a, c, g, or u
aucuuuuuguuuunganguauuna

SEQ ID NO: 55209 - RNA, 18 nt, Artificial Sequence
  Synthetic
  misc_feature (12)..(12): n is a, c, g, or u
  misc_feature (17)..(17): n is a, c, g, or u
agguucauguanuguuna

SEQ ID NO: 55210 - RNA, 19 nt, Artificial Sequence
  Synthetic
  misc_feature (13)..(13): n is a, c, g, or u
  misc_feature (18)..(18): n is a, c, g, or u
aagguucauguanuguuna

SEQ ID NO: 55211 - RNA, 20 nt, Artificial Sequence
  Synthetic
  misc_feature (14)..(14): n is a, c, g, or u
  misc_feature (19)..(19): n is a, c, g, or u
aaagguucauguanuguuna

SEQ ID NO: 55212 - RNA, 21 nt, Artificial Sequence
  Synthetic
  misc_feature (15)..(15): n is a, c, g, or u
  misc_feature (20)..(20): n is a, c, g, or u
uaaagguucauguanuguuna

SEQ ID NO: 55213 - RNA, 22 nt, Artificial Sequence
  Synthetic
  misc_feature (16)..(16): n is a, c, g, or u
  misc_feature (21)..(21): n is a, c, g, or u
guaaagguucauguanuguuna

SEQ ID NO: 55214 - RNA, 23 nt, Artificial Sequence
  Synthetic
  misc_feature (17)..(17): n is a, c, g, or u
  misc_feature (22)..(22): n is a, c, g, or u
gguaaagguucauguanuguuna

SEQ ID NO: 55215 - RNA, 24 nt, Artificial Sequence
  Synthetic
  misc_feature (18)..(18): n is a, c, g, or u
  misc_feature (23)..(23): n is a, c, g, or u
ggguaaagguucauguanuguuna

SEQ ID NO: 55216 - RNA, 18 nt, Artificial Sequence
  Synthetic
gccaccagcaggaaaaua

SEQ ID NO: 55217 - RNA, 19 nt, Artificial Sequence
  Synthetic
agccaccagcaggaaaaua

SEQ ID NO: 55218 - RNA, 20 nt, Artificial Sequence
  Synthetic
gagccaccagcaggaaaaua

SEQ ID NO: 55219 - RNA, 21 nt, Artificial Sequence
  Synthetic
ggagccaccagcaggaaaaua

SEQ ID NO: 55220 - RNA, 22 nt, Artificial Sequence
  Synthetic
uggagccaccagcaggaaaaua

SEQ ID NO: 55221 - RNA, 23 nt, Artificial Sequence
  Synthetic
cuggagccaccagcaggaaaaua

SEQ ID NO: 55222 - RNA, 24 nt, Artificial Sequence
  Synthetic
acuggagccaccagcaggaaaaua

SEQ ID NO: 55223 - RNA, 18 nt, Artificial Sequence
  Synthetic
  misc_feature (7)..(7): n is a, c, g, or u
uccaaangacaccaaaua

SEQ ID NO: 55224 - RNA, 19 nt, Artificial Sequence
  Synthetic
  misc_feature (8)..(8): n is a, c, g, or u
cuccaaangacaccaaaua

SEQ ID NO: 55225 - RNA, 20 nt, Artificial Sequence
  Synthetic
  misc_feature (9)..(9): n is a, c, g, or u
acuccaaangacaccaaaua

SEQ ID NO: 55226 - RNA, 21 nt, Artificial Sequence
  Synthetic
  misc_feature (10)..(10): n is a, c, g, or u
cacuccaaangacaccaaaua

SEQ ID NO: 55227 - RNA, 22 nt, Artificial Sequence
  Synthetic
  misc_feature (11)..(11): n is a, c, g, or u
acacuccaaangacaccaaaua

SEQ ID NO: 55228 - RNA, 23 nt, Artificial Sequence
  Synthetic
  misc_feature (12)..(12): n is a, c, g, or u
cacacuccaaangacaccaaaua

SEQ ID NO: 55229 - RNA, 24 nt, Artificial Sequence
  Synthetic
  misc_feature (13)..(13): n is a, c, g, or u
ccacacuccaaangacaccaaaua

SEQ ID NO: 55230 - RNA, 18 nt, Artificial Sequence
  Synthetic
gaugugagagaggcaaua

SEQ ID NO: 55231 - RNA, 19 nt, Artificial Sequence
  Synthetic
ugaugugagagaggcaaua

SEQ ID NO: 55232 - RNA, 20 nt, Artificial Sequence
  Synthetic
augaugugagagaggcaaua

SEQ ID NO: 55233 - RNA, 21 nt, Artificial Sequence
  Synthetic
gaugaugugagagaggcaaua

SEQ ID NO: 55234 - RNA, 22 nt, Artificial Sequence
  Synthetic
ugaugaugugagagaggcaaua

SEQ ID NO: 55235 - RNA, 23 nt, Artificial Sequence
  Synthetic
uugaugaugugagagaggcaaua

SEQ ID NO: 55236 - RNA, 24 nt, Artificial Sequence
  Synthetic
auugaugaugugagagaggcaaua

SEQ ID NO: 55237 - RNA, 18 nt, Artificial Sequence
  Synthetic
  misc_feature (10)..(10): n is a, c, g, or u
  misc_feature (13)..(13): n is a, c, g, or u
cauguuagunuunacaua

SEQ ID NO: 55238 - RNA, 19 nt, Artificial Sequence
  Synthetic
  misc_feature (11)..(11): n is a, c, g, or u
  misc_feature (14)..(14): n is a, c, g, or u
ccauguuagunuunacaua

SEQ ID NO: 55239 - RNA, 20 nt, Artificial Sequence
  Synthetic
  misc_feature (12)..(12): n is a, c, g, or u
  misc_feature (15)..(15): n is a, c, g, or u
cccauguuagunuunacaua

SEQ ID NO: 55240 - RNA, 21 nt, Artificial Sequence
  Synthetic
  misc_feature (13)..(13): n is a, c, g, or u
  misc_feature (16)..(16): n is a, c, g, or u
gcccauguuagunuunacaua

SEQ ID NO: 55241 - RNA, 22 nt, Artificial Sequence
  Synthetic
  misc_feature (1)..(1): n is a, c, g, or u
  misc_feature (14)..(14): n is a, c, g, or u
  misc_feature (17)..(17): n is a, c, g, or u
ngcccauguuagunuunacaua

SEQ ID NO: 55242 - RNA, 23 nt, Artificial Sequence
  Synthetic
  misc_feature (2)..(2): n is a, c, g, or u
  misc_feature (15)..(15): n is a, c, g, or u
  misc_feature (18)..(18): n is a, c, g, or u
angcccauguuagunuunacaua

SEQ ID NO: 55243 - RNA, 24 nt, Artificial Sequence
  Synthetic
  misc_feature (3)..(3): n is a, c, g, or u
  misc_feature (16)..(16): n is a, c, g, or u
  misc_feature (19)..(19): n is a, c, g, or u
uangcccauguuagunuunacaua

SEQ ID NO: 55244 - RNA, 18 nt, Artificial Sequence
  Synthetic
aauggauacccacagaua

SEQ ID NO: 55245 - RNA, 19 nt, Artificial Sequence
  Synthetic
aaauggauacccacagaua

SEQ ID NO: 55246 - RNA, 20 nt, Artificial Sequence
  Synthetic
  misc_feature (1)..(1): n is a, c, g, or u
naaauggauacccacagaua

SEQ ID NO: 55247 - RNA, 21 nt, Artificial Sequence
  Synthetic
  misc_feature (2)..(2): n is a, c, g, or u
unaaauggauacccacagaua

SEQ ID NO: 55248 - RNA, 22 nt, Artificial Sequence
  Synthetic
  misc_feature (3)..(3): n is a, c, g, or u
uunaaauggauacccacagaua

SEQ ID NO: 55249 - RNA, 23 nt, Artificial Sequence
  Synthetic
  misc_feature (4)..(4): n is a, c, g, or u
auunaaauggauacccacagaua

SEQ ID NO: 55250 - RNA, 24 nt, Artificial Sequence
  Synthetic
  misc_feature (5)..(5): n is a, c, g, or u
uauunaaauggauacccacagaua

SEQ ID NO: 55251 - RNA, 18 nt, Artificial Sequence
  Synthetic
  misc_feature (13)..(13): n is a, c, g, or u
cagacacauccancgaua

SEQ ID NO: 55252 - RNA, 19 nt, Artificial Sequence
  Synthetic
  misc_feature (14)..(14): n is a, c, g, or u
gcagacacauccancgaua

SEQ ID NO: 55253 - RNA, 20 nt, Artificial Sequence
  Synthetic
  misc_feature (15)..(15): n is a, c, g, or u
cgcagacacauccancgaua

SEQ ID NO: 55254 - RNA, 21 nt, Artificial Sequence
  Synthetic
  misc_feature (16)..(16): n is a, c, g, or u
ccgcagacacauccancgaua

SEQ ID NO: 55255 - RNA, 22 nt, Artificial Sequence
  Synthetic
  misc_feature (17)..(17): n is a, c, g, or u
gccgcagacacauccancgaua

SEQ ID NO: 55256 - RNA, 23 nt, Artificial Sequence
  Synthetic
  misc_feature (18)..(18): n is a, c, g, or u
cgccgcagacacauccancgaua

SEQ ID NO: 55257 - RNA, 24 nt, Artificial Sequence
  Synthetic
  misc_feature (19)..(19): n is a, c, g, or u
acgccgcagacacauccancgaua

SEQ ID NO: 55258 - RNA, 18 nt, Artificial Sequence
  Synthetic
  misc_feature (1)..(1): n is a, c, g, or u
  misc_feature (7)..(7): n is a, c, g, or u
  misc_feature (15)..(15): n is a, c, g, or u
ngcagunauacaggnaua

SEQ ID NO: 55259 - RNA, 19 nt, Artificial Sequence
  Synthetic
  misc_feature (2)..(2): n is a, c, g, or u
  misc_feature (8)..(8): n is a, c, g, or u
  misc_feature (16)..(16): n is a, c, g, or u
ungcagunauacaggnaua

SEQ ID NO: 55260 - RNA, 20 nt, Artificial Sequence
  Synthetic
  misc_feature (3)..(3): n is a, c, g, or u
  misc_feature (9)..(9): n is a, c, g, or u
  misc_feature (17)..(17): n is a, c, g, or u
uungcagunauacaggnaua

SEQ ID NO: 55261 - RNA, 21 nt, Artificial Sequence
  Synthetic
  misc_feature (4)..(4): n is a, c, g, or u
  misc_feature (10)..(10): n is a, c, g, or u
  misc_feature (18)..(18): n is a, c, g, or u
uuungcagunauacaggnaua

SEQ ID NO: 55262 - RNA, 22 nt, Artificial Sequence
  Synthetic
  misc_feature (5)..(5): n is a, c, g, or u
  misc_feature (11)..(11): n is a, c, g, or u
  misc_feature (19)..(19): n is a, c, g, or u
guuungcagunauacaggnaua

SEQ ID NO: 55263 - RNA, 23 nt, Artificial Sequence
  Synthetic
  misc_feature (6)..(6): n is a, c, g, or u
  misc_feature (12)..(12): n is a, c, g, or u
  misc_feature (20)..(20): n is a, c, g, or u
uguuungcagunauacaggnaua

SEQ ID NO: 55264 - RNA, 24 nt, Artificial Sequence
  Synthetic
  misc_feature (7)..(7): n is a, c, g, or u
  misc_feature (13)..(13): n is a, c, g, or u
  misc_feature (21)..(21): n is a, c, g, or u
cuguuungcagunauacaggnaua

SEQ ID NO: 55265 - RNA, 18 nt, Artificial Sequence
  Synthetic
uaccagaucauccauaua

SEQ ID NO: 55266 - RNA, 19 nt, Artificial Sequence
  Synthetic
auaccagaucauccauaua

SEQ ID NO: 55267 - RNA, 20 nt, Artificial Sequence
  Synthetic
aauaccagaucauccauaua

SEQ ID NO: 55268 - RNA, 21 nt, Artificial Sequence
  Synthetic
caauaccagaucauccauaua

SEQ ID NO: 55269 - RNA, 22 nt, Artificial Sequence
  Synthetic
ccaauaccagaucauccauaua

SEQ ID NO: 55270 - RNA, 23 nt, Artificial Sequence
  Synthetic
cccaauaccagaucauccauaua

SEQ ID NO: 55271 - RNA, 24 nt, Artificial Sequence
  Synthetic
ccccaauaccagaucauccauaua

SEQ ID NO: 55272 - RNA, 18 nt, Artificial Sequence
  Synthetic
auugguaacagcgguaua

SEQ ID NO: 55273 - RNA, 19 nt, Artificial Sequence
  Synthetic
aauugguaacagcgguaua

SEQ ID NO: 55274 - RNA, 20 nt, Artificial Sequence
  Synthetic
aaauugguaacagcgguaua

SEQ ID NO: 55275 - RNA, 21 nt, Artificial Sequence
  Synthetic
aaaauugguaacagcgguaua

SEQ ID NO: 55276 - RNA, 22 nt, Artificial Sequence
  Synthetic
gaaaauugguaacagcgguaua

SEQ ID NO: 55277 - RNA, 23 nt, Artificial Sequence
  Synthetic
agaaaauugguaacagcgguaua

SEQ ID NO: 55278 - RNA, 24 nt, Artificial Sequence
  Synthetic
cagaaaauugguaacagcgguaua

SEQ ID NO: 55279 - RNA, 18 nt, Artificial Sequence
  Synthetic
acugaacaaauugcacua

SEQ ID NO: 55280 - RNA, 19 nt, Artificial Sequence
  Synthetic
cacugaacaaauugcacua

SEQ ID NO: 55281 - RNA, 20 nt, Artificial Sequence
  Synthetic
ccacugaacaaauugcacua

SEQ ID NO: 55282 - RNA, 21 nt, Artificial Sequence
  Synthetic
accacugaacaaauugcacua

SEQ ID NO: 55283 - RNA, 22 nt, Artificial Sequence
  Synthetic
caccacugaacaaauugcacua

SEQ ID NO: 55284 - RNA, 23 nt, Artificial Sequence
  Synthetic
gcaccacugaacaaauugcacua

SEQ ID NO: 55285 - RNA, 24 nt, Artificial Sequence
  Synthetic
cgcaccacugaacaaauugcacua

SEQ ID NO: 55286 - RNA, 18 nt, Artificial Sequence
  Synthetic
aaggagguguacuuccua

SEQ ID NO: 55287 - RNA, 19 nt, Artificial Sequence
  Synthetic
  misc_feature (1)..(1): n is a, c, g, or u
naaggagguguacuuccua

SEQ ID NO: 55288 - RNA, 20 nt, Artificial Sequence
  Synthetic
  misc_feature (2)..(2): n is a, c, g, or u
gnaaggagguguacuuccua

SEQ ID NO: 55289 - RNA, 21 nt, Artificial Sequence
  Synthetic
  misc_feature (3)..(3): n is a, c, g, or u
ggnaaggagguguacuuccua

SEQ ID NO: 55290 - RNA, 22 nt, Artificial Sequence
  Synthetic
  misc_feature (4)..(4): n is a, c, g, or u
uggnaaggagguguacuuccua

SEQ ID NO: 55291 - RNA, 23 nt, Artificial Sequence
  Synthetic
  misc_feature (5)..(5): n is a, c, g, or u
auggnaaggagguguacuuccua

SEQ ID NO: 55292 - RNA, 24 nt, Artificial Sequence
  Synthetic
  misc_feature (6)..(6): n is a, c, g, or u
cauggnaaggagguguacuuccua

SEQ ID NO: 55293 - RNA, 18 nt, Artificial Sequence
  Synthetic
  misc_feature (3)..(3): n is a, c, g, or u
  misc_feature (6)..(6): n is a, c, g, or u
ccngcnuuccauaaagua

SEQ ID NO: 55294 - RNA, 19 nt, Artificial Sequence
  Synthetic
  misc_feature (1)..(1): n is a, c, g, or u
  misc_feature (4)..(4): n is a, c, g, or u
  misc_feature (7)..(7): n is a, c, g, or u
nccngcnuuccauaaagua

SEQ ID NO: 55295 - RNA, 20 nt, Artificial Sequence
  Synthetic
  misc_feature (2)..(2): n is a, c, g, or u
  misc_feature (5)..(5): n is a, c, g, or u
  misc_feature (8)..(8): n is a, c, g, or u
unccngcnuuccauaaagua

SEQ ID NO: 55296 - RNA, 21 nt, Artificial Sequence
  Synthetic
  misc_feature (3)..(3): n is a, c, g, or u
  misc_feature (6)..(6): n is a, c, g, or u
  misc_feature (9)..(9): n is a, c, g, or u
aunccngcnuuccauaaagua

SEQ ID NO: 55297 - RNA, 22 nt, Artificial Sequence
  Synthetic
  misc_feature (4)..(4): n is a, c, g, or u
  misc_feature (7)..(7): n is a, c, g, or u
  misc_feature (10)..(10): n is a, c, g, or u
aaunccngcnuuccauaaagua

SEQ ID NO: 55298 - RNA, 23 nt, Artificial Sequence
  Synthetic
  misc_feature (1)..(1): n is a, c, g, or u
  misc_feature (5)..(5): n is a, c, g, or u
  misc_feature (8)..(8): n is a, c, g, or u
  misc_feature (11)..(11): n is a, c, g, or u
naaunccngcnuuccauaaagua

SEQ ID NO: 55299 - RNA, 24 nt, Artificial Sequence
  Synthetic
  misc_feature (2)..(2): n is a, c, g, or u
  misc_feature (6)..(6): n is a, c, g, or u
  misc_feature (9)..(9): n is a, c, g, or u
  misc_feature (12)..(12): n is a, c, g, or u
anaaunccngcnuuccauaaagua

SEQ ID NO: 55300 - RNA, 18 nt, Artificial Sequence
  Synthetic
  misc_feature (3)..(3): n is a, c, g, or u
  misc_feature (8)..(8): n is a, c, g, or u
  misc_feature (12)..(12): n is a, c, g, or u
uunaaagnaggnacagua

SEQ ID NO: 55301 - RNA, 19 nt, Artificial Sequence
  Synthetic
  misc_feature (4)..(4): n is a, c, g, or u
  misc_feature (9)..(9): n is a, c, g, or u
  misc_feature (13)..(13): n is a, c, g, or u
auunaaagnaggnacagua

SEQ ID NO: 55302 - RNA, 20 nt, Artificial Sequence
  Synthetic
  misc_feature (5)..(5): n is a, c, g, or u
  misc_feature (10)..(10): n is a, c, g, or u
  misc_feature (14)..(14): n is a, c, g, or u
gauunaaagnaggnacagua

SEQ ID NO: 55303 - RNA, 21 nt, Artificial Sequence
  Synthetic
  misc_feature (6)..(6): n is a, c, g, or u
  misc_feature (11)..(11): n is a, c, g, or u
  misc_feature (15)..(15): n is a, c, g, or u
ggauunaaagnaggnacagua

SEQ ID NO: 55304 - RNA, 22 nt, Artificial Sequence
  Synthetic
  misc_feature (7)..(7): n is a, c, g, or u
  misc_feature (12)..(12): n is a, c, g, or u
  misc_feature (16)..(16): n is a, c, g, or u
aggauunaaagnaggnacagua

SEQ ID NO: 55305 - RNA, 23 nt, Artificial Sequence
  Synthetic
  misc_feature (1)..(1): n is a, c, g, or u
  misc_feature (8)..(8): n is a, c, g, or u
  misc_feature (13)..(13): n is a, c, g, or u
  misc_feature (17)..(17): n is a, c, g, or u
naggauunaaagnaggnacagua

SEQ ID NO: 55306 - RNA, 24 nt, Artificial Sequence
  Synthetic
  misc_feature (2)..(2): n is a, c, g, or u
  misc_feature (9)..(9): n is a, c, g, or u
  misc_feature (14)..(14): n is a, c, g, or u
  misc_feature (18)..(18): n is a, c, g, or u
unaggauunaaagnaggnacagua

SEQ ID NO: 55307 - RNA, 18 nt, Artificial Sequence
  Synthetic
cagcgccgacgggacgua

SEQ ID NO: 55308 - RNA, 19 nt, Artificial Sequence
  Synthetic
ucagcgccgacgggacgua

SEQ ID NO: 55309 - RNA, 20 nt, Artificial Sequence
  Synthetic
uucagcgccgacgggacgua

SEQ ID NO: 55310 - RNA, 21 nt, Artificial Sequence
  Synthetic
auucagcgccgacgggacgua

SEQ ID NO: 55311 - RNA, 22 nt, Artificial Sequence
  Synthetic
gauucagcgccgacgggacgua

SEQ ID NO: 55312 - RNA, 23 nt, Artificial Sequence
  Synthetic
ggauucagcgccgacgggacgua

SEQ ID NO: 55313 - RNA, 24 nt, Artificial Sequence
  Synthetic
  misc_feature (1)..(1): n is a, c, g, or u
nggauucagcgccgacgggacgua

SEQ ID NO: 55314 - RNA, 18 nt, Artificial Sequence
  Synthetic
  misc_feature (11)..(11): n is a, c, g, or u
agacggggagnccgcgua

SEQ ID NO: 55315 - RNA, 19 nt, Artificial Sequence
  Synthetic
  misc_feature (12)..(12): n is a, c, g, or u
cagacggggagnccgcgua

SEQ ID NO: 55316 - RNA, 20 nt, Artificial Sequence
  Synthetic
  misc_feature (13)..(13): n is a, c, g, or u
acagacggggagnccgcgua

SEQ ID NO: 55317 - RNA, 21 nt, Artificial Sequence
  Synthetic
  misc_feature (14)..(14): n is a, c, g, or u
aacagacggggagnccgcgua

SEQ ID NO: 55318 - RNA, 22 nt, Artificial Sequence
  Synthetic
  misc_feature (15)..(15): n is a, c, g, or u
gaacagacggggagnccgcgua

SEQ ID NO: 55319 - RNA, 23 nt, Artificial Sequence
  Synthetic
  misc_feature (16)..(16): n is a, c, g, or u
ggaacagacggggagnccgcgua

SEQ ID NO: 55320 - RNA, 24 nt, Artificial Sequence
  Synthetic
  misc_feature (17)..(17): n is a, c, g, or u
aggaacagacggggagnccgcgua

SEQ ID NO: 55321 - RNA, 18 nt, Artificial Sequence
  Synthetic
aaauugguaacagcggua

SEQ ID NO: 55322 - RNA, 19 nt, Artificial Sequence
  Synthetic
aaaauugguaacagcggua

SEQ ID NO: 55323 - RNA, 20 nt, Artificial Sequence
  Synthetic
gaaaauugguaacagcggua

SEQ ID NO: 55324 - RNA, 21 nt, Artificial Sequence
  Synthetic
agaaaauugguaacagcggua

SEQ ID NO: 55325 - RNA, 22 nt, Artificial Sequence
  Synthetic
cagaaaauugguaacagcggua

SEQ ID NO: 55326 - RNA, 23 nt, Artificial Sequence
  Synthetic
acagaaaauugguaacagcggua

SEQ ID NO: 55327 - RNA, 24 nt, Artificial Sequence
  Synthetic
aacagaaaauugguaacagcggua

SEQ ID NO: 55328 - RNA, 18 nt, Artificial Sequence
  Synthetic
  misc_feature (12)..(12): n is a, c, g, or u
  misc_feature (15)..(15): n is a, c, g, or u
cuuuuuguuuungangua

SEQ ID NO: 55329 - RNA, 19 nt, Artificial Sequence
  Synthetic
  misc_feature (13)..(13): n is a, c, g, or u
  misc_feature (16)..(16): n is a, c, g, or u
ucuuuuuguuuungangua

SEQ ID NO: 55330 - RNA, 20 nt, Artificial Sequence
  Synthetic
  misc_feature (14)..(14): n is a, c, g, or u
  misc_feature (17)..(17): n is a, c, g, or u
aucuuuuuguuuungangua

SEQ ID NO: 55331 - RNA, 21 nt, Artificial Sequence
  Synthetic
  misc_feature (15)..(15): n is a, c, g, or u
  misc_feature (18)..(18): n is a, c, g, or u
caucuuuuuguuuungangua

SEQ ID NO: 55332 - RNA, 22 nt, Artificial Sequence
  Synthetic
  misc_feature (16)..(16): n is a, c, g, or u
  misc_feature (19)..(19): n is a, c, g, or u
ccaucuuuuuguuuungangua

SEQ ID NO: 55333 - RNA, 23 nt, Artificial Sequence
  Synthetic
  misc_feature (17)..(17): n is a, c, g, or u
  misc_feature (20)..(20): n is a, c, g, or u
cccaucuuuuuguuuungangua

SEQ ID NO: 55334 - RNA, 24 nt, Artificial Sequence
  Synthetic
  misc_feature (18)..(18): n is a, c, g, or u
  misc_feature (21)..(21): n is a, c, g, or u
ccccaucuuuuuguuuungangua

SEQ ID NO: 55335 - RNA, 18 nt, Artificial Sequence
  Synthetic
  misc_feature (1)..(1): n is a, c, g, or u
  misc_feature (15)..(15): n is a, c, g, or u
nucuaaagcaucccngua

SEQ ID NO: 55336 - RNA, 19 nt, Artificial Sequence
  Synthetic
  misc_feature (2)..(2): n is a, c, g, or u
  misc_feature (16)..(16): n is a, c, g, or u
anucuaaagcaucccngua

SEQ ID NO: 55337 - RNA, 20 nt, Artificial Sequence
  Synthetic
  misc_feature (3)..(3): n is a, c, g, or u
  misc_feature (17)..(17): n is a, c, g, or u
ganucuaaagcaucccngua

SEQ ID NO: 55338 - RNA, 21 nt, Artificial Sequence
  Synthetic
  misc_feature (4)..(4): n is a, c, g, or u
  misc_feature (18)..(18): n is a, c, g, or u
uganucuaaagcaucccngua

SEQ ID NO: 55339 - RNA, 22 nt, Artificial Sequence
  Synthetic
  misc_feature (5)..(5): n is a, c, g, or u
  misc_feature (19)..(19): n is a, c, g, or u
guganucuaaagcaucccngua

SEQ ID NO: 55340 - RNA, 23 nt, Artificial Sequence
  Synthetic
  misc_feature (6)..(6): n is a, c, g, or u
  misc_feature (20)..(20): n is a, c, g, or u
gguganucuaaagcaucccngua

SEQ ID NO: 55341 - RNA, 24 nt, Artificial Sequence
  Synthetic
  misc_feature (1)..(1): n is a, c, g, or u
  misc_feature (7)..(7): n is a, c, g, or u
  misc_feature (21)..(21): n is a, c, g, or u
ngguganucuaaagcaucccngua

SEQ ID NO: 55342 - RNA, 18 nt, Artificial Sequence
  Synthetic
  misc_feature (5)..(5): n is a, c, g, or u
  misc_feature (16)..(16): n is a, c, g, or u
ucgungauccuggaanua

SEQ ID NO: 55343 - RNA, 19 nt, Artificial Sequence
  Synthetic
  misc_feature (6)..(6): n is a, c, g, or u
  misc_feature (17)..(17): n is a, c, g, or u
gucgungauccuggaanua

SEQ ID NO: 55344 - RNA, 20 nt, Artificial Sequence
  Synthetic
  misc_feature (7)..(7): n is a, c, g, or u
  misc_feature (18)..(18): n is a, c, g, or u
ggucgungauccuggaanua

SEQ ID NO: 55345 - RNA, 21 nt, Artificial Sequence
  Synthetic
  misc_feature (8)..(8): n is a, c, g, or u
  misc_feature (19)..(19): n is a, c, g, or u
uggucgungauccuggaanua

SEQ ID NO: 55346 - RNA, 22 nt, Artificial Sequence
  Synthetic
  misc_feature (9)..(9): n is a, c, g, or u
  misc_feature (20)..(20): n is a, c, g, or u
guggucgungauccuggaanua

SEQ ID NO: 55347 - RNA, 23 nt, Artificial Sequence
  Synthetic
  misc_feature (10)..(10): n is a, c, g, or u
  misc_feature (21)..(21): n is a, c, g, or u
gguggucgungauccuggaanua

SEQ ID NO: 55348 - RNA, 24 nt, Artificial Sequence
  Synthetic
  misc_feature (11)..(11): n is a, c, g, or u
  misc_feature (22)..(22): n is a, c, g, or u
ugguggucgungauccuggaanua

SEQ ID NO: 55349 - RNA, 18 nt, Artificial Sequence
  Synthetic
  misc_feature (16)..(16): n is a, c, g, or u
gccuacagccuccuanua

SEQ ID NO: 55350 - RNA, 19 nt, Artificial Sequence
  Synthetic
  misc_feature (17)..(17): n is a, c, g, or u
ugccuacagccuccuanua

SEQ ID NO: 55351 - RNA, 20 nt, Artificial Sequence
  Synthetic
  misc_feature (18)..(18): n is a, c, g, or u
augccuacagccuccuanua

SEQ ID NO: 55352 - RNA, 21 nt, Artificial Sequence
  Synthetic
  misc_feature (19)..(19): n is a, c, g, or u
uaugccuacagccuccuanua

SEQ ID NO: 55353 - RNA, 22 nt, Artificial Sequence
  Synthetic
  misc_feature (20)..(20): n is a, c, g, or u
uuaugccuacagccuccuanua

SEQ ID NO: 55354 - RNA, 23 nt, Artificial Sequence
  Synthetic
  misc_feature (21)..(21): n is a, c, g, or u
uuuaugccuacagccuccuanua

SEQ ID NO: 55355 - RNA, 24 nt, Artificial Sequence
  Synthetic
  misc_feature (22)..(22): n is a, c, g, or u
auuuaugccuacagccuccuanua

SEQ ID NO: 55356 - RNA, 18 nt, Artificial Sequence
  Synthetic
  misc_feature (16)..(16): n is a, c, g, or u
auguuguccauguucnua

SEQ ID NO: 55357 - RNA, 19 nt, Artificial Sequence
  Synthetic
  misc_feature (17)..(17): n is a, c, g, or u
gauguuguccauguucnua

SEQ ID NO: 55358 - RNA, 20 nt, Artificial Sequence
  Synthetic
  misc_feature (18)..(18): n is a, c, g, or u
ugauguuguccauguucnua

SEQ ID NO: 55359 - RNA, 21 nt, Artificial Sequence
  Synthetic
  misc_feature (19)..(19): n is a, c, g, or u
gugauguuguccauguucnua

SEQ ID NO: 55360 - RNA, 22 nt, Artificial Sequence
  Synthetic
  misc_feature (20)..(20): n is a, c, g, or u
ugugauguuguccauguucnua

SEQ ID NO: 55361 - RNA, 23 nt, Artificial Sequence
  Synthetic
  misc_feature (21)..(21): n is a, c, g, or u
augugauguuguccauguucnua

SEQ ID NO: 55362 - RNA, 24 nt, Artificial Sequence
  Synthetic
  misc_feature (22)..(22): n is a, c, g, or u
gaugugauguuguccauguucnua

SEQ ID NO: 55363 - RNA, 18 nt, Artificial Sequence
  Synthetic
augaacaaaagaugauua

SEQ ID NO: 55364 - RNA, 19 nt, Artificial Sequence
  Synthetic
caugaacaaaagaugauua

SEQ ID NO: 55365 - RNA, 20 nt, Artificial Sequence
  Synthetic
acaugaacaaaagaugauua

SEQ ID NO: 55366 - RNA, 21 nt, Artificial Sequence
  Synthetic
gacaugaacaaaagaugauua

SEQ ID NO: 55367 - RNA, 22 nt, Artificial Sequence
  Synthetic
ggacaugaacaaaagaugauua

SEQ ID NO: 55368 - RNA, 23 nt, Artificial Sequence
  Synthetic
  misc_feature (1)..(1): n is a, c, g, or u
nggacaugaacaaaagaugauua

SEQ ID NO: 55369 - RNA, 24 nt, Artificial Sequence
  Synthetic
  misc_feature (2)..(2): n is a, c, g, or u
unggacaugaacaaaagaugauua

SEQ ID NO: 55370 - RNA, 18 nt, Artificial Sequence
  Synthetic
  misc_feature (8)..(8): n is a, c, g, or u
  misc_feature (14)..(15): n is a, c, g, or u
aguccaanaguccnnuua

SEQ ID NO: 55371 - RNA, 19 nt, Artificial Sequence
  Synthetic
  misc_feature (9)..(9): n is a, c, g, or u
  misc_feature (15)..(16): n is a, c, g, or u
aaguccaanaguccnnuua

SEQ ID NO: 55372 - RNA, 20 nt, Artificial Sequence
  Synthetic
  misc_feature (10)..(10): n is a, c, g, or u
  misc_feature (16)..(17): n is a, c, g, or u
aaaguccaanaguccnnuua

SEQ ID NO: 55373 - RNA, 21 nt, Artificial Sequence
  Synthetic
  misc_feature (11)..(11): n is a, c, g, or u
  misc_feature (17)..(18): n is a, c, g, or u
gaaaguccaanaguccnnuua

SEQ ID NO: 55374 - RNA, 22 nt, Artificial Sequence
  Synthetic
  misc_feature (12)..(12): n is a, c, g, or u
  misc_feature (18)..(19): n is a, c, g, or u
ugaaaguccaanaguccnnuua

SEQ ID NO: 55375 - RNA, 23 nt, Artificial Sequence
  Synthetic
  misc_feature (13)..(13): n is a, c, g, or u
  misc_feature (19)..(20): n is a, c, g, or u
cugaaaguccaanaguccnnuua

SEQ ID NO: 55376 - RNA, 24 nt, Artificial Sequence
  Synthetic
  misc_feature (14)..(14): n is a, c, g, or u
  misc_feature (20)..(21): n is a, c, g, or u
ccugaaaguccaanaguccnnuua

SEQ ID NO: 55377 - RNA, 18 nt, Artificial Sequence
  Synthetic
  misc_feature (2)..(2): n is a, c, g, or u
  misc_feature (8)..(8): n is a, c, g, or u
  misc_feature (11)..(11): n is a, c, g, or u
anucaaunggncgauuua

SEQ ID NO: 55378 - RNA, 19 nt, Artificial Sequence
  Synthetic
  misc_feature (3)..(3): n is a, c, g, or u
  misc_feature (9)..(9): n is a, c, g, or u
  misc_feature (12)..(12): n is a, c, g, or u
canucaaunggncgauuua

SEQ ID NO: 55379 - RNA, 20 nt, Artificial Sequence
  Synthetic
  misc_feature (4)..(4): n is a, c, g, or u
  misc_feature (10)..(10): n is a, c, g, or u
  misc_feature (13)..(13): n is a, c, g, or u
ccanucaaunggncgauuua

SEQ ID NO: 55380 - RNA, 21 nt, Artificial Sequence
  Synthetic
  misc_feature (5)..(5): n is a, c, g, or u
  misc_feature (11)..(11): n is a, c, g, or u
  misc_feature (14)..(14): n is a, c, g, or u
uccanucaaunggncgauuua

SEQ ID NO: 55381 - RNA, 22 nt, Artificial Sequence
  Synthetic
  misc_feature (6)..(6): n is a, c, g, or u
  misc_feature (12)..(12): n is a, c, g, or u
  misc_feature (15)..(15): n is a, c, g, or u
uuccanucaaunggncgauuua

SEQ ID NO: 55382 - RNA, 23 nt, Artificial Sequence
  Synthetic
  misc_feature (7)..(7): n is a, c, g, or u
  misc_feature (13)..(13): n is a, c, g, or u
  misc_feature (16)..(16): n is a, c, g, or u
uuuccanucaaunggncgauuua

SEQ ID NO: 55383 - RNA, 24 nt, Artificial Sequence
  Synthetic
  misc_feature (8)..(8): n is a, c, g, or u
  misc_feature (14)..(14): n is a, c, g, or u
  misc_feature (17)..(17): n is a, c, g, or u
cuuuccanucaaunggncgauuua

SEQ ID NO: 55384 - RNA, 18 nt, Artificial Sequence
  Synthetic
gaagcuccaaauucuuua

SEQ ID NO: 55385 - RNA, 19 nt, Artificial Sequence
  Synthetic
agaagcuccaaauucuuua

SEQ ID NO: 55386 - RNA, 20 nt, Artificial Sequence
  Synthetic
cagaagcuccaaauucuuua

SEQ ID NO: 55387 - RNA, 21 nt, Artificial Sequence
  Synthetic
acagaagcuccaaauucuuua

SEQ ID NO: 55388 - RNA, 22 nt, Artificial Sequence
  Synthetic
cacagaagcuccaaauucuuua

SEQ ID NO: 55389 - RNA, 23 nt, Artificial Sequence
  Synthetic
ccacagaagcuccaaauucuuua

SEQ ID NO: 55390 - RNA, 24 nt, Artificial Sequence
  Synthetic
uccacagaagcuccaaauucuuua

SEQ ID NO: 55391 - RNA, 18 nt, Artificial Sequence
  Synthetic
  misc_feature (6)..(6): n is a, c, g, or u
  misc_feature (9)..(9): n is a, c, g, or u
cagcancangagggaaac

SEQ ID NO: 55392 - RNA, 19 nt, Artificial Sequence
  Synthetic
  misc_feature (7)..(7): n is a, c, g, or u
  misc_feature (10)..(10): n is a, c, g, or u
acagcancangagggaaac

SEQ ID NO: 55393 - RNA, 20 nt, Artificial Sequence
  Synthetic
  misc_feature (8)..(8): n is a, c, g, or u
  misc_feature (11)..(11): n is a, c, g, or u
aacagcancangagggaaac

SEQ ID NO: 55394 - RNA, 21 nt, Artificial Sequence
  Synthetic
  misc_feature (9)..(9): n is a, c, g, or u
  misc_feature (12)..(12): n is a, c, g, or u
gaacagcancangagggaaac

SEQ ID NO: 55395 - RNA, 22 nt, Artificial Sequence
  Synthetic
  misc_feature (10)..(10): n is a, c, g, or u
  misc_feature (13)..(13): n is a, c, g, or u
ggaacagcancangagggaaac

SEQ ID NO: 55396 - RNA, 23 nt, Artificial Sequence
  Synthetic
  misc_feature (11)..(11): n is a, c, g, or u
  misc_feature (14)..(14): n is a, c, g, or u
uggaacagcancangagggaaac

SEQ ID NO: 55397 - RNA, 24 nt, Artificial Sequence
  Synthetic
  misc_feature (12)..(12): n is a, c, g, or u
  misc_feature (15)..(15): n is a, c, g, or u
uuggaacagcancangagggaaac

SEQ ID NO: 55398 - RNA, 18 nt, Artificial Sequence
  Synthetic
cgccgacgggacguaaac

SEQ ID NO: 55399 - RNA, 19 nt, Artificial Sequence
  Synthetic
gcgccgacgggacguaaac

SEQ ID NO: 55400 - RNA, 20 nt, Artificial Sequence
  Synthetic
agcgccgacgggacguaaac

SEQ ID NO: 55401 - RNA, 18 nt, Artificial Sequence
  Synthetic
uaguccagaagaaccaac

SEQ ID NO: 55402 - RNA, 19 nt, Artificial Sequence
  Synthetic
auaguccagaagaaccaac

SEQ ID NO: 55403 - RNA, 20 nt, Artificial Sequence
  Synthetic
gauaguccagaagaaccaac

SEQ ID NO: 55404 - RNA, 21 nt, Artificial Sequence
  Synthetic
ugauaguccagaagaaccaac

SEQ ID NO: 55405 - RNA, 22 nt, Artificial Sequence
  Synthetic
uugauaguccagaagaaccaac

SEQ ID NO: 55406 - RNA, 23 nt, Artificial Sequence
  Synthetic
cuugauaguccagaagaaccaac

SEQ ID NO: 55407 - RNA, 24 nt, Artificial Sequence
  Synthetic
ccuugauaguccagaagaaccaac

SEQ ID NO: 55408 - RNA, 18 nt, Artificial Sequence
  Synthetic
gugaggauuuuugucaac

SEQ ID NO: 55409 - RNA, 19 nt, Artificial Sequence
  Synthetic
ugugaggauuuuugucaac

SEQ ID NO: 55410 - RNA, 20 nt, Artificial Sequence
  Synthetic
uugugaggauuuuugucaac

SEQ ID NO: 55411 - RNA, 21 nt, Artificial Sequence
  Synthetic
auugugaggauuuuugucaac

SEQ ID NO: 55412 - RNA, 22 nt, Artificial Sequence
  Synthetic
uauugugaggauuuuugucaac

SEQ ID NO: 55413 - RNA, 23 nt, Artificial Sequence
  Synthetic
guauugugaggauuuuugucaac

SEQ ID NO: 55414 - RNA, 24 nt, Artificial Sequence
  Synthetic
gguauugugaggauuuuugucaac

SEQ ID NO: 55415 - RNA, 18 nt, Artificial Sequence
  Synthetic
  misc_feature (6)..(6): n is a, c, g, or u
cccgungucggcuggaac

SEQ ID NO: 55416 - RNA, 19 nt, Artificial Sequence
  Synthetic
  misc_feature (7)..(7): n is a, c, g, or u
acccgungucggcuggaac

SEQ ID NO: 55417 - RNA, 20 nt, Artificial Sequence
  Synthetic
  misc_feature (8)..(8): n is a, c, g, or u
gacccgungucggcuggaac

SEQ ID NO: 55418 - RNA, 21 nt, Artificial Sequence
  Synthetic
  misc_feature (9)..(9): n is a, c, g, or u
cgacccgungucggcuggaac

SEQ ID NO: 55419 - RNA, 22 nt, Artificial Sequence
  Synthetic
  misc_feature (10)..(10): n is a, c, g, or u
gcgacccgungucggcuggaac

SEQ ID NO: 55420 - RNA, 23 nt, Artificial Sequence
  Synthetic
  misc_feature (11)..(11): n is a, c, g, or u
ugcgacccgungucggcuggaac

SEQ ID NO: 55421 - RNA, 24 nt, Artificial Sequence
  Synthetic
  misc_feature (12)..(12): n is a, c, g, or u
gugcgacccgungucggcuggaac

SEQ ID NO: 55422 - RNA, 18 nt, Artificial Sequence
  Synthetic
  misc_feature (8)..(8): n is a, c, g, or u
gaacagunggacaugaac

SEQ ID NO: 55423 - RNA, 19 nt, Artificial Sequence
  Synthetic
  misc_feature (9)..(9): n is a, c, g, or u
ugaacagunggacaugaac

SEQ ID NO: 55424 - RNA, 20 nt, Artificial Sequence
  Synthetic
  misc_feature (10)..(10): n is a, c, g, or u
uugaacagunggacaugaac

SEQ ID NO: 55425 - RNA, 21 nt, Artificial Sequence
  Synthetic
  misc_feature (11)..(11): n is a, c, g, or u
cuugaacagunggacaugaac

SEQ ID NO: 55426 - RNA, 22 nt, Artificial Sequence
  Synthetic
  misc_feature (12)..(12): n is a, c, g, or u
gcuugaacagunggacaugaac

SEQ ID NO: 55427 - RNA, 23 nt, Artificial Sequence
  Synthetic
  misc_feature (13)..(13): n is a, c, g, or u
ggcuugaacagunggacaugaac

SEQ ID NO: 55428 - RNA, 24 nt, Artificial Sequence
  Synthetic
  misc_feature (14)..(14): n is a, c, g, or u
aggcuugaacagunggacaugaac

SEQ ID NO: 55429 - RNA, 18 nt, Artificial Sequence
  Synthetic
  misc_feature (12)..(12): n is a, c, g, or u
gguucugugucncugaac

SEQ ID NO: 55430 - RNA, 19 nt, Artificial Sequence
  Synthetic
  misc_feature (13)..(13): n is a, c, g, or u
ggguucugugucncugaac

SEQ ID NO: 55431 - RNA, 20 nt, Artificial Sequence
  Synthetic
  misc_feature (14)..(14): n is a, c, g, or u
aggguucugugucncugaac

SEQ ID NO: 55432 - RNA, 21 nt, Artificial Sequence
  Synthetic
  misc_feature (15)..(15): n is a, c, g, or u
caggguucugugucncugaac

SEQ ID NO: 55433 - RNA, 22 nt, Artificial Sequence
  Synthetic
  misc_feature (16)..(16): n is a, c, g, or u
gcaggguucugugucncugaac

SEQ ID NO: 55434 - RNA, 23 nt, Artificial Sequence
  Synthetic
  misc_feature (17)..(17): n is a, c, g, or u
agcaggguucugugucncugaac

SEQ ID NO: 55435 - RNA, 24 nt, Artificial Sequence
  Synthetic
  misc_feature (18)..(18): n is a, c, g, or u
gagcaggguucugugucncugaac

SEQ ID NO: 55436 - RNA, 18 nt, Artificial Sequence
  Synthetic
ccgugugggggugugaac

SEQ ID NO: 55437 - RNA, 19 nt, Artificial Sequence
  Synthetic
accgugugggggugugaac

SEQ ID NO: 55438 - RNA, 20 nt, Artificial Sequence
  Synthetic
caccgugugggggugugaac

SEQ ID NO: 55439 - RNA, 21 nt, Artificial Sequence
  Synthetic
ccaccgugugggggugugaac

SEQ ID NO: 55440 - RNA, 22 nt, Artificial Sequence
  Synthetic
gccaccgugugggggugugaac

SEQ ID NO: 55441 - RNA, 23 nt, Artificial Sequence
  Synthetic
ggccaccgugugggggugugaac

SEQ ID NO: 55442 - RNA, 24 nt, Artificial Sequence
  Synthetic
aggccaccgugugggggugugaac

SEQ ID NO: 55443 - RNA, 18 nt, Artificial Sequence
  Synthetic
uggauacccacagauaac

SEQ ID NO: 55444 - RNA, 19 nt, Artificial Sequence
  Synthetic
auggauacccacagauaac

SEQ ID NO: 55445 - RNA, 20 nt, Artificial Sequence
  Synthetic
aauggauacccacagauaac

SEQ ID NO: 55446 - RNA, 21 nt, Artificial Sequence
  Synthetic
aaauggauacccacagauaac

SEQ ID NO: 55447 - RNA, 22 nt, Artificial Sequence
  Synthetic
  misc_feature (1)..(1): n is a, c, g, or u
naaauggauacccacagauaac

SEQ ID NO: 55448 - RNA, 23 nt, Artificial Sequence
  Synthetic
  misc_feature (2)..(2): n is a, c, g, or u
unaaauggauacccacagauaac

SEQ ID NO: 55449 - RNA, 24 nt, Artificial Sequence
  Synthetic
  misc_feature (3)..(3): n is a, c, g, or u
uunaaauggauacccacagauaac

SEQ ID NO: 55450 - RNA, 18 nt, Artificial Sequence
  Synthetic
ccagaucauccauauaac

SEQ ID NO: 55451 - RNA, 19 nt, Artificial Sequence
  Synthetic
accagaucauccauauaac

SEQ ID NO: 55452 - RNA, 20 nt, Artificial Sequence
  Synthetic
uaccagaucauccauauaac

SEQ ID NO: 55453 - RNA, 21 nt, Artificial Sequence
  Synthetic
auaccagaucauccauauaac

SEQ ID NO: 55454 - RNA, 22 nt, Artificial Sequence
  Synthetic
aauaccagaucauccauauaac

SEQ ID NO: 55455 - RNA, 23 nt, Artificial Sequence
  Synthetic
caauaccagaucauccauauaac

SEQ ID NO: 55456 - RNA, 24 nt, Artificial Sequence
  Synthetic
ccaauaccagaucauccauauaac

SEQ ID NO: 55457 - RNA, 18 nt, Artificial Sequence
  Synthetic
aguccaaggaauacuaac

SEQ ID NO: 55458 - RNA, 19 nt, Artificial Sequence
  Synthetic
gaguccaaggaauacuaac

SEQ ID NO: 55459 - RNA, 20 nt, Artificial Sequence
  Synthetic
ugaguccaaggaauacuaac

SEQ ID NO: 55460 - RNA, 21 nt, Artificial Sequence
  Synthetic
augaguccaaggaauacuaac

SEQ ID NO: 55461 - RNA, 22 nt, Artificial Sequence
  Synthetic
uaugaguccaaggaauacuaac

SEQ ID NO: 55462 - RNA, 23 nt, Artificial Sequence
  Synthetic
uuaugaguccaaggaauacuaac

SEQ ID NO: 55463 - RNA, 24 nt, Artificial Sequence
  Synthetic
cuuaugaguccaaggaauacuaac

SEQ ID NO: 55464 - RNA, 18 nt, Artificial Sequence
  Synthetic
aaacacaccgccuguaac

SEQ ID NO: 55465 - RNA, 19 nt, Artificial Sequence
  Synthetic
gaaacacaccgccuguaac

SEQ ID NO: 55466 - RNA, 20 nt, Artificial Sequence
  Synthetic
agaaacacaccgccuguaac

SEQ ID NO: 55467 - RNA, 21 nt, Artificial Sequence
  Synthetic
aagaaacacaccgccuguaac

SEQ ID NO: 55468 - RNA, 22 nt, Artificial Sequence
  Synthetic
caagaaacacaccgccuguaac

SEQ ID NO: 55469 - RNA, 23 nt, Artificial Sequence
  Synthetic
acaagaaacacaccgccuguaac

SEQ ID NO: 55470 - RNA, 24 nt, Artificial Sequence
  Synthetic
aacaagaaacacaccgccuguaac

SEQ ID NO: 55471 - RNA, 18 nt, Artificial Sequence
  Synthetic
aggagugcgaauccacac

SEQ ID NO: 55472 - RNA, 19 nt, Artificial Sequence
  Synthetic
gaggagugcgaauccacac

SEQ ID NO: 55473 - RNA, 20 nt, Artificial Sequence
  Synthetic
ggaggagugcgaauccacac

SEQ ID NO: 55474 - RNA, 21 nt, Artificial Sequence
  Synthetic
  misc_feature (1)..(1): n is a, c, g, or u
nggaggagugcgaauccacac

SEQ ID NO: 55475 - RNA, 22 nt, Artificial Sequence
  Synthetic
  misc_feature (2)..(2): n is a, c, g, or u
cnggaggagugcgaauccacac

SEQ ID NO: 55476 - RNA, 23 nt, Artificial Sequence
  Synthetic
  misc_feature (3)..(3): n is a, c, g, or u
gcnggaggagugcgaauccacac

SEQ ID NO: 55477 - RNA, 24 nt, Artificial Sequence
  Synthetic
  misc_feature (4)..(4): n is a, c, g, or u
agcnggaggagugcgaauccacac

SEQ ID NO: 55478 - RNA, 18 nt, Artificial Sequence
  Synthetic
  misc_feature (1)..(1): n is a, c, g, or u
  misc_feature (7)..(7): n is a, c, g, or u
nuccaanuuauugcccac

SEQ ID NO: 55479 - RNA, 19 nt, Artificial Sequence
  Synthetic
  misc_feature (2)..(2): n is a, c, g, or u
  misc_feature (8)..(8): n is a, c, g, or u
cnuccaanuuauugcccac

SEQ ID NO: 55480 - RNA, 20 nt, Artificial Sequence
  Synthetic
  misc_feature (3)..(3): n is a, c, g, or u
  misc_feature (9)..(9): n is a, c, g, or u
ucnuccaanuuauugcccac

SEQ ID NO: 55481 - RNA, 21 nt, Artificial Sequence
  Synthetic
  misc_feature (1)..(1): n is a, c, g, or u
  misc_feature (4)..(4): n is a, c, g, or u
  misc_feature (10)..(10): n is a, c, g, or u
nucnuccaanuuauugcccac

SEQ ID NO: 55482 - RNA, 22 nt, Artificial Sequence
  Synthetic
  misc_feature (2)..(2): n is a, c, g, or u
  misc_feature (5)..(5): n is a, c, g, or u
  misc_feature (11)..(11): n is a, c, g, or u
gnucnuccaanuuauugcccac

SEQ ID NO: 55483 - RNA, 23 nt, Artificial Sequence
  Synthetic
  misc_feature (3)..(3): n is a, c, g, or u
  misc_feature (6)..(6): n is a, c, g, or u
  misc_feature (12)..(12): n is a, c, g, or u
ggnucnuccaanuuauugcccac

SEQ ID NO: 55484 - RNA, 24 nt, Artificial Sequence
  Synthetic
  misc_feature (4)..(4): n is a, c, g, or u
  misc_feature (7)..(7): n is a, c, g, or u
  misc_feature (13)..(13): n is a, c, g, or u
aggnucnuccaanuuauugcccac

SEQ ID NO: 55485 - RNA, 18 nt, Artificial Sequence
  Synthetic
uccaugccccaaagccac

SEQ ID NO: 55486 - RNA, 19 nt, Artificial Sequence
  Synthetic
guccaugccccaaagccac

SEQ ID NO: 55487 - RNA, 20 nt, Artificial Sequence
  Synthetic
uguccaugccccaaagccac

SEQ ID NO: 55488 - RNA, 21 nt, Artificial Sequence
  Synthetic
auguccaugccccaaagccac

SEQ ID NO: 55489 - RNA, 22 nt, Artificial Sequence
  Synthetic
aauguccaugccccaaagccac

SEQ ID NO: 55490 - RNA, 23 nt, Artificial Sequence
  Synthetic
caauguccaugccccaaagccac

SEQ ID NO: 55491 - RNA, 24 nt, Artificial Sequence
  Synthetic
ucaauguccaugccccaaagccac

SEQ ID NO: 55492 - RNA, 18 nt, Artificial Sequence
  Synthetic
aaauugagagaaguccac

SEQ ID NO: 55493 - RNA, 19 nt, Artificial Sequence
  Synthetic
aaaauugagagaaguccac

SEQ ID NO: 55494 - RNA, 20 nt, Artificial Sequence
  Synthetic
gaaaauugagagaaguccac

SEQ ID NO: 55495 - RNA, 21 nt, Artificial Sequence
  Synthetic
agaaaauugagagaaguccac

SEQ ID NO: 55496 - RNA, 22 nt, Artificial Sequence
  Synthetic
uagaaaauugagagaaguccac

SEQ ID NO: 55497 - RNA, 23 nt, Artificial Sequence
  Synthetic
cuagaaaauugagagaaguccac

SEQ ID NO: 55498 - RNA, 24 nt, Artificial Sequence
  Synthetic
ccuagaaaauugagagaaguccac

SEQ ID NO: 55499 - RNA, 18 nt, Artificial Sequence
  Synthetic
  misc_feature (10)..(10): n is a, c, g, or u
aaaagagagnaauuccac

SEQ ID NO: 55500 - RNA, 19 nt, Artificial Sequence
  Synthetic
  misc_feature (11)..(11): n is a, c, g, or u
aaaaagagagnaauuccac

SEQ ID NO: 55501 - RNA, 20 nt, Artificial Sequence
  Synthetic
  misc_feature (12)..(12): n is a, c, g, or u
aaaaaagagagnaauuccac

SEQ ID NO: 55502 - RNA, 21 nt, Artificial Sequence
  Synthetic
  misc_feature (13)..(13): n is a, c, g, or u
caaaaaagagagnaauuccac

SEQ ID NO: 55503 - RNA, 22 nt, Artificial Sequence
  Synthetic
  misc_feature (14)..(14): n is a, c, g, or u
gcaaaaaagagagnaauuccac

SEQ ID NO: 55504 - RNA, 23 nt, Artificial Sequence
  Synthetic
  misc_feature (15)..(15): n is a, c, g, or u
ggcaaaaaagagagnaauuccac

SEQ ID NO: 55505 - RNA, 24 nt, Artificial Sequence
  Synthetic
  misc_feature (16)..(16): n is a, c, g, or u
aggcaaaaaagagagnaauuccac

SEQ ID NO: 55506 - RNA, 18 nt, Artificial Sequence
  Synthetic
guaaguuggcgaaaagac

SEQ ID NO: 55507 - RNA, 19 nt, Artificial Sequence
  Synthetic
uguaaguuggcgaaaagac

SEQ ID NO: 55508 - RNA, 20 nt, Artificial Sequence
  Synthetic
uuguaaguuggcgaaaagac

SEQ ID NO: 55509 - RNA, 21 nt, Artificial Sequence
  Synthetic
cuuguaaguuggcgaaaagac

SEQ ID NO: 55510 - RNA, 22 nt, Artificial Sequence
  Synthetic
ccuuguaaguuggcgaaaagac

SEQ ID NO: 55511 - RNA, 23 nt, Artificial Sequence
  Synthetic
gccuuguaaguuggcgaaaagac

SEQ ID NO: 55512 - RNA, 24 nt, Artificial Sequence
  Synthetic
ggccuuguaaguuggcgaaaagac

SEQ ID NO: 55513 - RNA, 18 nt, Artificial Sequence
  Synthetic
agaugagaaggaacagac

SEQ ID NO: 55514 - RNA, 19 nt, Artificial Sequence
  Synthetic
cagaugagaaggaacagac

SEQ ID NO: 55515 - RNA, 20 nt, Artificial Sequence
  Synthetic
gcagaugagaaggaacagac

SEQ ID NO: 55516 - RNA, 21 nt, Artificial Sequence
  Synthetic
ggcagaugagaaggaacagac

SEQ ID NO: 55517 - RNA, 22 nt, Artificial Sequence
  Synthetic
cggcagaugagaaggaacagac

SEQ ID NO: 55518 - RNA, 23 nt, Artificial Sequence
  Synthetic
ccggcagaugagaaggaacagac

SEQ ID NO: 55519 - RNA, 24 nt, Artificial Sequence
  Synthetic
  misc_feature (1)..(1): n is a, c, g, or u
nccggcagaugagaaggaacagac

SEQ ID NO: 55520 - RNA, 18 nt, Artificial Sequence
  Synthetic
uauaacuaaaagccagac

SEQ ID NO: 55521 - RNA, 19 nt, Artificial Sequence
  Synthetic
auauaacuaaaagccagac

SEQ ID NO: 55522 - RNA, 20 nt, Artificial Sequence
  Synthetic
cauauaacuaaaagccagac

SEQ ID NO: 55523 - RNA, 21 nt, Artificial Sequence
  Synthetic
ccauauaacuaaaagccagac

SEQ ID NO: 55524 - RNA, 22 nt, Artificial Sequence
  Synthetic
uccauauaacuaaaagccagac

SEQ ID NO: 55525 - RNA, 23 nt, Artificial Sequence
  Synthetic
auccauauaacuaaaagccagac

SEQ ID NO: 55526 - RNA, 24 nt, Artificial Sequence
  Synthetic
cauccauauaacuaaaagccagac

SEQ ID NO: 55527 - RNA, 18 nt, Artificial Sequence
  Synthetic
ucggcuggaacggcagac

SEQ ID NO: 55528 - RNA, 19 nt, Artificial Sequence
  Synthetic
gucggcuggaacggcagac

SEQ ID NO: 55529 - RNA, 20 nt, Artificial Sequence
  Synthetic
  misc_feature (1)..(1): n is a, c, g, or u
ngucggcuggaacggcagac

SEQ ID NO: 55530 - RNA, 18 nt, Artificial Sequence
  Synthetic
guacuuccuagagaggac

SEQ ID NO: 55531 - RNA, 19 nt, Artificial Sequence
  Synthetic
uguacuuccuagagaggac

SEQ ID NO: 55532 - RNA, 20 nt, Artificial Sequence
  Synthetic
guguacuuccuagagaggac

SEQ ID NO: 55533 - RNA, 21 nt, Artificial Sequence
  Synthetic
gguguacuuccuagagaggac

SEQ ID NO: 55534 - RNA, 22 nt, Artificial Sequence
  Synthetic
agguguacuuccuagagaggac

SEQ ID NO: 55535 - RNA, 23 nt, Artificial Sequence
  Synthetic
gagguguacuuccuagagaggac

SEQ ID NO: 55536 - RNA, 24 nt, Artificial Sequence
  Synthetic
ggagguguacuuccuagagaggac

SEQ ID NO: 55537 - RNA, 18 nt, Artificial Sequence
  Synthetic
caggacaaguuggaggac

SEQ ID NO: 55538 - RNA, 19 nt, Artificial Sequence
  Synthetic
ccaggacaaguuggaggac

SEQ ID NO: 55539 - RNA, 20 nt, Artificial Sequence
  Synthetic
gccaggacaaguuggaggac

SEQ ID NO: 55540 - RNA, 21 nt, Artificial Sequence
  Synthetic
agccaggacaaguuggaggac

SEQ ID NO: 55541 - RNA, 22 nt, Artificial Sequence
  Synthetic
uagccaggacaaguuggaggac

SEQ ID NO: 55542 - RNA, 23 nt, Artificial Sequence
  Synthetic
auagccaggacaaguuggaggac

SEQ ID NO: 55543 - RNA, 24 nt, Artificial Sequence
  Synthetic
gauagccaggacaaguuggaggac

SEQ ID NO: 55544 - RNA, 18 nt, Artificial Sequence
  Synthetic
acagcgguauaaagggac

SEQ ID NO: 55545 - RNA, 19 nt, Artificial Sequence
  Synthetic
aacagcgguauaaagggac

SEQ ID NO: 55546 - RNA, 20 nt, Artificial Sequence
  Synthetic
uaacagcgguauaaagggac

SEQ ID NO: 55547 - RNA, 21 nt, Artificial Sequence
  Synthetic
guaacagcgguauaaagggac

SEQ ID NO: 55548 - RNA, 22 nt, Artificial Sequence
  Synthetic
gguaacagcgguauaaagggac

SEQ ID NO: 55549 - RNA, 23 nt, Artificial Sequence
  Synthetic
ugguaacagcgguauaaagggac

SEQ ID NO: 55550 - RNA, 24 nt, Artificial Sequence
  Synthetic
uugguaacagcgguauaaagggac

SEQ ID NO: 55551 - RNA, 18 nt, Artificial Sequence
  Synthetic
auucagcgccgacgggac

SEQ ID NO: 55552 - RNA, 19 nt, Artificial Sequence
  Synthetic
gauucagcgccgacgggac

SEQ ID NO: 55553 - RNA, 20 nt, Artificial Sequence
  Synthetic
ggauucagcgccgacgggac

SEQ ID NO: 55554 - RNA, 21 nt, Artificial Sequence
  Synthetic
  misc_feature (1)..(1): n is a, c, g, or u
nggauucagcgccgacgggac

SEQ ID NO: 55555 - RNA, 22 nt, Artificial Sequence
  Synthetic
  misc_feature (2)..(2): n is a, c, g, or u
cnggauucagcgccgacgggac

SEQ ID NO: 55556 - RNA, 23 nt, Artificial Sequence
  Synthetic
  misc_feature (3)..(3): n is a, c, g, or u
gcnggauucagcgccgacgggac

SEQ ID NO: 55557 - RNA, 24 nt, Artificial Sequence
  Synthetic
  misc_feature (4)..(4): n is a, c, g, or u
cgcnggauucagcgccgacgggac

SEQ ID NO: 55558 - RNA, 18 nt, Artificial Sequence
  Synthetic
ugauuggagguuggggac

SEQ ID NO: 55559 - RNA, 19 nt, Artificial Sequence
  Synthetic
gugauuggagguuggggac

SEQ ID NO: 55560 - RNA, 20 nt, Artificial Sequence
  Synthetic
agugauuggagguuggggac

SEQ ID NO: 55561 - RNA, 21 nt, Artificial Sequence
  Synthetic
aagugauuggagguuggggac

SEQ ID NO: 55562 - RNA, 22 nt, Artificial Sequence
  Synthetic
uaagugauuggagguuggggac

SEQ ID NO: 55563 - RNA, 23 nt, Artificial Sequence
  Synthetic
guaagugauuggagguuggggac

SEQ ID NO: 55564 - RNA, 24 nt, Artificial Sequence
  Synthetic
gguaagugauuggagguuggggac

SEQ ID NO: 55565 - RNA, 18 nt, Artificial Sequence
  Synthetic
  misc_feature (14)..(14): n is a, c, g, or u
aggcuugaacagunggac

SEQ ID NO: 55566 - RNA, 19 nt, Artificial Sequence
  Synthetic
  misc_feature (15)..(15): n is a, c, g, or u
gaggcuugaacagunggac

SEQ ID NO: 55567 - RNA, 20 nt, Artificial Sequence
  Synthetic
  misc_feature (16)..(16): n is a, c, g, or u
ggaggcuugaacagunggac

SEQ ID NO: 55568 - RNA, 21 nt, Artificial Sequence
  Synthetic
  misc_feature (17)..(17): n is a, c, g, or u
uggaggcuugaacagunggac

SEQ ID NO: 55569 - RNA, 22 nt, Artificial Sequence
  Synthetic
  misc_feature (18)..(18): n is a, c, g, or u
uuggaggcuugaacagunggac

SEQ ID NO: 55570 - RNA, 23 nt, Artificial Sequence
  Synthetic
  misc_feature (19)..(19): n is a, c, g, or u
cuuggaggcuugaacagunggac

SEQ ID NO: 55571 - RNA, 24 nt, Artificial Sequence
  Synthetic
  misc_feature (20)..(20): n is a, c, g, or u
gcuuggaggcuugaacagunggac

SEQ ID NO: 55572 - RNA, 18 nt, Artificial Sequence
  Synthetic
  misc_feature (15)..(15): n is a, c, g, or u
auccacacuccaaangac

SEQ ID NO: 55573 - RNA, 19 nt, Artificial Sequence
  Synthetic
  misc_feature (16)..(16): n is a, c, g, or u
aauccacacuccaaangac

SEQ ID NO: 55574 - RNA, 20 nt, Artificial Sequence
  Synthetic
  misc_feature (17)..(17): n is a, c, g, or u
gaauccacacuccaaangac

SEQ ID NO: 55575 - RNA, 21 nt, Artificial Sequence
  Synthetic
  misc_feature (18)..(18): n is a, c, g, or u
cgaauccacacuccaaangac

SEQ ID NO: 55576 - RNA, 22 nt, Artificial Sequence
  Synthetic
  misc_feature (19)..(19): n is a, c, g, or u
gcgaauccacacuccaaangac

SEQ ID NO: 55577 - RNA, 23 nt, Artificial Sequence
  Synthetic
  misc_feature (20)..(20): n is a, c, g, or u
ugcgaauccacacuccaaangac

SEQ ID NO: 55578 - RNA, 24 nt, Artificial Sequence
  Synthetic
  misc_feature (21)..(21): n is a, c, g, or u
gugcgaauccacacuccaaangac

SEQ ID NO: 55579 - RNA, 18 nt, Artificial Sequence
  Synthetic
  misc_feature (15)..(15): n is a, c, g, or u
aguaggucccgaacngac

SEQ ID NO: 55580 - RNA, 19 nt, Artificial Sequence
  Synthetic
  misc_feature (16)..(16): n is a, c, g, or u
gaguaggucccgaacngac

SEQ ID NO: 55581 - RNA, 20 nt, Artificial Sequence
  Synthetic
  misc_feature (17)..(17): n is a, c, g, or u
cgaguaggucccgaacngac

SEQ ID NO: 55582 - RNA, 21 nt, Artificial Sequence
  Synthetic
  misc_feature (18)..(18): n is a, c, g, or u
ucgaguaggucccgaacngac

SEQ ID NO: 55583 - RNA, 22 nt, Artificial Sequence
  Synthetic
  misc_feature (19)..(19): n is a, c, g, or u
gucgaguaggucccgaacngac

SEQ ID NO: 55584 - RNA, 23 nt, Artificial Sequence
  Synthetic
  misc_feature (20)..(20): n is a, c, g, or u
ugucgaguaggucccgaacngac

SEQ ID NO: 55585 - RNA, 24 nt, Artificial Sequence
  Synthetic
  misc_feature (21)..(21): n is a, c, g, or u
gugucgaguaggucccgaacngac

SEQ ID NO: 55586 - RNA, 18 nt, Artificial Sequence
  Synthetic
  misc_feature (7)..(7): n is a, c, g, or u
  misc_feature (12)..(12): n is a, c, g, or u
  misc_feature (16)..(16): n is a, c, g, or u
aggauunaaagnaggnac

SEQ ID NO: 55587 - RNA, 19 nt, Artificial Sequence
  Synthetic
  misc_feature (1)..(1): n is a, c, g, or u
  misc_feature (8)..(8): n is a, c, g, or u
  misc_feature (13)..(13): n is a, c, g, or u
  misc_feature (17)..(17): n is a, c, g, or u
naggauunaaagnaggnac

SEQ ID NO: 55588 - RNA, 20 nt, Artificial Sequence
  Synthetic
  misc_feature (2)..(2): n is a, c, g, or u
  misc_feature (9)..(9): n is a, c, g, or u
  misc_feature (14)..(14): n is a, c, g, or u
  misc_feature (18)..(18): n is a, c, g, or u
unaggauunaaagnaggnac

SEQ ID NO: 55589 - RNA, 21 nt, Artificial Sequence
  Synthetic
  misc_feature (3)..(3): n is a, c, g, or u
  misc_feature (10)..(10): n is a, c, g, or u
  misc_feature (15)..(15): n is a, c, g, or u
  misc_feature (19)..(19): n is a, c, g, or u
gunaggauunaaagnaggnac

SEQ ID NO: 55590 - RNA, 22 nt, Artificial Sequence
  Synthetic
  misc_feature (4)..(4): n is a, c, g, or u
  misc_feature (11)..(11): n is a, c, g, or u
  misc_feature (16)..(16): n is a, c, g, or u
  misc_feature (20)..(20): n is a, c, g, or u
agunaggauunaaagnaggnac

SEQ ID NO: 55591 - RNA, 23 nt, Artificial Sequence
  Synthetic
  misc_feature (5)..(5): n is a, c, g, or u
  misc_feature (12)..(12): n is a, c, g, or u
  misc_feature (17)..(17): n is a, c, g, or u
  misc_feature (21)..(21): n is a, c, g, or u
cagunaggauunaaagnaggnac

SEQ ID NO: 55592 - RNA, 24 nt, Artificial Sequence
  Synthetic
  misc_feature (6)..(6): n is a, c, g, or u
  misc_feature (13)..(13): n is a, c, g, or u
  misc_feature (18)..(18): n is a, c, g, or u
  misc_feature (22)..(22): n is a, c, g, or u
ccagunaggauunaaagnaggnac

SEQ ID NO: 55593 - RNA, 18 nt, Artificial Sequence
  Synthetic
  misc_feature (7)..(7): n is a, c, g, or u
  misc_feature (16)..(16): n is a, c, g, or u
ucccagnggauugggnac

SEQ ID NO: 55594 - RNA, 19 nt, Artificial Sequence
  Synthetic
  misc_feature (8)..(8): n is a, c, g, or u
  misc_feature (17)..(17): n is a, c, g, or u
aucccagnggauugggnac

SEQ ID NO: 55595 - RNA, 20 nt, Artificial Sequence
  Synthetic
  misc_feature (9)..(9): n is a, c, g, or u
  misc_feature (18)..(18): n is a, c, g, or u
aaucccagnggauugggnac

SEQ ID NO: 55596 - RNA, 21 nt, Artificial Sequence
  Synthetic
  misc_feature (10)..(10): n is a, c, g, or u
  misc_feature (19)..(19): n is a, c, g, or u
gaaucccagnggauugggnac

SEQ ID NO: 55597 - RNA, 22 nt, Artificial Sequence
  Synthetic
  misc_feature (11)..(11): n is a, c, g, or u
  misc_feature (20)..(20): n is a, c, g, or u
agaaucccagnggauugggnac

SEQ ID NO: 55598 - RNA, 23 nt, Artificial Sequence
  Synthetic
  misc_feature (12)..(12): n is a, c, g, or u
  misc_feature (21)..(21): n is a, c, g, or u
aagaaucccagnggauugggnac

SEQ ID NO: 55599 - RNA, 24 nt, Artificial Sequence
  Synthetic
  misc_feature (13)..(13): n is a, c, g, or u
  misc_feature (22)..(22): n is a, c, g, or u
aaagaaucccagnggauugggnac

SEQ ID NO: 55600 - RNA, 18 nt, Artificial Sequence
  Synthetic
  misc_feature (11)..(11): n is a, c, g, or u
  misc_feature (16)..(16): n is a, c, g, or u
gguucauguanuguunac

SEQ ID NO: 55601 - RNA, 19 nt, Artificial Sequence
  Synthetic
  misc_feature (12)..(12): n is a, c, g, or u
  misc_feature (17)..(17): n is a, c, g, or u
agguucauguanuguunac

SEQ ID NO: 55602 - RNA, 20 nt, Artificial Sequence
  Synthetic
  misc_feature (13)..(13): n is a, c, g, or u
  misc_feature (18)..(18): n is a, c, g, or u
aagguucauguanuguunac

SEQ ID NO: 55603 - RNA, 21 nt, Artificial Sequence
  Synthetic
  misc_feature (14)..(14): n is a, c, g, or u
  misc_feature (19)..(19): n is a, c, g, or u
aaagguucauguanuguunac

SEQ ID NO: 55604 - RNA, 22 nt, Artificial Sequence
  Synthetic
  misc_feature (15)..(15): n is a, c, g, or u
  misc_feature (20)..(20): n is a, c, g, or u
uaaagguucauguanuguunac

SEQ ID NO: 55605 - RNA, 23 nt, Artificial Sequence
  Synthetic
  misc_feature (16)..(16): n is a, c, g, or u
  misc_feature (21)..(21): n is a, c, g, or u
guaaagguucauguanuguunac

SEQ ID NO: 55606 - RNA, 24 nt, Artificial Sequence
  Synthetic
  misc_feature (17)..(17): n is a, c, g, or u
  misc_feature (22)..(22): n is a, c, g, or u
gguaaagguucauguanuguunac

SEQ ID NO: 55607 - RNA, 18 nt, Artificial Sequence
  Synthetic
  misc_feature (6)..(6): n is a, c, g, or u
ccaaangacaccaaauac

SEQ ID NO: 55608 - RNA, 19 nt, Artificial Sequence
  Synthetic
  misc_feature (7)..(7): n is a, c, g, or u
uccaaangacaccaaauac

SEQ ID NO: 55609 - RNA, 20 nt, Artificial Sequence
  Synthetic
  misc_feature (8)..(8): n is a, c, g, or u
cuccaaangacaccaaauac

SEQ ID NO: 55610 - RNA, 21 nt, Artificial Sequence
  Synthetic
  misc_feature (9)..(9): n is a, c, g, or u
acuccaaangacaccaaauac

SEQ ID NO: 55611 - RNA, 22 nt, Artificial Sequence
  Synthetic
  misc_feature (10)..(10): n is a, c, g, or u
cacuccaaangacaccaaauac

SEQ ID NO: 55612 - RNA, 23 nt, Artificial Sequence
  Synthetic
  misc_feature (11)..(11): n is a, c, g, or u
acacuccaaangacaccaaauac

SEQ ID NO: 55613 - RNA, 24 nt, Artificial Sequence
  Synthetic
  misc_feature (12)..(12): n is a, c, g, or u
cacacuccaaangacaccaaauac

SEQ ID NO: 55614 - RNA, 18 nt, Artificial Sequence
  Synthetic
  misc_feature (6)..(6): n is a, c, g, or u
  misc_feature (14)..(14): n is a, c, g, or u
gcagunauacaggnauac

SEQ ID NO: 55615 - RNA, 19 nt, Artificial Sequence
  Synthetic
  misc_feature (1)..(1): n is a, c, g, or u
  misc_feature (7)..(7): n is a, c, g, or u
  misc_feature (15)..(15): n is a, c, g, or u
ngcagunauacaggnauac

SEQ ID NO: 55616 - RNA, 20 nt, Artificial Sequence
  Synthetic
  misc_feature (2)..(2): n is a, c, g, or u
  misc_feature (8)..(8): n is a, c, g, or u
  misc_feature (16)..(16): n is a, c, g, or u
ungcagunauacaggnauac

SEQ ID NO: 55617 - RNA, 21 nt, Artificial Sequence
  Synthetic
  misc_feature (3)..(3): n is a, c, g, or u
  misc_feature (9)..(9): n is a, c, g, or u
  misc_feature (17)..(17): n is a, c, g, or u
uungcagunauacaggnauac

SEQ ID NO: 55618 - RNA, 22 nt, Artificial Sequence
  Synthetic
  misc_feature (4)..(4): n is a, c, g, or u
  misc_feature (10)..(10): n is a, c, g, or u
  misc_feature (18)..(18): n is a, c, g, or u
uuungcagunauacaggnauac

SEQ ID NO: 55619 - RNA, 23 nt, Artificial Sequence
  Synthetic
  misc_feature (5)..(5): n is a, c, g, or u
  misc_feature (11)..(11): n is a, c, g, or u
  misc_feature (19)..(19): n is a, c, g, or u
guuungcagunauacaggnauac

SEQ ID NO: 55620 - RNA, 24 nt, Artificial Sequence
  Synthetic
  misc_feature (6)..(6): n is a, c, g, or u
  misc_feature (12)..(12): n is a, c, g, or u
  misc_feature (20)..(20): n is a, c, g, or u
uguuungcagunauacaggnauac

SEQ ID NO: 55621 - RNA, 18 nt, Artificial Sequence
  Synthetic
  misc_feature (15)..(15): n is a, c, g, or u
ccuacagccuccuanuac

SEQ ID NO: 55622 - RNA, 19 nt, Artificial Sequence
  Synthetic
  misc_feature (16)..(16): n is a, c, g, or u
gccuacagccuccuanuac

SEQ ID NO: 55623 - RNA, 20 nt, Artificial Sequence
  Synthetic
  misc_feature (17)..(17): n is a, c, g, or u
ugccuacagccuccuanuac

SEQ ID NO: 55624 - RNA, 21 nt, Artificial Sequence
  Synthetic
  misc_feature (18)..(18): n is a, c, g, or u
augccuacagccuccuanuac

SEQ ID NO: 55625 - RNA, 22 nt, Artificial Sequence
  Synthetic
  misc_feature (19)..(19): n is a, c, g, or u
uaugccuacagccuccuanuac

SEQ ID NO: 55626 - RNA, 23 nt, Artificial Sequence
  Synthetic
  misc_feature (20)..(20): n is a, c, g, or u
uuaugccuacagccuccuanuac

SEQ ID NO: 55627 - RNA, 24 nt, Artificial Sequence
  Synthetic
  misc_feature (21)..(21): n is a, c, g, or u
uuuaugccuacagccuccuanuac

SEQ ID NO: 55628 - RNA, 18 nt, Artificial Sequence
  Synthetic
  misc_feature (1)..(1): n is a, c, g, or u
  misc_feature (7)..(7): n is a, c, g, or u
  misc_feature (10)..(10): n is a, c, g, or u
nucaaunggncgauuuac

SEQ ID NO: 55629 - RNA, 19 nt, Artificial Sequence
  Synthetic
  misc_feature (2)..(2): n is a, c, g, or u
  misc_feature (8)..(8): n is a, c, g, or u
  misc_feature (11)..(11): n is a, c, g, or u
anucaaunggncgauuuac

SEQ ID NO: 55630 - RNA, 20 nt, Artificial Sequence
  Synthetic
  misc_feature (3)..(3): n is a, c, g, or u
  misc_feature (9)..(9): n is a, c, g, or u
  misc_feature (12)..(12): n is a, c, g, or u
canucaaunggncgauuuac

SEQ ID NO: 55631 - RNA, 21 nt, Artificial Sequence
  Synthetic
  misc_feature (4)..(4): n is a, c, g, or u
  misc_feature (10)..(10): n is a, c, g, or u
  misc_feature (13)..(13): n is a, c, g, or u
ccanucaaunggncgauuuac

SEQ ID NO: 55632 - RNA, 22 nt, Artificial Sequence
  Synthetic
  misc_feature (5)..(5): n is a, c, g, or u
  misc_feature (11)..(11): n is a, c, g, or u
  misc_feature (14)..(14): n is a, c, g, or u
uccanucaaunggncgauuuac

SEQ ID NO: 55633 - RNA, 23 nt, Artificial Sequence
  Synthetic
  misc_feature (6)..(6): n is a, c, g, or u
  misc_feature (12)..(12): n is a, c, g, or u
  misc_feature (15)..(15): n is a, c, g, or u
uuccanucaaunggncgauuuac

SEQ ID NO: 55634 - RNA, 24 nt, Artificial Sequence
  Synthetic
  misc_feature (7)..(7): n is a, c, g, or u
  misc_feature (13)..(13): n is a, c, g, or u
  misc_feature (16)..(16): n is a, c, g, or u
uuuccanucaaunggncgauuuac

SEQ ID NO: 55635 - RNA, 18 nt, Artificial Sequence
  Synthetic
aauggccaagccccaacc

SEQ ID NO: 55636 - RNA, 19 nt, Artificial Sequence
  Synthetic
caauggccaagccccaacc

SEQ ID NO: 55637 - RNA, 20 nt, Artificial Sequence
  Synthetic
ccaauggccaagccccaacc

SEQ ID NO: 55638 - RNA, 21 nt, Artificial Sequence
  Synthetic
gccaauggccaagccccaacc

SEQ ID NO: 55639 - RNA, 22 nt, Artificial Sequence
  Synthetic
ggccaauggccaagccccaacc

SEQ ID NO: 55640 - RNA, 23 nt, Artificial Sequence
  Synthetic
uggccaauggccaagccccaacc

SEQ ID NO: 55641 - RNA, 24 nt, Artificial Sequence
  Synthetic
auggccaauggccaagccccaacc

SEQ ID NO: 55642 - RNA, 18 nt, Artificial Sequence
  Synthetic
ugauaguccagaagaacc

SEQ ID NO: 55643 - RNA, 19 nt, Artificial Sequence
  Synthetic
uugauaguccagaagaacc

SEQ ID NO: 55644 - RNA, 20 nt, Artificial Sequence
  Synthetic
cuugauaguccagaagaacc

SEQ ID NO: 55645 - RNA, 21 nt, Artificial Sequence
  Synthetic
ccuugauaguccagaagaacc

SEQ ID NO: 55646 - RNA, 22 nt, Artificial Sequence
  Synthetic
accuugauaguccagaagaacc

SEQ ID NO: 55647 - RNA, 23 nt, Artificial Sequence
  Synthetic
uaccuugauaguccagaagaacc

SEQ ID NO: 55648 - RNA, 24 nt, Artificial Sequence
  Synthetic
auaccuugauaguccagaagaacc

SEQ ID NO: 55649 - RNA, 18 nt, Artificial Sequence
  Synthetic
cgugugggggugugaacc

SEQ ID NO: 55650 - RNA, 19 nt, Artificial Sequence
  Synthetic
ccgugugggggugugaacc

SEQ ID NO: 55651 - RNA, 20 nt, Artificial Sequence
  Synthetic
accgugugggggugugaacc

SEQ ID NO: 55652 - RNA, 21 nt, Artificial Sequence
  Synthetic
caccgugugggggugugaacc

SEQ ID NO: 55653 - RNA, 22 nt, Artificial Sequence
  Synthetic
ccaccgugugggggugugaacc

SEQ ID NO: 55654 - RNA, 23 nt, Artificial Sequence
  Synthetic
gccaccgugugggggugugaacc

SEQ ID NO: 55655 - RNA, 24 nt, Artificial Sequence
  Synthetic
ggccaccgugugggggugugaacc

SEQ ID NO: 55656 - RNA, 18 nt, Artificial Sequence
  Synthetic
  misc_feature (4)..(4): n is a, c, g, or u
  misc_feature (10)..(10): n is a, c, g, or u
acunccaaunacauaacc

SEQ ID NO: 55657 - RNA, 19 nt, Artificial Sequence
  Synthetic
  misc_feature (5)..(5): n is a, c, g, or u
  misc_feature (11)..(11): n is a, c, g, or u
aacunccaaunacauaacc

SEQ ID NO: 55658 - RNA, 20 nt, Artificial Sequence
  Synthetic
  misc_feature (6)..(6): n is a, c, g, or u
  misc_feature (12)..(12): n is a, c, g, or u
caacunccaaunacauaacc

SEQ ID NO: 55659 - RNA, 21 nt, Artificial Sequence
  Synthetic
  misc_feature (7)..(7): n is a, c, g, or u
  misc_feature (13)..(13): n is a, c, g, or u
ccaacunccaaunacauaacc

SEQ ID NO: 55660 - RNA, 22 nt, Artificial Sequence
  Synthetic
  misc_feature (8)..(8): n is a, c, g, or u
  misc_feature (14)..(14): n is a, c, g, or u
cccaacunccaaunacauaacc

SEQ ID NO: 55661 - RNA, 23 nt, Artificial Sequence
  Synthetic
  misc_feature (9)..(9): n is a, c, g, or u
  misc_feature (15)..(15): n is a, c, g, or u
ccccaacunccaaunacauaacc

SEQ ID NO: 55662 - RNA, 24 nt, Artificial Sequence
  Synthetic
  misc_feature (10)..(10): n is a, c, g, or u
  misc_feature (16)..(16): n is a, c, g, or u
uccccaacunccaaunacauaacc

SEQ ID NO: 55663 - RNA, 18 nt, Artificial Sequence
  Synthetic
  misc_feature (6)..(6): n is a, c, g, or u
uccaanuuauugcccacc

SEQ ID NO: 55664 - RNA, 19 nt, Artificial Sequence
  Synthetic
  misc_feature (1)..(1): n is a, c, g, or u
  misc_feature (7)..(7): n is a, c, g, or u
nuccaanuuauugcccacc

SEQ ID NO: 55665 - RNA, 20 nt, Artificial Sequence
  Synthetic
  misc_feature (2)..(2): n is a, c, g, or u
  misc_feature (8)..(8): n is a, c, g, or u
cnuccaanuuauugcccacc

SEQ ID NO: 55666 - RNA, 21 nt, Artificial Sequence
  Synthetic
  misc_feature (3)..(3): n is a, c, g, or u
  misc_feature (9)..(9): n is a, c, g, or u
ucnuccaanuuauugcccacc

SEQ ID NO: 55667 - RNA, 22 nt, Artificial Sequence
  Synthetic
  misc_feature (1)..(1): n is a, c, g, or u
  misc_feature (4)..(4): n is a, c, g, or u
  misc_feature (10)..(10): n is a, c, g, or u
nucnuccaanuuauugcccacc

SEQ ID NO: 55668 - RNA, 23 nt, Artificial Sequence
  Synthetic
  misc_feature (2)..(2): n is a, c, g, or u
  misc_feature (5)..(5): n is a, c, g, or u
  misc_feature (11)..(11): n is a, c, g, or u
gnucnuccaanuuauugcccacc

SEQ ID NO: 55669 - RNA, 24 nt, Artificial Sequence
  Synthetic
  misc_feature (3)..(3): n is a, c, g, or u
  misc_feature (6)..(6): n is a, c, g, or u
  misc_feature (12)..(12): n is a, c, g, or u
ggnucnuccaanuuauugcccacc

SEQ ID NO: 55670 - RNA, 18 nt, Artificial Sequence
  Synthetic
ccaugccccaaagccacc

SEQ ID NO: 55671 - RNA, 19 nt, Artificial Sequence
  Synthetic
uccaugccccaaagccacc

SEQ ID NO: 55672 - RNA, 20 nt, Artificial Sequence
  Synthetic
guccaugccccaaagccacc

SEQ ID NO: 55673 - RNA, 21 nt, Artificial Sequence
  Synthetic
uguccaugccccaaagccacc

SEQ ID NO: 55674 - RNA, 22 nt, Artificial Sequence
  Synthetic
auguccaugccccaaagccacc

SEQ ID NO: 55675 - RNA, 23 nt, Artificial Sequence
  Synthetic
aauguccaugccccaaagccacc

SEQ ID NO: 55676 - RNA, 24 nt, Artificial Sequence
  Synthetic
caauguccaugccccaaagccacc

SEQ ID NO: 55677 - RNA, 18 nt, Artificial Sequence
  Synthetic
  misc_feature (2)..(2): n is a, c, g, or u
cncugaacuggagccacc

SEQ ID NO: 55678 - RNA, 19 nt, Artificial Sequence
  Synthetic
  misc_feature (3)..(3): n is a, c, g, or u
ucncugaacuggagccacc

SEQ ID NO: 55679 - RNA, 20 nt, Artificial Sequence
  Synthetic
  misc_feature (4)..(4): n is a, c, g, or u
gucncugaacuggagccacc

SEQ ID NO: 55680 - RNA, 21 nt, Artificial Sequence
  Synthetic
  misc_feature (5)..(5): n is a, c, g, or u
ugucncugaacuggagccacc

SEQ ID NO: 55681 - RNA, 22 nt, Artificial Sequence
  Synthetic
  misc_feature (6)..(6): n is a, c, g, or u
gugucncugaacuggagccacc

SEQ ID NO: 55682 - RNA, 23 nt, Artificial Sequence
  Synthetic
  misc_feature (7)..(7): n is a, c, g, or u
ugugucncugaacuggagccacc

SEQ ID NO: 55683 - RNA, 24 nt, Artificial Sequence
  Synthetic
  misc_feature (8)..(8): n is a, c, g, or u
cugugucncugaacuggagccacc

SEQ ID NO: 55684 - RNA, 18 nt, Artificial Sequence
  Synthetic
gggaaagcccuacgcacc

SEQ ID NO: 55685 - RNA, 19 nt, Artificial Sequence
  Synthetic
ggggaaagcccuacgcacc

SEQ ID NO: 55686 - RNA, 20 nt, Artificial Sequence
  Synthetic
gggggaaagcccuacgcacc

SEQ ID NO: 55687 - RNA, 21 nt, Artificial Sequence
  Synthetic
ugggggaaagcccuacgcacc

SEQ ID NO: 55688 - RNA, 22 nt, Artificial Sequence
  Synthetic
gugggggaaagcccuacgcacc

SEQ ID NO: 55689 - RNA, 23 nt, Artificial Sequence
  Synthetic
agugggggaaagcccuacgcacc

SEQ ID NO: 55690 - RNA, 24 nt, Artificial Sequence
  Synthetic
cagugggggaaagcccuacgcacc

SEQ ID NO: 55691 - RNA, 18 nt, Artificial Sequence
  Synthetic
  misc_feature (5)..(5): n is a, c, g, or u
cccangaauauggugacc

SEQ ID NO: 55692 - RNA, 19 nt, Artificial Sequence
  Synthetic
  misc_feature (6)..(6): n is a, c, g, or u
ucccangaauauggugacc

SEQ ID NO: 55693 - RNA, 20 nt, Artificial Sequence
  Synthetic
  misc_feature (7)..(7): n is a, c, g, or u
uucccangaauauggugacc

SEQ ID NO: 55694 - RNA, 21 nt, Artificial Sequence
  Synthetic
  misc_feature (8)..(8): n is a, c, g, or u
guucccangaauauggugacc

SEQ ID NO: 55695 - RNA, 22 nt, Artificial Sequence
  Synthetic
  misc_feature (9)..(9): n is a, c, g, or u
uguucccangaauauggugacc

SEQ ID NO: 55696 - RNA, 23 nt, Artificial Sequence
  Synthetic
  misc_feature (10)..(10): n is a, c, g, or u
uuguucccangaauauggugacc

SEQ ID NO: 55697 - RNA, 24 nt, Artificial Sequence
  Synthetic
  misc_feature (11)..(11): n is a, c, g, or u
cuuguucccangaauauggugacc

SEQ ID NO: 55698 - RNA, 18 nt, Artificial Sequence
  Synthetic
  misc_feature (1)..(1): n is a, c, g, or u
  misc_feature (7)..(7): n is a, c, g, or u
nguauunaaauggauacc

SEQ ID NO: 55699 - RNA, 19 nt, Artificial Sequence
  Synthetic
  misc_feature (2)..(2): n is a, c, g, or u
  misc_feature (8)..(8): n is a, c, g, or u
anguauunaaauggauacc

SEQ ID NO: 55700 - RNA, 20 nt, Artificial Sequence
  Synthetic
  misc_feature (3)..(3): n is a, c, g, or u
  misc_feature (9)..(9): n is a, c, g, or u
ganguauunaaauggauacc

SEQ ID NO: 55701 - RNA, 21 nt, Artificial Sequence
  Synthetic
  misc_feature (1)..(1): n is a, c, g, or u
  misc_feature (4)..(4): n is a, c, g, or u
  misc_feature (10)..(10): n is a, c, g, or u
nganguauunaaauggauacc

SEQ ID NO: 55702 - RNA, 22 nt, Artificial Sequence
  Synthetic
  misc_feature (2)..(2): n is a, c, g, or u
  misc_feature (5)..(5): n is a, c, g, or u
  misc_feature (11)..(11): n is a, c, g, or u
unganguauunaaauggauacc

SEQ ID NO: 55703 - RNA, 23 nt, Artificial Sequence
  Synthetic
  misc_feature (3)..(3): n is a, c, g, or u
  misc_feature (6)..(6): n is a, c, g, or u
  misc_feature (12)..(12): n is a, c, g, or u
uunganguauunaaauggauacc

SEQ ID NO: 55704 - RNA, 24 nt, Artificial Sequence
  Synthetic
  misc_feature (4)..(4): n is a, c, g, or u
  misc_feature (7)..(7): n is a, c, g, or u
  misc_feature (13)..(13): n is a, c, g, or u
uuunganguauunaaauggauacc

SEQ ID NO: 55705 - RNA, 18 nt, Artificial Sequence
  Synthetic
aaauacagagcccuuacc

SEQ ID NO: 55706 - RNA, 19 nt, Artificial Sequence
  Synthetic
aaaauacagagcccuuacc

SEQ ID NO: 55707 - RNA, 20 nt, Artificial Sequence
  Synthetic
gaaaauacagagcccuuacc

SEQ ID NO: 55708 - RNA, 21 nt, Artificial Sequence
  Synthetic
ggaaaauacagagcccuuacc

SEQ ID NO: 55709 - RNA, 22 nt, Artificial Sequence
  Synthetic
aggaaaauacagagcccuuacc

SEQ ID NO: 55710 - RNA, 23 nt, Artificial Sequence
  Synthetic
caggaaaauacagagcccuuacc

SEQ ID NO: 55711 - RNA, 24 nt, Artificial Sequence
  Synthetic
gcaggaaaauacagagcccuuacc

SEQ ID NO: 55712 - RNA, 18 nt, Artificial Sequence
  Synthetic
  misc_feature (3)..(3): n is a, c, g, or u
  misc_feature (9)..(9): n is a, c, g, or u
cunccaaunacauaaccc

SEQ ID NO: 55713 - RNA, 19 nt, Artificial Sequence
  Synthetic
  misc_feature (4)..(4): n is a, c, g, or u
  misc_feature (10)..(10): n is a, c, g, or u
acunccaaunacauaaccc

SEQ ID NO: 55714 - RNA, 20 nt, Artificial Sequence
  Synthetic
  misc_feature (5)..(5): n is a, c, g, or u
  misc_feature (11)..(11): n is a, c, g, or u
aacunccaaunacauaaccc

SEQ ID NO: 55715 - RNA, 21 nt, Artificial Sequence
  Synthetic
  misc_feature (6)..(6): n is a, c, g, or u
  misc_feature (12)..(12): n is a, c, g, or u
caacunccaaunacauaaccc

SEQ ID NO: 55716 - RNA, 22 nt, Artificial Sequence
  Synthetic
  misc_feature (7)..(7): n is a, c, g, or u
  misc_feature (13)..(13): n is a, c, g, or u
ccaacunccaaunacauaaccc

SEQ ID NO: 55717 - RNA, 23 nt, Artificial Sequence
  Synthetic
  misc_feature (8)..(8): n is a, c, g, or u
  misc_feature (14)..(14): n is a, c, g, or u
cccaacunccaaunacauaaccc

SEQ ID NO: 55718 - RNA, 24 nt, Artificial Sequence
  Synthetic
  misc_feature (9)..(9): n is a, c, g, or u
  misc_feature (15)..(15): n is a, c, g, or u
ccccaacunccaaunacauaaccc

SEQ ID NO: 55719 - RNA, 18 nt, Artificial Sequence
  Synthetic
  misc_feature (5)..(5): n is a, c, g, or u
ccaanuuauugcccaccc

SEQ ID NO: 55720 - RNA, 19 nt, Artificial Sequence
  Synthetic
  misc_feature (6)..(6): n is a, c, g, or u
uccaanuuauugcccaccc

SEQ ID NO: 55721 - RNA, 20 nt, Artificial Sequence
  Synthetic
  misc_feature (1)..(1): n is a, c, g, or u
  misc_feature (7)..(7): n is a, c, g, or u
nuccaanuuauugcccaccc

SEQ ID NO: 55722 - RNA, 21 nt, Artificial Sequence
  Synthetic
  misc_feature (2)..(2): n is a, c, g, or u
  misc_feature (8)..(8): n is a, c, g, or u
cnuccaanuuauugcccaccc

SEQ ID NO: 55723 - RNA, 22 nt, Artificial Sequence
  Synthetic
  misc_feature (3)..(3): n is a, c, g, or u
  misc_feature (9)..(9): n is a, c, g, or u
ucnuccaanuuauugcccaccc

SEQ ID NO: 55724 - RNA, 23 nt, Artificial Sequence
  Synthetic
  misc_feature (1)..(1): n is a, c, g, or u
  misc_feature (4)..(4): n is a, c, g, or u
  misc_feature (10)..(10): n is a, c, g, or u
nucnuccaanuuauugcccaccc

SEQ ID NO: 55725 - RNA, 24 nt, Artificial Sequence
  Synthetic
  misc_feature (2)..(2): n is a, c, g, or u
  misc_feature (5)..(5): n is a, c, g, or u
  misc_feature (11)..(11): n is a, c, g, or u
gnucnuccaanuuauugcccaccc

SEQ ID NO: 55726 - RNA, 18 nt, Artificial Sequence
  Synthetic
  misc_feature (4)..(4): n is a, c, g, or u
ccangaauauggugaccc

SEQ ID NO: 55727 - RNA, 19 nt, Artificial Sequence
  Synthetic
  misc_feature (5)..(5): n is a, c, g, or u
cccangaauauggugaccc

SEQ ID NO: 55728 - RNA, 20 nt, Artificial Sequence
  Synthetic
  misc_feature (6)..(6): n is a, c, g, or u
ucccangaauauggugaccc

SEQ ID NO: 55729 - RNA, 21 nt, Artificial Sequence
  Synthetic
  misc_feature (7)..(7): n is a, c, g, or u
uucccangaauauggugaccc

SEQ ID NO: 55730 - RNA, 22 nt, Artificial Sequence
  Synthetic
  misc_feature (8)..(8): n is a, c, g, or u
guucccangaauauggugaccc

SEQ ID NO: 55731 - RNA, 23 nt, Artificial Sequence
  Synthetic
  misc_feature (9)..(9): n is a, c, g, or u
uguucccangaauauggugaccc

SEQ ID NO: 55732 - RNA, 24 nt, Artificial Sequence
  Synthetic
  misc_feature (10)..(10): n is a, c, g, or u
uuguucccangaauauggugaccc

SEQ ID NO: 55733 - RNA, 18 nt, Artificial Sequence
  Synthetic
  misc_feature (6)..(6): n is a, c, g, or u
  misc_feature (9)..(9): n is a, c, g, or u
gccugnggncuccacccc

SEQ ID NO: 55734 - RNA, 19 nt, Artificial Sequence
  Synthetic
  misc_feature (7)..(7): n is a, c, g, or u
  misc_feature (10)..(10): n is a, c, g, or u
ugccugnggncuccacccc

SEQ ID NO: 55735 - RNA, 20 nt, Artificial Sequence
  Synthetic
  misc_feature (8)..(8): n is a, c, g, or u
  misc_feature (11)..(11): n is a, c, g, or u
gugccugnggncuccacccc

SEQ ID NO: 55736 - RNA, 21 nt, Artificial Sequence
  Synthetic
  misc_feature (9)..(9): n is a, c, g, or u
  misc_feature (12)..(12): n is a, c, g, or u
ugugccugnggncuccacccc

SEQ ID NO: 55737 - RNA, 22 nt, Artificial Sequence
  Synthetic
  misc_feature (1)..(1): n is a, c, g, or u
  misc_feature (10)..(10): n is a, c, g, or u
  misc_feature (13)..(13): n is a, c, g, or u
nugugccugnggncuccacccc

SEQ ID NO: 55738 - RNA, 23 nt, Artificial Sequence
  Synthetic
  misc_feature (2)..(2): n is a, c, g, or u
  misc_feature (11)..(11): n is a, c, g, or u
  misc_feature (14)..(14): n is a, c, g, or u
cnugugccugnggncuccacccc

SEQ ID NO: 55739 - RNA, 24 nt, Artificial Sequence
  Synthetic
  misc_feature (3)..(3): n is a, c, g, or u
  misc_feature (12)..(12): n is a, c, g, or u
  misc_feature (15)..(15): n is a, c, g, or u
ccnugugccugnggncuccacccc

SEQ ID NO: 55740 - RNA, 18 nt, Artificial Sequence
  Synthetic
  misc_feature (11)..(12): n is a, c, g, or u
acacccgggunnuccccc

SEQ ID NO: 55741 - RNA, 19 nt, Artificial Sequence
  Synthetic
  misc_feature (12)..(13): n is a, c, g, or u
gacacccgggunnuccccc

SEQ ID NO: 55742 - RNA, 20 nt, Artificial Sequence
  Synthetic
  misc_feature (13)..(14): n is a, c, g, or u
ggacacccgggunnuccccc

SEQ ID NO: 55743 - RNA, 21 nt, Artificial Sequence
  Synthetic
  misc_feature (14)..(15): n is a, c, g, or u
aggacacccgggunnuccccc

SEQ ID NO: 55744 - RNA, 22 nt, Artificial Sequence
  Synthetic
  misc_feature (15)..(16): n is a, c, g, or u
caggacacccgggunnuccccc

SEQ ID NO: 55745 - RNA, 23 nt, Artificial Sequence
  Synthetic
  misc_feature (16)..(17): n is a, c, g, or u
ccaggacacccgggunnuccccc

SEQ ID NO: 55746 - RNA, 24 nt, Artificial Sequence
  Synthetic
  misc_feature (17)..(18): n is a, c, g, or u
gccaggacacccgggunnuccccc

SEQ ID NO: 55747 - RNA, 18 nt, Artificial Sequence
  Synthetic
  misc_feature (2)..(2): n is a, c, g, or u
  misc_feature (14)..(14): n is a, c, g, or u
anagccccaagcgncccc

SEQ ID NO: 55748 - RNA, 19 nt, Artificial Sequence
  Synthetic
  misc_feature (3)..(3): n is a, c, g, or u
  misc_feature (15)..(15): n is a, c, g, or u
uanagccccaagcgncccc

SEQ ID NO: 55749 - RNA, 20 nt, Artificial Sequence
  Synthetic
  misc_feature (1)..(1): n is a, c, g, or u
  misc_feature (4)..(4): n is a, c, g, or u
  misc_feature (16)..(16): n is a, c, g, or u
nuanagccccaagcgncccc

SEQ ID NO: 55750 - RNA, 21 nt, Artificial Sequence
  Synthetic
  misc_feature (2)..(2): n is a, c, g, or u
  misc_feature (5)..(5): n is a, c, g, or u
  misc_feature (17)..(17): n is a, c, g, or u
gnuanagccccaagcgncccc

SEQ ID NO: 55751 - RNA, 22 nt, Artificial Sequence
  Synthetic
  misc_feature (3)..(3): n is a, c, g, or u
  misc_feature (6)..(6): n is a, c, g, or u
  misc_feature (18)..(18): n is a, c, g, or u
cgnuanagccccaagcgncccc

SEQ ID NO: 55752 - RNA, 23 nt, Artificial Sequence
  Synthetic
  misc_feature (4)..(4): n is a, c, g, or u
  misc_feature (7)..(7): n is a, c, g, or u
  misc_feature (19)..(19): n is a, c, g, or u
gcgnuanagccccaagcgncccc

SEQ ID NO: 55753 - RNA, 24 nt, Artificial Sequence
  Synthetic
  misc_feature (5)..(5): n is a, c, g, or u
  misc_feature (8)..(8): n is a, c, g, or u
  misc_feature (20)..(20): n is a, c, g, or u
ggcgnuanagccccaagcgncccc

SEQ ID NO: 55754 - RNA, 18 nt, Artificial Sequence
  Synthetic
  misc_feature (12)..(13): n is a, c, g, or u
gacacccgggunnucccc

SEQ ID NO: 55755 - RNA, 19 nt, Artificial Sequence
  Synthetic
  misc_feature (13)..(14): n is a, c, g, or u
ggacacccgggunnucccc

SEQ ID NO: 55756 - RNA, 20 nt, Artificial Sequence
  Synthetic
  misc_feature (14)..(15): n is a, c, g, or u
aggacacccgggunnucccc

SEQ ID NO: 55757 - RNA, 21 nt, Artificial Sequence
  Synthetic
  misc_feature (15)..(16): n is a, c, g, or u
caggacacccgggunnucccc

SEQ ID NO: 55758 - RNA, 22 nt, Artificial Sequence
  Synthetic
  misc_feature (16)..(17): n is a, c, g, or u
ccaggacacccgggunnucccc

SEQ ID NO: 55759 - RNA, 23 nt, Artificial Sequence
  Synthetic
  misc_feature (17)..(18): n is a, c, g, or u
gccaggacacccgggunnucccc

SEQ ID NO: 55760 - RNA, 24 nt, Artificial Sequence
  Synthetic
  misc_feature (18)..(19): n is a, c, g, or u
ggccaggacacccgggunnucccc

SEQ ID NO: 55761 - RNA, 18 nt, Artificial Sequence
  Synthetic
  misc_feature (3)..(3): n is a, c, g, or u
  misc_feature (6)..(6): n is a, c, g, or u
  misc_feature (9)..(9): n is a, c, g, or u
aanggngcngcaaagccc

SEQ ID NO: 55762 - RNA, 19 nt, Artificial Sequence
  Synthetic
  misc_feature (1)..(1): n is a, c, g, or u
  misc_feature (4)..(4): n is a, c, g, or u
  misc_feature (7)..(7): n is a, c, g, or u
  misc_feature (10)..(10): n is a, c, g, or u
naanggngcngcaaagccc

SEQ ID NO: 55763 - RNA, 20 nt, Artificial Sequence
  Synthetic
  misc_feature (2)..(2): n is a, c, g, or u
  misc_feature (5)..(5): n is a, c, g, or u
  misc_feature (8)..(8): n is a, c, g, or u
  misc_feature (11)..(11): n is a, c, g, or u
unaanggngcngcaaagccc

SEQ ID NO: 55764 - RNA, 21 nt, Artificial Sequence
  Synthetic
  misc_feature (3)..(3): n is a, c, g, or u
  misc_feature (6)..(6): n is a, c, g, or u
  misc_feature (9)..(9): n is a, c, g, or u
  misc_feature (12)..(12): n is a, c, g, or u
gunaanggngcngcaaagccc

SEQ ID NO: 55765 - RNA, 22 nt, Artificial Sequence
  Synthetic
  misc_feature (1)..(1): n is a, c, g, or u
  misc_feature (4)..(4): n is a, c, g, or u
  misc_feature (7)..(7): n is a, c, g, or u
  misc_feature (10)..(10): n is a, c, g, or u
  misc_feature (13)..(13): n is a, c, g, or u
ngunaanggngcngcaaagccc

SEQ ID NO: 55766 - RNA, 23 nt, Artificial Sequence
  Synthetic
  misc_feature (2)..(2): n is a, c, g, or u
  misc_feature (5)..(5): n is a, c, g, or u
  misc_feature (8)..(8): n is a, c, g, or u
  misc_feature (11)..(11): n is a, c, g, or u
  misc_feature (14)..(14): n is a, c, g, or u
gngunaanggngcngcaaagccc

SEQ ID NO: 55767 - RNA, 24 nt, Artificial Sequence
  Synthetic
  misc_feature (3)..(3): n is a, c, g, or u
  misc_feature (6)..(6): n is a, c, g, or u
  misc_feature (9)..(9): n is a, c, g, or u
  misc_feature (12)..(12): n is a, c, g, or u
  misc_feature (15)..(15): n is a, c, g, or u
ugngunaanggngcngcaaagccc

SEQ ID NO: 55768 - RNA, 18 nt, Artificial Sequence
  Synthetic
gggucaauguccaugccc

SEQ ID NO: 55769 - RNA, 19 nt, Artificial Sequence
  Synthetic
agggucaauguccaugccc

SEQ ID NO: 55770 - RNA, 20 nt, Artificial Sequence
  Synthetic
aagggucaauguccaugccc

SEQ ID NO: 55771 - RNA, 21 nt, Artificial Sequence
  Synthetic
uaagggucaauguccaugccc

SEQ ID NO: 55772 - RNA, 22 nt, Artificial Sequence
  Synthetic
auaagggucaauguccaugccc

SEQ ID NO: 55773 - RNA, 23 nt, Artificial Sequence
  Synthetic
uauaagggucaauguccaugccc

SEQ ID NO: 55774 - RNA, 24 nt, Artificial Sequence
  Synthetic
uuauaagggucaauguccaugccc

SEQ ID NO: 55775 - RNA, 18 nt, Artificial Sequence
  Synthetic
  misc_feature (6)..(6): n is a, c, g, or u
  misc_feature (9)..(9): n is a, c, g, or u
  misc_feature (15)..(15): n is a, c, g, or u
guaganganuagagnccc

SEQ ID NO: 55776 - RNA, 19 nt, Artificial Sequence
  Synthetic
  misc_feature (7)..(7): n is a, c, g, or u
  misc_feature (10)..(10): n is a, c, g, or u
  misc_feature (16)..(16): n is a, c, g, or u
aguaganganuagagnccc

SEQ ID NO: 55777 - RNA, 20 nt, Artificial Sequence
  Synthetic
  misc_feature (8)..(8): n is a, c, g, or u
  misc_feature (11)..(11): n is a, c, g, or u
  misc_feature (17)..(17): n is a, c, g, or u
caguaganganuagagnccc

SEQ ID NO: 55778 - RNA, 21 nt, Artificial Sequence
  Synthetic
  misc_feature (9)..(9): n is a, c, g, or u
  misc_feature (12)..(12): n is a, c, g, or u
  misc_feature (18)..(18): n is a, c, g, or u
acaguaganganuagagnccc

SEQ ID NO: 55779 - RNA, 22 nt, Artificial Sequence
  Synthetic
  misc_feature (1)..(1): n is a, c, g, or u
  misc_feature (10)..(10): n is a, c, g, or u
  misc_feature (13)..(13): n is a, c, g, or u
  misc_feature (19)..(19): n is a, c, g, or u
nacaguaganganuagagnccc

SEQ ID NO: 55780 - RNA, 23 nt, Artificial Sequence
  Synthetic
  misc_feature (2)..(2): n is a, c, g, or u
  misc_feature (11)..(11): n is a, c, g, or u
  misc_feature (14)..(14): n is a, c, g, or u
  misc_feature (20)..(20): n is a, c, g, or u
gnacaguaganganuagagnccc

SEQ ID NO: 55781 - RNA, 24 nt, Artificial Sequence
  Synthetic
  misc_feature (3)..(3): n is a, c, g, or u
  misc_feature (12)..(12): n is a, c, g, or u
  misc_feature (15)..(15): n is a, c, g, or u
  misc_feature (21)..(21): n is a, c, g, or u
ggnacaguaganganuagagnccc

SEQ ID NO: 55782 - RNA, 18 nt, Artificial Sequence
  Synthetic
  misc_feature (3)..(3): n is a, c, g, or u
  misc_feature (15)..(15): n is a, c, g, or u
uanagccccaagcgnccc

SEQ ID NO: 55783 - RNA, 19 nt, Artificial Sequence
  Synthetic
  misc_feature (1)..(1): n is a, c, g, or u
  misc_feature (4)..(4): n is a, c, g, or u
  misc_feature (16)..(16): n is a, c, g, or u
nuanagccccaagcgnccc

SEQ ID NO: 55784 - RNA, 20 nt, Artificial Sequence
  Synthetic
  misc_feature (2)..(2): n is a, c, g, or u
  misc_feature (5)..(5): n is a, c, g, or u
  misc_feature (17)..(17): n is a, c, g, or u
gnuanagccccaagcgnccc

SEQ ID NO: 55785 - RNA, 21 nt, Artificial Sequence
  Synthetic
  misc_feature (3)..(3): n is a, c, g, or u
  misc_feature (6)..(6): n is a, c, g, or u
  misc_feature (18)..(18): n is a, c, g, or u
cgnuanagccccaagcgnccc

SEQ ID NO: 55786 - RNA, 22 nt, Artificial Sequence
  Synthetic
  misc_feature (4)..(4): n is a, c, g, or u
  misc_feature (7)..(7): n is a, c, g, or u
  misc_feature (19)..(19): n is a, c, g, or u
gcgnuanagccccaagcgnccc

SEQ ID NO: 55787 - RNA, 23 nt, Artificial Sequence
  Synthetic
  misc_feature (5)..(5): n is a, c, g, or u
  misc_feature (8)..(8): n is a, c, g, or u
  misc_feature (20)..(20): n is a, c, g, or u
ggcgnuanagccccaagcgnccc

SEQ ID NO: 55788 - RNA, 24 nt, Artificial Sequence
  Synthetic
  misc_feature (6)..(6): n is a, c, g, or u
  misc_feature (9)..(9): n is a, c, g, or u
  misc_feature (21)..(21): n is a, c, g, or u
gggcgnuanagccccaagcgnccc

SEQ ID NO: 55789 - RNA, 18 nt, Artificial Sequence
  Synthetic
uggucuggaaagaauccc

SEQ ID NO: 55790 - RNA, 19 nt, Artificial Sequence
  Synthetic
auggucuggaaagaauccc

SEQ ID NO: 55791 - RNA, 20 nt, Artificial Sequence
  Synthetic
gauggucuggaaagaauccc

SEQ ID NO: 55792 - RNA, 21 nt, Artificial Sequence
  Synthetic
ugauggucuggaaagaauccc

SEQ ID NO: 55793 - RNA, 22 nt, Artificial Sequence
  Synthetic
cugauggucuggaaagaauccc

SEQ ID NO: 55794 - RNA, 23 nt, Artificial Sequence
  Synthetic
gcugauggucuggaaagaauccc

SEQ ID NO: 55795 - RNA, 24 nt, Artificial Sequence
  Synthetic
agcugauggucuggaaagaauccc

SEQ ID NO: 55796 - RNA, 18 nt, Artificial Sequence
  Synthetic
  misc_feature (13)..(14): n is a, c, g, or u
ggacacccgggunnuccc

SEQ ID NO: 55797 - RNA, 19 nt, Artificial Sequence
  Synthetic
  misc_feature (14)..(15): n is a, c, g, or u
aggacacccgggunnuccc

SEQ ID NO: 55798 - RNA, 20 nt, Artificial Sequence
  Synthetic
  misc_feature (15)..(16): n is a, c, g, or u
caggacacccgggunnuccc

SEQ ID NO: 55799 - RNA, 21 nt, Artificial Sequence
  Synthetic
  misc_feature (16)..(17): n is a, c, g, or u
ccaggacacccgggunnuccc

SEQ ID NO: 55800 - RNA, 22 nt, Artificial Sequence
  Synthetic
  misc_feature (17)..(18): n is a, c, g, or u
gccaggacacccgggunnuccc

SEQ ID NO: 55801 - RNA, 23 nt, Artificial Sequence
  Synthetic
  misc_feature (18)..(19): n is a, c, g, or u
ggccaggacacccgggunnuccc

SEQ ID NO: 55802 - RNA, 24 nt, Artificial Sequence
  Synthetic
  misc_feature (19)..(20): n is a, c, g, or u
uggccaggacacccgggunnuccc

SEQ ID NO: 55803 - RNA, 18 nt, Artificial Sequence
  Synthetic
  misc_feature (1)..(1): n is a, c, g, or u
  misc_feature (4)..(4): n is a, c, g, or u
  misc_feature (7)..(7): n is a, c, g, or u
  misc_feature (10)..(10): n is a, c, g, or u
naanggngcngcaaagcc

SEQ ID NO: 55804 - RNA, 19 nt, Artificial Sequence
  Synthetic
  misc_feature (2)..(2): n is a, c, g, or u
  misc_feature (5)..(5): n is a, c, g, or u
  misc_feature (8)..(8): n is a, c, g, or u
  misc_feature (11)..(11): n is a, c, g, or u
unaanggngcngcaaagcc

SEQ ID NO: 55805 - RNA, 20 nt, Artificial Sequence
  Synthetic
  misc_feature (3)..(3): n is a, c, g, or u
  misc_feature (6)..(6): n is a, c, g, or u
  misc_feature (9)..(9): n is a, c, g, or u
  misc_feature (12)..(12): n is a, c, g, or u
gunaanggngcngcaaagcc

SEQ ID NO: 55806 - RNA, 21 nt, Artificial Sequence
  Synthetic
  misc_feature (1)..(1): n is a, c, g, or u
  misc_feature (4)..(4): n is a, c, g, or u
  misc_feature (7)..(7): n is a, c, g, or u
  misc_feature (10)..(10): n is a, c, g, or u
  misc_feature (13)..(13): n is a, c, g, or u
ngunaanggngcngcaaagcc

SEQ ID NO: 55807 - RNA, 22 nt, Artificial Sequence
  Synthetic
  misc_feature (2)..(2): n is a, c, g, or u
  misc_feature (5)..(5): n is a, c, g, or u
  misc_feature (8)..(8): n is a, c, g, or u
  misc_feature (11)..(11): n is a, c, g, or u
  misc_feature (14)..(14): n is a, c, g, or u
gngunaanggngcngcaaagcc

SEQ ID NO: 55808 - RNA, 23 nt, Artificial Sequence
  Synthetic
  misc_feature (3)..(3): n is a, c, g, or u
  misc_feature (6)..(6): n is a, c, g, or u
  misc_feature (9)..(9): n is a, c, g, or u
  misc_feature (12)..(12): n is a, c, g, or u
  misc_feature (15)..(15): n is a, c, g, or u
ugngunaanggngcngcaaagcc

SEQ ID NO: 55809 - RNA, 24 nt, Artificial Sequence
  Synthetic
  misc_feature (4)..(4): n is a, c, g, or u
  misc_feature (7)..(7): n is a, c, g, or u
  misc_feature (10)..(10): n is a, c, g, or u
  misc_feature (13)..(13): n is a, c, g, or u
  misc_feature (16)..(16): n is a, c, g, or u
uugngunaanggngcngcaaagcc

SEQ ID NO: 55810 - RNA, 18 nt, Artificial Sequence
  Synthetic
uggaucggcagaggagcc

SEQ ID NO: 55811 - RNA, 19 nt, Artificial Sequence
  Synthetic
auggaucggcagaggagcc

SEQ ID NO: 55812 - RNA, 20 nt, Artificial Sequence
  Synthetic
uauggaucggcagaggagcc

SEQ ID NO: 55813 - RNA, 21 nt, Artificial Sequence
  Synthetic
guauggaucggcagaggagcc

SEQ ID NO: 55814 - RNA, 22 nt, Artificial Sequence
  Synthetic
aguauggaucggcagaggagcc

SEQ ID NO: 55815 - RNA, 23 nt, Artificial Sequence
  Synthetic
caguauggaucggcagaggagcc

SEQ ID NO: 55816 - RNA, 24 nt, Artificial Sequence
  Synthetic
gcaguauggaucggcagaggagcc

SEQ ID NO: 55817 - RNA, 18 nt, Artificial Sequence
  Synthetic
  misc_feature (5)..(5): n is a, c, g, or u
ugucncugaacuggagcc

SEQ ID NO: 55818 - RNA, 19 nt, Artificial Sequence
  Synthetic
  misc_feature (6)..(6): n is a, c, g, or u
gugucncugaacuggagcc

SEQ ID NO: 55819 - RNA, 20 nt, Artificial Sequence
  Synthetic
  misc_feature (7)..(7): n is a, c, g, or u
ugugucncugaacuggagcc

SEQ ID NO: 55820 - RNA, 21 nt, Artificial Sequence
  Synthetic
  misc_feature (8)..(8): n is a, c, g, or u
cugugucncugaacuggagcc

SEQ ID NO: 55821 - RNA, 22 nt, Artificial Sequence
  Synthetic
  misc_feature (9)..(9): n is a, c, g, or u
ucugugucncugaacuggagcc

SEQ ID NO: 55822 - RNA, 23 nt, Artificial Sequence
  Synthetic
  misc_feature (10)..(10): n is a, c, g, or u
uucugugucncugaacuggagcc

SEQ ID NO: 55823 - RNA, 24 nt, Artificial Sequence
  Synthetic
  misc_feature (11)..(11): n is a, c, g, or u
guucugugucncugaacuggagcc

SEQ ID NO: 55824 - RNA, 18 nt, Artificial Sequence
  Synthetic
gcacuaguaaacugagcc

SEQ ID NO: 55825 - RNA, 19 nt, Artificial Sequence
  Synthetic
ugcacuaguaaacugagcc

SEQ ID NO: 55826 - RNA, 20 nt, Artificial Sequence
  Synthetic
uugcacuaguaaacugagcc

SEQ ID NO: 55827 - RNA, 21 nt, Artificial Sequence
  Synthetic
auugcacuaguaaacugagcc

SEQ ID NO: 55828 - RNA, 22 nt, Artificial Sequence
  Synthetic
aauugcacuaguaaacugagcc

SEQ ID NO: 55829 - RNA, 23 nt, Artificial Sequence
  Synthetic
aaauugcacuaguaaacugagcc

SEQ ID NO: 55830 - RNA, 24 nt, Artificial Sequence
  Synthetic
caaauugcacuaguaaacugagcc

SEQ ID NO: 55831 - RNA, 18 nt, Artificial Sequence
  Synthetic
  misc_feature (5)..(5): n is a, c, g, or u
  misc_feature (11)..(11): n is a, c, g, or u
  misc_feature (14)..(14): n is a, c, g, or u
gaagngggcgnuanagcc

SEQ ID NO: 55832 - RNA, 19 nt, Artificial Sequence
  Synthetic
  misc_feature (6)..(6): n is a, c, g, or u
  misc_feature (12)..(12): n is a, c, g, or u
  misc_feature (15)..(15): n is a, c, g, or u
agaagngggcgnuanagcc

SEQ ID NO: 55833 - RNA, 20 nt, Artificial Sequence
  Synthetic
  misc_feature (1)..(1): n is a, c, g, or u
  misc_feature (7)..(7): n is a, c, g, or u
  misc_feature (13)..(13): n is a, c, g, or u
  misc_feature (16)..(16): n is a, c, g, or u
nagaagngggcgnuanagcc

SEQ ID NO: 55834 - RNA, 21 nt, Artificial Sequence
  Synthetic
  misc_feature (2)..(2): n is a, c, g, or u
  misc_feature (8)..(8): n is a, c, g, or u
  misc_feature (14)..(14): n is a, c, g, or u
  misc_feature (17)..(17): n is a, c, g, or u
gnagaagngggcgnuanagcc

SEQ ID NO: 55835 - RNA, 22 nt, Artificial Sequence
  Synthetic
  misc_feature (3)..(3): n is a, c, g, or u
  misc_feature (9)..(9): n is a, c, g, or u
  misc_feature (15)..(15): n is a, c, g, or u
  misc_feature (18)..(18): n is a, c, g, or u
cgnagaagngggcgnuanagcc

SEQ ID NO: 55836 - RNA, 23 nt, Artificial Sequence
  Synthetic
  misc_feature (4)..(4): n is a, c, g, or u
  misc_feature (10)..(10): n is a, c, g, or u
  misc_feature (16)..(16): n is a, c, g, or u
  misc_feature (19)..(19): n is a, c, g, or u
acgnagaagngggcgnuanagcc

SEQ ID NO: 55837 - RNA, 24 nt, Artificial Sequence
  Synthetic
  misc_feature (5)..(5): n is a, c, g, or u
  misc_feature (11)..(11): n is a, c, g, or u
  misc_feature (17)..(17): n is a, c, g, or u
  misc_feature (20)..(20): n is a, c, g, or u
gacgnagaagngggcgnuanagcc

SEQ ID NO: 55838 - RNA, 18 nt, Artificial Sequence
  Synthetic
ggaagaugauaaaacgcc

SEQ ID NO: 55839 - RNA, 19 nt, Artificial Sequence
  Synthetic
aggaagaugauaaaacgcc

SEQ ID NO: 55840 - RNA, 20 nt, Artificial Sequence
  Synthetic
gaggaagaugauaaaacgcc

SEQ ID NO: 55841 - RNA, 21 nt, Artificial Sequence
  Synthetic
agaggaagaugauaaaacgcc

SEQ ID NO: 55842 - RNA, 22 nt, Artificial Sequence
  Synthetic
aagaggaagaugauaaaacgcc

SEQ ID NO: 55843 - RNA, 23 nt, Artificial Sequence
  Synthetic
gaagaggaagaugauaaaacgcc

SEQ ID NO: 55844 - RNA, 24 nt, Artificial Sequence
  Synthetic
ugaagaggaagaugauaaaacgcc

SEQ ID NO: 55845 - RNA, 18 nt, Artificial Sequence
  Synthetic
aacaagaaacacaccgcc

SEQ ID NO: 55846 - RNA, 19 nt, Artificial Sequence
  Synthetic
caacaagaaacacaccgcc

SEQ ID NO: 55847 - RNA, 20 nt, Artificial Sequence
  Synthetic
ucaacaagaaacacaccgcc

SEQ ID NO: 55848 - RNA, 21 nt, Artificial Sequence
  Synthetic
gucaacaagaaacacaccgcc

SEQ ID NO: 55849 - RNA, 22 nt, Artificial Sequence
  Synthetic
ugucaacaagaaacacaccgcc

SEQ ID NO: 55850 - RNA, 23 nt, Artificial Sequence
  Synthetic
uugucaacaagaaacacaccgcc

SEQ ID NO: 55851 - RNA, 24 nt, Artificial Sequence
  Synthetic
uuugucaacaagaaacacaccgcc

SEQ ID NO: 55852 - RNA, 18 nt, Artificial Sequence
  Synthetic
  misc_feature (6)..(6): n is a, c, g, or u
uccgcnggauucagcgcc

SEQ ID NO: 55853 - RNA, 19 nt, Artificial Sequence
  Synthetic
  misc_feature (7)..(7): n is a, c, g, or u
guccgcnggauucagcgcc

SEQ ID NO: 55854 - RNA, 20 nt, Artificial Sequence
  Synthetic
  misc_feature (8)..(8): n is a, c, g, or u
cguccgcnggauucagcgcc

SEQ ID NO: 55855 - RNA, 21 nt, Artificial Sequence
  Synthetic
  misc_feature (9)..(9): n is a, c, g, or u
ucguccgcnggauucagcgcc

SEQ ID NO: 55856 - RNA, 22 nt, Artificial Sequence
  Synthetic
  misc_feature (1)..(1): n is a, c, g, or u
  misc_feature (10)..(10): n is a, c, g, or u
nucguccgcnggauucagcgcc

SEQ ID NO: 55857 - RNA, 23 nt, Artificial Sequence
  Synthetic
  misc_feature (2)..(2): n is a, c, g, or u
  misc_feature (11)..(11): n is a, c, g, or u
gnucguccgcnggauucagcgcc

SEQ ID NO: 55858 - RNA, 24 nt, Artificial Sequence
  Synthetic
  misc_feature (3)..(3): n is a, c, g, or u
  misc_feature (12)..(12): n is a, c, g, or u
ggnucguccgcnggauucagcgcc

SEQ ID NO: 55859 - RNA, 18 nt, Artificial Sequence
  Synthetic
  misc_feature (7)..(7): n is a, c, g, or u
  misc_feature (10)..(10): n is a, c, g, or u
  misc_feature (13)..(13): n is a, c, g, or u
auuuuungunagngggcc

SEQ ID NO: 55860 - RNA, 19 nt, Artificial Sequence
  Synthetic
  misc_feature (8)..(8): n is a, c, g, or u
  misc_feature (11)..(11): n is a, c, g, or u
  misc_feature (14)..(14): n is a, c, g, or u
cauuuuungunagngggcc

SEQ ID NO: 55861 - RNA, 20 nt, Artificial Sequence
  Synthetic
  misc_feature (9)..(9): n is a, c, g, or u
  misc_feature (12)..(12): n is a, c, g, or u
  misc_feature (15)..(15): n is a, c, g, or u
ucauuuuungunagngggcc

SEQ ID NO: 55862 - RNA, 21 nt, Artificial Sequence
  Synthetic
  misc_feature (10)..(10): n is a, c, g, or u
  misc_feature (13)..(13): n is a, c, g, or u
  misc_feature (16)..(16): n is a, c, g, or u
uucauuuuungunagngggcc

SEQ ID NO: 55863 - RNA, 22 nt, Artificial Sequence
  Synthetic
  misc_feature (11)..(11): n is a, c, g, or u
  misc_feature (14)..(14): n is a, c, g, or u
  misc_feature (17)..(17): n is a, c, g, or u
auucauuuuungunagngggcc

SEQ ID NO: 55864 - RNA, 23 nt, Artificial Sequence
  Synthetic
  misc_feature (12)..(12): n is a, c, g, or u
  misc_feature (15)..(15): n is a, c, g, or u
  misc_feature (18)..(18): n is a, c, g, or u
aauucauuuuungunagngggcc

SEQ ID NO: 55865 - RNA, 24 nt, Artificial Sequence
  Synthetic
  misc_feature (13)..(13): n is a, c, g, or u
  misc_feature (16)..(16): n is a, c, g, or u
  misc_feature (19)..(19): n is a, c, g, or u
caauucauuuuungunagngggcc

SEQ ID NO: 55866 - RNA, 18 nt, Artificial Sequence
  Synthetic
acgcaugcgcugauggcc

SEQ ID NO: 55867 - RNA, 19 nt, Artificial Sequence
  Synthetic
cacgcaugcgcugauggcc

SEQ ID NO: 55868 - RNA, 20 nt, Artificial Sequence
  Synthetic
ccacgcaugcgcugauggcc

SEQ ID NO: 55869 - RNA, 21 nt, Artificial Sequence
  Synthetic
uccacgcaugcgcugauggcc

SEQ ID NO: 55870 - RNA, 22 nt, Artificial Sequence
  Synthetic
uuccacgcaugcgcugauggcc

SEQ ID NO: 55871 - RNA, 23 nt, Artificial Sequence
  Synthetic
guuccacgcaugcgcugauggcc

SEQ ID NO: 55872 - RNA, 24 nt, Artificial Sequence
  Synthetic
gguuccacgcaugcgcugauggcc

SEQ ID NO: 55873 - RNA, 18 nt, Artificial Sequence
  Synthetic
agggucaauguccaugcc

SEQ ID NO: 55874 - RNA, 19 nt, Artificial Sequence
  Synthetic
aagggucaauguccaugcc

SEQ ID NO: 55875 - RNA, 20 nt, Artificial Sequence
  Synthetic
uaagggucaauguccaugcc

SEQ ID NO: 55876 - RNA, 21 nt, Artificial Sequence
  Synthetic
auaagggucaauguccaugcc

SEQ ID NO: 55877 - RNA, 22 nt, Artificial Sequence
  Synthetic
uauaagggucaauguccaugcc

SEQ ID NO: 55878 - RNA, 23 nt, Artificial Sequence
  Synthetic
uuauaagggucaauguccaugcc

SEQ ID NO: 55879 - RNA, 24 nt, Artificial Sequence
  Synthetic
uuuauaagggucaauguccaugcc

SEQ ID NO: 55880 - RNA, 18 nt, Artificial Sequence
  Synthetic
aacagaccaauuuaugcc

SEQ ID NO: 55881 - RNA, 19 nt, Artificial Sequence
  Synthetic
gaacagaccaauuuaugcc

SEQ ID NO: 55882 - RNA, 20 nt, Artificial Sequence
  Synthetic
ugaacagaccaauuuaugcc

SEQ ID NO: 55883 - RNA, 21 nt, Artificial Sequence
  Synthetic
gugaacagaccaauuuaugcc

SEQ ID NO: 55884 - RNA, 22 nt, Artificial Sequence
  Synthetic
ggugaacagaccaauuuaugcc

SEQ ID NO: 55885 - RNA, 23 nt, Artificial Sequence
  Synthetic
uggugaacagaccaauuuaugcc

SEQ ID NO: 55886 - RNA, 24 nt, Artificial Sequence
  Synthetic
cuggugaacagaccaauuuaugcc

SEQ ID NO: 55887 - RNA, 18 nt, Artificial Sequence
  Synthetic
  misc_feature (13)..(13): n is a, c, g, or u
aacagaguugucngugcc

SEQ ID NO: 55888 - RNA, 19 nt, Artificial Sequence
  Synthetic
  misc_feature (14)..(14): n is a, c, g, or u
caacagaguugucngugcc

SEQ ID NO: 55889 - RNA, 20 nt, Artificial Sequence
  Synthetic
  misc_feature (15)..(15): n is a, c, g, or u
acaacagaguugucngugcc

SEQ ID NO: 55890 - RNA, 21 nt, Artificial Sequence
  Synthetic
  misc_feature (16)..(16): n is a, c, g, or u
gacaacagaguugucngugcc

SEQ ID NO: 55891 - RNA, 22 nt, Artificial Sequence
  Synthetic
  misc_feature (17)..(17): n is a, c, g, or u
ggacaacagaguugucngugcc

SEQ ID NO: 55892 - RNA, 23 nt, Artificial Sequence
  Synthetic
  misc_feature (18)..(18): n is a, c, g, or u
aggacaacagaguugucngugcc

SEQ ID NO: 55893 - RNA, 24 nt, Artificial Sequence
  Synthetic
  misc_feature (19)..(19): n is a, c, g, or u
gaggacaacagaguugucngugcc

SEQ ID NO: 55894 - RNA, 18 nt, Artificial Sequence
  Synthetic
  misc_feature (3)..(3): n is a, c, g, or u
  misc_feature (5)..(6): n is a, c, g, or u
  misc_feature (12)..(12): n is a, c, g, or u
gunannacaccnugugcc

SEQ ID NO: 55895 - RNA, 19 nt, Artificial Sequence
  Synthetic
  misc_feature (4)..(4): n is a, c, g, or u
  misc_feature (6)..(7): n is a, c, g, or u
  misc_feature (13)..(13): n is a, c, g, or u
ugunannacaccnugugcc

SEQ ID NO: 55896 - RNA, 20 nt, Artificial Sequence
  Synthetic
  misc_feature (5)..(5): n is a, c, g, or u
  misc_feature (7)..(8): n is a, c, g, or u
  misc_feature (14)..(14): n is a, c, g, or u
uugunannacaccnugugcc

SEQ ID NO: 55897 - RNA, 21 nt, Artificial Sequence
  Synthetic
  misc_feature (6)..(6): n is a, c, g, or u
  misc_feature (8)..(9): n is a, c, g, or u
  misc_feature (15)..(15): n is a, c, g, or u
guugunannacaccnugugcc

SEQ ID NO: 55898 - RNA, 22 nt, Artificial Sequence
  Synthetic
  misc_feature (1)..(1): n is a, c, g, or u
  misc_feature (7)..(7): n is a, c, g, or u
  misc_feature (9)..(10): n is a, c, g, or u
  misc_feature (16)..(16): n is a, c, g, or u
nguugunannacaccnugugcc

SEQ ID NO: 55899 - RNA, 23 nt, Artificial Sequence
  Synthetic
  misc_feature (2)..(2): n is a, c, g, or u
  misc_feature (8)..(8): n is a, c, g, or u
  misc_feature (10)..(11): n is a, c, g, or u
  misc_feature (17)..(17): n is a, c, g, or u
anguugunannacaccnugugcc

SEQ ID NO: 55900 - RNA, 24 nt, Artificial Sequence
  Synthetic
  misc_feature (3)..(3): n is a, c, g, or u
  misc_feature (9)..(9): n is a, c, g, or u
  misc_feature (11)..(12): n is a, c, g, or u
  misc_feature (18)..(18): n is a, c, g, or u
aanguugunannacaccnugugcc

SEQ ID NO: 55901 - RNA, 18 nt, Artificial Sequence
  Synthetic
  misc_feature (2)..(2): n is a, c, g, or u
  misc_feature (8)..(8): n is a, c, g, or u
ancacaanauagcuugcc

SEQ ID NO: 55902 - RNA, 19 nt, Artificial Sequence
  Synthetic
  misc_feature (3)..(3): n is a, c, g, or u
  misc_feature (9)..(9): n is a, c, g, or u
cancacaanauagcuugcc

SEQ ID NO: 55903 - RNA, 20 nt, Artificial Sequence
  Synthetic
  misc_feature (4)..(4): n is a, c, g, or u
  misc_feature (10)..(10): n is a, c, g, or u
ccancacaanauagcuugcc

SEQ ID NO: 55904 - RNA, 21 nt, Artificial Sequence
  Synthetic
  misc_feature (5)..(5): n is a, c, g, or u
  misc_feature (11)..(11): n is a, c, g, or u
cccancacaanauagcuugcc

SEQ ID NO: 55905 - RNA, 22 nt, Artificial Sequence
  Synthetic
  misc_feature (6)..(6): n is a, c, g, or u
  misc_feature (12)..(12): n is a, c, g, or u
ccccancacaanauagcuugcc

SEQ ID NO: 55906 - RNA, 23 nt, Artificial Sequence
  Synthetic
  misc_feature (7)..(7): n is a, c, g, or u
  misc_feature (13)..(13): n is a, c, g, or u
accccancacaanauagcuugcc

SEQ ID NO: 55907 - RNA, 24 nt, Artificial Sequence
  Synthetic
  misc_feature (8)..(8): n is a, c, g, or u
  misc_feature (14)..(14): n is a, c, g, or u
caccccancacaanauagcuugcc

SEQ ID NO: 55908 - RNA, 18 nt, Artificial Sequence
  Synthetic
acuccuaccuuguuugcc

SEQ ID NO: 55909 - RNA, 19 nt, Artificial Sequence
  Synthetic
cacuccuaccuuguuugcc

SEQ ID NO: 55910 - RNA, 20 nt, Artificial Sequence
  Synthetic
ccacuccuaccuuguuugcc

SEQ ID NO: 55911 - RNA, 21 nt, Artificial Sequence
  Synthetic
cccacuccuaccuuguuugcc

SEQ ID NO: 55912 - RNA, 22 nt, Artificial Sequence
  Synthetic
ucccacuccuaccuuguuugcc

SEQ ID NO: 55913 - RNA, 23 nt, Artificial Sequence
  Synthetic
cucccacuccuaccuuguuugcc

SEQ ID NO: 55914 - RNA, 24 nt, Artificial Sequence
  Synthetic
ccucccacuccuaccuuguuugcc

SEQ ID NO: 55915 - RNA, 18 nt, Artificial Sequence
  Synthetic
  misc_feature (7)..(7): n is a, c, g, or u
  misc_feature (10)..(10): n is a, c, g, or u
  misc_feature (16)..(16): n is a, c, g, or u
aguaganganuagagncc

SEQ ID NO: 55916 - RNA, 19 nt, Artificial Sequence
  Synthetic
  misc_feature (8)..(8): n is a, c, g, or u
  misc_feature (11)..(11): n is a, c, g, or u
  misc_feature (17)..(17): n is a, c, g, or u
caguaganganuagagncc

SEQ ID NO: 55917 - RNA, 20 nt, Artificial Sequence
  Synthetic
  misc_feature (9)..(9): n is a, c, g, or u
  misc_feature (12)..(12): n is a, c, g, or u
  misc_feature (18)..(18): n is a, c, g, or u
acaguaganganuagagncc

SEQ ID NO: 55918 - RNA, 21 nt, Artificial Sequence
  Synthetic
  misc_feature (1)..(1): n is a, c, g, or u
  misc_feature (10)..(10): n is a, c, g, or u
  misc_feature (13)..(13): n is a, c, g, or u
  misc_feature (19)..(19): n is a, c, g, or u
nacaguaganganuagagncc

SEQ ID NO: 55919 - RNA, 22 nt, Artificial Sequence
  Synthetic
  misc_feature (2)..(2): n is a, c, g, or u
  misc_feature (11)..(11): n is a, c, g, or u
  misc_feature (14)..(14): n is a, c, g, or u
  misc_feature (20)..(20): n is a, c, g, or u
gnacaguaganganuagagncc

SEQ ID NO: 55920 - RNA, 23 nt, Artificial Sequence
  Synthetic
  misc_feature (3)..(3): n is a, c, g, or u
  misc_feature (12)..(12): n is a, c, g, or u
  misc_feature (15)..(15): n is a, c, g, or u
  misc_feature (21)..(21): n is a, c, g, or u
ggnacaguaganganuagagncc

SEQ ID NO: 55921 - RNA, 24 nt, Artificial Sequence
  Synthetic
  misc_feature (4)..(4): n is a, c, g, or u
  misc_feature (13)..(13): n is a, c, g, or u
  misc_feature (16)..(16): n is a, c, g, or u
  misc_feature (22)..(22): n is a, c, g, or u
aggnacaguaganganuagagncc

SEQ ID NO: 55922 - RNA, 18 nt, Artificial Sequence
  Synthetic
  misc_feature (16)..(16): n is a, c, g, or u
gcgaagugcacacggncc

SEQ ID NO: 55923 - RNA, 19 nt, Artificial Sequence
  Synthetic
  misc_feature (17)..(17): n is a, c, g, or u
agcgaagugcacacggncc

SEQ ID NO: 55924 - RNA, 20 nt, Artificial Sequence
  Synthetic
  misc_feature (18)..(18): n is a, c, g, or u
aagcgaagugcacacggncc

SEQ ID NO: 55925 - RNA, 21 nt, Artificial Sequence
  Synthetic
  misc_feature (19)..(19): n is a, c, g, or u
gaagcgaagugcacacggncc

SEQ ID NO: 55926 - RNA, 22 nt, Artificial Sequence
  Synthetic
  misc_feature (20)..(20): n is a, c, g, or u
ugaagcgaagugcacacggncc

SEQ ID NO: 55927 - RNA, 23 nt, Artificial Sequence
  Synthetic
  misc_feature (21)..(21): n is a, c, g, or u
gugaagcgaagugcacacggncc

SEQ ID NO: 55928 - RNA, 24 nt, Artificial Sequence
  Synthetic
  misc_feature (22)..(22): n is a, c, g, or u
ggugaagcgaagugcacacggncc

SEQ ID NO: 55929 - RNA, 18 nt, Artificial Sequence
  Synthetic
  misc_feature (13)..(13): n is a, c, g, or u
gcugguggucgungaucc

SEQ ID NO: 55930 - RNA, 19 nt, Artificial Sequence
  Synthetic
  misc_feature (14)..(14): n is a, c, g, or u
ugcugguggucgungaucc

SEQ ID NO: 55931 - RNA, 20 nt, Artificial Sequence
  Synthetic
  misc_feature (15)..(15): n is a, c, g, or u
gugcugguggucgungaucc

SEQ ID NO: 55932 - RNA, 21 nt, Artificial Sequence
  Synthetic
  misc_feature (16)..(16): n is a, c, g, or u
cgugcugguggucgungaucc

SEQ ID NO: 55933 - RNA, 22 nt, Artificial Sequence
  Synthetic
  misc_feature (17)..(17): n is a, c, g, or u
ccgugcugguggucgungaucc

SEQ ID NO: 55934 - RNA, 23 nt, Artificial Sequence
  Synthetic
  misc_feature (18)..(18): n is a, c, g, or u
cccgugcugguggucgungaucc

SEQ ID NO: 55935 - RNA, 24 nt, Artificial Sequence
  Synthetic
  misc_feature (19)..(19): n is a, c, g, or u
ucccgugcugguggucgungaucc

SEQ ID NO: 55936 - RNA, 18 nt, Artificial Sequence
  Synthetic
cgggcugaggcccacucc

SEQ ID NO: 55937 - RNA, 19 nt, Artificial Sequence
  Synthetic
acgggcugaggcccacucc

SEQ ID NO: 55938 - RNA, 20 nt, Artificial Sequence
  Synthetic
aacgggcugaggcccacucc

SEQ ID NO: 55939 - RNA, 21 nt, Artificial Sequence
  Synthetic
aaacgggcugaggcccacucc

SEQ ID NO: 55940 - RNA, 22 nt, Artificial Sequence
  Synthetic
gaaacgggcugaggcccacucc

SEQ ID NO: 55941 - RNA, 23 nt, Artificial Sequence
  Synthetic
agaaacgggcugaggcccacucc

SEQ ID NO: 55942 - RNA, 24 nt, Artificial Sequence
  Synthetic
gagaaacgggcugaggcccacucc

SEQ ID NO: 55943 - RNA, 18 nt, Artificial Sequence
  Synthetic
uucccaccuuaugagucc

SEQ ID NO: 55944 - RNA, 19 nt, Artificial Sequence
  Synthetic
uuucccaccuuaugagucc

SEQ ID NO: 55945 - RNA, 20 nt, Artificial Sequence
  Synthetic
  misc_feature (1)..(1): n is a, c, g, or u
nuuucccaccuuaugagucc

SEQ ID NO: 55946 - RNA, 21 nt, Artificial Sequence
  Synthetic
  misc_feature (2)..(2): n is a, c, g, or u
anuuucccaccuuaugagucc

SEQ ID NO: 55947 - RNA, 22 nt, Artificial Sequence
  Synthetic
  misc_feature (3)..(3): n is a, c, g, or u
aanuuucccaccuuaugagucc

SEQ ID NO: 55948 - RNA, 23 nt, Artificial Sequence
  Synthetic
  misc_feature (4)..(4): n is a, c, g, or u
aaanuuucccaccuuaugagucc

SEQ ID NO: 55949 - RNA, 24 nt, Artificial Sequence
  Synthetic
  misc_feature (5)..(5): n is a, c, g, or u
uaaanuuucccaccuuaugagucc

SEQ ID NO: 55950 - RNA, 18 nt, Artificial Sequence
  Synthetic
aacauaccuugauagucc

SEQ ID NO: 55951 - RNA, 19 nt, Artificial Sequence
  Synthetic
caacauaccuugauagucc

SEQ ID NO: 55952 - RNA, 20 nt, Artificial Sequence
  Synthetic
gcaacauaccuugauagucc

SEQ ID NO: 55953 - RNA, 18 nt, Artificial Sequence
  Synthetic
  misc_feature (6)..(6): n is a, c, g, or u
  misc_feature (12)..(12): n is a, c, g, or u
ccccgngagggnucgucc

SEQ ID NO: 55954 - RNA, 19 nt, Artificial Sequence
  Synthetic
  misc_feature (1)..(1): n is a, c, g, or u
  misc_feature (7)..(7): n is a, c, g, or u
  misc_feature (13)..(13): n is a, c, g, or u
nccccgngagggnucgucc

SEQ ID NO: 55955 - RNA, 20 nt, Artificial Sequence
  Synthetic
  misc_feature (2)..(2): n is a, c, g, or u
  misc_feature (8)..(8): n is a, c, g, or u
  misc_feature (14)..(14): n is a, c, g, or u
gnccccgngagggnucgucc

SEQ ID NO: 55956 - RNA, 21 nt, Artificial Sequence
  Synthetic
  misc_feature (3)..(3): n is a, c, g, or u
  misc_feature (9)..(9): n is a, c, g, or u
  misc_feature (15)..(15): n is a, c, g, or u
cgnccccgngagggnucgucc

SEQ ID NO: 55957 - RNA, 22 nt, Artificial Sequence
  Synthetic
  misc_feature (4)..(4): n is a, c, g, or u
  misc_feature (10)..(10): n is a, c, g, or u
  misc_feature (16)..(16): n is a, c, g, or u
gcgnccccgngagggnucgucc

SEQ ID NO: 55958 - RNA, 23 nt, Artificial Sequence
  Synthetic
  misc_feature (5)..(5): n is a, c, g, or u
  misc_feature (11)..(11): n is a, c, g, or u
  misc_feature (17)..(17): n is a, c, g, or u
agcgnccccgngagggnucgucc

SEQ ID NO: 55959 - RNA, 24 nt, Artificial Sequence
  Synthetic
  misc_feature (6)..(6): n is a, c, g, or u
  misc_feature (12)..(12): n is a, c, g, or u
  misc_feature (18)..(18): n is a, c, g, or u
aagcgnccccgngagggnucgucc

SEQ ID NO: 55960 - RNA, 18 nt, Artificial Sequence
  Synthetic
uaacacgagcaggggucc

SEQ ID NO: 55961 - RNA, 19 nt, Artificial Sequence
  Synthetic
guaacacgagcaggggucc

SEQ ID NO: 55962 - RNA, 20 nt, Artificial Sequence
  Synthetic
uguaacacgagcaggggucc

SEQ ID NO: 55963 - RNA, 21 nt, Artificial Sequence
  Synthetic
cuguaacacgagcaggggucc

SEQ ID NO: 55964 - RNA, 22 nt, Artificial Sequence
  Synthetic
ccuguaacacgagcaggggucc

SEQ ID NO: 55965 - RNA, 23 nt, Artificial Sequence
  Synthetic
gccuguaacacgagcaggggucc

SEQ ID NO: 55966 - RNA, 24 nt, Artificial Sequence
  Synthetic
cgccuguaacacgagcaggggucc

SEQ ID NO: 55967 - RNA, 18 nt, Artificial Sequence
  Synthetic
  misc_feature (7)..(7): n is a, c, g, or u
  misc_feature (15)..(15): n is a, c, g, or u
ccaggunauugaccnucc

SEQ ID NO: 55968 - RNA, 19 nt, Artificial Sequence
  Synthetic
  misc_feature (8)..(8): n is a, c, g, or u
  misc_feature (16)..(16): n is a, c, g, or u
uccaggunauugaccnucc

SEQ ID NO: 55969 - RNA, 20 nt, Artificial Sequence
  Synthetic
  misc_feature (9)..(9): n is a, c, g, or u
  misc_feature (17)..(17): n is a, c, g, or u
auccaggunauugaccnucc

SEQ ID NO: 55970 - RNA, 21 nt, Artificial Sequence
  Synthetic
  misc_feature (10)..(10): n is a, c, g, or u
  misc_feature (18)..(18): n is a, c, g, or u
gauccaggunauugaccnucc

SEQ ID NO: 55971 - RNA, 22 nt, Artificial Sequence
  Synthetic
  misc_feature (11)..(11): n is a, c, g, or u
  misc_feature (19)..(19): n is a, c, g, or u
cgauccaggunauugaccnucc

SEQ ID NO: 55972 - RNA, 23 nt, Artificial Sequence
  Synthetic
  misc_feature (12)..(12): n is a, c, g, or u
  misc_feature (20)..(20): n is a, c, g, or u
ucgauccaggunauugaccnucc

SEQ ID NO: 55973 - RNA, 24 nt, Artificial Sequence
  Synthetic
  misc_feature (13)..(13): n is a, c, g, or u
  misc_feature (21)..(21): n is a, c, g, or u
uucgauccaggunauugaccnucc

SEQ ID NO: 55974 - RNA, 18 nt, Artificial Sequence
  Synthetic
  misc_feature (9)..(9): n is a, c, g, or u
  misc_feature (12)..(12): n is a, c, g, or u
  misc_feature (15)..(15): n is a, c, g, or u
gguuuaaunccnuunucc

SEQ ID NO: 55975 - RNA, 19 nt, Artificial Sequence
  Synthetic
  misc_feature (1)..(1): n is a, c, g, or u
  misc_feature (10)..(10): n is a, c, g, or u
  misc_feature (13)..(13): n is a, c, g, or u
  misc_feature (16)..(16): n is a, c, g, or u
ngguuuaaunccnuunucc

SEQ ID NO: 55976 - RNA, 20 nt, Artificial Sequence
  Synthetic
  misc_feature (2)..(2): n is a, c, g, or u
  misc_feature (11)..(11): n is a, c, g, or u
  misc_feature (14)..(14): n is a, c, g, or u
  misc_feature (17)..(17): n is a, c, g, or u
angguuuaaunccnuunucc

SEQ ID NO: 55977 - RNA, 21 nt, Artificial Sequence
  Synthetic
  misc_feature (3)..(3): n is a, c, g, or u
  misc_feature (12)..(12): n is a, c, g, or u
  misc_feature (15)..(15): n is a, c, g, or u
  misc_feature (18)..(18): n is a, c, g, or u
uangguuuaaunccnuunucc

SEQ ID NO: 55978 - RNA, 22 nt, Artificial Sequence
  Synthetic
  misc_feature (4)..(4): n is a, c, g, or u
  misc_feature (13)..(13): n is a, c, g, or u
  misc_feature (16)..(16): n is a, c, g, or u
  misc_feature (19)..(19): n is a, c, g, or u
auangguuuaaunccnuunucc

SEQ ID NO: 55979 - RNA, 23 nt, Artificial Sequence
  Synthetic
  misc_feature (5)..(5): n is a, c, g, or u
  misc_feature (14)..(14): n is a, c, g, or u
  misc_feature (17)..(17): n is a, c, g, or u
  misc_feature (20)..(20): n is a, c, g, or u
aauangguuuaaunccnuunucc

SEQ ID NO: 55980 - RNA, 24 nt, Artificial Sequence
  Synthetic
  misc_feature (6)..(6): n is a, c, g, or u
  misc_feature (15)..(15): n is a, c, g, or u
  misc_feature (18)..(18): n is a, c, g, or u
  misc_feature (21)..(21): n is a, c, g, or u
uaauangguuuaaunccnuunucc

SEQ ID NO: 55981 - RNA, 18 nt, Artificial Sequence
  Synthetic
  misc_feature (12)..(12): n is a, c, g, or u
aaaaaagagagnaauucc

SEQ ID NO: 55982 - RNA, 19 nt, Artificial Sequence
  Synthetic
  misc_feature (13)..(13): n is a, c, g, or u
caaaaaagagagnaauucc

SEQ ID NO: 55983 - RNA, 20 nt, Artificial Sequence
  Synthetic
  misc_feature (14)..(14): n is a, c, g, or u
gcaaaaaagagagnaauucc

SEQ ID NO: 55984 - RNA, 21 nt, Artificial Sequence
  Synthetic
  misc_feature (15)..(15): n is a, c, g, or u
ggcaaaaaagagagnaauucc

SEQ ID NO: 55985 - RNA, 22 nt, Artificial Sequence
  Synthetic
  misc_feature (16)..(16): n is a, c, g, or u
aggcaaaaaagagagnaauucc

SEQ ID NO: 55986 - RNA, 23 nt, Artificial Sequence
  Synthetic
  misc_feature (17)..(17): n is a, c, g, or u
aaggcaaaaaagagagnaauucc

SEQ ID NO: 55987 - RNA, 24 nt, Artificial Sequence
  Synthetic
  misc_feature (18)..(18): n is a, c, g, or u
gaaggcaaaaaagagagnaauucc

SEQ ID NO: 55988 - RNA, 18 nt, Artificial Sequence
  Synthetic
  misc_feature (2)..(2): n is a, c, g, or u
gnaaggagguguacuucc

SEQ ID NO: 55989 - RNA, 19 nt, Artificial Sequence
  Synthetic
  misc_feature (3)..(3): n is a, c, g, or u
ggnaaggagguguacuucc

SEQ ID NO: 55990 - RNA, 20 nt, Artificial Sequence
  Synthetic
  misc_feature (4)..(4): n is a, c, g, or u
uggnaaggagguguacuucc

SEQ ID NO: 55991 - RNA, 21 nt, Artificial Sequence
  Synthetic
  misc_feature (5)..(5): n is a, c, g, or u
auggnaaggagguguacuucc

SEQ ID NO: 55992 - RNA, 22 nt, Artificial Sequence
  Synthetic
  misc_feature (6)..(6): n is a, c, g, or u
cauggnaaggagguguacuucc

SEQ ID NO: 55993 - RNA, 23 nt, Artificial Sequence
  Synthetic
  misc_feature (7)..(7): n is a, c, g, or u
ccauggnaaggagguguacuucc

SEQ ID NO: 55994 - RNA, 24 nt, Artificial Sequence
  Synthetic
  misc_feature (8)..(8): n is a, c, g, or u
gccauggnaaggagguguacuucc

SEQ ID NO: 55995 - RNA, 18 nt, Artificial Sequence
  Synthetic
gggaaacauagagguucc

SEQ ID NO: 55996 - RNA, 19 nt, Artificial Sequence
  Synthetic
agggaaacauagagguucc

SEQ ID NO: 55997 - RNA, 20 nt, Artificial Sequence
  Synthetic
gagggaaacauagagguucc

SEQ ID NO: 55998 - RNA, 21 nt, Artificial Sequence
  Synthetic
  misc_feature (1)..(1): n is a, c, g, or u
ngagggaaacauagagguucc

SEQ ID NO: 55999 - RNA, 22 nt, Artificial Sequence
  Synthetic
  misc_feature (2)..(2): n is a, c, g, or u
angagggaaacauagagguucc

SEQ ID NO: 56000 - RNA, 23 nt, Artificial Sequence
  Synthetic
  misc_feature (3)..(3): n is a, c, g, or u
cangagggaaacauagagguucc

SEQ ID NO: 56001 - RNA, 24 nt, Artificial Sequence
  Synthetic
  misc_feature (1)..(1): n is a, c, g, or u
  misc_feature (4)..(4): n is a, c, g, or u
ncangagggaaacauagagguucc

SEQ ID NO: 56002 - RNA, 18 nt, Artificial Sequence
  Synthetic
ugcuguagcucuuguucc

SEQ ID NO: 56003 - RNA, 19 nt, Artificial Sequence
  Synthetic
augcuguagcucuuguucc

SEQ ID NO: 56004 - RNA, 20 nt, Artificial Sequence
  Synthetic
caugcuguagcucuuguucc

SEQ ID NO: 56005 - RNA, 21 nt, Artificial Sequence
  Synthetic
ccaugcuguagcucuuguucc

SEQ ID NO: 56006 - RNA, 22 nt, Artificial Sequence
  Synthetic
cccaugcuguagcucuuguucc

SEQ ID NO: 56007 - RNA, 23 nt, Artificial Sequence
  Synthetic
ucccaugcuguagcucuuguucc

SEQ ID NO: 56008 - RNA, 24 nt, Artificial Sequence
  Synthetic
cucccaugcuguagcucuuguucc

SEQ ID NO: 56009 - RNA, 18 nt, Artificial Sequence
  Synthetic
  misc_feature (4)..(4): n is a, c, g, or u
  misc_feature (8)..(8): n is a, c, g, or u
  misc_feature (11)..(11): n is a, c, g, or u
  misc_feature (14)..(14): n is a, c, g, or u
auanaaunccngcnuucc

SEQ ID NO: 56010 - RNA, 19 nt, Artificial Sequence
  Synthetic
  misc_feature (5)..(5): n is a, c, g, or u
  misc_feature (9)..(9): n is a, c, g, or u
  misc_feature (12)..(12): n is a, c, g, or u
  misc_feature (15)..(15): n is a, c, g, or u
uauanaaunccngcnuucc

SEQ ID NO: 56011 - RNA, 20 nt, Artificial Sequence
  Synthetic
  misc_feature (6)..(6): n is a, c, g, or u
  misc_feature (10)..(10): n is a, c, g, or u
  misc_feature (13)..(13): n is a, c, g, or u
  misc_feature (16)..(16): n is a, c, g, or u
auauanaaunccngcnuucc

SEQ ID NO: 56012 - RNA, 21 nt, Artificial Sequence
  Synthetic
  misc_feature (7)..(7): n is a, c, g, or u
  misc_feature (11)..(11): n is a, c, g, or u
  misc_feature (14)..(14): n is a, c, g, or u
  misc_feature (17)..(17): n is a, c, g, or u
uauauanaaunccngcnuucc

SEQ ID NO: 56013 - RNA, 22 nt, Artificial Sequence
  Synthetic
  misc_feature (8)..(8): n is a, c, g, or u
  misc_feature (12)..(12): n is a, c, g, or u
  misc_feature (15)..(15): n is a, c, g, or u
  misc_feature (18)..(18): n is a, c, g, or u
uuauauanaaunccngcnuucc

SEQ ID NO: 56014 - RNA, 23 nt, Artificial Sequence
  Synthetic
  misc_feature (9)..(9): n is a, c, g, or u
  misc_feature (13)..(13): n is a, c, g, or u
  misc_feature (16)..(16): n is a, c, g, or u
  misc_feature (19)..(19): n is a, c, g, or u
cuuauauanaaunccngcnuucc

SEQ ID NO: 56015 - RNA, 24 nt, Artificial Sequence
  Synthetic
  misc_feature (10)..(10): n is a, c, g, or u
  misc_feature (14)..(14): n is a, c, g, or u
  misc_feature (17)..(17): n is a, c, g, or u
  misc_feature (20)..(20): n is a, c, g, or u
ucuuauauanaaunccngcnuucc

SEQ ID NO: 56016 - RNA, 18 nt, Artificial Sequence
  Synthetic
cucccauagguauuuucc

SEQ ID NO: 56017 - RNA, 19 nt, Artificial Sequence
  Synthetic
acucccauagguauuuucc

SEQ ID NO: 56018 - RNA, 20 nt, Artificial Sequence
  Synthetic
cacucccauagguauuuucc

SEQ ID NO: 56019 - RNA, 21 nt, Artificial Sequence
  Synthetic
ccacucccauagguauuuucc

SEQ ID NO: 56020 - RNA, 22 nt, Artificial Sequence
  Synthetic
cccacucccauagguauuuucc

SEQ ID NO: 56021 - RNA, 23 nt, Artificial Sequence
  Synthetic
gcccacucccauagguauuuucc

SEQ ID NO: 56022 - RNA, 24 nt, Artificial Sequence
  Synthetic
ggcccacucccauagguauuuucc

SEQ ID NO: 56023 - RNA, 18 nt, Artificial Sequence
  Synthetic
  misc_feature (2)..(2): n is a, c, g, or u
  misc_feature (5)..(5): n is a, c, g, or u
  misc_feature (8)..(8): n is a, c, g, or u
  misc_feature (11)..(11): n is a, c, g, or u
unaanggngcngcaaagc

SEQ ID NO: 56024 - RNA, 19 nt, Artificial Sequence
  Synthetic
  misc_feature (3)..(3): n is a, c, g, or u
  misc_feature (6)..(6): n is a, c, g, or u
  misc_feature (9)..(9): n is a, c, g, or u
  misc_feature (12)..(12): n is a, c, g, or u
gunaanggngcngcaaagc

SEQ ID NO: 56025 - RNA, 20 nt, Artificial Sequence
  Synthetic
  misc_feature (1)..(1): n is a, c, g, or u
  misc_feature (4)..(4): n is a, c, g, or u
  misc_feature (7)..(7): n is a, c, g, or u
  misc_feature (10)..(10): n is a, c, g, or u
  misc_feature (13)..(13): n is a, c, g, or u
ngunaanggngcngcaaagc

SEQ ID NO: 56026 - RNA, 21 nt, Artificial Sequence
  Synthetic
  misc_feature (2)..(2): n is a, c, g, or u
  misc_feature (5)..(5): n is a, c, g, or u
  misc_feature (8)..(8): n is a, c, g, or u
  misc_feature (11)..(11): n is a, c, g, or u
  misc_feature (14)..(14): n is a, c, g, or u
gngunaanggngcngcaaagc

SEQ ID NO: 56027 - RNA, 22 nt, Artificial Sequence
  Synthetic
  misc_feature (3)..(3): n is a, c, g, or u
  misc_feature (6)..(6): n is a, c, g, or u
  misc_feature (9)..(9): n is a, c, g, or u
  misc_feature (12)..(12): n is a, c, g, or u
  misc_feature (15)..(15): n is a, c, g, or u
ugngunaanggngcngcaaagc

SEQ ID NO: 56028 - RNA, 23 nt, Artificial Sequence
  Synthetic
  misc_feature (4)..(4): n is a, c, g, or u
  misc_feature (7)..(7): n is a, c, g, or u
  misc_feature (10)..(10): n is a, c, g, or u
  misc_feature (13)..(13): n is a, c, g, or u
  misc_feature (16)..(16): n is a, c, g, or u
uugngunaanggngcngcaaagc

SEQ ID NO: 56029 - RNA, 24 nt, Artificial Sequence
  Synthetic
  misc_feature (5)..(5): n is a, c, g, or u
  misc_feature (8)..(8): n is a, c, g, or u
  misc_feature (11)..(11): n is a, c, g, or u
  misc_feature (14)..(14): n is a, c, g, or u
  misc_feature (17)..(17): n is a, c, g, or u
auugngunaanggngcngcaaagc

SEQ ID NO: 56030 - RNA, 18 nt, Artificial Sequence
  Synthetic
gcugcgagcgaaacaagc

SEQ ID NO: 56031 - RNA, 19 nt, Artificial Sequence
  Synthetic
ggcugcgagcgaaacaagc

SEQ ID NO: 56032 - RNA, 20 nt, Artificial Sequence
  Synthetic
cggcugcgagcgaaacaagc

SEQ ID NO: 56033 - RNA, 18 nt, Artificial Sequence
  Synthetic
gauggccaauggccaagc

SEQ ID NO: 56034 - RNA, 19 nt, Artificial Sequence
  Synthetic
ugauggccaauggccaagc

SEQ ID NO: 56035 - RNA, 20 nt, Artificial Sequence
  Synthetic
cugauggccaauggccaagc

SEQ ID NO: 56036 - RNA, 21 nt, Artificial Sequence
  Synthetic
gcugauggccaauggccaagc

SEQ ID NO: 56037 - RNA, 22 nt, Artificial Sequence
  Synthetic
cgcugauggccaauggccaagc

SEQ ID NO: 56038 - RNA, 23 nt, Artificial Sequence
  Synthetic
gcgcugauggccaauggccaagc

SEQ ID NO: 56039 - RNA, 24 nt, Artificial Sequence
  Synthetic
ugcgcugauggccaauggccaagc

SEQ ID NO: 56040 - RNA, 18 nt, Artificial Sequence
  Synthetic
  misc_feature (4)..(4): n is a, c, g, or u
gagnaauuccacagaagc

SEQ ID NO: 56041 - RNA, 19 nt, Artificial Sequence
  Synthetic
  misc_feature (5)..(5): n is a, c, g, or u
agagnaauuccacagaagc

SEQ ID NO: 56042 - RNA, 20 nt, Artificial Sequence
  Synthetic
  misc_feature (6)..(6): n is a, c, g, or u
gagagnaauuccacagaagc

SEQ ID NO: 56043 - RNA, 21 nt, Artificial Sequence
  Synthetic
  misc_feature (7)..(7): n is a, c, g, or u
agagagnaauuccacagaagc

SEQ ID NO: 56044 - RNA, 22 nt, Artificial Sequence
  Synthetic
  misc_feature (8)..(8): n is a, c, g, or u
aagagagnaauuccacagaagc

SEQ ID NO: 56045 - RNA, 23 nt, Artificial Sequence
  Synthetic
  misc_feature (9)..(9): n is a, c, g, or u
aaagagagnaauuccacagaagc

SEQ ID NO: 56046 - RNA, 24 nt, Artificial Sequence
  Synthetic
  misc_feature (10)..(10): n is a, c, g, or u
aaaagagagnaauuccacagaagc

SEQ ID NO: 56047 - RNA, 18 nt, Artificial Sequence
  Synthetic
auacuaacauugggaagc

SEQ ID NO: 56048 - RNA, 19 nt, Artificial Sequence
  Synthetic
aauacuaacauugggaagc

SEQ ID NO: 56049 - RNA, 20 nt, Artificial Sequence
  Synthetic
gaauacuaacauugggaagc

SEQ ID NO: 56050 - RNA, 21 nt, Artificial Sequence
  Synthetic
ggaauacuaacauugggaagc

SEQ ID NO: 56051 - RNA, 22 nt, Artificial Sequence
  Synthetic
aggaauacuaacauugggaagc

SEQ ID NO: 56052 - RNA, 23 nt, Artificial Sequence
  Synthetic
aaggaauacuaacauugggaagc

SEQ ID NO: 56053 - RNA, 24 nt, Artificial Sequence
  Synthetic
caaggaauacuaacauugggaagc

SEQ ID NO: 56054 - RNA, 18 nt, Artificial Sequence
  Synthetic
ccgccgauugguggaagc

SEQ ID NO: 56055 - RNA, 19 nt, Artificial Sequence
  Synthetic
accgccgauugguggaagc

SEQ ID NO: 56056 - RNA, 20 nt, Artificial Sequence
  Synthetic
gaccgccgauugguggaagc

SEQ ID NO: 56057 - RNA, 21 nt, Artificial Sequence
  Synthetic
ggaccgccgauugguggaagc

SEQ ID NO: 56058 - RNA, 22 nt, Artificial Sequence
  Synthetic
cggaccgccgauugguggaagc

SEQ ID NO: 56059 - RNA, 23 nt, Artificial Sequence
  Synthetic
ccggaccgccgauugguggaagc

SEQ ID NO: 56060 - RNA, 24 nt, Artificial Sequence
  Synthetic
cccggaccgccgauugguggaagc

SEQ ID NO: 56061 - RNA, 18 nt, Artificial Sequence
  Synthetic
auuugguggucuauaagc

SEQ ID NO: 56062 - RNA, 19 nt, Artificial Sequence
  Synthetic
cauuugguggucuauaagc

SEQ ID NO: 56063 - RNA, 20 nt, Artificial Sequence
  Synthetic
gcauuugguggucuauaagc

SEQ ID NO: 56064 - RNA, 21 nt, Artificial Sequence
  Synthetic
ggcauuugguggucuauaagc

SEQ ID NO: 56065 - RNA, 22 nt, Artificial Sequence
  Synthetic
gggcauuugguggucuauaagc

SEQ ID NO: 56066 - RNA, 23 nt, Artificial Sequence
  Synthetic
ggggcauuugguggucuauaagc

SEQ ID NO: 56067 - RNA, 24 nt, Artificial Sequence
  Synthetic
aggggcauuugguggucuauaagc

SEQ ID NO: 56068 - RNA, 18 nt, Artificial Sequence
  Synthetic
agccacccaaggcacagc

SEQ ID NO: 56069 - RNA, 19 nt, Artificial Sequence
  Synthetic
aagccacccaaggcacagc

SEQ ID NO: 56070 - RNA, 20 nt, Artificial Sequence
  Synthetic
aaagccacccaaggcacagc

SEQ ID NO: 56071 - RNA, 21 nt, Artificial Sequence
  Synthetic
caaagccacccaaggcacagc

SEQ ID NO: 56072 - RNA, 22 nt, Artificial Sequence
  Synthetic
ccaaagccacccaaggcacagc

SEQ ID NO: 56073 - RNA, 23 nt, Artificial Sequence
  Synthetic
cccaaagccacccaaggcacagc

SEQ ID NO: 56074 - RNA, 24 nt, Artificial Sequence
  Synthetic
ccccaaagccacccaaggcacagc

SEQ ID NO: 56075 - RNA, 18 nt, Artificial Sequence
  Synthetic
ugaacuggagccaccagc

SEQ ID NO: 56076 - RNA, 19 nt, Artificial Sequence
  Synthetic
cugaacuggagccaccagc

SEQ ID NO: 56077 - RNA, 20 nt, Artificial Sequence
  Synthetic
  misc_feature (1)..(1): n is a, c, g, or u
ncugaacuggagccaccagc

SEQ ID NO: 56078 - RNA, 21 nt, Artificial Sequence
  Synthetic
  misc_feature (2)..(2): n is a, c, g, or u
cncugaacuggagccaccagc

SEQ ID NO: 56079 - RNA, 22 nt, Artificial Sequence
  Synthetic
  misc_feature (3)..(3): n is a, c, g, or u
ucncugaacuggagccaccagc

SEQ ID NO: 56080 - RNA, 23 nt, Artificial Sequence
  Synthetic
  misc_feature (4)..(4): n is a, c, g, or u
gucncugaacuggagccaccagc

SEQ ID NO: 56081 - RNA, 24 nt, Artificial Sequence
  Synthetic
  misc_feature (5)..(5): n is a, c, g, or u
ugucncugaacuggagccaccagc

SEQ ID NO: 56082 - RNA, 18 nt, Artificial Sequence
  Synthetic
  misc_feature (9)..(9): n is a, c, g, or u
gcagcacanccgagcagc

SEQ ID NO: 56083 - RNA, 19 nt, Artificial Sequence
  Synthetic
  misc_feature (10)..(10): n is a, c, g, or u
ggcagcacanccgagcagc

SEQ ID NO: 56084 - RNA, 20 nt, Artificial Sequence
  Synthetic
  misc_feature (11)..(11): n is a, c, g, or u
uggcagcacanccgagcagc

SEQ ID NO: 56085 - RNA, 21 nt, Artificial Sequence
  Synthetic
  misc_feature (12)..(12): n is a, c, g, or u
uuggcagcacanccgagcagc

SEQ ID NO: 56086 - RNA, 22 nt, Artificial Sequence
  Synthetic
  misc_feature (13)..(13): n is a, c, g, or u
guuggcagcacanccgagcagc

SEQ ID NO: 56087 - RNA, 23 nt, Artificial Sequence
  Synthetic
  misc_feature (14)..(14): n is a, c, g, or u
aguuggcagcacanccgagcagc

SEQ ID NO: 56088 - RNA, 24 nt, Artificial Sequence
  Synthetic
  misc_feature (15)..(15): n is a, c, g, or u
caguuggcagcacanccgagcagc

SEQ ID NO: 56089 - RNA, 18 nt, Artificial Sequence
  Synthetic
  misc_feature (9)..(9): n is a, c, g, or u
ucguccgcnggauucagc

SEQ ID NO: 56090 - RNA, 19 nt, Artificial Sequence
  Synthetic
  misc_feature (1)..(1): n is a, c, g, or u
  misc_feature (10)..(10): n is a, c, g, or u
nucguccgcnggauucagc

SEQ ID NO: 56091 - RNA, 20 nt, Artificial Sequence
  Synthetic
  misc_feature (2)..(2): n is a, c, g, or u
  misc_feature (11)..(11): n is a, c, g, or u
gnucguccgcnggauucagc

SEQ ID NO: 56092 - RNA, 21 nt, Artificial Sequence
  Synthetic
  misc_feature (3)..(3): n is a, c, g, or u
  misc_feature (12)..(12): n is a, c, g, or u
ggnucguccgcnggauucagc

SEQ ID NO: 56093 - RNA, 22 nt, Artificial Sequence
  Synthetic
  misc_feature (4)..(4): n is a, c, g, or u
  misc_feature (13)..(13): n is a, c, g, or u
gggnucguccgcnggauucagc

SEQ ID NO: 56094 - RNA, 23 nt, Artificial Sequence
  Synthetic
  misc_feature (5)..(5): n is a, c, g, or u
  misc_feature (14)..(14): n is a, c, g, or u
agggnucguccgcnggauucagc

SEQ ID NO: 56095 - RNA, 24 nt, Artificial Sequence
  Synthetic
  misc_feature (6)..(6): n is a, c, g, or u
  misc_feature (15)..(15): n is a, c, g, or u
gagggnucguccgcnggauucagc

SEQ ID NO: 56096 - RNA, 18 nt, Artificial Sequence
  Synthetic
gccuggccguugccgagc

SEQ ID NO: 56097 - RNA, 19 nt, Artificial Sequence
  Synthetic
ggccuggccguugccgagc

SEQ ID NO: 56098 - RNA, 20 nt, Artificial Sequence
  Synthetic
aggccuggccguugccgagc

SEQ ID NO: 56099 - RNA, 21 nt, Artificial Sequence
  Synthetic
caggccuggccguugccgagc

SEQ ID NO: 56100 - RNA, 22 nt, Artificial Sequence
  Synthetic
acaggccuggccguugccgagc

SEQ ID NO: 56101 - RNA, 23 nt, Artificial Sequence
  Synthetic
cacaggccuggccguugccgagc

SEQ ID NO: 56102 - RNA, 24 nt, Artificial Sequence
  Synthetic
gcacaggccuggccguugccgagc

SEQ ID NO: 56103 - RNA, 18 nt, Artificial Sequence
  Synthetic
auggaucggcagaggagc

SEQ ID NO: 56104 - RNA, 19 nt, Artificial Sequence
  Synthetic
uauggaucggcagaggagc

SEQ ID NO: 56105 - RNA, 20 nt, Artificial Sequence
  Synthetic
guauggaucggcagaggagc

SEQ ID NO: 56106 - RNA, 21 nt, Artificial Sequence
  Synthetic
aguauggaucggcagaggagc

SEQ ID NO: 56107 - RNA, 22 nt, Artificial Sequence
  Synthetic
caguauggaucggcagaggagc

SEQ ID NO: 56108 - RNA, 23 nt, Artificial Sequence
  Synthetic
gcaguauggaucggcagaggagc

SEQ ID NO: 56109 - RNA, 24 nt, Artificial Sequence
  Synthetic
cgcaguauggaucggcagaggagc

SEQ ID NO: 56110 - RNA, 18 nt, Artificial Sequence
  Synthetic
ugcacuaguaaacugagc

SEQ ID NO: 56111 - RNA, 19 nt, Artificial Sequence
  Synthetic
uugcacuaguaaacugagc

SEQ ID NO: 56112 - RNA, 20 nt, Artificial Sequence
  Synthetic
auugcacuaguaaacugagc

SEQ ID NO: 56113 - RNA, 21 nt, Artificial Sequence
  Synthetic
aauugcacuaguaaacugagc

SEQ ID NO: 56114 - RNA, 22 nt, Artificial Sequence
  Synthetic
aaauugcacuaguaaacugagc

SEQ ID NO: 56115 - RNA, 23 nt, Artificial Sequence
  Synthetic
caaauugcacuaguaaacugagc

SEQ ID NO: 56116 - RNA, 24 nt, Artificial Sequence
  Synthetic
acaaauugcacuaguaaacugagc

SEQ ID NO: 56117 - RNA, 18 nt, Artificial Sequence
  Synthetic
  misc_feature (6)..(6): n is a, c, g, or u
  misc_feature (12)..(12): n is a, c, g, or u
  misc_feature (15)..(15): n is a, c, g, or u
agaagngggcgnuanagc

SEQ ID NO: 56118 - RNA, 19 nt, Artificial Sequence
  Synthetic
  misc_feature (1)..(1): n is a, c, g, or u
  misc_feature (7)..(7): n is a, c, g, or u
  misc_feature (13)..(13): n is a, c, g, or u
  misc_feature (16)..(16): n is a, c, g, or u
nagaagngggcgnuanagc

SEQ ID NO: 56119 - RNA, 20 nt, Artificial Sequence
  Synthetic
  misc_feature (2)..(2): n is a, c, g, or u
  misc_feature (8)..(8): n is a, c, g, or u
  misc_feature (14)..(14): n is a, c, g, or u
  misc_feature (17)..(17): n is a, c, g, or u
gnagaagngggcgnuanagc

SEQ ID NO: 56120 - RNA, 21 nt, Artificial Sequence
  Synthetic
  misc_feature (3)..(3): n is a, c, g, or u
  misc_feature (9)..(9): n is a, c, g, or u
  misc_feature (15)..(15): n is a, c, g, or u
  misc_feature (18)..(18): n is a, c, g, or u
cgnagaagngggcgnuanagc

SEQ ID NO: 56121 - RNA, 22 nt, Artificial Sequence
  Synthetic
  misc_feature (4)..(4): n is a, c, g, or u
  misc_feature (10)..(10): n is a, c, g, or u
  misc_feature (16)..(16): n is a, c, g, or u
  misc_feature (19)..(19): n is a, c, g, or u
acgnagaagngggcgnuanagc

SEQ ID NO: 56122 - RNA, 23 nt, Artificial Sequence
  Synthetic
  misc_feature (5)..(5): n is a, c, g, or u
  misc_feature (11)..(11): n is a, c, g, or u
  misc_feature (17)..(17): n is a, c, g, or u
  misc_feature (20)..(20): n is a, c, g, or u
gacgnagaagngggcgnuanagc

SEQ ID NO: 56123 - RNA, 24 nt, Artificial Sequence
  Synthetic
  misc_feature (6)..(6): n is a, c, g, or u
  misc_feature (12)..(12): n is a, c, g, or u
  misc_feature (18)..(18): n is a, c, g, or u
  misc_feature (21)..(21): n is a, c, g, or u
agacgnagaagngggcgnuanagc

SEQ ID NO: 56124 - RNA, 18 nt, Artificial Sequence
  Synthetic
aagaagaugaggcauagc

SEQ ID NO: 56125 - RNA, 19 nt, Artificial Sequence
  Synthetic
caagaagaugaggcauagc

SEQ ID NO: 56126 - RNA, 20 nt, Artificial Sequence
  Synthetic
acaagaagaugaggcauagc

SEQ ID NO: 56127 - RNA, 21 nt, Artificial Sequence
  Synthetic
aacaagaagaugaggcauagc

SEQ ID NO: 56128 - RNA, 22 nt, Artificial Sequence
  Synthetic
caacaagaagaugaggcauagc

SEQ ID NO: 56129 - RNA, 23 nt, Artificial Sequence
  Synthetic
ccaacaagaagaugaggcauagc

SEQ ID NO: 56130 - RNA, 24 nt, Artificial Sequence
  Synthetic
accaacaagaagaugaggcauagc

SEQ ID NO: 56131 - RNA, 18 nt, Artificial Sequence
  Synthetic
  misc_feature (11)..(11): n is a, c, g, or u
gacacauccancgauagc

SEQ ID NO: 56132 - RNA, 19 nt, Artificial Sequence
  Synthetic
  misc_feature (12)..(12): n is a, c, g, or u
agacacauccancgauagc

SEQ ID NO: 56133 - RNA, 20 nt, Artificial Sequence
  Synthetic
  misc_feature (13)..(13): n is a, c, g, or u
cagacacauccancgauagc

SEQ ID NO: 56134 - RNA, 21 nt, Artificial Sequence
  Synthetic
  misc_feature (14)..(14): n is a, c, g, or u
gcagacacauccancgauagc

SEQ ID NO: 56135 - RNA, 22 nt, Artificial Sequence
  Synthetic
  misc_feature (15)..(15): n is a, c, g, or u
cgcagacacauccancgauagc

SEQ ID NO: 56136 - RNA, 23 nt, Artificial Sequence
  Synthetic
  misc_feature (16)..(16): n is a, c, g, or u
ccgcagacacauccancgauagc

SEQ ID NO: 56137 - RNA, 24 nt, Artificial Sequence
  Synthetic
  misc_feature (17)..(17): n is a, c, g, or u
gccgcagacacauccancgauagc

SEQ ID NO: 56138 - RNA, 18 nt, Artificial Sequence
  Synthetic
aggaagaugauaaaacgc

SEQ ID NO: 56139 - RNA, 19 nt, Artificial Sequence
  Synthetic
gaggaagaugauaaaacgc

SEQ ID NO: 56140 - RNA, 20 nt, Artificial Sequence
  Synthetic
agaggaagaugauaaaacgc

SEQ ID NO: 56141 - RNA, 21 nt, Artificial Sequence
  Synthetic
aagaggaagaugauaaaacgc

SEQ ID NO: 56142 - RNA, 22 nt, Artificial Sequence
  Synthetic
gaagaggaagaugauaaaacgc

SEQ ID NO: 56143 - RNA, 23 nt, Artificial Sequence
  Synthetic
ugaagaggaagaugauaaaacgc

SEQ ID NO: 56144 - RNA, 24 nt, Artificial Sequence
  Synthetic
augaagaggaagaugauaaaacgc

SEQ ID NO: 56145 - RNA, 18 nt, Artificial Sequence
  Synthetic
aaacaaaggacgucccgc

SEQ ID NO: 56146 - RNA, 19 nt, Artificial Sequence
  Synthetic
uaaacaaaggacgucccgc

SEQ ID NO: 56147 - RNA, 20 nt, Artificial Sequence
  Synthetic
guaaacaaaggacgucccgc

SEQ ID NO: 56148 - RNA, 18 nt, Artificial Sequence
  Synthetic
  misc_feature (14)..(14): n is a, c, g, or u
aacagacggggagnccgc

SEQ ID NO: 56149 - RNA, 19 nt, Artificial Sequence
  Synthetic
  misc_feature (15)..(15): n is a, c, g, or u
gaacagacggggagnccgc

SEQ ID NO: 56150 - RNA, 20 nt, Artificial Sequence
  Synthetic
  misc_feature (16)..(16): n is a, c, g, or u
ggaacagacggggagnccgc

SEQ ID NO: 56151 - RNA, 21 nt, Artificial Sequence
  Synthetic
  misc_feature (17)..(17): n is a, c, g, or u
aggaacagacggggagnccgc

SEQ ID NO: 56152 - RNA, 22 nt, Artificial Sequence
  Synthetic
  misc_feature (18)..(18): n is a, c, g, or u
aaggaacagacggggagnccgc

SEQ ID NO: 56153 - RNA, 23 nt, Artificial Sequence
  Synthetic
  misc_feature (19)..(19): n is a, c, g, or u
gaaggaacagacggggagnccgc

SEQ ID NO: 56154 - RNA, 24 nt, Artificial Sequence
  Synthetic
  misc_feature (20)..(20): n is a, c, g, or u
agaaggaacagacggggagnccgc

SEQ ID NO: 56155 - RNA, 18 nt, Artificial Sequence
  Synthetic
  misc_feature (1)..(1): n is a, c, g, or u
  misc_feature (12)..(13): n is a, c, g, or u
ngugccgaugannuucgc

SEQ ID NO: 56156 - RNA, 19 nt, Artificial Sequence
  Synthetic
  misc_feature (2)..(2): n is a, c, g, or u
  misc_feature (13)..(14): n is a, c, g, or u
cngugccgaugannuucgc

SEQ ID NO: 56157 - RNA, 20 nt, Artificial Sequence
  Synthetic
  misc_feature (3)..(3): n is a, c, g, or u
  misc_feature (14)..(15): n is a, c, g, or u
ucngugccgaugannuucgc

SEQ ID NO: 56158 - RNA, 21 nt, Artificial Sequence
  Synthetic
  misc_feature (4)..(4): n is a, c, g, or u
  misc_feature (15)..(16): n is a, c, g, or u
gucngugccgaugannuucgc

SEQ ID NO: 56159 - RNA, 22 nt, Artificial Sequence
  Synthetic
  misc_feature (5)..(5): n is a, c, g, or u
  misc_feature (16)..(17): n is a, c, g, or u
ugucngugccgaugannuucgc

SEQ ID NO: 56160 - RNA, 23 nt, Artificial Sequence
  Synthetic
  misc_feature (6)..(6): n is a, c, g, or u
  misc_feature (17)..(18): n is a, c, g, or u
uugucngugccgaugannuucgc

SEQ ID NO: 56161 - RNA, 24 nt, Artificial Sequence
  Synthetic
  misc_feature (7)..(7): n is a, c, g, or u
  misc_feature (18)..(19): n is a, c, g, or u
guugucngugccgaugannuucgc

SEQ ID NO: 56162 - RNA, 18 nt, Artificial Sequence
  Synthetic
  misc_feature (9)..(9): n is a, c, g, or u
gggaagaanucagaaggc

SEQ ID NO: 56163 - RNA, 19 nt, Artificial Sequence
  Synthetic
  misc_feature (10)..(10): n is a, c, g, or u
cgggaagaanucagaaggc

SEQ ID NO: 56164 - RNA, 20 nt, Artificial Sequence
  Synthetic
  misc_feature (11)..(11): n is a, c, g, or u
acgggaagaanucagaaggc

SEQ ID NO: 56165 - RNA, 21 nt, Artificial Sequence
  Synthetic
  misc_feature (12)..(12): n is a, c, g, or u
gacgggaagaanucagaaggc

SEQ ID NO: 56166 - RNA, 22 nt, Artificial Sequence
  Synthetic
  misc_feature (1)..(1): n is a, c, g, or u
  misc_feature (13)..(13): n is a, c, g, or u
ngacgggaagaanucagaaggc

SEQ ID NO: 56167 - RNA, 23 nt, Artificial Sequence
  Synthetic
  misc_feature (2)..(2): n is a, c, g, or u
  misc_feature (14)..(14): n is a, c, g, or u
cngacgggaagaanucagaaggc

SEQ ID NO: 56168 - RNA, 24 nt, Artificial Sequence
  Synthetic
  misc_feature (3)..(3): n is a, c, g, or u
  misc_feature (15)..(15): n is a, c, g, or u
acngacgggaagaanucagaaggc

SEQ ID NO: 56169 - RNA, 18 nt, Artificial Sequence
  Synthetic
cucuuccaaaaguaaggc

SEQ ID NO: 56170 - RNA, 19 nt, Artificial Sequence
  Synthetic
ucucuuccaaaaguaaggc

SEQ ID NO: 56171 - RNA, 20 nt, Artificial Sequence
  Synthetic
uucucuuccaaaaguaaggc

SEQ ID NO: 56172 - RNA, 21 nt, Artificial Sequence
  Synthetic
uuucucuuccaaaaguaaggc

SEQ ID NO: 56173 - RNA, 22 nt, Artificial Sequence
  Synthetic
guuucucuuccaaaaguaaggc

SEQ ID NO: 56174 - RNA, 23 nt, Artificial Sequence
  Synthetic
uguuucucuuccaaaaguaaggc

SEQ ID NO: 56175 - RNA, 24 nt, Artificial Sequence
  Synthetic
cuguuucucuuccaaaaguaaggc

SEQ ID NO: 56176 - RNA, 18 nt, Artificial Sequence
  Synthetic
  misc_feature (8)..(8): n is a, c, g, or u
auacaggnauacagaggc

SEQ ID NO: 56177 - RNA, 19 nt, Artificial Sequence
  Synthetic
  misc_feature (1)..(1): n is a, c, g, or u
  misc_feature (9)..(9): n is a, c, g, or u
nauacaggnauacagaggc

SEQ ID NO: 56178 - RNA, 20 nt, Artificial Sequence
  Synthetic
  misc_feature (2)..(2): n is a, c, g, or u
  misc_feature (10)..(10): n is a, c, g, or u
unauacaggnauacagaggc

SEQ ID NO: 56179 - RNA, 21 nt, Artificial Sequence
  Synthetic
  misc_feature (3)..(3): n is a, c, g, or u
  misc_feature (11)..(11): n is a, c, g, or u
gunauacaggnauacagaggc

SEQ ID NO: 56180 - RNA, 22 nt, Artificial Sequence
  Synthetic
  misc_feature (4)..(4): n is a, c, g, or u
  misc_feature (12)..(12): n is a, c, g, or u
agunauacaggnauacagaggc

SEQ ID NO: 56181 - RNA, 23 nt, Artificial Sequence
  Synthetic
  misc_feature (5)..(5): n is a, c, g, or u
  misc_feature (13)..(13): n is a, c, g, or u
cagunauacaggnauacagaggc

SEQ ID NO: 56182 - RNA, 24 nt, Artificial Sequence
  Synthetic
  misc_feature (6)..(6): n is a, c, g, or u
  misc_feature (14)..(14): n is a, c, g, or u
gcagunauacaggnauacagaggc

SEQ ID NO: 56183 - RNA, 18 nt, Artificial Sequence
  Synthetic
  misc_feature (3)..(3): n is a, c, g, or u
gancuucgucugcgaggc

SEQ ID NO: 56184 - RNA, 19 nt, Artificial Sequence
  Synthetic
  misc_feature (4)..(4): n is a, c, g, or u
agancuucgucugcgaggc

SEQ ID NO: 56185 - RNA, 20 nt, Artificial Sequence
  Synthetic
  misc_feature (5)..(5): n is a, c, g, or u
gagancuucgucugcgaggc

SEQ ID NO: 56186 - RNA, 21 nt, Artificial Sequence
  Synthetic
  misc_feature (6)..(6): n is a, c, g, or u
ugagancuucgucugcgaggc

SEQ ID NO: 56187 - RNA, 22 nt, Artificial Sequence
  Synthetic
  misc_feature (7)..(7): n is a, c, g, or u
uugagancuucgucugcgaggc

SEQ ID NO: 56188 - RNA, 23 nt, Artificial Sequence
  Synthetic
  misc_feature (8)..(8): n is a, c, g, or u
auugagancuucgucugcgaggc

SEQ ID NO: 56189 - RNA, 24 nt, Artificial Sequence
  Synthetic
  misc_feature (9)..(9): n is a, c, g, or u
gauugagancuucgucugcgaggc

SEQ ID NO: 56190 - RNA, 18 nt, Artificial Sequence
  Synthetic
aaggcacagcuuggaggc

SEQ ID NO: 56191 - RNA, 19 nt, Artificial Sequence
  Synthetic
caaggcacagcuuggaggc

SEQ ID NO: 56192 - RNA, 20 nt, Artificial Sequence
  Synthetic
ccaaggcacagcuuggaggc

SEQ ID NO: 56193 - RNA, 21 nt, Artificial Sequence
  Synthetic
cccaaggcacagcuuggaggc

SEQ ID NO: 56194 - RNA, 22 nt, Artificial Sequence
  Synthetic
acccaaggcacagcuuggaggc

SEQ ID NO: 56195 - RNA, 23 nt, Artificial Sequence
  Synthetic
cacccaaggcacagcuuggaggc

SEQ ID NO: 56196 - RNA, 24 nt, Artificial Sequence
  Synthetic
ccacccaaggcacagcuuggaggc

SEQ ID NO: 56197 - RNA, 18 nt, Artificial Sequence
  Synthetic
  misc_feature (1)..(2): n is a, c, g, or u
nnuucgcuccagaccggc

SEQ ID NO: 56198 - RNA, 19 nt, Artificial Sequence
  Synthetic
  misc_feature (2)..(3): n is a, c, g, or u
annuucgcuccagaccggc

SEQ ID NO: 56199 - RNA, 20 nt, Artificial Sequence
  Synthetic
  misc_feature (3)..(4): n is a, c, g, or u
gannuucgcuccagaccggc

SEQ ID NO: 56200 - RNA, 21 nt, Artificial Sequence
  Synthetic
  misc_feature (4)..(5): n is a, c, g, or u
ugannuucgcuccagaccggc

SEQ ID NO: 56201 - RNA, 22 nt, Artificial Sequence
  Synthetic
  misc_feature (5)..(6): n is a, c, g, or u
augannuucgcuccagaccggc

SEQ ID NO: 56202 - RNA, 23 nt, Artificial Sequence
  Synthetic
  misc_feature (6)..(7): n is a, c, g, or u
gaugannuucgcuccagaccggc

SEQ ID NO: 56203 - RNA, 24 nt, Artificial Sequence
  Synthetic
  misc_feature (7)..(8): n is a, c, g, or u
cgaugannuucgcuccagaccggc

SEQ ID NO: 56204 - RNA, 18 nt, Artificial Sequence
  Synthetic
uccgcaguauggaucggc

SEQ ID NO: 56205 - RNA, 19 nt, Artificial Sequence
  Synthetic
uuccgcaguauggaucggc

SEQ ID NO: 56206 - RNA, 20 nt, Artificial Sequence
  Synthetic
guuccgcaguauggaucggc

SEQ ID NO: 56207 - RNA, 21 nt, Artificial Sequence
  Synthetic
aguuccgcaguauggaucggc

SEQ ID NO: 56208 - RNA, 22 nt, Artificial Sequence
  Synthetic
gaguuccgcaguauggaucggc

SEQ ID NO: 56209 - RNA, 23 nt, Artificial Sequence
  Synthetic
ggaguuccgcaguauggaucggc

SEQ ID NO: 56210 - RNA, 24 nt, Artificial Sequence
  Synthetic
aggaguuccgcaguauggaucggc

SEQ ID NO: 56211 - RNA, 18 nt, Artificial Sequence
  Synthetic
  misc_feature (12)..(12): n is a, c, g, or u
gugcgacccgungucggc

SEQ ID NO: 56212 - RNA, 19 nt, Artificial Sequence
  Synthetic
  misc_feature (13)..(13): n is a, c, g, or u
ggugcgacccgungucggc

SEQ ID NO: 56213 - RNA, 20 nt, Artificial Sequence
  Synthetic
  misc_feature (14)..(14): n is a, c, g, or u
aggugcgacccgungucggc

SEQ ID NO: 56214 - RNA, 21 nt, Artificial Sequence
  Synthetic
  misc_feature (15)..(15): n is a, c, g, or u
gaggugcgacccgungucggc

SEQ ID NO: 56215 - RNA, 22 nt, Artificial Sequence
  Synthetic
  misc_feature (16)..(16): n is a, c, g, or u
agaggugcgacccgungucggc

SEQ ID NO: 56216 - RNA, 23 nt, Artificial Sequence
  Synthetic
  misc_feature (17)..(17): n is a, c, g, or u
gagaggugcgacccgungucggc

SEQ ID NO: 56217 - RNA, 24 nt, Artificial Sequence
  Synthetic
  misc_feature (18)..(18): n is a, c, g, or u
agagaggugcgacccgungucggc

SEQ ID NO: 56218 - RNA, 18 nt, Artificial Sequence
  Synthetic
  misc_feature (9)..(9): n is a, c, g, or u
  misc_feature (13)..(13): n is a, c, g, or u
agcaucccnguanagggc

SEQ ID NO: 56219 - RNA, 19 nt, Artificial Sequence
  Synthetic
  misc_feature (10)..(10): n is a, c, g, or u
  misc_feature (14)..(14): n is a, c, g, or u
aagcaucccnguanagggc

SEQ ID NO: 56220 - RNA, 20 nt, Artificial Sequence
  Synthetic
  misc_feature (11)..(11): n is a, c, g, or u
  misc_feature (15)..(15): n is a, c, g, or u
aaagcaucccnguanagggc

SEQ ID NO: 56221 - RNA, 21 nt, Artificial Sequence
  Synthetic
  misc_feature (12)..(12): n is a, c, g, or u
  misc_feature (16)..(16): n is a, c, g, or u
uaaagcaucccnguanagggc

SEQ ID NO: 56222 - RNA, 22 nt, Artificial Sequence
  Synthetic
  misc_feature (13)..(13): n is a, c, g, or u
  misc_feature (17)..(17): n is a, c, g, or u
cuaaagcaucccnguanagggc

SEQ ID NO: 56223 - RNA, 23 nt, Artificial Sequence
  Synthetic
  misc_feature (14)..(14): n is a, c, g, or u
  misc_feature (18)..(18): n is a, c, g, or u
ucuaaagcaucccnguanagggc

SEQ ID NO: 56224 - RNA, 24 nt, Artificial Sequence
  Synthetic
  misc_feature (1)..(1): n is a, c, g, or u
  misc_feature (15)..(15): n is a, c, g, or u
  misc_feature (19)..(19): n is a, c, g, or u
nucuaaagcaucccnguanagggc

SEQ ID NO: 56225 - RNA, 18 nt, Artificial Sequence
  Synthetic
gagccaggagaaacgggc

SEQ ID NO: 56226 - RNA, 19 nt, Artificial Sequence
  Synthetic
ugagccaggagaaacgggc

SEQ ID NO: 56227 - RNA, 20 nt, Artificial Sequence
  Synthetic
cugagccaggagaaacgggc

SEQ ID NO: 56228 - RNA, 21 nt, Artificial Sequence
  Synthetic
acugagccaggagaaacgggc

SEQ ID NO: 56229 - RNA, 22 nt, Artificial Sequence
  Synthetic
aacugagccaggagaaacgggc

SEQ ID NO: 56230 - RNA, 23 nt, Artificial Sequence
  Synthetic
aaacugagccaggagaaacgggc

SEQ ID NO: 56231 - RNA, 24 nt, Artificial Sequence
  Synthetic
uaaacugagccaggagaaacgggc

SEQ ID NO: 56232 - RNA, 18 nt, Artificial Sequence
  Synthetic
cgucagcaaacacuuggc

SEQ ID NO: 56233 - RNA, 19 nt, Artificial Sequence
  Synthetic
gcgucagcaaacacuuggc

SEQ ID NO: 56234 - RNA, 20 nt, Artificial Sequence
  Synthetic
ugcgucagcaaacacuuggc

SEQ ID NO: 56235 - RNA, 21 nt, Artificial Sequence
  Synthetic
uugcgucagcaaacacuuggc

SEQ ID NO: 56236 - RNA, 22 nt, Artificial Sequence
  Synthetic
guugcgucagcaaacacuuggc

SEQ ID NO: 56237 - RNA, 23 nt, Artificial Sequence
  Synthetic
gguugcgucagcaaacacuuggc

SEQ ID NO: 56238 - RNA, 24 nt, Artificial Sequence
  Synthetic
ggguugcgucagcaaacacuuggc

SEQ ID NO: 56239 - RNA, 18 nt, Artificial Sequence
  Synthetic
aaggccuuguaaguuggc

SEQ ID NO: 56240 - RNA, 19 nt, Artificial Sequence
  Synthetic
aaaggccuuguaaguuggc

SEQ ID NO: 56241 - RNA, 20 nt, Artificial Sequence
  Synthetic
gaaaggccuuguaaguuggc

SEQ ID NO: 56242 - RNA, 21 nt, Artificial Sequence
  Synthetic
agaaaggccuuguaaguuggc

SEQ ID NO: 56243 - RNA, 22 nt, Artificial Sequence
  Synthetic
  misc_feature (1)..(1): n is a, c, g, or u
nagaaaggccuuguaaguuggc

SEQ ID NO: 56244 - RNA, 23 nt, Artificial Sequence
  Synthetic
  misc_feature (2)..(2): n is a, c, g, or u
anagaaaggccuuguaaguuggc

SEQ ID NO: 56245 - RNA, 24 nt, Artificial Sequence
  Synthetic
  misc_feature (3)..(3): n is a, c, g, or u
canagaaaggccuuguaaguuggc

SEQ ID NO: 56246 - RNA, 18 nt, Artificial Sequence
  Synthetic
gggacugcgaauuuuggc

SEQ ID NO: 56247 - RNA, 19 nt, Artificial Sequence
  Synthetic
ggggacugcgaauuuuggc

SEQ ID NO: 56248 - RNA, 20 nt, Artificial Sequence
  Synthetic
uggggacugcgaauuuuggc

SEQ ID NO: 56249 - RNA, 21 nt, Artificial Sequence
  Synthetic
uuggggacugcgaauuuuggc

SEQ ID NO: 56250 - RNA, 22 nt, Artificial Sequence
  Synthetic
guuggggacugcgaauuuuggc

SEQ ID NO: 56251 - RNA, 23 nt, Artificial Sequence
  Synthetic
gguuggggacugcgaauuuuggc

SEQ ID NO: 56252 - RNA, 24 nt, Artificial Sequence
  Synthetic
agguuggggacugcgaauuuuggc

SEQ ID NO: 56253 - RNA, 18 nt, Artificial Sequence
  Synthetic
  misc_feature (7)..(7): n is a, c, g, or u
  misc_feature (10)..(10): n is a, c, g, or u
  misc_feature (13)..(13): n is a, c, g, or u
  misc_feature (16)..(16): n is a, c, g, or u
acauugngunaanggngc

SEQ ID NO: 56254 - RNA, 19 nt, Artificial Sequence
  Synthetic
  misc_feature (8)..(8): n is a, c, g, or u
  misc_feature (11)..(11): n is a, c, g, or u
  misc_feature (14)..(14): n is a, c, g, or u
  misc_feature (17)..(17): n is a, c, g, or u
cacauugngunaanggngc

SEQ ID NO: 56255 - RNA, 20 nt, Artificial Sequence
  Synthetic
  misc_feature (9)..(9): n is a, c, g, or u
  misc_feature (12)..(12): n is a, c, g, or u
  misc_feature (15)..(15): n is a, c, g, or u
  misc_feature (18)..(18): n is a, c, g, or u
ccacauugngunaanggngc

SEQ ID NO: 56256 - RNA, 21 nt, Artificial Sequence
  Synthetic
  misc_feature (10)..(10): n is a, c, g, or u
  misc_feature (13)..(13): n is a, c, g, or u
  misc_feature (16)..(16): n is a, c, g, or u
  misc_feature (19)..(19): n is a, c, g, or u
accacauugngunaanggngc

SEQ ID NO: 56257 - RNA, 22 nt, Artificial Sequence
  Synthetic
  misc_feature (11)..(11): n is a, c, g, or u
  misc_feature (14)..(14): n is a, c, g, or u
  misc_feature (17)..(17): n is a, c, g, or u
  misc_feature (20)..(20): n is a, c, g, or u
aaccacauugngunaanggngc

SEQ ID NO: 56258 - RNA, 23 nt, Artificial Sequence
  Synthetic
  misc_feature (12)..(12): n is a, c, g, or u
  misc_feature (15)..(15): n is a, c, g, or u
  misc_feature (18)..(18): n is a, c, g, or u
  misc_feature (21)..(21): n is a, c, g, or u
uaaccacauugngunaanggngc

SEQ ID NO: 56259 - RNA, 24 nt, Artificial Sequence
  Synthetic
  misc_feature (13)..(13): n is a, c, g, or u
  misc_feature (16)..(16): n is a, c, g, or u
  misc_feature (19)..(19): n is a, c, g, or u
  misc_feature (22)..(22): n is a, c, g, or u
auaaccacauugngunaanggngc

SEQ ID NO: 56260 - RNA, 18 nt, Artificial Sequence
  Synthetic
  misc_feature (4)..(4): n is a, c, g, or u
  misc_feature (9)..(10): n is a, c, g, or u
  misc_feature (16)..(16): n is a, c, g, or u
aacnacuannucccungc

SEQ ID NO: 56261 - RNA, 19 nt, Artificial Sequence
  Synthetic
  misc_feature (5)..(5): n is a, c, g, or u
  misc_feature (10)..(11): n is a, c, g, or u
  misc_feature (17)..(17): n is a, c, g, or u
uaacnacuannucccungc

SEQ ID NO: 56262 - RNA, 20 nt, Artificial Sequence
  Synthetic
  misc_feature (6)..(6): n is a, c, g, or u
  misc_feature (11)..(12): n is a, c, g, or u
  misc_feature (18)..(18): n is a, c, g, or u
uuaacnacuannucccungc

SEQ ID NO: 56263 - RNA, 21 nt, Artificial Sequence
  Synthetic
  misc_feature (7)..(7): n is a, c, g, or u
  misc_feature (12)..(13): n is a, c, g, or u
  misc_feature (19)..(19): n is a, c, g, or u
guuaacnacuannucccungc

SEQ ID NO: 56264 - RNA, 22 nt, Artificial Sequence
  Synthetic
  misc_feature (8)..(8): n is a, c, g, or u
  misc_feature (13)..(14): n is a, c, g, or u
  misc_feature (20)..(20): n is a, c, g, or u
aguuaacnacuannucccungc

SEQ ID NO: 56265 - RNA, 23 nt, Artificial Sequence
  Synthetic
  misc_feature (9)..(9): n is a, c, g, or u
  misc_feature (14)..(15): n is a, c, g, or u
  misc_feature (21)..(21): n is a, c, g, or u
uaguuaacnacuannucccungc

SEQ ID NO: 56266 - RNA, 24 nt, Artificial Sequence
  Synthetic
  misc_feature (10)..(10): n is a, c, g, or u
  misc_feature (15)..(16): n is a, c, g, or u
  misc_feature (22)..(22): n is a, c, g, or u
auaguuaacnacuannucccungc

SEQ ID NO: 56267 - RNA, 18 nt, Artificial Sequence
  Synthetic
  misc_feature (2)..(2): n is a, c, g, or u
anagaggugcucccaugc

SEQ ID NO: 56268 - RNA, 19 nt, Artificial Sequence
  Synthetic
  misc_feature (3)..(3): n is a, c, g, or u
ganagaggugcucccaugc

SEQ ID NO: 56269 - RNA, 20 nt, Artificial Sequence
  Synthetic
  misc_feature (4)..(4): n is a, c, g, or u
uganagaggugcucccaugc

SEQ ID NO: 56270 - RNA, 21 nt, Artificial Sequence
  Synthetic
  misc_feature (5)..(5): n is a, c, g, or u
uuganagaggugcucccaugc

SEQ ID NO: 56271 - RNA, 22 nt, Artificial Sequence
  Synthetic
  misc_feature (6)..(6): n is a, c, g, or u
guuganagaggugcucccaugc

SEQ ID NO: 56272 - RNA, 23 nt, Artificial Sequence
  Synthetic
  misc_feature (7)..(7): n is a, c, g, or u
cguuganagaggugcucccaugc

SEQ ID NO: 56273 - RNA, 24 nt, Artificial Sequence
  Synthetic
  misc_feature (8)..(8): n is a, c, g, or u
ucguuganagaggugcucccaugc

SEQ ID NO: 56274 - RNA, 18 nt, Artificial Sequence
  Synthetic
aagggucaauguccaugc

SEQ ID NO: 56275 - RNA, 19 nt, Artificial Sequence
  Synthetic
uaagggucaauguccaugc

SEQ ID NO: 56276 - RNA, 20 nt, Artificial Sequence
  Synthetic
auaagggucaauguccaugc

SEQ ID NO: 56277 - RNA, 21 nt, Artificial Sequence
  Synthetic
uauaagggucaauguccaugc

SEQ ID NO: 56278 - RNA, 22 nt, Artificial Sequence
  Synthetic
uuauaagggucaauguccaugc

SEQ ID NO: 56279 - RNA, 23 nt, Artificial Sequence
  Synthetic
uuuauaagggucaauguccaugc

SEQ ID NO: 56280 - RNA, 24 nt, Artificial Sequence
  Synthetic
cuuuauaagggucaauguccaugc

SEQ ID NO: 56281 - RNA, 18 nt, Artificial Sequence
  Synthetic
gcgagcgaaacaagcugc

SEQ ID NO: 56282 - RNA, 19 nt, Artificial Sequence
  Synthetic
ugcgagcgaaacaagcugc

SEQ ID NO: 56283 - RNA, 20 nt, Artificial Sequence
  Synthetic
cugcgagcgaaacaagcugc

SEQ ID NO: 56284 - RNA, 21 nt, Artificial Sequence
  Synthetic
gcugcgagcgaaacaagcugc

SEQ ID NO: 56285 - RNA, 22 nt, Artificial Sequence
  Synthetic
ggcugcgagcgaaacaagcugc

SEQ ID NO: 56286 - RNA, 23 nt, Artificial Sequence
  Synthetic
cggcugcgagcgaaacaagcugc

SEQ ID NO: 56287 - RNA, 24 nt, Artificial Sequence
  Synthetic
ccggcugcgagcgaaacaagcugc

SEQ ID NO: 56288 - RNA, 18 nt, Artificial Sequence
  Synthetic
  misc_feature (3)..(3): n is a, c, g, or u
  misc_feature (9)..(9): n is a, c, g, or u
cancacaanauagcuugc

SEQ ID NO: 56289 - RNA, 19 nt, Artificial Sequence
  Synthetic
  misc_feature (4)..(4): n is a, c, g, or u
  misc_feature (10)..(10): n is a, c, g, or u
ccancacaanauagcuugc

SEQ ID NO: 56290 - RNA, 20 nt, Artificial Sequence
  Synthetic
  misc_feature (5)..(5): n is a, c, g, or u
  misc_feature (11)..(11): n is a, c, g, or u
cccancacaanauagcuugc

SEQ ID NO: 56291 - RNA, 21 nt, Artificial Sequence
  Synthetic
  misc_feature (6)..(6): n is a, c, g, or u
  misc_feature (12)..(12): n is a, c, g, or u
ccccancacaanauagcuugc

SEQ ID NO: 56292 - RNA, 22 nt, Artificial Sequence
  Synthetic
  misc_feature (7)..(7): n is a, c, g, or u
  misc_feature (13)..(13): n is a, c, g, or u
accccancacaanauagcuugc

SEQ ID NO: 56293 - RNA, 23 nt, Artificial Sequence
  Synthetic
  misc_feature (8)..(8): n is a, c, g, or u
  misc_feature (14)..(14): n is a, c, g, or u
caccccancacaanauagcuugc

SEQ ID NO: 56294 - RNA, 24 nt, Artificial Sequence
  Synthetic
  misc_feature (9)..(9): n is a, c, g, or u
  misc_feature (15)..(15): n is a, c, g, or u
ucaccccancacaanauagcuugc

SEQ ID NO: 56295 - RNA, 18 nt, Artificial Sequence
  Synthetic
ccaaccaguggggguugc

SEQ ID NO: 56296 - RNA, 19 nt, Artificial Sequence
  Synthetic
cccaaccaguggggguugc

SEQ ID NO: 56297 - RNA, 20 nt, Artificial Sequence
  Synthetic
ccccaaccaguggggguugc

SEQ ID NO: 56298 - RNA, 21 nt, Artificial Sequence
  Synthetic
gccccaaccaguggggguugc

SEQ ID NO: 56299 - RNA, 22 nt, Artificial Sequence
  Synthetic
agccccaaccaguggggguugc

SEQ ID NO: 56300 - RNA, 23 nt, Artificial Sequence
  Synthetic
aagccccaaccaguggggguugc

SEQ ID NO: 56301 - RNA, 24 nt, Artificial Sequence
  Synthetic
caagccccaaccaguggggguugc

SEQ ID NO: 56302 - RNA, 18 nt, Artificial Sequence
  Synthetic
gggacugcuggaauuugc

SEQ ID NO: 56303 - RNA, 19 nt, Artificial Sequence
  Synthetic
cgggacugcuggaauuugc

SEQ ID NO: 56304 - RNA, 20 nt, Artificial Sequence
  Synthetic
ucgggacugcuggaauuugc

SEQ ID NO: 56305 - RNA, 21 nt, Artificial Sequence
  Synthetic
  misc_feature (1)..(1): n is a, c, g, or u
nucgggacugcuggaauuugc

SEQ ID NO: 56306 - RNA, 22 nt, Artificial Sequence
  Synthetic
  misc_feature (2)..(2): n is a, c, g, or u
anucgggacugcuggaauuugc

SEQ ID NO: 56307 - RNA, 23 nt, Artificial Sequence
  Synthetic
  misc_feature (3)..(3): n is a, c, g, or u
canucgggacugcuggaauuugc

SEQ ID NO: 56308 - RNA, 24 nt, Artificial Sequence
  Synthetic
  misc_feature (4)..(4): n is a, c, g, or u
ccanucgggacugcuggaauuugc

SEQ ID NO: 56309 - RNA, 18 nt, Artificial Sequence
  Synthetic
  misc_feature (17)..(17): n is a, c, g, or u
gccgcagacacauccanc

SEQ ID NO: 56310 - RNA, 19 nt, Artificial Sequence
  Synthetic
  misc_feature (18)..(18): n is a, c, g, or u
cgccgcagacacauccanc

SEQ ID NO: 56311 - RNA, 20 nt, Artificial Sequence
  Synthetic
  misc_feature (19)..(19): n is a, c, g, or u
acgccgcagacacauccanc

SEQ ID NO: 56312 - RNA, 21 nt, Artificial Sequence
  Synthetic
  misc_feature (20)..(20): n is a, c, g, or u
aacgccgcagacacauccanc

SEQ ID NO: 56313 - RNA, 22 nt, Artificial Sequence
  Synthetic
  misc_feature (21)..(21): n is a, c, g, or u
aaacgccgcagacacauccanc

SEQ ID NO: 56314 - RNA, 23 nt, Artificial Sequence
  Synthetic
  misc_feature (22)..(22): n is a, c, g, or u
aaaacgccgcagacacauccanc

SEQ ID NO: 56315 - RNA, 24 nt, Artificial Sequence
  Synthetic
  misc_feature (23)..(23): n is a, c, g, or u
uaaaacgccgcagacacauccanc

SEQ ID NO: 56316 - RNA, 18 nt, Artificial Sequence
  Synthetic
  misc_feature (17)..(17): n is a, c, g, or u
aggguuuggaacagcanc

SEQ ID NO: 56317 - RNA, 19 nt, Artificial Sequence
  Synthetic
  misc_feature (18)..(18): n is a, c, g, or u
gaggguuuggaacagcanc

SEQ ID NO: 56318 - RNA, 20 nt, Artificial Sequence
  Synthetic
  misc_feature (19)..(19): n is a, c, g, or u
cgaggguuuggaacagcanc

SEQ ID NO: 56319 - RNA, 21 nt, Artificial Sequence
  Synthetic
  misc_feature (20)..(20): n is a, c, g, or u
ccgaggguuuggaacagcanc

SEQ ID NO: 56320 - RNA, 22 nt, Artificial Sequence
  Synthetic
  misc_feature (21)..(21): n is a, c, g, or u
uccgaggguuuggaacagcanc

SEQ ID NO: 56321 - RNA, 23 nt, Artificial Sequence
  Synthetic
  misc_feature (22)..(22): n is a, c, g, or u
guccgaggguuuggaacagcanc

SEQ ID NO: 56322 - RNA, 24 nt, Artificial Sequence
  Synthetic
  misc_feature (23)..(23): n is a, c, g, or u
cguccgaggguuuggaacagcanc

SEQ ID NO: 56323 - RNA, 18 nt, Artificial Sequence
  Synthetic
  misc_feature (8)..(8): n is a, c, g, or u
  misc_feature (17)..(17): n is a, c, g, or u
ccuccuanuacaaaganc

SEQ ID NO: 56324 - RNA, 19 nt, Artificial Sequence
  Synthetic
  misc_feature (9)..(9): n is a, c, g, or u
  misc_feature (18)..(18): n is a, c, g, or u
gccuccuanuacaaaganc

SEQ ID NO: 56325 - RNA, 20 nt, Artificial Sequence
  Synthetic
  misc_feature (10)..(10): n is a, c, g, or u
  misc_feature (19)..(19): n is a, c, g, or u
agccuccuanuacaaaganc

SEQ ID NO: 56326 - RNA, 21 nt, Artificial Sequence
  Synthetic
  misc_feature (11)..(11): n is a, c, g, or u
  misc_feature (20)..(20): n is a, c, g, or u
cagccuccuanuacaaaganc

SEQ ID NO: 56327 - RNA, 22 nt, Artificial Sequence
  Synthetic
  misc_feature (12)..(12): n is a, c, g, or u
  misc_feature (21)..(21): n is a, c, g, or u
acagccuccuanuacaaaganc

SEQ ID NO: 56328 - RNA, 23 nt, Artificial Sequence
  Synthetic
  misc_feature (13)..(13): n is a, c, g, or u
  misc_feature (22)..(22): n is a, c, g, or u
uacagccuccuanuacaaaganc

SEQ ID NO: 56329 - RNA, 24 nt, Artificial Sequence
  Synthetic
  misc_feature (14)..(14): n is a, c, g, or u
  misc_feature (23)..(23): n is a, c, g, or u
cuacagccuccuanuacaaaganc

SEQ ID NO: 56330 - RNA, 18 nt, Artificial Sequence
  Synthetic
  misc_feature (8)..(8): n is a, c, g, or u
  misc_feature (17)..(17): n is a, c, g, or u
ccaaaagncccacaaunc

SEQ ID NO: 56331 - RNA, 19 nt, Artificial Sequence
  Synthetic
  misc_feature (9)..(9): n is a, c, g, or u
  misc_feature (18)..(18): n is a, c, g, or u
cccaaaagncccacaaunc

SEQ ID NO: 56332 - RNA, 20 nt, Artificial Sequence
  Synthetic
  misc_feature (10)..(10): n is a, c, g, or u
  misc_feature (19)..(19): n is a, c, g, or u
gcccaaaagncccacaaunc

SEQ ID NO: 56333 - RNA, 21 nt, Artificial Sequence
  Synthetic
  misc_feature (11)..(11): n is a, c, g, or u
  misc_feature (20)..(20): n is a, c, g, or u
agcccaaaagncccacaaunc

SEQ ID NO: 56334 - RNA, 22 nt, Artificial Sequence
  Synthetic
  misc_feature (12)..(12): n is a, c, g, or u
  misc_feature (21)..(21): n is a, c, g, or u
aagcccaaaagncccacaaunc

SEQ ID NO: 56335 - RNA, 23 nt, Artificial Sequence
  Synthetic
  misc_feature (13)..(13): n is a, c, g, or u
  misc_feature (22)..(22): n is a, c, g, or u
aaagcccaaaagncccacaaunc

SEQ ID NO: 56336 - RNA, 24 nt, Artificial Sequence
  Synthetic
  misc_feature (14)..(14): n is a, c, g, or u
  misc_feature (23)..(23): n is a, c, g, or u
caaagcccaaaagncccacaaunc

SEQ ID NO: 56337 - RNA, 18 nt, Artificial Sequence
  Synthetic
  misc_feature (14)..(14): n is a, c, g, or u
  misc_feature (17)..(17): n is a, c, g, or u
agacuguuggcaancunc

SEQ ID NO: 56338 - RNA, 19 nt, Artificial Sequence
  Synthetic
  misc_feature (15)..(15): n is a, c, g, or u
  misc_feature (18)..(18): n is a, c, g, or u
aagacuguuggcaancunc

SEQ ID NO: 56339 - RNA, 20 nt, Artificial Sequence
  Synthetic
  misc_feature (16)..(16): n is a, c, g, or u
  misc_feature (19)..(19): n is a, c, g, or u
uaagacuguuggcaancunc

SEQ ID NO: 56340 - RNA, 21 nt, Artificial Sequence
  Synthetic
  misc_feature (17)..(17): n is a, c, g, or u
  misc_feature (20)..(20): n is a, c, g, or u
guaagacuguuggcaancunc

SEQ ID NO: 56341 - RNA, 22 nt, Artificial Sequence
  Synthetic
  misc_feature (18)..(18): n is a, c, g, or u
  misc_feature (21)..(21): n is a, c, g, or u
uguaagacuguuggcaancunc

SEQ ID NO: 56342 - RNA, 23 nt, Artificial Sequence
  Synthetic
  misc_feature (19)..(19): n is a, c, g, or u
  misc_feature (22)..(22): n is a, c, g, or u
auguaagacuguuggcaancunc

SEQ ID NO: 56343 - RNA, 24 nt, Artificial Sequence
  Synthetic
  misc_feature (20)..(20): n is a, c, g, or u
  misc_feature (23)..(23): n is a, c, g, or u
uauguaagacuguuggcaancunc

SEQ ID NO: 56344 - RNA, 18 nt, Artificial Sequence
  Synthetic
  misc_feature (17)..(17): n is a, c, g, or u
gauuuacaggaaguuunc

SEQ ID NO: 56345 - RNA, 19 nt, Artificial Sequence
  Synthetic
  misc_feature (18)..(18): n is a, c, g, or u
cgauuuacaggaaguuunc

SEQ ID NO: 56346 - RNA, 20 nt, Artificial Sequence
  Synthetic
  misc_feature (1)..(1): n is a, c, g, or u
  misc_feature (19)..(19): n is a, c, g, or u
ncgauuuacaggaaguuunc

SEQ ID NO: 56347 - RNA, 21 nt, Artificial Sequence
  Synthetic
  misc_feature (2)..(2): n is a, c, g, or u
  misc_feature (20)..(20): n is a, c, g, or u
gncgauuuacaggaaguuunc

SEQ ID NO: 56348 - RNA, 22 nt, Artificial Sequence
  Synthetic
  misc_feature (3)..(3): n is a, c, g, or u
  misc_feature (21)..(21): n is a, c, g, or u
ggncgauuuacaggaaguuunc

SEQ ID NO: 56349 - RNA, 23 nt, Artificial Sequence
  Synthetic
  misc_feature (1)..(1): n is a, c, g, or u
  misc_feature (4)..(4): n is a, c, g, or u
  misc_feature (22)..(22): n is a, c, g, or u
nggncgauuuacaggaaguuunc

SEQ ID NO: 56350 - RNA, 24 nt, Artificial Sequence
  Synthetic
  misc_feature (2)..(2): n is a, c, g, or u
  misc_feature (5)..(5): n is a, c, g, or u
  misc_feature (23)..(23): n is a, c, g, or u
unggncgauuuacaggaaguuunc

SEQ ID NO: 56351 - RNA, 18 nt, Artificial Sequence
  Synthetic
aguuccgcaguauggauc

SEQ ID NO: 56352 - RNA, 19 nt, Artificial Sequence
  Synthetic
gaguuccgcaguauggauc

SEQ ID NO: 56353 - RNA, 20 nt, Artificial Sequence
  Synthetic
ggaguuccgcaguauggauc

SEQ ID NO: 56354 - RNA, 21 nt, Artificial Sequence
  Synthetic
aggaguuccgcaguauggauc

SEQ ID NO: 56355 - RNA, 22 nt, Artificial Sequence
  Synthetic
aaggaguuccgcaguauggauc

SEQ ID NO: 56356 - RNA, 23 nt, Artificial Sequence
  Synthetic
caaggaguuccgcaguauggauc

SEQ ID NO: 56357 - RNA, 24 nt, Artificial Sequence
  Synthetic
gcaaggaguuccgcaguauggauc

SEQ ID NO: 56358 - RNA, 18 nt, Artificial Sequence
  Synthetic
  misc_feature (14)..(14): n is a, c, g, or u
ugcugguggucgungauc

SEQ ID NO: 56359 - RNA, 19 nt, Artificial Sequence
  Synthetic
  misc_feature (15)..(15): n is a, c, g, or u
gugcugguggucgungauc

SEQ ID NO: 56360 - RNA, 20 nt, Artificial Sequence
  Synthetic
  misc_feature (16)..(16): n is a, c, g, or u
cgugcugguggucgungauc

SEQ ID NO: 56361 - RNA, 21 nt, Artificial Sequence
  Synthetic
  misc_feature (17)..(17): n is a, c, g, or u
ccgugcugguggucgungauc

SEQ ID NO: 56362 - RNA, 22 nt, Artificial Sequence
  Synthetic
  misc_feature (18)..(18): n is a, c, g, or u
cccgugcugguggucgungauc

SEQ ID NO: 56363 - RNA, 23 nt, Artificial Sequence
  Synthetic
  misc_feature (19)..(19): n is a, c, g, or u
ucccgugcugguggucgungauc

SEQ ID NO: 56364 - RNA, 24 nt, Artificial Sequence
  Synthetic
  misc_feature (20)..(20): n is a, c, g, or u
gucccgugcugguggucgungauc

SEQ ID NO: 56365 - RNA, 18 nt, Artificial Sequence
  Synthetic
  misc_feature (4)..(4): n is a, c, g, or u
aaangacaccaaauacuc

SEQ ID NO: 56366 - RNA, 19 nt, Artificial Sequence
  Synthetic
  misc_feature (5)..(5): n is a, c, g, or u
caaangacaccaaauacuc

SEQ ID NO: 56367 - RNA, 20 nt, Artificial Sequence
  Synthetic
  misc_feature (6)..(6): n is a, c, g, or u
ccaaangacaccaaauacuc

SEQ ID NO: 56368 - RNA, 21 nt, Artificial Sequence
  Synthetic
  misc_feature (7)..(7): n is a, c, g, or u
uccaaangacaccaaauacuc

SEQ ID NO: 56369 - RNA, 22 nt, Artificial Sequence
  Synthetic
  misc_feature (8)..(8): n is a, c, g, or u
cuccaaangacaccaaauacuc

SEQ ID NO: 56370 - RNA, 23 nt, Artificial Sequence
  Synthetic
  misc_feature (9)..(9): n is a, c, g, or u
acuccaaangacaccaaauacuc

SEQ ID NO: 56371 - RNA, 24 nt, Artificial Sequence
  Synthetic
  misc_feature (10)..(10): n is a, c, g, or u
cacuccaaangacaccaaauacuc

SEQ ID NO: 56372 - RNA, 18 nt, Artificial Sequence
  Synthetic
  misc_feature (12)..(12): n is a, c, g, or u
  misc_feature (15)..(15): n is a, c, g, or u
acugggguuggnuuncuc

SEQ ID NO: 56373 - RNA, 19 nt, Artificial Sequence
  Synthetic
  misc_feature (13)..(13): n is a, c, g, or u
  misc_feature (16)..(16): n is a, c, g, or u
gacugggguuggnuuncuc

SEQ ID NO: 56374 - RNA, 20 nt, Artificial Sequence
  Synthetic
  misc_feature (14)..(14): n is a, c, g, or u
  misc_feature (17)..(17): n is a, c, g, or u
agacugggguuggnuuncuc

SEQ ID NO: 56375 - RNA, 21 nt, Artificial Sequence
  Synthetic
  misc_feature (15)..(15): n is a, c, g, or u
  misc_feature (18)..(18): n is a, c, g, or u
gagacugggguuggnuuncuc

SEQ ID NO: 56376 - RNA, 22 nt, Artificial Sequence
  Synthetic
  misc_feature (16)..(16): n is a, c, g, or u
  misc_feature (19)..(19): n is a, c, g, or u
agagacugggguuggnuuncuc

SEQ ID NO: 56377 - RNA, 23 nt, Artificial Sequence
  Synthetic
  misc_feature (17)..(17): n is a, c, g, or u
  misc_feature (20)..(20): n is a, c, g, or u
gagagacugggguuggnuuncuc

SEQ ID NO: 56378 - RNA, 24 nt, Artificial Sequence
  Synthetic
  misc_feature (18)..(18): n is a, c, g, or u
  misc_feature (21)..(21): n is a, c, g, or u
ggagagacugggguuggnuuncuc

SEQ ID NO: 56379 - RNA, 18 nt, Artificial Sequence
  Synthetic
  misc_feature (11)..(11): n is a, c, g, or u
ccuguggaugngugucuc

SEQ ID NO: 56380 - RNA, 19 nt, Artificial Sequence
  Synthetic
  misc_feature (12)..(12): n is a, c, g, or u
gccuguggaugngugucuc

SEQ ID NO: 56381 - RNA, 20 nt, Artificial Sequence
  Synthetic
  misc_feature (1)..(1): n is a, c, g, or u
  misc_feature (13)..(13): n is a, c, g, or u
ngccuguggaugngugucuc

SEQ ID NO: 56382 - RNA, 21 nt, Artificial Sequence
  Synthetic
  misc_feature (2)..(2): n is a, c, g, or u
  misc_feature (14)..(14): n is a, c, g, or u
ungccuguggaugngugucuc

SEQ ID NO: 56383 - RNA, 22 nt, Artificial Sequence
  Synthetic
  misc_feature (3)..(3): n is a, c, g, or u
  misc_feature (15)..(15): n is a, c, g, or u
aungccuguggaugngugucuc

SEQ ID NO: 56384 - RNA, 23 nt, Artificial Sequence
  Synthetic
  misc_feature (4)..(4): n is a, c, g, or u
  misc_feature (16)..(16): n is a, c, g, or u
caungccuguggaugngugucuc

SEQ ID NO: 56385 - RNA, 24 nt, Artificial Sequence
  Synthetic
  misc_feature (5)..(5): n is a, c, g, or u
  misc_feature (17)..(17): n is a, c, g, or u
gcaungccuguggaugngugucuc

SEQ ID NO: 56386 - RNA, 18 nt, Artificial Sequence
  Synthetic
acccaggaagccaaaguc

SEQ ID NO: 56387 - RNA, 19 nt, Artificial Sequence
  Synthetic
cacccaggaagccaaaguc

SEQ ID NO: 56388 - RNA, 20 nt, Artificial Sequence
  Synthetic
ccacccaggaagccaaaguc

SEQ ID NO: 56389 - RNA, 21 nt, Artificial Sequence
  Synthetic
cccacccaggaagccaaaguc

SEQ ID NO: 56390 - RNA, 22 nt, Artificial Sequence
  Synthetic
gcccacccaggaagccaaaguc

SEQ ID NO: 56391 - RNA, 23 nt, Artificial Sequence
  Synthetic
ugcccacccaggaagccaaaguc

SEQ ID NO: 56392 - RNA, 24 nt, Artificial Sequence
  Synthetic
uugcccacccaggaagccaaaguc

SEQ ID NO: 56393 - RNA, 18 nt, Artificial Sequence
  Synthetic
  misc_feature (6)..(6): n is a, c, g, or u
ccccancuccucccaguc

SEQ ID NO: 56394 - RNA, 19 nt, Artificial Sequence
  Synthetic
  misc_feature (7)..(7): n is a, c, g, or u
cccccancuccucccaguc

SEQ ID NO: 56395 - RNA, 20 nt, Artificial Sequence
  Synthetic
  misc_feature (8)..(8): n is a, c, g, or u
ucccccancuccucccaguc

SEQ ID NO: 56396 - RNA, 21 nt, Artificial Sequence
  Synthetic
  misc_feature (9)..(9): n is a, c, g, or u
cucccccancuccucccaguc

SEQ ID NO: 56397 - RNA, 22 nt, Artificial Sequence
  Synthetic
  misc_feature (10)..(10): n is a, c, g, or u
ccucccccancuccucccaguc

SEQ ID NO: 56398 - RNA, 23 nt, Artificial Sequence
  Synthetic
  misc_feature (11)..(11): n is a, c, g, or u
uccucccccancuccucccaguc

SEQ ID NO: 56399 - RNA, 24 nt, Artificial Sequence
  Synthetic
  misc_feature (12)..(12): n is a, c, g, or u
cuccucccccancuccucccaguc

SEQ ID NO: 56400 - RNA, 18 nt, Artificial Sequence
  Synthetic
uuucccaccuuaugaguc

SEQ ID NO: 56401 - RNA, 19 nt, Artificial Sequence
  Synthetic
  misc_feature (1)..(1): n is a, c, g, or u
nuuucccaccuuaugaguc

SEQ ID NO: 56402 - RNA, 20 nt, Artificial Sequence
  Synthetic
  misc_feature (2)..(2): n is a, c, g, or u
anuuucccaccuuaugaguc

SEQ ID NO: 56403 - RNA, 21 nt, Artificial Sequence
  Synthetic
  misc_feature (3)..(3): n is a, c, g, or u
aanuuucccaccuuaugaguc

SEQ ID NO: 56404 - RNA, 22 nt, Artificial Sequence
  Synthetic
  misc_feature (4)..(4): n is a, c, g, or u
aaanuuucccaccuuaugaguc

SEQ ID NO: 56405 - RNA, 23 nt, Artificial Sequence
  Synthetic
  misc_feature (5)..(5): n is a, c, g, or u
uaaanuuucccaccuuaugaguc

SEQ ID NO: 56406 - RNA, 24 nt, Artificial Sequence
  Synthetic
  misc_feature (6)..(6): n is a, c, g, or u
guaaanuuucccaccuuaugaguc

SEQ ID NO: 56407 - RNA, 18 nt, Artificial Sequence
  Synthetic
caacauaccuugauaguc

SEQ ID NO: 56408 - RNA, 19 nt, Artificial Sequence
  Synthetic
gcaacauaccuugauaguc

SEQ ID NO: 56409 - RNA, 20 nt, Artificial Sequence
  Synthetic
ggcaacauaccuugauaguc

SEQ ID NO: 56410 - RNA, 21 nt, Artificial Sequence
  Synthetic
gggcaacauaccuugauaguc

SEQ ID NO: 56411 - RNA, 22 nt, Artificial Sequence
  Synthetic
cgggcaacauaccuugauaguc

SEQ ID NO: 56412 - RNA, 23 nt, Artificial Sequence
  Synthetic
acgggcaacauaccuugauaguc

SEQ ID NO: 56413 - RNA, 24 nt, Artificial Sequence
  Synthetic
aacgggcaacauaccuugauaguc

SEQ ID NO: 56414 - RNA, 18 nt, Artificial Sequence
  Synthetic
  misc_feature (4)..(4): n is a, c, g, or u
acangugcaguuuccguc

SEQ ID NO: 56415 - RNA, 19 nt, Artificial Sequence
  Synthetic
  misc_feature (5)..(5): n is a, c, g, or u
uacangugcaguuuccguc

SEQ ID NO: 56416 - RNA, 20 nt, Artificial Sequence
  Synthetic
  misc_feature (6)..(6): n is a, c, g, or u
auacangugcaguuuccguc

SEQ ID NO: 56417 - RNA, 21 nt, Artificial Sequence
  Synthetic
  misc_feature (7)..(7): n is a, c, g, or u
aauacangugcaguuuccguc

SEQ ID NO: 56418 - RNA, 22 nt, Artificial Sequence
  Synthetic
  misc_feature (8)..(8): n is a, c, g, or u
gaauacangugcaguuuccguc

SEQ ID NO: 56419 - RNA, 23 nt, Artificial Sequence
  Synthetic
  misc_feature (9)..(9): n is a, c, g, or u
ggaauacangugcaguuuccguc

SEQ ID NO: 56420 - RNA, 24 nt, Artificial Sequence
  Synthetic
  misc_feature (10)..(10): n is a, c, g, or u
gggaauacangugcaguuuccguc

SEQ ID NO: 56421 - RNA, 18 nt, Artificial Sequence
  Synthetic
accaguggggguugcguc

SEQ ID NO: 56422 - RNA, 19 nt, Artificial Sequence
  Synthetic
aaccaguggggguugcguc

SEQ ID NO: 56423 - RNA, 20 nt, Artificial Sequence
  Synthetic
caaccaguggggguugcguc

SEQ ID NO: 56424 - RNA, 21 nt, Artificial Sequence
  Synthetic
ccaaccaguggggguugcguc

SEQ ID NO: 56425 - RNA, 22 nt, Artificial Sequence
  Synthetic
cccaaccaguggggguugcguc

SEQ ID NO: 56426 - RNA, 23 nt, Artificial Sequence
  Synthetic
ccccaaccaguggggguugcguc

SEQ ID NO: 56427 - RNA, 24 nt, Artificial Sequence
  Synthetic
gccccaaccaguggggguugcguc

SEQ ID NO: 56428 - RNA, 18 nt, Artificial Sequence
  Synthetic
  misc_feature (11)..(11): n is a, c, g, or u
gcgauugagancuucguc

SEQ ID NO: 56429 - RNA, 19 nt, Artificial Sequence
  Synthetic
  misc_feature (12)..(12): n is a, c, g, or u
ggcgauugagancuucguc

SEQ ID NO: 56430 - RNA, 20 nt, Artificial Sequence
  Synthetic
  misc_feature (13)..(13): n is a, c, g, or u
cggcgauugagancuucguc

SEQ ID NO: 56431 - RNA, 21 nt, Artificial Sequence
  Synthetic
  misc_feature (14)..(14): n is a, c, g, or u
gcggcgauugagancuucguc

SEQ ID NO: 56432 - RNA, 22 nt, Artificial Sequence
  Synthetic
  misc_feature (15)..(15): n is a, c, g, or u
cgcggcgauugagancuucguc

SEQ ID NO: 56433 - RNA, 23 nt, Artificial Sequence
  Synthetic
  misc_feature (16)..(16): n is a, c, g, or u
acgcggcgauugagancuucguc

SEQ ID NO: 56434 - RNA, 24 nt, Artificial Sequence
  Synthetic
  misc_feature (17)..(17): n is a, c, g, or u
gacgcggcgauugagancuucguc

SEQ ID NO: 56435 - RNA, 18 nt, Artificial Sequence
  Synthetic
agcggugucgaguagguc

SEQ ID NO: 56436 - RNA, 19 nt, Artificial Sequence
  Synthetic
aagcggugucgaguagguc

SEQ ID NO: 56437 - RNA, 20 nt, Artificial Sequence
  Synthetic
gaagcggugucgaguagguc

SEQ ID NO: 56438 - RNA, 18 nt, Artificial Sequence
  Synthetic
guaacacgagcagggguc

SEQ ID NO: 56439 - RNA, 19 nt, Artificial Sequence
  Synthetic
uguaacacgagcagggguc

SEQ ID NO: 56440 - RNA, 20 nt, Artificial Sequence
  Synthetic
cuguaacacgagcagggguc

SEQ ID NO: 56441 - RNA, 21 nt, Artificial Sequence
  Synthetic
ccuguaacacgagcagggguc

SEQ ID NO: 56442 - RNA, 22 nt, Artificial Sequence
  Synthetic
gccuguaacacgagcagggguc

SEQ ID NO: 56443 - RNA, 23 nt, Artificial Sequence
  Synthetic
cgccuguaacacgagcagggguc

SEQ ID NO: 56444 - RNA, 24 nt, Artificial Sequence
  Synthetic
ccgccuguaacacgagcagggguc

SEQ ID NO: 56445 - RNA, 18 nt, Artificial Sequence
  Synthetic
  misc_feature (1)..(1): n is a, c, g, or u
nggauccagcugaugguc

SEQ ID NO: 56446 - RNA, 19 nt, Artificial Sequence
  Synthetic
  misc_feature (2)..(2): n is a, c, g, or u
gnggauccagcugaugguc

SEQ ID NO: 56447 - RNA, 20 nt, Artificial Sequence
  Synthetic
  misc_feature (3)..(3): n is a, c, g, or u
agnggauccagcugaugguc

SEQ ID NO: 56448 - RNA, 21 nt, Artificial Sequence
  Synthetic
  misc_feature (1)..(1): n is a, c, g, or u
  misc_feature (4)..(4): n is a, c, g, or u
nagnggauccagcugaugguc

SEQ ID NO: 56449 - RNA, 22 nt, Artificial Sequence
  Synthetic
  misc_feature (2)..(2): n is a, c, g, or u
  misc_feature (5)..(5): n is a, c, g, or u
anagnggauccagcugaugguc

SEQ ID NO: 56450 - RNA, 23 nt, Artificial Sequence
  Synthetic
  misc_feature (3)..(3): n is a, c, g, or u
  misc_feature (6)..(6): n is a, c, g, or u
aanagnggauccagcugaugguc

SEQ ID NO: 56451 - RNA, 24 nt, Artificial Sequence
  Synthetic
  misc_feature (4)..(4): n is a, c, g, or u
  misc_feature (7)..(7): n is a, c, g, or u
gaanagnggauccagcugaugguc

SEQ ID NO: 56452 - RNA, 18 nt, Artificial Sequence
  Synthetic
uaggggcauuuggugguc

SEQ ID NO: 56453 - RNA, 19 nt, Artificial Sequence
  Synthetic
auaggggcauuuggugguc

SEQ ID NO: 56454 - RNA, 20 nt, Artificial Sequence
  Synthetic
gauaggggcauuuggugguc

SEQ ID NO: 56455 - RNA, 21 nt, Artificial Sequence
  Synthetic
  misc_feature (1)..(1): n is a, c, g, or u
ngauaggggcauuuggugguc

SEQ ID NO: 56456 - RNA, 22 nt, Artificial Sequence
  Synthetic
  misc_feature (2)..(2): n is a, c, g, or u
angauaggggcauuuggugguc

SEQ ID NO: 56457 - RNA, 23 nt, Artificial Sequence
  Synthetic
  misc_feature (3)..(3): n is a, c, g, or u
uangauaggggcauuuggugguc

SEQ ID NO: 56458 - RNA, 24 nt, Artificial Sequence
  Synthetic
  misc_feature (4)..(4): n is a, c, g, or u
auangauaggggcauuuggugguc

SEQ ID NO: 56459 - RNA, 18 nt, Artificial Sequence
  Synthetic
  misc_feature (14)..(15): n is a, c, g, or u
cccaugccccuucnnguc

SEQ ID NO: 56460 - RNA, 19 nt, Artificial Sequence
  Synthetic
  misc_feature (15)..(16): n is a, c, g, or u
ucccaugccccuucnnguc

SEQ ID NO: 56461 - RNA, 20 nt, Artificial Sequence
  Synthetic
  misc_feature (16)..(17): n is a, c, g, or u
gucccaugccccuucnnguc

SEQ ID NO: 56462 - RNA, 21 nt, Artificial Sequence
  Synthetic
  misc_feature (17)..(18): n is a, c, g, or u
ugucccaugccccuucnnguc

SEQ ID NO: 56463 - RNA, 22 nt, Artificial Sequence
  Synthetic
  misc_feature (18)..(19): n is a, c, g, or u
cugucccaugccccuucnnguc

SEQ ID NO: 56464 - RNA, 23 nt, Artificial Sequence
  Synthetic
  misc_feature (19)..(20): n is a, c, g, or u
ucugucccaugccccuucnnguc

SEQ ID NO: 56465 - RNA, 24 nt, Artificial Sequence
  Synthetic
  misc_feature (20)..(21): n is a, c, g, or u
uucugucccaugccccuucnnguc

SEQ ID NO: 56466 - RNA, 18 nt, Artificial Sequence
  Synthetic
ggagcaggguucuguguc

SEQ ID NO: 56467 - RNA, 19 nt, Artificial Sequence
  Synthetic
cggagcaggguucuguguc

SEQ ID NO: 56468 - RNA, 20 nt, Artificial Sequence
  Synthetic
ucggagcaggguucuguguc

SEQ ID NO: 56469 - RNA, 21 nt, Artificial Sequence
  Synthetic
gucggagcaggguucuguguc

SEQ ID NO: 56470 - RNA, 22 nt, Artificial Sequence
  Synthetic
agucggagcaggguucuguguc

SEQ ID NO: 56471 - RNA, 23 nt, Artificial Sequence
  Synthetic
uagucggagcaggguucuguguc

SEQ ID NO: 56472 - RNA, 24 nt, Artificial Sequence
  Synthetic
auagucggagcaggguucuguguc

SEQ ID NO: 56473 - RNA, 18 nt, Artificial Sequence
  Synthetic
auugugaggauuuuuguc

SEQ ID NO: 56474 - RNA, 19 nt, Artificial Sequence
  Synthetic
uauugugaggauuuuuguc

SEQ ID NO: 56475 - RNA, 20 nt, Artificial Sequence
  Synthetic
guauugugaggauuuuuguc

SEQ ID NO: 56476 - RNA, 21 nt, Artificial Sequence
  Synthetic
gguauugugaggauuuuuguc

SEQ ID NO: 56477 - RNA, 22 nt, Artificial Sequence
  Synthetic
ugguauugugaggauuuuuguc

SEQ ID NO: 56478 - RNA, 23 nt, Artificial Sequence
  Synthetic
gugguauugugaggauuuuuguc

SEQ ID NO: 56479 - RNA, 24 nt, Artificial Sequence
  Synthetic
ugugguauugugaggauuuuuguc

SEQ ID NO: 56480 - RNA, 18 nt, Artificial Sequence
  Synthetic
  misc_feature (4)..(4): n is a, c, g, or u
  misc_feature (16)..(16): n is a, c, g, or u
aacngacgggaagaanuc

SEQ ID NO: 56481 - RNA, 19 nt, Artificial Sequence
  Synthetic
  misc_feature (5)..(5): n is a, c, g, or u
  misc_feature (17)..(17): n is a, c, g, or u
gaacngacgggaagaanuc

SEQ ID NO: 56482 - RNA, 20 nt, Artificial Sequence
  Synthetic
  misc_feature (6)..(6): n is a, c, g, or u
  misc_feature (18)..(18): n is a, c, g, or u
cgaacngacgggaagaanuc

SEQ ID NO: 56483 - RNA, 21 nt, Artificial Sequence
  Synthetic
  misc_feature (7)..(7): n is a, c, g, or u
  misc_feature (19)..(19): n is a, c, g, or u
ccgaacngacgggaagaanuc

SEQ ID NO: 56484 - RNA, 22 nt, Artificial Sequence
  Synthetic
  misc_feature (8)..(8): n is a, c, g, or u
  misc_feature (20)..(20): n is a, c, g, or u
cccgaacngacgggaagaanuc

SEQ ID NO: 56485 - RNA, 23 nt, Artificial Sequence
  Synthetic
  misc_feature (9)..(9): n is a, c, g, or u
  misc_feature (21)..(21): n is a, c, g, or u
ucccgaacngacgggaagaanuc

SEQ ID NO: 56486 - RNA, 24 nt, Artificial Sequence
  Synthetic
  misc_feature (10)..(10): n is a, c, g, or u
  misc_feature (22)..(22): n is a, c, g, or u
gucccgaacngacgggaagaanuc

SEQ ID NO: 56487 - RNA, 18 nt, Artificial Sequence
  Synthetic
  misc_feature (7)..(7): n is a, c, g, or u
  misc_feature (9)..(9): n is a, c, g, or u
  misc_feature (16)..(16): n is a, c, g, or u
aaguuuncnaaaacanuc

SEQ ID NO: 56488 - RNA, 19 nt, Artificial Sequence
  Synthetic
  misc_feature (8)..(8): n is a, c, g, or u
  misc_feature (10)..(10): n is a, c, g, or u
  misc_feature (17)..(17): n is a, c, g, or u
gaaguuuncnaaaacanuc

SEQ ID NO: 56489 - RNA, 20 nt, Artificial Sequence
  Synthetic
  misc_feature (9)..(9): n is a, c, g, or u
  misc_feature (11)..(11): n is a, c, g, or u
  misc_feature (18)..(18): n is a, c, g, or u
ggaaguuuncnaaaacanuc

SEQ ID NO: 56490 - RNA, 21 nt, Artificial Sequence
  Synthetic
  misc_feature (10)..(10): n is a, c, g, or u
  misc_feature (12)..(12): n is a, c, g, or u
  misc_feature (19)..(19): n is a, c, g, or u
aggaaguuuncnaaaacanuc

SEQ ID NO: 56491 - RNA, 22 nt, Artificial Sequence
  Synthetic
  misc_feature (11)..(11): n is a, c, g, or u
  misc_feature (13)..(13): n is a, c, g, or u
  misc_feature (20)..(20): n is a, c, g, or u
caggaaguuuncnaaaacanuc

SEQ ID NO: 56492 - RNA, 23 nt, Artificial Sequence
  Synthetic
  misc_feature (12)..(12): n is a, c, g, or u
  misc_feature (14)..(14): n is a, c, g, or u
  misc_feature (21)..(21): n is a, c, g, or u
acaggaaguuuncnaaaacanuc

SEQ ID NO: 56493 - RNA, 24 nt, Artificial Sequence
  Synthetic
  misc_feature (13)..(13): n is a, c, g, or u
  misc_feature (15)..(15): n is a, c, g, or u
  misc_feature (22)..(22): n is a, c, g, or u
uacaggaaguuuncnaaaacanuc

SEQ ID NO: 56494 - RNA, 18 nt, Artificial Sequence
  Synthetic
  misc_feature (10)..(10): n is a, c, g, or u
  misc_feature (16)..(16): n is a, c, g, or u
gcaauguucngguganuc

SEQ ID NO: 56495 - RNA, 19 nt, Artificial Sequence
  Synthetic
  misc_feature (11)..(11): n is a, c, g, or u
  misc_feature (17)..(17): n is a, c, g, or u
ugcaauguucngguganuc

SEQ ID NO: 56496 - RNA, 20 nt, Artificial Sequence
  Synthetic
  misc_feature (12)..(12): n is a, c, g, or u
  misc_feature (18)..(18): n is a, c, g, or u
gugcaauguucngguganuc

SEQ ID NO: 56497 - RNA, 21 nt, Artificial Sequence
  Synthetic
  misc_feature (1)..(1): n is a, c, g, or u
  misc_feature (13)..(13): n is a, c, g, or u
  misc_feature (19)..(19): n is a, c, g, or u
ngugcaauguucngguganuc

SEQ ID NO: 56498 - RNA, 22 nt, Artificial Sequence
  Synthetic
  misc_feature (2)..(2): n is a, c, g, or u
  misc_feature (14)..(14): n is a, c, g, or u
  misc_feature (20)..(20): n is a, c, g, or u
gngugcaauguucngguganuc

SEQ ID NO: 56499 - RNA, 23 nt, Artificial Sequence
  Synthetic
  misc_feature (3)..(3): n is a, c, g, or u
  misc_feature (15)..(15): n is a, c, g, or u
  misc_feature (21)..(21): n is a, c, g, or u
ggngugcaauguucngguganuc

SEQ ID NO: 56500 - RNA, 24 nt, Artificial Sequence
  Synthetic
  misc_feature (1)..(1): n is a, c, g, or u
  misc_feature (4)..(4): n is a, c, g, or u
  misc_feature (16)..(16): n is a, c, g, or u
  misc_feature (22)..(22): n is a, c, g, or u
nggngugcaauguucngguganuc

SEQ ID NO: 56501 - RNA, 18 nt, Artificial Sequence
  Synthetic
  misc_feature (8)..(8): n is a, c, g, or u
  misc_feature (16)..(16): n is a, c, g, or u
uccaggunauugaccnuc

SEQ ID NO: 56502 - RNA, 19 nt, Artificial Sequence
  Synthetic
  misc_feature (9)..(9): n is a, c, g, or u
  misc_feature (17)..(17): n is a, c, g, or u
auccaggunauugaccnuc

SEQ ID NO: 56503 - RNA, 20 nt, Artificial Sequence
  Synthetic
  misc_feature (10)..(10): n is a, c, g, or u
  misc_feature (18)..(18): n is a, c, g, or u
gauccaggunauugaccnuc

SEQ ID NO: 56504 - RNA, 21 nt, Artificial Sequence
  Synthetic
  misc_feature (11)..(11): n is a, c, g, or u
  misc_feature (19)..(19): n is a, c, g, or u
cgauccaggunauugaccnuc

SEQ ID NO: 56505 - RNA, 22 nt, Artificial Sequence
  Synthetic
  misc_feature (12)..(12): n is a, c, g, or u
  misc_feature (20)..(20): n is a, c, g, or u
ucgauccaggunauugaccnuc

SEQ ID NO: 56506 - RNA, 23 nt, Artificial Sequence
  Synthetic
  misc_feature (13)..(13): n is a, c, g, or u
  misc_feature (21)..(21): n is a, c, g, or u
uucgauccaggunauugaccnuc

SEQ ID NO: 56507 - RNA, 24 nt, Artificial Sequence
  Synthetic
  misc_feature (14)..(14): n is a, c, g, or u
  misc_feature (22)..(22): n is a, c, g, or u
cuucgauccaggunauugaccnuc

SEQ ID NO: 56508 - RNA, 18 nt, Artificial Sequence
  Synthetic
  misc_feature (8)..(8): n is a, c, g, or u
  misc_feature (16)..(16): n is a, c, g, or u
gaucuugngguaaugnuc

SEQ ID NO: 56509 - RNA, 19 nt, Artificial Sequence
  Synthetic
  misc_feature (9)..(9): n is a, c, g, or u
  misc_feature (17)..(17): n is a, c, g, or u
ugaucuugngguaaugnuc

SEQ ID NO: 56510 - RNA, 20 nt, Artificial Sequence
  Synthetic
  misc_feature (1)..(1): n is a, c, g, or u
  misc_feature (10)..(10): n is a, c, g, or u
  misc_feature (18)..(18): n is a, c, g, or u
nugaucuugngguaaugnuc

SEQ ID NO: 56511 - RNA, 21 nt, Artificial Sequence
  Synthetic
  misc_feature (2)..(2): n is a, c, g, or u
  misc_feature (11)..(11): n is a, c, g, or u
  misc_feature (19)..(19): n is a, c, g, or u
unugaucuugngguaaugnuc

SEQ ID NO: 56512 - RNA, 22 nt, Artificial Sequence
  Synthetic
  misc_feature (3)..(3): n is a, c, g, or u
  misc_feature (12)..(12): n is a, c, g, or u
  misc_feature (20)..(20): n is a, c, g, or u
aunugaucuugngguaaugnuc

SEQ ID NO: 56513 - RNA, 23 nt, Artificial Sequence
  Synthetic
  misc_feature (4)..(4): n is a, c, g, or u
  misc_feature (13)..(13): n is a, c, g, or u
  misc_feature (21)..(21): n is a, c, g, or u
aaunugaucuugngguaaugnuc

SEQ ID NO: 56514 - RNA, 24 nt, Artificial Sequence
  Synthetic
  misc_feature (5)..(5): n is a, c, g, or u
  misc_feature (14)..(14): n is a, c, g, or u
  misc_feature (22)..(22): n is a, c, g, or u
caaunugaucuugngguaaugnuc

SEQ ID NO: 56515 - RNA, 18 nt, Artificial Sequence
  Synthetic
  misc_feature (7)..(7): n is a, c, g, or u
  misc_feature (16)..(16): n is a, c, g, or u
uugaugnaaaugaaunuc

SEQ ID NO: 56516 - RNA, 19 nt, Artificial Sequence
  Synthetic
  misc_feature (8)..(8): n is a, c, g, or u
  misc_feature (17)..(17): n is a, c, g, or u
cuugaugnaaaugaaunuc

SEQ ID NO: 56517 - RNA, 20 nt, Artificial Sequence
  Synthetic
  misc_feature (9)..(9): n is a, c, g, or u
  misc_feature (18)..(18): n is a, c, g, or u
ucuugaugnaaaugaaunuc

SEQ ID NO: 56518 - RNA, 21 nt, Artificial Sequence
  Synthetic
  misc_feature (1)..(1): n is a, c, g, or u
  misc_feature (10)..(10): n is a, c, g, or u
  misc_feature (19)..(19): n is a, c, g, or u
nucuugaugnaaaugaaunuc

SEQ ID NO: 56519 - RNA, 22 nt, Artificial Sequence
  Synthetic
  misc_feature (1)..(2): n is a, c, g, or u
  misc_feature (11)..(11): n is a, c, g, or u
  misc_feature (20)..(20): n is a, c, g, or u
nnucuugaugnaaaugaaunuc

SEQ ID NO: 56520 - RNA, 23 nt, Artificial Sequence
  Synthetic
  misc_feature (2)..(3): n is a, c, g, or u
  misc_feature (12)..(12): n is a, c, g, or u
  misc_feature (21)..(21): n is a, c, g, or u
annucuugaugnaaaugaaunuc

SEQ ID NO: 56521 - RNA, 24 nt, Artificial Sequence
  Synthetic
  misc_feature (3)..(4): n is a, c, g, or u
  misc_feature (13)..(13): n is a, c, g, or u
  misc_feature (22)..(22): n is a, c, g, or u
cannucuugaugnaaaugaaunuc

SEQ ID NO: 56522 - RNA, 18 nt, Artificial Sequence
  Synthetic
  misc_feature (1)..(1): n is a, c, g, or u
  misc_feature (10)..(10): n is a, c, g, or u
  misc_feature (13)..(13): n is a, c, g, or u
  misc_feature (16)..(16): n is a, c, g, or u
ngguuuaaunccnuunuc

SEQ ID NO: 56523 - RNA, 19 nt, Artificial Sequence
  Synthetic
  misc_feature (2)..(2): n is a, c, g, or u
  misc_feature (11)..(11): n is a, c, g, or u
  misc_feature (14)..(14): n is a, c, g, or u
  misc_feature (17)..(17): n is a, c, g, or u
angguuuaaunccnuunuc

SEQ ID NO: 56524 - RNA, 20 nt, Artificial Sequence
  Synthetic
  misc_feature (3)..(3): n is a, c, g, or u
  misc_feature (12)..(12): n is a, c, g, or u
  misc_feature (15)..(15): n is a, c, g, or u
  misc_feature (18)..(18): n is a, c, g, or u
uangguuuaaunccnuunuc

SEQ ID NO: 56525 - RNA, 21 nt, Artificial Sequence
  Synthetic
  misc_feature (4)..(4): n is a, c, g, or u
  misc_feature (13)..(13): n is a, c, g, or u
  misc_feature (16)..(16): n is a, c, g, or u
  misc_feature (19)..(19): n is a, c, g, or u
auangguuuaaunccnuunuc

SEQ ID NO: 56526 - RNA, 22 nt, Artificial Sequence
  Synthetic
  misc_feature (5)..(5): n is a, c, g, or u
  misc_feature (14)..(14): n is a, c, g, or u
  misc_feature (17)..(17): n is a, c, g, or u
  misc_feature (20)..(20): n is a, c, g, or u
aauangguuuaaunccnuunuc

SEQ ID NO: 56527 - RNA, 23 nt, Artificial Sequence
  Synthetic
  misc_feature (6)..(6): n is a, c, g, or u
  misc_feature (15)..(15): n is a, c, g, or u
  misc_feature (18)..(18): n is a, c, g, or u
  misc_feature (21)..(21): n is a, c, g, or u
uaauangguuuaaunccnuunuc

SEQ ID NO: 56528 - RNA, 24 nt, Artificial Sequence
  Synthetic
  misc_feature (7)..(7): n is a, c, g, or u
  misc_feature (16)..(16): n is a, c, g, or u
  misc_feature (19)..(19): n is a, c, g, or u
  misc_feature (22)..(22): n is a, c, g, or u
auaauangguuuaaunccnuunuc

SEQ ID NO: 56529 - RNA, 18 nt, Artificial Sequence
  Synthetic
  misc_feature (13)..(13): n is a, c, g, or u
caaaaaagagagnaauuc

SEQ ID NO: 56530 - RNA, 19 nt, Artificial Sequence
  Synthetic
  misc_feature (14)..(14): n is a, c, g, or u
gcaaaaaagagagnaauuc

SEQ ID NO: 56531 - RNA, 20 nt, Artificial Sequence
  Synthetic
  misc_feature (15)..(15): n is a, c, g, or u
ggcaaaaaagagagnaauuc

SEQ ID NO: 56532 - RNA, 21 nt, Artificial Sequence
  Synthetic
  misc_feature (16)..(16): n is a, c, g, or u
aggcaaaaaagagagnaauuc

SEQ ID NO: 56533 - RNA, 22 nt, Artificial Sequence
  Synthetic
  misc_feature (17)..(17): n is a, c, g, or u
aaggcaaaaaagagagnaauuc

SEQ ID NO: 56534 - RNA, 23 nt, Artificial Sequence
  Synthetic
  misc_feature (18)..(18): n is a, c, g, or u
gaaggcaaaaaagagagnaauuc

SEQ ID NO: 56535 - RNA, 24 nt, Artificial Sequence
  Synthetic
  misc_feature (19)..(19): n is a, c, g, or u
agaaggcaaaaaagagagnaauuc

SEQ ID NO: 56536 - RNA, 18 nt, Artificial Sequence
  Synthetic
  misc_feature (3)..(3): n is a, c, g, or u
ggnaaggagguguacuuc

SEQ ID NO: 56537 - RNA, 19 nt, Artificial Sequence
  Synthetic
  misc_feature (4)..(4): n is a, c, g, or u
uggnaaggagguguacuuc

SEQ ID NO: 56538 - RNA, 20 nt, Artificial Sequence
  Synthetic
  misc_feature (5)..(5): n is a, c, g, or u
auggnaaggagguguacuuc

SEQ ID NO: 56539 - RNA, 21 nt, Artificial Sequence
  Synthetic
  misc_feature (6)..(6): n is a, c, g, or u
cauggnaaggagguguacuuc

SEQ ID NO: 56540 - RNA, 22 nt, Artificial Sequence
  Synthetic
  misc_feature (7)..(7): n is a, c, g, or u
ccauggnaaggagguguacuuc

SEQ ID NO: 56541 - RNA, 23 nt, Artificial Sequence
  Synthetic
  misc_feature (8)..(8): n is a, c, g, or u
gccauggnaaggagguguacuuc

SEQ ID NO: 56542 - RNA, 24 nt, Artificial Sequence
  Synthetic
  misc_feature (9)..(9): n is a, c, g, or u
agccauggnaaggagguguacuuc

SEQ ID NO: 56543 - RNA, 18 nt, Artificial Sequence
  Synthetic
cuggagauugagaucuuc

SEQ ID NO: 56544 - RNA, 19 nt, Artificial Sequence
  Synthetic
gcuggagauugagaucuuc

SEQ ID NO: 56545 - RNA, 20 nt, Artificial Sequence
  Synthetic
agcuggagauugagaucuuc

SEQ ID NO: 56546 - RNA, 21 nt, Artificial Sequence
  Synthetic
aagcuggagauugagaucuuc

SEQ ID NO: 56547 - RNA, 22 nt, Artificial Sequence
  Synthetic
gaagcuggagauugagaucuuc

SEQ ID NO: 56548 - RNA, 23 nt, Artificial Sequence
  Synthetic
ggaagcuggagauugagaucuuc

SEQ ID NO: 56549 - RNA, 24 nt, Artificial Sequence
  Synthetic
gggaagcuggagauugagaucuuc

SEQ ID NO: 56550 - RNA, 18 nt, Artificial Sequence
  Synthetic
caagaacuguuucucuuc

SEQ ID NO: 56551 - RNA, 19 nt, Artificial Sequence
  Synthetic
ucaagaacuguuucucuuc

SEQ ID NO: 56552 - RNA, 20 nt, Artificial Sequence
  Synthetic
cucaagaacuguuucucuuc

SEQ ID NO: 56553 - RNA, 21 nt, Artificial Sequence
  Synthetic
acucaagaacuguuucucuuc

SEQ ID NO: 56554 - RNA, 22 nt, Artificial Sequence
  Synthetic
uacucaagaacuguuucucuuc

SEQ ID NO: 56555 - RNA, 23 nt, Artificial Sequence
  Synthetic
auacucaagaacuguuucucuuc

SEQ ID NO: 56556 - RNA, 24 nt, Artificial Sequence
  Synthetic
aauacucaagaacuguuucucuuc

SEQ ID NO: 56557 - RNA, 18 nt, Artificial Sequence
  Synthetic
gcagggcccccagucuuc

SEQ ID NO: 56558 - RNA, 19 nt, Artificial Sequence
  Synthetic
agcagggcccccagucuuc

SEQ ID NO: 56559 - RNA, 20 nt, Artificial Sequence
  Synthetic
uagcagggcccccagucuuc

SEQ ID NO: 56560 - RNA, 21 nt, Artificial Sequence
  Synthetic
  misc_feature (1)..(1): n is a, c, g, or u
nuagcagggcccccagucuuc

SEQ ID NO: 56561 - RNA, 22 nt, Artificial Sequence
  Synthetic
  misc_feature (2)..(2): n is a, c, g, or u
cnuagcagggcccccagucuuc

SEQ ID NO: 56562 - RNA, 23 nt, Artificial Sequence
  Synthetic
  misc_feature (3)..(3): n is a, c, g, or u
ucnuagcagggcccccagucuuc

SEQ ID NO: 56563 - RNA, 24 nt, Artificial Sequence
  Synthetic
  misc_feature (4)..(4): n is a, c, g, or u
uucnuagcagggcccccagucuuc

SEQ ID NO: 56564 - RNA, 18 nt, Artificial Sequence
  Synthetic
gcgagggaguucuucuuc

SEQ ID NO: 56565 - RNA, 19 nt, Artificial Sequence
  Synthetic
ggcgagggaguucuucuuc

SEQ ID NO: 56566 - RNA, 20 nt, Artificial Sequence
  Synthetic
aggcgagggaguucuucuuc

SEQ ID NO: 56567 - RNA, 21 nt, Artificial Sequence
  Synthetic
gaggcgagggaguucuucuuc

SEQ ID NO: 56568 - RNA, 22 nt, Artificial Sequence
  Synthetic
cgaggcgagggaguucuucuuc

SEQ ID NO: 56569 - RNA, 23 nt, Artificial Sequence
  Synthetic
gcgaggcgagggaguucuucuuc

SEQ ID NO: 56570 - RNA, 24 nt, Artificial Sequence
  Synthetic
ugcgaggcgagggaguucuucuuc

SEQ ID NO: 56571 - RNA, 18 nt, Artificial Sequence
  Synthetic
agggaaacauagagguuc

SEQ ID NO: 56572 - RNA, 19 nt, Artificial Sequence
  Synthetic
gagggaaacauagagguuc

SEQ ID NO: 56573 - RNA, 20 nt, Artificial Sequence
  Synthetic
  misc_feature (1)..(1): n is a, c, g, or u
ngagggaaacauagagguuc

SEQ ID NO: 56574 - RNA, 21 nt, Artificial Sequence
  Synthetic
  misc_feature (2)..(2): n is a, c, g, or u
angagggaaacauagagguuc

SEQ ID NO: 56575 - RNA, 22 nt, Artificial Sequence
  Synthetic
  misc_feature (3)..(3): n is a, c, g, or u
cangagggaaacauagagguuc

SEQ ID NO: 56576 - RNA, 23 nt, Artificial Sequence
  Synthetic
  misc_feature (1)..(1): n is a, c, g, or u
  misc_feature (4)..(4): n is a, c, g, or u
ncangagggaaacauagagguuc

SEQ ID NO: 56577 - RNA, 24 nt, Artificial Sequence
  Synthetic
  misc_feature (2)..(2): n is a, c, g, or u
  misc_feature (5)..(5): n is a, c, g, or u
ancangagggaaacauagagguuc

SEQ ID NO: 56578 - RNA, 18 nt, Artificial Sequence
  Synthetic
  misc_feature (5)..(5): n is a, c, g, or u
  misc_feature (9)..(9): n is a, c, g, or u
  misc_feature (12)..(12): n is a, c, g, or u
  misc_feature (15)..(15): n is a, c, g, or u
uauanaaunccngcnuuc

SEQ ID NO: 56579 - RNA, 19 nt, Artificial Sequence
  Synthetic
  misc_feature (6)..(6): n is a, c, g, or u
  misc_feature (10)..(10): n is a, c, g, or u
  misc_feature (13)..(13): n is a, c, g, or u
  misc_feature (16)..(16): n is a, c, g, or u
auauanaaunccngcnuuc

SEQ ID NO: 56580 - RNA, 20 nt, Artificial Sequence
  Synthetic
  misc_feature (7)..(7): n is a, c, g, or u
  misc_feature (11)..(11): n is a, c, g, or u
  misc_feature (14)..(14): n is a, c, g, or u
  misc_feature (17)..(17): n is a, c, g, or u
uauauanaaunccngcnuuc

SEQ ID NO: 56581 - RNA, 21 nt, Artificial Sequence
  Synthetic
  misc_feature (8)..(8): n is a, c, g, or u
  misc_feature (12)..(12): n is a, c, g, or u
  misc_feature (15)..(15): n is a, c, g, or u
  misc_feature (18)..(18): n is a, c, g, or u
uuauauanaaunccngcnuuc

SEQ ID NO: 56582 - RNA, 22 nt, Artificial Sequence
  Synthetic
  misc_feature (9)..(9): n is a, c, g, or u
  misc_feature (13)..(13): n is a, c, g, or u
  misc_feature (16)..(16): n is a, c, g, or u
  misc_feature (19)..(19): n is a, c, g, or u
cuuauauanaaunccngcnuuc

SEQ ID NO: 56583 - RNA, 23 nt, Artificial Sequence
  Synthetic
  misc_feature (10)..(10): n is a, c, g, or u
  misc_feature (14)..(14): n is a, c, g, or u
  misc_feature (17)..(17): n is a, c, g, or u
  misc_feature (20)..(20): n is a, c, g, or u
ucuuauauanaaunccngcnuuc

SEQ ID NO: 56584 - RNA, 24 nt, Artificial Sequence
  Synthetic
  misc_feature (11)..(11): n is a, c, g, or u
  misc_feature (15)..(15): n is a, c, g, or u
  misc_feature (18)..(18): n is a, c, g, or u
  misc_feature (21)..(21): n is a, c, g, or u
cucuuauauanaaunccngcnuuc

SEQ ID NO: 56585 - RNA, 18 nt, Artificial Sequence
  Synthetic
ucuaacaacaguaguuuc

SEQ ID NO: 56586 - RNA, 19 nt, Artificial Sequence
  Synthetic
gucuaacaacaguaguuuc

SEQ ID NO: 56587 - RNA, 20 nt, Artificial Sequence
  Synthetic
cgucuaacaacaguaguuuc

SEQ ID NO: 56588 - RNA, 21 nt, Artificial Sequence
  Synthetic
ucgucuaacaacaguaguuuc

SEQ ID NO: 56589 - RNA, 22 nt, Artificial Sequence
  Synthetic
gucgucuaacaacaguaguuuc

SEQ ID NO: 56590 - RNA, 23 nt, Artificial Sequence
  Synthetic
cgucgucuaacaacaguaguuuc

SEQ ID NO: 56591 - RNA, 24 nt, Artificial Sequence
  Synthetic
ucgucgucuaacaacaguaguuuc

SEQ ID NO: 56592 - RNA, 18 nt, Artificial Sequence
  Synthetic
acucccauagguauuuuc

SEQ ID NO: 56593 - RNA, 19 nt, Artificial Sequence
  Synthetic
cacucccauagguauuuuc

SEQ ID NO: 56594 - RNA, 20 nt, Artificial Sequence
  Synthetic
ccacucccauagguauuuuc

SEQ ID NO: 56595 - RNA, 21 nt, Artificial Sequence
  Synthetic
cccacucccauagguauuuuc

SEQ ID NO: 56596 - RNA, 22 nt, Artificial Sequence
  Synthetic
gcccacucccauagguauuuuc

SEQ ID NO: 56597 - RNA, 23 nt, Artificial Sequence
  Synthetic
ggcccacucccauagguauuuuc

SEQ ID NO: 56598 - RNA, 24 nt, Artificial Sequence
  Synthetic
aggcccacucccauagguauuuuc

SEQ ID NO: 56599 - RNA, 18 nt, Artificial Sequence
  Synthetic
cuguuucucuuccaaaag

SEQ ID NO: 56600 - RNA, 19 nt, Artificial Sequence
  Synthetic
acuguuucucuuccaaaag

SEQ ID NO: 56601 - RNA, 20 nt, Artificial Sequence
  Synthetic
aacuguuucucuuccaaaag

SEQ ID NO: 56602 - RNA, 21 nt, Artificial Sequence
  Synthetic
gaacuguuucucuuccaaaag

SEQ ID NO: 56603 - RNA, 22 nt, Artificial Sequence
  Synthetic
agaacuguuucucuuccaaaag

SEQ ID NO: 56604 - RNA, 23 nt, Artificial Sequence
  Synthetic
aagaacuguuucucuuccaaaag

SEQ ID NO: 56605 - RNA, 24 nt, Artificial Sequence
  Synthetic
caagaacuguuucucuuccaaaag

SEQ ID NO: 56606 - RNA, 18 nt, Artificial Sequence
  Synthetic
uuguaaguuggcgaaaag

SEQ ID NO: 56607 - RNA, 19 nt, Artificial Sequence
  Synthetic
cuuguaaguuggcgaaaag

SEQ ID NO: 56608 - RNA, 20 nt, Artificial Sequence
  Synthetic
ccuuguaaguuggcgaaaag

SEQ ID NO: 56609 - RNA, 21 nt, Artificial Sequence
  Synthetic
gccuuguaaguuggcgaaaag

SEQ ID NO: 56610 - RNA, 22 nt, Artificial Sequence
  Synthetic
ggccuuguaaguuggcgaaaag

SEQ ID NO: 56611 - RNA, 23 nt, Artificial Sequence
  Synthetic
aggccuuguaaguuggcgaaaag

SEQ ID NO: 56612 - RNA, 24 nt, Artificial Sequence
  Synthetic
aaggccuuguaaguuggcgaaaag

SEQ ID NO: 56613 - RNA, 18 nt, Artificial Sequence
  Synthetic
  misc_feature (8)..(8): n is a, c, g, or u
aaugaaunucaggaaaag

SEQ ID NO: 56614 - RNA, 19 nt, Artificial Sequence
  Synthetic
  misc_feature (9)..(9): n is a, c, g, or u
aaaugaaunucaggaaaag

SEQ ID NO: 56615 - RNA, 20 nt, Artificial Sequence
  Synthetic
  misc_feature (1)..(1): n is a, c, g, or u
  misc_feature (10)..(10): n is a, c, g, or u
naaaugaaunucaggaaaag

SEQ ID NO: 56616 - RNA, 21 nt, Artificial Sequence
  Synthetic
  misc_feature (2)..(2): n is a, c, g, or u
  misc_feature (11)..(11): n is a, c, g, or u
gnaaaugaaunucaggaaaag

SEQ ID NO: 56617 - RNA, 22 nt, Artificial Sequence
  Synthetic
  misc_feature (3)..(3): n is a, c, g, or u
  misc_feature (12)..(12): n is a, c, g, or u
ugnaaaugaaunucaggaaaag

SEQ ID NO: 56618 - RNA, 23 nt, Artificial Sequence
  Synthetic
  misc_feature (4)..(4): n is a, c, g, or u
  misc_feature (13)..(13): n is a, c, g, or u
augnaaaugaaunucaggaaaag

SEQ ID NO: 56619 - RNA, 24 nt, Artificial Sequence
  Synthetic
  misc_feature (5)..(5): n is a, c, g, or u
  misc_feature (14)..(14): n is a, c, g, or u
gaugnaaaugaaunucaggaaaag

SEQ ID NO: 56620 - RNA, 18 nt, Artificial Sequence
  Synthetic
cauccauauaacuaaaag

SEQ ID NO: 56621 - RNA, 19 nt, Artificial Sequence
  Synthetic
ucauccauauaacuaaaag

SEQ ID NO: 56622 - RNA, 20 nt, Artificial Sequence
  Synthetic
aucauccauauaacuaaaag

SEQ ID NO: 56623 - RNA, 21 nt, Artificial Sequence
  Synthetic
gaucauccauauaacuaaaag

SEQ ID NO: 56624 - RNA, 22 nt, Artificial Sequence
  Synthetic
agaucauccauauaacuaaaag

SEQ ID NO: 56625 - RNA, 23 nt, Artificial Sequence
  Synthetic
cagaucauccauauaacuaaaag

SEQ ID NO: 56626 - RNA, 24 nt, Artificial Sequence
  Synthetic
ccagaucauccauauaacuaaaag

SEQ ID NO: 56627 - RNA, 18 nt, Artificial Sequence
  Synthetic
  misc_feature (3)..(3): n is a, c, g, or u
  misc_feature (6)..(6): n is a, c, g, or u
  misc_feature (9)..(9): n is a, c, g, or u
  misc_feature (12)..(12): n is a, c, g, or u
gunaanggngcngcaaag

SEQ ID NO: 56628 - RNA, 19 nt, Artificial Sequence
  Synthetic
  misc_feature (1)..(1): n is a, c, g, or u
  misc_feature (4)..(4): n is a, c, g, or u
  misc_feature (7)..(7): n is a, c, g, or u
  misc_feature (10)..(10): n is a, c, g, or u
  misc_feature (13)..(13): n is a, c, g, or u
ngunaanggngcngcaaag

SEQ ID NO: 56629 - RNA, 20 nt, Artificial Sequence
  Synthetic
  misc_feature (2)..(2): n is a, c, g, or u
  misc_feature (5)..(5): n is a, c, g, or u
  misc_feature (8)..(8): n is a, c, g, or u
  misc_feature (11)..(11): n is a, c, g, or u
  misc_feature (14)..(14): n is a, c, g, or u
gngunaanggngcngcaaag

SEQ ID NO: 56630 - RNA, 21 nt, Artificial Sequence
  Synthetic
  misc_feature (3)..(3): n is a, c, g, or u
  misc_feature (6)..(6): n is a, c, g, or u
  misc_feature (9)..(9): n is a, c, g, or u
  misc_feature (12)..(12): n is a, c, g, or u
  misc_feature (15)..(15): n is a, c, g, or u
ugngunaanggngcngcaaag

SEQ ID NO: 56631 - RNA, 22 nt, Artificial Sequence
  Synthetic
  misc_feature (4)..(4): n is a, c, g, or u
  misc_feature (7)..(7): n is a, c, g, or u
  misc_feature (10)..(10): n is a, c, g, or u
  misc_feature (13)..(13): n is a, c, g, or u
  misc_feature (16)..(16): n is a, c, g, or u
uugngunaanggngcngcaaag

SEQ ID NO: 56632 - RNA, 23 nt, Artificial Sequence
  Synthetic
  misc_feature (5)..(5): n is a, c, g, or u
  misc_feature (8)..(8): n is a, c, g, or u
  misc_feature (11)..(11): n is a, c, g, or u
  misc_feature (14)..(14): n is a, c, g, or u
  misc_feature (17)..(17): n is a, c, g, or u
auugngunaanggngcngcaaag

SEQ ID NO: 56633 - RNA, 24 nt, Artificial Sequence
  Synthetic
  misc_feature (6)..(6): n is a, c, g, or u
  misc_feature (9)..(9): n is a, c, g, or u
  misc_feature (12)..(12): n is a, c, g, or u
  misc_feature (15)..(15): n is a, c, g, or u
  misc_feature (18)..(18): n is a, c, g, or u
cauugngunaanggngcngcaaag

SEQ ID NO: 56634 - RNA, 18 nt, Artificial Sequence
  Synthetic
  misc_feature (1)..(1): n is a, c, g, or u
  misc_feature (9)..(9): n is a, c, g, or u
nauugaccnuccugaaag

SEQ ID NO: 56635 - RNA, 19 nt, Artificial Sequence
  Synthetic
  misc_feature (2)..(2): n is a, c, g, or u
  misc_feature (10)..(10): n is a, c, g, or u
unauugaccnuccugaaag

SEQ ID NO: 56636 - RNA, 20 nt, Artificial Sequence
  Synthetic
  misc_feature (3)..(3): n is a, c, g, or u
  misc_feature (11)..(11): n is a, c, g, or u
gunauugaccnuccugaaag

SEQ ID NO: 56637 - RNA, 21 nt, Artificial Sequence
  Synthetic
  misc_feature (4)..(4): n is a, c, g, or u
  misc_feature (12)..(12): n is a, c, g, or u
ggunauugaccnuccugaaag

SEQ ID NO: 56638 - RNA, 22 nt, Artificial Sequence
  Synthetic
  misc_feature (5)..(5): n is a, c, g, or u
  misc_feature (13)..(13): n is a, c, g, or u
aggunauugaccnuccugaaag

SEQ ID NO: 56639 - RNA, 23 nt, Artificial Sequence
  Synthetic
  misc_feature (6)..(6): n is a, c, g, or u
  misc_feature (14)..(14): n is a, c, g, or u
caggunauugaccnuccugaaag

SEQ ID NO: 56640 - RNA, 24 nt, Artificial Sequence
  Synthetic
  misc_feature (7)..(7): n is a, c, g, or u
  misc_feature (15)..(15): n is a, c, g, or u
ccaggunauugaccnuccugaaag

SEQ ID NO: 56641 - RNA, 18 nt, Artificial Sequence
  Synthetic
  misc_feature (2)..(2): n is a, c, g, or u
ancgauagccaggacaag

SEQ ID NO: 56642 - RNA, 19 nt, Artificial Sequence
  Synthetic
  misc_feature (3)..(3): n is a, c, g, or u
cancgauagccaggacaag

SEQ ID NO: 56643 - RNA, 20 nt, Artificial Sequence
  Synthetic
  misc_feature (4)..(4): n is a, c, g, or u
ccancgauagccaggacaag

SEQ ID NO: 56644 - RNA, 21 nt, Artificial Sequence
  Synthetic
  misc_feature (5)..(5): n is a, c, g, or u
uccancgauagccaggacaag

SEQ ID NO: 56645 - RNA, 22 nt, Artificial Sequence
  Synthetic
  misc_feature (6)..(6): n is a, c, g, or u
auccancgauagccaggacaag

SEQ ID NO: 56646 - RNA, 23 nt, Artificial Sequence
  Synthetic
  misc_feature (7)..(7): n is a, c, g, or u
cauccancgauagccaggacaag

SEQ ID NO: 56647 - RNA, 24 nt, Artificial Sequence
  Synthetic
  misc_feature (8)..(8): n is a, c, g, or u
acauccancgauagccaggacaag

SEQ ID NO: 56648 - RNA, 18 nt, Artificial Sequence
  Synthetic
agaagaaccaacaagaag

SEQ ID NO: 56649 - RNA, 19 nt, Artificial Sequence
  Synthetic
cagaagaaccaacaagaag

SEQ ID NO: 56650 - RNA, 20 nt, Artificial Sequence
  Synthetic
ccagaagaaccaacaagaag

SEQ ID NO: 56651 - RNA, 21 nt, Artificial Sequence
  Synthetic
uccagaagaaccaacaagaag

SEQ ID NO: 56652 - RNA, 22 nt, Artificial Sequence
  Synthetic
guccagaagaaccaacaagaag

SEQ ID NO: 56653 - RNA, 23 nt, Artificial Sequence
  Synthetic
aguccagaagaaccaacaagaag

SEQ ID NO: 56654 - RNA, 24 nt, Artificial Sequence
  Synthetic
uaguccagaagaaccaacaagaag

SEQ ID NO: 56655 - RNA, 18 nt, Artificial Sequence
  Synthetic
  misc_feature (11)..(11): n is a, c, g, or u
acgggaagaanucagaag

SEQ ID NO: 56656 - RNA, 19 nt, Artificial Sequence
  Synthetic
  misc_feature (12)..(12): n is a, c, g, or u
gacgggaagaanucagaag

SEQ ID NO: 56657 - RNA, 20 nt, Artificial Sequence
  Synthetic
  misc_feature (1)..(1): n is a, c, g, or u
  misc_feature (13)..(13): n is a, c, g, or u
ngacgggaagaanucagaag

SEQ ID NO: 56658 - RNA, 21 nt, Artificial Sequence
  Synthetic
  misc_feature (2)..(2): n is a, c, g, or u
  misc_feature (14)..(14): n is a, c, g, or u
cngacgggaagaanucagaag

SEQ ID NO: 56659 - RNA, 22 nt, Artificial Sequence
  Synthetic
  misc_feature (3)..(3): n is a, c, g, or u
  misc_feature (15)..(15): n is a, c, g, or u
acngacgggaagaanucagaag

SEQ ID NO: 56660 - RNA, 23 nt, Artificial Sequence
  Synthetic
  misc_feature (4)..(4): n is a, c, g, or u
  misc_feature (16)..(16): n is a, c, g, or u
aacngacgggaagaanucagaag

SEQ ID NO: 56661 - RNA, 24 nt, Artificial Sequence
  Synthetic
  misc_feature (5)..(5): n is a, c, g, or u
  misc_feature (17)..(17): n is a, c, g, or u
gaacngacgggaagaanucagaag

SEQ ID NO: 56662 - RNA, 18 nt, Artificial Sequence
  Synthetic
uauugcccacccaggaag

SEQ ID NO: 56663 - RNA, 19 nt, Artificial Sequence
  Synthetic
uuauugcccacccaggaag

SEQ ID NO: 56664 - RNA, 20 nt, Artificial Sequence
  Synthetic
  misc_feature (1)..(1): n is a, c, g, or u
nuuauugcccacccaggaag

SEQ ID NO: 56665 - RNA, 21 nt, Artificial Sequence
  Synthetic
  misc_feature (2)..(2): n is a, c, g, or u
anuuauugcccacccaggaag

SEQ ID NO: 56666 - RNA, 22 nt, Artificial Sequence
  Synthetic
  misc_feature (3)..(3): n is a, c, g, or u
aanuuauugcccacccaggaag

SEQ ID NO: 56667 - RNA, 23 nt, Artificial Sequence
  Synthetic
  misc_feature (4)..(4): n is a, c, g, or u
caanuuauugcccacccaggaag

SEQ ID NO: 56668 - RNA, 24 nt, Artificial Sequence
  Synthetic
  misc_feature (5)..(5): n is a, c, g, or u
ccaanuuauugcccacccaggaag

SEQ ID NO: 56669 - RNA, 18 nt, Artificial Sequence
  Synthetic
aacaguaguuuccggaag

SEQ ID NO: 56670 - RNA, 19 nt, Artificial Sequence
  Synthetic
caacaguaguuuccggaag

SEQ ID NO: 56671 - RNA, 20 nt, Artificial Sequence
  Synthetic
acaacaguaguuuccggaag

SEQ ID NO: 56672 - RNA, 21 nt, Artificial Sequence
  Synthetic
aacaacaguaguuuccggaag

SEQ ID NO: 56673 - RNA, 22 nt, Artificial Sequence
  Synthetic
uaacaacaguaguuuccggaag

SEQ ID NO: 56674 - RNA, 23 nt, Artificial Sequence
  Synthetic
cuaacaacaguaguuuccggaag

SEQ ID NO: 56675 - RNA, 24 nt, Artificial Sequence
  Synthetic
ucuaacaacaguaguuuccggaag

SEQ ID NO: 56676 - RNA, 18 nt, Artificial Sequence
  Synthetic
aauacuaacauugggaag

SEQ ID NO: 56677 - RNA, 19 nt, Artificial Sequence
  Synthetic
gaauacuaacauugggaag

SEQ ID NO: 56678 - RNA, 20 nt, Artificial Sequence
  Synthetic
ggaauacuaacauugggaag

SEQ ID NO: 56679 - RNA, 21 nt, Artificial Sequence
  Synthetic
aggaauacuaacauugggaag

SEQ ID NO: 56680 - RNA, 22 nt, Artificial Sequence
  Synthetic
aaggaauacuaacauugggaag

SEQ ID NO: 56681 - RNA, 23 nt, Artificial Sequence
  Synthetic
caaggaauacuaacauugggaag

SEQ ID NO: 56682 - RNA, 24 nt, Artificial Sequence
  Synthetic
ccaaggaauacuaacauugggaag

SEQ ID NO: 56683 - RNA, 18 nt, Artificial Sequence
  Synthetic
accgccgauugguggaag

SEQ ID NO: 56684 - RNA, 19 nt, Artificial Sequence
  Synthetic
gaccgccgauugguggaag

SEQ ID NO: 56685 - RNA, 20 nt, Artificial Sequence
  Synthetic
ggaccgccgauugguggaag

SEQ ID NO: 56686 - RNA, 18 nt, Artificial Sequence
  Synthetic
cauagcagcaggaugaag

SEQ ID NO: 56687 - RNA, 19 nt, Artificial Sequence
  Synthetic
gcauagcagcaggaugaag

SEQ ID NO: 56688 - RNA, 20 nt, Artificial Sequence
  Synthetic
ggcauagcagcaggaugaag

SEQ ID NO: 56689 - RNA, 21 nt, Artificial Sequence
  Synthetic
aggcauagcagcaggaugaag

SEQ ID NO: 56690 - RNA, 22 nt, Artificial Sequence
  Synthetic
gaggcauagcagcaggaugaag

SEQ ID NO: 56691 - RNA, 23 nt, Artificial Sequence
  Synthetic
ugaggcauagcagcaggaugaag

SEQ ID NO: 56692 - RNA, 24 nt, Artificial Sequence
  Synthetic
augaggcauagcagcaggaugaag

SEQ ID NO: 56693 - RNA, 18 nt, Artificial Sequence
  Synthetic
cauuugguggucuauaag

SEQ ID NO: 56694 - RNA, 19 nt, Artificial Sequence
  Synthetic
gcauuugguggucuauaag

SEQ ID NO: 56695 - RNA, 20 nt, Artificial Sequence
  Synthetic
ggcauuugguggucuauaag

SEQ ID NO: 56696 - RNA, 21 nt, Artificial Sequence
  Synthetic
gggcauuugguggucuauaag

SEQ ID NO: 56697 - RNA, 22 nt, Artificial Sequence
  Synthetic
ggggcauuugguggucuauaag

SEQ ID NO: 56698 - RNA, 23 nt, Artificial Sequence
  Synthetic
aggggcauuugguggucuauaag

SEQ ID NO: 56699 - RNA, 24 nt, Artificial Sequence
  Synthetic
uaggggcauuugguggucuauaag

SEQ ID NO: 56700 - RNA, 18 nt, Artificial Sequence
  Synthetic
uucucuuccaaaaguaag

SEQ ID NO: 56701 - RNA, 19 nt, Artificial Sequence
  Synthetic
uuucucuuccaaaaguaag

SEQ ID NO: 56702 - RNA, 20 nt, Artificial Sequence
  Synthetic
guuucucuuccaaaaguaag

SEQ ID NO: 56703 - RNA, 21 nt, Artificial Sequence
  Synthetic
uguuucucuuccaaaaguaag

SEQ ID NO: 56704 - RNA, 22 nt, Artificial Sequence
  Synthetic
cuguuucucuuccaaaaguaag

SEQ ID NO: 56705 - RNA, 23 nt, Artificial Sequence
  Synthetic
acuguuucucuuccaaaaguaag

SEQ ID NO: 56706 - RNA, 24 nt, Artificial Sequence
  Synthetic
aacuguuucucuuccaaaaguaag

SEQ ID NO: 56707 - RNA, 18 nt, Artificial Sequence
  Synthetic
gcagaugagaaggaacag

SEQ ID NO: 56708 - RNA, 19 nt, Artificial Sequence
  Synthetic
ggcagaugagaaggaacag

SEQ ID NO: 56709 - RNA, 20 nt, Artificial Sequence
  Synthetic
cggcagaugagaaggaacag

SEQ ID NO: 56710 - RNA, 21 nt, Artificial Sequence
  Synthetic
ccggcagaugagaaggaacag

SEQ ID NO: 56711 - RNA, 22 nt, Artificial Sequence
  Synthetic
  misc_feature (1)..(1): n is a, c, g, or u
nccggcagaugagaaggaacag

SEQ ID NO: 56712 - RNA, 23 nt, Artificial Sequence
  Synthetic
  misc_feature (2)..(2): n is a, c, g, or u
gnccggcagaugagaaggaacag

SEQ ID NO: 56713 - RNA, 24 nt, Artificial Sequence
  Synthetic
  misc_feature (3)..(3): n is a, c, g, or u
ggnccggcagaugagaaggaacag

SEQ ID NO: 56714 - RNA, 18 nt, Artificial Sequence
  Synthetic
gcuuggaggcuugaacag

SEQ ID NO: 56715 - RNA, 19 nt, Artificial Sequence
  Synthetic
agcuuggaggcuugaacag

SEQ ID NO: 56716 - RNA, 20 nt, Artificial Sequence
  Synthetic
cagcuuggaggcuugaacag

SEQ ID NO: 56717 - RNA, 21 nt, Artificial Sequence
  Synthetic
acagcuuggaggcuugaacag

SEQ ID NO: 56718 - RNA, 22 nt, Artificial Sequence
  Synthetic
cacagcuuggaggcuugaacag

SEQ ID NO: 56719 - RNA, 23 nt, Artificial Sequence
  Synthetic
gcacagcuuggaggcuugaacag

SEQ ID NO: 56720 - RNA, 24 nt, Artificial Sequence
  Synthetic
ggcacagcuuggaggcuugaacag

SEQ ID NO: 56721 - RNA, 18 nt, Artificial Sequence
  Synthetic
aagccacccaaggcacag

SEQ ID NO: 56722 - RNA, 19 nt, Artificial Sequence
  Synthetic
aaagccacccaaggcacag

SEQ ID NO: 56723 - RNA, 20 nt, Artificial Sequence
  Synthetic
caaagccacccaaggcacag

SEQ ID NO: 56724 - RNA, 21 nt, Artificial Sequence
  Synthetic
ccaaagccacccaaggcacag

SEQ ID NO: 56725 - RNA, 22 nt, Artificial Sequence
  Synthetic
cccaaagccacccaaggcacag

SEQ ID NO: 56726 - RNA, 23 nt, Artificial Sequence
  Synthetic
ccccaaagccacccaaggcacag

SEQ ID NO: 56727 - RNA, 24 nt, Artificial Sequence
  Synthetic
gccccaaagccacccaaggcacag

SEQ ID NO: 56728 - RNA, 18 nt, Artificial Sequence
  Synthetic
uaacuaaaagccagacag

SEQ ID NO: 56729 - RNA, 19 nt, Artificial Sequence
  Synthetic
auaacuaaaagccagacag

SEQ ID NO: 56730 - RNA, 20 nt, Artificial Sequence
  Synthetic
uauaacuaaaagccagacag

SEQ ID NO: 56731 - RNA, 21 nt, Artificial Sequence
  Synthetic
auauaacuaaaagccagacag

SEQ ID NO: 56732 - RNA, 22 nt, Artificial Sequence
  Synthetic
cauauaacuaaaagccagacag

SEQ ID NO: 56733 - RNA, 23 nt, Artificial Sequence
  Synthetic
ccauauaacuaaaagccagacag

SEQ ID NO: 56734 - RNA, 24 nt, Artificial Sequence
  Synthetic
uccauauaacuaaaagccagacag

SEQ ID NO: 56735 - RNA, 18 nt, Artificial Sequence
  Synthetic
uggccaagccccaaccag

SEQ ID NO: 56736 - RNA, 19 nt, Artificial Sequence
  Synthetic
auggccaagccccaaccag

SEQ ID NO: 56737 - RNA, 20 nt, Artificial Sequence
  Synthetic
aauggccaagccccaaccag

SEQ ID NO: 56738 - RNA, 21 nt, Artificial Sequence
  Synthetic
caauggccaagccccaaccag

SEQ ID NO: 56739 - RNA, 22 nt, Artificial Sequence
  Synthetic
ccaauggccaagccccaaccag

SEQ ID NO: 56740 - RNA, 23 nt, Artificial Sequence
  Synthetic
gccaauggccaagccccaaccag

SEQ ID NO: 56741 - RNA, 24 nt, Artificial Sequence
  Synthetic
ggccaauggccaagccccaaccag

SEQ ID NO: 56742 - RNA, 18 nt, Artificial Sequence
  Synthetic
aaagaaggaguuaaccag

SEQ ID NO: 56743 - RNA, 19 nt, Artificial Sequence
  Synthetic
aaaagaaggaguuaaccag

SEQ ID NO: 56744 - RNA, 20 nt, Artificial Sequence
  Synthetic
gaaaagaaggaguuaaccag

SEQ ID NO: 56745 - RNA, 21 nt, Artificial Sequence
  Synthetic
ggaaaagaaggaguuaaccag

SEQ ID NO: 56746 - RNA, 22 nt, Artificial Sequence
  Synthetic
aggaaaagaaggaguuaaccag

SEQ ID NO: 56747 - RNA, 23 nt, Artificial Sequence
  Synthetic
caggaaaagaaggaguuaaccag

SEQ ID NO: 56748 - RNA, 24 nt, Artificial Sequence
  Synthetic
ucaggaaaagaaggaguuaaccag

SEQ ID NO: 56749 - RNA, 18 nt, Artificial Sequence
  Synthetic
cugaacuggagccaccag

SEQ ID NO: 56750 - RNA, 19 nt, Artificial Sequence
  Synthetic
  misc_feature (1)..(1): n is a, c, g, or u
ncugaacuggagccaccag

SEQ ID NO: 56751 - RNA, 20 nt, Artificial Sequence
  Synthetic
  misc_feature (2)..(2): n is a, c, g, or u
cncugaacuggagccaccag

SEQ ID NO: 56752 - RNA, 21 nt, Artificial Sequence
  Synthetic
  misc_feature (3)..(3): n is a, c, g, or u
ucncugaacuggagccaccag

SEQ ID NO: 56753 - RNA, 22 nt, Artificial Sequence
  Synthetic
  misc_feature (4)..(4): n is a, c, g, or u
gucncugaacuggagccaccag

SEQ ID NO: 56754 - RNA, 23 nt, Artificial Sequence
  Synthetic
  misc_feature (5)..(5): n is a, c, g, or u
ugucncugaacuggagccaccag

SEQ ID NO: 56755 - RNA, 24 nt, Artificial Sequence
  Synthetic
  misc_feature (6)..(6): n is a, c, g, or u
gugucncugaacuggagccaccag

SEQ ID NO: 56756 - RNA, 18 nt, Artificial Sequence
  Synthetic
acuaguaaacugagccag

SEQ ID NO: 56757 - RNA, 19 nt, Artificial Sequence
  Synthetic
cacuaguaaacugagccag

SEQ ID NO: 56758 - RNA, 20 nt, Artificial Sequence
  Synthetic
gcacuaguaaacugagccag

SEQ ID NO: 56759 - RNA, 21 nt, Artificial Sequence
  Synthetic
ugcacuaguaaacugagccag

SEQ ID NO: 56760 - RNA, 22 nt, Artificial Sequence
  Synthetic
uugcacuaguaaacugagccag

SEQ ID NO: 56761 - RNA, 23 nt, Artificial Sequence
  Synthetic
auugcacuaguaaacugagccag

SEQ ID NO: 56762 - RNA, 24 nt, Artificial Sequence
  Synthetic
aauugcacuaguaaacugagccag

SEQ ID NO: 56763 - RNA, 18 nt, Artificial Sequence
  Synthetic
  misc_feature (8)..(8): n is a, c, g, or u
acauccancgauagccag

SEQ ID NO: 56764 - RNA, 19 nt, Artificial Sequence
  Synthetic
  misc_feature (9)..(9): n is a, c, g, or u
cacauccancgauagccag

SEQ ID NO: 56765 - RNA, 20 nt, Artificial Sequence
  Synthetic
  misc_feature (10)..(10): n is a, c, g, or u
acacauccancgauagccag

SEQ ID NO: 56766 - RNA, 21 nt, Artificial Sequence
  Synthetic
  misc_feature (11)..(11): n is a, c, g, or u
gacacauccancgauagccag

SEQ ID NO: 56767 - RNA, 22 nt, Artificial Sequence
  Synthetic
  misc_feature (12)..(12): n is a, c, g, or u
agacacauccancgauagccag

SEQ ID NO: 56768 - RNA, 23 nt, Artificial Sequence
  Synthetic
  misc_feature (13)..(13): n is a, c, g, or u
cagacacauccancgauagccag

SEQ ID NO: 56769 - RNA, 24 nt, Artificial Sequence
  Synthetic
  misc_feature (14)..(14): n is a, c, g, or u
gcagacacauccancgauagccag

SEQ ID NO: 56770 - RNA, 18 nt, Artificial Sequence
  Synthetic
  misc_feature (7)..(8): n is a, c, g, or u
cgaugannuucgcuccag

SEQ ID NO: 56771 - RNA, 19 nt, Artificial Sequence
  Synthetic
  misc_feature (8)..(9): n is a, c, g, or u
ccgaugannuucgcuccag

SEQ ID NO: 56772 - RNA, 20 nt, Artificial Sequence
  Synthetic
  misc_feature (9)..(10): n is a, c, g, or u
gccgaugannuucgcuccag

SEQ ID NO: 56773 - RNA, 21 nt, Artificial Sequence
  Synthetic
  misc_feature (10)..(11): n is a, c, g, or u
ugccgaugannuucgcuccag

SEQ ID NO: 56774 - RNA, 22 nt, Artificial Sequence
  Synthetic
  misc_feature (11)..(12): n is a, c, g, or u
gugccgaugannuucgcuccag

SEQ ID NO: 56775 - RNA, 23 nt, Artificial Sequence
  Synthetic
  misc_feature (1)..(1): n is a, c, g, or u
  misc_feature (12)..(13): n is a, c, g, or u
ngugccgaugannuucgcuccag

SEQ ID NO: 56776 - RNA, 24 nt, Artificial Sequence
  Synthetic
  misc_feature (2)..(2): n is a, c, g, or u
  misc_feature (13)..(14): n is a, c, g, or u
cngugccgaugannuucgcuccag

SEQ ID NO: 56777 - RNA, 18 nt, Artificial Sequence
  Synthetic
cauaccuugauaguccag

SEQ ID NO: 56778 - RNA, 19 nt, Artificial Sequence
  Synthetic
acauaccuugauaguccag

SEQ ID NO: 56779 - RNA, 20 nt, Artificial Sequence
  Synthetic
aacauaccuugauaguccag

SEQ ID NO: 56780 - RNA, 21 nt, Artificial Sequence
  Synthetic
caacauaccuugauaguccag

SEQ ID NO: 56781 - RNA, 22 nt, Artificial Sequence
  Synthetic
gcaacauaccuugauaguccag

SEQ ID NO: 56782 - RNA, 23 nt, Artificial Sequence
  Synthetic
ggcaacauaccuugauaguccag

SEQ ID NO: 56783 - RNA, 24 nt, Artificial Sequence
  Synthetic
gggcaacauaccuugauaguccag

SEQ ID NO: 56784 - RNA, 18 nt, Artificial Sequence
  Synthetic
gaugaggcauagcagcag

SEQ ID NO: 56785 - RNA, 19 nt, Artificial Sequence
  Synthetic
agaugaggcauagcagcag

SEQ ID NO: 56786 - RNA, 20 nt, Artificial Sequence
  Synthetic
aagaugaggcauagcagcag

SEQ ID NO: 56787 - RNA, 21 nt, Artificial Sequence
  Synthetic
gaagaugaggcauagcagcag

SEQ ID NO: 56788 - RNA, 22 nt, Artificial Sequence
  Synthetic
agaagaugaggcauagcagcag

SEQ ID NO: 56789 - RNA, 23 nt, Artificial Sequence
  Synthetic
aagaagaugaggcauagcagcag

SEQ ID NO: 56790 - RNA, 24 nt, Artificial Sequence
  Synthetic
caagaagaugaggcauagcagcag

SEQ ID NO: 56791 - RNA, 18 nt, Artificial Sequence
  Synthetic
acagaggcaugagagcag

SEQ ID NO: 56792 - RNA, 19 nt, Artificial Sequence
  Synthetic
uacagaggcaugagagcag

SEQ ID NO: 56793 - RNA, 20 nt, Artificial Sequence
  Synthetic
auacagaggcaugagagcag

SEQ ID NO: 56794 - RNA, 21 nt, Artificial Sequence
  Synthetic
  misc_feature (1)..(1): n is a, c, g, or u
nauacagaggcaugagagcag

SEQ ID NO: 56795 - RNA, 22 nt, Artificial Sequence
  Synthetic
  misc_feature (2)..(2): n is a, c, g, or u
gnauacagaggcaugagagcag

SEQ ID NO: 56796 - RNA, 23 nt, Artificial Sequence
  Synthetic
  misc_feature (3)..(3): n is a, c, g, or u
ggnauacagaggcaugagagcag

SEQ ID NO: 56797 - RNA, 24 nt, Artificial Sequence
  Synthetic
  misc_feature (4)..(4): n is a, c, g, or u
aggnauacagaggcaugagagcag

SEQ ID NO: 56798 - RNA, 18 nt, Artificial Sequence
  Synthetic
cugcaaggaguuccgcag

SEQ ID NO: 56799 - RNA, 19 nt, Artificial Sequence
  Synthetic
gcugcaaggaguuccgcag

SEQ ID NO: 56800 - RNA, 20 nt, Artificial Sequence
  Synthetic
agcugcaaggaguuccgcag

SEQ ID NO: 56801 - RNA, 21 nt, Artificial Sequence
  Synthetic
aagcugcaaggaguuccgcag

SEQ ID NO: 56802 - RNA, 22 nt, Artificial Sequence
  Synthetic
caagcugcaaggaguuccgcag

SEQ ID NO: 56803 - RNA, 23 nt, Artificial Sequence
  Synthetic
acaagcugcaaggaguuccgcag

SEQ ID NO: 56804 - RNA, 24 nt, Artificial Sequence
  Synthetic
aacaagcugcaaggaguuccgcag

SEQ ID NO: 56805 - RNA, 18 nt, Artificial Sequence
  Synthetic
  misc_feature (11)..(11): n is a, c, g, or u
gugcacacggnccggcag

SEQ ID NO: 56806 - RNA, 19 nt, Artificial Sequence
  Synthetic
  misc_feature (12)..(12): n is a, c, g, or u
agugcacacggnccggcag

SEQ ID NO: 56807 - RNA, 20 nt, Artificial Sequence
  Synthetic
  misc_feature (13)..(13): n is a, c, g, or u
aagugcacacggnccggcag

SEQ ID NO: 56808 - RNA, 21 nt, Artificial Sequence
  Synthetic
  misc_feature (14)..(14): n is a, c, g, or u
gaagugcacacggnccggcag

SEQ ID NO: 56809 - RNA, 22 nt, Artificial Sequence
  Synthetic
  misc_feature (15)..(15): n is a, c, g, or u
cgaagugcacacggnccggcag

SEQ ID NO: 56810 - RNA, 23 nt, Artificial Sequence
  Synthetic
  misc_feature (16)..(16): n is a, c, g, or u
gcgaagugcacacggnccggcag

SEQ ID NO: 56811 - RNA, 24 nt, Artificial Sequence
  Synthetic
  misc_feature (17)..(17): n is a, c, g, or u
agcgaagugcacacggnccggcag

SEQ ID NO: 56812 - RNA, 18 nt, Artificial Sequence
  Synthetic
cgcaguauggaucggcag

SEQ ID NO: 56813 - RNA, 19 nt, Artificial Sequence
  Synthetic
ccgcaguauggaucggcag

SEQ ID NO: 56814 - RNA, 20 nt, Artificial Sequence
  Synthetic
uccgcaguauggaucggcag

SEQ ID NO: 56815 - RNA, 21 nt, Artificial Sequence
  Synthetic
uuccgcaguauggaucggcag

SEQ ID NO: 56816 - RNA, 22 nt, Artificial Sequence
  Synthetic
guuccgcaguauggaucggcag

SEQ ID NO: 56817 - RNA, 23 nt, Artificial Sequence
  Synthetic
aguuccgcaguauggaucggcag

SEQ ID NO: 56818 - RNA, 24 nt, Artificial Sequence
  Synthetic
gaguuccgcaguauggaucggcag

SEQ ID NO: 56819 - RNA, 18 nt, Artificial Sequence
  Synthetic
  misc_feature (5)..(5): n is a, c, g, or u
  misc_feature (14)..(14): n is a, c, g, or u
gaugnaaaugaaunucag

SEQ ID NO: 56820 - RNA, 19 nt, Artificial Sequence
  Synthetic
  misc_feature (6)..(6): n is a, c, g, or u
  misc_feature (15)..(15): n is a, c, g, or u
ugaugnaaaugaaunucag

SEQ ID NO: 56821 - RNA, 20 nt, Artificial Sequence
  Synthetic
  misc_feature (7)..(7): n is a, c, g, or u
  misc_feature (16)..(16): n is a, c, g, or u
uugaugnaaaugaaunucag

SEQ ID NO: 56822 - RNA, 21 nt, Artificial Sequence
  Synthetic
  misc_feature (8)..(8): n is a, c, g, or u
  misc_feature (17)..(17): n is a, c, g, or u
cuugaugnaaaugaaunucag

SEQ ID NO: 56823 - RNA, 22 nt, Artificial Sequence
  Synthetic
  misc_feature (9)..(9): n is a, c, g, or u
  misc_feature (18)..(18): n is a, c, g, or u
ucuugaugnaaaugaaunucag

SEQ ID NO: 56824 - RNA, 23 nt, Artificial Sequence
  Synthetic
  misc_feature (1)..(1): n is a, c, g, or u
  misc_feature (10)..(10): n is a, c, g, or u
  misc_feature (19)..(19): n is a, c, g, or u
nucuugaugnaaaugaaunucag

SEQ ID NO: 56825 - RNA, 24 nt, Artificial Sequence
  Synthetic
  misc_feature (1)..(2): n is a, c, g, or u
  misc_feature (11)..(11): n is a, c, g, or u
  misc_feature (20)..(20): n is a, c, g, or u
nnucuugaugnaaaugaaunucag

SEQ ID NO: 56826 - RNA, 18 nt, Artificial Sequence
  Synthetic
aaagaugauuaggcagag

SEQ ID NO: 56827 - RNA, 19 nt, Artificial Sequence
  Synthetic
aaaagaugauuaggcagag

SEQ ID NO: 56828 - RNA, 20 nt, Artificial Sequence
  Synthetic
caaaagaugauuaggcagag

SEQ ID NO: 56829 - RNA, 21 nt, Artificial Sequence
  Synthetic
acaaaagaugauuaggcagag

SEQ ID NO: 56830 - RNA, 22 nt, Artificial Sequence
  Synthetic
aacaaaagaugauuaggcagag

SEQ ID NO: 56831 - RNA, 23 nt, Artificial Sequence
  Synthetic
gaacaaaagaugauuaggcagag

SEQ ID NO: 56832 - RNA, 24 nt, Artificial Sequence
  Synthetic
ugaacaaaagaugauuaggcagag

SEQ ID NO: 56833 - RNA, 18 nt, Artificial Sequence
  Synthetic
uccaugcgacgugcagag

SEQ ID NO: 56834 - RNA, 19 nt, Artificial Sequence
  Synthetic
cuccaugcgacgugcagag

SEQ ID NO: 56835 - RNA, 20 nt, Artificial Sequence
  Synthetic
ucuccaugcgacgugcagag

SEQ ID NO: 56836 - RNA, 21 nt, Artificial Sequence
  Synthetic
gucuccaugcgacgugcagag

SEQ ID NO: 56837 - RNA, 22 nt, Artificial Sequence
  Synthetic
ggucuccaugcgacgugcagag

SEQ ID NO: 56838 - RNA, 23 nt, Artificial Sequence
  Synthetic
uggucuccaugcgacgugcagag

SEQ ID NO: 56839 - RNA, 24 nt, Artificial Sequence
  Synthetic
guggucuccaugcgacgugcagag

SEQ ID NO: 56840 - RNA, 18 nt, Artificial Sequence
  Synthetic
gguguacuuccuagagag

SEQ ID NO: 56841 - RNA, 19 nt, Artificial Sequence
  Synthetic
agguguacuuccuagagag

SEQ ID NO: 56842 - RNA, 20 nt, Artificial Sequence
  Synthetic
gagguguacuuccuagagag

SEQ ID NO: 56843 - RNA, 21 nt, Artificial Sequence
  Synthetic
ggagguguacuuccuagagag

SEQ ID NO: 56844 - RNA, 22 nt, Artificial Sequence
  Synthetic
aggagguguacuuccuagagag

SEQ ID NO: 56845 - RNA, 23 nt, Artificial Sequence
  Synthetic
aaggagguguacuuccuagagag

SEQ ID NO: 56846 - RNA, 24 nt, Artificial Sequence
  Synthetic
  misc_feature (1)..(1): n is a, c, g, or u
naaggagguguacuuccuagagag

SEQ ID NO: 56847 - RNA, 18 nt, Artificial Sequence
  Synthetic
ucucuuagagguggagag

SEQ ID NO: 56848 - RNA, 19 nt, Artificial Sequence
  Synthetic
gucucuuagagguggagag

SEQ ID NO: 56849 - RNA, 20 nt, Artificial Sequence
  Synthetic
ugucucuuagagguggagag

SEQ ID NO: 56850 - RNA, 21 nt, Artificial Sequence
  Synthetic
gugucucuuagagguggagag

SEQ ID NO: 56851 - RNA, 22 nt, Artificial Sequence
  Synthetic
  misc_feature (1)..(1): n is a, c, g, or u
ngugucucuuagagguggagag

SEQ ID NO: 56852 - RNA, 23 nt, Artificial Sequence
  Synthetic
  misc_feature (2)..(2): n is a, c, g, or u
gngugucucuuagagguggagag

SEQ ID NO: 56853 - RNA, 24 nt, Artificial Sequence
  Synthetic
  misc_feature (3)..(3): n is a, c, g, or u
ugngugucucuuagagguggagag

SEQ ID NO: 56854 - RNA, 18 nt, Artificial Sequence
  Synthetic
  misc_feature (2)..(2): n is a, c, g, or u
  misc_feature (13)..(13): n is a, c, g, or u
ungauccuggaanuagag

SEQ ID NO: 56855 - RNA, 19 nt, Artificial Sequence
  Synthetic
  misc_feature (3)..(3): n is a, c, g, or u
  misc_feature (14)..(14): n is a, c, g, or u
gungauccuggaanuagag

SEQ ID NO: 56856 - RNA, 20 nt, Artificial Sequence
  Synthetic
  misc_feature (4)..(4): n is a, c, g, or u
  misc_feature (15)..(15): n is a, c, g, or u
cgungauccuggaanuagag

SEQ ID NO: 56857 - RNA, 21 nt, Artificial Sequence
  Synthetic
  misc_feature (5)..(5): n is a, c, g, or u
  misc_feature (16)..(16): n is a, c, g, or u
ucgungauccuggaanuagag

SEQ ID NO: 56858 - RNA, 22 nt, Artificial Sequence
  Synthetic
  misc_feature (6)..(6): n is a, c, g, or u
  misc_feature (17)..(17): n is a, c, g, or u
gucgungauccuggaanuagag

SEQ ID NO: 56859 - RNA, 23 nt, Artificial Sequence
  Synthetic
  misc_feature (7)..(7): n is a, c, g, or u
  misc_feature (18)..(18): n is a, c, g, or u
ggucgungauccuggaanuagag

SEQ ID NO: 56860 - RNA, 24 nt, Artificial Sequence
  Synthetic
  misc_feature (8)..(8): n is a, c, g, or u
  misc_feature (19)..(19): n is a, c, g, or u
uggucgungauccuggaanuagag

SEQ ID NO: 56861 - RNA, 18 nt, Artificial Sequence
  Synthetic
  misc_feature (5)..(5): n is a, c, g, or u
gaugngugucucuuagag

SEQ ID NO: 56862 - RNA, 19 nt, Artificial Sequence
  Synthetic
  misc_feature (6)..(6): n is a, c, g, or u
ggaugngugucucuuagag

SEQ ID NO: 56863 - RNA, 20 nt, Artificial Sequence
  Synthetic
  misc_feature (7)..(7): n is a, c, g, or u
uggaugngugucucuuagag

SEQ ID NO: 56864 - RNA, 21 nt, Artificial Sequence
  Synthetic
  misc_feature (8)..(8): n is a, c, g, or u
guggaugngugucucuuagag

SEQ ID NO: 56865 - RNA, 22 nt, Artificial Sequence
  Synthetic
  misc_feature (9)..(9): n is a, c, g, or u
uguggaugngugucucuuagag

SEQ ID NO: 56866 - RNA, 23 nt, Artificial Sequence
  Synthetic
  misc_feature (10)..(10): n is a, c, g, or u
cuguggaugngugucucuuagag

SEQ ID NO: 56867 - RNA, 24 nt, Artificial Sequence
  Synthetic
  misc_feature (11)..(11): n is a, c, g, or u
ccuguggaugngugucucuuagag

SEQ ID NO: 56868 - RNA, 18 nt, Artificial Sequence
  Synthetic
caccgccuguaacacgag

SEQ ID NO: 56869 - RNA, 19 nt, Artificial Sequence
  Synthetic
acaccgccuguaacacgag

SEQ ID NO: 56870 - RNA, 20 nt, Artificial Sequence
  Synthetic
cacaccgccuguaacacgag

SEQ ID NO: 56871 - RNA, 21 nt, Artificial Sequence
  Synthetic
acacaccgccuguaacacgag

SEQ ID NO: 56872 - RNA, 22 nt, Artificial Sequence
  Synthetic
aacacaccgccuguaacacgag

SEQ ID NO: 56873 - RNA, 23 nt, Artificial Sequence
  Synthetic
aaacacaccgccuguaacacgag

SEQ ID NO: 56874 - RNA, 24 nt, Artificial Sequence
  Synthetic
gaaacacaccgccuguaacacgag

SEQ ID NO: 56875 - RNA, 18 nt, Artificial Sequence
  Synthetic
agagaaguccaccacgag

SEQ ID NO: 56876 - RNA, 19 nt, Artificial Sequence
  Synthetic
gagagaaguccaccacgag

SEQ ID NO: 56877 - RNA, 20 nt, Artificial Sequence
  Synthetic
ugagagaaguccaccacgag

SEQ ID NO: 56878 - RNA, 21 nt, Artificial Sequence
  Synthetic
uugagagaaguccaccacgag

SEQ ID NO: 56879 - RNA, 22 nt, Artificial Sequence
  Synthetic
auugagagaaguccaccacgag

SEQ ID NO: 56880 - RNA, 23 nt, Artificial Sequence
  Synthetic
aauugagagaaguccaccacgag

SEQ ID NO: 56881 - RNA, 24 nt, Artificial Sequence
  Synthetic
aaauugagagaaguccaccacgag

SEQ ID NO: 56882 - RNA, 18 nt, Artificial Sequence
  Synthetic
cuccagaccggcugcgag

SEQ ID NO: 56883 - RNA, 19 nt, Artificial Sequence
  Synthetic
gcuccagaccggcugcgag

SEQ ID NO: 56884 - RNA, 20 nt, Artificial Sequence
  Synthetic
cgcuccagaccggcugcgag

SEQ ID NO: 56885 - RNA, 21 nt, Artificial Sequence
  Synthetic
ucgcuccagaccggcugcgag

SEQ ID NO: 56886 - RNA, 22 nt, Artificial Sequence
  Synthetic
uucgcuccagaccggcugcgag

SEQ ID NO: 56887 - RNA, 23 nt, Artificial Sequence
  Synthetic
  misc_feature (1)..(1): n is a, c, g, or u
nuucgcuccagaccggcugcgag

SEQ ID NO: 56888 - RNA, 24 nt, Artificial Sequence
  Synthetic
  misc_feature (1)..(2): n is a, c, g, or u
nnuucgcuccagaccggcugcgag

SEQ ID NO: 56889 - RNA, 18 nt, Artificial Sequence
  Synthetic
  misc_feature (5)..(5): n is a, c, g, or u
gagancuucgucugcgag

SEQ ID NO: 56890 - RNA, 19 nt, Artificial Sequence
  Synthetic
  misc_feature (6)..(6): n is a, c, g, or u
ugagancuucgucugcgag

SEQ ID NO: 56891 - RNA, 20 nt, Artificial Sequence
  Synthetic
  misc_feature (7)..(7): n is a, c, g, or u
uugagancuucgucugcgag

SEQ ID NO: 56892 - RNA, 21 nt, Artificial Sequence
  Synthetic
  misc_feature (8)..(8): n is a, c, g, or u
auugagancuucgucugcgag

SEQ ID NO: 56893 - RNA, 22 nt, Artificial Sequence
  Synthetic
  misc_feature (9)..(9): n is a, c, g, or u
gauugagancuucgucugcgag

SEQ ID NO: 56894 - RNA, 23 nt, Artificial Sequence
  Synthetic
  misc_feature (10)..(10): n is a, c, g, or u
cgauugagancuucgucugcgag

SEQ ID NO: 56895 - RNA, 24 nt, Artificial Sequence
  Synthetic
  misc_feature (11)..(11): n is a, c, g, or u
gcgauugagancuucgucugcgag

SEQ ID NO: 56896 - RNA, 18 nt, Artificial Sequence
  Synthetic
  misc_feature (11)..(11): n is a, c, g, or u
gucuauaagcnggaggag

SEQ ID NO: 56897 - RNA, 19 nt, Artificial Sequence
  Synthetic
  misc_feature (12)..(12): n is a, c, g, or u
ggucuauaagcnggaggag

SEQ ID NO: 56898 - RNA, 20 nt, Artificial Sequence
  Synthetic
  misc_feature (13)..(13): n is a, c, g, or u
uggucuauaagcnggaggag

SEQ ID NO: 56899 - RNA, 21 nt, Artificial Sequence
  Synthetic
  misc_feature (14)..(14): n is a, c, g, or u
guggucuauaagcnggaggag

SEQ ID NO: 56900 - RNA, 22 nt, Artificial Sequence
  Synthetic
  misc_feature (15)..(15): n is a, c, g, or u
gguggucuauaagcnggaggag

SEQ ID NO: 56901 - RNA, 23 nt, Artificial Sequence
  Synthetic
  misc_feature (16)..(16): n is a, c, g, or u
ugguggucuauaagcnggaggag

SEQ ID NO: 56902 - RNA, 24 nt, Artificial Sequence
  Synthetic
  misc_feature (17)..(17): n is a, c, g, or u
uugguggucuauaagcnggaggag

SEQ ID NO: 56903 - RNA, 18 nt, Artificial Sequence
  Synthetic
aacauugggaagcuggag

SEQ ID NO: 56904 - RNA, 19 nt, Artificial Sequence
  Synthetic
uaacauugggaagcuggag

SEQ ID NO: 56905 - RNA, 20 nt, Artificial Sequence
  Synthetic
cuaacauugggaagcuggag

SEQ ID NO: 56906 - RNA, 21 nt, Artificial Sequence
  Synthetic
acuaacauugggaagcuggag

SEQ ID NO: 56907 - RNA, 22 nt, Artificial Sequence
  Synthetic
uacuaacauugggaagcuggag

SEQ ID NO: 56908 - RNA, 23 nt, Artificial Sequence
  Synthetic
auacuaacauugggaagcuggag

SEQ ID NO: 56909 - RNA, 24 nt, Artificial Sequence
  Synthetic
aauacuaacauugggaagcuggag

SEQ ID NO: 56910 - RNA, 18 nt, Artificial Sequence
  Synthetic
guugguaagugauuggag

SEQ ID NO: 56911 - RNA, 19 nt, Artificial Sequence
  Synthetic
gguugguaagugauuggag

SEQ ID NO: 56912 - RNA, 20 nt, Artificial Sequence
  Synthetic
agguugguaagugauuggag

SEQ ID NO: 56913 - RNA, 21 nt, Artificial Sequence
  Synthetic
gagguugguaagugauuggag

SEQ ID NO: 56914 - RNA, 22 nt, Artificial Sequence
  Synthetic
ggagguugguaagugauuggag

SEQ ID NO: 56915 - RNA, 23 nt, Artificial Sequence
  Synthetic
aggagguugguaagugauuggag

SEQ ID NO: 56916 - RNA, 24 nt, Artificial Sequence
  Synthetic
caggagguugguaagugauuggag

SEQ ID NO: 56917 - RNA, 18 nt, Artificial Sequence
  Synthetic
agccaggacaaguuggag

SEQ ID NO: 56918 - RNA, 19 nt, Artificial Sequence
  Synthetic
uagccaggacaaguuggag

SEQ ID NO: 56919 - RNA, 20 nt, Artificial Sequence
  Synthetic
auagccaggacaaguuggag

SEQ ID NO: 56920 - RNA, 21 nt, Artificial Sequence
  Synthetic
gauagccaggacaaguuggag

SEQ ID NO: 56921 - RNA, 22 nt, Artificial Sequence
  Synthetic
cgauagccaggacaaguuggag

SEQ ID NO: 56922 - RNA, 23 nt, Artificial Sequence
  Synthetic
  misc_feature (1)..(1): n is a, c, g, or u
ncgauagccaggacaaguuggag

SEQ ID NO: 56923 - RNA, 24 nt, Artificial Sequence
  Synthetic
  misc_feature (2)..(2): n is a, c, g, or u
ancgauagccaggacaaguuggag

SEQ ID NO: 56924 - RNA, 18 nt, Artificial Sequence
  Synthetic
  misc_feature (12)..(12): n is a, c, g, or u
  misc_feature (15)..(15): n is a, c, g, or u
uuggaacagcancangag

SEQ ID NO: 56925 - RNA, 19 nt, Artificial Sequence
  Synthetic
  misc_feature (13)..(13): n is a, c, g, or u
  misc_feature (16)..(16): n is a, c, g, or u
uuuggaacagcancangag

SEQ ID NO: 56926 - RNA, 20 nt, Artificial Sequence
  Synthetic
  misc_feature (14)..(14): n is a, c, g, or u
  misc_feature (17)..(17): n is a, c, g, or u
guuuggaacagcancangag
